United States Patent Application Publication US 2015/0141320 A1 - sequence listing, part 44

SEQ ID NO: 1716167 - DNA, 15 bp, Homo sapiens
ttttaccttattgtt

SEQ ID NO: 1716168 - DNA, 15 bp, Homo sapiens
tttaccttattgttt

SEQ ID NO: 1716169 - DNA, 15 bp, Homo sapiens
ttaccttattgtttc

SEQ ID NO: 1716170 - DNA, 15 bp, Homo sapiens
taccttattgtttct

SEQ ID NO: 1716171 - DNA, 15 bp, Homo sapiens
accttattgtttctc

SEQ ID NO: 1716172 - DNA, 15 bp, Homo sapiens
ccttattgtttctca

SEQ ID NO: 1716173 - DNA, 15 bp, Homo sapiens
cttattgtttctcag

SEQ ID NO: 1716174 - DNA, 15 bp, Homo sapiens
ttattgtttctcaga

SEQ ID NO: 1716175 - DNA, 15 bp, Homo sapiens
tattgtttctcagat

SEQ ID NO: 1716176 - DNA, 15 bp, Homo sapiens
attgtttctcagatg

SEQ ID NO: 1716177 - DNA, 15 bp, Homo sapiens
ttgtttctcagatga

SEQ ID NO: 1716178 - DNA, 15 bp, Homo sapiens
tgtttctcagatgac

SEQ ID NO: 1716179 - DNA, 15 bp, Homo sapiens
gtttctcagatgacc

SEQ ID NO: 1716180 - DNA, 15 bp, Homo sapiens
tttctcagatgacca

SEQ ID NO: 1716181 - DNA, 15 bp, Homo sapiens
ttctcagatgaccaa

SEQ ID NO: 1716182 - DNA, 15 bp, Homo sapiens
tctcagatgaccaag

SEQ ID NO: 1716183 - DNA, 15 bp, Homo sapiens
ctcagatgaccaagg

SEQ ID NO: 1716184 - DNA, 15 bp, Homo sapiens
tcagatgaccaaggg

SEQ ID NO: 1716185 - DNA, 15 bp, Homo sapiens
cagatgaccaagggg

SEQ ID NO: 1716186 - DNA, 15 bp, Homo sapiens
agatgaccaaggggt

SEQ ID NO: 1716187 - DNA, 15 bp, Homo sapiens
gatgaccaaggggtt

SEQ ID NO: 1716188 - DNA, 15 bp, Homo sapiens
atgaccaaggggttg

SEQ ID NO: 1716189 - DNA, 15 bp, Homo sapiens
tgaccaaggggttgg

SEQ ID NO: 1716190 - DNA, 15 bp, Homo sapiens
gaccaaggggttggc

SEQ ID NO: 1716191 - DNA, 15 bp, Homo sapiens
accaaggggttggct

SEQ ID NO: 1716192 - DNA, 15 bp, Homo sapiens
ccaaggggttggctt

SEQ ID NO: 1716193 - DNA, 15 bp, Homo sapiens
caaggggttggctta

SEQ ID NO: 1716194 - DNA, 15 bp, Homo sapiens
aaggggttggcttaa

SEQ ID NO: 1716195 - DNA, 15 bp, Homo sapiens
aggggttggcttaat

SEQ ID NO: 1716196 - DNA, 15 bp, Homo sapiens
ggggttggcttaatt

SEQ ID NO: 1716197 - DNA, 15 bp, Homo sapiens
gggttggcttaattt

SEQ ID NO: 1716198 - DNA, 15 bp, Homo sapiens
ggttggcttaatttg

SEQ ID NO: 1716199 - DNA, 15 bp, Homo sapiens
gttggcttaatttgt

SEQ ID NO: 1716200 - DNA, 15 bp, Homo sapiens
ttggcttaatttgtt

SEQ ID NO: 1716201 - DNA, 15 bp, Homo sapiens
tggcttaatttgttc

SEQ ID NO: 1716202 - DNA, 15 bp, Homo sapiens
ggcttaatttgttct

SEQ ID NO: 1716203 - DNA, 15 bp, Homo sapiens
gcttaatttgttctg

SEQ ID NO: 1716204 - DNA, 15 bp, Homo sapiens
cttaatttgttctgt

SEQ ID NO: 1716205 - DNA, 15 bp, Homo sapiens
ttaatttgttctgtt

SEQ ID NO: 1716206 - DNA, 15 bp, Homo sapiens
taatttgttctgttt

SEQ ID NO: 1716207 - DNA, 15 bp, Homo sapiens
aatttgttctgttta

SEQ ID NO: 1716208 - DNA, 15 bp, Homo sapiens
atttgttctgtttaa

SEQ ID NO: 1716209 - DNA, 15 bp, Homo sapiens
tttgttctgtttaaa

SEQ ID NO: 1716210 - DNA, 15 bp, Homo sapiens
ttgttctgtttaaac

SEQ ID NO: 1716211 - DNA, 15 bp, Homo sapiens
tgttctgtttaaact

SEQ ID NO: 1716212 - DNA, 15 bp, Homo sapiens
gttctgtttaaactt

SEQ ID NO: 1716213 - DNA, 15 bp, Homo sapiens
ttctgtttaaactta

SEQ ID NO: 1716214 - DNA, 15 bp, Homo sapiens
tctgtttaaacttat

SEQ ID NO: 1716215 - DNA, 15 bp, Homo sapiens
ctgtttaaacttatt

SEQ ID NO: 1716216 - DNA, 15 bp, Homo sapiens
tgtttaaacttattg

SEQ ID NO: 1716217 - DNA, 15 bp, Homo sapiens
gtttaaacttattgc

SEQ ID NO: 1716218 - DNA, 15 bp, Homo sapiens
tttaaacttattgca

SEQ ID NO: 1716219 - DNA, 15 bp, Homo sapiens
ttaaacttattgcaa

SEQ ID NO: 1716220 - DNA, 15 bp, Homo sapiens
taaacttattgcaag

SEQ ID NO: 1716221 - DNA, 15 bp, Homo sapiens
aaacttattgcaagt

SEQ ID NO: 1716222 - DNA, 15 bp, Homo sapiens
aacttattgcaagtc

SEQ ID NO: 1716223 - DNA, 15 bp, Homo sapiens
acttattgcaagtcc

SEQ ID NO: 1716224 - DNA, 15 bp, Homo sapiens
cttattgcaagtcct

SEQ ID NO: 1716225 - DNA, 15 bp, Homo sapiens
ttattgcaagtcctt

SEQ ID NO: 1716226 - DNA, 15 bp, Homo sapiens
tattgcaagtccttc

SEQ ID NO: 1716227 - DNA, 15 bp, Homo sapiens
attgcaagtccttct

SEQ ID NO: 1716228 - DNA, 15 bp, Homo sapiens
ttgcaagtccttctg

SEQ ID NO: 1716229 - DNA, 15 bp, Homo sapiens
tgcaagtccttctgt

SEQ ID NO: 1716230 - DNA, 15 bp, Homo sapiens
gcaagtccttctgta

SEQ ID NO: 1716231 - DNA, 15 bp, Homo sapiens
caagtccttctgtaa

SEQ ID NO: 1716232 - DNA, 15 bp, Homo sapiens
aagtccttctgtaat

SEQ ID NO: 1716233 - DNA, 15 bp, Homo sapiens
agtccttctgtaatt

SEQ ID NO: 1716234 - DNA, 15 bp, Homo sapiens
gtccttctgtaattt

SEQ ID NO: 1716235 - DNA, 15 bp, Homo sapiens
tccttctgtaatttc

SEQ ID NO: 1716236 - DNA, 15 bp, Homo sapiens
ccttctgtaatttcc

SEQ ID NO: 1716237 - DNA, 15 bp, Homo sapiens
cttctgtaatttcct

SEQ ID NO: 1716238 - DNA, 15 bp, Homo sapiens
ttctgtaatttccta

SEQ ID NO: 1716239 - DNA, 15 bp, Homo sapiens
tctgtaatttcctaa

SEQ ID NO: 1716240 - DNA, 15 bp, Homo sapiens
ctgtaatttcctaat

SEQ ID NO: 1716241 - DNA, 15 bp, Homo sapiens
tgtaatttcctaatg

SEQ ID NO: 1716242 - DNA, 15 bp, Homo sapiens
gtaatttcctaatgt

SEQ ID NO: 1716243 - DNA, 15 bp, Homo sapiens
taatttcctaatgtt

SEQ ID NO: 1716244 - DNA, 15 bp, Homo sapiens
aatttcctaatgttt

SEQ ID NO: 1716245 - DNA, 15 bp, Homo sapiens
atttcctaatgtttt

SEQ ID NO: 1716246 - DNA, 15 bp, Homo sapiens
tttcctaatgttttc

SEQ ID NO: 1716247 - DNA, 15 bp, Homo sapiens
ttcctaatgttttca

SEQ ID NO: 1716248 - DNA, 15 bp, Homo sapiens
tcctaatgttttcat

SEQ ID NO: 1716249 - DNA, 15 bp, Homo sapiens
cctaatgttttcata

SEQ ID NO: 1716250 - DNA, 15 bp, Homo sapiens
ctaatgttttcataa

SEQ ID NO: 1716251 - DNA, 15 bp, Homo sapiens
taatgttttcataat

SEQ ID NO: 1716252 - DNA, 15 bp, Homo sapiens
aatgttttcataatg

SEQ ID NO: 1716253 - DNA, 15 bp, Homo sapiens
atgttttcataatgt

SEQ ID NO: 1716254 - DNA, 15 bp, Homo sapiens
tgttttcataatgtg

SEQ ID NO: 1716255 - DNA, 15 bp, Homo sapiens
gttttcataatgtgt

SEQ ID NO: 1716256 - DNA, 15 bp, Homo sapiens
ttttcataatgtgtg

SEQ ID NO: 1716257 - DNA, 15 bp, Homo sapiens
tttcataatgtgtgt

SEQ ID NO: 1716258 - DNA, 15 bp, Homo sapiens
ttcataatgtgtgtt

SEQ ID NO: 1716259 - DNA, 15 bp, Homo sapiens
tcataatgtgtgttg

SEQ ID NO: 1716260 - DNA, 15 bp, Homo sapiens
cataatgtgtgttgt

SEQ ID NO: 1716261 - DNA, 15 bp, Homo sapiens
ataatgtgtgttgtg

SEQ ID NO: 1716262 - DNA, 15 bp, Homo sapiens
taatgtgtgttgtga

SEQ ID NO: 1716263 - DNA, 15 bp, Homo sapiens
aatgtgtgttgtgac

SEQ ID NO: 1716264 - DNA, 15 bp, Homo sapiens
atgtgtgttgtgacc

SEQ ID NO: 1716265 - DNA, 15 bp, Homo sapiens
tgtgtgttgtgacca

SEQ ID NO: 1716266 - DNA, 15 bp, Homo sapiens
gtgtgttgtgaccag

SEQ ID NO: 1716267 - DNA, 15 bp, Homo sapiens
tgtgttgtgaccaga

SEQ ID NO: 1716268 - DNA, 15 bp, Homo sapiens
gtgttgtgaccagac

SEQ ID NO: 1716269 - DNA, 15 bp, Homo sapiens
tgttgtgaccagact

SEQ ID NO: 1716270 - DNA, 15 bp, Homo sapiens
gttgtgaccagactc

SEQ ID NO: 1716271 - DNA, 15 bp, Homo sapiens
ttgtgaccagactct

SEQ ID NO: 1716272 - DNA, 15 bp, Homo sapiens
tgtgaccagactctc

SEQ ID NO: 1716273 - DNA, 15 bp, Homo sapiens
gtgaccagactctcc

SEQ ID NO: 1716274 - DNA, 15 bp, Homo sapiens
tgaccagactctcct

SEQ ID NO: 1716275 - DNA, 15 bp, Homo sapiens
gaccagactctcctt

SEQ ID NO: 1716276 - DNA, 15 bp, Homo sapiens
accagactctcctta

SEQ ID NO: 1716277 - DNA, 15 bp, Homo sapiens
ccagactctccttat

SEQ ID NO: 1716278 - DNA, 15 bp, Homo sapiens
cagactctccttata

SEQ ID NO: 1716279 - DNA, 15 bp, Homo sapiens
agactctccttataa

SEQ ID NO: 1716280 - DNA, 15 bp, Homo sapiens
gactctccttataac

SEQ ID NO: 1716281 - DNA, 15 bp, Homo sapiens
actctccttataacc

SEQ ID NO: 1716282 - DNA, 15 bp, Homo sapiens
ctctccttataaccc

SEQ ID NO: 1716283 - DNA, 15 bp, Homo sapiens
tctccttataacccc

SEQ ID NO: 1716284 - DNA, 15 bp, Homo sapiens
ctccttataacccca

SEQ ID NO: 1716285 - DNA, 15 bp, Homo sapiens
tccttataaccccag

SEQ ID NO: 1716286 - DNA, 15 bp, Homo sapiens
ccttataaccccagt

SEQ ID NO: 1716287 - DNA, 15 bp, Homo sapiens
cttataaccccagtt

SEQ ID NO: 1716288 - DNA, 15 bp, Homo sapiens
ttataaccccagtta

SEQ ID NO: 1716289 - DNA, 15 bp, Homo sapiens
tataaccccagttaa

SEQ ID NO: 1716290 - DNA, 15 bp, Homo sapiens
ataaccccagttaat

SEQ ID NO: 1716291 - DNA, 15 bp, Homo sapiens
taaccccagttaata

SEQ ID NO: 1716292 - DNA, 15 bp, Homo sapiens
aaccccagttaataa

SEQ ID NO: 1716293 - DNA, 15 bp, Homo sapiens
accccagttaataaa

SEQ ID NO: 1716294 - DNA, 15 bp, Homo sapiens
ccccagttaataaaa

SEQ ID NO: 1716295 - DNA, 15 bp, Homo sapiens
cccagttaataaaag

SEQ ID NO: 1716296 - DNA, 15 bp, Homo sapiens
ccagttaataaaagt

SEQ ID NO: 1716297 - DNA, 15 bp, Homo sapiens
cagttaataaaagtt

SEQ ID NO: 1716298 - DNA, 15 bp, Homo sapiens
agttaataaaagtta

SEQ ID NO: 1716299 - DNA, 15 bp, Homo sapiens
gttaataaaagttaa

SEQ ID NO: 1716300 - DNA, 15 bp, Homo sapiens
ttaataaaagttaac

SEQ ID NO: 1716301 - DNA, 15 bp, Homo sapiens
taataaaagttaaca

SEQ ID NO: 1716302 - DNA, 15 bp, Homo sapiens
aataaaagttaacag

SEQ ID NO: 1716303 - DNA, 15 bp, Homo sapiens
ataaaagttaacagg

SEQ ID NO: 1716304 - DNA, 15 bp, Homo sapiens
taaaagttaacagga

SEQ ID NO: 1716305 - DNA, 15 bp, Homo sapiens
aaaagttaacaggaa

SEQ ID NO: 1716306 - DNA, 15 bp, Homo sapiens
aaagttaacaggaaa

SEQ ID NO: 1716307 - DNA, 15 bp, Homo sapiens
aagttaacaggaaaa

SEQ ID NO: 1716308 - DNA, 15 bp, Homo sapiens
agttaacaggaaaaa

SEQ ID NO: 1716309 - DNA, 15 bp, Homo sapiens
gttaacaggaaaaaa

SEQ ID NO: 1716310 - DNA, 15 bp, Homo sapiens
ttaacaggaaaaaaa

SEQ ID NO: 1716311 - DNA, 15 bp, Homo sapiens
taacaggaaaaaaaa

SEQ ID NO: 1716312 - DNA, 15 bp, Homo sapiens
aacaggaaaaaaaaa

SEQ ID NO: 1716313 - DNA, 15 bp, Homo sapiens
acaggaaaaaaaaaa

SEQ ID NO: 1716314 - DNA, 15 bp, Homo sapiens
caggaaaaaaaaaaa

SEQ ID NO: 1716315 - DNA, 15 bp, Homo sapiens
ggaaaaaaaaaaaat

SEQ ID NO: 1716316 - DNA, 15 bp, Homo sapiens
gaaaaaaaaaaaata

SEQ ID NO: 1716317 - DNA, 15 bp, Homo sapiens
aaaaaaaaaaataga

SEQ ID NO: 1716318 - DNA, 15 bp, Homo sapiens
aaaaaaaaaatagaa

SEQ ID NO: 1716319 - DNA, 15 bp, Homo sapiens
aaaaaaaaatagaag

SEQ ID NO: 1716320 - DNA, 15 bp, Homo sapiens
aaaaaaaatagaagg

SEQ ID NO: 1716321 - DNA, 15 bp, Homo sapiens
aaaaaaatagaagga

SEQ ID NO: 1716322 - DNA, 15 bp, Homo sapiens
aaaaaatagaaggat

SEQ ID NO: 1716323 - DNA, 15 bp, Homo sapiens
aaaaatagaaggatt

SEQ ID NO: 1716324 - DNA, 15 bp, Homo sapiens
aaaatagaaggattg

SEQ ID NO: 1716325 - DNA, 15 bp, Homo sapiens
aaatagaaggattgg

SEQ ID NO: 1716326 - DNA, 15 bp, Homo sapiens
aatagaaggattgga

SEQ ID NO: 1716327 - DNA, 15 bp, Homo sapiens
atagaaggattggaa

SEQ ID NO: 1716328 - DNA, 15 bp, Homo sapiens
tagaaggattggaag

SEQ ID NO: 1716329 - DNA, 15 bp, Homo sapiens
agaaggattggaaga

SEQ ID NO: 1716330 - DNA, 15 bp, Homo sapiens
gaaggattggaagat

SEQ ID NO: 1716331 - DNA, 15 bp, Homo sapiens
aaggattggaagata

SEQ ID NO: 1716332 - DNA, 15 bp, Homo sapiens
aggattggaagataa

SEQ ID NO: 1716333 - DNA, 15 bp, Homo sapiens
ggattggaagataaa

SEQ ID NO: 1716334 - DNA, 15 bp, Homo sapiens
gattggaagataaag

SEQ ID NO: 1716335 - DNA, 15 bp, Homo sapiens
attggaagataaagt

SEQ ID NO: 1716336 - DNA, 15 bp, Homo sapiens
ttggaagataaagtt

SEQ ID NO: 1716337 - DNA, 15 bp, Homo sapiens
tggaagataaagttg

SEQ ID NO: 1716338 - DNA, 15 bp, Homo sapiens
ggaagataaagttgg

SEQ ID NO: 1716339 - DNA, 15 bp, Homo sapiens
gaagataaagttggg

SEQ ID NO: 1716340 - DNA, 15 bp, Homo sapiens
aagataaagttgggg

SEQ ID NO: 1716341 - DNA, 15 bp, Homo sapiens
agataaagttgggga

SEQ ID NO: 1716342 - DNA, 15 bp, Homo sapiens
gataaagttggggaa

SEQ ID NO: 1716343 - DNA, 15 bp, Homo sapiens
ataaagttggggaaa

SEQ ID NO: 1716344 - DNA, 15 bp, Homo sapiens
taaagttggggaaat

SEQ ID NO: 1716345 - DNA, 15 bp, Homo sapiens
aaagttggggaaatt

SEQ ID NO: 1716346 - DNA, 15 bp, Homo sapiens
aagttggggaaattt

SEQ ID NO: 1716347 - DNA, 15 bp, Homo sapiens
agttggggaaatttc

SEQ ID NO: 1716348 - DNA, 15 bp, Homo sapiens
gttggggaaatttct

SEQ ID NO: 1716349 - DNA, 15 bp, Homo sapiens
ttggggaaatttctc

SEQ ID NO: 1716350 - DNA, 15 bp, Homo sapiens
tggggaaatttctct

SEQ ID NO: 1716351 - DNA, 15 bp, Homo sapiens
ggggaaatttctctg

SEQ ID NO: 1716352 - DNA, 15 bp, Homo sapiens
gggaaatttctctga

SEQ ID NO: 1716353 - DNA, 15 bp, Homo sapiens
ggaaatttctctgaa

SEQ ID NO: 1716354 - DNA, 15 bp, Homo sapiens
gaaatttctctgaaa

SEQ ID NO: 1716355 - DNA, 15 bp, Homo sapiens
aaatttctctgaaag

SEQ ID NO: 1716356 - DNA, 15 bp, Homo sapiens
aatttctctgaaagt

SEQ ID NO: 1716357 - DNA, 15 bp, Homo sapiens
atttctctgaaagta

SEQ ID NO: 1716358 - DNA, 15 bp, Homo sapiens
tttctctgaaagtaa

SEQ ID NO: 1716359 - DNA, 15 bp, Homo sapiens
ttctctgaaagtaaa

SEQ ID NO: 1716360 - DNA, 15 bp, Homo sapiens
tctctgaaagtaaaa

SEQ ID NO: 1716361 - DNA, 15 bp, Homo sapiens
ctctgaaagtaaaac

SEQ ID NO: 1716362 - DNA, 15 bp, Homo sapiens
tctgaaagtaaaaca

SEQ ID NO: 1716363 - DNA, 15 bp, Homo sapiens
ctgaaagtaaaacaa

SEQ ID NO: 1716364 - DNA, 15 bp, Homo sapiens
tgaaagtaaaacaaa

SEQ ID NO: 1716365 - DNA, 15 bp, Homo sapiens
gaaagtaaaacaaaa

SEQ ID NO: 1716366 - DNA, 15 bp, Homo sapiens
aaagtaaaacaaaaa

SEQ ID NO: 1716367 - DNA, 15 bp, Homo sapiens
aagtaaaacaaaaag

SEQ ID NO: 1716368 - DNA, 15 bp, Homo sapiens
agtaaaacaaaaaga

SEQ ID NO: 1716369 - DNA, 15 bp, Homo sapiens
gtaaaacaaaaagat

SEQ ID NO: 1716370 - DNA, 15 bp, Homo sapiens
taaaacaaaaagata

SEQ ID NO: 1716371 - DNA, 15 bp, Homo sapiens
aaaacaaaaagatag

SEQ ID NO: 1716372 - DNA, 15 bp, Homo sapiens
aaacaaaaagataga

SEQ ID NO: 1716373 - DNA, 15 bp, Homo sapiens
aacaaaaagatagag

SEQ ID NO: 1716374 - DNA, 15 bp, Homo sapiens
acaaaaagatagaga

SEQ ID NO: 1716375 - DNA, 15 bp, Homo sapiens
caaaaagatagagat

SEQ ID NO: 1716376 - DNA, 15 bp, Homo sapiens
aaaaagatagagatg

SEQ ID NO: 1716377 - DNA, 15 bp, Homo sapiens
aaaagatagagatga

SEQ ID NO: 1716378 - DNA, 15 bp, Homo sapiens
aaagatagagatgaa

SEQ ID NO: 1716379 - DNA, 15 bp, Homo sapiens
aagatagagatgaaa

SEQ ID NO: 1716380 - DNA, 15 bp, Homo sapiens
agatagagatgaaaa

SEQ ID NO: 1716381 - DNA, 15 bp, Homo sapiens
gatagagatgaaaag

SEQ ID NO: 1716382 - DNA, 15 bp, Homo sapiens
atagagatgaaaagt

SEQ ID NO: 1716383 - DNA, 15 bp, Homo sapiens
tagagatgaaaagta

SEQ ID NO: 1716384 - DNA, 15 bp, Homo sapiens
agagatgaaaagtag

SEQ ID NO: 1716385 - DNA, 15 bp, Homo sapiens
gagatgaaaagtagg

SEQ ID NO: 1716386 - DNA, 15 bp, Homo sapiens
agatgaaaagtagga

SEQ ID NO: 1716387 - DNA, 15 bp, Homo sapiens
gatgaaaagtaggaa

SEQ ID NO: 1716388 - DNA, 15 bp, Homo sapiens
atgaaaagtaggaaa

SEQ ID NO: 1716389 - DNA, 15 bp, Homo sapiens
tgaaaagtaggaaaa

SEQ ID NO: 1716390 - DNA, 15 bp, Homo sapiens
gaaaagtaggaaaaa

SEQ ID NO: 1716391 - DNA, 15 bp, Homo sapiens
aaaagtaggaaaaaa

SEQ ID NO: 1716392 - DNA, 15 bp, Homo sapiens
aaagtaggaaaaaat

SEQ ID NO: 1716393 - DNA, 15 bp, Homo sapiens
aagtaggaaaaaata

SEQ ID NO: 1716394 - DNA, 15 bp, Homo sapiens
agtaggaaaaaataa

SEQ ID NO: 1716395 - DNA, 15 bp, Homo sapiens
gtaggaaaaaataag

SEQ ID NO: 1716396 - DNA, 15 bp, Homo sapiens
taggaaaaaataaga

SEQ ID NO: 1716397 - DNA, 15 bp, Homo sapiens
aggaaaaaataagaa

SEQ ID NO: 1716398 - DNA, 15 bp, Homo sapiens
ggaaaaaataagaaa

SEQ ID NO: 1716399 - DNA, 15 bp, Homo sapiens
gaaaaaataagaaaa

SEQ ID NO: 1716400 - DNA, 15 bp, Homo sapiens
aaaaaataagaaaag

SEQ ID NO: 1716401 - DNA, 15 bp, Homo sapiens
aaaaataagaaaaga

SEQ ID NO: 1716402 - DNA, 15 bp, Homo sapiens
aaaataagaaaagaa

SEQ ID NO: 1716403 - DNA, 15 bp, Homo sapiens
aaataagaaaagaaa

SEQ ID NO: 1716404 - DNA, 15 bp, Homo sapiens
aataagaaaagaaaa

SEQ ID NO: 1716405 - DNA, 15 bp, Homo sapiens
ataagaaaagaaaaa

SEQ ID NO: 1716406 - DNA, 15 bp, Homo sapiens
taagaaaagaaaaaa

SEQ ID NO: 1716407 - DNA, 15 bp, Homo sapiens
aagaaaagaaaaaat

SEQ ID NO: 1716408 - DNA, 15 bp, Homo sapiens
agaaaagaaaaaatt

SEQ ID NO: 1716409 - DNA, 15 bp, Homo sapiens
gaaaagaaaaaattg

SEQ ID NO: 1716410 - DNA, 15 bp, Homo sapiens
aaaagaaaaaattga

SEQ ID NO: 1716411 - DNA, 15 bp, Homo sapiens
aaagaaaaaattgag

SEQ ID NO: 1716412 - DNA, 15 bp, Homo sapiens
aagaaaaaattgagg

SEQ ID NO: 1716413 - DNA, 15 bp, Homo sapiens
agaaaaaattgaggg

SEQ ID NO: 1716414 - DNA, 15 bp, Homo sapiens
gaaaaaattgagggt

SEQ ID NO: 1716415 - DNA, 15 bp, Homo sapiens
aaaaaattgagggta

SEQ ID NO: 1716416 - DNA, 15 bp, Homo sapiens
aaaaattgagggtaa

SEQ ID NO: 1716417 - DNA, 15 bp, Homo sapiens
aaaattgagggtaac

SEQ ID NO: 1716418 - DNA, 15 bp, Homo sapiens
aaattgagggtaaca

SEQ ID NO: 1716419 - DNA, 15 bp, Homo sapiens
aattgagggtaacaa

SEQ ID NO: 1716420 - DNA, 15 bp, Homo sapiens
attgagggtaacaat

SEQ ID NO: 1716421 - DNA, 15 bp, Homo sapiens
ttgagggtaacaatt

SEQ ID NO: 1716422 - DNA, 15 bp, Homo sapiens
tgagggtaacaattc

SEQ ID NO: 1716423 - DNA, 15 bp, Homo sapiens
gagggtaacaattca

SEQ ID NO: 1716424 - DNA, 15 bp, Homo sapiens
agggtaacaattcag

SEQ ID NO: 1716425 - DNA, 15 bp, Homo sapiens
gggtaacaattcagg

SEQ ID NO: 1716426 - DNA, 15 bp, Homo sapiens
ggtaacaattcaggt

SEQ ID NO: 1716427 - DNA, 15 bp, Homo sapiens
gtaacaattcaggtg

SEQ ID NO: 1716428 - DNA, 15 bp, Homo sapiens
taacaattcaggtgg

SEQ ID NO: 1716429 - DNA, 15 bp, Homo sapiens
aacaattcaggtggt

SEQ ID NO: 1716430 - DNA, 15 bp, Homo sapiens
acaattcaggtggtg

SEQ ID NO: 1716431 - DNA, 15 bp, Homo sapiens
caattcaggtggtgc

SEQ ID NO: 1716432 - DNA, 15 bp, Homo sapiens
aattcaggtggtgca

SEQ ID NO: 1716433 - DNA, 15 bp, Homo sapiens
attcaggtggtgcaa

SEQ ID NO: 1716434 - DNA, 15 bp, Homo sapiens
ttcaggtggtgcaat

SEQ ID NO: 1716435 - DNA, 15 bp, Homo sapiens
tcaggtggtgcaata

SEQ ID NO: 1716436 - DNA, 15 bp, Homo sapiens
caggtggtgcaataa

SEQ ID NO: 1716437 - DNA, 15 bp, Homo sapiens
aggtggtgcaataat

SEQ ID NO: 1716438 - DNA, 15 bp, Homo sapiens
ggtggtgcaataatt

SEQ ID NO: 1716439 - DNA, 15 bp, Homo sapiens
gtggtgcaataatta

SEQ ID NO: 1716440 - DNA, 15 bp, Homo sapiens
tggtgcaataattag

SEQ ID NO: 1716441 - DNA, 15 bp, Homo sapiens
ggtgcaataattagt

SEQ ID NO: 1716442 - DNA, 15 bp, Homo sapiens
gtgcaataattagtc

SEQ ID NO: 1716443 - DNA, 15 bp, Homo sapiens
tgcaataattagtca

SEQ ID NO: 1716444 - DNA, 15 bp, Homo sapiens
gcaataattagtcaa

SEQ ID NO: 1716445 - DNA, 15 bp, Homo sapiens
caataattagtcaat

SEQ ID NO: 1716446 - DNA, 15 bp, Homo sapiens
aataattagtcaata

SEQ ID NO: 1716447 - DNA, 15 bp, Homo sapiens
ataattagtcaatag

SEQ ID NO: 1716448 - DNA, 15 bp, Homo sapiens
taattagtcaatagt

SEQ ID NO: 1716449 - DNA, 15 bp, Homo sapiens
aattagtcaatagtc

SEQ ID NO: 1716450 - DNA, 15 bp, Homo sapiens
attagtcaatagtct

SEQ ID NO: 1716451 - DNA, 15 bp, Homo sapiens
ttagtcaatagtcta

SEQ ID NO: 1716452 - DNA, 15 bp, Homo sapiens
tagtcaatagtctag

SEQ ID NO: 1716453 - DNA, 15 bp, Homo sapiens
agtcaatagtctagt

SEQ ID NO: 1716454 - DNA, 15 bp, Homo sapiens
gtcaatagtctagtt

SEQ ID NO: 1716455 - DNA, 15 bp, Homo sapiens
tcaatagtctagttc

SEQ ID NO: 1716456 - DNA, 15 bp, Homo sapiens
caatagtctagttca

SEQ ID NO: 1716457 - DNA, 15 bp, Homo sapiens
aatagtctagttcaa

SEQ ID NO: 1716458 - DNA, 15 bp, Homo sapiens
atagtctagttcaag

SEQ ID NO: 1716459 - DNA, 15 bp, Homo sapiens
tagtctagttcaaga

SEQ ID NO: 1716460 - DNA, 15 bp, Homo sapiens
agtctagttcaagag

SEQ ID NO: 1716461 - DNA, 15 bp, Homo sapiens
gtctagttcaagaga

SEQ ID NO: 1716462 - DNA, 15 bp, Homo sapiens
tctagttcaagagag

SEQ ID NO: 1716463 - DNA, 15 bp, Homo sapiens
ctagttcaagagagt

SEQ ID NO: 1716464 - DNA, 15 bp, Homo sapiens
tagttcaagagagtt

SEQ ID NO: 1716465 - DNA, 15 bp, Homo sapiens
agttcaagagagttt

SEQ ID NO: 1716466 - DNA, 15 bp, Homo sapiens
gttcaagagagttta

SEQ ID NO: 1716467 - DNA, 15 bp, Homo sapiens
ttcaagagagtttat

SEQ ID NO: 1716468 - DNA, 15 bp, Homo sapiens
tcaagagagtttatt

SEQ ID NO: 1716469 - DNA, 15 bp, Homo sapiens
caagagagtttattt

SEQ ID NO: 1716470 - DNA, 15 bp, Homo sapiens
aagagagtttattta

SEQ ID NO: 1716471 - DNA, 15 bp, Homo sapiens
agagagtttatttaa

SEQ ID NO: 1716472 - DNA, 15 bp, Homo sapiens
gagagtttatttaaa

SEQ ID NO: 1716473 - DNA, 15 bp, Homo sapiens
agagtttatttaaaa

SEQ ID NO: 1716474 - DNA, 15 bp, Homo sapiens
gagtttatttaaaaa

SEQ ID NO: 1716475 - DNA, 15 bp, Homo sapiens
agtttatttaaaaaa

SEQ ID NO: 1716476 - DNA, 15 bp, Homo sapiens
gtttatttaaaaaaa

SEQ ID NO: 1716477 - DNA, 15 bp, Homo sapiens
tttatttaaaaaaat

SEQ ID NO: 1716478 - DNA, 15 bp, Homo sapiens
ttatttaaaaaaata

SEQ ID NO: 1716479 - DNA, 15 bp, Homo sapiens
tatttaaaaaaataa

SEQ ID NO: 1716480 - DNA, 15 bp, Homo sapiens
ttaaaaaaataaatt

SEQ ID NO: 1716481 - DNA, 15 bp, Homo sapiens
taaaaaaataaattt

SEQ ID NO: 1716482 - DNA, 15 bp, Homo sapiens
aaaaaaataaattta

SEQ ID NO: 1716483 - DNA, 15 bp, Homo sapiens
aaaaaataaatttag

SEQ ID NO: 1716484 - DNA, 15 bp, Homo sapiens
aaaaataaatttaga

SEQ ID NO: 1716485 - DNA, 15 bp, Homo sapiens
aaaataaatttagac

SEQ ID NO: 1716486 - DNA, 15 bp, Homo sapiens
aaataaatttagact

SEQ ID NO: 1716487 - DNA, 15 bp, Homo sapiens
aataaatttagacta

SEQ ID NO: 1716488 - DNA, 15 bp, Homo sapiens
ataaatttagactat

SEQ ID NO: 1716489 - DNA, 15 bp, Homo sapiens
taaatttagactatt

SEQ ID NO: 1716490 - DNA, 15 bp, Homo sapiens
aaatttagactattt

SEQ ID NO: 1716491 - DNA, 15 bp, Homo sapiens
aatttagactatttt

SEQ ID NO: 1716492 - DNA, 15 bp, Homo sapiens
atttagactatttta

SEQ ID NO: 1716493 - DNA, 15 bp, Homo sapiens
tttagactattttaa

SEQ ID NO: 1716494 - DNA, 15 bp, Homo sapiens
ttagactattttaaa

SEQ ID NO: 1716495 - DNA, 15 bp, Homo sapiens
tagactattttaaaa

SEQ ID NO: 1716496 - DNA, 15 bp, Homo sapiens
agactattttaaaaa

SEQ ID NO: 1716497 - DNA, 15 bp, Homo sapiens
gactattttaaaaaa

SEQ ID NO: 1716498 - DNA, 15 bp, Homo sapiens
tattttaaaaaatag

SEQ ID NO: 1716499 - DNA, 15 bp, Homo sapiens
attttaaaaaatagt

SEQ ID NO: 1716500 - DNA, 15 bp, Homo sapiens
ttttaaaaaatagtc

SEQ ID NO: 1716501 - DNA, 15 bp, Homo sapiens
tttaaaaaatagtct

SEQ ID NO: 1716502 - DNA, 15 bp, Homo sapiens
ttaaaaaatagtcta

SEQ ID NO: 1716503 - DNA, 15 bp, Homo sapiens
taaaaaatagtctaa

SEQ ID NO: 1716504 - DNA, 15 bp, Homo sapiens
aaaaaatagtctaag

SEQ ID NO: 1716505 - DNA, 15 bp, Homo sapiens
aaaaatagtctaaga

SEQ ID NO: 1716506 - DNA, 15 bp, Homo sapiens
aaaatagtctaagat

SEQ ID NO: 1716507 - DNA, 15 bp, Homo sapiens
aaatagtctaagatc

SEQ ID NO: 1716508 - DNA, 15 bp, Homo sapiens
aatagtctaagatca

SEQ ID NO: 1716509 - DNA, 15 bp, Homo sapiens
atagtctaagatcat

SEQ ID NO: 1716510 - DNA, 15 bp, Homo sapiens
tagtctaagatcatt

SEQ ID NO: 1716511 - DNA, 15 bp, Homo sapiens
agtctaagatcattt

SEQ ID NO: 1716512 - DNA, 15 bp, Homo sapiens
gtctaagatcatttc

SEQ ID NO: 1716513 - DNA, 15 bp, Homo sapiens
tctaagatcatttcc

SEQ ID NO: 1716514 - DNA, 15 bp, Homo sapiens
ctaagatcatttcct

SEQ ID NO: 1716515 - DNA, 15 bp, Homo sapiens
taagatcatttccta

SEQ ID NO: 1716516 - DNA, 15 bp, Homo sapiens
aagatcatttcctac

SEQ ID NO: 1716517 - DNA, 15 bp, Homo sapiens
agatcatttcctaca

SEQ ID NO: 1716518 - DNA, 15 bp, Homo sapiens
gatcatttcctacaa

SEQ ID NO: 1716519 - DNA, 15 bp, Homo sapiens
atcatttcctacaat

SEQ ID NO: 1716520 - DNA, 15 bp, Homo sapiens
tcatttcctacaatt

SEQ ID NO: 1716521 - DNA, 15 bp, Homo sapiens
catttcctacaattg

SEQ ID NO: 1716522 - DNA, 15 bp, Homo sapiens
atttcctacaattga

SEQ ID NO: 1716523 - DNA, 15 bp, Homo sapiens
tttcctacaattgaa

SEQ ID NO: 1716524 - DNA, 15 bp, Homo sapiens
ttcctacaattgaag

SEQ ID NO: 1716525 - DNA, 15 bp, Homo sapiens
tcctacaattgaaga

SEQ ID NO: 1716526 - DNA, 15 bp, Homo sapiens
cctacaattgaagaa

SEQ ID NO: 1716527 - DNA, 15 bp, Homo sapiens
ctacaattgaagaat

SEQ ID NO: 1716528 - DNA, 15 bp, Homo sapiens
tacaattgaagaata

SEQ ID NO: 1716529 - DNA, 15 bp, Homo sapiens
acaattgaagaatat

SEQ ID NO: 1716530 - DNA, 15 bp, Homo sapiens
caattgaagaatatg

SEQ ID NO: 1716531 - DNA, 15 bp, Homo sapiens
aattgaagaatatga

SEQ ID NO: 1716532 - DNA, 15 bp, Homo sapiens
attgaagaatatgaa

SEQ ID NO: 1716533 - DNA, 15 bp, Homo sapiens
ttgaagaatatgaat

SEQ ID NO: 1716534 - DNA, 15 bp, Homo sapiens
tgaagaatatgaatt

SEQ ID NO: 1716535 - DNA, 15 bp, Homo sapiens
gaagaatatgaattt

SEQ ID NO: 1716536 - DNA, 15 bp, Homo sapiens
aagaatatgaatttc

SEQ ID NO: 1716537 - DNA, 15 bp, Homo sapiens
agaatatgaatttcc

SEQ ID NO: 1716538 - DNA, 15 bp, Homo sapiens
gaatatgaatttcca

SEQ ID NO: 1716539 - DNA, 15 bp, Homo sapiens
aatatgaatttccaa

SEQ ID NO: 1716540 - DNA, 15 bp, Homo sapiens
atatgaatttccaag

SEQ ID NO: 1716541 - DNA, 15 bp, Homo sapiens
tatgaatttccaagc

SEQ ID NO: 1716542 - DNA, 15 bp, Homo sapiens
atgaatttccaagct

SEQ ID NO: 1716543 - DNA, 15 bp, Homo sapiens
tgaatttccaagctg

SEQ ID NO: 1716544 - DNA, 15 bp, Homo sapiens
gaatttccaagctga

SEQ ID NO: 1716545 - DNA, 15 bp, Homo sapiens
aatttccaagctgaa

SEQ ID NO: 1716546 - DNA, 15 bp, Homo sapiens
atttccaagctgaaa

SEQ ID NO: 1716547 - DNA, 15 bp, Homo sapiens
tttccaagctgaaag

SEQ ID NO: 1716548 - DNA, 15 bp, Homo sapiens
ttccaagctgaaaga

SEQ ID NO: 1716549 - DNA, 15 bp, Homo sapiens
tccaagctgaaagag

SEQ ID NO: 1716550 - DNA, 15 bp, Homo sapiens
ccaagctgaaagagt

SEQ ID NO: 1716551 - DNA, 15 bp, Homo sapiens
caagctgaaagagtt

SEQ ID NO: 1716552 - DNA, 15 bp, Homo sapiens
aagctgaaagagttc

SEQ ID NO: 1716553 - DNA, 15 bp, Homo sapiens
agctgaaagagttca

SEQ ID NO: 1716554 - DNA, 15 bp, Homo sapiens
gctgaaagagttcac

SEQ ID NO: 1716555 - DNA, 15 bp, Homo sapiens
ctgaaagagttcacc

SEQ ID NO: 1716556 - DNA, 15 bp, Homo sapiens
tgaaagagttcaccc

SEQ ID NO: 1716557 - DNA, 15 bp, Homo sapiens
gaaagagttcaccca

SEQ ID NO: 1716558 - DNA, 15 bp, Homo sapiens
aaagagttcacccaa

SEQ ID NO: 1716559 - DNA, 15 bp, Homo sapiens
aagagttcacccaat

SEQ ID NO: 1716560 - DNA, 15 bp, Homo sapiens
agagttcacccaata

SEQ ID NO: 1716561 - DNA, 15 bp, Homo sapiens
gagttcacccaatac

SEQ ID NO: 1716562 - DNA, 15 bp, Homo sapiens
agttcacccaatact

SEQ ID NO: 1716563 - DNA, 15 bp, Homo sapiens
gttcacccaatactg

SEQ ID NO: 1716564 - DNA, 15 bp, Homo sapiens
ttcacccaatactga

SEQ ID NO: 1716565 - DNA, 15 bp, Homo sapiens
tcacccaatactgaa

SEQ ID NO: 1716566 - DNA, 15 bp, Homo sapiens
cacccaatactgaat

SEQ ID NO: 1716567 - DNA, 15 bp, Homo sapiens
acccaatactgaata

SEQ ID NO: 1716568 - DNA, 15 bp, Homo sapiens
cccaatactgaatat

SEQ ID NO: 1716569 - DNA, 15 bp, Homo sapiens
ccaatactgaatata

SEQ ID NO: 1716570 - DNA, 15 bp, Homo sapiens
caatactgaatataa

SEQ ID NO: 1716571 - DNA, 15 bp, Homo sapiens
aatactgaatataat

SEQ ID NO: 1716572 - DNA, 15 bp, Homo sapiens
atactgaatataata

SEQ ID NO: 1716573 - DNA, 15 bp, Homo sapiens
tactgaatataataa

SEQ ID NO: 1716574 - DNA, 15 bp, Homo sapiens
actgaatataataaa

SEQ ID NO: 1716575 - DNA, 15 bp, Homo sapiens
ctgaatataataaat

SEQ ID NO: 1716576 - DNA, 15 bp, Homo sapiens
tgaatataataaata

SEQ ID NO: 1716577 - DNA, 15 bp, Homo sapiens
gaatataataaataa

SEQ ID NO: 1716578 - DNA, 15 bp, Homo sapiens
aatataataaataaa

SEQ ID NO: 1716579 - DNA, 15 bp, Homo sapiens
atataataaataaaa

SEQ ID NO: 1716580 - DNA, 15 bp, Homo sapiens
tataataaataaaaa

SEQ ID NO: 1716581 - DNA, 15 bp, Homo sapiens
ataataaataaaaat

SEQ ID NO: 1716582 - DNA, 15 bp, Homo sapiens
taataaataaaaatc

SEQ ID NO: 1716583 - DNA, 15 bp, Homo sapiens
aataaataaaaatcc

SEQ ID NO: 1716584 - DNA, 15 bp, Homo sapiens
ataaataaaaatcct

SEQ ID NO: 1716585 - DNA, 15 bp, Homo sapiens
taaataaaaatccta

SEQ ID NO: 1716586 - DNA, 15 bp, Homo sapiens
aaataaaaatcctat

SEQ ID NO: 1716587 - DNA, 15 bp, Homo sapiens
aataaaaatcctatt

SEQ ID NO: 1716588 - DNA, 15 bp, Homo sapiens
ataaaaatcctattt

SEQ ID NO: 1716589 - DNA, 15 bp, Homo sapiens
taaaaatcctatttg

SEQ ID NO: 1716590 - DNA, 15 bp, Homo sapiens
aaaaatcctatttgg

SEQ ID NO: 1716591 - DNA, 15 bp, Homo sapiens
aaaatcctatttggg

SEQ ID NO: 1716592 - DNA, 15 bp, Homo sapiens
aaatcctatttgggc

SEQ ID NO: 1716593 - DNA, 15 bp, Homo sapiens
aatcctatttgggca

SEQ ID NO: 1716594 - DNA, 15 bp, Homo sapiens
atcctatttgggcac

SEQ ID NO: 1716595 - DNA, 15 bp, Homo sapiens
tcctatttgggcaca

SEQ ID NO: 1716596 - DNA, 15 bp, Homo sapiens
cctatttgggcacag

SEQ ID NO: 1716597 - DNA, 15 bp, Homo sapiens
ctatttgggcacagt

SEQ ID NO: 1716598 - DNA, 15 bp, Homo sapiens
tatttgggcacagta

SEQ ID NO: 1716599 - DNA, 15 bp, Homo sapiens
atttgggcacagtat

SEQ ID NO: 1716600 - DNA, 15 bp, Homo sapiens
tttgggcacagtatg

SEQ ID NO: 1716601 - DNA, 15 bp, Homo sapiens
ttgggcacagtatga

SEQ ID NO: 1716602 - DNA, 15 bp, Homo sapiens
tgggcacagtatgaa

SEQ ID NO: 1716603 - DNA, 15 bp, Homo sapiens
gggcacagtatgaaa

SEQ ID NO: 1716604 - DNA, 15 bp, Homo sapiens
ggcacagtatgaaat

SEQ ID NO: 1716605 - DNA, 15 bp, Homo sapiens
gcacagtatgaaatt

SEQ ID NO: 1716606 - DNA, 15 bp, Homo sapiens
cacagtatgaaattt

SEQ ID NO: 1716607 - DNA, 15 bp, Homo sapiens
acagtatgaaatttt

SEQ ID NO: 1716608 - DNA, 15 bp, Homo sapiens
cagtatgaaatttta

SEQ ID NO: 1716609 - DNA, 15 bp, Homo sapiens
agtatgaaattttag

SEQ ID NO: 1716610 - DNA, 15 bp, Homo sapiens
gtatgaaattttaga

SEQ ID NO: 1716611 - DNA, 15 bp, Homo sapiens
tatgaaattttagaa

SEQ ID NO: 1716612 - DNA, 15 bp, Homo sapiens
atgaaattttagaaa

SEQ ID NO: 1716613 - DNA, 15 bp, Homo sapiens
tgaaattttagaaaa

SEQ ID NO: 1716614 - DNA, 15 bp, Homo sapiens
gaaattttagaaaat

SEQ ID NO: 1716615 - DNA, 15 bp, Homo sapiens
aaattttagaaaatg

SEQ ID NO: 1716616 - DNA, 15 bp, Homo sapiens
aattttagaaaatga

SEQ ID NO: 1716617 - DNA, 15 bp, Homo sapiens
attttagaaaatgag

SEQ ID NO: 1716618 - DNA, 15 bp, Homo sapiens
ttttagaaaatgagg

SEQ ID NO: 1716619 - DNA, 15 bp, Homo sapiens
tttagaaaatgaggg

SEQ ID NO: 1716620 - DNA, 15 bp, Homo sapiens
ttagaaaatgaggga

SEQ ID NO: 1716621 - DNA, 15 bp, Homo sapiens
tagaaaatgagggaa

SEQ ID NO: 1716622 - DNA, 15 bp, Homo sapiens
agaaaatgagggaaa

SEQ ID NO: 1716623 - DNA, 15 bp, Homo sapiens
gaaaatgagggaaaa

SEQ ID NO: 1716624 - DNA, 15 bp, Homo sapiens
aaaatgagggaaaag

SEQ ID NO: 1716625 - DNA, 15 bp, Homo sapiens
aaatgagggaaaagg

SEQ ID NO: 1716626 - DNA, 15 bp, Homo sapiens
aatgagggaaaagga

SEQ ID NO: 1716627 - DNA, 15 bp, Homo sapiens
atgagggaaaaggag

SEQ ID NO: 1716628 - DNA, 15 bp, Homo sapiens
tgagggaaaaggaga

SEQ ID NO: 1716629 - DNA, 15 bp, Homo sapiens
gagggaaaaggagaa

SEQ ID NO: 1716630 - DNA, 15 bp, Homo sapiens
agggaaaaggagaat

SEQ ID NO: 1716631 - DNA, 15 bp, Homo sapiens
gggaaaaggagaata

SEQ ID NO: 1716632 - DNA, 15 bp, Homo sapiens
ggaaaaggagaatat

SEQ ID NO: 1716633 - DNA, 15 bp, Homo sapiens
gaaaaggagaatatt

SEQ ID NO: 1716634 - DNA, 15 bp, Homo sapiens
aaaaggagaatattt

SEQ ID NO: 1716635 - DNA, 15 bp, Homo sapiens
aaaggagaatatttt

SEQ ID NO: 1716636 - DNA, 15 bp, Homo sapiens
aaggagaatattttc

SEQ ID NO: 1716637 - DNA, 15 bp, Homo sapiens
aggagaatattttcc

SEQ ID NO: 1716638 - DNA, 15 bp, Homo sapiens
ggagaatattttcca

SEQ ID NO: 1716639 - DNA, 15 bp, Homo sapiens
gagaatattttccag

SEQ ID NO: 1716640 - DNA, 15 bp, Homo sapiens
agaatattttccagg

SEQ ID NO: 1716641 - DNA, 15 bp, Homo sapiens
gaatattttccagga

SEQ ID NO: 1716642 - DNA, 15 bp, Homo sapiens
aatattttccaggag

SEQ ID NO: 1716643 - DNA, 15 bp, Homo sapiens
atattttccaggaga

SEQ ID NO: 1716644 - DNA, 15 bp, Homo sapiens
tattttccaggagag

SEQ ID NO: 1716645 - DNA, 15 bp, Homo sapiens
attttccaggagaga

SEQ ID NO: 1716646 - DNA, 15 bp, Homo sapiens
ttttccaggagagaa

SEQ ID NO: 1716647 - DNA, 15 bp, Homo sapiens
tttccaggagagaag

SEQ ID NO: 1716648 - DNA, 15 bp, Homo sapiens
ttccaggagagaagg

SEQ ID NO: 1716649 - DNA, 15 bp, Homo sapiens
tccaggagagaagga

SEQ ID NO: 1716650 - DNA, 15 bp, Homo sapiens
ccaggagagaaggag

SEQ ID NO: 1716651 - DNA, 15 bp, Homo sapiens
caggagagaaggagg

SEQ ID NO: 1716652 - DNA, 15 bp, Homo sapiens
aggagagaaggagga

SEQ ID NO: 1716653 - DNA, 15 bp, Homo sapiens
ggagagaaggaggaa

SEQ ID NO: 1716654 - DNA, 15 bp, Homo sapiens
gagagaaggaggaat

SEQ ID NO: 1716655 - DNA, 15 bp, Homo sapiens
agagaaggaggaatg

SEQ ID NO: 1716656 - DNA, 15 bp, Homo sapiens
gagaaggaggaatgt

SEQ ID NO: 1716657 - DNA, 15 bp, Homo sapiens
agaaggaggaatgtg

SEQ ID NO: 1716658 - DNA, 15 bp, Homo sapiens
gaaggaggaatgtgt

SEQ ID NO: 1716659 - DNA, 15 bp, Homo sapiens
aaggaggaatgtgtg

SEQ ID NO: 1716660 - DNA, 15 bp, Homo sapiens
aggaggaatgtgtga

SEQ ID NO: 1716661 - DNA, 15 bp, Homo sapiens
ggaggaatgtgtgac

SEQ ID NO: 1716662 - DNA, 15 bp, Homo sapiens
gaggaatgtgtgaca

SEQ ID NO: 1716663 - DNA, 15 bp, Homo sapiens
aggaatgtgtgacat

SEQ ID NO: 1716664 - DNA, 15 bp, Homo sapiens
ggaatgtgtgacata

SEQ ID NO: 1716665 - DNA, 15 bp, Homo sapiens
gaatgtgtgacatat

SEQ ID NO: 1716666 - DNA, 15 bp, Homo sapiens
aatgtgtgacatata

SEQ ID NO: 1716667 - DNA, 15 bp, Homo sapiens
atgtgtgacatataa

SEQ ID NO: 1716668 - DNA, 15 bp, Homo sapiens
tgtgtgacatataat

SEQ ID NO: 1716669 - DNA, 15 bp, Homo sapiens
gtgtgacatataatc

SEQ ID NO: 1716670 - DNA, 15 bp, Homo sapiens
tgtgacatataatcg

SEQ ID NO: 1716671 - DNA, 15 bp, Homo sapiens
gtgacatataatcga

SEQ ID NO: 1716672 - DNA, 15 bp, Homo sapiens
tgacatataatcgat

SEQ ID NO: 1716673 - DNA, 15 bp, Homo sapiens
gacatataatcgata

SEQ ID NO: 1716674 - DNA, 15 bp, Homo sapiens
acatataatcgataa

SEQ ID NO: 1716675 - DNA, 15 bp, Homo sapiens
catataatcgataaa

SEQ ID NO: 1716676 - DNA, 15 bp, Homo sapiens
atataatcgataaag

SEQ ID NO: 1716677 - DNA, 15 bp, Homo sapiens
tataatcgataaaga

SEQ ID NO: 1716678 - DNA, 15 bp, Homo sapiens
ataatcgataaagaa

SEQ ID NO: 1716679 - DNA, 15 bp, Homo sapiens
taatcgataaagaat

SEQ ID NO: 1716680 - DNA, 15 bp, Homo sapiens
aatcgataaagaatt

SEQ ID NO: 1716681 - DNA, 15 bp, Homo sapiens
atcgataaagaatta

SEQ ID NO: 1716682 - DNA, 15 bp, Homo sapiens
tcgataaagaattat

SEQ ID NO: 1716683 - DNA, 15 bp, Homo sapiens
cgataaagaattata

SEQ ID NO: 1716684 - DNA, 15 bp, Homo sapiens
gataaagaattataa

SEQ ID NO: 1716685 - DNA, 15 bp, Homo sapiens
ataaagaattataat

SEQ ID NO: 1716686 - DNA, 15 bp, Homo sapiens
taaagaattataatc

SEQ ID NO: 1716687 - DNA, 15 bp, Homo sapiens
aaagaattataatca

SEQ ID NO: 1716688 - DNA, 15 bp, Homo sapiens
aagaattataatcat

SEQ ID NO: 1716689 - DNA, 15 bp, Homo sapiens
agaattataatcatg

SEQ ID NO: 1716690 - DNA, 15 bp, Homo sapiens
gaattataatcatgt

SEQ ID NO: 1716691 - DNA, 15 bp, Homo sapiens
aattataatcatgtg

SEQ ID NO: 1716692 - DNA, 15 bp, Homo sapiens
attataatcatgtga

SEQ ID NO: 1716693 - DNA, 15 bp, Homo sapiens
ttataatcatgtgac

SEQ ID NO: 1716694 - DNA, 15 bp, Homo sapiens
tataatcatgtgact

SEQ ID NO: 1716695 - DNA, 15 bp, Homo sapiens
ataatcatgtgactg

SEQ ID NO: 1716696 - DNA, 15 bp, Homo sapiens
taatcatgtgactgg

SEQ ID NO: 1716697 - DNA, 15 bp, Homo sapiens
aatcatgtgactggg

SEQ ID NO: 1716698 - DNA, 15 bp, Homo sapiens
atcatgtgactgggc

SEQ ID NO: 1716699 - DNA, 15 bp, Homo sapiens
tcatgtgactgggca

SEQ ID NO: 1716700 - DNA, 15 bp, Homo sapiens
catgtgactgggcac

SEQ ID NO: 1716701 - DNA, 15 bp, Homo sapiens
atgtgactgggcaca

SEQ ID NO: 1716702 - DNA, 15 bp, Homo sapiens
tgtgactgggcacag

SEQ ID NO: 1716703 - DNA, 15 bp, Homo sapiens
gtgactgggcacagt

SEQ ID NO: 1716704 - DNA, 15 bp, Homo sapiens
tgactgggcacagtg

SEQ ID NO: 1716705 - DNA, 15 bp, Homo sapiens
gactgggcacagtgg

SEQ ID NO: 1716706 - DNA, 15 bp, Homo sapiens
actgggcacagtggc

SEQ ID NO: 1716707 - DNA, 15 bp, Homo sapiens
cactttaggaggccg

SEQ ID NO: 1716708 - DNA, 15 bp, Homo sapiens
actttaggaggccga

SEQ ID NO: 1716709 - DNA, 15 bp, Homo sapiens
ctttaggaggccgag

SEQ ID NO: 1716710 - DNA, 15 bp, Homo sapiens
tttaggaggccgagg

SEQ ID NO: 1716711 - DNA, 15 bp, Homo sapiens
ttaggaggccgaggc

SEQ ID NO: 1716712 - DNA, 15 bp, Homo sapiens
taggaggccgaggca

SEQ ID NO: 1716713 - DNA, 15 bp, Homo sapiens
aggaggccgaggcaa

SEQ ID NO: 1716714 - DNA, 15 bp, Homo sapiens
cgaggcaagaggatt

SEQ ID NO: 1716715 - DNA, 15 bp, Homo sapiens
gaggcaagaggattg

SEQ ID NO: 1716716 - DNA, 15 bp, Homo sapiens
aggcaagaggattgc

SEQ ID NO: 1716717 - DNA, 15 bp, Homo sapiens
ggcaagaggattgct

SEQ ID NO: 1716718 - DNA, 15 bp, Homo sapiens
gcaagaggattgctt

SEQ ID NO: 1716719 - DNA, 15 bp, Homo sapiens
caagaggattgcttg

SEQ ID NO: 1716720 - DNA, 15 bp, Homo sapiens
aagaggattgcttga

SEQ ID NO: 1716721 - DNA, 15 bp, Homo sapiens
agaggattgcttgag

SEQ ID NO: 1716722 - DNA, 15 bp, Homo sapiens
ttgagcccaggagta

SEQ ID NO: 1716723 - DNA, 15 bp, Homo sapiens
tgagcccaggagtac

SEQ ID NO: 1716724 - DNA, 15 bp, Homo sapiens
gagcccaggagtaca

SEQ ID NO: 1716725 - DNA, 15 bp, Homo sapiens
agcccaggagtacaa

SEQ ID NO: 1716726 - DNA, 15 bp, Homo sapiens
gcccaggagtacaag

SEQ ID NO: 1716727 - DNA, 15 bp, Homo sapiens
cccaggagtacaaga

SEQ ID NO: 1716728 - DNA, 15 bp, Homo sapiens
ccaggagtacaagac

SEQ ID NO: 1716729 - DNA, 15 bp, Homo sapiens
caggagtacaagacc

SEQ ID NO: 1716730 - DNA, 15 bp, Homo sapiens
aggagtacaagacca

SEQ ID NO: 1716731 - DNA, 15 bp, Homo sapiens
ggagtacaagaccag

SEQ ID NO: 1716732 - DNA, 15 bp, Homo sapiens
gagtacaagaccagc

SEQ ID NO: 1716733 - DNA, 15 bp, Homo sapiens
agtacaagaccagcc

SEQ ID NO: 1716734 - DNA, 15 bp, Homo sapiens
gtacaagaccagcct

SEQ ID NO: 1716735 - DNA, 15 bp, Homo sapiens
tacaagaccagcctg

SEQ ID NO: 1716736 - DNA, 15 bp, Homo sapiens
acaagaccagcctgg

SEQ ID NO: 1716737 - DNA, 15 bp, Homo sapiens
ccagcctgggcaacc

SEQ ID NO: 1716738 - DNA, 15 bp, Homo sapiens
cagcctgggcaacct

SEQ ID NO: 1716739 - DNA, 15 bp, Homo sapiens
agcctgggcaacctg

SEQ ID NO: 1716740 - DNA, 15 bp, Homo sapiens
gcctgggcaacctgg

SEQ ID NO: 1716741 - DNA, 15 bp, Homo sapiens
cctgggcaacctggc

SEQ ID NO: 1716742 - DNA, 15 bp, Homo sapiens
ctgggcaacctggcg

SEQ ID NO: 1716743 - DNA, 15 bp, Homo sapiens
tgggcaacctggcga

SEQ ID NO: 1716744 - DNA, 15 bp, Homo sapiens
gggcaacctggcgaa

SEQ ID NO: 1716745 - DNA, 15 bp, Homo sapiens
ggcaacctggcgaaa

SEQ ID NO: 1716746 - DNA, 15 bp, Homo sapiens
gcaacctggcgaaac

SEQ ID NO: 1716747 - DNA, 15 bp, Homo sapiens
caacctggcgaaacc

SEQ ID NO: 1716748 - DNA, 15 bp, Homo sapiens
aacctggcgaaaccc

SEQ ID NO: 1716749 - DNA, 15 bp, Homo sapiens
acctggcgaaacccc

SEQ ID NO: 1716750 - DNA, 15 bp, Homo sapiens
cctggcgaaacccca

SEQ ID NO: 1716751 - DNA, 15 bp, Homo sapiens
ctggcgaaaccccat

SEQ ID NO: 1716752 - DNA, 15 bp, Homo sapiens
tggcgaaaccccatt

SEQ ID NO: 1716753 - DNA, 15 bp, Homo sapiens
ggcgaaaccccattt

SEQ ID NO: 1716754 - DNA, 15 bp, Homo sapiens
gcgaaaccccatttc

SEQ ID NO: 1716755 - DNA, 15 bp, Homo sapiens
cgaaaccccatttct

SEQ ID NO: 1716756 - DNA, 15 bp, Homo sapiens
aaaccccatttctaa

SEQ ID NO: 1716757 - DNA, 15 bp, Homo sapiens
aaccccatttctaac

SEQ ID NO: 1716758 - DNA, 15 bp, Homo sapiens
accccatttctaaca

SEQ ID NO: 1716759 - DNA, 15 bp, Homo sapiens
ccccatttctaacaa

SEQ ID NO: 1716760 - DNA, 15 bp, Homo sapiens
cccatttctaacaaa

SEQ ID NO: 1716761 - DNA, 15 bp, Homo sapiens
ccatttctaacaaaa

SEQ ID NO: 1716762 - DNA, 15 bp, Homo sapiens
catttctaacaaaaa

SEQ ID NO: 1716763 - DNA, 15 bp, Homo sapiens
atttctaacaaaaaa

SEQ ID NO: 1716764 - DNA, 15 bp, Homo sapiens
tttctaacaaaaaaa

SEQ ID NO: 1716765 - DNA, 15 bp, Homo sapiens
ttctaacaaaaaaag

SEQ ID NO: 1716766 - DNA, 15 bp, Homo sapiens
tctaacaaaaaaaga

SEQ ID NO: 1716767 - DNA, 15 bp, Homo sapiens
ctaacaaaaaaagaa

SEQ ID NO: 1716768 - DNA, 15 bp, Homo sapiens
taacaaaaaaagaaa

SEQ ID NO: 1716769 - DNA, 15 bp, Homo sapiens
aacaaaaaaagaaaa

SEQ ID NO: 1716770 - DNA, 15 bp, Homo sapiens
acaaaaaaagaaaag

SEQ ID NO: 1716771 - DNA, 15 bp, Homo sapiens
caaaaaaagaaaagc

SEQ ID NO: 1716772 - DNA, 15 bp, Homo sapiens
aaaaaaagaaaagca

SEQ ID NO: 1716773 - DNA, 15 bp, Homo sapiens
aaaaaagaaaagcaa

SEQ ID NO: 1716774 - DNA, 15 bp, Homo sapiens
aaaaagaaaagcaaa

SEQ ID NO: 1716775 - DNA, 15 bp, Homo sapiens
aaaagaaaagcaaaa

SEQ ID NO: 1716776 - DNA, 15 bp, Homo sapiens
aaagaaaagcaaaaa

SEQ ID NO: 1716777 - DNA, 15 bp, Homo sapiens
aagaaaagcaaaaat

SEQ ID NO: 1716778 - DNA, 15 bp, Homo sapiens
agaaaagcaaaaatt

SEQ ID NO: 1716779 - DNA, 15 bp, Homo sapiens
gaaaagcaaaaatta

SEQ ID NO: 1716780 - DNA, 15 bp, Homo sapiens
aaaagcaaaaattag

SEQ ID NO: 1716781 - DNA, 15 bp, Homo sapiens
aaagcaaaaattagc

SEQ ID NO: 1716782 - DNA, 15 bp, Homo sapiens
aagcaaaaattagcc

SEQ ID NO: 1716783 - DNA, 15 bp, Homo sapiens
agcaaaaattagcca

SEQ ID NO: 1716784 - DNA, 15 bp, Homo sapiens
gcaaaaattagccag

SEQ ID NO: 1716785 - DNA, 15 bp, Homo sapiens
ggcatggtggcatga

SEQ ID NO: 1716786 - DNA, 15 bp, Homo sapiens
gcatggtggcatgag

SEQ ID NO: 1716787 - DNA, 15 bp, Homo sapiens
catggtggcatgagc

SEQ ID NO: 1716788 - DNA, 15 bp, Homo sapiens
atggtggcatgagcc

SEQ ID NO: 1716789 - DNA, 15 bp, Homo sapiens
tggtggcatgagcca

SEQ ID NO: 1716790 - DNA, 15 bp, Homo sapiens
ggtggcatgagccac

SEQ ID NO: 1716791 - DNA, 15 bp, Homo sapiens
gtggcatgagccact

SEQ ID NO: 1716792 - DNA, 15 bp, Homo sapiens
tggcatgagccactc

SEQ ID NO: 1716793 - DNA, 15 bp, Homo sapiens
ggcatgagccactcg

SEQ ID NO: 1716794 - DNA, 15 bp, Homo sapiens
gcatgagccactcgg

SEQ ID NO: 1716795 - DNA, 15 bp, Homo sapiens
catgagccactcggg

SEQ ID NO: 1716796 - DNA, 15 bp, Homo sapiens
atgagccactcggga

SEQ ID NO: 1716797 - DNA, 15 bp, Homo sapiens
tgagccactcgggaa

SEQ ID NO: 1716798 - DNA, 15 bp, Homo sapiens
gagccactcgggaag

SEQ ID NO: 1716799 - DNA, 15 bp, Homo sapiens
agccactcgggaagc

SEQ ID NO: 1716800 - DNA, 15 bp, Homo sapiens
gccactcgggaagct

SEQ ID NO: 1716801 - DNA, 15 bp, Homo sapiens
ccactcgggaagctg

SEQ ID NO: 1716802 - DNA, 15 bp, Homo sapiens
cactcgggaagctga

SEQ ID NO: 1716803 - DNA, 15 bp, Homo sapiens
actcgggaagctgaa

SEQ ID NO: 1716804 - DNA, 15 bp, Homo sapiens
ctcgggaagctgaag

SEQ ID NO: 1716805 - DNA, 15 bp, Homo sapiens
tcgggaagctgaagt

SEQ ID NO: 1716806 - DNA, 15 bp, Homo sapiens
cgggaagctgaagtg

SEQ ID NO: 1716807 - DNA, 15 bp, Homo sapiens
gggaagctgaagtgg

SEQ ID NO: 1716808 - DNA, 15 bp, Homo sapiens
ggaagctgaagtggg

SEQ ID NO: 1716809 - DNA, 15 bp, Homo sapiens
gaagctgaagtgggg

SEQ ID NO: 1716810 - DNA, 15 bp, Homo sapiens
aagctgaagtggggt

SEQ ID NO: 1716811 - DNA, 15 bp, Homo sapiens
agctgaagtggggtg

SEQ ID NO: 1716812 - DNA, 15 bp, Homo sapiens
gctgaagtggggtga

SEQ ID NO: 1716813 - DNA, 15 bp, Homo sapiens
ctgaagtggggtgat

SEQ ID NO: 1716814 - DNA, 15 bp, Homo sapiens
tgaagtggggtgatt

SEQ ID NO: 1716815 - DNA, 15 bp, Homo sapiens
gaagtggggtgattg

SEQ ID NO: 1716816 - DNA, 15 bp, Homo sapiens
aagtggggtgattgc

SEQ ID NO: 1716817 - DNA, 15 bp, Homo sapiens
agtggggtgattgct

SEQ ID NO: 1716818 - DNA, 15 bp, Homo sapiens
gtggggtgattgctt

SEQ ID NO: 1716819 - DNA, 15 bp, Homo sapiens
tggggtgattgcttg

SEQ ID NO: 1716820 - DNA, 15 bp, Homo sapiens
ggggtgattgcttga

SEQ ID NO: 1716821 - DNA, 15 bp, Homo sapiens
gggtgattgcttgag

SEQ ID NO: 1716822 - DNA, 15 bp, Homo sapiens
ggtgattgcttgagt

SEQ ID NO: 1716823 - DNA, 15 bp, Homo sapiens
gtgattgcttgagtt

SEQ ID NO: 1716824 - DNA, 15 bp, Homo sapiens
tgattgcttgagttc

SEQ ID NO: 1716825 - DNA, 15 bp, Homo sapiens
gattgcttgagttca

SEQ ID NO: 1716826 - DNA, 15 bp, Homo sapiens
attgcttgagttcag

SEQ ID NO: 1716827 - DNA, 15 bp, Homo sapiens
ttgcttgagttcagg

SEQ ID NO: 1716828 - DNA, 15 bp, Homo sapiens
tgcttgagttcaggt

SEQ ID NO: 1716829 - DNA, 15 bp, Homo sapiens
gcttgagttcaggtg

SEQ ID NO: 1716830 - DNA, 15 bp, Homo sapiens
cttgagttcaggtgg

SEQ ID NO: 1716831 - DNA, 15 bp, Homo sapiens
ttgagttcaggtggt

SEQ ID NO: 1716832 - DNA, 15 bp, Homo sapiens
tgagttcaggtggtt

SEQ ID NO: 1716833 - DNA, 15 bp, Homo sapiens
gagttcaggtggttg

SEQ ID NO: 1716834 - DNA, 15 bp, Homo sapiens
agttcaggtggttga

SEQ ID NO: 1716835 - DNA, 15 bp, Homo sapiens
gttcaggtggttgag

SEQ ID NO: 1716836 - DNA, 15 bp, Homo sapiens
ttcaggtggttgagg

SEQ ID NO: 1716837 - DNA, 15 bp, Homo sapiens
tcaggtggttgaggc

SEQ ID NO: 1716838 - DNA, 15 bp, Homo sapiens
caggtggttgaggct

SEQ ID NO: 1716839 - DNA, 15 bp, Homo sapiens
aggtggttgaggctg

SEQ ID NO: 1716840 - DNA, 15 bp, Homo sapiens
ggtggttgaggctgc

SEQ ID NO: 1716841 - DNA, 15 bp, Homo sapiens
gtggttgaggctgca

SEQ ID NO: 1716842 - DNA, 15 bp, Homo sapiens
tggttgaggctgcag

SEQ ID NO: 1716843 - DNA, 15 bp, Homo sapiens
tgaggctgcagtgac

SEQ ID NO: 1716844 - DNA, 15 bp, Homo sapiens
gaggctgcagtgacc

SEQ ID NO: 1716845 - DNA, 15 bp, Homo sapiens
aggctgcagtgaccc

SEQ ID NO: 1716846 - DNA, 15 bp, Homo sapiens
ggctgcagtgaccca

SEQ ID NO: 1716847 - DNA, 15 bp, Homo sapiens
gctgcagtgacccaa

SEQ ID NO: 1716848 - DNA, 15 bp, Homo sapiens
ctgcagtgacccaac

SEQ ID NO: 1716849 - DNA, 15 bp, Homo sapiens
tgcagtgacccaaca

SEQ ID NO: 1716850 - DNA, 15 bp, Homo sapiens
gcagtgacccaacat

SEQ ID NO: 1716851 - DNA, 15 bp, Homo sapiens
cagtgacccaacatc

SEQ ID NO: 1716852 - DNA, 15 bp, Homo sapiens
agtgacccaacatcg

SEQ ID NO: 1716853 - DNA, 15 bp, Homo sapiens
gtgacccaacatcgc

SEQ ID NO: 1716854 - DNA, 15 bp, Homo sapiens
tgacccaacatcgcg

SEQ ID NO: 1716855 - DNA, 15 bp, Homo sapiens
gacccaacatcgcgc

SEQ ID NO: 1716856 - DNA, 15 bp, Homo sapiens
acccaacatcgcgcc

SEQ ID NO: 1716857 - DNA, 15 bp, Homo sapiens
cccaacatcgcgcca

SEQ ID NO: 1716858 - DNA, 15 bp, Homo sapiens
ccaacatcgcgccac

SEQ ID NO: 1716859 - DNA, 15 bp, Homo sapiens
caacatcgcgccact

SEQ ID NO: 1716860 - DNA, 15 bp, Homo sapiens
aacatcgcgccactg

SEQ ID NO: 1716861 - DNA, 15 bp, Homo sapiens
acatcgcgccactgc

SEQ ID NO: 1716862 - DNA, 15 bp, Homo sapiens
catcgcgccactgcc

SEQ ID NO: 1716863 - DNA, 15 bp, Homo sapiens
atcgcgccactgccc

SEQ ID NO: 1716864 - DNA, 15 bp, Homo sapiens
tcgcgccactgccct

SEQ ID NO: 1716865 - DNA, 15 bp, Homo sapiens
cgcgccactgccctc

SEQ ID NO: 1716866 - DNA, 15 bp, Homo sapiens
gcgccactgccctcc

SEQ ID NO: 1716867 - DNA, 15 bp, Homo sapiens
cgccactgccctcca

SEQ ID NO: 1716868 - DNA, 15 bp, Homo sapiens
ccctccagcctgggc

SEQ ID NO: 1716869 - DNA, 15 bp, Homo sapiens
cctccagcctgggca

SEQ ID NO: 1716870 - DNA, 15 bp, Homo sapiens
aacagagcaagacct

SEQ ID NO: 1716871 - DNA, 15 bp, Homo sapiens
gtctcaaaaaaaaac

SEQ ID NO: 1716872 - DNA, 15 bp, Homo sapiens
tcaaaaaaaaacaaa

SEQ ID NO: 1716873 - DNA, 15 bp, Homo sapiens
aaaacaaaaccaaaa

SEQ ID NO: 1716874 - DNA, 15 bp, Homo sapiens
aaacaaaaccaaaaa

SEQ ID NO: 1716875 - DNA, 15 bp, Homo sapiens
aacaaaaccaaaaaa

SEQ ID NO: 1716876 - DNA, 15 bp, Homo sapiens
acaaaaccaaaaaac

SEQ ID NO: 1716877 - DNA, 15 bp, Homo sapiens
caaaaccaaaaaacc

SEQ ID NO: 1716878 - DNA, 15 bp, Homo sapiens
aaaaccaaaaaacca

SEQ ID NO: 1716879 - DNA, 15 bp, Homo sapiens
aaaccaaaaaaccaa

SEQ ID NO: 1716880 - DNA, 15 bp, Homo sapiens
aaccaaaaaaccaaa

SEQ ID NO: 1716881 - DNA, 15 bp, Homo sapiens
accaaaaaaccaaaa

SEQ ID NO: 1716882 - DNA, 15 bp, Homo sapiens
ccaaaaaaccaaaaa

SEQ ID NO: 1716883 - DNA, 15 bp, Homo sapiens
caaaaaaccaaaaaa

SEQ ID NO: 1716884 - DNA, 15 bp, Homo sapiens
aaaaaaccaaaaaac

SEQ ID NO: 1716885 - DNA, 15 bp, Homo sapiens
aaaaaccaaaaaaca

SEQ ID NO: 1716886 - DNA, 15 bp, Homo sapiens
aaaaccaaaaaacaa

SEQ ID NO: 1716887 - DNA, 15 bp, Homo sapiens
aaaccaaaaaacaaa

SEQ ID NO: 1716888 - DNA, 15 bp, Homo sapiens
aaccaaaaaacaaaa

SEQ ID NO: 1716889 - DNA, 15 bp, Homo sapiens
accaaaaaacaaaac

SEQ ID NO: 1716890 - DNA, 15 bp, Homo sapiens
ccaaaaaacaaaaca

SEQ ID NO: 1716891 - DNA, 15 bp, Homo sapiens
caaaaaacaaaacaa

SEQ ID NO: 1716892 - DNA, 15 bp, Homo sapiens
aaaaaacaaaacaaa

SEQ ID NO: 1716893 - DNA, 15 bp, Homo sapiens
aacaaaacaaaacac

SEQ ID NO: 1716894 - DNA, 15 bp, Homo sapiens
acaaaacaaaacaca

SEQ ID NO: 1716895 - DNA, 15 bp, Homo sapiens
caaaacaaaacacac

SEQ ID NO: 1716896 - DNA, 15 bp, Homo sapiens
aaaacaaaacacaca

SEQ ID NO: 1716897 - DNA, 15 bp, Homo sapiens
aaacaaaacacacac

SEQ ID NO: 1716898 - DNA, 15 bp, Homo sapiens
aacaaaacacacaca

SEQ ID NO: 1716899 - DNA, 15 bp, Homo sapiens
acacacacacaaaag

SEQ ID NO: 1716900 - DNA, 15 bp, Homo sapiens
cacacacacaaaaga

SEQ ID NO: 1716901 - DNA, 15 bp, Homo sapiens
acacacacaaaagaa

SEQ ID NO: 1716902 - DNA, 15 bp, Homo sapiens
cacacacaaaagaac

SEQ ID NO: 1716903 - DNA, 15 bp, Homo sapiens
acacacaaaagaact

SEQ ID NO: 1716904 - DNA, 15 bp, Homo sapiens
cacacaaaagaacta

SEQ ID NO: 1716905 - DNA, 15 bp, Homo sapiens
acacaaaagaactat

SEQ ID NO: 1716906 - DNA, 15 bp, Homo sapiens
cacaaaagaactata

SEQ ID NO: 1716907 - DNA, 15 bp, Homo sapiens
acaaaagaactataa

SEQ ID NO: 1716908 - DNA, 15 bp, Homo sapiens
caaaagaactataat

SEQ ID NO: 1716909 - DNA, 15 bp, Homo sapiens
aaaagaactataatg

SEQ ID NO: 1716910 - DNA, 15 bp, Homo sapiens
aaagaactataatga

SEQ ID NO: 1716911 - DNA, 15 bp, Homo sapiens
aagaactataatgac

SEQ ID NO: 1716912 - DNA, 15 bp, Homo sapiens
agaactataatgaca

SEQ ID NO: 1716913 - DNA, 15 bp, Homo sapiens
gaactataatgacat

SEQ ID NO: 1716914 - DNA, 15 bp, Homo sapiens
actataatgacatag

SEQ ID NO: 1716915 - DNA, 15 bp, Homo sapiens
ctataatgacatagg

SEQ ID NO: 1716916 - DNA, 15 bp, Homo sapiens
tataatgacatagga

SEQ ID NO: 1716917 - DNA, 15 bp, Homo sapiens
ataatgacataggac

SEQ ID NO: 1716918 - DNA, 15 bp, Homo sapiens
taatgacataggacc

SEQ ID NO: 1716919 - DNA, 15 bp, Homo sapiens
aatgacataggacct

SEQ ID NO: 1716920 - DNA, 15 bp, Homo sapiens
atgacataggacctc

SEQ ID NO: 1716921 - DNA, 15 bp, Homo sapiens
tgacataggacctct

SEQ ID NO: 1716922 - DNA, 15 bp, Homo sapiens
gacataggacctctt

SEQ ID NO: 1716923 - DNA, 15 bp, Homo sapiens
acataggacctcttg

SEQ ID NO: 1716924 - DNA, 15 bp, Homo sapiens
cataggacctcttga

SEQ ID NO: 1716925 - DNA, 15 bp, Homo sapiens
ataggacctcttgac

SEQ ID NO: 1716926 - DNA, 15 bp, Homo sapiens
taggacctcttgaca

SEQ ID NO: 1716927 - DNA, 15 bp, Homo sapiens
aggacctcttgacaa

SEQ ID NO: 1716928 - DNA, 15 bp, Homo sapiens
ggacctcttgacaat

SEQ ID NO: 1716929 - DNA, 15 bp, Homo sapiens
gacctcttgacaatg

SEQ ID NO: 1716930 - DNA, 15 bp, Homo sapiens
acctcttgacaatga

SEQ ID NO: 1716931 - DNA, 15 bp, Homo sapiens
cctcttgacaatgaa

SEQ ID NO: 1716932 - DNA, 15 bp, Homo sapiens
ctcttgacaatgaaa

SEQ ID NO: 1716933 - DNA, 15 bp, Homo sapiens
tcttgacaatgaaac

SEQ ID NO: 1716934 - DNA, 15 bp, Homo sapiens
cttgacaatgaaact

SEQ ID NO: 1716935 - DNA, 15 bp, Homo sapiens
ttgacaatgaaacta

SEQ ID NO: 1716936 - DNA, 15 bp, Homo sapiens
tgacaatgaaactaa

SEQ ID NO: 1716937 - DNA, 15 bp, Homo sapiens
gacaatgaaactaaa

SEQ ID NO: 1716938 - DNA, 15 bp, Homo sapiens
acaatgaaactaaaa

SEQ ID NO: 1716939 - DNA, 15 bp, Homo sapiens
caatgaaactaaaat

SEQ ID NO: 1716940 - DNA, 15 bp, Homo sapiens
aatgaaactaaaatt

SEQ ID NO: 1716941 - DNA, 15 bp, Homo sapiens
atgaaactaaaattc

SEQ ID NO: 1716942 - DNA, 15 bp, Homo sapiens
tgaaactaaaattca

SEQ ID NO: 1716943 - DNA, 15 bp, Homo sapiens
gaaactaaaattcat

SEQ ID NO: 1716944 - DNA, 15 bp, Homo sapiens
aaactaaaattcata

SEQ ID NO: 1716945 - DNA, 15 bp, Homo sapiens
aactaaaattcataa

SEQ ID NO: 1716946 - DNA, 15 bp, Homo sapiens
actaaaattcataaa

SEQ ID NO: 1716947 - DNA, 15 bp, Homo sapiens
ctaaaattcataaag

SEQ ID NO: 1716948 - DNA, 15 bp, Homo sapiens
taaaattcataaaga

SEQ ID NO: 1716949 - DNA, 15 bp, Homo sapiens
aaaattcataaagat

SEQ ID NO: 1716950 - DNA, 15 bp, Homo sapiens
aaattcataaagatt

SEQ ID NO: 1716951 - DNA, 15 bp, Homo sapiens
aattcataaagattt

SEQ ID NO: 1716952 - DNA, 15 bp, Homo sapiens
attcataaagatttg

SEQ ID NO: 1716953 - DNA, 15 bp, Homo sapiens
ttcataaagatttgc

SEQ ID NO: 1716954 - DNA, 15 bp, Homo sapiens
tcataaagatttgcc

SEQ ID NO: 1716955 - DNA, 15 bp, Homo sapiens
cataaagatttgcct

SEQ ID NO: 1716956 - DNA, 15 bp, Homo sapiens
ataaagatttgcctt

SEQ ID NO: 1716957 - DNA, 15 bp, Homo sapiens
taaagatttgccttc

SEQ ID NO: 1716958 - DNA, 15 bp, Homo sapiens
aaagatttgccttca

SEQ ID NO: 1716959 - DNA, 15 bp, Homo sapiens
aagatttgccttcaa

SEQ ID NO: 1716960 - DNA, 15 bp, Homo sapiens
agatttgccttcaaa

SEQ ID NO: 1716961 - DNA, 15 bp, Homo sapiens
gatttgccttcaaaa

SEQ ID NO: 1716962 - DNA, 15 bp, Homo sapiens
atttgccttcaaaat

SEQ ID NO: 1716963 - DNA, 15 bp, Homo sapiens
tttgccttcaaaatt

SEQ ID NO: 1716964 - DNA, 15 bp, Homo sapiens
ttgccttcaaaattc

SEQ ID NO: 1716965 - DNA, 15 bp, Homo sapiens
tgccttcaaaattct

SEQ ID NO: 1716966 - DNA, 15 bp, Homo sapiens
gccttcaaaattcta

SEQ ID NO: 1716967 - DNA, 15 bp, Homo sapiens
ccttcaaaattctaa

SEQ ID NO: 1716968 - DNA, 15 bp, Homo sapiens
cttcaaaattctaag

SEQ ID NO: 1716969 - DNA, 15 bp, Homo sapiens
ttcaaaattctaagg

SEQ ID NO: 1716970 - DNA, 15 bp, Homo sapiens
tcaaaattctaaggg

SEQ ID NO: 1716971 - DNA, 15 bp, Homo sapiens
caaaattctaagggg

SEQ ID NO: 1716972 - DNA, 15 bp, Homo sapiens
aaaattctaagggga

SEQ ID NO: 1716973 - DNA, 15 bp, Homo sapiens
aaattctaaggggaa

SEQ ID NO: 1716974 - DNA, 15 bp, Homo sapiens
aattctaaggggaat

SEQ ID NO: 1716975 - DNA, 15 bp, Homo sapiens
attctaaggggaatc

SEQ ID NO: 1716976 - DNA, 15 bp, Homo sapiens
ttctaaggggaatca

SEQ ID NO: 1716977 - DNA, 15 bp, Homo sapiens
tctaaggggaatcat

SEQ ID NO: 1716978 - DNA, 15 bp, Homo sapiens
ctaaggggaatcatt

SEQ ID NO: 1716979 - DNA, 15 bp, Homo sapiens
taaggggaatcattc

SEQ ID NO: 1716980 - DNA, 15 bp, Homo sapiens
aaggggaatcattct

SEQ ID NO: 1716981 - DNA, 15 bp, Homo sapiens
aggggaatcattcta

SEQ ID NO: 1716982 - DNA, 15 bp, Homo sapiens
ggggaatcattctat

SEQ ID NO: 1716983 - DNA, 15 bp, Homo sapiens
gggaatcattctata

SEQ ID NO: 1716984 - DNA, 15 bp, Homo sapiens
ggaatcattctatat

SEQ ID NO: 1716985 - DNA, 15 bp, Homo sapiens
gaatcattctatatg

SEQ ID NO: 1716986 - DNA, 15 bp, Homo sapiens
aatcattctatatgt

SEQ ID NO: 1716987 - DNA, 15 bp, Homo sapiens
atcattctatatgta

SEQ ID NO: 1716988 - DNA, 15 bp, Homo sapiens
tcattctatatgtag

SEQ ID NO: 1716989 - DNA, 15 bp, Homo sapiens
cattctatatgtagc

SEQ ID NO: 1716990 - DNA, 15 bp, Homo sapiens
attctatatgtagca

SEQ ID NO: 1716991 - DNA, 15 bp, Homo sapiens
ttctatatgtagcaa

SEQ ID NO: 1716992 - DNA, 15 bp, Homo sapiens
tctatatgtagcaaa

SEQ ID NO: 1716993 - DNA, 15 bp, Homo sapiens
ctatatgtagcaaag

SEQ ID NO: 1716994 - DNA, 15 bp, Homo sapiens
tatatgtagcaaagc

SEQ ID NO: 1716995 - DNA, 15 bp, Homo sapiens
atatgtagcaaagct

SEQ ID NO: 1716996 - DNA, 15 bp, Homo sapiens
tatgtagcaaagcta

SEQ ID NO: 1716997 - DNA, 15 bp, Homo sapiens
atgtagcaaagctat

SEQ ID NO: 1716998 - DNA, 15 bp, Homo sapiens
tgtagcaaagctatt

SEQ ID NO: 1716999 - DNA, 15 bp, Homo sapiens
gtagcaaagctattc

SEQ ID NO: 1717000 - DNA, 15 bp, Homo sapiens
tagcaaagctattct

SEQ ID NO: 1717001 - DNA, 15 bp, Homo sapiens
agcaaagctattctc

SEQ ID NO: 1717002 - DNA, 15 bp, Homo sapiens
gcaaagctattctca

SEQ ID NO: 1717003 - DNA, 15 bp, Homo sapiens
caaagctattctcaa

SEQ ID NO: 1717004 - DNA, 15 bp, Homo sapiens
aaagctattctcaag

SEQ ID NO: 1717005 - DNA, 15 bp, Homo sapiens
aagctattctcaaga

SEQ ID NO: 1717006 - DNA, 15 bp, Homo sapiens
agctattctcaagaa

SEQ ID NO: 1717007 - DNA, 15 bp, Homo sapiens
gctattctcaagaat

SEQ ID NO: 1717008 - DNA, 15 bp, Homo sapiens
ctattctcaagaatg

SEQ ID NO: 1717009 - DNA, 15 bp, Homo sapiens
tattctcaagaatga

SEQ ID NO: 1717010 - DNA, 15 bp, Homo sapiens
attctcaagaatgag

SEQ ID NO: 1717011 - DNA, 15 bp, Homo sapiens
ttctcaagaatgaga

SEQ ID NO: 1717012 - DNA, 15 bp, Homo sapiens
tctcaagaatgagag

SEQ ID NO: 1717013 - DNA, 15 bp, Homo sapiens
ctcaagaatgagaga

SEQ ID NO: 1717014 - DNA, 15 bp, Homo sapiens
tcaagaatgagagag

SEQ ID NO: 1717015 - DNA, 15 bp, Homo sapiens
caagaatgagagagg

SEQ ID NO: 1717016 - DNA, 15 bp, Homo sapiens
aagaatgagagaggt

SEQ ID NO: 1717017 - DNA, 15 bp, Homo sapiens
agaatgagagaggtc

SEQ ID NO: 1717018 - DNA, 15 bp, Homo sapiens
gaatgagagaggtct

SEQ ID NO: 1717019 - DNA, 15 bp, Homo sapiens
aatgagagaggtcta

SEQ ID NO: 1717020 - DNA, 15 bp, Homo sapiens
atgagagaggtctaa

SEQ ID NO: 1717021 - DNA, 15 bp, Homo sapiens
tgagagaggtctaaa

SEQ ID NO: 1717022 - DNA, 15 bp, Homo sapiens
gagagaggtctaaag

SEQ ID NO: 1717023 - DNA, 15 bp, Homo sapiens
agagaggtctaaaga

SEQ ID NO: 1717024 - DNA, 15 bp, Homo sapiens
gagaggtctaaagac

SEQ ID NO: 1717025 - DNA, 15 bp, Homo sapiens
agaggtctaaagaca

SEQ ID NO: 1717026 - DNA, 15 bp, Homo sapiens
gaggtctaaagacat

SEQ ID NO: 1717027 - DNA, 15 bp, Homo sapiens
aggtctaaagacatt

SEQ ID NO: 1717028 - DNA, 15 bp, Homo sapiens
ggtctaaagacattc

SEQ ID NO: 1717029 - DNA, 15 bp, Homo sapiens
gtctaaagacattct

SEQ ID NO: 1717030 - DNA, 15 bp, Homo sapiens
tctaaagacattctc

SEQ ID NO: 1717031 - DNA, 15 bp, Homo sapiens
ctaaagacattctca

SEQ ID NO: 1717032 - DNA, 15 bp, Homo sapiens
taaagacattctcag

SEQ ID NO: 1717033 - DNA, 15 bp, Homo sapiens
aaagacattctcagt

SEQ ID NO: 1717034 - DNA, 15 bp, Homo sapiens
aagacattctcagtc

SEQ ID NO: 1717035 - DNA, 15 bp, Homo sapiens
agacattctcagtca

SEQ ID NO: 1717036 - DNA, 15 bp, Homo sapiens
gacattctcagtcat

SEQ ID NO: 1717037 - DNA, 15 bp, Homo sapiens
acattctcagtcatg

SEQ ID NO: 1717038 - DNA, 15 bp, Homo sapiens
cattctcagtcatgc

SEQ ID NO: 1717039 - DNA, 15 bp, Homo sapiens
attctcagtcatgca

SEQ ID NO: 1717040 - DNA, 15 bp, Homo sapiens
ttctcagtcatgcag

SEQ ID NO: 1717041 - DNA, 15 bp, Homo sapiens
tctcagtcatgcagg

SEQ ID NO: 1717042 - DNA, 15 bp, Homo sapiens
ctcagtcatgcaggt

SEQ ID NO: 1717043 - DNA, 15 bp, Homo sapiens
tcagtcatgcaggtc

SEQ ID NO: 1717044 - DNA, 15 bp, Homo sapiens
cagtcatgcaggtct

SEQ ID NO: 1717045 - DNA, 15 bp, Homo sapiens
agtcatgcaggtctc

SEQ ID NO: 1717046 - DNA, 15 bp, Homo sapiens
gtcatgcaggtctca

SEQ ID NO: 1717047 - DNA, 15 bp, Homo sapiens
tcatgcaggtctcaa

SEQ ID NO: 1717048 - DNA, 15 bp, Homo sapiens
catgcaggtctcaac

SEQ ID NO: 1717049 - DNA, 15 bp, Homo sapiens
atgcaggtctcaaca

SEQ ID NO: 1717050 - DNA, 15 bp, Homo sapiens
tgcaggtctcaacac

SEQ ID NO: 1717051 - DNA, 15 bp, Homo sapiens
gcaggtctcaacacc

SEQ ID NO: 1717052 - DNA, 15 bp, Homo sapiens
caggtctcaacacct

SEQ ID NO: 1717053 - DNA, 15 bp, Homo sapiens
aggtctcaacacctc

SEQ ID NO: 1717054 - DNA, 15 bp, Homo sapiens
ggtctcaacacctct

SEQ ID NO: 1717055 - DNA, 15 bp, Homo sapiens
gtctcaacacctcta

SEQ ID NO: 1717056 - DNA, 15 bp, Homo sapiens
tctcaacacctctac

SEQ ID NO: 1717057 - DNA, 15 bp, Homo sapiens
ctcaacacctctact

SEQ ID NO: 1717058 - DNA, 15 bp, Homo sapiens
tcaacacctctactc

SEQ ID NO: 1717059 - DNA, 15 bp, Homo sapiens
caacacctctactcc

SEQ ID NO: 1717060 - DNA, 15 bp, Homo sapiens
aacacctctactccc

SEQ ID NO: 1717061 - DNA, 15 bp, Homo sapiens
acacctctactcccc

SEQ ID NO: 1717062 - DNA, 15 bp, Homo sapiens
cacctctactcccca

SEQ ID NO: 1717063 - DNA, 15 bp, Homo sapiens
acctctactccccat

SEQ ID NO: 1717064 - DNA, 15 bp, Homo sapiens
cctctactccccatc

SEQ ID NO: 1717065 - DNA, 15 bp, Homo sapiens
ctctactccccatct

SEQ ID NO: 1717066 - DNA, 15 bp, Homo sapiens
tctactccccatctt

SEQ ID NO: 1717067 - DNA, 15 bp, Homo sapiens
ctactccccatcttt

SEQ ID NO: 1717068 - DNA, 15 bp, Homo sapiens
tactccccatctttt

SEQ ID NO: 1717069 - DNA, 15 bp, Homo sapiens
actccccatcttttc

SEQ ID NO: 1717070 - DNA, 15 bp, Homo sapiens
ctccccatcttttct

SEQ ID NO: 1717071 - DNA, 15 bp, Homo sapiens
tccccatcttttctc

SEQ ID NO: 1717072 - DNA, 15 bp, Homo sapiens
ccccatcttttctca

SEQ ID NO: 1717073 - DNA, 15 bp, Homo sapiens
cccatcttttctcag

SEQ ID NO: 1717074 - DNA, 15 bp, Homo sapiens
ccatcttttctcaga

SEQ ID NO: 1717075 - DNA, 15 bp, Homo sapiens
catcttttctcagaa

SEQ ID NO: 1717076 - DNA, 15 bp, Homo sapiens
atcttttctcagaaa

SEQ ID NO: 1717077 - DNA, 15 bp, Homo sapiens
tcttttctcagaaag

SEQ ID NO: 1717078 - DNA, 15 bp, Homo sapiens
cttttctcagaaagc

SEQ ID NO: 1717079 - DNA, 15 bp, Homo sapiens
ttttctcagaaagcc

SEQ ID NO: 1717080 - DNA, 15 bp, Homo sapiens
tttctcagaaagcca

SEQ ID NO: 1717081 - DNA, 15 bp, Homo sapiens
ttctcagaaagccac

SEQ ID NO: 1717082 - DNA, 15 bp, Homo sapiens
tctcagaaagccaca

SEQ ID NO: 1717083 - DNA, 15 bp, Homo sapiens
ctcagaaagccacaa

SEQ ID NO: 1717084 - DNA, 15 bp, Homo sapiens
tcagaaagccacaaa

SEQ ID NO: 1717085 - DNA, 15 bp, Homo sapiens
cagaaagccacaaaa

SEQ ID NO: 1717086 - DNA, 15 bp, Homo sapiens
agaaagccacaaaag

SEQ ID NO: 1717087 - DNA, 15 bp, Homo sapiens
gaaagccacaaaagg

SEQ ID NO: 1717088 - DNA, 15 bp, Homo sapiens
aaagccacaaaaggg

SEQ ID NO: 1717089 - DNA, 15 bp, Homo sapiens
aagccacaaaagggg

SEQ ID NO: 1717090 - DNA, 15 bp, Homo sapiens
agccacaaaaggggg

SEQ ID NO: 1717091 - DNA, 15 bp, Homo sapiens
gccacaaaagggggc

SEQ ID NO: 1717092 - DNA, 15 bp, Homo sapiens
ccacaaaagggggct

SEQ ID NO: 1717093 - DNA, 15 bp, Homo sapiens
cacaaaagggggctt

SEQ ID NO: 1717094 - DNA, 15 bp, Homo sapiens
acaaaagggggcttt

SEQ ID NO: 1717095 - DNA, 15 bp, Homo sapiens
caaaagggggctttt

SEQ ID NO: 1717096 - DNA, 15 bp, Homo sapiens
aaaagggggcttttt

SEQ ID NO: 1717097 - DNA, 15 bp, Homo sapiens
aaagggggctttttt

SEQ ID NO: 1717098 - DNA, 15 bp, Homo sapiens
aagggggcttttttt

SEQ ID NO: 1717099 - DNA, 15 bp, Homo sapiens
agggggctttttttt

SEQ ID NO: 1717100 - DNA, 15 bp, Homo sapiens
gggggcttttttttt

SEQ ID NO: 1717101 - DNA, 15 bp, Homo sapiens
ggggcttttttttta

SEQ ID NO: 1717102 - DNA, 15 bp, Homo sapiens
gggctttttttttaa

SEQ ID NO: 1717103 - DNA, 15 bp, Homo sapiens
ggctttttttttaaa

SEQ ID NO: 1717104 - DNA, 15 bp, Homo sapiens
gctttttttttaaaa

SEQ ID NO: 1717105 - DNA, 15 bp, Homo sapiens
ctttttttttaaaaa

SEQ ID NO: 1717106 - DNA, 15 bp, Homo sapiens
ttttttttaaaaaat

SEQ ID NO: 1717107 - DNA, 15 bp, Homo sapiens
ttttaaaaaataagg

SEQ ID NO: 1717108 - DNA, 15 bp, Homo sapiens
tttaaaaaataaggt

SEQ ID NO: 1717109 - DNA, 15 bp, Homo sapiens
ttaaaaaataaggtc

SEQ ID NO: 1717110 - DNA, 15 bp, Homo sapiens
taaaaaataaggtca

SEQ ID NO: 1717111 - DNA, 15 bp, Homo sapiens
aaaaaataaggtcac

SEQ ID NO: 1717112 - DNA, 15 bp, Homo sapiens
aaaaataaggtcaca

SEQ ID NO: 1717113 - DNA, 15 bp, Homo sapiens
aaaataaggtcacag

SEQ ID NO: 1717114 - DNA, 15 bp, Homo sapiens
aaataaggtcacaga

SEQ ID NO: 1717115 - DNA, 15 bp, Homo sapiens
aataaggtcacagat

SEQ ID NO: 1717116 - DNA, 15 bp, Homo sapiens
ataaggtcacagata

SEQ ID NO: 1717117 - DNA, 15 bp, Homo sapiens
taaggtcacagataa

SEQ ID NO: 1717118 - DNA, 15 bp, Homo sapiens
aaggtcacagataaa

SEQ ID NO: 1717119 - DNA, 15 bp, Homo sapiens
aggtcacagataaaa

SEQ ID NO: 1717120 - DNA, 15 bp, Homo sapiens
ggtcacagataaaaa

SEQ ID NO: 1717121 - DNA, 15 bp, Homo sapiens
gtcacagataaaaaa

SEQ ID NO: 1717122 - DNA, 15 bp, Homo sapiens
tcacagataaaaaaa

SEQ ID NO: 1717123 - DNA, 15 bp, Homo sapiens
cacagataaaaaaaa

SEQ ID NO: 1717124 - DNA, 15 bp, Homo sapiens
acagataaaaaaaat

SEQ ID NO: 1717125 - DNA, 15 bp, Homo sapiens
cagataaaaaaaata

SEQ ID NO: 1717126 - DNA, 15 bp, Homo sapiens
agataaaaaaaatag

SEQ ID NO: 1717127 - DNA, 15 bp, Homo sapiens
gataaaaaaaatagg

SEQ ID NO: 1717128 - DNA, 15 bp, Homo sapiens
ataaaaaaaatagga

SEQ ID NO: 1717129 - DNA, 15 bp, Homo sapiens
taaaaaaaataggaa

SEQ ID NO: 1717130 - DNA, 15 bp, Homo sapiens
aaaaaaaataggaag

SEQ ID NO: 1717131 - DNA, 15 bp, Homo sapiens
aaaaaaataggaaga

SEQ ID NO: 1717132 - DNA, 15 bp, Homo sapiens
aaaaaataggaagat

SEQ ID NO: 1717133 - DNA, 15 bp, Homo sapiens
aaaaataggaagata

SEQ ID NO: 1717134 - DNA, 15 bp, Homo sapiens
aaaataggaagatat

SEQ ID NO: 1717135 - DNA, 15 bp, Homo sapiens
aaataggaagatatg

SEQ ID NO: 1717136 - DNA, 15 bp, Homo sapiens
aataggaagatatgg

SEQ ID NO: 1717137 - DNA, 15 bp, Homo sapiens
ataggaagatatggg

SEQ ID NO: 1717138 - DNA, 15 bp, Homo sapiens
taggaagatatggga

SEQ ID NO: 1717139 - DNA, 15 bp, Homo sapiens
aggaagatatgggat

SEQ ID NO: 1717140 - DNA, 15 bp, Homo sapiens
ggaagatatgggatg

SEQ ID NO: 1717141 - DNA, 15 bp, Homo sapiens
gaagatatgggatgt

SEQ ID NO: 1717142 - DNA, 15 bp, Homo sapiens
aagatatgggatgta

SEQ ID NO: 1717143 - DNA, 15 bp, Homo sapiens
agatatgggatgtaa

SEQ ID NO: 1717144 - DNA, 15 bp, Homo sapiens
gatatgggatgtaag

SEQ ID NO: 1717145 - DNA, 15 bp, Homo sapiens
atatgggatgtaaga

SEQ ID NO: 1717146 - DNA, 15 bp, Homo sapiens
tatgggatgtaagaa

SEQ ID NO: 1717147 - DNA, 15 bp, Homo sapiens
atgggatgtaagaac

SEQ ID NO: 1717148 - DNA, 15 bp, Homo sapiens
tgggatgtaagaaca

SEQ ID NO: 1717149 - DNA, 15 bp, Homo sapiens
gggatgtaagaacag

SEQ ID NO: 1717150 - DNA, 15 bp, Homo sapiens
ggatgtaagaacaga

SEQ ID NO: 1717151 - DNA, 15 bp, Homo sapiens
gatgtaagaacagat

SEQ ID NO: 1717152 - DNA, 15 bp, Homo sapiens
atgtaagaacagatg

SEQ ID NO: 1717153 - DNA, 15 bp, Homo sapiens
tgtaagaacagatga

SEQ ID NO: 1717154 - DNA, 15 bp, Homo sapiens
gtaagaacagatgac

SEQ ID NO: 1717155 - DNA, 15 bp, Homo sapiens
taagaacagatgacc

SEQ ID NO: 1717156 - DNA, 15 bp, Homo sapiens
aagaacagatgacct

SEQ ID NO: 1717157 - DNA, 15 bp, Homo sapiens
agaacagatgaccta

SEQ ID NO: 1717158 - DNA, 15 bp, Homo sapiens
gaacagatgacctaa

SEQ ID NO: 1717159 - DNA, 15 bp, Homo sapiens
aacagatgacctaac

SEQ ID NO: 1717160 - DNA, 15 bp, Homo sapiens
acagatgacctaact

SEQ ID NO: 1717161 - DNA, 15 bp, Homo sapiens
cagatgacctaactc

SEQ ID NO: 1717162 - DNA, 15 bp, Homo sapiens
agatgacctaactca

SEQ ID NO: 1717163 - DNA, 15 bp, Homo sapiens
gatgacctaactcaa

SEQ ID NO: 1717164 - DNA, 15 bp, Homo sapiens
atgacctaactcaag

SEQ ID NO: 1717165 - DNA, 15 bp, Homo sapiens
tgacctaactcaaga

SEQ ID NO: 1717166 - DNA, 15 bp, Homo sapiens
gacctaactcaagaa

SEQ ID NO: 1717167 - DNA, 15 bp, Homo sapiens
acctaactcaagaat

SEQ ID NO: 1717168 - DNA, 15 bp, Homo sapiens
cctaactcaagaatg

SEQ ID NO: 1717169 - DNA, 15 bp, Homo sapiens
ctaactcaagaatga

SEQ ID NO: 1717170 - DNA, 15 bp, Homo sapiens
taactcaagaatgag

SEQ ID NO: 1717171 - DNA, 15 bp, Homo sapiens
aactcaagaatgagg

SEQ ID NO: 1717172 - DNA, 15 bp, Homo sapiens
actcaagaatgaggt

SEQ ID NO: 1717173 - DNA, 15 bp, Homo sapiens
ctcaagaatgaggtg

SEQ ID NO: 1717174 - DNA, 15 bp, Homo sapiens
tcaagaatgaggtgc

SEQ ID NO: 1717175 - DNA, 15 bp, Homo sapiens
caagaatgaggtgct

SEQ ID NO: 1717176 - DNA, 15 bp, Homo sapiens
aagaatgaggtgctg

SEQ ID NO: 1717177 - DNA, 15 bp, Homo sapiens
agaatgaggtgctgg

SEQ ID NO: 1717178 - DNA, 15 bp, Homo sapiens
gaatgaggtgctggg

SEQ ID NO: 1717179 - DNA, 15 bp, Homo sapiens
aatgaggtgctggga

SEQ ID NO: 1717180 - DNA, 15 bp, Homo sapiens
atgaggtgctgggaa

SEQ ID NO: 1717181 - DNA, 15 bp, Homo sapiens
tgaggtgctgggaat

SEQ ID NO: 1717182 - DNA, 15 bp, Homo sapiens
gaggtgctgggaatc

SEQ ID NO: 1717183 - DNA, 15 bp, Homo sapiens
aggtgctgggaatct

SEQ ID NO: 1717184 - DNA, 15 bp, Homo sapiens
ggtgctgggaatctc

SEQ ID NO: 1717185 - DNA, 15 bp, Homo sapiens
gtgctgggaatctcc

SEQ ID NO: 1717186 - DNA, 15 bp, Homo sapiens
tgctgggaatctcca

SEQ ID NO: 1717187 - DNA, 15 bp, Homo sapiens
gctgggaatctccag

SEQ ID NO: 1717188 - DNA, 15 bp, Homo sapiens
ctgggaatctccagg

SEQ ID NO: 1717189 - DNA, 15 bp, Homo sapiens
tgggaatctccagga

SEQ ID NO: 1717190 - DNA, 15 bp, Homo sapiens
gggaatctccaggat

SEQ ID NO: 1717191 - DNA, 15 bp, Homo sapiens
ggaatctccaggatg

SEQ ID NO: 1717192 - DNA, 15 bp, Homo sapiens
gaatctccaggatga

SEQ ID NO: 1717193 - DNA, 15 bp, Homo sapiens
aatctccaggatgat

SEQ ID NO: 1717194 - DNA, 15 bp, Homo sapiens
atctccaggatgatt

SEQ ID NO: 1717195 - DNA, 15 bp, Homo sapiens
tctccaggatgatta

SEQ ID NO: 1717196 - DNA, 15 bp, Homo sapiens
ctccaggatgattag

SEQ ID NO: 1717197 - DNA, 15 bp, Homo sapiens
tccaggatgattagg

SEQ ID NO: 1717198 - DNA, 15 bp, Homo sapiens
ccaggatgattagga

SEQ ID NO: 1717199 - DNA, 15 bp, Homo sapiens
caggatgattaggaa

SEQ ID NO: 1717200 - DNA, 15 bp, Homo sapiens
aggatgattaggaag

SEQ ID NO: 1717201 - DNA, 15 bp, Homo sapiens
ggatgattaggaagg

SEQ ID NO: 1717202 - DNA, 15 bp, Homo sapiens
gatgattaggaagga

SEQ ID NO: 1717203 - DNA, 15 bp, Homo sapiens
atgattaggaaggag

SEQ ID NO: 1717204 - DNA, 15 bp, Homo sapiens
tgattaggaaggaga

SEQ ID NO: 1717205 - DNA, 15 bp, Homo sapiens
gattaggaaggagat

SEQ ID NO: 1717206 - DNA, 15 bp, Homo sapiens
attaggaaggagatc

SEQ ID NO: 1717207 - DNA, 15 bp, Homo sapiens
ttaggaaggagatcc

SEQ ID NO: 1717208 - DNA, 15 bp, Homo sapiens
taggaaggagatccc

SEQ ID NO: 1717209 - DNA, 15 bp, Homo sapiens
aggaaggagatccca

SEQ ID NO: 1717210 - DNA, 15 bp, Homo sapiens
ggaaggagatcccag

SEQ ID NO: 1717211 - DNA, 15 bp, Homo sapiens
gaaggagatcccagg

SEQ ID NO: 1717212 - DNA, 15 bp, Homo sapiens
aaggagatcccagga

SEQ ID NO: 1717213 - DNA, 15 bp, Homo sapiens
aggagatcccaggat

SEQ ID NO: 1717214 - DNA, 15 bp, Homo sapiens
ggagatcccaggatt

SEQ ID NO: 1717215 - DNA, 15 bp, Homo sapiens
gagatcccaggatta

SEQ ID NO: 1717216 - DNA, 15 bp, Homo sapiens
agatcccaggattac

SEQ ID NO: 1717217 - DNA, 15 bp, Homo sapiens
gatcccaggattaca

SEQ ID NO: 1717218 - DNA, 15 bp, Homo sapiens
atcccaggattacag

SEQ ID NO: 1717219 - DNA, 15 bp, Homo sapiens
tcccaggattacagg

SEQ ID NO: 1717220 - DNA, 15 bp, Homo sapiens
cccaggattacaggt

SEQ ID NO: 1717221 - DNA, 15 bp, Homo sapiens
ccaggattacaggtg

SEQ ID NO: 1717222 - DNA, 15 bp, Homo sapiens
caggattacaggtgt

SEQ ID NO: 1717223 - DNA, 15 bp, Homo sapiens
gattacaggtgtgct

SEQ ID NO: 1717224 - DNA, 15 bp, Homo sapiens
attacaggtgtgctg

SEQ ID NO: 1717225 - DNA, 15 bp, Homo sapiens
ttacaggtgtgctgt

SEQ ID NO: 1717226 - DNA, 15 bp, Homo sapiens
tacaggtgtgctgta

SEQ ID NO: 1717227 - DNA, 15 bp, Homo sapiens
acaggtgtgctgtac

SEQ ID NO: 1717228 - DNA, 15 bp, Homo sapiens
caggtgtgctgtacc

SEQ ID NO: 1717229 - DNA, 15 bp, Homo sapiens
aggtgtgctgtaccc

SEQ ID NO: 1717230 - DNA, 15 bp, Homo sapiens
ggtgtgctgtaccca

SEQ ID NO: 1717231 - DNA, 15 bp, Homo sapiens
gtgtgctgtacccag

SEQ ID NO: 1717232 - DNA, 15 bp, Homo sapiens
tgtgctgtacccaga

SEQ ID NO: 1717233 - DNA, 15 bp, Homo sapiens
gtgctgtacccagag

SEQ ID NO: 1717234 - DNA, 15 bp, Homo sapiens
tgctgtacccagagg

SEQ ID NO: 1717235 - DNA, 15 bp, Homo sapiens
gctgtacccagagga

SEQ ID NO: 1717236 - DNA, 15 bp, Homo sapiens
ctgtacccagaggaa

SEQ ID NO: 1717237 - DNA, 15 bp, Homo sapiens
tgtacccagaggaag

SEQ ID NO: 1717238 - DNA, 15 bp, Homo sapiens
gtacccagaggaagt

SEQ ID NO: 1717239 - DNA, 15 bp, Homo sapiens
tacccagaggaagta

SEQ ID NO: 1717240 - DNA, 15 bp, Homo sapiens
acccagaggaagtag

SEQ ID NO: 1717241 - DNA, 15 bp, Homo sapiens
cccagaggaagtagt

SEQ ID NO: 1717242 - DNA, 15 bp, Homo sapiens
ccagaggaagtagtc

SEQ ID NO: 1717243 - DNA, 15 bp, Homo sapiens
cagaggaagtagtca

SEQ ID NO: 1717244 - DNA, 15 bp, Homo sapiens
agaggaagtagtcag

SEQ ID NO: 1717245 - DNA, 15 bp, Homo sapiens
gaggaagtagtcagc

SEQ ID NO: 1717246 - DNA, 15 bp, Homo sapiens
aggaagtagtcagct

SEQ ID NO: 1717247 - DNA, 15 bp, Homo sapiens
ggaagtagtcagcta

SEQ ID NO: 1717248 - DNA, 15 bp, Homo sapiens
gaagtagtcagctag

SEQ ID NO: 1717249 - DNA, 15 bp, Homo sapiens
aagtagtcagctaga

SEQ ID NO: 1717250 - DNA, 15 bp, Homo sapiens
agtagtcagctagat

SEQ ID NO: 1717251 - DNA, 15 bp, Homo sapiens
gtagtcagctagatt

SEQ ID NO: 1717252 - DNA, 15 bp, Homo sapiens
tagtcagctagattg

SEQ ID NO: 1717253 - DNA, 15 bp, Homo sapiens
agtcagctagattga

SEQ ID NO: 1717254 - DNA, 15 bp, Homo sapiens
gtcagctagattgag

SEQ ID NO: 1717255 - DNA, 15 bp, Homo sapiens
tcagctagattgagg

SEQ ID NO: 1717256 - DNA, 15 bp, Homo sapiens
cagctagattgaggc

SEQ ID NO: 1717257 - DNA, 15 bp, Homo sapiens
agctagattgaggca

SEQ ID NO: 1717258 - DNA, 15 bp, Homo sapiens
gctagattgaggcag

SEQ ID NO: 1717259 - DNA, 15 bp, Homo sapiens
ctagattgaggcagg

SEQ ID NO: 1717260 - DNA, 15 bp, Homo sapiens
tagattgaggcaggg

SEQ ID NO: 1717261 - DNA, 15 bp, Homo sapiens
agattgaggcaggga

SEQ ID NO: 1717262 - DNA, 15 bp, Homo sapiens
gattgaggcagggaa

SEQ ID NO: 1717263 - DNA, 15 bp, Homo sapiens
attgaggcagggaaa

SEQ ID NO: 1717264 - DNA, 15 bp, Homo sapiens
ttgaggcagggaaat

SEQ ID NO: 1717265 - DNA, 15 bp, Homo sapiens
tgaggcagggaaatg

SEQ ID NO: 1717266 - DNA, 15 bp, Homo sapiens
gaggcagggaaatgg

SEQ ID NO: 1717267 - DNA, 15 bp, Homo sapiens
aggcagggaaatggg

SEQ ID NO: 1717268 - DNA, 15 bp, Homo sapiens
ggcagggaaatgggt

SEQ ID NO: 1717269 - DNA, 15 bp, Homo sapiens
gcagggaaatgggtt

SEQ ID NO: 1717270 - DNA, 15 bp, Homo sapiens
cagggaaatgggttc

SEQ ID NO: 1717271 - DNA, 15 bp, Homo sapiens
agggaaatgggttct

SEQ ID NO: 1717272 - DNA, 15 bp, Homo sapiens
gggaaatgggttctg

SEQ ID NO: 1717273 - DNA, 15 bp, Homo sapiens
ggaaatgggttctga

SEQ ID NO: 1717274 - DNA, 15 bp, Homo sapiens
gaaatgggttctgag

SEQ ID NO: 1717275 - DNA, 15 bp, Homo sapiens
aaatgggttctgaga

SEQ ID NO: 1717276 - DNA, 15 bp, Homo sapiens
aatgggttctgagag

SEQ ID NO: 1717277 - DNA, 15 bp, Homo sapiens
atgggttctgagagg

SEQ ID NO: 1717278 - DNA, 15 bp, Homo sapiens
tgggttctgagagga

SEQ ID NO: 1717279 - DNA, 15 bp, Homo sapiens
gggttctgagaggaa

SEQ ID NO: 1717280 - DNA, 15 bp, Homo sapiens
ggttctgagaggaat

SEQ ID NO: 1717281 - DNA, 15 bp, Homo sapiens
gttctgagaggaatg

SEQ ID NO: 1717282 - DNA, 15 bp, Homo sapiens
ttctgagaggaatgt

SEQ ID NO: 1717283 - DNA, 15 bp, Homo sapiens
tctgagaggaatgtc

SEQ ID NO: 1717284 - DNA, 15 bp, Homo sapiens
ctgagaggaatgtcc

SEQ ID NO: 1717285 - DNA, 15 bp, Homo sapiens
tgagaggaatgtccc

SEQ ID NO: 1717286 - DNA, 15 bp, Homo sapiens
gagaggaatgtcccc

SEQ ID NO: 1717287 - DNA, 15 bp, Homo sapiens
agaggaatgtccccc

SEQ ID NO: 1717288 - DNA, 15 bp, Homo sapiens
gaggaatgtccccca

SEQ ID NO: 1717289 - DNA, 15 bp, Homo sapiens
aggaatgtcccccag

SEQ ID NO: 1717290 - DNA, 15 bp, Homo sapiens
ggaatgtcccccaga

SEQ ID NO: 1717291 - DNA, 15 bp, Homo sapiens
gaatgtcccccagaa

SEQ ID NO: 1717292 - DNA, 15 bp, Homo sapiens
aatgtcccccagaaa

SEQ ID NO: 1717293 - DNA, 15 bp, Homo sapiens
atgtcccccagaaaa

SEQ ID NO: 1717294 - DNA, 15 bp, Homo sapiens
tgtcccccagaaaaa

SEQ ID NO: 1717295 - DNA, 15 bp, Homo sapiens
gtcccccagaaaaac

SEQ ID NO: 1717296 - DNA, 15 bp, Homo sapiens
tcccccagaaaaaca

SEQ ID NO: 1717297 - DNA, 15 bp, Homo sapiens
cccccagaaaaacat

SEQ ID NO: 1717298 - DNA, 15 bp, Homo sapiens
ccccagaaaaacatg

SEQ ID NO: 1717299 - DNA, 15 bp, Homo sapiens
cccagaaaaacatgg

SEQ ID NO: 1717300 - DNA, 15 bp, Homo sapiens
ccagaaaaacatggt

SEQ ID NO: 1717301 - DNA, 15 bp, Homo sapiens
cagaaaaacatggtg

SEQ ID NO: 1717302 - DNA, 15 bp, Homo sapiens
agaaaaacatggtgc

SEQ ID NO: 1717303 - DNA, 15 bp, Homo sapiens
gaaaaacatggtgct

SEQ ID NO: 1717304 - DNA, 15 bp, Homo sapiens
aaaaacatggtgctg

SEQ ID NO: 1717305 - DNA, 15 bp, Homo sapiens
aaaacatggtgctgc

SEQ ID NO: 1717306 - DNA, 15 bp, Homo sapiens
aaacatggtgctgct

SEQ ID NO: 1717307 - DNA, 15 bp, Homo sapiens
aacatggtgctgcta

SEQ ID NO: 1717308 - DNA, 15 bp, Homo sapiens
acatggtgctgctag

SEQ ID NO: 1717309 - DNA, 15 bp, Homo sapiens
catggtgctgctaga

SEQ ID NO: 1717310 - DNA, 15 bp, Homo sapiens
atggtgctgctagaa

SEQ ID NO: 1717311 - DNA, 15 bp, Homo sapiens
tggtgctgctagaat

SEQ ID NO: 1717312 - DNA, 15 bp, Homo sapiens
ggtgctgctagaatg

SEQ ID NO: 1717313 - DNA, 15 bp, Homo sapiens
gtgctgctagaatgc

SEQ ID NO: 1717314 - DNA, 15 bp, Homo sapiens
tgctgctagaatgcc

SEQ ID NO: 1717315 - DNA, 15 bp, Homo sapiens
gctgctagaatgcct

SEQ ID NO: 1717316 - DNA, 15 bp, Homo sapiens
ctgctagaatgcctg

SEQ ID NO: 1717317 - DNA, 15 bp, Homo sapiens
tgctagaatgcctgg

SEQ ID NO: 1717318 - DNA, 15 bp, Homo sapiens
gctagaatgcctggt

SEQ ID NO: 1717319 - DNA, 15 bp, Homo sapiens
ctagaatgcctggtg

SEQ ID NO: 1717320 - DNA, 15 bp, Homo sapiens
tagaatgcctggtgg

SEQ ID NO: 1717321 - DNA, 15 bp, Homo sapiens
agaatgcctggtggg

SEQ ID NO: 1717322 - DNA, 15 bp, Homo sapiens
gaatgcctggtgggt

SEQ ID NO: 1717323 - DNA, 15 bp, Homo sapiens
aatgcctggtgggtt

SEQ ID NO: 1717324 - DNA, 15 bp, Homo sapiens
atgcctggtgggttt

SEQ ID NO: 1717325 - DNA, 15 bp, Homo sapiens
tgcctggtgggtttg

SEQ ID NO: 1717326 - DNA, 15 bp, Homo sapiens
gcctggtgggtttga

SEQ ID NO: 1717327 - DNA, 15 bp, Homo sapiens
cctggtgggtttgaa

SEQ ID NO: 1717328 - DNA, 15 bp, Homo sapiens
ctggtgggtttgaat

SEQ ID NO: 1717329 - DNA, 15 bp, Homo sapiens
tggtgggtttgaatg

SEQ ID NO: 1717330 - DNA, 15 bp, Homo sapiens
ggtgggtttgaatgc

SEQ ID NO: 1717331 - DNA, 15 bp, Homo sapiens
gtgggtttgaatgct

SEQ ID NO: 1717332 - DNA, 15 bp, Homo sapiens
tgggtttgaatgctg

SEQ ID NO: 1717333 - DNA, 15 bp, Homo sapiens
gggtttgaatgctga

SEQ ID NO: 1717334 - DNA, 15 bp, Homo sapiens
ggtttgaatgctgag

SEQ ID NO: 1717335 - DNA, 15 bp, Homo sapiens
gtttgaatgctgaga

SEQ ID NO: 1717336 - DNA, 15 bp, Homo sapiens
tttgaatgctgagag

SEQ ID NO: 1717337 - DNA, 15 bp, Homo sapiens
ttgaatgctgagaga

SEQ ID NO: 1717338 - DNA, 15 bp, Homo sapiens
tgaatgctgagagaa

SEQ ID NO: 1717339 - DNA, 15 bp, Homo sapiens
gaatgctgagagaag

SEQ ID NO: 1717340 - DNA, 15 bp, Homo sapiens
aatgctgagagaaga

SEQ ID NO: 1717341 - DNA, 15 bp, Homo sapiens
atgctgagagaagac

SEQ ID NO: 1717342 - DNA, 15 bp, Homo sapiens
tgctgagagaagaca

SEQ ID NO: 1717343 - DNA, 15 bp, Homo sapiens
gctgagagaagacag

SEQ ID NO: 1717344 - DNA, 15 bp, Homo sapiens
ctgagagaagacaga

SEQ ID NO: 1717345 - DNA, 15 bp, Homo sapiens
tgagagaagacagaa

SEQ ID NO: 1717346 - DNA, 15 bp, Homo sapiens
gagagaagacagaac

SEQ ID NO: 1717347 - DNA, 15 bp, Homo sapiens
agagaagacagaacc

SEQ ID NO: 1717348 - DNA, 15 bp, Homo sapiens
gagaagacagaaccc

SEQ ID NO: 1717349 - DNA, 15 bp, Homo sapiens
agaagacagaacccc

SEQ ID NO: 1717350 - DNA, 15 bp, Homo sapiens
gaagacagaaccccc

SEQ ID NO: 1717351 - DNA, 15 bp, Homo sapiens
aagacagaaccccct

SEQ ID NO: 1717352 - DNA, 15 bp, Homo sapiens
agacagaaccccctg

SEQ ID NO: 1717353 - DNA, 15 bp, Homo sapiens
gacagaaccccctgc

SEQ ID NO: 1717354 - DNA, 15 bp, Homo sapiens
acagaaccccctgct

SEQ ID NO: 1717355 - DNA, 15 bp, Homo sapiens
cagaaccccctgcta

SEQ ID NO: 1717356 - DNA, 15 bp, Homo sapiens
agaaccccctgctag

SEQ ID NO: 1717357 - DNA, 15 bp, Homo sapiens
gaaccccctgctaga

SEQ ID NO: 1717358 - DNA, 15 bp, Homo sapiens
aaccccctgctagag

SEQ ID NO: 1717359 - DNA, 15 bp, Homo sapiens
accccctgctagagt

SEQ ID NO: 1717360 - DNA, 15 bp, Homo sapiens
ccccctgctagagtt

SEQ ID NO: 1717361 - DNA, 15 bp, Homo sapiens
cccctgctagagttt

SEQ ID NO: 1717362 - DNA, 15 bp, Homo sapiens
ccctgctagagtttg

SEQ ID NO: 1717363 - DNA, 15 bp, Homo sapiens
cctgctagagtttga

SEQ ID NO: 1717364 - DNA, 15 bp, Homo sapiens
ctgctagagtttgag

SEQ ID NO: 1717365 - DNA, 15 bp, Homo sapiens
tgctagagtttgagg

SEQ ID NO: 1717366 - DNA, 15 bp, Homo sapiens
gctagagtttgaggg

SEQ ID NO: 1717367 - DNA, 15 bp, Homo sapiens
ctagagtttgagggt

SEQ ID NO: 1717368 - DNA, 15 bp, Homo sapiens
tagagtttgagggta

SEQ ID NO: 1717369 - DNA, 15 bp, Homo sapiens
agagtttgagggtaa

SEQ ID NO: 1717370 - DNA, 15 bp, Homo sapiens
gagtttgagggtaag

SEQ ID NO: 1717371 - DNA, 15 bp, Homo sapiens
agtttgagggtaagt

SEQ ID NO: 1717372 - DNA, 15 bp, Homo sapiens
gtttgagggtaagtt

SEQ ID NO: 1717373 - DNA, 15 bp, Homo sapiens
tttgagggtaagtta

SEQ ID NO: 1717374 - DNA, 15 bp, Homo sapiens
ttgagggtaagttag

SEQ ID NO: 1717375 - DNA, 15 bp, Homo sapiens
tgagggtaagttagc

SEQ ID NO: 1717376 - DNA, 15 bp, Homo sapiens
gagggtaagttagca

SEQ ID NO: 1717377 - DNA, 15 bp, Homo sapiens
agggtaagttagcaa

SEQ ID NO: 1717378 - DNA, 15 bp, Homo sapiens
gggtaagttagcaat

SEQ ID NO: 1717379 - DNA, 15 bp, Homo sapiens
ggtaagttagcaatg

SEQ ID NO: 1717380 - DNA, 15 bp, Homo sapiens
gtaagttagcaatgc

SEQ ID NO: 1717381 - DNA, 15 bp, Homo sapiens
taagttagcaatgcg

SEQ ID NO: 1717382 - DNA, 15 bp, Homo sapiens
aagttagcaatgcgt

SEQ ID NO: 1717383 - DNA, 15 bp, Homo sapiens
agttagcaatgcgta

SEQ ID NO: 1717384 - DNA, 15 bp, Homo sapiens
gttagcaatgcgtaa

SEQ ID NO: 1717385 - DNA, 15 bp, Homo sapiens
ttagcaatgcgtaat

SEQ ID NO: 1717386 - DNA, 15 bp, Homo sapiens
tagcaatgcgtaata

SEQ ID NO: 1717387 - DNA, 15 bp, Homo sapiens
agcaatgcgtaatag

SEQ ID NO: 1717388 - DNA, 15 bp, Homo sapiens
gcaatgcgtaataga

SEQ ID NO: 1717389 - DNA, 15 bp, Homo sapiens
caatgcgtaatagaa

SEQ ID NO: 1717390 - DNA, 15 bp, Homo sapiens
aatgcgtaatagaag

SEQ ID NO: 1717391 - DNA, 15 bp, Homo sapiens
atgcgtaatagaaga

SEQ ID NO: 1717392 - DNA, 15 bp, Homo sapiens
tgcgtaatagaagac

SEQ ID NO: 1717393 - DNA, 15 bp, Homo sapiens
gcgtaatagaagaca

SEQ ID NO: 1717394 - DNA, 15 bp, Homo sapiens
cgtaatagaagacaa

SEQ ID NO: 1717395 - DNA, 15 bp, Homo sapiens
gtaatagaagacaaa

SEQ ID NO: 1717396 - DNA, 15 bp, Homo sapiens
taatagaagacaaag

SEQ ID NO: 1717397 - DNA, 15 bp, Homo sapiens
aatagaagacaaaga

SEQ ID NO: 1717398 - DNA, 15 bp, Homo sapiens
atagaagacaaagag

SEQ ID NO: 1717399 - DNA, 15 bp, Homo sapiens
tagaagacaaagaga

SEQ ID NO: 1717400 - DNA, 15 bp, Homo sapiens
agaagacaaagagag

SEQ ID NO: 1717401 - DNA, 15 bp, Homo sapiens
gaagacaaagagagt

SEQ ID NO: 1717402 - DNA, 15 bp, Homo sapiens
aagacaaagagagtg

SEQ ID NO: 1717403 - DNA, 15 bp, Homo sapiens
agacaaagagagtga

SEQ ID NO: 1717404 - DNA, 15 bp, Homo sapiens
gacaaagagagtgag

SEQ ID NO: 1717405 - DNA, 15 bp, Homo sapiens
acaaagagagtgaga

SEQ ID NO: 1717406 - DNA, 15 bp, Homo sapiens
caaagagagtgagat

SEQ ID NO: 1717407 - DNA, 15 bp, Homo sapiens
aaagagagtgagatt

SEQ ID NO: 1717408 - DNA, 15 bp, Homo sapiens
aagagagtgagattg

SEQ ID NO: 1717409 - DNA, 15 bp, Homo sapiens
agagagtgagattgg

SEQ ID NO: 1717410 - DNA, 15 bp, Homo sapiens
gagagtgagattgga

SEQ ID NO: 1717411 - DNA, 15 bp, Homo sapiens
agagtgagattggag

SEQ ID NO: 1717412 - DNA, 15 bp, Homo sapiens
gagtgagattggaga

SEQ ID NO: 1717413 - DNA, 15 bp, Homo sapiens
agtgagattggagat

SEQ ID NO: 1717414 - DNA, 15 bp, Homo sapiens
gtgagattggagatt

SEQ ID NO: 1717415 - DNA, 15 bp, Homo sapiens
tgagattggagattt

SEQ ID NO: 1717416 - DNA, 15 bp, Homo sapiens
gagattggagatttt

SEQ ID NO: 1717417 - DNA, 15 bp, Homo sapiens
agattggagattttt

SEQ ID NO: 1717418 - DNA, 15 bp, Homo sapiens
gattggagattttta

SEQ ID NO: 1717419 - DNA, 15 bp, Homo sapiens
attggagatttttag

SEQ ID NO: 1717420 - DNA, 15 bp, Homo sapiens
ttggagatttttagc

SEQ ID NO: 1717421 - DNA, 15 bp, Homo sapiens
tggagatttttagct

SEQ ID NO: 1717422 - DNA, 15 bp, Homo sapiens
ggagatttttagcta

SEQ ID NO: 1717423 - DNA, 15 bp, Homo sapiens
gagatttttagctat

SEQ ID NO: 1717424 - DNA, 15 bp, Homo sapiens
agatttttagctatt

SEQ ID NO: 1717425 - DNA, 15 bp, Homo sapiens
gatttttagctatta

SEQ ID NO: 1717426 - DNA, 15 bp, Homo sapiens
atttttagctattag

SEQ ID NO: 1717427 - DNA, 15 bp, Homo sapiens
tttttagctattagc

SEQ ID NO: 1717428 - DNA, 15 bp, Homo sapiens
ttttagctattagct

SEQ ID NO: 1717429 - DNA, 15 bp, Homo sapiens
tttagctattagctc

SEQ ID NO: 1717430 - DNA, 15 bp, Homo sapiens
ttagctattagctct

SEQ ID NO: 1717431 - DNA, 15 bp, Homo sapiens
tagctattagctcta

SEQ ID NO: 1717432 - DNA, 15 bp, Homo sapiens
agctattagctctag

SEQ ID NO: 1717433 - DNA, 15 bp, Homo sapiens
gctattagctctagg

SEQ ID NO: 1717434 - DNA, 15 bp, Homo sapiens
ctattagctctaggt

SEQ ID NO: 1717435 - DNA, 15 bp, Homo sapiens
tattagctctaggtg

SEQ ID NO: 1717436 - DNA, 15 bp, Homo sapiens
attagctctaggtgg

SEQ ID NO: 1717437 - DNA, 15 bp, Homo sapiens
ttagctctaggtgga

SEQ ID NO: 1717438 - DNA, 15 bp, Homo sapiens
tagctctaggtggaa

SEQ ID NO: 1717439 - DNA, 15 bp, Homo sapiens
agctctaggtggaaa

SEQ ID NO: 1717440 - DNA, 15 bp, Homo sapiens
gctctaggtggaaag

SEQ ID NO: 1717441 - DNA, 15 bp, Homo sapiens
ctctaggtggaaaga

SEQ ID NO: 1717442 - DNA, 15 bp, Homo sapiens
tctaggtggaaagaa

SEQ ID NO: 1717443 - DNA, 15 bp, Homo sapiens
ctaggtggaaagaaa

SEQ ID NO: 1717444 - DNA, 15 bp, Homo sapiens
taggtggaaagaaaa

SEQ ID NO: 1717445 - DNA, 15 bp, Homo sapiens
aggtggaaagaaaag

SEQ ID NO: 1717446 - DNA, 15 bp, Homo sapiens
ggtggaaagaaaagt

SEQ ID NO: 1717447 - DNA, 15 bp, Homo sapiens
gtggaaagaaaagtt

SEQ ID NO: 1717448 - DNA, 15 bp, Homo sapiens
tggaaagaaaagtta

SEQ ID NO: 1717449 - DNA, 15 bp, Homo sapiens
ggaaagaaaagttac

SEQ ID NO: 1717450 - DNA, 15 bp, Homo sapiens
gaaagaaaagttaca

SEQ ID NO: 1717451 - DNA, 15 bp, Homo sapiens
aaagaaaagttacac

SEQ ID NO: 1717452 - DNA, 15 bp, Homo sapiens
aagaaaagttacaca

SEQ ID NO: 1717453 - DNA, 15 bp, Homo sapiens
agaaaagttacacaa

SEQ ID NO: 1717454 - DNA, 15 bp, Homo sapiens
gaaaagttacacaaa

SEQ ID NO: 1717455 - DNA, 15 bp, Homo sapiens
aaaagttacacaaaa

SEQ ID NO: 1717456 - DNA, 15 bp, Homo sapiens
aaagttacacaaaaa

SEQ ID NO: 1717457 - DNA, 15 bp, Homo sapiens
aagttacacaaaaag

SEQ ID NO: 1717458 - DNA, 15 bp, Homo sapiens
agttacacaaaaaga

SEQ ID NO: 1717459 - DNA, 15 bp, Homo sapiens
gttacacaaaaagaa

SEQ ID NO: 1717460 - DNA, 15 bp, Homo sapiens
ttacacaaaaagaaa

SEQ ID NO: 1717461 - DNA, 15 bp, Homo sapiens
tacacaaaaagaaaa

SEQ ID NO: 1717462 - DNA, 15 bp, Homo sapiens
acacaaaaagaaaat

SEQ ID NO: 1717463 - DNA, 15 bp, Homo sapiens
cacaaaaagaaaata

SEQ ID NO: 1717464 - DNA, 15 bp, Homo sapiens
acaaaaagaaaatat

SEQ ID NO: 1717465 - DNA, 15 bp, Homo sapiens
caaaaagaaaatata

SEQ ID NO: 1717466 - DNA, 15 bp, Homo sapiens
aaaaagaaaatatat

SEQ ID NO: 1717467 - DNA, 15 bp, Homo sapiens
aaagaaaatatattt

SEQ ID NO: 1717468 - DNA, 15 bp, Homo sapiens
aagaaaatatatttt

SEQ ID NO: 1717469 - DNA, 15 bp, Homo sapiens
agaaaatatattttt

SEQ ID NO: 1717470 - DNA, 15 bp, Homo sapiens
gaaaatatattttta

SEQ ID NO: 1717471 - DNA, 15 bp, Homo sapiens
aaaatatatttttat

SEQ ID NO: 1717472 - DNA, 15 bp, Homo sapiens
aaatatatttttatt

SEQ ID NO: 1717473 - DNA, 15 bp, Homo sapiens
aatatatttttattt

SEQ ID NO: 1717474 - DNA, 15 bp, Homo sapiens
atatatttttatttt

SEQ ID NO: 1717475 - DNA, 15 bp, Homo sapiens
tatatttttatttta

SEQ ID NO: 1717476 - DNA, 15 bp, Homo sapiens
atatttttattttac

SEQ ID NO: 1717477 - DNA, 15 bp, Homo sapiens
tatttttattttacc

SEQ ID NO: 1717478 - DNA, 15 bp, Homo sapiens
atttttattttacct

SEQ ID NO: 1717479 - DNA, 15 bp, Homo sapiens
tttattttaccttat

SEQ ID NO: 1717480 - DNA, 15 bp, Homo sapiens
ttattttaccttatg

SEQ ID NO: 1717481 - DNA, 15 bp, Homo sapiens
tattttaccttatga

SEQ ID NO: 1717482 - DNA, 15 bp, Homo sapiens
attttaccttatgac

SEQ ID NO: 1717483 - DNA, 15 bp, Homo sapiens
ttttaccttatgact

SEQ ID NO: 1717484 - DNA, 15 bp, Homo sapiens
tttaccttatgactc

SEQ ID NO: 1717485 - DNA, 15 bp, Homo sapiens
ttaccttatgactca

SEQ ID NO: 1717486 - DNA, 15 bp, Homo sapiens
taccttatgactcat

SEQ ID NO: 1717487 - DNA, 15 bp, Homo sapiens
accttatgactcatc

SEQ ID NO: 1717488 - DNA, 15 bp, Homo sapiens
ttatgactcatctga

SEQ ID NO: 1717489 - DNA, 15 bp, Homo sapiens
tatgactcatctgag

SEQ ID NO: 1717490 - DNA, 15 bp, Homo sapiens
atgactcatctgaga

SEQ ID NO: 1717491 - DNA, 15 bp, Homo sapiens
tgactcatctgagaa

SEQ ID NO: 1717492 - DNA, 15 bp, Homo sapiens
gactcatctgagaat

SEQ ID NO: 1717493 - DNA, 15 bp, Homo sapiens
actcatctgagaatg

SEQ ID NO: 1717494 - DNA, 15 bp, Homo sapiens
ctcatctgagaatgt

SEQ ID NO: 1717495 - DNA, 15 bp, Homo sapiens
tcatctgagaatgtt

SEQ ID NO: 1717496 - DNA, 15 bp, Homo sapiens
catctgagaatgtta

SEQ ID NO: 1717497 - DNA, 15 bp, Homo sapiens
atctgagaatgttat

SEQ ID NO: 1717498 - DNA, 15 bp, Homo sapiens
tctgagaatgttatt

SEQ ID NO: 1717499 - DNA, 15 bp, Homo sapiens
ctgagaatgttattt

SEQ ID NO: 1717500 - DNA, 15 bp, Homo sapiens
tgagaatgttattta

SEQ ID NO: 1717501 - DNA, 15 bp, Homo sapiens
gagaatgttatttac

SEQ ID NO: 1717502 - DNA, 15 bp, Homo sapiens
agaatgttatttaca

SEQ ID NO: 1717503 - DNA, 15 bp, Homo sapiens
gaatgttatttacaa

SEQ ID NO: 1717504 - DNA, 15 bp, Homo sapiens
aatgttatttacaaa

SEQ ID NO: 1717505 - DNA, 15 bp, Homo sapiens
atgttatttacaaag

SEQ ID NO: 1717506 - DNA, 15 bp, Homo sapiens
tgttatttacaaagt

SEQ ID NO: 1717507 - DNA, 15 bp, Homo sapiens
gttatttacaaagtc

SEQ ID NO: 1717508 - DNA, 15 bp, Homo sapiens
ttatttacaaagtca

SEQ ID NO: 1717509 - DNA, 15 bp, Homo sapiens
tatttacaaagtcac

SEQ ID NO: 1717510 - DNA, 15 bp, Homo sapiens
atttacaaagtcaca

SEQ ID NO: 1717511 - DNA, 15 bp, Homo sapiens
tttacaaagtcacat

SEQ ID NO: 1717512 - DNA, 15 bp, Homo sapiens
ttacaaagtcacatc

SEQ ID NO: 1717513 - DNA, 15 bp, Homo sapiens
tacaaagtcacatca

SEQ ID NO: 1717514 - DNA, 15 bp, Homo sapiens
acaaagtcacatcaa

SEQ ID NO: 1717515 - DNA, 15 bp, Homo sapiens
caaagtcacatcaat

SEQ ID NO: 1717516 - DNA, 15 bp, Homo sapiens
aaagtcacatcaatg

SEQ ID NO: 1717517 - DNA, 15 bp, Homo sapiens
aagtcacatcaatgt

SEQ ID NO: 1717518 - DNA, 15 bp, Homo sapiens
agtcacatcaatgta

SEQ ID NO: 1717519 - DNA, 15 bp, Homo sapiens
gtcacatcaatgtaa

SEQ ID NO: 1717520 - DNA, 15 bp, Homo sapiens
tcacatcaatgtaaa

SEQ ID NO: 1717521 - DNA, 15 bp, Homo sapiens
cacatcaatgtaaaa

SEQ ID NO: 1717522 - DNA, 15 bp, Homo sapiens
acatcaatgtaaaag

SEQ ID NO: 1717523 - DNA, 15 bp, Homo sapiens
catcaatgtaaaagc

SEQ ID NO: 1717524 - DNA, 15 bp, Homo sapiens
atcaatgtaaaagct

SEQ ID NO: 1717525 - DNA, 15 bp, Homo sapiens
tcaatgtaaaagctt

SEQ ID NO: 1717526 - DNA, 15 bp, Homo sapiens
caatgtaaaagctta

SEQ ID NO: 1717527 - DNA, 15 bp, Homo sapiens
aatgtaaaagcttaa

SEQ ID NO: 1717528 - DNA, 15 bp, Homo sapiens
atgtaaaagcttaat

SEQ ID NO: 1717529 - DNA, 15 bp, Homo sapiens
tgtaaaagcttaata

SEQ ID NO: 1717530 - DNA, 15 bp, Homo sapiens
gtaaaagcttaatac

SEQ ID NO: 1717531 - DNA, 15 bp, Homo sapiens
taaaagcttaatact

SEQ ID NO: 1717532 - DNA, 15 bp, Homo sapiens
aaaagcttaatactg

SEQ ID NO: 1717533 - DNA, 15 bp, Homo sapiens
aaagcttaatactga

SEQ ID NO: 1717534 - DNA, 15 bp, Homo sapiens
aagcttaatactgat

SEQ ID NO: 1717535 - DNA, 15 bp, Homo sapiens
agcttaatactgatc

SEQ ID NO: 1717536 - DNA, 15 bp, Homo sapiens
gcttaatactgatct

SEQ ID NO: 1717537 - DNA, 15 bp, Homo sapiens
cttaatactgatcta

SEQ ID NO: 1717538 - DNA, 15 bp, Homo sapiens
ttaatactgatctaa

SEQ ID NO: 1717539 - DNA, 15 bp, Homo sapiens
taatactgatctaaa

SEQ ID NO: 1717540 - DNA, 15 bp, Homo sapiens
aatactgatctaaag

SEQ ID NO: 1717541 - DNA, 15 bp, Homo sapiens
atactgatctaaagc

SEQ ID NO: 1717542 - DNA, 15 bp, Homo sapiens
tactgatctaaagca

SEQ ID NO: 1717543 - DNA, 15 bp, Homo sapiens
actgatctaaagcag

SEQ ID NO: 1717544 - DNA, 15 bp, Homo sapiens
ctgatctaaagcaga

SEQ ID NO: 1717545 - DNA, 15 bp, Homo sapiens
tgatctaaagcagaa

SEQ ID NO: 1717546 - DNA, 15 bp, Homo sapiens
gatctaaagcagaat

SEQ ID NO: 1717547 - DNA, 15 bp, Homo sapiens
atctaaagcagaatt

SEQ ID NO: 1717548 - DNA, 15 bp, Homo sapiens
tctaaagcagaatta

SEQ ID NO: 1717549 - DNA, 15 bp, Homo sapiens
ctaaagcagaattat

SEQ ID NO: 1717550 - DNA, 15 bp, Homo sapiens
taaagcagaattata

SEQ ID NO: 1717551 - DNA, 15 bp, Homo sapiens
aaagcagaattatag

SEQ ID NO: 1717552 - DNA, 15 bp, Homo sapiens
aagcagaattataga

SEQ ID NO: 1717553 - DNA, 15 bp, Homo sapiens
agcagaattatagat

SEQ ID NO: 1717554 - DNA, 15 bp, Homo sapiens
gcagaattatagata

SEQ ID NO: 1717555 - DNA, 15 bp, Homo sapiens
cagaattatagatag

SEQ ID NO: 1717556 - DNA, 15 bp, Homo sapiens
agaattatagataga

SEQ ID NO: 1717557 - DNA, 15 bp, Homo sapiens
gaattatagatagat

SEQ ID NO: 1717558 - DNA, 15 bp, Homo sapiens
aattatagatagatt

SEQ ID NO: 1717559 - DNA, 15 bp, Homo sapiens
attatagatagatta

SEQ ID NO: 1717560 - DNA, 15 bp, Homo sapiens
ttatagatagattat

SEQ ID NO: 1717561 - DNA, 15 bp, Homo sapiens
tatagatagattatg

SEQ ID NO: 1717562 - DNA, 15 bp, Homo sapiens
atagatagattatga

SEQ ID NO: 1717563 - DNA, 15 bp, Homo sapiens
tagatagattatgaa

SEQ ID NO: 1717564 - DNA, 15 bp, Homo sapiens
agatagattatgaaa

SEQ ID NO: 1717565 - DNA, 15 bp, Homo sapiens
gatagattatgaaag

SEQ ID NO: 1717566 - DNA, 15 bp, Homo sapiens
atagattatgaaagg

SEQ ID NO: 1717567 - DNA, 15 bp, Homo sapiens
tagattatgaaagga

SEQ ID NO: 1717568 - DNA, 15 bp, Homo sapiens
agattatgaaaggaa

SEQ ID NO: 1717569 - DNA, 15 bp, Homo sapiens
gattatgaaaggaac

SEQ ID NO: 1717570 - DNA, 15 bp, Homo sapiens
attatgaaaggaaca

SEQ ID NO: 1717571 - DNA, 15 bp, Homo sapiens
ttatgaaaggaacaa

SEQ ID NO: 1717572 - DNA, 15 bp, Homo sapiens
tatgaaaggaacaag

SEQ ID NO: 1717573 - DNA, 15 bp, Homo sapiens
atgaaaggaacaaga

SEQ ID NO: 1717574 - DNA, 15 bp, Homo sapiens
tgaaaggaacaagaa

SEQ ID NO: 1717575 - DNA, 15 bp, Homo sapiens
gaaaggaacaagaaa

SEQ ID NO: 1717576 - DNA, 15 bp, Homo sapiens
aaaggaacaagaaaa

SEQ ID NO: 1717577 - DNA, 15 bp, Homo sapiens
aaggaacaagaaaat

SEQ ID NO: 1717578 - DNA, 15 bp, Homo sapiens
aggaacaagaaaata

SEQ ID NO: 1717579 - DNA, 15 bp, Homo sapiens
ggaacaagaaaatat

SEQ ID NO: 1717580 - DNA, 15 bp, Homo sapiens
gaacaagaaaatatg

SEQ ID NO: 1717581 - DNA, 15 bp, Homo sapiens
aacaagaaaatatgt

SEQ ID NO: 1717582 - DNA, 15 bp, Homo sapiens
acaagaaaatatgtg

SEQ ID NO: 1717583 - DNA, 15 bp, Homo sapiens
caagaaaatatgtgg

SEQ ID NO: 1717584 - DNA, 15 bp, Homo sapiens
aagaaaatatgtggg

SEQ ID NO: 1717585 - DNA, 15 bp, Homo sapiens
agaaaatatgtgggg

SEQ ID NO: 1717586 - DNA, 15 bp, Homo sapiens
gaaaatatgtggggt

SEQ ID NO: 1717587 - DNA, 15 bp, Homo sapiens
aaaatatgtggggta

SEQ ID NO: 1717588 - DNA, 15 bp, Homo sapiens
aaatatgtggggtag

SEQ ID NO: 1717589 - DNA, 15 bp, Homo sapiens
aatatgtggggtagg

SEQ ID NO: 1717590 - DNA, 15 bp, Homo sapiens
atatgtggggtaggt

SEQ ID NO: 1717591 - DNA, 15 bp, Homo sapiens
tatgtggggtaggtt

SEQ ID NO: 1717592 - DNA, 15 bp, Homo sapiens
atgtggggtaggttg

SEQ ID NO: 1717593 - DNA, 15 bp, Homo sapiens
tgtggggtaggttgg

SEQ ID NO: 1717594 - DNA, 15 bp, Homo sapiens
gtggggtaggttggg

SEQ ID NO: 1717595 - DNA, 15 bp, Homo sapiens
tggggtaggttggga

SEQ ID NO: 1717596 - DNA, 15 bp, Homo sapiens
ggggtaggttgggat

SEQ ID NO: 1717597 - DNA, 15 bp, Homo sapiens
gggtaggttgggatg

SEQ ID NO: 1717598 - DNA, 15 bp, Homo sapiens
ggtaggttgggatgg

SEQ ID NO: 1717599 - DNA, 15 bp, Homo sapiens
gtaggttgggatggg

SEQ ID NO: 1717600 - DNA, 15 bp, Homo sapiens
taggttgggatggga

SEQ ID NO: 1717601 - DNA, 15 bp, Homo sapiens
aggttgggatgggat

SEQ ID NO: 1717602 - DNA, 15 bp, Homo sapiens
ggttgggatgggata

SEQ ID NO: 1717603 - DNA, 15 bp, Homo sapiens
gttgggatgggatag

SEQ ID NO: 1717604 - DNA, 15 bp, Homo sapiens
ttgggatgggatagg

SEQ ID NO: 1717605 - DNA, 15 bp, Homo sapiens
tgggatgggatagga

SEQ ID NO: 1717606 - DNA, 15 bp, Homo sapiens
gggatgggataggac

SEQ ID NO: 1717607 - DNA, 15 bp, Homo sapiens
ggatgggataggaca

SEQ ID NO: 1717608 - DNA, 15 bp, Homo sapiens
gatgggataggacat

SEQ ID NO: 1717609 - DNA, 15 bp, Homo sapiens
atgggataggacatg

SEQ ID NO: 1717610 - DNA, 15 bp, Homo sapiens
tgggataggacatgg

SEQ ID NO: 1717611 - DNA, 15 bp, Homo sapiens
gggataggacatggg

SEQ ID NO: 1717612 - DNA, 15 bp, Homo sapiens
ggataggacatgggt

SEQ ID NO: 1717613 - DNA, 15 bp, Homo sapiens
gataggacatgggta

SEQ ID NO: 1717614 - DNA, 15 bp, Homo sapiens
ataggacatgggtaa

SEQ ID NO: 1717615 - DNA, 15 bp, Homo sapiens
taggacatgggtaaa

SEQ ID NO: 1717616 - DNA, 15 bp, Homo sapiens
aggacatgggtaaaa

SEQ ID NO: 1717617 - DNA, 15 bp, Homo sapiens
ggacatgggtaaaaa

SEQ ID NO: 1717618 - DNA, 15 bp, Homo sapiens
gacatgggtaaaaaa

SEQ ID NO: 1717619 - DNA, 15 bp, Homo sapiens
acatgggtaaaaaaa

SEQ ID NO: 1717620 - DNA, 15 bp, Homo sapiens
catgggtaaaaaaag

SEQ ID NO: 1717621 - DNA, 15 bp, Homo sapiens
atgggtaaaaaaaga

SEQ ID NO: 1717622 - DNA, 15 bp, Homo sapiens
tgggtaaaaaaagaa

SEQ ID NO: 1717623 - DNA, 15 bp, Homo sapiens
gggtaaaaaaagaac

SEQ ID NO: 1717624 - DNA, 15 bp, Homo sapiens
ggtaaaaaaagaact

SEQ ID NO: 1717625 - DNA, 15 bp, Homo sapiens
gtaaaaaaagaactg

SEQ ID NO: 1717626 - DNA, 15 bp, Homo sapiens
taaaaaaagaactgg

SEQ ID NO: 1717627 - DNA, 15 bp, Homo sapiens
aaaaaaagaactgga

SEQ ID NO: 1717628 - DNA, 15 bp, Homo sapiens
aaaaaagaactggat

SEQ ID NO: 1717629 - DNA, 15 bp, Homo sapiens
aaaaagaactggatc

SEQ ID NO: 1717630 - DNA, 15 bp, Homo sapiens
aaaagaactggatcc

SEQ ID NO: 1717631 - DNA, 15 bp, Homo sapiens
aaagaactggatcct

SEQ ID NO: 1717632 - DNA, 15 bp, Homo sapiens
aagaactggatcctt

SEQ ID NO: 1717633 - DNA, 15 bp, Homo sapiens
agaactggatccttg

SEQ ID NO: 1717634 - DNA, 15 bp, Homo sapiens
gaactggatccttgt

SEQ ID NO: 1717635 - DNA, 15 bp, Homo sapiens
aactggatccttgtg

SEQ ID NO: 1717636 - DNA, 15 bp, Homo sapiens
actggatccttgtgg

SEQ ID NO: 1717637 - DNA, 15 bp, Homo sapiens
ctggatccttgtggt

SEQ ID NO: 1717638 - DNA, 15 bp, Homo sapiens
tggatccttgtggtc

SEQ ID NO: 1717639 - DNA, 15 bp, Homo sapiens
ggatccttgtggtcc

SEQ ID NO: 1717640 - DNA, 15 bp, Homo sapiens
gatccttgtggtcct

SEQ ID NO: 1717641 - DNA, 15 bp, Homo sapiens
atccttgtggtcctc

SEQ ID NO: 1717642 - DNA, 15 bp, Homo sapiens
tccttgtggtcctca

SEQ ID NO: 1717643 - DNA, 15 bp, Homo sapiens
ccttgtggtcctcat

SEQ ID NO: 1717644 - DNA, 15 bp, Homo sapiens
cttgtggtcctcata

SEQ ID NO: 1717645 - DNA, 15 bp, Homo sapiens
ttgtggtcctcatat

SEQ ID NO: 1717646 - DNA, 15 bp, Homo sapiens
tgtggtcctcatatt

SEQ ID NO: 1717647 - DNA, 15 bp, Homo sapiens
gtggtcctcatattt

SEQ ID NO: 1717648 - DNA, 15 bp, Homo sapiens
tggtcctcatatttc

SEQ ID NO: 1717649 - DNA, 15 bp, Homo sapiens
ggtcctcatatttca

SEQ ID NO: 1717650 - DNA, 15 bp, Homo sapiens
gtcctcatatttcat

SEQ ID NO: 1717651 - DNA, 15 bp, Homo sapiens
tcctcatatttcata

SEQ ID NO: 1717652 - DNA, 15 bp, Homo sapiens
cctcatatttcataa

SEQ ID NO: 1717653 - DNA, 15 bp, Homo sapiens
ctcatatttcataat

SEQ ID NO: 1717654 - DNA, 15 bp, Homo sapiens
tcatatttcataatg

SEQ ID NO: 1717655 - DNA, 15 bp, Homo sapiens
catatttcataatgg

SEQ ID NO: 1717656 - DNA, 15 bp, Homo sapiens
atatttcataatgga

SEQ ID NO: 1717657 - DNA, 15 bp, Homo sapiens
tatttcataatggaa

SEQ ID NO: 1717658 - DNA, 15 bp, Homo sapiens
atttcataatggaaa

SEQ ID NO: 1717659 - DNA, 15 bp, Homo sapiens
tttcataatggaaac

SEQ ID NO: 1717660 - DNA, 15 bp, Homo sapiens
ttcataatggaaact

SEQ ID NO: 1717661 - DNA, 15 bp, Homo sapiens
tcataatggaaacta

SEQ ID NO: 1717662 - DNA, 15 bp, Homo sapiens
cataatggaaactaa

SEQ ID NO: 1717663 - DNA, 15 bp, Homo sapiens
ataatggaaactaaa

SEQ ID NO: 1717664 - DNA, 15 bp, Homo sapiens
taatggaaactaaac

SEQ ID NO: 1717665 - DNA, 15 bp, Homo sapiens
aatggaaactaaaca

SEQ ID NO: 1717666 - DNA, 15 bp, Homo sapiens
atggaaactaaacag

SEQ ID NO: 1717667 - DNA, 15 bp, Homo sapiens
tggaaactaaacagt

SEQ ID NO: 1717668 - DNA, 15 bp, Homo sapiens
ggaaactaaacagtt

SEQ ID NO: 1717669 - DNA, 15 bp, Homo sapiens
gaaactaaacagtta

SEQ ID NO: 1717670 - DNA, 15 bp, Homo sapiens
aaactaaacagttaa

SEQ ID NO: 1717671 - DNA, 15 bp, Homo sapiens
aactaaacagttaaa

SEQ ID NO: 1717672 - DNA, 15 bp, Homo sapiens
actaaacagttaaac

SEQ ID NO: 1717673 - DNA, 15 bp, Homo sapiens
ctaaacagttaaaca

SEQ ID NO: 1717674 - DNA, 15 bp, Homo sapiens
taaacagttaaacat

SEQ ID NO: 1717675 - DNA, 15 bp, Homo sapiens
aaacagttaaacatt

SEQ ID NO: 1717676 - DNA, 15 bp, Homo sapiens
aacagttaaacattt

SEQ ID NO: 1717677 - DNA, 15 bp, Homo sapiens
acagttaaacattta

SEQ ID NO: 1717678 - DNA, 15 bp, Homo sapiens
cagttaaacatttaa

SEQ ID NO: 1717679 - DNA, 15 bp, Homo sapiens
agttaaacatttaaa

SEQ ID NO: 1717680 - DNA, 15 bp, Homo sapiens
gttaaacatttaaac

SEQ ID NO: 1717681 - DNA, 15 bp, Homo sapiens
ttaaacatttaaaca

SEQ ID NO: 1717682 - DNA, 15 bp, Homo sapiens
taaacatttaaacaa

SEQ ID NO: 1717683 - DNA, 15 bp, Homo sapiens
aaacatttaaacaaa

SEQ ID NO: 1717684 - DNA, 15 bp, Homo sapiens
aacatttaaacaaat

SEQ ID NO: 1717685 - DNA, 15 bp, Homo sapiens
acatttaaacaaata

SEQ ID NO: 1717686 - DNA, 15 bp, Homo sapiens
catttaaacaaataa

SEQ ID NO: 1717687 - DNA, 15 bp, Homo sapiens
atttaaacaaataag

SEQ ID NO: 1717688 - DNA, 15 bp, Homo sapiens
tttaaacaaataaga

SEQ ID NO: 1717689 - DNA, 15 bp, Homo sapiens
ttaaacaaataagat

SEQ ID NO: 1717690 - DNA, 15 bp, Homo sapiens
taaacaaataagatg

SEQ ID NO: 1717691 - DNA, 15 bp, Homo sapiens
aaacaaataagatgt

SEQ ID NO: 1717692 - DNA, 15 bp, Homo sapiens
aacaaataagatgtt

SEQ ID NO: 1717693 - DNA, 15 bp, Homo sapiens
acaaataagatgttt

SEQ ID NO: 1717694 - DNA, 15 bp, Homo sapiens
caaataagatgtttt

SEQ ID NO: 1717695 - DNA, 15 bp, Homo sapiens
aaataagatgtttta

SEQ ID NO: 1717696 - DNA, 15 bp, Homo sapiens
aataagatgttttac

SEQ ID NO: 1717697 - DNA, 15 bp, Homo sapiens
ataagatgttttaca

SEQ ID NO: 1717698 - DNA, 15 bp, Homo sapiens
taagatgttttacaa

SEQ ID NO: 1717699 - DNA, 15 bp, Homo sapiens
aagatgttttacaat

SEQ ID NO: 1717700 - DNA, 15 bp, Homo sapiens
agatgttttacaata

SEQ ID NO: 1717701 - DNA, 15 bp, Homo sapiens
gatgttttacaataa

SEQ ID NO: 1717702 - DNA, 15 bp, Homo sapiens
atgttttacaataaa

SEQ ID NO: 1717703 - DNA, 15 bp, Homo sapiens
tgttttacaataaaa

SEQ ID NO: 1717704 - DNA, 15 bp, Homo sapiens
gttttacaataaaaa

SEQ ID NO: 1717705 - DNA, 15 bp, Homo sapiens
ttttacaataaaaac

SEQ ID NO: 1717706 - DNA, 15 bp, Homo sapiens
tttacaataaaaaca

SEQ ID NO: 1717707 - DNA, 15 bp, Homo sapiens
ttacaataaaaacat

SEQ ID NO: 1717708 - DNA, 15 bp, Homo sapiens
tacaataaaaacatc

SEQ ID NO: 1717709 - DNA, 15 bp, Homo sapiens
acaataaaaacatct

SEQ ID NO: 1717710 - DNA, 15 bp, Homo sapiens
caataaaaacatctt

SEQ ID NO: 1717711 - DNA, 15 bp, Homo sapiens
aataaaaacatctta

SEQ ID NO: 1717712 - DNA, 15 bp, Homo sapiens
ataaaaacatcttat

SEQ ID NO: 1717713 - DNA, 15 bp, Homo sapiens
taaaaacatcttatt

SEQ ID NO: 1717714 - DNA, 15 bp, Homo sapiens
aaaaacatcttattg

SEQ ID NO: 1717715 - DNA, 15 bp, Homo sapiens
aaaacatcttattgt

SEQ ID NO: 1717716 - DNA, 15 bp, Homo sapiens
aaacatcttattgta

SEQ ID NO: 1717717 - DNA, 15 bp, Homo sapiens
aacatcttattgtaa

SEQ ID NO: 1717718 - DNA, 15 bp, Homo sapiens
acatcttattgtaaa

SEQ ID NO: 1717719 - DNA, 15 bp, Homo sapiens
catcttattgtaaaa

SEQ ID NO: 1717720 - DNA, 15 bp, Homo sapiens
atcttattgtaaaag

SEQ ID NO: 1717721 - DNA, 15 bp, Homo sapiens
tcttattgtaaaaga

SEQ ID NO: 1717722 - DNA, 15 bp, Homo sapiens
cttattgtaaaagat

SEQ ID NO: 1717723 - DNA, 15 bp, Homo sapiens
ttattgtaaaagatg

SEQ ID NO: 1717724 - DNA, 15 bp, Homo sapiens
tattgtaaaagatga

SEQ ID NO: 1717725 - DNA, 15 bp, Homo sapiens
attgtaaaagatgaa

SEQ ID NO: 1717726 - DNA, 15 bp, Homo sapiens
ttgtaaaagatgaag

SEQ ID NO: 1717727 - DNA, 15 bp, Homo sapiens
tgtaaaagatgaagg

SEQ ID NO: 1717728 - DNA, 15 bp, Homo sapiens
gtaaaagatgaaggt

SEQ ID NO: 1717729 - DNA, 15 bp, Homo sapiens
taaaagatgaaggtg

SEQ ID NO: 1717730 - DNA, 15 bp, Homo sapiens
aaaagatgaaggtga

SEQ ID NO: 1717731 - DNA, 15 bp, Homo sapiens
aaagatgaaggtgaa

SEQ ID NO: 1717732 - DNA, 15 bp, Homo sapiens
aagatgaaggtgaat

SEQ ID NO: 1717733 - DNA, 15 bp, Homo sapiens
agatgaaggtgaata

SEQ ID NO: 1717734 - DNA, 15 bp, Homo sapiens
gatgaaggtgaatac

SEQ ID NO: 1717735 - DNA, 15 bp, Homo sapiens
atgaaggtgaatact

SEQ ID NO: 1717736 - DNA, 15 bp, Homo sapiens
tgaaggtgaatactg

SEQ ID NO: 1717737 - DNA, 15 bp, Homo sapiens
aaggtgaatactgaa

SEQ ID NO: 1717738 - DNA, 15 bp, Homo sapiens
aggtgaatactgaaa

SEQ ID NO: 1717739 - DNA, 15 bp, Homo sapiens
ggtgaatactgaaag

SEQ ID NO: 1717740 - DNA, 15 bp, Homo sapiens
gtgaatactgaaaga

SEQ ID NO: 1717741 - DNA, 15 bp, Homo sapiens
tgaatactgaaagaa

SEQ ID NO: 1717742 - DNA, 15 bp, Homo sapiens
gaatactgaaagaaa

SEQ ID NO: 1717743 - DNA, 15 bp, Homo sapiens
aatactgaaagaaac

SEQ ID NO: 1717744 - DNA, 15 bp, Homo sapiens
atactgaaagaaact

SEQ ID NO: 1717745 - DNA, 15 bp, Homo sapiens
tactgaaagaaactg

SEQ ID NO: 1717746 - DNA, 15 bp, Homo sapiens
actgaaagaaactgc

SEQ ID NO: 1717747 - DNA, 15 bp, Homo sapiens
ctgaaagaaactgct

SEQ ID NO: 1717748 - DNA, 15 bp, Homo sapiens
tgaaagaaactgcta

SEQ ID NO: 1717749 - DNA, 15 bp, Homo sapiens
gaaagaaactgctaa

SEQ ID NO: 1717750 - DNA, 15 bp, Homo sapiens
aaagaaactgctaaa

SEQ ID NO: 1717751 - DNA, 15 bp, Homo sapiens
aagaaactgctaaaa

SEQ ID NO: 1717752 - DNA, 15 bp, Homo sapiens
agaaactgctaaaag

SEQ ID NO: 1717753 - DNA, 15 bp, Homo sapiens
gaaactgctaaaaga

SEQ ID NO: 1717754 - DNA, 15 bp, Homo sapiens
aaactgctaaaagat

SEQ ID NO: 1717755 - DNA, 15 bp, Homo sapiens
aactgctaaaagatt

SEQ ID NO: 1717756 - DNA, 15 bp, Homo sapiens
actgctaaaagattt

SEQ ID NO: 1717757 - DNA, 15 bp, Homo sapiens
ctgctaaaagattta

SEQ ID NO: 1717758 - DNA, 15 bp, Homo sapiens
tgctaaaagatttat

SEQ ID NO: 1717759 - DNA, 15 bp, Homo sapiens
gctaaaagatttatg

SEQ ID NO: 1717760 - DNA, 15 bp, Homo sapiens
ctaaaagatttatgt

SEQ ID NO: 1717761 - DNA, 15 bp, Homo sapiens
taaaagatttatgta

SEQ ID NO: 1717762 - DNA, 15 bp, Homo sapiens
aaaagatttatgtac

SEQ ID NO: 1717763 - DNA, 15 bp, Homo sapiens
aaagatttatgtaca

SEQ ID NO: 1717764 - DNA, 15 bp, Homo sapiens
aagatttatgtacat

SEQ ID NO: 1717765 - DNA, 15 bp, Homo sapiens
agatttatgtacata

SEQ ID NO: 1717766 - DNA, 15 bp, Homo sapiens
gatttatgtacatat

SEQ ID NO: 1717767 - DNA, 15 bp, Homo sapiens
atttatgtacatata

SEQ ID NO: 1717768 - DNA, 15 bp, Homo sapiens
tttatgtacatatat

SEQ ID NO: 1717769 - DNA, 15 bp, Homo sapiens
ttatgtacatatata

SEQ ID NO: 1717770 - DNA, 15 bp, Homo sapiens
tatgtacatatatat

SEQ ID NO: 1717771 - DNA, 15 bp, Homo sapiens
atgtacatatatatc

SEQ ID NO: 1717772 - DNA, 15 bp, Homo sapiens
tgtacatatatatct

SEQ ID NO: 1717773 - DNA, 15 bp, Homo sapiens
gtacatatatatctt

SEQ ID NO: 1717774 - DNA, 15 bp, Homo sapiens
tacatatatatcttt

SEQ ID NO: 1717775 - DNA, 15 bp, Homo sapiens
acatatatatctttc

SEQ ID NO: 1717776 - DNA, 15 bp, Homo sapiens
catatatatctttca

SEQ ID NO: 1717777 - DNA, 15 bp, Homo sapiens
atatatatctttcat

SEQ ID NO: 1717778 - DNA, 15 bp, Homo sapiens
tatatatctttcatt

SEQ ID NO: 1717779 - DNA, 15 bp, Homo sapiens
atatatctttcattg

SEQ ID NO: 1717780 - DNA, 15 bp, Homo sapiens
tatatctttcattga

SEQ ID NO: 1717781 - DNA, 15 bp, Homo sapiens
atatctttcattgaa

SEQ ID NO: 1717782 - DNA, 15 bp, Homo sapiens
tatctttcattgaaa

SEQ ID NO: 1717783 - DNA, 15 bp, Homo sapiens
atctttcattgaaaa

SEQ ID NO: 1717784 - DNA, 15 bp, Homo sapiens
tctttcattgaaaaa

SEQ ID NO: 1717785 - DNA, 15 bp, Homo sapiens
ctttcattgaaaaaa

SEQ ID NO: 1717786 - DNA, 15 bp, Homo sapiens
tttcattgaaaaaaa

SEQ ID NO: 1717787 - DNA, 15 bp, Homo sapiens
ttcattgaaaaaaat

SEQ ID NO: 1717788 - DNA, 15 bp, Homo sapiens
tcattgaaaaaaata

SEQ ID NO: 1717789 - DNA, 15 bp, Homo sapiens
cattgaaaaaaataa

SEQ ID NO: 1717790 - DNA, 15 bp, Homo sapiens
attgaaaaaaataaa

SEQ ID NO: 1717791 - DNA, 15 bp, Homo sapiens
ttgaaaaaaataaag

SEQ ID NO: 1717792 - DNA, 15 bp, Homo sapiens
tgaaaaaaataaagt

SEQ ID NO: 1717793 - DNA, 15 bp, Homo sapiens
gaaaaaaataaagtt

SEQ ID NO: 1717794 - DNA, 15 bp, Homo sapiens
aaaaaaataaagttt

SEQ ID NO: 1717795 - DNA, 15 bp, Homo sapiens
aaaaaataaagttta

SEQ ID NO: 1717796 - DNA, 15 bp, Homo sapiens
aaaaataaagtttaa

SEQ ID NO: 1717797 - DNA, 15 bp, Homo sapiens
aaaataaagtttaag

SEQ ID NO: 1717798 - DNA, 15 bp, Homo sapiens
aaataaagtttaaga

SEQ ID NO: 1717799 - DNA, 15 bp, Homo sapiens
aataaagtttaagat

SEQ ID NO: 1717800 - DNA, 15 bp, Homo sapiens
ataaagtttaagatg

SEQ ID NO: 1717801 - DNA, 15 bp, Homo sapiens
taaagtttaagatga

SEQ ID NO: 1717802 - DNA, 15 bp, Homo sapiens
aaagtttaagatgaa

SEQ ID NO: 1717803 - DNA, 15 bp, Homo sapiens
aagtttaagatgaaa

SEQ ID NO: 1717804 - DNA, 15 bp, Homo sapiens
agtttaagatgaaaa

SEQ ID NO: 1717805 - DNA, 15 bp, Homo sapiens
gtttaagatgaaaag

SEQ ID NO: 1717806 - DNA, 15 bp, Homo sapiens
tttaagatgaaaagg

SEQ ID NO: 1717807 - DNA, 15 bp, Homo sapiens
ttaagatgaaaaggg

SEQ ID NO: 1717808 - DNA, 15 bp, Homo sapiens
taagatgaaaagggg

SEQ ID NO: 1717809 - DNA, 15 bp, Homo sapiens
aagatgaaaagggga

SEQ ID NO: 1717810 - DNA, 15 bp, Homo sapiens
agatgaaaaggggat

SEQ ID NO: 1717811 - DNA, 15 bp, Homo sapiens
gatgaaaaggggata

SEQ ID NO: 1717812 - DNA, 15 bp, Homo sapiens
atgaaaaggggatag

SEQ ID NO: 1717813 - DNA, 15 bp, Homo sapiens
tgaaaaggggataga

SEQ ID NO: 1717814 - DNA, 15 bp, Homo sapiens
gaaaaggggatagaa

SEQ ID NO: 1717815 - DNA, 15 bp, Homo sapiens
aaaaggggatagaaa

SEQ ID NO: 1717816 - DNA, 15 bp, Homo sapiens
aaaggggatagaaat

SEQ ID NO: 1717817 - DNA, 15 bp, Homo sapiens
aaggggatagaaatg

SEQ ID NO: 1717818 - DNA, 15 bp, Homo sapiens
aggggatagaaatgc

SEQ ID NO: 1717819 - DNA, 15 bp, Homo sapiens
ggggatagaaatgca

SEQ ID NO: 1717820 - DNA, 15 bp, Homo sapiens
gggatagaaatgcag

SEQ ID NO: 1717821 - DNA, 15 bp, Homo sapiens
ggatagaaatgcagt

SEQ ID NO: 1717822 - DNA, 15 bp, Homo sapiens
gatagaaatgcagta

SEQ ID NO: 1717823 - DNA, 15 bp, Homo sapiens
atagaaatgcagtac

SEQ ID NO: 1717824 - DNA, 15 bp, Homo sapiens
tagaaatgcagtaca

SEQ ID NO: 1717825 - DNA, 15 bp, Homo sapiens
agaaatgcagtacag

SEQ ID NO: 1717826 - DNA, 15 bp, Homo sapiens
gaaatgcagtacagt

SEQ ID NO: 1717827 - DNA, 15 bp, Homo sapiens
aaatgcagtacagtt

SEQ ID NO: 1717828 - DNA, 15 bp, Homo sapiens
aatgcagtacagtta

SEQ ID NO: 1717829 - DNA, 15 bp, Homo sapiens
atgcagtacagttac

SEQ ID NO: 1717830 - DNA, 15 bp, Homo sapiens
tgcagtacagttaca

SEQ ID NO: 1717831 - DNA, 15 bp, Homo sapiens
gcagtacagttacaa

SEQ ID NO: 1717832 - DNA, 15 bp, Homo sapiens
cagtacagttacaaa

SEQ ID NO: 1717833 - DNA, 15 bp, Homo sapiens
agtacagttacaaaa

SEQ ID NO: 1717834 - DNA, 15 bp, Homo sapiens
gtacagttacaaaaa

SEQ ID NO: 1717835 - DNA, 15 bp, Homo sapiens
tacagttacaaaaat

SEQ ID NO: 1717836 - DNA, 15 bp, Homo sapiens
acagttacaaaaatt

SEQ ID NO: 1717837 - DNA, 15 bp, Homo sapiens
cagttacaaaaatta

SEQ ID NO: 1717838 - DNA, 15 bp, Homo sapiens
agttacaaaaattaa

SEQ ID NO: 1717839 - DNA, 15 bp, Homo sapiens
gttacaaaaattaaa

SEQ ID NO: 1717840 - DNA, 15 bp, Homo sapiens
ttacaaaaattaaaa

SEQ ID NO: 1717841 - DNA, 15 bp, Homo sapiens
tacaaaaattaaaac

SEQ ID NO: 1717842 - DNA, 15 bp, Homo sapiens
acaaaaattaaaaca

SEQ ID NO: 1717843 - DNA, 15 bp, Homo sapiens
caaaaattaaaacaa

SEQ ID NO: 1717844 - DNA, 15 bp, Homo sapiens
aaaaattaaaacaat

SEQ ID NO: 1717845 - DNA, 15 bp, Homo sapiens
aaaattaaaacaata

SEQ ID NO: 1717846 - DNA, 15 bp, Homo sapiens
aaattaaaacaatag

SEQ ID NO: 1717847 - DNA, 15 bp, Homo sapiens
aattaaaacaataga

SEQ ID NO: 1717848 - DNA, 15 bp, Homo sapiens
attaaaacaatagat

SEQ ID NO: 1717849 - DNA, 15 bp, Homo sapiens
ttaaaacaatagata

SEQ ID NO: 1717850 - DNA, 15 bp, Homo sapiens
taaaacaatagatac

SEQ ID NO: 1717851 - DNA, 15 bp, Homo sapiens
aaaacaatagatact

SEQ ID NO: 1717852 - DNA, 15 bp, Homo sapiens
aaacaatagatactg

SEQ ID NO: 1717853 - DNA, 15 bp, Homo sapiens
aacaatagatactga

SEQ ID NO: 1717854 - DNA, 15 bp, Homo sapiens
acaatagatactgaa

SEQ ID NO: 1717855 - DNA, 15 bp, Homo sapiens
caatagatactgaaa

SEQ ID NO: 1717856 - DNA, 15 bp, Homo sapiens
aatagatactgaaac

SEQ ID NO: 1717857 - DNA, 15 bp, Homo sapiens
atagatactgaaact

SEQ ID NO: 1717858 - DNA, 15 bp, Homo sapiens
tagatactgaaacta

SEQ ID NO: 1717859 - DNA, 15 bp, Homo sapiens
agatactgaaactat

SEQ ID NO: 1717860 - DNA, 15 bp, Homo sapiens
gatactgaaactatt

SEQ ID NO: 1717861 - DNA, 15 bp, Homo sapiens
atactgaaactatta

SEQ ID NO: 1717862 - DNA, 15 bp, Homo sapiens
tactgaaactattat

SEQ ID NO: 1717863 - DNA, 15 bp, Homo sapiens
actgaaactattata

SEQ ID NO: 1717864 - DNA, 15 bp, Homo sapiens
ctgaaactattatag

SEQ ID NO: 1717865 - DNA, 15 bp, Homo sapiens
tgaaactattataga

SEQ ID NO: 1717866 - DNA, 15 bp, Homo sapiens
gaaactattatagat

SEQ ID NO: 1717867 - DNA, 15 bp, Homo sapiens
aaactattatagatt

SEQ ID NO: 1717868 - DNA, 15 bp, Homo sapiens
aactattatagattt

SEQ ID NO: 1717869 - DNA, 15 bp, Homo sapiens
actattatagatttg

SEQ ID NO: 1717870 - DNA, 15 bp, Homo sapiens
ctattatagatttga

SEQ ID NO: 1717871 - DNA, 15 bp, Homo sapiens
tattatagatttgaa

SEQ ID NO: 1717872 - DNA, 15 bp, Homo sapiens
attatagatttgaaa

SEQ ID NO: 1717873 - DNA, 15 bp, Homo sapiens
ttatagatttgaaag

SEQ ID NO: 1717874 - DNA, 15 bp, Homo sapiens
tatagatttgaaaga

SEQ ID NO: 1717875 - DNA, 15 bp, Homo sapiens
atagatttgaaagat

SEQ ID NO: 1717876 - DNA, 15 bp, Homo sapiens
tagatttgaaagata

SEQ ID NO: 1717877 - DNA, 15 bp, Homo sapiens
agatttgaaagatac

SEQ ID NO: 1717878 - DNA, 15 bp, Homo sapiens
gatttgaaagataca

SEQ ID NO: 1717879 - DNA, 15 bp, Homo sapiens
atttgaaagatacat

SEQ ID NO: 1717880 - DNA, 15 bp, Homo sapiens
tttgaaagatacatc

SEQ ID NO: 1717881 - DNA, 15 bp, Homo sapiens
ttgaaagatacatca

SEQ ID NO: 1717882 - DNA, 15 bp, Homo sapiens
tgaaagatacatcac

SEQ ID NO: 1717883 - DNA, 15 bp, Homo sapiens
gaaagatacatcacc

SEQ ID NO: 1717884 - DNA, 15 bp, Homo sapiens
aaagatacatcacca

SEQ ID NO: 1717885 - DNA, 15 bp, Homo sapiens
aagatacatcaccag

SEQ ID NO: 1717886 - DNA, 15 bp, Homo sapiens
agatacatcaccaga

SEQ ID NO: 1717887 - DNA, 15 bp, Homo sapiens
gatacatcaccagaa

SEQ ID NO: 1717888 - DNA, 15 bp, Homo sapiens
atacatcaccagaac

SEQ ID NO: 1717889 - DNA, 15 bp, Homo sapiens
tacatcaccagaaca

SEQ ID NO: 1717890 - DNA, 15 bp, Homo sapiens
acatcaccagaacag

SEQ ID NO: 1717891 - DNA, 15 bp, Homo sapiens
catcaccagaacaga

SEQ ID NO: 1717892 - DNA, 15 bp, Homo sapiens
atcaccagaacagaa

SEQ ID NO: 1717893 - DNA, 15 bp, Homo sapiens
tcaccagaacagaag

SEQ ID NO: 1717894 - DNA, 15 bp, Homo sapiens
caccagaacagaagg

SEQ ID NO: 1717895 - DNA, 15 bp, Homo sapiens
accagaacagaaggg

SEQ ID NO: 1717896 - DNA, 15 bp, Homo sapiens
ccagaacagaaggga

SEQ ID NO: 1717897 - DNA, 15 bp, Homo sapiens
agaacagaagggagt

SEQ ID NO: 1717898 - DNA, 15 bp, Homo sapiens
gaacagaagggagtc

SEQ ID NO: 1717899 - DNA, 15 bp, Homo sapiens
aacagaagggagtcc

SEQ ID NO: 1717900 - DNA, 15 bp, Homo sapiens
acagaagggagtcca

SEQ ID NO: 1717901 - DNA, 15 bp, Homo sapiens
cagaagggagtccag

SEQ ID NO: 1717902 - DNA, 15 bp, Homo sapiens
agaagggagtccaga

SEQ ID NO: 1717903 - DNA, 15 bp, Homo sapiens
gaagggagtccagaa

SEQ ID NO: 1717904 - DNA, 15 bp, Homo sapiens
aagggagtccagaaa

SEQ ID NO: 1717905 - DNA, 15 bp, Homo sapiens
agggagtccagaaat

SEQ ID NO: 1717906 - DNA, 15 bp, Homo sapiens
gggagtccagaaata

SEQ ID NO: 1717907 - DNA, 15 bp, Homo sapiens
ggagtccagaaatag

SEQ ID NO: 1717908 - DNA, 15 bp, Homo sapiens
gagtccagaaataga

SEQ ID NO: 1717909 - DNA, 15 bp, Homo sapiens
agtccagaaatagat

SEQ ID NO: 1717910 - DNA, 15 bp, Homo sapiens
gtccagaaatagatt

SEQ ID NO: 1717911 - DNA, 15 bp, Homo sapiens
tccagaaatagattc

SEQ ID NO: 1717912 - DNA, 15 bp, Homo sapiens
ccagaaatagattca

SEQ ID NO: 1717913 - DNA, 15 bp, Homo sapiens
cagaaatagattcac

SEQ ID NO: 1717914 - DNA, 15 bp, Homo sapiens
agaaatagattcacc

SEQ ID NO: 1717915 - DNA, 15 bp, Homo sapiens
gaaatagattcacca

SEQ ID NO: 1717916 - DNA, 15 bp, Homo sapiens
aaatagattcaccag

SEQ ID NO: 1717917 - DNA, 15 bp, Homo sapiens
aatagattcaccaga

SEQ ID NO: 1717918 - DNA, 15 bp, Homo sapiens
atagattcaccagag

SEQ ID NO: 1717919 - DNA, 15 bp, Homo sapiens
tagattcaccagaga

SEQ ID NO: 1717920 - DNA, 15 bp, Homo sapiens
agattcaccagagat

SEQ ID NO: 1717921 - DNA, 15 bp, Homo sapiens
gattcaccagagatc

SEQ ID NO: 1717922 - DNA, 15 bp, Homo sapiens
attcaccagagatcc

SEQ ID NO: 1717923 - DNA, 15 bp, Homo sapiens
ttcaccagagatccc

SEQ ID NO: 1717924 - DNA, 15 bp, Homo sapiens
tcaccagagatccca

SEQ ID NO: 1717925 - DNA, 15 bp, Homo sapiens
caccagagatcccat

SEQ ID NO: 1717926 - DNA, 15 bp, Homo sapiens
accagagatcccatt

SEQ ID NO: 1717927 - DNA, 15 bp, Homo sapiens
ccagagatcccattt

SEQ ID NO: 1717928 - DNA, 15 bp, Homo sapiens
cagagatcccattta

SEQ ID NO: 1717929 - DNA, 15 bp, Homo sapiens
agagatcccatttat

SEQ ID NO: 1717930 - DNA, 15 bp, Homo sapiens
gagatcccatttatc

SEQ ID NO: 1717931 - DNA, 15 bp, Homo sapiens
agatcccatttatca

SEQ ID NO: 1717932 - DNA, 15 bp, Homo sapiens
gatcccatttatcag

SEQ ID NO: 1717933 - DNA, 15 bp, Homo sapiens
atcccatttatcaga

SEQ ID NO: 1717934 - DNA, 15 bp, Homo sapiens
tcccatttatcagaa

SEQ ID NO: 1717935 - DNA, 15 bp, Homo sapiens
cccatttatcagaat

SEQ ID NO: 1717936 - DNA, 15 bp, Homo sapiens
ccatttatcagaata

SEQ ID NO: 1717937 - DNA, 15 bp, Homo sapiens
catttatcagaatat

SEQ ID NO: 1717938 - DNA, 15 bp, Homo sapiens
atttatcagaatata

SEQ ID NO: 1717939 - DNA, 15 bp, Homo sapiens
tttatcagaatatat

SEQ ID NO: 1717940 - DNA, 15 bp, Homo sapiens
ttatcagaatatatt

SEQ ID NO: 1717941 - DNA, 15 bp, Homo sapiens
tatcagaatatattt

SEQ ID NO: 1717942 - DNA, 15 bp, Homo sapiens
atcagaatatatttt

SEQ ID NO: 1717943 - DNA, 15 bp, Homo sapiens
tcagaatatatttta

SEQ ID NO: 1717944 - DNA, 15 bp, Homo sapiens
cagaatatattttaa

SEQ ID NO: 1717945 - DNA, 15 bp, Homo sapiens
agaatatattttaaa

SEQ ID NO: 1717946 - DNA, 15 bp, Homo sapiens
gaatatattttaaac

SEQ ID NO: 1717947 - DNA, 15 bp, Homo sapiens
aatatattttaaact

SEQ ID NO: 1717948 - DNA, 15 bp, Homo sapiens
atatattttaaactt

SEQ ID NO: 1717949 - DNA, 15 bp, Homo sapiens
tatattttaaacttc

SEQ ID NO: 1717950 - DNA, 15 bp, Homo sapiens
atattttaaacttct

SEQ ID NO: 1717951 - DNA, 15 bp, Homo sapiens
tattttaaacttcta

SEQ ID NO: 1717952 - DNA, 15 bp, Homo sapiens
attttaaacttctaa

SEQ ID NO: 1717953 - DNA, 15 bp, Homo sapiens
ttttaaacttctaat

SEQ ID NO: 1717954 - DNA, 15 bp, Homo sapiens
tttaaacttctaatc

SEQ ID NO: 1717955 - DNA, 15 bp, Homo sapiens
ttaaacttctaatca

SEQ ID NO: 1717956 - DNA, 15 bp, Homo sapiens
taaacttctaatcac

SEQ ID NO: 1717957 - DNA, 15 bp, Homo sapiens
aaacttctaatcaca

SEQ ID NO: 1717958 - DNA, 15 bp, Homo sapiens
aacttctaatcacaa

SEQ ID NO: 1717959 - DNA, 15 bp, Homo sapiens
acttctaatcacaaa

SEQ ID NO: 1717960 - DNA, 15 bp, Homo sapiens
cttctaatcacaaaa

SEQ ID NO: 1717961 - DNA, 15 bp, Homo sapiens
ttctaatcacaaaaa

SEQ ID NO: 1717962 - DNA, 15 bp, Homo sapiens
tctaatcacaaaaag

SEQ ID NO: 1717963 - DNA, 15 bp, Homo sapiens
ctaatcacaaaaagt

SEQ ID NO: 1717964 - DNA, 15 bp, Homo sapiens
taatcacaaaaagtg

SEQ ID NO: 1717965 - DNA, 15 bp, Homo sapiens
aatcacaaaaagtga

SEQ ID NO: 1717966 - DNA, 15 bp, Homo sapiens
atcacaaaaagtgag

SEQ ID NO: 1717967 - DNA, 15 bp, Homo sapiens
tcacaaaaagtgagc

SEQ ID NO: 1717968 - DNA, 15 bp, Homo sapiens
cacaaaaagtgagca

SEQ ID NO: 1717969 - DNA, 15 bp, Homo sapiens
acaaaaagtgagcac

SEQ ID NO: 1717970 - DNA, 15 bp, Homo sapiens
caaaaagtgagcaca

SEQ ID NO: 1717971 - DNA, 15 bp, Homo sapiens
aaaaagtgagcacac

SEQ ID NO: 1717972 - DNA, 15 bp, Homo sapiens
aaaagtgagcacact

SEQ ID NO: 1717973 - DNA, 15 bp, Homo sapiens
aaagtgagcacactt

SEQ ID NO: 1717974 - DNA, 15 bp, Homo sapiens
aagtgagcacacttt

SEQ ID NO: 1717975 - DNA, 15 bp, Homo sapiens
agtgagcacactttt

SEQ ID NO: 1717976 - DNA, 15 bp, Homo sapiens
gtgagcacacttttc

SEQ ID NO: 1717977 - DNA, 15 bp, Homo sapiens
tgagcacacttttct

SEQ ID NO: 1717978 - DNA, 15 bp, Homo sapiens
gagcacacttttctc

SEQ ID NO: 1717979 - DNA, 15 bp, Homo sapiens
agcacacttttctct

SEQ ID NO: 1717980 - DNA, 15 bp, Homo sapiens
gcacacttttctctt

SEQ ID NO: 1717981 - DNA, 15 bp, Homo sapiens
cacacttttctcttc

SEQ ID NO: 1717982 - DNA, 15 bp, Homo sapiens
acacttttctcttcc

SEQ ID NO: 1717983 - DNA, 15 bp, Homo sapiens
cacttttctcttcct

SEQ ID NO: 1717984 - DNA, 15 bp, Homo sapiens
acttttctcttcctg

SEQ ID NO: 1717985 - DNA, 15 bp, Homo sapiens
cttttctcttcctgc

SEQ ID NO: 1717986 - DNA, 15 bp, Homo sapiens
ttttctcttcctgca

SEQ ID NO: 1717987 - DNA, 15 bp, Homo sapiens
tttctcttcctgcat

SEQ ID NO: 1717988 - DNA, 15 bp, Homo sapiens
ttctcttcctgcatt

SEQ ID NO: 1717989 - DNA, 15 bp, Homo sapiens
tctcttcctgcattg

SEQ ID NO: 1717990 - DNA, 15 bp, Homo sapiens
ctcttcctgcattgt

SEQ ID NO: 1717991 - DNA, 15 bp, Homo sapiens
tcttcctgcattgtt

SEQ ID NO: 1717992 - DNA, 15 bp, Homo sapiens
cttcctgcattgttc

SEQ ID NO: 1717993 - DNA, 15 bp, Homo sapiens
ttcctgcattgttca

SEQ ID NO: 1717994 - DNA, 15 bp, Homo sapiens
tcctgcattgttcac

SEQ ID NO: 1717995 - DNA, 15 bp, Homo sapiens
cctgcattgttcaca

SEQ ID NO: 1717996 - DNA, 15 bp, Homo sapiens
ctgcattgttcacaa

SEQ ID NO: 1717997 - DNA, 15 bp, Homo sapiens
tgcattgttcacaat

SEQ ID NO: 1717998 - DNA, 15 bp, Homo sapiens
gcattgttcacaatc

SEQ ID NO: 1717999 - DNA, 15 bp, Homo sapiens
cattgttcacaatca

SEQ ID NO: 1718000 - DNA, 15 bp, Homo sapiens
attgttcacaatcat

SEQ ID NO: 1718001 - DNA, 15 bp, Homo sapiens
ttgttcacaatcatt

SEQ ID NO: 1718002 - DNA, 15 bp, Homo sapiens
tgttcacaatcattt

SEQ ID NO: 1718003 - DNA, 15 bp, Homo sapiens
gttcacaatcatttg

SEQ ID NO: 1718004 - DNA, 15 bp, Homo sapiens
ttcacaatcatttgg

SEQ ID NO: 1718005 - DNA, 15 bp, Homo sapiens
tcacaatcatttgga

SEQ ID NO: 1718006 - DNA, 15 bp, Homo sapiens
cacaatcatttggaa

SEQ ID NO: 1718007 - DNA, 15 bp, Homo sapiens
acaatcatttggaaa

SEQ ID NO: 1718008 - DNA, 15 bp, Homo sapiens
caatcatttggaaaa

SEQ ID NO: 1718009 - DNA, 15 bp, Homo sapiens
aatcatttggaaaaa

SEQ ID NO: 1718010 - DNA, 15 bp, Homo sapiens
atcatttggaaaaaa

SEQ ID NO: 1718011 - DNA, 15 bp, Homo sapiens
tcatttggaaaaaat

SEQ ID NO: 1718012 - DNA, 15 bp, Homo sapiens
catttggaaaaaatc

SEQ ID NO: 1718013 - DNA, 15 bp, Homo sapiens
atttggaaaaaatct

SEQ ID NO: 1718014 - DNA, 15 bp, Homo sapiens
tttggaaaaaatctc

SEQ ID NO: 1718015 - DNA, 15 bp, Homo sapiens
ttggaaaaaatctca

SEQ ID NO: 1718016 - DNA, 15 bp, Homo sapiens
tggaaaaaatctcaa

SEQ ID NO: 1718017 - DNA, 15 bp, Homo sapiens
ggaaaaaatctcaaa

SEQ ID NO: 1718018 - DNA, 15 bp, Homo sapiens
gaaaaaatctcaaat

SEQ ID NO: 1718019 - DNA, 15 bp, Homo sapiens
aaaaaatctcaaatc

SEQ ID NO: 1718020 - DNA, 15 bp, Homo sapiens
aaaaatctcaaatct

SEQ ID NO: 1718021 - DNA, 15 bp, Homo sapiens
aaaatctcaaatcta

SEQ ID NO: 1718022 - DNA, 15 bp, Homo sapiens
aaatctcaaatctat

SEQ ID NO: 1718023 - DNA, 15 bp, Homo sapiens
aatctcaaatctata

SEQ ID NO: 1718024 - DNA, 15 bp, Homo sapiens
atctcaaatctataa

SEQ ID NO: 1718025 - DNA, 15 bp, Homo sapiens
tctcaaatctataaa

SEQ ID NO: 1718026 - DNA, 15 bp, Homo sapiens
ctcaaatctataaat

SEQ ID NO: 1718027 - DNA, 15 bp, Homo sapiens
tcaaatctataaata

SEQ ID NO: 1718028 - DNA, 15 bp, Homo sapiens
caaatctataaataa

SEQ ID NO: 1718029 - DNA, 15 bp, Homo sapiens
aaatctataaataag

SEQ ID NO: 1718030 - DNA, 15 bp, Homo sapiens
aatctataaataaga

SEQ ID NO: 1718031 - DNA, 15 bp, Homo sapiens
atctataaataagac

SEQ ID NO: 1718032 - DNA, 15 bp, Homo sapiens
tctataaataagacg

SEQ ID NO: 1718033 - DNA, 15 bp, Homo sapiens
ctataaataagacga

SEQ ID NO: 1718034 - DNA, 15 bp, Homo sapiens
tataaataagacgat

SEQ ID NO: 1718035 - DNA, 15 bp, Homo sapiens
ataaataagacgatg

SEQ ID NO: 1718036 - DNA, 15 bp, Homo sapiens
taaataagacgatgg

SEQ ID NO: 1718037 - DNA, 15 bp, Homo sapiens
aaataagacgatggg

SEQ ID NO: 1718038 - DNA, 15 bp, Homo sapiens
aataagacgatgggg

SEQ ID NO: 1718039 - DNA, 15 bp, Homo sapiens
ataagacgatggggt

SEQ ID NO: 1718040 - DNA, 15 bp, Homo sapiens
taagacgatggggta

SEQ ID NO: 1718041 - DNA, 15 bp, Homo sapiens
aagacgatggggtaa

SEQ ID NO: 1718042 - DNA, 15 bp, Homo sapiens
agacgatggggtaaa

SEQ ID NO: 1718043 - DNA, 15 bp, Homo sapiens
gacgatggggtaaag

SEQ ID NO: 1718044 - DNA, 15 bp, Homo sapiens
acgatggggtaaagg

SEQ ID NO: 1718045 - DNA, 15 bp, Homo sapiens
cgatggggtaaaggt

SEQ ID NO: 1718046 - DNA, 15 bp, Homo sapiens
gatggggtaaaggtc

SEQ ID NO: 1718047 - DNA, 15 bp, Homo sapiens
atggggtaaaggtca

SEQ ID NO: 1718048 - DNA, 15 bp, Homo sapiens
tggggtaaaggtcaa

SEQ ID NO: 1718049 - DNA, 15 bp, Homo sapiens
ggggtaaaggtcaaa

SEQ ID NO: 1718050 - DNA, 15 bp, Homo sapiens
gggtaaaggtcaaat

SEQ ID NO: 1718051 - DNA, 15 bp, Homo sapiens
ggtaaaggtcaaata

SEQ ID NO: 1718052 - DNA, 15 bp, Homo sapiens
gtaaaggtcaaataa

SEQ ID NO: 1718053 - DNA, 15 bp, Homo sapiens
taaaggtcaaataag

SEQ ID NO: 1718054 - DNA, 15 bp, Homo sapiens
aaaggtcaaataagt

SEQ ID NO: 1718055 - DNA, 15 bp, Homo sapiens
aaggtcaaataagtt

SEQ ID NO: 1718056 - DNA, 15 bp, Homo sapiens
aggtcaaataagttt

SEQ ID NO: 1718057 - DNA, 15 bp, Homo sapiens
ggtcaaataagtttc

SEQ ID NO: 1718058 - DNA, 15 bp, Homo sapiens
gtcaaataagtttcg

SEQ ID NO: 1718059 - DNA, 15 bp, Homo sapiens
tcaaataagtttcgg

SEQ ID NO: 1718060 - DNA, 15 bp, Homo sapiens
caaataagtttcggt

SEQ ID NO: 1718061 - DNA, 15 bp, Homo sapiens
aaataagtttcggta

SEQ ID NO: 1718062 - DNA, 15 bp, Homo sapiens
aataagtttcggtac

SEQ ID NO: 1718063 - DNA, 15 bp, Homo sapiens
ataagtttcggtaca

SEQ ID NO: 1718064 - DNA, 15 bp, Homo sapiens
taagtttcggtacat

SEQ ID NO: 1718065 - DNA, 15 bp, Homo sapiens
aagtttcggtacata

SEQ ID NO: 1718066 - DNA, 15 bp, Homo sapiens
agtttcggtacatat

SEQ ID NO: 1718067 - DNA, 15 bp, Homo sapiens
gtttcggtacatata

SEQ ID NO: 1718068 - DNA, 15 bp, Homo sapiens
tttcggtacatatat

SEQ ID NO: 1718069 - DNA, 15 bp, Homo sapiens
ttcggtacatatatg

SEQ ID NO: 1718070 - DNA, 15 bp, Homo sapiens
tcggtacatatatgc

SEQ ID NO: 1718071 - DNA, 15 bp, Homo sapiens
cggtacatatatgca

SEQ ID NO: 1718072 - DNA, 15 bp, Homo sapiens
ggtacatatatgcaa

SEQ ID NO: 1718073 - DNA, 15 bp, Homo sapiens
gtacatatatgcaat

SEQ ID NO: 1718074 - DNA, 15 bp, Homo sapiens
tacatatatgcaatg

SEQ ID NO: 1718075 - DNA, 15 bp, Homo sapiens
acatatatgcaatga

SEQ ID NO: 1718076 - DNA, 15 bp, Homo sapiens
catatatgcaatgat

SEQ ID NO: 1718077 - DNA, 15 bp, Homo sapiens
atatatgcaatgatg

SEQ ID NO: 1718078 - DNA, 15 bp, Homo sapiens
tatatgcaatgatgt

SEQ ID NO: 1718079 - DNA, 15 bp, Homo sapiens
atatgcaatgatgtt

SEQ ID NO: 1718080 - DNA, 15 bp, Homo sapiens
tatgcaatgatgttt

SEQ ID NO: 1718081 - DNA, 15 bp, Homo sapiens
atgcaatgatgtttt

SEQ ID NO: 1718082 - DNA, 15 bp, Homo sapiens
tgcaatgatgttttt

SEQ ID NO: 1718083 - DNA, 15 bp, Homo sapiens
gcaatgatgtttttc

SEQ ID NO: 1718084 - DNA, 15 bp, Homo sapiens
caatgatgtttttca

SEQ ID NO: 1718085 - DNA, 15 bp, Homo sapiens
aatgatgtttttcat

SEQ ID NO: 1718086 - DNA, 15 bp, Homo sapiens
atgatgtttttcatg

SEQ ID NO: 1718087 - DNA, 15 bp, Homo sapiens
tgatgtttttcatga

SEQ ID NO: 1718088 - DNA, 15 bp, Homo sapiens
gatgtttttcatgaa

SEQ ID NO: 1718089 - DNA, 15 bp, Homo sapiens
atgtttttcatgaag

SEQ ID NO: 1718090 - DNA, 15 bp, Homo sapiens
tgtttttcatgaagc

SEQ ID NO: 1718091 - DNA, 15 bp, Homo sapiens
gtttttcatgaagcc

SEQ ID NO: 1718092 - DNA, 15 bp, Homo sapiens
tttttcatgaagcca

SEQ ID NO: 1718093 - DNA, 15 bp, Homo sapiens
ttttcatgaagccaa

SEQ ID NO: 1718094 - DNA, 15 bp, Homo sapiens
tttcatgaagccaaa

SEQ ID NO: 1718095 - DNA, 15 bp, Homo sapiens
ttcatgaagccaaaa

SEQ ID NO: 1718096 - DNA, 15 bp, Homo sapiens
tcatgaagccaaaat

SEQ ID NO: 1718097 - DNA, 15 bp, Homo sapiens
catgaagccaaaata

SEQ ID NO: 1718098 - DNA, 15 bp, Homo sapiens
atgaagccaaaataa

SEQ ID NO: 1718099 - DNA, 15 bp, Homo sapiens
tgaagccaaaataat

SEQ ID NO: 1718100 - DNA, 15 bp, Homo sapiens
gaagccaaaataatg

SEQ ID NO: 1718101 - DNA, 15 bp, Homo sapiens
aagccaaaataatga

SEQ ID NO: 1718102 - DNA, 15 bp, Homo sapiens
agccaaaataatgat

SEQ ID NO: 1718103 - DNA, 15 bp, Homo sapiens
gccaaaataatgatg

SEQ ID NO: 1718104 - DNA, 15 bp, Homo sapiens
ccaaaataatgatgt

SEQ ID NO: 1718105 - DNA, 15 bp, Homo sapiens
caaaataatgatgtt

SEQ ID NO: 1718106 - DNA, 15 bp, Homo sapiens
aaaataatgatgttg

SEQ ID NO: 1718107 - DNA, 15 bp, Homo sapiens
aaataatgatgttga

SEQ ID NO: 1718108 - DNA, 15 bp, Homo sapiens
aataatgatgttgac

SEQ ID NO: 1718109 - DNA, 15 bp, Homo sapiens
ataatgatgttgact

SEQ ID NO: 1718110 - DNA, 15 bp, Homo sapiens
taatgatgttgactt

SEQ ID NO: 1718111 - DNA, 15 bp, Homo sapiens
aatgatgttgactta

SEQ ID NO: 1718112 - DNA, 15 bp, Homo sapiens
atgatgttgacttac

SEQ ID NO: 1718113 - DNA, 15 bp, Homo sapiens
tgatgttgacttaca

SEQ ID NO: 1718114 - DNA, 15 bp, Homo sapiens
gatgttgacttacat

SEQ ID NO: 1718115 - DNA, 15 bp, Homo sapiens
atgttgacttacatt

SEQ ID NO: 1718116 - DNA, 15 bp, Homo sapiens
tgttgacttacattt

SEQ ID NO: 1718117 - DNA, 15 bp, Homo sapiens
gttgacttacattta

SEQ ID NO: 1718118 - DNA, 15 bp, Homo sapiens
ttgacttacatttat

SEQ ID NO: 1718119 - DNA, 15 bp, Homo sapiens
tgacttacatttatt

SEQ ID NO: 1718120 - DNA, 15 bp, Homo sapiens
gacttacatttattg

SEQ ID NO: 1718121 - DNA, 15 bp, Homo sapiens
acttacatttattgt

SEQ ID NO: 1718122 - DNA, 15 bp, Homo sapiens
cttacatttattgtt

SEQ ID NO: 1718123 - DNA, 15 bp, Homo sapiens
ttacatttattgttt

SEQ ID NO: 1718124 - DNA, 15 bp, Homo sapiens
tacatttattgtttt

SEQ ID NO: 1718125 - DNA, 15 bp, Homo sapiens
acatttattgttttt

SEQ ID NO: 1718126 - DNA, 15 bp, Homo sapiens
catttattgtttttt

SEQ ID NO: 1718127 - DNA, 15 bp, Homo sapiens
atttattgttttttg

SEQ ID NO: 1718128 - DNA, 15 bp, Homo sapiens
tttattgttttttgt

SEQ ID NO: 1718129 - DNA, 15 bp, Homo sapiens
ttattgttttttgtg

SEQ ID NO: 1718130 - DNA, 15 bp, Homo sapiens
tattgttttttgtgg

SEQ ID NO: 1718131 - DNA, 15 bp, Homo sapiens
attgttttttgtgga

SEQ ID NO: 1718132 - DNA, 15 bp, Homo sapiens
ttgttttttgtggag

SEQ ID NO: 1718133 - DNA, 15 bp, Homo sapiens
tgttttttgtggagc

SEQ ID NO: 1718134 - DNA, 15 bp, Homo sapiens
gttttttgtggagca

SEQ ID NO: 1718135 - DNA, 15 bp, Homo sapiens
ttttttgtggagcaa

SEQ ID NO: 1718136 - DNA, 15 bp, Homo sapiens
tttttgtggagcaat

SEQ ID NO: 1718137 - DNA, 15 bp, Homo sapiens
ttttgtggagcaatg

SEQ ID NO: 1718138 - DNA, 15 bp, Homo sapiens
tttgtggagcaatgc

SEQ ID NO: 1718139 - DNA, 15 bp, Homo sapiens
ttgtggagcaatgcc

SEQ ID NO: 1718140 - DNA, 15 bp, Homo sapiens
tgtggagcaatgccc

SEQ ID NO: 1718141 - DNA, 15 bp, Homo sapiens
gtggagcaatgccca

SEQ ID NO: 1718142 - DNA, 15 bp, Homo sapiens
tggagcaatgcccat

SEQ ID NO: 1718143 - DNA, 15 bp, Homo sapiens
ggagcaatgcccatg

SEQ ID NO: 1718144 - DNA, 15 bp, Homo sapiens
gagcaatgcccatgt

SEQ ID NO: 1718145 - DNA, 15 bp, Homo sapiens
agcaatgcccatgtt

SEQ ID NO: 1718146 - DNA, 15 bp, Homo sapiens
gcaatgcccatgtta

SEQ ID NO: 1718147 - DNA, 15 bp, Homo sapiens
caatgcccatgttat

SEQ ID NO: 1718148 - DNA, 15 bp, Homo sapiens
aatgcccatgttata

SEQ ID NO: 1718149 - DNA, 15 bp, Homo sapiens
atgcccatgttatat

SEQ ID NO: 1718150 - DNA, 15 bp, Homo sapiens
tgcccatgttatatt

SEQ ID NO: 1718151 - DNA, 15 bp, Homo sapiens
gcccatgttatattg

SEQ ID NO: 1718152 - DNA, 15 bp, Homo sapiens
cccatgttatattgt

SEQ ID NO: 1718153 - DNA, 15 bp, Homo sapiens
taaatattcagaatc

SEQ ID NO: 1718154 - DNA, 15 bp, Homo sapiens
aaatattcagaatct

SEQ ID NO: 1718155 - DNA, 15 bp, Homo sapiens
aatattcagaatctg

SEQ ID NO: 1718156 - DNA, 15 bp, Homo sapiens
atattcagaatctga

SEQ ID NO: 1718157 - DNA, 15 bp, Homo sapiens
tattcagaatctgag

SEQ ID NO: 1718158 - DNA, 15 bp, Homo sapiens
attcagaatctgagg

SEQ ID NO: 1718159 - DNA, 15 bp, Homo sapiens
ttcagaatctgaggt

SEQ ID NO: 1718160 - DNA, 15 bp, Homo sapiens
tcagaatctgaggtg

SEQ ID NO: 1718161 - DNA, 15 bp, Homo sapiens
cagaatctgaggtgc

SEQ ID NO: 1718162 - DNA, 15 bp, Homo sapiens
agaatctgaggtgca

SEQ ID NO: 1718163 - DNA, 15 bp, Homo sapiens
gaatctgaggtgcat

SEQ ID NO: 1718164 - DNA, 15 bp, Homo sapiens
aatctgaggtgcatt

SEQ ID NO: 1718165 - DNA, 15 bp, Homo sapiens
atctgaggtgcattt

SEQ ID NO: 1718166 - DNA, 15 bp, Homo sapiens
tctgaggtgcattta

SEQ ID NO: 1718167 - DNA, 15 bp, Homo sapiens
ctgaggtgcatttac

SEQ ID NO: 1718168 - DNA, 15 bp, Homo sapiens
tgaggtgcatttaca

SEQ ID NO: 1718169 - DNA, 15 bp, Homo sapiens
gaggtgcatttacat

SEQ ID NO: 1718170 - DNA, 15 bp, Homo sapiens
aggtgcatttacatt

SEQ ID NO: 1718171 - DNA, 15 bp, Homo sapiens
ggtgcatttacattt

SEQ ID NO: 1718172 - DNA, 15 bp, Homo sapiens
gtgcatttacattta

SEQ ID NO: 1718173 - DNA, 15 bp, Homo sapiens
tgcatttacatttac

SEQ ID NO: 1718174 - DNA, 15 bp, Homo sapiens
gcatttacatttaca

SEQ ID NO: 1718175 - DNA, 15 bp, Homo sapiens
catttacatttacag

SEQ ID NO: 1718176 - DNA, 15 bp, Homo sapiens
atttacatttacagc

SEQ ID NO: 1718177 - DNA, 15 bp, Homo sapiens
tttacatttacagca

SEQ ID NO: 1718178 - DNA, 15 bp, Homo sapiens
ttacatttacagcac

SEQ ID NO: 1718179 - DNA, 15 bp, Homo sapiens
tacatttacagcaca

SEQ ID NO: 1718180 - DNA, 15 bp, Homo sapiens
acatttacagcacat

SEQ ID NO: 1718181 - DNA, 15 bp, Homo sapiens
catttacagcacatg

SEQ ID NO: 1718182 - DNA, 15 bp, Homo sapiens
atttacagcacatgt

SEQ ID NO: 1718183 - DNA, 15 bp, Homo sapiens
tttacagcacatgtt

SEQ ID NO: 1718184 - DNA, 15 bp, Homo sapiens
ttacagcacatgtta

SEQ ID NO: 1718185 - DNA, 15 bp, Homo sapiens
tacagcacatgttag

SEQ ID NO: 1718186 - DNA, 15 bp, Homo sapiens
acagcacatgttagc

SEQ ID NO: 1718187 - DNA, 15 bp, Homo sapiens
cagcacatgttagct

SEQ ID NO: 1718188 - DNA, 15 bp, Homo sapiens
agcacatgttagctc

SEQ ID NO: 1718189 - DNA, 15 bp, Homo sapiens
gcacatgttagctca

SEQ ID NO: 1718190 - DNA, 15 bp, Homo sapiens
cacatgttagctcaa

SEQ ID NO: 1718191 - DNA, 15 bp, Homo sapiens
acatgttagctcaaa

SEQ ID NO: 1718192 - DNA, 15 bp, Homo sapiens
catgttagctcaaat

SEQ ID NO: 1718193 - DNA, 15 bp, Homo sapiens
atgttagctcaaatc

SEQ ID NO: 1718194 - DNA, 15 bp, Homo sapiens
tgttagctcaaatca

SEQ ID NO: 1718195 - DNA, 15 bp, Homo sapiens
gttagctcaaatcag

SEQ ID NO: 1718196 - DNA, 15 bp, Homo sapiens
ttagctcaaatcagc

SEQ ID NO: 1718197 - DNA, 15 bp, Homo sapiens
tagctcaaatcagcc

SEQ ID NO: 1718198 - DNA, 15 bp, Homo sapiens
agctcaaatcagcct

SEQ ID NO: 1718199 - DNA, 15 bp, Homo sapiens
gctcaaatcagcctt

SEQ ID NO: 1718200 - DNA, 15 bp, Homo sapiens
ctcaaatcagcctta

SEQ ID NO: 1718201 - DNA, 15 bp, Homo sapiens
tcaaatcagccttat

SEQ ID NO: 1718202 - DNA, 15 bp, Homo sapiens
caaatcagccttatg

SEQ ID NO: 1718203 - DNA, 15 bp, Homo sapiens
aaatcagccttatgt

SEQ ID NO: 1718204 - DNA, 15 bp, Homo sapiens
aatcagccttatgtc

SEQ ID NO: 1718205 - DNA, 15 bp, Homo sapiens
atcagccttatgtca

SEQ ID NO: 1718206 - DNA, 15 bp, Homo sapiens
tcagccttatgtcaa

SEQ ID NO: 1718207 - DNA, 15 bp, Homo sapiens
cagccttatgtcaac

SEQ ID NO: 1718208 - DNA, 15 bp, Homo sapiens
agccttatgtcaacg

SEQ ID NO: 1718209 - DNA, 15 bp, Homo sapiens
gccttatgtcaacgt

SEQ ID NO: 1718210 - DNA, 15 bp, Homo sapiens
ccttatgtcaacgtc

SEQ ID NO: 1718211 - DNA, 15 bp, Homo sapiens
cttatgtcaacgtct

SEQ ID NO: 1718212 - DNA, 15 bp, Homo sapiens
ttatgtcaacgtctg

SEQ ID NO: 1718213 - DNA, 15 bp, Homo sapiens
tatgtcaacgtctgt

SEQ ID NO: 1718214 - DNA, 15 bp, Homo sapiens
atgtcaacgtctgtt

SEQ ID NO: 1718215 - DNA, 15 bp, Homo sapiens
tgtcaacgtctgttc

SEQ ID NO: 1718216 - DNA, 15 bp, Homo sapiens
gtcaacgtctgttct

SEQ ID NO: 1718217 - DNA, 15 bp, Homo sapiens
tcaacgtctgttctc

SEQ ID NO: 1718218 - DNA, 15 bp, Homo sapiens
caacgtctgttctca

SEQ ID NO: 1718219 - DNA, 15 bp, Homo sapiens
aacgtctgttctcaa

SEQ ID NO: 1718220 - DNA, 15 bp, Homo sapiens
acgtctgttctcaag

SEQ ID NO: 1718221 - DNA, 15 bp, Homo sapiens
cgtctgttctcaaga

SEQ ID NO: 1718222 - DNA, 15 bp, Homo sapiens
gtctgttctcaagag

SEQ ID NO: 1718223 - DNA, 15 bp, Homo sapiens
tctgttctcaagagc

SEQ ID NO: 1718224 - DNA, 15 bp, Homo sapiens
ctgttctcaagagcc

SEQ ID NO: 1718225 - DNA, 15 bp, Homo sapiens
tgttctcaagagcca

SEQ ID NO: 1718226 - DNA, 15 bp, Homo sapiens
gttctcaagagccac

SEQ ID NO: 1718227 - DNA, 15 bp, Homo sapiens
ttctcaagagccact

SEQ ID NO: 1718228 - DNA, 15 bp, Homo sapiens
tctcaagagccacta

SEQ ID NO: 1718229 - DNA, 15 bp, Homo sapiens
ctcaagagccactag

SEQ ID NO: 1718230 - DNA, 15 bp, Homo sapiens
tcaagagccactagt

SEQ ID NO: 1718231 - DNA, 15 bp, Homo sapiens
caagagccactagtg

SEQ ID NO: 1718232 - DNA, 15 bp, Homo sapiens
aagagccactagtgg

SEQ ID NO: 1718233 - DNA, 15 bp, Homo sapiens
agagccactagtggc

SEQ ID NO: 1718234 - DNA, 15 bp, Homo sapiens
gagccactagtggct

SEQ ID NO: 1718235 - DNA, 15 bp, Homo sapiens
agccactagtggcta

SEQ ID NO: 1718236 - DNA, 15 bp, Homo sapiens
gccactagtggctac

SEQ ID NO: 1718237 - DNA, 15 bp, Homo sapiens
ccactagtggctact

SEQ ID NO: 1718238 - DNA, 15 bp, Homo sapiens
cactagtggctacta

SEQ ID NO: 1718239 - DNA, 15 bp, Homo sapiens
actagtggctactat

SEQ ID NO: 1718240 - DNA, 15 bp, Homo sapiens
ctagtggctactatg

SEQ ID NO: 1718241 - DNA, 15 bp, Homo sapiens
tagtggctactatgt

SEQ ID NO: 1718242 - DNA, 15 bp, Homo sapiens
agtggctactatgtt

SEQ ID NO: 1718243 - DNA, 15 bp, Homo sapiens
gtggctactatgttg

SEQ ID NO: 1718244 - DNA, 15 bp, Homo sapiens
tggctactatgttgg

SEQ ID NO: 1718245 - DNA, 15 bp, Homo sapiens
ggctactatgttgga

SEQ ID NO: 1718246 - DNA, 15 bp, Homo sapiens
gctactatgttggac

SEQ ID NO: 1718247 - DNA, 15 bp, Homo sapiens
ctactatgttggaca

SEQ ID NO: 1718248 - DNA, 15 bp, Homo sapiens
tactatgttggacaa

SEQ ID NO: 1718249 - DNA, 15 bp, Homo sapiens
actatgttggacaac

SEQ ID NO: 1718250 - DNA, 15 bp, Homo sapiens
ctatgttggacaaca

SEQ ID NO: 1718251 - DNA, 15 bp, Homo sapiens
tatgttggacaacac

SEQ ID NO: 1718252 - DNA, 15 bp, Homo sapiens
atgttggacaacaca

SEQ ID NO: 1718253 - DNA, 15 bp, Homo sapiens
tgttggacaacacag

SEQ ID NO: 1718254 - DNA, 15 bp, Homo sapiens
gttggacaacacaga

SEQ ID NO: 1718255 - DNA, 15 bp, Homo sapiens
ttggacaacacagaa

SEQ ID NO: 1718256 - DNA, 15 bp, Homo sapiens
tggacaacacagaat

SEQ ID NO: 1718257 - DNA, 15 bp, Homo sapiens
ggacaacacagaatt

SEQ ID NO: 1718258 - DNA, 15 bp, Homo sapiens
gacaacacagaatta

SEQ ID NO: 1718259 - DNA, 15 bp, Homo sapiens
acaacacagaattag

SEQ ID NO: 1718260 - DNA, 15 bp, Homo sapiens
caacacagaattaga

SEQ ID NO: 1718261 - DNA, 15 bp, Homo sapiens
aacacagaattagaa

SEQ ID NO: 1718262 - DNA, 15 bp, Homo sapiens
acacagaattagaat

SEQ ID NO: 1718263 - DNA, 15 bp, Homo sapiens
cacagaattagaata

SEQ ID NO: 1718264 - DNA, 15 bp, Homo sapiens
acagaattagaatat

SEQ ID NO: 1718265 - DNA, 15 bp, Homo sapiens
cagaattagaatatc

SEQ ID NO: 1718266 - DNA, 15 bp, Homo sapiens
agaattagaatatca

SEQ ID NO: 1718267 - DNA, 15 bp, Homo sapiens
gaattagaatatcag

SEQ ID NO: 1718268 - DNA, 15 bp, Homo sapiens
aattagaatatcagg

SEQ ID NO: 1718269 - DNA, 15 bp, Homo sapiens
attagaatatcaggt

SEQ ID NO: 1718270 - DNA, 15 bp, Homo sapiens
ttagaatatcaggtt

SEQ ID NO: 1718271 - DNA, 15 bp, Homo sapiens
tagaatatcaggttc

SEQ ID NO: 1718272 - DNA, 15 bp, Homo sapiens
agaatatcaggttca

SEQ ID NO: 1718273 - DNA, 15 bp, Homo sapiens
gaatatcaggttcat

SEQ ID NO: 1718274 - DNA, 15 bp, Homo sapiens
aatatcaggttcatg

SEQ ID NO: 1718275 - DNA, 15 bp, Homo sapiens
atatcaggttcatga

SEQ ID NO: 1718276 - DNA, 15 bp, Homo sapiens
tatcaggttcatgaa

SEQ ID NO: 1718277 - DNA, 15 bp, Homo sapiens
atcaggttcatgaat

SEQ ID NO: 1718278 - DNA, 15 bp, Homo sapiens
tcaggttcatgaatt

SEQ ID NO: 1718279 - DNA, 15 bp, Homo sapiens
caggttcatgaattc

SEQ ID NO: 1718280 - DNA, 15 bp, Homo sapiens
aggttcatgaattct

SEQ ID NO: 1718281 - DNA, 15 bp, Homo sapiens
ggttcatgaattctc

SEQ ID NO: 1718282 - DNA, 15 bp, Homo sapiens
gttcatgaattctct

SEQ ID NO: 1718283 - DNA, 15 bp, Homo sapiens
ttcatgaattctcta

SEQ ID NO: 1718284 - DNA, 15 bp, Homo sapiens
tcatgaattctctag

SEQ ID NO: 1718285 - DNA, 15 bp, Homo sapiens
catgaattctctagt

SEQ ID NO: 1718286 - DNA, 15 bp, Homo sapiens
atgaattctctagtc

SEQ ID NO: 1718287 - DNA, 15 bp, Homo sapiens
tgaattctctagtct

SEQ ID NO: 1718288 - DNA, 15 bp, Homo sapiens
gaattctctagtctg

SEQ ID NO: 1718289 - DNA, 15 bp, Homo sapiens
aattctctagtctga

SEQ ID NO: 1718290 - DNA, 15 bp, Homo sapiens
tctctagtctgaatc

SEQ ID NO: 1718291 - DNA, 15 bp, Homo sapiens
ctctagtctgaatct

SEQ ID NO: 1718292 - DNA, 15 bp, Homo sapiens
tctagtctgaatctc

SEQ ID NO: 1718293 - DNA, 15 bp, Homo sapiens
ctagtctgaatctca

SEQ ID NO: 1718294 - DNA, 15 bp, Homo sapiens
tagtctgaatctcag

SEQ ID NO: 1718295 - DNA, 15 bp, Homo sapiens
agtctgaatctcagt

SEQ ID NO: 1718296 - DNA, 15 bp, Homo sapiens
gtctgaatctcagtt

SEQ ID NO: 1718297 - DNA, 15 bp, Homo sapiens
tctgaatctcagttg

SEQ ID NO: 1718298 - DNA, 15 bp, Homo sapiens
ctgaatctcagttgt

SEQ ID NO: 1718299 - DNA, 15 bp, Homo sapiens
tgaatctcagttgtc

SEQ ID NO: 1718300 - DNA, 15 bp, Homo sapiens
gaatctcagttgtct

SEQ ID NO: 1718301 - DNA, 15 bp, Homo sapiens
aatctcagttgtctc

SEQ ID NO: 1718302 - DNA, 15 bp, Homo sapiens
atctcagttgtctct

SEQ ID NO: 1718303 - DNA, 15 bp, Homo sapiens
tctcagttgtctcta

SEQ ID NO: 1718304 - DNA, 15 bp, Homo sapiens
ctcagttgtctctac

SEQ ID NO: 1718305 - DNA, 15 bp, Homo sapiens
tcagttgtctctaca

SEQ ID NO: 1718306 - DNA, 15 bp, Homo sapiens
cagttgtctctacaa

SEQ ID NO: 1718307 - DNA, 15 bp, Homo sapiens
agttgtctctacaat

SEQ ID NO: 1718308 - DNA, 15 bp, Homo sapiens
gttgtctctacaatt

SEQ ID NO: 1718309 - DNA, 15 bp, Homo sapiens
ttgtctctacaattc

SEQ ID NO: 1718310 - DNA, 15 bp, Homo sapiens
tgtctctacaattct

SEQ ID NO: 1718311 - DNA, 15 bp, Homo sapiens
gtctctacaattcta

SEQ ID NO: 1718312 - DNA, 15 bp, Homo sapiens
tctctacaattctag

SEQ ID NO: 1718313 - DNA, 15 bp, Homo sapiens
ctctacaattctagt

SEQ ID NO: 1718314 - DNA, 15 bp, Homo sapiens
tctacaattctagtc

SEQ ID NO: 1718315 - DNA, 15 bp, Homo sapiens
ctacaattctagtct

SEQ ID NO: 1718316 - DNA, 15 bp, Homo sapiens
tacaattctagtctt

SEQ ID NO: 1718317 - DNA, 15 bp, Homo sapiens
acaattctagtctta

SEQ ID NO: 1718318 - DNA, 15 bp, Homo sapiens
caattctagtcttat

SEQ ID NO: 1718319 - DNA, 15 bp, Homo sapiens
aattctagtcttata

SEQ ID NO: 1718320 - DNA, 15 bp, Homo sapiens
attctagtcttataa

SEQ ID NO: 1718321 - DNA, 15 bp, Homo sapiens
ttctagtcttataaa

SEQ ID NO: 1718322 - DNA, 15 bp, Homo sapiens
tctagtcttataaaa

SEQ ID NO: 1718323 - DNA, 15 bp, Homo sapiens
ctagtcttataaaaa

SEQ ID NO: 1718324 - DNA, 15 bp, Homo sapiens
tagtcttataaaaac

SEQ ID NO: 1718325 - DNA, 15 bp, Homo sapiens
agtcttataaaaaca

SEQ ID NO: 1718326 - DNA, 15 bp, Homo sapiens
gtcttataaaaacat

SEQ ID NO: 1718327 - DNA, 15 bp, Homo sapiens
tcttataaaaacatg

SEQ ID NO: 1718328 - DNA, 15 bp, Homo sapiens
cttataaaaacatga

SEQ ID NO: 1718329 - DNA, 15 bp, Homo sapiens
ttataaaaacatgag

SEQ ID NO: 1718330 - DNA, 15 bp, Homo sapiens
tataaaaacatgagc

SEQ ID NO: 1718331 - DNA, 15 bp, Homo sapiens
ataaaaacatgagcc

SEQ ID NO: 1718332 - DNA, 15 bp, Homo sapiens
taaaaacatgagccc

SEQ ID NO: 1718333 - DNA, 15 bp, Homo sapiens
aaaaacatgagccca

SEQ ID NO: 1718334 - DNA, 15 bp, Homo sapiens
aaaacatgagcccag

SEQ ID NO: 1718335 - DNA, 15 bp, Homo sapiens
aaacatgagcccagc

SEQ ID NO: 1718336 - DNA, 15 bp, Homo sapiens
aacatgagcccagct

SEQ ID NO: 1718337 - DNA, 15 bp, Homo sapiens
acatgagcccagctt

SEQ ID NO: 1718338 - DNA, 15 bp, Homo sapiens
catgagcccagcttc

SEQ ID NO: 1718339 - DNA, 15 bp, Homo sapiens
atgagcccagcttct

SEQ ID NO: 1718340 - DNA, 15 bp, Homo sapiens
tgagcccagcttctc

SEQ ID NO: 1718341 - DNA, 15 bp, Homo sapiens
gagcccagcttctcc

SEQ ID NO: 1718342 - DNA, 15 bp, Homo sapiens
agcccagcttctcca

SEQ ID NO: 1718343 - DNA, 15 bp, Homo sapiens
gcccagcttctccat

SEQ ID NO: 1718344 - DNA, 15 bp, Homo sapiens
cccagcttctccatt

SEQ ID NO: 1718345 - DNA, 15 bp, Homo sapiens
ccagcttctccattg

SEQ ID NO: 1718346 - DNA, 15 bp, Homo sapiens
cagcttctccattgg

SEQ ID NO: 1718347 - DNA, 15 bp, Homo sapiens
agcttctccattgga

SEQ ID NO: 1718348 - DNA, 15 bp, Homo sapiens
gcttctccattggaa

SEQ ID NO: 1718349 - DNA, 15 bp, Homo sapiens
cttctccattggaat

SEQ ID NO: 1718350 - DNA, 15 bp, Homo sapiens
ttctccattggaatg

SEQ ID NO: 1718351 - DNA, 15 bp, Homo sapiens
tctccattggaatgt

SEQ ID NO: 1718352 - DNA, 15 bp, Homo sapiens
ctccattggaatgtg

SEQ ID NO: 1718353 - DNA, 15 bp, Homo sapiens
tccattggaatgtgt

SEQ ID NO: 1718354 - DNA, 15 bp, Homo sapiens
ccattggaatgtgtc

SEQ ID NO: 1718355 - DNA, 15 bp, Homo sapiens
cattggaatgtgtcc

SEQ ID NO: 1718356 - DNA, 15 bp, Homo sapiens
attggaatgtgtcct

SEQ ID NO: 1718357 - DNA, 15 bp, Homo sapiens
ttggaatgtgtcctt

SEQ ID NO: 1718358 - DNA, 15 bp, Homo sapiens
tggaatgtgtcctta

SEQ ID NO: 1718359 - DNA, 15 bp, Homo sapiens
ggaatgtgtccttac

SEQ ID NO: 1718360 - DNA, 15 bp, Homo sapiens
gaatgtgtccttaca

SEQ ID NO: 1718361 - DNA, 15 bp, Homo sapiens
aatgtgtccttacac

SEQ ID NO: 1718362 - DNA, 15 bp, Homo sapiens
atgtgtccttacact

SEQ ID NO: 1718363 - DNA, 15 bp, Homo sapiens
tgtgtccttacactg

SEQ ID NO: 1718364 - DNA, 15 bp, Homo sapiens
gtgtccttacactgt

SEQ ID NO: 1718365 - DNA, 15 bp, Homo sapiens
tgtccttacactgta

SEQ ID NO: 1718366 - DNA, 15 bp, Homo sapiens
gtccttacactgtac

SEQ ID NO: 1718367 - DNA, 15 bp, Homo sapiens
tccttacactgtact

SEQ ID NO: 1718368 - DNA, 15 bp, Homo sapiens
ccttacactgtactc

SEQ ID NO: 1718369 - DNA, 15 bp, Homo sapiens
cttacactgtactca

SEQ ID NO: 1718370 - DNA, 15 bp, Homo sapiens
ttacactgtactcag

SEQ ID NO: 1718371 - DNA, 15 bp, Homo sapiens
tacactgtactcaga

SEQ ID NO: 1718372 - DNA, 15 bp, Homo sapiens
acactgtactcagaa

SEQ ID NO: 1718373 - DNA, 15 bp, Homo sapiens
cactgtactcagaaa

SEQ ID NO: 1718374 - DNA, 15 bp, Homo sapiens
actgtactcagaaac

SEQ ID NO: 1718375 - DNA, 15 bp, Homo sapiens
ctgtactcagaaact

SEQ ID NO: 1718376 - DNA, 15 bp, Homo sapiens
tgtactcagaaactt

SEQ ID NO: 1718377 - DNA, 15 bp, Homo sapiens
gtactcagaaacttt

SEQ ID NO: 1718378 - DNA, 15 bp, Homo sapiens
tactcagaaactttg

SEQ ID NO: 1718379 - DNA, 15 bp, Homo sapiens
actcagaaactttgc

SEQ ID NO: 1718380 - DNA, 15 bp, Homo sapiens
ctcagaaactttgca

SEQ ID NO: 1718381 - DNA, 15 bp, Homo sapiens
tcagaaactttgcaa

SEQ ID NO: 1718382 - DNA, 15 bp, Homo sapiens
cagaaactttgcaaa

SEQ ID NO: 1718383 - DNA, 15 bp, Homo sapiens
agaaactttgcaaaa

SEQ ID NO: 1718384 - DNA, 15 bp, Homo sapiens
gaaactttgcaaaac

SEQ ID NO: 1718385 - DNA, 15 bp, Homo sapiens
aaactttgcaaaact

SEQ ID NO: 1718386 - DNA, 15 bp, Homo sapiens
aactttgcaaaactt

SEQ ID NO: 1718387 - DNA, 15 bp, Homo sapiens
actttgcaaaacttc

SEQ ID NO: 1718388 - DNA, 15 bp, Homo sapiens
ctttgcaaaacttca

SEQ ID NO: 1718389 - DNA, 15 bp, Homo sapiens
tttgcaaaacttcag

SEQ ID NO: 1718390 - DNA, 15 bp, Homo sapiens
ttgcaaaacttcagt

SEQ ID NO: 1718391 - DNA, 15 bp, Homo sapiens
tgcaaaacttcagtt

SEQ ID NO: 1718392 - DNA, 15 bp, Homo sapiens
gcaaaacttcagttt

SEQ ID NO: 1718393 - DNA, 15 bp, Homo sapiens
caaaacttcagtttt

SEQ ID NO: 1718394 - DNA, 15 bp, Homo sapiens
aaaacttcagttttg

SEQ ID NO: 1718395 - DNA, 15 bp, Homo sapiens
aaacttcagttttgc

SEQ ID NO: 1718396 - DNA, 15 bp, Homo sapiens
aacttcagttttgca

SEQ ID NO: 1718397 - DNA, 15 bp, Homo sapiens
acttcagttttgcag

SEQ ID NO: 1718398 - DNA, 15 bp, Homo sapiens
cttcagttttgcagg

SEQ ID NO: 1718399 - DNA, 15 bp, Homo sapiens
ttcagttttgcagga

SEQ ID NO: 1718400 - DNA, 15 bp, Homo sapiens
tcagttttgcaggat

SEQ ID NO: 1718401 - DNA, 15 bp, Homo sapiens
cagttttgcaggatg

SEQ ID NO: 1718402 - DNA, 15 bp, Homo sapiens
agttttgcaggatgt

SEQ ID NO: 1718403 - DNA, 15 bp, Homo sapiens
gttttgcaggatgtc

SEQ ID NO: 1718404 - DNA, 15 bp, Homo sapiens
ttttgcaggatgtca

SEQ ID NO: 1718405 - DNA, 15 bp, Homo sapiens
tttgcaggatgtcag

SEQ ID NO: 1718406 - DNA, 15 bp, Homo sapiens
ttgcaggatgtcagt

SEQ ID NO: 1718407 - DNA, 15 bp, Homo sapiens
tgcaggatgtcagtt

SEQ ID NO: 1718408 - DNA, 15 bp, Homo sapiens
gcaggatgtcagttt

SEQ ID NO: 1718409 - DNA, 15 bp, Homo sapiens
caggatgtcagtttg

SEQ ID NO: 1718410 - DNA, 15 bp, Homo sapiens
aggatgtcagtttgg

SEQ ID NO: 1718411 - DNA, 15 bp, Homo sapiens
ggatgtcagtttgga

SEQ ID NO: 1718412 - DNA, 15 bp, Homo sapiens
gatgtcagtttggat

SEQ ID NO: 1718413 - DNA, 15 bp, Homo sapiens
atgtcagtttggatg

SEQ ID NO: 1718414 - DNA, 15 bp, Homo sapiens
tgtcagtttggatgc

SEQ ID NO: 1718415 - DNA, 15 bp, Homo sapiens
gtcagtttggatgca

SEQ ID NO: 1718416 - DNA, 15 bp, Homo sapiens
tcagtttggatgcaa

SEQ ID NO: 1718417 - DNA, 15 bp, Homo sapiens
cagtttggatgcaag

SEQ ID NO: 1718418 - DNA, 15 bp, Homo sapiens
agtttggatgcaaga

SEQ ID NO: 1718419 - DNA, 15 bp, Homo sapiens
gtttggatgcaagaa

SEQ ID NO: 1718420 - DNA, 15 bp, Homo sapiens
tttggatgcaagaaa

SEQ ID NO: 1718421 - DNA, 15 bp, Homo sapiens
ttggatgcaagaaag

SEQ ID NO: 1718422 - DNA, 15 bp, Homo sapiens
tggatgcaagaaaga

SEQ ID NO: 1718423 - DNA, 15 bp, Homo sapiens
ggatgcaagaaagac

SEQ ID NO: 1718424 - DNA, 15 bp, Homo sapiens
gatgcaagaaagacc

SEQ ID NO: 1718425 - DNA, 15 bp, Homo sapiens
atgcaagaaagacct

SEQ ID NO: 1718426 - DNA, 15 bp, Homo sapiens
tgcaagaaagacctt

SEQ ID NO: 1718427 - DNA, 15 bp, Homo sapiens
gcaagaaagaccttt

SEQ ID NO: 1718428 - DNA, 15 bp, Homo sapiens
caagaaagacctttg

SEQ ID NO: 1718429 - DNA, 15 bp, Homo sapiens
aagaaagacctttgg

SEQ ID NO: 1718430 - DNA, 15 bp, Homo sapiens
agaaagacctttggg

SEQ ID NO: 1718431 - DNA, 15 bp, Homo sapiens
gaaagacctttgggg

SEQ ID NO: 1718432 - DNA, 15 bp, Homo sapiens
aaagacctttgggga

SEQ ID NO: 1718433 - DNA, 15 bp, Homo sapiens
aagacctttggggaa

SEQ ID NO: 1718434 - DNA, 15 bp, Homo sapiens
agacctttggggaat

SEQ ID NO: 1718435 - DNA, 15 bp, Homo sapiens
gacctttggggaatc

SEQ ID NO: 1718436 - DNA, 15 bp, Homo sapiens
acctttggggaatca

SEQ ID NO: 1718437 - DNA, 15 bp, Homo sapiens
cctttggggaatcaa

SEQ ID NO: 1718438 - DNA, 15 bp, Homo sapiens
ctttggggaatcaaa

SEQ ID NO: 1718439 - DNA, 15 bp, Homo sapiens
tttggggaatcaaac

SEQ ID NO: 1718440 - DNA, 15 bp, Homo sapiens
ttggggaatcaaaca

SEQ ID NO: 1718441 - DNA, 15 bp, Homo sapiens
tggggaatcaaacaa

SEQ ID NO: 1718442 - DNA, 15 bp, Homo sapiens
ggggaatcaaacaaa

SEQ ID NO: 1718443 - DNA, 15 bp, Homo sapiens
gggaatcaaacaaat

SEQ ID NO: 1718444 - DNA, 15 bp, Homo sapiens
ggaatcaaacaaatc

SEQ ID NO: 1718445 - DNA, 15 bp, Homo sapiens
gaatcaaacaaatca

SEQ ID NO: 1718446 - DNA, 15 bp, Homo sapiens
aatcaaacaaatcat

SEQ ID NO: 1718447 - DNA, 15 bp, Homo sapiens
atcaaacaaatcatt

SEQ ID NO: 1718448 - DNA, 15 bp, Homo sapiens
tcaaacaaatcattt

SEQ ID NO: 1718449 - DNA, 15 bp, Homo sapiens
caaacaaatcatttt

SEQ ID NO: 1718450 - DNA, 15 bp, Homo sapiens
aaacaaatcattttg

SEQ ID NO: 1718451 - DNA, 15 bp, Homo sapiens
aacaaatcattttga

SEQ ID NO: 1718452 - DNA, 15 bp, Homo sapiens
acaaatcattttgat

SEQ ID NO: 1718453 - DNA, 15 bp, Homo sapiens
caaatcattttgatg

SEQ ID NO: 1718454 - DNA, 15 bp, Homo sapiens
aaatcattttgatgt

SEQ ID NO: 1718455 - DNA, 15 bp, Homo sapiens
aatcattttgatgtc

SEQ ID NO: 1718456 - DNA, 15 bp, Homo sapiens
atcattttgatgtca

SEQ ID NO: 1718457 - DNA, 15 bp, Homo sapiens
tcattttgatgtcag

SEQ ID NO: 1718458 - DNA, 15 bp, Homo sapiens
cattttgatgtcaga

SEQ ID NO: 1718459 - DNA, 15 bp, Homo sapiens
attttgatgtcagaa

SEQ ID NO: 1718460 - DNA, 15 bp, Homo sapiens
ttttgatgtcagaag

SEQ ID NO: 1718461 - DNA, 15 bp, Homo sapiens
tttgatgtcagaagt

SEQ ID NO: 1718462 - DNA, 15 bp, Homo sapiens
ttgatgtcagaagtc

SEQ ID NO: 1718463 - DNA, 15 bp, Homo sapiens
tgatgtcagaagtca

SEQ ID NO: 1718464 - DNA, 15 bp, Homo sapiens
gatgtcagaagtcat

SEQ ID NO: 1718465 - DNA, 15 bp, Homo sapiens
atgtcagaagtcata

SEQ ID NO: 1718466 - DNA, 15 bp, Homo sapiens
tgtcagaagtcatag

SEQ ID NO: 1718467 - DNA, 15 bp, Homo sapiens
gtcagaagtcataga

SEQ ID NO: 1718468 - DNA, 15 bp, Homo sapiens
tcagaagtcatagag

SEQ ID NO: 1718469 - DNA, 15 bp, Homo sapiens
cagaagtcatagagc

SEQ ID NO: 1718470 - DNA, 15 bp, Homo sapiens
agaagtcatagagct

SEQ ID NO: 1718471 - DNA, 15 bp, Homo sapiens
gaagtcatagagcta

SEQ ID NO: 1718472 - DNA, 15 bp, Homo sapiens
aagtcatagagctac

SEQ ID NO: 1718473 - DNA, 15 bp, Homo sapiens
agtcatagagctaca

SEQ ID NO: 1718474 - DNA, 15 bp, Homo sapiens
gtcatagagctacac

SEQ ID NO: 1718475 - DNA, 15 bp, Homo sapiens
tcatagagctacact

SEQ ID NO: 1718476 - DNA, 15 bp, Homo sapiens
catagagctacactg

SEQ ID NO: 1718477 - DNA, 15 bp, Homo sapiens
atagagctacactgg

SEQ ID NO: 1718478 - DNA, 15 bp, Homo sapiens
tagagctacactggc

SEQ ID NO: 1718479 - DNA, 15 bp, Homo sapiens
agagctacactggcc

SEQ ID NO: 1718480 - DNA, 15 bp, Homo sapiens
gagctacactggcct

SEQ ID NO: 1718481 - DNA, 15 bp, Homo sapiens
agctacactggcctg

SEQ ID NO: 1718482 - DNA, 15 bp, Homo sapiens
gctacactggcctgt

SEQ ID NO: 1718483 - DNA, 15 bp, Homo sapiens
ctacactggcctgta

SEQ ID NO: 1718484 - DNA, 15 bp, Homo sapiens
tacactggcctgtat

SEQ ID NO: 1718485 - DNA, 15 bp, Homo sapiens
acactggcctgtatc

SEQ ID NO: 1718486 - DNA, 15 bp, Homo sapiens
cactggcctgtatca

SEQ ID NO: 1718487 - DNA, 15 bp, Homo sapiens
actggcctgtatcag

SEQ ID NO: 1718488 - DNA, 15 bp, Homo sapiens
ctggcctgtatcaga

SEQ ID NO: 1718489 - DNA, 15 bp, Homo sapiens
tggcctgtatcagaa

SEQ ID NO: 1718490 - DNA, 15 bp, Homo sapiens
ggcctgtatcagaag

SEQ ID NO: 1718491 - DNA, 15 bp, Homo sapiens
gcctgtatcagaagt

SEQ ID NO: 1718492 - DNA, 15 bp, Homo sapiens
cctgtatcagaagtg

SEQ ID NO: 1718493 - DNA, 15 bp, Homo sapiens
ctgtatcagaagtgg

SEQ ID NO: 1718494 - DNA, 15 bp, Homo sapiens
tgtatcagaagtggt

SEQ ID NO: 1718495 - DNA, 15 bp, Homo sapiens
gtatcagaagtggtt

SEQ ID NO: 1718496 - DNA, 15 bp, Homo sapiens
tatcagaagtggtta

SEQ ID NO: 1718497 - DNA, 15 bp, Homo sapiens
atcagaagtggttaa

SEQ ID NO: 1718498 - DNA, 15 bp, Homo sapiens
tcagaagtggttaaa

SEQ ID NO: 1718499 - DNA, 15 bp, Homo sapiens
cagaagtggttaaaa

SEQ ID NO: 1718500 - DNA, 15 bp, Homo sapiens
agaagtggttaaaat

SEQ ID NO: 1718501 - DNA, 15 bp, Homo sapiens
gaagtggttaaaatg

SEQ ID NO: 1718502 - DNA, 15 bp, Homo sapiens
agtggttaaaatgct

SEQ ID NO: 1718503 - DNA, 15 bp, Homo sapiens
gtggttaaaatgctt

SEQ ID NO: 1718504 - DNA, 15 bp, Homo sapiens
tggttaaaatgcttt

SEQ ID NO: 1718505 - DNA, 15 bp, Homo sapiens
ggttaaaatgcttta

SEQ ID NO: 1718506 - DNA, 15 bp, Homo sapiens
gttaaaatgctttac

SEQ ID NO: 1718507 - DNA, 15 bp, Homo sapiens
ttaaaatgctttaca

SEQ ID NO: 1718508 - DNA, 15 bp, Homo sapiens
taaaatgctttacat

SEQ ID NO: 1718509 - DNA, 15 bp, Homo sapiens
aaaatgctttacatc

SEQ ID NO: 1718510 - DNA, 15 bp, Homo sapiens
aaatgctttacatca

SEQ ID NO: 1718511 - DNA, 15 bp, Homo sapiens
aatgctttacatcat

SEQ ID NO: 1718512 - DNA, 15 bp, Homo sapiens
atgctttacatcata

SEQ ID NO: 1718513 - DNA, 15 bp, Homo sapiens
tgctttacatcatac

SEQ ID NO: 1718514 - DNA, 15 bp, Homo sapiens
gctttacatcataca

SEQ ID NO: 1718515 - DNA, 15 bp, Homo sapiens
ctttacatcatacat

SEQ ID NO: 1718516 - DNA, 15 bp, Homo sapiens
tttacatcatacatt

SEQ ID NO: 1718517 - DNA, 15 bp, Homo sapiens
ttacatcatacattt

SEQ ID NO: 1718518 - DNA, 15 bp, Homo sapiens
tacatcatacatttt

SEQ ID NO: 1718519 - DNA, 15 bp, Homo sapiens
acatcatacatttta

SEQ ID NO: 1718520 - DNA, 15 bp, Homo sapiens
catcatacattttat

SEQ ID NO: 1718521 - DNA, 15 bp, Homo sapiens
atcatacattttatt

SEQ ID NO: 1718522 - DNA, 15 bp, Homo sapiens
tcatacattttattt

SEQ ID NO: 1718523 - DNA, 15 bp, Homo sapiens
catacattttatttg

SEQ ID NO: 1718524 - DNA, 15 bp, Homo sapiens
atacattttatttga

SEQ ID NO: 1718525 - DNA, 15 bp, Homo sapiens
tacattttatttgat

SEQ ID NO: 1718526 - DNA, 15 bp, Homo sapiens
acattttatttgatt

SEQ ID NO: 1718527 - DNA, 15 bp, Homo sapiens
cattttatttgattc

SEQ ID NO: 1718528 - DNA, 15 bp, Homo sapiens
attttatttgattca

SEQ ID NO: 1718529 - DNA, 15 bp, Homo sapiens
ttttatttgattcac

SEQ ID NO: 1718530 - DNA, 15 bp, Homo sapiens
tttatttgattcacc

SEQ ID NO: 1718531 - DNA, 15 bp, Homo sapiens
ttatttgattcacca

SEQ ID NO: 1718532 - DNA, 15 bp, Homo sapiens
tatttgattcaccag

SEQ ID NO: 1718533 - DNA, 15 bp, Homo sapiens
atttgattcaccagt

SEQ ID NO: 1718534 - DNA, 15 bp, Homo sapiens
tttgattcaccagtg

SEQ ID NO: 1718535 - DNA, 15 bp, Homo sapiens
ttgattcaccagtgt

SEQ ID NO: 1718536 - DNA, 15 bp, Homo sapiens
tgattcaccagtgtg

SEQ ID NO: 1718537 - DNA, 15 bp, Homo sapiens
gattcaccagtgtga

SEQ ID NO: 1718538 - DNA, 15 bp, Homo sapiens
attcaccagtgtgag

SEQ ID NO: 1718539 - DNA, 15 bp, Homo sapiens
ttcaccagtgtgagt

SEQ ID NO: 1718540 - DNA, 15 bp, Homo sapiens
tcaccagtgtgagtt

SEQ ID NO: 1718541 - DNA, 15 bp, Homo sapiens
caccagtgtgagttg

SEQ ID NO: 1718542 - DNA, 15 bp, Homo sapiens
accagtgtgagttga

SEQ ID NO: 1718543 - DNA, 15 bp, Homo sapiens
ccagtgtgagttgac

SEQ ID NO: 1718544 - DNA, 15 bp, Homo sapiens
cagtgtgagttgaca

SEQ ID NO: 1718545 - DNA, 15 bp, Homo sapiens
agtgtgagttgacaa

SEQ ID NO: 1718546 - DNA, 15 bp, Homo sapiens
gtgtgagttgacaaa

SEQ ID NO: 1718547 - DNA, 15 bp, Homo sapiens
tgtgagttgacaaaa

SEQ ID NO: 1718548 - DNA, 15 bp, Homo sapiens
gtgagttgacaaaag

SEQ ID NO: 1718549 - DNA, 15 bp, Homo sapiens
tgagttgacaaaagt

SEQ ID NO: 1718550 - DNA, 15 bp, Homo sapiens
gagttgacaaaagtg

SEQ ID NO: 1718551 - DNA, 15 bp, Homo sapiens
agttgacaaaagtga

SEQ ID NO: 1718552 - DNA, 15 bp, Homo sapiens
gttgacaaaagtgaa

SEQ ID NO: 1718553 - DNA, 15 bp, Homo sapiens
ttgacaaaagtgaaa

SEQ ID NO: 1718554 - DNA, 15 bp, Homo sapiens
tgacaaaagtgaaat

SEQ ID NO: 1718555 - DNA, 15 bp, Homo sapiens
gacaaaagtgaaata

SEQ ID NO: 1718556 - DNA, 15 bp, Homo sapiens
acaaaagtgaaataa

SEQ ID NO: 1718557 - DNA, 15 bp, Homo sapiens
caaaagtgaaataac

SEQ ID NO: 1718558 - DNA, 15 bp, Homo sapiens
aaaagtgaaataact

SEQ ID NO: 1718559 - DNA, 15 bp, Homo sapiens
aaagtgaaataacta

SEQ ID NO: 1718560 - DNA, 15 bp, Homo sapiens
aagtgaaataactaa

SEQ ID NO: 1718561 - DNA, 15 bp, Homo sapiens
agtgaaataactaag

SEQ ID NO: 1718562 - DNA, 15 bp, Homo sapiens
gtgaaataactaaga

SEQ ID NO: 1718563 - DNA, 15 bp, Homo sapiens
tgaaataactaagat

SEQ ID NO: 1718564 - DNA, 15 bp, Homo sapiens
gaaataactaagatt

SEQ ID NO: 1718565 - DNA, 15 bp, Homo sapiens
aaataactaagattg

SEQ ID NO: 1718566 - DNA, 15 bp, Homo sapiens
aataactaagattgt

SEQ ID NO: 1718567 - DNA, 15 bp, Homo sapiens
ataactaagattgtt

SEQ ID NO: 1718568 - DNA, 15 bp, Homo sapiens
taactaagattgttt

SEQ ID NO: 1718569 - DNA, 15 bp, Homo sapiens
aactaagattgttta

SEQ ID NO: 1718570 - DNA, 15 bp, Homo sapiens
actaagattgtttag

SEQ ID NO: 1718571 - DNA, 15 bp, Homo sapiens
ctaagattgtttagt

SEQ ID NO: 1718572 - DNA, 15 bp, Homo sapiens
taagattgtttagtg

SEQ ID NO: 1718573 - DNA, 15 bp, Homo sapiens
aagattgtttagtgt

SEQ ID NO: 1718574 - DNA, 15 bp, Homo sapiens
agattgtttagtgta

SEQ ID NO: 1718575 - DNA, 15 bp, Homo sapiens
gattgtttagtgtaa

SEQ ID NO: 1718576 - DNA, 15 bp, Homo sapiens
attgtttagtgtaac

SEQ ID NO: 1718577 - DNA, 15 bp, Homo sapiens
ttgtttagtgtaaca

SEQ ID NO: 1718578 - DNA, 15 bp, Homo sapiens
tgtttagtgtaacaa

SEQ ID NO: 1718579 - DNA, 15 bp, Homo sapiens
gtttagtgtaacaaa

SEQ ID NO: 1718580 - DNA, 15 bp, Homo sapiens
tttagtgtaacaaaa

SEQ ID NO: 1718581 - DNA, 15 bp, Homo sapiens
ttagtgtaacaaaat

SEQ ID NO: 1718582 - DNA, 15 bp, Homo sapiens
tagtgtaacaaaata

SEQ ID NO: 1718583 - DNA, 15 bp, Homo sapiens
agtgtaacaaaatac

SEQ ID NO: 1718584 - DNA, 15 bp, Homo sapiens
gtgtaacaaaataca

SEQ ID NO: 1718585 - DNA, 15 bp, Homo sapiens
tgtaacaaaatacag

SEQ ID NO: 1718586 - DNA, 15 bp, Homo sapiens
gtaacaaaatacagt

SEQ ID NO: 1718587 - DNA, 15 bp, Homo sapiens
taacaaaatacagta

SEQ ID NO: 1718588 - DNA, 15 bp, Homo sapiens
aacaaaatacagtat

SEQ ID NO: 1718589 - DNA, 15 bp, Homo sapiens
acaaaatacagtatg

SEQ ID NO: 1718590 - DNA, 15 bp, Homo sapiens
caaaatacagtatga

SEQ ID NO: 1718591 - DNA, 15 bp, Homo sapiens
aaaatacagtatgat

SEQ ID NO: 1718592 - DNA, 15 bp, Homo sapiens
aaatacagtatgata

SEQ ID NO: 1718593 - DNA, 15 bp, Homo sapiens
aatacagtatgatat

SEQ ID NO: 1718594 - DNA, 15 bp, Homo sapiens
atacagtatgatatt

SEQ ID NO: 1718595 - DNA, 15 bp, Homo sapiens
tacagtatgatatta

SEQ ID NO: 1718596 - DNA, 15 bp, Homo sapiens
acagtatgatattaa

SEQ ID NO: 1718597 - DNA, 15 bp, Homo sapiens
cagtatgatattaaa

SEQ ID NO: 1718598 - DNA, 15 bp, Homo sapiens
agtatgatattaaaa

SEQ ID NO: 1718599 - DNA, 15 bp, Homo sapiens
gtatgatattaaaaa

SEQ ID NO: 1718600 - DNA, 15 bp, Homo sapiens
tatgatattaaaaat

SEQ ID NO: 1718601 - DNA, 15 bp, Homo sapiens
atgatattaaaaatg

SEQ ID NO: 1718602 - DNA, 15 bp, Homo sapiens
tgatattaaaaatgg

SEQ ID NO: 1718603 - DNA, 15 bp, Homo sapiens
gatattaaaaatggt

SEQ ID NO: 1718604 - DNA, 15 bp, Homo sapiens
atattaaaaatggtc

SEQ ID NO: 1718605 - DNA, 15 bp, Homo sapiens
tattaaaaatggtca

SEQ ID NO: 1718606 - DNA, 15 bp, Homo sapiens
attaaaaatggtcat

SEQ ID NO: 1718607 - DNA, 15 bp, Homo sapiens
ttaaaaatggtcata

SEQ ID NO: 1718608 - DNA, 15 bp, Homo sapiens
taaaaatggtcatat

SEQ ID NO: 1718609 - DNA, 15 bp, Homo sapiens
aaaaatggtcatatt

SEQ ID NO: 1718610 - DNA, 15 bp, Homo sapiens
aaaatggtcatatta

SEQ ID NO: 1718611 - DNA, 15 bp, Homo sapiens
aaatggtcatattag

SEQ ID NO: 1718612 - DNA, 15 bp, Homo sapiens
aatggtcatattagc

SEQ ID NO: 1718613 - DNA, 15 bp, Homo sapiens
atggtcatattagct

SEQ ID NO: 1718614 - DNA, 15 bp, Homo sapiens
tggtcatattagcta

SEQ ID NO: 1718615 - DNA, 15 bp, Homo sapiens
ggtcatattagctaa

SEQ ID NO: 1718616 - DNA, 15 bp, Homo sapiens
gtcatattagctaag

SEQ ID NO: 1718617 - DNA, 15 bp, Homo sapiens
tcatattagctaagc

SEQ ID NO: 1718618 - DNA, 15 bp, Homo sapiens
catattagctaagct

SEQ ID NO: 1718619 - DNA, 15 bp, Homo sapiens
atattagctaagctt

SEQ ID NO: 1718620 - DNA, 15 bp, Homo sapiens
tattagctaagcttc

SEQ ID NO: 1718621 - DNA, 15 bp, Homo sapiens
attagctaagcttcc

SEQ ID NO: 1718622 - DNA, 15 bp, Homo sapiens
ttagctaagcttcct

SEQ ID NO: 1718623 - DNA, 15 bp, Homo sapiens
tagctaagcttcctg

SEQ ID NO: 1718624 - DNA, 15 bp, Homo sapiens
agctaagcttcctga

SEQ ID NO: 1718625 - DNA, 15 bp, Homo sapiens
gctaagcttcctgag

SEQ ID NO: 1718626 - DNA, 15 bp, Homo sapiens
ctaagcttcctgagg

SEQ ID NO: 1718627 - DNA, 15 bp, Homo sapiens
agcttcctgaggacc

SEQ ID NO: 1718628 - DNA, 15 bp, Homo sapiens
gcttcctgaggacct

SEQ ID NO: 1718629 - DNA, 15 bp, Homo sapiens
cttcctgaggacctc

SEQ ID NO: 1718630 - DNA, 15 bp, Homo sapiens
ttcctgaggacctct

SEQ ID NO: 1718631 - DNA, 15 bp, Homo sapiens
tcctgaggacctctt

SEQ ID NO: 1718632 - DNA, 15 bp, Homo sapiens
cctgaggacctcttc

SEQ ID NO: 1718633 - DNA, 15 bp, Homo sapiens
ctgaggacctcttcc

SEQ ID NO: 1718634 - DNA, 15 bp, Homo sapiens
tgaggacctcttccc

SEQ ID NO: 1718635 - DNA, 15 bp, Homo sapiens
gaggacctcttccca

SEQ ID NO: 1718636 - DNA, 15 bp, Homo sapiens
aggacctcttcccaa

SEQ ID NO: 1718637 - DNA, 15 bp, Homo sapiens
ggacctcttcccaaa

SEQ ID NO: 1718638 - DNA, 15 bp, Homo sapiens
gacctcttcccaaaa

SEQ ID NO: 1718639 - DNA, 15 bp, Homo sapiens
acctcttcccaaaac

SEQ ID NO: 1718640 - DNA, 15 bp, Homo sapiens
cctcttcccaaaaca

SEQ ID NO: 1718641 - DNA, 15 bp, Homo sapiens
ctcttcccaaaacaa

SEQ ID NO: 1718642 - DNA, 15 bp, Homo sapiens
tcttcccaaaacaag

SEQ ID NO: 1718643 - DNA, 15 bp, Homo sapiens
cttcccaaaacaagt

SEQ ID NO: 1718644 - DNA, 15 bp, Homo sapiens
ttcccaaaacaagtt

SEQ ID NO: 1718645 - DNA, 15 bp, Homo sapiens
tcccaaaacaagttt

SEQ ID NO: 1718646 - DNA, 15 bp, Homo sapiens
cccaaaacaagtttt

SEQ ID NO: 1718647 - DNA, 15 bp, Homo sapiens
ccaaaacaagttttc

SEQ ID NO: 1718648 - DNA, 15 bp, Homo sapiens
caaaacaagttttct

SEQ ID NO: 1718649 - DNA, 15 bp, Homo sapiens
aaaacaagttttctt

SEQ ID NO: 1718650 - DNA, 15 bp, Homo sapiens
aaacaagttttcttc

SEQ ID NO: 1718651 - DNA, 15 bp, Homo sapiens
aacaagttttcttcc

SEQ ID NO: 1718652 - DNA, 15 bp, Homo sapiens
acaagttttcttcca

SEQ ID NO: 1718653 - DNA, 15 bp, Homo sapiens
caagttttcttccag

SEQ ID NO: 1718654 - DNA, 15 bp, Homo sapiens
aagttttcttccagt

SEQ ID NO: 1718655 - DNA, 15 bp, Homo sapiens
agttttcttccagtt

SEQ ID NO: 1718656 - DNA, 15 bp, Homo sapiens
gttttcttccagttg

SEQ ID NO: 1718657 - DNA, 15 bp, Homo sapiens
ttttcttccagttga

SEQ ID NO: 1718658 - DNA, 15 bp, Homo sapiens
tttcttccagttgat

SEQ ID NO: 1718659 - DNA, 15 bp, Homo sapiens
ttcttccagttgatc

SEQ ID NO: 1718660 - DNA, 15 bp, Homo sapiens
tcttccagttgatct

SEQ ID NO: 1718661 - DNA, 15 bp, Homo sapiens
cttccagttgatctg

SEQ ID NO: 1718662 - DNA, 15 bp, Homo sapiens
ttccagttgatctgt

SEQ ID NO: 1718663 - DNA, 15 bp, Homo sapiens
tccagttgatctgta

SEQ ID NO: 1718664 - DNA, 15 bp, Homo sapiens
ccagttgatctgtaa

SEQ ID NO: 1718665 - DNA, 15 bp, Homo sapiens
cagttgatctgtaag

SEQ ID NO: 1718666 - DNA, 15 bp, Homo sapiens
agttgatctgtaaga

SEQ ID NO: 1718667 - DNA, 15 bp, Homo sapiens
gttgatctgtaagaa

SEQ ID NO: 1718668 - DNA, 15 bp, Homo sapiens
ttgatctgtaagaac

SEQ ID NO: 1718669 - DNA, 15 bp, Homo sapiens
tgatctgtaagaacc

SEQ ID NO: 1718670 - DNA, 15 bp, Homo sapiens
gatctgtaagaacca

SEQ ID NO: 1718671 - DNA, 15 bp, Homo sapiens
atctgtaagaaccat

SEQ ID NO: 1718672 - DNA, 15 bp, Homo sapiens
tctgtaagaaccatt

SEQ ID NO: 1718673 - DNA, 15 bp, Homo sapiens
ctgtaagaaccattt

SEQ ID NO: 1718674 - DNA, 15 bp, Homo sapiens
tgtaagaaccattta

SEQ ID NO: 1718675 - DNA, 15 bp, Homo sapiens
gtaagaaccatttat

SEQ ID NO: 1718676 - DNA, 15 bp, Homo sapiens
taagaaccatttatg

SEQ ID NO: 1718677 - DNA, 15 bp, Homo sapiens
aagaaccatttatga

SEQ ID NO: 1718678 - DNA, 15 bp, Homo sapiens
agaaccatttatgat

SEQ ID NO: 1718679 - DNA, 15 bp, Homo sapiens
gaaccatttatgatt

SEQ ID NO: 1718680 - DNA, 15 bp, Homo sapiens
aaccatttatgattt

SEQ ID NO: 1718681 - DNA, 15 bp, Homo sapiens
accatttatgatttt

SEQ ID NO: 1718682 - DNA, 15 bp, Homo sapiens
ccatttatgattttt

SEQ ID NO: 1718683 - DNA, 15 bp, Homo sapiens
catttatgatttttt

SEQ ID NO: 1718684 - DNA, 15 bp, Homo sapiens
atttatgattttttt

SEQ ID NO: 1718685 - DNA, 15 bp, Homo sapiens
tttatgatttttttc

SEQ ID NO: 1718686 - DNA, 15 bp, Homo sapiens
ttatgatttttttct

SEQ ID NO: 1718687 - DNA, 15 bp, Homo sapiens
tatgatttttttctg

SEQ ID NO: 1718688 - DNA, 15 bp, Homo sapiens
atgatttttttctgt

SEQ ID NO: 1718689 - DNA, 15 bp, Homo sapiens
tgatttttttctgtg

SEQ ID NO: 1718690 - DNA, 15 bp, Homo sapiens
gatttttttctgtga

SEQ ID NO: 1718691 - DNA, 15 bp, Homo sapiens
atttttttctgtgaa

SEQ ID NO: 1718692 - DNA, 15 bp, Homo sapiens
tttttttctgtgaac

SEQ ID NO: 1718693 - DNA, 15 bp, Homo sapiens
ttttttctgtgaaca

SEQ ID NO: 1718694 - DNA, 15 bp, Homo sapiens
tttttctgtgaacaa

SEQ ID NO: 1718695 - DNA, 15 bp, Homo sapiens
ttttctgtgaacaat

SEQ ID NO: 1718696 - DNA, 15 bp, Homo sapiens
tttctgtgaacaatt

SEQ ID NO: 1718697 - DNA, 15 bp, Homo sapiens
ttctgtgaacaattc

SEQ ID NO: 1718698 - DNA, 15 bp, Homo sapiens
tctgtgaacaattct

SEQ ID NO: 1718699 - DNA, 15 bp, Homo sapiens
ctgtgaacaattctt

SEQ ID NO: 1718700 - DNA, 15 bp, Homo sapiens
tgtgaacaattctta

SEQ ID NO: 1718701 - DNA, 15 bp, Homo sapiens
gtgaacaattcttag

SEQ ID NO: 1718702 - DNA, 15 bp, Homo sapiens
tgaacaattcttagg

SEQ ID NO: 1718703 - DNA, 15 bp, Homo sapiens
gaacaattcttagga

SEQ ID NO: 1718704 - DNA, 15 bp, Homo sapiens
aacaattcttaggaa

SEQ ID NO: 1718705 - DNA, 15 bp, Homo sapiens
acaattcttaggaaa

SEQ ID NO: 1718706 - DNA, 15 bp, Homo sapiens
caattcttaggaaaa

SEQ ID NO: 1718707 - DNA, 15 bp, Homo sapiens
aattcttaggaaaag

SEQ ID NO: 1718708 - DNA, 15 bp, Homo sapiens
attcttaggaaaagt

SEQ ID NO: 1718709 - DNA, 15 bp, Homo sapiens
ttcttaggaaaagtt

SEQ ID NO: 1718710 - DNA, 15 bp, Homo sapiens
tcttaggaaaagttg

SEQ ID NO: 1718711 - DNA, 15 bp, Homo sapiens
cttaggaaaagttga

SEQ ID NO: 1718712 - DNA, 15 bp, Homo sapiens
ttaggaaaagttgaa

SEQ ID NO: 1718713 - DNA, 15 bp, Homo sapiens
taggaaaagttgaag

SEQ ID NO: 1718714 - DNA, 15 bp, Homo sapiens
aggaaaagttgaagc

SEQ ID NO: 1718715 - DNA, 15 bp, Homo sapiens
ggaaaagttgaagca

SEQ ID NO: 1718716 - DNA, 15 bp, Homo sapiens
gaaaagttgaagcag

SEQ ID NO: 1718717 - DNA, 15 bp, Homo sapiens
aaaagttgaagcagc

SEQ ID NO: 1718718 - DNA, 15 bp, Homo sapiens
aaagttgaagcagca

SEQ ID NO: 1718719 - DNA, 15 bp, Homo sapiens
aagttgaagcagcac

SEQ ID NO: 1718720 - DNA, 15 bp, Homo sapiens
agttgaagcagcaca

SEQ ID NO: 1718721 - DNA, 15 bp, Homo sapiens
gttgaagcagcacat

SEQ ID NO: 1718722 - DNA, 15 bp, Homo sapiens
ttgaagcagcacatc

SEQ ID NO: 1718723 - DNA, 15 bp, Homo sapiens
tgaagcagcacatct

SEQ ID NO: 1718724 - DNA, 15 bp, Homo sapiens
gaagcagcacatctt

SEQ ID NO: 1718725 - DNA, 15 bp, Homo sapiens
aagcagcacatcttc

SEQ ID NO: 1718726 - DNA, 15 bp, Homo sapiens
agcagcacatcttcc

SEQ ID NO: 1718727 - DNA, 15 bp, Homo sapiens
gcagcacatcttcca

SEQ ID NO: 1718728 - DNA, 15 bp, Homo sapiens
cagcacatcttccaa

SEQ ID NO: 1718729 - DNA, 15 bp, Homo sapiens
agcacatcttccaac

SEQ ID NO: 1718730 - DNA, 15 bp, Homo sapiens
gcacatcttccaact

SEQ ID NO: 1718731 - DNA, 15 bp, Homo sapiens
cacatcttccaactt

SEQ ID NO: 1718732 - DNA, 15 bp, Homo sapiens
acatcttccaactta

SEQ ID NO: 1718733 - DNA, 15 bp, Homo sapiens
catcttccaacttat

SEQ ID NO: 1718734 - DNA, 15 bp, Homo sapiens
atcttccaacttatt

SEQ ID NO: 1718735 - DNA, 15 bp, Homo sapiens
tcttccaacttattt

SEQ ID NO: 1718736 - DNA, 15 bp, Homo sapiens
cttccaacttatttt

SEQ ID NO: 1718737 - DNA, 15 bp, Homo sapiens
ttccaacttattttg

SEQ ID NO: 1718738 - DNA, 15 bp, Homo sapiens
tccaacttattttga

SEQ ID NO: 1718739 - DNA, 15 bp, Homo sapiens
ccaacttattttgaa

SEQ ID NO: 1718740 - DNA, 15 bp, Homo sapiens
caacttattttgaaa

SEQ ID NO: 1718741 - DNA, 15 bp, Homo sapiens
aacttattttgaaaa

SEQ ID NO: 1718742 - DNA, 15 bp, Homo sapiens
acttattttgaaaac

SEQ ID NO: 1718743 - DNA, 15 bp, Homo sapiens
cttattttgaaaaca

SEQ ID NO: 1718744 - DNA, 15 bp, Homo sapiens
ttattttgaaaacag

SEQ ID NO: 1718745 - DNA, 15 bp, Homo sapiens
tattttgaaaacagg

SEQ ID NO: 1718746 - DNA, 15 bp, Homo sapiens
attttgaaaacaggc

SEQ ID NO: 1718747 - DNA, 15 bp, Homo sapiens
ttttgaaaacaggct

SEQ ID NO: 1718748 - DNA, 15 bp, Homo sapiens
tttgaaaacaggctc

SEQ ID NO: 1718749 - DNA, 15 bp, Homo sapiens
ttgaaaacaggctct

SEQ ID NO: 1718750 - DNA, 15 bp, Homo sapiens
tgaaaacaggctctc

SEQ ID NO: 1718751 - DNA, 15 bp, Homo sapiens
gaaaacaggctctca

SEQ ID NO: 1718752 - DNA, 15 bp, Homo sapiens
aaaacaggctctcag

SEQ ID NO: 1718753 - DNA, 15 bp, Homo sapiens
aaacaggctctcagt

SEQ ID NO: 1718754 - DNA, 15 bp, Homo sapiens
aacaggctctcagtt

SEQ ID NO: 1718755 - DNA, 15 bp, Homo sapiens
acaggctctcagtta

SEQ ID NO: 1718756 - DNA, 15 bp, Homo sapiens
caggctctcagttaa

SEQ ID NO: 1718757 - DNA, 15 bp, Homo sapiens
aggctctcagttaat

SEQ ID NO: 1718758 - DNA, 15 bp, Homo sapiens
ggctctcagttaatt

SEQ ID NO: 1718759 - DNA, 15 bp, Homo sapiens
gctctcagttaattt

SEQ ID NO: 1718760 - DNA, 15 bp, Homo sapiens
ctctcagttaatttt

SEQ ID NO: 1718761 - DNA, 15 bp, Homo sapiens
tctcagttaattttg

SEQ ID NO: 1718762 - DNA, 15 bp, Homo sapiens
ctcagttaattttgg

SEQ ID NO: 1718763 - DNA, 15 bp, Homo sapiens
tcagttaattttggt

SEQ ID NO: 1718764 - DNA, 15 bp, Homo sapiens
cagttaattttggtc

SEQ ID NO: 1718765 - DNA, 15 bp, Homo sapiens
agttaattttggtcc

SEQ ID NO: 1718766 - DNA, 15 bp, Homo sapiens
gttaattttggtcca

SEQ ID NO: 1718767 - DNA, 15 bp, Homo sapiens
ttaattttggtccat

SEQ ID NO: 1718768 - DNA, 15 bp, Homo sapiens
taattttggtccatt

SEQ ID NO: 1718769 - DNA, 15 bp, Homo sapiens
aattttggtccattt

SEQ ID NO: 1718770 - DNA, 15 bp, Homo sapiens
attttggtccatttc

SEQ ID NO: 1718771 - DNA, 15 bp, Homo sapiens
ttttggtccatttca

SEQ ID NO: 1718772 - DNA, 15 bp, Homo sapiens
tttggtccatttcaa

SEQ ID NO: 1718773 - DNA, 15 bp, Homo sapiens
ttggtccatttcaaa

SEQ ID NO: 1718774 - DNA, 15 bp, Homo sapiens
tggtccatttcaaaa

SEQ ID NO: 1718775 - DNA, 15 bp, Homo sapiens
ggtccatttcaaaat

SEQ ID NO: 1718776 - DNA, 15 bp, Homo sapiens
gtccatttcaaaatt

SEQ ID NO: 1718777 - DNA, 15 bp, Homo sapiens
tccatttcaaaattg

SEQ ID NO: 1718778 - DNA, 15 bp, Homo sapiens
ccatttcaaaattgc

SEQ ID NO: 1718779 - DNA, 15 bp, Homo sapiens
catttcaaaattgca

SEQ ID NO: 1718780 - DNA, 15 bp, Homo sapiens
atttcaaaattgcat

SEQ ID NO: 1718781 - DNA, 15 bp, Homo sapiens
tttcaaaattgcatg

SEQ ID NO: 1718782 - DNA, 15 bp, Homo sapiens
ttcaaaattgcatga

SEQ ID NO: 1718783 - DNA, 15 bp, Homo sapiens
tcaaaattgcatgaa

SEQ ID NO: 1718784 - DNA, 15 bp, Homo sapiens
caaaattgcatgaaa

SEQ ID NO: 1718785 - DNA, 15 bp, Homo sapiens
aaaattgcatgaaag

SEQ ID NO: 1718786 - DNA, 15 bp, Homo sapiens
aaattgcatgaaaga

SEQ ID NO: 1718787 - DNA, 15 bp, Homo sapiens
aattgcatgaaagag

SEQ ID NO: 1718788 - DNA, 15 bp, Homo sapiens
attgcatgaaagaga

SEQ ID NO: 1718789 - DNA, 15 bp, Homo sapiens
ttgcatgaaagagat

SEQ ID NO: 1718790 - DNA, 15 bp, Homo sapiens
tgcatgaaagagatg

SEQ ID NO: 1718791 - DNA, 15 bp, Homo sapiens
gcatgaaagagatgc

SEQ ID NO: 1718792 - DNA, 15 bp, Homo sapiens
catgaaagagatgcc

SEQ ID NO: 1718793 - DNA, 15 bp, Homo sapiens
atgaaagagatgccc

SEQ ID NO: 1718794 - DNA, 15 bp, Homo sapiens
tgaaagagatgccca

SEQ ID NO: 1718795 - DNA, 15 bp, Homo sapiens
gaaagagatgcccat

SEQ ID NO: 1718796 - DNA, 15 bp, Homo sapiens
aaagagatgcccata

SEQ ID NO: 1718797 - DNA, 15 bp, Homo sapiens
aagagatgcccatat

SEQ ID NO: 1718798 - DNA, 15 bp, Homo sapiens
agagatgcccatata

SEQ ID NO: 1718799 - DNA, 15 bp, Homo sapiens
gagatgcccatatat

SEQ ID NO: 1718800 - DNA, 15 bp, Homo sapiens
agatgcccatatatt

SEQ ID NO: 1718801 - DNA, 15 bp, Homo sapiens
gatgcccatatatta

SEQ ID NO: 1718802 - DNA, 15 bp, Homo sapiens
atgcccatatattag

SEQ ID NO: 1718803 - DNA, 15 bp, Homo sapiens
tgcccatatattaga

SEQ ID NO: 1718804 - DNA, 15 bp, Homo sapiens
gcccatatattagaa

SEQ ID NO: 1718805 - DNA, 15 bp, Homo sapiens
cccatatattagaaa

SEQ ID NO: 1718806 - DNA, 15 bp, Homo sapiens
ccatatattagaaat

SEQ ID NO: 1718807 - DNA, 15 bp, Homo sapiens
catatattagaaatg

SEQ ID NO: 1718808 - DNA, 15 bp, Homo sapiens
atatattagaaatgc

SEQ ID NO: 1718809 - DNA, 15 bp, Homo sapiens
tatattagaaatgct

SEQ ID NO: 1718810 - DNA, 15 bp, Homo sapiens
atattagaaatgcta

SEQ ID NO: 1718811 - DNA, 15 bp, Homo sapiens
tattagaaatgctac

SEQ ID NO: 1718812 - DNA, 15 bp, Homo sapiens
attagaaatgctact

SEQ ID NO: 1718813 - DNA, 15 bp, Homo sapiens
ttagaaatgctactg

SEQ ID NO: 1718814 - DNA, 15 bp, Homo sapiens
tagaaatgctactgt

SEQ ID NO: 1718815 - DNA, 15 bp, Homo sapiens
agaaatgctactgtt

SEQ ID NO: 1718816 - DNA, 15 bp, Homo sapiens
gaaatgctactgttt

SEQ ID NO: 1718817 - DNA, 15 bp, Homo sapiens
aaatgctactgtttg

SEQ ID NO: 1718818 - DNA, 15 bp, Homo sapiens
aatgctactgtttga

SEQ ID NO: 1718819 - DNA, 15 bp, Homo sapiens
atgctactgtttgag

SEQ ID NO: 1718820 - DNA, 15 bp, Homo sapiens
tgctactgtttgaga

SEQ ID NO: 1718821 - DNA, 15 bp, Homo sapiens
gctactgtttgagaa

SEQ ID NO: 1718822 - DNA, 15 bp, Homo sapiens
ctactgtttgagaaa

SEQ ID NO: 1718823 - DNA, 15 bp, Homo sapiens
tactgtttgagaaaa

SEQ ID NO: 1718824 - DNA, 15 bp, Homo sapiens
actgtttgagaaaaa

SEQ ID NO: 1718825 - DNA, 15 bp, Homo sapiens
ctgtttgagaaaaaa

SEQ ID NO: 1718826 - DNA, 15 bp, Homo sapiens
tgtttgagaaaaaaa

SEQ ID NO: 1718827 - DNA, 15 bp, Homo sapiens
gtttgagaaaaaaaa

SEQ ID NO: 1718828 - DNA, 15 bp, Homo sapiens
tttgagaaaaaaaaa

SEQ ID NO: 1718829 - DNA, 15 bp, Homo sapiens
ttgagaaaaaaaaag

SEQ ID NO: 1718830 - DNA, 15 bp, Homo sapiens
tgagaaaaaaaaagg

SEQ ID NO: 1718831 - DNA, 15 bp, Homo sapiens
gagaaaaaaaaaggt

SEQ ID NO: 1718832 - DNA, 15 bp, Homo sapiens
agaaaaaaaaaggta

SEQ ID NO: 1718833 - DNA, 15 bp, Homo sapiens
gaaaaaaaaaggtag

SEQ ID NO: 1718834 - DNA, 15 bp, Homo sapiens
aaaaaaaaaggtaga

SEQ ID NO: 1718835 - DNA, 15 bp, Homo sapiens
aaaaaaaaggtagaa

SEQ ID NO: 1718836 - DNA, 15 bp, Homo sapiens
aaaaaaaggtagaaa

SEQ ID NO: 1718837 - DNA, 15 bp, Homo sapiens
aaaaaaggtagaaaa

SEQ ID NO: 1718838 - DNA, 15 bp, Homo sapiens
aaaaaggtagaaaaa

SEQ ID NO: 1718839 - DNA, 15 bp, Homo sapiens
aaaaggtagaaaaat

SEQ ID NO: 1718840 - DNA, 15 bp, Homo sapiens
aaaggtagaaaaatt

SEQ ID NO: 1718841 - DNA, 15 bp, Homo sapiens
aaggtagaaaaattg

SEQ ID NO: 1718842 - DNA, 15 bp, Homo sapiens
aggtagaaaaattgg

SEQ ID NO: 1718843 - DNA, 15 bp, Homo sapiens
ggtagaaaaattggc

SEQ ID NO: 1718844 - DNA, 15 bp, Homo sapiens
gtagaaaaattggcc

SEQ ID NO: 1718845 - DNA, 15 bp, Homo sapiens
tagaaaaattggcct

SEQ ID NO: 1718846 - DNA, 15 bp, Homo sapiens
agaaaaattggcctc

SEQ ID NO: 1718847 - DNA, 15 bp, Homo sapiens
gaaaaattggcctct

SEQ ID NO: 1718848 - DNA, 15 bp, Homo sapiens
aaaaattggcctcta

SEQ ID NO: 1718849 - DNA, 15 bp, Homo sapiens
aaaattggcctctag

SEQ ID NO: 1718850 - DNA, 15 bp, Homo sapiens
aaattggcctctagt

SEQ ID NO: 1718851 - DNA, 15 bp, Homo sapiens
aattggcctctagtt

SEQ ID NO: 1718852 - DNA, 15 bp, Homo sapiens
attggcctctagttt

SEQ ID NO: 1718853 - DNA, 15 bp, Homo sapiens
ttggcctctagtttt

SEQ ID NO: 1718854 - DNA, 15 bp, Homo sapiens
tggcctctagttttt

SEQ ID NO: 1718855 - DNA, 15 bp, Homo sapiens
ggcctctagtttttt

SEQ ID NO: 1718856 - DNA, 15 bp, Homo sapiens
gcctctagttttttt

SEQ ID NO: 1718857 - DNA, 15 bp, Homo sapiens
cctctagtttttttg

SEQ ID NO: 1718858 - DNA, 15 bp, Homo sapiens
ctctagtttttttgt

SEQ ID NO: 1718859 - DNA, 15 bp, Homo sapiens
tctagtttttttgtc

SEQ ID NO: 1718860 - DNA, 15 bp, Homo sapiens
ctagtttttttgtcc

SEQ ID NO: 1718861 - DNA, 15 bp, Homo sapiens
tagtttttttgtcca

SEQ ID NO: 1718862 - DNA, 15 bp, Homo sapiens
agtttttttgtccaa

SEQ ID NO: 1718863 - DNA, 15 bp, Homo sapiens
gtttttttgtccaaa

SEQ ID NO: 1718864 - DNA, 15 bp, Homo sapiens
tttttttgtccaaaa

SEQ ID NO: 1718865 - DNA, 15 bp, Homo sapiens
ttttttgtccaaaaa

SEQ ID NO: 1718866 - DNA, 15 bp, Homo sapiens
tttttgtccaaaaac

SEQ ID NO: 1718867 - DNA, 15 bp, Homo sapiens
ttttgtccaaaaact

SEQ ID NO: 1718868 - DNA, 15 bp, Homo sapiens
tttgtccaaaaactc

SEQ ID NO: 1718869 - DNA, 15 bp, Homo sapiens
ttgtccaaaaactct

SEQ ID NO: 1718870 - DNA, 15 bp, Homo sapiens
tgtccaaaaactctt

SEQ ID NO: 1718871 - DNA, 15 bp, Homo sapiens
gtccaaaaactcttt

SEQ ID NO: 1718872 - DNA, 15 bp, Homo sapiens
tccaaaaactctttt

SEQ ID NO: 1718873 - DNA, 15 bp, Homo sapiens
ccaaaaactcttttt

SEQ ID NO: 1718874 - DNA, 15 bp, Homo sapiens
caaaaactctttttt

SEQ ID NO: 1718875 - DNA, 15 bp, Homo sapiens
aaaaactctttttta

SEQ ID NO: 1718876 - DNA, 15 bp, Homo sapiens
aaaactcttttttat

SEQ ID NO: 1718877 - DNA, 15 bp, Homo sapiens
aaactcttttttata

SEQ ID NO: 1718878 - DNA, 15 bp, Homo sapiens
aactcttttttatat

SEQ ID NO: 1718879 - DNA, 15 bp, Homo sapiens
actcttttttatata

SEQ ID NO: 1718880 - DNA, 15 bp, Homo sapiens
ctcttttttatatag

SEQ ID NO: 1718881 - DNA, 15 bp, Homo sapiens
tcttttttatatagt

SEQ ID NO: 1718882 - DNA, 15 bp, Homo sapiens
cttttttatatagtt

SEQ ID NO: 1718883 - DNA, 15 bp, Homo sapiens
ttttttatatagtta

SEQ ID NO: 1718884 - DNA, 15 bp, Homo sapiens
tttttatatagttac

SEQ ID NO: 1718885 - DNA, 15 bp, Homo sapiens
ttttatatagttact

SEQ ID NO: 1718886 - DNA, 15 bp, Homo sapiens
tttatatagttactc

SEQ ID NO: 1718887 - DNA, 15 bp, Homo sapiens
ttatatagttactct

SEQ ID NO: 1718888 - DNA, 15 bp, Homo sapiens
tatatagttactcta

SEQ ID NO: 1718889 - DNA, 15 bp, Homo sapiens
atatagttactctaa

SEQ ID NO: 1718890 - DNA, 15 bp, Homo sapiens
tatagttactctaaa

SEQ ID NO: 1718891 - DNA, 15 bp, Homo sapiens
atagttactctaaat

SEQ ID NO: 1718892 - DNA, 15 bp, Homo sapiens
tagttactctaaatg

SEQ ID NO: 1718893 - DNA, 15 bp, Homo sapiens
agttactctaaatgt

SEQ ID NO: 1718894 - DNA, 15 bp, Homo sapiens
gttactctaaatgta

SEQ ID NO: 1718895 - DNA, 15 bp, Homo sapiens
ttactctaaatgtac

SEQ ID NO: 1718896 - DNA, 15 bp, Homo sapiens
tactctaaatgtact

SEQ ID NO: 1718897 - DNA, 15 bp, Homo sapiens
actctaaatgtactc

SEQ ID NO: 1718898 - DNA, 15 bp, Homo sapiens
ctctaaatgtactct

SEQ ID NO: 1718899 - DNA, 15 bp, Homo sapiens
tctaaatgtactcta

SEQ ID NO: 1718900 - DNA, 15 bp, Homo sapiens
ctaaatgtactctac

SEQ ID NO: 1718901 - DNA, 15 bp, Homo sapiens
taaatgtactctaca

SEQ ID NO: 1718902 - DNA, 15 bp, Homo sapiens
aaatgtactctacat

SEQ ID NO: 1718903 - DNA, 15 bp, Homo sapiens
aatgtactctacatg

SEQ ID NO: 1718904 - DNA, 15 bp, Homo sapiens
atgtactctacatgt

SEQ ID NO: 1718905 - DNA, 15 bp, Homo sapiens
tgtactctacatgtg

SEQ ID NO: 1718906 - DNA, 15 bp, Homo sapiens
gtactctacatgtgc

SEQ ID NO: 1718907 - DNA, 15 bp, Homo sapiens
tactctacatgtgcc

SEQ ID NO: 1718908 - DNA, 15 bp, Homo sapiens
actctacatgtgccc

SEQ ID NO: 1718909 - DNA, 15 bp, Homo sapiens
ctctacatgtgccct

SEQ ID NO: 1718910 - DNA, 15 bp, Homo sapiens
tctacatgtgccctt

SEQ ID NO: 1718911 - DNA, 15 bp, Homo sapiens
ctacatgtgccctta

SEQ ID NO: 1718912 - DNA, 15 bp, Homo sapiens
tacatgtgcccttag

SEQ ID NO: 1718913 - DNA, 15 bp, Homo sapiens
acatgtgcccttagg

SEQ ID NO: 1718914 - DNA, 15 bp, Homo sapiens
catgtgcccttagga

SEQ ID NO: 1718915 - DNA, 15 bp, Homo sapiens
atgtgcccttaggaa

SEQ ID NO: 1718916 - DNA, 15 bp, Homo sapiens
tgtgcccttaggaaa

SEQ ID NO: 1718917 - DNA, 15 bp, Homo sapiens
gtgcccttaggaaat

SEQ ID NO: 1718918 - DNA, 15 bp, Homo sapiens
tgcccttaggaaatt

SEQ ID NO: 1718919 - DNA, 15 bp, Homo sapiens
gcccttaggaaatta

SEQ ID NO: 1718920 - DNA, 15 bp, Homo sapiens
cccttaggaaattat

SEQ ID NO: 1718921 - DNA, 15 bp, Homo sapiens
ccttaggaaattatt

SEQ ID NO: 1718922 - DNA, 15 bp, Homo sapiens
cttaggaaattattt

SEQ ID NO: 1718923 - DNA, 15 bp, Homo sapiens
ttaggaaattatttc

SEQ ID NO: 1718924 - DNA, 15 bp, Homo sapiens
taggaaattatttca

SEQ ID NO: 1718925 - DNA, 15 bp, Homo sapiens
aggaaattatttcaa

SEQ ID NO: 1718926 - DNA, 15 bp, Homo sapiens
ggaaattatttcaat

SEQ ID NO: 1718927 - DNA, 15 bp, Homo sapiens
gaaattatttcaatg

SEQ ID NO: 1718928 - DNA, 15 bp, Homo sapiens
aaattatttcaatga

SEQ ID NO: 1718929 - DNA, 15 bp, Homo sapiens
aattatttcaatgaa

SEQ ID NO: 1718930 - DNA, 15 bp, Homo sapiens
attatttcaatgaaa

SEQ ID NO: 1718931 - DNA, 15 bp, Homo sapiens
ttatttcaatgaaaa

SEQ ID NO: 1718932 - DNA, 15 bp, Homo sapiens
tatttcaatgaaaag

SEQ ID NO: 1718933 - DNA, 15 bp, Homo sapiens
atttcaatgaaaaga

SEQ ID NO: 1718934 - DNA, 15 bp, Homo sapiens
tttcaatgaaaagat

SEQ ID NO: 1718935 - DNA, 15 bp, Homo sapiens
ttcaatgaaaagatt

SEQ ID NO: 1718936 - DNA, 15 bp, Homo sapiens
tcaatgaaaagattc

SEQ ID NO: 1718937 - DNA, 15 bp, Homo sapiens
caatgaaaagattct

SEQ ID NO: 1718938 - DNA, 15 bp, Homo sapiens
aatgaaaagattctt

SEQ ID NO: 1718939 - DNA, 15 bp, Homo sapiens
atgaaaagattcttt

SEQ ID NO: 1718940 - DNA, 15 bp, Homo sapiens
tgaaaagattctttg

SEQ ID NO: 1718941 - DNA, 15 bp, Homo sapiens
gaaaagattctttga

SEQ ID NO: 1718942 - DNA, 15 bp, Homo sapiens
aaaagattctttgaa

SEQ ID NO: 1718943 - DNA, 15 bp, Homo sapiens
aaagattctttgaat

SEQ ID NO: 1718944 - DNA, 15 bp, Homo sapiens
aagattctttgaatt

SEQ ID NO: 1718945 - DNA, 15 bp, Homo sapiens
agattctttgaattt

SEQ ID NO: 1718946 - DNA, 15 bp, Homo sapiens
gattctttgaatttg

SEQ ID NO: 1718947 - DNA, 15 bp, Homo sapiens
attctttgaatttgg

SEQ ID NO: 1718948 - DNA, 15 bp, Homo sapiens
ttctttgaatttggt

SEQ ID NO: 1718949 - DNA, 15 bp, Homo sapiens
tctttgaatttggtg

SEQ ID NO: 1718950 - DNA, 15 bp, Homo sapiens
ctttgaatttggtgc

SEQ ID NO: 1718951 - DNA, 15 bp, Homo sapiens
tttgaatttggtgct

SEQ ID NO: 1718952 - DNA, 15 bp, Homo sapiens
ttgaatttggtgctg

SEQ ID NO: 1718953 - DNA, 15 bp, Homo sapiens
tgaatttggtgctgc

SEQ ID NO: 1718954 - DNA, 15 bp, Homo sapiens
gaatttggtgctgcc

SEQ ID NO: 1718955 - DNA, 15 bp, Homo sapiens
aatttggtgctgccc

SEQ ID NO: 1718956 - DNA, 15 bp, Homo sapiens
atttggtgctgcccc

SEQ ID NO: 1718957 - DNA, 15 bp, Homo sapiens
tttggtgctgccccc

SEQ ID NO: 1718958 - DNA, 15 bp, Homo sapiens
ttggtgctgcccccg

SEQ ID NO: 1718959 - DNA, 15 bp, Homo sapiens
tggtgctgcccccgt

SEQ ID NO: 1718960 - DNA, 15 bp, Homo sapiens
ggtgctgcccccgtg

SEQ ID NO: 1718961 - DNA, 15 bp, Homo sapiens
gtgctgcccccgtgc

SEQ ID NO: 1718962 - DNA, 15 bp, Homo sapiens
tgctgcccccgtgcc

SEQ ID NO: 1718963 - DNA, 15 bp, Homo sapiens
gctgcccccgtgcct

SEQ ID NO: 1718964 - DNA, 15 bp, Homo sapiens
ctgcccccgtgccta

SEQ ID NO: 1718965 - DNA, 15 bp, Homo sapiens
tgcccccgtgcctat

SEQ ID NO: 1718966 - DNA, 15 bp, Homo sapiens
gcccccgtgcctata

SEQ ID NO: 1718967 - DNA, 15 bp, Homo sapiens
cccccgtgcctataa

SEQ ID NO: 1718968 - DNA, 15 bp, Homo sapiens
ccccgtgcctataat

SEQ ID NO: 1718969 - DNA, 15 bp, Homo sapiens
cccgtgcctataatt

SEQ ID NO: 1718970 - DNA, 15 bp, Homo sapiens
ccgtgcctataattt

SEQ ID NO: 1718971 - DNA, 15 bp, Homo sapiens
cgtgcctataatttt

SEQ ID NO: 1718972 - DNA, 15 bp, Homo sapiens
gtgcctataattttt

SEQ ID NO: 1718973 - DNA, 15 bp, Homo sapiens
tgcctataatttttg

SEQ ID NO: 1718974 - DNA, 15 bp, Homo sapiens
gcctataatttttgg

SEQ ID NO: 1718975 - DNA, 15 bp, Homo sapiens
cctataatttttggc

SEQ ID NO: 1718976 - DNA, 15 bp, Homo sapiens
ctataatttttggca

SEQ ID NO: 1718977 - DNA, 15 bp, Homo sapiens
tataatttttggcaa

SEQ ID NO: 1718978 - DNA, 15 bp, Homo sapiens
ataatttttggcaat

SEQ ID NO: 1718979 - DNA, 15 bp, Homo sapiens
taatttttggcaatt

SEQ ID NO: 1718980 - DNA, 15 bp, Homo sapiens
aatttttggcaatta

SEQ ID NO: 1718981 - DNA, 15 bp, Homo sapiens
atttttggcaattat

SEQ ID NO: 1718982 - DNA, 15 bp, Homo sapiens
tttttggcaattata

SEQ ID NO: 1718983 - DNA, 15 bp, Homo sapiens
ttttggcaattatac

SEQ ID NO: 1718984 - DNA, 15 bp, Homo sapiens
tttggcaattataca

SEQ ID NO: 1718985 - DNA, 15 bp, Homo sapiens
ttggcaattatacac

SEQ ID NO: 1718986 - DNA, 15 bp, Homo sapiens
tggcaattatacact

SEQ ID NO: 1718987 - DNA, 15 bp, Homo sapiens
ggcaattatacactc

SEQ ID NO: 1718988 - DNA, 15 bp, Homo sapiens
gcaattatacactca

SEQ ID NO: 1718989 - DNA, 15 bp, Homo sapiens
caattatacactcat

SEQ ID NO: 1718990 - DNA, 15 bp, Homo sapiens
aattatacactcatt

SEQ ID NO: 1718991 - DNA, 15 bp, Homo sapiens
attatacactcattt

SEQ ID NO: 1718992 - DNA, 15 bp, Homo sapiens
ttatacactcatttt

SEQ ID NO: 1718993 - DNA, 15 bp, Homo sapiens
tatacactcatttta

SEQ ID NO: 1718994 - DNA, 15 bp, Homo sapiens
atacactcattttaa

SEQ ID NO: 1718995 - DNA, 15 bp, Homo sapiens
tacactcattttaaa

SEQ ID NO: 1718996 - DNA, 15 bp, Homo sapiens
acactcattttaaaa

SEQ ID NO: 1718997 - DNA, 15 bp, Homo sapiens
cactcattttaaaat

SEQ ID NO: 1718998 - DNA, 15 bp, Homo sapiens
actcattttaaaatg

SEQ ID NO: 1718999 - DNA, 15 bp, Homo sapiens
ctcattttaaaatgt

SEQ ID NO: 1719000 - DNA, 15 bp, Homo sapiens
tcattttaaaatgta

SEQ ID NO: 1719001 - DNA, 15 bp, Homo sapiens
cattttaaaatgtag

SEQ ID NO: 1719002 - DNA, 15 bp, Homo sapiens
attttaaaatgtagg

SEQ ID NO: 1719003 - DNA, 15 bp, Homo sapiens
ttttaaaatgtaggt

SEQ ID NO: 1719004 - DNA, 15 bp, Homo sapiens
tttaaaatgtaggtc

SEQ ID NO: 1719005 - DNA, 15 bp, Homo sapiens
ttaaaatgtaggtcc

SEQ ID NO: 1719006 - DNA, 15 bp, Homo sapiens
taaaatgtaggtcct

SEQ ID NO: 1719007 - DNA, 15 bp, Homo sapiens
aaaatgtaggtcctg

SEQ ID NO: 1719008 - DNA, 15 bp, Homo sapiens
aaatgtaggtcctgg

SEQ ID NO: 1719009 - DNA, 15 bp, Homo sapiens
aatgtaggtcctgga

SEQ ID NO: 1719010 - DNA, 15 bp, Homo sapiens
atgtaggtcctggaa

SEQ ID NO: 1719011 - DNA, 15 bp, Homo sapiens
tgtaggtcctggaat

SEQ ID NO: 1719012 - DNA, 15 bp, Homo sapiens
gtaggtcctggaata

SEQ ID NO: 1719013 - DNA, 15 bp, Homo sapiens
taggtcctggaatat

SEQ ID NO: 1719014 - DNA, 15 bp, Homo sapiens
aggtcctggaatatt

SEQ ID NO: 1719015 - DNA, 15 bp, Homo sapiens
ggtcctggaatattt

SEQ ID NO: 1719016 - DNA, 15 bp, Homo sapiens
gtcctggaatatttt

SEQ ID NO: 1719017 - DNA, 15 bp, Homo sapiens
tcctggaatatttta

SEQ ID NO: 1719018 - DNA, 15 bp, Homo sapiens
cctggaatattttaa

SEQ ID NO: 1719019 - DNA, 15 bp, Homo sapiens
ctggaatattttaat

SEQ ID NO: 1719020 - DNA, 15 bp, Homo sapiens
tggaatattttaata

SEQ ID NO: 1719021 - DNA, 15 bp, Homo sapiens
ggaatattttaatac

SEQ ID NO: 1719022 - DNA, 15 bp, Homo sapiens
gaatattttaatact

SEQ ID NO: 1719023 - DNA, 15 bp, Homo sapiens
aatattttaatacta

SEQ ID NO: 1719024 - DNA, 15 bp, Homo sapiens
atattttaatactat

SEQ ID NO: 1719025 - DNA, 15 bp, Homo sapiens
tattttaatactata

SEQ ID NO: 1719026 - DNA, 15 bp, Homo sapiens
attttaatactatat

SEQ ID NO: 1719027 - DNA, 15 bp, Homo sapiens
ttttaatactatatt

SEQ ID NO: 1719028 - DNA, 15 bp, Homo sapiens
tttaatactatattc

SEQ ID NO: 1719029 - DNA, 15 bp, Homo sapiens
ttaatactatattct

SEQ ID NO: 1719030 - DNA, 15 bp, Homo sapiens
taatactatattctg

SEQ ID NO: 1719031 - DNA, 15 bp, Homo sapiens
aatactatattctga

SEQ ID NO: 1719032 - DNA, 15 bp, Homo sapiens
atactatattctgaa

SEQ ID NO: 1719033 - DNA, 15 bp, Homo sapiens
tactatattctgaaa

SEQ ID NO: 1719034 - DNA, 15 bp, Homo sapiens
actatattctgaaag

SEQ ID NO: 1719035 - DNA, 15 bp, Homo sapiens
ctatattctgaaagt

SEQ ID NO: 1719036 - DNA, 15 bp, Homo sapiens
tatattctgaaagtg

SEQ ID NO: 1719037 - DNA, 15 bp, Homo sapiens
atattctgaaagtgt

SEQ ID NO: 1719038 - DNA, 15 bp, Homo sapiens
tattctgaaagtgta

SEQ ID NO: 1719039 - DNA, 15 bp, Homo sapiens
attctgaaagtgtaa

SEQ ID NO: 1719040 - DNA, 15 bp, Homo sapiens
ttctgaaagtgtaaa

SEQ ID NO: 1719041 - DNA, 15 bp, Homo sapiens
tctgaaagtgtaaaa

SEQ ID NO: 1719042 - DNA, 15 bp, Homo sapiens
ctgaaagtgtaaaat

SEQ ID NO: 1719043 - DNA, 15 bp, Homo sapiens
tgaaagtgtaaaata

SEQ ID NO: 1719044 - DNA, 15 bp, Homo sapiens
gaaagtgtaaaatac

SEQ ID NO: 1719045 - DNA, 15 bp, Homo sapiens
aaagtgtaaaataca

SEQ ID NO: 1719046 - DNA, 15 bp, Homo sapiens
aagtgtaaaatacat

SEQ ID NO: 1719047 - DNA, 15 bp, Homo sapiens
agtgtaaaatacata

SEQ ID NO: 1719048 - DNA, 15 bp, Homo sapiens
gtgtaaaatacatag

SEQ ID NO: 1719049 - DNA, 15 bp, Homo sapiens
tgtaaaatacatagg

SEQ ID NO: 1719050 - DNA, 15 bp, Homo sapiens
gtaaaatacatagga

SEQ ID NO: 1719051 - DNA, 15 bp, Homo sapiens
taaaatacataggat

SEQ ID NO: 1719052 - DNA, 15 bp, Homo sapiens
aaaatacataggatc

SEQ ID NO: 1719053 - DNA, 15 bp, Homo sapiens
aaatacataggatca

SEQ ID NO: 1719054 - DNA, 15 bp, Homo sapiens
aatacataggatcat

SEQ ID NO: 1719055 - DNA, 15 bp, Homo sapiens
atacataggatcata

SEQ ID NO: 1719056 - DNA, 15 bp, Homo sapiens
tacataggatcataa

SEQ ID NO: 1719057 - DNA, 15 bp, Homo sapiens
acataggatcataat

SEQ ID NO: 1719058 - DNA, 15 bp, Homo sapiens
cataggatcataatt

SEQ ID NO: 1719059 - DNA, 15 bp, Homo sapiens
ataggatcataatta

SEQ ID NO: 1719060 - DNA, 15 bp, Homo sapiens
taggatcataattag

SEQ ID NO: 1719061 - DNA, 15 bp, Homo sapiens
aggatcataattagg

SEQ ID NO: 1719062 - DNA, 15 bp, Homo sapiens
ggatcataattaggt

SEQ ID NO: 1719063 - DNA, 15 bp, Homo sapiens
gatcataattaggta

SEQ ID NO: 1719064 - DNA, 15 bp, Homo sapiens
atcataattaggtat

SEQ ID NO: 1719065 - DNA, 15 bp, Homo sapiens
tcataattaggtata

SEQ ID NO: 1719066 - DNA, 15 bp, Homo sapiens
cataattaggtatag

SEQ ID NO: 1719067 - DNA, 15 bp, Homo sapiens
ataattaggtatagt

SEQ ID NO: 1719068 - DNA, 15 bp, Homo sapiens
taattaggtatagtt

SEQ ID NO: 1719069 - DNA, 15 bp, Homo sapiens
aattaggtatagttt

SEQ ID NO: 1719070 - DNA, 15 bp, Homo sapiens
attaggtatagtttg

SEQ ID NO: 1719071 - DNA, 15 bp, Homo sapiens
ttaggtatagtttgc

SEQ ID NO: 1719072 - DNA, 15 bp, Homo sapiens
taggtatagtttgcc

SEQ ID NO: 1719073 - DNA, 15 bp, Homo sapiens
aggtatagtttgcca

SEQ ID NO: 1719074 - DNA, 15 bp, Homo sapiens
ggtatagtttgccat

SEQ ID NO: 1719075 - DNA, 15 bp, Homo sapiens
gtatagtttgccata

SEQ ID NO: 1719076 - DNA, 15 bp, Homo sapiens
tatagtttgccatat

SEQ ID NO: 1719077 - DNA, 15 bp, Homo sapiens
atagtttgccatata

SEQ ID NO: 1719078 - DNA, 15 bp, Homo sapiens
tagtttgccatatat

SEQ ID NO: 1719079 - DNA, 15 bp, Homo sapiens
agtttgccatatatt

SEQ ID NO: 1719080 - DNA, 15 bp, Homo sapiens
gtttgccatatattt

SEQ ID NO: 1719081 - DNA, 15 bp, Homo sapiens
tttgccatatattta

SEQ ID NO: 1719082 - DNA, 15 bp, Homo sapiens
ttgccatatatttat

SEQ ID NO: 1719083 - DNA, 15 bp, Homo sapiens
tgccatatatttatt

SEQ ID NO: 1719084 - DNA, 15 bp, Homo sapiens
gccatatatttattc

SEQ ID NO: 1719085 - DNA, 15 bp, Homo sapiens
ccatatatttattca

SEQ ID NO: 1719086 - DNA, 15 bp, Homo sapiens
catatatttattcaa

SEQ ID NO: 1719087 - DNA, 15 bp, Homo sapiens
atatatttattcaat

SEQ ID NO: 1719088 - DNA, 15 bp, Homo sapiens
tatatttattcaata

SEQ ID NO: 1719089 - DNA, 15 bp, Homo sapiens
atatttattcaataa

SEQ ID NO: 1719090 - DNA, 15 bp, Homo sapiens
tatttattcaataat

SEQ ID NO: 1719091 - DNA, 15 bp, Homo sapiens
atttattcaataatt

SEQ ID NO: 1719092 - DNA, 15 bp, Homo sapiens
tttattcaataatta

SEQ ID NO: 1719093 - DNA, 15 bp, Homo sapiens
ttattcaataattaa

SEQ ID NO: 1719094 - DNA, 15 bp, Homo sapiens
tattcaataattaaa

SEQ ID NO: 1719095 - DNA, 15 bp, Homo sapiens
attcaataattaaat

SEQ ID NO: 1719096 - DNA, 15 bp, Homo sapiens
ttcaataattaaata

SEQ ID NO: 1719097 - DNA, 15 bp, Homo sapiens
tcaataattaaatat

SEQ ID NO: 1719098 - DNA, 15 bp, Homo sapiens
caataattaaatatc

SEQ ID NO: 1719099 - DNA, 15 bp, Homo sapiens
aataattaaatatca

SEQ ID NO: 1719100 - DNA, 15 bp, Homo sapiens
ataattaaatatcag

SEQ ID NO: 1719101 - DNA, 15 bp, Homo sapiens
taattaaatatcagt

SEQ ID NO: 1719102 - DNA, 15 bp, Homo sapiens
aattaaatatcagtt

SEQ ID NO: 1719103 - DNA, 15 bp, Homo sapiens
attaaatatcagttt

SEQ ID NO: 1719104 - DNA, 15 bp, Homo sapiens
ttaaatatcagtttc

SEQ ID NO: 1719105 - DNA, 15 bp, Homo sapiens
taaatatcagtttct

SEQ ID NO: 1719106 - DNA, 15 bp, Homo sapiens
aaatatcagtttctt

SEQ ID NO: 1719107 - DNA, 15 bp, Homo sapiens
aatatcagtttctta

SEQ ID NO: 1719108 - DNA, 15 bp, Homo sapiens
atatcagtttcttat

SEQ ID NO: 1719109 - DNA, 15 bp, Homo sapiens
tatcagtttcttatc

SEQ ID NO: 1719110 - DNA, 15 bp, Homo sapiens
atcagtttcttatcg

SEQ ID NO: 1719111 - DNA, 15 bp, Homo sapiens
tcagtttcttatcgt

SEQ ID NO: 1719112 - DNA, 15 bp, Homo sapiens
cagtttcttatcgta

SEQ ID NO: 1719113 - DNA, 15 bp, Homo sapiens
agtttcttatcgtaa

SEQ ID NO: 1719114 - DNA, 15 bp, Homo sapiens
gtttcttatcgtaag

SEQ ID NO: 1719115 - DNA, 15 bp, Homo sapiens
tttcttatcgtaaga

SEQ ID NO: 1719116 - DNA, 15 bp, Homo sapiens
ttcttatcgtaagaa

SEQ ID NO: 1719117 - DNA, 15 bp, Homo sapiens
tcttatcgtaagaaa

SEQ ID NO: 1719118 - DNA, 15 bp, Homo sapiens
cttatcgtaagaaaa

SEQ ID NO: 1719119 - DNA, 15 bp, Homo sapiens
ttatcgtaagaaaat

SEQ ID NO: 1719120 - DNA, 15 bp, Homo sapiens
tatcgtaagaaaata

SEQ ID NO: 1719121 - DNA, 15 bp, Homo sapiens
atcgtaagaaaatat

SEQ ID NO: 1719122 - DNA, 15 bp, Homo sapiens
tcgtaagaaaatatc

SEQ ID NO: 1719123 - DNA, 15 bp, Homo sapiens
cgtaagaaaatatca

SEQ ID NO: 1719124 - DNA, 15 bp, Homo sapiens
gtaagaaaatatcag

SEQ ID NO: 1719125 - DNA, 15 bp, Homo sapiens
taagaaaatatcaga

SEQ ID NO: 1719126 - DNA, 15 bp, Homo sapiens
aagaaaatatcagaa

SEQ ID NO: 1719127 - DNA, 15 bp, Homo sapiens
agaaaatatcagaac

SEQ ID NO: 1719128 - DNA, 15 bp, Homo sapiens
gaaaatatcagaaca

SEQ ID NO: 1719129 - DNA, 15 bp, Homo sapiens
aaaatatcagaacag

SEQ ID NO: 1719130 - DNA, 15 bp, Homo sapiens
aaatatcagaacagt

SEQ ID NO: 1719131 - DNA, 15 bp, Homo sapiens
aatatcagaacagtt

SEQ ID NO: 1719132 - DNA, 15 bp, Homo sapiens
atatcagaacagttt

SEQ ID NO: 1719133 - DNA, 15 bp, Homo sapiens
tatcagaacagtttc

SEQ ID NO: 1719134 - DNA, 15 bp, Homo sapiens
atcagaacagtttca

SEQ ID NO: 1719135 - DNA, 15 bp, Homo sapiens
tcagaacagtttcat

SEQ ID NO: 1719136 - DNA, 15 bp, Homo sapiens
cagaacagtttcatc

SEQ ID NO: 1719137 - DNA, 15 bp, Homo sapiens
agaacagtttcatca

SEQ ID NO: 1719138 - DNA, 15 bp, Homo sapiens
gaacagtttcatcat

SEQ ID NO: 1719139 - DNA, 15 bp, Homo sapiens
aacagtttcatcatg

SEQ ID NO: 1719140 - DNA, 15 bp, Homo sapiens
acagtttcatcatgt

SEQ ID NO: 1719141 - DNA, 15 bp, Homo sapiens
cagtttcatcatgtt

SEQ ID NO: 1719142 - DNA, 15 bp, Homo sapiens
agtttcatcatgttg

SEQ ID NO: 1719143 - DNA, 15 bp, Homo sapiens
gtttcatcatgttgg

SEQ ID NO: 1719144 - DNA, 15 bp, Homo sapiens
tttcatcatgttggt

SEQ ID NO: 1719145 - DNA, 15 bp, Homo sapiens
ttcatcatgttggtt

SEQ ID NO: 1719146 - DNA, 15 bp, Homo sapiens
tcatcatgttggttt

SEQ ID NO: 1719147 - DNA, 15 bp, Homo sapiens
catcatgttggttta

SEQ ID NO: 1719148 - DNA, 15 bp, Homo sapiens
atcatgttggtttag

SEQ ID NO: 1719149 - DNA, 15 bp, Homo sapiens
tcatgttggtttagg

SEQ ID NO: 1719150 - DNA, 15 bp, Homo sapiens
catgttggtttagga

SEQ ID NO: 1719151 - DNA, 15 bp, Homo sapiens
atgttggtttaggat

SEQ ID NO: 1719152 - DNA, 15 bp, Homo sapiens
tgttggtttaggatc

SEQ ID NO: 1719153 - DNA, 15 bp, Homo sapiens
gttggtttaggatcc

SEQ ID NO: 1719154 - DNA, 15 bp, Homo sapiens
ttggtttaggatccc

SEQ ID NO: 1719155 - DNA, 15 bp, Homo sapiens
tggtttaggatccca

SEQ ID NO: 1719156 - DNA, 15 bp, Homo sapiens
ggtttaggatcccac

SEQ ID NO: 1719157 - DNA, 15 bp, Homo sapiens
gtttaggatcccacc

SEQ ID NO: 1719158 - DNA, 15 bp, Homo sapiens
tttaggatcccacct

SEQ ID NO: 1719159 - DNA, 15 bp, Homo sapiens
ttaggatcccacctc

SEQ ID NO: 1719160 - DNA, 15 bp, Homo sapiens
taggatcccacctca

SEQ ID NO: 1719161 - DNA, 15 bp, Homo sapiens
aggatcccacctcat

SEQ ID NO: 1719162 - DNA, 15 bp, Homo sapiens
ggatcccacctcata

SEQ ID NO: 1719163 - DNA, 15 bp, Homo sapiens
gatcccacctcatat

SEQ ID NO: 1719164 - DNA, 15 bp, Homo sapiens
atcccacctcatatt

SEQ ID NO: 1719165 - DNA, 15 bp, Homo sapiens
tcccacctcatattt

SEQ ID NO: 1719166 - DNA, 15 bp, Homo sapiens
cccacctcatatttc

SEQ ID NO: 1719167 - DNA, 15 bp, Homo sapiens
ccacctcatatttcc

SEQ ID NO: 1719168 - DNA, 15 bp, Homo sapiens
cacctcatatttcca

SEQ ID NO: 1719169 - DNA, 15 bp, Homo sapiens
acctcatatttccaa

SEQ ID NO: 1719170 - DNA, 15 bp, Homo sapiens
cctcatatttccaac

SEQ ID NO: 1719171 - DNA, 15 bp, Homo sapiens
ctcatatttccaact

SEQ ID NO: 1719172 - DNA, 15 bp, Homo sapiens
tcatatttccaacta

SEQ ID NO: 1719173 - DNA, 15 bp, Homo sapiens
catatttccaactaa

SEQ ID NO: 1719174 - DNA, 15 bp, Homo sapiens
atatttccaactaag

SEQ ID NO: 1719175 - DNA, 15 bp, Homo sapiens
tatttccaactaagg

SEQ ID NO: 1719176 - DNA, 15 bp, Homo sapiens
atttccaactaaggg

SEQ ID NO: 1719177 - DNA, 15 bp, Homo sapiens
tttccaactaagggt

SEQ ID NO: 1719178 - DNA, 15 bp, Homo sapiens
ttccaactaagggtt

SEQ ID NO: 1719179 - DNA, 15 bp, Homo sapiens
tccaactaagggttt

SEQ ID NO: 1719180 - DNA, 15 bp, Homo sapiens
ccaactaagggtttg

SEQ ID NO: 1719181 - DNA, 15 bp, Homo sapiens
caactaagggtttga

SEQ ID NO: 1719182 - DNA, 15 bp, Homo sapiens
aactaagggtttgat

SEQ ID NO: 1719183 - DNA, 15 bp, Homo sapiens
actaagggtttgatt

SEQ ID NO: 1719184 - DNA, 15 bp, Homo sapiens
ctaagggtttgattt

SEQ ID NO: 1719185 - DNA, 15 bp, Homo sapiens
taagggtttgattta

SEQ ID NO: 1719186 - DNA, 15 bp, Homo sapiens
aagggtttgatttat

SEQ ID NO: 1719187 - DNA, 15 bp, Homo sapiens
agggtttgatttatt

SEQ ID NO: 1719188 - DNA, 15 bp, Homo sapiens
gggtttgatttatta

SEQ ID NO: 1719189 - DNA, 15 bp, Homo sapiens
tttgatttattaaat

SEQ ID NO: 1719190 - DNA, 15 bp, Homo sapiens
ttgatttattaaata

SEQ ID NO: 1719191 - DNA, 15 bp, Homo sapiens
tgatttattaaatat

SEQ ID NO: 1719192 - DNA, 15 bp, Homo sapiens
gatttattaaatatt

SEQ ID NO: 1719193 - DNA, 15 bp, Homo sapiens
atttattaaatattt

SEQ ID NO: 1719194 - DNA, 15 bp, Homo sapiens
tttattaaatatttc

SEQ ID NO: 1719195 - DNA, 15 bp, Homo sapiens
ttattaaatatttct

SEQ ID NO: 1719196 - DNA, 15 bp, Homo sapiens
tattaaatatttctt

SEQ ID NO: 1719197 - DNA, 15 bp, Homo sapiens
attaaatatttctta

SEQ ID NO: 1719198 - DNA, 15 bp, Homo sapiens
ttaaatatttcttat

SEQ ID NO: 1719199 - DNA, 15 bp, Homo sapiens
taaatatttcttatg

SEQ ID NO: 1719200 - DNA, 15 bp, Homo sapiens
aaatatttcttatgc

SEQ ID NO: 1719201 - DNA, 15 bp, Homo sapiens
aatatttcttatgca

SEQ ID NO: 1719202 - DNA, 15 bp, Homo sapiens
atatttcttatgcat

SEQ ID NO: 1719203 - DNA, 15 bp, Homo sapiens
tatttcttatgcatg

SEQ ID NO: 1719204 - DNA, 15 bp, Homo sapiens
ttcttatgcatgcaa

SEQ ID NO: 1719205 - DNA, 15 bp, Homo sapiens
tcttatgcatgcaaa

SEQ ID NO: 1719206 - DNA, 15 bp, Homo sapiens
cttatgcatgcaaaa

SEQ ID NO: 1719207 - DNA, 15 bp, Homo sapiens
ttatgcatgcaaaat

SEQ ID NO: 1719208 - DNA, 15 bp, Homo sapiens
tatgcatgcaaaatc

SEQ ID NO: 1719209 - DNA, 15 bp, Homo sapiens
atgcatgcaaaatct

SEQ ID NO: 1719210 - DNA, 15 bp, Homo sapiens
tgcatgcaaaatctc

SEQ ID NO: 1719211 - DNA, 15 bp, Homo sapiens
gcatgcaaaatctct

SEQ ID NO: 1719212 - DNA, 15 bp, Homo sapiens
catgcaaaatctctc

SEQ ID NO: 1719213 - DNA, 15 bp, Homo sapiens
atgcaaaatctctcc

SEQ ID NO: 1719214 - DNA, 15 bp, Homo sapiens
tgcaaaatctctcca

SEQ ID NO: 1719215 - DNA, 15 bp, Homo sapiens
gcaaaatctctccat

SEQ ID NO: 1719216 - DNA, 15 bp, Homo sapiens
caaaatctctccata

SEQ ID NO: 1719217 - DNA, 15 bp, Homo sapiens
aaaatctctccataa

SEQ ID NO: 1719218 - DNA, 15 bp, Homo sapiens
aaatctctccataat

SEQ ID NO: 1719219 - DNA, 15 bp, Homo sapiens
aatctctccataatc

SEQ ID NO: 1719220 - DNA, 15 bp, Homo sapiens
atctctccataatca

SEQ ID NO: 1719221 - DNA, 15 bp, Homo sapiens
tctctccataatcaa

SEQ ID NO: 1719222 - DNA, 15 bp, Homo sapiens
ctctccataatcaag

SEQ ID NO: 1719223 - DNA, 15 bp, Homo sapiens
tctccataatcaagg

SEQ ID NO: 1719224 - DNA, 15 bp, Homo sapiens
ctccataatcaaggc

SEQ ID NO: 1719225 - DNA, 15 bp, Homo sapiens
tccataatcaaggca

SEQ ID NO: 1719226 - DNA, 15 bp, Homo sapiens
ccataatcaaggcac

SEQ ID NO: 1719227 - DNA, 15 bp, Homo sapiens
cataatcaaggcaca

SEQ ID NO: 1719228 - DNA, 15 bp, Homo sapiens
ataatcaaggcacaa

SEQ ID NO: 1719229 - DNA, 15 bp, Homo sapiens
taatcaaggcacaaa

SEQ ID NO: 1719230 - DNA, 15 bp, Homo sapiens
aatcaaggcacaaaa

SEQ ID NO: 1719231 - DNA, 15 bp, Homo sapiens
atcaaggcacaaaag

SEQ ID NO: 1719232 - DNA, 15 bp, Homo sapiens
tcaaggcacaaaagg

SEQ ID NO: 1719233 - DNA, 15 bp, Homo sapiens
caaggcacaaaagga

SEQ ID NO: 1719234 - DNA, 15 bp, Homo sapiens
aaggcacaaaaggat

SEQ ID NO: 1719235 - DNA, 15 bp, Homo sapiens
aggcacaaaaggatg

SEQ ID NO: 1719236 - DNA, 15 bp, Homo sapiens
ggcacaaaaggatgt

SEQ ID NO: 1719237 - DNA, 15 bp, Homo sapiens
gcacaaaaggatgtt

SEQ ID NO: 1719238 - DNA, 15 bp, Homo sapiens
cacaaaaggatgtta

SEQ ID NO: 1719239 - DNA, 15 bp, Homo sapiens
acaaaaggatgttag

SEQ ID NO: 1719240 - DNA, 15 bp, Homo sapiens
caaaaggatgttaga

SEQ ID NO: 1719241 - DNA, 15 bp, Homo sapiens
aaaaggatgttagag

SEQ ID NO: 1719242 - DNA, 15 bp, Homo sapiens
aaaggatgttagagg

SEQ ID NO: 1719243 - DNA, 15 bp, Homo sapiens
aaggatgttagagga

SEQ ID NO: 1719244 - DNA, 15 bp, Homo sapiens
aggatgttagaggaa

SEQ ID NO: 1719245 - DNA, 15 bp, Homo sapiens
ggatgttagaggaaa

SEQ ID NO: 1719246 - DNA, 15 bp, Homo sapiens
gatgttagaggaaat

SEQ ID NO: 1719247 - DNA, 15 bp, Homo sapiens
atgttagaggaaata

SEQ ID NO: 1719248 - DNA, 15 bp, Homo sapiens
tgttagaggaaatac

SEQ ID NO: 1719249 - DNA, 15 bp, Homo sapiens
gttagaggaaataca

SEQ ID NO: 1719250 - DNA, 15 bp, Homo sapiens
ttagaggaaatacaa

SEQ ID NO: 1719251 - DNA, 15 bp, Homo sapiens
tagaggaaatacaaa

SEQ ID NO: 1719252 - DNA, 15 bp, Homo sapiens
agaggaaatacaaaa

SEQ ID NO: 1719253 - DNA, 15 bp, Homo sapiens
gaggaaatacaaaat

SEQ ID NO: 1719254 - DNA, 15 bp, Homo sapiens
aggaaatacaaaatt

SEQ ID NO: 1719255 - DNA, 15 bp, Homo sapiens
ggaaatacaaaatta

SEQ ID NO: 1719256 - DNA, 15 bp, Homo sapiens
gaaatacaaaattaa

SEQ ID NO: 1719257 - DNA, 15 bp, Homo sapiens
aaatacaaaattaag

SEQ ID NO: 1719258 - DNA, 15 bp, Homo sapiens
aatacaaaattaaga

SEQ ID NO: 1719259 - DNA, 15 bp, Homo sapiens
atacaaaattaagaa

SEQ ID NO: 1719260 - DNA, 15 bp, Homo sapiens
tacaaaattaagaat

SEQ ID NO: 1719261 - DNA, 15 bp, Homo sapiens
acaaaattaagaatt

SEQ ID NO: 1719262 - DNA, 15 bp, Homo sapiens
caaaattaagaattt

SEQ ID NO: 1719263 - DNA, 15 bp, Homo sapiens
aaaattaagaatttg

SEQ ID NO: 1719264 - DNA, 15 bp, Homo sapiens
aaattaagaatttgg

SEQ ID NO: 1719265 - DNA, 15 bp, Homo sapiens
aattaagaatttggt

SEQ ID NO: 1719266 - DNA, 15 bp, Homo sapiens
attaagaatttggtt

SEQ ID NO: 1719267 - DNA, 15 bp, Homo sapiens
ttaagaatttggttg

SEQ ID NO: 1719268 - DNA, 15 bp, Homo sapiens
taagaatttggttgt

SEQ ID NO: 1719269 - DNA, 15 bp, Homo sapiens
aagaatttggttgtt

SEQ ID NO: 1719270 - DNA, 15 bp, Homo sapiens
agaatttggttgttt

SEQ ID NO: 1719271 - DNA, 15 bp, Homo sapiens
gaatttggttgtttt

SEQ ID NO: 1719272 - DNA, 15 bp, Homo sapiens
aatttggttgttttc

SEQ ID NO: 1719273 - DNA, 15 bp, Homo sapiens
atttggttgttttca

SEQ ID NO: 1719274 - DNA, 15 bp, Homo sapiens
tttggttgttttcaa

SEQ ID NO: 1719275 - DNA, 15 bp, Homo sapiens
ttggttgttttcaaa

SEQ ID NO: 1719276 - DNA, 15 bp, Homo sapiens
tggttgttttcaaac

SEQ ID NO: 1719277 - DNA, 15 bp, Homo sapiens
ggttgttttcaaaca

SEQ ID NO: 1719278 - DNA, 15 bp, Homo sapiens
gttgttttcaaacac

SEQ ID NO: 1719279 - DNA, 15 bp, Homo sapiens
ttgttttcaaacaca

SEQ ID NO: 1719280 - DNA, 15 bp, Homo sapiens
tgttttcaaacacac

SEQ ID NO: 1719281 - DNA, 15 bp, Homo sapiens
gttttcaaacacact

SEQ ID NO: 1719282 - DNA, 15 bp, Homo sapiens
ttttcaaacacactt

SEQ ID NO: 1719283 - DNA, 15 bp, Homo sapiens
tttcaaacacacttg

SEQ ID NO: 1719284 - DNA, 15 bp, Homo sapiens
ttcaaacacacttgg

SEQ ID NO: 1719285 - DNA, 15 bp, Homo sapiens
tcaaacacacttgga

SEQ ID NO: 1719286 - DNA, 15 bp, Homo sapiens
caaacacacttggag

SEQ ID NO: 1719287 - DNA, 15 bp, Homo sapiens
aaacacacttggaga

SEQ ID NO: 1719288 - DNA, 15 bp, Homo sapiens
aacacacttggagag

SEQ ID NO: 1719289 - DNA, 15 bp, Homo sapiens
acacacttggagaga

SEQ ID NO: 1719290 - DNA, 15 bp, Homo sapiens
cacacttggagagaa

SEQ ID NO: 1719291 - DNA, 15 bp, Homo sapiens
acacttggagagaaa

SEQ ID NO: 1719292 - DNA, 15 bp, Homo sapiens
cacttggagagaaat

SEQ ID NO: 1719293 - DNA, 15 bp, Homo sapiens
acttggagagaaatt

SEQ ID NO: 1719294 - DNA, 15 bp, Homo sapiens
cttggagagaaattt

SEQ ID NO: 1719295 - DNA, 15 bp, Homo sapiens
ttggagagaaattta

SEQ ID NO: 1719296 - DNA, 15 bp, Homo sapiens
tggagagaaatttac

SEQ ID NO: 1719297 - DNA, 15 bp, Homo sapiens
ggagagaaatttaca

SEQ ID NO: 1719298 - DNA, 15 bp, Homo sapiens
gagagaaatttacat

SEQ ID NO: 1719299 - DNA, 15 bp, Homo sapiens
agagaaatttacata

SEQ ID NO: 1719300 - DNA, 15 bp, Homo sapiens
gagaaatttacatat

SEQ ID NO: 1719301 - DNA, 15 bp, Homo sapiens
agaaatttacatata

SEQ ID NO: 1719302 - DNA, 15 bp, Homo sapiens
gaaatttacatatac

SEQ ID NO: 1719303 - DNA, 15 bp, Homo sapiens
aaatttacatataca

SEQ ID NO: 1719304 - DNA, 15 bp, Homo sapiens
aatttacatatacat

SEQ ID NO: 1719305 - DNA, 15 bp, Homo sapiens
atttacatatacatg

SEQ ID NO: 1719306 - DNA, 15 bp, Homo sapiens
tttacatatacatgt

SEQ ID NO: 1719307 - DNA, 15 bp, Homo sapiens
ttacatatacatgtg

SEQ ID NO: 1719308 - DNA, 15 bp, Homo sapiens
tacatatacatgtgt

SEQ ID NO: 1719309 - DNA, 15 bp, Homo sapiens
acatatacatgtgta

SEQ ID NO: 1719310 - DNA, 15 bp, Homo sapiens
catatacatgtgtac

SEQ ID NO: 1719311 - DNA, 15 bp, Homo sapiens
atatacatgtgtacc

SEQ ID NO: 1719312 - DNA, 15 bp, Homo sapiens
tatacatgtgtacca

SEQ ID NO: 1719313 - DNA, 15 bp, Homo sapiens
atacatgtgtaccat

SEQ ID NO: 1719314 - DNA, 15 bp, Homo sapiens
tacatgtgtaccatc

SEQ ID NO: 1719315 - DNA, 15 bp, Homo sapiens
acatgtgtaccatca

SEQ ID NO: 1719316 - DNA, 15 bp, Homo sapiens
catgtgtaccatcat

SEQ ID NO: 1719317 - DNA, 15 bp, Homo sapiens
atgtgtaccatcata

SEQ ID NO: 1719318 - DNA, 15 bp, Homo sapiens
tgtgtaccatcataa

SEQ ID NO: 1719319 - DNA, 15 bp, Homo sapiens
gtgtaccatcataaa

SEQ ID NO: 1719320 - DNA, 15 bp, Homo sapiens
tgtaccatcataaaa

SEQ ID NO: 1719321 - DNA, 15 bp, Homo sapiens
gtaccatcataaaat

SEQ ID NO: 1719322 - DNA, 15 bp, Homo sapiens
taccatcataaaatg

SEQ ID NO: 1719323 - DNA, 15 bp, Homo sapiens
accatcataaaatga

SEQ ID NO: 1719324 - DNA, 15 bp, Homo sapiens
ccatcataaaatgag

SEQ ID NO: 1719325 - DNA, 15 bp, Homo sapiens
catcataaaatgagc

SEQ ID NO: 1719326 - DNA, 15 bp, Homo sapiens
atcataaaatgagca

SEQ ID NO: 1719327 - DNA, 15 bp, Homo sapiens
tcataaaatgagcac

SEQ ID NO: 1719328 - DNA, 15 bp, Homo sapiens
cataaaatgagcact

SEQ ID NO: 1719329 - DNA, 15 bp, Homo sapiens
ataaaatgagcactg

SEQ ID NO: 1719330 - DNA, 15 bp, Homo sapiens
taaaatgagcactgt

SEQ ID NO: 1719331 - DNA, 15 bp, Homo sapiens
aaaatgagcactgtg

SEQ ID NO: 1719332 - DNA, 15 bp, Homo sapiens
aaatgagcactgtgt

SEQ ID NO: 1719333 - DNA, 15 bp, Homo sapiens
aatgagcactgtgtc

SEQ ID NO: 1719334 - DNA, 15 bp, Homo sapiens
atgagcactgtgtcc

SEQ ID NO: 1719335 - DNA, 15 bp, Homo sapiens
tgagcactgtgtcca

SEQ ID NO: 1719336 - DNA, 15 bp, Homo sapiens
gagcactgtgtccac

SEQ ID NO: 1719337 - DNA, 15 bp, Homo sapiens
agcactgtgtccact

SEQ ID NO: 1719338 - DNA, 15 bp, Homo sapiens
gcactgtgtccactt

SEQ ID NO: 1719339 - DNA, 15 bp, Homo sapiens
cactgtgtccacttg

SEQ ID NO: 1719340 - DNA, 15 bp, Homo sapiens
actgtgtccacttgg

SEQ ID NO: 1719341 - DNA, 15 bp, Homo sapiens
ctgtgtccacttgga

SEQ ID NO: 1719342 - DNA, 15 bp, Homo sapiens
tgtgtccacttggat

SEQ ID NO: 1719343 - DNA, 15 bp, Homo sapiens
gtgtccacttggatt

SEQ ID NO: 1719344 - DNA, 15 bp, Homo sapiens
tgtccacttggattt

SEQ ID NO: 1719345 - DNA, 15 bp, Homo sapiens
gtccacttggatttg

SEQ ID NO: 1719346 - DNA, 15 bp, Homo sapiens
tccacttggatttgc

SEQ ID NO: 1719347 - DNA, 15 bp, Homo sapiens
ccacttggatttgct

SEQ ID NO: 1719348 - DNA, 15 bp, Homo sapiens
cacttggatttgctc

SEQ ID NO: 1719349 - DNA, 15 bp, Homo sapiens
acttggatttgctct

SEQ ID NO: 1719350 - DNA, 15 bp, Homo sapiens
cttggatttgctcta

SEQ ID NO: 1719351 - DNA, 15 bp, Homo sapiens
ttggatttgctctaa

SEQ ID NO: 1719352 - DNA, 15 bp, Homo sapiens
tggatttgctctaaa

SEQ ID NO: 1719353 - DNA, 15 bp, Homo sapiens
ggatttgctctaaat

SEQ ID NO: 1719354 - DNA, 15 bp, Homo sapiens
gatttgctctaaatt

SEQ ID NO: 1719355 - DNA, 15 bp, Homo sapiens
atttgctctaaattt

SEQ ID NO: 1719356 - DNA, 15 bp, Homo sapiens
tttgctctaaattta

SEQ ID NO: 1719357 - DNA, 15 bp, Homo sapiens
ttgctctaaatttac

SEQ ID NO: 1719358 - DNA, 15 bp, Homo sapiens
tgctctaaatttaca

SEQ ID NO: 1719359 - DNA, 15 bp, Homo sapiens
gctctaaatttacag

SEQ ID NO: 1719360 - DNA, 15 bp, Homo sapiens
ctctaaatttacaga

SEQ ID NO: 1719361 - DNA, 15 bp, Homo sapiens
tctaaatttacagat

SEQ ID NO: 1719362 - DNA, 15 bp, Homo sapiens
ctaaatttacagatc

SEQ ID NO: 1719363 - DNA, 15 bp, Homo sapiens
taaatttacagatca

SEQ ID NO: 1719364 - DNA, 15 bp, Homo sapiens
aaatttacagatcaa

SEQ ID NO: 1719365 - DNA, 15 bp, Homo sapiens
aatttacagatcaag

SEQ ID NO: 1719366 - DNA, 15 bp, Homo sapiens
atttacagatcaagt

SEQ ID NO: 1719367 - DNA, 15 bp, Homo sapiens
tttacagatcaagta

SEQ ID NO: 1719368 - DNA, 15 bp, Homo sapiens
ttacagatcaagtaa

SEQ ID NO: 1719369 - DNA, 15 bp, Homo sapiens
tacagatcaagtaaa

SEQ ID NO: 1719370 - DNA, 15 bp, Homo sapiens
acagatcaagtaaat

SEQ ID NO: 1719371 - DNA, 15 bp, Homo sapiens
cagatcaagtaaatg

SEQ ID NO: 1719372 - DNA, 15 bp, Homo sapiens
agatcaagtaaatga

SEQ ID NO: 1719373 - DNA, 15 bp, Homo sapiens
gatcaagtaaatgat

SEQ ID NO: 1719374 - DNA, 15 bp, Homo sapiens
atcaagtaaatgatc

SEQ ID NO: 1719375 - DNA, 15 bp, Homo sapiens
tcaagtaaatgatct

SEQ ID NO: 1719376 - DNA, 15 bp, Homo sapiens
caagtaaatgatctc

SEQ ID NO: 1719377 - DNA, 15 bp, Homo sapiens
aagtaaatgatctca

SEQ ID NO: 1719378 - DNA, 15 bp, Homo sapiens
agtaaatgatctcac

SEQ ID NO: 1719379 - DNA, 15 bp, Homo sapiens
gtaaatgatctcacc

SEQ ID NO: 1719380 - DNA, 15 bp, Homo sapiens
taaatgatctcacct

SEQ ID NO: 1719381 - DNA, 15 bp, Homo sapiens
aaatgatctcacctg

SEQ ID NO: 1719382 - DNA, 15 bp, Homo sapiens
aatgatctcacctgc

SEQ ID NO: 1719383 - DNA, 15 bp, Homo sapiens
atgatctcacctgca

SEQ ID NO: 1719384 - DNA, 15 bp, Homo sapiens
tgatctcacctgcat

SEQ ID NO: 1719385 - DNA, 15 bp, Homo sapiens
gatctcacctgcatg

SEQ ID NO: 1719386 - DNA, 15 bp, Homo sapiens
atctcacctgcatgt

SEQ ID NO: 1719387 - DNA, 15 bp, Homo sapiens
tctcacctgcatgtg

SEQ ID NO: 1719388 - DNA, 15 bp, Homo sapiens
ctcacctgcatgtga

SEQ ID NO: 1719389 - DNA, 15 bp, Homo sapiens
tcacctgcatgtgag

SEQ ID NO: 1719390 - DNA, 15 bp, Homo sapiens
cacctgcatgtgaga

SEQ ID NO: 1719391 - DNA, 15 bp, Homo sapiens
acctgcatgtgagac

SEQ ID NO: 1719392 - DNA, 15 bp, Homo sapiens
cctgcatgtgagacg

SEQ ID NO: 1719393 - DNA, 15 bp, Homo sapiens
ctgcatgtgagacgg

SEQ ID NO: 1719394 - DNA, 15 bp, Homo sapiens
tgcatgtgagacggc

SEQ ID NO: 1719395 - DNA, 15 bp, Homo sapiens
gcatgtgagacggca

SEQ ID NO: 1719396 - DNA, 15 bp, Homo sapiens
catgtgagacggcag

SEQ ID NO: 1719397 - DNA, 15 bp, Homo sapiens
atgtgagacggcagg

SEQ ID NO: 1719398 - DNA, 15 bp, Homo sapiens
tgtgagacggcaggt

SEQ ID NO: 1719399 - DNA, 15 bp, Homo sapiens
gtgagacggcaggtg

SEQ ID NO: 1719400 - DNA, 15 bp, Homo sapiens
tgagacggcaggtga

SEQ ID NO: 1719401 - DNA, 15 bp, Homo sapiens
gagacggcaggtgaa

SEQ ID NO: 1719402 - DNA, 15 bp, Homo sapiens
agacggcaggtgaaa

SEQ ID NO: 1719403 - DNA, 15 bp, Homo sapiens
gacggcaggtgaaag

SEQ ID NO: 1719404 - DNA, 15 bp, Homo sapiens
acggcaggtgaaagt

SEQ ID NO: 1719405 - DNA, 15 bp, Homo sapiens
cggcaggtgaaagta

SEQ ID NO: 1719406 - DNA, 15 bp, Homo sapiens
ggcaggtgaaagtaa

SEQ ID NO: 1719407 - DNA, 15 bp, Homo sapiens
gcaggtgaaagtaac

SEQ ID NO: 1719408 - DNA, 15 bp, Homo sapiens
caggtgaaagtaact

SEQ ID NO: 1719409 - DNA, 15 bp, Homo sapiens
aggtgaaagtaactc

SEQ ID NO: 1719410 - DNA, 15 bp, Homo sapiens
ggtgaaagtaactca

SEQ ID NO: 1719411 - DNA, 15 bp, Homo sapiens
gtgaaagtaactcag

SEQ ID NO: 1719412 - DNA, 15 bp, Homo sapiens
tgaaagtaactcagt

SEQ ID NO: 1719413 - DNA, 15 bp, Homo sapiens
gaaagtaactcagtg

SEQ ID NO: 1719414 - DNA, 15 bp, Homo sapiens
aaagtaactcagtga

SEQ ID NO: 1719415 - DNA, 15 bp, Homo sapiens
aagtaactcagtgaa

SEQ ID NO: 1719416 - DNA, 15 bp, Homo sapiens
agtaactcagtgaac

SEQ ID NO: 1719417 - DNA, 15 bp, Homo sapiens
gtaactcagtgaacc

SEQ ID NO: 1719418 - DNA, 15 bp, Homo sapiens
taactcagtgaacct

SEQ ID NO: 1719419 - DNA, 15 bp, Homo sapiens
aactcagtgaacctc

SEQ ID NO: 1719420 - DNA, 15 bp, Homo sapiens
actcagtgaacctct

SEQ ID NO: 1719421 - DNA, 15 bp, Homo sapiens
ctcagtgaacctcta

SEQ ID NO: 1719422 - DNA, 15 bp, Homo sapiens
tcagtgaacctctaa

SEQ ID NO: 1719423 - DNA, 15 bp, Homo sapiens
cagtgaacctctaaa

SEQ ID NO: 1719424 - DNA, 15 bp, Homo sapiens
agtgaacctctaaac

SEQ ID NO: 1719425 - DNA, 15 bp, Homo sapiens
gtgaacctctaaacc

SEQ ID NO: 1719426 - DNA, 15 bp, Homo sapiens
tgaacctctaaaccc

SEQ ID NO: 1719427 - DNA, 15 bp, Homo sapiens
gaacctctaaaccca

SEQ ID NO: 1719428 - DNA, 15 bp, Homo sapiens
aacctctaaacccat

SEQ ID NO: 1719429 - DNA, 15 bp, Homo sapiens
acctctaaacccatt

SEQ ID NO: 1719430 - DNA, 15 bp, Homo sapiens
cctctaaacccattt

SEQ ID NO: 1719431 - DNA, 15 bp, Homo sapiens
ctctaaacccatttc

SEQ ID NO: 1719432 - DNA, 15 bp, Homo sapiens
tctaaacccatttcc

SEQ ID NO: 1719433 - DNA, 15 bp, Homo sapiens
ctaaacccatttcca

SEQ ID NO: 1719434 - DNA, 15 bp, Homo sapiens
taaacccatttccaa

SEQ ID NO: 1719435 - DNA, 15 bp, Homo sapiens
aaacccatttccaat

SEQ ID NO: 1719436 - DNA, 15 bp, Homo sapiens
aacccatttccaatt

SEQ ID NO: 1719437 - DNA, 15 bp, Homo sapiens
acccatttccaattt

SEQ ID NO: 1719438 - DNA, 15 bp, Homo sapiens
cccatttccaatttc

SEQ ID NO: 1719439 - DNA, 15 bp, Homo sapiens
ccatttccaatttct

SEQ ID NO: 1719440 - DNA, 15 bp, Homo sapiens
catttccaatttctt

SEQ ID NO: 1719441 - DNA, 15 bp, Homo sapiens
atttccaatttcttt

SEQ ID NO: 1719442 - DNA, 15 bp, Homo sapiens
tttccaatttctttc

SEQ ID NO: 1719443 - DNA, 15 bp, Homo sapiens
ttccaatttctttca

SEQ ID NO: 1719444 - DNA, 15 bp, Homo sapiens
tccaatttctttcac

SEQ ID NO: 1719445 - DNA, 15 bp, Homo sapiens
ccaatttctttcaca

SEQ ID NO: 1719446 - DNA, 15 bp, Homo sapiens
caatttctttcacac

SEQ ID NO: 1719447 - DNA, 15 bp, Homo sapiens
aatttctttcacact

SEQ ID NO: 1719448 - DNA, 15 bp, Homo sapiens
atttctttcacactg

SEQ ID NO: 1719449 - DNA, 15 bp, Homo sapiens
tttctttcacactgg

SEQ ID NO: 1719450 - DNA, 15 bp, Homo sapiens
ttctttcacactggg

SEQ ID NO: 1719451 - DNA, 15 bp, Homo sapiens
tctttcacactgggt

SEQ ID NO: 1719452 - DNA, 15 bp, Homo sapiens
ctttcacactgggtt

SEQ ID NO: 1719453 - DNA, 15 bp, Homo sapiens
tttcacactgggttc

SEQ ID NO: 1719454 - DNA, 15 bp, Homo sapiens
ttcacactgggttca

SEQ ID NO: 1719455 - DNA, 15 bp, Homo sapiens
tcacactgggttcaa

SEQ ID NO: 1719456 - DNA, 15 bp, Homo sapiens
cacactgggttcaat

SEQ ID NO: 1719457 - DNA, 15 bp, Homo sapiens
acactgggttcaatt

SEQ ID NO: 1719458 - DNA, 15 bp, Homo sapiens
cactgggttcaatta

SEQ ID NO: 1719459 - DNA, 15 bp, Homo sapiens
actgggttcaattaa

SEQ ID NO: 1719460 - DNA, 15 bp, Homo sapiens
ctgggttcaattaaa

SEQ ID NO: 1719461 - DNA, 15 bp, Homo sapiens
tgggttcaattaaat

SEQ ID NO: 1719462 - DNA, 15 bp, Homo sapiens
gggttcaattaaatg

SEQ ID NO: 1719463 - DNA, 15 bp, Homo sapiens
ggttcaattaaatgc

SEQ ID NO: 1719464 - DNA, 15 bp, Homo sapiens
gttcaattaaatgcc

SEQ ID NO: 1719465 - DNA, 15 bp, Homo sapiens
ttcaattaaatgccc

SEQ ID NO: 1719466 - DNA, 15 bp, Homo sapiens
tcaattaaatgccca

SEQ ID NO: 1719467 - DNA, 15 bp, Homo sapiens
caattaaatgcccaa

SEQ ID NO: 1719468 - DNA, 15 bp, Homo sapiens
aattaaatgcccaat

SEQ ID NO: 1719469 - DNA, 15 bp, Homo sapiens
attaaatgcccaatt

SEQ ID NO: 1719470 - DNA, 15 bp, Homo sapiens
ttaaatgcccaatta

SEQ ID NO: 1719471 - DNA, 15 bp, Homo sapiens
taaatgcccaattaa

SEQ ID NO: 1719472 - DNA, 15 bp, Homo sapiens
aaatgcccaattaat

SEQ ID NO: 1719473 - DNA, 15 bp, Homo sapiens
aatgcccaattaatt

SEQ ID NO: 1719474 - DNA, 15 bp, Homo sapiens
atgcccaattaattt

SEQ ID NO: 1719475 - DNA, 15 bp, Homo sapiens
tgcccaattaattta

SEQ ID NO: 1719476 - DNA, 15 bp, Homo sapiens
gcccaattaatttaa

SEQ ID NO: 1719477 - DNA, 15 bp, Homo sapiens
cccaattaatttaaa

SEQ ID NO: 1719478 - DNA, 15 bp, Homo sapiens
ccaattaatttaaat

SEQ ID NO: 1719479 - DNA, 15 bp, Homo sapiens
caattaatttaaata

SEQ ID NO: 1719480 - DNA, 15 bp, Homo sapiens
aattaatttaaatag

SEQ ID NO: 1719481 - DNA, 15 bp, Homo sapiens
attaatttaaatagc

SEQ ID NO: 1719482 - DNA, 15 bp, Homo sapiens
ttaatttaaatagca

SEQ ID NO: 1719483 - DNA, 15 bp, Homo sapiens
taatttaaatagcag

SEQ ID NO: 1719484 - DNA, 15 bp, Homo sapiens
aatttaaatagcaga

SEQ ID NO: 1719485 - DNA, 15 bp, Homo sapiens
atttaaatagcagac

SEQ ID NO: 1719486 - DNA, 15 bp, Homo sapiens
tttaaatagcagact

SEQ ID NO: 1719487 - DNA, 15 bp, Homo sapiens
ttaaatagcagactg

SEQ ID NO: 1719488 - DNA, 15 bp, Homo sapiens
taaatagcagactgt

SEQ ID NO: 1719489 - DNA, 15 bp, Homo sapiens
aaatagcagactgta

SEQ ID NO: 1719490 - DNA, 15 bp, Homo sapiens
aatagcagactgtaa

SEQ ID NO: 1719491 - DNA, 15 bp, Homo sapiens
atagcagactgtaaa

SEQ ID NO: 1719492 - DNA, 15 bp, Homo sapiens
tagcagactgtaaat

SEQ ID NO: 1719493 - DNA, 15 bp, Homo sapiens
agcagactgtaaata

SEQ ID NO: 1719494 - DNA, 15 bp, Homo sapiens
gcagactgtaaataa

SEQ ID NO: 1719495 - DNA, 15 bp, Homo sapiens
cagactgtaaataaa

SEQ ID NO: 1719496 - DNA, 15 bp, Homo sapiens
agactgtaaataaag

SEQ ID NO: 1719497 - DNA, 15 bp, Homo sapiens
gactgtaaataaagc

SEQ ID NO: 1719498 - DNA, 15 bp, Homo sapiens
actgtaaataaagca

SEQ ID NO: 1719499 - DNA, 15 bp, Homo sapiens
ctgtaaataaagcaa

SEQ ID NO: 1719500 - DNA, 15 bp, Homo sapiens
tgtaaataaagcaat

SEQ ID NO: 1719501 - DNA, 15 bp, Homo sapiens
gtaaataaagcaatg

SEQ ID NO: 1719502 - DNA, 15 bp, Homo sapiens
taaataaagcaatgc

SEQ ID NO: 1719503 - DNA, 15 bp, Homo sapiens
aaataaagcaatgca

SEQ ID NO: 1719504 - DNA, 15 bp, Homo sapiens
aataaagcaatgcac

SEQ ID NO: 1719505 - DNA, 15 bp, Homo sapiens
ataaagcaatgcaca

SEQ ID NO: 1719506 - DNA, 15 bp, Homo sapiens
taaagcaatgcacat

SEQ ID NO: 1719507 - DNA, 15 bp, Homo sapiens
aaagcaatgcacatg

SEQ ID NO: 1719508 - DNA, 15 bp, Homo sapiens
aagcaatgcacatga

SEQ ID NO: 1719509 - DNA, 15 bp, Homo sapiens
agcaatgcacatgat

SEQ ID NO: 1719510 - DNA, 15 bp, Homo sapiens
gcaatgcacatgatt

SEQ ID NO: 1719511 - DNA, 15 bp, Homo sapiens
caatgcacatgatta

SEQ ID NO: 1719512 - DNA, 15 bp, Homo sapiens
aatgcacatgattat

SEQ ID NO: 1719513 - DNA, 15 bp, Homo sapiens
atgcacatgattatc

SEQ ID NO: 1719514 - DNA, 15 bp, Homo sapiens
tgcacatgattatca

SEQ ID NO: 1719515 - DNA, 15 bp, Homo sapiens
gcacatgattatcat

SEQ ID NO: 1719516 - DNA, 15 bp, Homo sapiens
cacatgattatcatc

SEQ ID NO: 1719517 - DNA, 15 bp, Homo sapiens
acatgattatcatct

SEQ ID NO: 1719518 - DNA, 15 bp, Homo sapiens
catgattatcatcta

SEQ ID NO: 1719519 - DNA, 15 bp, Homo sapiens
atgattatcatctaa

SEQ ID NO: 1719520 - DNA, 15 bp, Homo sapiens
tgattatcatctaat

SEQ ID NO: 1719521 - DNA, 15 bp, Homo sapiens
gattatcatctaatt

SEQ ID NO: 1719522 - DNA, 15 bp, Homo sapiens
attatcatctaatta

SEQ ID NO: 1719523 - DNA, 15 bp, Homo sapiens
ttatcatctaattag

SEQ ID NO: 1719524 - DNA, 15 bp, Homo sapiens
tatcatctaattagc

SEQ ID NO: 1719525 - DNA, 15 bp, Homo sapiens
atcatctaattagca

SEQ ID NO: 1719526 - DNA, 15 bp, Homo sapiens
tcatctaattagcac

SEQ ID NO: 1719527 - DNA, 15 bp, Homo sapiens
catctaattagcact

SEQ ID NO: 1719528 - DNA, 15 bp, Homo sapiens
atctaattagcactg

SEQ ID NO: 1719529 - DNA, 15 bp, Homo sapiens
tctaattagcactgg

SEQ ID NO: 1719530 - DNA, 15 bp, Homo sapiens
ctaattagcactggc

SEQ ID NO: 1719531 - DNA, 15 bp, Homo sapiens
taattagcactggcc

SEQ ID NO: 1719532 - DNA, 15 bp, Homo sapiens
aattagcactggcca

SEQ ID NO: 1719533 - DNA, 15 bp, Homo sapiens
attagcactggccag

SEQ ID NO: 1719534 - DNA, 15 bp, Homo sapiens
ttagcactggccagc

SEQ ID NO: 1719535 - DNA, 15 bp, Homo sapiens
tagcactggccagca

SEQ ID NO: 1719536 - DNA, 15 bp, Homo sapiens
agcactggccagcat

SEQ ID NO: 1719537 - DNA, 15 bp, Homo sapiens
gcactggccagcatt

SEQ ID NO: 1719538 - DNA, 15 bp, Homo sapiens
cactggccagcatta

SEQ ID NO: 1719539 - DNA, 15 bp, Homo sapiens
actggccagcattat

SEQ ID NO: 1719540 - DNA, 15 bp, Homo sapiens
ctggccagcattata

SEQ ID NO: 1719541 - DNA, 15 bp, Homo sapiens
tggccagcattataa

SEQ ID NO: 1719542 - DNA, 15 bp, Homo sapiens
ggccagcattataat

SEQ ID NO: 1719543 - DNA, 15 bp, Homo sapiens
gccagcattataatg

SEQ ID NO: 1719544 - DNA, 15 bp, Homo sapiens
ccagcattataatgt

SEQ ID NO: 1719545 - DNA, 15 bp, Homo sapiens
cagcattataatgtg

SEQ ID NO: 1719546 - DNA, 15 bp, Homo sapiens
agcattataatgtgc

SEQ ID NO: 1719547 - DNA, 15 bp, Homo sapiens
gcattataatgtgct

SEQ ID NO: 1719548 - DNA, 15 bp, Homo sapiens
cattataatgtgctc

SEQ ID NO: 1719549 - DNA, 15 bp, Homo sapiens
attataatgtgctca

SEQ ID NO: 1719550 - DNA, 15 bp, Homo sapiens
ttataatgtgctcat

SEQ ID NO: 1719551 - DNA, 15 bp, Homo sapiens
tataatgtgctcatt

SEQ ID NO: 1719552 - DNA, 15 bp, Homo sapiens
ataatgtgctcatta

SEQ ID NO: 1719553 - DNA, 15 bp, Homo sapiens
taatgtgctcattag

SEQ ID NO: 1719554 - DNA, 15 bp, Homo sapiens
aatgtgctcattagc

SEQ ID NO: 1719555 - DNA, 15 bp, Homo sapiens
atgtgctcattagcg

SEQ ID NO: 1719556 - DNA, 15 bp, Homo sapiens
tgtgctcattagcga

SEQ ID NO: 1719557 - DNA, 15 bp, Homo sapiens
gtgctcattagcgag

SEQ ID NO: 1719558 - DNA, 15 bp, Homo sapiens
tgctcattagcgagt

SEQ ID NO: 1719559 - DNA, 15 bp, Homo sapiens
gctcattagcgagtt

SEQ ID NO: 1719560 - DNA, 15 bp, Homo sapiens
ctcattagcgagttg

SEQ ID NO: 1719561 - DNA, 15 bp, Homo sapiens
tcattagcgagttgt

SEQ ID NO: 1719562 - DNA, 15 bp, Homo sapiens
cattagcgagttgta

SEQ ID NO: 1719563 - DNA, 15 bp, Homo sapiens
attagcgagttgtat

SEQ ID NO: 1719564 - DNA, 15 bp, Homo sapiens
ttagcgagttgtatg

SEQ ID NO: 1719565 - DNA, 15 bp, Homo sapiens
tagcgagttgtatgg

SEQ ID NO: 1719566 - DNA, 15 bp, Homo sapiens
agcgagttgtatggt

SEQ ID NO: 1719567 - DNA, 15 bp, Homo sapiens
gcgagttgtatggta

SEQ ID NO: 1719568 - DNA, 15 bp, Homo sapiens
cgagttgtatggtat

SEQ ID NO: 1719569 - DNA, 15 bp, Homo sapiens
gagttgtatggtatc

SEQ ID NO: 1719570 - DNA, 15 bp, Homo sapiens
agttgtatggtatcc

SEQ ID NO: 1719571 - DNA, 15 bp, Homo sapiens
gttgtatggtatcct

SEQ ID NO: 1719572 - DNA, 15 bp, Homo sapiens
ttgtatggtatcctg

SEQ ID NO: 1719573 - DNA, 15 bp, Homo sapiens
tgtatggtatcctga

SEQ ID NO: 1719574 - DNA, 15 bp, Homo sapiens
gtatggtatcctgag

SEQ ID NO: 1719575 - DNA, 15 bp, Homo sapiens
tatggtatcctgagg

SEQ ID NO: 1719576 - DNA, 15 bp, Homo sapiens
atggtatcctgaggc

SEQ ID NO: 1719577 - DNA, 15 bp, Homo sapiens
tggtatcctgaggct

SEQ ID NO: 1719578 - DNA, 15 bp, Homo sapiens
ggtatcctgaggctc

SEQ ID NO: 1719579 - DNA, 15 bp, Homo sapiens
gtatcctgaggctca

SEQ ID NO: 1719580 - DNA, 15 bp, Homo sapiens
tatcctgaggctcat

SEQ ID NO: 1719581 - DNA, 15 bp, Homo sapiens
atcctgaggctcata

SEQ ID NO: 1719582 - DNA, 15 bp, Homo sapiens
tcctgaggctcataa

SEQ ID NO: 1719583 - DNA, 15 bp, Homo sapiens
cctgaggctcataat

SEQ ID NO: 1719584 - DNA, 15 bp, Homo sapiens
ctgaggctcataatg

SEQ ID NO: 1719585 - DNA, 15 bp, Homo sapiens
tgaggctcataatga

SEQ ID NO: 1719586 - DNA, 15 bp, Homo sapiens
gaggctcataatgag

SEQ ID NO: 1719587 - DNA, 15 bp, Homo sapiens
aggctcataatgagt

SEQ ID NO: 1719588 - DNA, 15 bp, Homo sapiens
ggctcataatgagta

SEQ ID NO: 1719589 - DNA, 15 bp, Homo sapiens
gctcataatgagtaa

SEQ ID NO: 1719590 - DNA, 15 bp, Homo sapiens
ctcataatgagtaat

SEQ ID NO: 1719591 - DNA, 15 bp, Homo sapiens
tcataatgagtaatc

SEQ ID NO: 1719592 - DNA, 15 bp, Homo sapiens
cataatgagtaatca

SEQ ID NO: 1719593 - DNA, 15 bp, Homo sapiens
ataatgagtaatcag

SEQ ID NO: 1719594 - DNA, 15 bp, Homo sapiens
taatgagtaatcagg

SEQ ID NO: 1719595 - DNA, 15 bp, Homo sapiens
aatgagtaatcaggg

SEQ ID NO: 1719596 - DNA, 15 bp, Homo sapiens
atgagtaatcagggt

SEQ ID NO: 1719597 - DNA, 15 bp, Homo sapiens
tgagtaatcagggta

SEQ ID NO: 1719598 - DNA, 15 bp, Homo sapiens
gagtaatcagggtac

SEQ ID NO: 1719599 - DNA, 15 bp, Homo sapiens
agtaatcagggtact

SEQ ID NO: 1719600 - DNA, 15 bp, Homo sapiens
gtaatcagggtactc

SEQ ID NO: 1719601 - DNA, 15 bp, Homo sapiens
taatcagggtactcg

SEQ ID NO: 1719602 - DNA, 15 bp, Homo sapiens
aatcagggtactcgt

SEQ ID NO: 1719603 - DNA, 15 bp, Homo sapiens
atcagggtactcgtg

SEQ ID NO: 1719604 - DNA, 15 bp, Homo sapiens
tcagggtactcgtga

SEQ ID NO: 1719605 - DNA, 15 bp, Homo sapiens
cagggtactcgtgat

SEQ ID NO: 1719606 - DNA, 15 bp, Homo sapiens
agggtactcgtgatt

SEQ ID NO: 1719607 - DNA, 15 bp, Homo sapiens
gggtactcgtgattg

SEQ ID NO: 1719608 - DNA, 15 bp, Homo sapiens
ggtactcgtgattgg

SEQ ID NO: 1719609 - DNA, 15 bp, Homo sapiens
gtactcgtgattggc

SEQ ID NO: 1719610 - DNA, 15 bp, Homo sapiens
tactcgtgattggca

SEQ ID NO: 1719611 - DNA, 15 bp, Homo sapiens
actcgtgattggcat

SEQ ID NO: 1719612 - DNA, 15 bp, Homo sapiens
ctcgtgattggcatg

SEQ ID NO: 1719613 - DNA, 15 bp, Homo sapiens
tcgtgattggcatgt

SEQ ID NO: 1719614 - DNA, 15 bp, Homo sapiens
cgtgattggcatgtg

SEQ ID NO: 1719615 - DNA, 15 bp, Homo sapiens
gtgattggcatgtgg

SEQ ID NO: 1719616 - DNA, 15 bp, Homo sapiens
tgattggcatgtggc

SEQ ID NO: 1719617 - DNA, 15 bp, Homo sapiens
gattggcatgtggct

SEQ ID NO: 1719618 - DNA, 15 bp, Homo sapiens
attggcatgtggcta

SEQ ID NO: 1719619 - DNA, 15 bp, Homo sapiens
ttggcatgtggctat

SEQ ID NO: 1719620 - DNA, 15 bp, Homo sapiens
tggcatgtggctatc

SEQ ID NO: 1719621 - DNA, 15 bp, Homo sapiens
ggcatgtggctatcc

SEQ ID NO: 1719622 - DNA, 15 bp, Homo sapiens
gcatgtggctatccg

SEQ ID NO: 1719623 - DNA, 15 bp, Homo sapiens
catgtggctatccga

SEQ ID NO: 1719624 - DNA, 15 bp, Homo sapiens
atgtggctatccgaa

SEQ ID NO: 1719625 - DNA, 15 bp, Homo sapiens
tgtggctatccgaat

SEQ ID NO: 1719626 - DNA, 15 bp, Homo sapiens
gtggctatccgaatg

SEQ ID NO: 1719627 - DNA, 15 bp, Homo sapiens
tggctatccgaatgc

SEQ ID NO: 1719628 - DNA, 15 bp, Homo sapiens
ggctatccgaatgca

SEQ ID NO: 1719629 - DNA, 15 bp, Homo sapiens
gctatccgaatgcaa

SEQ ID NO: 1719630 - DNA, 15 bp, Homo sapiens
ctatccgaatgcaac

SEQ ID NO: 1719631 - DNA, 15 bp, Homo sapiens
tatccgaatgcaact

SEQ ID NO: 1719632 - DNA, 15 bp, Homo sapiens
atccgaatgcaacta

SEQ ID NO: 1719633 - DNA, 15 bp, Homo sapiens
tccgaatgcaactac

SEQ ID NO: 1719634 - DNA, 15 bp, Homo sapiens
ccgaatgcaactact

SEQ ID NO: 1719635 - DNA, 15 bp, Homo sapiens
cgaatgcaactactc

SEQ ID NO: 1719636 - DNA, 15 bp, Homo sapiens
gaatgcaactactca

SEQ ID NO: 1719637 - DNA, 15 bp, Homo sapiens
aatgcaactactcaa

SEQ ID NO: 1719638 - DNA, 15 bp, Homo sapiens
atgcaactactcaac

SEQ ID NO: 1719639 - DNA, 15 bp, Homo sapiens
tgcaactactcaacc

SEQ ID NO: 1719640 - DNA, 15 bp, Homo sapiens
gcaactactcaaccc

SEQ ID NO: 1719641 - DNA, 15 bp, Homo sapiens
caactactcaaccca

SEQ ID NO: 1719642 - DNA, 15 bp, Homo sapiens
aactactcaacccaa

SEQ ID NO: 1719643 - DNA, 15 bp, Homo sapiens
actactcaacccaat

SEQ ID NO: 1719644 - DNA, 15 bp, Homo sapiens
ctactcaacccaata

SEQ ID NO: 1719645 - DNA, 15 bp, Homo sapiens
tactcaacccaataa

SEQ ID NO: 1719646 - DNA, 15 bp, Homo sapiens
actcaacccaataaa

SEQ ID NO: 1719647 - DNA, 15 bp, Homo sapiens
ctcaacccaataaat

SEQ ID NO: 1719648 - DNA, 15 bp, Homo sapiens
tcaacccaataaatt

SEQ ID NO: 1719649 - DNA, 15 bp, Homo sapiens
caacccaataaattg

SEQ ID NO: 1719650 - DNA, 15 bp, Homo sapiens
aacccaataaattgg

SEQ ID NO: 1719651 - DNA, 15 bp, Homo sapiens
acccaataaattgga

SEQ ID NO: 1719652 - DNA, 15 bp, Homo sapiens
cccaataaattggag

SEQ ID NO: 1719653 - DNA, 15 bp, Homo sapiens
ccaataaattggagt

SEQ ID NO: 1719654 - DNA, 15 bp, Homo sapiens
caataaattggagtt

SEQ ID NO: 1719655 - DNA, 15 bp, Homo sapiens
aataaattggagtta

SEQ ID NO: 1719656 - DNA, 15 bp, Homo sapiens
ataaattggagttag

SEQ ID NO: 1719657 - DNA, 15 bp, Homo sapiens
taaattggagttagg

SEQ ID NO: 1719658 - DNA, 15 bp, Homo sapiens
aaattggagttagga

SEQ ID NO: 1719659 - DNA, 15 bp, Homo sapiens
aattggagttaggac

SEQ ID NO: 1719660 - DNA, 15 bp, Homo sapiens
attggagttaggaca

SEQ ID NO: 1719661 - DNA, 15 bp, Homo sapiens
ttggagttaggacag

SEQ ID NO: 1719662 - DNA, 15 bp, Homo sapiens
tggagttaggacaga

SEQ ID NO: 1719663 - DNA, 15 bp, Homo sapiens
ggagttaggacagaa

SEQ ID NO: 1719664 - DNA, 15 bp, Homo sapiens
gagttaggacagaat

SEQ ID NO: 1719665 - DNA, 15 bp, Homo sapiens
agttaggacagaatg

SEQ ID NO: 1719666 - DNA, 15 bp, Homo sapiens
gttaggacagaatgt

SEQ ID NO: 1719667 - DNA, 15 bp, Homo sapiens
ttaggacagaatgtg

SEQ ID NO: 1719668 - DNA, 15 bp, Homo sapiens
taggacagaatgtgt

SEQ ID NO: 1719669 - DNA, 15 bp, Homo sapiens
aggacagaatgtgtt

SEQ ID NO: 1719670 - DNA, 15 bp, Homo sapiens
ggacagaatgtgtta

SEQ ID NO: 1719671 - DNA, 15 bp, Homo sapiens
gacagaatgtgttat

SEQ ID NO: 1719672 - DNA, 15 bp, Homo sapiens
acagaatgtgttatg

SEQ ID NO: 1719673 - DNA, 15 bp, Homo sapiens
cagaatgtgttatgt

SEQ ID NO: 1719674 - DNA, 15 bp, Homo sapiens
agaatgtgttatgta

SEQ ID NO: 1719675 - DNA, 15 bp, Homo sapiens
gaatgtgttatgtaa

SEQ ID NO: 1719676 - DNA, 15 bp, Homo sapiens
aatgtgttatgtaaa

SEQ ID NO: 1719677 - DNA, 15 bp, Homo sapiens
atgtgttatgtaaaa

SEQ ID NO: 1719678 - DNA, 15 bp, Homo sapiens
tgtgttatgtaaaaa

SEQ ID NO: 1719679 - DNA, 15 bp, Homo sapiens
gtgttatgtaaaaag

SEQ ID NO: 1719680 - DNA, 15 bp, Homo sapiens
tgttatgtaaaaaga

SEQ ID NO: 1719681 - DNA, 15 bp, Homo sapiens
gttatgtaaaaagaa

SEQ ID NO: 1719682 - DNA, 15 bp, Homo sapiens
ttatgtaaaaagaaa

SEQ ID NO: 1719683 - DNA, 15 bp, Homo sapiens
tatgtaaaaagaaaa

SEQ ID NO: 1719684 - DNA, 15 bp, Homo sapiens
atgtaaaaagaaaaa

SEQ ID NO: 1719685 - DNA, 15 bp, Homo sapiens
tgtaaaaagaaaaaa

SEQ ID NO: 1719686 - DNA, 15 bp, Homo sapiens
gtaaaaagaaaaaat

SEQ ID NO: 1719687 - DNA, 15 bp, Homo sapiens
taaaaagaaaaaata

SEQ ID NO: 1719688 - DNA, 15 bp, Homo sapiens
aaaagaaaaaataca

SEQ ID NO: 1719689 - DNA, 15 bp, Homo sapiens
aaagaaaaaatacag

SEQ ID NO: 1719690 - DNA, 15 bp, Homo sapiens
aagaaaaaatacaga

SEQ ID NO: 1719691 - DNA, 15 bp, Homo sapiens
agaaaaaatacagag

SEQ ID NO: 1719692 - DNA, 15 bp, Homo sapiens
gaaaaaatacagagc

SEQ ID NO: 1719693 - DNA, 15 bp, Homo sapiens
aaaaaatacagagcc

SEQ ID NO: 1719694 - DNA, 15 bp, Homo sapiens
aaaaatacagagcca

SEQ ID NO: 1719695 - DNA, 15 bp, Homo sapiens
aaaatacagagccag

SEQ ID NO: 1719696 - DNA, 15 bp, Homo sapiens
aaatacagagccagc

SEQ ID NO: 1719697 - DNA, 15 bp, Homo sapiens
aatacagagccagct

SEQ ID NO: 1719698 - DNA, 15 bp, Homo sapiens
atacagagccagctg

SEQ ID NO: 1719699 - DNA, 15 bp, Homo sapiens
tacagagccagctgg

SEQ ID NO: 1719700 - DNA, 15 bp, Homo sapiens
acagagccagctggt

SEQ ID NO: 1719701 - DNA, 15 bp, Homo sapiens
cagagccagctggtg

SEQ ID NO: 1719702 - DNA, 15 bp, Homo sapiens
agagccagctggtga

SEQ ID NO: 1719703 - DNA, 15 bp, Homo sapiens
gagccagctggtgaa

SEQ ID NO: 1719704 - DNA, 15 bp, Homo sapiens
agccagctggtgaat

SEQ ID NO: 1719705 - DNA, 15 bp, Homo sapiens
gccagctggtgaatt

SEQ ID NO: 1719706 - DNA, 15 bp, Homo sapiens
ccagctggtgaattg

SEQ ID NO: 1719707 - DNA, 15 bp, Homo sapiens
cagctggtgaattgg

SEQ ID NO: 1719708 - DNA, 15 bp, Homo sapiens
agctggtgaattggc

SEQ ID NO: 1719709 - DNA, 15 bp, Homo sapiens
gctggtgaattggca

SEQ ID NO: 1719710 - DNA, 15 bp, Homo sapiens
ctggtgaattggcaa

SEQ ID NO: 1719711 - DNA, 15 bp, Homo sapiens
tggtgaattggcaat

SEQ ID NO: 1719712 - DNA, 15 bp, Homo sapiens
ggtgaattggcaatt

SEQ ID NO: 1719713 - DNA, 15 bp, Homo sapiens
gtgaattggcaattt

SEQ ID NO: 1719714 - DNA, 15 bp, Homo sapiens
tgaattggcaatttc

SEQ ID NO: 1719715 - DNA, 15 bp, Homo sapiens
gaattggcaatttcc

SEQ ID NO: 1719716 - DNA, 15 bp, Homo sapiens
aattggcaatttcct

SEQ ID NO: 1719717 - DNA, 15 bp, Homo sapiens
attggcaatttcctc

SEQ ID NO: 1719718 - DNA, 15 bp, Homo sapiens
ttggcaatttcctcc

SEQ ID NO: 1719719 - DNA, 15 bp, Homo sapiens
tggcaatttcctcct

SEQ ID NO: 1719720 - DNA, 15 bp, Homo sapiens
ggcaatttcctcctt

SEQ ID NO: 1719721 - DNA, 15 bp, Homo sapiens
gcaatttcctccttc

SEQ ID NO: 1719722 - DNA, 15 bp, Homo sapiens
caatttcctccttcc

SEQ ID NO: 1719723 - DNA, 15 bp, Homo sapiens
aatttcctccttcct

SEQ ID NO: 1719724 - DNA, 15 bp, Homo sapiens
atttcctccttcctg

SEQ ID NO: 1719725 - DNA, 15 bp, Homo sapiens
tttcctccttcctgt

SEQ ID NO: 1719726 - DNA, 15 bp, Homo sapiens
ttcctccttcctgta

SEQ ID NO: 1719727 - DNA, 15 bp, Homo sapiens
tcctccttcctgtaa

SEQ ID NO: 1719728 - DNA, 15 bp, Homo sapiens
cctccttcctgtaat

SEQ ID NO: 1719729 - DNA, 15 bp, Homo sapiens
ctccttcctgtaatt

SEQ ID NO: 1719730 - DNA, 15 bp, Homo sapiens
tccttcctgtaattc

SEQ ID NO: 1719731 - DNA, 15 bp, Homo sapiens
ccttcctgtaattca

SEQ ID NO: 1719732 - DNA, 15 bp, Homo sapiens
cttcctgtaattcag

SEQ ID NO: 1719733 - DNA, 15 bp, Homo sapiens
ttcctgtaattcagg

SEQ ID NO: 1719734 - DNA, 15 bp, Homo sapiens
tcctgtaattcaggt

SEQ ID NO: 1719735 - DNA, 15 bp, Homo sapiens
cctgtaattcaggta

SEQ ID NO: 1719736 - DNA, 15 bp, Homo sapiens
ctgtaattcaggtac

SEQ ID NO: 1719737 - DNA, 15 bp, Homo sapiens
tgtaattcaggtaca

SEQ ID NO: 1719738 - DNA, 15 bp, Homo sapiens
gtaattcaggtacag

SEQ ID NO: 1719739 - DNA, 15 bp, Homo sapiens
taattcaggtacagc

SEQ ID NO: 1719740 - DNA, 15 bp, Homo sapiens
aattcaggtacagct

SEQ ID NO: 1719741 - DNA, 15 bp, Homo sapiens
attcaggtacagctc

SEQ ID NO: 1719742 - DNA, 15 bp, Homo sapiens
ttcaggtacagctcc

SEQ ID NO: 1719743 - DNA, 15 bp, Homo sapiens
tcaggtacagctcct

SEQ ID NO: 1719744 - DNA, 15 bp, Homo sapiens
caggtacagctcctg

SEQ ID NO: 1719745 - DNA, 15 bp, Homo sapiens
aggtacagctcctgc

SEQ ID NO: 1719746 - DNA, 15 bp, Homo sapiens
ggtacagctcctgct

SEQ ID NO: 1719747 - DNA, 15 bp, Homo sapiens
gtacagctcctgctc

SEQ ID NO: 1719748 - DNA, 15 bp, Homo sapiens
tacagctcctgctct

SEQ ID NO: 1719749 - DNA, 15 bp, Homo sapiens
acagctcctgctctc

SEQ ID NO: 1719750 - DNA, 15 bp, Homo sapiens
cagctcctgctctca

SEQ ID NO: 1719751 - DNA, 15 bp, Homo sapiens
agctcctgctctcaa

SEQ ID NO: 1719752 - DNA, 15 bp, Homo sapiens
gctcctgctctcaaa

SEQ ID NO: 1719753 - DNA, 15 bp, Homo sapiens
ctcctgctctcaaat

SEQ ID NO: 1719754 - DNA, 15 bp, Homo sapiens
tcctgctctcaaata

SEQ ID NO: 1719755 - DNA, 15 bp, Homo sapiens
cctgctctcaaatac

SEQ ID NO: 1719756 - DNA, 15 bp, Homo sapiens
ctgctctcaaataca

SEQ ID NO: 1719757 - DNA, 15 bp, Homo sapiens
tgctctcaaatacaa

SEQ ID NO: 1719758 - DNA, 15 bp, Homo sapiens
gctctcaaatacaaa

SEQ ID NO: 1719759 - DNA, 15 bp, Homo sapiens
ctctcaaatacaaaa

SEQ ID NO: 1719760 - DNA, 15 bp, Homo sapiens
tctcaaatacaaaat

SEQ ID NO: 1719761 - DNA, 15 bp, Homo sapiens
ctcaaatacaaaata

SEQ ID NO: 1719762 - DNA, 15 bp, Homo sapiens
tcaaatacaaaataa

SEQ ID NO: 1719763 - DNA, 15 bp, Homo sapiens
caaatacaaaataaa

SEQ ID NO: 1719764 - DNA, 15 bp, Homo sapiens
aaatacaaaataaat

SEQ ID NO: 1719765 - DNA, 15 bp, Homo sapiens
aatacaaaataaatg

SEQ ID NO: 1719766 - DNA, 15 bp, Homo sapiens
atacaaaataaatgt

SEQ ID NO: 1719767 - DNA, 15 bp, Homo sapiens
tacaaaataaatgtg

SEQ ID NO: 1719768 - DNA, 15 bp, Homo sapiens
acaaaataaatgtga

SEQ ID NO: 1719769 - DNA, 15 bp, Homo sapiens
caaaataaatgtgag

SEQ ID NO: 1719770 - DNA, 15 bp, Homo sapiens
aaaataaatgtgaga

SEQ ID NO: 1719771 - DNA, 15 bp, Homo sapiens
aaataaatgtgagaa

SEQ ID NO: 1719772 - DNA, 15 bp, Homo sapiens
aataaatgtgagaac

SEQ ID NO: 1719773 - DNA, 15 bp, Homo sapiens
ataaatgtgagaaca

SEQ ID NO: 1719774 - DNA, 15 bp, Homo sapiens
taaatgtgagaacag

SEQ ID NO: 1719775 - DNA, 15 bp, Homo sapiens
aaatgtgagaacagg

SEQ ID NO: 1719776 - DNA, 15 bp, Homo sapiens
aatgtgagaacagga

SEQ ID NO: 1719777 - DNA, 15 bp, Homo sapiens
atgtgagaacaggag

SEQ ID NO: 1719778 - DNA, 15 bp, Homo sapiens
tgtgagaacaggaga

SEQ ID NO: 1719779 - DNA, 15 bp, Homo sapiens
gtgagaacaggagag

SEQ ID NO: 1719780 - DNA, 15 bp, Homo sapiens
tgagaacaggagagc

SEQ ID NO: 1719781 - DNA, 15 bp, Homo sapiens
gagaacaggagagct

SEQ ID NO: 1719782 - DNA, 15 bp, Homo sapiens
agaacaggagagctg

SEQ ID NO: 1719783 - DNA, 15 bp, Homo sapiens
gaacaggagagctgg

SEQ ID NO: 1719784 - DNA, 15 bp, Homo sapiens
aacaggagagctgga

SEQ ID NO: 1719785 - DNA, 15 bp, Homo sapiens
acaggagagctggag

SEQ ID NO: 1719786 - DNA, 15 bp, Homo sapiens
caggagagctggaga

SEQ ID NO: 1719787 - DNA, 15 bp, Homo sapiens
aggagagctggagat

SEQ ID NO: 1719788 - DNA, 15 bp, Homo sapiens
ggagagctggagata

SEQ ID NO: 1719789 - DNA, 15 bp, Homo sapiens
gagagctggagatag

SEQ ID NO: 1719790 - DNA, 15 bp, Homo sapiens
agagctggagatagc

SEQ ID NO: 1719791 - DNA, 15 bp, Homo sapiens
gagctggagatagca

SEQ ID NO: 1719792 - DNA, 15 bp, Homo sapiens
agctggagatagcag

SEQ ID NO: 1719793 - DNA, 15 bp, Homo sapiens
gctggagatagcaga

SEQ ID NO: 1719794 - DNA, 15 bp, Homo sapiens
ctggagatagcagaa

SEQ ID NO: 1719795 - DNA, 15 bp, Homo sapiens
tggagatagcagaag

SEQ ID NO: 1719796 - DNA, 15 bp, Homo sapiens
ggagatagcagaaga

SEQ ID NO: 1719797 - DNA, 15 bp, Homo sapiens
gagatagcagaagag

SEQ ID NO: 1719798 - DNA, 15 bp, Homo sapiens
agatagcagaagagc

SEQ ID NO: 1719799 - DNA, 15 bp, Homo sapiens
gatagcagaagagct

SEQ ID NO: 1719800 - DNA, 15 bp, Homo sapiens
atagcagaagagctg

SEQ ID NO: 1719801 - DNA, 15 bp, Homo sapiens
tagcagaagagctgg

SEQ ID NO: 1719802 - DNA, 15 bp, Homo sapiens
agcagaagagctgga

SEQ ID NO: 1719803 - DNA, 15 bp, Homo sapiens
gcagaagagctggag

SEQ ID NO: 1719804 - DNA, 15 bp, Homo sapiens
cagaagagctggaga

SEQ ID NO: 1719805 - DNA, 15 bp, Homo sapiens
agaagagctggagat

SEQ ID NO: 1719806 - DNA, 15 bp, Homo sapiens
gaagagctggagata

SEQ ID NO: 1719807 - DNA, 15 bp, Homo sapiens
aagagctggagatag

SEQ ID NO: 1719808 - DNA, 15 bp, Homo sapiens
agagctggagataga

SEQ ID NO: 1719809 - DNA, 15 bp, Homo sapiens
gagctggagatagaa

SEQ ID NO: 1719810 - DNA, 15 bp, Homo sapiens
agctggagatagaaa

SEQ ID NO: 1719811 - DNA, 15 bp, Homo sapiens
gctggagatagaaat

SEQ ID NO: 1719812 - DNA, 15 bp, Homo sapiens
ctggagatagaaatg

SEQ ID NO: 1719813 - DNA, 15 bp, Homo sapiens
tggagatagaaatgg

SEQ ID NO: 1719814 - DNA, 15 bp, Homo sapiens
ggagatagaaatgga

SEQ ID NO: 1719815 - DNA, 15 bp, Homo sapiens
gagatagaaatggaa

SEQ ID NO: 1719816 - DNA, 15 bp, Homo sapiens
agatagaaatggaaa

SEQ ID NO: 1719817 - DNA, 15 bp, Homo sapiens
gatagaaatggaaat

SEQ ID NO: 1719818 - DNA, 15 bp, Homo sapiens
atagaaatggaaatg

SEQ ID NO: 1719819 - DNA, 15 bp, Homo sapiens
tagaaatggaaatgt

SEQ ID NO: 1719820 - DNA, 15 bp, Homo sapiens
agaaatggaaatgtt

SEQ ID NO: 1719821 - DNA, 15 bp, Homo sapiens
gaaatggaaatgttc

SEQ ID NO: 1719822 - DNA, 15 bp, Homo sapiens
aaatggaaatgttcg

SEQ ID NO: 1719823 - DNA, 15 bp, Homo sapiens
aatggaaatgttcgc

SEQ ID NO: 1719824 - DNA, 15 bp, Homo sapiens
atggaaatgttcgct

SEQ ID NO: 1719825 - DNA, 15 bp, Homo sapiens
tggaaatgttcgcta

SEQ ID NO: 1719826 - DNA, 15 bp, Homo sapiens
ggaaatgttcgctaa

SEQ ID NO: 1719827 - DNA, 15 bp, Homo sapiens
gaaatgttcgctaag

SEQ ID NO: 1719828 - DNA, 15 bp, Homo sapiens
aaatgttcgctaagg

SEQ ID NO: 1719829 - DNA, 15 bp, Homo sapiens
aatgttcgctaaggg

SEQ ID NO: 1719830 - DNA, 15 bp, Homo sapiens
atgttcgctaagggt

SEQ ID NO: 1719831 - DNA, 15 bp, Homo sapiens
tgttcgctaagggtg

SEQ ID NO: 1719832 - DNA, 15 bp, Homo sapiens
gttcgctaagggtga

SEQ ID NO: 1719833 - DNA, 15 bp, Homo sapiens
ttcgctaagggtgac

SEQ ID NO: 1719834 - DNA, 15 bp, Homo sapiens
tcgctaagggtgaca

SEQ ID NO: 1719835 - DNA, 15 bp, Homo sapiens
cgctaagggtgacag

SEQ ID NO: 1719836 - DNA, 15 bp, Homo sapiens
gctaagggtgacaga

SEQ ID NO: 1719837 - DNA, 15 bp, Homo sapiens
ctaagggtgacagag

SEQ ID NO: 1719838 - DNA, 15 bp, Homo sapiens
taagggtgacagaga

SEQ ID NO: 1719839 - DNA, 15 bp, Homo sapiens
aagggtgacagagaa

SEQ ID NO: 1719840 - DNA, 15 bp, Homo sapiens
agggtgacagagaac

SEQ ID NO: 1719841 - DNA, 15 bp, Homo sapiens
gggtgacagagaaca

SEQ ID NO: 1719842 - DNA, 15 bp, Homo sapiens
ggtgacagagaacaa

SEQ ID NO: 1719843 - DNA, 15 bp, Homo sapiens
gtgacagagaacaag

SEQ ID NO: 1719844 - DNA, 15 bp, Homo sapiens
tgacagagaacaagt

SEQ ID NO: 1719845 - DNA, 15 bp, Homo sapiens
gacagagaacaagtg

SEQ ID NO: 1719846 - DNA, 15 bp, Homo sapiens
acagagaacaagtgc

SEQ ID NO: 1719847 - DNA, 15 bp, Homo sapiens
cagagaacaagtgcc

SEQ ID NO: 1719848 - DNA, 15 bp, Homo sapiens
agagaacaagtgcct

SEQ ID NO: 1719849 - DNA, 15 bp, Homo sapiens
gagaacaagtgccta

SEQ ID NO: 1719850 - DNA, 15 bp, Homo sapiens
agaacaagtgcctat

SEQ ID NO: 1719851 - DNA, 15 bp, Homo sapiens
gaacaagtgcctatg

SEQ ID NO: 1719852 - DNA, 15 bp, Homo sapiens
aacaagtgcctatga

SEQ ID NO: 1719853 - DNA, 15 bp, Homo sapiens
acaagtgcctatgat

SEQ ID NO: 1719854 - DNA, 15 bp, Homo sapiens
caagtgcctatgatt

SEQ ID NO: 1719855 - DNA, 15 bp, Homo sapiens
aagtgcctatgatta

SEQ ID NO: 1719856 - DNA, 15 bp, Homo sapiens
agtgcctatgattat

SEQ ID NO: 1719857 - DNA, 15 bp, Homo sapiens
gtgcctatgattatt

SEQ ID NO: 1719858 - DNA, 15 bp, Homo sapiens
tgcctatgattatta

SEQ ID NO: 1719859 - DNA, 15 bp, Homo sapiens
gcctatgattattat

SEQ ID NO: 1719860 - DNA, 15 bp, Homo sapiens
cctatgattattata

SEQ ID NO: 1719861 - DNA, 15 bp, Homo sapiens
ctatgattattatac

SEQ ID NO: 1719862 - DNA, 15 bp, Homo sapiens
tatgattattataca

SEQ ID NO: 1719863 - DNA, 15 bp, Homo sapiens
atgattattatacaa

SEQ ID NO: 1719864 - DNA, 15 bp, Homo sapiens
tgattattatacaag

SEQ ID NO: 1719865 - DNA, 15 bp, Homo sapiens
gattattatacaaga

SEQ ID NO: 1719866 - DNA, 15 bp, Homo sapiens
attattatacaagat

SEQ ID NO: 1719867 - DNA, 15 bp, Homo sapiens
ttattatacaagatt

SEQ ID NO: 1719868 - DNA, 15 bp, Homo sapiens
tattatacaagatta

SEQ ID NO: 1719869 - DNA, 15 bp, Homo sapiens
attatacaagattac

SEQ ID NO: 1719870 - DNA, 15 bp, Homo sapiens
ttatacaagattacc

SEQ ID NO: 1719871 - DNA, 15 bp, Homo sapiens
tatacaagattacca

SEQ ID NO: 1719872 - DNA, 15 bp, Homo sapiens
atacaagattaccaa

SEQ ID NO: 1719873 - DNA, 15 bp, Homo sapiens
tacaagattaccaaa

SEQ ID NO: 1719874 - DNA, 15 bp, Homo sapiens
acaagattaccaaaa

SEQ ID NO: 1719875 - DNA, 15 bp, Homo sapiens
caagattaccaaaaa

SEQ ID NO: 1719876 - DNA, 15 bp, Homo sapiens
aagattaccaaaaaa

SEQ ID NO: 1719877 - DNA, 15 bp, Homo sapiens
agattaccaaaaaag

SEQ ID NO: 1719878 - DNA, 15 bp, Homo sapiens
gattaccaaaaaaga

SEQ ID NO: 1719879 - DNA, 15 bp, Homo sapiens
attaccaaaaaagat

SEQ ID NO: 1719880 - DNA, 15 bp, Homo sapiens
ttaccaaaaaagata

SEQ ID NO: 1719881 - DNA, 15 bp, Homo sapiens
taccaaaaaagataa

SEQ ID NO: 1719882 - DNA, 15 bp, Homo sapiens
accaaaaaagataaa

SEQ ID NO: 1719883 - DNA, 15 bp, Homo sapiens
ccaaaaaagataaaa

SEQ ID NO: 1719884 - DNA, 15 bp, Homo sapiens
caaaaaagataaaac

SEQ ID NO: 1719885 - DNA, 15 bp, Homo sapiens
aaaaaagataaaacc

SEQ ID NO: 1719886 - DNA, 15 bp, Homo sapiens
aaaaagataaaacct

SEQ ID NO: 1719887 - DNA, 15 bp, Homo sapiens
aaaagataaaacctt

SEQ ID NO: 1719888 - DNA, 15 bp, Homo sapiens
aaagataaaaccttt

SEQ ID NO: 1719889 - DNA, 15 bp, Homo sapiens
aagataaaacctttg

SEQ ID NO: 1719890 - DNA, 15 bp, Homo sapiens
agataaaacctttgt

SEQ ID NO: 1719891 - DNA, 15 bp, Homo sapiens
gataaaacctttgtg

SEQ ID NO: 1719892 - DNA, 15 bp, Homo sapiens
ataaaacctttgtgg

SEQ ID NO: 1719893 - DNA, 15 bp, Homo sapiens
taaaacctttgtggt

SEQ ID NO: 1719894 - DNA, 15 bp, Homo sapiens
aaaacctttgtggta

SEQ ID NO: 1719895 - DNA, 15 bp, Homo sapiens
aaacctttgtggtat

SEQ ID NO: 1719896 - DNA, 15 bp, Homo sapiens
aacctttgtggtatt

SEQ ID NO: 1719897 - DNA, 15 bp, Homo sapiens
acctttgtggtattt

SEQ ID NO: 1719898 - DNA, 15 bp, Homo sapiens
cctttgtggtatttg

SEQ ID NO: 1719899 - DNA, 15 bp, Homo sapiens
ctttgtggtatttgg

SEQ ID NO: 1719900 - DNA, 15 bp, Homo sapiens
tttgtggtatttggt

SEQ ID NO: 1719901 - DNA, 15 bp, Homo sapiens
ttgtggtatttggtt

SEQ ID NO: 1719902 - DNA, 15 bp, Homo sapiens
tgtggtatttggttt

SEQ ID NO: 1719903 - DNA, 15 bp, Homo sapiens
gtggtatttggtttc

SEQ ID NO: 1719904 - DNA, 15 bp, Homo sapiens
tggtatttggtttct

SEQ ID NO: 1719905 - DNA, 15 bp, Homo sapiens
ggtatttggtttctt

SEQ ID NO: 1719906 - DNA, 15 bp, Homo sapiens
gtatttggtttcttt

SEQ ID NO: 1719907 - DNA, 15 bp, Homo sapiens
tatttggtttctttt

SEQ ID NO: 1719908 - DNA, 15 bp, Homo sapiens
atttggtttcttttt

SEQ ID NO: 1719909 - DNA, 15 bp, Homo sapiens
tttggtttctttttc

SEQ ID NO: 1719910 - DNA, 15 bp, Homo sapiens
ttggtttctttttca

SEQ ID NO: 1719911 - DNA, 15 bp, Homo sapiens
tggtttctttttcat

SEQ ID NO: 1719912 - DNA, 15 bp, Homo sapiens
ggtttctttttcata

SEQ ID NO: 1719913 - DNA, 15 bp, Homo sapiens
gtttctttttcatat

SEQ ID NO: 1719914 - DNA, 15 bp, Homo sapiens
tttctttttcatatc

SEQ ID NO: 1719915 - DNA, 15 bp, Homo sapiens
ttctttttcatatct

SEQ ID NO: 1719916 - DNA, 15 bp, Homo sapiens
tctttttcatatctc

SEQ ID NO: 1719917 - DNA, 15 bp, Homo sapiens
ctttttcatatctca

SEQ ID NO: 1719918 - DNA, 15 bp, Homo sapiens
tttttcatatctcaa

SEQ ID NO: 1719919 - DNA, 15 bp, Homo sapiens
ttttcatatctcaag

SEQ ID NO: 1719920 - DNA, 15 bp, Homo sapiens
tttcatatctcaagt

SEQ ID NO: 1719921 - DNA, 15 bp, Homo sapiens
ttcatatctcaagta

SEQ ID NO: 1719922 - DNA, 15 bp, Homo sapiens
tcatatctcaagtat

SEQ ID NO: 1719923 - DNA, 15 bp, Homo sapiens
catatctcaagtata

SEQ ID NO: 1719924 - DNA, 15 bp, Homo sapiens
atatctcaagtatag

SEQ ID NO: 1719925 - DNA, 15 bp, Homo sapiens
tatctcaagtataga

SEQ ID NO: 1719926 - DNA, 15 bp, Homo sapiens
atctcaagtatagaa

SEQ ID NO: 1719927 - DNA, 15 bp, Homo sapiens
tctcaagtatagaat

SEQ ID NO: 1719928 - DNA, 15 bp, Homo sapiens
ctcaagtatagaatc

SEQ ID NO: 1719929 - DNA, 15 bp, Homo sapiens
tcaagtatagaatca

SEQ ID NO: 1719930 - DNA, 15 bp, Homo sapiens
caagtatagaatcaa

SEQ ID NO: 1719931 - DNA, 15 bp, Homo sapiens
aagtatagaatcaaa

SEQ ID NO: 1719932 - DNA, 15 bp, Homo sapiens
agtatagaatcaaag

SEQ ID NO: 1719933 - DNA, 15 bp, Homo sapiens
gtatagaatcaaagt

SEQ ID NO: 1719934 - DNA, 15 bp, Homo sapiens
tatagaatcaaagta

SEQ ID NO: 1719935 - DNA, 15 bp, Homo sapiens
atagaatcaaagtaa

SEQ ID NO: 1719936 - DNA, 15 bp, Homo sapiens
tagaatcaaagtaag

SEQ ID NO: 1719937 - DNA, 15 bp, Homo sapiens
agaatcaaagtaaga

SEQ ID NO: 1719938 - DNA, 15 bp, Homo sapiens
gaatcaaagtaagaa

SEQ ID NO: 1719939 - DNA, 15 bp, Homo sapiens
aatcaaagtaagaaa

SEQ ID NO: 1719940 - DNA, 15 bp, Homo sapiens
atcaaagtaagaaat

SEQ ID NO: 1719941 - DNA, 15 bp, Homo sapiens
tcaaagtaagaaatg

SEQ ID NO: 1719942 - DNA, 15 bp, Homo sapiens
caaagtaagaaatga

SEQ ID NO: 1719943 - DNA, 15 bp, Homo sapiens
aaagtaagaaatgag

SEQ ID NO: 1719944 - DNA, 15 bp, Homo sapiens
aagtaagaaatgagc

SEQ ID NO: 1719945 - DNA, 15 bp, Homo sapiens
agtaagaaatgagca

SEQ ID NO: 1719946 - DNA, 15 bp, Homo sapiens
gtaagaaatgagcag

SEQ ID NO: 1719947 - DNA, 15 bp, Homo sapiens
taagaaatgagcaga

SEQ ID NO: 1719948 - DNA, 15 bp, Homo sapiens
aagaaatgagcagag

SEQ ID NO: 1719949 - DNA, 15 bp, Homo sapiens
agaaatgagcagagt

SEQ ID NO: 1719950 - DNA, 15 bp, Homo sapiens
gaaatgagcagagtt

SEQ ID NO: 1719951 - DNA, 15 bp, Homo sapiens
aaatgagcagagttt

SEQ ID NO: 1719952 - DNA, 15 bp, Homo sapiens
aatgagcagagtttc

SEQ ID NO: 1719953 - DNA, 15 bp, Homo sapiens
atgagcagagtttca

SEQ ID NO: 1719954 - DNA, 15 bp, Homo sapiens
tgagcagagtttcaa

SEQ ID NO: 1719955 - DNA, 15 bp, Homo sapiens
gagcagagtttcaat

SEQ ID NO: 1719956 - DNA, 15 bp, Homo sapiens
agcagagtttcaata

SEQ ID NO: 1719957 - DNA, 15 bp, Homo sapiens
gcagagtttcaataa

SEQ ID NO: 1719958 - DNA, 15 bp, Homo sapiens
cagagtttcaataac

SEQ ID NO: 1719959 - DNA, 15 bp, Homo sapiens
agagtttcaataaca

SEQ ID NO: 1719960 - DNA, 15 bp, Homo sapiens
gagtttcaataacat

SEQ ID NO: 1719961 - DNA, 15 bp, Homo sapiens
agtttcaataacatt

SEQ ID NO: 1719962 - DNA, 15 bp, Homo sapiens
gtttcaataacattt

SEQ ID NO: 1719963 - DNA, 15 bp, Homo sapiens
tttcaataacatttc

SEQ ID NO: 1719964 - DNA, 15 bp, Homo sapiens
ttcaataacatttct

SEQ ID NO: 1719965 - DNA, 15 bp, Homo sapiens
tcaataacatttctt

SEQ ID NO: 1719966 - DNA, 15 bp, Homo sapiens
caataacatttcttg

SEQ ID NO: 1719967 - DNA, 15 bp, Homo sapiens
aataacatttcttgg

SEQ ID NO: 1719968 - DNA, 15 bp, Homo sapiens
ataacatttcttgga

SEQ ID NO: 1719969 - DNA, 15 bp, Homo sapiens
taacatttcttggaa

SEQ ID NO: 1719970 - DNA, 15 bp, Homo sapiens
aacatttcttggaag

SEQ ID NO: 1719971 - DNA, 15 bp, Homo sapiens
acatttcttggaagg

SEQ ID NO: 1719972 - DNA, 15 bp, Homo sapiens
catttcttggaaggt

SEQ ID NO: 1719973 - DNA, 15 bp, Homo sapiens
atttcttggaaggtg

SEQ ID NO: 1719974 - DNA, 15 bp, Homo sapiens
tttcttggaaggtga

SEQ ID NO: 1719975 - DNA, 15 bp, Homo sapiens
ttcttggaaggtgaa

SEQ ID NO: 1719976 - DNA, 15 bp, Homo sapiens
tcttggaaggtgaaa

SEQ ID NO: 1719977 - DNA, 15 bp, Homo sapiens
cttggaaggtgaaaa

SEQ ID NO: 1719978 - DNA, 15 bp, Homo sapiens
ttggaaggtgaaaat

SEQ ID NO: 1719979 - DNA, 15 bp, Homo sapiens
tggaaggtgaaaatt

SEQ ID NO: 1719980 - DNA, 15 bp, Homo sapiens
ggaaggtgaaaattt

SEQ ID NO: 1719981 - DNA, 15 bp, Homo sapiens
gaaggtgaaaattta

SEQ ID NO: 1719982 - DNA, 15 bp, Homo sapiens
aaggtgaaaatttaa

SEQ ID NO: 1719983 - DNA, 15 bp, Homo sapiens
aggtgaaaatttaat

SEQ ID NO: 1719984 - DNA, 15 bp, Homo sapiens
ggtgaaaatttaatc

SEQ ID NO: 1719985 - DNA, 15 bp, Homo sapiens
gtgaaaatttaatca

SEQ ID NO: 1719986 - DNA, 15 bp, Homo sapiens
tgaaaatttaatcat

SEQ ID NO: 1719987 - DNA, 15 bp, Homo sapiens
gaaaatttaatcatt

SEQ ID NO: 1719988 - DNA, 15 bp, Homo sapiens
aaaatttaatcattg

SEQ ID NO: 1719989 - DNA, 15 bp, Homo sapiens
aaatttaatcattga

SEQ ID NO: 1719990 - DNA, 15 bp, Homo sapiens
aatttaatcattgaa

SEQ ID NO: 1719991 - DNA, 15 bp, Homo sapiens
atttaatcattgaaa

SEQ ID NO: 1719992 - DNA, 15 bp, Homo sapiens
tttaatcattgaaat

SEQ ID NO: 1719993 - DNA, 15 bp, Homo sapiens
ttaatcattgaaata

SEQ ID NO: 1719994 - DNA, 15 bp, Homo sapiens
taatcattgaaatat

SEQ ID NO: 1719995 - DNA, 15 bp, Homo sapiens
aatcattgaaatata

SEQ ID NO: 1719996 - DNA, 15 bp, Homo sapiens
atcattgaaatatac

SEQ ID NO: 1719997 - DNA, 15 bp, Homo sapiens
tcattgaaatatact

SEQ ID NO: 1719998 - DNA, 15 bp, Homo sapiens
cattgaaatatactt

SEQ ID NO: 1719999 - DNA, 15 bp, Homo sapiens
attgaaatatacttc

SEQ ID NO: 1720000 - DNA, 15 bp, Homo sapiens
ttgaaatatacttcc

SEQ ID NO: 1720001 - DNA, 15 bp, Homo sapiens
tgaaatatacttcct

SEQ ID NO: 1720002 - DNA, 15 bp, Homo sapiens
gaaatatacttcctg

SEQ ID NO: 1720003 - DNA, 15 bp, Homo sapiens
aaatatacttcctga

SEQ ID NO: 1720004 - DNA, 15 bp, Homo sapiens
aatatacttcctgat

SEQ ID NO: 1720005 - DNA, 15 bp, Homo sapiens
atatacttcctgata

SEQ ID NO: 1720006 - DNA, 15 bp, Homo sapiens
tatacttcctgataa

SEQ ID NO: 1720007 - DNA, 15 bp, Homo sapiens
atacttcctgataat

SEQ ID NO: 1720008 - DNA, 15 bp, Homo sapiens
tacttcctgataatg

SEQ ID NO: 1720009 - DNA, 15 bp, Homo sapiens
acttcctgataatgt

SEQ ID NO: 1720010 - DNA, 15 bp, Homo sapiens
cttcctgataatgtt

SEQ ID NO: 1720011 - DNA, 15 bp, Homo sapiens
ttcctgataatgttc

SEQ ID NO: 1720012 - DNA, 15 bp, Homo sapiens
tcctgataatgttca

SEQ ID NO: 1720013 - DNA, 15 bp, Homo sapiens
cctgataatgttcat

SEQ ID NO: 1720014 - DNA, 15 bp, Homo sapiens
ctgataatgttcata

SEQ ID NO: 1720015 - DNA, 15 bp, Homo sapiens
tgataatgttcataa

SEQ ID NO: 1720016 - DNA, 15 bp, Homo sapiens
gataatgttcataaa

SEQ ID NO: 1720017 - DNA, 15 bp, Homo sapiens
ataatgttcataaag

SEQ ID NO: 1720018 - DNA, 15 bp, Homo sapiens
taatgttcataaagc

SEQ ID NO: 1720019 - DNA, 15 bp, Homo sapiens
aatgttcataaagca

SEQ ID NO: 1720020 - DNA, 15 bp, Homo sapiens
atgttcataaagcat

SEQ ID NO: 1720021 - DNA, 15 bp, Homo sapiens
tgttcataaagcatt

SEQ ID NO: 1720022 - DNA, 15 bp, Homo sapiens
gttcataaagcattt

SEQ ID NO: 1720023 - DNA, 15 bp, Homo sapiens
ttcataaagcatttt

SEQ ID NO: 1720024 - DNA, 15 bp, Homo sapiens
tcataaagcattttg

SEQ ID NO: 1720025 - DNA, 15 bp, Homo sapiens
cataaagcattttgc

SEQ ID NO: 1720026 - DNA, 15 bp, Homo sapiens
ataaagcattttgcc

SEQ ID NO: 1720027 - DNA, 15 bp, Homo sapiens
taaagcattttgcct

SEQ ID NO: 1720028 - DNA, 15 bp, Homo sapiens
aaagcattttgcctt

SEQ ID NO: 1720029 - DNA, 15 bp, Homo sapiens
aagcattttgccttc

SEQ ID NO: 1720030 - DNA, 15 bp, Homo sapiens
agcattttgccttca

SEQ ID NO: 1720031 - DNA, 15 bp, Homo sapiens
gcattttgccttcat

SEQ ID NO: 1720032 - DNA, 15 bp, Homo sapiens
cattttgccttcatg

SEQ ID NO: 1720033 - DNA, 15 bp, Homo sapiens
attttgccttcatgg

SEQ ID NO: 1720034 - DNA, 15 bp, Homo sapiens
ttttgccttcatggt

SEQ ID NO: 1720035 - DNA, 15 bp, Homo sapiens
tttgccttcatggtt

SEQ ID NO: 1720036 - DNA, 15 bp, Homo sapiens
ttgccttcatggttt

SEQ ID NO: 1720037 - DNA, 15 bp, Homo sapiens
tgccttcatggtttt

SEQ ID NO: 1720038 - DNA, 15 bp, Homo sapiens
gccttcatggtttta

SEQ ID NO: 1720039 - DNA, 15 bp, Homo sapiens
ccttcatggttttag

SEQ ID NO: 1720040 - DNA, 15 bp, Homo sapiens
cttcatggttttagc

SEQ ID NO: 1720041 - DNA, 15 bp, Homo sapiens
ttcatggttttagca

SEQ ID NO: 1720042 - DNA, 15 bp, Homo sapiens
tcatggttttagcat

SEQ ID NO: 1720043 - DNA, 15 bp, Homo sapiens
catggttttagcatg

SEQ ID NO: 1720044 - DNA, 15 bp, Homo sapiens
atggttttagcatgt

SEQ ID NO: 1720045 - DNA, 15 bp, Homo sapiens
tggttttagcatgtt

SEQ ID NO: 1720046 - DNA, 15 bp, Homo sapiens
ggttttagcatgtta

SEQ ID NO: 1720047 - DNA, 15 bp, Homo sapiens
gttttagcatgttac

SEQ ID NO: 1720048 - DNA, 15 bp, Homo sapiens
ttttagcatgttact

SEQ ID NO: 1720049 - DNA, 15 bp, Homo sapiens
tttagcatgttactg

SEQ ID NO: 1720050 - DNA, 15 bp, Homo sapiens
ttagcatgttactgc

SEQ ID NO: 1720051 - DNA, 15 bp, Homo sapiens
tagcatgttactgca

SEQ ID NO: 1720052 - DNA, 15 bp, Homo sapiens
agcatgttactgcaa

SEQ ID NO: 1720053 - DNA, 15 bp, Homo sapiens
gcatgttactgcaaa

SEQ ID NO: 1720054 - DNA, 15 bp, Homo sapiens
catgttactgcaaaa

SEQ ID NO: 1720055 - DNA, 15 bp, Homo sapiens
atgttactgcaaaat

SEQ ID NO: 1720056 - DNA, 15 bp, Homo sapiens
tgttactgcaaaata

SEQ ID NO: 1720057 - DNA, 15 bp, Homo sapiens
gttactgcaaaatag

SEQ ID NO: 1720058 - DNA, 15 bp, Homo sapiens
ttactgcaaaatagt

SEQ ID NO: 1720059 - DNA, 15 bp, Homo sapiens
tactgcaaaatagtt

SEQ ID NO: 1720060 - DNA, 15 bp, Homo sapiens
actgcaaaatagttt

SEQ ID NO: 1720061 - DNA, 15 bp, Homo sapiens
ctgcaaaatagtttg

SEQ ID NO: 1720062 - DNA, 15 bp, Homo sapiens
tgcaaaatagtttgg

SEQ ID NO: 1720063 - DNA, 15 bp, Homo sapiens
gcaaaatagtttggc

SEQ ID NO: 1720064 - DNA, 15 bp, Homo sapiens
caaaatagtttggca

SEQ ID NO: 1720065 - DNA, 15 bp, Homo sapiens
aaaatagtttggcag

SEQ ID NO: 1720066 - DNA, 15 bp, Homo sapiens
aaatagtttggcagg

SEQ ID NO: 1720067 - DNA, 15 bp, Homo sapiens
aatagtttggcaggc

SEQ ID NO: 1720068 - DNA, 15 bp, Homo sapiens
atagtttggcaggct

SEQ ID NO: 1720069 - DNA, 15 bp, Homo sapiens
tagtttggcaggctg

SEQ ID NO: 1720070 - DNA, 15 bp, Homo sapiens
agtttggcaggctgc

SEQ ID NO: 1720071 - DNA, 15 bp, Homo sapiens
gtttggcaggctgca

SEQ ID NO: 1720072 - DNA, 15 bp, Homo sapiens
tttggcaggctgcag

SEQ ID NO: 1720073 - DNA, 15 bp, Homo sapiens
ttggcaggctgcagg

SEQ ID NO: 1720074 - DNA, 15 bp, Homo sapiens
tggcaggctgcaggg

SEQ ID NO: 1720075 - DNA, 15 bp, Homo sapiens
ggcaggctgcaggga

SEQ ID NO: 1720076 - DNA, 15 bp, Homo sapiens
gcaggctgcagggag

SEQ ID NO: 1720077 - DNA, 15 bp, Homo sapiens
caggctgcagggaga

SEQ ID NO: 1720078 - DNA, 15 bp, Homo sapiens
aggctgcagggagag

SEQ ID NO: 1720079 - DNA, 15 bp, Homo sapiens
ggctgcagggagaga

SEQ ID NO: 1720080 - DNA, 15 bp, Homo sapiens
gctgcagggagagat

SEQ ID NO: 1720081 - DNA, 15 bp, Homo sapiens
ctgcagggagagatg

SEQ ID NO: 1720082 - DNA, 15 bp, Homo sapiens
tgcagggagagatgc

SEQ ID NO: 1720083 - DNA, 15 bp, Homo sapiens
gcagggagagatgca

SEQ ID NO: 1720084 - DNA, 15 bp, Homo sapiens
cagggagagatgcag

SEQ ID NO: 1720085 - DNA, 15 bp, Homo sapiens
agggagagatgcagc

SEQ ID NO: 1720086 - DNA, 15 bp, Homo sapiens
gggagagatgcagct

SEQ ID NO: 1720087 - DNA, 15 bp, Homo sapiens
ggagagatgcagctg

SEQ ID NO: 1720088 - DNA, 15 bp, Homo sapiens
gagagatgcagctga

SEQ ID NO: 1720089 - DNA, 15 bp, Homo sapiens
agagatgcagctgag

SEQ ID NO: 1720090 - DNA, 15 bp, Homo sapiens
gagatgcagctgagt

SEQ ID NO: 1720091 - DNA, 15 bp, Homo sapiens
agatgcagctgagtg

SEQ ID NO: 1720092 - DNA, 15 bp, Homo sapiens
gatgcagctgagtgt

SEQ ID NO: 1720093 - DNA, 15 bp, Homo sapiens
atgcagctgagtgtt

SEQ ID NO: 1720094 - DNA, 15 bp, Homo sapiens
tgcagctgagtgttg

SEQ ID NO: 1720095 - DNA, 15 bp, Homo sapiens
gcagctgagtgttgc

SEQ ID NO: 1720096 - DNA, 15 bp, Homo sapiens
cagctgagtgttgca

SEQ ID NO: 1720097 - DNA, 15 bp, Homo sapiens
agctgagtgttgcat

SEQ ID NO: 1720098 - DNA, 15 bp, Homo sapiens
gctgagtgttgcatt

SEQ ID NO: 1720099 - DNA, 15 bp, Homo sapiens
ctgagtgttgcattc

SEQ ID NO: 1720100 - DNA, 15 bp, Homo sapiens
tgagtgttgcattca

SEQ ID NO: 1720101 - DNA, 15 bp, Homo sapiens
gagtgttgcattcat

SEQ ID NO: 1720102 - DNA, 15 bp, Homo sapiens
agtgttgcattcatt

SEQ ID NO: 1720103 - DNA, 15 bp, Homo sapiens
gtgttgcattcattg

SEQ ID NO: 1720104 - DNA, 15 bp, Homo sapiens
tgttgcattcattgt

SEQ ID NO: 1720105 - DNA, 15 bp, Homo sapiens
gttgcattcattgtt

SEQ ID NO: 1720106 - DNA, 15 bp, Homo sapiens
ttgcattcattgtta

SEQ ID NO: 1720107 - DNA, 15 bp, Homo sapiens
tgcattcattgttat

SEQ ID NO: 1720108 - DNA, 15 bp, Homo sapiens
gcattcattgttatg

SEQ ID NO: 1720109 - DNA, 15 bp, Homo sapiens
cattcattgttatgt

SEQ ID NO: 1720110 - DNA, 15 bp, Homo sapiens
attcattgttatgta

SEQ ID NO: 1720111 - DNA, 15 bp, Homo sapiens
ttcattgttatgtag

SEQ ID NO: 1720112 - DNA, 15 bp, Homo sapiens
tcattgttatgtagg

SEQ ID NO: 1720113 - DNA, 15 bp, Homo sapiens
cattgttatgtaggt

SEQ ID NO: 1720114 - DNA, 15 bp, Homo sapiens
attgttatgtaggtg

SEQ ID NO: 1720115 - DNA, 15 bp, Homo sapiens
ttgttatgtaggtga

SEQ ID NO: 1720116 - DNA, 15 bp, Homo sapiens
tgttatgtaggtgat

SEQ ID NO: 1720117 - DNA, 15 bp, Homo sapiens
gttatgtaggtgata

SEQ ID NO: 1720118 - DNA, 15 bp, Homo sapiens
ttatgtaggtgataa

SEQ ID NO: 1720119 - DNA, 15 bp, Homo sapiens
tatgtaggtgataag

SEQ ID NO: 1720120 - DNA, 15 bp, Homo sapiens
atgtaggtgataagt

SEQ ID NO: 1720121 - DNA, 15 bp, Homo sapiens
tgtaggtgataagtc

SEQ ID NO: 1720122 - DNA, 15 bp, Homo sapiens
gtaggtgataagtca

SEQ ID NO: 1720123 - DNA, 15 bp, Homo sapiens
taggtgataagtcac

SEQ ID NO: 1720124 - DNA, 15 bp, Homo sapiens
aggtgataagtcact

SEQ ID NO: 1720125 - DNA, 15 bp, Homo sapiens
ggtgataagtcacta

SEQ ID NO: 1720126 - DNA, 15 bp, Homo sapiens
gtgataagtcactat

SEQ ID NO: 1720127 - DNA, 15 bp, Homo sapiens
tgataagtcactatg

SEQ ID NO: 1720128 - DNA, 15 bp, Homo sapiens
gataagtcactatgg

SEQ ID NO: 1720129 - DNA, 15 bp, Homo sapiens
ataagtcactatggc

SEQ ID NO: 1720130 - DNA, 15 bp, Homo sapiens
taagtcactatggca

SEQ ID NO: 1720131 - DNA, 15 bp, Homo sapiens
aagtcactatggcag

SEQ ID NO: 1720132 - DNA, 15 bp, Homo sapiens
agtcactatggcagg

SEQ ID NO: 1720133 - DNA, 15 bp, Homo sapiens
gtcactatggcaggt

SEQ ID NO: 1720134 - DNA, 15 bp, Homo sapiens
tcactatggcaggtg

SEQ ID NO: 1720135 - DNA, 15 bp, Homo sapiens
cactatggcaggtgt

SEQ ID NO: 1720136 - DNA, 15 bp, Homo sapiens
actatggcaggtgtt

SEQ ID NO: 1720137 - DNA, 15 bp, Homo sapiens
ctatggcaggtgttg

SEQ ID NO: 1720138 - DNA, 15 bp, Homo sapiens
tatggcaggtgttgt

SEQ ID NO: 1720139 - DNA, 15 bp, Homo sapiens
atggcaggtgttgtc

SEQ ID NO: 1720140 - DNA, 15 bp, Homo sapiens
tggcaggtgttgtct

SEQ ID NO: 1720141 - DNA, 15 bp, Homo sapiens
ggcaggtgttgtctc

SEQ ID NO: 1720142 - DNA, 15 bp, Homo sapiens
gcaggtgttgtctct

SEQ ID NO: 1720143 - DNA, 15 bp, Homo sapiens
caggtgttgtctctc

SEQ ID NO: 1720144 - DNA, 15 bp, Homo sapiens
aggtgttgtctctct

SEQ ID NO: 1720145 - DNA, 15 bp, Homo sapiens
ggtgttgtctctctt

SEQ ID NO: 1720146 - DNA, 15 bp, Homo sapiens
gtgttgtctctcttg

SEQ ID NO: 1720147 - DNA, 15 bp, Homo sapiens
tgttgtctctcttga

SEQ ID NO: 1720148 - DNA, 15 bp, Homo sapiens
gttgtctctcttgac

SEQ ID NO: 1720149 - DNA, 15 bp, Homo sapiens
ttgtctctcttgaca

SEQ ID NO: 1720150 - DNA, 15 bp, Homo sapiens
tgtctctcttgacac

SEQ ID NO: 1720151 - DNA, 15 bp, Homo sapiens
gtctctcttgacacc

SEQ ID NO: 1720152 - DNA, 15 bp, Homo sapiens
tctctcttgacaccc

SEQ ID NO: 1720153 - DNA, 15 bp, Homo sapiens
ctctcttgacaccca

SEQ ID NO: 1720154 - DNA, 15 bp, Homo sapiens
tctcttgacacccaa

SEQ ID NO: 1720155 - DNA, 15 bp, Homo sapiens
ctcttgacacccaat

SEQ ID NO: 1720156 - DNA, 15 bp, Homo sapiens
tcttgacacccaatc

SEQ ID NO: 1720157 - DNA, 15 bp, Homo sapiens
cttgacacccaatcc

SEQ ID NO: 1720158 - DNA, 15 bp, Homo sapiens
ttgacacccaatccg

SEQ ID NO: 1720159 - DNA, 15 bp, Homo sapiens
tgacacccaatccga

SEQ ID NO: 1720160 - DNA, 15 bp, Homo sapiens
gacacccaatccgac

SEQ ID NO: 1720161 - DNA, 15 bp, Homo sapiens
acacccaatccgaca

SEQ ID NO: 1720162 - DNA, 15 bp, Homo sapiens
cacccaatccgacac

SEQ ID NO: 1720163 - DNA, 15 bp, Homo sapiens
acccaatccgacacg

SEQ ID NO: 1720164 - DNA, 15 bp, Homo sapiens
cccaatccgacacgc

SEQ ID NO: 1720165 - DNA, 15 bp, Homo sapiens
ccaatccgacacgct

SEQ ID NO: 1720166 - DNA, 15 bp, Homo sapiens
caatccgacacgctt

SEQ ID NO: 1720167 - DNA, 15 bp, Homo sapiens
aatccgacacgcttt

SEQ ID NO: 1720168 - DNA, 15 bp, Homo sapiens
atccgacacgctttt

SEQ ID NO: 1720169 - DNA, 15 bp, Homo sapiens
tccgacacgcttttc

SEQ ID NO: 1720170 - DNA, 15 bp, Homo sapiens
ccgacacgcttttct

SEQ ID NO: 1720171 - DNA, 15 bp, Homo sapiens
cgacacgcttttctt

SEQ ID NO: 1720172 - DNA, 15 bp, Homo sapiens
gacacgcttttcttt

SEQ ID NO: 1720173 - DNA, 15 bp, Homo sapiens
acacgcttttctttt

SEQ ID NO: 1720174 - DNA, 15 bp, Homo sapiens
cacgcttttcttttg

SEQ ID NO: 1720175 - DNA, 15 bp, Homo sapiens
acgcttttcttttgc

SEQ ID NO: 1720176 - DNA, 15 bp, Homo sapiens
cgcttttcttttgct

SEQ ID NO: 1720177 - DNA, 15 bp, Homo sapiens
gcttttcttttgctt

SEQ ID NO: 1720178 - DNA, 15 bp, Homo sapiens
cttttcttttgcttt

SEQ ID NO: 1720179 - DNA, 15 bp, Homo sapiens
ttttcttttgctttc

SEQ ID NO: 1720180 - DNA, 15 bp, Homo sapiens
tttcttttgctttcc

SEQ ID NO: 1720181 - DNA, 15 bp, Homo sapiens
ttcttttgctttcct

SEQ ID NO: 1720182 - DNA, 15 bp, Homo sapiens
tcttttgctttcctc

SEQ ID NO: 1720183 - DNA, 15 bp, Homo sapiens
cttttgctttcctct

SEQ ID NO: 1720184 - DNA, 15 bp, Homo sapiens
ttttgctttcctcta

SEQ ID NO: 1720185 - DNA, 15 bp, Homo sapiens
tttgctttcctctat

SEQ ID NO: 1720186 - DNA, 15 bp, Homo sapiens
ttgctttcctctatt

SEQ ID NO: 1720187 - DNA, 15 bp, Homo sapiens
tgctttcctctatta

SEQ ID NO: 1720188 - DNA, 15 bp, Homo sapiens
gctttcctctattac

SEQ ID NO: 1720189 - DNA, 15 bp, Homo sapiens
ctttcctctattaca

SEQ ID NO: 1720190 - DNA, 15 bp, Homo sapiens
tttcctctattacag

SEQ ID NO: 1720191 - DNA, 15 bp, Homo sapiens
ttcctctattacaga

SEQ ID NO: 1720192 - DNA, 15 bp, Homo sapiens
tcctctattacagag

SEQ ID NO: 1720193 - DNA, 15 bp, Homo sapiens
cctctattacagagg

SEQ ID NO: 1720194 - DNA, 15 bp, Homo sapiens
ctctattacagaggc

SEQ ID NO: 1720195 - DNA, 15 bp, Homo sapiens
tctattacagaggct

SEQ ID NO: 1720196 - DNA, 15 bp, Homo sapiens
ctattacagaggctg

SEQ ID NO: 1720197 - DNA, 15 bp, Homo sapiens
tattacagaggctgg

SEQ ID NO: 1720198 - DNA, 15 bp, Homo sapiens
attacagaggctgga

SEQ ID NO: 1720199 - DNA, 15 bp, Homo sapiens
ttacagaggctggaa

SEQ ID NO: 1720200 - DNA, 15 bp, Homo sapiens
tacagaggctggaaa

SEQ ID NO: 1720201 - DNA, 15 bp, Homo sapiens
acagaggctggaaag

SEQ ID NO: 1720202 - DNA, 15 bp, Homo sapiens
cagaggctggaaagc

SEQ ID NO: 1720203 - DNA, 15 bp, Homo sapiens
agaggctggaaagca

SEQ ID NO: 1720204 - DNA, 15 bp, Homo sapiens
gaggctggaaagcaa

SEQ ID NO: 1720205 - DNA, 15 bp, Homo sapiens
aggctggaaagcaaa

SEQ ID NO: 1720206 - DNA, 15 bp, Homo sapiens
ggctggaaagcaaaa

SEQ ID NO: 1720207 - DNA, 15 bp, Homo sapiens
gctggaaagcaaaat

SEQ ID NO: 1720208 - DNA, 15 bp, Homo sapiens
ctggaaagcaaaata

SEQ ID NO: 1720209 - DNA, 15 bp, Homo sapiens
tggaaagcaaaatat

SEQ ID NO: 1720210 - DNA, 15 bp, Homo sapiens
ggaaagcaaaatatt

SEQ ID NO: 1720211 - DNA, 15 bp, Homo sapiens
gaaagcaaaatattt

SEQ ID NO: 1720212 - DNA, 15 bp, Homo sapiens
aaagcaaaatattta

SEQ ID NO: 1720213 - DNA, 15 bp, Homo sapiens
aagcaaaatatttac

SEQ ID NO: 1720214 - DNA, 15 bp, Homo sapiens
agcaaaatatttacc

SEQ ID NO: 1720215 - DNA, 15 bp, Homo sapiens
gcaaaatatttacct

SEQ ID NO: 1720216 - DNA, 15 bp, Homo sapiens
caaaatatttacctt

SEQ ID NO: 1720217 - DNA, 15 bp, Homo sapiens
aaaatatttaccttc

SEQ ID NO: 1720218 - DNA, 15 bp, Homo sapiens
aaatatttaccttcc

SEQ ID NO: 1720219 - DNA, 15 bp, Homo sapiens
aatatttaccttcct

SEQ ID NO: 1720220 - DNA, 15 bp, Homo sapiens
atatttaccttccta

SEQ ID NO: 1720221 - DNA, 15 bp, Homo sapiens
tatttaccttcctag

SEQ ID NO: 1720222 - DNA, 15 bp, Homo sapiens
atttaccttcctaga

SEQ ID NO: 1720223 - DNA, 15 bp, Homo sapiens
tttaccttcctagac

SEQ ID NO: 1720224 - DNA, 15 bp, Homo sapiens
ttaccttcctagact

SEQ ID NO: 1720225 - DNA, 15 bp, Homo sapiens
taccttcctagactc

SEQ ID NO: 1720226 - DNA, 15 bp, Homo sapiens
accttcctagactcc

SEQ ID NO: 1720227 - DNA, 15 bp, Homo sapiens
ccttcctagactccc

SEQ ID NO: 1720228 - DNA, 15 bp, Homo sapiens
cttcctagactccct

SEQ ID NO: 1720229 - DNA, 15 bp, Homo sapiens
ttcctagactccctt

SEQ ID NO: 1720230 - DNA, 15 bp, Homo sapiens
tcctagactcccttg

SEQ ID NO: 1720231 - DNA, 15 bp, Homo sapiens
cctagactcccttgc

SEQ ID NO: 1720232 - DNA, 15 bp, Homo sapiens
ctagactcccttgca

SEQ ID NO: 1720233 - DNA, 15 bp, Homo sapiens
tagactcccttgcag

SEQ ID NO: 1720234 - DNA, 15 bp, Homo sapiens
agactcccttgcagc

SEQ ID NO: 1720235 - DNA, 15 bp, Homo sapiens
gactcccttgcagct

SEQ ID NO: 1720236 - DNA, 15 bp, Homo sapiens
actcccttgcagcta

SEQ ID NO: 1720237 - DNA, 15 bp, Homo sapiens
ctcccttgcagctag

SEQ ID NO: 1720238 - DNA, 15 bp, Homo sapiens
tcccttgcagctaga

SEQ ID NO: 1720239 - DNA, 15 bp, Homo sapiens
cccttgcagctagat

SEQ ID NO: 1720240 - DNA, 15 bp, Homo sapiens
ccttgcagctagatg

SEQ ID NO: 1720241 - DNA, 15 bp, Homo sapiens
cttgcagctagatga

SEQ ID NO: 1720242 - DNA, 15 bp, Homo sapiens
ttgcagctagatgaa

SEQ ID NO: 1720243 - DNA, 15 bp, Homo sapiens
tgcagctagatgaag

SEQ ID NO: 1720244 - DNA, 15 bp, Homo sapiens
gcagctagatgaagg

SEQ ID NO: 1720245 - DNA, 15 bp, Homo sapiens
cagctagatgaaggc

SEQ ID NO: 1720246 - DNA, 15 bp, Homo sapiens
agctagatgaaggcc

SEQ ID NO: 1720247 - DNA, 15 bp, Homo sapiens
gctagatgaaggcca

SEQ ID NO: 1720248 - DNA, 15 bp, Homo sapiens
ctagatgaaggccag

SEQ ID NO: 1720249 - DNA, 15 bp, Homo sapiens
tagatgaaggccagg

SEQ ID NO: 1720250 - DNA, 15 bp, Homo sapiens
agatgaaggccaggt

SEQ ID NO: 1720251 - DNA, 15 bp, Homo sapiens
gatgaaggccaggtg

SEQ ID NO: 1720252 - DNA, 15 bp, Homo sapiens
atgaaggccaggtga

SEQ ID NO: 1720253 - DNA, 15 bp, Homo sapiens
tgaaggccaggtgac

SEQ ID NO: 1720254 - DNA, 15 bp, Homo sapiens
gaaggccaggtgaca

SEQ ID NO: 1720255 - DNA, 15 bp, Homo sapiens
aaggccaggtgacat

SEQ ID NO: 1720256 - DNA, 15 bp, Homo sapiens
aggccaggtgacatt

SEQ ID NO: 1720257 - DNA, 15 bp, Homo sapiens
ggccaggtgacattg

SEQ ID NO: 1720258 - DNA, 15 bp, Homo sapiens
gccaggtgacattgt

SEQ ID NO: 1720259 - DNA, 15 bp, Homo sapiens
ccaggtgacattgtc

SEQ ID NO: 1720260 - DNA, 15 bp, Homo sapiens
caggtgacattgtct

SEQ ID NO: 1720261 - DNA, 15 bp, Homo sapiens
aggtgacattgtctt

SEQ ID NO: 1720262 - DNA, 15 bp, Homo sapiens
ggtgacattgtcttg

SEQ ID NO: 1720263 - DNA, 15 bp, Homo sapiens
gtgacattgtcttgt

SEQ ID NO: 1720264 - DNA, 15 bp, Homo sapiens
tgacattgtcttgtc

SEQ ID NO: 1720265 - DNA, 15 bp, Homo sapiens
gacattgtcttgtca

SEQ ID NO: 1720266 - DNA, 15 bp, Homo sapiens
acattgtcttgtcaa

SEQ ID NO: 1720267 - DNA, 15 bp, Homo sapiens
cattgtcttgtcaat

SEQ ID NO: 1720268 - DNA, 15 bp, Homo sapiens
attgtcttgtcaatg

SEQ ID NO: 1720269 - DNA, 15 bp, Homo sapiens
ttgtcttgtcaatga

SEQ ID NO: 1720270 - DNA, 15 bp, Homo sapiens
tgtcttgtcaatgaa

SEQ ID NO: 1720271 - DNA, 15 bp, Homo sapiens
gtcttgtcaatgaaa

SEQ ID NO: 1720272 - DNA, 15 bp, Homo sapiens
tcttgtcaatgaaat

SEQ ID NO: 1720273 - DNA, 15 bp, Homo sapiens
cttgtcaatgaaata

SEQ ID NO: 1720274 - DNA, 15 bp, Homo sapiens
ttgtcaatgaaatat

SEQ ID NO: 1720275 - DNA, 15 bp, Homo sapiens
tgtcaatgaaatata

SEQ ID NO: 1720276 - DNA, 15 bp, Homo sapiens
gtcaatgaaatatag

SEQ ID NO: 1720277 - DNA, 15 bp, Homo sapiens
tcaatgaaatatagg

SEQ ID NO: 1720278 - DNA, 15 bp, Homo sapiens
caatgaaatataggc

SEQ ID NO: 1720279 - DNA, 15 bp, Homo sapiens
aatgaaatataggca

SEQ ID NO: 1720280 - DNA, 15 bp, Homo sapiens
atgaaatataggcac

SEQ ID NO: 1720281 - DNA, 15 bp, Homo sapiens
tgaaatataggcaca

SEQ ID NO: 1720282 - DNA, 15 bp, Homo sapiens
gaaatataggcacaa

SEQ ID NO: 1720283 - DNA, 15 bp, Homo sapiens
aaatataggcacaag

SEQ ID NO: 1720284 - DNA, 15 bp, Homo sapiens
aatataggcacaagg

SEQ ID NO: 1720285 - DNA, 15 bp, Homo sapiens
atataggcacaaggc

SEQ ID NO: 1720286 - DNA, 15 bp, Homo sapiens
tataggcacaaggcc

SEQ ID NO: 1720287 - DNA, 15 bp, Homo sapiens
ataggcacaaggccc

SEQ ID NO: 1720288 - DNA, 15 bp, Homo sapiens
taggcacaaggccct

SEQ ID NO: 1720289 - DNA, 15 bp, Homo sapiens
aggcacaaggcccta

SEQ ID NO: 1720290 - DNA, 15 bp, Homo sapiens
ggcacaaggccctat

SEQ ID NO: 1720291 - DNA, 15 bp, Homo sapiens
gcacaaggccctatg

SEQ ID NO: 1720292 - DNA, 15 bp, Homo sapiens
cacaaggccctatgc

SEQ ID NO: 1720293 - DNA, 15 bp, Homo sapiens
acaaggccctatgca

SEQ ID NO: 1720294 - DNA, 15 bp, Homo sapiens
caaggccctatgcag

SEQ ID NO: 1720295 - DNA, 15 bp, Homo sapiens
aaggccctatgcagg

SEQ ID NO: 1720296 - DNA, 15 bp, Homo sapiens
aggccctatgcaggc

SEQ ID NO: 1720297 - DNA, 15 bp, Homo sapiens
ggccctatgcaggct

SEQ ID NO: 1720298 - DNA, 15 bp, Homo sapiens
gccctatgcaggctg

SEQ ID NO: 1720299 - DNA, 15 bp, Homo sapiens
ccctatgcaggctgt

SEQ ID NO: 1720300 - DNA, 15 bp, Homo sapiens
cctatgcaggctgtc

SEQ ID NO: 1720301 - DNA, 15 bp, Homo sapiens
ctatgcaggctgtcc

SEQ ID NO: 1720302 - DNA, 15 bp, Homo sapiens
tatgcaggctgtccc

SEQ ID NO: 1720303 - DNA, 15 bp, Homo sapiens
atgcaggctgtccct

SEQ ID NO: 1720304 - DNA, 15 bp, Homo sapiens
tgcaggctgtccctt

SEQ ID NO: 1720305 - DNA, 15 bp, Homo sapiens
gcaggctgtcccttt

SEQ ID NO: 1720306 - DNA, 15 bp, Homo sapiens
caggctgtccctttc

SEQ ID NO: 1720307 - DNA, 15 bp, Homo sapiens
aggctgtccctttct

SEQ ID NO: 1720308 - DNA, 15 bp, Homo sapiens
ggctgtccctttctg

SEQ ID NO: 1720309 - DNA, 15 bp, Homo sapiens
gctgtccctttctga

SEQ ID NO: 1720310 - DNA, 15 bp, Homo sapiens
ctgtccctttctgaa

SEQ ID NO: 1720311 - DNA, 15 bp, Homo sapiens
tgtccctttctgaat

SEQ ID NO: 1720312 - DNA, 15 bp, Homo sapiens
gtccctttctgaata

SEQ ID NO: 1720313 - DNA, 15 bp, Homo sapiens
tccctttctgaataa

SEQ ID NO: 1720314 - DNA, 15 bp, Homo sapiens
ccctttctgaataaa

SEQ ID NO: 1720315 - DNA, 15 bp, Homo sapiens
cctttctgaataaag

SEQ ID NO: 1720316 - DNA, 15 bp, Homo sapiens
ctttctgaataaagc

SEQ ID NO: 1720317 - DNA, 15 bp, Homo sapiens
tttctgaataaagcc

SEQ ID NO: 1720318 - DNA, 15 bp, Homo sapiens
ttctgaataaagcct

SEQ ID NO: 1720319 - DNA, 15 bp, Homo sapiens
tctgaataaagcctg

SEQ ID NO: 1720320 - DNA, 15 bp, Homo sapiens
ctgaataaagcctgg

SEQ ID NO: 1720321 - DNA, 15 bp, Homo sapiens
tgaataaagcctggg

SEQ ID NO: 1720322 - DNA, 15 bp, Homo sapiens
gaataaagcctgggt

SEQ ID NO: 1720323 - DNA, 15 bp, Homo sapiens
aataaagcctgggta

SEQ ID NO: 1720324 - DNA, 15 bp, Homo sapiens
ataaagcctgggtaa

SEQ ID NO: 1720325 - DNA, 15 bp, Homo sapiens
taaagcctgggtaaa

SEQ ID NO: 1720326 - DNA, 15 bp, Homo sapiens
aaagcctgggtaaaa

SEQ ID NO: 1720327 - DNA, 15 bp, Homo sapiens
aagcctgggtaaaag

SEQ ID NO: 1720328 - DNA, 15 bp, Homo sapiens
agcctgggtaaaaga

SEQ ID NO: 1720329 - DNA, 15 bp, Homo sapiens
gcctgggtaaaagaa

SEQ ID NO: 1720330 - DNA, 15 bp, Homo sapiens
cctgggtaaaagaaa

SEQ ID NO: 1720331 - DNA, 15 bp, Homo sapiens
ctgggtaaaagaaaa

SEQ ID NO: 1720332 - DNA, 15 bp, Homo sapiens
tgggtaaaagaaaac

SEQ ID NO: 1720333 - DNA, 15 bp, Homo sapiens
gggtaaaagaaaacc

SEQ ID NO: 1720334 - DNA, 15 bp, Homo sapiens
ggtaaaagaaaacct

SEQ ID NO: 1720335 - DNA, 15 bp, Homo sapiens
gtaaaagaaaacctg

SEQ ID NO: 1720336 - DNA, 15 bp, Homo sapiens
taaaagaaaacctga

SEQ ID NO: 1720337 - DNA, 15 bp, Homo sapiens
aaaagaaaacctgag

SEQ ID NO: 1720338 - DNA, 15 bp, Homo sapiens
aaagaaaacctgagt

SEQ ID NO: 1720339 - DNA, 15 bp, Homo sapiens
aagaaaacctgagtc

SEQ ID NO: 1720340 - DNA, 15 bp, Homo sapiens
agaaaacctgagtct

SEQ ID NO: 1720341 - DNA, 15 bp, Homo sapiens
gaaaacctgagtctc

SEQ ID NO: 1720342 - DNA, 15 bp, Homo sapiens
aaaacctgagtctct

SEQ ID NO: 1720343 - DNA, 15 bp, Homo sapiens
aaacctgagtctctt

SEQ ID NO: 1720344 - DNA, 15 bp, Homo sapiens
aacctgagtctcttc

SEQ ID NO: 1720345 - DNA, 15 bp, Homo sapiens
acctgagtctcttcc

SEQ ID NO: 1720346 - DNA, 15 bp, Homo sapiens
cctgagtctcttccc

SEQ ID NO: 1720347 - DNA, 15 bp, Homo sapiens
ctgagtctcttcccc

SEQ ID NO: 1720348 - DNA, 15 bp, Homo sapiens
tgagtctcttccccc

SEQ ID NO: 1720349 - DNA, 15 bp, Homo sapiens
gagtctcttccccct

SEQ ID NO: 1720350 - DNA, 15 bp, Homo sapiens
agtctcttccccctt

SEQ ID NO: 1720351 - DNA, 15 bp, Homo sapiens
gtctcttcccccttt

SEQ ID NO: 1720352 - DNA, 15 bp, Homo sapiens
tctcttccccctttc

SEQ ID NO: 1720353 - DNA, 15 bp, Homo sapiens
ctcttccccctttct

SEQ ID NO: 1720354 - DNA, 15 bp, Homo sapiens
tcttccccctttctt

SEQ ID NO: 1720355 - DNA, 15 bp, Homo sapiens
cttccccctttcttc

SEQ ID NO: 1720356 - DNA, 15 bp, Homo sapiens
ttccccctttcttct

SEQ ID NO: 1720357 - DNA, 15 bp, Homo sapiens
tccccctttcttctt

SEQ ID NO: 1720358 - DNA, 15 bp, Homo sapiens
ccccctttcttcttt

SEQ ID NO: 1720359 - DNA, 15 bp, Homo sapiens
cccctttcttctttc

SEQ ID NO: 1720360 - DNA, 15 bp, Homo sapiens
ccctttcttctttcc

SEQ ID NO: 1720361 - DNA, 15 bp, Homo sapiens
cctttcttctttcct

SEQ ID NO: 1720362 - DNA, 15 bp, Homo sapiens
ctttcttctttcctg

SEQ ID NO: 1720363 - DNA, 15 bp, Homo sapiens
tttcttctttcctga

SEQ ID NO: 1720364 - DNA, 15 bp, Homo sapiens
ttcttctttcctgaa

SEQ ID NO: 1720365 - DNA, 15 bp, Homo sapiens
tcttctttcctgaat

SEQ ID NO: 1720366 - DNA, 15 bp, Homo sapiens
cttctttcctgaatg

SEQ ID NO: 1720367 - DNA, 15 bp, Homo sapiens
ttctttcctgaatgc

SEQ ID NO: 1720368 - DNA, 15 bp, Homo sapiens
tctttcctgaatgca

SEQ ID NO: 1720369 - DNA, 15 bp, Homo sapiens
ctttcctgaatgcac

SEQ ID NO: 1720370 - DNA, 15 bp, Homo sapiens
tttcctgaatgcaca

SEQ ID NO: 1720371 - DNA, 15 bp, Homo sapiens
ttcctgaatgcacag

SEQ ID NO: 1720372 - DNA, 15 bp, Homo sapiens
tcctgaatgcacagc

SEQ ID NO: 1720373 - DNA, 15 bp, Homo sapiens
cctgaatgcacagca

SEQ ID NO: 1720374 - DNA, 15 bp, Homo sapiens
ctgaatgcacagcag

SEQ ID NO: 1720375 - DNA, 15 bp, Homo sapiens
tgaatgcacagcagc

SEQ ID NO: 1720376 - DNA, 15 bp, Homo sapiens
gaatgcacagcagcc

SEQ ID NO: 1720377 - DNA, 15 bp, Homo sapiens
aatgcacagcagcca

SEQ ID NO: 1720378 - DNA, 15 bp, Homo sapiens
atgcacagcagccat

SEQ ID NO: 1720379 - DNA, 15 bp, Homo sapiens
tgcacagcagccatg

SEQ ID NO: 1720380 - DNA, 15 bp, Homo sapiens
gcacagcagccatgc

SEQ ID NO: 1720381 - DNA, 15 bp, Homo sapiens
cacagcagccatgct

SEQ ID NO: 1720382 - DNA, 15 bp, Homo sapiens
acagcagccatgctg

SEQ ID NO: 1720383 - DNA, 15 bp, Homo sapiens
cagcagccatgctgt

SEQ ID NO: 1720384 - DNA, 15 bp, Homo sapiens
agcagccatgctgtg

SEQ ID NO: 1720385 - DNA, 15 bp, Homo sapiens
gcagccatgctgtga

SEQ ID NO: 1720386 - DNA, 15 bp, Homo sapiens
cagccatgctgtgat

SEQ ID NO: 1720387 - DNA, 15 bp, Homo sapiens
agccatgctgtgatc

SEQ ID NO: 1720388 - DNA, 15 bp, Homo sapiens
gccatgctgtgatca

SEQ ID NO: 1720389 - DNA, 15 bp, Homo sapiens
ccatgctgtgatcac

SEQ ID NO: 1720390 - DNA, 15 bp, Homo sapiens
catgctgtgatcact

SEQ ID NO: 1720391 - DNA, 15 bp, Homo sapiens
atgctgtgatcactt

SEQ ID NO: 1720392 - DNA, 15 bp, Homo sapiens
tgctgtgatcacttg

SEQ ID NO: 1720393 - DNA, 15 bp, Homo sapiens
gctgtgatcacttgg

SEQ ID NO: 1720394 - DNA, 15 bp, Homo sapiens
ctgtgatcacttgga

SEQ ID NO: 1720395 - DNA, 15 bp, Homo sapiens
tgtgatcacttggac

SEQ ID NO: 1720396 - DNA, 15 bp, Homo sapiens
gtgatcacttggaca

SEQ ID NO: 1720397 - DNA, 15 bp, Homo sapiens
tgatcacttggacaa

SEQ ID NO: 1720398 - DNA, 15 bp, Homo sapiens
gatcacttggacaaa

SEQ ID NO: 1720399 - DNA, 15 bp, Homo sapiens
atcacttggacaaaa

SEQ ID NO: 1720400 - DNA, 15 bp, Homo sapiens
tcacttggacaaaag

SEQ ID NO: 1720401 - DNA, 15 bp, Homo sapiens
cacttggacaaaagc

SEQ ID NO: 1720402 - DNA, 15 bp, Homo sapiens
acttggacaaaagcc

SEQ ID NO: 1720403 - DNA, 15 bp, Homo sapiens
cttggacaaaagcca

SEQ ID NO: 1720404 - DNA, 15 bp, Homo sapiens
ttggacaaaagccac

SEQ ID NO: 1720405 - DNA, 15 bp, Homo sapiens
tggacaaaagccaca

SEQ ID NO: 1720406 - DNA, 15 bp, Homo sapiens
ggacaaaagccacac

SEQ ID NO: 1720407 - DNA, 15 bp, Homo sapiens
gacaaaagccacaca

SEQ ID NO: 1720408 - DNA, 15 bp, Homo sapiens
acaaaagccacacac

SEQ ID NO: 1720409 - DNA, 15 bp, Homo sapiens
caaaagccacacacc

SEQ ID NO: 1720410 - DNA, 15 bp, Homo sapiens
aaaagccacacacca

SEQ ID NO: 1720411 - DNA, 15 bp, Homo sapiens
aaagccacacaccac

SEQ ID NO: 1720412 - DNA, 15 bp, Homo sapiens
aagccacacaccaca

SEQ ID NO: 1720413 - DNA, 15 bp, Homo sapiens
agccacacaccacag

SEQ ID NO: 1720414 - DNA, 15 bp, Homo sapiens
gccacacaccacaga

SEQ ID NO: 1720415 - DNA, 15 bp, Homo sapiens
ccacacaccacagat

SEQ ID NO: 1720416 - DNA, 15 bp, Homo sapiens
cacacaccacagatg

SEQ ID NO: 1720417 - DNA, 15 bp, Homo sapiens
acacaccacagatgg

SEQ ID NO: 1720418 - DNA, 15 bp, Homo sapiens
cacaccacagatggc

SEQ ID NO: 1720419 - DNA, 15 bp, Homo sapiens
acaccacagatggca

SEQ ID NO: 1720420 - DNA, 15 bp, Homo sapiens
caccacagatggcag

SEQ ID NO: 1720421 - DNA, 15 bp, Homo sapiens
accacagatggcaga

SEQ ID NO: 1720422 - DNA, 15 bp, Homo sapiens
ccacagatggcagag

SEQ ID NO: 1720423 - DNA, 15 bp, Homo sapiens
cacagatggcagagc

SEQ ID NO: 1720424 - DNA, 15 bp, Homo sapiens
acagatggcagagca

SEQ ID NO: 1720425 - DNA, 15 bp, Homo sapiens
cagatggcagagcag

SEQ ID NO: 1720426 - DNA, 15 bp, Homo sapiens
agatggcagagcagg

SEQ ID NO: 1720427 - DNA, 15 bp, Homo sapiens
gatggcagagcagga

SEQ ID NO: 1720428 - DNA, 15 bp, Homo sapiens
atggcagagcaggaa

SEQ ID NO: 1720429 - DNA, 15 bp, Homo sapiens
tggcagagcaggaag

SEQ ID NO: 1720430 - DNA, 15 bp, Homo sapiens
ggcagagcaggaaga

SEQ ID NO: 1720431 - DNA, 15 bp, Homo sapiens
gcagagcaggaagat

SEQ ID NO: 1720432 - DNA, 15 bp, Homo sapiens
cagagcaggaagata

SEQ ID NO: 1720433 - DNA, 15 bp, Homo sapiens
agagcaggaagatat

SEQ ID NO: 1720434 - DNA, 15 bp, Homo sapiens
gagcaggaagatatt

SEQ ID NO: 1720435 - DNA, 15 bp, Homo sapiens
agcaggaagatattc

SEQ ID NO: 1720436 - DNA, 15 bp, Homo sapiens
gcaggaagatattca

SEQ ID NO: 1720437 - DNA, 15 bp, Homo sapiens
caggaagatattcag

SEQ ID NO: 1720438 - DNA, 15 bp, Homo sapiens
aggaagatattcagc

SEQ ID NO: 1720439 - DNA, 15 bp, Homo sapiens
ggaagatattcagcc

SEQ ID NO: 1720440 - DNA, 15 bp, Homo sapiens
gaagatattcagcct

SEQ ID NO: 1720441 - DNA, 15 bp, Homo sapiens
aagatattcagcctg

SEQ ID NO: 1720442 - DNA, 15 bp, Homo sapiens
agatattcagcctga

SEQ ID NO: 1720443 - DNA, 15 bp, Homo sapiens
gatattcagcctgat

SEQ ID NO: 1720444 - DNA, 15 bp, Homo sapiens
atattcagcctgatt

SEQ ID NO: 1720445 - DNA, 15 bp, Homo sapiens
tattcagcctgattc

SEQ ID NO: 1720446 - DNA, 15 bp, Homo sapiens
attcagcctgattcc

SEQ ID NO: 1720447 - DNA, 15 bp, Homo sapiens
ttcagcctgattcct

SEQ ID NO: 1720448 - DNA, 15 bp, Homo sapiens
tcagcctgattcctg

SEQ ID NO: 1720449 - DNA, 15 bp, Homo sapiens
cagcctgattcctga

SEQ ID NO: 1720450 - DNA, 15 bp, Homo sapiens
agcctgattcctgaa

SEQ ID NO: 1720451 - DNA, 15 bp, Homo sapiens
gcctgattcctgaac

SEQ ID NO: 1720452 - DNA, 15 bp, Homo sapiens
cctgattcctgaaca

SEQ ID NO: 1720453 - DNA, 15 bp, Homo sapiens
ctgattcctgaacat

SEQ ID NO: 1720454 - DNA, 15 bp, Homo sapiens
tgattcctgaacatc

SEQ ID NO: 1720455 - DNA, 15 bp, Homo sapiens
gattcctgaacatcc

SEQ ID NO: 1720456 - DNA, 15 bp, Homo sapiens
attcctgaacatcct

SEQ ID NO: 1720457 - DNA, 15 bp, Homo sapiens
ttcctgaacatcctt

SEQ ID NO: 1720458 - DNA, 15 bp, Homo sapiens
tcctgaacatccttt

SEQ ID NO: 1720459 - DNA, 15 bp, Homo sapiens
cctgaacatcctttg

SEQ ID NO: 1720460 - DNA, 15 bp, Homo sapiens
ctgaacatcctttgt

SEQ ID NO: 1720461 - DNA, 15 bp, Homo sapiens
tgaacatcctttgtg

SEQ ID NO: 1720462 - DNA, 15 bp, Homo sapiens
gaacatcctttgtgc

SEQ ID NO: 1720463 - DNA, 15 bp, Homo sapiens
aacatcctttgtgca

SEQ ID NO: 1720464 - DNA, 15 bp, Homo sapiens
acatcctttgtgcag

SEQ ID NO: 1720465 - DNA, 15 bp, Homo sapiens
catcctttgtgcagc

SEQ ID NO: 1720466 - DNA, 15 bp, Homo sapiens
atcctttgtgcagct

SEQ ID NO: 1720467 - DNA, 15 bp, Homo sapiens
tcctttgtgcagcta

SEQ ID NO: 1720468 - DNA, 15 bp, Homo sapiens
cctttgtgcagctac

SEQ ID NO: 1720469 - DNA, 15 bp, Homo sapiens
ctttgtgcagctact

SEQ ID NO: 1720470 - DNA, 15 bp, Homo sapiens
tttgtgcagctactt

SEQ ID NO: 1720471 - DNA, 15 bp, Homo sapiens
ttgtgcagctacttc

SEQ ID NO: 1720472 - DNA, 15 bp, Homo sapiens
tgtgcagctacttca

SEQ ID NO: 1720473 - DNA, 15 bp, Homo sapiens
gtgcagctacttcag

SEQ ID NO: 1720474 - DNA, 15 bp, Homo sapiens
tgcagctacttcagc

SEQ ID NO: 1720475 - DNA, 15 bp, Homo sapiens
gcagctacttcagcc

SEQ ID NO: 1720476 - DNA, 15 bp, Homo sapiens
cagctacttcagcct

SEQ ID NO: 1720477 - DNA, 15 bp, Homo sapiens
agctacttcagcctg

SEQ ID NO: 1720478 - DNA, 15 bp, Homo sapiens
gctacttcagcctgg

SEQ ID NO: 1720479 - DNA, 15 bp, Homo sapiens
ctacttcagcctggg

SEQ ID NO: 1720480 - DNA, 15 bp, Homo sapiens
tacttcagcctgggt

SEQ ID NO: 1720481 - DNA, 15 bp, Homo sapiens
acttcagcctgggtt

SEQ ID NO: 1720482 - DNA, 15 bp, Homo sapiens
cttcagcctgggttg

SEQ ID NO: 1720483 - DNA, 15 bp, Homo sapiens
ttcagcctgggttgc

SEQ ID NO: 1720484 - DNA, 15 bp, Homo sapiens
tcagcctgggttgcc

SEQ ID NO: 1720485 - DNA, 15 bp, Homo sapiens
cagcctgggttgcct

SEQ ID NO: 1720486 - DNA, 15 bp, Homo sapiens
agcctgggttgcctg

SEQ ID NO: 1720487 - DNA, 15 bp, Homo sapiens
gcctgggttgcctgc

SEQ ID NO: 1720488 - DNA, 15 bp, Homo sapiens
cctgggttgcctgcc

SEQ ID NO: 1720489 - DNA, 15 bp, Homo sapiens
ctgggttgcctgcct

SEQ ID NO: 1720490 - DNA, 15 bp, Homo sapiens
tgggttgcctgcctt

SEQ ID NO: 1720491 - DNA, 15 bp, Homo sapiens
gggttgcctgccttc

SEQ ID NO: 1720492 - DNA, 15 bp, Homo sapiens
ggttgcctgccttca

SEQ ID NO: 1720493 - DNA, 15 bp, Homo sapiens
gttgcctgccttcac

SEQ ID NO: 1720494 - DNA, 15 bp, Homo sapiens
ttgcctgccttcacc

SEQ ID NO: 1720495 - DNA, 15 bp, Homo sapiens
tgcctgccttcaccc

SEQ ID NO: 1720496 - DNA, 15 bp, Homo sapiens
gcctgccttcaccca

SEQ ID NO: 1720497 - DNA, 15 bp, Homo sapiens
cctgccttcacccat

SEQ ID NO: 1720498 - DNA, 15 bp, Homo sapiens
ctgccttcacccatc

SEQ ID NO: 1720499 - DNA, 15 bp, Homo sapiens
tgccttcacccatct

SEQ ID NO: 1720500 - DNA, 15 bp, Homo sapiens
gccttcacccatctt

SEQ ID NO: 1720501 - DNA, 15 bp, Homo sapiens
ccttcacccatcttg

SEQ ID NO: 1720502 - DNA, 15 bp, Homo sapiens
cttcacccatcttgt

SEQ ID NO: 1720503 - DNA, 15 bp, Homo sapiens
ttcacccatcttgtt

SEQ ID NO: 1720504 - DNA, 15 bp, Homo sapiens
tcacccatcttgtta

SEQ ID NO: 1720505 - DNA, 15 bp, Homo sapiens
cacccatcttgttac

SEQ ID NO: 1720506 - DNA, 15 bp, Homo sapiens
acccatcttgttaca

SEQ ID NO: 1720507 - DNA, 15 bp, Homo sapiens
cccatcttgttacag

SEQ ID NO: 1720508 - DNA, 15 bp, Homo sapiens
ccatcttgttacaga

SEQ ID NO: 1720509 - DNA, 15 bp, Homo sapiens
catcttgttacagaa

SEQ ID NO: 1720510 - DNA, 15 bp, Homo sapiens
atcttgttacagaag

SEQ ID NO: 1720511 - DNA, 15 bp, Homo sapiens
tcttgttacagaaga

SEQ ID NO: 1720512 - DNA, 15 bp, Homo sapiens
cttgttacagaagaa

SEQ ID NO: 1720513 - DNA, 15 bp, Homo sapiens
ttgttacagaagaaa

SEQ ID NO: 1720514 - DNA, 15 bp, Homo sapiens
tgttacagaagaaaa

SEQ ID NO: 1720515 - DNA, 15 bp, Homo sapiens
gttacagaagaaaaa

SEQ ID NO: 1720516 - DNA, 15 bp, Homo sapiens
ttacagaagaaaaag

SEQ ID NO: 1720517 - DNA, 15 bp, Homo sapiens
tacagaagaaaaaga

SEQ ID NO: 1720518 - DNA, 15 bp, Homo sapiens
acagaagaaaaagac

SEQ ID NO: 1720519 - DNA, 15 bp, Homo sapiens
cagaagaaaaagaca

SEQ ID NO: 1720520 - DNA, 15 bp, Homo sapiens
agaagaaaaagacac

SEQ ID NO: 1720521 - DNA, 15 bp, Homo sapiens
gaagaaaaagacacc

SEQ ID NO: 1720522 - DNA, 15 bp, Homo sapiens
aagaaaaagacacct

SEQ ID NO: 1720523 - DNA, 15 bp, Homo sapiens
agaaaaagacacctc

SEQ ID NO: 1720524 - DNA, 15 bp, Homo sapiens
gaaaaagacacctct

SEQ ID NO: 1720525 - DNA, 15 bp, Homo sapiens
aaaaagacacctctc

SEQ ID NO: 1720526 - DNA, 15 bp, Homo sapiens
aaaagacacctctca

SEQ ID NO: 1720527 - DNA, 15 bp, Homo sapiens
aaagacacctctcac

SEQ ID NO: 1720528 - DNA, 15 bp, Homo sapiens
aagacacctctcact

SEQ ID NO: 1720529 - DNA, 15 bp, Homo sapiens
agacacctctcactt

SEQ ID NO: 1720530 - DNA, 15 bp, Homo sapiens
gacacctctcacttg

SEQ ID NO: 1720531 - DNA, 15 bp, Homo sapiens
acctctcacttgttt

SEQ ID NO: 1720532 - DNA, 15 bp, Homo sapiens
cctctcacttgttta

SEQ ID NO: 1720533 - DNA, 15 bp, Homo sapiens
ctctcacttgtttaa

SEQ ID NO: 1720534 - DNA, 15 bp, Homo sapiens
tctcacttgtttaag

SEQ ID NO: 1720535 - DNA, 15 bp, Homo sapiens
ctcacttgtttaagc

SEQ ID NO: 1720536 - DNA, 15 bp, Homo sapiens
tcacttgtttaagcc

SEQ ID NO: 1720537 - DNA, 15 bp, Homo sapiens
cacttgtttaagcca

SEQ ID NO: 1720538 - DNA, 15 bp, Homo sapiens
acttgtttaagccac

SEQ ID NO: 1720539 - DNA, 15 bp, Homo sapiens
cttgtttaagccact

SEQ ID NO: 1720540 - DNA, 15 bp, Homo sapiens
ttgtttaagccactg

SEQ ID NO: 1720541 - DNA, 15 bp, Homo sapiens
tgtttaagccactga

SEQ ID NO: 1720542 - DNA, 15 bp, Homo sapiens
gtttaagccactgaa

SEQ ID NO: 1720543 - DNA, 15 bp, Homo sapiens
tttaagccactgaag

SEQ ID NO: 1720544 - DNA, 15 bp, Homo sapiens
ttaagccactgaagt

SEQ ID NO: 1720545 - DNA, 15 bp, Homo sapiens
taagccactgaagta

SEQ ID NO: 1720546 - DNA, 15 bp, Homo sapiens
aagccactgaagtag

SEQ ID NO: 1720547 - DNA, 15 bp, Homo sapiens
agccactgaagtagt

SEQ ID NO: 1720548 - DNA, 15 bp, Homo sapiens
gccactgaagtagtt

SEQ ID NO: 1720549 - DNA, 15 bp, Homo sapiens
ccactgaagtagttt

SEQ ID NO: 1720550 - DNA, 15 bp, Homo sapiens
cactgaagtagtttt

SEQ ID NO: 1720551 - DNA, 15 bp, Homo sapiens
actgaagtagttttt

SEQ ID NO: 1720552 - DNA, 15 bp, Homo sapiens
ctgaagtagtttttt

SEQ ID NO: 1720553 - DNA, 15 bp, Homo sapiens
tgaagtagttttttt

SEQ ID NO: 1720554 - DNA, 15 bp, Homo sapiens
gaagtagtttttttg

SEQ ID NO: 1720555 - DNA, 15 bp, Homo sapiens
aagtagtttttttgt

SEQ ID NO: 1720556 - DNA, 15 bp, Homo sapiens
agtagtttttttgta

SEQ ID NO: 1720557 - DNA, 15 bp, Homo sapiens
gtagtttttttgtaa

SEQ ID NO: 1720558 - DNA, 15 bp, Homo sapiens
tagtttttttgtaat

SEQ ID NO: 1720559 - DNA, 15 bp, Homo sapiens
agtttttttgtaatt

SEQ ID NO: 1720560 - DNA, 15 bp, Homo sapiens
gtttttttgtaattg

SEQ ID NO: 1720561 - DNA, 15 bp, Homo sapiens
tttttttgtaattgt

SEQ ID NO: 1720562 - DNA, 15 bp, Homo sapiens
ttttttgtaattgtg

SEQ ID NO: 1720563 - DNA, 15 bp, Homo sapiens
tttttgtaattgtgt

SEQ ID NO: 1720564 - DNA, 15 bp, Homo sapiens
ttttgtaattgtgtt

SEQ ID NO: 1720565 - DNA, 15 bp, Homo sapiens
tttgtaattgtgttt

SEQ ID NO: 1720566 - DNA, 15 bp, Homo sapiens
ttgtaattgtgtttg

SEQ ID NO: 1720567 - DNA, 15 bp, Homo sapiens
tgtaattgtgtttgt

SEQ ID NO: 1720568 - DNA, 15 bp, Homo sapiens
gtaattgtgtttgtt

SEQ ID NO: 1720569 - DNA, 15 bp, Homo sapiens
taattgtgtttgttg

SEQ ID NO: 1720570 - DNA, 15 bp, Homo sapiens
aattgtgtttgttgt

SEQ ID NO: 1720571 - DNA, 15 bp, Homo sapiens
attgtgtttgttgtt

SEQ ID NO: 1720572 - DNA, 15 bp, Homo sapiens
ttgtgtttgttgttg

SEQ ID NO: 1720573 - DNA, 15 bp, Homo sapiens
tgtgtttgttgttgt

SEQ ID NO: 1720574 - DNA, 15 bp, Homo sapiens
gtgtttgttgttgtt

SEQ ID NO: 1720575 - DNA, 15 bp, Homo sapiens
tgtttgttgttgttg

SEQ ID NO: 1720576 - DNA, 15 bp, Homo sapiens
gtttgttgttgttgt

SEQ ID NO: 1720577 - DNA, 15 bp, Homo sapiens
tgttgttgttgttgt

SEQ ID NO: 1720578 - DNA, 15 bp, Homo sapiens
gttgttgttgttgtt

SEQ ID NO: 1720579 - DNA, 15 bp, Homo sapiens
gttgttgttgttgct

SEQ ID NO: 1720580 - DNA, 15 bp, Homo sapiens
ttgttgttgttgctg

SEQ ID NO: 1720581 - DNA, 15 bp, Homo sapiens
tgttgttgttgctgt

SEQ ID NO: 1720582 - DNA, 15 bp, Homo sapiens
gttgttgttgctgtt

SEQ ID NO: 1720583 - DNA, 15 bp, Homo sapiens
ttgttgttgctgtta

SEQ ID NO: 1720584 - DNA, 15 bp, Homo sapiens
tgttgttgctgttaa

SEQ ID NO: 1720585 - DNA, 15 bp, Homo sapiens
gttgttgctgttaac

SEQ ID NO: 1720586 - DNA, 15 bp, Homo sapiens
tgttgctgttaacta

SEQ ID NO: 1720587 - DNA, 15 bp, Homo sapiens
gttgctgttaactaa

SEQ ID NO: 1720588 - DNA, 15 bp, Homo sapiens
ttgctgttaactaaa

SEQ ID NO: 1720589 - DNA, 15 bp, Homo sapiens
tgctgttaactaaaa

SEQ ID NO: 1720590 - DNA, 15 bp, Homo sapiens
gctgttaactaaaaa

SEQ ID NO: 1720591 - DNA, 15 bp, Homo sapiens
ctgttaactaaaaat

SEQ ID NO: 1720592 - DNA, 15 bp, Homo sapiens
tgttaactaaaaatt

SEQ ID NO: 1720593 - DNA, 15 bp, Homo sapiens
gttaactaaaaatta

SEQ ID NO: 1720594 - DNA, 15 bp, Homo sapiens
ttaactaaaaattaa

SEQ ID NO: 1720595 - DNA, 15 bp, Homo sapiens
taactaaaaattaat

SEQ ID NO: 1720596 - DNA, 15 bp, Homo sapiens
aactaaaaattaata

SEQ ID NO: 1720597 - DNA, 15 bp, Homo sapiens
actaaaaattaatac

SEQ ID NO: 1720598 - DNA, 15 bp, Homo sapiens
ctaaaaattaataca

SEQ ID NO: 1720599 - DNA, 15 bp, Homo sapiens
taaaaattaatacaa

SEQ ID NO: 1720600 - DNA, 15 bp, Homo sapiens
aaaaattaatacaat

SEQ ID NO: 1720601 - DNA, 15 bp, Homo sapiens
aaaattaatacaatc

SEQ ID NO: 1720602 - DNA, 15 bp, Homo sapiens
aaattaatacaatct

SEQ ID NO: 1720603 - DNA, 15 bp, Homo sapiens
aattaatacaatctt

SEQ ID NO: 1720604 - DNA, 15 bp, Homo sapiens
attaatacaatctta

SEQ ID NO: 1720605 - DNA, 15 bp, Homo sapiens
ttaatacaatcttac

SEQ ID NO: 1720606 - DNA, 15 bp, Homo sapiens
taatacaatcttact

SEQ ID NO: 1720607 - DNA, 15 bp, Homo sapiens
aatacaatcttactc

SEQ ID NO: 1720608 - DNA, 15 bp, Homo sapiens
atacaatcttactca

SEQ ID NO: 1720609 - DNA, 15 bp, Homo sapiens
tacaatcttactcaa

SEQ ID NO: 1720610 - DNA, 15 bp, Homo sapiens
acaatcttactcaat

SEQ ID NO: 1720611 - DNA, 15 bp, Homo sapiens
caatcttactcaata

SEQ ID NO: 1720612 - DNA, 15 bp, Homo sapiens
aatcttactcaatag

SEQ ID NO: 1720613 - DNA, 15 bp, Homo sapiens
atcttactcaataga

SEQ ID NO: 1720614 - DNA, 15 bp, Homo sapiens
tcttactcaatagat

SEQ ID NO: 1720615 - DNA, 15 bp, Homo sapiens
cttactcaatagatc

SEQ ID NO: 1720616 - DNA, 15 bp, Homo sapiens
ttactcaatagatct

SEQ ID NO: 1720617 - DNA, 15 bp, Homo sapiens
tactcaatagatctt

SEQ ID NO: 1720618 - DNA, 15 bp, Homo sapiens
actcaatagatcttt

SEQ ID NO: 1720619 - DNA, 15 bp, Homo sapiens
ctcaatagatcttta

SEQ ID NO: 1720620 - DNA, 15 bp, Homo sapiens
tcaatagatctttat

SEQ ID NO: 1720621 - DNA, 15 bp, Homo sapiens
caatagatctttatt

SEQ ID NO: 1720622 - DNA, 15 bp, Homo sapiens
aatagatctttatta

SEQ ID NO: 1720623 - DNA, 15 bp, Homo sapiens
atagatctttattaa

SEQ ID NO: 1720624 - DNA, 15 bp, Homo sapiens
tagatctttattaat

SEQ ID NO: 1720625 - DNA, 15 bp, Homo sapiens
agatctttattaata

SEQ ID NO: 1720626 - DNA, 15 bp, Homo sapiens
gatctttattaataa

SEQ ID NO: 1720627 - DNA, 15 bp, Homo sapiens
atctttattaataaa

SEQ ID NO: 1720628 - DNA, 15 bp, Homo sapiens
tctttattaataaaa

SEQ ID NO: 1720629 - DNA, 15 bp, Homo sapiens
ctttattaataaaaa

SEQ ID NO: 1720630 - DNA, 15 bp, Homo sapiens
tttattaataaaaat

SEQ ID NO: 1720631 - DNA, 15 bp, Homo sapiens
ttattaataaaaatc

SEQ ID NO: 1720632 - DNA, 15 bp, Homo sapiens
tattaataaaaatcc

SEQ ID NO: 1720633 - DNA, 15 bp, Homo sapiens
attaataaaaatcct

SEQ ID NO: 1720634 - DNA, 15 bp, Homo sapiens
ttaataaaaatcctg

SEQ ID NO: 1720635 - DNA, 15 bp, Homo sapiens
taataaaaatcctga

SEQ ID NO: 1720636 - DNA, 15 bp, Homo sapiens
aataaaaatcctgaa

SEQ ID NO: 1720637 - DNA, 15 bp, Homo sapiens
ataaaaatcctgaaa

SEQ ID NO: 1720638 - DNA, 15 bp, Homo sapiens
taaaaatcctgaaat

SEQ ID NO: 1720639 - DNA, 15 bp, Homo sapiens
aaaaatcctgaaatg

SEQ ID NO: 1720640 - DNA, 15 bp, Homo sapiens
aaaatcctgaaatgt

SEQ ID NO: 1720641 - DNA, 15 bp, Homo sapiens
aaatcctgaaatgta

SEQ ID NO: 1720642 - DNA, 15 bp, Homo sapiens
aatcctgaaatgtaa

SEQ ID NO: 1720643 - DNA, 15 bp, Homo sapiens
atcctgaaatgtaag

SEQ ID NO: 1720644 - DNA, 15 bp, Homo sapiens
tcctgaaatgtaagt

SEQ ID NO: 1720645 - DNA, 15 bp, Homo sapiens
cctgaaatgtaagta

SEQ ID NO: 1720646 - DNA, 15 bp, Homo sapiens
ctgaaatgtaagtat

SEQ ID NO: 1720647 - DNA, 15 bp, Homo sapiens
tgaaatgtaagtata

SEQ ID NO: 1720648 - DNA, 15 bp, Homo sapiens
gaaatgtaagtataa

SEQ ID NO: 1720649 - DNA, 15 bp, Homo sapiens
aaatgtaagtataaa

SEQ ID NO: 1720650 - DNA, 15 bp, Homo sapiens
aatgtaagtataaag

SEQ ID NO: 1720651 - DNA, 15 bp, Homo sapiens
atgtaagtataaaga

SEQ ID NO: 1720652 - DNA, 15 bp, Homo sapiens
tgtaagtataaagaa

SEQ ID NO: 1720653 - DNA, 15 bp, Homo sapiens
gtaagtataaagaaa

SEQ ID NO: 1720654 - DNA, 15 bp, Homo sapiens
taagtataaagaaaa

SEQ ID NO: 1720655 - DNA, 15 bp, Homo sapiens
aagtataaagaaaat

SEQ ID NO: 1720656 - DNA, 15 bp, Homo sapiens
agtataaagaaaata

SEQ ID NO: 1720657 - DNA, 15 bp, Homo sapiens
gtataaagaaaataa

SEQ ID NO: 1720658 - DNA, 15 bp, Homo sapiens
tataaagaaaataac

SEQ ID NO: 1720659 - DNA, 15 bp, Homo sapiens
ataaagaaaataaca

SEQ ID NO: 1720660 - DNA, 15 bp, Homo sapiens
taaagaaaataacac

SEQ ID NO: 1720661 - DNA, 15 bp, Homo sapiens
aaagaaaataacaca

SEQ ID NO: 1720662 - DNA, 15 bp, Homo sapiens
aagaaaataacacaa

SEQ ID NO: 1720663 - DNA, 15 bp, Homo sapiens
agaaaataacacaat

SEQ ID NO: 1720664 - DNA, 15 bp, Homo sapiens
gaaaataacacaata

SEQ ID NO: 1720665 - DNA, 15 bp, Homo sapiens
aaaataacacaatat

SEQ ID NO: 1720666 - DNA, 15 bp, Homo sapiens
aaataacacaatatt

SEQ ID NO: 1720667 - DNA, 15 bp, Homo sapiens
aataacacaatattg

SEQ ID NO: 1720668 - DNA, 15 bp, Homo sapiens
ataacacaatattga

SEQ ID NO: 1720669 - DNA, 15 bp, Homo sapiens
taacacaatattgaa

SEQ ID NO: 1720670 - DNA, 15 bp, Homo sapiens
aacacaatattgaag

SEQ ID NO: 1720671 - DNA, 15 bp, Homo sapiens
acacaatattgaagt

SEQ ID NO: 1720672 - DNA, 15 bp, Homo sapiens
cacaatattgaagta

SEQ ID NO: 1720673 - DNA, 15 bp, Homo sapiens
acaatattgaagtat

SEQ ID NO: 1720674 - DNA, 15 bp, Homo sapiens
caatattgaagtatt

SEQ ID NO: 1720675 - DNA, 15 bp, Homo sapiens
aatattgaagtatta

SEQ ID NO: 1720676 - DNA, 15 bp, Homo sapiens
atattgaagtattaa

SEQ ID NO: 1720677 - DNA, 15 bp, Homo sapiens
tattgaagtattaat

SEQ ID NO: 1720678 - DNA, 15 bp, Homo sapiens
attgaagtattaatg

SEQ ID NO: 1720679 - DNA, 15 bp, Homo sapiens
ttgaagtattaatgc

SEQ ID NO: 1720680 - DNA, 15 bp, Homo sapiens
tgaagtattaatgca

SEQ ID NO: 1720681 - DNA, 15 bp, Homo sapiens
gaagtattaatgcat

SEQ ID NO: 1720682 - DNA, 15 bp, Homo sapiens
aagtattaatgcatt

SEQ ID NO: 1720683 - DNA, 15 bp, Homo sapiens
agtattaatgcattc

SEQ ID NO: 1720684 - DNA, 15 bp, Homo sapiens
gtattaatgcattct

SEQ ID NO: 1720685 - DNA, 15 bp, Homo sapiens
tattaatgcattctt

SEQ ID NO: 1720686 - DNA, 15 bp, Homo sapiens
attaatgcattctta

SEQ ID NO: 1720687 - DNA, 15 bp, Homo sapiens
ttaatgcattcttaa

SEQ ID NO: 1720688 - DNA, 15 bp, Homo sapiens
taatgcattcttaaa

SEQ ID NO: 1720689 - DNA, 15 bp, Homo sapiens
aatgcattcttaaat

SEQ ID NO: 1720690 - DNA, 15 bp, Homo sapiens
atgcattcttaaatg

SEQ ID NO: 1720691 - DNA, 15 bp, Homo sapiens
tgcattcttaaatga

SEQ ID NO: 1720692 - DNA, 15 bp, Homo sapiens
gcattcttaaatgat

SEQ ID NO: 1720693 - DNA, 15 bp, Homo sapiens
cattcttaaatgatc

SEQ ID NO: 1720694 - DNA, 15 bp, Homo sapiens
attcttaaatgatct

SEQ ID NO: 1720695 - DNA, 15 bp, Homo sapiens
ttcttaaatgatctt

SEQ ID NO: 1720696 - DNA, 15 bp, Homo sapiens
tcttaaatgatcttc

SEQ ID NO: 1720697 - DNA, 15 bp, Homo sapiens
cttaaatgatcttca

SEQ ID NO: 1720698 - DNA, 15 bp, Homo sapiens
ttaaatgatcttcaa

SEQ ID NO: 1720699 - DNA, 15 bp, Homo sapiens
taaatgatcttcaaa

SEQ ID NO: 1720700 - DNA, 15 bp, Homo sapiens
aaatgatcttcaaat

SEQ ID NO: 1720701 - DNA, 15 bp, Homo sapiens
aatgatcttcaaata

SEQ ID NO: 1720702 - DNA, 15 bp, Homo sapiens
atgatcttcaaatat

SEQ ID NO: 1720703 - DNA, 15 bp, Homo sapiens
tgatcttcaaatatg

SEQ ID NO: 1720704 - DNA, 15 bp, Homo sapiens
gatcttcaaatatga

SEQ ID NO: 1720705 - DNA, 15 bp, Homo sapiens
atcttcaaatatgat

SEQ ID NO: 1720706 - DNA, 15 bp, Homo sapiens
tcttcaaatatgatc

SEQ ID NO: 1720707 - DNA, 15 bp, Homo sapiens
cttcaaatatgatca

SEQ ID NO: 1720708 - DNA, 15 bp, Homo sapiens
ttcaaatatgatcat

SEQ ID NO: 1720709 - DNA, 15 bp, Homo sapiens
tcaaatatgatcatt

SEQ ID NO: 1720710 - DNA, 15 bp, Homo sapiens
caaatatgatcatta

SEQ ID NO: 1720711 - DNA, 15 bp, Homo sapiens
aaatatgatcattat

SEQ ID NO: 1720712 - DNA, 15 bp, Homo sapiens
aatatgatcattata

SEQ ID NO: 1720713 - DNA, 15 bp, Homo sapiens
atatgatcattatat

SEQ ID NO: 1720714 - DNA, 15 bp, Homo sapiens
tatgatcattatatc

SEQ ID NO: 1720715 - DNA, 15 bp, Homo sapiens
atgatcattatatct

SEQ ID NO: 1720716 - DNA, 15 bp, Homo sapiens
tgatcattatatcta

SEQ ID NO: 1720717 - DNA, 15 bp, Homo sapiens
gatcattatatctag

SEQ ID NO: 1720718 - DNA, 15 bp, Homo sapiens
atcattatatctaga

SEQ ID NO: 1720719 - DNA, 15 bp, Homo sapiens
tcattatatctagag

SEQ ID NO: 1720720 - DNA, 15 bp, Homo sapiens
cattatatctagaga

SEQ ID NO: 1720721 - DNA, 15 bp, Homo sapiens
attatatctagagat

SEQ ID NO: 1720722 - DNA, 15 bp, Homo sapiens
ttatatctagagata

SEQ ID NO: 1720723 - DNA, 15 bp, Homo sapiens
tatatctagagatat

SEQ ID NO: 1720724 - DNA, 15 bp, Homo sapiens
atatctagagatatt

SEQ ID NO: 1720725 - DNA, 15 bp, Homo sapiens
tatctagagatattc

SEQ ID NO: 1720726 - DNA, 15 bp, Homo sapiens
atctagagatattcc

SEQ ID NO: 1720727 - DNA, 15 bp, Homo sapiens
tctagagatattcca

SEQ ID NO: 1720728 - DNA, 15 bp, Homo sapiens
ctagagatattccaa

SEQ ID NO: 1720729 - DNA, 15 bp, Homo sapiens
tagagatattccaaa

SEQ ID NO: 1720730 - DNA, 15 bp, Homo sapiens
agagatattccaaaa

SEQ ID NO: 1720731 - DNA, 15 bp, Homo sapiens
gagatattccaaaaa

SEQ ID NO: 1720732 - DNA, 15 bp, Homo sapiens
agatattccaaaaat

SEQ ID NO: 1720733 - DNA, 15 bp, Homo sapiens
gatattccaaaaata

SEQ ID NO: 1720734 - DNA, 15 bp, Homo sapiens
atattccaaaaatat

SEQ ID NO: 1720735 - DNA, 15 bp, Homo sapiens
tattccaaaaatatt

SEQ ID NO: 1720736 - DNA, 15 bp, Homo sapiens
attccaaaaatattc

SEQ ID NO: 1720737 - DNA, 15 bp, Homo sapiens
ttccaaaaatattca

SEQ ID NO: 1720738 - DNA, 15 bp, Homo sapiens
tccaaaaatattcag

SEQ ID NO: 1720739 - DNA, 15 bp, Homo sapiens
ccaaaaatattcagt

SEQ ID NO: 1720740 - DNA, 15 bp, Homo sapiens
caaaaatattcagtg

SEQ ID NO: 1720741 - DNA, 15 bp, Homo sapiens
aaaaatattcagtga

SEQ ID NO: 1720742 - DNA, 15 bp, Homo sapiens
aaaatattcagtgaa

SEQ ID NO: 1720743 - DNA, 15 bp, Homo sapiens
aaatattcagtgaaa

SEQ ID NO: 1720744 - DNA, 15 bp, Homo sapiens
aatattcagtgaaag

SEQ ID NO: 1720745 - DNA, 15 bp, Homo sapiens
atattcagtgaaagg

SEQ ID NO: 1720746 - DNA, 15 bp, Homo sapiens
tattcagtgaaagga

SEQ ID NO: 1720747 - DNA, 15 bp, Homo sapiens
attcagtgaaaggag

SEQ ID NO: 1720748 - DNA, 15 bp, Homo sapiens
ttcagtgaaaggagg

SEQ ID NO: 1720749 - DNA, 15 bp, Homo sapiens
tcagtgaaaggagga

SEQ ID NO: 1720750 - DNA, 15 bp, Homo sapiens
cagtgaaaggaggaa

SEQ ID NO: 1720751 - DNA, 15 bp, Homo sapiens
agtgaaaggaggaat

SEQ ID NO: 1720752 - DNA, 15 bp, Homo sapiens
gtgaaaggaggaatc

SEQ ID NO: 1720753 - DNA, 15 bp, Homo sapiens
tgaaaggaggaatcg

SEQ ID NO: 1720754 - DNA, 15 bp, Homo sapiens
gaaaggaggaatcgg

SEQ ID NO: 1720755 - DNA, 15 bp, Homo sapiens
aaaggaggaatcggt

SEQ ID NO: 1720756 - DNA, 15 bp, Homo sapiens
aaggaggaatcggtc

SEQ ID NO: 1720757 - DNA, 15 bp, Homo sapiens
aggaggaatcggtct

SEQ ID NO: 1720758 - DNA, 15 bp, Homo sapiens
ggaggaatcggtctt

SEQ ID NO: 1720759 - DNA, 15 bp, Homo sapiens
gaggaatcggtcttt

SEQ ID NO: 1720760 - DNA, 15 bp, Homo sapiens
aggaatcggtctttt

SEQ ID NO: 1720761 - DNA, 15 bp, Homo sapiens
ggaatcggtcttttt

SEQ ID NO: 1720762 - DNA, 15 bp, Homo sapiens
gaatcggtctttttt

SEQ ID NO: 1720763 - DNA, 15 bp, Homo sapiens
aatcggtctttttta

SEQ ID NO: 1720764 - DNA, 15 bp, Homo sapiens
atcggtcttttttac

SEQ ID NO: 1720765 - DNA, 15 bp, Homo sapiens
tcggtcttttttacc

SEQ ID NO: 1720766 - DNA, 15 bp, Homo sapiens
cggtcttttttacct

SEQ ID NO: 1720767 - DNA, 15 bp, Homo sapiens
ggtcttttttaccta

SEQ ID NO: 1720768 - DNA, 15 bp, Homo sapiens
gtcttttttacctag

SEQ ID NO: 1720769 - DNA, 15 bp, Homo sapiens
tcttttttacctagt

SEQ ID NO: 1720770 - DNA, 15 bp, Homo sapiens
cttttttacctagta

SEQ ID NO: 1720771 - DNA, 15 bp, Homo sapiens
ttttttacctagtat

SEQ ID NO: 1720772 - DNA, 15 bp, Homo sapiens
tttttacctagtatc

SEQ ID NO: 1720773 - DNA, 15 bp, Homo sapiens
ttttacctagtatca

SEQ ID NO: 1720774 - DNA, 15 bp, Homo sapiens
tttacctagtatcac

SEQ ID NO: 1720775 - DNA, 15 bp, Homo sapiens
ttacctagtatcact

SEQ ID NO: 1720776 - DNA, 15 bp, Homo sapiens
tacctagtatcactg

SEQ ID NO: 1720777 - DNA, 15 bp, Homo sapiens
acctagtatcactgc

SEQ ID NO: 1720778 - DNA, 15 bp, Homo sapiens
cctagtatcactgcc

SEQ ID NO: 1720779 - DNA, 15 bp, Homo sapiens
ctagtatcactgcca

SEQ ID NO: 1720780 - DNA, 15 bp, Homo sapiens
tagtatcactgccat

SEQ ID NO: 1720781 - DNA, 15 bp, Homo sapiens
agtatcactgccatg

SEQ ID NO: 1720782 - DNA, 15 bp, Homo sapiens
gtatcactgccatgg

SEQ ID NO: 1720783 - DNA, 15 bp, Homo sapiens
tatcactgccatgga

SEQ ID NO: 1720784 - DNA, 15 bp, Homo sapiens
atcactgccatggaa

SEQ ID NO: 1720785 - DNA, 15 bp, Homo sapiens
tcactgccatggaaa

SEQ ID NO: 1720786 - DNA, 15 bp, Homo sapiens
cactgccatggaaag

SEQ ID NO: 1720787 - DNA, 15 bp, Homo sapiens
actgccatggaaaga

SEQ ID NO: 1720788 - DNA, 15 bp, Homo sapiens
ctgccatggaaagac

SEQ ID NO: 1720789 - DNA, 15 bp, Homo sapiens
tgccatggaaagacg

SEQ ID NO: 1720790 - DNA, 15 bp, Homo sapiens
gccatggaaagacga

SEQ ID NO: 1720791 - DNA, 15 bp, Homo sapiens
ccatggaaagacgat

SEQ ID NO: 1720792 - DNA, 15 bp, Homo sapiens
catggaaagacgata

SEQ ID NO: 1720793 - DNA, 15 bp, Homo sapiens
atggaaagacgatat

SEQ ID NO: 1720794 - DNA, 15 bp, Homo sapiens
tggaaagacgatatc

SEQ ID NO: 1720795 - DNA, 15 bp, Homo sapiens
ggaaagacgatatca

SEQ ID NO: 1720796 - DNA, 15 bp, Homo sapiens
gaaagacgatatcac

SEQ ID NO: 1720797 - DNA, 15 bp, Homo sapiens
aaagacgatatcact

SEQ ID NO: 1720798 - DNA, 15 bp, Homo sapiens
aagacgatatcactg

SEQ ID NO: 1720799 - DNA, 15 bp, Homo sapiens
agacgatatcactgg

SEQ ID NO: 1720800 - DNA, 15 bp, Homo sapiens
gacgatatcactgga

SEQ ID NO: 1720801 - DNA, 15 bp, Homo sapiens
acgatatcactggat

SEQ ID NO: 1720802 - DNA, 15 bp, Homo sapiens
cgatatcactggatg

SEQ ID NO: 1720803 - DNA, 15 bp, Homo sapiens
gatatcactggatgg

SEQ ID NO: 1720804 - DNA, 15 bp, Homo sapiens
atatcactggatggg

SEQ ID NO: 1720805 - DNA, 15 bp, Homo sapiens
tatcactggatgggt

SEQ ID NO: 1720806 - DNA, 15 bp, Homo sapiens
atcactggatgggtg

SEQ ID NO: 1720807 - DNA, 15 bp, Homo sapiens
tcactggatgggtgt

SEQ ID NO: 1720808 - DNA, 15 bp, Homo sapiens
cactggatgggtgtc

SEQ ID NO: 1720809 - DNA, 15 bp, Homo sapiens
actggatgggtgtcc

SEQ ID NO: 1720810 - DNA, 15 bp, Homo sapiens
ctggatgggtgtcct

SEQ ID NO: 1720811 - DNA, 15 bp, Homo sapiens
tggatgggtgtcctg

SEQ ID NO: 1720812 - DNA, 15 bp, Homo sapiens
ggatgggtgtcctgg

SEQ ID NO: 1720813 - DNA, 15 bp, Homo sapiens
gatgggtgtcctggc

SEQ ID NO: 1720814 - DNA, 15 bp, Homo sapiens
atgggtgtcctggca

SEQ ID NO: 1720815 - DNA, 15 bp, Homo sapiens
tgggtgtcctggcag

SEQ ID NO: 1720816 - DNA, 15 bp, Homo sapiens
gggtgtcctggcagc

SEQ ID NO: 1720817 - DNA, 15 bp, Homo sapiens
ggtgtcctggcagct

SEQ ID NO: 1720818 - DNA, 15 bp, Homo sapiens
gtgtcctggcagctc

SEQ ID NO: 1720819 - DNA, 15 bp, Homo sapiens
tgtcctggcagctct

SEQ ID NO: 1720820 - DNA, 15 bp, Homo sapiens
gtcctggcagctctt

SEQ ID NO: 1720821 - DNA, 15 bp, Homo sapiens
tcctggcagctcttt

SEQ ID NO: 1720822 - DNA, 15 bp, Homo sapiens
cctggcagctctttc

SEQ ID NO: 1720823 - DNA, 15 bp, Homo sapiens
ctggcagctctttct

SEQ ID NO: 1720824 - DNA, 15 bp, Homo sapiens
tggcagctctttctt

SEQ ID NO: 1720825 - DNA, 15 bp, Homo sapiens
ggcagctctttcttt

SEQ ID NO: 1720826 - DNA, 15 bp, Homo sapiens
gcagctctttctttc

SEQ ID NO: 1720827 - DNA, 15 bp, Homo sapiens
cagctctttctttcc

SEQ ID NO: 1720828 - DNA, 15 bp, Homo sapiens
agctctttctttcct

SEQ ID NO: 1720829 - DNA, 15 bp, Homo sapiens
gctctttctttcctg

SEQ ID NO: 1720830 - DNA, 15 bp, Homo sapiens
ctctttctttcctgg

SEQ ID NO: 1720831 - DNA, 15 bp, Homo sapiens
tctttctttcctgga

SEQ ID NO: 1720832 - DNA, 15 bp, Homo sapiens
tttctttcctggaac

SEQ ID NO: 1720833 - DNA, 15 bp, Homo sapiens
ttctttcctggaaca

SEQ ID NO: 1720834 - DNA, 15 bp, Homo sapiens
tctttcctggaacat

SEQ ID NO: 1720835 - DNA, 15 bp, Homo sapiens
ctttcctggaacatt

SEQ ID NO: 1720836 - DNA, 15 bp, Homo sapiens
tttcctggaacattg

SEQ ID NO: 1720837 - DNA, 15 bp, Homo sapiens
ttcctggaacattgc

SEQ ID NO: 1720838 - DNA, 15 bp, Homo sapiens
tcctggaacattgca

SEQ ID NO: 1720839 - DNA, 15 bp, Homo sapiens
cctggaacattgcac

SEQ ID NO: 1720840 - DNA, 15 bp, Homo sapiens
ctggaacattgcaca

SEQ ID NO: 1720841 - DNA, 15 bp, Homo sapiens
tggaacattgcacat

SEQ ID NO: 1720842 - DNA, 15 bp, Homo sapiens
ggaacattgcacatg

SEQ ID NO: 1720843 - DNA, 15 bp, Homo sapiens
gaacattgcacatgc

SEQ ID NO: 1720844 - DNA, 15 bp, Homo sapiens
aacattgcacatgcc

SEQ ID NO: 1720845 - DNA, 15 bp, Homo sapiens
acattgcacatgccc

SEQ ID NO: 1720846 - DNA, 15 bp, Homo sapiens
cattgcacatgccct

SEQ ID NO: 1720847 - DNA, 15 bp, Homo sapiens
attgcacatgccctg

SEQ ID NO: 1720848 - DNA, 15 bp, Homo sapiens
ttgcacatgccctgc

SEQ ID NO: 1720849 - DNA, 15 bp, Homo sapiens
tgcacatgccctgct

SEQ ID NO: 1720850 - DNA, 15 bp, Homo sapiens
gcacatgccctgctt

SEQ ID NO: 1720851 - DNA, 15 bp, Homo sapiens
cacatgccctgcttt

SEQ ID NO: 1720852 - DNA, 15 bp, Homo sapiens
acatgccctgcttta

SEQ ID NO: 1720853 - DNA, 15 bp, Homo sapiens
catgccctgctttaa

SEQ ID NO: 1720854 - DNA, 15 bp, Homo sapiens
atgccctgctttaaa

SEQ ID NO: 1720855 - DNA, 15 bp, Homo sapiens
tgccctgctttaaat

SEQ ID NO: 1720856 - DNA, 15 bp, Homo sapiens
gccctgctttaaatg

SEQ ID NO: 1720857 - DNA, 15 bp, Homo sapiens
ccctgctttaaatga

SEQ ID NO: 1720858 - DNA, 15 bp, Homo sapiens
cctgctttaaatgaa

SEQ ID NO: 1720859 - DNA, 15 bp, Homo sapiens
ctgctttaaatgaag

SEQ ID NO: 1720860 - DNA, 15 bp, Homo sapiens
tgctttaaatgaagg

SEQ ID NO: 1720861 - DNA, 15 bp, Homo sapiens
gctttaaatgaagga

SEQ ID NO: 1720862 - DNA, 15 bp, Homo sapiens
ctttaaatgaaggaa

SEQ ID NO: 1720863 - DNA, 15 bp, Homo sapiens
tttaaatgaaggaag

SEQ ID NO: 1720864 - DNA, 15 bp, Homo sapiens
ttaaatgaaggaagc

SEQ ID NO: 1720865 - DNA, 15 bp, Homo sapiens
taaatgaaggaagct

SEQ ID NO: 1720866 - DNA, 15 bp, Homo sapiens
aaatgaaggaagctt

SEQ ID NO: 1720867 - DNA, 15 bp, Homo sapiens
aatgaaggaagcttt

SEQ ID NO: 1720868 - DNA, 15 bp, Homo sapiens
atgaaggaagctttt

SEQ ID NO: 1720869 - DNA, 15 bp, Homo sapiens
tgaaggaagctttta

SEQ ID NO: 1720870 - DNA, 15 bp, Homo sapiens
gaaggaagcttttac

SEQ ID NO: 1720871 - DNA, 15 bp, Homo sapiens
aaggaagcttttact

SEQ ID NO: 1720872 - DNA, 15 bp, Homo sapiens
aggaagcttttactt

SEQ ID NO: 1720873 - DNA, 15 bp, Homo sapiens
ggaagcttttacttt

SEQ ID NO: 1720874 - DNA, 15 bp, Homo sapiens
gaagcttttacttta

SEQ ID NO: 1720875 - DNA, 15 bp, Homo sapiens
aagcttttactttag

SEQ ID NO: 1720876 - DNA, 15 bp, Homo sapiens
agcttttactttagg

SEQ ID NO: 1720877 - DNA, 15 bp, Homo sapiens
gcttttactttaggc

SEQ ID NO: 1720878 - DNA, 15 bp, Homo sapiens
cttttactttaggca

SEQ ID NO: 1720879 - DNA, 15 bp, Homo sapiens
ttttactttaggcac

SEQ ID NO: 1720880 - DNA, 15 bp, Homo sapiens
tttactttaggcact

SEQ ID NO: 1720881 - DNA, 15 bp, Homo sapiens
ttactttaggcactt

SEQ ID NO: 1720882 - DNA, 15 bp, Homo sapiens
tactttaggcactta

SEQ ID NO: 1720883 - DNA, 15 bp, Homo sapiens
actttaggcacttag

SEQ ID NO: 1720884 - DNA, 15 bp, Homo sapiens
ctttaggcacttagt

SEQ ID NO: 1720885 - DNA, 15 bp, Homo sapiens
tttaggcacttagtg

SEQ ID NO: 1720886 - DNA, 15 bp, Homo sapiens
ttaggcacttagtgt

SEQ ID NO: 1720887 - DNA, 15 bp, Homo sapiens
taggcacttagtgtt

SEQ ID NO: 1720888 - DNA, 15 bp, Homo sapiens
aggcacttagtgttt

SEQ ID NO: 1720889 - DNA, 15 bp, Homo sapiens
ggcacttagtgtttt

SEQ ID NO: 1720890 - DNA, 15 bp, Homo sapiens
gcacttagtgttttt

SEQ ID NO: 1720891 - DNA, 15 bp, Homo sapiens
cacttagtgtttttt

SEQ ID NO: 1720892 - DNA, 15 bp, Homo sapiens
acttagtgttttttg

SEQ ID NO: 1720893 - DNA, 15 bp, Homo sapiens
cttagtgttttttga

SEQ ID NO: 1720894 - DNA, 15 bp, Homo sapiens
ttagtgttttttgaa

SEQ ID NO: 1720895 - DNA, 15 bp, Homo sapiens
tagtgttttttgaat

SEQ ID NO: 1720896 - DNA, 15 bp, Homo sapiens
agtgttttttgaata

SEQ ID NO: 1720897 - DNA, 15 bp, Homo sapiens
gtgttttttgaatat

SEQ ID NO: 1720898 - DNA, 15 bp, Homo sapiens
tgttttttgaatatg

SEQ ID NO: 1720899 - DNA, 15 bp, Homo sapiens
gttttttgaatatgc

SEQ ID NO: 1720900 - DNA, 15 bp, Homo sapiens
ttttttgaatatgct

SEQ ID NO: 1720901 - DNA, 15 bp, Homo sapiens
tttttgaatatgctt

SEQ ID NO: 1720902 - DNA, 15 bp, Homo sapiens
ttttgaatatgcttt

SEQ ID NO: 1720903 - DNA, 15 bp, Homo sapiens
tttgaatatgctttc

SEQ ID NO: 1720904 - DNA, 15 bp, Homo sapiens
ttgaatatgctttct

SEQ ID NO: 1720905 - DNA, 15 bp, Homo sapiens
tgaatatgctttctc

SEQ ID NO: 1720906 - DNA, 15 bp, Homo sapiens
gaatatgctttctca

SEQ ID NO: 1720907 - DNA, 15 bp, Homo sapiens
aatatgctttctcat

SEQ ID NO: 1720908 - DNA, 15 bp, Homo sapiens
atatgctttctcatc

SEQ ID NO: 1720909 - DNA, 15 bp, Homo sapiens
tatgctttctcatcc

SEQ ID NO: 1720910 - DNA, 15 bp, Homo sapiens
atgctttctcatcct

SEQ ID NO: 1720911 - DNA, 15 bp, Homo sapiens
tgctttctcatcctt

SEQ ID NO: 1720912 - DNA, 15 bp, Homo sapiens
gctttctcatccttt

SEQ ID NO: 1720913 - DNA, 15 bp, Homo sapiens
ctttctcatcctttc

SEQ ID NO: 1720914 - DNA, 15 bp, Homo sapiens
tttctcatcctttca

SEQ ID NO: 1720915 - DNA, 15 bp, Homo sapiens
ttctcatcctttcac

SEQ ID NO: 1720916 - DNA, 15 bp, Homo sapiens
tctcatcctttcacg

SEQ ID NO: 1720917 - DNA, 15 bp, Homo sapiens
ctcatcctttcacgt

SEQ ID NO: 1720918 - DNA, 15 bp, Homo sapiens
tcatcctttcacgtg

SEQ ID NO: 1720919 - DNA, 15 bp, Homo sapiens
catcctttcacgtga

SEQ ID NO: 1720920 - DNA, 15 bp, Homo sapiens
atcctttcacgtgat

SEQ ID NO: 1720921 - DNA, 15 bp, Homo sapiens
tcctttcacgtgata

SEQ ID NO: 1720922 - DNA, 15 bp, Homo sapiens
cctttcacgtgataa

SEQ ID NO: 1720923 - DNA, 15 bp, Homo sapiens
ctttcacgtgataaa

SEQ ID NO: 1720924 - DNA, 15 bp, Homo sapiens
tttcacgtgataaaa

SEQ ID NO: 1720925 - DNA, 15 bp, Homo sapiens
ttcacgtgataaaat

SEQ ID NO: 1720926 - DNA, 15 bp, Homo sapiens
tcacgtgataaaatt

SEQ ID NO: 1720927 - DNA, 15 bp, Homo sapiens
cacgtgataaaattg

SEQ ID NO: 1720928 - DNA, 15 bp, Homo sapiens
acgtgataaaattga

SEQ ID NO: 1720929 - DNA, 15 bp, Homo sapiens
cgtgataaaattgat

SEQ ID NO: 1720930 - DNA, 15 bp, Homo sapiens
gtgataaaattgatg

SEQ ID NO: 1720931 - DNA, 15 bp, Homo sapiens
tgataaaattgatgt

SEQ ID NO: 1720932 - DNA, 15 bp, Homo sapiens
gataaaattgatgtt

SEQ ID NO: 1720933 - DNA, 15 bp, Homo sapiens
ataaaattgatgtta

SEQ ID NO: 1720934 - DNA, 15 bp, Homo sapiens
taaaattgatgttag

SEQ ID NO: 1720935 - DNA, 15 bp, Homo sapiens
aaaattgatgttaga

SEQ ID NO: 1720936 - DNA, 15 bp, Homo sapiens
aaattgatgttagac

SEQ ID NO: 1720937 - DNA, 15 bp, Homo sapiens
aattgatgttagact

SEQ ID NO: 1720938 - DNA, 15 bp, Homo sapiens
attgatgttagactg

SEQ ID NO: 1720939 - DNA, 15 bp, Homo sapiens
ttgatgttagactgg

SEQ ID NO: 1720940 - DNA, 15 bp, Homo sapiens
tgatgttagactggg

SEQ ID NO: 1720941 - DNA, 15 bp, Homo sapiens
gatgttagactggga

SEQ ID NO: 1720942 - DNA, 15 bp, Homo sapiens
tgttagactgggaac

SEQ ID NO: 1720943 - DNA, 15 bp, Homo sapiens
gttagactgggaaca

SEQ ID NO: 1720944 - DNA, 15 bp, Homo sapiens
ttagactgggaacaa

SEQ ID NO: 1720945 - DNA, 15 bp, Homo sapiens
tagactgggaacaat

SEQ ID NO: 1720946 - DNA, 15 bp, Homo sapiens
agactgggaacaatc

SEQ ID NO: 1720947 - DNA, 15 bp, Homo sapiens
gactgggaacaatct

SEQ ID NO: 1720948 - DNA, 15 bp, Homo sapiens
actgggaacaatcta

SEQ ID NO: 1720949 - DNA, 15 bp, Homo sapiens
ctgggaacaatctag

SEQ ID NO: 1720950 - DNA, 15 bp, Homo sapiens
tgggaacaatctaga

SEQ ID NO: 1720951 - DNA, 15 bp, Homo sapiens
gggaacaatctagat

SEQ ID NO: 1720952 - DNA, 15 bp, Homo sapiens
ggaacaatctagatc

SEQ ID NO: 1720953 - DNA, 15 bp, Homo sapiens
gaacaatctagatcc

SEQ ID NO: 1720954 - DNA, 15 bp, Homo sapiens
aacaatctagatccc

SEQ ID NO: 1720955 - DNA, 15 bp, Homo sapiens
acaatctagatccct

SEQ ID NO: 1720956 - DNA, 15 bp, Homo sapiens
caatctagatccctt

SEQ ID NO: 1720957 - DNA, 15 bp, Homo sapiens
aatctagatcccttt

SEQ ID NO: 1720958 - DNA, 15 bp, Homo sapiens
atctagatccctttg

SEQ ID NO: 1720959 - DNA, 15 bp, Homo sapiens
tctagatccctttga

SEQ ID NO: 1720960 - DNA, 15 bp, Homo sapiens
ctagatccctttgac

SEQ ID NO: 1720961 - DNA, 15 bp, Homo sapiens
tagatccctttgaca

SEQ ID NO: 1720962 - DNA, 15 bp, Homo sapiens
agatccctttgacag

SEQ ID NO: 1720963 - DNA, 15 bp, Homo sapiens
gatccctttgacagg

SEQ ID NO: 1720964 - DNA, 15 bp, Homo sapiens
atccctttgacagga

SEQ ID NO: 1720965 - DNA, 15 bp, Homo sapiens
tccctttgacaggat

SEQ ID NO: 1720966 - DNA, 15 bp, Homo sapiens
ccctttgacaggata

SEQ ID NO: 1720967 - DNA, 15 bp, Homo sapiens
cctttgacaggatat

SEQ ID NO: 1720968 - DNA, 15 bp, Homo sapiens
ctttgacaggatatg

SEQ ID NO: 1720969 - DNA, 15 bp, Homo sapiens
tttgacaggatatgc

SEQ ID NO: 1720970 - DNA, 15 bp, Homo sapiens
ttgacaggatatgcc

SEQ ID NO: 1720971 - DNA, 15 bp, Homo sapiens
tgacaggatatgcca

SEQ ID NO: 1720972 - DNA, 15 bp, Homo sapiens
gacaggatatgccag

SEQ ID NO: 1720973 - DNA, 15 bp, Homo sapiens
acaggatatgccaga

SEQ ID NO: 1720974 - DNA, 15 bp, Homo sapiens
caggatatgccagag

SEQ ID NO: 1720975 - DNA, 15 bp, Homo sapiens
aggatatgccagagg

SEQ ID NO: 1720976 - DNA, 15 bp, Homo sapiens
ggatatgccagaggt

SEQ ID NO: 1720977 - DNA, 15 bp, Homo sapiens
gatatgccagaggtg

SEQ ID NO: 1720978 - DNA, 15 bp, Homo sapiens
atatgccagaggtgg

SEQ ID NO: 1720979 - DNA, 15 bp, Homo sapiens
tatgccagaggtggg

SEQ ID NO: 1720980 - DNA, 15 bp, Homo sapiens
atgccagaggtggga

SEQ ID NO: 1720981 - DNA, 15 bp, Homo sapiens
tgccagaggtgggaa

SEQ ID NO: 1720982 - DNA, 15 bp, Homo sapiens
gccagaggtgggaag

SEQ ID NO: 1720983 - DNA, 15 bp, Homo sapiens
ccagaggtgggaaga

SEQ ID NO: 1720984 - DNA, 15 bp, Homo sapiens
cagaggtgggaagaa

SEQ ID NO: 1720985 - DNA, 15 bp, Homo sapiens
agaggtgggaagaaa

SEQ ID NO: 1720986 - DNA, 15 bp, Homo sapiens
gaggtgggaagaaaa

SEQ ID NO: 1720987 - DNA, 15 bp, Homo sapiens
aggtgggaagaaaaa

SEQ ID NO: 1720988 - DNA, 15 bp, Homo sapiens
ggtgggaagaaaaag

SEQ ID NO: 1720989 - DNA, 15 bp, Homo sapiens
gtgggaagaaaaagt

SEQ ID NO: 1720990 - DNA, 15 bp, Homo sapiens
tgggaagaaaaagtg

SEQ ID NO: 1720991 - DNA, 15 bp, Homo sapiens
gggaagaaaaagtgg

SEQ ID NO: 1720992 - DNA, 15 bp, Homo sapiens
ggaagaaaaagtggt

SEQ ID NO: 1720993 - DNA, 15 bp, Homo sapiens
gaagaaaaagtggtt

SEQ ID NO: 1720994 - DNA, 15 bp, Homo sapiens
aagaaaaagtggttc

SEQ ID NO: 1720995 - DNA, 15 bp, Homo sapiens
agaaaaagtggttca

SEQ ID NO: 1720996 - DNA, 15 bp, Homo sapiens
gaaaaagtggttcaa

SEQ ID NO: 1720997 - DNA, 15 bp, Homo sapiens
aaaaagtggttcaag

SEQ ID NO: 1720998 - DNA, 15 bp, Homo sapiens
aaaagtggttcaaga

SEQ ID NO: 1720999 - DNA, 15 bp, Homo sapiens
aaagtggttcaagaa

SEQ ID NO: 1721000 - DNA, 15 bp, Homo sapiens
aagtggttcaagaaa

SEQ ID NO: 1721001 - DNA, 15 bp, Homo sapiens
agtggttcaagaaag

SEQ ID NO: 1721002 - DNA, 15 bp, Homo sapiens
gtggttcaagaaagg

SEQ ID NO: 1721003 - DNA, 15 bp, Homo sapiens
tggttcaagaaagga

SEQ ID NO: 1721004 - DNA, 15 bp, Homo sapiens
ggttcaagaaaggat

SEQ ID NO: 1721005 - DNA, 15 bp, Homo sapiens
gttcaagaaaggatg

SEQ ID NO: 1721006 - DNA, 15 bp, Homo sapiens
ttcaagaaaggatga

SEQ ID NO: 1721007 - DNA, 15 bp, Homo sapiens
tcaagaaaggatgaa

SEQ ID NO: 1721008 - DNA, 15 bp, Homo sapiens
caagaaaggatgaat

SEQ ID NO: 1721009 - DNA, 15 bp, Homo sapiens
aagaaaggatgaatt

SEQ ID NO: 1721010 - DNA, 15 bp, Homo sapiens
agaaaggatgaattt

SEQ ID NO: 1721011 - DNA, 15 bp, Homo sapiens
gaaaggatgaatttg

SEQ ID NO: 1721012 - DNA, 15 bp, Homo sapiens
aaaggatgaatttga

SEQ ID NO: 1721013 - DNA, 15 bp, Homo sapiens
aaggatgaatttgaa

SEQ ID NO: 1721014 - DNA, 15 bp, Homo sapiens
aggatgaatttgaaa

SEQ ID NO: 1721015 - DNA, 15 bp, Homo sapiens
ggatgaatttgaaaa

SEQ ID NO: 1721016 - DNA, 15 bp, Homo sapiens
gatgaatttgaaaaa

SEQ ID NO: 1721017 - DNA, 15 bp, Homo sapiens
atgaatttgaaaaag

SEQ ID NO: 1721018 - DNA, 15 bp, Homo sapiens
tgaatttgaaaaagg

SEQ ID NO: 1721019 - DNA, 15 bp, Homo sapiens
gaatttgaaaaagga

SEQ ID NO: 1721020 - DNA, 15 bp, Homo sapiens
aatttgaaaaaggat

SEQ ID NO: 1721021 - DNA, 15 bp, Homo sapiens
atttgaaaaaggatg

SEQ ID NO: 1721022 - DNA, 15 bp, Homo sapiens
tttgaaaaaggatgg

SEQ ID NO: 1721023 - DNA, 15 bp, Homo sapiens
ttgaaaaaggatggg

SEQ ID NO: 1721024 - DNA, 15 bp, Homo sapiens
tgaaaaaggatgggt

SEQ ID NO: 1721025 - DNA, 15 bp, Homo sapiens
gaaaaaggatgggtt

SEQ ID NO: 1721026 - DNA, 15 bp, Homo sapiens
aaaaaggatgggtta

SEQ ID NO: 1721027 - DNA, 15 bp, Homo sapiens
aaaaggatgggttag

SEQ ID NO: 1721028 - DNA, 15 bp, Homo sapiens
aaaggatgggttaga

SEQ ID NO: 1721029 - DNA, 15 bp, Homo sapiens
aaggatgggttagaa

SEQ ID NO: 1721030 - DNA, 15 bp, Homo sapiens
aggatgggttagaag

SEQ ID NO: 1721031 - DNA, 15 bp, Homo sapiens
ggatgggttagaaga

SEQ ID NO: 1721032 - DNA, 15 bp, Homo sapiens
gatgggttagaagaa

SEQ ID NO: 1721033 - DNA, 15 bp, Homo sapiens
atgggttagaagaaa

SEQ ID NO: 1721034 - DNA, 15 bp, Homo sapiens
tgggttagaagaaat

SEQ ID NO: 1721035 - DNA, 15 bp, Homo sapiens
gggttagaagaaatg

SEQ ID NO: 1721036 - DNA, 15 bp, Homo sapiens
ggttagaagaaatgg

SEQ ID NO: 1721037 - DNA, 15 bp, Homo sapiens
gttagaagaaatggg

SEQ ID NO: 1721038 - DNA, 15 bp, Homo sapiens
ttagaagaaatgggg

SEQ ID NO: 1721039 - DNA, 15 bp, Homo sapiens
tagaagaaatgggga

SEQ ID NO: 1721040 - DNA, 15 bp, Homo sapiens
agaagaaatggggag

SEQ ID NO: 1721041 - DNA, 15 bp, Homo sapiens
gaagaaatggggagt

SEQ ID NO: 1721042 - DNA, 15 bp, Homo sapiens
aagaaatggggagta

SEQ ID NO: 1721043 - DNA, 15 bp, Homo sapiens
agaaatggggagtaa

SEQ ID NO: 1721044 - DNA, 15 bp, Homo sapiens
gaaatggggagtaaa

SEQ ID NO: 1721045 - DNA, 15 bp, Homo sapiens
aaatggggagtaaag

SEQ ID NO: 1721046 - DNA, 15 bp, Homo sapiens
aatggggagtaaagt

SEQ ID NO: 1721047 - DNA, 15 bp, Homo sapiens
atggggagtaaagtt

SEQ ID NO: 1721048 - DNA, 15 bp, Homo sapiens
tggggagtaaagttc

SEQ ID NO: 1721049 - DNA, 15 bp, Homo sapiens
ggggagtaaagttcc

SEQ ID NO: 1721050 - DNA, 15 bp, Homo sapiens
gggagtaaagttccc

SEQ ID NO: 1721051 - DNA, 15 bp, Homo sapiens
ggagtaaagttccca

SEQ ID NO: 1721052 - DNA, 15 bp, Homo sapiens
gagtaaagttcccag

SEQ ID NO: 1721053 - DNA, 15 bp, Homo sapiens
agtaaagttcccagt

SEQ ID NO: 1721054 - DNA, 15 bp, Homo sapiens
gtaaagttcccagtt

SEQ ID NO: 1721055 - DNA, 15 bp, Homo sapiens
taaagttcccagtta

SEQ ID NO: 1721056 - DNA, 15 bp, Homo sapiens
aaagttcccagttaa

SEQ ID NO: 1721057 - DNA, 15 bp, Homo sapiens
aagttcccagttaat

SEQ ID NO: 1721058 - DNA, 15 bp, Homo sapiens
agttcccagttaatt

SEQ ID NO: 1721059 - DNA, 15 bp, Homo sapiens
gttcccagttaattt

SEQ ID NO: 1721060 - DNA, 15 bp, Homo sapiens
ttcccagttaattta

SEQ ID NO: 1721061 - DNA, 15 bp, Homo sapiens
tcccagttaatttat

SEQ ID NO: 1721062 - DNA, 15 bp, Homo sapiens
cccagttaatttata

SEQ ID NO: 1721063 - DNA, 15 bp, Homo sapiens
ccagttaatttatag

SEQ ID NO: 1721064 - DNA, 15 bp, Homo sapiens
cagttaatttatagc

SEQ ID NO: 1721065 - DNA, 15 bp, Homo sapiens
agttaatttatagct

SEQ ID NO: 1721066 - DNA, 15 bp, Homo sapiens
gttaatttatagctg

SEQ ID NO: 1721067 - DNA, 15 bp, Homo sapiens
ttaatttatagctgg

SEQ ID NO: 1721068 - DNA, 15 bp, Homo sapiens
taatttatagctgga

SEQ ID NO: 1721069 - DNA, 15 bp, Homo sapiens
aatttatagctggaa

SEQ ID NO: 1721070 - DNA, 15 bp, Homo sapiens
atttatagctggaaa

SEQ ID NO: 1721071 - DNA, 15 bp, Homo sapiens
tttatagctggaaat

SEQ ID NO: 1721072 - DNA, 15 bp, Homo sapiens
ttatagctggaaata

SEQ ID NO: 1721073 - DNA, 15 bp, Homo sapiens
tatagctggaaatag

SEQ ID NO: 1721074 - DNA, 15 bp, Homo sapiens
atagctggaaatagt

SEQ ID NO: 1721075 - DNA, 15 bp, Homo sapiens
tagctggaaatagtc

SEQ ID NO: 1721076 - DNA, 15 bp, Homo sapiens
agctggaaatagtca

SEQ ID NO: 1721077 - DNA, 15 bp, Homo sapiens
gctggaaatagtcac

SEQ ID NO: 1721078 - DNA, 15 bp, Homo sapiens
ctggaaatagtcaca

SEQ ID NO: 1721079 - DNA, 15 bp, Homo sapiens
tggaaatagtcacaa

SEQ ID NO: 1721080 - DNA, 15 bp, Homo sapiens
ggaaatagtcacaaa

SEQ ID NO: 1721081 - DNA, 15 bp, Homo sapiens
gaaatagtcacaaac

SEQ ID NO: 1721082 - DNA, 15 bp, Homo sapiens
aaatagtcacaaacc

SEQ ID NO: 1721083 - DNA, 15 bp, Homo sapiens
aatagtcacaaacca

SEQ ID NO: 1721084 - DNA, 15 bp, Homo sapiens
atagtcacaaaccaa

SEQ ID NO: 1721085 - DNA, 15 bp, Homo sapiens
tagtcacaaaccaat

SEQ ID NO: 1721086 - DNA, 15 bp, Homo sapiens
agtcacaaaccaatt

SEQ ID NO: 1721087 - DNA, 15 bp, Homo sapiens
gtcacaaaccaattc

SEQ ID NO: 1721088 - DNA, 15 bp, Homo sapiens
tcacaaaccaattct

SEQ ID NO: 1721089 - DNA, 15 bp, Homo sapiens
cacaaaccaattctt

SEQ ID NO: 1721090 - DNA, 15 bp, Homo sapiens
acaaaccaattcttc

SEQ ID NO: 1721091 - DNA, 15 bp, Homo sapiens
caaaccaattcttca

SEQ ID NO: 1721092 - DNA, 15 bp, Homo sapiens
aaaccaattcttcaa

SEQ ID NO: 1721093 - DNA, 15 bp, Homo sapiens
aaccaattcttcaag

SEQ ID NO: 1721094 - DNA, 15 bp, Homo sapiens
accaattcttcaagt

SEQ ID NO: 1721095 - DNA, 15 bp, Homo sapiens
ccaattcttcaagtc

SEQ ID NO: 1721096 - DNA, 15 bp, Homo sapiens
caattcttcaagtcc

SEQ ID NO: 1721097 - DNA, 15 bp, Homo sapiens
aattcttcaagtcca

SEQ ID NO: 1721098 - DNA, 15 bp, Homo sapiens
attcttcaagtccac

SEQ ID NO: 1721099 - DNA, 15 bp, Homo sapiens
ttcttcaagtccaca

SEQ ID NO: 1721100 - DNA, 15 bp, Homo sapiens
tcttcaagtccacag

SEQ ID NO: 1721101 - DNA, 15 bp, Homo sapiens
cttcaagtccacagg

SEQ ID NO: 1721102 - DNA, 15 bp, Homo sapiens
ttcaagtccacaggc

SEQ ID NO: 1721103 - DNA, 15 bp, Homo sapiens
tcaagtccacaggcc

SEQ ID NO: 1721104 - DNA, 15 bp, Homo sapiens
caagtccacaggcca

SEQ ID NO: 1721105 - DNA, 15 bp, Homo sapiens
aagtccacaggccag

SEQ ID NO: 1721106 - DNA, 15 bp, Homo sapiens
agtccacaggccaga

SEQ ID NO: 1721107 - DNA, 15 bp, Homo sapiens
gtccacaggccagag

SEQ ID NO: 1721108 - DNA, 15 bp, Homo sapiens
tccacaggccagagg

SEQ ID NO: 1721109 - DNA, 15 bp, Homo sapiens
ccacaggccagaggt

SEQ ID NO: 1721110 - DNA, 15 bp, Homo sapiens
cacaggccagaggta

SEQ ID NO: 1721111 - DNA, 15 bp, Homo sapiens
acaggccagaggtat

SEQ ID NO: 1721112 - DNA, 15 bp, Homo sapiens
caggccagaggtatc

SEQ ID NO: 1721113 - DNA, 15 bp, Homo sapiens
aggccagaggtatcc

SEQ ID NO: 1721114 - DNA, 15 bp, Homo sapiens
ggccagaggtatccc

SEQ ID NO: 1721115 - DNA, 15 bp, Homo sapiens
gccagaggtatccct

SEQ ID NO: 1721116 - DNA, 15 bp, Homo sapiens
ccagaggtatccctg

SEQ ID NO: 1721117 - DNA, 15 bp, Homo sapiens
cagaggtatccctgg

SEQ ID NO: 1721118 - DNA, 15 bp, Homo sapiens
agaggtatccctgga

SEQ ID NO: 1721119 - DNA, 15 bp, Homo sapiens
gaggtatccctggag

SEQ ID NO: 1721120 - DNA, 15 bp, Homo sapiens
aggtatccctggagt

SEQ ID NO: 1721121 - DNA, 15 bp, Homo sapiens
ggtatccctggagtc

SEQ ID NO: 1721122 - DNA, 15 bp, Homo sapiens
gtatccctggagtcc

SEQ ID NO: 1721123 - DNA, 15 bp, Homo sapiens
tatccctggagtcca

SEQ ID NO: 1721124 - DNA, 15 bp, Homo sapiens
atccctggagtccac

SEQ ID NO: 1721125 - DNA, 15 bp, Homo sapiens
tccctggagtccacc

SEQ ID NO: 1721126 - DNA, 15 bp, Homo sapiens
ccctggagtccaccc

SEQ ID NO: 1721127 - DNA, 15 bp, Homo sapiens
cctggagtccaccca

SEQ ID NO: 1721128 - DNA, 15 bp, Homo sapiens
ctggagtccacccag

SEQ ID NO: 1721129 - DNA, 15 bp, Homo sapiens
tggagtccacccaga

SEQ ID NO: 1721130 - DNA, 15 bp, Homo sapiens
ggagtccacccagat

SEQ ID NO: 1721131 - DNA, 15 bp, Homo sapiens
gagtccacccagatc

SEQ ID NO: 1721132 - DNA, 15 bp, Homo sapiens
agtccacccagatct

SEQ ID NO: 1721133 - DNA, 15 bp, Homo sapiens
gtccacccagatctg

SEQ ID NO: 1721134 - DNA, 15 bp, Homo sapiens
tccacccagatctgt

SEQ ID NO: 1721135 - DNA, 15 bp, Homo sapiens
ccacccagatctgtt

SEQ ID NO: 1721136 - DNA, 15 bp, Homo sapiens
cacccagatctgttg

SEQ ID NO: 1721137 - DNA, 15 bp, Homo sapiens
acccagatctgttgc

SEQ ID NO: 1721138 - DNA, 15 bp, Homo sapiens
cccagatctgttgca

SEQ ID NO: 1721139 - DNA, 15 bp, Homo sapiens
ccagatctgttgcaa

SEQ ID NO: 1721140 - DNA, 15 bp, Homo sapiens
cagatctgttgcaag

SEQ ID NO: 1721141 - DNA, 15 bp, Homo sapiens
agatctgttgcaagt

SEQ ID NO: 1721142 - DNA, 15 bp, Homo sapiens
gatctgttgcaagtg

SEQ ID NO: 1721143 - DNA, 15 bp, Homo sapiens
atctgttgcaagtga

SEQ ID NO: 1721144 - DNA, 15 bp, Homo sapiens
tctgttgcaagtgag

SEQ ID NO: 1721145 - DNA, 15 bp, Homo sapiens
ctgttgcaagtgagc

SEQ ID NO: 1721146 - DNA, 15 bp, Homo sapiens
tgttgcaagtgagcc

SEQ ID NO: 1721147 - DNA, 15 bp, Homo sapiens
gttgcaagtgagccc

SEQ ID NO: 1721148 - DNA, 15 bp, Homo sapiens
ttgcaagtgagccca

SEQ ID NO: 1721149 - DNA, 15 bp, Homo sapiens
tgcaagtgagcccag

SEQ ID NO: 1721150 - DNA, 15 bp, Homo sapiens
gcaagtgagcccaga

SEQ ID NO: 1721151 - DNA, 15 bp, Homo sapiens
caagtgagcccagaa

SEQ ID NO: 1721152 - DNA, 15 bp, Homo sapiens
aagtgagcccagaat

SEQ ID NO: 1721153 - DNA, 15 bp, Homo sapiens
agtgagcccagaatc

SEQ ID NO: 1721154 - DNA, 15 bp, Homo sapiens
gtgagcccagaatca

SEQ ID NO: 1721155 - DNA, 15 bp, Homo sapiens
tgagcccagaatcaa

SEQ ID NO: 1721156 - DNA, 15 bp, Homo sapiens
gagcccagaatcaat

SEQ ID NO: 1721157 - DNA, 15 bp, Homo sapiens
agcccagaatcaatg

SEQ ID NO: 1721158 - DNA, 15 bp, Homo sapiens
gcccagaatcaatgg

SEQ ID NO: 1721159 - DNA, 15 bp, Homo sapiens
cccagaatcaatgga

SEQ ID NO: 1721160 - DNA, 15 bp, Homo sapiens
ccagaatcaatggag

SEQ ID NO: 1721161 - DNA, 15 bp, Homo sapiens
cagaatcaatggagg

SEQ ID NO: 1721162 - DNA, 15 bp, Homo sapiens
agaatcaatggaggc

SEQ ID NO: 1721163 - DNA, 15 bp, Homo sapiens
gaatcaatggaggcc

SEQ ID NO: 1721164 - DNA, 15 bp, Homo sapiens
aatcaatggaggcct

SEQ ID NO: 1721165 - DNA, 15 bp, Homo sapiens
atcaatggaggcctc

SEQ ID NO: 1721166 - DNA, 15 bp, Homo sapiens
tcaatggaggcctcc

SEQ ID NO: 1721167 - DNA, 15 bp, Homo sapiens
caatggaggcctccc

SEQ ID NO: 1721168 - DNA, 15 bp, Homo sapiens
aatggaggcctcccc

SEQ ID NO: 1721169 - DNA, 15 bp, Homo sapiens
atggaggcctccccc

SEQ ID NO: 1721170 - DNA, 15 bp, Homo sapiens
tggaggcctcccccc

SEQ ID NO: 1721171 - DNA, 15 bp, Homo sapiens
ggaggcctcccccca

SEQ ID NO: 1721172 - DNA, 15 bp, Homo sapiens
gaggcctccccccag

SEQ ID NO: 1721173 - DNA, 15 bp, Homo sapiens
aggcctccccccagg

SEQ ID NO: 1721174 - DNA, 15 bp, Homo sapiens
ggcctccccccaggg

SEQ ID NO: 1721175 - DNA, 15 bp, Homo sapiens
gcctccccccaggga

SEQ ID NO: 1721176 - DNA, 15 bp, Homo sapiens
cctccccccagggaa

SEQ ID NO: 1721177 - DNA, 15 bp, Homo sapiens
ctccccccagggaag

SEQ ID NO: 1721178 - DNA, 15 bp, Homo sapiens
tccccccagggaaga

SEQ ID NO: 1721179 - DNA, 15 bp, Homo sapiens
ccccccagggaagag

SEQ ID NO: 1721180 - DNA, 15 bp, Homo sapiens
cccccagggaagagc

SEQ ID NO: 1721181 - DNA, 15 bp, Homo sapiens
ccccagggaagagcc

SEQ ID NO: 1721182 - DNA, 15 bp, Homo sapiens
cccagggaagagcct

SEQ ID NO: 1721183 - DNA, 15 bp, Homo sapiens
ccagggaagagccta

SEQ ID NO: 1721184 - DNA, 15 bp, Homo sapiens
cagggaagagcctat

SEQ ID NO: 1721185 - DNA, 15 bp, Homo sapiens
agggaagagcctata

SEQ ID NO: 1721186 - DNA, 15 bp, Homo sapiens
gggaagagcctatat

SEQ ID NO: 1721187 - DNA, 15 bp, Homo sapiens
ggaagagcctatatt

SEQ ID NO: 1721188 - DNA, 15 bp, Homo sapiens
gaagagcctatattg

SEQ ID NO: 1721189 - DNA, 15 bp, Homo sapiens
aagagcctatattga

SEQ ID NO: 1721190 - DNA, 15 bp, Homo sapiens
agagcctatattgaa

SEQ ID NO: 1721191 - DNA, 15 bp, Homo sapiens
gagcctatattgaac

SEQ ID NO: 1721192 - DNA, 15 bp, Homo sapiens
agcctatattgaact

SEQ ID NO: 1721193 - DNA, 15 bp, Homo sapiens
gcctatattgaactc

SEQ ID NO: 1721194 - DNA, 15 bp, Homo sapiens
cctatattgaactca

SEQ ID NO: 1721195 - DNA, 15 bp, Homo sapiens
ctatattgaactcac

SEQ ID NO: 1721196 - DNA, 15 bp, Homo sapiens
tatattgaactcacc

SEQ ID NO: 1721197 - DNA, 15 bp, Homo sapiens
atattgaactcaccc

SEQ ID NO: 1721198 - DNA, 15 bp, Homo sapiens
tattgaactcaccct

SEQ ID NO: 1721199 - DNA, 15 bp, Homo sapiens
attgaactcaccctt

SEQ ID NO: 1721200 - DNA, 15 bp, Homo sapiens
ttgaactcacccttg

SEQ ID NO: 1721201 - DNA, 15 bp, Homo sapiens
tgaactcacccttgc

SEQ ID NO: 1721202 - DNA, 15 bp, Homo sapiens
gaactcacccttgca

SEQ ID NO: 1721203 - DNA, 15 bp, Homo sapiens
aactcacccttgcat

SEQ ID NO: 1721204 - DNA, 15 bp, Homo sapiens
actcacccttgcatc

SEQ ID NO: 1721205 - DNA, 15 bp, Homo sapiens
ctcacccttgcatct

SEQ ID NO: 1721206 - DNA, 15 bp, Homo sapiens
tcacccttgcatctc

SEQ ID NO: 1721207 - DNA, 15 bp, Homo sapiens
cacccttgcatctcc

SEQ ID NO: 1721208 - DNA, 15 bp, Homo sapiens
acccttgcatctcca

SEQ ID NO: 1721209 - DNA, 15 bp, Homo sapiens
cccttgcatctccag

SEQ ID NO: 1721210 - DNA, 15 bp, Homo sapiens
ccttgcatctccagc

SEQ ID NO: 1721211 - DNA, 15 bp, Homo sapiens
cttgcatctccagca

SEQ ID NO: 1721212 - DNA, 15 bp, Homo sapiens
ttgcatctccagcag

SEQ ID NO: 1721213 - DNA, 15 bp, Homo sapiens
tgcatctccagcagc

SEQ ID NO: 1721214 - DNA, 15 bp, Homo sapiens
gcatctccagcagct

SEQ ID NO: 1721215 - DNA, 15 bp, Homo sapiens
catctccagcagctg

SEQ ID NO: 1721216 - DNA, 15 bp, Homo sapiens
atctccagcagctga

SEQ ID NO: 1721217 - DNA, 15 bp, Homo sapiens
tctccagcagctgaa

SEQ ID NO: 1721218 - DNA, 15 bp, Homo sapiens
ctccagcagctgaag

SEQ ID NO: 1721219 - DNA, 15 bp, Homo sapiens
tccagcagctgaagg

SEQ ID NO: 1721220 - DNA, 15 bp, Homo sapiens
ccagcagctgaaggc

SEQ ID NO: 1721221 - DNA, 15 bp, Homo sapiens
cagcagctgaaggca

SEQ ID NO: 1721222 - DNA, 15 bp, Homo sapiens
agcagctgaaggcat

SEQ ID NO: 1721223 - DNA, 15 bp, Homo sapiens
gcagctgaaggcatt

SEQ ID NO: 1721224 - DNA, 15 bp, Homo sapiens
cagctgaaggcattt

SEQ ID NO: 1721225 - DNA, 15 bp, Homo sapiens
agctgaaggcattta

SEQ ID NO: 1721226 - DNA, 15 bp, Homo sapiens
gctgaaggcatttaa

SEQ ID NO: 1721227 - DNA, 15 bp, Homo sapiens
ctgaaggcatttaat

SEQ ID NO: 1721228 - DNA, 15 bp, Homo sapiens
tgaaggcatttaata

SEQ ID NO: 1721229 - DNA, 15 bp, Homo sapiens
gaaggcatttaatac

SEQ ID NO: 1721230 - DNA, 15 bp, Homo sapiens
aaggcatttaataca

SEQ ID NO: 1721231 - DNA, 15 bp, Homo sapiens
aggcatttaatacat

SEQ ID NO: 1721232 - DNA, 15 bp, Homo sapiens
ggcatttaatacatt

SEQ ID NO: 1721233 - DNA, 15 bp, Homo sapiens
gcatttaatacattc

SEQ ID NO: 1721234 - DNA, 15 bp, Homo sapiens
catttaatacattct

SEQ ID NO: 1721235 - DNA, 15 bp, Homo sapiens
atttaatacattctg

SEQ ID NO: 1721236 - DNA, 15 bp, Homo sapiens
tttaatacattctgg

SEQ ID NO: 1721237 - DNA, 15 bp, Homo sapiens
ttaatacattctggt

SEQ ID NO: 1721238 - DNA, 15 bp, Homo sapiens
taatacattctggtc

SEQ ID NO: 1721239 - DNA, 15 bp, Homo sapiens
aatacattctggtct

SEQ ID NO: 1721240 - DNA, 15 bp, Homo sapiens
atacattctggtctg

SEQ ID NO: 1721241 - DNA, 15 bp, Homo sapiens
tacattctggtctgg

SEQ ID NO: 1721242 - DNA, 15 bp, Homo sapiens
acattctggtctggt

SEQ ID NO: 1721243 - DNA, 15 bp, Homo sapiens
cattctggtctggtg

SEQ ID NO: 1721244 - DNA, 15 bp, Homo sapiens
attctggtctggtgg

SEQ ID NO: 1721245 - DNA, 15 bp, Homo sapiens
ttctggtctggtggg

SEQ ID NO: 1721246 - DNA, 15 bp, Homo sapiens
tctggtctggtgggt

SEQ ID NO: 1721247 - DNA, 15 bp, Homo sapiens
ctggtctggtgggtg

SEQ ID NO: 1721248 - DNA, 15 bp, Homo sapiens
tggtctggtgggtgg

SEQ ID NO: 1721249 - DNA, 15 bp, Homo sapiens
ggtctggtgggtggg

SEQ ID NO: 1721250 - DNA, 15 bp, Homo sapiens
gtctggtgggtgggt

SEQ ID NO: 1721251 - DNA, 15 bp, Homo sapiens
tctggtgggtgggtg

SEQ ID NO: 1721252 - DNA, 15 bp, Homo sapiens
ctggtgggtgggtga

SEQ ID NO: 1721253 - DNA, 15 bp, Homo sapiens
tggtgggtgggtgag

SEQ ID NO: 1721254 - DNA, 15 bp, Homo sapiens
ggtgggtgggtgagt

SEQ ID NO: 1721255 - DNA, 15 bp, Homo sapiens
gtgggtgggtgagtt

SEQ ID NO: 1721256 - DNA, 15 bp, Homo sapiens
tgggtgggtgagtta

SEQ ID NO: 1721257 - DNA, 15 bp, Homo sapiens
gggtgggtgagttaa

SEQ ID NO: 1721258 - DNA, 15 bp, Homo sapiens
ggtgggtgagttaaa

SEQ ID NO: 1721259 - DNA, 15 bp, Homo sapiens
gtgggtgagttaaaa

SEQ ID NO: 1721260 - DNA, 15 bp, Homo sapiens
tgggtgagttaaaag

SEQ ID NO: 1721261 - DNA, 15 bp, Homo sapiens
gggtgagttaaaaga

SEQ ID NO: 1721262 - DNA, 15 bp, Homo sapiens
ggtgagttaaaagac

SEQ ID NO: 1721263 - DNA, 15 bp, Homo sapiens
gtgagttaaaagaca

SEQ ID NO: 1721264 - DNA, 15 bp, Homo sapiens
tgagttaaaagacaa

SEQ ID NO: 1721265 - DNA, 15 bp, Homo sapiens
gagttaaaagacaag

SEQ ID NO: 1721266 - DNA, 15 bp, Homo sapiens
agttaaaagacaagc

SEQ ID NO: 1721267 - DNA, 15 bp, Homo sapiens
gttaaaagacaagca

SEQ ID NO: 1721268 - DNA, 15 bp, Homo sapiens
ttaaaagacaagcat

SEQ ID NO: 1721269 - DNA, 15 bp, Homo sapiens
taaaagacaagcatg

SEQ ID NO: 1721270 - DNA, 15 bp, Homo sapiens
aaaagacaagcatgg

SEQ ID NO: 1721271 - DNA, 15 bp, Homo sapiens
aaagacaagcatgga

SEQ ID NO: 1721272 - DNA, 15 bp, Homo sapiens
aagacaagcatggac

SEQ ID NO: 1721273 - DNA, 15 bp, Homo sapiens
agacaagcatggaca

SEQ ID NO: 1721274 - DNA, 15 bp, Homo sapiens
gacaagcatggacag

SEQ ID NO: 1721275 - DNA, 15 bp, Homo sapiens
acaagcatggacaga

SEQ ID NO: 1721276 - DNA, 15 bp, Homo sapiens
caagcatggacagaa

SEQ ID NO: 1721277 - DNA, 15 bp, Homo sapiens
aagcatggacagaaa

SEQ ID NO: 1721278 - DNA, 15 bp, Homo sapiens
agcatggacagaaag

SEQ ID NO: 1721279 - DNA, 15 bp, Homo sapiens
gcatggacagaaagg

SEQ ID NO: 1721280 - DNA, 15 bp, Homo sapiens
catggacagaaaggg

SEQ ID NO: 1721281 - DNA, 15 bp, Homo sapiens
atggacagaaagggc

SEQ ID NO: 1721282 - DNA, 15 bp, Homo sapiens
tggacagaaagggcc

SEQ ID NO: 1721283 - DNA, 15 bp, Homo sapiens
ggacagaaagggccc

SEQ ID NO: 1721284 - DNA, 15 bp, Homo sapiens
gacagaaagggccct

SEQ ID NO: 1721285 - DNA, 15 bp, Homo sapiens
acagaaagggcccta

SEQ ID NO: 1721286 - DNA, 15 bp, Homo sapiens
cagaaagggccctag

SEQ ID NO: 1721287 - DNA, 15 bp, Homo sapiens
agaaagggccctagt

SEQ ID NO: 1721288 - DNA, 15 bp, Homo sapiens
gaaagggccctagtt

SEQ ID NO: 1721289 - DNA, 15 bp, Homo sapiens
aaagggccctagtta

SEQ ID NO: 1721290 - DNA, 15 bp, Homo sapiens
aagggccctagttaa

SEQ ID NO: 1721291 - DNA, 15 bp, Homo sapiens
agggccctagttaag

SEQ ID NO: 1721292 - DNA, 15 bp, Homo sapiens
gggccctagttaagt

SEQ ID NO: 1721293 - DNA, 15 bp, Homo sapiens
ggccctagttaagtc

SEQ ID NO: 1721294 - DNA, 15 bp, Homo sapiens
gccctagttaagtcc

SEQ ID NO: 1721295 - DNA, 15 bp, Homo sapiens
ccctagttaagtccg

SEQ ID NO: 1721296 - DNA, 15 bp, Homo sapiens
cctagttaagtccgt

SEQ ID NO: 1721297 - DNA, 15 bp, Homo sapiens
ctagttaagtccgtg

SEQ ID NO: 1721298 - DNA, 15 bp, Homo sapiens
tagttaagtccgtgg

SEQ ID NO: 1721299 - DNA, 15 bp, Homo sapiens
agttaagtccgtgga

SEQ ID NO: 1721300 - DNA, 15 bp, Homo sapiens
gttaagtccgtggag

SEQ ID NO: 1721301 - DNA, 15 bp, Homo sapiens
ttaagtccgtggaga

SEQ ID NO: 1721302 - DNA, 15 bp, Homo sapiens
taagtccgtggagat

SEQ ID NO: 1721303 - DNA, 15 bp, Homo sapiens
aagtccgtggagatt

SEQ ID NO: 1721304 - DNA, 15 bp, Homo sapiens
agtccgtggagattt

SEQ ID NO: 1721305 - DNA, 15 bp, Homo sapiens
gtccgtggagatttt

SEQ ID NO: 1721306 - DNA, 15 bp, Homo sapiens
tccgtggagatttta

SEQ ID NO: 1721307 - DNA, 15 bp, Homo sapiens
ccgtggagattttag

SEQ ID NO: 1721308 - DNA, 15 bp, Homo sapiens
cgtggagattttaga

SEQ ID NO: 1721309 - DNA, 15 bp, Homo sapiens
gtggagattttagaa

SEQ ID NO: 1721310 - DNA, 15 bp, Homo sapiens
tggagattttagaag

SEQ ID NO: 1721311 - DNA, 15 bp, Homo sapiens
ggagattttagaagc

SEQ ID NO: 1721312 - DNA, 15 bp, Homo sapiens
gagattttagaagct

SEQ ID NO: 1721313 - DNA, 15 bp, Homo sapiens
agattttagaagctt

SEQ ID NO: 1721314 - DNA, 15 bp, Homo sapiens
gattttagaagcttt

SEQ ID NO: 1721315 - DNA, 15 bp, Homo sapiens
attttagaagctttt

SEQ ID NO: 1721316 - DNA, 15 bp, Homo sapiens
tttagaagctttttg

SEQ ID NO: 1721317 - DNA, 15 bp, Homo sapiens
ttagaagctttttgg

SEQ ID NO: 1721318 - DNA, 15 bp, Homo sapiens
tagaagctttttgga

SEQ ID NO: 1721319 - DNA, 15 bp, Homo sapiens
agaagctttttggat

SEQ ID NO: 1721320 - DNA, 15 bp, Homo sapiens
gaagctttttggatc

SEQ ID NO: 1721321 - DNA, 15 bp, Homo sapiens
aagctttttggatct

SEQ ID NO: 1721322 - DNA, 15 bp, Homo sapiens
agctttttggatctg

SEQ ID NO: 1721323 - DNA, 15 bp, Homo sapiens
gctttttggatctgg

SEQ ID NO: 1721324 - DNA, 15 bp, Homo sapiens
ctttttggatctgga

SEQ ID NO: 1721325 - DNA, 15 bp, Homo sapiens
tttttggatctggat

SEQ ID NO: 1721326 - DNA, 15 bp, Homo sapiens
ttttggatctggatt

SEQ ID NO: 1721327 - DNA, 15 bp, Homo sapiens
tttggatctggattt

SEQ ID NO: 1721328 - DNA, 15 bp, Homo sapiens
ttggatctggatttc

SEQ ID NO: 1721329 - DNA, 15 bp, Homo sapiens
tggatctggatttct

SEQ ID NO: 1721330 - DNA, 15 bp, Homo sapiens
ggatctggatttcta

SEQ ID NO: 1721331 - DNA, 15 bp, Homo sapiens
gatctggatttctaa

SEQ ID NO: 1721332 - DNA, 15 bp, Homo sapiens
atctggatttctaat

SEQ ID NO: 1721333 - DNA, 15 bp, Homo sapiens
tctggatttctaatt

SEQ ID NO: 1721334 - DNA, 15 bp, Homo sapiens
ctggatttctaattt

SEQ ID NO: 1721335 - DNA, 15 bp, Homo sapiens
tggatttctaatttt

SEQ ID NO: 1721336 - DNA, 15 bp, Homo sapiens
ggatttctaattttg

SEQ ID NO: 1721337 - DNA, 15 bp, Homo sapiens
gatttctaattttgt

SEQ ID NO: 1721338 - DNA, 15 bp, Homo sapiens
atttctaattttgtt

SEQ ID NO: 1721339 - DNA, 15 bp, Homo sapiens
tttctaattttgttc

SEQ ID NO: 1721340 - DNA, 15 bp, Homo sapiens
ttctaattttgttca

SEQ ID NO: 1721341 - DNA, 15 bp, Homo sapiens
tctaattttgttcat

SEQ ID NO: 1721342 - DNA, 15 bp, Homo sapiens
ctaattttgttcatc

SEQ ID NO: 1721343 - DNA, 15 bp, Homo sapiens
taattttgttcatcc

SEQ ID NO: 1721344 - DNA, 15 bp, Homo sapiens
aattttgttcatcct

SEQ ID NO: 1721345 - DNA, 15 bp, Homo sapiens
attttgttcatcctc

SEQ ID NO: 1721346 - DNA, 15 bp, Homo sapiens
ttttgttcatcctca

SEQ ID NO: 1721347 - DNA, 15 bp, Homo sapiens
tttgttcatcctcaa

SEQ ID NO: 1721348 - DNA, 15 bp, Homo sapiens
ttgttcatcctcaaa

SEQ ID NO: 1721349 - DNA, 15 bp, Homo sapiens
tgttcatcctcaaaa

SEQ ID NO: 1721350 - DNA, 15 bp, Homo sapiens
gttcatcctcaaaaa

SEQ ID NO: 1721351 - DNA, 15 bp, Homo sapiens
ttcatcctcaaaaag

SEQ ID NO: 1721352 - DNA, 15 bp, Homo sapiens
tcatcctcaaaaagc

SEQ ID NO: 1721353 - DNA, 15 bp, Homo sapiens
catcctcaaaaagcc

SEQ ID NO: 1721354 - DNA, 15 bp, Homo sapiens
atcctcaaaaagcct

SEQ ID NO: 1721355 - DNA, 15 bp, Homo sapiens
tcctcaaaaagcctg

SEQ ID NO: 1721356 - DNA, 15 bp, Homo sapiens
cctcaaaaagcctgg

SEQ ID NO: 1721357 - DNA, 15 bp, Homo sapiens
ctcaaaaagcctggc

SEQ ID NO: 1721358 - DNA, 15 bp, Homo sapiens
tcaaaaagcctggca

SEQ ID NO: 1721359 - DNA, 15 bp, Homo sapiens
caaaaagcctggcat

SEQ ID NO: 1721360 - DNA, 15 bp, Homo sapiens
aaaaagcctggcatc

SEQ ID NO: 1721361 - DNA, 15 bp, Homo sapiens
aaaagcctggcatca

SEQ ID NO: 1721362 - DNA, 15 bp, Homo sapiens
aaagcctggcatcat

SEQ ID NO: 1721363 - DNA, 15 bp, Homo sapiens
aagcctggcatcatg

SEQ ID NO: 1721364 - DNA, 15 bp, Homo sapiens
agcctggcatcatgt

SEQ ID NO: 1721365 - DNA, 15 bp, Homo sapiens
gcctggcatcatgta

SEQ ID NO: 1721366 - DNA, 15 bp, Homo sapiens
cctggcatcatgtaa

SEQ ID NO: 1721367 - DNA, 15 bp, Homo sapiens
ctggcatcatgtaac

SEQ ID NO: 1721368 - DNA, 15 bp, Homo sapiens
tggcatcatgtaact

SEQ ID NO: 1721369 - DNA, 15 bp, Homo sapiens
ggcatcatgtaactt

SEQ ID NO: 1721370 - DNA, 15 bp, Homo sapiens
gcatcatgtaacttg

SEQ ID NO: 1721371 - DNA, 15 bp, Homo sapiens
catcatgtaacttgg

SEQ ID NO: 1721372 - DNA, 15 bp, Homo sapiens
atcatgtaacttggt

SEQ ID NO: 1721373 - DNA, 15 bp, Homo sapiens
tcatgtaacttggtg

SEQ ID NO: 1721374 - DNA, 15 bp, Homo sapiens
catgtaacttggtgt

SEQ ID NO: 1721375 - DNA, 15 bp, Homo sapiens
atgtaacttggtgtc

SEQ ID NO: 1721376 - DNA, 15 bp, Homo sapiens
tgtaacttggtgtca

SEQ ID NO: 1721377 - DNA, 15 bp, Homo sapiens
gtaacttggtgtcag

SEQ ID NO: 1721378 - DNA, 15 bp, Homo sapiens
taacttggtgtcaga

SEQ ID NO: 1721379 - DNA, 15 bp, Homo sapiens
aacttggtgtcagag

SEQ ID NO: 1721380 - DNA, 15 bp, Homo sapiens
acttggtgtcagagt

SEQ ID NO: 1721381 - DNA, 15 bp, Homo sapiens
cttggtgtcagagtt

SEQ ID NO: 1721382 - DNA, 15 bp, Homo sapiens
ttggtgtcagagttg

SEQ ID NO: 1721383 - DNA, 15 bp, Homo sapiens
tggtgtcagagttgt

SEQ ID NO: 1721384 - DNA, 15 bp, Homo sapiens
ggtgtcagagttgtg

SEQ ID NO: 1721385 - DNA, 15 bp, Homo sapiens
gtgtcagagttgtgt

SEQ ID NO: 1721386 - DNA, 15 bp, Homo sapiens
tgtcagagttgtgtt

SEQ ID NO: 1721387 - DNA, 15 bp, Homo sapiens
gtcagagttgtgttt

SEQ ID NO: 1721388 - DNA, 15 bp, Homo sapiens
tcagagttgtgtttc

SEQ ID NO: 1721389 - DNA, 15 bp, Homo sapiens
cagagttgtgtttca

SEQ ID NO: 1721390 - DNA, 15 bp, Homo sapiens
agagttgtgtttcat

SEQ ID NO: 1721391 - DNA, 15 bp, Homo sapiens
gagttgtgtttcatt

SEQ ID NO: 1721392 - DNA, 15 bp, Homo sapiens
agttgtgtttcattc

SEQ ID NO: 1721393 - DNA, 15 bp, Homo sapiens
gttgtgtttcattca

SEQ ID NO: 1721394 - DNA, 15 bp, Homo sapiens
ttgtgtttcattcag

SEQ ID NO: 1721395 - DNA, 15 bp, Homo sapiens
tgtgtttcattcagg

SEQ ID NO: 1721396 - DNA, 15 bp, Homo sapiens
gtgtttcattcagga

SEQ ID NO: 1721397 - DNA, 15 bp, Homo sapiens
tgtttcattcaggaa

SEQ ID NO: 1721398 - DNA, 15 bp, Homo sapiens
gtttcattcaggaag

SEQ ID NO: 1721399 - DNA, 15 bp, Homo sapiens
tttcattcaggaagc

SEQ ID NO: 1721400 - DNA, 15 bp, Homo sapiens
ttcattcaggaagca

SEQ ID NO: 1721401 - DNA, 15 bp, Homo sapiens
tcattcaggaagcac

SEQ ID NO: 1721402 - DNA, 15 bp, Homo sapiens
cattcaggaagcaca

SEQ ID NO: 1721403 - DNA, 15 bp, Homo sapiens
attcaggaagcacat

SEQ ID NO: 1721404 - DNA, 15 bp, Homo sapiens
ttcaggaagcacatt

SEQ ID NO: 1721405 - DNA, 15 bp, Homo sapiens
tcaggaagcacattt

SEQ ID NO: 1721406 - DNA, 15 bp, Homo sapiens
caggaagcacatttc

SEQ ID NO: 1721407 - DNA, 15 bp, Homo sapiens
aggaagcacatttca

SEQ ID NO: 1721408 - DNA, 15 bp, Homo sapiens
ggaagcacatttcaa

SEQ ID NO: 1721409 - DNA, 15 bp, Homo sapiens
gaagcacatttcaac

SEQ ID NO: 1721410 - DNA, 15 bp, Homo sapiens
aagcacatttcaaca

SEQ ID NO: 1721411 - DNA, 15 bp, Homo sapiens
agcacatttcaacag

SEQ ID NO: 1721412 - DNA, 15 bp, Homo sapiens
gcacatttcaacagc

SEQ ID NO: 1721413 - DNA, 15 bp, Homo sapiens
cacatttcaacagcc

SEQ ID NO: 1721414 - DNA, 15 bp, Homo sapiens
acatttcaacagcca

SEQ ID NO: 1721415 - DNA, 15 bp, Homo sapiens
catttcaacagccat

SEQ ID NO: 1721416 - DNA, 15 bp, Homo sapiens
atttcaacagccata

SEQ ID NO: 1721417 - DNA, 15 bp, Homo sapiens
tttcaacagccataa

SEQ ID NO: 1721418 - DNA, 15 bp, Homo sapiens
ttcaacagccataaa

SEQ ID NO: 1721419 - DNA, 15 bp, Homo sapiens
tcaacagccataaaa

SEQ ID NO: 1721420 - DNA, 15 bp, Homo sapiens
caacagccataaaaa

SEQ ID NO: 1721421 - DNA, 15 bp, Homo sapiens
aacagccataaaaaa

SEQ ID NO: 1721422 - DNA, 15 bp, Homo sapiens
acagccataaaaaat

SEQ ID NO: 1721423 - DNA, 15 bp, Homo sapiens
cagccataaaaaatt

SEQ ID NO: 1721424 - DNA, 15 bp, Homo sapiens
agccataaaaaatta

SEQ ID NO: 1721425 - DNA, 15 bp, Homo sapiens
gccataaaaaattaa

SEQ ID NO: 1721426 - DNA, 15 bp, Homo sapiens
ccataaaaaattaaa

SEQ ID NO: 1721427 - DNA, 15 bp, Homo sapiens
cataaaaaattaaaa

SEQ ID NO: 1721428 - DNA, 15 bp, Homo sapiens
ataaaaaattaaaaa

SEQ ID NO: 1721429 - DNA, 15 bp, Homo sapiens
taaaaaattaaaaag

SEQ ID NO: 1721430 - DNA, 15 bp, Homo sapiens
aaaaaattaaaaagt

SEQ ID NO: 1721431 - DNA, 15 bp, Homo sapiens
aaaaattaaaaagta

SEQ ID NO: 1721432 - DNA, 15 bp, Homo sapiens
aaaattaaaaagtaa

SEQ ID NO: 1721433 - DNA, 15 bp, Homo sapiens
aaattaaaaagtaaa

SEQ ID NO: 1721434 - DNA, 15 bp, Homo sapiens
aattaaaaagtaaat

SEQ ID NO: 1721435 - DNA, 15 bp, Homo sapiens
attaaaaagtaaatt

SEQ ID NO: 1721436 - DNA, 15 bp, Homo sapiens
ttaaaaagtaaattt

SEQ ID NO: 1721437 - DNA, 15 bp, Homo sapiens
taaaaagtaaatttt

SEQ ID NO: 1721438 - DNA, 15 bp, Homo sapiens
aaaaagtaaatttta

SEQ ID NO: 1721439 - DNA, 15 bp, Homo sapiens
aaaagtaaattttat

SEQ ID NO: 1721440 - DNA, 15 bp, Homo sapiens
aaagtaaattttatc

SEQ ID NO: 1721441 - DNA, 15 bp, Homo sapiens
aagtaaattttatct

SEQ ID NO: 1721442 - DNA, 15 bp, Homo sapiens
agtaaattttatctt

SEQ ID NO: 1721443 - DNA, 15 bp, Homo sapiens
gtaaattttatcttt

SEQ ID NO: 1721444 - DNA, 15 bp, Homo sapiens
taaattttatcttta

SEQ ID NO: 1721445 - DNA, 15 bp, Homo sapiens
aaattttatctttat

SEQ ID NO: 1721446 - DNA, 15 bp, Homo sapiens
aattttatctttatg

SEQ ID NO: 1721447 - DNA, 15 bp, Homo sapiens
attttatctttatgt

SEQ ID NO: 1721448 - DNA, 15 bp, Homo sapiens
ttttatctttatgtc

SEQ ID NO: 1721449 - DNA, 15 bp, Homo sapiens
tttatctttatgtct

SEQ ID NO: 1721450 - DNA, 15 bp, Homo sapiens
ttatctttatgtctt

SEQ ID NO: 1721451 - DNA, 15 bp, Homo sapiens
tatctttatgtcttt

SEQ ID NO: 1721452 - DNA, 15 bp, Homo sapiens
atctttatgtctttg

SEQ ID NO: 1721453 - DNA, 15 bp, Homo sapiens
tctttatgtctttga

SEQ ID NO: 1721454 - DNA, 15 bp, Homo sapiens
ctttatgtctttgag

SEQ ID NO: 1721455 - DNA, 15 bp, Homo sapiens
tttatgtctttgaga

SEQ ID NO: 1721456 - DNA, 15 bp, Homo sapiens
ttatgtctttgagaa

SEQ ID NO: 1721457 - DNA, 15 bp, Homo sapiens
tatgtctttgagaaa

SEQ ID NO: 1721458 - DNA, 15 bp, Homo sapiens
atgtctttgagaaat

SEQ ID NO: 1721459 - DNA, 15 bp, Homo sapiens
tgtctttgagaaatc

SEQ ID NO: 1721460 - DNA, 15 bp, Homo sapiens
gtctttgagaaatcc

SEQ ID NO: 1721461 - DNA, 15 bp, Homo sapiens
tctttgagaaatccg

SEQ ID NO: 1721462 - DNA, 15 bp, Homo sapiens
ctttgagaaatccgt

SEQ ID NO: 1721463 - DNA, 15 bp, Homo sapiens
tttgagaaatccgta

SEQ ID NO: 1721464 - DNA, 15 bp, Homo sapiens
ttgagaaatccgtaa

SEQ ID NO: 1721465 - DNA, 15 bp, Homo sapiens
tgagaaatccgtaat

SEQ ID NO: 1721466 - DNA, 15 bp, Homo sapiens
gagaaatccgtaatt

SEQ ID NO: 1721467 - DNA, 15 bp, Homo sapiens
agaaatccgtaatta

SEQ ID NO: 1721468 - DNA, 15 bp, Homo sapiens
gaaatccgtaattac

SEQ ID NO: 1721469 - DNA, 15 bp, Homo sapiens
aaatccgtaattact

SEQ ID NO: 1721470 - DNA, 15 bp, Homo sapiens
aatccgtaattactc

SEQ ID NO: 1721471 - DNA, 15 bp, Homo sapiens
atccgtaattactcc

SEQ ID NO: 1721472 - DNA, 15 bp, Homo sapiens
tccgtaattactcca

SEQ ID NO: 1721473 - DNA, 15 bp, Homo sapiens
ccgtaattactccac

SEQ ID NO: 1721474 - DNA, 15 bp, Homo sapiens
cgtaattactccaca

SEQ ID NO: 1721475 - DNA, 15 bp, Homo sapiens
gtaattactccacaa

SEQ ID NO: 1721476 - DNA, 15 bp, Homo sapiens
taattactccacaat

SEQ ID NO: 1721477 - DNA, 15 bp, Homo sapiens
aattactccacaata

SEQ ID NO: 1721478 - DNA, 15 bp, Homo sapiens
attactccacaataa

SEQ ID NO: 1721479 - DNA, 15 bp, Homo sapiens
ttactccacaataaa

SEQ ID NO: 1721480 - DNA, 15 bp, Homo sapiens
tactccacaataaac

SEQ ID NO: 1721481 - DNA, 15 bp, Homo sapiens
actccacaataaact

SEQ ID NO: 1721482 - DNA, 15 bp, Homo sapiens
ctccacaataaactt

SEQ ID NO: 1721483 - DNA, 15 bp, Homo sapiens
tccacaataaactta

SEQ ID NO: 1721484 - DNA, 15 bp, Homo sapiens
ccacaataaacttac

SEQ ID NO: 1721485 - DNA, 15 bp, Homo sapiens
cacaataaacttact

SEQ ID NO: 1721486 - DNA, 15 bp, Homo sapiens
acaataaacttacta

SEQ ID NO: 1721487 - DNA, 15 bp, Homo sapiens
caataaacttactaa

SEQ ID NO: 1721488 - DNA, 15 bp, Homo sapiens
aataaacttactaaa

SEQ ID NO: 1721489 - DNA, 15 bp, Homo sapiens
ataaacttactaaaa

SEQ ID NO: 1721490 - DNA, 15 bp, Homo sapiens
taaacttactaaaat

SEQ ID NO: 1721491 - DNA, 15 bp, Homo sapiens
aaacttactaaaatg

SEQ ID NO: 1721492 - DNA, 15 bp, Homo sapiens
aacttactaaaatgc

SEQ ID NO: 1721493 - DNA, 15 bp, Homo sapiens
acttactaaaatgct

SEQ ID NO: 1721494 - DNA, 15 bp, Homo sapiens
cttactaaaatgctg

SEQ ID NO: 1721495 - DNA, 15 bp, Homo sapiens
ttactaaaatgctgt

SEQ ID NO: 1721496 - DNA, 15 bp, Homo sapiens
tactaaaatgctgtg

SEQ ID NO: 1721497 - DNA, 15 bp, Homo sapiens
actaaaatgctgtgt

SEQ ID NO: 1721498 - DNA, 15 bp, Homo sapiens
ctaaaatgctgtgtc

SEQ ID NO: 1721499 - DNA, 15 bp, Homo sapiens
taaaatgctgtgtca

SEQ ID NO: 1721500 - DNA, 15 bp, Homo sapiens
aaaatgctgtgtcaa

SEQ ID NO: 1721501 - DNA, 15 bp, Homo sapiens
aaatgctgtgtcaaa

SEQ ID NO: 1721502 - DNA, 15 bp, Homo sapiens
aatgctgtgtcaaaa

SEQ ID NO: 1721503 - DNA, 15 bp, Homo sapiens
atgctgtgtcaaaac

SEQ ID NO: 1721504 - DNA, 15 bp, Homo sapiens
tgctgtgtcaaaact

SEQ ID NO: 1721505 - DNA, 15 bp, Homo sapiens
gctgtgtcaaaactc

SEQ ID NO: 1721506 - DNA, 15 bp, Homo sapiens
ctgtgtcaaaactct

SEQ ID NO: 1721507 - DNA, 15 bp, Homo sapiens
tgtgtcaaaactcta

SEQ ID NO: 1721508 - DNA, 15 bp, Homo sapiens
gtgtcaaaactctag

SEQ ID NO: 1721509 - DNA, 15 bp, Homo sapiens
tgtcaaaactctagt

SEQ ID NO: 1721510 - DNA, 15 bp, Homo sapiens
gtcaaaactctagtc

SEQ ID NO: 1721511 - DNA, 15 bp, Homo sapiens
tcaaaactctagtca

SEQ ID NO: 1721512 - DNA, 15 bp, Homo sapiens
caaaactctagtcac

SEQ ID NO: 1721513 - DNA, 15 bp, Homo sapiens
aaaactctagtcact

SEQ ID NO: 1721514 - DNA, 15 bp, Homo sapiens
aaactctagtcactt

SEQ ID NO: 1721515 - DNA, 15 bp, Homo sapiens
aactctagtcacttt

SEQ ID NO: 1721516 - DNA, 15 bp, Homo sapiens
actctagtcactttc

SEQ ID NO: 1721517 - DNA, 15 bp, Homo sapiens
ctctagtcactttcc

SEQ ID NO: 1721518 - DNA, 15 bp, Homo sapiens
tctagtcactttcct

SEQ ID NO: 1721519 - DNA, 15 bp, Homo sapiens
ctagtcactttcctc

SEQ ID NO: 1721520 - DNA, 15 bp, Homo sapiens
tagtcactttcctca

SEQ ID NO: 1721521 - DNA, 15 bp, Homo sapiens
agtcactttcctcat

SEQ ID NO: 1721522 - DNA, 15 bp, Homo sapiens
gtcactttcctcatt

SEQ ID NO: 1721523 - DNA, 15 bp, Homo sapiens
tcactttcctcattc

SEQ ID NO: 1721524 - DNA, 15 bp, Homo sapiens
cactttcctcattca

SEQ ID NO: 1721525 - DNA, 15 bp, Homo sapiens
actttcctcattcag

SEQ ID NO: 1721526 - DNA, 15 bp, Homo sapiens
ctttcctcattcagc

SEQ ID NO: 1721527 - DNA, 15 bp, Homo sapiens
tttcctcattcagct

SEQ ID NO: 1721528 - DNA, 15 bp, Homo sapiens
ttcctcattcagctc

SEQ ID NO: 1721529 - DNA, 15 bp, Homo sapiens
tcctcattcagctcc

SEQ ID NO: 1721530 - DNA, 15 bp, Homo sapiens
cctcattcagctccg

SEQ ID NO: 1721531 - DNA, 15 bp, Homo sapiens
ctcattcagctccgt

SEQ ID NO: 1721532 - DNA, 15 bp, Homo sapiens
tcattcagctccgtc

SEQ ID NO: 1721533 - DNA, 15 bp, Homo sapiens
cattcagctccgtca

SEQ ID NO: 1721534 - DNA, 15 bp, Homo sapiens
attcagctccgtcat

SEQ ID NO: 1721535 - DNA, 15 bp, Homo sapiens
ttcagctccgtcatg

SEQ ID NO: 1721536 - DNA, 15 bp, Homo sapiens
tcagctccgtcatgt

SEQ ID NO: 1721537 - DNA, 15 bp, Homo sapiens
cagctccgtcatgta

SEQ ID NO: 1721538 - DNA, 15 bp, Homo sapiens
agctccgtcatgtaa

SEQ ID NO: 1721539 - DNA, 15 bp, Homo sapiens
gctccgtcatgtaag

SEQ ID NO: 1721540 - DNA, 15 bp, Homo sapiens
ctccgtcatgtaagc

SEQ ID NO: 1721541 - DNA, 15 bp, Homo sapiens
tccgtcatgtaagct

SEQ ID NO: 1721542 - DNA, 15 bp, Homo sapiens
ccgtcatgtaagctc

SEQ ID NO: 1721543 - DNA, 15 bp, Homo sapiens
cgtcatgtaagctct

SEQ ID NO: 1721544 - DNA, 15 bp, Homo sapiens
gtcatgtaagctctc

SEQ ID NO: 1721545 - DNA, 15 bp, Homo sapiens
tcatgtaagctctcc

SEQ ID NO: 1721546 - DNA, 15 bp, Homo sapiens
catgtaagctctcca

SEQ ID NO: 1721547 - DNA, 15 bp, Homo sapiens
atgtaagctctccaa

SEQ ID NO: 1721548 - DNA, 15 bp, Homo sapiens
tgtaagctctccaac

SEQ ID NO: 1721549 - DNA, 15 bp, Homo sapiens
gtaagctctccaacc

SEQ ID NO: 1721550 - DNA, 15 bp, Homo sapiens
taagctctccaacct

SEQ ID NO: 1721551 - DNA, 15 bp, Homo sapiens
aagctctccaacctt

SEQ ID NO: 1721552 - DNA, 15 bp, Homo sapiens
agctctccaacctta

SEQ ID NO: 1721553 - DNA, 15 bp, Homo sapiens
gctctccaaccttac

SEQ ID NO: 1721554 - DNA, 15 bp, Homo sapiens
ctctccaaccttacc

SEQ ID NO: 1721555 - DNA, 15 bp, Homo sapiens
tctccaaccttacct

SEQ ID NO: 1721556 - DNA, 15 bp, Homo sapiens
ctccaaccttacctc

SEQ ID NO: 1721557 - DNA, 15 bp, Homo sapiens
tccaaccttacctcc

SEQ ID NO: 1721558 - DNA, 15 bp, Homo sapiens
ccaaccttacctccc

SEQ ID NO: 1721559 - DNA, 15 bp, Homo sapiens
caaccttacctccca

SEQ ID NO: 1721560 - DNA, 15 bp, Homo sapiens
aaccttacctcccac

SEQ ID NO: 1721561 - DNA, 15 bp, Homo sapiens
accttacctcccaca

SEQ ID NO: 1721562 - DNA, 15 bp, Homo sapiens
ccttacctcccacaa

SEQ ID NO: 1721563 - DNA, 15 bp, Homo sapiens
cttacctcccacaaa

SEQ ID NO: 1721564 - DNA, 15 bp, Homo sapiens
ttacctcccacaaag

SEQ ID NO: 1721565 - DNA, 15 bp, Homo sapiens
tacctcccacaaagc

SEQ ID NO: 1721566 - DNA, 15 bp, Homo sapiens
acctcccacaaagcc

SEQ ID NO: 1721567 - DNA, 15 bp, Homo sapiens
cctcccacaaagcca

SEQ ID NO: 1721568 - DNA, 15 bp, Homo sapiens
ctcccacaaagccaa

SEQ ID NO: 1721569 - DNA, 15 bp, Homo sapiens
tcccacaaagccaag

SEQ ID NO: 1721570 - DNA, 15 bp, Homo sapiens
cccacaaagccaagt

SEQ ID NO: 1721571 - DNA, 15 bp, Homo sapiens
ccacaaagccaagtt

SEQ ID NO: 1721572 - DNA, 15 bp, Homo sapiens
cacaaagccaagttt

SEQ ID NO: 1721573 - DNA, 15 bp, Homo sapiens
acaaagccaagtttc

SEQ ID NO: 1721574 - DNA, 15 bp, Homo sapiens
caaagccaagtttcc

SEQ ID NO: 1721575 - DNA, 15 bp, Homo sapiens
aaagccaagtttccc

SEQ ID NO: 1721576 - DNA, 15 bp, Homo sapiens
aagccaagtttccct

SEQ ID NO: 1721577 - DNA, 15 bp, Homo sapiens
agccaagtttccctc

SEQ ID NO: 1721578 - DNA, 15 bp, Homo sapiens
gccaagtttccctct

SEQ ID NO: 1721579 - DNA, 15 bp, Homo sapiens
ccaagtttccctctc

SEQ ID NO: 1721580 - DNA, 15 bp, Homo sapiens
caagtttccctctcc

SEQ ID NO: 1721581 - DNA, 15 bp, Homo sapiens
aagtttccctctcct

SEQ ID NO: 1721582 - DNA, 15 bp, Homo sapiens
agtttccctctcctt

SEQ ID NO: 1721583 - DNA, 15 bp, Homo sapiens
gtttccctctccttc

SEQ ID NO: 1721584 - DNA, 15 bp, Homo sapiens
tttccctctccttcc

SEQ ID NO: 1721585 - DNA, 15 bp, Homo sapiens
ttccctctccttcct

SEQ ID NO: 1721586 - DNA, 15 bp, Homo sapiens
tccctctccttcctt

SEQ ID NO: 1721587 - DNA, 15 bp, Homo sapiens
ccctctccttccttt

SEQ ID NO: 1721588 - DNA, 15 bp, Homo sapiens
cctctccttcctttc

SEQ ID NO: 1721589 - DNA, 15 bp, Homo sapiens
ctctccttcctttct

SEQ ID NO: 1721590 - DNA, 15 bp, Homo sapiens
tctccttcctttctt

SEQ ID NO: 1721591 - DNA, 15 bp, Homo sapiens
ctccttcctttcttc

SEQ ID NO: 1721592 - DNA, 15 bp, Homo sapiens
tccttcctttcttct

SEQ ID NO: 1721593 - DNA, 15 bp, Homo sapiens
ccttcctttcttctc

SEQ ID NO: 1721594 - DNA, 15 bp, Homo sapiens
cttcctttcttctca

SEQ ID NO: 1721595 - DNA, 15 bp, Homo sapiens
ttcctttcttctcat

SEQ ID NO: 1721596 - DNA, 15 bp, Homo sapiens
tcctttcttctcatt

SEQ ID NO: 1721597 - DNA, 15 bp, Homo sapiens
cctttcttctcattc

SEQ ID NO: 1721598 - DNA, 15 bp, Homo sapiens
ctttcttctcattca

SEQ ID NO: 1721599 - DNA, 15 bp, Homo sapiens
tttcttctcattcag

SEQ ID NO: 1721600 - DNA, 15 bp, Homo sapiens
ttcttctcattcagc

SEQ ID NO: 1721601 - DNA, 15 bp, Homo sapiens
tcttctcattcagcc

SEQ ID NO: 1721602 - DNA, 15 bp, Homo sapiens
cttctcattcagcct

SEQ ID NO: 1721603 - DNA, 15 bp, Homo sapiens
ttctcattcagccta

SEQ ID NO: 1721604 - DNA, 15 bp, Homo sapiens
tctcattcagcctat

SEQ ID NO: 1721605 - DNA, 15 bp, Homo sapiens
ctcattcagcctatt

SEQ ID NO: 1721606 - DNA, 15 bp, Homo sapiens
tcattcagcctatta

SEQ ID NO: 1721607 - DNA, 15 bp, Homo sapiens
cattcagcctattat

SEQ ID NO: 1721608 - DNA, 15 bp, Homo sapiens
attcagcctattatt

SEQ ID NO: 1721609 - DNA, 15 bp, Homo sapiens
ttcagcctattatta

SEQ ID NO: 1721610 - DNA, 15 bp, Homo sapiens
tcagcctattattat

SEQ ID NO: 1721611 - DNA, 15 bp, Homo sapiens
cagcctattattatg

SEQ ID NO: 1721612 - DNA, 15 bp, Homo sapiens
agcctattattatgt

SEQ ID NO: 1721613 - DNA, 15 bp, Homo sapiens
gcctattattatgtg

SEQ ID NO: 1721614 - DNA, 15 bp, Homo sapiens
cctattattatgtga

SEQ ID NO: 1721615 - DNA, 15 bp, Homo sapiens
ctattattatgtgat

SEQ ID NO: 1721616 - DNA, 15 bp, Homo sapiens
tattattatgtgatc

SEQ ID NO: 1721617 - DNA, 15 bp, Homo sapiens
attattatgtgatct

SEQ ID NO: 1721618 - DNA, 15 bp, Homo sapiens
ttattatgtgatctg

SEQ ID NO: 1721619 - DNA, 15 bp, Homo sapiens
tattatgtgatctgc

SEQ ID NO: 1721620 - DNA, 15 bp, Homo sapiens
attatgtgatctgct

SEQ ID NO: 1721621 - DNA, 15 bp, Homo sapiens
ttatgtgatctgctt

SEQ ID NO: 1721622 - DNA, 15 bp, Homo sapiens
tatgtgatctgctta

SEQ ID NO: 1721623 - DNA, 15 bp, Homo sapiens
atgtgatctgcttag

SEQ ID NO: 1721624 - DNA, 15 bp, Homo sapiens
tgtgatctgcttagt

SEQ ID NO: 1721625 - DNA, 15 bp, Homo sapiens
gtgatctgcttagta

SEQ ID NO: 1721626 - DNA, 15 bp, Homo sapiens
tgatctgcttagtat

SEQ ID NO: 1721627 - DNA, 15 bp, Homo sapiens
gatctgcttagtatc

SEQ ID NO: 1721628 - DNA, 15 bp, Homo sapiens
atctgcttagtatct

SEQ ID NO: 1721629 - DNA, 15 bp, Homo sapiens
tctgcttagtatctc

SEQ ID NO: 1721630 - DNA, 15 bp, Homo sapiens
ctgcttagtatctct

SEQ ID NO: 1721631 - DNA, 15 bp, Homo sapiens
tgcttagtatctctt

SEQ ID NO: 1721632 - DNA, 15 bp, Homo sapiens
gcttagtatctcttc

SEQ ID NO: 1721633 - DNA, 15 bp, Homo sapiens
cttagtatctcttcc

SEQ ID NO: 1721634 - DNA, 15 bp, Homo sapiens
ttagtatctcttcca

SEQ ID NO: 1721635 - DNA, 15 bp, Homo sapiens
tagtatctcttccag

SEQ ID NO: 1721636 - DNA, 15 bp, Homo sapiens
agtatctcttccagc

SEQ ID NO: 1721637 - DNA, 15 bp, Homo sapiens
gtatctcttccagca

SEQ ID NO: 1721638 - DNA, 15 bp, Homo sapiens
tatctcttccagcaa

SEQ ID NO: 1721639 - DNA, 15 bp, Homo sapiens
atctcttccagcaag

SEQ ID NO: 1721640 - DNA, 15 bp, Homo sapiens
tctcttccagcaaga

SEQ ID NO: 1721641 - DNA, 15 bp, Homo sapiens
ctcttccagcaagaa

SEQ ID NO: 1721642 - DNA, 15 bp, Homo sapiens
tcttccagcaagaat

SEQ ID NO: 1721643 - DNA, 15 bp, Homo sapiens
cttccagcaagaatt

SEQ ID NO: 1721644 - DNA, 15 bp, Homo sapiens
ttccagcaagaattt

SEQ ID NO: 1721645 - DNA, 15 bp, Homo sapiens
tccagcaagaatttc

SEQ ID NO: 1721646 - DNA, 15 bp, Homo sapiens
ccagcaagaatttct

SEQ ID NO: 1721647 - DNA, 15 bp, Homo sapiens
cagcaagaatttctt

SEQ ID NO: 1721648 - DNA, 15 bp, Homo sapiens
agcaagaatttcttc

SEQ ID NO: 1721649 - DNA, 15 bp, Homo sapiens
gcaagaatttcttct

SEQ ID NO: 1721650 - DNA, 15 bp, Homo sapiens
caagaatttcttctt

SEQ ID NO: 1721651 - DNA, 15 bp, Homo sapiens
aagaatttcttcttt

SEQ ID NO: 1721652 - DNA, 15 bp, Homo sapiens
agaatttcttcttta

SEQ ID NO: 1721653 - DNA, 15 bp, Homo sapiens
gaatttcttctttag

SEQ ID NO: 1721654 - DNA, 15 bp, Homo sapiens
aatttcttctttagg

SEQ ID NO: 1721655 - DNA, 15 bp, Homo sapiens
atttcttctttagga

SEQ ID NO: 1721656 - DNA, 15 bp, Homo sapiens
tttcttctttaggat

SEQ ID NO: 1721657 - DNA, 15 bp, Homo sapiens
ttcttctttaggatg

SEQ ID NO: 1721658 - DNA, 15 bp, Homo sapiens
tcttctttaggatgt

SEQ ID NO: 1721659 - DNA, 15 bp, Homo sapiens
cttctttaggatgtt

SEQ ID NO: 1721660 - DNA, 15 bp, Homo sapiens
ttctttaggatgttg

SEQ ID NO: 1721661 - DNA, 15 bp, Homo sapiens
tctttaggatgttga

SEQ ID NO: 1721662 - DNA, 15 bp, Homo sapiens
ctttaggatgttgag

SEQ ID NO: 1721663 - DNA, 15 bp, Homo sapiens
tttaggatgttgaga

SEQ ID NO: 1721664 - DNA, 15 bp, Homo sapiens
ttaggatgttgagaa

SEQ ID NO: 1721665 - DNA, 15 bp, Homo sapiens
taggatgttgagaaa

SEQ ID NO: 1721666 - DNA, 15 bp, Homo sapiens
aggatgttgagaaag

SEQ ID NO: 1721667 - DNA, 15 bp, Homo sapiens
ggatgttgagaaagg

SEQ ID NO: 1721668 - DNA, 15 bp, Homo sapiens
gatgttgagaaaggg

SEQ ID NO: 1721669 - DNA, 15 bp, Homo sapiens
atgttgagaaagggg

SEQ ID NO: 1721670 - DNA, 15 bp, Homo sapiens
tgttgagaaagggga

SEQ ID NO: 1721671 - DNA, 15 bp, Homo sapiens
gttgagaaaggggaa

SEQ ID NO: 1721672 - DNA, 15 bp, Homo sapiens
ttgagaaaggggaac

SEQ ID NO: 1721673 - DNA, 15 bp, Homo sapiens
tgagaaaggggaact

SEQ ID NO: 1721674 - DNA, 15 bp, Homo sapiens
gagaaaggggaactg

SEQ ID NO: 1721675 - DNA, 15 bp, Homo sapiens
agaaaggggaactgg

SEQ ID NO: 1721676 - DNA, 15 bp, Homo sapiens
gaaaggggaactgga

SEQ ID NO: 1721677 - DNA, 15 bp, Homo sapiens
aaaggggaactggag

SEQ ID NO: 1721678 - DNA, 15 bp, Homo sapiens
aaggggaactggagt

SEQ ID NO: 1721679 - DNA, 15 bp, Homo sapiens
aggggaactggagtt

SEQ ID NO: 1721680 - DNA, 15 bp, Homo sapiens
ggggaactggagttg

SEQ ID NO: 1721681 - DNA, 15 bp, Homo sapiens
gggaactggagttgg

SEQ ID NO: 1721682 - DNA, 15 bp, Homo sapiens
ggaactggagttgga

SEQ ID NO: 1721683 - DNA, 15 bp, Homo sapiens
gaactggagttggaa

SEQ ID NO: 1721684 - DNA, 15 bp, Homo sapiens
aactggagttggaat

SEQ ID NO: 1721685 - DNA, 15 bp, Homo sapiens
actggagttggaatt

SEQ ID NO: 1721686 - DNA, 15 bp, Homo sapiens
ctggagttggaattt

SEQ ID NO: 1721687 - DNA, 15 bp, Homo sapiens
tggagttggaattta

SEQ ID NO: 1721688 - DNA, 15 bp, Homo sapiens
ggagttggaatttaa

SEQ ID NO: 1721689 - DNA, 15 bp, Homo sapiens
gagttggaatttaat

SEQ ID NO: 1721690 - DNA, 15 bp, Homo sapiens
agttggaatttaatt

SEQ ID NO: 1721691 - DNA, 15 bp, Homo sapiens
gttggaatttaatta

SEQ ID NO: 1721692 - DNA, 15 bp, Homo sapiens
ttggaatttaattat

SEQ ID NO: 1721693 - DNA, 15 bp, Homo sapiens
tggaatttaattata

SEQ ID NO: 1721694 - DNA, 15 bp, Homo sapiens
ggaatttaattatag

SEQ ID NO: 1721695 - DNA, 15 bp, Homo sapiens
gaatttaattatagg

SEQ ID NO: 1721696 - DNA, 15 bp, Homo sapiens
aatttaattatagga

SEQ ID NO: 1721697 - DNA, 15 bp, Homo sapiens
atttaattataggat

SEQ ID NO: 1721698 - DNA, 15 bp, Homo sapiens
tttaattataggatt

SEQ ID NO: 1721699 - DNA, 15 bp, Homo sapiens
ttaattataggattt

SEQ ID NO: 1721700 - DNA, 15 bp, Homo sapiens
taattataggatttc

SEQ ID NO: 1721701 - DNA, 15 bp, Homo sapiens
aattataggatttct

SEQ ID NO: 1721702 - DNA, 15 bp, Homo sapiens
attataggatttctg

SEQ ID NO: 1721703 - DNA, 15 bp, Homo sapiens
ttataggatttctgt

SEQ ID NO: 1721704 - DNA, 15 bp, Homo sapiens
tataggatttctgtt

SEQ ID NO: 1721705 - DNA, 15 bp, Homo sapiens
ataggatttctgttg

SEQ ID NO: 1721706 - DNA, 15 bp, Homo sapiens
taggatttctgttgc

SEQ ID NO: 1721707 - DNA, 15 bp, Homo sapiens
aggatttctgttgca

SEQ ID NO: 1721708 - DNA, 15 bp, Homo sapiens
ggatttctgttgcaa

SEQ ID NO: 1721709 - DNA, 15 bp, Homo sapiens
gatttctgttgcaag

SEQ ID NO: 1721710 - DNA, 15 bp, Homo sapiens
atttctgttgcaaga

SEQ ID NO: 1721711 - DNA, 15 bp, Homo sapiens
tttctgttgcaagat

SEQ ID NO: 1721712 - DNA, 15 bp, Homo sapiens
ttctgttgcaagata

SEQ ID NO: 1721713 - DNA, 15 bp, Homo sapiens
tctgttgcaagatag

SEQ ID NO: 1721714 - DNA, 15 bp, Homo sapiens
ctgttgcaagatagc

SEQ ID NO: 1721715 - DNA, 15 bp, Homo sapiens
tgttgcaagatagca

SEQ ID NO: 1721716 - DNA, 15 bp, Homo sapiens
gttgcaagatagcat

SEQ ID NO: 1721717 - DNA, 15 bp, Homo sapiens
ttgcaagatagcata

SEQ ID NO: 1721718 - DNA, 15 bp, Homo sapiens
tgcaagatagcatag

SEQ ID NO: 1721719 - DNA, 15 bp, Homo sapiens
gcaagatagcatagc

SEQ ID NO: 1721720 - DNA, 15 bp, Homo sapiens
caagatagcatagca

SEQ ID NO: 1721721 - DNA, 15 bp, Homo sapiens
aagatagcatagcag

SEQ ID NO: 1721722 - DNA, 15 bp, Homo sapiens
agatagcatagcagg

SEQ ID NO: 1721723 - DNA, 15 bp, Homo sapiens
gatagcatagcagga

SEQ ID NO: 1721724 - DNA, 15 bp, Homo sapiens
atagcatagcaggaa

SEQ ID NO: 1721725 - DNA, 15 bp, Homo sapiens
tagcatagcaggaag

SEQ ID NO: 1721726 - DNA, 15 bp, Homo sapiens
agcatagcaggaagt

SEQ ID NO: 1721727 - DNA, 15 bp, Homo sapiens
gcatagcaggaagtc

SEQ ID NO: 1721728 - DNA, 15 bp, Homo sapiens
catagcaggaagtct

SEQ ID NO: 1721729 - DNA, 15 bp, Homo sapiens
atagcaggaagtcta

SEQ ID NO: 1721730 - DNA, 15 bp, Homo sapiens
tagcaggaagtctat

SEQ ID NO: 1721731 - DNA, 15 bp, Homo sapiens
agcaggaagtctatg

SEQ ID NO: 1721732 - DNA, 15 bp, Homo sapiens
gcaggaagtctatgg

SEQ ID NO: 1721733 - DNA, 15 bp, Homo sapiens
caggaagtctatggc

SEQ ID NO: 1721734 - DNA, 15 bp, Homo sapiens
aggaagtctatggct

SEQ ID NO: 1721735 - DNA, 15 bp, Homo sapiens
ggaagtctatggcta

SEQ ID NO: 1721736 - DNA, 15 bp, Homo sapiens
gaagtctatggctat

SEQ ID NO: 1721737 - DNA, 15 bp, Homo sapiens
aagtctatggctatt

SEQ ID NO: 1721738 - DNA, 15 bp, Homo sapiens
agtctatggctattc

SEQ ID NO: 1721739 - DNA, 15 bp, Homo sapiens
gtctatggctattct

SEQ ID NO: 1721740 - DNA, 15 bp, Homo sapiens
tctatggctattctc

SEQ ID NO: 1721741 - DNA, 15 bp, Homo sapiens
ctatggctattctca

SEQ ID NO: 1721742 - DNA, 15 bp, Homo sapiens
tatggctattctcac

SEQ ID NO: 1721743 - DNA, 15 bp, Homo sapiens
atggctattctcacg

SEQ ID NO: 1721744 - DNA, 15 bp, Homo sapiens
tggctattctcacgt

SEQ ID NO: 1721745 - DNA, 15 bp, Homo sapiens
ggctattctcacgtt

SEQ ID NO: 1721746 - DNA, 15 bp, Homo sapiens
gctattctcacgtta

SEQ ID NO: 1721747 - DNA, 15 bp, Homo sapiens
ctattctcacgttaa

SEQ ID NO: 1721748 - DNA, 15 bp, Homo sapiens
tattctcacgttaat

SEQ ID NO: 1721749 - DNA, 15 bp, Homo sapiens
attctcacgttaata

SEQ ID NO: 1721750 - DNA, 15 bp, Homo sapiens
ttctcacgttaataa

SEQ ID NO: 1721751 - DNA, 15 bp, Homo sapiens
tctcacgttaataat

SEQ ID NO: 1721752 - DNA, 15 bp, Homo sapiens
ctcacgttaataatt

SEQ ID NO: 1721753 - DNA, 15 bp, Homo sapiens
tcacgttaataattt

SEQ ID NO: 1721754 - DNA, 15 bp, Homo sapiens
cacgttaataatttt

SEQ ID NO: 1721755 - DNA, 15 bp, Homo sapiens
acgttaataattttg

SEQ ID NO: 1721756 - DNA, 15 bp, Homo sapiens
cgttaataattttgc

SEQ ID NO: 1721757 - DNA, 15 bp, Homo sapiens
gttaataattttgcc

SEQ ID NO: 1721758 - DNA, 15 bp, Homo sapiens
ttaataattttgccc

SEQ ID NO: 1721759 - DNA, 15 bp, Homo sapiens
taataattttgcccc

SEQ ID NO: 1721760 - DNA, 15 bp, Homo sapiens
aataattttgcccca

SEQ ID NO: 1721761 - DNA, 15 bp, Homo sapiens
ataattttgccccat

SEQ ID NO: 1721762 - DNA, 15 bp, Homo sapiens
taattttgccccata

SEQ ID NO: 1721763 - DNA, 15 bp, Homo sapiens
aattttgccccataa

SEQ ID NO: 1721764 - DNA, 15 bp, Homo sapiens
attttgccccataac

SEQ ID NO: 1721765 - DNA, 15 bp, Homo sapiens
ttttgccccataaca

SEQ ID NO: 1721766 - DNA, 15 bp, Homo sapiens
tttgccccataacat

SEQ ID NO: 1721767 - DNA, 15 bp, Homo sapiens
ttgccccataacatc

SEQ ID NO: 1721768 - DNA, 15 bp, Homo sapiens
tgccccataacatca

SEQ ID NO: 1721769 - DNA, 15 bp, Homo sapiens
gccccataacatcag

SEQ ID NO: 1721770 - DNA, 15 bp, Homo sapiens
ccccataacatcagt

SEQ ID NO: 1721771 - DNA, 15 bp, Homo sapiens
cccataacatcagtt

SEQ ID NO: 1721772 - DNA, 15 bp, Homo sapiens
ccataacatcagtta

SEQ ID NO: 1721773 - DNA, 15 bp, Homo sapiens
cataacatcagttaa

SEQ ID NO: 1721774 - DNA, 15 bp, Homo sapiens
ataacatcagttaaa

SEQ ID NO: 1721775 - DNA, 15 bp, Homo sapiens
taacatcagttaaat

SEQ ID NO: 1721776 - DNA, 15 bp, Homo sapiens
aacatcagttaaatt

SEQ ID NO: 1721777 - DNA, 15 bp, Homo sapiens
acatcagttaaatta

SEQ ID NO: 1721778 - DNA, 15 bp, Homo sapiens
catcagttaaattat

SEQ ID NO: 1721779 - DNA, 15 bp, Homo sapiens
atcagttaaattatc

SEQ ID NO: 1721780 - DNA, 15 bp, Homo sapiens
tcagttaaattatct

SEQ ID NO: 1721781 - DNA, 15 bp, Homo sapiens
cagttaaattatctc

SEQ ID NO: 1721782 - DNA, 15 bp, Homo sapiens
agttaaattatctct

SEQ ID NO: 1721783 - DNA, 15 bp, Homo sapiens
gttaaattatctctc

SEQ ID NO: 1721784 - DNA, 15 bp, Homo sapiens
ttaaattatctctcc

SEQ ID NO: 1721785 - DNA, 15 bp, Homo sapiens
taaattatctctcca

SEQ ID NO: 1721786 - DNA, 15 bp, Homo sapiens
aaattatctctccat

SEQ ID NO: 1721787 - DNA, 15 bp, Homo sapiens
aattatctctccatg

SEQ ID NO: 1721788 - DNA, 15 bp, Homo sapiens
attatctctccatgt

SEQ ID NO: 1721789 - DNA, 15 bp, Homo sapiens
ttatctctccatgta

SEQ ID NO: 1721790 - DNA, 15 bp, Homo sapiens
tatctctccatgtac

SEQ ID NO: 1721791 - DNA, 15 bp, Homo sapiens
atctctccatgtact

SEQ ID NO: 1721792 - DNA, 15 bp, Homo sapiens
tctctccatgtactt

SEQ ID NO: 1721793 - DNA, 15 bp, Homo sapiens
ctctccatgtacttt

SEQ ID NO: 1721794 - DNA, 15 bp, Homo sapiens
tctccatgtactttt

SEQ ID NO: 1721795 - DNA, 15 bp, Homo sapiens
ctccatgtacttttt

SEQ ID NO: 1721796 - DNA, 15 bp, Homo sapiens
tccatgtactttttt

SEQ ID NO: 1721797 - DNA, 15 bp, Homo sapiens
ccatgtactttttta

SEQ ID NO: 1721798 - DNA, 15 bp, Homo sapiens
catgtacttttttat

SEQ ID NO: 1721799 - DNA, 15 bp, Homo sapiens
atgtacttttttatt

SEQ ID NO: 1721800 - DNA, 15 bp, Homo sapiens
tgtacttttttattg

SEQ ID NO: 1721801 - DNA, 15 bp, Homo sapiens
gtacttttttattgc

SEQ ID NO: 1721802 - DNA, 15 bp, Homo sapiens
tacttttttattgct

SEQ ID NO: 1721803 - DNA, 15 bp, Homo sapiens
acttttttattgcta

SEQ ID NO: 1721804 - DNA, 15 bp, Homo sapiens
cttttttattgctat

SEQ ID NO: 1721805 - DNA, 15 bp, Homo sapiens
ttttttattgctata

SEQ ID NO: 1721806 - DNA, 15 bp, Homo sapiens
tttttattgctataa

SEQ ID NO: 1721807 - DNA, 15 bp, Homo sapiens
ttttattgctataaa

SEQ ID NO: 1721808 - DNA, 15 bp, Homo sapiens
tttattgctataaaa

SEQ ID NO: 1721809 - DNA, 15 bp, Homo sapiens
ttattgctataaaat

SEQ ID NO: 1721810 - DNA, 15 bp, Homo sapiens
tattgctataaaatt

SEQ ID NO: 1721811 - DNA, 15 bp, Homo sapiens
attgctataaaattc

SEQ ID NO: 1721812 - DNA, 15 bp, Homo sapiens
ttgctataaaattca

SEQ ID NO: 1721813 - DNA, 15 bp, Homo sapiens
tgctataaaattcag

SEQ ID NO: 1721814 - DNA, 15 bp, Homo sapiens
gctataaaattcaga

SEQ ID NO: 1721815 - DNA, 15 bp, Homo sapiens
ctataaaattcagat

SEQ ID NO: 1721816 - DNA, 15 bp, Homo sapiens
tataaaattcagatt

SEQ ID NO: 1721817 - DNA, 15 bp, Homo sapiens
ataaaattcagattc

SEQ ID NO: 1721818 - DNA, 15 bp, Homo sapiens
taaaattcagattct

SEQ ID NO: 1721819 - DNA, 15 bp, Homo sapiens
aaaattcagattcta

SEQ ID NO: 1721820 - DNA, 15 bp, Homo sapiens
aaattcagattctaa

SEQ ID NO: 1721821 - DNA, 15 bp, Homo sapiens
aattcagattctaat

SEQ ID NO: 1721822 - DNA, 15 bp, Homo sapiens
attcagattctaatt

SEQ ID NO: 1721823 - DNA, 15 bp, Homo sapiens
ttcagattctaatta

SEQ ID NO: 1721824 - DNA, 15 bp, Homo sapiens
tcagattctaattag

SEQ ID NO: 1721825 - DNA, 15 bp, Homo sapiens
cagattctaattaga

SEQ ID NO: 1721826 - DNA, 15 bp, Homo sapiens
agattctaattagaa

SEQ ID NO: 1721827 - DNA, 15 bp, Homo sapiens
gattctaattagaat

SEQ ID NO: 1721828 - DNA, 15 bp, Homo sapiens
attctaattagaatc

SEQ ID NO: 1721829 - DNA, 15 bp, Homo sapiens
ttctaattagaatcg

SEQ ID NO: 1721830 - DNA, 15 bp, Homo sapiens
tctaattagaatcga

SEQ ID NO: 1721831 - DNA, 15 bp, Homo sapiens
ctaattagaatcgaa

SEQ ID NO: 1721832 - DNA, 15 bp, Homo sapiens
taattagaatcgaat

SEQ ID NO: 1721833 - DNA, 15 bp, Homo sapiens
aattagaatcgaatg

SEQ ID NO: 1721834 - DNA, 15 bp, Homo sapiens
attagaatcgaatgt

SEQ ID NO: 1721835 - DNA, 15 bp, Homo sapiens
ttagaatcgaatgtt

SEQ ID NO: 1721836 - DNA, 15 bp, Homo sapiens
tagaatcgaatgttt

SEQ ID NO: 1721837 - DNA, 15 bp, Homo sapiens
agaatcgaatgtttt

SEQ ID NO: 1721838 - DNA, 15 bp, Homo sapiens
gaatcgaatgtttta

SEQ ID NO: 1721839 - DNA, 15 bp, Homo sapiens
aatcgaatgttttaa

SEQ ID NO: 1721840 - DNA, 15 bp, Homo sapiens
atcgaatgttttaaa

SEQ ID NO: 1721841 - DNA, 15 bp, Homo sapiens
tcgaatgttttaaag

SEQ ID NO: 1721842 - DNA, 15 bp, Homo sapiens
cgaatgttttaaaga

SEQ ID NO: 1721843 - DNA, 15 bp, Homo sapiens
gaatgttttaaagac

SEQ ID NO: 1721844 - DNA, 15 bp, Homo sapiens
aatgttttaaagact

SEQ ID NO: 1721845 - DNA, 15 bp, Homo sapiens
atgttttaaagactg

SEQ ID NO: 1721846 - DNA, 15 bp, Homo sapiens
tgttttaaagactgg

SEQ ID NO: 1721847 - DNA, 15 bp, Homo sapiens
gttttaaagactggt

SEQ ID NO: 1721848 - DNA, 15 bp, Homo sapiens
ttttaaagactggtc

SEQ ID NO: 1721849 - DNA, 15 bp, Homo sapiens
tttaaagactggtcc

SEQ ID NO: 1721850 - DNA, 15 bp, Homo sapiens
ttaaagactggtcca

SEQ ID NO: 1721851 - DNA, 15 bp, Homo sapiens
taaagactggtccaa

SEQ ID NO: 1721852 - DNA, 15 bp, Homo sapiens
aaagactggtccaaa

SEQ ID NO: 1721853 - DNA, 15 bp, Homo sapiens
aagactggtccaaaa

SEQ ID NO: 1721854 - DNA, 15 bp, Homo sapiens
agactggtccaaaat

SEQ ID NO: 1721855 - DNA, 15 bp, Homo sapiens
gactggtccaaaatt

SEQ ID NO: 1721856 - DNA, 15 bp, Homo sapiens
actggtccaaaattg

SEQ ID NO: 1721857 - DNA, 15 bp, Homo sapiens
ctggtccaaaattgt

SEQ ID NO: 1721858 - DNA, 15 bp, Homo sapiens
tggtccaaaattgtt

SEQ ID NO: 1721859 - DNA, 15 bp, Homo sapiens
ggtccaaaattgttt

SEQ ID NO: 1721860 - DNA, 15 bp, Homo sapiens
gtccaaaattgttta

SEQ ID NO: 1721861 - DNA, 15 bp, Homo sapiens
tccaaaattgtttaa

SEQ ID NO: 1721862 - DNA, 15 bp, Homo sapiens
ccaaaattgtttaat

SEQ ID NO: 1721863 - DNA, 15 bp, Homo sapiens
caaaattgtttaata

SEQ ID NO: 1721864 - DNA, 15 bp, Homo sapiens
aaaattgtttaataa

SEQ ID NO: 1721865 - DNA, 15 bp, Homo sapiens
aaattgtttaataaa

SEQ ID NO: 1721866 - DNA, 15 bp, Homo sapiens
aattgtttaataaag

SEQ ID NO: 1721867 - DNA, 15 bp, Homo sapiens
attgtttaataaagt

SEQ ID NO: 1721868 - DNA, 15 bp, Homo sapiens
ttgtttaataaagta

SEQ ID NO: 1721869 - DNA, 15 bp, Homo sapiens
tgtttaataaagtag

SEQ ID NO: 1721870 - DNA, 15 bp, Homo sapiens
gtttaataaagtagc

SEQ ID NO: 1721871 - DNA, 15 bp, Homo sapiens
tttaataaagtagca

SEQ ID NO: 1721872 - DNA, 15 bp, Homo sapiens
ttaataaagtagcac

SEQ ID NO: 1721873 - DNA, 15 bp, Homo sapiens
taataaagtagcaca

SEQ ID NO: 1721874 - DNA, 15 bp, Homo sapiens
aataaagtagcacat

SEQ ID NO: 1721875 - DNA, 15 bp, Homo sapiens
ataaagtagcacatt

SEQ ID NO: 1721876 - DNA, 15 bp, Homo sapiens
taaagtagcacattt

SEQ ID NO: 1721877 - DNA, 15 bp, Homo sapiens
aaagtagcacatttc

SEQ ID NO: 1721878 - DNA, 15 bp, Homo sapiens
aagtagcacatttca

SEQ ID NO: 1721879 - DNA, 15 bp, Homo sapiens
agtagcacatttcaa

SEQ ID NO: 1721880 - DNA, 15 bp, Homo sapiens
gtagcacatttcaaa

SEQ ID NO: 1721881 - DNA, 15 bp, Homo sapiens
tagcacatttcaaaa

SEQ ID NO: 1721882 - DNA, 15 bp, Homo sapiens
agcacatttcaaaac

SEQ ID NO: 1721883 - DNA, 15 bp, Homo sapiens
gcacatttcaaaaca

SEQ ID NO: 1721884 - DNA, 15 bp, Homo sapiens
cacatttcaaaacag

SEQ ID NO: 1721885 - DNA, 15 bp, Homo sapiens
acatttcaaaacaga

SEQ ID NO: 1721886 - DNA, 15 bp, Homo sapiens
catttcaaaacagag

SEQ ID NO: 1721887 - DNA, 15 bp, Homo sapiens
atttcaaaacagagt

SEQ ID NO: 1721888 - DNA, 15 bp, Homo sapiens
tttcaaaacagagtg

SEQ ID NO: 1721889 - DNA, 15 bp, Homo sapiens
ttcaaaacagagtgc

SEQ ID NO: 1721890 - DNA, 15 bp, Homo sapiens
tcaaaacagagtgct

SEQ ID NO: 1721891 - DNA, 15 bp, Homo sapiens
caaaacagagtgctt

SEQ ID NO: 1721892 - DNA, 15 bp, Homo sapiens
aaaacagagtgcttt

SEQ ID NO: 1721893 - DNA, 15 bp, Homo sapiens
aaacagagtgctttg

SEQ ID NO: 1721894 - DNA, 15 bp, Homo sapiens
aacagagtgctttgt

SEQ ID NO: 1721895 - DNA, 15 bp, Homo sapiens
acagagtgctttgta

SEQ ID NO: 1721896 - DNA, 15 bp, Homo sapiens
cagagtgctttgtag

SEQ ID NO: 1721897 - DNA, 15 bp, Homo sapiens
agagtgctttgtaga

SEQ ID NO: 1721898 - DNA, 15 bp, Homo sapiens
gagtgctttgtagaa

SEQ ID NO: 1721899 - DNA, 15 bp, Homo sapiens
agtgctttgtagaag

SEQ ID NO: 1721900 - DNA, 15 bp, Homo sapiens
gtgctttgtagaagt

SEQ ID NO: 1721901 - DNA, 15 bp, Homo sapiens
tgctttgtagaagtt

SEQ ID NO: 1721902 - DNA, 15 bp, Homo sapiens
gctttgtagaagtta

SEQ ID NO: 1721903 - DNA, 15 bp, Homo sapiens
ctttgtagaagttat

SEQ ID NO: 1721904 - DNA, 15 bp, Homo sapiens
tttgtagaagttata

SEQ ID NO: 1721905 - DNA, 15 bp, Homo sapiens
ttgtagaagttatag

SEQ ID NO: 1721906 - DNA, 15 bp, Homo sapiens
tgtagaagttatagc

SEQ ID NO: 1721907 - DNA, 15 bp, Homo sapiens
gtagaagttatagcc

SEQ ID NO: 1721908 - DNA, 15 bp, Homo sapiens
tagaagttatagcct

SEQ ID NO: 1721909 - DNA, 15 bp, Homo sapiens
agaagttatagcctt

SEQ ID NO: 1721910 - DNA, 15 bp, Homo sapiens
gaagttatagccttg

SEQ ID NO: 1721911 - DNA, 15 bp, Homo sapiens
aagttatagccttgt

SEQ ID NO: 1721912 - DNA, 15 bp, Homo sapiens
agttatagccttgtt

SEQ ID NO: 1721913 - DNA, 15 bp, Homo sapiens
gttatagccttgttc

SEQ ID NO: 1721914 - DNA, 15 bp, Homo sapiens
ttatagccttgttca

SEQ ID NO: 1721915 - DNA, 15 bp, Homo sapiens
tatagccttgttcat

SEQ ID NO: 1721916 - DNA, 15 bp, Homo sapiens
atagccttgttcatt

SEQ ID NO: 1721917 - DNA, 15 bp, Homo sapiens
tagccttgttcattg

SEQ ID NO: 1721918 - DNA, 15 bp, Homo sapiens
agccttgttcattgc

SEQ ID NO: 1721919 - DNA, 15 bp, Homo sapiens
gccttgttcattgca

SEQ ID NO: 1721920 - DNA, 15 bp, Homo sapiens
ccttgttcattgcat

SEQ ID NO: 1721921 - DNA, 15 bp, Homo sapiens
cttgttcattgcatg

SEQ ID NO: 1721922 - DNA, 15 bp, Homo sapiens
ttgttcattgcatgt

SEQ ID NO: 1721923 - DNA, 15 bp, Homo sapiens
tgttcattgcatgta

SEQ ID NO: 1721924 - DNA, 15 bp, Homo sapiens
gttcattgcatgtaa

SEQ ID NO: 1721925 - DNA, 15 bp, Homo sapiens
ttcattgcatgtaac

SEQ ID NO: 1721926 - DNA, 15 bp, Homo sapiens
tcattgcatgtaact

SEQ ID NO: 1721927 - DNA, 15 bp, Homo sapiens
cattgcatgtaacta

SEQ ID NO: 1721928 - DNA, 15 bp, Homo sapiens
attgcatgtaactaa

SEQ ID NO: 1721929 - DNA, 15 bp, Homo sapiens
ttgcatgtaactaaa

SEQ ID NO: 1721930 - DNA, 15 bp, Homo sapiens
tgcatgtaactaaaa

SEQ ID NO: 1721931 - DNA, 15 bp, Homo sapiens
gcatgtaactaaaat

SEQ ID NO: 1721932 - DNA, 15 bp, Homo sapiens
catgtaactaaaatt

SEQ ID NO: 1721933 - DNA, 15 bp, Homo sapiens
atgtaactaaaatta

SEQ ID NO: 1721934 - DNA, 15 bp, Homo sapiens
tgtaactaaaattaa

SEQ ID NO: 1721935 - DNA, 15 bp, Homo sapiens
gtaactaaaattaaa

SEQ ID NO: 1721936 - DNA, 15 bp, Homo sapiens
taactaaaattaaaa

SEQ ID NO: 1721937 - DNA, 15 bp, Homo sapiens
aactaaaattaaaac

SEQ ID NO: 1721938 - DNA, 15 bp, Homo sapiens
actaaaattaaaaca

SEQ ID NO: 1721939 - DNA, 15 bp, Homo sapiens
ctaaaattaaaacag

SEQ ID NO: 1721940 - DNA, 15 bp, Homo sapiens
taaaattaaaacagt

SEQ ID NO: 1721941 - DNA, 15 bp, Homo sapiens
aaaattaaaacagta

SEQ ID NO: 1721942 - DNA, 15 bp, Homo sapiens
aaattaaaacagtat

SEQ ID NO: 1721943 - DNA, 15 bp, Homo sapiens
aattaaaacagtatc

SEQ ID NO: 1721944 - DNA, 15 bp, Homo sapiens
attaaaacagtatca

SEQ ID NO: 1721945 - DNA, 15 bp, Homo sapiens
ttaaaacagtatcaa

SEQ ID NO: 1721946 - DNA, 15 bp, Homo sapiens
taaaacagtatcaaa

SEQ ID NO: 1721947 - DNA, 15 bp, Homo sapiens
aaaacagtatcaaaa

SEQ ID NO: 1721948 - DNA, 15 bp, Homo sapiens
aaacagtatcaaaac

SEQ ID NO: 1721949 - DNA, 15 bp, Homo sapiens
aacagtatcaaaaca

SEQ ID NO: 1721950 - DNA, 15 bp, Homo sapiens
acagtatcaaaacac

SEQ ID NO: 1721951 - DNA, 15 bp, Homo sapiens
cagtatcaaaacaca

SEQ ID NO: 1721952 - DNA, 15 bp, Homo sapiens
agtatcaaaacacat

SEQ ID NO: 1721953 - DNA, 15 bp, Homo sapiens
gtatcaaaacacatt

SEQ ID NO: 1721954 - DNA, 15 bp, Homo sapiens
tatcaaaacacatta

SEQ ID NO: 1721955 - DNA, 15 bp, Homo sapiens
atcaaaacacattag

SEQ ID NO: 1721956 - DNA, 15 bp, Homo sapiens
tcaaaacacattagc

SEQ ID NO: 1721957 - DNA, 15 bp, Homo sapiens
caaaacacattagcc

SEQ ID NO: 1721958 - DNA, 15 bp, Homo sapiens
aaaacacattagcca

SEQ ID NO: 1721959 - DNA, 15 bp, Homo sapiens
aaacacattagccag

SEQ ID NO: 1721960 - DNA, 15 bp, Homo sapiens
aacacattagccagg

SEQ ID NO: 1721961 - DNA, 15 bp, Homo sapiens
acacattagccaggg

SEQ ID NO: 1721962 - DNA, 15 bp, Homo sapiens
cacattagccagggt

SEQ ID NO: 1721963 - DNA, 15 bp, Homo sapiens
acattagccagggtc

SEQ ID NO: 1721964 - DNA, 15 bp, Homo sapiens
cattagccagggtct

SEQ ID NO: 1721965 - DNA, 15 bp, Homo sapiens
attagccagggtctt

SEQ ID NO: 1721966 - DNA, 15 bp, Homo sapiens
ttagccagggtctta

SEQ ID NO: 1721967 - DNA, 15 bp, Homo sapiens
tagccagggtcttat

SEQ ID NO: 1721968 - DNA, 15 bp, Homo sapiens
agccagggtcttatc

SEQ ID NO: 1721969 - DNA, 15 bp, Homo sapiens
gccagggtcttatca

SEQ ID NO: 1721970 - DNA, 15 bp, Homo sapiens
ccagggtcttatcac

SEQ ID NO: 1721971 - DNA, 15 bp, Homo sapiens
cagggtcttatcacc

SEQ ID NO: 1721972 - DNA, 15 bp, Homo sapiens
agggtcttatcacct

SEQ ID NO: 1721973 - DNA, 15 bp, Homo sapiens
gggtcttatcacctt

SEQ ID NO: 1721974 - DNA, 15 bp, Homo sapiens
ggtcttatcaccttc

SEQ ID NO: 1721975 - DNA, 15 bp, Homo sapiens
gtcttatcaccttct

SEQ ID NO: 1721976 - DNA, 15 bp, Homo sapiens
tcttatcaccttctt

SEQ ID NO: 1721977 - DNA, 15 bp, Homo sapiens
cttatcaccttcttg

SEQ ID NO: 1721978 - DNA, 15 bp, Homo sapiens
ttatcaccttcttgc

SEQ ID NO: 1721979 - DNA, 15 bp, Homo sapiens
tatcaccttcttgct

SEQ ID NO: 1721980 - DNA, 15 bp, Homo sapiens
atcaccttcttgctc

SEQ ID NO: 1721981 - DNA, 15 bp, Homo sapiens
tcaccttcttgctcc

SEQ ID NO: 1721982 - DNA, 15 bp, Homo sapiens
caccttcttgctcca

SEQ ID NO: 1721983 - DNA, 15 bp, Homo sapiens
accttcttgctccac

SEQ ID NO: 1721984 - DNA, 15 bp, Homo sapiens
cttcttgctccactt

SEQ ID NO: 1721985 - DNA, 15 bp, Homo sapiens
ttcttgctccacttc

SEQ ID NO: 1721986 - DNA, 15 bp, Homo sapiens
tcttgctccacttca

SEQ ID NO: 1721987 - DNA, 15 bp, Homo sapiens
cttgctccacttcac

SEQ ID NO: 1721988 - DNA, 15 bp, Homo sapiens
ttgctccacttcaca

SEQ ID NO: 1721989 - DNA, 15 bp, Homo sapiens
tgctccacttcacaa

SEQ ID NO: 1721990 - DNA, 15 bp, Homo sapiens
gctccacttcacaaa

SEQ ID NO: 1721991 - DNA, 15 bp, Homo sapiens
ctccacttcacaaaa

SEQ ID NO: 1721992 - DNA, 15 bp, Homo sapiens
tccacttcacaaaaa

SEQ ID NO: 1721993 - DNA, 15 bp, Homo sapiens
ccacttcacaaaaaa

SEQ ID NO: 1721994 - DNA, 15 bp, Homo sapiens
cacttcacaaaaaaa

SEQ ID NO: 1721995 - DNA, 15 bp, Homo sapiens
acttcacaaaaaaat

SEQ ID NO: 1721996 - DNA, 15 bp, Homo sapiens
cttcacaaaaaaatt

SEQ ID NO: 1721997 - DNA, 15 bp, Homo sapiens
ttcacaaaaaaatta

SEQ ID NO: 1721998 - DNA, 15 bp, Homo sapiens
tcacaaaaaaattaa

SEQ ID NO: 1721999 - DNA, 15 bp, Homo sapiens
cacaaaaaaattaac

SEQ ID NO: 1722000 - DNA, 15 bp, Homo sapiens
acaaaaaaattaaca

SEQ ID NO: 1722001 - DNA, 15 bp, Homo sapiens
caaaaaaattaacaa

SEQ ID NO: 1722002 - DNA, 15 bp, Homo sapiens
aaaaaaattaacaat

SEQ ID NO: 1722003 - DNA, 15 bp, Homo sapiens
aaaaaattaacaata

SEQ ID NO: 1722004 - DNA, 15 bp, Homo sapiens
aaaaattaacaatac

SEQ ID NO: 1722005 - DNA, 15 bp, Homo sapiens
aaaattaacaataca

SEQ ID NO: 1722006 - DNA, 15 bp, Homo sapiens
aaattaacaatacat

SEQ ID NO: 1722007 - DNA, 15 bp, Homo sapiens
aattaacaatacatc

SEQ ID NO: 1722008 - DNA, 15 bp, Homo sapiens
attaacaatacatct

SEQ ID NO: 1722009 - DNA, 15 bp, Homo sapiens
ttaacaatacatctg

SEQ ID NO: 1722010 - DNA, 15 bp, Homo sapiens
taacaatacatctga

SEQ ID NO: 1722011 - DNA, 15 bp, Homo sapiens
aacaatacatctgaa

SEQ ID NO: 1722012 - DNA, 15 bp, Homo sapiens
acaatacatctgaaa

SEQ ID NO: 1722013 - DNA, 15 bp, Homo sapiens
caatacatctgaaag

SEQ ID NO: 1722014 - DNA, 15 bp, Homo sapiens
aatacatctgaaagc

SEQ ID NO: 1722015 - DNA, 15 bp, Homo sapiens
atacatctgaaagcc

SEQ ID NO: 1722016 - DNA, 15 bp, Homo sapiens
tacatctgaaagcct

SEQ ID NO: 1722017 - DNA, 15 bp, Homo sapiens
acatctgaaagcctt

SEQ ID NO: 1722018 - DNA, 15 bp, Homo sapiens
catctgaaagccttc

SEQ ID NO: 1722019 - DNA, 15 bp, Homo sapiens
atctgaaagccttct

SEQ ID NO: 1722020 - DNA, 15 bp, Homo sapiens
tctgaaagccttctg

SEQ ID NO: 1722021 - DNA, 15 bp, Homo sapiens
ctgaaagccttctgt

SEQ ID NO: 1722022 - DNA, 15 bp, Homo sapiens
tgaaagccttctgtg

SEQ ID NO: 1722023 - DNA, 15 bp, Homo sapiens
gaaagccttctgtga

SEQ ID NO: 1722024 - DNA, 15 bp, Homo sapiens
aaagccttctgtgaa

SEQ ID NO: 1722025 - DNA, 15 bp, Homo sapiens
aagccttctgtgaag

SEQ ID NO: 1722026 - DNA, 15 bp, Homo sapiens
agccttctgtgaaga

SEQ ID NO: 1722027 - DNA, 15 bp, Homo sapiens
gccttctgtgaagat

SEQ ID NO: 1722028 - DNA, 15 bp, Homo sapiens
ccttctgtgaagata

SEQ ID NO: 1722029 - DNA, 15 bp, Homo sapiens
cttctgtgaagatag

SEQ ID NO: 1722030 - DNA, 15 bp, Homo sapiens
ttctgtgaagatagt

SEQ ID NO: 1722031 - DNA, 15 bp, Homo sapiens
tctgtgaagatagtg

SEQ ID NO: 1722032 - DNA, 15 bp, Homo sapiens
ctgtgaagatagtgc

SEQ ID NO: 1722033 - DNA, 15 bp, Homo sapiens
tgtgaagatagtgct

SEQ ID NO: 1722034 - DNA, 15 bp, Homo sapiens
gtgaagatagtgctt

SEQ ID NO: 1722035 - DNA, 15 bp, Homo sapiens
tgaagatagtgcttc

SEQ ID NO: 1722036 - DNA, 15 bp, Homo sapiens
gaagatagtgcttca

SEQ ID NO: 1722037 - DNA, 15 bp, Homo sapiens
aagatagtgcttcac

SEQ ID NO: 1722038 - DNA, 15 bp, Homo sapiens
agatagtgcttcaca

SEQ ID NO: 1722039 - DNA, 15 bp, Homo sapiens
gatagtgcttcacaa

SEQ ID NO: 1722040 - DNA, 15 bp, Homo sapiens
atagtgcttcacaaa

SEQ ID NO: 1722041 - DNA, 15 bp, Homo sapiens
tagtgcttcacaaag

SEQ ID NO: 1722042 - DNA, 15 bp, Homo sapiens
agtgcttcacaaaga

SEQ ID NO: 1722043 - DNA, 15 bp, Homo sapiens
gtgcttcacaaagag

SEQ ID NO: 1722044 - DNA, 15 bp, Homo sapiens
tgcttcacaaagagc

SEQ ID NO: 1722045 - DNA, 15 bp, Homo sapiens
gcttcacaaagagca

SEQ ID NO: 1722046 - DNA, 15 bp, Homo sapiens
cttcacaaagagcaa

SEQ ID NO: 1722047 - DNA, 15 bp, Homo sapiens
ttcacaaagagcaaa

SEQ ID NO: 1722048 - DNA, 15 bp, Homo sapiens
tcacaaagagcaaac

SEQ ID NO: 1722049 - DNA, 15 bp, Homo sapiens
cacaaagagcaaaca

SEQ ID NO: 1722050 - DNA, 15 bp, Homo sapiens
acaaagagcaaacaa

SEQ ID NO: 1722051 - DNA, 15 bp, Homo sapiens
caaagagcaaacaaa

SEQ ID NO: 1722052 - DNA, 15 bp, Homo sapiens
aaagagcaaacaaaa

SEQ ID NO: 1722053 - DNA, 15 bp, Homo sapiens
aagagcaaacaaaat

SEQ ID NO: 1722054 - DNA, 15 bp, Homo sapiens
agagcaaacaaaata

SEQ ID NO: 1722055 - DNA, 15 bp, Homo sapiens
gagcaaacaaaatag

SEQ ID NO: 1722056 - DNA, 15 bp, Homo sapiens
agcaaacaaaataga

SEQ ID NO: 1722057 - DNA, 15 bp, Homo sapiens
gcaaacaaaatagag

SEQ ID NO: 1722058 - DNA, 15 bp, Homo sapiens
caaacaaaatagagg

SEQ ID NO: 1722059 - DNA, 15 bp, Homo sapiens
aaacaaaatagagga

SEQ ID NO: 1722060 - DNA, 15 bp, Homo sapiens
aacaaaatagaggag

SEQ ID NO: 1722061 - DNA, 15 bp, Homo sapiens
acaaaatagaggagc

SEQ ID NO: 1722062 - DNA, 15 bp, Homo sapiens
caaaatagaggagct

SEQ ID NO: 1722063 - DNA, 15 bp, Homo sapiens
aaaatagaggagctg

SEQ ID NO: 1722064 - DNA, 15 bp, Homo sapiens
aaatagaggagctgg

SEQ ID NO: 1722065 - DNA, 15 bp, Homo sapiens
aatagaggagctggt

SEQ ID NO: 1722066 - DNA, 15 bp, Homo sapiens
atagaggagctggtt

SEQ ID NO: 1722067 - DNA, 15 bp, Homo sapiens
tagaggagctggttg

SEQ ID NO: 1722068 - DNA, 15 bp, Homo sapiens
agaggagctggttgg

SEQ ID NO: 1722069 - DNA, 15 bp, Homo sapiens
gaggagctggttgga

SEQ ID NO: 1722070 - DNA, 15 bp, Homo sapiens
aggagctggttggag

SEQ ID NO: 1722071 - DNA, 15 bp, Homo sapiens
ggagctggttggaga

SEQ ID NO: 1722072 - DNA, 15 bp, Homo sapiens
gagctggttggagag

SEQ ID NO: 1722073 - DNA, 15 bp, Homo sapiens
agctggttggagaga

SEQ ID NO: 1722074 - DNA, 15 bp, Homo sapiens
gctggttggagagac

SEQ ID NO: 1722075 - DNA, 15 bp, Homo sapiens
ctggttggagagaca

SEQ ID NO: 1722076 - DNA, 15 bp, Homo sapiens
tggttggagagacaa

SEQ ID NO: 1722077 - DNA, 15 bp, Homo sapiens
ggttggagagacaaa

SEQ ID NO: 1722078 - DNA, 15 bp, Homo sapiens
gttggagagacaaag

SEQ ID NO: 1722079 - DNA, 15 bp, Homo sapiens
ttggagagacaaagc

SEQ ID NO: 1722080 - DNA, 15 bp, Homo sapiens
tggagagacaaagca

SEQ ID NO: 1722081 - DNA, 15 bp, Homo sapiens
ggagagacaaagcac

SEQ ID NO: 1722082 - DNA, 15 bp, Homo sapiens
gagagacaaagcaca

SEQ ID NO: 1722083 - DNA, 15 bp, Homo sapiens
agagacaaagcacaa

SEQ ID NO: 1722084 - DNA, 15 bp, Homo sapiens
gagacaaagcacaat

SEQ ID NO: 1722085 - DNA, 15 bp, Homo sapiens
agacaaagcacaata

SEQ ID NO: 1722086 - DNA, 15 bp, Homo sapiens
gacaaagcacaatat

SEQ ID NO: 1722087 - DNA, 15 bp, Homo sapiens
acaaagcacaatatg

SEQ ID NO: 1722088 - DNA, 15 bp, Homo sapiens
caaagcacaatatgt

SEQ ID NO: 1722089 - DNA, 15 bp, Homo sapiens
aaagcacaatatgtt

SEQ ID NO: 1722090 - DNA, 15 bp, Homo sapiens
aagcacaatatgttg

SEQ ID NO: 1722091 - DNA, 15 bp, Homo sapiens
agcacaatatgttgg

SEQ ID NO: 1722092 - DNA, 15 bp, Homo sapiens
gcacaatatgttgga

SEQ ID NO: 1722093 - DNA, 15 bp, Homo sapiens
cacaatatgttggac

SEQ ID NO: 1722094 - DNA, 15 bp, Homo sapiens
acaatatgttggact

SEQ ID NO: 1722095 - DNA, 15 bp, Homo sapiens
caatatgttggactg

SEQ ID NO: 1722096 - DNA, 15 bp, Homo sapiens
aatatgttggactga

SEQ ID NO: 1722097 - DNA, 15 bp, Homo sapiens
atatgttggactgaa

SEQ ID NO: 1722098 - DNA, 15 bp, Homo sapiens
tatgttggactgaat

SEQ ID NO: 1722099 - DNA, 15 bp, Homo sapiens
atgttggactgaatg

SEQ ID NO: 1722100 - DNA, 15 bp, Homo sapiens
tgttggactgaatga

SEQ ID NO: 1722101 - DNA, 15 bp, Homo sapiens
gttggactgaatgag

SEQ ID NO: 1722102 - DNA, 15 bp, Homo sapiens
ttggactgaatgaga

SEQ ID NO: 1722103 - DNA, 15 bp, Homo sapiens
tggactgaatgagac

SEQ ID NO: 1722104 - DNA, 15 bp, Homo sapiens
ggactgaatgagacc

SEQ ID NO: 1722105 - DNA, 15 bp, Homo sapiens
gactgaatgagaccc

SEQ ID NO: 1722106 - DNA, 15 bp, Homo sapiens
actgaatgagaccct

SEQ ID NO: 1722107 - DNA, 15 bp, Homo sapiens
ctgaatgagaccctc

SEQ ID NO: 1722108 - DNA, 15 bp, Homo sapiens
tgaatgagaccctca

SEQ ID NO: 1722109 - DNA, 15 bp, Homo sapiens
gaatgagaccctcag

SEQ ID NO: 1722110 - DNA, 15 bp, Homo sapiens
aatgagaccctcaga

SEQ ID NO: 1722111 - DNA, 15 bp, Homo sapiens
atgagaccctcagag

SEQ ID NO: 1722112 - DNA, 15 bp, Homo sapiens
tgagaccctcagagt

SEQ ID NO: 1722113 - DNA, 15 bp, Homo sapiens
gagaccctcagagtt

SEQ ID NO: 1722114 - DNA, 15 bp, Homo sapiens
agaccctcagagttg

SEQ ID NO: 1722115 - DNA, 15 bp, Homo sapiens
gaccctcagagttga

SEQ ID NO: 1722116 - DNA, 15 bp, Homo sapiens
accctcagagttgaa

SEQ ID NO: 1722117 - DNA, 15 bp, Homo sapiens
ccctcagagttgaag

SEQ ID NO: 1722118 - DNA, 15 bp, Homo sapiens
cctcagagttgaaga

SEQ ID NO: 1722119 - DNA, 15 bp, Homo sapiens
ctcagagttgaagaa

SEQ ID NO: 1722120 - DNA, 15 bp, Homo sapiens
tcagagttgaagaat

SEQ ID NO: 1722121 - DNA, 15 bp, Homo sapiens
cagagttgaagaata

SEQ ID NO: 1722122 - DNA, 15 bp, Homo sapiens
agagttgaagaatat

SEQ ID NO: 1722123 - DNA, 15 bp, Homo sapiens
gagttgaagaatatc

SEQ ID NO: 1722124 - DNA, 15 bp, Homo sapiens
agttgaagaatatca

SEQ ID NO: 1722125 - DNA, 15 bp, Homo sapiens
gttgaagaatatcac

SEQ ID NO: 1722126 - DNA, 15 bp, Homo sapiens
ttgaagaatatcaca

SEQ ID NO: 1722127 - DNA, 15 bp, Homo sapiens
tgaagaatatcacac

SEQ ID NO: 1722128 - DNA, 15 bp, Homo sapiens
gaagaatatcacacc

SEQ ID NO: 1722129 - DNA, 15 bp, Homo sapiens
aagaatatcacaccg

SEQ ID NO: 1722130 - DNA, 15 bp, Homo sapiens
agaatatcacaccgt

SEQ ID NO: 1722131 - DNA, 15 bp, Homo sapiens
gaatatcacaccgtg

SEQ ID NO: 1722132 - DNA, 15 bp, Homo sapiens
aatatcacaccgtga

SEQ ID NO: 1722133 - DNA, 15 bp, Homo sapiens
atatcacaccgtgaa

SEQ ID NO: 1722134 - DNA, 15 bp, Homo sapiens
tatcacaccgtgaat

SEQ ID NO: 1722135 - DNA, 15 bp, Homo sapiens
atcacaccgtgaatg

SEQ ID NO: 1722136 - DNA, 15 bp, Homo sapiens
tcacaccgtgaatga

SEQ ID NO: 1722137 - DNA, 15 bp, Homo sapiens
cacaccgtgaatgaa

SEQ ID NO: 1722138 - DNA, 15 bp, Homo sapiens
acaccgtgaatgaac

SEQ ID NO: 1722139 - DNA, 15 bp, Homo sapiens
caccgtgaatgaacc

SEQ ID NO: 1722140 - DNA, 15 bp, Homo sapiens
accgtgaatgaacct

SEQ ID NO: 1722141 - DNA, 15 bp, Homo sapiens
ccgtgaatgaacctt

SEQ ID NO: 1722142 - DNA, 15 bp, Homo sapiens
cgtgaatgaaccttc

SEQ ID NO: 1722143 - DNA, 15 bp, Homo sapiens
gtgaatgaaccttcc

SEQ ID NO: 1722144 - DNA, 15 bp, Homo sapiens
tgaatgaaccttcca

SEQ ID NO: 1722145 - DNA, 15 bp, Homo sapiens
gaatgaaccttccat

SEQ ID NO: 1722146 - DNA, 15 bp, Homo sapiens
aatgaaccttccatt

SEQ ID NO: 1722147 - DNA, 15 bp, Homo sapiens
atgaaccttccattt

SEQ ID NO: 1722148 - DNA, 15 bp, Homo sapiens
tgaaccttccatttt

SEQ ID NO: 1722149 - DNA, 15 bp, Homo sapiens
gaaccttccatttta

SEQ ID NO: 1722150 - DNA, 15 bp, Homo sapiens
aaccttccattttaa

SEQ ID NO: 1722151 - DNA, 15 bp, Homo sapiens
accttccattttaac

SEQ ID NO: 1722152 - DNA, 15 bp, Homo sapiens
ccttccattttaacc

SEQ ID NO: 1722153 - DNA, 15 bp, Homo sapiens
cttccattttaaccc

SEQ ID NO: 1722154 - DNA, 15 bp, Homo sapiens
ttccattttaacccc

SEQ ID NO: 1722155 - DNA, 15 bp, Homo sapiens
tccattttaacccca

SEQ ID NO: 1722156 - DNA, 15 bp, Homo sapiens
ccattttaaccccat

SEQ ID NO: 1722157 - DNA, 15 bp, Homo sapiens
cattttaaccccata

SEQ ID NO: 1722158 - DNA, 15 bp, Homo sapiens
attttaaccccatac

SEQ ID NO: 1722159 - DNA, 15 bp, Homo sapiens
ttttaaccccatact

SEQ ID NO: 1722160 - DNA, 15 bp, Homo sapiens
tttaaccccatacta

SEQ ID NO: 1722161 - DNA, 15 bp, Homo sapiens
ttaaccccatactaa

SEQ ID NO: 1722162 - DNA, 15 bp, Homo sapiens
taaccccatactaaa

SEQ ID NO: 1722163 - DNA, 15 bp, Homo sapiens
aaccccatactaaac

SEQ ID NO: 1722164 - DNA, 15 bp, Homo sapiens
accccatactaaact

SEQ ID NO: 1722165 - DNA, 15 bp, Homo sapiens
ccccatactaaactc

SEQ ID NO: 1722166 - DNA, 15 bp, Homo sapiens
cccatactaaactcc

SEQ ID NO: 1722167 - DNA, 15 bp, Homo sapiens
ccatactaaactcct

SEQ ID NO: 1722168 - DNA, 15 bp, Homo sapiens
catactaaactcctc

SEQ ID NO: 1722169 - DNA, 15 bp, Homo sapiens
atactaaactcctca

SEQ ID NO: 1722170 - DNA, 15 bp, Homo sapiens
tactaaactcctcag

SEQ ID NO: 1722171 - DNA, 15 bp, Homo sapiens
actaaactcctcagt

SEQ ID NO: 1722172 - DNA, 15 bp, Homo sapiens
ctaaactcctcagtt

SEQ ID NO: 1722173 - DNA, 15 bp, Homo sapiens
taaactcctcagttg

SEQ ID NO: 1722174 - DNA, 15 bp, Homo sapiens
aaactcctcagttga

SEQ ID NO: 1722175 - DNA, 15 bp, Homo sapiens
aactcctcagttgag

SEQ ID NO: 1722176 - DNA, 15 bp, Homo sapiens
actcctcagttgaga

SEQ ID NO: 1722177 - DNA, 15 bp, Homo sapiens
ctcctcagttgagaa

SEQ ID NO: 1722178 - DNA, 15 bp, Homo sapiens
tcctcagttgagaac

SEQ ID NO: 1722179 - DNA, 15 bp, Homo sapiens
cctcagttgagaact

SEQ ID NO: 1722180 - DNA, 15 bp, Homo sapiens
ctcagttgagaactg

SEQ ID NO: 1722181 - DNA, 15 bp, Homo sapiens
tcagttgagaactgg

SEQ ID NO: 1722182 - DNA, 15 bp, Homo sapiens
cagttgagaactggg

SEQ ID NO: 1722183 - DNA, 15 bp, Homo sapiens
agttgagaactgggt

SEQ ID NO: 1722184 - DNA, 15 bp, Homo sapiens
gttgagaactgggta

SEQ ID NO: 1722185 - DNA, 15 bp, Homo sapiens
ttgagaactgggtaa

SEQ ID NO: 1722186 - DNA, 15 bp, Homo sapiens
tgagaactgggtaaa

SEQ ID NO: 1722187 - DNA, 15 bp, Homo sapiens
gagaactgggtaaac

SEQ ID NO: 1722188 - DNA, 15 bp, Homo sapiens
agaactgggtaaact

SEQ ID NO: 1722189 - DNA, 15 bp, Homo sapiens
gaactgggtaaactg

SEQ ID NO: 1722190 - DNA, 15 bp, Homo sapiens
aactgggtaaactga

SEQ ID NO: 1722191 - DNA, 15 bp, Homo sapiens
actgggtaaactgag

SEQ ID NO: 1722192 - DNA, 15 bp, Homo sapiens
ctgggtaaactgagg

SEQ ID NO: 1722193 - DNA, 15 bp, Homo sapiens
tgggtaaactgaggc

SEQ ID NO: 1722194 - DNA, 15 bp, Homo sapiens
gggtaaactgaggcc

SEQ ID NO: 1722195 - DNA, 15 bp, Homo sapiens
ggtaaactgaggcca

SEQ ID NO: 1722196 - DNA, 15 bp, Homo sapiens
gtaaactgaggccac

SEQ ID NO: 1722197 - DNA, 15 bp, Homo sapiens
taaactgaggccacc

SEQ ID NO: 1722198 - DNA, 15 bp, Homo sapiens
aaactgaggccacca

SEQ ID NO: 1722199 - DNA, 15 bp, Homo sapiens
aactgaggccaccaa

SEQ ID NO: 1722200 - DNA, 15 bp, Homo sapiens
actgaggccaccaac

SEQ ID NO: 1722201 - DNA, 15 bp, Homo sapiens
ctgaggccaccaaca

SEQ ID NO: 1722202 - DNA, 15 bp, Homo sapiens
tgaggccaccaacac

SEQ ID NO: 1722203 - DNA, 15 bp, Homo sapiens
gaggccaccaacact

SEQ ID NO: 1722204 - DNA, 15 bp, Homo sapiens
aggccaccaacacta

SEQ ID NO: 1722205 - DNA, 15 bp, Homo sapiens
ggccaccaacactaa

SEQ ID NO: 1722206 - DNA, 15 bp, Homo sapiens
gccaccaacactaaa

SEQ ID NO: 1722207 - DNA, 15 bp, Homo sapiens
ccaccaacactaaat

SEQ ID NO: 1722208 - DNA, 15 bp, Homo sapiens
caccaacactaaatg

SEQ ID NO: 1722209 - DNA, 15 bp, Homo sapiens
accaacactaaatgg

SEQ ID NO: 1722210 - DNA, 15 bp, Homo sapiens
ccaacactaaatggc

SEQ ID NO: 1722211 - DNA, 15 bp, Homo sapiens
caacactaaatggcc

SEQ ID NO: 1722212 - DNA, 15 bp, Homo sapiens
aacactaaatggcct

SEQ ID NO: 1722213 - DNA, 15 bp, Homo sapiens
acactaaatggcctt

SEQ ID NO: 1722214 - DNA, 15 bp, Homo sapiens
cactaaatggccttc

SEQ ID NO: 1722215 - DNA, 15 bp, Homo sapiens
actaaatggccttct

SEQ ID NO: 1722216 - DNA, 15 bp, Homo sapiens
ctaaatggccttctg

SEQ ID NO: 1722217 - DNA, 15 bp, Homo sapiens
taaatggccttctgg

SEQ ID NO: 1722218 - DNA, 15 bp, Homo sapiens
aaatggccttctgga

SEQ ID NO: 1722219 - DNA, 15 bp, Homo sapiens
aatggccttctggag

SEQ ID NO: 1722220 - DNA, 15 bp, Homo sapiens
atggccttctggagt

SEQ ID NO: 1722221 - DNA, 15 bp, Homo sapiens
tggccttctggagtt

SEQ ID NO: 1722222 - DNA, 15 bp, Homo sapiens
ggccttctggagttt

SEQ ID NO: 1722223 - DNA, 15 bp, Homo sapiens
gccttctggagtttt

SEQ ID NO: 1722224 - DNA, 15 bp, Homo sapiens
ccttctggagtttta

SEQ ID NO: 1722225 - DNA, 15 bp, Homo sapiens
cttctggagttttag

SEQ ID NO: 1722226 - DNA, 15 bp, Homo sapiens
ttctggagttttagt

SEQ ID NO: 1722227 - DNA, 15 bp, Homo sapiens
tctggagttttagtg

SEQ ID NO: 1722228 - DNA, 15 bp, Homo sapiens
ctggagttttagtgg

SEQ ID NO: 1722229 - DNA, 15 bp, Homo sapiens
tggagttttagtggt

SEQ ID NO: 1722230 - DNA, 15 bp, Homo sapiens
ggagttttagtggtt

SEQ ID NO: 1722231 - DNA, 15 bp, Homo sapiens
gagttttagtggtta

SEQ ID NO: 1722232 - DNA, 15 bp, Homo sapiens
agttttagtggttag

SEQ ID NO: 1722233 - DNA, 15 bp, Homo sapiens
gttttagtggttaga

SEQ ID NO: 1722234 - DNA, 15 bp, Homo sapiens
ttttagtggttagat

SEQ ID NO: 1722235 - DNA, 15 bp, Homo sapiens
tttagtggttagatg

SEQ ID NO: 1722236 - DNA, 15 bp, Homo sapiens
ttagtggttagatgc

SEQ ID NO: 1722237 - DNA, 15 bp, Homo sapiens
tagtggttagatgca

SEQ ID NO: 1722238 - DNA, 15 bp, Homo sapiens
agtggttagatgcag

SEQ ID NO: 1722239 - DNA, 15 bp, Homo sapiens
gtggttagatgcagg

SEQ ID NO: 1722240 - DNA, 15 bp, Homo sapiens
tggttagatgcaggg

SEQ ID NO: 1722241 - DNA, 15 bp, Homo sapiens
ggttagatgcagggc

SEQ ID NO: 1722242 - DNA, 15 bp, Homo sapiens
gttagatgcagggcc

SEQ ID NO: 1722243 - DNA, 15 bp, Homo sapiens
ttagatgcagggcca

SEQ ID NO: 1722244 - DNA, 15 bp, Homo sapiens
tagatgcagggccag

SEQ ID NO: 1722245 - DNA, 15 bp, Homo sapiens
agatgcagggccagg

SEQ ID NO: 1722246 - DNA, 15 bp, Homo sapiens
gatgcagggccaggc

SEQ ID NO: 1722247 - DNA, 15 bp, Homo sapiens
atgcagggccaggct

SEQ ID NO: 1722248 - DNA, 15 bp, Homo sapiens
tgcagggccaggcta

SEQ ID NO: 1722249 - DNA, 15 bp, Homo sapiens
gcagggccaggctag

SEQ ID NO: 1722250 - DNA, 15 bp, Homo sapiens
cagggccaggctaga

SEQ ID NO: 1722251 - DNA, 15 bp, Homo sapiens
agggccaggctagaa

SEQ ID NO: 1722252 - DNA, 15 bp, Homo sapiens
gggccaggctagaat

SEQ ID NO: 1722253 - DNA, 15 bp, Homo sapiens
ggccaggctagaatg

SEQ ID NO: 1722254 - DNA, 15 bp, Homo sapiens
gccaggctagaatgt

SEQ ID NO: 1722255 - DNA, 15 bp, Homo sapiens
ccaggctagaatgta

SEQ ID NO: 1722256 - DNA, 15 bp, Homo sapiens
caggctagaatgtag

SEQ ID NO: 1722257 - DNA, 15 bp, Homo sapiens
aggctagaatgtagt

SEQ ID NO: 1722258 - DNA, 15 bp, Homo sapiens
ggctagaatgtagtt

SEQ ID NO: 1722259 - DNA, 15 bp, Homo sapiens
gctagaatgtagttc

SEQ ID NO: 1722260 - DNA, 15 bp, Homo sapiens
ctagaatgtagttct

SEQ ID NO: 1722261 - DNA, 15 bp, Homo sapiens
tagaatgtagttctg

SEQ ID NO: 1722262 - DNA, 15 bp, Homo sapiens
agaatgtagttctga

SEQ ID NO: 1722263 - DNA, 15 bp, Homo sapiens
gaatgtagttctgat

SEQ ID NO: 1722264 - DNA, 15 bp, Homo sapiens
aatgtagttctgatg

SEQ ID NO: 1722265 - DNA, 15 bp, Homo sapiens
atgtagttctgatga

SEQ ID NO: 1722266 - DNA, 15 bp, Homo sapiens
tgtagttctgatgac

SEQ ID NO: 1722267 - DNA, 15 bp, Homo sapiens
gtagttctgatgact

SEQ ID NO: 1722268 - DNA, 15 bp, Homo sapiens
tagttctgatgactc

SEQ ID NO: 1722269 - DNA, 15 bp, Homo sapiens
agttctgatgactcc

SEQ ID NO: 1722270 - DNA, 15 bp, Homo sapiens
gttctgatgactcca

SEQ ID NO: 1722271 - DNA, 15 bp, Homo sapiens
ttctgatgactccag

SEQ ID NO: 1722272 - DNA, 15 bp, Homo sapiens
tctgatgactccagt

SEQ ID NO: 1722273 - DNA, 15 bp, Homo sapiens
ctgatgactccagtc

SEQ ID NO: 1722274 - DNA, 15 bp, Homo sapiens
tgatgactccagtcc

SEQ ID NO: 1722275 - DNA, 15 bp, Homo sapiens
gatgactccagtcca

SEQ ID NO: 1722276 - DNA, 15 bp, Homo sapiens
atgactccagtccag

SEQ ID NO: 1722277 - DNA, 15 bp, Homo sapiens
tgactccagtccagg

SEQ ID NO: 1722278 - DNA, 15 bp, Homo sapiens
gactccagtccagga

SEQ ID NO: 1722279 - DNA, 15 bp, Homo sapiens
actccagtccaggat

SEQ ID NO: 1722280 - DNA, 15 bp, Homo sapiens
ctccagtccaggatg

SEQ ID NO: 1722281 - DNA, 15 bp, Homo sapiens
tccagtccaggatgc

SEQ ID NO: 1722282 - DNA, 15 bp, Homo sapiens
ccagtccaggatgct

SEQ ID NO: 1722283 - DNA, 15 bp, Homo sapiens
cagtccaggatgctg

SEQ ID NO: 1722284 - DNA, 15 bp, Homo sapiens
agtccaggatgctgg

SEQ ID NO: 1722285 - DNA, 15 bp, Homo sapiens
gtccaggatgctggt

SEQ ID NO: 1722286 - DNA, 15 bp, Homo sapiens
tccaggatgctggtt

SEQ ID NO: 1722287 - DNA, 15 bp, Homo sapiens
ccaggatgctggttg

SEQ ID NO: 1722288 - DNA, 15 bp, Homo sapiens
caggatgctggttgc

SEQ ID NO: 1722289 - DNA, 15 bp, Homo sapiens
aggatgctggttgct

SEQ ID NO: 1722290 - DNA, 15 bp, Homo sapiens
ggatgctggttgcta

SEQ ID NO: 1722291 - DNA, 15 bp, Homo sapiens
gatgctggttgctaa

SEQ ID NO: 1722292 - DNA, 15 bp, Homo sapiens
atgctggttgctaaa

SEQ ID NO: 1722293 - DNA, 15 bp, Homo sapiens
tgctggttgctaaac

SEQ ID NO: 1722294 - DNA, 15 bp, Homo sapiens
gctggttgctaaact

SEQ ID NO: 1722295 - DNA, 15 bp, Homo sapiens
ctggttgctaaactc

SEQ ID NO: 1722296 - DNA, 15 bp, Homo sapiens
tggttgctaaactcc

SEQ ID NO: 1722297 - DNA, 15 bp, Homo sapiens
ggttgctaaactcca

SEQ ID NO: 1722298 - DNA, 15 bp, Homo sapiens
gttgctaaactccac

SEQ ID NO: 1722299 - DNA, 15 bp, Homo sapiens
ttgctaaactccacg

SEQ ID NO: 1722300 - DNA, 15 bp, Homo sapiens
tgctaaactccacga

SEQ ID NO: 1722301 - DNA, 15 bp, Homo sapiens
gctaaactccacgaa

SEQ ID NO: 1722302 - DNA, 15 bp, Homo sapiens
ctaaactccacgaag

SEQ ID NO: 1722303 - DNA, 15 bp, Homo sapiens
taaactccacgaagg

SEQ ID NO: 1722304 - DNA, 15 bp, Homo sapiens
aaactccacgaaggc

SEQ ID NO: 1722305 - DNA, 15 bp, Homo sapiens
aactccacgaaggcc

SEQ ID NO: 1722306 - DNA, 15 bp, Homo sapiens
actccacgaaggcct

SEQ ID NO: 1722307 - DNA, 15 bp, Homo sapiens
ctccacgaaggcctt

SEQ ID NO: 1722308 - DNA, 15 bp, Homo sapiens
tccacgaaggccttt

SEQ ID NO: 1722309 - DNA, 15 bp, Homo sapiens
ccacgaaggcctttg

SEQ ID NO: 1722310 - DNA, 15 bp, Homo sapiens
cacgaaggcctttgt

SEQ ID NO: 1722311 - DNA, 15 bp, Homo sapiens
acgaaggcctttgta

SEQ ID NO: 1722312 - DNA, 15 bp, Homo sapiens
cgaaggcctttgtac

SEQ ID NO: 1722313 - DNA, 15 bp, Homo sapiens
gaaggcctttgtaca

SEQ ID NO: 1722314 - DNA, 15 bp, Homo sapiens
aaggcctttgtacat

SEQ ID NO: 1722315 - DNA, 15 bp, Homo sapiens
aggcctttgtacatc

SEQ ID NO: 1722316 - DNA, 15 bp, Homo sapiens
ggcctttgtacatcg

SEQ ID NO: 1722317 - DNA, 15 bp, Homo sapiens
gcctttgtacatcga

SEQ ID NO: 1722318 - DNA, 15 bp, Homo sapiens
cctttgtacatcgat

SEQ ID NO: 1722319 - DNA, 15 bp, Homo sapiens
ctttgtacatcgatc

SEQ ID NO: 1722320 - DNA, 15 bp, Homo sapiens
tttgtacatcgatct

SEQ ID NO: 1722321 - DNA, 15 bp, Homo sapiens
ttgtacatcgatctg

SEQ ID NO: 1722322 - DNA, 15 bp, Homo sapiens
tgtacatcgatctgc

SEQ ID NO: 1722323 - DNA, 15 bp, Homo sapiens
gtacatcgatctgcc

SEQ ID NO: 1722324 - DNA, 15 bp, Homo sapiens
tacatcgatctgcct

SEQ ID NO: 1722325 - DNA, 15 bp, Homo sapiens
acatcgatctgcctt

SEQ ID NO: 1722326 - DNA, 15 bp, Homo sapiens
catcgatctgccttt

SEQ ID NO: 1722327 - DNA, 15 bp, Homo sapiens
atcgatctgcctttg

SEQ ID NO: 1722328 - DNA, 15 bp, Homo sapiens
tcgatctgcctttga

SEQ ID NO: 1722329 - DNA, 15 bp, Homo sapiens
cgatctgcctttgaa

SEQ ID NO: 1722330 - DNA, 15 bp, Homo sapiens
gatctgcctttgaat

SEQ ID NO: 1722331 - DNA, 15 bp, Homo sapiens
atctgcctttgaatt

SEQ ID NO: 1722332 - DNA, 15 bp, Homo sapiens
tctgcctttgaattt

SEQ ID NO: 1722333 - DNA, 15 bp, Homo sapiens
ctgcctttgaatttc

SEQ ID NO: 1722334 - DNA, 15 bp, Homo sapiens
tgcctttgaatttcc

SEQ ID NO: 1722335 - DNA, 15 bp, Homo sapiens
gcctttgaatttcct

SEQ ID NO: 1722336 - DNA, 15 bp, Homo sapiens
cctttgaatttcctg

SEQ ID NO: 1722337 - DNA, 15 bp, Homo sapiens
ctttgaatttcctgg

SEQ ID NO: 1722338 - DNA, 15 bp, Homo sapiens
tttgaatttcctggc

SEQ ID NO: 1722339 - DNA, 15 bp, Homo sapiens
ttgaatttcctggca

SEQ ID NO: 1722340 - DNA, 15 bp, Homo sapiens
tgaatttcctggcac

SEQ ID NO: 1722341 - DNA, 15 bp, Homo sapiens
gaatttcctggcacc

SEQ ID NO: 1722342 - DNA, 15 bp, Homo sapiens
aatttcctggcacct

SEQ ID NO: 1722343 - DNA, 15 bp, Homo sapiens
atttcctggcacctg

SEQ ID NO: 1722344 - DNA, 15 bp, Homo sapiens
tttcctggcacctgc

SEQ ID NO: 1722345 - DNA, 15 bp, Homo sapiens
ttcctggcacctgcc

SEQ ID NO: 1722346 - DNA, 15 bp, Homo sapiens
tcctggcacctgcct

SEQ ID NO: 1722347 - DNA, 15 bp, Homo sapiens
cctggcacctgccta

SEQ ID NO: 1722348 - DNA, 15 bp, Homo sapiens
ctggcacctgcctac

SEQ ID NO: 1722349 - DNA, 15 bp, Homo sapiens
tggcacctgcctacc

SEQ ID NO: 1722350 - DNA, 15 bp, Homo sapiens
ggcacctgcctacct

SEQ ID NO: 1722351 - DNA, 15 bp, Homo sapiens
gcacctgcctacctg

SEQ ID NO: 1722352 - DNA, 15 bp, Homo sapiens
cacctgcctacctgc

SEQ ID NO: 1722353 - DNA, 15 bp, Homo sapiens
acctgcctacctgca

SEQ ID NO: 1722354 - DNA, 15 bp, Homo sapiens
cctgcctacctgcat

SEQ ID NO: 1722355 - DNA, 15 bp, Homo sapiens
ctgcctacctgcatt

SEQ ID NO: 1722356 - DNA, 15 bp, Homo sapiens
tgcctacctgcattc

SEQ ID NO: 1722357 - DNA, 15 bp, Homo sapiens
gcctacctgcattct

SEQ ID NO: 1722358 - DNA, 15 bp, Homo sapiens
cctacctgcattctg

SEQ ID NO: 1722359 - DNA, 15 bp, Homo sapiens
ctacctgcattctga

SEQ ID NO: 1722360 - DNA, 15 bp, Homo sapiens
tacctgcattctgac

SEQ ID NO: 1722361 - DNA, 15 bp, Homo sapiens
acctgcattctgact

SEQ ID NO: 1722362 - DNA, 15 bp, Homo sapiens
cctgcattctgactt

SEQ ID NO: 1722363 - DNA, 15 bp, Homo sapiens
ctgcattctgacttc

SEQ ID NO: 1722364 - DNA, 15 bp, Homo sapiens
tgcattctgacttcc

SEQ ID NO: 1722365 - DNA, 15 bp, Homo sapiens
gcattctgacttcct

SEQ ID NO: 1722366 - DNA, 15 bp, Homo sapiens
cattctgacttcctc

SEQ ID NO: 1722367 - DNA, 15 bp, Homo sapiens
attctgacttcctct

SEQ ID NO: 1722368 - DNA, 15 bp, Homo sapiens
ttctgacttcctctg

SEQ ID NO: 1722369 - DNA, 15 bp, Homo sapiens
tctgacttcctctgg

SEQ ID NO: 1722370 - DNA, 15 bp, Homo sapiens
ctgacttcctctggg

SEQ ID NO: 1722371 - DNA, 15 bp, Homo sapiens
tgacttcctctggga

SEQ ID NO: 1722372 - DNA, 15 bp, Homo sapiens
gacttcctctgggat

SEQ ID NO: 1722373 - DNA, 15 bp, Homo sapiens
acttcctctgggatc

SEQ ID NO: 1722374 - DNA, 15 bp, Homo sapiens
cttcctctgggatcc

SEQ ID NO: 1722375 - DNA, 15 bp, Homo sapiens
ttcctctgggatcca

SEQ ID NO: 1722376 - DNA, 15 bp, Homo sapiens
tcctctgggatccac

SEQ ID NO: 1722377 - DNA, 15 bp, Homo sapiens
cctctgggatccaca

SEQ ID NO: 1722378 - DNA, 15 bp, Homo sapiens
ctctgggatccacat

SEQ ID NO: 1722379 - DNA, 15 bp, Homo sapiens
tctgggatccacatg

SEQ ID NO: 1722380 - DNA, 15 bp, Homo sapiens
ctgggatccacatgt

SEQ ID NO: 1722381 - DNA, 15 bp, Homo sapiens
tgggatccacatgtg

SEQ ID NO: 1722382 - DNA, 15 bp, Homo sapiens
gggatccacatgtgg

SEQ ID NO: 1722383 - DNA, 15 bp, Homo sapiens
ggatccacatgtgga

SEQ ID NO: 1722384 - DNA, 15 bp, Homo sapiens
gatccacatgtggac

SEQ ID NO: 1722385 - DNA, 15 bp, Homo sapiens
atccacatgtggacc

SEQ ID NO: 1722386 - DNA, 15 bp, Homo sapiens
tccacatgtggacct

SEQ ID NO: 1722387 - DNA, 15 bp, Homo sapiens
ccacatgtggacctg

SEQ ID NO: 1722388 - DNA, 15 bp, Homo sapiens
cacatgtggacctgt

SEQ ID NO: 1722389 - DNA, 15 bp, Homo sapiens
acatgtggacctgtg

SEQ ID NO: 1722390 - DNA, 15 bp, Homo sapiens
catgtggacctgtgg

SEQ ID NO: 1722391 - DNA, 15 bp, Homo sapiens
atgtggacctgtggc

SEQ ID NO: 1722392 - DNA, 15 bp, Homo sapiens
tgtggacctgtggcg

SEQ ID NO: 1722393 - DNA, 15 bp, Homo sapiens
gtggacctgtggcgc

SEQ ID NO: 1722394 - DNA, 15 bp, Homo sapiens
tggacctgtggcgca

SEQ ID NO: 1722395 - DNA, 15 bp, Homo sapiens
ggacctgtggcgcaa

SEQ ID NO: 1722396 - DNA, 15 bp, Homo sapiens
gacctgtggcgcaac

SEQ ID NO: 1722397 - DNA, 15 bp, Homo sapiens
acctgtggcgcaacc

SEQ ID NO: 1722398 - DNA, 15 bp, Homo sapiens
cctgtggcgcaacct

SEQ ID NO: 1722399 - DNA, 15 bp, Homo sapiens
ctgtggcgcaacctc

SEQ ID NO: 1722400 - DNA, 15 bp, Homo sapiens
tgtggcgcaacctct

SEQ ID NO: 1722401 - DNA, 15 bp, Homo sapiens
gtggcgcaacctctt

SEQ ID NO: 1722402 - DNA, 15 bp, Homo sapiens
tggcgcaacctcttg

SEQ ID NO: 1722403 - DNA, 15 bp, Homo sapiens
ggcgcaacctcttgc

SEQ ID NO: 1722404 - DNA, 15 bp, Homo sapiens
gcgcaacctcttgct

SEQ ID NO: 1722405 - DNA, 15 bp, Homo sapiens
cgcaacctcttgctt

SEQ ID NO: 1722406 - DNA, 15 bp, Homo sapiens
gcaacctcttgcttg

SEQ ID NO: 1722407 - DNA, 15 bp, Homo sapiens
caacctcttgcttgg

SEQ ID NO: 1722408 - DNA, 15 bp, Homo sapiens
aacctcttgcttggc

SEQ ID NO: 1722409 - DNA, 15 bp, Homo sapiens
acctcttgcttggcc

SEQ ID NO: 1722410 - DNA, 15 bp, Homo sapiens
cctcttgcttggcca

SEQ ID NO: 1722411 - DNA, 15 bp, Homo sapiens
ctcttgcttggccag

SEQ ID NO: 1722412 - DNA, 15 bp, Homo sapiens
tcttgcttggccagg

SEQ ID NO: 1722413 - DNA, 15 bp, Homo sapiens
cttgcttggccaggg

SEQ ID NO: 1722414 - DNA, 15 bp, Homo sapiens
ttgcttggccagggt

SEQ ID NO: 1722415 - DNA, 15 bp, Homo sapiens
tgcttggccagggtg

SEQ ID NO: 1722416 - DNA, 15 bp, Homo sapiens
gcttggccagggtga

SEQ ID NO: 1722417 - DNA, 15 bp, Homo sapiens
cttggccagggtgag

SEQ ID NO: 1722418 - DNA, 15 bp, Homo sapiens
ttggccagggtgagc

SEQ ID NO: 1722419 - DNA, 15 bp, Homo sapiens
tggccagggtgagca

SEQ ID NO: 1722420 - DNA, 15 bp, Homo sapiens
ggccagggtgagcag

SEQ ID NO: 1722421 - DNA, 15 bp, Homo sapiens
gccagggtgagcagg

SEQ ID NO: 1722422 - DNA, 15 bp, Homo sapiens
ccagggtgagcaggg

SEQ ID NO: 1722423 - DNA, 15 bp, Homo sapiens
cagggtgagcagggc

SEQ ID NO: 1722424 - DNA, 15 bp, Homo sapiens
agggtgagcagggca

SEQ ID NO: 1722425 - DNA, 15 bp, Homo sapiens
gggtgagcagggcat

SEQ ID NO: 1722426 - DNA, 15 bp, Homo sapiens
ggtgagcagggcatc

SEQ ID NO: 1722427 - DNA, 15 bp, Homo sapiens
gtgagcagggcatca

SEQ ID NO: 1722428 - DNA, 15 bp, Homo sapiens
tgagcagggcatcag

SEQ ID NO: 1722429 - DNA, 15 bp, Homo sapiens
gagcagggcatcagc

SEQ ID NO: 1722430 - DNA, 15 bp, Homo sapiens
agcagggcatcagca

SEQ ID NO: 1722431 - DNA, 15 bp, Homo sapiens
gcagggcatcagcat

SEQ ID NO: 1722432 - DNA, 15 bp, Homo sapiens
cagggcatcagcatt

SEQ ID NO: 1722433 - DNA, 15 bp, Homo sapiens
agggcatcagcattc

SEQ ID NO: 1722434 - DNA, 15 bp, Homo sapiens
gggcatcagcattcc

SEQ ID NO: 1722435 - DNA, 15 bp, Homo sapiens
ggcatcagcattcca

SEQ ID NO: 1722436 - DNA, 15 bp, Homo sapiens
gcatcagcattccaa

SEQ ID NO: 1722437 - DNA, 15 bp, Homo sapiens
catcagcattccaaa

SEQ ID NO: 1722438 - DNA, 15 bp, Homo sapiens
atcagcattccaaag

SEQ ID NO: 1722439 - DNA, 15 bp, Homo sapiens
tcagcattccaaagc

SEQ ID NO: 1722440 - DNA, 15 bp, Homo sapiens
cagcattccaaagct

SEQ ID NO: 1722441 - DNA, 15 bp, Homo sapiens
agcattccaaagcta

SEQ ID NO: 1722442 - DNA, 15 bp, Homo sapiens
gcattccaaagctaa

SEQ ID NO: 1722443 - DNA, 15 bp, Homo sapiens
cattccaaagctaag

SEQ ID NO: 1722444 - DNA, 15 bp, Homo sapiens
attccaaagctaaga

SEQ ID NO: 1722445 - DNA, 15 bp, Homo sapiens
ttccaaagctaagag

SEQ ID NO: 1722446 - DNA, 15 bp, Homo sapiens
tccaaagctaagaga

SEQ ID NO: 1722447 - DNA, 15 bp, Homo sapiens
ccaaagctaagagaa

SEQ ID NO: 1722448 - DNA, 15 bp, Homo sapiens
caaagctaagagaat

SEQ ID NO: 1722449 - DNA, 15 bp, Homo sapiens
aaagctaagagaata

SEQ ID NO: 1722450 - DNA, 15 bp, Homo sapiens
aagctaagagaataa

SEQ ID NO: 1722451 - DNA, 15 bp, Homo sapiens
agctaagagaataag

SEQ ID NO: 1722452 - DNA, 15 bp, Homo sapiens
gctaagagaataaga

SEQ ID NO: 1722453 - DNA, 15 bp, Homo sapiens
ctaagagaataagat

SEQ ID NO: 1722454 - DNA, 15 bp, Homo sapiens
taagagaataagata

SEQ ID NO: 1722455 - DNA, 15 bp, Homo sapiens
aagagaataagatac

SEQ ID NO: 1722456 - DNA, 15 bp, Homo sapiens
agagaataagataca

SEQ ID NO: 1722457 - DNA, 15 bp, Homo sapiens
gagaataagatacac

SEQ ID NO: 1722458 - DNA, 15 bp, Homo sapiens
agaataagatacaca

SEQ ID NO: 1722459 - DNA, 15 bp, Homo sapiens
gaataagatacacac

SEQ ID NO: 1722460 - DNA, 15 bp, Homo sapiens
aataagatacacaca

SEQ ID NO: 1722461 - DNA, 15 bp, Homo sapiens
ataagatacacacac

SEQ ID NO: 1722462 - DNA, 15 bp, Homo sapiens
taagatacacacaca

SEQ ID NO: 1722463 - DNA, 15 bp, Homo sapiens
aagatacacacacac

SEQ ID NO: 1722464 - DNA, 15 bp, Homo sapiens
agatacacacacaca

SEQ ID NO: 1722465 - DNA, 15 bp, Homo sapiens
gatacacacacacac

SEQ ID NO: 1722466 - DNA, 15 bp, Homo sapiens
tacacacacacacgc

SEQ ID NO: 1722467 - DNA, 15 bp, Homo sapiens
cacacacacacatct

SEQ ID NO: 1722468 - DNA, 15 bp, Homo sapiens
acacacacacatctc

SEQ ID NO: 1722469 - DNA, 15 bp, Homo sapiens
cacacacacatctcc

SEQ ID NO: 1722470 - DNA, 15 bp, Homo sapiens
acacacacatctcca

SEQ ID NO: 1722471 - DNA, 15 bp, Homo sapiens
cacacacatctccaa

SEQ ID NO: 1722472 - DNA, 15 bp, Homo sapiens
acacacatctccaaa

SEQ ID NO: 1722473 - DNA, 15 bp, Homo sapiens
cacacatctccaaaa

SEQ ID NO: 1722474 - DNA, 15 bp, Homo sapiens
acacatctccaaaac

SEQ ID NO: 1722475 - DNA, 15 bp, Homo sapiens
cacatctccaaaact

SEQ ID NO: 1722476 - DNA, 15 bp, Homo sapiens
acatctccaaaactc

SEQ ID NO: 1722477 - DNA, 15 bp, Homo sapiens
catctccaaaactca

SEQ ID NO: 1722478 - DNA, 15 bp, Homo sapiens
atctccaaaactcag

SEQ ID NO: 1722479 - DNA, 15 bp, Homo sapiens
tctccaaaactcaga

SEQ ID NO: 1722480 - DNA, 15 bp, Homo sapiens
ctccaaaactcagac

SEQ ID NO: 1722481 - DNA, 15 bp, Homo sapiens
tccaaaactcagaca

SEQ ID NO: 1722482 - DNA, 15 bp, Homo sapiens
ccaaaactcagacag

SEQ ID NO: 1722483 - DNA, 15 bp, Homo sapiens
caaaactcagacagg

SEQ ID NO: 1722484 - DNA, 15 bp, Homo sapiens
aaaactcagacagga

SEQ ID NO: 1722485 - DNA, 15 bp, Homo sapiens
aaactcagacaggaa

SEQ ID NO: 1722486 - DNA, 15 bp, Homo sapiens
aactcagacaggaac

SEQ ID NO: 1722487 - DNA, 15 bp, Homo sapiens
actcagacaggaaca

SEQ ID NO: 1722488 - DNA, 15 bp, Homo sapiens
ctcagacaggaacat

SEQ ID NO: 1722489 - DNA, 15 bp, Homo sapiens
tcagacaggaacatt

SEQ ID NO: 1722490 - DNA, 15 bp, Homo sapiens
cagacaggaacattt

SEQ ID NO: 1722491 - DNA, 15 bp, Homo sapiens
agacaggaacattta

SEQ ID NO: 1722492 - DNA, 15 bp, Homo sapiens
gacaggaacatttat

SEQ ID NO: 1722493 - DNA, 15 bp, Homo sapiens
acaggaacatttatt

SEQ ID NO: 1722494 - DNA, 15 bp, Homo sapiens
caggaacatttattt

SEQ ID NO: 1722495 - DNA, 15 bp, Homo sapiens
aggaacatttatttt

SEQ ID NO: 1722496 - DNA, 15 bp, Homo sapiens
ggaacatttattttt

SEQ ID NO: 1722497 - DNA, 15 bp, Homo sapiens
gaacatttattttta

SEQ ID NO: 1722498 - DNA, 15 bp, Homo sapiens
aacatttatttttat

SEQ ID NO: 1722499 - DNA, 15 bp, Homo sapiens
acatttatttttatt

SEQ ID NO: 1722500 - DNA, 15 bp, Homo sapiens
catttatttttattt

SEQ ID NO: 1722501 - DNA, 15 bp, Homo sapiens
atttatttttatttt

SEQ ID NO: 1722502 - DNA, 15 bp, Homo sapiens
tttatttttattttg

SEQ ID NO: 1722503 - DNA, 15 bp, Homo sapiens
ttatttttattttgt

SEQ ID NO: 1722504 - DNA, 15 bp, Homo sapiens
tatttttattttgtt

SEQ ID NO: 1722505 - DNA, 15 bp, Homo sapiens
atttttattttgtta

SEQ ID NO: 1722506 - DNA, 15 bp, Homo sapiens
tttttattttgttaa

SEQ ID NO: 1722507 - DNA, 15 bp, Homo sapiens
ttttattttgttaag

SEQ ID NO: 1722508 - DNA, 15 bp, Homo sapiens
tttattttgttaagt

SEQ ID NO: 1722509 - DNA, 15 bp, Homo sapiens
ttattttgttaagtc

SEQ ID NO: 1722510 - DNA, 15 bp, Homo sapiens
tattttgttaagtca

SEQ ID NO: 1722511 - DNA, 15 bp, Homo sapiens
attttgttaagtcaa

SEQ ID NO: 1722512 - DNA, 15 bp, Homo sapiens
ttttgttaagtcaat

SEQ ID NO: 1722513 - DNA, 15 bp, Homo sapiens
tttgttaagtcaatg

SEQ ID NO: 1722514 - DNA, 15 bp, Homo sapiens
ttgttaagtcaatgc

SEQ ID NO: 1722515 - DNA, 15 bp, Homo sapiens
tgttaagtcaatgca

SEQ ID NO: 1722516 - DNA, 15 bp, Homo sapiens
gttaagtcaatgcag

SEQ ID NO: 1722517 - DNA, 15 bp, Homo sapiens
ttaagtcaatgcagt

SEQ ID NO: 1722518 - DNA, 15 bp, Homo sapiens
taagtcaatgcagtt

SEQ ID NO: 1722519 - DNA, 15 bp, Homo sapiens
aagtcaatgcagttt

SEQ ID NO: 1722520 - DNA, 15 bp, Homo sapiens
agtcaatgcagtttt

SEQ ID NO: 1722521 - DNA, 15 bp, Homo sapiens
gtcaatgcagttttc

SEQ ID NO: 1722522 - DNA, 15 bp, Homo sapiens
tcaatgcagttttca

SEQ ID NO: 1722523 - DNA, 15 bp, Homo sapiens
caatgcagttttcat

SEQ ID NO: 1722524 - DNA, 15 bp, Homo sapiens
aatgcagttttcatc

SEQ ID NO: 1722525 - DNA, 15 bp, Homo sapiens
atgcagttttcatct

SEQ ID NO: 1722526 - DNA, 15 bp, Homo sapiens
tgcagttttcatcta

SEQ ID NO: 1722527 - DNA, 15 bp, Homo sapiens
gcagttttcatctag

SEQ ID NO: 1722528 - DNA, 15 bp, Homo sapiens
cagttttcatctaga

SEQ ID NO: 1722529 - DNA, 15 bp, Homo sapiens
agttttcatctagaa

SEQ ID NO: 1722530 - DNA, 15 bp, Homo sapiens
gttttcatctagaaa

SEQ ID NO: 1722531 - DNA, 15 bp, Homo sapiens
ttttcatctagaaat

SEQ ID NO: 1722532 - DNA, 15 bp, Homo sapiens
tttcatctagaaata

SEQ ID NO: 1722533 - DNA, 15 bp, Homo sapiens
ttcatctagaaatat

SEQ ID NO: 1722534 - DNA, 15 bp, Homo sapiens
tcatctagaaatata

SEQ ID NO: 1722535 - DNA, 15 bp, Homo sapiens
catctagaaatatag

SEQ ID NO: 1722536 - DNA, 15 bp, Homo sapiens
atctagaaatatagc

SEQ ID NO: 1722537 - DNA, 15 bp, Homo sapiens
tctagaaatatagca

SEQ ID NO: 1722538 - DNA, 15 bp, Homo sapiens
ctagaaatatagcaa

SEQ ID NO: 1722539 - DNA, 15 bp, Homo sapiens
tagaaatatagcaag

SEQ ID NO: 1722540 - DNA, 15 bp, Homo sapiens
agaaatatagcaaga

SEQ ID NO: 1722541 - DNA, 15 bp, Homo sapiens
gaaatatagcaagag

SEQ ID NO: 1722542 - DNA, 15 bp, Homo sapiens
aaatatagcaagagc

SEQ ID NO: 1722543 - DNA, 15 bp, Homo sapiens
aatatagcaagagct

SEQ ID NO: 1722544 - DNA, 15 bp, Homo sapiens
atatagcaagagctc

SEQ ID NO: 1722545 - DNA, 15 bp, Homo sapiens
tatagcaagagctct

SEQ ID NO: 1722546 - DNA, 15 bp, Homo sapiens
atagcaagagctcta

SEQ ID NO: 1722547 - DNA, 15 bp, Homo sapiens
tagcaagagctctac

SEQ ID NO: 1722548 - DNA, 15 bp, Homo sapiens
agcaagagctctacc

SEQ ID NO: 1722549 - DNA, 15 bp, Homo sapiens
gcaagagctctacca

SEQ ID NO: 1722550 - DNA, 15 bp, Homo sapiens
caagagctctaccat

SEQ ID NO: 1722551 - DNA, 15 bp, Homo sapiens
aagagctctaccatt

SEQ ID NO: 1722552 - DNA, 15 bp, Homo sapiens
agagctctaccattt

SEQ ID NO: 1722553 - DNA, 15 bp, Homo sapiens
gagctctaccatttt

SEQ ID NO: 1722554 - DNA, 15 bp, Homo sapiens
agctctaccattttt

SEQ ID NO: 1722555 - DNA, 15 bp, Homo sapiens
gctctaccatttttt

SEQ ID NO: 1722556 - DNA, 15 bp, Homo sapiens
ctctaccattttttt

SEQ ID NO: 1722557 - DNA, 15 bp, Homo sapiens
tctaccattttttta

SEQ ID NO: 1722558 - DNA, 15 bp, Homo sapiens
ctaccatttttttat

SEQ ID NO: 1722559 - DNA, 15 bp, Homo sapiens
taccatttttttatt

SEQ ID NO: 1722560 - DNA, 15 bp, Homo sapiens
accatttttttattt

SEQ ID NO: 1722561 - DNA, 15 bp, Homo sapiens
ccatttttttatttg

SEQ ID NO: 1722562 - DNA, 15 bp, Homo sapiens
catttttttatttga

SEQ ID NO: 1722563 - DNA, 15 bp, Homo sapiens
atttttttatttgaa

SEQ ID NO: 1722564 - DNA, 15 bp, Homo sapiens
tttttttatttgaac

SEQ ID NO: 1722565 - DNA, 15 bp, Homo sapiens
ttttttatttgaaca

SEQ ID NO: 1722566 - DNA, 15 bp, Homo sapiens
tttttatttgaacaa

SEQ ID NO: 1722567 - DNA, 15 bp, Homo sapiens
ttttatttgaacaat

SEQ ID NO: 1722568 - DNA, 15 bp, Homo sapiens
tttatttgaacaatt

SEQ ID NO: 1722569 - DNA, 15 bp, Homo sapiens
ttatttgaacaattg

SEQ ID NO: 1722570 - DNA, 15 bp, Homo sapiens
tatttgaacaattgc

SEQ ID NO: 1722571 - DNA, 15 bp, Homo sapiens
atttgaacaattgct

SEQ ID NO: 1722572 - DNA, 15 bp, Homo sapiens
tttgaacaattgctt

SEQ ID NO: 1722573 - DNA, 15 bp, Homo sapiens
ttgaacaattgctta

SEQ ID NO: 1722574 - DNA, 15 bp, Homo sapiens
tgaacaattgcttaa

SEQ ID NO: 1722575 - DNA, 15 bp, Homo sapiens
gaacaattgcttaaa

SEQ ID NO: 1722576 - DNA, 15 bp, Homo sapiens
aacaattgcttaaaa

SEQ ID NO: 1722577 - DNA, 15 bp, Homo sapiens
acaattgcttaaaaa

SEQ ID NO: 1722578 - DNA, 15 bp, Homo sapiens
caattgcttaaaaaa

SEQ ID NO: 1722579 - DNA, 15 bp, Homo sapiens
aattgcttaaaaaaa

SEQ ID NO: 1722580 - DNA, 15 bp, Homo sapiens
attgcttaaaaaaaa

SEQ ID NO: 1722581 - DNA, 15 bp, Homo sapiens
ttgcttaaaaaaaaa

SEQ ID NO: 1722582 - DNA, 15 bp, Homo sapiens
tgcttaaaaaaaaaa

SEQ ID NO: 1722583 - DNA, 15 bp, Homo sapiens
gcttaaaaaaaaaaa

SEQ ID NO: 1722584 - DNA, 15 bp, Homo sapiens
cttaaaaaaaaaaag

SEQ ID NO: 1722585 - DNA, 15 bp, Homo sapiens
aaaaaagaaaggaat

SEQ ID NO: 1722586 - DNA, 15 bp, Homo sapiens
aaaaagaaaggaatg

SEQ ID NO: 1722587 - DNA, 15 bp, Homo sapiens
aaaagaaaggaatga

SEQ ID NO: 1722588 - DNA, 15 bp, Homo sapiens
aaagaaaggaatgat

SEQ ID NO: 1722589 - DNA, 15 bp, Homo sapiens
aagaaaggaatgatt

SEQ ID NO: 1722590 - DNA, 15 bp, Homo sapiens
agaaaggaatgatta

SEQ ID NO: 1722591 - DNA, 15 bp, Homo sapiens
gaaaggaatgattat

SEQ ID NO: 1722592 - DNA, 15 bp, Homo sapiens
aaaggaatgattatg

SEQ ID NO: 1722593 - DNA, 15 bp, Homo sapiens
aaggaatgattatgt

SEQ ID NO: 1722594 - DNA, 15 bp, Homo sapiens
aggaatgattatgta

SEQ ID NO: 1722595 - DNA, 15 bp, Homo sapiens
ggaatgattatgtag

SEQ ID NO: 1722596 - DNA, 15 bp, Homo sapiens
gaatgattatgtaga

SEQ ID NO: 1722597 - DNA, 15 bp, Homo sapiens
aatgattatgtagaa

SEQ ID NO: 1722598 - DNA, 15 bp, Homo sapiens
atgattatgtagaaa

SEQ ID NO: 1722599 - DNA, 15 bp, Homo sapiens
tgattatgtagaaat

SEQ ID NO: 1722600 - DNA, 15 bp, Homo sapiens
gattatgtagaaatg

SEQ ID NO: 1722601 - DNA, 15 bp, Homo sapiens
attatgtagaaatgt

SEQ ID NO: 1722602 - DNA, 15 bp, Homo sapiens
ttatgtagaaatgtt

SEQ ID NO: 1722603 - DNA, 15 bp, Homo sapiens
tatgtagaaatgttt

SEQ ID NO: 1722604 - DNA, 15 bp, Homo sapiens
atgtagaaatgtttt

SEQ ID NO: 1722605 - DNA, 15 bp, Homo sapiens
tgtagaaatgttttt

SEQ ID NO: 1722606 - DNA, 15 bp, Homo sapiens
gtagaaatgtttttg

SEQ ID NO: 1722607 - DNA, 15 bp, Homo sapiens
tagaaatgtttttga

SEQ ID NO: 1722608 - DNA, 15 bp, Homo sapiens
agaaatgtttttgat

SEQ ID NO: 1722609 - DNA, 15 bp, Homo sapiens
gaaatgtttttgatg

SEQ ID NO: 1722610 - DNA, 15 bp, Homo sapiens
aaatgtttttgatgc

SEQ ID NO: 1722611 - DNA, 15 bp, Homo sapiens
aatgtttttgatgca

SEQ ID NO: 1722612 - DNA, 15 bp, Homo sapiens
atgtttttgatgcag

SEQ ID NO: 1722613 - DNA, 15 bp, Homo sapiens
tgtttttgatgcaga

SEQ ID NO: 1722614 - DNA, 15 bp, Homo sapiens
gtttttgatgcagaa

SEQ ID NO: 1722615 - DNA, 15 bp, Homo sapiens
tttttgatgcagaat

SEQ ID NO: 1722616 - DNA, 15 bp, Homo sapiens
ttttgatgcagaatt

SEQ ID NO: 1722617 - DNA, 15 bp, Homo sapiens
tttgatgcagaatta

SEQ ID NO: 1722618 - DNA, 15 bp, Homo sapiens
ttgatgcagaattac

SEQ ID NO: 1722619 - DNA, 15 bp, Homo sapiens
tgatgcagaattact

SEQ ID NO: 1722620 - DNA, 15 bp, Homo sapiens
gatgcagaattactg

SEQ ID NO: 1722621 - DNA, 15 bp, Homo sapiens
atgcagaattactga

SEQ ID NO: 1722622 - DNA, 15 bp, Homo sapiens
tgcagaattactgag

SEQ ID NO: 1722623 - DNA, 15 bp, Homo sapiens
gcagaattactgagc

SEQ ID NO: 1722624 - DNA, 15 bp, Homo sapiens
cagaattactgagcc

SEQ ID NO: 1722625 - DNA, 15 bp, Homo sapiens
agaattactgagcct

SEQ ID NO: 1722626 - DNA, 15 bp, Homo sapiens
gaattactgagcctg

SEQ ID NO: 1722627 - DNA, 15 bp, Homo sapiens
aattactgagcctgg

SEQ ID NO: 1722628 - DNA, 15 bp, Homo sapiens
attactgagcctgga

SEQ ID NO: 1722629 - DNA, 15 bp, Homo sapiens
ttactgagcctggag

SEQ ID NO: 1722630 - DNA, 15 bp, Homo sapiens
tactgagcctggagg

SEQ ID NO: 1722631 - DNA, 15 bp, Homo sapiens
actgagcctggaggc

SEQ ID NO: 1722632 - DNA, 15 bp, Homo sapiens
ctgagcctggaggca

SEQ ID NO: 1722633 - DNA, 15 bp, Homo sapiens
tgagcctggaggcaa

SEQ ID NO: 1722634 - DNA, 15 bp, Homo sapiens
gagcctggaggcaag

SEQ ID NO: 1722635 - DNA, 15 bp, Homo sapiens
agcctggaggcaagg

SEQ ID NO: 1722636 - DNA, 15 bp, Homo sapiens
gcctggaggcaaggg

SEQ ID NO: 1722637 - DNA, 15 bp, Homo sapiens
cctggaggcaagggg

SEQ ID NO: 1722638 - DNA, 15 bp, Homo sapiens
ctggaggcaaggggg

SEQ ID NO: 1722639 - DNA, 15 bp, Homo sapiens
tggaggcaagggggc

SEQ ID NO: 1722640 - DNA, 15 bp, Homo sapiens
ggaggcaagggggcg

SEQ ID NO: 1722641 - DNA, 15 bp, Homo sapiens
gaggcaagggggcgg

SEQ ID NO: 1722642 - DNA, 15 bp, Homo sapiens
aggcaagggggcggg

SEQ ID NO: 1722643 - DNA, 15 bp, Homo sapiens
ggcaagggggcgggg

SEQ ID NO: 1722644 - DNA, 15 bp, Homo sapiens
gcaagggggcggggc

SEQ ID NO: 1722645 - DNA, 15 bp, Homo sapiens
caagggggcggggcg

SEQ ID NO: 1722646 - DNA, 15 bp, Homo sapiens
aagggggcggggcgg

SEQ ID NO: 1722647 - DNA, 15 bp, Homo sapiens
agggggcggggcggg

SEQ ID NO: 1722648 - DNA, 15 bp, Homo sapiens
gggggcggggcgggg

SEQ ID NO: 1722649 - DNA, 15 bp, Homo sapiens
cggggcggggcgggt

SEQ ID NO: 1722650 - DNA, 15 bp, Homo sapiens
ggggcggggcgggtg

SEQ ID NO: 1722651 - DNA, 15 bp, Homo sapiens
gggcggggcgggtgg

SEQ ID NO: 1722652 - DNA, 15 bp, Homo sapiens
ggcggggcgggtgga

SEQ ID NO: 1722653 - DNA, 15 bp, Homo sapiens
gcggggcgggtggaa

SEQ ID NO: 1722654 - DNA, 15 bp, Homo sapiens
cggggcgggtggaag

SEQ ID NO: 1722655 - DNA, 15 bp, Homo sapiens
ggggcgggtggaaga

SEQ ID NO: 1722656 - DNA, 15 bp, Homo sapiens
gggcgggtggaagat

SEQ ID NO: 1722657 - DNA, 15 bp, Homo sapiens
ggcgggtggaagata

SEQ ID NO: 1722658 - DNA, 15 bp, Homo sapiens
gcgggtggaagatag

SEQ ID NO: 1722659 - DNA, 15 bp, Homo sapiens
cgggtggaagatagt

SEQ ID NO: 1722660 - DNA, 15 bp, Homo sapiens
gggtggaagatagtg

SEQ ID NO: 1722661 - DNA, 15 bp, Homo sapiens
ggtggaagatagtgc

SEQ ID NO: 1722662 - DNA, 15 bp, Homo sapiens
gtggaagatagtgcc

SEQ ID NO: 1722663 - DNA, 15 bp, Homo sapiens
tggaagatagtgccc

SEQ ID NO: 1722664 - DNA, 15 bp, Homo sapiens
ggaagatagtgccca

SEQ ID NO: 1722665 - DNA, 15 bp, Homo sapiens
gaagatagtgcccat

SEQ ID NO: 1722666 - DNA, 15 bp, Homo sapiens
aagatagtgcccatc

SEQ ID NO: 1722667 - DNA, 15 bp, Homo sapiens
agatagtgcccatct

SEQ ID NO: 1722668 - DNA, 15 bp, Homo sapiens
gatagtgcccatctt

SEQ ID NO: 1722669 - DNA, 15 bp, Homo sapiens
atagtgcccatcttc

SEQ ID NO: 1722670 - DNA, 15 bp, Homo sapiens
tagtgcccatcttct

SEQ ID NO: 1722671 - DNA, 15 bp, Homo sapiens
agtgcccatcttcta

SEQ ID NO: 1722672 - DNA, 15 bp, Homo sapiens
gtgcccatcttctat

SEQ ID NO: 1722673 - DNA, 15 bp, Homo sapiens
tgcccatcttctatt

SEQ ID NO: 1722674 - DNA, 15 bp, Homo sapiens
gcccatcttctatta

SEQ ID NO: 1722675 - DNA, 15 bp, Homo sapiens
cccatcttctattag

SEQ ID NO: 1722676 - DNA, 15 bp, Homo sapiens
ccatcttctattagc

SEQ ID NO: 1722677 - DNA, 15 bp, Homo sapiens
catcttctattagca

SEQ ID NO: 1722678 - DNA, 15 bp, Homo sapiens
atcttctattagcag

SEQ ID NO: 1722679 - DNA, 15 bp, Homo sapiens
tcttctattagcagc

SEQ ID NO: 1722680 - DNA, 15 bp, Homo sapiens
cttctattagcagca

SEQ ID NO: 1722681 - DNA, 15 bp, Homo sapiens
ttctattagcagcag

SEQ ID NO: 1722682 - DNA, 15 bp, Homo sapiens
tctattagcagcagg

SEQ ID NO: 1722683 - DNA, 15 bp, Homo sapiens
ctattagcagcagga

SEQ ID NO: 1722684 - DNA, 15 bp, Homo sapiens
tattagcagcaggat

SEQ ID NO: 1722685 - DNA, 15 bp, Homo sapiens
attagcagcaggatg

SEQ ID NO: 1722686 - DNA, 15 bp, Homo sapiens
ttagcagcaggatgt

SEQ ID NO: 1722687 - DNA, 15 bp, Homo sapiens
tagcagcaggatgta

SEQ ID NO: 1722688 - DNA, 15 bp, Homo sapiens
agcagcaggatgtat

SEQ ID NO: 1722689 - DNA, 15 bp, Homo sapiens
gcagcaggatgtatg

SEQ ID NO: 1722690 - DNA, 15 bp, Homo sapiens
cagcaggatgtatga

SEQ ID NO: 1722691 - DNA, 15 bp, Homo sapiens
agcaggatgtatgag

SEQ ID NO: 1722692 - DNA, 15 bp, Homo sapiens
gcaggatgtatgagc

SEQ ID NO: 1722693 - DNA, 15 bp, Homo sapiens
caggatgtatgagca

SEQ ID NO: 1722694 - DNA, 15 bp, Homo sapiens
aggatgtatgagcac

SEQ ID NO: 1722695 - DNA, 15 bp, Homo sapiens
ggatgtatgagcaca

SEQ ID NO: 1722696 - DNA, 15 bp, Homo sapiens
gatgtatgagcacag

SEQ ID NO: 1722697 - DNA, 15 bp, Homo sapiens
atgtatgagcacaga

SEQ ID NO: 1722698 - DNA, 15 bp, Homo sapiens
tgtatgagcacagat

SEQ ID NO: 1722699 - DNA, 15 bp, Homo sapiens
gtatgagcacagatg

SEQ ID NO: 1722700 - DNA, 15 bp, Homo sapiens
tatgagcacagatga

SEQ ID NO: 1722701 - DNA, 15 bp, Homo sapiens
atgagcacagatgac

SEQ ID NO: 1722702 - DNA, 15 bp, Homo sapiens
tgagcacagatgaca

SEQ ID NO: 1722703 - DNA, 15 bp, Homo sapiens
gagcacagatgacaa

SEQ ID NO: 1722704 - DNA, 15 bp, Homo sapiens
agcacagatgacaat

SEQ ID NO: 1722705 - DNA, 15 bp, Homo sapiens
gcacagatgacaatc

SEQ ID NO: 1722706 - DNA, 15 bp, Homo sapiens
cacagatgacaatcc

SEQ ID NO: 1722707 - DNA, 15 bp, Homo sapiens
acagatgacaatccg

SEQ ID NO: 1722708 - DNA, 15 bp, Homo sapiens
cagatgacaatccgg

SEQ ID NO: 1722709 - DNA, 15 bp, Homo sapiens
agatgacaatccggt

SEQ ID NO: 1722710 - DNA, 15 bp, Homo sapiens
gatgacaatccggtc

SEQ ID NO: 1722711 - DNA, 15 bp, Homo sapiens
atgacaatccggtcc

SEQ ID NO: 1722712 - DNA, 15 bp, Homo sapiens
tgacaatccggtcca

SEQ ID NO: 1722713 - DNA, 15 bp, Homo sapiens
gacaatccggtccat

SEQ ID NO: 1722714 - DNA, 15 bp, Homo sapiens
acaatccggtccatg

SEQ ID NO: 1722715 - DNA, 15 bp, Homo sapiens
caatccggtccatgc

SEQ ID NO: 1722716 - DNA, 15 bp, Homo sapiens
aatccggtccatgct

SEQ ID NO: 1722717 - DNA, 15 bp, Homo sapiens
atccggtccatgctg

SEQ ID NO: 1722718 - DNA, 15 bp, Homo sapiens
tccggtccatgctgt

SEQ ID NO: 1722719 - DNA, 15 bp, Homo sapiens
ccggtccatgctgtt

SEQ ID NO: 1722720 - DNA, 15 bp, Homo sapiens
cggtccatgctgttc

SEQ ID NO: 1722721 - DNA, 15 bp, Homo sapiens
ggtccatgctgttca

SEQ ID NO: 1722722 - DNA, 15 bp, Homo sapiens
gtccatgctgttcat

SEQ ID NO: 1722723 - DNA, 15 bp, Homo sapiens
tccatgctgttcatc

SEQ ID NO: 1722724 - DNA, 15 bp, Homo sapiens
ccatgctgttcatca

SEQ ID NO: 1722725 - DNA, 15 bp, Homo sapiens
catgctgttcatcag

SEQ ID NO: 1722726 - DNA, 15 bp, Homo sapiens
atgctgttcatcaga

SEQ ID NO: 1722727 - DNA, 15 bp, Homo sapiens
tgctgttcatcagac

SEQ ID NO: 1722728 - DNA, 15 bp, Homo sapiens
gctgttcatcagaca

SEQ ID NO: 1722729 - DNA, 15 bp, Homo sapiens
ctgttcatcagacaa

SEQ ID NO: 1722730 - DNA, 15 bp, Homo sapiens
tgttcatcagacaaa

SEQ ID NO: 1722731 - DNA, 15 bp, Homo sapiens
gttcatcagacaaag

SEQ ID NO: 1722732 - DNA, 15 bp, Homo sapiens
ttcatcagacaaagc

SEQ ID NO: 1722733 - DNA, 15 bp, Homo sapiens
tcatcagacaaagcc

SEQ ID NO: 1722734 - DNA, 15 bp, Homo sapiens
catcagacaaagcct

SEQ ID NO: 1722735 - DNA, 15 bp, Homo sapiens
atcagacaaagcctg

SEQ ID NO: 1722736 - DNA, 15 bp, Homo sapiens
tcagacaaagcctga

SEQ ID NO: 1722737 - DNA, 15 bp, Homo sapiens
cagacaaagcctgaa

SEQ ID NO: 1722738 - DNA, 15 bp, Homo sapiens
agacaaagcctgaat

SEQ ID NO: 1722739 - DNA, 15 bp, Homo sapiens
gacaaagcctgaatc

SEQ ID NO: 1722740 - DNA, 15 bp, Homo sapiens
acaaagcctgaatcc

SEQ ID NO: 1722741 - DNA, 15 bp, Homo sapiens
caaagcctgaatcct

SEQ ID NO: 1722742 - DNA, 15 bp, Homo sapiens
aaagcctgaatcctg

SEQ ID NO: 1722743 - DNA, 15 bp, Homo sapiens
aagcctgaatcctgg

SEQ ID NO: 1722744 - DNA, 15 bp, Homo sapiens
agcctgaatcctgga

SEQ ID NO: 1722745 - DNA, 15 bp, Homo sapiens
gcctgaatcctggaa

SEQ ID NO: 1722746 - DNA, 15 bp, Homo sapiens
cctgaatcctggaaa

SEQ ID NO: 1722747 - DNA, 15 bp, Homo sapiens
ctgaatcctggaaaa

SEQ ID NO: 1722748 - DNA, 15 bp, Homo sapiens
tgaatcctggaaaaa

SEQ ID NO: 1722749 - DNA, 15 bp, Homo sapiens
gaatcctggaaaaag

SEQ ID NO: 1722750 - DNA, 15 bp, Homo sapiens
aatcctggaaaaagc

SEQ ID NO: 1722751 - DNA, 15 bp, Homo sapiens
atcctggaaaaagcc

SEQ ID NO: 1722752 - DNA, 15 bp, Homo sapiens
tcctggaaaaagcca

SEQ ID NO: 1722753 - DNA, 15 bp, Homo sapiens
cctggaaaaagccaa

SEQ ID NO: 1722754 - DNA, 15 bp, Homo sapiens
ctggaaaaagccaac

SEQ ID NO: 1722755 - DNA, 15 bp, Homo sapiens
tggaaaaagccaact

SEQ ID NO: 1722756 - DNA, 15 bp, Homo sapiens
ggaaaaagccaactc

SEQ ID NO: 1722757 - DNA, 15 bp, Homo sapiens
gaaaaagccaactct

SEQ ID NO: 1722758 - DNA, 15 bp, Homo sapiens
aaaaagccaactctt

SEQ ID NO: 1722759 - DNA, 15 bp, Homo sapiens
aaaagccaactcttt

SEQ ID NO: 1722760 - DNA, 15 bp, Homo sapiens
aaagccaactctttg

SEQ ID NO: 1722761 - DNA, 15 bp, Homo sapiens
aagccaactctttga

SEQ ID NO: 1722762 - DNA, 15 bp, Homo sapiens
agccaactctttgaa

SEQ ID NO: 1722763 - DNA, 15 bp, Homo sapiens
gccaactctttgaac

SEQ ID NO: 1722764 - DNA, 15 bp, Homo sapiens
ccaactctttgaaca

SEQ ID NO: 1722765 - DNA, 15 bp, Homo sapiens
caactctttgaacag

SEQ ID NO: 1722766 - DNA, 15 bp, Homo sapiens
aactctttgaacagg

SEQ ID NO: 1722767 - DNA, 15 bp, Homo sapiens
actctttgaacagga

SEQ ID NO: 1722768 - DNA, 15 bp, Homo sapiens
ctctttgaacaggaa

SEQ ID NO: 1722769 - DNA, 15 bp, Homo sapiens
tctttgaacaggaat

SEQ ID NO: 1722770 - DNA, 15 bp, Homo sapiens
ctttgaacaggaatt

SEQ ID NO: 1722771 - DNA, 15 bp, Homo sapiens
tttgaacaggaatta

SEQ ID NO: 1722772 - DNA, 15 bp, Homo sapiens
ttgaacaggaattag

SEQ ID NO: 1722773 - DNA, 15 bp, Homo sapiens
tgaacaggaattaga

SEQ ID NO: 1722774 - DNA, 15 bp, Homo sapiens
gaacaggaattagag

SEQ ID NO: 1722775 - DNA, 15 bp, Homo sapiens
aacaggaattagagt

SEQ ID NO: 1722776 - DNA, 15 bp, Homo sapiens
acaggaattagagtg

SEQ ID NO: 1722777 - DNA, 15 bp, Homo sapiens
caggaattagagtgt

SEQ ID NO: 1722778 - DNA, 15 bp, Homo sapiens
aggaattagagtgtg

SEQ ID NO: 1722779 - DNA, 15 bp, Homo sapiens
ggaattagagtgtga

SEQ ID NO: 1722780 - DNA, 15 bp, Homo sapiens
gaattagagtgtgat

SEQ ID NO: 1722781 - DNA, 15 bp, Homo sapiens
aattagagtgtgatc

SEQ ID NO: 1722782 - DNA, 15 bp, Homo sapiens
attagagtgtgatcg

SEQ ID NO: 1722783 - DNA, 15 bp, Homo sapiens
ttagagtgtgatcgg

SEQ ID NO: 1722784 - DNA, 15 bp, Homo sapiens
tagagtgtgatcggc

SEQ ID NO: 1722785 - DNA, 15 bp, Homo sapiens
agagtgtgatcggct

SEQ ID NO: 1722786 - DNA, 15 bp, Homo sapiens
gagtgtgatcggctc

SEQ ID NO: 1722787 - DNA, 15 bp, Homo sapiens
agtgtgatcggctca

SEQ ID NO: 1722788 - DNA, 15 bp, Homo sapiens
gtgtgatcggctcag

SEQ ID NO: 1722789 - DNA, 15 bp, Homo sapiens
tgtgatcggctcagt

SEQ ID NO: 1722790 - DNA, 15 bp, Homo sapiens
gtgatcggctcagtt

SEQ ID NO: 1722791 - DNA, 15 bp, Homo sapiens
tgatcggctcagttg

SEQ ID NO: 1722792 - DNA, 15 bp, Homo sapiens
gatcggctcagttga

SEQ ID NO: 1722793 - DNA, 15 bp, Homo sapiens
atcggctcagttgac

SEQ ID NO: 1722794 - DNA, 15 bp, Homo sapiens
tcggctcagttgacg

SEQ ID NO: 1722795 - DNA, 15 bp, Homo sapiens
cggctcagttgacgt

SEQ ID NO: 1722796 - DNA, 15 bp, Homo sapiens
ggctcagttgacgta

SEQ ID NO: 1722797 - DNA, 15 bp, Homo sapiens
gctcagttgacgtac

SEQ ID NO: 1722798 - DNA, 15 bp, Homo sapiens
ctcagttgacgtaca

SEQ ID NO: 1722799 - DNA, 15 bp, Homo sapiens
tcagttgacgtacag

SEQ ID NO: 1722800 - DNA, 15 bp, Homo sapiens
cagttgacgtacagg

SEQ ID NO: 1722801 - DNA, 15 bp, Homo sapiens
agttgacgtacaggg

SEQ ID NO: 1722802 - DNA, 15 bp, Homo sapiens
gttgacgtacagggg

SEQ ID NO: 1722803 - DNA, 15 bp, Homo sapiens
ttgacgtacaggggt

SEQ ID NO: 1722804 - DNA, 15 bp, Homo sapiens
tgacgtacaggggta

SEQ ID NO: 1722805 - DNA, 15 bp, Homo sapiens
gacgtacaggggtag

SEQ ID NO: 1722806 - DNA, 15 bp, Homo sapiens
acgtacaggggtagg

SEQ ID NO: 1722807 - DNA, 15 bp, Homo sapiens
cgtacaggggtaggt

SEQ ID NO: 1722808 - DNA, 15 bp, Homo sapiens
gtacaggggtaggtg

SEQ ID NO: 1722809 - DNA, 15 bp, Homo sapiens
tacaggggtaggtga

SEQ ID NO: 1722810 - DNA, 15 bp, Homo sapiens
acaggggtaggtgag

SEQ ID NO: 1722811 - DNA, 15 bp, Homo sapiens
caggggtaggtgagt

SEQ ID NO: 1722812 - DNA, 15 bp, Homo sapiens
aggggtaggtgagtg

SEQ ID NO: 1722813 - DNA, 15 bp, Homo sapiens
ggggtaggtgagtgc

SEQ ID NO: 1722814 - DNA, 15 bp, Homo sapiens
gggtaggtgagtgcg

SEQ ID NO: 1722815 - DNA, 15 bp, Homo sapiens
ggtaggtgagtgcga

SEQ ID NO: 1722816 - DNA, 15 bp, Homo sapiens
gtaggtgagtgcgag

SEQ ID NO: 1722817 - DNA, 15 bp, Homo sapiens
taggtgagtgcgaga

SEQ ID NO: 1722818 - DNA, 15 bp, Homo sapiens
aggtgagtgcgagag

SEQ ID NO: 1722819 - DNA, 15 bp, Homo sapiens
ggtgagtgcgagagt

SEQ ID NO: 1722820 - DNA, 15 bp, Homo sapiens
gtgagtgcgagagta

SEQ ID NO: 1722821 - DNA, 15 bp, Homo sapiens
tgagtgcgagagtaa

SEQ ID NO: 1722822 - DNA, 15 bp, Homo sapiens
gagtgcgagagtaaa

SEQ ID NO: 1722823 - DNA, 15 bp, Homo sapiens
agtgcgagagtaaag

SEQ ID NO: 1722824 - DNA, 15 bp, Homo sapiens
gtgcgagagtaaaga

SEQ ID NO: 1722825 - DNA, 15 bp, Homo sapiens
tgcgagagtaaagaa

SEQ ID NO: 1722826 - DNA, 15 bp, Homo sapiens
gcgagagtaaagaag

SEQ ID NO: 1722827 - DNA, 15 bp, Homo sapiens
cgagagtaaagaagc

SEQ ID NO: 1722828 - DNA, 15 bp, Homo sapiens
gagagtaaagaagct

SEQ ID NO: 1722829 - DNA, 15 bp, Homo sapiens
agagtaaagaagctc

SEQ ID NO: 1722830 - DNA, 15 bp, Homo sapiens
gagtaaagaagctct

SEQ ID NO: 1722831 - DNA, 15 bp, Homo sapiens
agtaaagaagctctt

SEQ ID NO: 1722832 - DNA, 15 bp, Homo sapiens
gtaaagaagctcttc

SEQ ID NO: 1722833 - DNA, 15 bp, Homo sapiens
taaagaagctcttct

SEQ ID NO: 1722834 - DNA, 15 bp, Homo sapiens
aaagaagctcttctt

SEQ ID NO: 1722835 - DNA, 15 bp, Homo sapiens
aagaagctcttcttt

SEQ ID NO: 1722836 - DNA, 15 bp, Homo sapiens
agaagctcttctttg

SEQ ID NO: 1722837 - DNA, 15 bp, Homo sapiens
gaagctcttctttgt

SEQ ID NO: 1722838 - DNA, 15 bp, Homo sapiens
aagctcttctttgtc

SEQ ID NO: 1722839 - DNA, 15 bp, Homo sapiens
agctcttctttgtct

SEQ ID NO: 1722840 - DNA, 15 bp, Homo sapiens
gctcttctttgtctt

SEQ ID NO: 1722841 - DNA, 15 bp, Homo sapiens
ctcttctttgtcttc

SEQ ID NO: 1722842 - DNA, 15 bp, Homo sapiens
tcttctttgtcttcg

SEQ ID NO: 1722843 - DNA, 15 bp, Homo sapiens
cttctttgtcttcgg

SEQ ID NO: 1722844 - DNA, 15 bp, Homo sapiens
ttctttgtcttcggt

SEQ ID NO: 1722845 - DNA, 15 bp, Homo sapiens
tctttgtcttcggta

SEQ ID NO: 1722846 - DNA, 15 bp, Homo sapiens
ctttgtcttcggtag

SEQ ID NO: 1722847 - DNA, 15 bp, Homo sapiens
tttgtcttcggtagt

SEQ ID NO: 1722848 - DNA, 15 bp, Homo sapiens
ttgtcttcggtagtg

SEQ ID NO: 1722849 - DNA, 15 bp, Homo sapiens
tgtcttcggtagtgc

SEQ ID NO: 1722850 - DNA, 15 bp, Homo sapiens
gtcttcggtagtgct

SEQ ID NO: 1722851 - DNA, 15 bp, Homo sapiens
tcttcggtagtgctg

SEQ ID NO: 1722852 - DNA, 15 bp, Homo sapiens
cttcggtagtgctgg

SEQ ID NO: 1722853 - DNA, 15 bp, Homo sapiens
ttcggtagtgctggg

SEQ ID NO: 1722854 - DNA, 15 bp, Homo sapiens
tcggtagtgctgggt

SEQ ID NO: 1722855 - DNA, 15 bp, Homo sapiens
cggtagtgctgggtt

SEQ ID NO: 1722856 - DNA, 15 bp, Homo sapiens
ggtagtgctgggttt

SEQ ID NO: 1722857 - DNA, 15 bp, Homo sapiens
gtagtgctgggtttc

SEQ ID NO: 1722858 - DNA, 15 bp, Homo sapiens
tagtgctgggtttct

SEQ ID NO: 1722859 - DNA, 15 bp, Homo sapiens
agtgctgggtttctt

SEQ ID NO: 1722860 - DNA, 15 bp, Homo sapiens
gtgctgggtttcttt

SEQ ID NO: 1722861 - DNA, 15 bp, Homo sapiens
tgctgggtttctttt

SEQ ID NO: 1722862 - DNA, 15 bp, Homo sapiens
gctgggtttcttttc

SEQ ID NO: 1722863 - DNA, 15 bp, Homo sapiens
ctgggtttcttttcc

SEQ ID NO: 1722864 - DNA, 15 bp, Homo sapiens
tgggtttcttttcca

SEQ ID NO: 1722865 - DNA, 15 bp, Homo sapiens
gggtttcttttccag

SEQ ID NO: 1722866 - DNA, 15 bp, Homo sapiens
ggtttcttttccagg

SEQ ID NO: 1722867 - DNA, 15 bp, Homo sapiens
gtttcttttccaggc

SEQ ID NO: 1722868 - DNA, 15 bp, Homo sapiens
tttcttttccaggca

SEQ ID NO: 1722869 - DNA, 15 bp, Homo sapiens
ttcttttccaggcac

SEQ ID NO: 1722870 - DNA, 15 bp, Homo sapiens
tcttttccaggcaca

SEQ ID NO: 1722871 - DNA, 15 bp, Homo sapiens
cttttccaggcacac

SEQ ID NO: 1722872 - DNA, 15 bp, Homo sapiens
ttttccaggcacaca

SEQ ID NO: 1722873 - DNA, 15 bp, Homo sapiens
tttccaggcacacag

SEQ ID NO: 1722874 - DNA, 15 bp, Homo sapiens
ttccaggcacacaga

SEQ ID NO: 1722875 - DNA, 15 bp, Homo sapiens
tccaggcacacagat

SEQ ID NO: 1722876 - DNA, 15 bp, Homo sapiens
ccaggcacacagatg

SEQ ID NO: 1722877 - DNA, 15 bp, Homo sapiens
caggcacacagatgg

SEQ ID NO: 1722878 - DNA, 15 bp, Homo sapiens
aggcacacagatggc

SEQ ID NO: 1722879 - DNA, 15 bp, Homo sapiens
ggcacacagatggcc

SEQ ID NO: 1722880 - DNA, 15 bp, Homo sapiens
gcacacagatggcct

SEQ ID NO: 1722881 - DNA, 15 bp, Homo sapiens
cacacagatggcctg

SEQ ID NO: 1722882 - DNA, 15 bp, Homo sapiens
acacagatggcctgc

SEQ ID NO: 1722883 - DNA, 15 bp, Homo sapiens
cacagatggcctgct

SEQ ID NO: 1722884 - DNA, 15 bp, Homo sapiens
acagatggcctgctc

SEQ ID NO: 1722885 - DNA, 15 bp, Homo sapiens
cagatggcctgctcc

SEQ ID NO: 1722886 - DNA, 15 bp, Homo sapiens
agatggcctgctccc

SEQ ID NO: 1722887 - DNA, 15 bp, Homo sapiens
gatggcctgctcccc

SEQ ID NO: 1722888 - DNA, 15 bp, Homo sapiens
atggcctgctccccc

SEQ ID NO: 1722889 - DNA, 15 bp, Homo sapiens
tggcctgctccccct

SEQ ID NO: 1722890 - DNA, 15 bp, Homo sapiens
ggcctgctccccctg

SEQ ID NO: 1722891 - DNA, 15 bp, Homo sapiens
gcctgctccccctgc

SEQ ID NO: 1722892 - DNA, 15 bp, Homo sapiens
cctgctccccctgca

SEQ ID NO: 1722893 - DNA, 15 bp, Homo sapiens
ctgctccccctgcag

SEQ ID NO: 1722894 - DNA, 15 bp, Homo sapiens
tgctccccctgcagc

SEQ ID NO: 1722895 - DNA, 15 bp, Homo sapiens
gctccccctgcagcg

SEQ ID NO: 1722896 - DNA, 15 bp, Homo sapiens
ctccccctgcagcgc

SEQ ID NO: 1722897 - DNA, 15 bp, Homo sapiens
tccccctgcagcgca

SEQ ID NO: 1722898 - DNA, 15 bp, Homo sapiens
ccccctgcagcgcac

SEQ ID NO: 1722899 - DNA, 15 bp, Homo sapiens
cccctgcagcgcacc

SEQ ID NO: 1722900 - DNA, 15 bp, Homo sapiens
ccctgcagcgcaccc

SEQ ID NO: 1722901 - DNA, 15 bp, Homo sapiens
cctgcagcgcaccca

SEQ ID NO: 1722902 - DNA, 15 bp, Homo sapiens
ctgcagcgcacccag

SEQ ID NO: 1722903 - DNA, 15 bp, Homo sapiens
tgcagcgcacccaga

SEQ ID NO: 1722904 - DNA, 15 bp, Homo sapiens
gcagcgcacccagat

SEQ ID NO: 1722905 - DNA, 15 bp, Homo sapiens
cagcgcacccagatc

SEQ ID NO: 1722906 - DNA, 15 bp, Homo sapiens
agcgcacccagatcc

SEQ ID NO: 1722907 - DNA, 15 bp, Homo sapiens
gcgcacccagatcct

SEQ ID NO: 1722908 - DNA, 15 bp, Homo sapiens
cgcacccagatcctc

SEQ ID NO: 1722909 - DNA, 15 bp, Homo sapiens
gcacccagatcctcc

SEQ ID NO: 1722910 - DNA, 15 bp, Homo sapiens
cacccagatcctccc

SEQ ID NO: 1722911 - DNA, 15 bp, Homo sapiens
acccagatcctccca

SEQ ID NO: 1722912 - DNA, 15 bp, Homo sapiens
cccagatcctcccag

SEQ ID NO: 1722913 - DNA, 15 bp, Homo sapiens
ccagatcctcccagg

SEQ ID NO: 1722914 - DNA, 15 bp, Homo sapiens
cagatcctcccaggg

SEQ ID NO: 1722915 - DNA, 15 bp, Homo sapiens
agatcctcccaggga

SEQ ID NO: 1722916 - DNA, 15 bp, Homo sapiens
gatcctcccagggag

SEQ ID NO: 1722917 - DNA, 15 bp, Homo sapiens
atcctcccagggagg

SEQ ID NO: 1722918 - DNA, 15 bp, Homo sapiens
tcctcccagggaggc

SEQ ID NO: 1722919 - DNA, 15 bp, Homo sapiens
cctcccagggaggcc

SEQ ID NO: 1722920 - DNA, 15 bp, Homo sapiens
ctcccagggaggccg

SEQ ID NO: 1722921 - DNA, 15 bp, Homo sapiens
tcccagggaggccgc

SEQ ID NO: 1722922 - DNA, 15 bp, Homo sapiens
cccagggaggccgct

SEQ ID NO: 1722923 - DNA, 15 bp, Homo sapiens
ccagggaggccgctt

SEQ ID NO: 1722924 - DNA, 15 bp, Homo sapiens
cagggaggccgcttc

SEQ ID NO: 1722925 - DNA, 15 bp, Homo sapiens
agggaggccgcttca

SEQ ID NO: 1722926 - DNA, 15 bp, Homo sapiens
gggaggccgcttcag

SEQ ID NO: 1722927 - DNA, 15 bp, Homo sapiens
ggaggccgcttcagt

SEQ ID NO: 1722928 - DNA, 15 bp, Homo sapiens
gaggccgcttcagtt

SEQ ID NO: 1722929 - DNA, 15 bp, Homo sapiens
aggccgcttcagttt

SEQ ID NO: 1722930 - DNA, 15 bp, Homo sapiens
ggccgcttcagtttc

SEQ ID NO: 1722931 - DNA, 15 bp, Homo sapiens
gccgcttcagtttcc

SEQ ID NO: 1722932 - DNA, 15 bp, Homo sapiens
ccgcttcagtttcca

SEQ ID NO: 1722933 - DNA, 15 bp, Homo sapiens
cgcttcagtttccac

SEQ ID NO: 1722934 - DNA, 15 bp, Homo sapiens
gcttcagtttccact

SEQ ID NO: 1722935 - DNA, 15 bp, Homo sapiens
cttcagtttccactt

SEQ ID NO: 1722936 - DNA, 15 bp, Homo sapiens
ttcagtttccacttg

SEQ ID NO: 1722937 - DNA, 15 bp, Homo sapiens
tcagtttccacttgg

SEQ ID NO: 1722938 - DNA, 15 bp, Homo sapiens
cagtttccacttggc

SEQ ID NO: 1722939 - DNA, 15 bp, Homo sapiens
agtttccacttggcc

SEQ ID NO: 1722940 - DNA, 15 bp, Homo sapiens
gtttccacttggcca

SEQ ID NO: 1722941 - DNA, 15 bp, Homo sapiens
tttccacttggccag

SEQ ID NO: 1722942 - DNA, 15 bp, Homo sapiens
ttccacttggccagc

SEQ ID NO: 1722943 - DNA, 15 bp, Homo sapiens
tccacttggccagcg

SEQ ID NO: 1722944 - DNA, 15 bp, Homo sapiens
ccacttggccagcgc

SEQ ID NO: 1722945 - DNA, 15 bp, Homo sapiens
cacttggccagcgcc

SEQ ID NO: 1722946 - DNA, 15 bp, Homo sapiens
acttggccagcgcca

SEQ ID NO: 1722947 - DNA, 15 bp, Homo sapiens
cttggccagcgccag

SEQ ID NO: 1722948 - DNA, 15 bp, Homo sapiens
ttggccagcgccaga

SEQ ID NO: 1722949 - DNA, 15 bp, Homo sapiens
tggccagcgccagaa

SEQ ID NO: 1722950 - DNA, 15 bp, Homo sapiens
ggccagcgccagaaa

SEQ ID NO: 1722951 - DNA, 15 bp, Homo sapiens
gccagcgccagaaac

SEQ ID NO: 1722952 - DNA, 15 bp, Homo sapiens
ccagcgccagaaacg

SEQ ID NO: 1722953 - DNA, 15 bp, Homo sapiens
cagcgccagaaacgg

SEQ ID NO: 1722954 - DNA, 15 bp, Homo sapiens
agcgccagaaacggg

SEQ ID NO: 1722955 - DNA, 15 bp, Homo sapiens
gcgccagaaacgggc

SEQ ID NO: 1722956 - DNA, 15 bp, Homo sapiens
cgccagaaacgggct

SEQ ID NO: 1722957 - DNA, 15 bp, Homo sapiens
gccagaaacgggctg

SEQ ID NO: 1722958 - DNA, 15 bp, Homo sapiens
ccagaaacgggctgc

SEQ ID NO: 1722959 - DNA, 15 bp, Homo sapiens
cagaaacgggctgct

SEQ ID NO: 1722960 - DNA, 15 bp, Homo sapiens
agaaacgggctgctg

SEQ ID NO: 1722961 - DNA, 15 bp, Homo sapiens
gaaacgggctgctgt

SEQ ID NO: 1722962 - DNA, 15 bp, Homo sapiens
aaacgggctgctgtg

SEQ ID NO: 1722963 - DNA, 15 bp, Homo sapiens
aacgggctgctgtgc

SEQ ID NO: 1722964 - DNA, 15 bp, Homo sapiens
acgggctgctgtgct

SEQ ID NO: 1722965 - DNA, 15 bp, Homo sapiens
cgggctgctgtgctg

SEQ ID NO: 1722966 - DNA, 15 bp, Homo sapiens
gggctgctgtgctgc

SEQ ID NO: 1722967 - DNA, 15 bp, Homo sapiens
ggctgctgtgctgcc

SEQ ID NO: 1722968 - DNA, 15 bp, Homo sapiens
gctgctgtgctgcca

SEQ ID NO: 1722969 - DNA, 15 bp, Homo sapiens
ctgctgtgctgccag

SEQ ID NO: 1722970 - DNA, 15 bp, Homo sapiens
tgctgtgctgccagc

SEQ ID NO: 1722971 - DNA, 15 bp, Homo sapiens
gctgtgctgccagcg

SEQ ID NO: 1722972 - DNA, 15 bp, Homo sapiens
ctgtgctgccagcgc

SEQ ID NO: 1722973 - DNA, 15 bp, Homo sapiens
tgtgctgccagcgcc

SEQ ID NO: 1722974 - DNA, 15 bp, Homo sapiens
gtgctgccagcgcct

SEQ ID NO: 1722975 - DNA, 15 bp, Homo sapiens
tgctgccagcgccta

SEQ ID NO: 1722976 - DNA, 15 bp, Homo sapiens
gctgccagcgcctac

SEQ ID NO: 1722977 - DNA, 15 bp, Homo sapiens
ctgccagcgcctacg

SEQ ID NO: 1722978 - DNA, 15 bp, Homo sapiens
tgccagcgcctacgt

SEQ ID NO: 1722979 - DNA, 15 bp, Homo sapiens
gccagcgcctacgtt

SEQ ID NO: 1722980 - DNA, 15 bp, Homo sapiens
ccagcgcctacgttc

SEQ ID NO: 1722981 - DNA, 15 bp, Homo sapiens
cagcgcctacgttcc

SEQ ID NO: 1722982 - DNA, 15 bp, Homo sapiens
agcgcctacgttcct

SEQ ID NO: 1722983 - DNA, 15 bp, Homo sapiens
gcgcctacgttcctc

SEQ ID NO: 1722984 - DNA, 15 bp, Homo sapiens
cgcctacgttcctcc

SEQ ID NO: 1722985 - DNA, 15 bp, Homo sapiens
gcctacgttcctccc

SEQ ID NO: 1722986 - DNA, 15 bp, Homo sapiens
cctacgttcctcccc

SEQ ID NO: 1722987 - DNA, 15 bp, Homo sapiens
ctacgttcctccccg

SEQ ID NO: 1722988 - DNA, 15 bp, Homo sapiens
tacgttcctccccgc

SEQ ID NO: 1722989 - DNA, 15 bp, Homo sapiens
acgttcctccccgcg

SEQ ID NO: 1722990 - DNA, 15 bp, Homo sapiens
cgttcctccccgcgc

SEQ ID NO: 1722991 - DNA, 15 bp, Homo sapiens
gttcctccccgcgct

SEQ ID NO: 1722992 - DNA, 15 bp, Homo sapiens
ttcctccccgcgctg

SEQ ID NO: 1722993 - DNA, 15 bp, Homo sapiens
tcctccccgcgctgc

SEQ ID NO: 1722994 - DNA, 15 bp, Homo sapiens
cctccccgcgctgcg

SEQ ID NO: 1722995 - DNA, 15 bp, Homo sapiens
ctccccgcgctgcgc

SEQ ID NO: 1722996 - DNA, 15 bp, Homo sapiens
tccccgcgctgcgcc

SEQ ID NO: 1722997 - DNA, 15 bp, Homo sapiens
ccccgcgctgcgcca

SEQ ID NO: 1722998 - DNA, 15 bp, Homo sapiens
cccgcgctgcgccag

SEQ ID NO: 1722999 - DNA, 15 bp, Homo sapiens
ccgcgctgcgccagg

SEQ ID NO: 1723000 - DNA, 15 bp, Homo sapiens
cgcgctgcgccagga

SEQ ID NO: 1723001 - DNA, 15 bp, Homo sapiens
gcgctgcgccaggag

SEQ ID NO: 1723002 - DNA, 15 bp, Homo sapiens
cgctgcgccaggagt

SEQ ID NO: 1723003 - DNA, 15 bp, Homo sapiens
gctgcgccaggagtc

SEQ ID NO: 1723004 - DNA, 15 bp, Homo sapiens
ctgcgccaggagtcc

SEQ ID NO: 1723005 - DNA, 15 bp, Homo sapiens
tgcgccaggagtccc

SEQ ID NO: 1723006 - DNA, 15 bp, Homo sapiens
gcgccaggagtcccg

SEQ ID NO: 1723007 - DNA, 15 bp, Homo sapiens
cgccaggagtcccgt

SEQ ID NO: 1723008 - DNA, 15 bp, Homo sapiens
gccaggagtcccgtt

SEQ ID NO: 1723009 - DNA, 15 bp, Homo sapiens
ccaggagtcccgttc

SEQ ID NO: 1723010 - DNA, 15 bp, Homo sapiens
caggagtcccgttcg

SEQ ID NO: 1723011 - DNA, 15 bp, Homo sapiens
aggagtcccgttcgg

SEQ ID NO: 1723012 - DNA, 15 bp, Homo sapiens
ggagtcccgttcggc

SEQ ID NO: 1723013 - DNA, 15 bp, Homo sapiens
gagtcccgttcggcg

SEQ ID NO: 1723014 - DNA, 15 bp, Homo sapiens
agtcccgttcggcgg

SEQ ID NO: 1723015 - DNA, 15 bp, Homo sapiens
gtcccgttcggcggg

SEQ ID NO: 1723016 - DNA, 15 bp, Homo sapiens
tcccgttcggcggga

SEQ ID NO: 1723017 - DNA, 15 bp, Homo sapiens
cccgttcggcgggac

SEQ ID NO: 1723018 - DNA, 15 bp, Homo sapiens
ccgttcggcgggacc

SEQ ID NO: 1723019 - DNA, 15 bp, Homo sapiens
cgttcggcgggaccg

SEQ ID NO: 1723020 - DNA, 15 bp, Homo sapiens
gttcggcgggaccgc

SEQ ID NO: 1723021 - DNA, 15 bp, Homo sapiens
ttcggcgggaccgca

SEQ ID NO: 1723022 - DNA, 15 bp, Homo sapiens
tcggcgggaccgcag

SEQ ID NO: 1723023 - DNA, 15 bp, Homo sapiens
cggcgggaccgcagc

SEQ ID NO: 1723024 - DNA, 15 bp, Homo sapiens
ggcgggaccgcagct

SEQ ID NO: 1723025 - DNA, 15 bp, Homo sapiens
gcgggaccgcagctg

SEQ ID NO: 1723026 - DNA, 15 bp, Homo sapiens
cgggaccgcagctgc

SEQ ID NO: 1723027 - DNA, 15 bp, Homo sapiens
gggaccgcagctgct

SEQ ID NO: 1723028 - DNA, 15 bp, Homo sapiens
ggaccgcagctgctg

SEQ ID NO: 1723029 - DNA, 15 bp, Homo sapiens
gaccgcagctgctgc

SEQ ID NO: 1723030 - DNA, 15 bp, Homo sapiens
accgcagctgctgcc

SEQ ID NO: 1723031 - DNA, 15 bp, Homo sapiens
ccgcagctgctgcct

SEQ ID NO: 1723032 - DNA, 15 bp, Homo sapiens
cgcagctgctgcctt

SEQ ID NO: 1723033 - DNA, 15 bp, Homo sapiens
gcagctgctgccttc

SEQ ID NO: 1723034 - DNA, 15 bp, Homo sapiens
cagctgctgccttca

SEQ ID NO: 1723035 - DNA, 15 bp, Homo sapiens
agctgctgccttcac

SEQ ID NO: 1723036 - DNA, 15 bp, Homo sapiens
gctgctgccttcact

SEQ ID NO: 1723037 - DNA, 15 bp, Homo sapiens
ctgctgccttcactc

SEQ ID NO: 1723038 - DNA, 15 bp, Homo sapiens
tgctgccttcactca

SEQ ID NO: 1723039 - DNA, 15 bp, Homo sapiens
gctgccttcactcat

SEQ ID NO: 1723040 - DNA, 15 bp, Homo sapiens
ctgccttcactcatt

SEQ ID NO: 1723041 - DNA, 15 bp, Homo sapiens
tgccttcactcatta

SEQ ID NO: 1723042 - DNA, 15 bp, Homo sapiens
gccttcactcattac

SEQ ID NO: 1723043 - DNA, 15 bp, Homo sapiens
ccttcactcattacc

SEQ ID NO: 1723044 - DNA, 15 bp, Homo sapiens
cttcactcattacct

SEQ ID NO: 1723045 - DNA, 15 bp, Homo sapiens
ttcactcattacctg

SEQ ID NO: 1723046 - DNA, 15 bp, Homo sapiens
tcactcattacctgc

SEQ ID NO: 1723047 - DNA, 15 bp, Homo sapiens
cactcattacctgcc

SEQ ID NO: 1723048 - DNA, 15 bp, Homo sapiens
actcattacctgccc

SEQ ID NO: 1723049 - DNA, 15 bp, Homo sapiens
ctcattacctgcccc

SEQ ID NO: 1723050 - DNA, 15 bp, Homo sapiens
tcattacctgcccct

SEQ ID NO: 1723051 - DNA, 15 bp, Homo sapiens
cattacctgcccctg

SEQ ID NO: 1723052 - DNA, 15 bp, Homo sapiens
attacctgcccctgt

SEQ ID NO: 1723053 - DNA, 15 bp, Homo sapiens
ttacctgcccctgtc

SEQ ID NO: 1723054 - DNA, 15 bp, Homo sapiens
tacctgcccctgtcc

SEQ ID NO: 1723055 - DNA, 15 bp, Homo sapiens
acctgcccctgtcct

SEQ ID NO: 1723056 - DNA, 15 bp, Homo sapiens
cctgcccctgtcctg

SEQ ID NO: 1723057 - DNA, 15 bp, Homo sapiens
ctgcccctgtcctgg

SEQ ID NO: 1723058 - DNA, 15 bp, Homo sapiens
tgcccctgtcctggc

SEQ ID NO: 1723059 - DNA, 15 bp, Homo sapiens
gcccctgtcctggca

SEQ ID NO: 1723060 - DNA, 15 bp, Homo sapiens
cccctgtcctggcag

SEQ ID NO: 1723061 - DNA, 15 bp, Homo sapiens
ccctgtcctggcagc

SEQ ID NO: 1723062 - DNA, 15 bp, Homo sapiens
cctgtcctggcagct

SEQ ID NO: 1723063 - DNA, 15 bp, Homo sapiens
ctgtcctggcagctc

SEQ ID NO: 1723064 - DNA, 15 bp, Homo sapiens
tgtcctggcagctcc

SEQ ID NO: 1723065 - DNA, 15 bp, Homo sapiens
gtcctggcagctcct

SEQ ID NO: 1723066 - DNA, 15 bp, Homo sapiens
tcctggcagctcctt

SEQ ID NO: 1723067 - DNA, 15 bp, Homo sapiens
cctggcagctccttc

SEQ ID NO: 1723068 - DNA, 15 bp, Homo sapiens
ctggcagctccttca

SEQ ID NO: 1723069 - DNA, 15 bp, Homo sapiens
tggcagctccttcag

SEQ ID NO: 1723070 - DNA, 15 bp, Homo sapiens
ggcagctccttcaga

SEQ ID NO: 1723071 - DNA, 15 bp, Homo sapiens
gcagctccttcagaa

SEQ ID NO: 1723072 - DNA, 15 bp, Homo sapiens
cagctccttcagaac

SEQ ID NO: 1723073 - DNA, 15 bp, Homo sapiens
agctccttcagaaca

SEQ ID NO: 1723074 - DNA, 15 bp, Homo sapiens
gctccttcagaacat

SEQ ID NO: 1723075 - DNA, 15 bp, Homo sapiens
ctccttcagaacata

SEQ ID NO: 1723076 - DNA, 15 bp, Homo sapiens
tccttcagaacatat

SEQ ID NO: 1723077 - DNA, 15 bp, Homo sapiens
ccttcagaacatatt

SEQ ID NO: 1723078 - DNA, 15 bp, Homo sapiens
cttcagaacatattg

SEQ ID NO: 1723079 - DNA, 15 bp, Homo sapiens
ttcagaacatattgt

SEQ ID NO: 1723080 - DNA, 15 bp, Homo sapiens
tcagaacatattgtt

SEQ ID NO: 1723081 - DNA, 15 bp, Homo sapiens
cagaacatattgttc

SEQ ID NO: 1723082 - DNA, 15 bp, Homo sapiens
agaacatattgttct

SEQ ID NO: 1723083 - DNA, 15 bp, Homo sapiens
gaacatattgttctt

SEQ ID NO: 1723084 - DNA, 15 bp, Homo sapiens
aacatattgttcttt

SEQ ID NO: 1723085 - DNA, 15 bp, Homo sapiens
acatattgttctttg

SEQ ID NO: 1723086 - DNA, 15 bp, Homo sapiens
catattgttctttgg

SEQ ID NO: 1723087 - DNA, 15 bp, Homo sapiens
atattgttctttggg

SEQ ID NO: 1723088 - DNA, 15 bp, Homo sapiens
tattgttctttgggg

SEQ ID NO: 1723089 - DNA, 15 bp, Homo sapiens
attgttctttgggga

SEQ ID NO: 1723090 - DNA, 15 bp, Homo sapiens
ttgttctttggggaa

SEQ ID NO: 1723091 - DNA, 15 bp, Homo sapiens
tgttctttggggaaa

SEQ ID NO: 1723092 - DNA, 15 bp, Homo sapiens
gttctttggggaaat

SEQ ID NO: 1723093 - DNA, 15 bp, Homo sapiens
ttctttggggaaata

SEQ ID NO: 1723094 - DNA, 15 bp, Homo sapiens
tctttggggaaatat

SEQ ID NO: 1723095 - DNA, 15 bp, Homo sapiens
ctttggggaaatatc

SEQ ID NO: 1723096 - DNA, 15 bp, Homo sapiens
tttggggaaatatca

SEQ ID NO: 1723097 - DNA, 15 bp, Homo sapiens
ttggggaaatatcat

SEQ ID NO: 1723098 - DNA, 15 bp, Homo sapiens
tggggaaatatcatg

SEQ ID NO: 1723099 - DNA, 15 bp, Homo sapiens
ggggaaatatcatgg

SEQ ID NO: 1723100 - DNA, 15 bp, Homo sapiens
gggaaatatcatggt

SEQ ID NO: 1723101 - DNA, 15 bp, Homo sapiens
ggaaatatcatggtt

SEQ ID NO: 1723102 - DNA, 15 bp, Homo sapiens
gaaatatcatggttt

SEQ ID NO: 1723103 - DNA, 15 bp, Homo sapiens
aaatatcatggtttt

SEQ ID NO: 1723104 - DNA, 15 bp, Homo sapiens
aatatcatggttttt

SEQ ID NO: 1723105 - DNA, 15 bp, Homo sapiens
atatcatggtttttg

SEQ ID NO: 1723106 - DNA, 15 bp, Homo sapiens
tatcatggtttttga

SEQ ID NO: 1723107 - DNA, 15 bp, Homo sapiens
atcatggtttttgaa

SEQ ID NO: 1723108 - DNA, 15 bp, Homo sapiens
tcatggtttttgaac

SEQ ID NO: 1723109 - DNA, 15 bp, Homo sapiens
catggtttttgaact

SEQ ID NO: 1723110 - DNA, 15 bp, Homo sapiens
atggtttttgaactg

SEQ ID NO: 1723111 - DNA, 15 bp, Homo sapiens
tggtttttgaactga

SEQ ID NO: 1723112 - DNA, 15 bp, Homo sapiens
ggtttttgaactgag

SEQ ID NO: 1723113 - DNA, 15 bp, Homo sapiens
gtttttgaactgagg

SEQ ID NO: 1723114 - DNA, 15 bp, Homo sapiens
tttttgaactgagga

SEQ ID NO: 1723115 - DNA, 15 bp, Homo sapiens
ttttgaactgaggac

SEQ ID NO: 1723116 - DNA, 15 bp, Homo sapiens
tttgaactgaggaca

SEQ ID NO: 1723117 - DNA, 15 bp, Homo sapiens
ttgaactgaggacag

SEQ ID NO: 1723118 - DNA, 15 bp, Homo sapiens
tgaactgaggacaga

SEQ ID NO: 1723119 - DNA, 15 bp, Homo sapiens
gaactgaggacagat

SEQ ID NO: 1723120 - DNA, 15 bp, Homo sapiens
aactgaggacagatt

SEQ ID NO: 1723121 - DNA, 15 bp, Homo sapiens
actgaggacagattc

SEQ ID NO: 1723122 - DNA, 15 bp, Homo sapiens
tgaggacagattctc

SEQ ID NO: 1723123 - DNA, 15 bp, Homo sapiens
gaggacagattctct

SEQ ID NO: 1723124 - DNA, 15 bp, Homo sapiens
aggacagattctctt

SEQ ID NO: 1723125 - DNA, 15 bp, Homo sapiens
ggacagattctcttc

SEQ ID NO: 1723126 - DNA, 15 bp, Homo sapiens
gacagattctcttca

SEQ ID NO: 1723127 - DNA, 15 bp, Homo sapiens
acagattctcttcag

SEQ ID NO: 1723128 - DNA, 15 bp, Homo sapiens
cagattctcttcaga

SEQ ID NO: 1723129 - DNA, 15 bp, Homo sapiens
agattctcttcagaa

SEQ ID NO: 1723130 - DNA, 15 bp, Homo sapiens
gattctcttcagaaa

SEQ ID NO: 1723131 - DNA, 15 bp, Homo sapiens
attctcttcagaaat

SEQ ID NO: 1723132 - DNA, 15 bp, Homo sapiens
ttctcttcagaaatc

SEQ ID NO: 1723133 - DNA, 15 bp, Homo sapiens
tctcttcagaaatca

SEQ ID NO: 1723134 - DNA, 15 bp, Homo sapiens
ctcttcagaaatcac

SEQ ID NO: 1723135 - DNA, 15 bp, Homo sapiens
tcttcagaaatcaca

SEQ ID NO: 1723136 - DNA, 15 bp, Homo sapiens
cttcagaaatcacat

SEQ ID NO: 1723137 - DNA, 15 bp, Homo sapiens
ttcagaaatcacatg

SEQ ID NO: 1723138 - DNA, 15 bp, Homo sapiens
tcagaaatcacatgg

SEQ ID NO: 1723139 - DNA, 15 bp, Homo sapiens
cagaaatcacatggc

SEQ ID NO: 1723140 - DNA, 15 bp, Homo sapiens
agaaatcacatggca

SEQ ID NO: 1723141 - DNA, 15 bp, Homo sapiens
gaaatcacatggcaa

SEQ ID NO: 1723142 - DNA, 15 bp, Homo sapiens
aaatcacatggcaaa

SEQ ID NO: 1723143 - DNA, 15 bp, Homo sapiens
aatcacatggcaaaa

SEQ ID NO: 1723144 - DNA, 15 bp, Homo sapiens
atcacatggcaaaac

SEQ ID NO: 1723145 - DNA, 15 bp, Homo sapiens
tcacatggcaaaaca

SEQ ID NO: 1723146 - DNA, 15 bp, Homo sapiens
cacatggcaaaacat

SEQ ID NO: 1723147 - DNA, 15 bp, Homo sapiens
acatggcaaaacatt

SEQ ID NO: 1723148 - DNA, 15 bp, Homo sapiens
catggcaaaacatta

SEQ ID NO: 1723149 - DNA, 15 bp, Homo sapiens
atggcaaaacattag

SEQ ID NO: 1723150 - DNA, 15 bp, Homo sapiens
tggcaaaacattaga

SEQ ID NO: 1723151 - DNA, 15 bp, Homo sapiens
ggcaaaacattagaa

SEQ ID NO: 1723152 - DNA, 15 bp, Homo sapiens
gcaaaacattagaaa

SEQ ID NO: 1723153 - DNA, 15 bp, Homo sapiens
caaaacattagaaaa

SEQ ID NO: 1723154 - DNA, 15 bp, Homo sapiens
aaaacattagaaaaa

SEQ ID NO: 1723155 - DNA, 15 bp, Homo sapiens
aaacattagaaaaaa

SEQ ID NO: 1723156 - DNA, 15 bp, Homo sapiens
aacattagaaaaaaa

SEQ ID NO: 1723157 - DNA, 15 bp, Homo sapiens
acattagaaaaaaag

SEQ ID NO: 1723158 - DNA, 15 bp, Homo sapiens
cattagaaaaaaaga

SEQ ID NO: 1723159 - DNA, 15 bp, Homo sapiens
attagaaaaaaagaa

SEQ ID NO: 1723160 - DNA, 15 bp, Homo sapiens
ttagaaaaaaagaaa

SEQ ID NO: 1723161 - DNA, 15 bp, Homo sapiens
tagaaaaaaagaaaa

SEQ ID NO: 1723162 - DNA, 15 bp, Homo sapiens
agaaaaaaagaaaaa

SEQ ID NO: 1723163 - DNA, 15 bp, Homo sapiens
gaaaaaaagaaaaac

SEQ ID NO: 1723164 - DNA, 15 bp, Homo sapiens
aaaaaaagaaaaact

SEQ ID NO: 1723165 - DNA, 15 bp, Homo sapiens
aaaaaagaaaaacta

SEQ ID NO: 1723166 - DNA, 15 bp, Homo sapiens
aaaaagaaaaactaa

SEQ ID NO: 1723167 - DNA, 15 bp, Homo sapiens
aaaagaaaaactaag

SEQ ID NO: 1723168 - DNA, 15 bp, Homo sapiens
aaagaaaaactaaga

SEQ ID NO: 1723169 - DNA, 15 bp, Homo sapiens
aagaaaaactaagaa

SEQ ID NO: 1723170 - DNA, 15 bp, Homo sapiens
agaaaaactaagaaa

SEQ ID NO: 1723171 - DNA, 15 bp, Homo sapiens
gaaaaactaagaaat

SEQ ID NO: 1723172 - DNA, 15 bp, Homo sapiens
aaaaactaagaaatt

SEQ ID NO: 1723173 - DNA, 15 bp, Homo sapiens
aaaactaagaaattt

SEQ ID NO: 1723174 - DNA, 15 bp, Homo sapiens
aaactaagaaattta

SEQ ID NO: 1723175 - DNA, 15 bp, Homo sapiens
aactaagaaatttaa

SEQ ID NO: 1723176 - DNA, 15 bp, Homo sapiens
actaagaaatttaaa

SEQ ID NO: 1723177 - DNA, 15 bp, Homo sapiens
ctaagaaatttaaaa

SEQ ID NO: 1723178 - DNA, 15 bp, Homo sapiens
taagaaatttaaaaa

SEQ ID NO: 1723179 - DNA, 15 bp, Homo sapiens
aagaaatttaaaaat

SEQ ID NO: 1723180 - DNA, 15 bp, Homo sapiens
agaaatttaaaaatt

SEQ ID NO: 1723181 - DNA, 15 bp, Homo sapiens
gaaatttaaaaattc

SEQ ID NO: 1723182 - DNA, 15 bp, Homo sapiens
aaatttaaaaattca

SEQ ID NO: 1723183 - DNA, 15 bp, Homo sapiens
aatttaaaaattcag

SEQ ID NO: 1723184 - DNA, 15 bp, Homo sapiens
atttaaaaattcaga

SEQ ID NO: 1723185 - DNA, 15 bp, Homo sapiens
tttaaaaattcagaa

SEQ ID NO: 1723186 - DNA, 15 bp, Homo sapiens
ttaaaaattcagaac

SEQ ID NO: 1723187 - DNA, 15 bp, Homo sapiens
taaaaattcagaaca

SEQ ID NO: 1723188 - DNA, 15 bp, Homo sapiens
aaaaattcagaacag

SEQ ID NO: 1723189 - DNA, 15 bp, Homo sapiens
aaaattcagaacaga

SEQ ID NO: 1723190 - DNA, 15 bp, Homo sapiens
aaattcagaacagaa

SEQ ID NO: 1723191 - DNA, 15 bp, Homo sapiens
aattcagaacagaag

SEQ ID NO: 1723192 - DNA, 15 bp, Homo sapiens
attcagaacagaaga

SEQ ID NO: 1723193 - DNA, 15 bp, Homo sapiens
ttcagaacagaagac

SEQ ID NO: 1723194 - DNA, 15 bp, Homo sapiens
tcagaacagaagaca

SEQ ID NO: 1723195 - DNA, 15 bp, Homo sapiens
cagaacagaagacaa

SEQ ID NO: 1723196 - DNA, 15 bp, Homo sapiens
agaacagaagacaat

SEQ ID NO: 1723197 - DNA, 15 bp, Homo sapiens
gaacagaagacaatc

SEQ ID NO: 1723198 - DNA, 15 bp, Homo sapiens
aacagaagacaatcg

SEQ ID NO: 1723199 - DNA, 15 bp, Homo sapiens
acagaagacaatcgg

SEQ ID NO: 1723200 - DNA, 15 bp, Homo sapiens
cagaagacaatcggt

SEQ ID NO: 1723201 - DNA, 15 bp, Homo sapiens
agaagacaatcggtt

SEQ ID NO: 1723202 - DNA, 15 bp, Homo sapiens
gaagacaatcggttt

SEQ ID NO: 1723203 - DNA, 15 bp, Homo sapiens
aagacaatcggtttt

SEQ ID NO: 1723204 - DNA, 15 bp, Homo sapiens
agacaatcggtttta

SEQ ID NO: 1723205 - DNA, 15 bp, Homo sapiens
gacaatcggttttat

SEQ ID NO: 1723206 - DNA, 15 bp, Homo sapiens
acaatcggttttatg

SEQ ID NO: 1723207 - DNA, 15 bp, Homo sapiens
caatcggttttatgc

SEQ ID NO: 1723208 - DNA, 15 bp, Homo sapiens
aatcggttttatgct

SEQ ID NO: 1723209 - DNA, 15 bp, Homo sapiens
atcggttttatgcta

SEQ ID NO: 1723210 - DNA, 15 bp, Homo sapiens
tcggttttatgctaa

SEQ ID NO: 1723211 - DNA, 15 bp, Homo sapiens
cggttttatgctaac

SEQ ID NO: 1723212 - DNA, 15 bp, Homo sapiens
ggttttatgctaact

SEQ ID NO: 1723213 - DNA, 15 bp, Homo sapiens
gttttatgctaactt

SEQ ID NO: 1723214 - DNA, 15 bp, Homo sapiens
ttttatgctaacttt

SEQ ID NO: 1723215 - DNA, 15 bp, Homo sapiens
tttatgctaactttt

SEQ ID NO: 1723216 - DNA, 15 bp, Homo sapiens
ttatgctaactttta

SEQ ID NO: 1723217 - DNA, 15 bp, Homo sapiens
tatgctaacttttat

SEQ ID NO: 1723218 - DNA, 15 bp, Homo sapiens
atgctaacttttata

SEQ ID NO: 1723219 - DNA, 15 bp, Homo sapiens
tgctaacttttataa

SEQ ID NO: 1723220 - DNA, 15 bp, Homo sapiens
gctaacttttataac

SEQ ID NO: 1723221 - DNA, 15 bp, Homo sapiens
ctaacttttataacc

SEQ ID NO: 1723222 - DNA, 15 bp, Homo sapiens
taacttttataacct

SEQ ID NO: 1723223 - DNA, 15 bp, Homo sapiens
aacttttataacctt

SEQ ID NO: 1723224 - DNA, 15 bp, Homo sapiens
acttttataacctta

SEQ ID NO: 1723225 - DNA, 15 bp, Homo sapiens
cttttataaccttaa

SEQ ID NO: 1723226 - DNA, 15 bp, Homo sapiens
ttttataaccttaat

SEQ ID NO: 1723227 - DNA, 15 bp, Homo sapiens
tttataaccttaatc

SEQ ID NO: 1723228 - DNA, 15 bp, Homo sapiens
ttataaccttaatcg

SEQ ID NO: 1723229 - DNA, 15 bp, Homo sapiens
tataaccttaatcgt

SEQ ID NO: 1723230 - DNA, 15 bp, Homo sapiens
ataaccttaatcgtt

SEQ ID NO: 1723231 - DNA, 15 bp, Homo sapiens
taaccttaatcgttg

SEQ ID NO: 1723232 - DNA, 15 bp, Homo sapiens
aaccttaatcgttga

SEQ ID NO: 1723233 - DNA, 15 bp, Homo sapiens
accttaatcgttgaa

SEQ ID NO: 1723234 - DNA, 15 bp, Homo sapiens
ccttaatcgttgaag

SEQ ID NO: 1723235 - DNA, 15 bp, Homo sapiens
cttaatcgttgaagc

SEQ ID NO: 1723236 - DNA, 15 bp, Homo sapiens
ttaatcgttgaagct

SEQ ID NO: 1723237 - DNA, 15 bp, Homo sapiens
taatcgttgaagctt

SEQ ID NO: 1723238 - DNA, 15 bp, Homo sapiens
aatcgttgaagcttt

SEQ ID NO: 1723239 - DNA, 15 bp, Homo sapiens
atcgttgaagctttt

SEQ ID NO: 1723240 - DNA, 15 bp, Homo sapiens
tcgttgaagcttttc

SEQ ID NO: 1723241 - DNA, 15 bp, Homo sapiens
cgttgaagcttttcc

SEQ ID NO: 1723242 - DNA, 15 bp, Homo sapiens
gttgaagcttttccc

SEQ ID NO: 1723243 - DNA, 15 bp, Homo sapiens
ttgaagcttttcccc

SEQ ID NO: 1723244 - DNA, 15 bp, Homo sapiens
tgaagcttttcccct

SEQ ID NO: 1723245 - DNA, 15 bp, Homo sapiens
gaagcttttcccctc

SEQ ID NO: 1723246 - DNA, 15 bp, Homo sapiens
aagcttttcccctcc

SEQ ID NO: 1723247 - DNA, 15 bp, Homo sapiens
agcttttcccctcct

SEQ ID NO: 1723248 - DNA, 15 bp, Homo sapiens
gcttttcccctcctt

SEQ ID NO: 1723249 - DNA, 15 bp, Homo sapiens
cttttcccctccttt

SEQ ID NO: 1723250 - DNA, 15 bp, Homo sapiens
ttttcccctccttta

SEQ ID NO: 1723251 - DNA, 15 bp, Homo sapiens
tttcccctcctttag

SEQ ID NO: 1723252 - DNA, 15 bp, Homo sapiens
ttcccctcctttaga

SEQ ID NO: 1723253 - DNA, 15 bp, Homo sapiens
tcccctcctttagag

SEQ ID NO: 1723254 - DNA, 15 bp, Homo sapiens
cccctcctttagagc

SEQ ID NO: 1723255 - DNA, 15 bp, Homo sapiens
ccctcctttagagca

SEQ ID NO: 1723256 - DNA, 15 bp, Homo sapiens
cctcctttagagcaa

SEQ ID NO: 1723257 - DNA, 15 bp, Homo sapiens
ctcctttagagcaat

SEQ ID NO: 1723258 - DNA, 15 bp, Homo sapiens
tcctttagagcaatt

SEQ ID NO: 1723259 - DNA, 15 bp, Homo sapiens
cctttagagcaatta

SEQ ID NO: 1723260 - DNA, 15 bp, Homo sapiens
ctttagagcaattac

SEQ ID NO: 1723261 - DNA, 15 bp, Homo sapiens
tttagagcaattact

SEQ ID NO: 1723262 - DNA, 15 bp, Homo sapiens
ttagagcaattactt

SEQ ID NO: 1723263 - DNA, 15 bp, Homo sapiens
tagagcaattacttc

SEQ ID NO: 1723264 - DNA, 15 bp, Homo sapiens
agagcaattacttct

SEQ ID NO: 1723265 - DNA, 15 bp, Homo sapiens
gagcaattacttcta

SEQ ID NO: 1723266 - DNA, 15 bp, Homo sapiens
agcaattacttctat

SEQ ID NO: 1723267 - DNA, 15 bp, Homo sapiens
gcaattacttctatg

SEQ ID NO: 1723268 - DNA, 15 bp, Homo sapiens
caattacttctatgc

SEQ ID NO: 1723269 - DNA, 15 bp, Homo sapiens
aattacttctatgct

SEQ ID NO: 1723270 - DNA, 15 bp, Homo sapiens
attacttctatgctg

SEQ ID NO: 1723271 - DNA, 15 bp, Homo sapiens
ttacttctatgctgc

SEQ ID NO: 1723272 - DNA, 15 bp, Homo sapiens
tacttctatgctgcc

SEQ ID NO: 1723273 - DNA, 15 bp, Homo sapiens
acttctatgctgcca

SEQ ID NO: 1723274 - DNA, 15 bp, Homo sapiens
cttctatgctgccaa

SEQ ID NO: 1723275 - DNA, 15 bp, Homo sapiens
ttctatgctgccaaa

SEQ ID NO: 1723276 - DNA, 15 bp, Homo sapiens
tctatgctgccaaaa

SEQ ID NO: 1723277 - DNA, 15 bp, Homo sapiens
ctatgctgccaaaag

SEQ ID NO: 1723278 - DNA, 15 bp, Homo sapiens
tatgctgccaaaaga

SEQ ID NO: 1723279 - DNA, 15 bp, Homo sapiens
atgctgccaaaagaa

SEQ ID NO: 1723280 - DNA, 15 bp, Homo sapiens
tgctgccaaaagaaa

SEQ ID NO: 1723281 - DNA, 15 bp, Homo sapiens
gctgccaaaagaaat

SEQ ID NO: 1723282 - DNA, 15 bp, Homo sapiens
ctgccaaaagaaatg

SEQ ID NO: 1723283 - DNA, 15 bp, Homo sapiens
tgccaaaagaaatga

SEQ ID NO: 1723284 - DNA, 15 bp, Homo sapiens
gccaaaagaaatgag

SEQ ID NO: 1723285 - DNA, 15 bp, Homo sapiens
ccaaaagaaatgaga

SEQ ID NO: 1723286 - DNA, 15 bp, Homo sapiens
caaaagaaatgagaa

SEQ ID NO: 1723287 - DNA, 15 bp, Homo sapiens
aaaagaaatgagaag

SEQ ID NO: 1723288 - DNA, 15 bp, Homo sapiens
aaagaaatgagaagt

SEQ ID NO: 1723289 - DNA, 15 bp, Homo sapiens
aagaaatgagaagtg

SEQ ID NO: 1723290 - DNA, 15 bp, Homo sapiens
agaaatgagaagtga

SEQ ID NO: 1723291 - DNA, 15 bp, Homo sapiens
gaaatgagaagtgat

SEQ ID NO: 1723292 - DNA, 15 bp, Homo sapiens
aaatgagaagtgatt

SEQ ID NO: 1723293 - DNA, 15 bp, Homo sapiens
aatgagaagtgattt

SEQ ID NO: 1723294 - DNA, 15 bp, Homo sapiens
atgagaagtgatttc

SEQ ID NO: 1723295 - DNA, 15 bp, Homo sapiens
tgagaagtgatttca

SEQ ID NO: 1723296 - DNA, 15 bp, Homo sapiens
gagaagtgatttcat

SEQ ID NO: 1723297 - DNA, 15 bp, Homo sapiens
agaagtgatttcatc

SEQ ID NO: 1723298 - DNA, 15 bp, Homo sapiens
gaagtgatttcatct

SEQ ID NO: 1723299 - DNA, 15 bp, Homo sapiens
aagtgatttcatctg

SEQ ID NO: 1723300 - DNA, 15 bp, Homo sapiens
agtgatttcatctga

SEQ ID NO: 1723301 - DNA, 15 bp, Homo sapiens
gtgatttcatctgag

SEQ ID NO: 1723302 - DNA, 15 bp, Homo sapiens
tgatttcatctgagt

SEQ ID NO: 1723303 - DNA, 15 bp, Homo sapiens
gatttcatctgagtc

SEQ ID NO: 1723304 - DNA, 15 bp, Homo sapiens
atttcatctgagtca

SEQ ID NO: 1723305 - DNA, 15 bp, Homo sapiens
tttcatctgagtcat

SEQ ID NO: 1723306 - DNA, 15 bp, Homo sapiens
ttcatctgagtcatt

SEQ ID NO: 1723307 - DNA, 15 bp, Homo sapiens
tcatctgagtcatta

SEQ ID NO: 1723308 - DNA, 15 bp, Homo sapiens
catctgagtcattac

SEQ ID NO: 1723309 - DNA, 15 bp, Homo sapiens
atctgagtcattact

SEQ ID NO: 1723310 - DNA, 15 bp, Homo sapiens
tctgagtcattactg

SEQ ID NO: 1723311 - DNA, 15 bp, Homo sapiens
ctgagtcattactgt

SEQ ID NO: 1723312 - DNA, 15 bp, Homo sapiens
tgagtcattactgtg

SEQ ID NO: 1723313 - DNA, 15 bp, Homo sapiens
gagtcattactgtgc

SEQ ID NO: 1723314 - DNA, 15 bp, Homo sapiens
agtcattactgtgct

SEQ ID NO: 1723315 - DNA, 15 bp, Homo sapiens
gtcattactgtgctc

SEQ ID NO: 1723316 - DNA, 15 bp, Homo sapiens
tcattactgtgctct

SEQ ID NO: 1723317 - DNA, 15 bp, Homo sapiens
cattactgtgctctc

SEQ ID NO: 1723318 - DNA, 15 bp, Homo sapiens
attactgtgctctcc

SEQ ID NO: 1723319 - DNA, 15 bp, Homo sapiens
ttactgtgctctccc

SEQ ID NO: 1723320 - DNA, 15 bp, Homo sapiens
tactgtgctctccct

SEQ ID NO: 1723321 - DNA, 15 bp, Homo sapiens
actgtgctctccctc

SEQ ID NO: 1723322 - DNA, 15 bp, Homo sapiens
ctgtgctctccctca

SEQ ID NO: 1723323 - DNA, 15 bp, Homo sapiens
tgtgctctccctcaa

SEQ ID NO: 1723324 - DNA, 15 bp, Homo sapiens
gtgctctccctcaaa

SEQ ID NO: 1723325 - DNA, 15 bp, Homo sapiens
tgctctccctcaaag

SEQ ID NO: 1723326 - DNA, 15 bp, Homo sapiens
gctctccctcaaagg

SEQ ID NO: 1723327 - DNA, 15 bp, Homo sapiens
ctctccctcaaagga

SEQ ID NO: 1723328 - DNA, 15 bp, Homo sapiens
tctccctcaaaggat

SEQ ID NO: 1723329 - DNA, 15 bp, Homo sapiens
ctccctcaaaggata

SEQ ID NO: 1723330 - DNA, 15 bp, Homo sapiens
tccctcaaaggatag

SEQ ID NO: 1723331 - DNA, 15 bp, Homo sapiens
ccctcaaaggatagc

SEQ ID NO: 1723332 - DNA, 15 bp, Homo sapiens
cctcaaaggatagca

SEQ ID NO: 1723333 - DNA, 15 bp, Homo sapiens
ctcaaaggatagcag

SEQ ID NO: 1723334 - DNA, 15 bp, Homo sapiens
tcaaaggatagcaga

SEQ ID NO: 1723335 - DNA, 15 bp, Homo sapiens
caaaggatagcagac

SEQ ID NO: 1723336 - DNA, 15 bp, Homo sapiens
aaaggatagcagaca

SEQ ID NO: 1723337 - DNA, 15 bp, Homo sapiens
aaggatagcagacag

SEQ ID NO: 1723338 - DNA, 15 bp, Homo sapiens
aggatagcagacagt

SEQ ID NO: 1723339 - DNA, 15 bp, Homo sapiens
ggatagcagacagta

SEQ ID NO: 1723340 - DNA, 15 bp, Homo sapiens
gatagcagacagtaa

SEQ ID NO: 1723341 - DNA, 15 bp, Homo sapiens
atagcagacagtaat

SEQ ID NO: 1723342 - DNA, 15 bp, Homo sapiens
tagcagacagtaatt

SEQ ID NO: 1723343 - DNA, 15 bp, Homo sapiens
agcagacagtaatta

SEQ ID NO: 1723344 - DNA, 15 bp, Homo sapiens
gcagacagtaattag

SEQ ID NO: 1723345 - DNA, 15 bp, Homo sapiens
cagacagtaattagt

SEQ ID NO: 1723346 - DNA, 15 bp, Homo sapiens
agacagtaattagta

SEQ ID NO: 1723347 - DNA, 15 bp, Homo sapiens
gacagtaattagtac

SEQ ID NO: 1723348 - DNA, 15 bp, Homo sapiens
acagtaattagtact

SEQ ID NO: 1723349 - DNA, 15 bp, Homo sapiens
cagtaattagtactc

SEQ ID NO: 1723350 - DNA, 15 bp, Homo sapiens
agtaattagtactcc

SEQ ID NO: 1723351 - DNA, 15 bp, Homo sapiens
gtaattagtactcca

SEQ ID NO: 1723352 - DNA, 15 bp, Homo sapiens
taattagtactccac

SEQ ID NO: 1723353 - DNA, 15 bp, Homo sapiens
aattagtactccaca

SEQ ID NO: 1723354 - DNA, 15 bp, Homo sapiens
attagtactccacac

SEQ ID NO: 1723355 - DNA, 15 bp, Homo sapiens
ttagtactccacacc

SEQ ID NO: 1723356 - DNA, 15 bp, Homo sapiens
tagtactccacacca

SEQ ID NO: 1723357 - DNA, 15 bp, Homo sapiens
agtactccacaccag

SEQ ID NO: 1723358 - DNA, 15 bp, Homo sapiens
gtactccacaccaga

SEQ ID NO: 1723359 - DNA, 15 bp, Homo sapiens
tactccacaccagac

SEQ ID NO: 1723360 - DNA, 15 bp, Homo sapiens
actccacaccagacc

SEQ ID NO: 1723361 - DNA, 15 bp, Homo sapiens
ctccacaccagacct

SEQ ID NO: 1723362 - DNA, 15 bp, Homo sapiens
tccacaccagacctg

SEQ ID NO: 1723363 - DNA, 15 bp, Homo sapiens
ccacaccagacctgc

SEQ ID NO: 1723364 - DNA, 15 bp, Homo sapiens
cacaccagacctgcc

SEQ ID NO: 1723365 - DNA, 15 bp, Homo sapiens
acaccagacctgcct

SEQ ID NO: 1723366 - DNA, 15 bp, Homo sapiens
caccagacctgcctc

SEQ ID NO: 1723367 - DNA, 15 bp, Homo sapiens
accagacctgcctca

SEQ ID NO: 1723368 - DNA, 15 bp, Homo sapiens
ccagacctgcctcaa

SEQ ID NO: 1723369 - DNA, 15 bp, Homo sapiens
cagacctgcctcaaa

SEQ ID NO: 1723370 - DNA, 15 bp, Homo sapiens
agacctgcctcaaat

SEQ ID NO: 1723371 - DNA, 15 bp, Homo sapiens
gacctgcctcaaatt

SEQ ID NO: 1723372 - DNA, 15 bp, Homo sapiens
acctgcctcaaattt

SEQ ID NO: 1723373 - DNA, 15 bp, Homo sapiens
cctgcctcaaatttg

SEQ ID NO: 1723374 - DNA, 15 bp, Homo sapiens
ctgcctcaaatttgg

SEQ ID NO: 1723375 - DNA, 15 bp, Homo sapiens
tgcctcaaatttggc

SEQ ID NO: 1723376 - DNA, 15 bp, Homo sapiens
gcctcaaatttggca

SEQ ID NO: 1723377 - DNA, 15 bp, Homo sapiens
cctcaaatttggcat

SEQ ID NO: 1723378 - DNA, 15 bp, Homo sapiens
ctcaaatttggcata

SEQ ID NO: 1723379 - DNA, 15 bp, Homo sapiens
tcaaatttggcataa

SEQ ID NO: 1723380 - DNA, 15 bp, Homo sapiens
caaatttggcataaa

SEQ ID NO: 1723381 - DNA, 15 bp, Homo sapiens
aaatttggcataaac

SEQ ID NO: 1723382 - DNA, 15 bp, Homo sapiens
aatttggcataaact

SEQ ID NO: 1723383 - DNA, 15 bp, Homo sapiens
atttggcataaactg

SEQ ID NO: 1723384 - DNA, 15 bp, Homo sapiens
tttggcataaactgc

SEQ ID NO: 1723385 - DNA, 15 bp, Homo sapiens
ttggcataaactgca

SEQ ID NO: 1723386 - DNA, 15 bp, Homo sapiens
tggcataaactgcat

SEQ ID NO: 1723387 - DNA, 15 bp, Homo sapiens
ggcataaactgcatt

SEQ ID NO: 1723388 - DNA, 15 bp, Homo sapiens
gcataaactgcattc

SEQ ID NO: 1723389 - DNA, 15 bp, Homo sapiens
cataaactgcattcg

SEQ ID NO: 1723390 - DNA, 15 bp, Homo sapiens
ataaactgcattcgt

SEQ ID NO: 1723391 - DNA, 15 bp, Homo sapiens
taaactgcattcgtc

SEQ ID NO: 1723392 - DNA, 15 bp, Homo sapiens
aaactgcattcgtcc

SEQ ID NO: 1723393 - DNA, 15 bp, Homo sapiens
aactgcattcgtcct

SEQ ID NO: 1723394 - DNA, 15 bp, Homo sapiens
actgcattcgtcctt

SEQ ID NO: 1723395 - DNA, 15 bp, Homo sapiens
ctgcattcgtccttt

SEQ ID NO: 1723396 - DNA, 15 bp, Homo sapiens
tgcattcgtccttta

SEQ ID NO: 1723397 - DNA, 15 bp, Homo sapiens
gcattcgtcctttac

SEQ ID NO: 1723398 - DNA, 15 bp, Homo sapiens
cattcgtcctttaca

SEQ ID NO: 1723399 - DNA, 15 bp, Homo sapiens
attcgtcctttacag

SEQ ID NO: 1723400 - DNA, 15 bp, Homo sapiens
ttcgtcctttacaga

SEQ ID NO: 1723401 - DNA, 15 bp, Homo sapiens
tcgtcctttacagag

SEQ ID NO: 1723402 - DNA, 15 bp, Homo sapiens
cgtcctttacagagc

SEQ ID NO: 1723403 - DNA, 15 bp, Homo sapiens
gtcctttacagagcc

SEQ ID NO: 1723404 - DNA, 15 bp, Homo sapiens
tcctttacagagccg

SEQ ID NO: 1723405 - DNA, 15 bp, Homo sapiens
cctttacagagccga

SEQ ID NO: 1723406 - DNA, 15 bp, Homo sapiens
ctttacagagccgaa

SEQ ID NO: 1723407 - DNA, 15 bp, Homo sapiens
tttacagagccgaaa

SEQ ID NO: 1723408 - DNA, 15 bp, Homo sapiens
ttacagagccgaaaa

SEQ ID NO: 1723409 - DNA, 15 bp, Homo sapiens
tacagagccgaaaat

SEQ ID NO: 1723410 - DNA, 15 bp, Homo sapiens
acagagccgaaaatg

SEQ ID NO: 1723411 - DNA, 15 bp, Homo sapiens
cagagccgaaaatga

SEQ ID NO: 1723412 - DNA, 15 bp, Homo sapiens
agagccgaaaatgaa

SEQ ID NO: 1723413 - DNA, 15 bp, Homo sapiens
gagccgaaaatgaag

SEQ ID NO: 1723414 - DNA, 15 bp, Homo sapiens
agccgaaaatgaagc

SEQ ID NO: 1723415 - DNA, 15 bp, Homo sapiens
gccgaaaatgaagca

SEQ ID NO: 1723416 - DNA, 15 bp, Homo sapiens
ccgaaaatgaagcac

SEQ ID NO: 1723417 - DNA, 15 bp, Homo sapiens
cgaaaatgaagcact

SEQ ID NO: 1723418 - DNA, 15 bp, Homo sapiens
gaaaatgaagcactt

SEQ ID NO: 1723419 - DNA, 15 bp, Homo sapiens
aaaatgaagcacttc

SEQ ID NO: 1723420 - DNA, 15 bp, Homo sapiens
aaatgaagcacttct

SEQ ID NO: 1723421 - DNA, 15 bp, Homo sapiens
aatgaagcacttcta

SEQ ID NO: 1723422 - DNA, 15 bp, Homo sapiens
atgaagcacttctaa

SEQ ID NO: 1723423 - DNA, 15 bp, Homo sapiens
tgaagcacttctaag

SEQ ID NO: 1723424 - DNA, 15 bp, Homo sapiens
gaagcacttctaagt

SEQ ID NO: 1723425 - DNA, 15 bp, Homo sapiens
aagcacttctaagtc

SEQ ID NO: 1723426 - DNA, 15 bp, Homo sapiens
agcacttctaagtct

SEQ ID NO: 1723427 - DNA, 15 bp, Homo sapiens
gcacttctaagtctt

SEQ ID NO: 1723428 - DNA, 15 bp, Homo sapiens
cacttctaagtctta

SEQ ID NO: 1723429 - DNA, 15 bp, Homo sapiens
acttctaagtcttag

SEQ ID NO: 1723430 - DNA, 15 bp, Homo sapiens
cttctaagtcttaga

SEQ ID NO: 1723431 - DNA, 15 bp, Homo sapiens
ttctaagtcttagaa

SEQ ID NO: 1723432 - DNA, 15 bp, Homo sapiens
tctaagtcttagaat

SEQ ID NO: 1723433 - DNA, 15 bp, Homo sapiens
ctaagtcttagaatc

SEQ ID NO: 1723434 - DNA, 15 bp, Homo sapiens
taagtcttagaatct

SEQ ID NO: 1723435 - DNA, 15 bp, Homo sapiens
aagtcttagaatctt

SEQ ID NO: 1723436 - DNA, 15 bp, Homo sapiens
agtcttagaatcttc

SEQ ID NO: 1723437 - DNA, 15 bp, Homo sapiens
gtcttagaatcttct

SEQ ID NO: 1723438 - DNA, 15 bp, Homo sapiens
tcttagaatcttctc

SEQ ID NO: 1723439 - DNA, 15 bp, Homo sapiens
cttagaatcttctcg

SEQ ID NO: 1723440 - DNA, 15 bp, Homo sapiens
ttagaatcttctcgt

SEQ ID NO: 1723441 - DNA, 15 bp, Homo sapiens
tagaatcttctcgtg

SEQ ID NO: 1723442 - DNA, 15 bp, Homo sapiens
agaatcttctcgtga

SEQ ID NO: 1723443 - DNA, 15 bp, Homo sapiens
gaatcttctcgtgaa

SEQ ID NO: 1723444 - DNA, 15 bp, Homo sapiens
aatcttctcgtgaat

SEQ ID NO: 1723445 - DNA, 15 bp, Homo sapiens
atcttctcgtgaatt

SEQ ID NO: 1723446 - DNA, 15 bp, Homo sapiens
tcttctcgtgaattt

SEQ ID NO: 1723447 - DNA, 15 bp, Homo sapiens
cttctcgtgaatttc

SEQ ID NO: 1723448 - DNA, 15 bp, Homo sapiens
ttctcgtgaatttct

SEQ ID NO: 1723449 - DNA, 15 bp, Homo sapiens
tctcgtgaatttctg

SEQ ID NO: 1723450 - DNA, 15 bp, Homo sapiens
ctcgtgaatttctgt

SEQ ID NO: 1723451 - DNA, 15 bp, Homo sapiens
tcgtgaatttctgtc

SEQ ID NO: 1723452 - DNA, 15 bp, Homo sapiens
cgtgaatttctgtca

SEQ ID NO: 1723453 - DNA, 15 bp, Homo sapiens
gtgaatttctgtcat

SEQ ID NO: 1723454 - DNA, 15 bp, Homo sapiens
tgaatttctgtcatt

SEQ ID NO: 1723455 - DNA, 15 bp, Homo sapiens
gaatttctgtcattt

SEQ ID NO: 1723456 - DNA, 15 bp, Homo sapiens
aatttctgtcatttg

SEQ ID NO: 1723457 - DNA, 15 bp, Homo sapiens
atttctgtcatttgg

SEQ ID NO: 1723458 - DNA, 15 bp, Homo sapiens
tttctgtcatttggc

SEQ ID NO: 1723459 - DNA, 15 bp, Homo sapiens
ttctgtcatttggca

SEQ ID NO: 1723460 - DNA, 15 bp, Homo sapiens
tctgtcatttggcag

SEQ ID NO: 1723461 - DNA, 15 bp, Homo sapiens
ctgtcatttggcaga

SEQ ID NO: 1723462 - DNA, 15 bp, Homo sapiens
tgtcatttggcagaa

SEQ ID NO: 1723463 - DNA, 15 bp, Homo sapiens
gtcatttggcagaaa

SEQ ID NO: 1723464 - DNA, 15 bp, Homo sapiens
tcatttggcagaaat

SEQ ID NO: 1723465 - DNA, 15 bp, Homo sapiens
catttggcagaaatt

SEQ ID NO: 1723466 - DNA, 15 bp, Homo sapiens
atttggcagaaattt

SEQ ID NO: 1723467 - DNA, 15 bp, Homo sapiens
tttggcagaaatttc

SEQ ID NO: 1723468 - DNA, 15 bp, Homo sapiens
ttggcagaaatttct

SEQ ID NO: 1723469 - DNA, 15 bp, Homo sapiens
tggcagaaatttctg

SEQ ID NO: 1723470 - DNA, 15 bp, Homo sapiens
ggcagaaatttctgg

SEQ ID NO: 1723471 - DNA, 15 bp, Homo sapiens
gcagaaatttctgga

SEQ ID NO: 1723472 - DNA, 15 bp, Homo sapiens
cagaaatttctggag

SEQ ID NO: 1723473 - DNA, 15 bp, Homo sapiens
agaaatttctggagt

SEQ ID NO: 1723474 - DNA, 15 bp, Homo sapiens
gaaatttctggagtc

SEQ ID NO: 1723475 - DNA, 15 bp, Homo sapiens
aaatttctggagtcg

SEQ ID NO: 1723476 - DNA, 15 bp, Homo sapiens
aatttctggagtcgt

SEQ ID NO: 1723477 - DNA, 15 bp, Homo sapiens
atttctggagtcgtt

SEQ ID NO: 1723478 - DNA, 15 bp, Homo sapiens
tttctggagtcgttg

SEQ ID NO: 1723479 - DNA, 15 bp, Homo sapiens
ttctggagtcgttgc

SEQ ID NO: 1723480 - DNA, 15 bp, Homo sapiens
tctggagtcgttgct

SEQ ID NO: 1723481 - DNA, 15 bp, Homo sapiens
ctggagtcgttgctt

SEQ ID NO: 1723482 - DNA, 15 bp, Homo sapiens
tggagtcgttgcttc

SEQ ID NO: 1723483 - DNA, 15 bp, Homo sapiens
ggagtcgttgcttct

SEQ ID NO: 1723484 - DNA, 15 bp, Homo sapiens
gagtcgttgcttctt

SEQ ID NO: 1723485 - DNA, 15 bp, Homo sapiens
agtcgttgcttctta

SEQ ID NO: 1723486 - DNA, 15 bp, Homo sapiens
gtcgttgcttcttat

SEQ ID NO: 1723487 - DNA, 15 bp, Homo sapiens
tcgttgcttcttata

SEQ ID NO: 1723488 - DNA, 15 bp, Homo sapiens
cgttgcttcttatag

SEQ ID NO: 1723489 - DNA, 15 bp, Homo sapiens
gttgcttcttataga

SEQ ID NO: 1723490 - DNA, 15 bp, Homo sapiens
ttgcttcttatagat

SEQ ID NO: 1723491 - DNA, 15 bp, Homo sapiens
tgcttcttatagatc

SEQ ID NO: 1723492 - DNA, 15 bp, Homo sapiens
gcttcttatagatct

SEQ ID NO: 1723493 - DNA, 15 bp, Homo sapiens
cttcttatagatctt

SEQ ID NO: 1723494 - DNA, 15 bp, Homo sapiens
ttcttatagatcttt

SEQ ID NO: 1723495 - DNA, 15 bp, Homo sapiens
tcttatagatctttt

SEQ ID NO: 1723496 - DNA, 15 bp, Homo sapiens
cttatagatcttttc

SEQ ID NO: 1723497 - DNA, 15 bp, Homo sapiens
ttatagatcttttct

SEQ ID NO: 1723498 - DNA, 15 bp, Homo sapiens
tatagatcttttcta

SEQ ID NO: 1723499 - DNA, 15 bp, Homo sapiens
atagatcttttctac

SEQ ID NO: 1723500 - DNA, 15 bp, Homo sapiens
tagatcttttctact

SEQ ID NO: 1723501 - DNA, 15 bp, Homo sapiens
agatcttttctactg

SEQ ID NO: 1723502 - DNA, 15 bp, Homo sapiens
gatcttttctactgt

SEQ ID NO: 1723503 - DNA, 15 bp, Homo sapiens
atcttttctactgtt

SEQ ID NO: 1723504 - DNA, 15 bp, Homo sapiens
tcttttctactgtta

SEQ ID NO: 1723505 - DNA, 15 bp, Homo sapiens
cttttctactgttaa

SEQ ID NO: 1723506 - DNA, 15 bp, Homo sapiens
ttttctactgttaac

SEQ ID NO: 1723507 - DNA, 15 bp, Homo sapiens
tttctactgttaact

SEQ ID NO: 1723508 - DNA, 15 bp, Homo sapiens
ttctactgttaactt

SEQ ID NO: 1723509 - DNA, 15 bp, Homo sapiens
tctactgttaacttt

SEQ ID NO: 1723510 - DNA, 15 bp, Homo sapiens
ctactgttaacttta

SEQ ID NO: 1723511 - DNA, 15 bp, Homo sapiens
tactgttaactttaa

SEQ ID NO: 1723512 - DNA, 15 bp, Homo sapiens
actgttaactttaaa

SEQ ID NO: 1723513 - DNA, 15 bp, Homo sapiens
ctgttaactttaaaa

SEQ ID NO: 1723514 - DNA, 15 bp, Homo sapiens
tgttaactttaaaaa

SEQ ID NO: 1723515 - DNA, 15 bp, Homo sapiens
gttaactttaaaaaa

SEQ ID NO: 1723516 - DNA, 15 bp, Homo sapiens
ttaactttaaaaaaa

SEQ ID NO: 1723517 - DNA, 15 bp, Homo sapiens
taactttaaaaaaat

SEQ ID NO: 1723518 - DNA, 15 bp, Homo sapiens
aactttaaaaaaata

SEQ ID NO: 1723519 - DNA, 15 bp, Homo sapiens
actttaaaaaaatag

SEQ ID NO: 1723520 - DNA, 15 bp, Homo sapiens
ctttaaaaaaataga

SEQ ID NO: 1723521 - DNA, 15 bp, Homo sapiens
tttaaaaaaatagac

SEQ ID NO: 1723522 - DNA, 15 bp, Homo sapiens
ttaaaaaaatagact

SEQ ID NO: 1723523 - DNA, 15 bp, Homo sapiens
taaaaaaatagactt

SEQ ID NO: 1723524 - DNA, 15 bp, Homo sapiens
aaaaaaatagacttt

SEQ ID NO: 1723525 - DNA, 15 bp, Homo sapiens
aaaaaatagactttt

SEQ ID NO: 1723526 - DNA, 15 bp, Homo sapiens
aaaaatagactttta

SEQ ID NO: 1723527 - DNA, 15 bp, Homo sapiens
aaaatagacttttaa

SEQ ID NO: 1723528 - DNA, 15 bp, Homo sapiens
aaatagacttttaac

SEQ ID NO: 1723529 - DNA, 15 bp, Homo sapiens
aatagacttttaaca

SEQ ID NO: 1723530 - DNA, 15 bp, Homo sapiens
atagacttttaacaa

SEQ ID NO: 1723531 - DNA, 15 bp, Homo sapiens
tagacttttaacaat

SEQ ID NO: 1723532 - DNA, 15 bp, Homo sapiens
agacttttaacaatt

SEQ ID NO: 1723533 - DNA, 15 bp, Homo sapiens
gacttttaacaattg

SEQ ID NO: 1723534 - DNA, 15 bp, Homo sapiens
acttttaacaattgg

SEQ ID NO: 1723535 - DNA, 15 bp, Homo sapiens
cttttaacaattggc

SEQ ID NO: 1723536 - DNA, 15 bp, Homo sapiens
ttttaacaattggca

SEQ ID NO: 1723537 - DNA, 15 bp, Homo sapiens
tttaacaattggcaa

SEQ ID NO: 1723538 - DNA, 15 bp, Homo sapiens
ttaacaattggcaaa

SEQ ID NO: 1723539 - DNA, 15 bp, Homo sapiens
taacaattggcaaat

SEQ ID NO: 1723540 - DNA, 15 bp, Homo sapiens
aacaattggcaaatg

SEQ ID NO: 1723541 - DNA, 15 bp, Homo sapiens
acaattggcaaatgg

SEQ ID NO: 1723542 - DNA, 15 bp, Homo sapiens
caattggcaaatggc

SEQ ID NO: 1723543 - DNA, 15 bp, Homo sapiens
aattggcaaatggca

SEQ ID NO: 1723544 - DNA, 15 bp, Homo sapiens
attggcaaatggcac

SEQ ID NO: 1723545 - DNA, 15 bp, Homo sapiens
ttggcaaatggcacc

SEQ ID NO: 1723546 - DNA, 15 bp, Homo sapiens
tggcaaatggcacca

SEQ ID NO: 1723547 - DNA, 15 bp, Homo sapiens
ggcaaatggcaccac

SEQ ID NO: 1723548 - DNA, 15 bp, Homo sapiens
gcaaatggcaccaca

SEQ ID NO: 1723549 - DNA, 15 bp, Homo sapiens
caaatggcaccacat

SEQ ID NO: 1723550 - DNA, 15 bp, Homo sapiens
aaatggcaccacatt

SEQ ID NO: 1723551 - DNA, 15 bp, Homo sapiens
aatggcaccacatta

SEQ ID NO: 1723552 - DNA, 15 bp, Homo sapiens
atggcaccacattac

SEQ ID NO: 1723553 - DNA, 15 bp, Homo sapiens
tggcaccacattacc

SEQ ID NO: 1723554 - DNA, 15 bp, Homo sapiens
ggcaccacattacct

SEQ ID NO: 1723555 - DNA, 15 bp, Homo sapiens
gcaccacattacctt

SEQ ID NO: 1723556 - DNA, 15 bp, Homo sapiens
caccacattaccttc

SEQ ID NO: 1723557 - DNA, 15 bp, Homo sapiens
accacattaccttca

SEQ ID NO: 1723558 - DNA, 15 bp, Homo sapiens
ccacattaccttcag

SEQ ID NO: 1723559 - DNA, 15 bp, Homo sapiens
cacattaccttcaga

SEQ ID NO: 1723560 - DNA, 15 bp, Homo sapiens
acattaccttcagag

SEQ ID NO: 1723561 - DNA, 15 bp, Homo sapiens
cattaccttcagagt

SEQ ID NO: 1723562 - DNA, 15 bp, Homo sapiens
attaccttcagagtg

SEQ ID NO: 1723563 - DNA, 15 bp, Homo sapiens
ttaccttcagagtga

SEQ ID NO: 1723564 - DNA, 15 bp, Homo sapiens
taccttcagagtgaa

SEQ ID NO: 1723565 - DNA, 15 bp, Homo sapiens
accttcagagtgaaa

SEQ ID NO: 1723566 - DNA, 15 bp, Homo sapiens
ccttcagagtgaaat

SEQ ID NO: 1723567 - DNA, 15 bp, Homo sapiens
cttcagagtgaaatc

SEQ ID NO: 1723568 - DNA, 15 bp, Homo sapiens
ttcagagtgaaatca

SEQ ID NO: 1723569 - DNA, 15 bp, Homo sapiens
tcagagtgaaatcac

SEQ ID NO: 1723570 - DNA, 15 bp, Homo sapiens
cagagtgaaatcacc

SEQ ID NO: 1723571 - DNA, 15 bp, Homo sapiens
agagtgaaatcacca

SEQ ID NO: 1723572 - DNA, 15 bp, Homo sapiens
gagtgaaatcaccat

SEQ ID NO: 1723573 - DNA, 15 bp, Homo sapiens
agtgaaatcaccatc

SEQ ID NO: 1723574 - DNA, 15 bp, Homo sapiens
gtgaaatcaccatct

SEQ ID NO: 1723575 - DNA, 15 bp, Homo sapiens
tgaaatcaccatctg

SEQ ID NO: 1723576 - DNA, 15 bp, Homo sapiens
gaaatcaccatctga

SEQ ID NO: 1723577 - DNA, 15 bp, Homo sapiens
aaatcaccatctgaa

SEQ ID NO: 1723578 - DNA, 15 bp, Homo sapiens
aatcaccatctgaaa

SEQ ID NO: 1723579 - DNA, 15 bp, Homo sapiens
atcaccatctgaaag

SEQ ID NO: 1723580 - DNA, 15 bp, Homo sapiens
tcaccatctgaaagc

SEQ ID NO: 1723581 - DNA, 15 bp, Homo sapiens
caccatctgaaagca

SEQ ID NO: 1723582 - DNA, 15 bp, Homo sapiens
accatctgaaagcat

SEQ ID NO: 1723583 - DNA, 15 bp, Homo sapiens
ccatctgaaagcatt

SEQ ID NO: 1723584 - DNA, 15 bp, Homo sapiens
catctgaaagcattc

SEQ ID NO: 1723585 - DNA, 15 bp, Homo sapiens
atctgaaagcattcg

SEQ ID NO: 1723586 - DNA, 15 bp, Homo sapiens
tctgaaagcattcga

SEQ ID NO: 1723587 - DNA, 15 bp, Homo sapiens
ctgaaagcattcgaa

SEQ ID NO: 1723588 - DNA, 15 bp, Homo sapiens
tgaaagcattcgaag

SEQ ID NO: 1723589 - DNA, 15 bp, Homo sapiens
gaaagcattcgaagt

SEQ ID NO: 1723590 - DNA, 15 bp, Homo sapiens
aaagcattcgaagta

SEQ ID NO: 1723591 - DNA, 15 bp, Homo sapiens
aagcattcgaagtaa

SEQ ID NO: 1723592 - DNA, 15 bp, Homo sapiens
agcattcgaagtaag

SEQ ID NO: 1723593 - DNA, 15 bp, Homo sapiens
gcattcgaagtaagg

SEQ ID NO: 1723594 - DNA, 15 bp, Homo sapiens
cattcgaagtaaggg

SEQ ID NO: 1723595 - DNA, 15 bp, Homo sapiens
attcgaagtaagggg

SEQ ID NO: 1723596 - DNA, 15 bp, Homo sapiens
ttcgaagtaagggga

SEQ ID NO: 1723597 - DNA, 15 bp, Homo sapiens
tcgaagtaaggggag

SEQ ID NO: 1723598 - DNA, 15 bp, Homo sapiens
cgaagtaaggggagg

SEQ ID NO: 1723599 - DNA, 15 bp, Homo sapiens
gaagtaaggggaggg

SEQ ID NO: 1723600 - DNA, 15 bp, Homo sapiens
aagtaaggggagggg

SEQ ID NO: 1723601 - DNA, 15 bp, Homo sapiens
agtaaggggagggga

SEQ ID NO: 1723602 - DNA, 15 bp, Homo sapiens
gtaaggggaggggaa

SEQ ID NO: 1723603 - DNA, 15 bp, Homo sapiens
taaggggaggggaaa

SEQ ID NO: 1723604 - DNA, 15 bp, Homo sapiens
aaggggaggggaaaa

SEQ ID NO: 1723605 - DNA, 15 bp, Homo sapiens
aggggaggggaaaag

SEQ ID NO: 1723606 - DNA, 15 bp, Homo sapiens
ggggaggggaaaagt

SEQ ID NO: 1723607 - DNA, 15 bp, Homo sapiens
gggaggggaaaagtt

SEQ ID NO: 1723608 - DNA, 15 bp, Homo sapiens
ggaggggaaaagtta

SEQ ID NO: 1723609 - DNA, 15 bp, Homo sapiens
gaggggaaaagttag

SEQ ID NO: 1723610 - DNA, 15 bp, Homo sapiens
aggggaaaagttaga

SEQ ID NO: 1723611 - DNA, 15 bp, Homo sapiens
ggggaaaagttagac

SEQ ID NO: 1723612 - DNA, 15 bp, Homo sapiens
gggaaaagttagacc

SEQ ID NO: 1723613 - DNA, 15 bp, Homo sapiens
ggaaaagttagaccc

SEQ ID NO: 1723614 - DNA, 15 bp, Homo sapiens
gaaaagttagacccc

SEQ ID NO: 1723615 - DNA, 15 bp, Homo sapiens
aaaagttagaccccc

SEQ ID NO: 1723616 - DNA, 15 bp, Homo sapiens
aaagttagaccccca

SEQ ID NO: 1723617 - DNA, 15 bp, Homo sapiens
aagttagacccccat

SEQ ID NO: 1723618 - DNA, 15 bp, Homo sapiens
agttagacccccatt

SEQ ID NO: 1723619 - DNA, 15 bp, Homo sapiens
gttagacccccattt

SEQ ID NO: 1723620 - DNA, 15 bp, Homo sapiens
ttagacccccatttt

SEQ ID NO: 1723621 - DNA, 15 bp, Homo sapiens
tagacccccatttta

SEQ ID NO: 1723622 - DNA, 15 bp, Homo sapiens
agacccccattttag

SEQ ID NO: 1723623 - DNA, 15 bp, Homo sapiens
gacccccattttagt

SEQ ID NO: 1723624 - DNA, 15 bp, Homo sapiens
acccccattttagtt

SEQ ID NO: 1723625 - DNA, 15 bp, Homo sapiens
cccccattttagttt

SEQ ID NO: 1723626 - DNA, 15 bp, Homo sapiens
ccccattttagtttc

SEQ ID NO: 1723627 - DNA, 15 bp, Homo sapiens
cccattttagtttcc

SEQ ID NO: 1723628 - DNA, 15 bp, Homo sapiens
ccattttagtttcct

SEQ ID NO: 1723629 - DNA, 15 bp, Homo sapiens
cattttagtttcctg

SEQ ID NO: 1723630 - DNA, 15 bp, Homo sapiens
attttagtttcctgg

SEQ ID NO: 1723631 - DNA, 15 bp, Homo sapiens
ttttagtttcctggc

SEQ ID NO: 1723632 - DNA, 15 bp, Homo sapiens
tttagtttcctggca

SEQ ID NO: 1723633 - DNA, 15 bp, Homo sapiens
ttagtttcctggcaa

SEQ ID NO: 1723634 - DNA, 15 bp, Homo sapiens
tagtttcctggcaat

SEQ ID NO: 1723635 - DNA, 15 bp, Homo sapiens
agtttcctggcaata

SEQ ID NO: 1723636 - DNA, 15 bp, Homo sapiens
gtttcctggcaatat

SEQ ID NO: 1723637 - DNA, 15 bp, Homo sapiens
tttcctggcaatatt

SEQ ID NO: 1723638 - DNA, 15 bp, Homo sapiens
ttcctggcaatattg

SEQ ID NO: 1723639 - DNA, 15 bp, Homo sapiens
tcctggcaatattga

SEQ ID NO: 1723640 - DNA, 15 bp, Homo sapiens
cctggcaatattgag

SEQ ID NO: 1723641 - DNA, 15 bp, Homo sapiens
ctggcaatattgaga

SEQ ID NO: 1723642 - DNA, 15 bp, Homo sapiens
tggcaatattgagat

SEQ ID NO: 1723643 - DNA, 15 bp, Homo sapiens
ggcaatattgagatc

SEQ ID NO: 1723644 - DNA, 15 bp, Homo sapiens
gcaatattgagatct

SEQ ID NO: 1723645 - DNA, 15 bp, Homo sapiens
caatattgagatcta

SEQ ID NO: 1723646 - DNA, 15 bp, Homo sapiens
aatattgagatctag

SEQ ID NO: 1723647 - DNA, 15 bp, Homo sapiens
atattgagatctaga

SEQ ID NO: 1723648 - DNA, 15 bp, Homo sapiens
tattgagatctagaa

SEQ ID NO: 1723649 - DNA, 15 bp, Homo sapiens
attgagatctagaaa

SEQ ID NO: 1723650 - DNA, 15 bp, Homo sapiens
ttgagatctagaaat

SEQ ID NO: 1723651 - DNA, 15 bp, Homo sapiens
tgagatctagaaatt

SEQ ID NO: 1723652 - DNA, 15 bp, Homo sapiens
gagatctagaaattc

SEQ ID NO: 1723653 - DNA, 15 bp, Homo sapiens
agatctagaaattca

SEQ ID NO: 1723654 - DNA, 15 bp, Homo sapiens
gatctagaaattcat

SEQ ID NO: 1723655 - DNA, 15 bp, Homo sapiens
atctagaaattcatc

SEQ ID NO: 1723656 - DNA, 15 bp, Homo sapiens
tctagaaattcatcc

SEQ ID NO: 1723657 - DNA, 15 bp, Homo sapiens
ctagaaattcatcct

SEQ ID NO: 1723658 - DNA, 15 bp, Homo sapiens
tagaaattcatccta

SEQ ID NO: 1723659 - DNA, 15 bp, Homo sapiens
agaaattcatcctag

SEQ ID NO: 1723660 - DNA, 15 bp, Homo sapiens
gaaattcatcctaga

SEQ ID NO: 1723661 - DNA, 15 bp, Homo sapiens
aaattcatcctagaa

SEQ ID NO: 1723662 - DNA, 15 bp, Homo sapiens
aattcatcctagaag

SEQ ID NO: 1723663 - DNA, 15 bp, Homo sapiens
attcatcctagaagc

SEQ ID NO: 1723664 - DNA, 15 bp, Homo sapiens
ttcatcctagaagct

SEQ ID NO: 1723665 - DNA, 15 bp, Homo sapiens
tcatcctagaagctg

SEQ ID NO: 1723666 - DNA, 15 bp, Homo sapiens
catcctagaagctgt

SEQ ID NO: 1723667 - DNA, 15 bp, Homo sapiens
atcctagaagctgtt

SEQ ID NO: 1723668 - DNA, 15 bp, Homo sapiens
tcctagaagctgttt

SEQ ID NO: 1723669 - DNA, 15 bp, Homo sapiens
cctagaagctgtttg

SEQ ID NO: 1723670 - DNA, 15 bp, Homo sapiens
ctagaagctgtttgc

SEQ ID NO: 1723671 - DNA, 15 bp, Homo sapiens
tagaagctgtttgcc

SEQ ID NO: 1723672 - DNA, 15 bp, Homo sapiens
agaagctgtttgcca

SEQ ID NO: 1723673 - DNA, 15 bp, Homo sapiens
gaagctgtttgccat

SEQ ID NO: 1723674 - DNA, 15 bp, Homo sapiens
aagctgtttgccatt

SEQ ID NO: 1723675 - DNA, 15 bp, Homo sapiens
agctgtttgccattt

SEQ ID NO: 1723676 - DNA, 15 bp, Homo sapiens
gctgtttgccatttc

SEQ ID NO: 1723677 - DNA, 15 bp, Homo sapiens
ctgtttgccatttcc

SEQ ID NO: 1723678 - DNA, 15 bp, Homo sapiens
tgtttgccatttcca

SEQ ID NO: 1723679 - DNA, 15 bp, Homo sapiens
gtttgccatttccaa

SEQ ID NO: 1723680 - DNA, 15 bp, Homo sapiens
tttgccatttccaaa

SEQ ID NO: 1723681 - DNA, 15 bp, Homo sapiens
ttgccatttccaaag

SEQ ID NO: 1723682 - DNA, 15 bp, Homo sapiens
tgccatttccaaagt

SEQ ID NO: 1723683 - DNA, 15 bp, Homo sapiens
gccatttccaaagtg

SEQ ID NO: 1723684 - DNA, 15 bp, Homo sapiens
ccatttccaaagtgc

SEQ ID NO: 1723685 - DNA, 15 bp, Homo sapiens
catttccaaagtgcc

SEQ ID NO: 1723686 - DNA, 15 bp, Homo sapiens
atttccaaagtgcct

SEQ ID NO: 1723687 - DNA, 15 bp, Homo sapiens
tttccaaagtgccta

SEQ ID NO: 1723688 - DNA, 15 bp, Homo sapiens
ttccaaagtgcctag

SEQ ID NO: 1723689 - DNA, 15 bp, Homo sapiens
tccaaagtgcctagg

SEQ ID NO: 1723690 - DNA, 15 bp, Homo sapiens
ccaaagtgcctagga

SEQ ID NO: 1723691 - DNA, 15 bp, Homo sapiens
caaagtgcctaggac

SEQ ID NO: 1723692 - DNA, 15 bp, Homo sapiens
aaagtgcctaggaca

SEQ ID NO: 1723693 - DNA, 15 bp, Homo sapiens
aagtgcctaggacag

SEQ ID NO: 1723694 - DNA, 15 bp, Homo sapiens
agtgcctaggacagc

SEQ ID NO: 1723695 - DNA, 15 bp, Homo sapiens
gtgcctaggacagcc

SEQ ID NO: 1723696 - DNA, 15 bp, Homo sapiens
tgcctaggacagccc

SEQ ID NO: 1723697 - DNA, 15 bp, Homo sapiens
gcctaggacagccca

SEQ ID NO: 1723698 - DNA, 15 bp, Homo sapiens
cctaggacagcccat

SEQ ID NO: 1723699 - DNA, 15 bp, Homo sapiens
ctaggacagcccatc

SEQ ID NO: 1723700 - DNA, 15 bp, Homo sapiens
taggacagcccatca

SEQ ID NO: 1723701 - DNA, 15 bp, Homo sapiens
aggacagcccatcaa

SEQ ID NO: 1723702 - DNA, 15 bp, Homo sapiens
ggacagcccatcaat

SEQ ID NO: 1723703 - DNA, 15 bp, Homo sapiens
gacagcccatcaatg

SEQ ID NO: 1723704 - DNA, 15 bp, Homo sapiens
acagcccatcaatga

SEQ ID NO: 1723705 - DNA, 15 bp, Homo sapiens
cagcccatcaatgag

SEQ ID NO: 1723706 - DNA, 15 bp, Homo sapiens
agcccatcaatgagg

SEQ ID NO: 1723707 - DNA, 15 bp, Homo sapiens
gcccatcaatgaggg

SEQ ID NO: 1723708 - DNA, 15 bp, Homo sapiens
cccatcaatgagggc

SEQ ID NO: 1723709 - DNA, 15 bp, Homo sapiens
ccatcaatgagggca

SEQ ID NO: 1723710 - DNA, 15 bp, Homo sapiens
catcaatgagggcaa

SEQ ID NO: 1723711 - DNA, 15 bp, Homo sapiens
atcaatgagggcaaa

SEQ ID NO: 1723712 - DNA, 15 bp, Homo sapiens
tcaatgagggcaaaa

SEQ ID NO: 1723713 - DNA, 15 bp, Homo sapiens
caatgagggcaaaat

SEQ ID NO: 1723714 - DNA, 15 bp, Homo sapiens
aatgagggcaaaatc

SEQ ID NO: 1723715 - DNA, 15 bp, Homo sapiens
atgagggcaaaatcc

SEQ ID NO: 1723716 - DNA, 15 bp, Homo sapiens
tgagggcaaaatcct

SEQ ID NO: 1723717 - DNA, 15 bp, Homo sapiens
gagggcaaaatcctc

SEQ ID NO: 1723718 - DNA, 15 bp, Homo sapiens
agggcaaaatcctca

SEQ ID NO: 1723719 - DNA, 15 bp, Homo sapiens
gggcaaaatcctcag

SEQ ID NO: 1723720 - DNA, 15 bp, Homo sapiens
ggcaaaatcctcagg

SEQ ID NO: 1723721 - DNA, 15 bp, Homo sapiens
gcaaaatcctcaggg

SEQ ID NO: 1723722 - DNA, 15 bp, Homo sapiens
caaaatcctcagggg

SEQ ID NO: 1723723 - DNA, 15 bp, Homo sapiens
aaaatcctcaggggc

SEQ ID NO: 1723724 - DNA, 15 bp, Homo sapiens
aaatcctcaggggca

SEQ ID NO: 1723725 - DNA, 15 bp, Homo sapiens
aatcctcaggggcaa

SEQ ID NO: 1723726 - DNA, 15 bp, Homo sapiens
atcctcaggggcaac

SEQ ID NO: 1723727 - DNA, 15 bp, Homo sapiens
tcctcaggggcaact

SEQ ID NO: 1723728 - DNA, 15 bp, Homo sapiens
cctcaggggcaactg

SEQ ID NO: 1723729 - DNA, 15 bp, Homo sapiens
ctcaggggcaactgg

SEQ ID NO: 1723730 - DNA, 15 bp, Homo sapiens
tcaggggcaactgga

SEQ ID NO: 1723731 - DNA, 15 bp, Homo sapiens
caggggcaactggac

SEQ ID NO: 1723732 - DNA, 15 bp, Homo sapiens
aggggcaactggaca

SEQ ID NO: 1723733 - DNA, 15 bp, Homo sapiens
ggggcaactggacac

SEQ ID NO: 1723734 - DNA, 15 bp, Homo sapiens
gggcaactggacacg

SEQ ID NO: 1723735 - DNA, 15 bp, Homo sapiens
ggcaactggacacga

SEQ ID NO: 1723736 - DNA, 15 bp, Homo sapiens
gcaactggacacgag

SEQ ID NO: 1723737 - DNA, 15 bp, Homo sapiens
caactggacacgagc

SEQ ID NO: 1723738 - DNA, 15 bp, Homo sapiens
aactggacacgagcg

SEQ ID NO: 1723739 - DNA, 15 bp, Homo sapiens
actggacacgagcgg

SEQ ID NO: 1723740 - DNA, 15 bp, Homo sapiens
ctggacacgagcggt

SEQ ID NO: 1723741 - DNA, 15 bp, Homo sapiens
tggacacgagcggtc

SEQ ID NO: 1723742 - DNA, 15 bp, Homo sapiens
ggacacgagcggtcc

SEQ ID NO: 1723743 - DNA, 15 bp, Homo sapiens
gacacgagcggtcct

SEQ ID NO: 1723744 - DNA, 15 bp, Homo sapiens
acacgagcggtcctt

SEQ ID NO: 1723745 - DNA, 15 bp, Homo sapiens
cacgagcggtccttt

SEQ ID NO: 1723746 - DNA, 15 bp, Homo sapiens
acgagcggtcctttt

SEQ ID NO: 1723747 - DNA, 15 bp, Homo sapiens
cgagcggtccttttt

SEQ ID NO: 1723748 - DNA, 15 bp, Homo sapiens
gagcggtcctttttg

SEQ ID NO: 1723749 - DNA, 15 bp, Homo sapiens
agcggtcctttttgg

SEQ ID NO: 1723750 - DNA, 15 bp, Homo sapiens
gcggtcctttttgga

SEQ ID NO: 1723751 - DNA, 15 bp, Homo sapiens
cggtcctttttggaa

SEQ ID NO: 1723752 - DNA, 15 bp, Homo sapiens
ggtcctttttggaag

SEQ ID NO: 1723753 - DNA, 15 bp, Homo sapiens
gtcctttttggaaga

SEQ ID NO: 1723754 - DNA, 15 bp, Homo sapiens
tcctttttggaagac

SEQ ID NO: 1723755 - DNA, 15 bp, Homo sapiens
cctttttggaagact

SEQ ID NO: 1723756 - DNA, 15 bp, Homo sapiens
ctttttggaagactt

SEQ ID NO: 1723757 - DNA, 15 bp, Homo sapiens
tttttggaagacttt

SEQ ID NO: 1723758 - DNA, 15 bp, Homo sapiens
ttttggaagacttta

SEQ ID NO: 1723759 - DNA, 15 bp, Homo sapiens
tttggaagactttat

SEQ ID NO: 1723760 - DNA, 15 bp, Homo sapiens
ttggaagactttatg

SEQ ID NO: 1723761 - DNA, 15 bp, Homo sapiens
tggaagactttatga

SEQ ID NO: 1723762 - DNA, 15 bp, Homo sapiens
ggaagactttatgaa

SEQ ID NO: 1723763 - DNA, 15 bp, Homo sapiens
gaagactttatgaat

SEQ ID NO: 1723764 - DNA, 15 bp, Homo sapiens
aagactttatgaata

SEQ ID NO: 1723765 - DNA, 15 bp, Homo sapiens
agactttatgaatag

SEQ ID NO: 1723766 - DNA, 15 bp, Homo sapiens
gactttatgaatagc

SEQ ID NO: 1723767 - DNA, 15 bp, Homo sapiens
actttatgaatagcc

SEQ ID NO: 1723768 - DNA, 15 bp, Homo sapiens
ctttatgaatagcca

SEQ ID NO: 1723769 - DNA, 15 bp, Homo sapiens
tttatgaatagccac

SEQ ID NO: 1723770 - DNA, 15 bp, Homo sapiens
ttatgaatagccaca

SEQ ID NO: 1723771 - DNA, 15 bp, Homo sapiens
tatgaatagccacag

SEQ ID NO: 1723772 - DNA, 15 bp, Homo sapiens
atgaatagccacaga

SEQ ID NO: 1723773 - DNA, 15 bp, Homo sapiens
tgaatagccacagaa

SEQ ID NO: 1723774 - DNA, 15 bp, Homo sapiens
gaatagccacagaag

SEQ ID NO: 1723775 - DNA, 15 bp, Homo sapiens
aatagccacagaagt

SEQ ID NO: 1723776 - DNA, 15 bp, Homo sapiens
atagccacagaagta

SEQ ID NO: 1723777 - DNA, 15 bp, Homo sapiens
tagccacagaagtac

SEQ ID NO: 1723778 - DNA, 15 bp, Homo sapiens
agccacagaagtaca

SEQ ID NO: 1723779 - DNA, 15 bp, Homo sapiens
gccacagaagtacag

SEQ ID NO: 1723780 - DNA, 15 bp, Homo sapiens
ccacagaagtacagg

SEQ ID NO: 1723781 - DNA, 15 bp, Homo sapiens
cacagaagtacaggt

SEQ ID NO: 1723782 - DNA, 15 bp, Homo sapiens
acagaagtacaggtg

SEQ ID NO: 1723783 - DNA, 15 bp, Homo sapiens
cagaagtacaggtgt

SEQ ID NO: 1723784 - DNA, 15 bp, Homo sapiens
agaagtacaggtgtt

SEQ ID NO: 1723785 - DNA, 15 bp, Homo sapiens
gaagtacaggtgttg

SEQ ID NO: 1723786 - DNA, 15 bp, Homo sapiens
aagtacaggtgttgg

SEQ ID NO: 1723787 - DNA, 15 bp, Homo sapiens
agtacaggtgttggg

SEQ ID NO: 1723788 - DNA, 15 bp, Homo sapiens
gtacaggtgttgggc

SEQ ID NO: 1723789 - DNA, 15 bp, Homo sapiens
tacaggtgttgggca

SEQ ID NO: 1723790 - DNA, 15 bp, Homo sapiens
acaggtgttgggcat

SEQ ID NO: 1723791 - DNA, 15 bp, Homo sapiens
caggtgttgggcatt

SEQ ID NO: 1723792 - DNA, 15 bp, Homo sapiens
aggtgttgggcattg

SEQ ID NO: 1723793 - DNA, 15 bp, Homo sapiens
ggtgttgggcattga

SEQ ID NO: 1723794 - DNA, 15 bp, Homo sapiens
gtgttgggcattgat

SEQ ID NO: 1723795 - DNA, 15 bp, Homo sapiens
tgttgggcattgatg

SEQ ID NO: 1723796 - DNA, 15 bp, Homo sapiens
gttgggcattgatgt

SEQ ID NO: 1723797 - DNA, 15 bp, Homo sapiens
ttgggcattgatgtg

SEQ ID NO: 1723798 - DNA, 15 bp, Homo sapiens
tgggcattgatgtgt

SEQ ID NO: 1723799 - DNA, 15 bp, Homo sapiens
gggcattgatgtgtg

SEQ ID NO: 1723800 - DNA, 15 bp, Homo sapiens
ggcattgatgtgtgc

SEQ ID NO: 1723801 - DNA, 15 bp, Homo sapiens
gcattgatgtgtgct

SEQ ID NO: 1723802 - DNA, 15 bp, Homo sapiens
cattgatgtgtgcta

SEQ ID NO: 1723803 - DNA, 15 bp, Homo sapiens
attgatgtgtgctag

SEQ ID NO: 1723804 - DNA, 15 bp, Homo sapiens
ttgatgtgtgctaga

SEQ ID NO: 1723805 - DNA, 15 bp, Homo sapiens
tgatgtgtgctagac

SEQ ID NO: 1723806 - DNA, 15 bp, Homo sapiens
gatgtgtgctagacc

SEQ ID NO: 1723807 - DNA, 15 bp, Homo sapiens
atgtgtgctagaccc

SEQ ID NO: 1723808 - DNA, 15 bp, Homo sapiens
tgtgtgctagaccca

SEQ ID NO: 1723809 - DNA, 15 bp, Homo sapiens
gtgtgctagacccag

SEQ ID NO: 1723810 - DNA, 15 bp, Homo sapiens
gtgctagacccagag

SEQ ID NO: 1723811 - DNA, 15 bp, Homo sapiens
tgctagacccagaga

SEQ ID NO: 1723812 - DNA, 15 bp, Homo sapiens
gctagacccagagaa

SEQ ID NO: 1723813 - DNA, 15 bp, Homo sapiens
ctagacccagagaag

SEQ ID NO: 1723814 - DNA, 15 bp, Homo sapiens
tagacccagagaagc

SEQ ID NO: 1723815 - DNA, 15 bp, Homo sapiens
agacccagagaagca

SEQ ID NO: 1723816 - DNA, 15 bp, Homo sapiens
gacccagagaagcag

SEQ ID NO: 1723817 - DNA, 15 bp, Homo sapiens
acccagagaagcagg

SEQ ID NO: 1723818 - DNA, 15 bp, Homo sapiens
cccagagaagcaggg

SEQ ID NO: 1723819 - DNA, 15 bp, Homo sapiens
ccagagaagcaggga

SEQ ID NO: 1723820 - DNA, 15 bp, Homo sapiens
cagagaagcagggag

SEQ ID NO: 1723821 - DNA, 15 bp, Homo sapiens
agagaagcagggagg

SEQ ID NO: 1723822 - DNA, 15 bp, Homo sapiens
gagaagcagggaggc

SEQ ID NO: 1723823 - DNA, 15 bp, Homo sapiens
agaagcagggaggct

SEQ ID NO: 1723824 - DNA, 15 bp, Homo sapiens
gaagcagggaggctt

SEQ ID NO: 1723825 - DNA, 15 bp, Homo sapiens
aagcagggaggcttc

SEQ ID NO: 1723826 - DNA, 15 bp, Homo sapiens
agcagggaggcttcg

SEQ ID NO: 1723827 - DNA, 15 bp, Homo sapiens
gcagggaggcttcgt

SEQ ID NO: 1723828 - DNA, 15 bp, Homo sapiens
cagggaggcttcgtc

SEQ ID NO: 1723829 - DNA, 15 bp, Homo sapiens
agggaggcttcgtca

SEQ ID NO: 1723830 - DNA, 15 bp, Homo sapiens
gggaggcttcgtcag

SEQ ID NO: 1723831 - DNA, 15 bp, Homo sapiens
ggaggcttcgtcaga

SEQ ID NO: 1723832 - DNA, 15 bp, Homo sapiens
gaggcttcgtcagaa

SEQ ID NO: 1723833 - DNA, 15 bp, Homo sapiens
aggcttcgtcagaaa

SEQ ID NO: 1723834 - DNA, 15 bp, Homo sapiens
ggcttcgtcagaaag

SEQ ID NO: 1723835 - DNA, 15 bp, Homo sapiens
gcttcgtcagaaagc

SEQ ID NO: 1723836 - DNA, 15 bp, Homo sapiens
cttcgtcagaaagcc

SEQ ID NO: 1723837 - DNA, 15 bp, Homo sapiens
ttcgtcagaaagcca

SEQ ID NO: 1723838 - DNA, 15 bp, Homo sapiens
tcgtcagaaagccaa

SEQ ID NO: 1723839 - DNA, 15 bp, Homo sapiens
cgtcagaaagccaac

SEQ ID NO: 1723840 - DNA, 15 bp, Homo sapiens
gtcagaaagccaacc

SEQ ID NO: 1723841 - DNA, 15 bp, Homo sapiens
tcagaaagccaacca

SEQ ID NO: 1723842 - DNA, 15 bp, Homo sapiens
cagaaagccaaccag

SEQ ID NO: 1723843 - DNA, 15 bp, Homo sapiens
agaaagccaaccagc

SEQ ID NO: 1723844 - DNA, 15 bp, Homo sapiens
gaaagccaaccagcc

SEQ ID NO: 1723845 - DNA, 15 bp, Homo sapiens
aaagccaaccagcca

SEQ ID NO: 1723846 - DNA, 15 bp, Homo sapiens
aagccaaccagccat

SEQ ID NO: 1723847 - DNA, 15 bp, Homo sapiens
agccaaccagccatc

SEQ ID NO: 1723848 - DNA, 15 bp, Homo sapiens
gccaaccagccatcc

SEQ ID NO: 1723849 - DNA, 15 bp, Homo sapiens
ccaaccagccatcca

SEQ ID NO: 1723850 - DNA, 15 bp, Homo sapiens
caaccagccatccag

SEQ ID NO: 1723851 - DNA, 15 bp, Homo sapiens
aaccagccatccaga

SEQ ID NO: 1723852 - DNA, 15 bp, Homo sapiens
accagccatccagaa

SEQ ID NO: 1723853 - DNA, 15 bp, Homo sapiens
ccagccatccagaat

SEQ ID NO: 1723854 - DNA, 15 bp, Homo sapiens
cagccatccagaatg

SEQ ID NO: 1723855 - DNA, 15 bp, Homo sapiens
agccatccagaatgt

SEQ ID NO: 1723856 - DNA, 15 bp, Homo sapiens
gccatccagaatgtg

SEQ ID NO: 1723857 - DNA, 15 bp, Homo sapiens
ccatccagaatgtgg

SEQ ID NO: 1723858 - DNA, 15 bp, Homo sapiens
catccagaatgtggt

SEQ ID NO: 1723859 - DNA, 15 bp, Homo sapiens
atccagaatgtggtc

SEQ ID NO: 1723860 - DNA, 15 bp, Homo sapiens
tccagaatgtggtca

SEQ ID NO: 1723861 - DNA, 15 bp, Homo sapiens
ccagaatgtggtcat

SEQ ID NO: 1723862 - DNA, 15 bp, Homo sapiens
cagaatgtggtcatg

SEQ ID NO: 1723863 - DNA, 15 bp, Homo sapiens
agaatgtggtcatgg

SEQ ID NO: 1723864 - DNA, 15 bp, Homo sapiens
gaatgtggtcatgga

SEQ ID NO: 1723865 - DNA, 15 bp, Homo sapiens
aatgtggtcatggac

SEQ ID NO: 1723866 - DNA, 15 bp, Homo sapiens
atgtggtcatggact

SEQ ID NO: 1723867 - DNA, 15 bp, Homo sapiens
tgtggtcatggactg

SEQ ID NO: 1723868 - DNA, 15 bp, Homo sapiens
gtggtcatggactgg

SEQ ID NO: 1723869 - DNA, 15 bp, Homo sapiens
tggtcatggactggg

SEQ ID NO: 1723870 - DNA, 15 bp, Homo sapiens
ggtcatggactgggt

SEQ ID NO: 1723871 - DNA, 15 bp, Homo sapiens
gtcatggactgggta

SEQ ID NO: 1723872 - DNA, 15 bp, Homo sapiens
tcatggactgggtaa

SEQ ID NO: 1723873 - DNA, 15 bp, Homo sapiens
catggactgggtaaa

SEQ ID NO: 1723874 - DNA, 15 bp, Homo sapiens
atggactgggtaaag

SEQ ID NO: 1723875 - DNA, 15 bp, Homo sapiens
tggactgggtaaagc

SEQ ID NO: 1723876 - DNA, 15 bp, Homo sapiens
ggactgggtaaagct

SEQ ID NO: 1723877 - DNA, 15 bp, Homo sapiens
gactgggtaaagctc

SEQ ID NO: 1723878 - DNA, 15 bp, Homo sapiens
actgggtaaagctcc

SEQ ID NO: 1723879 - DNA, 15 bp, Homo sapiens
ctgggtaaagctccc

SEQ ID NO: 1723880 - DNA, 15 bp, Homo sapiens
tgggtaaagctcccc

SEQ ID NO: 1723881 - DNA, 15 bp, Homo sapiens
gggtaaagctccccg

SEQ ID NO: 1723882 - DNA, 15 bp, Homo sapiens
ggtaaagctccccgc

SEQ ID NO: 1723883 - DNA, 15 bp, Homo sapiens
gtaaagctccccgct

SEQ ID NO: 1723884 - DNA, 15 bp, Homo sapiens
taaagctccccgcta

SEQ ID NO: 1723885 - DNA, 15 bp, Homo sapiens
aaagctccccgctag

SEQ ID NO: 1723886 - DNA, 15 bp, Homo sapiens
aagctccccgctagt

SEQ ID NO: 1723887 - DNA, 15 bp, Homo sapiens
agctccccgctagta

SEQ ID NO: 1723888 - DNA, 15 bp, Homo sapiens
gctccccgctagtat

SEQ ID NO: 1723889 - DNA, 15 bp, Homo sapiens
ctccccgctagtatt

SEQ ID NO: 1723890 - DNA, 15 bp, Homo sapiens
tccccgctagtattg

SEQ ID NO: 1723891 - DNA, 15 bp, Homo sapiens
ccccgctagtattgt

SEQ ID NO: 1723892 - DNA, 15 bp, Homo sapiens
cccgctagtattgtg

SEQ ID NO: 1723893 - DNA, 15 bp, Homo sapiens
ccgctagtattgtgt

SEQ ID NO: 1723894 - DNA, 15 bp, Homo sapiens
cgctagtattgtgta

SEQ ID NO: 1723895 - DNA, 15 bp, Homo sapiens
gctagtattgtgtac

SEQ ID NO: 1723896 - DNA, 15 bp, Homo sapiens
ctagtattgtgtacc

SEQ ID NO: 1723897 - DNA, 15 bp, Homo sapiens
tagtattgtgtacct

SEQ ID NO: 1723898 - DNA, 15 bp, Homo sapiens
agtattgtgtacctt

SEQ ID NO: 1723899 - DNA, 15 bp, Homo sapiens
gtattgtgtacctta

SEQ ID NO: 1723900 - DNA, 15 bp, Homo sapiens
tattgtgtaccttag

SEQ ID NO: 1723901 - DNA, 15 bp, Homo sapiens
attgtgtaccttaga

SEQ ID NO: 1723902 - DNA, 15 bp, Homo sapiens
ttgtgtaccttagag

SEQ ID NO: 1723903 - DNA, 15 bp, Homo sapiens
tgtgtaccttagagg

SEQ ID NO: 1723904 - DNA, 15 bp, Homo sapiens
gtgtaccttagaggg

SEQ ID NO: 1723905 - DNA, 15 bp, Homo sapiens
tgtaccttagagggt

SEQ ID NO: 1723906 - DNA, 15 bp, Homo sapiens
gtaccttagagggtt

SEQ ID NO: 1723907 - DNA, 15 bp, Homo sapiens
taccttagagggttt

SEQ ID NO: 1723908 - DNA, 15 bp, Homo sapiens
accttagagggtttc

SEQ ID NO: 1723909 - DNA, 15 bp, Homo sapiens
ccttagagggtttcc

SEQ ID NO: 1723910 - DNA, 15 bp, Homo sapiens
cttagagggtttcca

SEQ ID NO: 1723911 - DNA, 15 bp, Homo sapiens
ttagagggtttccag

SEQ ID NO: 1723912 - DNA, 15 bp, Homo sapiens
tagagggtttccaga

SEQ ID NO: 1723913 - DNA, 15 bp, Homo sapiens
agagggtttccagaa

SEQ ID NO: 1723914 - DNA, 15 bp, Homo sapiens
gagggtttccagaac

SEQ ID NO: 1723915 - DNA, 15 bp, Homo sapiens
agggtttccagaaca

SEQ ID NO: 1723916 - DNA, 15 bp, Homo sapiens
gggtttccagaacat

SEQ ID NO: 1723917 - DNA, 15 bp, Homo sapiens
ggtttccagaacatg

SEQ ID NO: 1723918 - DNA, 15 bp, Homo sapiens
gtttccagaacatgg

SEQ ID NO: 1723919 - DNA, 15 bp, Homo sapiens
tttccagaacatggt

SEQ ID NO: 1723920 - DNA, 15 bp, Homo sapiens
ttccagaacatggtg

SEQ ID NO: 1723921 - DNA, 15 bp, Homo sapiens
tccagaacatggtgc

SEQ ID NO: 1723922 - DNA, 15 bp, Homo sapiens
ccagaacatggtgca

SEQ ID NO: 1723923 - DNA, 15 bp, Homo sapiens
cagaacatggtgcag

SEQ ID NO: 1723924 - DNA, 15 bp, Homo sapiens
agaacatggtgcagg

SEQ ID NO: 1723925 - DNA, 15 bp, Homo sapiens
gaacatggtgcaggg

SEQ ID NO: 1723926 - DNA, 15 bp, Homo sapiens
aacatggtgcaggga

SEQ ID NO: 1723927 - DNA, 15 bp, Homo sapiens
acatggtgcagggag

SEQ ID NO: 1723928 - DNA, 15 bp, Homo sapiens
catggtgcagggagg

SEQ ID NO: 1723929 - DNA, 15 bp, Homo sapiens
atggtgcagggaggg

SEQ ID NO: 1723930 - DNA, 15 bp, Homo sapiens
tggtgcagggagggt

SEQ ID NO: 1723931 - DNA, 15 bp, Homo sapiens
ggtgcagggagggtg

SEQ ID NO: 1723932 - DNA, 15 bp, Homo sapiens
gtgcagggagggtga

SEQ ID NO: 1723933 - DNA, 15 bp, Homo sapiens
tgcagggagggtgaa

SEQ ID NO: 1723934 - DNA, 15 bp, Homo sapiens
gcagggagggtgaac

SEQ ID NO: 1723935 - DNA, 15 bp, Homo sapiens
cagggagggtgaacc

SEQ ID NO: 1723936 - DNA, 15 bp, Homo sapiens
agggagggtgaaccc

SEQ ID NO: 1723937 - DNA, 15 bp, Homo sapiens
gggagggtgaaccca

SEQ ID NO: 1723938 - DNA, 15 bp, Homo sapiens
ggagggtgaacccag

SEQ ID NO: 1723939 - DNA, 15 bp, Homo sapiens
gagggtgaacccaga

SEQ ID NO: 1723940 - DNA, 15 bp, Homo sapiens
agggtgaacccagac

SEQ ID NO: 1723941 - DNA, 15 bp, Homo sapiens
gggtgaacccagact

SEQ ID NO: 1723942 - DNA, 15 bp, Homo sapiens
ggtgaacccagactc

SEQ ID NO: 1723943 - DNA, 15 bp, Homo sapiens
gtgaacccagactct

SEQ ID NO: 1723944 - DNA, 15 bp, Homo sapiens
tgaacccagactctc

SEQ ID NO: 1723945 - DNA, 15 bp, Homo sapiens
gaacccagactctct

SEQ ID NO: 1723946 - DNA, 15 bp, Homo sapiens
aacccagactctctg

SEQ ID NO: 1723947 - DNA, 15 bp, Homo sapiens
acccagactctctga

SEQ ID NO: 1723948 - DNA, 15 bp, Homo sapiens
cccagactctctgat

SEQ ID NO: 1723949 - DNA, 15 bp, Homo sapiens
ccagactctctgatt

SEQ ID NO: 1723950 - DNA, 15 bp, Homo sapiens
cagactctctgattc

SEQ ID NO: 1723951 - DNA, 15 bp, Homo sapiens
agactctctgattcc

SEQ ID NO: 1723952 - DNA, 15 bp, Homo sapiens
gactctctgattcca

SEQ ID NO: 1723953 - DNA, 15 bp, Homo sapiens
actctctgattccag

SEQ ID NO: 1723954 - DNA, 15 bp, Homo sapiens
ctctctgattccagg

SEQ ID NO: 1723955 - DNA, 15 bp, Homo sapiens
tctctgattccaggc

SEQ ID NO: 1723956 - DNA, 15 bp, Homo sapiens
ctctgattccaggca

SEQ ID NO: 1723957 - DNA, 15 bp, Homo sapiens
tctgattccaggcaa

SEQ ID NO: 1723958 - DNA, 15 bp, Homo sapiens
ctgattccaggcaac

SEQ ID NO: 1723959 - DNA, 15 bp, Homo sapiens
tgattccaggcaaca

SEQ ID NO: 1723960 - DNA, 15 bp, Homo sapiens
gattccaggcaacag

SEQ ID NO: 1723961 - DNA, 15 bp, Homo sapiens
attccaggcaacaga

SEQ ID NO: 1723962 - DNA, 15 bp, Homo sapiens
ttccaggcaacagag

SEQ ID NO: 1723963 - DNA, 15 bp, Homo sapiens
tccaggcaacagagc

SEQ ID NO: 1723964 - DNA, 15 bp, Homo sapiens
ccaggcaacagagct

SEQ ID NO: 1723965 - DNA, 15 bp, Homo sapiens
caggcaacagagctg

SEQ ID NO: 1723966 - DNA, 15 bp, Homo sapiens
aggcaacagagctga

SEQ ID NO: 1723967 - DNA, 15 bp, Homo sapiens
ggcaacagagctgag

SEQ ID NO: 1723968 - DNA, 15 bp, Homo sapiens
gcaacagagctgaga

SEQ ID NO: 1723969 - DNA, 15 bp, Homo sapiens
caacagagctgagag

SEQ ID NO: 1723970 - DNA, 15 bp, Homo sapiens
aacagagctgagagt

SEQ ID NO: 1723971 - DNA, 15 bp, Homo sapiens
acagagctgagagtc

SEQ ID NO: 1723972 - DNA, 15 bp, Homo sapiens
cagagctgagagtcc

SEQ ID NO: 1723973 - DNA, 15 bp, Homo sapiens
agagctgagagtcca

SEQ ID NO: 1723974 - DNA, 15 bp, Homo sapiens
gagctgagagtccag

SEQ ID NO: 1723975 - DNA, 15 bp, Homo sapiens
agctgagagtccagg

SEQ ID NO: 1723976 - DNA, 15 bp, Homo sapiens
gctgagagtccaggg

SEQ ID NO: 1723977 - DNA, 15 bp, Homo sapiens
ctgagagtccaggga

SEQ ID NO: 1723978 - DNA, 15 bp, Homo sapiens
tgagagtccagggac

SEQ ID NO: 1723979 - DNA, 15 bp, Homo sapiens
gagagtccagggaca

SEQ ID NO: 1723980 - DNA, 15 bp, Homo sapiens
agagtccagggacac

SEQ ID NO: 1723981 - DNA, 15 bp, Homo sapiens
gagtccagggacacc

SEQ ID NO: 1723982 - DNA, 15 bp, Homo sapiens
agtccagggacacca

SEQ ID NO: 1723983 - DNA, 15 bp, Homo sapiens
gtccagggacaccaa

SEQ ID NO: 1723984 - DNA, 15 bp, Homo sapiens
tccagggacaccaag

SEQ ID NO: 1723985 - DNA, 15 bp, Homo sapiens
ccagggacaccaagg

SEQ ID NO: 1723986 - DNA, 15 bp, Homo sapiens
cagggacaccaaggc

SEQ ID NO: 1723987 - DNA, 15 bp, Homo sapiens
agggacaccaaggcg

SEQ ID NO: 1723988 - DNA, 15 bp, Homo sapiens
gggacaccaaggcgg

SEQ ID NO: 1723989 - DNA, 15 bp, Homo sapiens
ggacaccaaggcggc

SEQ ID NO: 1723990 - DNA, 15 bp, Homo sapiens
gacaccaaggcggct

SEQ ID NO: 1723991 - DNA, 15 bp, Homo sapiens
acaccaaggcggcta

SEQ ID NO: 1723992 - DNA, 15 bp, Homo sapiens
caccaaggcggctat

SEQ ID NO: 1723993 - DNA, 15 bp, Homo sapiens
accaaggcggctatt

SEQ ID NO: 1723994 - DNA, 15 bp, Homo sapiens
ccaaggcggctattg

SEQ ID NO: 1723995 - DNA, 15 bp, Homo sapiens
caaggcggctattgc

SEQ ID NO: 1723996 - DNA, 15 bp, Homo sapiens
aaggcggctattgct

SEQ ID NO: 1723997 - DNA, 15 bp, Homo sapiens
aggcggctattgctc

SEQ ID NO: 1723998 - DNA, 15 bp, Homo sapiens
ggcggctattgctca

SEQ ID NO: 1723999 - DNA, 15 bp, Homo sapiens
gcggctattgctcac

SEQ ID NO: 1724000 - DNA, 15 bp, Homo sapiens
cggctattgctcaca

SEQ ID NO: 1724001 - DNA, 15 bp, Homo sapiens
ggctattgctcacag

SEQ ID NO: 1724002 - DNA, 15 bp, Homo sapiens
gctattgctcacagg

SEQ ID NO: 1724003 - DNA, 15 bp, Homo sapiens
ctattgctcacagga

SEQ ID NO: 1724004 - DNA, 15 bp, Homo sapiens
tattgctcacaggac

SEQ ID NO: 1724005 - DNA, 15 bp, Homo sapiens
attgctcacaggaca

SEQ ID NO: 1724006 - DNA, 15 bp, Homo sapiens
ttgctcacaggacag

SEQ ID NO: 1724007 - DNA, 15 bp, Homo sapiens
tgctcacaggacaga

SEQ ID NO: 1724008 - DNA, 15 bp, Homo sapiens
gctcacaggacagaa

SEQ ID NO: 1724009 - DNA, 15 bp, Homo sapiens
ctcacaggacagaat

SEQ ID NO: 1724010 - DNA, 15 bp, Homo sapiens
tcacaggacagaatg

SEQ ID NO: 1724011 - DNA, 15 bp, Homo sapiens
cacaggacagaatga

SEQ ID NO: 1724012 - DNA, 15 bp, Homo sapiens
acaggacagaatgag

SEQ ID NO: 1724013 - DNA, 15 bp, Homo sapiens
caggacagaatgaga

SEQ ID NO: 1724014 - DNA, 15 bp, Homo sapiens
aggacagaatgagag

SEQ ID NO: 1724015 - DNA, 15 bp, Homo sapiens
ggacagaatgagaga

SEQ ID NO: 1724016 - DNA, 15 bp, Homo sapiens
gacagaatgagagag

SEQ ID NO: 1724017 - DNA, 15 bp, Homo sapiens
acagaatgagagaga

SEQ ID NO: 1724018 - DNA, 15 bp, Homo sapiens
cagaatgagagagaa

SEQ ID NO: 1724019 - DNA, 15 bp, Homo sapiens
agaatgagagagaag

SEQ ID NO: 1724020 - DNA, 15 bp, Homo sapiens
gaatgagagagaagg

SEQ ID NO: 1724021 - DNA, 15 bp, Homo sapiens
aatgagagagaaggg

SEQ ID NO: 1724022 - DNA, 15 bp, Homo sapiens
atgagagagaaggga

SEQ ID NO: 1724023 - DNA, 15 bp, Homo sapiens
tgagagagaagggag

SEQ ID NO: 1724024 - DNA, 15 bp, Homo sapiens
gagagagaagggagc

SEQ ID NO: 1724025 - DNA, 15 bp, Homo sapiens
agagagaagggagct

SEQ ID NO: 1724026 - DNA, 15 bp, Homo sapiens
gagagaagggagctg

SEQ ID NO: 1724027 - DNA, 15 bp, Homo sapiens
agagaagggagctgc

SEQ ID NO: 1724028 - DNA, 15 bp, Homo sapiens
gagaagggagctgca

SEQ ID NO: 1724029 - DNA, 15 bp, Homo sapiens
agaagggagctgcag

SEQ ID NO: 1724030 - DNA, 15 bp, Homo sapiens
gaagggagctgcaga

SEQ ID NO: 1724031 - DNA, 15 bp, Homo sapiens
aagggagctgcagag

SEQ ID NO: 1724032 - DNA, 15 bp, Homo sapiens
agggagctgcagaga

SEQ ID NO: 1724033 - DNA, 15 bp, Homo sapiens
gggagctgcagagag

SEQ ID NO: 1724034 - DNA, 15 bp, Homo sapiens
ggagctgcagagaga

SEQ ID NO: 1724035 - DNA, 15 bp, Homo sapiens
gagctgcagagagag

SEQ ID NO: 1724036 - DNA, 15 bp, Homo sapiens
agctgcagagagaga

SEQ ID NO: 1724037 - DNA, 15 bp, Homo sapiens
gctgcagagagagaa

SEQ ID NO: 1724038 - DNA, 15 bp, Homo sapiens
ctgcagagagagaat

SEQ ID NO: 1724039 - DNA, 15 bp, Homo sapiens
tgcagagagagaatc

SEQ ID NO: 1724040 - DNA, 15 bp, Homo sapiens
gcagagagagaatcc

SEQ ID NO: 1724041 - DNA, 15 bp, Homo sapiens
cagagagagaatcca

SEQ ID NO: 1724042 - DNA, 15 bp, Homo sapiens
agagagagaatccag

SEQ ID NO: 1724043 - DNA, 15 bp, Homo sapiens
gagagagaatccagg

SEQ ID NO: 1724044 - DNA, 15 bp, Homo sapiens
agagagaatccaggt

SEQ ID NO: 1724045 - DNA, 15 bp, Homo sapiens
gagagaatccaggtc

SEQ ID NO: 1724046 - DNA, 15 bp, Homo sapiens
agagaatccaggtct

SEQ ID NO: 1724047 - DNA, 15 bp, Homo sapiens
gagaatccaggtctg

SEQ ID NO: 1724048 - DNA, 15 bp, Homo sapiens
agaatccaggtctgc

SEQ ID NO: 1724049 - DNA, 15 bp, Homo sapiens
gaatccaggtctgca

SEQ ID NO: 1724050 - DNA, 15 bp, Homo sapiens
aatccaggtctgcag

SEQ ID NO: 1724051 - DNA, 15 bp, Homo sapiens
atccaggtctgcaga

SEQ ID NO: 1724052 - DNA, 15 bp, Homo sapiens
tccaggtctgcagag

SEQ ID NO: 1724053 - DNA, 15 bp, Homo sapiens
ccaggtctgcagagg

SEQ ID NO: 1724054 - DNA, 15 bp, Homo sapiens
caggtctgcagaggg

SEQ ID NO: 1724055 - DNA, 15 bp, Homo sapiens
aggtctgcagagggt

SEQ ID NO: 1724056 - DNA, 15 bp, Homo sapiens
ggtctgcagagggtc

SEQ ID NO: 1724057 - DNA, 15 bp, Homo sapiens
gtctgcagagggtcc

SEQ ID NO: 1724058 - DNA, 15 bp, Homo sapiens
tctgcagagggtccc

SEQ ID NO: 1724059 - DNA, 15 bp, Homo sapiens
ctgcagagggtccct

SEQ ID NO: 1724060 - DNA, 15 bp, Homo sapiens
tgcagagggtccctt

SEQ ID NO: 1724061 - DNA, 15 bp, Homo sapiens
gcagagggtcccttt

SEQ ID NO: 1724062 - DNA, 15 bp, Homo sapiens
cagagggtccctttg

SEQ ID NO: 1724063 - DNA, 15 bp, Homo sapiens
agagggtccctttgg

SEQ ID NO: 1724064 - DNA, 15 bp, Homo sapiens
gagggtccctttgga

SEQ ID NO: 1724065 - DNA, 15 bp, Homo sapiens
agggtccctttggaa

SEQ ID NO: 1724066 - DNA, 15 bp, Homo sapiens
gggtccctttggaaa

SEQ ID NO: 1724067 - DNA, 15 bp, Homo sapiens
ggtccctttggaaaa

SEQ ID NO: 1724068 - DNA, 15 bp, Homo sapiens
gtccctttggaaaat

SEQ ID NO: 1724069 - DNA, 15 bp, Homo sapiens
tccctttggaaaatg

SEQ ID NO: 1724070 - DNA, 15 bp, Homo sapiens
ccctttggaaaatgc

SEQ ID NO: 1724071 - DNA, 15 bp, Homo sapiens
cctttggaaaatgca

SEQ ID NO: 1724072 - DNA, 15 bp, Homo sapiens
ctttggaaaatgcag

SEQ ID NO: 1724073 - DNA, 15 bp, Homo sapiens
tttggaaaatgcagc

SEQ ID NO: 1724074 - DNA, 15 bp, Homo sapiens
ttggaaaatgcagca

SEQ ID NO: 1724075 - DNA, 15 bp, Homo sapiens
tggaaaatgcagcaa

SEQ ID NO: 1724076 - DNA, 15 bp, Homo sapiens
ggaaaatgcagcaat

SEQ ID NO: 1724077 - DNA, 15 bp, Homo sapiens
gaaaatgcagcaata

SEQ ID NO: 1724078 - DNA, 15 bp, Homo sapiens
aaaatgcagcaatat

SEQ ID NO: 1724079 - DNA, 15 bp, Homo sapiens
aaatgcagcaatatc

SEQ ID NO: 1724080 - DNA, 15 bp, Homo sapiens
aatgcagcaatatct

SEQ ID NO: 1724081 - DNA, 15 bp, Homo sapiens
atgcagcaatatctg

SEQ ID NO: 1724082 - DNA, 15 bp, Homo sapiens
tgcagcaatatctgt

SEQ ID NO: 1724083 - DNA, 15 bp, Homo sapiens
gcagcaatatctgtt

SEQ ID NO: 1724084 - DNA, 15 bp, Homo sapiens
cagcaatatctgtta

SEQ ID NO: 1724085 - DNA, 15 bp, Homo sapiens
agcaatatctgttaa

SEQ ID NO: 1724086 - DNA, 15 bp, Homo sapiens
gcaatatctgttaac

SEQ ID NO: 1724087 - DNA, 15 bp, Homo sapiens
caatatctgttaact

SEQ ID NO: 1724088 - DNA, 15 bp, Homo sapiens
aatatctgttaactt

SEQ ID NO: 1724089 - DNA, 15 bp, Homo sapiens
atatctgttaacttc

SEQ ID NO: 1724090 - DNA, 15 bp, Homo sapiens
tatctgttaacttct

SEQ ID NO: 1724091 - DNA, 15 bp, Homo sapiens
atctgttaacttctt

SEQ ID NO: 1724092 - DNA, 15 bp, Homo sapiens
tctgttaacttctta

SEQ ID NO: 1724093 - DNA, 15 bp, Homo sapiens
ctgttaacttcttag

SEQ ID NO: 1724094 - DNA, 15 bp, Homo sapiens
tgttaacttcttaga

SEQ ID NO: 1724095 - DNA, 15 bp, Homo sapiens
gttaacttcttagag

SEQ ID NO: 1724096 - DNA, 15 bp, Homo sapiens
ttaacttcttagagc

SEQ ID NO: 1724097 - DNA, 15 bp, Homo sapiens
taacttcttagagcc

SEQ ID NO: 1724098 - DNA, 15 bp, Homo sapiens
aacttcttagagccg

SEQ ID NO: 1724099 - DNA, 15 bp, Homo sapiens
acttcttagagccgt

SEQ ID NO: 1724100 - DNA, 15 bp, Homo sapiens
cttcttagagccgtt

SEQ ID NO: 1724101 - DNA, 15 bp, Homo sapiens
ttcttagagccgtta

SEQ ID NO: 1724102 - DNA, 15 bp, Homo sapiens
tcttagagccgttaa

SEQ ID NO: 1724103 - DNA, 15 bp, Homo sapiens
cttagagccgttaac

SEQ ID NO: 1724104 - DNA, 15 bp, Homo sapiens
ttagagccgttaacg

SEQ ID NO: 1724105 - DNA, 15 bp, Homo sapiens
tagagccgttaacgc

SEQ ID NO: 1724106 - DNA, 15 bp, Homo sapiens
agagccgttaacgct

SEQ ID NO: 1724107 - DNA, 15 bp, Homo sapiens
gagccgttaacgctg

SEQ ID NO: 1724108 - DNA, 15 bp, Homo sapiens
agccgttaacgctga

SEQ ID NO: 1724109 - DNA, 15 bp, Homo sapiens
gccgttaacgctgat

SEQ ID NO: 1724110 - DNA, 15 bp, Homo sapiens
ccgttaacgctgatt

SEQ ID NO: 1724111 - DNA, 15 bp, Homo sapiens
cgttaacgctgattc

SEQ ID NO: 1724112 - DNA, 15 bp, Homo sapiens
gttaacgctgattca

SEQ ID NO: 1724113 - DNA, 15 bp, Homo sapiens
ttaacgctgattcat

SEQ ID NO: 1724114 - DNA, 15 bp, Homo sapiens
taacgctgattcatg

SEQ ID NO: 1724115 - DNA, 15 bp, Homo sapiens
aacgctgattcatgt

SEQ ID NO: 1724116 - DNA, 15 bp, Homo sapiens
acgctgattcatgtt

SEQ ID NO: 1724117 - DNA, 15 bp, Homo sapiens
cgctgattcatgttg

SEQ ID NO: 1724118 - DNA, 15 bp, Homo sapiens
gctgattcatgttgt

SEQ ID NO: 1724119 - DNA, 15 bp, Homo sapiens
ctgattcatgttgtc

SEQ ID NO: 1724120 - DNA, 15 bp, Homo sapiens
tgattcatgttgtct

SEQ ID NO: 1724121 - DNA, 15 bp, Homo sapiens
gattcatgttgtctc

SEQ ID NO: 1724122 - DNA, 15 bp, Homo sapiens
attcatgttgtctca

SEQ ID NO: 1724123 - DNA, 15 bp, Homo sapiens
ttcatgttgtctcac

SEQ ID NO: 1724124 - DNA, 15 bp, Homo sapiens
tcatgttgtctcaca

SEQ ID NO: 1724125 - DNA, 15 bp, Homo sapiens
catgttgtctcacag

SEQ ID NO: 1724126 - DNA, 15 bp, Homo sapiens
atgttgtctcacagg

SEQ ID NO: 1724127 - DNA, 15 bp, Homo sapiens
tgttgtctcacagga

SEQ ID NO: 1724128 - DNA, 15 bp, Homo sapiens
gttgtctcacaggaa

SEQ ID NO: 1724129 - DNA, 15 bp, Homo sapiens
ttgtctcacaggaac

SEQ ID NO: 1724130 - DNA, 15 bp, Homo sapiens
tgtctcacaggaaca

SEQ ID NO: 1724131 - DNA, 15 bp, Homo sapiens
gtctcacaggaacat

SEQ ID NO: 1724132 - DNA, 15 bp, Homo sapiens
tctcacaggaacatg

SEQ ID NO: 1724133 - DNA, 15 bp, Homo sapiens
ctcacaggaacatgg

SEQ ID NO: 1724134 - DNA, 15 bp, Homo sapiens
tcacaggaacatggc

SEQ ID NO: 1724135 - DNA, 15 bp, Homo sapiens
cacaggaacatggca

SEQ ID NO: 1724136 - DNA, 15 bp, Homo sapiens
acaggaacatggcaa

SEQ ID NO: 1724137 - DNA, 15 bp, Homo sapiens
caggaacatggcaaa

SEQ ID NO: 1724138 - DNA, 15 bp, Homo sapiens
aggaacatggcaaaa

SEQ ID NO: 1724139 - DNA, 15 bp, Homo sapiens
ggaacatggcaaaag

SEQ ID NO: 1724140 - DNA, 15 bp, Homo sapiens
gaacatggcaaaagt

SEQ ID NO: 1724141 - DNA, 15 bp, Homo sapiens
aacatggcaaaagtg

SEQ ID NO: 1724142 - DNA, 15 bp, Homo sapiens
acatggcaaaagtga

SEQ ID NO: 1724143 - DNA, 15 bp, Homo sapiens
catggcaaaagtgac

SEQ ID NO: 1724144 - DNA, 15 bp, Homo sapiens
atggcaaaagtgaca

SEQ ID NO: 1724145 - DNA, 15 bp, Homo sapiens
tggcaaaagtgacaa

SEQ ID NO: 1724146 - DNA, 15 bp, Homo sapiens
ggcaaaagtgacaat

SEQ ID NO: 1724147 - DNA, 15 bp, Homo sapiens
gcaaaagtgacaata

SEQ ID NO: 1724148 - DNA, 15 bp, Homo sapiens
caaaagtgacaatat

SEQ ID NO: 1724149 - DNA, 15 bp, Homo sapiens
aaaagtgacaatata

SEQ ID NO: 1724150 - DNA, 15 bp, Homo sapiens
aaagtgacaatatac

SEQ ID NO: 1724151 - DNA, 15 bp, Homo sapiens
aagtgacaatataca

SEQ ID NO: 1724152 - DNA, 15 bp, Homo sapiens
agtgacaatatacaa

SEQ ID NO: 1724153 - DNA, 15 bp, Homo sapiens
gtgacaatatacaaa

SEQ ID NO: 1724154 - DNA, 15 bp, Homo sapiens
tgacaatatacaaaa

SEQ ID NO: 1724155 - DNA, 15 bp, Homo sapiens
gacaatatacaaaat

SEQ ID NO: 1724156 - DNA, 15 bp, Homo sapiens
acaatatacaaaata

SEQ ID NO: 1724157 - DNA, 15 bp, Homo sapiens
caatatacaaaatac

SEQ ID NO: 1724158 - DNA, 15 bp, Homo sapiens
aatatacaaaatact

SEQ ID NO: 1724159 - DNA, 15 bp, Homo sapiens
atatacaaaatactt

SEQ ID NO: 1724160 - DNA, 15 bp, Homo sapiens
tatacaaaatacttg

SEQ ID NO: 1724161 - DNA, 15 bp, Homo sapiens
atacaaaatacttgg

SEQ ID NO: 1724162 - DNA, 15 bp, Homo sapiens
tacaaaatacttggg

SEQ ID NO: 1724163 - DNA, 15 bp, Homo sapiens
acaaaatacttgggt

SEQ ID NO: 1724164 - DNA, 15 bp, Homo sapiens
caaaatacttgggtt

SEQ ID NO: 1724165 - DNA, 15 bp, Homo sapiens
aaaatacttgggttt

SEQ ID NO: 1724166 - DNA, 15 bp, Homo sapiens
aaatacttgggtttt

SEQ ID NO: 1724167 - DNA, 15 bp, Homo sapiens
aatacttgggtttta

SEQ ID NO: 1724168 - DNA, 15 bp, Homo sapiens
atacttgggttttat

SEQ ID NO: 1724169 - DNA, 15 bp, Homo sapiens
tacttgggttttatt

SEQ ID NO: 1724170 - DNA, 15 bp, Homo sapiens
acttgggttttattt

SEQ ID NO: 1724171 - DNA, 15 bp, Homo sapiens
cttgggttttatttt

SEQ ID NO: 1724172 - DNA, 15 bp, Homo sapiens
ttgggttttattttc

SEQ ID NO: 1724173 - DNA, 15 bp, Homo sapiens
tgggttttattttca

SEQ ID NO: 1724174 - DNA, 15 bp, Homo sapiens
gggttttattttcaa

SEQ ID NO: 1724175 - DNA, 15 bp, Homo sapiens
ggttttattttcaag

SEQ ID NO: 1724176 - DNA, 15 bp, Homo sapiens
gttttattttcaagg

SEQ ID NO: 1724177 - DNA, 15 bp, Homo sapiens
ttttattttcaagga

SEQ ID NO: 1724178 - DNA, 15 bp, Homo sapiens
tttattttcaaggaa

SEQ ID NO: 1724179 - DNA, 15 bp, Homo sapiens
ttattttcaaggaaa

SEQ ID NO: 1724180 - DNA, 15 bp, Homo sapiens
tattttcaaggaaaa

SEQ ID NO: 1724181 - DNA, 15 bp, Homo sapiens
attttcaaggaaaat

SEQ ID NO: 1724182 - DNA, 15 bp, Homo sapiens
ttttcaaggaaaatc

SEQ ID NO: 1724183 - DNA, 15 bp, Homo sapiens
tttcaaggaaaatca

SEQ ID NO: 1724184 - DNA, 15 bp, Homo sapiens
ttcaaggaaaatcac

SEQ ID NO: 1724185 - DNA, 15 bp, Homo sapiens
tcaaggaaaatcact

SEQ ID NO: 1724186 - DNA, 15 bp, Homo sapiens
caaggaaaatcactg

SEQ ID NO: 1724187 - DNA, 15 bp, Homo sapiens
aaggaaaatcactgt

SEQ ID NO: 1724188 - DNA, 15 bp, Homo sapiens
aggaaaatcactgtg

SEQ ID NO: 1724189 - DNA, 15 bp, Homo sapiens
ggaaaatcactgtga

SEQ ID NO: 1724190 - DNA, 15 bp, Homo sapiens
gaaaatcactgtgag

SEQ ID NO: 1724191 - DNA, 15 bp, Homo sapiens
aaaatcactgtgaga

SEQ ID NO: 1724192 - DNA, 15 bp, Homo sapiens
aaatcactgtgagac

SEQ ID NO: 1724193 - DNA, 15 bp, Homo sapiens
aatcactgtgagact

SEQ ID NO: 1724194 - DNA, 15 bp, Homo sapiens
atcactgtgagactt

SEQ ID NO: 1724195 - DNA, 15 bp, Homo sapiens
tcactgtgagacttg

SEQ ID NO: 1724196 - DNA, 15 bp, Homo sapiens
cactgtgagacttga

SEQ ID NO: 1724197 - DNA, 15 bp, Homo sapiens
actgtgagacttgat

SEQ ID NO: 1724198 - DNA, 15 bp, Homo sapiens
ctgtgagacttgatt

SEQ ID NO: 1724199 - DNA, 15 bp, Homo sapiens
tgtgagacttgattt

SEQ ID NO: 1724200 - DNA, 15 bp, Homo sapiens
gtgagacttgatttg

SEQ ID NO: 1724201 - DNA, 15 bp, Homo sapiens
tgagacttgatttgt

SEQ ID NO: 1724202 - DNA, 15 bp, Homo sapiens
gagacttgatttgtg

SEQ ID NO: 1724203 - DNA, 15 bp, Homo sapiens
agacttgatttgtgc

SEQ ID NO: 1724204 - DNA, 15 bp, Homo sapiens
gacttgatttgtgct

SEQ ID NO: 1724205 - DNA, 15 bp, Homo sapiens
acttgatttgtgctg

SEQ ID NO: 1724206 - DNA, 15 bp, Homo sapiens
cttgatttgtgctgt

SEQ ID NO: 1724207 - DNA, 15 bp, Homo sapiens
ttgatttgtgctgtc

SEQ ID NO: 1724208 - DNA, 15 bp, Homo sapiens
tgatttgtgctgtcc

SEQ ID NO: 1724209 - DNA, 15 bp, Homo sapiens
gatttgtgctgtcca

SEQ ID NO: 1724210 - DNA, 15 bp, Homo sapiens
atttgtgctgtccaa

SEQ ID NO: 1724211 - DNA, 15 bp, Homo sapiens
tttgtgctgtccaat

SEQ ID NO: 1724212 - DNA, 15 bp, Homo sapiens
ttgtgctgtccaatt

SEQ ID NO: 1724213 - DNA, 15 bp, Homo sapiens
tgtgctgtccaattc

SEQ ID NO: 1724214 - DNA, 15 bp, Homo sapiens
gtgctgtccaattca

SEQ ID NO: 1724215 - DNA, 15 bp, Homo sapiens
tgctgtccaattcag

SEQ ID NO: 1724216 - DNA, 15 bp, Homo sapiens
gctgtccaattcagt

SEQ ID NO: 1724217 - DNA, 15 bp, Homo sapiens
ctgtccaattcagta

SEQ ID NO: 1724218 - DNA, 15 bp, Homo sapiens
tgtccaattcagtag

SEQ ID NO: 1724219 - DNA, 15 bp, Homo sapiens
gtccaattcagtagc

SEQ ID NO: 1724220 - DNA, 15 bp, Homo sapiens
tccaattcagtagcc

SEQ ID NO: 1724221 - DNA, 15 bp, Homo sapiens
ccaattcagtagcca

SEQ ID NO: 1724222 - DNA, 15 bp, Homo sapiens
caattcagtagccac

SEQ ID NO: 1724223 - DNA, 15 bp, Homo sapiens
aattcagtagccact

SEQ ID NO: 1724224 - DNA, 15 bp, Homo sapiens
attcagtagccacta

SEQ ID NO: 1724225 - DNA, 15 bp, Homo sapiens
ttcagtagccactag

SEQ ID NO: 1724226 - DNA, 15 bp, Homo sapiens
tcagtagccactaga

SEQ ID NO: 1724227 - DNA, 15 bp, Homo sapiens
cagtagccactagac

SEQ ID NO: 1724228 - DNA, 15 bp, Homo sapiens
agtagccactagaca

SEQ ID NO: 1724229 - DNA, 15 bp, Homo sapiens
tagccactagacaca

SEQ ID NO: 1724230 - DNA, 15 bp, Homo sapiens
agccactagacacac

SEQ ID NO: 1724231 - DNA, 15 bp, Homo sapiens
gccactagacacaca

SEQ ID NO: 1724232 - DNA, 15 bp, Homo sapiens
ccactagacacacat

SEQ ID NO: 1724233 - DNA, 15 bp, Homo sapiens
cactagacacacatg

SEQ ID NO: 1724234 - DNA, 15 bp, Homo sapiens
actagacacacatgg

SEQ ID NO: 1724235 - DNA, 15 bp, Homo sapiens
ctagacacacatggc

SEQ ID NO: 1724236 - DNA, 15 bp, Homo sapiens
tagacacacatggct

SEQ ID NO: 1724237 - DNA, 15 bp, Homo sapiens
agacacacatggcta

SEQ ID NO: 1724238 - DNA, 15 bp, Homo sapiens
gacacacatggctat

SEQ ID NO: 1724239 - DNA, 15 bp, Homo sapiens
acacacatggctatt

SEQ ID NO: 1724240 - DNA, 15 bp, Homo sapiens
cacacatggctattg

SEQ ID NO: 1724241 - DNA, 15 bp, Homo sapiens
acacatggctattga

SEQ ID NO: 1724242 - DNA, 15 bp, Homo sapiens
cacatggctattgaa

SEQ ID NO: 1724243 - DNA, 15 bp, Homo sapiens
acatggctattgaaa

SEQ ID NO: 1724244 - DNA, 15 bp, Homo sapiens
catggctattgaaat

SEQ ID NO: 1724245 - DNA, 15 bp, Homo sapiens
atggctattgaaatg

SEQ ID NO: 1724246 - DNA, 15 bp, Homo sapiens
tggctattgaaatgt

SEQ ID NO: 1724247 - DNA, 15 bp, Homo sapiens
ggctattgaaatgta

SEQ ID NO: 1724248 - DNA, 15 bp, Homo sapiens
gctattgaaatgtaa

SEQ ID NO: 1724249 - DNA, 15 bp, Homo sapiens
ctattgaaatgtaaa

SEQ ID NO: 1724250 - DNA, 15 bp, Homo sapiens
tattgaaatgtaaat

SEQ ID NO: 1724251 - DNA, 15 bp, Homo sapiens
attgaaatgtaaatt

SEQ ID NO: 1724252 - DNA, 15 bp, Homo sapiens
ttgaaatgtaaatta

SEQ ID NO: 1724253 - DNA, 15 bp, Homo sapiens
tgaaatgtaaattaa

SEQ ID NO: 1724254 - DNA, 15 bp, Homo sapiens
gaaatgtaaattaaa

SEQ ID NO: 1724255 - DNA, 15 bp, Homo sapiens
aaatgtaaattaaaa

SEQ ID NO: 1724256 - DNA, 15 bp, Homo sapiens
aatgtaaattaaaag

SEQ ID NO: 1724257 - DNA, 15 bp, Homo sapiens
atgtaaattaaaagt

SEQ ID NO: 1724258 - DNA, 15 bp, Homo sapiens
tgtaaattaaaagta

SEQ ID NO: 1724259 - DNA, 15 bp, Homo sapiens
gtaaattaaaagtaa

SEQ ID NO: 1724260 - DNA, 15 bp, Homo sapiens
taaattaaaagtaaa

SEQ ID NO: 1724261 - DNA, 15 bp, Homo sapiens
aaattaaaagtaaat

SEQ ID NO: 1724262 - DNA, 15 bp, Homo sapiens
aattaaaagtaaatg

SEQ ID NO: 1724263 - DNA, 15 bp, Homo sapiens
attaaaagtaaatga

SEQ ID NO: 1724264 - DNA, 15 bp, Homo sapiens
ttaaaagtaaatgaa

SEQ ID NO: 1724265 - DNA, 15 bp, Homo sapiens
taaaagtaaatgaag

SEQ ID NO: 1724266 - DNA, 15 bp, Homo sapiens
aaaagtaaatgaagg

SEQ ID NO: 1724267 - DNA, 15 bp, Homo sapiens
aaagtaaatgaaggt

SEQ ID NO: 1724268 - DNA, 15 bp, Homo sapiens
aagtaaatgaaggtt

SEQ ID NO: 1724269 - DNA, 15 bp, Homo sapiens
agtaaatgaaggtta

SEQ ID NO: 1724270 - DNA, 15 bp, Homo sapiens
gtaaatgaaggttaa

SEQ ID NO: 1724271 - DNA, 15 bp, Homo sapiens
taaatgaaggttaaa

SEQ ID NO: 1724272 - DNA, 15 bp, Homo sapiens
aaatgaaggttaaaa

SEQ ID NO: 1724273 - DNA, 15 bp, Homo sapiens
aatgaaggttaaaaa

SEQ ID NO: 1724274 - DNA, 15 bp, Homo sapiens
atgaaggttaaaaat

SEQ ID NO: 1724275 - DNA, 15 bp, Homo sapiens
tgaaggttaaaaatg

SEQ ID NO: 1724276 - DNA, 15 bp, Homo sapiens
gaaggttaaaaatgc

SEQ ID NO: 1724277 - DNA, 15 bp, Homo sapiens
aaggttaaaaatgca

SEQ ID NO: 1724278 - DNA, 15 bp, Homo sapiens
aggttaaaaatgcat

SEQ ID NO: 1724279 - DNA, 15 bp, Homo sapiens
ggttaaaaatgcatt

SEQ ID NO: 1724280 - DNA, 15 bp, Homo sapiens
gttaaaaatgcattt

SEQ ID NO: 1724281 - DNA, 15 bp, Homo sapiens
ttaaaaatgcatttc

SEQ ID NO: 1724282 - DNA, 15 bp, Homo sapiens
taaaaatgcatttcc

SEQ ID NO: 1724283 - DNA, 15 bp, Homo sapiens
aaaaatgcatttccg

SEQ ID NO: 1724284 - DNA, 15 bp, Homo sapiens
aaaatgcatttccgg

SEQ ID NO: 1724285 - DNA, 15 bp, Homo sapiens
aaatgcatttccggc

SEQ ID NO: 1724286 - DNA, 15 bp, Homo sapiens
aatgcatttccggca

SEQ ID NO: 1724287 - DNA, 15 bp, Homo sapiens
atgcatttccggcag

SEQ ID NO: 1724288 - DNA, 15 bp, Homo sapiens
tgcatttccggcagg

SEQ ID NO: 1724289 - DNA, 15 bp, Homo sapiens
gcatttccggcaggg

SEQ ID NO: 1724290 - DNA, 15 bp, Homo sapiens
catttccggcagggc

SEQ ID NO: 1724291 - DNA, 15 bp, Homo sapiens
atttccggcagggct

SEQ ID NO: 1724292 - DNA, 15 bp, Homo sapiens
tttccggcagggctt

SEQ ID NO: 1724293 - DNA, 15 bp, Homo sapiens
ttccggcagggcttg

SEQ ID NO: 1724294 - DNA, 15 bp, Homo sapiens
tccggcagggcttgg

SEQ ID NO: 1724295 - DNA, 15 bp, Homo sapiens
ccggcagggcttggt

SEQ ID NO: 1724296 - DNA, 15 bp, Homo sapiens
cggcagggcttggtg

SEQ ID NO: 1724297 - DNA, 15 bp, Homo sapiens
ggcagggcttggtgg

SEQ ID NO: 1724298 - DNA, 15 bp, Homo sapiens
gcagggcttggtggc

SEQ ID NO: 1724299 - DNA, 15 bp, Homo sapiens
cagggcttggtggct

SEQ ID NO: 1724300 - DNA, 15 bp, Homo sapiens
agggcttggtggctc

SEQ ID NO: 1724301 - DNA, 15 bp, Homo sapiens
gggcttggtggctca

SEQ ID NO: 1724302 - DNA, 15 bp, Homo sapiens
ggcttggtggctcac

SEQ ID NO: 1724303 - DNA, 15 bp, Homo sapiens
gcttggtggctcacg

SEQ ID NO: 1724304 - DNA, 15 bp, Homo sapiens
cttggtggctcacgc

SEQ ID NO: 1724305 - DNA, 15 bp, Homo sapiens
ttggtggctcacgcc

SEQ ID NO: 1724306 - DNA, 15 bp, Homo sapiens
gctgaggcgggcggg

SEQ ID NO: 1724307 - DNA, 15 bp, Homo sapiens
ctgaggcgggcgggt

SEQ ID NO: 1724308 - DNA, 15 bp, Homo sapiens
tgaggcgggcgggtc

SEQ ID NO: 1724309 - DNA, 15 bp, Homo sapiens
gaggcgggcgggtca

SEQ ID NO: 1724310 - DNA, 15 bp, Homo sapiens
aggcgggcgggtcac

SEQ ID NO: 1724311 - DNA, 15 bp, Homo sapiens
ggcgggcgggtcacg

SEQ ID NO: 1724312 - DNA, 15 bp, Homo sapiens
gcgggcgggtcacga

SEQ ID NO: 1724313 - DNA, 15 bp, Homo sapiens
cgggcgggtcacgag

SEQ ID NO: 1724314 - DNA, 15 bp, Homo sapiens
gggcgggtcacgagg

SEQ ID NO: 1724315 - DNA, 15 bp, Homo sapiens
ggcgggtcacgaggt

SEQ ID NO: 1724316 - DNA, 15 bp, Homo sapiens
gcgggtcacgaggtc

SEQ ID NO: 1724317 - DNA, 15 bp, Homo sapiens
cgggtcacgaggtca

SEQ ID NO: 1724318 - DNA, 15 bp, Homo sapiens
gggtcacgaggtcag

SEQ ID NO: 1724319 - DNA, 15 bp, Homo sapiens
ggtcacgaggtcagg

SEQ ID NO: 1724320 - DNA, 15 bp, Homo sapiens
gtcacgaggtcagga

SEQ ID NO: 1724321 - DNA, 15 bp, Homo sapiens
cctggctaacacgga

SEQ ID NO: 1724322 - DNA, 15 bp, Homo sapiens
ctggctaacacggag

SEQ ID NO: 1724323 - DNA, 15 bp, Homo sapiens
tggctaacacggaga

SEQ ID NO: 1724324 - DNA, 15 bp, Homo sapiens
ggctaacacggagaa

SEQ ID NO: 1724325 - DNA, 15 bp, Homo sapiens
gctaacacggagaaa

SEQ ID NO: 1724326 - DNA, 15 bp, Homo sapiens
ctaacacggagaaac

SEQ ID NO: 1724327 - DNA, 15 bp, Homo sapiens
taacacggagaaacc

SEQ ID NO: 1724328 - DNA, 15 bp, Homo sapiens
aacacggagaaaccc

SEQ ID NO: 1724329 - DNA, 15 bp, Homo sapiens
acacggagaaaccct

SEQ ID NO: 1724330 - DNA, 15 bp, Homo sapiens
cacggagaaaccctg

SEQ ID NO: 1724331 - DNA, 15 bp, Homo sapiens
acggagaaaccctgt

SEQ ID NO: 1724332 - DNA, 15 bp, Homo sapiens
cggagaaaccctgtc

SEQ ID NO: 1724333 - DNA, 15 bp, Homo sapiens
ggagaaaccctgtct

SEQ ID NO: 1724334 - DNA, 15 bp, Homo sapiens
gagaaaccctgtctc

SEQ ID NO: 1724335 - DNA, 15 bp, Homo sapiens
agaaaccctgtctct

SEQ ID NO: 1724336 - DNA, 15 bp, Homo sapiens
aaaccctgtctctat

SEQ ID NO: 1724337 - DNA, 15 bp, Homo sapiens
aaccctgtctctatt

SEQ ID NO: 1724338 - DNA, 15 bp, Homo sapiens
accctgtctctatta

SEQ ID NO: 1724339 - DNA, 15 bp, Homo sapiens
ccctgtctctattaa

SEQ ID NO: 1724340 - DNA, 15 bp, Homo sapiens
cctgtctctattaaa

SEQ ID NO: 1724341 - DNA, 15 bp, Homo sapiens
ctgtctctattaaaa

SEQ ID NO: 1724342 - DNA, 15 bp, Homo sapiens
tgtctctattaaaaa

SEQ ID NO: 1724343 - DNA, 15 bp, Homo sapiens
gtctctattaaaaat

SEQ ID NO: 1724344 - DNA, 15 bp, Homo sapiens
tctctattaaaaata

SEQ ID NO: 1724345 - DNA, 15 bp, Homo sapiens
ctctattaaaaatac

SEQ ID NO: 1724346 - DNA, 15 bp, Homo sapiens
tctattaaaaataca

SEQ ID NO: 1724347 - DNA, 15 bp, Homo sapiens
ctattaaaaatacaa

SEQ ID NO: 1724348 - DNA, 15 bp, Homo sapiens
tattaaaaatacaaa

SEQ ID NO: 1724349 - DNA, 15 bp, Homo sapiens
ggtgtggtggcaggt

SEQ ID NO: 1724350 - DNA, 15 bp, Homo sapiens
gtgtggtggcaggtg

SEQ ID NO: 1724351 - DNA, 15 bp, Homo sapiens
tgtggtggcaggtgc

SEQ ID NO: 1724352 - DNA, 15 bp, Homo sapiens
ggtggcaggtgccta

SEQ ID NO: 1724353 - DNA, 15 bp, Homo sapiens
gtggcaggtgcctat

SEQ ID NO: 1724354 - DNA, 15 bp, Homo sapiens
tggcaggtgcctata

SEQ ID NO: 1724355 - DNA, 15 bp, Homo sapiens
ggcaggtgcctatag

SEQ ID NO: 1724356 - DNA, 15 bp, Homo sapiens
gcaggtgcctatagt

SEQ ID NO: 1724357 - DNA, 15 bp, Homo sapiens
caggtgcctatagtc

SEQ ID NO: 1724358 - DNA, 15 bp, Homo sapiens
aggtgcctatagtcc

SEQ ID NO: 1724359 - DNA, 15 bp, Homo sapiens
tatagtcccagctac

SEQ ID NO: 1724360 - DNA, 15 bp, Homo sapiens
gtcccagctactccg

SEQ ID NO: 1724361 - DNA, 15 bp, Homo sapiens
tcccagctactccgg

SEQ ID NO: 1724362 - DNA, 15 bp, Homo sapiens
cccagctactccgga

SEQ ID NO: 1724363 - DNA, 15 bp, Homo sapiens
ccagctactccggag

SEQ ID NO: 1724364 - DNA, 15 bp, Homo sapiens
cagctactccggagg

SEQ ID NO: 1724365 - DNA, 15 bp, Homo sapiens
agctactccggaggc

SEQ ID NO: 1724366 - DNA, 15 bp, Homo sapiens
gctactccggaggct

SEQ ID NO: 1724367 - DNA, 15 bp, Homo sapiens
cccaggaggcagagc

SEQ ID NO: 1724368 - DNA, 15 bp, Homo sapiens
ccaggaggcagagct

SEQ ID NO: 1724369 - DNA, 15 bp, Homo sapiens
caggaggcagagctt

SEQ ID NO: 1724370 - DNA, 15 bp, Homo sapiens
aggaggcagagcttg

SEQ ID NO: 1724371 - DNA, 15 bp, Homo sapiens
agagcttgcagtgaa

SEQ ID NO: 1724372 - DNA, 15 bp, Homo sapiens
gagcttgcagtgaac

SEQ ID NO: 1724373 - DNA, 15 bp, Homo sapiens
agcttgcagtgaacc

SEQ ID NO: 1724374 - DNA, 15 bp, Homo sapiens
gcttgcagtgaaccg

SEQ ID NO: 1724375 - DNA, 15 bp, Homo sapiens
cttgcagtgaaccga

SEQ ID NO: 1724376 - DNA, 15 bp, Homo sapiens
gtgaaccgagatcgc

SEQ ID NO: 1724377 - DNA, 15 bp, Homo sapiens
tgaaccgagatcgcg

SEQ ID NO: 1724378 - DNA, 15 bp, Homo sapiens
gaaccgagatcgcgc

SEQ ID NO: 1724379 - DNA, 15 bp, Homo sapiens
aaccgagatcgcgcc

SEQ ID NO: 1724380 - DNA, 15 bp, Homo sapiens
accgagatcgcgcca

SEQ ID NO: 1724381 - DNA, 15 bp, Homo sapiens
aaaaaaaaaaaaatg

SEQ ID NO: 1724382 - DNA, 15 bp, Homo sapiens
aaaaaaaaaaatgca

SEQ ID NO: 1724383 - DNA, 15 bp, Homo sapiens
aaaaaaaaaatgcac

SEQ ID NO: 1724384 - DNA, 15 bp, Homo sapiens
aaaaaaaaatgcact

SEQ ID NO: 1724385 - DNA, 15 bp, Homo sapiens
aaaaaaaatgcactt

SEQ ID NO: 1724386 - DNA, 15 bp, Homo sapiens
aaaaaaatgcacttc

SEQ ID NO: 1724387 - DNA, 15 bp, Homo sapiens
aaaaaatgcacttcc

SEQ ID NO: 1724388 - DNA, 15 bp, Homo sapiens
aaaaatgcacttcct

SEQ ID NO: 1724389 - DNA, 15 bp, Homo sapiens
aaaatgcacttcctc

SEQ ID NO: 1724390 - DNA, 15 bp, Homo sapiens
aaatgcacttcctca

SEQ ID NO: 1724391 - DNA, 15 bp, Homo sapiens
aatgcacttcctcag

SEQ ID NO: 1724392 - DNA, 15 bp, Homo sapiens
atgcacttcctcagt

SEQ ID NO: 1724393 - DNA, 15 bp, Homo sapiens
tgcacttcctcagtt

SEQ ID NO: 1724394 - DNA, 15 bp, Homo sapiens
gcacttcctcagttg

SEQ ID NO: 1724395 - DNA, 15 bp, Homo sapiens
cacttcctcagttgc

SEQ ID NO: 1724396 - DNA, 15 bp, Homo sapiens
acttcctcagttgca

SEQ ID NO: 1724397 - DNA, 15 bp, Homo sapiens
cttcctcagttgcat

SEQ ID NO: 1724398 - DNA, 15 bp, Homo sapiens
ttcctcagttgcatc

SEQ ID NO: 1724399 - DNA, 15 bp, Homo sapiens
tcctcagttgcatca

SEQ ID NO: 1724400 - DNA, 15 bp, Homo sapiens
cctcagttgcatcag

SEQ ID NO: 1724401 - DNA, 15 bp, Homo sapiens
ctcagttgcatcagc

SEQ ID NO: 1724402 - DNA, 15 bp, Homo sapiens
tcagttgcatcagct

SEQ ID NO: 1724403 - DNA, 15 bp, Homo sapiens
cagttgcatcagcta

SEQ ID NO: 1724404 - DNA, 15 bp, Homo sapiens
agttgcatcagctac

SEQ ID NO: 1724405 - DNA, 15 bp, Homo sapiens
gttgcatcagctaca

SEQ ID NO: 1724406 - DNA, 15 bp, Homo sapiens
ttgcatcagctacat

SEQ ID NO: 1724407 - DNA, 15 bp, Homo sapiens
tgcatcagctacatt

SEQ ID NO: 1724408 - DNA, 15 bp, Homo sapiens
gcatcagctacattt

SEQ ID NO: 1724409 - DNA, 15 bp, Homo sapiens
catcagctacatttc

SEQ ID NO: 1724410 - DNA, 15 bp, Homo sapiens
atcagctacatttca

SEQ ID NO: 1724411 - DNA, 15 bp, Homo sapiens
tcagctacatttcaa

SEQ ID NO: 1724412 - DNA, 15 bp, Homo sapiens
cagctacatttcaag

SEQ ID NO: 1724413 - DNA, 15 bp, Homo sapiens
agctacatttcaaga

SEQ ID NO: 1724414 - DNA, 15 bp, Homo sapiens
gctacatttcaagag

SEQ ID NO: 1724415 - DNA, 15 bp, Homo sapiens
ctacatttcaagagc

SEQ ID NO: 1724416 - DNA, 15 bp, Homo sapiens
tacatttcaagagct

SEQ ID NO: 1724417 - DNA, 15 bp, Homo sapiens
acatttcaagagctc

SEQ ID NO: 1724418 - DNA, 15 bp, Homo sapiens
catttcaagagctca

SEQ ID NO: 1724419 - DNA, 15 bp, Homo sapiens
atttcaagagctcaa

SEQ ID NO: 1724420 - DNA, 15 bp, Homo sapiens
tttcaagagctcaat

SEQ ID NO: 1724421 - DNA, 15 bp, Homo sapiens
ttcaagagctcaata

SEQ ID NO: 1724422 - DNA, 15 bp, Homo sapiens
tcaagagctcaataa

SEQ ID NO: 1724423 - DNA, 15 bp, Homo sapiens
caagagctcaataaa

SEQ ID NO: 1724424 - DNA, 15 bp, Homo sapiens
aagagctcaataaac

SEQ ID NO: 1724425 - DNA, 15 bp, Homo sapiens
agagctcaataaaca

SEQ ID NO: 1724426 - DNA, 15 bp, Homo sapiens
gagctcaataaacat

SEQ ID NO: 1724427 - DNA, 15 bp, Homo sapiens
agctcaataaacatc

SEQ ID NO: 1724428 - DNA, 15 bp, Homo sapiens
gctcaataaacatct

SEQ ID NO: 1724429 - DNA, 15 bp, Homo sapiens
ctcaataaacatctg

SEQ ID NO: 1724430 - DNA, 15 bp, Homo sapiens
tcaataaacatctgt

SEQ ID NO: 1724431 - DNA, 15 bp, Homo sapiens
caataaacatctgtg

SEQ ID NO: 1724432 - DNA, 15 bp, Homo sapiens
aataaacatctgtgg

SEQ ID NO: 1724433 - DNA, 15 bp, Homo sapiens
ataaacatctgtggc

SEQ ID NO: 1724434 - DNA, 15 bp, Homo sapiens
taaacatctgtggcc

SEQ ID NO: 1724435 - DNA, 15 bp, Homo sapiens
aaacatctgtggcca

SEQ ID NO: 1724436 - DNA, 15 bp, Homo sapiens
aacatctgtggccag

SEQ ID NO: 1724437 - DNA, 15 bp, Homo sapiens
acatctgtggccagt

SEQ ID NO: 1724438 - DNA, 15 bp, Homo sapiens
catctgtggccagtg

SEQ ID NO: 1724439 - DNA, 15 bp, Homo sapiens
atctgtggccagtgg

SEQ ID NO: 1724440 - DNA, 15 bp, Homo sapiens
tctgtggccagtggc

SEQ ID NO: 1724441 - DNA, 15 bp, Homo sapiens
ctgtggccagtggct

SEQ ID NO: 1724442 - DNA, 15 bp, Homo sapiens
tgtggccagtggcta

SEQ ID NO: 1724443 - DNA, 15 bp, Homo sapiens
gtggccagtggctac

SEQ ID NO: 1724444 - DNA, 15 bp, Homo sapiens
tggccagtggctact

SEQ ID NO: 1724445 - DNA, 15 bp, Homo sapiens
ggccagtggctacta

SEQ ID NO: 1724446 - DNA, 15 bp, Homo sapiens
gccagtggctactat

SEQ ID NO: 1724447 - DNA, 15 bp, Homo sapiens
ccagtggctactata

SEQ ID NO: 1724448 - DNA, 15 bp, Homo sapiens
cagtggctactatat

SEQ ID NO: 1724449 - DNA, 15 bp, Homo sapiens
agtggctactatatt

SEQ ID NO: 1724450 - DNA, 15 bp, Homo sapiens
gtggctactatattg

SEQ ID NO: 1724451 - DNA, 15 bp, Homo sapiens
tggctactatattgg

SEQ ID NO: 1724452 - DNA, 15 bp, Homo sapiens
ggctactatattgga

SEQ ID NO: 1724453 - DNA, 15 bp, Homo sapiens
gctactatattggac

SEQ ID NO: 1724454 - DNA, 15 bp, Homo sapiens
ctactatattggaca

SEQ ID NO: 1724455 - DNA, 15 bp, Homo sapiens
tactatattggacag

SEQ ID NO: 1724456 - DNA, 15 bp, Homo sapiens
actatattggacagc

SEQ ID NO: 1724457 - DNA, 15 bp, Homo sapiens
ctatattggacagca

SEQ ID NO: 1724458 - DNA, 15 bp, Homo sapiens
tatattggacagcac

SEQ ID NO: 1724459 - DNA, 15 bp, Homo sapiens
atattggacagcaca

SEQ ID NO: 1724460 - DNA, 15 bp, Homo sapiens
tattggacagcacag

SEQ ID NO: 1724461 - DNA, 15 bp, Homo sapiens
attggacagcacaga

SEQ ID NO: 1724462 - DNA, 15 bp, Homo sapiens
ttggacagcacagat

SEQ ID NO: 1724463 - DNA, 15 bp, Homo sapiens
tggacagcacagata

SEQ ID NO: 1724464 - DNA, 15 bp, Homo sapiens
ggacagcacagatag

SEQ ID NO: 1724465 - DNA, 15 bp, Homo sapiens
gacagcacagataga

SEQ ID NO: 1724466 - DNA, 15 bp, Homo sapiens
acagcacagatagag

SEQ ID NO: 1724467 - DNA, 15 bp, Homo sapiens
cagatagagaacatc

SEQ ID NO: 1724468 - DNA, 15 bp, Homo sapiens
agatagagaacatct

SEQ ID NO: 1724469 - DNA, 15 bp, Homo sapiens
gatagagaacatctc

SEQ ID NO: 1724470 - DNA, 15 bp, Homo sapiens
atagagaacatctcc

SEQ ID NO: 1724471 - DNA, 15 bp, Homo sapiens
tagagaacatctcca

SEQ ID NO: 1724472 - DNA, 15 bp, Homo sapiens
agagaacatctccat

SEQ ID NO: 1724473 - DNA, 15 bp, Homo sapiens
gagaacatctccatc

SEQ ID NO: 1724474 - DNA, 15 bp, Homo sapiens
agaacatctccatca

SEQ ID NO: 1724475 - DNA, 15 bp, Homo sapiens
gaacatctccatcac

SEQ ID NO: 1724476 - DNA, 15 bp, Homo sapiens
aacatctccatcact

SEQ ID NO: 1724477 - DNA, 15 bp, Homo sapiens
acatctccatcactg

SEQ ID NO: 1724478 - DNA, 15 bp, Homo sapiens
catctccatcactgt

SEQ ID NO: 1724479 - DNA, 15 bp, Homo sapiens
atctccatcactgta

SEQ ID NO: 1724480 - DNA, 15 bp, Homo sapiens
tctccatcactgtaa

SEQ ID NO: 1724481 - DNA, 15 bp, Homo sapiens
ctccatcactgtaaa

SEQ ID NO: 1724482 - DNA, 15 bp, Homo sapiens
tccatcactgtaaaa

SEQ ID NO: 1724483 - DNA, 15 bp, Homo sapiens
ccatcactgtaaaag

SEQ ID NO: 1724484 - DNA, 15 bp, Homo sapiens
catcactgtaaaagt

SEQ ID NO: 1724485 - DNA, 15 bp, Homo sapiens
atcactgtaaaagtt

SEQ ID NO: 1724486 - DNA, 15 bp, Homo sapiens
tcactgtaaaagttc

SEQ ID NO: 1724487 - DNA, 15 bp, Homo sapiens
cactgtaaaagttca

SEQ ID NO: 1724488 - DNA, 15 bp, Homo sapiens
actgtaaaagttcaa

SEQ ID NO: 1724489 - DNA, 15 bp, Homo sapiens
ctgtaaaagttcaat

SEQ ID NO: 1724490 - DNA, 15 bp, Homo sapiens
tgtaaaagttcaatt

SEQ ID NO: 1724491 - DNA, 15 bp, Homo sapiens
gtaaaagttcaattg

SEQ ID NO: 1724492 - DNA, 15 bp, Homo sapiens
taaaagttcaattga

SEQ ID NO: 1724493 - DNA, 15 bp, Homo sapiens
aaaagttcaattgaa

SEQ ID NO: 1724494 - DNA, 15 bp, Homo sapiens
aaagttcaattgaag

SEQ ID NO: 1724495 - DNA, 15 bp, Homo sapiens
aagttcaattgaaga

SEQ ID NO: 1724496 - DNA, 15 bp, Homo sapiens
agttcaattgaagag

SEQ ID NO: 1724497 - DNA, 15 bp, Homo sapiens
gttcaattgaagagt

SEQ ID NO: 1724498 - DNA, 15 bp, Homo sapiens
ttcaattgaagagtg

SEQ ID NO: 1724499 - DNA, 15 bp, Homo sapiens
tcaattgaagagtgc

SEQ ID NO: 1724500 - DNA, 15 bp, Homo sapiens
caattgaagagtgct

SEQ ID NO: 1724501 - DNA, 15 bp, Homo sapiens
aattgaagagtgctg

SEQ ID NO: 1724502 - DNA, 15 bp, Homo sapiens
attgaagagtgctgg

SEQ ID NO: 1724503 - DNA, 15 bp, Homo sapiens
ttgaagagtgctgga

SEQ ID NO: 1724504 - DNA, 15 bp, Homo sapiens
tgaagagtgctggaa

SEQ ID NO: 1724505 - DNA, 15 bp, Homo sapiens
gaagagtgctggaat

SEQ ID NO: 1724506 - DNA, 15 bp, Homo sapiens
aagagtgctggaata

SEQ ID NO: 1724507 - DNA, 15 bp, Homo sapiens
agagtgctggaatat

SEQ ID NO: 1724508 - DNA, 15 bp, Homo sapiens
gagtgctggaatata

SEQ ID NO: 1724509 - DNA, 15 bp, Homo sapiens
agtgctggaatatac

SEQ ID NO: 1724510 - DNA, 15 bp, Homo sapiens
gtgctggaatataca

SEQ ID NO: 1724511 - DNA, 15 bp, Homo sapiens
tgctggaatatacag

SEQ ID NO: 1724512 - DNA, 15 bp, Homo sapiens
gctggaatatacagt

SEQ ID NO: 1724513 - DNA, 15 bp, Homo sapiens
ctggaatatacagtt

SEQ ID NO: 1724514 - DNA, 15 bp, Homo sapiens
tggaatatacagttt

SEQ ID NO: 1724515 - DNA, 15 bp, Homo sapiens
ggaatatacagtttt

SEQ ID NO: 1724516 - DNA, 15 bp, Homo sapiens
gaatatacagtttta

SEQ ID NO: 1724517 - DNA, 15 bp, Homo sapiens
aatatacagttttaa

SEQ ID NO: 1724518 - DNA, 15 bp, Homo sapiens
atatacagttttaaa

SEQ ID NO: 1724519 - DNA, 15 bp, Homo sapiens
tatacagttttaaaa

SEQ ID NO: 1724520 - DNA, 15 bp, Homo sapiens
atacagttttaaaat

SEQ ID NO: 1724521 - DNA, 15 bp, Homo sapiens
tacagttttaaaata

SEQ ID NO: 1724522 - DNA, 15 bp, Homo sapiens
acagttttaaaatac

SEQ ID NO: 1724523 - DNA, 15 bp, Homo sapiens
cagttttaaaatact

SEQ ID NO: 1724524 - DNA, 15 bp, Homo sapiens
agttttaaaatactt

SEQ ID NO: 1724525 - DNA, 15 bp, Homo sapiens
gttttaaaatactta

SEQ ID NO: 1724526 - DNA, 15 bp, Homo sapiens
tttaaaatacttaag

SEQ ID NO: 1724527 - DNA, 15 bp, Homo sapiens
ttaaaatacttaaga

SEQ ID NO: 1724528 - DNA, 15 bp, Homo sapiens
taaaatacttaagaa

SEQ ID NO: 1724529 - DNA, 15 bp, Homo sapiens
aaaatacttaagaaa

SEQ ID NO: 1724530 - DNA, 15 bp, Homo sapiens
aaatacttaagaaaa

SEQ ID NO: 1724531 - DNA, 15 bp, Homo sapiens
aatacttaagaaaag

SEQ ID NO: 1724532 - DNA, 15 bp, Homo sapiens
atacttaagaaaaga

SEQ ID NO: 1724533 - DNA, 15 bp, Homo sapiens
tacttaagaaaagaa

SEQ ID NO: 1724534 - DNA, 15 bp, Homo sapiens
acttaagaaaagaat

SEQ ID NO: 1724535 - DNA, 15 bp, Homo sapiens
cttaagaaaagaatc

SEQ ID NO: 1724536 - DNA, 15 bp, Homo sapiens
ttaagaaaagaatct

SEQ ID NO: 1724537 - DNA, 15 bp, Homo sapiens
taagaaaagaatctc

SEQ ID NO: 1724538 - DNA, 15 bp, Homo sapiens
aagaaaagaatctca

SEQ ID NO: 1724539 - DNA, 15 bp, Homo sapiens
agaaaagaatctcat

SEQ ID NO: 1724540 - DNA, 15 bp, Homo sapiens
gaaaagaatctcatt

SEQ ID NO: 1724541 - DNA, 15 bp, Homo sapiens
aaaagaatctcattt

SEQ ID NO: 1724542 - DNA, 15 bp, Homo sapiens
aaagaatctcatttt

SEQ ID NO: 1724543 - DNA, 15 bp, Homo sapiens
aagaatctcattttt

SEQ ID NO: 1724544 - DNA, 15 bp, Homo sapiens
agaatctcattttta

SEQ ID NO: 1724545 - DNA, 15 bp, Homo sapiens
gaatctcatttttag

SEQ ID NO: 1724546 - DNA, 15 bp, Homo sapiens
aatctcatttttaga

SEQ ID NO: 1724547 - DNA, 15 bp, Homo sapiens
atctcatttttagaa

SEQ ID NO: 1724548 - DNA, 15 bp, Homo sapiens
tctcatttttagaac

SEQ ID NO: 1724549 - DNA, 15 bp, Homo sapiens
ctcatttttagaacc

SEQ ID NO: 1724550 - DNA, 15 bp, Homo sapiens
tcatttttagaacca

SEQ ID NO: 1724551 - DNA, 15 bp, Homo sapiens
catttttagaaccaa

SEQ ID NO: 1724552 - DNA, 15 bp, Homo sapiens
atttttagaaccaag

SEQ ID NO: 1724553 - DNA, 15 bp, Homo sapiens
tttttagaaccaagt

SEQ ID NO: 1724554 - DNA, 15 bp, Homo sapiens
ttttagaaccaagtc

SEQ ID NO: 1724555 - DNA, 15 bp, Homo sapiens
tttagaaccaagtca

SEQ ID NO: 1724556 - DNA, 15 bp, Homo sapiens
ttagaaccaagtcac

SEQ ID NO: 1724557 - DNA, 15 bp, Homo sapiens
tagaaccaagtcact

SEQ ID NO: 1724558 - DNA, 15 bp, Homo sapiens
agaaccaagtcactt

SEQ ID NO: 1724559 - DNA, 15 bp, Homo sapiens
gaaccaagtcacttg

SEQ ID NO: 1724560 - DNA, 15 bp, Homo sapiens
aaccaagtcacttga

SEQ ID NO: 1724561 - DNA, 15 bp, Homo sapiens
accaagtcacttgac

SEQ ID NO: 1724562 - DNA, 15 bp, Homo sapiens
ccaagtcacttgact

SEQ ID NO: 1724563 - DNA, 15 bp, Homo sapiens
caagtcacttgactt

SEQ ID NO: 1724564 - DNA, 15 bp, Homo sapiens
aagtcacttgacttt

SEQ ID NO: 1724565 - DNA, 15 bp, Homo sapiens
agtcacttgactttt

SEQ ID NO: 1724566 - DNA, 15 bp, Homo sapiens
gtcacttgacttttt

SEQ ID NO: 1724567 - DNA, 15 bp, Homo sapiens
tcacttgactttttc

SEQ ID NO: 1724568 - DNA, 15 bp, Homo sapiens
cacttgactttttct

SEQ ID NO: 1724569 - DNA, 15 bp, Homo sapiens
acttgactttttctt

SEQ ID NO: 1724570 - DNA, 15 bp, Homo sapiens
cttgactttttctta

SEQ ID NO: 1724571 - DNA, 15 bp, Homo sapiens
ttgactttttcttaa

SEQ ID NO: 1724572 - DNA, 15 bp, Homo sapiens
tgactttttcttaaa

SEQ ID NO: 1724573 - DNA, 15 bp, Homo sapiens
gactttttcttaaac

SEQ ID NO: 1724574 - DNA, 15 bp, Homo sapiens
actttttcttaaacc

SEQ ID NO: 1724575 - DNA, 15 bp, Homo sapiens
ctttttcttaaacca

SEQ ID NO: 1724576 - DNA, 15 bp, Homo sapiens
tttttcttaaaccaa

SEQ ID NO: 1724577 - DNA, 15 bp, Homo sapiens
ttttcttaaaccaag

SEQ ID NO: 1724578 - DNA, 15 bp, Homo sapiens
tttcttaaaccaaga

SEQ ID NO: 1724579 - DNA, 15 bp, Homo sapiens
ttcttaaaccaagat

SEQ ID NO: 1724580 - DNA, 15 bp, Homo sapiens
tcttaaaccaagatt

SEQ ID NO: 1724581 - DNA, 15 bp, Homo sapiens
cttaaaccaagattt

SEQ ID NO: 1724582 - DNA, 15 bp, Homo sapiens
ttaaaccaagatttt

SEQ ID NO: 1724583 - DNA, 15 bp, Homo sapiens
taaaccaagattttt

SEQ ID NO: 1724584 - DNA, 15 bp, Homo sapiens
aaaccaagatttttg

SEQ ID NO: 1724585 - DNA, 15 bp, Homo sapiens
aaccaagatttttgt

SEQ ID NO: 1724586 - DNA, 15 bp, Homo sapiens
accaagatttttgta

SEQ ID NO: 1724587 - DNA, 15 bp, Homo sapiens
ccaagatttttgtat

SEQ ID NO: 1724588 - DNA, 15 bp, Homo sapiens
caagatttttgtatg

SEQ ID NO: 1724589 - DNA, 15 bp, Homo sapiens
aagatttttgtatgt

SEQ ID NO: 1724590 - DNA, 15 bp, Homo sapiens
agatttttgtatgta

SEQ ID NO: 1724591 - DNA, 15 bp, Homo sapiens
gatttttgtatgtat

SEQ ID NO: 1724592 - DNA, 15 bp, Homo sapiens
atttttgtatgtatg

SEQ ID NO: 1724593 - DNA, 15 bp, Homo sapiens
tttttgtatgtatgt

SEQ ID NO: 1724594 - DNA, 15 bp, Homo sapiens
ttttgtatgtatgta

SEQ ID NO: 1724595 - DNA, 15 bp, Homo sapiens
tttgtatgtatgtac

SEQ ID NO: 1724596 - DNA, 15 bp, Homo sapiens
ttgtatgtatgtacc

SEQ ID NO: 1724597 - DNA, 15 bp, Homo sapiens
tgtatgtatgtacca

SEQ ID NO: 1724598 - DNA, 15 bp, Homo sapiens
gtatgtatgtaccaa

SEQ ID NO: 1724599 - DNA, 15 bp, Homo sapiens
tatgtatgtaccaat

SEQ ID NO: 1724600 - DNA, 15 bp, Homo sapiens
atgtatgtaccaatt

SEQ ID NO: 1724601 - DNA, 15 bp, Homo sapiens
tgtatgtaccaattt

SEQ ID NO: 1724602 - DNA, 15 bp, Homo sapiens
gtatgtaccaatttg

SEQ ID NO: 1724603 - DNA, 15 bp, Homo sapiens
tatgtaccaatttga

SEQ ID NO: 1724604 - DNA, 15 bp, Homo sapiens
atgtaccaatttgat

SEQ ID NO: 1724605 - DNA, 15 bp, Homo sapiens
tgtaccaatttgatc

SEQ ID NO: 1724606 - DNA, 15 bp, Homo sapiens
gtaccaatttgatct

SEQ ID NO: 1724607 - DNA, 15 bp, Homo sapiens
taccaatttgatctt

SEQ ID NO: 1724608 - DNA, 15 bp, Homo sapiens
accaatttgatcttg

SEQ ID NO: 1724609 - DNA, 15 bp, Homo sapiens
ccaatttgatcttga

SEQ ID NO: 1724610 - DNA, 15 bp, Homo sapiens
caatttgatcttgaa

SEQ ID NO: 1724611 - DNA, 15 bp, Homo sapiens
aatttgatcttgaat

SEQ ID NO: 1724612 - DNA, 15 bp, Homo sapiens
atttgatcttgaatt

SEQ ID NO: 1724613 - DNA, 15 bp, Homo sapiens
tttgatcttgaattt

SEQ ID NO: 1724614 - DNA, 15 bp, Homo sapiens
ttgatcttgaattta

SEQ ID NO: 1724615 - DNA, 15 bp, Homo sapiens
tgatcttgaatttat

SEQ ID NO: 1724616 - DNA, 15 bp, Homo sapiens
gatcttgaatttatt

SEQ ID NO: 1724617 - DNA, 15 bp, Homo sapiens
atcttgaatttattt

SEQ ID NO: 1724618 - DNA, 15 bp, Homo sapiens
tcttgaatttattta

SEQ ID NO: 1724619 - DNA, 15 bp, Homo sapiens
cttgaatttatttaa

SEQ ID NO: 1724620 - DNA, 15 bp, Homo sapiens
ttgaatttatttaaa

SEQ ID NO: 1724621 - DNA, 15 bp, Homo sapiens
tgaatttatttaaaa

SEQ ID NO: 1724622 - DNA, 15 bp, Homo sapiens
gaatttatttaaaaa

SEQ ID NO: 1724623 - DNA, 15 bp, Homo sapiens
aatttatttaaaaat

SEQ ID NO: 1724624 - DNA, 15 bp, Homo sapiens
atttatttaaaaatt

SEQ ID NO: 1724625 - DNA, 15 bp, Homo sapiens
tttatttaaaaattt

SEQ ID NO: 1724626 - DNA, 15 bp, Homo sapiens
ttatttaaaaatttt

SEQ ID NO: 1724627 - DNA, 15 bp, Homo sapiens
tatttaaaaattttg

SEQ ID NO: 1724628 - DNA, 15 bp, Homo sapiens
atttaaaaattttga

SEQ ID NO: 1724629 - DNA, 15 bp, Homo sapiens
tttaaaaattttgaa

SEQ ID NO: 1724630 - DNA, 15 bp, Homo sapiens
ttaaaaattttgaaa

SEQ ID NO: 1724631 - DNA, 15 bp, Homo sapiens
taaaaattttgaaaa

SEQ ID NO: 1724632 - DNA, 15 bp, Homo sapiens
aaaaattttgaaaaa

SEQ ID NO: 1724633 - DNA, 15 bp, Homo sapiens
aaaattttgaaaaaa

SEQ ID NO: 1724634 - DNA, 15 bp, Homo sapiens
aaattttgaaaaaat

SEQ ID NO: 1724635 - DNA, 15 bp, Homo sapiens
aattttgaaaaaatg

SEQ ID NO: 1724636 - DNA, 15 bp, Homo sapiens
attttgaaaaaatgt

SEQ ID NO: 1724637 - DNA, 15 bp, Homo sapiens
ttttgaaaaaatgta

SEQ ID NO: 1724638 - DNA, 15 bp, Homo sapiens
tttgaaaaaatgtaa

SEQ ID NO: 1724639 - DNA, 15 bp, Homo sapiens
ttgaaaaaatgtaaa

SEQ ID NO: 1724640 - DNA, 15 bp, Homo sapiens
tgaaaaaatgtaaag

SEQ ID NO: 1724641 - DNA, 15 bp, Homo sapiens
gaaaaaatgtaaagc

SEQ ID NO: 1724642 - DNA, 15 bp, Homo sapiens
aaaaaatgtaaagca

SEQ ID NO: 1724643 - DNA, 15 bp, Homo sapiens
aaaaatgtaaagcat

SEQ ID NO: 1724644 - DNA, 15 bp, Homo sapiens
aaaatgtaaagcatt

SEQ ID NO: 1724645 - DNA, 15 bp, Homo sapiens
aaatgtaaagcattt

SEQ ID NO: 1724646 - DNA, 15 bp, Homo sapiens
aatgtaaagcatttc

SEQ ID NO: 1724647 - DNA, 15 bp, Homo sapiens
atgtaaagcatttca

SEQ ID NO: 1724648 - DNA, 15 bp, Homo sapiens
tgtaaagcatttcaa

SEQ ID NO: 1724649 - DNA, 15 bp, Homo sapiens
gtaaagcatttcaac

SEQ ID NO: 1724650 - DNA, 15 bp, Homo sapiens
taaagcatttcaaca

SEQ ID NO: 1724651 - DNA, 15 bp, Homo sapiens
aaagcatttcaacat

SEQ ID NO: 1724652 - DNA, 15 bp, Homo sapiens
aagcatttcaacatt

SEQ ID NO: 1724653 - DNA, 15 bp, Homo sapiens
agcatttcaacattt

SEQ ID NO: 1724654 - DNA, 15 bp, Homo sapiens
atttcaacatttgac

SEQ ID NO: 1724655 - DNA, 15 bp, Homo sapiens
tttcaacatttgact

SEQ ID NO: 1724656 - DNA, 15 bp, Homo sapiens
ttcaacatttgactt

SEQ ID NO: 1724657 - DNA, 15 bp, Homo sapiens
tcaacatttgacttt

SEQ ID NO: 1724658 - DNA, 15 bp, Homo sapiens
caacatttgactttt

SEQ ID NO: 1724659 - DNA, 15 bp, Homo sapiens
aacatttgactttta

SEQ ID NO: 1724660 - DNA, 15 bp, Homo sapiens
acatttgacttttag

SEQ ID NO: 1724661 - DNA, 15 bp, Homo sapiens
catttgacttttagt

SEQ ID NO: 1724662 - DNA, 15 bp, Homo sapiens
atttgacttttagtt

SEQ ID NO: 1724663 - DNA, 15 bp, Homo sapiens
tttgacttttagttt

SEQ ID NO: 1724664 - DNA, 15 bp, Homo sapiens
ttgacttttagtttc

SEQ ID NO: 1724665 - DNA, 15 bp, Homo sapiens
tgacttttagtttca

SEQ ID NO: 1724666 - DNA, 15 bp, Homo sapiens
gacttttagtttcaa

SEQ ID NO: 1724667 - DNA, 15 bp, Homo sapiens
acttttagtttcaag

SEQ ID NO: 1724668 - DNA, 15 bp, Homo sapiens
cttttagtttcaagg

SEQ ID NO: 1724669 - DNA, 15 bp, Homo sapiens
ttttagtttcaagga

SEQ ID NO: 1724670 - DNA, 15 bp, Homo sapiens
tttagtttcaaggac

SEQ ID NO: 1724671 - DNA, 15 bp, Homo sapiens
ttagtttcaaggaca

SEQ ID NO: 1724672 - DNA, 15 bp, Homo sapiens
tagtttcaaggacat

SEQ ID NO: 1724673 - DNA, 15 bp, Homo sapiens
agtttcaaggacatc

SEQ ID NO: 1724674 - DNA, 15 bp, Homo sapiens
gtttcaaggacatct

SEQ ID NO: 1724675 - DNA, 15 bp, Homo sapiens
tttcaaggacatctt

SEQ ID NO: 1724676 - DNA, 15 bp, Homo sapiens
ttcaaggacatctta

SEQ ID NO: 1724677 - DNA, 15 bp, Homo sapiens
tcaaggacatcttat

SEQ ID NO: 1724678 - DNA, 15 bp, Homo sapiens
caaggacatcttata

SEQ ID NO: 1724679 - DNA, 15 bp, Homo sapiens
aaggacatcttataa

SEQ ID NO: 1724680 - DNA, 15 bp, Homo sapiens
aggacatcttataac

SEQ ID NO: 1724681 - DNA, 15 bp, Homo sapiens
ggacatcttataaca

SEQ ID NO: 1724682 - DNA, 15 bp, Homo sapiens
gacatcttataacaa

SEQ ID NO: 1724683 - DNA, 15 bp, Homo sapiens
acatcttataacaat

SEQ ID NO: 1724684 - DNA, 15 bp, Homo sapiens
catcttataacaatt

SEQ ID NO: 1724685 - DNA, 15 bp, Homo sapiens
atcttataacaattc

SEQ ID NO: 1724686 - DNA, 15 bp, Homo sapiens
tcttataacaattct

SEQ ID NO: 1724687 - DNA, 15 bp, Homo sapiens
cttataacaattctt

SEQ ID NO: 1724688 - DNA, 15 bp, Homo sapiens
ttataacaattcttt

SEQ ID NO: 1724689 - DNA, 15 bp, Homo sapiens
tataacaattctttt

SEQ ID NO: 1724690 - DNA, 15 bp, Homo sapiens
ataacaattctttta

SEQ ID NO: 1724691 - DNA, 15 bp, Homo sapiens
taacaattcttttaa

SEQ ID NO: 1724692 - DNA, 15 bp, Homo sapiens
aacaattcttttaat

SEQ ID NO: 1724693 - DNA, 15 bp, Homo sapiens
acaattcttttaatc

SEQ ID NO: 1724694 - DNA, 15 bp, Homo sapiens
caattcttttaatca

SEQ ID NO: 1724695 - DNA, 15 bp, Homo sapiens
aattcttttaatcac

SEQ ID NO: 1724696 - DNA, 15 bp, Homo sapiens
attcttttaatcacc

SEQ ID NO: 1724697 - DNA, 15 bp, Homo sapiens
ttcttttaatcacca

SEQ ID NO: 1724698 - DNA, 15 bp, Homo sapiens
tcttttaatcaccat

SEQ ID NO: 1724699 - DNA, 15 bp, Homo sapiens
cttttaatcaccatc

SEQ ID NO: 1724700 - DNA, 15 bp, Homo sapiens
ttttaatcaccatct

SEQ ID NO: 1724701 - DNA, 15 bp, Homo sapiens
tttaatcaccatctg

SEQ ID NO: 1724702 - DNA, 15 bp, Homo sapiens
ttaatcaccatctgt

SEQ ID NO: 1724703 - DNA, 15 bp, Homo sapiens
taatcaccatctgtt

SEQ ID NO: 1724704 - DNA, 15 bp, Homo sapiens
aatcaccatctgttt

SEQ ID NO: 1724705 - DNA, 15 bp, Homo sapiens
atcaccatctgtttt

SEQ ID NO: 1724706 - DNA, 15 bp, Homo sapiens
tcaccatctgtttta

SEQ ID NO: 1724707 - DNA, 15 bp, Homo sapiens
caccatctgttttat

SEQ ID NO: 1724708 - DNA, 15 bp, Homo sapiens
accatctgttttata

SEQ ID NO: 1724709 - DNA, 15 bp, Homo sapiens
ccatctgttttataa

SEQ ID NO: 1724710 - DNA, 15 bp, Homo sapiens
catctgttttataat

SEQ ID NO: 1724711 - DNA, 15 bp, Homo sapiens
atctgttttataatg

SEQ ID NO: 1724712 - DNA, 15 bp, Homo sapiens
tctgttttataatga

SEQ ID NO: 1724713 - DNA, 15 bp, Homo sapiens
ctgttttataatgaa

SEQ ID NO: 1724714 - DNA, 15 bp, Homo sapiens
tgttttataatgaaa

SEQ ID NO: 1724715 - DNA, 15 bp, Homo sapiens
gttttataatgaaat

SEQ ID NO: 1724716 - DNA, 15 bp, Homo sapiens
ttttataatgaaata

SEQ ID NO: 1724717 - DNA, 15 bp, Homo sapiens
tttataatgaaatat

SEQ ID NO: 1724718 - DNA, 15 bp, Homo sapiens
ttataatgaaatatg

SEQ ID NO: 1724719 - DNA, 15 bp, Homo sapiens
tataatgaaatatgt

SEQ ID NO: 1724720 - DNA, 15 bp, Homo sapiens
ataatgaaatatgtc

SEQ ID NO: 1724721 - DNA, 15 bp, Homo sapiens
taatgaaatatgtct

SEQ ID NO: 1724722 - DNA, 15 bp, Homo sapiens
aatgaaatatgtcta

SEQ ID NO: 1724723 - DNA, 15 bp, Homo sapiens
atgaaatatgtctaa

SEQ ID NO: 1724724 - DNA, 15 bp, Homo sapiens
tgaaatatgtctaaa

SEQ ID NO: 1724725 - DNA, 15 bp, Homo sapiens
gaaatatgtctaaag

SEQ ID NO: 1724726 - DNA, 15 bp, Homo sapiens
aaatatgtctaaaga

SEQ ID NO: 1724727 - DNA, 15 bp, Homo sapiens
aatatgtctaaagaa

SEQ ID NO: 1724728 - DNA, 15 bp, Homo sapiens
atatgtctaaagaag

SEQ ID NO: 1724729 - DNA, 15 bp, Homo sapiens
tatgtctaaagaagg

SEQ ID NO: 1724730 - DNA, 15 bp, Homo sapiens
atgtctaaagaaggc

SEQ ID NO: 1724731 - DNA, 15 bp, Homo sapiens
tgtctaaagaaggca

SEQ ID NO: 1724732 - DNA, 15 bp, Homo sapiens
gtctaaagaaggcac

SEQ ID NO: 1724733 - DNA, 15 bp, Homo sapiens
tctaaagaaggcacc

SEQ ID NO: 1724734 - DNA, 15 bp, Homo sapiens
ctaaagaaggcacca

SEQ ID NO: 1724735 - DNA, 15 bp, Homo sapiens
taaagaaggcaccaa

SEQ ID NO: 1724736 - DNA, 15 bp, Homo sapiens
aaagaaggcaccaac

SEQ ID NO: 1724737 - DNA, 15 bp, Homo sapiens
aagaaggcaccaact

SEQ ID NO: 1724738 - DNA, 15 bp, Homo sapiens
agaaggcaccaactt

SEQ ID NO: 1724739 - DNA, 15 bp, Homo sapiens
gaaggcaccaactta

SEQ ID NO: 1724740 - DNA, 15 bp, Homo sapiens
aaggcaccaacttaa

SEQ ID NO: 1724741 - DNA, 15 bp, Homo sapiens
aggcaccaacttaac

SEQ ID NO: 1724742 - DNA, 15 bp, Homo sapiens
ggcaccaacttaacc

SEQ ID NO: 1724743 - DNA, 15 bp, Homo sapiens
gcaccaacttaacct

SEQ ID NO: 1724744 - DNA, 15 bp, Homo sapiens
caccaacttaacctt

SEQ ID NO: 1724745 - DNA, 15 bp, Homo sapiens
accaacttaaccttc

SEQ ID NO: 1724746 - DNA, 15 bp, Homo sapiens
ccaacttaaccttct

SEQ ID NO: 1724747 - DNA, 15 bp, Homo sapiens
caacttaaccttctt

SEQ ID NO: 1724748 - DNA, 15 bp, Homo sapiens
aacttaaccttctta

SEQ ID NO: 1724749 - DNA, 15 bp, Homo sapiens
acttaaccttcttag

SEQ ID NO: 1724750 - DNA, 15 bp, Homo sapiens
cttaaccttcttagg

SEQ ID NO: 1724751 - DNA, 15 bp, Homo sapiens
ttaaccttcttaggc

SEQ ID NO: 1724752 - DNA, 15 bp, Homo sapiens
taaccttcttaggca

SEQ ID NO: 1724753 - DNA, 15 bp, Homo sapiens
aaccttcttaggcag

SEQ ID NO: 1724754 - DNA, 15 bp, Homo sapiens
accttcttaggcaga

SEQ ID NO: 1724755 - DNA, 15 bp, Homo sapiens
ccttcttaggcagat

SEQ ID NO: 1724756 - DNA, 15 bp, Homo sapiens
cttcttaggcagatg

SEQ ID NO: 1724757 - DNA, 15 bp, Homo sapiens
ttcttaggcagatgt

SEQ ID NO: 1724758 - DNA, 15 bp, Homo sapiens
tcttaggcagatgtc

SEQ ID NO: 1724759 - DNA, 15 bp, Homo sapiens
cttaggcagatgtcc

SEQ ID NO: 1724760 - DNA, 15 bp, Homo sapiens
ttaggcagatgtcca

SEQ ID NO: 1724761 - DNA, 15 bp, Homo sapiens
taggcagatgtccaa

SEQ ID NO: 1724762 - DNA, 15 bp, Homo sapiens
aggcagatgtccaat

SEQ ID NO: 1724763 - DNA, 15 bp, Homo sapiens
ggcagatgtccaatc

SEQ ID NO: 1724764 - DNA, 15 bp, Homo sapiens
gcagatgtccaatca

SEQ ID NO: 1724765 - DNA, 15 bp, Homo sapiens
cagatgtccaatcaa

SEQ ID NO: 1724766 - DNA, 15 bp, Homo sapiens
agatgtccaatcaat

SEQ ID NO: 1724767 - DNA, 15 bp, Homo sapiens
gatgtccaatcaata

SEQ ID NO: 1724768 - DNA, 15 bp, Homo sapiens
atgtccaatcaatag

SEQ ID NO: 1724769 - DNA, 15 bp, Homo sapiens
tgtccaatcaatagg

SEQ ID NO: 1724770 - DNA, 15 bp, Homo sapiens
gtccaatcaataggt

SEQ ID NO: 1724771 - DNA, 15 bp, Homo sapiens
tccaatcaataggtt

SEQ ID NO: 1724772 - DNA, 15 bp, Homo sapiens
ccaatcaataggttg

SEQ ID NO: 1724773 - DNA, 15 bp, Homo sapiens
caatcaataggttgt

SEQ ID NO: 1724774 - DNA, 15 bp, Homo sapiens
aatcaataggttgtc

SEQ ID NO: 1724775 - DNA, 15 bp, Homo sapiens
atcaataggttgtca

SEQ ID NO: 1724776 - DNA, 15 bp, Homo sapiens
tcaataggttgtcaa

SEQ ID NO: 1724777 - DNA, 15 bp, Homo sapiens
caataggttgtcaaa

SEQ ID NO: 1724778 - DNA, 15 bp, Homo sapiens
aataggttgtcaaag

SEQ ID NO: 1724779 - DNA, 15 bp, Homo sapiens
ataggttgtcaaagg

SEQ ID NO: 1724780 - DNA, 15 bp, Homo sapiens
taggttgtcaaagga

SEQ ID NO: 1724781 - DNA, 15 bp, Homo sapiens
aggttgtcaaaggaa

SEQ ID NO: 1724782 - DNA, 15 bp, Homo sapiens
ggttgtcaaaggaaa

SEQ ID NO: 1724783 - DNA, 15 bp, Homo sapiens
gttgtcaaaggaaag

SEQ ID NO: 1724784 - DNA, 15 bp, Homo sapiens
ttgtcaaaggaaagg

SEQ ID NO: 1724785 - DNA, 15 bp, Homo sapiens
tgtcaaaggaaagga

SEQ ID NO: 1724786 - DNA, 15 bp, Homo sapiens
gtcaaaggaaaggaa

SEQ ID NO: 1724787 - DNA, 15 bp, Homo sapiens
tcaaaggaaaggaac

SEQ ID NO: 1724788 - DNA, 15 bp, Homo sapiens
caaaggaaaggaact

SEQ ID NO: 1724789 - DNA, 15 bp, Homo sapiens
aaaggaaaggaacta

SEQ ID NO: 1724790 - DNA, 15 bp, Homo sapiens
aaggaaaggaactaa

SEQ ID NO: 1724791 - DNA, 15 bp, Homo sapiens
aggaaaggaactaat

SEQ ID NO: 1724792 - DNA, 15 bp, Homo sapiens
ggaaaggaactaata

SEQ ID NO: 1724793 - DNA, 15 bp, Homo sapiens
gaaaggaactaatat

SEQ ID NO: 1724794 - DNA, 15 bp, Homo sapiens
aaaggaactaatatt

SEQ ID NO: 1724795 - DNA, 15 bp, Homo sapiens
aaggaactaatattc

SEQ ID NO: 1724796 - DNA, 15 bp, Homo sapiens
aggaactaatattct

SEQ ID NO: 1724797 - DNA, 15 bp, Homo sapiens
ggaactaatattctt

SEQ ID NO: 1724798 - DNA, 15 bp, Homo sapiens
gaactaatattcttc

SEQ ID NO: 1724799 - DNA, 15 bp, Homo sapiens
aactaatattcttcc

SEQ ID NO: 1724800 - DNA, 15 bp, Homo sapiens
actaatattcttcct

SEQ ID NO: 1724801 - DNA, 15 bp, Homo sapiens
ctaatattcttcctg

SEQ ID NO: 1724802 - DNA, 15 bp, Homo sapiens
taatattcttcctga

SEQ ID NO: 1724803 - DNA, 15 bp, Homo sapiens
aatattcttcctgat

SEQ ID NO: 1724804 - DNA, 15 bp, Homo sapiens
atattcttcctgata

SEQ ID NO: 1724805 - DNA, 15 bp, Homo sapiens
tattcttcctgatag

SEQ ID NO: 1724806 - DNA, 15 bp, Homo sapiens
attcttcctgatagc

SEQ ID NO: 1724807 - DNA, 15 bp, Homo sapiens
ttcttcctgatagct

SEQ ID NO: 1724808 - DNA, 15 bp, Homo sapiens
tcttcctgatagcta

SEQ ID NO: 1724809 - DNA, 15 bp, Homo sapiens
cttcctgatagctag

SEQ ID NO: 1724810 - DNA, 15 bp, Homo sapiens
ttcctgatagctagt

SEQ ID NO: 1724811 - DNA, 15 bp, Homo sapiens
tcctgatagctagtt

SEQ ID NO: 1724812 - DNA, 15 bp, Homo sapiens
cctgatagctagttt

SEQ ID NO: 1724813 - DNA, 15 bp, Homo sapiens
ctgatagctagtttc

SEQ ID NO: 1724814 - DNA, 15 bp, Homo sapiens
tgatagctagtttca

SEQ ID NO: 1724815 - DNA, 15 bp, Homo sapiens
gatagctagtttcag

SEQ ID NO: 1724816 - DNA, 15 bp, Homo sapiens
atagctagtttcagc

SEQ ID NO: 1724817 - DNA, 15 bp, Homo sapiens
tagctagtttcagca

SEQ ID NO: 1724818 - DNA, 15 bp, Homo sapiens
agctagtttcagcaa

SEQ ID NO: 1724819 - DNA, 15 bp, Homo sapiens
gctagtttcagcaat

SEQ ID NO: 1724820 - DNA, 15 bp, Homo sapiens
ctagtttcagcaata

SEQ ID NO: 1724821 - DNA, 15 bp, Homo sapiens
tagtttcagcaataa

SEQ ID NO: 1724822 - DNA, 15 bp, Homo sapiens
agtttcagcaataat

SEQ ID NO: 1724823 - DNA, 15 bp, Homo sapiens
gtttcagcaataata

SEQ ID NO: 1724824 - DNA, 15 bp, Homo sapiens
tttcagcaataataa

SEQ ID NO: 1724825 - DNA, 15 bp, Homo sapiens
ttcagcaataataaa

SEQ ID NO: 1724826 - DNA, 15 bp, Homo sapiens
tcagcaataataaat

SEQ ID NO: 1724827 - DNA, 15 bp, Homo sapiens
cagcaataataaatt

SEQ ID NO: 1724828 - DNA, 15 bp, Homo sapiens
agcaataataaatta

SEQ ID NO: 1724829 - DNA, 15 bp, Homo sapiens
gcaataataaattat

SEQ ID NO: 1724830 - DNA, 15 bp, Homo sapiens
caataataaattatt

SEQ ID NO: 1724831 - DNA, 15 bp, Homo sapiens
aataataaattattt

SEQ ID NO: 1724832 - DNA, 15 bp, Homo sapiens
ataataaattatttt

SEQ ID NO: 1724833 - DNA, 15 bp, Homo sapiens
taataaattattttg

SEQ ID NO: 1724834 - DNA, 15 bp, Homo sapiens
aataaattattttgt

SEQ ID NO: 1724835 - DNA, 15 bp, Homo sapiens
ataaattattttgta

SEQ ID NO: 1724836 - DNA, 15 bp, Homo sapiens
taaattattttgtat

SEQ ID NO: 1724837 - DNA, 15 bp, Homo sapiens
aaattattttgtatt

SEQ ID NO: 1724838 - DNA, 15 bp, Homo sapiens
aattattttgtattt

SEQ ID NO: 1724839 - DNA, 15 bp, Homo sapiens
attattttgtatttt

SEQ ID NO: 1724840 - DNA, 15 bp, Homo sapiens
ttattttgtattttt

SEQ ID NO: 1724841 - DNA, 15 bp, Homo sapiens
tattttgtatttttt

SEQ ID NO: 1724842 - DNA, 15 bp, Homo sapiens
attttgtattttttt

SEQ ID NO: 1724843 - DNA, 15 bp, Homo sapiens
tttgtattttttttc

SEQ ID NO: 1724844 - DNA, 15 bp, Homo sapiens
ttgtattttttttcc

SEQ ID NO: 1724845 - DNA, 15 bp, Homo sapiens
tgtattttttttcca

SEQ ID NO: 1724846 - DNA, 15 bp, Homo sapiens
gtattttttttccaa

SEQ ID NO: 1724847 - DNA, 15 bp, Homo sapiens
tattttttttccaaa

SEQ ID NO: 1724848 - DNA, 15 bp, Homo sapiens
attttttttccaaat

SEQ ID NO: 1724849 - DNA, 15 bp, Homo sapiens
ttttttttccaaatg

SEQ ID NO: 1724850 - DNA, 15 bp, Homo sapiens
atctatctctctctt

SEQ ID NO: 1724851 - DNA, 15 bp, Homo sapiens
tctatctctctcttc

SEQ ID NO: 1724852 - DNA, 15 bp, Homo sapiens
ctatctctctcttca

SEQ ID NO: 1724853 - DNA, 15 bp, Homo sapiens
tatctctctcttcag

SEQ ID NO: 1724854 - DNA, 15 bp, Homo sapiens
atctctctcttcagt

SEQ ID NO: 1724855 - DNA, 15 bp, Homo sapiens
tctctctcttcagtt

SEQ ID NO: 1724856 - DNA, 15 bp, Homo sapiens
ctctctcttcagttc

SEQ ID NO: 1724857 - DNA, 15 bp, Homo sapiens
tctctcttcagttct

SEQ ID NO: 1724858 - DNA, 15 bp, Homo sapiens
ctctcttcagttcta

SEQ ID NO: 1724859 - DNA, 15 bp, Homo sapiens
tctcttcagttctaa

SEQ ID NO: 1724860 - DNA, 15 bp, Homo sapiens
ctcttcagttctaaa

SEQ ID NO: 1724861 - DNA, 15 bp, Homo sapiens
tcttcagttctaaag

SEQ ID NO: 1724862 - DNA, 15 bp, Homo sapiens
cttcagttctaaaga

SEQ ID NO: 1724863 - DNA, 15 bp, Homo sapiens
ttcagttctaaagat

SEQ ID NO: 1724864 - DNA, 15 bp, Homo sapiens
tcagttctaaagata

SEQ ID NO: 1724865 - DNA, 15 bp, Homo sapiens
cagttctaaagatat

SEQ ID NO: 1724866 - DNA, 15 bp, Homo sapiens
agttctaaagatatg

SEQ ID NO: 1724867 - DNA, 15 bp, Homo sapiens
gttctaaagatatgt

SEQ ID NO: 1724868 - DNA, 15 bp, Homo sapiens
ttctaaagatatgtg

SEQ ID NO: 1724869 - DNA, 15 bp, Homo sapiens
tctaaagatatgtgc

SEQ ID NO: 1724870 - DNA, 15 bp, Homo sapiens
ctaaagatatgtgct

SEQ ID NO: 1724871 - DNA, 15 bp, Homo sapiens
taaagatatgtgctt

SEQ ID NO: 1724872 - DNA, 15 bp, Homo sapiens
aaagatatgtgcttt

SEQ ID NO: 1724873 - DNA, 15 bp, Homo sapiens
aagatatgtgcttta

SEQ ID NO: 1724874 - DNA, 15 bp, Homo sapiens
agatatgtgctttat

SEQ ID NO: 1724875 - DNA, 15 bp, Homo sapiens
gatatgtgctttata

SEQ ID NO: 1724876 - DNA, 15 bp, Homo sapiens
atatgtgctttatat

SEQ ID NO: 1724877 - DNA, 15 bp, Homo sapiens
tatgtgctttatata

SEQ ID NO: 1724878 - DNA, 15 bp, Homo sapiens
atgtgctttatatat

SEQ ID NO: 1724879 - DNA, 15 bp, Homo sapiens
tgtgctttatatatc

SEQ ID NO: 1724880 - DNA, 15 bp, Homo sapiens
gtgctttatatatct

SEQ ID NO: 1724881 - DNA, 15 bp, Homo sapiens
tgctttatatatctg

SEQ ID NO: 1724882 - DNA, 15 bp, Homo sapiens
gctttatatatctgg

SEQ ID NO: 1724883 - DNA, 15 bp, Homo sapiens
ctttatatatctgga

SEQ ID NO: 1724884 - DNA, 15 bp, Homo sapiens
tttatatatctggat

SEQ ID NO: 1724885 - DNA, 15 bp, Homo sapiens
ttatatatctggatg

SEQ ID NO: 1724886 - DNA, 15 bp, Homo sapiens
tatatatctggatgc

SEQ ID NO: 1724887 - DNA, 15 bp, Homo sapiens
atatatctggatgct

SEQ ID NO: 1724888 - DNA, 15 bp, Homo sapiens
tatatctggatgctc

SEQ ID NO: 1724889 - DNA, 15 bp, Homo sapiens
atatctggatgctcc

SEQ ID NO: 1724890 - DNA, 15 bp, Homo sapiens
tatctggatgctcca

SEQ ID NO: 1724891 - DNA, 15 bp, Homo sapiens
atctggatgctccag

SEQ ID NO: 1724892 - DNA, 15 bp, Homo sapiens
tctggatgctccagt

SEQ ID NO: 1724893 - DNA, 15 bp, Homo sapiens
ctggatgctccagtg

SEQ ID NO: 1724894 - DNA, 15 bp, Homo sapiens
tggatgctccagtgt

SEQ ID NO: 1724895 - DNA, 15 bp, Homo sapiens
ggatgctccagtgtt

SEQ ID NO: 1724896 - DNA, 15 bp, Homo sapiens
gatgctccagtgttg

SEQ ID NO: 1724897 - DNA, 15 bp, Homo sapiens
atgctccagtgttgg

SEQ ID NO: 1724898 - DNA, 15 bp, Homo sapiens
tgctccagtgttggg

SEQ ID NO: 1724899 - DNA, 15 bp, Homo sapiens
gctccagtgttgggt

SEQ ID NO: 1724900 - DNA, 15 bp, Homo sapiens
ctccagtgttgggtg

SEQ ID NO: 1724901 - DNA, 15 bp, Homo sapiens
tccagtgttgggtgc

SEQ ID NO: 1724902 - DNA, 15 bp, Homo sapiens
ccagtgttgggtgca

SEQ ID NO: 1724903 - DNA, 15 bp, Homo sapiens
cagtgttgggtgcat

SEQ ID NO: 1724904 - DNA, 15 bp, Homo sapiens
agtgttgggtgcata

SEQ ID NO: 1724905 - DNA, 15 bp, Homo sapiens
gtgttgggtgcatat

SEQ ID NO: 1724906 - DNA, 15 bp, Homo sapiens
tgttgggtgcatata

SEQ ID NO: 1724907 - DNA, 15 bp, Homo sapiens
gttgggtgcatatat

SEQ ID NO: 1724908 - DNA, 15 bp, Homo sapiens
ttgggtgcatatata

SEQ ID NO: 1724909 - DNA, 15 bp, Homo sapiens
tgggtgcatatatat

SEQ ID NO: 1724910 - DNA, 15 bp, Homo sapiens
gggtgcatatatatt

SEQ ID NO: 1724911 - DNA, 15 bp, Homo sapiens
ggtgcatatatattt

SEQ ID NO: 1724912 - DNA, 15 bp, Homo sapiens
gtgcatatatattta

SEQ ID NO: 1724913 - DNA, 15 bp, Homo sapiens
tgcatatatatttaa

SEQ ID NO: 1724914 - DNA, 15 bp, Homo sapiens
gcatatatatttaaa

SEQ ID NO: 1724915 - DNA, 15 bp, Homo sapiens
catatatatttaaaa

SEQ ID NO: 1724916 - DNA, 15 bp, Homo sapiens
atatatatttaaaat

SEQ ID NO: 1724917 - DNA, 15 bp, Homo sapiens
tatatatttaaaatt

SEQ ID NO: 1724918 - DNA, 15 bp, Homo sapiens
atatatttaaaattg

SEQ ID NO: 1724919 - DNA, 15 bp, Homo sapiens
tatatttaaaattgt

SEQ ID NO: 1724920 - DNA, 15 bp, Homo sapiens
atatttaaaattgtt

SEQ ID NO: 1724921 - DNA, 15 bp, Homo sapiens
tatttaaaattgtta

SEQ ID NO: 1724922 - DNA, 15 bp, Homo sapiens
atttaaaattgttat

SEQ ID NO: 1724923 - DNA, 15 bp, Homo sapiens
tttaaaattgttata

SEQ ID NO: 1724924 - DNA, 15 bp, Homo sapiens
ttaaaattgttatat

SEQ ID NO: 1724925 - DNA, 15 bp, Homo sapiens
taaaattgttatatc

SEQ ID NO: 1724926 - DNA, 15 bp, Homo sapiens
aaaattgttatatcc

SEQ ID NO: 1724927 - DNA, 15 bp, Homo sapiens
aaattgttatatcct

SEQ ID NO: 1724928 - DNA, 15 bp, Homo sapiens
aattgttatatcctc

SEQ ID NO: 1724929 - DNA, 15 bp, Homo sapiens
attgttatatcctct

SEQ ID NO: 1724930 - DNA, 15 bp, Homo sapiens
ttgttatatcctctt

SEQ ID NO: 1724931 - DNA, 15 bp, Homo sapiens
tgttatatcctcttg

SEQ ID NO: 1724932 - DNA, 15 bp, Homo sapiens
gttatatcctcttgc

SEQ ID NO: 1724933 - DNA, 15 bp, Homo sapiens
ttatatcctcttgct

SEQ ID NO: 1724934 - DNA, 15 bp, Homo sapiens
tatatcctcttgctg

SEQ ID NO: 1724935 - DNA, 15 bp, Homo sapiens
atatcctcttgctga

SEQ ID NO: 1724936 - DNA, 15 bp, Homo sapiens
tatcctcttgctgaa

SEQ ID NO: 1724937 - DNA, 15 bp, Homo sapiens
atcctcttgctgaat

SEQ ID NO: 1724938 - DNA, 15 bp, Homo sapiens
tcctcttgctgaatc

SEQ ID NO: 1724939 - DNA, 15 bp, Homo sapiens
cctcttgctgaatca

SEQ ID NO: 1724940 - DNA, 15 bp, Homo sapiens
ctcttgctgaatcaa

SEQ ID NO: 1724941 - DNA, 15 bp, Homo sapiens
tcttgctgaatcaac

SEQ ID NO: 1724942 - DNA, 15 bp, Homo sapiens
cttgctgaatcaacc

SEQ ID NO: 1724943 - DNA, 15 bp, Homo sapiens
ttgctgaatcaaccc

SEQ ID NO: 1724944 - DNA, 15 bp, Homo sapiens
tgctgaatcaacccc

SEQ ID NO: 1724945 - DNA, 15 bp, Homo sapiens
gctgaatcaacccct

SEQ ID NO: 1724946 - DNA, 15 bp, Homo sapiens
ctgaatcaacccctt

SEQ ID NO: 1724947 - DNA, 15 bp, Homo sapiens
tgaatcaaccccttt

SEQ ID NO: 1724948 - DNA, 15 bp, Homo sapiens
gaatcaaccccttta

SEQ ID NO: 1724949 - DNA, 15 bp, Homo sapiens
aatcaacccctttat

SEQ ID NO: 1724950 - DNA, 15 bp, Homo sapiens
atcaacccctttatc

SEQ ID NO: 1724951 - DNA, 15 bp, Homo sapiens
tcaacccctttatca

SEQ ID NO: 1724952 - DNA, 15 bp, Homo sapiens
caacccctttatcat

SEQ ID NO: 1724953 - DNA, 15 bp, Homo sapiens
aacccctttatcatt

SEQ ID NO: 1724954 - DNA, 15 bp, Homo sapiens
acccctttatcatta

SEQ ID NO: 1724955 - DNA, 15 bp, Homo sapiens
cccctttatcattat

SEQ ID NO: 1724956 - DNA, 15 bp, Homo sapiens
ccctttatcattata

SEQ ID NO: 1724957 - DNA, 15 bp, Homo sapiens
cctttatcattatat

SEQ ID NO: 1724958 - DNA, 15 bp, Homo sapiens
ctttatcattatata

SEQ ID NO: 1724959 - DNA, 15 bp, Homo sapiens
tttatcattatatag

SEQ ID NO: 1724960 - DNA, 15 bp, Homo sapiens
ttatcattatatagt

SEQ ID NO: 1724961 - DNA, 15 bp, Homo sapiens
tatcattatatagta

SEQ ID NO: 1724962 - DNA, 15 bp, Homo sapiens
atcattatatagtaa

SEQ ID NO: 1724963 - DNA, 15 bp, Homo sapiens
tcattatatagtaac

SEQ ID NO: 1724964 - DNA, 15 bp, Homo sapiens
cattatatagtaacc

SEQ ID NO: 1724965 - DNA, 15 bp, Homo sapiens
attatatagtaacct

SEQ ID NO: 1724966 - DNA, 15 bp, Homo sapiens
ttatatagtaacctt

SEQ ID NO: 1724967 - DNA, 15 bp, Homo sapiens
tatatagtaaccttg

SEQ ID NO: 1724968 - DNA, 15 bp, Homo sapiens
atatagtaaccttgt

SEQ ID NO: 1724969 - DNA, 15 bp, Homo sapiens
tatagtaaccttgtt

SEQ ID NO: 1724970 - DNA, 15 bp, Homo sapiens
atagtaaccttgttt

SEQ ID NO: 1724971 - DNA, 15 bp, Homo sapiens
tagtaaccttgtttc

SEQ ID NO: 1724972 - DNA, 15 bp, Homo sapiens
agtaaccttgtttct

SEQ ID NO: 1724973 - DNA, 15 bp, Homo sapiens
gtaaccttgtttctt

SEQ ID NO: 1724974 - DNA, 15 bp, Homo sapiens
taaccttgtttcttc

SEQ ID NO: 1724975 - DNA, 15 bp, Homo sapiens
aaccttgtttcttct

SEQ ID NO: 1724976 - DNA, 15 bp, Homo sapiens
accttgtttcttctt

SEQ ID NO: 1724977 - DNA, 15 bp, Homo sapiens
ccttgtttcttctta

SEQ ID NO: 1724978 - DNA, 15 bp, Homo sapiens
cttgtttcttcttac

SEQ ID NO: 1724979 - DNA, 15 bp, Homo sapiens
ttgtttcttcttaca

SEQ ID NO: 1724980 - DNA, 15 bp, Homo sapiens
tgtttcttcttacag

SEQ ID NO: 1724981 - DNA, 15 bp, Homo sapiens
gtttcttcttacagt

SEQ ID NO: 1724982 - DNA, 15 bp, Homo sapiens
tttcttcttacagtt

SEQ ID NO: 1724983 - DNA, 15 bp, Homo sapiens
ttcttcttacagttt

SEQ ID NO: 1724984 - DNA, 15 bp, Homo sapiens
tcttcttacagtttt

SEQ ID NO: 1724985 - DNA, 15 bp, Homo sapiens
cttcttacagttttc

SEQ ID NO: 1724986 - DNA, 15 bp, Homo sapiens
ttcttacagttttcg

SEQ ID NO: 1724987 - DNA, 15 bp, Homo sapiens
tcttacagttttcgt

SEQ ID NO: 1724988 - DNA, 15 bp, Homo sapiens
cttacagttttcgtc

SEQ ID NO: 1724989 - DNA, 15 bp, Homo sapiens
ttacagttttcgtct

SEQ ID NO: 1724990 - DNA, 15 bp, Homo sapiens
tacagttttcgtctt

SEQ ID NO: 1724991 - DNA, 15 bp, Homo sapiens
acagttttcgtcttg

SEQ ID NO: 1724992 - DNA, 15 bp, Homo sapiens
cagttttcgtcttga

SEQ ID NO: 1724993 - DNA, 15 bp, Homo sapiens
agttttcgtcttgaa

SEQ ID NO: 1724994 - DNA, 15 bp, Homo sapiens
gttttcgtcttgaaa

SEQ ID NO: 1724995 - DNA, 15 bp, Homo sapiens
ttttcgtcttgaaat

SEQ ID NO: 1724996 - DNA, 15 bp, Homo sapiens
tttcgtcttgaaatc

SEQ ID NO: 1724997 - DNA, 15 bp, Homo sapiens
ttcgtcttgaaatct

SEQ ID NO: 1724998 - DNA, 15 bp, Homo sapiens
tcgtcttgaaatcta

SEQ ID NO: 1724999 - DNA, 15 bp, Homo sapiens
cgtcttgaaatctat

SEQ ID NO: 1725000 - DNA, 15 bp, Homo sapiens
gtcttgaaatctatt

SEQ ID NO: 1725001 - DNA, 15 bp, Homo sapiens
tcttgaaatctattt

SEQ ID NO: 1725002 - DNA, 15 bp, Homo sapiens
cttgaaatctatttt

SEQ ID NO: 1725003 - DNA, 15 bp, Homo sapiens
ttgaaatctattttg

SEQ ID NO: 1725004 - DNA, 15 bp, Homo sapiens
tgaaatctattttgt

SEQ ID NO: 1725005 - DNA, 15 bp, Homo sapiens
gaaatctattttgtc

SEQ ID NO: 1725006 - DNA, 15 bp, Homo sapiens
aaatctattttgtct

SEQ ID NO: 1725007 - DNA, 15 bp, Homo sapiens
aatctattttgtctg

SEQ ID NO: 1725008 - DNA, 15 bp, Homo sapiens
atctattttgtctga

SEQ ID NO: 1725009 - DNA, 15 bp, Homo sapiens
tctattttgtctgat

SEQ ID NO: 1725010 - DNA, 15 bp, Homo sapiens
ctattttgtctgata

SEQ ID NO: 1725011 - DNA, 15 bp, Homo sapiens
tattttgtctgatac

SEQ ID NO: 1725012 - DNA, 15 bp, Homo sapiens
attttgtctgataca

SEQ ID NO: 1725013 - DNA, 15 bp, Homo sapiens
ttttgtctgatacat

SEQ ID NO: 1725014 - DNA, 15 bp, Homo sapiens
tttgtctgatacatg

SEQ ID NO: 1725015 - DNA, 15 bp, Homo sapiens
ttgtctgatacatgt

SEQ ID NO: 1725016 - DNA, 15 bp, Homo sapiens
tgtctgatacatgta

SEQ ID NO: 1725017 - DNA, 15 bp, Homo sapiens
gtctgatacatgtat

SEQ ID NO: 1725018 - DNA, 15 bp, Homo sapiens
tctgatacatgtata

SEQ ID NO: 1725019 - DNA, 15 bp, Homo sapiens
ctgatacatgtatag

SEQ ID NO: 1725020 - DNA, 15 bp, Homo sapiens
tgatacatgtatagc

SEQ ID NO: 1725021 - DNA, 15 bp, Homo sapiens
gatacatgtatagct

SEQ ID NO: 1725022 - DNA, 15 bp, Homo sapiens
atacatgtatagcta

SEQ ID NO: 1725023 - DNA, 15 bp, Homo sapiens
tacatgtatagctac

SEQ ID NO: 1725024 - DNA, 15 bp, Homo sapiens
acatgtatagctact

SEQ ID NO: 1725025 - DNA, 15 bp, Homo sapiens
catgtatagctactc

SEQ ID NO: 1725026 - DNA, 15 bp, Homo sapiens
atgtatagctactcc

SEQ ID NO: 1725027 - DNA, 15 bp, Homo sapiens
tgtatagctactcct

SEQ ID NO: 1725028 - DNA, 15 bp, Homo sapiens
gtatagctactcctc

SEQ ID NO: 1725029 - DNA, 15 bp, Homo sapiens
tatagctactcctcc

SEQ ID NO: 1725030 - DNA, 15 bp, Homo sapiens
atagctactcctcct

SEQ ID NO: 1725031 - DNA, 15 bp, Homo sapiens
tagctactcctcctc

SEQ ID NO: 1725032 - DNA, 15 bp, Homo sapiens
agctactcctcctct

SEQ ID NO: 1725033 - DNA, 15 bp, Homo sapiens
gctactcctcctctt

SEQ ID NO: 1725034 - DNA, 15 bp, Homo sapiens
ctactcctcctcttt

SEQ ID NO: 1725035 - DNA, 15 bp, Homo sapiens
tactcctcctctttt

SEQ ID NO: 1725036 - DNA, 15 bp, Homo sapiens
actcctcctcttttt

SEQ ID NO: 1725037 - DNA, 15 bp, Homo sapiens
ctcctcctctttttt

SEQ ID NO: 1725038 - DNA, 15 bp, Homo sapiens
tcctcctcttttttt

SEQ ID NO: 1725039 - DNA, 15 bp, Homo sapiens
cctcctctttttttt

SEQ ID NO: 1725040 - DNA, 15 bp, Homo sapiens
ctcctcttttttttt

SEQ ID NO: 1725041 - DNA, 15 bp, Homo sapiens
ttttttttttttgtt

SEQ ID NO: 1725042 - DNA, 15 bp, Homo sapiens
tttttttttttgttt

SEQ ID NO: 1725043 - DNA, 15 bp, Homo sapiens
ttttttttttgtttc

SEQ ID NO: 1725044 - DNA, 15 bp, Homo sapiens
tttttttttgtttcc

SEQ ID NO: 1725045 - DNA, 15 bp, Homo sapiens
ttttttttgtttcca

SEQ ID NO: 1725046 - DNA, 15 bp, Homo sapiens
tttttttgtttccat

SEQ ID NO: 1725047 - DNA, 15 bp, Homo sapiens
ttttttgtttccatt

SEQ ID NO: 1725048 - DNA, 15 bp, Homo sapiens
tttttgtttccattg

SEQ ID NO: 1725049 - DNA, 15 bp, Homo sapiens
ttttgtttccattgg

SEQ ID NO: 1725050 - DNA, 15 bp, Homo sapiens
tttgtttccattggc

SEQ ID NO: 1725051 - DNA, 15 bp, Homo sapiens
ttgtttccattggca

SEQ ID NO: 1725052 - DNA, 15 bp, Homo sapiens
tgtttccattggcat

SEQ ID NO: 1725053 - DNA, 15 bp, Homo sapiens
gtttccattggcatg

SEQ ID NO: 1725054 - DNA, 15 bp, Homo sapiens
tttccattggcatgg

SEQ ID NO: 1725055 - DNA, 15 bp, Homo sapiens
ttccattggcatgga

SEQ ID NO: 1725056 - DNA, 15 bp, Homo sapiens
tccattggcatggaa

SEQ ID NO: 1725057 - DNA, 15 bp, Homo sapiens
ccattggcatggaat

SEQ ID NO: 1725058 - DNA, 15 bp, Homo sapiens
cattggcatggaata

SEQ ID NO: 1725059 - DNA, 15 bp, Homo sapiens
attggcatggaatat

SEQ ID NO: 1725060 - DNA, 15 bp, Homo sapiens
ttggcatggaatatc

SEQ ID NO: 1725061 - DNA, 15 bp, Homo sapiens
tggcatggaatatct

SEQ ID NO: 1725062 - DNA, 15 bp, Homo sapiens
ggcatggaatatctt

SEQ ID NO: 1725063 - DNA, 15 bp, Homo sapiens
gcatggaatatcttt

SEQ ID NO: 1725064 - DNA, 15 bp, Homo sapiens
catggaatatctttt

SEQ ID NO: 1725065 - DNA, 15 bp, Homo sapiens
atggaatatcttttt

SEQ ID NO: 1725066 - DNA, 15 bp, Homo sapiens
tggaatatctttttc

SEQ ID NO: 1725067 - DNA, 15 bp, Homo sapiens
ggaatatctttttct

SEQ ID NO: 1725068 - DNA, 15 bp, Homo sapiens
gaatatctttttcta

SEQ ID NO: 1725069 - DNA, 15 bp, Homo sapiens
aatatctttttctat

SEQ ID NO: 1725070 - DNA, 15 bp, Homo sapiens
atatctttttctatc

SEQ ID NO: 1725071 - DNA, 15 bp, Homo sapiens
tatctttttctatcc

SEQ ID NO: 1725072 - DNA, 15 bp, Homo sapiens
atctttttctatccc

SEQ ID NO: 1725073 - DNA, 15 bp, Homo sapiens
tctttttctatccct

SEQ ID NO: 1725074 - DNA, 15 bp, Homo sapiens
ctttttctatccctt

SEQ ID NO: 1725075 - DNA, 15 bp, Homo sapiens
tttttctatccctta

SEQ ID NO: 1725076 - DNA, 15 bp, Homo sapiens
ttttctatcccttaa

SEQ ID NO: 1725077 - DNA, 15 bp, Homo sapiens
tttctatcccttaat

SEQ ID NO: 1725078 - DNA, 15 bp, Homo sapiens
ttctatcccttaatt

SEQ ID NO: 1725079 - DNA, 15 bp, Homo sapiens
tctatcccttaattt

SEQ ID NO: 1725080 - DNA, 15 bp, Homo sapiens
ctatcccttaatttt

SEQ ID NO: 1725081 - DNA, 15 bp, Homo sapiens
tatcccttaattttc

SEQ ID NO: 1725082 - DNA, 15 bp, Homo sapiens
atcccttaattttca

SEQ ID NO: 1725083 - DNA, 15 bp, Homo sapiens
tcccttaattttcag

SEQ ID NO: 1725084 - DNA, 15 bp, Homo sapiens
cccttaattttcagt

SEQ ID NO: 1725085 - DNA, 15 bp, Homo sapiens
ccttaattttcagtc

SEQ ID NO: 1725086 - DNA, 15 bp, Homo sapiens
cttaattttcagtct

SEQ ID NO: 1725087 - DNA, 15 bp, Homo sapiens
ttaattttcagtcta

SEQ ID NO: 1725088 - DNA, 15 bp, Homo sapiens
taattttcagtctat

SEQ ID NO: 1725089 - DNA, 15 bp, Homo sapiens
aattttcagtctatg

SEQ ID NO: 1725090 - DNA, 15 bp, Homo sapiens
attttcagtctatgt

SEQ ID NO: 1725091 - DNA, 15 bp, Homo sapiens
ttttcagtctatgtg

SEQ ID NO: 1725092 - DNA, 15 bp, Homo sapiens
tttcagtctatgtgt

SEQ ID NO: 1725093 - DNA, 15 bp, Homo sapiens
ttcagtctatgtgta

SEQ ID NO: 1725094 - DNA, 15 bp, Homo sapiens
tcagtctatgtgtat

SEQ ID NO: 1725095 - DNA, 15 bp, Homo sapiens
cagtctatgtgtatc

SEQ ID NO: 1725096 - DNA, 15 bp, Homo sapiens
agtctatgtgtatct

SEQ ID NO: 1725097 - DNA, 15 bp, Homo sapiens
gtctatgtgtatctt

SEQ ID NO: 1725098 - DNA, 15 bp, Homo sapiens
tctatgtgtatcttt

SEQ ID NO: 1725099 - DNA, 15 bp, Homo sapiens
ctatgtgtatcttta

SEQ ID NO: 1725100 - DNA, 15 bp, Homo sapiens
tatgtgtatctttat

SEQ ID NO: 1725101 - DNA, 15 bp, Homo sapiens
atgtgtatctttatg

SEQ ID NO: 1725102 - DNA, 15 bp, Homo sapiens
tgtgtatctttatgg

SEQ ID NO: 1725103 - DNA, 15 bp, Homo sapiens
gtgtatctttatgga

SEQ ID NO: 1725104 - DNA, 15 bp, Homo sapiens
tgtatctttatggat

SEQ ID NO: 1725105 - DNA, 15 bp, Homo sapiens
gtatctttatggatt

SEQ ID NO: 1725106 - DNA, 15 bp, Homo sapiens
tatctttatggatta

SEQ ID NO: 1725107 - DNA, 15 bp, Homo sapiens
atctttatggattaa

SEQ ID NO: 1725108 - DNA, 15 bp, Homo sapiens
tctttatggattaag

SEQ ID NO: 1725109 - DNA, 15 bp, Homo sapiens
ctttatggattaagt

SEQ ID NO: 1725110 - DNA, 15 bp, Homo sapiens
tttatggattaagtg

SEQ ID NO: 1725111 - DNA, 15 bp, Homo sapiens
ttatggattaagtgt

SEQ ID NO: 1725112 - DNA, 15 bp, Homo sapiens
tatggattaagtgtg

SEQ ID NO: 1725113 - DNA, 15 bp, Homo sapiens
atggattaagtgtgt

SEQ ID NO: 1725114 - DNA, 15 bp, Homo sapiens
tggattaagtgtgtt

SEQ ID NO: 1725115 - DNA, 15 bp, Homo sapiens
ggattaagtgtgttt

SEQ ID NO: 1725116 - DNA, 15 bp, Homo sapiens
gattaagtgtgtttc

SEQ ID NO: 1725117 - DNA, 15 bp, Homo sapiens
attaagtgtgtttct

SEQ ID NO: 1725118 - DNA, 15 bp, Homo sapiens
ttaagtgtgtttctt

SEQ ID NO: 1725119 - DNA, 15 bp, Homo sapiens
taagtgtgtttcttg

SEQ ID NO: 1725120 - DNA, 15 bp, Homo sapiens
aagtgtgtttcttgt

SEQ ID NO: 1725121 - DNA, 15 bp, Homo sapiens
agtgtgtttcttgtg

SEQ ID NO: 1725122 - DNA, 15 bp, Homo sapiens
gtgtgtttcttgtgg

SEQ ID NO: 1725123 - DNA, 15 bp, Homo sapiens
tgtgtttcttgtggg

SEQ ID NO: 1725124 - DNA, 15 bp, Homo sapiens
gtgtttcttgtgggc

SEQ ID NO: 1725125 - DNA, 15 bp, Homo sapiens
gtttcttgtgggcaa

SEQ ID NO: 1725126 - DNA, 15 bp, Homo sapiens
tttcttgtgggcaac

SEQ ID NO: 1725127 - DNA, 15 bp, Homo sapiens
ttcttgtgggcaaca

SEQ ID NO: 1725128 - DNA, 15 bp, Homo sapiens
tcttgtgggcaacag

SEQ ID NO: 1725129 - DNA, 15 bp, Homo sapiens
cttgtgggcaacaga

SEQ ID NO: 1725130 - DNA, 15 bp, Homo sapiens
ttgtgggcaacagat

SEQ ID NO: 1725131 - DNA, 15 bp, Homo sapiens
tgtgggcaacagatc

SEQ ID NO: 1725132 - DNA, 15 bp, Homo sapiens
gtgggcaacagatca

SEQ ID NO: 1725133 - DNA, 15 bp, Homo sapiens
tgggcaacagatcat

SEQ ID NO: 1725134 - DNA, 15 bp, Homo sapiens
gggcaacagatcatt

SEQ ID NO: 1725135 - DNA, 15 bp, Homo sapiens
ggcaacagatcattc

SEQ ID NO: 1725136 - DNA, 15 bp, Homo sapiens
gcaacagatcattcg

SEQ ID NO: 1725137 - DNA, 15 bp, Homo sapiens
caacagatcattcgg

SEQ ID NO: 1725138 - DNA, 15 bp, Homo sapiens
aacagatcattcggt

SEQ ID NO: 1725139 - DNA, 15 bp, Homo sapiens
acagatcattcggtc

SEQ ID NO: 1725140 - DNA, 15 bp, Homo sapiens
cagatcattcggtct

SEQ ID NO: 1725141 - DNA, 15 bp, Homo sapiens
agatcattcggtctt

SEQ ID NO: 1725142 - DNA, 15 bp, Homo sapiens
gatcattcggtcttg

SEQ ID NO: 1725143 - DNA, 15 bp, Homo sapiens
atcattcggtcttgt

SEQ ID NO: 1725144 - DNA, 15 bp, Homo sapiens
tcattcggtcttgtt

SEQ ID NO: 1725145 - DNA, 15 bp, Homo sapiens
cattcggtcttgttt

SEQ ID NO: 1725146 - DNA, 15 bp, Homo sapiens
attcggtcttgtttt

SEQ ID NO: 1725147 - DNA, 15 bp, Homo sapiens
ttcggtcttgttttg

SEQ ID NO: 1725148 - DNA, 15 bp, Homo sapiens
tcggtcttgttttgt

SEQ ID NO: 1725149 - DNA, 15 bp, Homo sapiens
cggtcttgttttgtg

SEQ ID NO: 1725150 - DNA, 15 bp, Homo sapiens
ggtcttgttttgtgt

SEQ ID NO: 1725151 - DNA, 15 bp, Homo sapiens
gtcttgttttgtgtt

SEQ ID NO: 1725152 - DNA, 15 bp, Homo sapiens
tcttgttttgtgttg

SEQ ID NO: 1725153 - DNA, 15 bp, Homo sapiens
cttgttttgtgttgt

SEQ ID NO: 1725154 - DNA, 15 bp, Homo sapiens
ttgttttgtgttgtt

SEQ ID NO: 1725155 - DNA, 15 bp, Homo sapiens
tgttttgtgttgttt

SEQ ID NO: 1725156 - DNA, 15 bp, Homo sapiens
gttttgtgttgtttt

SEQ ID NO: 1725157 - DNA, 15 bp, Homo sapiens
ttgtgttgttttgtt

SEQ ID NO: 1725158 - DNA, 15 bp, Homo sapiens
tgtgttgttttgttt

SEQ ID NO: 1725159 - DNA, 15 bp, Homo sapiens
gtgttgttttgtttt

SEQ ID NO: 1725160 - DNA, 15 bp, Homo sapiens
ttttgttttgtttta

SEQ ID NO: 1725161 - DNA, 15 bp, Homo sapiens
tttgttttgttttaa

SEQ ID NO: 1725162 - DNA, 15 bp, Homo sapiens
ttgttttgttttaat

SEQ ID NO: 1725163 - DNA, 15 bp, Homo sapiens
tgttttgttttaatc

SEQ ID NO: 1725164 - DNA, 15 bp, Homo sapiens
gttttgttttaatcc

SEQ ID NO: 1725165 - DNA, 15 bp, Homo sapiens
ttttgttttaatcca

SEQ ID NO: 1725166 - DNA, 15 bp, Homo sapiens
tttgttttaatccat

SEQ ID NO: 1725167 - DNA, 15 bp, Homo sapiens
ttgttttaatccatt

SEQ ID NO: 1725168 - DNA, 15 bp, Homo sapiens
tgttttaatccattc

SEQ ID NO: 1725169 - DNA, 15 bp, Homo sapiens
gttttaatccattca

SEQ ID NO: 1725170 - DNA, 15 bp, Homo sapiens
ttttaatccattcag

SEQ ID NO: 1725171 - DNA, 15 bp, Homo sapiens
tttaatccattcagt

SEQ ID NO: 1725172 - DNA, 15 bp, Homo sapiens
ttaatccattcagtg

SEQ ID NO: 1725173 - DNA, 15 bp, Homo sapiens
taatccattcagtga

SEQ ID NO: 1725174 - DNA, 15 bp, Homo sapiens
aatccattcagtgac

SEQ ID NO: 1725175 - DNA, 15 bp, Homo sapiens
atccattcagtgact

SEQ ID NO: 1725176 - DNA, 15 bp, Homo sapiens
tccattcagtgactc

SEQ ID NO: 1725177 - DNA, 15 bp, Homo sapiens
ccattcagtgactct

SEQ ID NO: 1725178 - DNA, 15 bp, Homo sapiens
cattcagtgactcta

SEQ ID NO: 1725179 - DNA, 15 bp, Homo sapiens
attcagtgactctat

SEQ ID NO: 1725180 - DNA, 15 bp, Homo sapiens
ttcagtgactctatg

SEQ ID NO: 1725181 - DNA, 15 bp, Homo sapiens
tcagtgactctatga

SEQ ID NO: 1725182 - DNA, 15 bp, Homo sapiens
cagtgactctatgac

SEQ ID NO: 1725183 - DNA, 15 bp, Homo sapiens
agtgactctatgact

SEQ ID NO: 1725184 - DNA, 15 bp, Homo sapiens
gtgactctatgactt

SEQ ID NO: 1725185 - DNA, 15 bp, Homo sapiens
tgactctatgacttt

SEQ ID NO: 1725186 - DNA, 15 bp, Homo sapiens
gactctatgactttt

SEQ ID NO: 1725187 - DNA, 15 bp, Homo sapiens
actctatgacttttg

SEQ ID NO: 1725188 - DNA, 15 bp, Homo sapiens
ctctatgacttttga

SEQ ID NO: 1725189 - DNA, 15 bp, Homo sapiens
tctatgacttttgat

SEQ ID NO: 1725190 - DNA, 15 bp, Homo sapiens
ctatgacttttgatt

SEQ ID NO: 1725191 - DNA, 15 bp, Homo sapiens
tatgacttttgattg

SEQ ID NO: 1725192 - DNA, 15 bp, Homo sapiens
atgacttttgattgg

SEQ ID NO: 1725193 - DNA, 15 bp, Homo sapiens
tgacttttgattgga

SEQ ID NO: 1725194 - DNA, 15 bp, Homo sapiens
gacttttgattggag

SEQ ID NO: 1725195 - DNA, 15 bp, Homo sapiens
acttttgattggaga

SEQ ID NO: 1725196 - DNA, 15 bp, Homo sapiens
cttttgattggagag

SEQ ID NO: 1725197 - DNA, 15 bp, Homo sapiens
ttttgattggagagt

SEQ ID NO: 1725198 - DNA, 15 bp, Homo sapiens
tttgattggagagtc

SEQ ID NO: 1725199 - DNA, 15 bp, Homo sapiens
ttgattggagagtct

SEQ ID NO: 1725200 - DNA, 15 bp, Homo sapiens
tgattggagagtcta

SEQ ID NO: 1725201 - DNA, 15 bp, Homo sapiens
gattggagagtctag

SEQ ID NO: 1725202 - DNA, 15 bp, Homo sapiens
attggagagtctagg

SEQ ID NO: 1725203 - DNA, 15 bp, Homo sapiens
ttggagagtctaggc

SEQ ID NO: 1725204 - DNA, 15 bp, Homo sapiens
tggagagtctaggcc

SEQ ID NO: 1725205 - DNA, 15 bp, Homo sapiens
ggagagtctaggcca

SEQ ID NO: 1725206 - DNA, 15 bp, Homo sapiens
gagagtctaggccat

SEQ ID NO: 1725207 - DNA, 15 bp, Homo sapiens
agagtctaggccatt

SEQ ID NO: 1725208 - DNA, 15 bp, Homo sapiens
gagtctaggccattt

SEQ ID NO: 1725209 - DNA, 15 bp, Homo sapiens
agtctaggccattta

SEQ ID NO: 1725210 - DNA, 15 bp, Homo sapiens
gtctaggccatttat

SEQ ID NO: 1725211 - DNA, 15 bp, Homo sapiens
tctaggccatttata

SEQ ID NO: 1725212 - DNA, 15 bp, Homo sapiens
ctaggccatttatat

SEQ ID NO: 1725213 - DNA, 15 bp, Homo sapiens
taggccatttatatt

SEQ ID NO: 1725214 - DNA, 15 bp, Homo sapiens
aggccatttatattc

SEQ ID NO: 1725215 - DNA, 15 bp, Homo sapiens
ggccatttatattca

SEQ ID NO: 1725216 - DNA, 15 bp, Homo sapiens
gccatttatattcaa

SEQ ID NO: 1725217 - DNA, 15 bp, Homo sapiens
ccatttatattcaat

SEQ ID NO: 1725218 - DNA, 15 bp, Homo sapiens
catttatattcaatg

SEQ ID NO: 1725219 - DNA, 15 bp, Homo sapiens
atttatattcaatgt

SEQ ID NO: 1725220 - DNA, 15 bp, Homo sapiens
tttatattcaatgtt

SEQ ID NO: 1725221 - DNA, 15 bp, Homo sapiens
ttatattcaatgtta

SEQ ID NO: 1725222 - DNA, 15 bp, Homo sapiens
tatattcaatgttat

SEQ ID NO: 1725223 - DNA, 15 bp, Homo sapiens
atattcaatgttatt

SEQ ID NO: 1725224 - DNA, 15 bp, Homo sapiens
tattcaatgttatta

SEQ ID NO: 1725225 - DNA, 15 bp, Homo sapiens
attcaatgttattat

SEQ ID NO: 1725226 - DNA, 15 bp, Homo sapiens
ttcaatgttattatt

SEQ ID NO: 1725227 - DNA, 15 bp, Homo sapiens
tcaatgttattattg

SEQ ID NO: 1725228 - DNA, 15 bp, Homo sapiens
caatgttattattga

SEQ ID NO: 1725229 - DNA, 15 bp, Homo sapiens
aatgttattattgat

SEQ ID NO: 1725230 - DNA, 15 bp, Homo sapiens
atgttattattgata

SEQ ID NO: 1725231 - DNA, 15 bp, Homo sapiens
tgttattattgataa

SEQ ID NO: 1725232 - DNA, 15 bp, Homo sapiens
gttattattgataag

SEQ ID NO: 1725233 - DNA, 15 bp, Homo sapiens
ttattattgataagt

SEQ ID NO: 1725234 - DNA, 15 bp, Homo sapiens
tattattgataagta

SEQ ID NO: 1725235 - DNA, 15 bp, Homo sapiens
attattgataagtaa

SEQ ID NO: 1725236 - DNA, 15 bp, Homo sapiens
ttattgataagtaaa

SEQ ID NO: 1725237 - DNA, 15 bp, Homo sapiens
tattgataagtaaag

SEQ ID NO: 1725238 - DNA, 15 bp, Homo sapiens
attgataagtaaaga

SEQ ID NO: 1725239 - DNA, 15 bp, Homo sapiens
ttgataagtaaagac

SEQ ID NO: 1725240 - DNA, 15 bp, Homo sapiens
tgataagtaaagact

SEQ ID NO: 1725241 - DNA, 15 bp, Homo sapiens
gataagtaaagactt

SEQ ID NO: 1725242 - DNA, 15 bp, Homo sapiens
ataagtaaagactta

SEQ ID NO: 1725243 - DNA, 15 bp, Homo sapiens
taagtaaagacttac

SEQ ID NO: 1725244 - DNA, 15 bp, Homo sapiens
aagtaaagacttact

SEQ ID NO: 1725245 - DNA, 15 bp, Homo sapiens
agtaaagacttactc

SEQ ID NO: 1725246 - DNA, 15 bp, Homo sapiens
gtaaagacttactcc

SEQ ID NO: 1725247 - DNA, 15 bp, Homo sapiens
taaagacttactcct

SEQ ID NO: 1725248 - DNA, 15 bp, Homo sapiens
aaagacttactcctg

SEQ ID NO: 1725249 - DNA, 15 bp, Homo sapiens
aagacttactcctgc

SEQ ID NO: 1725250 - DNA, 15 bp, Homo sapiens
agacttactcctgcc

SEQ ID NO: 1725251 - DNA, 15 bp, Homo sapiens
gacttactcctgcca

SEQ ID NO: 1725252 - DNA, 15 bp, Homo sapiens
acttactcctgccat

SEQ ID NO: 1725253 - DNA, 15 bp, Homo sapiens
cttactcctgccatt

SEQ ID NO: 1725254 - DNA, 15 bp, Homo sapiens
ttactcctgccattt

SEQ ID NO: 1725255 - DNA, 15 bp, Homo sapiens
tactcctgccatttt

SEQ ID NO: 1725256 - DNA, 15 bp, Homo sapiens
actcctgccatttta

SEQ ID NO: 1725257 - DNA, 15 bp, Homo sapiens
ctcctgccattttat

SEQ ID NO: 1725258 - DNA, 15 bp, Homo sapiens
tcctgccattttatt

SEQ ID NO: 1725259 - DNA, 15 bp, Homo sapiens
cctgccattttatta

SEQ ID NO: 1725260 - DNA, 15 bp, Homo sapiens
ctgccattttattat

SEQ ID NO: 1725261 - DNA, 15 bp, Homo sapiens
tgccattttattatt

SEQ ID NO: 1725262 - DNA, 15 bp, Homo sapiens
gccattttattattt

SEQ ID NO: 1725263 - DNA, 15 bp, Homo sapiens
ccattttattatttg

SEQ ID NO: 1725264 - DNA, 15 bp, Homo sapiens
cattttattatttgt

SEQ ID NO: 1725265 - DNA, 15 bp, Homo sapiens
attttattatttgtt

SEQ ID NO: 1725266 - DNA, 15 bp, Homo sapiens
ttttattatttgttt

SEQ ID NO: 1725267 - DNA, 15 bp, Homo sapiens
tttattatttgtttt

SEQ ID NO: 1725268 - DNA, 15 bp, Homo sapiens
ttattatttgttttc

SEQ ID NO: 1725269 - DNA, 15 bp, Homo sapiens
tattatttgttttct

SEQ ID NO: 1725270 - DNA, 15 bp, Homo sapiens
attatttgttttctg

SEQ ID NO: 1725271 - DNA, 15 bp, Homo sapiens
ttatttgttttctgg

SEQ ID NO: 1725272 - DNA, 15 bp, Homo sapiens
tatttgttttctggt

SEQ ID NO: 1725273 - DNA, 15 bp, Homo sapiens
atttgttttctggtt

SEQ ID NO: 1725274 - DNA, 15 bp, Homo sapiens
tttgttttctggttg

SEQ ID NO: 1725275 - DNA, 15 bp, Homo sapiens
ttgttttctggttgt

SEQ ID NO: 1725276 - DNA, 15 bp, Homo sapiens
tgttttctggttgtt

SEQ ID NO: 1725277 - DNA, 15 bp, Homo sapiens
gttttctggttgttt

SEQ ID NO: 1725278 - DNA, 15 bp, Homo sapiens
ttttctggttgtttt

SEQ ID NO: 1725279 - DNA, 15 bp, Homo sapiens
tttctggttgttttg

SEQ ID NO: 1725280 - DNA, 15 bp, Homo sapiens
ttctggttgttttgt

SEQ ID NO: 1725281 - DNA, 15 bp, Homo sapiens
tctggttgttttgtg

SEQ ID NO: 1725282 - DNA, 15 bp, Homo sapiens
ctggttgttttgtga

SEQ ID NO: 1725283 - DNA, 15 bp, Homo sapiens
tggttgttttgtgat

SEQ ID NO: 1725284 - DNA, 15 bp, Homo sapiens
ggttgttttgtgatc

SEQ ID NO: 1725285 - DNA, 15 bp, Homo sapiens
gttgttttgtgatct

SEQ ID NO: 1725286 - DNA, 15 bp, Homo sapiens
ttgttttgtgatctt

SEQ ID NO: 1725287 - DNA, 15 bp, Homo sapiens
tgttttgtgatcttc

SEQ ID NO: 1725288 - DNA, 15 bp, Homo sapiens
gttttgtgatcttct

SEQ ID NO: 1725289 - DNA, 15 bp, Homo sapiens
ttttgtgatcttctc

SEQ ID NO: 1725290 - DNA, 15 bp, Homo sapiens
tttgtgatcttctct

SEQ ID NO: 1725291 - DNA, 15 bp, Homo sapiens
ttgtgatcttctcta

SEQ ID NO: 1725292 - DNA, 15 bp, Homo sapiens
tgtgatcttctctat

SEQ ID NO: 1725293 - DNA, 15 bp, Homo sapiens
gtgatcttctctatt

SEQ ID NO: 1725294 - DNA, 15 bp, Homo sapiens
tgatcttctctattt

SEQ ID NO: 1725295 - DNA, 15 bp, Homo sapiens
gatcttctctatttt

SEQ ID NO: 1725296 - DNA, 15 bp, Homo sapiens
atcttctctattttc

SEQ ID NO: 1725297 - DNA, 15 bp, Homo sapiens
tcttctctattttct

SEQ ID NO: 1725298 - DNA, 15 bp, Homo sapiens
cttctctattttctt

SEQ ID NO: 1725299 - DNA, 15 bp, Homo sapiens
ttctctattttcttt

SEQ ID NO: 1725300 - DNA, 15 bp, Homo sapiens
tctctattttctttc

SEQ ID NO: 1725301 - DNA, 15 bp, Homo sapiens
ctctattttctttcc

SEQ ID NO: 1725302 - DNA, 15 bp, Homo sapiens
tctattttctttcct

SEQ ID NO: 1725303 - DNA, 15 bp, Homo sapiens
ctattttctttcctg

SEQ ID NO: 1725304 - DNA, 15 bp, Homo sapiens
tattttctttcctgt

SEQ ID NO: 1725305 - DNA, 15 bp, Homo sapiens
attttctttcctgtc

SEQ ID NO: 1725306 - DNA, 15 bp, Homo sapiens
ttttctttcctgtct

SEQ ID NO: 1725307 - DNA, 15 bp, Homo sapiens
tttctttcctgtctt

SEQ ID NO: 1725308 - DNA, 15 bp, Homo sapiens
ttctttcctgtcttc

SEQ ID NO: 1725309 - DNA, 15 bp, Homo sapiens
tctttcctgtcttcc

SEQ ID NO: 1725310 - DNA, 15 bp, Homo sapiens
ctttcctgtcttcct

SEQ ID NO: 1725311 - DNA, 15 bp, Homo sapiens
tttcctgtcttcctt

SEQ ID NO: 1725312 - DNA, 15 bp, Homo sapiens
ttcctgtcttccttt

SEQ ID NO: 1725313 - DNA, 15 bp, Homo sapiens
tcctgtcttcctttt

SEQ ID NO: 1725314 - DNA, 15 bp, Homo sapiens
cctgtcttcctttta

SEQ ID NO: 1725315 - DNA, 15 bp, Homo sapiens
ctgtcttccttttag

SEQ ID NO: 1725316 - DNA, 15 bp, Homo sapiens
tgtcttccttttagt

SEQ ID NO: 1725317 - DNA, 15 bp, Homo sapiens
gtcttccttttagtg

SEQ ID NO: 1725318 - DNA, 15 bp, Homo sapiens
tcttccttttagtga

SEQ ID NO: 1725319 - DNA, 15 bp, Homo sapiens
cttccttttagtgaa

SEQ ID NO: 1725320 - DNA, 15 bp, Homo sapiens
ttccttttagtgaag

SEQ ID NO: 1725321 - DNA, 15 bp, Homo sapiens
tccttttagtgaagg

SEQ ID NO: 1725322 - DNA, 15 bp, Homo sapiens
ccttttagtgaaggt

SEQ ID NO: 1725323 - DNA, 15 bp, Homo sapiens
cttttagtgaaggta

SEQ ID NO: 1725324 - DNA, 15 bp, Homo sapiens
ttttagtgaaggtag

SEQ ID NO: 1725325 - DNA, 15 bp, Homo sapiens
tttagtgaaggtagt

SEQ ID NO: 1725326 - DNA, 15 bp, Homo sapiens
ttagtgaaggtagtt

SEQ ID NO: 1725327 - DNA, 15 bp, Homo sapiens
tagtgaaggtagttt

SEQ ID NO: 1725328 - DNA, 15 bp, Homo sapiens
agtgaaggtagtttc

SEQ ID NO: 1725329 - DNA, 15 bp, Homo sapiens
gtgaaggtagtttct

SEQ ID NO: 1725330 - DNA, 15 bp, Homo sapiens
tgaaggtagtttctc

SEQ ID NO: 1725331 - DNA, 15 bp, Homo sapiens
gaaggtagtttctct

SEQ ID NO: 1725332 - DNA, 15 bp, Homo sapiens
aaggtagtttctctg

SEQ ID NO: 1725333 - DNA, 15 bp, Homo sapiens
aggtagtttctctga

SEQ ID NO: 1725334 - DNA, 15 bp, Homo sapiens
ggtagtttctctgaa

SEQ ID NO: 1725335 - DNA, 15 bp, Homo sapiens
gtagtttctctgaag

SEQ ID NO: 1725336 - DNA, 15 bp, Homo sapiens
tagtttctctgaagg

SEQ ID NO: 1725337 - DNA, 15 bp, Homo sapiens
agtttctctgaaggt

SEQ ID NO: 1725338 - DNA, 15 bp, Homo sapiens
gtttctctgaaggta

SEQ ID NO: 1725339 - DNA, 15 bp, Homo sapiens
tttctctgaaggtat

SEQ ID NO: 1725340 - DNA, 15 bp, Homo sapiens
ttctctgaaggtatg

SEQ ID NO: 1725341 - DNA, 15 bp, Homo sapiens
tctctgaaggtatgt

SEQ ID NO: 1725342 - DNA, 15 bp, Homo sapiens
ctctgaaggtatgtt

SEQ ID NO: 1725343 - DNA, 15 bp, Homo sapiens
tctgaaggtatgttt

SEQ ID NO: 1725344 - DNA, 15 bp, Homo sapiens
ctgaaggtatgtttt

SEQ ID NO: 1725345 - DNA, 15 bp, Homo sapiens
tgaaggtatgtttta

SEQ ID NO: 1725346 - DNA, 15 bp, Homo sapiens
gaaggtatgttttaa

SEQ ID NO: 1725347 - DNA, 15 bp, Homo sapiens
aaggtatgttttaat

SEQ ID NO: 1725348 - DNA, 15 bp, Homo sapiens
aggtatgttttaatt

SEQ ID NO: 1725349 - DNA, 15 bp, Homo sapiens
ggtatgttttaattt

SEQ ID NO: 1725350 - DNA, 15 bp, Homo sapiens
gtatgttttaatttc

SEQ ID NO: 1725351 - DNA, 15 bp, Homo sapiens
tatgttttaatttct

SEQ ID NO: 1725352 - DNA, 15 bp, Homo sapiens
atgttttaatttctt

SEQ ID NO: 1725353 - DNA, 15 bp, Homo sapiens
tgttttaatttcttg

SEQ ID NO: 1725354 - DNA, 15 bp, Homo sapiens
gttttaatttcttgc

SEQ ID NO: 1725355 - DNA, 15 bp, Homo sapiens
ttttaatttcttgct

SEQ ID NO: 1725356 - DNA, 15 bp, Homo sapiens
tttaatttcttgctt

SEQ ID NO: 1725357 - DNA, 15 bp, Homo sapiens
ttaatttcttgcttt

SEQ ID NO: 1725358 - DNA, 15 bp, Homo sapiens
taatttcttgcttta

SEQ ID NO: 1725359 - DNA, 15 bp, Homo sapiens
aatttcttgctttat

SEQ ID NO: 1725360 - DNA, 15 bp, Homo sapiens
atttcttgctttata

SEQ ID NO: 1725361 - DNA, 15 bp, Homo sapiens
tttcttgctttatat

SEQ ID NO: 1725362 - DNA, 15 bp, Homo sapiens
ttcttgctttatatc

SEQ ID NO: 1725363 - DNA, 15 bp, Homo sapiens
tcttgctttatatct

SEQ ID NO: 1725364 - DNA, 15 bp, Homo sapiens
cttgctttatatctt

SEQ ID NO: 1725365 - DNA, 15 bp, Homo sapiens
ttgctttatatcttt

SEQ ID NO: 1725366 - DNA, 15 bp, Homo sapiens
tgctttatatctttt

SEQ ID NO: 1725367 - DNA, 15 bp, Homo sapiens
gctttatatcttttg

SEQ ID NO: 1725368 - DNA, 15 bp, Homo sapiens
ctttatatcttttgt

SEQ ID NO: 1725369 - DNA, 15 bp, Homo sapiens
tttatatcttttgtg

SEQ ID NO: 1725370 - DNA, 15 bp, Homo sapiens
ttatatcttttgtgt

SEQ ID NO: 1725371 - DNA, 15 bp, Homo sapiens
tatatcttttgtgta

SEQ ID NO: 1725372 - DNA, 15 bp, Homo sapiens
atatcttttgtgtaa

SEQ ID NO: 1725373 - DNA, 15 bp, Homo sapiens
tatcttttgtgtaac

SEQ ID NO: 1725374 - DNA, 15 bp, Homo sapiens
atcttttgtgtaact

SEQ ID NO: 1725375 - DNA, 15 bp, Homo sapiens
tcttttgtgtaactg

SEQ ID NO: 1725376 - DNA, 15 bp, Homo sapiens
cttttgtgtaactgt

SEQ ID NO: 1725377 - DNA, 15 bp, Homo sapiens
ttttgtgtaactgtt

SEQ ID NO: 1725378 - DNA, 15 bp, Homo sapiens
tttgtgtaactgttg

SEQ ID NO: 1725379 - DNA, 15 bp, Homo sapiens
ttgtgtaactgttgt

SEQ ID NO: 1725380 - DNA, 15 bp, Homo sapiens
tgtgtaactgttgta

SEQ ID NO: 1725381 - DNA, 15 bp, Homo sapiens
gtgtaactgttgtag

SEQ ID NO: 1725382 - DNA, 15 bp, Homo sapiens
tgtaactgttgtagg

SEQ ID NO: 1725383 - DNA, 15 bp, Homo sapiens
gtaactgttgtaggt

SEQ ID NO: 1725384 - DNA, 15 bp, Homo sapiens
taactgttgtaggtt

SEQ ID NO: 1725385 - DNA, 15 bp, Homo sapiens
aactgttgtaggttt

SEQ ID NO: 1725386 - DNA, 15 bp, Homo sapiens
actgttgtaggtttg

SEQ ID NO: 1725387 - DNA, 15 bp, Homo sapiens
ctgttgtaggtttgt

SEQ ID NO: 1725388 - DNA, 15 bp, Homo sapiens
tgttgtaggtttgtt

SEQ ID NO: 1725389 - DNA, 15 bp, Homo sapiens
gttgtaggtttgttg

SEQ ID NO: 1725390 - DNA, 15 bp, Homo sapiens
ttgtaggtttgttga

SEQ ID NO: 1725391 - DNA, 15 bp, Homo sapiens
tgtaggtttgttgat

SEQ ID NO: 1725392 - DNA, 15 bp, Homo sapiens
gtaggtttgttgatt

SEQ ID NO: 1725393 - DNA, 15 bp, Homo sapiens
taggtttgttgattt

SEQ ID NO: 1725394 - DNA, 15 bp, Homo sapiens
aggtttgttgatttg

SEQ ID NO: 1725395 - DNA, 15 bp, Homo sapiens
ggtttgttgatttga

SEQ ID NO: 1725396 - DNA, 15 bp, Homo sapiens
gtttgttgatttgag

SEQ ID NO: 1725397 - DNA, 15 bp, Homo sapiens
tttgttgatttgagg

SEQ ID NO: 1725398 - DNA, 15 bp, Homo sapiens
ttgttgatttgaggt

SEQ ID NO: 1725399 - DNA, 15 bp, Homo sapiens
tgttgatttgaggtt

SEQ ID NO: 1725400 - DNA, 15 bp, Homo sapiens
gttgatttgaggtta

SEQ ID NO: 1725401 - DNA, 15 bp, Homo sapiens
ttgatttgaggttac

SEQ ID NO: 1725402 - DNA, 15 bp, Homo sapiens
tgatttgaggttact

SEQ ID NO: 1725403 - DNA, 15 bp, Homo sapiens
gatttgaggttactc

SEQ ID NO: 1725404 - DNA, 15 bp, Homo sapiens
atttgaggttactct

SEQ ID NO: 1725405 - DNA, 15 bp, Homo sapiens
tttgaggttactctg

SEQ ID NO: 1725406 - DNA, 15 bp, Homo sapiens
ttgaggttactctgg

SEQ ID NO: 1725407 - DNA, 15 bp, Homo sapiens
tgaggttactctggg

SEQ ID NO: 1725408 - DNA, 15 bp, Homo sapiens
gaggttactctgggg

SEQ ID NO: 1725409 - DNA, 15 bp, Homo sapiens
aggttactctggggc

SEQ ID NO: 1725410 - DNA, 15 bp, Homo sapiens
ggttactctggggct

SEQ ID NO: 1725411 - DNA, 15 bp, Homo sapiens
gttactctggggctt

SEQ ID NO: 1725412 - DNA, 15 bp, Homo sapiens
ttactctggggcttg

SEQ ID NO: 1725413 - DNA, 15 bp, Homo sapiens
tactctggggcttgt

SEQ ID NO: 1725414 - DNA, 15 bp, Homo sapiens
actctggggcttgta

SEQ ID NO: 1725415 - DNA, 15 bp, Homo sapiens
ctctggggcttgtaa

SEQ ID NO: 1725416 - DNA, 15 bp, Homo sapiens
tctggggcttgtaaa

SEQ ID NO: 1725417 - DNA, 15 bp, Homo sapiens
ctggggcttgtaaat

SEQ ID NO: 1725418 - DNA, 15 bp, Homo sapiens
tggggcttgtaaata

SEQ ID NO: 1725419 - DNA, 15 bp, Homo sapiens
ggggcttgtaaatac

SEQ ID NO: 1725420 - DNA, 15 bp, Homo sapiens
gggcttgtaaatact

SEQ ID NO: 1725421 - DNA, 15 bp, Homo sapiens
ggcttgtaaatacta

SEQ ID NO: 1725422 - DNA, 15 bp, Homo sapiens
gcttgtaaatactat

SEQ ID NO: 1725423 - DNA, 15 bp, Homo sapiens
cttgtaaatactatc

SEQ ID NO: 1725424 - DNA, 15 bp, Homo sapiens
ttgtaaatactatct

SEQ ID NO: 1725425 - DNA, 15 bp, Homo sapiens
tgtaaatactatctt

SEQ ID NO: 1725426 - DNA, 15 bp, Homo sapiens
gtaaatactatctta

SEQ ID NO: 1725427 - DNA, 15 bp, Homo sapiens
taaatactatcttat

SEQ ID NO: 1725428 - DNA, 15 bp, Homo sapiens
aaatactatcttata

SEQ ID NO: 1725429 - DNA, 15 bp, Homo sapiens
aatactatcttataa

SEQ ID NO: 1725430 - DNA, 15 bp, Homo sapiens
atactatcttataac

SEQ ID NO: 1725431 - DNA, 15 bp, Homo sapiens
tactatcttataact

SEQ ID NO: 1725432 - DNA, 15 bp, Homo sapiens
actatcttataactg

SEQ ID NO: 1725433 - DNA, 15 bp, Homo sapiens
ctatcttataactga

SEQ ID NO: 1725434 - DNA, 15 bp, Homo sapiens
tatcttataactgat

SEQ ID NO: 1725435 - DNA, 15 bp, Homo sapiens
atcttataactgatt

SEQ ID NO: 1725436 - DNA, 15 bp, Homo sapiens
tcttataactgatta

SEQ ID NO: 1725437 - DNA, 15 bp, Homo sapiens
cttataactgattat

SEQ ID NO: 1725438 - DNA, 15 bp, Homo sapiens
ttataactgattatt

SEQ ID NO: 1725439 - DNA, 15 bp, Homo sapiens
tataactgattattt

SEQ ID NO: 1725440 - DNA, 15 bp, Homo sapiens
ataactgattatttt

SEQ ID NO: 1725441 - DNA, 15 bp, Homo sapiens
taactgattatttta

SEQ ID NO: 1725442 - DNA, 15 bp, Homo sapiens
aactgattattttaa

SEQ ID NO: 1725443 - DNA, 15 bp, Homo sapiens
actgattattttaag

SEQ ID NO: 1725444 - DNA, 15 bp, Homo sapiens
ctgattattttaagc

SEQ ID NO: 1725445 - DNA, 15 bp, Homo sapiens
tgattattttaagct

SEQ ID NO: 1725446 - DNA, 15 bp, Homo sapiens
gattattttaagctg

SEQ ID NO: 1725447 - DNA, 15 bp, Homo sapiens
attattttaagctga

SEQ ID NO: 1725448 - DNA, 15 bp, Homo sapiens
ttattttaagctgat

SEQ ID NO: 1725449 - DNA, 15 bp, Homo sapiens
tattttaagctgata

SEQ ID NO: 1725450 - DNA, 15 bp, Homo sapiens
attttaagctgataa

SEQ ID NO: 1725451 - DNA, 15 bp, Homo sapiens
ttttaagctgataac

SEQ ID NO: 1725452 - DNA, 15 bp, Homo sapiens
tttaagctgataaca

SEQ ID NO: 1725453 - DNA, 15 bp, Homo sapiens
ttaagctgataacaa

SEQ ID NO: 1725454 - DNA, 15 bp, Homo sapiens
taagctgataacaac

SEQ ID NO: 1725455 - DNA, 15 bp, Homo sapiens
aagctgataacaact

SEQ ID NO: 1725456 - DNA, 15 bp, Homo sapiens
agctgataacaactt

SEQ ID NO: 1725457 - DNA, 15 bp, Homo sapiens
gctgataacaactta

SEQ ID NO: 1725458 - DNA, 15 bp, Homo sapiens
ctgataacaacttaa

SEQ ID NO: 1725459 - DNA, 15 bp, Homo sapiens
tgataacaacttaac

SEQ ID NO: 1725460 - DNA, 15 bp, Homo sapiens
gataacaacttaaca

SEQ ID NO: 1725461 - DNA, 15 bp, Homo sapiens
ataacaacttaacac

SEQ ID NO: 1725462 - DNA, 15 bp, Homo sapiens
taacaacttaacact

SEQ ID NO: 1725463 - DNA, 15 bp, Homo sapiens
aacaacttaacactg

SEQ ID NO: 1725464 - DNA, 15 bp, Homo sapiens
acaacttaacactgt

SEQ ID NO: 1725465 - DNA, 15 bp, Homo sapiens
caacttaacactgtt

SEQ ID NO: 1725466 - DNA, 15 bp, Homo sapiens
aacttaacactgttt

SEQ ID NO: 1725467 - DNA, 15 bp, Homo sapiens
acttaacactgtttg

SEQ ID NO: 1725468 - DNA, 15 bp, Homo sapiens
cttaacactgtttgc

SEQ ID NO: 1725469 - DNA, 15 bp, Homo sapiens
ttaacactgtttgca

SEQ ID NO: 1725470 - DNA, 15 bp, Homo sapiens
taacactgtttgcac

SEQ ID NO: 1725471 - DNA, 15 bp, Homo sapiens
aacactgtttgcaca

SEQ ID NO: 1725472 - DNA, 15 bp, Homo sapiens
acactgtttgcacaa

SEQ ID NO: 1725473 - DNA, 15 bp, Homo sapiens
cactgtttgcacaaa

SEQ ID NO: 1725474 - DNA, 15 bp, Homo sapiens
actgtttgcacaaac

SEQ ID NO: 1725475 - DNA, 15 bp, Homo sapiens
ctgtttgcacaaaca

SEQ ID NO: 1725476 - DNA, 15 bp, Homo sapiens
tgtttgcacaaacaa

SEQ ID NO: 1725477 - DNA, 15 bp, Homo sapiens
gtttgcacaaacaaa

SEQ ID NO: 1725478 - DNA, 15 bp, Homo sapiens
tttgcacaaacaaac

SEQ ID NO: 1725479 - DNA, 15 bp, Homo sapiens
ttgcacaaacaaaca

SEQ ID NO: 1725480 - DNA, 15 bp, Homo sapiens
tgcacaaacaaacaa

SEQ ID NO: 1725481 - DNA, 15 bp, Homo sapiens
gcacaaacaaacaag

SEQ ID NO: 1725482 - DNA, 15 bp, Homo sapiens
cacaaacaaacaagc

SEQ ID NO: 1725483 - DNA, 15 bp, Homo sapiens
acaaacaaacaagca

SEQ ID NO: 1725484 - DNA, 15 bp, Homo sapiens
caaacaaacaagcaa

SEQ ID NO: 1725485 - DNA, 15 bp, Homo sapiens
aaacaaacaagcaaa

SEQ ID NO: 1725486 - DNA, 15 bp, Homo sapiens
aacaaacaagcaaaa

SEQ ID NO: 1725487 - DNA, 15 bp, Homo sapiens
acaaacaagcaaaaa

SEQ ID NO: 1725488 - DNA, 15 bp, Homo sapiens
caaacaagcaaaaag

SEQ ID NO: 1725489 - DNA, 15 bp, Homo sapiens
aaacaagcaaaaaga

SEQ ID NO: 1725490 - DNA, 15 bp, Homo sapiens
aacaagcaaaaagaa

SEQ ID NO: 1725491 - DNA, 15 bp, Homo sapiens
acaagcaaaaagaaa

SEQ ID NO: 1725492 - DNA, 15 bp, Homo sapiens
caagcaaaaagaaaa

SEQ ID NO: 1725493 - DNA, 15 bp, Homo sapiens
aagcaaaaagaaaac

SEQ ID NO: 1725494 - DNA, 15 bp, Homo sapiens
agcaaaaagaaaact

SEQ ID NO: 1725495 - DNA, 15 bp, Homo sapiens
gcaaaaagaaaactg

SEQ ID NO: 1725496 - DNA, 15 bp, Homo sapiens
caaaaagaaaactga

SEQ ID NO: 1725497 - DNA, 15 bp, Homo sapiens
aaaaagaaaactgaa

SEQ ID NO: 1725498 - DNA, 15 bp, Homo sapiens
aaaagaaaactgaaa

SEQ ID NO: 1725499 - DNA, 15 bp, Homo sapiens
aaagaaaactgaaaa

SEQ ID NO: 1725500 - DNA, 15 bp, Homo sapiens
aagaaaactgaaaaa

SEQ ID NO: 1725501 - DNA, 15 bp, Homo sapiens
agaaaactgaaaaaa

SEQ ID NO: 1725502 - DNA, 15 bp, Homo sapiens
gaaaactgaaaaaac

SEQ ID NO: 1725503 - DNA, 15 bp, Homo sapiens
aaaactgaaaaaacc

SEQ ID NO: 1725504 - DNA, 15 bp, Homo sapiens
aaactgaaaaaacct

SEQ ID NO: 1725505 - DNA, 15 bp, Homo sapiens
aactgaaaaaacctt

SEQ ID NO: 1725506 - DNA, 15 bp, Homo sapiens
actgaaaaaaccttt

SEQ ID NO: 1725507 - DNA, 15 bp, Homo sapiens
ctgaaaaaaccttta

SEQ ID NO: 1725508 - DNA, 15 bp, Homo sapiens
tgaaaaaacctttac

SEQ ID NO: 1725509 - DNA, 15 bp, Homo sapiens
gaaaaaacctttaca

SEQ ID NO: 1725510 - DNA, 15 bp, Homo sapiens
aaaaaacctttacac

SEQ ID NO: 1725511 - DNA, 15 bp, Homo sapiens
aaaaacctttacacc

SEQ ID NO: 1725512 - DNA, 15 bp, Homo sapiens
aaaacctttacacct

SEQ ID NO: 1725513 - DNA, 15 bp, Homo sapiens
aaacctttacacctt

SEQ ID NO: 1725514 - DNA, 15 bp, Homo sapiens
aacctttacacctta

SEQ ID NO: 1725515 - DNA, 15 bp, Homo sapiens
acctttacaccttaa

SEQ ID NO: 1725516 - DNA, 15 bp, Homo sapiens
cctttacaccttaaa

SEQ ID NO: 1725517 - DNA, 15 bp, Homo sapiens
ctttacaccttaaac

SEQ ID NO: 1725518 - DNA, 15 bp, Homo sapiens
tttacaccttaaact

SEQ ID NO: 1725519 - DNA, 15 bp, Homo sapiens
ttacaccttaaactc

SEQ ID NO: 1725520 - DNA, 15 bp, Homo sapiens
tacaccttaaactca

SEQ ID NO: 1725521 - DNA, 15 bp, Homo sapiens
acaccttaaactcat

SEQ ID NO: 1725522 - DNA, 15 bp, Homo sapiens
caccttaaactcatt

SEQ ID NO: 1725523 - DNA, 15 bp, Homo sapiens
accttaaactcattc

SEQ ID NO: 1725524 - DNA, 15 bp, Homo sapiens
ccttaaactcattct

SEQ ID NO: 1725525 - DNA, 15 bp, Homo sapiens
cttaaactcattctc

SEQ ID NO: 1725526 - DNA, 15 bp, Homo sapiens
ttaaactcattctct

SEQ ID NO: 1725527 - DNA, 15 bp, Homo sapiens
taaactcattctctg

SEQ ID NO: 1725528 - DNA, 15 bp, Homo sapiens
aaactcattctctgc

SEQ ID NO: 1725529 - DNA, 15 bp, Homo sapiens
aactcattctctgct

SEQ ID NO: 1725530 - DNA, 15 bp, Homo sapiens
actcattctctgctt

SEQ ID NO: 1725531 - DNA, 15 bp, Homo sapiens
ctcattctctgcttt

SEQ ID NO: 1725532 - DNA, 15 bp, Homo sapiens
tcattctctgctttt

SEQ ID NO: 1725533 - DNA, 15 bp, Homo sapiens
cattctctgctttta

SEQ ID NO: 1725534 - DNA, 15 bp, Homo sapiens
attctctgcttttaa

SEQ ID NO: 1725535 - DNA, 15 bp, Homo sapiens
ttctctgcttttaaa

SEQ ID NO: 1725536 - DNA, 15 bp, Homo sapiens
tctctgcttttaaat

SEQ ID NO: 1725537 - DNA, 15 bp, Homo sapiens
ctctgcttttaaatt

SEQ ID NO: 1725538 - DNA, 15 bp, Homo sapiens
tctgcttttaaattt

SEQ ID NO: 1725539 - DNA, 15 bp, Homo sapiens
ctgcttttaaatttt

SEQ ID NO: 1725540 - DNA, 15 bp, Homo sapiens
tgcttttaaattttt

SEQ ID NO: 1725541 - DNA, 15 bp, Homo sapiens
gcttttaaatttttt

SEQ ID NO: 1725542 - DNA, 15 bp, Homo sapiens
cttttaaatttttta

SEQ ID NO: 1725543 - DNA, 15 bp, Homo sapiens
ttttaaattttttat

SEQ ID NO: 1725544 - DNA, 15 bp, Homo sapiens
tttaaattttttatt

SEQ ID NO: 1725545 - DNA, 15 bp, Homo sapiens
ttaaattttttattg

SEQ ID NO: 1725546 - DNA, 15 bp, Homo sapiens
taaattttttattgt

SEQ ID NO: 1725547 - DNA, 15 bp, Homo sapiens
aaattttttattgtt

SEQ ID NO: 1725548 - DNA, 15 bp, Homo sapiens
aattttttattgttt

SEQ ID NO: 1725549 - DNA, 15 bp, Homo sapiens
attttttattgtttc

SEQ ID NO: 1725550 - DNA, 15 bp, Homo sapiens
ttttttattgtttct

SEQ ID NO: 1725551 - DNA, 15 bp, Homo sapiens
tttttattgtttcta

SEQ ID NO: 1725552 - DNA, 15 bp, Homo sapiens
ttttattgtttctat

SEQ ID NO: 1725553 - DNA, 15 bp, Homo sapiens
tttattgtttctatt

SEQ ID NO: 1725554 - DNA, 15 bp, Homo sapiens
ttattgtttctattt

SEQ ID NO: 1725555 - DNA, 15 bp, Homo sapiens
tattgtttctattta

SEQ ID NO: 1725556 - DNA, 15 bp, Homo sapiens
attgtttctatttat

SEQ ID NO: 1725557 - DNA, 15 bp, Homo sapiens
ttgtttctatttata

SEQ ID NO: 1725558 - DNA, 15 bp, Homo sapiens
tgtttctatttatac

SEQ ID NO: 1725559 - DNA, 15 bp, Homo sapiens
gtttctatttatacg

SEQ ID NO: 1725560 - DNA, 15 bp, Homo sapiens
tttctatttatacgt

SEQ ID NO: 1725561 - DNA, 15 bp, Homo sapiens
ttctatttatacgtt

SEQ ID NO: 1725562 - DNA, 15 bp, Homo sapiens
tctatttatacgtta

SEQ ID NO: 1725563 - DNA, 15 bp, Homo sapiens
ctatttatacgttat

SEQ ID NO: 1725564 - DNA, 15 bp, Homo sapiens
tatttatacgttatt

SEQ ID NO: 1725565 - DNA, 15 bp, Homo sapiens
atttatacgttattg

SEQ ID NO: 1725566 - DNA, 15 bp, Homo sapiens
tttatacgttattgt

SEQ ID NO: 1725567 - DNA, 15 bp, Homo sapiens
ttatacgttattgtg

SEQ ID NO: 1725568 - DNA, 15 bp, Homo sapiens
tatacgttattgtgc

SEQ ID NO: 1725569 - DNA, 15 bp, Homo sapiens
atacgttattgtgct

SEQ ID NO: 1725570 - DNA, 15 bp, Homo sapiens
tacgttattgtgctg

SEQ ID NO: 1725571 - DNA, 15 bp, Homo sapiens
acgttattgtgctgc

SEQ ID NO: 1725572 - DNA, 15 bp, Homo sapiens
cgttattgtgctgcc

SEQ ID NO: 1725573 - DNA, 15 bp, Homo sapiens
gttattgtgctgcct

SEQ ID NO: 1725574 - DNA, 15 bp, Homo sapiens
ttattgtgctgccta

SEQ ID NO: 1725575 - DNA, 15 bp, Homo sapiens
tattgtgctgcctat

SEQ ID NO: 1725576 - DNA, 15 bp, Homo sapiens
attgtgctgcctatg

SEQ ID NO: 1725577 - DNA, 15 bp, Homo sapiens
ttgtgctgcctatgt

SEQ ID NO: 1725578 - DNA, 15 bp, Homo sapiens
tgtgctgcctatgtc

SEQ ID NO: 1725579 - DNA, 15 bp, Homo sapiens
gtgctgcctatgtct

SEQ ID NO: 1725580 - DNA, 15 bp, Homo sapiens
tgctgcctatgtctt

SEQ ID NO: 1725581 - DNA, 15 bp, Homo sapiens
gctgcctatgtcttg

SEQ ID NO: 1725582 - DNA, 15 bp, Homo sapiens
ctgcctatgtcttga

SEQ ID NO: 1725583 - DNA, 15 bp, Homo sapiens
tgcctatgtcttgaa

SEQ ID NO: 1725584 - DNA, 15 bp, Homo sapiens
gcctatgtcttgaaa

SEQ ID NO: 1725585 - DNA, 15 bp, Homo sapiens
cctatgtcttgaaaa

SEQ ID NO: 1725586 - DNA, 15 bp, Homo sapiens
ctatgtcttgaaaaa

SEQ ID NO: 1725587 - DNA, 15 bp, Homo sapiens
tatgtcttgaaaaaa

SEQ ID NO: 1725588 - DNA, 15 bp, Homo sapiens
atgtcttgaaaaaag

SEQ ID NO: 1725589 - DNA, 15 bp, Homo sapiens
tgtcttgaaaaaaga

SEQ ID NO: 1725590 - DNA, 15 bp, Homo sapiens
gtcttgaaaaaagat

SEQ ID NO: 1725591 - DNA, 15 bp, Homo sapiens
tcttgaaaaaagatt

SEQ ID NO: 1725592 - DNA, 15 bp, Homo sapiens
cttgaaaaaagattg

SEQ ID NO: 1725593 - DNA, 15 bp, Homo sapiens
ttgaaaaaagattgg

SEQ ID NO: 1725594 - DNA, 15 bp, Homo sapiens
tgaaaaaagattggt

SEQ ID NO: 1725595 - DNA, 15 bp, Homo sapiens
gaaaaaagattggtt

SEQ ID NO: 1725596 - DNA, 15 bp, Homo sapiens
aaaaaagattggttc

SEQ ID NO: 1725597 - DNA, 15 bp, Homo sapiens
aaaaagattggttca

SEQ ID NO: 1725598 - DNA, 15 bp, Homo sapiens
aaaagattggttcac

SEQ ID NO: 1725599 - DNA, 15 bp, Homo sapiens
aaagattggttcacc

SEQ ID NO: 1725600 - DNA, 15 bp, Homo sapiens
aagattggttcacct

SEQ ID NO: 1725601 - DNA, 15 bp, Homo sapiens
agattggttcacctt

SEQ ID NO: 1725602 - DNA, 15 bp, Homo sapiens
gattggttcaccttt

SEQ ID NO: 1725603 - DNA, 15 bp, Homo sapiens
attggttcacctttt

SEQ ID NO: 1725604 - DNA, 15 bp, Homo sapiens
ttggttcacctttta

SEQ ID NO: 1725605 - DNA, 15 bp, Homo sapiens
tggttcaccttttag

SEQ ID NO: 1725606 - DNA, 15 bp, Homo sapiens
ggttcaccttttagt

SEQ ID NO: 1725607 - DNA, 15 bp, Homo sapiens
gttcaccttttagtc

SEQ ID NO: 1725608 - DNA, 15 bp, Homo sapiens
ttcaccttttagtct

SEQ ID NO: 1725609 - DNA, 15 bp, Homo sapiens
tcaccttttagtctt

SEQ ID NO: 1725610 - DNA, 15 bp, Homo sapiens
caccttttagtcttt

SEQ ID NO: 1725611 - DNA, 15 bp, Homo sapiens
accttttagtctttc

SEQ ID NO: 1725612 - DNA, 15 bp, Homo sapiens
ccttttagtctttct

SEQ ID NO: 1725613 - DNA, 15 bp, Homo sapiens
cttttagtctttcta

SEQ ID NO: 1725614 - DNA, 15 bp, Homo sapiens
ttttagtctttctac

SEQ ID NO: 1725615 - DNA, 15 bp, Homo sapiens
tttagtctttctact

SEQ ID NO: 1725616 - DNA, 15 bp, Homo sapiens
ttagtctttctactt

SEQ ID NO: 1725617 - DNA, 15 bp, Homo sapiens
tagtctttctactta

SEQ ID NO: 1725618 - DNA, 15 bp, Homo sapiens
agtctttctacttaa

SEQ ID NO: 1725619 - DNA, 15 bp, Homo sapiens
gtctttctacttaag

SEQ ID NO: 1725620 - DNA, 15 bp, Homo sapiens
tctttctacttaaga

SEQ ID NO: 1725621 - DNA, 15 bp, Homo sapiens
ctttctacttaagat

SEQ ID NO: 1725622 - DNA, 15 bp, Homo sapiens
tttctacttaagata

SEQ ID NO: 1725623 - DNA, 15 bp, Homo sapiens
ttctacttaagataa

SEQ ID NO: 1725624 - DNA, 15 bp, Homo sapiens
tctacttaagataag

SEQ ID NO: 1725625 - DNA, 15 bp, Homo sapiens
ctacttaagataaga

SEQ ID NO: 1725626 - DNA, 15 bp, Homo sapiens
tacttaagataagag

SEQ ID NO: 1725627 - DNA, 15 bp, Homo sapiens
acttaagataagagt

SEQ ID NO: 1725628 - DNA, 15 bp, Homo sapiens
cttaagataagagta

SEQ ID NO: 1725629 - DNA, 15 bp, Homo sapiens
ttaagataagagtag

SEQ ID NO: 1725630 - DNA, 15 bp, Homo sapiens
taagataagagtagt

SEQ ID NO: 1725631 - DNA, 15 bp, Homo sapiens
aagataagagtagtt

SEQ ID NO: 1725632 - DNA, 15 bp, Homo sapiens
agataagagtagttt

SEQ ID NO: 1725633 - DNA, 15 bp, Homo sapiens
gataagagtagttta

SEQ ID NO: 1725634 - DNA, 15 bp, Homo sapiens
ataagagtagtttac

SEQ ID NO: 1725635 - DNA, 15 bp, Homo sapiens
taagagtagtttaca

SEQ ID NO: 1725636 - DNA, 15 bp, Homo sapiens
aagagtagtttacac

SEQ ID NO: 1725637 - DNA, 15 bp, Homo sapiens
agagtagtttacaca

SEQ ID NO: 1725638 - DNA, 15 bp, Homo sapiens
gagtagtttacacac

SEQ ID NO: 1725639 - DNA, 15 bp, Homo sapiens
agtagtttacacacc

SEQ ID NO: 1725640 - DNA, 15 bp, Homo sapiens
gtagtttacacacca

SEQ ID NO: 1725641 - DNA, 15 bp, Homo sapiens
tagtttacacaccac

SEQ ID NO: 1725642 - DNA, 15 bp, Homo sapiens
agtttacacaccaca

SEQ ID NO: 1725643 - DNA, 15 bp, Homo sapiens
gtttacacaccacag

SEQ ID NO: 1725644 - DNA, 15 bp, Homo sapiens
tttacacaccacagt

SEQ ID NO: 1725645 - DNA, 15 bp, Homo sapiens
ttacacaccacagtt

SEQ ID NO: 1725646 - DNA, 15 bp, Homo sapiens
tacacaccacagtta

SEQ ID NO: 1725647 - DNA, 15 bp, Homo sapiens
acacaccacagttac

SEQ ID NO: 1725648 - DNA, 15 bp, Homo sapiens
cacaccacagttaca

SEQ ID NO: 1725649 - DNA, 15 bp, Homo sapiens
acaccacagttacat

SEQ ID NO: 1725650 - DNA, 15 bp, Homo sapiens
caccacagttacatt

SEQ ID NO: 1725651 - DNA, 15 bp, Homo sapiens
accacagttacattg

SEQ ID NO: 1725652 - DNA, 15 bp, Homo sapiens
ccacagttacattgt

SEQ ID NO: 1725653 - DNA, 15 bp, Homo sapiens
cacagttacattgtt

SEQ ID NO: 1725654 - DNA, 15 bp, Homo sapiens
acagttacattgtta

SEQ ID NO: 1725655 - DNA, 15 bp, Homo sapiens
cagttacattgttaa

SEQ ID NO: 1725656 - DNA, 15 bp, Homo sapiens
agttacattgttaaa

SEQ ID NO: 1725657 - DNA, 15 bp, Homo sapiens
gttacattgttaaaa

SEQ ID NO: 1725658 - DNA, 15 bp, Homo sapiens
ttacattgttaaaat

SEQ ID NO: 1725659 - DNA, 15 bp, Homo sapiens
tacattgttaaaata

SEQ ID NO: 1725660 - DNA, 15 bp, Homo sapiens
acattgttaaaatag

SEQ ID NO: 1725661 - DNA, 15 bp, Homo sapiens
cattgttaaaatagt

SEQ ID NO: 1725662 - DNA, 15 bp, Homo sapiens
attgttaaaatagtc

SEQ ID NO: 1725663 - DNA, 15 bp, Homo sapiens
ttgttaaaatagtct

SEQ ID NO: 1725664 - DNA, 15 bp, Homo sapiens
tgttaaaatagtctg

SEQ ID NO: 1725665 - DNA, 15 bp, Homo sapiens
gttaaaatagtctgt

SEQ ID NO: 1725666 - DNA, 15 bp, Homo sapiens
ttaaaatagtctgtg

SEQ ID NO: 1725667 - DNA, 15 bp, Homo sapiens
taaaatagtctgtgt

SEQ ID NO: 1725668 - DNA, 15 bp, Homo sapiens
aaaatagtctgtgtt

SEQ ID NO: 1725669 - DNA, 15 bp, Homo sapiens
aaatagtctgtgttc

SEQ ID NO: 1725670 - DNA, 15 bp, Homo sapiens
aatagtctgtgttct

SEQ ID NO: 1725671 - DNA, 15 bp, Homo sapiens
atagtctgtgttcta

SEQ ID NO: 1725672 - DNA, 15 bp, Homo sapiens
tagtctgtgttctat

SEQ ID NO: 1725673 - DNA, 15 bp, Homo sapiens
agtctgtgttctatg

SEQ ID NO: 1725674 - DNA, 15 bp, Homo sapiens
gtctgtgttctatgt

SEQ ID NO: 1725675 - DNA, 15 bp, Homo sapiens
tctgtgttctatgtg

SEQ ID NO: 1725676 - DNA, 15 bp, Homo sapiens
ctgtgttctatgtgc

SEQ ID NO: 1725677 - DNA, 15 bp, Homo sapiens
tgtgttctatgtgct

SEQ ID NO: 1725678 - DNA, 15 bp, Homo sapiens
gtgttctatgtgctt

SEQ ID NO: 1725679 - DNA, 15 bp, Homo sapiens
tgttctatgtgctta

SEQ ID NO: 1725680 - DNA, 15 bp, Homo sapiens
gttctatgtgcttat

SEQ ID NO: 1725681 - DNA, 15 bp, Homo sapiens
ttctatgtgcttatt

SEQ ID NO: 1725682 - DNA, 15 bp, Homo sapiens
tctatgtgcttatta

SEQ ID NO: 1725683 - DNA, 15 bp, Homo sapiens
ctatgtgcttattat

SEQ ID NO: 1725684 - DNA, 15 bp, Homo sapiens
tatgtgcttattatt

SEQ ID NO: 1725685 - DNA, 15 bp, Homo sapiens
atgtgcttattatta

SEQ ID NO: 1725686 - DNA, 15 bp, Homo sapiens
tgtgcttattattac

SEQ ID NO: 1725687 - DNA, 15 bp, Homo sapiens
gtgcttattattacc

SEQ ID NO: 1725688 - DNA, 15 bp, Homo sapiens
tgcttattattacca

SEQ ID NO: 1725689 - DNA, 15 bp, Homo sapiens
gcttattattaccat

SEQ ID NO: 1725690 - DNA, 15 bp, Homo sapiens
cttattattaccatg

SEQ ID NO: 1725691 - DNA, 15 bp, Homo sapiens
ttattattaccatga

SEQ ID NO: 1725692 - DNA, 15 bp, Homo sapiens
tattattaccatgag

SEQ ID NO: 1725693 - DNA, 15 bp, Homo sapiens
attattaccatgagt

SEQ ID NO: 1725694 - DNA, 15 bp, Homo sapiens
ttattaccatgagtt

SEQ ID NO: 1725695 - DNA, 15 bp, Homo sapiens
tattaccatgagttt

SEQ ID NO: 1725696 - DNA, 15 bp, Homo sapiens
attaccatgagtttt

SEQ ID NO: 1725697 - DNA, 15 bp, Homo sapiens
ttaccatgagttttg

SEQ ID NO: 1725698 - DNA, 15 bp, Homo sapiens
taccatgagttttgt

SEQ ID NO: 1725699 - DNA, 15 bp, Homo sapiens
accatgagttttgta

SEQ ID NO: 1725700 - DNA, 15 bp, Homo sapiens
ccatgagttttgtag

SEQ ID NO: 1725701 - DNA, 15 bp, Homo sapiens
catgagttttgtagc

SEQ ID NO: 1725702 - DNA, 15 bp, Homo sapiens
atgagttttgtagct

SEQ ID NO: 1725703 - DNA, 15 bp, Homo sapiens
tgagttttgtagctt

SEQ ID NO: 1725704 - DNA, 15 bp, Homo sapiens
gagttttgtagcttc

SEQ ID NO: 1725705 - DNA, 15 bp, Homo sapiens
agttttgtagcttca

SEQ ID NO: 1725706 - DNA, 15 bp, Homo sapiens
gttttgtagcttcag

SEQ ID NO: 1725707 - DNA, 15 bp, Homo sapiens
ttttgtagcttcaga

SEQ ID NO: 1725708 - DNA, 15 bp, Homo sapiens
tttgtagcttcagat

SEQ ID NO: 1725709 - DNA, 15 bp, Homo sapiens
ttgtagcttcagatg

SEQ ID NO: 1725710 - DNA, 15 bp, Homo sapiens
tgtagcttcagatga

SEQ ID NO: 1725711 - DNA, 15 bp, Homo sapiens
gtagcttcagatgat

SEQ ID NO: 1725712 - DNA, 15 bp, Homo sapiens
tagcttcagatgatc

SEQ ID NO: 1725713 - DNA, 15 bp, Homo sapiens
agcttcagatgatct

SEQ ID NO: 1725714 - DNA, 15 bp, Homo sapiens
gcttcagatgatctt

SEQ ID NO: 1725715 - DNA, 15 bp, Homo sapiens
cttcagatgatctta

SEQ ID NO: 1725716 - DNA, 15 bp, Homo sapiens
ttcagatgatcttac

SEQ ID NO: 1725717 - DNA, 15 bp, Homo sapiens
tcagatgatcttact

SEQ ID NO: 1725718 - DNA, 15 bp, Homo sapiens
cagatgatcttactg

SEQ ID NO: 1725719 - DNA, 15 bp, Homo sapiens
agatgatcttactgc

SEQ ID NO: 1725720 - DNA, 15 bp, Homo sapiens
gatgatcttactgct

SEQ ID NO: 1725721 - DNA, 15 bp, Homo sapiens
atgatcttactgctc

SEQ ID NO: 1725722 - DNA, 15 bp, Homo sapiens
tgatcttactgctca

SEQ ID NO: 1725723 - DNA, 15 bp, Homo sapiens
gatcttactgctcat

SEQ ID NO: 1725724 - DNA, 15 bp, Homo sapiens
atcttactgctcatt

SEQ ID NO: 1725725 - DNA, 15 bp, Homo sapiens
tcttactgctcatta

SEQ ID NO: 1725726 - DNA, 15 bp, Homo sapiens
cttactgctcattaa

SEQ ID NO: 1725727 - DNA, 15 bp, Homo sapiens
ttactgctcattaac

SEQ ID NO: 1725728 - DNA, 15 bp, Homo sapiens
tactgctcattaaca

SEQ ID NO: 1725729 - DNA, 15 bp, Homo sapiens
actgctcattaacat

SEQ ID NO: 1725730 - DNA, 15 bp, Homo sapiens
ctgctcattaacatc

SEQ ID NO: 1725731 - DNA, 15 bp, Homo sapiens
tgctcattaacatcc

SEQ ID NO: 1725732 - DNA, 15 bp, Homo sapiens
gctcattaacatccc

SEQ ID NO: 1725733 - DNA, 15 bp, Homo sapiens
ctcattaacatccct

SEQ ID NO: 1725734 - DNA, 15 bp, Homo sapiens
tcattaacatccctt

SEQ ID NO: 1725735 - DNA, 15 bp, Homo sapiens
cattaacatcccttt

SEQ ID NO: 1725736 - DNA, 15 bp, Homo sapiens
attaacatccctttc

SEQ ID NO: 1725737 - DNA, 15 bp, Homo sapiens
ttaacatccctttct

SEQ ID NO: 1725738 - DNA, 15 bp, Homo sapiens
taacatccctttctt

SEQ ID NO: 1725739 - DNA, 15 bp, Homo sapiens
aacatccctttcttt

SEQ ID NO: 1725740 - DNA, 15 bp, Homo sapiens
acatccctttctttc

SEQ ID NO: 1725741 - DNA, 15 bp, Homo sapiens
catccctttctttct

SEQ ID NO: 1725742 - DNA, 15 bp, Homo sapiens
atccctttctttctg

SEQ ID NO: 1725743 - DNA, 15 bp, Homo sapiens
tccctttctttctga

SEQ ID NO: 1725744 - DNA, 15 bp, Homo sapiens
ccctttctttctgat

SEQ ID NO: 1725745 - DNA, 15 bp, Homo sapiens
cctttctttctgatt

SEQ ID NO: 1725746 - DNA, 15 bp, Homo sapiens
ctttctttctgattg

SEQ ID NO: 1725747 - DNA, 15 bp, Homo sapiens
tttctttctgattgt

SEQ ID NO: 1725748 - DNA, 15 bp, Homo sapiens
ttctttctgattgta

SEQ ID NO: 1725749 - DNA, 15 bp, Homo sapiens
tctttctgattgtag

SEQ ID NO: 1725750 - DNA, 15 bp, Homo sapiens
ctttctgattgtagt

SEQ ID NO: 1725751 - DNA, 15 bp, Homo sapiens
tttctgattgtagta

SEQ ID NO: 1725752 - DNA, 15 bp, Homo sapiens
ttctgattgtagtac

SEQ ID NO: 1725753 - DNA, 15 bp, Homo sapiens
tctgattgtagtact

SEQ ID NO: 1725754 - DNA, 15 bp, Homo sapiens
ctgattgtagtactc

SEQ ID NO: 1725755 - DNA, 15 bp, Homo sapiens
tgattgtagtactcc

SEQ ID NO: 1725756 - DNA, 15 bp, Homo sapiens
gattgtagtactccc

SEQ ID NO: 1725757 - DNA, 15 bp, Homo sapiens
attgtagtactcccg

SEQ ID NO: 1725758 - DNA, 15 bp, Homo sapiens
ttgtagtactcccgt

SEQ ID NO: 1725759 - DNA, 15 bp, Homo sapiens
tgtagtactcccgtc

SEQ ID NO: 1725760 - DNA, 15 bp, Homo sapiens
gtagtactcccgtca

SEQ ID NO: 1725761 - DNA, 15 bp, Homo sapiens
tagtactcccgtcag

SEQ ID NO: 1725762 - DNA, 15 bp, Homo sapiens
agtactcccgtcagc

SEQ ID NO: 1725763 - DNA, 15 bp, Homo sapiens
gtactcccgtcagca

SEQ ID NO: 1725764 - DNA, 15 bp, Homo sapiens
tactcccgtcagcat

SEQ ID NO: 1725765 - DNA, 15 bp, Homo sapiens
actcccgtcagcatt

SEQ ID NO: 1725766 - DNA, 15 bp, Homo sapiens
ctcccgtcagcattt

SEQ ID NO: 1725767 - DNA, 15 bp, Homo sapiens
tcccgtcagcatttc

SEQ ID NO: 1725768 - DNA, 15 bp, Homo sapiens
cccgtcagcatttct

SEQ ID NO: 1725769 - DNA, 15 bp, Homo sapiens
ccgtcagcatttctt

SEQ ID NO: 1725770 - DNA, 15 bp, Homo sapiens
cgtcagcatttcttg

SEQ ID NO: 1725771 - DNA, 15 bp, Homo sapiens
gtcagcatttcttgt

SEQ ID NO: 1725772 - DNA, 15 bp, Homo sapiens
tcagcatttcttgtg

SEQ ID NO: 1725773 - DNA, 15 bp, Homo sapiens
cagcatttcttgtgg

SEQ ID NO: 1725774 - DNA, 15 bp, Homo sapiens
agcatttcttgtggg

SEQ ID NO: 1725775 - DNA, 15 bp, Homo sapiens
gcatttcttgtggga

SEQ ID NO: 1725776 - DNA, 15 bp, Homo sapiens
catttcttgtgggac

SEQ ID NO: 1725777 - DNA, 15 bp, Homo sapiens
atttcttgtgggaca

SEQ ID NO: 1725778 - DNA, 15 bp, Homo sapiens
tttcttgtgggacag

SEQ ID NO: 1725779 - DNA, 15 bp, Homo sapiens
ttcttgtgggacaga

SEQ ID NO: 1725780 - DNA, 15 bp, Homo sapiens
tcttgtgggacagat

SEQ ID NO: 1725781 - DNA, 15 bp, Homo sapiens
cttgtgggacagatc

SEQ ID NO: 1725782 - DNA, 15 bp, Homo sapiens
ttgtgggacagatcc

SEQ ID NO: 1725783 - DNA, 15 bp, Homo sapiens
tgtgggacagatcca

SEQ ID NO: 1725784 - DNA, 15 bp, Homo sapiens
gtgggacagatccag

SEQ ID NO: 1725785 - DNA, 15 bp, Homo sapiens
tgggacagatccagt

SEQ ID NO: 1725786 - DNA, 15 bp, Homo sapiens
gggacagatccagtg

SEQ ID NO: 1725787 - DNA, 15 bp, Homo sapiens
ggacagatccagtgt

SEQ ID NO: 1725788 - DNA, 15 bp, Homo sapiens
gacagatccagtgtt

SEQ ID NO: 1725789 - DNA, 15 bp, Homo sapiens
acagatccagtgttg

SEQ ID NO: 1725790 - DNA, 15 bp, Homo sapiens
cagatccagtgttga

SEQ ID NO: 1725791 - DNA, 15 bp, Homo sapiens
agatccagtgttgat

SEQ ID NO: 1725792 - DNA, 15 bp, Homo sapiens
gatccagtgttgatg

SEQ ID NO: 1725793 - DNA, 15 bp, Homo sapiens
atccagtgttgatga

SEQ ID NO: 1725794 - DNA, 15 bp, Homo sapiens
tccagtgttgatgaa

SEQ ID NO: 1725795 - DNA, 15 bp, Homo sapiens
ccagtgttgatgaaa

SEQ ID NO: 1725796 - DNA, 15 bp, Homo sapiens
cagtgttgatgaaat

SEQ ID NO: 1725797 - DNA, 15 bp, Homo sapiens
agtgttgatgaaatc

SEQ ID NO: 1725798 - DNA, 15 bp, Homo sapiens
gtgttgatgaaatcc

SEQ ID NO: 1725799 - DNA, 15 bp, Homo sapiens
tgttgatgaaatccc

SEQ ID NO: 1725800 - DNA, 15 bp, Homo sapiens
gttgatgaaatccct

SEQ ID NO: 1725801 - DNA, 15 bp, Homo sapiens
ttgatgaaatccctc

SEQ ID NO: 1725802 - DNA, 15 bp, Homo sapiens
tgatgaaatccctct

SEQ ID NO: 1725803 - DNA, 15 bp, Homo sapiens
gatgaaatccctctt

SEQ ID NO: 1725804 - DNA, 15 bp, Homo sapiens
atgaaatccctctta

SEQ ID NO: 1725805 - DNA, 15 bp, Homo sapiens
tgaaatccctcttac

SEQ ID NO: 1725806 - DNA, 15 bp, Homo sapiens
gaaatccctcttacg

SEQ ID NO: 1725807 - DNA, 15 bp, Homo sapiens
aaatccctcttacga

SEQ ID NO: 1725808 - DNA, 15 bp, Homo sapiens
aatccctcttacgat

SEQ ID NO: 1725809 - DNA, 15 bp, Homo sapiens
atccctcttacgatt

SEQ ID NO: 1725810 - DNA, 15 bp, Homo sapiens
tccctcttacgattc

SEQ ID NO: 1725811 - DNA, 15 bp, Homo sapiens
ccctcttacgattcc

SEQ ID NO: 1725812 - DNA, 15 bp, Homo sapiens
cctcttacgattcct

SEQ ID NO: 1725813 - DNA, 15 bp, Homo sapiens
ctcttacgattcctt

SEQ ID NO: 1725814 - DNA, 15 bp, Homo sapiens
tcttacgattccttt

SEQ ID NO: 1725815 - DNA, 15 bp, Homo sapiens
cttacgattcctttg

SEQ ID NO: 1725816 - DNA, 15 bp, Homo sapiens
ttacgattcctttga

SEQ ID NO: 1725817 - DNA, 15 bp, Homo sapiens
tacgattcctttgaa

SEQ ID NO: 1725818 - DNA, 15 bp, Homo sapiens
acgattcctttgaat

SEQ ID NO: 1725819 - DNA, 15 bp, Homo sapiens
cgattcctttgaata

SEQ ID NO: 1725820 - DNA, 15 bp, Homo sapiens
gattcctttgaataa

SEQ ID NO: 1725821 - DNA, 15 bp, Homo sapiens
attcctttgaataaa

SEQ ID NO: 1725822 - DNA, 15 bp, Homo sapiens
ttcctttgaataaac

SEQ ID NO: 1725823 - DNA, 15 bp, Homo sapiens
tcctttgaataaact

SEQ ID NO: 1725824 - DNA, 15 bp, Homo sapiens
cctttgaataaactt

SEQ ID NO: 1725825 - DNA, 15 bp, Homo sapiens
ctttgaataaacttt

SEQ ID NO: 1725826 - DNA, 15 bp, Homo sapiens
tttgaataaactttc

SEQ ID NO: 1725827 - DNA, 15 bp, Homo sapiens
ttgaataaactttct

SEQ ID NO: 1725828 - DNA, 15 bp, Homo sapiens
tgaataaactttcta

SEQ ID NO: 1725829 - DNA, 15 bp, Homo sapiens
gaataaactttctac

SEQ ID NO: 1725830 - DNA, 15 bp, Homo sapiens
aataaactttctacc

SEQ ID NO: 1725831 - DNA, 15 bp, Homo sapiens
ataaactttctaccc

SEQ ID NO: 1725832 - DNA, 15 bp, Homo sapiens
taaactttctacccc

SEQ ID NO: 1725833 - DNA, 15 bp, Homo sapiens
aaactttctacccca

SEQ ID NO: 1725834 - DNA, 15 bp, Homo sapiens
aactttctaccccat

SEQ ID NO: 1725835 - DNA, 15 bp, Homo sapiens
actttctaccccatc

SEQ ID NO: 1725836 - DNA, 15 bp, Homo sapiens
ctttctaccccatca

SEQ ID NO: 1725837 - DNA, 15 bp, Homo sapiens
tttctaccccatcac

SEQ ID NO: 1725838 - DNA, 15 bp, Homo sapiens
ttctaccccatcact

SEQ ID NO: 1725839 - DNA, 15 bp, Homo sapiens
tctaccccatcactc

SEQ ID NO: 1725840 - DNA, 15 bp, Homo sapiens
ctaccccatcactct

SEQ ID NO: 1725841 - DNA, 15 bp, Homo sapiens
taccccatcactctc

SEQ ID NO: 1725842 - DNA, 15 bp, Homo sapiens
accccatcactctct

SEQ ID NO: 1725843 - DNA, 15 bp, Homo sapiens
ccccatcactctctc

SEQ ID NO: 1725844 - DNA, 15 bp, Homo sapiens
cccatcactctctct

SEQ ID NO: 1725845 - DNA, 15 bp, Homo sapiens
ccatcactctctcta

SEQ ID NO: 1725846 - DNA, 15 bp, Homo sapiens
catcactctctctac

SEQ ID NO: 1725847 - DNA, 15 bp, Homo sapiens
atcactctctctacc

SEQ ID NO: 1725848 - DNA, 15 bp, Homo sapiens
tcactctctctacct

SEQ ID NO: 1725849 - DNA, 15 bp, Homo sapiens
cactctctctaccta

SEQ ID NO: 1725850 - DNA, 15 bp, Homo sapiens
actctctctacctac

SEQ ID NO: 1725851 - DNA, 15 bp, Homo sapiens
ctctctctacctact

SEQ ID NO: 1725852 - DNA, 15 bp, Homo sapiens
tctctctacctactt

SEQ ID NO: 1725853 - DNA, 15 bp, Homo sapiens
ctctctacctacttt

SEQ ID NO: 1725854 - DNA, 15 bp, Homo sapiens
tctctacctactttt

SEQ ID NO: 1725855 - DNA, 15 bp, Homo sapiens
ctctacctacttttt

SEQ ID NO: 1725856 - DNA, 15 bp, Homo sapiens
tctacctacttttta

SEQ ID NO: 1725857 - DNA, 15 bp, Homo sapiens
ctacctactttttaa

SEQ ID NO: 1725858 - DNA, 15 bp, Homo sapiens
tacctactttttaag

SEQ ID NO: 1725859 - DNA, 15 bp, Homo sapiens
acctactttttaagg

SEQ ID NO: 1725860 - DNA, 15 bp, Homo sapiens
cctactttttaaggc

SEQ ID NO: 1725861 - DNA, 15 bp, Homo sapiens
ctactttttaaggcc

SEQ ID NO: 1725862 - DNA, 15 bp, Homo sapiens
tactttttaaggcca

SEQ ID NO: 1725863 - DNA, 15 bp, Homo sapiens
actttttaaggccaa

SEQ ID NO: 1725864 - DNA, 15 bp, Homo sapiens
ctttttaaggccaat

SEQ ID NO: 1725865 - DNA, 15 bp, Homo sapiens
tttttaaggccaata

SEQ ID NO: 1725866 - DNA, 15 bp, Homo sapiens
ttttaaggccaataa

SEQ ID NO: 1725867 - DNA, 15 bp, Homo sapiens
tttaaggccaataac

SEQ ID NO: 1725868 - DNA, 15 bp, Homo sapiens
ttaaggccaataact

SEQ ID NO: 1725869 - DNA, 15 bp, Homo sapiens
taaggccaataacta

SEQ ID NO: 1725870 - DNA, 15 bp, Homo sapiens
aaggccaataactat

SEQ ID NO: 1725871 - DNA, 15 bp, Homo sapiens
aggccaataactatt

SEQ ID NO: 1725872 - DNA, 15 bp, Homo sapiens
ggccaataactatta

SEQ ID NO: 1725873 - DNA, 15 bp, Homo sapiens
gccaataactattag

SEQ ID NO: 1725874 - DNA, 15 bp, Homo sapiens
ccaataactattaga

SEQ ID NO: 1725875 - DNA, 15 bp, Homo sapiens
caataactattagat

SEQ ID NO: 1725876 - DNA, 15 bp, Homo sapiens
aataactattagatt

SEQ ID NO: 1725877 - DNA, 15 bp, Homo sapiens
ataactattagattt

SEQ ID NO: 1725878 - DNA, 15 bp, Homo sapiens
taactattagatttg

SEQ ID NO: 1725879 - DNA, 15 bp, Homo sapiens
aactattagatttgc

SEQ ID NO: 1725880 - DNA, 15 bp, Homo sapiens
actattagatttgcc

SEQ ID NO: 1725881 - DNA, 15 bp, Homo sapiens
ctattagatttgccc

SEQ ID NO: 1725882 - DNA, 15 bp, Homo sapiens
tattagatttgccct

SEQ ID NO: 1725883 - DNA, 15 bp, Homo sapiens
attagatttgccctt

SEQ ID NO: 1725884 - DNA, 15 bp, Homo sapiens
ttagatttgcccttt

SEQ ID NO: 1725885 - DNA, 15 bp, Homo sapiens
tagatttgccctttt

SEQ ID NO: 1725886 - DNA, 15 bp, Homo sapiens
agatttgcccttttg

SEQ ID NO: 1725887 - DNA, 15 bp, Homo sapiens
gatttgcccttttga

SEQ ID NO: 1725888 - DNA, 15 bp, Homo sapiens
atttgcccttttgat

SEQ ID NO: 1725889 - DNA, 15 bp, Homo sapiens
tttgcccttttgatg

SEQ ID NO: 1725890 - DNA, 15 bp, Homo sapiens
ttgcccttttgatgc

SEQ ID NO: 1725891 - DNA, 15 bp, Homo sapiens
tgcccttttgatgct

SEQ ID NO: 1725892 - DNA, 15 bp, Homo sapiens
gcccttttgatgcta

SEQ ID NO: 1725893 - DNA, 15 bp, Homo sapiens
cccttttgatgctat

SEQ ID NO: 1725894 - DNA, 15 bp, Homo sapiens
ccttttgatgctatt

SEQ ID NO: 1725895 - DNA, 15 bp, Homo sapiens
cttttgatgctattt

SEQ ID NO: 1725896 - DNA, 15 bp, Homo sapiens
ttttgatgctatttt

SEQ ID NO: 1725897 - DNA, 15 bp, Homo sapiens
tttgatgctattttc

SEQ ID NO: 1725898 - DNA, 15 bp, Homo sapiens
ttgatgctattttct

SEQ ID NO: 1725899 - DNA, 15 bp, Homo sapiens
tgatgctattttcta

SEQ ID NO: 1725900 - DNA, 15 bp, Homo sapiens
gatgctattttctag

SEQ ID NO: 1725901 - DNA, 15 bp, Homo sapiens
atgctattttctaga

SEQ ID NO: 1725902 - DNA, 15 bp, Homo sapiens
tgctattttctagat

SEQ ID NO: 1725903 - DNA, 15 bp, Homo sapiens
gctattttctagatc

SEQ ID NO: 1725904 - DNA, 15 bp, Homo sapiens
ctattttctagatct

SEQ ID NO: 1725905 - DNA, 15 bp, Homo sapiens
tattttctagatctt

SEQ ID NO: 1725906 - DNA, 15 bp, Homo sapiens
attttctagatctta

SEQ ID NO: 1725907 - DNA, 15 bp, Homo sapiens
ttttctagatcttat

SEQ ID NO: 1725908 - DNA, 15 bp, Homo sapiens
tttctagatcttata

SEQ ID NO: 1725909 - DNA, 15 bp, Homo sapiens
ttctagatcttatag

SEQ ID NO: 1725910 - DNA, 15 bp, Homo sapiens
tctagatcttatagt

SEQ ID NO: 1725911 - DNA, 15 bp, Homo sapiens
ctagatcttatagtt

SEQ ID NO: 1725912 - DNA, 15 bp, Homo sapiens
tagatcttatagttg

SEQ ID NO: 1725913 - DNA, 15 bp, Homo sapiens
agatcttatagttgt

SEQ ID NO: 1725914 - DNA, 15 bp, Homo sapiens
gatcttatagttgtg

SEQ ID NO: 1725915 - DNA, 15 bp, Homo sapiens
atcttatagttgtgt

SEQ ID NO: 1725916 - DNA, 15 bp, Homo sapiens
tcttatagttgtgtt

SEQ ID NO: 1725917 - DNA, 15 bp, Homo sapiens
cttatagttgtgttt

SEQ ID NO: 1725918 - DNA, 15 bp, Homo sapiens
ttatagttgtgtttc

SEQ ID NO: 1725919 - DNA, 15 bp, Homo sapiens
tatagttgtgtttca

SEQ ID NO: 1725920 - DNA, 15 bp, Homo sapiens
atagttgtgtttcat

SEQ ID NO: 1725921 - DNA, 15 bp, Homo sapiens
tagttgtgtttcatt

SEQ ID NO: 1725922 - DNA, 15 bp, Homo sapiens
agttgtgtttcattt

SEQ ID NO: 1725923 - DNA, 15 bp, Homo sapiens
gttgtgtttcatttt

SEQ ID NO: 1725924 - DNA, 15 bp, Homo sapiens
ttgtgtttcattttt

SEQ ID NO: 1725925 - DNA, 15 bp, Homo sapiens
tgtgtttcatttttt

SEQ ID NO: 1725926 - DNA, 15 bp, Homo sapiens
gtgtttcatttttta

SEQ ID NO: 1725927 - DNA, 15 bp, Homo sapiens
tgtttcattttttaa

SEQ ID NO: 1725928 - DNA, 15 bp, Homo sapiens
gtttcattttttaaa

SEQ ID NO: 1725929 - DNA, 15 bp, Homo sapiens
tttcattttttaaat

SEQ ID NO: 1725930 - DNA, 15 bp, Homo sapiens
ttcattttttaaatt

SEQ ID NO: 1725931 - DNA, 15 bp, Homo sapiens
tcattttttaaattc

SEQ ID NO: 1725932 - DNA, 15 bp, Homo sapiens
cattttttaaattct

SEQ ID NO: 1725933 - DNA, 15 bp, Homo sapiens
attttttaaattctt

SEQ ID NO: 1725934 - DNA, 15 bp, Homo sapiens
ttttttaaattcttt

SEQ ID NO: 1725935 - DNA, 15 bp, Homo sapiens
tttttaaattctttt

SEQ ID NO: 1725936 - DNA, 15 bp, Homo sapiens
ttttaaattcttttt

SEQ ID NO: 1725937 - DNA, 15 bp, Homo sapiens
tttaaattctttttg

SEQ ID NO: 1725938 - DNA, 15 bp, Homo sapiens
ttaaattctttttgt

SEQ ID NO: 1725939 - DNA, 15 bp, Homo sapiens
taaattctttttgtg

SEQ ID NO: 1725940 - DNA, 15 bp, Homo sapiens
aaattctttttgtgt

SEQ ID NO: 1725941 - DNA, 15 bp, Homo sapiens
aattctttttgtgtg

SEQ ID NO: 1725942 - DNA, 15 bp, Homo sapiens
attctttttgtgtgt

SEQ ID NO: 1725943 - DNA, 15 bp, Homo sapiens
ttctttttgtgtgtg

SEQ ID NO: 1725944 - DNA, 15 bp, Homo sapiens
tctttttgtgtgtgt

SEQ ID NO: 1725945 - DNA, 15 bp, Homo sapiens
ctttttgtgtgtgta

SEQ ID NO: 1725946 - DNA, 15 bp, Homo sapiens
tttttgtgtgtgtag

SEQ ID NO: 1725947 - DNA, 15 bp, Homo sapiens
ttttgtgtgtgtagt

SEQ ID NO: 1725948 - DNA, 15 bp, Homo sapiens
tttgtgtgtgtagtt

SEQ ID NO: 1725949 - DNA, 15 bp, Homo sapiens
ttgtgtgtgtagttt

SEQ ID NO: 1725950 - DNA, 15 bp, Homo sapiens
tgtgtgtgtagtttt

SEQ ID NO: 1725951 - DNA, 15 bp, Homo sapiens
gtgtgtgtagttttg

SEQ ID NO: 1725952 - DNA, 15 bp, Homo sapiens
tgtgtgtagttttgt

SEQ ID NO: 1725953 - DNA, 15 bp, Homo sapiens
gtgtgtagttttgtg

SEQ ID NO: 1725954 - DNA, 15 bp, Homo sapiens
tgtgtagttttgtgt

SEQ ID NO: 1725955 - DNA, 15 bp, Homo sapiens
gtgtagttttgtgta

SEQ ID NO: 1725956 - DNA, 15 bp, Homo sapiens
tgtagttttgtgtat

SEQ ID NO: 1725957 - DNA, 15 bp, Homo sapiens
gtagttttgtgtatt

SEQ ID NO: 1725958 - DNA, 15 bp, Homo sapiens
tagttttgtgtattc

SEQ ID NO: 1725959 - DNA, 15 bp, Homo sapiens
agttttgtgtattca

SEQ ID NO: 1725960 - DNA, 15 bp, Homo sapiens
gttttgtgtattcac

SEQ ID NO: 1725961 - DNA, 15 bp, Homo sapiens
ttttgtgtattcact

SEQ ID NO: 1725962 - DNA, 15 bp, Homo sapiens
tttgtgtattcactg

SEQ ID NO: 1725963 - DNA, 15 bp, Homo sapiens
ttgtgtattcactgt

SEQ ID NO: 1725964 - DNA, 15 bp, Homo sapiens
tgtgtattcactgtg

SEQ ID NO: 1725965 - DNA, 15 bp, Homo sapiens
gtgtattcactgtgt

SEQ ID NO: 1725966 - DNA, 15 bp, Homo sapiens
tgtattcactgtgta

SEQ ID NO: 1725967 - DNA, 15 bp, Homo sapiens
gtattcactgtgtat

SEQ ID NO: 1725968 - DNA, 15 bp, Homo sapiens
tattcactgtgtatt

SEQ ID NO: 1725969 - DNA, 15 bp, Homo sapiens
attcactgtgtattt

SEQ ID NO: 1725970 - DNA, 15 bp, Homo sapiens
ttcactgtgtatttt

SEQ ID NO: 1725971 - DNA, 15 bp, Homo sapiens
tcactgtgtattttc

SEQ ID NO: 1725972 - DNA, 15 bp, Homo sapiens
cactgtgtattttca

SEQ ID NO: 1725973 - DNA, 15 bp, Homo sapiens
actgtgtattttcaa

SEQ ID NO: 1725974 - DNA, 15 bp, Homo sapiens
ctgtgtattttcaaa

SEQ ID NO: 1725975 - DNA, 15 bp, Homo sapiens
tgtgtattttcaaat

SEQ ID NO: 1725976 - DNA, 15 bp, Homo sapiens
gtgtattttcaaata

SEQ ID NO: 1725977 - DNA, 15 bp, Homo sapiens
tgtattttcaaataa

SEQ ID NO: 1725978 - DNA, 15 bp, Homo sapiens
gtattttcaaataac

SEQ ID NO: 1725979 - DNA, 15 bp, Homo sapiens
tattttcaaataact

SEQ ID NO: 1725980 - DNA, 15 bp, Homo sapiens
attttcaaataactc

SEQ ID NO: 1725981 - DNA, 15 bp, Homo sapiens
ttttcaaataactca

SEQ ID NO: 1725982 - DNA, 15 bp, Homo sapiens
tttcaaataactcac

SEQ ID NO: 1725983 - DNA, 15 bp, Homo sapiens
ttcaaataactcact

SEQ ID NO: 1725984 - DNA, 15 bp, Homo sapiens
tcaaataactcacta

SEQ ID NO: 1725985 - DNA, 15 bp, Homo sapiens
caaataactcactaa

SEQ ID NO: 1725986 - DNA, 15 bp, Homo sapiens
aaataactcactaat

SEQ ID NO: 1725987 - DNA, 15 bp, Homo sapiens
aataactcactaatt

SEQ ID NO: 1725988 - DNA, 15 bp, Homo sapiens
ataactcactaattc

SEQ ID NO: 1725989 - DNA, 15 bp, Homo sapiens
taactcactaattct

SEQ ID NO: 1725990 - DNA, 15 bp, Homo sapiens
aactcactaattctt

SEQ ID NO: 1725991 - DNA, 15 bp, Homo sapiens
actcactaattcttt

SEQ ID NO: 1725992 - DNA, 15 bp, Homo sapiens
ctcactaattctttc

SEQ ID NO: 1725993 - DNA, 15 bp, Homo sapiens
tcactaattctttct

SEQ ID NO: 1725994 - DNA, 15 bp, Homo sapiens
cactaattctttctt

SEQ ID NO: 1725995 - DNA, 15 bp, Homo sapiens
actaattctttcttc

SEQ ID NO: 1725996 - DNA, 15 bp, Homo sapiens
ctaattctttcttct

SEQ ID NO: 1725997 - DNA, 15 bp, Homo sapiens
taattctttcttctg

SEQ ID NO: 1725998 - DNA, 15 bp, Homo sapiens
aattctttcttctgc

SEQ ID NO: 1725999 - DNA, 15 bp, Homo sapiens
attctttcttctgct

SEQ ID NO: 1726000 - DNA, 15 bp, Homo sapiens
ttctttcttctgctt

SEQ ID NO: 1726001 - DNA, 15 bp, Homo sapiens
tctttcttctgcttg

SEQ ID NO: 1726002 - DNA, 15 bp, Homo sapiens
ctttcttctgcttga

SEQ ID NO: 1726003 - DNA, 15 bp, Homo sapiens
tttcttctgcttgat

SEQ ID NO: 1726004 - DNA, 15 bp, Homo sapiens
ttcttctgcttgatc

SEQ ID NO: 1726005 - DNA, 15 bp, Homo sapiens
tcttctgcttgatca

SEQ ID NO: 1726006 - DNA, 15 bp, Homo sapiens
cttctgcttgatcaa

SEQ ID NO: 1726007 - DNA, 15 bp, Homo sapiens
ttctgcttgatcaat

SEQ ID NO: 1726008 - DNA, 15 bp, Homo sapiens
tctgcttgatcaatt

SEQ ID NO: 1726009 - DNA, 15 bp, Homo sapiens
ctgcttgatcaattc

SEQ ID NO: 1726010 - DNA, 15 bp, Homo sapiens
tgcttgatcaattct

SEQ ID NO: 1726011 - DNA, 15 bp, Homo sapiens
gcttgatcaattctg

SEQ ID NO: 1726012 - DNA, 15 bp, Homo sapiens
cttgatcaattctgc

SEQ ID NO: 1726013 - DNA, 15 bp, Homo sapiens
ttgatcaattctgcc

SEQ ID NO: 1726014 - DNA, 15 bp, Homo sapiens
tgatcaattctgcca

SEQ ID NO: 1726015 - DNA, 15 bp, Homo sapiens
gatcaattctgccat

SEQ ID NO: 1726016 - DNA, 15 bp, Homo sapiens
atcaattctgccatt

SEQ ID NO: 1726017 - DNA, 15 bp, Homo sapiens
tcaattctgccatta

SEQ ID NO: 1726018 - DNA, 15 bp, Homo sapiens
caattctgccattaa

SEQ ID NO: 1726019 - DNA, 15 bp, Homo sapiens
aattctgccattaaa

SEQ ID NO: 1726020 - DNA, 15 bp, Homo sapiens
attctgccattaaaa

SEQ ID NO: 1726021 - DNA, 15 bp, Homo sapiens
ttctgccattaaaag

SEQ ID NO: 1726022 - DNA, 15 bp, Homo sapiens
tctgccattaaaaga

SEQ ID NO: 1726023 - DNA, 15 bp, Homo sapiens
ctgccattaaaagac

SEQ ID NO: 1726024 - DNA, 15 bp, Homo sapiens
tgccattaaaagacc

SEQ ID NO: 1726025 - DNA, 15 bp, Homo sapiens
gccattaaaagacct

SEQ ID NO: 1726026 - DNA, 15 bp, Homo sapiens
ccattaaaagacctc

SEQ ID NO: 1726027 - DNA, 15 bp, Homo sapiens
cattaaaagacctcg

SEQ ID NO: 1726028 - DNA, 15 bp, Homo sapiens
attaaaagacctcga

SEQ ID NO: 1726029 - DNA, 15 bp, Homo sapiens
ttaaaagacctcgat

SEQ ID NO: 1726030 - DNA, 15 bp, Homo sapiens
taaaagacctcgatg

SEQ ID NO: 1726031 - DNA, 15 bp, Homo sapiens
aaaagacctcgatgc

SEQ ID NO: 1726032 - DNA, 15 bp, Homo sapiens
aaagacctcgatgca

SEQ ID NO: 1726033 - DNA, 15 bp, Homo sapiens
aagacctcgatgcat

SEQ ID NO: 1726034 - DNA, 15 bp, Homo sapiens
agacctcgatgcatt

SEQ ID NO: 1726035 - DNA, 15 bp, Homo sapiens
gacctcgatgcattt

SEQ ID NO: 1726036 - DNA, 15 bp, Homo sapiens
acctcgatgcatttt

SEQ ID NO: 1726037 - DNA, 15 bp, Homo sapiens
cctcgatgcattttc

SEQ ID NO: 1726038 - DNA, 15 bp, Homo sapiens
ctcgatgcattttca

SEQ ID NO: 1726039 - DNA, 15 bp, Homo sapiens
tcgatgcattttcag

SEQ ID NO: 1726040 - DNA, 15 bp, Homo sapiens
cgatgcattttcagt

SEQ ID NO: 1726041 - DNA, 15 bp, Homo sapiens
gatgcattttcagta

SEQ ID NO: 1726042 - DNA, 15 bp, Homo sapiens
atgcattttcagtaa

SEQ ID NO: 1726043 - DNA, 15 bp, Homo sapiens
tgcattttcagtaag

SEQ ID NO: 1726044 - DNA, 15 bp, Homo sapiens
gcattttcagtaagt

SEQ ID NO: 1726045 - DNA, 15 bp, Homo sapiens
cattttcagtaagtc

SEQ ID NO: 1726046 - DNA, 15 bp, Homo sapiens
attttcagtaagtca

SEQ ID NO: 1726047 - DNA, 15 bp, Homo sapiens
ttttcagtaagtcaa

SEQ ID NO: 1726048 - DNA, 15 bp, Homo sapiens
tttcagtaagtcaat

SEQ ID NO: 1726049 - DNA, 15 bp, Homo sapiens
ttcagtaagtcaatt

SEQ ID NO: 1726050 - DNA, 15 bp, Homo sapiens
tcagtaagtcaattg

SEQ ID NO: 1726051 - DNA, 15 bp, Homo sapiens
cagtaagtcaattgc

SEQ ID NO: 1726052 - DNA, 15 bp, Homo sapiens
agtaagtcaattgca

SEQ ID NO: 1726053 - DNA, 15 bp, Homo sapiens
gtaagtcaattgcat

SEQ ID NO: 1726054 - DNA, 15 bp, Homo sapiens
taagtcaattgcatt

SEQ ID NO: 1726055 - DNA, 15 bp, Homo sapiens
aagtcaattgcattt

SEQ ID NO: 1726056 - DNA, 15 bp, Homo sapiens
agtcaattgcatttt

SEQ ID NO: 1726057 - DNA, 15 bp, Homo sapiens
gtcaattgcattttt

SEQ ID NO: 1726058 - DNA, 15 bp, Homo sapiens
tcaattgcatttttc

SEQ ID NO: 1726059 - DNA, 15 bp, Homo sapiens
caattgcatttttca

SEQ ID NO: 1726060 - DNA, 15 bp, Homo sapiens
aattgcatttttcaa

SEQ ID NO: 1726061 - DNA, 15 bp, Homo sapiens
attgcatttttcaac

SEQ ID NO: 1726062 - DNA, 15 bp, Homo sapiens
ttgcatttttcaact

SEQ ID NO: 1726063 - DNA, 15 bp, Homo sapiens
tgcatttttcaactc

SEQ ID NO: 1726064 - DNA, 15 bp, Homo sapiens
gcatttttcaactcc

SEQ ID NO: 1726065 - DNA, 15 bp, Homo sapiens
catttttcaactcca

SEQ ID NO: 1726066 - DNA, 15 bp, Homo sapiens
atttttcaactccag

SEQ ID NO: 1726067 - DNA, 15 bp, Homo sapiens
tttttcaactccaga

SEQ ID NO: 1726068 - DNA, 15 bp, Homo sapiens
ttttcaactccagaa

SEQ ID NO: 1726069 - DNA, 15 bp, Homo sapiens
tttcaactccagaat

SEQ ID NO: 1726070 - DNA, 15 bp, Homo sapiens
ttcaactccagaatt

SEQ ID NO: 1726071 - DNA, 15 bp, Homo sapiens
tcaactccagaattt

SEQ ID NO: 1726072 - DNA, 15 bp, Homo sapiens
caactccagaatttc

SEQ ID NO: 1726073 - DNA, 15 bp, Homo sapiens
aactccagaatttct

SEQ ID NO: 1726074 - DNA, 15 bp, Homo sapiens
actccagaatttctg

SEQ ID NO: 1726075 - DNA, 15 bp, Homo sapiens
ctccagaatttctgc

SEQ ID NO: 1726076 - DNA, 15 bp, Homo sapiens
tccagaatttctgct

SEQ ID NO: 1726077 - DNA, 15 bp, Homo sapiens
ccagaatttctgctt

SEQ ID NO: 1726078 - DNA, 15 bp, Homo sapiens
cagaatttctgcttg

SEQ ID NO: 1726079 - DNA, 15 bp, Homo sapiens
agaatttctgcttga

SEQ ID NO: 1726080 - DNA, 15 bp, Homo sapiens
gaatttctgcttgac

SEQ ID NO: 1726081 - DNA, 15 bp, Homo sapiens
aatttctgcttgact

SEQ ID NO: 1726082 - DNA, 15 bp, Homo sapiens
atttctgcttgactg

SEQ ID NO: 1726083 - DNA, 15 bp, Homo sapiens
tttctgcttgactgt

SEQ ID NO: 1726084 - DNA, 15 bp, Homo sapiens
ttctgcttgactgtt

SEQ ID NO: 1726085 - DNA, 15 bp, Homo sapiens
tctgcttgactgttt

SEQ ID NO: 1726086 - DNA, 15 bp, Homo sapiens
ctgcttgactgtttt

SEQ ID NO: 1726087 - DNA, 15 bp, Homo sapiens
tgcttgactgtttta

SEQ ID NO: 1726088 - DNA, 15 bp, Homo sapiens
gcttgactgttttaa

SEQ ID NO: 1726089 - DNA, 15 bp, Homo sapiens
cttgactgttttaaa

SEQ ID NO: 1726090 - DNA, 15 bp, Homo sapiens
ttgactgttttaaat

SEQ ID NO: 1726091 - DNA, 15 bp, Homo sapiens
tgactgttttaaatt

SEQ ID NO: 1726092 - DNA, 15 bp, Homo sapiens
gactgttttaaatta

SEQ ID NO: 1726093 - DNA, 15 bp, Homo sapiens
actgttttaaattat

SEQ ID NO: 1726094 - DNA, 15 bp, Homo sapiens
ctgttttaaattatt

SEQ ID NO: 1726095 - DNA, 15 bp, Homo sapiens
tgttttaaattattt

SEQ ID NO: 1726096 - DNA, 15 bp, Homo sapiens
gttttaaattatttc

SEQ ID NO: 1726097 - DNA, 15 bp, Homo sapiens
ttttaaattatttca

SEQ ID NO: 1726098 - DNA, 15 bp, Homo sapiens
tttaaattatttcaa

SEQ ID NO: 1726099 - DNA, 15 bp, Homo sapiens
ttaaattatttcaat

SEQ ID NO: 1726100 - DNA, 15 bp, Homo sapiens
taaattatttcaatc

SEQ ID NO: 1726101 - DNA, 15 bp, Homo sapiens
aaattatttcaatct

SEQ ID NO: 1726102 - DNA, 15 bp, Homo sapiens
aattatttcaatctc

SEQ ID NO: 1726103 - DNA, 15 bp, Homo sapiens
attatttcaatctct

SEQ ID NO: 1726104 - DNA, 15 bp, Homo sapiens
ttatttcaatctctt

SEQ ID NO: 1726105 - DNA, 15 bp, Homo sapiens
tatttcaatctcttt

SEQ ID NO: 1726106 - DNA, 15 bp, Homo sapiens
atttcaatctctttg

SEQ ID NO: 1726107 - DNA, 15 bp, Homo sapiens
tttcaatctctttgt

SEQ ID NO: 1726108 - DNA, 15 bp, Homo sapiens
ttcaatctctttgtt

SEQ ID NO: 1726109 - DNA, 15 bp, Homo sapiens
tcaatctctttgtta

SEQ ID NO: 1726110 - DNA, 15 bp, Homo sapiens
caatctctttgttaa

SEQ ID NO: 1726111 - DNA, 15 bp, Homo sapiens
aatctctttgttaac

SEQ ID NO: 1726112 - DNA, 15 bp, Homo sapiens
atctctttgttaact

SEQ ID NO: 1726113 - DNA, 15 bp, Homo sapiens
tctctttgttaactt

SEQ ID NO: 1726114 - DNA, 15 bp, Homo sapiens
ctctttgttaacttt

SEQ ID NO: 1726115 - DNA, 15 bp, Homo sapiens
tctttgttaacttta

SEQ ID NO: 1726116 - DNA, 15 bp, Homo sapiens
ctttgttaactttat

SEQ ID NO: 1726117 - DNA, 15 bp, Homo sapiens
tttgttaactttatc

SEQ ID NO: 1726118 - DNA, 15 bp, Homo sapiens
ttgttaactttatcc

SEQ ID NO: 1726119 - DNA, 15 bp, Homo sapiens
tgttaactttatccg

SEQ ID NO: 1726120 - DNA, 15 bp, Homo sapiens
gttaactttatccga

SEQ ID NO: 1726121 - DNA, 15 bp, Homo sapiens
ttaactttatccgat

SEQ ID NO: 1726122 - DNA, 15 bp, Homo sapiens
taactttatccgata

SEQ ID NO: 1726123 - DNA, 15 bp, Homo sapiens
aactttatccgatag

SEQ ID NO: 1726124 - DNA, 15 bp, Homo sapiens
actttatccgataga

SEQ ID NO: 1726125 - DNA, 15 bp, Homo sapiens
ctttatccgatagaa

SEQ ID NO: 1726126 - DNA, 15 bp, Homo sapiens
tttatccgatagaaa

SEQ ID NO: 1726127 - DNA, 15 bp, Homo sapiens
ttatccgatagaaat

SEQ ID NO: 1726128 - DNA, 15 bp, Homo sapiens
tatccgatagaaatc

SEQ ID NO: 1726129 - DNA, 15 bp, Homo sapiens
atccgatagaaatct

SEQ ID NO: 1726130 - DNA, 15 bp, Homo sapiens
tccgatagaaatctg

SEQ ID NO: 1726131 - DNA, 15 bp, Homo sapiens
ccgatagaaatctga

SEQ ID NO: 1726132 - DNA, 15 bp, Homo sapiens
cgatagaaatctgaa

SEQ ID NO: 1726133 - DNA, 15 bp, Homo sapiens
gatagaaatctgaat

SEQ ID NO: 1726134 - DNA, 15 bp, Homo sapiens
atagaaatctgaatt

SEQ ID NO: 1726135 - DNA, 15 bp, Homo sapiens
tagaaatctgaattc

SEQ ID NO: 1726136 - DNA, 15 bp, Homo sapiens
agaaatctgaattcc

SEQ ID NO: 1726137 - DNA, 15 bp, Homo sapiens
gaaatctgaattcct

SEQ ID NO: 1726138 - DNA, 15 bp, Homo sapiens
aaatctgaattcctt

SEQ ID NO: 1726139 - DNA, 15 bp, Homo sapiens
aatctgaattccttc

SEQ ID NO: 1726140 - DNA, 15 bp, Homo sapiens
atctgaattccttct

SEQ ID NO: 1726141 - DNA, 15 bp, Homo sapiens
tctgaattccttctc

SEQ ID NO: 1726142 - DNA, 15 bp, Homo sapiens
ctgaattccttctct

SEQ ID NO: 1726143 - DNA, 15 bp, Homo sapiens
tgaattccttctctg

SEQ ID NO: 1726144 - DNA, 15 bp, Homo sapiens
gaattccttctctgt

SEQ ID NO: 1726145 - DNA, 15 bp, Homo sapiens
aattccttctctgtg

SEQ ID NO: 1726146 - DNA, 15 bp, Homo sapiens
attccttctctgtgt

SEQ ID NO: 1726147 - DNA, 15 bp, Homo sapiens
ttccttctctgtgtt

SEQ ID NO: 1726148 - DNA, 15 bp, Homo sapiens
tccttctctgtgtta

SEQ ID NO: 1726149 - DNA, 15 bp, Homo sapiens
ccttctctgtgttat

SEQ ID NO: 1726150 - DNA, 15 bp, Homo sapiens
cttctctgtgttatc

SEQ ID NO: 1726151 - DNA, 15 bp, Homo sapiens
ttctctgtgttatct

SEQ ID NO: 1726152 - DNA, 15 bp, Homo sapiens
tctctgtgttatctt

SEQ ID NO: 1726153 - DNA, 15 bp, Homo sapiens
ctctgtgttatcttg

SEQ ID NO: 1726154 - DNA, 15 bp, Homo sapiens
tctgtgttatcttga

SEQ ID NO: 1726155 - DNA, 15 bp, Homo sapiens
ctgtgttatcttgac

SEQ ID NO: 1726156 - DNA, 15 bp, Homo sapiens
tgtgttatcttgact

SEQ ID NO: 1726157 - DNA, 15 bp, Homo sapiens
gtgttatcttgactt

SEQ ID NO: 1726158 - DNA, 15 bp, Homo sapiens
tgttatcttgacttt

SEQ ID NO: 1726159 - DNA, 15 bp, Homo sapiens
gttatcttgactttc

SEQ ID NO: 1726160 - DNA, 15 bp, Homo sapiens
ttatcttgactttct

SEQ ID NO: 1726161 - DNA, 15 bp, Homo sapiens
tatcttgactttctt

SEQ ID NO: 1726162 - DNA, 15 bp, Homo sapiens
atcttgactttcttt

SEQ ID NO: 1726163 - DNA, 15 bp, Homo sapiens
tcttgactttctttg

SEQ ID NO: 1726164 - DNA, 15 bp, Homo sapiens
cttgactttctttga

SEQ ID NO: 1726165 - DNA, 15 bp, Homo sapiens
ttgactttctttgag

SEQ ID NO: 1726166 - DNA, 15 bp, Homo sapiens
tgactttctttgagt

SEQ ID NO: 1726167 - DNA, 15 bp, Homo sapiens
gactttctttgagtt

SEQ ID NO: 1726168 - DNA, 15 bp, Homo sapiens
actttctttgagttt

SEQ ID NO: 1726169 - DNA, 15 bp, Homo sapiens
ctttctttgagtttt

SEQ ID NO: 1726170 - DNA, 15 bp, Homo sapiens
tttctttgagttttc

SEQ ID NO: 1726171 - DNA, 15 bp, Homo sapiens
ttctttgagttttct

SEQ ID NO: 1726172 - DNA, 15 bp, Homo sapiens
tctttgagttttctc

SEQ ID NO: 1726173 - DNA, 15 bp, Homo sapiens
ctttgagttttctca

SEQ ID NO: 1726174 - DNA, 15 bp, Homo sapiens
tttgagttttctcaa

SEQ ID NO: 1726175 - DNA, 15 bp, Homo sapiens
ttgagttttctcaaa

SEQ ID NO: 1726176 - DNA, 15 bp, Homo sapiens
tgagttttctcaaaa

SEQ ID NO: 1726177 - DNA, 15 bp, Homo sapiens
gagttttctcaaaat

SEQ ID NO: 1726178 - DNA, 15 bp, Homo sapiens
agttttctcaaaata

SEQ ID NO: 1726179 - DNA, 15 bp, Homo sapiens
gttttctcaaaatag

SEQ ID NO: 1726180 - DNA, 15 bp, Homo sapiens
ttttctcaaaatagc

SEQ ID NO: 1726181 - DNA, 15 bp, Homo sapiens
tttctcaaaatagct

SEQ ID NO: 1726182 - DNA, 15 bp, Homo sapiens
ttctcaaaatagcta

SEQ ID NO: 1726183 - DNA, 15 bp, Homo sapiens
tctcaaaatagctat

SEQ ID NO: 1726184 - DNA, 15 bp, Homo sapiens
ctcaaaatagctatt

SEQ ID NO: 1726185 - DNA, 15 bp, Homo sapiens
tcaaaatagctattt

SEQ ID NO: 1726186 - DNA, 15 bp, Homo sapiens
caaaatagctatttt

SEQ ID NO: 1726187 - DNA, 15 bp, Homo sapiens
aaaatagctatttta

SEQ ID NO: 1726188 - DNA, 15 bp, Homo sapiens
aaatagctattttat

SEQ ID NO: 1726189 - DNA, 15 bp, Homo sapiens
aatagctattttatt

SEQ ID NO: 1726190 - DNA, 15 bp, Homo sapiens
atagctattttattt

SEQ ID NO: 1726191 - DNA, 15 bp, Homo sapiens
tagctattttattta

SEQ ID NO: 1726192 - DNA, 15 bp, Homo sapiens
agctattttatttat

SEQ ID NO: 1726193 - DNA, 15 bp, Homo sapiens
gctattttatttatt

SEQ ID NO: 1726194 - DNA, 15 bp, Homo sapiens
ctattttatttattt

SEQ ID NO: 1726195 - DNA, 15 bp, Homo sapiens
tttatttatttttta

SEQ ID NO: 1726196 - DNA, 15 bp, Homo sapiens
ttatttattttttac

SEQ ID NO: 1726197 - DNA, 15 bp, Homo sapiens
tatttattttttact

SEQ ID NO: 1726198 - DNA, 15 bp, Homo sapiens
atttattttttactt

SEQ ID NO: 1726199 - DNA, 15 bp, Homo sapiens
tttattttttacttt

SEQ ID NO: 1726200 - DNA, 15 bp, Homo sapiens
ttattttttacttta

SEQ ID NO: 1726201 - DNA, 15 bp, Homo sapiens
tattttttactttaa

SEQ ID NO: 1726202 - DNA, 15 bp, Homo sapiens
attttttactttaag

SEQ ID NO: 1726203 - DNA, 15 bp, Homo sapiens
ttttttactttaagt

SEQ ID NO: 1726204 - DNA, 15 bp, Homo sapiens
tttttactttaagtt

SEQ ID NO: 1726205 - DNA, 15 bp, Homo sapiens
ttttactttaagttc

SEQ ID NO: 1726206 - DNA, 15 bp, Homo sapiens
tttactttaagttct

SEQ ID NO: 1726207 - DNA, 15 bp, Homo sapiens
ttactttaagttctg

SEQ ID NO: 1726208 - DNA, 15 bp, Homo sapiens
tactttaagttctgg

SEQ ID NO: 1726209 - DNA, 15 bp, Homo sapiens
actttaagttctggg

SEQ ID NO: 1726210 - DNA, 15 bp, Homo sapiens
ctttaagttctggga

SEQ ID NO: 1726211 - DNA, 15 bp, Homo sapiens
tttaagttctgggag

SEQ ID NO: 1726212 - DNA, 15 bp, Homo sapiens
ttaagttctgggaga

SEQ ID NO: 1726213 - DNA, 15 bp, Homo sapiens
taagttctgggagat

SEQ ID NO: 1726214 - DNA, 15 bp, Homo sapiens
aagttctgggagata

SEQ ID NO: 1726215 - DNA, 15 bp, Homo sapiens
agttctgggagataa

SEQ ID NO: 1726216 - DNA, 15 bp, Homo sapiens
gttctgggagataag

SEQ ID NO: 1726217 - DNA, 15 bp, Homo sapiens
ttctgggagataagt

SEQ ID NO: 1726218 - DNA, 15 bp, Homo sapiens
tctgggagataagta

SEQ ID NO: 1726219 - DNA, 15 bp, Homo sapiens
ctgggagataagtac

SEQ ID NO: 1726220 - DNA, 15 bp, Homo sapiens
tgggagataagtaca

SEQ ID NO: 1726221 - DNA, 15 bp, Homo sapiens
gggagataagtacag

SEQ ID NO: 1726222 - DNA, 15 bp, Homo sapiens
ggagataagtacaga

SEQ ID NO: 1726223 - DNA, 15 bp, Homo sapiens
gagataagtacagaa

SEQ ID NO: 1726224 - DNA, 15 bp, Homo sapiens
agataagtacagaat

SEQ ID NO: 1726225 - DNA, 15 bp, Homo sapiens
gataagtacagaatg

SEQ ID NO: 1726226 - DNA, 15 bp, Homo sapiens
ataagtacagaatgt

SEQ ID NO: 1726227 - DNA, 15 bp, Homo sapiens
taagtacagaatgtg

SEQ ID NO: 1726228 - DNA, 15 bp, Homo sapiens
aagtacagaatgtgt

SEQ ID NO: 1726229 - DNA, 15 bp, Homo sapiens
agtacagaatgtgta

SEQ ID NO: 1726230 - DNA, 15 bp, Homo sapiens
gtacagaatgtgtag

SEQ ID NO: 1726231 - DNA, 15 bp, Homo sapiens
tacagaatgtgtagg

SEQ ID NO: 1726232 - DNA, 15 bp, Homo sapiens
acagaatgtgtaggt

SEQ ID NO: 1726233 - DNA, 15 bp, Homo sapiens
gtaggtttgttacac

SEQ ID NO: 1726234 - DNA, 15 bp, Homo sapiens
taggtttgttacaca

SEQ ID NO: 1726235 - DNA, 15 bp, Homo sapiens
aggtttgttacacag

SEQ ID NO: 1726236 - DNA, 15 bp, Homo sapiens
ggtttgttacacagg

SEQ ID NO: 1726237 - DNA, 15 bp, Homo sapiens
gtttgttacacaggt

SEQ ID NO: 1726238 - DNA, 15 bp, Homo sapiens
tttgttacacaggtg

SEQ ID NO: 1726239 - DNA, 15 bp, Homo sapiens
ttgttacacaggtgt

SEQ ID NO: 1726240 - DNA, 15 bp, Homo sapiens
tgttacacaggtgta

SEQ ID NO: 1726241 - DNA, 15 bp, Homo sapiens
gttacacaggtgtac

SEQ ID NO: 1726242 - DNA, 15 bp, Homo sapiens
ttacacaggtgtacg

SEQ ID NO: 1726243 - DNA, 15 bp, Homo sapiens
tacacaggtgtacgt

SEQ ID NO: 1726244 - DNA, 15 bp, Homo sapiens
acacaggtgtacgta

SEQ ID NO: 1726245 - DNA, 15 bp, Homo sapiens
cacaggtgtacgtat

SEQ ID NO: 1726246 - DNA, 15 bp, Homo sapiens
acaggtgtacgtatg

SEQ ID NO: 1726247 - DNA, 15 bp, Homo sapiens
caggtgtacgtatgc

SEQ ID NO: 1726248 - DNA, 15 bp, Homo sapiens
aggtgtacgtatgcc

SEQ ID NO: 1726249 - DNA, 15 bp, Homo sapiens
ggtgtacgtatgcca

SEQ ID NO: 1726250 - DNA, 15 bp, Homo sapiens
gtgtacgtatgccat

SEQ ID NO: 1726251 - DNA, 15 bp, Homo sapiens
tgtacgtatgccatg

SEQ ID NO: 1726252 - DNA, 15 bp, Homo sapiens
gtacgtatgccatgg

SEQ ID NO: 1726253 - DNA, 15 bp, Homo sapiens
tacgtatgccatggt

SEQ ID NO: 1726254 - DNA, 15 bp, Homo sapiens
acgtatgccatggtg

SEQ ID NO: 1726255 - DNA, 15 bp, Homo sapiens
cgtatgccatggtgg

SEQ ID NO: 1726256 - DNA, 15 bp, Homo sapiens
gtatgccatggtggt

SEQ ID NO: 1726257 - DNA, 15 bp, Homo sapiens
tatgccatggtggtt

SEQ ID NO: 1726258 - DNA, 15 bp, Homo sapiens
atgccatggtggttt

SEQ ID NO: 1726259 - DNA, 15 bp, Homo sapiens
gtggtttgctgcacc

SEQ ID NO: 1726260 - DNA, 15 bp, Homo sapiens
tggtttgctgcacct

SEQ ID NO: 1726261 - DNA, 15 bp, Homo sapiens
ggtttgctgcaccta

SEQ ID NO: 1726262 - DNA, 15 bp, Homo sapiens
gtttgctgcacctat

SEQ ID NO: 1726263 - DNA, 15 bp, Homo sapiens
tttgctgcacctatc

SEQ ID NO: 1726264 - DNA, 15 bp, Homo sapiens
ttgctgcacctatca

SEQ ID NO: 1726265 - DNA, 15 bp, Homo sapiens
tgctgcacctatcaa

SEQ ID NO: 1726266 - DNA, 15 bp, Homo sapiens
gctgcacctatcaat

SEQ ID NO: 1726267 - DNA, 15 bp, Homo sapiens
ctgcacctatcaatc

SEQ ID NO: 1726268 - DNA, 15 bp, Homo sapiens
tgcacctatcaatcc

SEQ ID NO: 1726269 - DNA, 15 bp, Homo sapiens
gcacctatcaatcca

SEQ ID NO: 1726270 - DNA, 15 bp, Homo sapiens
cacctatcaatccat

SEQ ID NO: 1726271 - DNA, 15 bp, Homo sapiens
acctatcaatccatc

SEQ ID NO: 1726272 - DNA, 15 bp, Homo sapiens
cctatcaatccatca

SEQ ID NO: 1726273 - DNA, 15 bp, Homo sapiens
ctatcaatccatcat

SEQ ID NO: 1726274 - DNA, 15 bp, Homo sapiens
tatcaatccatcatt

SEQ ID NO: 1726275 - DNA, 15 bp, Homo sapiens
atcaatccatcattc

SEQ ID NO: 1726276 - DNA, 15 bp, Homo sapiens
tcaatccatcattct

SEQ ID NO: 1726277 - DNA, 15 bp, Homo sapiens
caatccatcattcta

SEQ ID NO: 1726278 - DNA, 15 bp, Homo sapiens
aatccatcattctag

SEQ ID NO: 1726279 - DNA, 15 bp, Homo sapiens
atccatcattctagg

SEQ ID NO: 1726280 - DNA, 15 bp, Homo sapiens
tccatcattctaggt

SEQ ID NO: 1726281 - DNA, 15 bp, Homo sapiens
ccatcattctaggtt

SEQ ID NO: 1726282 - DNA, 15 bp, Homo sapiens
catcattctaggttt

SEQ ID NO: 1726283 - DNA, 15 bp, Homo sapiens
atcattctaggtttt

SEQ ID NO: 1726284 - DNA, 15 bp, Homo sapiens
tcattctaggtttta

SEQ ID NO: 1726285 - DNA, 15 bp, Homo sapiens
cattctaggttttaa

SEQ ID NO: 1726286 - DNA, 15 bp, Homo sapiens
attctaggttttaag

SEQ ID NO: 1726287 - DNA, 15 bp, Homo sapiens
ttctaggttttaagc

SEQ ID NO: 1726288 - DNA, 15 bp, Homo sapiens
ctaggttttaagcct

SEQ ID NO: 1726289 - DNA, 15 bp, Homo sapiens
taggttttaagcctt

SEQ ID NO: 1726290 - DNA, 15 bp, Homo sapiens
aggttttaagccttg

SEQ ID NO: 1726291 - DNA, 15 bp, Homo sapiens
ggttttaagccttgc

SEQ ID NO: 1726292 - DNA, 15 bp, Homo sapiens
gttttaagccttgca

SEQ ID NO: 1726293 - DNA, 15 bp, Homo sapiens
ttttaagccttgcat

SEQ ID NO: 1726294 - DNA, 15 bp, Homo sapiens
tttaagccttgcatg

SEQ ID NO: 1726295 - DNA, 15 bp, Homo sapiens
ttaagccttgcatgc

SEQ ID NO: 1726296 - DNA, 15 bp, Homo sapiens
taagccttgcatgca

SEQ ID NO: 1726297 - DNA, 15 bp, Homo sapiens
aagccttgcatgcat

SEQ ID NO: 1726298 - DNA, 15 bp, Homo sapiens
agccttgcatgcatt

SEQ ID NO: 1726299 - DNA, 15 bp, Homo sapiens
gccttgcatgcatta

SEQ ID NO: 1726300 - DNA, 15 bp, Homo sapiens
ccttgcatgcattag

SEQ ID NO: 1726301 - DNA, 15 bp, Homo sapiens
cttgcatgcattagc

SEQ ID NO: 1726302 - DNA, 15 bp, Homo sapiens
ttgcatgcattagct

SEQ ID NO: 1726303 - DNA, 15 bp, Homo sapiens
tgcatgcattagcta

SEQ ID NO: 1726304 - DNA, 15 bp, Homo sapiens
gcatgcattagctat

SEQ ID NO: 1726305 - DNA, 15 bp, Homo sapiens
ctatttgtcctaata

SEQ ID NO: 1726306 - DNA, 15 bp, Homo sapiens
tatttgtcctaatac

SEQ ID NO: 1726307 - DNA, 15 bp, Homo sapiens
atttgtcctaataca

SEQ ID NO: 1726308 - DNA, 15 bp, Homo sapiens
tttgtcctaatacac

SEQ ID NO: 1726309 - DNA, 15 bp, Homo sapiens
ttgtcctaatacact

SEQ ID NO: 1726310 - DNA, 15 bp, Homo sapiens
tgtcctaatacactc

SEQ ID NO: 1726311 - DNA, 15 bp, Homo sapiens
gtcctaatacactcc

SEQ ID NO: 1726312 - DNA, 15 bp, Homo sapiens
tcctaatacactccc

SEQ ID NO: 1726313 - DNA, 15 bp, Homo sapiens
cctaatacactccct

SEQ ID NO: 1726314 - DNA, 15 bp, Homo sapiens
ctaatacactccctc

SEQ ID NO: 1726315 - DNA, 15 bp, Homo sapiens
taatacactccctct

SEQ ID NO: 1726316 - DNA, 15 bp, Homo sapiens
aatacactccctctt

SEQ ID NO: 1726317 - DNA, 15 bp, Homo sapiens
atacactccctcttc

SEQ ID NO: 1726318 - DNA, 15 bp, Homo sapiens
tacactccctcttct

SEQ ID NO: 1726319 - DNA, 15 bp, Homo sapiens
acactccctcttctt

SEQ ID NO: 1726320 - DNA, 15 bp, Homo sapiens
cactccctcttcttg

SEQ ID NO: 1726321 - DNA, 15 bp, Homo sapiens
actccctcttcttgc

SEQ ID NO: 1726322 - DNA, 15 bp, Homo sapiens
ctccctcttcttgcc

SEQ ID NO: 1726323 - DNA, 15 bp, Homo sapiens
tccctcttcttgccc

SEQ ID NO: 1726324 - DNA, 15 bp, Homo sapiens
ccctcttcttgcccc

SEQ ID NO: 1726325 - DNA, 15 bp, Homo sapiens
cctcttcttgcccct

SEQ ID NO: 1726326 - DNA, 15 bp, Homo sapiens
ctcttcttgcccctc

SEQ ID NO: 1726327 - DNA, 15 bp, Homo sapiens
tcttcttgcccctcc

SEQ ID NO: 1726328 - DNA, 15 bp, Homo sapiens
cttcttgcccctcca

SEQ ID NO: 1726329 - DNA, 15 bp, Homo sapiens
ttcttgcccctccac

SEQ ID NO: 1726330 - DNA, 15 bp, Homo sapiens
tcttgcccctccacc

SEQ ID NO: 1726331 - DNA, 15 bp, Homo sapiens
cttgcccctccaccc

SEQ ID NO: 1726332 - DNA, 15 bp, Homo sapiens
ttgcccctccacccc

SEQ ID NO: 1726333 - DNA, 15 bp, Homo sapiens
tgcccctccaccccc

SEQ ID NO: 1726334 - DNA, 15 bp, Homo sapiens
gcccctccaccccca

SEQ ID NO: 1726335 - DNA, 15 bp, Homo sapiens
cccctccacccccaa

SEQ ID NO: 1726336 - DNA, 15 bp, Homo sapiens
ccctccacccccaat

SEQ ID NO: 1726337 - DNA, 15 bp, Homo sapiens
cctccacccccaatt

SEQ ID NO: 1726338 - DNA, 15 bp, Homo sapiens
ctccacccccaattg

SEQ ID NO: 1726339 - DNA, 15 bp, Homo sapiens
tccacccccaattgg

SEQ ID NO: 1726340 - DNA, 15 bp, Homo sapiens
ccacccccaattggc

SEQ ID NO: 1726341 - DNA, 15 bp, Homo sapiens
cacccccaattggct

SEQ ID NO: 1726342 - DNA, 15 bp, Homo sapiens
acccccaattggctc

SEQ ID NO: 1726343 - DNA, 15 bp, Homo sapiens
cccccaattggctct

SEQ ID NO: 1726344 - DNA, 15 bp, Homo sapiens
ccccaattggctcta

SEQ ID NO: 1726345 - DNA, 15 bp, Homo sapiens
cccaattggctctag

SEQ ID NO: 1726346 - DNA, 15 bp, Homo sapiens
ccaattggctctagt

SEQ ID NO: 1726347 - DNA, 15 bp, Homo sapiens
caattggctctagtg

SEQ ID NO: 1726348 - DNA, 15 bp, Homo sapiens
aattggctctagtgt

SEQ ID NO: 1726349 - DNA, 15 bp, Homo sapiens
attggctctagtgtg

SEQ ID NO: 1726350 - DNA, 15 bp, Homo sapiens
ttggctctagtgtgt

SEQ ID NO: 1726351 - DNA, 15 bp, Homo sapiens
tggctctagtgtgtg

SEQ ID NO: 1726352 - DNA, 15 bp, Homo sapiens
ggctctagtgtgtgt

SEQ ID NO: 1726353 - DNA, 15 bp, Homo sapiens
gctctagtgtgtgtt

SEQ ID NO: 1726354 - DNA, 15 bp, Homo sapiens
ctctagtgtgtgttg

SEQ ID NO: 1726355 - DNA, 15 bp, Homo sapiens
tctagtgtgtgttgt

SEQ ID NO: 1726356 - DNA, 15 bp, Homo sapiens
ctagtgtgtgttgtt

SEQ ID NO: 1726357 - DNA, 15 bp, Homo sapiens
tagtgtgtgttgttc

SEQ ID NO: 1726358 - DNA, 15 bp, Homo sapiens
agtgtgtgttgttcc

SEQ ID NO: 1726359 - DNA, 15 bp, Homo sapiens
gtgtgtgttgttccc

SEQ ID NO: 1726360 - DNA, 15 bp, Homo sapiens
tgtgtgttgttcccc

SEQ ID NO: 1726361 - DNA, 15 bp, Homo sapiens
gtgtgttgttcccct

SEQ ID NO: 1726362 - DNA, 15 bp, Homo sapiens
tgtgttgttcccctt

SEQ ID NO: 1726363 - DNA, 15 bp, Homo sapiens
gtgttgttccccttc

SEQ ID NO: 1726364 - DNA, 15 bp, Homo sapiens
tgttgttccccttcc

SEQ ID NO: 1726365 - DNA, 15 bp, Homo sapiens
gttgttccccttcct

SEQ ID NO: 1726366 - DNA, 15 bp, Homo sapiens
ttgttccccttcctg

SEQ ID NO: 1726367 - DNA, 15 bp, Homo sapiens
tgttccccttcctgt

SEQ ID NO: 1726368 - DNA, 15 bp, Homo sapiens
gttccccttcctgtg

SEQ ID NO: 1726369 - DNA, 15 bp, Homo sapiens
ttccccttcctgtgt

SEQ ID NO: 1726370 - DNA, 15 bp, Homo sapiens
tccccttcctgtgtc

SEQ ID NO: 1726371 - DNA, 15 bp, Homo sapiens
ccccttcctgtgtcc

SEQ ID NO: 1726372 - DNA, 15 bp, Homo sapiens
cccttcctgtgtcca

SEQ ID NO: 1726373 - DNA, 15 bp, Homo sapiens
ccttcctgtgtccat

SEQ ID NO: 1726374 - DNA, 15 bp, Homo sapiens
cttcctgtgtccatg

SEQ ID NO: 1726375 - DNA, 15 bp, Homo sapiens
ttcctgtgtccatgt

SEQ ID NO: 1726376 - DNA, 15 bp, Homo sapiens
tcctgtgtccatgtg

SEQ ID NO: 1726377 - DNA, 15 bp, Homo sapiens
gttctcattgttcaa

SEQ ID NO: 1726378 - DNA, 15 bp, Homo sapiens
ttctcattgttcaac

SEQ ID NO: 1726379 - DNA, 15 bp, Homo sapiens
tctcattgttcaact

SEQ ID NO: 1726380 - DNA, 15 bp, Homo sapiens
ctcattgttcaactc

SEQ ID NO: 1726381 - DNA, 15 bp, Homo sapiens
tcattgttcaactcc

SEQ ID NO: 1726382 - DNA, 15 bp, Homo sapiens
cattgttcaactcca

SEQ ID NO: 1726383 - DNA, 15 bp, Homo sapiens
attgttcaactccaa

SEQ ID NO: 1726384 - DNA, 15 bp, Homo sapiens
ttgttcaactccaac

SEQ ID NO: 1726385 - DNA, 15 bp, Homo sapiens
tgttcaactccaact

SEQ ID NO: 1726386 - DNA, 15 bp, Homo sapiens
gttcaactccaactt

SEQ ID NO: 1726387 - DNA, 15 bp, Homo sapiens
ttcaactccaactta

SEQ ID NO: 1726388 - DNA, 15 bp, Homo sapiens
tcaactccaacttat

SEQ ID NO: 1726389 - DNA, 15 bp, Homo sapiens
caactccaacttatg

SEQ ID NO: 1726390 - DNA, 15 bp, Homo sapiens
aactccaacttatga

SEQ ID NO: 1726391 - DNA, 15 bp, Homo sapiens
actccaacttatgag

SEQ ID NO: 1726392 - DNA, 15 bp, Homo sapiens
ctccaacttatgagt

SEQ ID NO: 1726393 - DNA, 15 bp, Homo sapiens
tccaacttatgagtg

SEQ ID NO: 1726394 - DNA, 15 bp, Homo sapiens
ccaacttatgagtga

SEQ ID NO: 1726395 - DNA, 15 bp, Homo sapiens
caacttatgagtgag

SEQ ID NO: 1726396 - DNA, 15 bp, Homo sapiens
aacttatgagtgaga

SEQ ID NO: 1726397 - DNA, 15 bp, Homo sapiens
cttatgagtgagaat

SEQ ID NO: 1726398 - DNA, 15 bp, Homo sapiens
ttatgagtgagaata

SEQ ID NO: 1726399 - DNA, 15 bp, Homo sapiens
tatgagtgagaatat

SEQ ID NO: 1726400 - DNA, 15 bp, Homo sapiens
atgagtgagaatatg

SEQ ID NO: 1726401 - DNA, 15 bp, Homo sapiens
tgagtgagaatatgc

SEQ ID NO: 1726402 - DNA, 15 bp, Homo sapiens
gagtgagaatatgca

SEQ ID NO: 1726403 - DNA, 15 bp, Homo sapiens
agtgagaatatgcag

SEQ ID NO: 1726404 - DNA, 15 bp, Homo sapiens
gtgagaatatgcagt

SEQ ID NO: 1726405 - DNA, 15 bp, Homo sapiens
tgagaatatgcagtg

SEQ ID NO: 1726406 - DNA, 15 bp, Homo sapiens
gagaatatgcagtgt

SEQ ID NO: 1726407 - DNA, 15 bp, Homo sapiens
agaatatgcagtgtt

SEQ ID NO: 1726408 - DNA, 15 bp, Homo sapiens
gaatatgcagtgttt

SEQ ID NO: 1726409 - DNA, 15 bp, Homo sapiens
aatatgcagtgttta

SEQ ID NO: 1726410 - DNA, 15 bp, Homo sapiens
atatgcagtgtttag

SEQ ID NO: 1726411 - DNA, 15 bp, Homo sapiens
tatgcagtgtttagt

SEQ ID NO: 1726412 - DNA, 15 bp, Homo sapiens
atgcagtgtttagtt

SEQ ID NO: 1726413 - DNA, 15 bp, Homo sapiens
tgcagtgtttagttt

SEQ ID NO: 1726414 - DNA, 15 bp, Homo sapiens
gcagtgtttagtttt

SEQ ID NO: 1726415 - DNA, 15 bp, Homo sapiens
cagtgtttagttttc

SEQ ID NO: 1726416 - DNA, 15 bp, Homo sapiens
agtgtttagttttct

SEQ ID NO: 1726417 - DNA, 15 bp, Homo sapiens
agttttctgttccta

SEQ ID NO: 1726418 - DNA, 15 bp, Homo sapiens
gttttctgttcctat

SEQ ID NO: 1726419 - DNA, 15 bp, Homo sapiens
ttttctgttcctatg

SEQ ID NO: 1726420 - DNA, 15 bp, Homo sapiens
tttctgttcctatgt

SEQ ID NO: 1726421 - DNA, 15 bp, Homo sapiens
ttctgttcctatgtt

SEQ ID NO: 1726422 - DNA, 15 bp, Homo sapiens
tctgttcctatgtta

SEQ ID NO: 1726423 - DNA, 15 bp, Homo sapiens
ctgttcctatgttag

SEQ ID NO: 1726424 - DNA, 15 bp, Homo sapiens
tgttcctatgttagt

SEQ ID NO: 1726425 - DNA, 15 bp, Homo sapiens
gttcctatgttagtt

SEQ ID NO: 1726426 - DNA, 15 bp, Homo sapiens
ttcctatgttagttt

SEQ ID NO: 1726427 - DNA, 15 bp, Homo sapiens
tcctatgttagtttg

SEQ ID NO: 1726428 - DNA, 15 bp, Homo sapiens
cctatgttagtttgc

SEQ ID NO: 1726429 - DNA, 15 bp, Homo sapiens
ctatgttagtttgct

SEQ ID NO: 1726430 - DNA, 15 bp, Homo sapiens
tatgttagtttgctg

SEQ ID NO: 1726431 - DNA, 15 bp, Homo sapiens
atgttagtttgctga

SEQ ID NO: 1726432 - DNA, 15 bp, Homo sapiens
gttagtttgctgaga

SEQ ID NO: 1726433 - DNA, 15 bp, Homo sapiens
ttagtttgctgagaa

SEQ ID NO: 1726434 - DNA, 15 bp, Homo sapiens
tttgctgagaatgat

SEQ ID NO: 1726435 - DNA, 15 bp, Homo sapiens
ttgctgagaatgatg

SEQ ID NO: 1726436 - DNA, 15 bp, Homo sapiens
tgctgagaatgatgg

SEQ ID NO: 1726437 - DNA, 15 bp, Homo sapiens
gctgagaatgatggc

SEQ ID NO: 1726438 - DNA, 15 bp, Homo sapiens
ctgagaatgatggct

SEQ ID NO: 1726439 - DNA, 15 bp, Homo sapiens
tgagaatgatggctt

SEQ ID NO: 1726440 - DNA, 15 bp, Homo sapiens
gagaatgatggcttc

SEQ ID NO: 1726441 - DNA, 15 bp, Homo sapiens
agaatgatggcttcc

SEQ ID NO: 1726442 - DNA, 15 bp, Homo sapiens
gaatgatggcttcca

SEQ ID NO: 1726443 - DNA, 15 bp, Homo sapiens
aatgatggcttccag

SEQ ID NO: 1726444 - DNA, 15 bp, Homo sapiens
tggcttccagcttca

SEQ ID NO: 1726445 - DNA, 15 bp, Homo sapiens
ggcttccagcttcat

SEQ ID NO: 1726446 - DNA, 15 bp, Homo sapiens
gcttccagcttcatc

SEQ ID NO: 1726447 - DNA, 15 bp, Homo sapiens
cttccagcttcatcc

SEQ ID NO: 1726448 - DNA, 15 bp, Homo sapiens
ttcatccatgtccct

SEQ ID NO: 1726449 - DNA, 15 bp, Homo sapiens
tcatccatgtccctg

SEQ ID NO: 1726450 - DNA, 15 bp, Homo sapiens
catccatgtccctgc

SEQ ID NO: 1726451 - DNA, 15 bp, Homo sapiens
atccatgtccctgca

SEQ ID NO: 1726452 - DNA, 15 bp, Homo sapiens
ggacatgatctcatc

SEQ ID NO: 1726453 - DNA, 15 bp, Homo sapiens
gacatgatctcatcc

SEQ ID NO: 1726454 - DNA, 15 bp, Homo sapiens
acatgatctcatccc

SEQ ID NO: 1726455 - DNA, 15 bp, Homo sapiens
catgatctcatccct

SEQ ID NO: 1726456 - DNA, 15 bp, Homo sapiens
atgatctcatccctt

SEQ ID NO: 1726457 - DNA, 15 bp, Homo sapiens
tgatctcatcccttt

SEQ ID NO: 1726458 - DNA, 15 bp, Homo sapiens
gatctcatccctttt

SEQ ID NO: 1726459 - DNA, 15 bp, Homo sapiens
atctcatcccttttt

SEQ ID NO: 1726460 - DNA, 15 bp, Homo sapiens
tctcatcccttttta

SEQ ID NO: 1726461 - DNA, 15 bp, Homo sapiens
ctcatccctttttat

SEQ ID NO: 1726462 - DNA, 15 bp, Homo sapiens
tcatccctttttatg

SEQ ID NO: 1726463 - DNA, 15 bp, Homo sapiens
catccctttttatgg

SEQ ID NO: 1726464 - DNA, 15 bp, Homo sapiens
atccctttttatggt

SEQ ID NO: 1726465 - DNA, 15 bp, Homo sapiens
tccctttttatggtt

SEQ ID NO: 1726466 - DNA, 15 bp, Homo sapiens
ccctttttatggttg

SEQ ID NO: 1726467 - DNA, 15 bp, Homo sapiens
cctttttatggttgc

SEQ ID NO: 1726468 - DNA, 15 bp, Homo sapiens
ctttttatggttgca

SEQ ID NO: 1726469 - DNA, 15 bp, Homo sapiens
tttttatggttgcat

SEQ ID NO: 1726470 - DNA, 15 bp, Homo sapiens
ttttatggttgcata

SEQ ID NO: 1726471 - DNA, 15 bp, Homo sapiens
tttatggttgcatag

SEQ ID NO: 1726472 - DNA, 15 bp, Homo sapiens
ttatggttgcatagt

SEQ ID NO: 1726473 - DNA, 15 bp, Homo sapiens
tatggttgcatagta

SEQ ID NO: 1726474 - DNA, 15 bp, Homo sapiens
atggttgcatagtat

SEQ ID NO: 1726475 - DNA, 15 bp, Homo sapiens
tggttgcatagtatt

SEQ ID NO: 1726476 - DNA, 15 bp, Homo sapiens
ggttgcatagtattc

SEQ ID NO: 1726477 - DNA, 15 bp, Homo sapiens
gttgcatagtattcc

SEQ ID NO: 1726478 - DNA, 15 bp, Homo sapiens
ttgcatagtattcca

SEQ ID NO: 1726479 - DNA, 15 bp, Homo sapiens
tgcatagtattccat

SEQ ID NO: 1726480 - DNA, 15 bp, Homo sapiens
gcatagtattccatg

SEQ ID NO: 1726481 - DNA, 15 bp, Homo sapiens
catagtattccatgg

SEQ ID NO: 1726482 - DNA, 15 bp, Homo sapiens
atagtattccatggt

SEQ ID NO: 1726483 - DNA, 15 bp, Homo sapiens
tagtattccatggtg

SEQ ID NO: 1726484 - DNA, 15 bp, Homo sapiens
agtattccatggtgc

SEQ ID NO: 1726485 - DNA, 15 bp, Homo sapiens
gtattccatggtgca

SEQ ID NO: 1726486 - DNA, 15 bp, Homo sapiens
tattccatggtgcat

SEQ ID NO: 1726487 - DNA, 15 bp, Homo sapiens
attccatggtgcata

SEQ ID NO: 1726488 - DNA, 15 bp, Homo sapiens
ttccatggtgcatat

SEQ ID NO: 1726489 - DNA, 15 bp, Homo sapiens
tccatggtgcatatg

SEQ ID NO: 1726490 - DNA, 15 bp, Homo sapiens
ccatggtgcatatgt

SEQ ID NO: 1726491 - DNA, 15 bp, Homo sapiens
catggtgcatatgtt

SEQ ID NO: 1726492 - DNA, 15 bp, Homo sapiens
atggtgcatatgttc

SEQ ID NO: 1726493 - DNA, 15 bp, Homo sapiens
tggtgcatatgttcc

SEQ ID NO: 1726494 - DNA, 15 bp, Homo sapiens
ggtgcatatgttcca

SEQ ID NO: 1726495 - DNA, 15 bp, Homo sapiens
gtgcatatgttccac

SEQ ID NO: 1726496 - DNA, 15 bp, Homo sapiens
tgcatatgttccaca

SEQ ID NO: 1726497 - DNA, 15 bp, Homo sapiens
gcatatgttccacat

SEQ ID NO: 1726498 - DNA, 15 bp, Homo sapiens
catatgttccacatt

SEQ ID NO: 1726499 - DNA, 15 bp, Homo sapiens
atatgttccacattt

SEQ ID NO: 1726500 - DNA, 15 bp, Homo sapiens
tatgttccacatttt

SEQ ID NO: 1726501 - DNA, 15 bp, Homo sapiens
atgttccacattttc

SEQ ID NO: 1726502 - DNA, 15 bp, Homo sapiens
tgttccacattttct

SEQ ID NO: 1726503 - DNA, 15 bp, Homo sapiens
gttccacattttctt

SEQ ID NO: 1726504 - DNA, 15 bp, Homo sapiens
ttccacattttcttt

SEQ ID NO: 1726505 - DNA, 15 bp, Homo sapiens
tccacattttcttta

SEQ ID NO: 1726506 - DNA, 15 bp, Homo sapiens
attttctttatccag

SEQ ID NO: 1726507 - DNA, 15 bp, Homo sapiens
ttttctttatccagt

SEQ ID NO: 1726508 - DNA, 15 bp, Homo sapiens
tttctttatccagtc

SEQ ID NO: 1726509 - DNA, 15 bp, Homo sapiens
ttctttatccagtct

SEQ ID NO: 1726510 - DNA, 15 bp, Homo sapiens
tctttatccagtcta

SEQ ID NO: 1726511 - DNA, 15 bp, Homo sapiens
ctttatccagtctat

SEQ ID NO: 1726512 - DNA, 15 bp, Homo sapiens
tttatccagtctatt

SEQ ID NO: 1726513 - DNA, 15 bp, Homo sapiens
ttatccagtctatta

SEQ ID NO: 1726514 - DNA, 15 bp, Homo sapiens
tatccagtctattat

SEQ ID NO: 1726515 - DNA, 15 bp, Homo sapiens
atccagtctattatt

SEQ ID NO: 1726516 - DNA, 15 bp, Homo sapiens
tccagtctattattg

SEQ ID NO: 1726517 - DNA, 15 bp, Homo sapiens
ccagtctattattga

SEQ ID NO: 1726518 - DNA, 15 bp, Homo sapiens
cagtctattattgat

SEQ ID NO: 1726519 - DNA, 15 bp, Homo sapiens
agtctattattgatg

SEQ ID NO: 1726520 - DNA, 15 bp, Homo sapiens
gtctattattgatgg

SEQ ID NO: 1726521 - DNA, 15 bp, Homo sapiens
tctattattgatggg

SEQ ID NO: 1726522 - DNA, 15 bp, Homo sapiens
ctattattgatgggc

SEQ ID NO: 1726523 - DNA, 15 bp, Homo sapiens
tattattgatgggca

SEQ ID NO: 1726524 - DNA, 15 bp, Homo sapiens
attattgatgggcat

SEQ ID NO: 1726525 - DNA, 15 bp, Homo sapiens
ttattgatgggcatt

SEQ ID NO: 1726526 - DNA, 15 bp, Homo sapiens
tattgatgggcattt

SEQ ID NO: 1726527 - DNA, 15 bp, Homo sapiens
gatgggcatttgggt

SEQ ID NO: 1726528 - DNA, 15 bp, Homo sapiens
atgggcatttgggtt

SEQ ID NO: 1726529 - DNA, 15 bp, Homo sapiens
tgggcatttgggttg

SEQ ID NO: 1726530 - DNA, 15 bp, Homo sapiens
gggcatttgggttgg

SEQ ID NO: 1726531 - DNA, 15 bp, Homo sapiens
ggcatttgggttggt

SEQ ID NO: 1726532 - DNA, 15 bp, Homo sapiens
gcatttgggttggtt

SEQ ID NO: 1726533 - DNA, 15 bp, Homo sapiens
catttgggttggttc

SEQ ID NO: 1726534 - DNA, 15 bp, Homo sapiens
atttgggttggttcc

SEQ ID NO: 1726535 - DNA, 15 bp, Homo sapiens
tttgggttggttcca

SEQ ID NO: 1726536 - DNA, 15 bp, Homo sapiens
ttgggttggttccat

SEQ ID NO: 1726537 - DNA, 15 bp, Homo sapiens
tgggttggttccatg

SEQ ID NO: 1726538 - DNA, 15 bp, Homo sapiens
gggttggttccatgt

SEQ ID NO: 1726539 - DNA, 15 bp, Homo sapiens
ggttggttccatgtc

SEQ ID NO: 1726540 - DNA, 15 bp, Homo sapiens
gttggttccatgtct

SEQ ID NO: 1726541 - DNA, 15 bp, Homo sapiens
ttccatgtctttgct

SEQ ID NO: 1726542 - DNA, 15 bp, Homo sapiens
tccatgtctttgcta

SEQ ID NO: 1726543 - DNA, 15 bp, Homo sapiens
ccatgtctttgctat

SEQ ID NO: 1726544 - DNA, 15 bp, Homo sapiens
atgtctttgctattg

SEQ ID NO: 1726545 - DNA, 15 bp, Homo sapiens
tgtctttgctattgt

SEQ ID NO: 1726546 - DNA, 15 bp, Homo sapiens
gtctttgctattgta

SEQ ID NO: 1726547 - DNA, 15 bp, Homo sapiens
tctttgctattgtaa

SEQ ID NO: 1726548 - DNA, 15 bp, Homo sapiens
ctttgctattgtaaa

SEQ ID NO: 1726549 - DNA, 15 bp, Homo sapiens
tttgctattgtaaat

SEQ ID NO: 1726550 - DNA, 15 bp, Homo sapiens
tgctattgtaaatag

SEQ ID NO: 1726551 - DNA, 15 bp, Homo sapiens
gctattgtaaatagt

SEQ ID NO: 1726552 - DNA, 15 bp, Homo sapiens
ctattgtaaatagtg

SEQ ID NO: 1726553 - DNA, 15 bp, Homo sapiens
tattgtaaatagtgc

SEQ ID NO: 1726554 - DNA, 15 bp, Homo sapiens
attgtaaatagtgct

SEQ ID NO: 1726555 - DNA, 15 bp, Homo sapiens
ttgtaaatagtgctg

SEQ ID NO: 1726556 - DNA, 15 bp, Homo sapiens
tgtaaatagtgctgc

SEQ ID NO: 1726557 - DNA, 15 bp, Homo sapiens
gtaaatagtgctgca

SEQ ID NO: 1726558 - DNA, 15 bp, Homo sapiens
taaatagtgctgcaa

SEQ ID NO: 1726559 - DNA, 15 bp, Homo sapiens
aaatagtgctgcaat

SEQ ID NO: 1726560 - DNA, 15 bp, Homo sapiens
aatagtgctgcaata

SEQ ID NO: 1726561 - DNA, 15 bp, Homo sapiens
atagtgctgcaataa

SEQ ID NO: 1726562 - DNA, 15 bp, Homo sapiens
tagtgctgcaataaa

SEQ ID NO: 1726563 - DNA, 15 bp, Homo sapiens
agtgctgcaataaac

SEQ ID NO: 1726564 - DNA, 15 bp, Homo sapiens
gtgctgcaataaaca

SEQ ID NO: 1726565 - DNA, 15 bp, Homo sapiens
tgctgcaataaacat

SEQ ID NO: 1726566 - DNA, 15 bp, Homo sapiens
gctgcaataaacata

SEQ ID NO: 1726567 - DNA, 15 bp, Homo sapiens
ctgcaataaacatac

SEQ ID NO: 1726568 - DNA, 15 bp, Homo sapiens
tgcaataaacatacg

SEQ ID NO: 1726569 - DNA, 15 bp, Homo sapiens
gcaataaacatacgt

SEQ ID NO: 1726570 - DNA, 15 bp, Homo sapiens
caataaacatacgtg

SEQ ID NO: 1726571 - DNA, 15 bp, Homo sapiens
aataaacatacgtgt

SEQ ID NO: 1726572 - DNA, 15 bp, Homo sapiens
ataaacatacgtgtg

SEQ ID NO: 1726573 - DNA, 15 bp, Homo sapiens
taaacatacgtgtgc

SEQ ID NO: 1726574 - DNA, 15 bp, Homo sapiens
aaacatacgtgtgca

SEQ ID NO: 1726575 - DNA, 15 bp, Homo sapiens
aacatacgtgtgcac

SEQ ID NO: 1726576 - DNA, 15 bp, Homo sapiens
acatacgtgtgcacg

SEQ ID NO: 1726577 - DNA, 15 bp, Homo sapiens
catacgtgtgcacgt

SEQ ID NO: 1726578 - DNA, 15 bp, Homo sapiens
atacgtgtgcacgtg

SEQ ID NO: 1726579 - DNA, 15 bp, Homo sapiens
tacgtgtgcacgtgt

SEQ ID NO: 1726580 - DNA, 15 bp, Homo sapiens
acgtgtgcacgtgtc

SEQ ID NO: 1726581 - DNA, 15 bp, Homo sapiens
cgtgtgcacgtgtct

SEQ ID NO: 1726582 - DNA, 15 bp, Homo sapiens
gtgtgcacgtgtctt

SEQ ID NO: 1726583 - DNA, 15 bp, Homo sapiens
tgtgcacgtgtcttt

SEQ ID NO: 1726584 - DNA, 15 bp, Homo sapiens
gtgcacgtgtcttta

SEQ ID NO: 1726585 - DNA, 15 bp, Homo sapiens
tgcacgtgtctttat

SEQ ID NO: 1726586 - DNA, 15 bp, Homo sapiens
gcacgtgtctttata

SEQ ID NO: 1726587 - DNA, 15 bp, Homo sapiens
cacgtgtctttatag

SEQ ID NO: 1726588 - DNA, 15 bp, Homo sapiens
acgtgtctttatagt

SEQ ID NO: 1726589 - DNA, 15 bp, Homo sapiens
cgtgtctttatagta

SEQ ID NO: 1726590 - DNA, 15 bp, Homo sapiens
gtgtctttatagtag

SEQ ID NO: 1726591 - DNA, 15 bp, Homo sapiens
tgtctttatagtaga

SEQ ID NO: 1726592 - DNA, 15 bp, Homo sapiens
gtctttatagtagaa

SEQ ID NO: 1726593 - DNA, 15 bp, Homo sapiens
tctttatagtagaat

SEQ ID NO: 1726594 - DNA, 15 bp, Homo sapiens
ctttatagtagaatg

SEQ ID NO: 1726595 - DNA, 15 bp, Homo sapiens
ttatattcctttggg

SEQ ID NO: 1726596 - DNA, 15 bp, Homo sapiens
tatattcctttgggt

SEQ ID NO: 1726597 - DNA, 15 bp, Homo sapiens
atattcctttgggtg

SEQ ID NO: 1726598 - DNA, 15 bp, Homo sapiens
tattcctttgggtgt

SEQ ID NO: 1726599 - DNA, 15 bp, Homo sapiens
attcctttgggtgta

SEQ ID NO: 1726600 - DNA, 15 bp, Homo sapiens
ttcctttgggtgtat

SEQ ID NO: 1726601 - DNA, 15 bp, Homo sapiens
tcctttgggtgtata

SEQ ID NO: 1726602 - DNA, 15 bp, Homo sapiens
cctttgggtgtatac

SEQ ID NO: 1726603 - DNA, 15 bp, Homo sapiens
ctttgggtgtatacc

SEQ ID NO: 1726604 - DNA, 15 bp, Homo sapiens
tttgggtgtatacct

SEQ ID NO: 1726605 - DNA, 15 bp, Homo sapiens
ttgggtgtataccta

SEQ ID NO: 1726606 - DNA, 15 bp, Homo sapiens
tgggtgtatacctag

SEQ ID NO: 1726607 - DNA, 15 bp, Homo sapiens
gggtgtatacctagt

SEQ ID NO: 1726608 - DNA, 15 bp, Homo sapiens
ggtgtatacctagta

SEQ ID NO: 1726609 - DNA, 15 bp, Homo sapiens
gtgtatacctagtaa

SEQ ID NO: 1726610 - DNA, 15 bp, Homo sapiens
tgtatacctagtaat

SEQ ID NO: 1726611 - DNA, 15 bp, Homo sapiens
gtatacctagtaatg

SEQ ID NO: 1726612 - DNA, 15 bp, Homo sapiens
tatacctagtaatgg

SEQ ID NO: 1726613 - DNA, 15 bp, Homo sapiens
atacctagtaatggg

SEQ ID NO: 1726614 - DNA, 15 bp, Homo sapiens
tacctagtaatggga

SEQ ID NO: 1726615 - DNA, 15 bp, Homo sapiens
acctagtaatgggat

SEQ ID NO: 1726616 - DNA, 15 bp, Homo sapiens
cctagtaatgggatt

SEQ ID NO: 1726617 - DNA, 15 bp, Homo sapiens
ctagtaatgggattg

SEQ ID NO: 1726618 - DNA, 15 bp, Homo sapiens
tagtaatgggattgc

SEQ ID NO: 1726619 - DNA, 15 bp, Homo sapiens
agtaatgggattgct

SEQ ID NO: 1726620 - DNA, 15 bp, Homo sapiens
gtaatgggattgctg

SEQ ID NO: 1726621 - DNA, 15 bp, Homo sapiens
taatgggattgctgg

SEQ ID NO: 1726622 - DNA, 15 bp, Homo sapiens
aatgggattgctggg

SEQ ID NO: 1726623 - DNA, 15 bp, Homo sapiens
atgggattgctgggt

SEQ ID NO: 1726624 - DNA, 15 bp, Homo sapiens
tgggattgctgggtc

SEQ ID NO: 1726625 - DNA, 15 bp, Homo sapiens
gggattgctgggtca

SEQ ID NO: 1726626 - DNA, 15 bp, Homo sapiens
ggattgctgggtcaa

SEQ ID NO: 1726627 - DNA, 15 bp, Homo sapiens
gattgctgggtcaaa

SEQ ID NO: 1726628 - DNA, 15 bp, Homo sapiens
attgctgggtcaaat

SEQ ID NO: 1726629 - DNA, 15 bp, Homo sapiens
ttgctgggtcaaatg

SEQ ID NO: 1726630 - DNA, 15 bp, Homo sapiens
tgctgggtcaaatgg

SEQ ID NO: 1726631 - DNA, 15 bp, Homo sapiens
gctgggtcaaatggt

SEQ ID NO: 1726632 - DNA, 15 bp, Homo sapiens
ctgggtcaaatggta

SEQ ID NO: 1726633 - DNA, 15 bp, Homo sapiens
tgggtcaaatggtat

SEQ ID NO: 1726634 - DNA, 15 bp, Homo sapiens
gggtcaaatggtatt

SEQ ID NO: 1726635 - DNA, 15 bp, Homo sapiens
ggtcaaatggtattt

SEQ ID NO: 1726636 - DNA, 15 bp, Homo sapiens
gtcaaatggtatttc

SEQ ID NO: 1726637 - DNA, 15 bp, Homo sapiens
tcaaatggtatttct

SEQ ID NO: 1726638 - DNA, 15 bp, Homo sapiens
caaatggtatttctg

SEQ ID NO: 1726639 - DNA, 15 bp, Homo sapiens
aaatggtatttctgg

SEQ ID NO: 1726640 - DNA, 15 bp, Homo sapiens
aatggtatttctggt

SEQ ID NO: 1726641 - DNA, 15 bp, Homo sapiens
atggtatttctggtt

SEQ ID NO: 1726642 - DNA, 15 bp, Homo sapiens
tggtatttctggttc

SEQ ID NO: 1726643 - DNA, 15 bp, Homo sapiens
ggtatttctggttct

SEQ ID NO: 1726644 - DNA, 15 bp, Homo sapiens
tctggttctagatct

SEQ ID NO: 1726645 - DNA, 15 bp, Homo sapiens
ctggttctagatctt

SEQ ID NO: 1726646 - DNA, 15 bp, Homo sapiens
tggttctagatcttt

SEQ ID NO: 1726647 - DNA, 15 bp, Homo sapiens
ggttctagatctttg

SEQ ID NO: 1726648 - DNA, 15 bp, Homo sapiens
gttctagatctttga

SEQ ID NO: 1726649 - DNA, 15 bp, Homo sapiens
ttctagatctttgag

SEQ ID NO: 1726650 - DNA, 15 bp, Homo sapiens
tctagatctttgagg

SEQ ID NO: 1726651 - DNA, 15 bp, Homo sapiens
ctagatctttgagga

SEQ ID NO: 1726652 - DNA, 15 bp, Homo sapiens
tagatctttgaggaa

SEQ ID NO: 1726653 - DNA, 15 bp, Homo sapiens
agatctttgaggaat

SEQ ID NO: 1726654 - DNA, 15 bp, Homo sapiens
gatctttgaggaatc

SEQ ID NO: 1726655 - DNA, 15 bp, Homo sapiens
atctttgaggaatca

SEQ ID NO: 1726656 - DNA, 15 bp, Homo sapiens
tctttgaggaatcac

SEQ ID NO: 1726657 - DNA, 15 bp, Homo sapiens
ctttgaggaatcacc

SEQ ID NO: 1726658 - DNA, 15 bp, Homo sapiens
tttgaggaatcacca

SEQ ID NO: 1726659 - DNA, 15 bp, Homo sapiens
ttgaggaatcaccac

SEQ ID NO: 1726660 - DNA, 15 bp, Homo sapiens
tgaggaatcaccaca

SEQ ID NO: 1726661 - DNA, 15 bp, Homo sapiens
gaggaatcaccacac

SEQ ID NO: 1726662 - DNA, 15 bp, Homo sapiens
aggaatcaccacact

SEQ ID NO: 1726663 - DNA, 15 bp, Homo sapiens
ggaatcaccacactg

SEQ ID NO: 1726664 - DNA, 15 bp, Homo sapiens
gaatcaccacactgt

SEQ ID NO: 1726665 - DNA, 15 bp, Homo sapiens
aatcaccacactgtc

SEQ ID NO: 1726666 - DNA, 15 bp, Homo sapiens
atcaccacactgtct

SEQ ID NO: 1726667 - DNA, 15 bp, Homo sapiens
tcaccacactgtctt

SEQ ID NO: 1726668 - DNA, 15 bp, Homo sapiens
caccacactgtcttc

SEQ ID NO: 1726669 - DNA, 15 bp, Homo sapiens
accacactgtcttcc

SEQ ID NO: 1726670 - DNA, 15 bp, Homo sapiens
ctgtcttccacaatg

SEQ ID NO: 1726671 - DNA, 15 bp, Homo sapiens
tgtcttccacaatga

SEQ ID NO: 1726672 - DNA, 15 bp, Homo sapiens
gtcttccacaatgat

SEQ ID NO: 1726673 - DNA, 15 bp, Homo sapiens
tcttccacaatgatt

SEQ ID NO: 1726674 - DNA, 15 bp, Homo sapiens
cttccacaatgattg

SEQ ID NO: 1726675 - DNA, 15 bp, Homo sapiens
ttccacaatgattga

SEQ ID NO: 1726676 - DNA, 15 bp, Homo sapiens
tccacaatgattgaa

SEQ ID NO: 1726677 - DNA, 15 bp, Homo sapiens
ccacaatgattgaac

SEQ ID NO: 1726678 - DNA, 15 bp, Homo sapiens
cacaatgattgaact

SEQ ID NO: 1726679 - DNA, 15 bp, Homo sapiens
acaatgattgaacta

SEQ ID NO: 1726680 - DNA, 15 bp, Homo sapiens
caatgattgaactaa

SEQ ID NO: 1726681 - DNA, 15 bp, Homo sapiens
aatgattgaactaac

SEQ ID NO: 1726682 - DNA, 15 bp, Homo sapiens
atgattgaactaact

SEQ ID NO: 1726683 - DNA, 15 bp, Homo sapiens
tgattgaactaactt

SEQ ID NO: 1726684 - DNA, 15 bp, Homo sapiens
gattgaactaactta

SEQ ID NO: 1726685 - DNA, 15 bp, Homo sapiens
attgaactaacttac

SEQ ID NO: 1726686 - DNA, 15 bp, Homo sapiens
ttgaactaacttaca

SEQ ID NO: 1726687 - DNA, 15 bp, Homo sapiens
tgaactaacttacat

SEQ ID NO: 1726688 - DNA, 15 bp, Homo sapiens
gaactaacttacatt

SEQ ID NO: 1726689 - DNA, 15 bp, Homo sapiens
aactaacttacattc

SEQ ID NO: 1726690 - DNA, 15 bp, Homo sapiens
actaacttacattct

SEQ ID NO: 1726691 - DNA, 15 bp, Homo sapiens
ctaacttacattctc

SEQ ID NO: 1726692 - DNA, 15 bp, Homo sapiens
taacttacattctca

SEQ ID NO: 1726693 - DNA, 15 bp, Homo sapiens
aacttacattctcac

SEQ ID NO: 1726694 - DNA, 15 bp, Homo sapiens
acttacattctcacc

SEQ ID NO: 1726695 - DNA, 15 bp, Homo sapiens
cttacattctcacca

SEQ ID NO: 1726696 - DNA, 15 bp, Homo sapiens
ttacattctcaccaa

SEQ ID NO: 1726697 - DNA, 15 bp, Homo sapiens
acattctcaccaacg

SEQ ID NO: 1726698 - DNA, 15 bp, Homo sapiens
cattctcaccaacgg

SEQ ID NO: 1726699 - DNA, 15 bp, Homo sapiens
attctcaccaacggt

SEQ ID NO: 1726700 - DNA, 15 bp, Homo sapiens
ttctcaccaacggtg

SEQ ID NO: 1726701 - DNA, 15 bp, Homo sapiens
tctcaccaacggtgt

SEQ ID NO: 1726702 - DNA, 15 bp, Homo sapiens
ctcaccaacggtgta

SEQ ID NO: 1726703 - DNA, 15 bp, Homo sapiens
tcaccaacggtgtaa

SEQ ID NO: 1726704 - DNA, 15 bp, Homo sapiens
caccaacggtgtaaa

SEQ ID NO: 1726705 - DNA, 15 bp, Homo sapiens
accaacggtgtaaaa

SEQ ID NO: 1726706 - DNA, 15 bp, Homo sapiens
ccaacggtgtaaaag

SEQ ID NO: 1726707 - DNA, 15 bp, Homo sapiens
caacggtgtaaaagt

SEQ ID NO: 1726708 - DNA, 15 bp, Homo sapiens
aacggtgtaaaagtg

SEQ ID NO: 1726709 - DNA, 15 bp, Homo sapiens
acggtgtaaaagtgt

SEQ ID NO: 1726710 - DNA, 15 bp, Homo sapiens
cggtgtaaaagtgtt

SEQ ID NO: 1726711 - DNA, 15 bp, Homo sapiens
ggtgtaaaagtgttc

SEQ ID NO: 1726712 - DNA, 15 bp, Homo sapiens
gtgtaaaagtgttcc

SEQ ID NO: 1726713 - DNA, 15 bp, Homo sapiens
tgtaaaagtgttcct

SEQ ID NO: 1726714 - DNA, 15 bp, Homo sapiens
gtaaaagtgttccta

SEQ ID NO: 1726715 - DNA, 15 bp, Homo sapiens
taaaagtgttcctat

SEQ ID NO: 1726716 - DNA, 15 bp, Homo sapiens
aaaagtgttcctatt

SEQ ID NO: 1726717 - DNA, 15 bp, Homo sapiens
aaagtgttcctattt

SEQ ID NO: 1726718 - DNA, 15 bp, Homo sapiens
aagtgttcctatttc

SEQ ID NO: 1726719 - DNA, 15 bp, Homo sapiens
agtgttcctatttct

SEQ ID NO: 1726720 - DNA, 15 bp, Homo sapiens
gtgttcctatttctc

SEQ ID NO: 1726721 - DNA, 15 bp, Homo sapiens
tgttcctatttctcc

SEQ ID NO: 1726722 - DNA, 15 bp, Homo sapiens
gttcctatttctcca

SEQ ID NO: 1726723 - DNA, 15 bp, Homo sapiens
ttcctatttctccac

SEQ ID NO: 1726724 - DNA, 15 bp, Homo sapiens
tcctatttctccaca

SEQ ID NO: 1726725 - DNA, 15 bp, Homo sapiens
cctatttctccacag

SEQ ID NO: 1726726 - DNA, 15 bp, Homo sapiens
ctatttctccacagc

SEQ ID NO: 1726727 - DNA, 15 bp, Homo sapiens
tatttctccacagcc

SEQ ID NO: 1726728 - DNA, 15 bp, Homo sapiens
atttctccacagcct

SEQ ID NO: 1726729 - DNA, 15 bp, Homo sapiens
tttctccacagcctc

SEQ ID NO: 1726730 - DNA, 15 bp, Homo sapiens
ttctccacagcctca

SEQ ID NO: 1726731 - DNA, 15 bp, Homo sapiens
tctccacagcctcac

SEQ ID NO: 1726732 - DNA, 15 bp, Homo sapiens
ctccacagcctcact

SEQ ID NO: 1726733 - DNA, 15 bp, Homo sapiens
tccacagcctcacta

SEQ ID NO: 1726734 - DNA, 15 bp, Homo sapiens
ccacagcctcactag

SEQ ID NO: 1726735 - DNA, 15 bp, Homo sapiens
cacagcctcactagc

SEQ ID NO: 1726736 - DNA, 15 bp, Homo sapiens
acagcctcactagca

SEQ ID NO: 1726737 - DNA, 15 bp, Homo sapiens
cagcctcactagcat

SEQ ID NO: 1726738 - DNA, 15 bp, Homo sapiens
agcctcactagcatc

SEQ ID NO: 1726739 - DNA, 15 bp, Homo sapiens
gcctcactagcatct

SEQ ID NO: 1726740 - DNA, 15 bp, Homo sapiens
cctcactagcatcta

SEQ ID NO: 1726741 - DNA, 15 bp, Homo sapiens
ctcactagcatctac

SEQ ID NO: 1726742 - DNA, 15 bp, Homo sapiens
tcactagcatctact

SEQ ID NO: 1726743 - DNA, 15 bp, Homo sapiens
cactagcatctactg

SEQ ID NO: 1726744 - DNA, 15 bp, Homo sapiens
actagcatctactgt

SEQ ID NO: 1726745 - DNA, 15 bp, Homo sapiens
ctagcatctactgtc

SEQ ID NO: 1726746 - DNA, 15 bp, Homo sapiens
tagcatctactgtct

SEQ ID NO: 1726747 - DNA, 15 bp, Homo sapiens
agcatctactgtctc

SEQ ID NO: 1726748 - DNA, 15 bp, Homo sapiens
gcatctactgtctct

SEQ ID NO: 1726749 - DNA, 15 bp, Homo sapiens
catctactgtctctt

SEQ ID NO: 1726750 - DNA, 15 bp, Homo sapiens
atctactgtctcttg

SEQ ID NO: 1726751 - DNA, 15 bp, Homo sapiens
tctactgtctcttga

SEQ ID NO: 1726752 - DNA, 15 bp, Homo sapiens
ctactgtctcttgac

SEQ ID NO: 1726753 - DNA, 15 bp, Homo sapiens
tactgtctcttgact

SEQ ID NO: 1726754 - DNA, 15 bp, Homo sapiens
actgtctcttgactt

SEQ ID NO: 1726755 - DNA, 15 bp, Homo sapiens
ctgtctcttgacttt

SEQ ID NO: 1726756 - DNA, 15 bp, Homo sapiens
tgtctcttgactttt

SEQ ID NO: 1726757 - DNA, 15 bp, Homo sapiens
gtctcttgacttttt

SEQ ID NO: 1726758 - DNA, 15 bp, Homo sapiens
tctcttgacttttta

SEQ ID NO: 1726759 - DNA, 15 bp, Homo sapiens
ctcttgactttttaa

SEQ ID NO: 1726760 - DNA, 15 bp, Homo sapiens
tcttgactttttaat

SEQ ID NO: 1726761 - DNA, 15 bp, Homo sapiens
cttgactttttaatg

SEQ ID NO: 1726762 - DNA, 15 bp, Homo sapiens
ttgactttttaatga

SEQ ID NO: 1726763 - DNA, 15 bp, Homo sapiens
tgactttttaatgat

SEQ ID NO: 1726764 - DNA, 15 bp, Homo sapiens
gactttttaatgatc

SEQ ID NO: 1726765 - DNA, 15 bp, Homo sapiens
actttttaatgatca

SEQ ID NO: 1726766 - DNA, 15 bp, Homo sapiens
ctttttaatgatcac

SEQ ID NO: 1726767 - DNA, 15 bp, Homo sapiens
tttttaatgatcact

SEQ ID NO: 1726768 - DNA, 15 bp, Homo sapiens
ttttaatgatcacta

SEQ ID NO: 1726769 - DNA, 15 bp, Homo sapiens
tttaatgatcactat

SEQ ID NO: 1726770 - DNA, 15 bp, Homo sapiens
ttaatgatcactatt

SEQ ID NO: 1726771 - DNA, 15 bp, Homo sapiens
taatgatcactattc

SEQ ID NO: 1726772 - DNA, 15 bp, Homo sapiens
aatgatcactattca

SEQ ID NO: 1726773 - DNA, 15 bp, Homo sapiens
atgatcactattcag

SEQ ID NO: 1726774 - DNA, 15 bp, Homo sapiens
tgatcactattcaga

SEQ ID NO: 1726775 - DNA, 15 bp, Homo sapiens
gatcactattcagac

SEQ ID NO: 1726776 - DNA, 15 bp, Homo sapiens
atcactattcagact

SEQ ID NO: 1726777 - DNA, 15 bp, Homo sapiens
tcactattcagactg

SEQ ID NO: 1726778 - DNA, 15 bp, Homo sapiens
cactattcagactgg

SEQ ID NO: 1726779 - DNA, 15 bp, Homo sapiens
actattcagactggc

SEQ ID NO: 1726780 - DNA, 15 bp, Homo sapiens
ctattcagactggca

SEQ ID NO: 1726781 - DNA, 15 bp, Homo sapiens
tattcagactggcat

SEQ ID NO: 1726782 - DNA, 15 bp, Homo sapiens
attcagactggcatg

SEQ ID NO: 1726783 - DNA, 15 bp, Homo sapiens
ttcagactggcatga

SEQ ID NO: 1726784 - DNA, 15 bp, Homo sapiens
tcagactggcatgag

SEQ ID NO: 1726785 - DNA, 15 bp, Homo sapiens
cagactggcatgaga

SEQ ID NO: 1726786 - DNA, 15 bp, Homo sapiens
agactggcatgagat

SEQ ID NO: 1726787 - DNA, 15 bp, Homo sapiens
actggcatgagatgg

SEQ ID NO: 1726788 - DNA, 15 bp, Homo sapiens
ctggcatgagatggt

SEQ ID NO: 1726789 - DNA, 15 bp, Homo sapiens
tggcatgagatggtg

SEQ ID NO: 1726790 - DNA, 15 bp, Homo sapiens
ggcatgagatggtgt

SEQ ID NO: 1726791 - DNA, 15 bp, Homo sapiens
gcatgagatggtgtc

SEQ ID NO: 1726792 - DNA, 15 bp, Homo sapiens
catgagatggtgtct

SEQ ID NO: 1726793 - DNA, 15 bp, Homo sapiens
atgagatggtgtctc

SEQ ID NO: 1726794 - DNA, 15 bp, Homo sapiens
tgagatggtgtctca

SEQ ID NO: 1726795 - DNA, 15 bp, Homo sapiens
gagatggtgtctcat

SEQ ID NO: 1726796 - DNA, 15 bp, Homo sapiens
agatggtgtctcatt

SEQ ID NO: 1726797 - DNA, 15 bp, Homo sapiens
gatggtgtctcattg

SEQ ID NO: 1726798 - DNA, 15 bp, Homo sapiens
atggtgtctcattgt

SEQ ID NO: 1726799 - DNA, 15 bp, Homo sapiens
tggtgtctcattgtg

SEQ ID NO: 1726800 - DNA, 15 bp, Homo sapiens
ggtgtctcattgtgg

SEQ ID NO: 1726801 - DNA, 15 bp, Homo sapiens
gtgtctcattgtggt

SEQ ID NO: 1726802 - DNA, 15 bp, Homo sapiens
tgtctcattgtggtt

SEQ ID NO: 1726803 - DNA, 15 bp, Homo sapiens
gtctcattgtggttt

SEQ ID NO: 1726804 - DNA, 15 bp, Homo sapiens
tctcattgtggtttt

SEQ ID NO: 1726805 - DNA, 15 bp, Homo sapiens
ctcattgtggttttg

SEQ ID NO: 1726806 - DNA, 15 bp, Homo sapiens
tcattgtggttttga

SEQ ID NO: 1726807 - DNA, 15 bp, Homo sapiens
cattgtggttttgat

SEQ ID NO: 1726808 - DNA, 15 bp, Homo sapiens
attgtggttttgatt

SEQ ID NO: 1726809 - DNA, 15 bp, Homo sapiens
ttgtggttttgattt

SEQ ID NO: 1726810 - DNA, 15 bp, Homo sapiens
tgtggttttgatttg

SEQ ID NO: 1726811 - DNA, 15 bp, Homo sapiens
gtggttttgatttgc

SEQ ID NO: 1726812 - DNA, 15 bp, Homo sapiens
atttgcatttctcta

SEQ ID NO: 1726813 - DNA, 15 bp, Homo sapiens
tttgcatttctctaa

SEQ ID NO: 1726814 - DNA, 15 bp, Homo sapiens
ttgcatttctctaat

SEQ ID NO: 1726815 - DNA, 15 bp, Homo sapiens
tgcatttctctaatg

SEQ ID NO: 1726816 - DNA, 15 bp, Homo sapiens
gcatttctctaatga

SEQ ID NO: 1726817 - DNA, 15 bp, Homo sapiens
catttctctaatgat

SEQ ID NO: 1726818 - DNA, 15 bp, Homo sapiens
atttctctaatgatc

SEQ ID NO: 1726819 - DNA, 15 bp, Homo sapiens
tttctctaatgatca

SEQ ID NO: 1726820 - DNA, 15 bp, Homo sapiens
ttctctaatgatcag

SEQ ID NO: 1726821 - DNA, 15 bp, Homo sapiens
tctctaatgatcagt

SEQ ID NO: 1726822 - DNA, 15 bp, Homo sapiens
ctctaatgatcagtg

SEQ ID NO: 1726823 - DNA, 15 bp, Homo sapiens
tctaatgatcagtga

SEQ ID NO: 1726824 - DNA, 15 bp, Homo sapiens
ctaatgatcagtgat

SEQ ID NO: 1726825 - DNA, 15 bp, Homo sapiens
taatgatcagtgatg

SEQ ID NO: 1726826 - DNA, 15 bp, Homo sapiens
aatgatcagtgatgt

SEQ ID NO: 1726827 - DNA, 15 bp, Homo sapiens
atgatcagtgatgtt

SEQ ID NO: 1726828 - DNA, 15 bp, Homo sapiens
tgatcagtgatgttg

SEQ ID NO: 1726829 - DNA, 15 bp, Homo sapiens
gatcagtgatgttga

SEQ ID NO: 1726830 - DNA, 15 bp, Homo sapiens
atcagtgatgttgag

SEQ ID NO: 1726831 - DNA, 15 bp, Homo sapiens
tcagtgatgttgagc

SEQ ID NO: 1726832 - DNA, 15 bp, Homo sapiens
cagtgatgttgagct

SEQ ID NO: 1726833 - DNA, 15 bp, Homo sapiens
agtgatgttgagctt

SEQ ID NO: 1726834 - DNA, 15 bp, Homo sapiens
gtgatgttgagcttc

SEQ ID NO: 1726835 - DNA, 15 bp, Homo sapiens
tgatgttgagcttct

SEQ ID NO: 1726836 - DNA, 15 bp, Homo sapiens
gatgttgagcttctt

SEQ ID NO: 1726837 - DNA, 15 bp, Homo sapiens
atgttgagcttcttt

SEQ ID NO: 1726838 - DNA, 15 bp, Homo sapiens
tgttgagcttctttt

SEQ ID NO: 1726839 - DNA, 15 bp, Homo sapiens
gttgagcttcttttt

SEQ ID NO: 1726840 - DNA, 15 bp, Homo sapiens
ttgagcttcttttta

SEQ ID NO: 1726841 - DNA, 15 bp, Homo sapiens
tgagcttctttttat

SEQ ID NO: 1726842 - DNA, 15 bp, Homo sapiens
gagcttctttttata

SEQ ID NO: 1726843 - DNA, 15 bp, Homo sapiens
agcttctttttatat

SEQ ID NO: 1726844 - DNA, 15 bp, Homo sapiens
gcttctttttatatg

SEQ ID NO: 1726845 - DNA, 15 bp, Homo sapiens
cttctttttatatgt

SEQ ID NO: 1726846 - DNA, 15 bp, Homo sapiens
ttctttttatatgtt

SEQ ID NO: 1726847 - DNA, 15 bp, Homo sapiens
tctttttatatgttt

SEQ ID NO: 1726848 - DNA, 15 bp, Homo sapiens
ctttttatatgtttg

SEQ ID NO: 1726849 - DNA, 15 bp, Homo sapiens
tttttatatgtttgt

SEQ ID NO: 1726850 - DNA, 15 bp, Homo sapiens
ttttatatgtttgtt

SEQ ID NO: 1726851 - DNA, 15 bp, Homo sapiens
tttatatgtttgttg

SEQ ID NO: 1726852 - DNA, 15 bp, Homo sapiens
ttatatgtttgttgg

SEQ ID NO: 1726853 - DNA, 15 bp, Homo sapiens
tatatgtttgttggc

SEQ ID NO: 1726854 - DNA, 15 bp, Homo sapiens
atatgtttgttggct

SEQ ID NO: 1726855 - DNA, 15 bp, Homo sapiens
tatgtttgttggctg

SEQ ID NO: 1726856 - DNA, 15 bp, Homo sapiens
atgtttgttggctgc

SEQ ID NO: 1726857 - DNA, 15 bp, Homo sapiens
tgtttgttggctgca

SEQ ID NO: 1726858 - DNA, 15 bp, Homo sapiens
gtttgttggctgcat

SEQ ID NO: 1726859 - DNA, 15 bp, Homo sapiens
tttgttggctgcata

SEQ ID NO: 1726860 - DNA, 15 bp, Homo sapiens
ttgttggctgcataa

SEQ ID NO: 1726861 - DNA, 15 bp, Homo sapiens
tgttggctgcataaa

SEQ ID NO: 1726862 - DNA, 15 bp, Homo sapiens
gttggctgcataaat

SEQ ID NO: 1726863 - DNA, 15 bp, Homo sapiens
ttggctgcataaatg

SEQ ID NO: 1726864 - DNA, 15 bp, Homo sapiens
tggctgcataaatgt

SEQ ID NO: 1726865 - DNA, 15 bp, Homo sapiens
ggctgcataaatgtc

SEQ ID NO: 1726866 - DNA, 15 bp, Homo sapiens
gctgcataaatgtct

SEQ ID NO: 1726867 - DNA, 15 bp, Homo sapiens
ctgcataaatgtctt

SEQ ID NO: 1726868 - DNA, 15 bp, Homo sapiens
tgcataaatgtcttc

SEQ ID NO: 1726869 - DNA, 15 bp, Homo sapiens
gcataaatgtcttct

SEQ ID NO: 1726870 - DNA, 15 bp, Homo sapiens
cataaatgtcttctt

SEQ ID NO: 1726871 - DNA, 15 bp, Homo sapiens
ataaatgtcttcttt

SEQ ID NO: 1726872 - DNA, 15 bp, Homo sapiens
taaatgtcttctttg

SEQ ID NO: 1726873 - DNA, 15 bp, Homo sapiens
aaatgtcttctttgg

SEQ ID NO: 1726874 - DNA, 15 bp, Homo sapiens
aatgtcttctttgga

SEQ ID NO: 1726875 - DNA, 15 bp, Homo sapiens
atgtcttctttggag

SEQ ID NO: 1726876 - DNA, 15 bp, Homo sapiens
tgtcttctttggaga

SEQ ID NO: 1726877 - DNA, 15 bp, Homo sapiens
gtcttctttggagaa

SEQ ID NO: 1726878 - DNA, 15 bp, Homo sapiens
tcttctttggagaag

SEQ ID NO: 1726879 - DNA, 15 bp, Homo sapiens
cttctttggagaagt

SEQ ID NO: 1726880 - DNA, 15 bp, Homo sapiens
ttctttggagaagtg

SEQ ID NO: 1726881 - DNA, 15 bp, Homo sapiens
tctttggagaagtgt

SEQ ID NO: 1726882 - DNA, 15 bp, Homo sapiens
ctttggagaagtgtc

SEQ ID NO: 1726883 - DNA, 15 bp, Homo sapiens
tttggagaagtgtct

SEQ ID NO: 1726884 - DNA, 15 bp, Homo sapiens
ttggagaagtgtctc

SEQ ID NO: 1726885 - DNA, 15 bp, Homo sapiens
tggagaagtgtctct

SEQ ID NO: 1726886 - DNA, 15 bp, Homo sapiens
ggagaagtgtctctt

SEQ ID NO: 1726887 - DNA, 15 bp, Homo sapiens
gagaagtgtctcttc

SEQ ID NO: 1726888 - DNA, 15 bp, Homo sapiens
agaagtgtctcttca

SEQ ID NO: 1726889 - DNA, 15 bp, Homo sapiens
gaagtgtctcttcat

SEQ ID NO: 1726890 - DNA, 15 bp, Homo sapiens
aagtgtctcttcata

SEQ ID NO: 1726891 - DNA, 15 bp, Homo sapiens
agtgtctcttcatat

SEQ ID NO: 1726892 - DNA, 15 bp, Homo sapiens
gtgtctcttcatatc

SEQ ID NO: 1726893 - DNA, 15 bp, Homo sapiens
tgtctcttcatatcc

SEQ ID NO: 1726894 - DNA, 15 bp, Homo sapiens
gtctcttcatatcct

SEQ ID NO: 1726895 - DNA, 15 bp, Homo sapiens
tctcttcatatcctt

SEQ ID NO: 1726896 - DNA, 15 bp, Homo sapiens
ctcttcatatccttt

SEQ ID NO: 1726897 - DNA, 15 bp, Homo sapiens
tcttcatatcctttg

SEQ ID NO: 1726898 - DNA, 15 bp, Homo sapiens
cttcatatcctttgc

SEQ ID NO: 1726899 - DNA, 15 bp, Homo sapiens
ttcatatcctttgcc

SEQ ID NO: 1726900 - DNA, 15 bp, Homo sapiens
tcatatcctttgcca

SEQ ID NO: 1726901 - DNA, 15 bp, Homo sapiens
catatcctttgccaa

SEQ ID NO: 1726902 - DNA, 15 bp, Homo sapiens
atatcctttgccaac

SEQ ID NO: 1726903 - DNA, 15 bp, Homo sapiens
tatcctttgccaact

SEQ ID NO: 1726904 - DNA, 15 bp, Homo sapiens
atcctttgccaactt

SEQ ID NO: 1726905 - DNA, 15 bp, Homo sapiens
tcctttgccaacttt

SEQ ID NO: 1726906 - DNA, 15 bp, Homo sapiens
cctttgccaactttt

SEQ ID NO: 1726907 - DNA, 15 bp, Homo sapiens
ctttgccaacttttt

SEQ ID NO: 1726908 - DNA, 15 bp, Homo sapiens
tttgccaactttttt

SEQ ID NO: 1726909 - DNA, 15 bp, Homo sapiens
ttgccaactttttta

SEQ ID NO: 1726910 - DNA, 15 bp, Homo sapiens
tgccaacttttttat

SEQ ID NO: 1726911 - DNA, 15 bp, Homo sapiens
gccaacttttttatg

SEQ ID NO: 1726912 - DNA, 15 bp, Homo sapiens
ccaacttttttatgg

SEQ ID NO: 1726913 - DNA, 15 bp, Homo sapiens
caacttttttatggg

SEQ ID NO: 1726914 - DNA, 15 bp, Homo sapiens
aacttttttatgggg

SEQ ID NO: 1726915 - DNA, 15 bp, Homo sapiens
acttttttatggggt

SEQ ID NO: 1726916 - DNA, 15 bp, Homo sapiens
cttttttatggggtt

SEQ ID NO: 1726917 - DNA, 15 bp, Homo sapiens
ttttttatggggtta

SEQ ID NO: 1726918 - DNA, 15 bp, Homo sapiens
tttttatggggttat

SEQ ID NO: 1726919 - DNA, 15 bp, Homo sapiens
ttttatggggttatt

SEQ ID NO: 1726920 - DNA, 15 bp, Homo sapiens
tttatggggttattt

SEQ ID NO: 1726921 - DNA, 15 bp, Homo sapiens
ttatggggttatttg

SEQ ID NO: 1726922 - DNA, 15 bp, Homo sapiens
tatggggttatttgt

SEQ ID NO: 1726923 - DNA, 15 bp, Homo sapiens
atggggttatttgtt

SEQ ID NO: 1726924 - DNA, 15 bp, Homo sapiens
tggggttatttgttt

SEQ ID NO: 1726925 - DNA, 15 bp, Homo sapiens
ggggttatttgtttt

SEQ ID NO: 1726926 - DNA, 15 bp, Homo sapiens
gggttatttgttttt

SEQ ID NO: 1726927 - DNA, 15 bp, Homo sapiens
ggttatttgtttttt

SEQ ID NO: 1726928 - DNA, 15 bp, Homo sapiens
gttatttgttttttt

SEQ ID NO: 1726929 - DNA, 15 bp, Homo sapiens
ttatttgtttttttc

SEQ ID NO: 1726930 - DNA, 15 bp, Homo sapiens
tatttgtttttttct

SEQ ID NO: 1726931 - DNA, 15 bp, Homo sapiens
atttgtttttttctt

SEQ ID NO: 1726932 - DNA, 15 bp, Homo sapiens
tttgtttttttcttg

SEQ ID NO: 1726933 - DNA, 15 bp, Homo sapiens
ttgtttttttcttgt

SEQ ID NO: 1726934 - DNA, 15 bp, Homo sapiens
tgtttttttcttgta

SEQ ID NO: 1726935 - DNA, 15 bp, Homo sapiens
gtttttttcttgtaa

SEQ ID NO: 1726936 - DNA, 15 bp, Homo sapiens
tttttttcttgtaaa

SEQ ID NO: 1726937 - DNA, 15 bp, Homo sapiens
ttttttcttgtaaat

SEQ ID NO: 1726938 - DNA, 15 bp, Homo sapiens
tttttcttgtaaatt

SEQ ID NO: 1726939 - DNA, 15 bp, Homo sapiens
ttttcttgtaaattt

SEQ ID NO: 1726940 - DNA, 15 bp, Homo sapiens
tttcttgtaaatttg

SEQ ID NO: 1726941 - DNA, 15 bp, Homo sapiens
ttcttgtaaatttgt

SEQ ID NO: 1726942 - DNA, 15 bp, Homo sapiens
tcttgtaaatttgtt

SEQ ID NO: 1726943 - DNA, 15 bp, Homo sapiens
cttgtaaatttgttt

SEQ ID NO: 1726944 - DNA, 15 bp, Homo sapiens
ttgtaaatttgttta

SEQ ID NO: 1726945 - DNA, 15 bp, Homo sapiens
tgtaaatttgtttaa

SEQ ID NO: 1726946 - DNA, 15 bp, Homo sapiens
gtaaatttgtttaag

SEQ ID NO: 1726947 - DNA, 15 bp, Homo sapiens
taaatttgtttaagt

SEQ ID NO: 1726948 - DNA, 15 bp, Homo sapiens
aaatttgtttaagtt

SEQ ID NO: 1726949 - DNA, 15 bp, Homo sapiens
aatttgtttaagttc

SEQ ID NO: 1726950 - DNA, 15 bp, Homo sapiens
atttgtttaagttcc

SEQ ID NO: 1726951 - DNA, 15 bp, Homo sapiens
tttgtttaagttcct

SEQ ID NO: 1726952 - DNA, 15 bp, Homo sapiens
ttgtttaagttcctt

SEQ ID NO: 1726953 - DNA, 15 bp, Homo sapiens
tgtttaagttccttg

SEQ ID NO: 1726954 - DNA, 15 bp, Homo sapiens
gtttaagttccttgt

SEQ ID NO: 1726955 - DNA, 15 bp, Homo sapiens
tttaagttccttgta

SEQ ID NO: 1726956 - DNA, 15 bp, Homo sapiens
ttaagttccttgtag

SEQ ID NO: 1726957 - DNA, 15 bp, Homo sapiens
taagttccttgtaga

SEQ ID NO: 1726958 - DNA, 15 bp, Homo sapiens
aagttccttgtagat

SEQ ID NO: 1726959 - DNA, 15 bp, Homo sapiens
agttccttgtagatt

SEQ ID NO: 1726960 - DNA, 15 bp, Homo sapiens
gttccttgtagattc

SEQ ID NO: 1726961 - DNA, 15 bp, Homo sapiens
ttccttgtagattct

SEQ ID NO: 1726962 - DNA, 15 bp, Homo sapiens
tccttgtagattctg

SEQ ID NO: 1726963 - DNA, 15 bp, Homo sapiens
ccttgtagattctgg

SEQ ID NO: 1726964 - DNA, 15 bp, Homo sapiens
cttgtagattctgga

SEQ ID NO: 1726965 - DNA, 15 bp, Homo sapiens
ttgtagattctggat

SEQ ID NO: 1726966 - DNA, 15 bp, Homo sapiens
tgtagattctggata

SEQ ID NO: 1726967 - DNA, 15 bp, Homo sapiens
gtagattctggatat

SEQ ID NO: 1726968 - DNA, 15 bp, Homo sapiens
tagattctggatatt

SEQ ID NO: 1726969 - DNA, 15 bp, Homo sapiens
agattctggatattt

SEQ ID NO: 1726970 - DNA, 15 bp, Homo sapiens
gattctggatatttg

SEQ ID NO: 1726971 - DNA, 15 bp, Homo sapiens
attctggatatttga

SEQ ID NO: 1726972 - DNA, 15 bp, Homo sapiens
ttctggatatttgac

SEQ ID NO: 1726973 - DNA, 15 bp, Homo sapiens
tctggatatttgacc

SEQ ID NO: 1726974 - DNA, 15 bp, Homo sapiens
ctggatatttgacct

SEQ ID NO: 1726975 - DNA, 15 bp, Homo sapiens
tggatatttgacctt

SEQ ID NO: 1726976 - DNA, 15 bp, Homo sapiens
ggatatttgaccttt

SEQ ID NO: 1726977 - DNA, 15 bp, Homo sapiens
gatatttgacctttg

SEQ ID NO: 1726978 - DNA, 15 bp, Homo sapiens
atatttgacctttgt

SEQ ID NO: 1726979 - DNA, 15 bp, Homo sapiens
tatttgacctttgtc

SEQ ID NO: 1726980 - DNA, 15 bp, Homo sapiens
atttgacctttgtca

SEQ ID NO: 1726981 - DNA, 15 bp, Homo sapiens
tttgacctttgtcag

SEQ ID NO: 1726982 - DNA, 15 bp, Homo sapiens
ttgacctttgtcaga

SEQ ID NO: 1726983 - DNA, 15 bp, Homo sapiens
tgacctttgtcagat

SEQ ID NO: 1726984 - DNA, 15 bp, Homo sapiens
gacctttgtcagatt

SEQ ID NO: 1726985 - DNA, 15 bp, Homo sapiens
acctttgtcagattc

SEQ ID NO: 1726986 - DNA, 15 bp, Homo sapiens
cctttgtcagattct

SEQ ID NO: 1726987 - DNA, 15 bp, Homo sapiens
ctttgtcagattcta

SEQ ID NO: 1726988 - DNA, 15 bp, Homo sapiens
tttgtcagattctat

SEQ ID NO: 1726989 - DNA, 15 bp, Homo sapiens
ttgtcagattctata

SEQ ID NO: 1726990 - DNA, 15 bp, Homo sapiens
tgtcagattctatag

SEQ ID NO: 1726991 - DNA, 15 bp, Homo sapiens
gtcagattctatagg

SEQ ID NO: 1726992 - DNA, 15 bp, Homo sapiens
tcagattctataggt

SEQ ID NO: 1726993 - DNA, 15 bp, Homo sapiens
cagattctataggtt

SEQ ID NO: 1726994 - DNA, 15 bp, Homo sapiens
agattctataggttg

SEQ ID NO: 1726995 - DNA, 15 bp, Homo sapiens
gattctataggttgc

SEQ ID NO: 1726996 - DNA, 15 bp, Homo sapiens
attctataggttgcc

SEQ ID NO: 1726997 - DNA, 15 bp, Homo sapiens
ttctataggttgcct

SEQ ID NO: 1726998 - DNA, 15 bp, Homo sapiens
tctataggttgcctg

SEQ ID NO: 1726999 - DNA, 15 bp, Homo sapiens
ctataggttgcctgt

SEQ ID NO: 1727000 - DNA, 15 bp, Homo sapiens
tataggttgcctgtt

SEQ ID NO: 1727001 - DNA, 15 bp, Homo sapiens
ataggttgcctgtta

SEQ ID NO: 1727002 - DNA, 15 bp, Homo sapiens
taggttgcctgttaa

SEQ ID NO: 1727003 - DNA, 15 bp, Homo sapiens
aggttgcctgttaac

SEQ ID NO: 1727004 - DNA, 15 bp, Homo sapiens
ggttgcctgttaact

SEQ ID NO: 1727005 - DNA, 15 bp, Homo sapiens
gttgcctgttaactc

SEQ ID NO: 1727006 - DNA, 15 bp, Homo sapiens
ttgcctgttaactct

SEQ ID NO: 1727007 - DNA, 15 bp, Homo sapiens
tgcctgttaactctg

SEQ ID NO: 1727008 - DNA, 15 bp, Homo sapiens
gcctgttaactctga

SEQ ID NO: 1727009 - DNA, 15 bp, Homo sapiens
cctgttaactctgat

SEQ ID NO: 1727010 - DNA, 15 bp, Homo sapiens
ctgttaactctgatg

SEQ ID NO: 1727011 - DNA, 15 bp, Homo sapiens
tgttaactctgatga

SEQ ID NO: 1727012 - DNA, 15 bp, Homo sapiens
gttaactctgatgat

SEQ ID NO: 1727013 - DNA, 15 bp, Homo sapiens
ttaactctgatgata

SEQ ID NO: 1727014 - DNA, 15 bp, Homo sapiens
taactctgatgatag

SEQ ID NO: 1727015 - DNA, 15 bp, Homo sapiens
aactctgatgatagt

SEQ ID NO: 1727016 - DNA, 15 bp, Homo sapiens
actctgatgatagtt

SEQ ID NO: 1727017 - DNA, 15 bp, Homo sapiens
ctctgatgatagttt

SEQ ID NO: 1727018 - DNA, 15 bp, Homo sapiens
tctgatgatagtttc

SEQ ID NO: 1727019 - DNA, 15 bp, Homo sapiens
ctgatgatagtttct

SEQ ID NO: 1727020 - DNA, 15 bp, Homo sapiens
tgatgatagtttctt

SEQ ID NO: 1727021 - DNA, 15 bp, Homo sapiens
gatgatagtttcttt

SEQ ID NO: 1727022 - DNA, 15 bp, Homo sapiens
ttttgctgtgcagag

SEQ ID NO: 1727023 - DNA, 15 bp, Homo sapiens
tttgctgtgcagagc

SEQ ID NO: 1727024 - DNA, 15 bp, Homo sapiens
ttgctgtgcagagct

SEQ ID NO: 1727025 - DNA, 15 bp, Homo sapiens
tgctgtgcagagctc

SEQ ID NO: 1727026 - DNA, 15 bp, Homo sapiens
gctgtgcagagctct

SEQ ID NO: 1727027 - DNA, 15 bp, Homo sapiens
ctgtgcagagctctt

SEQ ID NO: 1727028 - DNA, 15 bp, Homo sapiens
tgtgcagagctcttt

SEQ ID NO: 1727029 - DNA, 15 bp, Homo sapiens
gtgcagagctcttta

SEQ ID NO: 1727030 - DNA, 15 bp, Homo sapiens
tgcagagctctttag

SEQ ID NO: 1727031 - DNA, 15 bp, Homo sapiens
gcagagctctttagt

SEQ ID NO: 1727032 - DNA, 15 bp, Homo sapiens
cagagctctttagtt

SEQ ID NO: 1727033 - DNA, 15 bp, Homo sapiens
agagctctttagttt

SEQ ID NO: 1727034 - DNA, 15 bp, Homo sapiens
gagctctttagttta

SEQ ID NO: 1727035 - DNA, 15 bp, Homo sapiens
agctctttagtttaa

SEQ ID NO: 1727036 - DNA, 15 bp, Homo sapiens
gctctttagtttaat

SEQ ID NO: 1727037 - DNA, 15 bp, Homo sapiens
ctttagtttaattag

SEQ ID NO: 1727038 - DNA, 15 bp, Homo sapiens
tttagtttaattaga

SEQ ID NO: 1727039 - DNA, 15 bp, Homo sapiens
ttagtttaattagat

SEQ ID NO: 1727040 - DNA, 15 bp, Homo sapiens
tagtttaattagatc

SEQ ID NO: 1727041 - DNA, 15 bp, Homo sapiens
agtttaattagatcc

SEQ ID NO: 1727042 - DNA, 15 bp, Homo sapiens
gtttaattagatccc

SEQ ID NO: 1727043 - DNA, 15 bp, Homo sapiens
tttaattagatccca

SEQ ID NO: 1727044 - DNA, 15 bp, Homo sapiens
ttaattagatcccat

SEQ ID NO: 1727045 - DNA, 15 bp, Homo sapiens
taattagatcccatt

SEQ ID NO: 1727046 - DNA, 15 bp, Homo sapiens
aattagatcccattg

SEQ ID NO: 1727047 - DNA, 15 bp, Homo sapiens
attagatcccattgg

SEQ ID NO: 1727048 - DNA, 15 bp, Homo sapiens
ttagatcccattggt

SEQ ID NO: 1727049 - DNA, 15 bp, Homo sapiens
tagatcccattggtc

SEQ ID NO: 1727050 - DNA, 15 bp, Homo sapiens
agatcccattggtca

SEQ ID NO: 1727051 - DNA, 15 bp, Homo sapiens
gatcccattggtcag

SEQ ID NO: 1727052 - DNA, 15 bp, Homo sapiens
atcccattggtcagt

SEQ ID NO: 1727053 - DNA, 15 bp, Homo sapiens
tcccattggtcagtt

SEQ ID NO: 1727054 - DNA, 15 bp, Homo sapiens
cccattggtcagttt

SEQ ID NO: 1727055 - DNA, 15 bp, Homo sapiens
ccattggtcagtttt

SEQ ID NO: 1727056 - DNA, 15 bp, Homo sapiens
cattggtcagttttg

SEQ ID NO: 1727057 - DNA, 15 bp, Homo sapiens
attggtcagttttgg

SEQ ID NO: 1727058 - DNA, 15 bp, Homo sapiens
ttggtcagttttggc

SEQ ID NO: 1727059 - DNA, 15 bp, Homo sapiens
tggtcagttttggct

SEQ ID NO: 1727060 - DNA, 15 bp, Homo sapiens
ggtcagttttggctt

SEQ ID NO: 1727061 - DNA, 15 bp, Homo sapiens
gtcagttttggcttt

SEQ ID NO: 1727062 - DNA, 15 bp, Homo sapiens
tcagttttggctttt

SEQ ID NO: 1727063 - DNA, 15 bp, Homo sapiens
cagttttggcttttg

SEQ ID NO: 1727064 - DNA, 15 bp, Homo sapiens
agttttggcttttgt

SEQ ID NO: 1727065 - DNA, 15 bp, Homo sapiens
gttttggcttttgtt

SEQ ID NO: 1727066 - DNA, 15 bp, Homo sapiens
cttttgttgcaattc

SEQ ID NO: 1727067 - DNA, 15 bp, Homo sapiens
ttttgttgcaattcc

SEQ ID NO: 1727068 - DNA, 15 bp, Homo sapiens
tttgttgcaattcct

SEQ ID NO: 1727069 - DNA, 15 bp, Homo sapiens
ttgttgcaattcctt

SEQ ID NO: 1727070 - DNA, 15 bp, Homo sapiens
tgttgcaattccttt

SEQ ID NO: 1727071 - DNA, 15 bp, Homo sapiens
gttgcaattcctttt

SEQ ID NO: 1727072 - DNA, 15 bp, Homo sapiens
ttgcaattccttttg

SEQ ID NO: 1727073 - DNA, 15 bp, Homo sapiens
tgcaattccttttgg

SEQ ID NO: 1727074 - DNA, 15 bp, Homo sapiens
gcaattccttttggc

SEQ ID NO: 1727075 - DNA, 15 bp, Homo sapiens
caattccttttggca

SEQ ID NO: 1727076 - DNA, 15 bp, Homo sapiens
aattccttttggcat

SEQ ID NO: 1727077 - DNA, 15 bp, Homo sapiens
attccttttggcatt

SEQ ID NO: 1727078 - DNA, 15 bp, Homo sapiens
ttccttttggcattt

SEQ ID NO: 1727079 - DNA, 15 bp, Homo sapiens
tccttttggcatttt

SEQ ID NO: 1727080 - DNA, 15 bp, Homo sapiens
ccttttggcattttc

SEQ ID NO: 1727081 - DNA, 15 bp, Homo sapiens
cttttggcattttca

SEQ ID NO: 1727082 - DNA, 15 bp, Homo sapiens
ttttggcattttcat

SEQ ID NO: 1727083 - DNA, 15 bp, Homo sapiens
tttggcattttcatc

SEQ ID NO: 1727084 - DNA, 15 bp, Homo sapiens
ttggcattttcatca

SEQ ID NO: 1727085 - DNA, 15 bp, Homo sapiens
tggcattttcatcat

SEQ ID NO: 1727086 - DNA, 15 bp, Homo sapiens
ggcattttcatcatg

SEQ ID NO: 1727087 - DNA, 15 bp, Homo sapiens
gcattttcatcatga

SEQ ID NO: 1727088 - DNA, 15 bp, Homo sapiens
cattttcatcatgaa

SEQ ID NO: 1727089 - DNA, 15 bp, Homo sapiens
attttcatcatgaag

SEQ ID NO: 1727090 - DNA, 15 bp, Homo sapiens
ttttcatcatgaagt

SEQ ID NO: 1727091 - DNA, 15 bp, Homo sapiens
tttcatcatgaagtc

SEQ ID NO: 1727092 - DNA, 15 bp, Homo sapiens
ttcatcatgaagtct

SEQ ID NO: 1727093 - DNA, 15 bp, Homo sapiens
tcatcatgaagtctt

SEQ ID NO: 1727094 - DNA, 15 bp, Homo sapiens
catcatgaagtcttt

SEQ ID NO: 1727095 - DNA, 15 bp, Homo sapiens
atcatgaagtctttg

SEQ ID NO: 1727096 - DNA, 15 bp, Homo sapiens
aagtctttgcccatt

SEQ ID NO: 1727097 - DNA, 15 bp, Homo sapiens
agtctttgcccattc

SEQ ID NO: 1727098 - DNA, 15 bp, Homo sapiens
gtctttgcccattcc

SEQ ID NO: 1727099 - DNA, 15 bp, Homo sapiens
tctttgcccattcct

SEQ ID NO: 1727100 - DNA, 15 bp, Homo sapiens
ctttgcccattccta

SEQ ID NO: 1727101 - DNA, 15 bp, Homo sapiens
tttgcccattcctat

SEQ ID NO: 1727102 - DNA, 15 bp, Homo sapiens
ttgcccattcctatg

SEQ ID NO: 1727103 - DNA, 15 bp, Homo sapiens
tgcccattcctatgt

SEQ ID NO: 1727104 - DNA, 15 bp, Homo sapiens
gcccattcctatgtc

SEQ ID NO: 1727105 - DNA, 15 bp, Homo sapiens
cccattcctatgtcc

SEQ ID NO: 1727106 - DNA, 15 bp, Homo sapiens
ccattcctatgtcct

SEQ ID NO: 1727107 - DNA, 15 bp, Homo sapiens
cattcctatgtcctg

SEQ ID NO: 1727108 - DNA, 15 bp, Homo sapiens
attcctatgtcctga

SEQ ID NO: 1727109 - DNA, 15 bp, Homo sapiens
ttcctatgtcctgaa

SEQ ID NO: 1727110 - DNA, 15 bp, Homo sapiens
tcctatgtcctgaat

SEQ ID NO: 1727111 - DNA, 15 bp, Homo sapiens
cctatgtcctgaatg

SEQ ID NO: 1727112 - DNA, 15 bp, Homo sapiens
ctatgtcctgaatgg

SEQ ID NO: 1727113 - DNA, 15 bp, Homo sapiens
tatgtcctgaatggt

SEQ ID NO: 1727114 - DNA, 15 bp, Homo sapiens
atgtcctgaatggta

SEQ ID NO: 1727115 - DNA, 15 bp, Homo sapiens
tgtcctgaatggtat

SEQ ID NO: 1727116 - DNA, 15 bp, Homo sapiens
gtcctgaatggtatt

SEQ ID NO: 1727117 - DNA, 15 bp, Homo sapiens
tcctgaatggtattg

SEQ ID NO: 1727118 - DNA, 15 bp, Homo sapiens
cctgaatggtattgc

SEQ ID NO: 1727119 - DNA, 15 bp, Homo sapiens
ctgaatggtattgcc

SEQ ID NO: 1727120 - DNA, 15 bp, Homo sapiens
tgaatggtattgcct

SEQ ID NO: 1727121 - DNA, 15 bp, Homo sapiens
gaatggtattgccta

SEQ ID NO: 1727122 - DNA, 15 bp, Homo sapiens
aatggtattgcctag

SEQ ID NO: 1727123 - DNA, 15 bp, Homo sapiens
atggtattgcctagg

SEQ ID NO: 1727124 - DNA, 15 bp, Homo sapiens
tggtattgcctaggt

SEQ ID NO: 1727125 - DNA, 15 bp, Homo sapiens
ggtattgcctaggtt

SEQ ID NO: 1727126 - DNA, 15 bp, Homo sapiens
gtattgcctaggttt

SEQ ID NO: 1727127 - DNA, 15 bp, Homo sapiens
tattgcctaggtttt

SEQ ID NO: 1727128 - DNA, 15 bp, Homo sapiens
attgcctaggttttc

SEQ ID NO: 1727129 - DNA, 15 bp, Homo sapiens
ttgcctaggttttct

SEQ ID NO: 1727130 - DNA, 15 bp, Homo sapiens
tgcctaggttttctt

SEQ ID NO: 1727131 - DNA, 15 bp, Homo sapiens
gcctaggttttcttc

SEQ ID NO: 1727132 - DNA, 15 bp, Homo sapiens
cctaggttttcttct

SEQ ID NO: 1727133 - DNA, 15 bp, Homo sapiens
ctaggttttcttcta

SEQ ID NO: 1727134 - DNA, 15 bp, Homo sapiens
taggttttcttctag

SEQ ID NO: 1727135 - DNA, 15 bp, Homo sapiens
aggttttcttctagt

SEQ ID NO: 1727136 - DNA, 15 bp, Homo sapiens
ggttttcttctagtg

SEQ ID NO: 1727137 - DNA, 15 bp, Homo sapiens
gttttcttctagtgt

SEQ ID NO: 1727138 - DNA, 15 bp, Homo sapiens
ttttcttctagtgtt

SEQ ID NO: 1727139 - DNA, 15 bp, Homo sapiens
tttcttctagtgttt

SEQ ID NO: 1727140 - DNA, 15 bp, Homo sapiens
ttcttctagtgtttt

SEQ ID NO: 1727141 - DNA, 15 bp, Homo sapiens
tcttctagtgtttta

SEQ ID NO: 1727142 - DNA, 15 bp, Homo sapiens
cttctagtgttttat

SEQ ID NO: 1727143 - DNA, 15 bp, Homo sapiens
ttctagtgttttatg

SEQ ID NO: 1727144 - DNA, 15 bp, Homo sapiens
tctagtgttttatgg

SEQ ID NO: 1727145 - DNA, 15 bp, Homo sapiens
ctagtgttttatggt

SEQ ID NO: 1727146 - DNA, 15 bp, Homo sapiens
tagtgttttatggtt

SEQ ID NO: 1727147 - DNA, 15 bp, Homo sapiens
agtgttttatggttt

SEQ ID NO: 1727148 - DNA, 15 bp, Homo sapiens
gtgttttatggtttt

SEQ ID NO: 1727149 - DNA, 15 bp, Homo sapiens
tgttttatggttttg

SEQ ID NO: 1727150 - DNA, 15 bp, Homo sapiens
gttttatggttttgg

SEQ ID NO: 1727151 - DNA, 15 bp, Homo sapiens
ttttatggttttggg

SEQ ID NO: 1727152 - DNA, 15 bp, Homo sapiens
tttatggttttgggt

SEQ ID NO: 1727153 - DNA, 15 bp, Homo sapiens
ttatggttttgggtt

SEQ ID NO: 1727154 - DNA, 15 bp, Homo sapiens
tatggttttgggttt

SEQ ID NO: 1727155 - DNA, 15 bp, Homo sapiens
atggttttgggtttt

SEQ ID NO: 1727156 - DNA, 15 bp, Homo sapiens
tggttttgggtttta

SEQ ID NO: 1727157 - DNA, 15 bp, Homo sapiens
ggttttgggttttaa

SEQ ID NO: 1727158 - DNA, 15 bp, Homo sapiens
gttttgggttttaag

SEQ ID NO: 1727159 - DNA, 15 bp, Homo sapiens
ttttgggttttaagt

SEQ ID NO: 1727160 - DNA, 15 bp, Homo sapiens
tttgggttttaagtc

SEQ ID NO: 1727161 - DNA, 15 bp, Homo sapiens
ttgggttttaagtct

SEQ ID NO: 1727162 - DNA, 15 bp, Homo sapiens
tgggttttaagtctt

SEQ ID NO: 1727163 - DNA, 15 bp, Homo sapiens
gggttttaagtcttt

SEQ ID NO: 1727164 - DNA, 15 bp, Homo sapiens
ggttttaagtcttta

SEQ ID NO: 1727165 - DNA, 15 bp, Homo sapiens
gttttaagtctttaa

SEQ ID NO: 1727166 - DNA, 15 bp, Homo sapiens
ttttaagtctttaat

SEQ ID NO: 1727167 - DNA, 15 bp, Homo sapiens
aagtctttaatccat

SEQ ID NO: 1727168 - DNA, 15 bp, Homo sapiens
agtctttaatccatc

SEQ ID NO: 1727169 - DNA, 15 bp, Homo sapiens
gtctttaatccatct

SEQ ID NO: 1727170 - DNA, 15 bp, Homo sapiens
tctttaatccatctt

SEQ ID NO: 1727171 - DNA, 15 bp, Homo sapiens
ctttaatccatcttg

SEQ ID NO: 1727172 - DNA, 15 bp, Homo sapiens
tttaatccatcttga

SEQ ID NO: 1727173 - DNA, 15 bp, Homo sapiens
ttaatccatcttgag

SEQ ID NO: 1727174 - DNA, 15 bp, Homo sapiens
taatccatcttgagt

SEQ ID NO: 1727175 - DNA, 15 bp, Homo sapiens
aatccatcttgagtt

SEQ ID NO: 1727176 - DNA, 15 bp, Homo sapiens
atccatcttgagtta

SEQ ID NO: 1727177 - DNA, 15 bp, Homo sapiens
tccatcttgagttaa

SEQ ID NO: 1727178 - DNA, 15 bp, Homo sapiens
ccatcttgagttaac

SEQ ID NO: 1727179 - DNA, 15 bp, Homo sapiens
catcttgagttaact

SEQ ID NO: 1727180 - DNA, 15 bp, Homo sapiens
atcttgagttaactt

SEQ ID NO: 1727181 - DNA, 15 bp, Homo sapiens
tcttgagttaacttt

SEQ ID NO: 1727182 - DNA, 15 bp, Homo sapiens
cttgagttaactttt

SEQ ID NO: 1727183 - DNA, 15 bp, Homo sapiens
ttgagttaacttttg

SEQ ID NO: 1727184 - DNA, 15 bp, Homo sapiens
tgagttaacttttgt

SEQ ID NO: 1727185 - DNA, 15 bp, Homo sapiens
gagttaacttttgta

SEQ ID NO: 1727186 - DNA, 15 bp, Homo sapiens
agttaacttttgtat

SEQ ID NO: 1727187 - DNA, 15 bp, Homo sapiens
gttaacttttgtata

SEQ ID NO: 1727188 - DNA, 15 bp, Homo sapiens
ttaacttttgtataa

SEQ ID NO: 1727189 - DNA, 15 bp, Homo sapiens
taacttttgtataag

SEQ ID NO: 1727190 - DNA, 15 bp, Homo sapiens
aacttttgtataagt

SEQ ID NO: 1727191 - DNA, 15 bp, Homo sapiens
acttttgtataagtt

SEQ ID NO: 1727192 - DNA, 15 bp, Homo sapiens
cttttgtataagttg

SEQ ID NO: 1727193 - DNA, 15 bp, Homo sapiens
ttttgtataagttgt

SEQ ID NO: 1727194 - DNA, 15 bp, Homo sapiens
tttgtataagttgta

SEQ ID NO: 1727195 - DNA, 15 bp, Homo sapiens
ttgtataagttgtaa

SEQ ID NO: 1727196 - DNA, 15 bp, Homo sapiens
tgtataagttgtaag

SEQ ID NO: 1727197 - DNA, 15 bp, Homo sapiens
gtataagttgtaagg

SEQ ID NO: 1727198 - DNA, 15 bp, Homo sapiens
tataagttgtaagga

SEQ ID NO: 1727199 - DNA, 15 bp, Homo sapiens
ataagttgtaaggaa

SEQ ID NO: 1727200 - DNA, 15 bp, Homo sapiens
taagttgtaaggaag

SEQ ID NO: 1727201 - DNA, 15 bp, Homo sapiens
aagttgtaaggaagg

SEQ ID NO: 1727202 - DNA, 15 bp, Homo sapiens
agttgtaaggaagga

SEQ ID NO: 1727203 - DNA, 15 bp, Homo sapiens
gttgtaaggaaggag

SEQ ID NO: 1727204 - DNA, 15 bp, Homo sapiens
ttgtaaggaaggagt

SEQ ID NO: 1727205 - DNA, 15 bp, Homo sapiens
tgtaaggaaggagtc

SEQ ID NO: 1727206 - DNA, 15 bp, Homo sapiens
gtaaggaaggagtcc

SEQ ID NO: 1727207 - DNA, 15 bp, Homo sapiens
taaggaaggagtcca

SEQ ID NO: 1727208 - DNA, 15 bp, Homo sapiens
aaggaaggagtccac

SEQ ID NO: 1727209 - DNA, 15 bp, Homo sapiens
aggaaggagtccact

SEQ ID NO: 1727210 - DNA, 15 bp, Homo sapiens
ggaaggagtccactt

SEQ ID NO: 1727211 - DNA, 15 bp, Homo sapiens
gaaggagtccacttt

SEQ ID NO: 1727212 - DNA, 15 bp, Homo sapiens
aaggagtccactttc

SEQ ID NO: 1727213 - DNA, 15 bp, Homo sapiens
aggagtccactttca

SEQ ID NO: 1727214 - DNA, 15 bp, Homo sapiens
ggagtccactttcag

SEQ ID NO: 1727215 - DNA, 15 bp, Homo sapiens
gagtccactttcagt

SEQ ID NO: 1727216 - DNA, 15 bp, Homo sapiens
agtccactttcagtt

SEQ ID NO: 1727217 - DNA, 15 bp, Homo sapiens
gtccactttcagttt

SEQ ID NO: 1727218 - DNA, 15 bp, Homo sapiens
tccactttcagtttt

SEQ ID NO: 1727219 - DNA, 15 bp, Homo sapiens
ccactttcagttttc

SEQ ID NO: 1727220 - DNA, 15 bp, Homo sapiens
cactttcagttttct

SEQ ID NO: 1727221 - DNA, 15 bp, Homo sapiens
actttcagttttctg

SEQ ID NO: 1727222 - DNA, 15 bp, Homo sapiens
ctttcagttttctgc

SEQ ID NO: 1727223 - DNA, 15 bp, Homo sapiens
tttcagttttctgca

SEQ ID NO: 1727224 - DNA, 15 bp, Homo sapiens
ttcagttttctgcat

SEQ ID NO: 1727225 - DNA, 15 bp, Homo sapiens
tcagttttctgcata

SEQ ID NO: 1727226 - DNA, 15 bp, Homo sapiens
cagttttctgcatat

SEQ ID NO: 1727227 - DNA, 15 bp, Homo sapiens
agttttctgcatatg

SEQ ID NO: 1727228 - DNA, 15 bp, Homo sapiens
gttttctgcatatgg

SEQ ID NO: 1727229 - DNA, 15 bp, Homo sapiens
ttttctgcatatggc

SEQ ID NO: 1727230 - DNA, 15 bp, Homo sapiens
tttctgcatatggct

SEQ ID NO: 1727231 - DNA, 15 bp, Homo sapiens
ttctgcatatggcta

SEQ ID NO: 1727232 - DNA, 15 bp, Homo sapiens
tctgcatatggctag

SEQ ID NO: 1727233 - DNA, 15 bp, Homo sapiens
ctgcatatggctagc

SEQ ID NO: 1727234 - DNA, 15 bp, Homo sapiens
tgcatatggctagcc

SEQ ID NO: 1727235 - DNA, 15 bp, Homo sapiens
gcatatggctagcca

SEQ ID NO: 1727236 - DNA, 15 bp, Homo sapiens
agccagttttcccag

SEQ ID NO: 1727237 - DNA, 15 bp, Homo sapiens
gccagttttcccagc

SEQ ID NO: 1727238 - DNA, 15 bp, Homo sapiens
ccagttttcccagca

SEQ ID NO: 1727239 - DNA, 15 bp, Homo sapiens
cagttttcccagcac

SEQ ID NO: 1727240 - DNA, 15 bp, Homo sapiens
caccatttattgaat

SEQ ID NO: 1727241 - DNA, 15 bp, Homo sapiens
accatttattgaata

SEQ ID NO: 1727242 - DNA, 15 bp, Homo sapiens
ccatttattgaatag

SEQ ID NO: 1727243 - DNA, 15 bp, Homo sapiens
catttattgaatagg

SEQ ID NO: 1727244 - DNA, 15 bp, Homo sapiens
atttattgaatagga

SEQ ID NO: 1727245 - DNA, 15 bp, Homo sapiens
tttattgaataggag

SEQ ID NO: 1727246 - DNA, 15 bp, Homo sapiens
ttattgaataggaga

SEQ ID NO: 1727247 - DNA, 15 bp, Homo sapiens
tattgaataggagat

SEQ ID NO: 1727248 - DNA, 15 bp, Homo sapiens
attgaataggagatc

SEQ ID NO: 1727249 - DNA, 15 bp, Homo sapiens
ttgaataggagatcc

SEQ ID NO: 1727250 - DNA, 15 bp, Homo sapiens
tgaataggagatcct

SEQ ID NO: 1727251 - DNA, 15 bp, Homo sapiens
gaataggagatcctt

SEQ ID NO: 1727252 - DNA, 15 bp, Homo sapiens
aataggagatccttt

SEQ ID NO: 1727253 - DNA, 15 bp, Homo sapiens
ataggagatcctttc

SEQ ID NO: 1727254 - DNA, 15 bp, Homo sapiens
taggagatcctttcc

SEQ ID NO: 1727255 - DNA, 15 bp, Homo sapiens
aggagatcctttccc

SEQ ID NO: 1727256 - DNA, 15 bp, Homo sapiens
ggagatcctttcccc

SEQ ID NO: 1727257 - DNA, 15 bp, Homo sapiens
gagatcctttccccc

SEQ ID NO: 1727258 - DNA, 15 bp, Homo sapiens
agatcctttccccca

SEQ ID NO: 1727259 - DNA, 15 bp, Homo sapiens
gatcctttcccccat

SEQ ID NO: 1727260 - DNA, 15 bp, Homo sapiens
atcctttcccccatt

SEQ ID NO: 1727261 - DNA, 15 bp, Homo sapiens
tcctttcccccattg

SEQ ID NO: 1727262 - DNA, 15 bp, Homo sapiens
cctttcccccattgc

SEQ ID NO: 1727263 - DNA, 15 bp, Homo sapiens
ctttcccccattgct

SEQ ID NO: 1727264 - DNA, 15 bp, Homo sapiens
tttcccccattgctt

SEQ ID NO: 1727265 - DNA, 15 bp, Homo sapiens
ttcccccattgcttg

SEQ ID NO: 1727266 - DNA, 15 bp, Homo sapiens
tcccccattgcttgt

SEQ ID NO: 1727267 - DNA, 15 bp, Homo sapiens
cccccattgcttgtt

SEQ ID NO: 1727268 - DNA, 15 bp, Homo sapiens
ccccattgcttgttg

SEQ ID NO: 1727269 - DNA, 15 bp, Homo sapiens
cccattgcttgttgt

SEQ ID NO: 1727270 - DNA, 15 bp, Homo sapiens
ccattgcttgttgtt

SEQ ID NO: 1727271 - DNA, 15 bp, Homo sapiens
cattgcttgttgttg

SEQ ID NO: 1727272 - DNA, 15 bp, Homo sapiens
attgcttgttgttgt

SEQ ID NO: 1727273 - DNA, 15 bp, Homo sapiens
ttgcttgttgttgtc

SEQ ID NO: 1727274 - DNA, 15 bp, Homo sapiens
tgcttgttgttgtca

SEQ ID NO: 1727275 - DNA, 15 bp, Homo sapiens
gcttgttgttgtcag

SEQ ID NO: 1727276 - DNA, 15 bp, Homo sapiens
cttgttgttgtcagg

SEQ ID NO: 1727277 - DNA, 15 bp, Homo sapiens
ttgttgttgtcaggt

SEQ ID NO: 1727278 - DNA, 15 bp, Homo sapiens
tgttgttgtcaggtt

SEQ ID NO: 1727279 - DNA, 15 bp, Homo sapiens
gttgttgtcaggttt

SEQ ID NO: 1727280 - DNA, 15 bp, Homo sapiens
ttgttgtcaggtttg

SEQ ID NO: 1727281 - DNA, 15 bp, Homo sapiens
tgttgtcaggtttgt

SEQ ID NO: 1727282 - DNA, 15 bp, Homo sapiens
gttgtcaggtttgtc

SEQ ID NO: 1727283 - DNA, 15 bp, Homo sapiens
ttgtcaggtttgtca

SEQ ID NO: 1727284 - DNA, 15 bp, Homo sapiens
tgtcaggtttgtcaa

SEQ ID NO: 1727285 - DNA, 15 bp, Homo sapiens
gtcaggtttgtcaaa

SEQ ID NO: 1727286 - DNA, 15 bp, Homo sapiens
tcaggtttgtcaaag

SEQ ID NO: 1727287 - DNA, 15 bp, Homo sapiens
caggtttgtcaaaga

SEQ ID NO: 1727288 - DNA, 15 bp, Homo sapiens
aggtttgtcaaagat

SEQ ID NO: 1727289 - DNA, 15 bp, Homo sapiens
ggtttgtcaaagatc

SEQ ID NO: 1727290 - DNA, 15 bp, Homo sapiens
gtttgtcaaagatca

SEQ ID NO: 1727291 - DNA, 15 bp, Homo sapiens
tttgtcaaagatcag

SEQ ID NO: 1727292 - DNA, 15 bp, Homo sapiens
ttgtcaaagatcaga

SEQ ID NO: 1727293 - DNA, 15 bp, Homo sapiens
tgtcaaagatcagat

SEQ ID NO: 1727294 - DNA, 15 bp, Homo sapiens
gtcaaagatcagatg

SEQ ID NO: 1727295 - DNA, 15 bp, Homo sapiens
tcaaagatcagatgg

SEQ ID NO: 1727296 - DNA, 15 bp, Homo sapiens
caaagatcagatggt

SEQ ID NO: 1727297 - DNA, 15 bp, Homo sapiens
aaagatcagatggtt

SEQ ID NO: 1727298 - DNA, 15 bp, Homo sapiens
aagatcagatggttg

SEQ ID NO: 1727299 - DNA, 15 bp, Homo sapiens
agatcagatggttgt

SEQ ID NO: 1727300 - DNA, 15 bp, Homo sapiens
gatcagatggttgta

SEQ ID NO: 1727301 - DNA, 15 bp, Homo sapiens
atcagatggttgtag

SEQ ID NO: 1727302 - DNA, 15 bp, Homo sapiens
tcagatggttgtaga

SEQ ID NO: 1727303 - DNA, 15 bp, Homo sapiens
cagatggttgtagat

SEQ ID NO: 1727304 - DNA, 15 bp, Homo sapiens
agatggttgtagatg

SEQ ID NO: 1727305 - DNA, 15 bp, Homo sapiens
gatggttgtagatgt

SEQ ID NO: 1727306 - DNA, 15 bp, Homo sapiens
atggttgtagatgtg

SEQ ID NO: 1727307 - DNA, 15 bp, Homo sapiens
tggttgtagatgtgc

SEQ ID NO: 1727308 - DNA, 15 bp, Homo sapiens
ggttgtagatgtgcg

SEQ ID NO: 1727309 - DNA, 15 bp, Homo sapiens
gttgtagatgtgcga

SEQ ID NO: 1727310 - DNA, 15 bp, Homo sapiens
ttgtagatgtgcgat

SEQ ID NO: 1727311 - DNA, 15 bp, Homo sapiens
tgtagatgtgcgata

SEQ ID NO: 1727312 - DNA, 15 bp, Homo sapiens
gtagatgtgcgatat

SEQ ID NO: 1727313 - DNA, 15 bp, Homo sapiens
tagatgtgcgatatt

SEQ ID NO: 1727314 - DNA, 15 bp, Homo sapiens
agatgtgcgatatta

SEQ ID NO: 1727315 - DNA, 15 bp, Homo sapiens
gatgtgcgatattat

SEQ ID NO: 1727316 - DNA, 15 bp, Homo sapiens
atgtgcgatattatt

SEQ ID NO: 1727317 - DNA, 15 bp, Homo sapiens
tgtgcgatattattt

SEQ ID NO: 1727318 - DNA, 15 bp, Homo sapiens
gtgcgatattatttc

SEQ ID NO: 1727319 - DNA, 15 bp, Homo sapiens
tgcgatattatttct

SEQ ID NO: 1727320 - DNA, 15 bp, Homo sapiens
gcgatattatttctg

SEQ ID NO: 1727321 - DNA, 15 bp, Homo sapiens
cgatattatttctga

SEQ ID NO: 1727322 - DNA, 15 bp, Homo sapiens
gatattatttctgag

SEQ ID NO: 1727323 - DNA, 15 bp, Homo sapiens
atattatttctgagg

SEQ ID NO: 1727324 - DNA, 15 bp, Homo sapiens
tattatttctgaggt

SEQ ID NO: 1727325 - DNA, 15 bp, Homo sapiens
attatttctgaggtc

SEQ ID NO: 1727326 - DNA, 15 bp, Homo sapiens
ttatttctgaggtct

SEQ ID NO: 1727327 - DNA, 15 bp, Homo sapiens
tatttctgaggtctc

SEQ ID NO: 1727328 - DNA, 15 bp, Homo sapiens
atttctgaggtctct

SEQ ID NO: 1727329 - DNA, 15 bp, Homo sapiens
tttctgaggtctctg

SEQ ID NO: 1727330 - DNA, 15 bp, Homo sapiens
ttctgaggtctctgt

SEQ ID NO: 1727331 - DNA, 15 bp, Homo sapiens
tctgaggtctctgtt

SEQ ID NO: 1727332 - DNA, 15 bp, Homo sapiens
gaggtctctgttctg

SEQ ID NO: 1727333 - DNA, 15 bp, Homo sapiens
aggtctctgttctgt

SEQ ID NO: 1727334 - DNA, 15 bp, Homo sapiens
ggtctctgttctgtt

SEQ ID NO: 1727335 - DNA, 15 bp, Homo sapiens
gtctctgttctgttt

SEQ ID NO: 1727336 - DNA, 15 bp, Homo sapiens
tctctgttctgtttc

SEQ ID NO: 1727337 - DNA, 15 bp, Homo sapiens
ctctgttctgtttca

SEQ ID NO: 1727338 - DNA, 15 bp, Homo sapiens
tctgttctgtttcat

SEQ ID NO: 1727339 - DNA, 15 bp, Homo sapiens
ctgttctgtttcatt

SEQ ID NO: 1727340 - DNA, 15 bp, Homo sapiens
tgttctgtttcattg

SEQ ID NO: 1727341 - DNA, 15 bp, Homo sapiens
gttctgtttcattgg

SEQ ID NO: 1727342 - DNA, 15 bp, Homo sapiens
ttctgtttcattggt

SEQ ID NO: 1727343 - DNA, 15 bp, Homo sapiens
tctgtttcattggtc

SEQ ID NO: 1727344 - DNA, 15 bp, Homo sapiens
ctgtttcattggtct

SEQ ID NO: 1727345 - DNA, 15 bp, Homo sapiens
tgtttcattggtcta

SEQ ID NO: 1727346 - DNA, 15 bp, Homo sapiens
gtttcattggtctat

SEQ ID NO: 1727347 - DNA, 15 bp, Homo sapiens
tttcattggtctata

SEQ ID NO: 1727348 - DNA, 15 bp, Homo sapiens
ttcattggtctatat

SEQ ID NO: 1727349 - DNA, 15 bp, Homo sapiens
tcattggtctatatg

SEQ ID NO: 1727350 - DNA, 15 bp, Homo sapiens
cattggtctatatgt

SEQ ID NO: 1727351 - DNA, 15 bp, Homo sapiens
attggtctatatgtc

SEQ ID NO: 1727352 - DNA, 15 bp, Homo sapiens
ttggtctatatgtca

SEQ ID NO: 1727353 - DNA, 15 bp, Homo sapiens
tggtctatatgtcaa

SEQ ID NO: 1727354 - DNA, 15 bp, Homo sapiens
ggtctatatgtcaaa

SEQ ID NO: 1727355 - DNA, 15 bp, Homo sapiens
gtctatatgtcaaaa

SEQ ID NO: 1727356 - DNA, 15 bp, Homo sapiens
tctatatgtcaaaac

SEQ ID NO: 1727357 - DNA, 15 bp, Homo sapiens
ctatatgtcaaaaca

SEQ ID NO: 1727358 - DNA, 15 bp, Homo sapiens
tatatgtcaaaacag

SEQ ID NO: 1727359 - DNA, 15 bp, Homo sapiens
atatgtcaaaacagc

SEQ ID NO: 1727360 - DNA, 15 bp, Homo sapiens
tatgtcaaaacagct

SEQ ID NO: 1727361 - DNA, 15 bp, Homo sapiens
atgtcaaaacagcta

SEQ ID NO: 1727362 - DNA, 15 bp, Homo sapiens
tgtcaaaacagctat

SEQ ID NO: 1727363 - DNA, 15 bp, Homo sapiens
gtcaaaacagctatt

SEQ ID NO: 1727364 - DNA, 15 bp, Homo sapiens
tcaaaacagctattt

SEQ ID NO: 1727365 - DNA, 15 bp, Homo sapiens
caaaacagctatttt

SEQ ID NO: 1727366 - DNA, 15 bp, Homo sapiens
aaaacagctattttg

SEQ ID NO: 1727367 - DNA, 15 bp, Homo sapiens
aaacagctattttga

SEQ ID NO: 1727368 - DNA, 15 bp, Homo sapiens
aacagctattttgaa

SEQ ID NO: 1727369 - DNA, 15 bp, Homo sapiens
acagctattttgaat

SEQ ID NO: 1727370 - DNA, 15 bp, Homo sapiens
cagctattttgaatt

SEQ ID NO: 1727371 - DNA, 15 bp, Homo sapiens
agctattttgaattc

SEQ ID NO: 1727372 - DNA, 15 bp, Homo sapiens
gctattttgaattct

SEQ ID NO: 1727373 - DNA, 15 bp, Homo sapiens
ctattttgaattctc

SEQ ID NO: 1727374 - DNA, 15 bp, Homo sapiens
tattttgaattctct

SEQ ID NO: 1727375 - DNA, 15 bp, Homo sapiens
attttgaattctctg

SEQ ID NO: 1727376 - DNA, 15 bp, Homo sapiens
ttttgaattctctgc

SEQ ID NO: 1727377 - DNA, 15 bp, Homo sapiens
tttgaattctctgcc

SEQ ID NO: 1727378 - DNA, 15 bp, Homo sapiens
ttgaattctctgcct

SEQ ID NO: 1727379 - DNA, 15 bp, Homo sapiens
tgaattctctgcctg

SEQ ID NO: 1727380 - DNA, 15 bp, Homo sapiens
gaattctctgcctga

SEQ ID NO: 1727381 - DNA, 15 bp, Homo sapiens
aattctctgcctgac

SEQ ID NO: 1727382 - DNA, 15 bp, Homo sapiens
attctctgcctgaca

SEQ ID NO: 1727383 - DNA, 15 bp, Homo sapiens
ttctctgcctgacag

SEQ ID NO: 1727384 - DNA, 15 bp, Homo sapiens
tctctgcctgacagg

SEQ ID NO: 1727385 - DNA, 15 bp, Homo sapiens
ctctgcctgacaggt

SEQ ID NO: 1727386 - DNA, 15 bp, Homo sapiens
tctgcctgacaggtc

SEQ ID NO: 1727387 - DNA, 15 bp, Homo sapiens
ctgcctgacaggtca

SEQ ID NO: 1727388 - DNA, 15 bp, Homo sapiens
tgcctgacaggtcac

SEQ ID NO: 1727389 - DNA, 15 bp, Homo sapiens
gcctgacaggtcaca

SEQ ID NO: 1727390 - DNA, 15 bp, Homo sapiens
cctgacaggtcacat

SEQ ID NO: 1727391 - DNA, 15 bp, Homo sapiens
ctgacaggtcacata

SEQ ID NO: 1727392 - DNA, 15 bp, Homo sapiens
tgacaggtcacatat

SEQ ID NO: 1727393 - DNA, 15 bp, Homo sapiens
gacaggtcacatatc

SEQ ID NO: 1727394 - DNA, 15 bp, Homo sapiens
acaggtcacatatct

SEQ ID NO: 1727395 - DNA, 15 bp, Homo sapiens
caggtcacatatctc

SEQ ID NO: 1727396 - DNA, 15 bp, Homo sapiens
aggtcacatatctct

SEQ ID NO: 1727397 - DNA, 15 bp, Homo sapiens
ggtcacatatctctt

SEQ ID NO: 1727398 - DNA, 15 bp, Homo sapiens
gtcacatatctcttt

SEQ ID NO: 1727399 - DNA, 15 bp, Homo sapiens
tcacatatctctttc

SEQ ID NO: 1727400 - DNA, 15 bp, Homo sapiens
cacatatctctttct

SEQ ID NO: 1727401 - DNA, 15 bp, Homo sapiens
acatatctctttctt

SEQ ID NO: 1727402 - DNA, 15 bp, Homo sapiens
catatctctttcttc

SEQ ID NO: 1727403 - DNA, 15 bp, Homo sapiens
atatctctttcttca

SEQ ID NO: 1727404 - DNA, 15 bp, Homo sapiens
tatctctttcttcag

SEQ ID NO: 1727405 - DNA, 15 bp, Homo sapiens
atctctttcttcagt

SEQ ID NO: 1727406 - DNA, 15 bp, Homo sapiens
tctctttcttcagta

SEQ ID NO: 1727407 - DNA, 15 bp, Homo sapiens
ctctttcttcagtat

SEQ ID NO: 1727408 - DNA, 15 bp, Homo sapiens
tctttcttcagtatt

SEQ ID NO: 1727409 - DNA, 15 bp, Homo sapiens
ctttcttcagtattg

SEQ ID NO: 1727410 - DNA, 15 bp, Homo sapiens
tttcttcagtattgt

SEQ ID NO: 1727411 - DNA, 15 bp, Homo sapiens
ttcttcagtattgtt

SEQ ID NO: 1727412 - DNA, 15 bp, Homo sapiens
tcttcagtattgttc

SEQ ID NO: 1727413 - DNA, 15 bp, Homo sapiens
cttcagtattgttcc

SEQ ID NO: 1727414 - DNA, 15 bp, Homo sapiens
ttcagtattgttccc

SEQ ID NO: 1727415 - DNA, 15 bp, Homo sapiens
tcagtattgttccca

SEQ ID NO: 1727416 - DNA, 15 bp, Homo sapiens
cagtattgttcccag

SEQ ID NO: 1727417 - DNA, 15 bp, Homo sapiens
agtattgttcccagg

SEQ ID NO: 1727418 - DNA, 15 bp, Homo sapiens
gtattgttcccaggt

SEQ ID NO: 1727419 - DNA, 15 bp, Homo sapiens
tattgttcccaggtg

SEQ ID NO: 1727420 - DNA, 15 bp, Homo sapiens
attgttcccaggtga

SEQ ID NO: 1727421 - DNA, 15 bp, Homo sapiens
ttgttcccaggtgac

SEQ ID NO: 1727422 - DNA, 15 bp, Homo sapiens
tgttcccaggtgact

SEQ ID NO: 1727423 - DNA, 15 bp, Homo sapiens
gttcccaggtgactt

SEQ ID NO: 1727424 - DNA, 15 bp, Homo sapiens
ttcccaggtgactta

SEQ ID NO: 1727425 - DNA, 15 bp, Homo sapiens
tcccaggtgacttat

SEQ ID NO: 1727426 - DNA, 15 bp, Homo sapiens
cccaggtgacttatt

SEQ ID NO: 1727427 - DNA, 15 bp, Homo sapiens
ccaggtgacttattt

SEQ ID NO: 1727428 - DNA, 15 bp, Homo sapiens
caggtgacttattta

SEQ ID NO: 1727429 - DNA, 15 bp, Homo sapiens
aggtgacttatttag

SEQ ID NO: 1727430 - DNA, 15 bp, Homo sapiens
ggtgacttatttagt

SEQ ID NO: 1727431 - DNA, 15 bp, Homo sapiens
gtgacttatttagtt

SEQ ID NO: 1727432 - DNA, 15 bp, Homo sapiens
tgacttatttagttc

SEQ ID NO: 1727433 - DNA, 15 bp, Homo sapiens
gacttatttagttca

SEQ ID NO: 1727434 - DNA, 15 bp, Homo sapiens
acttatttagttcat

SEQ ID NO: 1727435 - DNA, 15 bp, Homo sapiens
cttatttagttcatt

SEQ ID NO: 1727436 - DNA, 15 bp, Homo sapiens
ttatttagttcattt

SEQ ID NO: 1727437 - DNA, 15 bp, Homo sapiens
tatttagttcatttg

SEQ ID NO: 1727438 - DNA, 15 bp, Homo sapiens
atttagttcatttgg

SEQ ID NO: 1727439 - DNA, 15 bp, Homo sapiens
tttagttcatttggt

SEQ ID NO: 1727440 - DNA, 15 bp, Homo sapiens
ttagttcatttggtg

SEQ ID NO: 1727441 - DNA, 15 bp, Homo sapiens
tagttcatttggtga

SEQ ID NO: 1727442 - DNA, 15 bp, Homo sapiens
agttcatttggtgag

SEQ ID NO: 1727443 - DNA, 15 bp, Homo sapiens
gttcatttggtgagg

SEQ ID NO: 1727444 - DNA, 15 bp, Homo sapiens
ttcatttggtgaggt

SEQ ID NO: 1727445 - DNA, 15 bp, Homo sapiens
tcatttggtgaggtc

SEQ ID NO: 1727446 - DNA, 15 bp, Homo sapiens
catttggtgaggtca

SEQ ID NO: 1727447 - DNA, 15 bp, Homo sapiens
atttggtgaggtcat

SEQ ID NO: 1727448 - DNA, 15 bp, Homo sapiens
tttggtgaggtcatg

SEQ ID NO: 1727449 - DNA, 15 bp, Homo sapiens
ttggtgaggtcatgt

SEQ ID NO: 1727450 - DNA, 15 bp, Homo sapiens
tggtgaggtcatgtt

SEQ ID NO: 1727451 - DNA, 15 bp, Homo sapiens
ggtgaggtcatgttt

SEQ ID NO: 1727452 - DNA, 15 bp, Homo sapiens
gtgaggtcatgtttt

SEQ ID NO: 1727453 - DNA, 15 bp, Homo sapiens
tgaggtcatgttttc

SEQ ID NO: 1727454 - DNA, 15 bp, Homo sapiens
gaggtcatgttttcc

SEQ ID NO: 1727455 - DNA, 15 bp, Homo sapiens
aggtcatgttttcct

SEQ ID NO: 1727456 - DNA, 15 bp, Homo sapiens
ggtcatgttttcctg

SEQ ID NO: 1727457 - DNA, 15 bp, Homo sapiens
gtcatgttttcctgg

SEQ ID NO: 1727458 - DNA, 15 bp, Homo sapiens
tcatgttttcctgga

SEQ ID NO: 1727459 - DNA, 15 bp, Homo sapiens
catgttttcctggat

SEQ ID NO: 1727460 - DNA, 15 bp, Homo sapiens
atgttttcctggatg

SEQ ID NO: 1727461 - DNA, 15 bp, Homo sapiens
tgttttcctggatgg

SEQ ID NO: 1727462 - DNA, 15 bp, Homo sapiens
gttttcctggatggt

SEQ ID NO: 1727463 - DNA, 15 bp, Homo sapiens
ttttcctggatggta

SEQ ID NO: 1727464 - DNA, 15 bp, Homo sapiens
tttcctggatggtat

SEQ ID NO: 1727465 - DNA, 15 bp, Homo sapiens
ttcctggatggtatt

SEQ ID NO: 1727466 - DNA, 15 bp, Homo sapiens
tcctggatggtattg

SEQ ID NO: 1727467 - DNA, 15 bp, Homo sapiens
cctggatggtattga

SEQ ID NO: 1727468 - DNA, 15 bp, Homo sapiens
ctggatggtattgat

SEQ ID NO: 1727469 - DNA, 15 bp, Homo sapiens
tggatggtattgata

SEQ ID NO: 1727470 - DNA, 15 bp, Homo sapiens
ggatggtattgatac

SEQ ID NO: 1727471 - DNA, 15 bp, Homo sapiens
gatggtattgatact

SEQ ID NO: 1727472 - DNA, 15 bp, Homo sapiens
atggtattgatactt

SEQ ID NO: 1727473 - DNA, 15 bp, Homo sapiens
tggtattgatacttg

SEQ ID NO: 1727474 - DNA, 15 bp, Homo sapiens
ggtattgatacttgt

SEQ ID NO: 1727475 - DNA, 15 bp, Homo sapiens
gtattgatacttgta

SEQ ID NO: 1727476 - DNA, 15 bp, Homo sapiens
tattgatacttgtag

SEQ ID NO: 1727477 - DNA, 15 bp, Homo sapiens
attgatacttgtagg

SEQ ID NO: 1727478 - DNA, 15 bp, Homo sapiens
ttgatacttgtaggt

SEQ ID NO: 1727479 - DNA, 15 bp, Homo sapiens
tgatacttgtaggta

SEQ ID NO: 1727480 - DNA, 15 bp, Homo sapiens
gatacttgtaggtat

SEQ ID NO: 1727481 - DNA, 15 bp, Homo sapiens
atacttgtaggtatc

SEQ ID NO: 1727482 - DNA, 15 bp, Homo sapiens
tacttgtaggtatcg

SEQ ID NO: 1727483 - DNA, 15 bp, Homo sapiens
acttgtaggtatcgg

SEQ ID NO: 1727484 - DNA, 15 bp, Homo sapiens
cttgtaggtatcggt

SEQ ID NO: 1727485 - DNA, 15 bp, Homo sapiens
ttgtaggtatcggtc

SEQ ID NO: 1727486 - DNA, 15 bp, Homo sapiens
tgtaggtatcggtca

SEQ ID NO: 1727487 - DNA, 15 bp, Homo sapiens
gtaggtatcggtcag

SEQ ID NO: 1727488 - DNA, 15 bp, Homo sapiens
taggtatcggtcagt

SEQ ID NO: 1727489 - DNA, 15 bp, Homo sapiens
aggtatcggtcagta

SEQ ID NO: 1727490 - DNA, 15 bp, Homo sapiens
ggtatcggtcagtat

SEQ ID NO: 1727491 - DNA, 15 bp, Homo sapiens
gtatcggtcagtata

SEQ ID NO: 1727492 - DNA, 15 bp, Homo sapiens
tatcggtcagtatat

SEQ ID NO: 1727493 - DNA, 15 bp, Homo sapiens
atcggtcagtatatg

SEQ ID NO: 1727494 - DNA, 15 bp, Homo sapiens
tcggtcagtatatgg

SEQ ID NO: 1727495 - DNA, 15 bp, Homo sapiens
cggtcagtatatggg

SEQ ID NO: 1727496 - DNA, 15 bp, Homo sapiens
ggtcagtatatgggc

SEQ ID NO: 1727497 - DNA, 15 bp, Homo sapiens
gtcagtatatgggca

SEQ ID NO: 1727498 - DNA, 15 bp, Homo sapiens
tcagtatatgggcat

SEQ ID NO: 1727499 - DNA, 15 bp, Homo sapiens
cagtatatgggcatt

SEQ ID NO: 1727500 - DNA, 15 bp, Homo sapiens
agtatatgggcattg

SEQ ID NO: 1727501 - DNA, 15 bp, Homo sapiens
gtatatgggcattga

SEQ ID NO: 1727502 - DNA, 15 bp, Homo sapiens
tatatgggcattgaa

SEQ ID NO: 1727503 - DNA, 15 bp, Homo sapiens
atatgggcattgaag

SEQ ID NO: 1727504 - DNA, 15 bp, Homo sapiens
tatgggcattgaagt

SEQ ID NO: 1727505 - DNA, 15 bp, Homo sapiens
atgggcattgaagtg

SEQ ID NO: 1727506 - DNA, 15 bp, Homo sapiens
tgggcattgaagtgt

SEQ ID NO: 1727507 - DNA, 15 bp, Homo sapiens
gggcattgaagtgtt

SEQ ID NO: 1727508 - DNA, 15 bp, Homo sapiens
ggcattgaagtgtta

SEQ ID NO: 1727509 - DNA, 15 bp, Homo sapiens
gcattgaagtgttag

SEQ ID NO: 1727510 - DNA, 15 bp, Homo sapiens
cattgaagtgttagg

SEQ ID NO: 1727511 - DNA, 15 bp, Homo sapiens
attgaagtgttaggt

SEQ ID NO: 1727512 - DNA, 15 bp, Homo sapiens
ttgaagtgttaggta

SEQ ID NO: 1727513 - DNA, 15 bp, Homo sapiens
tgaagtgttaggtat

SEQ ID NO: 1727514 - DNA, 15 bp, Homo sapiens
gaagtgttaggtatt

SEQ ID NO: 1727515 - DNA, 15 bp, Homo sapiens
aagtgttaggtattt

SEQ ID NO: 1727516 - DNA, 15 bp, Homo sapiens
agtgttaggtattta

SEQ ID NO: 1727517 - DNA, 15 bp, Homo sapiens
gtgttaggtatttat

SEQ ID NO: 1727518 - DNA, 15 bp, Homo sapiens
tgttaggtatttatt

SEQ ID NO: 1727519 - DNA, 15 bp, Homo sapiens
gttaggtatttattt

SEQ ID NO: 1727520 - DNA, 15 bp, Homo sapiens
ttaggtatttatttt

SEQ ID NO: 1727521 - DNA, 15 bp, Homo sapiens
taggtatttattttg

SEQ ID NO: 1727522 - DNA, 15 bp, Homo sapiens
aggtatttattttgg

SEQ ID NO: 1727523 - DNA, 15 bp, Homo sapiens
ggtatttattttggt

SEQ ID NO: 1727524 - DNA, 15 bp, Homo sapiens
gtatttattttggtc

SEQ ID NO: 1727525 - DNA, 15 bp, Homo sapiens
tatttattttggtct

SEQ ID NO: 1727526 - DNA, 15 bp, Homo sapiens
atttattttggtctt

SEQ ID NO: 1727527 - DNA, 15 bp, Homo sapiens
tttattttggtcttt

SEQ ID NO: 1727528 - DNA, 15 bp, Homo sapiens
ttattttggtctttg

SEQ ID NO: 1727529 - DNA, 15 bp, Homo sapiens
tattttggtctttgc

SEQ ID NO: 1727530 - DNA, 15 bp, Homo sapiens
attttggtctttgca

SEQ ID NO: 1727531 - DNA, 15 bp, Homo sapiens
ttttggtctttgcag

SEQ ID NO: 1727532 - DNA, 15 bp, Homo sapiens
tttggtctttgcagc

SEQ ID NO: 1727533 - DNA, 15 bp, Homo sapiens
ttggtctttgcagcc

SEQ ID NO: 1727534 - DNA, 15 bp, Homo sapiens
tggtctttgcagccc

SEQ ID NO: 1727535 - DNA, 15 bp, Homo sapiens
ggtctttgcagcccg

SEQ ID NO: 1727536 - DNA, 15 bp, Homo sapiens
gtctttgcagcccga

SEQ ID NO: 1727537 - DNA, 15 bp, Homo sapiens
tctttgcagcccgag

SEQ ID NO: 1727538 - DNA, 15 bp, Homo sapiens
ctttgcagcccgagc

SEQ ID NO: 1727539 - DNA, 15 bp, Homo sapiens
tttgcagcccgagct

SEQ ID NO: 1727540 - DNA, 15 bp, Homo sapiens
ttgcagcccgagctt

SEQ ID NO: 1727541 - DNA, 15 bp, Homo sapiens
tgcagcccgagcttg

SEQ ID NO: 1727542 - DNA, 15 bp, Homo sapiens
gcagcccgagcttgt

SEQ ID NO: 1727543 - DNA, 15 bp, Homo sapiens
cagcccgagcttgtt

SEQ ID NO: 1727544 - DNA, 15 bp, Homo sapiens
agcccgagcttgttt

SEQ ID NO: 1727545 - DNA, 15 bp, Homo sapiens
gcccgagcttgtttg

SEQ ID NO: 1727546 - DNA, 15 bp, Homo sapiens
cccgagcttgtttgt

SEQ ID NO: 1727547 - DNA, 15 bp, Homo sapiens
ccgagcttgtttgta

SEQ ID NO: 1727548 - DNA, 15 bp, Homo sapiens
cgagcttgtttgtac

SEQ ID NO: 1727549 - DNA, 15 bp, Homo sapiens
gagcttgtttgtacc

SEQ ID NO: 1727550 - DNA, 15 bp, Homo sapiens
agcttgtttgtaccc

SEQ ID NO: 1727551 - DNA, 15 bp, Homo sapiens
gcttgtttgtaccca

SEQ ID NO: 1727552 - DNA, 15 bp, Homo sapiens
cttgtttgtacccat

SEQ ID NO: 1727553 - DNA, 15 bp, Homo sapiens
ttgtttgtacccatc

SEQ ID NO: 1727554 - DNA, 15 bp, Homo sapiens
tgtttgtacccatct

SEQ ID NO: 1727555 - DNA, 15 bp, Homo sapiens
gtttgtacccatctt

SEQ ID NO: 1727556 - DNA, 15 bp, Homo sapiens
tttgtacccatcttt

SEQ ID NO: 1727557 - DNA, 15 bp, Homo sapiens
ttgtacccatctttc

SEQ ID NO: 1727558 - DNA, 15 bp, Homo sapiens
tgtacccatctttct

SEQ ID NO: 1727559 - DNA, 15 bp, Homo sapiens
gtacccatctttctt

SEQ ID NO: 1727560 - DNA, 15 bp, Homo sapiens
tacccatctttcttg

SEQ ID NO: 1727561 - DNA, 15 bp, Homo sapiens
acccatctttcttga

SEQ ID NO: 1727562 - DNA, 15 bp, Homo sapiens
cccatctttcttgag

SEQ ID NO: 1727563 - DNA, 15 bp, Homo sapiens
ccatctttcttgaga

SEQ ID NO: 1727564 - DNA, 15 bp, Homo sapiens
catctttcttgagaa

SEQ ID NO: 1727565 - DNA, 15 bp, Homo sapiens
atctttcttgagaag

SEQ ID NO: 1727566 - DNA, 15 bp, Homo sapiens
tctttcttgagaagg

SEQ ID NO: 1727567 - DNA, 15 bp, Homo sapiens
ctttcttgagaaggc

SEQ ID NO: 1727568 - DNA, 15 bp, Homo sapiens
tttcttgagaaggct

SEQ ID NO: 1727569 - DNA, 15 bp, Homo sapiens
ttcttgagaaggctt

SEQ ID NO: 1727570 - DNA, 15 bp, Homo sapiens
tcttgagaaggcttt

SEQ ID NO: 1727571 - DNA, 15 bp, Homo sapiens
cttgagaaggctttt

SEQ ID NO: 1727572 - DNA, 15 bp, Homo sapiens
ttgagaaggcttttc

SEQ ID NO: 1727573 - DNA, 15 bp, Homo sapiens
tgagaaggcttttct

SEQ ID NO: 1727574 - DNA, 15 bp, Homo sapiens
gagaaggcttttcta

SEQ ID NO: 1727575 - DNA, 15 bp, Homo sapiens
agaaggcttttctag

SEQ ID NO: 1727576 - DNA, 15 bp, Homo sapiens
gaaggcttttctagg

SEQ ID NO: 1727577 - DNA, 15 bp, Homo sapiens
aaggcttttctaggt

SEQ ID NO: 1727578 - DNA, 15 bp, Homo sapiens
aggcttttctaggtg

SEQ ID NO: 1727579 - DNA, 15 bp, Homo sapiens
ggcttttctaggtgt

SEQ ID NO: 1727580 - DNA, 15 bp, Homo sapiens
gcttttctaggtgtt

SEQ ID NO: 1727581 - DNA, 15 bp, Homo sapiens
cttttctaggtgttt

SEQ ID NO: 1727582 - DNA, 15 bp, Homo sapiens
ttttctaggtgtttg

SEQ ID NO: 1727583 - DNA, 15 bp, Homo sapiens
tttctaggtgtttga

SEQ ID NO: 1727584 - DNA, 15 bp, Homo sapiens
ttctaggtgtttgaa

SEQ ID NO: 1727585 - DNA, 15 bp, Homo sapiens
tctaggtgtttgaaa

SEQ ID NO: 1727586 - DNA, 15 bp, Homo sapiens
ctaggtgtttgaaag

SEQ ID NO: 1727587 - DNA, 15 bp, Homo sapiens
taggtgtttgaaagt

SEQ ID NO: 1727588 - DNA, 15 bp, Homo sapiens
aggtgtttgaaagta

SEQ ID NO: 1727589 - DNA, 15 bp, Homo sapiens
ggtgtttgaaagtac

SEQ ID NO: 1727590 - DNA, 15 bp, Homo sapiens
gtgtttgaaagtact

SEQ ID NO: 1727591 - DNA, 15 bp, Homo sapiens
tgtttgaaagtactt

SEQ ID NO: 1727592 - DNA, 15 bp, Homo sapiens
gtttgaaagtacttg

SEQ ID NO: 1727593 - DNA, 15 bp, Homo sapiens
tttgaaagtacttgg

SEQ ID NO: 1727594 - DNA, 15 bp, Homo sapiens
ttgaaagtacttggg

SEQ ID NO: 1727595 - DNA, 15 bp, Homo sapiens
tgaaagtacttgggt

SEQ ID NO: 1727596 - DNA, 15 bp, Homo sapiens
gaaagtacttgggta

SEQ ID NO: 1727597 - DNA, 15 bp, Homo sapiens
aaagtacttgggtat

SEQ ID NO: 1727598 - DNA, 15 bp, Homo sapiens
aagtacttgggtatt

SEQ ID NO: 1727599 - DNA, 15 bp, Homo sapiens
agtacttgggtattt

SEQ ID NO: 1727600 - DNA, 15 bp, Homo sapiens
gtacttgggtatttt

SEQ ID NO: 1727601 - DNA, 15 bp, Homo sapiens
tacttgggtattttg

SEQ ID NO: 1727602 - DNA, 15 bp, Homo sapiens
acttgggtattttga

SEQ ID NO: 1727603 - DNA, 15 bp, Homo sapiens
cttgggtattttgat

SEQ ID NO: 1727604 - DNA, 15 bp, Homo sapiens
ttgggtattttgatc

SEQ ID NO: 1727605 - DNA, 15 bp, Homo sapiens
tgggtattttgatct

SEQ ID NO: 1727606 - DNA, 15 bp, Homo sapiens
gggtattttgatcta

SEQ ID NO: 1727607 - DNA, 15 bp, Homo sapiens
ggtattttgatctaa

SEQ ID NO: 1727608 - DNA, 15 bp, Homo sapiens
gtattttgatctaag

SEQ ID NO: 1727609 - DNA, 15 bp, Homo sapiens
tattttgatctaagc

SEQ ID NO: 1727610 - DNA, 15 bp, Homo sapiens
attttgatctaagct

SEQ ID NO: 1727611 - DNA, 15 bp, Homo sapiens
ttttgatctaagctg

SEQ ID NO: 1727612 - DNA, 15 bp, Homo sapiens
tttgatctaagctgt

SEQ ID NO: 1727613 - DNA, 15 bp, Homo sapiens
ttgatctaagctgta

SEQ ID NO: 1727614 - DNA, 15 bp, Homo sapiens
tgatctaagctgtat

SEQ ID NO: 1727615 - DNA, 15 bp, Homo sapiens
gatctaagctgtatc

SEQ ID NO: 1727616 - DNA, 15 bp, Homo sapiens
atctaagctgtatct

SEQ ID NO: 1727617 - DNA, 15 bp, Homo sapiens
tctaagctgtatctg

SEQ ID NO: 1727618 - DNA, 15 bp, Homo sapiens
ctaagctgtatctgc

SEQ ID NO: 1727619 - DNA, 15 bp, Homo sapiens
taagctgtatctgca

SEQ ID NO: 1727620 - DNA, 15 bp, Homo sapiens
aagctgtatctgcat

SEQ ID NO: 1727621 - DNA, 15 bp, Homo sapiens
agctgtatctgcatt

SEQ ID NO: 1727622 - DNA, 15 bp, Homo sapiens
gctgtatctgcatta

SEQ ID NO: 1727623 - DNA, 15 bp, Homo sapiens
ctgtatctgcattag

SEQ ID NO: 1727624 - DNA, 15 bp, Homo sapiens
tgtatctgcattagg

SEQ ID NO: 1727625 - DNA, 15 bp, Homo sapiens
gtatctgcattaggg

SEQ ID NO: 1727626 - DNA, 15 bp, Homo sapiens
tatctgcattaggga

SEQ ID NO: 1727627 - DNA, 15 bp, Homo sapiens
atctgcattagggag

SEQ ID NO: 1727628 - DNA, 15 bp, Homo sapiens
tctgcattagggagc

SEQ ID NO: 1727629 - DNA, 15 bp, Homo sapiens
ctgcattagggagca

SEQ ID NO: 1727630 - DNA, 15 bp, Homo sapiens
tgcattagggagcac

SEQ ID NO: 1727631 - DNA, 15 bp, Homo sapiens
gcattagggagcacc

SEQ ID NO: 1727632 - DNA, 15 bp, Homo sapiens
cattagggagcaccc

SEQ ID NO: 1727633 - DNA, 15 bp, Homo sapiens
attagggagcaccct

SEQ ID NO: 1727634 - DNA, 15 bp, Homo sapiens
ttagggagcacccta

SEQ ID NO: 1727635 - DNA, 15 bp, Homo sapiens
tagggagcaccctaa

SEQ ID NO: 1727636 - DNA, 15 bp, Homo sapiens
agggagcaccctaag

SEQ ID NO: 1727637 - DNA, 15 bp, Homo sapiens
gggagcaccctaagc

SEQ ID NO: 1727638 - DNA, 15 bp, Homo sapiens
ggagcaccctaagcc

SEQ ID NO: 1727639 - DNA, 15 bp, Homo sapiens
gagcaccctaagccc

SEQ ID NO: 1727640 - DNA, 15 bp, Homo sapiens
agcaccctaagccca

SEQ ID NO: 1727641 - DNA, 15 bp, Homo sapiens
gcaccctaagcccag

SEQ ID NO: 1727642 - DNA, 15 bp, Homo sapiens
caccctaagcccagt

SEQ ID NO: 1727643 - DNA, 15 bp, Homo sapiens
accctaagcccagta

SEQ ID NO: 1727644 - DNA, 15 bp, Homo sapiens
ccctaagcccagtaa

SEQ ID NO: 1727645 - DNA, 15 bp, Homo sapiens
cctaagcccagtaac

SEQ ID NO: 1727646 - DNA, 15 bp, Homo sapiens
ctaagcccagtaaca

SEQ ID NO: 1727647 - DNA, 15 bp, Homo sapiens
taagcccagtaacat

SEQ ID NO: 1727648 - DNA, 15 bp, Homo sapiens
aagcccagtaacatt

SEQ ID NO: 1727649 - DNA, 15 bp, Homo sapiens
agcccagtaacattg

SEQ ID NO: 1727650 - DNA, 15 bp, Homo sapiens
gcccagtaacattgt

SEQ ID NO: 1727651 - DNA, 15 bp, Homo sapiens
cccagtaacattgtg

SEQ ID NO: 1727652 - DNA, 15 bp, Homo sapiens
ccagtaacattgtgg

SEQ ID NO: 1727653 - DNA, 15 bp, Homo sapiens
cagtaacattgtggt

SEQ ID NO: 1727654 - DNA, 15 bp, Homo sapiens
agtaacattgtggtt

SEQ ID NO: 1727655 - DNA, 15 bp, Homo sapiens
gtaacattgtggttt

SEQ ID NO: 1727656 - DNA, 15 bp, Homo sapiens
taacattgtggtttc

SEQ ID NO: 1727657 - DNA, 15 bp, Homo sapiens
aacattgtggtttct

SEQ ID NO: 1727658 - DNA, 15 bp, Homo sapiens
acattgtggtttctt

SEQ ID NO: 1727659 - DNA, 15 bp, Homo sapiens
cattgtggtttctta

SEQ ID NO: 1727660 - DNA, 15 bp, Homo sapiens
attgtggtttcttac

SEQ ID NO: 1727661 - DNA, 15 bp, Homo sapiens
ttgtggtttcttaca

SEQ ID NO: 1727662 - DNA, 15 bp, Homo sapiens
tgtggtttcttacag

SEQ ID NO: 1727663 - DNA, 15 bp, Homo sapiens
gtggtttcttacaga

SEQ ID NO: 1727664 - DNA, 15 bp, Homo sapiens
tggtttcttacagac

SEQ ID NO: 1727665 - DNA, 15 bp, Homo sapiens
ggtttcttacagact

SEQ ID NO: 1727666 - DNA, 15 bp, Homo sapiens
gtttcttacagactt

SEQ ID NO: 1727667 - DNA, 15 bp, Homo sapiens
tttcttacagactta

SEQ ID NO: 1727668 - DNA, 15 bp, Homo sapiens
ttcttacagacttat

SEQ ID NO: 1727669 - DNA, 15 bp, Homo sapiens
tcttacagacttata

SEQ ID NO: 1727670 - DNA, 15 bp, Homo sapiens
cttacagacttatag

SEQ ID NO: 1727671 - DNA, 15 bp, Homo sapiens
ttacagacttataga

SEQ ID NO: 1727672 - DNA, 15 bp, Homo sapiens
tacagacttatagag

SEQ ID NO: 1727673 - DNA, 15 bp, Homo sapiens
acagacttatagagg

SEQ ID NO: 1727674 - DNA, 15 bp, Homo sapiens
cagacttatagaggt

SEQ ID NO: 1727675 - DNA, 15 bp, Homo sapiens
agacttatagaggta

SEQ ID NO: 1727676 - DNA, 15 bp, Homo sapiens
gacttatagaggtac

SEQ ID NO: 1727677 - DNA, 15 bp, Homo sapiens
acttatagaggtact

SEQ ID NO: 1727678 - DNA, 15 bp, Homo sapiens
cttatagaggtactg

SEQ ID NO: 1727679 - DNA, 15 bp, Homo sapiens
ttatagaggtactgc

SEQ ID NO: 1727680 - DNA, 15 bp, Homo sapiens
tatagaggtactgcc

SEQ ID NO: 1727681 - DNA, 15 bp, Homo sapiens
atagaggtactgcct

SEQ ID NO: 1727682 - DNA, 15 bp, Homo sapiens
tagaggtactgcctt

SEQ ID NO: 1727683 - DNA, 15 bp, Homo sapiens
agaggtactgccttg

SEQ ID NO: 1727684 - DNA, 15 bp, Homo sapiens
gaggtactgccttga

SEQ ID NO: 1727685 - DNA, 15 bp, Homo sapiens
aggtactgccttgat

SEQ ID NO: 1727686 - DNA, 15 bp, Homo sapiens
ggtactgccttgatg

SEQ ID NO: 1727687 - DNA, 15 bp, Homo sapiens
gtactgccttgatgg

SEQ ID NO: 1727688 - DNA, 15 bp, Homo sapiens
tactgccttgatggt

SEQ ID NO: 1727689 - DNA, 15 bp, Homo sapiens
actgccttgatggtc

SEQ ID NO: 1727690 - DNA, 15 bp, Homo sapiens
ctgccttgatggtct

SEQ ID NO: 1727691 - DNA, 15 bp, Homo sapiens
tgccttgatggtctt

SEQ ID NO: 1727692 - DNA, 15 bp, Homo sapiens
gccttgatggtcttg

SEQ ID NO: 1727693 - DNA, 15 bp, Homo sapiens
ccttgatggtcttgg

SEQ ID NO: 1727694 - DNA, 15 bp, Homo sapiens
cttgatggtcttgga

SEQ ID NO: 1727695 - DNA, 15 bp, Homo sapiens
ttgatggtcttggat

SEQ ID NO: 1727696 - DNA, 15 bp, Homo sapiens
tgatggtcttggata

SEQ ID NO: 1727697 - DNA, 15 bp, Homo sapiens
gatggtcttggataa

SEQ ID NO: 1727698 - DNA, 15 bp, Homo sapiens
atggtcttggataag

SEQ ID NO: 1727699 - DNA, 15 bp, Homo sapiens
tggtcttggataaga

SEQ ID NO: 1727700 - DNA, 15 bp, Homo sapiens
ggtcttggataagat

SEQ ID NO: 1727701 - DNA, 15 bp, Homo sapiens
gtcttggataagatc

SEQ ID NO: 1727702 - DNA, 15 bp, Homo sapiens
tcttggataagatcc

SEQ ID NO: 1727703 - DNA, 15 bp, Homo sapiens
cttggataagatcca

SEQ ID NO: 1727704 - DNA, 15 bp, Homo sapiens
ttggataagatccag

SEQ ID NO: 1727705 - DNA, 15 bp, Homo sapiens
tggataagatccaga

SEQ ID NO: 1727706 - DNA, 15 bp, Homo sapiens
ggataagatccagaa

SEQ ID NO: 1727707 - DNA, 15 bp, Homo sapiens
gataagatccagaaa

SEQ ID NO: 1727708 - DNA, 15 bp, Homo sapiens
ataagatccagaaaa

SEQ ID NO: 1727709 - DNA, 15 bp, Homo sapiens
taagatccagaaaat

SEQ ID NO: 1727710 - DNA, 15 bp, Homo sapiens
aagatccagaaaatt

SEQ ID NO: 1727711 - DNA, 15 bp, Homo sapiens
agatccagaaaattt

SEQ ID NO: 1727712 - DNA, 15 bp, Homo sapiens
gatccagaaaatttc

SEQ ID NO: 1727713 - DNA, 15 bp, Homo sapiens
atccagaaaatttct

SEQ ID NO: 1727714 - DNA, 15 bp, Homo sapiens
tccagaaaatttctt

SEQ ID NO: 1727715 - DNA, 15 bp, Homo sapiens
ccagaaaatttctta

SEQ ID NO: 1727716 - DNA, 15 bp, Homo sapiens
cagaaaatttcttac

SEQ ID NO: 1727717 - DNA, 15 bp, Homo sapiens
agaaaatttcttacc

SEQ ID NO: 1727718 - DNA, 15 bp, Homo sapiens
gaaaatttcttacca

SEQ ID NO: 1727719 - DNA, 15 bp, Homo sapiens
aaaatttcttaccag

SEQ ID NO: 1727720 - DNA, 15 bp, Homo sapiens
aaatttcttaccagg

SEQ ID NO: 1727721 - DNA, 15 bp, Homo sapiens
aatttcttaccaggc

SEQ ID NO: 1727722 - DNA, 15 bp, Homo sapiens
atttcttaccaggca

SEQ ID NO: 1727723 - DNA, 15 bp, Homo sapiens
tttcttaccaggcag

SEQ ID NO: 1727724 - DNA, 15 bp, Homo sapiens
ttcttaccaggcaga

SEQ ID NO: 1727725 - DNA, 15 bp, Homo sapiens
tcttaccaggcagag

SEQ ID NO: 1727726 - DNA, 15 bp, Homo sapiens
cttaccaggcagaga

SEQ ID NO: 1727727 - DNA, 15 bp, Homo sapiens
ttaccaggcagagac

SEQ ID NO: 1727728 - DNA, 15 bp, Homo sapiens
taccaggcagagact

SEQ ID NO: 1727729 - DNA, 15 bp, Homo sapiens
accaggcagagactc

SEQ ID NO: 1727730 - DNA, 15 bp, Homo sapiens
ccaggcagagactct

SEQ ID NO: 1727731 - DNA, 15 bp, Homo sapiens
caggcagagactctt

SEQ ID NO: 1727732 - DNA, 15 bp, Homo sapiens
aggcagagactcttg

SEQ ID NO: 1727733 - DNA, 15 bp, Homo sapiens
ggcagagactcttgt

SEQ ID NO: 1727734 - DNA, 15 bp, Homo sapiens
gcagagactcttgtt

SEQ ID NO: 1727735 - DNA, 15 bp, Homo sapiens
cagagactcttgttg

SEQ ID NO: 1727736 - DNA, 15 bp, Homo sapiens
agagactcttgttgt

SEQ ID NO: 1727737 - DNA, 15 bp, Homo sapiens
gagactcttgttgtc

SEQ ID NO: 1727738 - DNA, 15 bp, Homo sapiens
agactcttgttgtct

SEQ ID NO: 1727739 - DNA, 15 bp, Homo sapiens
gactcttgttgtctt

SEQ ID NO: 1727740 - DNA, 15 bp, Homo sapiens
actcttgttgtcttc

SEQ ID NO: 1727741 - DNA, 15 bp, Homo sapiens
ctcttgttgtcttct

SEQ ID NO: 1727742 - DNA, 15 bp, Homo sapiens
tcttgttgtcttctt

SEQ ID NO: 1727743 - DNA, 15 bp, Homo sapiens
cttgttgtcttcttt

SEQ ID NO: 1727744 - DNA, 15 bp, Homo sapiens
ttgttgtcttctttt

SEQ ID NO: 1727745 - DNA, 15 bp, Homo sapiens
tgttgtcttctttta

SEQ ID NO: 1727746 - DNA, 15 bp, Homo sapiens
gttgtcttcttttac

SEQ ID NO: 1727747 - DNA, 15 bp, Homo sapiens
ttgtcttcttttact

SEQ ID NO: 1727748 - DNA, 15 bp, Homo sapiens
tgtcttcttttactt

SEQ ID NO: 1727749 - DNA, 15 bp, Homo sapiens
gtcttcttttacttt

SEQ ID NO: 1727750 - DNA, 15 bp, Homo sapiens
tcttcttttactttc

SEQ ID NO: 1727751 - DNA, 15 bp, Homo sapiens
cttcttttactttct

SEQ ID NO: 1727752 - DNA, 15 bp, Homo sapiens
ttcttttactttctc

SEQ ID NO: 1727753 - DNA, 15 bp, Homo sapiens
tcttttactttctcc

SEQ ID NO: 1727754 - DNA, 15 bp, Homo sapiens
cttttactttctccc

SEQ ID NO: 1727755 - DNA, 15 bp, Homo sapiens
ttttactttctccca

SEQ ID NO: 1727756 - DNA, 15 bp, Homo sapiens
tttactttctcccaa

SEQ ID NO: 1727757 - DNA, 15 bp, Homo sapiens
ttactttctcccaaa

SEQ ID NO: 1727758 - DNA, 15 bp, Homo sapiens
tactttctcccaaac

SEQ ID NO: 1727759 - DNA, 15 bp, Homo sapiens
actttctcccaaaca

SEQ ID NO: 1727760 - DNA, 15 bp, Homo sapiens
ctttctcccaaacaa

SEQ ID NO: 1727761 - DNA, 15 bp, Homo sapiens
tttctcccaaacaaa

SEQ ID NO: 1727762 - DNA, 15 bp, Homo sapiens
ttctcccaaacaaac

SEQ ID NO: 1727763 - DNA, 15 bp, Homo sapiens
tctcccaaacaaaca

SEQ ID NO: 1727764 - DNA, 15 bp, Homo sapiens
ctcccaaacaaacaa

SEQ ID NO: 1727765 - DNA, 15 bp, Homo sapiens
tcccaaacaaacaaa

SEQ ID NO: 1727766 - DNA, 15 bp, Homo sapiens
cccaaacaaacaaat

SEQ ID NO: 1727767 - DNA, 15 bp, Homo sapiens
ccaaacaaacaaatt

SEQ ID NO: 1727768 - DNA, 15 bp, Homo sapiens
caaacaaacaaattc

SEQ ID NO: 1727769 - DNA, 15 bp, Homo sapiens
aaacaaacaaattct

SEQ ID NO: 1727770 - DNA, 15 bp, Homo sapiens
aacaaacaaattctc

SEQ ID NO: 1727771 - DNA, 15 bp, Homo sapiens
acaaacaaattctct

SEQ ID NO: 1727772 - DNA, 15 bp, Homo sapiens
caaacaaattctctc

SEQ ID NO: 1727773 - DNA, 15 bp, Homo sapiens
aaacaaattctctct

SEQ ID NO: 1727774 - DNA, 15 bp, Homo sapiens
aacaaattctctctc

SEQ ID NO: 1727775 - DNA, 15 bp, Homo sapiens
acaaattctctctct

SEQ ID NO: 1727776 - DNA, 15 bp, Homo sapiens
caaattctctctctc

SEQ ID NO: 1727777 - DNA, 15 bp, Homo sapiens
aaattctctctctct

SEQ ID NO: 1727778 - DNA, 15 bp, Homo sapiens
aattctctctctctc

SEQ ID NO: 1727779 - DNA, 15 bp, Homo sapiens
attctctctctctct

SEQ ID NO: 1727780 - DNA, 15 bp, Homo sapiens
ctctctccctctctc

SEQ ID NO: 1727781 - DNA, 15 bp, Homo sapiens
tctctccctctctct

SEQ ID NO: 1727782 - DNA, 15 bp, Homo sapiens
ctctccctctctctt

SEQ ID NO: 1727783 - DNA, 15 bp, Homo sapiens
tctccctctctcttt

SEQ ID NO: 1727784 - DNA, 15 bp, Homo sapiens
ctccctctctctttt

SEQ ID NO: 1727785 - DNA, 15 bp, Homo sapiens
tccctctctcttttt

SEQ ID NO: 1727786 - DNA, 15 bp, Homo sapiens
ccctctctctttttc

SEQ ID NO: 1727787 - DNA, 15 bp, Homo sapiens
cctctctctttttct

SEQ ID NO: 1727788 - DNA, 15 bp, Homo sapiens
ctctctctttttctg

SEQ ID NO: 1727789 - DNA, 15 bp, Homo sapiens
tctctctttttctgt

SEQ ID NO: 1727790 - DNA, 15 bp, Homo sapiens
ctctctttttctgtg

SEQ ID NO: 1727791 - DNA, 15 bp, Homo sapiens
tctctttttctgtgc

SEQ ID NO: 1727792 - DNA, 15 bp, Homo sapiens
ctctttttctgtgct

SEQ ID NO: 1727793 - DNA, 15 bp, Homo sapiens
tctttttctgtgctg

SEQ ID NO: 1727794 - DNA, 15 bp, Homo sapiens
ctttttctgtgctgg

SEQ ID NO: 1727795 - DNA, 15 bp, Homo sapiens
tttttctgtgctgga

SEQ ID NO: 1727796 - DNA, 15 bp, Homo sapiens
ttttctgtgctggac

SEQ ID NO: 1727797 - DNA, 15 bp, Homo sapiens
tttctgtgctggaca

SEQ ID NO: 1727798 - DNA, 15 bp, Homo sapiens
ttctgtgctggacat

SEQ ID NO: 1727799 - DNA, 15 bp, Homo sapiens
tctgtgctggacatc

SEQ ID NO: 1727800 - DNA, 15 bp, Homo sapiens
ctgtgctggacatcc

SEQ ID NO: 1727801 - DNA, 15 bp, Homo sapiens
tgtgctggacatcct

SEQ ID NO: 1727802 - DNA, 15 bp, Homo sapiens
gtgctggacatcctg

SEQ ID NO: 1727803 - DNA, 15 bp, Homo sapiens
tgctggacatcctgg

SEQ ID NO: 1727804 - DNA, 15 bp, Homo sapiens
gctggacatcctgga

SEQ ID NO: 1727805 - DNA, 15 bp, Homo sapiens
ctggacatcctggag

SEQ ID NO: 1727806 - DNA, 15 bp, Homo sapiens
tggacatcctggagc

SEQ ID NO: 1727807 - DNA, 15 bp, Homo sapiens
ggacatcctggagct

SEQ ID NO: 1727808 - DNA, 15 bp, Homo sapiens
gacatcctggagctt

SEQ ID NO: 1727809 - DNA, 15 bp, Homo sapiens
acatcctggagcttg

SEQ ID NO: 1727810 - DNA, 15 bp, Homo sapiens
catcctggagcttgg

SEQ ID NO: 1727811 - DNA, 15 bp, Homo sapiens
atcctggagcttggg

SEQ ID NO: 1727812 - DNA, 15 bp, Homo sapiens
tcctggagcttgggg

SEQ ID NO: 1727813 - DNA, 15 bp, Homo sapiens
cctggagcttggggt

SEQ ID NO: 1727814 - DNA, 15 bp, Homo sapiens
ctggagcttggggtg

SEQ ID NO: 1727815 - DNA, 15 bp, Homo sapiens
tggagcttggggtgg

SEQ ID NO: 1727816 - DNA, 15 bp, Homo sapiens
ggagcttggggtggg

SEQ ID NO: 1727817 - DNA, 15 bp, Homo sapiens
gagcttggggtggga

SEQ ID NO: 1727818 - DNA, 15 bp, Homo sapiens
agcttggggtgggat

SEQ ID NO: 1727819 - DNA, 15 bp, Homo sapiens
gcttggggtgggatg

SEQ ID NO: 1727820 - DNA, 15 bp, Homo sapiens
cttggggtgggatga

SEQ ID NO: 1727821 - DNA, 15 bp, Homo sapiens
ttggggtgggatgac

SEQ ID NO: 1727822 - DNA, 15 bp, Homo sapiens
tggggtgggatgaca

SEQ ID NO: 1727823 - DNA, 15 bp, Homo sapiens
ggggtgggatgacac

SEQ ID NO: 1727824 - DNA, 15 bp, Homo sapiens
gggtgggatgacaca

SEQ ID NO: 1727825 - DNA, 15 bp, Homo sapiens
ggtgggatgacacaa

SEQ ID NO: 1727826 - DNA, 15 bp, Homo sapiens
gtgggatgacacaag

SEQ ID NO: 1727827 - DNA, 15 bp, Homo sapiens
tgggatgacacaagt

SEQ ID NO: 1727828 - DNA, 15 bp, Homo sapiens
gggatgacacaagtt

SEQ ID NO: 1727829 - DNA, 15 bp, Homo sapiens
ggatgacacaagttc

SEQ ID NO: 1727830 - DNA, 15 bp, Homo sapiens
gatgacacaagttcc

SEQ ID NO: 1727831 - DNA, 15 bp, Homo sapiens
atgacacaagttcct

SEQ ID NO: 1727832 - DNA, 15 bp, Homo sapiens
tgacacaagttcctc

SEQ ID NO: 1727833 - DNA, 15 bp, Homo sapiens
gacacaagttcctct

SEQ ID NO: 1727834 - DNA, 15 bp, Homo sapiens
acacaagttcctctg

SEQ ID NO: 1727835 - DNA, 15 bp, Homo sapiens
cacaagttcctctgt

SEQ ID NO: 1727836 - DNA, 15 bp, Homo sapiens
acaagttcctctgtg

SEQ ID NO: 1727837 - DNA, 15 bp, Homo sapiens
caagttcctctgtgg

SEQ ID NO: 1727838 - DNA, 15 bp, Homo sapiens
aagttcctctgtggc

SEQ ID NO: 1727839 - DNA, 15 bp, Homo sapiens
agttcctctgtggct

SEQ ID NO: 1727840 - DNA, 15 bp, Homo sapiens
gttcctctgtggcta

SEQ ID NO: 1727841 - DNA, 15 bp, Homo sapiens
ttcctctgtggctac

SEQ ID NO: 1727842 - DNA, 15 bp, Homo sapiens
tcctctgtggctaca

SEQ ID NO: 1727843 - DNA, 15 bp, Homo sapiens
cctctgtggctacac

SEQ ID NO: 1727844 - DNA, 15 bp, Homo sapiens
ctctgtggctacacc

SEQ ID NO: 1727845 - DNA, 15 bp, Homo sapiens
tctgtggctacacca

SEQ ID NO: 1727846 - DNA, 15 bp, Homo sapiens
ctgtggctacaccac

SEQ ID NO: 1727847 - DNA, 15 bp, Homo sapiens
tgtggctacaccact

SEQ ID NO: 1727848 - DNA, 15 bp, Homo sapiens
gtggctacaccactg

SEQ ID NO: 1727849 - DNA, 15 bp, Homo sapiens
tggctacaccactgg

SEQ ID NO: 1727850 - DNA, 15 bp, Homo sapiens
ggctacaccactggg

SEQ ID NO: 1727851 - DNA, 15 bp, Homo sapiens
gctacaccactgggg

SEQ ID NO: 1727852 - DNA, 15 bp, Homo sapiens
ctacaccactggggc

SEQ ID NO: 1727853 - DNA, 15 bp, Homo sapiens
tacaccactggggct

SEQ ID NO: 1727854 - DNA, 15 bp, Homo sapiens
acaccactggggctg

SEQ ID NO: 1727855 - DNA, 15 bp, Homo sapiens
caccactggggctgc

SEQ ID NO: 1727856 - DNA, 15 bp, Homo sapiens
accactggggctgca

SEQ ID NO: 1727857 - DNA, 15 bp, Homo sapiens
ccactggggctgcac

SEQ ID NO: 1727858 - DNA, 15 bp, Homo sapiens
cactggggctgcact

SEQ ID NO: 1727859 - DNA, 15 bp, Homo sapiens
actggggctgcacta

SEQ ID NO: 1727860 - DNA, 15 bp, Homo sapiens
ctggggctgcactag

SEQ ID NO: 1727861 - DNA, 15 bp, Homo sapiens
tggggctgcactagg

SEQ ID NO: 1727862 - DNA, 15 bp, Homo sapiens
ggggctgcactagga

SEQ ID NO: 1727863 - DNA, 15 bp, Homo sapiens
gggctgcactaggac

SEQ ID NO: 1727864 - DNA, 15 bp, Homo sapiens
ggctgcactaggaca

SEQ ID NO: 1727865 - DNA, 15 bp, Homo sapiens
gctgcactaggacag

SEQ ID NO: 1727866 - DNA, 15 bp, Homo sapiens
ctgcactaggacaga

SEQ ID NO: 1727867 - DNA, 15 bp, Homo sapiens
tgcactaggacagac

SEQ ID NO: 1727868 - DNA, 15 bp, Homo sapiens
gcactaggacagacc

SEQ ID NO: 1727869 - DNA, 15 bp, Homo sapiens
cactaggacagacct

SEQ ID NO: 1727870 - DNA, 15 bp, Homo sapiens
actaggacagacctg

SEQ ID NO: 1727871 - DNA, 15 bp, Homo sapiens
ctaggacagacctga

SEQ ID NO: 1727872 - DNA, 15 bp, Homo sapiens
taggacagacctgaa

SEQ ID NO: 1727873 - DNA, 15 bp, Homo sapiens
aggacagacctgaaa

SEQ ID NO: 1727874 - DNA, 15 bp, Homo sapiens
ggacagacctgaaat

SEQ ID NO: 1727875 - DNA, 15 bp, Homo sapiens
gacagacctgaaatc

SEQ ID NO: 1727876 - DNA, 15 bp, Homo sapiens
acagacctgaaatca

SEQ ID NO: 1727877 - DNA, 15 bp, Homo sapiens
cagacctgaaatcag

SEQ ID NO: 1727878 - DNA, 15 bp, Homo sapiens
agacctgaaatcagc

SEQ ID NO: 1727879 - DNA, 15 bp, Homo sapiens
gacctgaaatcagca

SEQ ID NO: 1727880 - DNA, 15 bp, Homo sapiens
acctgaaatcagcac

SEQ ID NO: 1727881 - DNA, 15 bp, Homo sapiens
cctgaaatcagcaca

SEQ ID NO: 1727882 - DNA, 15 bp, Homo sapiens
ctgaaatcagcacag

SEQ ID NO: 1727883 - DNA, 15 bp, Homo sapiens
tgaaatcagcacagt

SEQ ID NO: 1727884 - DNA, 15 bp, Homo sapiens
gaaatcagcacagta

SEQ ID NO: 1727885 - DNA, 15 bp, Homo sapiens
aaatcagcacagtac

SEQ ID NO: 1727886 - DNA, 15 bp, Homo sapiens
aatcagcacagtact

SEQ ID NO: 1727887 - DNA, 15 bp, Homo sapiens
atcagcacagtactg

SEQ ID NO: 1727888 - DNA, 15 bp, Homo sapiens
tcagcacagtactgc

SEQ ID NO: 1727889 - DNA, 15 bp, Homo sapiens
cagcacagtactgca

SEQ ID NO: 1727890 - DNA, 15 bp, Homo sapiens
agcacagtactgcat

SEQ ID NO: 1727891 - DNA, 15 bp, Homo sapiens
gcacagtactgcatc

SEQ ID NO: 1727892 - DNA, 15 bp, Homo sapiens
cacagtactgcatct

SEQ ID NO: 1727893 - DNA, 15 bp, Homo sapiens
acagtactgcatctt

SEQ ID NO: 1727894 - DNA, 15 bp, Homo sapiens
cagtactgcatcttg

SEQ ID NO: 1727895 - DNA, 15 bp, Homo sapiens
agtactgcatcttgc

SEQ ID NO: 1727896 - DNA, 15 bp, Homo sapiens
gtactgcatcttgct

SEQ ID NO: 1727897 - DNA, 15 bp, Homo sapiens
tactgcatcttgctc

SEQ ID NO: 1727898 - DNA, 15 bp, Homo sapiens
actgcatcttgctca

SEQ ID NO: 1727899 - DNA, 15 bp, Homo sapiens
ctgcatcttgctcaa

SEQ ID NO: 1727900 - DNA, 15 bp, Homo sapiens
tgcatcttgctcaag

SEQ ID NO: 1727901 - DNA, 15 bp, Homo sapiens
gcatcttgctcaagg

SEQ ID NO: 1727902 - DNA, 15 bp, Homo sapiens
catcttgctcaaggc

SEQ ID NO: 1727903 - DNA, 15 bp, Homo sapiens
atcttgctcaaggcc

SEQ ID NO: 1727904 - DNA, 15 bp, Homo sapiens
tcttgctcaaggcct

SEQ ID NO: 1727905 - DNA, 15 bp, Homo sapiens
cttgctcaaggcctg

SEQ ID NO: 1727906 - DNA, 15 bp, Homo sapiens
ttgctcaaggcctga

SEQ ID NO: 1727907 - DNA, 15 bp, Homo sapiens
tgctcaaggcctgat

SEQ ID NO: 1727908 - DNA, 15 bp, Homo sapiens
gctcaaggcctgatg

SEQ ID NO: 1727909 - DNA, 15 bp, Homo sapiens
ctcaaggcctgatgt

SEQ ID NO: 1727910 - DNA, 15 bp, Homo sapiens
tcaaggcctgatgta

SEQ ID NO: 1727911 - DNA, 15 bp, Homo sapiens
caaggcctgatgtaa

SEQ ID NO: 1727912 - DNA, 15 bp, Homo sapiens
aaggcctgatgtaac

SEQ ID NO: 1727913 - DNA, 15 bp, Homo sapiens
aggcctgatgtaacc

SEQ ID NO: 1727914 - DNA, 15 bp, Homo sapiens
ggcctgatgtaacca

SEQ ID NO: 1727915 - DNA, 15 bp, Homo sapiens
gcctgatgtaaccac

SEQ ID NO: 1727916 - DNA, 15 bp, Homo sapiens
cctgatgtaaccact

SEQ ID NO: 1727917 - DNA, 15 bp, Homo sapiens
ctgatgtaaccacta

SEQ ID NO: 1727918 - DNA, 15 bp, Homo sapiens
tgatgtaaccactac

SEQ ID NO: 1727919 - DNA, 15 bp, Homo sapiens
gatgtaaccactacc

SEQ ID NO: 1727920 - DNA, 15 bp, Homo sapiens
atgtaaccactacct

SEQ ID NO: 1727921 - DNA, 15 bp, Homo sapiens
tgtaaccactacctg

SEQ ID NO: 1727922 - DNA, 15 bp, Homo sapiens
gtaaccactacctgg

SEQ ID NO: 1727923 - DNA, 15 bp, Homo sapiens
taaccactacctggc

SEQ ID NO: 1727924 - DNA, 15 bp, Homo sapiens
aaccactacctggct

SEQ ID NO: 1727925 - DNA, 15 bp, Homo sapiens
accactacctggcta

SEQ ID NO: 1727926 - DNA, 15 bp, Homo sapiens
ccactacctggctac

SEQ ID NO: 1727927 - DNA, 15 bp, Homo sapiens
cactacctggctacc

SEQ ID NO: 1727928 - DNA, 15 bp, Homo sapiens
actacctggctacca

SEQ ID NO: 1727929 - DNA, 15 bp, Homo sapiens
ctacctggctaccaa

SEQ ID NO: 1727930 - DNA, 15 bp, Homo sapiens
tacctggctaccaat

SEQ ID NO: 1727931 - DNA, 15 bp, Homo sapiens
acctggctaccaatg

SEQ ID NO: 1727932 - DNA, 15 bp, Homo sapiens
cctggctaccaatgt

SEQ ID NO: 1727933 - DNA, 15 bp, Homo sapiens
ctggctaccaatgtg

SEQ ID NO: 1727934 - DNA, 15 bp, Homo sapiens
tggctaccaatgtgt

SEQ ID NO: 1727935 - DNA, 15 bp, Homo sapiens
ggctaccaatgtgtg

SEQ ID NO: 1727936 - DNA, 15 bp, Homo sapiens
gctaccaatgtgtgc

SEQ ID NO: 1727937 - DNA, 15 bp, Homo sapiens
ctaccaatgtgtgct

SEQ ID NO: 1727938 - DNA, 15 bp, Homo sapiens
taccaatgtgtgctc

SEQ ID NO: 1727939 - DNA, 15 bp, Homo sapiens
accaatgtgtgctca

SEQ ID NO: 1727940 - DNA, 15 bp, Homo sapiens
ccaatgtgtgctcaa

SEQ ID NO: 1727941 - DNA, 15 bp, Homo sapiens
caatgtgtgctcaag

SEQ ID NO: 1727942 - DNA, 15 bp, Homo sapiens
aatgtgtgctcaaga

SEQ ID NO: 1727943 - DNA, 15 bp, Homo sapiens
atgtgtgctcaagac

SEQ ID NO: 1727944 - DNA, 15 bp, Homo sapiens
tgtgtgctcaagacc

SEQ ID NO: 1727945 - DNA, 15 bp, Homo sapiens
gtgtgctcaagacct

SEQ ID NO: 1727946 - DNA, 15 bp, Homo sapiens
tgtgctcaagacctt

SEQ ID NO: 1727947 - DNA, 15 bp, Homo sapiens
gtgctcaagaccttg

SEQ ID NO: 1727948 - DNA, 15 bp, Homo sapiens
tgctcaagaccttgg

SEQ ID NO: 1727949 - DNA, 15 bp, Homo sapiens
gctcaagaccttggg

SEQ ID NO: 1727950 - DNA, 15 bp, Homo sapiens
ctcaagaccttgggg

SEQ ID NO: 1727951 - DNA, 15 bp, Homo sapiens
tcaagaccttggggc

SEQ ID NO: 1727952 - DNA, 15 bp, Homo sapiens
caagaccttggggct

SEQ ID NO: 1727953 - DNA, 15 bp, Homo sapiens
aagaccttggggctc

SEQ ID NO: 1727954 - DNA, 15 bp, Homo sapiens
agaccttggggctct

SEQ ID NO: 1727955 - DNA, 15 bp, Homo sapiens
gaccttggggctcta

SEQ ID NO: 1727956 - DNA, 15 bp, Homo sapiens
accttggggctctat

SEQ ID NO: 1727957 - DNA, 15 bp, Homo sapiens
ccttggggctctata

SEQ ID NO: 1727958 - DNA, 15 bp, Homo sapiens
cttggggctctataa

SEQ ID NO: 1727959 - DNA, 15 bp, Homo sapiens
ttggggctctataat

SEQ ID NO: 1727960 - DNA, 15 bp, Homo sapiens
tggggctctataatc

SEQ ID NO: 1727961 - DNA, 15 bp, Homo sapiens
ggggctctataatca

SEQ ID NO: 1727962 - DNA, 15 bp, Homo sapiens
gggctctataatcag

SEQ ID NO: 1727963 - DNA, 15 bp, Homo sapiens
ggctctataatcagc

SEQ ID NO: 1727964 - DNA, 15 bp, Homo sapiens
gctctataatcagct

SEQ ID NO: 1727965 - DNA, 15 bp, Homo sapiens
ctctataatcagctg

SEQ ID NO: 1727966 - DNA, 15 bp, Homo sapiens
tctataatcagctgg

SEQ ID NO: 1727967 - DNA, 15 bp, Homo sapiens
ctataatcagctggt

SEQ ID NO: 1727968 - DNA, 15 bp, Homo sapiens
tataatcagctggta

SEQ ID NO: 1727969 - DNA, 15 bp, Homo sapiens
ataatcagctggtag

SEQ ID NO: 1727970 - DNA, 15 bp, Homo sapiens
taatcagctggtagt

SEQ ID NO: 1727971 - DNA, 15 bp, Homo sapiens
aatcagctggtagta

SEQ ID NO: 1727972 - DNA, 15 bp, Homo sapiens
atcagctggtagtaa

SEQ ID NO: 1727973 - DNA, 15 bp, Homo sapiens
tcagctggtagtaaa

SEQ ID NO: 1727974 - DNA, 15 bp, Homo sapiens
cagctggtagtaaat

SEQ ID NO: 1727975 - DNA, 15 bp, Homo sapiens
agctggtagtaaatc

SEQ ID NO: 1727976 - DNA, 15 bp, Homo sapiens
gctggtagtaaatct

SEQ ID NO: 1727977 - DNA, 15 bp, Homo sapiens
ctggtagtaaatcta

SEQ ID NO: 1727978 - DNA, 15 bp, Homo sapiens
tggtagtaaatctag

SEQ ID NO: 1727979 - DNA, 15 bp, Homo sapiens
ggtagtaaatctagc

SEQ ID NO: 1727980 - DNA, 15 bp, Homo sapiens
gtagtaaatctagcc

SEQ ID NO: 1727981 - DNA, 15 bp, Homo sapiens
tagtaaatctagcca

SEQ ID NO: 1727982 - DNA, 15 bp, Homo sapiens
agtaaatctagccac

SEQ ID NO: 1727983 - DNA, 15 bp, Homo sapiens
gtaaatctagccacg

SEQ ID NO: 1727984 - DNA, 15 bp, Homo sapiens
taaatctagccacgt

SEQ ID NO: 1727985 - DNA, 15 bp, Homo sapiens
aaatctagccacgtt

SEQ ID NO: 1727986 - DNA, 15 bp, Homo sapiens
aatctagccacgttt

SEQ ID NO: 1727987 - DNA, 15 bp, Homo sapiens
atctagccacgtttg

SEQ ID NO: 1727988 - DNA, 15 bp, Homo sapiens
tctagccacgtttgt

SEQ ID NO: 1727989 - DNA, 15 bp, Homo sapiens
ctagccacgtttgta

SEQ ID NO: 1727990 - DNA, 15 bp, Homo sapiens
tagccacgtttgtat

SEQ ID NO: 1727991 - DNA, 15 bp, Homo sapiens
agccacgtttgtatc

SEQ ID NO: 1727992 - DNA, 15 bp, Homo sapiens
gccacgtttgtatcc

SEQ ID NO: 1727993 - DNA, 15 bp, Homo sapiens
ccacgtttgtatcct

SEQ ID NO: 1727994 - DNA, 15 bp, Homo sapiens
cacgtttgtatcctt

SEQ ID NO: 1727995 - DNA, 15 bp, Homo sapiens
acgtttgtatccttc

SEQ ID NO: 1727996 - DNA, 15 bp, Homo sapiens
cgtttgtatccttcc

SEQ ID NO: 1727997 - DNA, 15 bp, Homo sapiens
gtttgtatccttccc

SEQ ID NO: 1727998 - DNA, 15 bp, Homo sapiens
tttgtatccttccct

SEQ ID NO: 1727999 - DNA, 15 bp, Homo sapiens
ttgtatccttccctt

SEQ ID NO: 1728000 - DNA, 15 bp, Homo sapiens
tgtatccttcccttc

SEQ ID NO: 1728001 - DNA, 15 bp, Homo sapiens
gtatccttcccttca

SEQ ID NO: 1728002 - DNA, 15 bp, Homo sapiens
tatccttcccttcag

SEQ ID NO: 1728003 - DNA, 15 bp, Homo sapiens
atccttcccttcagg

SEQ ID NO: 1728004 - DNA, 15 bp, Homo sapiens
tccttcccttcaggg

SEQ ID NO: 1728005 - DNA, 15 bp, Homo sapiens
ccttcccttcagggt

SEQ ID NO: 1728006 - DNA, 15 bp, Homo sapiens
cttcccttcagggtg

SEQ ID NO: 1728007 - DNA, 15 bp, Homo sapiens
ttcccttcagggtgg

SEQ ID NO: 1728008 - DNA, 15 bp, Homo sapiens
tcccttcagggtggt

SEQ ID NO: 1728009 - DNA, 15 bp, Homo sapiens
cccttcagggtggtg

SEQ ID NO: 1728010 - DNA, 15 bp, Homo sapiens
ccttcagggtggtga

SEQ ID NO: 1728011 - DNA, 15 bp, Homo sapiens
cttcagggtggtgag

SEQ ID NO: 1728012 - DNA, 15 bp, Homo sapiens
ttcagggtggtgagt

SEQ ID NO: 1728013 - DNA, 15 bp, Homo sapiens
tcagggtggtgagtt

SEQ ID NO: 1728014 - DNA, 15 bp, Homo sapiens
cagggtggtgagttc

SEQ ID NO: 1728015 - DNA, 15 bp, Homo sapiens
agggtggtgagttcc

SEQ ID NO: 1728016 - DNA, 15 bp, Homo sapiens
gggtggtgagttccc

SEQ ID NO: 1728017 - DNA, 15 bp, Homo sapiens
ggtggtgagttcccc

SEQ ID NO: 1728018 - DNA, 15 bp, Homo sapiens
gtggtgagttccccc

SEQ ID NO: 1728019 - DNA, 15 bp, Homo sapiens
tggtgagttccccca

SEQ ID NO: 1728020 - DNA, 15 bp, Homo sapiens
ggtgagttcccccag

SEQ ID NO: 1728021 - DNA, 15 bp, Homo sapiens
gtgagttcccccagg

SEQ ID NO: 1728022 - DNA, 15 bp, Homo sapiens
tgagttcccccaggc

SEQ ID NO: 1728023 - DNA, 15 bp, Homo sapiens
gagttcccccaggcc

SEQ ID NO: 1728024 - DNA, 15 bp, Homo sapiens
agttcccccaggccc

SEQ ID NO: 1728025 - DNA, 15 bp, Homo sapiens
gttcccccaggccct

SEQ ID NO: 1728026 - DNA, 15 bp, Homo sapiens
ttcccccaggccctg

SEQ ID NO: 1728027 - DNA, 15 bp, Homo sapiens
tcccccaggccctgg

SEQ ID NO: 1728028 - DNA, 15 bp, Homo sapiens
cccccaggccctggg

SEQ ID NO: 1728029 - DNA, 15 bp, Homo sapiens
ccccaggccctgggt

SEQ ID NO: 1728030 - DNA, 15 bp, Homo sapiens
cccaggccctgggta

SEQ ID NO: 1728031 - DNA, 15 bp, Homo sapiens
ccaggccctgggtag

SEQ ID NO: 1728032 - DNA, 15 bp, Homo sapiens
caggccctgggtagg

SEQ ID NO: 1728033 - DNA, 15 bp, Homo sapiens
aggccctgggtaggt

SEQ ID NO: 1728034 - DNA, 15 bp, Homo sapiens
ggccctgggtaggtt

SEQ ID NO: 1728035 - DNA, 15 bp, Homo sapiens
gccctgggtaggttg

SEQ ID NO: 1728036 - DNA, 15 bp, Homo sapiens
ccctgggtaggttga

SEQ ID NO: 1728037 - DNA, 15 bp, Homo sapiens
cctgggtaggttgag

SEQ ID NO: 1728038 - DNA, 15 bp, Homo sapiens
ctgggtaggttgaga

SEQ ID NO: 1728039 - DNA, 15 bp, Homo sapiens
tgggtaggttgagag

SEQ ID NO: 1728040 - DNA, 15 bp, Homo sapiens
gggtaggttgagagg

SEQ ID NO: 1728041 - DNA, 15 bp, Homo sapiens
ggtaggttgagaggt

SEQ ID NO: 1728042 - DNA, 15 bp, Homo sapiens
gtaggttgagaggtg

SEQ ID NO: 1728043 - DNA, 15 bp, Homo sapiens
taggttgagaggtgt

SEQ ID NO: 1728044 - DNA, 15 bp, Homo sapiens
aggttgagaggtgta

SEQ ID NO: 1728045 - DNA, 15 bp, Homo sapiens
ggttgagaggtgtag

SEQ ID NO: 1728046 - DNA, 15 bp, Homo sapiens
gttgagaggtgtagt

SEQ ID NO: 1728047 - DNA, 15 bp, Homo sapiens
ttgagaggtgtagtc

SEQ ID NO: 1728048 - DNA, 15 bp, Homo sapiens
tgagaggtgtagtct

SEQ ID NO: 1728049 - DNA, 15 bp, Homo sapiens
gagaggtgtagtctg

SEQ ID NO: 1728050 - DNA, 15 bp, Homo sapiens
agaggtgtagtctga

SEQ ID NO: 1728051 - DNA, 15 bp, Homo sapiens
gaggtgtagtctgag

SEQ ID NO: 1728052 - DNA, 15 bp, Homo sapiens
aggtgtagtctgaga

SEQ ID NO: 1728053 - DNA, 15 bp, Homo sapiens
ggtgtagtctgagag

SEQ ID NO: 1728054 - DNA, 15 bp, Homo sapiens
gtgtagtctgagagc

SEQ ID NO: 1728055 - DNA, 15 bp, Homo sapiens
tgtagtctgagagcc

SEQ ID NO: 1728056 - DNA, 15 bp, Homo sapiens
gtagtctgagagcca

SEQ ID NO: 1728057 - DNA, 15 bp, Homo sapiens
tagtctgagagccag

SEQ ID NO: 1728058 - DNA, 15 bp, Homo sapiens
agtctgagagccaga

SEQ ID NO: 1728059 - DNA, 15 bp, Homo sapiens
gtctgagagccagag

SEQ ID NO: 1728060 - DNA, 15 bp, Homo sapiens
tctgagagccagaga

SEQ ID NO: 1728061 - DNA, 15 bp, Homo sapiens
ctgagagccagagac

SEQ ID NO: 1728062 - DNA, 15 bp, Homo sapiens
tgagagccagagact

SEQ ID NO: 1728063 - DNA, 15 bp, Homo sapiens
gagagccagagactg

SEQ ID NO: 1728064 - DNA, 15 bp, Homo sapiens
agagccagagactgg

SEQ ID NO: 1728065 - DNA, 15 bp, Homo sapiens
gagccagagactgga

SEQ ID NO: 1728066 - DNA, 15 bp, Homo sapiens
agccagagactggag

SEQ ID NO: 1728067 - DNA, 15 bp, Homo sapiens
gccagagactggagt

SEQ ID NO: 1728068 - DNA, 15 bp, Homo sapiens
ccagagactggagtc

SEQ ID NO: 1728069 - DNA, 15 bp, Homo sapiens
cagagactggagtca

SEQ ID NO: 1728070 - DNA, 15 bp, Homo sapiens
agagactggagtcag

SEQ ID NO: 1728071 - DNA, 15 bp, Homo sapiens
gagactggagtcaga

SEQ ID NO: 1728072 - DNA, 15 bp, Homo sapiens
agactggagtcagaa

SEQ ID NO: 1728073 - DNA, 15 bp, Homo sapiens
gactggagtcagaat

SEQ ID NO: 1728074 - DNA, 15 bp, Homo sapiens
actggagtcagaatc

SEQ ID NO: 1728075 - DNA, 15 bp, Homo sapiens
ctggagtcagaatcc

SEQ ID NO: 1728076 - DNA, 15 bp, Homo sapiens
tggagtcagaatcct

SEQ ID NO: 1728077 - DNA, 15 bp, Homo sapiens
ggagtcagaatcctt

SEQ ID NO: 1728078 - DNA, 15 bp, Homo sapiens
gagtcagaatcctta

SEQ ID NO: 1728079 - DNA, 15 bp, Homo sapiens
agtcagaatccttag

SEQ ID NO: 1728080 - DNA, 15 bp, Homo sapiens
gtcagaatccttaga

SEQ ID NO: 1728081 - DNA, 15 bp, Homo sapiens
tcagaatccttagaa

SEQ ID NO: 1728082 - DNA, 15 bp, Homo sapiens
cagaatccttagaaa

SEQ ID NO: 1728083 - DNA, 15 bp, Homo sapiens
agaatccttagaaat

SEQ ID NO: 1728084 - DNA, 15 bp, Homo sapiens
gaatccttagaaatc

SEQ ID NO: 1728085 - DNA, 15 bp, Homo sapiens
aatccttagaaatct

SEQ ID NO: 1728086 - DNA, 15 bp, Homo sapiens
atccttagaaatcta

SEQ ID NO: 1728087 - DNA, 15 bp, Homo sapiens
tccttagaaatctac

SEQ ID NO: 1728088 - DNA, 15 bp, Homo sapiens
ccttagaaatctact

SEQ ID NO: 1728089 - DNA, 15 bp, Homo sapiens
cttagaaatctactt

SEQ ID NO: 1728090 - DNA, 15 bp, Homo sapiens
ttagaaatctacttg

SEQ ID NO: 1728091 - DNA, 15 bp, Homo sapiens
tagaaatctacttgg

SEQ ID NO: 1728092 - DNA, 15 bp, Homo sapiens
agaaatctacttggt

SEQ ID NO: 1728093 - DNA, 15 bp, Homo sapiens
gaaatctacttggtg

SEQ ID NO: 1728094 - DNA, 15 bp, Homo sapiens
aaatctacttggtgt

SEQ ID NO: 1728095 - DNA, 15 bp, Homo sapiens
aatctacttggtgtg

SEQ ID NO: 1728096 - DNA, 15 bp, Homo sapiens
atctacttggtgtgc

SEQ ID NO: 1728097 - DNA, 15 bp, Homo sapiens
tctacttggtgtgca

SEQ ID NO: 1728098 - DNA, 15 bp, Homo sapiens
ctacttggtgtgcag

SEQ ID NO: 1728099 - DNA, 15 bp, Homo sapiens
tacttggtgtgcagt

SEQ ID NO: 1728100 - DNA, 15 bp, Homo sapiens
acttggtgtgcagtt

SEQ ID NO: 1728101 - DNA, 15 bp, Homo sapiens
cttggtgtgcagttt

SEQ ID NO: 1728102 - DNA, 15 bp, Homo sapiens
ttggtgtgcagttta

SEQ ID NO: 1728103 - DNA, 15 bp, Homo sapiens
tggtgtgcagtttag

SEQ ID NO: 1728104 - DNA, 15 bp, Homo sapiens
ggtgtgcagtttagt

SEQ ID NO: 1728105 - DNA, 15 bp, Homo sapiens
gtgtgcagtttagtt

SEQ ID NO: 1728106 - DNA, 15 bp, Homo sapiens
tgtgcagtttagttg

SEQ ID NO: 1728107 - DNA, 15 bp, Homo sapiens
gtgcagtttagttgg

SEQ ID NO: 1728108 - DNA, 15 bp, Homo sapiens
tgcagtttagttggc

SEQ ID NO: 1728109 - DNA, 15 bp, Homo sapiens
gcagtttagttggca

SEQ ID NO: 1728110 - DNA, 15 bp, Homo sapiens
cagtttagttggcac

SEQ ID NO: 1728111 - DNA, 15 bp, Homo sapiens
agtttagttggcact

SEQ ID NO: 1728112 - DNA, 15 bp, Homo sapiens
gtttagttggcactc

SEQ ID NO: 1728113 - DNA, 15 bp, Homo sapiens
tttagttggcactca

SEQ ID NO: 1728114 - DNA, 15 bp, Homo sapiens
ttagttggcactcaa

SEQ ID NO: 1728115 - DNA, 15 bp, Homo sapiens
tagttggcactcaaa

SEQ ID NO: 1728116 - DNA, 15 bp, Homo sapiens
agttggcactcaaac

SEQ ID NO: 1728117 - DNA, 15 bp, Homo sapiens
gttggcactcaaacc

SEQ ID NO: 1728118 - DNA, 15 bp, Homo sapiens
ttggcactcaaacca

SEQ ID NO: 1728119 - DNA, 15 bp, Homo sapiens
tggcactcaaaccac

SEQ ID NO: 1728120 - DNA, 15 bp, Homo sapiens
ggcactcaaaccact

SEQ ID NO: 1728121 - DNA, 15 bp, Homo sapiens
gcactcaaaccacta

SEQ ID NO: 1728122 - DNA, 15 bp, Homo sapiens
cactcaaaccactag

SEQ ID NO: 1728123 - DNA, 15 bp, Homo sapiens
actcaaaccactaga

SEQ ID NO: 1728124 - DNA, 15 bp, Homo sapiens
ctcaaaccactagac

SEQ ID NO: 1728125 - DNA, 15 bp, Homo sapiens
tcaaaccactagaca

SEQ ID NO: 1728126 - DNA, 15 bp, Homo sapiens
caaaccactagacac

SEQ ID NO: 1728127 - DNA, 15 bp, Homo sapiens
aaaccactagacaca

SEQ ID NO: 1728128 - DNA, 15 bp, Homo sapiens
aaccactagacacat

SEQ ID NO: 1728129 - DNA, 15 bp, Homo sapiens
accactagacacatt

SEQ ID NO: 1728130 - DNA, 15 bp, Homo sapiens
ccactagacacattc

SEQ ID NO: 1728131 - DNA, 15 bp, Homo sapiens
cactagacacattct

SEQ ID NO: 1728132 - DNA, 15 bp, Homo sapiens
actagacacattctt

SEQ ID NO: 1728133 - DNA, 15 bp, Homo sapiens
ctagacacattcttc

SEQ ID NO: 1728134 - DNA, 15 bp, Homo sapiens
tagacacattcttcc

SEQ ID NO: 1728135 - DNA, 15 bp, Homo sapiens
agacacattcttccc

SEQ ID NO: 1728136 - DNA, 15 bp, Homo sapiens
gacacattcttccct

SEQ ID NO: 1728137 - DNA, 15 bp, Homo sapiens
acacattcttccctc

SEQ ID NO: 1728138 - DNA, 15 bp, Homo sapiens
cacattcttccctcc

SEQ ID NO: 1728139 - DNA, 15 bp, Homo sapiens
acattcttccctccc

SEQ ID NO: 1728140 - DNA, 15 bp, Homo sapiens
cattcttccctcccc

SEQ ID NO: 1728141 - DNA, 15 bp, Homo sapiens
attcttccctcccct

SEQ ID NO: 1728142 - DNA, 15 bp, Homo sapiens
ttcttccctcccctt

SEQ ID NO: 1728143 - DNA, 15 bp, Homo sapiens
tcttccctccccttt

SEQ ID NO: 1728144 - DNA, 15 bp, Homo sapiens
cttccctcccctttc

SEQ ID NO: 1728145 - DNA, 15 bp, Homo sapiens
ttccctcccctttcc

SEQ ID NO: 1728146 - DNA, 15 bp, Homo sapiens
tccctcccctttcca

SEQ ID NO: 1728147 - DNA, 15 bp, Homo sapiens
ccctcccctttccac

SEQ ID NO: 1728148 - DNA, 15 bp, Homo sapiens
cctcccctttccaca

SEQ ID NO: 1728149 - DNA, 15 bp, Homo sapiens
ctcccctttccacag

SEQ ID NO: 1728150 - DNA, 15 bp, Homo sapiens
tcccctttccacagg

SEQ ID NO: 1728151 - DNA, 15 bp, Homo sapiens
cccctttccacaggc

SEQ ID NO: 1728152 - DNA, 15 bp, Homo sapiens
ccctttccacaggca

SEQ ID NO: 1728153 - DNA, 15 bp, Homo sapiens
cctttccacaggcag

SEQ ID NO: 1728154 - DNA, 15 bp, Homo sapiens
ctttccacaggcagg

SEQ ID NO: 1728155 - DNA, 15 bp, Homo sapiens
tttccacaggcagga

SEQ ID NO: 1728156 - DNA, 15 bp, Homo sapiens
ttccacaggcaggag

SEQ ID NO: 1728157 - DNA, 15 bp, Homo sapiens
tccacaggcaggaga

SEQ ID NO: 1728158 - DNA, 15 bp, Homo sapiens
acaggcaggagagcc

SEQ ID NO: 1728159 - DNA, 15 bp, Homo sapiens
caggcaggagagcct

SEQ ID NO: 1728160 - DNA, 15 bp, Homo sapiens
aggcaggagagcctc

SEQ ID NO: 1728161 - DNA, 15 bp, Homo sapiens
ggcaggagagcctcg

SEQ ID NO: 1728162 - DNA, 15 bp, Homo sapiens
gcaggagagcctcgc

SEQ ID NO: 1728163 - DNA, 15 bp, Homo sapiens
caggagagcctcgcc

SEQ ID NO: 1728164 - DNA, 15 bp, Homo sapiens
aggagagcctcgccc

SEQ ID NO: 1728165 - DNA, 15 bp, Homo sapiens
ggagagcctcgcccc

SEQ ID NO: 1728166 - DNA, 15 bp, Homo sapiens
gagagcctcgccccc

SEQ ID NO: 1728167 - DNA, 15 bp, Homo sapiens
agagcctcgccccct

SEQ ID NO: 1728168 - DNA, 15 bp, Homo sapiens
gagcctcgccccctg

SEQ ID NO: 1728169 - DNA, 15 bp, Homo sapiens
agcctcgccccctgg

SEQ ID NO: 1728170 - DNA, 15 bp, Homo sapiens
gcctcgccccctggc

SEQ ID NO: 1728171 - DNA, 15 bp, Homo sapiens
cctcgccccctggcc

SEQ ID NO: 1728172 - DNA, 15 bp, Homo sapiens
ctcgccccctggcct

SEQ ID NO: 1728173 - DNA, 15 bp, Homo sapiens
tcgccccctggcctt

SEQ ID NO: 1728174 - DNA, 15 bp, Homo sapiens
cgccccctggccttc

SEQ ID NO: 1728175 - DNA, 15 bp, Homo sapiens
gccccctggccttca

SEQ ID NO: 1728176 - DNA, 15 bp, Homo sapiens
ccccctggccttcac

SEQ ID NO: 1728177 - DNA, 15 bp, Homo sapiens
cccctggccttcacc

SEQ ID NO: 1728178 - DNA, 15 bp, Homo sapiens
ccctggccttcacca

SEQ ID NO: 1728179 - DNA, 15 bp, Homo sapiens
cctggccttcaccac

SEQ ID NO: 1728180 - DNA, 15 bp, Homo sapiens
ctggccttcaccacc

SEQ ID NO: 1728181 - DNA, 15 bp, Homo sapiens
tggccttcaccacca

SEQ ID NO: 1728182 - DNA, 15 bp, Homo sapiens
ggccttcaccaccac

SEQ ID NO: 1728183 - DNA, 15 bp, Homo sapiens
gccttcaccaccaca

SEQ ID NO: 1728184 - DNA, 15 bp, Homo sapiens
ccttcaccaccacag

SEQ ID NO: 1728185 - DNA, 15 bp, Homo sapiens
cttcaccaccacagg

SEQ ID NO: 1728186 - DNA, 15 bp, Homo sapiens
ttcaccaccacaggc

SEQ ID NO: 1728187 - DNA, 15 bp, Homo sapiens
tcaccaccacaggcc

SEQ ID NO: 1728188 - DNA, 15 bp, Homo sapiens
caccaccacaggccc

SEQ ID NO: 1728189 - DNA, 15 bp, Homo sapiens
accaccacaggccca

SEQ ID NO: 1728190 - DNA, 15 bp, Homo sapiens
ccaccacaggcccag

SEQ ID NO: 1728191 - DNA, 15 bp, Homo sapiens
caccacaggcccagg

SEQ ID NO: 1728192 - DNA, 15 bp, Homo sapiens
accacaggcccaggg

SEQ ID NO: 1728193 - DNA, 15 bp, Homo sapiens
ccacaggcccagggg

SEQ ID NO: 1728194 - DNA, 15 bp, Homo sapiens
cacaggcccagggga

SEQ ID NO: 1728195 - DNA, 15 bp, Homo sapiens
acaggcccaggggag

SEQ ID NO: 1728196 - DNA, 15 bp, Homo sapiens
caggcccaggggagt

SEQ ID NO: 1728197 - DNA, 15 bp, Homo sapiens
aggcccaggggagta

SEQ ID NO: 1728198 - DNA, 15 bp, Homo sapiens
ggcccaggggagtac

SEQ ID NO: 1728199 - DNA, 15 bp, Homo sapiens
gcccaggggagtact

SEQ ID NO: 1728200 - DNA, 15 bp, Homo sapiens
cccaggggagtactt

SEQ ID NO: 1728201 - DNA, 15 bp, Homo sapiens
ccaggggagtacttc

SEQ ID NO: 1728202 - DNA, 15 bp, Homo sapiens
caggggagtacttcc

SEQ ID NO: 1728203 - DNA, 15 bp, Homo sapiens
aggggagtacttcca

SEQ ID NO: 1728204 - DNA, 15 bp, Homo sapiens
ggggagtacttccag

SEQ ID NO: 1728205 - DNA, 15 bp, Homo sapiens
gggagtacttccagg

SEQ ID NO: 1728206 - DNA, 15 bp, Homo sapiens
ggagtacttccaggc

SEQ ID NO: 1728207 - DNA, 15 bp, Homo sapiens
gagtacttccaggct

SEQ ID NO: 1728208 - DNA, 15 bp, Homo sapiens
agtacttccaggcta

SEQ ID NO: 1728209 - DNA, 15 bp, Homo sapiens
gtacttccaggctac

SEQ ID NO: 1728210 - DNA, 15 bp, Homo sapiens
tacttccaggctact

SEQ ID NO: 1728211 - DNA, 15 bp, Homo sapiens
acttccaggctactg

SEQ ID NO: 1728212 - DNA, 15 bp, Homo sapiens
cttccaggctactgc

SEQ ID NO: 1728213 - DNA, 15 bp, Homo sapiens
ttccaggctactgcc

SEQ ID NO: 1728214 - DNA, 15 bp, Homo sapiens
tccaggctactgcca

SEQ ID NO: 1728215 - DNA, 15 bp, Homo sapiens
ccaggctactgccac

SEQ ID NO: 1728216 - DNA, 15 bp, Homo sapiens
caggctactgccacg

SEQ ID NO: 1728217 - DNA, 15 bp, Homo sapiens
aggctactgccacgg

SEQ ID NO: 1728218 - DNA, 15 bp, Homo sapiens
ggctactgccacggt

SEQ ID NO: 1728219 - DNA, 15 bp, Homo sapiens
gctactgccacggtt

SEQ ID NO: 1728220 - DNA, 15 bp, Homo sapiens
ctactgccacggttc

SEQ ID NO: 1728221 - DNA, 15 bp, Homo sapiens
tactgccacggttca

SEQ ID NO: 1728222 - DNA, 15 bp, Homo sapiens
actgccacggttcac

SEQ ID NO: 1728223 - DNA, 15 bp, Homo sapiens
ctgccacggttcact

SEQ ID NO: 1728224 - DNA, 15 bp, Homo sapiens
tgccacggttcactt

SEQ ID NO: 1728225 - DNA, 15 bp, Homo sapiens
gccacggttcactta

SEQ ID NO: 1728226 - DNA, 15 bp, Homo sapiens
ccacggttcacttaa

SEQ ID NO: 1728227 - DNA, 15 bp, Homo sapiens
cacggttcacttaag

SEQ ID NO: 1728228 - DNA, 15 bp, Homo sapiens
acggttcacttaagg

SEQ ID NO: 1728229 - DNA, 15 bp, Homo sapiens
cggttcacttaaggc

SEQ ID NO: 1728230 - DNA, 15 bp, Homo sapiens
ggttcacttaaggca

SEQ ID NO: 1728231 - DNA, 15 bp, Homo sapiens
gttcacttaaggcac

SEQ ID NO: 1728232 - DNA, 15 bp, Homo sapiens
ttcacttaaggcaca

SEQ ID NO: 1728233 - DNA, 15 bp, Homo sapiens
tcacttaaggcacaa

SEQ ID NO: 1728234 - DNA, 15 bp, Homo sapiens
cacttaaggcacaaa

SEQ ID NO: 1728235 - DNA, 15 bp, Homo sapiens
acttaaggcacaaag

SEQ ID NO: 1728236 - DNA, 15 bp, Homo sapiens
cttaaggcacaaagg

SEQ ID NO: 1728237 - DNA, 15 bp, Homo sapiens
ttaaggcacaaaggt

SEQ ID NO: 1728238 - DNA, 15 bp, Homo sapiens
taaggcacaaaggtt

SEQ ID NO: 1728239 - DNA, 15 bp, Homo sapiens
aaggcacaaaggttt

SEQ ID NO: 1728240 - DNA, 15 bp, Homo sapiens
aggcacaaaggtttt

SEQ ID NO: 1728241 - DNA, 15 bp, Homo sapiens
ggcacaaaggttttt

SEQ ID NO: 1728242 - DNA, 15 bp, Homo sapiens
gcacaaaggtttttc

SEQ ID NO: 1728243 - DNA, 15 bp, Homo sapiens
cacaaaggtttttca

SEQ ID NO: 1728244 - DNA, 15 bp, Homo sapiens
acaaaggtttttcaa

SEQ ID NO: 1728245 - DNA, 15 bp, Homo sapiens
caaaggtttttcaat

SEQ ID NO: 1728246 - DNA, 15 bp, Homo sapiens
aaaggtttttcaatc

SEQ ID NO: 1728247 - DNA, 15 bp, Homo sapiens
aaggtttttcaatca

SEQ ID NO: 1728248 - DNA, 15 bp, Homo sapiens
aggtttttcaatcag

SEQ ID NO: 1728249 - DNA, 15 bp, Homo sapiens
ggtttttcaatcagc

SEQ ID NO: 1728250 - DNA, 15 bp, Homo sapiens
gtttttcaatcagct

SEQ ID NO: 1728251 - DNA, 15 bp, Homo sapiens
tttttcaatcagctt

SEQ ID NO: 1728252 - DNA, 15 bp, Homo sapiens
ttttcaatcagcttg

SEQ ID NO: 1728253 - DNA, 15 bp, Homo sapiens
tttcaatcagcttgt

SEQ ID NO: 1728254 - DNA, 15 bp, Homo sapiens
ttcaatcagcttgtg

SEQ ID NO: 1728255 - DNA, 15 bp, Homo sapiens
tcaatcagcttgtgg

SEQ ID NO: 1728256 - DNA, 15 bp, Homo sapiens
caatcagcttgtggt

SEQ ID NO: 1728257 - DNA, 15 bp, Homo sapiens
aatcagcttgtggtg

SEQ ID NO: 1728258 - DNA, 15 bp, Homo sapiens
atcagcttgtggtga

SEQ ID NO: 1728259 - DNA, 15 bp, Homo sapiens
tcagcttgtggtgaa

SEQ ID NO: 1728260 - DNA, 15 bp, Homo sapiens
cagcttgtggtgaat

SEQ ID NO: 1728261 - DNA, 15 bp, Homo sapiens
agcttgtggtgaatg

SEQ ID NO: 1728262 - DNA, 15 bp, Homo sapiens
gcttgtggtgaatgc

SEQ ID NO: 1728263 - DNA, 15 bp, Homo sapiens
cttgtggtgaatgct

SEQ ID NO: 1728264 - DNA, 15 bp, Homo sapiens
ttgtggtgaatgctg

SEQ ID NO: 1728265 - DNA, 15 bp, Homo sapiens
tgtggtgaatgctgc

SEQ ID NO: 1728266 - DNA, 15 bp, Homo sapiens
gtggtgaatgctgcc

SEQ ID NO: 1728267 - DNA, 15 bp, Homo sapiens
tggtgaatgctgccc

SEQ ID NO: 1728268 - DNA, 15 bp, Homo sapiens
ggtgaatgctgcccg

SEQ ID NO: 1728269 - DNA, 15 bp, Homo sapiens
gtgaatgctgcccgg

SEQ ID NO: 1728270 - DNA, 15 bp, Homo sapiens
tgaatgctgcccggt

SEQ ID NO: 1728271 - DNA, 15 bp, Homo sapiens
gaatgctgcccggtc

SEQ ID NO: 1728272 - DNA, 15 bp, Homo sapiens
aatgctgcccggtct

SEQ ID NO: 1728273 - DNA, 15 bp, Homo sapiens
atgctgcccggtctg

SEQ ID NO: 1728274 - DNA, 15 bp, Homo sapiens
tgctgcccggtctgg

SEQ ID NO: 1728275 - DNA, 15 bp, Homo sapiens
gctgcccggtctgga

SEQ ID NO: 1728276 - DNA, 15 bp, Homo sapiens
ctgcccggtctggaa

SEQ ID NO: 1728277 - DNA, 15 bp, Homo sapiens
tgcccggtctggaac

SEQ ID NO: 1728278 - DNA, 15 bp, Homo sapiens
gcccggtctggaact

SEQ ID NO: 1728279 - DNA, 15 bp, Homo sapiens
cccggtctggaactc

SEQ ID NO: 1728280 - DNA, 15 bp, Homo sapiens
ccggtctggaactca

SEQ ID NO: 1728281 - DNA, 15 bp, Homo sapiens
cggtctggaactcat

SEQ ID NO: 1728282 - DNA, 15 bp, Homo sapiens
ggtctggaactcatt

SEQ ID NO: 1728283 - DNA, 15 bp, Homo sapiens
gtctggaactcattc

SEQ ID NO: 1728284 - DNA, 15 bp, Homo sapiens
tctggaactcattct

SEQ ID NO: 1728285 - DNA, 15 bp, Homo sapiens
ctggaactcattctt

SEQ ID NO: 1728286 - DNA, 15 bp, Homo sapiens
tggaactcattcttt

SEQ ID NO: 1728287 - DNA, 15 bp, Homo sapiens
ggaactcattcttta

SEQ ID NO: 1728288 - DNA, 15 bp, Homo sapiens
gaactcattctttag

SEQ ID NO: 1728289 - DNA, 15 bp, Homo sapiens
aactcattctttagg

SEQ ID NO: 1728290 - DNA, 15 bp, Homo sapiens
actcattctttaggg

SEQ ID NO: 1728291 - DNA, 15 bp, Homo sapiens
ctcattctttagggc

SEQ ID NO: 1728292 - DNA, 15 bp, Homo sapiens
tcattctttagggca

SEQ ID NO: 1728293 - DNA, 15 bp, Homo sapiens
cattctttagggcag

SEQ ID NO: 1728294 - DNA, 15 bp, Homo sapiens
attctttagggcagt

SEQ ID NO: 1728295 - DNA, 15 bp, Homo sapiens
ttctttagggcagtg

SEQ ID NO: 1728296 - DNA, 15 bp, Homo sapiens
tctttagggcagtgg

SEQ ID NO: 1728297 - DNA, 15 bp, Homo sapiens
ctttagggcagtggg

SEQ ID NO: 1728298 - DNA, 15 bp, Homo sapiens
tttagggcagtgggc

SEQ ID NO: 1728299 - DNA, 15 bp, Homo sapiens
ttagggcagtgggca

SEQ ID NO: 1728300 - DNA, 15 bp, Homo sapiens
tagggcagtgggcac

SEQ ID NO: 1728301 - DNA, 15 bp, Homo sapiens
agggcagtgggcacc

SEQ ID NO: 1728302 - DNA, 15 bp, Homo sapiens
gggcagtgggcaccc

SEQ ID NO: 1728303 - DNA, 15 bp, Homo sapiens
ggcagtgggcaccct

SEQ ID NO: 1728304 - DNA, 15 bp, Homo sapiens
gcagtgggcaccctc

SEQ ID NO: 1728305 - DNA, 15 bp, Homo sapiens
cagtgggcaccctct

SEQ ID NO: 1728306 - DNA, 15 bp, Homo sapiens
agtgggcaccctctg

SEQ ID NO: 1728307 - DNA, 15 bp, Homo sapiens
gtgggcaccctctgc

SEQ ID NO: 1728308 - DNA, 15 bp, Homo sapiens
tgggcaccctctgct

SEQ ID NO: 1728309 - DNA, 15 bp, Homo sapiens
gggcaccctctgctc

SEQ ID NO: 1728310 - DNA, 15 bp, Homo sapiens
ggcaccctctgctca

SEQ ID NO: 1728311 - DNA, 15 bp, Homo sapiens
gcaccctctgctcat

SEQ ID NO: 1728312 - DNA, 15 bp, Homo sapiens
caccctctgctcatg

SEQ ID NO: 1728313 - DNA, 15 bp, Homo sapiens
accctctgctcatgg

SEQ ID NO: 1728314 - DNA, 15 bp, Homo sapiens
ccctctgctcatggc

SEQ ID NO: 1728315 - DNA, 15 bp, Homo sapiens
cctctgctcatggcg

SEQ ID NO: 1728316 - DNA, 15 bp, Homo sapiens
ctctgctcatggcgg

SEQ ID NO: 1728317 - DNA, 15 bp, Homo sapiens
tctgctcatggcggg

SEQ ID NO: 1728318 - DNA, 15 bp, Homo sapiens
ctgctcatggcgggt

SEQ ID NO: 1728319 - DNA, 15 bp, Homo sapiens
tgctcatggcgggtc

SEQ ID NO: 1728320 - DNA, 15 bp, Homo sapiens
gctcatggcgggtcc

SEQ ID NO: 1728321 - DNA, 15 bp, Homo sapiens
ctcatggcgggtcca

SEQ ID NO: 1728322 - DNA, 15 bp, Homo sapiens
tcatggcgggtccag

SEQ ID NO: 1728323 - DNA, 15 bp, Homo sapiens
catggcgggtccaga

SEQ ID NO: 1728324 - DNA, 15 bp, Homo sapiens
atggcgggtccagaa

SEQ ID NO: 1728325 - DNA, 15 bp, Homo sapiens
tggcgggtccagaaa

SEQ ID NO: 1728326 - DNA, 15 bp, Homo sapiens
ggcgggtccagaaat

SEQ ID NO: 1728327 - DNA, 15 bp, Homo sapiens
gcgggtccagaaatg

SEQ ID NO: 1728328 - DNA, 15 bp, Homo sapiens
cgggtccagaaatgc

SEQ ID NO: 1728329 - DNA, 15 bp, Homo sapiens
gggtccagaaatgcc

SEQ ID NO: 1728330 - DNA, 15 bp, Homo sapiens
ggtccagaaatgcca

SEQ ID NO: 1728331 - DNA, 15 bp, Homo sapiens
gtccagaaatgccat

SEQ ID NO: 1728332 - DNA, 15 bp, Homo sapiens
tccagaaatgccata

SEQ ID NO: 1728333 - DNA, 15 bp, Homo sapiens
ccagaaatgccataa

SEQ ID NO: 1728334 - DNA, 15 bp, Homo sapiens
cagaaatgccataaa

SEQ ID NO: 1728335 - DNA, 15 bp, Homo sapiens
agaaatgccataaaa

SEQ ID NO: 1728336 - DNA, 15 bp, Homo sapiens
gaaatgccataaaag

SEQ ID NO: 1728337 - DNA, 15 bp, Homo sapiens
aaatgccataaaaga

SEQ ID NO: 1728338 - DNA, 15 bp, Homo sapiens
aatgccataaaagag

SEQ ID NO: 1728339 - DNA, 15 bp, Homo sapiens
atgccataaaagagc

SEQ ID NO: 1728340 - DNA, 15 bp, Homo sapiens
tgccataaaagagcc

SEQ ID NO: 1728341 - DNA, 15 bp, Homo sapiens
gccataaaagagcca

SEQ ID NO: 1728342 - DNA, 15 bp, Homo sapiens
ccataaaagagccaa

SEQ ID NO: 1728343 - DNA, 15 bp, Homo sapiens
cataaaagagccaag

SEQ ID NO: 1728344 - DNA, 15 bp, Homo sapiens
ataaaagagccaagg

SEQ ID NO: 1728345 - DNA, 15 bp, Homo sapiens
taaaagagccaaggc

SEQ ID NO: 1728346 - DNA, 15 bp, Homo sapiens
aaaagagccaaggcc

SEQ ID NO: 1728347 - DNA, 15 bp, Homo sapiens
aaagagccaaggcct

SEQ ID NO: 1728348 - DNA, 15 bp, Homo sapiens
aagagccaaggcctg

SEQ ID NO: 1728349 - DNA, 15 bp, Homo sapiens
agagccaaggcctgg

SEQ ID NO: 1728350 - DNA, 15 bp, Homo sapiens
gagccaaggcctgga

SEQ ID NO: 1728351 - DNA, 15 bp, Homo sapiens
agccaaggcctggat

SEQ ID NO: 1728352 - DNA, 15 bp, Homo sapiens
gccaaggcctggatt

SEQ ID NO: 1728353 - DNA, 15 bp, Homo sapiens
ccaaggcctggattc

SEQ ID NO: 1728354 - DNA, 15 bp, Homo sapiens
caaggcctggattcc

SEQ ID NO: 1728355 - DNA, 15 bp, Homo sapiens
aaggcctggattcca

SEQ ID NO: 1728356 - DNA, 15 bp, Homo sapiens
aggcctggattccaa

SEQ ID NO: 1728357 - DNA, 15 bp, Homo sapiens
ggcctggattccaag

SEQ ID NO: 1728358 - DNA, 15 bp, Homo sapiens
cctggattccaagag

SEQ ID NO: 1728359 - DNA, 15 bp, Homo sapiens
ctggattccaagagc

SEQ ID NO: 1728360 - DNA, 15 bp, Homo sapiens
tggattccaagagcc

SEQ ID NO: 1728361 - DNA, 15 bp, Homo sapiens
ggattccaagagcct

SEQ ID NO: 1728362 - DNA, 15 bp, Homo sapiens
gattccaagagcctg

SEQ ID NO: 1728363 - DNA, 15 bp, Homo sapiens
attccaagagcctgc

SEQ ID NO: 1728364 - DNA, 15 bp, Homo sapiens
ttccaagagcctgct

SEQ ID NO: 1728365 - DNA, 15 bp, Homo sapiens
tccaagagcctgctt

SEQ ID NO: 1728366 - DNA, 15 bp, Homo sapiens
ccaagagcctgcttg

SEQ ID NO: 1728367 - DNA, 15 bp, Homo sapiens
caagagcctgcttgg

SEQ ID NO: 1728368 - DNA, 15 bp, Homo sapiens
aagagcctgcttggt

SEQ ID NO: 1728369 - DNA, 15 bp, Homo sapiens
agagcctgcttggtg

SEQ ID NO: 1728370 - DNA, 15 bp, Homo sapiens
gagcctgcttggtgc

SEQ ID NO: 1728371 - DNA, 15 bp, Homo sapiens
agcctgcttggtgct

SEQ ID NO: 1728372 - DNA, 15 bp, Homo sapiens
gcctgcttggtgctt

SEQ ID NO: 1728373 - DNA, 15 bp, Homo sapiens
cctgcttggtgcttt

SEQ ID NO: 1728374 - DNA, 15 bp, Homo sapiens
ctgcttggtgctttg

SEQ ID NO: 1728375 - DNA, 15 bp, Homo sapiens
tgcttggtgctttga

SEQ ID NO: 1728376 - DNA, 15 bp, Homo sapiens
gcttggtgctttgac

SEQ ID NO: 1728377 - DNA, 15 bp, Homo sapiens
cttggtgctttgacc

SEQ ID NO: 1728378 - DNA, 15 bp, Homo sapiens
ttggtgctttgaccc

SEQ ID NO: 1728379 - DNA, 15 bp, Homo sapiens
tggtgctttgaccct

SEQ ID NO: 1728380 - DNA, 15 bp, Homo sapiens
ggtgctttgaccctg

SEQ ID NO: 1728381 - DNA, 15 bp, Homo sapiens
gtgctttgaccctgt

SEQ ID NO: 1728382 - DNA, 15 bp, Homo sapiens
tgctttgaccctgtg

SEQ ID NO: 1728383 - DNA, 15 bp, Homo sapiens
gctttgaccctgtgg

SEQ ID NO: 1728384 - DNA, 15 bp, Homo sapiens
ctttgaccctgtggc

SEQ ID NO: 1728385 - DNA, 15 bp, Homo sapiens
tttgaccctgtggcc

SEQ ID NO: 1728386 - DNA, 15 bp, Homo sapiens
ttgaccctgtggccg

SEQ ID NO: 1728387 - DNA, 15 bp, Homo sapiens
tgaccctgtggccga

SEQ ID NO: 1728388 - DNA, 15 bp, Homo sapiens
gaccctgtggccgaa

SEQ ID NO: 1728389 - DNA, 15 bp, Homo sapiens
accctgtggccgaat

SEQ ID NO: 1728390 - DNA, 15 bp, Homo sapiens
ccctgtggccgaatt

SEQ ID NO: 1728391 - DNA, 15 bp, Homo sapiens
cctgtggccgaattg

SEQ ID NO: 1728392 - DNA, 15 bp, Homo sapiens
ctgtggccgaattgg

SEQ ID NO: 1728393 - DNA, 15 bp, Homo sapiens
tgtggccgaattggt

SEQ ID NO: 1728394 - DNA, 15 bp, Homo sapiens
gtggccgaattggta

SEQ ID NO: 1728395 - DNA, 15 bp, Homo sapiens
tggccgaattggtac

SEQ ID NO: 1728396 - DNA, 15 bp, Homo sapiens
ggccgaattggtacc

SEQ ID NO: 1728397 - DNA, 15 bp, Homo sapiens
gccgaattggtacct

SEQ ID NO: 1728398 - DNA, 15 bp, Homo sapiens
ccgaattggtaccta

SEQ ID NO: 1728399 - DNA, 15 bp, Homo sapiens
cgaattggtacctaa

SEQ ID NO: 1728400 - DNA, 15 bp, Homo sapiens
gaattggtacctaag

SEQ ID NO: 1728401 - DNA, 15 bp, Homo sapiens
aattggtacctaagg

SEQ ID NO: 1728402 - DNA, 15 bp, Homo sapiens
attggtacctaaggt

SEQ ID NO: 1728403 - DNA, 15 bp, Homo sapiens
ttggtacctaaggtg

SEQ ID NO: 1728404 - DNA, 15 bp, Homo sapiens
tggtacctaaggtgc

SEQ ID NO: 1728405 - DNA, 15 bp, Homo sapiens
ggtacctaaggtgca

SEQ ID NO: 1728406 - DNA, 15 bp, Homo sapiens
gtacctaaggtgcaa

SEQ ID NO: 1728407 - DNA, 15 bp, Homo sapiens
tacctaaggtgcaat

SEQ ID NO: 1728408 - DNA, 15 bp, Homo sapiens
acctaaggtgcaata

SEQ ID NO: 1728409 - DNA, 15 bp, Homo sapiens
cctaaggtgcaatac

SEQ ID NO: 1728410 - DNA, 15 bp, Homo sapiens
ctaaggtgcaataca

SEQ ID NO: 1728411 - DNA, 15 bp, Homo sapiens
taaggtgcaatacaa

SEQ ID NO: 1728412 - DNA, 15 bp, Homo sapiens
aaggtgcaatacaaa

SEQ ID NO: 1728413 - DNA, 15 bp, Homo sapiens
aggtgcaatacaaag

SEQ ID NO: 1728414 - DNA, 15 bp, Homo sapiens
ggtgcaatacaaagt

SEQ ID NO: 1728415 - DNA, 15 bp, Homo sapiens
gtgcaatacaaagtc

SEQ ID NO: 1728416 - DNA, 15 bp, Homo sapiens
tgcaatacaaagtct

SEQ ID NO: 1728417 - DNA, 15 bp, Homo sapiens
gcaatacaaagtctc

SEQ ID NO: 1728418 - DNA, 15 bp, Homo sapiens
caatacaaagtctcc

SEQ ID NO: 1728419 - DNA, 15 bp, Homo sapiens
aatacaaagtctcct

SEQ ID NO: 1728420 - DNA, 15 bp, Homo sapiens
atacaaagtctcctt

SEQ ID NO: 1728421 - DNA, 15 bp, Homo sapiens
tacaaagtctccttt

SEQ ID NO: 1728422 - DNA, 15 bp, Homo sapiens
acaaagtctccttta

SEQ ID NO: 1728423 - DNA, 15 bp, Homo sapiens
caaagtctcctttac

SEQ ID NO: 1728424 - DNA, 15 bp, Homo sapiens
aaagtctcctttact

SEQ ID NO: 1728425 - DNA, 15 bp, Homo sapiens
aagtctcctttactt

SEQ ID NO: 1728426 - DNA, 15 bp, Homo sapiens
agtctcctttacttt

SEQ ID NO: 1728427 - DNA, 15 bp, Homo sapiens
gtctcctttactttt

SEQ ID NO: 1728428 - DNA, 15 bp, Homo sapiens
tctcctttacttttc

SEQ ID NO: 1728429 - DNA, 15 bp, Homo sapiens
ctcctttacttttcc

SEQ ID NO: 1728430 - DNA, 15 bp, Homo sapiens
tcctttacttttcca

SEQ ID NO: 1728431 - DNA, 15 bp, Homo sapiens
cctttacttttccac

SEQ ID NO: 1728432 - DNA, 15 bp, Homo sapiens
ctttacttttccacc

SEQ ID NO: 1728433 - DNA, 15 bp, Homo sapiens
tttacttttccacct

SEQ ID NO: 1728434 - DNA, 15 bp, Homo sapiens
ttacttttccacctg

SEQ ID NO: 1728435 - DNA, 15 bp, Homo sapiens
tacttttccacctgc

SEQ ID NO: 1728436 - DNA, 15 bp, Homo sapiens
acttttccacctgct

SEQ ID NO: 1728437 - DNA, 15 bp, Homo sapiens
cttttccacctgctt

SEQ ID NO: 1728438 - DNA, 15 bp, Homo sapiens
ttttccacctgcttt

SEQ ID NO: 1728439 - DNA, 15 bp, Homo sapiens
tttccacctgctttt

SEQ ID NO: 1728440 - DNA, 15 bp, Homo sapiens
ttccacctgcttttc

SEQ ID NO: 1728441 - DNA, 15 bp, Homo sapiens
tccacctgcttttct

SEQ ID NO: 1728442 - DNA, 15 bp, Homo sapiens
ccacctgcttttctc

SEQ ID NO: 1728443 - DNA, 15 bp, Homo sapiens
cacctgcttttctca

SEQ ID NO: 1728444 - DNA, 15 bp, Homo sapiens
acctgcttttctcaa

SEQ ID NO: 1728445 - DNA, 15 bp, Homo sapiens
cctgcttttctcaag

SEQ ID NO: 1728446 - DNA, 15 bp, Homo sapiens
ctgcttttctcaagc

SEQ ID NO: 1728447 - DNA, 15 bp, Homo sapiens
tgcttttctcaagca

SEQ ID NO: 1728448 - DNA, 15 bp, Homo sapiens
gcttttctcaagcaa

SEQ ID NO: 1728449 - DNA, 15 bp, Homo sapiens
cttttctcaagcaaa

SEQ ID NO: 1728450 - DNA, 15 bp, Homo sapiens
ttttctcaagcaaag

SEQ ID NO: 1728451 - DNA, 15 bp, Homo sapiens
tttctcaagcaaaga

SEQ ID NO: 1728452 - DNA, 15 bp, Homo sapiens
ttctcaagcaaagag

SEQ ID NO: 1728453 - DNA, 15 bp, Homo sapiens
tctcaagcaaagagt

SEQ ID NO: 1728454 - DNA, 15 bp, Homo sapiens
ctcaagcaaagagtc

SEQ ID NO: 1728455 - DNA, 15 bp, Homo sapiens
tcaagcaaagagtct

SEQ ID NO: 1728456 - DNA, 15 bp, Homo sapiens
caagcaaagagtctc

SEQ ID NO: 1728457 - DNA, 15 bp, Homo sapiens
aagcaaagagtctct

SEQ ID NO: 1728458 - DNA, 15 bp, Homo sapiens
agcaaagagtctctc

SEQ ID NO: 1728459 - DNA, 15 bp, Homo sapiens
gcaaagagtctctca

SEQ ID NO: 1728460 - DNA, 15 bp, Homo sapiens
caaagagtctctcac

SEQ ID NO: 1728461 - DNA, 15 bp, Homo sapiens
aaagagtctctcacc

SEQ ID NO: 1728462 - DNA, 15 bp, Homo sapiens
aagagtctctcacca

SEQ ID NO: 1728463 - DNA, 15 bp, Homo sapiens
agagtctctcaccac

SEQ ID NO: 1728464 - DNA, 15 bp, Homo sapiens
gagtctctcaccacc

SEQ ID NO: 1728465 - DNA, 15 bp, Homo sapiens
agtctctcaccaccg

SEQ ID NO: 1728466 - DNA, 15 bp, Homo sapiens
gtctctcaccaccgc

SEQ ID NO: 1728467 - DNA, 15 bp, Homo sapiens
tctctcaccaccgcc

SEQ ID NO: 1728468 - DNA, 15 bp, Homo sapiens
ctctcaccaccgcca

SEQ ID NO: 1728469 - DNA, 15 bp, Homo sapiens
tctcaccaccgccac

SEQ ID NO: 1728470 - DNA, 15 bp, Homo sapiens
ctcaccaccgccacc

SEQ ID NO: 1728471 - DNA, 15 bp, Homo sapiens
tcaccaccgccacca

SEQ ID NO: 1728472 - DNA, 15 bp, Homo sapiens
caccaccgccaccat

SEQ ID NO: 1728473 - DNA, 15 bp, Homo sapiens
accaccgccaccata

SEQ ID NO: 1728474 - DNA, 15 bp, Homo sapiens
ccaccgccaccatag

SEQ ID NO: 1728475 - DNA, 15 bp, Homo sapiens
caccgccaccatagc

SEQ ID NO: 1728476 - DNA, 15 bp, Homo sapiens
accgccaccatagcg

SEQ ID NO: 1728477 - DNA, 15 bp, Homo sapiens
ccgccaccatagcgg

SEQ ID NO: 1728478 - DNA, 15 bp, Homo sapiens
cgccaccatagcggg

SEQ ID NO: 1728479 - DNA, 15 bp, Homo sapiens
gccaccatagcgggt

SEQ ID NO: 1728480 - DNA, 15 bp, Homo sapiens
ccaccatagcgggta

SEQ ID NO: 1728481 - DNA, 15 bp, Homo sapiens
caccatagcgggtaa

SEQ ID NO: 1728482 - DNA, 15 bp, Homo sapiens
accatagcgggtaat

SEQ ID NO: 1728483 - DNA, 15 bp, Homo sapiens
ccatagcgggtaatg

SEQ ID NO: 1728484 - DNA, 15 bp, Homo sapiens
catagcgggtaatgt

SEQ ID NO: 1728485 - DNA, 15 bp, Homo sapiens
atagcgggtaatgtg

SEQ ID NO: 1728486 - DNA, 15 bp, Homo sapiens
tagcgggtaatgtgc

SEQ ID NO: 1728487 - DNA, 15 bp, Homo sapiens
agcgggtaatgtgct

SEQ ID NO: 1728488 - DNA, 15 bp, Homo sapiens
gcgggtaatgtgctg

SEQ ID NO: 1728489 - DNA, 15 bp, Homo sapiens
cgggtaatgtgctgg

SEQ ID NO: 1728490 - DNA, 15 bp, Homo sapiens
gggtaatgtgctgga

SEQ ID NO: 1728491 - DNA, 15 bp, Homo sapiens
ggtaatgtgctggat

SEQ ID NO: 1728492 - DNA, 15 bp, Homo sapiens
gtaatgtgctggatc

SEQ ID NO: 1728493 - DNA, 15 bp, Homo sapiens
taatgtgctggatct

SEQ ID NO: 1728494 - DNA, 15 bp, Homo sapiens
aatgtgctggatctt

SEQ ID NO: 1728495 - DNA, 15 bp, Homo sapiens
atgtgctggatctta

SEQ ID NO: 1728496 - DNA, 15 bp, Homo sapiens
tgtgctggatcttac

SEQ ID NO: 1728497 - DNA, 15 bp, Homo sapiens
gtgctggatcttacc

SEQ ID NO: 1728498 - DNA, 15 bp, Homo sapiens
tgctggatcttacct

SEQ ID NO: 1728499 - DNA, 15 bp, Homo sapiens
gctggatcttaccta

SEQ ID NO: 1728500 - DNA, 15 bp, Homo sapiens
ctggatcttacctaa

SEQ ID NO: 1728501 - DNA, 15 bp, Homo sapiens
tggatcttacctaaa

SEQ ID NO: 1728502 - DNA, 15 bp, Homo sapiens
ggatcttacctaaag

SEQ ID NO: 1728503 - DNA, 15 bp, Homo sapiens
gatcttacctaaagc

SEQ ID NO: 1728504 - DNA, 15 bp, Homo sapiens
atcttacctaaagcc

SEQ ID NO: 1728505 - DNA, 15 bp, Homo sapiens
tcttacctaaagcca

SEQ ID NO: 1728506 - DNA, 15 bp, Homo sapiens
cttacctaaagccag

SEQ ID NO: 1728507 - DNA, 15 bp, Homo sapiens
ttacctaaagccagc

SEQ ID NO: 1728508 - DNA, 15 bp, Homo sapiens
tacctaaagccagca

SEQ ID NO: 1728509 - DNA, 15 bp, Homo sapiens
acctaaagccagcac

SEQ ID NO: 1728510 - DNA, 15 bp, Homo sapiens
cctaaagccagcaca

SEQ ID NO: 1728511 - DNA, 15 bp, Homo sapiens
ctaaagccagcacat

SEQ ID NO: 1728512 - DNA, 15 bp, Homo sapiens
taaagccagcacatc

SEQ ID NO: 1728513 - DNA, 15 bp, Homo sapiens
aaagccagcacatct

SEQ ID NO: 1728514 - DNA, 15 bp, Homo sapiens
aagccagcacatctc

SEQ ID NO: 1728515 - DNA, 15 bp, Homo sapiens
agccagcacatctca

SEQ ID NO: 1728516 - DNA, 15 bp, Homo sapiens
gccagcacatctcag

SEQ ID NO: 1728517 - DNA, 15 bp, Homo sapiens
ccagcacatctcaga

SEQ ID NO: 1728518 - DNA, 15 bp, Homo sapiens
cagcacatctcagag

SEQ ID NO: 1728519 - DNA, 15 bp, Homo sapiens
agcacatctcagagt

SEQ ID NO: 1728520 - DNA, 15 bp, Homo sapiens
gcacatctcagagtc

SEQ ID NO: 1728521 - DNA, 15 bp, Homo sapiens
cacatctcagagtcc

SEQ ID NO: 1728522 - DNA, 15 bp, Homo sapiens
acatctcagagtcct

SEQ ID NO: 1728523 - DNA, 15 bp, Homo sapiens
catctcagagtccta

SEQ ID NO: 1728524 - DNA, 15 bp, Homo sapiens
atctcagagtcctac

SEQ ID NO: 1728525 - DNA, 15 bp, Homo sapiens
tctcagagtcctacc

SEQ ID NO: 1728526 - DNA, 15 bp, Homo sapiens
ctcagagtcctaccc

SEQ ID NO: 1728527 - DNA, 15 bp, Homo sapiens
tcagagtcctaccca

SEQ ID NO: 1728528 - DNA, 15 bp, Homo sapiens
cagagtcctacccaa

SEQ ID NO: 1728529 - DNA, 15 bp, Homo sapiens
agagtcctacccaag

SEQ ID NO: 1728530 - DNA, 15 bp, Homo sapiens
gagtcctacccaagg

SEQ ID NO: 1728531 - DNA, 15 bp, Homo sapiens
agtcctacccaaggt

SEQ ID NO: 1728532 - DNA, 15 bp, Homo sapiens
gtcctacccaaggtc

SEQ ID NO: 1728533 - DNA, 15 bp, Homo sapiens
tcctacccaaggtcc

SEQ ID NO: 1728534 - DNA, 15 bp, Homo sapiens
cctacccaaggtcca

SEQ ID NO: 1728535 - DNA, 15 bp, Homo sapiens
ctacccaaggtccat

SEQ ID NO: 1728536 - DNA, 15 bp, Homo sapiens
tacccaaggtccatg

SEQ ID NO: 1728537 - DNA, 15 bp, Homo sapiens
acccaaggtccatgt

SEQ ID NO: 1728538 - DNA, 15 bp, Homo sapiens
cccaaggtccatgtc

SEQ ID NO: 1728539 - DNA, 15 bp, Homo sapiens
ccaaggtccatgtcc

SEQ ID NO: 1728540 - DNA, 15 bp, Homo sapiens
caaggtccatgtcca

SEQ ID NO: 1728541 - DNA, 15 bp, Homo sapiens
aaggtccatgtccat

SEQ ID NO: 1728542 - DNA, 15 bp, Homo sapiens
aggtccatgtccatg

SEQ ID NO: 1728543 - DNA, 15 bp, Homo sapiens
ggtccatgtccatgg

SEQ ID NO: 1728544 - DNA, 15 bp, Homo sapiens
gtccatgtccatggc

SEQ ID NO: 1728545 - DNA, 15 bp, Homo sapiens
tccatgtccatggcg

SEQ ID NO: 1728546 - DNA, 15 bp, Homo sapiens
ccatgtccatggcgt

SEQ ID NO: 1728547 - DNA, 15 bp, Homo sapiens
catgtccatggcgta

SEQ ID NO: 1728548 - DNA, 15 bp, Homo sapiens
atgtccatggcgtac

SEQ ID NO: 1728549 - DNA, 15 bp, Homo sapiens
tgtccatggcgtact

SEQ ID NO: 1728550 - DNA, 15 bp, Homo sapiens
gtccatggcgtacta

SEQ ID NO: 1728551 - DNA, 15 bp, Homo sapiens
tccatggcgtactat

SEQ ID NO: 1728552 - DNA, 15 bp, Homo sapiens
ccatggcgtactatc

SEQ ID NO: 1728553 - DNA, 15 bp, Homo sapiens
catggcgtactatct

SEQ ID NO: 1728554 - DNA, 15 bp, Homo sapiens
atggcgtactatctg

SEQ ID NO: 1728555 - DNA, 15 bp, Homo sapiens
tggcgtactatctgg

SEQ ID NO: 1728556 - DNA, 15 bp, Homo sapiens
ggcgtactatctggg

SEQ ID NO: 1728557 - DNA, 15 bp, Homo sapiens
gcgtactatctgggc

SEQ ID NO: 1728558 - DNA, 15 bp, Homo sapiens
cgtactatctgggca

SEQ ID NO: 1728559 - DNA, 15 bp, Homo sapiens
gtactatctgggcat

SEQ ID NO: 1728560 - DNA, 15 bp, Homo sapiens
tactatctgggcatc

SEQ ID NO: 1728561 - DNA, 15 bp, Homo sapiens
actatctgggcatca

SEQ ID NO: 1728562 - DNA, 15 bp, Homo sapiens
ctatctgggcatcac

SEQ ID NO: 1728563 - DNA, 15 bp, Homo sapiens
tatctgggcatcact

SEQ ID NO: 1728564 - DNA, 15 bp, Homo sapiens
atctgggcatcactg

SEQ ID NO: 1728565 - DNA, 15 bp, Homo sapiens
tctgggcatcactga

SEQ ID NO: 1728566 - DNA, 15 bp, Homo sapiens
ctgggcatcactgat

SEQ ID NO: 1728567 - DNA, 15 bp, Homo sapiens
tgggcatcactgatg

SEQ ID NO: 1728568 - DNA, 15 bp, Homo sapiens
gggcatcactgatgg

SEQ ID NO: 1728569 - DNA, 15 bp, Homo sapiens
ggcatcactgatggt

SEQ ID NO: 1728570 - DNA, 15 bp, Homo sapiens
gcatcactgatggtt

SEQ ID NO: 1728571 - DNA, 15 bp, Homo sapiens
catcactgatggtta

SEQ ID NO: 1728572 - DNA, 15 bp, Homo sapiens
atcactgatggttat

SEQ ID NO: 1728573 - DNA, 15 bp, Homo sapiens
tcactgatggttatt

SEQ ID NO: 1728574 - DNA, 15 bp, Homo sapiens
cactgatggttattc

SEQ ID NO: 1728575 - DNA, 15 bp, Homo sapiens
actgatggttattcg

SEQ ID NO: 1728576 - DNA, 15 bp, Homo sapiens
ctgatggttattcgg

SEQ ID NO: 1728577 - DNA, 15 bp, Homo sapiens
tgatggttattcggg

SEQ ID NO: 1728578 - DNA, 15 bp, Homo sapiens
gatggttattcgggg

SEQ ID NO: 1728579 - DNA, 15 bp, Homo sapiens
atggttattcggggc

SEQ ID NO: 1728580 - DNA, 15 bp, Homo sapiens
tggttattcggggcc

SEQ ID NO: 1728581 - DNA, 15 bp, Homo sapiens
ggttattcggggccc

SEQ ID NO: 1728582 - DNA, 15 bp, Homo sapiens
gttattcggggccca

SEQ ID NO: 1728583 - DNA, 15 bp, Homo sapiens
ttattcggggcccaa

SEQ ID NO: 1728584 - DNA, 15 bp, Homo sapiens
tattcggggcccaaa

SEQ ID NO: 1728585 - DNA, 15 bp, Homo sapiens
attcggggcccaaag

SEQ ID NO: 1728586 - DNA, 15 bp, Homo sapiens
ttcggggcccaaagg

SEQ ID NO: 1728587 - DNA, 15 bp, Homo sapiens
tcggggcccaaaggt

SEQ ID NO: 1728588 - DNA, 15 bp, Homo sapiens
cggggcccaaaggtc

SEQ ID NO: 1728589 - DNA, 15 bp, Homo sapiens
ggggcccaaaggtca

SEQ ID NO: 1728590 - DNA, 15 bp, Homo sapiens
gggcccaaaggtcag

SEQ ID NO: 1728591 - DNA, 15 bp, Homo sapiens
ggcccaaaggtcagc

SEQ ID NO: 1728592 - DNA, 15 bp, Homo sapiens
gcccaaaggtcagca

SEQ ID NO: 1728593 - DNA, 15 bp, Homo sapiens
cccaaaggtcagcaa

SEQ ID NO: 1728594 - DNA, 15 bp, Homo sapiens
ccaaaggtcagcaag

SEQ ID NO: 1728595 - DNA, 15 bp, Homo sapiens
caaaggtcagcaagt

SEQ ID NO: 1728596 - DNA, 15 bp, Homo sapiens
aaaggtcagcaagta

SEQ ID NO: 1728597 - DNA, 15 bp, Homo sapiens
aaggtcagcaagtaa

SEQ ID NO: 1728598 - DNA, 15 bp, Homo sapiens
aggtcagcaagtaat

SEQ ID NO: 1728599 - DNA, 15 bp, Homo sapiens
ggtcagcaagtaatg

SEQ ID NO: 1728600 - DNA, 15 bp, Homo sapiens
gtcagcaagtaatga

SEQ ID NO: 1728601 - DNA, 15 bp, Homo sapiens
tcagcaagtaatgag

SEQ ID NO: 1728602 - DNA, 15 bp, Homo sapiens
cagcaagtaatgagt

SEQ ID NO: 1728603 - DNA, 15 bp, Homo sapiens
agcaagtaatgagtc

SEQ ID NO: 1728604 - DNA, 15 bp, Homo sapiens
gcaagtaatgagtcc

SEQ ID NO: 1728605 - DNA, 15 bp, Homo sapiens
caagtaatgagtcct

SEQ ID NO: 1728606 - DNA, 15 bp, Homo sapiens
aagtaatgagtcctg

SEQ ID NO: 1728607 - DNA, 15 bp, Homo sapiens
agtaatgagtcctgc

SEQ ID NO: 1728608 - DNA, 15 bp, Homo sapiens
gtaatgagtcctgct

SEQ ID NO: 1728609 - DNA, 15 bp, Homo sapiens
taatgagtcctgcta

SEQ ID NO: 1728610 - DNA, 15 bp, Homo sapiens
aatgagtcctgctag

SEQ ID NO: 1728611 - DNA, 15 bp, Homo sapiens
atgagtcctgctagg

SEQ ID NO: 1728612 - DNA, 15 bp, Homo sapiens
tgagtcctgctagga

SEQ ID NO: 1728613 - DNA, 15 bp, Homo sapiens
gagtcctgctaggac

SEQ ID NO: 1728614 - DNA, 15 bp, Homo sapiens
agtcctgctaggact

SEQ ID NO: 1728615 - DNA, 15 bp, Homo sapiens
gtcctgctaggactg

SEQ ID NO: 1728616 - DNA, 15 bp, Homo sapiens
tcctgctaggactgg

SEQ ID NO: 1728617 - DNA, 15 bp, Homo sapiens
cctgctaggactggt

SEQ ID NO: 1728618 - DNA, 15 bp, Homo sapiens
ctgctaggactggtt

SEQ ID NO: 1728619 - DNA, 15 bp, Homo sapiens
tgctaggactggttc

SEQ ID NO: 1728620 - DNA, 15 bp, Homo sapiens
gctaggactggttcc

SEQ ID NO: 1728621 - DNA, 15 bp, Homo sapiens
ctaggactggttcct

SEQ ID NO: 1728622 - DNA, 15 bp, Homo sapiens
taggactggttcctt

SEQ ID NO: 1728623 - DNA, 15 bp, Homo sapiens
aggactggttccttc

SEQ ID NO: 1728624 - DNA, 15 bp, Homo sapiens
ggactggttccttcc

SEQ ID NO: 1728625 - DNA, 15 bp, Homo sapiens
gactggttccttccc

SEQ ID NO: 1728626 - DNA, 15 bp, Homo sapiens
actggttccttccct

SEQ ID NO: 1728627 - DNA, 15 bp, Homo sapiens
ctggttccttccctt

SEQ ID NO: 1728628 - DNA, 15 bp, Homo sapiens
tggttccttcccttc

SEQ ID NO: 1728629 - DNA, 15 bp, Homo sapiens
ggttccttcccttca

SEQ ID NO: 1728630 - DNA, 15 bp, Homo sapiens
gttccttcccttcaa

SEQ ID NO: 1728631 - DNA, 15 bp, Homo sapiens
ttccttcccttcaaa

SEQ ID NO: 1728632 - DNA, 15 bp, Homo sapiens
tccttcccttcaaag

SEQ ID NO: 1728633 - DNA, 15 bp, Homo sapiens
ccttcccttcaaagc

SEQ ID NO: 1728634 - DNA, 15 bp, Homo sapiens
cttcccttcaaagca

SEQ ID NO: 1728635 - DNA, 15 bp, Homo sapiens
ttcccttcaaagcag

SEQ ID NO: 1728636 - DNA, 15 bp, Homo sapiens
tcccttcaaagcagt

SEQ ID NO: 1728637 - DNA, 15 bp, Homo sapiens
cccttcaaagcagta

SEQ ID NO: 1728638 - DNA, 15 bp, Homo sapiens
ccttcaaagcagtag

SEQ ID NO: 1728639 - DNA, 15 bp, Homo sapiens
cttcaaagcagtaga

SEQ ID NO: 1728640 - DNA, 15 bp, Homo sapiens
ttcaaagcagtagat

SEQ ID NO: 1728641 - DNA, 15 bp, Homo sapiens
tcaaagcagtagatt

SEQ ID NO: 1728642 - DNA, 15 bp, Homo sapiens
caaagcagtagattc

SEQ ID NO: 1728643 - DNA, 15 bp, Homo sapiens
aaagcagtagattcc

SEQ ID NO: 1728644 - DNA, 15 bp, Homo sapiens
aagcagtagattccc

SEQ ID NO: 1728645 - DNA, 15 bp, Homo sapiens
agcagtagattccct

SEQ ID NO: 1728646 - DNA, 15 bp, Homo sapiens
gcagtagattccctt

SEQ ID NO: 1728647 - DNA, 15 bp, Homo sapiens
cagtagattcccttc

SEQ ID NO: 1728648 - DNA, 15 bp, Homo sapiens
agtagattcccttct

SEQ ID NO: 1728649 - DNA, 15 bp, Homo sapiens
gtagattcccttctt

SEQ ID NO: 1728650 - DNA, 15 bp, Homo sapiens
tagattcccttcttg

SEQ ID NO: 1728651 - DNA, 15 bp, Homo sapiens
agattcccttcttgt

SEQ ID NO: 1728652 - DNA, 15 bp, Homo sapiens
gattcccttcttgtc

SEQ ID NO: 1728653 - DNA, 15 bp, Homo sapiens
attcccttcttgtcc

SEQ ID NO: 1728654 - DNA, 15 bp, Homo sapiens
ttcccttcttgtcca

SEQ ID NO: 1728655 - DNA, 15 bp, Homo sapiens
tcccttcttgtccag

SEQ ID NO: 1728656 - DNA, 15 bp, Homo sapiens
cccttcttgtccagc

SEQ ID NO: 1728657 - DNA, 15 bp, Homo sapiens
ccttcttgtccagcg

SEQ ID NO: 1728658 - DNA, 15 bp, Homo sapiens
cttcttgtccagcgt

SEQ ID NO: 1728659 - DNA, 15 bp, Homo sapiens
ttcttgtccagcgta

SEQ ID NO: 1728660 - DNA, 15 bp, Homo sapiens
tcttgtccagcgtat

SEQ ID NO: 1728661 - DNA, 15 bp, Homo sapiens
cttgtccagcgtatg

SEQ ID NO: 1728662 - DNA, 15 bp, Homo sapiens
ttgtccagcgtatgt

SEQ ID NO: 1728663 - DNA, 15 bp, Homo sapiens
tgtccagcgtatgtc

SEQ ID NO: 1728664 - DNA, 15 bp, Homo sapiens
gtccagcgtatgtct

SEQ ID NO: 1728665 - DNA, 15 bp, Homo sapiens
tccagcgtatgtcta

SEQ ID NO: 1728666 - DNA, 15 bp, Homo sapiens
ccagcgtatgtctag

SEQ ID NO: 1728667 - DNA, 15 bp, Homo sapiens
cagcgtatgtctaga

SEQ ID NO: 1728668 - DNA, 15 bp, Homo sapiens
agcgtatgtctagaa

SEQ ID NO: 1728669 - DNA, 15 bp, Homo sapiens
gcgtatgtctagaaa

SEQ ID NO: 1728670 - DNA, 15 bp, Homo sapiens
cgtatgtctagaaat

SEQ ID NO: 1728671 - DNA, 15 bp, Homo sapiens
gtatgtctagaaatg

SEQ ID NO: 1728672 - DNA, 15 bp, Homo sapiens
tatgtctagaaatgt

SEQ ID NO: 1728673 - DNA, 15 bp, Homo sapiens
atgtctagaaatgtc

SEQ ID NO: 1728674 - DNA, 15 bp, Homo sapiens
tgtctagaaatgtcc

SEQ ID NO: 1728675 - DNA, 15 bp, Homo sapiens
gtctagaaatgtcca

SEQ ID NO: 1728676 - DNA, 15 bp, Homo sapiens
tctagaaatgtccag

SEQ ID NO: 1728677 - DNA, 15 bp, Homo sapiens
ctagaaatgtccagg

SEQ ID NO: 1728678 - DNA, 15 bp, Homo sapiens
tagaaatgtccagga

SEQ ID NO: 1728679 - DNA, 15 bp, Homo sapiens
agaaatgtccaggag

SEQ ID NO: 1728680 - DNA, 15 bp, Homo sapiens
gaaatgtccaggagc

SEQ ID NO: 1728681 - DNA, 15 bp, Homo sapiens
aaatgtccaggagct

SEQ ID NO: 1728682 - DNA, 15 bp, Homo sapiens
aatgtccaggagcta

SEQ ID NO: 1728683 - DNA, 15 bp, Homo sapiens
atgtccaggagctag

SEQ ID NO: 1728684 - DNA, 15 bp, Homo sapiens
tgtccaggagctagg

SEQ ID NO: 1728685 - DNA, 15 bp, Homo sapiens
gtccaggagctaggg

SEQ ID NO: 1728686 - DNA, 15 bp, Homo sapiens
tccaggagctagggc

SEQ ID NO: 1728687 - DNA, 15 bp, Homo sapiens
ccaggagctagggcc

SEQ ID NO: 1728688 - DNA, 15 bp, Homo sapiens
caggagctagggcct

SEQ ID NO: 1728689 - DNA, 15 bp, Homo sapiens
aggagctagggcctg

SEQ ID NO: 1728690 - DNA, 15 bp, Homo sapiens
ggagctagggcctgg

SEQ ID NO: 1728691 - DNA, 15 bp, Homo sapiens
gagctagggcctggg

SEQ ID NO: 1728692 - DNA, 15 bp, Homo sapiens
agctagggcctggga

SEQ ID NO: 1728693 - DNA, 15 bp, Homo sapiens
gctagggcctgggat

SEQ ID NO: 1728694 - DNA, 15 bp, Homo sapiens
ctagggcctgggatg

SEQ ID NO: 1728695 - DNA, 15 bp, Homo sapiens
tagggcctgggatgt

SEQ ID NO: 1728696 - DNA, 15 bp, Homo sapiens
agggcctgggatgtg

SEQ ID NO: 1728697 - DNA, 15 bp, Homo sapiens
gggcctgggatgtga

SEQ ID NO: 1728698 - DNA, 15 bp, Homo sapiens
cctgggatgtgagtc

SEQ ID NO: 1728699 - DNA, 15 bp, Homo sapiens
ctgggatgtgagtct

SEQ ID NO: 1728700 - DNA, 15 bp, Homo sapiens
tgggatgtgagtctc

SEQ ID NO: 1728701 - DNA, 15 bp, Homo sapiens
gggatgtgagtctca

SEQ ID NO: 1728702 - DNA, 15 bp, Homo sapiens
ggatgtgagtctcat

SEQ ID NO: 1728703 - DNA, 15 bp, Homo sapiens
gatgtgagtctcatg

SEQ ID NO: 1728704 - DNA, 15 bp, Homo sapiens
atgtgagtctcatga

SEQ ID NO: 1728705 - DNA, 15 bp, Homo sapiens
tgtgagtctcatgac

SEQ ID NO: 1728706 - DNA, 15 bp, Homo sapiens
gtgagtctcatgact

SEQ ID NO: 1728707 - DNA, 15 bp, Homo sapiens
tgagtctcatgactc

SEQ ID NO: 1728708 - DNA, 15 bp, Homo sapiens
gagtctcatgactct

SEQ ID NO: 1728709 - DNA, 15 bp, Homo sapiens
agtctcatgactctg

SEQ ID NO: 1728710 - DNA, 15 bp, Homo sapiens
gtctcatgactctga

SEQ ID NO: 1728711 - DNA, 15 bp, Homo sapiens
tctcatgactctgac

SEQ ID NO: 1728712 - DNA, 15 bp, Homo sapiens
ctcatgactctgacc

SEQ ID NO: 1728713 - DNA, 15 bp, Homo sapiens
tcatgactctgacca

SEQ ID NO: 1728714 - DNA, 15 bp, Homo sapiens
catgactctgaccag

SEQ ID NO: 1728715 - DNA, 15 bp, Homo sapiens
atgactctgaccagt

SEQ ID NO: 1728716 - DNA, 15 bp, Homo sapiens
tgactctgaccagtc

SEQ ID NO: 1728717 - DNA, 15 bp, Homo sapiens
gactctgaccagtcc

SEQ ID NO: 1728718 - DNA, 15 bp, Homo sapiens
actctgaccagtccc

SEQ ID NO: 1728719 - DNA, 15 bp, Homo sapiens
ctctgaccagtcccc

SEQ ID NO: 1728720 - DNA, 15 bp, Homo sapiens
tctgaccagtcccct

SEQ ID NO: 1728721 - DNA, 15 bp, Homo sapiens
ctgaccagtccccta

SEQ ID NO: 1728722 - DNA, 15 bp, Homo sapiens
tgaccagtcccctat

SEQ ID NO: 1728723 - DNA, 15 bp, Homo sapiens
gaccagtcccctatc

SEQ ID NO: 1728724 - DNA, 15 bp, Homo sapiens
accagtcccctatcc

SEQ ID NO: 1728725 - DNA, 15 bp, Homo sapiens
ccagtcccctatcct

SEQ ID NO: 1728726 - DNA, 15 bp, Homo sapiens
cagtcccctatccta

SEQ ID NO: 1728727 - DNA, 15 bp, Homo sapiens
agtcccctatcctac

SEQ ID NO: 1728728 - DNA, 15 bp, Homo sapiens
gtcccctatcctact

SEQ ID NO: 1728729 - DNA, 15 bp, Homo sapiens
tcccctatcctactg

SEQ ID NO: 1728730 - DNA, 15 bp, Homo sapiens
cccctatcctactgt

SEQ ID NO: 1728731 - DNA, 15 bp, Homo sapiens
ccctatcctactgtg

SEQ ID NO: 1728732 - DNA, 15 bp, Homo sapiens
cctatcctactgtgg

SEQ ID NO: 1728733 - DNA, 15 bp, Homo sapiens
ctatcctactgtggc

SEQ ID NO: 1728734 - DNA, 15 bp, Homo sapiens
tatcctactgtggct

SEQ ID NO: 1728735 - DNA, 15 bp, Homo sapiens
atcctactgtggcta

SEQ ID NO: 1728736 - DNA, 15 bp, Homo sapiens
tcctactgtggctaa

SEQ ID NO: 1728737 - DNA, 15 bp, Homo sapiens
cctactgtggctaag

SEQ ID NO: 1728738 - DNA, 15 bp, Homo sapiens
ctactgtggctaagc

SEQ ID NO: 1728739 - DNA, 15 bp, Homo sapiens
tactgtggctaagct

SEQ ID NO: 1728740 - DNA, 15 bp, Homo sapiens
actgtggctaagctg

SEQ ID NO: 1728741 - DNA, 15 bp, Homo sapiens
ctgtggctaagctgg

SEQ ID NO: 1728742 - DNA, 15 bp, Homo sapiens
tgtggctaagctggt

SEQ ID NO: 1728743 - DNA, 15 bp, Homo sapiens
gtggctaagctggta

SEQ ID NO: 1728744 - DNA, 15 bp, Homo sapiens
tggctaagctggtaa

SEQ ID NO: 1728745 - DNA, 15 bp, Homo sapiens
ggctaagctggtaac

SEQ ID NO: 1728746 - DNA, 15 bp, Homo sapiens
gctaagctggtaacc

SEQ ID NO: 1728747 - DNA, 15 bp, Homo sapiens
ctaagctggtaacca

SEQ ID NO: 1728748 - DNA, 15 bp, Homo sapiens
taagctggtaaccaa

SEQ ID NO: 1728749 - DNA, 15 bp, Homo sapiens
aagctggtaaccaag

SEQ ID NO: 1728750 - DNA, 15 bp, Homo sapiens
agctggtaaccaaga

SEQ ID NO: 1728751 - DNA, 15 bp, Homo sapiens
gctggtaaccaagat

SEQ ID NO: 1728752 - DNA, 15 bp, Homo sapiens
ctggtaaccaagatg

SEQ ID NO: 1728753 - DNA, 15 bp, Homo sapiens
tggtaaccaagatgc

SEQ ID NO: 1728754 - DNA, 15 bp, Homo sapiens
ggtaaccaagatgca

SEQ ID NO: 1728755 - DNA, 15 bp, Homo sapiens
gtaaccaagatgcaa

SEQ ID NO: 1728756 - DNA, 15 bp, Homo sapiens
taaccaagatgcaaa

SEQ ID NO: 1728757 - DNA, 15 bp, Homo sapiens
aaccaagatgcaaaa

SEQ ID NO: 1728758 - DNA, 15 bp, Homo sapiens
accaagatgcaaaat

SEQ ID NO: 1728759 - DNA, 15 bp, Homo sapiens
ccaagatgcaaaata

SEQ ID NO: 1728760 - DNA, 15 bp, Homo sapiens
caagatgcaaaataa

SEQ ID NO: 1728761 - DNA, 15 bp, Homo sapiens
aagatgcaaaataaa

SEQ ID NO: 1728762 - DNA, 15 bp, Homo sapiens
agatgcaaaataaag

SEQ ID NO: 1728763 - DNA, 15 bp, Homo sapiens
gatgcaaaataaagt

SEQ ID NO: 1728764 - DNA, 15 bp, Homo sapiens
atgcaaaataaagtc

SEQ ID NO: 1728765 - DNA, 15 bp, Homo sapiens
tgcaaaataaagtcc

SEQ ID NO: 1728766 - DNA, 15 bp, Homo sapiens
gcaaaataaagtcct

SEQ ID NO: 1728767 - DNA, 15 bp, Homo sapiens
caaaataaagtcctc

SEQ ID NO: 1728768 - DNA, 15 bp, Homo sapiens
aaaataaagtcctct

SEQ ID NO: 1728769 - DNA, 15 bp, Homo sapiens
aaataaagtcctctt

SEQ ID NO: 1728770 - DNA, 15 bp, Homo sapiens
aataaagtcctcttt

SEQ ID NO: 1728771 - DNA, 15 bp, Homo sapiens
ataaagtcctcttta

SEQ ID NO: 1728772 - DNA, 15 bp, Homo sapiens
taaagtcctctttac

SEQ ID NO: 1728773 - DNA, 15 bp, Homo sapiens
aaagtcctctttact

SEQ ID NO: 1728774 - DNA, 15 bp, Homo sapiens
aagtcctctttactc

SEQ ID NO: 1728775 - DNA, 15 bp, Homo sapiens
agtcctctttactct

SEQ ID NO: 1728776 - DNA, 15 bp, Homo sapiens
gtcctctttactctt

SEQ ID NO: 1728777 - DNA, 15 bp, Homo sapiens
tcctctttactcttc

SEQ ID NO: 1728778 - DNA, 15 bp, Homo sapiens
cctctttactcttcc

SEQ ID NO: 1728779 - DNA, 15 bp, Homo sapiens
ctctttactcttccc

SEQ ID NO: 1728780 - DNA, 15 bp, Homo sapiens
tctttactcttccct

SEQ ID NO: 1728781 - DNA, 15 bp, Homo sapiens
ctttactcttccctt

SEQ ID NO: 1728782 - DNA, 15 bp, Homo sapiens
tttactcttcccttt

SEQ ID NO: 1728783 - DNA, 15 bp, Homo sapiens
ttactcttccctttc

SEQ ID NO: 1728784 - DNA, 15 bp, Homo sapiens
tactcttccctttcc

SEQ ID NO: 1728785 - DNA, 15 bp, Homo sapiens
actcttccctttcct

SEQ ID NO: 1728786 - DNA, 15 bp, Homo sapiens
ctcttccctttcctc

SEQ ID NO: 1728787 - DNA, 15 bp, Homo sapiens
tcttccctttcctct

SEQ ID NO: 1728788 - DNA, 15 bp, Homo sapiens
cttccctttcctctc

SEQ ID NO: 1728789 - DNA, 15 bp, Homo sapiens
ttccctttcctctcc

SEQ ID NO: 1728790 - DNA, 15 bp, Homo sapiens
tccctttcctctcct

SEQ ID NO: 1728791 - DNA, 15 bp, Homo sapiens
ccctttcctctcctc

SEQ ID NO: 1728792 - DNA, 15 bp, Homo sapiens
cctttcctctcctca

SEQ ID NO: 1728793 - DNA, 15 bp, Homo sapiens
ctttcctctcctcaa

SEQ ID NO: 1728794 - DNA, 15 bp, Homo sapiens
tttcctctcctcaag

SEQ ID NO: 1728795 - DNA, 15 bp, Homo sapiens
ttcctctcctcaagc

SEQ ID NO: 1728796 - DNA, 15 bp, Homo sapiens
tcctctcctcaagca

SEQ ID NO: 1728797 - DNA, 15 bp, Homo sapiens
cctctcctcaagcag

SEQ ID NO: 1728798 - DNA, 15 bp, Homo sapiens
ctctcctcaagcaga

SEQ ID NO: 1728799 - DNA, 15 bp, Homo sapiens
tctcctcaagcagaa

SEQ ID NO: 1728800 - DNA, 15 bp, Homo sapiens
ctcctcaagcagaag

SEQ ID NO: 1728801 - DNA, 15 bp, Homo sapiens
tcctcaagcagaagg

SEQ ID NO: 1728802 - DNA, 15 bp, Homo sapiens
cctcaagcagaagga

SEQ ID NO: 1728803 - DNA, 15 bp, Homo sapiens
ctcaagcagaaggaa

SEQ ID NO: 1728804 - DNA, 15 bp, Homo sapiens
tcaagcagaaggaag

SEQ ID NO: 1728805 - DNA, 15 bp, Homo sapiens
caagcagaaggaagg

SEQ ID NO: 1728806 - DNA, 15 bp, Homo sapiens
aagcagaaggaagga

SEQ ID NO: 1728807 - DNA, 15 bp, Homo sapiens
agcagaaggaaggaa

SEQ ID NO: 1728808 - DNA, 15 bp, Homo sapiens
gcagaaggaaggaat

SEQ ID NO: 1728809 - DNA, 15 bp, Homo sapiens
cagaaggaaggaatc

SEQ ID NO: 1728810 - DNA, 15 bp, Homo sapiens
agaaggaaggaatct

SEQ ID NO: 1728811 - DNA, 15 bp, Homo sapiens
gaaggaaggaatctc

SEQ ID NO: 1728812 - DNA, 15 bp, Homo sapiens
aaggaaggaatctct

SEQ ID NO: 1728813 - DNA, 15 bp, Homo sapiens
aggaaggaatctctt

SEQ ID NO: 1728814 - DNA, 15 bp, Homo sapiens
ggaaggaatctcttt

SEQ ID NO: 1728815 - DNA, 15 bp, Homo sapiens
gaaggaatctctttt

SEQ ID NO: 1728816 - DNA, 15 bp, Homo sapiens
aaggaatctcttttg

SEQ ID NO: 1728817 - DNA, 15 bp, Homo sapiens
aggaatctcttttgg

SEQ ID NO: 1728818 - DNA, 15 bp, Homo sapiens
ggaatctcttttgga

SEQ ID NO: 1728819 - DNA, 15 bp, Homo sapiens
gaatctcttttggag

SEQ ID NO: 1728820 - DNA, 15 bp, Homo sapiens
aatctcttttggagc

SEQ ID NO: 1728821 - DNA, 15 bp, Homo sapiens
atctcttttggagcc

SEQ ID NO: 1728822 - DNA, 15 bp, Homo sapiens
tctcttttggagcca

SEQ ID NO: 1728823 - DNA, 15 bp, Homo sapiens
ctcttttggagccat

SEQ ID NO: 1728824 - DNA, 15 bp, Homo sapiens
tcttttggagccatg

SEQ ID NO: 1728825 - DNA, 15 bp, Homo sapiens
cttttggagccatga

SEQ ID NO: 1728826 - DNA, 15 bp, Homo sapiens
ttttggagccatgag

SEQ ID NO: 1728827 - DNA, 15 bp, Homo sapiens
tttggagccatgagc

SEQ ID NO: 1728828 - DNA, 15 bp, Homo sapiens
ttggagccatgagct

SEQ ID NO: 1728829 - DNA, 15 bp, Homo sapiens
tggagccatgagcta

SEQ ID NO: 1728830 - DNA, 15 bp, Homo sapiens
ggagccatgagctat

SEQ ID NO: 1728831 - DNA, 15 bp, Homo sapiens
gagccatgagctatg

SEQ ID NO: 1728832 - DNA, 15 bp, Homo sapiens
agccatgagctatgc

SEQ ID NO: 1728833 - DNA, 15 bp, Homo sapiens
gccatgagctatgct

SEQ ID NO: 1728834 - DNA, 15 bp, Homo sapiens
ccatgagctatgctg

SEQ ID NO: 1728835 - DNA, 15 bp, Homo sapiens
catgagctatgctgc

SEQ ID NO: 1728836 - DNA, 15 bp, Homo sapiens
atgagctatgctgcc

SEQ ID NO: 1728837 - DNA, 15 bp, Homo sapiens
tgagctatgctgcct

SEQ ID NO: 1728838 - DNA, 15 bp, Homo sapiens
gagctatgctgcctg

SEQ ID NO: 1728839 - DNA, 15 bp, Homo sapiens
agctatgctgcctgg

SEQ ID NO: 1728840 - DNA, 15 bp, Homo sapiens
gctatgctgcctggg

SEQ ID NO: 1728841 - DNA, 15 bp, Homo sapiens
ctatgctgcctgggg

SEQ ID NO: 1728842 - DNA, 15 bp, Homo sapiens
tatgctgcctggggt

SEQ ID NO: 1728843 - DNA, 15 bp, Homo sapiens
atgctgcctggggtt

SEQ ID NO: 1728844 - DNA, 15 bp, Homo sapiens
tgctgcctggggttg

SEQ ID NO: 1728845 - DNA, 15 bp, Homo sapiens
gctgcctggggttgg

SEQ ID NO: 1728846 - DNA, 15 bp, Homo sapiens
ctgcctggggttggg

SEQ ID NO: 1728847 - DNA, 15 bp, Homo sapiens
tgcctggggttgggg

SEQ ID NO: 1728848 - DNA, 15 bp, Homo sapiens
gcctggggttggggg

SEQ ID NO: 1728849 - DNA, 15 bp, Homo sapiens
cctggggttggggga

SEQ ID NO: 1728850 - DNA, 15 bp, Homo sapiens
ctggggttgggggaa

SEQ ID NO: 1728851 - DNA, 15 bp, Homo sapiens
tggggttgggggaag

SEQ ID NO: 1728852 - DNA, 15 bp, Homo sapiens
ggggttgggggaagg

SEQ ID NO: 1728853 - DNA, 15 bp, Homo sapiens
gggttgggggaaggg

SEQ ID NO: 1728854 - DNA, 15 bp, Homo sapiens
ggttgggggaagggt

SEQ ID NO: 1728855 - DNA, 15 bp, Homo sapiens
gttgggggaagggtg

SEQ ID NO: 1728856 - DNA, 15 bp, Homo sapiens
ttgggggaagggtgg

SEQ ID NO: 1728857 - DNA, 15 bp, Homo sapiens
tgggggaagggtggt

SEQ ID NO: 1728858 - DNA, 15 bp, Homo sapiens
gggggaagggtggtg

SEQ ID NO: 1728859 - DNA, 15 bp, Homo sapiens
ggggaagggtggtgc

SEQ ID NO: 1728860 - DNA, 15 bp, Homo sapiens
gggaagggtggtgca

SEQ ID NO: 1728861 - DNA, 15 bp, Homo sapiens
ggaagggtggtgcaa

SEQ ID NO: 1728862 - DNA, 15 bp, Homo sapiens
gaagggtggtgcaag

SEQ ID NO: 1728863 - DNA, 15 bp, Homo sapiens
aagggtggtgcaagc

SEQ ID NO: 1728864 - DNA, 15 bp, Homo sapiens
agggtggtgcaagcc

SEQ ID NO: 1728865 - DNA, 15 bp, Homo sapiens
gggtggtgcaagcca

SEQ ID NO: 1728866 - DNA, 15 bp, Homo sapiens
ggtggtgcaagccat

SEQ ID NO: 1728867 - DNA, 15 bp, Homo sapiens
gtggtgcaagccatt

SEQ ID NO: 1728868 - DNA, 15 bp, Homo sapiens
tggtgcaagccattt

SEQ ID NO: 1728869 - DNA, 15 bp, Homo sapiens
ggtgcaagccatttc

SEQ ID NO: 1728870 - DNA, 15 bp, Homo sapiens
gtgcaagccatttcc

SEQ ID NO: 1728871 - DNA, 15 bp, Homo sapiens
tgcaagccatttcct

SEQ ID NO: 1728872 - DNA, 15 bp, Homo sapiens
gcaagccatttcctt

SEQ ID NO: 1728873 - DNA, 15 bp, Homo sapiens
caagccatttcctta

SEQ ID NO: 1728874 - DNA, 15 bp, Homo sapiens
aagccatttccttag

SEQ ID NO: 1728875 - DNA, 15 bp, Homo sapiens
agccatttccttagc

SEQ ID NO: 1728876 - DNA, 15 bp, Homo sapiens
gccatttccttagct

SEQ ID NO: 1728877 - DNA, 15 bp, Homo sapiens
ccatttccttagctg

SEQ ID NO: 1728878 - DNA, 15 bp, Homo sapiens
catttccttagctgc

SEQ ID NO: 1728879 - DNA, 15 bp, Homo sapiens
atttccttagctgcc

SEQ ID NO: 1728880 - DNA, 15 bp, Homo sapiens
tttccttagctgccc

SEQ ID NO: 1728881 - DNA, 15 bp, Homo sapiens
ttccttagctgcccc

SEQ ID NO: 1728882 - DNA, 15 bp, Homo sapiens
tccttagctgcccca

SEQ ID NO: 1728883 - DNA, 15 bp, Homo sapiens
ccttagctgccccag

SEQ ID NO: 1728884 - DNA, 15 bp, Homo sapiens
cttagctgccccagc

SEQ ID NO: 1728885 - DNA, 15 bp, Homo sapiens
ttagctgccccagct

SEQ ID NO: 1728886 - DNA, 15 bp, Homo sapiens
tagctgccccagctg

SEQ ID NO: 1728887 - DNA, 15 bp, Homo sapiens
agctgccccagctgg

SEQ ID NO: 1728888 - DNA, 15 bp, Homo sapiens
gctgccccagctggt

SEQ ID NO: 1728889 - DNA, 15 bp, Homo sapiens
ctgccccagctggtg

SEQ ID NO: 1728890 - DNA, 15 bp, Homo sapiens
tgccccagctggtgt

SEQ ID NO: 1728891 - DNA, 15 bp, Homo sapiens
gccccagctggtgtc

SEQ ID NO: 1728892 - DNA, 15 bp, Homo sapiens
ccccagctggtgtct

SEQ ID NO: 1728893 - DNA, 15 bp, Homo sapiens
cccagctggtgtctc

SEQ ID NO: 1728894 - DNA, 15 bp, Homo sapiens
ccagctggtgtctcc

SEQ ID NO: 1728895 - DNA, 15 bp, Homo sapiens
cagctggtgtctccg

SEQ ID NO: 1728896 - DNA, 15 bp, Homo sapiens
agctggtgtctccgt

SEQ ID NO: 1728897 - DNA, 15 bp, Homo sapiens
gctggtgtctccgta

SEQ ID NO: 1728898 - DNA, 15 bp, Homo sapiens
ctggtgtctccgtag

SEQ ID NO: 1728899 - DNA, 15 bp, Homo sapiens
tggtgtctccgtagg

SEQ ID NO: 1728900 - DNA, 15 bp, Homo sapiens
ggtgtctccgtaggt

SEQ ID NO: 1728901 - DNA, 15 bp, Homo sapiens
gtgtctccgtaggtc

SEQ ID NO: 1728902 - DNA, 15 bp, Homo sapiens
tgtctccgtaggtca

SEQ ID NO: 1728903 - DNA, 15 bp, Homo sapiens
gtctccgtaggtcat

SEQ ID NO: 1728904 - DNA, 15 bp, Homo sapiens
tctccgtaggtcatg

SEQ ID NO: 1728905 - DNA, 15 bp, Homo sapiens
ctccgtaggtcatgt

SEQ ID NO: 1728906 - DNA, 15 bp, Homo sapiens
tccgtaggtcatgtg

SEQ ID NO: 1728907 - DNA, 15 bp, Homo sapiens
ccgtaggtcatgtgc

SEQ ID NO: 1728908 - DNA, 15 bp, Homo sapiens
cgtaggtcatgtgcc

SEQ ID NO: 1728909 - DNA, 15 bp, Homo sapiens
gtaggtcatgtgcct

SEQ ID NO: 1728910 - DNA, 15 bp, Homo sapiens
taggtcatgtgcctc

SEQ ID NO: 1728911 - DNA, 15 bp, Homo sapiens
aggtcatgtgcctcc

SEQ ID NO: 1728912 - DNA, 15 bp, Homo sapiens
ggtcatgtgcctccc

SEQ ID NO: 1728913 - DNA, 15 bp, Homo sapiens
gtcatgtgcctcccc

SEQ ID NO: 1728914 - DNA, 15 bp, Homo sapiens
tcatgtgcctcccca

SEQ ID NO: 1728915 - DNA, 15 bp, Homo sapiens
catgtgcctccccaa

SEQ ID NO: 1728916 - DNA, 15 bp, Homo sapiens
atgtgcctccccaag

SEQ ID NO: 1728917 - DNA, 15 bp, Homo sapiens
tgtgcctccccaagt

SEQ ID NO: 1728918 - DNA, 15 bp, Homo sapiens
gtgcctccccaagtc

SEQ ID NO: 1728919 - DNA, 15 bp, Homo sapiens
tgcctccccaagtcc

SEQ ID NO: 1728920 - DNA, 15 bp, Homo sapiens
gcctccccaagtcca

SEQ ID NO: 1728921 - DNA, 15 bp, Homo sapiens
cctccccaagtccac

SEQ ID NO: 1728922 - DNA, 15 bp, Homo sapiens
ctccccaagtccact

SEQ ID NO: 1728923 - DNA, 15 bp, Homo sapiens
tccccaagtccactg

SEQ ID NO: 1728924 - DNA, 15 bp, Homo sapiens
ccccaagtccactgg

SEQ ID NO: 1728925 - DNA, 15 bp, Homo sapiens
cccaagtccactggc

SEQ ID NO: 1728926 - DNA, 15 bp, Homo sapiens
ccaagtccactggct

SEQ ID NO: 1728927 - DNA, 15 bp, Homo sapiens
caagtccactggctc

SEQ ID NO: 1728928 - DNA, 15 bp, Homo sapiens
aagtccactggctct

SEQ ID NO: 1728929 - DNA, 15 bp, Homo sapiens
agtccactggctctg

SEQ ID NO: 1728930 - DNA, 15 bp, Homo sapiens
gtccactggctctga

SEQ ID NO: 1728931 - DNA, 15 bp, Homo sapiens
tccactggctctgag

SEQ ID NO: 1728932 - DNA, 15 bp, Homo sapiens
ccactggctctgagc

SEQ ID NO: 1728933 - DNA, 15 bp, Homo sapiens
cactggctctgagct

SEQ ID NO: 1728934 - DNA, 15 bp, Homo sapiens
actggctctgagctc

SEQ ID NO: 1728935 - DNA, 15 bp, Homo sapiens
ctggctctgagctca

SEQ ID NO: 1728936 - DNA, 15 bp, Homo sapiens
tggctctgagctcag

SEQ ID NO: 1728937 - DNA, 15 bp, Homo sapiens
ggctctgagctcagc

SEQ ID NO: 1728938 - DNA, 15 bp, Homo sapiens
gctctgagctcagct

SEQ ID NO: 1728939 - DNA, 15 bp, Homo sapiens
ctctgagctcagctt

SEQ ID NO: 1728940 - DNA, 15 bp, Homo sapiens
tctgagctcagctta

SEQ ID NO: 1728941 - DNA, 15 bp, Homo sapiens
ctgagctcagcttag

SEQ ID NO: 1728942 - DNA, 15 bp, Homo sapiens
tgagctcagcttagc

SEQ ID NO: 1728943 - DNA, 15 bp, Homo sapiens
gagctcagcttagca

SEQ ID NO: 1728944 - DNA, 15 bp, Homo sapiens
agctcagcttagcac

SEQ ID NO: 1728945 - DNA, 15 bp, Homo sapiens
gctcagcttagcact

SEQ ID NO: 1728946 - DNA, 15 bp, Homo sapiens
ctcagcttagcacta

SEQ ID NO: 1728947 - DNA, 15 bp, Homo sapiens
tcagcttagcactag

SEQ ID NO: 1728948 - DNA, 15 bp, Homo sapiens
cagcttagcactaga

SEQ ID NO: 1728949 - DNA, 15 bp, Homo sapiens
agcttagcactagaa

SEQ ID NO: 1728950 - DNA, 15 bp, Homo sapiens
gcttagcactagaaa

SEQ ID NO: 1728951 - DNA, 15 bp, Homo sapiens
cttagcactagaaat

SEQ ID NO: 1728952 - DNA, 15 bp, Homo sapiens
ttagcactagaaatc

SEQ ID NO: 1728953 - DNA, 15 bp, Homo sapiens
tagcactagaaatca

SEQ ID NO: 1728954 - DNA, 15 bp, Homo sapiens
agcactagaaatcac

SEQ ID NO: 1728955 - DNA, 15 bp, Homo sapiens
gcactagaaatcacc

SEQ ID NO: 1728956 - DNA, 15 bp, Homo sapiens
cactagaaatcacct

SEQ ID NO: 1728957 - DNA, 15 bp, Homo sapiens
actagaaatcaccta

SEQ ID NO: 1728958 - DNA, 15 bp, Homo sapiens
ctagaaatcacctag

SEQ ID NO: 1728959 - DNA, 15 bp, Homo sapiens
tagaaatcacctagg

SEQ ID NO: 1728960 - DNA, 15 bp, Homo sapiens
agaaatcacctagga

SEQ ID NO: 1728961 - DNA, 15 bp, Homo sapiens
gaaatcacctaggag

SEQ ID NO: 1728962 - DNA, 15 bp, Homo sapiens
aaatcacctaggagt

SEQ ID NO: 1728963 - DNA, 15 bp, Homo sapiens
aatcacctaggagtt

SEQ ID NO: 1728964 - DNA, 15 bp, Homo sapiens
atcacctaggagttg

SEQ ID NO: 1728965 - DNA, 15 bp, Homo sapiens
tcacctaggagttgc

SEQ ID NO: 1728966 - DNA, 15 bp, Homo sapiens
cacctaggagttgca

SEQ ID NO: 1728967 - DNA, 15 bp, Homo sapiens
acctaggagttgcag

SEQ ID NO: 1728968 - DNA, 15 bp, Homo sapiens
cctaggagttgcagt

SEQ ID NO: 1728969 - DNA, 15 bp, Homo sapiens
ctaggagttgcagtc

SEQ ID NO: 1728970 - DNA, 15 bp, Homo sapiens
taggagttgcagtcc

SEQ ID NO: 1728971 - DNA, 15 bp, Homo sapiens
aggagttgcagtcct

SEQ ID NO: 1728972 - DNA, 15 bp, Homo sapiens
ggagttgcagtcctt

SEQ ID NO: 1728973 - DNA, 15 bp, Homo sapiens
gagttgcagtccttg

SEQ ID NO: 1728974 - DNA, 15 bp, Homo sapiens
agttgcagtccttgt

SEQ ID NO: 1728975 - DNA, 15 bp, Homo sapiens
gttgcagtccttgtg

SEQ ID NO: 1728976 - DNA, 15 bp, Homo sapiens
ttgcagtccttgtgg

SEQ ID NO: 1728977 - DNA, 15 bp, Homo sapiens
tgcagtccttgtggc

SEQ ID NO: 1728978 - DNA, 15 bp, Homo sapiens
gcagtccttgtggcc

SEQ ID NO: 1728979 - DNA, 15 bp, Homo sapiens
cagtccttgtggcct

SEQ ID NO: 1728980 - DNA, 15 bp, Homo sapiens
agtccttgtggccta

SEQ ID NO: 1728981 - DNA, 15 bp, Homo sapiens
gtccttgtggcctac

SEQ ID NO: 1728982 - DNA, 15 bp, Homo sapiens
tccttgtggcctaca

SEQ ID NO: 1728983 - DNA, 15 bp, Homo sapiens
ccttgtggcctacac

SEQ ID NO: 1728984 - DNA, 15 bp, Homo sapiens
cttgtggcctacact

SEQ ID NO: 1728985 - DNA, 15 bp, Homo sapiens
ttgtggcctacactg

SEQ ID NO: 1728986 - DNA, 15 bp, Homo sapiens
tgtggcctacactga

SEQ ID NO: 1728987 - DNA, 15 bp, Homo sapiens
gtggcctacactgac

SEQ ID NO: 1728988 - DNA, 15 bp, Homo sapiens
tggcctacactgact

SEQ ID NO: 1728989 - DNA, 15 bp, Homo sapiens
ggcctacactgactt

SEQ ID NO: 1728990 - DNA, 15 bp, Homo sapiens
gcctacactgacttt

SEQ ID NO: 1728991 - DNA, 15 bp, Homo sapiens
cctacactgactttc

SEQ ID NO: 1728992 - DNA, 15 bp, Homo sapiens
ctacactgactttca

SEQ ID NO: 1728993 - DNA, 15 bp, Homo sapiens
tacactgactttcaa

SEQ ID NO: 1728994 - DNA, 15 bp, Homo sapiens
acactgactttcaag

SEQ ID NO: 1728995 - DNA, 15 bp, Homo sapiens
cactgactttcaagt

SEQ ID NO: 1728996 - DNA, 15 bp, Homo sapiens
actgactttcaagtt

SEQ ID NO: 1728997 - DNA, 15 bp, Homo sapiens
ctgactttcaagttt

SEQ ID NO: 1728998 - DNA, 15 bp, Homo sapiens
tgactttcaagttta

SEQ ID NO: 1728999 - DNA, 15 bp, Homo sapiens
gactttcaagtttat

SEQ ID NO: 1729000 - DNA, 15 bp, Homo sapiens
actttcaagtttatt

SEQ ID NO: 1729001 - DNA, 15 bp, Homo sapiens
ctttcaagtttattt

SEQ ID NO: 1729002 - DNA, 15 bp, Homo sapiens
tttcaagtttattta

SEQ ID NO: 1729003 - DNA, 15 bp, Homo sapiens
ttcaagtttatttag

SEQ ID NO: 1729004 - DNA, 15 bp, Homo sapiens
tcaagtttatttaga

SEQ ID NO: 1729005 - DNA, 15 bp, Homo sapiens
caagtttatttagag

SEQ ID NO: 1729006 - DNA, 15 bp, Homo sapiens
aagtttatttagagc

SEQ ID NO: 1729007 - DNA, 15 bp, Homo sapiens
agtttatttagagcc

SEQ ID NO: 1729008 - DNA, 15 bp, Homo sapiens
gtttatttagagccc

SEQ ID NO: 1729009 - DNA, 15 bp, Homo sapiens
tttatttagagcccc

SEQ ID NO: 1729010 - DNA, 15 bp, Homo sapiens
ttatttagagcccca

SEQ ID NO: 1729011 - DNA, 15 bp, Homo sapiens
tatttagagccccaa

SEQ ID NO: 1729012 - DNA, 15 bp, Homo sapiens
atttagagccccaag

SEQ ID NO: 1729013 - DNA, 15 bp, Homo sapiens
tttagagccccaagg

SEQ ID NO: 1729014 - DNA, 15 bp, Homo sapiens
ttagagccccaaggc

SEQ ID NO: 1729015 - DNA, 15 bp, Homo sapiens
tagagccccaaggca

SEQ ID NO: 1729016 - DNA, 15 bp, Homo sapiens
agagccccaaggcat

SEQ ID NO: 1729017 - DNA, 15 bp, Homo sapiens
gagccccaaggcatt

SEQ ID NO: 1729018 - DNA, 15 bp, Homo sapiens
agccccaaggcattt

SEQ ID NO: 1729019 - DNA, 15 bp, Homo sapiens
gccccaaggcatttt

SEQ ID NO: 1729020 - DNA, 15 bp, Homo sapiens
ccccaaggcatttta

SEQ ID NO: 1729021 - DNA, 15 bp, Homo sapiens
cccaaggcattttag

SEQ ID NO: 1729022 - DNA, 15 bp, Homo sapiens
ccaaggcattttagc

SEQ ID NO: 1729023 - DNA, 15 bp, Homo sapiens
caaggcattttagcc

SEQ ID NO: 1729024 - DNA, 15 bp, Homo sapiens
aaggcattttagccc

SEQ ID NO: 1729025 - DNA, 15 bp, Homo sapiens
aggcattttagccca

SEQ ID NO: 1729026 - DNA, 15 bp, Homo sapiens
ggcattttagcccac

SEQ ID NO: 1729027 - DNA, 15 bp, Homo sapiens
gcattttagcccaca

SEQ ID NO: 1729028 - DNA, 15 bp, Homo sapiens
cattttagcccacag

SEQ ID NO: 1729029 - DNA, 15 bp, Homo sapiens
attttagcccacagt

SEQ ID NO: 1729030 - DNA, 15 bp, Homo sapiens
ttttagcccacagtg

SEQ ID NO: 1729031 - DNA, 15 bp, Homo sapiens
tttagcccacagtga

SEQ ID NO: 1729032 - DNA, 15 bp, Homo sapiens
ttagcccacagtgat

SEQ ID NO: 1729033 - DNA, 15 bp, Homo sapiens
tagcccacagtgatg

SEQ ID NO: 1729034 - DNA, 15 bp, Homo sapiens
agcccacagtgatga

SEQ ID NO: 1729035 - DNA, 15 bp, Homo sapiens
gcccacagtgatgaa

SEQ ID NO: 1729036 - DNA, 15 bp, Homo sapiens
cccacagtgatgaag

SEQ ID NO: 1729037 - DNA, 15 bp, Homo sapiens
ccacagtgatgaagc

SEQ ID NO: 1729038 - DNA, 15 bp, Homo sapiens
cacagtgatgaagct

SEQ ID NO: 1729039 - DNA, 15 bp, Homo sapiens
acagtgatgaagctt

SEQ ID NO: 1729040 - DNA, 15 bp, Homo sapiens
cagtgatgaagcttg

SEQ ID NO: 1729041 - DNA, 15 bp, Homo sapiens
agtgatgaagcttga

SEQ ID NO: 1729042 - DNA, 15 bp, Homo sapiens
gtgatgaagcttgat

SEQ ID NO: 1729043 - DNA, 15 bp, Homo sapiens
tgatgaagcttgatg

SEQ ID NO: 1729044 - DNA, 15 bp, Homo sapiens
gatgaagcttgatgg

SEQ ID NO: 1729045 - DNA, 15 bp, Homo sapiens
atgaagcttgatgga

SEQ ID NO: 1729046 - DNA, 15 bp, Homo sapiens
tgaagcttgatggaa

SEQ ID NO: 1729047 - DNA, 15 bp, Homo sapiens
gaagcttgatggaac

SEQ ID NO: 1729048 - DNA, 15 bp, Homo sapiens
aagcttgatggaact

SEQ ID NO: 1729049 - DNA, 15 bp, Homo sapiens
agcttgatggaactc

SEQ ID NO: 1729050 - DNA, 15 bp, Homo sapiens
gcttgatggaactca

SEQ ID NO: 1729051 - DNA, 15 bp, Homo sapiens
cttgatggaactcaa

SEQ ID NO: 1729052 - DNA, 15 bp, Homo sapiens
ttgatggaactcaag

SEQ ID NO: 1729053 - DNA, 15 bp, Homo sapiens
tgatggaactcaagt

SEQ ID NO: 1729054 - DNA, 15 bp, Homo sapiens
gatggaactcaagtt

SEQ ID NO: 1729055 - DNA, 15 bp, Homo sapiens
atggaactcaagttc

SEQ ID NO: 1729056 - DNA, 15 bp, Homo sapiens
tggaactcaagttcc

SEQ ID NO: 1729057 - DNA, 15 bp, Homo sapiens
ggaactcaagttccg

SEQ ID NO: 1729058 - DNA, 15 bp, Homo sapiens
gaactcaagttccga

SEQ ID NO: 1729059 - DNA, 15 bp, Homo sapiens
aactcaagttccgac

SEQ ID NO: 1729060 - DNA, 15 bp, Homo sapiens
actcaagttccgaca

SEQ ID NO: 1729061 - DNA, 15 bp, Homo sapiens
ctcaagttccgacaa

SEQ ID NO: 1729062 - DNA, 15 bp, Homo sapiens
tcaagttccgacaac

SEQ ID NO: 1729063 - DNA, 15 bp, Homo sapiens
caagttccgacaact

SEQ ID NO: 1729064 - DNA, 15 bp, Homo sapiens
aagttccgacaactg

SEQ ID NO: 1729065 - DNA, 15 bp, Homo sapiens
agttccgacaactgg

SEQ ID NO: 1729066 - DNA, 15 bp, Homo sapiens
gttccgacaactggg

SEQ ID NO: 1729067 - DNA, 15 bp, Homo sapiens
ttccgacaactggga

SEQ ID NO: 1729068 - DNA, 15 bp, Homo sapiens
tccgacaactgggat

SEQ ID NO: 1729069 - DNA, 15 bp, Homo sapiens
ccgacaactgggatg

SEQ ID NO: 1729070 - DNA, 15 bp, Homo sapiens
cgacaactgggatgg

SEQ ID NO: 1729071 - DNA, 15 bp, Homo sapiens
gacaactgggatggg

SEQ ID NO: 1729072 - DNA, 15 bp, Homo sapiens
acaactgggatgggt

SEQ ID NO: 1729073 - DNA, 15 bp, Homo sapiens
caactgggatgggtg

SEQ ID NO: 1729074 - DNA, 15 bp, Homo sapiens
aactgggatgggtga

SEQ ID NO: 1729075 - DNA, 15 bp, Homo sapiens
actgggatgggtgat

SEQ ID NO: 1729076 - DNA, 15 bp, Homo sapiens
ctgggatgggtgatt

SEQ ID NO: 1729077 - DNA, 15 bp, Homo sapiens
tgggatgggtgattc

SEQ ID NO: 1729078 - DNA, 15 bp, Homo sapiens
gggatgggtgattcc

SEQ ID NO: 1729079 - DNA, 15 bp, Homo sapiens
ggatgggtgattccc

SEQ ID NO: 1729080 - DNA, 15 bp, Homo sapiens
gatgggtgattcccc

SEQ ID NO: 1729081 - DNA, 15 bp, Homo sapiens
atgggtgattcccct

SEQ ID NO: 1729082 - DNA, 15 bp, Homo sapiens
tgggtgattcccctc

SEQ ID NO: 1729083 - DNA, 15 bp, Homo sapiens
gggtgattcccctct

SEQ ID NO: 1729084 - DNA, 15 bp, Homo sapiens
ggtgattcccctctg

SEQ ID NO: 1729085 - DNA, 15 bp, Homo sapiens
gtgattcccctctgg

SEQ ID NO: 1729086 - DNA, 15 bp, Homo sapiens
tgattcccctctggc

SEQ ID NO: 1729087 - DNA, 15 bp, Homo sapiens
gattcccctctggct

SEQ ID NO: 1729088 - DNA, 15 bp, Homo sapiens
attcccctctggcta

SEQ ID NO: 1729089 - DNA, 15 bp, Homo sapiens
ttcccctctggctag

SEQ ID NO: 1729090 - DNA, 15 bp, Homo sapiens
tcccctctggctagg

SEQ ID NO: 1729091 - DNA, 15 bp, Homo sapiens
cccctctggctaggc

SEQ ID NO: 1729092 - DNA, 15 bp, Homo sapiens
ccctctggctaggcc

SEQ ID NO: 1729093 - DNA, 15 bp, Homo sapiens
cctctggctaggcct

SEQ ID NO: 1729094 - DNA, 15 bp, Homo sapiens
ctctggctaggcctg

SEQ ID NO: 1729095 - DNA, 15 bp, Homo sapiens
tctggctaggcctga

SEQ ID NO: 1729096 - DNA, 15 bp, Homo sapiens
ctggctaggcctgat

SEQ ID NO: 1729097 - DNA, 15 bp, Homo sapiens
tggctaggcctgatc

SEQ ID NO: 1729098 - DNA, 15 bp, Homo sapiens
ggctaggcctgatct

SEQ ID NO: 1729099 - DNA, 15 bp, Homo sapiens
gctaggcctgatcta

SEQ ID NO: 1729100 - DNA, 15 bp, Homo sapiens
ctaggcctgatctaa

SEQ ID NO: 1729101 - DNA, 15 bp, Homo sapiens
taggcctgatctaaa

SEQ ID NO: 1729102 - DNA, 15 bp, Homo sapiens
aggcctgatctaaat

SEQ ID NO: 1729103 - DNA, 15 bp, Homo sapiens
ggcctgatctaaatg

SEQ ID NO: 1729104 - DNA, 15 bp, Homo sapiens
gcctgatctaaatgc

SEQ ID NO: 1729105 - DNA, 15 bp, Homo sapiens
cctgatctaaatgct

SEQ ID NO: 1729106 - DNA, 15 bp, Homo sapiens
ctgatctaaatgctc

SEQ ID NO: 1729107 - DNA, 15 bp, Homo sapiens
tgatctaaatgctcc

SEQ ID NO: 1729108 - DNA, 15 bp, Homo sapiens
gatctaaatgctccc

SEQ ID NO: 1729109 - DNA, 15 bp, Homo sapiens
atctaaatgctccct

SEQ ID NO: 1729110 - DNA, 15 bp, Homo sapiens
tctaaatgctccctc

SEQ ID NO: 1729111 - DNA, 15 bp, Homo sapiens
ctaaatgctccctct

SEQ ID NO: 1729112 - DNA, 15 bp, Homo sapiens
taaatgctccctctg

SEQ ID NO: 1729113 - DNA, 15 bp, Homo sapiens
aaatgctccctctgt

SEQ ID NO: 1729114 - DNA, 15 bp, Homo sapiens
aatgctccctctgtg

SEQ ID NO: 1729115 - DNA, 15 bp, Homo sapiens
atgctccctctgtgg

SEQ ID NO: 1729116 - DNA, 15 bp, Homo sapiens
tgctccctctgtggg

SEQ ID NO: 1729117 - DNA, 15 bp, Homo sapiens
gctccctctgtgggc

SEQ ID NO: 1729118 - DNA, 15 bp, Homo sapiens
ctccctctgtgggca

SEQ ID NO: 1729119 - DNA, 15 bp, Homo sapiens
tccctctgtgggcag

SEQ ID NO: 1729120 - DNA, 15 bp, Homo sapiens
ccctctgtgggcagg

SEQ ID NO: 1729121 - DNA, 15 bp, Homo sapiens
cctctgtgggcaggt

SEQ ID NO: 1729122 - DNA, 15 bp, Homo sapiens
ctctgtgggcaggtg

SEQ ID NO: 1729123 - DNA, 15 bp, Homo sapiens
tctgtgggcaggtgt

SEQ ID NO: 1729124 - DNA, 15 bp, Homo sapiens
ctgtgggcaggtgtc

SEQ ID NO: 1729125 - DNA, 15 bp, Homo sapiens
tgtgggcaggtgtca

SEQ ID NO: 1729126 - DNA, 15 bp, Homo sapiens
gtgggcaggtgtcaa

SEQ ID NO: 1729127 - DNA, 15 bp, Homo sapiens
tgggcaggtgtcaac

SEQ ID NO: 1729128 - DNA, 15 bp, Homo sapiens
gggcaggtgtcaact

SEQ ID NO: 1729129 - DNA, 15 bp, Homo sapiens
ggcaggtgtcaactg

SEQ ID NO: 1729130 - DNA, 15 bp, Homo sapiens
gcaggtgtcaactga

SEQ ID NO: 1729131 - DNA, 15 bp, Homo sapiens
caggtgtcaactgag

SEQ ID NO: 1729132 - DNA, 15 bp, Homo sapiens
aggtgtcaactgagt

SEQ ID NO: 1729133 - DNA, 15 bp, Homo sapiens
ggtgtcaactgagtt

SEQ ID NO: 1729134 - DNA, 15 bp, Homo sapiens
gtgtcaactgagttc

SEQ ID NO: 1729135 - DNA, 15 bp, Homo sapiens
tgtcaactgagttca

SEQ ID NO: 1729136 - DNA, 15 bp, Homo sapiens
gtcaactgagttcag

SEQ ID NO: 1729137 - DNA, 15 bp, Homo sapiens
tcaactgagttcagc

SEQ ID NO: 1729138 - DNA, 15 bp, Homo sapiens
caactgagttcagcc

SEQ ID NO: 1729139 - DNA, 15 bp, Homo sapiens
aactgagttcagccc

SEQ ID NO: 1729140 - DNA, 15 bp, Homo sapiens
actgagttcagccca

SEQ ID NO: 1729141 - DNA, 15 bp, Homo sapiens
ctgagttcagcccag

SEQ ID NO: 1729142 - DNA, 15 bp, Homo sapiens
tgagttcagcccagc

SEQ ID NO: 1729143 - DNA, 15 bp, Homo sapiens
gagttcagcccagct

SEQ ID NO: 1729144 - DNA, 15 bp, Homo sapiens
agttcagcccagctt

SEQ ID NO: 1729145 - DNA, 15 bp, Homo sapiens
gttcagcccagcttt

SEQ ID NO: 1729146 - DNA, 15 bp, Homo sapiens
ttcagcccagctttg

SEQ ID NO: 1729147 - DNA, 15 bp, Homo sapiens
tcagcccagctttgc

SEQ ID NO: 1729148 - DNA, 15 bp, Homo sapiens
cagcccagctttgct

SEQ ID NO: 1729149 - DNA, 15 bp, Homo sapiens
agcccagctttgctt

SEQ ID NO: 1729150 - DNA, 15 bp, Homo sapiens
gcccagctttgcttt

SEQ ID NO: 1729151 - DNA, 15 bp, Homo sapiens
cccagctttgcttta

SEQ ID NO: 1729152 - DNA, 15 bp, Homo sapiens
ccagctttgctttat

SEQ ID NO: 1729153 - DNA, 15 bp, Homo sapiens
cagctttgctttata

SEQ ID NO: 1729154 - DNA, 15 bp, Homo sapiens
agctttgctttatac

SEQ ID NO: 1729155 - DNA, 15 bp, Homo sapiens
gctttgctttatact

SEQ ID NO: 1729156 - DNA, 15 bp, Homo sapiens
ctttgctttatactg

SEQ ID NO: 1729157 - DNA, 15 bp, Homo sapiens
tttgctttatactgt

SEQ ID NO: 1729158 - DNA, 15 bp, Homo sapiens
ttgctttatactgtg

SEQ ID NO: 1729159 - DNA, 15 bp, Homo sapiens
tgctttatactgtga

SEQ ID NO: 1729160 - DNA, 15 bp, Homo sapiens
gctttatactgtgac

SEQ ID NO: 1729161 - DNA, 15 bp, Homo sapiens
ctttatactgtgaca

SEQ ID NO: 1729162 - DNA, 15 bp, Homo sapiens
tttatactgtgacag

SEQ ID NO: 1729163 - DNA, 15 bp, Homo sapiens
ttatactgtgacagg

SEQ ID NO: 1729164 - DNA, 15 bp, Homo sapiens
tatactgtgacaggg

SEQ ID NO: 1729165 - DNA, 15 bp, Homo sapiens
atactgtgacaggga

SEQ ID NO: 1729166 - DNA, 15 bp, Homo sapiens
tactgtgacagggaa

SEQ ID NO: 1729167 - DNA, 15 bp, Homo sapiens
actgtgacagggaag

SEQ ID NO: 1729168 - DNA, 15 bp, Homo sapiens
ctgtgacagggaagc

SEQ ID NO: 1729169 - DNA, 15 bp, Homo sapiens
tgtgacagggaagca

SEQ ID NO: 1729170 - DNA, 15 bp, Homo sapiens
gtgacagggaagcac

SEQ ID NO: 1729171 - DNA, 15 bp, Homo sapiens
tgacagggaagcact

SEQ ID NO: 1729172 - DNA, 15 bp, Homo sapiens
gacagggaagcactg

SEQ ID NO: 1729173 - DNA, 15 bp, Homo sapiens
acagggaagcactga

SEQ ID NO: 1729174 - DNA, 15 bp, Homo sapiens
cagggaagcactgag

SEQ ID NO: 1729175 - DNA, 15 bp, Homo sapiens
agggaagcactgagt

SEQ ID NO: 1729176 - DNA, 15 bp, Homo sapiens
gggaagcactgagtt

SEQ ID NO: 1729177 - DNA, 15 bp, Homo sapiens
ggaagcactgagttc

SEQ ID NO: 1729178 - DNA, 15 bp, Homo sapiens
gaagcactgagttca

SEQ ID NO: 1729179 - DNA, 15 bp, Homo sapiens
aagcactgagttcaa

SEQ ID NO: 1729180 - DNA, 15 bp, Homo sapiens
agcactgagttcaat

SEQ ID NO: 1729181 - DNA, 15 bp, Homo sapiens
gcactgagttcaatg

SEQ ID NO: 1729182 - DNA, 15 bp, Homo sapiens
cactgagttcaatgc

SEQ ID NO: 1729183 - DNA, 15 bp, Homo sapiens
actgagttcaatgca

SEQ ID NO: 1729184 - DNA, 15 bp, Homo sapiens
ctgagttcaatgcac

SEQ ID NO: 1729185 - DNA, 15 bp, Homo sapiens
tgagttcaatgcaca

SEQ ID NO: 1729186 - DNA, 15 bp, Homo sapiens
gagttcaatgcacag

SEQ ID NO: 1729187 - DNA, 15 bp, Homo sapiens
agttcaatgcacagt

SEQ ID NO: 1729188 - DNA, 15 bp, Homo sapiens
gttcaatgcacagtc

SEQ ID NO: 1729189 - DNA, 15 bp, Homo sapiens
ttcaatgcacagtct

SEQ ID NO: 1729190 - DNA, 15 bp, Homo sapiens
tcaatgcacagtctc

SEQ ID NO: 1729191 - DNA, 15 bp, Homo sapiens
caatgcacagtctca

SEQ ID NO: 1729192 - DNA, 15 bp, Homo sapiens
aatgcacagtctcac

SEQ ID NO: 1729193 - DNA, 15 bp, Homo sapiens
atgcacagtctcaca

SEQ ID NO: 1729194 - DNA, 15 bp, Homo sapiens
tgcacagtctcacaa

SEQ ID NO: 1729195 - DNA, 15 bp, Homo sapiens
gcacagtctcacaat

SEQ ID NO: 1729196 - DNA, 15 bp, Homo sapiens
cacagtctcacaatc

SEQ ID NO: 1729197 - DNA, 15 bp, Homo sapiens
acagtctcacaatct

SEQ ID NO: 1729198 - DNA, 15 bp, Homo sapiens
cagtctcacaatctc

SEQ ID NO: 1729199 - DNA, 15 bp, Homo sapiens
agtctcacaatctct

SEQ ID NO: 1729200 - DNA, 15 bp, Homo sapiens
gtctcacaatctctg

SEQ ID NO: 1729201 - DNA, 15 bp, Homo sapiens
tctcacaatctctgt

SEQ ID NO: 1729202 - DNA, 15 bp, Homo sapiens
ctcacaatctctgtg

SEQ ID NO: 1729203 - DNA, 15 bp, Homo sapiens
tcacaatctctgtgc

SEQ ID NO: 1729204 - DNA, 15 bp, Homo sapiens
cacaatctctgtgct

SEQ ID NO: 1729205 - DNA, 15 bp, Homo sapiens
acaatctctgtgctc

SEQ ID NO: 1729206 - DNA, 15 bp, Homo sapiens
caatctctgtgctct

SEQ ID NO: 1729207 - DNA, 15 bp, Homo sapiens
aatctctgtgctctc

SEQ ID NO: 1729208 - DNA, 15 bp, Homo sapiens
atctctgtgctctcc

SEQ ID NO: 1729209 - DNA, 15 bp, Homo sapiens
tctctgtgctctccc

SEQ ID NO: 1729210 - DNA, 15 bp, Homo sapiens
ctctgtgctctccct

SEQ ID NO: 1729211 - DNA, 15 bp, Homo sapiens
tctgtgctctccctc

SEQ ID NO: 1729212 - DNA, 15 bp, Homo sapiens
ctgtgctctccctct

SEQ ID NO: 1729213 - DNA, 15 bp, Homo sapiens
tgtgctctccctctc

SEQ ID NO: 1729214 - DNA, 15 bp, Homo sapiens
gtgctctccctctcc

SEQ ID NO: 1729215 - DNA, 15 bp, Homo sapiens
tgctctccctctccc

SEQ ID NO: 1729216 - DNA, 15 bp, Homo sapiens
gctctccctctccca

SEQ ID NO: 1729217 - DNA, 15 bp, Homo sapiens
ctctccctctcccaa

SEQ ID NO: 1729218 - DNA, 15 bp, Homo sapiens
tctccctctcccaaa

SEQ ID NO: 1729219 - DNA, 15 bp, Homo sapiens
ctccctctcccaaac

SEQ ID NO: 1729220 - DNA, 15 bp, Homo sapiens
tccctctcccaaaca

SEQ ID NO: 1729221 - DNA, 15 bp, Homo sapiens
ccctctcccaaacac

SEQ ID NO: 1729222 - DNA, 15 bp, Homo sapiens
cctctcccaaacaca

SEQ ID NO: 1729223 - DNA, 15 bp, Homo sapiens
ctctcccaaacacat

SEQ ID NO: 1729224 - DNA, 15 bp, Homo sapiens
tctcccaaacacata

SEQ ID NO: 1729225 - DNA, 15 bp, Homo sapiens
ctcccaaacacatag

SEQ ID NO: 1729226 - DNA, 15 bp, Homo sapiens
tcccaaacacatagc

SEQ ID NO: 1729227 - DNA, 15 bp, Homo sapiens
cccaaacacatagct

SEQ ID NO: 1729228 - DNA, 15 bp, Homo sapiens
ccaaacacatagctt

SEQ ID NO: 1729229 - DNA, 15 bp, Homo sapiens
caaacacatagcttt

SEQ ID NO: 1729230 - DNA, 15 bp, Homo sapiens
aaacacatagctttt

SEQ ID NO: 1729231 - DNA, 15 bp, Homo sapiens
aacacatagcttttc

SEQ ID NO: 1729232 - DNA, 15 bp, Homo sapiens
acacatagcttttct

SEQ ID NO: 1729233 - DNA, 15 bp, Homo sapiens
cacatagcttttctc

SEQ ID NO: 1729234 - DNA, 15 bp, Homo sapiens
acatagcttttctct

SEQ ID NO: 1729235 - DNA, 15 bp, Homo sapiens
catagcttttctctc

SEQ ID NO: 1729236 - DNA, 15 bp, Homo sapiens
atagcttttctctcc

SEQ ID NO: 1729237 - DNA, 15 bp, Homo sapiens
tagcttttctctccg

SEQ ID NO: 1729238 - DNA, 15 bp, Homo sapiens
agcttttctctccgc

SEQ ID NO: 1729239 - DNA, 15 bp, Homo sapiens
gcttttctctccgca

SEQ ID NO: 1729240 - DNA, 15 bp, Homo sapiens
cttttctctccgcac

SEQ ID NO: 1729241 - DNA, 15 bp, Homo sapiens
ttttctctccgcaca

SEQ ID NO: 1729242 - DNA, 15 bp, Homo sapiens
tttctctccgcacaa

SEQ ID NO: 1729243 - DNA, 15 bp, Homo sapiens
ttctctccgcacaat

SEQ ID NO: 1729244 - DNA, 15 bp, Homo sapiens
tctctccgcacaatg

SEQ ID NO: 1729245 - DNA, 15 bp, Homo sapiens
ctctccgcacaatgt

SEQ ID NO: 1729246 - DNA, 15 bp, Homo sapiens
tctccgcacaatgtg

SEQ ID NO: 1729247 - DNA, 15 bp, Homo sapiens
ctccgcacaatgtgg

SEQ ID NO: 1729248 - DNA, 15 bp, Homo sapiens
tccgcacaatgtggc

SEQ ID NO: 1729249 - DNA, 15 bp, Homo sapiens
ccgcacaatgtggcc

SEQ ID NO: 1729250 - DNA, 15 bp, Homo sapiens
cgcacaatgtggcca

SEQ ID NO: 1729251 - DNA, 15 bp, Homo sapiens
gcacaatgtggccac

SEQ ID NO: 1729252 - DNA, 15 bp, Homo sapiens
cacaatgtggccact

SEQ ID NO: 1729253 - DNA, 15 bp, Homo sapiens
acaatgtggccactg

SEQ ID NO: 1729254 - DNA, 15 bp, Homo sapiens
caatgtggccactgc

SEQ ID NO: 1729255 - DNA, 15 bp, Homo sapiens
aatgtggccactgct

SEQ ID NO: 1729256 - DNA, 15 bp, Homo sapiens
atgtggccactgctg

SEQ ID NO: 1729257 - DNA, 15 bp, Homo sapiens
tgtggccactgctgg

SEQ ID NO: 1729258 - DNA, 15 bp, Homo sapiens
gtggccactgctggg

SEQ ID NO: 1729259 - DNA, 15 bp, Homo sapiens
tggccactgctggga

SEQ ID NO: 1729260 - DNA, 15 bp, Homo sapiens
ggccactgctgggag

SEQ ID NO: 1729261 - DNA, 15 bp, Homo sapiens
gccactgctgggagg

SEQ ID NO: 1729262 - DNA, 15 bp, Homo sapiens
ccactgctgggagga

SEQ ID NO: 1729263 - DNA, 15 bp, Homo sapiens
cactgctgggaggat

SEQ ID NO: 1729264 - DNA, 15 bp, Homo sapiens
actgctgggaggatg

SEQ ID NO: 1729265 - DNA, 15 bp, Homo sapiens
ctgctgggaggatga

SEQ ID NO: 1729266 - DNA, 15 bp, Homo sapiens
tgctgggaggatgaa

SEQ ID NO: 1729267 - DNA, 15 bp, Homo sapiens
gctgggaggatgaag

SEQ ID NO: 1729268 - DNA, 15 bp, Homo sapiens
ctgggaggatgaagg

SEQ ID NO: 1729269 - DNA, 15 bp, Homo sapiens
tgggaggatgaaggg

SEQ ID NO: 1729270 - DNA, 15 bp, Homo sapiens
gggaggatgaagggt

SEQ ID NO: 1729271 - DNA, 15 bp, Homo sapiens
ggaggatgaagggtg

SEQ ID NO: 1729272 - DNA, 15 bp, Homo sapiens
gaggatgaagggtgg

SEQ ID NO: 1729273 - DNA, 15 bp, Homo sapiens
aggatgaagggtggc

SEQ ID NO: 1729274 - DNA, 15 bp, Homo sapiens
ggatgaagggtggca

SEQ ID NO: 1729275 - DNA, 15 bp, Homo sapiens
gatgaagggtggcat

SEQ ID NO: 1729276 - DNA, 15 bp, Homo sapiens
atgaagggtggcatc

SEQ ID NO: 1729277 - DNA, 15 bp, Homo sapiens
tgaagggtggcatca

SEQ ID NO: 1729278 - DNA, 15 bp, Homo sapiens
gaagggtggcatcag

SEQ ID NO: 1729279 - DNA, 15 bp, Homo sapiens
aagggtggcatcagc

SEQ ID NO: 1729280 - DNA, 15 bp, Homo sapiens
agggtggcatcagca

SEQ ID NO: 1729281 - DNA, 15 bp, Homo sapiens
gggtggcatcagcaa

SEQ ID NO: 1729282 - DNA, 15 bp, Homo sapiens
ggtggcatcagcaat

SEQ ID NO: 1729283 - DNA, 15 bp, Homo sapiens
gtggcatcagcaatt

SEQ ID NO: 1729284 - DNA, 15 bp, Homo sapiens
tggcatcagcaattc

SEQ ID NO: 1729285 - DNA, 15 bp, Homo sapiens
ggcatcagcaattca

SEQ ID NO: 1729286 - DNA, 15 bp, Homo sapiens
gcatcagcaattcaa

SEQ ID NO: 1729287 - DNA, 15 bp, Homo sapiens
catcagcaattcaag

SEQ ID NO: 1729288 - DNA, 15 bp, Homo sapiens
atcagcaattcaaga

SEQ ID NO: 1729289 - DNA, 15 bp, Homo sapiens
tcagcaattcaagac

SEQ ID NO: 1729290 - DNA, 15 bp, Homo sapiens
cagcaattcaagact

SEQ ID NO: 1729291 - DNA, 15 bp, Homo sapiens
agcaattcaagactg

SEQ ID NO: 1729292 - DNA, 15 bp, Homo sapiens
gcaattcaagactgt

SEQ ID NO: 1729293 - DNA, 15 bp, Homo sapiens
caattcaagactgtc

SEQ ID NO: 1729294 - DNA, 15 bp, Homo sapiens
aattcaagactgtct

SEQ ID NO: 1729295 - DNA, 15 bp, Homo sapiens
attcaagactgtctt

SEQ ID NO: 1729296 - DNA, 15 bp, Homo sapiens
ttcaagactgtcttt

SEQ ID NO: 1729297 - DNA, 15 bp, Homo sapiens
tcaagactgtctttc

SEQ ID NO: 1729298 - DNA, 15 bp, Homo sapiens
caagactgtctttcc

SEQ ID NO: 1729299 - DNA, 15 bp, Homo sapiens
aagactgtctttcct

SEQ ID NO: 1729300 - DNA, 15 bp, Homo sapiens
agactgtctttccta

SEQ ID NO: 1729301 - DNA, 15 bp, Homo sapiens
gactgtctttcctac

SEQ ID NO: 1729302 - DNA, 15 bp, Homo sapiens
actgtctttcctacc

SEQ ID NO: 1729303 - DNA, 15 bp, Homo sapiens
ctgtctttcctaccc

SEQ ID NO: 1729304 - DNA, 15 bp, Homo sapiens
tgtctttcctaccct

SEQ ID NO: 1729305 - DNA, 15 bp, Homo sapiens
gtctttcctaccctc

SEQ ID NO: 1729306 - DNA, 15 bp, Homo sapiens
tctttcctaccctct

SEQ ID NO: 1729307 - DNA, 15 bp, Homo sapiens
tttcctaccctcttc

SEQ ID NO: 1729308 - DNA, 15 bp, Homo sapiens
ttcctaccctcttca

SEQ ID NO: 1729309 - DNA, 15 bp, Homo sapiens
tcctaccctcttcaa

SEQ ID NO: 1729310 - DNA, 15 bp, Homo sapiens
cctaccctcttcaat

SEQ ID NO: 1729311 - DNA, 15 bp, Homo sapiens
ctaccctcttcaatg

SEQ ID NO: 1729312 - DNA, 15 bp, Homo sapiens
taccctcttcaatgc

SEQ ID NO: 1729313 - DNA, 15 bp, Homo sapiens
accctcttcaatgcc

SEQ ID NO: 1729314 - DNA, 15 bp, Homo sapiens
ccctcttcaatgcct

SEQ ID NO: 1729315 - DNA, 15 bp, Homo sapiens
cctcttcaatgcctc

SEQ ID NO: 1729316 - DNA, 15 bp, Homo sapiens
ctcttcaatgcctct

SEQ ID NO: 1729317 - DNA, 15 bp, Homo sapiens
tcttcaatgcctctt

SEQ ID NO: 1729318 - DNA, 15 bp, Homo sapiens
cttcaatgcctcttt

SEQ ID NO: 1729319 - DNA, 15 bp, Homo sapiens
ttcaatgcctctttc

SEQ ID NO: 1729320 - DNA, 15 bp, Homo sapiens
tcaatgcctctttca

SEQ ID NO: 1729321 - DNA, 15 bp, Homo sapiens
caatgcctctttcag

SEQ ID NO: 1729322 - DNA, 15 bp, Homo sapiens
aatgcctctttcagc

SEQ ID NO: 1729323 - DNA, 15 bp, Homo sapiens
atgcctctttcagcg

SEQ ID NO: 1729324 - DNA, 15 bp, Homo sapiens
tgcctctttcagcga

SEQ ID NO: 1729325 - DNA, 15 bp, Homo sapiens
gcctctttcagcgat

SEQ ID NO: 1729326 - DNA, 15 bp, Homo sapiens
cctctttcagcgata

SEQ ID NO: 1729327 - DNA, 15 bp, Homo sapiens
ctctttcagcgatat

SEQ ID NO: 1729328 - DNA, 15 bp, Homo sapiens
tctttcagcgatatg

SEQ ID NO: 1729329 - DNA, 15 bp, Homo sapiens
ctttcagcgatatga

SEQ ID NO: 1729330 - DNA, 15 bp, Homo sapiens
tttcagcgatatgaa

SEQ ID NO: 1729331 - DNA, 15 bp, Homo sapiens
ttcagcgatatgaag

SEQ ID NO: 1729332 - DNA, 15 bp, Homo sapiens
tcagcgatatgaagt

SEQ ID NO: 1729333 - DNA, 15 bp, Homo sapiens
cagcgatatgaagtt

SEQ ID NO: 1729334 - DNA, 15 bp, Homo sapiens
agcgatatgaagtta

SEQ ID NO: 1729335 - DNA, 15 bp, Homo sapiens
gcgatatgaagttaa

SEQ ID NO: 1729336 - DNA, 15 bp, Homo sapiens
cgatatgaagttaaa

SEQ ID NO: 1729337 - DNA, 15 bp, Homo sapiens
gatatgaagttaaaa

SEQ ID NO: 1729338 - DNA, 15 bp, Homo sapiens
atatgaagttaaaac

SEQ ID NO: 1729339 - DNA, 15 bp, Homo sapiens
tatgaagttaaaact

SEQ ID NO: 1729340 - DNA, 15 bp, Homo sapiens
atgaagttaaaacta

SEQ ID NO: 1729341 - DNA, 15 bp, Homo sapiens
tgaagttaaaactag

SEQ ID NO: 1729342 - DNA, 15 bp, Homo sapiens
gaagttaaaactagg

SEQ ID NO: 1729343 - DNA, 15 bp, Homo sapiens
aagttaaaactagga

SEQ ID NO: 1729344 - DNA, 15 bp, Homo sapiens
agttaaaactaggaa

SEQ ID NO: 1729345 - DNA, 15 bp, Homo sapiens
gttaaaactaggaac

SEQ ID NO: 1729346 - DNA, 15 bp, Homo sapiens
ttaaaactaggaact

SEQ ID NO: 1729347 - DNA, 15 bp, Homo sapiens
taaaactaggaacta

SEQ ID NO: 1729348 - DNA, 15 bp, Homo sapiens
aaaactaggaactat

SEQ ID NO: 1729349 - DNA, 15 bp, Homo sapiens
aaactaggaactatg

SEQ ID NO: 1729350 - DNA, 15 bp, Homo sapiens
aactaggaactatga

SEQ ID NO: 1729351 - DNA, 15 bp, Homo sapiens
actaggaactatgag

SEQ ID NO: 1729352 - DNA, 15 bp, Homo sapiens
ctaggaactatgagt

SEQ ID NO: 1729353 - DNA, 15 bp, Homo sapiens
taggaactatgagtg

SEQ ID NO: 1729354 - DNA, 15 bp, Homo sapiens
aggaactatgagtgc

SEQ ID NO: 1729355 - DNA, 15 bp, Homo sapiens
ggaactatgagtgct

SEQ ID NO: 1729356 - DNA, 15 bp, Homo sapiens
gaactatgagtgctc

SEQ ID NO: 1729357 - DNA, 15 bp, Homo sapiens
aactatgagtgctca

SEQ ID NO: 1729358 - DNA, 15 bp, Homo sapiens
actatgagtgctcat

SEQ ID NO: 1729359 - DNA, 15 bp, Homo sapiens
ctatgagtgctcatc

SEQ ID NO: 1729360 - DNA, 15 bp, Homo sapiens
tatgagtgctcatct

SEQ ID NO: 1729361 - DNA, 15 bp, Homo sapiens
atgagtgctcatctg

SEQ ID NO: 1729362 - DNA, 15 bp, Homo sapiens
tgagtgctcatctga

SEQ ID NO: 1729363 - DNA, 15 bp, Homo sapiens
gagtgctcatctgat

SEQ ID NO: 1729364 - DNA, 15 bp, Homo sapiens
agtgctcatctgatt

SEQ ID NO: 1729365 - DNA, 15 bp, Homo sapiens
gtgctcatctgattt

SEQ ID NO: 1729366 - DNA, 15 bp, Homo sapiens
tgctcatctgatttt

SEQ ID NO: 1729367 - DNA, 15 bp, Homo sapiens
gctcatctgattttt

SEQ ID NO: 1729368 - DNA, 15 bp, Homo sapiens
ctcatctgatttttg

SEQ ID NO: 1729369 - DNA, 15 bp, Homo sapiens
tcatctgatttttgg

SEQ ID NO: 1729370 - DNA, 15 bp, Homo sapiens
catctgatttttggc

SEQ ID NO: 1729371 - DNA, 15 bp, Homo sapiens
atctgatttttggct

SEQ ID NO: 1729372 - DNA, 15 bp, Homo sapiens
tctgatttttggctt

SEQ ID NO: 1729373 - DNA, 15 bp, Homo sapiens
ctgatttttggcttt

SEQ ID NO: 1729374 - DNA, 15 bp, Homo sapiens
tgatttttggctttt

SEQ ID NO: 1729375 - DNA, 15 bp, Homo sapiens
gatttttggctttta

SEQ ID NO: 1729376 - DNA, 15 bp, Homo sapiens
atttttggcttttat

SEQ ID NO: 1729377 - DNA, 15 bp, Homo sapiens
tttttggcttttata

SEQ ID NO: 1729378 - DNA, 15 bp, Homo sapiens
ttttggcttttataa

SEQ ID NO: 1729379 - DNA, 15 bp, Homo sapiens
tttggcttttataaa

SEQ ID NO: 1729380 - DNA, 15 bp, Homo sapiens
ttggcttttataaag

SEQ ID NO: 1729381 - DNA, 15 bp, Homo sapiens
tggcttttataaagt

SEQ ID NO: 1729382 - DNA, 15 bp, Homo sapiens
ggcttttataaagtt

SEQ ID NO: 1729383 - DNA, 15 bp, Homo sapiens
gcttttataaagttg

SEQ ID NO: 1729384 - DNA, 15 bp, Homo sapiens
cttttataaagttgc

SEQ ID NO: 1729385 - DNA, 15 bp, Homo sapiens
ttttataaagttgct

SEQ ID NO: 1729386 - DNA, 15 bp, Homo sapiens
tttataaagttgctt

SEQ ID NO: 1729387 - DNA, 15 bp, Homo sapiens
ttataaagttgcttt

SEQ ID NO: 1729388 - DNA, 15 bp, Homo sapiens
tataaagttgctttt

SEQ ID NO: 1729389 - DNA, 15 bp, Homo sapiens
ataaagttgcttttt

SEQ ID NO: 1729390 - DNA, 15 bp, Homo sapiens
taaagttgctttttg

SEQ ID NO: 1729391 - DNA, 15 bp, Homo sapiens
aaagttgctttttgt

SEQ ID NO: 1729392 - DNA, 15 bp, Homo sapiens
aagttgctttttgtg

SEQ ID NO: 1729393 - DNA, 15 bp, Homo sapiens
agttgctttttgtgt

SEQ ID NO: 1729394 - DNA, 15 bp, Homo sapiens
gttgctttttgtgta

SEQ ID NO: 1729395 - DNA, 15 bp, Homo sapiens
ttgctttttgtgtat

SEQ ID NO: 1729396 - DNA, 15 bp, Homo sapiens
tgctttttgtgtata

SEQ ID NO: 1729397 - DNA, 15 bp, Homo sapiens
gctttttgtgtatag

SEQ ID NO: 1729398 - DNA, 15 bp, Homo sapiens
ctttttgtgtataga

SEQ ID NO: 1729399 - DNA, 15 bp, Homo sapiens
tttttgtgtatagat

SEQ ID NO: 1729400 - DNA, 15 bp, Homo sapiens
ttttgtgtatagata

SEQ ID NO: 1729401 - DNA, 15 bp, Homo sapiens
tttgtgtatagatag

SEQ ID NO: 1729402 - DNA, 15 bp, Homo sapiens
ttgtgtatagatagt

SEQ ID NO: 1729403 - DNA, 15 bp, Homo sapiens
tgtgtatagatagtt

SEQ ID NO: 1729404 - DNA, 15 bp, Homo sapiens
gtgtatagatagttg

SEQ ID NO: 1729405 - DNA, 15 bp, Homo sapiens
tgtatagatagttgt

SEQ ID NO: 1729406 - DNA, 15 bp, Homo sapiens
gtatagatagttgtt

SEQ ID NO: 1729407 - DNA, 15 bp, Homo sapiens
tatagatagttgttt

SEQ ID NO: 1729408 - DNA, 15 bp, Homo sapiens
atagatagttgttta

SEQ ID NO: 1729409 - DNA, 15 bp, Homo sapiens
tagatagttgtttaa

SEQ ID NO: 1729410 - DNA, 15 bp, Homo sapiens
agatagttgtttaaa

SEQ ID NO: 1729411 - DNA, 15 bp, Homo sapiens
gatagttgtttaaat

SEQ ID NO: 1729412 - DNA, 15 bp, Homo sapiens
atagttgtttaaatt

SEQ ID NO: 1729413 - DNA, 15 bp, Homo sapiens
tagttgtttaaattt

SEQ ID NO: 1729414 - DNA, 15 bp, Homo sapiens
agttgtttaaattta

SEQ ID NO: 1729415 - DNA, 15 bp, Homo sapiens
gttgtttaaatttag

SEQ ID NO: 1729416 - DNA, 15 bp, Homo sapiens
ttgtttaaatttagt

SEQ ID NO: 1729417 - DNA, 15 bp, Homo sapiens
tgtttaaatttagtg

SEQ ID NO: 1729418 - DNA, 15 bp, Homo sapiens
gtttaaatttagtgt

SEQ ID NO: 1729419 - DNA, 15 bp, Homo sapiens
tttaaatttagtgtt

SEQ ID NO: 1729420 - DNA, 15 bp, Homo sapiens
ttaaatttagtgttc

SEQ ID NO: 1729421 - DNA, 15 bp, Homo sapiens
taaatttagtgttct

SEQ ID NO: 1729422 - DNA, 15 bp, Homo sapiens
aaatttagtgttctt

SEQ ID NO: 1729423 - DNA, 15 bp, Homo sapiens
aatttagtgttcttg

SEQ ID NO: 1729424 - DNA, 15 bp, Homo sapiens
atttagtgttcttgt

SEQ ID NO: 1729425 - DNA, 15 bp, Homo sapiens
tttagtgttcttgta

SEQ ID NO: 1729426 - DNA, 15 bp, Homo sapiens
ttagtgttcttgtag

SEQ ID NO: 1729427 - DNA, 15 bp, Homo sapiens
tagtgttcttgtaga

SEQ ID NO: 1729428 - DNA, 15 bp, Homo sapiens
agtgttcttgtagag

SEQ ID NO: 1729429 - DNA, 15 bp, Homo sapiens
gtgttcttgtagaga

SEQ ID NO: 1729430 - DNA, 15 bp, Homo sapiens
tgttcttgtagagag

SEQ ID NO: 1729431 - DNA, 15 bp, Homo sapiens
gttcttgtagagagg

SEQ ID NO: 1729432 - DNA, 15 bp, Homo sapiens
ttcttgtagagaggg

SEQ ID NO: 1729433 - DNA, 15 bp, Homo sapiens
tcttgtagagaggga

SEQ ID NO: 1729434 - DNA, 15 bp, Homo sapiens
cttgtagagagggac

SEQ ID NO: 1729435 - DNA, 15 bp, Homo sapiens
ttgtagagagggaca

SEQ ID NO: 1729436 - DNA, 15 bp, Homo sapiens
tgtagagagggacaa

SEQ ID NO: 1729437 - DNA, 15 bp, Homo sapiens
gtagagagggacaat

SEQ ID NO: 1729438 - DNA, 15 bp, Homo sapiens
tagagagggacaatc

SEQ ID NO: 1729439 - DNA, 15 bp, Homo sapiens
agagagggacaatca

SEQ ID NO: 1729440 - DNA, 15 bp, Homo sapiens
gagagggacaatcag

SEQ ID NO: 1729441 - DNA, 15 bp, Homo sapiens
agagggacaatcagt

SEQ ID NO: 1729442 - DNA, 15 bp, Homo sapiens
gagggacaatcagta

SEQ ID NO: 1729443 - DNA, 15 bp, Homo sapiens
agggacaatcagtag

SEQ ID NO: 1729444 - DNA, 15 bp, Homo sapiens
gggacaatcagtaga

SEQ ID NO: 1729445 - DNA, 15 bp, Homo sapiens
ggacaatcagtagat

SEQ ID NO: 1729446 - DNA, 15 bp, Homo sapiens
gacaatcagtagatc

SEQ ID NO: 1729447 - DNA, 15 bp, Homo sapiens
acaatcagtagatcc

SEQ ID NO: 1729448 - DNA, 15 bp, Homo sapiens
caatcagtagatcct

SEQ ID NO: 1729449 - DNA, 15 bp, Homo sapiens
aatcagtagatcctt

SEQ ID NO: 1729450 - DNA, 15 bp, Homo sapiens
atcagtagatccttc

SEQ ID NO: 1729451 - DNA, 15 bp, Homo sapiens
tcagtagatccttct

SEQ ID NO: 1729452 - DNA, 15 bp, Homo sapiens
cagtagatccttcta

SEQ ID NO: 1729453 - DNA, 15 bp, Homo sapiens
agtagatccttctat

SEQ ID NO: 1729454 - DNA, 15 bp, Homo sapiens
gtagatccttctatt

SEQ ID NO: 1729455 - DNA, 15 bp, Homo sapiens
tagatccttctattc

SEQ ID NO: 1729456 - DNA, 15 bp, Homo sapiens
agatccttctattca

SEQ ID NO: 1729457 - DNA, 15 bp, Homo sapiens
gatccttctattcag

SEQ ID NO: 1729458 - DNA, 15 bp, Homo sapiens
atccttctattcagc

SEQ ID NO: 1729459 - DNA, 15 bp, Homo sapiens
tccttctattcagcc

SEQ ID NO: 1729460 - DNA, 15 bp, Homo sapiens
ccttctattcagcca

SEQ ID NO: 1729461 - DNA, 15 bp, Homo sapiens
cttctattcagccat

SEQ ID NO: 1729462 - DNA, 15 bp, Homo sapiens
ttctattcagccatc

SEQ ID NO: 1729463 - DNA, 15 bp, Homo sapiens
tctattcagccatct

SEQ ID NO: 1729464 - DNA, 15 bp, Homo sapiens
ctattcagccatctt

SEQ ID NO: 1729465 - DNA, 15 bp, Homo sapiens
tattcagccatcttg

SEQ ID NO: 1729466 - DNA, 15 bp, Homo sapiens
attcagccatcttgc

SEQ ID NO: 1729467 - DNA, 15 bp, Homo sapiens
ttcagccatcttgcc

SEQ ID NO: 1729468 - DNA, 15 bp, Homo sapiens
tcagccatcttgccc

SEQ ID NO: 1729469 - DNA, 15 bp, Homo sapiens
cagccatcttgccct

SEQ ID NO: 1729470 - DNA, 15 bp, Homo sapiens
agccatcttgccctg

SEQ ID NO: 1729471 - DNA, 15 bp, Homo sapiens
gccatcttgccctgc

SEQ ID NO: 1729472 - DNA, 15 bp, Homo sapiens
ccatcttgccctgcc

SEQ ID NO: 1729473 - DNA, 15 bp, Homo sapiens
catcttgccctgccc

SEQ ID NO: 1729474 - DNA, 15 bp, Homo sapiens
atcttgccctgccct

SEQ ID NO: 1729475 - DNA, 15 bp, Homo sapiens
tcttgccctgccctt

SEQ ID NO: 1729476 - DNA, 15 bp, Homo sapiens
cttgccctgcccttc

SEQ ID NO: 1729477 - DNA, 15 bp, Homo sapiens
ttgccctgcccttct

SEQ ID NO: 1729478 - DNA, 15 bp, Homo sapiens
tgccctgcccttctt

SEQ ID NO: 1729479 - DNA, 15 bp, Homo sapiens
gccctgcccttcttc

SEQ ID NO: 1729480 - DNA, 15 bp, Homo sapiens
ccctgcccttcttct

SEQ ID NO: 1729481 - DNA, 15 bp, Homo sapiens
cctgcccttcttctc

SEQ ID NO: 1729482 - DNA, 15 bp, Homo sapiens
ctgcccttcttctct

SEQ ID NO: 1729483 - DNA, 15 bp, Homo sapiens
tgcccttcttctcta

SEQ ID NO: 1729484 - DNA, 15 bp, Homo sapiens
gcccttcttctctac

SEQ ID NO: 1729485 - DNA, 15 bp, Homo sapiens
cccttcttctctacc

SEQ ID NO: 1729486 - DNA, 15 bp, Homo sapiens
ccttcttctctacct

SEQ ID NO: 1729487 - DNA, 15 bp, Homo sapiens
cttcttctctacctg

SEQ ID NO: 1729488 - DNA, 15 bp, Homo sapiens
ttcttctctacctgt

SEQ ID NO: 1729489 - DNA, 15 bp, Homo sapiens
tcttctctacctgtg

SEQ ID NO: 1729490 - DNA, 15 bp, Homo sapiens
cttctctacctgtgg

SEQ ID NO: 1729491 - DNA, 15 bp, Homo sapiens
ttctctacctgtggt

SEQ ID NO: 1729492 - DNA, 15 bp, Homo sapiens
tctctacctgtggta

SEQ ID NO: 1729493 - DNA, 15 bp, Homo sapiens
ctctacctgtggtag

SEQ ID NO: 1729494 - DNA, 15 bp, Homo sapiens
tctacctgtggtagt

SEQ ID NO: 1729495 - DNA, 15 bp, Homo sapiens
ctacctgtggtagtc

SEQ ID NO: 1729496 - DNA, 15 bp, Homo sapiens
tacctgtggtagtct

SEQ ID NO: 1729497 - DNA, 15 bp, Homo sapiens
acctgtggtagtctt

SEQ ID NO: 1729498 - DNA, 15 bp, Homo sapiens
cctgtggtagtcttg

SEQ ID NO: 1729499 - DNA, 15 bp, Homo sapiens
ctgtggtagtcttga

SEQ ID NO: 1729500 - DNA, 15 bp, Homo sapiens
tgtggtagtcttgac

SEQ ID NO: 1729501 - DNA, 15 bp, Homo sapiens
gtggtagtcttgact

SEQ ID NO: 1729502 - DNA, 15 bp, Homo sapiens
tggtagtcttgacta

SEQ ID NO: 1729503 - DNA, 15 bp, Homo sapiens
ggtagtcttgactat

SEQ ID NO: 1729504 - DNA, 15 bp, Homo sapiens
gtagtcttgactata

SEQ ID NO: 1729505 - DNA, 15 bp, Homo sapiens
tagtcttgactatat

SEQ ID NO: 1729506 - DNA, 15 bp, Homo sapiens
agtcttgactatatc

SEQ ID NO: 1729507 - DNA, 15 bp, Homo sapiens
gtcttgactatatct

SEQ ID NO: 1729508 - DNA, 15 bp, Homo sapiens
tcttgactatatcta

SEQ ID NO: 1729509 - DNA, 15 bp, Homo sapiens
cttgactatatctat

SEQ ID NO: 1729510 - DNA, 15 bp, Homo sapiens
ttgactatatctatt

SEQ ID NO: 1729511 - DNA, 15 bp, Homo sapiens
tgactatatctattt

SEQ ID NO: 1729512 - DNA, 15 bp, Homo sapiens
gactatatctatttg

SEQ ID NO: 1729513 - DNA, 15 bp, Homo sapiens
actatatctatttgt

SEQ ID NO: 1729514 - DNA, 15 bp, Homo sapiens
ctatatctatttgtg

SEQ ID NO: 1729515 - DNA, 15 bp, Homo sapiens
tatatctatttgtgt

SEQ ID NO: 1729516 - DNA, 15 bp, Homo sapiens
atatctatttgtgta

SEQ ID NO: 1729517 - DNA, 15 bp, Homo sapiens
tatctatttgtgtag

SEQ ID NO: 1729518 - DNA, 15 bp, Homo sapiens
atctatttgtgtaga

SEQ ID NO: 1729519 - DNA, 15 bp, Homo sapiens
tctatttgtgtagat

SEQ ID NO: 1729520 - DNA, 15 bp, Homo sapiens
ctatttgtgtagatt

SEQ ID NO: 1729521 - DNA, 15 bp, Homo sapiens
tatttgtgtagattt

SEQ ID NO: 1729522 - DNA, 15 bp, Homo sapiens
atttgtgtagatttt

SEQ ID NO: 1729523 - DNA, 15 bp, Homo sapiens
tttgtgtagattttt

SEQ ID NO: 1729524 - DNA, 15 bp, Homo sapiens
ttgtgtagatttttt

SEQ ID NO: 1729525 - DNA, 15 bp, Homo sapiens
tgtgtagatttttta

SEQ ID NO: 1729526 - DNA, 15 bp, Homo sapiens
gtgtagattttttag

SEQ ID NO: 1729527 - DNA, 15 bp, Homo sapiens
tgtagattttttagt

SEQ ID NO: 1729528 - DNA, 15 bp, Homo sapiens
gtagattttttagtg

SEQ ID NO: 1729529 - DNA, 15 bp, Homo sapiens
tagattttttagtgg

SEQ ID NO: 1729530 - DNA, 15 bp, Homo sapiens
agattttttagtggt

SEQ ID NO: 1729531 - DNA, 15 bp, Homo sapiens
gattttttagtggtc

SEQ ID NO: 1729532 - DNA, 15 bp, Homo sapiens
attttttagtggtcc

SEQ ID NO: 1729533 - DNA, 15 bp, Homo sapiens
ttttttagtggtcct

SEQ ID NO: 1729534 - DNA, 15 bp, Homo sapiens
tttttagtggtcctc

SEQ ID NO: 1729535 - DNA, 15 bp, Homo sapiens
ttttagtggtcctct

SEQ ID NO: 1729536 - DNA, 15 bp, Homo sapiens
tttagtggtcctctg

SEQ ID NO: 1729537 - DNA, 15 bp, Homo sapiens
ttagtggtcctctga

SEQ ID NO: 1729538 - DNA, 15 bp, Homo sapiens
tagtggtcctctgag

SEQ ID NO: 1729539 - DNA, 15 bp, Homo sapiens
agtggtcctctgagt

SEQ ID NO: 1729540 - DNA, 15 bp, Homo sapiens
gtggtcctctgagta

SEQ ID NO: 1729541 - DNA, 15 bp, Homo sapiens
tggtcctctgagtat

SEQ ID NO: 1729542 - DNA, 15 bp, Homo sapiens
ggtcctctgagtatt

SEQ ID NO: 1729543 - DNA, 15 bp, Homo sapiens
gtcctctgagtattg

SEQ ID NO: 1729544 - DNA, 15 bp, Homo sapiens
tcctctgagtattgc

SEQ ID NO: 1729545 - DNA, 15 bp, Homo sapiens
cctctgagtattgca

SEQ ID NO: 1729546 - DNA, 15 bp, Homo sapiens
ctctgagtattgcat

SEQ ID NO: 1729547 - DNA, 15 bp, Homo sapiens
tctgagtattgcatt

SEQ ID NO: 1729548 - DNA, 15 bp, Homo sapiens
ctgagtattgcatta

SEQ ID NO: 1729549 - DNA, 15 bp, Homo sapiens
tgagtattgcattat

SEQ ID NO: 1729550 - DNA, 15 bp, Homo sapiens
gagtattgcattata

SEQ ID NO: 1729551 - DNA, 15 bp, Homo sapiens
agtattgcattatat

SEQ ID NO: 1729552 - DNA, 15 bp, Homo sapiens
gtattgcattatata

SEQ ID NO: 1729553 - DNA, 15 bp, Homo sapiens
tattgcattatatat

SEQ ID NO: 1729554 - DNA, 15 bp, Homo sapiens
attgcattatatata

SEQ ID NO: 1729555 - DNA, 15 bp, Homo sapiens
ttgcattatatataa

SEQ ID NO: 1729556 - DNA, 15 bp, Homo sapiens
tgcattatatataaa

SEQ ID NO: 1729557 - DNA, 15 bp, Homo sapiens
gcattatatataaat

SEQ ID NO: 1729558 - DNA, 15 bp, Homo sapiens
cattatatataaata

SEQ ID NO: 1729559 - DNA, 15 bp, Homo sapiens
attatatataaataa

SEQ ID NO: 1729560 - DNA, 15 bp, Homo sapiens
ttatatataaataac

SEQ ID NO: 1729561 - DNA, 15 bp, Homo sapiens
tatatataaataact

SEQ ID NO: 1729562 - DNA, 15 bp, Homo sapiens
atatataaataactt

SEQ ID NO: 1729563 - DNA, 15 bp, Homo sapiens
tatataaataactta

SEQ ID NO: 1729564 - DNA, 15 bp, Homo sapiens
atataaataacttat

SEQ ID NO: 1729565 - DNA, 15 bp, Homo sapiens
tataaataacttatc

SEQ ID NO: 1729566 - DNA, 15 bp, Homo sapiens
ataaataacttatca

SEQ ID NO: 1729567 - DNA, 15 bp, Homo sapiens
taaataacttatcat

SEQ ID NO: 1729568 - DNA, 15 bp, Homo sapiens
aaataacttatcata

SEQ ID NO: 1729569 - DNA, 15 bp, Homo sapiens
aataacttatcatac

SEQ ID NO: 1729570 - DNA, 15 bp, Homo sapiens
ataacttatcatact

SEQ ID NO: 1729571 - DNA, 15 bp, Homo sapiens
taacttatcatactt

SEQ ID NO: 1729572 - DNA, 15 bp, Homo sapiens
aacttatcatacttt

SEQ ID NO: 1729573 - DNA, 15 bp, Homo sapiens
acttatcatacttta

SEQ ID NO: 1729574 - DNA, 15 bp, Homo sapiens
cttatcatactttac

SEQ ID NO: 1729575 - DNA, 15 bp, Homo sapiens
ttatcatactttact

SEQ ID NO: 1729576 - DNA, 15 bp, Homo sapiens
tatcatactttacta

SEQ ID NO: 1729577 - DNA, 15 bp, Homo sapiens
atcatactttactat

SEQ ID NO: 1729578 - DNA, 15 bp, Homo sapiens
tcatactttactatt

SEQ ID NO: 1729579 - DNA, 15 bp, Homo sapiens
catactttactattt

SEQ ID NO: 1729580 - DNA, 15 bp, Homo sapiens
atactttactatttt

SEQ ID NO: 1729581 - DNA, 15 bp, Homo sapiens
tactttactattttc

SEQ ID NO: 1729582 - DNA, 15 bp, Homo sapiens
actttactattttca

SEQ ID NO: 1729583 - DNA, 15 bp, Homo sapiens
ctttactattttcat

SEQ ID NO: 1729584 - DNA, 15 bp, Homo sapiens
tttactattttcatc

SEQ ID NO: 1729585 - DNA, 15 bp, Homo sapiens
ttactattttcatca

SEQ ID NO: 1729586 - DNA, 15 bp, Homo sapiens
tactattttcatcat

SEQ ID NO: 1729587 - DNA, 15 bp, Homo sapiens
actattttcatcatt

SEQ ID NO: 1729588 - DNA, 15 bp, Homo sapiens
ctattttcatcattt

SEQ ID NO: 1729589 - DNA, 15 bp, Homo sapiens
tattttcatcatttt

SEQ ID NO: 1729590 - DNA, 15 bp, Homo sapiens
attttcatcatttta

SEQ ID NO: 1729591 - DNA, 15 bp, Homo sapiens
ttttcatcattttac

SEQ ID NO: 1729592 - DNA, 15 bp, Homo sapiens
tttcatcattttact

SEQ ID NO: 1729593 - DNA, 15 bp, Homo sapiens
ttcatcattttactt

SEQ ID NO: 1729594 - DNA, 15 bp, Homo sapiens
tcatcattttacttg

SEQ ID NO: 1729595 - DNA, 15 bp, Homo sapiens
catcattttacttgt

SEQ ID NO: 1729596 - DNA, 15 bp, Homo sapiens
atcattttacttgtt

SEQ ID NO: 1729597 - DNA, 15 bp, Homo sapiens
tcattttacttgttt

SEQ ID NO: 1729598 - DNA, 15 bp, Homo sapiens
cattttacttgtttg

SEQ ID NO: 1729599 - DNA, 15 bp, Homo sapiens
attttacttgtttga

SEQ ID NO: 1729600 - DNA, 15 bp, Homo sapiens
ttttacttgtttgag

SEQ ID NO: 1729601 - DNA, 15 bp, Homo sapiens
tttacttgtttgagt

SEQ ID NO: 1729602 - DNA, 15 bp, Homo sapiens
ttacttgtttgagtg

SEQ ID NO: 1729603 - DNA, 15 bp, Homo sapiens
tacttgtttgagtga

SEQ ID NO: 1729604 - DNA, 15 bp, Homo sapiens
acttgtttgagtgaa

SEQ ID NO: 1729605 - DNA, 15 bp, Homo sapiens
cttgtttgagtgaag

SEQ ID NO: 1729606 - DNA, 15 bp, Homo sapiens
ttgtttgagtgaagt

SEQ ID NO: 1729607 - DNA, 15 bp, Homo sapiens
tgtttgagtgaagtg

SEQ ID NO: 1729608 - DNA, 15 bp, Homo sapiens
gtttgagtgaagtgt

SEQ ID NO: 1729609 - DNA, 15 bp, Homo sapiens
tttgagtgaagtgta

SEQ ID NO: 1729610 - DNA, 15 bp, Homo sapiens
ttgagtgaagtgtag

SEQ ID NO: 1729611 - DNA, 15 bp, Homo sapiens
tgagtgaagtgtaga

SEQ ID NO: 1729612 - DNA, 15 bp, Homo sapiens
gagtgaagtgtagaa

SEQ ID NO: 1729613 - DNA, 15 bp, Homo sapiens
agtgaagtgtagaaa

SEQ ID NO: 1729614 - DNA, 15 bp, Homo sapiens
gtgaagtgtagaaat

SEQ ID NO: 1729615 - DNA, 15 bp, Homo sapiens
tgaagtgtagaaatc

SEQ ID NO: 1729616 - DNA, 15 bp, Homo sapiens
gaagtgtagaaatct

SEQ ID NO: 1729617 - DNA, 15 bp, Homo sapiens
aagtgtagaaatctt

SEQ ID NO: 1729618 - DNA, 15 bp, Homo sapiens
agtgtagaaatctta

SEQ ID NO: 1729619 - DNA, 15 bp, Homo sapiens
gtgtagaaatcttat

SEQ ID NO: 1729620 - DNA, 15 bp, Homo sapiens
tgtagaaatcttatc

SEQ ID NO: 1729621 - DNA, 15 bp, Homo sapiens
gtagaaatcttatct

SEQ ID NO: 1729622 - DNA, 15 bp, Homo sapiens
tagaaatcttatctc

SEQ ID NO: 1729623 - DNA, 15 bp, Homo sapiens
agaaatcttatctcc

SEQ ID NO: 1729624 - DNA, 15 bp, Homo sapiens
gaaatcttatctccc

SEQ ID NO: 1729625 - DNA, 15 bp, Homo sapiens
aaatcttatctccct

SEQ ID NO: 1729626 - DNA, 15 bp, Homo sapiens
aatcttatctccctt

SEQ ID NO: 1729627 - DNA, 15 bp, Homo sapiens
atcttatctccctta

SEQ ID NO: 1729628 - DNA, 15 bp, Homo sapiens
tcttatctcccttat

SEQ ID NO: 1729629 - DNA, 15 bp, Homo sapiens
cttatctcccttata

SEQ ID NO: 1729630 - DNA, 15 bp, Homo sapiens
ttatctcccttatat

SEQ ID NO: 1729631 - DNA, 15 bp, Homo sapiens
tatctcccttatatc

SEQ ID NO: 1729632 - DNA, 15 bp, Homo sapiens
atctcccttatatcc

SEQ ID NO: 1729633 - DNA, 15 bp, Homo sapiens
tctcccttatatccc

SEQ ID NO: 1729634 - DNA, 15 bp, Homo sapiens
ctcccttatatccct

SEQ ID NO: 1729635 - DNA, 15 bp, Homo sapiens
tcccttatatccctt

SEQ ID NO: 1729636 - DNA, 15 bp, Homo sapiens
cccttatatcccttt

SEQ ID NO: 1729637 - DNA, 15 bp, Homo sapiens
ccttatatcccttta

SEQ ID NO: 1729638 - DNA, 15 bp, Homo sapiens
cttatatccctttac

SEQ ID NO: 1729639 - DNA, 15 bp, Homo sapiens
ttatatccctttact

SEQ ID NO: 1729640 - DNA, 15 bp, Homo sapiens
tatatccctttactc

SEQ ID NO: 1729641 - DNA, 15 bp, Homo sapiens
atatccctttactct

SEQ ID NO: 1729642 - DNA, 15 bp, Homo sapiens
tatccctttactctc

SEQ ID NO: 1729643 - DNA, 15 bp, Homo sapiens
atccctttactctct

SEQ ID NO: 1729644 - DNA, 15 bp, Homo sapiens
tccctttactctctc

SEQ ID NO: 1729645 - DNA, 15 bp, Homo sapiens
ccctttactctctct

SEQ ID NO: 1729646 - DNA, 15 bp, Homo sapiens
cctttactctctctc

SEQ ID NO: 1729647 - DNA, 15 bp, Homo sapiens
ctttactctctctca

SEQ ID NO: 1729648 - DNA, 15 bp, Homo sapiens
tttactctctctcat

SEQ ID NO: 1729649 - DNA, 15 bp, Homo sapiens
ttactctctctcatt

SEQ ID NO: 1729650 - DNA, 15 bp, Homo sapiens
tactctctctcattc

SEQ ID NO: 1729651 - DNA, 15 bp, Homo sapiens
actctctctcattca

SEQ ID NO: 1729652 - DNA, 15 bp, Homo sapiens
ctctctctcattcac

SEQ ID NO: 1729653 - DNA, 15 bp, Homo sapiens
tctctctcattcact

SEQ ID NO: 1729654 - DNA, 15 bp, Homo sapiens
ctctctcattcactt

SEQ ID NO: 1729655 - DNA, 15 bp, Homo sapiens
tctctcattcacttg

SEQ ID NO: 1729656 - DNA, 15 bp, Homo sapiens
ctctcattcacttgt

SEQ ID NO: 1729657 - DNA, 15 bp, Homo sapiens
tctcattcacttgta

SEQ ID NO: 1729658 - DNA, 15 bp, Homo sapiens
ctcattcacttgtaa

SEQ ID NO: 1729659 - DNA, 15 bp, Homo sapiens
tcattcacttgtaat

SEQ ID NO: 1729660 - DNA, 15 bp, Homo sapiens
cattcacttgtaatt

SEQ ID NO: 1729661 - DNA, 15 bp, Homo sapiens
attcacttgtaattg

SEQ ID NO: 1729662 - DNA, 15 bp, Homo sapiens
ttcacttgtaattgt

SEQ ID NO: 1729663 - DNA, 15 bp, Homo sapiens
tcacttgtaattgtc

SEQ ID NO: 1729664 - DNA, 15 bp, Homo sapiens
cacttgtaattgtct

SEQ ID NO: 1729665 - DNA, 15 bp, Homo sapiens
acttgtaattgtctt

SEQ ID NO: 1729666 - DNA, 15 bp, Homo sapiens
cttgtaattgtctta

SEQ ID NO: 1729667 - DNA, 15 bp, Homo sapiens
ttgtaattgtcttat

SEQ ID NO: 1729668 - DNA, 15 bp, Homo sapiens
tgtaattgtcttatg

SEQ ID NO: 1729669 - DNA, 15 bp, Homo sapiens
gtaattgtcttatgt

SEQ ID NO: 1729670 - DNA, 15 bp, Homo sapiens
taattgtcttatgta

SEQ ID NO: 1729671 - DNA, 15 bp, Homo sapiens
aattgtcttatgtat

SEQ ID NO: 1729672 - DNA, 15 bp, Homo sapiens
attgtcttatgtatt

SEQ ID NO: 1729673 - DNA, 15 bp, Homo sapiens
ttgtcttatgtattt

SEQ ID NO: 1729674 - DNA, 15 bp, Homo sapiens
tgtcttatgtatttc

SEQ ID NO: 1729675 - DNA, 15 bp, Homo sapiens
gtcttatgtatttcc

SEQ ID NO: 1729676 - DNA, 15 bp, Homo sapiens
tcttatgtatttccc

SEQ ID NO: 1729677 - DNA, 15 bp, Homo sapiens
cttatgtatttccct

SEQ ID NO: 1729678 - DNA, 15 bp, Homo sapiens
ttatgtatttccctt

SEQ ID NO: 1729679 - DNA, 15 bp, Homo sapiens
tatgtatttccctta

SEQ ID NO: 1729680 - DNA, 15 bp, Homo sapiens
atgtatttcccttac

SEQ ID NO: 1729681 - DNA, 15 bp, Homo sapiens
tgtatttcccttact

SEQ ID NO: 1729682 - DNA, 15 bp, Homo sapiens
gtatttcccttactt

SEQ ID NO: 1729683 - DNA, 15 bp, Homo sapiens
tatttcccttactta

SEQ ID NO: 1729684 - DNA, 15 bp, Homo sapiens
atttcccttacttat

SEQ ID NO: 1729685 - DNA, 15 bp, Homo sapiens
tttcccttacttata

SEQ ID NO: 1729686 - DNA, 15 bp, Homo sapiens
ttcccttacttatat

SEQ ID NO: 1729687 - DNA, 15 bp, Homo sapiens
tcccttacttatatt

SEQ ID NO: 1729688 - DNA, 15 bp, Homo sapiens
cccttacttatattt

SEQ ID NO: 1729689 - DNA, 15 bp, Homo sapiens
ccttacttatattta

SEQ ID NO: 1729690 - DNA, 15 bp, Homo sapiens
cttacttatatttag

SEQ ID NO: 1729691 - DNA, 15 bp, Homo sapiens
ttacttatatttaga

SEQ ID NO: 1729692 - DNA, 15 bp, Homo sapiens
tacttatatttagaa

SEQ ID NO: 1729693 - DNA, 15 bp, Homo sapiens
acttatatttagaac

SEQ ID NO: 1729694 - DNA, 15 bp, Homo sapiens
cttatatttagaacc

SEQ ID NO: 1729695 - DNA, 15 bp, Homo sapiens
ttatatttagaacca

SEQ ID NO: 1729696 - DNA, 15 bp, Homo sapiens
tatatttagaaccac

SEQ ID NO: 1729697 - DNA, 15 bp, Homo sapiens
atatttagaaccaca

SEQ ID NO: 1729698 - DNA, 15 bp, Homo sapiens
tatttagaaccacat

SEQ ID NO: 1729699 - DNA, 15 bp, Homo sapiens
atttagaaccacatc

SEQ ID NO: 1729700 - DNA, 15 bp, Homo sapiens
tttagaaccacatca

SEQ ID NO: 1729701 - DNA, 15 bp, Homo sapiens
ttagaaccacatcag

SEQ ID NO: 1729702 - DNA, 15 bp, Homo sapiens
tagaaccacatcaga

SEQ ID NO: 1729703 - DNA, 15 bp, Homo sapiens
agaaccacatcagac

SEQ ID NO: 1729704 - DNA, 15 bp, Homo sapiens
gaaccacatcagaca

SEQ ID NO: 1729705 - DNA, 15 bp, Homo sapiens
aaccacatcagacag

SEQ ID NO: 1729706 - DNA, 15 bp, Homo sapiens
accacatcagacagt

SEQ ID NO: 1729707 - DNA, 15 bp, Homo sapiens
ccacatcagacagtg

SEQ ID NO: 1729708 - DNA, 15 bp, Homo sapiens
cacatcagacagtga

SEQ ID NO: 1729709 - DNA, 15 bp, Homo sapiens
acatcagacagtgat

SEQ ID NO: 1729710 - DNA, 15 bp, Homo sapiens
catcagacagtgata

SEQ ID NO: 1729711 - DNA, 15 bp, Homo sapiens
atcagacagtgatat

SEQ ID NO: 1729712 - DNA, 15 bp, Homo sapiens
tcagacagtgatata

SEQ ID NO: 1729713 - DNA, 15 bp, Homo sapiens
cagacagtgatataa

SEQ ID NO: 1729714 - DNA, 15 bp, Homo sapiens
agacagtgatataat

SEQ ID NO: 1729715 - DNA, 15 bp, Homo sapiens
gacagtgatataatt

SEQ ID NO: 1729716 - DNA, 15 bp, Homo sapiens
acagtgatataattt

SEQ ID NO: 1729717 - DNA, 15 bp, Homo sapiens
cagtgatataatttt

SEQ ID NO: 1729718 - DNA, 15 bp, Homo sapiens
agtgatataattttt

SEQ ID NO: 1729719 - DNA, 15 bp, Homo sapiens
gtgatataatttttg

SEQ ID NO: 1729720 - DNA, 15 bp, Homo sapiens
tgatataatttttgc

SEQ ID NO: 1729721 - DNA, 15 bp, Homo sapiens
gatataatttttgct

SEQ ID NO: 1729722 - DNA, 15 bp, Homo sapiens
atataatttttgctt

SEQ ID NO: 1729723 - DNA, 15 bp, Homo sapiens
tataatttttgcttc

SEQ ID NO: 1729724 - DNA, 15 bp, Homo sapiens
ataatttttgcttca

SEQ ID NO: 1729725 - DNA, 15 bp, Homo sapiens
taatttttgcttcac

SEQ ID NO: 1729726 - DNA, 15 bp, Homo sapiens
aatttttgcttcacc

SEQ ID NO: 1729727 - DNA, 15 bp, Homo sapiens
atttttgcttcaccc

SEQ ID NO: 1729728 - DNA, 15 bp, Homo sapiens
tttttgcttcaccca

SEQ ID NO: 1729729 - DNA, 15 bp, Homo sapiens
ttttgcttcacccat

SEQ ID NO: 1729730 - DNA, 15 bp, Homo sapiens
tttgcttcacccata

SEQ ID NO: 1729731 - DNA, 15 bp, Homo sapiens
ttgcttcacccataa

SEQ ID NO: 1729732 - DNA, 15 bp, Homo sapiens
tgcttcacccataaa

SEQ ID NO: 1729733 - DNA, 15 bp, Homo sapiens
gcttcacccataaaa

SEQ ID NO: 1729734 - DNA, 15 bp, Homo sapiens
cttcacccataaaaa

SEQ ID NO: 1729735 - DNA, 15 bp, Homo sapiens
ttcacccataaaaaa

SEQ ID NO: 1729736 - DNA, 15 bp, Homo sapiens
tcacccataaaaaat

SEQ ID NO: 1729737 - DNA, 15 bp, Homo sapiens
cacccataaaaaata

SEQ ID NO: 1729738 - DNA, 15 bp, Homo sapiens
acccataaaaaataa

SEQ ID NO: 1729739 - DNA, 15 bp, Homo sapiens
cccataaaaaataat

SEQ ID NO: 1729740 - DNA, 15 bp, Homo sapiens
ccataaaaaataatt

SEQ ID NO: 1729741 - DNA, 15 bp, Homo sapiens
cataaaaaataattt

SEQ ID NO: 1729742 - DNA, 15 bp, Homo sapiens
ataaaaaataattta

SEQ ID NO: 1729743 - DNA, 15 bp, Homo sapiens
taaaaaataatttag

SEQ ID NO: 1729744 - DNA, 15 bp, Homo sapiens
aaaaaataatttaga

SEQ ID NO: 1729745 - DNA, 15 bp, Homo sapiens
aaaaataatttagaa

SEQ ID NO: 1729746 - DNA, 15 bp, Homo sapiens
aaaataatttagaaa

SEQ ID NO: 1729747 - DNA, 15 bp, Homo sapiens
aaataatttagaaaa

SEQ ID NO: 1729748 - DNA, 15 bp, Homo sapiens
aataatttagaaaac

SEQ ID NO: 1729749 - DNA, 15 bp, Homo sapiens
ataatttagaaaact

SEQ ID NO: 1729750 - DNA, 15 bp, Homo sapiens
taatttagaaaactc

SEQ ID NO: 1729751 - DNA, 15 bp, Homo sapiens
aatttagaaaactca

SEQ ID NO: 1729752 - DNA, 15 bp, Homo sapiens
atttagaaaactcaa

SEQ ID NO: 1729753 - DNA, 15 bp, Homo sapiens
tttagaaaactcaat

SEQ ID NO: 1729754 - DNA, 15 bp, Homo sapiens
ttagaaaactcaata

SEQ ID NO: 1729755 - DNA, 15 bp, Homo sapiens
tagaaaactcaatag

SEQ ID NO: 1729756 - DNA, 15 bp, Homo sapiens
agaaaactcaatagg

SEQ ID NO: 1729757 - DNA, 15 bp, Homo sapiens
gaaaactcaatagga

SEQ ID NO: 1729758 - DNA, 15 bp, Homo sapiens
aaaactcaataggaa

SEQ ID NO: 1729759 - DNA, 15 bp, Homo sapiens
aaactcaataggaag

SEQ ID NO: 1729760 - DNA, 15 bp, Homo sapiens
aactcaataggaaga

SEQ ID NO: 1729761 - DNA, 15 bp, Homo sapiens
actcaataggaagag

SEQ ID NO: 1729762 - DNA, 15 bp, Homo sapiens
ctcaataggaagagg

SEQ ID NO: 1729763 - DNA, 15 bp, Homo sapiens
tcaataggaagagga

SEQ ID NO: 1729764 - DNA, 15 bp, Homo sapiens
caataggaagaggaa

SEQ ID NO: 1729765 - DNA, 15 bp, Homo sapiens
aataggaagaggaaa

SEQ ID NO: 1729766 - DNA, 15 bp, Homo sapiens
ataggaagaggaaag

SEQ ID NO: 1729767 - DNA, 15 bp, Homo sapiens
taggaagaggaaagt

SEQ ID NO: 1729768 - DNA, 15 bp, Homo sapiens
aggaagaggaaagtt

SEQ ID NO: 1729769 - DNA, 15 bp, Homo sapiens
ggaagaggaaagttt

SEQ ID NO: 1729770 - DNA, 15 bp, Homo sapiens
gaagaggaaagtttc

SEQ ID NO: 1729771 - DNA, 15 bp, Homo sapiens
aagaggaaagtttct

SEQ ID NO: 1729772 - DNA, 15 bp, Homo sapiens
agaggaaagtttctt

SEQ ID NO: 1729773 - DNA, 15 bp, Homo sapiens
gaggaaagtttcttg

SEQ ID NO: 1729774 - DNA, 15 bp, Homo sapiens
aggaaagtttcttgt

SEQ ID NO: 1729775 - DNA, 15 bp, Homo sapiens
ggaaagtttcttgta

SEQ ID NO: 1729776 - DNA, 15 bp, Homo sapiens
gaaagtttcttgtat

SEQ ID NO: 1729777 - DNA, 15 bp, Homo sapiens
aaagtttcttgtatt

SEQ ID NO: 1729778 - DNA, 15 bp, Homo sapiens
aagtttcttgtattt

SEQ ID NO: 1729779 - DNA, 15 bp, Homo sapiens
agtttcttgtattta

SEQ ID NO: 1729780 - DNA, 15 bp, Homo sapiens
gtttcttgtatttac

SEQ ID NO: 1729781 - DNA, 15 bp, Homo sapiens
tttcttgtatttacc

SEQ ID NO: 1729782 - DNA, 15 bp, Homo sapiens
ttcttgtatttacca

SEQ ID NO: 1729783 - DNA, 15 bp, Homo sapiens
tcttgtatttaccaa

SEQ ID NO: 1729784 - DNA, 15 bp, Homo sapiens
cttgtatttaccaat

SEQ ID NO: 1729785 - DNA, 15 bp, Homo sapiens
ttgtatttaccaata

SEQ ID NO: 1729786 - DNA, 15 bp, Homo sapiens
tgtatttaccaatat

SEQ ID NO: 1729787 - DNA, 15 bp, Homo sapiens
gtatttaccaatatt

SEQ ID NO: 1729788 - DNA, 15 bp, Homo sapiens
tatttaccaatattt

SEQ ID NO: 1729789 - DNA, 15 bp, Homo sapiens
atttaccaatatttt

SEQ ID NO: 1729790 - DNA, 15 bp, Homo sapiens
tttaccaatattttt

SEQ ID NO: 1729791 - DNA, 15 bp, Homo sapiens
ttaccaatatttttc

SEQ ID NO: 1729792 - DNA, 15 bp, Homo sapiens
taccaatatttttct

SEQ ID NO: 1729793 - DNA, 15 bp, Homo sapiens
accaatatttttctt

SEQ ID NO: 1729794 - DNA, 15 bp, Homo sapiens
ccaatatttttcttg

SEQ ID NO: 1729795 - DNA, 15 bp, Homo sapiens
caatatttttcttga

SEQ ID NO: 1729796 - DNA, 15 bp, Homo sapiens
aatatttttcttgac

SEQ ID NO: 1729797 - DNA, 15 bp, Homo sapiens
atatttttcttgacc

SEQ ID NO: 1729798 - DNA, 15 bp, Homo sapiens
tatttttcttgacca

SEQ ID NO: 1729799 - DNA, 15 bp, Homo sapiens
atttttcttgaccat

SEQ ID NO: 1729800 - DNA, 15 bp, Homo sapiens
tttttcttgaccatg

SEQ ID NO: 1729801 - DNA, 15 bp, Homo sapiens
ttttcttgaccatgt

SEQ ID NO: 1729802 - DNA, 15 bp, Homo sapiens
tttcttgaccatgtt

SEQ ID NO: 1729803 - DNA, 15 bp, Homo sapiens
ttcttgaccatgttc

SEQ ID NO: 1729804 - DNA, 15 bp, Homo sapiens
tcttgaccatgttct

SEQ ID NO: 1729805 - DNA, 15 bp, Homo sapiens
cttgaccatgttctt

SEQ ID NO: 1729806 - DNA, 15 bp, Homo sapiens
ttgaccatgttcttt

SEQ ID NO: 1729807 - DNA, 15 bp, Homo sapiens
tgaccatgttcttta

SEQ ID NO: 1729808 - DNA, 15 bp, Homo sapiens
gaccatgttctttat

SEQ ID NO: 1729809 - DNA, 15 bp, Homo sapiens
accatgttctttatt

SEQ ID NO: 1729810 - DNA, 15 bp, Homo sapiens
ccatgttctttattc

SEQ ID NO: 1729811 - DNA, 15 bp, Homo sapiens
catgttctttattct

SEQ ID NO: 1729812 - DNA, 15 bp, Homo sapiens
atgttctttattcta

SEQ ID NO: 1729813 - DNA, 15 bp, Homo sapiens
tgttctttattctag

SEQ ID NO: 1729814 - DNA, 15 bp, Homo sapiens
gttctttattctaga

SEQ ID NO: 1729815 - DNA, 15 bp, Homo sapiens
ttctttattctagat

SEQ ID NO: 1729816 - DNA, 15 bp, Homo sapiens
tctttattctagata

SEQ ID NO: 1729817 - DNA, 15 bp, Homo sapiens
ctttattctagatat

SEQ ID NO: 1729818 - DNA, 15 bp, Homo sapiens
tttattctagatatt

SEQ ID NO: 1729819 - DNA, 15 bp, Homo sapiens
ttattctagatattc

SEQ ID NO: 1729820 - DNA, 15 bp, Homo sapiens
tattctagatattct

SEQ ID NO: 1729821 - DNA, 15 bp, Homo sapiens
attctagatattcta

SEQ ID NO: 1729822 - DNA, 15 bp, Homo sapiens
ttctagatattctaa

SEQ ID NO: 1729823 - DNA, 15 bp, Homo sapiens
tctagatattctaag

SEQ ID NO: 1729824 - DNA, 15 bp, Homo sapiens
ctagatattctaagt

SEQ ID NO: 1729825 - DNA, 15 bp, Homo sapiens
tagatattctaagtt

SEQ ID NO: 1729826 - DNA, 15 bp, Homo sapiens
agatattctaagttt

SEQ ID NO: 1729827 - DNA, 15 bp, Homo sapiens
gatattctaagtttc

SEQ ID NO: 1729828 - DNA, 15 bp, Homo sapiens
atattctaagtttct

SEQ ID NO: 1729829 - DNA, 15 bp, Homo sapiens
tattctaagtttctc

SEQ ID NO: 1729830 - DNA, 15 bp, Homo sapiens
attctaagtttctcc

SEQ ID NO: 1729831 - DNA, 15 bp, Homo sapiens
ttctaagtttctcct

SEQ ID NO: 1729832 - DNA, 15 bp, Homo sapiens
tctaagtttctcctg

SEQ ID NO: 1729833 - DNA, 15 bp, Homo sapiens
ctaagtttctcctgt

SEQ ID NO: 1729834 - DNA, 15 bp, Homo sapiens
taagtttctcctgtt

SEQ ID NO: 1729835 - DNA, 15 bp, Homo sapiens
aagtttctcctgttt

SEQ ID NO: 1729836 - DNA, 15 bp, Homo sapiens
agtttctcctgttta

SEQ ID NO: 1729837 - DNA, 15 bp, Homo sapiens
gtttctcctgtttat

SEQ ID NO: 1729838 - DNA, 15 bp, Homo sapiens
tttctcctgtttata

SEQ ID NO: 1729839 - DNA, 15 bp, Homo sapiens
ttctcctgtttataa

SEQ ID NO: 1729840 - DNA, 15 bp, Homo sapiens
tctcctgtttataat

SEQ ID NO: 1729841 - DNA, 15 bp, Homo sapiens
ctcctgtttataatt

SEQ ID NO: 1729842 - DNA, 15 bp, Homo sapiens
tcctgtttataattt

SEQ ID NO: 1729843 - DNA, 15 bp, Homo sapiens
cctgtttataatttt

SEQ ID NO: 1729844 - DNA, 15 bp, Homo sapiens
ctgtttataattttc

SEQ ID NO: 1729845 - DNA, 15 bp, Homo sapiens
tgtttataattttct

SEQ ID NO: 1729846 - DNA, 15 bp, Homo sapiens
gtttataattttcta

SEQ ID NO: 1729847 - DNA, 15 bp, Homo sapiens
tttataattttctat

SEQ ID NO: 1729848 - DNA, 15 bp, Homo sapiens
ttataattttctatt

SEQ ID NO: 1729849 - DNA, 15 bp, Homo sapiens
tataattttctattt

SEQ ID NO: 1729850 - DNA, 15 bp, Homo sapiens
ataattttctattta

SEQ ID NO: 1729851 - DNA, 15 bp, Homo sapiens
taattttctatttag

SEQ ID NO: 1729852 - DNA, 15 bp, Homo sapiens
aattttctatttaga

SEQ ID NO: 1729853 - DNA, 15 bp, Homo sapiens
attttctatttagag

SEQ ID NO: 1729854 - DNA, 15 bp, Homo sapiens
ttttctatttagaga

SEQ ID NO: 1729855 - DNA, 15 bp, Homo sapiens
tttctatttagagaa

SEQ ID NO: 1729856 - DNA, 15 bp, Homo sapiens
ttctatttagagaac

SEQ ID NO: 1729857 - DNA, 15 bp, Homo sapiens
tctatttagagaact

SEQ ID NO: 1729858 - DNA, 15 bp, Homo sapiens
ctatttagagaactt

SEQ ID NO: 1729859 - DNA, 15 bp, Homo sapiens
tatttagagaacttc

SEQ ID NO: 1729860 - DNA, 15 bp, Homo sapiens
atttagagaacttcc

SEQ ID NO: 1729861 - DNA, 15 bp, Homo sapiens
tttagagaacttcct

SEQ ID NO: 1729862 - DNA, 15 bp, Homo sapiens
ttagagaacttcctt

SEQ ID NO: 1729863 - DNA, 15 bp, Homo sapiens
tagagaacttccttt

SEQ ID NO: 1729864 - DNA, 15 bp, Homo sapiens
agagaacttccttta

SEQ ID NO: 1729865 - DNA, 15 bp, Homo sapiens
agaacttcctttagt

SEQ ID NO: 1729866 - DNA, 15 bp, Homo sapiens
gaacttcctttagtc

SEQ ID NO: 1729867 - DNA, 15 bp, Homo sapiens
aacttcctttagtca

SEQ ID NO: 1729868 - DNA, 15 bp, Homo sapiens
acttcctttagtcat

SEQ ID NO: 1729869 - DNA, 15 bp, Homo sapiens
cttcctttagtcatt

SEQ ID NO: 1729870 - DNA, 15 bp, Homo sapiens
ttcctttagtcattc

SEQ ID NO: 1729871 - DNA, 15 bp, Homo sapiens
tcctttagtcattct

SEQ ID NO: 1729872 - DNA, 15 bp, Homo sapiens
cctttagtcattctt

SEQ ID NO: 1729873 - DNA, 15 bp, Homo sapiens
ctttagtcattcttt

SEQ ID NO: 1729874 - DNA, 15 bp, Homo sapiens
tttagtcattctttt

SEQ ID NO: 1729875 - DNA, 15 bp, Homo sapiens
ttagtcattctttta

SEQ ID NO: 1729876 - DNA, 15 bp, Homo sapiens
tagtcattcttttat

SEQ ID NO: 1729877 - DNA, 15 bp, Homo sapiens
agtcattcttttatt

SEQ ID NO: 1729878 - DNA, 15 bp, Homo sapiens
gtcattcttttattt

SEQ ID NO: 1729879 - DNA, 15 bp, Homo sapiens
tcattcttttatttt

SEQ ID NO: 1729880 - DNA, 15 bp, Homo sapiens
cattcttttattttg

SEQ ID NO: 1729881 - DNA, 15 bp, Homo sapiens
attcttttattttga

SEQ ID NO: 1729882 - DNA, 15 bp, Homo sapiens
ttcttttattttgaa

SEQ ID NO: 1729883 - DNA, 15 bp, Homo sapiens
tcttttattttgaaa

SEQ ID NO: 1729884 - DNA, 15 bp, Homo sapiens
cttttattttgaaaa

SEQ ID NO: 1729885 - DNA, 15 bp, Homo sapiens
ttttattttgaaaag

SEQ ID NO: 1729886 - DNA, 15 bp, Homo sapiens
tttattttgaaaagc

SEQ ID NO: 1729887 - DNA, 15 bp, Homo sapiens
ttattttgaaaagcg

SEQ ID NO: 1729888 - DNA, 15 bp, Homo sapiens
tattttgaaaagcgt

SEQ ID NO: 1729889 - DNA, 15 bp, Homo sapiens
attttgaaaagcgtt

SEQ ID NO: 1729890 - DNA, 15 bp, Homo sapiens
ttttgaaaagcgtta

SEQ ID NO: 1729891 - DNA, 15 bp, Homo sapiens
tttgaaaagcgttag

SEQ ID NO: 1729892 - DNA, 15 bp, Homo sapiens
ttgaaaagcgttagc

SEQ ID NO: 1729893 - DNA, 15 bp, Homo sapiens
tgaaaagcgttagct

SEQ ID NO: 1729894 - DNA, 15 bp, Homo sapiens
gaaaagcgttagctt

SEQ ID NO: 1729895 - DNA, 15 bp, Homo sapiens
aaaagcgttagcttt

SEQ ID NO: 1729896 - DNA, 15 bp, Homo sapiens
aaagcgttagcttta

SEQ ID NO: 1729897 - DNA, 15 bp, Homo sapiens
aagcgttagctttag

SEQ ID NO: 1729898 - DNA, 15 bp, Homo sapiens
agcgttagctttaga

SEQ ID NO: 1729899 - DNA, 15 bp, Homo sapiens
gcgttagctttagaa

SEQ ID NO: 1729900 - DNA, 15 bp, Homo sapiens
cgttagctttagaat

SEQ ID NO: 1729901 - DNA, 15 bp, Homo sapiens
gttagctttagaata

SEQ ID NO: 1729902 - DNA, 15 bp, Homo sapiens
ttagctttagaataa

SEQ ID NO: 1729903 - DNA, 15 bp, Homo sapiens
tagctttagaataac

SEQ ID NO: 1729904 - DNA, 15 bp, Homo sapiens
agctttagaataact

SEQ ID NO: 1729905 - DNA, 15 bp, Homo sapiens
gctttagaataactt

SEQ ID NO: 1729906 - DNA, 15 bp, Homo sapiens
ctttagaataacttt

SEQ ID NO: 1729907 - DNA, 15 bp, Homo sapiens
tttagaataacttta

SEQ ID NO: 1729908 - DNA, 15 bp, Homo sapiens
ttagaataactttaa

SEQ ID NO: 1729909 - DNA, 15 bp, Homo sapiens
tagaataactttaag

SEQ ID NO: 1729910 - DNA, 15 bp, Homo sapiens
agaataactttaaga

SEQ ID NO: 1729911 - DNA, 15 bp, Homo sapiens
gaataactttaagag

SEQ ID NO: 1729912 - DNA, 15 bp, Homo sapiens
aataactttaagagt

SEQ ID NO: 1729913 - DNA, 15 bp, Homo sapiens
ataactttaagagtt

SEQ ID NO: 1729914 - DNA, 15 bp, Homo sapiens
taactttaagagtta

SEQ ID NO: 1729915 - DNA, 15 bp, Homo sapiens
aactttaagagttag

SEQ ID NO: 1729916 - DNA, 15 bp, Homo sapiens
actttaagagttagt

SEQ ID NO: 1729917 - DNA, 15 bp, Homo sapiens
ctttaagagttagta

SEQ ID NO: 1729918 - DNA, 15 bp, Homo sapiens
tttaagagttagtaa

SEQ ID NO: 1729919 - DNA, 15 bp, Homo sapiens
ttaagagttagtaaa

SEQ ID NO: 1729920 - DNA, 15 bp, Homo sapiens
taagagttagtaaat

SEQ ID NO: 1729921 - DNA, 15 bp, Homo sapiens
aagagttagtaaatg

SEQ ID NO: 1729922 - DNA, 15 bp, Homo sapiens
agagttagtaaatgt

SEQ ID NO: 1729923 - DNA, 15 bp, Homo sapiens
gagttagtaaatgtc

SEQ ID NO: 1729924 - DNA, 15 bp, Homo sapiens
agttagtaaatgtca

SEQ ID NO: 1729925 - DNA, 15 bp, Homo sapiens
gttagtaaatgtcaa

SEQ ID NO: 1729926 - DNA, 15 bp, Homo sapiens
ttagtaaatgtcaat

SEQ ID NO: 1729927 - DNA, 15 bp, Homo sapiens
tagtaaatgtcaata

SEQ ID NO: 1729928 - DNA, 15 bp, Homo sapiens
agtaaatgtcaataa

SEQ ID NO: 1729929 - DNA, 15 bp, Homo sapiens
gtaaatgtcaataac

SEQ ID NO: 1729930 - DNA, 15 bp, Homo sapiens
taaatgtcaataacc

SEQ ID NO: 1729931 - DNA, 15 bp, Homo sapiens
aaatgtcaataacct

SEQ ID NO: 1729932 - DNA, 15 bp, Homo sapiens
aatgtcaataacctt

SEQ ID NO: 1729933 - DNA, 15 bp, Homo sapiens
atgtcaataacctta

SEQ ID NO: 1729934 - DNA, 15 bp, Homo sapiens
tgtcaataaccttaa

SEQ ID NO: 1729935 - DNA, 15 bp, Homo sapiens
gtcaataaccttaag

SEQ ID NO: 1729936 - DNA, 15 bp, Homo sapiens
tcaataaccttaagc

SEQ ID NO: 1729937 - DNA, 15 bp, Homo sapiens
caataaccttaagcc

SEQ ID NO: 1729938 - DNA, 15 bp, Homo sapiens
aataaccttaagcct

SEQ ID NO: 1729939 - DNA, 15 bp, Homo sapiens
ataaccttaagccta

SEQ ID NO: 1729940 - DNA, 15 bp, Homo sapiens
taaccttaagcctag

SEQ ID NO: 1729941 - DNA, 15 bp, Homo sapiens
aaccttaagcctagt

SEQ ID NO: 1729942 - DNA, 15 bp, Homo sapiens
accttaagcctagtg

SEQ ID NO: 1729943 - DNA, 15 bp, Homo sapiens
ccttaagcctagtga

SEQ ID NO: 1729944 - DNA, 15 bp, Homo sapiens
cttaagcctagtgac

SEQ ID NO: 1729945 - DNA, 15 bp, Homo sapiens
ttaagcctagtgacc

SEQ ID NO: 1729946 - DNA, 15 bp, Homo sapiens
taagcctagtgaccc

SEQ ID NO: 1729947 - DNA, 15 bp, Homo sapiens
aagcctagtgaccct

SEQ ID NO: 1729948 - DNA, 15 bp, Homo sapiens
agcctagtgacccta

SEQ ID NO: 1729949 - DNA, 15 bp, Homo sapiens
gcctagtgaccctac

SEQ ID NO: 1729950 - DNA, 15 bp, Homo sapiens
cctagtgaccctact

SEQ ID NO: 1729951 - DNA, 15 bp, Homo sapiens
ctagtgaccctactc

SEQ ID NO: 1729952 - DNA, 15 bp, Homo sapiens
tagtgaccctactct

SEQ ID NO: 1729953 - DNA, 15 bp, Homo sapiens
agtgaccctactctt

SEQ ID NO: 1729954 - DNA, 15 bp, Homo sapiens
gtgaccctactcttg

SEQ ID NO: 1729955 - DNA, 15 bp, Homo sapiens
tgaccctactcttgc

SEQ ID NO: 1729956 - DNA, 15 bp, Homo sapiens
gaccctactcttgct

SEQ ID NO: 1729957 - DNA, 15 bp, Homo sapiens
accctactcttgctt

SEQ ID NO: 1729958 - DNA, 15 bp, Homo sapiens
ccctactcttgctta

SEQ ID NO: 1729959 - DNA, 15 bp, Homo sapiens
cctactcttgcttat

SEQ ID NO: 1729960 - DNA, 15 bp, Homo sapiens
ctactcttgcttatc

SEQ ID NO: 1729961 - DNA, 15 bp, Homo sapiens
tactcttgcttatcc

SEQ ID NO: 1729962 - DNA, 15 bp, Homo sapiens
actcttgcttatcca

SEQ ID NO: 1729963 - DNA, 15 bp, Homo sapiens
ctcttgcttatccat

SEQ ID NO: 1729964 - DNA, 15 bp, Homo sapiens
tcttgcttatccatt

SEQ ID NO: 1729965 - DNA, 15 bp, Homo sapiens
cttgcttatccattt

SEQ ID NO: 1729966 - DNA, 15 bp, Homo sapiens
ttgcttatccatttc

SEQ ID NO: 1729967 - DNA, 15 bp, Homo sapiens
tgcttatccatttca

SEQ ID NO: 1729968 - DNA, 15 bp, Homo sapiens
gcttatccatttcat

SEQ ID NO: 1729969 - DNA, 15 bp, Homo sapiens
cttatccatttcatc

SEQ ID NO: 1729970 - DNA, 15 bp, Homo sapiens
ttatccatttcatcg

SEQ ID NO: 1729971 - DNA, 15 bp, Homo sapiens
tatccatttcatcgt

SEQ ID NO: 1729972 - DNA, 15 bp, Homo sapiens
atccatttcatcgtt

SEQ ID NO: 1729973 - DNA, 15 bp, Homo sapiens
tccatttcatcgttg

SEQ ID NO: 1729974 - DNA, 15 bp, Homo sapiens
ccatttcatcgttgg

SEQ ID NO: 1729975 - DNA, 15 bp, Homo sapiens
catttcatcgttggc

SEQ ID NO: 1729976 - DNA, 15 bp, Homo sapiens
atttcatcgttggcc

SEQ ID NO: 1729977 - DNA, 15 bp, Homo sapiens
tttcatcgttggcct

SEQ ID NO: 1729978 - DNA, 15 bp, Homo sapiens
ttcatcgttggcctt

SEQ ID NO: 1729979 - DNA, 15 bp, Homo sapiens
tcatcgttggccttg

SEQ ID NO: 1729980 - DNA, 15 bp, Homo sapiens
catcgttggccttgg

SEQ ID NO: 1729981 - DNA, 15 bp, Homo sapiens
atcgttggccttggc

SEQ ID NO: 1729982 - DNA, 15 bp, Homo sapiens
tcgttggccttggca

SEQ ID NO: 1729983 - DNA, 15 bp, Homo sapiens
cgttggccttggcac

SEQ ID NO: 1729984 - DNA, 15 bp, Homo sapiens
gttggccttggcacc

SEQ ID NO: 1729985 - DNA, 15 bp, Homo sapiens
ttggccttggcacct

SEQ ID NO: 1729986 - DNA, 15 bp, Homo sapiens
tggccttggcacctt

SEQ ID NO: 1729987 - DNA, 15 bp, Homo sapiens
ggccttggcaccttg

SEQ ID NO: 1729988 - DNA, 15 bp, Homo sapiens
gccttggcaccttgc

SEQ ID NO: 1729989 - DNA, 15 bp, Homo sapiens
ccttggcaccttgca

SEQ ID NO: 1729990 - DNA, 15 bp, Homo sapiens
ttggcaccttgcagc

SEQ ID NO: 1729991 - DNA, 15 bp, Homo sapiens
tggcaccttgcagcc

SEQ ID NO: 1729992 - DNA, 15 bp, Homo sapiens
ggcaccttgcagccc

SEQ ID NO: 1729993 - DNA, 15 bp, Homo sapiens
gcaccttgcagccct

SEQ ID NO: 1729994 - DNA, 15 bp, Homo sapiens
caccttgcagccctc

SEQ ID NO: 1729995 - DNA, 15 bp, Homo sapiens
accttgcagccctcc

SEQ ID NO: 1729996 - DNA, 15 bp, Homo sapiens
ccttgcagccctccc

SEQ ID NO: 1729997 - DNA, 15 bp, Homo sapiens
cttgcagccctccct

SEQ ID NO: 1729998 - DNA, 15 bp, Homo sapiens
ttgcagccctccctg

SEQ ID NO: 1729999 - DNA, 15 bp, Homo sapiens
tgcagccctccctgt

SEQ ID NO: 1730000 - DNA, 15 bp, Homo sapiens
gcagccctccctgtc

SEQ ID NO: 1730001 - DNA, 15 bp, Homo sapiens
cagccctccctgtcc

SEQ ID NO: 1730002 - DNA, 15 bp, Homo sapiens
agccctccctgtcca

SEQ ID NO: 1730003 - DNA, 15 bp, Homo sapiens
gccctccctgtccac

SEQ ID NO: 1730004 - DNA, 15 bp, Homo sapiens
ccctccctgtccacc

SEQ ID NO: 1730005 - DNA, 15 bp, Homo sapiens
cctccctgtccaccc

SEQ ID NO: 1730006 - DNA, 15 bp, Homo sapiens
ctccctgtccaccca

SEQ ID NO: 1730007 - DNA, 15 bp, Homo sapiens
tccctgtccacccag

SEQ ID NO: 1730008 - DNA, 15 bp, Homo sapiens
ccctgtccacccagt

SEQ ID NO: 1730009 - DNA, 15 bp, Homo sapiens
cctgtccacccagtg

SEQ ID NO: 1730010 - DNA, 15 bp, Homo sapiens
ctgtccacccagtgg

SEQ ID NO: 1730011 - DNA, 15 bp, Homo sapiens
tgtccacccagtggt

SEQ ID NO: 1730012 - DNA, 15 bp, Homo sapiens
gtccacccagtggtt

SEQ ID NO: 1730013 - DNA, 15 bp, Homo sapiens
tccacccagtggttt

SEQ ID NO: 1730014 - DNA, 15 bp, Homo sapiens
ccacccagtggtttt

SEQ ID NO: 1730015 - DNA, 15 bp, Homo sapiens
cacccagtggttttc

SEQ ID NO: 1730016 - DNA, 15 bp, Homo sapiens
acccagtggttttca

SEQ ID NO: 1730017 - DNA, 15 bp, Homo sapiens
cccagtggttttcat

SEQ ID NO: 1730018 - DNA, 15 bp, Homo sapiens
ccagtggttttcatt

SEQ ID NO: 1730019 - DNA, 15 bp, Homo sapiens
cagtggttttcatta

SEQ ID NO: 1730020 - DNA, 15 bp, Homo sapiens
agtggttttcattac

SEQ ID NO: 1730021 - DNA, 15 bp, Homo sapiens
gtggttttcattact

SEQ ID NO: 1730022 - DNA, 15 bp, Homo sapiens
tggttttcattactc

SEQ ID NO: 1730023 - DNA, 15 bp, Homo sapiens
ggttttcattactct

SEQ ID NO: 1730024 - DNA, 15 bp, Homo sapiens
gttttcattactctc

SEQ ID NO: 1730025 - DNA, 15 bp, Homo sapiens
ttttcattactctca

SEQ ID NO: 1730026 - DNA, 15 bp, Homo sapiens
tttcattactctcac

SEQ ID NO: 1730027 - DNA, 15 bp, Homo sapiens
ttcattactctcaca

SEQ ID NO: 1730028 - DNA, 15 bp, Homo sapiens
tcattactctcacag

SEQ ID NO: 1730029 - DNA, 15 bp, Homo sapiens
cattactctcacaga

SEQ ID NO: 1730030 - DNA, 15 bp, Homo sapiens
attactctcacagaa

SEQ ID NO: 1730031 - DNA, 15 bp, Homo sapiens
ttactctcacagaac

SEQ ID NO: 1730032 - DNA, 15 bp, Homo sapiens
tactctcacagaaca

SEQ ID NO: 1730033 - DNA, 15 bp, Homo sapiens
actctcacagaacac

SEQ ID NO: 1730034 - DNA, 15 bp, Homo sapiens
ctctcacagaacaca

SEQ ID NO: 1730035 - DNA, 15 bp, Homo sapiens
tctcacagaacacaa

SEQ ID NO: 1730036 - DNA, 15 bp, Homo sapiens
ctcacagaacacaag

SEQ ID NO: 1730037 - DNA, 15 bp, Homo sapiens
tcacagaacacaaga

SEQ ID NO: 1730038 - DNA, 15 bp, Homo sapiens
cacagaacacaagaa

SEQ ID NO: 1730039 - DNA, 15 bp, Homo sapiens
acagaacacaagaat

SEQ ID NO: 1730040 - DNA, 15 bp, Homo sapiens
cagaacacaagaatt

SEQ ID NO: 1730041 - DNA, 15 bp, Homo sapiens
agaacacaagaattt

SEQ ID NO: 1730042 - DNA, 15 bp, Homo sapiens
gaacacaagaatttc

SEQ ID NO: 1730043 - DNA, 15 bp, Homo sapiens
aacacaagaatttca

SEQ ID NO: 1730044 - DNA, 15 bp, Homo sapiens
acacaagaatttcat

SEQ ID NO: 1730045 - DNA, 15 bp, Homo sapiens
cacaagaatttcatt

SEQ ID NO: 1730046 - DNA, 15 bp, Homo sapiens
acaagaatttcatta

SEQ ID NO: 1730047 - DNA, 15 bp, Homo sapiens
caagaatttcattag

SEQ ID NO: 1730048 - DNA, 15 bp, Homo sapiens
aagaatttcattagg

SEQ ID NO: 1730049 - DNA, 15 bp, Homo sapiens
agaatttcattaggc

SEQ ID NO: 1730050 - DNA, 15 bp, Homo sapiens
gaatttcattaggca

SEQ ID NO: 1730051 - DNA, 15 bp, Homo sapiens
aatttcattaggcaa

SEQ ID NO: 1730052 - DNA, 15 bp, Homo sapiens
atttcattaggcaat

SEQ ID NO: 1730053 - DNA, 15 bp, Homo sapiens
tttcattaggcaatg

SEQ ID NO: 1730054 - DNA, 15 bp, Homo sapiens
ttcattaggcaatgt

SEQ ID NO: 1730055 - DNA, 15 bp, Homo sapiens
tcattaggcaatgtg

SEQ ID NO: 1730056 - DNA, 15 bp, Homo sapiens
cattaggcaatgtga

SEQ ID NO: 1730057 - DNA, 15 bp, Homo sapiens
attaggcaatgtgac

SEQ ID NO: 1730058 - DNA, 15 bp, Homo sapiens
ttaggcaatgtgacc

SEQ ID NO: 1730059 - DNA, 15 bp, Homo sapiens
taggcaatgtgacct

SEQ ID NO: 1730060 - DNA, 15 bp, Homo sapiens
aggcaatgtgacctt

SEQ ID NO: 1730061 - DNA, 15 bp, Homo sapiens
ggcaatgtgaccttg

SEQ ID NO: 1730062 - DNA, 15 bp, Homo sapiens
gcaatgtgaccttgg

SEQ ID NO: 1730063 - DNA, 15 bp, Homo sapiens
caatgtgaccttgga

SEQ ID NO: 1730064 - DNA, 15 bp, Homo sapiens
aatgtgaccttggaa

SEQ ID NO: 1730065 - DNA, 15 bp, Homo sapiens
atgtgaccttggaac

SEQ ID NO: 1730066 - DNA, 15 bp, Homo sapiens
tgtgaccttggaact

SEQ ID NO: 1730067 - DNA, 15 bp, Homo sapiens
gtgaccttggaactc

SEQ ID NO: 1730068 - DNA, 15 bp, Homo sapiens
tgaccttggaactct

SEQ ID NO: 1730069 - DNA, 15 bp, Homo sapiens
gaccttggaactctc

SEQ ID NO: 1730070 - DNA, 15 bp, Homo sapiens
accttggaactctca

SEQ ID NO: 1730071 - DNA, 15 bp, Homo sapiens
ccttggaactctcaa

SEQ ID NO: 1730072 - DNA, 15 bp, Homo sapiens
cttggaactctcaat

SEQ ID NO: 1730073 - DNA, 15 bp, Homo sapiens
ttggaactctcaatg

SEQ ID NO: 1730074 - DNA, 15 bp, Homo sapiens
tggaactctcaatgt

SEQ ID NO: 1730075 - DNA, 15 bp, Homo sapiens
ggaactctcaatgtg

SEQ ID NO: 1730076 - DNA, 15 bp, Homo sapiens
gaactctcaatgtgc

SEQ ID NO: 1730077 - DNA, 15 bp, Homo sapiens
aactctcaatgtgcc

SEQ ID NO: 1730078 - DNA, 15 bp, Homo sapiens
actctcaatgtgccc

SEQ ID NO: 1730079 - DNA, 15 bp, Homo sapiens
ctctcaatgtgccca

SEQ ID NO: 1730080 - DNA, 15 bp, Homo sapiens
tctcaatgtgcccat

SEQ ID NO: 1730081 - DNA, 15 bp, Homo sapiens
ctcaatgtgcccatt

SEQ ID NO: 1730082 - DNA, 15 bp, Homo sapiens
tcaatgtgcccatta

SEQ ID NO: 1730083 - DNA, 15 bp, Homo sapiens
caatgtgcccattaa

SEQ ID NO: 1730084 - DNA, 15 bp, Homo sapiens
aatgtgcccattaat

SEQ ID NO: 1730085 - DNA, 15 bp, Homo sapiens
atgtgcccattaatc

SEQ ID NO: 1730086 - DNA, 15 bp, Homo sapiens
tgtgcccattaatcc

SEQ ID NO: 1730087 - DNA, 15 bp, Homo sapiens
gtgcccattaatcca

SEQ ID NO: 1730088 - DNA, 15 bp, Homo sapiens
tgcccattaatccac

SEQ ID NO: 1730089 - DNA, 15 bp, Homo sapiens
gcccattaatccacg

SEQ ID NO: 1730090 - DNA, 15 bp, Homo sapiens
cccattaatccacgt

SEQ ID NO: 1730091 - DNA, 15 bp, Homo sapiens
ccattaatccacgtt

SEQ ID NO: 1730092 - DNA, 15 bp, Homo sapiens
cattaatccacgttg

SEQ ID NO: 1730093 - DNA, 15 bp, Homo sapiens
attaatccacgttgg

SEQ ID NO: 1730094 - DNA, 15 bp, Homo sapiens
ttaatccacgttggc

SEQ ID NO: 1730095 - DNA, 15 bp, Homo sapiens
taatccacgttggca

SEQ ID NO: 1730096 - DNA, 15 bp, Homo sapiens
aatccacgttggcag

SEQ ID NO: 1730097 - DNA, 15 bp, Homo sapiens
atccacgttggcaga

SEQ ID NO: 1730098 - DNA, 15 bp, Homo sapiens
tccacgttggcagaa

SEQ ID NO: 1730099 - DNA, 15 bp, Homo sapiens
ccacgttggcagaaa

SEQ ID NO: 1730100 - DNA, 15 bp, Homo sapiens
cacgttggcagaaat

SEQ ID NO: 1730101 - DNA, 15 bp, Homo sapiens
acgttggcagaaatg

SEQ ID NO: 1730102 - DNA, 15 bp, Homo sapiens
cgttggcagaaatga

SEQ ID NO: 1730103 - DNA, 15 bp, Homo sapiens
gttggcagaaatgat

SEQ ID NO: 1730104 - DNA, 15 bp, Homo sapiens
ttggcagaaatgata

SEQ ID NO: 1730105 - DNA, 15 bp, Homo sapiens
tggcagaaatgatat

SEQ ID NO: 1730106 - DNA, 15 bp, Homo sapiens
ggcagaaatgatata

SEQ ID NO: 1730107 - DNA, 15 bp, Homo sapiens
gcagaaatgatataa

SEQ ID NO: 1730108 - DNA, 15 bp, Homo sapiens
cagaaatgatataac

SEQ ID NO: 1730109 - DNA, 15 bp, Homo sapiens
agaaatgatataaca

SEQ ID NO: 1730110 - DNA, 15 bp, Homo sapiens
gaaatgatataacat

SEQ ID NO: 1730111 - DNA, 15 bp, Homo sapiens
aaatgatataacata

SEQ ID NO: 1730112 - DNA, 15 bp, Homo sapiens
aatgatataacatag

SEQ ID NO: 1730113 - DNA, 15 bp, Homo sapiens
atgatataacatagt

SEQ ID NO: 1730114 - DNA, 15 bp, Homo sapiens
tgatataacatagtg

SEQ ID NO: 1730115 - DNA, 15 bp, Homo sapiens
gatataacatagtga

SEQ ID NO: 1730116 - DNA, 15 bp, Homo sapiens
atataacatagtgat

SEQ ID NO: 1730117 - DNA, 15 bp, Homo sapiens
tataacatagtgatt

SEQ ID NO: 1730118 - DNA, 15 bp, Homo sapiens
ataacatagtgatta

SEQ ID NO: 1730119 - DNA, 15 bp, Homo sapiens
taacatagtgattaa

SEQ ID NO: 1730120 - DNA, 15 bp, Homo sapiens
aacatagtgattaat

SEQ ID NO: 1730121 - DNA, 15 bp, Homo sapiens
acatagtgattaata

SEQ ID NO: 1730122 - DNA, 15 bp, Homo sapiens
catagtgattaatag

SEQ ID NO: 1730123 - DNA, 15 bp, Homo sapiens
atagtgattaatagc

SEQ ID NO: 1730124 - DNA, 15 bp, Homo sapiens
tagtgattaatagca

SEQ ID NO: 1730125 - DNA, 15 bp, Homo sapiens
agtgattaatagcaa

SEQ ID NO: 1730126 - DNA, 15 bp, Homo sapiens
gtgattaatagcaaa

SEQ ID NO: 1730127 - DNA, 15 bp, Homo sapiens
tgattaatagcaaat

SEQ ID NO: 1730128 - DNA, 15 bp, Homo sapiens
gattaatagcaaatt

SEQ ID NO: 1730129 - DNA, 15 bp, Homo sapiens
attaatagcaaattc

SEQ ID NO: 1730130 - DNA, 15 bp, Homo sapiens
ttaatagcaaattct

SEQ ID NO: 1730131 - DNA, 15 bp, Homo sapiens
taatagcaaattctt

SEQ ID NO: 1730132 - DNA, 15 bp, Homo sapiens
aatagcaaattcttc

SEQ ID NO: 1730133 - DNA, 15 bp, Homo sapiens
atagcaaattcttct

SEQ ID NO: 1730134 - DNA, 15 bp, Homo sapiens
tagcaaattcttcta

SEQ ID NO: 1730135 - DNA, 15 bp, Homo sapiens
agcaaattcttctaa

SEQ ID NO: 1730136 - DNA, 15 bp, Homo sapiens
gcaaattcttctaac

SEQ ID NO: 1730137 - DNA, 15 bp, Homo sapiens
caaattcttctaact

SEQ ID NO: 1730138 - DNA, 15 bp, Homo sapiens
aaattcttctaacta

SEQ ID NO: 1730139 - DNA, 15 bp, Homo sapiens
aattcttctaactac

SEQ ID NO: 1730140 - DNA, 15 bp, Homo sapiens
attcttctaactact

SEQ ID NO: 1730141 - DNA, 15 bp, Homo sapiens
ttcttctaactactt

SEQ ID NO: 1730142 - DNA, 15 bp, Homo sapiens
tcttctaactacttc

SEQ ID NO: 1730143 - DNA, 15 bp, Homo sapiens
cttctaactacttct

SEQ ID NO: 1730144 - DNA, 15 bp, Homo sapiens
ttctaactacttctt

SEQ ID NO: 1730145 - DNA, 15 bp, Homo sapiens
tctaactacttcttg

SEQ ID NO: 1730146 - DNA, 15 bp, Homo sapiens
ctaactacttcttgt

SEQ ID NO: 1730147 - DNA, 15 bp, Homo sapiens
taactacttcttgtc

SEQ ID NO: 1730148 - DNA, 15 bp, Homo sapiens
aactacttcttgtca

SEQ ID NO: 1730149 - DNA, 15 bp, Homo sapiens
actacttcttgtcat

SEQ ID NO: 1730150 - DNA, 15 bp, Homo sapiens
ctacttcttgtcatg

SEQ ID NO: 1730151 - DNA, 15 bp, Homo sapiens
tacttcttgtcatgg

SEQ ID NO: 1730152 - DNA, 15 bp, Homo sapiens
acttcttgtcatggt

SEQ ID NO: 1730153 - DNA, 15 bp, Homo sapiens
cttcttgtcatggta

SEQ ID NO: 1730154 - DNA, 15 bp, Homo sapiens
ttcttgtcatggtac

SEQ ID NO: 1730155 - DNA, 15 bp, Homo sapiens
tcttgtcatggtacc

SEQ ID NO: 1730156 - DNA, 15 bp, Homo sapiens
cttgtcatggtacct

SEQ ID NO: 1730157 - DNA, 15 bp, Homo sapiens
ttgtcatggtacctt

SEQ ID NO: 1730158 - DNA, 15 bp, Homo sapiens
tgtcatggtaccttt

SEQ ID NO: 1730159 - DNA, 15 bp, Homo sapiens
gtcatggtacctttg

SEQ ID NO: 1730160 - DNA, 15 bp, Homo sapiens
tcatggtacctttgc

SEQ ID NO: 1730161 - DNA, 15 bp, Homo sapiens
catggtacctttgca

SEQ ID NO: 1730162 - DNA, 15 bp, Homo sapiens
atggtacctttgcaa

SEQ ID NO: 1730163 - DNA, 15 bp, Homo sapiens
tggtacctttgcaag

SEQ ID NO: 1730164 - DNA, 15 bp, Homo sapiens
ggtacctttgcaagt

SEQ ID NO: 1730165 - DNA, 15 bp, Homo sapiens
gtacctttgcaagtc

SEQ ID NO: 1730166 - DNA, 15 bp, Homo sapiens
tacctttgcaagtcc

SEQ ID NO: 1730167 - DNA, 15 bp, Homo sapiens
acctttgcaagtcca

SEQ ID NO: 1730168 - DNA, 15 bp, Homo sapiens
cctttgcaagtccac

SEQ ID NO: 1730169 - DNA, 15 bp, Homo sapiens
ctttgcaagtccacc

SEQ ID NO: 1730170 - DNA, 15 bp, Homo sapiens
tttgcaagtccaccc

SEQ ID NO: 1730171 - DNA, 15 bp, Homo sapiens
ttgcaagtccaccct

SEQ ID NO: 1730172 - DNA, 15 bp, Homo sapiens
tgcaagtccacccta

SEQ ID NO: 1730173 - DNA, 15 bp, Homo sapiens
gcaagtccaccctag

SEQ ID NO: 1730174 - DNA, 15 bp, Homo sapiens
caagtccaccctagt

SEQ ID NO: 1730175 - DNA, 15 bp, Homo sapiens
aagtccaccctagtt

SEQ ID NO: 1730176 - DNA, 15 bp, Homo sapiens
agtccaccctagttt

SEQ ID NO: 1730177 - DNA, 15 bp, Homo sapiens
gtccaccctagttta

SEQ ID NO: 1730178 - DNA, 15 bp, Homo sapiens
tccaccctagtttat

SEQ ID NO: 1730179 - DNA, 15 bp, Homo sapiens
ccaccctagtttatg

SEQ ID NO: 1730180 - DNA, 15 bp, Homo sapiens
caccctagtttatga

SEQ ID NO: 1730181 - DNA, 15 bp, Homo sapiens
accctagtttatgaa

SEQ ID NO: 1730182 - DNA, 15 bp, Homo sapiens
ccctagtttatgaag

SEQ ID NO: 1730183 - DNA, 15 bp, Homo sapiens
cctagtttatgaagg

SEQ ID NO: 1730184 - DNA, 15 bp, Homo sapiens
ctagtttatgaaggt

SEQ ID NO: 1730185 - DNA, 15 bp, Homo sapiens
tagtttatgaaggta

SEQ ID NO: 1730186 - DNA, 15 bp, Homo sapiens
agtttatgaaggtat

SEQ ID NO: 1730187 - DNA, 15 bp, Homo sapiens
gtttatgaaggtata

SEQ ID NO: 1730188 - DNA, 15 bp, Homo sapiens
tttatgaaggtataa

SEQ ID NO: 1730189 - DNA, 15 bp, Homo sapiens
ttatgaaggtataag

SEQ ID NO: 1730190 - DNA, 15 bp, Homo sapiens
tatgaaggtataagg

SEQ ID NO: 1730191 - DNA, 15 bp, Homo sapiens
atgaaggtataagga

SEQ ID NO: 1730192 - DNA, 15 bp, Homo sapiens
tgaaggtataaggaa

SEQ ID NO: 1730193 - DNA, 15 bp, Homo sapiens
gaaggtataaggaag

SEQ ID NO: 1730194 - DNA, 15 bp, Homo sapiens
aaggtataaggaaga

SEQ ID NO: 1730195 - DNA, 15 bp, Homo sapiens
aggtataaggaagag

SEQ ID NO: 1730196 - DNA, 15 bp, Homo sapiens
ggtataaggaagagt

SEQ ID NO: 1730197 - DNA, 15 bp, Homo sapiens
gtataaggaagagtt

SEQ ID NO: 1730198 - DNA, 15 bp, Homo sapiens
tataaggaagagttt

SEQ ID NO: 1730199 - DNA, 15 bp, Homo sapiens
ataaggaagagttta

SEQ ID NO: 1730200 - DNA, 15 bp, Homo sapiens
taaggaagagtttag

SEQ ID NO: 1730201 - DNA, 15 bp, Homo sapiens
aaggaagagtttagt

SEQ ID NO: 1730202 - DNA, 15 bp, Homo sapiens
aggaagagtttagtg

SEQ ID NO: 1730203 - DNA, 15 bp, Homo sapiens
ggaagagtttagtgg

SEQ ID NO: 1730204 - DNA, 15 bp, Homo sapiens
gaagagtttagtgga

SEQ ID NO: 1730205 - DNA, 15 bp, Homo sapiens
aagagtttagtggaa

SEQ ID NO: 1730206 - DNA, 15 bp, Homo sapiens
agagtttagtggaaa

SEQ ID NO: 1730207 - DNA, 15 bp, Homo sapiens
gagtttagtggaaaa

SEQ ID NO: 1730208 - DNA, 15 bp, Homo sapiens
agtttagtggaaaac

SEQ ID NO: 1730209 - DNA, 15 bp, Homo sapiens
gtttagtggaaaaca

SEQ ID NO: 1730210 - DNA, 15 bp, Homo sapiens
tttagtggaaaacag

SEQ ID NO: 1730211 - DNA, 15 bp, Homo sapiens
ttagtggaaaacaga

SEQ ID NO: 1730212 - DNA, 15 bp, Homo sapiens
tagtggaaaacagag

SEQ ID NO: 1730213 - DNA, 15 bp, Homo sapiens
agtggaaaacagaga

SEQ ID NO: 1730214 - DNA, 15 bp, Homo sapiens
gtggaaaacagagag

SEQ ID NO: 1730215 - DNA, 15 bp, Homo sapiens
tggaaaacagagaga

SEQ ID NO: 1730216 - DNA, 15 bp, Homo sapiens
ggaaaacagagagag

SEQ ID NO: 1730217 - DNA, 15 bp, Homo sapiens
gaaaacagagagaga

SEQ ID NO: 1730218 - DNA, 15 bp, Homo sapiens
aaaacagagagagag

SEQ ID NO: 1730219 - DNA, 15 bp, Homo sapiens
aaacagagagagaga

SEQ ID NO: 1730220 - DNA, 15 bp, Homo sapiens
aacagagagagagag

SEQ ID NO: 1730221 - DNA, 15 bp, Homo sapiens
acagagagagagaga

SEQ ID NO: 1730222 - DNA, 15 bp, Homo sapiens
cagagagagagagag

SEQ ID NO: 1730223 - DNA, 15 bp, Homo sapiens
agagagagagagagc

SEQ ID NO: 1730224 - DNA, 15 bp, Homo sapiens
gagagagagagagct

SEQ ID NO: 1730225 - DNA, 15 bp, Homo sapiens
agagagagagagctg

SEQ ID NO: 1730226 - DNA, 15 bp, Homo sapiens
gagagagagagctga

SEQ ID NO: 1730227 - DNA, 15 bp, Homo sapiens
agagagagagctgaa

SEQ ID NO: 1730228 - DNA, 15 bp, Homo sapiens
gagagagagctgaat

SEQ ID NO: 1730229 - DNA, 15 bp, Homo sapiens
agagagagctgaatc

SEQ ID NO: 1730230 - DNA, 15 bp, Homo sapiens
gagagagctgaatca

SEQ ID NO: 1730231 - DNA, 15 bp, Homo sapiens
agagagctgaatcag

SEQ ID NO: 1730232 - DNA, 15 bp, Homo sapiens
gagagctgaatcagt

SEQ ID NO: 1730233 - DNA, 15 bp, Homo sapiens
agagctgaatcagta

SEQ ID NO: 1730234 - DNA, 15 bp, Homo sapiens
gagctgaatcagtat

SEQ ID NO: 1730235 - DNA, 15 bp, Homo sapiens
agctgaatcagtatt

SEQ ID NO: 1730236 - DNA, 15 bp, Homo sapiens
gctgaatcagtatta

SEQ ID NO: 1730237 - DNA, 15 bp, Homo sapiens
ctgaatcagtattac

SEQ ID NO: 1730238 - DNA, 15 bp, Homo sapiens
tgaatcagtattacc

SEQ ID NO: 1730239 - DNA, 15 bp, Homo sapiens
gaatcagtattaccc

SEQ ID NO: 1730240 - DNA, 15 bp, Homo sapiens
aatcagtattaccct

SEQ ID NO: 1730241 - DNA, 15 bp, Homo sapiens
atcagtattaccctt

SEQ ID NO: 1730242 - DNA, 15 bp, Homo sapiens
tcagtattacccttg

SEQ ID NO: 1730243 - DNA, 15 bp, Homo sapiens
cagtattacccttgt

SEQ ID NO: 1730244 - DNA, 15 bp, Homo sapiens
agtattacccttgtc

SEQ ID NO: 1730245 - DNA, 15 bp, Homo sapiens
gtattacccttgtct

SEQ ID NO: 1730246 - DNA, 15 bp, Homo sapiens
tattacccttgtctt

SEQ ID NO: 1730247 - DNA, 15 bp, Homo sapiens
attacccttgtcttc

SEQ ID NO: 1730248 - DNA, 15 bp, Homo sapiens
ttacccttgtcttca

SEQ ID NO: 1730249 - DNA, 15 bp, Homo sapiens
tacccttgtcttcaa

SEQ ID NO: 1730250 - DNA, 15 bp, Homo sapiens
acccttgtcttcaac

SEQ ID NO: 1730251 - DNA, 15 bp, Homo sapiens
cccttgtcttcaaca

SEQ ID NO: 1730252 - DNA, 15 bp, Homo sapiens
ccttgtcttcaacat

SEQ ID NO: 1730253 - DNA, 15 bp, Homo sapiens
cttgtcttcaacatc

SEQ ID NO: 1730254 - DNA, 15 bp, Homo sapiens
ttgtcttcaacatct

SEQ ID NO: 1730255 - DNA, 15 bp, Homo sapiens
tgtcttcaacatctt

SEQ ID NO: 1730256 - DNA, 15 bp, Homo sapiens
gtcttcaacatcttt

SEQ ID NO: 1730257 - DNA, 15 bp, Homo sapiens
tcttcaacatcttta

SEQ ID NO: 1730258 - DNA, 15 bp, Homo sapiens
cttcaacatctttat

SEQ ID NO: 1730259 - DNA, 15 bp, Homo sapiens
ttcaacatctttatg

SEQ ID NO: 1730260 - DNA, 15 bp, Homo sapiens
tcaacatctttatga

SEQ ID NO: 1730261 - DNA, 15 bp, Homo sapiens
caacatctttatgag

SEQ ID NO: 1730262 - DNA, 15 bp, Homo sapiens
aacatctttatgagt

SEQ ID NO: 1730263 - DNA, 15 bp, Homo sapiens
acatctttatgagtg

SEQ ID NO: 1730264 - DNA, 15 bp, Homo sapiens
catctttatgagtgc

SEQ ID NO: 1730265 - DNA, 15 bp, Homo sapiens
atctttatgagtgcc

SEQ ID NO: 1730266 - DNA, 15 bp, Homo sapiens
tctttatgagtgcct

SEQ ID NO: 1730267 - DNA, 15 bp, Homo sapiens
ctttatgagtgcctt

SEQ ID NO: 1730268 - DNA, 15 bp, Homo sapiens
tttatgagtgccttt

SEQ ID NO: 1730269 - DNA, 15 bp, Homo sapiens
ttatgagtgcctttg

SEQ ID NO: 1730270 - DNA, 15 bp, Homo sapiens
tatgagtgcctttgg

SEQ ID NO: 1730271 - DNA, 15 bp, Homo sapiens
atgagtgcctttggg

SEQ ID NO: 1730272 - DNA, 15 bp, Homo sapiens
tgagtgcctttgggt

SEQ ID NO: 1730273 - DNA, 15 bp, Homo sapiens
gagtgcctttgggtg

SEQ ID NO: 1730274 - DNA, 15 bp, Homo sapiens
agtgcctttgggtgt

SEQ ID NO: 1730275 - DNA, 15 bp, Homo sapiens
gtgcctttgggtgtg

SEQ ID NO: 1730276 - DNA, 15 bp, Homo sapiens
tgcctttgggtgtgc

SEQ ID NO: 1730277 - DNA, 15 bp, Homo sapiens
gcctttgggtgtgct

SEQ ID NO: 1730278 - DNA, 15 bp, Homo sapiens
cctttgggtgtgctg

SEQ ID NO: 1730279 - DNA, 15 bp, Homo sapiens
ctttgggtgtgctgg

SEQ ID NO: 1730280 - DNA, 15 bp, Homo sapiens
tttgggtgtgctggg

SEQ ID NO: 1730281 - DNA, 15 bp, Homo sapiens
ttgggtgtgctgggc

SEQ ID NO: 1730282 - DNA, 15 bp, Homo sapiens
gggtgtgctgggccg

SEQ ID NO: 1730283 - DNA, 15 bp, Homo sapiens
ggtgtgctgggccga

SEQ ID NO: 1730284 - DNA, 15 bp, Homo sapiens
gtgtgctgggccgaa

SEQ ID NO: 1730285 - DNA, 15 bp, Homo sapiens
tgtgctgggccgaat

SEQ ID NO: 1730286 - DNA, 15 bp, Homo sapiens
gtgctgggccgaatt

SEQ ID NO: 1730287 - DNA, 15 bp, Homo sapiens
tgctgggccgaatta

SEQ ID NO: 1730288 - DNA, 15 bp, Homo sapiens
gctgggccgaattag

SEQ ID NO: 1730289 - DNA, 15 bp, Homo sapiens
ctgggccgaattaga

SEQ ID NO: 1730290 - DNA, 15 bp, Homo sapiens
tgggccgaattagat

SEQ ID NO: 1730291 - DNA, 15 bp, Homo sapiens
gggccgaattagatg

SEQ ID NO: 1730292 - DNA, 15 bp, Homo sapiens
ggccgaattagatga

SEQ ID NO: 1730293 - DNA, 15 bp, Homo sapiens
gccgaattagatgaa

SEQ ID NO: 1730294 - DNA, 15 bp, Homo sapiens
ccgaattagatgaat

SEQ ID NO: 1730295 - DNA, 15 bp, Homo sapiens
cgaattagatgaatt

SEQ ID NO: 1730296 - DNA, 15 bp, Homo sapiens
gaattagatgaattt

SEQ ID NO: 1730297 - DNA, 15 bp, Homo sapiens
aattagatgaatttt

SEQ ID NO: 1730298 - DNA, 15 bp, Homo sapiens
attagatgaatttta

SEQ ID NO: 1730299 - DNA, 15 bp, Homo sapiens
ttagatgaattttat

SEQ ID NO: 1730300 - DNA, 15 bp, Homo sapiens
tagatgaattttata

SEQ ID NO: 1730301 - DNA, 15 bp, Homo sapiens
agatgaattttataa

SEQ ID NO: 1730302 - DNA, 15 bp, Homo sapiens
gatgaattttataat

SEQ ID NO: 1730303 - DNA, 15 bp, Homo sapiens
atgaattttataatg

SEQ ID NO: 1730304 - DNA, 15 bp, Homo sapiens
tgaattttataatga

SEQ ID NO: 1730305 - DNA, 15 bp, Homo sapiens
gaattttataatgaa

SEQ ID NO: 1730306 - DNA, 15 bp, Homo sapiens
aattttataatgaac

SEQ ID NO: 1730307 - DNA, 15 bp, Homo sapiens
attttataatgaaca

SEQ ID NO: 1730308 - DNA, 15 bp, Homo sapiens
ttttataatgaacaa

SEQ ID NO: 1730309 - DNA, 15 bp, Homo sapiens
tttataatgaacaaa

SEQ ID NO: 1730310 - DNA, 15 bp, Homo sapiens
ttataatgaacaaaa

SEQ ID NO: 1730311 - DNA, 15 bp, Homo sapiens
tataatgaacaaaag

SEQ ID NO: 1730312 - DNA, 15 bp, Homo sapiens
ataatgaacaaaaga

SEQ ID NO: 1730313 - DNA, 15 bp, Homo sapiens
taatgaacaaaagaa

SEQ ID NO: 1730314 - DNA, 15 bp, Homo sapiens
aatgaacaaaagaag

SEQ ID NO: 1730315 - DNA, 15 bp, Homo sapiens
atgaacaaaagaaga

SEQ ID NO: 1730316 - DNA, 15 bp, Homo sapiens
tgaacaaaagaagaa

SEQ ID NO: 1730317 - DNA, 15 bp, Homo sapiens
gaacaaaagaagaac

SEQ ID NO: 1730318 - DNA, 15 bp, Homo sapiens
aacaaaagaagaacg

SEQ ID NO: 1730319 - DNA, 15 bp, Homo sapiens
acaaaagaagaacga

SEQ ID NO: 1730320 - DNA, 15 bp, Homo sapiens
caaaagaagaacgaa

SEQ ID NO: 1730321 - DNA, 15 bp, Homo sapiens
aaaagaagaacgaaa

SEQ ID NO: 1730322 - DNA, 15 bp, Homo sapiens
aaagaagaacgaaac

SEQ ID NO: 1730323 - DNA, 15 bp, Homo sapiens
aagaagaacgaaacc

SEQ ID NO: 1730324 - DNA, 15 bp, Homo sapiens
agaagaacgaaacca

SEQ ID NO: 1730325 - DNA, 15 bp, Homo sapiens
gaagaacgaaaccaa

SEQ ID NO: 1730326 - DNA, 15 bp, Homo sapiens
aagaacgaaaccaaa

SEQ ID NO: 1730327 - DNA, 15 bp, Homo sapiens
agaacgaaaccaaaa

SEQ ID NO: 1730328 - DNA, 15 bp, Homo sapiens
gaacgaaaccaaaag

SEQ ID NO: 1730329 - DNA, 15 bp, Homo sapiens
aacgaaaccaaaagg

SEQ ID NO: 1730330 - DNA, 15 bp, Homo sapiens
acgaaaccaaaagga

SEQ ID NO: 1730331 - DNA, 15 bp, Homo sapiens
cgaaaccaaaaggaa

SEQ ID NO: 1730332 - DNA, 15 bp, Homo sapiens
gaaaccaaaaggaaa

SEQ ID NO: 1730333 - DNA, 15 bp, Homo sapiens
aaaccaaaaggaaat

SEQ ID NO: 1730334 - DNA, 15 bp, Homo sapiens
aaccaaaaggaaata

SEQ ID NO: 1730335 - DNA, 15 bp, Homo sapiens
accaaaaggaaataa

SEQ ID NO: 1730336 - DNA, 15 bp, Homo sapiens
ccaaaaggaaataat

SEQ ID NO: 1730337 - DNA, 15 bp, Homo sapiens
caaaaggaaataata

SEQ ID NO: 1730338 - DNA, 15 bp, Homo sapiens
aaaaggaaataatat

SEQ ID NO: 1730339 - DNA, 15 bp, Homo sapiens
aaaggaaataatatt

SEQ ID NO: 1730340 - DNA, 15 bp, Homo sapiens
aaggaaataatattt

SEQ ID NO: 1730341 - DNA, 15 bp, Homo sapiens
aggaaataatatttt

SEQ ID NO: 1730342 - DNA, 15 bp, Homo sapiens
ggaaataatattttt

SEQ ID NO: 1730343 - DNA, 15 bp, Homo sapiens
gaaataatattttta

SEQ ID NO: 1730344 - DNA, 15 bp, Homo sapiens
aaataatatttttaa

SEQ ID NO: 1730345 - DNA, 15 bp, Homo sapiens
aataatatttttaag

SEQ ID NO: 1730346 - DNA, 15 bp, Homo sapiens
ataatatttttaaga

SEQ ID NO: 1730347 - DNA, 15 bp, Homo sapiens
taatatttttaagag

SEQ ID NO: 1730348 - DNA, 15 bp, Homo sapiens
aatatttttaagaga

SEQ ID NO: 1730349 - DNA, 15 bp, Homo sapiens
atatttttaagagaa

SEQ ID NO: 1730350 - DNA, 15 bp, Homo sapiens
tatttttaagagaaa

SEQ ID NO: 1730351 - DNA, 15 bp, Homo sapiens
atttttaagagaaag

SEQ ID NO: 1730352 - DNA, 15 bp, Homo sapiens
tttttaagagaaagg

SEQ ID NO: 1730353 - DNA, 15 bp, Homo sapiens
ttttaagagaaaggt

SEQ ID NO: 1730354 - DNA, 15 bp, Homo sapiens
tttaagagaaaggtc

SEQ ID NO: 1730355 - DNA, 15 bp, Homo sapiens
ttaagagaaaggtca

SEQ ID NO: 1730356 - DNA, 15 bp, Homo sapiens
taagagaaaggtcaa

SEQ ID NO: 1730357 - DNA, 15 bp, Homo sapiens
aagagaaaggtcaaa

SEQ ID NO: 1730358 - DNA, 15 bp, Homo sapiens
agagaaaggtcaaag

SEQ ID NO: 1730359 - DNA, 15 bp, Homo sapiens
gagaaaggtcaaagg

SEQ ID NO: 1730360 - DNA, 15 bp, Homo sapiens
agaaaggtcaaaggc

SEQ ID NO: 1730361 - DNA, 15 bp, Homo sapiens
gaaaggtcaaaggca

SEQ ID NO: 1730362 - DNA, 15 bp, Homo sapiens
aaaggtcaaaggcaa

SEQ ID NO: 1730363 - DNA, 15 bp, Homo sapiens
aaggtcaaaggcaaa

SEQ ID NO: 1730364 - DNA, 15 bp, Homo sapiens
aggtcaaaggcaaag

SEQ ID NO: 1730365 - DNA, 15 bp, Homo sapiens
ggtcaaaggcaaagc

SEQ ID NO: 1730366 - DNA, 15 bp, Homo sapiens
gtcaaaggcaaagca

SEQ ID NO: 1730367 - DNA, 15 bp, Homo sapiens
tcaaaggcaaagcaa

SEQ ID NO: 1730368 - DNA, 15 bp, Homo sapiens
caaaggcaaagcaaa

SEQ ID NO: 1730369 - DNA, 15 bp, Homo sapiens
aaaggcaaagcaaaa

SEQ ID NO: 1730370 - DNA, 15 bp, Homo sapiens
aaggcaaagcaaaaa

SEQ ID NO: 1730371 - DNA, 15 bp, Homo sapiens
aggcaaagcaaaaaa

SEQ ID NO: 1730372 - DNA, 15 bp, Homo sapiens
ggcaaagcaaaaaat

SEQ ID NO: 1730373 - DNA, 15 bp, Homo sapiens
gcaaagcaaaaaatt

SEQ ID NO: 1730374 - DNA, 15 bp, Homo sapiens
caaagcaaaaaattt

SEQ ID NO: 1730375 - DNA, 15 bp, Homo sapiens
aaagcaaaaaatttc

SEQ ID NO: 1730376 - DNA, 15 bp, Homo sapiens
aagcaaaaaatttct

SEQ ID NO: 1730377 - DNA, 15 bp, Homo sapiens
agcaaaaaatttctg

SEQ ID NO: 1730378 - DNA, 15 bp, Homo sapiens
gcaaaaaatttctga

SEQ ID NO: 1730379 - DNA, 15 bp, Homo sapiens
caaaaaatttctgag

SEQ ID NO: 1730380 - DNA, 15 bp, Homo sapiens
aaaaaatttctgagt

SEQ ID NO: 1730381 - DNA, 15 bp, Homo sapiens
aaaaatttctgagtc

SEQ ID NO: 1730382 - DNA, 15 bp, Homo sapiens
aaaatttctgagtca

SEQ ID NO: 1730383 - DNA, 15 bp, Homo sapiens
aaatttctgagtcaa

SEQ ID NO: 1730384 - DNA, 15 bp, Homo sapiens
aatttctgagtcaag

SEQ ID NO: 1730385 - DNA, 15 bp, Homo sapiens
atttctgagtcaagc

SEQ ID NO: 1730386 - DNA, 15 bp, Homo sapiens
tttctgagtcaagca

SEQ ID NO: 1730387 - DNA, 15 bp, Homo sapiens
ttctgagtcaagcaa

SEQ ID NO: 1730388 - DNA, 15 bp, Homo sapiens
tctgagtcaagcaat

SEQ ID NO: 1730389 - DNA, 15 bp, Homo sapiens
ctgagtcaagcaatg

SEQ ID NO: 1730390 - DNA, 15 bp, Homo sapiens
tgagtcaagcaatga

SEQ ID NO: 1730391 - DNA, 15 bp, Homo sapiens
gagtcaagcaatgag

SEQ ID NO: 1730392 - DNA, 15 bp, Homo sapiens
agtcaagcaatgaga

SEQ ID NO: 1730393 - DNA, 15 bp, Homo sapiens
gtcaagcaatgagaa

SEQ ID NO: 1730394 - DNA, 15 bp, Homo sapiens
tcaagcaatgagaag

SEQ ID NO: 1730395 - DNA, 15 bp, Homo sapiens
caagcaatgagaagg

SEQ ID NO: 1730396 - DNA, 15 bp, Homo sapiens
aagcaatgagaaggg

SEQ ID NO: 1730397 - DNA, 15 bp, Homo sapiens
agcaatgagaagggt

SEQ ID NO: 1730398 - DNA, 15 bp, Homo sapiens
gcaatgagaagggtt

SEQ ID NO: 1730399 - DNA, 15 bp, Homo sapiens
caatgagaagggttt

SEQ ID NO: 1730400 - DNA, 15 bp, Homo sapiens
aatgagaagggtttt

SEQ ID NO: 1730401 - DNA, 15 bp, Homo sapiens
atgagaagggttttt

SEQ ID NO: 1730402 - DNA, 15 bp, Homo sapiens
tgagaagggtttttt

SEQ ID NO: 1730403 - DNA, 15 bp, Homo sapiens
gagaagggtttttta

SEQ ID NO: 1730404 - DNA, 15 bp, Homo sapiens
agaagggttttttaa

SEQ ID NO: 1730405 - DNA, 15 bp, Homo sapiens
gaagggttttttaaa

SEQ ID NO: 1730406 - DNA, 15 bp, Homo sapiens
aagggttttttaaaa

SEQ ID NO: 1730407 - DNA, 15 bp, Homo sapiens
agggttttttaaaaa

SEQ ID NO: 1730408 - DNA, 15 bp, Homo sapiens
gggttttttaaaaaa

SEQ ID NO: 1730409 - DNA, 15 bp, Homo sapiens
ggttttttaaaaaag

SEQ ID NO: 1730410 - DNA, 15 bp, Homo sapiens
gttttttaaaaaaga

SEQ ID NO: 1730411 - DNA, 15 bp, Homo sapiens
ttttttaaaaaagaa

SEQ ID NO: 1730412 - DNA, 15 bp, Homo sapiens
tttttaaaaaagaaa

SEQ ID NO: 1730413 - DNA, 15 bp, Homo sapiens
ttttaaaaaagaaaa

SEQ ID NO: 1730414 - DNA, 15 bp, Homo sapiens
tttaaaaaagaaaaa

SEQ ID NO: 1730415 - DNA, 15 bp, Homo sapiens
ttaaaaaagaaaaaa

SEQ ID NO: 1730416 - DNA, 15 bp, Homo sapiens
aaaagaaaaaaaaac

SEQ ID NO: 1730417 - DNA, 15 bp, Homo sapiens
agaaaaaaaaacttt

SEQ ID NO: 1730418 - DNA, 15 bp, Homo sapiens
gaaaaaaaaactttg

SEQ ID NO: 1730419 - DNA, 15 bp, Homo sapiens
aaaaaaaaactttgg

SEQ ID NO: 1730420 - DNA, 15 bp, Homo sapiens
aaaaaaaactttggg

SEQ ID NO: 1730421 - DNA, 15 bp, Homo sapiens
aaaaaaactttggga

SEQ ID NO: 1730422 - DNA, 15 bp, Homo sapiens
aaaaaactttgggag

SEQ ID NO: 1730423 - DNA, 15 bp, Homo sapiens
aaaaactttgggaga

SEQ ID NO: 1730424 - DNA, 15 bp, Homo sapiens
aaaactttgggagaa

SEQ ID NO: 1730425 - DNA, 15 bp, Homo sapiens
aaactttgggagaag

SEQ ID NO: 1730426 - DNA, 15 bp, Homo sapiens
aactttgggagaagt

SEQ ID NO: 1730427 - DNA, 15 bp, Homo sapiens
actttgggagaagta

SEQ ID NO: 1730428 - DNA, 15 bp, Homo sapiens
ctttgggagaagtat

SEQ ID NO: 1730429 - DNA, 15 bp, Homo sapiens
tttgggagaagtata

SEQ ID NO: 1730430 - DNA, 15 bp, Homo sapiens
ttgggagaagtataa

SEQ ID NO: 1730431 - DNA, 15 bp, Homo sapiens
tgggagaagtataag

SEQ ID NO: 1730432 - DNA, 15 bp, Homo sapiens
gggagaagtataaga

SEQ ID NO: 1730433 - DNA, 15 bp, Homo sapiens
ggagaagtataagat

SEQ ID NO: 1730434 - DNA, 15 bp, Homo sapiens
gagaagtataagatg

SEQ ID NO: 1730435 - DNA, 15 bp, Homo sapiens
agaagtataagatgt

SEQ ID NO: 1730436 - DNA, 15 bp, Homo sapiens
gaagtataagatgta

SEQ ID NO: 1730437 - DNA, 15 bp, Homo sapiens
aagtataagatgtaa

SEQ ID NO: 1730438 - DNA, 15 bp, Homo sapiens
agtataagatgtaac

SEQ ID NO: 1730439 - DNA, 15 bp, Homo sapiens
gtataagatgtaaca

SEQ ID NO: 1730440 - DNA, 15 bp, Homo sapiens
tataagatgtaacat

SEQ ID NO: 1730441 - DNA, 15 bp, Homo sapiens
ataagatgtaacatg

SEQ ID NO: 1730442 - DNA, 15 bp, Homo sapiens
taagatgtaacatgg

SEQ ID NO: 1730443 - DNA, 15 bp, Homo sapiens
aagatgtaacatggg

SEQ ID NO: 1730444 - DNA, 15 bp, Homo sapiens
agatgtaacatgggt

SEQ ID NO: 1730445 - DNA, 15 bp, Homo sapiens
gatgtaacatgggtt

SEQ ID NO: 1730446 - DNA, 15 bp, Homo sapiens
atgtaacatgggttg

SEQ ID NO: 1730447 - DNA, 15 bp, Homo sapiens
tgtaacatgggttga

SEQ ID NO: 1730448 - DNA, 15 bp, Homo sapiens
gtaacatgggttgaa

SEQ ID NO: 1730449 - DNA, 15 bp, Homo sapiens
taacatgggttgaag

SEQ ID NO: 1730450 - DNA, 15 bp, Homo sapiens
aacatgggttgaagg

SEQ ID NO: 1730451 - DNA, 15 bp, Homo sapiens
acatgggttgaagga

SEQ ID NO: 1730452 - DNA, 15 bp, Homo sapiens
catgggttgaaggaa

SEQ ID NO: 1730453 - DNA, 15 bp, Homo sapiens
atgggttgaaggaag

SEQ ID NO: 1730454 - DNA, 15 bp, Homo sapiens
tgggttgaaggaagt

SEQ ID NO: 1730455 - DNA, 15 bp, Homo sapiens
gggttgaaggaagta

SEQ ID NO: 1730456 - DNA, 15 bp, Homo sapiens
ggttgaaggaagtaa

SEQ ID NO: 1730457 - DNA, 15 bp, Homo sapiens
gttgaaggaagtaaa

SEQ ID NO: 1730458 - DNA, 15 bp, Homo sapiens
ttgaaggaagtaaag

SEQ ID NO: 1730459 - DNA, 15 bp, Homo sapiens
tgaaggaagtaaagg

SEQ ID NO: 1730460 - DNA, 15 bp, Homo sapiens
gaaggaagtaaaggc

SEQ ID NO: 1730461 - DNA, 15 bp, Homo sapiens
aaggaagtaaaggca

SEQ ID NO: 1730462 - DNA, 15 bp, Homo sapiens
aggaagtaaaggcag

SEQ ID NO: 1730463 - DNA, 15 bp, Homo sapiens
ggaagtaaaggcagg

SEQ ID NO: 1730464 - DNA, 15 bp, Homo sapiens
gaagtaaaggcagga

SEQ ID NO: 1730465 - DNA, 15 bp, Homo sapiens
aagtaaaggcaggaa

SEQ ID NO: 1730466 - DNA, 15 bp, Homo sapiens
agtaaaggcaggaaa

SEQ ID NO: 1730467 - DNA, 15 bp, Homo sapiens
gtaaaggcaggaaaa

SEQ ID NO: 1730468 - DNA, 15 bp, Homo sapiens
taaaggcaggaaaaa

SEQ ID NO: 1730469 - DNA, 15 bp, Homo sapiens
aaaggcaggaaaaat

SEQ ID NO: 1730470 - DNA, 15 bp, Homo sapiens
aaggcaggaaaaatt

SEQ ID NO: 1730471 - DNA, 15 bp, Homo sapiens
aggcaggaaaaatta

SEQ ID NO: 1730472 - DNA, 15 bp, Homo sapiens
ggcaggaaaaattaa

SEQ ID NO: 1730473 - DNA, 15 bp, Homo sapiens
gcaggaaaaattaag

SEQ ID NO: 1730474 - DNA, 15 bp, Homo sapiens
caggaaaaattaaga

SEQ ID NO: 1730475 - DNA, 15 bp, Homo sapiens
aggaaaaattaagat

SEQ ID NO: 1730476 - DNA, 15 bp, Homo sapiens
ggaaaaattaagatc

SEQ ID NO: 1730477 - DNA, 15 bp, Homo sapiens
gaaaaattaagatct

SEQ ID NO: 1730478 - DNA, 15 bp, Homo sapiens
aaaaattaagatcta

SEQ ID NO: 1730479 - DNA, 15 bp, Homo sapiens
aaaattaagatctat

SEQ ID NO: 1730480 - DNA, 15 bp, Homo sapiens
aaattaagatctata

SEQ ID NO: 1730481 - DNA, 15 bp, Homo sapiens
aattaagatctataa

SEQ ID NO: 1730482 - DNA, 15 bp, Homo sapiens
attaagatctataaa

SEQ ID NO: 1730483 - DNA, 15 bp, Homo sapiens
ttaagatctataaac

SEQ ID NO: 1730484 - DNA, 15 bp, Homo sapiens
taagatctataaact

SEQ ID NO: 1730485 - DNA, 15 bp, Homo sapiens
aagatctataaactc

SEQ ID NO: 1730486 - DNA, 15 bp, Homo sapiens
agatctataaactct

SEQ ID NO: 1730487 - DNA, 15 bp, Homo sapiens
gatctataaactctg

SEQ ID NO: 1730488 - DNA, 15 bp, Homo sapiens
atctataaactctga

SEQ ID NO: 1730489 - DNA, 15 bp, Homo sapiens
tctataaactctgag

SEQ ID NO: 1730490 - DNA, 15 bp, Homo sapiens
ctataaactctgaga

SEQ ID NO: 1730491 - DNA, 15 bp, Homo sapiens
tataaactctgagaa

SEQ ID NO: 1730492 - DNA, 15 bp, Homo sapiens
ataaactctgagaag

SEQ ID NO: 1730493 - DNA, 15 bp, Homo sapiens
taaactctgagaagg

SEQ ID NO: 1730494 - DNA, 15 bp, Homo sapiens
aaactctgagaaggt

SEQ ID NO: 1730495 - DNA, 15 bp, Homo sapiens
aactctgagaaggta

SEQ ID NO: 1730496 - DNA, 15 bp, Homo sapiens
actctgagaaggtag

SEQ ID NO: 1730497 - DNA, 15 bp, Homo sapiens
ctctgagaaggtagt

SEQ ID NO: 1730498 - DNA, 15 bp, Homo sapiens
tctgagaaggtagtt

SEQ ID NO: 1730499 - DNA, 15 bp, Homo sapiens
ctgagaaggtagttt

SEQ ID NO: 1730500 - DNA, 15 bp, Homo sapiens
tgagaaggtagtttg

SEQ ID NO: 1730501 - DNA, 15 bp, Homo sapiens
gagaaggtagtttga

SEQ ID NO: 1730502 - DNA, 15 bp, Homo sapiens
agaaggtagtttgag

SEQ ID NO: 1730503 - DNA, 15 bp, Homo sapiens
gaaggtagtttgagc

SEQ ID NO: 1730504 - DNA, 15 bp, Homo sapiens
aaggtagtttgagca

SEQ ID NO: 1730505 - DNA, 15 bp, Homo sapiens
aggtagtttgagcag

SEQ ID NO: 1730506 - DNA, 15 bp, Homo sapiens
ggtagtttgagcaga

SEQ ID NO: 1730507 - DNA, 15 bp, Homo sapiens
gtagtttgagcagaa

SEQ ID NO: 1730508 - DNA, 15 bp, Homo sapiens
tagtttgagcagaag

SEQ ID NO: 1730509 - DNA, 15 bp, Homo sapiens
agtttgagcagaagt

SEQ ID NO: 1730510 - DNA, 15 bp, Homo sapiens
gtttgagcagaagta

SEQ ID NO: 1730511 - DNA, 15 bp, Homo sapiens
tttgagcagaagtaa

SEQ ID NO: 1730512 - DNA, 15 bp, Homo sapiens
ttgagcagaagtaaa

SEQ ID NO: 1730513 - DNA, 15 bp, Homo sapiens
tgagcagaagtaaaa

SEQ ID NO: 1730514 - DNA, 15 bp, Homo sapiens
gagcagaagtaaaaa

SEQ ID NO: 1730515 - DNA, 15 bp, Homo sapiens
agcagaagtaaaaaa

SEQ ID NO: 1730516 - DNA, 15 bp, Homo sapiens
gcagaagtaaaaaac

SEQ ID NO: 1730517 - DNA, 15 bp, Homo sapiens
cagaagtaaaaaaca

SEQ ID NO: 1730518 - DNA, 15 bp, Homo sapiens
agaagtaaaaaacat

SEQ ID NO: 1730519 - DNA, 15 bp, Homo sapiens
gaagtaaaaaacatt

SEQ ID NO: 1730520 - DNA, 15 bp, Homo sapiens
aagtaaaaaacatta

SEQ ID NO: 1730521 - DNA, 15 bp, Homo sapiens
agtaaaaaacattag

SEQ ID NO: 1730522 - DNA, 15 bp, Homo sapiens
gtaaaaaacattagt

SEQ ID NO: 1730523 - DNA, 15 bp, Homo sapiens
taaaaaacattagtg

SEQ ID NO: 1730524 - DNA, 15 bp, Homo sapiens
aaaaaacattagtga

SEQ ID NO: 1730525 - DNA, 15 bp, Homo sapiens
aaaaacattagtgac

SEQ ID NO: 1730526 - DNA, 15 bp, Homo sapiens
aaaacattagtgacc

SEQ ID NO: 1730527 - DNA, 15 bp, Homo sapiens
aaacattagtgacca

SEQ ID NO: 1730528 - DNA, 15 bp, Homo sapiens
aacattagtgaccaa

SEQ ID NO: 1730529 - DNA, 15 bp, Homo sapiens
acattagtgaccaaa

SEQ ID NO: 1730530 - DNA, 15 bp, Homo sapiens
cattagtgaccaaaa

SEQ ID NO: 1730531 - DNA, 15 bp, Homo sapiens
attagtgaccaaaag

SEQ ID NO: 1730532 - DNA, 15 bp, Homo sapiens
ttagtgaccaaaagt

SEQ ID NO: 1730533 - DNA, 15 bp, Homo sapiens
tagtgaccaaaagtt

SEQ ID NO: 1730534 - DNA, 15 bp, Homo sapiens
agtgaccaaaagttt

SEQ ID NO: 1730535 - DNA, 15 bp, Homo sapiens
gtgaccaaaagtttg

SEQ ID NO: 1730536 - DNA, 15 bp, Homo sapiens
tgaccaaaagtttgg

SEQ ID NO: 1730537 - DNA, 15 bp, Homo sapiens
gaccaaaagtttgga

SEQ ID NO: 1730538 - DNA, 15 bp, Homo sapiens
accaaaagtttggaa

SEQ ID NO: 1730539 - DNA, 15 bp, Homo sapiens
ccaaaagtttggaaa

SEQ ID NO: 1730540 - DNA, 15 bp, Homo sapiens
caaaagtttggaaat

SEQ ID NO: 1730541 - DNA, 15 bp, Homo sapiens
aaaagtttggaaatg

SEQ ID NO: 1730542 - DNA, 15 bp, Homo sapiens
aaagtttggaaatga

SEQ ID NO: 1730543 - DNA, 15 bp, Homo sapiens
aagtttggaaatgat

SEQ ID NO: 1730544 - DNA, 15 bp, Homo sapiens
agtttggaaatgatt

SEQ ID NO: 1730545 - DNA, 15 bp, Homo sapiens
gtttggaaatgattc

SEQ ID NO: 1730546 - DNA, 15 bp, Homo sapiens
tttggaaatgattca

SEQ ID NO: 1730547 - DNA, 15 bp, Homo sapiens
ttggaaatgattcaa

SEQ ID NO: 1730548 - DNA, 15 bp, Homo sapiens
tggaaatgattcaag

SEQ ID NO: 1730549 - DNA, 15 bp, Homo sapiens
ggaaatgattcaaga

SEQ ID NO: 1730550 - DNA, 15 bp, Homo sapiens
gaaatgattcaagag

SEQ ID NO: 1730551 - DNA, 15 bp, Homo sapiens
aaatgattcaagagt

SEQ ID NO: 1730552 - DNA, 15 bp, Homo sapiens
aatgattcaagagta

SEQ ID NO: 1730553 - DNA, 15 bp, Homo sapiens
atgattcaagagtag

SEQ ID NO: 1730554 - DNA, 15 bp, Homo sapiens
tgattcaagagtagt

SEQ ID NO: 1730555 - DNA, 15 bp, Homo sapiens
gattcaagagtagtt

SEQ ID NO: 1730556 - DNA, 15 bp, Homo sapiens
attcaagagtagtta

SEQ ID NO: 1730557 - DNA, 15 bp, Homo sapiens
ttcaagagtagttaa

SEQ ID NO: 1730558 - DNA, 15 bp, Homo sapiens
tcaagagtagttaag

SEQ ID NO: 1730559 - DNA, 15 bp, Homo sapiens
caagagtagttaagt

SEQ ID NO: 1730560 - DNA, 15 bp, Homo sapiens
aagagtagttaagtg

SEQ ID NO: 1730561 - DNA, 15 bp, Homo sapiens
agagtagttaagtgc

SEQ ID NO: 1730562 - DNA, 15 bp, Homo sapiens
gagtagttaagtgca

SEQ ID NO: 1730563 - DNA, 15 bp, Homo sapiens
agtagttaagtgcag

SEQ ID NO: 1730564 - DNA, 15 bp, Homo sapiens
gtagttaagtgcagc

SEQ ID NO: 1730565 - DNA, 15 bp, Homo sapiens
tagttaagtgcagcc

SEQ ID NO: 1730566 - DNA, 15 bp, Homo sapiens
agttaagtgcagcca

SEQ ID NO: 1730567 - DNA, 15 bp, Homo sapiens
gttaagtgcagccaa

SEQ ID NO: 1730568 - DNA, 15 bp, Homo sapiens
ttaagtgcagccaag

SEQ ID NO: 1730569 - DNA, 15 bp, Homo sapiens
taagtgcagccaagt

SEQ ID NO: 1730570 - DNA, 15 bp, Homo sapiens
aagtgcagccaagtg

SEQ ID NO: 1730571 - DNA, 15 bp, Homo sapiens
agtgcagccaagtgc

SEQ ID NO: 1730572 - DNA, 15 bp, Homo sapiens
gtgcagccaagtgca

SEQ ID NO: 1730573 - DNA, 15 bp, Homo sapiens
tgcagccaagtgcaa

SEQ ID NO: 1730574 - DNA, 15 bp, Homo sapiens
gcagccaagtgcaaa

SEQ ID NO: 1730575 - DNA, 15 bp, Homo sapiens
cagccaagtgcaaac

SEQ ID NO: 1730576 - DNA, 15 bp, Homo sapiens
agccaagtgcaaaca

SEQ ID NO: 1730577 - DNA, 15 bp, Homo sapiens
gccaagtgcaaacag

SEQ ID NO: 1730578 - DNA, 15 bp, Homo sapiens
ccaagtgcaaacaga

SEQ ID NO: 1730579 - DNA, 15 bp, Homo sapiens
caagtgcaaacagaa

SEQ ID NO: 1730580 - DNA, 15 bp, Homo sapiens
aagtgcaaacagaat

SEQ ID NO: 1730581 - DNA, 15 bp, Homo sapiens
agtgcaaacagaata

SEQ ID NO: 1730582 - DNA, 15 bp, Homo sapiens
gtgcaaacagaatag

SEQ ID NO: 1730583 - DNA, 15 bp, Homo sapiens
tgcaaacagaatagt

SEQ ID NO: 1730584 - DNA, 15 bp, Homo sapiens
gcaaacagaatagtc

SEQ ID NO: 1730585 - DNA, 15 bp, Homo sapiens
caaacagaatagtca

SEQ ID NO: 1730586 - DNA, 15 bp, Homo sapiens
aaacagaatagtcaa

SEQ ID NO: 1730587 - DNA, 15 bp, Homo sapiens
aacagaatagtcaaa

SEQ ID NO: 1730588 - DNA, 15 bp, Homo sapiens
acagaatagtcaaat

SEQ ID NO: 1730589 - DNA, 15 bp, Homo sapiens
cagaatagtcaaatt

SEQ ID NO: 1730590 - DNA, 15 bp, Homo sapiens
agaatagtcaaattt

SEQ ID NO: 1730591 - DNA, 15 bp, Homo sapiens
gaatagtcaaatttt

SEQ ID NO: 1730592 - DNA, 15 bp, Homo sapiens
aatagtcaaattttc

SEQ ID NO: 1730593 - DNA, 15 bp, Homo sapiens
atagtcaaattttca

SEQ ID NO: 1730594 - DNA, 15 bp, Homo sapiens
tagtcaaattttcac

SEQ ID NO: 1730595 - DNA, 15 bp, Homo sapiens
agtcaaattttcact

SEQ ID NO: 1730596 - DNA, 15 bp, Homo sapiens
gtcaaattttcacta

SEQ ID NO: 1730597 - DNA, 15 bp, Homo sapiens
tcaaattttcactat

SEQ ID NO: 1730598 - DNA, 15 bp, Homo sapiens
caaattttcactatc

SEQ ID NO: 1730599 - DNA, 15 bp, Homo sapiens
aaattttcactatct

SEQ ID NO: 1730600 - DNA, 15 bp, Homo sapiens
aattttcactatctt

SEQ ID NO: 1730601 - DNA, 15 bp, Homo sapiens
attttcactatcttc

SEQ ID NO: 1730602 - DNA, 15 bp, Homo sapiens
ttttcactatcttca

SEQ ID NO: 1730603 - DNA, 15 bp, Homo sapiens
tttcactatcttcag

SEQ ID NO: 1730604 - DNA, 15 bp, Homo sapiens
ttcactatcttcaga

SEQ ID NO: 1730605 - DNA, 15 bp, Homo sapiens
tcactatcttcagac

SEQ ID NO: 1730606 - DNA, 15 bp, Homo sapiens
cactatcttcagaca

SEQ ID NO: 1730607 - DNA, 15 bp, Homo sapiens
actatcttcagacat

SEQ ID NO: 1730608 - DNA, 15 bp, Homo sapiens
ctatcttcagacatg

SEQ ID NO: 1730609 - DNA, 15 bp, Homo sapiens
tatcttcagacatga

SEQ ID NO: 1730610 - DNA, 15 bp, Homo sapiens
atcttcagacatgaa

SEQ ID NO: 1730611 - DNA, 15 bp, Homo sapiens
tcttcagacatgaaa

SEQ ID NO: 1730612 - DNA, 15 bp, Homo sapiens
cttcagacatgaaaa

SEQ ID NO: 1730613 - DNA, 15 bp, Homo sapiens
ttcagacatgaaaat

SEQ ID NO: 1730614 - DNA, 15 bp, Homo sapiens
tcagacatgaaaatt

SEQ ID NO: 1730615 - DNA, 15 bp, Homo sapiens
cagacatgaaaattt

SEQ ID NO: 1730616 - DNA, 15 bp, Homo sapiens
agacatgaaaatttg

SEQ ID NO: 1730617 - DNA, 15 bp, Homo sapiens
gacatgaaaatttgg

SEQ ID NO: 1730618 - DNA, 15 bp, Homo sapiens
acatgaaaatttgga

SEQ ID NO: 1730619 - DNA, 15 bp, Homo sapiens
catgaaaatttggag

SEQ ID NO: 1730620 - DNA, 15 bp, Homo sapiens
atgaaaatttggaga

SEQ ID NO: 1730621 - DNA, 15 bp, Homo sapiens
tgaaaatttggagaa

SEQ ID NO: 1730622 - DNA, 15 bp, Homo sapiens
gaaaatttggagaat

SEQ ID NO: 1730623 - DNA, 15 bp, Homo sapiens
aaaatttggagaatt

SEQ ID NO: 1730624 - DNA, 15 bp, Homo sapiens
aaatttggagaattg

SEQ ID NO: 1730625 - DNA, 15 bp, Homo sapiens
aatttggagaattgt

SEQ ID NO: 1730626 - DNA, 15 bp, Homo sapiens
atttggagaattgtt

SEQ ID NO: 1730627 - DNA, 15 bp, Homo sapiens
tttggagaattgtta

SEQ ID NO: 1730628 - DNA, 15 bp, Homo sapiens
ttggagaattgttag

SEQ ID NO: 1730629 - DNA, 15 bp, Homo sapiens
tggagaattgttaga

SEQ ID NO: 1730630 - DNA, 15 bp, Homo sapiens
ggagaattgttagat

SEQ ID NO: 1730631 - DNA, 15 bp, Homo sapiens
gagaattgttagata

SEQ ID NO: 1730632 - DNA, 15 bp, Homo sapiens
agaattgttagatag

SEQ ID NO: 1730633 - DNA, 15 bp, Homo sapiens
gaattgttagatagc

SEQ ID NO: 1730634 - DNA, 15 bp, Homo sapiens
aattgttagatagcc

SEQ ID NO: 1730635 - DNA, 15 bp, Homo sapiens
attgttagatagcca

SEQ ID NO: 1730636 - DNA, 15 bp, Homo sapiens
ttgttagatagccac

SEQ ID NO: 1730637 - DNA, 15 bp, Homo sapiens
tgttagatagccaca

SEQ ID NO: 1730638 - DNA, 15 bp, Homo sapiens
gttagatagccacaa

SEQ ID NO: 1730639 - DNA, 15 bp, Homo sapiens
ttagatagccacaaa

SEQ ID NO: 1730640 - DNA, 15 bp, Homo sapiens
tagatagccacaaat

SEQ ID NO: 1730641 - DNA, 15 bp, Homo sapiens
agatagccacaaatg

SEQ ID NO: 1730642 - DNA, 15 bp, Homo sapiens
gatagccacaaatgc

SEQ ID NO: 1730643 - DNA, 15 bp, Homo sapiens
atagccacaaatgca

SEQ ID NO: 1730644 - DNA, 15 bp, Homo sapiens
tagccacaaatgcaa

SEQ ID NO: 1730645 - DNA, 15 bp, Homo sapiens
agccacaaatgcaat

SEQ ID NO: 1730646 - DNA, 15 bp, Homo sapiens
gccacaaatgcaata

SEQ ID NO: 1730647 - DNA, 15 bp, Homo sapiens
ccacaaatgcaatat

SEQ ID NO: 1730648 - DNA, 15 bp, Homo sapiens
cacaaatgcaatata

SEQ ID NO: 1730649 - DNA, 15 bp, Homo sapiens
acaaatgcaatatag

SEQ ID NO: 1730650 - DNA, 15 bp, Homo sapiens
caaatgcaatatagt

SEQ ID NO: 1730651 - DNA, 15 bp, Homo sapiens
aaatgcaatatagtg

SEQ ID NO: 1730652 - DNA, 15 bp, Homo sapiens
aatgcaatatagtgg

SEQ ID NO: 1730653 - DNA, 15 bp, Homo sapiens
atgcaatatagtggg

SEQ ID NO: 1730654 - DNA, 15 bp, Homo sapiens
tgcaatatagtgggg

SEQ ID NO: 1730655 - DNA, 15 bp, Homo sapiens
gcaatatagtggggg

SEQ ID NO: 1730656 - DNA, 15 bp, Homo sapiens
caatatagtggggga

SEQ ID NO: 1730657 - DNA, 15 bp, Homo sapiens
aatatagtgggggaa

SEQ ID NO: 1730658 - DNA, 15 bp, Homo sapiens
atatagtgggggaaa

SEQ ID NO: 1730659 - DNA, 15 bp, Homo sapiens
tatagtgggggaaaa

SEQ ID NO: 1730660 - DNA, 15 bp, Homo sapiens
atagtgggggaaaag

SEQ ID NO: 1730661 - DNA, 15 bp, Homo sapiens
tagtgggggaaaaga

SEQ ID NO: 1730662 - DNA, 15 bp, Homo sapiens
agtgggggaaaagac

SEQ ID NO: 1730663 - DNA, 15 bp, Homo sapiens
gtgggggaaaagacc

SEQ ID NO: 1730664 - DNA, 15 bp, Homo sapiens
tgggggaaaagacca

SEQ ID NO: 1730665 - DNA, 15 bp, Homo sapiens
gggggaaaagaccac

SEQ ID NO: 1730666 - DNA, 15 bp, Homo sapiens
ggggaaaagaccaca

SEQ ID NO: 1730667 - DNA, 15 bp, Homo sapiens
gggaaaagaccacag

SEQ ID NO: 1730668 - DNA, 15 bp, Homo sapiens
ggaaaagaccacaga

SEQ ID NO: 1730669 - DNA, 15 bp, Homo sapiens
gaaaagaccacagag

SEQ ID NO: 1730670 - DNA, 15 bp, Homo sapiens
aaaagaccacagagc

SEQ ID NO: 1730671 - DNA, 15 bp, Homo sapiens
aaagaccacagagca

SEQ ID NO: 1730672 - DNA, 15 bp, Homo sapiens
aagaccacagagcat

SEQ ID NO: 1730673 - DNA, 15 bp, Homo sapiens
agaccacagagcata

SEQ ID NO: 1730674 - DNA, 15 bp, Homo sapiens
gaccacagagcatat

SEQ ID NO: 1730675 - DNA, 15 bp, Homo sapiens
accacagagcatatt

SEQ ID NO: 1730676 - DNA, 15 bp, Homo sapiens
ccacagagcatattt

SEQ ID NO: 1730677 - DNA, 15 bp, Homo sapiens
cacagagcatatttg

SEQ ID NO: 1730678 - DNA, 15 bp, Homo sapiens
acagagcatatttgt

SEQ ID NO: 1730679 - DNA, 15 bp, Homo sapiens
cagagcatatttgtc

SEQ ID NO: 1730680 - DNA, 15 bp, Homo sapiens
agagcatatttgtca

SEQ ID NO: 1730681 - DNA, 15 bp, Homo sapiens
gagcatatttgtcaa

SEQ ID NO: 1730682 - DNA, 15 bp, Homo sapiens
agcatatttgtcaag

SEQ ID NO: 1730683 - DNA, 15 bp, Homo sapiens
gcatatttgtcaaga

SEQ ID NO: 1730684 - DNA, 15 bp, Homo sapiens
catatttgtcaagat

SEQ ID NO: 1730685 - DNA, 15 bp, Homo sapiens
atatttgtcaagata

SEQ ID NO: 1730686 - DNA, 15 bp, Homo sapiens
tatttgtcaagatat

SEQ ID NO: 1730687 - DNA, 15 bp, Homo sapiens
atttgtcaagatata

SEQ ID NO: 1730688 - DNA, 15 bp, Homo sapiens
tttgtcaagatataa

SEQ ID NO: 1730689 - DNA, 15 bp, Homo sapiens
ttgtcaagatataag

SEQ ID NO: 1730690 - DNA, 15 bp, Homo sapiens
tgtcaagatataagt

SEQ ID NO: 1730691 - DNA, 15 bp, Homo sapiens
gtcaagatataagtc

SEQ ID NO: 1730692 - DNA, 15 bp, Homo sapiens
tcaagatataagtca

SEQ ID NO: 1730693 - DNA, 15 bp, Homo sapiens
caagatataagtcaa

SEQ ID NO: 1730694 - DNA, 15 bp, Homo sapiens
aagatataagtcaac

SEQ ID NO: 1730695 - DNA, 15 bp, Homo sapiens
agatataagtcaaca

SEQ ID NO: 1730696 - DNA, 15 bp, Homo sapiens
gatataagtcaacag

SEQ ID NO: 1730697 - DNA, 15 bp, Homo sapiens
atataagtcaacagg

SEQ ID NO: 1730698 - DNA, 15 bp, Homo sapiens
tataagtcaacagga

SEQ ID NO: 1730699 - DNA, 15 bp, Homo sapiens
ataagtcaacaggac

SEQ ID NO: 1730700 - DNA, 15 bp, Homo sapiens
taagtcaacaggaca

SEQ ID NO: 1730701 - DNA, 15 bp, Homo sapiens
aagtcaacaggacag

SEQ ID NO: 1730702 - DNA, 15 bp, Homo sapiens
agtcaacaggacaga

SEQ ID NO: 1730703 - DNA, 15 bp, Homo sapiens
gtcaacaggacagag

SEQ ID NO: 1730704 - DNA, 15 bp, Homo sapiens
tcaacaggacagaga

SEQ ID NO: 1730705 - DNA, 15 bp, Homo sapiens
caacaggacagagaa

SEQ ID NO: 1730706 - DNA, 15 bp, Homo sapiens
aacaggacagagaat

SEQ ID NO: 1730707 - DNA, 15 bp, Homo sapiens
acaggacagagaata

SEQ ID NO: 1730708 - DNA, 15 bp, Homo sapiens
caggacagagaatag

SEQ ID NO: 1730709 - DNA, 15 bp, Homo sapiens
aggacagagaataga

SEQ ID NO: 1730710 - DNA, 15 bp, Homo sapiens
ggacagagaatagag

SEQ ID NO: 1730711 - DNA, 15 bp, Homo sapiens
gacagagaatagagt

SEQ ID NO: 1730712 - DNA, 15 bp, Homo sapiens
acagagaatagagtc

SEQ ID NO: 1730713 - DNA, 15 bp, Homo sapiens
cagagaatagagtcc

SEQ ID NO: 1730714 - DNA, 15 bp, Homo sapiens
agagaatagagtcca

SEQ ID NO: 1730715 - DNA, 15 bp, Homo sapiens
gagaatagagtccat

SEQ ID NO: 1730716 - DNA, 15 bp, Homo sapiens
agaatagagtccatc

SEQ ID NO: 1730717 - DNA, 15 bp, Homo sapiens
gaatagagtccatca

SEQ ID NO: 1730718 - DNA, 15 bp, Homo sapiens
aatagagtccatcat

SEQ ID NO: 1730719 - DNA, 15 bp, Homo sapiens
atagagtccatcata

SEQ ID NO: 1730720 - DNA, 15 bp, Homo sapiens
tagagtccatcatag

SEQ ID NO: 1730721 - DNA, 15 bp, Homo sapiens
agagtccatcatagc

SEQ ID NO: 1730722 - DNA, 15 bp, Homo sapiens
gagtccatcatagca

SEQ ID NO: 1730723 - DNA, 15 bp, Homo sapiens
agtccatcatagcac

SEQ ID NO: 1730724 - DNA, 15 bp, Homo sapiens
gtccatcatagcacc

SEQ ID NO: 1730725 - DNA, 15 bp, Homo sapiens
tccatcatagcaccc

SEQ ID NO: 1730726 - DNA, 15 bp, Homo sapiens
ccatcatagcaccct

SEQ ID NO: 1730727 - DNA, 15 bp, Homo sapiens
catcatagcaccctc

SEQ ID NO: 1730728 - DNA, 15 bp, Homo sapiens
atcatagcaccctct

SEQ ID NO: 1730729 - DNA, 15 bp, Homo sapiens
tcatagcaccctctt

SEQ ID NO: 1730730 - DNA, 15 bp, Homo sapiens
catagcaccctcttt

SEQ ID NO: 1730731 - DNA, 15 bp, Homo sapiens
atagcaccctcttta

SEQ ID NO: 1730732 - DNA, 15 bp, Homo sapiens
tagcaccctctttag

SEQ ID NO: 1730733 - DNA, 15 bp, Homo sapiens
agcaccctctttagg

SEQ ID NO: 1730734 - DNA, 15 bp, Homo sapiens
gcaccctctttagga

SEQ ID NO: 1730735 - DNA, 15 bp, Homo sapiens
caccctctttaggaa

SEQ ID NO: 1730736 - DNA, 15 bp, Homo sapiens
accctctttaggaaa

SEQ ID NO: 1730737 - DNA, 15 bp, Homo sapiens
ccctctttaggaaaa

SEQ ID NO: 1730738 - DNA, 15 bp, Homo sapiens
cctctttaggaaaaa

SEQ ID NO: 1730739 - DNA, 15 bp, Homo sapiens
ctctttaggaaaaat

SEQ ID NO: 1730740 - DNA, 15 bp, Homo sapiens
tctttaggaaaaatt

SEQ ID NO: 1730741 - DNA, 15 bp, Homo sapiens
ctttaggaaaaattg

SEQ ID NO: 1730742 - DNA, 15 bp, Homo sapiens
tttaggaaaaattgt

SEQ ID NO: 1730743 - DNA, 15 bp, Homo sapiens
ttaggaaaaattgtt

SEQ ID NO: 1730744 - DNA, 15 bp, Homo sapiens
taggaaaaattgttg

SEQ ID NO: 1730745 - DNA, 15 bp, Homo sapiens
aggaaaaattgttgc

SEQ ID NO: 1730746 - DNA, 15 bp, Homo sapiens
ggaaaaattgttgct

SEQ ID NO: 1730747 - DNA, 15 bp, Homo sapiens
gaaaaattgttgcta

SEQ ID NO: 1730748 - DNA, 15 bp, Homo sapiens
aaaaattgttgctaa

SEQ ID NO: 1730749 - DNA, 15 bp, Homo sapiens
aaaattgttgctaat

SEQ ID NO: 1730750 - DNA, 15 bp, Homo sapiens
aaattgttgctaatt

SEQ ID NO: 1730751 - DNA, 15 bp, Homo sapiens
aattgttgctaatta

SEQ ID NO: 1730752 - DNA, 15 bp, Homo sapiens
attgttgctaattaa

SEQ ID NO: 1730753 - DNA, 15 bp, Homo sapiens
ttgttgctaattaat

SEQ ID NO: 1730754 - DNA, 15 bp, Homo sapiens
tgttgctaattaatt

SEQ ID NO: 1730755 - DNA, 15 bp, Homo sapiens
gttgctaattaattt

SEQ ID NO: 1730756 - DNA, 15 bp, Homo sapiens
ttgctaattaattta

SEQ ID NO: 1730757 - DNA, 15 bp, Homo sapiens
tgctaattaatttat

SEQ ID NO: 1730758 - DNA, 15 bp, Homo sapiens
gctaattaatttata

SEQ ID NO: 1730759 - DNA, 15 bp, Homo sapiens
ctaattaatttatat

SEQ ID NO: 1730760 - DNA, 15 bp, Homo sapiens
taattaatttatatt

SEQ ID NO: 1730761 - DNA, 15 bp, Homo sapiens
aattaatttatattt

SEQ ID NO: 1730762 - DNA, 15 bp, Homo sapiens
attaatttatatttg

SEQ ID NO: 1730763 - DNA, 15 bp, Homo sapiens
ttaatttatatttga

SEQ ID NO: 1730764 - DNA, 15 bp, Homo sapiens
taatttatatttgaa

SEQ ID NO: 1730765 - DNA, 15 bp, Homo sapiens
aatttatatttgaat

SEQ ID NO: 1730766 - DNA, 15 bp, Homo sapiens
atttatatttgaata

SEQ ID NO: 1730767 - DNA, 15 bp, Homo sapiens
ttatatttgaatata

SEQ ID NO: 1730768 - DNA, 15 bp, Homo sapiens
tatatttgaatataa

SEQ ID NO: 1730769 - DNA, 15 bp, Homo sapiens
atatttgaatataat

SEQ ID NO: 1730770 - DNA, 15 bp, Homo sapiens
tatttgaatataatt

SEQ ID NO: 1730771 - DNA, 15 bp, Homo sapiens
atttgaatataattt

SEQ ID NO: 1730772 - DNA, 15 bp, Homo sapiens
tttgaatataatttg

SEQ ID NO: 1730773 - DNA, 15 bp, Homo sapiens
ttgaatataatttga

SEQ ID NO: 1730774 - DNA, 15 bp, Homo sapiens
tgaatataatttgaa

SEQ ID NO: 1730775 - DNA, 15 bp, Homo sapiens
gaatataatttgaaa

SEQ ID NO: 1730776 - DNA, 15 bp, Homo sapiens
aatataatttgaaaa

SEQ ID NO: 1730777 - DNA, 15 bp, Homo sapiens
atataatttgaaaat

SEQ ID NO: 1730778 - DNA, 15 bp, Homo sapiens
tataatttgaaaata

SEQ ID NO: 1730779 - DNA, 15 bp, Homo sapiens
ataatttgaaaatac

SEQ ID NO: 1730780 - DNA, 15 bp, Homo sapiens
taatttgaaaatact

SEQ ID NO: 1730781 - DNA, 15 bp, Homo sapiens
aatttgaaaatactt

SEQ ID NO: 1730782 - DNA, 15 bp, Homo sapiens
atttgaaaatacttt

SEQ ID NO: 1730783 - DNA, 15 bp, Homo sapiens
tttgaaaatactttg

SEQ ID NO: 1730784 - DNA, 15 bp, Homo sapiens
ttgaaaatactttgg

SEQ ID NO: 1730785 - DNA, 15 bp, Homo sapiens
tgaaaatactttggt

SEQ ID NO: 1730786 - DNA, 15 bp, Homo sapiens
gaaaatactttggta

SEQ ID NO: 1730787 - DNA, 15 bp, Homo sapiens
aaaatactttggtag

SEQ ID NO: 1730788 - DNA, 15 bp, Homo sapiens
aaatactttggtaga

SEQ ID NO: 1730789 - DNA, 15 bp, Homo sapiens
aatactttggtagat

SEQ ID NO: 1730790 - DNA, 15 bp, Homo sapiens
atactttggtagatg

SEQ ID NO: 1730791 - DNA, 15 bp, Homo sapiens
tactttggtagatgg

SEQ ID NO: 1730792 - DNA, 15 bp, Homo sapiens
actttggtagatgga

SEQ ID NO: 1730793 - DNA, 15 bp, Homo sapiens
ctttggtagatggaa

SEQ ID NO: 1730794 - DNA, 15 bp, Homo sapiens
tttggtagatggaat

SEQ ID NO: 1730795 - DNA, 15 bp, Homo sapiens
ttggtagatggaatt

SEQ ID NO: 1730796 - DNA, 15 bp, Homo sapiens
tggtagatggaattt

SEQ ID NO: 1730797 - DNA, 15 bp, Homo sapiens
ggtagatggaatttg

SEQ ID NO: 1730798 - DNA, 15 bp, Homo sapiens
gtagatggaatttgt

SEQ ID NO: 1730799 - DNA, 15 bp, Homo sapiens
tagatggaatttgtt

SEQ ID NO: 1730800 - DNA, 15 bp, Homo sapiens
agatggaatttgtta

SEQ ID NO: 1730801 - DNA, 15 bp, Homo sapiens
gatggaatttgttat

SEQ ID NO: 1730802 - DNA, 15 bp, Homo sapiens
atggaatttgttatt

SEQ ID NO: 1730803 - DNA, 15 bp, Homo sapiens
tggaatttgttattc

SEQ ID NO: 1730804 - DNA, 15 bp, Homo sapiens
ggaatttgttattct

SEQ ID NO: 1730805 - DNA, 15 bp, Homo sapiens
gaatttgttattctc

SEQ ID NO: 1730806 - DNA, 15 bp, Homo sapiens
aatttgttattctct

SEQ ID NO: 1730807 - DNA, 15 bp, Homo sapiens
atttgttattctctg

SEQ ID NO: 1730808 - DNA, 15 bp, Homo sapiens
tttgttattctctgt

SEQ ID NO: 1730809 - DNA, 15 bp, Homo sapiens
ttgttattctctgtt

SEQ ID NO: 1730810 - DNA, 15 bp, Homo sapiens
tgttattctctgttg

SEQ ID NO: 1730811 - DNA, 15 bp, Homo sapiens
gttattctctgttga

SEQ ID NO: 1730812 - DNA, 15 bp, Homo sapiens
ttattctctgttgac

SEQ ID NO: 1730813 - DNA, 15 bp, Homo sapiens
tattctctgttgact

SEQ ID NO: 1730814 - DNA, 15 bp, Homo sapiens
attctctgttgactc

SEQ ID NO: 1730815 - DNA, 15 bp, Homo sapiens
ttctctgttgactct

SEQ ID NO: 1730816 - DNA, 15 bp, Homo sapiens
tctctgttgactctt

SEQ ID NO: 1730817 - DNA, 15 bp, Homo sapiens
ctctgttgactctta

SEQ ID NO: 1730818 - DNA, 15 bp, Homo sapiens
tctgttgactcttac

SEQ ID NO: 1730819 - DNA, 15 bp, Homo sapiens
ctgttgactcttact

SEQ ID NO: 1730820 - DNA, 15 bp, Homo sapiens
tgttgactcttactt

SEQ ID NO: 1730821 - DNA, 15 bp, Homo sapiens
gttgactcttactta

SEQ ID NO: 1730822 - DNA, 15 bp, Homo sapiens
ttgactcttacttat

SEQ ID NO: 1730823 - DNA, 15 bp, Homo sapiens
tgactcttacttata

SEQ ID NO: 1730824 - DNA, 15 bp, Homo sapiens
gactcttacttatag

SEQ ID NO: 1730825 - DNA, 15 bp, Homo sapiens
actcttacttatagg

SEQ ID NO: 1730826 - DNA, 15 bp, Homo sapiens
ctcttacttatagga

SEQ ID NO: 1730827 - DNA, 15 bp, Homo sapiens
tcttacttataggaa

SEQ ID NO: 1730828 - DNA, 15 bp, Homo sapiens
cttacttataggaaa

SEQ ID NO: 1730829 - DNA, 15 bp, Homo sapiens
ttacttataggaaat

SEQ ID NO: 1730830 - DNA, 15 bp, Homo sapiens
tacttataggaaatt

SEQ ID NO: 1730831 - DNA, 15 bp, Homo sapiens
acttataggaaattc

SEQ ID NO: 1730832 - DNA, 15 bp, Homo sapiens
cttataggaaattct

SEQ ID NO: 1730833 - DNA, 15 bp, Homo sapiens
ttataggaaattctt

SEQ ID NO: 1730834 - DNA, 15 bp, Homo sapiens
tataggaaattcttt

SEQ ID NO: 1730835 - DNA, 15 bp, Homo sapiens
ataggaaattctttt

SEQ ID NO: 1730836 - DNA, 15 bp, Homo sapiens
taggaaattcttttt

SEQ ID NO: 1730837 - DNA, 15 bp, Homo sapiens
aggaaattctttttg

SEQ ID NO: 1730838 - DNA, 15 bp, Homo sapiens
ggaaattctttttgt

SEQ ID NO: 1730839 - DNA, 15 bp, Homo sapiens
gaaattctttttgta

SEQ ID NO: 1730840 - DNA, 15 bp, Homo sapiens
aaattctttttgtac

SEQ ID NO: 1730841 - DNA, 15 bp, Homo sapiens
aattctttttgtaca

SEQ ID NO: 1730842 - DNA, 15 bp, Homo sapiens
attctttttgtacaa

SEQ ID NO: 1730843 - DNA, 15 bp, Homo sapiens
ttctttttgtacaaa

SEQ ID NO: 1730844 - DNA, 15 bp, Homo sapiens
tctttttgtacaaac

SEQ ID NO: 1730845 - DNA, 15 bp, Homo sapiens
ctttttgtacaaacc

SEQ ID NO: 1730846 - DNA, 15 bp, Homo sapiens
tttttgtacaaaccc

SEQ ID NO: 1730847 - DNA, 15 bp, Homo sapiens
ttttgtacaaaccct

SEQ ID NO: 1730848 - DNA, 15 bp, Homo sapiens
tttgtacaaaccctt

SEQ ID NO: 1730849 - DNA, 15 bp, Homo sapiens
ttgtacaaacccttt

SEQ ID NO: 1730850 - DNA, 15 bp, Homo sapiens
tgtacaaaccctttt

SEQ ID NO: 1730851 - DNA, 15 bp, Homo sapiens
gtacaaaccctttta

SEQ ID NO: 1730852 - DNA, 15 bp, Homo sapiens
tacaaacccttttat

SEQ ID NO: 1730853 - DNA, 15 bp, Homo sapiens
acaaacccttttatg

SEQ ID NO: 1730854 - DNA, 15 bp, Homo sapiens
caaacccttttatgc

SEQ ID NO: 1730855 - DNA, 15 bp, Homo sapiens
aaacccttttatgct

SEQ ID NO: 1730856 - DNA, 15 bp, Homo sapiens
aacccttttatgcta

SEQ ID NO: 1730857 - DNA, 15 bp, Homo sapiens
acccttttatgctat

SEQ ID NO: 1730858 - DNA, 15 bp, Homo sapiens
cccttttatgctata

SEQ ID NO: 1730859 - DNA, 15 bp, Homo sapiens
ccttttatgctatag

SEQ ID NO: 1730860 - DNA, 15 bp, Homo sapiens
cttttatgctatagt

SEQ ID NO: 1730861 - DNA, 15 bp, Homo sapiens
ttttatgctatagtt

SEQ ID NO: 1730862 - DNA, 15 bp, Homo sapiens
tttatgctatagttc

SEQ ID NO: 1730863 - DNA, 15 bp, Homo sapiens
ttatgctatagttca

SEQ ID NO: 1730864 - DNA, 15 bp, Homo sapiens
tatgctatagttcaa

SEQ ID NO: 1730865 - DNA, 15 bp, Homo sapiens
atgctatagttcaaa

SEQ ID NO: 1730866 - DNA, 15 bp, Homo sapiens
tgctatagttcaaaa

SEQ ID NO: 1730867 - DNA, 15 bp, Homo sapiens
gctatagttcaaaaa

SEQ ID NO: 1730868 - DNA, 15 bp, Homo sapiens
ctatagttcaaaaat

SEQ ID NO: 1730869 - DNA, 15 bp, Homo sapiens
tatagttcaaaaata

SEQ ID NO: 1730870 - DNA, 15 bp, Homo sapiens
atagttcaaaaatat

SEQ ID NO: 1730871 - DNA, 15 bp, Homo sapiens
tagttcaaaaatatt

SEQ ID NO: 1730872 - DNA, 15 bp, Homo sapiens
agttcaaaaatattg

SEQ ID NO: 1730873 - DNA, 15 bp, Homo sapiens
gttcaaaaatattga

SEQ ID NO: 1730874 - DNA, 15 bp, Homo sapiens
ttcaaaaatattgat

SEQ ID NO: 1730875 - DNA, 15 bp, Homo sapiens
tcaaaaatattgatc

SEQ ID NO: 1730876 - DNA, 15 bp, Homo sapiens
caaaaatattgatct

SEQ ID NO: 1730877 - DNA, 15 bp, Homo sapiens
aaaaatattgatcta

SEQ ID NO: 1730878 - DNA, 15 bp, Homo sapiens
aaaatattgatctat

SEQ ID NO: 1730879 - DNA, 15 bp, Homo sapiens
aaatattgatctatt

SEQ ID NO: 1730880 - DNA, 15 bp, Homo sapiens
aatattgatctattc

SEQ ID NO: 1730881 - DNA, 15 bp, Homo sapiens
atattgatctattca

SEQ ID NO: 1730882 - DNA, 15 bp, Homo sapiens
tattgatctattcaa

SEQ ID NO: 1730883 - DNA, 15 bp, Homo sapiens
attgatctattcaat

SEQ ID NO: 1730884 - DNA, 15 bp, Homo sapiens
ttgatctattcaata

SEQ ID NO: 1730885 - DNA, 15 bp, Homo sapiens
tgatctattcaatac

SEQ ID NO: 1730886 - DNA, 15 bp, Homo sapiens
gatctattcaataca

SEQ ID NO: 1730887 - DNA, 15 bp, Homo sapiens
atctattcaatacac

SEQ ID NO: 1730888 - DNA, 15 bp, Homo sapiens
tctattcaatacaca

SEQ ID NO: 1730889 - DNA, 15 bp, Homo sapiens
ctattcaatacacat

SEQ ID NO: 1730890 - DNA, 15 bp, Homo sapiens
tattcaatacacatt

SEQ ID NO: 1730891 - DNA, 15 bp, Homo sapiens
attcaatacacattt

SEQ ID NO: 1730892 - DNA, 15 bp, Homo sapiens
ttcaatacacattta

SEQ ID NO: 1730893 - DNA, 15 bp, Homo sapiens
tcaatacacatttac

SEQ ID NO: 1730894 - DNA, 15 bp, Homo sapiens
caatacacatttact

SEQ ID NO: 1730895 - DNA, 15 bp, Homo sapiens
aatacacatttactg

SEQ ID NO: 1730896 - DNA, 15 bp, Homo sapiens
atacacatttactga

SEQ ID NO: 1730897 - DNA, 15 bp, Homo sapiens
tacacatttactgag

SEQ ID NO: 1730898 - DNA, 15 bp, Homo sapiens
acacatttactgagc

SEQ ID NO: 1730899 - DNA, 15 bp, Homo sapiens
cacatttactgagcc

SEQ ID NO: 1730900 - DNA, 15 bp, Homo sapiens
acatttactgagccc

SEQ ID NO: 1730901 - DNA, 15 bp, Homo sapiens
catttactgagccca

SEQ ID NO: 1730902 - DNA, 15 bp, Homo sapiens
atttactgagcccac

SEQ ID NO: 1730903 - DNA, 15 bp, Homo sapiens
tttactgagcccact

SEQ ID NO: 1730904 - DNA, 15 bp, Homo sapiens
ttactgagcccactg

SEQ ID NO: 1730905 - DNA, 15 bp, Homo sapiens
tactgagcccactgg

SEQ ID NO: 1730906 - DNA, 15 bp, Homo sapiens
actgagcccactggt

SEQ ID NO: 1730907 - DNA, 15 bp, Homo sapiens
ctgagcccactggtg

SEQ ID NO: 1730908 - DNA, 15 bp, Homo sapiens
tgagcccactggtgc

SEQ ID NO: 1730909 - DNA, 15 bp, Homo sapiens
gagcccactggtgct

SEQ ID NO: 1730910 - DNA, 15 bp, Homo sapiens
agcccactggtgctg

SEQ ID NO: 1730911 - DNA, 15 bp, Homo sapiens
gcccactggtgctgt

SEQ ID NO: 1730912 - DNA, 15 bp, Homo sapiens
cccactggtgctgtg

SEQ ID NO: 1730913 - DNA, 15 bp, Homo sapiens
ccactggtgctgtgg

SEQ ID NO: 1730914 - DNA, 15 bp, Homo sapiens
cactggtgctgtggg

SEQ ID NO: 1730915 - DNA, 15 bp, Homo sapiens
actggtgctgtgggc

SEQ ID NO: 1730916 - DNA, 15 bp, Homo sapiens
ctggtgctgtgggca

SEQ ID NO: 1730917 - DNA, 15 bp, Homo sapiens
tggtgctgtgggcac

SEQ ID NO: 1730918 - DNA, 15 bp, Homo sapiens
ggtgctgtgggcact

SEQ ID NO: 1730919 - DNA, 15 bp, Homo sapiens
gtgctgtgggcacta

SEQ ID NO: 1730920 - DNA, 15 bp, Homo sapiens
tgctgtgggcactag

SEQ ID NO: 1730921 - DNA, 15 bp, Homo sapiens
gctgtgggcactaga

SEQ ID NO: 1730922 - DNA, 15 bp, Homo sapiens
ctgtgggcactagaa

SEQ ID NO: 1730923 - DNA, 15 bp, Homo sapiens
tgtgggcactagaaa

SEQ ID NO: 1730924 - DNA, 15 bp, Homo sapiens
gtgggcactagaaat

SEQ ID NO: 1730925 - DNA, 15 bp, Homo sapiens
tgggcactagaaata

SEQ ID NO: 1730926 - DNA, 15 bp, Homo sapiens
gggcactagaaatac

SEQ ID NO: 1730927 - DNA, 15 bp, Homo sapiens
ggcactagaaataca

SEQ ID NO: 1730928 - DNA, 15 bp, Homo sapiens
gcactagaaatacaa

SEQ ID NO: 1730929 - DNA, 15 bp, Homo sapiens
cactagaaatacaac

SEQ ID NO: 1730930 - DNA, 15 bp, Homo sapiens
actagaaatacaaca

SEQ ID NO: 1730931 - DNA, 15 bp, Homo sapiens
ctagaaatacaacag

SEQ ID NO: 1730932 - DNA, 15 bp, Homo sapiens
tagaaatacaacagg

SEQ ID NO: 1730933 - DNA, 15 bp, Homo sapiens
agaaatacaacaggt

SEQ ID NO: 1730934 - DNA, 15 bp, Homo sapiens
gaaatacaacaggta

SEQ ID NO: 1730935 - DNA, 15 bp, Homo sapiens
aaatacaacaggtaa

SEQ ID NO: 1730936 - DNA, 15 bp, Homo sapiens
aatacaacaggtaag

SEQ ID NO: 1730937 - DNA, 15 bp, Homo sapiens
atacaacaggtaagg

SEQ ID NO: 1730938 - DNA, 15 bp, Homo sapiens
tacaacaggtaaggc

SEQ ID NO: 1730939 - DNA, 15 bp, Homo sapiens
acaacaggtaaggct

SEQ ID NO: 1730940 - DNA, 15 bp, Homo sapiens
caacaggtaaggctt

SEQ ID NO: 1730941 - DNA, 15 bp, Homo sapiens
aacaggtaaggcttc

SEQ ID NO: 1730942 - DNA, 15 bp, Homo sapiens
acaggtaaggcttct

SEQ ID NO: 1730943 - DNA, 15 bp, Homo sapiens
caggtaaggcttctg

SEQ ID NO: 1730944 - DNA, 15 bp, Homo sapiens
aggtaaggcttctgt

SEQ ID NO: 1730945 - DNA, 15 bp, Homo sapiens
ggtaaggcttctgtc

SEQ ID NO: 1730946 - DNA, 15 bp, Homo sapiens
gtaaggcttctgtct

SEQ ID NO: 1730947 - DNA, 15 bp, Homo sapiens
taaggcttctgtcta

SEQ ID NO: 1730948 - DNA, 15 bp, Homo sapiens
aaggcttctgtctaa

SEQ ID NO: 1730949 - DNA, 15 bp, Homo sapiens
aggcttctgtctaac

SEQ ID NO: 1730950 - DNA, 15 bp, Homo sapiens
ggcttctgtctaaca

SEQ ID NO: 1730951 - DNA, 15 bp, Homo sapiens
gcttctgtctaacag

SEQ ID NO: 1730952 - DNA, 15 bp, Homo sapiens
cttctgtctaacagt

SEQ ID NO: 1730953 - DNA, 15 bp, Homo sapiens
ttctgtctaacagtg

SEQ ID NO: 1730954 - DNA, 15 bp, Homo sapiens
tctgtctaacagtgg

SEQ ID NO: 1730955 - DNA, 15 bp, Homo sapiens
ctgtctaacagtggt

SEQ ID NO: 1730956 - DNA, 15 bp, Homo sapiens
tgtctaacagtggtc

SEQ ID NO: 1730957 - DNA, 15 bp, Homo sapiens
gtctaacagtggtct

SEQ ID NO: 1730958 - DNA, 15 bp, Homo sapiens
tctaacagtggtctt

SEQ ID NO: 1730959 - DNA, 15 bp, Homo sapiens
ctaacagtggtcttc

SEQ ID NO: 1730960 - DNA, 15 bp, Homo sapiens
taacagtggtcttca

SEQ ID NO: 1730961 - DNA, 15 bp, Homo sapiens
aacagtggtcttcaa

SEQ ID NO: 1730962 - DNA, 15 bp, Homo sapiens
acagtggtcttcaat

SEQ ID NO: 1730963 - DNA, 15 bp, Homo sapiens
cagtggtcttcaata

SEQ ID NO: 1730964 - DNA, 15 bp, Homo sapiens
agtggtcttcaatag

SEQ ID NO: 1730965 - DNA, 15 bp, Homo sapiens
gtggtcttcaatagg

SEQ ID NO: 1730966 - DNA, 15 bp, Homo sapiens
tggtcttcaatagga

SEQ ID NO: 1730967 - DNA, 15 bp, Homo sapiens
ggtcttcaataggaa

SEQ ID NO: 1730968 - DNA, 15 bp, Homo sapiens
gtcttcaataggaat

SEQ ID NO: 1730969 - DNA, 15 bp, Homo sapiens
tcttcaataggaata

SEQ ID NO: 1730970 - DNA, 15 bp, Homo sapiens
cttcaataggaatac

SEQ ID NO: 1730971 - DNA, 15 bp, Homo sapiens
ttcaataggaataca

SEQ ID NO: 1730972 - DNA, 15 bp, Homo sapiens
tcaataggaatacag

SEQ ID NO: 1730973 - DNA, 15 bp, Homo sapiens
caataggaatacaga

SEQ ID NO: 1730974 - DNA, 15 bp, Homo sapiens
aataggaatacagaa

SEQ ID NO: 1730975 - DNA, 15 bp, Homo sapiens
ataggaatacagaat

SEQ ID NO: 1730976 - DNA, 15 bp, Homo sapiens
taggaatacagaatg

SEQ ID NO: 1730977 - DNA, 15 bp, Homo sapiens
aggaatacagaatga

SEQ ID NO: 1730978 - DNA, 15 bp, Homo sapiens
ggaatacagaatgag

SEQ ID NO: 1730979 - DNA, 15 bp, Homo sapiens
gaatacagaatgaga

SEQ ID NO: 1730980 - DNA, 15 bp, Homo sapiens
aatacagaatgagaa

SEQ ID NO: 1730981 - DNA, 15 bp, Homo sapiens
atacagaatgagaag

SEQ ID NO: 1730982 - DNA, 15 bp, Homo sapiens
tacagaatgagaagc

SEQ ID NO: 1730983 - DNA, 15 bp, Homo sapiens
acagaatgagaagct

SEQ ID NO: 1730984 - DNA, 15 bp, Homo sapiens
cagaatgagaagctg

SEQ ID NO: 1730985 - DNA, 15 bp, Homo sapiens
agaatgagaagctga

SEQ ID NO: 1730986 - DNA, 15 bp, Homo sapiens
gaatgagaagctgaa

SEQ ID NO: 1730987 - DNA, 15 bp, Homo sapiens
aatgagaagctgaag

SEQ ID NO: 1730988 - DNA, 15 bp, Homo sapiens
atgagaagctgaagt

SEQ ID NO: 1730989 - DNA, 15 bp, Homo sapiens
tgagaagctgaagtc

SEQ ID NO: 1730990 - DNA, 15 bp, Homo sapiens
gagaagctgaagtca

SEQ ID NO: 1730991 - DNA, 15 bp, Homo sapiens
agaagctgaagtcac

SEQ ID NO: 1730992 - DNA, 15 bp, Homo sapiens
gaagctgaagtcacg

SEQ ID NO: 1730993 - DNA, 15 bp, Homo sapiens
aagctgaagtcacgt

SEQ ID NO: 1730994 - DNA, 15 bp, Homo sapiens
agctgaagtcacgtg

SEQ ID NO: 1730995 - DNA, 15 bp, Homo sapiens
gctgaagtcacgtgg

SEQ ID NO: 1730996 - DNA, 15 bp, Homo sapiens
ctgaagtcacgtggc

SEQ ID NO: 1730997 - DNA, 15 bp, Homo sapiens
tgaagtcacgtggcc

SEQ ID NO: 1730998 - DNA, 15 bp, Homo sapiens
gaagtcacgtggcca

SEQ ID NO: 1730999 - DNA, 15 bp, Homo sapiens
aagtcacgtggccag

SEQ ID NO: 1731000 - DNA, 15 bp, Homo sapiens
agtcacgtggccaga

SEQ ID NO: 1731001 - DNA, 15 bp, Homo sapiens
gtcacgtggccagag

SEQ ID NO: 1731002 - DNA, 15 bp, Homo sapiens
tcacgtggccagagc

SEQ ID NO: 1731003 - DNA, 15 bp, Homo sapiens
cacgtggccagagct

SEQ ID NO: 1731004 - DNA, 15 bp, Homo sapiens
acgtggccagagctg

SEQ ID NO: 1731005 - DNA, 15 bp, Homo sapiens
cgtggccagagctgg

SEQ ID NO: 1731006 - DNA, 15 bp, Homo sapiens
gtggccagagctgga

SEQ ID NO: 1731007 - DNA, 15 bp, Homo sapiens
tggccagagctggaa

SEQ ID NO: 1731008 - DNA, 15 bp, Homo sapiens
ggccagagctggaag

SEQ ID NO: 1731009 - DNA, 15 bp, Homo sapiens
gccagagctggaagc

SEQ ID NO: 1731010 - DNA, 15 bp, Homo sapiens
ccagagctggaagcc

SEQ ID NO: 1731011 - DNA, 15 bp, Homo sapiens
cagagctggaagcct

SEQ ID NO: 1731012 - DNA, 15 bp, Homo sapiens
agagctggaagccta

SEQ ID NO: 1731013 - DNA, 15 bp, Homo sapiens
gagctggaagcctaa

SEQ ID NO: 1731014 - DNA, 15 bp, Homo sapiens
agctggaagcctaat

SEQ ID NO: 1731015 - DNA, 15 bp, Homo sapiens
gctggaagcctaatt

SEQ ID NO: 1731016 - DNA, 15 bp, Homo sapiens
ctggaagcctaattc

SEQ ID NO: 1731017 - DNA, 15 bp, Homo sapiens
tggaagcctaattcc

SEQ ID NO: 1731018 - DNA, 15 bp, Homo sapiens
ggaagcctaattcca

SEQ ID NO: 1731019 - DNA, 15 bp, Homo sapiens
gaagcctaattccat

SEQ ID NO: 1731020 - DNA, 15 bp, Homo sapiens
aagcctaattccatt

SEQ ID NO: 1731021 - DNA, 15 bp, Homo sapiens
agcctaattccattg

SEQ ID NO: 1731022 - DNA, 15 bp, Homo sapiens
gcctaattccattgt

SEQ ID NO: 1731023 - DNA, 15 bp, Homo sapiens
cctaattccattgtt

SEQ ID NO: 1731024 - DNA, 15 bp, Homo sapiens
ctaattccattgttt

SEQ ID NO: 1731025 - DNA, 15 bp, Homo sapiens
taattccattgttta

SEQ ID NO: 1731026 - DNA, 15 bp, Homo sapiens
aattccattgtttac

SEQ ID NO: 1731027 - DNA, 15 bp, Homo sapiens
attccattgtttact

SEQ ID NO: 1731028 - DNA, 15 bp, Homo sapiens
ttccattgtttacta

SEQ ID NO: 1731029 - DNA, 15 bp, Homo sapiens
tccattgtttactag

SEQ ID NO: 1731030 - DNA, 15 bp, Homo sapiens
ccattgtttactagc

SEQ ID NO: 1731031 - DNA, 15 bp, Homo sapiens
cattgtttactagct

SEQ ID NO: 1731032 - DNA, 15 bp, Homo sapiens
attgtttactagctg

SEQ ID NO: 1731033 - DNA, 15 bp, Homo sapiens
ttgtttactagctgt

SEQ ID NO: 1731034 - DNA, 15 bp, Homo sapiens
tgtttactagctgtg

SEQ ID NO: 1731035 - DNA, 15 bp, Homo sapiens
gtttactagctgtgt

SEQ ID NO: 1731036 - DNA, 15 bp, Homo sapiens
tttactagctgtgta

SEQ ID NO: 1731037 - DNA, 15 bp, Homo sapiens
ttactagctgtgtaa

SEQ ID NO: 1731038 - DNA, 15 bp, Homo sapiens
tactagctgtgtaaa

SEQ ID NO: 1731039 - DNA, 15 bp, Homo sapiens
actagctgtgtaaaa

SEQ ID NO: 1731040 - DNA, 15 bp, Homo sapiens
ctagctgtgtaaaat

SEQ ID NO: 1731041 - DNA, 15 bp, Homo sapiens
tagctgtgtaaaatt

SEQ ID NO: 1731042 - DNA, 15 bp, Homo sapiens
agctgtgtaaaattc

SEQ ID NO: 1731043 - DNA, 15 bp, Homo sapiens
gctgtgtaaaattca

SEQ ID NO: 1731044 - DNA, 15 bp, Homo sapiens
ctgtgtaaaattcac

SEQ ID NO: 1731045 - DNA, 15 bp, Homo sapiens
tgtgtaaaattcact

SEQ ID NO: 1731046 - DNA, 15 bp, Homo sapiens
gtgtaaaattcactt

SEQ ID NO: 1731047 - DNA, 15 bp, Homo sapiens
tgtaaaattcacttt

SEQ ID NO: 1731048 - DNA, 15 bp, Homo sapiens
gtaaaattcactttg

SEQ ID NO: 1731049 - DNA, 15 bp, Homo sapiens
taaaattcactttga

SEQ ID NO: 1731050 - DNA, 15 bp, Homo sapiens
aaaattcactttgat

SEQ ID NO: 1731051 - DNA, 15 bp, Homo sapiens
aaattcactttgata

SEQ ID NO: 1731052 - DNA, 15 bp, Homo sapiens
aattcactttgatat

SEQ ID NO: 1731053 - DNA, 15 bp, Homo sapiens
attcactttgatatc

SEQ ID NO: 1731054 - DNA, 15 bp, Homo sapiens
ttcactttgatatcc

SEQ ID NO: 1731055 - DNA, 15 bp, Homo sapiens
tcactttgatatccc

SEQ ID NO: 1731056 - DNA, 15 bp, Homo sapiens
cactttgatatcccc

SEQ ID NO: 1731057 - DNA, 15 bp, Homo sapiens
actttgatatcccca

SEQ ID NO: 1731058 - DNA, 15 bp, Homo sapiens
ctttgatatccccac

SEQ ID NO: 1731059 - DNA, 15 bp, Homo sapiens
tttgatatccccacc

SEQ ID NO: 1731060 - DNA, 15 bp, Homo sapiens
ttgatatccccacct

SEQ ID NO: 1731061 - DNA, 15 bp, Homo sapiens
tgatatccccacctc

SEQ ID NO: 1731062 - DNA, 15 bp, Homo sapiens
gatatccccacctct

SEQ ID NO: 1731063 - DNA, 15 bp, Homo sapiens
atatccccacctcta

SEQ ID NO: 1731064 - DNA, 15 bp, Homo sapiens
tatccccacctctaa

SEQ ID NO: 1731065 - DNA, 15 bp, Homo sapiens
atccccacctctaaa

SEQ ID NO: 1731066 - DNA, 15 bp, Homo sapiens
tccccacctctaaac

SEQ ID NO: 1731067 - DNA, 15 bp, Homo sapiens
ccccacctctaaact

SEQ ID NO: 1731068 - DNA, 15 bp, Homo sapiens
cccacctctaaactg

SEQ ID NO: 1731069 - DNA, 15 bp, Homo sapiens
ccacctctaaactga

SEQ ID NO: 1731070 - DNA, 15 bp, Homo sapiens
cacctctaaactgag

SEQ ID NO: 1731071 - DNA, 15 bp, Homo sapiens
acctctaaactgaga

SEQ ID NO: 1731072 - DNA, 15 bp, Homo sapiens
cctctaaactgagaa

SEQ ID NO: 1731073 - DNA, 15 bp, Homo sapiens
ctctaaactgagaat

SEQ ID NO: 1731074 - DNA, 15 bp, Homo sapiens
tctaaactgagaata

SEQ ID NO: 1731075 - DNA, 15 bp, Homo sapiens
ctaaactgagaataa

SEQ ID NO: 1731076 - DNA, 15 bp, Homo sapiens
taaactgagaataat

SEQ ID NO: 1731077 - DNA, 15 bp, Homo sapiens
aaactgagaataata

SEQ ID NO: 1731078 - DNA, 15 bp, Homo sapiens
aactgagaataatag

SEQ ID NO: 1731079 - DNA, 15 bp, Homo sapiens
actgagaataatagt

SEQ ID NO: 1731080 - DNA, 15 bp, Homo sapiens
ctgagaataatagtt

SEQ ID NO: 1731081 - DNA, 15 bp, Homo sapiens
tgagaataatagttc

SEQ ID NO: 1731082 - DNA, 15 bp, Homo sapiens
gagaataatagttcc

SEQ ID NO: 1731083 - DNA, 15 bp, Homo sapiens
agaataatagttcct

SEQ ID NO: 1731084 - DNA, 15 bp, Homo sapiens
gaataatagttcctc

SEQ ID NO: 1731085 - DNA, 15 bp, Homo sapiens
aataatagttcctca

SEQ ID NO: 1731086 - DNA, 15 bp, Homo sapiens
ataatagttcctcac

SEQ ID NO: 1731087 - DNA, 15 bp, Homo sapiens
taatagttcctcact

SEQ ID NO: 1731088 - DNA, 15 bp, Homo sapiens
aatagttcctcactt

SEQ ID NO: 1731089 - DNA, 15 bp, Homo sapiens
atagttcctcacttg

SEQ ID NO: 1731090 - DNA, 15 bp, Homo sapiens
tagttcctcacttgt

SEQ ID NO: 1731091 - DNA, 15 bp, Homo sapiens
agttcctcacttgtt

SEQ ID NO: 1731092 - DNA, 15 bp, Homo sapiens
gttcctcacttgttt

SEQ ID NO: 1731093 - DNA, 15 bp, Homo sapiens
ttcctcacttgttta

SEQ ID NO: 1731094 - DNA, 15 bp, Homo sapiens
tcctcacttgtttac

SEQ ID NO: 1731095 - DNA, 15 bp, Homo sapiens
cctcacttgtttacc

SEQ ID NO: 1731096 - DNA, 15 bp, Homo sapiens
ctcacttgtttacct

SEQ ID NO: 1731097 - DNA, 15 bp, Homo sapiens
tcacttgtttacctt

SEQ ID NO: 1731098 - DNA, 15 bp, Homo sapiens
cacttgtttaccttg

SEQ ID NO: 1731099 - DNA, 15 bp, Homo sapiens
acttgtttaccttga

SEQ ID NO: 1731100 - DNA, 15 bp, Homo sapiens
cttgtttaccttgaa

SEQ ID NO: 1731101 - DNA, 15 bp, Homo sapiens
ttgtttaccttgaac

SEQ ID NO: 1731102 - DNA, 15 bp, Homo sapiens
tgtttaccttgaaca

SEQ ID NO: 1731103 - DNA, 15 bp, Homo sapiens
gtttaccttgaacat

SEQ ID NO: 1731104 - DNA, 15 bp, Homo sapiens
tttaccttgaacatg

SEQ ID NO: 1731105 - DNA, 15 bp, Homo sapiens
ttaccttgaacatgc

SEQ ID NO: 1731106 - DNA, 15 bp, Homo sapiens
taccttgaacatgct

SEQ ID NO: 1731107 - DNA, 15 bp, Homo sapiens
accttgaacatgctc

SEQ ID NO: 1731108 - DNA, 15 bp, Homo sapiens
ccttgaacatgctcc

SEQ ID NO: 1731109 - DNA, 15 bp, Homo sapiens
cttgaacatgctcct

SEQ ID NO: 1731110 - DNA, 15 bp, Homo sapiens
ttgaacatgctcctt

SEQ ID NO: 1731111 - DNA, 15 bp, Homo sapiens
tgaacatgctccttg

SEQ ID NO: 1731112 - DNA, 15 bp, Homo sapiens
gaacatgctccttgt

SEQ ID NO: 1731113 - DNA, 15 bp, Homo sapiens
aacatgctccttgtt

SEQ ID NO: 1731114 - DNA, 15 bp, Homo sapiens
acatgctccttgttt

SEQ ID NO: 1731115 - DNA, 15 bp, Homo sapiens
catgctccttgtttt

SEQ ID NO: 1731116 - DNA, 15 bp, Homo sapiens
atgctccttgttttg

SEQ ID NO: 1731117 - DNA, 15 bp, Homo sapiens
tgctccttgttttga

SEQ ID NO: 1731118 - DNA, 15 bp, Homo sapiens
gctccttgttttgag

SEQ ID NO: 1731119 - DNA, 15 bp, Homo sapiens
ctccttgttttgaga

SEQ ID NO: 1731120 - DNA, 15 bp, Homo sapiens
tccttgttttgagaa

SEQ ID NO: 1731121 - DNA, 15 bp, Homo sapiens
ccttgttttgagaat

SEQ ID NO: 1731122 - DNA, 15 bp, Homo sapiens
cttgttttgagaatc

SEQ ID NO: 1731123 - DNA, 15 bp, Homo sapiens
ttgttttgagaatca

SEQ ID NO: 1731124 - DNA, 15 bp, Homo sapiens
tgttttgagaatcaa

SEQ ID NO: 1731125 - DNA, 15 bp, Homo sapiens
gttttgagaatcaaa

SEQ ID NO: 1731126 - DNA, 15 bp, Homo sapiens
ttttgagaatcaaat

SEQ ID NO: 1731127 - DNA, 15 bp, Homo sapiens
tttgagaatcaaatg

SEQ ID NO: 1731128 - DNA, 15 bp, Homo sapiens
ttgagaatcaaatga

SEQ ID NO: 1731129 - DNA, 15 bp, Homo sapiens
tgagaatcaaatgag

SEQ ID NO: 1731130 - DNA, 15 bp, Homo sapiens
gagaatcaaatgaga

SEQ ID NO: 1731131 - DNA, 15 bp, Homo sapiens
agaatcaaatgagat

SEQ ID NO: 1731132 - DNA, 15 bp, Homo sapiens
gaatcaaatgagatg

SEQ ID NO: 1731133 - DNA, 15 bp, Homo sapiens
aatcaaatgagatga

SEQ ID NO: 1731134 - DNA, 15 bp, Homo sapiens
atcaaatgagatgat

SEQ ID NO: 1731135 - DNA, 15 bp, Homo sapiens
tcaaatgagatgata

SEQ ID NO: 1731136 - DNA, 15 bp, Homo sapiens
caaatgagatgatat

SEQ ID NO: 1731137 - DNA, 15 bp, Homo sapiens
aaatgagatgatata

SEQ ID NO: 1731138 - DNA, 15 bp, Homo sapiens
aatgagatgatatat

SEQ ID NO: 1731139 - DNA, 15 bp, Homo sapiens
atgagatgatatata

SEQ ID NO: 1731140 - DNA, 15 bp, Homo sapiens
tgagatgatatatat

SEQ ID NO: 1731141 - DNA, 15 bp, Homo sapiens
gagatgatatatatg

SEQ ID NO: 1731142 - DNA, 15 bp, Homo sapiens
agatgatatatatgt

SEQ ID NO: 1731143 - DNA, 15 bp, Homo sapiens
gatgatatatatgtg

SEQ ID NO: 1731144 - DNA, 15 bp, Homo sapiens
atgatatatatgtgt

SEQ ID NO: 1731145 - DNA, 15 bp, Homo sapiens
tgatatatatgtgtg

SEQ ID NO: 1731146 - DNA, 15 bp, Homo sapiens
gatatatatgtgtga

SEQ ID NO: 1731147 - DNA, 15 bp, Homo sapiens
atatatatgtgtgat

SEQ ID NO: 1731148 - DNA, 15 bp, Homo sapiens
tatatatgtgtgata

SEQ ID NO: 1731149 - DNA, 15 bp, Homo sapiens
atatatgtgtgatag

SEQ ID NO: 1731150 - DNA, 15 bp, Homo sapiens
tatatgtgtgatagg

SEQ ID NO: 1731151 - DNA, 15 bp, Homo sapiens
atatgtgtgataggc

SEQ ID NO: 1731152 - DNA, 15 bp, Homo sapiens
tatgtgtgataggct

SEQ ID NO: 1731153 - DNA, 15 bp, Homo sapiens
atgtgtgataggctc

SEQ ID NO: 1731154 - DNA, 15 bp, Homo sapiens
tgtgtgataggctct

SEQ ID NO: 1731155 - DNA, 15 bp, Homo sapiens
gtgtgataggctctg

SEQ ID NO: 1731156 - DNA, 15 bp, Homo sapiens
tgtgataggctctgt

SEQ ID NO: 1731157 - DNA, 15 bp, Homo sapiens
gtgataggctctgta

SEQ ID NO: 1731158 - DNA, 15 bp, Homo sapiens
tgataggctctgtaa

SEQ ID NO: 1731159 - DNA, 15 bp, Homo sapiens
gataggctctgtaaa

SEQ ID NO: 1731160 - DNA, 15 bp, Homo sapiens
ataggctctgtaaat

SEQ ID NO: 1731161 - DNA, 15 bp, Homo sapiens
taggctctgtaaatt

SEQ ID NO: 1731162 - DNA, 15 bp, Homo sapiens
aggctctgtaaattc

SEQ ID NO: 1731163 - DNA, 15 bp, Homo sapiens
ggctctgtaaattca

SEQ ID NO: 1731164 - DNA, 15 bp, Homo sapiens
gctctgtaaattcat

SEQ ID NO: 1731165 - DNA, 15 bp, Homo sapiens
ctctgtaaattcata

SEQ ID NO: 1731166 - DNA, 15 bp, Homo sapiens
tctgtaaattcataa

SEQ ID NO: 1731167 - DNA, 15 bp, Homo sapiens
ctgtaaattcataaa

SEQ ID NO: 1731168 - DNA, 15 bp, Homo sapiens
tgtaaattcataaaa

SEQ ID NO: 1731169 - DNA, 15 bp, Homo sapiens
gtaaattcataaaat

SEQ ID NO: 1731170 - DNA, 15 bp, Homo sapiens
taaattcataaaata

SEQ ID NO: 1731171 - DNA, 15 bp, Homo sapiens
aaattcataaaatac

SEQ ID NO: 1731172 - DNA, 15 bp, Homo sapiens
aattcataaaatact

SEQ ID NO: 1731173 - DNA, 15 bp, Homo sapiens
attcataaaatacta

SEQ ID NO: 1731174 - DNA, 15 bp, Homo sapiens
ttcataaaatactat

SEQ ID NO: 1731175 - DNA, 15 bp, Homo sapiens
tcataaaatactata

SEQ ID NO: 1731176 - DNA, 15 bp, Homo sapiens
cataaaatactatat

SEQ ID NO: 1731177 - DNA, 15 bp, Homo sapiens
ataaaatactatata

SEQ ID NO: 1731178 - DNA, 15 bp, Homo sapiens
taaaatactatataa

SEQ ID NO: 1731179 - DNA, 15 bp, Homo sapiens
aaaatactatataat

SEQ ID NO: 1731180 - DNA, 15 bp, Homo sapiens
aaatactatataatc

SEQ ID NO: 1731181 - DNA, 15 bp, Homo sapiens
aatactatataatct

SEQ ID NO: 1731182 - DNA, 15 bp, Homo sapiens
atactatataatctg

SEQ ID NO: 1731183 - DNA, 15 bp, Homo sapiens
tactatataatctga

SEQ ID NO: 1731184 - DNA, 15 bp, Homo sapiens
actatataatctgag

SEQ ID NO: 1731185 - DNA, 15 bp, Homo sapiens
ctatataatctgagt

SEQ ID NO: 1731186 - DNA, 15 bp, Homo sapiens
tatataatctgagta

SEQ ID NO: 1731187 - DNA, 15 bp, Homo sapiens
atataatctgagtaa

SEQ ID NO: 1731188 - DNA, 15 bp, Homo sapiens
tataatctgagtaac

SEQ ID NO: 1731189 - DNA, 15 bp, Homo sapiens
ataatctgagtaact

SEQ ID NO: 1731190 - DNA, 15 bp, Homo sapiens
taatctgagtaactt

SEQ ID NO: 1731191 - DNA, 15 bp, Homo sapiens
aatctgagtaacttt

SEQ ID NO: 1731192 - DNA, 15 bp, Homo sapiens
atctgagtaactttt

SEQ ID NO: 1731193 - DNA, 15 bp, Homo sapiens
tctgagtaacttttg

SEQ ID NO: 1731194 - DNA, 15 bp, Homo sapiens
ctgagtaacttttgc

SEQ ID NO: 1731195 - DNA, 15 bp, Homo sapiens
tgagtaacttttgca

SEQ ID NO: 1731196 - DNA, 15 bp, Homo sapiens
gagtaacttttgcat

SEQ ID NO: 1731197 - DNA, 15 bp, Homo sapiens
agtaacttttgcatt

SEQ ID NO: 1731198 - DNA, 15 bp, Homo sapiens
gtaacttttgcatta

SEQ ID NO: 1731199 - DNA, 15 bp, Homo sapiens
taacttttgcattag

SEQ ID NO: 1731200 - DNA, 15 bp, Homo sapiens
aacttttgcattagc

SEQ ID NO: 1731201 - DNA, 15 bp, Homo sapiens
acttttgcattagcc

SEQ ID NO: 1731202 - DNA, 15 bp, Homo sapiens
cttttgcattagcct

SEQ ID NO: 1731203 - DNA, 15 bp, Homo sapiens
ttttgcattagcctt

SEQ ID NO: 1731204 - DNA, 15 bp, Homo sapiens
tttgcattagccttg

SEQ ID NO: 1731205 - DNA, 15 bp, Homo sapiens
ttgcattagccttgt

SEQ ID NO: 1731206 - DNA, 15 bp, Homo sapiens
tgcattagccttgtt

SEQ ID NO: 1731207 - DNA, 15 bp, Homo sapiens
gcattagccttgttt

SEQ ID NO: 1731208 - DNA, 15 bp, Homo sapiens
cattagccttgttta

SEQ ID NO: 1731209 - DNA, 15 bp, Homo sapiens
attagccttgtttaa

SEQ ID NO: 1731210 - DNA, 15 bp, Homo sapiens
ttagccttgtttaaa

SEQ ID NO: 1731211 - DNA, 15 bp, Homo sapiens
tagccttgtttaaat

SEQ ID NO: 1731212 - DNA, 15 bp, Homo sapiens
agccttgtttaaatc

SEQ ID NO: 1731213 - DNA, 15 bp, Homo sapiens
gccttgtttaaatcc

SEQ ID NO: 1731214 - DNA, 15 bp, Homo sapiens
ccttgtttaaatcct

SEQ ID NO: 1731215 - DNA, 15 bp, Homo sapiens
cttgtttaaatcctt

SEQ ID NO: 1731216 - DNA, 15 bp, Homo sapiens
ttgtttaaatccttc

SEQ ID NO: 1731217 - DNA, 15 bp, Homo sapiens
tgtttaaatccttct

SEQ ID NO: 1731218 - DNA, 15 bp, Homo sapiens
gtttaaatccttctt

SEQ ID NO: 1731219 - DNA, 15 bp, Homo sapiens
tttaaatccttcttt

SEQ ID NO: 1731220 - DNA, 15 bp, Homo sapiens
ttaaatccttcttta

SEQ ID NO: 1731221 - DNA, 15 bp, Homo sapiens
taaatccttctttat

SEQ ID NO: 1731222 - DNA, 15 bp, Homo sapiens
aaatccttctttata

SEQ ID NO: 1731223 - DNA, 15 bp, Homo sapiens
aatccttctttatat

SEQ ID NO: 1731224 - DNA, 15 bp, Homo sapiens
atccttctttatatg

SEQ ID NO: 1731225 - DNA, 15 bp, Homo sapiens
tccttctttatatgc

SEQ ID NO: 1731226 - DNA, 15 bp, Homo sapiens
ccttctttatatgcc

SEQ ID NO: 1731227 - DNA, 15 bp, Homo sapiens
cttctttatatgcct

SEQ ID NO: 1731228 - DNA, 15 bp, Homo sapiens
ttctttatatgccta

SEQ ID NO: 1731229 - DNA, 15 bp, Homo sapiens
tctttatatgcctaa

SEQ ID NO: 1731230 - DNA, 15 bp, Homo sapiens
ctttatatgcctaaa

SEQ ID NO: 1731231 - DNA, 15 bp, Homo sapiens
tttatatgcctaaaa

SEQ ID NO: 1731232 - DNA, 15 bp, Homo sapiens
ttatatgcctaaaac

SEQ ID NO: 1731233 - DNA, 15 bp, Homo sapiens
tatatgcctaaaact

SEQ ID NO: 1731234 - DNA, 15 bp, Homo sapiens
atatgcctaaaactt

SEQ ID NO: 1731235 - DNA, 15 bp, Homo sapiens
tatgcctaaaacttt

SEQ ID NO: 1731236 - DNA, 15 bp, Homo sapiens
atgcctaaaactttt

SEQ ID NO: 1731237 - DNA, 15 bp, Homo sapiens
tgcctaaaacttttt

SEQ ID NO: 1731238 - DNA, 15 bp, Homo sapiens
gcctaaaacttttta

SEQ ID NO: 1731239 - DNA, 15 bp, Homo sapiens
cctaaaactttttat

SEQ ID NO: 1731240 - DNA, 15 bp, Homo sapiens
ctaaaactttttatc

SEQ ID NO: 1731241 - DNA, 15 bp, Homo sapiens
taaaactttttatcc

SEQ ID NO: 1731242 - DNA, 15 bp, Homo sapiens
aaaactttttatcct

SEQ ID NO: 1731243 - DNA, 15 bp, Homo sapiens
aaactttttatccta

SEQ ID NO: 1731244 - DNA, 15 bp, Homo sapiens
aactttttatcctaa

SEQ ID NO: 1731245 - DNA, 15 bp, Homo sapiens
actttttatcctaaa

SEQ ID NO: 1731246 - DNA, 15 bp, Homo sapiens
ctttttatcctaaaa

SEQ ID NO: 1731247 - DNA, 15 bp, Homo sapiens
tttttatcctaaaac

SEQ ID NO: 1731248 - DNA, 15 bp, Homo sapiens
ttttatcctaaaacc

SEQ ID NO: 1731249 - DNA, 15 bp, Homo sapiens
tttatcctaaaacct

SEQ ID NO: 1731250 - DNA, 15 bp, Homo sapiens
ttatcctaaaacctt

SEQ ID NO: 1731251 - DNA, 15 bp, Homo sapiens
tatcctaaaacctta

SEQ ID NO: 1731252 - DNA, 15 bp, Homo sapiens
atcctaaaaccttag

SEQ ID NO: 1731253 - DNA, 15 bp, Homo sapiens
tcctaaaaccttagc

SEQ ID NO: 1731254 - DNA, 15 bp, Homo sapiens
cctaaaaccttagcc

SEQ ID NO: 1731255 - DNA, 15 bp, Homo sapiens
ctaaaaccttagccc

SEQ ID NO: 1731256 - DNA, 15 bp, Homo sapiens
taaaaccttagccca

SEQ ID NO: 1731257 - DNA, 15 bp, Homo sapiens
aaaaccttagcccag

SEQ ID NO: 1731258 - DNA, 15 bp, Homo sapiens
aaaccttagcccagg

SEQ ID NO: 1731259 - DNA, 15 bp, Homo sapiens
aaccttagcccaggt

SEQ ID NO: 1731260 - DNA, 15 bp, Homo sapiens
accttagcccaggtc

SEQ ID NO: 1731261 - DNA, 15 bp, Homo sapiens
ccttagcccaggtcc

SEQ ID NO: 1731262 - DNA, 15 bp, Homo sapiens
cttagcccaggtcct

SEQ ID NO: 1731263 - DNA, 15 bp, Homo sapiens
ttagcccaggtcctt

SEQ ID NO: 1731264 - DNA, 15 bp, Homo sapiens
tagcccaggtccttg

SEQ ID NO: 1731265 - DNA, 15 bp, Homo sapiens
agcccaggtccttgc

SEQ ID NO: 1731266 - DNA, 15 bp, Homo sapiens
gcccaggtccttgca

SEQ ID NO: 1731267 - DNA, 15 bp, Homo sapiens
ccaggtccttgcaca

SEQ ID NO: 1731268 - DNA, 15 bp, Homo sapiens
caggtccttgcacat

SEQ ID NO: 1731269 - DNA, 15 bp, Homo sapiens
aggtccttgcacata

SEQ ID NO: 1731270 - DNA, 15 bp, Homo sapiens
ggtccttgcacatag

SEQ ID NO: 1731271 - DNA, 15 bp, Homo sapiens
gtccttgcacatagt

SEQ ID NO: 1731272 - DNA, 15 bp, Homo sapiens
tccttgcacatagta

SEQ ID NO: 1731273 - DNA, 15 bp, Homo sapiens
ccttgcacatagtaa

SEQ ID NO: 1731274 - DNA, 15 bp, Homo sapiens
cttgcacatagtaag

SEQ ID NO: 1731275 - DNA, 15 bp, Homo sapiens
ttgcacatagtaagt

SEQ ID NO: 1731276 - DNA, 15 bp, Homo sapiens
tgcacatagtaagtg

SEQ ID NO: 1731277 - DNA, 15 bp, Homo sapiens
gcacatagtaagtgt

SEQ ID NO: 1731278 - DNA, 15 bp, Homo sapiens
cacatagtaagtgtg

SEQ ID NO: 1731279 - DNA, 15 bp, Homo sapiens
acatagtaagtgtgg

SEQ ID NO: 1731280 - DNA, 15 bp, Homo sapiens
catagtaagtgtggg

SEQ ID NO: 1731281 - DNA, 15 bp, Homo sapiens
atagtaagtgtgggc

SEQ ID NO: 1731282 - DNA, 15 bp, Homo sapiens
tagtaagtgtgggca

SEQ ID NO: 1731283 - DNA, 15 bp, Homo sapiens
agtaagtgtgggcag

SEQ ID NO: 1731284 - DNA, 15 bp, Homo sapiens
gtaagtgtgggcagc

SEQ ID NO: 1731285 - DNA, 15 bp, Homo sapiens
taagtgtgggcagca

SEQ ID NO: 1731286 - DNA, 15 bp, Homo sapiens
aagtgtgggcagcaa

SEQ ID NO: 1731287 - DNA, 15 bp, Homo sapiens
agtgtgggcagcaat

SEQ ID NO: 1731288 - DNA, 15 bp, Homo sapiens
gtgtgggcagcaatt

SEQ ID NO: 1731289 - DNA, 15 bp, Homo sapiens
tgtgggcagcaatta

SEQ ID NO: 1731290 - DNA, 15 bp, Homo sapiens
gtgggcagcaattat

SEQ ID NO: 1731291 - DNA, 15 bp, Homo sapiens
tgggcagcaattatt

SEQ ID NO: 1731292 - DNA, 15 bp, Homo sapiens
gggcagcaattattg

SEQ ID NO: 1731293 - DNA, 15 bp, Homo sapiens
ggcagcaattattgg

SEQ ID NO: 1731294 - DNA, 15 bp, Homo sapiens
gcagcaattattgga

SEQ ID NO: 1731295 - DNA, 15 bp, Homo sapiens
cagcaattattggat

SEQ ID NO: 1731296 - DNA, 15 bp, Homo sapiens
agcaattattggata

SEQ ID NO: 1731297 - DNA, 15 bp, Homo sapiens
gcaattattggatat

SEQ ID NO: 1731298 - DNA, 15 bp, Homo sapiens
caattattggatatt

SEQ ID NO: 1731299 - DNA, 15 bp, Homo sapiens
aattattggatattc

SEQ ID NO: 1731300 - DNA, 15 bp, Homo sapiens
attattggatattcc

SEQ ID NO: 1731301 - DNA, 15 bp, Homo sapiens
ttattggatattcca

SEQ ID NO: 1731302 - DNA, 15 bp, Homo sapiens
tattggatattccag

SEQ ID NO: 1731303 - DNA, 15 bp, Homo sapiens
attggatattccagc

SEQ ID NO: 1731304 - DNA, 15 bp, Homo sapiens
ttggatattccagcg

SEQ ID NO: 1731305 - DNA, 15 bp, Homo sapiens
tggatattccagcga

SEQ ID NO: 1731306 - DNA, 15 bp, Homo sapiens
ggatattccagcgaa

SEQ ID NO: 1731307 - DNA, 15 bp, Homo sapiens
gatattccagcgaat

SEQ ID NO: 1731308 - DNA, 15 bp, Homo sapiens
atattccagcgaatg

SEQ ID NO: 1731309 - DNA, 15 bp, Homo sapiens
tattccagcgaatga

SEQ ID NO: 1731310 - DNA, 15 bp, Homo sapiens
attccagcgaatgaa

SEQ ID NO: 1731311 - DNA, 15 bp, Homo sapiens
ttccagcgaatgaaa

SEQ ID NO: 1731312 - DNA, 15 bp, Homo sapiens
tccagcgaatgaaat

SEQ ID NO: 1731313 - DNA, 15 bp, Homo sapiens
ccagcgaatgaaatg

SEQ ID NO: 1731314 - DNA, 15 bp, Homo sapiens
cagcgaatgaaatga

SEQ ID NO: 1731315 - DNA, 15 bp, Homo sapiens
agcgaatgaaatgaa

SEQ ID NO: 1731316 - DNA, 15 bp, Homo sapiens
gcgaatgaaatgaaa

SEQ ID NO: 1731317 - DNA, 15 bp, Homo sapiens
cgaatgaaatgaaaa

SEQ ID NO: 1731318 - DNA, 15 bp, Homo sapiens
gaatgaaatgaaaac

SEQ ID NO: 1731319 - DNA, 15 bp, Homo sapiens
aatgaaatgaaaaca

SEQ ID NO: 1731320 - DNA, 15 bp, Homo sapiens
atgaaatgaaaacat

SEQ ID NO: 1731321 - DNA, 15 bp, Homo sapiens
tgaaatgaaaacata

SEQ ID NO: 1731322 - DNA, 15 bp, Homo sapiens
gaaatgaaaacatat

SEQ ID NO: 1731323 - DNA, 15 bp, Homo sapiens
aaatgaaaacatatt

SEQ ID NO: 1731324 - DNA, 15 bp, Homo sapiens
aatgaaaacatatta

SEQ ID NO: 1731325 - DNA, 15 bp, Homo sapiens
atgaaaacatattaa

SEQ ID NO: 1731326 - DNA, 15 bp, Homo sapiens
tgaaaacatattaat

SEQ ID NO: 1731327 - DNA, 15 bp, Homo sapiens
gaaaacatattaata

SEQ ID NO: 1731328 - DNA, 15 bp, Homo sapiens
aaaacatattaatat

SEQ ID NO: 1731329 - DNA, 15 bp, Homo sapiens
aaacatattaatatt

SEQ ID NO: 1731330 - DNA, 15 bp, Homo sapiens
aacatattaatattt

SEQ ID NO: 1731331 - DNA, 15 bp, Homo sapiens
acatattaatatttt

SEQ ID NO: 1731332 - DNA, 15 bp, Homo sapiens
catattaatattttt

SEQ ID NO: 1731333 - DNA, 15 bp, Homo sapiens
atattaatattttta

SEQ ID NO: 1731334 - DNA, 15 bp, Homo sapiens
tattaatatttttac

SEQ ID NO: 1731335 - DNA, 15 bp, Homo sapiens
attaatatttttact

SEQ ID NO: 1731336 - DNA, 15 bp, Homo sapiens
ttaatatttttactc

SEQ ID NO: 1731337 - DNA, 15 bp, Homo sapiens
taatatttttactct

SEQ ID NO: 1731338 - DNA, 15 bp, Homo sapiens
aatatttttactctc

SEQ ID NO: 1731339 - DNA, 15 bp, Homo sapiens
atatttttactctca

SEQ ID NO: 1731340 - DNA, 15 bp, Homo sapiens
tatttttactctcac

SEQ ID NO: 1731341 - DNA, 15 bp, Homo sapiens
atttttactctcacg

SEQ ID NO: 1731342 - DNA, 15 bp, Homo sapiens
tttttactctcacgg

SEQ ID NO: 1731343 - DNA, 15 bp, Homo sapiens
ttttactctcacggc

SEQ ID NO: 1731344 - DNA, 15 bp, Homo sapiens
tttactctcacggct

SEQ ID NO: 1731345 - DNA, 15 bp, Homo sapiens
ttactctcacggctc

SEQ ID NO: 1731346 - DNA, 15 bp, Homo sapiens
tactctcacggctct

SEQ ID NO: 1731347 - DNA, 15 bp, Homo sapiens
actctcacggctctt

SEQ ID NO: 1731348 - DNA, 15 bp, Homo sapiens
ctctcacggctctta

SEQ ID NO: 1731349 - DNA, 15 bp, Homo sapiens
tctcacggctcttat

SEQ ID NO: 1731350 - DNA, 15 bp, Homo sapiens
ctcacggctcttatg

SEQ ID NO: 1731351 - DNA, 15 bp, Homo sapiens
tcacggctcttatgt

SEQ ID NO: 1731352 - DNA, 15 bp, Homo sapiens
cacggctcttatgtg

SEQ ID NO: 1731353 - DNA, 15 bp, Homo sapiens
acggctcttatgtgc

SEQ ID NO: 1731354 - DNA, 15 bp, Homo sapiens
cggctcttatgtgct

SEQ ID NO: 1731355 - DNA, 15 bp, Homo sapiens
ggctcttatgtgcta

SEQ ID NO: 1731356 - DNA, 15 bp, Homo sapiens
gctcttatgtgctac

SEQ ID NO: 1731357 - DNA, 15 bp, Homo sapiens
ctcttatgtgctact

SEQ ID NO: 1731358 - DNA, 15 bp, Homo sapiens
tcttatgtgctacta

SEQ ID NO: 1731359 - DNA, 15 bp, Homo sapiens
cttatgtgctactaa

SEQ ID NO: 1731360 - DNA, 15 bp, Homo sapiens
ttatgtgctactaag

SEQ ID NO: 1731361 - DNA, 15 bp, Homo sapiens
tatgtgctactaaga

SEQ ID NO: 1731362 - DNA, 15 bp, Homo sapiens
atgtgctactaagat

SEQ ID NO: 1731363 - DNA, 15 bp, Homo sapiens
tgtgctactaagatg

SEQ ID NO: 1731364 - DNA, 15 bp, Homo sapiens
gtgctactaagatga

SEQ ID NO: 1731365 - DNA, 15 bp, Homo sapiens
tgctactaagatgac

SEQ ID NO: 1731366 - DNA, 15 bp, Homo sapiens
gctactaagatgaca

SEQ ID NO: 1731367 - DNA, 15 bp, Homo sapiens
ctactaagatgacaa

SEQ ID NO: 1731368 - DNA, 15 bp, Homo sapiens
tactaagatgacaag

SEQ ID NO: 1731369 - DNA, 15 bp, Homo sapiens
actaagatgacaaga

SEQ ID NO: 1731370 - DNA, 15 bp, Homo sapiens
ctaagatgacaagag

SEQ ID NO: 1731371 - DNA, 15 bp, Homo sapiens
taagatgacaagaga

SEQ ID NO: 1731372 - DNA, 15 bp, Homo sapiens
aagatgacaagagac

SEQ ID NO: 1731373 - DNA, 15 bp, Homo sapiens
agatgacaagagaca

SEQ ID NO: 1731374 - DNA, 15 bp, Homo sapiens
gatgacaagagacaa

SEQ ID NO: 1731375 - DNA, 15 bp, Homo sapiens
atgacaagagacaat

SEQ ID NO: 1731376 - DNA, 15 bp, Homo sapiens
tgacaagagacaata

SEQ ID NO: 1731377 - DNA, 15 bp, Homo sapiens
gacaagagacaataa

SEQ ID NO: 1731378 - DNA, 15 bp, Homo sapiens
acaagagacaataag

SEQ ID NO: 1731379 - DNA, 15 bp, Homo sapiens
caagagacaataagc

SEQ ID NO: 1731380 - DNA, 15 bp, Homo sapiens
aagagacaataagca

SEQ ID NO: 1731381 - DNA, 15 bp, Homo sapiens
agagacaataagcat

SEQ ID NO: 1731382 - DNA, 15 bp, Homo sapiens
gagacaataagcata

SEQ ID NO: 1731383 - DNA, 15 bp, Homo sapiens
agacaataagcataa

SEQ ID NO: 1731384 - DNA, 15 bp, Homo sapiens
gacaataagcataat

SEQ ID NO: 1731385 - DNA, 15 bp, Homo sapiens
acaataagcataata

SEQ ID NO: 1731386 - DNA, 15 bp, Homo sapiens
caataagcataataa

SEQ ID NO: 1731387 - DNA, 15 bp, Homo sapiens
aataagcataataaa

SEQ ID NO: 1731388 - DNA, 15 bp, Homo sapiens
ataagcataataaat

SEQ ID NO: 1731389 - DNA, 15 bp, Homo sapiens
taagcataataaatt

SEQ ID NO: 1731390 - DNA, 15 bp, Homo sapiens
aagcataataaattc

SEQ ID NO: 1731391 - DNA, 15 bp, Homo sapiens
agcataataaattct

SEQ ID NO: 1731392 - DNA, 15 bp, Homo sapiens
gcataataaattctt

SEQ ID NO: 1731393 - DNA, 15 bp, Homo sapiens
cataataaattcttt

SEQ ID NO: 1731394 - DNA, 15 bp, Homo sapiens
ataataaattcttta

SEQ ID NO: 1731395 - DNA, 15 bp, Homo sapiens
taataaattctttaa

SEQ ID NO: 1731396 - DNA, 15 bp, Homo sapiens
aataaattctttaat

SEQ ID NO: 1731397 - DNA, 15 bp, Homo sapiens
ataaattctttaatg

SEQ ID NO: 1731398 - DNA, 15 bp, Homo sapiens
taaattctttaatga

SEQ ID NO: 1731399 - DNA, 15 bp, Homo sapiens
aaattctttaatgat

SEQ ID NO: 1731400 - DNA, 15 bp, Homo sapiens
aattctttaatgata

SEQ ID NO: 1731401 - DNA, 15 bp, Homo sapiens
attctttaatgatat

SEQ ID NO: 1731402 - DNA, 15 bp, Homo sapiens
ttctttaatgatata

SEQ ID NO: 1731403 - DNA, 15 bp, Homo sapiens
tctttaatgatatag

SEQ ID NO: 1731404 - DNA, 15 bp, Homo sapiens
ctttaatgatatagt

SEQ ID NO: 1731405 - DNA, 15 bp, Homo sapiens
tttaatgatatagta

SEQ ID NO: 1731406 - DNA, 15 bp, Homo sapiens
ttaatgatatagtat

SEQ ID NO: 1731407 - DNA, 15 bp, Homo sapiens
taatgatatagtata

SEQ ID NO: 1731408 - DNA, 15 bp, Homo sapiens
aatgatatagtatac

SEQ ID NO: 1731409 - DNA, 15 bp, Homo sapiens
atgatatagtatact

SEQ ID NO: 1731410 - DNA, 15 bp, Homo sapiens
tgatatagtatacta

SEQ ID NO: 1731411 - DNA, 15 bp, Homo sapiens
gatatagtatactag

SEQ ID NO: 1731412 - DNA, 15 bp, Homo sapiens
atatagtatactaga

SEQ ID NO: 1731413 - DNA, 15 bp, Homo sapiens
tatagtatactagaa

SEQ ID NO: 1731414 - DNA, 15 bp, Homo sapiens
atagtatactagaag

SEQ ID NO: 1731415 - DNA, 15 bp, Homo sapiens
tagtatactagaagg

SEQ ID NO: 1731416 - DNA, 15 bp, Homo sapiens
agtatactagaaggt

SEQ ID NO: 1731417 - DNA, 15 bp, Homo sapiens
gtatactagaaggtg

SEQ ID NO: 1731418 - DNA, 15 bp, Homo sapiens
tatactagaaggtga

SEQ ID NO: 1731419 - DNA, 15 bp, Homo sapiens
atactagaaggtgat

SEQ ID NO: 1731420 - DNA, 15 bp, Homo sapiens
tactagaaggtgata

SEQ ID NO: 1731421 - DNA, 15 bp, Homo sapiens
actagaaggtgataa

SEQ ID NO: 1731422 - DNA, 15 bp, Homo sapiens
ctagaaggtgataaa

SEQ ID NO: 1731423 - DNA, 15 bp, Homo sapiens
tagaaggtgataaat

SEQ ID NO: 1731424 - DNA, 15 bp, Homo sapiens
agaaggtgataaatg

SEQ ID NO: 1731425 - DNA, 15 bp, Homo sapiens
gaaggtgataaatgc

SEQ ID NO: 1731426 - DNA, 15 bp, Homo sapiens
aaggtgataaatgct

SEQ ID NO: 1731427 - DNA, 15 bp, Homo sapiens
aggtgataaatgctg

SEQ ID NO: 1731428 - DNA, 15 bp, Homo sapiens
ggtgataaatgctgt

SEQ ID NO: 1731429 - DNA, 15 bp, Homo sapiens
gtgataaatgctgtg

SEQ ID NO: 1731430 - DNA, 15 bp, Homo sapiens
tgataaatgctgtgg

SEQ ID NO: 1731431 - DNA, 15 bp, Homo sapiens
gataaatgctgtgga

SEQ ID NO: 1731432 - DNA, 15 bp, Homo sapiens
ataaatgctgtggaa

SEQ ID NO: 1731433 - DNA, 15 bp, Homo sapiens
taaatgctgtggaaa

SEQ ID NO: 1731434 - DNA, 15 bp, Homo sapiens
aaatgctgtggaaaa

SEQ ID NO: 1731435 - DNA, 15 bp, Homo sapiens
aatgctgtggaaaag

SEQ ID NO: 1731436 - DNA, 15 bp, Homo sapiens
atgctgtggaaaaga

SEQ ID NO: 1731437 - DNA, 15 bp, Homo sapiens
tgctgtggaaaagaa

SEQ ID NO: 1731438 - DNA, 15 bp, Homo sapiens
gctgtggaaaagaaa

SEQ ID NO: 1731439 - DNA, 15 bp, Homo sapiens
ctgtggaaaagaaaa

SEQ ID NO: 1731440 - DNA, 15 bp, Homo sapiens
tgtggaaaagaaaat

SEQ ID NO: 1731441 - DNA, 15 bp, Homo sapiens
gtggaaaagaaaatc

SEQ ID NO: 1731442 - DNA, 15 bp, Homo sapiens
tggaaaagaaaatca

SEQ ID NO: 1731443 - DNA, 15 bp, Homo sapiens
ggaaaagaaaatcaa

SEQ ID NO: 1731444 - DNA, 15 bp, Homo sapiens
gaaaagaaaatcaaa

SEQ ID NO: 1731445 - DNA, 15 bp, Homo sapiens
aaaagaaaatcaaag

SEQ ID NO: 1731446 - DNA, 15 bp, Homo sapiens
aaagaaaatcaaagt

SEQ ID NO: 1731447 - DNA, 15 bp, Homo sapiens
aagaaaatcaaagta

SEQ ID NO: 1731448 - DNA, 15 bp, Homo sapiens
agaaaatcaaagtag

SEQ ID NO: 1731449 - DNA, 15 bp, Homo sapiens
gaaaatcaaagtagg

SEQ ID NO: 1731450 - DNA, 15 bp, Homo sapiens
aaaatcaaagtagga

SEQ ID NO: 1731451 - DNA, 15 bp, Homo sapiens
aaatcaaagtaggat

SEQ ID NO: 1731452 - DNA, 15 bp, Homo sapiens
aatcaaagtaggata

SEQ ID NO: 1731453 - DNA, 15 bp, Homo sapiens
atcaaagtaggataa

SEQ ID NO: 1731454 - DNA, 15 bp, Homo sapiens
tcaaagtaggataag

SEQ ID NO: 1731455 - DNA, 15 bp, Homo sapiens
caaagtaggataaga

SEQ ID NO: 1731456 - DNA, 15 bp, Homo sapiens
aaagtaggataagag

SEQ ID NO: 1731457 - DNA, 15 bp, Homo sapiens
aagtaggataagagg

SEQ ID NO: 1731458 - DNA, 15 bp, Homo sapiens
agtaggataagagga

SEQ ID NO: 1731459 - DNA, 15 bp, Homo sapiens
gtaggataagaggaa

SEQ ID NO: 1731460 - DNA, 15 bp, Homo sapiens
taggataagaggaac

SEQ ID NO: 1731461 - DNA, 15 bp, Homo sapiens
aggataagaggaact

SEQ ID NO: 1731462 - DNA, 15 bp, Homo sapiens
ggataagaggaactg

SEQ ID NO: 1731463 - DNA, 15 bp, Homo sapiens
gataagaggaactga

SEQ ID NO: 1731464 - DNA, 15 bp, Homo sapiens
ataagaggaactgag

SEQ ID NO: 1731465 - DNA, 15 bp, Homo sapiens
taagaggaactgaga

SEQ ID NO: 1731466 - DNA, 15 bp, Homo sapiens
aagaggaactgagag

SEQ ID NO: 1731467 - DNA, 15 bp, Homo sapiens
agaggaactgagagt

SEQ ID NO: 1731468 - DNA, 15 bp, Homo sapiens
gaggaactgagagtc

SEQ ID NO: 1731469 - DNA, 15 bp, Homo sapiens
aggaactgagagtcc

SEQ ID NO: 1731470 - DNA, 15 bp, Homo sapiens
ggaactgagagtcct

SEQ ID NO: 1731471 - DNA, 15 bp, Homo sapiens
gaactgagagtcctg

SEQ ID NO: 1731472 - DNA, 15 bp, Homo sapiens
aactgagagtcctga

SEQ ID NO: 1731473 - DNA, 15 bp, Homo sapiens
actgagagtcctgag

SEQ ID NO: 1731474 - DNA, 15 bp, Homo sapiens
ctgagagtcctgagg

SEQ ID NO: 1731475 - DNA, 15 bp, Homo sapiens
tgagagtcctgaggg

SEQ ID NO: 1731476 - DNA, 15 bp, Homo sapiens
gagagtcctgagggt

SEQ ID NO: 1731477 - DNA, 15 bp, Homo sapiens
agagtcctgagggta

SEQ ID NO: 1731478 - DNA, 15 bp, Homo sapiens
gagtcctgagggtac

SEQ ID NO: 1731479 - DNA, 15 bp, Homo sapiens
agtcctgagggtaca

SEQ ID NO: 1731480 - DNA, 15 bp, Homo sapiens
gtcctgagggtacaa

SEQ ID NO: 1731481 - DNA, 15 bp, Homo sapiens
tcctgagggtacaag

SEQ ID NO: 1731482 - DNA, 15 bp, Homo sapiens
cctgagggtacaaga

SEQ ID NO: 1731483 - DNA, 15 bp, Homo sapiens
ctgagggtacaagat

SEQ ID NO: 1731484 - DNA, 15 bp, Homo sapiens
tgagggtacaagatc

SEQ ID NO: 1731485 - DNA, 15 bp, Homo sapiens
gagggtacaagatcc

SEQ ID NO: 1731486 - DNA, 15 bp, Homo sapiens
agggtacaagatcca

SEQ ID NO: 1731487 - DNA, 15 bp, Homo sapiens
gggtacaagatccaa

SEQ ID NO: 1731488 - DNA, 15 bp, Homo sapiens
ggtacaagatccaac

SEQ ID NO: 1731489 - DNA, 15 bp, Homo sapiens
gtacaagatccaact

SEQ ID NO: 1731490 - DNA, 15 bp, Homo sapiens
tacaagatccaactt

SEQ ID NO: 1731491 - DNA, 15 bp, Homo sapiens
acaagatccaacttc

SEQ ID NO: 1731492 - DNA, 15 bp, Homo sapiens
caagatccaacttct

SEQ ID NO: 1731493 - DNA, 15 bp, Homo sapiens
aagatccaacttcta

SEQ ID NO: 1731494 - DNA, 15 bp, Homo sapiens
agatccaacttctaa

SEQ ID NO: 1731495 - DNA, 15 bp, Homo sapiens
gatccaacttctaat

SEQ ID NO: 1731496 - DNA, 15 bp, Homo sapiens
atccaacttctaatt

SEQ ID NO: 1731497 - DNA, 15 bp, Homo sapiens
tccaacttctaattg

SEQ ID NO: 1731498 - DNA, 15 bp, Homo sapiens
ccaacttctaattga

SEQ ID NO: 1731499 - DNA, 15 bp, Homo sapiens
caacttctaattgag

SEQ ID NO: 1731500 - DNA, 15 bp, Homo sapiens
aacttctaattgaga

SEQ ID NO: 1731501 - DNA, 15 bp, Homo sapiens
acttctaattgagaa

SEQ ID NO: 1731502 - DNA, 15 bp, Homo sapiens
cttctaattgagaag

SEQ ID NO: 1731503 - DNA, 15 bp, Homo sapiens
ttctaattgagaaga

SEQ ID NO: 1731504 - DNA, 15 bp, Homo sapiens
tctaattgagaagag

SEQ ID NO: 1731505 - DNA, 15 bp, Homo sapiens
ctaattgagaagaga

SEQ ID NO: 1731506 - DNA, 15 bp, Homo sapiens
taattgagaagagat

SEQ ID NO: 1731507 - DNA, 15 bp, Homo sapiens
aattgagaagagatt

SEQ ID NO: 1731508 - DNA, 15 bp, Homo sapiens
attgagaagagattt

SEQ ID NO: 1731509 - DNA, 15 bp, Homo sapiens
ttgagaagagatttt

SEQ ID NO: 1731510 - DNA, 15 bp, Homo sapiens
tgagaagagattttt

SEQ ID NO: 1731511 - DNA, 15 bp, Homo sapiens
gagaagagattttta

SEQ ID NO: 1731512 - DNA, 15 bp, Homo sapiens
agaagagatttttag

SEQ ID NO: 1731513 - DNA, 15 bp, Homo sapiens
gaagagatttttagg

SEQ ID NO: 1731514 - DNA, 15 bp, Homo sapiens
aagagatttttagga

SEQ ID NO: 1731515 - DNA, 15 bp, Homo sapiens
agagatttttaggag

SEQ ID NO: 1731516 - DNA, 15 bp, Homo sapiens
gagatttttaggagg

SEQ ID NO: 1731517 - DNA, 15 bp, Homo sapiens
agatttttaggaggt

SEQ ID NO: 1731518 - DNA, 15 bp, Homo sapiens
gatttttaggaggtg

SEQ ID NO: 1731519 - DNA, 15 bp, Homo sapiens
atttttaggaggtga

SEQ ID NO: 1731520 - DNA, 15 bp, Homo sapiens
tttttaggaggtgag

SEQ ID NO: 1731521 - DNA, 15 bp, Homo sapiens
ttttaggaggtgaga

SEQ ID NO: 1731522 - DNA, 15 bp, Homo sapiens
tttaggaggtgagag

SEQ ID NO: 1731523 - DNA, 15 bp, Homo sapiens
ttaggaggtgagagt

SEQ ID NO: 1731524 - DNA, 15 bp, Homo sapiens
taggaggtgagagtg

SEQ ID NO: 1731525 - DNA, 15 bp, Homo sapiens
aggaggtgagagtgt

SEQ ID NO: 1731526 - DNA, 15 bp, Homo sapiens
ggaggtgagagtgtc

SEQ ID NO: 1731527 - DNA, 15 bp, Homo sapiens
gaggtgagagtgtcc

SEQ ID NO: 1731528 - DNA, 15 bp, Homo sapiens
aggtgagagtgtcct

SEQ ID NO: 1731529 - DNA, 15 bp, Homo sapiens
ggtgagagtgtcctc

SEQ ID NO: 1731530 - DNA, 15 bp, Homo sapiens
gtgagagtgtcctcc

SEQ ID NO: 1731531 - DNA, 15 bp, Homo sapiens
tgagagtgtcctcca

SEQ ID NO: 1731532 - DNA, 15 bp, Homo sapiens
gagagtgtcctccat

SEQ ID NO: 1731533 - DNA, 15 bp, Homo sapiens
agagtgtcctccatg

SEQ ID NO: 1731534 - DNA, 15 bp, Homo sapiens
gagtgtcctccatgt

SEQ ID NO: 1731535 - DNA, 15 bp, Homo sapiens
agtgtcctccatgtc

SEQ ID NO: 1731536 - DNA, 15 bp, Homo sapiens
gtgtcctccatgtca

SEQ ID NO: 1731537 - DNA, 15 bp, Homo sapiens
tgtcctccatgtcag

SEQ ID NO: 1731538 - DNA, 15 bp, Homo sapiens
gtcctccatgtcagt

SEQ ID NO: 1731539 - DNA, 15 bp, Homo sapiens
tcctccatgtcagta

SEQ ID NO: 1731540 - DNA, 15 bp, Homo sapiens
cctccatgtcagtat

SEQ ID NO: 1731541 - DNA, 15 bp, Homo sapiens
ctccatgtcagtatt

SEQ ID NO: 1731542 - DNA, 15 bp, Homo sapiens
tccatgtcagtattt

SEQ ID NO: 1731543 - DNA, 15 bp, Homo sapiens
ccatgtcagtatttt

SEQ ID NO: 1731544 - DNA, 15 bp, Homo sapiens
catgtcagtattttg

SEQ ID NO: 1731545 - DNA, 15 bp, Homo sapiens
atgtcagtattttgg

SEQ ID NO: 1731546 - DNA, 15 bp, Homo sapiens
tgtcagtattttggg

SEQ ID NO: 1731547 - DNA, 15 bp, Homo sapiens
gtcagtattttgggg

SEQ ID NO: 1731548 - DNA, 15 bp, Homo sapiens
tcagtattttgggga

SEQ ID NO: 1731549 - DNA, 15 bp, Homo sapiens
cagtattttggggag

SEQ ID NO: 1731550 - DNA, 15 bp, Homo sapiens
agtattttggggagg

SEQ ID NO: 1731551 - DNA, 15 bp, Homo sapiens
gtattttggggagga

SEQ ID NO: 1731552 - DNA, 15 bp, Homo sapiens
tattttggggaggat

SEQ ID NO: 1731553 - DNA, 15 bp, Homo sapiens
attttggggaggata

SEQ ID NO: 1731554 - DNA, 15 bp, Homo sapiens
ttttggggaggataa

SEQ ID NO: 1731555 - DNA, 15 bp, Homo sapiens
tttggggaggataat

SEQ ID NO: 1731556 - DNA, 15 bp, Homo sapiens
ttggggaggataatt

SEQ ID NO: 1731557 - DNA, 15 bp, Homo sapiens
tggggaggataattt

SEQ ID NO: 1731558 - DNA, 15 bp, Homo sapiens
ggggaggataatttt

SEQ ID NO: 1731559 - DNA, 15 bp, Homo sapiens
gggaggataattttg

SEQ ID NO: 1731560 - DNA, 15 bp, Homo sapiens
ggaggataattttgg

SEQ ID NO: 1731561 - DNA, 15 bp, Homo sapiens
gaggataattttgga

SEQ ID NO: 1731562 - DNA, 15 bp, Homo sapiens
aggataattttggac

SEQ ID NO: 1731563 - DNA, 15 bp, Homo sapiens
ggataattttggaca

SEQ ID NO: 1731564 - DNA, 15 bp, Homo sapiens
gataattttggacag

SEQ ID NO: 1731565 - DNA, 15 bp, Homo sapiens
ataattttggacagg

SEQ ID NO: 1731566 - DNA, 15 bp, Homo sapiens
taattttggacaggg

SEQ ID NO: 1731567 - DNA, 15 bp, Homo sapiens
aattttggacagggg

SEQ ID NO: 1731568 - DNA, 15 bp, Homo sapiens
attttggacaggggg

SEQ ID NO: 1731569 - DNA, 15 bp, Homo sapiens
ttttggacaggggga

SEQ ID NO: 1731570 - DNA, 15 bp, Homo sapiens
tttggacagggggaa

SEQ ID NO: 1731571 - DNA, 15 bp, Homo sapiens
ttggacagggggaac

SEQ ID NO: 1731572 - DNA, 15 bp, Homo sapiens
tggacagggggaaca

SEQ ID NO: 1731573 - DNA, 15 bp, Homo sapiens
ggacagggggaacaa

SEQ ID NO: 1731574 - DNA, 15 bp, Homo sapiens
gacagggggaacaac

SEQ ID NO: 1731575 - DNA, 15 bp, Homo sapiens
acagggggaacaact

SEQ ID NO: 1731576 - DNA, 15 bp, Homo sapiens
cagggggaacaacta

SEQ ID NO: 1731577 - DNA, 15 bp, Homo sapiens
agggggaacaactag

SEQ ID NO: 1731578 - DNA, 15 bp, Homo sapiens
gggggaacaactagt

SEQ ID NO: 1731579 - DNA, 15 bp, Homo sapiens
ggggaacaactagta

SEQ ID NO: 1731580 - DNA, 15 bp, Homo sapiens
gggaacaactagtac

SEQ ID NO: 1731581 - DNA, 15 bp, Homo sapiens
ggaacaactagtaca

SEQ ID NO: 1731582 - DNA, 15 bp, Homo sapiens
gaacaactagtacaa

SEQ ID NO: 1731583 - DNA, 15 bp, Homo sapiens
aacaactagtacaaa

SEQ ID NO: 1731584 - DNA, 15 bp, Homo sapiens
acaactagtacaaac

SEQ ID NO: 1731585 - DNA, 15 bp, Homo sapiens
caactagtacaaaca

SEQ ID NO: 1731586 - DNA, 15 bp, Homo sapiens
aactagtacaaacac

SEQ ID NO: 1731587 - DNA, 15 bp, Homo sapiens
actagtacaaacacc

SEQ ID NO: 1731588 - DNA, 15 bp, Homo sapiens
ctagtacaaacaccc

SEQ ID NO: 1731589 - DNA, 15 bp, Homo sapiens
tagtacaaacaccct

SEQ ID NO: 1731590 - DNA, 15 bp, Homo sapiens
agtacaaacaccctg

SEQ ID NO: 1731591 - DNA, 15 bp, Homo sapiens
gtacaaacaccctga

SEQ ID NO: 1731592 - DNA, 15 bp, Homo sapiens
tacaaacaccctgag

SEQ ID NO: 1731593 - DNA, 15 bp, Homo sapiens
acaaacaccctgagg

SEQ ID NO: 1731594 - DNA, 15 bp, Homo sapiens
caaacaccctgaggt

SEQ ID NO: 1731595 - DNA, 15 bp, Homo sapiens
aaacaccctgaggtg

SEQ ID NO: 1731596 - DNA, 15 bp, Homo sapiens
aacaccctgaggtgg

SEQ ID NO: 1731597 - DNA, 15 bp, Homo sapiens
acaccctgaggtgga

SEQ ID NO: 1731598 - DNA, 15 bp, Homo sapiens
caccctgaggtggag

SEQ ID NO: 1731599 - DNA, 15 bp, Homo sapiens
accctgaggtggagt

SEQ ID NO: 1731600 - DNA, 15 bp, Homo sapiens
ccctgaggtggagtg

SEQ ID NO: 1731601 - DNA, 15 bp, Homo sapiens
cctgaggtggagtgc

SEQ ID NO: 1731602 - DNA, 15 bp, Homo sapiens
ctgaggtggagtgct

SEQ ID NO: 1731603 - DNA, 15 bp, Homo sapiens
tgaggtggagtgctg

SEQ ID NO: 1731604 - DNA, 15 bp, Homo sapiens
gaggtggagtgctgc

SEQ ID NO: 1731605 - DNA, 15 bp, Homo sapiens
aggtggagtgctgcc

SEQ ID NO: 1731606 - DNA, 15 bp, Homo sapiens
ggtggagtgctgcct

SEQ ID NO: 1731607 - DNA, 15 bp, Homo sapiens
gtggagtgctgcctc

SEQ ID NO: 1731608 - DNA, 15 bp, Homo sapiens
tggagtgctgcctct

SEQ ID NO: 1731609 - DNA, 15 bp, Homo sapiens
ggagtgctgcctctc

SEQ ID NO: 1731610 - DNA, 15 bp, Homo sapiens
gagtgctgcctctct

SEQ ID NO: 1731611 - DNA, 15 bp, Homo sapiens
agtgctgcctctctt

SEQ ID NO: 1731612 - DNA, 15 bp, Homo sapiens
gtgctgcctctcttg

SEQ ID NO: 1731613 - DNA, 15 bp, Homo sapiens
tgctgcctctcttgt

SEQ ID NO: 1731614 - DNA, 15 bp, Homo sapiens
gctgcctctcttgtc

SEQ ID NO: 1731615 - DNA, 15 bp, Homo sapiens
ctgcctctcttgtct

SEQ ID NO: 1731616 - DNA, 15 bp, Homo sapiens
tgcctctcttgtctg

SEQ ID NO: 1731617 - DNA, 15 bp, Homo sapiens
gcctctcttgtctga

SEQ ID NO: 1731618 - DNA, 15 bp, Homo sapiens
cctctcttgtctgag

SEQ ID NO: 1731619 - DNA, 15 bp, Homo sapiens
ctctcttgtctgagt

SEQ ID NO: 1731620 - DNA, 15 bp, Homo sapiens
tctcttgtctgagta

SEQ ID NO: 1731621 - DNA, 15 bp, Homo sapiens
ctcttgtctgagtaa

SEQ ID NO: 1731622 - DNA, 15 bp, Homo sapiens
tcttgtctgagtaat

SEQ ID NO: 1731623 - DNA, 15 bp, Homo sapiens
cttgtctgagtaata

SEQ ID NO: 1731624 - DNA, 15 bp, Homo sapiens
ttgtctgagtaatat

SEQ ID NO: 1731625 - DNA, 15 bp, Homo sapiens
tgtctgagtaatatc

SEQ ID NO: 1731626 - DNA, 15 bp, Homo sapiens
gtctgagtaatatcc

SEQ ID NO: 1731627 - DNA, 15 bp, Homo sapiens
tctgagtaatatcca

SEQ ID NO: 1731628 - DNA, 15 bp, Homo sapiens
ctgagtaatatccaa

SEQ ID NO: 1731629 - DNA, 15 bp, Homo sapiens
tgagtaatatccaag

SEQ ID NO: 1731630 - DNA, 15 bp, Homo sapiens
gagtaatatccaaga

SEQ ID NO: 1731631 - DNA, 15 bp, Homo sapiens
agtaatatccaagag

SEQ ID NO: 1731632 - DNA, 15 bp, Homo sapiens
gtaatatccaagagg

SEQ ID NO: 1731633 - DNA, 15 bp, Homo sapiens
taatatccaagaggc

SEQ ID NO: 1731634 - DNA, 15 bp, Homo sapiens
aatatccaagaggcc

SEQ ID NO: 1731635 - DNA, 15 bp, Homo sapiens
atatccaagaggcca

SEQ ID NO: 1731636 - DNA, 15 bp, Homo sapiens
tatccaagaggccag

SEQ ID NO: 1731637 - DNA, 15 bp, Homo sapiens
atccaagaggccagt

SEQ ID NO: 1731638 - DNA, 15 bp, Homo sapiens
tccaagaggccagtg

SEQ ID NO: 1731639 - DNA, 15 bp, Homo sapiens
ccaagaggccagtgt

SEQ ID NO: 1731640 - DNA, 15 bp, Homo sapiens
caagaggccagtgtg

SEQ ID NO: 1731641 - DNA, 15 bp, Homo sapiens
aagaggccagtgtgg

SEQ ID NO: 1731642 - DNA, 15 bp, Homo sapiens
agaggccagtgtggc

SEQ ID NO: 1731643 - DNA, 15 bp, Homo sapiens
gaggccagtgtggct

SEQ ID NO: 1731644 - DNA, 15 bp, Homo sapiens
aggccagtgtggctg

SEQ ID NO: 1731645 - DNA, 15 bp, Homo sapiens
ggccagtgtggctgg

SEQ ID NO: 1731646 - DNA, 15 bp, Homo sapiens
gccagtgtggctgga

SEQ ID NO: 1731647 - DNA, 15 bp, Homo sapiens
ccagtgtggctggag

SEQ ID NO: 1731648 - DNA, 15 bp, Homo sapiens
cagtgtggctggagt

SEQ ID NO: 1731649 - DNA, 15 bp, Homo sapiens
agtgtggctggagtg

SEQ ID NO: 1731650 - DNA, 15 bp, Homo sapiens
gtgtggctggagtgg

SEQ ID NO: 1731651 - DNA, 15 bp, Homo sapiens
tgtggctggagtgga

SEQ ID NO: 1731652 - DNA, 15 bp, Homo sapiens
gtggctggagtggag

SEQ ID NO: 1731653 - DNA, 15 bp, Homo sapiens
tggctggagtggagt

SEQ ID NO: 1731654 - DNA, 15 bp, Homo sapiens
ggctggagtggagtt

SEQ ID NO: 1731655 - DNA, 15 bp, Homo sapiens
gctggagtggagtta

SEQ ID NO: 1731656 - DNA, 15 bp, Homo sapiens
ctggagtggagttag

SEQ ID NO: 1731657 - DNA, 15 bp, Homo sapiens
tggagtggagttagg

SEQ ID NO: 1731658 - DNA, 15 bp, Homo sapiens
ggagtggagttaggc

SEQ ID NO: 1731659 - DNA, 15 bp, Homo sapiens
gagtggagttaggca

SEQ ID NO: 1731660 - DNA, 15 bp, Homo sapiens
agtggagttaggcaa

SEQ ID NO: 1731661 - DNA, 15 bp, Homo sapiens
gtggagttaggcaaa

SEQ ID NO: 1731662 - DNA, 15 bp, Homo sapiens
tggagttaggcaaag

SEQ ID NO: 1731663 - DNA, 15 bp, Homo sapiens
ggagttaggcaaaga

SEQ ID NO: 1731664 - DNA, 15 bp, Homo sapiens
gagttaggcaaagac

SEQ ID NO: 1731665 - DNA, 15 bp, Homo sapiens
agttaggcaaagaca

SEQ ID NO: 1731666 - DNA, 15 bp, Homo sapiens
gttaggcaaagacaa

SEQ ID NO: 1731667 - DNA, 15 bp, Homo sapiens
ttaggcaaagacaaa

SEQ ID NO: 1731668 - DNA, 15 bp, Homo sapiens
taggcaaagacaaaa

SEQ ID NO: 1731669 - DNA, 15 bp, Homo sapiens
aggcaaagacaaaat

SEQ ID NO: 1731670 - DNA, 15 bp, Homo sapiens
ggcaaagacaaaata

SEQ ID NO: 1731671 - DNA, 15 bp, Homo sapiens
gcaaagacaaaataa

SEQ ID NO: 1731672 - DNA, 15 bp, Homo sapiens
caaagacaaaataaa

SEQ ID NO: 1731673 - DNA, 15 bp, Homo sapiens
aaagacaaaataaat

SEQ ID NO: 1731674 - DNA, 15 bp, Homo sapiens
aagacaaaataaata

SEQ ID NO: 1731675 - DNA, 15 bp, Homo sapiens
agacaaaataaataa

SEQ ID NO: 1731676 - DNA, 15 bp, Homo sapiens
gacaaaataaataaa

SEQ ID NO: 1731677 - DNA, 15 bp, Homo sapiens
caaaataaataaaaa

SEQ ID NO: 1731678 - DNA, 15 bp, Homo sapiens
aaaataaataaaaat

SEQ ID NO: 1731679 - DNA, 15 bp, Homo sapiens
aaataaataaaaatg

SEQ ID NO: 1731680 - DNA, 15 bp, Homo sapiens
aataaataaaaatga

SEQ ID NO: 1731681 - DNA, 15 bp, Homo sapiens
ataaataaaaatgag

SEQ ID NO: 1731682 - DNA, 15 bp, Homo sapiens
taaataaaaatgaga

SEQ ID NO: 1731683 - DNA, 15 bp, Homo sapiens
aaataaaaatgagat

SEQ ID NO: 1731684 - DNA, 15 bp, Homo sapiens
aataaaaatgagatc

SEQ ID NO: 1731685 - DNA, 15 bp, Homo sapiens
ataaaaatgagatca

SEQ ID NO: 1731686 - DNA, 15 bp, Homo sapiens
taaaaatgagatcag

SEQ ID NO: 1731687 - DNA, 15 bp, Homo sapiens
aaaaatgagatcaga

SEQ ID NO: 1731688 - DNA, 15 bp, Homo sapiens
aaaatgagatcagag

SEQ ID NO: 1731689 - DNA, 15 bp, Homo sapiens
aaatgagatcagaga

SEQ ID NO: 1731690 - DNA, 15 bp, Homo sapiens
aatgagatcagagag

SEQ ID NO: 1731691 - DNA, 15 bp, Homo sapiens
atgagatcagagagg

SEQ ID NO: 1731692 - DNA, 15 bp, Homo sapiens
tgagatcagagaggt

SEQ ID NO: 1731693 - DNA, 15 bp, Homo sapiens
gagatcagagaggtc

SEQ ID NO: 1731694 - DNA, 15 bp, Homo sapiens
agatcagagaggtca

SEQ ID NO: 1731695 - DNA, 15 bp, Homo sapiens
gatcagagaggtcac

SEQ ID NO: 1731696 - DNA, 15 bp, Homo sapiens
atcagagaggtcacg

SEQ ID NO: 1731697 - DNA, 15 bp, Homo sapiens
tcagagaggtcacgg

SEQ ID NO: 1731698 - DNA, 15 bp, Homo sapiens
cagagaggtcacgga

SEQ ID NO: 1731699 - DNA, 15 bp, Homo sapiens
agagaggtcacggag

SEQ ID NO: 1731700 - DNA, 15 bp, Homo sapiens
gagaggtcacggaga

SEQ ID NO: 1731701 - DNA, 15 bp, Homo sapiens
agaggtcacggagag

SEQ ID NO: 1731702 - DNA, 15 bp, Homo sapiens
gaggtcacggagagg

SEQ ID NO: 1731703 - DNA, 15 bp, Homo sapiens
aggtcacggagaggg

SEQ ID NO: 1731704 - DNA, 15 bp, Homo sapiens
ggtcacggagagggc

SEQ ID NO: 1731705 - DNA, 15 bp, Homo sapiens
gtcacggagagggca

SEQ ID NO: 1731706 - DNA, 15 bp, Homo sapiens
tcacggagagggcac

SEQ ID NO: 1731707 - DNA, 15 bp, Homo sapiens
cacggagagggcaca

SEQ ID NO: 1731708 - DNA, 15 bp, Homo sapiens
acggagagggcacag

SEQ ID NO: 1731709 - DNA, 15 bp, Homo sapiens
cggagagggcacagc

SEQ ID NO: 1731710 - DNA, 15 bp, Homo sapiens
ggagagggcacagca

SEQ ID NO: 1731711 - DNA, 15 bp, Homo sapiens
gagagggcacagcat

SEQ ID NO: 1731712 - DNA, 15 bp, Homo sapiens
agagggcacagcatt

SEQ ID NO: 1731713 - DNA, 15 bp, Homo sapiens
gagggcacagcattg

SEQ ID NO: 1731714 - DNA, 15 bp, Homo sapiens
agggcacagcattgt

SEQ ID NO: 1731715 - DNA, 15 bp, Homo sapiens
gggcacagcattgta

SEQ ID NO: 1731716 - DNA, 15 bp, Homo sapiens
ggcacagcattgtag

SEQ ID NO: 1731717 - DNA, 15 bp, Homo sapiens
gcacagcattgtagg

SEQ ID NO: 1731718 - DNA, 15 bp, Homo sapiens
cacagcattgtaggc

SEQ ID NO: 1731719 - DNA, 15 bp, Homo sapiens
acagcattgtaggcc

SEQ ID NO: 1731720 - DNA, 15 bp, Homo sapiens
cagcattgtaggcca

SEQ ID NO: 1731721 - DNA, 15 bp, Homo sapiens
agcattgtaggccat

SEQ ID NO: 1731722 - DNA, 15 bp, Homo sapiens
gcattgtaggccatg

SEQ ID NO: 1731723 - DNA, 15 bp, Homo sapiens
cattgtaggccatga

SEQ ID NO: 1731724 - DNA, 15 bp, Homo sapiens
attgtaggccatgac

SEQ ID NO: 1731725 - DNA, 15 bp, Homo sapiens
ttgtaggccatgact

SEQ ID NO: 1731726 - DNA, 15 bp, Homo sapiens
tgtaggccatgactg

SEQ ID NO: 1731727 - DNA, 15 bp, Homo sapiens
gtaggccatgactga

SEQ ID NO: 1731728 - DNA, 15 bp, Homo sapiens
taggccatgactgag

SEQ ID NO: 1731729 - DNA, 15 bp, Homo sapiens
aggccatgactgagt

SEQ ID NO: 1731730 - DNA, 15 bp, Homo sapiens
ggccatgactgagtg

SEQ ID NO: 1731731 - DNA, 15 bp, Homo sapiens
gccatgactgagtga

SEQ ID NO: 1731732 - DNA, 15 bp, Homo sapiens
ccatgactgagtgaa

SEQ ID NO: 1731733 - DNA, 15 bp, Homo sapiens
catgactgagtgaat

SEQ ID NO: 1731734 - DNA, 15 bp, Homo sapiens
atgactgagtgaatt

SEQ ID NO: 1731735 - DNA, 15 bp, Homo sapiens
tgactgagtgaattg

SEQ ID NO: 1731736 - DNA, 15 bp, Homo sapiens
gactgagtgaattgg

SEQ ID NO: 1731737 - DNA, 15 bp, Homo sapiens
actgagtgaattggg

SEQ ID NO: 1731738 - DNA, 15 bp, Homo sapiens
ctgagtgaattgggg

SEQ ID NO: 1731739 - DNA, 15 bp, Homo sapiens
tgagtgaattggggg

SEQ ID NO: 1731740 - DNA, 15 bp, Homo sapiens
gagtgaattgggggc

SEQ ID NO: 1731741 - DNA, 15 bp, Homo sapiens
agtgaattgggggct

SEQ ID NO: 1731742 - DNA, 15 bp, Homo sapiens
gtgaattgggggcta

SEQ ID NO: 1731743 - DNA, 15 bp, Homo sapiens
tgaattgggggctac

SEQ ID NO: 1731744 - DNA, 15 bp, Homo sapiens
gaattgggggctacc

SEQ ID NO: 1731745 - DNA, 15 bp, Homo sapiens
aattgggggctacca

SEQ ID NO: 1731746 - DNA, 15 bp, Homo sapiens
attgggggctaccac

SEQ ID NO: 1731747 - DNA, 15 bp, Homo sapiens
ttgggggctaccaca

SEQ ID NO: 1731748 - DNA, 15 bp, Homo sapiens
tgggggctaccacag

SEQ ID NO: 1731749 - DNA, 15 bp, Homo sapiens
gggggctaccacaga

SEQ ID NO: 1731750 - DNA, 15 bp, Homo sapiens
ggggctaccacagaa

SEQ ID NO: 1731751 - DNA, 15 bp, Homo sapiens
gggctaccacagaaa

SEQ ID NO: 1731752 - DNA, 15 bp, Homo sapiens
ggctaccacagaaat

SEQ ID NO: 1731753 - DNA, 15 bp, Homo sapiens
gctaccacagaaatg

SEQ ID NO: 1731754 - DNA, 15 bp, Homo sapiens
ctaccacagaaatgt

SEQ ID NO: 1731755 - DNA, 15 bp, Homo sapiens
taccacagaaatgtg

SEQ ID NO: 1731756 - DNA, 15 bp, Homo sapiens
accacagaaatgtga

SEQ ID NO: 1731757 - DNA, 15 bp, Homo sapiens
ccacagaaatgtgaa

SEQ ID NO: 1731758 - DNA, 15 bp, Homo sapiens
cacagaaatgtgaag

SEQ ID NO: 1731759 - DNA, 15 bp, Homo sapiens
acagaaatgtgaaga

SEQ ID NO: 1731760 - DNA, 15 bp, Homo sapiens
cagaaatgtgaagag

SEQ ID NO: 1731761 - DNA, 15 bp, Homo sapiens
agaaatgtgaagaga

SEQ ID NO: 1731762 - DNA, 15 bp, Homo sapiens
gaaatgtgaagagaa

SEQ ID NO: 1731763 - DNA, 15 bp, Homo sapiens
aaatgtgaagagaag

SEQ ID NO: 1731764 - DNA, 15 bp, Homo sapiens
aatgtgaagagaaga

SEQ ID NO: 1731765 - DNA, 15 bp, Homo sapiens
atgtgaagagaagag

SEQ ID NO: 1731766 - DNA, 15 bp, Homo sapiens
tgtgaagagaagagt

SEQ ID NO: 1731767 - DNA, 15 bp, Homo sapiens
gtgaagagaagagtg

SEQ ID NO: 1731768 - DNA, 15 bp, Homo sapiens
tgaagagaagagtga

SEQ ID NO: 1731769 - DNA, 15 bp, Homo sapiens
gaagagaagagtgat

SEQ ID NO: 1731770 - DNA, 15 bp, Homo sapiens
aagagaagagtgatg

SEQ ID NO: 1731771 - DNA, 15 bp, Homo sapiens
agagaagagtgatgt

SEQ ID NO: 1731772 - DNA, 15 bp, Homo sapiens
gagaagagtgatgtg

SEQ ID NO: 1731773 - DNA, 15 bp, Homo sapiens
agaagagtgatgtga

SEQ ID NO: 1731774 - DNA, 15 bp, Homo sapiens
gaagagtgatgtgat

SEQ ID NO: 1731775 - DNA, 15 bp, Homo sapiens
aagagtgatgtgatg

SEQ ID NO: 1731776 - DNA, 15 bp, Homo sapiens
agagtgatgtgatgt

SEQ ID NO: 1731777 - DNA, 15 bp, Homo sapiens
gagtgatgtgatgtg

SEQ ID NO: 1731778 - DNA, 15 bp, Homo sapiens
agtgatgtgatgtga

SEQ ID NO: 1731779 - DNA, 15 bp, Homo sapiens
gtgatgtgatgtgac

SEQ ID NO: 1731780 - DNA, 15 bp, Homo sapiens
tgatgtgatgtgact

SEQ ID NO: 1731781 - DNA, 15 bp, Homo sapiens
gatgtgatgtgactc

SEQ ID NO: 1731782 - DNA, 15 bp, Homo sapiens
atgtgatgtgactca

SEQ ID NO: 1731783 - DNA, 15 bp, Homo sapiens
tgtgatgtgactcac

SEQ ID NO: 1731784 - DNA, 15 bp, Homo sapiens
gtgatgtgactcaca

SEQ ID NO: 1731785 - DNA, 15 bp, Homo sapiens
tgatgtgactcacat

SEQ ID NO: 1731786 - DNA, 15 bp, Homo sapiens
gatgtgactcacatt

SEQ ID NO: 1731787 - DNA, 15 bp, Homo sapiens
atgtgactcacattt

SEQ ID NO: 1731788 - DNA, 15 bp, Homo sapiens
tgtgactcacatttc

SEQ ID NO: 1731789 - DNA, 15 bp, Homo sapiens
gtgactcacatttca

SEQ ID NO: 1731790 - DNA, 15 bp, Homo sapiens
tgactcacatttcaa

SEQ ID NO: 1731791 - DNA, 15 bp, Homo sapiens
gactcacatttcaaa

SEQ ID NO: 1731792 - DNA, 15 bp, Homo sapiens
actcacatttcaaaa

SEQ ID NO: 1731793 - DNA, 15 bp, Homo sapiens
ctcacatttcaaaag

SEQ ID NO: 1731794 - DNA, 15 bp, Homo sapiens
tcacatttcaaaaga

SEQ ID NO: 1731795 - DNA, 15 bp, Homo sapiens
cacatttcaaaagaa

SEQ ID NO: 1731796 - DNA, 15 bp, Homo sapiens
acatttcaaaagaat

SEQ ID NO: 1731797 - DNA, 15 bp, Homo sapiens
catttcaaaagaatc

SEQ ID NO: 1731798 - DNA, 15 bp, Homo sapiens
atttcaaaagaatca

SEQ ID NO: 1731799 - DNA, 15 bp, Homo sapiens
tttcaaaagaatcat

SEQ ID NO: 1731800 - DNA, 15 bp, Homo sapiens
ttcaaaagaatcatc

SEQ ID NO: 1731801 - DNA, 15 bp, Homo sapiens
tcaaaagaatcatcc

SEQ ID NO: 1731802 - DNA, 15 bp, Homo sapiens
caaaagaatcatcca

SEQ ID NO: 1731803 - DNA, 15 bp, Homo sapiens
aaaagaatcatccag

SEQ ID NO: 1731804 - DNA, 15 bp, Homo sapiens
aaagaatcatccagg

SEQ ID NO: 1731805 - DNA, 15 bp, Homo sapiens
aagaatcatccaggc

SEQ ID NO: 1731806 - DNA, 15 bp, Homo sapiens
agaatcatccaggcc

SEQ ID NO: 1731807 - DNA, 15 bp, Homo sapiens
gaatcatccaggcca

SEQ ID NO: 1731808 - DNA, 15 bp, Homo sapiens
aatcatccaggccat

SEQ ID NO: 1731809 - DNA, 15 bp, Homo sapiens
atcatccaggccatg

SEQ ID NO: 1731810 - DNA, 15 bp, Homo sapiens
tcatccaggccatgc

SEQ ID NO: 1731811 - DNA, 15 bp, Homo sapiens
catccaggccatgct

SEQ ID NO: 1731812 - DNA, 15 bp, Homo sapiens
atccaggccatgctt

SEQ ID NO: 1731813 - DNA, 15 bp, Homo sapiens
tccaggccatgcttt

SEQ ID NO: 1731814 - DNA, 15 bp, Homo sapiens
ccaggccatgctttt

SEQ ID NO: 1731815 - DNA, 15 bp, Homo sapiens
caggccatgcttttg

SEQ ID NO: 1731816 - DNA, 15 bp, Homo sapiens
aggccatgcttttga

SEQ ID NO: 1731817 - DNA, 15 bp, Homo sapiens
ggccatgcttttgac

SEQ ID NO: 1731818 - DNA, 15 bp, Homo sapiens
gccatgcttttgaca

SEQ ID NO: 1731819 - DNA, 15 bp, Homo sapiens
ccatgcttttgacaa

SEQ ID NO: 1731820 - DNA, 15 bp, Homo sapiens
catgcttttgacaat

SEQ ID NO: 1731821 - DNA, 15 bp, Homo sapiens
atgcttttgacaatg

SEQ ID NO: 1731822 - DNA, 15 bp, Homo sapiens
tgcttttgacaatgg

SEQ ID NO: 1731823 - DNA, 15 bp, Homo sapiens
gcttttgacaatgga

SEQ ID NO: 1731824 - DNA, 15 bp, Homo sapiens
cttttgacaatggac

SEQ ID NO: 1731825 - DNA, 15 bp, Homo sapiens
ttttgacaatggaca

SEQ ID NO: 1731826 - DNA, 15 bp, Homo sapiens
tttgacaatggacaa

SEQ ID NO: 1731827 - DNA, 15 bp, Homo sapiens
ttgacaatggacaaa

SEQ ID NO: 1731828 - DNA, 15 bp, Homo sapiens
tgacaatggacaaag

SEQ ID NO: 1731829 - DNA, 15 bp, Homo sapiens
gacaatggacaaagg

SEQ ID NO: 1731830 - DNA, 15 bp, Homo sapiens
acaatggacaaaggc

SEQ ID NO: 1731831 - DNA, 15 bp, Homo sapiens
caatggacaaaggcg

SEQ ID NO: 1731832 - DNA, 15 bp, Homo sapiens
aatggacaaaggcgg

SEQ ID NO: 1731833 - DNA, 15 bp, Homo sapiens
atggacaaaggcgga

SEQ ID NO: 1731834 - DNA, 15 bp, Homo sapiens
tggacaaaggcggaa

SEQ ID NO: 1731835 - DNA, 15 bp, Homo sapiens
ggacaaaggcggaag

SEQ ID NO: 1731836 - DNA, 15 bp, Homo sapiens
gacaaaggcggaaga

SEQ ID NO: 1731837 - DNA, 15 bp, Homo sapiens
acaaaggcggaagag

SEQ ID NO: 1731838 - DNA, 15 bp, Homo sapiens
caaaggcggaagagg

SEQ ID NO: 1731839 - DNA, 15 bp, Homo sapiens
aaaggcggaagagga

SEQ ID NO: 1731840 - DNA, 15 bp, Homo sapiens
aaggcggaagaggag

SEQ ID NO: 1731841 - DNA, 15 bp, Homo sapiens
aggcggaagaggagg

SEQ ID NO: 1731842 - DNA, 15 bp, Homo sapiens
ggcggaagaggagga

SEQ ID NO: 1731843 - DNA, 15 bp, Homo sapiens
gcggaagaggaggaa

SEQ ID NO: 1731844 - DNA, 15 bp, Homo sapiens
cggaagaggaggaaa

SEQ ID NO: 1731845 - DNA, 15 bp, Homo sapiens
ggaagaggaggaaag

SEQ ID NO: 1731846 - DNA, 15 bp, Homo sapiens
gaagaggaggaaagg

SEQ ID NO: 1731847 - DNA, 15 bp, Homo sapiens
aagaggaggaaagga

SEQ ID NO: 1731848 - DNA, 15 bp, Homo sapiens
agaggaggaaaggac

SEQ ID NO: 1731849 - DNA, 15 bp, Homo sapiens
gaggaggaaaggaca

SEQ ID NO: 1731850 - DNA, 15 bp, Homo sapiens
aggaggaaaggacag

SEQ ID NO: 1731851 - DNA, 15 bp, Homo sapiens
ggaggaaaggacaga

SEQ ID NO: 1731852 - DNA, 15 bp, Homo sapiens
gaggaaaggacagag

SEQ ID NO: 1731853 - DNA, 15 bp, Homo sapiens
aggaaaggacagagg

SEQ ID NO: 1731854 - DNA, 15 bp, Homo sapiens
ggaaaggacagaggc

SEQ ID NO: 1731855 - DNA, 15 bp, Homo sapiens
gaaaggacagaggca

SEQ ID NO: 1731856 - DNA, 15 bp, Homo sapiens
aaaggacagaggcag

SEQ ID NO: 1731857 - DNA, 15 bp, Homo sapiens
aaggacagaggcaga

SEQ ID NO: 1731858 - DNA, 15 bp, Homo sapiens
aggacagaggcagag

SEQ ID NO: 1731859 - DNA, 15 bp, Homo sapiens
ggacagaggcagaga

SEQ ID NO: 1731860 - DNA, 15 bp, Homo sapiens
gacagaggcagagag

SEQ ID NO: 1731861 - DNA, 15 bp, Homo sapiens
acagaggcagagaga

SEQ ID NO: 1731862 - DNA, 15 bp, Homo sapiens
cagaggcagagagac

SEQ ID NO: 1731863 - DNA, 15 bp, Homo sapiens
agaggcagagagaca

SEQ ID NO: 1731864 - DNA, 15 bp, Homo sapiens
gaggcagagagacaa

SEQ ID NO: 1731865 - DNA, 15 bp, Homo sapiens
aggcagagagacaat

SEQ ID NO: 1731866 - DNA, 15 bp, Homo sapiens
ggcagagagacaatt

SEQ ID NO: 1731867 - DNA, 15 bp, Homo sapiens
gcagagagacaatta

SEQ ID NO: 1731868 - DNA, 15 bp, Homo sapiens
cagagagacaattaa

SEQ ID NO: 1731869 - DNA, 15 bp, Homo sapiens
agagagacaattaac

SEQ ID NO: 1731870 - DNA, 15 bp, Homo sapiens
gagagacaattaaca

SEQ ID NO: 1731871 - DNA, 15 bp, Homo sapiens
agagacaattaacaa

SEQ ID NO: 1731872 - DNA, 15 bp, Homo sapiens
gagacaattaacaag

SEQ ID NO: 1731873 - DNA, 15 bp, Homo sapiens
agacaattaacaagc

SEQ ID NO: 1731874 - DNA, 15 bp, Homo sapiens
gacaattaacaagct

SEQ ID NO: 1731875 - DNA, 15 bp, Homo sapiens
ctggccagacagctg

SEQ ID NO: 1731876 - DNA, 15 bp, Homo sapiens
tggccagacagctgg

SEQ ID NO: 1731877 - DNA, 15 bp, Homo sapiens
ggccagacagctggt

SEQ ID NO: 1731878 - DNA, 15 bp, Homo sapiens
gccagacagctggta

SEQ ID NO: 1731879 - DNA, 15 bp, Homo sapiens
ccagacagctggtac

SEQ ID NO: 1731880 - DNA, 15 bp, Homo sapiens
cagacagctggtaca

SEQ ID NO: 1731881 - DNA, 15 bp, Homo sapiens
agacagctggtacat

SEQ ID NO: 1731882 - DNA, 15 bp, Homo sapiens
gacagctggtacatg

SEQ ID NO: 1731883 - DNA, 15 bp, Homo sapiens
acagctggtacatgg

SEQ ID NO: 1731884 - DNA, 15 bp, Homo sapiens
cagctggtacatggg

SEQ ID NO: 1731885 - DNA, 15 bp, Homo sapiens
agctggtacatggga

SEQ ID NO: 1731886 - DNA, 15 bp, Homo sapiens
gctggtacatgggaa

SEQ ID NO: 1731887 - DNA, 15 bp, Homo sapiens
ctggtacatgggaaa

SEQ ID NO: 1731888 - DNA, 15 bp, Homo sapiens
tggtacatgggaaag

SEQ ID NO: 1731889 - DNA, 15 bp, Homo sapiens
ggtacatgggaaagg

SEQ ID NO: 1731890 - DNA, 15 bp, Homo sapiens
gtacatgggaaaggt

SEQ ID NO: 1731891 - DNA, 15 bp, Homo sapiens
tacatgggaaaggtg

SEQ ID NO: 1731892 - DNA, 15 bp, Homo sapiens
acatgggaaaggtga

SEQ ID NO: 1731893 - DNA, 15 bp, Homo sapiens
catgggaaaggtgag

SEQ ID NO: 1731894 - DNA, 15 bp, Homo sapiens
atgggaaaggtgaga

SEQ ID NO: 1731895 - DNA, 15 bp, Homo sapiens
tgggaaaggtgagat

SEQ ID NO: 1731896 - DNA, 15 bp, Homo sapiens
gggaaaggtgagatt

SEQ ID NO: 1731897 - DNA, 15 bp, Homo sapiens
ggaaaggtgagattc

SEQ ID NO: 1731898 - DNA, 15 bp, Homo sapiens
gaaaggtgagattca

SEQ ID NO: 1731899 - DNA, 15 bp, Homo sapiens
aaaggtgagattcac

SEQ ID NO: 1731900 - DNA, 15 bp, Homo sapiens
aaggtgagattcaca

SEQ ID NO: 1731901 - DNA, 15 bp, Homo sapiens
aggtgagattcacac

SEQ ID NO: 1731902 - DNA, 15 bp, Homo sapiens
ggtgagattcacacc

SEQ ID NO: 1731903 - DNA, 15 bp, Homo sapiens
gtgagattcacacca

SEQ ID NO: 1731904 - DNA, 15 bp, Homo sapiens
tgagattcacaccag

SEQ ID NO: 1731905 - DNA, 15 bp, Homo sapiens
gagattcacaccagg

SEQ ID NO: 1731906 - DNA, 15 bp, Homo sapiens
agattcacaccaggg

SEQ ID NO: 1731907 - DNA, 15 bp, Homo sapiens
gattcacaccagggt

SEQ ID NO: 1731908 - DNA, 15 bp, Homo sapiens
attcacaccagggtc

SEQ ID NO: 1731909 - DNA, 15 bp, Homo sapiens
ttcacaccagggtcc

SEQ ID NO: 1731910 - DNA, 15 bp, Homo sapiens
tcacaccagggtcca

SEQ ID NO: 1731911 - DNA, 15 bp, Homo sapiens
cacaccagggtccac

SEQ ID NO: 1731912 - DNA, 15 bp, Homo sapiens
acaccagggtccacc

SEQ ID NO: 1731913 - DNA, 15 bp, Homo sapiens
caccagggtccaccc

SEQ ID NO: 1731914 - DNA, 15 bp, Homo sapiens
accagggtccaccca

SEQ ID NO: 1731915 - DNA, 15 bp, Homo sapiens
ccagggtccacccag

SEQ ID NO: 1731916 - DNA, 15 bp, Homo sapiens
cagggtccacccagc

SEQ ID NO: 1731917 - DNA, 15 bp, Homo sapiens
agggtccacccagca

SEQ ID NO: 1731918 - DNA, 15 bp, Homo sapiens
gggtccacccagcat

SEQ ID NO: 1731919 - DNA, 15 bp, Homo sapiens
ggtccacccagcatc

SEQ ID NO: 1731920 - DNA, 15 bp, Homo sapiens
gtccacccagcatct

SEQ ID NO: 1731921 - DNA, 15 bp, Homo sapiens
tccacccagcatctc

SEQ ID NO: 1731922 - DNA, 15 bp, Homo sapiens
ccacccagcatctct

SEQ ID NO: 1731923 - DNA, 15 bp, Homo sapiens
cacccagcatctcta

SEQ ID NO: 1731924 - DNA, 15 bp, Homo sapiens
acccagcatctctac

SEQ ID NO: 1731925 - DNA, 15 bp, Homo sapiens
cccagcatctctact

SEQ ID NO: 1731926 - DNA, 15 bp, Homo sapiens
ccagcatctctactt

SEQ ID NO: 1731927 - DNA, 15 bp, Homo sapiens
cagcatctctactta

SEQ ID NO: 1731928 - DNA, 15 bp, Homo sapiens
agcatctctacttat

SEQ ID NO: 1731929 - DNA, 15 bp, Homo sapiens
gcatctctacttata

SEQ ID NO: 1731930 - DNA, 15 bp, Homo sapiens
catctctacttatac

SEQ ID NO: 1731931 - DNA, 15 bp, Homo sapiens
atctctacttatacc

SEQ ID NO: 1731932 - DNA, 15 bp, Homo sapiens
tctctacttatacca

SEQ ID NO: 1731933 - DNA, 15 bp, Homo sapiens
ctctacttataccat

SEQ ID NO: 1731934 - DNA, 15 bp, Homo sapiens
tctacttataccatg

SEQ ID NO: 1731935 - DNA, 15 bp, Homo sapiens
ctacttataccatgc

SEQ ID NO: 1731936 - DNA, 15 bp, Homo sapiens
tacttataccatgct

SEQ ID NO: 1731937 - DNA, 15 bp, Homo sapiens
acttataccatgctc

SEQ ID NO: 1731938 - DNA, 15 bp, Homo sapiens
cttataccatgctct

SEQ ID NO: 1731939 - DNA, 15 bp, Homo sapiens
ttataccatgctctg

SEQ ID NO: 1731940 - DNA, 15 bp, Homo sapiens
tataccatgctctgc

SEQ ID NO: 1731941 - DNA, 15 bp, Homo sapiens
ataccatgctctgct

SEQ ID NO: 1731942 - DNA, 15 bp, Homo sapiens
taccatgctctgctt

SEQ ID NO: 1731943 - DNA, 15 bp, Homo sapiens
accatgctctgcttt

SEQ ID NO: 1731944 - DNA, 15 bp, Homo sapiens
ccatgctctgcttta

SEQ ID NO: 1731945 - DNA, 15 bp, Homo sapiens
catgctctgctttaa

SEQ ID NO: 1731946 - DNA, 15 bp, Homo sapiens
atgctctgctttaag

SEQ ID NO: 1731947 - DNA, 15 bp, Homo sapiens
tgctctgctttaagg

SEQ ID NO: 1731948 - DNA, 15 bp, Homo sapiens
gctctgctttaaggt

SEQ ID NO: 1731949 - DNA, 15 bp, Homo sapiens
ctctgctttaaggtt

SEQ ID NO: 1731950 - DNA, 15 bp, Homo sapiens
tctgctttaaggttc

SEQ ID NO: 1731951 - DNA, 15 bp, Homo sapiens
ctgctttaaggttct

SEQ ID NO: 1731952 - DNA, 15 bp, Homo sapiens
tgctttaaggttctc

SEQ ID NO: 1731953 - DNA, 15 bp, Homo sapiens
gctttaaggttctct

SEQ ID NO: 1731954 - DNA, 15 bp, Homo sapiens
ctttaaggttctctg

SEQ ID NO: 1731955 - DNA, 15 bp, Homo sapiens
tttaaggttctctga

SEQ ID NO: 1731956 - DNA, 15 bp, Homo sapiens
ttaaggttctctgag

SEQ ID NO: 1731957 - DNA, 15 bp, Homo sapiens
taaggttctctgaga

SEQ ID NO: 1731958 - DNA, 15 bp, Homo sapiens
aaggttctctgagaa

SEQ ID NO: 1731959 - DNA, 15 bp, Homo sapiens
aggttctctgagaac

SEQ ID NO: 1731960 - DNA, 15 bp, Homo sapiens
ggttctctgagaact

SEQ ID NO: 1731961 - DNA, 15 bp, Homo sapiens
gttctctgagaactc

SEQ ID NO: 1731962 - DNA, 15 bp, Homo sapiens
ttctctgagaactca

SEQ ID NO: 1731963 - DNA, 15 bp, Homo sapiens
tctctgagaactcag

SEQ ID NO: 1731964 - DNA, 15 bp, Homo sapiens
ctctgagaactcaga

SEQ ID NO: 1731965 - DNA, 15 bp, Homo sapiens
tctgagaactcagac

SEQ ID NO: 1731966 - DNA, 15 bp, Homo sapiens
ctgagaactcagaca

SEQ ID NO: 1731967 - DNA, 15 bp, Homo sapiens
tgagaactcagacaa

SEQ ID NO: 1731968 - DNA, 15 bp, Homo sapiens
gagaactcagacaag

SEQ ID NO: 1731969 - DNA, 15 bp, Homo sapiens
agaactcagacaagc

SEQ ID NO: 1731970 - DNA, 15 bp, Homo sapiens
gaactcagacaagcc

SEQ ID NO: 1731971 - DNA, 15 bp, Homo sapiens
aactcagacaagcct

SEQ ID NO: 1731972 - DNA, 15 bp, Homo sapiens
actcagacaagcctt

SEQ ID NO: 1731973 - DNA, 15 bp, Homo sapiens
ctcagacaagccttg

SEQ ID NO: 1731974 - DNA, 15 bp, Homo sapiens
tcagacaagccttgg

SEQ ID NO: 1731975 - DNA, 15 bp, Homo sapiens
cagacaagccttggg

SEQ ID NO: 1731976 - DNA, 15 bp, Homo sapiens
agacaagccttgggc

SEQ ID NO: 1731977 - DNA, 15 bp, Homo sapiens
gacaagccttgggct

SEQ ID NO: 1731978 - DNA, 15 bp, Homo sapiens
acaagccttgggcta

SEQ ID NO: 1731979 - DNA, 15 bp, Homo sapiens
caagccttgggctaa

SEQ ID NO: 1731980 - DNA, 15 bp, Homo sapiens
aagccttgggctaac

SEQ ID NO: 1731981 - DNA, 15 bp, Homo sapiens
agccttgggctaaca

SEQ ID NO: 1731982 - DNA, 15 bp, Homo sapiens
gccttgggctaacaa

SEQ ID NO: 1731983 - DNA, 15 bp, Homo sapiens
taaagcaaatacttt

SEQ ID NO: 1731984 - DNA, 15 bp, Homo sapiens
aaagcaaatacttta

SEQ ID NO: 1731985 - DNA, 15 bp, Homo sapiens
aagcaaatactttaa

SEQ ID NO: 1731986 - DNA, 15 bp, Homo sapiens
agcaaatactttaag

SEQ ID NO: 1731987 - DNA, 15 bp, Homo sapiens
gcaaatactttaaga

SEQ ID NO: 1731988 - DNA, 15 bp, Homo sapiens
caaatactttaagat

SEQ ID NO: 1731989 - DNA, 15 bp, Homo sapiens
aaatactttaagatt

SEQ ID NO: 1731990 - DNA, 15 bp, Homo sapiens
aatactttaagattg

SEQ ID NO: 1731991 - DNA, 15 bp, Homo sapiens
atactttaagattgt

SEQ ID NO: 1731992 - DNA, 15 bp, Homo sapiens
tactttaagattgtc

SEQ ID NO: 1731993 - DNA, 15 bp, Homo sapiens
actttaagattgtct

SEQ ID NO: 1731994 - DNA, 15 bp, Homo sapiens
ctttaagattgtcta

SEQ ID NO: 1731995 - DNA, 15 bp, Homo sapiens
tttaagattgtctag

SEQ ID NO: 1731996 - DNA, 15 bp, Homo sapiens
ttaagattgtctagc

SEQ ID NO: 1731997 - DNA, 15 bp, Homo sapiens
taagattgtctagct

SEQ ID NO: 1731998 - DNA, 15 bp, Homo sapiens
aagattgtctagcta

SEQ ID NO: 1731999 - DNA, 15 bp, Homo sapiens
agattgtctagctag

SEQ ID NO: 1732000 - DNA, 15 bp, Homo sapiens
gattgtctagctagg

SEQ ID NO: 1732001 - DNA, 15 bp, Homo sapiens
attgtctagctaggc

SEQ ID NO: 1732002 - DNA, 15 bp, Homo sapiens
ttgtctagctaggcg

SEQ ID NO: 1732003 - DNA, 15 bp, Homo sapiens
tgtctagctaggcga

SEQ ID NO: 1732004 - DNA, 15 bp, Homo sapiens
gtctagctaggcgag

SEQ ID NO: 1732005 - DNA, 15 bp, Homo sapiens
tctagctaggcgagc

SEQ ID NO: 1732006 - DNA, 15 bp, Homo sapiens
ctagctaggcgagct

SEQ ID NO: 1732007 - DNA, 15 bp, Homo sapiens
tagctaggcgagctg

SEQ ID NO: 1732008 - DNA, 15 bp, Homo sapiens
agctaggcgagctga

SEQ ID NO: 1732009 - DNA, 15 bp, Homo sapiens
gctaggcgagctgac

SEQ ID NO: 1732010 - DNA, 15 bp, Homo sapiens
ctaggcgagctgact

SEQ ID NO: 1732011 - DNA, 15 bp, Homo sapiens
taggcgagctgactc

SEQ ID NO: 1732012 - DNA, 15 bp, Homo sapiens
aggcgagctgactca

SEQ ID NO: 1732013 - DNA, 15 bp, Homo sapiens
ggcgagctgactcat

SEQ ID NO: 1732014 - DNA, 15 bp, Homo sapiens
gcgagctgactcata

SEQ ID NO: 1732015 - DNA, 15 bp, Homo sapiens
cgagctgactcatac

SEQ ID NO: 1732016 - DNA, 15 bp, Homo sapiens
gagctgactcatact

SEQ ID NO: 1732017 - DNA, 15 bp, Homo sapiens
agctgactcatactt

SEQ ID NO: 1732018 - DNA, 15 bp, Homo sapiens
gctgactcatacttg

SEQ ID NO: 1732019 - DNA, 15 bp, Homo sapiens
ctgactcatacttgt

SEQ ID NO: 1732020 - DNA, 15 bp, Homo sapiens
tgactcatacttgta

SEQ ID NO: 1732021 - DNA, 15 bp, Homo sapiens
gactcatacttgtaa

SEQ ID NO: 1732022 - DNA, 15 bp, Homo sapiens
actcatacttgtaat

SEQ ID NO: 1732023 - DNA, 15 bp, Homo sapiens
ctcatacttgtaatc

SEQ ID NO: 1732024 - DNA, 15 bp, Homo sapiens
tcatacttgtaatcc

SEQ ID NO: 1732025 - DNA, 15 bp, Homo sapiens
catacttgtaatccc

SEQ ID NO: 1732026 - DNA, 15 bp, Homo sapiens
atacttgtaatccca

SEQ ID NO: 1732027 - DNA, 15 bp, Homo sapiens
tacttgtaatcccag

SEQ ID NO: 1732028 - DNA, 15 bp, Homo sapiens
gcactttgggagact

SEQ ID NO: 1732029 - DNA, 15 bp, Homo sapiens
cactttgggagactg

SEQ ID NO: 1732030 - DNA, 15 bp, Homo sapiens
actttgggagactga

SEQ ID NO: 1732031 - DNA, 15 bp, Homo sapiens
ttgggagactgaggt

SEQ ID NO: 1732032 - DNA, 15 bp, Homo sapiens
tgggagactgaggtg

SEQ ID NO: 1732033 - DNA, 15 bp, Homo sapiens
gggagactgaggtgg

SEQ ID NO: 1732034 - DNA, 15 bp, Homo sapiens
actgaggtgggaggg

SEQ ID NO: 1732035 - DNA, 15 bp, Homo sapiens
ctgaggtgggagggt

SEQ ID NO: 1732036 - DNA, 15 bp, Homo sapiens
tgaggtgggagggtt

SEQ ID NO: 1732037 - DNA, 15 bp, Homo sapiens
gaggtgggagggttg

SEQ ID NO: 1732038 - DNA, 15 bp, Homo sapiens
aggtgggagggttgc

SEQ ID NO: 1732039 - DNA, 15 bp, Homo sapiens
ggtgggagggttgct

SEQ ID NO: 1732040 - DNA, 15 bp, Homo sapiens
gtgggagggttgctt

SEQ ID NO: 1732041 - DNA, 15 bp, Homo sapiens
tgggagggttgcttg

SEQ ID NO: 1732042 - DNA, 15 bp, Homo sapiens
gggagggttgcttga

SEQ ID NO: 1732043 - DNA, 15 bp, Homo sapiens
ggagggttgcttgag

SEQ ID NO: 1732044 - DNA, 15 bp, Homo sapiens
gagggttgcttgagc

SEQ ID NO: 1732045 - DNA, 15 bp, Homo sapiens
agggttgcttgagca

SEQ ID NO: 1732046 - DNA, 15 bp, Homo sapiens
gggttgcttgagcac

SEQ ID NO: 1732047 - DNA, 15 bp, Homo sapiens
ggttgcttgagcaca

SEQ ID NO: 1732048 - DNA, 15 bp, Homo sapiens
gttgcttgagcacaa

SEQ ID NO: 1732049 - DNA, 15 bp, Homo sapiens
ttgcttgagcacaag

SEQ ID NO: 1732050 - DNA, 15 bp, Homo sapiens
tgcttgagcacaaga

SEQ ID NO: 1732051 - DNA, 15 bp, Homo sapiens
gcttgagcacaagag

SEQ ID NO: 1732052 - DNA, 15 bp, Homo sapiens
cttgagcacaagagt

SEQ ID NO: 1732053 - DNA, 15 bp, Homo sapiens
ttgagcacaagagtt

SEQ ID NO: 1732054 - DNA, 15 bp, Homo sapiens
tgagcacaagagttt

SEQ ID NO: 1732055 - DNA, 15 bp, Homo sapiens
gagcacaagagtttg

SEQ ID NO: 1732056 - DNA, 15 bp, Homo sapiens
agcacaagagtttga

SEQ ID NO: 1732057 - DNA, 15 bp, Homo sapiens
gcacaagagtttgag

SEQ ID NO: 1732058 - DNA, 15 bp, Homo sapiens
cacaagagtttgaga

SEQ ID NO: 1732059 - DNA, 15 bp, Homo sapiens
acaagagtttgagac

SEQ ID NO: 1732060 - DNA, 15 bp, Homo sapiens
agagtttgagaccag

SEQ ID NO: 1732061 - DNA, 15 bp, Homo sapiens
gaccagcctggacaa

SEQ ID NO: 1732062 - DNA, 15 bp, Homo sapiens
accagcctggacaac

SEQ ID NO: 1732063 - DNA, 15 bp, Homo sapiens
cagcctggacaacat

SEQ ID NO: 1732064 - DNA, 15 bp, Homo sapiens
agcctggacaacata

SEQ ID NO: 1732065 - DNA, 15 bp, Homo sapiens
gcctggacaacatag

SEQ ID NO: 1732066 - DNA, 15 bp, Homo sapiens
cctggacaacatagt

SEQ ID NO: 1732067 - DNA, 15 bp, Homo sapiens
ctggacaacatagtg

SEQ ID NO: 1732068 - DNA, 15 bp, Homo sapiens
tggacaacatagtga

SEQ ID NO: 1732069 - DNA, 15 bp, Homo sapiens
ggacaacatagtgag

SEQ ID NO: 1732070 - DNA, 15 bp, Homo sapiens
gacaacatagtgaga

SEQ ID NO: 1732071 - DNA, 15 bp, Homo sapiens
acaacatagtgagat

SEQ ID NO: 1732072 - DNA, 15 bp, Homo sapiens
caacatagtgagatc

SEQ ID NO: 1732073 - DNA, 15 bp, Homo sapiens
aacatagtgagatct

SEQ ID NO: 1732074 - DNA, 15 bp, Homo sapiens
acatagtgagatctc

SEQ ID NO: 1732075 - DNA, 15 bp, Homo sapiens
catagtgagatctca

SEQ ID NO: 1732076 - DNA, 15 bp, Homo sapiens
atagtgagatctcat

SEQ ID NO: 1732077 - DNA, 15 bp, Homo sapiens
tagtgagatctcatc

SEQ ID NO: 1732078 - DNA, 15 bp, Homo sapiens
agtgagatctcatct

SEQ ID NO: 1732079 - DNA, 15 bp, Homo sapiens
gtgagatctcatctc

SEQ ID NO: 1732080 - DNA, 15 bp, Homo sapiens
tgagatctcatctct

SEQ ID NO: 1732081 - DNA, 15 bp, Homo sapiens
gagatctcatctcta

SEQ ID NO: 1732082 - DNA, 15 bp, Homo sapiens
agatctcatctctac

SEQ ID NO: 1732083 - DNA, 15 bp, Homo sapiens
gatctcatctctaca

SEQ ID NO: 1732084 - DNA, 15 bp, Homo sapiens
atctcatctctacaa

SEQ ID NO: 1732085 - DNA, 15 bp, Homo sapiens
tctcatctctacaaa

SEQ ID NO: 1732086 - DNA, 15 bp, Homo sapiens
tcatctctacaaaat

SEQ ID NO: 1732087 - DNA, 15 bp, Homo sapiens
ctctacaaaataata

SEQ ID NO: 1732088 - DNA, 15 bp, Homo sapiens
tctacaaaataataa

SEQ ID NO: 1732089 - DNA, 15 bp, Homo sapiens
ctacaaaataataaa

SEQ ID NO: 1732090 - DNA, 15 bp, Homo sapiens
tacaaaataataaaa

SEQ ID NO: 1732091 - DNA, 15 bp, Homo sapiens
acaaaataataaaaa

SEQ ID NO: 1732092 - DNA, 15 bp, Homo sapiens
caaaataataaaaat

SEQ ID NO: 1732093 - DNA, 15 bp, Homo sapiens
aaataataaaaataa

SEQ ID NO: 1732094 - DNA, 15 bp, Homo sapiens
aataataaaaataaa

SEQ ID NO: 1732095 - DNA, 15 bp, Homo sapiens
ataataaaaataaaa

SEQ ID NO: 1732096 - DNA, 15 bp, Homo sapiens
ataaaaataaaaatc

SEQ ID NO: 1732097 - DNA, 15 bp, Homo sapiens
taaaaataaaaatct

SEQ ID NO: 1732098 - DNA, 15 bp, Homo sapiens
aaaaataaaaatctt

SEQ ID NO: 1732099 - DNA, 15 bp, Homo sapiens
aaaataaaaatctta

SEQ ID NO: 1732100 - DNA, 15 bp, Homo sapiens
aaataaaaatcttaa

SEQ ID NO: 1732101 - DNA, 15 bp, Homo sapiens
aataaaaatcttaaa

SEQ ID NO: 1732102 - DNA, 15 bp, Homo sapiens
ataaaaatcttaaaa

SEQ ID NO: 1732103 - DNA, 15 bp, Homo sapiens
taaaaatcttaaaaa

SEQ ID NO: 1732104 - DNA, 15 bp, Homo sapiens
aaaaatcttaaaaaa

SEQ ID NO: 1732105 - DNA, 15 bp, Homo sapiens
aaaatcttaaaaaat

SEQ ID NO: 1732106 - DNA, 15 bp, Homo sapiens
aaatcttaaaaaata

SEQ ID NO: 1732107 - DNA, 15 bp, Homo sapiens
aatcttaaaaaatag

SEQ ID NO: 1732108 - DNA, 15 bp, Homo sapiens
atcttaaaaaatagc

SEQ ID NO: 1732109 - DNA, 15 bp, Homo sapiens
tcttaaaaaatagca

SEQ ID NO: 1732110 - DNA, 15 bp, Homo sapiens
cttaaaaaatagcat

SEQ ID NO: 1732111 - DNA, 15 bp, Homo sapiens
ttaaaaaatagcata

SEQ ID NO: 1732112 - DNA, 15 bp, Homo sapiens
taaaaaatagcatat

SEQ ID NO: 1732113 - DNA, 15 bp, Homo sapiens
aaaaaatagcatatg

SEQ ID NO: 1732114 - DNA, 15 bp, Homo sapiens
aaaaatagcatatgt

SEQ ID NO: 1732115 - DNA, 15 bp, Homo sapiens
aaaatagcatatgtc

SEQ ID NO: 1732116 - DNA, 15 bp, Homo sapiens
aaatagcatatgtca

SEQ ID NO: 1732117 - DNA, 15 bp, Homo sapiens
aatagcatatgtcat

SEQ ID NO: 1732118 - DNA, 15 bp, Homo sapiens
atagcatatgtcatg

SEQ ID NO: 1732119 - DNA, 15 bp, Homo sapiens
tagcatatgtcatgg

SEQ ID NO: 1732120 - DNA, 15 bp, Homo sapiens
agcatatgtcatggc

SEQ ID NO: 1732121 - DNA, 15 bp, Homo sapiens
gcatatgtcatggca

SEQ ID NO: 1732122 - DNA, 15 bp, Homo sapiens
catatgtcatggcat

SEQ ID NO: 1732123 - DNA, 15 bp, Homo sapiens
atatgtcatggcatg

SEQ ID NO: 1732124 - DNA, 15 bp, Homo sapiens
tatgtcatggcatga

SEQ ID NO: 1732125 - DNA, 15 bp, Homo sapiens
atgtcatggcatgaa

SEQ ID NO: 1732126 - DNA, 15 bp, Homo sapiens
tgtcatggcatgaac

SEQ ID NO: 1732127 - DNA, 15 bp, Homo sapiens
gtcatggcatgaacc

SEQ ID NO: 1732128 - DNA, 15 bp, Homo sapiens
tcatggcatgaacct

SEQ ID NO: 1732129 - DNA, 15 bp, Homo sapiens
catggcatgaacctg

SEQ ID NO: 1732130 - DNA, 15 bp, Homo sapiens
atggcatgaacctgt

SEQ ID NO: 1732131 - DNA, 15 bp, Homo sapiens
tggcatgaacctgta

SEQ ID NO: 1732132 - DNA, 15 bp, Homo sapiens
ggcatgaacctgtag

SEQ ID NO: 1732133 - DNA, 15 bp, Homo sapiens
gcatgaacctgtagt

SEQ ID NO: 1732134 - DNA, 15 bp, Homo sapiens
catgaacctgtagtc

SEQ ID NO: 1732135 - DNA, 15 bp, Homo sapiens
atgaacctgtagtcc

SEQ ID NO: 1732136 - DNA, 15 bp, Homo sapiens
tgaacctgtagtccc

SEQ ID NO: 1732137 - DNA, 15 bp, Homo sapiens
gaacctgtagtccca

SEQ ID NO: 1732138 - DNA, 15 bp, Homo sapiens
aacctgtagtcccag

SEQ ID NO: 1732139 - DNA, 15 bp, Homo sapiens
gctgaggcaggaggg

SEQ ID NO: 1732140 - DNA, 15 bp, Homo sapiens
ctgaggcaggagggt

SEQ ID NO: 1732141 - DNA, 15 bp, Homo sapiens
tgaggcaggagggtc

SEQ ID NO: 1732142 - DNA, 15 bp, Homo sapiens
gaggcaggagggtct

SEQ ID NO: 1732143 - DNA, 15 bp, Homo sapiens
aggcaggagggtctt

SEQ ID NO: 1732144 - DNA, 15 bp, Homo sapiens
ggcaggagggtctta

SEQ ID NO: 1732145 - DNA, 15 bp, Homo sapiens
gcaggagggtcttag

SEQ ID NO: 1732146 - DNA, 15 bp, Homo sapiens
caggagggtcttagg

SEQ ID NO: 1732147 - DNA, 15 bp, Homo sapiens
aggagggtcttagga

SEQ ID NO: 1732148 - DNA, 15 bp, Homo sapiens
ggagggtcttaggag

SEQ ID NO: 1732149 - DNA, 15 bp, Homo sapiens
gagggtcttaggagt

SEQ ID NO: 1732150 - DNA, 15 bp, Homo sapiens
agggtcttaggagtc

SEQ ID NO: 1732151 - DNA, 15 bp, Homo sapiens
gggtcttaggagtct

SEQ ID NO: 1732152 - DNA, 15 bp, Homo sapiens
ggtcttaggagtctg

SEQ ID NO: 1732153 - DNA, 15 bp, Homo sapiens
gtcttaggagtctga

SEQ ID NO: 1732154 - DNA, 15 bp, Homo sapiens
tcttaggagtctgag

SEQ ID NO: 1732155 - DNA, 15 bp, Homo sapiens
cttaggagtctgagg

SEQ ID NO: 1732156 - DNA, 15 bp, Homo sapiens
ttaggagtctgaggc

SEQ ID NO: 1732157 - DNA, 15 bp, Homo sapiens
taggagtctgaggct

SEQ ID NO: 1732158 - DNA, 15 bp, Homo sapiens
aggagtctgaggctg

SEQ ID NO: 1732159 - DNA, 15 bp, Homo sapiens
ggagtctgaggctgc

SEQ ID NO: 1732160 - DNA, 15 bp, Homo sapiens
gagtctgaggctgca

SEQ ID NO: 1732161 - DNA, 15 bp, Homo sapiens
agtctgaggctgcag

SEQ ID NO: 1732162 - DNA, 15 bp, Homo sapiens
gtctgaggctgcagt

SEQ ID NO: 1732163 - DNA, 15 bp, Homo sapiens
tctgaggctgcagtg

SEQ ID NO: 1732164 - DNA, 15 bp, Homo sapiens
ctgaggctgcagtga

SEQ ID NO: 1732165 - DNA, 15 bp, Homo sapiens
gaggctgcagtgagt

SEQ ID NO: 1732166 - DNA, 15 bp, Homo sapiens
aggctgcagtgagtt

SEQ ID NO: 1732167 - DNA, 15 bp, Homo sapiens
ggctgcagtgagtta

SEQ ID NO: 1732168 - DNA, 15 bp, Homo sapiens
gctgcagtgagttat

SEQ ID NO: 1732169 - DNA, 15 bp, Homo sapiens
ctgcagtgagttatg

SEQ ID NO: 1732170 - DNA, 15 bp, Homo sapiens
tgcagtgagttatga

SEQ ID NO: 1732171 - DNA, 15 bp, Homo sapiens
gcagtgagttatgat

SEQ ID NO: 1732172 - DNA, 15 bp, Homo sapiens
cagtgagttatgatc

SEQ ID NO: 1732173 - DNA, 15 bp, Homo sapiens
agtgagttatgatca

SEQ ID NO: 1732174 - DNA, 15 bp, Homo sapiens
gtgagttatgatcac

SEQ ID NO: 1732175 - DNA, 15 bp, Homo sapiens
tgagttatgatcaca

SEQ ID NO: 1732176 - DNA, 15 bp, Homo sapiens
gagttatgatcacac

SEQ ID NO: 1732177 - DNA, 15 bp, Homo sapiens
agttatgatcacacc

SEQ ID NO: 1732178 - DNA, 15 bp, Homo sapiens
gttatgatcacacca

SEQ ID NO: 1732179 - DNA, 15 bp, Homo sapiens
ttatgatcacaccac

SEQ ID NO: 1732180 - DNA, 15 bp, Homo sapiens
tatgatcacaccact

SEQ ID NO: 1732181 - DNA, 15 bp, Homo sapiens
atgatcacaccactg

SEQ ID NO: 1732182 - DNA, 15 bp, Homo sapiens
ctccagcctgggtgg

SEQ ID NO: 1732183 - DNA, 15 bp, Homo sapiens
tccagcctgggtggc

SEQ ID NO: 1732184 - DNA, 15 bp, Homo sapiens
ccagcctgggtggca

SEQ ID NO: 1732185 - DNA, 15 bp, Homo sapiens
cagcctgggtggcag

SEQ ID NO: 1732186 - DNA, 15 bp, Homo sapiens
agcctgggtggcaga

SEQ ID NO: 1732187 - DNA, 15 bp, Homo sapiens
gcctgggtggcagag

SEQ ID NO: 1732188 - DNA, 15 bp, Homo sapiens
cctgggtggcagagc

SEQ ID NO: 1732189 - DNA, 15 bp, Homo sapiens
ctgggtggcagagca

SEQ ID NO: 1732190 - DNA, 15 bp, Homo sapiens
tgggtggcagagcaa

SEQ ID NO: 1732191 - DNA, 15 bp, Homo sapiens
gggtggcagagcaag

SEQ ID NO: 1732192 - DNA, 15 bp, Homo sapiens
ggtggcagagcaaga

SEQ ID NO: 1732193 - DNA, 15 bp, Homo sapiens
gtggcagagcaagac

SEQ ID NO: 1732194 - DNA, 15 bp, Homo sapiens
tggcagagcaagacc

SEQ ID NO: 1732195 - DNA, 15 bp, Homo sapiens
ggcagagcaagaccc

SEQ ID NO: 1732196 - DNA, 15 bp, Homo sapiens
gcagagcaagaccct

SEQ ID NO: 1732197 - DNA, 15 bp, Homo sapiens
ccctgtctcaaaaac

SEQ ID NO: 1732198 - DNA, 15 bp, Homo sapiens
cctgtctcaaaaaca

SEQ ID NO: 1732199 - DNA, 15 bp, Homo sapiens
ctgtctcaaaaacaa

SEQ ID NO: 1732200 - DNA, 15 bp, Homo sapiens
tgtctcaaaaacaac

SEQ ID NO: 1732201 - DNA, 15 bp, Homo sapiens
gtctcaaaaacaacg

SEQ ID NO: 1732202 - DNA, 15 bp, Homo sapiens
tctcaaaaacaacga

SEQ ID NO: 1732203 - DNA, 15 bp, Homo sapiens
ctcaaaaacaacgac

SEQ ID NO: 1732204 - DNA, 15 bp, Homo sapiens
tcaaaaacaacgaca

SEQ ID NO: 1732205 - DNA, 15 bp, Homo sapiens
caaaaacaacgacaa

SEQ ID NO: 1732206 - DNA, 15 bp, Homo sapiens
aaaaacaacgacaac

SEQ ID NO: 1732207 - DNA, 15 bp, Homo sapiens
aaaacaacgacaaca

SEQ ID NO: 1732208 - DNA, 15 bp, Homo sapiens
aaacaacgacaacaa

SEQ ID NO: 1732209 - DNA, 15 bp, Homo sapiens
aacaacgacaacaaa

SEQ ID NO: 1732210 - DNA, 15 bp, Homo sapiens
acaacgacaacaaaa

SEQ ID NO: 1732211 - DNA, 15 bp, Homo sapiens
caacgacaacaaaaa

SEQ ID NO: 1732212 - DNA, 15 bp, Homo sapiens
aacgacaacaaaaaa

SEQ ID NO: 1732213 - DNA, 15 bp, Homo sapiens
acgacaacaaaaaac

SEQ ID NO: 1732214 - DNA, 15 bp, Homo sapiens
cgacaacaaaaaact

SEQ ID NO: 1732215 - DNA, 15 bp, Homo sapiens
gacaacaaaaaactg

SEQ ID NO: 1732216 - DNA, 15 bp, Homo sapiens
acaacaaaaaactgt

SEQ ID NO: 1732217 - DNA, 15 bp, Homo sapiens
caacaaaaaactgtc

SEQ ID NO: 1732218 - DNA, 15 bp, Homo sapiens
aacaaaaaactgtct

SEQ ID NO: 1732219 - DNA, 15 bp, Homo sapiens
acaaaaaactgtctg

SEQ ID NO: 1732220 - DNA, 15 bp, Homo sapiens
caaaaaactgtctgc

SEQ ID NO: 1732221 - DNA, 15 bp, Homo sapiens
aaaaaactgtctgca

SEQ ID NO: 1732222 - DNA, 15 bp, Homo sapiens
aaaaactgtctgcag

SEQ ID NO: 1732223 - DNA, 15 bp, Homo sapiens
aaaactgtctgcaga

SEQ ID NO: 1732224 - DNA, 15 bp, Homo sapiens
aaactgtctgcagac

SEQ ID NO: 1732225 - DNA, 15 bp, Homo sapiens
aactgtctgcagaca

SEQ ID NO: 1732226 - DNA, 15 bp, Homo sapiens
actgtctgcagacag

SEQ ID NO: 1732227 - DNA, 15 bp, Homo sapiens
ctgtctgcagacagc

SEQ ID NO: 1732228 - DNA, 15 bp, Homo sapiens
tgtctgcagacagca

SEQ ID NO: 1732229 - DNA, 15 bp, Homo sapiens
gtctgcagacagcaa

SEQ ID NO: 1732230 - DNA, 15 bp, Homo sapiens
tctgcagacagcaat

SEQ ID NO: 1732231 - DNA, 15 bp, Homo sapiens
ctgcagacagcaata

SEQ ID NO: 1732232 - DNA, 15 bp, Homo sapiens
tgcagacagcaataa

SEQ ID NO: 1732233 - DNA, 15 bp, Homo sapiens
gcagacagcaataaa

SEQ ID NO: 1732234 - DNA, 15 bp, Homo sapiens
cagacagcaataaat

SEQ ID NO: 1732235 - DNA, 15 bp, Homo sapiens
agacagcaataaatt

SEQ ID NO: 1732236 - DNA, 15 bp, Homo sapiens
gacagcaataaattg

SEQ ID NO: 1732237 - DNA, 15 bp, Homo sapiens
acagcaataaattgt

SEQ ID NO: 1732238 - DNA, 15 bp, Homo sapiens
cagcaataaattgtc

SEQ ID NO: 1732239 - DNA, 15 bp, Homo sapiens
agcaataaattgtcc

SEQ ID NO: 1732240 - DNA, 15 bp, Homo sapiens
gcaataaattgtcct

SEQ ID NO: 1732241 - DNA, 15 bp, Homo sapiens
caataaattgtcctt

SEQ ID NO: 1732242 - DNA, 15 bp, Homo sapiens
aataaattgtccttg

SEQ ID NO: 1732243 - DNA, 15 bp, Homo sapiens
ataaattgtccttgc

SEQ ID NO: 1732244 - DNA, 15 bp, Homo sapiens
taaattgtccttgct

SEQ ID NO: 1732245 - DNA, 15 bp, Homo sapiens
aaattgtccttgctg

SEQ ID NO: 1732246 - DNA, 15 bp, Homo sapiens
aattgtccttgctgc

SEQ ID NO: 1732247 - DNA, 15 bp, Homo sapiens
attgtccttgctgca

SEQ ID NO: 1732248 - DNA, 15 bp, Homo sapiens
ttgtccttgctgcac

SEQ ID NO: 1732249 - DNA, 15 bp, Homo sapiens
tgtccttgctgcacc

SEQ ID NO: 1732250 - DNA, 15 bp, Homo sapiens
gtccttgctgcacct

SEQ ID NO: 1732251 - DNA, 15 bp, Homo sapiens
tccttgctgcacctg

SEQ ID NO: 1732252 - DNA, 15 bp, Homo sapiens
ccttgctgcacctgt

SEQ ID NO: 1732253 - DNA, 15 bp, Homo sapiens
cttgctgcacctgtg

SEQ ID NO: 1732254 - DNA, 15 bp, Homo sapiens
ttgctgcacctgtgc

SEQ ID NO: 1732255 - DNA, 15 bp, Homo sapiens
tgctgcacctgtgct

SEQ ID NO: 1732256 - DNA, 15 bp, Homo sapiens
gctgcacctgtgctg

SEQ ID NO: 1732257 - DNA, 15 bp, Homo sapiens
ctgcacctgtgctgt

SEQ ID NO: 1732258 - DNA, 15 bp, Homo sapiens
tgcacctgtgctgta

SEQ ID NO: 1732259 - DNA, 15 bp, Homo sapiens
gcacctgtgctgtat

SEQ ID NO: 1732260 - DNA, 15 bp, Homo sapiens
cacctgtgctgtata

SEQ ID NO: 1732261 - DNA, 15 bp, Homo sapiens
acctgtgctgtataa

SEQ ID NO: 1732262 - DNA, 15 bp, Homo sapiens
cctgtgctgtataag

SEQ ID NO: 1732263 - DNA, 15 bp, Homo sapiens
ctgtgctgtataagt

SEQ ID NO: 1732264 - DNA, 15 bp, Homo sapiens
tgtgctgtataagtt

SEQ ID NO: 1732265 - DNA, 15 bp, Homo sapiens
gtgctgtataagttt

SEQ ID NO: 1732266 - DNA, 15 bp, Homo sapiens
tgctgtataagtttg

SEQ ID NO: 1732267 - DNA, 15 bp, Homo sapiens
gctgtataagtttgg

SEQ ID NO: 1732268 - DNA, 15 bp, Homo sapiens
ctgtataagtttggc

SEQ ID NO: 1732269 - DNA, 15 bp, Homo sapiens
tgtataagtttggct

SEQ ID NO: 1732270 - DNA, 15 bp, Homo sapiens
gtataagtttggctt

SEQ ID NO: 1732271 - DNA, 15 bp, Homo sapiens
tataagtttggctta

SEQ ID NO: 1732272 - DNA, 15 bp, Homo sapiens
ataagtttggcttat

SEQ ID NO: 1732273 - DNA, 15 bp, Homo sapiens
taagtttggcttatt

SEQ ID NO: 1732274 - DNA, 15 bp, Homo sapiens
aagtttggcttatta

SEQ ID NO: 1732275 - DNA, 15 bp, Homo sapiens
agtttggcttattat

SEQ ID NO: 1732276 - DNA, 15 bp, Homo sapiens
gtttggcttattata

SEQ ID NO: 1732277 - DNA, 15 bp, Homo sapiens
tttggcttattatag

SEQ ID NO: 1732278 - DNA, 15 bp, Homo sapiens
ttggcttattatagt

SEQ ID NO: 1732279 - DNA, 15 bp, Homo sapiens
tggcttattatagtc

SEQ ID NO: 1732280 - DNA, 15 bp, Homo sapiens
ggcttattatagtca

SEQ ID NO: 1732281 - DNA, 15 bp, Homo sapiens
gcttattatagtcaa

SEQ ID NO: 1732282 - DNA, 15 bp, Homo sapiens
cttattatagtcaat

SEQ ID NO: 1732283 - DNA, 15 bp, Homo sapiens
ttattatagtcaatg

SEQ ID NO: 1732284 - DNA, 15 bp, Homo sapiens
tattatagtcaatga

SEQ ID NO: 1732285 - DNA, 15 bp, Homo sapiens
attatagtcaatgac

SEQ ID NO: 1732286 - DNA, 15 bp, Homo sapiens
ttatagtcaatgacc

SEQ ID NO: 1732287 - DNA, 15 bp, Homo sapiens
tatagtcaatgaccc

SEQ ID NO: 1732288 - DNA, 15 bp, Homo sapiens
atagtcaatgaccca

SEQ ID NO: 1732289 - DNA, 15 bp, Homo sapiens
tagtcaatgacccac

SEQ ID NO: 1732290 - DNA, 15 bp, Homo sapiens
agtcaatgacccaca

SEQ ID NO: 1732291 - DNA, 15 bp, Homo sapiens
gtcaatgacccacat

SEQ ID NO: 1732292 - DNA, 15 bp, Homo sapiens
tcaatgacccacatt

SEQ ID NO: 1732293 - DNA, 15 bp, Homo sapiens
caatgacccacattc

SEQ ID NO: 1732294 - DNA, 15 bp, Homo sapiens
aatgacccacattct

SEQ ID NO: 1732295 - DNA, 15 bp, Homo sapiens
atgacccacattctt

SEQ ID NO: 1732296 - DNA, 15 bp, Homo sapiens
tgacccacattctta

SEQ ID NO: 1732297 - DNA, 15 bp, Homo sapiens
gacccacattcttaa

SEQ ID NO: 1732298 - DNA, 15 bp, Homo sapiens
acccacattcttaag

SEQ ID NO: 1732299 - DNA, 15 bp, Homo sapiens
cccacattcttaaga

SEQ ID NO: 1732300 - DNA, 15 bp, Homo sapiens
ccacattcttaagat

SEQ ID NO: 1732301 - DNA, 15 bp, Homo sapiens
cacattcttaagatg

SEQ ID NO: 1732302 - DNA, 15 bp, Homo sapiens
acattcttaagatgg

SEQ ID NO: 1732303 - DNA, 15 bp, Homo sapiens
cattcttaagatgga

SEQ ID NO: 1732304 - DNA, 15 bp, Homo sapiens
attcttaagatggat

SEQ ID NO: 1732305 - DNA, 15 bp, Homo sapiens
ttcttaagatggatg

SEQ ID NO: 1732306 - DNA, 15 bp, Homo sapiens
tcttaagatggatga

SEQ ID NO: 1732307 - DNA, 15 bp, Homo sapiens
cttaagatggatgat

SEQ ID NO: 1732308 - DNA, 15 bp, Homo sapiens
ttaagatggatgatt

SEQ ID NO: 1732309 - DNA, 15 bp, Homo sapiens
taagatggatgattt

SEQ ID NO: 1732310 - DNA, 15 bp, Homo sapiens
aagatggatgatttt

SEQ ID NO: 1732311 - DNA, 15 bp, Homo sapiens
agatggatgattttt

SEQ ID NO: 1732312 - DNA, 15 bp, Homo sapiens
gatggatgatttttt

SEQ ID NO: 1732313 - DNA, 15 bp, Homo sapiens
atggatgatttttta

SEQ ID NO: 1732314 - DNA, 15 bp, Homo sapiens
tggatgattttttaa

SEQ ID NO: 1732315 - DNA, 15 bp, Homo sapiens
ggatgattttttaaa

SEQ ID NO: 1732316 - DNA, 15 bp, Homo sapiens
gatgattttttaaaa

SEQ ID NO: 1732317 - DNA, 15 bp, Homo sapiens
atgattttttaaaaa

SEQ ID NO: 1732318 - DNA, 15 bp, Homo sapiens
tgattttttaaaaag

SEQ ID NO: 1732319 - DNA, 15 bp, Homo sapiens
gattttttaaaaagt

SEQ ID NO: 1732320 - DNA, 15 bp, Homo sapiens
attttttaaaaagta

SEQ ID NO: 1732321 - DNA, 15 bp, Homo sapiens
ttttttaaaaagtag

SEQ ID NO: 1732322 - DNA, 15 bp, Homo sapiens
tttttaaaaagtaga

SEQ ID NO: 1732323 - DNA, 15 bp, Homo sapiens
ttttaaaaagtagag

SEQ ID NO: 1732324 - DNA, 15 bp, Homo sapiens
tttaaaaagtagaga

SEQ ID NO: 1732325 - DNA, 15 bp, Homo sapiens
ttaaaaagtagagac

SEQ ID NO: 1732326 - DNA, 15 bp, Homo sapiens
taaaaagtagagaca

SEQ ID NO: 1732327 - DNA, 15 bp, Homo sapiens
aaaaagtagagacag

SEQ ID NO: 1732328 - DNA, 15 bp, Homo sapiens
aaaagtagagacagg

SEQ ID NO: 1732329 - DNA, 15 bp, Homo sapiens
aaagtagagacaggc

SEQ ID NO: 1732330 - DNA, 15 bp, Homo sapiens
aagtagagacaggct

SEQ ID NO: 1732331 - DNA, 15 bp, Homo sapiens
agtagagacaggctg

SEQ ID NO: 1732332 - DNA, 15 bp, Homo sapiens
gtagagacaggctgg

SEQ ID NO: 1732333 - DNA, 15 bp, Homo sapiens
tagagacaggctggc

SEQ ID NO: 1732334 - DNA, 15 bp, Homo sapiens
agagacaggctggcg

SEQ ID NO: 1732335 - DNA, 15 bp, Homo sapiens
gagacaggctggcga

SEQ ID NO: 1732336 - DNA, 15 bp, Homo sapiens
agacaggctggcgat

SEQ ID NO: 1732337 - DNA, 15 bp, Homo sapiens
gacaggctggcgatg

SEQ ID NO: 1732338 - DNA, 15 bp, Homo sapiens
acaggctggcgatga

SEQ ID NO: 1732339 - DNA, 15 bp, Homo sapiens
caggctggcgatgac

SEQ ID NO: 1732340 - DNA, 15 bp, Homo sapiens
aggctggcgatgaca

SEQ ID NO: 1732341 - DNA, 15 bp, Homo sapiens
ggctggcgatgacac

SEQ ID NO: 1732342 - DNA, 15 bp, Homo sapiens
gctggcgatgacacc

SEQ ID NO: 1732343 - DNA, 15 bp, Homo sapiens
ctggcgatgacaccg

SEQ ID NO: 1732344 - DNA, 15 bp, Homo sapiens
tggcgatgacaccgg

SEQ ID NO: 1732345 - DNA, 15 bp, Homo sapiens
ggcgatgacaccgga

SEQ ID NO: 1732346 - DNA, 15 bp, Homo sapiens
gcgatgacaccggac

SEQ ID NO: 1732347 - DNA, 15 bp, Homo sapiens
cgatgacaccggaca

SEQ ID NO: 1732348 - DNA, 15 bp, Homo sapiens
gatgacaccggacag

SEQ ID NO: 1732349 - DNA, 15 bp, Homo sapiens
atgacaccggacaga

SEQ ID NO: 1732350 - DNA, 15 bp, Homo sapiens
tgacaccggacagag

SEQ ID NO: 1732351 - DNA, 15 bp, Homo sapiens
gacaccggacagagc

SEQ ID NO: 1732352 - DNA, 15 bp, Homo sapiens
acaccggacagagct

SEQ ID NO: 1732353 - DNA, 15 bp, Homo sapiens
caccggacagagcta

SEQ ID NO: 1732354 - DNA, 15 bp, Homo sapiens
accggacagagctaa

SEQ ID NO: 1732355 - DNA, 15 bp, Homo sapiens
ccggacagagctaac

SEQ ID NO: 1732356 - DNA, 15 bp, Homo sapiens
cggacagagctaact

SEQ ID NO: 1732357 - DNA, 15 bp, Homo sapiens
ggacagagctaactg

SEQ ID NO: 1732358 - DNA, 15 bp, Homo sapiens
gacagagctaactgg

SEQ ID NO: 1732359 - DNA, 15 bp, Homo sapiens
acagagctaactggt

SEQ ID NO: 1732360 - DNA, 15 bp, Homo sapiens
cagagctaactggtg

SEQ ID NO: 1732361 - DNA, 15 bp, Homo sapiens
agagctaactggtgt

SEQ ID NO: 1732362 - DNA, 15 bp, Homo sapiens
gagctaactggtgtg

SEQ ID NO: 1732363 - DNA, 15 bp, Homo sapiens
agctaactggtgtgc

SEQ ID NO: 1732364 - DNA, 15 bp, Homo sapiens
gctaactggtgtgca

SEQ ID NO: 1732365 - DNA, 15 bp, Homo sapiens
ctaactggtgtgcaa

SEQ ID NO: 1732366 - DNA, 15 bp, Homo sapiens
taactggtgtgcaag

SEQ ID NO: 1732367 - DNA, 15 bp, Homo sapiens
aactggtgtgcaagg

SEQ ID NO: 1732368 - DNA, 15 bp, Homo sapiens
actggtgtgcaagga

SEQ ID NO: 1732369 - DNA, 15 bp, Homo sapiens
ctggtgtgcaaggaa

SEQ ID NO: 1732370 - DNA, 15 bp, Homo sapiens
tggtgtgcaaggaaa

SEQ ID NO: 1732371 - DNA, 15 bp, Homo sapiens
ggtgtgcaaggaaag

SEQ ID NO: 1732372 - DNA, 15 bp, Homo sapiens
gtgtgcaaggaaagt

SEQ ID NO: 1732373 - DNA, 15 bp, Homo sapiens
tgtgcaaggaaagtg

SEQ ID NO: 1732374 - DNA, 15 bp, Homo sapiens
gtgcaaggaaagtga

SEQ ID NO: 1732375 - DNA, 15 bp, Homo sapiens
tgcaaggaaagtgaa

SEQ ID NO: 1732376 - DNA, 15 bp, Homo sapiens
gcaaggaaagtgaaa

SEQ ID NO: 1732377 - DNA, 15 bp, Homo sapiens
caaggaaagtgaaaa

SEQ ID NO: 1732378 - DNA, 15 bp, Homo sapiens
aaggaaagtgaaaat

SEQ ID NO: 1732379 - DNA, 15 bp, Homo sapiens
aggaaagtgaaaatg

SEQ ID NO: 1732380 - DNA, 15 bp, Homo sapiens
ggaaagtgaaaatgg

SEQ ID NO: 1732381 - DNA, 15 bp, Homo sapiens
gaaagtgaaaatggg

SEQ ID NO: 1732382 - DNA, 15 bp, Homo sapiens
aaagtgaaaatggga

SEQ ID NO: 1732383 - DNA, 15 bp, Homo sapiens
aagtgaaaatgggaa

SEQ ID NO: 1732384 - DNA, 15 bp, Homo sapiens
agtgaaaatgggaat

SEQ ID NO: 1732385 - DNA, 15 bp, Homo sapiens
gtgaaaatgggaatt

SEQ ID NO: 1732386 - DNA, 15 bp, Homo sapiens
tgaaaatgggaattg

SEQ ID NO: 1732387 - DNA, 15 bp, Homo sapiens
gaaaatgggaattgt

SEQ ID NO: 1732388 - DNA, 15 bp, Homo sapiens
aaaatgggaattgtg

SEQ ID NO: 1732389 - DNA, 15 bp, Homo sapiens
aaatgggaattgtgt

SEQ ID NO: 1732390 - DNA, 15 bp, Homo sapiens
aatgggaattgtgtt

SEQ ID NO: 1732391 - DNA, 15 bp, Homo sapiens
atgggaattgtgtta

SEQ ID NO: 1732392 - DNA, 15 bp, Homo sapiens
tgggaattgtgttag

SEQ ID NO: 1732393 - DNA, 15 bp, Homo sapiens
gggaattgtgttagt

SEQ ID NO: 1732394 - DNA, 15 bp, Homo sapiens
ggaattgtgttagta

SEQ ID NO: 1732395 - DNA, 15 bp, Homo sapiens
gaattgtgttagtag

SEQ ID NO: 1732396 - DNA, 15 bp, Homo sapiens
aattgtgttagtagc

SEQ ID NO: 1732397 - DNA, 15 bp, Homo sapiens
attgtgttagtagca

SEQ ID NO: 1732398 - DNA, 15 bp, Homo sapiens
ttgtgttagtagcac

SEQ ID NO: 1732399 - DNA, 15 bp, Homo sapiens
tgtgttagtagcaca

SEQ ID NO: 1732400 - DNA, 15 bp, Homo sapiens
gtgttagtagcacaa

SEQ ID NO: 1732401 - DNA, 15 bp, Homo sapiens
tgttagtagcacaat

SEQ ID NO: 1732402 - DNA, 15 bp, Homo sapiens
gttagtagcacaatg

SEQ ID NO: 1732403 - DNA, 15 bp, Homo sapiens
ttagtagcacaatgc

SEQ ID NO: 1732404 - DNA, 15 bp, Homo sapiens
tagtagcacaatgca

SEQ ID NO: 1732405 - DNA, 15 bp, Homo sapiens
agtagcacaatgcaa

SEQ ID NO: 1732406 - DNA, 15 bp, Homo sapiens
gtagcacaatgcaaa

SEQ ID NO: 1732407 - DNA, 15 bp, Homo sapiens
tagcacaatgcaaac

SEQ ID NO: 1732408 - DNA, 15 bp, Homo sapiens
agcacaatgcaaact

SEQ ID NO: 1732409 - DNA, 15 bp, Homo sapiens
gcacaatgcaaactc

SEQ ID NO: 1732410 - DNA, 15 bp, Homo sapiens
cacaatgcaaactca

SEQ ID NO: 1732411 - DNA, 15 bp, Homo sapiens
acaatgcaaactcaa

SEQ ID NO: 1732412 - DNA, 15 bp, Homo sapiens
caatgcaaactcaac

SEQ ID NO: 1732413 - DNA, 15 bp, Homo sapiens
aatgcaaactcaaca

SEQ ID NO: 1732414 - DNA, 15 bp, Homo sapiens
atgcaaactcaacaa

SEQ ID NO: 1732415 - DNA, 15 bp, Homo sapiens
tgcaaactcaacaat

SEQ ID NO: 1732416 - DNA, 15 bp, Homo sapiens
gcaaactcaacaatt

SEQ ID NO: 1732417 - DNA, 15 bp, Homo sapiens
caaactcaacaattt

SEQ ID NO: 1732418 - DNA, 15 bp, Homo sapiens
aaactcaacaatttc

SEQ ID NO: 1732419 - DNA, 15 bp, Homo sapiens
aactcaacaatttca

SEQ ID NO: 1732420 - DNA, 15 bp, Homo sapiens
actcaacaatttcaa

SEQ ID NO: 1732421 - DNA, 15 bp, Homo sapiens
ctcaacaatttcaag

SEQ ID NO: 1732422 - DNA, 15 bp, Homo sapiens
tcaacaatttcaaga

SEQ ID NO: 1732423 - DNA, 15 bp, Homo sapiens
caacaatttcaagaa

SEQ ID NO: 1732424 - DNA, 15 bp, Homo sapiens
aacaatttcaagaaa

SEQ ID NO: 1732425 - DNA, 15 bp, Homo sapiens
acaatttcaagaaaa

SEQ ID NO: 1732426 - DNA, 15 bp, Homo sapiens
caatttcaagaaaat

SEQ ID NO: 1732427 - DNA, 15 bp, Homo sapiens
aatttcaagaaaatg

SEQ ID NO: 1732428 - DNA, 15 bp, Homo sapiens
atttcaagaaaatgc

SEQ ID NO: 1732429 - DNA, 15 bp, Homo sapiens
tttcaagaaaatgca

SEQ ID NO: 1732430 - DNA, 15 bp, Homo sapiens
ttcaagaaaatgcat

SEQ ID NO: 1732431 - DNA, 15 bp, Homo sapiens
tcaagaaaatgcatt

SEQ ID NO: 1732432 - DNA, 15 bp, Homo sapiens
caagaaaatgcattt

SEQ ID NO: 1732433 - DNA, 15 bp, Homo sapiens
aagaaaatgcatttc

SEQ ID NO: 1732434 - DNA, 15 bp, Homo sapiens
agaaaatgcatttct

SEQ ID NO: 1732435 - DNA, 15 bp, Homo sapiens
gaaaatgcatttctg

SEQ ID NO: 1732436 - DNA, 15 bp, Homo sapiens
aaaatgcatttctgc

SEQ ID NO: 1732437 - DNA, 15 bp, Homo sapiens
aaatgcatttctgca

SEQ ID NO: 1732438 - DNA, 15 bp, Homo sapiens
aatgcatttctgcat

SEQ ID NO: 1732439 - DNA, 15 bp, Homo sapiens
atgcatttctgcatt

SEQ ID NO: 1732440 - DNA, 15 bp, Homo sapiens
tgcatttctgcattt

SEQ ID NO: 1732441 - DNA, 15 bp, Homo sapiens
gcatttctgcatttg

SEQ ID NO: 1732442 - DNA, 15 bp, Homo sapiens
catttctgcatttgc

SEQ ID NO: 1732443 - DNA, 15 bp, Homo sapiens
atttctgcatttgct

SEQ ID NO: 1732444 - DNA, 15 bp, Homo sapiens
tttctgcatttgctt

SEQ ID NO: 1732445 - DNA, 15 bp, Homo sapiens
ttctgcatttgcttc

SEQ ID NO: 1732446 - DNA, 15 bp, Homo sapiens
tctgcatttgcttca

SEQ ID NO: 1732447 - DNA, 15 bp, Homo sapiens
ctgcatttgcttcac

SEQ ID NO: 1732448 - DNA, 15 bp, Homo sapiens
tgcatttgcttcaca

SEQ ID NO: 1732449 - DNA, 15 bp, Homo sapiens
gcatttgcttcacag

SEQ ID NO: 1732450 - DNA, 15 bp, Homo sapiens
catttgcttcacaga

SEQ ID NO: 1732451 - DNA, 15 bp, Homo sapiens
atttgcttcacagac

SEQ ID NO: 1732452 - DNA, 15 bp, Homo sapiens
tttgcttcacagacc

SEQ ID NO: 1732453 - DNA, 15 bp, Homo sapiens
ttgcttcacagaccc

SEQ ID NO: 1732454 - DNA, 15 bp, Homo sapiens
tgcttcacagacccc

SEQ ID NO: 1732455 - DNA, 15 bp, Homo sapiens
gcttcacagaccccc

SEQ ID NO: 1732456 - DNA, 15 bp, Homo sapiens
cttcacagaccccca

SEQ ID NO: 1732457 - DNA, 15 bp, Homo sapiens
ttcacagacccccac

SEQ ID NO: 1732458 - DNA, 15 bp, Homo sapiens
tcacagacccccacc

SEQ ID NO: 1732459 - DNA, 15 bp, Homo sapiens
cacagacccccaccc

SEQ ID NO: 1732460 - DNA, 15 bp, Homo sapiens
acagacccccacccc

SEQ ID NO: 1732461 - DNA, 15 bp, Homo sapiens
cagacccccacccca

SEQ ID NO: 1732462 - DNA, 15 bp, Homo sapiens
agacccccaccccaa

SEQ ID NO: 1732463 - DNA, 15 bp, Homo sapiens
gacccccaccccaaa

SEQ ID NO: 1732464 - DNA, 15 bp, Homo sapiens
acccccaccccaaat

SEQ ID NO: 1732465 - DNA, 15 bp, Homo sapiens
cccccaccccaaatt

SEQ ID NO: 1732466 - DNA, 15 bp, Homo sapiens
ccccaccccaaattt

SEQ ID NO: 1732467 - DNA, 15 bp, Homo sapiens
cccaccccaaattta

SEQ ID NO: 1732468 - DNA, 15 bp, Homo sapiens
ccaccccaaatttag

SEQ ID NO: 1732469 - DNA, 15 bp, Homo sapiens
caccccaaatttagc

SEQ ID NO: 1732470 - DNA, 15 bp, Homo sapiens
accccaaatttagct

SEQ ID NO: 1732471 - DNA, 15 bp, Homo sapiens
ccccaaatttagctt

SEQ ID NO: 1732472 - DNA, 15 bp, Homo sapiens
cccaaatttagctta

SEQ ID NO: 1732473 - DNA, 15 bp, Homo sapiens
ccaaatttagcttaa

SEQ ID NO: 1732474 - DNA, 15 bp, Homo sapiens
caaatttagcttaaa

SEQ ID NO: 1732475 - DNA, 15 bp, Homo sapiens
aaatttagcttaaaa

SEQ ID NO: 1732476 - DNA, 15 bp, Homo sapiens
aatttagcttaaaat

SEQ ID NO: 1732477 - DNA, 15 bp, Homo sapiens
atttagcttaaaata

SEQ ID NO: 1732478 - DNA, 15 bp, Homo sapiens
tttagcttaaaataa

SEQ ID NO: 1732479 - DNA, 15 bp, Homo sapiens
ttagcttaaaataag

SEQ ID NO: 1732480 - DNA, 15 bp, Homo sapiens
tagcttaaaataagc

SEQ ID NO: 1732481 - DNA, 15 bp, Homo sapiens
agcttaaaataagct

SEQ ID NO: 1732482 - DNA, 15 bp, Homo sapiens
gcttaaaataagctt

SEQ ID NO: 1732483 - DNA, 15 bp, Homo sapiens
cttaaaataagcttg

SEQ ID NO: 1732484 - DNA, 15 bp, Homo sapiens
ttaaaataagcttgc

SEQ ID NO: 1732485 - DNA, 15 bp, Homo sapiens
taaaataagcttgca

SEQ ID NO: 1732486 - DNA, 15 bp, Homo sapiens
aaaataagcttgcat

SEQ ID NO: 1732487 - DNA, 15 bp, Homo sapiens
aaataagcttgcatt

SEQ ID NO: 1732488 - DNA, 15 bp, Homo sapiens
aataagcttgcattt

SEQ ID NO: 1732489 - DNA, 15 bp, Homo sapiens
ataagcttgcatttc

SEQ ID NO: 1732490 - DNA, 15 bp, Homo sapiens
taagcttgcatttca

SEQ ID NO: 1732491 - DNA, 15 bp, Homo sapiens
aagcttgcatttcaa

SEQ ID NO: 1732492 - DNA, 15 bp, Homo sapiens
agcttgcatttcaag

SEQ ID NO: 1732493 - DNA, 15 bp, Homo sapiens
gcttgcatttcaaga

SEQ ID NO: 1732494 - DNA, 15 bp, Homo sapiens
cttgcatttcaagaa

SEQ ID NO: 1732495 - DNA, 15 bp, Homo sapiens
ttgcatttcaagaaa

SEQ ID NO: 1732496 - DNA, 15 bp, Homo sapiens
tgcatttcaagaaag

SEQ ID NO: 1732497 - DNA, 15 bp, Homo sapiens
gcatttcaagaaagt

SEQ ID NO: 1732498 - DNA, 15 bp, Homo sapiens
catttcaagaaagta

SEQ ID NO: 1732499 - DNA, 15 bp, Homo sapiens
atttcaagaaagtaa

SEQ ID NO: 1732500 - DNA, 15 bp, Homo sapiens
tttcaagaaagtaat

SEQ ID NO: 1732501 - DNA, 15 bp, Homo sapiens
ttcaagaaagtaatt

SEQ ID NO: 1732502 - DNA, 15 bp, Homo sapiens
tcaagaaagtaattg

SEQ ID NO: 1732503 - DNA, 15 bp, Homo sapiens
caagaaagtaattgt

SEQ ID NO: 1732504 - DNA, 15 bp, Homo sapiens
aagaaagtaattgtt

SEQ ID NO: 1732505 - DNA, 15 bp, Homo sapiens
agaaagtaattgtta

SEQ ID NO: 1732506 - DNA, 15 bp, Homo sapiens
gaaagtaattgttaa

SEQ ID NO: 1732507 - DNA, 15 bp, Homo sapiens
aaagtaattgttaag

SEQ ID NO: 1732508 - DNA, 15 bp, Homo sapiens
aagtaattgttaagt

SEQ ID NO: 1732509 - DNA, 15 bp, Homo sapiens
agtaattgttaagta

SEQ ID NO: 1732510 - DNA, 15 bp, Homo sapiens
gtaattgttaagtac

SEQ ID NO: 1732511 - DNA, 15 bp, Homo sapiens
taattgttaagtaca

SEQ ID NO: 1732512 - DNA, 15 bp, Homo sapiens
aattgttaagtacat

SEQ ID NO: 1732513 - DNA, 15 bp, Homo sapiens
attgttaagtacata

SEQ ID NO: 1732514 - DNA, 15 bp, Homo sapiens
ttgttaagtacataa

SEQ ID NO: 1732515 - DNA, 15 bp, Homo sapiens
tgttaagtacataaa

SEQ ID NO: 1732516 - DNA, 15 bp, Homo sapiens
gttaagtacataaat

SEQ ID NO: 1732517 - DNA, 15 bp, Homo sapiens
ttaagtacataaatt

SEQ ID NO: 1732518 - DNA, 15 bp, Homo sapiens
taagtacataaattt

SEQ ID NO: 1732519 - DNA, 15 bp, Homo sapiens
aagtacataaatttt

SEQ ID NO: 1732520 - DNA, 15 bp, Homo sapiens
agtacataaatttta

SEQ ID NO: 1732521 - DNA, 15 bp, Homo sapiens
gtacataaattttaa

SEQ ID NO: 1732522 - DNA, 15 bp, Homo sapiens
tacataaattttaat

SEQ ID NO: 1732523 - DNA, 15 bp, Homo sapiens
acataaattttaatt

SEQ ID NO: 1732524 - DNA, 15 bp, Homo sapiens
cataaattttaattt

SEQ ID NO: 1732525 - DNA, 15 bp, Homo sapiens
ataaattttaattta

SEQ ID NO: 1732526 - DNA, 15 bp, Homo sapiens
taaattttaatttaa

SEQ ID NO: 1732527 - DNA, 15 bp, Homo sapiens
aaattttaatttaag

SEQ ID NO: 1732528 - DNA, 15 bp, Homo sapiens
aattttaatttaagg

SEQ ID NO: 1732529 - DNA, 15 bp, Homo sapiens
attttaatttaagga

SEQ ID NO: 1732530 - DNA, 15 bp, Homo sapiens
ttttaatttaaggaa

SEQ ID NO: 1732531 - DNA, 15 bp, Homo sapiens
tttaatttaaggaat

SEQ ID NO: 1732532 - DNA, 15 bp, Homo sapiens
ttaatttaaggaatc

SEQ ID NO: 1732533 - DNA, 15 bp, Homo sapiens
taatttaaggaatct

SEQ ID NO: 1732534 - DNA, 15 bp, Homo sapiens
aatttaaggaatcta

SEQ ID NO: 1732535 - DNA, 15 bp, Homo sapiens
atttaaggaatctac

SEQ ID NO: 1732536 - DNA, 15 bp, Homo sapiens
tttaaggaatctaca

SEQ ID NO: 1732537 - DNA, 15 bp, Homo sapiens
ttaaggaatctacat

SEQ ID NO: 1732538 - DNA, 15 bp, Homo sapiens
taaggaatctacatt

SEQ ID NO: 1732539 - DNA, 15 bp, Homo sapiens
aaggaatctacattc

SEQ ID NO: 1732540 - DNA, 15 bp, Homo sapiens
aggaatctacattca

SEQ ID NO: 1732541 - DNA, 15 bp, Homo sapiens
ggaatctacattcac

SEQ ID NO: 1732542 - DNA, 15 bp, Homo sapiens
gaatctacattcaca

SEQ ID NO: 1732543 - DNA, 15 bp, Homo sapiens
aatctacattcacat

SEQ ID NO: 1732544 - DNA, 15 bp, Homo sapiens
atctacattcacatt

SEQ ID NO: 1732545 - DNA, 15 bp, Homo sapiens
tctacattcacattt

SEQ ID NO: 1732546 - DNA, 15 bp, Homo sapiens
ctacattcacatttg

SEQ ID NO: 1732547 - DNA, 15 bp, Homo sapiens
tacattcacatttgg

SEQ ID NO: 1732548 - DNA, 15 bp, Homo sapiens
acattcacatttggt

SEQ ID NO: 1732549 - DNA, 15 bp, Homo sapiens
cattcacatttggtt

SEQ ID NO: 1732550 - DNA, 15 bp, Homo sapiens
attcacatttggttt

SEQ ID NO: 1732551 - DNA, 15 bp, Homo sapiens
ttcacatttggtttc

SEQ ID NO: 1732552 - DNA, 15 bp, Homo sapiens
tcacatttggtttcc

SEQ ID NO: 1732553 - DNA, 15 bp, Homo sapiens
cacatttggtttcca

SEQ ID NO: 1732554 - DNA, 15 bp, Homo sapiens
acatttggtttccaa

SEQ ID NO: 1732555 - DNA, 15 bp, Homo sapiens
catttggtttccaaa

SEQ ID NO: 1732556 - DNA, 15 bp, Homo sapiens
atttggtttccaaaa

SEQ ID NO: 1732557 - DNA, 15 bp, Homo sapiens
tttggtttccaaaaa

SEQ ID NO: 1732558 - DNA, 15 bp, Homo sapiens
ttggtttccaaaaaa

SEQ ID NO: 1732559 - DNA, 15 bp, Homo sapiens
tggtttccaaaaaat

SEQ ID NO: 1732560 - DNA, 15 bp, Homo sapiens
ggtttccaaaaaatt

SEQ ID NO: 1732561 - DNA, 15 bp, Homo sapiens
gtttccaaaaaattg

SEQ ID NO: 1732562 - DNA, 15 bp, Homo sapiens
tttccaaaaaattgg

SEQ ID NO: 1732563 - DNA, 15 bp, Homo sapiens
ttccaaaaaattggc

SEQ ID NO: 1732564 - DNA, 15 bp, Homo sapiens
tccaaaaaattggct

SEQ ID NO: 1732565 - DNA, 15 bp, Homo sapiens
ccaaaaaattggcta

SEQ ID NO: 1732566 - DNA, 15 bp, Homo sapiens
caaaaaattggctaa

SEQ ID NO: 1732567 - DNA, 15 bp, Homo sapiens
aaaaaattggctaaa

SEQ ID NO: 1732568 - DNA, 15 bp, Homo sapiens
aaaaattggctaaat

SEQ ID NO: 1732569 - DNA, 15 bp, Homo sapiens
aaaattggctaaata

SEQ ID NO: 1732570 - DNA, 15 bp, Homo sapiens
aaattggctaaatag

SEQ ID NO: 1732571 - DNA, 15 bp, Homo sapiens
aattggctaaatagg

SEQ ID NO: 1732572 - DNA, 15 bp, Homo sapiens
attggctaaataggg

SEQ ID NO: 1732573 - DNA, 15 bp, Homo sapiens
ttggctaaatagggg

SEQ ID NO: 1732574 - DNA, 15 bp, Homo sapiens
tggctaaataggggg

SEQ ID NO: 1732575 - DNA, 15 bp, Homo sapiens
ggctaaatagggggt

SEQ ID NO: 1732576 - DNA, 15 bp, Homo sapiens
gctaaatagggggta

SEQ ID NO: 1732577 - DNA, 15 bp, Homo sapiens
ctaaatagggggtaa

SEQ ID NO: 1732578 - DNA, 15 bp, Homo sapiens
taaatagggggtaac

SEQ ID NO: 1732579 - DNA, 15 bp, Homo sapiens
aaatagggggtaact

SEQ ID NO: 1732580 - DNA, 15 bp, Homo sapiens
aatagggggtaacta

SEQ ID NO: 1732581 - DNA, 15 bp, Homo sapiens
atagggggtaactat

SEQ ID NO: 1732582 - DNA, 15 bp, Homo sapiens
tagggggtaactatt

SEQ ID NO: 1732583 - DNA, 15 bp, Homo sapiens
agggggtaactatta

SEQ ID NO: 1732584 - DNA, 15 bp, Homo sapiens
gggggtaactattag

SEQ ID NO: 1732585 - DNA, 15 bp, Homo sapiens
ggggtaactattagg

SEQ ID NO: 1732586 - DNA, 15 bp, Homo sapiens
gggtaactattagga

SEQ ID NO: 1732587 - DNA, 15 bp, Homo sapiens
ggtaactattaggaa

SEQ ID NO: 1732588 - DNA, 15 bp, Homo sapiens
gtaactattaggaat

SEQ ID NO: 1732589 - DNA, 15 bp, Homo sapiens
taactattaggaatt

SEQ ID NO: 1732590 - DNA, 15 bp, Homo sapiens
aactattaggaattc

SEQ ID NO: 1732591 - DNA, 15 bp, Homo sapiens
actattaggaattct

SEQ ID NO: 1732592 - DNA, 15 bp, Homo sapiens
ctattaggaattctg

SEQ ID NO: 1732593 - DNA, 15 bp, Homo sapiens
tattaggaattctga

SEQ ID NO: 1732594 - DNA, 15 bp, Homo sapiens
attaggaattctgat

SEQ ID NO: 1732595 - DNA, 15 bp, Homo sapiens
ttaggaattctgatt

SEQ ID NO: 1732596 - DNA, 15 bp, Homo sapiens
taggaattctgatta

SEQ ID NO: 1732597 - DNA, 15 bp, Homo sapiens
aggaattctgattat

SEQ ID NO: 1732598 - DNA, 15 bp, Homo sapiens
ggaattctgattatg

SEQ ID NO: 1732599 - DNA, 15 bp, Homo sapiens
gaattctgattatgc

SEQ ID NO: 1732600 - DNA, 15 bp, Homo sapiens
aattctgattatgct

SEQ ID NO: 1732601 - DNA, 15 bp, Homo sapiens
attctgattatgctt

SEQ ID NO: 1732602 - DNA, 15 bp, Homo sapiens
ttctgattatgctta

SEQ ID NO: 1732603 - DNA, 15 bp, Homo sapiens
tctgattatgcttaa

SEQ ID NO: 1732604 - DNA, 15 bp, Homo sapiens
ctgattatgcttaaa

SEQ ID NO: 1732605 - DNA, 15 bp, Homo sapiens
tgattatgcttaaaa

SEQ ID NO: 1732606 - DNA, 15 bp, Homo sapiens
gattatgcttaaaac

SEQ ID NO: 1732607 - DNA, 15 bp, Homo sapiens
attatgcttaaaaca

SEQ ID NO: 1732608 - DNA, 15 bp, Homo sapiens
ttatgcttaaaacag

SEQ ID NO: 1732609 - DNA, 15 bp, Homo sapiens
tatgcttaaaacagt

SEQ ID NO: 1732610 - DNA, 15 bp, Homo sapiens
atgcttaaaacagtt

SEQ ID NO: 1732611 - DNA, 15 bp, Homo sapiens
tgcttaaaacagttt

SEQ ID NO: 1732612 - DNA, 15 bp, Homo sapiens
gcttaaaacagtttt

SEQ ID NO: 1732613 - DNA, 15 bp, Homo sapiens
cttaaaacagttttc

SEQ ID NO: 1732614 - DNA, 15 bp, Homo sapiens
ttaaaacagttttcg

SEQ ID NO: 1732615 - DNA, 15 bp, Homo sapiens
taaaacagttttcgg

SEQ ID NO: 1732616 - DNA, 15 bp, Homo sapiens
aaaacagttttcggt

SEQ ID NO: 1732617 - DNA, 15 bp, Homo sapiens
aaacagttttcggtg

SEQ ID NO: 1732618 - DNA, 15 bp, Homo sapiens
aacagttttcggtgc

SEQ ID NO: 1732619 - DNA, 15 bp, Homo sapiens
acagttttcggtgct

SEQ ID NO: 1732620 - DNA, 15 bp, Homo sapiens
cagttttcggtgctt

SEQ ID NO: 1732621 - DNA, 15 bp, Homo sapiens
agttttcggtgcttt

SEQ ID NO: 1732622 - DNA, 15 bp, Homo sapiens
gttttcggtgctttt

SEQ ID NO: 1732623 - DNA, 15 bp, Homo sapiens
ttttcggtgcttttc

SEQ ID NO: 1732624 - DNA, 15 bp, Homo sapiens
tttcggtgcttttct

SEQ ID NO: 1732625 - DNA, 15 bp, Homo sapiens
ttcggtgcttttctg

SEQ ID NO: 1732626 - DNA, 15 bp, Homo sapiens
tcggtgcttttctgt

SEQ ID NO: 1732627 - DNA, 15 bp, Homo sapiens
cggtgcttttctgtt

SEQ ID NO: 1732628 - DNA, 15 bp, Homo sapiens
ggtgcttttctgttg

SEQ ID NO: 1732629 - DNA, 15 bp, Homo sapiens
gtgcttttctgttgg

SEQ ID NO: 1732630 - DNA, 15 bp, Homo sapiens
tgcttttctgttggt

SEQ ID NO: 1732631 - DNA, 15 bp, Homo sapiens
gcttttctgttggta

SEQ ID NO: 1732632 - DNA, 15 bp, Homo sapiens
cttttctgttggtac

SEQ ID NO: 1732633 - DNA, 15 bp, Homo sapiens
ttttctgttggtaca

SEQ ID NO: 1732634 - DNA, 15 bp, Homo sapiens
tttctgttggtacaa

SEQ ID NO: 1732635 - DNA, 15 bp, Homo sapiens
ttctgttggtacaag

SEQ ID NO: 1732636 - DNA, 15 bp, Homo sapiens
tctgttggtacaaga

SEQ ID NO: 1732637 - DNA, 15 bp, Homo sapiens
ctgttggtacaagac

SEQ ID NO: 1732638 - DNA, 15 bp, Homo sapiens
tgttggtacaagaca

SEQ ID NO: 1732639 - DNA, 15 bp, Homo sapiens
gttggtacaagacaa

SEQ ID NO: 1732640 - DNA, 15 bp, Homo sapiens
ttggtacaagacaag

SEQ ID NO: 1732641 - DNA, 15 bp, Homo sapiens
tggtacaagacaaga

SEQ ID NO: 1732642 - DNA, 15 bp, Homo sapiens
ggtacaagacaagac

SEQ ID NO: 1732643 - DNA, 15 bp, Homo sapiens
gtacaagacaagaca

SEQ ID NO: 1732644 - DNA, 15 bp, Homo sapiens
tacaagacaagacaa

SEQ ID NO: 1732645 - DNA, 15 bp, Homo sapiens
acaagacaagacaat

SEQ ID NO: 1732646 - DNA, 15 bp, Homo sapiens
caagacaagacaata

SEQ ID NO: 1732647 - DNA, 15 bp, Homo sapiens
aagacaagacaatat

SEQ ID NO: 1732648 - DNA, 15 bp, Homo sapiens
agacaagacaatatt

SEQ ID NO: 1732649 - DNA, 15 bp, Homo sapiens
gacaagacaatattt

SEQ ID NO: 1732650 - DNA, 15 bp, Homo sapiens
acaagacaatatttt

SEQ ID NO: 1732651 - DNA, 15 bp, Homo sapiens
caagacaatattttt

SEQ ID NO: 1732652 - DNA, 15 bp, Homo sapiens
aagacaatatttttg

SEQ ID NO: 1732653 - DNA, 15 bp, Homo sapiens
agacaatatttttgg

SEQ ID NO: 1732654 - DNA, 15 bp, Homo sapiens
gacaatatttttgga

SEQ ID NO: 1732655 - DNA, 15 bp, Homo sapiens
acaatatttttggaa

SEQ ID NO: 1732656 - DNA, 15 bp, Homo sapiens
caatatttttggaag

SEQ ID NO: 1732657 - DNA, 15 bp, Homo sapiens
aatatttttggaaga

SEQ ID NO: 1732658 - DNA, 15 bp, Homo sapiens
atatttttggaagaa

SEQ ID NO: 1732659 - DNA, 15 bp, Homo sapiens
tatttttggaagaag

SEQ ID NO: 1732660 - DNA, 15 bp, Homo sapiens
atttttggaagaagt

SEQ ID NO: 1732661 - DNA, 15 bp, Homo sapiens
tttttggaagaagtc

SEQ ID NO: 1732662 - DNA, 15 bp, Homo sapiens
ttttggaagaagtct

SEQ ID NO: 1732663 - DNA, 15 bp, Homo sapiens
tttggaagaagtctc

SEQ ID NO: 1732664 - DNA, 15 bp, Homo sapiens
ttggaagaagtctcc

SEQ ID NO: 1732665 - DNA, 15 bp, Homo sapiens
tggaagaagtctcct

SEQ ID NO: 1732666 - DNA, 15 bp, Homo sapiens
ggaagaagtctcctc

SEQ ID NO: 1732667 - DNA, 15 bp, Homo sapiens
gaagaagtctcctca

SEQ ID NO: 1732668 - DNA, 15 bp, Homo sapiens
aagaagtctcctcat

SEQ ID NO: 1732669 - DNA, 15 bp, Homo sapiens
agaagtctcctcatc

SEQ ID NO: 1732670 - DNA, 15 bp, Homo sapiens
gaagtctcctcatct

SEQ ID NO: 1732671 - DNA, 15 bp, Homo sapiens
aagtctcctcatctg

SEQ ID NO: 1732672 - DNA, 15 bp, Homo sapiens
agtctcctcatctgg

SEQ ID NO: 1732673 - DNA, 15 bp, Homo sapiens
gtctcctcatctggt

SEQ ID NO: 1732674 - DNA, 15 bp, Homo sapiens
tctcctcatctggtt

SEQ ID NO: 1732675 - DNA, 15 bp, Homo sapiens
ctcctcatctggttt

SEQ ID NO: 1732676 - DNA, 15 bp, Homo sapiens
tcctcatctggtttt

SEQ ID NO: 1732677 - DNA, 15 bp, Homo sapiens
cctcatctggttttc

SEQ ID NO: 1732678 - DNA, 15 bp, Homo sapiens
ctcatctggttttca

SEQ ID NO: 1732679 - DNA, 15 bp, Homo sapiens
tcatctggttttcat

SEQ ID NO: 1732680 - DNA, 15 bp, Homo sapiens
catctggttttcatt

SEQ ID NO: 1732681 - DNA, 15 bp, Homo sapiens
atctggttttcattt

SEQ ID NO: 1732682 - DNA, 15 bp, Homo sapiens
tctggttttcatttg

SEQ ID NO: 1732683 - DNA, 15 bp, Homo sapiens
ctggttttcatttga

SEQ ID NO: 1732684 - DNA, 15 bp, Homo sapiens
tggttttcatttgaa

SEQ ID NO: 1732685 - DNA, 15 bp, Homo sapiens
ggttttcatttgaaa

SEQ ID NO: 1732686 - DNA, 15 bp, Homo sapiens
gttttcatttgaaat

SEQ ID NO: 1732687 - DNA, 15 bp, Homo sapiens
ttttcatttgaaata

SEQ ID NO: 1732688 - DNA, 15 bp, Homo sapiens
tttcatttgaaatat

SEQ ID NO: 1732689 - DNA, 15 bp, Homo sapiens
ttcatttgaaatatg

SEQ ID NO: 1732690 - DNA, 15 bp, Homo sapiens
tcatttgaaatatgt

SEQ ID NO: 1732691 - DNA, 15 bp, Homo sapiens
catttgaaatatgtc

SEQ ID NO: 1732692 - DNA, 15 bp, Homo sapiens
atttgaaatatgtct

SEQ ID NO: 1732693 - DNA, 15 bp, Homo sapiens
tttgaaatatgtctt

SEQ ID NO: 1732694 - DNA, 15 bp, Homo sapiens
ttgaaatatgtctta

SEQ ID NO: 1732695 - DNA, 15 bp, Homo sapiens
tgaaatatgtcttac

SEQ ID NO: 1732696 - DNA, 15 bp, Homo sapiens
gaaatatgtcttaca

SEQ ID NO: 1732697 - DNA, 15 bp, Homo sapiens
aaatatgtcttacag

SEQ ID NO: 1732698 - DNA, 15 bp, Homo sapiens
aatatgtcttacaga

SEQ ID NO: 1732699 - DNA, 15 bp, Homo sapiens
atatgtcttacagag

SEQ ID NO: 1732700 - DNA, 15 bp, Homo sapiens
tatgtcttacagagg

SEQ ID NO: 1732701 - DNA, 15 bp, Homo sapiens
atgtcttacagaggc

SEQ ID NO: 1732702 - DNA, 15 bp, Homo sapiens
tgtcttacagaggca

SEQ ID NO: 1732703 - DNA, 15 bp, Homo sapiens
gtcttacagaggcag

SEQ ID NO: 1732704 - DNA, 15 bp, Homo sapiens
tcttacagaggcagc

SEQ ID NO: 1732705 - DNA, 15 bp, Homo sapiens
cttacagaggcagct

SEQ ID NO: 1732706 - DNA, 15 bp, Homo sapiens
ttacagaggcagctc

SEQ ID NO: 1732707 - DNA, 15 bp, Homo sapiens
tacagaggcagctca

SEQ ID NO: 1732708 - DNA, 15 bp, Homo sapiens
acagaggcagctcaa

SEQ ID NO: 1732709 - DNA, 15 bp, Homo sapiens
cagaggcagctcaag

SEQ ID NO: 1732710 - DNA, 15 bp, Homo sapiens
agaggcagctcaaga

SEQ ID NO: 1732711 - DNA, 15 bp, Homo sapiens
gaggcagctcaagaa

SEQ ID NO: 1732712 - DNA, 15 bp, Homo sapiens
aggcagctcaagaaa

SEQ ID NO: 1732713 - DNA, 15 bp, Homo sapiens
ggcagctcaagaaag

SEQ ID NO: 1732714 - DNA, 15 bp, Homo sapiens
gcagctcaagaaagc

SEQ ID NO: 1732715 - DNA, 15 bp, Homo sapiens
cagctcaagaaagca

SEQ ID NO: 1732716 - DNA, 15 bp, Homo sapiens
agctcaagaaagcat

SEQ ID NO: 1732717 - DNA, 15 bp, Homo sapiens
gctcaagaaagcatt

SEQ ID NO: 1732718 - DNA, 15 bp, Homo sapiens
ctcaagaaagcattt

SEQ ID NO: 1732719 - DNA, 15 bp, Homo sapiens
tcaagaaagcatttg

SEQ ID NO: 1732720 - DNA, 15 bp, Homo sapiens
caagaaagcatttgc

SEQ ID NO: 1732721 - DNA, 15 bp, Homo sapiens
aagaaagcatttgcc

SEQ ID NO: 1732722 - DNA, 15 bp, Homo sapiens
agaaagcatttgccc

SEQ ID NO: 1732723 - DNA, 15 bp, Homo sapiens
gaaagcatttgccca

SEQ ID NO: 1732724 - DNA, 15 bp, Homo sapiens
aaagcatttgcccat

SEQ ID NO: 1732725 - DNA, 15 bp, Homo sapiens
aagcatttgcccatt

SEQ ID NO: 1732726 - DNA, 15 bp, Homo sapiens
agcatttgcccattt

SEQ ID NO: 1732727 - DNA, 15 bp, Homo sapiens
gcatttgcccatttt

SEQ ID NO: 1732728 - DNA, 15 bp, Homo sapiens
catttgcccattttt

SEQ ID NO: 1732729 - DNA, 15 bp, Homo sapiens
atttgcccatttttg

SEQ ID NO: 1732730 - DNA, 15 bp, Homo sapiens
tttgcccatttttgg

SEQ ID NO: 1732731 - DNA, 15 bp, Homo sapiens
ttgcccatttttggt

SEQ ID NO: 1732732 - DNA, 15 bp, Homo sapiens
tgcccatttttggta

SEQ ID NO: 1732733 - DNA, 15 bp, Homo sapiens
gcccatttttggtaa

SEQ ID NO: 1732734 - DNA, 15 bp, Homo sapiens
cccatttttggtaaa

SEQ ID NO: 1732735 - DNA, 15 bp, Homo sapiens
ccatttttggtaaat

SEQ ID NO: 1732736 - DNA, 15 bp, Homo sapiens
catttttggtaaata

SEQ ID NO: 1732737 - DNA, 15 bp, Homo sapiens
atttttggtaaatat

SEQ ID NO: 1732738 - DNA, 15 bp, Homo sapiens
tttttggtaaatatg

SEQ ID NO: 1732739 - DNA, 15 bp, Homo sapiens
ttttggtaaatatga

SEQ ID NO: 1732740 - DNA, 15 bp, Homo sapiens
tttggtaaatatgac

SEQ ID NO: 1732741 - DNA, 15 bp, Homo sapiens
ttggtaaatatgacg

SEQ ID NO: 1732742 - DNA, 15 bp, Homo sapiens
tggtaaatatgacgt

SEQ ID NO: 1732743 - DNA, 15 bp, Homo sapiens
ggtaaatatgacgtg

SEQ ID NO: 1732744 - DNA, 15 bp, Homo sapiens
gtaaatatgacgtgt

SEQ ID NO: 1732745 - DNA, 15 bp, Homo sapiens
taaatatgacgtgtt

SEQ ID NO: 1732746 - DNA, 15 bp, Homo sapiens
aaatatgacgtgttt

SEQ ID NO: 1732747 - DNA, 15 bp, Homo sapiens
aatatgacgtgtttc

SEQ ID NO: 1732748 - DNA, 15 bp, Homo sapiens
atatgacgtgtttca

SEQ ID NO: 1732749 - DNA, 15 bp, Homo sapiens
tatgacgtgtttcaa

SEQ ID NO: 1732750 - DNA, 15 bp, Homo sapiens
atgacgtgtttcaaa

SEQ ID NO: 1732751 - DNA, 15 bp, Homo sapiens
tgacgtgtttcaaac

SEQ ID NO: 1732752 - DNA, 15 bp, Homo sapiens
gacgtgtttcaaact

SEQ ID NO: 1732753 - DNA, 15 bp, Homo sapiens
acgtgtttcaaactg

SEQ ID NO: 1732754 - DNA, 15 bp, Homo sapiens
cgtgtttcaaactgt

SEQ ID NO: 1732755 - DNA, 15 bp, Homo sapiens
gtgtttcaaactgtg

SEQ ID NO: 1732756 - DNA, 15 bp, Homo sapiens
tgtttcaaactgtga

SEQ ID NO: 1732757 - DNA, 15 bp, Homo sapiens
gtttcaaactgtgac

SEQ ID NO: 1732758 - DNA, 15 bp, Homo sapiens
tttcaaactgtgaca

SEQ ID NO: 1732759 - DNA, 15 bp, Homo sapiens
ttcaaactgtgacag

SEQ ID NO: 1732760 - DNA, 15 bp, Homo sapiens
tcaaactgtgacagc

SEQ ID NO: 1732761 - DNA, 15 bp, Homo sapiens
caaactgtgacagcc

SEQ ID NO: 1732762 - DNA, 15 bp, Homo sapiens
aaactgtgacagcca

SEQ ID NO: 1732763 - DNA, 15 bp, Homo sapiens
aactgtgacagccat

SEQ ID NO: 1732764 - DNA, 15 bp, Homo sapiens
actgtgacagccatt

SEQ ID NO: 1732765 - DNA, 15 bp, Homo sapiens
ctgtgacagccatta

SEQ ID NO: 1732766 - DNA, 15 bp, Homo sapiens
tgtgacagccattat

SEQ ID NO: 1732767 - DNA, 15 bp, Homo sapiens
gtgacagccattatt

SEQ ID NO: 1732768 - DNA, 15 bp, Homo sapiens
tgacagccattattt

SEQ ID NO: 1732769 - DNA, 15 bp, Homo sapiens
gacagccattatttg

SEQ ID NO: 1732770 - DNA, 15 bp, Homo sapiens
acagccattatttgg

SEQ ID NO: 1732771 - DNA, 15 bp, Homo sapiens
cagccattatttggt

SEQ ID NO: 1732772 - DNA, 15 bp, Homo sapiens
agccattatttggta

SEQ ID NO: 1732773 - DNA, 15 bp, Homo sapiens
gccattatttggtag

SEQ ID NO: 1732774 - DNA, 15 bp, Homo sapiens
ccattatttggtagc

SEQ ID NO: 1732775 - DNA, 15 bp, Homo sapiens
cattatttggtagca

SEQ ID NO: 1732776 - DNA, 15 bp, Homo sapiens
attatttggtagcaa

SEQ ID NO: 1732777 - DNA, 15 bp, Homo sapiens
ttatttggtagcaaa

SEQ ID NO: 1732778 - DNA, 15 bp, Homo sapiens
tatttggtagcaaag

SEQ ID NO: 1732779 - DNA, 15 bp, Homo sapiens
atttggtagcaaaga

SEQ ID NO: 1732780 - DNA, 15 bp, Homo sapiens
tttggtagcaaagaa

SEQ ID NO: 1732781 - DNA, 15 bp, Homo sapiens
ttggtagcaaagaag

SEQ ID NO: 1732782 - DNA, 15 bp, Homo sapiens
tggtagcaaagaagt

SEQ ID NO: 1732783 - DNA, 15 bp, Homo sapiens
ggtagcaaagaagtt

SEQ ID NO: 1732784 - DNA, 15 bp, Homo sapiens
gtagcaaagaagtta

SEQ ID NO: 1732785 - DNA, 15 bp, Homo sapiens
tagcaaagaagttag

SEQ ID NO: 1732786 - DNA, 15 bp, Homo sapiens
agcaaagaagttaga

SEQ ID NO: 1732787 - DNA, 15 bp, Homo sapiens
gcaaagaagttagaa

SEQ ID NO: 1732788 - DNA, 15 bp, Homo sapiens
caaagaagttagaat

SEQ ID NO: 1732789 - DNA, 15 bp, Homo sapiens
aaagaagttagaatt

SEQ ID NO: 1732790 - DNA, 15 bp, Homo sapiens
aagaagttagaatta

SEQ ID NO: 1732791 - DNA, 15 bp, Homo sapiens
agaagttagaattaa

SEQ ID NO: 1732792 - DNA, 15 bp, Homo sapiens
gaagttagaattaag

SEQ ID NO: 1732793 - DNA, 15 bp, Homo sapiens
aagttagaattaagt

SEQ ID NO: 1732794 - DNA, 15 bp, Homo sapiens
agttagaattaagtg

SEQ ID NO: 1732795 - DNA, 15 bp, Homo sapiens
gttagaattaagtgt

SEQ ID NO: 1732796 - DNA, 15 bp, Homo sapiens
ttagaattaagtgtc

SEQ ID NO: 1732797 - DNA, 15 bp, Homo sapiens
tagaattaagtgtca

SEQ ID NO: 1732798 - DNA, 15 bp, Homo sapiens
agaattaagtgtcat

SEQ ID NO: 1732799 - DNA, 15 bp, Homo sapiens
gaattaagtgtcatg

SEQ ID NO: 1732800 - DNA, 15 bp, Homo sapiens
aattaagtgtcatgt

SEQ ID NO: 1732801 - DNA, 15 bp, Homo sapiens
attaagtgtcatgtc

SEQ ID NO: 1732802 - DNA, 15 bp, Homo sapiens
ttaagtgtcatgtca

SEQ ID NO: 1732803 - DNA, 15 bp, Homo sapiens
taagtgtcatgtcag

SEQ ID NO: 1732804 - DNA, 15 bp, Homo sapiens
aagtgtcatgtcagc

SEQ ID NO: 1732805 - DNA, 15 bp, Homo sapiens
agtgtcatgtcagct

SEQ ID NO: 1732806 - DNA, 15 bp, Homo sapiens
gtgtcatgtcagctg

SEQ ID NO: 1732807 - DNA, 15 bp, Homo sapiens
tgtcatgtcagctga

SEQ ID NO: 1732808 - DNA, 15 bp, Homo sapiens
gtcatgtcagctgaa

SEQ ID NO: 1732809 - DNA, 15 bp, Homo sapiens
tcatgtcagctgaaa

SEQ ID NO: 1732810 - DNA, 15 bp, Homo sapiens
catgtcagctgaaat

SEQ ID NO: 1732811 - DNA, 15 bp, Homo sapiens
atgtcagctgaaatc

SEQ ID NO: 1732812 - DNA, 15 bp, Homo sapiens
tgtcagctgaaatcc

SEQ ID NO: 1732813 - DNA, 15 bp, Homo sapiens
gtcagctgaaatcca

SEQ ID NO: 1732814 - DNA, 15 bp, Homo sapiens
tcagctgaaatccaa

SEQ ID NO: 1732815 - DNA, 15 bp, Homo sapiens
cagctgaaatccaac

SEQ ID NO: 1732816 - DNA, 15 bp, Homo sapiens
agctgaaatccaact

SEQ ID NO: 1732817 - DNA, 15 bp, Homo sapiens
gctgaaatccaactt

SEQ ID NO: 1732818 - DNA, 15 bp, Homo sapiens
ctgaaatccaactta

SEQ ID NO: 1732819 - DNA, 15 bp, Homo sapiens
tgaaatccaacttag

SEQ ID NO: 1732820 - DNA, 15 bp, Homo sapiens
gaaatccaacttagt

SEQ ID NO: 1732821 - DNA, 15 bp, Homo sapiens
aaatccaacttagta

SEQ ID NO: 1732822 - DNA, 15 bp, Homo sapiens
aatccaacttagtaa

SEQ ID NO: 1732823 - DNA, 15 bp, Homo sapiens
atccaacttagtaat

SEQ ID NO: 1732824 - DNA, 15 bp, Homo sapiens
tccaacttagtaatt

SEQ ID NO: 1732825 - DNA, 15 bp, Homo sapiens
ccaacttagtaatta

SEQ ID NO: 1732826 - DNA, 15 bp, Homo sapiens
caacttagtaattaa

SEQ ID NO: 1732827 - DNA, 15 bp, Homo sapiens
aacttagtaattaaa

SEQ ID NO: 1732828 - DNA, 15 bp, Homo sapiens
acttagtaattaaat

SEQ ID NO: 1732829 - DNA, 15 bp, Homo sapiens
cttagtaattaaatg

SEQ ID NO: 1732830 - DNA, 15 bp, Homo sapiens
ttagtaattaaatgg

SEQ ID NO: 1732831 - DNA, 15 bp, Homo sapiens
tagtaattaaatgga

SEQ ID NO: 1732832 - DNA, 15 bp, Homo sapiens
agtaattaaatggat

SEQ ID NO: 1732833 - DNA, 15 bp, Homo sapiens
gtaattaaatggata

SEQ ID NO: 1732834 - DNA, 15 bp, Homo sapiens
taattaaatggataa

SEQ ID NO: 1732835 - DNA, 15 bp, Homo sapiens
aattaaatggataaa

SEQ ID NO: 1732836 - DNA, 15 bp, Homo sapiens
attaaatggataaaa

SEQ ID NO: 1732837 - DNA, 15 bp, Homo sapiens
ttaaatggataaaaa

SEQ ID NO: 1732838 - DNA, 15 bp, Homo sapiens
taaatggataaaaag

SEQ ID NO: 1732839 - DNA, 15 bp, Homo sapiens
aaatggataaaaaga

SEQ ID NO: 1732840 - DNA, 15 bp, Homo sapiens
aatggataaaaagac

SEQ ID NO: 1732841 - DNA, 15 bp, Homo sapiens
atggataaaaagaca

SEQ ID NO: 1732842 - DNA, 15 bp, Homo sapiens
tggataaaaagacac

SEQ ID NO: 1732843 - DNA, 15 bp, Homo sapiens
ggataaaaagacacc

SEQ ID NO: 1732844 - DNA, 15 bp, Homo sapiens
gataaaaagacacca

SEQ ID NO: 1732845 - DNA, 15 bp, Homo sapiens
ataaaaagacaccaa

SEQ ID NO: 1732846 - DNA, 15 bp, Homo sapiens
taaaaagacaccaaa

SEQ ID NO: 1732847 - DNA, 15 bp, Homo sapiens
aaaaagacaccaaaa

SEQ ID NO: 1732848 - DNA, 15 bp, Homo sapiens
aaaagacaccaaaac

SEQ ID NO: 1732849 - DNA, 15 bp, Homo sapiens
aaagacaccaaaaca

SEQ ID NO: 1732850 - DNA, 15 bp, Homo sapiens
aagacaccaaaacat

SEQ ID NO: 1732851 - DNA, 15 bp, Homo sapiens
agacaccaaaacatc

SEQ ID NO: 1732852 - DNA, 15 bp, Homo sapiens
gacaccaaaacatcc

SEQ ID NO: 1732853 - DNA, 15 bp, Homo sapiens
acaccaaaacatcca

SEQ ID NO: 1732854 - DNA, 15 bp, Homo sapiens
caccaaaacatccac

SEQ ID NO: 1732855 - DNA, 15 bp, Homo sapiens
accaaaacatccaca

SEQ ID NO: 1732856 - DNA, 15 bp, Homo sapiens
ccaaaacatccacac

SEQ ID NO: 1732857 - DNA, 15 bp, Homo sapiens
caaaacatccacact

SEQ ID NO: 1732858 - DNA, 15 bp, Homo sapiens
aaaacatccacactc

SEQ ID NO: 1732859 - DNA, 15 bp, Homo sapiens
aaacatccacactct

SEQ ID NO: 1732860 - DNA, 15 bp, Homo sapiens
aacatccacactctc

SEQ ID NO: 1732861 - DNA, 15 bp, Homo sapiens
acatccacactctca

SEQ ID NO: 1732862 - DNA, 15 bp, Homo sapiens
catccacactctcaa

SEQ ID NO: 1732863 - DNA, 15 bp, Homo sapiens
atccacactctcaaa

SEQ ID NO: 1732864 - DNA, 15 bp, Homo sapiens
tccacactctcaaac

SEQ ID NO: 1732865 - DNA, 15 bp, Homo sapiens
ccacactctcaaaca

SEQ ID NO: 1732866 - DNA, 15 bp, Homo sapiens
cacactctcaaacac

SEQ ID NO: 1732867 - DNA, 15 bp, Homo sapiens
acactctcaaacact

SEQ ID NO: 1732868 - DNA, 15 bp, Homo sapiens
cactctcaaacactg

SEQ ID NO: 1732869 - DNA, 15 bp, Homo sapiens
actctcaaacactgc

SEQ ID NO: 1732870 - DNA, 15 bp, Homo sapiens
ctctcaaacactgct

SEQ ID NO: 1732871 - DNA, 15 bp, Homo sapiens
tctcaaacactgctg

SEQ ID NO: 1732872 - DNA, 15 bp, Homo sapiens
ctcaaacactgctgc

SEQ ID NO: 1732873 - DNA, 15 bp, Homo sapiens
tcaaacactgctgca

SEQ ID NO: 1732874 - DNA, 15 bp, Homo sapiens
caaacactgctgcat

SEQ ID NO: 1732875 - DNA, 15 bp, Homo sapiens
aaacactgctgcata

SEQ ID NO: 1732876 - DNA, 15 bp, Homo sapiens
aacactgctgcatac

SEQ ID NO: 1732877 - DNA, 15 bp, Homo sapiens
acactgctgcatact

SEQ ID NO: 1732878 - DNA, 15 bp, Homo sapiens
cactgctgcatactt

SEQ ID NO: 1732879 - DNA, 15 bp, Homo sapiens
actgctgcatacttc

SEQ ID NO: 1732880 - DNA, 15 bp, Homo sapiens
ctgctgcatacttct

SEQ ID NO: 1732881 - DNA, 15 bp, Homo sapiens
tgctgcatacttctc

SEQ ID NO: 1732882 - DNA, 15 bp, Homo sapiens
gctgcatacttctca

SEQ ID NO: 1732883 - DNA, 15 bp, Homo sapiens
ctgcatacttctcat

SEQ ID NO: 1732884 - DNA, 15 bp, Homo sapiens
tgcatacttctcatg

SEQ ID NO: 1732885 - DNA, 15 bp, Homo sapiens
gcatacttctcatgt

SEQ ID NO: 1732886 - DNA, 15 bp, Homo sapiens
catacttctcatgta

SEQ ID NO: 1732887 - DNA, 15 bp, Homo sapiens
atacttctcatgtaa

SEQ ID NO: 1732888 - DNA, 15 bp, Homo sapiens
tacttctcatgtaac

SEQ ID NO: 1732889 - DNA, 15 bp, Homo sapiens
acttctcatgtaacc

SEQ ID NO: 1732890 - DNA, 15 bp, Homo sapiens
cttctcatgtaacca

SEQ ID NO: 1732891 - DNA, 15 bp, Homo sapiens
ttctcatgtaaccaa

SEQ ID NO: 1732892 - DNA, 15 bp, Homo sapiens
tctcatgtaaccaaa

SEQ ID NO: 1732893 - DNA, 15 bp, Homo sapiens
ctcatgtaaccaaaa

SEQ ID NO: 1732894 - DNA, 15 bp, Homo sapiens
tcatgtaaccaaaag

SEQ ID NO: 1732895 - DNA, 15 bp, Homo sapiens
catgtaaccaaaagc

SEQ ID NO: 1732896 - DNA, 15 bp, Homo sapiens
atgtaaccaaaagcc

SEQ ID NO: 1732897 - DNA, 15 bp, Homo sapiens
tgtaaccaaaagccc

SEQ ID NO: 1732898 - DNA, 15 bp, Homo sapiens
gtaaccaaaagcccc

SEQ ID NO: 1732899 - DNA, 15 bp, Homo sapiens
taaccaaaagcccct

SEQ ID NO: 1732900 - DNA, 15 bp, Homo sapiens
aaccaaaagccccta

SEQ ID NO: 1732901 - DNA, 15 bp, Homo sapiens
accaaaagcccctat

SEQ ID NO: 1732902 - DNA, 15 bp, Homo sapiens
ccaaaagcccctatt

SEQ ID NO: 1732903 - DNA, 15 bp, Homo sapiens
caaaagcccctattc

SEQ ID NO: 1732904 - DNA, 15 bp, Homo sapiens
aaaagcccctattca

SEQ ID NO: 1732905 - DNA, 15 bp, Homo sapiens
aaagcccctattcat

SEQ ID NO: 1732906 - DNA, 15 bp, Homo sapiens
aagcccctattcatt

SEQ ID NO: 1732907 - DNA, 15 bp, Homo sapiens
agcccctattcattg

SEQ ID NO: 1732908 - DNA, 15 bp, Homo sapiens
gcccctattcattgt

SEQ ID NO: 1732909 - DNA, 15 bp, Homo sapiens
cccctattcattgtc

SEQ ID NO: 1732910 - DNA, 15 bp, Homo sapiens
ccctattcattgtct

SEQ ID NO: 1732911 - DNA, 15 bp, Homo sapiens
cctattcattgtctt

SEQ ID NO: 1732912 - DNA, 15 bp, Homo sapiens
ctattcattgtcttc

SEQ ID NO: 1732913 - DNA, 15 bp, Homo sapiens
tattcattgtcttct

SEQ ID NO: 1732914 - DNA, 15 bp, Homo sapiens
attcattgtcttctc

SEQ ID NO: 1732915 - DNA, 15 bp, Homo sapiens
ttcattgtcttctct

SEQ ID NO: 1732916 - DNA, 15 bp, Homo sapiens
tcattgtcttctctc

SEQ ID NO: 1732917 - DNA, 15 bp, Homo sapiens
cattgtcttctctcc

SEQ ID NO: 1732918 - DNA, 15 bp, Homo sapiens
attgtcttctctcct

SEQ ID NO: 1732919 - DNA, 15 bp, Homo sapiens
ttgtcttctctcctc

SEQ ID NO: 1732920 - DNA, 15 bp, Homo sapiens
tgtcttctctcctct

SEQ ID NO: 1732921 - DNA, 15 bp, Homo sapiens
gtcttctctcctctt

SEQ ID NO: 1732922 - DNA, 15 bp, Homo sapiens
tcttctctcctcttt

SEQ ID NO: 1732923 - DNA, 15 bp, Homo sapiens
cttctctcctctttt

SEQ ID NO: 1732924 - DNA, 15 bp, Homo sapiens
ttctctcctcttttt

SEQ ID NO: 1732925 - DNA, 15 bp, Homo sapiens
tctctcctctttttt

SEQ ID NO: 1732926 - DNA, 15 bp, Homo sapiens
ctctcctcttttttt

SEQ ID NO: 1732927 - DNA, 15 bp, Homo sapiens
tctcctcttttttta

SEQ ID NO: 1732928 - DNA, 15 bp, Homo sapiens
ctcctctttttttat

SEQ ID NO: 1732929 - DNA, 15 bp, Homo sapiens
tcctctttttttatt

SEQ ID NO: 1732930 - DNA, 15 bp, Homo sapiens
cctctttttttattt

SEQ ID NO: 1732931 - DNA, 15 bp, Homo sapiens
ctctttttttatttg

SEQ ID NO: 1732932 - DNA, 15 bp, Homo sapiens
tctttttttatttgt

SEQ ID NO: 1732933 - DNA, 15 bp, Homo sapiens
ctttttttatttgtt

SEQ ID NO: 1732934 - DNA, 15 bp, Homo sapiens
tttttttatttgttt

SEQ ID NO: 1732935 - DNA, 15 bp, Homo sapiens
ttttttatttgttta

SEQ ID NO: 1732936 - DNA, 15 bp, Homo sapiens
tttttatttgtttaa

SEQ ID NO: 1732937 - DNA, 15 bp, Homo sapiens
ttttatttgtttaaa

SEQ ID NO: 1732938 - DNA, 15 bp, Homo sapiens
tttatttgtttaaaa

SEQ ID NO: 1732939 - DNA, 15 bp, Homo sapiens
ttatttgtttaaaaa

SEQ ID NO: 1732940 - DNA, 15 bp, Homo sapiens
tatttgtttaaaaag

SEQ ID NO: 1732941 - DNA, 15 bp, Homo sapiens
atttgtttaaaaagc

SEQ ID NO: 1732942 - DNA, 15 bp, Homo sapiens
tttgtttaaaaagcc

SEQ ID NO: 1732943 - DNA, 15 bp, Homo sapiens
ttgtttaaaaagcct

SEQ ID NO: 1732944 - DNA, 15 bp, Homo sapiens
tgtttaaaaagcctc

SEQ ID NO: 1732945 - DNA, 15 bp, Homo sapiens
gtttaaaaagcctca

SEQ ID NO: 1732946 - DNA, 15 bp, Homo sapiens
tttaaaaagcctcag

SEQ ID NO: 1732947 - DNA, 15 bp, Homo sapiens
ttaaaaagcctcagt

SEQ ID NO: 1732948 - DNA, 15 bp, Homo sapiens
taaaaagcctcagta

SEQ ID NO: 1732949 - DNA, 15 bp, Homo sapiens
aaaaagcctcagtaa

SEQ ID NO: 1732950 - DNA, 15 bp, Homo sapiens
aaaagcctcagtaag

SEQ ID NO: 1732951 - DNA, 15 bp, Homo sapiens
aaagcctcagtaagg

SEQ ID NO: 1732952 - DNA, 15 bp, Homo sapiens
aagcctcagtaaggg

SEQ ID NO: 1732953 - DNA, 15 bp, Homo sapiens
agcctcagtaagggc

SEQ ID NO: 1732954 - DNA, 15 bp, Homo sapiens
gcctcagtaagggca

SEQ ID NO: 1732955 - DNA, 15 bp, Homo sapiens
cctcagtaagggcaa

SEQ ID NO: 1732956 - DNA, 15 bp, Homo sapiens
ctcagtaagggcaat

SEQ ID NO: 1732957 - DNA, 15 bp, Homo sapiens
tcagtaagggcaatt

SEQ ID NO: 1732958 - DNA, 15 bp, Homo sapiens
cagtaagggcaattt

SEQ ID NO: 1732959 - DNA, 15 bp, Homo sapiens
agtaagggcaattta

SEQ ID NO: 1732960 - DNA, 15 bp, Homo sapiens
gtaagggcaatttaa

SEQ ID NO: 1732961 - DNA, 15 bp, Homo sapiens
taagggcaatttaaa

SEQ ID NO: 1732962 - DNA, 15 bp, Homo sapiens
aagggcaatttaaaa

SEQ ID NO: 1732963 - DNA, 15 bp, Homo sapiens
agggcaatttaaaaa

SEQ ID NO: 1732964 - DNA, 15 bp, Homo sapiens
gggcaatttaaaaaa

SEQ ID NO: 1732965 - DNA, 15 bp, Homo sapiens
ggcaatttaaaaaaa

SEQ ID NO: 1732966 - DNA, 15 bp, Homo sapiens
gcaatttaaaaaaaa

SEQ ID NO: 1732967 - DNA, 15 bp, Homo sapiens
caatttaaaaaaaaa

SEQ ID NO: 1732968 - DNA, 15 bp, Homo sapiens
aatttaaaaaaaaat

SEQ ID NO: 1732969 - DNA, 15 bp, Homo sapiens
atttaaaaaaaaatt

SEQ ID NO: 1732970 - DNA, 15 bp, Homo sapiens
tttaaaaaaaaatta

SEQ ID NO: 1732971 - DNA, 15 bp, Homo sapiens
aaaaaaaaattagca

SEQ ID NO: 1732972 - DNA, 15 bp, Homo sapiens
aaaaaaaattagcac

SEQ ID NO: 1732973 - DNA, 15 bp, Homo sapiens
aaaaaaattagcact

SEQ ID NO: 1732974 - DNA, 15 bp, Homo sapiens
aaaaaattagcactt

SEQ ID NO: 1732975 - DNA, 15 bp, Homo sapiens
aaaaattagcacttt

SEQ ID NO: 1732976 - DNA, 15 bp, Homo sapiens
aaaattagcactttg

SEQ ID NO: 1732977 - DNA, 15 bp, Homo sapiens
aaattagcactttgg

SEQ ID NO: 1732978 - DNA, 15 bp, Homo sapiens
aattagcactttgga

SEQ ID NO: 1732979 - DNA, 15 bp, Homo sapiens
attagcactttggag

SEQ ID NO: 1732980 - DNA, 15 bp, Homo sapiens
ttagcactttggaga

SEQ ID NO: 1732981 - DNA, 15 bp, Homo sapiens
tagcactttggagaa

SEQ ID NO: 1732982 - DNA, 15 bp, Homo sapiens
agcactttggagaat

SEQ ID NO: 1732983 - DNA, 15 bp, Homo sapiens
gcactttggagaata

SEQ ID NO: 1732984 - DNA, 15 bp, Homo sapiens
cactttggagaataa

SEQ ID NO: 1732985 - DNA, 15 bp, Homo sapiens
actttggagaataaa

SEQ ID NO: 1732986 - DNA, 15 bp, Homo sapiens
ctttggagaataaat

SEQ ID NO: 1732987 - DNA, 15 bp, Homo sapiens
tttggagaataaatt

SEQ ID NO: 1732988 - DNA, 15 bp, Homo sapiens
ttggagaataaattg

SEQ ID NO: 1732989 - DNA, 15 bp, Homo sapiens
tggagaataaattgt

SEQ ID NO: 1732990 - DNA, 15 bp, Homo sapiens
ggagaataaattgtt

SEQ ID NO: 1732991 - DNA, 15 bp, Homo sapiens
gagaataaattgttt

SEQ ID NO: 1732992 - DNA, 15 bp, Homo sapiens
agaataaattgttta

SEQ ID NO: 1732993 - DNA, 15 bp, Homo sapiens
gaataaattgtttat

SEQ ID NO: 1732994 - DNA, 15 bp, Homo sapiens
aataaattgtttatc

SEQ ID NO: 1732995 - DNA, 15 bp, Homo sapiens
ataaattgtttatca

SEQ ID NO: 1732996 - DNA, 15 bp, Homo sapiens
taaattgtttatcaa

SEQ ID NO: 1732997 - DNA, 15 bp, Homo sapiens
aaattgtttatcaaa

SEQ ID NO: 1732998 - DNA, 15 bp, Homo sapiens
aattgtttatcaaat

SEQ ID NO: 1732999 - DNA, 15 bp, Homo sapiens
attgtttatcaaatg

SEQ ID NO: 1733000 - DNA, 15 bp, Homo sapiens
ttgtttatcaaatga

SEQ ID NO: 1733001 - DNA, 15 bp, Homo sapiens
tgtttatcaaatgaa

SEQ ID NO: 1733002 - DNA, 15 bp, Homo sapiens
gtttatcaaatgaaa

SEQ ID NO: 1733003 - DNA, 15 bp, Homo sapiens
tttatcaaatgaaag

SEQ ID NO: 1733004 - DNA, 15 bp, Homo sapiens
ttatcaaatgaaagc

SEQ ID NO: 1733005 - DNA, 15 bp, Homo sapiens
tatcaaatgaaagct

SEQ ID NO: 1733006 - DNA, 15 bp, Homo sapiens
atcaaatgaaagctg

SEQ ID NO: 1733007 - DNA, 15 bp, Homo sapiens
tcaaatgaaagctgg

SEQ ID NO: 1733008 - DNA, 15 bp, Homo sapiens
caaatgaaagctggt

SEQ ID NO: 1733009 - DNA, 15 bp, Homo sapiens
aaatgaaagctggtt

SEQ ID NO: 1733010 - DNA, 15 bp, Homo sapiens
aatgaaagctggttt

SEQ ID NO: 1733011 - DNA, 15 bp, Homo sapiens
atgaaagctggtttt

SEQ ID NO: 1733012 - DNA, 15 bp, Homo sapiens
tgaaagctggtttta

SEQ ID NO: 1733013 - DNA, 15 bp, Homo sapiens
gaaagctggttttat

SEQ ID NO: 1733014 - DNA, 15 bp, Homo sapiens
aaagctggttttatt

SEQ ID NO: 1733015 - DNA, 15 bp, Homo sapiens
aagctggttttattt

SEQ ID NO: 1733016 - DNA, 15 bp, Homo sapiens
agctggttttattta

SEQ ID NO: 1733017 - DNA, 15 bp, Homo sapiens
gctggttttatttat

SEQ ID NO: 1733018 - DNA, 15 bp, Homo sapiens
ctggttttatttatt

SEQ ID NO: 1733019 - DNA, 15 bp, Homo sapiens
tggttttatttattt

SEQ ID NO: 1733020 - DNA, 15 bp, Homo sapiens
ggttttatttatttt

SEQ ID NO: 1733021 - DNA, 15 bp, Homo sapiens
gttttatttattttt

SEQ ID NO: 1733022 - DNA, 15 bp, Homo sapiens
tttatttttttagaa

SEQ ID NO: 1733023 - DNA, 15 bp, Homo sapiens
ttatttttttagaag

SEQ ID NO: 1733024 - DNA, 15 bp, Homo sapiens
tatttttttagaagt

SEQ ID NO: 1733025 - DNA, 15 bp, Homo sapiens
atttttttagaagtt

SEQ ID NO: 1733026 - DNA, 15 bp, Homo sapiens
tttttttagaagttt

SEQ ID NO: 1733027 - DNA, 15 bp, Homo sapiens
ttttttagaagtttt

SEQ ID NO: 1733028 - DNA, 15 bp, Homo sapiens
tttttagaagttttt

SEQ ID NO: 1733029 - DNA, 15 bp, Homo sapiens
ttttagaagtttttt

SEQ ID NO: 1733030 - DNA, 15 bp, Homo sapiens
tttagaagttttttt

SEQ ID NO: 1733031 - DNA, 15 bp, Homo sapiens
ttagaagtttttttt

SEQ ID NO: 1733032 - DNA, 15 bp, Homo sapiens
tagaagttttttttt

SEQ ID NO: 1733033 - DNA, 15 bp, Homo sapiens
agaagtttttttttc

SEQ ID NO: 1733034 - DNA, 15 bp, Homo sapiens
gaagtttttttttct

SEQ ID NO: 1733035 - DNA, 15 bp, Homo sapiens
aagtttttttttctt

SEQ ID NO: 1733036 - DNA, 15 bp, Homo sapiens
agtttttttttcttt

SEQ ID NO: 1733037 - DNA, 15 bp, Homo sapiens
gtttttttttcttta

SEQ ID NO: 1733038 - DNA, 15 bp, Homo sapiens
tttttttttctttat

SEQ ID NO: 1733039 - DNA, 15 bp, Homo sapiens
ttttttttctttatt

SEQ ID NO: 1733040 - DNA, 15 bp, Homo sapiens
tttttttctttattt

SEQ ID NO: 1733041 - DNA, 15 bp, Homo sapiens
ttttttctttatttt

SEQ ID NO: 1733042 - DNA, 15 bp, Homo sapiens
tttttctttattttt

SEQ ID NO: 1733043 - DNA, 15 bp, Homo sapiens
ttttctttatttttt

SEQ ID NO: 1733044 - DNA, 15 bp, Homo sapiens
tttctttattttttt

SEQ ID NO: 1733045 - DNA, 15 bp, Homo sapiens
ttctttattttttta

SEQ ID NO: 1733046 - DNA, 15 bp, Homo sapiens
tctttatttttttaa

SEQ ID NO: 1733047 - DNA, 15 bp, Homo sapiens
ctttatttttttaaa

SEQ ID NO: 1733048 - DNA, 15 bp, Homo sapiens
tttatttttttaaat

SEQ ID NO: 1733049 - DNA, 15 bp, Homo sapiens
ttatttttttaaatt

SEQ ID NO: 1733050 - DNA, 15 bp, Homo sapiens
tatttttttaaattt

SEQ ID NO: 1733051 - DNA, 15 bp, Homo sapiens
atttttttaaatttg

SEQ ID NO: 1733052 - DNA, 15 bp, Homo sapiens
tttttttaaatttgt

SEQ ID NO: 1733053 - DNA, 15 bp, Homo sapiens
ttttttaaatttgtt

SEQ ID NO: 1733054 - DNA, 15 bp, Homo sapiens
tttttaaatttgttt

SEQ ID NO: 1733055 - DNA, 15 bp, Homo sapiens
ttttaaatttgttta

SEQ ID NO: 1733056 - DNA, 15 bp, Homo sapiens
tttaaatttgtttaa

SEQ ID NO: 1733057 - DNA, 15 bp, Homo sapiens
ttaaatttgtttaaa

SEQ ID NO: 1733058 - DNA, 15 bp, Homo sapiens
taaatttgtttaaat

SEQ ID NO: 1733059 - DNA, 15 bp, Homo sapiens
aaatttgtttaaatt

SEQ ID NO: 1733060 - DNA, 15 bp, Homo sapiens
aatttgtttaaatta

SEQ ID NO: 1733061 - DNA, 15 bp, Homo sapiens
atttgtttaaattat

SEQ ID NO: 1733062 - DNA, 15 bp, Homo sapiens
tttgtttaaattata

SEQ ID NO: 1733063 - DNA, 15 bp, Homo sapiens
ttgtttaaattatac

SEQ ID NO: 1733064 - DNA, 15 bp, Homo sapiens
tgtttaaattatact

SEQ ID NO: 1733065 - DNA, 15 bp, Homo sapiens
gtttaaattatactt

SEQ ID NO: 1733066 - DNA, 15 bp, Homo sapiens
agggtacatgtgcat

SEQ ID NO: 1733067 - DNA, 15 bp, Homo sapiens
gggtacatgtgcata

SEQ ID NO: 1733068 - DNA, 15 bp, Homo sapiens
ggtacatgtgcataa

SEQ ID NO: 1733069 - DNA, 15 bp, Homo sapiens
gtacatgtgcataac

SEQ ID NO: 1733070 - DNA, 15 bp, Homo sapiens
tacatgtgcataacg

SEQ ID NO: 1733071 - DNA, 15 bp, Homo sapiens
acatgtgcataacgt

SEQ ID NO: 1733072 - DNA, 15 bp, Homo sapiens
catgtgcataacgtg

SEQ ID NO: 1733073 - DNA, 15 bp, Homo sapiens
atgtgcataacgtgc

SEQ ID NO: 1733074 - DNA, 15 bp, Homo sapiens
tgtgcataacgtgca

SEQ ID NO: 1733075 - DNA, 15 bp, Homo sapiens
gtgcataacgtgcag

SEQ ID NO: 1733076 - DNA, 15 bp, Homo sapiens
tgcataacgtgcagg

SEQ ID NO: 1733077 - DNA, 15 bp, Homo sapiens
gcataacgtgcaggt

SEQ ID NO: 1733078 - DNA, 15 bp, Homo sapiens
cataacgtgcaggtt

SEQ ID NO: 1733079 - DNA, 15 bp, Homo sapiens
ataacgtgcaggttt

SEQ ID NO: 1733080 - DNA, 15 bp, Homo sapiens
taacgtgcaggtttg

SEQ ID NO: 1733081 - DNA, 15 bp, Homo sapiens
tgcacccattaactt

SEQ ID NO: 1733082 - DNA, 15 bp, Homo sapiens
gcacccattaacttg

SEQ ID NO: 1733083 - DNA, 15 bp, Homo sapiens
cacccattaacttgt

SEQ ID NO: 1733084 - DNA, 15 bp, Homo sapiens
acccattaacttgtc

SEQ ID NO: 1733085 - DNA, 15 bp, Homo sapiens
cccattaacttgtca

SEQ ID NO: 1733086 - DNA, 15 bp, Homo sapiens
ccattaacttgtcat

SEQ ID NO: 1733087 - DNA, 15 bp, Homo sapiens
cattaacttgtcatt

SEQ ID NO: 1733088 - DNA, 15 bp, Homo sapiens
attaacttgtcattt

SEQ ID NO: 1733089 - DNA, 15 bp, Homo sapiens
ttaacttgtcattta

SEQ ID NO: 1733090 - DNA, 15 bp, Homo sapiens
taacttgtcatttac

SEQ ID NO: 1733091 - DNA, 15 bp, Homo sapiens
acttgtcatttacat

SEQ ID NO: 1733092 - DNA, 15 bp, Homo sapiens
cttgtcatttacatt

SEQ ID NO: 1733093 - DNA, 15 bp, Homo sapiens
ttgtcatttacatta

SEQ ID NO: 1733094 - DNA, 15 bp, Homo sapiens
tgtcatttacattag

SEQ ID NO: 1733095 - DNA, 15 bp, Homo sapiens
gtcatttacattagg

SEQ ID NO: 1733096 - DNA, 15 bp, Homo sapiens
atgctatccctcccc

SEQ ID NO: 1733097 - DNA, 15 bp, Homo sapiens
tgctatccctccccc

SEQ ID NO: 1733098 - DNA, 15 bp, Homo sapiens
gctatccctccccca

SEQ ID NO: 1733099 - DNA, 15 bp, Homo sapiens
ctatccctcccccat

SEQ ID NO: 1733100 - DNA, 15 bp, Homo sapiens
tatccctcccccatc

SEQ ID NO: 1733101 - DNA, 15 bp, Homo sapiens
atccctcccccatcc

SEQ ID NO: 1733102 - DNA, 15 bp, Homo sapiens
tccctcccccatccc

SEQ ID NO: 1733103 - DNA, 15 bp, Homo sapiens
ccctcccccatcccc

SEQ ID NO: 1733104 - DNA, 15 bp, Homo sapiens
cctcccccatccccc

SEQ ID NO: 1733105 - DNA, 15 bp, Homo sapiens
ctcccccatcccccc

SEQ ID NO: 1733106 - DNA, 15 bp, Homo sapiens
tcccccatcccccca

SEQ ID NO: 1733107 - DNA, 15 bp, Homo sapiens
cccccatccccccac

SEQ ID NO: 1733108 - DNA, 15 bp, Homo sapiens
ccccatccccccacc

SEQ ID NO: 1733109 - DNA, 15 bp, Homo sapiens
cccatccccccaccc

SEQ ID NO: 1733110 - DNA, 15 bp, Homo sapiens
catccccccacccca

SEQ ID NO: 1733111 - DNA, 15 bp, Homo sapiens
atccccccaccccac

SEQ ID NO: 1733112 - DNA, 15 bp, Homo sapiens
tccccccaccccaca

SEQ ID NO: 1733113 - DNA, 15 bp, Homo sapiens
ccccccaccccacaa

SEQ ID NO: 1733114 - DNA, 15 bp, Homo sapiens
cccccaccccacaat

SEQ ID NO: 1733115 - DNA, 15 bp, Homo sapiens
ccccaccccacaata

SEQ ID NO: 1733116 - DNA, 15 bp, Homo sapiens
cccaccccacaatag

SEQ ID NO: 1733117 - DNA, 15 bp, Homo sapiens
ccaccccacaatagg

SEQ ID NO: 1733118 - DNA, 15 bp, Homo sapiens
caccccacaataggc

SEQ ID NO: 1733119 - DNA, 15 bp, Homo sapiens
accccacaataggcc

SEQ ID NO: 1733120 - DNA, 15 bp, Homo sapiens
ccccacaataggccc

SEQ ID NO: 1733121 - DNA, 15 bp, Homo sapiens
cccacaataggcccc

SEQ ID NO: 1733122 - DNA, 15 bp, Homo sapiens
ccacaataggccccg

SEQ ID NO: 1733123 - DNA, 15 bp, Homo sapiens
cacaataggccccgg

SEQ ID NO: 1733124 - DNA, 15 bp, Homo sapiens
acaataggccccggt

SEQ ID NO: 1733125 - DNA, 15 bp, Homo sapiens
caataggccccggtg

SEQ ID NO: 1733126 - DNA, 15 bp, Homo sapiens
aataggccccggtgt

SEQ ID NO: 1733127 - DNA, 15 bp, Homo sapiens
ataggccccggtgtg

SEQ ID NO: 1733128 - DNA, 15 bp, Homo sapiens
taggccccggtgtgt

SEQ ID NO: 1733129 - DNA, 15 bp, Homo sapiens
aggccccggtgtgtg

SEQ ID NO: 1733130 - DNA, 15 bp, Homo sapiens
ggccccggtgtgtga

SEQ ID NO: 1733131 - DNA, 15 bp, Homo sapiens
gccccggtgtgtgat

SEQ ID NO: 1733132 - DNA, 15 bp, Homo sapiens
ccccggtgtgtgatg

SEQ ID NO: 1733133 - DNA, 15 bp, Homo sapiens
cccggtgtgtgatgt

SEQ ID NO: 1733134 - DNA, 15 bp, Homo sapiens
tgtgatgttcccctt

SEQ ID NO: 1733135 - DNA, 15 bp, Homo sapiens
gtgatgttccccttc

SEQ ID NO: 1733136 - DNA, 15 bp, Homo sapiens
tgatgttccccttcc

SEQ ID NO: 1733137 - DNA, 15 bp, Homo sapiens
gatgttccccttcct

SEQ ID NO: 1733138 - DNA, 15 bp, Homo sapiens
atgttccccttcctg

SEQ ID NO: 1733139 - DNA, 15 bp, Homo sapiens
ccttcctgtgtccaa

SEQ ID NO: 1733140 - DNA, 15 bp, Homo sapiens
cttcctgtgtccaag

SEQ ID NO: 1733141 - DNA, 15 bp, Homo sapiens
ttctcattgttcagt

SEQ ID NO: 1733142 - DNA, 15 bp, Homo sapiens
tctcattgttcagtt

SEQ ID NO: 1733143 - DNA, 15 bp, Homo sapiens
ctcattgttcagttc

SEQ ID NO: 1733144 - DNA, 15 bp, Homo sapiens
tcattgttcagttcc

SEQ ID NO: 1733145 - DNA, 15 bp, Homo sapiens
cattgttcagttccc

SEQ ID NO: 1733146 - DNA, 15 bp, Homo sapiens
attgttcagttccca

SEQ ID NO: 1733147 - DNA, 15 bp, Homo sapiens
ttgttcagttcccac

SEQ ID NO: 1733148 - DNA, 15 bp, Homo sapiens
tgttcagttcccacc

SEQ ID NO: 1733149 - DNA, 15 bp, Homo sapiens
gttcagttcccacct

SEQ ID NO: 1733150 - DNA, 15 bp, Homo sapiens
ttcagttcccacctg

SEQ ID NO: 1733151 - DNA, 15 bp, Homo sapiens
tcagttcccacctgt

SEQ ID NO: 1733152 - DNA, 15 bp, Homo sapiens
cagttcccacctgtg

SEQ ID NO: 1733153 - DNA, 15 bp, Homo sapiens
agttcccacctgtga

SEQ ID NO: 1733154 - DNA, 15 bp, Homo sapiens
gttcccacctgtgag

SEQ ID NO: 1733155 - DNA, 15 bp, Homo sapiens
ttcccacctgtgagt

SEQ ID NO: 1733156 - DNA, 15 bp, Homo sapiens
tcccacctgtgagtg

SEQ ID NO: 1733157 - DNA, 15 bp, Homo sapiens
cccacctgtgagtga

SEQ ID NO: 1733158 - DNA, 15 bp, Homo sapiens
ccacctgtgagtgag

SEQ ID NO: 1733159 - DNA, 15 bp, Homo sapiens
cacctgtgagtgaga

SEQ ID NO: 1733160 - DNA, 15 bp, Homo sapiens
acctgtgagtgagaa

SEQ ID NO: 1733161 - DNA, 15 bp, Homo sapiens
tgtgagtgagaacat

SEQ ID NO: 1733162 - DNA, 15 bp, Homo sapiens
gtgagtgagaacatg

SEQ ID NO: 1733163 - DNA, 15 bp, Homo sapiens
tgagtgagaacatga

SEQ ID NO: 1733164 - DNA, 15 bp, Homo sapiens
gagtgagaacatgag

SEQ ID NO: 1733165 - DNA, 15 bp, Homo sapiens
agtgagaacatgagg

SEQ ID NO: 1733166 - DNA, 15 bp, Homo sapiens
gtgagaacatgaggt

SEQ ID NO: 1733167 - DNA, 15 bp, Homo sapiens
tgagaacatgaggtg

SEQ ID NO: 1733168 - DNA, 15 bp, Homo sapiens
gagaacatgaggtgt

SEQ ID NO: 1733169 - DNA, 15 bp, Homo sapiens
agaacatgaggtgtt

SEQ ID NO: 1733170 - DNA, 15 bp, Homo sapiens
gaacatgaggtgttt

SEQ ID NO: 1733171 - DNA, 15 bp, Homo sapiens
aacatgaggtgtttg

SEQ ID NO: 1733172 - DNA, 15 bp, Homo sapiens
acatgaggtgtttgg

SEQ ID NO: 1733173 - DNA, 15 bp, Homo sapiens
catgaggtgtttggt

SEQ ID NO: 1733174 - DNA, 15 bp, Homo sapiens
atgaggtgtttggtt

SEQ ID NO: 1733175 - DNA, 15 bp, Homo sapiens
tgaggtgtttggttt

SEQ ID NO: 1733176 - DNA, 15 bp, Homo sapiens
gaggtgtttggtttt

SEQ ID NO: 1733177 - DNA, 15 bp, Homo sapiens
aggtgtttggttttt

SEQ ID NO: 1733178 - DNA, 15 bp, Homo sapiens
ggtgtttggtttttt

SEQ ID NO: 1733179 - DNA, 15 bp, Homo sapiens
gtgtttggttttttg

SEQ ID NO: 1733180 - DNA, 15 bp, Homo sapiens
tgtttggttttttgt

SEQ ID NO: 1733181 - DNA, 15 bp, Homo sapiens
gtttggttttttgtc

SEQ ID NO: 1733182 - DNA, 15 bp, Homo sapiens
tttggttttttgtcc

SEQ ID NO: 1733183 - DNA, 15 bp, Homo sapiens
ttggttttttgtcct

SEQ ID NO: 1733184 - DNA, 15 bp, Homo sapiens
tggttttttgtcctt

SEQ ID NO: 1733185 - DNA, 15 bp, Homo sapiens
ggttttttgtccttg

SEQ ID NO: 1733186 - DNA, 15 bp, Homo sapiens
gttttttgtccttgc

SEQ ID NO: 1733187 - DNA, 15 bp, Homo sapiens
ttttttgtccttgcg

SEQ ID NO: 1733188 - DNA, 15 bp, Homo sapiens
gatagtttgctgagg

SEQ ID NO: 1733189 - DNA, 15 bp, Homo sapiens
atagtttgctgagga

SEQ ID NO: 1733190 - DNA, 15 bp, Homo sapiens
gtttgctgaggatgg

SEQ ID NO: 1733191 - DNA, 15 bp, Homo sapiens
tttgctgaggatggt

SEQ ID NO: 1733192 - DNA, 15 bp, Homo sapiens
ttgctgaggatggtt

SEQ ID NO: 1733193 - DNA, 15 bp, Homo sapiens
tgctgaggatggttt

SEQ ID NO: 1733194 - DNA, 15 bp, Homo sapiens
gctgaggatggtttc

SEQ ID NO: 1733195 - DNA, 15 bp, Homo sapiens
ctgaggatggtttcc

SEQ ID NO: 1733196 - DNA, 15 bp, Homo sapiens
tgaggatggtttcca

SEQ ID NO: 1733197 - DNA, 15 bp, Homo sapiens
gaggatggtttccag

SEQ ID NO: 1733198 - DNA, 15 bp, Homo sapiens
aggatggtttccagc

SEQ ID NO: 1733199 - DNA, 15 bp, Homo sapiens
ggatggtttccagct

SEQ ID NO: 1733200 - DNA, 15 bp, Homo sapiens
atggtttccagcttc

SEQ ID NO: 1733201 - DNA, 15 bp, Homo sapiens
tggtttccagcttca

SEQ ID NO: 1733202 - DNA, 15 bp, Homo sapiens
tcatccatgtcccta

SEQ ID NO: 1733203 - DNA, 15 bp, Homo sapiens
catccatgtccctac

SEQ ID NO: 1733204 - DNA, 15 bp, Homo sapiens
atccatgtccctaca

SEQ ID NO: 1733205 - DNA, 15 bp, Homo sapiens
tccatgtccctacaa

SEQ ID NO: 1733206 - DNA, 15 bp, Homo sapiens
ccatgtccctacaaa

SEQ ID NO: 1733207 - DNA, 15 bp, Homo sapiens
catgtccctacaaag

SEQ ID NO: 1733208 - DNA, 15 bp, Homo sapiens
atgtccctacaaagg

SEQ ID NO: 1733209 - DNA, 15 bp, Homo sapiens
tgtccctacaaagga

SEQ ID NO: 1733210 - DNA, 15 bp, Homo sapiens
gtccctacaaaggac

SEQ ID NO: 1733211 - DNA, 15 bp, Homo sapiens
tccctacaaaggaca

SEQ ID NO: 1733212 - DNA, 15 bp, Homo sapiens
ccctacaaaggacat

SEQ ID NO: 1733213 - DNA, 15 bp, Homo sapiens
cctacaaaggacatg

SEQ ID NO: 1733214 - DNA, 15 bp, Homo sapiens
ctacaaaggacatga

SEQ ID NO: 1733215 - DNA, 15 bp, Homo sapiens
tacaaaggacatgaa

SEQ ID NO: 1733216 - DNA, 15 bp, Homo sapiens
acaaaggacatgaac

SEQ ID NO: 1733217 - DNA, 15 bp, Homo sapiens
caaaggacatgaact

SEQ ID NO: 1733218 - DNA, 15 bp, Homo sapiens
aaaggacatgaactc

SEQ ID NO: 1733219 - DNA, 15 bp, Homo sapiens
aaggacatgaactca

SEQ ID NO: 1733220 - DNA, 15 bp, Homo sapiens
aggacatgaactcat

SEQ ID NO: 1733221 - DNA, 15 bp, Homo sapiens
gacatgaactcatca

SEQ ID NO: 1733222 - DNA, 15 bp, Homo sapiens
acatgaactcatcat

SEQ ID NO: 1733223 - DNA, 15 bp, Homo sapiens
catgaactcatcatt

SEQ ID NO: 1733224 - DNA, 15 bp, Homo sapiens
atgaactcatcattt

SEQ ID NO: 1733225 - DNA, 15 bp, Homo sapiens
tgaactcatcatttt

SEQ ID NO: 1733226 - DNA, 15 bp, Homo sapiens
gaactcatcattttt

SEQ ID NO: 1733227 - DNA, 15 bp, Homo sapiens
aactcatcatttttt

SEQ ID NO: 1733228 - DNA, 15 bp, Homo sapiens
actcatcatttttta

SEQ ID NO: 1733229 - DNA, 15 bp, Homo sapiens
ctcatcattttttat

SEQ ID NO: 1733230 - DNA, 15 bp, Homo sapiens
tcatcattttttatg

SEQ ID NO: 1733231 - DNA, 15 bp, Homo sapiens
catcattttttatgg

SEQ ID NO: 1733232 - DNA, 15 bp, Homo sapiens
atcattttttatggc

SEQ ID NO: 1733233 - DNA, 15 bp, Homo sapiens
tcattttttatggct

SEQ ID NO: 1733234 - DNA, 15 bp, Homo sapiens
cattttttatggctg

SEQ ID NO: 1733235 - DNA, 15 bp, Homo sapiens
attttttatggctgc

SEQ ID NO: 1733236 - DNA, 15 bp, Homo sapiens
gctgcatagtattcc

SEQ ID NO: 1733237 - DNA, 15 bp, Homo sapiens
ctgcatagtattcca

SEQ ID NO: 1733238 - DNA, 15 bp, Homo sapiens
agtattccatggtgt

SEQ ID NO: 1733239 - DNA, 15 bp, Homo sapiens
gtattccatggtgta

SEQ ID NO: 1733240 - DNA, 15 bp, Homo sapiens
tattccatggtgtat

SEQ ID NO: 1733241 - DNA, 15 bp, Homo sapiens
attccatggtgtata

SEQ ID NO: 1733242 - DNA, 15 bp, Homo sapiens
ttccatggtgtatat

SEQ ID NO: 1733243 - DNA, 15 bp, Homo sapiens
tccatggtgtatatg

SEQ ID NO: 1733244 - DNA, 15 bp, Homo sapiens
ccatggtgtatatgt

SEQ ID NO: 1733245 - DNA, 15 bp, Homo sapiens
catggtgtatatgtg

SEQ ID NO: 1733246 - DNA, 15 bp, Homo sapiens
atggtgtatatgtgc

SEQ ID NO: 1733247 - DNA, 15 bp, Homo sapiens
tggtgtatatgtgcc

SEQ ID NO: 1733248 - DNA, 15 bp, Homo sapiens
ggtgtatatgtgcca

SEQ ID NO: 1733249 - DNA, 15 bp, Homo sapiens
gtgtatatgtgccac

SEQ ID NO: 1733250 - DNA, 15 bp, Homo sapiens
tgtatatgtgccaca

SEQ ID NO: 1733251 - DNA, 15 bp, Homo sapiens
gtatatgtgccacat

SEQ ID NO: 1733252 - DNA, 15 bp, Homo sapiens
tatatgtgccacatt

SEQ ID NO: 1733253 - DNA, 15 bp, Homo sapiens
atatgtgccacattt

SEQ ID NO: 1733254 - DNA, 15 bp, Homo sapiens
tatgtgccacatttt

SEQ ID NO: 1733255 - DNA, 15 bp, Homo sapiens
tgccacattttctta

SEQ ID NO: 1733256 - DNA, 15 bp, Homo sapiens
gccacattttcttaa

SEQ ID NO: 1733257 - DNA, 15 bp, Homo sapiens
ccacattttcttaat

SEQ ID NO: 1733258 - DNA, 15 bp, Homo sapiens
cacattttcttaatc

SEQ ID NO: 1733259 - DNA, 15 bp, Homo sapiens
acattttcttaatcc

SEQ ID NO: 1733260 - DNA, 15 bp, Homo sapiens
cattttcttaatcca

SEQ ID NO: 1733261 - DNA, 15 bp, Homo sapiens
attttcttaatccag

SEQ ID NO: 1733262 - DNA, 15 bp, Homo sapiens
ttttcttaatccagt

SEQ ID NO: 1733263 - DNA, 15 bp, Homo sapiens
tttcttaatccagtc

SEQ ID NO: 1733264 - DNA, 15 bp, Homo sapiens
ttcttaatccagtct

SEQ ID NO: 1733265 - DNA, 15 bp, Homo sapiens
tcttaatccagtcta

SEQ ID NO: 1733266 - DNA, 15 bp, Homo sapiens
cttaatccagtctat

SEQ ID NO: 1733267 - DNA, 15 bp, Homo sapiens
ttaatccagtctatc

SEQ ID NO: 1733268 - DNA, 15 bp, Homo sapiens
taatccagtctatca

SEQ ID NO: 1733269 - DNA, 15 bp, Homo sapiens
aatccagtctatcat

SEQ ID NO: 1733270 - DNA, 15 bp, Homo sapiens
atccagtctatcatt

SEQ ID NO: 1733271 - DNA, 15 bp, Homo sapiens
tccagtctatcattg

SEQ ID NO: 1733272 - DNA, 15 bp, Homo sapiens
ccagtctatcattgt

SEQ ID NO: 1733273 - DNA, 15 bp, Homo sapiens
cagtctatcattgtt

SEQ ID NO: 1733274 - DNA, 15 bp, Homo sapiens
agtctatcattgttg

SEQ ID NO: 1733275 - DNA, 15 bp, Homo sapiens
gtctatcattgttgg

SEQ ID NO: 1733276 - DNA, 15 bp, Homo sapiens
tctatcattgttgga

SEQ ID NO: 1733277 - DNA, 15 bp, Homo sapiens
ctatcattgttggac

SEQ ID NO: 1733278 - DNA, 15 bp, Homo sapiens
tatcattgttggaca

SEQ ID NO: 1733279 - DNA, 15 bp, Homo sapiens
atcattgttggacat

SEQ ID NO: 1733280 - DNA, 15 bp, Homo sapiens
tcattgttggacatt

SEQ ID NO: 1733281 - DNA, 15 bp, Homo sapiens
cattgttggacattt

SEQ ID NO: 1733282 - DNA, 15 bp, Homo sapiens
attgttggacatttg

SEQ ID NO: 1733283 - DNA, 15 bp, Homo sapiens
ttgttggacatttgg

SEQ ID NO: 1733284 - DNA, 15 bp, Homo sapiens
tgttggacatttggg

SEQ ID NO: 1733285 - DNA, 15 bp, Homo sapiens
gttggacatttgggt

SEQ ID NO: 1733286 - DNA, 15 bp, Homo sapiens
ttggacatttgggtt

SEQ ID NO: 1733287 - DNA, 15 bp, Homo sapiens
tggacatttgggttg

SEQ ID NO: 1733288 - DNA, 15 bp, Homo sapiens
ggacatttgggttgg

SEQ ID NO: 1733289 - DNA, 15 bp, Homo sapiens
gacatttgggttggt

SEQ ID NO: 1733290 - DNA, 15 bp, Homo sapiens
acatttgggttggtt

SEQ ID NO: 1733291 - DNA, 15 bp, Homo sapiens
ttgggttggttccaa

SEQ ID NO: 1733292 - DNA, 15 bp, Homo sapiens
tgggttggttccaag

SEQ ID NO: 1733293 - DNA, 15 bp, Homo sapiens
gggttggttccaagt

SEQ ID NO: 1733294 - DNA, 15 bp, Homo sapiens
ggttggttccaagtc

SEQ ID NO: 1733295 - DNA, 15 bp, Homo sapiens
gttggttccaagtct

SEQ ID NO: 1733296 - DNA, 15 bp, Homo sapiens
ttggttccaagtctt

SEQ ID NO: 1733297 - DNA, 15 bp, Homo sapiens
tggttccaagtcttt

SEQ ID NO: 1733298 - DNA, 15 bp, Homo sapiens
ggttccaagtctttg

SEQ ID NO: 1733299 - DNA, 15 bp, Homo sapiens
gttccaagtctttgc

SEQ ID NO: 1733300 - DNA, 15 bp, Homo sapiens
ttccaagtctttgct

SEQ ID NO: 1733301 - DNA, 15 bp, Homo sapiens
tccaagtctttgcta

SEQ ID NO: 1733302 - DNA, 15 bp, Homo sapiens
ccaagtctttgctat

SEQ ID NO: 1733303 - DNA, 15 bp, Homo sapiens
caagtctttgctatt

SEQ ID NO: 1733304 - DNA, 15 bp, Homo sapiens
tgtgaatagtgctgc

SEQ ID NO: 1733305 - DNA, 15 bp, Homo sapiens
gtgaatagtgctgca

SEQ ID NO: 1733306 - DNA, 15 bp, Homo sapiens
tgaatagtgctgcaa

SEQ ID NO: 1733307 - DNA, 15 bp, Homo sapiens
gaatagtgctgcaat

SEQ ID NO: 1733308 - DNA, 15 bp, Homo sapiens
tgcaataaacatact

SEQ ID NO: 1733309 - DNA, 15 bp, Homo sapiens
gcaataaacatactt

SEQ ID NO: 1733310 - DNA, 15 bp, Homo sapiens
caataaacatacttg

SEQ ID NO: 1733311 - DNA, 15 bp, Homo sapiens
aataaacatacttgt

SEQ ID NO: 1733312 - DNA, 15 bp, Homo sapiens
ataaacatacttgtg

SEQ ID NO: 1733313 - DNA, 15 bp, Homo sapiens
taaacatacttgtgc

SEQ ID NO: 1733314 - DNA, 15 bp, Homo sapiens
aaacatacttgtgca

SEQ ID NO: 1733315 - DNA, 15 bp, Homo sapiens
aacatacttgtgcat

SEQ ID NO: 1733316 - DNA, 15 bp, Homo sapiens
acatacttgtgcatg

SEQ ID NO: 1733317 - DNA, 15 bp, Homo sapiens
catacttgtgcatgt

SEQ ID NO: 1733318 - DNA, 15 bp, Homo sapiens
atacttgtgcatgtg

SEQ ID NO: 1733319 - DNA, 15 bp, Homo sapiens
tacttgtgcatgtgt

SEQ ID NO: 1733320 - DNA, 15 bp, Homo sapiens
acttgtgcatgtgtc

SEQ ID NO: 1733321 - DNA, 15 bp, Homo sapiens
cttgtgcatgtgtct

SEQ ID NO: 1733322 - DNA, 15 bp, Homo sapiens
ttgtgcatgtgtctg

SEQ ID NO: 1733323 - DNA, 15 bp, Homo sapiens
tgtgcatgtgtctgt

SEQ ID NO: 1733324 - DNA, 15 bp, Homo sapiens
gtgcatgtgtctgta

SEQ ID NO: 1733325 - DNA, 15 bp, Homo sapiens
tgcatgtgtctgtat

SEQ ID NO: 1733326 - DNA, 15 bp, Homo sapiens
gcatgtgtctgtata

SEQ ID NO: 1733327 - DNA, 15 bp, Homo sapiens
catgtgtctgtatag

SEQ ID NO: 1733328 - DNA, 15 bp, Homo sapiens
atgtgtctgtatagc

SEQ ID NO: 1733329 - DNA, 15 bp, Homo sapiens
tgtgtctgtatagca

SEQ ID NO: 1733330 - DNA, 15 bp, Homo sapiens
gtgtctgtatagcag

SEQ ID NO: 1733331 - DNA, 15 bp, Homo sapiens
tgtctgtatagcagc

SEQ ID NO: 1733332 - DNA, 15 bp, Homo sapiens
gtctgtatagcagca

SEQ ID NO: 1733333 - DNA, 15 bp, Homo sapiens
tctgtatagcagcat

SEQ ID NO: 1733334 - DNA, 15 bp, Homo sapiens
ctgtatagcagcatg

SEQ ID NO: 1733335 - DNA, 15 bp, Homo sapiens
tgtatagcagcatga

SEQ ID NO: 1733336 - DNA, 15 bp, Homo sapiens
gtatagcagcatgat

SEQ ID NO: 1733337 - DNA, 15 bp, Homo sapiens
tatagcagcatgatt

SEQ ID NO: 1733338 - DNA, 15 bp, Homo sapiens
atagcagcatgattt

SEQ ID NO: 1733339 - DNA, 15 bp, Homo sapiens
tagcagcatgattta

SEQ ID NO: 1733340 - DNA, 15 bp, Homo sapiens
agcagcatgatttat

SEQ ID NO: 1733341 - DNA, 15 bp, Homo sapiens
gcagcatgatttata

SEQ ID NO: 1733342 - DNA, 15 bp, Homo sapiens
cagcatgatttatat

SEQ ID NO: 1733343 - DNA, 15 bp, Homo sapiens
agcatgatttatatt

SEQ ID NO: 1733344 - DNA, 15 bp, Homo sapiens
gcatgatttatattc

SEQ ID NO: 1733345 - DNA, 15 bp, Homo sapiens
catgatttatattcc

SEQ ID NO: 1733346 - DNA, 15 bp, Homo sapiens
atattcctttgggta

SEQ ID NO: 1733347 - DNA, 15 bp, Homo sapiens
tattcctttgggtat

SEQ ID NO: 1733348 - DNA, 15 bp, Homo sapiens
attcctttgggtata

SEQ ID NO: 1733349 - DNA, 15 bp, Homo sapiens
ttcctttgggtatat

SEQ ID NO: 1733350 - DNA, 15 bp, Homo sapiens
tcctttgggtatata

SEQ ID NO: 1733351 - DNA, 15 bp, Homo sapiens
cctttgggtatatac

SEQ ID NO: 1733352 - DNA, 15 bp, Homo sapiens
ctttgggtatatacc

SEQ ID NO: 1733353 - DNA, 15 bp, Homo sapiens
tttgggtatatacct

SEQ ID NO: 1733354 - DNA, 15 bp, Homo sapiens
ttgggtatataccta

SEQ ID NO: 1733355 - DNA, 15 bp, Homo sapiens
tgggtatatacctag

SEQ ID NO: 1733356 - DNA, 15 bp, Homo sapiens
gggtatatacctagt

SEQ ID NO: 1733357 - DNA, 15 bp, Homo sapiens
ggtatatacctagta

SEQ ID NO: 1733358 - DNA, 15 bp, Homo sapiens
gtatatacctagtaa

SEQ ID NO: 1733359 - DNA, 15 bp, Homo sapiens
tatatacctagtaat

SEQ ID NO: 1733360 - DNA, 15 bp, Homo sapiens
atatacctagtaatg

SEQ ID NO: 1733361 - DNA, 15 bp, Homo sapiens
cctagtaatgggatg

SEQ ID NO: 1733362 - DNA, 15 bp, Homo sapiens
ctagtaatgggatgg

SEQ ID NO: 1733363 - DNA, 15 bp, Homo sapiens
tagtaatgggatggc

SEQ ID NO: 1733364 - DNA, 15 bp, Homo sapiens
agtaatgggatggct

SEQ ID NO: 1733365 - DNA, 15 bp, Homo sapiens
gtaatgggatggctg

SEQ ID NO: 1733366 - DNA, 15 bp, Homo sapiens
taatgggatggctgg

SEQ ID NO: 1733367 - DNA, 15 bp, Homo sapiens
aatgggatggctggg

SEQ ID NO: 1733368 - DNA, 15 bp, Homo sapiens
atgggatggctgggt

SEQ ID NO: 1733369 - DNA, 15 bp, Homo sapiens
tgggatggctgggtc

SEQ ID NO: 1733370 - DNA, 15 bp, Homo sapiens
gggatggctgggtca

SEQ ID NO: 1733371 - DNA, 15 bp, Homo sapiens
ggatggctgggtcaa

SEQ ID NO: 1733372 - DNA, 15 bp, Homo sapiens
gatggctgggtcaaa

SEQ ID NO: 1733373 - DNA, 15 bp, Homo sapiens
atggctgggtcaaat

SEQ ID NO: 1733374 - DNA, 15 bp, Homo sapiens
tggctgggtcaaatg

SEQ ID NO: 1733375 - DNA, 15 bp, Homo sapiens
ggctgggtcaaatga

SEQ ID NO: 1733376 - DNA, 15 bp, Homo sapiens
gctgggtcaaatgat

SEQ ID NO: 1733377 - DNA, 15 bp, Homo sapiens
ctgggtcaaatgata

SEQ ID NO: 1733378 - DNA, 15 bp, Homo sapiens
tgggtcaaatgatat

SEQ ID NO: 1733379 - DNA, 15 bp, Homo sapiens
gggtcaaatgatatt

SEQ ID NO: 1733380 - DNA, 15 bp, Homo sapiens
ggtcaaatgatattt

SEQ ID NO: 1733381 - DNA, 15 bp, Homo sapiens
gtcaaatgatatttc

SEQ ID NO: 1733382 - DNA, 15 bp, Homo sapiens
tcaaatgatatttct

SEQ ID NO: 1733383 - DNA, 15 bp, Homo sapiens
caaatgatatttcta

SEQ ID NO: 1733384 - DNA, 15 bp, Homo sapiens
aaatgatatttctag

SEQ ID NO: 1733385 - DNA, 15 bp, Homo sapiens
aatgatatttctagt

SEQ ID NO: 1733386 - DNA, 15 bp, Homo sapiens
atgatatttctagtt

SEQ ID NO: 1733387 - DNA, 15 bp, Homo sapiens
tgatatttctagttc

SEQ ID NO: 1733388 - DNA, 15 bp, Homo sapiens
gatatttctagttct

SEQ ID NO: 1733389 - DNA, 15 bp, Homo sapiens
atatttctagttcta

SEQ ID NO: 1733390 - DNA, 15 bp, Homo sapiens
tatttctagttctag

SEQ ID NO: 1733391 - DNA, 15 bp, Homo sapiens
atttctagttctaga

SEQ ID NO: 1733392 - DNA, 15 bp, Homo sapiens
tttctagttctagat

SEQ ID NO: 1733393 - DNA, 15 bp, Homo sapiens
ttctagttctagatc

SEQ ID NO: 1733394 - DNA, 15 bp, Homo sapiens
tctagttctagatcc

SEQ ID NO: 1733395 - DNA, 15 bp, Homo sapiens
ctagttctagatcct

SEQ ID NO: 1733396 - DNA, 15 bp, Homo sapiens
tagttctagatcctt

SEQ ID NO: 1733397 - DNA, 15 bp, Homo sapiens
agttctagatccttg

SEQ ID NO: 1733398 - DNA, 15 bp, Homo sapiens
ccttgaggaatcacc

SEQ ID NO: 1733399 - DNA, 15 bp, Homo sapiens
cttgaggaatcacca

SEQ ID NO: 1733400 - DNA, 15 bp, Homo sapiens
tgtcttccacaatgg

SEQ ID NO: 1733401 - DNA, 15 bp, Homo sapiens
gtcttccacaatggt

SEQ ID NO: 1733402 - DNA, 15 bp, Homo sapiens
caatggttgaactag

SEQ ID NO: 1733403 - DNA, 15 bp, Homo sapiens
aatggttgaactagt

SEQ ID NO: 1733404 - DNA, 15 bp, Homo sapiens
atggttgaactagtt

SEQ ID NO: 1733405 - DNA, 15 bp, Homo sapiens
tggttgaactagttt

SEQ ID NO: 1733406 - DNA, 15 bp, Homo sapiens
ggttgaactagttta

SEQ ID NO: 1733407 - DNA, 15 bp, Homo sapiens
gttgaactagtttac

SEQ ID NO: 1733408 - DNA, 15 bp, Homo sapiens
ttgaactagtttaca

SEQ ID NO: 1733409 - DNA, 15 bp, Homo sapiens
tgaactagtttacag

SEQ ID NO: 1733410 - DNA, 15 bp, Homo sapiens
gaactagtttacagt

SEQ ID NO: 1733411 - DNA, 15 bp, Homo sapiens
aactagtttacagtc

SEQ ID NO: 1733412 - DNA, 15 bp, Homo sapiens
actagtttacagtcc

SEQ ID NO: 1733413 - DNA, 15 bp, Homo sapiens
ctagtttacagtccc

SEQ ID NO: 1733414 - DNA, 15 bp, Homo sapiens
tagtttacagtccca

SEQ ID NO: 1733415 - DNA, 15 bp, Homo sapiens
agtttacagtcccac

SEQ ID NO: 1733416 - DNA, 15 bp, Homo sapiens
gtttacagtcccacc

SEQ ID NO: 1733417 - DNA, 15 bp, Homo sapiens
tttacagtcccacca

SEQ ID NO: 1733418 - DNA, 15 bp, Homo sapiens
ttacagtcccaccaa

SEQ ID NO: 1733419 - DNA, 15 bp, Homo sapiens
tacagtcccaccaat

SEQ ID NO: 1733420 - DNA, 15 bp, Homo sapiens
acagtcccaccaata

SEQ ID NO: 1733421 - DNA, 15 bp, Homo sapiens
cagtcccaccaatag

SEQ ID NO: 1733422 - DNA, 15 bp, Homo sapiens
agtcccaccaatagt

SEQ ID NO: 1733423 - DNA, 15 bp, Homo sapiens
gtcccaccaatagtg

SEQ ID NO: 1733424 - DNA, 15 bp, Homo sapiens
tcccaccaatagtgt

SEQ ID NO: 1733425 - DNA, 15 bp, Homo sapiens
cccaccaatagtgta

SEQ ID NO: 1733426 - DNA, 15 bp, Homo sapiens
ccaccaatagtgtaa

SEQ ID NO: 1733427 - DNA, 15 bp, Homo sapiens
caccaatagtgtaaa

SEQ ID NO: 1733428 - DNA, 15 bp, Homo sapiens
accaatagtgtaaaa

SEQ ID NO: 1733429 - DNA, 15 bp, Homo sapiens
ccaatagtgtaaaag

SEQ ID NO: 1733430 - DNA, 15 bp, Homo sapiens
caatagtgtaaaagt

SEQ ID NO: 1733431 - DNA, 15 bp, Homo sapiens
aatagtgtaaaagtg

SEQ ID NO: 1733432 - DNA, 15 bp, Homo sapiens
atagtgtaaaagtgt

SEQ ID NO: 1733433 - DNA, 15 bp, Homo sapiens
tagtgtaaaagtgtt

SEQ ID NO: 1733434 - DNA, 15 bp, Homo sapiens
agtgtaaaagtgttc

SEQ ID NO: 1733435 - DNA, 15 bp, Homo sapiens
cctatttctccacat

SEQ ID NO: 1733436 - DNA, 15 bp, Homo sapiens
ctatttctccacatc

SEQ ID NO: 1733437 - DNA, 15 bp, Homo sapiens
tatttctccacatcc

SEQ ID NO: 1733438 - DNA, 15 bp, Homo sapiens
ttctccacatcctct

SEQ ID NO: 1733439 - DNA, 15 bp, Homo sapiens
tctccacatcctctc

SEQ ID NO: 1733440 - DNA, 15 bp, Homo sapiens
ctccacatcctctcc

SEQ ID NO: 1733441 - DNA, 15 bp, Homo sapiens
tccacatcctctcca

SEQ ID NO: 1733442 - DNA, 15 bp, Homo sapiens
ccacatcctctccag

SEQ ID NO: 1733443 - DNA, 15 bp, Homo sapiens
cacatcctctccagc

SEQ ID NO: 1733444 - DNA, 15 bp, Homo sapiens
acatcctctccagca

SEQ ID NO: 1733445 - DNA, 15 bp, Homo sapiens
catcctctccagcac

SEQ ID NO: 1733446 - DNA, 15 bp, Homo sapiens
atcctctccagcacc

SEQ ID NO: 1733447 - DNA, 15 bp, Homo sapiens
tcctctccagcacct

SEQ ID NO: 1733448 - DNA, 15 bp, Homo sapiens
cctctccagcacctg

SEQ ID NO: 1733449 - DNA, 15 bp, Homo sapiens
ctctccagcacctgt

SEQ ID NO: 1733450 - DNA, 15 bp, Homo sapiens
tctccagcacctgtt

SEQ ID NO: 1733451 - DNA, 15 bp, Homo sapiens
ctccagcacctgttg

SEQ ID NO: 1733452 - DNA, 15 bp, Homo sapiens
tccagcacctgttgt

SEQ ID NO: 1733453 - DNA, 15 bp, Homo sapiens
ccagcacctgttgtt

SEQ ID NO: 1733454 - DNA, 15 bp, Homo sapiens
cagcacctgttgttt

SEQ ID NO: 1733455 - DNA, 15 bp, Homo sapiens
agcacctgttgtttc

SEQ ID NO: 1733456 - DNA, 15 bp, Homo sapiens
gcacctgttgtttcc

SEQ ID NO: 1733457 - DNA, 15 bp, Homo sapiens
cacctgttgtttcct

SEQ ID NO: 1733458 - DNA, 15 bp, Homo sapiens
acctgttgtttcctg

SEQ ID NO: 1733459 - DNA, 15 bp, Homo sapiens
cctgttgtttcctga

SEQ ID NO: 1733460 - DNA, 15 bp, Homo sapiens
ctgttgtttcctgac

SEQ ID NO: 1733461 - DNA, 15 bp, Homo sapiens
tgttgtttcctgact

SEQ ID NO: 1733462 - DNA, 15 bp, Homo sapiens
gttgtttcctgactt

SEQ ID NO: 1733463 - DNA, 15 bp, Homo sapiens
ttgtttcctgacttt

SEQ ID NO: 1733464 - DNA, 15 bp, Homo sapiens
tgtttcctgactttt

SEQ ID NO: 1733465 - DNA, 15 bp, Homo sapiens
gtttcctgacttttt

SEQ ID NO: 1733466 - DNA, 15 bp, Homo sapiens
tttcctgacttttta

SEQ ID NO: 1733467 - DNA, 15 bp, Homo sapiens
ttcctgactttttaa

SEQ ID NO: 1733468 - DNA, 15 bp, Homo sapiens
tcctgactttttaat

SEQ ID NO: 1733469 - DNA, 15 bp, Homo sapiens
cctgactttttaatg

SEQ ID NO: 1733470 - DNA, 15 bp, Homo sapiens
ctgactttttaatga

SEQ ID NO: 1733471 - DNA, 15 bp, Homo sapiens
gactttttaatgatt

SEQ ID NO: 1733472 - DNA, 15 bp, Homo sapiens
actttttaatgattg

SEQ ID NO: 1733473 - DNA, 15 bp, Homo sapiens
ctttttaatgattgc

SEQ ID NO: 1733474 - DNA, 15 bp, Homo sapiens
tttttaatgattgcc

SEQ ID NO: 1733475 - DNA, 15 bp, Homo sapiens
ttttaatgattgcca

SEQ ID NO: 1733476 - DNA, 15 bp, Homo sapiens
tttaatgattgccat

SEQ ID NO: 1733477 - DNA, 15 bp, Homo sapiens
ttaatgattgccatt

SEQ ID NO: 1733478 - DNA, 15 bp, Homo sapiens
taatgattgccattc

SEQ ID NO: 1733479 - DNA, 15 bp, Homo sapiens
aatgattgccattct

SEQ ID NO: 1733480 - DNA, 15 bp, Homo sapiens
atgattgccattcta

SEQ ID NO: 1733481 - DNA, 15 bp, Homo sapiens
tgattgccattctaa

SEQ ID NO: 1733482 - DNA, 15 bp, Homo sapiens
gattgccattctaac

SEQ ID NO: 1733483 - DNA, 15 bp, Homo sapiens
attgccattctaact

SEQ ID NO: 1733484 - DNA, 15 bp, Homo sapiens
ttgccattctaactg

SEQ ID NO: 1733485 - DNA, 15 bp, Homo sapiens
tgccattctaactgg

SEQ ID NO: 1733486 - DNA, 15 bp, Homo sapiens
gccattctaactggt

SEQ ID NO: 1733487 - DNA, 15 bp, Homo sapiens
ccattctaactggtg

SEQ ID NO: 1733488 - DNA, 15 bp, Homo sapiens
cattctaactggtgt

SEQ ID NO: 1733489 - DNA, 15 bp, Homo sapiens
attctaactggtgtg

SEQ ID NO: 1733490 - DNA, 15 bp, Homo sapiens
ttctaactggtgtga

SEQ ID NO: 1733491 - DNA, 15 bp, Homo sapiens
tctaactggtgtgag

SEQ ID NO: 1733492 - DNA, 15 bp, Homo sapiens
ctaactggtgtgaga

SEQ ID NO: 1733493 - DNA, 15 bp, Homo sapiens
taactggtgtgagat

SEQ ID NO: 1733494 - DNA, 15 bp, Homo sapiens
aactggtgtgagatg

SEQ ID NO: 1733495 - DNA, 15 bp, Homo sapiens
actggtgtgagatgg

SEQ ID NO: 1733496 - DNA, 15 bp, Homo sapiens
ctggtgtgagatggt

SEQ ID NO: 1733497 - DNA, 15 bp, Homo sapiens
tggtgtgagatggta

SEQ ID NO: 1733498 - DNA, 15 bp, Homo sapiens
ggtgtgagatggtat

SEQ ID NO: 1733499 - DNA, 15 bp, Homo sapiens
gtgtgagatggtatc

SEQ ID NO: 1733500 - DNA, 15 bp, Homo sapiens
tgtgagatggtatct

SEQ ID NO: 1733501 - DNA, 15 bp, Homo sapiens
gtgagatggtatctc

SEQ ID NO: 1733502 - DNA, 15 bp, Homo sapiens
tgagatggtatctca

SEQ ID NO: 1733503 - DNA, 15 bp, Homo sapiens
gagatggtatctcat

SEQ ID NO: 1733504 - DNA, 15 bp, Homo sapiens
agatggtatctcatt

SEQ ID NO: 1733505 - DNA, 15 bp, Homo sapiens
gatggtatctcattg

SEQ ID NO: 1733506 - DNA, 15 bp, Homo sapiens
atggtatctcattgt

SEQ ID NO: 1733507 - DNA, 15 bp, Homo sapiens
tggtatctcattgtg

SEQ ID NO: 1733508 - DNA, 15 bp, Homo sapiens
ggtatctcattgtgg

SEQ ID NO: 1733509 - DNA, 15 bp, Homo sapiens
gtatctcattgtggt

SEQ ID NO: 1733510 - DNA, 15 bp, Homo sapiens
tatctcattgtggtt

SEQ ID NO: 1733511 - DNA, 15 bp, Homo sapiens
atctcattgtggttt

SEQ ID NO: 1733512 - DNA, 15 bp, Homo sapiens
gcatttctctgatgg

SEQ ID NO: 1733513 - DNA, 15 bp, Homo sapiens
catttctctgatggc

SEQ ID NO: 1733514 - DNA, 15 bp, Homo sapiens
atttctctgatggcc

SEQ ID NO: 1733515 - DNA, 15 bp, Homo sapiens
tttctctgatggcca

SEQ ID NO: 1733516 - DNA, 15 bp, Homo sapiens
ttctctgatggccag

SEQ ID NO: 1733517 - DNA, 15 bp, Homo sapiens
tctctgatggccagt

SEQ ID NO: 1733518 - DNA, 15 bp, Homo sapiens
ctctgatggccagtg

SEQ ID NO: 1733519 - DNA, 15 bp, Homo sapiens
tctgatggccagtga

SEQ ID NO: 1733520 - DNA, 15 bp, Homo sapiens
ctgatggccagtgat

SEQ ID NO: 1733521 - DNA, 15 bp, Homo sapiens
tgatggccagtgatc

SEQ ID NO: 1733522 - DNA, 15 bp, Homo sapiens
gatggccagtgatca

SEQ ID NO: 1733523 - DNA, 15 bp, Homo sapiens
atggccagtgatcat

SEQ ID NO: 1733524 - DNA, 15 bp, Homo sapiens
tggccagtgatcatg

SEQ ID NO: 1733525 - DNA, 15 bp, Homo sapiens
ggccagtgatcatga

SEQ ID NO: 1733526 - DNA, 15 bp, Homo sapiens
gccagtgatcatgag

SEQ ID NO: 1733527 - DNA, 15 bp, Homo sapiens
ccagtgatcatgagc

SEQ ID NO: 1733528 - DNA, 15 bp, Homo sapiens
cagtgatcatgagca

SEQ ID NO: 1733529 - DNA, 15 bp, Homo sapiens
agtgatcatgagcat

SEQ ID NO: 1733530 - DNA, 15 bp, Homo sapiens
gtgatcatgagcatt

SEQ ID NO: 1733531 - DNA, 15 bp, Homo sapiens
tgatcatgagcattt

SEQ ID NO: 1733532 - DNA, 15 bp, Homo sapiens
gatcatgagcatttt

SEQ ID NO: 1733533 - DNA, 15 bp, Homo sapiens
atcatgagcattttt

SEQ ID NO: 1733534 - DNA, 15 bp, Homo sapiens
tcatgagcatttttt

SEQ ID NO: 1733535 - DNA, 15 bp, Homo sapiens
catgagcattttttc

SEQ ID NO: 1733536 - DNA, 15 bp, Homo sapiens
atgagcattttttca

SEQ ID NO: 1733537 - DNA, 15 bp, Homo sapiens
tgagcattttttcat

SEQ ID NO: 1733538 - DNA, 15 bp, Homo sapiens
gagcattttttcatg

SEQ ID NO: 1733539 - DNA, 15 bp, Homo sapiens
agcattttttcatgt

SEQ ID NO: 1733540 - DNA, 15 bp, Homo sapiens
gcattttttcatgtg

SEQ ID NO: 1733541 - DNA, 15 bp, Homo sapiens
cattttttcatgtgt

SEQ ID NO: 1733542 - DNA, 15 bp, Homo sapiens
attttttcatgtgtc

SEQ ID NO: 1733543 - DNA, 15 bp, Homo sapiens
ttttttcatgtgtct

SEQ ID NO: 1733544 - DNA, 15 bp, Homo sapiens
tttttcatgtgtcta

SEQ ID NO: 1733545 - DNA, 15 bp, Homo sapiens
ttttcatgtgtctat

SEQ ID NO: 1733546 - DNA, 15 bp, Homo sapiens
tttcatgtgtctatt

SEQ ID NO: 1733547 - DNA, 15 bp, Homo sapiens
ttcatgtgtctattg

SEQ ID NO: 1733548 - DNA, 15 bp, Homo sapiens
tcatgtgtctattgg

SEQ ID NO: 1733549 - DNA, 15 bp, Homo sapiens
catgtgtctattggc

SEQ ID NO: 1733550 - DNA, 15 bp, Homo sapiens
atgtgtctattggct

SEQ ID NO: 1733551 - DNA, 15 bp, Homo sapiens
tgtgtctattggctg

SEQ ID NO: 1733552 - DNA, 15 bp, Homo sapiens
gtgtctattggctgc

SEQ ID NO: 1733553 - DNA, 15 bp, Homo sapiens
tgtctattggctgca

SEQ ID NO: 1733554 - DNA, 15 bp, Homo sapiens
gtctattggctgcat

SEQ ID NO: 1733555 - DNA, 15 bp, Homo sapiens
tctattggctgcata

SEQ ID NO: 1733556 - DNA, 15 bp, Homo sapiens
ctattggctgcataa

SEQ ID NO: 1733557 - DNA, 15 bp, Homo sapiens
tattggctgcataaa

SEQ ID NO: 1733558 - DNA, 15 bp, Homo sapiens
attggctgcataaat

SEQ ID NO: 1733559 - DNA, 15 bp, Homo sapiens
taaatgtcttctttt

SEQ ID NO: 1733560 - DNA, 15 bp, Homo sapiens
aaatgtcttcttttg

SEQ ID NO: 1733561 - DNA, 15 bp, Homo sapiens
aatgtcttcttttga

SEQ ID NO: 1733562 - DNA, 15 bp, Homo sapiens
atgtcttcttttgag

SEQ ID NO: 1733563 - DNA, 15 bp, Homo sapiens
tgtcttcttttgagg

SEQ ID NO: 1733564 - DNA, 15 bp, Homo sapiens
gtcttcttttgagga

SEQ ID NO: 1733565 - DNA, 15 bp, Homo sapiens
tcttcttttgaggag

SEQ ID NO: 1733566 - DNA, 15 bp, Homo sapiens
cttcttttgaggagt

SEQ ID NO: 1733567 - DNA, 15 bp, Homo sapiens
ttcttttgaggagtg

SEQ ID NO: 1733568 - DNA, 15 bp, Homo sapiens
tcttttgaggagtgt

SEQ ID NO: 1733569 - DNA, 15 bp, Homo sapiens
cttttgaggagtgtc

SEQ ID NO: 1733570 - DNA, 15 bp, Homo sapiens
ttttgaggagtgtct

SEQ ID NO: 1733571 - DNA, 15 bp, Homo sapiens
tttgaggagtgtctg

SEQ ID NO: 1733572 - DNA, 15 bp, Homo sapiens
ttgaggagtgtctgt

SEQ ID NO: 1733573 - DNA, 15 bp, Homo sapiens
tgaggagtgtctgtt

SEQ ID NO: 1733574 - DNA, 15 bp, Homo sapiens
gaggagtgtctgttc

SEQ ID NO: 1733575 - DNA, 15 bp, Homo sapiens
aggagtgtctgttca

SEQ ID NO: 1733576 - DNA, 15 bp, Homo sapiens
ggagtgtctgttcat

SEQ ID NO: 1733577 - DNA, 15 bp, Homo sapiens
gagtgtctgttcata

SEQ ID NO: 1733578 - DNA, 15 bp, Homo sapiens
agtgtctgttcatat

SEQ ID NO: 1733579 - DNA, 15 bp, Homo sapiens
gtgtctgttcatatc

SEQ ID NO: 1733580 - DNA, 15 bp, Homo sapiens
tgtctgttcatatcc

SEQ ID NO: 1733581 - DNA, 15 bp, Homo sapiens
gtctgttcatatcct

SEQ ID NO: 1733582 - DNA, 15 bp, Homo sapiens
tctgttcatatcctt

SEQ ID NO: 1733583 - DNA, 15 bp, Homo sapiens
ctgttcatatccttc

SEQ ID NO: 1733584 - DNA, 15 bp, Homo sapiens
tgttcatatccttca

SEQ ID NO: 1733585 - DNA, 15 bp, Homo sapiens
gttcatatccttcac

SEQ ID NO: 1733586 - DNA, 15 bp, Homo sapiens
ttcatatccttcacc

SEQ ID NO: 1733587 - DNA, 15 bp, Homo sapiens
tcatatccttcaccc

SEQ ID NO: 1733588 - DNA, 15 bp, Homo sapiens
catatccttcaccca

SEQ ID NO: 1733589 - DNA, 15 bp, Homo sapiens
atatccttcacccac

SEQ ID NO: 1733590 - DNA, 15 bp, Homo sapiens
tatccttcacccact

SEQ ID NO: 1733591 - DNA, 15 bp, Homo sapiens
atccttcacccactt

SEQ ID NO: 1733592 - DNA, 15 bp, Homo sapiens
tccttcacccacttg

SEQ ID NO: 1733593 - DNA, 15 bp, Homo sapiens
ccttcacccacttgt

SEQ ID NO: 1733594 - DNA, 15 bp, Homo sapiens
cttcacccacttgtt

SEQ ID NO: 1733595 - DNA, 15 bp, Homo sapiens
ttcacccacttgttg

SEQ ID NO: 1733596 - DNA, 15 bp, Homo sapiens
tcacccacttgttgg

SEQ ID NO: 1733597 - DNA, 15 bp, Homo sapiens
cacccacttgttggt

SEQ ID NO: 1733598 - DNA, 15 bp, Homo sapiens
acccacttgttggtg

SEQ ID NO: 1733599 - DNA, 15 bp, Homo sapiens
cccacttgttggtgg

SEQ ID NO: 1733600 - DNA, 15 bp, Homo sapiens
ccacttgttggtggg

SEQ ID NO: 1733601 - DNA, 15 bp, Homo sapiens
cacttgttggtgggg

SEQ ID NO: 1733602 - DNA, 15 bp, Homo sapiens
acttgttggtggggt

SEQ ID NO: 1733603 - DNA, 15 bp, Homo sapiens
cttgttggtggggtt

SEQ ID NO: 1733604 - DNA, 15 bp, Homo sapiens
ttgttggtggggttg

SEQ ID NO: 1733605 - DNA, 15 bp, Homo sapiens
tgttggtggggttgt

SEQ ID NO: 1733606 - DNA, 15 bp, Homo sapiens
gttggtggggttgtt

SEQ ID NO: 1733607 - DNA, 15 bp, Homo sapiens
ttggtggggttgttt

SEQ ID NO: 1733608 - DNA, 15 bp, Homo sapiens
tggtggggttgtttt

SEQ ID NO: 1733609 - DNA, 15 bp, Homo sapiens
ggtggggttgttttt

SEQ ID NO: 1733610 - DNA, 15 bp, Homo sapiens
gtggggttgtttttt

SEQ ID NO: 1733611 - DNA, 15 bp, Homo sapiens
tggggttgttttttt

SEQ ID NO: 1733612 - DNA, 15 bp, Homo sapiens
ggggttgtttttttc

SEQ ID NO: 1733613 - DNA, 15 bp, Homo sapiens
gggttgtttttttct

SEQ ID NO: 1733614 - DNA, 15 bp, Homo sapiens
ggttgtttttttctt

SEQ ID NO: 1733615 - DNA, 15 bp, Homo sapiens
gttgtttttttcttg

SEQ ID NO: 1733616 - DNA, 15 bp, Homo sapiens
gtaaatttgtttgag

SEQ ID NO: 1733617 - DNA, 15 bp, Homo sapiens
taaatttgtttgagt

SEQ ID NO: 1733618 - DNA, 15 bp, Homo sapiens
aaatttgtttgagtt

SEQ ID NO: 1733619 - DNA, 15 bp, Homo sapiens
aatttgtttgagttc

SEQ ID NO: 1733620 - DNA, 15 bp, Homo sapiens
atttgtttgagttct

SEQ ID NO: 1733621 - DNA, 15 bp, Homo sapiens
tttgtttgagttctt

SEQ ID NO: 1733622 - DNA, 15 bp, Homo sapiens
ttgtttgagttcttt

SEQ ID NO: 1733623 - DNA, 15 bp, Homo sapiens
tgtttgagttctttg

SEQ ID NO: 1733624 - DNA, 15 bp, Homo sapiens
gtttgagttctttgt

SEQ ID NO: 1733625 - DNA, 15 bp, Homo sapiens
tttgagttctttgta

SEQ ID NO: 1733626 - DNA, 15 bp, Homo sapiens
ttgagttctttgtag

SEQ ID NO: 1733627 - DNA, 15 bp, Homo sapiens
tgagttctttgtaga

SEQ ID NO: 1733628 - DNA, 15 bp, Homo sapiens
gagttctttgtagat

SEQ ID NO: 1733629 - DNA, 15 bp, Homo sapiens
agttctttgtagatt

SEQ ID NO: 1733630 - DNA, 15 bp, Homo sapiens
gttctttgtagattc

SEQ ID NO: 1733631 - DNA, 15 bp, Homo sapiens
ttctttgtagattct

SEQ ID NO: 1733632 - DNA, 15 bp, Homo sapiens
tctttgtagattctg

SEQ ID NO: 1733633 - DNA, 15 bp, Homo sapiens
ctttgtagattctgg

SEQ ID NO: 1733634 - DNA, 15 bp, Homo sapiens
tttgtagattctgga

SEQ ID NO: 1733635 - DNA, 15 bp, Homo sapiens
gtagattctggatac

SEQ ID NO: 1733636 - DNA, 15 bp, Homo sapiens
tagattctggatact

SEQ ID NO: 1733637 - DNA, 15 bp, Homo sapiens
agattctggatacta

SEQ ID NO: 1733638 - DNA, 15 bp, Homo sapiens
gattctggatactag

SEQ ID NO: 1733639 - DNA, 15 bp, Homo sapiens
attctggatactagc

SEQ ID NO: 1733640 - DNA, 15 bp, Homo sapiens
ttctggatactagcc

SEQ ID NO: 1733641 - DNA, 15 bp, Homo sapiens
tctggatactagccc

SEQ ID NO: 1733642 - DNA, 15 bp, Homo sapiens
ctggatactagccct

SEQ ID NO: 1733643 - DNA, 15 bp, Homo sapiens
tggatactagccctt

SEQ ID NO: 1733644 - DNA, 15 bp, Homo sapiens
ggatactagcccttt

SEQ ID NO: 1733645 - DNA, 15 bp, Homo sapiens
gatactagccctttg

SEQ ID NO: 1733646 - DNA, 15 bp, Homo sapiens
atactagccctttgt

SEQ ID NO: 1733647 - DNA, 15 bp, Homo sapiens
tactagccctttgtc

SEQ ID NO: 1733648 - DNA, 15 bp, Homo sapiens
actagccctttgtca

SEQ ID NO: 1733649 - DNA, 15 bp, Homo sapiens
ctagccctttgtcag

SEQ ID NO: 1733650 - DNA, 15 bp, Homo sapiens
tagccctttgtcaga

SEQ ID NO: 1733651 - DNA, 15 bp, Homo sapiens
agccctttgtcagat

SEQ ID NO: 1733652 - DNA, 15 bp, Homo sapiens
gccctttgtcagatg

SEQ ID NO: 1733653 - DNA, 15 bp, Homo sapiens
ccctttgtcagatga

SEQ ID NO: 1733654 - DNA, 15 bp, Homo sapiens
cctttgtcagatgag

SEQ ID NO: 1733655 - DNA, 15 bp, Homo sapiens
ctttgtcagatgagt

SEQ ID NO: 1733656 - DNA, 15 bp, Homo sapiens
tttgtcagatgagta

SEQ ID NO: 1733657 - DNA, 15 bp, Homo sapiens
ttgtcagatgagtag

SEQ ID NO: 1733658 - DNA, 15 bp, Homo sapiens
tgtcagatgagtaga

SEQ ID NO: 1733659 - DNA, 15 bp, Homo sapiens
gtcagatgagtagat

SEQ ID NO: 1733660 - DNA, 15 bp, Homo sapiens
tcagatgagtagatt

SEQ ID NO: 1733661 - DNA, 15 bp, Homo sapiens
cagatgagtagattg

SEQ ID NO: 1733662 - DNA, 15 bp, Homo sapiens
agatgagtagattgc

SEQ ID NO: 1733663 - DNA, 15 bp, Homo sapiens
gatgagtagattgca

SEQ ID NO: 1733664 - DNA, 15 bp, Homo sapiens
atgagtagattgcaa

SEQ ID NO: 1733665 - DNA, 15 bp, Homo sapiens
tgagtagattgcaaa

SEQ ID NO: 1733666 - DNA, 15 bp, Homo sapiens
gagtagattgcaaaa

SEQ ID NO: 1733667 - DNA, 15 bp, Homo sapiens
agtagattgcaaaaa

SEQ ID NO: 1733668 - DNA, 15 bp, Homo sapiens
gtagattgcaaaaat

SEQ ID NO: 1733669 - DNA, 15 bp, Homo sapiens
tagattgcaaaaatt

SEQ ID NO: 1733670 - DNA, 15 bp, Homo sapiens
agattgcaaaaattt

SEQ ID NO: 1733671 - DNA, 15 bp, Homo sapiens
gattgcaaaaatttt

SEQ ID NO: 1733672 - DNA, 15 bp, Homo sapiens
attgcaaaaattttc

SEQ ID NO: 1733673 - DNA, 15 bp, Homo sapiens
ttgcaaaaattttct

SEQ ID NO: 1733674 - DNA, 15 bp, Homo sapiens
tgcaaaaattttctc

SEQ ID NO: 1733675 - DNA, 15 bp, Homo sapiens
gcaaaaattttctcc

SEQ ID NO: 1733676 - DNA, 15 bp, Homo sapiens
caaaaattttctccc

SEQ ID NO: 1733677 - DNA, 15 bp, Homo sapiens
aaaaattttctccca

SEQ ID NO: 1733678 - DNA, 15 bp, Homo sapiens
aaaattttctcccat

SEQ ID NO: 1733679 - DNA, 15 bp, Homo sapiens
aaattttctcccatt

SEQ ID NO: 1733680 - DNA, 15 bp, Homo sapiens
aattttctcccattc

SEQ ID NO: 1733681 - DNA, 15 bp, Homo sapiens
attttctcccattct

SEQ ID NO: 1733682 - DNA, 15 bp, Homo sapiens
ttttctcccattctg

SEQ ID NO: 1733683 - DNA, 15 bp, Homo sapiens
tttctcccattctgt

SEQ ID NO: 1733684 - DNA, 15 bp, Homo sapiens
ttctcccattctgta

SEQ ID NO: 1733685 - DNA, 15 bp, Homo sapiens
tctcccattctgtag

SEQ ID NO: 1733686 - DNA, 15 bp, Homo sapiens
ctcccattctgtagg

SEQ ID NO: 1733687 - DNA, 15 bp, Homo sapiens
tcccattctgtaggt

SEQ ID NO: 1733688 - DNA, 15 bp, Homo sapiens
cccattctgtaggtt

SEQ ID NO: 1733689 - DNA, 15 bp, Homo sapiens
ccattctgtaggttg

SEQ ID NO: 1733690 - DNA, 15 bp, Homo sapiens
cattctgtaggttgc

SEQ ID NO: 1733691 - DNA, 15 bp, Homo sapiens
ttctgtaggttgcca

SEQ ID NO: 1733692 - DNA, 15 bp, Homo sapiens
tctgtaggttgccag

SEQ ID NO: 1733693 - DNA, 15 bp, Homo sapiens
ctgtaggttgccagt

SEQ ID NO: 1733694 - DNA, 15 bp, Homo sapiens
tgtaggttgccagtt

SEQ ID NO: 1733695 - DNA, 15 bp, Homo sapiens
gtaggttgccagttc

SEQ ID NO: 1733696 - DNA, 15 bp, Homo sapiens
taggttgccagttca

SEQ ID NO: 1733697 - DNA, 15 bp, Homo sapiens
aggttgccagttcac

SEQ ID NO: 1733698 - DNA, 15 bp, Homo sapiens
ggttgccagttcact

SEQ ID NO: 1733699 - DNA, 15 bp, Homo sapiens
gttgccagttcactc

SEQ ID NO: 1733700 - DNA, 15 bp, Homo sapiens
ttgccagttcactct

SEQ ID NO: 1733701 - DNA, 15 bp, Homo sapiens
tgccagttcactcta

SEQ ID NO: 1733702 - DNA, 15 bp, Homo sapiens
gccagttcactctaa

SEQ ID NO: 1733703 - DNA, 15 bp, Homo sapiens
ccagttcactctaat

SEQ ID NO: 1733704 - DNA, 15 bp, Homo sapiens
cagttcactctaatg

SEQ ID NO: 1733705 - DNA, 15 bp, Homo sapiens
agttcactctaatga

SEQ ID NO: 1733706 - DNA, 15 bp, Homo sapiens
gttcactctaatgat

SEQ ID NO: 1733707 - DNA, 15 bp, Homo sapiens
ttcactctaatgata

SEQ ID NO: 1733708 - DNA, 15 bp, Homo sapiens
tcactctaatgatag

SEQ ID NO: 1733709 - DNA, 15 bp, Homo sapiens
cactctaatgatagt

SEQ ID NO: 1733710 - DNA, 15 bp, Homo sapiens
actctaatgatagtt

SEQ ID NO: 1733711 - DNA, 15 bp, Homo sapiens
ctctaatgatagttt

SEQ ID NO: 1733712 - DNA, 15 bp, Homo sapiens
tctaatgatagtttc

SEQ ID NO: 1733713 - DNA, 15 bp, Homo sapiens
cagaagctctttagt

SEQ ID NO: 1733714 - DNA, 15 bp, Homo sapiens
agaagctctttagtt

SEQ ID NO: 1733715 - DNA, 15 bp, Homo sapiens
gaagctctttagttt

SEQ ID NO: 1733716 - DNA, 15 bp, Homo sapiens
aagctctttagttta

SEQ ID NO: 1733717 - DNA, 15 bp, Homo sapiens
aattagatcccattt

SEQ ID NO: 1733718 - DNA, 15 bp, Homo sapiens
attagatcccatttt

SEQ ID NO: 1733719 - DNA, 15 bp, Homo sapiens
ttagatcccattttt

SEQ ID NO: 1733720 - DNA, 15 bp, Homo sapiens
tagatcccatttttg

SEQ ID NO: 1733721 - DNA, 15 bp, Homo sapiens
agatcccatttttgt

SEQ ID NO: 1733722 - DNA, 15 bp, Homo sapiens
gatcccatttttgtc

SEQ ID NO: 1733723 - DNA, 15 bp, Homo sapiens
atcccatttttgtca

SEQ ID NO: 1733724 - DNA, 15 bp, Homo sapiens
tcccatttttgtcaa

SEQ ID NO: 1733725 - DNA, 15 bp, Homo sapiens
cccatttttgtcaat

SEQ ID NO: 1733726 - DNA, 15 bp, Homo sapiens
ccatttttgtcaatt

SEQ ID NO: 1733727 - DNA, 15 bp, Homo sapiens
catttttgtcaattt

SEQ ID NO: 1733728 - DNA, 15 bp, Homo sapiens
atttttgtcaatttt

SEQ ID NO: 1733729 - DNA, 15 bp, Homo sapiens
tttttgtcaattttg

SEQ ID NO: 1733730 - DNA, 15 bp, Homo sapiens
ttttgtcaattttgg

SEQ ID NO: 1733731 - DNA, 15 bp, Homo sapiens
tttgtcaattttggc

SEQ ID NO: 1733732 - DNA, 15 bp, Homo sapiens
ttgtcaattttggct

SEQ ID NO: 1733733 - DNA, 15 bp, Homo sapiens
tgtcaattttggctt

SEQ ID NO: 1733734 - DNA, 15 bp, Homo sapiens
gtcaattttggcttt

SEQ ID NO: 1733735 - DNA, 15 bp, Homo sapiens
ttggcttttgttgcc

SEQ ID NO: 1733736 - DNA, 15 bp, Homo sapiens
tggcttttgttgcct

SEQ ID NO: 1733737 - DNA, 15 bp, Homo sapiens
ggcttttgttgcctt

SEQ ID NO: 1733738 - DNA, 15 bp, Homo sapiens
gcttttgttgccttt

SEQ ID NO: 1733739 - DNA, 15 bp, Homo sapiens
cttttgttgcctttg

SEQ ID NO: 1733740 - DNA, 15 bp, Homo sapiens
ttttgttgcctttgc

SEQ ID NO: 1733741 - DNA, 15 bp, Homo sapiens
tttgttgcctttgct

SEQ ID NO: 1733742 - DNA, 15 bp, Homo sapiens
ttgttgcctttgctt

SEQ ID NO: 1733743 - DNA, 15 bp, Homo sapiens
tgttgcctttgcttt

SEQ ID NO: 1733744 - DNA, 15 bp, Homo sapiens
gttgcctttgctttt

SEQ ID NO: 1733745 - DNA, 15 bp, Homo sapiens
ttgcctttgcttttg

SEQ ID NO: 1733746 - DNA, 15 bp, Homo sapiens
tgcctttgcttttgg

SEQ ID NO: 1733747 - DNA, 15 bp, Homo sapiens
gcctttgcttttggt

SEQ ID NO: 1733748 - DNA, 15 bp, Homo sapiens
cctttgcttttggtg

SEQ ID NO: 1733749 - DNA, 15 bp, Homo sapiens
ctttgcttttggtgt

SEQ ID NO: 1733750 - DNA, 15 bp, Homo sapiens
tttgcttttggtgtt

SEQ ID NO: 1733751 - DNA, 15 bp, Homo sapiens
ttttggtgttttaga

SEQ ID NO: 1733752 - DNA, 15 bp, Homo sapiens
tttggtgttttagac

SEQ ID NO: 1733753 - DNA, 15 bp, Homo sapiens
ttggtgttttagaca

SEQ ID NO: 1733754 - DNA, 15 bp, Homo sapiens
tggtgttttagacat

SEQ ID NO: 1733755 - DNA, 15 bp, Homo sapiens
ggtgttttagacatg

SEQ ID NO: 1733756 - DNA, 15 bp, Homo sapiens
gtgttttagacatga

SEQ ID NO: 1733757 - DNA, 15 bp, Homo sapiens
tgttttagacatgaa

SEQ ID NO: 1733758 - DNA, 15 bp, Homo sapiens
gttttagacatgaac

SEQ ID NO: 1733759 - DNA, 15 bp, Homo sapiens
ttttagacatgaact

SEQ ID NO: 1733760 - DNA, 15 bp, Homo sapiens
tttagacatgaactc

SEQ ID NO: 1733761 - DNA, 15 bp, Homo sapiens
ttagacatgaactcc

SEQ ID NO: 1733762 - DNA, 15 bp, Homo sapiens
tagacatgaactcct

SEQ ID NO: 1733763 - DNA, 15 bp, Homo sapiens
agacatgaactcctt

SEQ ID NO: 1733764 - DNA, 15 bp, Homo sapiens
gacatgaactccttg

SEQ ID NO: 1733765 - DNA, 15 bp, Homo sapiens
acatgaactccttga

SEQ ID NO: 1733766 - DNA, 15 bp, Homo sapiens
catgaactccttgac

SEQ ID NO: 1733767 - DNA, 15 bp, Homo sapiens
atgaactccttgacc

SEQ ID NO: 1733768 - DNA, 15 bp, Homo sapiens
tgaactccttgacca

SEQ ID NO: 1733769 - DNA, 15 bp, Homo sapiens
gaactccttgaccat

SEQ ID NO: 1733770 - DNA, 15 bp, Homo sapiens
aactccttgaccatg

SEQ ID NO: 1733771 - DNA, 15 bp, Homo sapiens
actccttgaccatgc

SEQ ID NO: 1733772 - DNA, 15 bp, Homo sapiens
ctccttgaccatgcc

SEQ ID NO: 1733773 - DNA, 15 bp, Homo sapiens
tccttgaccatgcct

SEQ ID NO: 1733774 - DNA, 15 bp, Homo sapiens
ccttgaccatgccta

SEQ ID NO: 1733775 - DNA, 15 bp, Homo sapiens
cttgaccatgcctat

SEQ ID NO: 1733776 - DNA, 15 bp, Homo sapiens
ttgaccatgcctatg

SEQ ID NO: 1733777 - DNA, 15 bp, Homo sapiens
tgaccatgcctatgt

SEQ ID NO: 1733778 - DNA, 15 bp, Homo sapiens
gaccatgcctatgtc

SEQ ID NO: 1733779 - DNA, 15 bp, Homo sapiens
accatgcctatgtcc

SEQ ID NO: 1733780 - DNA, 15 bp, Homo sapiens
ccatgcctatgtcct

SEQ ID NO: 1733781 - DNA, 15 bp, Homo sapiens
catgcctatgtcctg

SEQ ID NO: 1733782 - DNA, 15 bp, Homo sapiens
atgcctatgtcctga

SEQ ID NO: 1733783 - DNA, 15 bp, Homo sapiens
tgcctatgtcctgaa

SEQ ID NO: 1733784 - DNA, 15 bp, Homo sapiens
gcctatgtcctgaat

SEQ ID NO: 1733785 - DNA, 15 bp, Homo sapiens
aggttttcttctagg

SEQ ID NO: 1733786 - DNA, 15 bp, Homo sapiens
ggttttcttctaggg

SEQ ID NO: 1733787 - DNA, 15 bp, Homo sapiens
gttttcttctagggt

SEQ ID NO: 1733788 - DNA, 15 bp, Homo sapiens
ttttcttctagggtt

SEQ ID NO: 1733789 - DNA, 15 bp, Homo sapiens
tttcttctagggttt

SEQ ID NO: 1733790 - DNA, 15 bp, Homo sapiens
ttcttctagggtttt

SEQ ID NO: 1733791 - DNA, 15 bp, Homo sapiens
tcttctagggttttt

SEQ ID NO: 1733792 - DNA, 15 bp, Homo sapiens
cttctagggttttta

SEQ ID NO: 1733793 - DNA, 15 bp, Homo sapiens
ttctagggtttttat

SEQ ID NO: 1733794 - DNA, 15 bp, Homo sapiens
tctagggtttttatg

SEQ ID NO: 1733795 - DNA, 15 bp, Homo sapiens
ctagggtttttatgg

SEQ ID NO: 1733796 - DNA, 15 bp, Homo sapiens
tagggtttttatggt

SEQ ID NO: 1733797 - DNA, 15 bp, Homo sapiens
agggtttttatggtt

SEQ ID NO: 1733798 - DNA, 15 bp, Homo sapiens
gggtttttatggttt

SEQ ID NO: 1733799 - DNA, 15 bp, Homo sapiens
ggtttttatggtttt

SEQ ID NO: 1733800 - DNA, 15 bp, Homo sapiens
gtttttatggtttta

SEQ ID NO: 1733801 - DNA, 15 bp, Homo sapiens
tttttatggttttag

SEQ ID NO: 1733802 - DNA, 15 bp, Homo sapiens
ttttatggttttagg

SEQ ID NO: 1733803 - DNA, 15 bp, Homo sapiens
tttatggttttaggt

SEQ ID NO: 1733804 - DNA, 15 bp, Homo sapiens
ttatggttttaggtc

SEQ ID NO: 1733805 - DNA, 15 bp, Homo sapiens
tatggttttaggtct

SEQ ID NO: 1733806 - DNA, 15 bp, Homo sapiens
atggttttaggtcta

SEQ ID NO: 1733807 - DNA, 15 bp, Homo sapiens
tggttttaggtctaa

SEQ ID NO: 1733808 - DNA, 15 bp, Homo sapiens
ggttttaggtctaac

SEQ ID NO: 1733809 - DNA, 15 bp, Homo sapiens
gttttaggtctaaca

SEQ ID NO: 1733810 - DNA, 15 bp, Homo sapiens
ttttaggtctaacat

SEQ ID NO: 1733811 - DNA, 15 bp, Homo sapiens
tttaggtctaacatg

SEQ ID NO: 1733812 - DNA, 15 bp, Homo sapiens
ttaggtctaacatgt

SEQ ID NO: 1733813 - DNA, 15 bp, Homo sapiens
taggtctaacatgta

SEQ ID NO: 1733814 - DNA, 15 bp, Homo sapiens
aggtctaacatgtaa

SEQ ID NO: 1733815 - DNA, 15 bp, Homo sapiens
ggtctaacatgtaag

SEQ ID NO: 1733816 - DNA, 15 bp, Homo sapiens
gtctaacatgtaagt

SEQ ID NO: 1733817 - DNA, 15 bp, Homo sapiens
tctaacatgtaagtc

SEQ ID NO: 1733818 - DNA, 15 bp, Homo sapiens
ctaacatgtaagtct

SEQ ID NO: 1733819 - DNA, 15 bp, Homo sapiens
taacatgtaagtctt

SEQ ID NO: 1733820 - DNA, 15 bp, Homo sapiens
aacatgtaagtcttt

SEQ ID NO: 1733821 - DNA, 15 bp, Homo sapiens
acatgtaagtcttta

SEQ ID NO: 1733822 - DNA, 15 bp, Homo sapiens
catgtaagtctttaa

SEQ ID NO: 1733823 - DNA, 15 bp, Homo sapiens
atgtaagtctttaat

SEQ ID NO: 1733824 - DNA, 15 bp, Homo sapiens
tgtaagtctttaatc

SEQ ID NO: 1733825 - DNA, 15 bp, Homo sapiens
gtaagtctttaatcc

SEQ ID NO: 1733826 - DNA, 15 bp, Homo sapiens
ttaatccatcttgaa

SEQ ID NO: 1733827 - DNA, 15 bp, Homo sapiens
taatccatcttgaat

SEQ ID NO: 1733828 - DNA, 15 bp, Homo sapiens
aatccatcttgaatt

SEQ ID NO: 1733829 - DNA, 15 bp, Homo sapiens
atccatcttgaatta

SEQ ID NO: 1733830 - DNA, 15 bp, Homo sapiens
tccatcttgaattaa

SEQ ID NO: 1733831 - DNA, 15 bp, Homo sapiens
ccatcttgaattaat

SEQ ID NO: 1733832 - DNA, 15 bp, Homo sapiens
catcttgaattaatg

SEQ ID NO: 1733833 - DNA, 15 bp, Homo sapiens
atcttgaattaatgt

SEQ ID NO: 1733834 - DNA, 15 bp, Homo sapiens
tcttgaattaatgtt

SEQ ID NO: 1733835 - DNA, 15 bp, Homo sapiens
cttgaattaatgttt

SEQ ID NO: 1733836 - DNA, 15 bp, Homo sapiens
ttgaattaatgtttg

SEQ ID NO: 1733837 - DNA, 15 bp, Homo sapiens
tgaattaatgtttgt

SEQ ID NO: 1733838 - DNA, 15 bp, Homo sapiens
gaattaatgtttgta

SEQ ID NO: 1733839 - DNA, 15 bp, Homo sapiens
aattaatgtttgtat

SEQ ID NO: 1733840 - DNA, 15 bp, Homo sapiens
attaatgtttgtata

SEQ ID NO: 1733841 - DNA, 15 bp, Homo sapiens
ttaatgtttgtataa

SEQ ID NO: 1733842 - DNA, 15 bp, Homo sapiens
taatgtttgtataag

SEQ ID NO: 1733843 - DNA, 15 bp, Homo sapiens
aatgtttgtataagg

SEQ ID NO: 1733844 - DNA, 15 bp, Homo sapiens
atgtttgtataaggt

SEQ ID NO: 1733845 - DNA, 15 bp, Homo sapiens
tgtttgtataaggtg

SEQ ID NO: 1733846 - DNA, 15 bp, Homo sapiens
gtttgtataaggtgt

SEQ ID NO: 1733847 - DNA, 15 bp, Homo sapiens
aagggatccagtttc

SEQ ID NO: 1733848 - DNA, 15 bp, Homo sapiens
agggatccagtttca

SEQ ID NO: 1733849 - DNA, 15 bp, Homo sapiens
gggatccagtttcag

SEQ ID NO: 1733850 - DNA, 15 bp, Homo sapiens
ggatccagtttcagc

SEQ ID NO: 1733851 - DNA, 15 bp, Homo sapiens
gatccagtttcagct

SEQ ID NO: 1733852 - DNA, 15 bp, Homo sapiens
atccagtttcagctt

SEQ ID NO: 1733853 - DNA, 15 bp, Homo sapiens
tccagtttcagcttt

SEQ ID NO: 1733854 - DNA, 15 bp, Homo sapiens
ccagtttcagctttc

SEQ ID NO: 1733855 - DNA, 15 bp, Homo sapiens
cagtttcagctttct

SEQ ID NO: 1733856 - DNA, 15 bp, Homo sapiens
agtttcagctttcta

SEQ ID NO: 1733857 - DNA, 15 bp, Homo sapiens
gtttcagctttctac

SEQ ID NO: 1733858 - DNA, 15 bp, Homo sapiens
tttcagctttctaca

SEQ ID NO: 1733859 - DNA, 15 bp, Homo sapiens
ttcagctttctacat

SEQ ID NO: 1733860 - DNA, 15 bp, Homo sapiens
tcagctttctacata

SEQ ID NO: 1733861 - DNA, 15 bp, Homo sapiens
cagctttctacatat

SEQ ID NO: 1733862 - DNA, 15 bp, Homo sapiens
agctttctacatatg

SEQ ID NO: 1733863 - DNA, 15 bp, Homo sapiens
gctttctacatatgg

SEQ ID NO: 1733864 - DNA, 15 bp, Homo sapiens
ctttctacatatggc

SEQ ID NO: 1733865 - DNA, 15 bp, Homo sapiens
tcccagcaccatttg

SEQ ID NO: 1733866 - DNA, 15 bp, Homo sapiens
cccagcaccatttgt

SEQ ID NO: 1733867 - DNA, 15 bp, Homo sapiens
ccagcaccatttgtt

SEQ ID NO: 1733868 - DNA, 15 bp, Homo sapiens
cagcaccatttgtta

SEQ ID NO: 1733869 - DNA, 15 bp, Homo sapiens
agcaccatttgttaa

SEQ ID NO: 1733870 - DNA, 15 bp, Homo sapiens
gcaccatttgttaaa

SEQ ID NO: 1733871 - DNA, 15 bp, Homo sapiens
caccatttgttaaat

SEQ ID NO: 1733872 - DNA, 15 bp, Homo sapiens
accatttgttaaata

SEQ ID NO: 1733873 - DNA, 15 bp, Homo sapiens
ccatttgttaaatag

SEQ ID NO: 1733874 - DNA, 15 bp, Homo sapiens
catttgttaaatagg

SEQ ID NO: 1733875 - DNA, 15 bp, Homo sapiens
atttgttaaataggg

SEQ ID NO: 1733876 - DNA, 15 bp, Homo sapiens
tttgttaaataggga

SEQ ID NO: 1733877 - DNA, 15 bp, Homo sapiens
ttgttaaatagggaa

SEQ ID NO: 1733878 - DNA, 15 bp, Homo sapiens
tgttaaatagggaat

SEQ ID NO: 1733879 - DNA, 15 bp, Homo sapiens
gttaaatagggaatc

SEQ ID NO: 1733880 - DNA, 15 bp, Homo sapiens
atagggaatcctttt

SEQ ID NO: 1733881 - DNA, 15 bp, Homo sapiens
tagggaatccttttc

SEQ ID NO: 1733882 - DNA, 15 bp, Homo sapiens
agggaatccttttcc

SEQ ID NO: 1733883 - DNA, 15 bp, Homo sapiens
gggaatccttttccc

SEQ ID NO: 1733884 - DNA, 15 bp, Homo sapiens
ggaatccttttccca

SEQ ID NO: 1733885 - DNA, 15 bp, Homo sapiens
gaatccttttcccat

SEQ ID NO: 1733886 - DNA, 15 bp, Homo sapiens
aatccttttcccatt

SEQ ID NO: 1733887 - DNA, 15 bp, Homo sapiens
atccttttcccattt

SEQ ID NO: 1733888 - DNA, 15 bp, Homo sapiens
tccttttcccatttc

SEQ ID NO: 1733889 - DNA, 15 bp, Homo sapiens
ccttttcccatttct

SEQ ID NO: 1733890 - DNA, 15 bp, Homo sapiens
cttttcccatttctt

SEQ ID NO: 1733891 - DNA, 15 bp, Homo sapiens
ttttcccatttcttg

SEQ ID NO: 1733892 - DNA, 15 bp, Homo sapiens
tttcccatttcttgt

SEQ ID NO: 1733893 - DNA, 15 bp, Homo sapiens
ttcccatttcttgtt

SEQ ID NO: 1733894 - DNA, 15 bp, Homo sapiens
tcccatttcttgttt

SEQ ID NO: 1733895 - DNA, 15 bp, Homo sapiens
cccatttcttgtttt

SEQ ID NO: 1733896 - DNA, 15 bp, Homo sapiens
ccatttcttgttttt

SEQ ID NO: 1733897 - DNA, 15 bp, Homo sapiens
catttcttgtttttg

SEQ ID NO: 1733898 - DNA, 15 bp, Homo sapiens
atttcttgtttttgt

SEQ ID NO: 1733899 - DNA, 15 bp, Homo sapiens
tttcttgtttttgtc

SEQ ID NO: 1733900 - DNA, 15 bp, Homo sapiens
ttcttgtttttgtca

SEQ ID NO: 1733901 - DNA, 15 bp, Homo sapiens
tcttgtttttgtcag

SEQ ID NO: 1733902 - DNA, 15 bp, Homo sapiens
cttgtttttgtcagg

SEQ ID NO: 1733903 - DNA, 15 bp, Homo sapiens
ttgtttttgtcaggt

SEQ ID NO: 1733904 - DNA, 15 bp, Homo sapiens
tgtttttgtcaggtt

SEQ ID NO: 1733905 - DNA, 15 bp, Homo sapiens
gtttttgtcaggttt

SEQ ID NO: 1733906 - DNA, 15 bp, Homo sapiens
tttttgtcaggtttg

SEQ ID NO: 1733907 - DNA, 15 bp, Homo sapiens
ttttgtcaggtttgt

SEQ ID NO: 1733908 - DNA, 15 bp, Homo sapiens
tttgtcaggtttgtc

SEQ ID NO: 1733909 - DNA, 15 bp, Homo sapiens
gtcaaagatcagata

SEQ ID NO: 1733910 - DNA, 15 bp, Homo sapiens
tcaaagatcagatag

SEQ ID NO: 1733911 - DNA, 15 bp, Homo sapiens
caaagatcagatagt

SEQ ID NO: 1733912 - DNA, 15 bp, Homo sapiens
aaagatcagatagtt

SEQ ID NO: 1733913 - DNA, 15 bp, Homo sapiens
aagatcagatagttg

SEQ ID NO: 1733914 - DNA, 15 bp, Homo sapiens
agatcagatagttgt

SEQ ID NO: 1733915 - DNA, 15 bp, Homo sapiens
gatcagatagttgta

SEQ ID NO: 1733916 - DNA, 15 bp, Homo sapiens
atcagatagttgtag

SEQ ID NO: 1733917 - DNA, 15 bp, Homo sapiens
tcagatagttgtaga

SEQ ID NO: 1733918 - DNA, 15 bp, Homo sapiens
cagatagttgtagat

SEQ ID NO: 1733919 - DNA, 15 bp, Homo sapiens
agatagttgtagatg

SEQ ID NO: 1733920 - DNA, 15 bp, Homo sapiens
gatagttgtagatgt

SEQ ID NO: 1733921 - DNA, 15 bp, Homo sapiens
atagttgtagatgta

SEQ ID NO: 1733922 - DNA, 15 bp, Homo sapiens
tagttgtagatgtat

SEQ ID NO: 1733923 - DNA, 15 bp, Homo sapiens
agttgtagatgtatg

SEQ ID NO: 1733924 - DNA, 15 bp, Homo sapiens
gttgtagatgtatgg

SEQ ID NO: 1733925 - DNA, 15 bp, Homo sapiens
ttgtagatgtatggt

SEQ ID NO: 1733926 - DNA, 15 bp, Homo sapiens
tgtagatgtatggta

SEQ ID NO: 1733927 - DNA, 15 bp, Homo sapiens
gtagatgtatggtat

SEQ ID NO: 1733928 - DNA, 15 bp, Homo sapiens
tagatgtatggtatt

SEQ ID NO: 1733929 - DNA, 15 bp, Homo sapiens
agatgtatggtatta

SEQ ID NO: 1733930 - DNA, 15 bp, Homo sapiens
gatgtatggtattat

SEQ ID NO: 1733931 - DNA, 15 bp, Homo sapiens
atgtatggtattatt

SEQ ID NO: 1733932 - DNA, 15 bp, Homo sapiens
tgtatggtattattt

SEQ ID NO: 1733933 - DNA, 15 bp, Homo sapiens
gtatggtattatttc

SEQ ID NO: 1733934 - DNA, 15 bp, Homo sapiens
tatggtattatttct

SEQ ID NO: 1733935 - DNA, 15 bp, Homo sapiens
atggtattatttctg

SEQ ID NO: 1733936 - DNA, 15 bp, Homo sapiens
tggtattatttctga

SEQ ID NO: 1733937 - DNA, 15 bp, Homo sapiens
ggtattatttctgag

SEQ ID NO: 1733938 - DNA, 15 bp, Homo sapiens
gtattatttctgagg

SEQ ID NO: 1733939 - DNA, 15 bp, Homo sapiens
tattatttctgaggg

SEQ ID NO: 1733940 - DNA, 15 bp, Homo sapiens
attatttctgagggc

SEQ ID NO: 1733941 - DNA, 15 bp, Homo sapiens
ttatttctgagggct

SEQ ID NO: 1733942 - DNA, 15 bp, Homo sapiens
tatttctgagggctc

SEQ ID NO: 1733943 - DNA, 15 bp, Homo sapiens
atttctgagggctct

SEQ ID NO: 1733944 - DNA, 15 bp, Homo sapiens
tttctgagggctctg

SEQ ID NO: 1733945 - DNA, 15 bp, Homo sapiens
ttctgagggctctgt

SEQ ID NO: 1733946 - DNA, 15 bp, Homo sapiens
tctgagggctctgtt

SEQ ID NO: 1733947 - DNA, 15 bp, Homo sapiens
ctgagggctctgttc

SEQ ID NO: 1733948 - DNA, 15 bp, Homo sapiens
tgagggctctgttct

SEQ ID NO: 1733949 - DNA, 15 bp, Homo sapiens
gagggctctgttctg

SEQ ID NO: 1733950 - DNA, 15 bp, Homo sapiens
agggctctgttctgt

SEQ ID NO: 1733951 - DNA, 15 bp, Homo sapiens
gggctctgttctgtt

SEQ ID NO: 1733952 - DNA, 15 bp, Homo sapiens
ggctctgttctgttc

SEQ ID NO: 1733953 - DNA, 15 bp, Homo sapiens
gctctgttctgttcc

SEQ ID NO: 1733954 - DNA, 15 bp, Homo sapiens
ttccattggtctata

SEQ ID NO: 1733955 - DNA, 15 bp, Homo sapiens
tccattggtctatat

SEQ ID NO: 1733956 - DNA, 15 bp, Homo sapiens
ccattggtctatatc

SEQ ID NO: 1733957 - DNA, 15 bp, Homo sapiens
cattggtctatatct

SEQ ID NO: 1733958 - DNA, 15 bp, Homo sapiens
attggtctatatctc

SEQ ID NO: 1733959 - DNA, 15 bp, Homo sapiens
ttggtctatatctct

SEQ ID NO: 1733960 - DNA, 15 bp, Homo sapiens
tggtctatatctctg

SEQ ID NO: 1733961 - DNA, 15 bp, Homo sapiens
ggtctatatctctgt

SEQ ID NO: 1733962 - DNA, 15 bp, Homo sapiens
gtctatatctctgtt

SEQ ID NO: 1733963 - DNA, 15 bp, Homo sapiens
tctatatctctgttt

SEQ ID NO: 1733964 - DNA, 15 bp, Homo sapiens
ctatatctctgtttt

SEQ ID NO: 1733965 - DNA, 15 bp, Homo sapiens
tatatctctgttttg

SEQ ID NO: 1733966 - DNA, 15 bp, Homo sapiens
atatctctgttttgg

SEQ ID NO: 1733967 - DNA, 15 bp, Homo sapiens
tatctctgttttggt

SEQ ID NO: 1733968 - DNA, 15 bp, Homo sapiens
atctctgttttggta

SEQ ID NO: 1733969 - DNA, 15 bp, Homo sapiens
tctctgttttggtac

SEQ ID NO: 1733970 - DNA, 15 bp, Homo sapiens
ctctgttttggtacc

SEQ ID NO: 1733971 - DNA, 15 bp, Homo sapiens
tctgttttggtacca

SEQ ID NO: 1733972 - DNA, 15 bp, Homo sapiens
ctgttttggtaccag

SEQ ID NO: 1733973 - DNA, 15 bp, Homo sapiens
tgttttggtaccagt

SEQ ID NO: 1733974 - DNA, 15 bp, Homo sapiens
gttttggtaccagta

SEQ ID NO: 1733975 - DNA, 15 bp, Homo sapiens
ttttggtaccagtac

SEQ ID NO: 1733976 - DNA, 15 bp, Homo sapiens
tttggtaccagtacc

SEQ ID NO: 1733977 - DNA, 15 bp, Homo sapiens
ttggtaccagtacca

SEQ ID NO: 1733978 - DNA, 15 bp, Homo sapiens
tggtaccagtaccat

SEQ ID NO: 1733979 - DNA, 15 bp, Homo sapiens
ggtaccagtaccatg

SEQ ID NO: 1733980 - DNA, 15 bp, Homo sapiens
gtaccagtaccatgc

SEQ ID NO: 1733981 - DNA, 15 bp, Homo sapiens
taccagtaccatgct

SEQ ID NO: 1733982 - DNA, 15 bp, Homo sapiens
accagtaccatgctg

SEQ ID NO: 1733983 - DNA, 15 bp, Homo sapiens
taccatgctgttttg

SEQ ID NO: 1733984 - DNA, 15 bp, Homo sapiens
accatgctgttttgg

SEQ ID NO: 1733985 - DNA, 15 bp, Homo sapiens
ccatgctgttttggt

SEQ ID NO: 1733986 - DNA, 15 bp, Homo sapiens
catgctgttttggtt

SEQ ID NO: 1733987 - DNA, 15 bp, Homo sapiens
atgctgttttggtta

SEQ ID NO: 1733988 - DNA, 15 bp, Homo sapiens
tgctgttttggttac

SEQ ID NO: 1733989 - DNA, 15 bp, Homo sapiens
gctgttttggttact

SEQ ID NO: 1733990 - DNA, 15 bp, Homo sapiens
ctgttttggttactg

SEQ ID NO: 1733991 - DNA, 15 bp, Homo sapiens
tgttttggttactgt

SEQ ID NO: 1733992 - DNA, 15 bp, Homo sapiens
gttttggttactgta

SEQ ID NO: 1733993 - DNA, 15 bp, Homo sapiens
ttttggttactgtag

SEQ ID NO: 1733994 - DNA, 15 bp, Homo sapiens
tttggttactgtagc

SEQ ID NO: 1733995 - DNA, 15 bp, Homo sapiens
ttggttactgtagcc

SEQ ID NO: 1733996 - DNA, 15 bp, Homo sapiens
tggttactgtagcct

SEQ ID NO: 1733997 - DNA, 15 bp, Homo sapiens
ggttactgtagcctt

SEQ ID NO: 1733998 - DNA, 15 bp, Homo sapiens
gttactgtagccttg

SEQ ID NO: 1733999 - DNA, 15 bp, Homo sapiens
ttactgtagccttgt

SEQ ID NO: 1734000 - DNA, 15 bp, Homo sapiens
tactgtagccttgta

SEQ ID NO: 1734001 - DNA, 15 bp, Homo sapiens
actgtagccttgtag

SEQ ID NO: 1734002 - DNA, 15 bp, Homo sapiens
ctgtagccttgtagt

SEQ ID NO: 1734003 - DNA, 15 bp, Homo sapiens
tgtagccttgtagta

SEQ ID NO: 1734004 - DNA, 15 bp, Homo sapiens
gtagccttgtagtat

SEQ ID NO: 1734005 - DNA, 15 bp, Homo sapiens
tagccttgtagtata

SEQ ID NO: 1734006 - DNA, 15 bp, Homo sapiens
agccttgtagtatag

SEQ ID NO: 1734007 - DNA, 15 bp, Homo sapiens
gccttgtagtatagt

SEQ ID NO: 1734008 - DNA, 15 bp, Homo sapiens
ccttgtagtatagtt

SEQ ID NO: 1734009 - DNA, 15 bp, Homo sapiens
cttgtagtatagttt

SEQ ID NO: 1734010 - DNA, 15 bp, Homo sapiens
ttgtagtatagtttg

SEQ ID NO: 1734011 - DNA, 15 bp, Homo sapiens
tgtagtatagtttga

SEQ ID NO: 1734012 - DNA, 15 bp, Homo sapiens
gtagtatagtttgaa

SEQ ID NO: 1734013 - DNA, 15 bp, Homo sapiens
tagtatagtttgaag

SEQ ID NO: 1734014 - DNA, 15 bp, Homo sapiens
agtatagtttgaagt

SEQ ID NO: 1734015 - DNA, 15 bp, Homo sapiens
gtatagtttgaagtc

SEQ ID NO: 1734016 - DNA, 15 bp, Homo sapiens
tatagtttgaagtca

SEQ ID NO: 1734017 - DNA, 15 bp, Homo sapiens
atagtttgaagtcag

SEQ ID NO: 1734018 - DNA, 15 bp, Homo sapiens
tagtttgaagtcagg

SEQ ID NO: 1734019 - DNA, 15 bp, Homo sapiens
agtttgaagtcaggt

SEQ ID NO: 1734020 - DNA, 15 bp, Homo sapiens
gtttgaagtcaggta

SEQ ID NO: 1734021 - DNA, 15 bp, Homo sapiens
tttgaagtcaggtag

SEQ ID NO: 1734022 - DNA, 15 bp, Homo sapiens
ttgaagtcaggtagc

SEQ ID NO: 1734023 - DNA, 15 bp, Homo sapiens
tgaagtcaggtagca

SEQ ID NO: 1734024 - DNA, 15 bp, Homo sapiens
gaagtcaggtagcat

SEQ ID NO: 1734025 - DNA, 15 bp, Homo sapiens
aagtcaggtagcatg

SEQ ID NO: 1734026 - DNA, 15 bp, Homo sapiens
agtcaggtagcatga

SEQ ID NO: 1734027 - DNA, 15 bp, Homo sapiens
gtcaggtagcatgat

SEQ ID NO: 1734028 - DNA, 15 bp, Homo sapiens
tcaggtagcatgatg

SEQ ID NO: 1734029 - DNA, 15 bp, Homo sapiens
caggtagcatgatgc

SEQ ID NO: 1734030 - DNA, 15 bp, Homo sapiens
aggtagcatgatgcc

SEQ ID NO: 1734031 - DNA, 15 bp, Homo sapiens
ggtagcatgatgcct

SEQ ID NO: 1734032 - DNA, 15 bp, Homo sapiens
gtagcatgatgcctc

SEQ ID NO: 1734033 - DNA, 15 bp, Homo sapiens
tagcatgatgcctcc

SEQ ID NO: 1734034 - DNA, 15 bp, Homo sapiens
agcatgatgcctcca

SEQ ID NO: 1734035 - DNA, 15 bp, Homo sapiens
gcatgatgcctccag

SEQ ID NO: 1734036 - DNA, 15 bp, Homo sapiens
catgatgcctccagc

SEQ ID NO: 1734037 - DNA, 15 bp, Homo sapiens
atgatgcctccagct

SEQ ID NO: 1734038 - DNA, 15 bp, Homo sapiens
ccagctttgttcttt

SEQ ID NO: 1734039 - DNA, 15 bp, Homo sapiens
cagctttgttctttt

SEQ ID NO: 1734040 - DNA, 15 bp, Homo sapiens
agctttgttctttta

SEQ ID NO: 1734041 - DNA, 15 bp, Homo sapiens
gctttgttcttttag

SEQ ID NO: 1734042 - DNA, 15 bp, Homo sapiens
ctttgttcttttagc

SEQ ID NO: 1734043 - DNA, 15 bp, Homo sapiens
tttgttcttttagct

SEQ ID NO: 1734044 - DNA, 15 bp, Homo sapiens
ttgttcttttagctt

SEQ ID NO: 1734045 - DNA, 15 bp, Homo sapiens
tgttcttttagctta

SEQ ID NO: 1734046 - DNA, 15 bp, Homo sapiens
gttcttttagcttag

SEQ ID NO: 1734047 - DNA, 15 bp, Homo sapiens
ttcttttagcttagg

SEQ ID NO: 1734048 - DNA, 15 bp, Homo sapiens
tcttttagcttagga

SEQ ID NO: 1734049 - DNA, 15 bp, Homo sapiens
cttttagcttaggat

SEQ ID NO: 1734050 - DNA, 15 bp, Homo sapiens
ttttagcttaggatt

SEQ ID NO: 1734051 - DNA, 15 bp, Homo sapiens
tttagcttaggattg

SEQ ID NO: 1734052 - DNA, 15 bp, Homo sapiens
ttagcttaggattga

SEQ ID NO: 1734053 - DNA, 15 bp, Homo sapiens
tagcttaggattgac

SEQ ID NO: 1734054 - DNA, 15 bp, Homo sapiens
agcttaggattgact

SEQ ID NO: 1734055 - DNA, 15 bp, Homo sapiens
gcttaggattgactt

SEQ ID NO: 1734056 - DNA, 15 bp, Homo sapiens
cttaggattgacttg

SEQ ID NO: 1734057 - DNA, 15 bp, Homo sapiens
ttaggattgacttgc

SEQ ID NO: 1734058 - DNA, 15 bp, Homo sapiens
taggattgacttgcc

SEQ ID NO: 1734059 - DNA, 15 bp, Homo sapiens
aggattgacttgcca

SEQ ID NO: 1734060 - DNA, 15 bp, Homo sapiens
ggattgacttgccaa

SEQ ID NO: 1734061 - DNA, 15 bp, Homo sapiens
gattgacttgccaat

SEQ ID NO: 1734062 - DNA, 15 bp, Homo sapiens
attgacttgccaatg

SEQ ID NO: 1734063 - DNA, 15 bp, Homo sapiens
ttgacttgccaatgc

SEQ ID NO: 1734064 - DNA, 15 bp, Homo sapiens
tgacttgccaatgca

SEQ ID NO: 1734065 - DNA, 15 bp, Homo sapiens
gacttgccaatgcag

SEQ ID NO: 1734066 - DNA, 15 bp, Homo sapiens
acttgccaatgcagg

SEQ ID NO: 1734067 - DNA, 15 bp, Homo sapiens
cttgccaatgcaggc

SEQ ID NO: 1734068 - DNA, 15 bp, Homo sapiens
ttgccaatgcaggct

SEQ ID NO: 1734069 - DNA, 15 bp, Homo sapiens
tgccaatgcaggctc

SEQ ID NO: 1734070 - DNA, 15 bp, Homo sapiens
gccaatgcaggctct

SEQ ID NO: 1734071 - DNA, 15 bp, Homo sapiens
ccaatgcaggctctt

SEQ ID NO: 1734072 - DNA, 15 bp, Homo sapiens
caatgcaggctcttt

SEQ ID NO: 1734073 - DNA, 15 bp, Homo sapiens
aatgcaggctctttt

SEQ ID NO: 1734074 - DNA, 15 bp, Homo sapiens
atgcaggctcttttt

SEQ ID NO: 1734075 - DNA, 15 bp, Homo sapiens
tgcaggctctttttt

SEQ ID NO: 1734076 - DNA, 15 bp, Homo sapiens
gcaggctcttttttg

SEQ ID NO: 1734077 - DNA, 15 bp, Homo sapiens
caggctcttttttgg

SEQ ID NO: 1734078 - DNA, 15 bp, Homo sapiens
aggctcttttttggt

SEQ ID NO: 1734079 - DNA, 15 bp, Homo sapiens
ggctcttttttggtt

SEQ ID NO: 1734080 - DNA, 15 bp, Homo sapiens
gctcttttttggttc

SEQ ID NO: 1734081 - DNA, 15 bp, Homo sapiens
ctcttttttggttcc

SEQ ID NO: 1734082 - DNA, 15 bp, Homo sapiens
tcttttttggttcca

SEQ ID NO: 1734083 - DNA, 15 bp, Homo sapiens
cttttttggttccat

SEQ ID NO: 1734084 - DNA, 15 bp, Homo sapiens
ttttttggttccata

SEQ ID NO: 1734085 - DNA, 15 bp, Homo sapiens
tttttggttccatat

SEQ ID NO: 1734086 - DNA, 15 bp, Homo sapiens
ttttggttccatatt

SEQ ID NO: 1734087 - DNA, 15 bp, Homo sapiens
tttggttccatatta

SEQ ID NO: 1734088 - DNA, 15 bp, Homo sapiens
ttggttccatattaa

SEQ ID NO: 1734089 - DNA, 15 bp, Homo sapiens
tggttccatattaac

SEQ ID NO: 1734090 - DNA, 15 bp, Homo sapiens
ggttccatattaact

SEQ ID NO: 1734091 - DNA, 15 bp, Homo sapiens
gttccatattaactt

SEQ ID NO: 1734092 - DNA, 15 bp, Homo sapiens
ttccatattaacttt

SEQ ID NO: 1734093 - DNA, 15 bp, Homo sapiens
tccatattaacttta

SEQ ID NO: 1734094 - DNA, 15 bp, Homo sapiens
ccatattaactttaa

SEQ ID NO: 1734095 - DNA, 15 bp, Homo sapiens
catattaactttaaa

SEQ ID NO: 1734096 - DNA, 15 bp, Homo sapiens
atattaactttaaag

SEQ ID NO: 1734097 - DNA, 15 bp, Homo sapiens
tattaactttaaagt

SEQ ID NO: 1734098 - DNA, 15 bp, Homo sapiens
attaactttaaagta

SEQ ID NO: 1734099 - DNA, 15 bp, Homo sapiens
ttaactttaaagtag

SEQ ID NO: 1734100 - DNA, 15 bp, Homo sapiens
taactttaaagtagt

SEQ ID NO: 1734101 - DNA, 15 bp, Homo sapiens
aactttaaagtagtt

SEQ ID NO: 1734102 - DNA, 15 bp, Homo sapiens
actttaaagtagttt

SEQ ID NO: 1734103 - DNA, 15 bp, Homo sapiens
ctttaaagtagtttt

SEQ ID NO: 1734104 - DNA, 15 bp, Homo sapiens
tttaaagtagttttt

SEQ ID NO: 1734105 - DNA, 15 bp, Homo sapiens
ttaaagtagtttttt

SEQ ID NO: 1734106 - DNA, 15 bp, Homo sapiens
taaagtagttttttc

SEQ ID NO: 1734107 - DNA, 15 bp, Homo sapiens
aaagtagttttttcc

SEQ ID NO: 1734108 - DNA, 15 bp, Homo sapiens
aagtagttttttcca

SEQ ID NO: 1734109 - DNA, 15 bp, Homo sapiens
agtagttttttccaa

SEQ ID NO: 1734110 - DNA, 15 bp, Homo sapiens
gtagttttttccaat

SEQ ID NO: 1734111 - DNA, 15 bp, Homo sapiens
tagttttttccaatt

SEQ ID NO: 1734112 - DNA, 15 bp, Homo sapiens
agttttttccaattc

SEQ ID NO: 1734113 - DNA, 15 bp, Homo sapiens
gttttttccaattct

SEQ ID NO: 1734114 - DNA, 15 bp, Homo sapiens
ttttttccaattcta

SEQ ID NO: 1734115 - DNA, 15 bp, Homo sapiens
tttttccaattctat

SEQ ID NO: 1734116 - DNA, 15 bp, Homo sapiens
ttttccaattctatg

SEQ ID NO: 1734117 - DNA, 15 bp, Homo sapiens
tttccaattctatga

SEQ ID NO: 1734118 - DNA, 15 bp, Homo sapiens
ttccaattctatgaa

SEQ ID NO: 1734119 - DNA, 15 bp, Homo sapiens
tccaattctatgaag

SEQ ID NO: 1734120 - DNA, 15 bp, Homo sapiens
ccaattctatgaaga

SEQ ID NO: 1734121 - DNA, 15 bp, Homo sapiens
caattctatgaagaa

SEQ ID NO: 1734122 - DNA, 15 bp, Homo sapiens
aattctatgaagaaa

SEQ ID NO: 1734123 - DNA, 15 bp, Homo sapiens
attctatgaagaaag

SEQ ID NO: 1734124 - DNA, 15 bp, Homo sapiens
ttctatgaagaaagt

SEQ ID NO: 1734125 - DNA, 15 bp, Homo sapiens
tctatgaagaaagtc

SEQ ID NO: 1734126 - DNA, 15 bp, Homo sapiens
ctatgaagaaagtca

SEQ ID NO: 1734127 - DNA, 15 bp, Homo sapiens
tatgaagaaagtcat

SEQ ID NO: 1734128 - DNA, 15 bp, Homo sapiens
atgaagaaagtcatt

SEQ ID NO: 1734129 - DNA, 15 bp, Homo sapiens
tgaagaaagtcattg

SEQ ID NO: 1734130 - DNA, 15 bp, Homo sapiens
gaagaaagtcattgg

SEQ ID NO: 1734131 - DNA, 15 bp, Homo sapiens
aagaaagtcattggt

SEQ ID NO: 1734132 - DNA, 15 bp, Homo sapiens
agaaagtcattggta

SEQ ID NO: 1734133 - DNA, 15 bp, Homo sapiens
gaaagtcattggtag

SEQ ID NO: 1734134 - DNA, 15 bp, Homo sapiens
aaagtcattggtagc

SEQ ID NO: 1734135 - DNA, 15 bp, Homo sapiens
aagtcattggtagct

SEQ ID NO: 1734136 - DNA, 15 bp, Homo sapiens
agtcattggtagctt

SEQ ID NO: 1734137 - DNA, 15 bp, Homo sapiens
gtcattggtagcttg

SEQ ID NO: 1734138 - DNA, 15 bp, Homo sapiens
tcattggtagcttga

SEQ ID NO: 1734139 - DNA, 15 bp, Homo sapiens
cattggtagcttgat

SEQ ID NO: 1734140 - DNA, 15 bp, Homo sapiens
attggtagcttgatg

SEQ ID NO: 1734141 - DNA, 15 bp, Homo sapiens
ttggtagcttgatgg

SEQ ID NO: 1734142 - DNA, 15 bp, Homo sapiens
tggtagcttgatggg

SEQ ID NO: 1734143 - DNA, 15 bp, Homo sapiens
ggtagcttgatgggg

SEQ ID NO: 1734144 - DNA, 15 bp, Homo sapiens
gtagcttgatgggga

SEQ ID NO: 1734145 - DNA, 15 bp, Homo sapiens
tagcttgatggggat

SEQ ID NO: 1734146 - DNA, 15 bp, Homo sapiens
agcttgatggggatg

SEQ ID NO: 1734147 - DNA, 15 bp, Homo sapiens
gcttgatggggatgg

SEQ ID NO: 1734148 - DNA, 15 bp, Homo sapiens
cttgatggggatggc

SEQ ID NO: 1734149 - DNA, 15 bp, Homo sapiens
ttgatggggatggca

SEQ ID NO: 1734150 - DNA, 15 bp, Homo sapiens
tgatggggatggcat

SEQ ID NO: 1734151 - DNA, 15 bp, Homo sapiens
gatggggatggcatt

SEQ ID NO: 1734152 - DNA, 15 bp, Homo sapiens
atggggatggcattg

SEQ ID NO: 1734153 - DNA, 15 bp, Homo sapiens
tggggatggcattga

SEQ ID NO: 1734154 - DNA, 15 bp, Homo sapiens
ggggatggcattgaa

SEQ ID NO: 1734155 - DNA, 15 bp, Homo sapiens
gggatggcattgaat

SEQ ID NO: 1734156 - DNA, 15 bp, Homo sapiens
ggatggcattgaatc

SEQ ID NO: 1734157 - DNA, 15 bp, Homo sapiens
gatggcattgaatct

SEQ ID NO: 1734158 - DNA, 15 bp, Homo sapiens
atggcattgaatcta

SEQ ID NO: 1734159 - DNA, 15 bp, Homo sapiens
tggcattgaatctat

SEQ ID NO: 1734160 - DNA, 15 bp, Homo sapiens
ggcattgaatctata

SEQ ID NO: 1734161 - DNA, 15 bp, Homo sapiens
gcattgaatctataa

SEQ ID NO: 1734162 - DNA, 15 bp, Homo sapiens
cattgaatctataaa

SEQ ID NO: 1734163 - DNA, 15 bp, Homo sapiens
attgaatctataaat

SEQ ID NO: 1734164 - DNA, 15 bp, Homo sapiens
ttgaatctataaatt

SEQ ID NO: 1734165 - DNA, 15 bp, Homo sapiens
tgaatctataaatta

SEQ ID NO: 1734166 - DNA, 15 bp, Homo sapiens
gaatctataaattac

SEQ ID NO: 1734167 - DNA, 15 bp, Homo sapiens
aatctataaattacc

SEQ ID NO: 1734168 - DNA, 15 bp, Homo sapiens
atctataaattacct

SEQ ID NO: 1734169 - DNA, 15 bp, Homo sapiens
tctataaattacctt

SEQ ID NO: 1734170 - DNA, 15 bp, Homo sapiens
ctataaattaccttg

SEQ ID NO: 1734171 - DNA, 15 bp, Homo sapiens
tataaattaccttgg

SEQ ID NO: 1734172 - DNA, 15 bp, Homo sapiens
ataaattaccttggg

SEQ ID NO: 1734173 - DNA, 15 bp, Homo sapiens
taaattaccttgggc

SEQ ID NO: 1734174 - DNA, 15 bp, Homo sapiens
aaattaccttgggca

SEQ ID NO: 1734175 - DNA, 15 bp, Homo sapiens
aattaccttgggcag

SEQ ID NO: 1734176 - DNA, 15 bp, Homo sapiens
attaccttgggcagt

SEQ ID NO: 1734177 - DNA, 15 bp, Homo sapiens
ttaccttgggcagta

SEQ ID NO: 1734178 - DNA, 15 bp, Homo sapiens
taccttgggcagtat

SEQ ID NO: 1734179 - DNA, 15 bp, Homo sapiens
accttgggcagtatg

SEQ ID NO: 1734180 - DNA, 15 bp, Homo sapiens
ccttgggcagtatgg

SEQ ID NO: 1734181 - DNA, 15 bp, Homo sapiens
cttgggcagtatggc

SEQ ID NO: 1734182 - DNA, 15 bp, Homo sapiens
ttgggcagtatggcc

SEQ ID NO: 1734183 - DNA, 15 bp, Homo sapiens
tgggcagtatggcca

SEQ ID NO: 1734184 - DNA, 15 bp, Homo sapiens
gggcagtatggccat

SEQ ID NO: 1734185 - DNA, 15 bp, Homo sapiens
ggcagtatggccatt

SEQ ID NO: 1734186 - DNA, 15 bp, Homo sapiens
gcagtatggccattt

SEQ ID NO: 1734187 - DNA, 15 bp, Homo sapiens
cagtatggccatttt

SEQ ID NO: 1734188 - DNA, 15 bp, Homo sapiens
agtatggccattttc

SEQ ID NO: 1734189 - DNA, 15 bp, Homo sapiens
gtatggccattttca

SEQ ID NO: 1734190 - DNA, 15 bp, Homo sapiens
tatggccattttcac

SEQ ID NO: 1734191 - DNA, 15 bp, Homo sapiens
atggccattttcacg

SEQ ID NO: 1734192 - DNA, 15 bp, Homo sapiens
tggccattttcacga

SEQ ID NO: 1734193 - DNA, 15 bp, Homo sapiens
ggccattttcacgat

SEQ ID NO: 1734194 - DNA, 15 bp, Homo sapiens
gccattttcacgata

SEQ ID NO: 1734195 - DNA, 15 bp, Homo sapiens
ccattttcacgatat

SEQ ID NO: 1734196 - DNA, 15 bp, Homo sapiens
cattttcacgatatt

SEQ ID NO: 1734197 - DNA, 15 bp, Homo sapiens
attttcacgatattg

SEQ ID NO: 1734198 - DNA, 15 bp, Homo sapiens
ttttcacgatattga

SEQ ID NO: 1734199 - DNA, 15 bp, Homo sapiens
tttcacgatattgat

SEQ ID NO: 1734200 - DNA, 15 bp, Homo sapiens
ttcacgatattgatt

SEQ ID NO: 1734201 - DNA, 15 bp, Homo sapiens
tcacgatattgattc

SEQ ID NO: 1734202 - DNA, 15 bp, Homo sapiens
cacgatattgattct

SEQ ID NO: 1734203 - DNA, 15 bp, Homo sapiens
acgatattgattctt

SEQ ID NO: 1734204 - DNA, 15 bp, Homo sapiens
cgatattgattcttc

SEQ ID NO: 1734205 - DNA, 15 bp, Homo sapiens
gatattgattcttcc

SEQ ID NO: 1734206 - DNA, 15 bp, Homo sapiens
atattgattcttcct

SEQ ID NO: 1734207 - DNA, 15 bp, Homo sapiens
tattgattcttccta

SEQ ID NO: 1734208 - DNA, 15 bp, Homo sapiens
attgattcttcctat

SEQ ID NO: 1734209 - DNA, 15 bp, Homo sapiens
ttgattcttcctatc

SEQ ID NO: 1734210 - DNA, 15 bp, Homo sapiens
tgattcttcctatcc

SEQ ID NO: 1734211 - DNA, 15 bp, Homo sapiens
gattcttcctatcca

SEQ ID NO: 1734212 - DNA, 15 bp, Homo sapiens
attcttcctatccat

SEQ ID NO: 1734213 - DNA, 15 bp, Homo sapiens
ttcttcctatccatg

SEQ ID NO: 1734214 - DNA, 15 bp, Homo sapiens
tcttcctatccatga

SEQ ID NO: 1734215 - DNA, 15 bp, Homo sapiens
cttcctatccatgag

SEQ ID NO: 1734216 - DNA, 15 bp, Homo sapiens
ttcctatccatgagc

SEQ ID NO: 1734217 - DNA, 15 bp, Homo sapiens
catgagcatggaatg

SEQ ID NO: 1734218 - DNA, 15 bp, Homo sapiens
atgagcatggaatgt

SEQ ID NO: 1734219 - DNA, 15 bp, Homo sapiens
tgagcatggaatgtt

SEQ ID NO: 1734220 - DNA, 15 bp, Homo sapiens
gagcatggaatgttc

SEQ ID NO: 1734221 - DNA, 15 bp, Homo sapiens
agcatggaatgttct

SEQ ID NO: 1734222 - DNA, 15 bp, Homo sapiens
gcatggaatgttctt

SEQ ID NO: 1734223 - DNA, 15 bp, Homo sapiens
catggaatgttcttc

SEQ ID NO: 1734224 - DNA, 15 bp, Homo sapiens
atggaatgttcttcc

SEQ ID NO: 1734225 - DNA, 15 bp, Homo sapiens
tggaatgttcttcca

SEQ ID NO: 1734226 - DNA, 15 bp, Homo sapiens
ggaatgttcttccat

SEQ ID NO: 1734227 - DNA, 15 bp, Homo sapiens
gaatgttcttccatt

SEQ ID NO: 1734228 - DNA, 15 bp, Homo sapiens
aatgttcttccattt

SEQ ID NO: 1734229 - DNA, 15 bp, Homo sapiens
atgttcttccatttg

SEQ ID NO: 1734230 - DNA, 15 bp, Homo sapiens
tgttcttccatttgt

SEQ ID NO: 1734231 - DNA, 15 bp, Homo sapiens
gttcttccatttgtt

SEQ ID NO: 1734232 - DNA, 15 bp, Homo sapiens
ttcttccatttgttt

SEQ ID NO: 1734233 - DNA, 15 bp, Homo sapiens
tcttccatttgtttg

SEQ ID NO: 1734234 - DNA, 15 bp, Homo sapiens
cttccatttgtttgt

SEQ ID NO: 1734235 - DNA, 15 bp, Homo sapiens
ttccatttgtttgtg

SEQ ID NO: 1734236 - DNA, 15 bp, Homo sapiens
tccatttgtttgtgt

SEQ ID NO: 1734237 - DNA, 15 bp, Homo sapiens
ccatttgtttgtgtc

SEQ ID NO: 1734238 - DNA, 15 bp, Homo sapiens
catttgtttgtgtcc

SEQ ID NO: 1734239 - DNA, 15 bp, Homo sapiens
atttgtttgtgtcct

SEQ ID NO: 1734240 - DNA, 15 bp, Homo sapiens
tttgtttgtgtcctc

SEQ ID NO: 1734241 - DNA, 15 bp, Homo sapiens
ttgtttgtgtcctct

SEQ ID NO: 1734242 - DNA, 15 bp, Homo sapiens
tgtttgtgtcctctt

SEQ ID NO: 1734243 - DNA, 15 bp, Homo sapiens
gtttgtgtcctcttt

SEQ ID NO: 1734244 - DNA, 15 bp, Homo sapiens
tttgtgtcctctttt

SEQ ID NO: 1734245 - DNA, 15 bp, Homo sapiens
ttgtgtcctctttta

SEQ ID NO: 1734246 - DNA, 15 bp, Homo sapiens
tgtgtcctcttttat

SEQ ID NO: 1734247 - DNA, 15 bp, Homo sapiens
gtgtcctcttttatt

SEQ ID NO: 1734248 - DNA, 15 bp, Homo sapiens
tgtcctcttttattt

SEQ ID NO: 1734249 - DNA, 15 bp, Homo sapiens
gtcctcttttatttc

SEQ ID NO: 1734250 - DNA, 15 bp, Homo sapiens
tcctcttttatttcg

SEQ ID NO: 1734251 - DNA, 15 bp, Homo sapiens
cctcttttatttcgt

SEQ ID NO: 1734252 - DNA, 15 bp, Homo sapiens
ctcttttatttcgtt

SEQ ID NO: 1734253 - DNA, 15 bp, Homo sapiens
tcttttatttcgttg

SEQ ID NO: 1734254 - DNA, 15 bp, Homo sapiens
cttttatttcgttga

SEQ ID NO: 1734255 - DNA, 15 bp, Homo sapiens
ttttatttcgttgag

SEQ ID NO: 1734256 - DNA, 15 bp, Homo sapiens
tttatttcgttgagc

SEQ ID NO: 1734257 - DNA, 15 bp, Homo sapiens
ttatttcgttgagca

SEQ ID NO: 1734258 - DNA, 15 bp, Homo sapiens
tatttcgttgagcag

SEQ ID NO: 1734259 - DNA, 15 bp, Homo sapiens
atttcgttgagcagt

SEQ ID NO: 1734260 - DNA, 15 bp, Homo sapiens
tttcgttgagcagtg

SEQ ID NO: 1734261 - DNA, 15 bp, Homo sapiens
ttcgttgagcagtgg

SEQ ID NO: 1734262 - DNA, 15 bp, Homo sapiens
tcgttgagcagtggt

SEQ ID NO: 1734263 - DNA, 15 bp, Homo sapiens
cgttgagcagtggtt

SEQ ID NO: 1734264 - DNA, 15 bp, Homo sapiens
gttgagcagtggttt

SEQ ID NO: 1734265 - DNA, 15 bp, Homo sapiens
ttgagcagtggtttg

SEQ ID NO: 1734266 - DNA, 15 bp, Homo sapiens
tgagcagtggtttgt

SEQ ID NO: 1734267 - DNA, 15 bp, Homo sapiens
ttttattctctttga

SEQ ID NO: 1734268 - DNA, 15 bp, Homo sapiens
tttattctctttgaa

SEQ ID NO: 1734269 - DNA, 15 bp, Homo sapiens
ttattctctttgaag

SEQ ID NO: 1734270 - DNA, 15 bp, Homo sapiens
tattctctttgaagc

SEQ ID NO: 1734271 - DNA, 15 bp, Homo sapiens
attctctttgaagca

SEQ ID NO: 1734272 - DNA, 15 bp, Homo sapiens
ttctctttgaagcaa

SEQ ID NO: 1734273 - DNA, 15 bp, Homo sapiens
tctctttgaagcaat

SEQ ID NO: 1734274 - DNA, 15 bp, Homo sapiens
ctctttgaagcaatt

SEQ ID NO: 1734275 - DNA, 15 bp, Homo sapiens
tctttgaagcaattg

SEQ ID NO: 1734276 - DNA, 15 bp, Homo sapiens
ctttgaagcaattgt

SEQ ID NO: 1734277 - DNA, 15 bp, Homo sapiens
tttgaagcaattgtg

SEQ ID NO: 1734278 - DNA, 15 bp, Homo sapiens
ttgaagcaattgtga

SEQ ID NO: 1734279 - DNA, 15 bp, Homo sapiens
tgaagcaattgtgaa

SEQ ID NO: 1734280 - DNA, 15 bp, Homo sapiens
gaagcaattgtgaat

SEQ ID NO: 1734281 - DNA, 15 bp, Homo sapiens
aagcaattgtgaatg

SEQ ID NO: 1734282 - DNA, 15 bp, Homo sapiens
agcaattgtgaatgg

SEQ ID NO: 1734283 - DNA, 15 bp, Homo sapiens
gcaattgtgaatggg

SEQ ID NO: 1734284 - DNA, 15 bp, Homo sapiens
caattgtgaatggga

SEQ ID NO: 1734285 - DNA, 15 bp, Homo sapiens
aattgtgaatgggag

SEQ ID NO: 1734286 - DNA, 15 bp, Homo sapiens
attgtgaatgggagt

SEQ ID NO: 1734287 - DNA, 15 bp, Homo sapiens
atttggctctctgtc

SEQ ID NO: 1734288 - DNA, 15 bp, Homo sapiens
tttggctctctgtct

SEQ ID NO: 1734289 - DNA, 15 bp, Homo sapiens
ttggctctctgtctg

SEQ ID NO: 1734290 - DNA, 15 bp, Homo sapiens
tggctctctgtctgt

SEQ ID NO: 1734291 - DNA, 15 bp, Homo sapiens
ggctctctgtctgtt

SEQ ID NO: 1734292 - DNA, 15 bp, Homo sapiens
gctctctgtctgtta

SEQ ID NO: 1734293 - DNA, 15 bp, Homo sapiens
ctctctgtctgttat

SEQ ID NO: 1734294 - DNA, 15 bp, Homo sapiens
tctctgtctgttatt

SEQ ID NO: 1734295 - DNA, 15 bp, Homo sapiens
ctctgtctgttattg

SEQ ID NO: 1734296 - DNA, 15 bp, Homo sapiens
tctgtctgttattga

SEQ ID NO: 1734297 - DNA, 15 bp, Homo sapiens
ctgtctgttattgat

SEQ ID NO: 1734298 - DNA, 15 bp, Homo sapiens
tgtctgttattgatg

SEQ ID NO: 1734299 - DNA, 15 bp, Homo sapiens
gtctgttattgatgt

SEQ ID NO: 1734300 - DNA, 15 bp, Homo sapiens
tctgttattgatgta

SEQ ID NO: 1734301 - DNA, 15 bp, Homo sapiens
ctgttattgatgtat

SEQ ID NO: 1734302 - DNA, 15 bp, Homo sapiens
tgttattgatgtata

SEQ ID NO: 1734303 - DNA, 15 bp, Homo sapiens
gttattgatgtataa

SEQ ID NO: 1734304 - DNA, 15 bp, Homo sapiens
ttattgatgtataag

SEQ ID NO: 1734305 - DNA, 15 bp, Homo sapiens
tattgatgtataaga

SEQ ID NO: 1734306 - DNA, 15 bp, Homo sapiens
attgatgtataagaa

SEQ ID NO: 1734307 - DNA, 15 bp, Homo sapiens
ttgatgtataagaat

SEQ ID NO: 1734308 - DNA, 15 bp, Homo sapiens
tgatgtataagaatg

SEQ ID NO: 1734309 - DNA, 15 bp, Homo sapiens
gatgtataagaatgc

SEQ ID NO: 1734310 - DNA, 15 bp, Homo sapiens
atgtataagaatgct

SEQ ID NO: 1734311 - DNA, 15 bp, Homo sapiens
tgtataagaatgctt

SEQ ID NO: 1734312 - DNA, 15 bp, Homo sapiens
gtataagaatgcttg

SEQ ID NO: 1734313 - DNA, 15 bp, Homo sapiens
tataagaatgcttgt

SEQ ID NO: 1734314 - DNA, 15 bp, Homo sapiens
ataagaatgcttgtg

SEQ ID NO: 1734315 - DNA, 15 bp, Homo sapiens
taagaatgcttgtga

SEQ ID NO: 1734316 - DNA, 15 bp, Homo sapiens
aagaatgcttgtgat

SEQ ID NO: 1734317 - DNA, 15 bp, Homo sapiens
agaatgcttgtgatt

SEQ ID NO: 1734318 - DNA, 15 bp, Homo sapiens
atcagcttaaggagg

SEQ ID NO: 1734319 - DNA, 15 bp, Homo sapiens
tcagcttaaggaggc

SEQ ID NO: 1734320 - DNA, 15 bp, Homo sapiens
cagcttaaggaggct

SEQ ID NO: 1734321 - DNA, 15 bp, Homo sapiens
agcttaaggaggctt

SEQ ID NO: 1734322 - DNA, 15 bp, Homo sapiens
gcttaaggaggcttt

SEQ ID NO: 1734323 - DNA, 15 bp, Homo sapiens
cttaaggaggctttg

SEQ ID NO: 1734324 - DNA, 15 bp, Homo sapiens
ttaaggaggctttgg

SEQ ID NO: 1734325 - DNA, 15 bp, Homo sapiens
taaggaggctttggg

SEQ ID NO: 1734326 - DNA, 15 bp, Homo sapiens
aaggaggctttgggc

SEQ ID NO: 1734327 - DNA, 15 bp, Homo sapiens
aggaggctttgggct

SEQ ID NO: 1734328 - DNA, 15 bp, Homo sapiens
ggaggctttgggctg

SEQ ID NO: 1734329 - DNA, 15 bp, Homo sapiens
gaggctttgggctga

SEQ ID NO: 1734330 - DNA, 15 bp, Homo sapiens
aggctttgggctgag

SEQ ID NO: 1734331 - DNA, 15 bp, Homo sapiens
ggctttgggctgaga

SEQ ID NO: 1734332 - DNA, 15 bp, Homo sapiens
gctttgggctgagac

SEQ ID NO: 1734333 - DNA, 15 bp, Homo sapiens
ctttgggctgagaca

SEQ ID NO: 1734334 - DNA, 15 bp, Homo sapiens
tttgggctgagacaa

SEQ ID NO: 1734335 - DNA, 15 bp, Homo sapiens
ttgggctgagacaat

SEQ ID NO: 1734336 - DNA, 15 bp, Homo sapiens
tgggctgagacaatg

SEQ ID NO: 1734337 - DNA, 15 bp, Homo sapiens
gggctgagacaatgg

SEQ ID NO: 1734338 - DNA, 15 bp, Homo sapiens
ggctgagacaatggg

SEQ ID NO: 1734339 - DNA, 15 bp, Homo sapiens
gctgagacaatgggg

SEQ ID NO: 1734340 - DNA, 15 bp, Homo sapiens
ctgagacaatggggt

SEQ ID NO: 1734341 - DNA, 15 bp, Homo sapiens
tgagacaatggggtt

SEQ ID NO: 1734342 - DNA, 15 bp, Homo sapiens
gagacaatggggttt

SEQ ID NO: 1734343 - DNA, 15 bp, Homo sapiens
agacaatggggtttt

SEQ ID NO: 1734344 - DNA, 15 bp, Homo sapiens
gacaatggggttttc

SEQ ID NO: 1734345 - DNA, 15 bp, Homo sapiens
acaatggggttttct

SEQ ID NO: 1734346 - DNA, 15 bp, Homo sapiens
caatggggttttcta

SEQ ID NO: 1734347 - DNA, 15 bp, Homo sapiens
aatggggttttctag

SEQ ID NO: 1734348 - DNA, 15 bp, Homo sapiens
atggggttttctaga

SEQ ID NO: 1734349 - DNA, 15 bp, Homo sapiens
tggggttttctagat

SEQ ID NO: 1734350 - DNA, 15 bp, Homo sapiens
ggggttttctagata

SEQ ID NO: 1734351 - DNA, 15 bp, Homo sapiens
gggttttctagatat

SEQ ID NO: 1734352 - DNA, 15 bp, Homo sapiens
ggttttctagatata

SEQ ID NO: 1734353 - DNA, 15 bp, Homo sapiens
gttttctagatatac

SEQ ID NO: 1734354 - DNA, 15 bp, Homo sapiens
ttttctagatataca

SEQ ID NO: 1734355 - DNA, 15 bp, Homo sapiens
tttctagatatacag

SEQ ID NO: 1734356 - DNA, 15 bp, Homo sapiens
ttctagatatacagt

SEQ ID NO: 1734357 - DNA, 15 bp, Homo sapiens
tctagatatacagtc

SEQ ID NO: 1734358 - DNA, 15 bp, Homo sapiens
ctagatatacagtca

SEQ ID NO: 1734359 - DNA, 15 bp, Homo sapiens
tagatatacagtcat

SEQ ID NO: 1734360 - DNA, 15 bp, Homo sapiens
agatatacagtcatg

SEQ ID NO: 1734361 - DNA, 15 bp, Homo sapiens
gatatacagtcatgt

SEQ ID NO: 1734362 - DNA, 15 bp, Homo sapiens
atatacagtcatgtc

SEQ ID NO: 1734363 - DNA, 15 bp, Homo sapiens
tatacagtcatgtca

SEQ ID NO: 1734364 - DNA, 15 bp, Homo sapiens
atacagtcatgtcat

SEQ ID NO: 1734365 - DNA, 15 bp, Homo sapiens
tacagtcatgtcatc

SEQ ID NO: 1734366 - DNA, 15 bp, Homo sapiens
acagtcatgtcatct

SEQ ID NO: 1734367 - DNA, 15 bp, Homo sapiens
cagtcatgtcatctg

SEQ ID NO: 1734368 - DNA, 15 bp, Homo sapiens
agtcatgtcatctgc

SEQ ID NO: 1734369 - DNA, 15 bp, Homo sapiens
gtcatgtcatctgca

SEQ ID NO: 1734370 - DNA, 15 bp, Homo sapiens
tcatgtcatctgcaa

SEQ ID NO: 1734371 - DNA, 15 bp, Homo sapiens
tcatctgcaaacagg

SEQ ID NO: 1734372 - DNA, 15 bp, Homo sapiens
catctgcaaacaggg

SEQ ID NO: 1734373 - DNA, 15 bp, Homo sapiens
atctgcaaacaggga

SEQ ID NO: 1734374 - DNA, 15 bp, Homo sapiens
tctgcaaacagggac

SEQ ID NO: 1734375 - DNA, 15 bp, Homo sapiens
ctgcaaacagggaca

SEQ ID NO: 1734376 - DNA, 15 bp, Homo sapiens
tgcaaacagggacag

SEQ ID NO: 1734377 - DNA, 15 bp, Homo sapiens
gcaaacagggacagt

SEQ ID NO: 1734378 - DNA, 15 bp, Homo sapiens
caaacagggacagtt

SEQ ID NO: 1734379 - DNA, 15 bp, Homo sapiens
aaacagggacagttt

SEQ ID NO: 1734380 - DNA, 15 bp, Homo sapiens
aacagggacagtttt

SEQ ID NO: 1734381 - DNA, 15 bp, Homo sapiens
acagggacagtttta

SEQ ID NO: 1734382 - DNA, 15 bp, Homo sapiens
cagggacagttttac

SEQ ID NO: 1734383 - DNA, 15 bp, Homo sapiens
agggacagttttact

SEQ ID NO: 1734384 - DNA, 15 bp, Homo sapiens
gggacagttttactt

SEQ ID NO: 1734385 - DNA, 15 bp, Homo sapiens
ggacagttttacttc

SEQ ID NO: 1734386 - DNA, 15 bp, Homo sapiens
gacagttttacttcc

SEQ ID NO: 1734387 - DNA, 15 bp, Homo sapiens
acagttttacttcct

SEQ ID NO: 1734388 - DNA, 15 bp, Homo sapiens
cagttttacttcctc

SEQ ID NO: 1734389 - DNA, 15 bp, Homo sapiens
agttttacttcctct

SEQ ID NO: 1734390 - DNA, 15 bp, Homo sapiens
gttttacttcctctt

SEQ ID NO: 1734391 - DNA, 15 bp, Homo sapiens
ttttacttcctcttt

SEQ ID NO: 1734392 - DNA, 15 bp, Homo sapiens
tttacttcctctttt

SEQ ID NO: 1734393 - DNA, 15 bp, Homo sapiens
ttacttcctcttttc

SEQ ID NO: 1734394 - DNA, 15 bp, Homo sapiens
tacttcctcttttcc

SEQ ID NO: 1734395 - DNA, 15 bp, Homo sapiens
acttcctcttttcct

SEQ ID NO: 1734396 - DNA, 15 bp, Homo sapiens
cttcctcttttccta

SEQ ID NO: 1734397 - DNA, 15 bp, Homo sapiens
ttcctcttttcctaa

SEQ ID NO: 1734398 - DNA, 15 bp, Homo sapiens
tcctcttttcctaat

SEQ ID NO: 1734399 - DNA, 15 bp, Homo sapiens
cctcttttcctaatt

SEQ ID NO: 1734400 - DNA, 15 bp, Homo sapiens
ctcttttcctaattg

SEQ ID NO: 1734401 - DNA, 15 bp, Homo sapiens
tcttttcctaattga

SEQ ID NO: 1734402 - DNA, 15 bp, Homo sapiens
cttttcctaattgaa

SEQ ID NO: 1734403 - DNA, 15 bp, Homo sapiens
ttttcctaattgaat

SEQ ID NO: 1734404 - DNA, 15 bp, Homo sapiens
tttcctaattgaata

SEQ ID NO: 1734405 - DNA, 15 bp, Homo sapiens
ttcctaattgaatac

SEQ ID NO: 1734406 - DNA, 15 bp, Homo sapiens
tcctaattgaatacc

SEQ ID NO: 1734407 - DNA, 15 bp, Homo sapiens
cctaattgaataccc

SEQ ID NO: 1734408 - DNA, 15 bp, Homo sapiens
ctaattgaataccct

SEQ ID NO: 1734409 - DNA, 15 bp, Homo sapiens
taattgaataccctt

SEQ ID NO: 1734410 - DNA, 15 bp, Homo sapiens
aattgaatacccttt

SEQ ID NO: 1734411 - DNA, 15 bp, Homo sapiens
attgaataccctttc

SEQ ID NO: 1734412 - DNA, 15 bp, Homo sapiens
ttgaataccctttct

SEQ ID NO: 1734413 - DNA, 15 bp, Homo sapiens
tgaataccctttctt

SEQ ID NO: 1734414 - DNA, 15 bp, Homo sapiens
gaataccctttcttt

SEQ ID NO: 1734415 - DNA, 15 bp, Homo sapiens
aataccctttctttc

SEQ ID NO: 1734416 - DNA, 15 bp, Homo sapiens
ataccctttctttct

SEQ ID NO: 1734417 - DNA, 15 bp, Homo sapiens
taccctttctttctt

SEQ ID NO: 1734418 - DNA, 15 bp, Homo sapiens
accctttctttcttt

SEQ ID NO: 1734419 - DNA, 15 bp, Homo sapiens
ccctttctttctttc

SEQ ID NO: 1734420 - DNA, 15 bp, Homo sapiens
tctttctttcttctg

SEQ ID NO: 1734421 - DNA, 15 bp, Homo sapiens
ctttctttcttctgc

SEQ ID NO: 1734422 - DNA, 15 bp, Homo sapiens
tttctttcttctgcc

SEQ ID NO: 1734423 - DNA, 15 bp, Homo sapiens
ttctttcttctgcct

SEQ ID NO: 1734424 - DNA, 15 bp, Homo sapiens
tctttcttctgcctg

SEQ ID NO: 1734425 - DNA, 15 bp, Homo sapiens
ctttcttctgcctga

SEQ ID NO: 1734426 - DNA, 15 bp, Homo sapiens
tttcttctgcctgat

SEQ ID NO: 1734427 - DNA, 15 bp, Homo sapiens
ttcttctgcctgatt

SEQ ID NO: 1734428 - DNA, 15 bp, Homo sapiens
tcttctgcctgattg

SEQ ID NO: 1734429 - DNA, 15 bp, Homo sapiens
cttctgcctgattgc

SEQ ID NO: 1734430 - DNA, 15 bp, Homo sapiens
ttctgcctgattgcc

SEQ ID NO: 1734431 - DNA, 15 bp, Homo sapiens
tctgcctgattgccc

SEQ ID NO: 1734432 - DNA, 15 bp, Homo sapiens
ctgcctgattgccct

SEQ ID NO: 1734433 - DNA, 15 bp, Homo sapiens
gccagaacttccaac

SEQ ID NO: 1734434 - DNA, 15 bp, Homo sapiens
ccagaacttccaaca

SEQ ID NO: 1734435 - DNA, 15 bp, Homo sapiens
cagaacttccaacac

SEQ ID NO: 1734436 - DNA, 15 bp, Homo sapiens
agaacttccaacact

SEQ ID NO: 1734437 - DNA, 15 bp, Homo sapiens
gaacttccaacacta

SEQ ID NO: 1734438 - DNA, 15 bp, Homo sapiens
aacttccaacactat

SEQ ID NO: 1734439 - DNA, 15 bp, Homo sapiens
acttccaacactatg

SEQ ID NO: 1734440 - DNA, 15 bp, Homo sapiens
cttccaacactatgt

SEQ ID NO: 1734441 - DNA, 15 bp, Homo sapiens
ttccaacactatgtt

SEQ ID NO: 1734442 - DNA, 15 bp, Homo sapiens
tccaacactatgttg

SEQ ID NO: 1734443 - DNA, 15 bp, Homo sapiens
ccaacactatgttga

SEQ ID NO: 1734444 - DNA, 15 bp, Homo sapiens
caacactatgttgaa

SEQ ID NO: 1734445 - DNA, 15 bp, Homo sapiens
aacactatgttgaat

SEQ ID NO: 1734446 - DNA, 15 bp, Homo sapiens
acactatgttgaata

SEQ ID NO: 1734447 - DNA, 15 bp, Homo sapiens
cactatgttgaatag

SEQ ID NO: 1734448 - DNA, 15 bp, Homo sapiens
actatgttgaatagg

SEQ ID NO: 1734449 - DNA, 15 bp, Homo sapiens
ctatgttgaatagga

SEQ ID NO: 1734450 - DNA, 15 bp, Homo sapiens
tatgttgaataggag

SEQ ID NO: 1734451 - DNA, 15 bp, Homo sapiens
atgttgaataggagt

SEQ ID NO: 1734452 - DNA, 15 bp, Homo sapiens
tgttgaataggagtg

SEQ ID NO: 1734453 - DNA, 15 bp, Homo sapiens
gttgaataggagtgg

SEQ ID NO: 1734454 - DNA, 15 bp, Homo sapiens
agagagggcatcctg

SEQ ID NO: 1734455 - DNA, 15 bp, Homo sapiens
gagagggcatcctgt

SEQ ID NO: 1734456 - DNA, 15 bp, Homo sapiens
agagggcatcctgtc

SEQ ID NO: 1734457 - DNA, 15 bp, Homo sapiens
gagggcatcctgtct

SEQ ID NO: 1734458 - DNA, 15 bp, Homo sapiens
agggcatcctgtctt

SEQ ID NO: 1734459 - DNA, 15 bp, Homo sapiens
gggcatcctgtcttg

SEQ ID NO: 1734460 - DNA, 15 bp, Homo sapiens
ggcatcctgtcttgt

SEQ ID NO: 1734461 - DNA, 15 bp, Homo sapiens
gcatcctgtcttgtg

SEQ ID NO: 1734462 - DNA, 15 bp, Homo sapiens
catcctgtcttgtgc

SEQ ID NO: 1734463 - DNA, 15 bp, Homo sapiens
atcctgtcttgtgcc

SEQ ID NO: 1734464 - DNA, 15 bp, Homo sapiens
tcctgtcttgtgcca

SEQ ID NO: 1734465 - DNA, 15 bp, Homo sapiens
cctgtcttgtgccaa

SEQ ID NO: 1734466 - DNA, 15 bp, Homo sapiens
ctgtcttgtgccaat

SEQ ID NO: 1734467 - DNA, 15 bp, Homo sapiens
tgtcttgtgccaatt

SEQ ID NO: 1734468 - DNA, 15 bp, Homo sapiens
gtcttgtgccaattt

SEQ ID NO: 1734469 - DNA, 15 bp, Homo sapiens
tcttgtgccaatttt

SEQ ID NO: 1734470 - DNA, 15 bp, Homo sapiens
cttgtgccaattttc

SEQ ID NO: 1734471 - DNA, 15 bp, Homo sapiens
ttgtgccaattttca

SEQ ID NO: 1734472 - DNA, 15 bp, Homo sapiens
tgtgccaattttcaa

SEQ ID NO: 1734473 - DNA, 15 bp, Homo sapiens
gtgccaattttcaaa

SEQ ID NO: 1734474 - DNA, 15 bp, Homo sapiens
tgccaattttcaaag

SEQ ID NO: 1734475 - DNA, 15 bp, Homo sapiens
gccaattttcaaagg

SEQ ID NO: 1734476 - DNA, 15 bp, Homo sapiens
ccaattttcaaaggg

SEQ ID NO: 1734477 - DNA, 15 bp, Homo sapiens
caattttcaaaggga

SEQ ID NO: 1734478 - DNA, 15 bp, Homo sapiens
aattttcaaagggaa

SEQ ID NO: 1734479 - DNA, 15 bp, Homo sapiens
attttcaaagggaat

SEQ ID NO: 1734480 - DNA, 15 bp, Homo sapiens
ttttcaaagggaatg

SEQ ID NO: 1734481 - DNA, 15 bp, Homo sapiens
tttcaaagggaatgc

SEQ ID NO: 1734482 - DNA, 15 bp, Homo sapiens
ttcaaagggaatgct

SEQ ID NO: 1734483 - DNA, 15 bp, Homo sapiens
tcaaagggaatgctt

SEQ ID NO: 1734484 - DNA, 15 bp, Homo sapiens
caaagggaatgcttc

SEQ ID NO: 1734485 - DNA, 15 bp, Homo sapiens
aaagggaatgcttcc

SEQ ID NO: 1734486 - DNA, 15 bp, Homo sapiens
aagggaatgcttcca

SEQ ID NO: 1734487 - DNA, 15 bp, Homo sapiens
agggaatgcttccag

SEQ ID NO: 1734488 - DNA, 15 bp, Homo sapiens
gggaatgcttccagt

SEQ ID NO: 1734489 - DNA, 15 bp, Homo sapiens
ggaatgcttccagtt

SEQ ID NO: 1734490 - DNA, 15 bp, Homo sapiens
gaatgcttccagttt

SEQ ID NO: 1734491 - DNA, 15 bp, Homo sapiens
aatgcttccagtttt

SEQ ID NO: 1734492 - DNA, 15 bp, Homo sapiens
atgcttccagttttt

SEQ ID NO: 1734493 - DNA, 15 bp, Homo sapiens
tgcttccagtttttc

SEQ ID NO: 1734494 - DNA, 15 bp, Homo sapiens
gcttccagtttttcc

SEQ ID NO: 1734495 - DNA, 15 bp, Homo sapiens
cttccagtttttccc

SEQ ID NO: 1734496 - DNA, 15 bp, Homo sapiens
ttccagtttttccca

SEQ ID NO: 1734497 - DNA, 15 bp, Homo sapiens
tccagtttttcccat

SEQ ID NO: 1734498 - DNA, 15 bp, Homo sapiens
ccagtttttcccatt

SEQ ID NO: 1734499 - DNA, 15 bp, Homo sapiens
cagtttttcccattc

SEQ ID NO: 1734500 - DNA, 15 bp, Homo sapiens
agtttttcccattca

SEQ ID NO: 1734501 - DNA, 15 bp, Homo sapiens
gtttttcccattcag

SEQ ID NO: 1734502 - DNA, 15 bp, Homo sapiens
tttttcccattcagt

SEQ ID NO: 1734503 - DNA, 15 bp, Homo sapiens
ttttcccattcagta

SEQ ID NO: 1734504 - DNA, 15 bp, Homo sapiens
tttcccattcagtat

SEQ ID NO: 1734505 - DNA, 15 bp, Homo sapiens
ttcccattcagtatg

SEQ ID NO: 1734506 - DNA, 15 bp, Homo sapiens
tcccattcagtatga

SEQ ID NO: 1734507 - DNA, 15 bp, Homo sapiens
gtatgatattggcta

SEQ ID NO: 1734508 - DNA, 15 bp, Homo sapiens
tatgatattggctat

SEQ ID NO: 1734509 - DNA, 15 bp, Homo sapiens
atgatattggctatg

SEQ ID NO: 1734510 - DNA, 15 bp, Homo sapiens
tgatattggctatgg

SEQ ID NO: 1734511 - DNA, 15 bp, Homo sapiens
gatattggctatggg

SEQ ID NO: 1734512 - DNA, 15 bp, Homo sapiens
atattggctatgggt

SEQ ID NO: 1734513 - DNA, 15 bp, Homo sapiens
tattggctatgggtt

SEQ ID NO: 1734514 - DNA, 15 bp, Homo sapiens
attggctatgggttt

SEQ ID NO: 1734515 - DNA, 15 bp, Homo sapiens
ttggctatgggtttg

SEQ ID NO: 1734516 - DNA, 15 bp, Homo sapiens
tggctatgggtttgt

SEQ ID NO: 1734517 - DNA, 15 bp, Homo sapiens
ggctatgggtttgtc

SEQ ID NO: 1734518 - DNA, 15 bp, Homo sapiens
gctatgggtttgtca

SEQ ID NO: 1734519 - DNA, 15 bp, Homo sapiens
ctatgggtttgtcat

SEQ ID NO: 1734520 - DNA, 15 bp, Homo sapiens
tatgggtttgtcata

SEQ ID NO: 1734521 - DNA, 15 bp, Homo sapiens
atgggtttgtcataa

SEQ ID NO: 1734522 - DNA, 15 bp, Homo sapiens
atagctcttattatg

SEQ ID NO: 1734523 - DNA, 15 bp, Homo sapiens
tagctcttattatgt

SEQ ID NO: 1734524 - DNA, 15 bp, Homo sapiens
agctcttattatgtt

SEQ ID NO: 1734525 - DNA, 15 bp, Homo sapiens
gctcttattatgttt

SEQ ID NO: 1734526 - DNA, 15 bp, Homo sapiens
ctcttattatgttta

SEQ ID NO: 1734527 - DNA, 15 bp, Homo sapiens
tcttattatgtttag

SEQ ID NO: 1734528 - DNA, 15 bp, Homo sapiens
cttattatgtttaga

SEQ ID NO: 1734529 - DNA, 15 bp, Homo sapiens
ttattatgtttagat

SEQ ID NO: 1734530 - DNA, 15 bp, Homo sapiens
tattatgtttagata

SEQ ID NO: 1734531 - DNA, 15 bp, Homo sapiens
attatgtttagatac

SEQ ID NO: 1734532 - DNA, 15 bp, Homo sapiens
ttatgtttagatacc

SEQ ID NO: 1734533 - DNA, 15 bp, Homo sapiens
tatgtttagatacct

SEQ ID NO: 1734534 - DNA, 15 bp, Homo sapiens
atgtttagatacctc

SEQ ID NO: 1734535 - DNA, 15 bp, Homo sapiens
tgtttagatacctcc

SEQ ID NO: 1734536 - DNA, 15 bp, Homo sapiens
gtttagatacctccc

SEQ ID NO: 1734537 - DNA, 15 bp, Homo sapiens
tttagatacctccca

SEQ ID NO: 1734538 - DNA, 15 bp, Homo sapiens
ttagatacctcccat

SEQ ID NO: 1734539 - DNA, 15 bp, Homo sapiens
tagatacctcccatc

SEQ ID NO: 1734540 - DNA, 15 bp, Homo sapiens
agatacctcccatca

SEQ ID NO: 1734541 - DNA, 15 bp, Homo sapiens
gatacctcccatcaa

SEQ ID NO: 1734542 - DNA, 15 bp, Homo sapiens
atacctcccatcaat

SEQ ID NO: 1734543 - DNA, 15 bp, Homo sapiens
tacctcccatcaata

SEQ ID NO: 1734544 - DNA, 15 bp, Homo sapiens
acctcccatcaatac

SEQ ID NO: 1734545 - DNA, 15 bp, Homo sapiens
cctcccatcaatacc

SEQ ID NO: 1734546 - DNA, 15 bp, Homo sapiens
ctcccatcaatacct

SEQ ID NO: 1734547 - DNA, 15 bp, Homo sapiens
tcccatcaataccta

SEQ ID NO: 1734548 - DNA, 15 bp, Homo sapiens
cccatcaatacctaa

SEQ ID NO: 1734549 - DNA, 15 bp, Homo sapiens
ccatcaatacctaat

SEQ ID NO: 1734550 - DNA, 15 bp, Homo sapiens
catcaatacctaatt

SEQ ID NO: 1734551 - DNA, 15 bp, Homo sapiens
atcaatacctaattt

SEQ ID NO: 1734552 - DNA, 15 bp, Homo sapiens
tcaatacctaattta

SEQ ID NO: 1734553 - DNA, 15 bp, Homo sapiens
caatacctaatttat

SEQ ID NO: 1734554 - DNA, 15 bp, Homo sapiens
aatacctaatttatt

SEQ ID NO: 1734555 - DNA, 15 bp, Homo sapiens
atacctaatttattg

SEQ ID NO: 1734556 - DNA, 15 bp, Homo sapiens
tacctaatttattga

SEQ ID NO: 1734557 - DNA, 15 bp, Homo sapiens
acctaatttattgag

SEQ ID NO: 1734558 - DNA, 15 bp, Homo sapiens
cctaatttattgaga

SEQ ID NO: 1734559 - DNA, 15 bp, Homo sapiens
ctaatttattgagag

SEQ ID NO: 1734560 - DNA, 15 bp, Homo sapiens
taatttattgagagt

SEQ ID NO: 1734561 - DNA, 15 bp, Homo sapiens
aatttattgagagtt

SEQ ID NO: 1734562 - DNA, 15 bp, Homo sapiens
atttattgagagttt

SEQ ID NO: 1734563 - DNA, 15 bp, Homo sapiens
tttattgagagtttt

SEQ ID NO: 1734564 - DNA, 15 bp, Homo sapiens
ttattgagagttttt

SEQ ID NO: 1734565 - DNA, 15 bp, Homo sapiens
tattgagagttttta

SEQ ID NO: 1734566 - DNA, 15 bp, Homo sapiens
attgagagtttttag

SEQ ID NO: 1734567 - DNA, 15 bp, Homo sapiens
ttgagagtttttagc

SEQ ID NO: 1734568 - DNA, 15 bp, Homo sapiens
tgagagtttttagca

SEQ ID NO: 1734569 - DNA, 15 bp, Homo sapiens
gagagtttttagcat

SEQ ID NO: 1734570 - DNA, 15 bp, Homo sapiens
agagtttttagcatg

SEQ ID NO: 1734571 - DNA, 15 bp, Homo sapiens
gagtttttagcatga

SEQ ID NO: 1734572 - DNA, 15 bp, Homo sapiens
agtttttagcatgaa

SEQ ID NO: 1734573 - DNA, 15 bp, Homo sapiens
gtttttagcatgaat

SEQ ID NO: 1734574 - DNA, 15 bp, Homo sapiens
tttttagcatgaatg

SEQ ID NO: 1734575 - DNA, 15 bp, Homo sapiens
ttttagcatgaatgg

SEQ ID NO: 1734576 - DNA, 15 bp, Homo sapiens
tttagcatgaatggc

SEQ ID NO: 1734577 - DNA, 15 bp, Homo sapiens
ttagcatgaatggct

SEQ ID NO: 1734578 - DNA, 15 bp, Homo sapiens
tagcatgaatggctg

SEQ ID NO: 1734579 - DNA, 15 bp, Homo sapiens
agcatgaatggctgt

SEQ ID NO: 1734580 - DNA, 15 bp, Homo sapiens
gcatgaatggctgtt

SEQ ID NO: 1734581 - DNA, 15 bp, Homo sapiens
catgaatggctgttg

SEQ ID NO: 1734582 - DNA, 15 bp, Homo sapiens
atgaatggctgttga

SEQ ID NO: 1734583 - DNA, 15 bp, Homo sapiens
tgaatggctgttgaa

SEQ ID NO: 1734584 - DNA, 15 bp, Homo sapiens
gaatggctgttgaat

SEQ ID NO: 1734585 - DNA, 15 bp, Homo sapiens
aatggctgttgaatt

SEQ ID NO: 1734586 - DNA, 15 bp, Homo sapiens
atggctgttgaattt

SEQ ID NO: 1734587 - DNA, 15 bp, Homo sapiens
tggctgttgaatttt

SEQ ID NO: 1734588 - DNA, 15 bp, Homo sapiens
ggctgttgaattttg

SEQ ID NO: 1734589 - DNA, 15 bp, Homo sapiens
gctgttgaattttgt

SEQ ID NO: 1734590 - DNA, 15 bp, Homo sapiens
ctgttgaattttgtc

SEQ ID NO: 1734591 - DNA, 15 bp, Homo sapiens
tgttgaattttgtca

SEQ ID NO: 1734592 - DNA, 15 bp, Homo sapiens
gttgaattttgtcaa

SEQ ID NO: 1734593 - DNA, 15 bp, Homo sapiens
ttgaattttgtcaaa

SEQ ID NO: 1734594 - DNA, 15 bp, Homo sapiens
tgaattttgtcaaag

SEQ ID NO: 1734595 - DNA, 15 bp, Homo sapiens
gaattttgtcaaagg

SEQ ID NO: 1734596 - DNA, 15 bp, Homo sapiens
aattttgtcaaaggc

SEQ ID NO: 1734597 - DNA, 15 bp, Homo sapiens
attttgtcaaaggcc

SEQ ID NO: 1734598 - DNA, 15 bp, Homo sapiens
ttttgtcaaaggcct

SEQ ID NO: 1734599 - DNA, 15 bp, Homo sapiens
tttgtcaaaggcctt

SEQ ID NO: 1734600 - DNA, 15 bp, Homo sapiens
ttgtcaaaggccttt

SEQ ID NO: 1734601 - DNA, 15 bp, Homo sapiens
tgtcaaaggcctttt

SEQ ID NO: 1734602 - DNA, 15 bp, Homo sapiens
gtcaaaggccttttc

SEQ ID NO: 1734603 - DNA, 15 bp, Homo sapiens
tcaaaggccttttct

SEQ ID NO: 1734604 - DNA, 15 bp, Homo sapiens
caaaggccttttctg

SEQ ID NO: 1734605 - DNA, 15 bp, Homo sapiens
aaaggccttttctgc

SEQ ID NO: 1734606 - DNA, 15 bp, Homo sapiens
aaggccttttctgca

SEQ ID NO: 1734607 - DNA, 15 bp, Homo sapiens
aggccttttctgcat

SEQ ID NO: 1734608 - DNA, 15 bp, Homo sapiens
ggccttttctgcatc

SEQ ID NO: 1734609 - DNA, 15 bp, Homo sapiens
gccttttctgcatct

SEQ ID NO: 1734610 - DNA, 15 bp, Homo sapiens
ccttttctgcatcta

SEQ ID NO: 1734611 - DNA, 15 bp, Homo sapiens
cttttctgcatctat

SEQ ID NO: 1734612 - DNA, 15 bp, Homo sapiens
ttttctgcatctatt

SEQ ID NO: 1734613 - DNA, 15 bp, Homo sapiens
tttctgcatctattg

SEQ ID NO: 1734614 - DNA, 15 bp, Homo sapiens
ttctgcatctattga

SEQ ID NO: 1734615 - DNA, 15 bp, Homo sapiens
tctgcatctattgag

SEQ ID NO: 1734616 - DNA, 15 bp, Homo sapiens
ctgcatctattgaga

SEQ ID NO: 1734617 - DNA, 15 bp, Homo sapiens
tgcatctattgagat

SEQ ID NO: 1734618 - DNA, 15 bp, Homo sapiens
atctattgagataat

SEQ ID NO: 1734619 - DNA, 15 bp, Homo sapiens
tctattgagataata

SEQ ID NO: 1734620 - DNA, 15 bp, Homo sapiens
ctattgagataataa

SEQ ID NO: 1734621 - DNA, 15 bp, Homo sapiens
tattgagataataat

SEQ ID NO: 1734622 - DNA, 15 bp, Homo sapiens
attgagataataatg

SEQ ID NO: 1734623 - DNA, 15 bp, Homo sapiens
ttgagataataatgt

SEQ ID NO: 1734624 - DNA, 15 bp, Homo sapiens
tgagataataatgtg

SEQ ID NO: 1734625 - DNA, 15 bp, Homo sapiens
gagataataatgtgg

SEQ ID NO: 1734626 - DNA, 15 bp, Homo sapiens
agataataatgtggt

SEQ ID NO: 1734627 - DNA, 15 bp, Homo sapiens
gataataatgtggtt

SEQ ID NO: 1734628 - DNA, 15 bp, Homo sapiens
ataataatgtggttt

SEQ ID NO: 1734629 - DNA, 15 bp, Homo sapiens
taataatgtggtttt

SEQ ID NO: 1734630 - DNA, 15 bp, Homo sapiens
aataatgtggttttt

SEQ ID NO: 1734631 - DNA, 15 bp, Homo sapiens
ataatgtggtttttt

SEQ ID NO: 1734632 - DNA, 15 bp, Homo sapiens
taatgtggttttttt

SEQ ID NO: 1734633 - DNA, 15 bp, Homo sapiens
aatgtggtttttttc

SEQ ID NO: 1734634 - DNA, 15 bp, Homo sapiens
atgtggtttttttct

SEQ ID NO: 1734635 - DNA, 15 bp, Homo sapiens
tgtggtttttttctt

SEQ ID NO: 1734636 - DNA, 15 bp, Homo sapiens
gtggtttttttcttt

SEQ ID NO: 1734637 - DNA, 15 bp, Homo sapiens
tggtttttttctttg

SEQ ID NO: 1734638 - DNA, 15 bp, Homo sapiens
ggtttttttctttgg

SEQ ID NO: 1734639 - DNA, 15 bp, Homo sapiens
gtttttttctttggt

SEQ ID NO: 1734640 - DNA, 15 bp, Homo sapiens
tttttttctttggtt

SEQ ID NO: 1734641 - DNA, 15 bp, Homo sapiens
ttttttctttggttc

SEQ ID NO: 1734642 - DNA, 15 bp, Homo sapiens
tttttctttggttct

SEQ ID NO: 1734643 - DNA, 15 bp, Homo sapiens
ttttctttggttctg

SEQ ID NO: 1734644 - DNA, 15 bp, Homo sapiens
tttctttggttctgt

SEQ ID NO: 1734645 - DNA, 15 bp, Homo sapiens
ttctttggttctgtt

SEQ ID NO: 1734646 - DNA, 15 bp, Homo sapiens
tctttggttctgttt

SEQ ID NO: 1734647 - DNA, 15 bp, Homo sapiens
ctttggttctgttta

SEQ ID NO: 1734648 - DNA, 15 bp, Homo sapiens
tttggttctgtttat

SEQ ID NO: 1734649 - DNA, 15 bp, Homo sapiens
ttggttctgtttata

SEQ ID NO: 1734650 - DNA, 15 bp, Homo sapiens
tggttctgtttatat

SEQ ID NO: 1734651 - DNA, 15 bp, Homo sapiens
ggttctgtttatatg

SEQ ID NO: 1734652 - DNA, 15 bp, Homo sapiens
gttctgtttatatgc

SEQ ID NO: 1734653 - DNA, 15 bp, Homo sapiens
ttctgtttatatgct

SEQ ID NO: 1734654 - DNA, 15 bp, Homo sapiens
tctgtttatatgctg

SEQ ID NO: 1734655 - DNA, 15 bp, Homo sapiens
ctgtttatatgctgt

SEQ ID NO: 1734656 - DNA, 15 bp, Homo sapiens
tgtttatatgctgta

SEQ ID NO: 1734657 - DNA, 15 bp, Homo sapiens
gtttatatgctgtat

SEQ ID NO: 1734658 - DNA, 15 bp, Homo sapiens
tttatatgctgtatt

SEQ ID NO: 1734659 - DNA, 15 bp, Homo sapiens
ttatatgctgtatta

SEQ ID NO: 1734660 - DNA, 15 bp, Homo sapiens
tatatgctgtattac

SEQ ID NO: 1734661 - DNA, 15 bp, Homo sapiens
atatgctgtattacg

SEQ ID NO: 1734662 - DNA, 15 bp, Homo sapiens
tatgctgtattacgt

SEQ ID NO: 1734663 - DNA, 15 bp, Homo sapiens
atgctgtattacgtt

SEQ ID NO: 1734664 - DNA, 15 bp, Homo sapiens
tgctgtattacgttt

SEQ ID NO: 1734665 - DNA, 15 bp, Homo sapiens
gctgtattacgttta

SEQ ID NO: 1734666 - DNA, 15 bp, Homo sapiens
ctgtattacgtttat

SEQ ID NO: 1734667 - DNA, 15 bp, Homo sapiens
tgtattacgtttatt

SEQ ID NO: 1734668 - DNA, 15 bp, Homo sapiens
gtattacgtttattg

SEQ ID NO: 1734669 - DNA, 15 bp, Homo sapiens
tattacgtttattga

SEQ ID NO: 1734670 - DNA, 15 bp, Homo sapiens
attacgtttattgat

SEQ ID NO: 1734671 - DNA, 15 bp, Homo sapiens
ttacgtttattgatt

SEQ ID NO: 1734672 - DNA, 15 bp, Homo sapiens
tacgtttattgattt

SEQ ID NO: 1734673 - DNA, 15 bp, Homo sapiens
acgtttattgatttg

SEQ ID NO: 1734674 - DNA, 15 bp, Homo sapiens
cgtttattgatttgt

SEQ ID NO: 1734675 - DNA, 15 bp, Homo sapiens
gtttattgatttgtg

SEQ ID NO: 1734676 - DNA, 15 bp, Homo sapiens
tttattgatttgtgt

SEQ ID NO: 1734677 - DNA, 15 bp, Homo sapiens
ttattgatttgtgta

SEQ ID NO: 1734678 - DNA, 15 bp, Homo sapiens
tattgatttgtgtat

SEQ ID NO: 1734679 - DNA, 15 bp, Homo sapiens
attgatttgtgtatg

SEQ ID NO: 1734680 - DNA, 15 bp, Homo sapiens
ttgatttgtgtatgt

SEQ ID NO: 1734681 - DNA, 15 bp, Homo sapiens
tgatttgtgtatgtt

SEQ ID NO: 1734682 - DNA, 15 bp, Homo sapiens
gatttgtgtatgttg

SEQ ID NO: 1734683 - DNA, 15 bp, Homo sapiens
atttgtgtatgttga

SEQ ID NO: 1734684 - DNA, 15 bp, Homo sapiens
tttgtgtatgttgaa

SEQ ID NO: 1734685 - DNA, 15 bp, Homo sapiens
ttgtgtatgttgaac

SEQ ID NO: 1734686 - DNA, 15 bp, Homo sapiens
tgtgtatgttgaacc

SEQ ID NO: 1734687 - DNA, 15 bp, Homo sapiens
gtgtatgttgaacca

SEQ ID NO: 1734688 - DNA, 15 bp, Homo sapiens
tgtatgttgaaccag

SEQ ID NO: 1734689 - DNA, 15 bp, Homo sapiens
gtatgttgaaccagc

SEQ ID NO: 1734690 - DNA, 15 bp, Homo sapiens
tatgttgaaccagcc

SEQ ID NO: 1734691 - DNA, 15 bp, Homo sapiens
atgttgaaccagcct

SEQ ID NO: 1734692 - DNA, 15 bp, Homo sapiens
tgttgaaccagcctt

SEQ ID NO: 1734693 - DNA, 15 bp, Homo sapiens
gttgaaccagccttg

SEQ ID NO: 1734694 - DNA, 15 bp, Homo sapiens
ttgaaccagccttgc

SEQ ID NO: 1734695 - DNA, 15 bp, Homo sapiens
tgaaccagccttgca

SEQ ID NO: 1734696 - DNA, 15 bp, Homo sapiens
gaaccagccttgcat

SEQ ID NO: 1734697 - DNA, 15 bp, Homo sapiens
aaccagccttgcatc

SEQ ID NO: 1734698 - DNA, 15 bp, Homo sapiens
accagccttgcatcc

SEQ ID NO: 1734699 - DNA, 15 bp, Homo sapiens
ccagccttgcatccc

SEQ ID NO: 1734700 - DNA, 15 bp, Homo sapiens
cagccttgcatccca

SEQ ID NO: 1734701 - DNA, 15 bp, Homo sapiens
agccttgcatcccag

SEQ ID NO: 1734702 - DNA, 15 bp, Homo sapiens
gccttgcatcccagg

SEQ ID NO: 1734703 - DNA, 15 bp, Homo sapiens
ccttgcatcccaggg

SEQ ID NO: 1734704 - DNA, 15 bp, Homo sapiens
cttgcatcccagggg

SEQ ID NO: 1734705 - DNA, 15 bp, Homo sapiens
ttgcatcccaggggt

SEQ ID NO: 1734706 - DNA, 15 bp, Homo sapiens
tgcatcccaggggtg

SEQ ID NO: 1734707 - DNA, 15 bp, Homo sapiens
gcatcccaggggtga

SEQ ID NO: 1734708 - DNA, 15 bp, Homo sapiens
catcccaggggtgaa

SEQ ID NO: 1734709 - DNA, 15 bp, Homo sapiens
atcccaggggtgaag

SEQ ID NO: 1734710 - DNA, 15 bp, Homo sapiens
tcccaggggtgaagc

SEQ ID NO: 1734711 - DNA, 15 bp, Homo sapiens
cccaggggtgaagcc

SEQ ID NO: 1734712 - DNA, 15 bp, Homo sapiens
ccaggggtgaagccc

SEQ ID NO: 1734713 - DNA, 15 bp, Homo sapiens
caggggtgaagccca

SEQ ID NO: 1734714 - DNA, 15 bp, Homo sapiens
aggggtgaagcccac

SEQ ID NO: 1734715 - DNA, 15 bp, Homo sapiens
ggggtgaagcccact

SEQ ID NO: 1734716 - DNA, 15 bp, Homo sapiens
gggtgaagcccactt

SEQ ID NO: 1734717 - DNA, 15 bp, Homo sapiens
ggtgaagcccacttg

SEQ ID NO: 1734718 - DNA, 15 bp, Homo sapiens
gtgaagcccacttga

SEQ ID NO: 1734719 - DNA, 15 bp, Homo sapiens
tgaagcccacttgat

SEQ ID NO: 1734720 - DNA, 15 bp, Homo sapiens
gaagcccacttgatc

SEQ ID NO: 1734721 - DNA, 15 bp, Homo sapiens
aagcccacttgatca

SEQ ID NO: 1734722 - DNA, 15 bp, Homo sapiens
agcccacttgatcat

SEQ ID NO: 1734723 - DNA, 15 bp, Homo sapiens
gcccacttgatcatg

SEQ ID NO: 1734724 - DNA, 15 bp, Homo sapiens
cccacttgatcatgg

SEQ ID NO: 1734725 - DNA, 15 bp, Homo sapiens
ccacttgatcatggt

SEQ ID NO: 1734726 - DNA, 15 bp, Homo sapiens
acttgatcatggtgg

SEQ ID NO: 1734727 - DNA, 15 bp, Homo sapiens
cttgatcatggtgga

SEQ ID NO: 1734728 - DNA, 15 bp, Homo sapiens
ttgatcatggtggat

SEQ ID NO: 1734729 - DNA, 15 bp, Homo sapiens
tgatcatggtggata

SEQ ID NO: 1734730 - DNA, 15 bp, Homo sapiens
gatcatggtggataa

SEQ ID NO: 1734731 - DNA, 15 bp, Homo sapiens
atcatggtggataag

SEQ ID NO: 1734732 - DNA, 15 bp, Homo sapiens
tcatggtggataagc

SEQ ID NO: 1734733 - DNA, 15 bp, Homo sapiens
catggtggataagct

SEQ ID NO: 1734734 - DNA, 15 bp, Homo sapiens
atggtggataagctt

SEQ ID NO: 1734735 - DNA, 15 bp, Homo sapiens
tggtggataagcttt

SEQ ID NO: 1734736 - DNA, 15 bp, Homo sapiens
ggtggataagctttt

SEQ ID NO: 1734737 - DNA, 15 bp, Homo sapiens
gtggataagcttttt

SEQ ID NO: 1734738 - DNA, 15 bp, Homo sapiens
tggataagctttttg

SEQ ID NO: 1734739 - DNA, 15 bp, Homo sapiens
ggataagctttttga

SEQ ID NO: 1734740 - DNA, 15 bp, Homo sapiens
gataagctttttgat

SEQ ID NO: 1734741 - DNA, 15 bp, Homo sapiens
ataagctttttgatg

SEQ ID NO: 1734742 - DNA, 15 bp, Homo sapiens
taagctttttgatgt

SEQ ID NO: 1734743 - DNA, 15 bp, Homo sapiens
aagctttttgatgtg

SEQ ID NO: 1734744 - DNA, 15 bp, Homo sapiens
agctttttgatgtgc

SEQ ID NO: 1734745 - DNA, 15 bp, Homo sapiens
gctttttgatgtgct

SEQ ID NO: 1734746 - DNA, 15 bp, Homo sapiens
ctttttgatgtgctg

SEQ ID NO: 1734747 - DNA, 15 bp, Homo sapiens
tttttgatgtgctgc

SEQ ID NO: 1734748 - DNA, 15 bp, Homo sapiens
ttttgatgtgctgct

SEQ ID NO: 1734749 - DNA, 15 bp, Homo sapiens
tttgatgtgctgctg

SEQ ID NO: 1734750 - DNA, 15 bp, Homo sapiens
ttgatgtgctgctgg

SEQ ID NO: 1734751 - DNA, 15 bp, Homo sapiens
tgatgtgctgctgga

SEQ ID NO: 1734752 - DNA, 15 bp, Homo sapiens
gatgtgctgctggat

SEQ ID NO: 1734753 - DNA, 15 bp, Homo sapiens
atgtgctgctggatt

SEQ ID NO: 1734754 - DNA, 15 bp, Homo sapiens
tgtgctgctggattc

SEQ ID NO: 1734755 - DNA, 15 bp, Homo sapiens
gtgctgctggattcg

SEQ ID NO: 1734756 - DNA, 15 bp, Homo sapiens
tgctgctggattcgg

SEQ ID NO: 1734757 - DNA, 15 bp, Homo sapiens
gctgctggattcggt

SEQ ID NO: 1734758 - DNA, 15 bp, Homo sapiens
ctgctggattcggtt

SEQ ID NO: 1734759 - DNA, 15 bp, Homo sapiens
tgctggattcggttt

SEQ ID NO: 1734760 - DNA, 15 bp, Homo sapiens
gctggattcggtttg

SEQ ID NO: 1734761 - DNA, 15 bp, Homo sapiens
ctggattcggtttgc

SEQ ID NO: 1734762 - DNA, 15 bp, Homo sapiens
tggattcggtttgcc

SEQ ID NO: 1734763 - DNA, 15 bp, Homo sapiens
ggattcggtttgcca

SEQ ID NO: 1734764 - DNA, 15 bp, Homo sapiens
gattcggtttgccag

SEQ ID NO: 1734765 - DNA, 15 bp, Homo sapiens
attcggtttgccagt

SEQ ID NO: 1734766 - DNA, 15 bp, Homo sapiens
ttcggtttgccagta

SEQ ID NO: 1734767 - DNA, 15 bp, Homo sapiens
tcggtttgccagtat

SEQ ID NO: 1734768 - DNA, 15 bp, Homo sapiens
cggtttgccagtatt

SEQ ID NO: 1734769 - DNA, 15 bp, Homo sapiens
ggtttgccagtattt

SEQ ID NO: 1734770 - DNA, 15 bp, Homo sapiens
gtttgccagtatttt

SEQ ID NO: 1734771 - DNA, 15 bp, Homo sapiens
tttgccagtatttta

SEQ ID NO: 1734772 - DNA, 15 bp, Homo sapiens
ttgccagtattttat

SEQ ID NO: 1734773 - DNA, 15 bp, Homo sapiens
tgccagtattttatt

SEQ ID NO: 1734774 - DNA, 15 bp, Homo sapiens
gccagtattttattt

SEQ ID NO: 1734775 - DNA, 15 bp, Homo sapiens
ccagtattttatttt

SEQ ID NO: 1734776 - DNA, 15 bp, Homo sapiens
cagtattttatttta

SEQ ID NO: 1734777 - DNA, 15 bp, Homo sapiens
agtattttattttat

SEQ ID NO: 1734778 - DNA, 15 bp, Homo sapiens
gtattttattttatt

SEQ ID NO: 1734779 - DNA, 15 bp, Homo sapiens
tattttattttattt

SEQ ID NO: 1734780 - DNA, 15 bp, Homo sapiens
ttttattttatttat

SEQ ID NO: 1734781 - DNA, 15 bp, Homo sapiens
tttattttatttatt

SEQ ID NO: 1734782 - DNA, 15 bp, Homo sapiens
attttttgagacgga

SEQ ID NO: 1734783 - DNA, 15 bp, Homo sapiens
tttgagacggagttg

SEQ ID NO: 1734784 - DNA, 15 bp, Homo sapiens
ttgagacggagttgc

SEQ ID NO: 1734785 - DNA, 15 bp, Homo sapiens
tgagacggagttgcg

SEQ ID NO: 1734786 - DNA, 15 bp, Homo sapiens
gagacggagttgcgc

SEQ ID NO: 1734787 - DNA, 15 bp, Homo sapiens
agacggagttgcgct

SEQ ID NO: 1734788 - DNA, 15 bp, Homo sapiens
gacggagttgcgctg

SEQ ID NO: 1734789 - DNA, 15 bp, Homo sapiens
acggagttgcgctgt

SEQ ID NO: 1734790 - DNA, 15 bp, Homo sapiens
cggagttgcgctgtt

SEQ ID NO: 1734791 - DNA, 15 bp, Homo sapiens
ggagttgcgctgttt

SEQ ID NO: 1734792 - DNA, 15 bp, Homo sapiens
gagttgcgctgtttc

SEQ ID NO: 1734793 - DNA, 15 bp, Homo sapiens
agttgcgctgtttcg

SEQ ID NO: 1734794 - DNA, 15 bp, Homo sapiens
gttgcgctgtttcgc

SEQ ID NO: 1734795 - DNA, 15 bp, Homo sapiens
ttgcgctgtttcgcc

SEQ ID NO: 1734796 - DNA, 15 bp, Homo sapiens
tgcgctgtttcgccc

SEQ ID NO: 1734797 - DNA, 15 bp, Homo sapiens
gcgctgtttcgccca

SEQ ID NO: 1734798 - DNA, 15 bp, Homo sapiens
cgctgtttcgcccag

SEQ ID NO: 1734799 - DNA, 15 bp, Homo sapiens
gctgtttcgcccagg

SEQ ID NO: 1734800 - DNA, 15 bp, Homo sapiens
ctgtttcgcccaggc

SEQ ID NO: 1734801 - DNA, 15 bp, Homo sapiens
tgtttcgcccaggcc

SEQ ID NO: 1734802 - DNA, 15 bp, Homo sapiens
gtttcgcccaggccg

SEQ ID NO: 1734803 - DNA, 15 bp, Homo sapiens
tttcgcccaggccgg

SEQ ID NO: 1734804 - DNA, 15 bp, Homo sapiens
ttcgcccaggccgga

SEQ ID NO: 1734805 - DNA, 15 bp, Homo sapiens
cccaggccggactgt

SEQ ID NO: 1734806 - DNA, 15 bp, Homo sapiens
ccaggccggactgta

SEQ ID NO: 1734807 - DNA, 15 bp, Homo sapiens
caggccggactgtag

SEQ ID NO: 1734808 - DNA, 15 bp, Homo sapiens
aggccggactgtagt

SEQ ID NO: 1734809 - DNA, 15 bp, Homo sapiens
ggccggactgtagtg

SEQ ID NO: 1734810 - DNA, 15 bp, Homo sapiens
gccggactgtagtgg

SEQ ID NO: 1734811 - DNA, 15 bp, Homo sapiens
ccggactgtagtggc

SEQ ID NO: 1734812 - DNA, 15 bp, Homo sapiens
cggactgtagtggcg

SEQ ID NO: 1734813 - DNA, 15 bp, Homo sapiens
ggactgtagtggcgc

SEQ ID NO: 1734814 - DNA, 15 bp, Homo sapiens
gactgtagtggcgct

SEQ ID NO: 1734815 - DNA, 15 bp, Homo sapiens
actgtagtggcgcta

SEQ ID NO: 1734816 - DNA, 15 bp, Homo sapiens
ctgtagtggcgctat

SEQ ID NO: 1734817 - DNA, 15 bp, Homo sapiens
tgtagtggcgctatc

SEQ ID NO: 1734818 - DNA, 15 bp, Homo sapiens
gtagtggcgctatct

SEQ ID NO: 1734819 - DNA, 15 bp, Homo sapiens
tagtggcgctatctg

SEQ ID NO: 1734820 - DNA, 15 bp, Homo sapiens
agtggcgctatctgg

SEQ ID NO: 1734821 - DNA, 15 bp, Homo sapiens
gtggcgctatctggg

SEQ ID NO: 1734822 - DNA, 15 bp, Homo sapiens
tggcgctatctgggc

SEQ ID NO: 1734823 - DNA, 15 bp, Homo sapiens
ggcgctatctgggct

SEQ ID NO: 1734824 - DNA, 15 bp, Homo sapiens
gcgctatctgggctc

SEQ ID NO: 1734825 - DNA, 15 bp, Homo sapiens
cgctatctgggctca

SEQ ID NO: 1734826 - DNA, 15 bp, Homo sapiens
gctatctgggctcac

SEQ ID NO: 1734827 - DNA, 15 bp, Homo sapiens
ctatctgggctcact

SEQ ID NO: 1734828 - DNA, 15 bp, Homo sapiens
tatctgggctcactg

SEQ ID NO: 1734829 - DNA, 15 bp, Homo sapiens
tgggctcactgcaag

SEQ ID NO: 1734830 - DNA, 15 bp, Homo sapiens
gggctcactgcaagc

SEQ ID NO: 1734831 - DNA, 15 bp, Homo sapiens
gctcactgcaagctg

SEQ ID NO: 1734832 - DNA, 15 bp, Homo sapiens
ctcactgcaagctgc

SEQ ID NO: 1734833 - DNA, 15 bp, Homo sapiens
tcactgcaagctgcg

SEQ ID NO: 1734834 - DNA, 15 bp, Homo sapiens
cactgcaagctgcgc

SEQ ID NO: 1734835 - DNA, 15 bp, Homo sapiens
actgcaagctgcgcc

SEQ ID NO: 1734836 - DNA, 15 bp, Homo sapiens
ctgcaagctgcgcct

SEQ ID NO: 1734837 - DNA, 15 bp, Homo sapiens
tgcaagctgcgcctc

SEQ ID NO: 1734838 - DNA, 15 bp, Homo sapiens
gcaagctgcgcctcc

SEQ ID NO: 1734839 - DNA, 15 bp, Homo sapiens
caagctgcgcctccc

SEQ ID NO: 1734840 - DNA, 15 bp, Homo sapiens
aagctgcgcctcccg

SEQ ID NO: 1734841 - DNA, 15 bp, Homo sapiens
agctgcgcctcccgg

SEQ ID NO: 1734842 - DNA, 15 bp, Homo sapiens
gctgcgcctcccggg

SEQ ID NO: 1734843 - DNA, 15 bp, Homo sapiens
ctgcgcctcccgggt

SEQ ID NO: 1734844 - DNA, 15 bp, Homo sapiens
tgcgcctcccgggtt

SEQ ID NO: 1734845 - DNA, 15 bp, Homo sapiens
gcgcctcccgggttc

SEQ ID NO: 1734846 - DNA, 15 bp, Homo sapiens
gcctcccgggttcac

SEQ ID NO: 1734847 - DNA, 15 bp, Homo sapiens
tcgagtagctgagac

SEQ ID NO: 1734848 - DNA, 15 bp, Homo sapiens
cgagtagctgagact

SEQ ID NO: 1734849 - DNA, 15 bp, Homo sapiens
agtagctgagactac

SEQ ID NO: 1734850 - DNA, 15 bp, Homo sapiens
gtagctgagactaca

SEQ ID NO: 1734851 - DNA, 15 bp, Homo sapiens
tagctgagactacag

SEQ ID NO: 1734852 - DNA, 15 bp, Homo sapiens
agctgagactacagg

SEQ ID NO: 1734853 - DNA, 15 bp, Homo sapiens
gctgagactacaggt

SEQ ID NO: 1734854 - DNA, 15 bp, Homo sapiens
ctgagactacaggtc

SEQ ID NO: 1734855 - DNA, 15 bp, Homo sapiens
tgagactacaggtcc

SEQ ID NO: 1734856 - DNA, 15 bp, Homo sapiens
gagactacaggtccc

SEQ ID NO: 1734857 - DNA, 15 bp, Homo sapiens
agactacaggtcccc

SEQ ID NO: 1734858 - DNA, 15 bp, Homo sapiens
gactacaggtcccca

SEQ ID NO: 1734859 - DNA, 15 bp, Homo sapiens
actacaggtccccac

SEQ ID NO: 1734860 - DNA, 15 bp, Homo sapiens
ctacaggtccccacc

SEQ ID NO: 1734861 - DNA, 15 bp, Homo sapiens
tacaggtccccacca

SEQ ID NO: 1734862 - DNA, 15 bp, Homo sapiens
acaggtccccaccac

SEQ ID NO: 1734863 - DNA, 15 bp, Homo sapiens
caggtccccaccacc

SEQ ID NO: 1734864 - DNA, 15 bp, Homo sapiens
aggtccccaccacca

SEQ ID NO: 1734865 - DNA, 15 bp, Homo sapiens
ggtccccaccaccac

SEQ ID NO: 1734866 - DNA, 15 bp, Homo sapiens
gtccccaccaccacg

SEQ ID NO: 1734867 - DNA, 15 bp, Homo sapiens
tccccaccaccacgc

SEQ ID NO: 1734868 - DNA, 15 bp, Homo sapiens
ccccaccaccacgcc

SEQ ID NO: 1734869 - DNA, 15 bp, Homo sapiens
cccaccaccacgcct

SEQ ID NO: 1734870 - DNA, 15 bp, Homo sapiens
ccaccaccacgcctg

SEQ ID NO: 1734871 - DNA, 15 bp, Homo sapiens
accacgcctggctag

SEQ ID NO: 1734872 - DNA, 15 bp, Homo sapiens
ccacgcctggctagt

SEQ ID NO: 1734873 - DNA, 15 bp, Homo sapiens
cacgcctggctagtt

SEQ ID NO: 1734874 - DNA, 15 bp, Homo sapiens
acgcctggctagttt

SEQ ID NO: 1734875 - DNA, 15 bp, Homo sapiens
cgcctggctagtttt

SEQ ID NO: 1734876 - DNA, 15 bp, Homo sapiens
gcctggctagttttt

SEQ ID NO: 1734877 - DNA, 15 bp, Homo sapiens
cctggctagtttttg

SEQ ID NO: 1734878 - DNA, 15 bp, Homo sapiens
ctggctagtttttgt

SEQ ID NO: 1734879 - DNA, 15 bp, Homo sapiens
tggctagtttttgta

SEQ ID NO: 1734880 - DNA, 15 bp, Homo sapiens
ggctagtttttgtat

SEQ ID NO: 1734881 - DNA, 15 bp, Homo sapiens
gtttttgtattttta

SEQ ID NO: 1734882 - DNA, 15 bp, Homo sapiens
atggtcttgatctct

SEQ ID NO: 1734883 - DNA, 15 bp, Homo sapiens
tggtcttgatctctt

SEQ ID NO: 1734884 - DNA, 15 bp, Homo sapiens
ggtcttgatctcttg

SEQ ID NO: 1734885 - DNA, 15 bp, Homo sapiens
gtcttgatctcttga

SEQ ID NO: 1734886 - DNA, 15 bp, Homo sapiens
tcttgatctcttgac

SEQ ID NO: 1734887 - DNA, 15 bp, Homo sapiens
cttgatctcttgacc

SEQ ID NO: 1734888 - DNA, 15 bp, Homo sapiens
ttgatctcttgacct

SEQ ID NO: 1734889 - DNA, 15 bp, Homo sapiens
tgatctcttgacctt

SEQ ID NO: 1734890 - DNA, 15 bp, Homo sapiens
gatctcttgaccttg

SEQ ID NO: 1734891 - DNA, 15 bp, Homo sapiens
atctcttgaccttgt

SEQ ID NO: 1734892 - DNA, 15 bp, Homo sapiens
tctcttgaccttgtg

SEQ ID NO: 1734893 - DNA, 15 bp, Homo sapiens
ctcttgaccttgtga

SEQ ID NO: 1734894 - DNA, 15 bp, Homo sapiens
tcttgaccttgtgat

SEQ ID NO: 1734895 - DNA, 15 bp, Homo sapiens
cttgaccttgtgatc

SEQ ID NO: 1734896 - DNA, 15 bp, Homo sapiens
ttgaccttgtgatcc

SEQ ID NO: 1734897 - DNA, 15 bp, Homo sapiens
tgaccttgtgatccg

SEQ ID NO: 1734898 - DNA, 15 bp, Homo sapiens
gaccttgtgatccgc

SEQ ID NO: 1734899 - DNA, 15 bp, Homo sapiens
accttgtgatccgcc

SEQ ID NO: 1734900 - DNA, 15 bp, Homo sapiens
ccttgtgatccgccc

SEQ ID NO: 1734901 - DNA, 15 bp, Homo sapiens
gatccgcccgcctca

SEQ ID NO: 1734902 - DNA, 15 bp, Homo sapiens
atccgcccgcctcag

SEQ ID NO: 1734903 - DNA, 15 bp, Homo sapiens
tccgcccgcctcagc

SEQ ID NO: 1734904 - DNA, 15 bp, Homo sapiens
ccgcccgcctcagcc

SEQ ID NO: 1734905 - DNA, 15 bp, Homo sapiens
aagtgctgcgattat

SEQ ID NO: 1734906 - DNA, 15 bp, Homo sapiens
agtgctgcgattata

SEQ ID NO: 1734907 - DNA, 15 bp, Homo sapiens
gtgctgcgattatag

SEQ ID NO: 1734908 - DNA, 15 bp, Homo sapiens
tgctgcgattatagg

SEQ ID NO: 1734909 - DNA, 15 bp, Homo sapiens
gctgcgattataggc

SEQ ID NO: 1734910 - DNA, 15 bp, Homo sapiens
ctgcgattataggcg

SEQ ID NO: 1734911 - DNA, 15 bp, Homo sapiens
tgcgattataggcgt

SEQ ID NO: 1734912 - DNA, 15 bp, Homo sapiens
gcgattataggcgtg

SEQ ID NO: 1734913 - DNA, 15 bp, Homo sapiens
cgattataggcgtga

SEQ ID NO: 1734914 - DNA, 15 bp, Homo sapiens
ttggctcttgacttt

SEQ ID NO: 1734915 - DNA, 15 bp, Homo sapiens
tggctcttgacttta

SEQ ID NO: 1734916 - DNA, 15 bp, Homo sapiens
ggctcttgactttac

SEQ ID NO: 1734917 - DNA, 15 bp, Homo sapiens
gctcttgactttacc

SEQ ID NO: 1734918 - DNA, 15 bp, Homo sapiens
ctcttgactttacct

SEQ ID NO: 1734919 - DNA, 15 bp, Homo sapiens
tcttgactttacctg

SEQ ID NO: 1734920 - DNA, 15 bp, Homo sapiens
cttgactttacctgc

SEQ ID NO: 1734921 - DNA, 15 bp, Homo sapiens
ttgactttacctgct

SEQ ID NO: 1734922 - DNA, 15 bp, Homo sapiens
tgactttacctgctc

SEQ ID NO: 1734923 - DNA, 15 bp, Homo sapiens
gactttacctgctcc

SEQ ID NO: 1734924 - DNA, 15 bp, Homo sapiens
actttacctgctccc

SEQ ID NO: 1734925 - DNA, 15 bp, Homo sapiens
ctttacctgctccca

SEQ ID NO: 1734926 - DNA, 15 bp, Homo sapiens
tttacctgctcccat

SEQ ID NO: 1734927 - DNA, 15 bp, Homo sapiens
ttacctgctcccatt

SEQ ID NO: 1734928 - DNA, 15 bp, Homo sapiens
tacctgctcccattg

SEQ ID NO: 1734929 - DNA, 15 bp, Homo sapiens
acctgctcccattgt

SEQ ID NO: 1734930 - DNA, 15 bp, Homo sapiens
cctgctcccattgtt

SEQ ID NO: 1734931 - DNA, 15 bp, Homo sapiens
ctgctcccattgttt

SEQ ID NO: 1734932 - DNA, 15 bp, Homo sapiens
tgctcccattgtttt

SEQ ID NO: 1734933 - DNA, 15 bp, Homo sapiens
gctcccattgtttta

SEQ ID NO: 1734934 - DNA, 15 bp, Homo sapiens
ctcccattgttttat

SEQ ID NO: 1734935 - DNA, 15 bp, Homo sapiens
tcccattgttttatc

SEQ ID NO: 1734936 - DNA, 15 bp, Homo sapiens
cccattgttttatcc

SEQ ID NO: 1734937 - DNA, 15 bp, Homo sapiens
ccattgttttatcca

SEQ ID NO: 1734938 - DNA, 15 bp, Homo sapiens
cattgttttatccaa

SEQ ID NO: 1734939 - DNA, 15 bp, Homo sapiens
attgttttatccaag

SEQ ID NO: 1734940 - DNA, 15 bp, Homo sapiens
ttgttttatccaagc

SEQ ID NO: 1734941 - DNA, 15 bp, Homo sapiens
tgttttatccaagct

SEQ ID NO: 1734942 - DNA, 15 bp, Homo sapiens
gttttatccaagctc

SEQ ID NO: 1734943 - DNA, 15 bp, Homo sapiens
ttttatccaagctct

SEQ ID NO: 1734944 - DNA, 15 bp, Homo sapiens
tttatccaagctctg

SEQ ID NO: 1734945 - DNA, 15 bp, Homo sapiens
ttatccaagctctgc

SEQ ID NO: 1734946 - DNA, 15 bp, Homo sapiens
tatccaagctctgcc

SEQ ID NO: 1734947 - DNA, 15 bp, Homo sapiens
atccaagctctgcct

SEQ ID NO: 1734948 - DNA, 15 bp, Homo sapiens
tccaagctctgcctg

SEQ ID NO: 1734949 - DNA, 15 bp, Homo sapiens
ccaagctctgcctgg

SEQ ID NO: 1734950 - DNA, 15 bp, Homo sapiens
caagctctgcctggt

SEQ ID NO: 1734951 - DNA, 15 bp, Homo sapiens
aagctctgcctggtt

SEQ ID NO: 1734952 - DNA, 15 bp, Homo sapiens
agctctgcctggttt

SEQ ID NO: 1734953 - DNA, 15 bp, Homo sapiens
gctctgcctggtttc

SEQ ID NO: 1734954 - DNA, 15 bp, Homo sapiens
ctctgcctggtttct

SEQ ID NO: 1734955 - DNA, 15 bp, Homo sapiens
tctgcctggtttctg

SEQ ID NO: 1734956 - DNA, 15 bp, Homo sapiens
ctgcctggtttctga

SEQ ID NO: 1734957 - DNA, 15 bp, Homo sapiens
tgcctggtttctgac

SEQ ID NO: 1734958 - DNA, 15 bp, Homo sapiens
gcctggtttctgacc

SEQ ID NO: 1734959 - DNA, 15 bp, Homo sapiens
cctggtttctgaccc

SEQ ID NO: 1734960 - DNA, 15 bp, Homo sapiens
ctggtttctgaccct

SEQ ID NO: 1734961 - DNA, 15 bp, Homo sapiens
tggtttctgaccctt

SEQ ID NO: 1734962 - DNA, 15 bp, Homo sapiens
ggtttctgacccttt

SEQ ID NO: 1734963 - DNA, 15 bp, Homo sapiens
gtttctgaccctttg

SEQ ID NO: 1734964 - DNA, 15 bp, Homo sapiens
tttctgaccctttgt

SEQ ID NO: 1734965 - DNA, 15 bp, Homo sapiens
ttctgaccctttgtc

SEQ ID NO: 1734966 - DNA, 15 bp, Homo sapiens
tctgaccctttgtct

SEQ ID NO: 1734967 - DNA, 15 bp, Homo sapiens
ctgaccctttgtctc

SEQ ID NO: 1734968 - DNA, 15 bp, Homo sapiens
tgaccctttgtctct

SEQ ID NO: 1734969 - DNA, 15 bp, Homo sapiens
gaccctttgtctctt

SEQ ID NO: 1734970 - DNA, 15 bp, Homo sapiens
accctttgtctcttt

SEQ ID NO: 1734971 - DNA, 15 bp, Homo sapiens
ccctttgtctctttc

SEQ ID NO: 1734972 - DNA, 15 bp, Homo sapiens
cctttgtctctttcg

SEQ ID NO: 1734973 - DNA, 15 bp, Homo sapiens
ctttgtctctttcgg

SEQ ID NO: 1734974 - DNA, 15 bp, Homo sapiens
tttgtctctttcggt

SEQ ID NO: 1734975 - DNA, 15 bp, Homo sapiens
ttgtctctttcggtt

SEQ ID NO: 1734976 - DNA, 15 bp, Homo sapiens
tgtctctttcggttc

SEQ ID NO: 1734977 - DNA, 15 bp, Homo sapiens
gtctctttcggttct

SEQ ID NO: 1734978 - DNA, 15 bp, Homo sapiens
tctctttcggttctc

SEQ ID NO: 1734979 - DNA, 15 bp, Homo sapiens
ctctttcggttctct

SEQ ID NO: 1734980 - DNA, 15 bp, Homo sapiens
tctttcggttctctt

SEQ ID NO: 1734981 - DNA, 15 bp, Homo sapiens
ctttcggttctcttg

SEQ ID NO: 1734982 - DNA, 15 bp, Homo sapiens
tttcggttctcttgc

SEQ ID NO: 1734983 - DNA, 15 bp, Homo sapiens
ttcggttctcttgct

SEQ ID NO: 1734984 - DNA, 15 bp, Homo sapiens
tcggttctcttgctt

SEQ ID NO: 1734985 - DNA, 15 bp, Homo sapiens
cggttctcttgcttg

SEQ ID NO: 1734986 - DNA, 15 bp, Homo sapiens
ggttctcttgcttgc

SEQ ID NO: 1734987 - DNA, 15 bp, Homo sapiens
gttctcttgcttgcc

SEQ ID NO: 1734988 - DNA, 15 bp, Homo sapiens
ttctcttgcttgccc

SEQ ID NO: 1734989 - DNA, 15 bp, Homo sapiens
tctcttgcttgccct

SEQ ID NO: 1734990 - DNA, 15 bp, Homo sapiens
ctcttgcttgccctg

SEQ ID NO: 1734991 - DNA, 15 bp, Homo sapiens
tcttgcttgccctgt

SEQ ID NO: 1734992 - DNA, 15 bp, Homo sapiens
cttgcttgccctgtg

SEQ ID NO: 1734993 - DNA, 15 bp, Homo sapiens
ttgcttgccctgtgt

SEQ ID NO: 1734994 - DNA, 15 bp, Homo sapiens
tgcttgccctgtgtg

SEQ ID NO: 1734995 - DNA, 15 bp, Homo sapiens
gcttgccctgtgtgt

SEQ ID NO: 1734996 - DNA, 15 bp, Homo sapiens
cttgccctgtgtgtt

SEQ ID NO: 1734997 - DNA, 15 bp, Homo sapiens
ttgccctgtgtgttt

SEQ ID NO: 1734998 - DNA, 15 bp, Homo sapiens
tgccctgtgtgtttg

SEQ ID NO: 1734999 - DNA, 15 bp, Homo sapiens
gccctgtgtgtttga

SEQ ID NO: 1735000 - DNA, 15 bp, Homo sapiens
ccctgtgtgtttgat

SEQ ID NO: 1735001 - DNA, 15 bp, Homo sapiens
cctgtgtgtttgatg

SEQ ID NO: 1735002 - DNA, 15 bp, Homo sapiens
ctgtgtgtttgatga

SEQ ID NO: 1735003 - DNA, 15 bp, Homo sapiens
tgtgtgtttgatgat

SEQ ID NO: 1735004 - DNA, 15 bp, Homo sapiens
gtgtgtttgatgatg

SEQ ID NO: 1735005 - DNA, 15 bp, Homo sapiens
tgtgtttgatgatgg

SEQ ID NO: 1735006 - DNA, 15 bp, Homo sapiens
gtgtttgatgatgga

SEQ ID NO: 1735007 - DNA, 15 bp, Homo sapiens
tgtttgatgatggag

SEQ ID NO: 1735008 - DNA, 15 bp, Homo sapiens
gtttgatgatggagt

SEQ ID NO: 1735009 - DNA, 15 bp, Homo sapiens
tttgatgatggagtt

SEQ ID NO: 1735010 - DNA, 15 bp, Homo sapiens
ttgatgatggagttt

SEQ ID NO: 1735011 - DNA, 15 bp, Homo sapiens
tgatgatggagtttg

SEQ ID NO: 1735012 - DNA, 15 bp, Homo sapiens
gatgatggagtttgt

SEQ ID NO: 1735013 - DNA, 15 bp, Homo sapiens
atgatggagtttgtc

SEQ ID NO: 1735014 - DNA, 15 bp, Homo sapiens
tgatggagtttgtcc

SEQ ID NO: 1735015 - DNA, 15 bp, Homo sapiens
gatggagtttgtccc

SEQ ID NO: 1735016 - DNA, 15 bp, Homo sapiens
atggagtttgtccct

SEQ ID NO: 1735017 - DNA, 15 bp, Homo sapiens
tggagtttgtccctg

SEQ ID NO: 1735018 - DNA, 15 bp, Homo sapiens
ggagtttgtccctgt

SEQ ID NO: 1735019 - DNA, 15 bp, Homo sapiens
gagtttgtccctgtc

SEQ ID NO: 1735020 - DNA, 15 bp, Homo sapiens
agtttgtccctgtcc

SEQ ID NO: 1735021 - DNA, 15 bp, Homo sapiens
gtttgtccctgtccc

SEQ ID NO: 1735022 - DNA, 15 bp, Homo sapiens
tttgtccctgtccct

SEQ ID NO: 1735023 - DNA, 15 bp, Homo sapiens
ttgtccctgtccctg

SEQ ID NO: 1735024 - DNA, 15 bp, Homo sapiens
tgtccctgtccctga

SEQ ID NO: 1735025 - DNA, 15 bp, Homo sapiens
gtccctgtccctgaa

SEQ ID NO: 1735026 - DNA, 15 bp, Homo sapiens
tccctgtccctgaaa

SEQ ID NO: 1735027 - DNA, 15 bp, Homo sapiens
ccctgtccctgaaac

SEQ ID NO: 1735028 - DNA, 15 bp, Homo sapiens
cctgtccctgaaacc

SEQ ID NO: 1735029 - DNA, 15 bp, Homo sapiens
ctgtccctgaaacct

SEQ ID NO: 1735030 - DNA, 15 bp, Homo sapiens
tgtccctgaaacctt

SEQ ID NO: 1735031 - DNA, 15 bp, Homo sapiens
gtccctgaaaccttg

SEQ ID NO: 1735032 - DNA, 15 bp, Homo sapiens
tccctgaaaccttgc

SEQ ID NO: 1735033 - DNA, 15 bp, Homo sapiens
ccctgaaaccttgcc

SEQ ID NO: 1735034 - DNA, 15 bp, Homo sapiens
cctgaaaccttgcct

SEQ ID NO: 1735035 - DNA, 15 bp, Homo sapiens
ctgaaaccttgcctg

SEQ ID NO: 1735036 - DNA, 15 bp, Homo sapiens
tgaaaccttgcctga

SEQ ID NO: 1735037 - DNA, 15 bp, Homo sapiens
gaaaccttgcctgaa

SEQ ID NO: 1735038 - DNA, 15 bp, Homo sapiens
aaaccttgcctgaac

SEQ ID NO: 1735039 - DNA, 15 bp, Homo sapiens
aaccttgcctgaact

SEQ ID NO: 1735040 - DNA, 15 bp, Homo sapiens
accttgcctgaactc

SEQ ID NO: 1735041 - DNA, 15 bp, Homo sapiens
ccttgcctgaactcc

SEQ ID NO: 1735042 - DNA, 15 bp, Homo sapiens
cttgcctgaactcct

SEQ ID NO: 1735043 - DNA, 15 bp, Homo sapiens
ttgcctgaactcctg

SEQ ID NO: 1735044 - DNA, 15 bp, Homo sapiens
tgcctgaactcctgg

SEQ ID NO: 1735045 - DNA, 15 bp, Homo sapiens
gcctgaactcctgga

SEQ ID NO: 1735046 - DNA, 15 bp, Homo sapiens
cctgaactcctggaa

SEQ ID NO: 1735047 - DNA, 15 bp, Homo sapiens
ctgaactcctggaaa

SEQ ID NO: 1735048 - DNA, 15 bp, Homo sapiens
tgaactcctggaaat

SEQ ID NO: 1735049 - DNA, 15 bp, Homo sapiens
gaactcctggaaatc

SEQ ID NO: 1735050 - DNA, 15 bp, Homo sapiens
aactcctggaaatct

SEQ ID NO: 1735051 - DNA, 15 bp, Homo sapiens
actcctggaaatctt

SEQ ID NO: 1735052 - DNA, 15 bp, Homo sapiens
ctcctggaaatcttt

SEQ ID NO: 1735053 - DNA, 15 bp, Homo sapiens
tcctggaaatctttg

SEQ ID NO: 1735054 - DNA, 15 bp, Homo sapiens
cctggaaatctttga

SEQ ID NO: 1735055 - DNA, 15 bp, Homo sapiens
ctggaaatctttgag

SEQ ID NO: 1735056 - DNA, 15 bp, Homo sapiens
tggaaatctttgaga

SEQ ID NO: 1735057 - DNA, 15 bp, Homo sapiens
ggaaatctttgagaa

SEQ ID NO: 1735058 - DNA, 15 bp, Homo sapiens
gaaatctttgagaat

SEQ ID NO: 1735059 - DNA, 15 bp, Homo sapiens
aaatctttgagaatg

SEQ ID NO: 1735060 - DNA, 15 bp, Homo sapiens
aatctttgagaatgg

SEQ ID NO: 1735061 - DNA, 15 bp, Homo sapiens
atctttgagaatggt

SEQ ID NO: 1735062 - DNA, 15 bp, Homo sapiens
tctttgagaatggtg

SEQ ID NO: 1735063 - DNA, 15 bp, Homo sapiens
ctttgagaatggtgt

SEQ ID NO: 1735064 - DNA, 15 bp, Homo sapiens
tttgagaatggtgta

SEQ ID NO: 1735065 - DNA, 15 bp, Homo sapiens
ttgagaatggtgtac

SEQ ID NO: 1735066 - DNA, 15 bp, Homo sapiens
tgagaatggtgtaca

SEQ ID NO: 1735067 - DNA, 15 bp, Homo sapiens
gagaatggtgtacac

SEQ ID NO: 1735068 - DNA, 15 bp, Homo sapiens
agaatggtgtacaca

SEQ ID NO: 1735069 - DNA, 15 bp, Homo sapiens
gaatggtgtacacac

SEQ ID NO: 1735070 - DNA, 15 bp, Homo sapiens
aatggtgtacacaca

SEQ ID NO: 1735071 - DNA, 15 bp, Homo sapiens
atggtgtacacacat

SEQ ID NO: 1735072 - DNA, 15 bp, Homo sapiens
tggtgtacacacata

SEQ ID NO: 1735073 - DNA, 15 bp, Homo sapiens
ggtgtacacacatat

SEQ ID NO: 1735074 - DNA, 15 bp, Homo sapiens
gtgtacacacatatc

SEQ ID NO: 1735075 - DNA, 15 bp, Homo sapiens
tgtacacacatatcc

SEQ ID NO: 1735076 - DNA, 15 bp, Homo sapiens
gtacacacatatcca

SEQ ID NO: 1735077 - DNA, 15 bp, Homo sapiens
tacacacatatccac

SEQ ID NO: 1735078 - DNA, 15 bp, Homo sapiens
acacacatatccact

SEQ ID NO: 1735079 - DNA, 15 bp, Homo sapiens
cacacatatccactt

SEQ ID NO: 1735080 - DNA, 15 bp, Homo sapiens
acacatatccacttt

SEQ ID NO: 1735081 - DNA, 15 bp, Homo sapiens
cacatatccactttc

SEQ ID NO: 1735082 - DNA, 15 bp, Homo sapiens
acatatccactttcc

SEQ ID NO: 1735083 - DNA, 15 bp, Homo sapiens
catatccactttcca

SEQ ID NO: 1735084 - DNA, 15 bp, Homo sapiens
atatccactttccac

SEQ ID NO: 1735085 - DNA, 15 bp, Homo sapiens
tatccactttccacc

SEQ ID NO: 1735086 - DNA, 15 bp, Homo sapiens
atccactttccacca

SEQ ID NO: 1735087 - DNA, 15 bp, Homo sapiens
tccactttccaccat

SEQ ID NO: 1735088 - DNA, 15 bp, Homo sapiens
ccactttccaccatg

SEQ ID NO: 1735089 - DNA, 15 bp, Homo sapiens
cactttccaccatgt

SEQ ID NO: 1735090 - DNA, 15 bp, Homo sapiens
actttccaccatgtg

SEQ ID NO: 1735091 - DNA, 15 bp, Homo sapiens
ctttccaccatgtgc

SEQ ID NO: 1735092 - DNA, 15 bp, Homo sapiens
tttccaccatgtgcc

SEQ ID NO: 1735093 - DNA, 15 bp, Homo sapiens
ttccaccatgtgcct

SEQ ID NO: 1735094 - DNA, 15 bp, Homo sapiens
tccaccatgtgcctc

SEQ ID NO: 1735095 - DNA, 15 bp, Homo sapiens
ccaccatgtgcctct

SEQ ID NO: 1735096 - DNA, 15 bp, Homo sapiens
caccatgtgcctcta

SEQ ID NO: 1735097 - DNA, 15 bp, Homo sapiens
accatgtgcctctaa

SEQ ID NO: 1735098 - DNA, 15 bp, Homo sapiens
ccatgtgcctctaac

SEQ ID NO: 1735099 - DNA, 15 bp, Homo sapiens
catgtgcctctaacc

SEQ ID NO: 1735100 - DNA, 15 bp, Homo sapiens
atgtgcctctaacct

SEQ ID NO: 1735101 - DNA, 15 bp, Homo sapiens
tgtgcctctaacctc

SEQ ID NO: 1735102 - DNA, 15 bp, Homo sapiens
gtgcctctaacctca

SEQ ID NO: 1735103 - DNA, 15 bp, Homo sapiens
tgcctctaacctcag

SEQ ID NO: 1735104 - DNA, 15 bp, Homo sapiens
gcctctaacctcagc

SEQ ID NO: 1735105 - DNA, 15 bp, Homo sapiens
cctctaacctcagcc

SEQ ID NO: 1735106 - DNA, 15 bp, Homo sapiens
ctctaacctcagcct

SEQ ID NO: 1735107 - DNA, 15 bp, Homo sapiens
tctaacctcagcctc

SEQ ID NO: 1735108 - DNA, 15 bp, Homo sapiens
ctaacctcagcctca

SEQ ID NO: 1735109 - DNA, 15 bp, Homo sapiens
taacctcagcctcac

SEQ ID NO: 1735110 - DNA, 15 bp, Homo sapiens
aacctcagcctcacc

SEQ ID NO: 1735111 - DNA, 15 bp, Homo sapiens
acctcagcctcaccc

SEQ ID NO: 1735112 - DNA, 15 bp, Homo sapiens
cctcagcctcacccg

SEQ ID NO: 1735113 - DNA, 15 bp, Homo sapiens
ctcagcctcacccgg

SEQ ID NO: 1735114 - DNA, 15 bp, Homo sapiens
tcagcctcacccggg

SEQ ID NO: 1735115 - DNA, 15 bp, Homo sapiens
cagcctcacccgggt

SEQ ID NO: 1735116 - DNA, 15 bp, Homo sapiens
agcctcacccgggtt

SEQ ID NO: 1735117 - DNA, 15 bp, Homo sapiens
gcctcacccgggtta

SEQ ID NO: 1735118 - DNA, 15 bp, Homo sapiens
cctcacccgggttat

SEQ ID NO: 1735119 - DNA, 15 bp, Homo sapiens
ctcacccgggttatt

SEQ ID NO: 1735120 - DNA, 15 bp, Homo sapiens
tcacccgggttattg

SEQ ID NO: 1735121 - DNA, 15 bp, Homo sapiens
cacccgggttattga

SEQ ID NO: 1735122 - DNA, 15 bp, Homo sapiens
acccgggttattgac

SEQ ID NO: 1735123 - DNA, 15 bp, Homo sapiens
cccgggttattgacc

SEQ ID NO: 1735124 - DNA, 15 bp, Homo sapiens
ccgggttattgaccc

SEQ ID NO: 1735125 - DNA, 15 bp, Homo sapiens
cgggttattgaccca

SEQ ID NO: 1735126 - DNA, 15 bp, Homo sapiens
gggttattgacccag

SEQ ID NO: 1735127 - DNA, 15 bp, Homo sapiens
ggttattgacccagt

SEQ ID NO: 1735128 - DNA, 15 bp, Homo sapiens
gttattgacccagtc

SEQ ID NO: 1735129 - DNA, 15 bp, Homo sapiens
ttattgacccagtct

SEQ ID NO: 1735130 - DNA, 15 bp, Homo sapiens
tattgacccagtctg

SEQ ID NO: 1735131 - DNA, 15 bp, Homo sapiens
attgacccagtctga

SEQ ID NO: 1735132 - DNA, 15 bp, Homo sapiens
ttgacccagtctgac

SEQ ID NO: 1735133 - DNA, 15 bp, Homo sapiens
tgacccagtctgacc

SEQ ID NO: 1735134 - DNA, 15 bp, Homo sapiens
gacccagtctgacct

SEQ ID NO: 1735135 - DNA, 15 bp, Homo sapiens
acccagtctgaccta

SEQ ID NO: 1735136 - DNA, 15 bp, Homo sapiens
cccagtctgacctag

SEQ ID NO: 1735137 - DNA, 15 bp, Homo sapiens
ccagtctgacctagc

SEQ ID NO: 1735138 - DNA, 15 bp, Homo sapiens
cagtctgacctagct

SEQ ID NO: 1735139 - DNA, 15 bp, Homo sapiens
agtctgacctagctt

SEQ ID NO: 1735140 - DNA, 15 bp, Homo sapiens
gtctgacctagcttc

SEQ ID NO: 1735141 - DNA, 15 bp, Homo sapiens
tctgacctagcttca

SEQ ID NO: 1735142 - DNA, 15 bp, Homo sapiens
ctgacctagcttcag

SEQ ID NO: 1735143 - DNA, 15 bp, Homo sapiens
tgacctagcttcagc

SEQ ID NO: 1735144 - DNA, 15 bp, Homo sapiens
gacctagcttcagcc

SEQ ID NO: 1735145 - DNA, 15 bp, Homo sapiens
acctagcttcagccc

SEQ ID NO: 1735146 - DNA, 15 bp, Homo sapiens
cctagcttcagccct

SEQ ID NO: 1735147 - DNA, 15 bp, Homo sapiens
ctagcttcagccctc

SEQ ID NO: 1735148 - DNA, 15 bp, Homo sapiens
tagcttcagccctca

SEQ ID NO: 1735149 - DNA, 15 bp, Homo sapiens
agcttcagccctcaa

SEQ ID NO: 1735150 - DNA, 15 bp, Homo sapiens
gcttcagccctcaaa

SEQ ID NO: 1735151 - DNA, 15 bp, Homo sapiens
cttcagccctcaaag

SEQ ID NO: 1735152 - DNA, 15 bp, Homo sapiens
ttcagccctcaaagg

SEQ ID NO: 1735153 - DNA, 15 bp, Homo sapiens
tcagccctcaaaggc

SEQ ID NO: 1735154 - DNA, 15 bp, Homo sapiens
cagccctcaaaggct

SEQ ID NO: 1735155 - DNA, 15 bp, Homo sapiens
agccctcaaaggctc

SEQ ID NO: 1735156 - DNA, 15 bp, Homo sapiens
gccctcaaaggctcc

SEQ ID NO: 1735157 - DNA, 15 bp, Homo sapiens
ccctcaaaggctcca

SEQ ID NO: 1735158 - DNA, 15 bp, Homo sapiens
cctcaaaggctccac

SEQ ID NO: 1735159 - DNA, 15 bp, Homo sapiens
ctcaaaggctccact

SEQ ID NO: 1735160 - DNA, 15 bp, Homo sapiens
tcaaaggctccactg

SEQ ID NO: 1735161 - DNA, 15 bp, Homo sapiens
caaaggctccactgt

SEQ ID NO: 1735162 - DNA, 15 bp, Homo sapiens
aaaggctccactgtg

SEQ ID NO: 1735163 - DNA, 15 bp, Homo sapiens
aaggctccactgtgc

SEQ ID NO: 1735164 - DNA, 15 bp, Homo sapiens
aggctccactgtgcc

SEQ ID NO: 1735165 - DNA, 15 bp, Homo sapiens
ggctccactgtgcca

SEQ ID NO: 1735166 - DNA, 15 bp, Homo sapiens
gctccactgtgccaa

SEQ ID NO: 1735167 - DNA, 15 bp, Homo sapiens
ctccactgtgccaag

SEQ ID NO: 1735168 - DNA, 15 bp, Homo sapiens
tccactgtgccaagc

SEQ ID NO: 1735169 - DNA, 15 bp, Homo sapiens
ccactgtgccaagcc

SEQ ID NO: 1735170 - DNA, 15 bp, Homo sapiens
cactgtgccaagcct

SEQ ID NO: 1735171 - DNA, 15 bp, Homo sapiens
actgtgccaagcctg

SEQ ID NO: 1735172 - DNA, 15 bp, Homo sapiens
ctgtgccaagcctgg

SEQ ID NO: 1735173 - DNA, 15 bp, Homo sapiens
tgtgccaagcctggc

SEQ ID NO: 1735174 - DNA, 15 bp, Homo sapiens
gtgccaagcctggct

SEQ ID NO: 1735175 - DNA, 15 bp, Homo sapiens
tgccaagcctggctc

SEQ ID NO: 1735176 - DNA, 15 bp, Homo sapiens
gccaagcctggctca

SEQ ID NO: 1735177 - DNA, 15 bp, Homo sapiens
ccaagcctggctcat

SEQ ID NO: 1735178 - DNA, 15 bp, Homo sapiens
caagcctggctcatc

SEQ ID NO: 1735179 - DNA, 15 bp, Homo sapiens
aagcctggctcatca

SEQ ID NO: 1735180 - DNA, 15 bp, Homo sapiens
agcctggctcatcac

SEQ ID NO: 1735181 - DNA, 15 bp, Homo sapiens
gcctggctcatcacc

SEQ ID NO: 1735182 - DNA, 15 bp, Homo sapiens
cctggctcatcaccc

SEQ ID NO: 1735183 - DNA, 15 bp, Homo sapiens
ctggctcatcaccct

SEQ ID NO: 1735184 - DNA, 15 bp, Homo sapiens
tggctcatcaccctc

SEQ ID NO: 1735185 - DNA, 15 bp, Homo sapiens
ggctcatcaccctct

SEQ ID NO: 1735186 - DNA, 15 bp, Homo sapiens
gctcatcaccctctc

SEQ ID NO: 1735187 - DNA, 15 bp, Homo sapiens
ctcatcaccctctct

SEQ ID NO: 1735188 - DNA, 15 bp, Homo sapiens
tcatcaccctctctc

SEQ ID NO: 1735189 - DNA, 15 bp, Homo sapiens
catcaccctctctcc

SEQ ID NO: 1735190 - DNA, 15 bp, Homo sapiens
atcaccctctctccc

SEQ ID NO: 1735191 - DNA, 15 bp, Homo sapiens
tcaccctctctccca

SEQ ID NO: 1735192 - DNA, 15 bp, Homo sapiens
caccctctctcccaa

SEQ ID NO: 1735193 - DNA, 15 bp, Homo sapiens
accctctctcccaat

SEQ ID NO: 1735194 - DNA, 15 bp, Homo sapiens
ccctctctcccaata

SEQ ID NO: 1735195 - DNA, 15 bp, Homo sapiens
cctctctcccaataa

SEQ ID NO: 1735196 - DNA, 15 bp, Homo sapiens
ctctctcccaataac

SEQ ID NO: 1735197 - DNA, 15 bp, Homo sapiens
tctctcccaataact

SEQ ID NO: 1735198 - DNA, 15 bp, Homo sapiens
ctctcccaataactg

SEQ ID NO: 1735199 - DNA, 15 bp, Homo sapiens
tctcccaataactgt

SEQ ID NO: 1735200 - DNA, 15 bp, Homo sapiens
ctcccaataactgtt

SEQ ID NO: 1735201 - DNA, 15 bp, Homo sapiens
tcccaataactgttc

SEQ ID NO: 1735202 - DNA, 15 bp, Homo sapiens
cccaataactgttct

SEQ ID NO: 1735203 - DNA, 15 bp, Homo sapiens
ccaataactgttctt

SEQ ID NO: 1735204 - DNA, 15 bp, Homo sapiens
caataactgttcttt

SEQ ID NO: 1735205 - DNA, 15 bp, Homo sapiens
aataactgttctttg

SEQ ID NO: 1735206 - DNA, 15 bp, Homo sapiens
ataactgttctttgt

SEQ ID NO: 1735207 - DNA, 15 bp, Homo sapiens
taactgttctttgtc

SEQ ID NO: 1735208 - DNA, 15 bp, Homo sapiens
aactgttctttgtcc

SEQ ID NO: 1735209 - DNA, 15 bp, Homo sapiens
actgttctttgtccc

SEQ ID NO: 1735210 - DNA, 15 bp, Homo sapiens
ctgttctttgtcccc

SEQ ID NO: 1735211 - DNA, 15 bp, Homo sapiens
tgttctttgtcccca

SEQ ID NO: 1735212 - DNA, 15 bp, Homo sapiens
gttctttgtccccaa

SEQ ID NO: 1735213 - DNA, 15 bp, Homo sapiens
ttctttgtccccaaa

SEQ ID NO: 1735214 - DNA, 15 bp, Homo sapiens
tctttgtccccaaaa

SEQ ID NO: 1735215 - DNA, 15 bp, Homo sapiens
ctttgtccccaaaag

SEQ ID NO: 1735216 - DNA, 15 bp, Homo sapiens
tttgtccccaaaagg

SEQ ID NO: 1735217 - DNA, 15 bp, Homo sapiens
ttgtccccaaaaggg

SEQ ID NO: 1735218 - DNA, 15 bp, Homo sapiens
tgtccccaaaagggg

SEQ ID NO: 1735219 - DNA, 15 bp, Homo sapiens
gtccccaaaaggggc

SEQ ID NO: 1735220 - DNA, 15 bp, Homo sapiens
tccccaaaaggggct

SEQ ID NO: 1735221 - DNA, 15 bp, Homo sapiens
ccccaaaaggggctg

SEQ ID NO: 1735222 - DNA, 15 bp, Homo sapiens
cccaaaaggggctga

SEQ ID NO: 1735223 - DNA, 15 bp, Homo sapiens
ccaaaaggggctgag

SEQ ID NO: 1735224 - DNA, 15 bp, Homo sapiens
caaaaggggctgagg

SEQ ID NO: 1735225 - DNA, 15 bp, Homo sapiens
aaaaggggctgaggt

SEQ ID NO: 1735226 - DNA, 15 bp, Homo sapiens
aaaggggctgaggtg

SEQ ID NO: 1735227 - DNA, 15 bp, Homo sapiens
aaggggctgaggtgg

SEQ ID NO: 1735228 - DNA, 15 bp, Homo sapiens
aggggctgaggtggg

SEQ ID NO: 1735229 - DNA, 15 bp, Homo sapiens
ggggctgaggtgggg

SEQ ID NO: 1735230 - DNA, 15 bp, Homo sapiens
gggctgaggtggggg

SEQ ID NO: 1735231 - DNA, 15 bp, Homo sapiens
ggctgaggtgggggg

SEQ ID NO: 1735232 - DNA, 15 bp, Homo sapiens
gctgaggtgggggga

SEQ ID NO: 1735233 - DNA, 15 bp, Homo sapiens
ctgaggtggggggaa

SEQ ID NO: 1735234 - DNA, 15 bp, Homo sapiens
tgaggtggggggaat

SEQ ID NO: 1735235 - DNA, 15 bp, Homo sapiens
gaggtggggggaatg

SEQ ID NO: 1735236 - DNA, 15 bp, Homo sapiens
aggtggggggaatgg

SEQ ID NO: 1735237 - DNA, 15 bp, Homo sapiens
ggtggggggaatggg

SEQ ID NO: 1735238 - DNA, 15 bp, Homo sapiens
gtggggggaatgggc

SEQ ID NO: 1735239 - DNA, 15 bp, Homo sapiens
tggggggaatgggca

SEQ ID NO: 1735240 - DNA, 15 bp, Homo sapiens
ggggggaatgggcag

SEQ ID NO: 1735241 - DNA, 15 bp, Homo sapiens
gggggaatgggcaga

SEQ ID NO: 1735242 - DNA, 15 bp, Homo sapiens
ggggaatgggcagag

SEQ ID NO: 1735243 - DNA, 15 bp, Homo sapiens
gggaatgggcagagt

SEQ ID NO: 1735244 - DNA, 15 bp, Homo sapiens
ggaatgggcagagta

SEQ ID NO: 1735245 - DNA, 15 bp, Homo sapiens
gaatgggcagagtaa

SEQ ID NO: 1735246 - DNA, 15 bp, Homo sapiens
aatgggcagagtaaa

SEQ ID NO: 1735247 - DNA, 15 bp, Homo sapiens
atgggcagagtaaag

SEQ ID NO: 1735248 - DNA, 15 bp, Homo sapiens
tgggcagagtaaagc

SEQ ID NO: 1735249 - DNA, 15 bp, Homo sapiens
gggcagagtaaagca

SEQ ID NO: 1735250 - DNA, 15 bp, Homo sapiens
ggcagagtaaagcat

SEQ ID NO: 1735251 - DNA, 15 bp, Homo sapiens
gcagagtaaagcatt

SEQ ID NO: 1735252 - DNA, 15 bp, Homo sapiens
cagagtaaagcattt

SEQ ID NO: 1735253 - DNA, 15 bp, Homo sapiens
agagtaaagcatttt

SEQ ID NO: 1735254 - DNA, 15 bp, Homo sapiens
gagtaaagcatttta

SEQ ID NO: 1735255 - DNA, 15 bp, Homo sapiens
agtaaagcattttaa

SEQ ID NO: 1735256 - DNA, 15 bp, Homo sapiens
gtaaagcattttaaa

SEQ ID NO: 1735257 - DNA, 15 bp, Homo sapiens
taaagcattttaaaa

SEQ ID NO: 1735258 - DNA, 15 bp, Homo sapiens
aaagcattttaaaag

SEQ ID NO: 1735259 - DNA, 15 bp, Homo sapiens
aagcattttaaaaga

SEQ ID NO: 1735260 - DNA, 15 bp, Homo sapiens
agcattttaaaagag

SEQ ID NO: 1735261 - DNA, 15 bp, Homo sapiens
gcattttaaaagaga

SEQ ID NO: 1735262 - DNA, 15 bp, Homo sapiens
cattttaaaagagag

SEQ ID NO: 1735263 - DNA, 15 bp, Homo sapiens
attttaaaagagagg

SEQ ID NO: 1735264 - DNA, 15 bp, Homo sapiens
ttttaaaagagagga

SEQ ID NO: 1735265 - DNA, 15 bp, Homo sapiens
tttaaaagagaggag

SEQ ID NO: 1735266 - DNA, 15 bp, Homo sapiens
ttaaaagagaggaga

SEQ ID NO: 1735267 - DNA, 15 bp, Homo sapiens
taaaagagaggagag

SEQ ID NO: 1735268 - DNA, 15 bp, Homo sapiens
aaaagagaggagaga

SEQ ID NO: 1735269 - DNA, 15 bp, Homo sapiens
aaagagaggagagaa

SEQ ID NO: 1735270 - DNA, 15 bp, Homo sapiens
aagagaggagagaaa

SEQ ID NO: 1735271 - DNA, 15 bp, Homo sapiens
agagaggagagaaaa

SEQ ID NO: 1735272 - DNA, 15 bp, Homo sapiens
gagaggagagaaaaa

SEQ ID NO: 1735273 - DNA, 15 bp, Homo sapiens
agaggagagaaaaaa

SEQ ID NO: 1735274 - DNA, 15 bp, Homo sapiens
gaggagagaaaaaaa

SEQ ID NO: 1735275 - DNA, 15 bp, Homo sapiens
aggagagaaaaaaaa

SEQ ID NO: 1735276 - DNA, 15 bp, Homo sapiens
ggagagaaaaaaaag

SEQ ID NO: 1735277 - DNA, 15 bp, Homo sapiens
gagagaaaaaaaaga

SEQ ID NO: 1735278 - DNA, 15 bp, Homo sapiens
agagaaaaaaaagat

SEQ ID NO: 1735279 - DNA, 15 bp, Homo sapiens
gagaaaaaaaagata

SEQ ID NO: 1735280 - DNA, 15 bp, Homo sapiens
agaaaaaaaagatag

SEQ ID NO: 1735281 - DNA, 15 bp, Homo sapiens
gaaaaaaaagatagg

SEQ ID NO: 1735282 - DNA, 15 bp, Homo sapiens
aaaaaaaagatagga

SEQ ID NO: 1735283 - DNA, 15 bp, Homo sapiens
aaaaaaagataggaa

SEQ ID NO: 1735284 - DNA, 15 bp, Homo sapiens
aaaaaagataggaag

SEQ ID NO: 1735285 - DNA, 15 bp, Homo sapiens
aaaaagataggaagc

SEQ ID NO: 1735286 - DNA, 15 bp, Homo sapiens
aaaagataggaagct

SEQ ID NO: 1735287 - DNA, 15 bp, Homo sapiens
aaagataggaagcta

SEQ ID NO: 1735288 - DNA, 15 bp, Homo sapiens
aagataggaagctat

SEQ ID NO: 1735289 - DNA, 15 bp, Homo sapiens
agataggaagctata

SEQ ID NO: 1735290 - DNA, 15 bp, Homo sapiens
gataggaagctatag

SEQ ID NO: 1735291 - DNA, 15 bp, Homo sapiens
ataggaagctataga

SEQ ID NO: 1735292 - DNA, 15 bp, Homo sapiens
taggaagctatagaa

SEQ ID NO: 1735293 - DNA, 15 bp, Homo sapiens
aggaagctatagaaa

SEQ ID NO: 1735294 - DNA, 15 bp, Homo sapiens
ggaagctatagaaat

SEQ ID NO: 1735295 - DNA, 15 bp, Homo sapiens
gaagctatagaaatg

SEQ ID NO: 1735296 - DNA, 15 bp, Homo sapiens
aagctatagaaatgg

SEQ ID NO: 1735297 - DNA, 15 bp, Homo sapiens
agctatagaaatgga

SEQ ID NO: 1735298 - DNA, 15 bp, Homo sapiens
gctatagaaatggaa

SEQ ID NO: 1735299 - DNA, 15 bp, Homo sapiens
ctatagaaatggaaa

SEQ ID NO: 1735300 - DNA, 15 bp, Homo sapiens
tatagaaatggaaat

SEQ ID NO: 1735301 - DNA, 15 bp, Homo sapiens
atagaaatggaaatg

SEQ ID NO: 1735302 - DNA, 15 bp, Homo sapiens
tagaaatggaaatgt

SEQ ID NO: 1735303 - DNA, 15 bp, Homo sapiens
agaaatggaaatgta

SEQ ID NO: 1735304 - DNA, 15 bp, Homo sapiens
gaaatggaaatgtaa

SEQ ID NO: 1735305 - DNA, 15 bp, Homo sapiens
aaatggaaatgtaag

SEQ ID NO: 1735306 - DNA, 15 bp, Homo sapiens
aatggaaatgtaaga

SEQ ID NO: 1735307 - DNA, 15 bp, Homo sapiens
atggaaatgtaagat

SEQ ID NO: 1735308 - DNA, 15 bp, Homo sapiens
tggaaatgtaagatg

SEQ ID NO: 1735309 - DNA, 15 bp, Homo sapiens
ggaaatgtaagatga

SEQ ID NO: 1735310 - DNA, 15 bp, Homo sapiens
gaaatgtaagatgag

SEQ ID NO: 1735311 - DNA, 15 bp, Homo sapiens
aaatgtaagatgagg

SEQ ID NO: 1735312 - DNA, 15 bp, Homo sapiens
aatgtaagatgagga

SEQ ID NO: 1735313 - DNA, 15 bp, Homo sapiens
atgtaagatgaggaa

SEQ ID NO: 1735314 - DNA, 15 bp, Homo sapiens
tgtaagatgaggaaa

SEQ ID NO: 1735315 - DNA, 15 bp, Homo sapiens
gtaagatgaggaaaa

SEQ ID NO: 1735316 - DNA, 15 bp, Homo sapiens
taagatgaggaaaat

SEQ ID NO: 1735317 - DNA, 15 bp, Homo sapiens
aagatgaggaaaatg

SEQ ID NO: 1735318 - DNA, 15 bp, Homo sapiens
agatgaggaaaatgt

SEQ ID NO: 1735319 - DNA, 15 bp, Homo sapiens
gatgaggaaaatgta

SEQ ID NO: 1735320 - DNA, 15 bp, Homo sapiens
atgaggaaaatgtag

SEQ ID NO: 1735321 - DNA, 15 bp, Homo sapiens
tgaggaaaatgtagt

SEQ ID NO: 1735322 - DNA, 15 bp, Homo sapiens
gaggaaaatgtagtc

SEQ ID NO: 1735323 - DNA, 15 bp, Homo sapiens
aggaaaatgtagtct

SEQ ID NO: 1735324 - DNA, 15 bp, Homo sapiens
ggaaaatgtagtcta

SEQ ID NO: 1735325 - DNA, 15 bp, Homo sapiens
gaaaatgtagtctag

SEQ ID NO: 1735326 - DNA, 15 bp, Homo sapiens
aaaatgtagtctaga

SEQ ID NO: 1735327 - DNA, 15 bp, Homo sapiens
aaatgtagtctagaa

SEQ ID NO: 1735328 - DNA, 15 bp, Homo sapiens
aatgtagtctagaag

SEQ ID NO: 1735329 - DNA, 15 bp, Homo sapiens
atgtagtctagaagg

SEQ ID NO: 1735330 - DNA, 15 bp, Homo sapiens
tgtagtctagaaggc

SEQ ID NO: 1735331 - DNA, 15 bp, Homo sapiens
gtagtctagaaggca

SEQ ID NO: 1735332 - DNA, 15 bp, Homo sapiens
tagtctagaaggcag

SEQ ID NO: 1735333 - DNA, 15 bp, Homo sapiens
agtctagaaggcaga

SEQ ID NO: 1735334 - DNA, 15 bp, Homo sapiens
gtctagaaggcagag

SEQ ID NO: 1735335 - DNA, 15 bp, Homo sapiens
tctagaaggcagagg

SEQ ID NO: 1735336 - DNA, 15 bp, Homo sapiens
ctagaaggcagagga

SEQ ID NO: 1735337 - DNA, 15 bp, Homo sapiens
tagaaggcagaggag

SEQ ID NO: 1735338 - DNA, 15 bp, Homo sapiens
agaaggcagaggagg

SEQ ID NO: 1735339 - DNA, 15 bp, Homo sapiens
gaaggcagaggagga

SEQ ID NO: 1735340 - DNA, 15 bp, Homo sapiens
aaggcagaggaggaa

SEQ ID NO: 1735341 - DNA, 15 bp, Homo sapiens
aggcagaggaggaaa

SEQ ID NO: 1735342 - DNA, 15 bp, Homo sapiens
ggcagaggaggaaag

SEQ ID NO: 1735343 - DNA, 15 bp, Homo sapiens
gcagaggaggaaaga

SEQ ID NO: 1735344 - DNA, 15 bp, Homo sapiens
cagaggaggaaagaa

SEQ ID NO: 1735345 - DNA, 15 bp, Homo sapiens
gaggaggaaagaaga

SEQ ID NO: 1735346 - DNA, 15 bp, Homo sapiens
aggaggaaagaagaa

SEQ ID NO: 1735347 - DNA, 15 bp, Homo sapiens
ggaggaaagaagaac

SEQ ID NO: 1735348 - DNA, 15 bp, Homo sapiens
gaggaaagaagaaca

SEQ ID NO: 1735349 - DNA, 15 bp, Homo sapiens
aggaaagaagaacaa

SEQ ID NO: 1735350 - DNA, 15 bp, Homo sapiens
ggaaagaagaacaaa

SEQ ID NO: 1735351 - DNA, 15 bp, Homo sapiens
gaaagaagaacaaag

SEQ ID NO: 1735352 - DNA, 15 bp, Homo sapiens
aaagaagaacaaaga

SEQ ID NO: 1735353 - DNA, 15 bp, Homo sapiens
aagaagaacaaagag

SEQ ID NO: 1735354 - DNA, 15 bp, Homo sapiens
agaagaacaaagaga

SEQ ID NO: 1735355 - DNA, 15 bp, Homo sapiens
gaagaacaaagagaa

SEQ ID NO: 1735356 - DNA, 15 bp, Homo sapiens
aagaacaaagagaaa

SEQ ID NO: 1735357 - DNA, 15 bp, Homo sapiens
agaacaaagagaaag

SEQ ID NO: 1735358 - DNA, 15 bp, Homo sapiens
gaacaaagagaaaga

SEQ ID NO: 1735359 - DNA, 15 bp, Homo sapiens
aacaaagagaaagag

SEQ ID NO: 1735360 - DNA, 15 bp, Homo sapiens
acaaagagaaagaga

SEQ ID NO: 1735361 - DNA, 15 bp, Homo sapiens
caaagagaaagagag

SEQ ID NO: 1735362 - DNA, 15 bp, Homo sapiens
aaagagaaagagagc

SEQ ID NO: 1735363 - DNA, 15 bp, Homo sapiens
aagagaaagagagcc

SEQ ID NO: 1735364 - DNA, 15 bp, Homo sapiens
agagaaagagagcca

SEQ ID NO: 1735365 - DNA, 15 bp, Homo sapiens
gagaaagagagccat

SEQ ID NO: 1735366 - DNA, 15 bp, Homo sapiens
agaaagagagccata

SEQ ID NO: 1735367 - DNA, 15 bp, Homo sapiens
gaaagagagccataa

SEQ ID NO: 1735368 - DNA, 15 bp, Homo sapiens
aaagagagccataaa

SEQ ID NO: 1735369 - DNA, 15 bp, Homo sapiens
aagagagccataaat

SEQ ID NO: 1735370 - DNA, 15 bp, Homo sapiens
agagagccataaatg

SEQ ID NO: 1735371 - DNA, 15 bp, Homo sapiens
gagagccataaatgg

SEQ ID NO: 1735372 - DNA, 15 bp, Homo sapiens
agagccataaatggg

SEQ ID NO: 1735373 - DNA, 15 bp, Homo sapiens
gagccataaatgggt

SEQ ID NO: 1735374 - DNA, 15 bp, Homo sapiens
agccataaatgggtc

SEQ ID NO: 1735375 - DNA, 15 bp, Homo sapiens
gccataaatgggtca

SEQ ID NO: 1735376 - DNA, 15 bp, Homo sapiens
ccataaatgggtcaa

SEQ ID NO: 1735377 - DNA, 15 bp, Homo sapiens
cataaatgggtcaat

SEQ ID NO: 1735378 - DNA, 15 bp, Homo sapiens
ataaatgggtcaatc

SEQ ID NO: 1735379 - DNA, 15 bp, Homo sapiens
taaatgggtcaatca

SEQ ID NO: 1735380 - DNA, 15 bp, Homo sapiens
aaatgggtcaatcaa

SEQ ID NO: 1735381 - DNA, 15 bp, Homo sapiens
aatgggtcaatcaaa

SEQ ID NO: 1735382 - DNA, 15 bp, Homo sapiens
atgggtcaatcaaaa

SEQ ID NO: 1735383 - DNA, 15 bp, Homo sapiens
tgggtcaatcaaaaa

SEQ ID NO: 1735384 - DNA, 15 bp, Homo sapiens
gggtcaatcaaaaac

SEQ ID NO: 1735385 - DNA, 15 bp, Homo sapiens
ggtcaatcaaaaaca

SEQ ID NO: 1735386 - DNA, 15 bp, Homo sapiens
gtcaatcaaaaacag

SEQ ID NO: 1735387 - DNA, 15 bp, Homo sapiens
tcaatcaaaaacaga

SEQ ID NO: 1735388 - DNA, 15 bp, Homo sapiens
caatcaaaaacagaa

SEQ ID NO: 1735389 - DNA, 15 bp, Homo sapiens
aatcaaaaacagaaa

SEQ ID NO: 1735390 - DNA, 15 bp, Homo sapiens
atcaaaaacagaaag

SEQ ID NO: 1735391 - DNA, 15 bp, Homo sapiens
tcaaaaacagaaaga

SEQ ID NO: 1735392 - DNA, 15 bp, Homo sapiens
caaaaacagaaagaa

SEQ ID NO: 1735393 - DNA, 15 bp, Homo sapiens
aaaaacagaaagaaa

SEQ ID NO: 1735394 - DNA, 15 bp, Homo sapiens
aaaacagaaagaaaa

SEQ ID NO: 1735395 - DNA, 15 bp, Homo sapiens
aaacagaaagaaaag

SEQ ID NO: 1735396 - DNA, 15 bp, Homo sapiens
aacagaaagaaaagg

SEQ ID NO: 1735397 - DNA, 15 bp, Homo sapiens
acagaaagaaaaggt

SEQ ID NO: 1735398 - DNA, 15 bp, Homo sapiens
cagaaagaaaaggtg

SEQ ID NO: 1735399 - DNA, 15 bp, Homo sapiens
agaaagaaaaggtga

SEQ ID NO: 1735400 - DNA, 15 bp, Homo sapiens
gaaagaaaaggtgag

SEQ ID NO: 1735401 - DNA, 15 bp, Homo sapiens
aaagaaaaggtgaga

SEQ ID NO: 1735402 - DNA, 15 bp, Homo sapiens
aagaaaaggtgagaa

SEQ ID NO: 1735403 - DNA, 15 bp, Homo sapiens
agaaaaggtgagaaa

SEQ ID NO: 1735404 - DNA, 15 bp, Homo sapiens
gaaaaggtgagaaat

SEQ ID NO: 1735405 - DNA, 15 bp, Homo sapiens
aaaaggtgagaaatg

SEQ ID NO: 1735406 - DNA, 15 bp, Homo sapiens
aaaggtgagaaatgg

SEQ ID NO: 1735407 - DNA, 15 bp, Homo sapiens
aaggtgagaaatgga

SEQ ID NO: 1735408 - DNA, 15 bp, Homo sapiens
aggtgagaaatggaa

SEQ ID NO: 1735409 - DNA, 15 bp, Homo sapiens
ggtgagaaatggaag

SEQ ID NO: 1735410 - DNA, 15 bp, Homo sapiens
gtgagaaatggaaga

SEQ ID NO: 1735411 - DNA, 15 bp, Homo sapiens
tgagaaatggaagag

SEQ ID NO: 1735412 - DNA, 15 bp, Homo sapiens
gagaaatggaagagg

SEQ ID NO: 1735413 - DNA, 15 bp, Homo sapiens
agaaatggaagagga

SEQ ID NO: 1735414 - DNA, 15 bp, Homo sapiens
gaaatggaagaggac

SEQ ID NO: 1735415 - DNA, 15 bp, Homo sapiens
aaatggaagaggact

SEQ ID NO: 1735416 - DNA, 15 bp, Homo sapiens
aatggaagaggacta

SEQ ID NO: 1735417 - DNA, 15 bp, Homo sapiens
atggaagaggactaa

SEQ ID NO: 1735418 - DNA, 15 bp, Homo sapiens
tggaagaggactaat

SEQ ID NO: 1735419 - DNA, 15 bp, Homo sapiens
ggaagaggactaata

SEQ ID NO: 1735420 - DNA, 15 bp, Homo sapiens
gaagaggactaataa

SEQ ID NO: 1735421 - DNA, 15 bp, Homo sapiens
aagaggactaataag

SEQ ID NO: 1735422 - DNA, 15 bp, Homo sapiens
agaggactaataaga

SEQ ID NO: 1735423 - DNA, 15 bp, Homo sapiens
gaggactaataagac

SEQ ID NO: 1735424 - DNA, 15 bp, Homo sapiens
aggactaataagaca

SEQ ID NO: 1735425 - DNA, 15 bp, Homo sapiens
ggactaataagacag

SEQ ID NO: 1735426 - DNA, 15 bp, Homo sapiens
gactaataagacagt

SEQ ID NO: 1735427 - DNA, 15 bp, Homo sapiens
actaataagacagta

SEQ ID NO: 1735428 - DNA, 15 bp, Homo sapiens
ctaataagacagtaa

SEQ ID NO: 1735429 - DNA, 15 bp, Homo sapiens
taataagacagtaac

SEQ ID NO: 1735430 - DNA, 15 bp, Homo sapiens
aataagacagtaaca

SEQ ID NO: 1735431 - DNA, 15 bp, Homo sapiens
ataagacagtaacaa

SEQ ID NO: 1735432 - DNA, 15 bp, Homo sapiens
taagacagtaacaaa

SEQ ID NO: 1735433 - DNA, 15 bp, Homo sapiens
aagacagtaacaaag

SEQ ID NO: 1735434 - DNA, 15 bp, Homo sapiens
agacagtaacaaagt

SEQ ID NO: 1735435 - DNA, 15 bp, Homo sapiens
gacagtaacaaagtc

SEQ ID NO: 1735436 - DNA, 15 bp, Homo sapiens
acagtaacaaagtcc

SEQ ID NO: 1735437 - DNA, 15 bp, Homo sapiens
cagtaacaaagtcct

SEQ ID NO: 1735438 - DNA, 15 bp, Homo sapiens
agtaacaaagtcctt

SEQ ID NO: 1735439 - DNA, 15 bp, Homo sapiens
gtaacaaagtccttt

SEQ ID NO: 1735440 - DNA, 15 bp, Homo sapiens
taacaaagtcctttg

SEQ ID NO: 1735441 - DNA, 15 bp, Homo sapiens
aacaaagtcctttga

SEQ ID NO: 1735442 - DNA, 15 bp, Homo sapiens
acaaagtcctttgaa

SEQ ID NO: 1735443 - DNA, 15 bp, Homo sapiens
caaagtcctttgaag

SEQ ID NO: 1735444 - DNA, 15 bp, Homo sapiens
aaagtcctttgaagt

SEQ ID NO: 1735445 - DNA, 15 bp, Homo sapiens
aagtcctttgaagtg

SEQ ID NO: 1735446 - DNA, 15 bp, Homo sapiens
agtcctttgaagtgt

SEQ ID NO: 1735447 - DNA, 15 bp, Homo sapiens
gtcctttgaagtgtt

SEQ ID NO: 1735448 - DNA, 15 bp, Homo sapiens
tcctttgaagtgtta

SEQ ID NO: 1735449 - DNA, 15 bp, Homo sapiens
cctttgaagtgttag

SEQ ID NO: 1735450 - DNA, 15 bp, Homo sapiens
ctttgaagtgttaga

SEQ ID NO: 1735451 - DNA, 15 bp, Homo sapiens
tttgaagtgttagaa

SEQ ID NO: 1735452 - DNA, 15 bp, Homo sapiens
ttgaagtgttagaac

SEQ ID NO: 1735453 - DNA, 15 bp, Homo sapiens
tgaagtgttagaaca

SEQ ID NO: 1735454 - DNA, 15 bp, Homo sapiens
gaagtgttagaacac

SEQ ID NO: 1735455 - DNA, 15 bp, Homo sapiens
aagtgttagaacact

SEQ ID NO: 1735456 - DNA, 15 bp, Homo sapiens
agtgttagaacactg

SEQ ID NO: 1735457 - DNA, 15 bp, Homo sapiens
gtgttagaacactga

SEQ ID NO: 1735458 - DNA, 15 bp, Homo sapiens
tgttagaacactgaa

SEQ ID NO: 1735459 - DNA, 15 bp, Homo sapiens
gttagaacactgaac

SEQ ID NO: 1735460 - DNA, 15 bp, Homo sapiens
ttagaacactgaact

SEQ ID NO: 1735461 - DNA, 15 bp, Homo sapiens
tagaacactgaactg

SEQ ID NO: 1735462 - DNA, 15 bp, Homo sapiens
agaacactgaactgc

SEQ ID NO: 1735463 - DNA, 15 bp, Homo sapiens
gaacactgaactgct

SEQ ID NO: 1735464 - DNA, 15 bp, Homo sapiens
aacactgaactgctg

SEQ ID NO: 1735465 - DNA, 15 bp, Homo sapiens
acactgaactgctgg

SEQ ID NO: 1735466 - DNA, 15 bp, Homo sapiens
cactgaactgctggt

SEQ ID NO: 1735467 - DNA, 15 bp, Homo sapiens
actgaactgctggtt

SEQ ID NO: 1735468 - DNA, 15 bp, Homo sapiens
ctgaactgctggtta

SEQ ID NO: 1735469 - DNA, 15 bp, Homo sapiens
tgaactgctggttag

SEQ ID NO: 1735470 - DNA, 15 bp, Homo sapiens
gaactgctggttagt

SEQ ID NO: 1735471 - DNA, 15 bp, Homo sapiens
aactgctggttagtt

SEQ ID NO: 1735472 - DNA, 15 bp, Homo sapiens
actgctggttagttc

SEQ ID NO: 1735473 - DNA, 15 bp, Homo sapiens
ctgctggttagttct

SEQ ID NO: 1735474 - DNA, 15 bp, Homo sapiens
tgctggttagttctt

SEQ ID NO: 1735475 - DNA, 15 bp, Homo sapiens
gctggttagttcttg

SEQ ID NO: 1735476 - DNA, 15 bp, Homo sapiens
ctggttagttcttga

SEQ ID NO: 1735477 - DNA, 15 bp, Homo sapiens
tggttagttcttgag

SEQ ID NO: 1735478 - DNA, 15 bp, Homo sapiens
ggttagttcttgagg

SEQ ID NO: 1735479 - DNA, 15 bp, Homo sapiens
gttagttcttgaggg

SEQ ID NO: 1735480 - DNA, 15 bp, Homo sapiens
ttagttcttgagggt

SEQ ID NO: 1735481 - DNA, 15 bp, Homo sapiens
tagttcttgagggtt

SEQ ID NO: 1735482 - DNA, 15 bp, Homo sapiens
agttcttgagggttg

SEQ ID NO: 1735483 - DNA, 15 bp, Homo sapiens
gttcttgagggttgt

SEQ ID NO: 1735484 - DNA, 15 bp, Homo sapiens
ttcttgagggttgtg

SEQ ID NO: 1735485 - DNA, 15 bp, Homo sapiens
tcttgagggttgtgc

SEQ ID NO: 1735486 - DNA, 15 bp, Homo sapiens
cttgagggttgtgca

SEQ ID NO: 1735487 - DNA, 15 bp, Homo sapiens
ttgagggttgtgcac

SEQ ID NO: 1735488 - DNA, 15 bp, Homo sapiens
tgagggttgtgcact

SEQ ID NO: 1735489 - DNA, 15 bp, Homo sapiens
gagggttgtgcactt

SEQ ID NO: 1735490 - DNA, 15 bp, Homo sapiens
agggttgtgcacttc

SEQ ID NO: 1735491 - DNA, 15 bp, Homo sapiens
gggttgtgcacttca

SEQ ID NO: 1735492 - DNA, 15 bp, Homo sapiens
ggttgtgcacttcac

SEQ ID NO: 1735493 - DNA, 15 bp, Homo sapiens
gttgtgcacttcact

SEQ ID NO: 1735494 - DNA, 15 bp, Homo sapiens
ttgtgcacttcactg

SEQ ID NO: 1735495 - DNA, 15 bp, Homo sapiens
tgtgcacttcactgt

SEQ ID NO: 1735496 - DNA, 15 bp, Homo sapiens
gtgcacttcactgtg

SEQ ID NO: 1735497 - DNA, 15 bp, Homo sapiens
tgcacttcactgtga

SEQ ID NO: 1735498 - DNA, 15 bp, Homo sapiens
gcacttcactgtgac

SEQ ID NO: 1735499 - DNA, 15 bp, Homo sapiens
cacttcactgtgaca

SEQ ID NO: 1735500 - DNA, 15 bp, Homo sapiens
acttcactgtgacaa

SEQ ID NO: 1735501 - DNA, 15 bp, Homo sapiens
cttcactgtgacaac

SEQ ID NO: 1735502 - DNA, 15 bp, Homo sapiens
ttcactgtgacaact

SEQ ID NO: 1735503 - DNA, 15 bp, Homo sapiens
tcactgtgacaactg

SEQ ID NO: 1735504 - DNA, 15 bp, Homo sapiens
cactgtgacaactgg

SEQ ID NO: 1735505 - DNA, 15 bp, Homo sapiens
actgtgacaactggt

SEQ ID NO: 1735506 - DNA, 15 bp, Homo sapiens
ctgtgacaactggta

SEQ ID NO: 1735507 - DNA, 15 bp, Homo sapiens
tgtgacaactggtat

SEQ ID NO: 1735508 - DNA, 15 bp, Homo sapiens
gtgacaactggtatc

SEQ ID NO: 1735509 - DNA, 15 bp, Homo sapiens
tgacaactggtatca

SEQ ID NO: 1735510 - DNA, 15 bp, Homo sapiens
gacaactggtatcac

SEQ ID NO: 1735511 - DNA, 15 bp, Homo sapiens
acaactggtatcacc

SEQ ID NO: 1735512 - DNA, 15 bp, Homo sapiens
caactggtatcaccc

SEQ ID NO: 1735513 - DNA, 15 bp, Homo sapiens
aactggtatcaccct

SEQ ID NO: 1735514 - DNA, 15 bp, Homo sapiens
actggtatcaccctt

SEQ ID NO: 1735515 - DNA, 15 bp, Homo sapiens
ctggtatcacccttc

SEQ ID NO: 1735516 - DNA, 15 bp, Homo sapiens
tggtatcacccttcc

SEQ ID NO: 1735517 - DNA, 15 bp, Homo sapiens
ggtatcacccttccc

SEQ ID NO: 1735518 - DNA, 15 bp, Homo sapiens
gtatcacccttcccc

SEQ ID NO: 1735519 - DNA, 15 bp, Homo sapiens
tatcacccttcccct

SEQ ID NO: 1735520 - DNA, 15 bp, Homo sapiens
atcacccttcccctc

SEQ ID NO: 1735521 - DNA, 15 bp, Homo sapiens
tcacccttcccctct

SEQ ID NO: 1735522 - DNA, 15 bp, Homo sapiens
cacccttcccctctg

SEQ ID NO: 1735523 - DNA, 15 bp, Homo sapiens
acccttcccctctgt

SEQ ID NO: 1735524 - DNA, 15 bp, Homo sapiens
cccttcccctctgta

SEQ ID NO: 1735525 - DNA, 15 bp, Homo sapiens
ccttcccctctgtag

SEQ ID NO: 1735526 - DNA, 15 bp, Homo sapiens
cttcccctctgtagg

SEQ ID NO: 1735527 - DNA, 15 bp, Homo sapiens
ttcccctctgtaggt

SEQ ID NO: 1735528 - DNA, 15 bp, Homo sapiens
tcccctctgtaggta

SEQ ID NO: 1735529 - DNA, 15 bp, Homo sapiens
cccctctgtaggtag

SEQ ID NO: 1735530 - DNA, 15 bp, Homo sapiens
ccctctgtaggtagt

SEQ ID NO: 1735531 - DNA, 15 bp, Homo sapiens
cctctgtaggtagta

SEQ ID NO: 1735532 - DNA, 15 bp, Homo sapiens
ctctgtaggtagtac

SEQ ID NO: 1735533 - DNA, 15 bp, Homo sapiens
tctgtaggtagtact

SEQ ID NO: 1735534 - DNA, 15 bp, Homo sapiens
ctgtaggtagtactg

SEQ ID NO: 1735535 - DNA, 15 bp, Homo sapiens
tgtaggtagtactgt

SEQ ID NO: 1735536 - DNA, 15 bp, Homo sapiens
gtaggtagtactgtg

SEQ ID NO: 1735537 - DNA, 15 bp, Homo sapiens
taggtagtactgtgt

SEQ ID NO: 1735538 - DNA, 15 bp, Homo sapiens
aggtagtactgtgtc

SEQ ID NO: 1735539 - DNA, 15 bp, Homo sapiens
ggtagtactgtgtcc

SEQ ID NO: 1735540 - DNA, 15 bp, Homo sapiens
gtagtactgtgtcca

SEQ ID NO: 1735541 - DNA, 15 bp, Homo sapiens
tagtactgtgtccaa

SEQ ID NO: 1735542 - DNA, 15 bp, Homo sapiens
agtactgtgtccaag

SEQ ID NO: 1735543 - DNA, 15 bp, Homo sapiens
gtactgtgtccaaga

SEQ ID NO: 1735544 - DNA, 15 bp, Homo sapiens
tactgtgtccaagat

SEQ ID NO: 1735545 - DNA, 15 bp, Homo sapiens
actgtgtccaagatt

SEQ ID NO: 1735546 - DNA, 15 bp, Homo sapiens
ctgtgtccaagattc

SEQ ID NO: 1735547 - DNA, 15 bp, Homo sapiens
tgtgtccaagattct

SEQ ID NO: 1735548 - DNA, 15 bp, Homo sapiens
gtgtccaagattctt

SEQ ID NO: 1735549 - DNA, 15 bp, Homo sapiens
tgtccaagattcttg

SEQ ID NO: 1735550 - DNA, 15 bp, Homo sapiens
gtccaagattcttgg

SEQ ID NO: 1735551 - DNA, 15 bp, Homo sapiens
tccaagattcttggt

SEQ ID NO: 1735552 - DNA, 15 bp, Homo sapiens
ccaagattcttggtg

SEQ ID NO: 1735553 - DNA, 15 bp, Homo sapiens
caagattcttggtgt

SEQ ID NO: 1735554 - DNA, 15 bp, Homo sapiens
aagattcttggtgtg

SEQ ID NO: 1735555 - DNA, 15 bp, Homo sapiens
agattcttggtgtgg

SEQ ID NO: 1735556 - DNA, 15 bp, Homo sapiens
gattcttggtgtggc

SEQ ID NO: 1735557 - DNA, 15 bp, Homo sapiens
attcttggtgtggcc

SEQ ID NO: 1735558 - DNA, 15 bp, Homo sapiens
ttcttggtgtggccc

SEQ ID NO: 1735559 - DNA, 15 bp, Homo sapiens
tcttggtgtggccca

SEQ ID NO: 1735560 - DNA, 15 bp, Homo sapiens
cttggtgtggcccac

SEQ ID NO: 1735561 - DNA, 15 bp, Homo sapiens
ttggtgtggcccacc

SEQ ID NO: 1735562 - DNA, 15 bp, Homo sapiens
tggtgtggcccacca

SEQ ID NO: 1735563 - DNA, 15 bp, Homo sapiens
ggtgtggcccaccag

SEQ ID NO: 1735564 - DNA, 15 bp, Homo sapiens
gtgtggcccaccagc

SEQ ID NO: 1735565 - DNA, 15 bp, Homo sapiens
tgtggcccaccagcg

SEQ ID NO: 1735566 - DNA, 15 bp, Homo sapiens
gtggcccaccagcgc

SEQ ID NO: 1735567 - DNA, 15 bp, Homo sapiens
tggcccaccagcgca

SEQ ID NO: 1735568 - DNA, 15 bp, Homo sapiens
ggcccaccagcgcag

SEQ ID NO: 1735569 - DNA, 15 bp, Homo sapiens
gcccaccagcgcagg

SEQ ID NO: 1735570 - DNA, 15 bp, Homo sapiens
cccaccagcgcaggc

SEQ ID NO: 1735571 - DNA, 15 bp, Homo sapiens
ccaccagcgcaggcc

SEQ ID NO: 1735572 - DNA, 15 bp, Homo sapiens
caccagcgcaggcct

SEQ ID NO: 1735573 - DNA, 15 bp, Homo sapiens
accagcgcaggcctt

SEQ ID NO: 1735574 - DNA, 15 bp, Homo sapiens
ccagcgcaggccttc

SEQ ID NO: 1735575 - DNA, 15 bp, Homo sapiens
cagcgcaggccttct

SEQ ID NO: 1735576 - DNA, 15 bp, Homo sapiens
agcgcaggccttcta

SEQ ID NO: 1735577 - DNA, 15 bp, Homo sapiens
gcgcaggccttctat

SEQ ID NO: 1735578 - DNA, 15 bp, Homo sapiens
cgcaggccttctatc

SEQ ID NO: 1735579 - DNA, 15 bp, Homo sapiens
gcaggccttctatct

SEQ ID NO: 1735580 - DNA, 15 bp, Homo sapiens
caggccttctatctc

SEQ ID NO: 1735581 - DNA, 15 bp, Homo sapiens
aggccttctatctct

SEQ ID NO: 1735582 - DNA, 15 bp, Homo sapiens
ggccttctatctctc

SEQ ID NO: 1735583 - DNA, 15 bp, Homo sapiens
gccttctatctctct

SEQ ID NO: 1735584 - DNA, 15 bp, Homo sapiens
ccttctatctctctc

SEQ ID NO: 1735585 - DNA, 15 bp, Homo sapiens
cttctatctctctcc

SEQ ID NO: 1735586 - DNA, 15 bp, Homo sapiens
ttctatctctctcca

SEQ ID NO: 1735587 - DNA, 15 bp, Homo sapiens
tctatctctctccaa

SEQ ID NO: 1735588 - DNA, 15 bp, Homo sapiens
ctatctctctccaac

SEQ ID NO: 1735589 - DNA, 15 bp, Homo sapiens
tatctctctccaaca

SEQ ID NO: 1735590 - DNA, 15 bp, Homo sapiens
atctctctccaacat

SEQ ID NO: 1735591 - DNA, 15 bp, Homo sapiens
tctctctccaacatc

SEQ ID NO: 1735592 - DNA, 15 bp, Homo sapiens
ctctctccaacatcc

SEQ ID NO: 1735593 - DNA, 15 bp, Homo sapiens
tctctccaacatcct

SEQ ID NO: 1735594 - DNA, 15 bp, Homo sapiens
ctctccaacatcctc

SEQ ID NO: 1735595 - DNA, 15 bp, Homo sapiens
tctccaacatcctct

SEQ ID NO: 1735596 - DNA, 15 bp, Homo sapiens
ctccaacatcctctc

SEQ ID NO: 1735597 - DNA, 15 bp, Homo sapiens
tccaacatcctctcc

SEQ ID NO: 1735598 - DNA, 15 bp, Homo sapiens
ccaacatcctctccc

SEQ ID NO: 1735599 - DNA, 15 bp, Homo sapiens
caacatcctctccca

SEQ ID NO: 1735600 - DNA, 15 bp, Homo sapiens
aacatcctctcccac

SEQ ID NO: 1735601 - DNA, 15 bp, Homo sapiens
acatcctctcccaca

SEQ ID NO: 1735602 - DNA, 15 bp, Homo sapiens
catcctctcccacac

SEQ ID NO: 1735603 - DNA, 15 bp, Homo sapiens
atcctctcccacact

SEQ ID NO: 1735604 - DNA, 15 bp, Homo sapiens
tcctctcccacactt

SEQ ID NO: 1735605 - DNA, 15 bp, Homo sapiens
cctctcccacacttt

SEQ ID NO: 1735606 - DNA, 15 bp, Homo sapiens
ctctcccacactttg

SEQ ID NO: 1735607 - DNA, 15 bp, Homo sapiens
tctcccacactttgt

SEQ ID NO: 1735608 - DNA, 15 bp, Homo sapiens
ctcccacactttgta

SEQ ID NO: 1735609 - DNA, 15 bp, Homo sapiens
tcccacactttgtac

SEQ ID NO: 1735610 - DNA, 15 bp, Homo sapiens
cccacactttgtact

SEQ ID NO: 1735611 - DNA, 15 bp, Homo sapiens
ccacactttgtactg

SEQ ID NO: 1735612 - DNA, 15 bp, Homo sapiens
cacactttgtactgt

SEQ ID NO: 1735613 - DNA, 15 bp, Homo sapiens
acactttgtactgtg

SEQ ID NO: 1735614 - DNA, 15 bp, Homo sapiens
cactttgtactgtgc

SEQ ID NO: 1735615 - DNA, 15 bp, Homo sapiens
actttgtactgtgcc

SEQ ID NO: 1735616 - DNA, 15 bp, Homo sapiens
ctttgtactgtgccc

SEQ ID NO: 1735617 - DNA, 15 bp, Homo sapiens
tttgtactgtgccct

SEQ ID NO: 1735618 - DNA, 15 bp, Homo sapiens
ttgtactgtgccctt

SEQ ID NO: 1735619 - DNA, 15 bp, Homo sapiens
tgtactgtgcccttc

SEQ ID NO: 1735620 - DNA, 15 bp, Homo sapiens
gtactgtgcccttca

SEQ ID NO: 1735621 - DNA, 15 bp, Homo sapiens
tactgtgcccttcag

SEQ ID NO: 1735622 - DNA, 15 bp, Homo sapiens
actgtgcccttcagg

SEQ ID NO: 1735623 - DNA, 15 bp, Homo sapiens
ctgtgcccttcagga

SEQ ID NO: 1735624 - DNA, 15 bp, Homo sapiens
tgtgcccttcaggaa

SEQ ID NO: 1735625 - DNA, 15 bp, Homo sapiens
gtgcccttcaggaat

SEQ ID NO: 1735626 - DNA, 15 bp, Homo sapiens
tgcccttcaggaatt

SEQ ID NO: 1735627 - DNA, 15 bp, Homo sapiens
gcccttcaggaattc

SEQ ID NO: 1735628 - DNA, 15 bp, Homo sapiens
cccttcaggaattcc

SEQ ID NO: 1735629 - DNA, 15 bp, Homo sapiens
ccttcaggaattcca

SEQ ID NO: 1735630 - DNA, 15 bp, Homo sapiens
cttcaggaattccac

SEQ ID NO: 1735631 - DNA, 15 bp, Homo sapiens
ttcaggaattccact

SEQ ID NO: 1735632 - DNA, 15 bp, Homo sapiens
tcaggaattccactg

SEQ ID NO: 1735633 - DNA, 15 bp, Homo sapiens
caggaattccactgc

SEQ ID NO: 1735634 - DNA, 15 bp, Homo sapiens
aggaattccactgcc

SEQ ID NO: 1735635 - DNA, 15 bp, Homo sapiens
ggaattccactgcca

SEQ ID NO: 1735636 - DNA, 15 bp, Homo sapiens
gaattccactgccag

SEQ ID NO: 1735637 - DNA, 15 bp, Homo sapiens
aattccactgccagg

SEQ ID NO: 1735638 - DNA, 15 bp, Homo sapiens
attccactgccaggg

SEQ ID NO: 1735639 - DNA, 15 bp, Homo sapiens
ttccactgccagggg

SEQ ID NO: 1735640 - DNA, 15 bp, Homo sapiens
tccactgccaggggt

SEQ ID NO: 1735641 - DNA, 15 bp, Homo sapiens
ccactgccaggggtt

SEQ ID NO: 1735642 - DNA, 15 bp, Homo sapiens
cactgccaggggtta

SEQ ID NO: 1735643 - DNA, 15 bp, Homo sapiens
actgccaggggttac

SEQ ID NO: 1735644 - DNA, 15 bp, Homo sapiens
ctgccaggggttact

SEQ ID NO: 1735645 - DNA, 15 bp, Homo sapiens
tgccaggggttactt

SEQ ID NO: 1735646 - DNA, 15 bp, Homo sapiens
gccaggggttactta

SEQ ID NO: 1735647 - DNA, 15 bp, Homo sapiens
ccaggggttacttaa

SEQ ID NO: 1735648 - DNA, 15 bp, Homo sapiens
caggggttacttaag

SEQ ID NO: 1735649 - DNA, 15 bp, Homo sapiens
aggggttacttaagc

SEQ ID NO: 1735650 - DNA, 15 bp, Homo sapiens
ggggttacttaagca

SEQ ID NO: 1735651 - DNA, 15 bp, Homo sapiens
gggttacttaagcat

SEQ ID NO: 1735652 - DNA, 15 bp, Homo sapiens
ggttacttaagcatt

SEQ ID NO: 1735653 - DNA, 15 bp, Homo sapiens
gttacttaagcattc

SEQ ID NO: 1735654 - DNA, 15 bp, Homo sapiens
ttacttaagcattcc

SEQ ID NO: 1735655 - DNA, 15 bp, Homo sapiens
tacttaagcattcca

SEQ ID NO: 1735656 - DNA, 15 bp, Homo sapiens
acttaagcattccat

SEQ ID NO: 1735657 - DNA, 15 bp, Homo sapiens
cttaagcattccatg

SEQ ID NO: 1735658 - DNA, 15 bp, Homo sapiens
ttaagcattccatgt

SEQ ID NO: 1735659 - DNA, 15 bp, Homo sapiens
taagcattccatgta

SEQ ID NO: 1735660 - DNA, 15 bp, Homo sapiens
aagcattccatgtag

SEQ ID NO: 1735661 - DNA, 15 bp, Homo sapiens
agcattccatgtagt

SEQ ID NO: 1735662 - DNA, 15 bp, Homo sapiens
gcattccatgtagtt

SEQ ID NO: 1735663 - DNA, 15 bp, Homo sapiens
cattccatgtagttt

SEQ ID NO: 1735664 - DNA, 15 bp, Homo sapiens
attccatgtagtttc

SEQ ID NO: 1735665 - DNA, 15 bp, Homo sapiens
ttccatgtagtttct

SEQ ID NO: 1735666 - DNA, 15 bp, Homo sapiens
tccatgtagtttcta

SEQ ID NO: 1735667 - DNA, 15 bp, Homo sapiens
ccatgtagtttctag

SEQ ID NO: 1735668 - DNA, 15 bp, Homo sapiens
catgtagtttctagt

SEQ ID NO: 1735669 - DNA, 15 bp, Homo sapiens
atgtagtttctagtt

SEQ ID NO: 1735670 - DNA, 15 bp, Homo sapiens
tgtagtttctagtta

SEQ ID NO: 1735671 - DNA, 15 bp, Homo sapiens
gtagtttctagttac

SEQ ID NO: 1735672 - DNA, 15 bp, Homo sapiens
tagtttctagttacc

SEQ ID NO: 1735673 - DNA, 15 bp, Homo sapiens
agtttctagttacct

SEQ ID NO: 1735674 - DNA, 15 bp, Homo sapiens
gtttctagttacctt

SEQ ID NO: 1735675 - DNA, 15 bp, Homo sapiens
tttctagttaccttc

SEQ ID NO: 1735676 - DNA, 15 bp, Homo sapiens
ttctagttaccttct

SEQ ID NO: 1735677 - DNA, 15 bp, Homo sapiens
tctagttaccttctt

SEQ ID NO: 1735678 - DNA, 15 bp, Homo sapiens
ctagttaccttctta

SEQ ID NO: 1735679 - DNA, 15 bp, Homo sapiens
tagttaccttcttat

SEQ ID NO: 1735680 - DNA, 15 bp, Homo sapiens
agttaccttcttatt

SEQ ID NO: 1735681 - DNA, 15 bp, Homo sapiens
gttaccttcttattc

SEQ ID NO: 1735682 - DNA, 15 bp, Homo sapiens
ttaccttcttattct

SEQ ID NO: 1735683 - DNA, 15 bp, Homo sapiens
taccttcttattcta

SEQ ID NO: 1735684 - DNA, 15 bp, Homo sapiens
accttcttattctaa

SEQ ID NO: 1735685 - DNA, 15 bp, Homo sapiens
ccttcttattctaag

SEQ ID NO: 1735686 - DNA, 15 bp, Homo sapiens
cttcttattctaagc

SEQ ID NO: 1735687 - DNA, 15 bp, Homo sapiens
ttcttattctaagcc

SEQ ID NO: 1735688 - DNA, 15 bp, Homo sapiens
tcttattctaagcct

SEQ ID NO: 1735689 - DNA, 15 bp, Homo sapiens
cttattctaagccta

SEQ ID NO: 1735690 - DNA, 15 bp, Homo sapiens
ttattctaagcctaa

SEQ ID NO: 1735691 - DNA, 15 bp, Homo sapiens
tattctaagcctaaa

SEQ ID NO: 1735692 - DNA, 15 bp, Homo sapiens
attctaagcctaaat

SEQ ID NO: 1735693 - DNA, 15 bp, Homo sapiens
ttctaagcctaaatt

SEQ ID NO: 1735694 - DNA, 15 bp, Homo sapiens
tctaagcctaaattc

SEQ ID NO: 1735695 - DNA, 15 bp, Homo sapiens
ctaagcctaaattct

SEQ ID NO: 1735696 - DNA, 15 bp, Homo sapiens
taagcctaaattctt

SEQ ID NO: 1735697 - DNA, 15 bp, Homo sapiens
aagcctaaattcttc

SEQ ID NO: 1735698 - DNA, 15 bp, Homo sapiens
agcctaaattcttcc

SEQ ID NO: 1735699 - DNA, 15 bp, Homo sapiens
gcctaaattcttcct

SEQ ID NO: 1735700 - DNA, 15 bp, Homo sapiens
cctaaattcttccta

SEQ ID NO: 1735701 - DNA, 15 bp, Homo sapiens
ctaaattcttcctac

SEQ ID NO: 1735702 - DNA, 15 bp, Homo sapiens
taaattcttcctact

SEQ ID NO: 1735703 - DNA, 15 bp, Homo sapiens
aaattcttcctactt

SEQ ID NO: 1735704 - DNA, 15 bp, Homo sapiens
aattcttcctacttc

SEQ ID NO: 1735705 - DNA, 15 bp, Homo sapiens
attcttcctacttct

SEQ ID NO: 1735706 - DNA, 15 bp, Homo sapiens
ttcttcctacttctt

SEQ ID NO: 1735707 - DNA, 15 bp, Homo sapiens
tcttcctacttcttt

SEQ ID NO: 1735708 - DNA, 15 bp, Homo sapiens
cttcctacttctttt

SEQ ID NO: 1735709 - DNA, 15 bp, Homo sapiens
ttcctacttctttta

SEQ ID NO: 1735710 - DNA, 15 bp, Homo sapiens
tcctacttcttttac

SEQ ID NO: 1735711 - DNA, 15 bp, Homo sapiens
cctacttcttttaca

SEQ ID NO: 1735712 - DNA, 15 bp, Homo sapiens
ctacttcttttacac

SEQ ID NO: 1735713 - DNA, 15 bp, Homo sapiens
tacttcttttacact

SEQ ID NO: 1735714 - DNA, 15 bp, Homo sapiens
acttcttttacactc

SEQ ID NO: 1735715 - DNA, 15 bp, Homo sapiens
cttcttttacactcg

SEQ ID NO: 1735716 - DNA, 15 bp, Homo sapiens
ttcttttacactcgc

SEQ ID NO: 1735717 - DNA, 15 bp, Homo sapiens
tcttttacactcgcc

SEQ ID NO: 1735718 - DNA, 15 bp, Homo sapiens
cttttacactcgccg

SEQ ID NO: 1735719 - DNA, 15 bp, Homo sapiens
ttttacactcgccga

SEQ ID NO: 1735720 - DNA, 15 bp, Homo sapiens
tttacactcgccgat

SEQ ID NO: 1735721 - DNA, 15 bp, Homo sapiens
ttacactcgccgatt

SEQ ID NO: 1735722 - DNA, 15 bp, Homo sapiens
tacactcgccgattc

SEQ ID NO: 1735723 - DNA, 15 bp, Homo sapiens
acactcgccgattct

SEQ ID NO: 1735724 - DNA, 15 bp, Homo sapiens
cactcgccgattctt

SEQ ID NO: 1735725 - DNA, 15 bp, Homo sapiens
actcgccgattcttc

SEQ ID NO: 1735726 - DNA, 15 bp, Homo sapiens
ctcgccgattcttct

SEQ ID NO: 1735727 - DNA, 15 bp, Homo sapiens
tcgccgattcttctc

SEQ ID NO: 1735728 - DNA, 15 bp, Homo sapiens
cgccgattcttctcc

SEQ ID NO: 1735729 - DNA, 15 bp, Homo sapiens
gccgattcttctcca

SEQ ID NO: 1735730 - DNA, 15 bp, Homo sapiens
ccgattcttctccag

SEQ ID NO: 1735731 - DNA, 15 bp, Homo sapiens
cgattcttctccagc

SEQ ID NO: 1735732 - DNA, 15 bp, Homo sapiens
gattcttctccagcg

SEQ ID NO: 1735733 - DNA, 15 bp, Homo sapiens
attcttctccagcga

SEQ ID NO: 1735734 - DNA, 15 bp, Homo sapiens
ttcttctccagcgaa

SEQ ID NO: 1735735 - DNA, 15 bp, Homo sapiens
tcttctccagcgaac

SEQ ID NO: 1735736 - DNA, 15 bp, Homo sapiens
cttctccagcgaact

SEQ ID NO: 1735737 - DNA, 15 bp, Homo sapiens
ttctccagcgaactc

SEQ ID NO: 1735738 - DNA, 15 bp, Homo sapiens
tctccagcgaactcc

SEQ ID NO: 1735739 - DNA, 15 bp, Homo sapiens
ctccagcgaactccc

SEQ ID NO: 1735740 - DNA, 15 bp, Homo sapiens
tccagcgaactccct

SEQ ID NO: 1735741 - DNA, 15 bp, Homo sapiens
ccagcgaactccctc

SEQ ID NO: 1735742 - DNA, 15 bp, Homo sapiens
cagcgaactccctct

SEQ ID NO: 1735743 - DNA, 15 bp, Homo sapiens
agcgaactccctctt

SEQ ID NO: 1735744 - DNA, 15 bp, Homo sapiens
gcgaactccctctta

SEQ ID NO: 1735745 - DNA, 15 bp, Homo sapiens
cgaactccctcttac

SEQ ID NO: 1735746 - DNA, 15 bp, Homo sapiens
gaactccctcttacc

SEQ ID NO: 1735747 - DNA, 15 bp, Homo sapiens
aactccctcttaccc

SEQ ID NO: 1735748 - DNA, 15 bp, Homo sapiens
actccctcttaccct

SEQ ID NO: 1735749 - DNA, 15 bp, Homo sapiens
ctccctcttaccctt

SEQ ID NO: 1735750 - DNA, 15 bp, Homo sapiens
tccctcttacccttc

SEQ ID NO: 1735751 - DNA, 15 bp, Homo sapiens
ccctcttacccttca

SEQ ID NO: 1735752 - DNA, 15 bp, Homo sapiens
cctcttacccttcaa

SEQ ID NO: 1735753 - DNA, 15 bp, Homo sapiens
ctcttacccttcaag

SEQ ID NO: 1735754 - DNA, 15 bp, Homo sapiens
tcttacccttcaagg

SEQ ID NO: 1735755 - DNA, 15 bp, Homo sapiens
cttacccttcaaggt

SEQ ID NO: 1735756 - DNA, 15 bp, Homo sapiens
ttacccttcaaggtt

SEQ ID NO: 1735757 - DNA, 15 bp, Homo sapiens
tacccttcaaggttc

SEQ ID NO: 1735758 - DNA, 15 bp, Homo sapiens
acccttcaaggttct

SEQ ID NO: 1735759 - DNA, 15 bp, Homo sapiens
cccttcaaggttctg

SEQ ID NO: 1735760 - DNA, 15 bp, Homo sapiens
ccttcaaggttctgc

SEQ ID NO: 1735761 - DNA, 15 bp, Homo sapiens
cttcaaggttctgca

SEQ ID NO: 1735762 - DNA, 15 bp, Homo sapiens
ttcaaggttctgcat

SEQ ID NO: 1735763 - DNA, 15 bp, Homo sapiens
tcaaggttctgcata

SEQ ID NO: 1735764 - DNA, 15 bp, Homo sapiens
caaggttctgcatac

SEQ ID NO: 1735765 - DNA, 15 bp, Homo sapiens
aaggttctgcatact

SEQ ID NO: 1735766 - DNA, 15 bp, Homo sapiens
aggttctgcatactt

SEQ ID NO: 1735767 - DNA, 15 bp, Homo sapiens
ggttctgcatacttg

SEQ ID NO: 1735768 - DNA, 15 bp, Homo sapiens
gttctgcatacttgg

SEQ ID NO: 1735769 - DNA, 15 bp, Homo sapiens
ttctgcatacttggc

SEQ ID NO: 1735770 - DNA, 15 bp, Homo sapiens
tctgcatacttggca

SEQ ID NO: 1735771 - DNA, 15 bp, Homo sapiens
ctgcatacttggcag

SEQ ID NO: 1735772 - DNA, 15 bp, Homo sapiens
tgcatacttggcagg

SEQ ID NO: 1735773 - DNA, 15 bp, Homo sapiens
gcatacttggcaggt

SEQ ID NO: 1735774 - DNA, 15 bp, Homo sapiens
catacttggcaggtg

SEQ ID NO: 1735775 - DNA, 15 bp, Homo sapiens
atacttggcaggtga

SEQ ID NO: 1735776 - DNA, 15 bp, Homo sapiens
tacttggcaggtgac

SEQ ID NO: 1735777 - DNA, 15 bp, Homo sapiens
acttggcaggtgaca

SEQ ID NO: 1735778 - DNA, 15 bp, Homo sapiens
cttggcaggtgacac

SEQ ID NO: 1735779 - DNA, 15 bp, Homo sapiens
ttggcaggtgacact

SEQ ID NO: 1735780 - DNA, 15 bp, Homo sapiens
tggcaggtgacactg

SEQ ID NO: 1735781 - DNA, 15 bp, Homo sapiens
ggcaggtgacactgg

SEQ ID NO: 1735782 - DNA, 15 bp, Homo sapiens
gcaggtgacactggt

SEQ ID NO: 1735783 - DNA, 15 bp, Homo sapiens
caggtgacactggtg

SEQ ID NO: 1735784 - DNA, 15 bp, Homo sapiens
aggtgacactggtga

SEQ ID NO: 1735785 - DNA, 15 bp, Homo sapiens
ggtgacactggtgaa

SEQ ID NO: 1735786 - DNA, 15 bp, Homo sapiens
gtgacactggtgaaa

SEQ ID NO: 1735787 - DNA, 15 bp, Homo sapiens
tgacactggtgaaaa

SEQ ID NO: 1735788 - DNA, 15 bp, Homo sapiens
gacactggtgaaaac

SEQ ID NO: 1735789 - DNA, 15 bp, Homo sapiens
acactggtgaaaact

SEQ ID NO: 1735790 - DNA, 15 bp, Homo sapiens
cactggtgaaaacta

SEQ ID NO: 1735791 - DNA, 15 bp, Homo sapiens
actggtgaaaactaa

SEQ ID NO: 1735792 - DNA, 15 bp, Homo sapiens
ctggtgaaaactaaa

SEQ ID NO: 1735793 - DNA, 15 bp, Homo sapiens
tggtgaaaactaaat

SEQ ID NO: 1735794 - DNA, 15 bp, Homo sapiens
ggtgaaaactaaatt

SEQ ID NO: 1735795 - DNA, 15 bp, Homo sapiens
gtgaaaactaaattt

SEQ ID NO: 1735796 - DNA, 15 bp, Homo sapiens
tgaaaactaaatttt

SEQ ID NO: 1735797 - DNA, 15 bp, Homo sapiens
gaaaactaaattttt

SEQ ID NO: 1735798 - DNA, 15 bp, Homo sapiens
aaaactaaattttta

SEQ ID NO: 1735799 - DNA, 15 bp, Homo sapiens
aaactaaatttttaa

SEQ ID NO: 1735800 - DNA, 15 bp, Homo sapiens
aactaaatttttaaa

SEQ ID NO: 1735801 - DNA, 15 bp, Homo sapiens
actaaatttttaaaa

SEQ ID NO: 1735802 - DNA, 15 bp, Homo sapiens
ctaaatttttaaaaa

SEQ ID NO: 1735803 - DNA, 15 bp, Homo sapiens
aaatttttaaaaaag

SEQ ID NO: 1735804 - DNA, 15 bp, Homo sapiens
aatttttaaaaaagg

SEQ ID NO: 1735805 - DNA, 15 bp, Homo sapiens
atttttaaaaaaggt

SEQ ID NO: 1735806 - DNA, 15 bp, Homo sapiens
tttttaaaaaaggtt

SEQ ID NO: 1735807 - DNA, 15 bp, Homo sapiens
ttttaaaaaaggttc

SEQ ID NO: 1735808 - DNA, 15 bp, Homo sapiens
tttaaaaaaggttct

SEQ ID NO: 1735809 - DNA, 15 bp, Homo sapiens
ttaaaaaaggttctg

SEQ ID NO: 1735810 - DNA, 15 bp, Homo sapiens
taaaaaaggttctgc

SEQ ID NO: 1735811 - DNA, 15 bp, Homo sapiens
aaaaaaggttctgca

SEQ ID NO: 1735812 - DNA, 15 bp, Homo sapiens
aaaaaggttctgcat

SEQ ID NO: 1735813 - DNA, 15 bp, Homo sapiens
aaaaggttctgcata

SEQ ID NO: 1735814 - DNA, 15 bp, Homo sapiens
aaaggttctgcataa

SEQ ID NO: 1735815 - DNA, 15 bp, Homo sapiens
aaggttctgcataag

SEQ ID NO: 1735816 - DNA, 15 bp, Homo sapiens
aggttctgcataagg

SEQ ID NO: 1735817 - DNA, 15 bp, Homo sapiens
ggttctgcataagga

SEQ ID NO: 1735818 - DNA, 15 bp, Homo sapiens
gttctgcataaggat

SEQ ID NO: 1735819 - DNA, 15 bp, Homo sapiens
ttctgcataaggatc

SEQ ID NO: 1735820 - DNA, 15 bp, Homo sapiens
tctgcataaggatct

SEQ ID NO: 1735821 - DNA, 15 bp, Homo sapiens
ctgcataaggatctc

SEQ ID NO: 1735822 - DNA, 15 bp, Homo sapiens
tgcataaggatctcc

SEQ ID NO: 1735823 - DNA, 15 bp, Homo sapiens
gcataaggatctcca

SEQ ID NO: 1735824 - DNA, 15 bp, Homo sapiens
cataaggatctccat

SEQ ID NO: 1735825 - DNA, 15 bp, Homo sapiens
ataaggatctccata

SEQ ID NO: 1735826 - DNA, 15 bp, Homo sapiens
taaggatctccatag

SEQ ID NO: 1735827 - DNA, 15 bp, Homo sapiens
aaggatctccatagg

SEQ ID NO: 1735828 - DNA, 15 bp, Homo sapiens
aggatctccataggc

SEQ ID NO: 1735829 - DNA, 15 bp, Homo sapiens
ggatctccataggca

SEQ ID NO: 1735830 - DNA, 15 bp, Homo sapiens
gatctccataggcaa

SEQ ID NO: 1735831 - DNA, 15 bp, Homo sapiens
atctccataggcaag

SEQ ID NO: 1735832 - DNA, 15 bp, Homo sapiens
tctccataggcaaga

SEQ ID NO: 1735833 - DNA, 15 bp, Homo sapiens
ctccataggcaagac

SEQ ID NO: 1735834 - DNA, 15 bp, Homo sapiens
tccataggcaagact

SEQ ID NO: 1735835 - DNA, 15 bp, Homo sapiens
ccataggcaagactt

SEQ ID NO: 1735836 - DNA, 15 bp, Homo sapiens
cataggcaagacttc

SEQ ID NO: 1735837 - DNA, 15 bp, Homo sapiens
ataggcaagacttcc

SEQ ID NO: 1735838 - DNA, 15 bp, Homo sapiens
taggcaagacttccc

SEQ ID NO: 1735839 - DNA, 15 bp, Homo sapiens
aggcaagacttccct

SEQ ID NO: 1735840 - DNA, 15 bp, Homo sapiens
ggcaagacttcccta

SEQ ID NO: 1735841 - DNA, 15 bp, Homo sapiens
gcaagacttccctaa

SEQ ID NO: 1735842 - DNA, 15 bp, Homo sapiens
caagacttccctaag

SEQ ID NO: 1735843 - DNA, 15 bp, Homo sapiens
aagacttccctaagg

SEQ ID NO: 1735844 - DNA, 15 bp, Homo sapiens
agacttccctaaggt

SEQ ID NO: 1735845 - DNA, 15 bp, Homo sapiens
gacttccctaaggtg

SEQ ID NO: 1735846 - DNA, 15 bp, Homo sapiens
acttccctaaggtgc

SEQ ID NO: 1735847 - DNA, 15 bp, Homo sapiens
cttccctaaggtgca

SEQ ID NO: 1735848 - DNA, 15 bp, Homo sapiens
ttccctaaggtgcat

SEQ ID NO: 1735849 - DNA, 15 bp, Homo sapiens
tccctaaggtgcata

SEQ ID NO: 1735850 - DNA, 15 bp, Homo sapiens
ccctaaggtgcatat

SEQ ID NO: 1735851 - DNA, 15 bp, Homo sapiens
cctaaggtgcatata

SEQ ID NO: 1735852 - DNA, 15 bp, Homo sapiens
ctaaggtgcatatat

SEQ ID NO: 1735853 - DNA, 15 bp, Homo sapiens
taaggtgcatatata

SEQ ID NO: 1735854 - DNA, 15 bp, Homo sapiens
aaggtgcatatatag

SEQ ID NO: 1735855 - DNA, 15 bp, Homo sapiens
aggtgcatatataga

SEQ ID NO: 1735856 - DNA, 15 bp, Homo sapiens
ggtgcatatatagac

SEQ ID NO: 1735857 - DNA, 15 bp, Homo sapiens
gtgcatatatagaca

SEQ ID NO: 1735858 - DNA, 15 bp, Homo sapiens
tgcatatatagacac

SEQ ID NO: 1735859 - DNA, 15 bp, Homo sapiens
gcatatatagacaca

SEQ ID NO: 1735860 - DNA, 15 bp, Homo sapiens
catatatagacacac

SEQ ID NO: 1735861 - DNA, 15 bp, Homo sapiens
atatatagacacact

SEQ ID NO: 1735862 - DNA, 15 bp, Homo sapiens
tatatagacacactg

SEQ ID NO: 1735863 - DNA, 15 bp, Homo sapiens
atatagacacactgt

SEQ ID NO: 1735864 - DNA, 15 bp, Homo sapiens
tatagacacactgta

SEQ ID NO: 1735865 - DNA, 15 bp, Homo sapiens
atagacacactgtaa

SEQ ID NO: 1735866 - DNA, 15 bp, Homo sapiens
tagacacactgtaat

SEQ ID NO: 1735867 - DNA, 15 bp, Homo sapiens
agacacactgtaatg

SEQ ID NO: 1735868 - DNA, 15 bp, Homo sapiens
gacacactgtaatgt

SEQ ID NO: 1735869 - DNA, 15 bp, Homo sapiens
acacactgtaatgtt

SEQ ID NO: 1735870 - DNA, 15 bp, Homo sapiens
cacactgtaatgttt

SEQ ID NO: 1735871 - DNA, 15 bp, Homo sapiens
acactgtaatgttta

SEQ ID NO: 1735872 - DNA, 15 bp, Homo sapiens
cactgtaatgtttat

SEQ ID NO: 1735873 - DNA, 15 bp, Homo sapiens
actgtaatgtttatt

SEQ ID NO: 1735874 - DNA, 15 bp, Homo sapiens
ctgtaatgtttattg

SEQ ID NO: 1735875 - DNA, 15 bp, Homo sapiens
tgtaatgtttattgt

SEQ ID NO: 1735876 - DNA, 15 bp, Homo sapiens
gtaatgtttattgtg

SEQ ID NO: 1735877 - DNA, 15 bp, Homo sapiens
taatgtttattgtgc

SEQ ID NO: 1735878 - DNA, 15 bp, Homo sapiens
aatgtttattgtgct

SEQ ID NO: 1735879 - DNA, 15 bp, Homo sapiens
atgtttattgtgctt

SEQ ID NO: 1735880 - DNA, 15 bp, Homo sapiens
tgtttattgtgcttc

SEQ ID NO: 1735881 - DNA, 15 bp, Homo sapiens
gtttattgtgcttca

SEQ ID NO: 1735882 - DNA, 15 bp, Homo sapiens
tttattgtgcttcac

SEQ ID NO: 1735883 - DNA, 15 bp, Homo sapiens
ttattgtgcttcact

SEQ ID NO: 1735884 - DNA, 15 bp, Homo sapiens
tattgtgcttcacta

SEQ ID NO: 1735885 - DNA, 15 bp, Homo sapiens
attgtgcttcactac

SEQ ID NO: 1735886 - DNA, 15 bp, Homo sapiens
ttgtgcttcactact

SEQ ID NO: 1735887 - DNA, 15 bp, Homo sapiens
tgtgcttcactactg

SEQ ID NO: 1735888 - DNA, 15 bp, Homo sapiens
gtgcttcactactga

SEQ ID NO: 1735889 - DNA, 15 bp, Homo sapiens
tgcttcactactgag

SEQ ID NO: 1735890 - DNA, 15 bp, Homo sapiens
gcttcactactgagt

SEQ ID NO: 1735891 - DNA, 15 bp, Homo sapiens
cttcactactgagtt

SEQ ID NO: 1735892 - DNA, 15 bp, Homo sapiens
ttcactactgagttg

SEQ ID NO: 1735893 - DNA, 15 bp, Homo sapiens
tcactactgagttgc

SEQ ID NO: 1735894 - DNA, 15 bp, Homo sapiens
cactactgagttgcc

SEQ ID NO: 1735895 - DNA, 15 bp, Homo sapiens
actactgagttgcct

SEQ ID NO: 1735896 - DNA, 15 bp, Homo sapiens
ctactgagttgcctt

SEQ ID NO: 1735897 - DNA, 15 bp, Homo sapiens
tactgagttgccttt

SEQ ID NO: 1735898 - DNA, 15 bp, Homo sapiens
actgagttgcctttt

SEQ ID NO: 1735899 - DNA, 15 bp, Homo sapiens
ctgagttgccttttt

SEQ ID NO: 1735900 - DNA, 15 bp, Homo sapiens
tgagttgccttttta

SEQ ID NO: 1735901 - DNA, 15 bp, Homo sapiens
gagttgcctttttaa

SEQ ID NO: 1735902 - DNA, 15 bp, Homo sapiens
agttgcctttttaaa

SEQ ID NO: 1735903 - DNA, 15 bp, Homo sapiens
gttgcctttttaaag

SEQ ID NO: 1735904 - DNA, 15 bp, Homo sapiens
ttgcctttttaaagc

SEQ ID NO: 1735905 - DNA, 15 bp, Homo sapiens
tgcctttttaaagct

SEQ ID NO: 1735906 - DNA, 15 bp, Homo sapiens
cctttttaaagctaa

SEQ ID NO: 1735907 - DNA, 15 bp, Homo sapiens
ctttttaaagctaac

SEQ ID NO: 1735908 - DNA, 15 bp, Homo sapiens
tttttaaagctaact

SEQ ID NO: 1735909 - DNA, 15 bp, Homo sapiens
ttttaaagctaactt

SEQ ID NO: 1735910 - DNA, 15 bp, Homo sapiens
tttaaagctaactta

SEQ ID NO: 1735911 - DNA, 15 bp, Homo sapiens
ttaaagctaacttaa

SEQ ID NO: 1735912 - DNA, 15 bp, Homo sapiens
taaagctaacttaaa

SEQ ID NO: 1735913 - DNA, 15 bp, Homo sapiens
aaagctaacttaaac

SEQ ID NO: 1735914 - DNA, 15 bp, Homo sapiens
aagctaacttaaacc

SEQ ID NO: 1735915 - DNA, 15 bp, Homo sapiens
agctaacttaaacct

SEQ ID NO: 1735916 - DNA, 15 bp, Homo sapiens
gctaacttaaacctt

SEQ ID NO: 1735917 - DNA, 15 bp, Homo sapiens
ctaacttaaaccttc

SEQ ID NO: 1735918 - DNA, 15 bp, Homo sapiens
taacttaaaccttct

SEQ ID NO: 1735919 - DNA, 15 bp, Homo sapiens
aacttaaaccttcta

SEQ ID NO: 1735920 - DNA, 15 bp, Homo sapiens
acttaaaccttctaa

SEQ ID NO: 1735921 - DNA, 15 bp, Homo sapiens
cttaaaccttctaaa

SEQ ID NO: 1735922 - DNA, 15 bp, Homo sapiens
ttaaaccttctaaag

SEQ ID NO: 1735923 - DNA, 15 bp, Homo sapiens
taaaccttctaaagg

SEQ ID NO: 1735924 - DNA, 15 bp, Homo sapiens
aaaccttctaaaggg

SEQ ID NO: 1735925 - DNA, 15 bp, Homo sapiens
aaccttctaaaggga

SEQ ID NO: 1735926 - DNA, 15 bp, Homo sapiens
accttctaaagggat

SEQ ID NO: 1735927 - DNA, 15 bp, Homo sapiens
ccttctaaagggatc

SEQ ID NO: 1735928 - DNA, 15 bp, Homo sapiens
cttctaaagggatct

SEQ ID NO: 1735929 - DNA, 15 bp, Homo sapiens
ttctaaagggatctt

SEQ ID NO: 1735930 - DNA, 15 bp, Homo sapiens
tctaaagggatctta

SEQ ID NO: 1735931 - DNA, 15 bp, Homo sapiens
ctaaagggatcttat

SEQ ID NO: 1735932 - DNA, 15 bp, Homo sapiens
taaagggatcttatc

SEQ ID NO: 1735933 - DNA, 15 bp, Homo sapiens
aaagggatcttatct

SEQ ID NO: 1735934 - DNA, 15 bp, Homo sapiens
aagggatcttatctc

SEQ ID NO: 1735935 - DNA, 15 bp, Homo sapiens
agggatcttatctca

SEQ ID NO: 1735936 - DNA, 15 bp, Homo sapiens
gggatcttatctcaa

SEQ ID NO: 1735937 - DNA, 15 bp, Homo sapiens
ggatcttatctcaaa

SEQ ID NO: 1735938 - DNA, 15 bp, Homo sapiens
gatcttatctcaaaa

SEQ ID NO: 1735939 - DNA, 15 bp, Homo sapiens
atcttatctcaaaac

SEQ ID NO: 1735940 - DNA, 15 bp, Homo sapiens
tcttatctcaaaact

SEQ ID NO: 1735941 - DNA, 15 bp, Homo sapiens
cttatctcaaaactc

SEQ ID NO: 1735942 - DNA, 15 bp, Homo sapiens
ttatctcaaaactca

SEQ ID NO: 1735943 - DNA, 15 bp, Homo sapiens
tatctcaaaactcag

SEQ ID NO: 1735944 - DNA, 15 bp, Homo sapiens
atctcaaaactcaga

SEQ ID NO: 1735945 - DNA, 15 bp, Homo sapiens
tctcaaaactcagag

SEQ ID NO: 1735946 - DNA, 15 bp, Homo sapiens
ctcaaaactcagagc

SEQ ID NO: 1735947 - DNA, 15 bp, Homo sapiens
tcaaaactcagagca

SEQ ID NO: 1735948 - DNA, 15 bp, Homo sapiens
caaaactcagagcat

SEQ ID NO: 1735949 - DNA, 15 bp, Homo sapiens
aaaactcagagcatc

SEQ ID NO: 1735950 - DNA, 15 bp, Homo sapiens
aaactcagagcatct

SEQ ID NO: 1735951 - DNA, 15 bp, Homo sapiens
aactcagagcatcta

SEQ ID NO: 1735952 - DNA, 15 bp, Homo sapiens
actcagagcatctat

SEQ ID NO: 1735953 - DNA, 15 bp, Homo sapiens
ctcagagcatctatt

SEQ ID NO: 1735954 - DNA, 15 bp, Homo sapiens
tcagagcatctattt

SEQ ID NO: 1735955 - DNA, 15 bp, Homo sapiens
cagagcatctatttt

SEQ ID NO: 1735956 - DNA, 15 bp, Homo sapiens
agagcatctattttc

SEQ ID NO: 1735957 - DNA, 15 bp, Homo sapiens
gagcatctattttcc

SEQ ID NO: 1735958 - DNA, 15 bp, Homo sapiens
agcatctattttcct

SEQ ID NO: 1735959 - DNA, 15 bp, Homo sapiens
gcatctattttcctc

SEQ ID NO: 1735960 - DNA, 15 bp, Homo sapiens
catctattttcctct

SEQ ID NO: 1735961 - DNA, 15 bp, Homo sapiens
atctattttcctcta

SEQ ID NO: 1735962 - DNA, 15 bp, Homo sapiens
tctattttcctctat

SEQ ID NO: 1735963 - DNA, 15 bp, Homo sapiens
ctattttcctctatt

SEQ ID NO: 1735964 - DNA, 15 bp, Homo sapiens
tattttcctctattt

SEQ ID NO: 1735965 - DNA, 15 bp, Homo sapiens
attttcctctatttt

SEQ ID NO: 1735966 - DNA, 15 bp, Homo sapiens
ttttcctctatttta

SEQ ID NO: 1735967 - DNA, 15 bp, Homo sapiens
tttcctctattttaa

SEQ ID NO: 1735968 - DNA, 15 bp, Homo sapiens
ttcctctattttaaa

SEQ ID NO: 1735969 - DNA, 15 bp, Homo sapiens
tcctctattttaaat

SEQ ID NO: 1735970 - DNA, 15 bp, Homo sapiens
cctctattttaaatt

SEQ ID NO: 1735971 - DNA, 15 bp, Homo sapiens
ctctattttaaattc

SEQ ID NO: 1735972 - DNA, 15 bp, Homo sapiens
tctattttaaattct

SEQ ID NO: 1735973 - DNA, 15 bp, Homo sapiens
ctattttaaattctc

SEQ ID NO: 1735974 - DNA, 15 bp, Homo sapiens
tattttaaattctcc

SEQ ID NO: 1735975 - DNA, 15 bp, Homo sapiens
attttaaattctccc

SEQ ID NO: 1735976 - DNA, 15 bp, Homo sapiens
ttttaaattctccct

SEQ ID NO: 1735977 - DNA, 15 bp, Homo sapiens
tttaaattctccctc

SEQ ID NO: 1735978 - DNA, 15 bp, Homo sapiens
ttaaattctccctct

SEQ ID NO: 1735979 - DNA, 15 bp, Homo sapiens
taaattctccctctg

SEQ ID NO: 1735980 - DNA, 15 bp, Homo sapiens
aaattctccctctga

SEQ ID NO: 1735981 - DNA, 15 bp, Homo sapiens
aattctccctctgaa

SEQ ID NO: 1735982 - DNA, 15 bp, Homo sapiens
attctccctctgaaa

SEQ ID NO: 1735983 - DNA, 15 bp, Homo sapiens
ttctccctctgaaat

SEQ ID NO: 1735984 - DNA, 15 bp, Homo sapiens
tctccctctgaaata

SEQ ID NO: 1735985 - DNA, 15 bp, Homo sapiens
ctccctctgaaatat

SEQ ID NO: 1735986 - DNA, 15 bp, Homo sapiens
tccctctgaaatatt

SEQ ID NO: 1735987 - DNA, 15 bp, Homo sapiens
ccctctgaaatattc

SEQ ID NO: 1735988 - DNA, 15 bp, Homo sapiens
cctctgaaatattct

SEQ ID NO: 1735989 - DNA, 15 bp, Homo sapiens
ctctgaaatattctg

SEQ ID NO: 1735990 - DNA, 15 bp, Homo sapiens
tctgaaatattctga

SEQ ID NO: 1735991 - DNA, 15 bp, Homo sapiens
ctgaaatattctgaa

SEQ ID NO: 1735992 - DNA, 15 bp, Homo sapiens
tgaaatattctgaat

SEQ ID NO: 1735993 - DNA, 15 bp, Homo sapiens
gaaatattctgaatg

SEQ ID NO: 1735994 - DNA, 15 bp, Homo sapiens
aaatattctgaatgc

SEQ ID NO: 1735995 - DNA, 15 bp, Homo sapiens
aatattctgaatgct

SEQ ID NO: 1735996 - DNA, 15 bp, Homo sapiens
atattctgaatgctt

SEQ ID NO: 1735997 - DNA, 15 bp, Homo sapiens
tattctgaatgcttt

SEQ ID NO: 1735998 - DNA, 15 bp, Homo sapiens
attctgaatgctttt

SEQ ID NO: 1735999 - DNA, 15 bp, Homo sapiens
ttctgaatgcttttt

SEQ ID NO: 1736000 - DNA, 15 bp, Homo sapiens
tctgaatgctttttt

SEQ ID NO: 1736001 - DNA, 15 bp, Homo sapiens
ctgaatgctttttta

SEQ ID NO: 1736002 - DNA, 15 bp, Homo sapiens
tgaatgcttttttaa

SEQ ID NO: 1736003 - DNA, 15 bp, Homo sapiens
gaatgcttttttaaa

SEQ ID NO: 1736004 - DNA, 15 bp, Homo sapiens
aatgcttttttaaag

SEQ ID NO: 1736005 - DNA, 15 bp, Homo sapiens
atgcttttttaaagg

SEQ ID NO: 1736006 - DNA, 15 bp, Homo sapiens
tgcttttttaaagga

SEQ ID NO: 1736007 - DNA, 15 bp, Homo sapiens
gcttttttaaaggat

SEQ ID NO: 1736008 - DNA, 15 bp, Homo sapiens
cttttttaaaggatg

SEQ ID NO: 1736009 - DNA, 15 bp, Homo sapiens
ttttttaaaggatgt

SEQ ID NO: 1736010 - DNA, 15 bp, Homo sapiens
tttttaaaggatgtg

SEQ ID NO: 1736011 - DNA, 15 bp, Homo sapiens
ttttaaaggatgtgg

SEQ ID NO: 1736012 - DNA, 15 bp, Homo sapiens
tttaaaggatgtggt

SEQ ID NO: 1736013 - DNA, 15 bp, Homo sapiens
ttaaaggatgtggtg

SEQ ID NO: 1736014 - DNA, 15 bp, Homo sapiens
taaaggatgtggtgt

SEQ ID NO: 1736015 - DNA, 15 bp, Homo sapiens
aaaggatgtggtgtg

SEQ ID NO: 1736016 - DNA, 15 bp, Homo sapiens
aaggatgtggtgtgt

SEQ ID NO: 1736017 - DNA, 15 bp, Homo sapiens
aggatgtggtgtgtg

SEQ ID NO: 1736018 - DNA, 15 bp, Homo sapiens
ggatgtggtgtgtgt

SEQ ID NO: 1736019 - DNA, 15 bp, Homo sapiens
gatgtggtgtgtgtg

SEQ ID NO: 1736020 - DNA, 15 bp, Homo sapiens
atgtggtgtgtgtgt

SEQ ID NO: 1736021 - DNA, 15 bp, Homo sapiens
tgtggtgtgtgtgtg

SEQ ID NO: 1736022 - DNA, 15 bp, Homo sapiens
gtggtgtgtgtgtgt

SEQ ID NO: 1736023 - DNA, 15 bp, Homo sapiens
tggtgtgtgtgtgtg

SEQ ID NO: 1736024 - DNA, 15 bp, Homo sapiens
gtgtgtgtgtgttta

SEQ ID NO: 1736025 - DNA, 15 bp, Homo sapiens
tgtgtgtgtgtttaa

SEQ ID NO: 1736026 - DNA, 15 bp, Homo sapiens
gtgtgtgtgtttaaa

SEQ ID NO: 1736027 - DNA, 15 bp, Homo sapiens
tgtgtgtgtttaaac

SEQ ID NO: 1736028 - DNA, 15 bp, Homo sapiens
gtgtgtgtttaaact

SEQ ID NO: 1736029 - DNA, 15 bp, Homo sapiens
tgtgtgtttaaactt

SEQ ID NO: 1736030 - DNA, 15 bp, Homo sapiens
gtgtgtttaaactta

SEQ ID NO: 1736031 - DNA, 15 bp, Homo sapiens
tgtgtttaaacttaa

SEQ ID NO: 1736032 - DNA, 15 bp, Homo sapiens
gtgtttaaacttaat

SEQ ID NO: 1736033 - DNA, 15 bp, Homo sapiens
tgtttaaacttaatg

SEQ ID NO: 1736034 - DNA, 15 bp, Homo sapiens
gtttaaacttaatgt

SEQ ID NO: 1736035 - DNA, 15 bp, Homo sapiens
tttaaacttaatgtc

SEQ ID NO: 1736036 - DNA, 15 bp, Homo sapiens
ttaaacttaatgtct

SEQ ID NO: 1736037 - DNA, 15 bp, Homo sapiens
taaacttaatgtctt

SEQ ID NO: 1736038 - DNA, 15 bp, Homo sapiens
aaacttaatgtcttt

SEQ ID NO: 1736039 - DNA, 15 bp, Homo sapiens
aacttaatgtctttc

SEQ ID NO: 1736040 - DNA, 15 bp, Homo sapiens
acttaatgtctttcc

SEQ ID NO: 1736041 - DNA, 15 bp, Homo sapiens
cttaatgtctttccc

SEQ ID NO: 1736042 - DNA, 15 bp, Homo sapiens
ttaatgtctttccct

SEQ ID NO: 1736043 - DNA, 15 bp, Homo sapiens
taatgtctttcccta

SEQ ID NO: 1736044 - DNA, 15 bp, Homo sapiens
aatgtctttccctag

SEQ ID NO: 1736045 - DNA, 15 bp, Homo sapiens
atgtctttccctagc

SEQ ID NO: 1736046 - DNA, 15 bp, Homo sapiens
tgtctttccctagcc

SEQ ID NO: 1736047 - DNA, 15 bp, Homo sapiens
gtctttccctagccg

SEQ ID NO: 1736048 - DNA, 15 bp, Homo sapiens
tctttccctagccgt

SEQ ID NO: 1736049 - DNA, 15 bp, Homo sapiens
ctttccctagccgtt

SEQ ID NO: 1736050 - DNA, 15 bp, Homo sapiens
tttccctagccgttc

SEQ ID NO: 1736051 - DNA, 15 bp, Homo sapiens
ttccctagccgttct

SEQ ID NO: 1736052 - DNA, 15 bp, Homo sapiens
tccctagccgttctt

SEQ ID NO: 1736053 - DNA, 15 bp, Homo sapiens
ccctagccgttcttt

SEQ ID NO: 1736054 - DNA, 15 bp, Homo sapiens
cctagccgttcttta

SEQ ID NO: 1736055 - DNA, 15 bp, Homo sapiens
ctagccgttctttat

SEQ ID NO: 1736056 - DNA, 15 bp, Homo sapiens
tagccgttctttatt

SEQ ID NO: 1736057 - DNA, 15 bp, Homo sapiens
agccgttctttatta

SEQ ID NO: 1736058 - DNA, 15 bp, Homo sapiens
gccgttctttattac

SEQ ID NO: 1736059 - DNA, 15 bp, Homo sapiens
ccgttctttattacc

SEQ ID NO: 1736060 - DNA, 15 bp, Homo sapiens
cgttctttattacca

SEQ ID NO: 1736061 - DNA, 15 bp, Homo sapiens
gttctttattaccac

SEQ ID NO: 1736062 - DNA, 15 bp, Homo sapiens
ttctttattaccaca

SEQ ID NO: 1736063 - DNA, 15 bp, Homo sapiens
tctttattaccacag

SEQ ID NO: 1736064 - DNA, 15 bp, Homo sapiens
ctttattaccacagg

SEQ ID NO: 1736065 - DNA, 15 bp, Homo sapiens
tttattaccacagga

SEQ ID NO: 1736066 - DNA, 15 bp, Homo sapiens
ttattaccacaggag

SEQ ID NO: 1736067 - DNA, 15 bp, Homo sapiens
tattaccacaggagc

SEQ ID NO: 1736068 - DNA, 15 bp, Homo sapiens
attaccacaggagct

SEQ ID NO: 1736069 - DNA, 15 bp, Homo sapiens
ttaccacaggagctc

SEQ ID NO: 1736070 - DNA, 15 bp, Homo sapiens
taccacaggagctct

SEQ ID NO: 1736071 - DNA, 15 bp, Homo sapiens
accacaggagctctg

SEQ ID NO: 1736072 - DNA, 15 bp, Homo sapiens
ccacaggagctctgg

SEQ ID NO: 1736073 - DNA, 15 bp, Homo sapiens
cacaggagctctggg

SEQ ID NO: 1736074 - DNA, 15 bp, Homo sapiens
acaggagctctggga

SEQ ID NO: 1736075 - DNA, 15 bp, Homo sapiens
caggagctctgggat

SEQ ID NO: 1736076 - DNA, 15 bp, Homo sapiens
aggagctctgggata

SEQ ID NO: 1736077 - DNA, 15 bp, Homo sapiens
ggagctctgggatat

SEQ ID NO: 1736078 - DNA, 15 bp, Homo sapiens
gagctctgggatatc

SEQ ID NO: 1736079 - DNA, 15 bp, Homo sapiens
agctctgggatatca

SEQ ID NO: 1736080 - DNA, 15 bp, Homo sapiens
gctctgggatatcaa

SEQ ID NO: 1736081 - DNA, 15 bp, Homo sapiens
ctctgggatatcaaa

SEQ ID NO: 1736082 - DNA, 15 bp, Homo sapiens
tctgggatatcaaat

SEQ ID NO: 1736083 - DNA, 15 bp, Homo sapiens
ctgggatatcaaata

SEQ ID NO: 1736084 - DNA, 15 bp, Homo sapiens
tgggatatcaaataa

SEQ ID NO: 1736085 - DNA, 15 bp, Homo sapiens
gggatatcaaataat

SEQ ID NO: 1736086 - DNA, 15 bp, Homo sapiens
ggatatcaaataata

SEQ ID NO: 1736087 - DNA, 15 bp, Homo sapiens
gatatcaaataatat

SEQ ID NO: 1736088 - DNA, 15 bp, Homo sapiens
atatcaaataatatt

SEQ ID NO: 1736089 - DNA, 15 bp, Homo sapiens
tatcaaataatattt

SEQ ID NO: 1736090 - DNA, 15 bp, Homo sapiens
atcaaataatatttc

SEQ ID NO: 1736091 - DNA, 15 bp, Homo sapiens
tcaaataatatttct

SEQ ID NO: 1736092 - DNA, 15 bp, Homo sapiens
caaataatatttctt

SEQ ID NO: 1736093 - DNA, 15 bp, Homo sapiens
aaataatatttctta

SEQ ID NO: 1736094 - DNA, 15 bp, Homo sapiens
aataatatttcttaa

SEQ ID NO: 1736095 - DNA, 15 bp, Homo sapiens
ataatatttcttaaa

SEQ ID NO: 1736096 - DNA, 15 bp, Homo sapiens
taatatttcttaaac

SEQ ID NO: 1736097 - DNA, 15 bp, Homo sapiens
aatatttcttaaacc

SEQ ID NO: 1736098 - DNA, 15 bp, Homo sapiens
atatttcttaaacct

SEQ ID NO: 1736099 - DNA, 15 bp, Homo sapiens
tatttcttaaacctt

SEQ ID NO: 1736100 - DNA, 15 bp, Homo sapiens
atttcttaaaccttt

SEQ ID NO: 1736101 - DNA, 15 bp, Homo sapiens
tttcttaaaccttta

SEQ ID NO: 1736102 - DNA, 15 bp, Homo sapiens
ttcttaaacctttat

SEQ ID NO: 1736103 - DNA, 15 bp, Homo sapiens
tcttaaacctttatc

SEQ ID NO: 1736104 - DNA, 15 bp, Homo sapiens
cttaaacctttatcc

SEQ ID NO: 1736105 - DNA, 15 bp, Homo sapiens
ttaaacctttatccc

SEQ ID NO: 1736106 - DNA, 15 bp, Homo sapiens
taaacctttatccct

SEQ ID NO: 1736107 - DNA, 15 bp, Homo sapiens
aaacctttatccctt

SEQ ID NO: 1736108 - DNA, 15 bp, Homo sapiens
aacctttatcccttt

SEQ ID NO: 1736109 - DNA, 15 bp, Homo sapiens
acctttatccctttt

SEQ ID NO: 1736110 - DNA, 15 bp, Homo sapiens
cctttatcccttttg

SEQ ID NO: 1736111 - DNA, 15 bp, Homo sapiens
ctttatcccttttga

SEQ ID NO: 1736112 - DNA, 15 bp, Homo sapiens
tttatcccttttgat

SEQ ID NO: 1736113 - DNA, 15 bp, Homo sapiens
ttatcccttttgatt

SEQ ID NO: 1736114 - DNA, 15 bp, Homo sapiens
tatcccttttgattg

SEQ ID NO: 1736115 - DNA, 15 bp, Homo sapiens
atcccttttgattgt

SEQ ID NO: 1736116 - DNA, 15 bp, Homo sapiens
tcccttttgattgta

SEQ ID NO: 1736117 - DNA, 15 bp, Homo sapiens
cccttttgattgtat

SEQ ID NO: 1736118 - DNA, 15 bp, Homo sapiens
ccttttgattgtata

SEQ ID NO: 1736119 - DNA, 15 bp, Homo sapiens
cttttgattgtatag

SEQ ID NO: 1736120 - DNA, 15 bp, Homo sapiens
ttttgattgtatagt

SEQ ID NO: 1736121 - DNA, 15 bp, Homo sapiens
tttgattgtatagta

SEQ ID NO: 1736122 - DNA, 15 bp, Homo sapiens
ttgattgtatagtaa

SEQ ID NO: 1736123 - DNA, 15 bp, Homo sapiens
tgattgtatagtaat

SEQ ID NO: 1736124 - DNA, 15 bp, Homo sapiens
gattgtatagtaatt

SEQ ID NO: 1736125 - DNA, 15 bp, Homo sapiens
attgtatagtaatta

SEQ ID NO: 1736126 - DNA, 15 bp, Homo sapiens
ttgtatagtaattat

SEQ ID NO: 1736127 - DNA, 15 bp, Homo sapiens
tgtatagtaattatt

SEQ ID NO: 1736128 - DNA, 15 bp, Homo sapiens
gtatagtaattattt

SEQ ID NO: 1736129 - DNA, 15 bp, Homo sapiens
tatagtaattattta

SEQ ID NO: 1736130 - DNA, 15 bp, Homo sapiens
atagtaattatttat

SEQ ID NO: 1736131 - DNA, 15 bp, Homo sapiens
tagtaattatttatt

SEQ ID NO: 1736132 - DNA, 15 bp, Homo sapiens
agtaattatttattc

SEQ ID NO: 1736133 - DNA, 15 bp, Homo sapiens
gtaattatttattca

SEQ ID NO: 1736134 - DNA, 15 bp, Homo sapiens
taattatttattcaa

SEQ ID NO: 1736135 - DNA, 15 bp, Homo sapiens
aattatttattcaaa

SEQ ID NO: 1736136 - DNA, 15 bp, Homo sapiens
attatttattcaaat

SEQ ID NO: 1736137 - DNA, 15 bp, Homo sapiens
ttatttattcaaatc

SEQ ID NO: 1736138 - DNA, 15 bp, Homo sapiens
tatttattcaaatca

SEQ ID NO: 1736139 - DNA, 15 bp, Homo sapiens
atttattcaaatcag

SEQ ID NO: 1736140 - DNA, 15 bp, Homo sapiens
tttattcaaatcaga

SEQ ID NO: 1736141 - DNA, 15 bp, Homo sapiens
ttattcaaatcagat

SEQ ID NO: 1736142 - DNA, 15 bp, Homo sapiens
tattcaaatcagata

SEQ ID NO: 1736143 - DNA, 15 bp, Homo sapiens
attcaaatcagatac

SEQ ID NO: 1736144 - DNA, 15 bp, Homo sapiens
ttcaaatcagatacc

SEQ ID NO: 1736145 - DNA, 15 bp, Homo sapiens
tcaaatcagatacca

SEQ ID NO: 1736146 - DNA, 15 bp, Homo sapiens
caaatcagataccaa

SEQ ID NO: 1736147 - DNA, 15 bp, Homo sapiens
aaatcagataccaat

SEQ ID NO: 1736148 - DNA, 15 bp, Homo sapiens
aatcagataccaatt

SEQ ID NO: 1736149 - DNA, 15 bp, Homo sapiens
atcagataccaatta

SEQ ID NO: 1736150 - DNA, 15 bp, Homo sapiens
tcagataccaattaa

SEQ ID NO: 1736151 - DNA, 15 bp, Homo sapiens
cagataccaattaaa

SEQ ID NO: 1736152 - DNA, 15 bp, Homo sapiens
agataccaattaaac

SEQ ID NO: 1736153 - DNA, 15 bp, Homo sapiens
gataccaattaaaca

SEQ ID NO: 1736154 - DNA, 15 bp, Homo sapiens
ataccaattaaacat

SEQ ID NO: 1736155 - DNA, 15 bp, Homo sapiens
taccaattaaacata

SEQ ID NO: 1736156 - DNA, 15 bp, Homo sapiens
accaattaaacataa

SEQ ID NO: 1736157 - DNA, 15 bp, Homo sapiens
ccaattaaacataat

SEQ ID NO: 1736158 - DNA, 15 bp, Homo sapiens
caattaaacataatt

SEQ ID NO: 1736159 - DNA, 15 bp, Homo sapiens
aattaaacataatta

SEQ ID NO: 1736160 - DNA, 15 bp, Homo sapiens
attaaacataattag

SEQ ID NO: 1736161 - DNA, 15 bp, Homo sapiens
ttaaacataattaga

SEQ ID NO: 1736162 - DNA, 15 bp, Homo sapiens
taaacataattagat

SEQ ID NO: 1736163 - DNA, 15 bp, Homo sapiens
aaacataattagatt

SEQ ID NO: 1736164 - DNA, 15 bp, Homo sapiens
aacataattagattg

SEQ ID NO: 1736165 - DNA, 15 bp, Homo sapiens
acataattagattga

SEQ ID NO: 1736166 - DNA, 15 bp, Homo sapiens
cataattagattgat

SEQ ID NO: 1736167 - DNA, 15 bp, Homo sapiens
ataattagattgatt

SEQ ID NO: 1736168 - DNA, 15 bp, Homo sapiens
taattagattgattt

SEQ ID NO: 1736169 - DNA, 15 bp, Homo sapiens
aattagattgatttc

SEQ ID NO: 1736170 - DNA, 15 bp, Homo sapiens
attagattgatttct

SEQ ID NO: 1736171 - DNA, 15 bp, Homo sapiens
ttagattgatttctt

SEQ ID NO: 1736172 - DNA, 15 bp, Homo sapiens
tagattgatttcttc

SEQ ID NO: 1736173 - DNA, 15 bp, Homo sapiens
agattgatttcttca

SEQ ID NO: 1736174 - DNA, 15 bp, Homo sapiens
gattgatttcttcac

SEQ ID NO: 1736175 - DNA, 15 bp, Homo sapiens
attgatttcttcaca

SEQ ID NO: 1736176 - DNA, 15 bp, Homo sapiens
ttgatttcttcacag

SEQ ID NO: 1736177 - DNA, 15 bp, Homo sapiens
tgatttcttcacaga

SEQ ID NO: 1736178 - DNA, 15 bp, Homo sapiens
gatttcttcacagaa

SEQ ID NO: 1736179 - DNA, 15 bp, Homo sapiens
atttcttcacagaat

SEQ ID NO: 1736180 - DNA, 15 bp, Homo sapiens
tttcttcacagaata

SEQ ID NO: 1736181 - DNA, 15 bp, Homo sapiens
ttcttcacagaatac

SEQ ID NO: 1736182 - DNA, 15 bp, Homo sapiens
tcttcacagaataca

SEQ ID NO: 1736183 - DNA, 15 bp, Homo sapiens
cttcacagaatacaa

SEQ ID NO: 1736184 - DNA, 15 bp, Homo sapiens
ttcacagaatacaaa

SEQ ID NO: 1736185 - DNA, 15 bp, Homo sapiens
tcacagaatacaaaa

SEQ ID NO: 1736186 - DNA, 15 bp, Homo sapiens
cacagaatacaaaat

SEQ ID NO: 1736187 - DNA, 15 bp, Homo sapiens
acagaatacaaaata

SEQ ID NO: 1736188 - DNA, 15 bp, Homo sapiens
cagaatacaaaataa

SEQ ID NO: 1736189 - DNA, 15 bp, Homo sapiens
agaatacaaaataaa

SEQ ID NO: 1736190 - DNA, 15 bp, Homo sapiens
gaatacaaaataaac

SEQ ID NO: 1736191 - DNA, 15 bp, Homo sapiens
aatacaaaataaaca

SEQ ID NO: 1736192 - DNA, 15 bp, Homo sapiens
atacaaaataaacag

SEQ ID NO: 1736193 - DNA, 15 bp, Homo sapiens
tacaaaataaacaga

SEQ ID NO: 1736194 - DNA, 15 bp, Homo sapiens
acaaaataaacagaa

SEQ ID NO: 1736195 - DNA, 15 bp, Homo sapiens
caaaataaacagaat

SEQ ID NO: 1736196 - DNA, 15 bp, Homo sapiens
aaaataaacagaatc

SEQ ID NO: 1736197 - DNA, 15 bp, Homo sapiens
aaataaacagaatca

SEQ ID NO: 1736198 - DNA, 15 bp, Homo sapiens
aataaacagaatcat

SEQ ID NO: 1736199 - DNA, 15 bp, Homo sapiens
ataaacagaatcatg

SEQ ID NO: 1736200 - DNA, 15 bp, Homo sapiens
taaacagaatcatga

SEQ ID NO: 1736201 - DNA, 15 bp, Homo sapiens
aaacagaatcatgaa

SEQ ID NO: 1736202 - DNA, 15 bp, Homo sapiens
aacagaatcatgaaa

SEQ ID NO: 1736203 - DNA, 15 bp, Homo sapiens
acagaatcatgaaat

SEQ ID NO: 1736204 - DNA, 15 bp, Homo sapiens
cagaatcatgaaatt

SEQ ID NO: 1736205 - DNA, 15 bp, Homo sapiens
agaatcatgaaatta

SEQ ID NO: 1736206 - DNA, 15 bp, Homo sapiens
gaatcatgaaattaa

SEQ ID NO: 1736207 - DNA, 15 bp, Homo sapiens
aatcatgaaattaag

SEQ ID NO: 1736208 - DNA, 15 bp, Homo sapiens
atcatgaaattaagt

SEQ ID NO: 1736209 - DNA, 15 bp, Homo sapiens
tcatgaaattaagtt

SEQ ID NO: 1736210 - DNA, 15 bp, Homo sapiens
catgaaattaagttg

SEQ ID NO: 1736211 - DNA, 15 bp, Homo sapiens
atgaaattaagttgt

SEQ ID NO: 1736212 - DNA, 15 bp, Homo sapiens
tgaaattaagttgtt

SEQ ID NO: 1736213 - DNA, 15 bp, Homo sapiens
gaaattaagttgtta

SEQ ID NO: 1736214 - DNA, 15 bp, Homo sapiens
aaattaagttgttaa

SEQ ID NO: 1736215 - DNA, 15 bp, Homo sapiens
aattaagttgttaat

SEQ ID NO: 1736216 - DNA, 15 bp, Homo sapiens
attaagttgttaatg

SEQ ID NO: 1736217 - DNA, 15 bp, Homo sapiens
ttaagttgttaatga

SEQ ID NO: 1736218 - DNA, 15 bp, Homo sapiens
taagttgttaatgat

SEQ ID NO: 1736219 - DNA, 15 bp, Homo sapiens
aagttgttaatgatt

SEQ ID NO: 1736220 - DNA, 15 bp, Homo sapiens
agttgttaatgattt

SEQ ID NO: 1736221 - DNA, 15 bp, Homo sapiens
gttgttaatgatttg

SEQ ID NO: 1736222 - DNA, 15 bp, Homo sapiens
ttgttaatgatttga

SEQ ID NO: 1736223 - DNA, 15 bp, Homo sapiens
tgttaatgatttgaa

SEQ ID NO: 1736224 - DNA, 15 bp, Homo sapiens
gttaatgatttgaag

SEQ ID NO: 1736225 - DNA, 15 bp, Homo sapiens
ttaatgatttgaagg

SEQ ID NO: 1736226 - DNA, 15 bp, Homo sapiens
taatgatttgaaggc

SEQ ID NO: 1736227 - DNA, 15 bp, Homo sapiens
aatgatttgaaggcc

SEQ ID NO: 1736228 - DNA, 15 bp, Homo sapiens
atgatttgaaggcct

SEQ ID NO: 1736229 - DNA, 15 bp, Homo sapiens
tgatttgaaggcctc

SEQ ID NO: 1736230 - DNA, 15 bp, Homo sapiens
gatttgaaggcctcc

SEQ ID NO: 1736231 - DNA, 15 bp, Homo sapiens
atttgaaggcctcct

SEQ ID NO: 1736232 - DNA, 15 bp, Homo sapiens
tttgaaggcctcctt

SEQ ID NO: 1736233 - DNA, 15 bp, Homo sapiens
ttgaaggcctccttt

SEQ ID NO: 1736234 - DNA, 15 bp, Homo sapiens
tgaaggcctcctttt

SEQ ID NO: 1736235 - DNA, 15 bp, Homo sapiens
gaaggcctccttttc

SEQ ID NO: 1736236 - DNA, 15 bp, Homo sapiens
aaggcctccttttct

SEQ ID NO: 1736237 - DNA, 15 bp, Homo sapiens
aggcctccttttcta

SEQ ID NO: 1736238 - DNA, 15 bp, Homo sapiens
ggcctccttttctaa

SEQ ID NO: 1736239 - DNA, 15 bp, Homo sapiens
gcctccttttctaag

SEQ ID NO: 1736240 - DNA, 15 bp, Homo sapiens
cctccttttctaaga

SEQ ID NO: 1736241 - DNA, 15 bp, Homo sapiens
ctccttttctaagac

SEQ ID NO: 1736242 - DNA, 15 bp, Homo sapiens
tccttttctaagaca

SEQ ID NO: 1736243 - DNA, 15 bp, Homo sapiens
ccttttctaagacat

SEQ ID NO: 1736244 - DNA, 15 bp, Homo sapiens
cttttctaagacatt

SEQ ID NO: 1736245 - DNA, 15 bp, Homo sapiens
ttttctaagacattc

SEQ ID NO: 1736246 - DNA, 15 bp, Homo sapiens
tttctaagacattca

SEQ ID NO: 1736247 - DNA, 15 bp, Homo sapiens
ttctaagacattcat

SEQ ID NO: 1736248 - DNA, 15 bp, Homo sapiens
tctaagacattcatt

SEQ ID NO: 1736249 - DNA, 15 bp, Homo sapiens
ctaagacattcattt

SEQ ID NO: 1736250 - DNA, 15 bp, Homo sapiens
taagacattcattta

SEQ ID NO: 1736251 - DNA, 15 bp, Homo sapiens
aagacattcatttac

SEQ ID NO: 1736252 - DNA, 15 bp, Homo sapiens
agacattcatttaca

SEQ ID NO: 1736253 - DNA, 15 bp, Homo sapiens
gacattcatttacaa

SEQ ID NO: 1736254 - DNA, 15 bp, Homo sapiens
acattcatttacaac

SEQ ID NO: 1736255 - DNA, 15 bp, Homo sapiens
cattcatttacaact

SEQ ID NO: 1736256 - DNA, 15 bp, Homo sapiens
attcatttacaactc

SEQ ID NO: 1736257 - DNA, 15 bp, Homo sapiens
ttcatttacaactct

SEQ ID NO: 1736258 - DNA, 15 bp, Homo sapiens
tcatttacaactctt

SEQ ID NO: 1736259 - DNA, 15 bp, Homo sapiens
catttacaactctta

SEQ ID NO: 1736260 - DNA, 15 bp, Homo sapiens
atttacaactcttaa

SEQ ID NO: 1736261 - DNA, 15 bp, Homo sapiens
tttacaactcttaaa

SEQ ID NO: 1736262 - DNA, 15 bp, Homo sapiens
ttacaactcttaaaa

SEQ ID NO: 1736263 - DNA, 15 bp, Homo sapiens
tacaactcttaaaaa

SEQ ID NO: 1736264 - DNA, 15 bp, Homo sapiens
acaactcttaaaaaa

SEQ ID NO: 1736265 - DNA, 15 bp, Homo sapiens
caactcttaaaaaag

SEQ ID NO: 1736266 - DNA, 15 bp, Homo sapiens
aactcttaaaaaagt

SEQ ID NO: 1736267 - DNA, 15 bp, Homo sapiens
actcttaaaaaagta

SEQ ID NO: 1736268 - DNA, 15 bp, Homo sapiens
ctcttaaaaaagtac

SEQ ID NO: 1736269 - DNA, 15 bp, Homo sapiens
tcttaaaaaagtact

SEQ ID NO: 1736270 - DNA, 15 bp, Homo sapiens
cttaaaaaagtactg

SEQ ID NO: 1736271 - DNA, 15 bp, Homo sapiens
ttaaaaaagtactga

SEQ ID NO: 1736272 - DNA, 15 bp, Homo sapiens
taaaaaagtactgac

SEQ ID NO: 1736273 - DNA, 15 bp, Homo sapiens
aaaaaagtactgact

SEQ ID NO: 1736274 - DNA, 15 bp, Homo sapiens
aaaaagtactgactt

SEQ ID NO: 1736275 - DNA, 15 bp, Homo sapiens
aaaagtactgacttt

SEQ ID NO: 1736276 - DNA, 15 bp, Homo sapiens
aaagtactgacttta

SEQ ID NO: 1736277 - DNA, 15 bp, Homo sapiens
aagtactgactttaa

SEQ ID NO: 1736278 - DNA, 15 bp, Homo sapiens
agtactgactttaaa

SEQ ID NO: 1736279 - DNA, 15 bp, Homo sapiens
gtactgactttaaat

SEQ ID NO: 1736280 - DNA, 15 bp, Homo sapiens
tactgactttaaata

SEQ ID NO: 1736281 - DNA, 15 bp, Homo sapiens
actgactttaaataa

SEQ ID NO: 1736282 - DNA, 15 bp, Homo sapiens
ctgactttaaataaa

SEQ ID NO: 1736283 - DNA, 15 bp, Homo sapiens
tgactttaaataaaa

SEQ ID NO: 1736284 - DNA, 15 bp, Homo sapiens
gactttaaataaaaa

SEQ ID NO: 1736285 - DNA, 15 bp, Homo sapiens
actttaaataaaaat

SEQ ID NO: 1736286 - DNA, 15 bp, Homo sapiens
ctttaaataaaaatc

SEQ ID NO: 1736287 - DNA, 15 bp, Homo sapiens
tttaaataaaaatcc

SEQ ID NO: 1736288 - DNA, 15 bp, Homo sapiens
ttaaataaaaatcca

SEQ ID NO: 1736289 - DNA, 15 bp, Homo sapiens
taaataaaaatccaa

SEQ ID NO: 1736290 - DNA, 15 bp, Homo sapiens
aaataaaaatccaaa

SEQ ID NO: 1736291 - DNA, 15 bp, Homo sapiens
aataaaaatccaaag

SEQ ID NO: 1736292 - DNA, 15 bp, Homo sapiens
ataaaaatccaaaga

SEQ ID NO: 1736293 - DNA, 15 bp, Homo sapiens
taaaaatccaaagaa

SEQ ID NO: 1736294 - DNA, 15 bp, Homo sapiens
aaaaatccaaagaat

SEQ ID NO: 1736295 - DNA, 15 bp, Homo sapiens
aaaatccaaagaata

SEQ ID NO: 1736296 - DNA, 15 bp, Homo sapiens
aaatccaaagaatat

SEQ ID NO: 1736297 - DNA, 15 bp, Homo sapiens
aatccaaagaatata

SEQ ID NO: 1736298 - DNA, 15 bp, Homo sapiens
atccaaagaatatat

SEQ ID NO: 1736299 - DNA, 15 bp, Homo sapiens
tccaaagaatatata

SEQ ID NO: 1736300 - DNA, 15 bp, Homo sapiens
ccaaagaatatataa

SEQ ID NO: 1736301 - DNA, 15 bp, Homo sapiens
caaagaatatataat

SEQ ID NO: 1736302 - DNA, 15 bp, Homo sapiens
aaagaatatataatt

SEQ ID NO: 1736303 - DNA, 15 bp, Homo sapiens
aagaatatataatta

SEQ ID NO: 1736304 - DNA, 15 bp, Homo sapiens
agaatatataattat

SEQ ID NO: 1736305 - DNA, 15 bp, Homo sapiens
gaatatataattatg

SEQ ID NO: 1736306 - DNA, 15 bp, Homo sapiens
aatatataattatgg

SEQ ID NO: 1736307 - DNA, 15 bp, Homo sapiens
atatataattatgga

SEQ ID NO: 1736308 - DNA, 15 bp, Homo sapiens
tatataattatggaa

SEQ ID NO: 1736309 - DNA, 15 bp, Homo sapiens
atataattatggaag

SEQ ID NO: 1736310 - DNA, 15 bp, Homo sapiens
tataattatggaaga

SEQ ID NO: 1736311 - DNA, 15 bp, Homo sapiens
ataattatggaagag

SEQ ID NO: 1736312 - DNA, 15 bp, Homo sapiens
taattatggaagagg

SEQ ID NO: 1736313 - DNA, 15 bp, Homo sapiens
aattatggaagagga

SEQ ID NO: 1736314 - DNA, 15 bp, Homo sapiens
attatggaagaggag

SEQ ID NO: 1736315 - DNA, 15 bp, Homo sapiens
ttatggaagaggaga

SEQ ID NO: 1736316 - DNA, 15 bp, Homo sapiens
tatggaagaggagaa

SEQ ID NO: 1736317 - DNA, 15 bp, Homo sapiens
atggaagaggagaaa

SEQ ID NO: 1736318 - DNA, 15 bp, Homo sapiens
tggaagaggagaaat

SEQ ID NO: 1736319 - DNA, 15 bp, Homo sapiens
ggaagaggagaaatt

SEQ ID NO: 1736320 - DNA, 15 bp, Homo sapiens
gaagaggagaaattc

SEQ ID NO: 1736321 - DNA, 15 bp, Homo sapiens
aagaggagaaattcc

SEQ ID NO: 1736322 - DNA, 15 bp, Homo sapiens
agaggagaaattcca

SEQ ID NO: 1736323 - DNA, 15 bp, Homo sapiens
gaggagaaattccat

SEQ ID NO: 1736324 - DNA, 15 bp, Homo sapiens
aggagaaattccatt

SEQ ID NO: 1736325 - DNA, 15 bp, Homo sapiens
ggagaaattccattc

SEQ ID NO: 1736326 - DNA, 15 bp, Homo sapiens
gagaaattccattcc

SEQ ID NO: 1736327 - DNA, 15 bp, Homo sapiens
agaaattccattcca

SEQ ID NO: 1736328 - DNA, 15 bp, Homo sapiens
gaaattccattccac

SEQ ID NO: 1736329 - DNA, 15 bp, Homo sapiens
aaattccattccaca

SEQ ID NO: 1736330 - DNA, 15 bp, Homo sapiens
aattccattccacag

SEQ ID NO: 1736331 - DNA, 15 bp, Homo sapiens
attccattccacagc

SEQ ID NO: 1736332 - DNA, 15 bp, Homo sapiens
ttccattccacagct

SEQ ID NO: 1736333 - DNA, 15 bp, Homo sapiens
tccattccacagcta

SEQ ID NO: 1736334 - DNA, 15 bp, Homo sapiens
ccattccacagctaa

SEQ ID NO: 1736335 - DNA, 15 bp, Homo sapiens
cattccacagctaag

SEQ ID NO: 1736336 - DNA, 15 bp, Homo sapiens
attccacagctaagt

SEQ ID NO: 1736337 - DNA, 15 bp, Homo sapiens
ttccacagctaagta

SEQ ID NO: 1736338 - DNA, 15 bp, Homo sapiens
tccacagctaagtat

SEQ ID NO: 1736339 - DNA, 15 bp, Homo sapiens
ccacagctaagtatt

SEQ ID NO: 1736340 - DNA, 15 bp, Homo sapiens
cacagctaagtatta

SEQ ID NO: 1736341 - DNA, 15 bp, Homo sapiens
acagctaagtattat

SEQ ID NO: 1736342 - DNA, 15 bp, Homo sapiens
cagctaagtattatt

SEQ ID NO: 1736343 - DNA, 15 bp, Homo sapiens
agctaagtattattt

SEQ ID NO: 1736344 - DNA, 15 bp, Homo sapiens
gctaagtattatttt

SEQ ID NO: 1736345 - DNA, 15 bp, Homo sapiens
ctaagtattatttta

SEQ ID NO: 1736346 - DNA, 15 bp, Homo sapiens
taagtattattttat

SEQ ID NO: 1736347 - DNA, 15 bp, Homo sapiens
aagtattattttatt

SEQ ID NO: 1736348 - DNA, 15 bp, Homo sapiens
agtattattttattt

SEQ ID NO: 1736349 - DNA, 15 bp, Homo sapiens
gtattattttatttc

SEQ ID NO: 1736350 - DNA, 15 bp, Homo sapiens
tattattttatttcc

SEQ ID NO: 1736351 - DNA, 15 bp, Homo sapiens
attattttatttcct

SEQ ID NO: 1736352 - DNA, 15 bp, Homo sapiens
ttattttatttcctt

SEQ ID NO: 1736353 - DNA, 15 bp, Homo sapiens
attttatttcctttt

SEQ ID NO: 1736354 - DNA, 15 bp, Homo sapiens
ttttatttccttttt

SEQ ID NO: 1736355 - DNA, 15 bp, Homo sapiens
tttatttcctttttt

SEQ ID NO: 1736356 - DNA, 15 bp, Homo sapiens
ttatttccttttttt

SEQ ID NO: 1736357 - DNA, 15 bp, Homo sapiens
tatttccttttttta

SEQ ID NO: 1736358 - DNA, 15 bp, Homo sapiens
atttcctttttttag

SEQ ID NO: 1736359 - DNA, 15 bp, Homo sapiens
tttcctttttttagt

SEQ ID NO: 1736360 - DNA, 15 bp, Homo sapiens
ttcctttttttagtt

SEQ ID NO: 1736361 - DNA, 15 bp, Homo sapiens
tcctttttttagttt

SEQ ID NO: 1736362 - DNA, 15 bp, Homo sapiens
cctttttttagtttc

SEQ ID NO: 1736363 - DNA, 15 bp, Homo sapiens
ctttttttagtttcg

SEQ ID NO: 1736364 - DNA, 15 bp, Homo sapiens
tttttttagtttcga

SEQ ID NO: 1736365 - DNA, 15 bp, Homo sapiens
ttttttagtttcgat

SEQ ID NO: 1736366 - DNA, 15 bp, Homo sapiens
tttttagtttcgata

SEQ ID NO: 1736367 - DNA, 15 bp, Homo sapiens
ttttagtttcgatac

SEQ ID NO: 1736368 - DNA, 15 bp, Homo sapiens
tttagtttcgatact

SEQ ID NO: 1736369 - DNA, 15 bp, Homo sapiens
ttagtttcgatactc

SEQ ID NO: 1736370 - DNA, 15 bp, Homo sapiens
tagtttcgatactcc

SEQ ID NO: 1736371 - DNA, 15 bp, Homo sapiens
agtttcgatactccg

SEQ ID NO: 1736372 - DNA, 15 bp, Homo sapiens
gtttcgatactccga

SEQ ID NO: 1736373 - DNA, 15 bp, Homo sapiens
tttcgatactccgat

SEQ ID NO: 1736374 - DNA, 15 bp, Homo sapiens
ttcgatactccgatt

SEQ ID NO: 1736375 - DNA, 15 bp, Homo sapiens
tcgatactccgattg

SEQ ID NO: 1736376 - DNA, 15 bp, Homo sapiens
cgatactccgattgg

SEQ ID NO: 1736377 - DNA, 15 bp, Homo sapiens
gatactccgattggc

SEQ ID NO: 1736378 - DNA, 15 bp, Homo sapiens
atactccgattggca

SEQ ID NO: 1736379 - DNA, 15 bp, Homo sapiens
tactccgattggcag

SEQ ID NO: 1736380 - DNA, 15 bp, Homo sapiens
actccgattggcagg

SEQ ID NO: 1736381 - DNA, 15 bp, Homo sapiens
ctccgattggcagga

SEQ ID NO: 1736382 - DNA, 15 bp, Homo sapiens
tccgattggcaggat

SEQ ID NO: 1736383 - DNA, 15 bp, Homo sapiens
ccgattggcaggata

SEQ ID NO: 1736384 - DNA, 15 bp, Homo sapiens
cgattggcaggataa

SEQ ID NO: 1736385 - DNA, 15 bp, Homo sapiens
gattggcaggataaa

SEQ ID NO: 1736386 - DNA, 15 bp, Homo sapiens
attggcaggataaat

SEQ ID NO: 1736387 - DNA, 15 bp, Homo sapiens
ttggcaggataaatt

SEQ ID NO: 1736388 - DNA, 15 bp, Homo sapiens
tggcaggataaattg

SEQ ID NO: 1736389 - DNA, 15 bp, Homo sapiens
ggcaggataaattgt

SEQ ID NO: 1736390 - DNA, 15 bp, Homo sapiens
gcaggataaattgtt

SEQ ID NO: 1736391 - DNA, 15 bp, Homo sapiens
caggataaattgttt

SEQ ID NO: 1736392 - DNA, 15 bp, Homo sapiens
aggataaattgttta

SEQ ID NO: 1736393 - DNA, 15 bp, Homo sapiens
ggataaattgtttat

SEQ ID NO: 1736394 - DNA, 15 bp, Homo sapiens
gataaattgtttatg

SEQ ID NO: 1736395 - DNA, 15 bp, Homo sapiens
ataaattgtttatgt

SEQ ID NO: 1736396 - DNA, 15 bp, Homo sapiens
taaattgtttatgtc

SEQ ID NO: 1736397 - DNA, 15 bp, Homo sapiens
aaattgtttatgtcg

SEQ ID NO: 1736398 - DNA, 15 bp, Homo sapiens
aattgtttatgtcgc

SEQ ID NO: 1736399 - DNA, 15 bp, Homo sapiens
attgtttatgtcgct

SEQ ID NO: 1736400 - DNA, 15 bp, Homo sapiens
ttgtttatgtcgctg

SEQ ID NO: 1736401 - DNA, 15 bp, Homo sapiens
tgtttatgtcgctgg

SEQ ID NO: 1736402 - DNA, 15 bp, Homo sapiens
gtttatgtcgctggg

SEQ ID NO: 1736403 - DNA, 15 bp, Homo sapiens
tttatgtcgctgggt

SEQ ID NO: 1736404 - DNA, 15 bp, Homo sapiens
ttatgtcgctgggta

SEQ ID NO: 1736405 - DNA, 15 bp, Homo sapiens
tatgtcgctgggtac

SEQ ID NO: 1736406 - DNA, 15 bp, Homo sapiens
atgtcgctgggtacc

SEQ ID NO: 1736407 - DNA, 15 bp, Homo sapiens
tgtcgctgggtacca

SEQ ID NO: 1736408 - DNA, 15 bp, Homo sapiens
gtcgctgggtaccat

SEQ ID NO: 1736409 - DNA, 15 bp, Homo sapiens
tcgctgggtaccatc

SEQ ID NO: 1736410 - DNA, 15 bp, Homo sapiens
cgctgggtaccatca

SEQ ID NO: 1736411 - DNA, 15 bp, Homo sapiens
gctgggtaccatcat

SEQ ID NO: 1736412 - DNA, 15 bp, Homo sapiens
ctgggtaccatcatg

SEQ ID NO: 1736413 - DNA, 15 bp, Homo sapiens
tgggtaccatcatgg

SEQ ID NO: 1736414 - DNA, 15 bp, Homo sapiens
gggtaccatcatggc

SEQ ID NO: 1736415 - DNA, 15 bp, Homo sapiens
ggtaccatcatggcc

SEQ ID NO: 1736416 - DNA, 15 bp, Homo sapiens
gtaccatcatggcca

SEQ ID NO: 1736417 - DNA, 15 bp, Homo sapiens
taccatcatggccat

SEQ ID NO: 1736418 - DNA, 15 bp, Homo sapiens
accatcatggccata

SEQ ID NO: 1736419 - DNA, 15 bp, Homo sapiens
ccatcatggccatag

SEQ ID NO: 1736420 - DNA, 15 bp, Homo sapiens
catcatggccatagc

SEQ ID NO: 1736421 - DNA, 15 bp, Homo sapiens
atcatggccatagct

SEQ ID NO: 1736422 - DNA, 15 bp, Homo sapiens
tcatggccatagctc

SEQ ID NO: 1736423 - DNA, 15 bp, Homo sapiens
catggccatagctca

SEQ ID NO: 1736424 - DNA, 15 bp, Homo sapiens
atggccatagctcac

SEQ ID NO: 1736425 - DNA, 15 bp, Homo sapiens
tggccatagctcacg

SEQ ID NO: 1736426 - DNA, 15 bp, Homo sapiens
ggccatagctcacgg

SEQ ID NO: 1736427 - DNA, 15 bp, Homo sapiens
gccatagctcacgga

SEQ ID NO: 1736428 - DNA, 15 bp, Homo sapiens
ccatagctcacggat

SEQ ID NO: 1736429 - DNA, 15 bp, Homo sapiens
catagctcacggatc

SEQ ID NO: 1736430 - DNA, 15 bp, Homo sapiens
atagctcacggatca

SEQ ID NO: 1736431 - DNA, 15 bp, Homo sapiens
tagctcacggatcag

SEQ ID NO: 1736432 - DNA, 15 bp, Homo sapiens
agctcacggatcagg

SEQ ID NO: 1736433 - DNA, 15 bp, Homo sapiens
gctcacggatcaggt

SEQ ID NO: 1736434 - DNA, 15 bp, Homo sapiens
ctcacggatcaggtc

SEQ ID NO: 1736435 - DNA, 15 bp, Homo sapiens
tcacggatcaggtct

SEQ ID NO: 1736436 - DNA, 15 bp, Homo sapiens
cacggatcaggtctc

SEQ ID NO: 1736437 - DNA, 15 bp, Homo sapiens
acggatcaggtctcc

SEQ ID NO: 1736438 - DNA, 15 bp, Homo sapiens
cggatcaggtctccc

SEQ ID NO: 1736439 - DNA, 15 bp, Homo sapiens
ggatcaggtctcccc

SEQ ID NO: 1736440 - DNA, 15 bp, Homo sapiens
gatcaggtctccccc

SEQ ID NO: 1736441 - DNA, 15 bp, Homo sapiens
atcaggtctccccct

SEQ ID NO: 1736442 - DNA, 15 bp, Homo sapiens
tcaggtctccccctc

SEQ ID NO: 1736443 - DNA, 15 bp, Homo sapiens
caggtctccccctca

SEQ ID NO: 1736444 - DNA, 15 bp, Homo sapiens
aggtctccccctcat

SEQ ID NO: 1736445 - DNA, 15 bp, Homo sapiens
ggtctccccctcatg

SEQ ID NO: 1736446 - DNA, 15 bp, Homo sapiens
gtctccccctcatga

SEQ ID NO: 1736447 - DNA, 15 bp, Homo sapiens
tctccccctcatgat

SEQ ID NO: 1736448 - DNA, 15 bp, Homo sapiens
ctccccctcatgatg

SEQ ID NO: 1736449 - DNA, 15 bp, Homo sapiens
tccccctcatgatga

SEQ ID NO: 1736450 - DNA, 15 bp, Homo sapiens
ccccctcatgatgat

SEQ ID NO: 1736451 - DNA, 15 bp, Homo sapiens
cccctcatgatgata

SEQ ID NO: 1736452 - DNA, 15 bp, Homo sapiens
ccctcatgatgatag

SEQ ID NO: 1736453 - DNA, 15 bp, Homo sapiens
cctcatgatgatagt

SEQ ID NO: 1736454 - DNA, 15 bp, Homo sapiens
ctcatgatgatagta

SEQ ID NO: 1736455 - DNA, 15 bp, Homo sapiens
tcatgatgatagtat

SEQ ID NO: 1736456 - DNA, 15 bp, Homo sapiens
catgatgatagtatt

SEQ ID NO: 1736457 - DNA, 15 bp, Homo sapiens
atgatgatagtattt

SEQ ID NO: 1736458 - DNA, 15 bp, Homo sapiens
tgatgatagtatttg

SEQ ID NO: 1736459 - DNA, 15 bp, Homo sapiens
gatgatagtatttgg

SEQ ID NO: 1736460 - DNA, 15 bp, Homo sapiens
atgatagtatttgga

SEQ ID NO: 1736461 - DNA, 15 bp, Homo sapiens
tgatagtatttggag

SEQ ID NO: 1736462 - DNA, 15 bp, Homo sapiens
gatagtatttggaga

SEQ ID NO: 1736463 - DNA, 15 bp, Homo sapiens
atagtatttggagag

SEQ ID NO: 1736464 - DNA, 15 bp, Homo sapiens
tagtatttggagaga

SEQ ID NO: 1736465 - DNA, 15 bp, Homo sapiens
agtatttggagagat

SEQ ID NO: 1736466 - DNA, 15 bp, Homo sapiens
gtatttggagagatg

SEQ ID NO: 1736467 - DNA, 15 bp, Homo sapiens
tatttggagagatga

SEQ ID NO: 1736468 - DNA, 15 bp, Homo sapiens
atttggagagatgac

SEQ ID NO: 1736469 - DNA, 15 bp, Homo sapiens
tttggagagatgact

SEQ ID NO: 1736470 - DNA, 15 bp, Homo sapiens
ttggagagatgactg

SEQ ID NO: 1736471 - DNA, 15 bp, Homo sapiens
tggagagatgactga

SEQ ID NO: 1736472 - DNA, 15 bp, Homo sapiens
ggagagatgactgac

SEQ ID NO: 1736473 - DNA, 15 bp, Homo sapiens
gagagatgactgaca

SEQ ID NO: 1736474 - DNA, 15 bp, Homo sapiens
agagatgactgacaa

SEQ ID NO: 1736475 - DNA, 15 bp, Homo sapiens
gagatgactgacaaa

SEQ ID NO: 1736476 - DNA, 15 bp, Homo sapiens
agatgactgacaaat

SEQ ID NO: 1736477 - DNA, 15 bp, Homo sapiens
gatgactgacaaatt

SEQ ID NO: 1736478 - DNA, 15 bp, Homo sapiens
atgactgacaaattt

SEQ ID NO: 1736479 - DNA, 15 bp, Homo sapiens
tgactgacaaatttg

SEQ ID NO: 1736480 - DNA, 15 bp, Homo sapiens
gactgacaaatttgt

SEQ ID NO: 1736481 - DNA, 15 bp, Homo sapiens
actgacaaatttgtt

SEQ ID NO: 1736482 - DNA, 15 bp, Homo sapiens
ctgacaaatttgttg

SEQ ID NO: 1736483 - DNA, 15 bp, Homo sapiens
tgacaaatttgttga

SEQ ID NO: 1736484 - DNA, 15 bp, Homo sapiens
gacaaatttgttgat

SEQ ID NO: 1736485 - DNA, 15 bp, Homo sapiens
acaaatttgttgata

SEQ ID NO: 1736486 - DNA, 15 bp, Homo sapiens
caaatttgttgatac

SEQ ID NO: 1736487 - DNA, 15 bp, Homo sapiens
aaatttgttgatact

SEQ ID NO: 1736488 - DNA, 15 bp, Homo sapiens
aatttgttgatactg

SEQ ID NO: 1736489 - DNA, 15 bp, Homo sapiens
atttgttgatactgc

SEQ ID NO: 1736490 - DNA, 15 bp, Homo sapiens
tttgttgatactgca

SEQ ID NO: 1736491 - DNA, 15 bp, Homo sapiens
ttgttgatactgcag

SEQ ID NO: 1736492 - DNA, 15 bp, Homo sapiens
tgttgatactgcagg

SEQ ID NO: 1736493 - DNA, 15 bp, Homo sapiens
gttgatactgcagga

SEQ ID NO: 1736494 - DNA, 15 bp, Homo sapiens
ttgatactgcaggaa

SEQ ID NO: 1736495 - DNA, 15 bp, Homo sapiens
tgatactgcaggaaa

SEQ ID NO: 1736496 - DNA, 15 bp, Homo sapiens
gatactgcaggaaac

SEQ ID NO: 1736497 - DNA, 15 bp, Homo sapiens
atactgcaggaaact

SEQ ID NO: 1736498 - DNA, 15 bp, Homo sapiens
tactgcaggaaactt

SEQ ID NO: 1736499 - DNA, 15 bp, Homo sapiens
actgcaggaaacttc

SEQ ID NO: 1736500 - DNA, 15 bp, Homo sapiens
ctgcaggaaacttct

SEQ ID NO: 1736501 - DNA, 15 bp, Homo sapiens
tgcaggaaacttctc

SEQ ID NO: 1736502 - DNA, 15 bp, Homo sapiens
gcaggaaacttctcc

SEQ ID NO: 1736503 - DNA, 15 bp, Homo sapiens
caggaaacttctcct

SEQ ID NO: 1736504 - DNA, 15 bp, Homo sapiens
aggaaacttctcctt

SEQ ID NO: 1736505 - DNA, 15 bp, Homo sapiens
ggaaacttctccttt

SEQ ID NO: 1736506 - DNA, 15 bp, Homo sapiens
gaaacttctcctttc

SEQ ID NO: 1736507 - DNA, 15 bp, Homo sapiens
aaacttctcctttcc

SEQ ID NO: 1736508 - DNA, 15 bp, Homo sapiens
aacttctcctttcca

SEQ ID NO: 1736509 - DNA, 15 bp, Homo sapiens
acttctcctttccag

SEQ ID NO: 1736510 - DNA, 15 bp, Homo sapiens
cttctcctttccagg

SEQ ID NO: 1736511 - DNA, 15 bp, Homo sapiens
ttctcctttccaggt

SEQ ID NO: 1736512 - DNA, 15 bp, Homo sapiens
tctcctttccaggta

SEQ ID NO: 1736513 - DNA, 15 bp, Homo sapiens
ctcctttccaggtaa

SEQ ID NO: 1736514 - DNA, 15 bp, Homo sapiens
tcctttccaggtaag

SEQ ID NO: 1736515 - DNA, 15 bp, Homo sapiens
cctttccaggtaagc

SEQ ID NO: 1736516 - DNA, 15 bp, Homo sapiens
ctttccaggtaagca

SEQ ID NO: 1736517 - DNA, 15 bp, Homo sapiens
tttccaggtaagcat

SEQ ID NO: 1736518 - DNA, 15 bp, Homo sapiens
ttccaggtaagcatt

SEQ ID NO: 1736519 - DNA, 15 bp, Homo sapiens
tccaggtaagcattt

SEQ ID NO: 1736520 - DNA, 15 bp, Homo sapiens
ccaggtaagcatttc

SEQ ID NO: 1736521 - DNA, 15 bp, Homo sapiens
caggtaagcatttct

SEQ ID NO: 1736522 - DNA, 15 bp, Homo sapiens
aggtaagcatttctt

SEQ ID NO: 1736523 - DNA, 15 bp, Homo sapiens
ggtaagcatttcttt

SEQ ID NO: 1736524 - DNA, 15 bp, Homo sapiens
gtaagcatttcttta

SEQ ID NO: 1736525 - DNA, 15 bp, Homo sapiens
taagcatttctttac

SEQ ID NO: 1736526 - DNA, 15 bp, Homo sapiens
aagcatttctttacc

SEQ ID NO: 1736527 - DNA, 15 bp, Homo sapiens
agcatttctttacct

SEQ ID NO: 1736528 - DNA, 15 bp, Homo sapiens
gcatttctttacctt

SEQ ID NO: 1736529 - DNA, 15 bp, Homo sapiens
catttctttaccttt

SEQ ID NO: 1736530 - DNA, 15 bp, Homo sapiens
atttctttacctttt

SEQ ID NO: 1736531 - DNA, 15 bp, Homo sapiens
tttctttacctttta

SEQ ID NO: 1736532 - DNA, 15 bp, Homo sapiens
ttctttaccttttaa

SEQ ID NO: 1736533 - DNA, 15 bp, Homo sapiens
tctttaccttttaaa

SEQ ID NO: 1736534 - DNA, 15 bp, Homo sapiens
ctttaccttttaaaa

SEQ ID NO: 1736535 - DNA, 15 bp, Homo sapiens
tttaccttttaaaaa

SEQ ID NO: 1736536 - DNA, 15 bp, Homo sapiens
ttaccttttaaaaaa

SEQ ID NO: 1736537 - DNA, 15 bp, Homo sapiens
taccttttaaaaaaa

SEQ ID NO: 1736538 - DNA, 15 bp, Homo sapiens
accttttaaaaaaat

SEQ ID NO: 1736539 - DNA, 15 bp, Homo sapiens
ccttttaaaaaaatc

SEQ ID NO: 1736540 - DNA, 15 bp, Homo sapiens
cttttaaaaaaatcc

SEQ ID NO: 1736541 - DNA, 15 bp, Homo sapiens
ttttaaaaaaatcca

SEQ ID NO: 1736542 - DNA, 15 bp, Homo sapiens
tttaaaaaaatccat

SEQ ID NO: 1736543 - DNA, 15 bp, Homo sapiens
ttaaaaaaatccata

SEQ ID NO: 1736544 - DNA, 15 bp, Homo sapiens
taaaaaaatccatag

SEQ ID NO: 1736545 - DNA, 15 bp, Homo sapiens
aaaaaaatccatagc

SEQ ID NO: 1736546 - DNA, 15 bp, Homo sapiens
aaaaaatccatagca

SEQ ID NO: 1736547 - DNA, 15 bp, Homo sapiens
aaaaatccatagcat

SEQ ID NO: 1736548 - DNA, 15 bp, Homo sapiens
aaaatccatagcatt

SEQ ID NO: 1736549 - DNA, 15 bp, Homo sapiens
aaatccatagcattt

SEQ ID NO: 1736550 - DNA, 15 bp, Homo sapiens
aatccatagcatttc

SEQ ID NO: 1736551 - DNA, 15 bp, Homo sapiens
atccatagcatttct

SEQ ID NO: 1736552 - DNA, 15 bp, Homo sapiens
tccatagcatttctt

SEQ ID NO: 1736553 - DNA, 15 bp, Homo sapiens
ccatagcatttcttt

SEQ ID NO: 1736554 - DNA, 15 bp, Homo sapiens
catagcatttcttta

SEQ ID NO: 1736555 - DNA, 15 bp, Homo sapiens
atagcatttctttaa

SEQ ID NO: 1736556 - DNA, 15 bp, Homo sapiens
tagcatttctttaac

SEQ ID NO: 1736557 - DNA, 15 bp, Homo sapiens
agcatttctttaact

SEQ ID NO: 1736558 - DNA, 15 bp, Homo sapiens
gcatttctttaactg

SEQ ID NO: 1736559 - DNA, 15 bp, Homo sapiens
catttctttaactgg

SEQ ID NO: 1736560 - DNA, 15 bp, Homo sapiens
atttctttaactggg

SEQ ID NO: 1736561 - DNA, 15 bp, Homo sapiens
tttctttaactgggt

SEQ ID NO: 1736562 - DNA, 15 bp, Homo sapiens
ttctttaactgggta

SEQ ID NO: 1736563 - DNA, 15 bp, Homo sapiens
tctttaactgggtaa

SEQ ID NO: 1736564 - DNA, 15 bp, Homo sapiens
ctttaactgggtaaa

SEQ ID NO: 1736565 - DNA, 15 bp, Homo sapiens
tttaactgggtaaaa

SEQ ID NO: 1736566 - DNA, 15 bp, Homo sapiens
ttaactgggtaaaaa

SEQ ID NO: 1736567 - DNA, 15 bp, Homo sapiens
taactgggtaaaaat

SEQ ID NO: 1736568 - DNA, 15 bp, Homo sapiens
aactgggtaaaaatt

SEQ ID NO: 1736569 - DNA, 15 bp, Homo sapiens
actgggtaaaaattt

SEQ ID NO: 1736570 - DNA, 15 bp, Homo sapiens
ctgggtaaaaatttg

SEQ ID NO: 1736571 - DNA, 15 bp, Homo sapiens
tgggtaaaaatttgg

SEQ ID NO: 1736572 - DNA, 15 bp, Homo sapiens
gggtaaaaatttggg

SEQ ID NO: 1736573 - DNA, 15 bp, Homo sapiens
ggtaaaaatttggga

SEQ ID NO: 1736574 - DNA, 15 bp, Homo sapiens
gtaaaaatttgggag

SEQ ID NO: 1736575 - DNA, 15 bp, Homo sapiens
taaaaatttgggagt

SEQ ID NO: 1736576 - DNA, 15 bp, Homo sapiens
aaaaatttgggagtt

SEQ ID NO: 1736577 - DNA, 15 bp, Homo sapiens
aaaatttgggagttg

SEQ ID NO: 1736578 - DNA, 15 bp, Homo sapiens
aaatttgggagttga

SEQ ID NO: 1736579 - DNA, 15 bp, Homo sapiens
aatttgggagttgat

SEQ ID NO: 1736580 - DNA, 15 bp, Homo sapiens
atttgggagttgatt

SEQ ID NO: 1736581 - DNA, 15 bp, Homo sapiens
tttgggagttgattt

SEQ ID NO: 1736582 - DNA, 15 bp, Homo sapiens
ttgggagttgatttt

SEQ ID NO: 1736583 - DNA, 15 bp, Homo sapiens
tgggagttgattttg

SEQ ID NO: 1736584 - DNA, 15 bp, Homo sapiens
gggagttgattttgc

SEQ ID NO: 1736585 - DNA, 15 bp, Homo sapiens
ggagttgattttgct

SEQ ID NO: 1736586 - DNA, 15 bp, Homo sapiens
gagttgattttgcta

SEQ ID NO: 1736587 - DNA, 15 bp, Homo sapiens
agttgattttgctat

SEQ ID NO: 1736588 - DNA, 15 bp, Homo sapiens
gttgattttgctatt

SEQ ID NO: 1736589 - DNA, 15 bp, Homo sapiens
ttgattttgctattc

SEQ ID NO: 1736590 - DNA, 15 bp, Homo sapiens
tgattttgctattca

SEQ ID NO: 1736591 - DNA, 15 bp, Homo sapiens
gattttgctattcat

SEQ ID NO: 1736592 - DNA, 15 bp, Homo sapiens
attttgctattcatt

SEQ ID NO: 1736593 - DNA, 15 bp, Homo sapiens
ttttgctattcatta

SEQ ID NO: 1736594 - DNA, 15 bp, Homo sapiens
tttgctattcattac

SEQ ID NO: 1736595 - DNA, 15 bp, Homo sapiens
ttgctattcattacc

SEQ ID NO: 1736596 - DNA, 15 bp, Homo sapiens
tgctattcattacca

SEQ ID NO: 1736597 - DNA, 15 bp, Homo sapiens
gctattcattaccat

SEQ ID NO: 1736598 - DNA, 15 bp, Homo sapiens
ctattcattaccatc

SEQ ID NO: 1736599 - DNA, 15 bp, Homo sapiens
tattcattaccatct

SEQ ID NO: 1736600 - DNA, 15 bp, Homo sapiens
attcattaccatctt

SEQ ID NO: 1736601 - DNA, 15 bp, Homo sapiens
ttcattaccatctta

SEQ ID NO: 1736602 - DNA, 15 bp, Homo sapiens
tcattaccatcttat

SEQ ID NO: 1736603 - DNA, 15 bp, Homo sapiens
cattaccatcttatt

SEQ ID NO: 1736604 - DNA, 15 bp, Homo sapiens
attaccatcttattt

SEQ ID NO: 1736605 - DNA, 15 bp, Homo sapiens
ttaccatcttattta

SEQ ID NO: 1736606 - DNA, 15 bp, Homo sapiens
taccatcttatttaa

SEQ ID NO: 1736607 - DNA, 15 bp, Homo sapiens
accatcttatttaat

SEQ ID NO: 1736608 - DNA, 15 bp, Homo sapiens
ccatcttatttaatg

SEQ ID NO: 1736609 - DNA, 15 bp, Homo sapiens
catcttatttaatga

SEQ ID NO: 1736610 - DNA, 15 bp, Homo sapiens
atcttatttaatgat

SEQ ID NO: 1736611 - DNA, 15 bp, Homo sapiens
tcttatttaatgatt

SEQ ID NO: 1736612 - DNA, 15 bp, Homo sapiens
cttatttaatgattt

SEQ ID NO: 1736613 - DNA, 15 bp, Homo sapiens
ttatttaatgatttg

SEQ ID NO: 1736614 - DNA, 15 bp, Homo sapiens
tatttaatgatttgg

SEQ ID NO: 1736615 - DNA, 15 bp, Homo sapiens
atttaatgatttgga

SEQ ID NO: 1736616 - DNA, 15 bp, Homo sapiens
tttaatgatttggat

SEQ ID NO: 1736617 - DNA, 15 bp, Homo sapiens
ttaatgatttggata

SEQ ID NO: 1736618 - DNA, 15 bp, Homo sapiens
taatgatttggatat

SEQ ID NO: 1736619 - DNA, 15 bp, Homo sapiens
aatgatttggatatc

SEQ ID NO: 1736620 - DNA, 15 bp, Homo sapiens
atgatttggatatct

SEQ ID NO: 1736621 - DNA, 15 bp, Homo sapiens
tgatttggatatctg

SEQ ID NO: 1736622 - DNA, 15 bp, Homo sapiens
gatttggatatctgg

SEQ ID NO: 1736623 - DNA, 15 bp, Homo sapiens
atttggatatctggt

SEQ ID NO: 1736624 - DNA, 15 bp, Homo sapiens
tttggatatctggtt

SEQ ID NO: 1736625 - DNA, 15 bp, Homo sapiens
ttggatatctggttg

SEQ ID NO: 1736626 - DNA, 15 bp, Homo sapiens
tggatatctggttga

SEQ ID NO: 1736627 - DNA, 15 bp, Homo sapiens
ggatatctggttgac

SEQ ID NO: 1736628 - DNA, 15 bp, Homo sapiens
gatatctggttgact

SEQ ID NO: 1736629 - DNA, 15 bp, Homo sapiens
atatctggttgactc

SEQ ID NO: 1736630 - DNA, 15 bp, Homo sapiens
tatctggttgactcc

SEQ ID NO: 1736631 - DNA, 15 bp, Homo sapiens
atctggttgactcca

SEQ ID NO: 1736632 - DNA, 15 bp, Homo sapiens
tctggttgactccag

SEQ ID NO: 1736633 - DNA, 15 bp, Homo sapiens
ctggttgactccaga

SEQ ID NO: 1736634 - DNA, 15 bp, Homo sapiens
tggttgactccagat

SEQ ID NO: 1736635 - DNA, 15 bp, Homo sapiens
ggttgactccagata

SEQ ID NO: 1736636 - DNA, 15 bp, Homo sapiens
gttgactccagatat

SEQ ID NO: 1736637 - DNA, 15 bp, Homo sapiens
ttgactccagatatc

SEQ ID NO: 1736638 - DNA, 15 bp, Homo sapiens
tgactccagatatca

SEQ ID NO: 1736639 - DNA, 15 bp, Homo sapiens
gactccagatatcat

SEQ ID NO: 1736640 - DNA, 15 bp, Homo sapiens
actccagatatcata

SEQ ID NO: 1736641 - DNA, 15 bp, Homo sapiens
ctccagatatcatag

SEQ ID NO: 1736642 - DNA, 15 bp, Homo sapiens
tccagatatcataga

SEQ ID NO: 1736643 - DNA, 15 bp, Homo sapiens
ccagatatcatagaa

SEQ ID NO: 1736644 - DNA, 15 bp, Homo sapiens
cagatatcatagaag

SEQ ID NO: 1736645 - DNA, 15 bp, Homo sapiens
agatatcatagaagg

SEQ ID NO: 1736646 - DNA, 15 bp, Homo sapiens
gatatcatagaagga

SEQ ID NO: 1736647 - DNA, 15 bp, Homo sapiens
atatcatagaaggag

SEQ ID NO: 1736648 - DNA, 15 bp, Homo sapiens
tatcatagaaggagt

SEQ ID NO: 1736649 - DNA, 15 bp, Homo sapiens
atcatagaaggagtt

SEQ ID NO: 1736650 - DNA, 15 bp, Homo sapiens
tcatagaaggagttg

SEQ ID NO: 1736651 - DNA, 15 bp, Homo sapiens
catagaaggagttgt

SEQ ID NO: 1736652 - DNA, 15 bp, Homo sapiens
atagaaggagttgta

SEQ ID NO: 1736653 - DNA, 15 bp, Homo sapiens
tagaaggagttgtaa

SEQ ID NO: 1736654 - DNA, 15 bp, Homo sapiens
agaaggagttgtaaa

SEQ ID NO: 1736655 - DNA, 15 bp, Homo sapiens
gaaggagttgtaaaa

SEQ ID NO: 1736656 - DNA, 15 bp, Homo sapiens
aaggagttgtaaaat

SEQ ID NO: 1736657 - DNA, 15 bp, Homo sapiens
aggagttgtaaaatt

SEQ ID NO: 1736658 - DNA, 15 bp, Homo sapiens
ggagttgtaaaattc

SEQ ID NO: 1736659 - DNA, 15 bp, Homo sapiens
gagttgtaaaattct

SEQ ID NO: 1736660 - DNA, 15 bp, Homo sapiens
agttgtaaaattctc

SEQ ID NO: 1736661 - DNA, 15 bp, Homo sapiens
gttgtaaaattctca

SEQ ID NO: 1736662 - DNA, 15 bp, Homo sapiens
ttgtaaaattctcag

SEQ ID NO: 1736663 - DNA, 15 bp, Homo sapiens
tgtaaaattctcaga

SEQ ID NO: 1736664 - DNA, 15 bp, Homo sapiens
gtaaaattctcagaa

SEQ ID NO: 1736665 - DNA, 15 bp, Homo sapiens
taaaattctcagaaa

SEQ ID NO: 1736666 - DNA, 15 bp, Homo sapiens
aaaattctcagaaaa

SEQ ID NO: 1736667 - DNA, 15 bp, Homo sapiens
aaattctcagaaaat

SEQ ID NO: 1736668 - DNA, 15 bp, Homo sapiens
aattctcagaaaatt

SEQ ID NO: 1736669 - DNA, 15 bp, Homo sapiens
attctcagaaaattg

SEQ ID NO: 1736670 - DNA, 15 bp, Homo sapiens
ttctcagaaaattgt

SEQ ID NO: 1736671 - DNA, 15 bp, Homo sapiens
tctcagaaaattgtt

SEQ ID NO: 1736672 - DNA, 15 bp, Homo sapiens
ctcagaaaattgttc

SEQ ID NO: 1736673 - DNA, 15 bp, Homo sapiens
tcagaaaattgttca

SEQ ID NO: 1736674 - DNA, 15 bp, Homo sapiens
cagaaaattgttcaa

SEQ ID NO: 1736675 - DNA, 15 bp, Homo sapiens
agaaaattgttcaaa

SEQ ID NO: 1736676 - DNA, 15 bp, Homo sapiens
gaaaattgttcaaat

SEQ ID NO: 1736677 - DNA, 15 bp, Homo sapiens
aaaattgttcaaata

SEQ ID NO: 1736678 - DNA, 15 bp, Homo sapiens
aaattgttcaaatac

SEQ ID NO: 1736679 - DNA, 15 bp, Homo sapiens
aattgttcaaatact

SEQ ID NO: 1736680 - DNA, 15 bp, Homo sapiens
attgttcaaatactc

SEQ ID NO: 1736681 - DNA, 15 bp, Homo sapiens
ttgttcaaatactcg

SEQ ID NO: 1736682 - DNA, 15 bp, Homo sapiens
tgttcaaatactcgt

SEQ ID NO: 1736683 - DNA, 15 bp, Homo sapiens
gttcaaatactcgtt

SEQ ID NO: 1736684 - DNA, 15 bp, Homo sapiens
ttcaaatactcgttt

SEQ ID NO: 1736685 - DNA, 15 bp, Homo sapiens
tcaaatactcgttta

SEQ ID NO: 1736686 - DNA, 15 bp, Homo sapiens
caaatactcgtttaa

SEQ ID NO: 1736687 - DNA, 15 bp, Homo sapiens
aaatactcgtttaaa

SEQ ID NO: 1736688 - DNA, 15 bp, Homo sapiens
aatactcgtttaaat

SEQ ID NO: 1736689 - DNA, 15 bp, Homo sapiens
atactcgtttaaatt

SEQ ID NO: 1736690 - DNA, 15 bp, Homo sapiens
tactcgtttaaattt

SEQ ID NO: 1736691 - DNA, 15 bp, Homo sapiens
actcgtttaaattta

SEQ ID NO: 1736692 - DNA, 15 bp, Homo sapiens
ctcgtttaaatttaa

SEQ ID NO: 1736693 - DNA, 15 bp, Homo sapiens
tcgtttaaatttaaa

SEQ ID NO: 1736694 - DNA, 15 bp, Homo sapiens
cgtttaaatttaaag

SEQ ID NO: 1736695 - DNA, 15 bp, Homo sapiens
gtttaaatttaaaga

SEQ ID NO: 1736696 - DNA, 15 bp, Homo sapiens
tttaaatttaaagaa

SEQ ID NO: 1736697 - DNA, 15 bp, Homo sapiens
ttaaatttaaagaaa

SEQ ID NO: 1736698 - DNA, 15 bp, Homo sapiens
taaatttaaagaaat

SEQ ID NO: 1736699 - DNA, 15 bp, Homo sapiens
aaatttaaagaaata

SEQ ID NO: 1736700 - DNA, 15 bp, Homo sapiens
aatttaaagaaatat

SEQ ID NO: 1736701 - DNA, 15 bp, Homo sapiens
atttaaagaaatatg

SEQ ID NO: 1736702 - DNA, 15 bp, Homo sapiens
tttaaagaaatatgt

SEQ ID NO: 1736703 - DNA, 15 bp, Homo sapiens
ttaaagaaatatgtg

SEQ ID NO: 1736704 - DNA, 15 bp, Homo sapiens
taaagaaatatgtgt

SEQ ID NO: 1736705 - DNA, 15 bp, Homo sapiens
aaagaaatatgtgta

SEQ ID NO: 1736706 - DNA, 15 bp, Homo sapiens
aagaaatatgtgtat

SEQ ID NO: 1736707 - DNA, 15 bp, Homo sapiens
agaaatatgtgtatt

SEQ ID NO: 1736708 - DNA, 15 bp, Homo sapiens
gaaatatgtgtattg

SEQ ID NO: 1736709 - DNA, 15 bp, Homo sapiens
aaatatgtgtattgt

SEQ ID NO: 1736710 - DNA, 15 bp, Homo sapiens
aatatgtgtattgtt

SEQ ID NO: 1736711 - DNA, 15 bp, Homo sapiens
atatgtgtattgttg

SEQ ID NO: 1736712 - DNA, 15 bp, Homo sapiens
tatgtgtattgttgt

SEQ ID NO: 1736713 - DNA, 15 bp, Homo sapiens
atgtgtattgttgtt

SEQ ID NO: 1736714 - DNA, 15 bp, Homo sapiens
tgtgtattgttgttt

SEQ ID NO: 1736715 - DNA, 15 bp, Homo sapiens
gtgtattgttgtttg

SEQ ID NO: 1736716 - DNA, 15 bp, Homo sapiens
tgtattgttgtttga

SEQ ID NO: 1736717 - DNA, 15 bp, Homo sapiens
gtattgttgtttgac

SEQ ID NO: 1736718 - DNA, 15 bp, Homo sapiens
tattgttgtttgact

SEQ ID NO: 1736719 - DNA, 15 bp, Homo sapiens
tgttgtttgactttt

SEQ ID NO: 1736720 - DNA, 15 bp, Homo sapiens
gttgtttgactttta

SEQ ID NO: 1736721 - DNA, 15 bp, Homo sapiens
ttgtttgacttttaa

SEQ ID NO: 1736722 - DNA, 15 bp, Homo sapiens
tgtttgacttttaat

SEQ ID NO: 1736723 - DNA, 15 bp, Homo sapiens
gtttgacttttaata

SEQ ID NO: 1736724 - DNA, 15 bp, Homo sapiens
tttgacttttaatac

SEQ ID NO: 1736725 - DNA, 15 bp, Homo sapiens
ttgacttttaataca

SEQ ID NO: 1736726 - DNA, 15 bp, Homo sapiens
tgacttttaatacag

SEQ ID NO: 1736727 - DNA, 15 bp, Homo sapiens
gacttttaatacagg

SEQ ID NO: 1736728 - DNA, 15 bp, Homo sapiens
acttttaatacaggt

SEQ ID NO: 1736729 - DNA, 15 bp, Homo sapiens
cttttaatacaggtg

SEQ ID NO: 1736730 - DNA, 15 bp, Homo sapiens
ttttaatacaggtga

SEQ ID NO: 1736731 - DNA, 15 bp, Homo sapiens
tttaatacaggtgaa

SEQ ID NO: 1736732 - DNA, 15 bp, Homo sapiens
ttaatacaggtgaag

SEQ ID NO: 1736733 - DNA, 15 bp, Homo sapiens
taatacaggtgaagg

SEQ ID NO: 1736734 - DNA, 15 bp, Homo sapiens
aatacaggtgaagga

SEQ ID NO: 1736735 - DNA, 15 bp, Homo sapiens
atacaggtgaaggaa

SEQ ID NO: 1736736 - DNA, 15 bp, Homo sapiens
tacaggtgaaggaaa

SEQ ID NO: 1736737 - DNA, 15 bp, Homo sapiens
acaggtgaaggaaat

SEQ ID NO: 1736738 - DNA, 15 bp, Homo sapiens
caggtgaaggaaata

SEQ ID NO: 1736739 - DNA, 15 bp, Homo sapiens
aggtgaaggaaatac

SEQ ID NO: 1736740 - DNA, 15 bp, Homo sapiens
ggtgaaggaaataca

SEQ ID NO: 1736741 - DNA, 15 bp, Homo sapiens
gtgaaggaaatacac

SEQ ID NO: 1736742 - DNA, 15 bp, Homo sapiens
tgaaggaaatacaca

SEQ ID NO: 1736743 - DNA, 15 bp, Homo sapiens
gaaggaaatacacag

SEQ ID NO: 1736744 - DNA, 15 bp, Homo sapiens
aaggaaatacacagg

SEQ ID NO: 1736745 - DNA, 15 bp, Homo sapiens
aggaaatacacagga

SEQ ID NO: 1736746 - DNA, 15 bp, Homo sapiens
ggaaatacacaggaa

SEQ ID NO: 1736747 - DNA, 15 bp, Homo sapiens
gaaatacacaggaag

SEQ ID NO: 1736748 - DNA, 15 bp, Homo sapiens
aaatacacaggaagc

SEQ ID NO: 1736749 - DNA, 15 bp, Homo sapiens
aatacacaggaagct

SEQ ID NO: 1736750 - DNA, 15 bp, Homo sapiens
atacacaggaagctt

SEQ ID NO: 1736751 - DNA, 15 bp, Homo sapiens
tacacaggaagcttc

SEQ ID NO: 1736752 - DNA, 15 bp, Homo sapiens
acacaggaagcttct

SEQ ID NO: 1736753 - DNA, 15 bp, Homo sapiens
cacaggaagcttcta

SEQ ID NO: 1736754 - DNA, 15 bp, Homo sapiens
acaggaagcttctaa

SEQ ID NO: 1736755 - DNA, 15 bp, Homo sapiens
caggaagcttctaaa

SEQ ID NO: 1736756 - DNA, 15 bp, Homo sapiens
aggaagcttctaaat

SEQ ID NO: 1736757 - DNA, 15 bp, Homo sapiens
ggaagcttctaaata

SEQ ID NO: 1736758 - DNA, 15 bp, Homo sapiens
gaagcttctaaataa

SEQ ID NO: 1736759 - DNA, 15 bp, Homo sapiens
aagcttctaaataaa

SEQ ID NO: 1736760 - DNA, 15 bp, Homo sapiens
agcttctaaataaag

SEQ ID NO: 1736761 - DNA, 15 bp, Homo sapiens
gcttctaaataaagt

SEQ ID NO: 1736762 - DNA, 15 bp, Homo sapiens
cttctaaataaagta

SEQ ID NO: 1736763 - DNA, 15 bp, Homo sapiens
ttctaaataaagtaa

SEQ ID NO: 1736764 - DNA, 15 bp, Homo sapiens
tctaaataaagtaag

SEQ ID NO: 1736765 - DNA, 15 bp, Homo sapiens
ctaaataaagtaagg

SEQ ID NO: 1736766 - DNA, 15 bp, Homo sapiens
taaataaagtaagga

SEQ ID NO: 1736767 - DNA, 15 bp, Homo sapiens
aaataaagtaaggaa

SEQ ID NO: 1736768 - DNA, 15 bp, Homo sapiens
aataaagtaaggaag

SEQ ID NO: 1736769 - DNA, 15 bp, Homo sapiens
ataaagtaaggaagt

SEQ ID NO: 1736770 - DNA, 15 bp, Homo sapiens
taaagtaaggaagtc

SEQ ID NO: 1736771 - DNA, 15 bp, Homo sapiens
aaagtaaggaagtca

SEQ ID NO: 1736772 - DNA, 15 bp, Homo sapiens
aagtaaggaagtcac

SEQ ID NO: 1736773 - DNA, 15 bp, Homo sapiens
agtaaggaagtcact

SEQ ID NO: 1736774 - DNA, 15 bp, Homo sapiens
gtaaggaagtcactc

SEQ ID NO: 1736775 - DNA, 15 bp, Homo sapiens
taaggaagtcactct

SEQ ID NO: 1736776 - DNA, 15 bp, Homo sapiens
aaggaagtcactcta

SEQ ID NO: 1736777 - DNA, 15 bp, Homo sapiens
aggaagtcactctac

SEQ ID NO: 1736778 - DNA, 15 bp, Homo sapiens
ggaagtcactctact

SEQ ID NO: 1736779 - DNA, 15 bp, Homo sapiens
gaagtcactctactt

SEQ ID NO: 1736780 - DNA, 15 bp, Homo sapiens
aagtcactctacttg

SEQ ID NO: 1736781 - DNA, 15 bp, Homo sapiens
agtcactctacttga

SEQ ID NO: 1736782 - DNA, 15 bp, Homo sapiens
gtcactctacttgag

SEQ ID NO: 1736783 - DNA, 15 bp, Homo sapiens
tcactctacttgaga

SEQ ID NO: 1736784 - DNA, 15 bp, Homo sapiens
cactctacttgagaa

SEQ ID NO: 1736785 - DNA, 15 bp, Homo sapiens
actctacttgagaac

SEQ ID NO: 1736786 - DNA, 15 bp, Homo sapiens
ctctacttgagaaca

SEQ ID NO: 1736787 - DNA, 15 bp, Homo sapiens
tctacttgagaacag

SEQ ID NO: 1736788 - DNA, 15 bp, Homo sapiens
ctacttgagaacagt

SEQ ID NO: 1736789 - DNA, 15 bp, Homo sapiens
tacttgagaacagtg

SEQ ID NO: 1736790 - DNA, 15 bp, Homo sapiens
acttgagaacagtgg

SEQ ID NO: 1736791 - DNA, 15 bp, Homo sapiens
cttgagaacagtgga

SEQ ID NO: 1736792 - DNA, 15 bp, Homo sapiens
ttgagaacagtggaa

SEQ ID NO: 1736793 - DNA, 15 bp, Homo sapiens
tgagaacagtggaaa

SEQ ID NO: 1736794 - DNA, 15 bp, Homo sapiens
gagaacagtggaaat

SEQ ID NO: 1736795 - DNA, 15 bp, Homo sapiens
agaacagtggaaatg

SEQ ID NO: 1736796 - DNA, 15 bp, Homo sapiens
gaacagtggaaatgt

SEQ ID NO: 1736797 - DNA, 15 bp, Homo sapiens
aacagtggaaatgta

SEQ ID NO: 1736798 - DNA, 15 bp, Homo sapiens
acagtggaaatgtaa

SEQ ID NO: 1736799 - DNA, 15 bp, Homo sapiens
cagtggaaatgtaat

SEQ ID NO: 1736800 - DNA, 15 bp, Homo sapiens
agtggaaatgtaatg

SEQ ID NO: 1736801 - DNA, 15 bp, Homo sapiens
gtggaaatgtaatga

SEQ ID NO: 1736802 - DNA, 15 bp, Homo sapiens
tggaaatgtaatgag

SEQ ID NO: 1736803 - DNA, 15 bp, Homo sapiens
ggaaatgtaatgaga

SEQ ID NO: 1736804 - DNA, 15 bp, Homo sapiens
gaaatgtaatgagag

SEQ ID NO: 1736805 - DNA, 15 bp, Homo sapiens
aaatgtaatgagagt

SEQ ID NO: 1736806 - DNA, 15 bp, Homo sapiens
aatgtaatgagagta

SEQ ID NO: 1736807 - DNA, 15 bp, Homo sapiens
atgtaatgagagtat

SEQ ID NO: 1736808 - DNA, 15 bp, Homo sapiens
tgtaatgagagtatc

SEQ ID NO: 1736809 - DNA, 15 bp, Homo sapiens
gtaatgagagtatct

SEQ ID NO: 1736810 - DNA, 15 bp, Homo sapiens
taatgagagtatctc

SEQ ID NO: 1736811 - DNA, 15 bp, Homo sapiens
aatgagagtatctct

SEQ ID NO: 1736812 - DNA, 15 bp, Homo sapiens
atgagagtatctcta

SEQ ID NO: 1736813 - DNA, 15 bp, Homo sapiens
tttaaagtcagatta

SEQ ID NO: 1736814 - DNA, 15 bp, Homo sapiens
ttaaagtcagattaa

SEQ ID NO: 1736815 - DNA, 15 bp, Homo sapiens
taaagtcagattaaa

SEQ ID NO: 1736816 - DNA, 15 bp, Homo sapiens
aaagtcagattaaag

SEQ ID NO: 1736817 - DNA, 15 bp, Homo sapiens
aagtcagattaaagc

SEQ ID NO: 1736818 - DNA, 15 bp, Homo sapiens
agtcagattaaagca

SEQ ID NO: 1736819 - DNA, 15 bp, Homo sapiens
gtcagattaaagcaa

SEQ ID NO: 1736820 - DNA, 15 bp, Homo sapiens
tcagattaaagcaat

SEQ ID NO: 1736821 - DNA, 15 bp, Homo sapiens
cagattaaagcaatg

SEQ ID NO: 1736822 - DNA, 15 bp, Homo sapiens
agattaaagcaatgc

SEQ ID NO: 1736823 - DNA, 15 bp, Homo sapiens
gattaaagcaatgca

SEQ ID NO: 1736824 - DNA, 15 bp, Homo sapiens
attaaagcaatgcaa

SEQ ID NO: 1736825 - DNA, 15 bp, Homo sapiens
ttaaagcaatgcaat

SEQ ID NO: 1736826 - DNA, 15 bp, Homo sapiens
taaagcaatgcaatt

SEQ ID NO: 1736827 - DNA, 15 bp, Homo sapiens
aaagcaatgcaattc

SEQ ID NO: 1736828 - DNA, 15 bp, Homo sapiens
aagcaatgcaattca

SEQ ID NO: 1736829 - DNA, 15 bp, Homo sapiens
agcaatgcaattcac

SEQ ID NO: 1736830 - DNA, 15 bp, Homo sapiens
gcaatgcaattcact

SEQ ID NO: 1736831 - DNA, 15 bp, Homo sapiens
caatgcaattcactt

SEQ ID NO: 1736832 - DNA, 15 bp, Homo sapiens
aatgcaattcactta

SEQ ID NO: 1736833 - DNA, 15 bp, Homo sapiens
atgcaattcacttat

SEQ ID NO: 1736834 - DNA, 15 bp, Homo sapiens
tgcaattcacttatc

SEQ ID NO: 1736835 - DNA, 15 bp, Homo sapiens
gcaattcacttatca

SEQ ID NO: 1736836 - DNA, 15 bp, Homo sapiens
caattcacttatcac

SEQ ID NO: 1736837 - DNA, 15 bp, Homo sapiens
aattcacttatcaca

SEQ ID NO: 1736838 - DNA, 15 bp, Homo sapiens
attcacttatcacac

SEQ ID NO: 1736839 - DNA, 15 bp, Homo sapiens
ttcacttatcacaca

SEQ ID NO: 1736840 - DNA, 15 bp, Homo sapiens
tcacttatcacacat

SEQ ID NO: 1736841 - DNA, 15 bp, Homo sapiens
cacttatcacacatc

SEQ ID NO: 1736842 - DNA, 15 bp, Homo sapiens
acttatcacacatca

SEQ ID NO: 1736843 - DNA, 15 bp, Homo sapiens
cttatcacacatcat

SEQ ID NO: 1736844 - DNA, 15 bp, Homo sapiens
ttatcacacatcatt

SEQ ID NO: 1736845 - DNA, 15 bp, Homo sapiens
tatcacacatcattt

SEQ ID NO: 1736846 - DNA, 15 bp, Homo sapiens
atcacacatcatttc

SEQ ID NO: 1736847 - DNA, 15 bp, Homo sapiens
tcacacatcatttct

SEQ ID NO: 1736848 - DNA, 15 bp, Homo sapiens
cacacatcatttctc

SEQ ID NO: 1736849 - DNA, 15 bp, Homo sapiens
acacatcatttctct

SEQ ID NO: 1736850 - DNA, 15 bp, Homo sapiens
cacatcatttctctt

SEQ ID NO: 1736851 - DNA, 15 bp, Homo sapiens
acatcatttctcttt

SEQ ID NO: 1736852 - DNA, 15 bp, Homo sapiens
catcatttctctttt

SEQ ID NO: 1736853 - DNA, 15 bp, Homo sapiens
atcatttctcttttg

SEQ ID NO: 1736854 - DNA, 15 bp, Homo sapiens
tcatttctcttttgg

SEQ ID NO: 1736855 - DNA, 15 bp, Homo sapiens
catttctcttttgga

SEQ ID NO: 1736856 - DNA, 15 bp, Homo sapiens
atttctcttttggac

SEQ ID NO: 1736857 - DNA, 15 bp, Homo sapiens
tttctcttttggacc

SEQ ID NO: 1736858 - DNA, 15 bp, Homo sapiens
ttctcttttggacca

SEQ ID NO: 1736859 - DNA, 15 bp, Homo sapiens
tctcttttggaccaa

SEQ ID NO: 1736860 - DNA, 15 bp, Homo sapiens
ctcttttggaccaat

SEQ ID NO: 1736861 - DNA, 15 bp, Homo sapiens
tcttttggaccaatt

SEQ ID NO: 1736862 - DNA, 15 bp, Homo sapiens
cttttggaccaattt

SEQ ID NO: 1736863 - DNA, 15 bp, Homo sapiens
ttttggaccaatttt

SEQ ID NO: 1736864 - DNA, 15 bp, Homo sapiens
tttggaccaatttta

SEQ ID NO: 1736865 - DNA, 15 bp, Homo sapiens
ttggaccaattttat

SEQ ID NO: 1736866 - DNA, 15 bp, Homo sapiens
tggaccaattttatt

SEQ ID NO: 1736867 - DNA, 15 bp, Homo sapiens
ggaccaattttatta

SEQ ID NO: 1736868 - DNA, 15 bp, Homo sapiens
gaccaattttattag

SEQ ID NO: 1736869 - DNA, 15 bp, Homo sapiens
accaattttattagt

SEQ ID NO: 1736870 - DNA, 15 bp, Homo sapiens
ccaattttattagtt

SEQ ID NO: 1736871 - DNA, 15 bp, Homo sapiens
caattttattagttc

SEQ ID NO: 1736872 - DNA, 15 bp, Homo sapiens
aattttattagttct

SEQ ID NO: 1736873 - DNA, 15 bp, Homo sapiens
attttattagttctg

SEQ ID NO: 1736874 - DNA, 15 bp, Homo sapiens
ttttattagttctgt

SEQ ID NO: 1736875 - DNA, 15 bp, Homo sapiens
tttattagttctgtt

SEQ ID NO: 1736876 - DNA, 15 bp, Homo sapiens
ttattagttctgttt

SEQ ID NO: 1736877 - DNA, 15 bp, Homo sapiens
tattagttctgtttt

SEQ ID NO: 1736878 - DNA, 15 bp, Homo sapiens
attagttctgttttt

SEQ ID NO: 1736879 - DNA, 15 bp, Homo sapiens
ttagttctgtttttg

SEQ ID NO: 1736880 - DNA, 15 bp, Homo sapiens
tagttctgtttttgt

SEQ ID NO: 1736881 - DNA, 15 bp, Homo sapiens
agttctgtttttgtt

SEQ ID NO: 1736882 - DNA, 15 bp, Homo sapiens
gttctgtttttgttt

SEQ ID NO: 1736883 - DNA, 15 bp, Homo sapiens
ttctgtttttgtttt

SEQ ID NO: 1736884 - DNA, 15 bp, Homo sapiens
tctgtttttgttttt

SEQ ID NO: 1736885 - DNA, 15 bp, Homo sapiens
ctgtttttgttttta

SEQ ID NO: 1736886 - DNA, 15 bp, Homo sapiens
tgtttttgtttttac

SEQ ID NO: 1736887 - DNA, 15 bp, Homo sapiens
gtttttgtttttact

SEQ ID NO: 1736888 - DNA, 15 bp, Homo sapiens
tttttgtttttacta

SEQ ID NO: 1736889 - DNA, 15 bp, Homo sapiens
ttttgtttttactaa

SEQ ID NO: 1736890 - DNA, 15 bp, Homo sapiens
tttgtttttactaat

SEQ ID NO: 1736891 - DNA, 15 bp, Homo sapiens
ttgtttttactaata

SEQ ID NO: 1736892 - DNA, 15 bp, Homo sapiens
tgtttttactaatac

SEQ ID NO: 1736893 - DNA, 15 bp, Homo sapiens
gtttttactaatacc

SEQ ID NO: 1736894 - DNA, 15 bp, Homo sapiens
tttttactaatacca

SEQ ID NO: 1736895 - DNA, 15 bp, Homo sapiens
ttttactaataccag

SEQ ID NO: 1736896 - DNA, 15 bp, Homo sapiens
tttactaataccaga

SEQ ID NO: 1736897 - DNA, 15 bp, Homo sapiens
ttactaataccagaa

SEQ ID NO: 1736898 - DNA, 15 bp, Homo sapiens
tactaataccagaat

SEQ ID NO: 1736899 - DNA, 15 bp, Homo sapiens
actaataccagaata

SEQ ID NO: 1736900 - DNA, 15 bp, Homo sapiens
ctaataccagaataa

SEQ ID NO: 1736901 - DNA, 15 bp, Homo sapiens
taataccagaataat

SEQ ID NO: 1736902 - DNA, 15 bp, Homo sapiens
aataccagaataatt

SEQ ID NO: 1736903 - DNA, 15 bp, Homo sapiens
ataccagaataattc

SEQ ID NO: 1736904 - DNA, 15 bp, Homo sapiens
taccagaataattcc

SEQ ID NO: 1736905 - DNA, 15 bp, Homo sapiens
accagaataattccc

SEQ ID NO: 1736906 - DNA, 15 bp, Homo sapiens
ccagaataattccca

SEQ ID NO: 1736907 - DNA, 15 bp, Homo sapiens
cagaataattcccaa

SEQ ID NO: 1736908 - DNA, 15 bp, Homo sapiens
agaataattcccaac

SEQ ID NO: 1736909 - DNA, 15 bp, Homo sapiens
gaataattcccaact

SEQ ID NO: 1736910 - DNA, 15 bp, Homo sapiens
aataattcccaactt

SEQ ID NO: 1736911 - DNA, 15 bp, Homo sapiens
ataattcccaacttt

SEQ ID NO: 1736912 - DNA, 15 bp, Homo sapiens
taattcccaactttc

SEQ ID NO: 1736913 - DNA, 15 bp, Homo sapiens
aattcccaactttct

SEQ ID NO: 1736914 - DNA, 15 bp, Homo sapiens
attcccaactttctt

SEQ ID NO: 1736915 - DNA, 15 bp, Homo sapiens
ttcccaactttctta

SEQ ID NO: 1736916 - DNA, 15 bp, Homo sapiens
tcccaactttcttat

SEQ ID NO: 1736917 - DNA, 15 bp, Homo sapiens
cccaactttcttatt

SEQ ID NO: 1736918 - DNA, 15 bp, Homo sapiens
ccaactttcttattt

SEQ ID NO: 1736919 - DNA, 15 bp, Homo sapiens
caactttcttatttg

SEQ ID NO: 1736920 - DNA, 15 bp, Homo sapiens
aactttcttatttgg

SEQ ID NO: 1736921 - DNA, 15 bp, Homo sapiens
actttcttatttgga

SEQ ID NO: 1736922 - DNA, 15 bp, Homo sapiens
ctttcttatttggag

SEQ ID NO: 1736923 - DNA, 15 bp, Homo sapiens
tttcttatttggagc

SEQ ID NO: 1736924 - DNA, 15 bp, Homo sapiens
ttcttatttggagca

SEQ ID NO: 1736925 - DNA, 15 bp, Homo sapiens
tcttatttggagcag

SEQ ID NO: 1736926 - DNA, 15 bp, Homo sapiens
cttatttggagcagt

SEQ ID NO: 1736927 - DNA, 15 bp, Homo sapiens
ttatttggagcagtt

SEQ ID NO: 1736928 - DNA, 15 bp, Homo sapiens
tatttggagcagttt

SEQ ID NO: 1736929 - DNA, 15 bp, Homo sapiens
atttggagcagtttg

SEQ ID NO: 1736930 - DNA, 15 bp, Homo sapiens
tttggagcagtttgc

SEQ ID NO: 1736931 - DNA, 15 bp, Homo sapiens
ttggagcagtttgct

SEQ ID NO: 1736932 - DNA, 15 bp, Homo sapiens
tggagcagtttgctt

SEQ ID NO: 1736933 - DNA, 15 bp, Homo sapiens
ggagcagtttgcttt

SEQ ID NO: 1736934 - DNA, 15 bp, Homo sapiens
gagcagtttgctttt

SEQ ID NO: 1736935 - DNA, 15 bp, Homo sapiens
agcagtttgcttttt

SEQ ID NO: 1736936 - DNA, 15 bp, Homo sapiens
gcagtttgctttttt

SEQ ID NO: 1736937 - DNA, 15 bp, Homo sapiens
cagtttgcttttttt

SEQ ID NO: 1736938 - DNA, 15 bp, Homo sapiens
agtttgctttttttt

SEQ ID NO: 1736939 - DNA, 15 bp, Homo sapiens
gtttgcttttttttt

SEQ ID NO: 1736940 - DNA, 15 bp, Homo sapiens
tttgctttttttttt

SEQ ID NO: 1736941 - DNA, 15 bp, Homo sapiens
ttgcttttttttttt

SEQ ID NO: 1736942 - DNA, 15 bp, Homo sapiens
tttttttttaacttg

SEQ ID NO: 1736943 - DNA, 15 bp, Homo sapiens
ttttttttaacttgt

SEQ ID NO: 1736944 - DNA, 15 bp, Homo sapiens
tttttttaacttgtg

SEQ ID NO: 1736945 - DNA, 15 bp, Homo sapiens
ttttttaacttgtgc

SEQ ID NO: 1736946 - DNA, 15 bp, Homo sapiens
tttttaacttgtgcc

SEQ ID NO: 1736947 - DNA, 15 bp, Homo sapiens
ttttaacttgtgcct

SEQ ID NO: 1736948 - DNA, 15 bp, Homo sapiens
tttaacttgtgccta

SEQ ID NO: 1736949 - DNA, 15 bp, Homo sapiens
ttaacttgtgcctaa

SEQ ID NO: 1736950 - DNA, 15 bp, Homo sapiens
taacttgtgcctaat

SEQ ID NO: 1736951 - DNA, 15 bp, Homo sapiens
aacttgtgcctaatt

SEQ ID NO: 1736952 - DNA, 15 bp, Homo sapiens
acttgtgcctaatta

SEQ ID NO: 1736953 - DNA, 15 bp, Homo sapiens
cttgtgcctaattat

SEQ ID NO: 1736954 - DNA, 15 bp, Homo sapiens
ttgtgcctaattatg

SEQ ID NO: 1736955 - DNA, 15 bp, Homo sapiens
tgtgcctaattatga

SEQ ID NO: 1736956 - DNA, 15 bp, Homo sapiens
gtgcctaattatgaa

SEQ ID NO: 1736957 - DNA, 15 bp, Homo sapiens
tgcctaattatgaaa

SEQ ID NO: 1736958 - DNA, 15 bp, Homo sapiens
gcctaattatgaaac

SEQ ID NO: 1736959 - DNA, 15 bp, Homo sapiens
cctaattatgaaact

SEQ ID NO: 1736960 - DNA, 15 bp, Homo sapiens
ctaattatgaaactg

SEQ ID NO: 1736961 - DNA, 15 bp, Homo sapiens
taattatgaaactga

SEQ ID NO: 1736962 - DNA, 15 bp, Homo sapiens
aattatgaaactgaa

SEQ ID NO: 1736963 - DNA, 15 bp, Homo sapiens
attatgaaactgaat

SEQ ID NO: 1736964 - DNA, 15 bp, Homo sapiens
ttatgaaactgaatg

SEQ ID NO: 1736965 - DNA, 15 bp, Homo sapiens
tatgaaactgaatgg

SEQ ID NO: 1736966 - DNA, 15 bp, Homo sapiens
atgaaactgaatggc

SEQ ID NO: 1736967 - DNA, 15 bp, Homo sapiens
tgaaactgaatggct

SEQ ID NO: 1736968 - DNA, 15 bp, Homo sapiens
gaaactgaatggctt

SEQ ID NO: 1736969 - DNA, 15 bp, Homo sapiens
aaactgaatggcttt

SEQ ID NO: 1736970 - DNA, 15 bp, Homo sapiens
aactgaatggcttta

SEQ ID NO: 1736971 - DNA, 15 bp, Homo sapiens
actgaatggctttaa

SEQ ID NO: 1736972 - DNA, 15 bp, Homo sapiens
ctgaatggctttaag

SEQ ID NO: 1736973 - DNA, 15 bp, Homo sapiens
tgaatggctttaagc

SEQ ID NO: 1736974 - DNA, 15 bp, Homo sapiens
gaatggctttaagct

SEQ ID NO: 1736975 - DNA, 15 bp, Homo sapiens
aatggctttaagctg

SEQ ID NO: 1736976 - DNA, 15 bp, Homo sapiens
atggctttaagctgg

SEQ ID NO: 1736977 - DNA, 15 bp, Homo sapiens
tggctttaagctgga

SEQ ID NO: 1736978 - DNA, 15 bp, Homo sapiens
ggctttaagctggac

SEQ ID NO: 1736979 - DNA, 15 bp, Homo sapiens
gctttaagctggaca

SEQ ID NO: 1736980 - DNA, 15 bp, Homo sapiens
ctttaagctggacat

SEQ ID NO: 1736981 - DNA, 15 bp, Homo sapiens
tttaagctggacatg

SEQ ID NO: 1736982 - DNA, 15 bp, Homo sapiens
ttaagctggacatgg

SEQ ID NO: 1736983 - DNA, 15 bp, Homo sapiens
taagctggacatggc

SEQ ID NO: 1736984 - DNA, 15 bp, Homo sapiens
aagctggacatggca

SEQ ID NO: 1736985 - DNA, 15 bp, Homo sapiens
agctggacatggcag

SEQ ID NO: 1736986 - DNA, 15 bp, Homo sapiens
gctggacatggcaga

SEQ ID NO: 1736987 - DNA, 15 bp, Homo sapiens
ctggacatggcagag

SEQ ID NO: 1736988 - DNA, 15 bp, Homo sapiens
tggacatggcagaga

SEQ ID NO: 1736989 - DNA, 15 bp, Homo sapiens
ggacatggcagagag

SEQ ID NO: 1736990 - DNA, 15 bp, Homo sapiens
gacatggcagagagg

SEQ ID NO: 1736991 - DNA, 15 bp, Homo sapiens
acatggcagagaggt

SEQ ID NO: 1736992 - DNA, 15 bp, Homo sapiens
catggcagagaggtg

SEQ ID NO: 1736993 - DNA, 15 bp, Homo sapiens
atggcagagaggtgc

SEQ ID NO: 1736994 - DNA, 15 bp, Homo sapiens
tggcagagaggtgcc

SEQ ID NO: 1736995 - DNA, 15 bp, Homo sapiens
ggcagagaggtgcca

SEQ ID NO: 1736996 - DNA, 15 bp, Homo sapiens
gcagagaggtgccaa

SEQ ID NO: 1736997 - DNA, 15 bp, Homo sapiens
cagagaggtgccaaa

SEQ ID NO: 1736998 - DNA, 15 bp, Homo sapiens
agagaggtgccaaat

SEQ ID NO: 1736999 - DNA, 15 bp, Homo sapiens
gagaggtgccaaatt

SEQ ID NO: 1737000 - DNA, 15 bp, Homo sapiens
agaggtgccaaattc

SEQ ID NO: 1737001 - DNA, 15 bp, Homo sapiens
gaggtgccaaattca

SEQ ID NO: 1737002 - DNA, 15 bp, Homo sapiens
aggtgccaaattcaa

SEQ ID NO: 1737003 - DNA, 15 bp, Homo sapiens
ggtgccaaattcaag

SEQ ID NO: 1737004 - DNA, 15 bp, Homo sapiens
gtgccaaattcaagg

SEQ ID NO: 1737005 - DNA, 15 bp, Homo sapiens
tgccaaattcaaggt

SEQ ID NO: 1737006 - DNA, 15 bp, Homo sapiens
gccaaattcaaggtc

SEQ ID NO: 1737007 - DNA, 15 bp, Homo sapiens
ccaaattcaaggtct

SEQ ID NO: 1737008 - DNA, 15 bp, Homo sapiens
caaattcaaggtctc

SEQ ID NO: 1737009 - DNA, 15 bp, Homo sapiens
aaattcaaggtctct

SEQ ID NO: 1737010 - DNA, 15 bp, Homo sapiens
aattcaaggtctctc

SEQ ID NO: 1737011 - DNA, 15 bp, Homo sapiens
attcaaggtctctct

SEQ ID NO: 1737012 - DNA, 15 bp, Homo sapiens
ttcaaggtctctctg

SEQ ID NO: 1737013 - DNA, 15 bp, Homo sapiens
tcaaggtctctctgg

SEQ ID NO: 1737014 - DNA, 15 bp, Homo sapiens
caaggtctctctggg

SEQ ID NO: 1737015 - DNA, 15 bp, Homo sapiens
aaggtctctctgggg

SEQ ID NO: 1737016 - DNA, 15 bp, Homo sapiens
aggtctctctgggga

SEQ ID NO: 1737017 - DNA, 15 bp, Homo sapiens
ggtctctctggggaa

SEQ ID NO: 1737018 - DNA, 15 bp, Homo sapiens
gtctctctggggaat

SEQ ID NO: 1737019 - DNA, 15 bp, Homo sapiens
tctctctggggaatg

SEQ ID NO: 1737020 - DNA, 15 bp, Homo sapiens
ctctctggggaatgg

SEQ ID NO: 1737021 - DNA, 15 bp, Homo sapiens
tctctggggaatggc

SEQ ID NO: 1737022 - DNA, 15 bp, Homo sapiens
ctctggggaatggca

SEQ ID NO: 1737023 - DNA, 15 bp, Homo sapiens
tctggggaatggcac

SEQ ID NO: 1737024 - DNA, 15 bp, Homo sapiens
ctggggaatggcaca

SEQ ID NO: 1737025 - DNA, 15 bp, Homo sapiens
tggggaatggcacaa

SEQ ID NO: 1737026 - DNA, 15 bp, Homo sapiens
ggggaatggcacaag

SEQ ID NO: 1737027 - DNA, 15 bp, Homo sapiens
gggaatggcacaagc

SEQ ID NO: 1737028 - DNA, 15 bp, Homo sapiens
ggaatggcacaagca

SEQ ID NO: 1737029 - DNA, 15 bp, Homo sapiens
gaatggcacaagcaa

SEQ ID NO: 1737030 - DNA, 15 bp, Homo sapiens
aatggcacaagcaag

SEQ ID NO: 1737031 - DNA, 15 bp, Homo sapiens
atggcacaagcaagt

SEQ ID NO: 1737032 - DNA, 15 bp, Homo sapiens
tggcacaagcaagtc

SEQ ID NO: 1737033 - DNA, 15 bp, Homo sapiens
ggcacaagcaagtca

SEQ ID NO: 1737034 - DNA, 15 bp, Homo sapiens
gcacaagcaagtcac

SEQ ID NO: 1737035 - DNA, 15 bp, Homo sapiens
cacaagcaagtcact

SEQ ID NO: 1737036 - DNA, 15 bp, Homo sapiens
acaagcaagtcactt

SEQ ID NO: 1737037 - DNA, 15 bp, Homo sapiens
caagcaagtcactta

SEQ ID NO: 1737038 - DNA, 15 bp, Homo sapiens
aagcaagtcacttac

SEQ ID NO: 1737039 - DNA, 15 bp, Homo sapiens
agcaagtcacttaca

SEQ ID NO: 1737040 - DNA, 15 bp, Homo sapiens
gcaagtcacttacag

SEQ ID NO: 1737041 - DNA, 15 bp, Homo sapiens
caagtcacttacaga

SEQ ID NO: 1737042 - DNA, 15 bp, Homo sapiens
aagtcacttacagaa

SEQ ID NO: 1737043 - DNA, 15 bp, Homo sapiens
agtcacttacagaac

SEQ ID NO: 1737044 - DNA, 15 bp, Homo sapiens
gtcacttacagaact

SEQ ID NO: 1737045 - DNA, 15 bp, Homo sapiens
tcacttacagaactg

SEQ ID NO: 1737046 - DNA, 15 bp, Homo sapiens
cacttacagaactgt

SEQ ID NO: 1737047 - DNA, 15 bp, Homo sapiens
acttacagaactgtg

SEQ ID NO: 1737048 - DNA, 15 bp, Homo sapiens
cttacagaactgtgg

SEQ ID NO: 1737049 - DNA, 15 bp, Homo sapiens
ttacagaactgtggt

SEQ ID NO: 1737050 - DNA, 15 bp, Homo sapiens
tacagaactgtggtt

SEQ ID NO: 1737051 - DNA, 15 bp, Homo sapiens
acagaactgtggttg

SEQ ID NO: 1737052 - DNA, 15 bp, Homo sapiens
cagaactgtggttga

SEQ ID NO: 1737053 - DNA, 15 bp, Homo sapiens
agaactgtggttgac

SEQ ID NO: 1737054 - DNA, 15 bp, Homo sapiens
gaactgtggttgaca

SEQ ID NO: 1737055 - DNA, 15 bp, Homo sapiens
aactgtggttgacac

SEQ ID NO: 1737056 - DNA, 15 bp, Homo sapiens
actgtggttgacaca

SEQ ID NO: 1737057 - DNA, 15 bp, Homo sapiens
ctgtggttgacacag

SEQ ID NO: 1737058 - DNA, 15 bp, Homo sapiens
tgtggttgacacaga

SEQ ID NO: 1737059 - DNA, 15 bp, Homo sapiens
gtggttgacacagag

SEQ ID NO: 1737060 - DNA, 15 bp, Homo sapiens
tggttgacacagaga

SEQ ID NO: 1737061 - DNA, 15 bp, Homo sapiens
ggttgacacagagat

SEQ ID NO: 1737062 - DNA, 15 bp, Homo sapiens
gttgacacagagata

SEQ ID NO: 1737063 - DNA, 15 bp, Homo sapiens
ttgacacagagataa

SEQ ID NO: 1737064 - DNA, 15 bp, Homo sapiens
tgacacagagataaa

SEQ ID NO: 1737065 - DNA, 15 bp, Homo sapiens
gacacagagataaac

SEQ ID NO: 1737066 - DNA, 15 bp, Homo sapiens
acacagagataaact

SEQ ID NO: 1737067 - DNA, 15 bp, Homo sapiens
cacagagataaactc

SEQ ID NO: 1737068 - DNA, 15 bp, Homo sapiens
acagagataaactcg

SEQ ID NO: 1737069 - DNA, 15 bp, Homo sapiens
cagagataaactcgc

SEQ ID NO: 1737070 - DNA, 15 bp, Homo sapiens
agagataaactcgcg

SEQ ID NO: 1737071 - DNA, 15 bp, Homo sapiens
gagataaactcgcga

SEQ ID NO: 1737072 - DNA, 15 bp, Homo sapiens
agataaactcgcgag

SEQ ID NO: 1737073 - DNA, 15 bp, Homo sapiens
gataaactcgcgaga

SEQ ID NO: 1737074 - DNA, 15 bp, Homo sapiens
ataaactcgcgagag

SEQ ID NO: 1737075 - DNA, 15 bp, Homo sapiens
taaactcgcgagagt

SEQ ID NO: 1737076 - DNA, 15 bp, Homo sapiens
aaactcgcgagagtt

SEQ ID NO: 1737077 - DNA, 15 bp, Homo sapiens
aactcgcgagagttg

SEQ ID NO: 1737078 - DNA, 15 bp, Homo sapiens
actcgcgagagttgc

SEQ ID NO: 1737079 - DNA, 15 bp, Homo sapiens
ctcgcgagagttgcc

SEQ ID NO: 1737080 - DNA, 15 bp, Homo sapiens
tcgcgagagttgcca

SEQ ID NO: 1737081 - DNA, 15 bp, Homo sapiens
cgcgagagttgccaa

SEQ ID NO: 1737082 - DNA, 15 bp, Homo sapiens
gcgagagttgccaac

SEQ ID NO: 1737083 - DNA, 15 bp, Homo sapiens
cgagagttgccaact

SEQ ID NO: 1737084 - DNA, 15 bp, Homo sapiens
gagagttgccaactt

SEQ ID NO: 1737085 - DNA, 15 bp, Homo sapiens
agagttgccaacttt

SEQ ID NO: 1737086 - DNA, 15 bp, Homo sapiens
gagttgccaactttg

SEQ ID NO: 1737087 - DNA, 15 bp, Homo sapiens
agttgccaactttgt

SEQ ID NO: 1737088 - DNA, 15 bp, Homo sapiens
gttgccaactttgtt

SEQ ID NO: 1737089 - DNA, 15 bp, Homo sapiens
ttgccaactttgttt

SEQ ID NO: 1737090 - DNA, 15 bp, Homo sapiens
tgccaactttgtttt

SEQ ID NO: 1737091 - DNA, 15 bp, Homo sapiens
gccaactttgttttg

SEQ ID NO: 1737092 - DNA, 15 bp, Homo sapiens
ccaactttgttttgg

SEQ ID NO: 1737093 - DNA, 15 bp, Homo sapiens
caactttgttttggt

SEQ ID NO: 1737094 - DNA, 15 bp, Homo sapiens
aactttgttttggta

SEQ ID NO: 1737095 - DNA, 15 bp, Homo sapiens
actttgttttggtag

SEQ ID NO: 1737096 - DNA, 15 bp, Homo sapiens
ctttgttttggtagc

SEQ ID NO: 1737097 - DNA, 15 bp, Homo sapiens
tttgttttggtagcc

SEQ ID NO: 1737098 - DNA, 15 bp, Homo sapiens
ttgttttggtagcct

SEQ ID NO: 1737099 - DNA, 15 bp, Homo sapiens
tgttttggtagcctc

SEQ ID NO: 1737100 - DNA, 15 bp, Homo sapiens
gttttggtagcctcc

SEQ ID NO: 1737101 - DNA, 15 bp, Homo sapiens
ttttggtagcctccg

SEQ ID NO: 1737102 - DNA, 15 bp, Homo sapiens
tttggtagcctccga

SEQ ID NO: 1737103 - DNA, 15 bp, Homo sapiens
ttggtagcctccgaa

SEQ ID NO: 1737104 - DNA, 15 bp, Homo sapiens
tggtagcctccgaat

SEQ ID NO: 1737105 - DNA, 15 bp, Homo sapiens
ggtagcctccgaatt

SEQ ID NO: 1737106 - DNA, 15 bp, Homo sapiens
gtagcctccgaatta

SEQ ID NO: 1737107 - DNA, 15 bp, Homo sapiens
tagcctccgaattat

SEQ ID NO: 1737108 - DNA, 15 bp, Homo sapiens
agcctccgaattata

SEQ ID NO: 1737109 - DNA, 15 bp, Homo sapiens
gcctccgaattataa

SEQ ID NO: 1737110 - DNA, 15 bp, Homo sapiens
cctccgaattataaa

SEQ ID NO: 1737111 - DNA, 15 bp, Homo sapiens
ctccgaattataaac

SEQ ID NO: 1737112 - DNA, 15 bp, Homo sapiens
tccgaattataaaca

SEQ ID NO: 1737113 - DNA, 15 bp, Homo sapiens
ccgaattataaacac

SEQ ID NO: 1737114 - DNA, 15 bp, Homo sapiens
cgaattataaacact

SEQ ID NO: 1737115 - DNA, 15 bp, Homo sapiens
gaattataaacactc

SEQ ID NO: 1737116 - DNA, 15 bp, Homo sapiens
aattataaacactcc

SEQ ID NO: 1737117 - DNA, 15 bp, Homo sapiens
attataaacactcct

SEQ ID NO: 1737118 - DNA, 15 bp, Homo sapiens
ttataaacactcctg

SEQ ID NO: 1737119 - DNA, 15 bp, Homo sapiens
tataaacactcctgt

SEQ ID NO: 1737120 - DNA, 15 bp, Homo sapiens
ataaacactcctgtt

SEQ ID NO: 1737121 - DNA, 15 bp, Homo sapiens
taaacactcctgtta

SEQ ID NO: 1737122 - DNA, 15 bp, Homo sapiens
aaacactcctgttat

SEQ ID NO: 1737123 - DNA, 15 bp, Homo sapiens
aacactcctgttatg

SEQ ID NO: 1737124 - DNA, 15 bp, Homo sapiens
acactcctgttatga

SEQ ID NO: 1737125 - DNA, 15 bp, Homo sapiens
cactcctgttatgat

SEQ ID NO: 1737126 - DNA, 15 bp, Homo sapiens
actcctgttatgatg

SEQ ID NO: 1737127 - DNA, 15 bp, Homo sapiens
ctcctgttatgatgc

SEQ ID NO: 1737128 - DNA, 15 bp, Homo sapiens
tcctgttatgatgct

SEQ ID NO: 1737129 - DNA, 15 bp, Homo sapiens
cctgttatgatgctt

SEQ ID NO: 1737130 - DNA, 15 bp, Homo sapiens
ctgttatgatgcttg

SEQ ID NO: 1737131 - DNA, 15 bp, Homo sapiens
tgttatgatgcttgg

SEQ ID NO: 1737132 - DNA, 15 bp, Homo sapiens
gttatgatgcttggt

SEQ ID NO: 1737133 - DNA, 15 bp, Homo sapiens
ttatgatgcttggta

SEQ ID NO: 1737134 - DNA, 15 bp, Homo sapiens
tatgatgcttggtac

SEQ ID NO: 1737135 - DNA, 15 bp, Homo sapiens
atgatgcttggtacc

SEQ ID NO: 1737136 - DNA, 15 bp, Homo sapiens
tgatgcttggtaccc

SEQ ID NO: 1737137 - DNA, 15 bp, Homo sapiens
gatgcttggtaccct

SEQ ID NO: 1737138 - DNA, 15 bp, Homo sapiens
atgcttggtaccctg

SEQ ID NO: 1737139 - DNA, 15 bp, Homo sapiens
tgcttggtaccctgt

SEQ ID NO: 1737140 - DNA, 15 bp, Homo sapiens
gcttggtaccctgta

SEQ ID NO: 1737141 - DNA, 15 bp, Homo sapiens
cttggtaccctgtag

SEQ ID NO: 1737142 - DNA, 15 bp, Homo sapiens
ttggtaccctgtagc

SEQ ID NO: 1737143 - DNA, 15 bp, Homo sapiens
tggtaccctgtagcc

SEQ ID NO: 1737144 - DNA, 15 bp, Homo sapiens
ggtaccctgtagcca

SEQ ID NO: 1737145 - DNA, 15 bp, Homo sapiens
gtaccctgtagccat

SEQ ID NO: 1737146 - DNA, 15 bp, Homo sapiens
taccctgtagccatg

SEQ ID NO: 1737147 - DNA, 15 bp, Homo sapiens
accctgtagccatgt

SEQ ID NO: 1737148 - DNA, 15 bp, Homo sapiens
ccctgtagccatgtt

SEQ ID NO: 1737149 - DNA, 15 bp, Homo sapiens
cctgtagccatgttt

SEQ ID NO: 1737150 - DNA, 15 bp, Homo sapiens
ctgtagccatgtttc

SEQ ID NO: 1737151 - DNA, 15 bp, Homo sapiens
tgtagccatgtttct

SEQ ID NO: 1737152 - DNA, 15 bp, Homo sapiens
gtagccatgtttctc

SEQ ID NO: 1737153 - DNA, 15 bp, Homo sapiens
tagccatgtttctca

SEQ ID NO: 1737154 - DNA, 15 bp, Homo sapiens
agccatgtttctcat

SEQ ID NO: 1737155 - DNA, 15 bp, Homo sapiens
gccatgtttctcatt

SEQ ID NO: 1737156 - DNA, 15 bp, Homo sapiens
ccatgtttctcatta

SEQ ID NO: 1737157 - DNA, 15 bp, Homo sapiens
catgtttctcattag

SEQ ID NO: 1737158 - DNA, 15 bp, Homo sapiens
atgtttctcattagg

SEQ ID NO: 1737159 - DNA, 15 bp, Homo sapiens
tgtttctcattaggc

SEQ ID NO: 1737160 - DNA, 15 bp, Homo sapiens
gtttctcattaggct

SEQ ID NO: 1737161 - DNA, 15 bp, Homo sapiens
tttctcattaggctt

SEQ ID NO: 1737162 - DNA, 15 bp, Homo sapiens
ttctcattaggctta

SEQ ID NO: 1737163 - DNA, 15 bp, Homo sapiens
tctcattaggcttac

SEQ ID NO: 1737164 - DNA, 15 bp, Homo sapiens
ctcattaggcttact

SEQ ID NO: 1737165 - DNA, 15 bp, Homo sapiens
tcattaggcttactg

SEQ ID NO: 1737166 - DNA, 15 bp, Homo sapiens
cattaggcttactgg

SEQ ID NO: 1737167 - DNA, 15 bp, Homo sapiens
attaggcttactgga

SEQ ID NO: 1737168 - DNA, 15 bp, Homo sapiens
ttaggcttactggat

SEQ ID NO: 1737169 - DNA, 15 bp, Homo sapiens
taggcttactggatg

SEQ ID NO: 1737170 - DNA, 15 bp, Homo sapiens
aggcttactggatgc

SEQ ID NO: 1737171 - DNA, 15 bp, Homo sapiens
ggcttactggatgct

SEQ ID NO: 1737172 - DNA, 15 bp, Homo sapiens
gcttactggatgcta

SEQ ID NO: 1737173 - DNA, 15 bp, Homo sapiens
cttactggatgctat

SEQ ID NO: 1737174 - DNA, 15 bp, Homo sapiens
ttactggatgctatg

SEQ ID NO: 1737175 - DNA, 15 bp, Homo sapiens
tactggatgctatgg

SEQ ID NO: 1737176 - DNA, 15 bp, Homo sapiens
actggatgctatgga

SEQ ID NO: 1737177 - DNA, 15 bp, Homo sapiens
ctggatgctatggag

SEQ ID NO: 1737178 - DNA, 15 bp, Homo sapiens
tggatgctatggagt

SEQ ID NO: 1737179 - DNA, 15 bp, Homo sapiens
ggatgctatggagta

SEQ ID NO: 1737180 - DNA, 15 bp, Homo sapiens
gatgctatggagtat

SEQ ID NO: 1737181 - DNA, 15 bp, Homo sapiens
atgctatggagtatt

SEQ ID NO: 1737182 - DNA, 15 bp, Homo sapiens
tgctatggagtattt

SEQ ID NO: 1737183 - DNA, 15 bp, Homo sapiens
gctatggagtattta

SEQ ID NO: 1737184 - DNA, 15 bp, Homo sapiens
ctatggagtatttag

SEQ ID NO: 1737185 - DNA, 15 bp, Homo sapiens
tatggagtatttaga

SEQ ID NO: 1737186 - DNA, 15 bp, Homo sapiens
atggagtatttagat

SEQ ID NO: 1737187 - DNA, 15 bp, Homo sapiens
tggagtatttagatg

SEQ ID NO: 1737188 - DNA, 15 bp, Homo sapiens
ggagtatttagatgg

SEQ ID NO: 1737189 - DNA, 15 bp, Homo sapiens
gagtatttagatgga

SEQ ID NO: 1737190 - DNA, 15 bp, Homo sapiens
agtatttagatggaa

SEQ ID NO: 1737191 - DNA, 15 bp, Homo sapiens
gtatttagatggaaa

SEQ ID NO: 1737192 - DNA, 15 bp, Homo sapiens
tatttagatggaaag

SEQ ID NO: 1737193 - DNA, 15 bp, Homo sapiens
atttagatggaaagt

SEQ ID NO: 1737194 - DNA, 15 bp, Homo sapiens
tttagatggaaagtt

SEQ ID NO: 1737195 - DNA, 15 bp, Homo sapiens
ttagatggaaagttc

SEQ ID NO: 1737196 - DNA, 15 bp, Homo sapiens
tagatggaaagttcc

SEQ ID NO: 1737197 - DNA, 15 bp, Homo sapiens
agatggaaagttcct

SEQ ID NO: 1737198 - DNA, 15 bp, Homo sapiens
gatggaaagttcctc

SEQ ID NO: 1737199 - DNA, 15 bp, Homo sapiens
atggaaagttcctca

SEQ ID NO: 1737200 - DNA, 15 bp, Homo sapiens
tggaaagttcctcaa

SEQ ID NO: 1737201 - DNA, 15 bp, Homo sapiens
ggaaagttcctcaaa

SEQ ID NO: 1737202 - DNA, 15 bp, Homo sapiens
gaaagttcctcaaat

SEQ ID NO: 1737203 - DNA, 15 bp, Homo sapiens
aaagttcctcaaatg

SEQ ID NO: 1737204 - DNA, 15 bp, Homo sapiens
aagttcctcaaatgt

SEQ ID NO: 1737205 - DNA, 15 bp, Homo sapiens
agttcctcaaatgtt

SEQ ID NO: 1737206 - DNA, 15 bp, Homo sapiens
gttcctcaaatgtta

SEQ ID NO: 1737207 - DNA, 15 bp, Homo sapiens
ttcctcaaatgttat

SEQ ID NO: 1737208 - DNA, 15 bp, Homo sapiens
tcctcaaatgttatg

SEQ ID NO: 1737209 - DNA, 15 bp, Homo sapiens
cctcaaatgttatga

SEQ ID NO: 1737210 - DNA, 15 bp, Homo sapiens
ctcaaatgttatgaa

SEQ ID NO: 1737211 - DNA, 15 bp, Homo sapiens
tcaaatgttatgaat

SEQ ID NO: 1737212 - DNA, 15 bp, Homo sapiens
caaatgttatgaatt

SEQ ID NO: 1737213 - DNA, 15 bp, Homo sapiens
aaatgttatgaattt

SEQ ID NO: 1737214 - DNA, 15 bp, Homo sapiens
aatgttatgaatttc

SEQ ID NO: 1737215 - DNA, 15 bp, Homo sapiens
atgttatgaatttcc

SEQ ID NO: 1737216 - DNA, 15 bp, Homo sapiens
tgttatgaatttcca

SEQ ID NO: 1737217 - DNA, 15 bp, Homo sapiens
gttatgaatttccag

SEQ ID NO: 1737218 - DNA, 15 bp, Homo sapiens
ttatgaatttccagc

SEQ ID NO: 1737219 - DNA, 15 bp, Homo sapiens
tatgaatttccagca

SEQ ID NO: 1737220 - DNA, 15 bp, Homo sapiens
atgaatttccagcat

SEQ ID NO: 1737221 - DNA, 15 bp, Homo sapiens
tgaatttccagcatc

SEQ ID NO: 1737222 - DNA, 15 bp, Homo sapiens
gaatttccagcatcc

SEQ ID NO: 1737223 - DNA, 15 bp, Homo sapiens
aatttccagcatcca

SEQ ID NO: 1737224 - DNA, 15 bp, Homo sapiens
atttccagcatccac

SEQ ID NO: 1737225 - DNA, 15 bp, Homo sapiens
tttccagcatccact

SEQ ID NO: 1737226 - DNA, 15 bp, Homo sapiens
ttccagcatccactc

SEQ ID NO: 1737227 - DNA, 15 bp, Homo sapiens
tccagcatccactct

SEQ ID NO: 1737228 - DNA, 15 bp, Homo sapiens
ccagcatccactctt

SEQ ID NO: 1737229 - DNA, 15 bp, Homo sapiens
cagcatccactcttt

SEQ ID NO: 1737230 - DNA, 15 bp, Homo sapiens
agcatccactctttg

SEQ ID NO: 1737231 - DNA, 15 bp, Homo sapiens
gcatccactctttgg

SEQ ID NO: 1737232 - DNA, 15 bp, Homo sapiens
catccactctttggt

SEQ ID NO: 1737233 - DNA, 15 bp, Homo sapiens
atccactctttggtc

SEQ ID NO: 1737234 - DNA, 15 bp, Homo sapiens
tccactctttggtcg

SEQ ID NO: 1737235 - DNA, 15 bp, Homo sapiens
ccactctttggtcgt

SEQ ID NO: 1737236 - DNA, 15 bp, Homo sapiens
cactctttggtcgtt

SEQ ID NO: 1737237 - DNA, 15 bp, Homo sapiens
actctttggtcgttt

SEQ ID NO: 1737238 - DNA, 15 bp, Homo sapiens
ctctttggtcgtttg

SEQ ID NO: 1737239 - DNA, 15 bp, Homo sapiens
tctttggtcgtttgt

SEQ ID NO: 1737240 - DNA, 15 bp, Homo sapiens
ctttggtcgtttgta

SEQ ID NO: 1737241 - DNA, 15 bp, Homo sapiens
tttggtcgtttgtaa

SEQ ID NO: 1737242 - DNA, 15 bp, Homo sapiens
ttggtcgtttgtaaa

SEQ ID NO: 1737243 - DNA, 15 bp, Homo sapiens
tggtcgtttgtaaaa

SEQ ID NO: 1737244 - DNA, 15 bp, Homo sapiens
ggtcgtttgtaaaaa

SEQ ID NO: 1737245 - DNA, 15 bp, Homo sapiens
gtcgtttgtaaaaat

SEQ ID NO: 1737246 - DNA, 15 bp, Homo sapiens
tcgtttgtaaaaata

SEQ ID NO: 1737247 - DNA, 15 bp, Homo sapiens
cgtttgtaaaaataa

SEQ ID NO: 1737248 - DNA, 15 bp, Homo sapiens
gtttgtaaaaataat

SEQ ID NO: 1737249 - DNA, 15 bp, Homo sapiens
tttgtaaaaataata

SEQ ID NO: 1737250 - DNA, 15 bp, Homo sapiens
ttgtaaaaataatat

SEQ ID NO: 1737251 - DNA, 15 bp, Homo sapiens
tgtaaaaataatatt

SEQ ID NO: 1737252 - DNA, 15 bp, Homo sapiens
gtaaaaataatattc

SEQ ID NO: 1737253 - DNA, 15 bp, Homo sapiens
taaaaataatattct

SEQ ID NO: 1737254 - DNA, 15 bp, Homo sapiens
aaaaataatattctc

SEQ ID NO: 1737255 - DNA, 15 bp, Homo sapiens
aaaataatattctca

SEQ ID NO: 1737256 - DNA, 15 bp, Homo sapiens
aaataatattctcat

SEQ ID NO: 1737257 - DNA, 15 bp, Homo sapiens
aataatattctcata

SEQ ID NO: 1737258 - DNA, 15 bp, Homo sapiens
ataatattctcatac

SEQ ID NO: 1737259 - DNA, 15 bp, Homo sapiens
taatattctcatacc

SEQ ID NO: 1737260 - DNA, 15 bp, Homo sapiens
aatattctcatacct

SEQ ID NO: 1737261 - DNA, 15 bp, Homo sapiens
atattctcatacctc

SEQ ID NO: 1737262 - DNA, 15 bp, Homo sapiens
tattctcatacctct

SEQ ID NO: 1737263 - DNA, 15 bp, Homo sapiens
attctcatacctctt

SEQ ID NO: 1737264 - DNA, 15 bp, Homo sapiens
ttctcatacctctta

SEQ ID NO: 1737265 - DNA, 15 bp, Homo sapiens
tctcatacctcttag

SEQ ID NO: 1737266 - DNA, 15 bp, Homo sapiens
ctcatacctcttaga

SEQ ID NO: 1737267 - DNA, 15 bp, Homo sapiens
tcatacctcttagaa

SEQ ID NO: 1737268 - DNA, 15 bp, Homo sapiens
catacctcttagaag

SEQ ID NO: 1737269 - DNA, 15 bp, Homo sapiens
atacctcttagaaga

SEQ ID NO: 1737270 - DNA, 15 bp, Homo sapiens
tacctcttagaagac

SEQ ID NO: 1737271 - DNA, 15 bp, Homo sapiens
acctcttagaagaca

SEQ ID NO: 1737272 - DNA, 15 bp, Homo sapiens
cctcttagaagacaa

SEQ ID NO: 1737273 - DNA, 15 bp, Homo sapiens
ctcttagaagacaat

SEQ ID NO: 1737274 - DNA, 15 bp, Homo sapiens
tcttagaagacaatg

SEQ ID NO: 1737275 - DNA, 15 bp, Homo sapiens
cttagaagacaatga

SEQ ID NO: 1737276 - DNA, 15 bp, Homo sapiens
ttagaagacaatgaa

SEQ ID NO: 1737277 - DNA, 15 bp, Homo sapiens
tagaagacaatgaaa

SEQ ID NO: 1737278 - DNA, 15 bp, Homo sapiens
agaagacaatgaaat

SEQ ID NO: 1737279 - DNA, 15 bp, Homo sapiens
gaagacaatgaaatc

SEQ ID NO: 1737280 - DNA, 15 bp, Homo sapiens
aagacaatgaaatct

SEQ ID NO: 1737281 - DNA, 15 bp, Homo sapiens
agacaatgaaatctt

SEQ ID NO: 1737282 - DNA, 15 bp, Homo sapiens
gacaatgaaatcttt

SEQ ID NO: 1737283 - DNA, 15 bp, Homo sapiens
acaatgaaatcttta

SEQ ID NO: 1737284 - DNA, 15 bp, Homo sapiens
caatgaaatctttaa

SEQ ID NO: 1737285 - DNA, 15 bp, Homo sapiens
aatgaaatctttaaa

SEQ ID NO: 1737286 - DNA, 15 bp, Homo sapiens
atgaaatctttaaag

SEQ ID NO: 1737287 - DNA, 15 bp, Homo sapiens
tgaaatctttaaagg

SEQ ID NO: 1737288 - DNA, 15 bp, Homo sapiens
gaaatctttaaagga

SEQ ID NO: 1737289 - DNA, 15 bp, Homo sapiens
aaatctttaaaggat

SEQ ID NO: 1737290 - DNA, 15 bp, Homo sapiens
aatctttaaaggata

SEQ ID NO: 1737291 - DNA, 15 bp, Homo sapiens
atctttaaaggatac

SEQ ID NO: 1737292 - DNA, 15 bp, Homo sapiens
tctttaaaggatact

SEQ ID NO: 1737293 - DNA, 15 bp, Homo sapiens
ctttaaaggatactc

SEQ ID NO: 1737294 - DNA, 15 bp, Homo sapiens
tttaaaggatactca

SEQ ID NO: 1737295 - DNA, 15 bp, Homo sapiens
ttaaaggatactcac

SEQ ID NO: 1737296 - DNA, 15 bp, Homo sapiens
taaaggatactcact

SEQ ID NO: 1737297 - DNA, 15 bp, Homo sapiens
aaaggatactcactc

SEQ ID NO: 1737298 - DNA, 15 bp, Homo sapiens
aaggatactcactct

SEQ ID NO: 1737299 - DNA, 15 bp, Homo sapiens
aggatactcactcta

SEQ ID NO: 1737300 - DNA, 15 bp, Homo sapiens
ggatactcactctaa

SEQ ID NO: 1737301 - DNA, 15 bp, Homo sapiens
gatactcactctaaa

SEQ ID NO: 1737302 - DNA, 15 bp, Homo sapiens
atactcactctaaat

SEQ ID NO: 1737303 - DNA, 15 bp, Homo sapiens
tactcactctaaatc

SEQ ID NO: 1737304 - DNA, 15 bp, Homo sapiens
actcactctaaatcc

SEQ ID NO: 1737305 - DNA, 15 bp, Homo sapiens
ctcactctaaatcca

SEQ ID NO: 1737306 - DNA, 15 bp, Homo sapiens
tcactctaaatccag

SEQ ID NO: 1737307 - DNA, 15 bp, Homo sapiens
cactctaaatccaga

SEQ ID NO: 1737308 - DNA, 15 bp, Homo sapiens
actctaaatccagac

SEQ ID NO: 1737309 - DNA, 15 bp, Homo sapiens
ctctaaatccagact

SEQ ID NO: 1737310 - DNA, 15 bp, Homo sapiens
tctaaatccagactg

SEQ ID NO: 1737311 - DNA, 15 bp, Homo sapiens
ctaaatccagactgc

SEQ ID NO: 1737312 - DNA, 15 bp, Homo sapiens
taaatccagactgct

SEQ ID NO: 1737313 - DNA, 15 bp, Homo sapiens
aaatccagactgctt

SEQ ID NO: 1737314 - DNA, 15 bp, Homo sapiens
aatccagactgctta

SEQ ID NO: 1737315 - DNA, 15 bp, Homo sapiens
atccagactgcttat

SEQ ID NO: 1737316 - DNA, 15 bp, Homo sapiens
tccagactgcttatt

SEQ ID NO: 1737317 - DNA, 15 bp, Homo sapiens
ccagactgcttattg

SEQ ID NO: 1737318 - DNA, 15 bp, Homo sapiens
cagactgcttattga

SEQ ID NO: 1737319 - DNA, 15 bp, Homo sapiens
agactgcttattgat

SEQ ID NO: 1737320 - DNA, 15 bp, Homo sapiens
gactgcttattgatg

SEQ ID NO: 1737321 - DNA, 15 bp, Homo sapiens
actgcttattgatgt

SEQ ID NO: 1737322 - DNA, 15 bp, Homo sapiens
ctgcttattgatgtg

SEQ ID NO: 1737323 - DNA, 15 bp, Homo sapiens
tgcttattgatgtgt

SEQ ID NO: 1737324 - DNA, 15 bp, Homo sapiens
gcttattgatgtgtt

SEQ ID NO: 1737325 - DNA, 15 bp, Homo sapiens
cttattgatgtgttg

SEQ ID NO: 1737326 - DNA, 15 bp, Homo sapiens
ttattgatgtgttga

SEQ ID NO: 1737327 - DNA, 15 bp, Homo sapiens
tattgatgtgttgag

SEQ ID NO: 1737328 - DNA, 15 bp, Homo sapiens
attgatgtgttgaga

SEQ ID NO: 1737329 - DNA, 15 bp, Homo sapiens
ttgatgtgttgagag

SEQ ID NO: 1737330 - DNA, 15 bp, Homo sapiens
tgatgtgttgagagt

SEQ ID NO: 1737331 - DNA, 15 bp, Homo sapiens
gatgtgttgagagtt

SEQ ID NO: 1737332 - DNA, 15 bp, Homo sapiens
atgtgttgagagttg

SEQ ID NO: 1737333 - DNA, 15 bp, Homo sapiens
tgtgttgagagttgt

SEQ ID NO: 1737334 - DNA, 15 bp, Homo sapiens
gtgttgagagttgta

SEQ ID NO: 1737335 - DNA, 15 bp, Homo sapiens
tgttgagagttgtag

SEQ ID NO: 1737336 - DNA, 15 bp, Homo sapiens
gttgagagttgtaga

SEQ ID NO: 1737337 - DNA, 15 bp, Homo sapiens
ttgagagttgtagag

SEQ ID NO: 1737338 - DNA, 15 bp, Homo sapiens
tgagagttgtagagt

SEQ ID NO: 1737339 - DNA, 15 bp, Homo sapiens
gagagttgtagagtt

SEQ ID NO: 1737340 - DNA, 15 bp, Homo sapiens
agagttgtagagttt

SEQ ID NO: 1737341 - DNA, 15 bp, Homo sapiens
gagttgtagagttta

SEQ ID NO: 1737342 - DNA, 15 bp, Homo sapiens
agttgtagagtttaa

SEQ ID NO: 1737343 - DNA, 15 bp, Homo sapiens
gttgtagagtttaac

SEQ ID NO: 1737344 - DNA, 15 bp, Homo sapiens
ttgtagagtttaaca

SEQ ID NO: 1737345 - DNA, 15 bp, Homo sapiens
tgtagagtttaacaa

SEQ ID NO: 1737346 - DNA, 15 bp, Homo sapiens
gtagagtttaacaaa

SEQ ID NO: 1737347 - DNA, 15 bp, Homo sapiens
tagagtttaacaaaa

SEQ ID NO: 1737348 - DNA, 15 bp, Homo sapiens
agagtttaacaaaaa

SEQ ID NO: 1737349 - DNA, 15 bp, Homo sapiens
gagtttaacaaaaat

SEQ ID NO: 1737350 - DNA, 15 bp, Homo sapiens
agtttaacaaaaatc

SEQ ID NO: 1737351 - DNA, 15 bp, Homo sapiens
gtttaacaaaaatca

SEQ ID NO: 1737352 - DNA, 15 bp, Homo sapiens
tttaacaaaaatcat

SEQ ID NO: 1737353 - DNA, 15 bp, Homo sapiens
ttaacaaaaatcatg

SEQ ID NO: 1737354 - DNA, 15 bp, Homo sapiens
taacaaaaatcatgg

SEQ ID NO: 1737355 - DNA, 15 bp, Homo sapiens
aacaaaaatcatggg

SEQ ID NO: 1737356 - DNA, 15 bp, Homo sapiens
acaaaaatcatgggg

SEQ ID NO: 1737357 - DNA, 15 bp, Homo sapiens
caaaaatcatggggg

SEQ ID NO: 1737358 - DNA, 15 bp, Homo sapiens
aaaaatcatgggggt

SEQ ID NO: 1737359 - DNA, 15 bp, Homo sapiens
aaaatcatgggggtt

SEQ ID NO: 1737360 - DNA, 15 bp, Homo sapiens
aaatcatgggggttg

SEQ ID NO: 1737361 - DNA, 15 bp, Homo sapiens
aatcatgggggttgg

SEQ ID NO: 1737362 - DNA, 15 bp, Homo sapiens
atcatgggggttggg

SEQ ID NO: 1737363 - DNA, 15 bp, Homo sapiens
tcatgggggttggga

SEQ ID NO: 1737364 - DNA, 15 bp, Homo sapiens
catgggggttgggaa

SEQ ID NO: 1737365 - DNA, 15 bp, Homo sapiens
atgggggttgggaac

SEQ ID NO: 1737366 - DNA, 15 bp, Homo sapiens
tgggggttgggaaca

SEQ ID NO: 1737367 - DNA, 15 bp, Homo sapiens
gggggttgggaacag

SEQ ID NO: 1737368 - DNA, 15 bp, Homo sapiens
ggggttgggaacaga

SEQ ID NO: 1737369 - DNA, 15 bp, Homo sapiens
gggttgggaacagat

SEQ ID NO: 1737370 - DNA, 15 bp, Homo sapiens
ggttgggaacagata

SEQ ID NO: 1737371 - DNA, 15 bp, Homo sapiens
gttgggaacagatag

SEQ ID NO: 1737372 - DNA, 15 bp, Homo sapiens
ttgggaacagataga

SEQ ID NO: 1737373 - DNA, 15 bp, Homo sapiens
tgggaacagatagag

SEQ ID NO: 1737374 - DNA, 15 bp, Homo sapiens
gggaacagatagagt

SEQ ID NO: 1737375 - DNA, 15 bp, Homo sapiens
ggaacagatagagtg

SEQ ID NO: 1737376 - DNA, 15 bp, Homo sapiens
gaacagatagagtga

SEQ ID NO: 1737377 - DNA, 15 bp, Homo sapiens
aacagatagagtgag

SEQ ID NO: 1737378 - DNA, 15 bp, Homo sapiens
acagatagagtgagg

SEQ ID NO: 1737379 - DNA, 15 bp, Homo sapiens
cagatagagtgaggt

SEQ ID NO: 1737380 - DNA, 15 bp, Homo sapiens
agatagagtgaggta

SEQ ID NO: 1737381 - DNA, 15 bp, Homo sapiens
gatagagtgaggtac

SEQ ID NO: 1737382 - DNA, 15 bp, Homo sapiens
atagagtgaggtact

SEQ ID NO: 1737383 - DNA, 15 bp, Homo sapiens
tagagtgaggtactt

SEQ ID NO: 1737384 - DNA, 15 bp, Homo sapiens
agagtgaggtactta

SEQ ID NO: 1737385 - DNA, 15 bp, Homo sapiens
gagtgaggtacttag

SEQ ID NO: 1737386 - DNA, 15 bp, Homo sapiens
agtgaggtacttagc

SEQ ID NO: 1737387 - DNA, 15 bp, Homo sapiens
gtgaggtacttagct

SEQ ID NO: 1737388 - DNA, 15 bp, Homo sapiens
tgaggtacttagctg

SEQ ID NO: 1737389 - DNA, 15 bp, Homo sapiens
gaggtacttagctga

SEQ ID NO: 1737390 - DNA, 15 bp, Homo sapiens
aggtacttagctgag

SEQ ID NO: 1737391 - DNA, 15 bp, Homo sapiens
ggtacttagctgagg

SEQ ID NO: 1737392 - DNA, 15 bp, Homo sapiens
gtacttagctgaggt

SEQ ID NO: 1737393 - DNA, 15 bp, Homo sapiens
tacttagctgaggtt

SEQ ID NO: 1737394 - DNA, 15 bp, Homo sapiens
acttagctgaggttc

SEQ ID NO: 1737395 - DNA, 15 bp, Homo sapiens
cttagctgaggttcc

SEQ ID NO: 1737396 - DNA, 15 bp, Homo sapiens
ttagctgaggttcca

SEQ ID NO: 1737397 - DNA, 15 bp, Homo sapiens
tagctgaggttccag

SEQ ID NO: 1737398 - DNA, 15 bp, Homo sapiens
agctgaggttccagc

SEQ ID NO: 1737399 - DNA, 15 bp, Homo sapiens
gctgaggttccagct

SEQ ID NO: 1737400 - DNA, 15 bp, Homo sapiens
ctgaggttccagctt

SEQ ID NO: 1737401 - DNA, 15 bp, Homo sapiens
tgaggttccagctta

SEQ ID NO: 1737402 - DNA, 15 bp, Homo sapiens
gaggttccagcttat

SEQ ID NO: 1737403 - DNA, 15 bp, Homo sapiens
aggttccagcttatc

SEQ ID NO: 1737404 - DNA, 15 bp, Homo sapiens
ggttccagcttatct

SEQ ID NO: 1737405 - DNA, 15 bp, Homo sapiens
gttccagcttatctc

SEQ ID NO: 1737406 - DNA, 15 bp, Homo sapiens
ttccagcttatctct

SEQ ID NO: 1737407 - DNA, 15 bp, Homo sapiens
tccagcttatctctt

SEQ ID NO: 1737408 - DNA, 15 bp, Homo sapiens
ccagcttatctctta

SEQ ID NO: 1737409 - DNA, 15 bp, Homo sapiens
cagcttatctcttag

SEQ ID NO: 1737410 - DNA, 15 bp, Homo sapiens
agcttatctcttaga

SEQ ID NO: 1737411 - DNA, 15 bp, Homo sapiens
gcttatctcttagag

SEQ ID NO: 1737412 - DNA, 15 bp, Homo sapiens
cttatctcttagaga

SEQ ID NO: 1737413 - DNA, 15 bp, Homo sapiens
ttatctcttagagat

SEQ ID NO: 1737414 - DNA, 15 bp, Homo sapiens
atctcttagagatgt

SEQ ID NO: 1737415 - DNA, 15 bp, Homo sapiens
tctcttagagatgtt

SEQ ID NO: 1737416 - DNA, 15 bp, Homo sapiens
ctcttagagatgttt

SEQ ID NO: 1737417 - DNA, 15 bp, Homo sapiens
tcttagagatgttta

SEQ ID NO: 1737418 - DNA, 15 bp, Homo sapiens
cttagagatgtttac

SEQ ID NO: 1737419 - DNA, 15 bp, Homo sapiens
ttagagatgtttact

SEQ ID NO: 1737420 - DNA, 15 bp, Homo sapiens
tagagatgtttactt

SEQ ID NO: 1737421 - DNA, 15 bp, Homo sapiens
agagatgtttactta

SEQ ID NO: 1737422 - DNA, 15 bp, Homo sapiens
gagatgtttacttag

SEQ ID NO: 1737423 - DNA, 15 bp, Homo sapiens
agatgtttacttagt

SEQ ID NO: 1737424 - DNA, 15 bp, Homo sapiens
gatgtttacttagtc

SEQ ID NO: 1737425 - DNA, 15 bp, Homo sapiens
atgtttacttagtct

SEQ ID NO: 1737426 - DNA, 15 bp, Homo sapiens
tgtttacttagtcta

SEQ ID NO: 1737427 - DNA, 15 bp, Homo sapiens
gtttacttagtctat

SEQ ID NO: 1737428 - DNA, 15 bp, Homo sapiens
tttacttagtctatt

SEQ ID NO: 1737429 - DNA, 15 bp, Homo sapiens
ttacttagtctattc

SEQ ID NO: 1737430 - DNA, 15 bp, Homo sapiens
tacttagtctattct

SEQ ID NO: 1737431 - DNA, 15 bp, Homo sapiens
acttagtctattctt

SEQ ID NO: 1737432 - DNA, 15 bp, Homo sapiens
cttagtctattcttt

SEQ ID NO: 1737433 - DNA, 15 bp, Homo sapiens
ttagtctattcttta

SEQ ID NO: 1737434 - DNA, 15 bp, Homo sapiens
tagtctattctttag

SEQ ID NO: 1737435 - DNA, 15 bp, Homo sapiens
agtctattctttaga

SEQ ID NO: 1737436 - DNA, 15 bp, Homo sapiens
gtctattctttagaa

SEQ ID NO: 1737437 - DNA, 15 bp, Homo sapiens
tctattctttagaat

SEQ ID NO: 1737438 - DNA, 15 bp, Homo sapiens
ctattctttagaatt

SEQ ID NO: 1737439 - DNA, 15 bp, Homo sapiens
tattctttagaattg

SEQ ID NO: 1737440 - DNA, 15 bp, Homo sapiens
attctttagaattgt

SEQ ID NO: 1737441 - DNA, 15 bp, Homo sapiens
ttctttagaattgtt

SEQ ID NO: 1737442 - DNA, 15 bp, Homo sapiens
tctttagaattgttg

SEQ ID NO: 1737443 - DNA, 15 bp, Homo sapiens
ctttagaattgttgg

SEQ ID NO: 1737444 - DNA, 15 bp, Homo sapiens
tttagaattgttgga

SEQ ID NO: 1737445 - DNA, 15 bp, Homo sapiens
ttagaattgttggat

SEQ ID NO: 1737446 - DNA, 15 bp, Homo sapiens
tagaattgttggatg

SEQ ID NO: 1737447 - DNA, 15 bp, Homo sapiens
agaattgttggatgc

SEQ ID NO: 1737448 - DNA, 15 bp, Homo sapiens
gaattgttggatgct

SEQ ID NO: 1737449 - DNA, 15 bp, Homo sapiens
aattgttggatgctt

SEQ ID NO: 1737450 - DNA, 15 bp, Homo sapiens
attgttggatgcttg

SEQ ID NO: 1737451 - DNA, 15 bp, Homo sapiens
ttgttggatgcttgg

SEQ ID NO: 1737452 - DNA, 15 bp, Homo sapiens
tgttggatgcttgga

SEQ ID NO: 1737453 - DNA, 15 bp, Homo sapiens
gttggatgcttggac

SEQ ID NO: 1737454 - DNA, 15 bp, Homo sapiens
ttggatgcttggaca

SEQ ID NO: 1737455 - DNA, 15 bp, Homo sapiens
tggatgcttggacaa

SEQ ID NO: 1737456 - DNA, 15 bp, Homo sapiens
ggatgcttggacaac

SEQ ID NO: 1737457 - DNA, 15 bp, Homo sapiens
gatgcttggacaacc

SEQ ID NO: 1737458 - DNA, 15 bp, Homo sapiens
atgcttggacaacca

SEQ ID NO: 1737459 - DNA, 15 bp, Homo sapiens
tgcttggacaaccag

SEQ ID NO: 1737460 - DNA, 15 bp, Homo sapiens
gcttggacaaccaga

SEQ ID NO: 1737461 - DNA, 15 bp, Homo sapiens
cttggacaaccagac

SEQ ID NO: 1737462 - DNA, 15 bp, Homo sapiens
ttggacaaccagact

SEQ ID NO: 1737463 - DNA, 15 bp, Homo sapiens
tggacaaccagactt

SEQ ID NO: 1737464 - DNA, 15 bp, Homo sapiens
ggacaaccagactta

SEQ ID NO: 1737465 - DNA, 15 bp, Homo sapiens
gacaaccagacttaa

SEQ ID NO: 1737466 - DNA, 15 bp, Homo sapiens
acaaccagacttaat

SEQ ID NO: 1737467 - DNA, 15 bp, Homo sapiens
caaccagacttaata

SEQ ID NO: 1737468 - DNA, 15 bp, Homo sapiens
aaccagacttaatag

SEQ ID NO: 1737469 - DNA, 15 bp, Homo sapiens
accagacttaatagg

SEQ ID NO: 1737470 - DNA, 15 bp, Homo sapiens
ccagacttaatagga

SEQ ID NO: 1737471 - DNA, 15 bp, Homo sapiens
cagacttaataggag

SEQ ID NO: 1737472 - DNA, 15 bp, Homo sapiens
agacttaataggagc

SEQ ID NO: 1737473 - DNA, 15 bp, Homo sapiens
gacttaataggagcc

SEQ ID NO: 1737474 - DNA, 15 bp, Homo sapiens
acttaataggagcca

SEQ ID NO: 1737475 - DNA, 15 bp, Homo sapiens
cttaataggagccaa

SEQ ID NO: 1737476 - DNA, 15 bp, Homo sapiens
ttaataggagccaaa

SEQ ID NO: 1737477 - DNA, 15 bp, Homo sapiens
taataggagccaaat

SEQ ID NO: 1737478 - DNA, 15 bp, Homo sapiens
aataggagccaaatg

SEQ ID NO: 1737479 - DNA, 15 bp, Homo sapiens
ataggagccaaatga

SEQ ID NO: 1737480 - DNA, 15 bp, Homo sapiens
taggagccaaatgag

SEQ ID NO: 1737481 - DNA, 15 bp, Homo sapiens
aggagccaaatgaga

SEQ ID NO: 1737482 - DNA, 15 bp, Homo sapiens
ggagccaaatgagaa

SEQ ID NO: 1737483 - DNA, 15 bp, Homo sapiens
gagccaaatgagaaa

SEQ ID NO: 1737484 - DNA, 15 bp, Homo sapiens
agccaaatgagaaag

SEQ ID NO: 1737485 - DNA, 15 bp, Homo sapiens
gccaaatgagaaagg

SEQ ID NO: 1737486 - DNA, 15 bp, Homo sapiens
ccaaatgagaaaggc

SEQ ID NO: 1737487 - DNA, 15 bp, Homo sapiens
caaatgagaaaggca

SEQ ID NO: 1737488 - DNA, 15 bp, Homo sapiens
aaatgagaaaggcat

SEQ ID NO: 1737489 - DNA, 15 bp, Homo sapiens
aatgagaaaggcatg

SEQ ID NO: 1737490 - DNA, 15 bp, Homo sapiens
atgagaaaggcatgt

SEQ ID NO: 1737491 - DNA, 15 bp, Homo sapiens
tgagaaaggcatgtt

SEQ ID NO: 1737492 - DNA, 15 bp, Homo sapiens
gagaaaggcatgtta

SEQ ID NO: 1737493 - DNA, 15 bp, Homo sapiens
agaaaggcatgttag

SEQ ID NO: 1737494 - DNA, 15 bp, Homo sapiens
gaaaggcatgttaga

SEQ ID NO: 1737495 - DNA, 15 bp, Homo sapiens
aaaggcatgttagaa

SEQ ID NO: 1737496 - DNA, 15 bp, Homo sapiens
aaggcatgttagaag

SEQ ID NO: 1737497 - DNA, 15 bp, Homo sapiens
aggcatgttagaaga

SEQ ID NO: 1737498 - DNA, 15 bp, Homo sapiens
ggcatgttagaagaa

SEQ ID NO: 1737499 - DNA, 15 bp, Homo sapiens
gcatgttagaagaaa

SEQ ID NO: 1737500 - DNA, 15 bp, Homo sapiens
catgttagaagaaaa

SEQ ID NO: 1737501 - DNA, 15 bp, Homo sapiens
atgttagaagaaaaa

SEQ ID NO: 1737502 - DNA, 15 bp, Homo sapiens
tgttagaagaaaaaa

SEQ ID NO: 1737503 - DNA, 15 bp, Homo sapiens
gttagaagaaaaaaa

SEQ ID NO: 1737504 - DNA, 15 bp, Homo sapiens
ttagaagaaaaaaag

SEQ ID NO: 1737505 - DNA, 15 bp, Homo sapiens
tagaagaaaaaaagg

SEQ ID NO: 1737506 - DNA, 15 bp, Homo sapiens
agaagaaaaaaaggt

SEQ ID NO: 1737507 - DNA, 15 bp, Homo sapiens
gaagaaaaaaaggtt

SEQ ID NO: 1737508 - DNA, 15 bp, Homo sapiens
aagaaaaaaaggttc

SEQ ID NO: 1737509 - DNA, 15 bp, Homo sapiens
agaaaaaaaggttca

SEQ ID NO: 1737510 - DNA, 15 bp, Homo sapiens
gaaaaaaaggttcat

SEQ ID NO: 1737511 - DNA, 15 bp, Homo sapiens
aaaaaaaggttcata

SEQ ID NO: 1737512 - DNA, 15 bp, Homo sapiens
aaaaaaggttcatat

SEQ ID NO: 1737513 - DNA, 15 bp, Homo sapiens
aaaaaggttcatatt

SEQ ID NO: 1737514 - DNA, 15 bp, Homo sapiens
aaaaggttcatatta

SEQ ID NO: 1737515 - DNA, 15 bp, Homo sapiens
aaaggttcatattac

SEQ ID NO: 1737516 - DNA, 15 bp, Homo sapiens
aaggttcatattaca

SEQ ID NO: 1737517 - DNA, 15 bp, Homo sapiens
aggttcatattacaa

SEQ ID NO: 1737518 - DNA, 15 bp, Homo sapiens
ggttcatattacaag

SEQ ID NO: 1737519 - DNA, 15 bp, Homo sapiens
gttcatattacaaga

SEQ ID NO: 1737520 - DNA, 15 bp, Homo sapiens
ttcatattacaagag

SEQ ID NO: 1737521 - DNA, 15 bp, Homo sapiens
tcatattacaagagg

SEQ ID NO: 1737522 - DNA, 15 bp, Homo sapiens
catattacaagaggg

SEQ ID NO: 1737523 - DNA, 15 bp, Homo sapiens
atattacaagagggt

SEQ ID NO: 1737524 - DNA, 15 bp, Homo sapiens
tattacaagagggtc

SEQ ID NO: 1737525 - DNA, 15 bp, Homo sapiens
attacaagagggtct

SEQ ID NO: 1737526 - DNA, 15 bp, Homo sapiens
ttacaagagggtctg

SEQ ID NO: 1737527 - DNA, 15 bp, Homo sapiens
tacaagagggtctga

SEQ ID NO: 1737528 - DNA, 15 bp, Homo sapiens
acaagagggtctgac

SEQ ID NO: 1737529 - DNA, 15 bp, Homo sapiens
caagagggtctgaca

SEQ ID NO: 1737530 - DNA, 15 bp, Homo sapiens
aagagggtctgacaa

SEQ ID NO: 1737531 - DNA, 15 bp, Homo sapiens
agagggtctgacaat

SEQ ID NO: 1737532 - DNA, 15 bp, Homo sapiens
gagggtctgacaatg

SEQ ID NO: 1737533 - DNA, 15 bp, Homo sapiens
agggtctgacaatga

SEQ ID NO: 1737534 - DNA, 15 bp, Homo sapiens
gggtctgacaatgac

SEQ ID NO: 1737535 - DNA, 15 bp, Homo sapiens
ggtctgacaatgact

SEQ ID NO: 1737536 - DNA, 15 bp, Homo sapiens
gtctgacaatgactt

SEQ ID NO: 1737537 - DNA, 15 bp, Homo sapiens
tctgacaatgactta

SEQ ID NO: 1737538 - DNA, 15 bp, Homo sapiens
ctgacaatgacttat

SEQ ID NO: 1737539 - DNA, 15 bp, Homo sapiens
gacaatgacttattg

SEQ ID NO: 1737540 - DNA, 15 bp, Homo sapiens
acaatgacttattgt

SEQ ID NO: 1737541 - DNA, 15 bp, Homo sapiens
caatgacttattgtg

SEQ ID NO: 1737542 - DNA, 15 bp, Homo sapiens
aatgacttattgtga

SEQ ID NO: 1737543 - DNA, 15 bp, Homo sapiens
atgacttattgtgag

SEQ ID NO: 1737544 - DNA, 15 bp, Homo sapiens
tgacttattgtgagc

SEQ ID NO: 1737545 - DNA, 15 bp, Homo sapiens
gacttattgtgagca

SEQ ID NO: 1737546 - DNA, 15 bp, Homo sapiens
acttattgtgagcaa

SEQ ID NO: 1737547 - DNA, 15 bp, Homo sapiens
cttattgtgagcaaa

SEQ ID NO: 1737548 - DNA, 15 bp, Homo sapiens
ttattgtgagcaaag

SEQ ID NO: 1737549 - DNA, 15 bp, Homo sapiens
tattgtgagcaaagc

SEQ ID NO: 1737550 - DNA, 15 bp, Homo sapiens
attgtgagcaaagct

SEQ ID NO: 1737551 - DNA, 15 bp, Homo sapiens
ttgtgagcaaagctc

SEQ ID NO: 1737552 - DNA, 15 bp, Homo sapiens
tgtgagcaaagctcg

SEQ ID NO: 1737553 - DNA, 15 bp, Homo sapiens
gtgagcaaagctcgt

SEQ ID NO: 1737554 - DNA, 15 bp, Homo sapiens
tgagcaaagctcgtc

SEQ ID NO: 1737555 - DNA, 15 bp, Homo sapiens
gagcaaagctcgtcc

SEQ ID NO: 1737556 - DNA, 15 bp, Homo sapiens
agcaaagctcgtcct

SEQ ID NO: 1737557 - DNA, 15 bp, Homo sapiens
gcaaagctcgtcctt

SEQ ID NO: 1737558 - DNA, 15 bp, Homo sapiens
caaagctcgtccttg

SEQ ID NO: 1737559 - DNA, 15 bp, Homo sapiens
aaagctcgtccttgt

SEQ ID NO: 1737560 - DNA, 15 bp, Homo sapiens
aagctcgtccttgtc

SEQ ID NO: 1737561 - DNA, 15 bp, Homo sapiens
agctcgtccttgtca

SEQ ID NO: 1737562 - DNA, 15 bp, Homo sapiens
gctcgtccttgtcaa

SEQ ID NO: 1737563 - DNA, 15 bp, Homo sapiens
ctcgtccttgtcaac

SEQ ID NO: 1737564 - DNA, 15 bp, Homo sapiens
tcgtccttgtcaaca

SEQ ID NO: 1737565 - DNA, 15 bp, Homo sapiens
cgtccttgtcaacag

SEQ ID NO: 1737566 - DNA, 15 bp, Homo sapiens
gtccttgtcaacaga

SEQ ID NO: 1737567 - DNA, 15 bp, Homo sapiens
tccttgtcaacagaa

SEQ ID NO: 1737568 - DNA, 15 bp, Homo sapiens
ccttgtcaacagaat

SEQ ID NO: 1737569 - DNA, 15 bp, Homo sapiens
cttgtcaacagaata

SEQ ID NO: 1737570 - DNA, 15 bp, Homo sapiens
ttgtcaacagaataa

SEQ ID NO: 1737571 - DNA, 15 bp, Homo sapiens
tgtcaacagaataaa

SEQ ID NO: 1737572 - DNA, 15 bp, Homo sapiens
gtcaacagaataaag

SEQ ID NO: 1737573 - DNA, 15 bp, Homo sapiens
tcaacagaataaagc

SEQ ID NO: 1737574 - DNA, 15 bp, Homo sapiens
caacagaataaagcc

SEQ ID NO: 1737575 - DNA, 15 bp, Homo sapiens
aacagaataaagcca

SEQ ID NO: 1737576 - DNA, 15 bp, Homo sapiens
acagaataaagccac

SEQ ID NO: 1737577 - DNA, 15 bp, Homo sapiens
cagaataaagccact

SEQ ID NO: 1737578 - DNA, 15 bp, Homo sapiens
agaataaagccactc

SEQ ID NO: 1737579 - DNA, 15 bp, Homo sapiens
gaataaagccactcc

SEQ ID NO: 1737580 - DNA, 15 bp, Homo sapiens
aataaagccactcca

SEQ ID NO: 1737581 - DNA, 15 bp, Homo sapiens
ataaagccactccat

SEQ ID NO: 1737582 - DNA, 15 bp, Homo sapiens
taaagccactccatg

SEQ ID NO: 1737583 - DNA, 15 bp, Homo sapiens
aaagccactccatga

SEQ ID NO: 1737584 - DNA, 15 bp, Homo sapiens
aagccactccatgac

SEQ ID NO: 1737585 - DNA, 15 bp, Homo sapiens
agccactccatgaca

SEQ ID NO: 1737586 - DNA, 15 bp, Homo sapiens
gccactccatgacag

SEQ ID NO: 1737587 - DNA, 15 bp, Homo sapiens
ccactccatgacagg

SEQ ID NO: 1737588 - DNA, 15 bp, Homo sapiens
cactccatgacaggg

SEQ ID NO: 1737589 - DNA, 15 bp, Homo sapiens
actccatgacagggt

SEQ ID NO: 1737590 - DNA, 15 bp, Homo sapiens
ctccatgacagggtt

SEQ ID NO: 1737591 - DNA, 15 bp, Homo sapiens
tccatgacagggttg

SEQ ID NO: 1737592 - DNA, 15 bp, Homo sapiens
ccatgacagggttgt

SEQ ID NO: 1737593 - DNA, 15 bp, Homo sapiens
catgacagggttgtt

SEQ ID NO: 1737594 - DNA, 15 bp, Homo sapiens
atgacagggttgttc

SEQ ID NO: 1737595 - DNA, 15 bp, Homo sapiens
tgacagggttgttcc

SEQ ID NO: 1737596 - DNA, 15 bp, Homo sapiens
gacagggttgttccc

SEQ ID NO: 1737597 - DNA, 15 bp, Homo sapiens
acagggttgttccct

SEQ ID NO: 1737598 - DNA, 15 bp, Homo sapiens
cagggttgttccctc

SEQ ID NO: 1737599 - DNA, 15 bp, Homo sapiens
agggttgttccctca

SEQ ID NO: 1737600 - DNA, 15 bp, Homo sapiens
gggttgttccctcac

SEQ ID NO: 1737601 - DNA, 15 bp, Homo sapiens
ggttgttccctcaca

SEQ ID NO: 1737602 - DNA, 15 bp, Homo sapiens
gttgttccctcacaa

SEQ ID NO: 1737603 - DNA, 15 bp, Homo sapiens
ttgttccctcacaat

SEQ ID NO: 1737604 - DNA, 15 bp, Homo sapiens
tgttccctcacaatg

SEQ ID NO: 1737605 - DNA, 15 bp, Homo sapiens
gttccctcacaatga

SEQ ID NO: 1737606 - DNA, 15 bp, Homo sapiens
ttccctcacaatgag

SEQ ID NO: 1737607 - DNA, 15 bp, Homo sapiens
tccctcacaatgagt

SEQ ID NO: 1737608 - DNA, 15 bp, Homo sapiens
ccctcacaatgagtc

SEQ ID NO: 1737609 - DNA, 15 bp, Homo sapiens
cctcacaatgagtca

SEQ ID NO: 1737610 - DNA, 15 bp, Homo sapiens
ctcacaatgagtcag

SEQ ID NO: 1737611 - DNA, 15 bp, Homo sapiens
tcacaatgagtcagt

SEQ ID NO: 1737612 - DNA, 15 bp, Homo sapiens
cacaatgagtcagtt

SEQ ID NO: 1737613 - DNA, 15 bp, Homo sapiens
acaatgagtcagttg

SEQ ID NO: 1737614 - DNA, 15 bp, Homo sapiens
caatgagtcagttgt

SEQ ID NO: 1737615 - DNA, 15 bp, Homo sapiens
aatgagtcagttgtg

SEQ ID NO: 1737616 - DNA, 15 bp, Homo sapiens
atgagtcagttgtgc

SEQ ID NO: 1737617 - DNA, 15 bp, Homo sapiens
tgagtcagttgtgca

SEQ ID NO: 1737618 - DNA, 15 bp, Homo sapiens
gagtcagttgtgcag

SEQ ID NO: 1737619 - DNA, 15 bp, Homo sapiens
agtcagttgtgcaga

SEQ ID NO: 1737620 - DNA, 15 bp, Homo sapiens
gtcagttgtgcagaa

SEQ ID NO: 1737621 - DNA, 15 bp, Homo sapiens
tcagttgtgcagaaa

SEQ ID NO: 1737622 - DNA, 15 bp, Homo sapiens
cagttgtgcagaaag

SEQ ID NO: 1737623 - DNA, 15 bp, Homo sapiens
agttgtgcagaaagt

SEQ ID NO: 1737624 - DNA, 15 bp, Homo sapiens
gttgtgcagaaagta

SEQ ID NO: 1737625 - DNA, 15 bp, Homo sapiens
ttgtgcagaaagtat

SEQ ID NO: 1737626 - DNA, 15 bp, Homo sapiens
tgtgcagaaagtatg

SEQ ID NO: 1737627 - DNA, 15 bp, Homo sapiens
gtgcagaaagtatgc

SEQ ID NO: 1737628 - DNA, 15 bp, Homo sapiens
tgcagaaagtatgca

SEQ ID NO: 1737629 - DNA, 15 bp, Homo sapiens
gcagaaagtatgcac

SEQ ID NO: 1737630 - DNA, 15 bp, Homo sapiens
cagaaagtatgcaca

SEQ ID NO: 1737631 - DNA, 15 bp, Homo sapiens
agaaagtatgcacac

SEQ ID NO: 1737632 - DNA, 15 bp, Homo sapiens
gaaagtatgcacaca

SEQ ID NO: 1737633 - DNA, 15 bp, Homo sapiens
aaagtatgcacacaa

SEQ ID NO: 1737634 - DNA, 15 bp, Homo sapiens
aagtatgcacacaac

SEQ ID NO: 1737635 - DNA, 15 bp, Homo sapiens
agtatgcacacaaca

SEQ ID NO: 1737636 - DNA, 15 bp, Homo sapiens
gtatgcacacaacat

SEQ ID NO: 1737637 - DNA, 15 bp, Homo sapiens
tatgcacacaacatt

SEQ ID NO: 1737638 - DNA, 15 bp, Homo sapiens
atgcacacaacattc

SEQ ID NO: 1737639 - DNA, 15 bp, Homo sapiens
tgcacacaacattct

SEQ ID NO: 1737640 - DNA, 15 bp, Homo sapiens
gcacacaacattctg

SEQ ID NO: 1737641 - DNA, 15 bp, Homo sapiens
cacacaacattctgc

SEQ ID NO: 1737642 - DNA, 15 bp, Homo sapiens
acacaacattctgca

SEQ ID NO: 1737643 - DNA, 15 bp, Homo sapiens
cacaacattctgcat

SEQ ID NO: 1737644 - DNA, 15 bp, Homo sapiens
acaacattctgcatc

SEQ ID NO: 1737645 - DNA, 15 bp, Homo sapiens
caacattctgcatcc

SEQ ID NO: 1737646 - DNA, 15 bp, Homo sapiens
aacattctgcatcca

SEQ ID NO: 1737647 - DNA, 15 bp, Homo sapiens
acattctgcatccaa

SEQ ID NO: 1737648 - DNA, 15 bp, Homo sapiens
cattctgcatccaaa

SEQ ID NO: 1737649 - DNA, 15 bp, Homo sapiens
attctgcatccaaaa

SEQ ID NO: 1737650 - DNA, 15 bp, Homo sapiens
ttctgcatccaaaac

SEQ ID NO: 1737651 - DNA, 15 bp, Homo sapiens
tctgcatccaaaaca

SEQ ID NO: 1737652 - DNA, 15 bp, Homo sapiens
ctgcatccaaaacat

SEQ ID NO: 1737653 - DNA, 15 bp, Homo sapiens
tgcatccaaaacatt

SEQ ID NO: 1737654 - DNA, 15 bp, Homo sapiens
gcatccaaaacatta

SEQ ID NO: 1737655 - DNA, 15 bp, Homo sapiens
catccaaaacattaa

SEQ ID NO: 1737656 - DNA, 15 bp, Homo sapiens
atccaaaacattaag

SEQ ID NO: 1737657 - DNA, 15 bp, Homo sapiens
tccaaaacattaagg

SEQ ID NO: 1737658 - DNA, 15 bp, Homo sapiens
ccaaaacattaagga

SEQ ID NO: 1737659 - DNA, 15 bp, Homo sapiens
caaaacattaaggac

SEQ ID NO: 1737660 - DNA, 15 bp, Homo sapiens
aaaacattaaggacg

SEQ ID NO: 1737661 - DNA, 15 bp, Homo sapiens
aaacattaaggacgg

SEQ ID NO: 1737662 - DNA, 15 bp, Homo sapiens
aacattaaggacgga

SEQ ID NO: 1737663 - DNA, 15 bp, Homo sapiens
acattaaggacggag

SEQ ID NO: 1737664 - DNA, 15 bp, Homo sapiens
cattaaggacggagt

SEQ ID NO: 1737665 - DNA, 15 bp, Homo sapiens
attaaggacggagtt

SEQ ID NO: 1737666 - DNA, 15 bp, Homo sapiens
ttaaggacggagttg

SEQ ID NO: 1737667 - DNA, 15 bp, Homo sapiens
taaggacggagttgg

SEQ ID NO: 1737668 - DNA, 15 bp, Homo sapiens
aaggacggagttgga

SEQ ID NO: 1737669 - DNA, 15 bp, Homo sapiens
aggacggagttggag

SEQ ID NO: 1737670 - DNA, 15 bp, Homo sapiens
ggacggagttggaga

SEQ ID NO: 1737671 - DNA, 15 bp, Homo sapiens
gacggagttggagaa

SEQ ID NO: 1737672 - DNA, 15 bp, Homo sapiens
acggagttggagaaa

SEQ ID NO: 1737673 - DNA, 15 bp, Homo sapiens
cggagttggagaaaa

SEQ ID NO: 1737674 - DNA, 15 bp, Homo sapiens
ggagttggagaaaac

SEQ ID NO: 1737675 - DNA, 15 bp, Homo sapiens
gagttggagaaaaca

SEQ ID NO: 1737676 - DNA, 15 bp, Homo sapiens
agttggagaaaacag

SEQ ID NO: 1737677 - DNA, 15 bp, Homo sapiens
gttggagaaaacagt

SEQ ID NO: 1737678 - DNA, 15 bp, Homo sapiens
ttggagaaaacagtt

SEQ ID NO: 1737679 - DNA, 15 bp, Homo sapiens
tggagaaaacagttt

SEQ ID NO: 1737680 - DNA, 15 bp, Homo sapiens
ggagaaaacagtttt

SEQ ID NO: 1737681 - DNA, 15 bp, Homo sapiens
agaaaacagtttttc

SEQ ID NO: 1737682 - DNA, 15 bp, Homo sapiens
gaaaacagtttttct

SEQ ID NO: 1737683 - DNA, 15 bp, Homo sapiens
aaaacagtttttctg

SEQ ID NO: 1737684 - DNA, 15 bp, Homo sapiens
aaacagtttttctgc

SEQ ID NO: 1737685 - DNA, 15 bp, Homo sapiens
aacagtttttctgca

SEQ ID NO: 1737686 - DNA, 15 bp, Homo sapiens
acagtttttctgcag

SEQ ID NO: 1737687 - DNA, 15 bp, Homo sapiens
cagtttttctgcaga

SEQ ID NO: 1737688 - DNA, 15 bp, Homo sapiens
agtttttctgcagag

SEQ ID NO: 1737689 - DNA, 15 bp, Homo sapiens
gtttttctgcagagt

SEQ ID NO: 1737690 - DNA, 15 bp, Homo sapiens
tttttctgcagagtg

SEQ ID NO: 1737691 - DNA, 15 bp, Homo sapiens
ttttctgcagagtgt

SEQ ID NO: 1737692 - DNA, 15 bp, Homo sapiens
tttctgcagagtgtc

SEQ ID NO: 1737693 - DNA, 15 bp, Homo sapiens
ttctgcagagtgtca

SEQ ID NO: 1737694 - DNA, 15 bp, Homo sapiens
tctgcagagtgtcaa

SEQ ID NO: 1737695 - DNA, 15 bp, Homo sapiens
ctgcagagtgtcaag

SEQ ID NO: 1737696 - DNA, 15 bp, Homo sapiens
tgcagagtgtcaagg

SEQ ID NO: 1737697 - DNA, 15 bp, Homo sapiens
gcagagtgtcaagga

SEQ ID NO: 1737698 - DNA, 15 bp, Homo sapiens
cagagtgtcaaggac

SEQ ID NO: 1737699 - DNA, 15 bp, Homo sapiens
agagtgtcaaggact

SEQ ID NO: 1737700 - DNA, 15 bp, Homo sapiens
gagtgtcaaggactt

SEQ ID NO: 1737701 - DNA, 15 bp, Homo sapiens
agtgtcaaggacttg

SEQ ID NO: 1737702 - DNA, 15 bp, Homo sapiens
gtgtcaaggacttga

SEQ ID NO: 1737703 - DNA, 15 bp, Homo sapiens
tgtcaaggacttgat

SEQ ID NO: 1737704 - DNA, 15 bp, Homo sapiens
gtcaaggacttgata

SEQ ID NO: 1737705 - DNA, 15 bp, Homo sapiens
tcaaggacttgatat

SEQ ID NO: 1737706 - DNA, 15 bp, Homo sapiens
caaggacttgatatc

SEQ ID NO: 1737707 - DNA, 15 bp, Homo sapiens
aaggacttgatatct

SEQ ID NO: 1737708 - DNA, 15 bp, Homo sapiens
aggacttgatatctt

SEQ ID NO: 1737709 - DNA, 15 bp, Homo sapiens
ggacttgatatcttt

SEQ ID NO: 1737710 - DNA, 15 bp, Homo sapiens
gacttgatatctttt

SEQ ID NO: 1737711 - DNA, 15 bp, Homo sapiens
acttgatatctttta

SEQ ID NO: 1737712 - DNA, 15 bp, Homo sapiens
cttgatatcttttat

SEQ ID NO: 1737713 - DNA, 15 bp, Homo sapiens
ttgatatcttttatg

SEQ ID NO: 1737714 - DNA, 15 bp, Homo sapiens
tgatatcttttatgc

SEQ ID NO: 1737715 - DNA, 15 bp, Homo sapiens
gatatcttttatgct

SEQ ID NO: 1737716 - DNA, 15 bp, Homo sapiens
atatcttttatgctg

SEQ ID NO: 1737717 - DNA, 15 bp, Homo sapiens
tatcttttatgctgt

SEQ ID NO: 1737718 - DNA, 15 bp, Homo sapiens
atcttttatgctgtc

SEQ ID NO: 1737719 - DNA, 15 bp, Homo sapiens
tcttttatgctgtct

SEQ ID NO: 1737720 - DNA, 15 bp, Homo sapiens
cttttatgctgtctc

SEQ ID NO: 1737721 - DNA, 15 bp, Homo sapiens
ttttatgctgtctct

SEQ ID NO: 1737722 - DNA, 15 bp, Homo sapiens
tttatgctgtctctg

SEQ ID NO: 1737723 - DNA, 15 bp, Homo sapiens
ttatgctgtctctgt

SEQ ID NO: 1737724 - DNA, 15 bp, Homo sapiens
tatgctgtctctgtg

SEQ ID NO: 1737725 - DNA, 15 bp, Homo sapiens
atgctgtctctgtga

SEQ ID NO: 1737726 - DNA, 15 bp, Homo sapiens
tgctgtctctgtgac

SEQ ID NO: 1737727 - DNA, 15 bp, Homo sapiens
gctgtctctgtgact

SEQ ID NO: 1737728 - DNA, 15 bp, Homo sapiens
ctgtctctgtgacta

SEQ ID NO: 1737729 - DNA, 15 bp, Homo sapiens
tgtctctgtgactat

SEQ ID NO: 1737730 - DNA, 15 bp, Homo sapiens
gtctctgtgactata

SEQ ID NO: 1737731 - DNA, 15 bp, Homo sapiens
tctctgtgactataa

SEQ ID NO: 1737732 - DNA, 15 bp, Homo sapiens
ctctgtgactataat

SEQ ID NO: 1737733 - DNA, 15 bp, Homo sapiens
tctgtgactataata

SEQ ID NO: 1737734 - DNA, 15 bp, Homo sapiens
ctgtgactataatag

SEQ ID NO: 1737735 - DNA, 15 bp, Homo sapiens
tgtgactataatagt

SEQ ID NO: 1737736 - DNA, 15 bp, Homo sapiens
gtgactataatagtc

SEQ ID NO: 1737737 - DNA, 15 bp, Homo sapiens
tgactataatagtct

SEQ ID NO: 1737738 - DNA, 15 bp, Homo sapiens
gactataatagtcta

SEQ ID NO: 1737739 - DNA, 15 bp, Homo sapiens
actataatagtctag

SEQ ID NO: 1737740 - DNA, 15 bp, Homo sapiens
ctataatagtctaga

SEQ ID NO: 1737741 - DNA, 15 bp, Homo sapiens
tataatagtctagaa

SEQ ID NO: 1737742 - DNA, 15 bp, Homo sapiens
ataatagtctagaaa

SEQ ID NO: 1737743 - DNA, 15 bp, Homo sapiens
taatagtctagaaaa

SEQ ID NO: 1737744 - DNA, 15 bp, Homo sapiens
aatagtctagaaaat

SEQ ID NO: 1737745 - DNA, 15 bp, Homo sapiens
atagtctagaaaatt

SEQ ID NO: 1737746 - DNA, 15 bp, Homo sapiens
tagtctagaaaattc

SEQ ID NO: 1737747 - DNA, 15 bp, Homo sapiens
agtctagaaaattct

SEQ ID NO: 1737748 - DNA, 15 bp, Homo sapiens
gtctagaaaattctg

SEQ ID NO: 1737749 - DNA, 15 bp, Homo sapiens
tctagaaaattctgc

SEQ ID NO: 1737750 - DNA, 15 bp, Homo sapiens
ctagaaaattctgcg

SEQ ID NO: 1737751 - DNA, 15 bp, Homo sapiens
tagaaaattctgcgg

SEQ ID NO: 1737752 - DNA, 15 bp, Homo sapiens
agaaaattctgcggg

SEQ ID NO: 1737753 - DNA, 15 bp, Homo sapiens
gaaaattctgcggga

SEQ ID NO: 1737754 - DNA, 15 bp, Homo sapiens
aaaattctgcgggaa

SEQ ID NO: 1737755 - DNA, 15 bp, Homo sapiens
aaattctgcgggaaa

SEQ ID NO: 1737756 - DNA, 15 bp, Homo sapiens
aattctgcgggaaaa

SEQ ID NO: 1737757 - DNA, 15 bp, Homo sapiens
attctgcgggaaaat

SEQ ID NO: 1737758 - DNA, 15 bp, Homo sapiens
ttctgcgggaaaata

SEQ ID NO: 1737759 - DNA, 15 bp, Homo sapiens
tctgcgggaaaatag

SEQ ID NO: 1737760 - DNA, 15 bp, Homo sapiens
ctgcgggaaaatagc

SEQ ID NO: 1737761 - DNA, 15 bp, Homo sapiens
tgcgggaaaatagct

SEQ ID NO: 1737762 - DNA, 15 bp, Homo sapiens
gcgggaaaatagctg

SEQ ID NO: 1737763 - DNA, 15 bp, Homo sapiens
cgggaaaatagctgc

SEQ ID NO: 1737764 - DNA, 15 bp, Homo sapiens
gggaaaatagctgca

SEQ ID NO: 1737765 - DNA, 15 bp, Homo sapiens
ggaaaatagctgcac

SEQ ID NO: 1737766 - DNA, 15 bp, Homo sapiens
gaaaatagctgcacc

SEQ ID NO: 1737767 - DNA, 15 bp, Homo sapiens
aaaatagctgcaccc

SEQ ID NO: 1737768 - DNA, 15 bp, Homo sapiens
aaatagctgcaccct

SEQ ID NO: 1737769 - DNA, 15 bp, Homo sapiens
aatagctgcaccctg

SEQ ID NO: 1737770 - DNA, 15 bp, Homo sapiens
atagctgcaccctga

SEQ ID NO: 1737771 - DNA, 15 bp, Homo sapiens
tagctgcaccctgat

SEQ ID NO: 1737772 - DNA, 15 bp, Homo sapiens
agctgcaccctgatt

SEQ ID NO: 1737773 - DNA, 15 bp, Homo sapiens
gctgcaccctgattg

SEQ ID NO: 1737774 - DNA, 15 bp, Homo sapiens
ctgcaccctgattgt

SEQ ID NO: 1737775 - DNA, 15 bp, Homo sapiens
tgcaccctgattgtc

SEQ ID NO: 1737776 - DNA, 15 bp, Homo sapiens
gcaccctgattgtcc

SEQ ID NO: 1737777 - DNA, 15 bp, Homo sapiens
caccctgattgtcct

SEQ ID NO: 1737778 - DNA, 15 bp, Homo sapiens
accctgattgtcctt

SEQ ID NO: 1737779 - DNA, 15 bp, Homo sapiens
ccctgattgtccttg

SEQ ID NO: 1737780 - DNA, 15 bp, Homo sapiens
cctgattgtccttgc

SEQ ID NO: 1737781 - DNA, 15 bp, Homo sapiens
ctgattgtccttgca

SEQ ID NO: 1737782 - DNA, 15 bp, Homo sapiens
tgattgtccttgcat

SEQ ID NO: 1737783 - DNA, 15 bp, Homo sapiens
gattgtccttgcatt

SEQ ID NO: 1737784 - DNA, 15 bp, Homo sapiens
attgtccttgcattg

SEQ ID NO: 1737785 - DNA, 15 bp, Homo sapiens
ttgtccttgcattgc

SEQ ID NO: 1737786 - DNA, 15 bp, Homo sapiens
tgtccttgcattgcc

SEQ ID NO: 1737787 - DNA, 15 bp, Homo sapiens
gtccttgcattgcct

SEQ ID NO: 1737788 - DNA, 15 bp, Homo sapiens
tccttgcattgcctc

SEQ ID NO: 1737789 - DNA, 15 bp, Homo sapiens
ccttgcattgcctct

SEQ ID NO: 1737790 - DNA, 15 bp, Homo sapiens
cttgcattgcctctt

SEQ ID NO: 1737791 - DNA, 15 bp, Homo sapiens
ttgcattgcctcttg

SEQ ID NO: 1737792 - DNA, 15 bp, Homo sapiens
tgcattgcctcttgt

SEQ ID NO: 1737793 - DNA, 15 bp, Homo sapiens
gcattgcctcttgtt

SEQ ID NO: 1737794 - DNA, 15 bp, Homo sapiens
cattgcctcttgttt

SEQ ID NO: 1737795 - DNA, 15 bp, Homo sapiens
attgcctcttgtttg

SEQ ID NO: 1737796 - DNA, 15 bp, Homo sapiens
ttgcctcttgtttga

SEQ ID NO: 1737797 - DNA, 15 bp, Homo sapiens
tgcctcttgtttgag

SEQ ID NO: 1737798 - DNA, 15 bp, Homo sapiens
gcctcttgtttgagg

SEQ ID NO: 1737799 - DNA, 15 bp, Homo sapiens
cctcttgtttgaggg

SEQ ID NO: 1737800 - DNA, 15 bp, Homo sapiens
ctcttgtttgagggg

SEQ ID NO: 1737801 - DNA, 15 bp, Homo sapiens
tcttgtttgagggga

SEQ ID NO: 1737802 - DNA, 15 bp, Homo sapiens
cttgtttgaggggaa

SEQ ID NO: 1737803 - DNA, 15 bp, Homo sapiens
ttgtttgaggggaaa

SEQ ID NO: 1737804 - DNA, 15 bp, Homo sapiens
tgtttgaggggaaaa

SEQ ID NO: 1737805 - DNA, 15 bp, Homo sapiens
gtttgaggggaaaaa

SEQ ID NO: 1737806 - DNA, 15 bp, Homo sapiens
tttgaggggaaaaat

SEQ ID NO: 1737807 - DNA, 15 bp, Homo sapiens
ttgaggggaaaaatg

SEQ ID NO: 1737808 - DNA, 15 bp, Homo sapiens
tgaggggaaaaatgc

SEQ ID NO: 1737809 - DNA, 15 bp, Homo sapiens
gaggggaaaaatgcc

SEQ ID NO: 1737810 - DNA, 15 bp, Homo sapiens
aggggaaaaatgcca

SEQ ID NO: 1737811 - DNA, 15 bp, Homo sapiens
ggggaaaaatgccat

SEQ ID NO: 1737812 - DNA, 15 bp, Homo sapiens
gggaaaaatgccatt

SEQ ID NO: 1737813 - DNA, 15 bp, Homo sapiens
ggaaaaatgccattt

SEQ ID NO: 1737814 - DNA, 15 bp, Homo sapiens
gaaaaatgccatttt

SEQ ID NO: 1737815 - DNA, 15 bp, Homo sapiens
aaaaatgccattttg

SEQ ID NO: 1737816 - DNA, 15 bp, Homo sapiens
aaaatgccattttga

SEQ ID NO: 1737817 - DNA, 15 bp, Homo sapiens
aaatgccattttgag

SEQ ID NO: 1737818 - DNA, 15 bp, Homo sapiens
aatgccattttgagc

SEQ ID NO: 1737819 - DNA, 15 bp, Homo sapiens
atgccattttgagcc

SEQ ID NO: 1737820 - DNA, 15 bp, Homo sapiens
tgccattttgagccc

SEQ ID NO: 1737821 - DNA, 15 bp, Homo sapiens
gccattttgagcccc

SEQ ID NO: 1737822 - DNA, 15 bp, Homo sapiens
ccattttgagccccc

SEQ ID NO: 1737823 - DNA, 15 bp, Homo sapiens
cattttgagccccca

SEQ ID NO: 1737824 - DNA, 15 bp, Homo sapiens
attttgagcccccaa

SEQ ID NO: 1737825 - DNA, 15 bp, Homo sapiens
ttttgagcccccaag

SEQ ID NO: 1737826 - DNA, 15 bp, Homo sapiens
tttgagcccccaaga

SEQ ID NO: 1737827 - DNA, 15 bp, Homo sapiens
ttgagcccccaagat

SEQ ID NO: 1737828 - DNA, 15 bp, Homo sapiens
tgagcccccaagata

SEQ ID NO: 1737829 - DNA, 15 bp, Homo sapiens
gagcccccaagatat

SEQ ID NO: 1737830 - DNA, 15 bp, Homo sapiens
agcccccaagatatc

SEQ ID NO: 1737831 - DNA, 15 bp, Homo sapiens
gcccccaagatatct

SEQ ID NO: 1737832 - DNA, 15 bp, Homo sapiens
cccccaagatatctt

SEQ ID NO: 1737833 - DNA, 15 bp, Homo sapiens
ccccaagatatcttc

SEQ ID NO: 1737834 - DNA, 15 bp, Homo sapiens
cccaagatatcttca

SEQ ID NO: 1737835 - DNA, 15 bp, Homo sapiens
ccaagatatcttcat

SEQ ID NO: 1737836 - DNA, 15 bp, Homo sapiens
caagatatcttcata

SEQ ID NO: 1737837 - DNA, 15 bp, Homo sapiens
aagatatcttcataa

SEQ ID NO: 1737838 - DNA, 15 bp, Homo sapiens
agatatcttcataac

SEQ ID NO: 1737839 - DNA, 15 bp, Homo sapiens
gatatcttcataact

SEQ ID NO: 1737840 - DNA, 15 bp, Homo sapiens
atatcttcataactg

SEQ ID NO: 1737841 - DNA, 15 bp, Homo sapiens
tatcttcataactgt

SEQ ID NO: 1737842 - DNA, 15 bp, Homo sapiens
atcttcataactgtc

SEQ ID NO: 1737843 - DNA, 15 bp, Homo sapiens
tcttcataactgtcc

SEQ ID NO: 1737844 - DNA, 15 bp, Homo sapiens
cttcataactgtcca

SEQ ID NO: 1737845 - DNA, 15 bp, Homo sapiens
ttcataactgtccat

SEQ ID NO: 1737846 - DNA, 15 bp, Homo sapiens
tcataactgtccata

SEQ ID NO: 1737847 - DNA, 15 bp, Homo sapiens
cataactgtccatag

SEQ ID NO: 1737848 - DNA, 15 bp, Homo sapiens
ataactgtccatagt

SEQ ID NO: 1737849 - DNA, 15 bp, Homo sapiens
taactgtccatagtg

SEQ ID NO: 1737850 - DNA, 15 bp, Homo sapiens
aactgtccatagtgc

SEQ ID NO: 1737851 - DNA, 15 bp, Homo sapiens
actgtccatagtgcc

SEQ ID NO: 1737852 - DNA, 15 bp, Homo sapiens
ctgtccatagtgcct

SEQ ID NO: 1737853 - DNA, 15 bp, Homo sapiens
tgtccatagtgccta

SEQ ID NO: 1737854 - DNA, 15 bp, Homo sapiens
gtccatagtgcctag

SEQ ID NO: 1737855 - DNA, 15 bp, Homo sapiens
tccatagtgcctagg

SEQ ID NO: 1737856 - DNA, 15 bp, Homo sapiens
ccatagtgcctaggg

SEQ ID NO: 1737857 - DNA, 15 bp, Homo sapiens
catagtgcctagggt

SEQ ID NO: 1737858 - DNA, 15 bp, Homo sapiens
atagtgcctagggtg

SEQ ID NO: 1737859 - DNA, 15 bp, Homo sapiens
tagtgcctagggtgc

SEQ ID NO: 1737860 - DNA, 15 bp, Homo sapiens
agtgcctagggtgcc

SEQ ID NO: 1737861 - DNA, 15 bp, Homo sapiens
gtgcctagggtgcct

SEQ ID NO: 1737862 - DNA, 15 bp, Homo sapiens
tgcctagggtgcctg

SEQ ID NO: 1737863 - DNA, 15 bp, Homo sapiens
gcctagggtgcctga

SEQ ID NO: 1737864 - DNA, 15 bp, Homo sapiens
cctagggtgcctgaa

SEQ ID NO: 1737865 - DNA, 15 bp, Homo sapiens
ctagggtgcctgaac

SEQ ID NO: 1737866 - DNA, 15 bp, Homo sapiens
tagggtgcctgaaca

SEQ ID NO: 1737867 - DNA, 15 bp, Homo sapiens
agggtgcctgaacaa

SEQ ID NO: 1737868 - DNA, 15 bp, Homo sapiens
gggtgcctgaacaaa

SEQ ID NO: 1737869 - DNA, 15 bp, Homo sapiens
ggtgcctgaacaaac

SEQ ID NO: 1737870 - DNA, 15 bp, Homo sapiens
gtgcctgaacaaaca

SEQ ID NO: 1737871 - DNA, 15 bp, Homo sapiens
tgcctgaacaaacac

SEQ ID NO: 1737872 - DNA, 15 bp, Homo sapiens
gcctgaacaaacacc

SEQ ID NO: 1737873 - DNA, 15 bp, Homo sapiens
cctgaacaaacacca

SEQ ID NO: 1737874 - DNA, 15 bp, Homo sapiens
ctgaacaaacaccag

SEQ ID NO: 1737875 - DNA, 15 bp, Homo sapiens
tgaacaaacaccagc

SEQ ID NO: 1737876 - DNA, 15 bp, Homo sapiens
gaacaaacaccagct

SEQ ID NO: 1737877 - DNA, 15 bp, Homo sapiens
aacaaacaccagctc

SEQ ID NO: 1737878 - DNA, 15 bp, Homo sapiens
acaaacaccagctct

SEQ ID NO: 1737879 - DNA, 15 bp, Homo sapiens
caaacaccagctctt

SEQ ID NO: 1737880 - DNA, 15 bp, Homo sapiens
aaacaccagctcttt

SEQ ID NO: 1737881 - DNA, 15 bp, Homo sapiens
aacaccagctcttta

SEQ ID NO: 1737882 - DNA, 15 bp, Homo sapiens
acaccagctctttat

SEQ ID NO: 1737883 - DNA, 15 bp, Homo sapiens
caccagctctttatt

SEQ ID NO: 1737884 - DNA, 15 bp, Homo sapiens
accagctctttattt

SEQ ID NO: 1737885 - DNA, 15 bp, Homo sapiens
ccagctctttatttt

SEQ ID NO: 1737886 - DNA, 15 bp, Homo sapiens
cagctctttatttta

SEQ ID NO: 1737887 - DNA, 15 bp, Homo sapiens
agctctttattttat

SEQ ID NO: 1737888 - DNA, 15 bp, Homo sapiens
gctctttattttata

SEQ ID NO: 1737889 - DNA, 15 bp, Homo sapiens
ctctttattttataa

SEQ ID NO: 1737890 - DNA, 15 bp, Homo sapiens
tctttattttataat

SEQ ID NO: 1737891 - DNA, 15 bp, Homo sapiens
ctttattttataatg

SEQ ID NO: 1737892 - DNA, 15 bp, Homo sapiens
tttattttataatga

SEQ ID NO: 1737893 - DNA, 15 bp, Homo sapiens
ttattttataatgaa

SEQ ID NO: 1737894 - DNA, 15 bp, Homo sapiens
tattttataatgaat

SEQ ID NO: 1737895 - DNA, 15 bp, Homo sapiens
attttataatgaata

SEQ ID NO: 1737896 - DNA, 15 bp, Homo sapiens
ttttataatgaatag

SEQ ID NO: 1737897 - DNA, 15 bp, Homo sapiens
tttataatgaatagt

SEQ ID NO: 1737898 - DNA, 15 bp, Homo sapiens
ttataatgaatagtt

SEQ ID NO: 1737899 - DNA, 15 bp, Homo sapiens
tataatgaatagttc

SEQ ID NO: 1737900 - DNA, 15 bp, Homo sapiens
ataatgaatagttct

SEQ ID NO: 1737901 - DNA, 15 bp, Homo sapiens
taatgaatagttcta

SEQ ID NO: 1737902 - DNA, 15 bp, Homo sapiens
aatgaatagttctat

SEQ ID NO: 1737903 - DNA, 15 bp, Homo sapiens
atgaatagttctatg

SEQ ID NO: 1737904 - DNA, 15 bp, Homo sapiens
tgaatagttctatgt

SEQ ID NO: 1737905 - DNA, 15 bp, Homo sapiens
gaatagttctatgtg

SEQ ID NO: 1737906 - DNA, 15 bp, Homo sapiens
aatagttctatgtgt

SEQ ID NO: 1737907 - DNA, 15 bp, Homo sapiens
atagttctatgtgtt

SEQ ID NO: 1737908 - DNA, 15 bp, Homo sapiens
tagttctatgtgtta

SEQ ID NO: 1737909 - DNA, 15 bp, Homo sapiens
agttctatgtgttaa

SEQ ID NO: 1737910 - DNA, 15 bp, Homo sapiens
gttctatgtgttaaa

SEQ ID NO: 1737911 - DNA, 15 bp, Homo sapiens
ttctatgtgttaaaa

SEQ ID NO: 1737912 - DNA, 15 bp, Homo sapiens
tctatgtgttaaaag

SEQ ID NO: 1737913 - DNA, 15 bp, Homo sapiens
ctatgtgttaaaaga

SEQ ID NO: 1737914 - DNA, 15 bp, Homo sapiens
tatgtgttaaaagaa

SEQ ID NO: 1737915 - DNA, 15 bp, Homo sapiens
atgtgttaaaagaag

SEQ ID NO: 1737916 - DNA, 15 bp, Homo sapiens
tgtgttaaaagaagt

SEQ ID NO: 1737917 - DNA, 15 bp, Homo sapiens
gtgttaaaagaagtc

SEQ ID NO: 1737918 - DNA, 15 bp, Homo sapiens
tgttaaaagaagtcc

SEQ ID NO: 1737919 - DNA, 15 bp, Homo sapiens
gttaaaagaagtcct

SEQ ID NO: 1737920 - DNA, 15 bp, Homo sapiens
ttaaaagaagtccta

SEQ ID NO: 1737921 - DNA, 15 bp, Homo sapiens
taaaagaagtcctag

SEQ ID NO: 1737922 - DNA, 15 bp, Homo sapiens
aaaagaagtcctagg

SEQ ID NO: 1737923 - DNA, 15 bp, Homo sapiens
aaagaagtcctaggc

SEQ ID NO: 1737924 - DNA, 15 bp, Homo sapiens
aagaagtcctaggca

SEQ ID NO: 1737925 - DNA, 15 bp, Homo sapiens
agaagtcctaggcaa

SEQ ID NO: 1737926 - DNA, 15 bp, Homo sapiens
gaagtcctaggcaac

SEQ ID NO: 1737927 - DNA, 15 bp, Homo sapiens
aagtcctaggcaaca

SEQ ID NO: 1737928 - DNA, 15 bp, Homo sapiens
agtcctaggcaacat

SEQ ID NO: 1737929 - DNA, 15 bp, Homo sapiens
gtcctaggcaacatt

SEQ ID NO: 1737930 - DNA, 15 bp, Homo sapiens
tcctaggcaacattt

SEQ ID NO: 1737931 - DNA, 15 bp, Homo sapiens
cctaggcaacattta

SEQ ID NO: 1737932 - DNA, 15 bp, Homo sapiens
ctaggcaacatttaa

SEQ ID NO: 1737933 - DNA, 15 bp, Homo sapiens
taggcaacatttaaa

SEQ ID NO: 1737934 - DNA, 15 bp, Homo sapiens
aggcaacatttaaaa

SEQ ID NO: 1737935 - DNA, 15 bp, Homo sapiens
ggcaacatttaaaaa

SEQ ID NO: 1737936 - DNA, 15 bp, Homo sapiens
gcaacatttaaaaat

SEQ ID NO: 1737937 - DNA, 15 bp, Homo sapiens
caacatttaaaaata

SEQ ID NO: 1737938 - DNA, 15 bp, Homo sapiens
aacatttaaaaataa

SEQ ID NO: 1737939 - DNA, 15 bp, Homo sapiens
acatttaaaaataac

SEQ ID NO: 1737940 - DNA, 15 bp, Homo sapiens
catttaaaaataact

SEQ ID NO: 1737941 - DNA, 15 bp, Homo sapiens
atttaaaaataacta

SEQ ID NO: 1737942 - DNA, 15 bp, Homo sapiens
tttaaaaataactaa

SEQ ID NO: 1737943 - DNA, 15 bp, Homo sapiens
ttaaaaataactaaa

SEQ ID NO: 1737944 - DNA, 15 bp, Homo sapiens
taaaaataactaaaa

SEQ ID NO: 1737945 - DNA, 15 bp, Homo sapiens
aaaaataactaaaag

SEQ ID NO: 1737946 - DNA, 15 bp, Homo sapiens
aaaataactaaaagt

SEQ ID NO: 1737947 - DNA, 15 bp, Homo sapiens
aaataactaaaagta

SEQ ID NO: 1737948 - DNA, 15 bp, Homo sapiens
aataactaaaagtac

SEQ ID NO: 1737949 - DNA, 15 bp, Homo sapiens
ataactaaaagtaca

SEQ ID NO: 1737950 - DNA, 15 bp, Homo sapiens
taactaaaagtacat

SEQ ID NO: 1737951 - DNA, 15 bp, Homo sapiens
aactaaaagtacata

SEQ ID NO: 1737952 - DNA, 15 bp, Homo sapiens
actaaaagtacataa

SEQ ID NO: 1737953 - DNA, 15 bp, Homo sapiens
ctaaaagtacataat

SEQ ID NO: 1737954 - DNA, 15 bp, Homo sapiens
taaaagtacataatt

SEQ ID NO: 1737955 - DNA, 15 bp, Homo sapiens
aaaagtacataattg

SEQ ID NO: 1737956 - DNA, 15 bp, Homo sapiens
aaagtacataattgg

SEQ ID NO: 1737957 - DNA, 15 bp, Homo sapiens
aagtacataattgga

SEQ ID NO: 1737958 - DNA, 15 bp, Homo sapiens
agtacataattggat

SEQ ID NO: 1737959 - DNA, 15 bp, Homo sapiens
gtacataattggatt

SEQ ID NO: 1737960 - DNA, 15 bp, Homo sapiens
tacataattggattg

SEQ ID NO: 1737961 - DNA, 15 bp, Homo sapiens
acataattggattgt

SEQ ID NO: 1737962 - DNA, 15 bp, Homo sapiens
cataattggattgtt

SEQ ID NO: 1737963 - DNA, 15 bp, Homo sapiens
ataattggattgttt

SEQ ID NO: 1737964 - DNA, 15 bp, Homo sapiens
ggattgtttgtaaca

SEQ ID NO: 1737965 - DNA, 15 bp, Homo sapiens
gattgtttgtaacac

SEQ ID NO: 1737966 - DNA, 15 bp, Homo sapiens
attgtttgtaacaca

SEQ ID NO: 1737967 - DNA, 15 bp, Homo sapiens
ttgtttgtaacacaa

SEQ ID NO: 1737968 - DNA, 15 bp, Homo sapiens
tgtttgtaacacaaa

SEQ ID NO: 1737969 - DNA, 15 bp, Homo sapiens
gtttgtaacacaaag

SEQ ID NO: 1737970 - DNA, 15 bp, Homo sapiens
tttgtaacacaaaga

SEQ ID NO: 1737971 - DNA, 15 bp, Homo sapiens
ttgtaacacaaagaa

SEQ ID NO: 1737972 - DNA, 15 bp, Homo sapiens
tgtaacacaaagaaa

SEQ ID NO: 1737973 - DNA, 15 bp, Homo sapiens
gtaacacaaagaaag

SEQ ID NO: 1737974 - DNA, 15 bp, Homo sapiens
taacacaaagaaagg

SEQ ID NO: 1737975 - DNA, 15 bp, Homo sapiens
aacacaaagaaagga

SEQ ID NO: 1737976 - DNA, 15 bp, Homo sapiens
acacaaagaaaggag

SEQ ID NO: 1737977 - DNA, 15 bp, Homo sapiens
cacaaagaaaggaga

SEQ ID NO: 1737978 - DNA, 15 bp, Homo sapiens
acaaagaaaggagag

SEQ ID NO: 1737979 - DNA, 15 bp, Homo sapiens
caaagaaaggagaga

SEQ ID NO: 1737980 - DNA, 15 bp, Homo sapiens
aaagaaaggagagat

SEQ ID NO: 1737981 - DNA, 15 bp, Homo sapiens
aagaaaggagagatg

SEQ ID NO: 1737982 - DNA, 15 bp, Homo sapiens
agaaaggagagatgc

SEQ ID NO: 1737983 - DNA, 15 bp, Homo sapiens
gaaaggagagatgct

SEQ ID NO: 1737984 - DNA, 15 bp, Homo sapiens
aaaggagagatgctt

SEQ ID NO: 1737985 - DNA, 15 bp, Homo sapiens
aaggagagatgcttg

SEQ ID NO: 1737986 - DNA, 15 bp, Homo sapiens
aggagagatgcttga

SEQ ID NO: 1737987 - DNA, 15 bp, Homo sapiens
ggagagatgcttgag

SEQ ID NO: 1737988 - DNA, 15 bp, Homo sapiens
gagagatgcttgagg

SEQ ID NO: 1737989 - DNA, 15 bp, Homo sapiens
agagatgcttgaggt

SEQ ID NO: 1737990 - DNA, 15 bp, Homo sapiens
gagatgcttgaggtg

SEQ ID NO: 1737991 - DNA, 15 bp, Homo sapiens
agatgcttgaggtga

SEQ ID NO: 1737992 - DNA, 15 bp, Homo sapiens
gatgcttgaggtgat

SEQ ID NO: 1737993 - DNA, 15 bp, Homo sapiens
atgcttgaggtgatg

SEQ ID NO: 1737994 - DNA, 15 bp, Homo sapiens
tgcttgaggtgatgg

SEQ ID NO: 1737995 - DNA, 15 bp, Homo sapiens
gcttgaggtgatgga

SEQ ID NO: 1737996 - DNA, 15 bp, Homo sapiens
cttgaggtgatggat

SEQ ID NO: 1737997 - DNA, 15 bp, Homo sapiens
ttgaggtgatggata

SEQ ID NO: 1737998 - DNA, 15 bp, Homo sapiens
tgaggtgatggatac

SEQ ID NO: 1737999 - DNA, 15 bp, Homo sapiens
gaggtgatggatacc

SEQ ID NO: 1738000 - DNA, 15 bp, Homo sapiens
aggtgatggatacct

SEQ ID NO: 1738001 - DNA, 15 bp, Homo sapiens
ggtgatggatacctc

SEQ ID NO: 1738002 - DNA, 15 bp, Homo sapiens
gtgatggatacctct

SEQ ID NO: 1738003 - DNA, 15 bp, Homo sapiens
tgatggatacctctc

SEQ ID NO: 1738004 - DNA, 15 bp, Homo sapiens
gatggatacctctct

SEQ ID NO: 1738005 - DNA, 15 bp, Homo sapiens
atggatacctctctt

SEQ ID NO: 1738006 - DNA, 15 bp, Homo sapiens
tggatacctctcttt

SEQ ID NO: 1738007 - DNA, 15 bp, Homo sapiens
ggatacctctctttc

SEQ ID NO: 1738008 - DNA, 15 bp, Homo sapiens
gatacctctctttct

SEQ ID NO: 1738009 - DNA, 15 bp, Homo sapiens
atacctctctttctt

SEQ ID NO: 1738010 - DNA, 15 bp, Homo sapiens
tacctctctttcttc

SEQ ID NO: 1738011 - DNA, 15 bp, Homo sapiens
acctctctttcttcc

SEQ ID NO: 1738012 - DNA, 15 bp, Homo sapiens
cctctctttcttccc

SEQ ID NO: 1738013 - DNA, 15 bp, Homo sapiens
ctctctttcttcccc

SEQ ID NO: 1738014 - DNA, 15 bp, Homo sapiens
tctctttcttcccct

SEQ ID NO: 1738015 - DNA, 15 bp, Homo sapiens
ctctttcttcccctt

SEQ ID NO: 1738016 - DNA, 15 bp, Homo sapiens
tctttcttccccttt

SEQ ID NO: 1738017 - DNA, 15 bp, Homo sapiens
ctttcttcccctttg

SEQ ID NO: 1738018 - DNA, 15 bp, Homo sapiens
tttcttcccctttga

SEQ ID NO: 1738019 - DNA, 15 bp, Homo sapiens
ttcttcccctttgaa

SEQ ID NO: 1738020 - DNA, 15 bp, Homo sapiens
tcttcccctttgaaa

SEQ ID NO: 1738021 - DNA, 15 bp, Homo sapiens
cttcccctttgaaaa

SEQ ID NO: 1738022 - DNA, 15 bp, Homo sapiens
ttcccctttgaaaaa

SEQ ID NO: 1738023 - DNA, 15 bp, Homo sapiens
tcccctttgaaaaaa

SEQ ID NO: 1738024 - DNA, 15 bp, Homo sapiens
cccctttgaaaaaaa

SEQ ID NO: 1738025 - DNA, 15 bp, Homo sapiens
ccctttgaaaaaaaa

SEQ ID NO: 1738026 - DNA, 15 bp, Homo sapiens
cctttgaaaaaaaaa

SEQ ID NO: 1738027 - DNA, 15 bp, Homo sapiens
ctttgaaaaaaaaag

SEQ ID NO: 1738028 - DNA, 15 bp, Homo sapiens
tttgaaaaaaaaaga

SEQ ID NO: 1738029 - DNA, 15 bp, Homo sapiens
ttgaaaaaaaaagaa

SEQ ID NO: 1738030 - DNA, 15 bp, Homo sapiens
tgaaaaaaaaagaag

SEQ ID NO: 1738031 - DNA, 15 bp, Homo sapiens
gaaaaaaaaagaagt

SEQ ID NO: 1738032 - DNA, 15 bp, Homo sapiens
aaaaaaaaagaagtc

SEQ ID NO: 1738033 - DNA, 15 bp, Homo sapiens
aaaaaaaagaagtct

SEQ ID NO: 1738034 - DNA, 15 bp, Homo sapiens
aaaaaaagaagtctt

SEQ ID NO: 1738035 - DNA, 15 bp, Homo sapiens
aaaaaagaagtcttg

SEQ ID NO: 1738036 - DNA, 15 bp, Homo sapiens
aaaaagaagtcttgg

SEQ ID NO: 1738037 - DNA, 15 bp, Homo sapiens
aaaagaagtcttggg

SEQ ID NO: 1738038 - DNA, 15 bp, Homo sapiens
aaagaagtcttgggc

SEQ ID NO: 1738039 - DNA, 15 bp, Homo sapiens
aagaagtcttgggca

SEQ ID NO: 1738040 - DNA, 15 bp, Homo sapiens
agaagtcttgggcag

SEQ ID NO: 1738041 - DNA, 15 bp, Homo sapiens
gaagtcttgggcaga

SEQ ID NO: 1738042 - DNA, 15 bp, Homo sapiens
aagtcttgggcagaa

SEQ ID NO: 1738043 - DNA, 15 bp, Homo sapiens
agtcttgggcagaat

SEQ ID NO: 1738044 - DNA, 15 bp, Homo sapiens
gtcttgggcagaatc

SEQ ID NO: 1738045 - DNA, 15 bp, Homo sapiens
tcttgggcagaatcc

SEQ ID NO: 1738046 - DNA, 15 bp, Homo sapiens
cttgggcagaatccg

SEQ ID NO: 1738047 - DNA, 15 bp, Homo sapiens
ttgggcagaatccgg

SEQ ID NO: 1738048 - DNA, 15 bp, Homo sapiens
tgggcagaatccggg

SEQ ID NO: 1738049 - DNA, 15 bp, Homo sapiens
gggcagaatccggga

SEQ ID NO: 1738050 - DNA, 15 bp, Homo sapiens
ggcagaatccgggaa

SEQ ID NO: 1738051 - DNA, 15 bp, Homo sapiens
gcagaatccgggaag

SEQ ID NO: 1738052 - DNA, 15 bp, Homo sapiens
cagaatccgggaagg

SEQ ID NO: 1738053 - DNA, 15 bp, Homo sapiens
agaatccgggaaggc

SEQ ID NO: 1738054 - DNA, 15 bp, Homo sapiens
gaatccgggaaggca

SEQ ID NO: 1738055 - DNA, 15 bp, Homo sapiens
aatccgggaaggcag

SEQ ID NO: 1738056 - DNA, 15 bp, Homo sapiens
atccgggaaggcaga

SEQ ID NO: 1738057 - DNA, 15 bp, Homo sapiens
tccgggaaggcagac

SEQ ID NO: 1738058 - DNA, 15 bp, Homo sapiens
ccgggaaggcagaca

SEQ ID NO: 1738059 - DNA, 15 bp, Homo sapiens
cgggaaggcagacat

SEQ ID NO: 1738060 - DNA, 15 bp, Homo sapiens
aaggcagacattgat

SEQ ID NO: 1738061 - DNA, 15 bp, Homo sapiens
aggcagacattgatt

SEQ ID NO: 1738062 - DNA, 15 bp, Homo sapiens
ggcagacattgattt

SEQ ID NO: 1738063 - DNA, 15 bp, Homo sapiens
gcagacattgattta

SEQ ID NO: 1738064 - DNA, 15 bp, Homo sapiens
cagacattgatttac

SEQ ID NO: 1738065 - DNA, 15 bp, Homo sapiens
agacattgatttact

SEQ ID NO: 1738066 - DNA, 15 bp, Homo sapiens
gacattgatttactt

SEQ ID NO: 1738067 - DNA, 15 bp, Homo sapiens
acattgatttacttt

SEQ ID NO: 1738068 - DNA, 15 bp, Homo sapiens
cattgatttactttg

SEQ ID NO: 1738069 - DNA, 15 bp, Homo sapiens
attgatttactttga

SEQ ID NO: 1738070 - DNA, 15 bp, Homo sapiens
ttgatttactttgag

SEQ ID NO: 1738071 - DNA, 15 bp, Homo sapiens
tgatttactttgaga

SEQ ID NO: 1738072 - DNA, 15 bp, Homo sapiens
gatttactttgagac

SEQ ID NO: 1738073 - DNA, 15 bp, Homo sapiens
atttactttgagact

SEQ ID NO: 1738074 - DNA, 15 bp, Homo sapiens
tttactttgagactc

SEQ ID NO: 1738075 - DNA, 15 bp, Homo sapiens
ttactttgagactca

SEQ ID NO: 1738076 - DNA, 15 bp, Homo sapiens
tactttgagactcaa

SEQ ID NO: 1738077 - DNA, 15 bp, Homo sapiens
actttgagactcaaa

SEQ ID NO: 1738078 - DNA, 15 bp, Homo sapiens
ctttgagactcaaaa

SEQ ID NO: 1738079 - DNA, 15 bp, Homo sapiens
tttgagactcaaaag

SEQ ID NO: 1738080 - DNA, 15 bp, Homo sapiens
ttgagactcaaaagt

SEQ ID NO: 1738081 - DNA, 15 bp, Homo sapiens
tgagactcaaaagtg

SEQ ID NO: 1738082 - DNA, 15 bp, Homo sapiens
gagactcaaaagtga

SEQ ID NO: 1738083 - DNA, 15 bp, Homo sapiens
agactcaaaagtgaa

SEQ ID NO: 1738084 - DNA, 15 bp, Homo sapiens
gactcaaaagtgaaa

SEQ ID NO: 1738085 - DNA, 15 bp, Homo sapiens
actcaaaagtgaaaa

SEQ ID NO: 1738086 - DNA, 15 bp, Homo sapiens
ctcaaaagtgaaaat

SEQ ID NO: 1738087 - DNA, 15 bp, Homo sapiens
tcaaaagtgaaaatg

SEQ ID NO: 1738088 - DNA, 15 bp, Homo sapiens
caaaagtgaaaatga

SEQ ID NO: 1738089 - DNA, 15 bp, Homo sapiens
aaaagtgaaaatgaa

SEQ ID NO: 1738090 - DNA, 15 bp, Homo sapiens
aaagtgaaaatgaag

SEQ ID NO: 1738091 - DNA, 15 bp, Homo sapiens
aagtgaaaatgaaga

SEQ ID NO: 1738092 - DNA, 15 bp, Homo sapiens
agtgaaaatgaagac

SEQ ID NO: 1738093 - DNA, 15 bp, Homo sapiens
gtgaaaatgaagact

SEQ ID NO: 1738094 - DNA, 15 bp, Homo sapiens
tgaaaatgaagacta

SEQ ID NO: 1738095 - DNA, 15 bp, Homo sapiens
gaaaatgaagactat

SEQ ID NO: 1738096 - DNA, 15 bp, Homo sapiens
aaaatgaagactatg

SEQ ID NO: 1738097 - DNA, 15 bp, Homo sapiens
aaatgaagactatgt

SEQ ID NO: 1738098 - DNA, 15 bp, Homo sapiens
aatgaagactatgtt

SEQ ID NO: 1738099 - DNA, 15 bp, Homo sapiens
atgaagactatgttt

SEQ ID NO: 1738100 - DNA, 15 bp, Homo sapiens
tgaagactatgtttc

SEQ ID NO: 1738101 - DNA, 15 bp, Homo sapiens
gaagactatgtttcc

SEQ ID NO: 1738102 - DNA, 15 bp, Homo sapiens
aagactatgtttccc

SEQ ID NO: 1738103 - DNA, 15 bp, Homo sapiens
agactatgtttccct

SEQ ID NO: 1738104 - DNA, 15 bp, Homo sapiens
gactatgtttcccta

SEQ ID NO: 1738105 - DNA, 15 bp, Homo sapiens
actatgtttccctat

SEQ ID NO: 1738106 - DNA, 15 bp, Homo sapiens
ctatgtttccctatc

SEQ ID NO: 1738107 - DNA, 15 bp, Homo sapiens
tatgtttccctatct

SEQ ID NO: 1738108 - DNA, 15 bp, Homo sapiens
atgtttccctatcta

SEQ ID NO: 1738109 - DNA, 15 bp, Homo sapiens
tgtttccctatctaa

SEQ ID NO: 1738110 - DNA, 15 bp, Homo sapiens
gtttccctatctaat

SEQ ID NO: 1738111 - DNA, 15 bp, Homo sapiens
tttccctatctaatc

SEQ ID NO: 1738112 - DNA, 15 bp, Homo sapiens
ttccctatctaatcc

SEQ ID NO: 1738113 - DNA, 15 bp, Homo sapiens
tccctatctaatcct

SEQ ID NO: 1738114 - DNA, 15 bp, Homo sapiens
ccctatctaatcctt

SEQ ID NO: 1738115 - DNA, 15 bp, Homo sapiens
cctatctaatcctta

SEQ ID NO: 1738116 - DNA, 15 bp, Homo sapiens
ctatctaatccttaa

SEQ ID NO: 1738117 - DNA, 15 bp, Homo sapiens
tatctaatccttaat

SEQ ID NO: 1738118 - DNA, 15 bp, Homo sapiens
atctaatccttaatg

SEQ ID NO: 1738119 - DNA, 15 bp, Homo sapiens
tctaatccttaatgt

SEQ ID NO: 1738120 - DNA, 15 bp, Homo sapiens
ctaatccttaatgta

SEQ ID NO: 1738121 - DNA, 15 bp, Homo sapiens
taatccttaatgtat

SEQ ID NO: 1738122 - DNA, 15 bp, Homo sapiens
aatccttaatgtata

SEQ ID NO: 1738123 - DNA, 15 bp, Homo sapiens
atccttaatgtatac

SEQ ID NO: 1738124 - DNA, 15 bp, Homo sapiens
tccttaatgtataca

SEQ ID NO: 1738125 - DNA, 15 bp, Homo sapiens
ccttaatgtatacac

SEQ ID NO: 1738126 - DNA, 15 bp, Homo sapiens
cttaatgtatacact

SEQ ID NO: 1738127 - DNA, 15 bp, Homo sapiens
ttaatgtatacactg

SEQ ID NO: 1738128 - DNA, 15 bp, Homo sapiens
taatgtatacactgc

SEQ ID NO: 1738129 - DNA, 15 bp, Homo sapiens
aatgtatacactgct

SEQ ID NO: 1738130 - DNA, 15 bp, Homo sapiens
atgtatacactgctt

SEQ ID NO: 1738131 - DNA, 15 bp, Homo sapiens
tgtatacactgctta

SEQ ID NO: 1738132 - DNA, 15 bp, Homo sapiens
gtatacactgcttat

SEQ ID NO: 1738133 - DNA, 15 bp, Homo sapiens
tatacactgcttatt

SEQ ID NO: 1738134 - DNA, 15 bp, Homo sapiens
atacactgcttattc

SEQ ID NO: 1738135 - DNA, 15 bp, Homo sapiens
tacactgcttattca

SEQ ID NO: 1738136 - DNA, 15 bp, Homo sapiens
acactgcttattcag

SEQ ID NO: 1738137 - DNA, 15 bp, Homo sapiens
cactgcttattcaga

SEQ ID NO: 1738138 - DNA, 15 bp, Homo sapiens
actgcttattcagac

SEQ ID NO: 1738139 - DNA, 15 bp, Homo sapiens
ctgcttattcagacc

SEQ ID NO: 1738140 - DNA, 15 bp, Homo sapiens
tgcttattcagaccc

SEQ ID NO: 1738141 - DNA, 15 bp, Homo sapiens
gcttattcagaccct

SEQ ID NO: 1738142 - DNA, 15 bp, Homo sapiens
cttattcagaccctt

SEQ ID NO: 1738143 - DNA, 15 bp, Homo sapiens
ttattcagacccttc

SEQ ID NO: 1738144 - DNA, 15 bp, Homo sapiens
tattcagacccttca

SEQ ID NO: 1738145 - DNA, 15 bp, Homo sapiens
attcagacccttcac

SEQ ID NO: 1738146 - DNA, 15 bp, Homo sapiens
ttcagacccttcacc

SEQ ID NO: 1738147 - DNA, 15 bp, Homo sapiens
tcagacccttcaccc

SEQ ID NO: 1738148 - DNA, 15 bp, Homo sapiens
cagacccttcaccca

SEQ ID NO: 1738149 - DNA, 15 bp, Homo sapiens
agacccttcacccat

SEQ ID NO: 1738150 - DNA, 15 bp, Homo sapiens
gacccttcacccata

SEQ ID NO: 1738151 - DNA, 15 bp, Homo sapiens
acccttcacccataa

SEQ ID NO: 1738152 - DNA, 15 bp, Homo sapiens
cccttcacccataag

SEQ ID NO: 1738153 - DNA, 15 bp, Homo sapiens
ccttcacccataagc

SEQ ID NO: 1738154 - DNA, 15 bp, Homo sapiens
cttcacccataagct

SEQ ID NO: 1738155 - DNA, 15 bp, Homo sapiens
ttcacccataagctg

SEQ ID NO: 1738156 - DNA, 15 bp, Homo sapiens
tcacccataagctgt

SEQ ID NO: 1738157 - DNA, 15 bp, Homo sapiens
cacccataagctgtg

SEQ ID NO: 1738158 - DNA, 15 bp, Homo sapiens
acccataagctgtgt

SEQ ID NO: 1738159 - DNA, 15 bp, Homo sapiens
cccataagctgtgtg

SEQ ID NO: 1738160 - DNA, 15 bp, Homo sapiens
ccataagctgtgtga

SEQ ID NO: 1738161 - DNA, 15 bp, Homo sapiens
cataagctgtgtgac

SEQ ID NO: 1738162 - DNA, 15 bp, Homo sapiens
ataagctgtgtgacc

SEQ ID NO: 1738163 - DNA, 15 bp, Homo sapiens
taagctgtgtgacca

SEQ ID NO: 1738164 - DNA, 15 bp, Homo sapiens
aagctgtgtgaccat

SEQ ID NO: 1738165 - DNA, 15 bp, Homo sapiens
agctgtgtgaccatg

SEQ ID NO: 1738166 - DNA, 15 bp, Homo sapiens
gctgtgtgaccatga

SEQ ID NO: 1738167 - DNA, 15 bp, Homo sapiens
ctgtgtgaccatgag

SEQ ID NO: 1738168 - DNA, 15 bp, Homo sapiens
tgtgtgaccatgagc

SEQ ID NO: 1738169 - DNA, 15 bp, Homo sapiens
gtgtgaccatgagca

SEQ ID NO: 1738170 - DNA, 15 bp, Homo sapiens
tgtgaccatgagcaa

SEQ ID NO: 1738171 - DNA, 15 bp, Homo sapiens
gtgaccatgagcaag

SEQ ID NO: 1738172 - DNA, 15 bp, Homo sapiens
tgaccatgagcaagt

SEQ ID NO: 1738173 - DNA, 15 bp, Homo sapiens
gaccatgagcaagtc

SEQ ID NO: 1738174 - DNA, 15 bp, Homo sapiens
accatgagcaagtct

SEQ ID NO: 1738175 - DNA, 15 bp, Homo sapiens
ccatgagcaagtctc

SEQ ID NO: 1738176 - DNA, 15 bp, Homo sapiens
catgagcaagtctct

SEQ ID NO: 1738177 - DNA, 15 bp, Homo sapiens
atgagcaagtctctt

SEQ ID NO: 1738178 - DNA, 15 bp, Homo sapiens
tgagcaagtctctta

SEQ ID NO: 1738179 - DNA, 15 bp, Homo sapiens
gagcaagtctcttaa

SEQ ID NO: 1738180 - DNA, 15 bp, Homo sapiens
agcaagtctcttaac

SEQ ID NO: 1738181 - DNA, 15 bp, Homo sapiens
gcaagtctcttaacc

SEQ ID NO: 1738182 - DNA, 15 bp, Homo sapiens
caagtctcttaacct

SEQ ID NO: 1738183 - DNA, 15 bp, Homo sapiens
gtctcttaacctcta

SEQ ID NO: 1738184 - DNA, 15 bp, Homo sapiens
tctcttaacctctat

SEQ ID NO: 1738185 - DNA, 15 bp, Homo sapiens
ctcttaacctctata

SEQ ID NO: 1738186 - DNA, 15 bp, Homo sapiens
tcttaacctctataa

SEQ ID NO: 1738187 - DNA, 15 bp, Homo sapiens
cttaacctctataat

SEQ ID NO: 1738188 - DNA, 15 bp, Homo sapiens
ttaacctctataatc

SEQ ID NO: 1738189 - DNA, 15 bp, Homo sapiens
taacctctataatcc

SEQ ID NO: 1738190 - DNA, 15 bp, Homo sapiens
aacctctataatcct

SEQ ID NO: 1738191 - DNA, 15 bp, Homo sapiens
acctctataatcctt

SEQ ID NO: 1738192 - DNA, 15 bp, Homo sapiens
cctctataatcctta

SEQ ID NO: 1738193 - DNA, 15 bp, Homo sapiens
ctctataatccttac

SEQ ID NO: 1738194 - DNA, 15 bp, Homo sapiens
tctataatccttact

SEQ ID NO: 1738195 - DNA, 15 bp, Homo sapiens
ctataatccttactg

SEQ ID NO: 1738196 - DNA, 15 bp, Homo sapiens
tataatccttactgt

SEQ ID NO: 1738197 - DNA, 15 bp, Homo sapiens
ataatccttactgtt

SEQ ID NO: 1738198 - DNA, 15 bp, Homo sapiens
taatccttactgttc

SEQ ID NO: 1738199 - DNA, 15 bp, Homo sapiens
aatccttactgttct

SEQ ID NO: 1738200 - DNA, 15 bp, Homo sapiens
atccttactgttctc

SEQ ID NO: 1738201 - DNA, 15 bp, Homo sapiens
tccttactgttctca

SEQ ID NO: 1738202 - DNA, 15 bp, Homo sapiens
ccttactgttctcat

SEQ ID NO: 1738203 - DNA, 15 bp, Homo sapiens
cttactgttctcatc

SEQ ID NO: 1738204 - DNA, 15 bp, Homo sapiens
ttactgttctcatct

SEQ ID NO: 1738205 - DNA, 15 bp, Homo sapiens
tactgttctcatctt

SEQ ID NO: 1738206 - DNA, 15 bp, Homo sapiens
actgttctcatcttt

SEQ ID NO: 1738207 - DNA, 15 bp, Homo sapiens
ctgttctcatctttg

SEQ ID NO: 1738208 - DNA, 15 bp, Homo sapiens
tgttctcatctttga

SEQ ID NO: 1738209 - DNA, 15 bp, Homo sapiens
gttctcatctttgag

SEQ ID NO: 1738210 - DNA, 15 bp, Homo sapiens
ttctcatctttgaga

SEQ ID NO: 1738211 - DNA, 15 bp, Homo sapiens
tctcatctttgagag

SEQ ID NO: 1738212 - DNA, 15 bp, Homo sapiens
ctcatctttgagagg

SEQ ID NO: 1738213 - DNA, 15 bp, Homo sapiens
tcatctttgagaggt

SEQ ID NO: 1738214 - DNA, 15 bp, Homo sapiens
catctttgagaggta

SEQ ID NO: 1738215 - DNA, 15 bp, Homo sapiens
atctttgagaggtaa

SEQ ID NO: 1738216 - DNA, 15 bp, Homo sapiens
tctttgagaggtaag

SEQ ID NO: 1738217 - DNA, 15 bp, Homo sapiens
ctttgagaggtaagc

SEQ ID NO: 1738218 - DNA, 15 bp, Homo sapiens
tttgagaggtaagca

SEQ ID NO: 1738219 - DNA, 15 bp, Homo sapiens
ttgagaggtaagcat

SEQ ID NO: 1738220 - DNA, 15 bp, Homo sapiens
tgagaggtaagcatc

SEQ ID NO: 1738221 - DNA, 15 bp, Homo sapiens
gagaggtaagcatca

SEQ ID NO: 1738222 - DNA, 15 bp, Homo sapiens
agaggtaagcatcaa

SEQ ID NO: 1738223 - DNA, 15 bp, Homo sapiens
gaggtaagcatcaat

SEQ ID NO: 1738224 - DNA, 15 bp, Homo sapiens
aggtaagcatcaatt

SEQ ID NO: 1738225 - DNA, 15 bp, Homo sapiens
ggtaagcatcaattt

SEQ ID NO: 1738226 - DNA, 15 bp, Homo sapiens
gtaagcatcaattta

SEQ ID NO: 1738227 - DNA, 15 bp, Homo sapiens
taagcatcaatttac

SEQ ID NO: 1738228 - DNA, 15 bp, Homo sapiens
aagcatcaatttact

SEQ ID NO: 1738229 - DNA, 15 bp, Homo sapiens
agcatcaatttactg

SEQ ID NO: 1738230 - DNA, 15 bp, Homo sapiens
gcatcaatttactga

SEQ ID NO: 1738231 - DNA, 15 bp, Homo sapiens
catcaatttactgat

SEQ ID NO: 1738232 - DNA, 15 bp, Homo sapiens
atcaatttactgata

SEQ ID NO: 1738233 - DNA, 15 bp, Homo sapiens
tcaatttactgatag

SEQ ID NO: 1738234 - DNA, 15 bp, Homo sapiens
caatttactgataga

SEQ ID NO: 1738235 - DNA, 15 bp, Homo sapiens
aatttactgatagaa

SEQ ID NO: 1738236 - DNA, 15 bp, Homo sapiens
atttactgatagaat

SEQ ID NO: 1738237 - DNA, 15 bp, Homo sapiens
tttactgatagaatt

SEQ ID NO: 1738238 - DNA, 15 bp, Homo sapiens
ttactgatagaatta

SEQ ID NO: 1738239 - DNA, 15 bp, Homo sapiens
tactgatagaattaa

SEQ ID NO: 1738240 - DNA, 15 bp, Homo sapiens
actgatagaattaag

SEQ ID NO: 1738241 - DNA, 15 bp, Homo sapiens
ctgatagaattaagt

SEQ ID NO: 1738242 - DNA, 15 bp, Homo sapiens
tgatagaattaagtg

SEQ ID NO: 1738243 - DNA, 15 bp, Homo sapiens
gatagaattaagtga

SEQ ID NO: 1738244 - DNA, 15 bp, Homo sapiens
atagaattaagtgag

SEQ ID NO: 1738245 - DNA, 15 bp, Homo sapiens
tagaattaagtgaga

SEQ ID NO: 1738246 - DNA, 15 bp, Homo sapiens
agaattaagtgagat

SEQ ID NO: 1738247 - DNA, 15 bp, Homo sapiens
gaattaagtgagatg

SEQ ID NO: 1738248 - DNA, 15 bp, Homo sapiens
aattaagtgagatga

SEQ ID NO: 1738249 - DNA, 15 bp, Homo sapiens
attaagtgagatgat

SEQ ID NO: 1738250 - DNA, 15 bp, Homo sapiens
ttaagtgagatgatt

SEQ ID NO: 1738251 - DNA, 15 bp, Homo sapiens
taagtgagatgattt

SEQ ID NO: 1738252 - DNA, 15 bp, Homo sapiens
aagtgagatgatttg

SEQ ID NO: 1738253 - DNA, 15 bp, Homo sapiens
agtgagatgatttgt

SEQ ID NO: 1738254 - DNA, 15 bp, Homo sapiens
gtgagatgatttgtg

SEQ ID NO: 1738255 - DNA, 15 bp, Homo sapiens
tgagatgatttgtgt

SEQ ID NO: 1738256 - DNA, 15 bp, Homo sapiens
gagatgatttgtgta

SEQ ID NO: 1738257 - DNA, 15 bp, Homo sapiens
agatgatttgtgtaa

SEQ ID NO: 1738258 - DNA, 15 bp, Homo sapiens
gatgatttgtgtaaa

SEQ ID NO: 1738259 - DNA, 15 bp, Homo sapiens
atgatttgtgtaaag

SEQ ID NO: 1738260 - DNA, 15 bp, Homo sapiens
tgatttgtgtaaagt

SEQ ID NO: 1738261 - DNA, 15 bp, Homo sapiens
gatttgtgtaaagtg

SEQ ID NO: 1738262 - DNA, 15 bp, Homo sapiens
atttgtgtaaagtgt

SEQ ID NO: 1738263 - DNA, 15 bp, Homo sapiens
tttgtgtaaagtgtc

SEQ ID NO: 1738264 - DNA, 15 bp, Homo sapiens
ttgtgtaaagtgtct

SEQ ID NO: 1738265 - DNA, 15 bp, Homo sapiens
tgtgtaaagtgtctg

SEQ ID NO: 1738266 - DNA, 15 bp, Homo sapiens
gtgtaaagtgtctgg

SEQ ID NO: 1738267 - DNA, 15 bp, Homo sapiens
tgtaaagtgtctgga

SEQ ID NO: 1738268 - DNA, 15 bp, Homo sapiens
gtaaagtgtctggaa

SEQ ID NO: 1738269 - DNA, 15 bp, Homo sapiens
taaagtgtctggaac

SEQ ID NO: 1738270 - DNA, 15 bp, Homo sapiens
aaagtgtctggaaca

SEQ ID NO: 1738271 - DNA, 15 bp, Homo sapiens
aagtgtctggaacat

SEQ ID NO: 1738272 - DNA, 15 bp, Homo sapiens
agtgtctggaacata

SEQ ID NO: 1738273 - DNA, 15 bp, Homo sapiens
gtgtctggaacatag

SEQ ID NO: 1738274 - DNA, 15 bp, Homo sapiens
tgtctggaacatagt

SEQ ID NO: 1738275 - DNA, 15 bp, Homo sapiens
gtctggaacatagta

SEQ ID NO: 1738276 - DNA, 15 bp, Homo sapiens
tctggaacatagtaa

SEQ ID NO: 1738277 - DNA, 15 bp, Homo sapiens
ctggaacatagtaaa

SEQ ID NO: 1738278 - DNA, 15 bp, Homo sapiens
tggaacatagtaaat

SEQ ID NO: 1738279 - DNA, 15 bp, Homo sapiens
ggaacatagtaaatg

SEQ ID NO: 1738280 - DNA, 15 bp, Homo sapiens
gaacatagtaaatga

SEQ ID NO: 1738281 - DNA, 15 bp, Homo sapiens
aacatagtaaatgat

SEQ ID NO: 1738282 - DNA, 15 bp, Homo sapiens
acatagtaaatgatc

SEQ ID NO: 1738283 - DNA, 15 bp, Homo sapiens
catagtaaatgatca

SEQ ID NO: 1738284 - DNA, 15 bp, Homo sapiens
atagtaaatgatcaa

SEQ ID NO: 1738285 - DNA, 15 bp, Homo sapiens
tagtaaatgatcaat

SEQ ID NO: 1738286 - DNA, 15 bp, Homo sapiens
agtaaatgatcaata

SEQ ID NO: 1738287 - DNA, 15 bp, Homo sapiens
gtaaatgatcaataa

SEQ ID NO: 1738288 - DNA, 15 bp, Homo sapiens
taaatgatcaataaa

SEQ ID NO: 1738289 - DNA, 15 bp, Homo sapiens
aaatgatcaataaat

SEQ ID NO: 1738290 - DNA, 15 bp, Homo sapiens
aatgatcaataaata

SEQ ID NO: 1738291 - DNA, 15 bp, Homo sapiens
atgatcaataaatat

SEQ ID NO: 1738292 - DNA, 15 bp, Homo sapiens
tgatcaataaatatt

SEQ ID NO: 1738293 - DNA, 15 bp, Homo sapiens
gatcaataaatattg

SEQ ID NO: 1738294 - DNA, 15 bp, Homo sapiens
atcaataaatattgg

SEQ ID NO: 1738295 - DNA, 15 bp, Homo sapiens
tcaataaatattggg

SEQ ID NO: 1738296 - DNA, 15 bp, Homo sapiens
caataaatattggga

SEQ ID NO: 1738297 - DNA, 15 bp, Homo sapiens
aataaatattgggac

SEQ ID NO: 1738298 - DNA, 15 bp, Homo sapiens
ataaatattgggaca

SEQ ID NO: 1738299 - DNA, 15 bp, Homo sapiens
taaatattgggacaa

SEQ ID NO: 1738300 - DNA, 15 bp, Homo sapiens
aaatattgggacaaa

SEQ ID NO: 1738301 - DNA, 15 bp, Homo sapiens
aatattgggacaaac

SEQ ID NO: 1738302 - DNA, 15 bp, Homo sapiens
atattgggacaaact

SEQ ID NO: 1738303 - DNA, 15 bp, Homo sapiens
tattgggacaaacta

SEQ ID NO: 1738304 - DNA, 15 bp, Homo sapiens
attgggacaaactag

SEQ ID NO: 1738305 - DNA, 15 bp, Homo sapiens
ttgggacaaactagc

SEQ ID NO: 1738306 - DNA, 15 bp, Homo sapiens
tgggacaaactagct

SEQ ID NO: 1738307 - DNA, 15 bp, Homo sapiens
gggacaaactagcta

SEQ ID NO: 1738308 - DNA, 15 bp, Homo sapiens
ggacaaactagctat

SEQ ID NO: 1738309 - DNA, 15 bp, Homo sapiens
gacaaactagctata

SEQ ID NO: 1738310 - DNA, 15 bp, Homo sapiens
acaaactagctataa

SEQ ID NO: 1738311 - DNA, 15 bp, Homo sapiens
caaactagctataag

SEQ ID NO: 1738312 - DNA, 15 bp, Homo sapiens
aaactagctataaga

SEQ ID NO: 1738313 - DNA, 15 bp, Homo sapiens
aactagctataagaa

SEQ ID NO: 1738314 - DNA, 15 bp, Homo sapiens
actagctataagaac

SEQ ID NO: 1738315 - DNA, 15 bp, Homo sapiens
ctagctataagaact

SEQ ID NO: 1738316 - DNA, 15 bp, Homo sapiens
tagctataagaactt

SEQ ID NO: 1738317 - DNA, 15 bp, Homo sapiens
agctataagaacttg

SEQ ID NO: 1738318 - DNA, 15 bp, Homo sapiens
gctataagaacttgg

SEQ ID NO: 1738319 - DNA, 15 bp, Homo sapiens
ctataagaacttgga

SEQ ID NO: 1738320 - DNA, 15 bp, Homo sapiens
tataagaacttggaa

SEQ ID NO: 1738321 - DNA, 15 bp, Homo sapiens
ataagaacttggaaa

SEQ ID NO: 1738322 - DNA, 15 bp, Homo sapiens
taagaacttggaaat

SEQ ID NO: 1738323 - DNA, 15 bp, Homo sapiens
aagaacttggaaatg

SEQ ID NO: 1738324 - DNA, 15 bp, Homo sapiens
agaacttggaaatga

SEQ ID NO: 1738325 - DNA, 15 bp, Homo sapiens
gaacttggaaatgaa

SEQ ID NO: 1738326 - DNA, 15 bp, Homo sapiens
aacttggaaatgaaa

SEQ ID NO: 1738327 - DNA, 15 bp, Homo sapiens
ttggaaatgaaacaa

SEQ ID NO: 1738328 - DNA, 15 bp, Homo sapiens
tggaaatgaaacaac

SEQ ID NO: 1738329 - DNA, 15 bp, Homo sapiens
ggaaatgaaacaacc

SEQ ID NO: 1738330 - DNA, 15 bp, Homo sapiens
gaaatgaaacaaccc

SEQ ID NO: 1738331 - DNA, 15 bp, Homo sapiens
aaatgaaacaaccca

SEQ ID NO: 1738332 - DNA, 15 bp, Homo sapiens
aatgaaacaacccac

SEQ ID NO: 1738333 - DNA, 15 bp, Homo sapiens
atgaaacaacccact

SEQ ID NO: 1738334 - DNA, 15 bp, Homo sapiens
tgaaacaacccactc

SEQ ID NO: 1738335 - DNA, 15 bp, Homo sapiens
gaaacaacccactct

SEQ ID NO: 1738336 - DNA, 15 bp, Homo sapiens
aaacaacccactctg

SEQ ID NO: 1738337 - DNA, 15 bp, Homo sapiens
aacaacccactctgt

SEQ ID NO: 1738338 - DNA, 15 bp, Homo sapiens
acaacccactctgtc

SEQ ID NO: 1738339 - DNA, 15 bp, Homo sapiens
caacccactctgtct

SEQ ID NO: 1738340 - DNA, 15 bp, Homo sapiens
aacccactctgtctc

SEQ ID NO: 1738341 - DNA, 15 bp, Homo sapiens
acccactctgtctct

SEQ ID NO: 1738342 - DNA, 15 bp, Homo sapiens
cccactctgtctctt

SEQ ID NO: 1738343 - DNA, 15 bp, Homo sapiens
ccactctgtctcttc

SEQ ID NO: 1738344 - DNA, 15 bp, Homo sapiens
cactctgtctcttca

SEQ ID NO: 1738345 - DNA, 15 bp, Homo sapiens
actctgtctcttcat

SEQ ID NO: 1738346 - DNA, 15 bp, Homo sapiens
ctctgtctcttcatc

SEQ ID NO: 1738347 - DNA, 15 bp, Homo sapiens
tctgtctcttcatct

SEQ ID NO: 1738348 - DNA, 15 bp, Homo sapiens
ctgtctcttcatctg

SEQ ID NO: 1738349 - DNA, 15 bp, Homo sapiens
tgtctcttcatctgt

SEQ ID NO: 1738350 - DNA, 15 bp, Homo sapiens
gtctcttcatctgta

SEQ ID NO: 1738351 - DNA, 15 bp, Homo sapiens
tctcttcatctgtaa

SEQ ID NO: 1738352 - DNA, 15 bp, Homo sapiens
ctcttcatctgtaaa

SEQ ID NO: 1738353 - DNA, 15 bp, Homo sapiens
tcttcatctgtaaaa

SEQ ID NO: 1738354 - DNA, 15 bp, Homo sapiens
cttcatctgtaaaat

SEQ ID NO: 1738355 - DNA, 15 bp, Homo sapiens
ttcatctgtaaaatg

SEQ ID NO: 1738356 - DNA, 15 bp, Homo sapiens
catctgtaaaatgga

SEQ ID NO: 1738357 - DNA, 15 bp, Homo sapiens
atctgtaaaatggat

SEQ ID NO: 1738358 - DNA, 15 bp, Homo sapiens
tctgtaaaatggata

SEQ ID NO: 1738359 - DNA, 15 bp, Homo sapiens
ctgtaaaatggatag

SEQ ID NO: 1738360 - DNA, 15 bp, Homo sapiens
tgtaaaatggatagg

SEQ ID NO: 1738361 - DNA, 15 bp, Homo sapiens
gtaaaatggataggt

SEQ ID NO: 1738362 - DNA, 15 bp, Homo sapiens
taaaatggataggtt

SEQ ID NO: 1738363 - DNA, 15 bp, Homo sapiens
aaaatggataggtta

SEQ ID NO: 1738364 - DNA, 15 bp, Homo sapiens
aaatggataggttat

SEQ ID NO: 1738365 - DNA, 15 bp, Homo sapiens
aatggataggttata

SEQ ID NO: 1738366 - DNA, 15 bp, Homo sapiens
atggataggttatat

SEQ ID NO: 1738367 - DNA, 15 bp, Homo sapiens
tggataggttatata

SEQ ID NO: 1738368 - DNA, 15 bp, Homo sapiens
ggataggttatatag

SEQ ID NO: 1738369 - DNA, 15 bp, Homo sapiens
gataggttatatagg

SEQ ID NO: 1738370 - DNA, 15 bp, Homo sapiens
ataggttatataggt

SEQ ID NO: 1738371 - DNA, 15 bp, Homo sapiens
taggttatataggta

SEQ ID NO: 1738372 - DNA, 15 bp, Homo sapiens
aggttatataggtac

SEQ ID NO: 1738373 - DNA, 15 bp, Homo sapiens
ggttatataggtact

SEQ ID NO: 1738374 - DNA, 15 bp, Homo sapiens
gttatataggtactc

SEQ ID NO: 1738375 - DNA, 15 bp, Homo sapiens
ttatataggtactct

SEQ ID NO: 1738376 - DNA, 15 bp, Homo sapiens
tatataggtactctc

SEQ ID NO: 1738377 - DNA, 15 bp, Homo sapiens
atataggtactctct

SEQ ID NO: 1738378 - DNA, 15 bp, Homo sapiens
tataggtactctcta

SEQ ID NO: 1738379 - DNA, 15 bp, Homo sapiens
ataggtactctctaa

SEQ ID NO: 1738380 - DNA, 15 bp, Homo sapiens
taggtactctctaaa

SEQ ID NO: 1738381 - DNA, 15 bp, Homo sapiens
aggtactctctaaaa

SEQ ID NO: 1738382 - DNA, 15 bp, Homo sapiens
ggtactctctaaaat

SEQ ID NO: 1738383 - DNA, 15 bp, Homo sapiens
gtactctctaaaatg

SEQ ID NO: 1738384 - DNA, 15 bp, Homo sapiens
tactctctaaaatga

SEQ ID NO: 1738385 - DNA, 15 bp, Homo sapiens
actctctaaaatgaa

SEQ ID NO: 1738386 - DNA, 15 bp, Homo sapiens
ctctctaaaatgaac

SEQ ID NO: 1738387 - DNA, 15 bp, Homo sapiens
tctctaaaatgaaca

SEQ ID NO: 1738388 - DNA, 15 bp, Homo sapiens
ctctaaaatgaacag

SEQ ID NO: 1738389 - DNA, 15 bp, Homo sapiens
tctaaaatgaacagg

SEQ ID NO: 1738390 - DNA, 15 bp, Homo sapiens
ctaaaatgaacaggc

SEQ ID NO: 1738391 - DNA, 15 bp, Homo sapiens
taaaatgaacaggca

SEQ ID NO: 1738392 - DNA, 15 bp, Homo sapiens
aaaatgaacaggcag

SEQ ID NO: 1738393 - DNA, 15 bp, Homo sapiens
aaatgaacaggcagc

SEQ ID NO: 1738394 - DNA, 15 bp, Homo sapiens
aatgaacaggcagct

SEQ ID NO: 1738395 - DNA, 15 bp, Homo sapiens
atgaacaggcagctt

SEQ ID NO: 1738396 - DNA, 15 bp, Homo sapiens
tgaacaggcagcttc

SEQ ID NO: 1738397 - DNA, 15 bp, Homo sapiens
gaacaggcagcttca

SEQ ID NO: 1738398 - DNA, 15 bp, Homo sapiens
aacaggcagcttcag

SEQ ID NO: 1738399 - DNA, 15 bp, Homo sapiens
acaggcagcttcagg

SEQ ID NO: 1738400 - DNA, 15 bp, Homo sapiens
caggcagcttcagga

SEQ ID NO: 1738401 - DNA, 15 bp, Homo sapiens
aggcagcttcaggag

SEQ ID NO: 1738402 - DNA, 15 bp, Homo sapiens
ggcagcttcaggagt

SEQ ID NO: 1738403 - DNA, 15 bp, Homo sapiens
gcagcttcaggagtt

SEQ ID NO: 1738404 - DNA, 15 bp, Homo sapiens
cagcttcaggagttc

SEQ ID NO: 1738405 - DNA, 15 bp, Homo sapiens
agcttcaggagttcc

SEQ ID NO: 1738406 - DNA, 15 bp, Homo sapiens
gcttcaggagttccc

SEQ ID NO: 1738407 - DNA, 15 bp, Homo sapiens
cttcaggagttcccc

SEQ ID NO: 1738408 - DNA, 15 bp, Homo sapiens
ttcaggagttcccca

SEQ ID NO: 1738409 - DNA, 15 bp, Homo sapiens
tcaggagttccccag

SEQ ID NO: 1738410 - DNA, 15 bp, Homo sapiens
caggagttccccagt

SEQ ID NO: 1738411 - DNA, 15 bp, Homo sapiens
aggagttccccagtt

SEQ ID NO: 1738412 - DNA, 15 bp, Homo sapiens
ggagttccccagttc

SEQ ID NO: 1738413 - DNA, 15 bp, Homo sapiens
gagttccccagttcc

SEQ ID NO: 1738414 - DNA, 15 bp, Homo sapiens
agttccccagttcct

SEQ ID NO: 1738415 - DNA, 15 bp, Homo sapiens
gttccccagttcctt

SEQ ID NO: 1738416 - DNA, 15 bp, Homo sapiens
ttccccagttcctta

SEQ ID NO: 1738417 - DNA, 15 bp, Homo sapiens
tccccagttccttac

SEQ ID NO: 1738418 - DNA, 15 bp, Homo sapiens
ccccagttccttact

SEQ ID NO: 1738419 - DNA, 15 bp, Homo sapiens
cccagttccttacta

SEQ ID NO: 1738420 - DNA, 15 bp, Homo sapiens
ccagttccttactac

SEQ ID NO: 1738421 - DNA, 15 bp, Homo sapiens
cagttccttactacg

SEQ ID NO: 1738422 - DNA, 15 bp, Homo sapiens
agttccttactacgg

SEQ ID NO: 1738423 - DNA, 15 bp, Homo sapiens
gttccttactacggg

SEQ ID NO: 1738424 - DNA, 15 bp, Homo sapiens
ttccttactacggga

SEQ ID NO: 1738425 - DNA, 15 bp, Homo sapiens
tccttactacgggag

SEQ ID NO: 1738426 - DNA, 15 bp, Homo sapiens
ccttactacgggagg

SEQ ID NO: 1738427 - DNA, 15 bp, Homo sapiens
cttactacgggaggc

SEQ ID NO: 1738428 - DNA, 15 bp, Homo sapiens
ttactacgggaggca

SEQ ID NO: 1738429 - DNA, 15 bp, Homo sapiens
tactacgggaggcat

SEQ ID NO: 1738430 - DNA, 15 bp, Homo sapiens
actacgggaggcatt

SEQ ID NO: 1738431 - DNA, 15 bp, Homo sapiens
ctacgggaggcattc

SEQ ID NO: 1738432 - DNA, 15 bp, Homo sapiens
tacgggaggcattca

SEQ ID NO: 1738433 - DNA, 15 bp, Homo sapiens
acgggaggcattcag

SEQ ID NO: 1738434 - DNA, 15 bp, Homo sapiens
cgggaggcattcagg

SEQ ID NO: 1738435 - DNA, 15 bp, Homo sapiens
gggaggcattcaggt

SEQ ID NO: 1738436 - DNA, 15 bp, Homo sapiens
ggaggcattcaggtg

SEQ ID NO: 1738437 - DNA, 15 bp, Homo sapiens
gaggcattcaggtgg

SEQ ID NO: 1738438 - DNA, 15 bp, Homo sapiens
aggcattcaggtgga

SEQ ID NO: 1738439 - DNA, 15 bp, Homo sapiens
ggcattcaggtggac

SEQ ID NO: 1738440 - DNA, 15 bp, Homo sapiens
gcattcaggtggact

SEQ ID NO: 1738441 - DNA, 15 bp, Homo sapiens
cattcaggtggactg

SEQ ID NO: 1738442 - DNA, 15 bp, Homo sapiens
attcaggtggactgg

SEQ ID NO: 1738443 - DNA, 15 bp, Homo sapiens
ttcaggtggactggg

SEQ ID NO: 1738444 - DNA, 15 bp, Homo sapiens
tcaggtggactgggg

SEQ ID NO: 1738445 - DNA, 15 bp, Homo sapiens
caggtggactggggt

SEQ ID NO: 1738446 - DNA, 15 bp, Homo sapiens
aggtggactggggtg

SEQ ID NO: 1738447 - DNA, 15 bp, Homo sapiens
ggtggactggggtgt

SEQ ID NO: 1738448 - DNA, 15 bp, Homo sapiens
gtggactggggtgta

SEQ ID NO: 1738449 - DNA, 15 bp, Homo sapiens
tggactggggtgtaa

SEQ ID NO: 1738450 - DNA, 15 bp, Homo sapiens
ggactggggtgtaag

SEQ ID NO: 1738451 - DNA, 15 bp, Homo sapiens
gactggggtgtaagt

SEQ ID NO: 1738452 - DNA, 15 bp, Homo sapiens
actggggtgtaagtt

SEQ ID NO: 1738453 - DNA, 15 bp, Homo sapiens
ctggggtgtaagttc

SEQ ID NO: 1738454 - DNA, 15 bp, Homo sapiens
tggggtgtaagttct

SEQ ID NO: 1738455 - DNA, 15 bp, Homo sapiens
ggggtgtaagttctc

SEQ ID NO: 1738456 - DNA, 15 bp, Homo sapiens
gggtgtaagttctcc

SEQ ID NO: 1738457 - DNA, 15 bp, Homo sapiens
ggtgtaagttctcca

SEQ ID NO: 1738458 - DNA, 15 bp, Homo sapiens
gtgtaagttctccat

SEQ ID NO: 1738459 - DNA, 15 bp, Homo sapiens
tgtaagttctccatc

SEQ ID NO: 1738460 - DNA, 15 bp, Homo sapiens
gtaagttctccatcc

SEQ ID NO: 1738461 - DNA, 15 bp, Homo sapiens
taagttctccatcct

SEQ ID NO: 1738462 - DNA, 15 bp, Homo sapiens
aagttctccatcctg

SEQ ID NO: 1738463 - DNA, 15 bp, Homo sapiens
agttctccatcctgg

SEQ ID NO: 1738464 - DNA, 15 bp, Homo sapiens
gttctccatcctggc

SEQ ID NO: 1738465 - DNA, 15 bp, Homo sapiens
ttctccatcctggca

SEQ ID NO: 1738466 - DNA, 15 bp, Homo sapiens
tctccatcctggcat

SEQ ID NO: 1738467 - DNA, 15 bp, Homo sapiens
ctccatcctggcata

SEQ ID NO: 1738468 - DNA, 15 bp, Homo sapiens
tccatcctggcatat

SEQ ID NO: 1738469 - DNA, 15 bp, Homo sapiens
ccatcctggcatatt

SEQ ID NO: 1738470 - DNA, 15 bp, Homo sapiens
catcctggcatatta

SEQ ID NO: 1738471 - DNA, 15 bp, Homo sapiens
atcctggcatattag

SEQ ID NO: 1738472 - DNA, 15 bp, Homo sapiens
tcctggcatattaga

SEQ ID NO: 1738473 - DNA, 15 bp, Homo sapiens
cctggcatattagaa

SEQ ID NO: 1738474 - DNA, 15 bp, Homo sapiens
ctggcatattagaat

SEQ ID NO: 1738475 - DNA, 15 bp, Homo sapiens
tggcatattagaatc

SEQ ID NO: 1738476 - DNA, 15 bp, Homo sapiens
ggcatattagaatca

SEQ ID NO: 1738477 - DNA, 15 bp, Homo sapiens
gcatattagaatcaa

SEQ ID NO: 1738478 - DNA, 15 bp, Homo sapiens
catattagaatcaac

SEQ ID NO: 1738479 - DNA, 15 bp, Homo sapiens
atattagaatcaacc

SEQ ID NO: 1738480 - DNA, 15 bp, Homo sapiens
tattagaatcaacca

SEQ ID NO: 1738481 - DNA, 15 bp, Homo sapiens
attagaatcaaccag

SEQ ID NO: 1738482 - DNA, 15 bp, Homo sapiens
ttagaatcaaccagg

SEQ ID NO: 1738483 - DNA, 15 bp, Homo sapiens
tagaatcaaccaggg

SEQ ID NO: 1738484 - DNA, 15 bp, Homo sapiens
agaatcaaccagggt

SEQ ID NO: 1738485 - DNA, 15 bp, Homo sapiens
gaatcaaccagggta

SEQ ID NO: 1738486 - DNA, 15 bp, Homo sapiens
aatcaaccagggtac

SEQ ID NO: 1738487 - DNA, 15 bp, Homo sapiens
atcaaccagggtact

SEQ ID NO: 1738488 - DNA, 15 bp, Homo sapiens
tcaaccagggtactt

SEQ ID NO: 1738489 - DNA, 15 bp, Homo sapiens
caaccagggtacttt

SEQ ID NO: 1738490 - DNA, 15 bp, Homo sapiens
aaccagggtactttt

SEQ ID NO: 1738491 - DNA, 15 bp, Homo sapiens
accagggtacttttt

SEQ ID NO: 1738492 - DNA, 15 bp, Homo sapiens
ccagggtactttttc

SEQ ID NO: 1738493 - DNA, 15 bp, Homo sapiens
cagggtactttttct

SEQ ID NO: 1738494 - DNA, 15 bp, Homo sapiens
agggtactttttctt

SEQ ID NO: 1738495 - DNA, 15 bp, Homo sapiens
gggtactttttcttt

SEQ ID NO: 1738496 - DNA, 15 bp, Homo sapiens
ggtactttttctttt

SEQ ID NO: 1738497 - DNA, 15 bp, Homo sapiens
gtactttttcttttt

SEQ ID NO: 1738498 - DNA, 15 bp, Homo sapiens
tactttttctttttt

SEQ ID NO: 1738499 - DNA, 15 bp, Homo sapiens
actttttcttttttg

SEQ ID NO: 1738500 - DNA, 15 bp, Homo sapiens
gggtcttgctctgtt

SEQ ID NO: 1738501 - DNA, 15 bp, Homo sapiens
ggtcttgctctgttg

SEQ ID NO: 1738502 - DNA, 15 bp, Homo sapiens
ctagagtgcagtgaa

SEQ ID NO: 1738503 - DNA, 15 bp, Homo sapiens
tagagtgcagtgaag

SEQ ID NO: 1738504 - DNA, 15 bp, Homo sapiens
agagtgcagtgaagt

SEQ ID NO: 1738505 - DNA, 15 bp, Homo sapiens
gagtgcagtgaagtg

SEQ ID NO: 1738506 - DNA, 15 bp, Homo sapiens
agtgcagtgaagtga

SEQ ID NO: 1738507 - DNA, 15 bp, Homo sapiens
gtgcagtgaagtgat

SEQ ID NO: 1738508 - DNA, 15 bp, Homo sapiens
tgcagtgaagtgatc

SEQ ID NO: 1738509 - DNA, 15 bp, Homo sapiens
gcagtgaagtgatca

SEQ ID NO: 1738510 - DNA, 15 bp, Homo sapiens
cagtgaagtgatcat

SEQ ID NO: 1738511 - DNA, 15 bp, Homo sapiens
agtgaagtgatcata

SEQ ID NO: 1738512 - DNA, 15 bp, Homo sapiens
gtgaagtgatcatag

SEQ ID NO: 1738513 - DNA, 15 bp, Homo sapiens
tgaagtgatcatagc

SEQ ID NO: 1738514 - DNA, 15 bp, Homo sapiens
gaagtgatcatagct

SEQ ID NO: 1738515 - DNA, 15 bp, Homo sapiens
aagtgatcatagctc

SEQ ID NO: 1738516 - DNA, 15 bp, Homo sapiens
agtgatcatagctca

SEQ ID NO: 1738517 - DNA, 15 bp, Homo sapiens
gatcatagctcactc

SEQ ID NO: 1738518 - DNA, 15 bp, Homo sapiens
atcatagctcactcc

SEQ ID NO: 1738519 - DNA, 15 bp, Homo sapiens
tcatagctcactcca

SEQ ID NO: 1738520 - DNA, 15 bp, Homo sapiens
catagctcactccag

SEQ ID NO: 1738521 - DNA, 15 bp, Homo sapiens
atagctcactccagc

SEQ ID NO: 1738522 - DNA, 15 bp, Homo sapiens
tagctcactccagcc

SEQ ID NO: 1738523 - DNA, 15 bp, Homo sapiens
agctcactccagcct

SEQ ID NO: 1738524 - DNA, 15 bp, Homo sapiens
gctcactccagcctt

SEQ ID NO: 1738525 - DNA, 15 bp, Homo sapiens
ctcactccagccttg

SEQ ID NO: 1738526 - DNA, 15 bp, Homo sapiens
tcactccagccttga

SEQ ID NO: 1738527 - DNA, 15 bp, Homo sapiens
cactccagccttgag

SEQ ID NO: 1738528 - DNA, 15 bp, Homo sapiens
actccagccttgagc

SEQ ID NO: 1738529 - DNA, 15 bp, Homo sapiens
ctccagccttgagct

SEQ ID NO: 1738530 - DNA, 15 bp, Homo sapiens
tccagccttgagctc

SEQ ID NO: 1738531 - DNA, 15 bp, Homo sapiens
ccagccttgagctcc

SEQ ID NO: 1738532 - DNA, 15 bp, Homo sapiens
cagccttgagctcct

SEQ ID NO: 1738533 - DNA, 15 bp, Homo sapiens
agccttgagctcctg

SEQ ID NO: 1738534 - DNA, 15 bp, Homo sapiens
gccttgagctcctgg

SEQ ID NO: 1738535 - DNA, 15 bp, Homo sapiens
ccttgagctcctggg

SEQ ID NO: 1738536 - DNA, 15 bp, Homo sapiens
cttgagctcctgggc

SEQ ID NO: 1738537 - DNA, 15 bp, Homo sapiens
ttgagctcctgggct

SEQ ID NO: 1738538 - DNA, 15 bp, Homo sapiens
tgagctcctgggctc

SEQ ID NO: 1738539 - DNA, 15 bp, Homo sapiens
tcctgggctcaagta

SEQ ID NO: 1738540 - DNA, 15 bp, Homo sapiens
cctgggctcaagtaa

SEQ ID NO: 1738541 - DNA, 15 bp, Homo sapiens
ctgggctcaagtaat

SEQ ID NO: 1738542 - DNA, 15 bp, Homo sapiens
tgggctcaagtaatc

SEQ ID NO: 1738543 - DNA, 15 bp, Homo sapiens
gggctcaagtaatcc

SEQ ID NO: 1738544 - DNA, 15 bp, Homo sapiens
ggctcaagtaatcct

SEQ ID NO: 1738545 - DNA, 15 bp, Homo sapiens
gctcaagtaatcctc

SEQ ID NO: 1738546 - DNA, 15 bp, Homo sapiens
ctcaagtaatcctcc

SEQ ID NO: 1738547 - DNA, 15 bp, Homo sapiens
tcaagtaatcctcct

SEQ ID NO: 1738548 - DNA, 15 bp, Homo sapiens
caagtaatcctcctg

SEQ ID NO: 1738549 - DNA, 15 bp, Homo sapiens
aagtaatcctcctgc

SEQ ID NO: 1738550 - DNA, 15 bp, Homo sapiens
agtaatcctcctgct

SEQ ID NO: 1738551 - DNA, 15 bp, Homo sapiens
gtaatcctcctgctt

SEQ ID NO: 1738552 - DNA, 15 bp, Homo sapiens
taatcctcctgcttc

SEQ ID NO: 1738553 - DNA, 15 bp, Homo sapiens
aatcctcctgcttca

SEQ ID NO: 1738554 - DNA, 15 bp, Homo sapiens
atcctcctgcttcag

SEQ ID NO: 1738555 - DNA, 15 bp, Homo sapiens
tcctcctgcttcagt

SEQ ID NO: 1738556 - DNA, 15 bp, Homo sapiens
cctcctgcttcagtc

SEQ ID NO: 1738557 - DNA, 15 bp, Homo sapiens
ctcctgcttcagtct

SEQ ID NO: 1738558 - DNA, 15 bp, Homo sapiens
tcctgcttcagtctc

SEQ ID NO: 1738559 - DNA, 15 bp, Homo sapiens
cctgcttcagtctcc

SEQ ID NO: 1738560 - DNA, 15 bp, Homo sapiens
ctgcttcagtctcct

SEQ ID NO: 1738561 - DNA, 15 bp, Homo sapiens
tgcttcagtctcctg

SEQ ID NO: 1738562 - DNA, 15 bp, Homo sapiens
gcttcagtctcctgt

SEQ ID NO: 1738563 - DNA, 15 bp, Homo sapiens
cttcagtctcctgtg

SEQ ID NO: 1738564 - DNA, 15 bp, Homo sapiens
ttcagtctcctgtgt

SEQ ID NO: 1738565 - DNA, 15 bp, Homo sapiens
tcagtctcctgtgta

SEQ ID NO: 1738566 - DNA, 15 bp, Homo sapiens
cagtctcctgtgtag

SEQ ID NO: 1738567 - DNA, 15 bp, Homo sapiens
agtctcctgtgtagc

SEQ ID NO: 1738568 - DNA, 15 bp, Homo sapiens
gtctcctgtgtagct

SEQ ID NO: 1738569 - DNA, 15 bp, Homo sapiens
tctcctgtgtagctg

SEQ ID NO: 1738570 - DNA, 15 bp, Homo sapiens
ctcctgtgtagctgg

SEQ ID NO: 1738571 - DNA, 15 bp, Homo sapiens
tcctgtgtagctggg

SEQ ID NO: 1738572 - DNA, 15 bp, Homo sapiens
cctgtgtagctggga

SEQ ID NO: 1738573 - DNA, 15 bp, Homo sapiens
ctgtgtagctgggac

SEQ ID NO: 1738574 - DNA, 15 bp, Homo sapiens
tgtgtagctgggact

SEQ ID NO: 1738575 - DNA, 15 bp, Homo sapiens
gtgtagctgggacta

SEQ ID NO: 1738576 - DNA, 15 bp, Homo sapiens
ggactacaggcacct

SEQ ID NO: 1738577 - DNA, 15 bp, Homo sapiens
gactacaggcacctg

SEQ ID NO: 1738578 - DNA, 15 bp, Homo sapiens
actacaggcacctgc

SEQ ID NO: 1738579 - DNA, 15 bp, Homo sapiens
ctacaggcacctgcc

SEQ ID NO: 1738580 - DNA, 15 bp, Homo sapiens
tacaggcacctgcca

SEQ ID NO: 1738581 - DNA, 15 bp, Homo sapiens
acaggcacctgccac

SEQ ID NO: 1738582 - DNA, 15 bp, Homo sapiens
caggcacctgccacc

SEQ ID NO: 1738583 - DNA, 15 bp, Homo sapiens
aggcacctgccacca

SEQ ID NO: 1738584 - DNA, 15 bp, Homo sapiens
ggcacctgccaccat

SEQ ID NO: 1738585 - DNA, 15 bp, Homo sapiens
gcacctgccaccatg

SEQ ID NO: 1738586 - DNA, 15 bp, Homo sapiens
cacctgccaccatgc

SEQ ID NO: 1738587 - DNA, 15 bp, Homo sapiens
acctgccaccatgcc

SEQ ID NO: 1738588 - DNA, 15 bp, Homo sapiens
ccaccatgcccggcc

SEQ ID NO: 1738589 - DNA, 15 bp, Homo sapiens
caccatgcccggcca

SEQ ID NO: 1738590 - DNA, 15 bp, Homo sapiens
accatgcccggccaa

SEQ ID NO: 1738591 - DNA, 15 bp, Homo sapiens
ccatgcccggccaac

SEQ ID NO: 1738592 - DNA, 15 bp, Homo sapiens
catgcccggccaact

SEQ ID NO: 1738593 - DNA, 15 bp, Homo sapiens
atgcccggccaactt

SEQ ID NO: 1738594 - DNA, 15 bp, Homo sapiens
tgcccggccaacttt

SEQ ID NO: 1738595 - DNA, 15 bp, Homo sapiens
gcccggccaactttt

SEQ ID NO: 1738596 - DNA, 15 bp, Homo sapiens
cccggccaacttttt

SEQ ID NO: 1738597 - DNA, 15 bp, Homo sapiens
ccggccaactttttg

SEQ ID NO: 1738598 - DNA, 15 bp, Homo sapiens
cggccaactttttgt

SEQ ID NO: 1738599 - DNA, 15 bp, Homo sapiens
ggccaactttttgta

SEQ ID NO: 1738600 - DNA, 15 bp, Homo sapiens
gccaactttttgtaa

SEQ ID NO: 1738601 - DNA, 15 bp, Homo sapiens
ccaactttttgtaaa

SEQ ID NO: 1738602 - DNA, 15 bp, Homo sapiens
caactttttgtaaag

SEQ ID NO: 1738603 - DNA, 15 bp, Homo sapiens
aactttttgtaaagg

SEQ ID NO: 1738604 - DNA, 15 bp, Homo sapiens
actttttgtaaaggt

SEQ ID NO: 1738605 - DNA, 15 bp, Homo sapiens
ctttttgtaaaggtg

SEQ ID NO: 1738606 - DNA, 15 bp, Homo sapiens
tttttgtaaaggtgg

SEQ ID NO: 1738607 - DNA, 15 bp, Homo sapiens
ttttgtaaaggtgga

SEQ ID NO: 1738608 - DNA, 15 bp, Homo sapiens
tttgtaaaggtggat

SEQ ID NO: 1738609 - DNA, 15 bp, Homo sapiens
ttgtaaaggtggatt

SEQ ID NO: 1738610 - DNA, 15 bp, Homo sapiens
tgtaaaggtggattt

SEQ ID NO: 1738611 - DNA, 15 bp, Homo sapiens
gtaaaggtggatttc

SEQ ID NO: 1738612 - DNA, 15 bp, Homo sapiens
taaaggtggatttca

SEQ ID NO: 1738613 - DNA, 15 bp, Homo sapiens
aaaggtggatttcac

SEQ ID NO: 1738614 - DNA, 15 bp, Homo sapiens
aaggtggatttcacc

SEQ ID NO: 1738615 - DNA, 15 bp, Homo sapiens
aggtggatttcacca

SEQ ID NO: 1738616 - DNA, 15 bp, Homo sapiens
ggtggatttcaccac

SEQ ID NO: 1738617 - DNA, 15 bp, Homo sapiens
gtggatttcaccacg

SEQ ID NO: 1738618 - DNA, 15 bp, Homo sapiens
tggatttcaccacgt

SEQ ID NO: 1738619 - DNA, 15 bp, Homo sapiens
ggatttcaccacgtt

SEQ ID NO: 1738620 - DNA, 15 bp, Homo sapiens
gatttcaccacgttg

SEQ ID NO: 1738621 - DNA, 15 bp, Homo sapiens
atttcaccacgttgc

SEQ ID NO: 1738622 - DNA, 15 bp, Homo sapiens
tttcaccacgttgcc

SEQ ID NO: 1738623 - DNA, 15 bp, Homo sapiens
ttcaccacgttgccc

SEQ ID NO: 1738624 - DNA, 15 bp, Homo sapiens
tcaccacgttgccca

SEQ ID NO: 1738625 - DNA, 15 bp, Homo sapiens
caccacgttgcccag

SEQ ID NO: 1738626 - DNA, 15 bp, Homo sapiens
accacgttgcccagg

SEQ ID NO: 1738627 - DNA, 15 bp, Homo sapiens
ccacgttgcccaggc

SEQ ID NO: 1738628 - DNA, 15 bp, Homo sapiens
cacgttgcccaggct

SEQ ID NO: 1738629 - DNA, 15 bp, Homo sapiens
gcctcaagtgatcct

SEQ ID NO: 1738630 - DNA, 15 bp, Homo sapiens
cctcaagtgatcctc

SEQ ID NO: 1738631 - DNA, 15 bp, Homo sapiens
ctcccaaagtgctgt

SEQ ID NO: 1738632 - DNA, 15 bp, Homo sapiens
tcccaaagtgctgta

SEQ ID NO: 1738633 - DNA, 15 bp, Homo sapiens
cccaaagtgctgtaa

SEQ ID NO: 1738634 - DNA, 15 bp, Homo sapiens
ccaaagtgctgtaat

SEQ ID NO: 1738635 - DNA, 15 bp, Homo sapiens
caaagtgctgtaatt

SEQ ID NO: 1738636 - DNA, 15 bp, Homo sapiens
aaagtgctgtaatta

SEQ ID NO: 1738637 - DNA, 15 bp, Homo sapiens
aagtgctgtaattat

SEQ ID NO: 1738638 - DNA, 15 bp, Homo sapiens
agtgctgtaattata

SEQ ID NO: 1738639 - DNA, 15 bp, Homo sapiens
gtgctgtaattatag

SEQ ID NO: 1738640 - DNA, 15 bp, Homo sapiens
tgctgtaattatagg

SEQ ID NO: 1738641 - DNA, 15 bp, Homo sapiens
gctgtaattataggt

SEQ ID NO: 1738642 - DNA, 15 bp, Homo sapiens
ctgtaattataggtg

SEQ ID NO: 1738643 - DNA, 15 bp, Homo sapiens
tgtaattataggtgt

SEQ ID NO: 1738644 - DNA, 15 bp, Homo sapiens
gtaattataggtgtg

SEQ ID NO: 1738645 - DNA, 15 bp, Homo sapiens
taattataggtgtga

SEQ ID NO: 1738646 - DNA, 15 bp, Homo sapiens
aattataggtgtgag

SEQ ID NO: 1738647 - DNA, 15 bp, Homo sapiens
ggtgtgagccaccgg

SEQ ID NO: 1738648 - DNA, 15 bp, Homo sapiens
gtgtgagccaccggg

SEQ ID NO: 1738649 - DNA, 15 bp, Homo sapiens
tgtgagccaccgggc

SEQ ID NO: 1738650 - DNA, 15 bp, Homo sapiens
gtgagccaccgggcc

SEQ ID NO: 1738651 - DNA, 15 bp, Homo sapiens
tgagccaccgggcct

SEQ ID NO: 1738652 - DNA, 15 bp, Homo sapiens
gagccaccgggcctg

SEQ ID NO: 1738653 - DNA, 15 bp, Homo sapiens
agccaccgggcctgg

SEQ ID NO: 1738654 - DNA, 15 bp, Homo sapiens
gccaccgggcctggc

SEQ ID NO: 1738655 - DNA, 15 bp, Homo sapiens
ccaccgggcctggcg

SEQ ID NO: 1738656 - DNA, 15 bp, Homo sapiens
caccgggcctggcgg

SEQ ID NO: 1738657 - DNA, 15 bp, Homo sapiens
accgggcctggcggg

SEQ ID NO: 1738658 - DNA, 15 bp, Homo sapiens
ccgggcctggcgggg

SEQ ID NO: 1738659 - DNA, 15 bp, Homo sapiens
cgggcctggcggggg

SEQ ID NO: 1738660 - DNA, 15 bp, Homo sapiens
gggcctggcgggggg

SEQ ID NO: 1738661 - DNA, 15 bp, Homo sapiens
ggcctggcggggggc

SEQ ID NO: 1738662 - DNA, 15 bp, Homo sapiens
gcctggcggggggca

SEQ ID NO: 1738663 - DNA, 15 bp, Homo sapiens
cctggcggggggcac

SEQ ID NO: 1738664 - DNA, 15 bp, Homo sapiens
ctggcggggggcact

SEQ ID NO: 1738665 - DNA, 15 bp, Homo sapiens
tggcggggggcactt

SEQ ID NO: 1738666 - DNA, 15 bp, Homo sapiens
ggcggggggcacttt

SEQ ID NO: 1738667 - DNA, 15 bp, Homo sapiens
gcggggggcacttta

SEQ ID NO: 1738668 - DNA, 15 bp, Homo sapiens
cggggggcactttat

SEQ ID NO: 1738669 - DNA, 15 bp, Homo sapiens
ggggggcactttata

SEQ ID NO: 1738670 - DNA, 15 bp, Homo sapiens
gggggcactttataa

SEQ ID NO: 1738671 - DNA, 15 bp, Homo sapiens
ggggcactttataaa

SEQ ID NO: 1738672 - DNA, 15 bp, Homo sapiens
gggcactttataaaa

SEQ ID NO: 1738673 - DNA, 15 bp, Homo sapiens
ggcactttataaaaa

SEQ ID NO: 1738674 - DNA, 15 bp, Homo sapiens
gcactttataaaaat

SEQ ID NO: 1738675 - DNA, 15 bp, Homo sapiens
cactttataaaaatg

SEQ ID NO: 1738676 - DNA, 15 bp, Homo sapiens
actttataaaaatgt

SEQ ID NO: 1738677 - DNA, 15 bp, Homo sapiens
ctttataaaaatgtg

SEQ ID NO: 1738678 - DNA, 15 bp, Homo sapiens
tttataaaaatgtga

SEQ ID NO: 1738679 - DNA, 15 bp, Homo sapiens
ttataaaaatgtgat

SEQ ID NO: 1738680 - DNA, 15 bp, Homo sapiens
tataaaaatgtgatg

SEQ ID NO: 1738681 - DNA, 15 bp, Homo sapiens
ataaaaatgtgatgc

SEQ ID NO: 1738682 - DNA, 15 bp, Homo sapiens
taaaaatgtgatgct

SEQ ID NO: 1738683 - DNA, 15 bp, Homo sapiens
aaaaatgtgatgctc

SEQ ID NO: 1738684 - DNA, 15 bp, Homo sapiens
aaaatgtgatgctct

SEQ ID NO: 1738685 - DNA, 15 bp, Homo sapiens
aaatgtgatgctctg

SEQ ID NO: 1738686 - DNA, 15 bp, Homo sapiens
aatgtgatgctctgg

SEQ ID NO: 1738687 - DNA, 15 bp, Homo sapiens
atgtgatgctctgga

SEQ ID NO: 1738688 - DNA, 15 bp, Homo sapiens
tgtgatgctctggac

SEQ ID NO: 1738689 - DNA, 15 bp, Homo sapiens
gtgatgctctggact

SEQ ID NO: 1738690 - DNA, 15 bp, Homo sapiens
tgatgctctggactc

SEQ ID NO: 1738691 - DNA, 15 bp, Homo sapiens
gatgctctggactca

SEQ ID NO: 1738692 - DNA, 15 bp, Homo sapiens
atgctctggactcaa

SEQ ID NO: 1738693 - DNA, 15 bp, Homo sapiens
tgctctggactcaac

SEQ ID NO: 1738694 - DNA, 15 bp, Homo sapiens
gctctggactcaacc

SEQ ID NO: 1738695 - DNA, 15 bp, Homo sapiens
ctctggactcaacca

SEQ ID NO: 1738696 - DNA, 15 bp, Homo sapiens
tctggactcaaccag

SEQ ID NO: 1738697 - DNA, 15 bp, Homo sapiens
ctggactcaaccaga

SEQ ID NO: 1738698 - DNA, 15 bp, Homo sapiens
tggactcaaccagag

SEQ ID NO: 1738699 - DNA, 15 bp, Homo sapiens
ggactcaaccagaga

SEQ ID NO: 1738700 - DNA, 15 bp, Homo sapiens
gactcaaccagagat

SEQ ID NO: 1738701 - DNA, 15 bp, Homo sapiens
actcaaccagagatt

SEQ ID NO: 1738702 - DNA, 15 bp, Homo sapiens
ctcaaccagagattc

SEQ ID NO: 1738703 - DNA, 15 bp, Homo sapiens
tcaaccagagattct

SEQ ID NO: 1738704 - DNA, 15 bp, Homo sapiens
caaccagagattctg

SEQ ID NO: 1738705 - DNA, 15 bp, Homo sapiens
aaccagagattctgg

SEQ ID NO: 1738706 - DNA, 15 bp, Homo sapiens
accagagattctggc

SEQ ID NO: 1738707 - DNA, 15 bp, Homo sapiens
ccagagattctggct

SEQ ID NO: 1738708 - DNA, 15 bp, Homo sapiens
cagagattctggctg

SEQ ID NO: 1738709 - DNA, 15 bp, Homo sapiens
agagattctggctgc

SEQ ID NO: 1738710 - DNA, 15 bp, Homo sapiens
gagattctggctgca

SEQ ID NO: 1738711 - DNA, 15 bp, Homo sapiens
agattctggctgcat

SEQ ID NO: 1738712 - DNA, 15 bp, Homo sapiens
gattctggctgcatt

SEQ ID NO: 1738713 - DNA, 15 bp, Homo sapiens
attctggctgcattg

SEQ ID NO: 1738714 - DNA, 15 bp, Homo sapiens
ttctggctgcattgg

SEQ ID NO: 1738715 - DNA, 15 bp, Homo sapiens
tctggctgcattggg

SEQ ID NO: 1738716 - DNA, 15 bp, Homo sapiens
ctggctgcattgggc

SEQ ID NO: 1738717 - DNA, 15 bp, Homo sapiens
tggctgcattgggct

SEQ ID NO: 1738718 - DNA, 15 bp, Homo sapiens
ggctgcattgggctt

SEQ ID NO: 1738719 - DNA, 15 bp, Homo sapiens
gctgcattgggcttg

SEQ ID NO: 1738720 - DNA, 15 bp, Homo sapiens
ctgcattgggcttga

SEQ ID NO: 1738721 - DNA, 15 bp, Homo sapiens
tgcattgggcttgag

SEQ ID NO: 1738722 - DNA, 15 bp, Homo sapiens
gcattgggcttgagt

SEQ ID NO: 1738723 - DNA, 15 bp, Homo sapiens
cattgggcttgagtg

SEQ ID NO: 1738724 - DNA, 15 bp, Homo sapiens
attgggcttgagtgg

SEQ ID NO: 1738725 - DNA, 15 bp, Homo sapiens
ttgggcttgagtgga

SEQ ID NO: 1738726 - DNA, 15 bp, Homo sapiens
tgggcttgagtggag

SEQ ID NO: 1738727 - DNA, 15 bp, Homo sapiens
gggcttgagtggagc

SEQ ID NO: 1738728 - DNA, 15 bp, Homo sapiens
ggcttgagtggagcc

SEQ ID NO: 1738729 - DNA, 15 bp, Homo sapiens
gcttgagtggagcct

SEQ ID NO: 1738730 - DNA, 15 bp, Homo sapiens
cttgagtggagcctg

SEQ ID NO: 1738731 - DNA, 15 bp, Homo sapiens
ttgagtggagcctga

SEQ ID NO: 1738732 - DNA, 15 bp, Homo sapiens
tgagtggagcctgaa

SEQ ID NO: 1738733 - DNA, 15 bp, Homo sapiens
gagtggagcctgaac

SEQ ID NO: 1738734 - DNA, 15 bp, Homo sapiens
agtggagcctgaaca

SEQ ID NO: 1738735 - DNA, 15 bp, Homo sapiens
gtggagcctgaacat

SEQ ID NO: 1738736 - DNA, 15 bp, Homo sapiens
tggagcctgaacatc

SEQ ID NO: 1738737 - DNA, 15 bp, Homo sapiens
ggagcctgaacatct

SEQ ID NO: 1738738 - DNA, 15 bp, Homo sapiens
gagcctgaacatctg

SEQ ID NO: 1738739 - DNA, 15 bp, Homo sapiens
agcctgaacatctgt

SEQ ID NO: 1738740 - DNA, 15 bp, Homo sapiens
gcctgaacatctgta

SEQ ID NO: 1738741 - DNA, 15 bp, Homo sapiens
cctgaacatctgtaa

SEQ ID NO: 1738742 - DNA, 15 bp, Homo sapiens
ctgaacatctgtaat

SEQ ID NO: 1738743 - DNA, 15 bp, Homo sapiens
tgaacatctgtaatt

SEQ ID NO: 1738744 - DNA, 15 bp, Homo sapiens
gaacatctgtaattc

SEQ ID NO: 1738745 - DNA, 15 bp, Homo sapiens
aacatctgtaattct

SEQ ID NO: 1738746 - DNA, 15 bp, Homo sapiens
acatctgtaattctt

SEQ ID NO: 1738747 - DNA, 15 bp, Homo sapiens
catctgtaattctta

SEQ ID NO: 1738748 - DNA, 15 bp, Homo sapiens
atctgtaattcttaa

SEQ ID NO: 1738749 - DNA, 15 bp, Homo sapiens
tctgtaattcttaag

SEQ ID NO: 1738750 - DNA, 15 bp, Homo sapiens
ctgtaattcttaagc

SEQ ID NO: 1738751 - DNA, 15 bp, Homo sapiens
tgtaattcttaagct

SEQ ID NO: 1738752 - DNA, 15 bp, Homo sapiens
gtaattcttaagctc

SEQ ID NO: 1738753 - DNA, 15 bp, Homo sapiens
taattcttaagctcc

SEQ ID NO: 1738754 - DNA, 15 bp, Homo sapiens
aattcttaagctccc

SEQ ID NO: 1738755 - DNA, 15 bp, Homo sapiens
attcttaagctcccc

SEQ ID NO: 1738756 - DNA, 15 bp, Homo sapiens
ttcttaagctcccca

SEQ ID NO: 1738757 - DNA, 15 bp, Homo sapiens
tcttaagctccccat

SEQ ID NO: 1738758 - DNA, 15 bp, Homo sapiens
cttaagctccccatg

SEQ ID NO: 1738759 - DNA, 15 bp, Homo sapiens
ttaagctccccatgt

SEQ ID NO: 1738760 - DNA, 15 bp, Homo sapiens
taagctccccatgta

SEQ ID NO: 1738761 - DNA, 15 bp, Homo sapiens
aagctccccatgtaa

SEQ ID NO: 1738762 - DNA, 15 bp, Homo sapiens
agctccccatgtaat

SEQ ID NO: 1738763 - DNA, 15 bp, Homo sapiens
gctccccatgtaatt

SEQ ID NO: 1738764 - DNA, 15 bp, Homo sapiens
ctccccatgtaattc

SEQ ID NO: 1738765 - DNA, 15 bp, Homo sapiens
tccccatgtaattct

SEQ ID NO: 1738766 - DNA, 15 bp, Homo sapiens
ccccatgtaattcta

SEQ ID NO: 1738767 - DNA, 15 bp, Homo sapiens
cccatgtaattctaa

SEQ ID NO: 1738768 - DNA, 15 bp, Homo sapiens
ccatgtaattctaat

SEQ ID NO: 1738769 - DNA, 15 bp, Homo sapiens
catgtaattctaatg

SEQ ID NO: 1738770 - DNA, 15 bp, Homo sapiens
atgtaattctaatgc

SEQ ID NO: 1738771 - DNA, 15 bp, Homo sapiens
tgtaattctaatgca

SEQ ID NO: 1738772 - DNA, 15 bp, Homo sapiens
gtaattctaatgcac

SEQ ID NO: 1738773 - DNA, 15 bp, Homo sapiens
taattctaatgcaca

SEQ ID NO: 1738774 - DNA, 15 bp, Homo sapiens
aattctaatgcacag

SEQ ID NO: 1738775 - DNA, 15 bp, Homo sapiens
attctaatgcacaga

SEQ ID NO: 1738776 - DNA, 15 bp, Homo sapiens
ttctaatgcacagac

SEQ ID NO: 1738777 - DNA, 15 bp, Homo sapiens
tctaatgcacagaca

SEQ ID NO: 1738778 - DNA, 15 bp, Homo sapiens
ctaatgcacagacag

SEQ ID NO: 1738779 - DNA, 15 bp, Homo sapiens
taatgcacagacagc

SEQ ID NO: 1738780 - DNA, 15 bp, Homo sapiens
aatgcacagacagcg

SEQ ID NO: 1738781 - DNA, 15 bp, Homo sapiens
atgcacagacagcgt

SEQ ID NO: 1738782 - DNA, 15 bp, Homo sapiens
tgcacagacagcgtt

SEQ ID NO: 1738783 - DNA, 15 bp, Homo sapiens
gcacagacagcgtta

SEQ ID NO: 1738784 - DNA, 15 bp, Homo sapiens
cacagacagcgttaa

SEQ ID NO: 1738785 - DNA, 15 bp, Homo sapiens
acagacagcgttaag

SEQ ID NO: 1738786 - DNA, 15 bp, Homo sapiens
cagacagcgttaagt

SEQ ID NO: 1738787 - DNA, 15 bp, Homo sapiens
agacagcgttaagta

SEQ ID NO: 1738788 - DNA, 15 bp, Homo sapiens
gacagcgttaagtac

SEQ ID NO: 1738789 - DNA, 15 bp, Homo sapiens
acagcgttaagtacc

SEQ ID NO: 1738790 - DNA, 15 bp, Homo sapiens
cagcgttaagtacca

SEQ ID NO: 1738791 - DNA, 15 bp, Homo sapiens
agcgttaagtaccac

SEQ ID NO: 1738792 - DNA, 15 bp, Homo sapiens
gcgttaagtaccacc

SEQ ID NO: 1738793 - DNA, 15 bp, Homo sapiens
cgttaagtaccacca

SEQ ID NO: 1738794 - DNA, 15 bp, Homo sapiens
gttaagtaccaccaa

SEQ ID NO: 1738795 - DNA, 15 bp, Homo sapiens
ttaagtaccaccaag

SEQ ID NO: 1738796 - DNA, 15 bp, Homo sapiens
taagtaccaccaagc

SEQ ID NO: 1738797 - DNA, 15 bp, Homo sapiens
aagtaccaccaagcc

SEQ ID NO: 1738798 - DNA, 15 bp, Homo sapiens
agtaccaccaagcca

SEQ ID NO: 1738799 - DNA, 15 bp, Homo sapiens
gtaccaccaagccaa

SEQ ID NO: 1738800 - DNA, 15 bp, Homo sapiens
taccaccaagccaaa

SEQ ID NO: 1738801 - DNA, 15 bp, Homo sapiens
accaccaagccaaat

SEQ ID NO: 1738802 - DNA, 15 bp, Homo sapiens
ccaccaagccaaatg

SEQ ID NO: 1738803 - DNA, 15 bp, Homo sapiens
caccaagccaaatga

SEQ ID NO: 1738804 - DNA, 15 bp, Homo sapiens
accaagccaaatgac

SEQ ID NO: 1738805 - DNA, 15 bp, Homo sapiens
ccaagccaaatgacc

SEQ ID NO: 1738806 - DNA, 15 bp, Homo sapiens
caagccaaatgacca

SEQ ID NO: 1738807 - DNA, 15 bp, Homo sapiens
aagccaaatgaccat

SEQ ID NO: 1738808 - DNA, 15 bp, Homo sapiens
agccaaatgaccatg

SEQ ID NO: 1738809 - DNA, 15 bp, Homo sapiens
gccaaatgaccatgt

SEQ ID NO: 1738810 - DNA, 15 bp, Homo sapiens
ccaaatgaccatgta

SEQ ID NO: 1738811 - DNA, 15 bp, Homo sapiens
caaatgaccatgtag

SEQ ID NO: 1738812 - DNA, 15 bp, Homo sapiens
aaatgaccatgtaga

SEQ ID NO: 1738813 - DNA, 15 bp, Homo sapiens
aatgaccatgtagat

SEQ ID NO: 1738814 - DNA, 15 bp, Homo sapiens
atgaccatgtagata

SEQ ID NO: 1738815 - DNA, 15 bp, Homo sapiens
tgaccatgtagatat

SEQ ID NO: 1738816 - DNA, 15 bp, Homo sapiens
gaccatgtagatatc

SEQ ID NO: 1738817 - DNA, 15 bp, Homo sapiens
accatgtagatatcg

SEQ ID NO: 1738818 - DNA, 15 bp, Homo sapiens
ccatgtagatatcgt

SEQ ID NO: 1738819 - DNA, 15 bp, Homo sapiens
catgtagatatcgtt

SEQ ID NO: 1738820 - DNA, 15 bp, Homo sapiens
atgtagatatcgttt

SEQ ID NO: 1738821 - DNA, 15 bp, Homo sapiens
tgtagatatcgttta

SEQ ID NO: 1738822 - DNA, 15 bp, Homo sapiens
gtagatatcgtttat

SEQ ID NO: 1738823 - DNA, 15 bp, Homo sapiens
tagatatcgtttatg

SEQ ID NO: 1738824 - DNA, 15 bp, Homo sapiens
agatatcgtttatga

SEQ ID NO: 1738825 - DNA, 15 bp, Homo sapiens
gatatcgtttatgag

SEQ ID NO: 1738826 - DNA, 15 bp, Homo sapiens
atatcgtttatgaga

SEQ ID NO: 1738827 - DNA, 15 bp, Homo sapiens
tatcgtttatgagac

SEQ ID NO: 1738828 - DNA, 15 bp, Homo sapiens
atcgtttatgagact

SEQ ID NO: 1738829 - DNA, 15 bp, Homo sapiens
tcgtttatgagactg

SEQ ID NO: 1738830 - DNA, 15 bp, Homo sapiens
cgtttatgagactga

SEQ ID NO: 1738831 - DNA, 15 bp, Homo sapiens
gtttatgagactgaa

SEQ ID NO: 1738832 - DNA, 15 bp, Homo sapiens
tttatgagactgaag

SEQ ID NO: 1738833 - DNA, 15 bp, Homo sapiens
ttatgagactgaagc

SEQ ID NO: 1738834 - DNA, 15 bp, Homo sapiens
tatgagactgaagca

SEQ ID NO: 1738835 - DNA, 15 bp, Homo sapiens
atgagactgaagcag

SEQ ID NO: 1738836 - DNA, 15 bp, Homo sapiens
tgagactgaagcaga

SEQ ID NO: 1738837 - DNA, 15 bp, Homo sapiens
gagactgaagcagaa

SEQ ID NO: 1738838 - DNA, 15 bp, Homo sapiens
agactgaagcagaat

SEQ ID NO: 1738839 - DNA, 15 bp, Homo sapiens
gactgaagcagaata

SEQ ID NO: 1738840 - DNA, 15 bp, Homo sapiens
actgaagcagaatag

SEQ ID NO: 1738841 - DNA, 15 bp, Homo sapiens
ctgaagcagaatagg

SEQ ID NO: 1738842 - DNA, 15 bp, Homo sapiens
tgaagcagaataggt

SEQ ID NO: 1738843 - DNA, 15 bp, Homo sapiens
gaagcagaataggta

SEQ ID NO: 1738844 - DNA, 15 bp, Homo sapiens
aagcagaataggtag

SEQ ID NO: 1738845 - DNA, 15 bp, Homo sapiens
agcagaataggtagc

SEQ ID NO: 1738846 - DNA, 15 bp, Homo sapiens
gcagaataggtagca

SEQ ID NO: 1738847 - DNA, 15 bp, Homo sapiens
cagaataggtagcat

SEQ ID NO: 1738848 - DNA, 15 bp, Homo sapiens
agaataggtagcatc

SEQ ID NO: 1738849 - DNA, 15 bp, Homo sapiens
gaataggtagcatct

SEQ ID NO: 1738850 - DNA, 15 bp, Homo sapiens
aataggtagcatctg

SEQ ID NO: 1738851 - DNA, 15 bp, Homo sapiens
ataggtagcatctga

SEQ ID NO: 1738852 - DNA, 15 bp, Homo sapiens
taggtagcatctgac

SEQ ID NO: 1738853 - DNA, 15 bp, Homo sapiens
aggtagcatctgaca

SEQ ID NO: 1738854 - DNA, 15 bp, Homo sapiens
ggtagcatctgacaa

SEQ ID NO: 1738855 - DNA, 15 bp, Homo sapiens
gtagcatctgacaag

SEQ ID NO: 1738856 - DNA, 15 bp, Homo sapiens
tagcatctgacaaga

SEQ ID NO: 1738857 - DNA, 15 bp, Homo sapiens
agcatctgacaagac

SEQ ID NO: 1738858 - DNA, 15 bp, Homo sapiens
gcatctgacaagacc

SEQ ID NO: 1738859 - DNA, 15 bp, Homo sapiens
catctgacaagacca

SEQ ID NO: 1738860 - DNA, 15 bp, Homo sapiens
atctgacaagaccag

SEQ ID NO: 1738861 - DNA, 15 bp, Homo sapiens
tctgacaagaccagg

SEQ ID NO: 1738862 - DNA, 15 bp, Homo sapiens
ctgacaagaccagga

SEQ ID NO: 1738863 - DNA, 15 bp, Homo sapiens
tgacaagaccaggag

SEQ ID NO: 1738864 - DNA, 15 bp, Homo sapiens
gacaagaccaggagt

SEQ ID NO: 1738865 - DNA, 15 bp, Homo sapiens
acaagaccaggagta

SEQ ID NO: 1738866 - DNA, 15 bp, Homo sapiens
caagaccaggagtag

SEQ ID NO: 1738867 - DNA, 15 bp, Homo sapiens
aagaccaggagtagg

SEQ ID NO: 1738868 - DNA, 15 bp, Homo sapiens
agaccaggagtaggc

SEQ ID NO: 1738869 - DNA, 15 bp, Homo sapiens
gaccaggagtaggct

SEQ ID NO: 1738870 - DNA, 15 bp, Homo sapiens
accaggagtaggctc

SEQ ID NO: 1738871 - DNA, 15 bp, Homo sapiens
ccaggagtaggctct

SEQ ID NO: 1738872 - DNA, 15 bp, Homo sapiens
caggagtaggctctt

SEQ ID NO: 1738873 - DNA, 15 bp, Homo sapiens
aggagtaggctcttt

SEQ ID NO: 1738874 - DNA, 15 bp, Homo sapiens
ggagtaggctctttt

SEQ ID NO: 1738875 - DNA, 15 bp, Homo sapiens
gagtaggctcttttc

SEQ ID NO: 1738876 - DNA, 15 bp, Homo sapiens
agtaggctcttttca

SEQ ID NO: 1738877 - DNA, 15 bp, Homo sapiens
gtaggctcttttcag

SEQ ID NO: 1738878 - DNA, 15 bp, Homo sapiens
taggctcttttcaga

SEQ ID NO: 1738879 - DNA, 15 bp, Homo sapiens
aggctcttttcagat

SEQ ID NO: 1738880 - DNA, 15 bp, Homo sapiens
ggctcttttcagatc

SEQ ID NO: 1738881 - DNA, 15 bp, Homo sapiens
gctcttttcagatct

SEQ ID NO: 1738882 - DNA, 15 bp, Homo sapiens
ctcttttcagatcta

SEQ ID NO: 1738883 - DNA, 15 bp, Homo sapiens
tcttttcagatctag

SEQ ID NO: 1738884 - DNA, 15 bp, Homo sapiens
cttttcagatctagc

SEQ ID NO: 1738885 - DNA, 15 bp, Homo sapiens
ttttcagatctagca

SEQ ID NO: 1738886 - DNA, 15 bp, Homo sapiens
tttcagatctagcag

SEQ ID NO: 1738887 - DNA, 15 bp, Homo sapiens
ttcagatctagcagg

SEQ ID NO: 1738888 - DNA, 15 bp, Homo sapiens
tcagatctagcaggc

SEQ ID NO: 1738889 - DNA, 15 bp, Homo sapiens
cagatctagcaggcc

SEQ ID NO: 1738890 - DNA, 15 bp, Homo sapiens
agatctagcaggcca

SEQ ID NO: 1738891 - DNA, 15 bp, Homo sapiens
gatctagcaggccat

SEQ ID NO: 1738892 - DNA, 15 bp, Homo sapiens
atctagcaggccatg

SEQ ID NO: 1738893 - DNA, 15 bp, Homo sapiens
tctagcaggccatga

SEQ ID NO: 1738894 - DNA, 15 bp, Homo sapiens
ctagcaggccatgac

SEQ ID NO: 1738895 - DNA, 15 bp, Homo sapiens
tagcaggccatgact

SEQ ID NO: 1738896 - DNA, 15 bp, Homo sapiens
agcaggccatgactt

SEQ ID NO: 1738897 - DNA, 15 bp, Homo sapiens
gcaggccatgacttt

SEQ ID NO: 1738898 - DNA, 15 bp, Homo sapiens
caggccatgactttt

SEQ ID NO: 1738899 - DNA, 15 bp, Homo sapiens
aggccatgacttttc

SEQ ID NO: 1738900 - DNA, 15 bp, Homo sapiens
ggccatgacttttca

SEQ ID NO: 1738901 - DNA, 15 bp, Homo sapiens
gccatgacttttcag

SEQ ID NO: 1738902 - DNA, 15 bp, Homo sapiens
ccatgacttttcagg

SEQ ID NO: 1738903 - DNA, 15 bp, Homo sapiens
catgacttttcaggc

SEQ ID NO: 1738904 - DNA, 15 bp, Homo sapiens
atgacttttcaggca

SEQ ID NO: 1738905 - DNA, 15 bp, Homo sapiens
tgacttttcaggcaa

SEQ ID NO: 1738906 - DNA, 15 bp, Homo sapiens
gacttttcaggcaac

SEQ ID NO: 1738907 - DNA, 15 bp, Homo sapiens
acttttcaggcaaca

SEQ ID NO: 1738908 - DNA, 15 bp, Homo sapiens
cttttcaggcaacac

SEQ ID NO: 1738909 - DNA, 15 bp, Homo sapiens
ttttcaggcaacaca

SEQ ID NO: 1738910 - DNA, 15 bp, Homo sapiens
tttcaggcaacacac

SEQ ID NO: 1738911 - DNA, 15 bp, Homo sapiens
ttcaggcaacacacc

SEQ ID NO: 1738912 - DNA, 15 bp, Homo sapiens
tcaggcaacacacca

SEQ ID NO: 1738913 - DNA, 15 bp, Homo sapiens
caggcaacacaccaa

SEQ ID NO: 1738914 - DNA, 15 bp, Homo sapiens
aggcaacacaccaac

SEQ ID NO: 1738915 - DNA, 15 bp, Homo sapiens
ggcaacacaccaaca

SEQ ID NO: 1738916 - DNA, 15 bp, Homo sapiens
gcaacacaccaacat

SEQ ID NO: 1738917 - DNA, 15 bp, Homo sapiens
caacacaccaacata

SEQ ID NO: 1738918 - DNA, 15 bp, Homo sapiens
aacacaccaacatat

SEQ ID NO: 1738919 - DNA, 15 bp, Homo sapiens
acacaccaacatatg

SEQ ID NO: 1738920 - DNA, 15 bp, Homo sapiens
cacaccaacatatgt

SEQ ID NO: 1738921 - DNA, 15 bp, Homo sapiens
acaccaacatatgtt

SEQ ID NO: 1738922 - DNA, 15 bp, Homo sapiens
caccaacatatgttt

SEQ ID NO: 1738923 - DNA, 15 bp, Homo sapiens
accaacatatgttta

SEQ ID NO: 1738924 - DNA, 15 bp, Homo sapiens
ccaacatatgtttag

SEQ ID NO: 1738925 - DNA, 15 bp, Homo sapiens
caacatatgtttagt

SEQ ID NO: 1738926 - DNA, 15 bp, Homo sapiens
aacatatgtttagtt

SEQ ID NO: 1738927 - DNA, 15 bp, Homo sapiens
acatatgtttagttc

SEQ ID NO: 1738928 - DNA, 15 bp, Homo sapiens
catatgtttagttca

SEQ ID NO: 1738929 - DNA, 15 bp, Homo sapiens
atatgtttagttcac

SEQ ID NO: 1738930 - DNA, 15 bp, Homo sapiens
tatgtttagttcacc

SEQ ID NO: 1738931 - DNA, 15 bp, Homo sapiens
atgtttagttcacct

SEQ ID NO: 1738932 - DNA, 15 bp, Homo sapiens
tgtttagttcacctt

SEQ ID NO: 1738933 - DNA, 15 bp, Homo sapiens
gtttagttcaccttt

SEQ ID NO: 1738934 - DNA, 15 bp, Homo sapiens
tttagttcacctttg

SEQ ID NO: 1738935 - DNA, 15 bp, Homo sapiens
ttagttcacctttgt

SEQ ID NO: 1738936 - DNA, 15 bp, Homo sapiens
tagttcacctttgtc

SEQ ID NO: 1738937 - DNA, 15 bp, Homo sapiens
agttcacctttgtcc

SEQ ID NO: 1738938 - DNA, 15 bp, Homo sapiens
gttcacctttgtccc

SEQ ID NO: 1738939 - DNA, 15 bp, Homo sapiens
ttcacctttgtccca

SEQ ID NO: 1738940 - DNA, 15 bp, Homo sapiens
tcacctttgtcccag

SEQ ID NO: 1738941 - DNA, 15 bp, Homo sapiens
cacctttgtcccagg

SEQ ID NO: 1738942 - DNA, 15 bp, Homo sapiens
acctttgtcccaggc

SEQ ID NO: 1738943 - DNA, 15 bp, Homo sapiens
cctttgtcccaggca

SEQ ID NO: 1738944 - DNA, 15 bp, Homo sapiens
ctttgtcccaggcag

SEQ ID NO: 1738945 - DNA, 15 bp, Homo sapiens
tttgtcccaggcagc

SEQ ID NO: 1738946 - DNA, 15 bp, Homo sapiens
ttgtcccaggcagca

SEQ ID NO: 1738947 - DNA, 15 bp, Homo sapiens
tgtcccaggcagcag

SEQ ID NO: 1738948 - DNA, 15 bp, Homo sapiens
gtcccaggcagcaga

SEQ ID NO: 1738949 - DNA, 15 bp, Homo sapiens
tcccaggcagcagaa

SEQ ID NO: 1738950 - DNA, 15 bp, Homo sapiens
cccaggcagcagaaa

SEQ ID NO: 1738951 - DNA, 15 bp, Homo sapiens
ccaggcagcagaaac

SEQ ID NO: 1738952 - DNA, 15 bp, Homo sapiens
caggcagcagaaact

SEQ ID NO: 1738953 - DNA, 15 bp, Homo sapiens
aggcagcagaaactc

SEQ ID NO: 1738954 - DNA, 15 bp, Homo sapiens
ggcagcagaaactct

SEQ ID NO: 1738955 - DNA, 15 bp, Homo sapiens
gcagcagaaactctg

SEQ ID NO: 1738956 - DNA, 15 bp, Homo sapiens
cagcagaaactctga

SEQ ID NO: 1738957 - DNA, 15 bp, Homo sapiens
agcagaaactctgag

SEQ ID NO: 1738958 - DNA, 15 bp, Homo sapiens
gcagaaactctgagt

SEQ ID NO: 1738959 - DNA, 15 bp, Homo sapiens
cagaaactctgagtt

SEQ ID NO: 1738960 - DNA, 15 bp, Homo sapiens
agaaactctgagttt

SEQ ID NO: 1738961 - DNA, 15 bp, Homo sapiens
gaaactctgagtttc

SEQ ID NO: 1738962 - DNA, 15 bp, Homo sapiens
aaactctgagtttcc

SEQ ID NO: 1738963 - DNA, 15 bp, Homo sapiens
aactctgagtttccc

SEQ ID NO: 1738964 - DNA, 15 bp, Homo sapiens
actctgagtttcccc

SEQ ID NO: 1738965 - DNA, 15 bp, Homo sapiens
ctctgagtttccccg

SEQ ID NO: 1738966 - DNA, 15 bp, Homo sapiens
tctgagtttccccgg

SEQ ID NO: 1738967 - DNA, 15 bp, Homo sapiens
ctgagtttccccggg

SEQ ID NO: 1738968 - DNA, 15 bp, Homo sapiens
tgagtttccccgggg

SEQ ID NO: 1738969 - DNA, 15 bp, Homo sapiens
gagtttccccgggga

SEQ ID NO: 1738970 - DNA, 15 bp, Homo sapiens
agtttccccggggac

SEQ ID NO: 1738971 - DNA, 15 bp, Homo sapiens
gtttccccggggact

SEQ ID NO: 1738972 - DNA, 15 bp, Homo sapiens
tttccccggggactc

SEQ ID NO: 1738973 - DNA, 15 bp, Homo sapiens
ttccccggggactct

SEQ ID NO: 1738974 - DNA, 15 bp, Homo sapiens
tccccggggactctg

SEQ ID NO: 1738975 - DNA, 15 bp, Homo sapiens
ccccggggactctgg

SEQ ID NO: 1738976 - DNA, 15 bp, Homo sapiens
cccggggactctgga

SEQ ID NO: 1738977 - DNA, 15 bp, Homo sapiens
ccggggactctggag

SEQ ID NO: 1738978 - DNA, 15 bp, Homo sapiens
cggggactctggagc

SEQ ID NO: 1738979 - DNA, 15 bp, Homo sapiens
ggggactctggagct

SEQ ID NO: 1738980 - DNA, 15 bp, Homo sapiens
gggactctggagctc

SEQ ID NO: 1738981 - DNA, 15 bp, Homo sapiens
ggactctggagctcc

SEQ ID NO: 1738982 - DNA, 15 bp, Homo sapiens
gactctggagctcct

SEQ ID NO: 1738983 - DNA, 15 bp, Homo sapiens
actctggagctcctc

SEQ ID NO: 1738984 - DNA, 15 bp, Homo sapiens
ctctggagctcctca

SEQ ID NO: 1738985 - DNA, 15 bp, Homo sapiens
tctggagctcctcag

SEQ ID NO: 1738986 - DNA, 15 bp, Homo sapiens
ctggagctcctcagg

SEQ ID NO: 1738987 - DNA, 15 bp, Homo sapiens
tggagctcctcaggt

SEQ ID NO: 1738988 - DNA, 15 bp, Homo sapiens
ggagctcctcaggtt

SEQ ID NO: 1738989 - DNA, 15 bp, Homo sapiens
gagctcctcaggtta

SEQ ID NO: 1738990 - DNA, 15 bp, Homo sapiens
agctcctcaggttac

SEQ ID NO: 1738991 - DNA, 15 bp, Homo sapiens
gctcctcaggttact

SEQ ID NO: 1738992 - DNA, 15 bp, Homo sapiens
ctcctcaggttacta

SEQ ID NO: 1738993 - DNA, 15 bp, Homo sapiens
tcctcaggttactaa

SEQ ID NO: 1738994 - DNA, 15 bp, Homo sapiens
cctcaggttactaac

SEQ ID NO: 1738995 - DNA, 15 bp, Homo sapiens
ctcaggttactaacc

SEQ ID NO: 1738996 - DNA, 15 bp, Homo sapiens
tcaggttactaaccc

SEQ ID NO: 1738997 - DNA, 15 bp, Homo sapiens
caggttactaaccca

SEQ ID NO: 1738998 - DNA, 15 bp, Homo sapiens
aggttactaacccag

SEQ ID NO: 1738999 - DNA, 15 bp, Homo sapiens
ggttactaacccagc

SEQ ID NO: 1739000 - DNA, 15 bp, Homo sapiens
gttactaacccagca

SEQ ID NO: 1739001 - DNA, 15 bp, Homo sapiens
ttactaacccagcac

SEQ ID NO: 1739002 - DNA, 15 bp, Homo sapiens
tactaacccagcact

SEQ ID NO: 1739003 - DNA, 15 bp, Homo sapiens
actaacccagcacta

SEQ ID NO: 1739004 - DNA, 15 bp, Homo sapiens
ctaacccagcactag

SEQ ID NO: 1739005 - DNA, 15 bp, Homo sapiens
taacccagcactaga

SEQ ID NO: 1739006 - DNA, 15 bp, Homo sapiens
aacccagcactagat

SEQ ID NO: 1739007 - DNA, 15 bp, Homo sapiens
acccagcactagatt

SEQ ID NO: 1739008 - DNA, 15 bp, Homo sapiens
cccagcactagattt

SEQ ID NO: 1739009 - DNA, 15 bp, Homo sapiens
ccagcactagatttc

SEQ ID NO: 1739010 - DNA, 15 bp, Homo sapiens
cagcactagatttcc

SEQ ID NO: 1739011 - DNA, 15 bp, Homo sapiens
agcactagatttcca

SEQ ID NO: 1739012 - DNA, 15 bp, Homo sapiens
gcactagatttccat

SEQ ID NO: 1739013 - DNA, 15 bp, Homo sapiens
cactagatttccatt

SEQ ID NO: 1739014 - DNA, 15 bp, Homo sapiens
actagatttccattc

SEQ ID NO: 1739015 - DNA, 15 bp, Homo sapiens
ctagatttccattct

SEQ ID NO: 1739016 - DNA, 15 bp, Homo sapiens
tagatttccattctt

SEQ ID NO: 1739017 - DNA, 15 bp, Homo sapiens
agatttccattcttg

SEQ ID NO: 1739018 - DNA, 15 bp, Homo sapiens
gatttccattcttga

SEQ ID NO: 1739019 - DNA, 15 bp, Homo sapiens
atttccattcttgag

SEQ ID NO: 1739020 - DNA, 15 bp, Homo sapiens
tttccattcttgaga

SEQ ID NO: 1739021 - DNA, 15 bp, Homo sapiens
ttccattcttgagac

SEQ ID NO: 1739022 - DNA, 15 bp, Homo sapiens
tccattcttgagact

SEQ ID NO: 1739023 - DNA, 15 bp, Homo sapiens
ccattcttgagactc

SEQ ID NO: 1739024 - DNA, 15 bp, Homo sapiens
cattcttgagactct

SEQ ID NO: 1739025 - DNA, 15 bp, Homo sapiens
attcttgagactctg

SEQ ID NO: 1739026 - DNA, 15 bp, Homo sapiens
ttcttgagactctga

SEQ ID NO: 1739027 - DNA, 15 bp, Homo sapiens
tcttgagactctgag

SEQ ID NO: 1739028 - DNA, 15 bp, Homo sapiens
cttgagactctgaga

SEQ ID NO: 1739029 - DNA, 15 bp, Homo sapiens
ttgagactctgagaa

SEQ ID NO: 1739030 - DNA, 15 bp, Homo sapiens
tgagactctgagaaa

SEQ ID NO: 1739031 - DNA, 15 bp, Homo sapiens
gagactctgagaaag

SEQ ID NO: 1739032 - DNA, 15 bp, Homo sapiens
agactctgagaaagg

SEQ ID NO: 1739033 - DNA, 15 bp, Homo sapiens
gactctgagaaagga

SEQ ID NO: 1739034 - DNA, 15 bp, Homo sapiens
actctgagaaaggag

SEQ ID NO: 1739035 - DNA, 15 bp, Homo sapiens
ctctgagaaaggagc

SEQ ID NO: 1739036 - DNA, 15 bp, Homo sapiens
tctgagaaaggagcg

SEQ ID NO: 1739037 - DNA, 15 bp, Homo sapiens
ctgagaaaggagcgg

SEQ ID NO: 1739038 - DNA, 15 bp, Homo sapiens
tgagaaaggagcggg

SEQ ID NO: 1739039 - DNA, 15 bp, Homo sapiens
gagaaaggagcgggt

SEQ ID NO: 1739040 - DNA, 15 bp, Homo sapiens
agaaaggagcgggtc

SEQ ID NO: 1739041 - DNA, 15 bp, Homo sapiens
gaaaggagcgggtcc

SEQ ID NO: 1739042 - DNA, 15 bp, Homo sapiens
aaaggagcgggtcca

SEQ ID NO: 1739043 - DNA, 15 bp, Homo sapiens
aaggagcgggtccaa

SEQ ID NO: 1739044 - DNA, 15 bp, Homo sapiens
aggagcgggtccaat

SEQ ID NO: 1739045 - DNA, 15 bp, Homo sapiens
ggagcgggtccaatc

SEQ ID NO: 1739046 - DNA, 15 bp, Homo sapiens
gagcgggtccaatct

SEQ ID NO: 1739047 - DNA, 15 bp, Homo sapiens
agcgggtccaatctg

SEQ ID NO: 1739048 - DNA, 15 bp, Homo sapiens
gcgggtccaatctgg

SEQ ID NO: 1739049 - DNA, 15 bp, Homo sapiens
cgggtccaatctgga

SEQ ID NO: 1739050 - DNA, 15 bp, Homo sapiens
gggtccaatctggaa

SEQ ID NO: 1739051 - DNA, 15 bp, Homo sapiens
ggtccaatctggaac

SEQ ID NO: 1739052 - DNA, 15 bp, Homo sapiens
gtccaatctggaacg

SEQ ID NO: 1739053 - DNA, 15 bp, Homo sapiens
tccaatctggaacgc

SEQ ID NO: 1739054 - DNA, 15 bp, Homo sapiens
ccaatctggaacgct

SEQ ID NO: 1739055 - DNA, 15 bp, Homo sapiens
caatctggaacgctc

SEQ ID NO: 1739056 - DNA, 15 bp, Homo sapiens
aatctggaacgctca

SEQ ID NO: 1739057 - DNA, 15 bp, Homo sapiens
atctggaacgctcat

SEQ ID NO: 1739058 - DNA, 15 bp, Homo sapiens
tctggaacgctcata

SEQ ID NO: 1739059 - DNA, 15 bp, Homo sapiens
ctggaacgctcatag

SEQ ID NO: 1739060 - DNA, 15 bp, Homo sapiens
tggaacgctcataga

SEQ ID NO: 1739061 - DNA, 15 bp, Homo sapiens
ggaacgctcatagat

SEQ ID NO: 1739062 - DNA, 15 bp, Homo sapiens
gaacgctcatagatt

SEQ ID NO: 1739063 - DNA, 15 bp, Homo sapiens
aacgctcatagattc

SEQ ID NO: 1739064 - DNA, 15 bp, Homo sapiens
acgctcatagattct

SEQ ID NO: 1739065 - DNA, 15 bp, Homo sapiens
cgctcatagattctt

SEQ ID NO: 1739066 - DNA, 15 bp, Homo sapiens
gctcatagattcttt

SEQ ID NO: 1739067 - DNA, 15 bp, Homo sapiens
ctcatagattctttc

SEQ ID NO: 1739068 - DNA, 15 bp, Homo sapiens
tcatagattctttcc

SEQ ID NO: 1739069 - DNA, 15 bp, Homo sapiens
catagattctttcct

SEQ ID NO: 1739070 - DNA, 15 bp, Homo sapiens
atagattctttccta

SEQ ID NO: 1739071 - DNA, 15 bp, Homo sapiens
tagattctttcctag

SEQ ID NO: 1739072 - DNA, 15 bp, Homo sapiens
agattctttcctagg

SEQ ID NO: 1739073 - DNA, 15 bp, Homo sapiens
gattctttcctagga

SEQ ID NO: 1739074 - DNA, 15 bp, Homo sapiens
attctttcctaggag

SEQ ID NO: 1739075 - DNA, 15 bp, Homo sapiens
ttctttcctaggagg

SEQ ID NO: 1739076 - DNA, 15 bp, Homo sapiens
tctttcctaggaggg

SEQ ID NO: 1739077 - DNA, 15 bp, Homo sapiens
ctttcctaggaggga

SEQ ID NO: 1739078 - DNA, 15 bp, Homo sapiens
tttcctaggagggag

SEQ ID NO: 1739079 - DNA, 15 bp, Homo sapiens
ttcctaggagggaga

SEQ ID NO: 1739080 - DNA, 15 bp, Homo sapiens
tcctaggagggagag

SEQ ID NO: 1739081 - DNA, 15 bp, Homo sapiens
cctaggagggagagt

SEQ ID NO: 1739082 - DNA, 15 bp, Homo sapiens
ctaggagggagagtc

SEQ ID NO: 1739083 - DNA, 15 bp, Homo sapiens
taggagggagagtca

SEQ ID NO: 1739084 - DNA, 15 bp, Homo sapiens
aggagggagagtcaa

SEQ ID NO: 1739085 - DNA, 15 bp, Homo sapiens
ggagggagagtcaat

SEQ ID NO: 1739086 - DNA, 15 bp, Homo sapiens
gagggagagtcaatt

SEQ ID NO: 1739087 - DNA, 15 bp, Homo sapiens
agggagagtcaattt

SEQ ID NO: 1739088 - DNA, 15 bp, Homo sapiens
gggagagtcaatttg

SEQ ID NO: 1739089 - DNA, 15 bp, Homo sapiens
ggagagtcaatttga

SEQ ID NO: 1739090 - DNA, 15 bp, Homo sapiens
gagagtcaatttgag

SEQ ID NO: 1739091 - DNA, 15 bp, Homo sapiens
agagtcaatttgagt

SEQ ID NO: 1739092 - DNA, 15 bp, Homo sapiens
gagtcaatttgagtt

SEQ ID NO: 1739093 - DNA, 15 bp, Homo sapiens
agtcaatttgagttg

SEQ ID NO: 1739094 - DNA, 15 bp, Homo sapiens
gtcaatttgagttgg

SEQ ID NO: 1739095 - DNA, 15 bp, Homo sapiens
tcaatttgagttggt

SEQ ID NO: 1739096 - DNA, 15 bp, Homo sapiens
caatttgagttggta

SEQ ID NO: 1739097 - DNA, 15 bp, Homo sapiens
aatttgagttggtat

SEQ ID NO: 1739098 - DNA, 15 bp, Homo sapiens
atttgagttggtatc

SEQ ID NO: 1739099 - DNA, 15 bp, Homo sapiens
tttgagttggtatct

SEQ ID NO: 1739100 - DNA, 15 bp, Homo sapiens
ttgagttggtatctg

SEQ ID NO: 1739101 - DNA, 15 bp, Homo sapiens
tgagttggtatctgt

SEQ ID NO: 1739102 - DNA, 15 bp, Homo sapiens
gagttggtatctgtg

SEQ ID NO: 1739103 - DNA, 15 bp, Homo sapiens
agttggtatctgtgt

SEQ ID NO: 1739104 - DNA, 15 bp, Homo sapiens
gttggtatctgtgtt

SEQ ID NO: 1739105 - DNA, 15 bp, Homo sapiens
ttggtatctgtgtta

SEQ ID NO: 1739106 - DNA, 15 bp, Homo sapiens
tggtatctgtgttag

SEQ ID NO: 1739107 - DNA, 15 bp, Homo sapiens
ggtatctgtgttagt

SEQ ID NO: 1739108 - DNA, 15 bp, Homo sapiens
gtatctgtgttagtc

SEQ ID NO: 1739109 - DNA, 15 bp, Homo sapiens
tatctgtgttagtcc

SEQ ID NO: 1739110 - DNA, 15 bp, Homo sapiens
atctgtgttagtcca

SEQ ID NO: 1739111 - DNA, 15 bp, Homo sapiens
tctgtgttagtccat

SEQ ID NO: 1739112 - DNA, 15 bp, Homo sapiens
ctgtgttagtccatt

SEQ ID NO: 1739113 - DNA, 15 bp, Homo sapiens
tgtgttagtccattt

SEQ ID NO: 1739114 - DNA, 15 bp, Homo sapiens
gtgttagtccatttt

SEQ ID NO: 1739115 - DNA, 15 bp, Homo sapiens
tgttagtccattttg

SEQ ID NO: 1739116 - DNA, 15 bp, Homo sapiens
gttagtccattttgt

SEQ ID NO: 1739117 - DNA, 15 bp, Homo sapiens
ttagtccattttgtg

SEQ ID NO: 1739118 - DNA, 15 bp, Homo sapiens
tagtccattttgtgt

SEQ ID NO: 1739119 - DNA, 15 bp, Homo sapiens
agtccattttgtgtt

SEQ ID NO: 1739120 - DNA, 15 bp, Homo sapiens
gtccattttgtgttg

SEQ ID NO: 1739121 - DNA, 15 bp, Homo sapiens
tccattttgtgttgc

SEQ ID NO: 1739122 - DNA, 15 bp, Homo sapiens
ccattttgtgttgct

SEQ ID NO: 1739123 - DNA, 15 bp, Homo sapiens
cattttgtgttgcta

SEQ ID NO: 1739124 - DNA, 15 bp, Homo sapiens
attttgtgttgctag

SEQ ID NO: 1739125 - DNA, 15 bp, Homo sapiens
ttttgtgttgctagg

SEQ ID NO: 1739126 - DNA, 15 bp, Homo sapiens
tttgtgttgctagga

SEQ ID NO: 1739127 - DNA, 15 bp, Homo sapiens
ttgtgttgctaggaa

SEQ ID NO: 1739128 - DNA, 15 bp, Homo sapiens
tgtgttgctaggaag

SEQ ID NO: 1739129 - DNA, 15 bp, Homo sapiens
gtgttgctaggaagg

SEQ ID NO: 1739130 - DNA, 15 bp, Homo sapiens
tgttgctaggaagga

SEQ ID NO: 1739131 - DNA, 15 bp, Homo sapiens
gttgctaggaaggaa

SEQ ID NO: 1739132 - DNA, 15 bp, Homo sapiens
ttgctaggaaggaat

SEQ ID NO: 1739133 - DNA, 15 bp, Homo sapiens
tgctaggaaggaata

SEQ ID NO: 1739134 - DNA, 15 bp, Homo sapiens
gctaggaaggaatac

SEQ ID NO: 1739135 - DNA, 15 bp, Homo sapiens
ctaggaaggaatacc

SEQ ID NO: 1739136 - DNA, 15 bp, Homo sapiens
taggaaggaatacct

SEQ ID NO: 1739137 - DNA, 15 bp, Homo sapiens
aggaaggaatacctg

SEQ ID NO: 1739138 - DNA, 15 bp, Homo sapiens
ggaaggaatacctga

SEQ ID NO: 1739139 - DNA, 15 bp, Homo sapiens
gaaggaatacctgag

SEQ ID NO: 1739140 - DNA, 15 bp, Homo sapiens
aaggaatacctgaga

SEQ ID NO: 1739141 - DNA, 15 bp, Homo sapiens
aggaatacctgagac

SEQ ID NO: 1739142 - DNA, 15 bp, Homo sapiens
ggaatacctgagact

SEQ ID NO: 1739143 - DNA, 15 bp, Homo sapiens
ggtaatttatgaaga

SEQ ID NO: 1739144 - DNA, 15 bp, Homo sapiens
gtaatttatgaagaa

SEQ ID NO: 1739145 - DNA, 15 bp, Homo sapiens
taatttatgaagaaa

SEQ ID NO: 1739146 - DNA, 15 bp, Homo sapiens
aatttatgaagaaaa

SEQ ID NO: 1739147 - DNA, 15 bp, Homo sapiens
atttatgaagaaaat

SEQ ID NO: 1739148 - DNA, 15 bp, Homo sapiens
tttatgaagaaaata

SEQ ID NO: 1739149 - DNA, 15 bp, Homo sapiens
ttatgaagaaaatat

SEQ ID NO: 1739150 - DNA, 15 bp, Homo sapiens
tatgaagaaaatatg

SEQ ID NO: 1739151 - DNA, 15 bp, Homo sapiens
atgaagaaaatatgt

SEQ ID NO: 1739152 - DNA, 15 bp, Homo sapiens
tgaagaaaatatgtt

SEQ ID NO: 1739153 - DNA, 15 bp, Homo sapiens
gaagaaaatatgttt

SEQ ID NO: 1739154 - DNA, 15 bp, Homo sapiens
aagaaaatatgttta

SEQ ID NO: 1739155 - DNA, 15 bp, Homo sapiens
agaaaatatgtttat

SEQ ID NO: 1739156 - DNA, 15 bp, Homo sapiens
gaaaatatgtttatt

SEQ ID NO: 1739157 - DNA, 15 bp, Homo sapiens
aaaatatgtttattt

SEQ ID NO: 1739158 - DNA, 15 bp, Homo sapiens
aaatatgtttatttg

SEQ ID NO: 1739159 - DNA, 15 bp, Homo sapiens
aatatgtttatttgg

SEQ ID NO: 1739160 - DNA, 15 bp, Homo sapiens
atatgtttatttggc

SEQ ID NO: 1739161 - DNA, 15 bp, Homo sapiens
tatgtttatttggct

SEQ ID NO: 1739162 - DNA, 15 bp, Homo sapiens
atgtttatttggctc

SEQ ID NO: 1739163 - DNA, 15 bp, Homo sapiens
tgtttatttggctca

SEQ ID NO: 1739164 - DNA, 15 bp, Homo sapiens
gtttatttggctcat

SEQ ID NO: 1739165 - DNA, 15 bp, Homo sapiens
tttatttggctcatg

SEQ ID NO: 1739166 - DNA, 15 bp, Homo sapiens
ttatttggctcatgg

SEQ ID NO: 1739167 - DNA, 15 bp, Homo sapiens
tatttggctcatggt

SEQ ID NO: 1739168 - DNA, 15 bp, Homo sapiens
atttggctcatggtt

SEQ ID NO: 1739169 - DNA, 15 bp, Homo sapiens
tttggctcatggttc

SEQ ID NO: 1739170 - DNA, 15 bp, Homo sapiens
ttggctcatggttca

SEQ ID NO: 1739171 - DNA, 15 bp, Homo sapiens
tggctcatggttcag

SEQ ID NO: 1739172 - DNA, 15 bp, Homo sapiens
ggctcatggttcagc

SEQ ID NO: 1739173 - DNA, 15 bp, Homo sapiens
gctcatggttcagca

SEQ ID NO: 1739174 - DNA, 15 bp, Homo sapiens
ctcatggttcagcag

SEQ ID NO: 1739175 - DNA, 15 bp, Homo sapiens
tcatggttcagcagg

SEQ ID NO: 1739176 - DNA, 15 bp, Homo sapiens
catggttcagcaggc

SEQ ID NO: 1739177 - DNA, 15 bp, Homo sapiens
atggttcagcaggct

SEQ ID NO: 1739178 - DNA, 15 bp, Homo sapiens
tggttcagcaggctg

SEQ ID NO: 1739179 - DNA, 15 bp, Homo sapiens
ggttcagcaggctgt

SEQ ID NO: 1739180 - DNA, 15 bp, Homo sapiens
gttcagcaggctgta

SEQ ID NO: 1739181 - DNA, 15 bp, Homo sapiens
ttcagcaggctgtaa

SEQ ID NO: 1739182 - DNA, 15 bp, Homo sapiens
tcagcaggctgtaaa

SEQ ID NO: 1739183 - DNA, 15 bp, Homo sapiens
cagcaggctgtaaaa

SEQ ID NO: 1739184 - DNA, 15 bp, Homo sapiens
agcaggctgtaaaag

SEQ ID NO: 1739185 - DNA, 15 bp, Homo sapiens
gcaggctgtaaaagt

SEQ ID NO: 1739186 - DNA, 15 bp, Homo sapiens
caggctgtaaaagta

SEQ ID NO: 1739187 - DNA, 15 bp, Homo sapiens
aggctgtaaaagtat

SEQ ID NO: 1739188 - DNA, 15 bp, Homo sapiens
ggctgtaaaagtatg

SEQ ID NO: 1739189 - DNA, 15 bp, Homo sapiens
gctgtaaaagtatgg

SEQ ID NO: 1739190 - DNA, 15 bp, Homo sapiens
ctgtaaaagtatggt

SEQ ID NO: 1739191 - DNA, 15 bp, Homo sapiens
tgtaaaagtatggta

SEQ ID NO: 1739192 - DNA, 15 bp, Homo sapiens
gtaaaagtatggtac

SEQ ID NO: 1739193 - DNA, 15 bp, Homo sapiens
taaaagtatggtacc

SEQ ID NO: 1739194 - DNA, 15 bp, Homo sapiens
aaaagtatggtaccc

SEQ ID NO: 1739195 - DNA, 15 bp, Homo sapiens
aaagtatggtaccca

SEQ ID NO: 1739196 - DNA, 15 bp, Homo sapiens
aagtatggtacccac

SEQ ID NO: 1739197 - DNA, 15 bp, Homo sapiens
agtatggtacccaca

SEQ ID NO: 1739198 - DNA, 15 bp, Homo sapiens
gtatggtacccacat

SEQ ID NO: 1739199 - DNA, 15 bp, Homo sapiens
tatggtacccacatc

SEQ ID NO: 1739200 - DNA, 15 bp, Homo sapiens
atggtacccacatct

SEQ ID NO: 1739201 - DNA, 15 bp, Homo sapiens
tggtacccacatctg

SEQ ID NO: 1739202 - DNA, 15 bp, Homo sapiens
ggtacccacatctgt

SEQ ID NO: 1739203 - DNA, 15 bp, Homo sapiens
gtacccacatctgtt

SEQ ID NO: 1739204 - DNA, 15 bp, Homo sapiens
tacccacatctgttt

SEQ ID NO: 1739205 - DNA, 15 bp, Homo sapiens
acccacatctgtttg

SEQ ID NO: 1739206 - DNA, 15 bp, Homo sapiens
cccacatctgtttgg

SEQ ID NO: 1739207 - DNA, 15 bp, Homo sapiens
ccacatctgtttggg

SEQ ID NO: 1739208 - DNA, 15 bp, Homo sapiens
cacatctgtttgggg

SEQ ID NO: 1739209 - DNA, 15 bp, Homo sapiens
acatctgtttggggc

SEQ ID NO: 1739210 - DNA, 15 bp, Homo sapiens
catctgtttggggct

SEQ ID NO: 1739211 - DNA, 15 bp, Homo sapiens
atctgtttggggctt

SEQ ID NO: 1739212 - DNA, 15 bp, Homo sapiens
tctgtttggggcttc

SEQ ID NO: 1739213 - DNA, 15 bp, Homo sapiens
ctgtttggggcttct

SEQ ID NO: 1739214 - DNA, 15 bp, Homo sapiens
tgtttggggcttctg

SEQ ID NO: 1739215 - DNA, 15 bp, Homo sapiens
gtttggggcttctgg

SEQ ID NO: 1739216 - DNA, 15 bp, Homo sapiens
tttggggcttctggc

SEQ ID NO: 1739217 - DNA, 15 bp, Homo sapiens
ttggggcttctggca

SEQ ID NO: 1739218 - DNA, 15 bp, Homo sapiens
tggggcttctggcaa

SEQ ID NO: 1739219 - DNA, 15 bp, Homo sapiens
ggggcttctggcaaa

SEQ ID NO: 1739220 - DNA, 15 bp, Homo sapiens
gggcttctggcaaag

SEQ ID NO: 1739221 - DNA, 15 bp, Homo sapiens
ggcttctggcaaagc

SEQ ID NO: 1739222 - DNA, 15 bp, Homo sapiens
gcttctggcaaagcc

SEQ ID NO: 1739223 - DNA, 15 bp, Homo sapiens
cttctggcaaagcct

SEQ ID NO: 1739224 - DNA, 15 bp, Homo sapiens
ttctggcaaagcctc

SEQ ID NO: 1739225 - DNA, 15 bp, Homo sapiens
tctggcaaagcctca

SEQ ID NO: 1739226 - DNA, 15 bp, Homo sapiens
ctggcaaagcctcag

SEQ ID NO: 1739227 - DNA, 15 bp, Homo sapiens
tggcaaagcctcagg

SEQ ID NO: 1739228 - DNA, 15 bp, Homo sapiens
ggcaaagcctcagga

SEQ ID NO: 1739229 - DNA, 15 bp, Homo sapiens
aaagcctcaggaagc

SEQ ID NO: 1739230 - DNA, 15 bp, Homo sapiens
aagcctcaggaagct

SEQ ID NO: 1739231 - DNA, 15 bp, Homo sapiens
agcctcaggaagctt

SEQ ID NO: 1739232 - DNA, 15 bp, Homo sapiens
gcctcaggaagcttt

SEQ ID NO: 1739233 - DNA, 15 bp, Homo sapiens
cctcaggaagctttt

SEQ ID NO: 1739234 - DNA, 15 bp, Homo sapiens
ctcaggaagctttta

SEQ ID NO: 1739235 - DNA, 15 bp, Homo sapiens
tcaggaagcttttac

SEQ ID NO: 1739236 - DNA, 15 bp, Homo sapiens
caggaagcttttact

SEQ ID NO: 1739237 - DNA, 15 bp, Homo sapiens
aggaagcttttactc

SEQ ID NO: 1739238 - DNA, 15 bp, Homo sapiens
ggaagcttttactca

SEQ ID NO: 1739239 - DNA, 15 bp, Homo sapiens
gaagcttttactcag

SEQ ID NO: 1739240 - DNA, 15 bp, Homo sapiens
aagcttttactcagt

SEQ ID NO: 1739241 - DNA, 15 bp, Homo sapiens
agcttttactcagtg

SEQ ID NO: 1739242 - DNA, 15 bp, Homo sapiens
gcttttactcagtga

SEQ ID NO: 1739243 - DNA, 15 bp, Homo sapiens
cttttactcagtgag

SEQ ID NO: 1739244 - DNA, 15 bp, Homo sapiens
ttttactcagtgagg

SEQ ID NO: 1739245 - DNA, 15 bp, Homo sapiens
tttactcagtgaggg

SEQ ID NO: 1739246 - DNA, 15 bp, Homo sapiens
ttactcagtgaggga

SEQ ID NO: 1739247 - DNA, 15 bp, Homo sapiens
tactcagtgagggaa

SEQ ID NO: 1739248 - DNA, 15 bp, Homo sapiens
actcagtgagggaag

SEQ ID NO: 1739249 - DNA, 15 bp, Homo sapiens
ctcagtgagggaagg

SEQ ID NO: 1739250 - DNA, 15 bp, Homo sapiens
tcagtgagggaaggt

SEQ ID NO: 1739251 - DNA, 15 bp, Homo sapiens
cagtgagggaaggtg

SEQ ID NO: 1739252 - DNA, 15 bp, Homo sapiens
agtgagggaaggtga

SEQ ID NO: 1739253 - DNA, 15 bp, Homo sapiens
gtgagggaaggtgaa

SEQ ID NO: 1739254 - DNA, 15 bp, Homo sapiens
tgagggaaggtgaat

SEQ ID NO: 1739255 - DNA, 15 bp, Homo sapiens
gagggaaggtgaatg

SEQ ID NO: 1739256 - DNA, 15 bp, Homo sapiens
agggaaggtgaatgg

SEQ ID NO: 1739257 - DNA, 15 bp, Homo sapiens
gggaaggtgaatggg

SEQ ID NO: 1739258 - DNA, 15 bp, Homo sapiens
ggaaggtgaatgggg

SEQ ID NO: 1739259 - DNA, 15 bp, Homo sapiens
gaaggtgaatgggga

SEQ ID NO: 1739260 - DNA, 15 bp, Homo sapiens
aaggtgaatggggag

SEQ ID NO: 1739261 - DNA, 15 bp, Homo sapiens
aggtgaatggggagc

SEQ ID NO: 1739262 - DNA, 15 bp, Homo sapiens
ggtgaatggggagca

SEQ ID NO: 1739263 - DNA, 15 bp, Homo sapiens
gtgaatggggagcag

SEQ ID NO: 1739264 - DNA, 15 bp, Homo sapiens
tgaatggggagcaga

SEQ ID NO: 1739265 - DNA, 15 bp, Homo sapiens
gaatggggagcagat

SEQ ID NO: 1739266 - DNA, 15 bp, Homo sapiens
aatggggagcagatg

SEQ ID NO: 1739267 - DNA, 15 bp, Homo sapiens
atggggagcagatgt

SEQ ID NO: 1739268 - DNA, 15 bp, Homo sapiens
tggggagcagatgtg

SEQ ID NO: 1739269 - DNA, 15 bp, Homo sapiens
ggggagcagatgtgt

SEQ ID NO: 1739270 - DNA, 15 bp, Homo sapiens
gggagcagatgtgtc

SEQ ID NO: 1739271 - DNA, 15 bp, Homo sapiens
ggagcagatgtgtca

SEQ ID NO: 1739272 - DNA, 15 bp, Homo sapiens
gagcagatgtgtcac

SEQ ID NO: 1739273 - DNA, 15 bp, Homo sapiens
agcagatgtgtcaca

SEQ ID NO: 1739274 - DNA, 15 bp, Homo sapiens
gcagatgtgtcacat

SEQ ID NO: 1739275 - DNA, 15 bp, Homo sapiens
cagatgtgtcacatg

SEQ ID NO: 1739276 - DNA, 15 bp, Homo sapiens
agatgtgtcacatgg

SEQ ID NO: 1739277 - DNA, 15 bp, Homo sapiens
gatgtgtcacatgga

SEQ ID NO: 1739278 - DNA, 15 bp, Homo sapiens
atgtgtcacatggag

SEQ ID NO: 1739279 - DNA, 15 bp, Homo sapiens
tgtgtcacatggaga

SEQ ID NO: 1739280 - DNA, 15 bp, Homo sapiens
gtgtcacatggagag

SEQ ID NO: 1739281 - DNA, 15 bp, Homo sapiens
tgtcacatggagaga

SEQ ID NO: 1739282 - DNA, 15 bp, Homo sapiens
gtcacatggagagag

SEQ ID NO: 1739283 - DNA, 15 bp, Homo sapiens
tcacatggagagaga

SEQ ID NO: 1739284 - DNA, 15 bp, Homo sapiens
cacatggagagagag

SEQ ID NO: 1739285 - DNA, 15 bp, Homo sapiens
acatggagagagagg

SEQ ID NO: 1739286 - DNA, 15 bp, Homo sapiens
catggagagagaggg

SEQ ID NO: 1739287 - DNA, 15 bp, Homo sapiens
atggagagagaggga

SEQ ID NO: 1739288 - DNA, 15 bp, Homo sapiens
tggagagagagggag

SEQ ID NO: 1739289 - DNA, 15 bp, Homo sapiens
ggagagagagggagc

SEQ ID NO: 1739290 - DNA, 15 bp, Homo sapiens
gagagagagggagca

SEQ ID NO: 1739291 - DNA, 15 bp, Homo sapiens
agagagagggagcag

SEQ ID NO: 1739292 - DNA, 15 bp, Homo sapiens
gagagagggagcagg

SEQ ID NO: 1739293 - DNA, 15 bp, Homo sapiens
agagagggagcagga

SEQ ID NO: 1739294 - DNA, 15 bp, Homo sapiens
gagagggagcaggag

SEQ ID NO: 1739295 - DNA, 15 bp, Homo sapiens
agagggagcaggagg

SEQ ID NO: 1739296 - DNA, 15 bp, Homo sapiens
gagggagcaggaggg

SEQ ID NO: 1739297 - DNA, 15 bp, Homo sapiens
agggagcaggaggga

SEQ ID NO: 1739298 - DNA, 15 bp, Homo sapiens
gggagcaggagggag

SEQ ID NO: 1739299 - DNA, 15 bp, Homo sapiens
ggagcaggagggaga

SEQ ID NO: 1739300 - DNA, 15 bp, Homo sapiens
gagcaggagggagag

SEQ ID NO: 1739301 - DNA, 15 bp, Homo sapiens
agcaggagggagagg

SEQ ID NO: 1739302 - DNA, 15 bp, Homo sapiens
gcaggagggagaggc

SEQ ID NO: 1739303 - DNA, 15 bp, Homo sapiens
caggagggagaggcc

SEQ ID NO: 1739304 - DNA, 15 bp, Homo sapiens
aggagggagaggcca

SEQ ID NO: 1739305 - DNA, 15 bp, Homo sapiens
ggagggagaggccag

SEQ ID NO: 1739306 - DNA, 15 bp, Homo sapiens
gagggagaggccagg

SEQ ID NO: 1739307 - DNA, 15 bp, Homo sapiens
agggagaggccaggc

SEQ ID NO: 1739308 - DNA, 15 bp, Homo sapiens
gggagaggccaggct

SEQ ID NO: 1739309 - DNA, 15 bp, Homo sapiens
ggagaggccaggctc

SEQ ID NO: 1739310 - DNA, 15 bp, Homo sapiens
gagaggccaggctct

SEQ ID NO: 1739311 - DNA, 15 bp, Homo sapiens
agaggccaggctctc

SEQ ID NO: 1739312 - DNA, 15 bp, Homo sapiens
gaggccaggctctct

SEQ ID NO: 1739313 - DNA, 15 bp, Homo sapiens
aggccaggctctctt

SEQ ID NO: 1739314 - DNA, 15 bp, Homo sapiens
ggccaggctctcttt

SEQ ID NO: 1739315 - DNA, 15 bp, Homo sapiens
gccaggctctcttta

SEQ ID NO: 1739316 - DNA, 15 bp, Homo sapiens
ccaggctctctttaa

SEQ ID NO: 1739317 - DNA, 15 bp, Homo sapiens
caggctctctttaac

SEQ ID NO: 1739318 - DNA, 15 bp, Homo sapiens
aggctctctttaaca

SEQ ID NO: 1739319 - DNA, 15 bp, Homo sapiens
ggctctctttaacaa

SEQ ID NO: 1739320 - DNA, 15 bp, Homo sapiens
gctctctttaacaac

SEQ ID NO: 1739321 - DNA, 15 bp, Homo sapiens
ctctctttaacaacc

SEQ ID NO: 1739322 - DNA, 15 bp, Homo sapiens
tctctttaacaacca

SEQ ID NO: 1739323 - DNA, 15 bp, Homo sapiens
ctctttaacaaccag

SEQ ID NO: 1739324 - DNA, 15 bp, Homo sapiens
tctttaacaaccagc

SEQ ID NO: 1739325 - DNA, 15 bp, Homo sapiens
ctttaacaaccagct

SEQ ID NO: 1739326 - DNA, 15 bp, Homo sapiens
tttaacaaccagctg

SEQ ID NO: 1739327 - DNA, 15 bp, Homo sapiens
ttaacaaccagctgt

SEQ ID NO: 1739328 - DNA, 15 bp, Homo sapiens
taacaaccagctgtc

SEQ ID NO: 1739329 - DNA, 15 bp, Homo sapiens
aacaaccagctgtca

SEQ ID NO: 1739330 - DNA, 15 bp, Homo sapiens
acaaccagctgtcac

SEQ ID NO: 1739331 - DNA, 15 bp, Homo sapiens
caaccagctgtcaca

SEQ ID NO: 1739332 - DNA, 15 bp, Homo sapiens
aaccagctgtcacat

SEQ ID NO: 1739333 - DNA, 15 bp, Homo sapiens
accagctgtcacatg

SEQ ID NO: 1739334 - DNA, 15 bp, Homo sapiens
ccagctgtcacatga

SEQ ID NO: 1739335 - DNA, 15 bp, Homo sapiens
cagctgtcacatgaa

SEQ ID NO: 1739336 - DNA, 15 bp, Homo sapiens
agctgtcacatgaac

SEQ ID NO: 1739337 - DNA, 15 bp, Homo sapiens
gctgtcacatgaact

SEQ ID NO: 1739338 - DNA, 15 bp, Homo sapiens
ctgtcacatgaactg

SEQ ID NO: 1739339 - DNA, 15 bp, Homo sapiens
tgtcacatgaactga

SEQ ID NO: 1739340 - DNA, 15 bp, Homo sapiens
gtcacatgaactgag

SEQ ID NO: 1739341 - DNA, 15 bp, Homo sapiens
tcacatgaactgagt

SEQ ID NO: 1739342 - DNA, 15 bp, Homo sapiens
cacatgaactgagtg

SEQ ID NO: 1739343 - DNA, 15 bp, Homo sapiens
acatgaactgagtga

SEQ ID NO: 1739344 - DNA, 15 bp, Homo sapiens
catgaactgagtgag

SEQ ID NO: 1739345 - DNA, 15 bp, Homo sapiens
atgaactgagtgaga

SEQ ID NO: 1739346 - DNA, 15 bp, Homo sapiens
tgaactgagtgagaa

SEQ ID NO: 1739347 - DNA, 15 bp, Homo sapiens
gaactgagtgagaac

SEQ ID NO: 1739348 - DNA, 15 bp, Homo sapiens
aactgagtgagaact

SEQ ID NO: 1739349 - DNA, 15 bp, Homo sapiens
actgagtgagaactc

SEQ ID NO: 1739350 - DNA, 15 bp, Homo sapiens
ctgagtgagaactcg

SEQ ID NO: 1739351 - DNA, 15 bp, Homo sapiens
tgagtgagaactcgc

SEQ ID NO: 1739352 - DNA, 15 bp, Homo sapiens
gagtgagaactcgct

SEQ ID NO: 1739353 - DNA, 15 bp, Homo sapiens
agtgagaactcgctc

SEQ ID NO: 1739354 - DNA, 15 bp, Homo sapiens
gtgagaactcgctca

SEQ ID NO: 1739355 - DNA, 15 bp, Homo sapiens
tgagaactcgctcat

SEQ ID NO: 1739356 - DNA, 15 bp, Homo sapiens
gagaactcgctcatt

SEQ ID NO: 1739357 - DNA, 15 bp, Homo sapiens
agaactcgctcatta

SEQ ID NO: 1739358 - DNA, 15 bp, Homo sapiens
gaactcgctcattat

SEQ ID NO: 1739359 - DNA, 15 bp, Homo sapiens
aactcgctcattatc

SEQ ID NO: 1739360 - DNA, 15 bp, Homo sapiens
actcgctcattatct

SEQ ID NO: 1739361 - DNA, 15 bp, Homo sapiens
ctcgctcattatctc

SEQ ID NO: 1739362 - DNA, 15 bp, Homo sapiens
tcgctcattatctca

SEQ ID NO: 1739363 - DNA, 15 bp, Homo sapiens
cgctcattatctcag

SEQ ID NO: 1739364 - DNA, 15 bp, Homo sapiens
gctcattatctcagg

SEQ ID NO: 1739365 - DNA, 15 bp, Homo sapiens
ctcattatctcaggg

SEQ ID NO: 1739366 - DNA, 15 bp, Homo sapiens
tcattatctcaggga

SEQ ID NO: 1739367 - DNA, 15 bp, Homo sapiens
cattatctcagggag

SEQ ID NO: 1739368 - DNA, 15 bp, Homo sapiens
attatctcagggagg

SEQ ID NO: 1739369 - DNA, 15 bp, Homo sapiens
ttatctcagggaggg

SEQ ID NO: 1739370 - DNA, 15 bp, Homo sapiens
tatctcagggagggc

SEQ ID NO: 1739371 - DNA, 15 bp, Homo sapiens
atctcagggagggca

SEQ ID NO: 1739372 - DNA, 15 bp, Homo sapiens
tctcagggagggcac

SEQ ID NO: 1739373 - DNA, 15 bp, Homo sapiens
ctcagggagggcacc

SEQ ID NO: 1739374 - DNA, 15 bp, Homo sapiens
tcagggagggcacca

SEQ ID NO: 1739375 - DNA, 15 bp, Homo sapiens
cagggagggcaccaa

SEQ ID NO: 1739376 - DNA, 15 bp, Homo sapiens
agggagggcaccaag

SEQ ID NO: 1739377 - DNA, 15 bp, Homo sapiens
gggagggcaccaagc

SEQ ID NO: 1739378 - DNA, 15 bp, Homo sapiens
ggagggcaccaagcc

SEQ ID NO: 1739379 - DNA, 15 bp, Homo sapiens
gagggcaccaagcca

SEQ ID NO: 1739380 - DNA, 15 bp, Homo sapiens
agggcaccaagccat

SEQ ID NO: 1739381 - DNA, 15 bp, Homo sapiens
gggcaccaagccatt

SEQ ID NO: 1739382 - DNA, 15 bp, Homo sapiens
ggcaccaagccattc

SEQ ID NO: 1739383 - DNA, 15 bp, Homo sapiens
gcaccaagccattca

SEQ ID NO: 1739384 - DNA, 15 bp, Homo sapiens
caccaagccattcat

SEQ ID NO: 1739385 - DNA, 15 bp, Homo sapiens
accaagccattcatg

SEQ ID NO: 1739386 - DNA, 15 bp, Homo sapiens
ccaagccattcatgt

SEQ ID NO: 1739387 - DNA, 15 bp, Homo sapiens
caagccattcatgtg

SEQ ID NO: 1739388 - DNA, 15 bp, Homo sapiens
aagccattcatgtgg

SEQ ID NO: 1739389 - DNA, 15 bp, Homo sapiens
agccattcatgtggg

SEQ ID NO: 1739390 - DNA, 15 bp, Homo sapiens
gccattcatgtggga

SEQ ID NO: 1739391 - DNA, 15 bp, Homo sapiens
ccattcatgtgggat

SEQ ID NO: 1739392 - DNA, 15 bp, Homo sapiens
cattcatgtgggatc

SEQ ID NO: 1739393 - DNA, 15 bp, Homo sapiens
attcatgtgggatct

SEQ ID NO: 1739394 - DNA, 15 bp, Homo sapiens
ttcatgtgggatctg

SEQ ID NO: 1739395 - DNA, 15 bp, Homo sapiens
tcatgtgggatctgt

SEQ ID NO: 1739396 - DNA, 15 bp, Homo sapiens
catgtgggatctgtc

SEQ ID NO: 1739397 - DNA, 15 bp, Homo sapiens
atgtgggatctgtcc

SEQ ID NO: 1739398 - DNA, 15 bp, Homo sapiens
tgtgggatctgtccc

SEQ ID NO: 1739399 - DNA, 15 bp, Homo sapiens
gtgggatctgtcccc

SEQ ID NO: 1739400 - DNA, 15 bp, Homo sapiens
tgggatctgtcccct

SEQ ID NO: 1739401 - DNA, 15 bp, Homo sapiens
gggatctgtcccctt

SEQ ID NO: 1739402 - DNA, 15 bp, Homo sapiens
ggatctgtccccttg

SEQ ID NO: 1739403 - DNA, 15 bp, Homo sapiens
gatctgtccccttga

SEQ ID NO: 1739404 - DNA, 15 bp, Homo sapiens
atctgtccccttgac

SEQ ID NO: 1739405 - DNA, 15 bp, Homo sapiens
tctgtccccttgacc

SEQ ID NO: 1739406 - DNA, 15 bp, Homo sapiens
ctgtccccttgaccc

SEQ ID NO: 1739407 - DNA, 15 bp, Homo sapiens
tgtccccttgaccca

SEQ ID NO: 1739408 - DNA, 15 bp, Homo sapiens
gtccccttgacccaa

SEQ ID NO: 1739409 - DNA, 15 bp, Homo sapiens
tccccttgacccaaa

SEQ ID NO: 1739410 - DNA, 15 bp, Homo sapiens
ccccttgacccaaac

SEQ ID NO: 1739411 - DNA, 15 bp, Homo sapiens
cccttgacccaaaca

SEQ ID NO: 1739412 - DNA, 15 bp, Homo sapiens
ccttgacccaaacac

SEQ ID NO: 1739413 - DNA, 15 bp, Homo sapiens
cttgacccaaacacc

SEQ ID NO: 1739414 - DNA, 15 bp, Homo sapiens
ttgacccaaacacct

SEQ ID NO: 1739415 - DNA, 15 bp, Homo sapiens
tgacccaaacacctc

SEQ ID NO: 1739416 - DNA, 15 bp, Homo sapiens
gacccaaacacctcc

SEQ ID NO: 1739417 - DNA, 15 bp, Homo sapiens
acccaaacacctccc

SEQ ID NO: 1739418 - DNA, 15 bp, Homo sapiens
cccaaacacctccca

SEQ ID NO: 1739419 - DNA, 15 bp, Homo sapiens
ccaaacacctcccat

SEQ ID NO: 1739420 - DNA, 15 bp, Homo sapiens
caaacacctcccatc

SEQ ID NO: 1739421 - DNA, 15 bp, Homo sapiens
aaacacctcccatca

SEQ ID NO: 1739422 - DNA, 15 bp, Homo sapiens
aacacctcccatcag

SEQ ID NO: 1739423 - DNA, 15 bp, Homo sapiens
acacctcccatcagg

SEQ ID NO: 1739424 - DNA, 15 bp, Homo sapiens
cacctcccatcaggc

SEQ ID NO: 1739425 - DNA, 15 bp, Homo sapiens
acctcccatcaggcc

SEQ ID NO: 1739426 - DNA, 15 bp, Homo sapiens
cctcccatcaggccc

SEQ ID NO: 1739427 - DNA, 15 bp, Homo sapiens
ctcccatcaggcccc

SEQ ID NO: 1739428 - DNA, 15 bp, Homo sapiens
tcccatcaggcccca

SEQ ID NO: 1739429 - DNA, 15 bp, Homo sapiens
cccatcaggccccac

SEQ ID NO: 1739430 - DNA, 15 bp, Homo sapiens
ccatcaggccccacc

SEQ ID NO: 1739431 - DNA, 15 bp, Homo sapiens
catcaggccccacct

SEQ ID NO: 1739432 - DNA, 15 bp, Homo sapiens
atcaggccccacctc

SEQ ID NO: 1739433 - DNA, 15 bp, Homo sapiens
tcaggccccacctcc

SEQ ID NO: 1739434 - DNA, 15 bp, Homo sapiens
caggccccacctcca

SEQ ID NO: 1739435 - DNA, 15 bp, Homo sapiens
aggccccacctccaa

SEQ ID NO: 1739436 - DNA, 15 bp, Homo sapiens
ggccccacctccaac

SEQ ID NO: 1739437 - DNA, 15 bp, Homo sapiens
gccccacctccaaca

SEQ ID NO: 1739438 - DNA, 15 bp, Homo sapiens
ccccacctccaacac

SEQ ID NO: 1739439 - DNA, 15 bp, Homo sapiens
cccacctccaacact

SEQ ID NO: 1739440 - DNA, 15 bp, Homo sapiens
ccacctccaacactg

SEQ ID NO: 1739441 - DNA, 15 bp, Homo sapiens
cacctccaacactga

SEQ ID NO: 1739442 - DNA, 15 bp, Homo sapiens
acctccaacactgag

SEQ ID NO: 1739443 - DNA, 15 bp, Homo sapiens
cctccaacactgagg

SEQ ID NO: 1739444 - DNA, 15 bp, Homo sapiens
ctccaacactgagga

SEQ ID NO: 1739445 - DNA, 15 bp, Homo sapiens
tccaacactgaggat

SEQ ID NO: 1739446 - DNA, 15 bp, Homo sapiens
ccaacactgaggatc

SEQ ID NO: 1739447 - DNA, 15 bp, Homo sapiens
caacactgaggatca

SEQ ID NO: 1739448 - DNA, 15 bp, Homo sapiens
aacactgaggatcac

SEQ ID NO: 1739449 - DNA, 15 bp, Homo sapiens
acactgaggatcaca

SEQ ID NO: 1739450 - DNA, 15 bp, Homo sapiens
cactgaggatcacat

SEQ ID NO: 1739451 - DNA, 15 bp, Homo sapiens
actgaggatcacatt

SEQ ID NO: 1739452 - DNA, 15 bp, Homo sapiens
ctgaggatcacattt

SEQ ID NO: 1739453 - DNA, 15 bp, Homo sapiens
tgaggatcacatttc

SEQ ID NO: 1739454 - DNA, 15 bp, Homo sapiens
gaggatcacatttca

SEQ ID NO: 1739455 - DNA, 15 bp, Homo sapiens
aggatcacatttcaa

SEQ ID NO: 1739456 - DNA, 15 bp, Homo sapiens
ggatcacatttcaac

SEQ ID NO: 1739457 - DNA, 15 bp, Homo sapiens
gatcacatttcaacg

SEQ ID NO: 1739458 - DNA, 15 bp, Homo sapiens
atcacatttcaacgt

SEQ ID NO: 1739459 - DNA, 15 bp, Homo sapiens
tcacatttcaacgtg

SEQ ID NO: 1739460 - DNA, 15 bp, Homo sapiens
cacatttcaacgtga

SEQ ID NO: 1739461 - DNA, 15 bp, Homo sapiens
acatttcaacgtgag

SEQ ID NO: 1739462 - DNA, 15 bp, Homo sapiens
catttcaacgtgaga

SEQ ID NO: 1739463 - DNA, 15 bp, Homo sapiens
atttcaacgtgagat

SEQ ID NO: 1739464 - DNA, 15 bp, Homo sapiens
tttcaacgtgagatt

SEQ ID NO: 1739465 - DNA, 15 bp, Homo sapiens
ttcaacgtgagattt

SEQ ID NO: 1739466 - DNA, 15 bp, Homo sapiens
tcaacgtgagatttg

SEQ ID NO: 1739467 - DNA, 15 bp, Homo sapiens
caacgtgagatttgg

SEQ ID NO: 1739468 - DNA, 15 bp, Homo sapiens
aacgtgagatttgga

SEQ ID NO: 1739469 - DNA, 15 bp, Homo sapiens
acgtgagatttggag

SEQ ID NO: 1739470 - DNA, 15 bp, Homo sapiens
cgtgagatttggagg

SEQ ID NO: 1739471 - DNA, 15 bp, Homo sapiens
gtgagatttggaggg

SEQ ID NO: 1739472 - DNA, 15 bp, Homo sapiens
tgagatttggaggga

SEQ ID NO: 1739473 - DNA, 15 bp, Homo sapiens
gagatttggagggaa

SEQ ID NO: 1739474 - DNA, 15 bp, Homo sapiens
agatttggagggaac

SEQ ID NO: 1739475 - DNA, 15 bp, Homo sapiens
gatttggagggaaca

SEQ ID NO: 1739476 - DNA, 15 bp, Homo sapiens
atttggagggaacaa

SEQ ID NO: 1739477 - DNA, 15 bp, Homo sapiens
tttggagggaacaaa

SEQ ID NO: 1739478 - DNA, 15 bp, Homo sapiens
ttggagggaacaaat

SEQ ID NO: 1739479 - DNA, 15 bp, Homo sapiens
tggagggaacaaata

SEQ ID NO: 1739480 - DNA, 15 bp, Homo sapiens
ggagggaacaaatat

SEQ ID NO: 1739481 - DNA, 15 bp, Homo sapiens
gagggaacaaatatc

SEQ ID NO: 1739482 - DNA, 15 bp, Homo sapiens
agggaacaaatatcc

SEQ ID NO: 1739483 - DNA, 15 bp, Homo sapiens
gggaacaaatatcca

SEQ ID NO: 1739484 - DNA, 15 bp, Homo sapiens
ggaacaaatatccaa

SEQ ID NO: 1739485 - DNA, 15 bp, Homo sapiens
gaacaaatatccaaa

SEQ ID NO: 1739486 - DNA, 15 bp, Homo sapiens
aacaaatatccaaac

SEQ ID NO: 1739487 - DNA, 15 bp, Homo sapiens
acaaatatccaaacc

SEQ ID NO: 1739488 - DNA, 15 bp, Homo sapiens
caaatatccaaacca

SEQ ID NO: 1739489 - DNA, 15 bp, Homo sapiens
aaatatccaaaccat

SEQ ID NO: 1739490 - DNA, 15 bp, Homo sapiens
aatatccaaaccata

SEQ ID NO: 1739491 - DNA, 15 bp, Homo sapiens
atatccaaaccatat

SEQ ID NO: 1739492 - DNA, 15 bp, Homo sapiens
tatccaaaccatatc

SEQ ID NO: 1739493 - DNA, 15 bp, Homo sapiens
atccaaaccatatca

SEQ ID NO: 1739494 - DNA, 15 bp, Homo sapiens
tccaaaccatatcag

SEQ ID NO: 1739495 - DNA, 15 bp, Homo sapiens
ccaaaccatatcagt

SEQ ID NO: 1739496 - DNA, 15 bp, Homo sapiens
caaaccatatcagta

SEQ ID NO: 1739497 - DNA, 15 bp, Homo sapiens
aaaccatatcagtat

SEQ ID NO: 1739498 - DNA, 15 bp, Homo sapiens
aaccatatcagtatc

SEQ ID NO: 1739499 - DNA, 15 bp, Homo sapiens
accatatcagtatcc

SEQ ID NO: 1739500 - DNA, 15 bp, Homo sapiens
ccatatcagtatcct

SEQ ID NO: 1739501 - DNA, 15 bp, Homo sapiens
catatcagtatcctt

SEQ ID NO: 1739502 - DNA, 15 bp, Homo sapiens
atatcagtatcctta

SEQ ID NO: 1739503 - DNA, 15 bp, Homo sapiens
tatcagtatccttat

SEQ ID NO: 1739504 - DNA, 15 bp, Homo sapiens
atcagtatccttatt

SEQ ID NO: 1739505 - DNA, 15 bp, Homo sapiens
tcagtatccttattg

SEQ ID NO: 1739506 - DNA, 15 bp, Homo sapiens
cagtatccttattga

SEQ ID NO: 1739507 - DNA, 15 bp, Homo sapiens
agtatccttattgag

SEQ ID NO: 1739508 - DNA, 15 bp, Homo sapiens
gtatccttattgaga

SEQ ID NO: 1739509 - DNA, 15 bp, Homo sapiens
tatccttattgagag

SEQ ID NO: 1739510 - DNA, 15 bp, Homo sapiens
atccttattgagaga

SEQ ID NO: 1739511 - DNA, 15 bp, Homo sapiens
tccttattgagagaa

SEQ ID NO: 1739512 - DNA, 15 bp, Homo sapiens
ccttattgagagaat

SEQ ID NO: 1739513 - DNA, 15 bp, Homo sapiens
cttattgagagaatt

SEQ ID NO: 1739514 - DNA, 15 bp, Homo sapiens
ttattgagagaattt

SEQ ID NO: 1739515 - DNA, 15 bp, Homo sapiens
tattgagagaattta

SEQ ID NO: 1739516 - DNA, 15 bp, Homo sapiens
attgagagaatttaa

SEQ ID NO: 1739517 - DNA, 15 bp, Homo sapiens
ttgagagaatttaaa

SEQ ID NO: 1739518 - DNA, 15 bp, Homo sapiens
tgagagaatttaaaa

SEQ ID NO: 1739519 - DNA, 15 bp, Homo sapiens
gagagaatttaaaag

SEQ ID NO: 1739520 - DNA, 15 bp, Homo sapiens
agagaatttaaaagt

SEQ ID NO: 1739521 - DNA, 15 bp, Homo sapiens
gagaatttaaaagtt

SEQ ID NO: 1739522 - DNA, 15 bp, Homo sapiens
agaatttaaaagttt

SEQ ID NO: 1739523 - DNA, 15 bp, Homo sapiens
gaatttaaaagtttg

SEQ ID NO: 1739524 - DNA, 15 bp, Homo sapiens
aatttaaaagtttga

SEQ ID NO: 1739525 - DNA, 15 bp, Homo sapiens
atttaaaagtttgag

SEQ ID NO: 1739526 - DNA, 15 bp, Homo sapiens
tttaaaagtttgagg

SEQ ID NO: 1739527 - DNA, 15 bp, Homo sapiens
ttaaaagtttgaggt

SEQ ID NO: 1739528 - DNA, 15 bp, Homo sapiens
taaaagtttgaggta

SEQ ID NO: 1739529 - DNA, 15 bp, Homo sapiens
aaaagtttgaggtag

SEQ ID NO: 1739530 - DNA, 15 bp, Homo sapiens
aaagtttgaggtagg

SEQ ID NO: 1739531 - DNA, 15 bp, Homo sapiens
aagtttgaggtaggt

SEQ ID NO: 1739532 - DNA, 15 bp, Homo sapiens
agtttgaggtaggtg

SEQ ID NO: 1739533 - DNA, 15 bp, Homo sapiens
gtttgaggtaggtgt

SEQ ID NO: 1739534 - DNA, 15 bp, Homo sapiens
tttgaggtaggtgtt

SEQ ID NO: 1739535 - DNA, 15 bp, Homo sapiens
ttgaggtaggtgttg

SEQ ID NO: 1739536 - DNA, 15 bp, Homo sapiens
tgaggtaggtgttga

SEQ ID NO: 1739537 - DNA, 15 bp, Homo sapiens
gaggtaggtgttgaa

SEQ ID NO: 1739538 - DNA, 15 bp, Homo sapiens
aggtaggtgttgaaa

SEQ ID NO: 1739539 - DNA, 15 bp, Homo sapiens
ggtaggtgttgaaag

SEQ ID NO: 1739540 - DNA, 15 bp, Homo sapiens
gtaggtgttgaaaga

SEQ ID NO: 1739541 - DNA, 15 bp, Homo sapiens
taggtgttgaaagag

SEQ ID NO: 1739542 - DNA, 15 bp, Homo sapiens
aggtgttgaaagaga

SEQ ID NO: 1739543 - DNA, 15 bp, Homo sapiens
ggtgttgaaagagag

SEQ ID NO: 1739544 - DNA, 15 bp, Homo sapiens
gtgttgaaagagagg

SEQ ID NO: 1739545 - DNA, 15 bp, Homo sapiens
tgttgaaagagagga

SEQ ID NO: 1739546 - DNA, 15 bp, Homo sapiens
gttgaaagagaggaa

SEQ ID NO: 1739547 - DNA, 15 bp, Homo sapiens
ttgaaagagaggaaa

SEQ ID NO: 1739548 - DNA, 15 bp, Homo sapiens
tgaaagagaggaaaa

SEQ ID NO: 1739549 - DNA, 15 bp, Homo sapiens
gaaagagaggaaaaa

SEQ ID NO: 1739550 - DNA, 15 bp, Homo sapiens
aaagagaggaaaaac

SEQ ID NO: 1739551 - DNA, 15 bp, Homo sapiens
aagagaggaaaaact

SEQ ID NO: 1739552 - DNA, 15 bp, Homo sapiens
agagaggaaaaactt

SEQ ID NO: 1739553 - DNA, 15 bp, Homo sapiens
gagaggaaaaactta

SEQ ID NO: 1739554 - DNA, 15 bp, Homo sapiens
agaggaaaaacttat

SEQ ID NO: 1739555 - DNA, 15 bp, Homo sapiens
gaggaaaaacttatt

SEQ ID NO: 1739556 - DNA, 15 bp, Homo sapiens
aggaaaaacttattt

SEQ ID NO: 1739557 - DNA, 15 bp, Homo sapiens
ggaaaaacttattta

SEQ ID NO: 1739558 - DNA, 15 bp, Homo sapiens
gaaaaacttatttaa

SEQ ID NO: 1739559 - DNA, 15 bp, Homo sapiens
aaaaacttatttaag

SEQ ID NO: 1739560 - DNA, 15 bp, Homo sapiens
aaaacttatttaaga

SEQ ID NO: 1739561 - DNA, 15 bp, Homo sapiens
aaacttatttaagat

SEQ ID NO: 1739562 - DNA, 15 bp, Homo sapiens
aacttatttaagatt

SEQ ID NO: 1739563 - DNA, 15 bp, Homo sapiens
acttatttaagattt

SEQ ID NO: 1739564 - DNA, 15 bp, Homo sapiens
cttatttaagatttc

SEQ ID NO: 1739565 - DNA, 15 bp, Homo sapiens
ttatttaagatttca

SEQ ID NO: 1739566 - DNA, 15 bp, Homo sapiens
tatttaagatttcac

SEQ ID NO: 1739567 - DNA, 15 bp, Homo sapiens
atttaagatttcacc

SEQ ID NO: 1739568 - DNA, 15 bp, Homo sapiens
tttaagatttcaccc

SEQ ID NO: 1739569 - DNA, 15 bp, Homo sapiens
ttaagatttcaccca

SEQ ID NO: 1739570 - DNA, 15 bp, Homo sapiens
taagatttcacccaa

SEQ ID NO: 1739571 - DNA, 15 bp, Homo sapiens
aagatttcacccaat

SEQ ID NO: 1739572 - DNA, 15 bp, Homo sapiens
agatttcacccaatt

SEQ ID NO: 1739573 - DNA, 15 bp, Homo sapiens
gatttcacccaattt

SEQ ID NO: 1739574 - DNA, 15 bp, Homo sapiens
atttcacccaatttt

SEQ ID NO: 1739575 - DNA, 15 bp, Homo sapiens
tttcacccaattttt

SEQ ID NO: 1739576 - DNA, 15 bp, Homo sapiens
ttcacccaatttttc

SEQ ID NO: 1739577 - DNA, 15 bp, Homo sapiens
tcacccaatttttca

SEQ ID NO: 1739578 - DNA, 15 bp, Homo sapiens
cacccaatttttcag

SEQ ID NO: 1739579 - DNA, 15 bp, Homo sapiens
acccaatttttcagt

SEQ ID NO: 1739580 - DNA, 15 bp, Homo sapiens
cccaatttttcagtt

SEQ ID NO: 1739581 - DNA, 15 bp, Homo sapiens
ccaatttttcagttc

SEQ ID NO: 1739582 - DNA, 15 bp, Homo sapiens
caatttttcagttca

SEQ ID NO: 1739583 - DNA, 15 bp, Homo sapiens
aatttttcagttcag

SEQ ID NO: 1739584 - DNA, 15 bp, Homo sapiens
atttttcagttcagg

SEQ ID NO: 1739585 - DNA, 15 bp, Homo sapiens
tttttcagttcaggg

SEQ ID NO: 1739586 - DNA, 15 bp, Homo sapiens
ttttcagttcaggga

SEQ ID NO: 1739587 - DNA, 15 bp, Homo sapiens
tttcagttcagggaa

SEQ ID NO: 1739588 - DNA, 15 bp, Homo sapiens
ttcagttcagggaaa

SEQ ID NO: 1739589 - DNA, 15 bp, Homo sapiens
tcagttcagggaaat

SEQ ID NO: 1739590 - DNA, 15 bp, Homo sapiens
cagttcagggaaata

SEQ ID NO: 1739591 - DNA, 15 bp, Homo sapiens
agttcagggaaataa

SEQ ID NO: 1739592 - DNA, 15 bp, Homo sapiens
gttcagggaaataaa

SEQ ID NO: 1739593 - DNA, 15 bp, Homo sapiens
ttcagggaaataaaa

SEQ ID NO: 1739594 - DNA, 15 bp, Homo sapiens
tcagggaaataaaaa

SEQ ID NO: 1739595 - DNA, 15 bp, Homo sapiens
cagggaaataaaaaa

SEQ ID NO: 1739596 - DNA, 15 bp, Homo sapiens
agggaaataaaaaaa

SEQ ID NO: 1739597 - DNA, 15 bp, Homo sapiens
gggaaataaaaaaac

SEQ ID NO: 1739598 - DNA, 15 bp, Homo sapiens
ggaaataaaaaaacc

SEQ ID NO: 1739599 - DNA, 15 bp, Homo sapiens
gaaataaaaaaacca

SEQ ID NO: 1739600 - DNA, 15 bp, Homo sapiens
aaataaaaaaaccac

SEQ ID NO: 1739601 - DNA, 15 bp, Homo sapiens
aataaaaaaaccaca

SEQ ID NO: 1739602 - DNA, 15 bp, Homo sapiens
ataaaaaaaccacaa

SEQ ID NO: 1739603 - DNA, 15 bp, Homo sapiens
taaaaaaaccacaat

SEQ ID NO: 1739604 - DNA, 15 bp, Homo sapiens
aaaaaaaccacaatg

SEQ ID NO: 1739605 - DNA, 15 bp, Homo sapiens
aaaaaaccacaatga

SEQ ID NO: 1739606 - DNA, 15 bp, Homo sapiens
aaaaaccacaatgat

SEQ ID NO: 1739607 - DNA, 15 bp, Homo sapiens
aaaaccacaatgatt

SEQ ID NO: 1739608 - DNA, 15 bp, Homo sapiens
aaaccacaatgattt

SEQ ID NO: 1739609 - DNA, 15 bp, Homo sapiens
aaccacaatgatttt

SEQ ID NO: 1739610 - DNA, 15 bp, Homo sapiens
accacaatgattttt

SEQ ID NO: 1739611 - DNA, 15 bp, Homo sapiens
ccacaatgattttta

SEQ ID NO: 1739612 - DNA, 15 bp, Homo sapiens
cacaatgatttttac

SEQ ID NO: 1739613 - DNA, 15 bp, Homo sapiens
acaatgatttttaca

SEQ ID NO: 1739614 - DNA, 15 bp, Homo sapiens
caatgatttttacaa

SEQ ID NO: 1739615 - DNA, 15 bp, Homo sapiens
aatgatttttacaaa

SEQ ID NO: 1739616 - DNA, 15 bp, Homo sapiens
atgatttttacaaat

SEQ ID NO: 1739617 - DNA, 15 bp, Homo sapiens
tgatttttacaaatg

SEQ ID NO: 1739618 - DNA, 15 bp, Homo sapiens
gatttttacaaatgc

SEQ ID NO: 1739619 - DNA, 15 bp, Homo sapiens
atttttacaaatgcc

SEQ ID NO: 1739620 - DNA, 15 bp, Homo sapiens
tttttacaaatgcca

SEQ ID NO: 1739621 - DNA, 15 bp, Homo sapiens
ttttacaaatgccac

SEQ ID NO: 1739622 - DNA, 15 bp, Homo sapiens
tttacaaatgccaca

SEQ ID NO: 1739623 - DNA, 15 bp, Homo sapiens
ttacaaatgccacag

SEQ ID NO: 1739624 - DNA, 15 bp, Homo sapiens
tacaaatgccacagc

SEQ ID NO: 1739625 - DNA, 15 bp, Homo sapiens
acaaatgccacagct

SEQ ID NO: 1739626 - DNA, 15 bp, Homo sapiens
caaatgccacagctt

SEQ ID NO: 1739627 - DNA, 15 bp, Homo sapiens
aaatgccacagcttt

SEQ ID NO: 1739628 - DNA, 15 bp, Homo sapiens
aatgccacagcttta

SEQ ID NO: 1739629 - DNA, 15 bp, Homo sapiens
atgccacagctttag

SEQ ID NO: 1739630 - DNA, 15 bp, Homo sapiens
tgccacagctttaga

SEQ ID NO: 1739631 - DNA, 15 bp, Homo sapiens
gccacagctttagaa

SEQ ID NO: 1739632 - DNA, 15 bp, Homo sapiens
ccacagctttagaat

SEQ ID NO: 1739633 - DNA, 15 bp, Homo sapiens
cacagctttagaata

SEQ ID NO: 1739634 - DNA, 15 bp, Homo sapiens
acagctttagaatag

SEQ ID NO: 1739635 - DNA, 15 bp, Homo sapiens
cagctttagaatagc

SEQ ID NO: 1739636 - DNA, 15 bp, Homo sapiens
agctttagaatagct

SEQ ID NO: 1739637 - DNA, 15 bp, Homo sapiens
gctttagaatagctt

SEQ ID NO: 1739638 - DNA, 15 bp, Homo sapiens
ctttagaatagcttg

SEQ ID NO: 1739639 - DNA, 15 bp, Homo sapiens
tttagaatagcttgc

SEQ ID NO: 1739640 - DNA, 15 bp, Homo sapiens
ttagaatagcttgcc

SEQ ID NO: 1739641 - DNA, 15 bp, Homo sapiens
tagaatagcttgcct

SEQ ID NO: 1739642 - DNA, 15 bp, Homo sapiens
agaatagcttgcctg

SEQ ID NO: 1739643 - DNA, 15 bp, Homo sapiens
gaatagcttgcctgc

SEQ ID NO: 1739644 - DNA, 15 bp, Homo sapiens
aatagcttgcctgcc

SEQ ID NO: 1739645 - DNA, 15 bp, Homo sapiens
atagcttgcctgcct

SEQ ID NO: 1739646 - DNA, 15 bp, Homo sapiens
tagcttgcctgcctc

SEQ ID NO: 1739647 - DNA, 15 bp, Homo sapiens
agcttgcctgcctct

SEQ ID NO: 1739648 - DNA, 15 bp, Homo sapiens
gcttgcctgcctcta

SEQ ID NO: 1739649 - DNA, 15 bp, Homo sapiens
cttgcctgcctctag

SEQ ID NO: 1739650 - DNA, 15 bp, Homo sapiens
ttgcctgcctctagt

SEQ ID NO: 1739651 - DNA, 15 bp, Homo sapiens
tgcctgcctctagtt

SEQ ID NO: 1739652 - DNA, 15 bp, Homo sapiens
gcctgcctctagttc

SEQ ID NO: 1739653 - DNA, 15 bp, Homo sapiens
cctgcctctagttcc

SEQ ID NO: 1739654 - DNA, 15 bp, Homo sapiens
ctgcctctagttcca

SEQ ID NO: 1739655 - DNA, 15 bp, Homo sapiens
tgcctctagttccaa

SEQ ID NO: 1739656 - DNA, 15 bp, Homo sapiens
gcctctagttccaaa

SEQ ID NO: 1739657 - DNA, 15 bp, Homo sapiens
cctctagttccaaat

SEQ ID NO: 1739658 - DNA, 15 bp, Homo sapiens
ctctagttccaaata

SEQ ID NO: 1739659 - DNA, 15 bp, Homo sapiens
tctagttccaaatac

SEQ ID NO: 1739660 - DNA, 15 bp, Homo sapiens
ctagttccaaatact

SEQ ID NO: 1739661 - DNA, 15 bp, Homo sapiens
tagttccaaatactc

SEQ ID NO: 1739662 - DNA, 15 bp, Homo sapiens
agttccaaatactct

SEQ ID NO: 1739663 - DNA, 15 bp, Homo sapiens
gttccaaatactctt

SEQ ID NO: 1739664 - DNA, 15 bp, Homo sapiens
ttccaaatactcttc

SEQ ID NO: 1739665 - DNA, 15 bp, Homo sapiens
tccaaatactcttcc

SEQ ID NO: 1739666 - DNA, 15 bp, Homo sapiens
ccaaatactcttcca

SEQ ID NO: 1739667 - DNA, 15 bp, Homo sapiens
caaatactcttccaa

SEQ ID NO: 1739668 - DNA, 15 bp, Homo sapiens
aaatactcttccaat

SEQ ID NO: 1739669 - DNA, 15 bp, Homo sapiens
aatactcttccaatt

SEQ ID NO: 1739670 - DNA, 15 bp, Homo sapiens
atactcttccaattt

SEQ ID NO: 1739671 - DNA, 15 bp, Homo sapiens
tactcttccaatttg

SEQ ID NO: 1739672 - DNA, 15 bp, Homo sapiens
actcttccaatttgc

SEQ ID NO: 1739673 - DNA, 15 bp, Homo sapiens
ctcttccaatttgcc

SEQ ID NO: 1739674 - DNA, 15 bp, Homo sapiens
tcttccaatttgccc

SEQ ID NO: 1739675 - DNA, 15 bp, Homo sapiens
cttccaatttgccct

SEQ ID NO: 1739676 - DNA, 15 bp, Homo sapiens
ttccaatttgcccta

SEQ ID NO: 1739677 - DNA, 15 bp, Homo sapiens
tccaatttgccctat

SEQ ID NO: 1739678 - DNA, 15 bp, Homo sapiens
ccaatttgccctatt

SEQ ID NO: 1739679 - DNA, 15 bp, Homo sapiens
caatttgccctattt

SEQ ID NO: 1739680 - DNA, 15 bp, Homo sapiens
aatttgccctattta

SEQ ID NO: 1739681 - DNA, 15 bp, Homo sapiens
atttgccctatttaa

SEQ ID NO: 1739682 - DNA, 15 bp, Homo sapiens
tttgccctatttaaa

SEQ ID NO: 1739683 - DNA, 15 bp, Homo sapiens
ttgccctatttaaaa

SEQ ID NO: 1739684 - DNA, 15 bp, Homo sapiens
tgccctatttaaaac

SEQ ID NO: 1739685 - DNA, 15 bp, Homo sapiens
gccctatttaaaact

SEQ ID NO: 1739686 - DNA, 15 bp, Homo sapiens
ccctatttaaaactt

SEQ ID NO: 1739687 - DNA, 15 bp, Homo sapiens
cctatttaaaacttc

SEQ ID NO: 1739688 - DNA, 15 bp, Homo sapiens
ctatttaaaacttca

SEQ ID NO: 1739689 - DNA, 15 bp, Homo sapiens
tatttaaaacttcag

SEQ ID NO: 1739690 - DNA, 15 bp, Homo sapiens
atttaaaacttcagg

SEQ ID NO: 1739691 - DNA, 15 bp, Homo sapiens
tttaaaacttcagga

SEQ ID NO: 1739692 - DNA, 15 bp, Homo sapiens
ttaaaacttcaggat

SEQ ID NO: 1739693 - DNA, 15 bp, Homo sapiens
taaaacttcaggatg

SEQ ID NO: 1739694 - DNA, 15 bp, Homo sapiens
aaaacttcaggatgg

SEQ ID NO: 1739695 - DNA, 15 bp, Homo sapiens
aaacttcaggatgga

SEQ ID NO: 1739696 - DNA, 15 bp, Homo sapiens
aacttcaggatggaa

SEQ ID NO: 1739697 - DNA, 15 bp, Homo sapiens
acttcaggatggaaa

SEQ ID NO: 1739698 - DNA, 15 bp, Homo sapiens
cttcaggatggaaat

SEQ ID NO: 1739699 - DNA, 15 bp, Homo sapiens
ttcaggatggaaatg

SEQ ID NO: 1739700 - DNA, 15 bp, Homo sapiens
tcaggatggaaatga

SEQ ID NO: 1739701 - DNA, 15 bp, Homo sapiens
caggatggaaatgaa

SEQ ID NO: 1739702 - DNA, 15 bp, Homo sapiens
aggatggaaatgaac

SEQ ID NO: 1739703 - DNA, 15 bp, Homo sapiens
ggatggaaatgaaca

SEQ ID NO: 1739704 - DNA, 15 bp, Homo sapiens
gatggaaatgaacac

SEQ ID NO: 1739705 - DNA, 15 bp, Homo sapiens
atggaaatgaacaca

SEQ ID NO: 1739706 - DNA, 15 bp, Homo sapiens
tggaaatgaacacac

SEQ ID NO: 1739707 - DNA, 15 bp, Homo sapiens
ggaaatgaacacaca

SEQ ID NO: 1739708 - DNA, 15 bp, Homo sapiens
gaaatgaacacacag

SEQ ID NO: 1739709 - DNA, 15 bp, Homo sapiens
aaatgaacacacaga

SEQ ID NO: 1739710 - DNA, 15 bp, Homo sapiens
aatgaacacacagaa

SEQ ID NO: 1739711 - DNA, 15 bp, Homo sapiens
atgaacacacagaaa

SEQ ID NO: 1739712 - DNA, 15 bp, Homo sapiens
tgaacacacagaaag

SEQ ID NO: 1739713 - DNA, 15 bp, Homo sapiens
gaacacacagaaagg

SEQ ID NO: 1739714 - DNA, 15 bp, Homo sapiens
aacacacagaaagga

SEQ ID NO: 1739715 - DNA, 15 bp, Homo sapiens
acacacagaaaggaa

SEQ ID NO: 1739716 - DNA, 15 bp, Homo sapiens
cacacagaaaggaac

SEQ ID NO: 1739717 - DNA, 15 bp, Homo sapiens
acacagaaaggaact

SEQ ID NO: 1739718 - DNA, 15 bp, Homo sapiens
cacagaaaggaactg

SEQ ID NO: 1739719 - DNA, 15 bp, Homo sapiens
acagaaaggaactga

SEQ ID NO: 1739720 - DNA, 15 bp, Homo sapiens
cagaaaggaactgat

SEQ ID NO: 1739721 - DNA, 15 bp, Homo sapiens
agaaaggaactgata

SEQ ID NO: 1739722 - DNA, 15 bp, Homo sapiens
gaaaggaactgataa

SEQ ID NO: 1739723 - DNA, 15 bp, Homo sapiens
aaaggaactgataag

SEQ ID NO: 1739724 - DNA, 15 bp, Homo sapiens
aaggaactgataaga

SEQ ID NO: 1739725 - DNA, 15 bp, Homo sapiens
aggaactgataagat

SEQ ID NO: 1739726 - DNA, 15 bp, Homo sapiens
ggaactgataagatg

SEQ ID NO: 1739727 - DNA, 15 bp, Homo sapiens
gaactgataagatga

SEQ ID NO: 1739728 - DNA, 15 bp, Homo sapiens
aactgataagatgaa

SEQ ID NO: 1739729 - DNA, 15 bp, Homo sapiens
actgataagatgaaa

SEQ ID NO: 1739730 - DNA, 15 bp, Homo sapiens
ctgataagatgaaaa

SEQ ID NO: 1739731 - DNA, 15 bp, Homo sapiens
tgataagatgaaaag

SEQ ID NO: 1739732 - DNA, 15 bp, Homo sapiens
gataagatgaaaagt

SEQ ID NO: 1739733 - DNA, 15 bp, Homo sapiens
ataagatgaaaagta

SEQ ID NO: 1739734 - DNA, 15 bp, Homo sapiens
taagatgaaaagtaa

SEQ ID NO: 1739735 - DNA, 15 bp, Homo sapiens
aagatgaaaagtaaa

SEQ ID NO: 1739736 - DNA, 15 bp, Homo sapiens
agatgaaaagtaaaa

SEQ ID NO: 1739737 - DNA, 15 bp, Homo sapiens
gatgaaaagtaaaat

SEQ ID NO: 1739738 - DNA, 15 bp, Homo sapiens
atgaaaagtaaaata

SEQ ID NO: 1739739 - DNA, 15 bp, Homo sapiens
tgaaaagtaaaatag

SEQ ID NO: 1739740 - DNA, 15 bp, Homo sapiens
gaaaagtaaaatagg

SEQ ID NO: 1739741 - DNA, 15 bp, Homo sapiens
aaaagtaaaataggg

SEQ ID NO: 1739742 - DNA, 15 bp, Homo sapiens
aaagtaaaatagggt

SEQ ID NO: 1739743 - DNA, 15 bp, Homo sapiens
aagtaaaatagggta

SEQ ID NO: 1739744 - DNA, 15 bp, Homo sapiens
agtaaaatagggtat

SEQ ID NO: 1739745 - DNA, 15 bp, Homo sapiens
gtaaaatagggtatg

SEQ ID NO: 1739746 - DNA, 15 bp, Homo sapiens
taaaatagggtatga

SEQ ID NO: 1739747 - DNA, 15 bp, Homo sapiens
aaaatagggtatgaa

SEQ ID NO: 1739748 - DNA, 15 bp, Homo sapiens
aaatagggtatgaat

SEQ ID NO: 1739749 - DNA, 15 bp, Homo sapiens
aatagggtatgaatc

SEQ ID NO: 1739750 - DNA, 15 bp, Homo sapiens
atagggtatgaatct

SEQ ID NO: 1739751 - DNA, 15 bp, Homo sapiens
tagggtatgaatctt

SEQ ID NO: 1739752 - DNA, 15 bp, Homo sapiens
agggtatgaatcttc

SEQ ID NO: 1739753 - DNA, 15 bp, Homo sapiens
gggtatgaatcttca

SEQ ID NO: 1739754 - DNA, 15 bp, Homo sapiens
ggtatgaatcttcaa

SEQ ID NO: 1739755 - DNA, 15 bp, Homo sapiens
gtatgaatcttcaag

SEQ ID NO: 1739756 - DNA, 15 bp, Homo sapiens
tatgaatcttcaagg

SEQ ID NO: 1739757 - DNA, 15 bp, Homo sapiens
atgaatcttcaaggt

SEQ ID NO: 1739758 - DNA, 15 bp, Homo sapiens
tgaatcttcaaggtt

SEQ ID NO: 1739759 - DNA, 15 bp, Homo sapiens
gaatcttcaaggttc

SEQ ID NO: 1739760 - DNA, 15 bp, Homo sapiens
aatcttcaaggttct

SEQ ID NO: 1739761 - DNA, 15 bp, Homo sapiens
atcttcaaggttctg

SEQ ID NO: 1739762 - DNA, 15 bp, Homo sapiens
tcttcaaggttctga

SEQ ID NO: 1739763 - DNA, 15 bp, Homo sapiens
cttcaaggttctgat

SEQ ID NO: 1739764 - DNA, 15 bp, Homo sapiens
ttcaaggttctgata

SEQ ID NO: 1739765 - DNA, 15 bp, Homo sapiens
tcaaggttctgatag

SEQ ID NO: 1739766 - DNA, 15 bp, Homo sapiens
caaggttctgatagc

SEQ ID NO: 1739767 - DNA, 15 bp, Homo sapiens
aaggttctgatagct

SEQ ID NO: 1739768 - DNA, 15 bp, Homo sapiens
aggttctgatagctt

SEQ ID NO: 1739769 - DNA, 15 bp, Homo sapiens
ggttctgatagctta

SEQ ID NO: 1739770 - DNA, 15 bp, Homo sapiens
gttctgatagcttat

SEQ ID NO: 1739771 - DNA, 15 bp, Homo sapiens
ttctgatagcttata

SEQ ID NO: 1739772 - DNA, 15 bp, Homo sapiens
tctgatagcttataa

SEQ ID NO: 1739773 - DNA, 15 bp, Homo sapiens
ctgatagcttataaa

SEQ ID NO: 1739774 - DNA, 15 bp, Homo sapiens
tgatagcttataaag

SEQ ID NO: 1739775 - DNA, 15 bp, Homo sapiens
gatagcttataaaga

SEQ ID NO: 1739776 - DNA, 15 bp, Homo sapiens
atagcttataaagag

SEQ ID NO: 1739777 - DNA, 15 bp, Homo sapiens
tagcttataaagagc

SEQ ID NO: 1739778 - DNA, 15 bp, Homo sapiens
agcttataaagagct

SEQ ID NO: 1739779 - DNA, 15 bp, Homo sapiens
gcttataaagagcta

SEQ ID NO: 1739780 - DNA, 15 bp, Homo sapiens
cttataaagagctag

SEQ ID NO: 1739781 - DNA, 15 bp, Homo sapiens
ttataaagagctaga

SEQ ID NO: 1739782 - DNA, 15 bp, Homo sapiens
tataaagagctagat

SEQ ID NO: 1739783 - DNA, 15 bp, Homo sapiens
ataaagagctagatt

SEQ ID NO: 1739784 - DNA, 15 bp, Homo sapiens
taaagagctagatta

SEQ ID NO: 1739785 - DNA, 15 bp, Homo sapiens
aaagagctagattaa

SEQ ID NO: 1739786 - DNA, 15 bp, Homo sapiens
aagagctagattaat

SEQ ID NO: 1739787 - DNA, 15 bp, Homo sapiens
agagctagattaata

SEQ ID NO: 1739788 - DNA, 15 bp, Homo sapiens
gagctagattaataa

SEQ ID NO: 1739789 - DNA, 15 bp, Homo sapiens
agctagattaataat

SEQ ID NO: 1739790 - DNA, 15 bp, Homo sapiens
gctagattaataatc

SEQ ID NO: 1739791 - DNA, 15 bp, Homo sapiens
ctagattaataatcg

SEQ ID NO: 1739792 - DNA, 15 bp, Homo sapiens
tagattaataatcgg

SEQ ID NO: 1739793 - DNA, 15 bp, Homo sapiens
agattaataatcgga

SEQ ID NO: 1739794 - DNA, 15 bp, Homo sapiens
gattaataatcggaa

SEQ ID NO: 1739795 - DNA, 15 bp, Homo sapiens
attaataatcggaaa

SEQ ID NO: 1739796 - DNA, 15 bp, Homo sapiens
ttaataatcggaaat

SEQ ID NO: 1739797 - DNA, 15 bp, Homo sapiens
taataatcggaaatt

SEQ ID NO: 1739798 - DNA, 15 bp, Homo sapiens
aataatcggaaattt

SEQ ID NO: 1739799 - DNA, 15 bp, Homo sapiens
ataatcggaaatttc

SEQ ID NO: 1739800 - DNA, 15 bp, Homo sapiens
taatcggaaatttca

SEQ ID NO: 1739801 - DNA, 15 bp, Homo sapiens
aatcggaaatttcac

SEQ ID NO: 1739802 - DNA, 15 bp, Homo sapiens
atcggaaatttcact

SEQ ID NO: 1739803 - DNA, 15 bp, Homo sapiens
tcggaaatttcactg

SEQ ID NO: 1739804 - DNA, 15 bp, Homo sapiens
cggaaatttcactgt

SEQ ID NO: 1739805 - DNA, 15 bp, Homo sapiens
ggaaatttcactgtg

SEQ ID NO: 1739806 - DNA, 15 bp, Homo sapiens
gaaatttcactgtga

SEQ ID NO: 1739807 - DNA, 15 bp, Homo sapiens
aaatttcactgtgaa

SEQ ID NO: 1739808 - DNA, 15 bp, Homo sapiens
aatttcactgtgaac

SEQ ID NO: 1739809 - DNA, 15 bp, Homo sapiens
atttcactgtgaaca

SEQ ID NO: 1739810 - DNA, 15 bp, Homo sapiens
tttcactgtgaacat

SEQ ID NO: 1739811 - DNA, 15 bp, Homo sapiens
ttcactgtgaacatc

SEQ ID NO: 1739812 - DNA, 15 bp, Homo sapiens
tcactgtgaacatca

SEQ ID NO: 1739813 - DNA, 15 bp, Homo sapiens
cactgtgaacatcag

SEQ ID NO: 1739814 - DNA, 15 bp, Homo sapiens
actgtgaacatcagt

SEQ ID NO: 1739815 - DNA, 15 bp, Homo sapiens
ctgtgaacatcagta

SEQ ID NO: 1739816 - DNA, 15 bp, Homo sapiens
tgtgaacatcagtag

SEQ ID NO: 1739817 - DNA, 15 bp, Homo sapiens
gtgaacatcagtaga

SEQ ID NO: 1739818 - DNA, 15 bp, Homo sapiens
tgaacatcagtagaa

SEQ ID NO: 1739819 - DNA, 15 bp, Homo sapiens
gaacatcagtagaaa

SEQ ID NO: 1739820 - DNA, 15 bp, Homo sapiens
aacatcagtagaaat

SEQ ID NO: 1739821 - DNA, 15 bp, Homo sapiens
acatcagtagaaatt

SEQ ID NO: 1739822 - DNA, 15 bp, Homo sapiens
catcagtagaaatta

SEQ ID NO: 1739823 - DNA, 15 bp, Homo sapiens
atcagtagaaattat

SEQ ID NO: 1739824 - DNA, 15 bp, Homo sapiens
tcagtagaaattata

SEQ ID NO: 1739825 - DNA, 15 bp, Homo sapiens
cagtagaaattataa

SEQ ID NO: 1739826 - DNA, 15 bp, Homo sapiens
agtagaaattataat

SEQ ID NO: 1739827 - DNA, 15 bp, Homo sapiens
gtagaaattataatc

SEQ ID NO: 1739828 - DNA, 15 bp, Homo sapiens
tagaaattataatcc

SEQ ID NO: 1739829 - DNA, 15 bp, Homo sapiens
agaaattataatcct

SEQ ID NO: 1739830 - DNA, 15 bp, Homo sapiens
gaaattataatcctg

SEQ ID NO: 1739831 - DNA, 15 bp, Homo sapiens
aaattataatcctgg

SEQ ID NO: 1739832 - DNA, 15 bp, Homo sapiens
aattataatcctggg

SEQ ID NO: 1739833 - DNA, 15 bp, Homo sapiens
attataatcctgggg

SEQ ID NO: 1739834 - DNA, 15 bp, Homo sapiens
ttataatcctggggg

SEQ ID NO: 1739835 - DNA, 15 bp, Homo sapiens
tataatcctggggga

SEQ ID NO: 1739836 - DNA, 15 bp, Homo sapiens
ataatcctgggggaa

SEQ ID NO: 1739837 - DNA, 15 bp, Homo sapiens
taatcctgggggaaa

SEQ ID NO: 1739838 - DNA, 15 bp, Homo sapiens
aatcctgggggaaag

SEQ ID NO: 1739839 - DNA, 15 bp, Homo sapiens
atcctgggggaaaga

SEQ ID NO: 1739840 - DNA, 15 bp, Homo sapiens
tcctgggggaaagat

SEQ ID NO: 1739841 - DNA, 15 bp, Homo sapiens
cctgggggaaagatg

SEQ ID NO: 1739842 - DNA, 15 bp, Homo sapiens
ctgggggaaagatga

SEQ ID NO: 1739843 - DNA, 15 bp, Homo sapiens
tgggggaaagatgat

SEQ ID NO: 1739844 - DNA, 15 bp, Homo sapiens
gggggaaagatgatg

SEQ ID NO: 1739845 - DNA, 15 bp, Homo sapiens
ggggaaagatgatgc

SEQ ID NO: 1739846 - DNA, 15 bp, Homo sapiens
gggaaagatgatgct

SEQ ID NO: 1739847 - DNA, 15 bp, Homo sapiens
ggaaagatgatgctg

SEQ ID NO: 1739848 - DNA, 15 bp, Homo sapiens
gaaagatgatgctgc

SEQ ID NO: 1739849 - DNA, 15 bp, Homo sapiens
aaagatgatgctgca

SEQ ID NO: 1739850 - DNA, 15 bp, Homo sapiens
aagatgatgctgcag

SEQ ID NO: 1739851 - DNA, 15 bp, Homo sapiens
agatgatgctgcagt

SEQ ID NO: 1739852 - DNA, 15 bp, Homo sapiens
gatgatgctgcagtt

SEQ ID NO: 1739853 - DNA, 15 bp, Homo sapiens
atgatgctgcagttg

SEQ ID NO: 1739854 - DNA, 15 bp, Homo sapiens
tgatgctgcagttgg

SEQ ID NO: 1739855 - DNA, 15 bp, Homo sapiens
gatgctgcagttggg

SEQ ID NO: 1739856 - DNA, 15 bp, Homo sapiens
atgctgcagttgggg

SEQ ID NO: 1739857 - DNA, 15 bp, Homo sapiens
tgctgcagttggggc

SEQ ID NO: 1739858 - DNA, 15 bp, Homo sapiens
gctgcagttggggcc

SEQ ID NO: 1739859 - DNA, 15 bp, Homo sapiens
ctgcagttggggcca

SEQ ID NO: 1739860 - DNA, 15 bp, Homo sapiens
tgcagttggggccag

SEQ ID NO: 1739861 - DNA, 15 bp, Homo sapiens
gcagttggggccaga

SEQ ID NO: 1739862 - DNA, 15 bp, Homo sapiens
cagttggggccagat

SEQ ID NO: 1739863 - DNA, 15 bp, Homo sapiens
agttggggccagatg

SEQ ID NO: 1739864 - DNA, 15 bp, Homo sapiens
gttggggccagatgc

SEQ ID NO: 1739865 - DNA, 15 bp, Homo sapiens
ttggggccagatgcc

SEQ ID NO: 1739866 - DNA, 15 bp, Homo sapiens
tggggccagatgcct

SEQ ID NO: 1739867 - DNA, 15 bp, Homo sapiens
ggggccagatgcctg

SEQ ID NO: 1739868 - DNA, 15 bp, Homo sapiens
gggccagatgcctgg

SEQ ID NO: 1739869 - DNA, 15 bp, Homo sapiens
ggccagatgcctggt

SEQ ID NO: 1739870 - DNA, 15 bp, Homo sapiens
gccagatgcctggta

SEQ ID NO: 1739871 - DNA, 15 bp, Homo sapiens
ccagatgcctggtaa

SEQ ID NO: 1739872 - DNA, 15 bp, Homo sapiens
cagatgcctggtaat

SEQ ID NO: 1739873 - DNA, 15 bp, Homo sapiens
agatgcctggtaatt

SEQ ID NO: 1739874 - DNA, 15 bp, Homo sapiens
gatgcctggtaattg

SEQ ID NO: 1739875 - DNA, 15 bp, Homo sapiens
atgcctggtaattga

SEQ ID NO: 1739876 - DNA, 15 bp, Homo sapiens
tgcctggtaattgat

SEQ ID NO: 1739877 - DNA, 15 bp, Homo sapiens
gcctggtaattgatc

SEQ ID NO: 1739878 - DNA, 15 bp, Homo sapiens
cctggtaattgatcc

SEQ ID NO: 1739879 - DNA, 15 bp, Homo sapiens
ctggtaattgatcct

SEQ ID NO: 1739880 - DNA, 15 bp, Homo sapiens
tggtaattgatcctg

SEQ ID NO: 1739881 - DNA, 15 bp, Homo sapiens
ggtaattgatcctga

SEQ ID NO: 1739882 - DNA, 15 bp, Homo sapiens
gtaattgatcctgac

SEQ ID NO: 1739883 - DNA, 15 bp, Homo sapiens
taattgatcctgaca

SEQ ID NO: 1739884 - DNA, 15 bp, Homo sapiens
aattgatcctgacag

SEQ ID NO: 1739885 - DNA, 15 bp, Homo sapiens
attgatcctgacagt

SEQ ID NO: 1739886 - DNA, 15 bp, Homo sapiens
ttgatcctgacagta

SEQ ID NO: 1739887 - DNA, 15 bp, Homo sapiens
tgatcctgacagtag

SEQ ID NO: 1739888 - DNA, 15 bp, Homo sapiens
gatcctgacagtagt

SEQ ID NO: 1739889 - DNA, 15 bp, Homo sapiens
atcctgacagtagtt

SEQ ID NO: 1739890 - DNA, 15 bp, Homo sapiens
tcctgacagtagttt

SEQ ID NO: 1739891 - DNA, 15 bp, Homo sapiens
cctgacagtagtttg

SEQ ID NO: 1739892 - DNA, 15 bp, Homo sapiens
ctgacagtagtttga

SEQ ID NO: 1739893 - DNA, 15 bp, Homo sapiens
tgacagtagtttgag

SEQ ID NO: 1739894 - DNA, 15 bp, Homo sapiens
gacagtagtttgagt

SEQ ID NO: 1739895 - DNA, 15 bp, Homo sapiens
acagtagtttgagtt

SEQ ID NO: 1739896 - DNA, 15 bp, Homo sapiens
cagtagtttgagttt

SEQ ID NO: 1739897 - DNA, 15 bp, Homo sapiens
agtagtttgagtttt

SEQ ID NO: 1739898 - DNA, 15 bp, Homo sapiens
gtagtttgagtttta

SEQ ID NO: 1739899 - DNA, 15 bp, Homo sapiens
tagtttgagttttaa

SEQ ID NO: 1739900 - DNA, 15 bp, Homo sapiens
agtttgagttttaaa

SEQ ID NO: 1739901 - DNA, 15 bp, Homo sapiens
gtttgagttttaaat

SEQ ID NO: 1739902 - DNA, 15 bp, Homo sapiens
tttgagttttaaata

SEQ ID NO: 1739903 - DNA, 15 bp, Homo sapiens
ttgagttttaaataa

SEQ ID NO: 1739904 - DNA, 15 bp, Homo sapiens
tgagttttaaataag

SEQ ID NO: 1739905 - DNA, 15 bp, Homo sapiens
gagttttaaataagt

SEQ ID NO: 1739906 - DNA, 15 bp, Homo sapiens
agttttaaataagtt

SEQ ID NO: 1739907 - DNA, 15 bp, Homo sapiens
gttttaaataagttt

SEQ ID NO: 1739908 - DNA, 15 bp, Homo sapiens
ttttaaataagtttc

SEQ ID NO: 1739909 - DNA, 15 bp, Homo sapiens
tttaaataagtttca

SEQ ID NO: 1739910 - DNA, 15 bp, Homo sapiens
ttaaataagtttcaa

SEQ ID NO: 1739911 - DNA, 15 bp, Homo sapiens
taaataagtttcaac

SEQ ID NO: 1739912 - DNA, 15 bp, Homo sapiens
aaataagtttcaacc

SEQ ID NO: 1739913 - DNA, 15 bp, Homo sapiens
aataagtttcaacct

SEQ ID NO: 1739914 - DNA, 15 bp, Homo sapiens
ataagtttcaacctt

SEQ ID NO: 1739915 - DNA, 15 bp, Homo sapiens
taagtttcaacctta

SEQ ID NO: 1739916 - DNA, 15 bp, Homo sapiens
aagtttcaaccttat

SEQ ID NO: 1739917 - DNA, 15 bp, Homo sapiens
agtttcaaccttatc

SEQ ID NO: 1739918 - DNA, 15 bp, Homo sapiens
gtttcaaccttatct

SEQ ID NO: 1739919 - DNA, 15 bp, Homo sapiens
tttcaaccttatctt

SEQ ID NO: 1739920 - DNA, 15 bp, Homo sapiens
ttcaaccttatcttt

SEQ ID NO: 1739921 - DNA, 15 bp, Homo sapiens
tcaaccttatctttc

SEQ ID NO: 1739922 - DNA, 15 bp, Homo sapiens
caaccttatctttct

SEQ ID NO: 1739923 - DNA, 15 bp, Homo sapiens
aaccttatctttctt

SEQ ID NO: 1739924 - DNA, 15 bp, Homo sapiens
accttatctttcttt

SEQ ID NO: 1739925 - DNA, 15 bp, Homo sapiens
ccttatctttctttg

SEQ ID NO: 1739926 - DNA, 15 bp, Homo sapiens
cttatctttctttgg

SEQ ID NO: 1739927 - DNA, 15 bp, Homo sapiens
ttatctttctttgga

SEQ ID NO: 1739928 - DNA, 15 bp, Homo sapiens
tatctttctttggaa

SEQ ID NO: 1739929 - DNA, 15 bp, Homo sapiens
atctttctttggaaa

SEQ ID NO: 1739930 - DNA, 15 bp, Homo sapiens
tctttctttggaaaa

SEQ ID NO: 1739931 - DNA, 15 bp, Homo sapiens
ctttctttggaaaaa

SEQ ID NO: 1739932 - DNA, 15 bp, Homo sapiens
tttctttggaaaaag

SEQ ID NO: 1739933 - DNA, 15 bp, Homo sapiens
ttctttggaaaaaga

SEQ ID NO: 1739934 - DNA, 15 bp, Homo sapiens
tctttggaaaaagat

SEQ ID NO: 1739935 - DNA, 15 bp, Homo sapiens
ctttggaaaaagata

SEQ ID NO: 1739936 - DNA, 15 bp, Homo sapiens
tttggaaaaagataa

SEQ ID NO: 1739937 - DNA, 15 bp, Homo sapiens
ttggaaaaagataag

SEQ ID NO: 1739938 - DNA, 15 bp, Homo sapiens
tggaaaaagataagg

SEQ ID NO: 1739939 - DNA, 15 bp, Homo sapiens
ggaaaaagataagga

SEQ ID NO: 1739940 - DNA, 15 bp, Homo sapiens
gaaaaagataaggag

SEQ ID NO: 1739941 - DNA, 15 bp, Homo sapiens
aaaaagataaggagg

SEQ ID NO: 1739942 - DNA, 15 bp, Homo sapiens
aaaagataaggagga

SEQ ID NO: 1739943 - DNA, 15 bp, Homo sapiens
aaagataaggaggat

SEQ ID NO: 1739944 - DNA, 15 bp, Homo sapiens
aagataaggaggata

SEQ ID NO: 1739945 - DNA, 15 bp, Homo sapiens
agataaggaggatac

SEQ ID NO: 1739946 - DNA, 15 bp, Homo sapiens
gataaggaggataca

SEQ ID NO: 1739947 - DNA, 15 bp, Homo sapiens
ataaggaggatacac

SEQ ID NO: 1739948 - DNA, 15 bp, Homo sapiens
taaggaggatacaca

SEQ ID NO: 1739949 - DNA, 15 bp, Homo sapiens
aaggaggatacacag

SEQ ID NO: 1739950 - DNA, 15 bp, Homo sapiens
aggaggatacacagc

SEQ ID NO: 1739951 - DNA, 15 bp, Homo sapiens
ggaggatacacagca

SEQ ID NO: 1739952 - DNA, 15 bp, Homo sapiens
gaggatacacagcac

SEQ ID NO: 1739953 - DNA, 15 bp, Homo sapiens
aggatacacagcacc

SEQ ID NO: 1739954 - DNA, 15 bp, Homo sapiens
ggatacacagcacca

SEQ ID NO: 1739955 - DNA, 15 bp, Homo sapiens
gatacacagcaccac

SEQ ID NO: 1739956 - DNA, 15 bp, Homo sapiens
atacacagcaccacg

SEQ ID NO: 1739957 - DNA, 15 bp, Homo sapiens
tacacagcaccacga

SEQ ID NO: 1739958 - DNA, 15 bp, Homo sapiens
acacagcaccacgaa

SEQ ID NO: 1739959 - DNA, 15 bp, Homo sapiens
cacagcaccacgaaa

SEQ ID NO: 1739960 - DNA, 15 bp, Homo sapiens
acagcaccacgaaaa

SEQ ID NO: 1739961 - DNA, 15 bp, Homo sapiens
cagcaccacgaaaac

SEQ ID NO: 1739962 - DNA, 15 bp, Homo sapiens
agcaccacgaaaaca

SEQ ID NO: 1739963 - DNA, 15 bp, Homo sapiens
gcaccacgaaaacac

SEQ ID NO: 1739964 - DNA, 15 bp, Homo sapiens
caccacgaaaacacg

SEQ ID NO: 1739965 - DNA, 15 bp, Homo sapiens
accacgaaaacacga

SEQ ID NO: 1739966 - DNA, 15 bp, Homo sapiens
ccacgaaaacacgaa

SEQ ID NO: 1739967 - DNA, 15 bp, Homo sapiens
cacgaaaacacgaaa

SEQ ID NO: 1739968 - DNA, 15 bp, Homo sapiens
acgaaaacacgaaaa

SEQ ID NO: 1739969 - DNA, 15 bp, Homo sapiens
cgaaaacacgaaaac

SEQ ID NO: 1739970 - DNA, 15 bp, Homo sapiens
gaaaacacgaaaaca

SEQ ID NO: 1739971 - DNA, 15 bp, Homo sapiens
aaaacacgaaaacac

SEQ ID NO: 1739972 - DNA, 15 bp, Homo sapiens
aaacacgaaaacacg

SEQ ID NO: 1739973 - DNA, 15 bp, Homo sapiens
aacacgaaaacacga

SEQ ID NO: 1739974 - DNA, 15 bp, Homo sapiens
acacgaaaacacgac

SEQ ID NO: 1739975 - DNA, 15 bp, Homo sapiens
cacgaaaacacgacc

SEQ ID NO: 1739976 - DNA, 15 bp, Homo sapiens
acgaaaacacgaccc

SEQ ID NO: 1739977 - DNA, 15 bp, Homo sapiens
cgaaaacacgacccc

SEQ ID NO: 1739978 - DNA, 15 bp, Homo sapiens
gaaaacacgacccct

SEQ ID NO: 1739979 - DNA, 15 bp, Homo sapiens
aaaacacgacccctg

SEQ ID NO: 1739980 - DNA, 15 bp, Homo sapiens
aaacacgacccctgg

SEQ ID NO: 1739981 - DNA, 15 bp, Homo sapiens
aacacgacccctggg

SEQ ID NO: 1739982 - DNA, 15 bp, Homo sapiens
acacgacccctgggc

SEQ ID NO: 1739983 - DNA, 15 bp, Homo sapiens
cacgacccctgggct

SEQ ID NO: 1739984 - DNA, 15 bp, Homo sapiens
acgacccctgggcta

SEQ ID NO: 1739985 - DNA, 15 bp, Homo sapiens
cgacccctgggctat

SEQ ID NO: 1739986 - DNA, 15 bp, Homo sapiens
gacccctgggctatt

SEQ ID NO: 1739987 - DNA, 15 bp, Homo sapiens
acccctgggctattt

SEQ ID NO: 1739988 - DNA, 15 bp, Homo sapiens
cccctgggctattta

SEQ ID NO: 1739989 - DNA, 15 bp, Homo sapiens
ccctgggctatttac

SEQ ID NO: 1739990 - DNA, 15 bp, Homo sapiens
cctgggctatttaca

SEQ ID NO: 1739991 - DNA, 15 bp, Homo sapiens
ctgggctatttacac

SEQ ID NO: 1739992 - DNA, 15 bp, Homo sapiens
tgggctatttacaca

SEQ ID NO: 1739993 - DNA, 15 bp, Homo sapiens
gggctatttacacat

SEQ ID NO: 1739994 - DNA, 15 bp, Homo sapiens
ggctatttacacatg

SEQ ID NO: 1739995 - DNA, 15 bp, Homo sapiens
gctatttacacatgg

SEQ ID NO: 1739996 - DNA, 15 bp, Homo sapiens
ctatttacacatggc

SEQ ID NO: 1739997 - DNA, 15 bp, Homo sapiens
tatttacacatggca

SEQ ID NO: 1739998 - DNA, 15 bp, Homo sapiens
atttacacatggcaa

SEQ ID NO: 1739999 - DNA, 15 bp, Homo sapiens
tttacacatggcaaa

SEQ ID NO: 1740000 - DNA, 15 bp, Homo sapiens
ttacacatggcaaag

SEQ ID NO: 1740001 - DNA, 15 bp, Homo sapiens
tacacatggcaaagg

SEQ ID NO: 1740002 - DNA, 15 bp, Homo sapiens
acacatggcaaagga

SEQ ID NO: 1740003 - DNA, 15 bp, Homo sapiens
cacatggcaaaggaa

SEQ ID NO: 1740004 - DNA, 15 bp, Homo sapiens
acatggcaaaggaac

SEQ ID NO: 1740005 - DNA, 15 bp, Homo sapiens
catggcaaaggaaca

SEQ ID NO: 1740006 - DNA, 15 bp, Homo sapiens
atggcaaaggaacaa

SEQ ID NO: 1740007 - DNA, 15 bp, Homo sapiens
tggcaaaggaacaaa

SEQ ID NO: 1740008 - DNA, 15 bp, Homo sapiens
ggcaaaggaacaaag

SEQ ID NO: 1740009 - DNA, 15 bp, Homo sapiens
gcaaaggaacaaaga

SEQ ID NO: 1740010 - DNA, 15 bp, Homo sapiens
caaaggaacaaagag

SEQ ID NO: 1740011 - DNA, 15 bp, Homo sapiens
aaaggaacaaagaga

SEQ ID NO: 1740012 - DNA, 15 bp, Homo sapiens
aaggaacaaagagac

SEQ ID NO: 1740013 - DNA, 15 bp, Homo sapiens
aggaacaaagagacc

SEQ ID NO: 1740014 - DNA, 15 bp, Homo sapiens
ggaacaaagagacca

SEQ ID NO: 1740015 - DNA, 15 bp, Homo sapiens
gaacaaagagaccaa

SEQ ID NO: 1740016 - DNA, 15 bp, Homo sapiens
aacaaagagaccaat

SEQ ID NO: 1740017 - DNA, 15 bp, Homo sapiens
acaaagagaccaatt

SEQ ID NO: 1740018 - DNA, 15 bp, Homo sapiens
caaagagaccaattt

SEQ ID NO: 1740019 - DNA, 15 bp, Homo sapiens
aaagagaccaatttc

SEQ ID NO: 1740020 - DNA, 15 bp, Homo sapiens
aagagaccaatttct

SEQ ID NO: 1740021 - DNA, 15 bp, Homo sapiens
agagaccaatttctc

SEQ ID NO: 1740022 - DNA, 15 bp, Homo sapiens
gagaccaatttctct

SEQ ID NO: 1740023 - DNA, 15 bp, Homo sapiens
agaccaatttctctc

SEQ ID NO: 1740024 - DNA, 15 bp, Homo sapiens
gaccaatttctctcc

SEQ ID NO: 1740025 - DNA, 15 bp, Homo sapiens
accaatttctctcct

SEQ ID NO: 1740026 - DNA, 15 bp, Homo sapiens
ccaatttctctccta

SEQ ID NO: 1740027 - DNA, 15 bp, Homo sapiens
caatttctctcctag

SEQ ID NO: 1740028 - DNA, 15 bp, Homo sapiens
aatttctctcctagg

SEQ ID NO: 1740029 - DNA, 15 bp, Homo sapiens
atttctctcctagga

SEQ ID NO: 1740030 - DNA, 15 bp, Homo sapiens
tttctctcctaggac

SEQ ID NO: 1740031 - DNA, 15 bp, Homo sapiens
ttctctcctaggacc

SEQ ID NO: 1740032 - DNA, 15 bp, Homo sapiens
tctctcctaggacca

SEQ ID NO: 1740033 - DNA, 15 bp, Homo sapiens
ctctcctaggaccat

SEQ ID NO: 1740034 - DNA, 15 bp, Homo sapiens
tctcctaggaccatg

SEQ ID NO: 1740035 - DNA, 15 bp, Homo sapiens
ctcctaggaccatgg

SEQ ID NO: 1740036 - DNA, 15 bp, Homo sapiens
tcctaggaccatgga

SEQ ID NO: 1740037 - DNA, 15 bp, Homo sapiens
cctaggaccatggaa

SEQ ID NO: 1740038 - DNA, 15 bp, Homo sapiens
ctaggaccatggaaa

SEQ ID NO: 1740039 - DNA, 15 bp, Homo sapiens
taggaccatggaaaa

SEQ ID NO: 1740040 - DNA, 15 bp, Homo sapiens
aggaccatggaaaat

SEQ ID NO: 1740041 - DNA, 15 bp, Homo sapiens
ggaccatggaaaatg

SEQ ID NO: 1740042 - DNA, 15 bp, Homo sapiens
gaccatggaaaatga

SEQ ID NO: 1740043 - DNA, 15 bp, Homo sapiens
accatggaaaatgag

SEQ ID NO: 1740044 - DNA, 15 bp, Homo sapiens
ccatggaaaatgaga

SEQ ID NO: 1740045 - DNA, 15 bp, Homo sapiens
catggaaaatgagaa

SEQ ID NO: 1740046 - DNA, 15 bp, Homo sapiens
atggaaaatgagaaa

SEQ ID NO: 1740047 - DNA, 15 bp, Homo sapiens
tggaaaatgagaaat

SEQ ID NO: 1740048 - DNA, 15 bp, Homo sapiens
ggaaaatgagaaata

SEQ ID NO: 1740049 - DNA, 15 bp, Homo sapiens
gaaaatgagaaatat

SEQ ID NO: 1740050 - DNA, 15 bp, Homo sapiens
aaaatgagaaatatg

SEQ ID NO: 1740051 - DNA, 15 bp, Homo sapiens
aaatgagaaatatgt

SEQ ID NO: 1740052 - DNA, 15 bp, Homo sapiens
aatgagaaatatgta

SEQ ID NO: 1740053 - DNA, 15 bp, Homo sapiens
atgagaaatatgtac

SEQ ID NO: 1740054 - DNA, 15 bp, Homo sapiens
tgagaaatatgtacc

SEQ ID NO: 1740055 - DNA, 15 bp, Homo sapiens
gagaaatatgtaccc

SEQ ID NO: 1740056 - DNA, 15 bp, Homo sapiens
agaaatatgtaccct

SEQ ID NO: 1740057 - DNA, 15 bp, Homo sapiens
gaaatatgtaccctg

SEQ ID NO: 1740058 - DNA, 15 bp, Homo sapiens
aaatatgtaccctga

SEQ ID NO: 1740059 - DNA, 15 bp, Homo sapiens
aatatgtaccctgat

SEQ ID NO: 1740060 - DNA, 15 bp, Homo sapiens
atatgtaccctgatg

SEQ ID NO: 1740061 - DNA, 15 bp, Homo sapiens
tatgtaccctgatgt

SEQ ID NO: 1740062 - DNA, 15 bp, Homo sapiens
atgtaccctgatgtg

SEQ ID NO: 1740063 - DNA, 15 bp, Homo sapiens
tgtaccctgatgtgt

SEQ ID NO: 1740064 - DNA, 15 bp, Homo sapiens
gtaccctgatgtgtt

SEQ ID NO: 1740065 - DNA, 15 bp, Homo sapiens
taccctgatgtgttt

SEQ ID NO: 1740066 - DNA, 15 bp, Homo sapiens
accctgatgtgtttt

SEQ ID NO: 1740067 - DNA, 15 bp, Homo sapiens
ccctgatgtgttttc

SEQ ID NO: 1740068 - DNA, 15 bp, Homo sapiens
cctgatgtgttttct

SEQ ID NO: 1740069 - DNA, 15 bp, Homo sapiens
ctgatgtgttttctc

SEQ ID NO: 1740070 - DNA, 15 bp, Homo sapiens
tgatgtgttttctca

SEQ ID NO: 1740071 - DNA, 15 bp, Homo sapiens
gatgtgttttctcaa

SEQ ID NO: 1740072 - DNA, 15 bp, Homo sapiens
atgtgttttctcaac

SEQ ID NO: 1740073 - DNA, 15 bp, Homo sapiens
tgtgttttctcaaca

SEQ ID NO: 1740074 - DNA, 15 bp, Homo sapiens
gtgttttctcaacaa

SEQ ID NO: 1740075 - DNA, 15 bp, Homo sapiens
tgttttctcaacaat

SEQ ID NO: 1740076 - DNA, 15 bp, Homo sapiens
gttttctcaacaatg

SEQ ID NO: 1740077 - DNA, 15 bp, Homo sapiens
ttttctcaacaatgc

SEQ ID NO: 1740078 - DNA, 15 bp, Homo sapiens
tttctcaacaatgct

SEQ ID NO: 1740079 - DNA, 15 bp, Homo sapiens
ttctcaacaatgctg

SEQ ID NO: 1740080 - DNA, 15 bp, Homo sapiens
tctcaacaatgctgt

SEQ ID NO: 1740081 - DNA, 15 bp, Homo sapiens
ctcaacaatgctgtg

SEQ ID NO: 1740082 - DNA, 15 bp, Homo sapiens
tcaacaatgctgtgg

SEQ ID NO: 1740083 - DNA, 15 bp, Homo sapiens
caacaatgctgtggt

SEQ ID NO: 1740084 - DNA, 15 bp, Homo sapiens
aacaatgctgtggtg

SEQ ID NO: 1740085 - DNA, 15 bp, Homo sapiens
acaatgctgtggtga

SEQ ID NO: 1740086 - DNA, 15 bp, Homo sapiens
caatgctgtggtgat

SEQ ID NO: 1740087 - DNA, 15 bp, Homo sapiens
aatgctgtggtgata

SEQ ID NO: 1740088 - DNA, 15 bp, Homo sapiens
atgctgtggtgatat

SEQ ID NO: 1740089 - DNA, 15 bp, Homo sapiens
tgctgtggtgatatt

SEQ ID NO: 1740090 - DNA, 15 bp, Homo sapiens
gctgtggtgatattt

SEQ ID NO: 1740091 - DNA, 15 bp, Homo sapiens
ctgtggtgatatttt

SEQ ID NO: 1740092 - DNA, 15 bp, Homo sapiens
tgtggtgatatttta

SEQ ID NO: 1740093 - DNA, 15 bp, Homo sapiens
gtggtgatattttat

SEQ ID NO: 1740094 - DNA, 15 bp, Homo sapiens
tggtgatattttatc

SEQ ID NO: 1740095 - DNA, 15 bp, Homo sapiens
ggtgatattttatcc

SEQ ID NO: 1740096 - DNA, 15 bp, Homo sapiens
gtgatattttatcct

SEQ ID NO: 1740097 - DNA, 15 bp, Homo sapiens
tgatattttatccta

SEQ ID NO: 1740098 - DNA, 15 bp, Homo sapiens
gatattttatcctat

SEQ ID NO: 1740099 - DNA, 15 bp, Homo sapiens
atattttatcctatt

SEQ ID NO: 1740100 - DNA, 15 bp, Homo sapiens
tattttatcctatta

SEQ ID NO: 1740101 - DNA, 15 bp, Homo sapiens
attttatcctattat

SEQ ID NO: 1740102 - DNA, 15 bp, Homo sapiens
ttttatcctattatt

SEQ ID NO: 1740103 - DNA, 15 bp, Homo sapiens
tttatcctattattt

SEQ ID NO: 1740104 - DNA, 15 bp, Homo sapiens
ttatcctattatttt

SEQ ID NO: 1740105 - DNA, 15 bp, Homo sapiens
tatcctattattttg

SEQ ID NO: 1740106 - DNA, 15 bp, Homo sapiens
atcctattattttgt

SEQ ID NO: 1740107 - DNA, 15 bp, Homo sapiens
tcctattattttgtg

SEQ ID NO: 1740108 - DNA, 15 bp, Homo sapiens
cctattattttgtga

SEQ ID NO: 1740109 - DNA, 15 bp, Homo sapiens
ctattattttgtgaa

SEQ ID NO: 1740110 - DNA, 15 bp, Homo sapiens
tattattttgtgaat

SEQ ID NO: 1740111 - DNA, 15 bp, Homo sapiens
attattttgtgaatg

SEQ ID NO: 1740112 - DNA, 15 bp, Homo sapiens
ttattttgtgaatgc

SEQ ID NO: 1740113 - DNA, 15 bp, Homo sapiens
tattttgtgaatgca

SEQ ID NO: 1740114 - DNA, 15 bp, Homo sapiens
attttgtgaatgcag

SEQ ID NO: 1740115 - DNA, 15 bp, Homo sapiens
ttttgtgaatgcagt

SEQ ID NO: 1740116 - DNA, 15 bp, Homo sapiens
tttgtgaatgcagta

SEQ ID NO: 1740117 - DNA, 15 bp, Homo sapiens
ttgtgaatgcagtag

SEQ ID NO: 1740118 - DNA, 15 bp, Homo sapiens
tgtgaatgcagtaga

SEQ ID NO: 1740119 - DNA, 15 bp, Homo sapiens
gtgaatgcagtagat

SEQ ID NO: 1740120 - DNA, 15 bp, Homo sapiens
tgaatgcagtagatg

SEQ ID NO: 1740121 - DNA, 15 bp, Homo sapiens
gaatgcagtagatgt

SEQ ID NO: 1740122 - DNA, 15 bp, Homo sapiens
aatgcagtagatgta

SEQ ID NO: 1740123 - DNA, 15 bp, Homo sapiens
atgcagtagatgtag

SEQ ID NO: 1740124 - DNA, 15 bp, Homo sapiens
tgcagtagatgtagg

SEQ ID NO: 1740125 - DNA, 15 bp, Homo sapiens
gcagtagatgtaggc

SEQ ID NO: 1740126 - DNA, 15 bp, Homo sapiens
cagtagatgtaggct

SEQ ID NO: 1740127 - DNA, 15 bp, Homo sapiens
agtagatgtaggctg

SEQ ID NO: 1740128 - DNA, 15 bp, Homo sapiens
gtagatgtaggctgt

SEQ ID NO: 1740129 - DNA, 15 bp, Homo sapiens
tagatgtaggctgtt

SEQ ID NO: 1740130 - DNA, 15 bp, Homo sapiens
agatgtaggctgttt

SEQ ID NO: 1740131 - DNA, 15 bp, Homo sapiens
gatgtaggctgtttc

SEQ ID NO: 1740132 - DNA, 15 bp, Homo sapiens
atgtaggctgtttct

SEQ ID NO: 1740133 - DNA, 15 bp, Homo sapiens
tgtaggctgtttctt

SEQ ID NO: 1740134 - DNA, 15 bp, Homo sapiens
gtaggctgtttctta

SEQ ID NO: 1740135 - DNA, 15 bp, Homo sapiens
taggctgtttcttat

SEQ ID NO: 1740136 - DNA, 15 bp, Homo sapiens
aggctgtttcttatt

SEQ ID NO: 1740137 - DNA, 15 bp, Homo sapiens
ggctgtttcttattt

SEQ ID NO: 1740138 - DNA, 15 bp, Homo sapiens
gctgtttcttatttt

SEQ ID NO: 1740139 - DNA, 15 bp, Homo sapiens
ctgtttcttattttt

SEQ ID NO: 1740140 - DNA, 15 bp, Homo sapiens
tgtttcttatttttt

SEQ ID NO: 1740141 - DNA, 15 bp, Homo sapiens
gtttcttattttttc

SEQ ID NO: 1740142 - DNA, 15 bp, Homo sapiens
tttcttattttttca

SEQ ID NO: 1740143 - DNA, 15 bp, Homo sapiens
ttcttattttttcat

SEQ ID NO: 1740144 - DNA, 15 bp, Homo sapiens
tcttattttttcatt

SEQ ID NO: 1740145 - DNA, 15 bp, Homo sapiens
cttattttttcattt

SEQ ID NO: 1740146 - DNA, 15 bp, Homo sapiens
ttattttttcatttg

SEQ ID NO: 1740147 - DNA, 15 bp, Homo sapiens
tattttttcatttgt

SEQ ID NO: 1740148 - DNA, 15 bp, Homo sapiens
attttttcatttgtc

SEQ ID NO: 1740149 - DNA, 15 bp, Homo sapiens
ttttttcatttgtct

SEQ ID NO: 1740150 - DNA, 15 bp, Homo sapiens
tttttcatttgtctt

SEQ ID NO: 1740151 - DNA, 15 bp, Homo sapiens
ttttcatttgtcttt

SEQ ID NO: 1740152 - DNA, 15 bp, Homo sapiens
tttcatttgtctttt

SEQ ID NO: 1740153 - DNA, 15 bp, Homo sapiens
ttcatttgtcttttc

SEQ ID NO: 1740154 - DNA, 15 bp, Homo sapiens
tcatttgtcttttct

SEQ ID NO: 1740155 - DNA, 15 bp, Homo sapiens
catttgtcttttcta

SEQ ID NO: 1740156 - DNA, 15 bp, Homo sapiens
atttgtcttttctaa

SEQ ID NO: 1740157 - DNA, 15 bp, Homo sapiens
tttgtcttttctaaa

SEQ ID NO: 1740158 - DNA, 15 bp, Homo sapiens
ttgtcttttctaaaa

SEQ ID NO: 1740159 - DNA, 15 bp, Homo sapiens
tgtcttttctaaaaa

SEQ ID NO: 1740160 - DNA, 15 bp, Homo sapiens
gtcttttctaaaaaa

SEQ ID NO: 1740161 - DNA, 15 bp, Homo sapiens
tcttttctaaaaaat

SEQ ID NO: 1740162 - DNA, 15 bp, Homo sapiens
cttttctaaaaaata

SEQ ID NO: 1740163 - DNA, 15 bp, Homo sapiens
ttttctaaaaaataa

SEQ ID NO: 1740164 - DNA, 15 bp, Homo sapiens
tttctaaaaaataaa

SEQ ID NO: 1740165 - DNA, 15 bp, Homo sapiens
ttctaaaaaataaaa

SEQ ID NO: 1740166 - DNA, 15 bp, Homo sapiens
tctaaaaaataaaaa

SEQ ID NO: 1740167 - DNA, 15 bp, Homo sapiens
taaaaaataaaaata

SEQ ID NO: 1740168 - DNA, 15 bp, Homo sapiens
aaaaataaaaataag

SEQ ID NO: 1740169 - DNA, 15 bp, Homo sapiens
aaaataaaaataagt

SEQ ID NO: 1740170 - DNA, 15 bp, Homo sapiens
aaataaaaataagtc

SEQ ID NO: 1740171 - DNA, 15 bp, Homo sapiens
aataaaaataagtca

SEQ ID NO: 1740172 - DNA, 15 bp, Homo sapiens
ataaaaataagtcat

SEQ ID NO: 1740173 - DNA, 15 bp, Homo sapiens
taaaaataagtcatt

SEQ ID NO: 1740174 - DNA, 15 bp, Homo sapiens
aaaaataagtcattg

SEQ ID NO: 1740175 - DNA, 15 bp, Homo sapiens
aaataagtcattgtc

SEQ ID NO: 1740176 - DNA, 15 bp, Homo sapiens
aataagtcattgtca

SEQ ID NO: 1740177 - DNA, 15 bp, Homo sapiens
ataagtcattgtcac

SEQ ID NO: 1740178 - DNA, 15 bp, Homo sapiens
taagtcattgtcaca

SEQ ID NO: 1740179 - DNA, 15 bp, Homo sapiens
aagtcattgtcacat

SEQ ID NO: 1740180 - DNA, 15 bp, Homo sapiens
agtcattgtcacatg

SEQ ID NO: 1740181 - DNA, 15 bp, Homo sapiens
gtcattgtcacatga

SEQ ID NO: 1740182 - DNA, 15 bp, Homo sapiens
tcattgtcacatgaa

SEQ ID NO: 1740183 - DNA, 15 bp, Homo sapiens
cattgtcacatgaat

SEQ ID NO: 1740184 - DNA, 15 bp, Homo sapiens
attgtcacatgaata

SEQ ID NO: 1740185 - DNA, 15 bp, Homo sapiens
ttgtcacatgaataa

SEQ ID NO: 1740186 - DNA, 15 bp, Homo sapiens
tgtcacatgaataaa

SEQ ID NO: 1740187 - DNA, 15 bp, Homo sapiens
gtcacatgaataaat

SEQ ID NO: 1740188 - DNA, 15 bp, Homo sapiens
tcacatgaataaatc

SEQ ID NO: 1740189 - DNA, 15 bp, Homo sapiens
cacatgaataaatca

SEQ ID NO: 1740190 - DNA, 15 bp, Homo sapiens
acatgaataaatcag

SEQ ID NO: 1740191 - DNA, 15 bp, Homo sapiens
catgaataaatcagt

SEQ ID NO: 1740192 - DNA, 15 bp, Homo sapiens
atgaataaatcagta

SEQ ID NO: 1740193 - DNA, 15 bp, Homo sapiens
tgaataaatcagtat

SEQ ID NO: 1740194 - DNA, 15 bp, Homo sapiens
gaataaatcagtata

SEQ ID NO: 1740195 - DNA, 15 bp, Homo sapiens
aataaatcagtatag

SEQ ID NO: 1740196 - DNA, 15 bp, Homo sapiens
ataaatcagtatagt

SEQ ID NO: 1740197 - DNA, 15 bp, Homo sapiens
taaatcagtatagta

SEQ ID NO: 1740198 - DNA, 15 bp, Homo sapiens
aaatcagtatagtat

SEQ ID NO: 1740199 - DNA, 15 bp, Homo sapiens
aatcagtatagtata

SEQ ID NO: 1740200 - DNA, 15 bp, Homo sapiens
atcagtatagtatag

SEQ ID NO: 1740201 - DNA, 15 bp, Homo sapiens
tcagtatagtatagt

SEQ ID NO: 1740202 - DNA, 15 bp, Homo sapiens
cagtatagtatagtg

SEQ ID NO: 1740203 - DNA, 15 bp, Homo sapiens
agtatagtatagtgt

SEQ ID NO: 1740204 - DNA, 15 bp, Homo sapiens
gtatagtatagtgtt

SEQ ID NO: 1740205 - DNA, 15 bp, Homo sapiens
tatagtatagtgtta

SEQ ID NO: 1740206 - DNA, 15 bp, Homo sapiens
atagtatagtgttac

SEQ ID NO: 1740207 - DNA, 15 bp, Homo sapiens
tagtatagtgttacg

SEQ ID NO: 1740208 - DNA, 15 bp, Homo sapiens
agtatagtgttacga

SEQ ID NO: 1740209 - DNA, 15 bp, Homo sapiens
gtatagtgttacgag

SEQ ID NO: 1740210 - DNA, 15 bp, Homo sapiens
tatagtgttacgagc

SEQ ID NO: 1740211 - DNA, 15 bp, Homo sapiens
atagtgttacgagca

SEQ ID NO: 1740212 - DNA, 15 bp, Homo sapiens
tagtgttacgagcat

SEQ ID NO: 1740213 - DNA, 15 bp, Homo sapiens
agtgttacgagcata

SEQ ID NO: 1740214 - DNA, 15 bp, Homo sapiens
gtgttacgagcatag

SEQ ID NO: 1740215 - DNA, 15 bp, Homo sapiens
tgttacgagcatagg

SEQ ID NO: 1740216 - DNA, 15 bp, Homo sapiens
gttacgagcataggc

SEQ ID NO: 1740217 - DNA, 15 bp, Homo sapiens
ttacgagcataggcc

SEQ ID NO: 1740218 - DNA, 15 bp, Homo sapiens
tacgagcataggcca

SEQ ID NO: 1740219 - DNA, 15 bp, Homo sapiens
acgagcataggccaa

SEQ ID NO: 1740220 - DNA, 15 bp, Homo sapiens
cgagcataggccaaa

SEQ ID NO: 1740221 - DNA, 15 bp, Homo sapiens
gagcataggccaaat

SEQ ID NO: 1740222 - DNA, 15 bp, Homo sapiens
agcataggccaaatt

SEQ ID NO: 1740223 - DNA, 15 bp, Homo sapiens
gcataggccaaattg

SEQ ID NO: 1740224 - DNA, 15 bp, Homo sapiens
cataggccaaattgc

SEQ ID NO: 1740225 - DNA, 15 bp, Homo sapiens
ataggccaaattgcc

SEQ ID NO: 1740226 - DNA, 15 bp, Homo sapiens
taggccaaattgcct

SEQ ID NO: 1740227 - DNA, 15 bp, Homo sapiens
aggccaaattgcctg

SEQ ID NO: 1740228 - DNA, 15 bp, Homo sapiens
ggccaaattgcctgg

SEQ ID NO: 1740229 - DNA, 15 bp, Homo sapiens
gccaaattgcctggg

SEQ ID NO: 1740230 - DNA, 15 bp, Homo sapiens
ccaaattgcctgggc

SEQ ID NO: 1740231 - DNA, 15 bp, Homo sapiens
caaattgcctgggct

SEQ ID NO: 1740232 - DNA, 15 bp, Homo sapiens
aaattgcctgggctg

SEQ ID NO: 1740233 - DNA, 15 bp, Homo sapiens
aattgcctgggctga

SEQ ID NO: 1740234 - DNA, 15 bp, Homo sapiens
attgcctgggctgac

SEQ ID NO: 1740235 - DNA, 15 bp, Homo sapiens
ttgcctgggctgact

SEQ ID NO: 1740236 - DNA, 15 bp, Homo sapiens
tgcctgggctgactt

SEQ ID NO: 1740237 - DNA, 15 bp, Homo sapiens
gcctgggctgacttt

SEQ ID NO: 1740238 - DNA, 15 bp, Homo sapiens
cctgggctgactttc

SEQ ID NO: 1740239 - DNA, 15 bp, Homo sapiens
ctgggctgactttca

SEQ ID NO: 1740240 - DNA, 15 bp, Homo sapiens
tgggctgactttcag

SEQ ID NO: 1740241 - DNA, 15 bp, Homo sapiens
gggctgactttcagc

SEQ ID NO: 1740242 - DNA, 15 bp, Homo sapiens
ggctgactttcagct

SEQ ID NO: 1740243 - DNA, 15 bp, Homo sapiens
gctgactttcagctc

SEQ ID NO: 1740244 - DNA, 15 bp, Homo sapiens
ctgactttcagctct

SEQ ID NO: 1740245 - DNA, 15 bp, Homo sapiens
tgactttcagctctg

SEQ ID NO: 1740246 - DNA, 15 bp, Homo sapiens
gactttcagctctgc

SEQ ID NO: 1740247 - DNA, 15 bp, Homo sapiens
actttcagctctgcc

SEQ ID NO: 1740248 - DNA, 15 bp, Homo sapiens
ctttcagctctgcca

SEQ ID NO: 1740249 - DNA, 15 bp, Homo sapiens
tttcagctctgccac

SEQ ID NO: 1740250 - DNA, 15 bp, Homo sapiens
ttcagctctgccact

SEQ ID NO: 1740251 - DNA, 15 bp, Homo sapiens
tcagctctgccactt

SEQ ID NO: 1740252 - DNA, 15 bp, Homo sapiens
cagctctgccactta

SEQ ID NO: 1740253 - DNA, 15 bp, Homo sapiens
agctctgccacttac

SEQ ID NO: 1740254 - DNA, 15 bp, Homo sapiens
gctctgccacttact

SEQ ID NO: 1740255 - DNA, 15 bp, Homo sapiens
ctctgccacttacta

SEQ ID NO: 1740256 - DNA, 15 bp, Homo sapiens
tctgccacttactag

SEQ ID NO: 1740257 - DNA, 15 bp, Homo sapiens
ctgccacttactagc

SEQ ID NO: 1740258 - DNA, 15 bp, Homo sapiens
cacttactagctgta

SEQ ID NO: 1740259 - DNA, 15 bp, Homo sapiens
acttactagctgtat

SEQ ID NO: 1740260 - DNA, 15 bp, Homo sapiens
cttactagctgtatg

SEQ ID NO: 1740261 - DNA, 15 bp, Homo sapiens
ttactagctgtatga

SEQ ID NO: 1740262 - DNA, 15 bp, Homo sapiens
tactagctgtatgac

SEQ ID NO: 1740263 - DNA, 15 bp, Homo sapiens
actagctgtatgaca

SEQ ID NO: 1740264 - DNA, 15 bp, Homo sapiens
ctagctgtatgacat

SEQ ID NO: 1740265 - DNA, 15 bp, Homo sapiens
tagctgtatgacatt

SEQ ID NO: 1740266 - DNA, 15 bp, Homo sapiens
agctgtatgacattg

SEQ ID NO: 1740267 - DNA, 15 bp, Homo sapiens
gctgtatgacattga

SEQ ID NO: 1740268 - DNA, 15 bp, Homo sapiens
ctgtatgacattgag

SEQ ID NO: 1740269 - DNA, 15 bp, Homo sapiens
tgtatgacattgagt

SEQ ID NO: 1740270 - DNA, 15 bp, Homo sapiens
gtatgacattgagta

SEQ ID NO: 1740271 - DNA, 15 bp, Homo sapiens
tatgacattgagtaa

SEQ ID NO: 1740272 - DNA, 15 bp, Homo sapiens
atgacattgagtaag

SEQ ID NO: 1740273 - DNA, 15 bp, Homo sapiens
tgacattgagtaagt

SEQ ID NO: 1740274 - DNA, 15 bp, Homo sapiens
gacattgagtaagtt

SEQ ID NO: 1740275 - DNA, 15 bp, Homo sapiens
acattgagtaagtta

SEQ ID NO: 1740276 - DNA, 15 bp, Homo sapiens
cattgagtaagttac

SEQ ID NO: 1740277 - DNA, 15 bp, Homo sapiens
attgagtaagttact

SEQ ID NO: 1740278 - DNA, 15 bp, Homo sapiens
ttgagtaagttactt

SEQ ID NO: 1740279 - DNA, 15 bp, Homo sapiens
tgagtaagttacttt

SEQ ID NO: 1740280 - DNA, 15 bp, Homo sapiens
gagtaagttacttta

SEQ ID NO: 1740281 - DNA, 15 bp, Homo sapiens
agtaagttactttat

SEQ ID NO: 1740282 - DNA, 15 bp, Homo sapiens
gtaagttactttatt

SEQ ID NO: 1740283 - DNA, 15 bp, Homo sapiens
taagttactttattt

SEQ ID NO: 1740284 - DNA, 15 bp, Homo sapiens
aagttactttattta

SEQ ID NO: 1740285 - DNA, 15 bp, Homo sapiens
agttactttatttat

SEQ ID NO: 1740286 - DNA, 15 bp, Homo sapiens
gttactttatttatc

SEQ ID NO: 1740287 - DNA, 15 bp, Homo sapiens
ttactttatttatct

SEQ ID NO: 1740288 - DNA, 15 bp, Homo sapiens
tactttatttatctg

SEQ ID NO: 1740289 - DNA, 15 bp, Homo sapiens
actttatttatctgt

SEQ ID NO: 1740290 - DNA, 15 bp, Homo sapiens
ctttatttatctgtg

SEQ ID NO: 1740291 - DNA, 15 bp, Homo sapiens
tttatttatctgtgc

SEQ ID NO: 1740292 - DNA, 15 bp, Homo sapiens
ttatttatctgtgcc

SEQ ID NO: 1740293 - DNA, 15 bp, Homo sapiens
tatttatctgtgcct

SEQ ID NO: 1740294 - DNA, 15 bp, Homo sapiens
atttatctgtgcctc

SEQ ID NO: 1740295 - DNA, 15 bp, Homo sapiens
tttatctgtgcctcc

SEQ ID NO: 1740296 - DNA, 15 bp, Homo sapiens
ttatctgtgcctcca

SEQ ID NO: 1740297 - DNA, 15 bp, Homo sapiens
tatctgtgcctccat

SEQ ID NO: 1740298 - DNA, 15 bp, Homo sapiens
atctgtgcctccatt

SEQ ID NO: 1740299 - DNA, 15 bp, Homo sapiens
tgtgcctccatttcc

SEQ ID NO: 1740300 - DNA, 15 bp, Homo sapiens
gtgcctccatttcct

SEQ ID NO: 1740301 - DNA, 15 bp, Homo sapiens
tgcctccatttccta

SEQ ID NO: 1740302 - DNA, 15 bp, Homo sapiens
gcctccatttcctat

SEQ ID NO: 1740303 - DNA, 15 bp, Homo sapiens
cctccatttcctatt

SEQ ID NO: 1740304 - DNA, 15 bp, Homo sapiens
ctccatttcctattc

SEQ ID NO: 1740305 - DNA, 15 bp, Homo sapiens
tccatttcctattct

SEQ ID NO: 1740306 - DNA, 15 bp, Homo sapiens
ccatttcctattcta

SEQ ID NO: 1740307 - DNA, 15 bp, Homo sapiens
catttcctattctat

SEQ ID NO: 1740308 - DNA, 15 bp, Homo sapiens
atttcctattctata

SEQ ID NO: 1740309 - DNA, 15 bp, Homo sapiens
tttcctattctataa

SEQ ID NO: 1740310 - DNA, 15 bp, Homo sapiens
ttcctattctataaa

SEQ ID NO: 1740311 - DNA, 15 bp, Homo sapiens
tcctattctataaaa

SEQ ID NO: 1740312 - DNA, 15 bp, Homo sapiens
cctattctataaaat

SEQ ID NO: 1740313 - DNA, 15 bp, Homo sapiens
ctattctataaaatg

SEQ ID NO: 1740314 - DNA, 15 bp, Homo sapiens
tattctataaaatgg

SEQ ID NO: 1740315 - DNA, 15 bp, Homo sapiens
attctataaaatggg

SEQ ID NO: 1740316 - DNA, 15 bp, Homo sapiens
ttctataaaatgggg

SEQ ID NO: 1740317 - DNA, 15 bp, Homo sapiens
tctataaaatggggt

SEQ ID NO: 1740318 - DNA, 15 bp, Homo sapiens
ctataaaatggggtt

SEQ ID NO: 1740319 - DNA, 15 bp, Homo sapiens
tataaaatggggttt

SEQ ID NO: 1740320 - DNA, 15 bp, Homo sapiens
ataaaatggggtttg

SEQ ID NO: 1740321 - DNA, 15 bp, Homo sapiens
taaaatggggtttgt

SEQ ID NO: 1740322 - DNA, 15 bp, Homo sapiens
aaaatggggtttgtg

SEQ ID NO: 1740323 - DNA, 15 bp, Homo sapiens
aaatggggtttgtga

SEQ ID NO: 1740324 - DNA, 15 bp, Homo sapiens
aatggggtttgtgaa

SEQ ID NO: 1740325 - DNA, 15 bp, Homo sapiens
atggggtttgtgaaa

SEQ ID NO: 1740326 - DNA, 15 bp, Homo sapiens
tggggtttgtgaaat

SEQ ID NO: 1740327 - DNA, 15 bp, Homo sapiens
ggggtttgtgaaata

SEQ ID NO: 1740328 - DNA, 15 bp, Homo sapiens
gggtttgtgaaatag

SEQ ID NO: 1740329 - DNA, 15 bp, Homo sapiens
ggtttgtgaaatagt

SEQ ID NO: 1740330 - DNA, 15 bp, Homo sapiens
gtttgtgaaatagtc

SEQ ID NO: 1740331 - DNA, 15 bp, Homo sapiens
tttgtgaaatagtct

SEQ ID NO: 1740332 - DNA, 15 bp, Homo sapiens
ttgtgaaatagtctc

SEQ ID NO: 1740333 - DNA, 15 bp, Homo sapiens
tgtgaaatagtctca

SEQ ID NO: 1740334 - DNA, 15 bp, Homo sapiens
gtgaaatagtctcac

SEQ ID NO: 1740335 - DNA, 15 bp, Homo sapiens
tgaaatagtctcacc

SEQ ID NO: 1740336 - DNA, 15 bp, Homo sapiens
gaaatagtctcacct

SEQ ID NO: 1740337 - DNA, 15 bp, Homo sapiens
aaatagtctcacctc

SEQ ID NO: 1740338 - DNA, 15 bp, Homo sapiens
aatagtctcacctca

SEQ ID NO: 1740339 - DNA, 15 bp, Homo sapiens
atagtctcacctcat

SEQ ID NO: 1740340 - DNA, 15 bp, Homo sapiens
tagtctcacctcata

SEQ ID NO: 1740341 - DNA, 15 bp, Homo sapiens
agtctcacctcataa

SEQ ID NO: 1740342 - DNA, 15 bp, Homo sapiens
gtctcacctcataag

SEQ ID NO: 1740343 - DNA, 15 bp, Homo sapiens
tctcacctcataaga

SEQ ID NO: 1740344 - DNA, 15 bp, Homo sapiens
ctcacctcataagat

SEQ ID NO: 1740345 - DNA, 15 bp, Homo sapiens
tcacctcataagata

SEQ ID NO: 1740346 - DNA, 15 bp, Homo sapiens
cacctcataagataa

SEQ ID NO: 1740347 - DNA, 15 bp, Homo sapiens
acctcataagataat

SEQ ID NO: 1740348 - DNA, 15 bp, Homo sapiens
cctcataagataatt

SEQ ID NO: 1740349 - DNA, 15 bp, Homo sapiens
ctcataagataatta

SEQ ID NO: 1740350 - DNA, 15 bp, Homo sapiens
tcataagataattaa

SEQ ID NO: 1740351 - DNA, 15 bp, Homo sapiens
cataagataattaaa

SEQ ID NO: 1740352 - DNA, 15 bp, Homo sapiens
ataagataattaaat

SEQ ID NO: 1740353 - DNA, 15 bp, Homo sapiens
taagataattaaatg

SEQ ID NO: 1740354 - DNA, 15 bp, Homo sapiens
aagataattaaatga

SEQ ID NO: 1740355 - DNA, 15 bp, Homo sapiens
agataattaaatgaa

SEQ ID NO: 1740356 - DNA, 15 bp, Homo sapiens
gataattaaatgaat

SEQ ID NO: 1740357 - DNA, 15 bp, Homo sapiens
ataattaaatgaatt

SEQ ID NO: 1740358 - DNA, 15 bp, Homo sapiens
taattaaatgaatta

SEQ ID NO: 1740359 - DNA, 15 bp, Homo sapiens
aattaaatgaattaa

SEQ ID NO: 1740360 - DNA, 15 bp, Homo sapiens
attaaatgaattaac

SEQ ID NO: 1740361 - DNA, 15 bp, Homo sapiens
ttaaatgaattaaca

SEQ ID NO: 1740362 - DNA, 15 bp, Homo sapiens
taaatgaattaacac

SEQ ID NO: 1740363 - DNA, 15 bp, Homo sapiens
aaatgaattaacaca

SEQ ID NO: 1740364 - DNA, 15 bp, Homo sapiens
aatgaattaacacac

SEQ ID NO: 1740365 - DNA, 15 bp, Homo sapiens
atgaattaacacacc

SEQ ID NO: 1740366 - DNA, 15 bp, Homo sapiens
tgaattaacacacct

SEQ ID NO: 1740367 - DNA, 15 bp, Homo sapiens
gaattaacacaccta

SEQ ID NO: 1740368 - DNA, 15 bp, Homo sapiens
aattaacacacctaa

SEQ ID NO: 1740369 - DNA, 15 bp, Homo sapiens
attaacacacctaaa

SEQ ID NO: 1740370 - DNA, 15 bp, Homo sapiens
ttaacacacctaaag

SEQ ID NO: 1740371 - DNA, 15 bp, Homo sapiens
taacacacctaaagt

SEQ ID NO: 1740372 - DNA, 15 bp, Homo sapiens
aacacacctaaagta

SEQ ID NO: 1740373 - DNA, 15 bp, Homo sapiens
acacacctaaagtat

SEQ ID NO: 1740374 - DNA, 15 bp, Homo sapiens
cacacctaaagtatt

SEQ ID NO: 1740375 - DNA, 15 bp, Homo sapiens
acacctaaagtattc

SEQ ID NO: 1740376 - DNA, 15 bp, Homo sapiens
cacctaaagtattca

SEQ ID NO: 1740377 - DNA, 15 bp, Homo sapiens
acctaaagtattcag

SEQ ID NO: 1740378 - DNA, 15 bp, Homo sapiens
cctaaagtattcaga

SEQ ID NO: 1740379 - DNA, 15 bp, Homo sapiens
ctaaagtattcagag

SEQ ID NO: 1740380 - DNA, 15 bp, Homo sapiens
taaagtattcagagc

SEQ ID NO: 1740381 - DNA, 15 bp, Homo sapiens
aaagtattcagagca

SEQ ID NO: 1740382 - DNA, 15 bp, Homo sapiens
aagtattcagagcag

SEQ ID NO: 1740383 - DNA, 15 bp, Homo sapiens
agtattcagagcagt

SEQ ID NO: 1740384 - DNA, 15 bp, Homo sapiens
gtattcagagcagtg

SEQ ID NO: 1740385 - DNA, 15 bp, Homo sapiens
tattcagagcagtgc

SEQ ID NO: 1740386 - DNA, 15 bp, Homo sapiens
attcagagcagtgcc

SEQ ID NO: 1740387 - DNA, 15 bp, Homo sapiens
ttcagagcagtgcct

SEQ ID NO: 1740388 - DNA, 15 bp, Homo sapiens
tcagagcagtgcctg

SEQ ID NO: 1740389 - DNA, 15 bp, Homo sapiens
cagagcagtgcctgg

SEQ ID NO: 1740390 - DNA, 15 bp, Homo sapiens
agagcagtgcctggt

SEQ ID NO: 1740391 - DNA, 15 bp, Homo sapiens
gagcagtgcctggta

SEQ ID NO: 1740392 - DNA, 15 bp, Homo sapiens
agcagtgcctggtat

SEQ ID NO: 1740393 - DNA, 15 bp, Homo sapiens
gcagtgcctggtatt

SEQ ID NO: 1740394 - DNA, 15 bp, Homo sapiens
cagtgcctggtattt

SEQ ID NO: 1740395 - DNA, 15 bp, Homo sapiens
agtgcctggtattta

SEQ ID NO: 1740396 - DNA, 15 bp, Homo sapiens
gtgcctggtatttaa

SEQ ID NO: 1740397 - DNA, 15 bp, Homo sapiens
tgcctggtatttaat

SEQ ID NO: 1740398 - DNA, 15 bp, Homo sapiens
gcctggtatttaata

SEQ ID NO: 1740399 - DNA, 15 bp, Homo sapiens
cctggtatttaataa

SEQ ID NO: 1740400 - DNA, 15 bp, Homo sapiens
ctggtatttaataaa

SEQ ID NO: 1740401 - DNA, 15 bp, Homo sapiens
tggtatttaataaat

SEQ ID NO: 1740402 - DNA, 15 bp, Homo sapiens
ggtatttaataaatg

SEQ ID NO: 1740403 - DNA, 15 bp, Homo sapiens
gtatttaataaatgc

SEQ ID NO: 1740404 - DNA, 15 bp, Homo sapiens
tatttaataaatgct

SEQ ID NO: 1740405 - DNA, 15 bp, Homo sapiens
atttaataaatgctc

SEQ ID NO: 1740406 - DNA, 15 bp, Homo sapiens
tttaataaatgctca

SEQ ID NO: 1740407 - DNA, 15 bp, Homo sapiens
ttaataaatgctcaa

SEQ ID NO: 1740408 - DNA, 15 bp, Homo sapiens
taataaatgctcaat

SEQ ID NO: 1740409 - DNA, 15 bp, Homo sapiens
aataaatgctcaata

SEQ ID NO: 1740410 - DNA, 15 bp, Homo sapiens
ataaatgctcaataa

SEQ ID NO: 1740411 - DNA, 15 bp, Homo sapiens
taaatgctcaataaa

SEQ ID NO: 1740412 - DNA, 15 bp, Homo sapiens
aaatgctcaataaac

SEQ ID NO: 1740413 - DNA, 15 bp, Homo sapiens
aatgctcaataaaca

SEQ ID NO: 1740414 - DNA, 15 bp, Homo sapiens
atgctcaataaacat

SEQ ID NO: 1740415 - DNA, 15 bp, Homo sapiens
tgctcaataaacatt

SEQ ID NO: 1740416 - DNA, 15 bp, Homo sapiens
gctcaataaacatta

SEQ ID NO: 1740417 - DNA, 15 bp, Homo sapiens
ctcaataaacattag

SEQ ID NO: 1740418 - DNA, 15 bp, Homo sapiens
tcaataaacattagc

SEQ ID NO: 1740419 - DNA, 15 bp, Homo sapiens
caataaacattagct

SEQ ID NO: 1740420 - DNA, 15 bp, Homo sapiens
aataaacattagcta

SEQ ID NO: 1740421 - DNA, 15 bp, Homo sapiens
ataaacattagctat

SEQ ID NO: 1740422 - DNA, 15 bp, Homo sapiens
taaacattagctatt

SEQ ID NO: 1740423 - DNA, 15 bp, Homo sapiens
aaacattagctatta

SEQ ID NO: 1740424 - DNA, 15 bp, Homo sapiens
aacattagctattat

SEQ ID NO: 1740425 - DNA, 15 bp, Homo sapiens
acattagctattatt

SEQ ID NO: 1740426 - DNA, 15 bp, Homo sapiens
cattagctattatta

SEQ ID NO: 1740427 - DNA, 15 bp, Homo sapiens
attagctattattaa

SEQ ID NO: 1740428 - DNA, 15 bp, Homo sapiens
ttagctattattaaa

SEQ ID NO: 1740429 - DNA, 15 bp, Homo sapiens
tagctattattaaaa

SEQ ID NO: 1740430 - DNA, 15 bp, Homo sapiens
agctattattaaaac

SEQ ID NO: 1740431 - DNA, 15 bp, Homo sapiens
gctattattaaaaca

SEQ ID NO: 1740432 - DNA, 15 bp, Homo sapiens
ctattattaaaacat

SEQ ID NO: 1740433 - DNA, 15 bp, Homo sapiens
tattattaaaacatg

SEQ ID NO: 1740434 - DNA, 15 bp, Homo sapiens
attattaaaacatgg

SEQ ID NO: 1740435 - DNA, 15 bp, Homo sapiens
ttattaaaacatgga

SEQ ID NO: 1740436 - DNA, 15 bp, Homo sapiens
tattaaaacatggaa

SEQ ID NO: 1740437 - DNA, 15 bp, Homo sapiens
attaaaacatggaaa

SEQ ID NO: 1740438 - DNA, 15 bp, Homo sapiens
ttaaaacatggaaat

SEQ ID NO: 1740439 - DNA, 15 bp, Homo sapiens
taaaacatggaaatc

SEQ ID NO: 1740440 - DNA, 15 bp, Homo sapiens
aaaacatggaaatca

SEQ ID NO: 1740441 - DNA, 15 bp, Homo sapiens
aaacatggaaatcag

SEQ ID NO: 1740442 - DNA, 15 bp, Homo sapiens
aacatggaaatcagg

SEQ ID NO: 1740443 - DNA, 15 bp, Homo sapiens
acatggaaatcagga

SEQ ID NO: 1740444 - DNA, 15 bp, Homo sapiens
catggaaatcaggaa

SEQ ID NO: 1740445 - DNA, 15 bp, Homo sapiens
atggaaatcaggaaa

SEQ ID NO: 1740446 - DNA, 15 bp, Homo sapiens
tggaaatcaggaaag

SEQ ID NO: 1740447 - DNA, 15 bp, Homo sapiens
ggaaatcaggaaaga

SEQ ID NO: 1740448 - DNA, 15 bp, Homo sapiens
gaaatcaggaaagat

SEQ ID NO: 1740449 - DNA, 15 bp, Homo sapiens
aaatcaggaaagata

SEQ ID NO: 1740450 - DNA, 15 bp, Homo sapiens
aatcaggaaagatac

SEQ ID NO: 1740451 - DNA, 15 bp, Homo sapiens
atcaggaaagataca

SEQ ID NO: 1740452 - DNA, 15 bp, Homo sapiens
tcaggaaagatacat

SEQ ID NO: 1740453 - DNA, 15 bp, Homo sapiens
caggaaagatacatt

SEQ ID NO: 1740454 - DNA, 15 bp, Homo sapiens
aggaaagatacattg

SEQ ID NO: 1740455 - DNA, 15 bp, Homo sapiens
ggaaagatacattga

SEQ ID NO: 1740456 - DNA, 15 bp, Homo sapiens
gaaagatacattgac

SEQ ID NO: 1740457 - DNA, 15 bp, Homo sapiens
aaagatacattgaca

SEQ ID NO: 1740458 - DNA, 15 bp, Homo sapiens
aagatacattgacat

SEQ ID NO: 1740459 - DNA, 15 bp, Homo sapiens
agatacattgacatt

SEQ ID NO: 1740460 - DNA, 15 bp, Homo sapiens
gatacattgacattt

SEQ ID NO: 1740461 - DNA, 15 bp, Homo sapiens
atacattgacatttt

SEQ ID NO: 1740462 - DNA, 15 bp, Homo sapiens
tacattgacatttta

SEQ ID NO: 1740463 - DNA, 15 bp, Homo sapiens
acattgacattttat

SEQ ID NO: 1740464 - DNA, 15 bp, Homo sapiens
cattgacattttatc

SEQ ID NO: 1740465 - DNA, 15 bp, Homo sapiens
attgacattttatca

SEQ ID NO: 1740466 - DNA, 15 bp, Homo sapiens
ttgacattttatcaa

SEQ ID NO: 1740467 - DNA, 15 bp, Homo sapiens
tgacattttatcaaa

SEQ ID NO: 1740468 - DNA, 15 bp, Homo sapiens
gacattttatcaaat

SEQ ID NO: 1740469 - DNA, 15 bp, Homo sapiens
acattttatcaaatt

SEQ ID NO: 1740470 - DNA, 15 bp, Homo sapiens
cattttatcaaatta

SEQ ID NO: 1740471 - DNA, 15 bp, Homo sapiens
attttatcaaattag

SEQ ID NO: 1740472 - DNA, 15 bp, Homo sapiens
ttttatcaaattagc

SEQ ID NO: 1740473 - DNA, 15 bp, Homo sapiens
tttatcaaattagct

SEQ ID NO: 1740474 - DNA, 15 bp, Homo sapiens
ttatcaaattagctc

SEQ ID NO: 1740475 - DNA, 15 bp, Homo sapiens
tatcaaattagctca

SEQ ID NO: 1740476 - DNA, 15 bp, Homo sapiens
atcaaattagctcaa

SEQ ID NO: 1740477 - DNA, 15 bp, Homo sapiens
tcaaattagctcaaa

SEQ ID NO: 1740478 - DNA, 15 bp, Homo sapiens
caaattagctcaaat

SEQ ID NO: 1740479 - DNA, 15 bp, Homo sapiens
aaattagctcaaatt

SEQ ID NO: 1740480 - DNA, 15 bp, Homo sapiens
aattagctcaaatta

SEQ ID NO: 1740481 - DNA, 15 bp, Homo sapiens
attagctcaaattaa

SEQ ID NO: 1740482 - DNA, 15 bp, Homo sapiens
ttagctcaaattaat

SEQ ID NO: 1740483 - DNA, 15 bp, Homo sapiens
tagctcaaattaata

SEQ ID NO: 1740484 - DNA, 15 bp, Homo sapiens
agctcaaattaatag

SEQ ID NO: 1740485 - DNA, 15 bp, Homo sapiens
gctcaaattaataga

SEQ ID NO: 1740486 - DNA, 15 bp, Homo sapiens
ctcaaattaatagac

SEQ ID NO: 1740487 - DNA, 15 bp, Homo sapiens
tcaaattaatagaca

SEQ ID NO: 1740488 - DNA, 15 bp, Homo sapiens
caaattaatagacaa

SEQ ID NO: 1740489 - DNA, 15 bp, Homo sapiens
aaattaatagacaat

SEQ ID NO: 1740490 - DNA, 15 bp, Homo sapiens
aattaatagacaata

SEQ ID NO: 1740491 - DNA, 15 bp, Homo sapiens
attaatagacaatag

SEQ ID NO: 1740492 - DNA, 15 bp, Homo sapiens
ttaatagacaataga

SEQ ID NO: 1740493 - DNA, 15 bp, Homo sapiens
taatagacaatagat

SEQ ID NO: 1740494 - DNA, 15 bp, Homo sapiens
aatagacaatagatt

SEQ ID NO: 1740495 - DNA, 15 bp, Homo sapiens
atagacaatagattt

SEQ ID NO: 1740496 - DNA, 15 bp, Homo sapiens
tagacaatagatttc

SEQ ID NO: 1740497 - DNA, 15 bp, Homo sapiens
agacaatagatttct

SEQ ID NO: 1740498 - DNA, 15 bp, Homo sapiens
gacaatagatttctt

SEQ ID NO: 1740499 - DNA, 15 bp, Homo sapiens
acaatagatttcttt

SEQ ID NO: 1740500 - DNA, 15 bp, Homo sapiens
caatagatttctttc

SEQ ID NO: 1740501 - DNA, 15 bp, Homo sapiens
aatagatttctttcc

SEQ ID NO: 1740502 - DNA, 15 bp, Homo sapiens
atagatttctttcca

SEQ ID NO: 1740503 - DNA, 15 bp, Homo sapiens
tagatttctttccaa

SEQ ID NO: 1740504 - DNA, 15 bp, Homo sapiens
agatttctttccaat

SEQ ID NO: 1740505 - DNA, 15 bp, Homo sapiens
gatttctttccaatt

SEQ ID NO: 1740506 - DNA, 15 bp, Homo sapiens
atttctttccaatta

SEQ ID NO: 1740507 - DNA, 15 bp, Homo sapiens
tttctttccaattaa

SEQ ID NO: 1740508 - DNA, 15 bp, Homo sapiens
ttctttccaattaat

SEQ ID NO: 1740509 - DNA, 15 bp, Homo sapiens
tctttccaattaata

SEQ ID NO: 1740510 - DNA, 15 bp, Homo sapiens
ctttccaattaatac

SEQ ID NO: 1740511 - DNA, 15 bp, Homo sapiens
tttccaattaatact

SEQ ID NO: 1740512 - DNA, 15 bp, Homo sapiens
ttccaattaatactg

SEQ ID NO: 1740513 - DNA, 15 bp, Homo sapiens
tccaattaatactgc

SEQ ID NO: 1740514 - DNA, 15 bp, Homo sapiens
ccaattaatactgct

SEQ ID NO: 1740515 - DNA, 15 bp, Homo sapiens
caattaatactgctt

SEQ ID NO: 1740516 - DNA, 15 bp, Homo sapiens
aattaatactgcttc

SEQ ID NO: 1740517 - DNA, 15 bp, Homo sapiens
attaatactgcttca

SEQ ID NO: 1740518 - DNA, 15 bp, Homo sapiens
ttaatactgcttcaa

SEQ ID NO: 1740519 - DNA, 15 bp, Homo sapiens
taatactgcttcaaa

SEQ ID NO: 1740520 - DNA, 15 bp, Homo sapiens
aatactgcttcaaaa

SEQ ID NO: 1740521 - DNA, 15 bp, Homo sapiens
atactgcttcaaaaa

SEQ ID NO: 1740522 - DNA, 15 bp, Homo sapiens
tactgcttcaaaaaa

SEQ ID NO: 1740523 - DNA, 15 bp, Homo sapiens
actgcttcaaaaaat

SEQ ID NO: 1740524 - DNA, 15 bp, Homo sapiens
ctgcttcaaaaaata

SEQ ID NO: 1740525 - DNA, 15 bp, Homo sapiens
tgcttcaaaaaatac

SEQ ID NO: 1740526 - DNA, 15 bp, Homo sapiens
gcttcaaaaaatact

SEQ ID NO: 1740527 - DNA, 15 bp, Homo sapiens
cttcaaaaaatacta

SEQ ID NO: 1740528 - DNA, 15 bp, Homo sapiens
ttcaaaaaatactag

SEQ ID NO: 1740529 - DNA, 15 bp, Homo sapiens
tcaaaaaatactaga

SEQ ID NO: 1740530 - DNA, 15 bp, Homo sapiens
caaaaaatactagaa

SEQ ID NO: 1740531 - DNA, 15 bp, Homo sapiens
aaaaaatactagaat

SEQ ID NO: 1740532 - DNA, 15 bp, Homo sapiens
aaaaatactagaata

SEQ ID NO: 1740533 - DNA, 15 bp, Homo sapiens
aaaatactagaatac

SEQ ID NO: 1740534 - DNA, 15 bp, Homo sapiens
aaatactagaataca

SEQ ID NO: 1740535 - DNA, 15 bp, Homo sapiens
aatactagaatacag

SEQ ID NO: 1740536 - DNA, 15 bp, Homo sapiens
atactagaatacagc

SEQ ID NO: 1740537 - DNA, 15 bp, Homo sapiens
tactagaatacagca

SEQ ID NO: 1740538 - DNA, 15 bp, Homo sapiens
actagaatacagcag

SEQ ID NO: 1740539 - DNA, 15 bp, Homo sapiens
ctagaatacagcagt

SEQ ID NO: 1740540 - DNA, 15 bp, Homo sapiens
tagaatacagcagtg

SEQ ID NO: 1740541 - DNA, 15 bp, Homo sapiens
agaatacagcagtgc

SEQ ID NO: 1740542 - DNA, 15 bp, Homo sapiens
gaatacagcagtgct

SEQ ID NO: 1740543 - DNA, 15 bp, Homo sapiens
aatacagcagtgctg

SEQ ID NO: 1740544 - DNA, 15 bp, Homo sapiens
atacagcagtgctgg

SEQ ID NO: 1740545 - DNA, 15 bp, Homo sapiens
tacagcagtgctggt

SEQ ID NO: 1740546 - DNA, 15 bp, Homo sapiens
acagcagtgctggta

SEQ ID NO: 1740547 - DNA, 15 bp, Homo sapiens
cagcagtgctggtaa

SEQ ID NO: 1740548 - DNA, 15 bp, Homo sapiens
agcagtgctggtaaa

SEQ ID NO: 1740549 - DNA, 15 bp, Homo sapiens
gcagtgctggtaaac

SEQ ID NO: 1740550 - DNA, 15 bp, Homo sapiens
cagtgctggtaaaca

SEQ ID NO: 1740551 - DNA, 15 bp, Homo sapiens
agtgctggtaaacaa

SEQ ID NO: 1740552 - DNA, 15 bp, Homo sapiens
gtgctggtaaacaag

SEQ ID NO: 1740553 - DNA, 15 bp, Homo sapiens
tgctggtaaacaaga

SEQ ID NO: 1740554 - DNA, 15 bp, Homo sapiens
gctggtaaacaagag

SEQ ID NO: 1740555 - DNA, 15 bp, Homo sapiens
ctggtaaacaagagg

SEQ ID NO: 1740556 - DNA, 15 bp, Homo sapiens
tggtaaacaagaggt

SEQ ID NO: 1740557 - DNA, 15 bp, Homo sapiens
ggtaaacaagaggtg

SEQ ID NO: 1740558 - DNA, 15 bp, Homo sapiens
gtaaacaagaggtgg

SEQ ID NO: 1740559 - DNA, 15 bp, Homo sapiens
taaacaagaggtgga

SEQ ID NO: 1740560 - DNA, 15 bp, Homo sapiens
aaacaagaggtggaa

SEQ ID NO: 1740561 - DNA, 15 bp, Homo sapiens
aacaagaggtggaat

SEQ ID NO: 1740562 - DNA, 15 bp, Homo sapiens
acaagaggtggaatg

SEQ ID NO: 1740563 - DNA, 15 bp, Homo sapiens
caagaggtggaatgc

SEQ ID NO: 1740564 - DNA, 15 bp, Homo sapiens
aagaggtggaatgca

SEQ ID NO: 1740565 - DNA, 15 bp, Homo sapiens
agaggtggaatgcag

SEQ ID NO: 1740566 - DNA, 15 bp, Homo sapiens
gaggtggaatgcagg

SEQ ID NO: 1740567 - DNA, 15 bp, Homo sapiens
aggtggaatgcagga

SEQ ID NO: 1740568 - DNA, 15 bp, Homo sapiens
ggtggaatgcaggat

SEQ ID NO: 1740569 - DNA, 15 bp, Homo sapiens
gtggaatgcaggatg

SEQ ID NO: 1740570 - DNA, 15 bp, Homo sapiens
tggaatgcaggatgt

SEQ ID NO: 1740571 - DNA, 15 bp, Homo sapiens
ggaatgcaggatgtt

SEQ ID NO: 1740572 - DNA, 15 bp, Homo sapiens
gaatgcaggatgttc

SEQ ID NO: 1740573 - DNA, 15 bp, Homo sapiens
aatgcaggatgttca

SEQ ID NO: 1740574 - DNA, 15 bp, Homo sapiens
atgcaggatgttcac

SEQ ID NO: 1740575 - DNA, 15 bp, Homo sapiens
tgcaggatgttcact

SEQ ID NO: 1740576 - DNA, 15 bp, Homo sapiens
gcaggatgttcacta

SEQ ID NO: 1740577 - DNA, 15 bp, Homo sapiens
caggatgttcactaa

SEQ ID NO: 1740578 - DNA, 15 bp, Homo sapiens
aggatgttcactaat

SEQ ID NO: 1740579 - DNA, 15 bp, Homo sapiens
ggatgttcactaatt

SEQ ID NO: 1740580 - DNA, 15 bp, Homo sapiens
gatgttcactaattg

SEQ ID NO: 1740581 - DNA, 15 bp, Homo sapiens
atgttcactaattgc

SEQ ID NO: 1740582 - DNA, 15 bp, Homo sapiens
tgttcactaattgcc

SEQ ID NO: 1740583 - DNA, 15 bp, Homo sapiens
gttcactaattgcca

SEQ ID NO: 1740584 - DNA, 15 bp, Homo sapiens
ttcactaattgccag

SEQ ID NO: 1740585 - DNA, 15 bp, Homo sapiens
tcactaattgccagt

SEQ ID NO: 1740586 - DNA, 15 bp, Homo sapiens
cactaattgccagtg

SEQ ID NO: 1740587 - DNA, 15 bp, Homo sapiens
actaattgccagtga

SEQ ID NO: 1740588 - DNA, 15 bp, Homo sapiens
ctaattgccagtgat

SEQ ID NO: 1740589 - DNA, 15 bp, Homo sapiens
taattgccagtgatc

SEQ ID NO: 1740590 - DNA, 15 bp, Homo sapiens
aattgccagtgatca

SEQ ID NO: 1740591 - DNA, 15 bp, Homo sapiens
attgccagtgatcac

SEQ ID NO: 1740592 - DNA, 15 bp, Homo sapiens
ttgccagtgatcact

SEQ ID NO: 1740593 - DNA, 15 bp, Homo sapiens
tgccagtgatcactg

SEQ ID NO: 1740594 - DNA, 15 bp, Homo sapiens
gccagtgatcactga

SEQ ID NO: 1740595 - DNA, 15 bp, Homo sapiens
ccagtgatcactgac

SEQ ID NO: 1740596 - DNA, 15 bp, Homo sapiens
cagtgatcactgaca

SEQ ID NO: 1740597 - DNA, 15 bp, Homo sapiens
agtgatcactgacat

SEQ ID NO: 1740598 - DNA, 15 bp, Homo sapiens
gtgatcactgacatg

SEQ ID NO: 1740599 - DNA, 15 bp, Homo sapiens
tgatcactgacatgc

SEQ ID NO: 1740600 - DNA, 15 bp, Homo sapiens
gatcactgacatgcc

SEQ ID NO: 1740601 - DNA, 15 bp, Homo sapiens
atcactgacatgcct

SEQ ID NO: 1740602 - DNA, 15 bp, Homo sapiens
tcactgacatgcctt

SEQ ID NO: 1740603 - DNA, 15 bp, Homo sapiens
cactgacatgccttt

SEQ ID NO: 1740604 - DNA, 15 bp, Homo sapiens
actgacatgcctttg

SEQ ID NO: 1740605 - DNA, 15 bp, Homo sapiens
ctgacatgcctttga

SEQ ID NO: 1740606 - DNA, 15 bp, Homo sapiens
tgacatgcctttgag

SEQ ID NO: 1740607 - DNA, 15 bp, Homo sapiens
gacatgcctttgagc

SEQ ID NO: 1740608 - DNA, 15 bp, Homo sapiens
acatgcctttgagca

SEQ ID NO: 1740609 - DNA, 15 bp, Homo sapiens
catgcctttgagcaa

SEQ ID NO: 1740610 - DNA, 15 bp, Homo sapiens
atgcctttgagcaac

SEQ ID NO: 1740611 - DNA, 15 bp, Homo sapiens
tgcctttgagcaact

SEQ ID NO: 1740612 - DNA, 15 bp, Homo sapiens
gcctttgagcaacta

SEQ ID NO: 1740613 - DNA, 15 bp, Homo sapiens
cctttgagcaactaa

SEQ ID NO: 1740614 - DNA, 15 bp, Homo sapiens
ctttgagcaactaag

SEQ ID NO: 1740615 - DNA, 15 bp, Homo sapiens
tttgagcaactaagt

SEQ ID NO: 1740616 - DNA, 15 bp, Homo sapiens
ttgagcaactaagtt

SEQ ID NO: 1740617 - DNA, 15 bp, Homo sapiens
tgagcaactaagtta

SEQ ID NO: 1740618 - DNA, 15 bp, Homo sapiens
gagcaactaagttat

SEQ ID NO: 1740619 - DNA, 15 bp, Homo sapiens
agcaactaagttatc

SEQ ID NO: 1740620 - DNA, 15 bp, Homo sapiens
gcaactaagttatct

SEQ ID NO: 1740621 - DNA, 15 bp, Homo sapiens
caactaagttatctt

SEQ ID NO: 1740622 - DNA, 15 bp, Homo sapiens
aactaagttatcttc

SEQ ID NO: 1740623 - DNA, 15 bp, Homo sapiens
actaagttatcttcc

SEQ ID NO: 1740624 - DNA, 15 bp, Homo sapiens
ctaagttatcttccc

SEQ ID NO: 1740625 - DNA, 15 bp, Homo sapiens
taagttatcttccct

SEQ ID NO: 1740626 - DNA, 15 bp, Homo sapiens
aagttatcttccctg

SEQ ID NO: 1740627 - DNA, 15 bp, Homo sapiens
agttatcttccctgt

SEQ ID NO: 1740628 - DNA, 15 bp, Homo sapiens
gttatcttccctgtc

SEQ ID NO: 1740629 - DNA, 15 bp, Homo sapiens
ttatcttccctgtct

SEQ ID NO: 1740630 - DNA, 15 bp, Homo sapiens
tatcttccctgtcta

SEQ ID NO: 1740631 - DNA, 15 bp, Homo sapiens
atcttccctgtctag

SEQ ID NO: 1740632 - DNA, 15 bp, Homo sapiens
tcttccctgtctagt

SEQ ID NO: 1740633 - DNA, 15 bp, Homo sapiens
cttccctgtctagtt

SEQ ID NO: 1740634 - DNA, 15 bp, Homo sapiens
ttccctgtctagttt

SEQ ID NO: 1740635 - DNA, 15 bp, Homo sapiens
tccctgtctagtttt

SEQ ID NO: 1740636 - DNA, 15 bp, Homo sapiens
ccctgtctagttttt

SEQ ID NO: 1740637 - DNA, 15 bp, Homo sapiens
cctgtctagtttttc

SEQ ID NO: 1740638 - DNA, 15 bp, Homo sapiens
ctgtctagtttttcc

SEQ ID NO: 1740639 - DNA, 15 bp, Homo sapiens
tgtctagtttttcct

SEQ ID NO: 1740640 - DNA, 15 bp, Homo sapiens
gtctagtttttcctc

SEQ ID NO: 1740641 - DNA, 15 bp, Homo sapiens
tctagtttttcctcc

SEQ ID NO: 1740642 - DNA, 15 bp, Homo sapiens
ctagtttttcctcct

SEQ ID NO: 1740643 - DNA, 15 bp, Homo sapiens
tagtttttcctcctt

SEQ ID NO: 1740644 - DNA, 15 bp, Homo sapiens
agtttttcctccttt

SEQ ID NO: 1740645 - DNA, 15 bp, Homo sapiens
gtttttcctcctttg

SEQ ID NO: 1740646 - DNA, 15 bp, Homo sapiens
tttttcctcctttgc

SEQ ID NO: 1740647 - DNA, 15 bp, Homo sapiens
ttttcctcctttgcg

SEQ ID NO: 1740648 - DNA, 15 bp, Homo sapiens
tttcctcctttgcga

SEQ ID NO: 1740649 - DNA, 15 bp, Homo sapiens
ttcctcctttgcgat

SEQ ID NO: 1740650 - DNA, 15 bp, Homo sapiens
tcctcctttgcgatg

SEQ ID NO: 1740651 - DNA, 15 bp, Homo sapiens
cctcctttgcgatgg

SEQ ID NO: 1740652 - DNA, 15 bp, Homo sapiens
ctcctttgcgatgga

SEQ ID NO: 1740653 - DNA, 15 bp, Homo sapiens
tcctttgcgatggat

SEQ ID NO: 1740654 - DNA, 15 bp, Homo sapiens
cctttgcgatggatg

SEQ ID NO: 1740655 - DNA, 15 bp, Homo sapiens
ctttgcgatggatgt

SEQ ID NO: 1740656 - DNA, 15 bp, Homo sapiens
tttgcgatggatgta

SEQ ID NO: 1740657 - DNA, 15 bp, Homo sapiens
ttgcgatggatgtaa

SEQ ID NO: 1740658 - DNA, 15 bp, Homo sapiens
tgcgatggatgtaac

SEQ ID NO: 1740659 - DNA, 15 bp, Homo sapiens
gcgatggatgtaact

SEQ ID NO: 1740660 - DNA, 15 bp, Homo sapiens
cgatggatgtaactt

SEQ ID NO: 1740661 - DNA, 15 bp, Homo sapiens
gatggatgtaactta

SEQ ID NO: 1740662 - DNA, 15 bp, Homo sapiens
atggatgtaacttag

SEQ ID NO: 1740663 - DNA, 15 bp, Homo sapiens
tggatgtaacttagc

SEQ ID NO: 1740664 - DNA, 15 bp, Homo sapiens
ggatgtaacttagcc

SEQ ID NO: 1740665 - DNA, 15 bp, Homo sapiens
gatgtaacttagcct

SEQ ID NO: 1740666 - DNA, 15 bp, Homo sapiens
atgtaacttagcctt

SEQ ID NO: 1740667 - DNA, 15 bp, Homo sapiens
tgtaacttagccttt

SEQ ID NO: 1740668 - DNA, 15 bp, Homo sapiens
gtaacttagcctttc

SEQ ID NO: 1740669 - DNA, 15 bp, Homo sapiens
taacttagcctttcc

SEQ ID NO: 1740670 - DNA, 15 bp, Homo sapiens
aacttagcctttccc

SEQ ID NO: 1740671 - DNA, 15 bp, Homo sapiens
acttagcctttccct

SEQ ID NO: 1740672 - DNA, 15 bp, Homo sapiens
cttagcctttccctt

SEQ ID NO: 1740673 - DNA, 15 bp, Homo sapiens
ttagcctttccctta

SEQ ID NO: 1740674 - DNA, 15 bp, Homo sapiens
tagcctttcccttac

SEQ ID NO: 1740675 - DNA, 15 bp, Homo sapiens
agcctttcccttact

SEQ ID NO: 1740676 - DNA, 15 bp, Homo sapiens
gcctttcccttactt

SEQ ID NO: 1740677 - DNA, 15 bp, Homo sapiens
cctttcccttactta

SEQ ID NO: 1740678 - DNA, 15 bp, Homo sapiens
ctttcccttacttat

SEQ ID NO: 1740679 - DNA, 15 bp, Homo sapiens
tttcccttacttatg

SEQ ID NO: 1740680 - DNA, 15 bp, Homo sapiens
ttcccttacttatgt

SEQ ID NO: 1740681 - DNA, 15 bp, Homo sapiens
tcccttacttatgtc

SEQ ID NO: 1740682 - DNA, 15 bp, Homo sapiens
cccttacttatgtca

SEQ ID NO: 1740683 - DNA, 15 bp, Homo sapiens
ccttacttatgtcat

SEQ ID NO: 1740684 - DNA, 15 bp, Homo sapiens
cttacttatgtcata

SEQ ID NO: 1740685 - DNA, 15 bp, Homo sapiens
ttacttatgtcatat

SEQ ID NO: 1740686 - DNA, 15 bp, Homo sapiens
tacttatgtcatatg

SEQ ID NO: 1740687 - DNA, 15 bp, Homo sapiens
acttatgtcatatga

SEQ ID NO: 1740688 - DNA, 15 bp, Homo sapiens
cttatgtcatatgag

SEQ ID NO: 1740689 - DNA, 15 bp, Homo sapiens
ttatgtcatatgaga

SEQ ID NO: 1740690 - DNA, 15 bp, Homo sapiens
tatgtcatatgagac

SEQ ID NO: 1740691 - DNA, 15 bp, Homo sapiens
atgtcatatgagaca

SEQ ID NO: 1740692 - DNA, 15 bp, Homo sapiens
tgtcatatgagacat

SEQ ID NO: 1740693 - DNA, 15 bp, Homo sapiens
gtcatatgagacatg

SEQ ID NO: 1740694 - DNA, 15 bp, Homo sapiens
tcatatgagacatgt

SEQ ID NO: 1740695 - DNA, 15 bp, Homo sapiens
catatgagacatgta

SEQ ID NO: 1740696 - DNA, 15 bp, Homo sapiens
atatgagacatgtaa

SEQ ID NO: 1740697 - DNA, 15 bp, Homo sapiens
tatgagacatgtaaa

SEQ ID NO: 1740698 - DNA, 15 bp, Homo sapiens
atgagacatgtaaag

SEQ ID NO: 1740699 - DNA, 15 bp, Homo sapiens
tgagacatgtaaaga

SEQ ID NO: 1740700 - DNA, 15 bp, Homo sapiens
gagacatgtaaagaa

SEQ ID NO: 1740701 - DNA, 15 bp, Homo sapiens
agacatgtaaagaaa

SEQ ID NO: 1740702 - DNA, 15 bp, Homo sapiens
gacatgtaaagaaaa

SEQ ID NO: 1740703 - DNA, 15 bp, Homo sapiens
acatgtaaagaaaaa

SEQ ID NO: 1740704 - DNA, 15 bp, Homo sapiens
catgtaaagaaaaaa

SEQ ID NO: 1740705 - DNA, 15 bp, Homo sapiens
atgtaaagaaaaaac

SEQ ID NO: 1740706 - DNA, 15 bp, Homo sapiens
tgtaaagaaaaaaca

SEQ ID NO: 1740707 - DNA, 15 bp, Homo sapiens
acagtacagctatta

SEQ ID NO: 1740708 - DNA, 15 bp, Homo sapiens
cagtacagctattag

SEQ ID NO: 1740709 - DNA, 15 bp, Homo sapiens
agtacagctattagc

SEQ ID NO: 1740710 - DNA, 15 bp, Homo sapiens
gtacagctattagct

SEQ ID NO: 1740711 - DNA, 15 bp, Homo sapiens
tacagctattagctt

SEQ ID NO: 1740712 - DNA, 15 bp, Homo sapiens
acagctattagcttc

SEQ ID NO: 1740713 - DNA, 15 bp, Homo sapiens
cagctattagcttca

SEQ ID NO: 1740714 - DNA, 15 bp, Homo sapiens
agctattagcttcag

SEQ ID NO: 1740715 - DNA, 15 bp, Homo sapiens
gctattagcttcagt

SEQ ID NO: 1740716 - DNA, 15 bp, Homo sapiens
ctattagcttcagta

SEQ ID NO: 1740717 - DNA, 15 bp, Homo sapiens
tattagcttcagtaa

SEQ ID NO: 1740718 - DNA, 15 bp, Homo sapiens
attagcttcagtaaa

SEQ ID NO: 1740719 - DNA, 15 bp, Homo sapiens
ttagcttcagtaaat

SEQ ID NO: 1740720 - DNA, 15 bp, Homo sapiens
tagcttcagtaaatt

SEQ ID NO: 1740721 - DNA, 15 bp, Homo sapiens
agcttcagtaaattt

SEQ ID NO: 1740722 - DNA, 15 bp, Homo sapiens
gcttcagtaaatttc

SEQ ID NO: 1740723 - DNA, 15 bp, Homo sapiens
cttcagtaaatttca

SEQ ID NO: 1740724 - DNA, 15 bp, Homo sapiens
ttcagtaaatttcag

SEQ ID NO: 1740725 - DNA, 15 bp, Homo sapiens
tcagtaaatttcagt

SEQ ID NO: 1740726 - DNA, 15 bp, Homo sapiens
cagtaaatttcagta

SEQ ID NO: 1740727 - DNA, 15 bp, Homo sapiens
agtaaatttcagtac

SEQ ID NO: 1740728 - DNA, 15 bp, Homo sapiens
gtaaatttcagtact

SEQ ID NO: 1740729 - DNA, 15 bp, Homo sapiens
taaatttcagtactt

SEQ ID NO: 1740730 - DNA, 15 bp, Homo sapiens
aaatttcagtacttt

SEQ ID NO: 1740731 - DNA, 15 bp, Homo sapiens
aatttcagtactttt

SEQ ID NO: 1740732 - DNA, 15 bp, Homo sapiens
atttcagtactttta

SEQ ID NO: 1740733 - DNA, 15 bp, Homo sapiens
tttcagtacttttat

SEQ ID NO: 1740734 - DNA, 15 bp, Homo sapiens
ttcagtacttttatc

SEQ ID NO: 1740735 - DNA, 15 bp, Homo sapiens
tcagtacttttatct

SEQ ID NO: 1740736 - DNA, 15 bp, Homo sapiens
cagtacttttatcta

SEQ ID NO: 1740737 - DNA, 15 bp, Homo sapiens
agtacttttatctaa

SEQ ID NO: 1740738 - DNA, 15 bp, Homo sapiens
gtacttttatctaat

SEQ ID NO: 1740739 - DNA, 15 bp, Homo sapiens
tacttttatctaata

SEQ ID NO: 1740740 - DNA, 15 bp, Homo sapiens
acttttatctaatat

SEQ ID NO: 1740741 - DNA, 15 bp, Homo sapiens
cttttatctaatata

SEQ ID NO: 1740742 - DNA, 15 bp, Homo sapiens
ttttatctaatataa

SEQ ID NO: 1740743 - DNA, 15 bp, Homo sapiens
tttatctaatataac

SEQ ID NO: 1740744 - DNA, 15 bp, Homo sapiens
ttatctaatataaca

SEQ ID NO: 1740745 - DNA, 15 bp, Homo sapiens
tatctaatataacat

SEQ ID NO: 1740746 - DNA, 15 bp, Homo sapiens
atctaatataacatc

SEQ ID NO: 1740747 - DNA, 15 bp, Homo sapiens
tctaatataacatct

SEQ ID NO: 1740748 - DNA, 15 bp, Homo sapiens
ctaatataacatcta

SEQ ID NO: 1740749 - DNA, 15 bp, Homo sapiens
taatataacatctat

SEQ ID NO: 1740750 - DNA, 15 bp, Homo sapiens
aatataacatctata

SEQ ID NO: 1740751 - DNA, 15 bp, Homo sapiens
atataacatctatat

SEQ ID NO: 1740752 - DNA, 15 bp, Homo sapiens
tataacatctatatt

SEQ ID NO: 1740753 - DNA, 15 bp, Homo sapiens
ataacatctatattc

SEQ ID NO: 1740754 - DNA, 15 bp, Homo sapiens
taacatctatattcc

SEQ ID NO: 1740755 - DNA, 15 bp, Homo sapiens
aacatctatattcca

SEQ ID NO: 1740756 - DNA, 15 bp, Homo sapiens
acatctatattccaa

SEQ ID NO: 1740757 - DNA, 15 bp, Homo sapiens
catctatattccaat

SEQ ID NO: 1740758 - DNA, 15 bp, Homo sapiens
atctatattccaatt

SEQ ID NO: 1740759 - DNA, 15 bp, Homo sapiens
tctatattccaattt

SEQ ID NO: 1740760 - DNA, 15 bp, Homo sapiens
ctatattccaatttt

SEQ ID NO: 1740761 - DNA, 15 bp, Homo sapiens
tatattccaattttg

SEQ ID NO: 1740762 - DNA, 15 bp, Homo sapiens
atattccaattttgt

SEQ ID NO: 1740763 - DNA, 15 bp, Homo sapiens
tattccaattttgtc

SEQ ID NO: 1740764 - DNA, 15 bp, Homo sapiens
attccaattttgtca

SEQ ID NO: 1740765 - DNA, 15 bp, Homo sapiens
ttccaattttgtcat

SEQ ID NO: 1740766 - DNA, 15 bp, Homo sapiens
tccaattttgtcatt

SEQ ID NO: 1740767 - DNA, 15 bp, Homo sapiens
ccaattttgtcattt

SEQ ID NO: 1740768 - DNA, 15 bp, Homo sapiens
caattttgtcatttg

SEQ ID NO: 1740769 - DNA, 15 bp, Homo sapiens
aattttgtcatttga

SEQ ID NO: 1740770 - DNA, 15 bp, Homo sapiens
attttgtcatttgat

SEQ ID NO: 1740771 - DNA, 15 bp, Homo sapiens
ttttgtcatttgatc

SEQ ID NO: 1740772 - DNA, 15 bp, Homo sapiens
tttgtcatttgatcc

SEQ ID NO: 1740773 - DNA, 15 bp, Homo sapiens
ttgtcatttgatcca

SEQ ID NO: 1740774 - DNA, 15 bp, Homo sapiens
tgtcatttgatccaa

SEQ ID NO: 1740775 - DNA, 15 bp, Homo sapiens
gtcatttgatccaat

SEQ ID NO: 1740776 - DNA, 15 bp, Homo sapiens
tcatttgatccaata

SEQ ID NO: 1740777 - DNA, 15 bp, Homo sapiens
catttgatccaataa

SEQ ID NO: 1740778 - DNA, 15 bp, Homo sapiens
atttgatccaataat

SEQ ID NO: 1740779 - DNA, 15 bp, Homo sapiens
tttgatccaataatg

SEQ ID NO: 1740780 - DNA, 15 bp, Homo sapiens
ttgatccaataatgt

SEQ ID NO: 1740781 - DNA, 15 bp, Homo sapiens
tgatccaataatgtc

SEQ ID NO: 1740782 - DNA, 15 bp, Homo sapiens
gatccaataatgtca

SEQ ID NO: 1740783 - DNA, 15 bp, Homo sapiens
atccaataatgtcat

SEQ ID NO: 1740784 - DNA, 15 bp, Homo sapiens
tccaataatgtcatt

SEQ ID NO: 1740785 - DNA, 15 bp, Homo sapiens
ccaataatgtcattt

SEQ ID NO: 1740786 - DNA, 15 bp, Homo sapiens
caataatgtcattta

SEQ ID NO: 1740787 - DNA, 15 bp, Homo sapiens
aataatgtcatttat

SEQ ID NO: 1740788 - DNA, 15 bp, Homo sapiens
ataatgtcatttatg

SEQ ID NO: 1740789 - DNA, 15 bp, Homo sapiens
taatgtcatttatgg

SEQ ID NO: 1740790 - DNA, 15 bp, Homo sapiens
aatgtcatttatggc

SEQ ID NO: 1740791 - DNA, 15 bp, Homo sapiens
atgtcatttatggca

SEQ ID NO: 1740792 - DNA, 15 bp, Homo sapiens
tgtcatttatggcat

SEQ ID NO: 1740793 - DNA, 15 bp, Homo sapiens
gtcatttatggcatt

SEQ ID NO: 1740794 - DNA, 15 bp, Homo sapiens
tcatttatggcattt

SEQ ID NO: 1740795 - DNA, 15 bp, Homo sapiens
catttatggcatttt

SEQ ID NO: 1740796 - DNA, 15 bp, Homo sapiens
atttatggcattttc

SEQ ID NO: 1740797 - DNA, 15 bp, Homo sapiens
tttatggcattttct

SEQ ID NO: 1740798 - DNA, 15 bp, Homo sapiens
ttatggcattttctc

SEQ ID NO: 1740799 - DNA, 15 bp, Homo sapiens
tatggcattttctcc

SEQ ID NO: 1740800 - DNA, 15 bp, Homo sapiens
atggcattttctcct

SEQ ID NO: 1740801 - DNA, 15 bp, Homo sapiens
tggcattttctcctc

SEQ ID NO: 1740802 - DNA, 15 bp, Homo sapiens
ggcattttctcctcc

SEQ ID NO: 1740803 - DNA, 15 bp, Homo sapiens
gcattttctcctcct

SEQ ID NO: 1740804 - DNA, 15 bp, Homo sapiens
cattttctcctcctt

SEQ ID NO: 1740805 - DNA, 15 bp, Homo sapiens
attttctcctccttc

SEQ ID NO: 1740806 - DNA, 15 bp, Homo sapiens
ttttctcctccttct

SEQ ID NO: 1740807 - DNA, 15 bp, Homo sapiens
tttctcctccttcta

SEQ ID NO: 1740808 - DNA, 15 bp, Homo sapiens
ttctcctccttctag

SEQ ID NO: 1740809 - DNA, 15 bp, Homo sapiens
tctcctccttctagt

SEQ ID NO: 1740810 - DNA, 15 bp, Homo sapiens
ctcctccttctagtt

SEQ ID NO: 1740811 - DNA, 15 bp, Homo sapiens
tcctccttctagttt

SEQ ID NO: 1740812 - DNA, 15 bp, Homo sapiens
cctccttctagtttc

SEQ ID NO: 1740813 - DNA, 15 bp, Homo sapiens
ctccttctagtttct

SEQ ID NO: 1740814 - DNA, 15 bp, Homo sapiens
tccttctagtttctc

SEQ ID NO: 1740815 - DNA, 15 bp, Homo sapiens
ccttctagtttctca

SEQ ID NO: 1740816 - DNA, 15 bp, Homo sapiens
cttctagtttctcaa

SEQ ID NO: 1740817 - DNA, 15 bp, Homo sapiens
ttctagtttctcaat

SEQ ID NO: 1740818 - DNA, 15 bp, Homo sapiens
tctagtttctcaata

SEQ ID NO: 1740819 - DNA, 15 bp, Homo sapiens
ctagtttctcaatag

SEQ ID NO: 1740820 - DNA, 15 bp, Homo sapiens
tagtttctcaataga

SEQ ID NO: 1740821 - DNA, 15 bp, Homo sapiens
agtttctcaatagaa

SEQ ID NO: 1740822 - DNA, 15 bp, Homo sapiens
gtttctcaatagaaa

SEQ ID NO: 1740823 - DNA, 15 bp, Homo sapiens
tttctcaatagaaat

SEQ ID NO: 1740824 - DNA, 15 bp, Homo sapiens
ttctcaatagaaatc

SEQ ID NO: 1740825 - DNA, 15 bp, Homo sapiens
tctcaatagaaatct

SEQ ID NO: 1740826 - DNA, 15 bp, Homo sapiens
ctcaatagaaatctc

SEQ ID NO: 1740827 - DNA, 15 bp, Homo sapiens
tcaatagaaatctct

SEQ ID NO: 1740828 - DNA, 15 bp, Homo sapiens
caatagaaatctcta

SEQ ID NO: 1740829 - DNA, 15 bp, Homo sapiens
aatagaaatctctaa

SEQ ID NO: 1740830 - DNA, 15 bp, Homo sapiens
atagaaatctctaaa

SEQ ID NO: 1740831 - DNA, 15 bp, Homo sapiens
tagaaatctctaaag

SEQ ID NO: 1740832 - DNA, 15 bp, Homo sapiens
agaaatctctaaagc

SEQ ID NO: 1740833 - DNA, 15 bp, Homo sapiens
gaaatctctaaagcc

SEQ ID NO: 1740834 - DNA, 15 bp, Homo sapiens
aaatctctaaagcct

SEQ ID NO: 1740835 - DNA, 15 bp, Homo sapiens
aatctctaaagcctg

SEQ ID NO: 1740836 - DNA, 15 bp, Homo sapiens
atctctaaagcctgt

SEQ ID NO: 1740837 - DNA, 15 bp, Homo sapiens
tctctaaagcctgta

SEQ ID NO: 1740838 - DNA, 15 bp, Homo sapiens
gttgctacagccacc

SEQ ID NO: 1740839 - DNA, 15 bp, Homo sapiens
ttgctacagccacct

SEQ ID NO: 1740840 - DNA, 15 bp, Homo sapiens
tgctacagccacctt

SEQ ID NO: 1740841 - DNA, 15 bp, Homo sapiens
gctacagccaccttt

SEQ ID NO: 1740842 - DNA, 15 bp, Homo sapiens
ctacagccacctttg

SEQ ID NO: 1740843 - DNA, 15 bp, Homo sapiens
tacagccacctttgt

SEQ ID NO: 1740844 - DNA, 15 bp, Homo sapiens
acagccacctttgtt

SEQ ID NO: 1740845 - DNA, 15 bp, Homo sapiens
cagccacctttgttt

SEQ ID NO: 1740846 - DNA, 15 bp, Homo sapiens
agccacctttgtttt

SEQ ID NO: 1740847 - DNA, 15 bp, Homo sapiens
gccacctttgttttc

SEQ ID NO: 1740848 - DNA, 15 bp, Homo sapiens
ccacctttgttttct

SEQ ID NO: 1740849 - DNA, 15 bp, Homo sapiens
cacctttgttttctg

SEQ ID NO: 1740850 - DNA, 15 bp, Homo sapiens
acctttgttttctga

SEQ ID NO: 1740851 - DNA, 15 bp, Homo sapiens
cctttgttttctgag

SEQ ID NO: 1740852 - DNA, 15 bp, Homo sapiens
ctttgttttctgagt

SEQ ID NO: 1740853 - DNA, 15 bp, Homo sapiens
tttgttttctgagtg

SEQ ID NO: 1740854 - DNA, 15 bp, Homo sapiens
ttgttttctgagtgg

SEQ ID NO: 1740855 - DNA, 15 bp, Homo sapiens
tgttttctgagtggt

SEQ ID NO: 1740856 - DNA, 15 bp, Homo sapiens
gttttctgagtggta

SEQ ID NO: 1740857 - DNA, 15 bp, Homo sapiens
ttttctgagtggtac

SEQ ID NO: 1740858 - DNA, 15 bp, Homo sapiens
tttctgagtggtaca

SEQ ID NO: 1740859 - DNA, 15 bp, Homo sapiens
ttctgagtggtacaa

SEQ ID NO: 1740860 - DNA, 15 bp, Homo sapiens
tctgagtggtacaac

SEQ ID NO: 1740861 - DNA, 15 bp, Homo sapiens
ctgagtggtacaaca

SEQ ID NO: 1740862 - DNA, 15 bp, Homo sapiens
tgagtggtacaacac

SEQ ID NO: 1740863 - DNA, 15 bp, Homo sapiens
gagtggtacaacact

SEQ ID NO: 1740864 - DNA, 15 bp, Homo sapiens
agtggtacaacacta

SEQ ID NO: 1740865 - DNA, 15 bp, Homo sapiens
gtggtacaacactaa

SEQ ID NO: 1740866 - DNA, 15 bp, Homo sapiens
tggtacaacactaat

SEQ ID NO: 1740867 - DNA, 15 bp, Homo sapiens
ggtacaacactaatt

SEQ ID NO: 1740868 - DNA, 15 bp, Homo sapiens
gtacaacactaattc

SEQ ID NO: 1740869 - DNA, 15 bp, Homo sapiens
tacaacactaattca

SEQ ID NO: 1740870 - DNA, 15 bp, Homo sapiens
acaacactaattcat

SEQ ID NO: 1740871 - DNA, 15 bp, Homo sapiens
caacactaattcatc

SEQ ID NO: 1740872 - DNA, 15 bp, Homo sapiens
aacactaattcatcc

SEQ ID NO: 1740873 - DNA, 15 bp, Homo sapiens
acactaattcatcct

SEQ ID NO: 1740874 - DNA, 15 bp, Homo sapiens
cactaattcatcctt

SEQ ID NO: 1740875 - DNA, 15 bp, Homo sapiens
actaattcatcctta

SEQ ID NO: 1740876 - DNA, 15 bp, Homo sapiens
ctaattcatccttat

SEQ ID NO: 1740877 - DNA, 15 bp, Homo sapiens
taattcatccttata

SEQ ID NO: 1740878 - DNA, 15 bp, Homo sapiens
aattcatccttatat

SEQ ID NO: 1740879 - DNA, 15 bp, Homo sapiens
attcatccttatatg

SEQ ID NO: 1740880 - DNA, 15 bp, Homo sapiens
ttcatccttatatgt

SEQ ID NO: 1740881 - DNA, 15 bp, Homo sapiens
tcatccttatatgtg

SEQ ID NO: 1740882 - DNA, 15 bp, Homo sapiens
catccttatatgtgc

SEQ ID NO: 1740883 - DNA, 15 bp, Homo sapiens
atccttatatgtgct

SEQ ID NO: 1740884 - DNA, 15 bp, Homo sapiens
tccttatatgtgctt

SEQ ID NO: 1740885 - DNA, 15 bp, Homo sapiens
ccttatatgtgcttt

SEQ ID NO: 1740886 - DNA, 15 bp, Homo sapiens
cttatatgtgctttg

SEQ ID NO: 1740887 - DNA, 15 bp, Homo sapiens
ttatatgtgctttgt

SEQ ID NO: 1740888 - DNA, 15 bp, Homo sapiens
tatatgtgctttgtg

SEQ ID NO: 1740889 - DNA, 15 bp, Homo sapiens
atatgtgctttgtgg

SEQ ID NO: 1740890 - DNA, 15 bp, Homo sapiens
tatgtgctttgtggt

SEQ ID NO: 1740891 - DNA, 15 bp, Homo sapiens
atgtgctttgtggtg

SEQ ID NO: 1740892 - DNA, 15 bp, Homo sapiens
tgtgctttgtggtgg

SEQ ID NO: 1740893 - DNA, 15 bp, Homo sapiens
gtgctttgtggtgga

SEQ ID NO: 1740894 - DNA, 15 bp, Homo sapiens
tgctttgtggtggat

SEQ ID NO: 1740895 - DNA, 15 bp, Homo sapiens
gctttgtggtggatg

SEQ ID NO: 1740896 - DNA, 15 bp, Homo sapiens
ctttgtggtggatgt

SEQ ID NO: 1740897 - DNA, 15 bp, Homo sapiens
tttgtggtggatgtc

SEQ ID NO: 1740898 - DNA, 15 bp, Homo sapiens
ttgtggtggatgtct

SEQ ID NO: 1740899 - DNA, 15 bp, Homo sapiens
tgtggtggatgtctc

SEQ ID NO: 1740900 - DNA, 15 bp, Homo sapiens
gtggtggatgtctct

SEQ ID NO: 1740901 - DNA, 15 bp, Homo sapiens
tggtggatgtctctt

SEQ ID NO: 1740902 - DNA, 15 bp, Homo sapiens
ggtggatgtctctta

SEQ ID NO: 1740903 - DNA, 15 bp, Homo sapiens
gtggatgtctcttag

SEQ ID NO: 1740904 - DNA, 15 bp, Homo sapiens
tggatgtctcttagg

SEQ ID NO: 1740905 - DNA, 15 bp, Homo sapiens
ggatgtctcttagga

SEQ ID NO: 1740906 - DNA, 15 bp, Homo sapiens
gatgtctcttaggac

SEQ ID NO: 1740907 - DNA, 15 bp, Homo sapiens
atgtctcttaggaca

SEQ ID NO: 1740908 - DNA, 15 bp, Homo sapiens
tgtctcttaggacac

SEQ ID NO: 1740909 - DNA, 15 bp, Homo sapiens
gtctcttaggacacg

SEQ ID NO: 1740910 - DNA, 15 bp, Homo sapiens
tctcttaggacacgt

SEQ ID NO: 1740911 - DNA, 15 bp, Homo sapiens
ctcttaggacacgta

SEQ ID NO: 1740912 - DNA, 15 bp, Homo sapiens
tcttaggacacgtac

SEQ ID NO: 1740913 - DNA, 15 bp, Homo sapiens
cttaggacacgtacc

SEQ ID NO: 1740914 - DNA, 15 bp, Homo sapiens
ttaggacacgtaccc

SEQ ID NO: 1740915 - DNA, 15 bp, Homo sapiens
taggacacgtaccct

SEQ ID NO: 1740916 - DNA, 15 bp, Homo sapiens
aggacacgtaccctt

SEQ ID NO: 1740917 - DNA, 15 bp, Homo sapiens
ggacacgtacccttt

SEQ ID NO: 1740918 - DNA, 15 bp, Homo sapiens
gacacgtaccctttg

SEQ ID NO: 1740919 - DNA, 15 bp, Homo sapiens
acacgtaccctttgt

SEQ ID NO: 1740920 - DNA, 15 bp, Homo sapiens
cacgtaccctttgta

SEQ ID NO: 1740921 - DNA, 15 bp, Homo sapiens
acgtaccctttgtaa

SEQ ID NO: 1740922 - DNA, 15 bp, Homo sapiens
cgtaccctttgtaac

SEQ ID NO: 1740923 - DNA, 15 bp, Homo sapiens
gtaccctttgtaaca

SEQ ID NO: 1740924 - DNA, 15 bp, Homo sapiens
taccctttgtaacaa

SEQ ID NO: 1740925 - DNA, 15 bp, Homo sapiens
accctttgtaacaac

SEQ ID NO: 1740926 - DNA, 15 bp, Homo sapiens
ccctttgtaacaaca

SEQ ID NO: 1740927 - DNA, 15 bp, Homo sapiens
cctttgtaacaacag

SEQ ID NO: 1740928 - DNA, 15 bp, Homo sapiens
ctttgtaacaacaga

SEQ ID NO: 1740929 - DNA, 15 bp, Homo sapiens
tttgtaacaacagat

SEQ ID NO: 1740930 - DNA, 15 bp, Homo sapiens
ttgtaacaacagatg

SEQ ID NO: 1740931 - DNA, 15 bp, Homo sapiens
tgtaacaacagatgg

SEQ ID NO: 1740932 - DNA, 15 bp, Homo sapiens
gtaacaacagatggt

SEQ ID NO: 1740933 - DNA, 15 bp, Homo sapiens
taacaacagatggtc

SEQ ID NO: 1740934 - DNA, 15 bp, Homo sapiens
aacaacagatggtct

SEQ ID NO: 1740935 - DNA, 15 bp, Homo sapiens
acaacagatggtctc

SEQ ID NO: 1740936 - DNA, 15 bp, Homo sapiens
caacagatggtctct

SEQ ID NO: 1740937 - DNA, 15 bp, Homo sapiens
aacagatggtctctt

SEQ ID NO: 1740938 - DNA, 15 bp, Homo sapiens
acagatggtctcttt

SEQ ID NO: 1740939 - DNA, 15 bp, Homo sapiens
cagatggtctctttc

SEQ ID NO: 1740940 - DNA, 15 bp, Homo sapiens
agatggtctctttcc

SEQ ID NO: 1740941 - DNA, 15 bp, Homo sapiens
gatggtctctttccc

SEQ ID NO: 1740942 - DNA, 15 bp, Homo sapiens
atggtctctttccct

SEQ ID NO: 1740943 - DNA, 15 bp, Homo sapiens
tggtctctttccctt

SEQ ID NO: 1740944 - DNA, 15 bp, Homo sapiens
ggtctctttcccttt

SEQ ID NO: 1740945 - DNA, 15 bp, Homo sapiens
gtctctttccctttt

SEQ ID NO: 1740946 - DNA, 15 bp, Homo sapiens
tctctttccctttta

SEQ ID NO: 1740947 - DNA, 15 bp, Homo sapiens
ctctttcccttttac

SEQ ID NO: 1740948 - DNA, 15 bp, Homo sapiens
tctttcccttttaca

SEQ ID NO: 1740949 - DNA, 15 bp, Homo sapiens
ctttcccttttacac

SEQ ID NO: 1740950 - DNA, 15 bp, Homo sapiens
tttcccttttacact

SEQ ID NO: 1740951 - DNA, 15 bp, Homo sapiens
ttcccttttacactt

SEQ ID NO: 1740952 - DNA, 15 bp, Homo sapiens
tcccttttacacttt

SEQ ID NO: 1740953 - DNA, 15 bp, Homo sapiens
cccttttacactttt

SEQ ID NO: 1740954 - DNA, 15 bp, Homo sapiens
ccttttacacttttg

SEQ ID NO: 1740955 - DNA, 15 bp, Homo sapiens
cttttacacttttga

SEQ ID NO: 1740956 - DNA, 15 bp, Homo sapiens
ttttacacttttgaa

SEQ ID NO: 1740957 - DNA, 15 bp, Homo sapiens
tttacacttttgaat

SEQ ID NO: 1740958 - DNA, 15 bp, Homo sapiens
ttacacttttgaatt

SEQ ID NO: 1740959 - DNA, 15 bp, Homo sapiens
tacacttttgaatta

SEQ ID NO: 1740960 - DNA, 15 bp, Homo sapiens
acacttttgaattaa

SEQ ID NO: 1740961 - DNA, 15 bp, Homo sapiens
cacttttgaattaaa

SEQ ID NO: 1740962 - DNA, 15 bp, Homo sapiens
acttttgaattaaat

SEQ ID NO: 1740963 - DNA, 15 bp, Homo sapiens
cttttgaattaaatg

SEQ ID NO: 1740964 - DNA, 15 bp, Homo sapiens
ttttgaattaaatgg

SEQ ID NO: 1740965 - DNA, 15 bp, Homo sapiens
tttgaattaaatggt

SEQ ID NO: 1740966 - DNA, 15 bp, Homo sapiens
ttgaattaaatggtc

SEQ ID NO: 1740967 - DNA, 15 bp, Homo sapiens
tgaattaaatggtct

SEQ ID NO: 1740968 - DNA, 15 bp, Homo sapiens
gaattaaatggtctt

SEQ ID NO: 1740969 - DNA, 15 bp, Homo sapiens
aattaaatggtcttt

SEQ ID NO: 1740970 - DNA, 15 bp, Homo sapiens
attaaatggtcttta

SEQ ID NO: 1740971 - DNA, 15 bp, Homo sapiens
ttaaatggtctttaa

SEQ ID NO: 1740972 - DNA, 15 bp, Homo sapiens
taaatggtctttaaa

SEQ ID NO: 1740973 - DNA, 15 bp, Homo sapiens
aaatggtctttaaaa

SEQ ID NO: 1740974 - DNA, 15 bp, Homo sapiens
aatggtctttaaaat

SEQ ID NO: 1740975 - DNA, 15 bp, Homo sapiens
atggtctttaaaatt

SEQ ID NO: 1740976 - DNA, 15 bp, Homo sapiens
tggtctttaaaatta

SEQ ID NO: 1740977 - DNA, 15 bp, Homo sapiens
ggtctttaaaattac

SEQ ID NO: 1740978 - DNA, 15 bp, Homo sapiens
gtctttaaaattacc

SEQ ID NO: 1740979 - DNA, 15 bp, Homo sapiens
tctttaaaattaccc

SEQ ID NO: 1740980 - DNA, 15 bp, Homo sapiens
ctttaaaattaccca

SEQ ID NO: 1740981 - DNA, 15 bp, Homo sapiens
tttaaaattacccag

SEQ ID NO: 1740982 - DNA, 15 bp, Homo sapiens
ttaaaattacccagg

SEQ ID NO: 1740983 - DNA, 15 bp, Homo sapiens
taaaattacccaggt

SEQ ID NO: 1740984 - DNA, 15 bp, Homo sapiens
aaaattacccaggta

SEQ ID NO: 1740985 - DNA, 15 bp, Homo sapiens
aaattacccaggtac

SEQ ID NO: 1740986 - DNA, 15 bp, Homo sapiens
aattacccaggtaca

SEQ ID NO: 1740987 - DNA, 15 bp, Homo sapiens
attacccaggtacat

SEQ ID NO: 1740988 - DNA, 15 bp, Homo sapiens
ttacccaggtacatt

SEQ ID NO: 1740989 - DNA, 15 bp, Homo sapiens
tacccaggtacattg

SEQ ID NO: 1740990 - DNA, 15 bp, Homo sapiens
acccaggtacattgg

SEQ ID NO: 1740991 - DNA, 15 bp, Homo sapiens
cccaggtacattgga

SEQ ID NO: 1740992 - DNA, 15 bp, Homo sapiens
ccaggtacattggag

SEQ ID NO: 1740993 - DNA, 15 bp, Homo sapiens
caggtacattggagt

SEQ ID NO: 1740994 - DNA, 15 bp, Homo sapiens
aggtacattggagtt

SEQ ID NO: 1740995 - DNA, 15 bp, Homo sapiens
ggtacattggagtta

SEQ ID NO: 1740996 - DNA, 15 bp, Homo sapiens
gtacattggagttag

SEQ ID NO: 1740997 - DNA, 15 bp, Homo sapiens
tacattggagttagt

SEQ ID NO: 1740998 - DNA, 15 bp, Homo sapiens
acattggagttagtt

SEQ ID NO: 1740999 - DNA, 15 bp, Homo sapiens
cattggagttagttt

SEQ ID NO: 1741000 - DNA, 15 bp, Homo sapiens
attggagttagtttc

SEQ ID NO: 1741001 - DNA, 15 bp, Homo sapiens
ttggagttagtttcc

SEQ ID NO: 1741002 - DNA, 15 bp, Homo sapiens
tggagttagtttcct

SEQ ID NO: 1741003 - DNA, 15 bp, Homo sapiens
ggagttagtttcctc

SEQ ID NO: 1741004 - DNA, 15 bp, Homo sapiens
gagttagtttcctct

SEQ ID NO: 1741005 - DNA, 15 bp, Homo sapiens
agttagtttcctctt

SEQ ID NO: 1741006 - DNA, 15 bp, Homo sapiens
gttagtttcctcttt

SEQ ID NO: 1741007 - DNA, 15 bp, Homo sapiens
ttagtttcctctttg

SEQ ID NO: 1741008 - DNA, 15 bp, Homo sapiens
tagtttcctctttga

SEQ ID NO: 1741009 - DNA, 15 bp, Homo sapiens
agtttcctctttgaa

SEQ ID NO: 1741010 - DNA, 15 bp, Homo sapiens
gtttcctctttgaac

SEQ ID NO: 1741011 - DNA, 15 bp, Homo sapiens
tttcctctttgaaca

SEQ ID NO: 1741012 - DNA, 15 bp, Homo sapiens
ttcctctttgaacat

SEQ ID NO: 1741013 - DNA, 15 bp, Homo sapiens
tcctctttgaacatt

SEQ ID NO: 1741014 - DNA, 15 bp, Homo sapiens
cctctttgaacattg

SEQ ID NO: 1741015 - DNA, 15 bp, Homo sapiens
ctctttgaacattgc

SEQ ID NO: 1741016 - DNA, 15 bp, Homo sapiens
tctttgaacattgca

SEQ ID NO: 1741017 - DNA, 15 bp, Homo sapiens
ctttgaacattgcat

SEQ ID NO: 1741018 - DNA, 15 bp, Homo sapiens
tttgaacattgcatc

SEQ ID NO: 1741019 - DNA, 15 bp, Homo sapiens
ttgaacattgcatct

SEQ ID NO: 1741020 - DNA, 15 bp, Homo sapiens
tgaacattgcatcta

SEQ ID NO: 1741021 - DNA, 15 bp, Homo sapiens
gaacattgcatctat

SEQ ID NO: 1741022 - DNA, 15 bp, Homo sapiens
aacattgcatctatg

SEQ ID NO: 1741023 - DNA, 15 bp, Homo sapiens
acattgcatctatga

SEQ ID NO: 1741024 - DNA, 15 bp, Homo sapiens
cattgcatctatgaa

SEQ ID NO: 1741025 - DNA, 15 bp, Homo sapiens
attgcatctatgaaa

SEQ ID NO: 1741026 - DNA, 15 bp, Homo sapiens
ttgcatctatgaaaa

SEQ ID NO: 1741027 - DNA, 15 bp, Homo sapiens
tgcatctatgaaaaa

SEQ ID NO: 1741028 - DNA, 15 bp, Homo sapiens
gcatctatgaaaaaa

SEQ ID NO: 1741029 - DNA, 15 bp, Homo sapiens
catctatgaaaaaat

SEQ ID NO: 1741030 - DNA, 15 bp, Homo sapiens
atctatgaaaaaata

SEQ ID NO: 1741031 - DNA, 15 bp, Homo sapiens
tctatgaaaaaatac

SEQ ID NO: 1741032 - DNA, 15 bp, Homo sapiens
ctatgaaaaaataca

SEQ ID NO: 1741033 - DNA, 15 bp, Homo sapiens
tatgaaaaaatacat

SEQ ID NO: 1741034 - DNA, 15 bp, Homo sapiens
atgaaaaaatacatg

SEQ ID NO: 1741035 - DNA, 15 bp, Homo sapiens
tgaaaaaatacatgc

SEQ ID NO: 1741036 - DNA, 15 bp, Homo sapiens
gaaaaaatacatgca

SEQ ID NO: 1741037 - DNA, 15 bp, Homo sapiens
aaaaaatacatgcac

SEQ ID NO: 1741038 - DNA, 15 bp, Homo sapiens
aaaaatacatgcacc

SEQ ID NO: 1741039 - DNA, 15 bp, Homo sapiens
aaaatacatgcaccc

SEQ ID NO: 1741040 - DNA, 15 bp, Homo sapiens
aaatacatgcacccc

SEQ ID NO: 1741041 - DNA, 15 bp, Homo sapiens
aatacatgcaccccc

SEQ ID NO: 1741042 - DNA, 15 bp, Homo sapiens
atacatgcaccccca

SEQ ID NO: 1741043 - DNA, 15 bp, Homo sapiens
tacatgcacccccag

SEQ ID NO: 1741044 - DNA, 15 bp, Homo sapiens
acatgcacccccagt

SEQ ID NO: 1741045 - DNA, 15 bp, Homo sapiens
catgcacccccagtg

SEQ ID NO: 1741046 - DNA, 15 bp, Homo sapiens
atgcacccccagtgc

SEQ ID NO: 1741047 - DNA, 15 bp, Homo sapiens
tgcacccccagtgcc

SEQ ID NO: 1741048 - DNA, 15 bp, Homo sapiens
gcacccccagtgccc

SEQ ID NO: 1741049 - DNA, 15 bp, Homo sapiens
acccccagtgcccat

SEQ ID NO: 1741050 - DNA, 15 bp, Homo sapiens
cccccagtgcccatc

SEQ ID NO: 1741051 - DNA, 15 bp, Homo sapiens
ccccagtgcccatcc

SEQ ID NO: 1741052 - DNA, 15 bp, Homo sapiens
cccagtgcccatcca

SEQ ID NO: 1741053 - DNA, 15 bp, Homo sapiens
ccagtgcccatccac

SEQ ID NO: 1741054 - DNA, 15 bp, Homo sapiens
cagtgcccatccaca

SEQ ID NO: 1741055 - DNA, 15 bp, Homo sapiens
agtgcccatccacaa

SEQ ID NO: 1741056 - DNA, 15 bp, Homo sapiens
gtgcccatccacaaa

SEQ ID NO: 1741057 - DNA, 15 bp, Homo sapiens
tgcccatccacaaag

SEQ ID NO: 1741058 - DNA, 15 bp, Homo sapiens
gcccatccacaaagc

SEQ ID NO: 1741059 - DNA, 15 bp, Homo sapiens
cccatccacaaagca

SEQ ID NO: 1741060 - DNA, 15 bp, Homo sapiens
ccatccacaaagcag

SEQ ID NO: 1741061 - DNA, 15 bp, Homo sapiens
catccacaaagcaga

SEQ ID NO: 1741062 - DNA, 15 bp, Homo sapiens
atccacaaagcagag

SEQ ID NO: 1741063 - DNA, 15 bp, Homo sapiens
tccacaaagcagaga

SEQ ID NO: 1741064 - DNA, 15 bp, Homo sapiens
ccacaaagcagagaa

SEQ ID NO: 1741065 - DNA, 15 bp, Homo sapiens
cacaaagcagagaag

SEQ ID NO: 1741066 - DNA, 15 bp, Homo sapiens
acaaagcagagaagt

SEQ ID NO: 1741067 - DNA, 15 bp, Homo sapiens
caaagcagagaagtt

SEQ ID NO: 1741068 - DNA, 15 bp, Homo sapiens
aaagcagagaagttg

SEQ ID NO: 1741069 - DNA, 15 bp, Homo sapiens
aagcagagaagttga

SEQ ID NO: 1741070 - DNA, 15 bp, Homo sapiens
agcagagaagttgat

SEQ ID NO: 1741071 - DNA, 15 bp, Homo sapiens
gcagagaagttgatt

SEQ ID NO: 1741072 - DNA, 15 bp, Homo sapiens
cagagaagttgatta

SEQ ID NO: 1741073 - DNA, 15 bp, Homo sapiens
agagaagttgattac

SEQ ID NO: 1741074 - DNA, 15 bp, Homo sapiens
gagaagttgattact

SEQ ID NO: 1741075 - DNA, 15 bp, Homo sapiens
agaagttgattactt

SEQ ID NO: 1741076 - DNA, 15 bp, Homo sapiens
gaagttgattacttg

SEQ ID NO: 1741077 - DNA, 15 bp, Homo sapiens
aagttgattacttgg

SEQ ID NO: 1741078 - DNA, 15 bp, Homo sapiens
agttgattacttggt

SEQ ID NO: 1741079 - DNA, 15 bp, Homo sapiens
gttgattacttggtt

SEQ ID NO: 1741080 - DNA, 15 bp, Homo sapiens
ttgattacttggttc

SEQ ID NO: 1741081 - DNA, 15 bp, Homo sapiens
tgattacttggttct

SEQ ID NO: 1741082 - DNA, 15 bp, Homo sapiens
gattacttggttcta

SEQ ID NO: 1741083 - DNA, 15 bp, Homo sapiens
attacttggttctag

SEQ ID NO: 1741084 - DNA, 15 bp, Homo sapiens
ttacttggttctaga

SEQ ID NO: 1741085 - DNA, 15 bp, Homo sapiens
tacttggttctagaa

SEQ ID NO: 1741086 - DNA, 15 bp, Homo sapiens
acttggttctagaat

SEQ ID NO: 1741087 - DNA, 15 bp, Homo sapiens
cttggttctagaatg

SEQ ID NO: 1741088 - DNA, 15 bp, Homo sapiens
ttggttctagaatgt

SEQ ID NO: 1741089 - DNA, 15 bp, Homo sapiens
tggttctagaatgtt

SEQ ID NO: 1741090 - DNA, 15 bp, Homo sapiens
ggttctagaatgttg

SEQ ID NO: 1741091 - DNA, 15 bp, Homo sapiens
gttctagaatgttgg

SEQ ID NO: 1741092 - DNA, 15 bp, Homo sapiens
ttctagaatgttggt

SEQ ID NO: 1741093 - DNA, 15 bp, Homo sapiens
tctagaatgttggtt

SEQ ID NO: 1741094 - DNA, 15 bp, Homo sapiens
ctagaatgttggttc

SEQ ID NO: 1741095 - DNA, 15 bp, Homo sapiens
tagaatgttggttca

SEQ ID NO: 1741096 - DNA, 15 bp, Homo sapiens
agaatgttggttcag

SEQ ID NO: 1741097 - DNA, 15 bp, Homo sapiens
gaatgttggttcagg

SEQ ID NO: 1741098 - DNA, 15 bp, Homo sapiens
aatgttggttcaggt

SEQ ID NO: 1741099 - DNA, 15 bp, Homo sapiens
atgttggttcaggtg

SEQ ID NO: 1741100 - DNA, 15 bp, Homo sapiens
tgttggttcaggtgg

SEQ ID NO: 1741101 - DNA, 15 bp, Homo sapiens
gttggttcaggtggg

SEQ ID NO: 1741102 - DNA, 15 bp, Homo sapiens
ttggttcaggtgggc

SEQ ID NO: 1741103 - DNA, 15 bp, Homo sapiens
tggttcaggtgggca

SEQ ID NO: 1741104 - DNA, 15 bp, Homo sapiens
ggttcaggtgggcag

SEQ ID NO: 1741105 - DNA, 15 bp, Homo sapiens
gttcaggtgggcagg

SEQ ID NO: 1741106 - DNA, 15 bp, Homo sapiens
ttcaggtgggcagga

SEQ ID NO: 1741107 - DNA, 15 bp, Homo sapiens
tcaggtgggcaggag

SEQ ID NO: 1741108 - DNA, 15 bp, Homo sapiens
caggtgggcaggaga

SEQ ID NO: 1741109 - DNA, 15 bp, Homo sapiens
aggtgggcaggagag

SEQ ID NO: 1741110 - DNA, 15 bp, Homo sapiens
ggtgggcaggagagg

SEQ ID NO: 1741111 - DNA, 15 bp, Homo sapiens
gtgggcaggagagga

SEQ ID NO: 1741112 - DNA, 15 bp, Homo sapiens
tgggcaggagaggaa

SEQ ID NO: 1741113 - DNA, 15 bp, Homo sapiens
gggcaggagaggaat

SEQ ID NO: 1741114 - DNA, 15 bp, Homo sapiens
ggcaggagaggaatg

SEQ ID NO: 1741115 - DNA, 15 bp, Homo sapiens
gcaggagaggaatga

SEQ ID NO: 1741116 - DNA, 15 bp, Homo sapiens
caggagaggaatgag

SEQ ID NO: 1741117 - DNA, 15 bp, Homo sapiens
aggagaggaatgaga

SEQ ID NO: 1741118 - DNA, 15 bp, Homo sapiens
ggagaggaatgagag

SEQ ID NO: 1741119 - DNA, 15 bp, Homo sapiens
gagaggaatgagagt

SEQ ID NO: 1741120 - DNA, 15 bp, Homo sapiens
agaggaatgagagtg

SEQ ID NO: 1741121 - DNA, 15 bp, Homo sapiens
gaggaatgagagtgt

SEQ ID NO: 1741122 - DNA, 15 bp, Homo sapiens
aggaatgagagtgta

SEQ ID NO: 1741123 - DNA, 15 bp, Homo sapiens
ggaatgagagtgtaa

SEQ ID NO: 1741124 - DNA, 15 bp, Homo sapiens
gaatgagagtgtaaa

SEQ ID NO: 1741125 - DNA, 15 bp, Homo sapiens
aatgagagtgtaaag

SEQ ID NO: 1741126 - DNA, 15 bp, Homo sapiens
atgagagtgtaaagg

SEQ ID NO: 1741127 - DNA, 15 bp, Homo sapiens
tgagagtgtaaaggc

SEQ ID NO: 1741128 - DNA, 15 bp, Homo sapiens
gagagtgtaaaggca

SEQ ID NO: 1741129 - DNA, 15 bp, Homo sapiens
agagtgtaaaggcac

SEQ ID NO: 1741130 - DNA, 15 bp, Homo sapiens
gagtgtaaaggcaca

SEQ ID NO: 1741131 - DNA, 15 bp, Homo sapiens
agtgtaaaggcacaa

SEQ ID NO: 1741132 - DNA, 15 bp, Homo sapiens
gtgtaaaggcacaat

SEQ ID NO: 1741133 - DNA, 15 bp, Homo sapiens
tgtaaaggcacaatg

SEQ ID NO: 1741134 - DNA, 15 bp, Homo sapiens
gtaaaggcacaatga

SEQ ID NO: 1741135 - DNA, 15 bp, Homo sapiens
taaaggcacaatgaa

SEQ ID NO: 1741136 - DNA, 15 bp, Homo sapiens
aaaggcacaatgaag

SEQ ID NO: 1741137 - DNA, 15 bp, Homo sapiens
aaggcacaatgaaga

SEQ ID NO: 1741138 - DNA, 15 bp, Homo sapiens
aggcacaatgaagaa

SEQ ID NO: 1741139 - DNA, 15 bp, Homo sapiens
ggcacaatgaagaaa

SEQ ID NO: 1741140 - DNA, 15 bp, Homo sapiens
gcacaatgaagaaat

SEQ ID NO: 1741141 - DNA, 15 bp, Homo sapiens
cacaatgaagaaatg

SEQ ID NO: 1741142 - DNA, 15 bp, Homo sapiens
acaatgaagaaatgt

SEQ ID NO: 1741143 - DNA, 15 bp, Homo sapiens
caatgaagaaatgtc

SEQ ID NO: 1741144 - DNA, 15 bp, Homo sapiens
aatgaagaaatgtct

SEQ ID NO: 1741145 - DNA, 15 bp, Homo sapiens
atgaagaaatgtctg

SEQ ID NO: 1741146 - DNA, 15 bp, Homo sapiens
tgaagaaatgtctgc

SEQ ID NO: 1741147 - DNA, 15 bp, Homo sapiens
gaagaaatgtctgca

SEQ ID NO: 1741148 - DNA, 15 bp, Homo sapiens
aagaaatgtctgcag

SEQ ID NO: 1741149 - DNA, 15 bp, Homo sapiens
agaaatgtctgcaga

SEQ ID NO: 1741150 - DNA, 15 bp, Homo sapiens
gaaatgtctgcagag

SEQ ID NO: 1741151 - DNA, 15 bp, Homo sapiens
aaatgtctgcagagc

SEQ ID NO: 1741152 - DNA, 15 bp, Homo sapiens
atgtctgcagagcct

SEQ ID NO: 1741153 - DNA, 15 bp, Homo sapiens
tgtctgcagagcctc

SEQ ID NO: 1741154 - DNA, 15 bp, Homo sapiens
gtctgcagagcctca

SEQ ID NO: 1741155 - DNA, 15 bp, Homo sapiens
tctgcagagcctcat

SEQ ID NO: 1741156 - DNA, 15 bp, Homo sapiens
ctgcagagcctcatg

SEQ ID NO: 1741157 - DNA, 15 bp, Homo sapiens
tgcagagcctcatga

SEQ ID NO: 1741158 - DNA, 15 bp, Homo sapiens
gcagagcctcatgag

SEQ ID NO: 1741159 - DNA, 15 bp, Homo sapiens
cagagcctcatgagt

SEQ ID NO: 1741160 - DNA, 15 bp, Homo sapiens
agagcctcatgagtt

SEQ ID NO: 1741161 - DNA, 15 bp, Homo sapiens
gagcctcatgagtta

SEQ ID NO: 1741162 - DNA, 15 bp, Homo sapiens
agcctcatgagttaa

SEQ ID NO: 1741163 - DNA, 15 bp, Homo sapiens
gcctcatgagttaag

SEQ ID NO: 1741164 - DNA, 15 bp, Homo sapiens
cctcatgagttaagc

SEQ ID NO: 1741165 - DNA, 15 bp, Homo sapiens
ctcatgagttaagca

SEQ ID NO: 1741166 - DNA, 15 bp, Homo sapiens
tcatgagttaagcac

SEQ ID NO: 1741167 - DNA, 15 bp, Homo sapiens
catgagttaagcaca

SEQ ID NO: 1741168 - DNA, 15 bp, Homo sapiens
atgagttaagcacag

SEQ ID NO: 1741169 - DNA, 15 bp, Homo sapiens
tgagttaagcacagg

SEQ ID NO: 1741170 - DNA, 15 bp, Homo sapiens
gagttaagcacaggt

SEQ ID NO: 1741171 - DNA, 15 bp, Homo sapiens
agttaagcacaggtg

SEQ ID NO: 1741172 - DNA, 15 bp, Homo sapiens
gttaagcacaggtgt

SEQ ID NO: 1741173 - DNA, 15 bp, Homo sapiens
ttaagcacaggtgtt

SEQ ID NO: 1741174 - DNA, 15 bp, Homo sapiens
taagcacaggtgttg

SEQ ID NO: 1741175 - DNA, 15 bp, Homo sapiens
aagcacaggtgttgt

SEQ ID NO: 1741176 - DNA, 15 bp, Homo sapiens
agcacaggtgttgtg

SEQ ID NO: 1741177 - DNA, 15 bp, Homo sapiens
gcacaggtgttgtgg

SEQ ID NO: 1741178 - DNA, 15 bp, Homo sapiens
cacaggtgttgtggg

SEQ ID NO: 1741179 - DNA, 15 bp, Homo sapiens
acaggtgttgtgggt

SEQ ID NO: 1741180 - DNA, 15 bp, Homo sapiens
caggtgttgtgggtt

SEQ ID NO: 1741181 - DNA, 15 bp, Homo sapiens
aggtgttgtgggttt

SEQ ID NO: 1741182 - DNA, 15 bp, Homo sapiens
ggtgttgtgggttta

SEQ ID NO: 1741183 - DNA, 15 bp, Homo sapiens
gtgttgtgggtttat

SEQ ID NO: 1741184 - DNA, 15 bp, Homo sapiens
tgttgtgggtttatt

SEQ ID NO: 1741185 - DNA, 15 bp, Homo sapiens
gttgtgggtttattg

SEQ ID NO: 1741186 - DNA, 15 bp, Homo sapiens
ttgtgggtttattgt

SEQ ID NO: 1741187 - DNA, 15 bp, Homo sapiens
tgtgggtttattgta

SEQ ID NO: 1741188 - DNA, 15 bp, Homo sapiens
gtgggtttattgtaa

SEQ ID NO: 1741189 - DNA, 15 bp, Homo sapiens
tgggtttattgtaat

SEQ ID NO: 1741190 - DNA, 15 bp, Homo sapiens
gggtttattgtaatg

SEQ ID NO: 1741191 - DNA, 15 bp, Homo sapiens
ggtttattgtaatga

SEQ ID NO: 1741192 - DNA, 15 bp, Homo sapiens
gtttattgtaatgaa

SEQ ID NO: 1741193 - DNA, 15 bp, Homo sapiens
tttattgtaatgaaa

SEQ ID NO: 1741194 - DNA, 15 bp, Homo sapiens
ttattgtaatgaaag

SEQ ID NO: 1741195 - DNA, 15 bp, Homo sapiens
tattgtaatgaaagt

SEQ ID NO: 1741196 - DNA, 15 bp, Homo sapiens
attgtaatgaaagta

SEQ ID NO: 1741197 - DNA, 15 bp, Homo sapiens
ttgtaatgaaagtaa

SEQ ID NO: 1741198 - DNA, 15 bp, Homo sapiens
tgtaatgaaagtaag

SEQ ID NO: 1741199 - DNA, 15 bp, Homo sapiens
gtaatgaaagtaagc

SEQ ID NO: 1741200 - DNA, 15 bp, Homo sapiens
taatgaaagtaagcc

SEQ ID NO: 1741201 - DNA, 15 bp, Homo sapiens
aatgaaagtaagcca

SEQ ID NO: 1741202 - DNA, 15 bp, Homo sapiens
atgaaagtaagccaa

SEQ ID NO: 1741203 - DNA, 15 bp, Homo sapiens
tgaaagtaagccaat

SEQ ID NO: 1741204 - DNA, 15 bp, Homo sapiens
gaaagtaagccaatg

SEQ ID NO: 1741205 - DNA, 15 bp, Homo sapiens
aaagtaagccaatgt

SEQ ID NO: 1741206 - DNA, 15 bp, Homo sapiens
aagtaagccaatgta

SEQ ID NO: 1741207 - DNA, 15 bp, Homo sapiens
agtaagccaatgtag

SEQ ID NO: 1741208 - DNA, 15 bp, Homo sapiens
gtaagccaatgtagc

SEQ ID NO: 1741209 - DNA, 15 bp, Homo sapiens
taagccaatgtagct

SEQ ID NO: 1741210 - DNA, 15 bp, Homo sapiens
aagccaatgtagctc

SEQ ID NO: 1741211 - DNA, 15 bp, Homo sapiens
gccaatgtagctcag

SEQ ID NO: 1741212 - DNA, 15 bp, Homo sapiens
ccaatgtagctcagg

SEQ ID NO: 1741213 - DNA, 15 bp, Homo sapiens
caatgtagctcaggc

SEQ ID NO: 1741214 - DNA, 15 bp, Homo sapiens
aatgtagctcaggca

SEQ ID NO: 1741215 - DNA, 15 bp, Homo sapiens
atgtagctcaggcat

SEQ ID NO: 1741216 - DNA, 15 bp, Homo sapiens
tgtagctcaggcata

SEQ ID NO: 1741217 - DNA, 15 bp, Homo sapiens
gtagctcaggcatag

SEQ ID NO: 1741218 - DNA, 15 bp, Homo sapiens
tagctcaggcataga

SEQ ID NO: 1741219 - DNA, 15 bp, Homo sapiens
agctcaggcatagaa

SEQ ID NO: 1741220 - DNA, 15 bp, Homo sapiens
gctcaggcatagaac

SEQ ID NO: 1741221 - DNA, 15 bp, Homo sapiens
ctcaggcatagaacc

SEQ ID NO: 1741222 - DNA, 15 bp, Homo sapiens
tcaggcatagaaccc

SEQ ID NO: 1741223 - DNA, 15 bp, Homo sapiens
caggcatagaaccca

SEQ ID NO: 1741224 - DNA, 15 bp, Homo sapiens
aggcatagaacccac

SEQ ID NO: 1741225 - DNA, 15 bp, Homo sapiens
ggcatagaacccact

SEQ ID NO: 1741226 - DNA, 15 bp, Homo sapiens
gcatagaacccactc

SEQ ID NO: 1741227 - DNA, 15 bp, Homo sapiens
catagaacccactca

SEQ ID NO: 1741228 - DNA, 15 bp, Homo sapiens
atagaacccactcat

SEQ ID NO: 1741229 - DNA, 15 bp, Homo sapiens
tagaacccactcatc

SEQ ID NO: 1741230 - DNA, 15 bp, Homo sapiens
agaacccactcatca

SEQ ID NO: 1741231 - DNA, 15 bp, Homo sapiens
gaacccactcatcat

SEQ ID NO: 1741232 - DNA, 15 bp, Homo sapiens
aacccactcatcatt

SEQ ID NO: 1741233 - DNA, 15 bp, Homo sapiens
acccactcatcattc

SEQ ID NO: 1741234 - DNA, 15 bp, Homo sapiens
cccactcatcattct

SEQ ID NO: 1741235 - DNA, 15 bp, Homo sapiens
ccactcatcattctg

SEQ ID NO: 1741236 - DNA, 15 bp, Homo sapiens
cactcatcattctga

SEQ ID NO: 1741237 - DNA, 15 bp, Homo sapiens
actcatcattctgac

SEQ ID NO: 1741238 - DNA, 15 bp, Homo sapiens
ctcatcattctgacc

SEQ ID NO: 1741239 - DNA, 15 bp, Homo sapiens
tcatcattctgacca

SEQ ID NO: 1741240 - DNA, 15 bp, Homo sapiens
catcattctgaccaa

SEQ ID NO: 1741241 - DNA, 15 bp, Homo sapiens
atcattctgaccaag

SEQ ID NO: 1741242 - DNA, 15 bp, Homo sapiens
tcattctgaccaaga

SEQ ID NO: 1741243 - DNA, 15 bp, Homo sapiens
cattctgaccaagag

SEQ ID NO: 1741244 - DNA, 15 bp, Homo sapiens
attctgaccaagagg

SEQ ID NO: 1741245 - DNA, 15 bp, Homo sapiens
ttctgaccaagaggc

SEQ ID NO: 1741246 - DNA, 15 bp, Homo sapiens
tctgaccaagaggct

SEQ ID NO: 1741247 - DNA, 15 bp, Homo sapiens
ctgaccaagaggcta

SEQ ID NO: 1741248 - DNA, 15 bp, Homo sapiens
tgaccaagaggctaa

SEQ ID NO: 1741249 - DNA, 15 bp, Homo sapiens
gaccaagaggctaag

SEQ ID NO: 1741250 - DNA, 15 bp, Homo sapiens
accaagaggctaagg

SEQ ID NO: 1741251 - DNA, 15 bp, Homo sapiens
ccaagaggctaaggc

SEQ ID NO: 1741252 - DNA, 15 bp, Homo sapiens
caagaggctaaggct

SEQ ID NO: 1741253 - DNA, 15 bp, Homo sapiens
aagaggctaaggctg

SEQ ID NO: 1741254 - DNA, 15 bp, Homo sapiens
agaggctaaggctgg

SEQ ID NO: 1741255 - DNA, 15 bp, Homo sapiens
gaggctaaggctgga

SEQ ID NO: 1741256 - DNA, 15 bp, Homo sapiens
aggctaaggctggag

SEQ ID NO: 1741257 - DNA, 15 bp, Homo sapiens
ggctaaggctggagc

SEQ ID NO: 1741258 - DNA, 15 bp, Homo sapiens
gctaaggctggagcg

SEQ ID NO: 1741259 - DNA, 15 bp, Homo sapiens
ctaaggctggagcgc

SEQ ID NO: 1741260 - DNA, 15 bp, Homo sapiens
taaggctggagcgca

SEQ ID NO: 1741261 - DNA, 15 bp, Homo sapiens
aaggctggagcgcat

SEQ ID NO: 1741262 - DNA, 15 bp, Homo sapiens
aggctggagcgcatg

SEQ ID NO: 1741263 - DNA, 15 bp, Homo sapiens
ggctggagcgcatgc

SEQ ID NO: 1741264 - DNA, 15 bp, Homo sapiens
gctggagcgcatgca

SEQ ID NO: 1741265 - DNA, 15 bp, Homo sapiens
ctggagcgcatgcat

SEQ ID NO: 1741266 - DNA, 15 bp, Homo sapiens
tggagcgcatgcatt

SEQ ID NO: 1741267 - DNA, 15 bp, Homo sapiens
ggagcgcatgcattt

SEQ ID NO: 1741268 - DNA, 15 bp, Homo sapiens
gagcgcatgcatttg

SEQ ID NO: 1741269 - DNA, 15 bp, Homo sapiens
agcgcatgcatttgg

SEQ ID NO: 1741270 - DNA, 15 bp, Homo sapiens
gcgcatgcatttgga

SEQ ID NO: 1741271 - DNA, 15 bp, Homo sapiens
cgcatgcatttggag

SEQ ID NO: 1741272 - DNA, 15 bp, Homo sapiens
gcatgcatttggagc

SEQ ID NO: 1741273 - DNA, 15 bp, Homo sapiens
catgcatttggagct

SEQ ID NO: 1741274 - DNA, 15 bp, Homo sapiens
atgcatttggagctt

SEQ ID NO: 1741275 - DNA, 15 bp, Homo sapiens
tgcatttggagctta

SEQ ID NO: 1741276 - DNA, 15 bp, Homo sapiens
gcatttggagcttaa

SEQ ID NO: 1741277 - DNA, 15 bp, Homo sapiens
catttggagcttaaa

SEQ ID NO: 1741278 - DNA, 15 bp, Homo sapiens
atttggagcttaaaa

SEQ ID NO: 1741279 - DNA, 15 bp, Homo sapiens
tttggagcttaaaac

SEQ ID NO: 1741280 - DNA, 15 bp, Homo sapiens
ttggagcttaaaact

SEQ ID NO: 1741281 - DNA, 15 bp, Homo sapiens
tggagcttaaaacta

SEQ ID NO: 1741282 - DNA, 15 bp, Homo sapiens
ggagcttaaaactac

SEQ ID NO: 1741283 - DNA, 15 bp, Homo sapiens
gagcttaaaactaca

SEQ ID NO: 1741284 - DNA, 15 bp, Homo sapiens
agcttaaaactacag

SEQ ID NO: 1741285 - DNA, 15 bp, Homo sapiens
gcttaaaactacagt

SEQ ID NO: 1741286 - DNA, 15 bp, Homo sapiens
cttaaaactacagtt

SEQ ID NO: 1741287 - DNA, 15 bp, Homo sapiens
ttaaaactacagttg

SEQ ID NO: 1741288 - DNA, 15 bp, Homo sapiens
taaaactacagttgc

SEQ ID NO: 1741289 - DNA, 15 bp, Homo sapiens
aaaactacagttgct

SEQ ID NO: 1741290 - DNA, 15 bp, Homo sapiens
aaactacagttgctt

SEQ ID NO: 1741291 - DNA, 15 bp, Homo sapiens
aactacagttgcttt

SEQ ID NO: 1741292 - DNA, 15 bp, Homo sapiens
actacagttgctttg

SEQ ID NO: 1741293 - DNA, 15 bp, Homo sapiens
ctacagttgctttgt

SEQ ID NO: 1741294 - DNA, 15 bp, Homo sapiens
tacagttgctttgtg

SEQ ID NO: 1741295 - DNA, 15 bp, Homo sapiens
acagttgctttgtgc

SEQ ID NO: 1741296 - DNA, 15 bp, Homo sapiens
cagttgctttgtgct

SEQ ID NO: 1741297 - DNA, 15 bp, Homo sapiens
agttgctttgtgctt

SEQ ID NO: 1741298 - DNA, 15 bp, Homo sapiens
gttgctttgtgcttt

SEQ ID NO: 1741299 - DNA, 15 bp, Homo sapiens
ttgctttgtgctttt

SEQ ID NO: 1741300 - DNA, 15 bp, Homo sapiens
tgctttgtgcttttt

SEQ ID NO: 1741301 - DNA, 15 bp, Homo sapiens
gctttgtgctttttc

SEQ ID NO: 1741302 - DNA, 15 bp, Homo sapiens
ctttgtgctttttct

SEQ ID NO: 1741303 - DNA, 15 bp, Homo sapiens
tttgtgctttttctc

SEQ ID NO: 1741304 - DNA, 15 bp, Homo sapiens
ttgtgctttttctct

SEQ ID NO: 1741305 - DNA, 15 bp, Homo sapiens
tgtgctttttctctc

SEQ ID NO: 1741306 - DNA, 15 bp, Homo sapiens
gtgctttttctctcc

SEQ ID NO: 1741307 - DNA, 15 bp, Homo sapiens
tgctttttctctccc

SEQ ID NO: 1741308 - DNA, 15 bp, Homo sapiens
gctttttctctccca

SEQ ID NO: 1741309 - DNA, 15 bp, Homo sapiens
ctttttctctcccag

SEQ ID NO: 1741310 - DNA, 15 bp, Homo sapiens
tttttctctcccagg

SEQ ID NO: 1741311 - DNA, 15 bp, Homo sapiens
ttttctctcccaggc

SEQ ID NO: 1741312 - DNA, 15 bp, Homo sapiens
tttctctcccaggcc

SEQ ID NO: 1741313 - DNA, 15 bp, Homo sapiens
ttctctcccaggcca

SEQ ID NO: 1741314 - DNA, 15 bp, Homo sapiens
tctctcccaggccac

SEQ ID NO: 1741315 - DNA, 15 bp, Homo sapiens
ctctcccaggccaca

SEQ ID NO: 1741316 - DNA, 15 bp, Homo sapiens
tctcccaggccacag

SEQ ID NO: 1741317 - DNA, 15 bp, Homo sapiens
ctcccaggccacagg

SEQ ID NO: 1741318 - DNA, 15 bp, Homo sapiens
tcccaggccacagga

SEQ ID NO: 1741319 - DNA, 15 bp, Homo sapiens
cccaggccacaggaa

SEQ ID NO: 1741320 - DNA, 15 bp, Homo sapiens
ccaggccacaggaac

SEQ ID NO: 1741321 - DNA, 15 bp, Homo sapiens
caggccacaggaacc

SEQ ID NO: 1741322 - DNA, 15 bp, Homo sapiens
aggccacaggaacca

SEQ ID NO: 1741323 - DNA, 15 bp, Homo sapiens
ggccacaggaaccag

SEQ ID NO: 1741324 - DNA, 15 bp, Homo sapiens
gccacaggaaccagg

SEQ ID NO: 1741325 - DNA, 15 bp, Homo sapiens
ccacaggaaccaggt

SEQ ID NO: 1741326 - DNA, 15 bp, Homo sapiens
cacaggaaccaggtt

SEQ ID NO: 1741327 - DNA, 15 bp, Homo sapiens
acaggaaccaggttg

SEQ ID NO: 1741328 - DNA, 15 bp, Homo sapiens
caggaaccaggttgg

SEQ ID NO: 1741329 - DNA, 15 bp, Homo sapiens
aggaaccaggttggc

SEQ ID NO: 1741330 - DNA, 15 bp, Homo sapiens
ggaaccaggttggct

SEQ ID NO: 1741331 - DNA, 15 bp, Homo sapiens
gaaccaggttggctt

SEQ ID NO: 1741332 - DNA, 15 bp, Homo sapiens
aaccaggttggcttt

SEQ ID NO: 1741333 - DNA, 15 bp, Homo sapiens
accaggttggcttta

SEQ ID NO: 1741334 - DNA, 15 bp, Homo sapiens
ccaggttggctttaa

SEQ ID NO: 1741335 - DNA, 15 bp, Homo sapiens
caggttggctttaat

SEQ ID NO: 1741336 - DNA, 15 bp, Homo sapiens
aggttggctttaatt

SEQ ID NO: 1741337 - DNA, 15 bp, Homo sapiens
ggttggctttaattg

SEQ ID NO: 1741338 - DNA, 15 bp, Homo sapiens
gttggctttaattgc

SEQ ID NO: 1741339 - DNA, 15 bp, Homo sapiens
ttggctttaattgca

SEQ ID NO: 1741340 - DNA, 15 bp, Homo sapiens
tggctttaattgcac

SEQ ID NO: 1741341 - DNA, 15 bp, Homo sapiens
ggctttaattgcaca

SEQ ID NO: 1741342 - DNA, 15 bp, Homo sapiens
gctttaattgcacag

SEQ ID NO: 1741343 - DNA, 15 bp, Homo sapiens
ctttaattgcacaga

SEQ ID NO: 1741344 - DNA, 15 bp, Homo sapiens
tttaattgcacagaa

SEQ ID NO: 1741345 - DNA, 15 bp, Homo sapiens
ttaattgcacagaat

SEQ ID NO: 1741346 - DNA, 15 bp, Homo sapiens
taattgcacagaata

SEQ ID NO: 1741347 - DNA, 15 bp, Homo sapiens
aattgcacagaatat

SEQ ID NO: 1741348 - DNA, 15 bp, Homo sapiens
attgcacagaatata

SEQ ID NO: 1741349 - DNA, 15 bp, Homo sapiens
ttgcacagaatatag

SEQ ID NO: 1741350 - DNA, 15 bp, Homo sapiens
tgcacagaatatagc

SEQ ID NO: 1741351 - DNA, 15 bp, Homo sapiens
gcacagaatatagct

SEQ ID NO: 1741352 - DNA, 15 bp, Homo sapiens
cacagaatatagcta

SEQ ID NO: 1741353 - DNA, 15 bp, Homo sapiens
acagaatatagctaa

SEQ ID NO: 1741354 - DNA, 15 bp, Homo sapiens
cagaatatagctaac

SEQ ID NO: 1741355 - DNA, 15 bp, Homo sapiens
agaatatagctaacc

SEQ ID NO: 1741356 - DNA, 15 bp, Homo sapiens
gaatatagctaacct

SEQ ID NO: 1741357 - DNA, 15 bp, Homo sapiens
aatatagctaacctt

SEQ ID NO: 1741358 - DNA, 15 bp, Homo sapiens
atatagctaaccttg

SEQ ID NO: 1741359 - DNA, 15 bp, Homo sapiens
tatagctaaccttgg

SEQ ID NO: 1741360 - DNA, 15 bp, Homo sapiens
atagctaaccttgga

SEQ ID NO: 1741361 - DNA, 15 bp, Homo sapiens
tagctaaccttggaa

SEQ ID NO: 1741362 - DNA, 15 bp, Homo sapiens
agctaaccttggaac

SEQ ID NO: 1741363 - DNA, 15 bp, Homo sapiens
gctaaccttggaact

SEQ ID NO: 1741364 - DNA, 15 bp, Homo sapiens
ctaaccttggaactg

SEQ ID NO: 1741365 - DNA, 15 bp, Homo sapiens
taaccttggaactgg

SEQ ID NO: 1741366 - DNA, 15 bp, Homo sapiens
aaccttggaactggt

SEQ ID NO: 1741367 - DNA, 15 bp, Homo sapiens
accttggaactggta

SEQ ID NO: 1741368 - DNA, 15 bp, Homo sapiens
ccttggaactggtat

SEQ ID NO: 1741369 - DNA, 15 bp, Homo sapiens
cttggaactggtatt

SEQ ID NO: 1741370 - DNA, 15 bp, Homo sapiens
ttggaactggtatta

SEQ ID NO: 1741371 - DNA, 15 bp, Homo sapiens
tggaactggtattat

SEQ ID NO: 1741372 - DNA, 15 bp, Homo sapiens
ggaactggtattatc

SEQ ID NO: 1741373 - DNA, 15 bp, Homo sapiens
gaactggtattatca

SEQ ID NO: 1741374 - DNA, 15 bp, Homo sapiens
aactggtattatcat

SEQ ID NO: 1741375 - DNA, 15 bp, Homo sapiens
actggtattatcata

SEQ ID NO: 1741376 - DNA, 15 bp, Homo sapiens
ctggtattatcatat

SEQ ID NO: 1741377 - DNA, 15 bp, Homo sapiens
tggtattatcatatc

SEQ ID NO: 1741378 - DNA, 15 bp, Homo sapiens
ggtattatcatatca

SEQ ID NO: 1741379 - DNA, 15 bp, Homo sapiens
gtattatcatatcat

SEQ ID NO: 1741380 - DNA, 15 bp, Homo sapiens
tattatcatatcatt

SEQ ID NO: 1741381 - DNA, 15 bp, Homo sapiens
attatcatatcattt

SEQ ID NO: 1741382 - DNA, 15 bp, Homo sapiens
ttatcatatcattta

SEQ ID NO: 1741383 - DNA, 15 bp, Homo sapiens
tatcatatcatttat

SEQ ID NO: 1741384 - DNA, 15 bp, Homo sapiens
atcatatcatttatc

SEQ ID NO: 1741385 - DNA, 15 bp, Homo sapiens
tcatatcatttatct

SEQ ID NO: 1741386 - DNA, 15 bp, Homo sapiens
catatcatttatcta

SEQ ID NO: 1741387 - DNA, 15 bp, Homo sapiens
atatcatttatctac

SEQ ID NO: 1741388 - DNA, 15 bp, Homo sapiens
tatcatttatctacg

SEQ ID NO: 1741389 - DNA, 15 bp, Homo sapiens
atcatttatctacgg

SEQ ID NO: 1741390 - DNA, 15 bp, Homo sapiens
tcatttatctacggt

SEQ ID NO: 1741391 - DNA, 15 bp, Homo sapiens
catttatctacggtt

SEQ ID NO: 1741392 - DNA, 15 bp, Homo sapiens
atttatctacggttg

SEQ ID NO: 1741393 - DNA, 15 bp, Homo sapiens
tttatctacggttgg

SEQ ID NO: 1741394 - DNA, 15 bp, Homo sapiens
ttatctacggttggc

SEQ ID NO: 1741395 - DNA, 15 bp, Homo sapiens
tatctacggttggca

SEQ ID NO: 1741396 - DNA, 15 bp, Homo sapiens
atctacggttggcag

SEQ ID NO: 1741397 - DNA, 15 bp, Homo sapiens
tctacggttggcagt

SEQ ID NO: 1741398 - DNA, 15 bp, Homo sapiens
ctacggttggcagtt

SEQ ID NO: 1741399 - DNA, 15 bp, Homo sapiens
tacggttggcagtta

SEQ ID NO: 1741400 - DNA, 15 bp, Homo sapiens
acggttggcagttaa

SEQ ID NO: 1741401 - DNA, 15 bp, Homo sapiens
cggttggcagttaac

SEQ ID NO: 1741402 - DNA, 15 bp, Homo sapiens
ggttggcagttaacc

SEQ ID NO: 1741403 - DNA, 15 bp, Homo sapiens
gttggcagttaaccc

SEQ ID NO: 1741404 - DNA, 15 bp, Homo sapiens
ttggcagttaaccct

SEQ ID NO: 1741405 - DNA, 15 bp, Homo sapiens
tggcagttaacccta

SEQ ID NO: 1741406 - DNA, 15 bp, Homo sapiens
ggcagttaaccctat

SEQ ID NO: 1741407 - DNA, 15 bp, Homo sapiens
gcagttaaccctatt

SEQ ID NO: 1741408 - DNA, 15 bp, Homo sapiens
cagttaaccctattg

SEQ ID NO: 1741409 - DNA, 15 bp, Homo sapiens
agttaaccctattgc

SEQ ID NO: 1741410 - DNA, 15 bp, Homo sapiens
gttaaccctattgct

SEQ ID NO: 1741411 - DNA, 15 bp, Homo sapiens
ttaaccctattgcta

SEQ ID NO: 1741412 - DNA, 15 bp, Homo sapiens
taaccctattgctat

SEQ ID NO: 1741413 - DNA, 15 bp, Homo sapiens
aaccctattgctatt

SEQ ID NO: 1741414 - DNA, 15 bp, Homo sapiens
accctattgctatta

SEQ ID NO: 1741415 - DNA, 15 bp, Homo sapiens
ccctattgctattag

SEQ ID NO: 1741416 - DNA, 15 bp, Homo sapiens
cctattgctattagc

SEQ ID NO: 1741417 - DNA, 15 bp, Homo sapiens
ctattgctattagca

SEQ ID NO: 1741418 - DNA, 15 bp, Homo sapiens
tattgctattagcag

SEQ ID NO: 1741419 - DNA, 15 bp, Homo sapiens
attgctattagcagt

SEQ ID NO: 1741420 - DNA, 15 bp, Homo sapiens
ttgctattagcagtt

SEQ ID NO: 1741421 - DNA, 15 bp, Homo sapiens
tgctattagcagttg

SEQ ID NO: 1741422 - DNA, 15 bp, Homo sapiens
gctattagcagttgt

SEQ ID NO: 1741423 - DNA, 15 bp, Homo sapiens
ctattagcagttgtt

SEQ ID NO: 1741424 - DNA, 15 bp, Homo sapiens
tattagcagttgttc

SEQ ID NO: 1741425 - DNA, 15 bp, Homo sapiens
attagcagttgttcc

SEQ ID NO: 1741426 - DNA, 15 bp, Homo sapiens
ttagcagttgttcca

SEQ ID NO: 1741427 - DNA, 15 bp, Homo sapiens
tagcagttgttccaa

SEQ ID NO: 1741428 - DNA, 15 bp, Homo sapiens
agcagttgttccaat

SEQ ID NO: 1741429 - DNA, 15 bp, Homo sapiens
gcagttgttccaatt

SEQ ID NO: 1741430 - DNA, 15 bp, Homo sapiens
cagttgttccaatta

SEQ ID NO: 1741431 - DNA, 15 bp, Homo sapiens
agttgttccaattat

SEQ ID NO: 1741432 - DNA, 15 bp, Homo sapiens
gttgttccaattatt

SEQ ID NO: 1741433 - DNA, 15 bp, Homo sapiens
ttgttccaattattg

SEQ ID NO: 1741434 - DNA, 15 bp, Homo sapiens
tgttccaattattgc

SEQ ID NO: 1741435 - DNA, 15 bp, Homo sapiens
gttccaattattgct

SEQ ID NO: 1741436 - DNA, 15 bp, Homo sapiens
ttccaattattgctg

SEQ ID NO: 1741437 - DNA, 15 bp, Homo sapiens
tccaattattgctgt

SEQ ID NO: 1741438 - DNA, 15 bp, Homo sapiens
ccaattattgctgtg

SEQ ID NO: 1741439 - DNA, 15 bp, Homo sapiens
caattattgctgtgt

SEQ ID NO: 1741440 - DNA, 15 bp, Homo sapiens
aattattgctgtgtc

SEQ ID NO: 1741441 - DNA, 15 bp, Homo sapiens
attattgctgtgtca

SEQ ID NO: 1741442 - DNA, 15 bp, Homo sapiens
ttattgctgtgtcag

SEQ ID NO: 1741443 - DNA, 15 bp, Homo sapiens
tattgctgtgtcagg

SEQ ID NO: 1741444 - DNA, 15 bp, Homo sapiens
attgctgtgtcagga

SEQ ID NO: 1741445 - DNA, 15 bp, Homo sapiens
ttgctgtgtcaggaa

SEQ ID NO: 1741446 - DNA, 15 bp, Homo sapiens
tgctgtgtcaggaat

SEQ ID NO: 1741447 - DNA, 15 bp, Homo sapiens
gctgtgtcaggaatt

SEQ ID NO: 1741448 - DNA, 15 bp, Homo sapiens
ctgtgtcaggaattg

SEQ ID NO: 1741449 - DNA, 15 bp, Homo sapiens
tgtgtcaggaattgt

SEQ ID NO: 1741450 - DNA, 15 bp, Homo sapiens
gtcaggaattgttga

SEQ ID NO: 1741451 - DNA, 15 bp, Homo sapiens
tcaggaattgttgaa

SEQ ID NO: 1741452 - DNA, 15 bp, Homo sapiens
caggaattgttgaaa

SEQ ID NO: 1741453 - DNA, 15 bp, Homo sapiens
aggaattgttgaaat

SEQ ID NO: 1741454 - DNA, 15 bp, Homo sapiens
ggaattgttgaaatg

SEQ ID NO: 1741455 - DNA, 15 bp, Homo sapiens
gaattgttgaaatga

SEQ ID NO: 1741456 - DNA, 15 bp, Homo sapiens
aattgttgaaatgaa

SEQ ID NO: 1741457 - DNA, 15 bp, Homo sapiens
attgttgaaatgaaa

SEQ ID NO: 1741458 - DNA, 15 bp, Homo sapiens
ttgttgaaatgaaat

SEQ ID NO: 1741459 - DNA, 15 bp, Homo sapiens
tgttgaaatgaaatt

SEQ ID NO: 1741460 - DNA, 15 bp, Homo sapiens
gttgaaatgaaattg

SEQ ID NO: 1741461 - DNA, 15 bp, Homo sapiens
ttgaaatgaaattgt

SEQ ID NO: 1741462 - DNA, 15 bp, Homo sapiens
tgaaatgaaattgtt

SEQ ID NO: 1741463 - DNA, 15 bp, Homo sapiens
gaaatgaaattgttg

SEQ ID NO: 1741464 - DNA, 15 bp, Homo sapiens
aaatgaaattgttgg

SEQ ID NO: 1741465 - DNA, 15 bp, Homo sapiens
aatgaaattgttggc

SEQ ID NO: 1741466 - DNA, 15 bp, Homo sapiens
atgaaattgttggct

SEQ ID NO: 1741467 - DNA, 15 bp, Homo sapiens
tgaaattgttggctg

SEQ ID NO: 1741468 - DNA, 15 bp, Homo sapiens
gaaattgttggctgg

SEQ ID NO: 1741469 - DNA, 15 bp, Homo sapiens
aaattgttggctgga

SEQ ID NO: 1741470 - DNA, 15 bp, Homo sapiens
aattgttggctggaa

SEQ ID NO: 1741471 - DNA, 15 bp, Homo sapiens
attgttggctggaaa

SEQ ID NO: 1741472 - DNA, 15 bp, Homo sapiens
ttgttggctggaaat

SEQ ID NO: 1741473 - DNA, 15 bp, Homo sapiens
tgttggctggaaatg

SEQ ID NO: 1741474 - DNA, 15 bp, Homo sapiens
gttggctggaaatgc

SEQ ID NO: 1741475 - DNA, 15 bp, Homo sapiens
ttggctggaaatgcc

SEQ ID NO: 1741476 - DNA, 15 bp, Homo sapiens
tggctggaaatgcca

SEQ ID NO: 1741477 - DNA, 15 bp, Homo sapiens
ggctggaaatgccaa

SEQ ID NO: 1741478 - DNA, 15 bp, Homo sapiens
gctggaaatgccaaa

SEQ ID NO: 1741479 - DNA, 15 bp, Homo sapiens
ctggaaatgccaaaa

SEQ ID NO: 1741480 - DNA, 15 bp, Homo sapiens
tggaaatgccaaaag

SEQ ID NO: 1741481 - DNA, 15 bp, Homo sapiens
ggaaatgccaaaaga

SEQ ID NO: 1741482 - DNA, 15 bp, Homo sapiens
gaaatgccaaaagag

SEQ ID NO: 1741483 - DNA, 15 bp, Homo sapiens
aaatgccaaaagaga

SEQ ID NO: 1741484 - DNA, 15 bp, Homo sapiens
aatgccaaaagagat

SEQ ID NO: 1741485 - DNA, 15 bp, Homo sapiens
atgccaaaagagata

SEQ ID NO: 1741486 - DNA, 15 bp, Homo sapiens
tgccaaaagagataa

SEQ ID NO: 1741487 - DNA, 15 bp, Homo sapiens
gccaaaagagataaa

SEQ ID NO: 1741488 - DNA, 15 bp, Homo sapiens
ccaaaagagataaaa

SEQ ID NO: 1741489 - DNA, 15 bp, Homo sapiens
caaaagagataaaaa

SEQ ID NO: 1741490 - DNA, 15 bp, Homo sapiens
aaaagagataaaaaa

SEQ ID NO: 1741491 - DNA, 15 bp, Homo sapiens
aaagagataaaaaag

SEQ ID NO: 1741492 - DNA, 15 bp, Homo sapiens
aagagataaaaaaga

SEQ ID NO: 1741493 - DNA, 15 bp, Homo sapiens
agagataaaaaagaa

SEQ ID NO: 1741494 - DNA, 15 bp, Homo sapiens
gagataaaaaagaac

SEQ ID NO: 1741495 - DNA, 15 bp, Homo sapiens
agataaaaaagaact

SEQ ID NO: 1741496 - DNA, 15 bp, Homo sapiens
gataaaaaagaactg

SEQ ID NO: 1741497 - DNA, 15 bp, Homo sapiens
ataaaaaagaactgg

SEQ ID NO: 1741498 - DNA, 15 bp, Homo sapiens
taaaaaagaactgga

SEQ ID NO: 1741499 - DNA, 15 bp, Homo sapiens
aaaaaagaactggaa

SEQ ID NO: 1741500 - DNA, 15 bp, Homo sapiens
aaaaagaactggaag

SEQ ID NO: 1741501 - DNA, 15 bp, Homo sapiens
aaaagaactggaagc

SEQ ID NO: 1741502 - DNA, 15 bp, Homo sapiens
aaagaactggaagct

SEQ ID NO: 1741503 - DNA, 15 bp, Homo sapiens
aagaactggaagctg

SEQ ID NO: 1741504 - DNA, 15 bp, Homo sapiens
agaactggaagctgc

SEQ ID NO: 1741505 - DNA, 15 bp, Homo sapiens
gaactggaagctgct

SEQ ID NO: 1741506 - DNA, 15 bp, Homo sapiens
aactggaagctgctg

SEQ ID NO: 1741507 - DNA, 15 bp, Homo sapiens
actggaagctgctgg

SEQ ID NO: 1741508 - DNA, 15 bp, Homo sapiens
ctggaagctgctgga

SEQ ID NO: 1741509 - DNA, 15 bp, Homo sapiens
tggaagctgctggaa

SEQ ID NO: 1741510 - DNA, 15 bp, Homo sapiens
ggaagctgctggaaa

SEQ ID NO: 1741511 - DNA, 15 bp, Homo sapiens
gaagctgctggaaag

SEQ ID NO: 1741512 - DNA, 15 bp, Homo sapiens
aagctgctggaaagg

SEQ ID NO: 1741513 - DNA, 15 bp, Homo sapiens
agctgctggaaaggt

SEQ ID NO: 1741514 - DNA, 15 bp, Homo sapiens
gctgctggaaaggta

SEQ ID NO: 1741515 - DNA, 15 bp, Homo sapiens
ctgctggaaaggtag

SEQ ID NO: 1741516 - DNA, 15 bp, Homo sapiens
tgctggaaaggtagg

SEQ ID NO: 1741517 - DNA, 15 bp, Homo sapiens
gctggaaaggtaggt

SEQ ID NO: 1741518 - DNA, 15 bp, Homo sapiens
ctggaaaggtaggtc

SEQ ID NO: 1741519 - DNA, 15 bp, Homo sapiens
tggaaaggtaggtca

SEQ ID NO: 1741520 - DNA, 15 bp, Homo sapiens
ggaaaggtaggtcaa

SEQ ID NO: 1741521 - DNA, 15 bp, Homo sapiens
gaaaggtaggtcaaa

SEQ ID NO: 1741522 - DNA, 15 bp, Homo sapiens
aaaggtaggtcaaat

SEQ ID NO: 1741523 - DNA, 15 bp, Homo sapiens
aaggtaggtcaaata

SEQ ID NO: 1741524 - DNA, 15 bp, Homo sapiens
aggtaggtcaaataa

SEQ ID NO: 1741525 - DNA, 15 bp, Homo sapiens
ggtaggtcaaataag

SEQ ID NO: 1741526 - DNA, 15 bp, Homo sapiens
gtaggtcaaataaga

SEQ ID NO: 1741527 - DNA, 15 bp, Homo sapiens
taggtcaaataagat

SEQ ID NO: 1741528 - DNA, 15 bp, Homo sapiens
aggtcaaataagatt

SEQ ID NO: 1741529 - DNA, 15 bp, Homo sapiens
ggtcaaataagattt

SEQ ID NO: 1741530 - DNA, 15 bp, Homo sapiens
gtcaaataagatttc

SEQ ID NO: 1741531 - DNA, 15 bp, Homo sapiens
tcaaataagatttca

SEQ ID NO: 1741532 - DNA, 15 bp, Homo sapiens
caaataagatttcaa

SEQ ID NO: 1741533 - DNA, 15 bp, Homo sapiens
aaataagatttcaat

SEQ ID NO: 1741534 - DNA, 15 bp, Homo sapiens
aataagatttcaatt

SEQ ID NO: 1741535 - DNA, 15 bp, Homo sapiens
ataagatttcaattg

SEQ ID NO: 1741536 - DNA, 15 bp, Homo sapiens
taagatttcaattgg

SEQ ID NO: 1741537 - DNA, 15 bp, Homo sapiens
aagatttcaattggt

SEQ ID NO: 1741538 - DNA, 15 bp, Homo sapiens
agatttcaattggtg

SEQ ID NO: 1741539 - DNA, 15 bp, Homo sapiens
gatttcaattggtgt

SEQ ID NO: 1741540 - DNA, 15 bp, Homo sapiens
atttcaattggtgtt

SEQ ID NO: 1741541 - DNA, 15 bp, Homo sapiens
tttcaattggtgtta

SEQ ID NO: 1741542 - DNA, 15 bp, Homo sapiens
ttcaattggtgttaa

SEQ ID NO: 1741543 - DNA, 15 bp, Homo sapiens
tcaattggtgttaag

SEQ ID NO: 1741544 - DNA, 15 bp, Homo sapiens
caattggtgttaagt

SEQ ID NO: 1741545 - DNA, 15 bp, Homo sapiens
aattggtgttaagtg

SEQ ID NO: 1741546 - DNA, 15 bp, Homo sapiens
attggtgttaagtgt

SEQ ID NO: 1741547 - DNA, 15 bp, Homo sapiens
ttggtgttaagtgtt

SEQ ID NO: 1741548 - DNA, 15 bp, Homo sapiens
tggtgttaagtgttg

SEQ ID NO: 1741549 - DNA, 15 bp, Homo sapiens
ggtgttaagtgttgt

SEQ ID NO: 1741550 - DNA, 15 bp, Homo sapiens
gtgttaagtgttgtt

SEQ ID NO: 1741551 - DNA, 15 bp, Homo sapiens
tgttaagtgttgttt

SEQ ID NO: 1741552 - DNA, 15 bp, Homo sapiens
gttaagtgttgtttt

SEQ ID NO: 1741553 - DNA, 15 bp, Homo sapiens
ttaagtgttgttttt

SEQ ID NO: 1741554 - DNA, 15 bp, Homo sapiens
taagtgttgttttta

SEQ ID NO: 1741555 - DNA, 15 bp, Homo sapiens
aagtgttgtttttag

SEQ ID NO: 1741556 - DNA, 15 bp, Homo sapiens
agtgttgtttttaga

SEQ ID NO: 1741557 - DNA, 15 bp, Homo sapiens
gtgttgtttttagac

SEQ ID NO: 1741558 - DNA, 15 bp, Homo sapiens
tgttgtttttagaca

SEQ ID NO: 1741559 - DNA, 15 bp, Homo sapiens
gttgtttttagacat

SEQ ID NO: 1741560 - DNA, 15 bp, Homo sapiens
ttgtttttagacatg

SEQ ID NO: 1741561 - DNA, 15 bp, Homo sapiens
tgtttttagacatgt

SEQ ID NO: 1741562 - DNA, 15 bp, Homo sapiens
gtttttagacatgtg

SEQ ID NO: 1741563 - DNA, 15 bp, Homo sapiens
tttttagacatgtgt

SEQ ID NO: 1741564 - DNA, 15 bp, Homo sapiens
ttttagacatgtgtt

SEQ ID NO: 1741565 - DNA, 15 bp, Homo sapiens
tttagacatgtgttt

SEQ ID NO: 1741566 - DNA, 15 bp, Homo sapiens
ttagacatgtgtttt

SEQ ID NO: 1741567 - DNA, 15 bp, Homo sapiens
tagacatgtgtttta

SEQ ID NO: 1741568 - DNA, 15 bp, Homo sapiens
agacatgtgttttat

SEQ ID NO: 1741569 - DNA, 15 bp, Homo sapiens
gacatgtgttttatt

SEQ ID NO: 1741570 - DNA, 15 bp, Homo sapiens
acatgtgttttattt

SEQ ID NO: 1741571 - DNA, 15 bp, Homo sapiens
catgtgttttatttg

SEQ ID NO: 1741572 - DNA, 15 bp, Homo sapiens
atgtgttttatttga

SEQ ID NO: 1741573 - DNA, 15 bp, Homo sapiens
tgtgttttatttgaa

SEQ ID NO: 1741574 - DNA, 15 bp, Homo sapiens
gtgttttatttgaat

SEQ ID NO: 1741575 - DNA, 15 bp, Homo sapiens
tgttttatttgaatt

SEQ ID NO: 1741576 - DNA, 15 bp, Homo sapiens
gttttatttgaatta

SEQ ID NO: 1741577 - DNA, 15 bp, Homo sapiens
ttttatttgaattat

SEQ ID NO: 1741578 - DNA, 15 bp, Homo sapiens
tttatttgaattatt

SEQ ID NO: 1741579 - DNA, 15 bp, Homo sapiens
ttatttgaattattt

SEQ ID NO: 1741580 - DNA, 15 bp, Homo sapiens
tatttgaattattta

SEQ ID NO: 1741581 - DNA, 15 bp, Homo sapiens
atttgaattatttat

SEQ ID NO: 1741582 - DNA, 15 bp, Homo sapiens
tttgaattatttatc

SEQ ID NO: 1741583 - DNA, 15 bp, Homo sapiens
ttgaattatttatca

SEQ ID NO: 1741584 - DNA, 15 bp, Homo sapiens
tgaattatttatcat

SEQ ID NO: 1741585 - DNA, 15 bp, Homo sapiens
gaattatttatcatg

SEQ ID NO: 1741586 - DNA, 15 bp, Homo sapiens
aattatttatcatga

SEQ ID NO: 1741587 - DNA, 15 bp, Homo sapiens
attatttatcatgat

SEQ ID NO: 1741588 - DNA, 15 bp, Homo sapiens
ttatttatcatgata

SEQ ID NO: 1741589 - DNA, 15 bp, Homo sapiens
tatttatcatgatat

SEQ ID NO: 1741590 - DNA, 15 bp, Homo sapiens
atttatcatgatatg

SEQ ID NO: 1741591 - DNA, 15 bp, Homo sapiens
tttatcatgatatgc

SEQ ID NO: 1741592 - DNA, 15 bp, Homo sapiens
ttatcatgatatgca

SEQ ID NO: 1741593 - DNA, 15 bp, Homo sapiens
tatcatgatatgcag

SEQ ID NO: 1741594 - DNA, 15 bp, Homo sapiens
atcatgatatgcagg

SEQ ID NO: 1741595 - DNA, 15 bp, Homo sapiens
tcatgatatgcaggc

SEQ ID NO: 1741596 - DNA, 15 bp, Homo sapiens
catgatatgcaggct

SEQ ID NO: 1741597 - DNA, 15 bp, Homo sapiens
atgatatgcaggctt

SEQ ID NO: 1741598 - DNA, 15 bp, Homo sapiens
tgatatgcaggcttt

SEQ ID NO: 1741599 - DNA, 15 bp, Homo sapiens
gatatgcaggcttta

SEQ ID NO: 1741600 - DNA, 15 bp, Homo sapiens
atatgcaggctttaa

SEQ ID NO: 1741601 - DNA, 15 bp, Homo sapiens
tatgcaggctttaat

SEQ ID NO: 1741602 - DNA, 15 bp, Homo sapiens
atgcaggctttaata

SEQ ID NO: 1741603 - DNA, 15 bp, Homo sapiens
tgcaggctttaataa

SEQ ID NO: 1741604 - DNA, 15 bp, Homo sapiens
gcaggctttaataat

SEQ ID NO: 1741605 - DNA, 15 bp, Homo sapiens
caggctttaataatt

SEQ ID NO: 1741606 - DNA, 15 bp, Homo sapiens
aggctttaataatta

SEQ ID NO: 1741607 - DNA, 15 bp, Homo sapiens
ggctttaataattaa

SEQ ID NO: 1741608 - DNA, 15 bp, Homo sapiens
gctttaataattaaa

SEQ ID NO: 1741609 - DNA, 15 bp, Homo sapiens
ctttaataattaaat

SEQ ID NO: 1741610 - DNA, 15 bp, Homo sapiens
tttaataattaaatg

SEQ ID NO: 1741611 - DNA, 15 bp, Homo sapiens
ttaataattaaatgt

SEQ ID NO: 1741612 - DNA, 15 bp, Homo sapiens
taataattaaatgtt

SEQ ID NO: 1741613 - DNA, 15 bp, Homo sapiens
aataattaaatgttt

SEQ ID NO: 1741614 - DNA, 15 bp, Homo sapiens
ataattaaatgtttg

SEQ ID NO: 1741615 - DNA, 15 bp, Homo sapiens
taattaaatgtttgt

SEQ ID NO: 1741616 - DNA, 15 bp, Homo sapiens
aattaaatgtttgtg

SEQ ID NO: 1741617 - DNA, 15 bp, Homo sapiens
attaaatgtttgtgc

SEQ ID NO: 1741618 - DNA, 15 bp, Homo sapiens
ttaaatgtttgtgcc

SEQ ID NO: 1741619 - DNA, 15 bp, Homo sapiens
taaatgtttgtgccc

SEQ ID NO: 1741620 - DNA, 15 bp, Homo sapiens
aaatgtttgtgccca

SEQ ID NO: 1741621 - DNA, 15 bp, Homo sapiens
aatgtttgtgcccac

SEQ ID NO: 1741622 - DNA, 15 bp, Homo sapiens
atgtttgtgcccact

SEQ ID NO: 1741623 - DNA, 15 bp, Homo sapiens
tgtttgtgcccacta

SEQ ID NO: 1741624 - DNA, 15 bp, Homo sapiens
gtttgtgcccactac

SEQ ID NO: 1741625 - DNA, 15 bp, Homo sapiens
tttgtgcccactaca

SEQ ID NO: 1741626 - DNA, 15 bp, Homo sapiens
ttgtgcccactacaa

SEQ ID NO: 1741627 - DNA, 15 bp, Homo sapiens
tgtgcccactacaac

SEQ ID NO: 1741628 - DNA, 15 bp, Homo sapiens
gtgcccactacaact

SEQ ID NO: 1741629 - DNA, 15 bp, Homo sapiens
tgcccactacaacta

SEQ ID NO: 1741630 - DNA, 15 bp, Homo sapiens
gcccactacaactaa

SEQ ID NO: 1741631 - DNA, 15 bp, Homo sapiens
cccactacaactaat

SEQ ID NO: 1741632 - DNA, 15 bp, Homo sapiens
ccactacaactaata

SEQ ID NO: 1741633 - DNA, 15 bp, Homo sapiens
cactacaactaataa

SEQ ID NO: 1741634 - DNA, 15 bp, Homo sapiens
actacaactaataat

SEQ ID NO: 1741635 - DNA, 15 bp, Homo sapiens
ctacaactaataatt

SEQ ID NO: 1741636 - DNA, 15 bp, Homo sapiens
tacaactaataattg

SEQ ID NO: 1741637 - DNA, 15 bp, Homo sapiens
acaactaataattgt

SEQ ID NO: 1741638 - DNA, 15 bp, Homo sapiens
caactaataattgtc

SEQ ID NO: 1741639 - DNA, 15 bp, Homo sapiens
aactaataattgtca

SEQ ID NO: 1741640 - DNA, 15 bp, Homo sapiens
actaataattgtcaa

SEQ ID NO: 1741641 - DNA, 15 bp, Homo sapiens
ctaataattgtcaat

SEQ ID NO: 1741642 - DNA, 15 bp, Homo sapiens
taataattgtcaatt

SEQ ID NO: 1741643 - DNA, 15 bp, Homo sapiens
aataattgtcaattg

SEQ ID NO: 1741644 - DNA, 15 bp, Homo sapiens
ataattgtcaattgt

SEQ ID NO: 1741645 - DNA, 15 bp, Homo sapiens
taattgtcaattgtg

SEQ ID NO: 1741646 - DNA, 15 bp, Homo sapiens
aattgtcaattgtgt

SEQ ID NO: 1741647 - DNA, 15 bp, Homo sapiens
attgtcaattgtgta

SEQ ID NO: 1741648 - DNA, 15 bp, Homo sapiens
ttgtcaattgtgtat

SEQ ID NO: 1741649 - DNA, 15 bp, Homo sapiens
tgtcaattgtgtatg

SEQ ID NO: 1741650 - DNA, 15 bp, Homo sapiens
gtcaattgtgtatga

SEQ ID NO: 1741651 - DNA, 15 bp, Homo sapiens
tcaattgtgtatgaa

SEQ ID NO: 1741652 - DNA, 15 bp, Homo sapiens
caattgtgtatgaaa

SEQ ID NO: 1741653 - DNA, 15 bp, Homo sapiens
aattgtgtatgaaat

SEQ ID NO: 1741654 - DNA, 15 bp, Homo sapiens
attgtgtatgaaata

SEQ ID NO: 1741655 - DNA, 15 bp, Homo sapiens
ttgtgtatgaaatat

SEQ ID NO: 1741656 - DNA, 15 bp, Homo sapiens
tgtgtatgaaatatt

SEQ ID NO: 1741657 - DNA, 15 bp, Homo sapiens
gtgtatgaaatattt

SEQ ID NO: 1741658 - DNA, 15 bp, Homo sapiens
tgtatgaaatatttt

SEQ ID NO: 1741659 - DNA, 15 bp, Homo sapiens
gtatgaaatatttta

SEQ ID NO: 1741660 - DNA, 15 bp, Homo sapiens
tatgaaatattttac

SEQ ID NO: 1741661 - DNA, 15 bp, Homo sapiens
atgaaatattttact

SEQ ID NO: 1741662 - DNA, 15 bp, Homo sapiens
tgaaatattttactg

SEQ ID NO: 1741663 - DNA, 15 bp, Homo sapiens
gaaatattttactgt

SEQ ID NO: 1741664 - DNA, 15 bp, Homo sapiens
aaatattttactgta

SEQ ID NO: 1741665 - DNA, 15 bp, Homo sapiens
aatattttactgtat

SEQ ID NO: 1741666 - DNA, 15 bp, Homo sapiens
atattttactgtatt

SEQ ID NO: 1741667 - DNA, 15 bp, Homo sapiens
tattttactgtatta

SEQ ID NO: 1741668 - DNA, 15 bp, Homo sapiens
attttactgtattaa

SEQ ID NO: 1741669 - DNA, 15 bp, Homo sapiens
ttttactgtattaat

SEQ ID NO: 1741670 - DNA, 15 bp, Homo sapiens
tttactgtattaatg

SEQ ID NO: 1741671 - DNA, 15 bp, Homo sapiens
ttactgtattaatgt

SEQ ID NO: 1741672 - DNA, 15 bp, Homo sapiens
tactgtattaatgtc

SEQ ID NO: 1741673 - DNA, 15 bp, Homo sapiens
actgtattaatgtct

SEQ ID NO: 1741674 - DNA, 15 bp, Homo sapiens
ctgtattaatgtcta

SEQ ID NO: 1741675 - DNA, 15 bp, Homo sapiens
tgtattaatgtctag

SEQ ID NO: 1741676 - DNA, 15 bp, Homo sapiens
gtattaatgtctaga

SEQ ID NO: 1741677 - DNA, 15 bp, Homo sapiens
tattaatgtctagaa

SEQ ID NO: 1741678 - DNA, 15 bp, Homo sapiens
attaatgtctagaac

SEQ ID NO: 1741679 - DNA, 15 bp, Homo sapiens
ttaatgtctagaact

SEQ ID NO: 1741680 - DNA, 15 bp, Homo sapiens
taatgtctagaactt

SEQ ID NO: 1741681 - DNA, 15 bp, Homo sapiens
aatgtctagaactta

SEQ ID NO: 1741682 - DNA, 15 bp, Homo sapiens
atgtctagaacttaa

SEQ ID NO: 1741683 - DNA, 15 bp, Homo sapiens
tgtctagaacttaaa

SEQ ID NO: 1741684 - DNA, 15 bp, Homo sapiens
gtctagaacttaaat

SEQ ID NO: 1741685 - DNA, 15 bp, Homo sapiens
tctagaacttaaata

SEQ ID NO: 1741686 - DNA, 15 bp, Homo sapiens
ctagaacttaaatat

SEQ ID NO: 1741687 - DNA, 15 bp, Homo sapiens
tagaacttaaatata

SEQ ID NO: 1741688 - DNA, 15 bp, Homo sapiens
agaacttaaatataa

SEQ ID NO: 1741689 - DNA, 15 bp, Homo sapiens
gaacttaaatataag

SEQ ID NO: 1741690 - DNA, 15 bp, Homo sapiens
aacttaaatataagg

SEQ ID NO: 1741691 - DNA, 15 bp, Homo sapiens
acttaaatataaggt

SEQ ID NO: 1741692 - DNA, 15 bp, Homo sapiens
cttaaatataaggtg

SEQ ID NO: 1741693 - DNA, 15 bp, Homo sapiens
ttaaatataaggtga

SEQ ID NO: 1741694 - DNA, 15 bp, Homo sapiens
taaatataaggtgat

SEQ ID NO: 1741695 - DNA, 15 bp, Homo sapiens
aaatataaggtgatt

SEQ ID NO: 1741696 - DNA, 15 bp, Homo sapiens
aatataaggtgatta

SEQ ID NO: 1741697 - DNA, 15 bp, Homo sapiens
atataaggtgattaa

SEQ ID NO: 1741698 - DNA, 15 bp, Homo sapiens
tataaggtgattaac

SEQ ID NO: 1741699 - DNA, 15 bp, Homo sapiens
ataaggtgattaaca

SEQ ID NO: 1741700 - DNA, 15 bp, Homo sapiens
taaggtgattaacat

SEQ ID NO: 1741701 - DNA, 15 bp, Homo sapiens
aaggtgattaacata

SEQ ID NO: 1741702 - DNA, 15 bp, Homo sapiens
aggtgattaacataa

SEQ ID NO: 1741703 - DNA, 15 bp, Homo sapiens
ggtgattaacataaa

SEQ ID NO: 1741704 - DNA, 15 bp, Homo sapiens
gtgattaacataaaa

SEQ ID NO: 1741705 - DNA, 15 bp, Homo sapiens
tgattaacataaaac

SEQ ID NO: 1741706 - DNA, 15 bp, Homo sapiens
gattaacataaaacg

SEQ ID NO: 1741707 - DNA, 15 bp, Homo sapiens
attaacataaaacgt

SEQ ID NO: 1741708 - DNA, 15 bp, Homo sapiens
ttaacataaaacgtt

SEQ ID NO: 1741709 - DNA, 15 bp, Homo sapiens
taacataaaacgttg

SEQ ID NO: 1741710 - DNA, 15 bp, Homo sapiens
aacataaaacgttga

SEQ ID NO: 1741711 - DNA, 15 bp, Homo sapiens
acataaaacgttgag

SEQ ID NO: 1741712 - DNA, 15 bp, Homo sapiens
cataaaacgttgagc

SEQ ID NO: 1741713 - DNA, 15 bp, Homo sapiens
ataaaacgttgagcc

SEQ ID NO: 1741714 - DNA, 15 bp, Homo sapiens
taaaacgttgagcct

SEQ ID NO: 1741715 - DNA, 15 bp, Homo sapiens
aaaacgttgagccta

SEQ ID NO: 1741716 - DNA, 15 bp, Homo sapiens
aaacgttgagcctat

SEQ ID NO: 1741717 - DNA, 15 bp, Homo sapiens
aacgttgagcctata

SEQ ID NO: 1741718 - DNA, 15 bp, Homo sapiens
acgttgagcctatag

SEQ ID NO: 1741719 - DNA, 15 bp, Homo sapiens
cgttgagcctataga

SEQ ID NO: 1741720 - DNA, 15 bp, Homo sapiens
gttgagcctatagaa

SEQ ID NO: 1741721 - DNA, 15 bp, Homo sapiens
ttgagcctatagaaa

SEQ ID NO: 1741722 - DNA, 15 bp, Homo sapiens
tgagcctatagaaag

SEQ ID NO: 1741723 - DNA, 15 bp, Homo sapiens
gagcctatagaaagc

SEQ ID NO: 1741724 - DNA, 15 bp, Homo sapiens
agcctatagaaagca

SEQ ID NO: 1741725 - DNA, 15 bp, Homo sapiens
gcctatagaaagcac

SEQ ID NO: 1741726 - DNA, 15 bp, Homo sapiens
cctatagaaagcact

SEQ ID NO: 1741727 - DNA, 15 bp, Homo sapiens
ctatagaaagcactt

SEQ ID NO: 1741728 - DNA, 15 bp, Homo sapiens
tatagaaagcactta

SEQ ID NO: 1741729 - DNA, 15 bp, Homo sapiens
atagaaagcacttaa

SEQ ID NO: 1741730 - DNA, 15 bp, Homo sapiens
tagaaagcacttaac

SEQ ID NO: 1741731 - DNA, 15 bp, Homo sapiens
agaaagcacttaaca

SEQ ID NO: 1741732 - DNA, 15 bp, Homo sapiens
gaaagcacttaacat

SEQ ID NO: 1741733 - DNA, 15 bp, Homo sapiens
aaagcacttaacata

SEQ ID NO: 1741734 - DNA, 15 bp, Homo sapiens
aagcacttaacatag

SEQ ID NO: 1741735 - DNA, 15 bp, Homo sapiens
agcacttaacatagt

SEQ ID NO: 1741736 - DNA, 15 bp, Homo sapiens
gcacttaacatagtt

SEQ ID NO: 1741737 - DNA, 15 bp, Homo sapiens
cacttaacatagtta

SEQ ID NO: 1741738 - DNA, 15 bp, Homo sapiens
acttaacatagttat

SEQ ID NO: 1741739 - DNA, 15 bp, Homo sapiens
cttaacatagttatg

SEQ ID NO: 1741740 - DNA, 15 bp, Homo sapiens
ttaacatagttatga

SEQ ID NO: 1741741 - DNA, 15 bp, Homo sapiens
taacatagttatgat

SEQ ID NO: 1741742 - DNA, 15 bp, Homo sapiens
aacatagttatgata

SEQ ID NO: 1741743 - DNA, 15 bp, Homo sapiens
acatagttatgataa

SEQ ID NO: 1741744 - DNA, 15 bp, Homo sapiens
catagttatgataaa

SEQ ID NO: 1741745 - DNA, 15 bp, Homo sapiens
atagttatgataaag

SEQ ID NO: 1741746 - DNA, 15 bp, Homo sapiens
tagttatgataaaga

SEQ ID NO: 1741747 - DNA, 15 bp, Homo sapiens
agttatgataaagaa

SEQ ID NO: 1741748 - DNA, 15 bp, Homo sapiens
gttatgataaagaac

SEQ ID NO: 1741749 - DNA, 15 bp, Homo sapiens
ttatgataaagaact

SEQ ID NO: 1741750 - DNA, 15 bp, Homo sapiens
tatgataaagaactt

SEQ ID NO: 1741751 - DNA, 15 bp, Homo sapiens
atgataaagaacttc

SEQ ID NO: 1741752 - DNA, 15 bp, Homo sapiens
tgataaagaacttct

SEQ ID NO: 1741753 - DNA, 15 bp, Homo sapiens
gataaagaacttctg

SEQ ID NO: 1741754 - DNA, 15 bp, Homo sapiens
ataaagaacttctga

SEQ ID NO: 1741755 - DNA, 15 bp, Homo sapiens
taaagaacttctgaa

SEQ ID NO: 1741756 - DNA, 15 bp, Homo sapiens
aaagaacttctgaat

SEQ ID NO: 1741757 - DNA, 15 bp, Homo sapiens
aagaacttctgaata

SEQ ID NO: 1741758 - DNA, 15 bp, Homo sapiens
agaacttctgaatat

SEQ ID NO: 1741759 - DNA, 15 bp, Homo sapiens
gaacttctgaatatt

SEQ ID NO: 1741760 - DNA, 15 bp, Homo sapiens
aacttctgaatattc

SEQ ID NO: 1741761 - DNA, 15 bp, Homo sapiens
acttctgaatattca

SEQ ID NO: 1741762 - DNA, 15 bp, Homo sapiens
cttctgaatattcaa

SEQ ID NO: 1741763 - DNA, 15 bp, Homo sapiens
ttctgaatattcaaa

SEQ ID NO: 1741764 - DNA, 15 bp, Homo sapiens
tctgaatattcaaag

SEQ ID NO: 1741765 - DNA, 15 bp, Homo sapiens
ctgaatattcaaagt

SEQ ID NO: 1741766 - DNA, 15 bp, Homo sapiens
tgaatattcaaagtg

SEQ ID NO: 1741767 - DNA, 15 bp, Homo sapiens
gaatattcaaagtgc

SEQ ID NO: 1741768 - DNA, 15 bp, Homo sapiens
aatattcaaagtgca

SEQ ID NO: 1741769 - DNA, 15 bp, Homo sapiens
atattcaaagtgcat

SEQ ID NO: 1741770 - DNA, 15 bp, Homo sapiens
tattcaaagtgcatt

SEQ ID NO: 1741771 - DNA, 15 bp, Homo sapiens
attcaaagtgcattt

SEQ ID NO: 1741772 - DNA, 15 bp, Homo sapiens
ttcaaagtgcatttc

SEQ ID NO: 1741773 - DNA, 15 bp, Homo sapiens
tcaaagtgcatttca

SEQ ID NO: 1741774 - DNA, 15 bp, Homo sapiens
caaagtgcatttcat

SEQ ID NO: 1741775 - DNA, 15 bp, Homo sapiens
aaagtgcatttcatt

SEQ ID NO: 1741776 - DNA, 15 bp, Homo sapiens
aagtgcatttcattt

SEQ ID NO: 1741777 - DNA, 15 bp, Homo sapiens
agtgcatttcatttt

SEQ ID NO: 1741778 - DNA, 15 bp, Homo sapiens
gtgcatttcatttta

SEQ ID NO: 1741779 - DNA, 15 bp, Homo sapiens
tgcatttcattttac

SEQ ID NO: 1741780 - DNA, 15 bp, Homo sapiens
gcatttcattttact

SEQ ID NO: 1741781 - DNA, 15 bp, Homo sapiens
catttcattttactt

SEQ ID NO: 1741782 - DNA, 15 bp, Homo sapiens
atttcattttacttc

SEQ ID NO: 1741783 - DNA, 15 bp, Homo sapiens
tttcattttacttca

SEQ ID NO: 1741784 - DNA, 15 bp, Homo sapiens
ttcattttacttcat

SEQ ID NO: 1741785 - DNA, 15 bp, Homo sapiens
tcattttacttcatg

SEQ ID NO: 1741786 - DNA, 15 bp, Homo sapiens
cattttacttcatgt

SEQ ID NO: 1741787 - DNA, 15 bp, Homo sapiens
attttacttcatgtc

SEQ ID NO: 1741788 - DNA, 15 bp, Homo sapiens
ttttacttcatgtcc

SEQ ID NO: 1741789 - DNA, 15 bp, Homo sapiens
tttacttcatgtcca

SEQ ID NO: 1741790 - DNA, 15 bp, Homo sapiens
ttacttcatgtccaa

SEQ ID NO: 1741791 - DNA, 15 bp, Homo sapiens
tacttcatgtccaaa

SEQ ID NO: 1741792 - DNA, 15 bp, Homo sapiens
acttcatgtccaaat

SEQ ID NO: 1741793 - DNA, 15 bp, Homo sapiens
cttcatgtccaaatg

SEQ ID NO: 1741794 - DNA, 15 bp, Homo sapiens
ttcatgtccaaatgc

SEQ ID NO: 1741795 - DNA, 15 bp, Homo sapiens
tcatgtccaaatgct

SEQ ID NO: 1741796 - DNA, 15 bp, Homo sapiens
catgtccaaatgcta

SEQ ID NO: 1741797 - DNA, 15 bp, Homo sapiens
atgtccaaatgctac

SEQ ID NO: 1741798 - DNA, 15 bp, Homo sapiens
tgtccaaatgctact

SEQ ID NO: 1741799 - DNA, 15 bp, Homo sapiens
gtccaaatgctactg

SEQ ID NO: 1741800 - DNA, 15 bp, Homo sapiens
tccaaatgctactgt

SEQ ID NO: 1741801 - DNA, 15 bp, Homo sapiens
ccaaatgctactgtt

SEQ ID NO: 1741802 - DNA, 15 bp, Homo sapiens
caaatgctactgttt

SEQ ID NO: 1741803 - DNA, 15 bp, Homo sapiens
aaatgctactgtttg

SEQ ID NO: 1741804 - DNA, 15 bp, Homo sapiens
aatgctactgtttgg

SEQ ID NO: 1741805 - DNA, 15 bp, Homo sapiens
atgctactgtttgga

SEQ ID NO: 1741806 - DNA, 15 bp, Homo sapiens
tgctactgtttggac

SEQ ID NO: 1741807 - DNA, 15 bp, Homo sapiens
gctactgtttggaca

SEQ ID NO: 1741808 - DNA, 15 bp, Homo sapiens
ctactgtttggacaa

SEQ ID NO: 1741809 - DNA, 15 bp, Homo sapiens
tactgtttggacaaa

SEQ ID NO: 1741810 - DNA, 15 bp, Homo sapiens
actgtttggacaaat

SEQ ID NO: 1741811 - DNA, 15 bp, Homo sapiens
ctgtttggacaaatg

SEQ ID NO: 1741812 - DNA, 15 bp, Homo sapiens
tgtttggacaaatgt

SEQ ID NO: 1741813 - DNA, 15 bp, Homo sapiens
gtttggacaaatgtc

SEQ ID NO: 1741814 - DNA, 15 bp, Homo sapiens
tttggacaaatgtca

SEQ ID NO: 1741815 - DNA, 15 bp, Homo sapiens
ttggacaaatgtcat

SEQ ID NO: 1741816 - DNA, 15 bp, Homo sapiens
tggacaaatgtcatc

SEQ ID NO: 1741817 - DNA, 15 bp, Homo sapiens
ggacaaatgtcatcc

SEQ ID NO: 1741818 - DNA, 15 bp, Homo sapiens
gacaaatgtcatccc

SEQ ID NO: 1741819 - DNA, 15 bp, Homo sapiens
acaaatgtcatccct

SEQ ID NO: 1741820 - DNA, 15 bp, Homo sapiens
caaatgtcatccctg

SEQ ID NO: 1741821 - DNA, 15 bp, Homo sapiens
aaatgtcatccctgt

SEQ ID NO: 1741822 - DNA, 15 bp, Homo sapiens
aatgtcatccctgtt

SEQ ID NO: 1741823 - DNA, 15 bp, Homo sapiens
atgtcatccctgttt

SEQ ID NO: 1741824 - DNA, 15 bp, Homo sapiens
tgtcatccctgtttc

SEQ ID NO: 1741825 - DNA, 15 bp, Homo sapiens
gtcatccctgtttca

SEQ ID NO: 1741826 - DNA, 15 bp, Homo sapiens
tcatccctgtttcac

SEQ ID NO: 1741827 - DNA, 15 bp, Homo sapiens
catccctgtttcaca

SEQ ID NO: 1741828 - DNA, 15 bp, Homo sapiens
atccctgtttcacaa

SEQ ID NO: 1741829 - DNA, 15 bp, Homo sapiens
tccctgtttcacaaa

SEQ ID NO: 1741830 - DNA, 15 bp, Homo sapiens
ccctgtttcacaaac

SEQ ID NO: 1741831 - DNA, 15 bp, Homo sapiens
cctgtttcacaaacc

SEQ ID NO: 1741832 - DNA, 15 bp, Homo sapiens
ctgtttcacaaacct

SEQ ID NO: 1741833 - DNA, 15 bp, Homo sapiens
tgtttcacaaacctt

SEQ ID NO: 1741834 - DNA, 15 bp, Homo sapiens
gtttcacaaaccttc

SEQ ID NO: 1741835 - DNA, 15 bp, Homo sapiens
tttcacaaaccttca

SEQ ID NO: 1741836 - DNA, 15 bp, Homo sapiens
ttcacaaaccttcat

SEQ ID NO: 1741837 - DNA, 15 bp, Homo sapiens
tcacaaaccttcatg

SEQ ID NO: 1741838 - DNA, 15 bp, Homo sapiens
cacaaaccttcatgc

SEQ ID NO: 1741839 - DNA, 15 bp, Homo sapiens
acaaaccttcatgca

SEQ ID NO: 1741840 - DNA, 15 bp, Homo sapiens
caaaccttcatgcag

SEQ ID NO: 1741841 - DNA, 15 bp, Homo sapiens
aaaccttcatgcaga

SEQ ID NO: 1741842 - DNA, 15 bp, Homo sapiens
aaccttcatgcagaa

SEQ ID NO: 1741843 - DNA, 15 bp, Homo sapiens
accttcatgcagaag

SEQ ID NO: 1741844 - DNA, 15 bp, Homo sapiens
ccttcatgcagaaga

SEQ ID NO: 1741845 - DNA, 15 bp, Homo sapiens
cttcatgcagaagac

SEQ ID NO: 1741846 - DNA, 15 bp, Homo sapiens
ttcatgcagaagact

SEQ ID NO: 1741847 - DNA, 15 bp, Homo sapiens
tcatgcagaagactg

SEQ ID NO: 1741848 - DNA, 15 bp, Homo sapiens
catgcagaagactgt

SEQ ID NO: 1741849 - DNA, 15 bp, Homo sapiens
atgcagaagactgta

SEQ ID NO: 1741850 - DNA, 15 bp, Homo sapiens
tgcagaagactgtaa

SEQ ID NO: 1741851 - DNA, 15 bp, Homo sapiens
gcagaagactgtaag

SEQ ID NO: 1741852 - DNA, 15 bp, Homo sapiens
cagaagactgtaagt

SEQ ID NO: 1741853 - DNA, 15 bp, Homo sapiens
agaagactgtaagtg

SEQ ID NO: 1741854 - DNA, 15 bp, Homo sapiens
gaagactgtaagtga

SEQ ID NO: 1741855 - DNA, 15 bp, Homo sapiens
aagactgtaagtgaa

SEQ ID NO: 1741856 - DNA, 15 bp, Homo sapiens
agactgtaagtgaat

SEQ ID NO: 1741857 - DNA, 15 bp, Homo sapiens
gactgtaagtgaatt

SEQ ID NO: 1741858 - DNA, 15 bp, Homo sapiens
actgtaagtgaattg

SEQ ID NO: 1741859 - DNA, 15 bp, Homo sapiens
ctgtaagtgaattgt

SEQ ID NO: 1741860 - DNA, 15 bp, Homo sapiens
tgtaagtgaattgtt

SEQ ID NO: 1741861 - DNA, 15 bp, Homo sapiens
gtaagtgaattgttc

SEQ ID NO: 1741862 - DNA, 15 bp, Homo sapiens
taagtgaattgttca

SEQ ID NO: 1741863 - DNA, 15 bp, Homo sapiens
aagtgaattgttcag

SEQ ID NO: 1741864 - DNA, 15 bp, Homo sapiens
agtgaattgttcagg

SEQ ID NO: 1741865 - DNA, 15 bp, Homo sapiens
gtgaattgttcaggg

SEQ ID NO: 1741866 - DNA, 15 bp, Homo sapiens
tgaattgttcagggt

SEQ ID NO: 1741867 - DNA, 15 bp, Homo sapiens
gaattgttcagggtc

SEQ ID NO: 1741868 - DNA, 15 bp, Homo sapiens
aattgttcagggtcg

SEQ ID NO: 1741869 - DNA, 15 bp, Homo sapiens
attgttcagggtcgg

SEQ ID NO: 1741870 - DNA, 15 bp, Homo sapiens
ttgttcagggtcgga

SEQ ID NO: 1741871 - DNA, 15 bp, Homo sapiens
tgttcagggtcggac

SEQ ID NO: 1741872 - DNA, 15 bp, Homo sapiens
gttcagggtcggaca

SEQ ID NO: 1741873 - DNA, 15 bp, Homo sapiens
ttcagggtcggacat

SEQ ID NO: 1741874 - DNA, 15 bp, Homo sapiens
tcagggtcggacatg

SEQ ID NO: 1741875 - DNA, 15 bp, Homo sapiens
cagggtcggacatgt

SEQ ID NO: 1741876 - DNA, 15 bp, Homo sapiens
agggtcggacatgtg

SEQ ID NO: 1741877 - DNA, 15 bp, Homo sapiens
gggtcggacatgtgc

SEQ ID NO: 1741878 - DNA, 15 bp, Homo sapiens
ggtcggacatgtgct

SEQ ID NO: 1741879 - DNA, 15 bp, Homo sapiens
gtcggacatgtgctg

SEQ ID NO: 1741880 - DNA, 15 bp, Homo sapiens
tcggacatgtgctgg

SEQ ID NO: 1741881 - DNA, 15 bp, Homo sapiens
cggacatgtgctggc

SEQ ID NO: 1741882 - DNA, 15 bp, Homo sapiens
ggacatgtgctggca

SEQ ID NO: 1741883 - DNA, 15 bp, Homo sapiens
gacatgtgctggcat

SEQ ID NO: 1741884 - DNA, 15 bp, Homo sapiens
acatgtgctggcatt

SEQ ID NO: 1741885 - DNA, 15 bp, Homo sapiens
catgtgctggcattt

SEQ ID NO: 1741886 - DNA, 15 bp, Homo sapiens
atgtgctggcattta

SEQ ID NO: 1741887 - DNA, 15 bp, Homo sapiens
tgtgctggcatttaa

SEQ ID NO: 1741888 - DNA, 15 bp, Homo sapiens
gtgctggcatttaag

SEQ ID NO: 1741889 - DNA, 15 bp, Homo sapiens
tgctggcatttaaga

SEQ ID NO: 1741890 - DNA, 15 bp, Homo sapiens
gctggcatttaagag

SEQ ID NO: 1741891 - DNA, 15 bp, Homo sapiens
ctggcatttaagaga

SEQ ID NO: 1741892 - DNA, 15 bp, Homo sapiens
tggcatttaagagat

SEQ ID NO: 1741893 - DNA, 15 bp, Homo sapiens
ggcatttaagagatc

SEQ ID NO: 1741894 - DNA, 15 bp, Homo sapiens
gcatttaagagatcc

SEQ ID NO: 1741895 - DNA, 15 bp, Homo sapiens
catttaagagatcct

SEQ ID NO: 1741896 - DNA, 15 bp, Homo sapiens
atttaagagatcctc

SEQ ID NO: 1741897 - DNA, 15 bp, Homo sapiens
tttaagagatcctct

SEQ ID NO: 1741898 - DNA, 15 bp, Homo sapiens
ttaagagatcctctt

SEQ ID NO: 1741899 - DNA, 15 bp, Homo sapiens
taagagatcctcttc

SEQ ID NO: 1741900 - DNA, 15 bp, Homo sapiens
aagagatcctcttct

SEQ ID NO: 1741901 - DNA, 15 bp, Homo sapiens
agagatcctcttctt

SEQ ID NO: 1741902 - DNA, 15 bp, Homo sapiens
gagatcctcttcttt

SEQ ID NO: 1741903 - DNA, 15 bp, Homo sapiens
agatcctcttctttt

SEQ ID NO: 1741904 - DNA, 15 bp, Homo sapiens
gatcctcttcttttt

SEQ ID NO: 1741905 - DNA, 15 bp, Homo sapiens
atcctcttctttttg

SEQ ID NO: 1741906 - DNA, 15 bp, Homo sapiens
tcctcttctttttgg

SEQ ID NO: 1741907 - DNA, 15 bp, Homo sapiens
cctcttctttttggc

SEQ ID NO: 1741908 - DNA, 15 bp, Homo sapiens
ctcttctttttggct

SEQ ID NO: 1741909 - DNA, 15 bp, Homo sapiens
tcttctttttggctg

SEQ ID NO: 1741910 - DNA, 15 bp, Homo sapiens
cttctttttggctgt

SEQ ID NO: 1741911 - DNA, 15 bp, Homo sapiens
ttctttttggctgtg

SEQ ID NO: 1741912 - DNA, 15 bp, Homo sapiens
tctttttggctgtga

SEQ ID NO: 1741913 - DNA, 15 bp, Homo sapiens
ctttttggctgtgat

SEQ ID NO: 1741914 - DNA, 15 bp, Homo sapiens
tttttggctgtgatt

SEQ ID NO: 1741915 - DNA, 15 bp, Homo sapiens
ttttggctgtgattt

SEQ ID NO: 1741916 - DNA, 15 bp, Homo sapiens
tttggctgtgatttc

SEQ ID NO: 1741917 - DNA, 15 bp, Homo sapiens
ttggctgtgatttct

SEQ ID NO: 1741918 - DNA, 15 bp, Homo sapiens
tggctgtgatttcta

SEQ ID NO: 1741919 - DNA, 15 bp, Homo sapiens
ggctgtgatttctat

SEQ ID NO: 1741920 - DNA, 15 bp, Homo sapiens
gctgtgatttctata

SEQ ID NO: 1741921 - DNA, 15 bp, Homo sapiens
ctgtgatttctataa

SEQ ID NO: 1741922 - DNA, 15 bp, Homo sapiens
tgtgatttctataat

SEQ ID NO: 1741923 - DNA, 15 bp, Homo sapiens
gtgatttctataatt

SEQ ID NO: 1741924 - DNA, 15 bp, Homo sapiens
tgatttctataatta

SEQ ID NO: 1741925 - DNA, 15 bp, Homo sapiens
gatttctataattaa

SEQ ID NO: 1741926 - DNA, 15 bp, Homo sapiens
atttctataattaag

SEQ ID NO: 1741927 - DNA, 15 bp, Homo sapiens
tttctataattaaga

SEQ ID NO: 1741928 - DNA, 15 bp, Homo sapiens
ttctataattaagat

SEQ ID NO: 1741929 - DNA, 15 bp, Homo sapiens
tctataattaagatg

SEQ ID NO: 1741930 - DNA, 15 bp, Homo sapiens
ctataattaagatgg

SEQ ID NO: 1741931 - DNA, 15 bp, Homo sapiens
tataattaagatggc

SEQ ID NO: 1741932 - DNA, 15 bp, Homo sapiens
ataattaagatggca

SEQ ID NO: 1741933 - DNA, 15 bp, Homo sapiens
taattaagatggcag

SEQ ID NO: 1741934 - DNA, 15 bp, Homo sapiens
aattaagatggcagc

SEQ ID NO: 1741935 - DNA, 15 bp, Homo sapiens
attaagatggcagcc

SEQ ID NO: 1741936 - DNA, 15 bp, Homo sapiens
ttaagatggcagcca

SEQ ID NO: 1741937 - DNA, 15 bp, Homo sapiens
taagatggcagccac

SEQ ID NO: 1741938 - DNA, 15 bp, Homo sapiens
aagatggcagccacc

SEQ ID NO: 1741939 - DNA, 15 bp, Homo sapiens
agatggcagccacca

SEQ ID NO: 1741940 - DNA, 15 bp, Homo sapiens
gatggcagccaccag

SEQ ID NO: 1741941 - DNA, 15 bp, Homo sapiens
atggcagccaccaga

SEQ ID NO: 1741942 - DNA, 15 bp, Homo sapiens
tggcagccaccagat

SEQ ID NO: 1741943 - DNA, 15 bp, Homo sapiens
ggcagccaccagatg

SEQ ID NO: 1741944 - DNA, 15 bp, Homo sapiens
gcagccaccagatgg

SEQ ID NO: 1741945 - DNA, 15 bp, Homo sapiens
cagccaccagatggc

SEQ ID NO: 1741946 - DNA, 15 bp, Homo sapiens
agccaccagatggca

SEQ ID NO: 1741947 - DNA, 15 bp, Homo sapiens
gccaccagatggcag

SEQ ID NO: 1741948 - DNA, 15 bp, Homo sapiens
ccaccagatggcagt

SEQ ID NO: 1741949 - DNA, 15 bp, Homo sapiens
caccagatggcagta

SEQ ID NO: 1741950 - DNA, 15 bp, Homo sapiens
accagatggcagtaa

SEQ ID NO: 1741951 - DNA, 15 bp, Homo sapiens
ccagatggcagtaat

SEQ ID NO: 1741952 - DNA, 15 bp, Homo sapiens
cagatggcagtaatg

SEQ ID NO: 1741953 - DNA, 15 bp, Homo sapiens
agatggcagtaatgc

SEQ ID NO: 1741954 - DNA, 15 bp, Homo sapiens
gatggcagtaatgcc

SEQ ID NO: 1741955 - DNA, 15 bp, Homo sapiens
atggcagtaatgcct

SEQ ID NO: 1741956 - DNA, 15 bp, Homo sapiens
tggcagtaatgcctc

SEQ ID NO: 1741957 - DNA, 15 bp, Homo sapiens
ggcagtaatgcctca

SEQ ID NO: 1741958 - DNA, 15 bp, Homo sapiens
gcagtaatgcctcaa

SEQ ID NO: 1741959 - DNA, 15 bp, Homo sapiens
cagtaatgcctcaat

SEQ ID NO: 1741960 - DNA, 15 bp, Homo sapiens
agtaatgcctcaatt

SEQ ID NO: 1741961 - DNA, 15 bp, Homo sapiens
gtaatgcctcaattt

SEQ ID NO: 1741962 - DNA, 15 bp, Homo sapiens
taatgcctcaatttt

SEQ ID NO: 1741963 - DNA, 15 bp, Homo sapiens
aatgcctcaattttg

SEQ ID NO: 1741964 - DNA, 15 bp, Homo sapiens
atgcctcaattttgt

SEQ ID NO: 1741965 - DNA, 15 bp, Homo sapiens
tgcctcaattttgtg

SEQ ID NO: 1741966 - DNA, 15 bp, Homo sapiens
gcctcaattttgtgg

SEQ ID NO: 1741967 - DNA, 15 bp, Homo sapiens
cctcaattttgtggt

SEQ ID NO: 1741968 - DNA, 15 bp, Homo sapiens
ctcaattttgtggtt

SEQ ID NO: 1741969 - DNA, 15 bp, Homo sapiens
tcaattttgtggttc

SEQ ID NO: 1741970 - DNA, 15 bp, Homo sapiens
caattttgtggttct

SEQ ID NO: 1741971 - DNA, 15 bp, Homo sapiens
aattttgtggttctc

SEQ ID NO: 1741972 - DNA, 15 bp, Homo sapiens
attttgtggttctca

SEQ ID NO: 1741973 - DNA, 15 bp, Homo sapiens
ttttgtggttctcac

SEQ ID NO: 1741974 - DNA, 15 bp, Homo sapiens
tttgtggttctcact

SEQ ID NO: 1741975 - DNA, 15 bp, Homo sapiens
ttgtggttctcacta

SEQ ID NO: 1741976 - DNA, 15 bp, Homo sapiens
tgtggttctcactat

SEQ ID NO: 1741977 - DNA, 15 bp, Homo sapiens
gtggttctcactata

SEQ ID NO: 1741978 - DNA, 15 bp, Homo sapiens
tggttctcactataa

SEQ ID NO: 1741979 - DNA, 15 bp, Homo sapiens
ggttctcactataat

SEQ ID NO: 1741980 - DNA, 15 bp, Homo sapiens
gttctcactataatg

SEQ ID NO: 1741981 - DNA, 15 bp, Homo sapiens
ttctcactataatgg

SEQ ID NO: 1741982 - DNA, 15 bp, Homo sapiens
tctcactataatggc

SEQ ID NO: 1741983 - DNA, 15 bp, Homo sapiens
ctcactataatggca

SEQ ID NO: 1741984 - DNA, 15 bp, Homo sapiens
tcactataatggcaa

SEQ ID NO: 1741985 - DNA, 15 bp, Homo sapiens
cactataatggcaat

SEQ ID NO: 1741986 - DNA, 15 bp, Homo sapiens
actataatggcaatt

SEQ ID NO: 1741987 - DNA, 15 bp, Homo sapiens
ctataatggcaattg

SEQ ID NO: 1741988 - DNA, 15 bp, Homo sapiens
tataatggcaattgg

SEQ ID NO: 1741989 - DNA, 15 bp, Homo sapiens
ataatggcaattggg

SEQ ID NO: 1741990 - DNA, 15 bp, Homo sapiens
taatggcaattgggc

SEQ ID NO: 1741991 - DNA, 15 bp, Homo sapiens
aatggcaattgggct

SEQ ID NO: 1741992 - DNA, 15 bp, Homo sapiens
atggcaattgggctt

SEQ ID NO: 1741993 - DNA, 15 bp, Homo sapiens
tggcaattgggctta

SEQ ID NO: 1741994 - DNA, 15 bp, Homo sapiens
ggcaattgggcttaa

SEQ ID NO: 1741995 - DNA, 15 bp, Homo sapiens
gcaattgggcttaac

SEQ ID NO: 1741996 - DNA, 15 bp, Homo sapiens
caattgggcttaaca

SEQ ID NO: 1741997 - DNA, 15 bp, Homo sapiens
aattgggcttaacat

SEQ ID NO: 1741998 - DNA, 15 bp, Homo sapiens
attgggcttaacatt

SEQ ID NO: 1741999 - DNA, 15 bp, Homo sapiens
ttgggcttaacattt

SEQ ID NO: 1742000 - DNA, 15 bp, Homo sapiens
tgggcttaacattta

SEQ ID NO: 1742001 - DNA, 15 bp, Homo sapiens
gggcttaacatttac

SEQ ID NO: 1742002 - DNA, 15 bp, Homo sapiens
ggcttaacatttact

SEQ ID NO: 1742003 - DNA, 15 bp, Homo sapiens
gcttaacatttactt

SEQ ID NO: 1742004 - DNA, 15 bp, Homo sapiens
cttaacatttacttg

SEQ ID NO: 1742005 - DNA, 15 bp, Homo sapiens
ttaacatttacttga

SEQ ID NO: 1742006 - DNA, 15 bp, Homo sapiens
taacatttacttgag

SEQ ID NO: 1742007 - DNA, 15 bp, Homo sapiens
aacatttacttgagc

SEQ ID NO: 1742008 - DNA, 15 bp, Homo sapiens
acatttacttgagcc

SEQ ID NO: 1742009 - DNA, 15 bp, Homo sapiens
catttacttgagcct

SEQ ID NO: 1742010 - DNA, 15 bp, Homo sapiens
atttacttgagcctt

SEQ ID NO: 1742011 - DNA, 15 bp, Homo sapiens
tttacttgagcctta

SEQ ID NO: 1742012 - DNA, 15 bp, Homo sapiens
ttacttgagccttac

SEQ ID NO: 1742013 - DNA, 15 bp, Homo sapiens
tacttgagccttact

SEQ ID NO: 1742014 - DNA, 15 bp, Homo sapiens
acttgagccttacta

SEQ ID NO: 1742015 - DNA, 15 bp, Homo sapiens
cttgagccttactac

SEQ ID NO: 1742016 - DNA, 15 bp, Homo sapiens
ttgagccttactacg

SEQ ID NO: 1742017 - DNA, 15 bp, Homo sapiens
tgagccttactacgt

SEQ ID NO: 1742018 - DNA, 15 bp, Homo sapiens
gagccttactacgtg

SEQ ID NO: 1742019 - DNA, 15 bp, Homo sapiens
agccttactacgtgc

SEQ ID NO: 1742020 - DNA, 15 bp, Homo sapiens
gccttactacgtgcc

SEQ ID NO: 1742021 - DNA, 15 bp, Homo sapiens
ccttactacgtgcca

SEQ ID NO: 1742022 - DNA, 15 bp, Homo sapiens
cttactacgtgccag

SEQ ID NO: 1742023 - DNA, 15 bp, Homo sapiens
ttactacgtgccagt

SEQ ID NO: 1742024 - DNA, 15 bp, Homo sapiens
tactacgtgccagtt

SEQ ID NO: 1742025 - DNA, 15 bp, Homo sapiens
actacgtgccagtta

SEQ ID NO: 1742026 - DNA, 15 bp, Homo sapiens
ctacgtgccagttat

SEQ ID NO: 1742027 - DNA, 15 bp, Homo sapiens
tacgtgccagttatt

SEQ ID NO: 1742028 - DNA, 15 bp, Homo sapiens
acgtgccagttattg

SEQ ID NO: 1742029 - DNA, 15 bp, Homo sapiens
cgtgccagttattgt

SEQ ID NO: 1742030 - DNA, 15 bp, Homo sapiens
gtgccagttattgtg

SEQ ID NO: 1742031 - DNA, 15 bp, Homo sapiens
tgccagttattgtgc

SEQ ID NO: 1742032 - DNA, 15 bp, Homo sapiens
gccagttattgtgct

SEQ ID NO: 1742033 - DNA, 15 bp, Homo sapiens
ccagttattgtgcta

SEQ ID NO: 1742034 - DNA, 15 bp, Homo sapiens
cagttattgtgctac

SEQ ID NO: 1742035 - DNA, 15 bp, Homo sapiens
agttattgtgctaca

SEQ ID NO: 1742036 - DNA, 15 bp, Homo sapiens
gttattgtgctacat

SEQ ID NO: 1742037 - DNA, 15 bp, Homo sapiens
ttattgtgctacata

SEQ ID NO: 1742038 - DNA, 15 bp, Homo sapiens
tattgtgctacatat

SEQ ID NO: 1742039 - DNA, 15 bp, Homo sapiens
attgtgctacatatt

SEQ ID NO: 1742040 - DNA, 15 bp, Homo sapiens
ttgtgctacatattt

SEQ ID NO: 1742041 - DNA, 15 bp, Homo sapiens
tgtgctacatattta

SEQ ID NO: 1742042 - DNA, 15 bp, Homo sapiens
gtgctacatatttat

SEQ ID NO: 1742043 - DNA, 15 bp, Homo sapiens
tgctacatatttata

SEQ ID NO: 1742044 - DNA, 15 bp, Homo sapiens
gctacatatttatat

SEQ ID NO: 1742045 - DNA, 15 bp, Homo sapiens
ctacatatttatatg

SEQ ID NO: 1742046 - DNA, 15 bp, Homo sapiens
tacatatttatatgc

SEQ ID NO: 1742047 - DNA, 15 bp, Homo sapiens
acatatttatatgca

SEQ ID NO: 1742048 - DNA, 15 bp, Homo sapiens
catatttatatgcac

SEQ ID NO: 1742049 - DNA, 15 bp, Homo sapiens
atatttatatgcacc

SEQ ID NO: 1742050 - DNA, 15 bp, Homo sapiens
tatttatatgcacca

SEQ ID NO: 1742051 - DNA, 15 bp, Homo sapiens
atttatatgcaccaa

SEQ ID NO: 1742052 - DNA, 15 bp, Homo sapiens
tttatatgcaccaat

SEQ ID NO: 1742053 - DNA, 15 bp, Homo sapiens
ttatatgcaccaatt

SEQ ID NO: 1742054 - DNA, 15 bp, Homo sapiens
tatatgcaccaattt

SEQ ID NO: 1742055 - DNA, 15 bp, Homo sapiens
atatgcaccaattta

SEQ ID NO: 1742056 - DNA, 15 bp, Homo sapiens
tatgcaccaatttat

SEQ ID NO: 1742057 - DNA, 15 bp, Homo sapiens
atgcaccaatttatt

SEQ ID NO: 1742058 - DNA, 15 bp, Homo sapiens
tgcaccaatttatta

SEQ ID NO: 1742059 - DNA, 15 bp, Homo sapiens
gcaccaatttattac

SEQ ID NO: 1742060 - DNA, 15 bp, Homo sapiens
caccaatttattaca

SEQ ID NO: 1742061 - DNA, 15 bp, Homo sapiens
accaatttattacat

SEQ ID NO: 1742062 - DNA, 15 bp, Homo sapiens
ccaatttattacatc

SEQ ID NO: 1742063 - DNA, 15 bp, Homo sapiens
caatttattacatct

SEQ ID NO: 1742064 - DNA, 15 bp, Homo sapiens
aatttattacatctt

SEQ ID NO: 1742065 - DNA, 15 bp, Homo sapiens
atttattacatcttc

SEQ ID NO: 1742066 - DNA, 15 bp, Homo sapiens
tttattacatcttca

SEQ ID NO: 1742067 - DNA, 15 bp, Homo sapiens
ttattacatcttcac

SEQ ID NO: 1742068 - DNA, 15 bp, Homo sapiens
tattacatcttcaca

SEQ ID NO: 1742069 - DNA, 15 bp, Homo sapiens
attacatcttcacaa

SEQ ID NO: 1742070 - DNA, 15 bp, Homo sapiens
ttacatcttcacaat

SEQ ID NO: 1742071 - DNA, 15 bp, Homo sapiens
tacatcttcacaata

SEQ ID NO: 1742072 - DNA, 15 bp, Homo sapiens
acatcttcacaataa

SEQ ID NO: 1742073 - DNA, 15 bp, Homo sapiens
catcttcacaataat

SEQ ID NO: 1742074 - DNA, 15 bp, Homo sapiens
atcttcacaataatc

SEQ ID NO: 1742075 - DNA, 15 bp, Homo sapiens
tcttcacaataatcc

SEQ ID NO: 1742076 - DNA, 15 bp, Homo sapiens
cttcacaataatcct

SEQ ID NO: 1742077 - DNA, 15 bp, Homo sapiens
ttcacaataatccta

SEQ ID NO: 1742078 - DNA, 15 bp, Homo sapiens
tcacaataatcctat

SEQ ID NO: 1742079 - DNA, 15 bp, Homo sapiens
cacaataatcctata

SEQ ID NO: 1742080 - DNA, 15 bp, Homo sapiens
acaataatcctataa

SEQ ID NO: 1742081 - DNA, 15 bp, Homo sapiens
caataatcctataag

SEQ ID NO: 1742082 - DNA, 15 bp, Homo sapiens
aataatcctataagg

SEQ ID NO: 1742083 - DNA, 15 bp, Homo sapiens
ataatcctataaggc

SEQ ID NO: 1742084 - DNA, 15 bp, Homo sapiens
taatcctataaggca

SEQ ID NO: 1742085 - DNA, 15 bp, Homo sapiens
aatcctataaggcag

SEQ ID NO: 1742086 - DNA, 15 bp, Homo sapiens
atcctataaggcagg

SEQ ID NO: 1742087 - DNA, 15 bp, Homo sapiens
tcctataaggcaggc

SEQ ID NO: 1742088 - DNA, 15 bp, Homo sapiens
cctataaggcaggca

SEQ ID NO: 1742089 - DNA, 15 bp, Homo sapiens
ctataaggcaggcac

SEQ ID NO: 1742090 - DNA, 15 bp, Homo sapiens
tataaggcaggcact

SEQ ID NO: 1742091 - DNA, 15 bp, Homo sapiens
ataaggcaggcacta

SEQ ID NO: 1742092 - DNA, 15 bp, Homo sapiens
taaggcaggcactat

SEQ ID NO: 1742093 - DNA, 15 bp, Homo sapiens
aaggcaggcactatt

SEQ ID NO: 1742094 - DNA, 15 bp, Homo sapiens
aggcaggcactattg

SEQ ID NO: 1742095 - DNA, 15 bp, Homo sapiens
ggcaggcactattgt

SEQ ID NO: 1742096 - DNA, 15 bp, Homo sapiens
gcaggcactattgtt

SEQ ID NO: 1742097 - DNA, 15 bp, Homo sapiens
caggcactattgtta

SEQ ID NO: 1742098 - DNA, 15 bp, Homo sapiens
aggcactattgttat

SEQ ID NO: 1742099 - DNA, 15 bp, Homo sapiens
ggcactattgttatc

SEQ ID NO: 1742100 - DNA, 15 bp, Homo sapiens
gcactattgttatcc

SEQ ID NO: 1742101 - DNA, 15 bp, Homo sapiens
cactattgttatccc

SEQ ID NO: 1742102 - DNA, 15 bp, Homo sapiens
actattgttatccca

SEQ ID NO: 1742103 - DNA, 15 bp, Homo sapiens
ctattgttatcccaa

SEQ ID NO: 1742104 - DNA, 15 bp, Homo sapiens
tattgttatcccaat

SEQ ID NO: 1742105 - DNA, 15 bp, Homo sapiens
attgttatcccaatt

SEQ ID NO: 1742106 - DNA, 15 bp, Homo sapiens
ttgttatcccaattt

SEQ ID NO: 1742107 - DNA, 15 bp, Homo sapiens
tgttatcccaatttc

SEQ ID NO: 1742108 - DNA, 15 bp, Homo sapiens
gttatcccaatttca

SEQ ID NO: 1742109 - DNA, 15 bp, Homo sapiens
ttatcccaatttcag

SEQ ID NO: 1742110 - DNA, 15 bp, Homo sapiens
tatcccaatttcaga

SEQ ID NO: 1742111 - DNA, 15 bp, Homo sapiens
atcccaatttcagaa

SEQ ID NO: 1742112 - DNA, 15 bp, Homo sapiens
tcccaatttcagaaa

SEQ ID NO: 1742113 - DNA, 15 bp, Homo sapiens
cccaatttcagaaat

SEQ ID NO: 1742114 - DNA, 15 bp, Homo sapiens
ccaatttcagaaata

SEQ ID NO: 1742115 - DNA, 15 bp, Homo sapiens
caatttcagaaatac

SEQ ID NO: 1742116 - DNA, 15 bp, Homo sapiens
aatttcagaaataca

SEQ ID NO: 1742117 - DNA, 15 bp, Homo sapiens
atttcagaaatacag

SEQ ID NO: 1742118 - DNA, 15 bp, Homo sapiens
tttcagaaatacaga

SEQ ID NO: 1742119 - DNA, 15 bp, Homo sapiens
ttcagaaatacagaa

SEQ ID NO: 1742120 - DNA, 15 bp, Homo sapiens
tcagaaatacagaac

SEQ ID NO: 1742121 - DNA, 15 bp, Homo sapiens
cagaaatacagaacc

SEQ ID NO: 1742122 - DNA, 15 bp, Homo sapiens
agaaatacagaacct

SEQ ID NO: 1742123 - DNA, 15 bp, Homo sapiens
gaaatacagaacctg

SEQ ID NO: 1742124 - DNA, 15 bp, Homo sapiens
aaatacagaacctga

SEQ ID NO: 1742125 - DNA, 15 bp, Homo sapiens
aatacagaacctgag

SEQ ID NO: 1742126 - DNA, 15 bp, Homo sapiens
atacagaacctgaga

SEQ ID NO: 1742127 - DNA, 15 bp, Homo sapiens
tacagaacctgagat

SEQ ID NO: 1742128 - DNA, 15 bp, Homo sapiens
acagaacctgagatt

SEQ ID NO: 1742129 - DNA, 15 bp, Homo sapiens
cagaacctgagattc

SEQ ID NO: 1742130 - DNA, 15 bp, Homo sapiens
agaacctgagattca

SEQ ID NO: 1742131 - DNA, 15 bp, Homo sapiens
gaacctgagattcaa

SEQ ID NO: 1742132 - DNA, 15 bp, Homo sapiens
aacctgagattcaaa

SEQ ID NO: 1742133 - DNA, 15 bp, Homo sapiens
acctgagattcaaac

SEQ ID NO: 1742134 - DNA, 15 bp, Homo sapiens
cctgagattcaaaca

SEQ ID NO: 1742135 - DNA, 15 bp, Homo sapiens
ctgagattcaaacag

SEQ ID NO: 1742136 - DNA, 15 bp, Homo sapiens
tgagattcaaacaga

SEQ ID NO: 1742137 - DNA, 15 bp, Homo sapiens
gagattcaaacagaa

SEQ ID NO: 1742138 - DNA, 15 bp, Homo sapiens
agattcaaacagaag

SEQ ID NO: 1742139 - DNA, 15 bp, Homo sapiens
gattcaaacagaagt

SEQ ID NO: 1742140 - DNA, 15 bp, Homo sapiens
attcaaacagaagtt

SEQ ID NO: 1742141 - DNA, 15 bp, Homo sapiens
ttcaaacagaagtta

SEQ ID NO: 1742142 - DNA, 15 bp, Homo sapiens
tcaaacagaagttag

SEQ ID NO: 1742143 - DNA, 15 bp, Homo sapiens
caaacagaagttaga

SEQ ID NO: 1742144 - DNA, 15 bp, Homo sapiens
aaacagaagttagag

SEQ ID NO: 1742145 - DNA, 15 bp, Homo sapiens
aacagaagttagaga

SEQ ID NO: 1742146 - DNA, 15 bp, Homo sapiens
acagaagttagagat

SEQ ID NO: 1742147 - DNA, 15 bp, Homo sapiens
cagaagttagagatt

SEQ ID NO: 1742148 - DNA, 15 bp, Homo sapiens
agaagttagagattt

SEQ ID NO: 1742149 - DNA, 15 bp, Homo sapiens
gaagttagagatttg

SEQ ID NO: 1742150 - DNA, 15 bp, Homo sapiens
aagttagagatttgg

SEQ ID NO: 1742151 - DNA, 15 bp, Homo sapiens
agttagagatttggc

SEQ ID NO: 1742152 - DNA, 15 bp, Homo sapiens
gttagagatttggct

SEQ ID NO: 1742153 - DNA, 15 bp, Homo sapiens
ttagagatttggctg

SEQ ID NO: 1742154 - DNA, 15 bp, Homo sapiens
tagagatttggctgg

SEQ ID NO: 1742155 - DNA, 15 bp, Homo sapiens
agagatttggctggg

SEQ ID NO: 1742156 - DNA, 15 bp, Homo sapiens
gagatttggctggga

SEQ ID NO: 1742157 - DNA, 15 bp, Homo sapiens
agatttggctgggat

SEQ ID NO: 1742158 - DNA, 15 bp, Homo sapiens
gatttggctgggatt

SEQ ID NO: 1742159 - DNA, 15 bp, Homo sapiens
atttggctgggattt

SEQ ID NO: 1742160 - DNA, 15 bp, Homo sapiens
tttggctgggattta

SEQ ID NO: 1742161 - DNA, 15 bp, Homo sapiens
ttggctgggatttaa

SEQ ID NO: 1742162 - DNA, 15 bp, Homo sapiens
tggctgggatttaag

SEQ ID NO: 1742163 - DNA, 15 bp, Homo sapiens
ggctgggatttaagt

SEQ ID NO: 1742164 - DNA, 15 bp, Homo sapiens
gctgggatttaagtt

SEQ ID NO: 1742165 - DNA, 15 bp, Homo sapiens
ctgggatttaagttc

SEQ ID NO: 1742166 - DNA, 15 bp, Homo sapiens
tgggatttaagttca

SEQ ID NO: 1742167 - DNA, 15 bp, Homo sapiens
gggatttaagttcag

SEQ ID NO: 1742168 - DNA, 15 bp, Homo sapiens
ggatttaagttcagg

SEQ ID NO: 1742169 - DNA, 15 bp, Homo sapiens
gatttaagttcaggt

SEQ ID NO: 1742170 - DNA, 15 bp, Homo sapiens
atttaagttcaggtc

SEQ ID NO: 1742171 - DNA, 15 bp, Homo sapiens
tttaagttcaggtct

SEQ ID NO: 1742172 - DNA, 15 bp, Homo sapiens
ttaagttcaggtcta

SEQ ID NO: 1742173 - DNA, 15 bp, Homo sapiens
taagttcaggtctag

SEQ ID NO: 1742174 - DNA, 15 bp, Homo sapiens
aagttcaggtctagt

SEQ ID NO: 1742175 - DNA, 15 bp, Homo sapiens
agttcaggtctagtt

SEQ ID NO: 1742176 - DNA, 15 bp, Homo sapiens
gttcaggtctagttt

SEQ ID NO: 1742177 - DNA, 15 bp, Homo sapiens
ttcaggtctagtttc

SEQ ID NO: 1742178 - DNA, 15 bp, Homo sapiens
tcaggtctagtttca

SEQ ID NO: 1742179 - DNA, 15 bp, Homo sapiens
caggtctagtttcaa

SEQ ID NO: 1742180 - DNA, 15 bp, Homo sapiens
aggtctagtttcaaa

SEQ ID NO: 1742181 - DNA, 15 bp, Homo sapiens
ggtctagtttcaaag

SEQ ID NO: 1742182 - DNA, 15 bp, Homo sapiens
gtctagtttcaaagc

SEQ ID NO: 1742183 - DNA, 15 bp, Homo sapiens
tctagtttcaaagct

SEQ ID NO: 1742184 - DNA, 15 bp, Homo sapiens
ctagtttcaaagctc

SEQ ID NO: 1742185 - DNA, 15 bp, Homo sapiens
tagtttcaaagctct

SEQ ID NO: 1742186 - DNA, 15 bp, Homo sapiens
agtttcaaagctctt

SEQ ID NO: 1742187 - DNA, 15 bp, Homo sapiens
gtttcaaagctctta

SEQ ID NO: 1742188 - DNA, 15 bp, Homo sapiens
tttcaaagctcttac

SEQ ID NO: 1742189 - DNA, 15 bp, Homo sapiens
ttcaaagctcttacc

SEQ ID NO: 1742190 - DNA, 15 bp, Homo sapiens
tcaaagctcttacct

SEQ ID NO: 1742191 - DNA, 15 bp, Homo sapiens
caaagctcttacctc

SEQ ID NO: 1742192 - DNA, 15 bp, Homo sapiens
aaagctcttacctct

SEQ ID NO: 1742193 - DNA, 15 bp, Homo sapiens
aagctcttacctcta

SEQ ID NO: 1742194 - DNA, 15 bp, Homo sapiens
agctcttacctctac

SEQ ID NO: 1742195 - DNA, 15 bp, Homo sapiens
gctcttacctctact

SEQ ID NO: 1742196 - DNA, 15 bp, Homo sapiens
ctcttacctctacta

SEQ ID NO: 1742197 - DNA, 15 bp, Homo sapiens
tcttacctctactat

SEQ ID NO: 1742198 - DNA, 15 bp, Homo sapiens
cttacctctactata

SEQ ID NO: 1742199 - DNA, 15 bp, Homo sapiens
ttacctctactatat

SEQ ID NO: 1742200 - DNA, 15 bp, Homo sapiens
tacctctactatatg

SEQ ID NO: 1742201 - DNA, 15 bp, Homo sapiens
acctctactatatgg

SEQ ID NO: 1742202 - DNA, 15 bp, Homo sapiens
cctctactatatggt

SEQ ID NO: 1742203 - DNA, 15 bp, Homo sapiens
ctctactatatggtc

SEQ ID NO: 1742204 - DNA, 15 bp, Homo sapiens
tctactatatggtct

SEQ ID NO: 1742205 - DNA, 15 bp, Homo sapiens
ctactatatggtctc

SEQ ID NO: 1742206 - DNA, 15 bp, Homo sapiens
tactatatggtctct

SEQ ID NO: 1742207 - DNA, 15 bp, Homo sapiens
actatatggtctctt

SEQ ID NO: 1742208 - DNA, 15 bp, Homo sapiens
ctatatggtctcttt

SEQ ID NO: 1742209 - DNA, 15 bp, Homo sapiens
tatatggtctcttta

SEQ ID NO: 1742210 - DNA, 15 bp, Homo sapiens
atatggtctctttat

SEQ ID NO: 1742211 - DNA, 15 bp, Homo sapiens
tatggtctctttata

SEQ ID NO: 1742212 - DNA, 15 bp, Homo sapiens
atggtctctttatat

SEQ ID NO: 1742213 - DNA, 15 bp, Homo sapiens
tggtctctttatatg

SEQ ID NO: 1742214 - DNA, 15 bp, Homo sapiens
ggtctctttatatgt

SEQ ID NO: 1742215 - DNA, 15 bp, Homo sapiens
gtctctttatatgtg

SEQ ID NO: 1742216 - DNA, 15 bp, Homo sapiens
tctctttatatgtgt

SEQ ID NO: 1742217 - DNA, 15 bp, Homo sapiens
ctctttatatgtgtt

SEQ ID NO: 1742218 - DNA, 15 bp, Homo sapiens
tctttatatgtgttt

SEQ ID NO: 1742219 - DNA, 15 bp, Homo sapiens
ctttatatgtgttta

SEQ ID NO: 1742220 - DNA, 15 bp, Homo sapiens
tttatatgtgtttaa

SEQ ID NO: 1742221 - DNA, 15 bp, Homo sapiens
ttatatgtgtttaag

SEQ ID NO: 1742222 - DNA, 15 bp, Homo sapiens
tatatgtgtttaagt

SEQ ID NO: 1742223 - DNA, 15 bp, Homo sapiens
atatgtgtttaagtg

SEQ ID NO: 1742224 - DNA, 15 bp, Homo sapiens
tatgtgtttaagtgt

SEQ ID NO: 1742225 - DNA, 15 bp, Homo sapiens
atgtgtttaagtgtc

SEQ ID NO: 1742226 - DNA, 15 bp, Homo sapiens
tgtgtttaagtgtct

SEQ ID NO: 1742227 - DNA, 15 bp, Homo sapiens
gtgtttaagtgtcta

SEQ ID NO: 1742228 - DNA, 15 bp, Homo sapiens
tgtttaagtgtctaa

SEQ ID NO: 1742229 - DNA, 15 bp, Homo sapiens
gtttaagtgtctaaa

SEQ ID NO: 1742230 - DNA, 15 bp, Homo sapiens
tttaagtgtctaaat

SEQ ID NO: 1742231 - DNA, 15 bp, Homo sapiens
ttaagtgtctaaatc

SEQ ID NO: 1742232 - DNA, 15 bp, Homo sapiens
taagtgtctaaatct

SEQ ID NO: 1742233 - DNA, 15 bp, Homo sapiens
aagtgtctaaatcta

SEQ ID NO: 1742234 - DNA, 15 bp, Homo sapiens
agtgtctaaatctac

SEQ ID NO: 1742235 - DNA, 15 bp, Homo sapiens
gtgtctaaatctaca

SEQ ID NO: 1742236 - DNA, 15 bp, Homo sapiens
tgtctaaatctacac

SEQ ID NO: 1742237 - DNA, 15 bp, Homo sapiens
gtctaaatctacaca

SEQ ID NO: 1742238 - DNA, 15 bp, Homo sapiens
tctaaatctacacat

SEQ ID NO: 1742239 - DNA, 15 bp, Homo sapiens
ctaaatctacacata

SEQ ID NO: 1742240 - DNA, 15 bp, Homo sapiens
taaatctacacataa

SEQ ID NO: 1742241 - DNA, 15 bp, Homo sapiens
aaatctacacataaa

SEQ ID NO: 1742242 - DNA, 15 bp, Homo sapiens
aatctacacataaac

SEQ ID NO: 1742243 - DNA, 15 bp, Homo sapiens
atctacacataaaca

SEQ ID NO: 1742244 - DNA, 15 bp, Homo sapiens
tctacacataaacat

SEQ ID NO: 1742245 - DNA, 15 bp, Homo sapiens
ctacacataaacatt

SEQ ID NO: 1742246 - DNA, 15 bp, Homo sapiens
tacacataaacattt

SEQ ID NO: 1742247 - DNA, 15 bp, Homo sapiens
acacataaacatttt

SEQ ID NO: 1742248 - DNA, 15 bp, Homo sapiens
cacataaacatttta

SEQ ID NO: 1742249 - DNA, 15 bp, Homo sapiens
acataaacattttat

SEQ ID NO: 1742250 - DNA, 15 bp, Homo sapiens
cataaacattttatt

SEQ ID NO: 1742251 - DNA, 15 bp, Homo sapiens
ataaacattttattt

SEQ ID NO: 1742252 - DNA, 15 bp, Homo sapiens
taaacattttattta

SEQ ID NO: 1742253 - DNA, 15 bp, Homo sapiens
aaacattttatttac

SEQ ID NO: 1742254 - DNA, 15 bp, Homo sapiens
aacattttatttaca

SEQ ID NO: 1742255 - DNA, 15 bp, Homo sapiens
acattttatttacaa

SEQ ID NO: 1742256 - DNA, 15 bp, Homo sapiens
cattttatttacaag

SEQ ID NO: 1742257 - DNA, 15 bp, Homo sapiens
attttatttacaagt

SEQ ID NO: 1742258 - DNA, 15 bp, Homo sapiens
ttttatttacaagta

SEQ ID NO: 1742259 - DNA, 15 bp, Homo sapiens
tttatttacaagtac

SEQ ID NO: 1742260 - DNA, 15 bp, Homo sapiens
ttatttacaagtaca

SEQ ID NO: 1742261 - DNA, 15 bp, Homo sapiens
tatttacaagtacat

SEQ ID NO: 1742262 - DNA, 15 bp, Homo sapiens
atttacaagtacatg

SEQ ID NO: 1742263 - DNA, 15 bp, Homo sapiens
tttacaagtacatgc

SEQ ID NO: 1742264 - DNA, 15 bp, Homo sapiens
ttacaagtacatgca

SEQ ID NO: 1742265 - DNA, 15 bp, Homo sapiens
tacaagtacatgcac

SEQ ID NO: 1742266 - DNA, 15 bp, Homo sapiens
acaagtacatgcact

SEQ ID NO: 1742267 - DNA, 15 bp, Homo sapiens
caagtacatgcactg

SEQ ID NO: 1742268 - DNA, 15 bp, Homo sapiens
aagtacatgcactga

SEQ ID NO: 1742269 - DNA, 15 bp, Homo sapiens
agtacatgcactgaa

SEQ ID NO: 1742270 - DNA, 15 bp, Homo sapiens
gtacatgcactgaaa

SEQ ID NO: 1742271 - DNA, 15 bp, Homo sapiens
tacatgcactgaaat

SEQ ID NO: 1742272 - DNA, 15 bp, Homo sapiens
acatgcactgaaatg

SEQ ID NO: 1742273 - DNA, 15 bp, Homo sapiens
catgcactgaaatgt

SEQ ID NO: 1742274 - DNA, 15 bp, Homo sapiens
atgcactgaaatgtt

SEQ ID NO: 1742275 - DNA, 15 bp, Homo sapiens
tgcactgaaatgttc

SEQ ID NO: 1742276 - DNA, 15 bp, Homo sapiens
gcactgaaatgttca

SEQ ID NO: 1742277 - DNA, 15 bp, Homo sapiens
cactgaaatgttcac

SEQ ID NO: 1742278 - DNA, 15 bp, Homo sapiens
actgaaatgttcaca

SEQ ID NO: 1742279 - DNA, 15 bp, Homo sapiens
ctgaaatgttcacat

SEQ ID NO: 1742280 - DNA, 15 bp, Homo sapiens
tgaaatgttcacatg

SEQ ID NO: 1742281 - DNA, 15 bp, Homo sapiens
gaaatgttcacatgt

SEQ ID NO: 1742282 - DNA, 15 bp, Homo sapiens
aaatgttcacatgta

SEQ ID NO: 1742283 - DNA, 15 bp, Homo sapiens
aatgttcacatgtag

SEQ ID NO: 1742284 - DNA, 15 bp, Homo sapiens
atgttcacatgtaga

SEQ ID NO: 1742285 - DNA, 15 bp, Homo sapiens
tgttcacatgtagat

SEQ ID NO: 1742286 - DNA, 15 bp, Homo sapiens
gttcacatgtagatt

SEQ ID NO: 1742287 - DNA, 15 bp, Homo sapiens
ttcacatgtagatta

SEQ ID NO: 1742288 - DNA, 15 bp, Homo sapiens
tcacatgtagattat

SEQ ID NO: 1742289 - DNA, 15 bp, Homo sapiens
cacatgtagattata

SEQ ID NO: 1742290 - DNA, 15 bp, Homo sapiens
acatgtagattataa

SEQ ID NO: 1742291 - DNA, 15 bp, Homo sapiens
catgtagattataac

SEQ ID NO: 1742292 - DNA, 15 bp, Homo sapiens
atgtagattataacc

SEQ ID NO: 1742293 - DNA, 15 bp, Homo sapiens
tgtagattataacca

SEQ ID NO: 1742294 - DNA, 15 bp, Homo sapiens
gtagattataaccat

SEQ ID NO: 1742295 - DNA, 15 bp, Homo sapiens
tagattataaccatg

SEQ ID NO: 1742296 - DNA, 15 bp, Homo sapiens
agattataaccatga

SEQ ID NO: 1742297 - DNA, 15 bp, Homo sapiens
gattataaccatgaa

SEQ ID NO: 1742298 - DNA, 15 bp, Homo sapiens
attataaccatgaac

SEQ ID NO: 1742299 - DNA, 15 bp, Homo sapiens
ttataaccatgaaca

SEQ ID NO: 1742300 - DNA, 15 bp, Homo sapiens
tataaccatgaacat

SEQ ID NO: 1742301 - DNA, 15 bp, Homo sapiens
ataaccatgaacatt

SEQ ID NO: 1742302 - DNA, 15 bp, Homo sapiens
taaccatgaacattc

SEQ ID NO: 1742303 - DNA, 15 bp, Homo sapiens
aaccatgaacattct

SEQ ID NO: 1742304 - DNA, 15 bp, Homo sapiens
accatgaacattctt

SEQ ID NO: 1742305 - DNA, 15 bp, Homo sapiens
ccatgaacattctta

SEQ ID NO: 1742306 - DNA, 15 bp, Homo sapiens
catgaacattcttag

SEQ ID NO: 1742307 - DNA, 15 bp, Homo sapiens
atgaacattcttagt

SEQ ID NO: 1742308 - DNA, 15 bp, Homo sapiens
tgaacattcttagtc

SEQ ID NO: 1742309 - DNA, 15 bp, Homo sapiens
gaacattcttagtct

SEQ ID NO: 1742310 - DNA, 15 bp, Homo sapiens
aacattcttagtctt

SEQ ID NO: 1742311 - DNA, 15 bp, Homo sapiens
acattcttagtctta

SEQ ID NO: 1742312 - DNA, 15 bp, Homo sapiens
cattcttagtcttat

SEQ ID NO: 1742313 - DNA, 15 bp, Homo sapiens
attcttagtcttatt

SEQ ID NO: 1742314 - DNA, 15 bp, Homo sapiens
ttcttagtcttattt

SEQ ID NO: 1742315 - DNA, 15 bp, Homo sapiens
tcttagtcttattta

SEQ ID NO: 1742316 - DNA, 15 bp, Homo sapiens
cttagtcttatttat

SEQ ID NO: 1742317 - DNA, 15 bp, Homo sapiens
ttagtcttatttatg

SEQ ID NO: 1742318 - DNA, 15 bp, Homo sapiens
tagtcttatttatgt

SEQ ID NO: 1742319 - DNA, 15 bp, Homo sapiens
agtcttatttatgta

SEQ ID NO: 1742320 - DNA, 15 bp, Homo sapiens
gtcttatttatgtaa

SEQ ID NO: 1742321 - DNA, 15 bp, Homo sapiens
tcttatttatgtaat

SEQ ID NO: 1742322 - DNA, 15 bp, Homo sapiens
cttatttatgtaatt

SEQ ID NO: 1742323 - DNA, 15 bp, Homo sapiens
ttatttatgtaatta

SEQ ID NO: 1742324 - DNA, 15 bp, Homo sapiens
tatttatgtaattat

SEQ ID NO: 1742325 - DNA, 15 bp, Homo sapiens
atttatgtaattatt

SEQ ID NO: 1742326 - DNA, 15 bp, Homo sapiens
tttatgtaattatta

SEQ ID NO: 1742327 - DNA, 15 bp, Homo sapiens
ttatgtaattattat

SEQ ID NO: 1742328 - DNA, 15 bp, Homo sapiens
tatgtaattattatc

SEQ ID NO: 1742329 - DNA, 15 bp, Homo sapiens
atgtaattattatcc

SEQ ID NO: 1742330 - DNA, 15 bp, Homo sapiens
tgtaattattatcct

SEQ ID NO: 1742331 - DNA, 15 bp, Homo sapiens
gtaattattatcctt

SEQ ID NO: 1742332 - DNA, 15 bp, Homo sapiens
taattattatccttt

SEQ ID NO: 1742333 - DNA, 15 bp, Homo sapiens
aattattatccttta

SEQ ID NO: 1742334 - DNA, 15 bp, Homo sapiens
attattatcctttat

SEQ ID NO: 1742335 - DNA, 15 bp, Homo sapiens
ttattatcctttatt

SEQ ID NO: 1742336 - DNA, 15 bp, Homo sapiens
tattatcctttattg

SEQ ID NO: 1742337 - DNA, 15 bp, Homo sapiens
attatcctttattga

SEQ ID NO: 1742338 - DNA, 15 bp, Homo sapiens
ttatcctttattgaa

SEQ ID NO: 1742339 - DNA, 15 bp, Homo sapiens
tatcctttattgaaa

SEQ ID NO: 1742340 - DNA, 15 bp, Homo sapiens
atcctttattgaaac

SEQ ID NO: 1742341 - DNA, 15 bp, Homo sapiens
tcctttattgaaaca

SEQ ID NO: 1742342 - DNA, 15 bp, Homo sapiens
cctttattgaaacat

SEQ ID NO: 1742343 - DNA, 15 bp, Homo sapiens
ctttattgaaacatg

SEQ ID NO: 1742344 - DNA, 15 bp, Homo sapiens
tttattgaaacatga

SEQ ID NO: 1742345 - DNA, 15 bp, Homo sapiens
ttattgaaacatgag

SEQ ID NO: 1742346 - DNA, 15 bp, Homo sapiens
tattgaaacatgagg

SEQ ID NO: 1742347 - DNA, 15 bp, Homo sapiens
attgaaacatgagga

SEQ ID NO: 1742348 - DNA, 15 bp, Homo sapiens
ttgaaacatgaggaa

SEQ ID NO: 1742349 - DNA, 15 bp, Homo sapiens
tgaaacatgaggaag

SEQ ID NO: 1742350 - DNA, 15 bp, Homo sapiens
gaaacatgaggaagt

SEQ ID NO: 1742351 - DNA, 15 bp, Homo sapiens
aaacatgaggaagtg

SEQ ID NO: 1742352 - DNA, 15 bp, Homo sapiens
aacatgaggaagtga

SEQ ID NO: 1742353 - DNA, 15 bp, Homo sapiens
acatgaggaagtgaa

SEQ ID NO: 1742354 - DNA, 15 bp, Homo sapiens
catgaggaagtgaag

SEQ ID NO: 1742355 - DNA, 15 bp, Homo sapiens
atgaggaagtgaagc

SEQ ID NO: 1742356 - DNA, 15 bp, Homo sapiens
tgaggaagtgaagca

SEQ ID NO: 1742357 - DNA, 15 bp, Homo sapiens
gaggaagtgaagcag

SEQ ID NO: 1742358 - DNA, 15 bp, Homo sapiens
aggaagtgaagcaga

SEQ ID NO: 1742359 - DNA, 15 bp, Homo sapiens
ggaagtgaagcagat

SEQ ID NO: 1742360 - DNA, 15 bp, Homo sapiens
gaagtgaagcagata

SEQ ID NO: 1742361 - DNA, 15 bp, Homo sapiens
aagtgaagcagataa

SEQ ID NO: 1742362 - DNA, 15 bp, Homo sapiens
agtgaagcagataat

SEQ ID NO: 1742363 - DNA, 15 bp, Homo sapiens
gtgaagcagataata

SEQ ID NO: 1742364 - DNA, 15 bp, Homo sapiens
tgaagcagataataa

SEQ ID NO: 1742365 - DNA, 15 bp, Homo sapiens
gaagcagataataaa

SEQ ID NO: 1742366 - DNA, 15 bp, Homo sapiens
aagcagataataaat

SEQ ID NO: 1742367 - DNA, 15 bp, Homo sapiens
agcagataataaata

SEQ ID NO: 1742368 - DNA, 15 bp, Homo sapiens
gcagataataaatat

SEQ ID NO: 1742369 - DNA, 15 bp, Homo sapiens
cagataataaatata

SEQ ID NO: 1742370 - DNA, 15 bp, Homo sapiens
agataataaatataa

SEQ ID NO: 1742371 - DNA, 15 bp, Homo sapiens
gataataaatataaa

SEQ ID NO: 1742372 - DNA, 15 bp, Homo sapiens
ataataaatataaat

SEQ ID NO: 1742373 - DNA, 15 bp, Homo sapiens
taataaatataaatt

SEQ ID NO: 1742374 - DNA, 15 bp, Homo sapiens
aataaatataaattg

SEQ ID NO: 1742375 - DNA, 15 bp, Homo sapiens
ataaatataaattgt

SEQ ID NO: 1742376 - DNA, 15 bp, Homo sapiens
taaatataaattgtg

SEQ ID NO: 1742377 - DNA, 15 bp, Homo sapiens
aaatataaattgtga

SEQ ID NO: 1742378 - DNA, 15 bp, Homo sapiens
aatataaattgtgat

SEQ ID NO: 1742379 - DNA, 15 bp, Homo sapiens
atataaattgtgata

SEQ ID NO: 1742380 - DNA, 15 bp, Homo sapiens
tataaattgtgatat

SEQ ID NO: 1742381 - DNA, 15 bp, Homo sapiens
ataaattgtgatata

SEQ ID NO: 1742382 - DNA, 15 bp, Homo sapiens
taaattgtgatatag

SEQ ID NO: 1742383 - DNA, 15 bp, Homo sapiens
aaattgtgatatagg

SEQ ID NO: 1742384 - DNA, 15 bp, Homo sapiens
aattgtgatataggt

SEQ ID NO: 1742385 - DNA, 15 bp, Homo sapiens
attgtgatataggtt

SEQ ID NO: 1742386 - DNA, 15 bp, Homo sapiens
ttgtgatataggttt

SEQ ID NO: 1742387 - DNA, 15 bp, Homo sapiens
tgtgatataggtttt

SEQ ID NO: 1742388 - DNA, 15 bp, Homo sapiens
gtgatataggtttta

SEQ ID NO: 1742389 - DNA, 15 bp, Homo sapiens
tgatataggttttat

SEQ ID NO: 1742390 - DNA, 15 bp, Homo sapiens
gatataggttttata

SEQ ID NO: 1742391 - DNA, 15 bp, Homo sapiens
atataggttttatag

SEQ ID NO: 1742392 - DNA, 15 bp, Homo sapiens
tataggttttatagc

SEQ ID NO: 1742393 - DNA, 15 bp, Homo sapiens
ataggttttatagca

SEQ ID NO: 1742394 - DNA, 15 bp, Homo sapiens
taggttttatagcat

SEQ ID NO: 1742395 - DNA, 15 bp, Homo sapiens
aggttttatagcatt

SEQ ID NO: 1742396 - DNA, 15 bp, Homo sapiens
ggttttatagcattg

SEQ ID NO: 1742397 - DNA, 15 bp, Homo sapiens
gttttatagcattgc

SEQ ID NO: 1742398 - DNA, 15 bp, Homo sapiens
ttttatagcattgca

SEQ ID NO: 1742399 - DNA, 15 bp, Homo sapiens
tttatagcattgcac

SEQ ID NO: 1742400 - DNA, 15 bp, Homo sapiens
ttatagcattgcact

SEQ ID NO: 1742401 - DNA, 15 bp, Homo sapiens
tatagcattgcactt

SEQ ID NO: 1742402 - DNA, 15 bp, Homo sapiens
atagcattgcacttt

SEQ ID NO: 1742403 - DNA, 15 bp, Homo sapiens
tagcattgcacttta

SEQ ID NO: 1742404 - DNA, 15 bp, Homo sapiens
agcattgcactttac

SEQ ID NO: 1742405 - DNA, 15 bp, Homo sapiens
gcattgcactttaca

SEQ ID NO: 1742406 - DNA, 15 bp, Homo sapiens
cattgcactttacaa

SEQ ID NO: 1742407 - DNA, 15 bp, Homo sapiens
attgcactttacaaa

SEQ ID NO: 1742408 - DNA, 15 bp, Homo sapiens
ttgcactttacaaag

SEQ ID NO: 1742409 - DNA, 15 bp, Homo sapiens
tgcactttacaaagc

SEQ ID NO: 1742410 - DNA, 15 bp, Homo sapiens
gcactttacaaagcc

SEQ ID NO: 1742411 - DNA, 15 bp, Homo sapiens
cactttacaaagccc

SEQ ID NO: 1742412 - DNA, 15 bp, Homo sapiens
actttacaaagccct

SEQ ID NO: 1742413 - DNA, 15 bp, Homo sapiens
ctttacaaagccctt

SEQ ID NO: 1742414 - DNA, 15 bp, Homo sapiens
tttacaaagcccttt

SEQ ID NO: 1742415 - DNA, 15 bp, Homo sapiens
ttacaaagccctttt

SEQ ID NO: 1742416 - DNA, 15 bp, Homo sapiens
tacaaagccctttta

SEQ ID NO: 1742417 - DNA, 15 bp, Homo sapiens
acaaagcccttttac

SEQ ID NO: 1742418 - DNA, 15 bp, Homo sapiens
caaagcccttttaca

SEQ ID NO: 1742419 - DNA, 15 bp, Homo sapiens
aaagcccttttacaa

SEQ ID NO: 1742420 - DNA, 15 bp, Homo sapiens
aagcccttttacaag

SEQ ID NO: 1742421 - DNA, 15 bp, Homo sapiens
agcccttttacaagc

SEQ ID NO: 1742422 - DNA, 15 bp, Homo sapiens
gcccttttacaagca

SEQ ID NO: 1742423 - DNA, 15 bp, Homo sapiens
cccttttacaagcat

SEQ ID NO: 1742424 - DNA, 15 bp, Homo sapiens
ccttttacaagcatt

SEQ ID NO: 1742425 - DNA, 15 bp, Homo sapiens
cttttacaagcatta

SEQ ID NO: 1742426 - DNA, 15 bp, Homo sapiens
ttttacaagcattac

SEQ ID NO: 1742427 - DNA, 15 bp, Homo sapiens
tttacaagcattact

SEQ ID NO: 1742428 - DNA, 15 bp, Homo sapiens
ttacaagcattactg

SEQ ID NO: 1742429 - DNA, 15 bp, Homo sapiens
tacaagcattactgc

SEQ ID NO: 1742430 - DNA, 15 bp, Homo sapiens
acaagcattactgca

SEQ ID NO: 1742431 - DNA, 15 bp, Homo sapiens
caagcattactgcaa

SEQ ID NO: 1742432 - DNA, 15 bp, Homo sapiens
aagcattactgcaac

SEQ ID NO: 1742433 - DNA, 15 bp, Homo sapiens
agcattactgcaact

SEQ ID NO: 1742434 - DNA, 15 bp, Homo sapiens
gcattactgcaactg

SEQ ID NO: 1742435 - DNA, 15 bp, Homo sapiens
cattactgcaactga

SEQ ID NO: 1742436 - DNA, 15 bp, Homo sapiens
attactgcaactgac

SEQ ID NO: 1742437 - DNA, 15 bp, Homo sapiens
ttactgcaactgacc

SEQ ID NO: 1742438 - DNA, 15 bp, Homo sapiens
tactgcaactgacct

SEQ ID NO: 1742439 - DNA, 15 bp, Homo sapiens
actgcaactgacctt

SEQ ID NO: 1742440 - DNA, 15 bp, Homo sapiens
ctgcaactgacctta

SEQ ID NO: 1742441 - DNA, 15 bp, Homo sapiens
tgcaactgaccttaa

SEQ ID NO: 1742442 - DNA, 15 bp, Homo sapiens
gcaactgaccttaac

SEQ ID NO: 1742443 - DNA, 15 bp, Homo sapiens
caactgaccttaact

SEQ ID NO: 1742444 - DNA, 15 bp, Homo sapiens
aactgaccttaacta

SEQ ID NO: 1742445 - DNA, 15 bp, Homo sapiens
actgaccttaactag

SEQ ID NO: 1742446 - DNA, 15 bp, Homo sapiens
ctgaccttaactagt

SEQ ID NO: 1742447 - DNA, 15 bp, Homo sapiens
tgaccttaactagtt

SEQ ID NO: 1742448 - DNA, 15 bp, Homo sapiens
gaccttaactagtta

SEQ ID NO: 1742449 - DNA, 15 bp, Homo sapiens
accttaactagttat

SEQ ID NO: 1742450 - DNA, 15 bp, Homo sapiens
ccttaactagttatg

SEQ ID NO: 1742451 - DNA, 15 bp, Homo sapiens
cttaactagttatga

SEQ ID NO: 1742452 - DNA, 15 bp, Homo sapiens
ttaactagttatgag

SEQ ID NO: 1742453 - DNA, 15 bp, Homo sapiens
taactagttatgaga

SEQ ID NO: 1742454 - DNA, 15 bp, Homo sapiens
aactagttatgagaa

SEQ ID NO: 1742455 - DNA, 15 bp, Homo sapiens
actagttatgagaag

SEQ ID NO: 1742456 - DNA, 15 bp, Homo sapiens
ctagttatgagaagt

SEQ ID NO: 1742457 - DNA, 15 bp, Homo sapiens
tagttatgagaagtg

SEQ ID NO: 1742458 - DNA, 15 bp, Homo sapiens
agttatgagaagtgg

SEQ ID NO: 1742459 - DNA, 15 bp, Homo sapiens
gttatgagaagtgga

SEQ ID NO: 1742460 - DNA, 15 bp, Homo sapiens
ttatgagaagtggaa

SEQ ID NO: 1742461 - DNA, 15 bp, Homo sapiens
tatgagaagtggaac

SEQ ID NO: 1742462 - DNA, 15 bp, Homo sapiens
atgagaagtggaaca

SEQ ID NO: 1742463 - DNA, 15 bp, Homo sapiens
tgagaagtggaacag

SEQ ID NO: 1742464 - DNA, 15 bp, Homo sapiens
gagaagtggaacaga

SEQ ID NO: 1742465 - DNA, 15 bp, Homo sapiens
agaagtggaacagac

SEQ ID NO: 1742466 - DNA, 15 bp, Homo sapiens
gaagtggaacagaca

SEQ ID NO: 1742467 - DNA, 15 bp, Homo sapiens
aagtggaacagacag

SEQ ID NO: 1742468 - DNA, 15 bp, Homo sapiens
agtggaacagacagt

SEQ ID NO: 1742469 - DNA, 15 bp, Homo sapiens
gtggaacagacagta

SEQ ID NO: 1742470 - DNA, 15 bp, Homo sapiens
tggaacagacagtat

SEQ ID NO: 1742471 - DNA, 15 bp, Homo sapiens
ggaacagacagtatc

SEQ ID NO: 1742472 - DNA, 15 bp, Homo sapiens
gaacagacagtatct

SEQ ID NO: 1742473 - DNA, 15 bp, Homo sapiens
aacagacagtatctc

SEQ ID NO: 1742474 - DNA, 15 bp, Homo sapiens
acagacagtatctct

SEQ ID NO: 1742475 - DNA, 15 bp, Homo sapiens
cagacagtatctcta

SEQ ID NO: 1742476 - DNA, 15 bp, Homo sapiens
agacagtatctctat

SEQ ID NO: 1742477 - DNA, 15 bp, Homo sapiens
gacagtatctctata

SEQ ID NO: 1742478 - DNA, 15 bp, Homo sapiens
acagtatctctatag

SEQ ID NO: 1742479 - DNA, 15 bp, Homo sapiens
cagtatctctatagg

SEQ ID NO: 1742480 - DNA, 15 bp, Homo sapiens
agtatctctataggg

SEQ ID NO: 1742481 - DNA, 15 bp, Homo sapiens
gtatctctataggga

SEQ ID NO: 1742482 - DNA, 15 bp, Homo sapiens
tatctctatagggaa

SEQ ID NO: 1742483 - DNA, 15 bp, Homo sapiens
atctctatagggaag

SEQ ID NO: 1742484 - DNA, 15 bp, Homo sapiens
tctctatagggaaga

SEQ ID NO: 1742485 - DNA, 15 bp, Homo sapiens
ctctatagggaagaa

SEQ ID NO: 1742486 - DNA, 15 bp, Homo sapiens
tctatagggaagaag

SEQ ID NO: 1742487 - DNA, 15 bp, Homo sapiens
ctatagggaagaagg

SEQ ID NO: 1742488 - DNA, 15 bp, Homo sapiens
tatagggaagaaggc

SEQ ID NO: 1742489 - DNA, 15 bp, Homo sapiens
atagggaagaaggcg

SEQ ID NO: 1742490 - DNA, 15 bp, Homo sapiens
tagggaagaaggcgt

SEQ ID NO: 1742491 - DNA, 15 bp, Homo sapiens
agggaagaaggcgtc

SEQ ID NO: 1742492 - DNA, 15 bp, Homo sapiens
gggaagaaggcgtca

SEQ ID NO: 1742493 - DNA, 15 bp, Homo sapiens
ggaagaaggcgtcag

SEQ ID NO: 1742494 - DNA, 15 bp, Homo sapiens
gaagaaggcgtcaga

SEQ ID NO: 1742495 - DNA, 15 bp, Homo sapiens
aagaaggcgtcagag

SEQ ID NO: 1742496 - DNA, 15 bp, Homo sapiens
agaaggcgtcagaga

SEQ ID NO: 1742497 - DNA, 15 bp, Homo sapiens
gaaggcgtcagagac

SEQ ID NO: 1742498 - DNA, 15 bp, Homo sapiens
aaggcgtcagagact

SEQ ID NO: 1742499 - DNA, 15 bp, Homo sapiens
aggcgtcagagactg

SEQ ID NO: 1742500 - DNA, 15 bp, Homo sapiens
ggcgtcagagactgg

SEQ ID NO: 1742501 - DNA, 15 bp, Homo sapiens
gcgtcagagactggg

SEQ ID NO: 1742502 - DNA, 15 bp, Homo sapiens
cgtcagagactgggt

SEQ ID NO: 1742503 - DNA, 15 bp, Homo sapiens
gtcagagactgggtg

SEQ ID NO: 1742504 - DNA, 15 bp, Homo sapiens
tcagagactgggtga

SEQ ID NO: 1742505 - DNA, 15 bp, Homo sapiens
cagagactgggtgag

SEQ ID NO: 1742506 - DNA, 15 bp, Homo sapiens
agagactgggtgagt

SEQ ID NO: 1742507 - DNA, 15 bp, Homo sapiens
gagactgggtgagtg

SEQ ID NO: 1742508 - DNA, 15 bp, Homo sapiens
agactgggtgagtga

SEQ ID NO: 1742509 - DNA, 15 bp, Homo sapiens
gactgggtgagtgac

SEQ ID NO: 1742510 - DNA, 15 bp, Homo sapiens
actgggtgagtgact

SEQ ID NO: 1742511 - DNA, 15 bp, Homo sapiens
ctgggtgagtgacta

SEQ ID NO: 1742512 - DNA, 15 bp, Homo sapiens
tgggtgagtgactag

SEQ ID NO: 1742513 - DNA, 15 bp, Homo sapiens
gggtgagtgactagc

SEQ ID NO: 1742514 - DNA, 15 bp, Homo sapiens
ggtgagtgactagct

SEQ ID NO: 1742515 - DNA, 15 bp, Homo sapiens
gtgagtgactagctt

SEQ ID NO: 1742516 - DNA, 15 bp, Homo sapiens
tgagtgactagcttc

SEQ ID NO: 1742517 - DNA, 15 bp, Homo sapiens
gagtgactagcttca

SEQ ID NO: 1742518 - DNA, 15 bp, Homo sapiens
agtgactagcttcag

SEQ ID NO: 1742519 - DNA, 15 bp, Homo sapiens
gtgactagcttcaga

SEQ ID NO: 1742520 - DNA, 15 bp, Homo sapiens
tgactagcttcagag

SEQ ID NO: 1742521 - DNA, 15 bp, Homo sapiens
gactagcttcagagg

SEQ ID NO: 1742522 - DNA, 15 bp, Homo sapiens
actagcttcagaggc

SEQ ID NO: 1742523 - DNA, 15 bp, Homo sapiens
ctagcttcagaggca

SEQ ID NO: 1742524 - DNA, 15 bp, Homo sapiens
tagcttcagaggcac

SEQ ID NO: 1742525 - DNA, 15 bp, Homo sapiens
agcttcagaggcacc

SEQ ID NO: 1742526 - DNA, 15 bp, Homo sapiens
gcttcagaggcacca

SEQ ID NO: 1742527 - DNA, 15 bp, Homo sapiens
cttcagaggcaccat

SEQ ID NO: 1742528 - DNA, 15 bp, Homo sapiens
ttcagaggcaccata

SEQ ID NO: 1742529 - DNA, 15 bp, Homo sapiens
tcagaggcaccatat

SEQ ID NO: 1742530 - DNA, 15 bp, Homo sapiens
cagaggcaccatatt

SEQ ID NO: 1742531 - DNA, 15 bp, Homo sapiens
agaggcaccatatta

SEQ ID NO: 1742532 - DNA, 15 bp, Homo sapiens
gaggcaccatattaa

SEQ ID NO: 1742533 - DNA, 15 bp, Homo sapiens
aggcaccatattaag

SEQ ID NO: 1742534 - DNA, 15 bp, Homo sapiens
ggcaccatattaaga

SEQ ID NO: 1742535 - DNA, 15 bp, Homo sapiens
gcaccatattaagag

SEQ ID NO: 1742536 - DNA, 15 bp, Homo sapiens
caccatattaagagg

SEQ ID NO: 1742537 - DNA, 15 bp, Homo sapiens
accatattaagaggg

SEQ ID NO: 1742538 - DNA, 15 bp, Homo sapiens
ccatattaagaggga

SEQ ID NO: 1742539 - DNA, 15 bp, Homo sapiens
catattaagagggaa

SEQ ID NO: 1742540 - DNA, 15 bp, Homo sapiens
atattaagagggaag

SEQ ID NO: 1742541 - DNA, 15 bp, Homo sapiens
tattaagagggaaga

SEQ ID NO: 1742542 - DNA, 15 bp, Homo sapiens
attaagagggaagat

SEQ ID NO: 1742543 - DNA, 15 bp, Homo sapiens
ttaagagggaagatt

SEQ ID NO: 1742544 - DNA, 15 bp, Homo sapiens
taagagggaagatta

SEQ ID NO: 1742545 - DNA, 15 bp, Homo sapiens
aagagggaagattaa

SEQ ID NO: 1742546 - DNA, 15 bp, Homo sapiens
agagggaagattaac

SEQ ID NO: 1742547 - DNA, 15 bp, Homo sapiens
gagggaagattaaca

SEQ ID NO: 1742548 - DNA, 15 bp, Homo sapiens
agggaagattaacat

SEQ ID NO: 1742549 - DNA, 15 bp, Homo sapiens
gggaagattaacatt

SEQ ID NO: 1742550 - DNA, 15 bp, Homo sapiens
ggaagattaacattc

SEQ ID NO: 1742551 - DNA, 15 bp, Homo sapiens
gaagattaacattcg

SEQ ID NO: 1742552 - DNA, 15 bp, Homo sapiens
aagattaacattcgg

SEQ ID NO: 1742553 - DNA, 15 bp, Homo sapiens
agattaacattcgga

SEQ ID NO: 1742554 - DNA, 15 bp, Homo sapiens
gattaacattcggac

SEQ ID NO: 1742555 - DNA, 15 bp, Homo sapiens
attaacattcggact

SEQ ID NO: 1742556 - DNA, 15 bp, Homo sapiens
ttaacattcggacta

SEQ ID NO: 1742557 - DNA, 15 bp, Homo sapiens
taacattcggactaa

SEQ ID NO: 1742558 - DNA, 15 bp, Homo sapiens
aacattcggactaac

SEQ ID NO: 1742559 - DNA, 15 bp, Homo sapiens
acattcggactaacc

SEQ ID NO: 1742560 - DNA, 15 bp, Homo sapiens
cattcggactaacca

SEQ ID NO: 1742561 - DNA, 15 bp, Homo sapiens
attcggactaaccat

SEQ ID NO: 1742562 - DNA, 15 bp, Homo sapiens
ttcggactaaccatg

SEQ ID NO: 1742563 - DNA, 15 bp, Homo sapiens
tcggactaaccatgt

SEQ ID NO: 1742564 - DNA, 15 bp, Homo sapiens
cggactaaccatgtt

SEQ ID NO: 1742565 - DNA, 15 bp, Homo sapiens
ggactaaccatgttt

SEQ ID NO: 1742566 - DNA, 15 bp, Homo sapiens
gactaaccatgtttc

SEQ ID NO: 1742567 - DNA, 15 bp, Homo sapiens
actaaccatgtttcc

SEQ ID NO: 1742568 - DNA, 15 bp, Homo sapiens
ctaaccatgtttcca

SEQ ID NO: 1742569 - DNA, 15 bp, Homo sapiens
taaccatgtttccac

SEQ ID NO: 1742570 - DNA, 15 bp, Homo sapiens
aaccatgtttccact

SEQ ID NO: 1742571 - DNA, 15 bp, Homo sapiens
accatgtttccacta

SEQ ID NO: 1742572 - DNA, 15 bp, Homo sapiens
ccatgtttccactaa

SEQ ID NO: 1742573 - DNA, 15 bp, Homo sapiens
catgtttccactaaa

SEQ ID NO: 1742574 - DNA, 15 bp, Homo sapiens
atgtttccactaaac

SEQ ID NO: 1742575 - DNA, 15 bp, Homo sapiens
tgtttccactaaacc

SEQ ID NO: 1742576 - DNA, 15 bp, Homo sapiens
gtttccactaaacca

SEQ ID NO: 1742577 - DNA, 15 bp, Homo sapiens
tttccactaaaccaa

SEQ ID NO: 1742578 - DNA, 15 bp, Homo sapiens
ttccactaaaccaat

SEQ ID NO: 1742579 - DNA, 15 bp, Homo sapiens
tccactaaaccaatt

SEQ ID NO: 1742580 - DNA, 15 bp, Homo sapiens
ccactaaaccaatta

SEQ ID NO: 1742581 - DNA, 15 bp, Homo sapiens
cactaaaccaattat

SEQ ID NO: 1742582 - DNA, 15 bp, Homo sapiens
actaaaccaattatg

SEQ ID NO: 1742583 - DNA, 15 bp, Homo sapiens
ctaaaccaattatgt

SEQ ID NO: 1742584 - DNA, 15 bp, Homo sapiens
taaaccaattatgtc

SEQ ID NO: 1742585 - DNA, 15 bp, Homo sapiens
aaaccaattatgtct

SEQ ID NO: 1742586 - DNA, 15 bp, Homo sapiens
aaccaattatgtctg

SEQ ID NO: 1742587 - DNA, 15 bp, Homo sapiens
accaattatgtctgg

SEQ ID NO: 1742588 - DNA, 15 bp, Homo sapiens
ccaattatgtctggt

SEQ ID NO: 1742589 - DNA, 15 bp, Homo sapiens
caattatgtctggtg

SEQ ID NO: 1742590 - DNA, 15 bp, Homo sapiens
aattatgtctggtga

SEQ ID NO: 1742591 - DNA, 15 bp, Homo sapiens
attatgtctggtgaa

SEQ ID NO: 1742592 - DNA, 15 bp, Homo sapiens
ttatgtctggtgaaa

SEQ ID NO: 1742593 - DNA, 15 bp, Homo sapiens
tatgtctggtgaaat

SEQ ID NO: 1742594 - DNA, 15 bp, Homo sapiens
atgtctggtgaaatc

SEQ ID NO: 1742595 - DNA, 15 bp, Homo sapiens
tgtctggtgaaatcc

SEQ ID NO: 1742596 - DNA, 15 bp, Homo sapiens
gtctggtgaaatcct

SEQ ID NO: 1742597 - DNA, 15 bp, Homo sapiens
tctggtgaaatcctt

SEQ ID NO: 1742598 - DNA, 15 bp, Homo sapiens
ctggtgaaatccttt

SEQ ID NO: 1742599 - DNA, 15 bp, Homo sapiens
tggtgaaatcctttc

SEQ ID NO: 1742600 - DNA, 15 bp, Homo sapiens
ggtgaaatcctttct

SEQ ID NO: 1742601 - DNA, 15 bp, Homo sapiens
gtgaaatcctttctt

SEQ ID NO: 1742602 - DNA, 15 bp, Homo sapiens
tgaaatcctttcttg

SEQ ID NO: 1742603 - DNA, 15 bp, Homo sapiens
gaaatcctttcttgt

SEQ ID NO: 1742604 - DNA, 15 bp, Homo sapiens
aaatcctttcttgtc

SEQ ID NO: 1742605 - DNA, 15 bp, Homo sapiens
aatcctttcttgtcc

SEQ ID NO: 1742606 - DNA, 15 bp, Homo sapiens
atcctttcttgtcct

SEQ ID NO: 1742607 - DNA, 15 bp, Homo sapiens
tcctttcttgtcctc

SEQ ID NO: 1742608 - DNA, 15 bp, Homo sapiens
cctttcttgtcctct

SEQ ID NO: 1742609 - DNA, 15 bp, Homo sapiens
ctttcttgtcctctt

SEQ ID NO: 1742610 - DNA, 15 bp, Homo sapiens
tttcttgtcctcttg

SEQ ID NO: 1742611 - DNA, 15 bp, Homo sapiens
ttcttgtcctcttgt

SEQ ID NO: 1742612 - DNA, 15 bp, Homo sapiens
tcttgtcctcttgta

SEQ ID NO: 1742613 - DNA, 15 bp, Homo sapiens
cttgtcctcttgtaa

SEQ ID NO: 1742614 - DNA, 15 bp, Homo sapiens
ttgtcctcttgtaat

SEQ ID NO: 1742615 - DNA, 15 bp, Homo sapiens
tgtcctcttgtaatc

SEQ ID NO: 1742616 - DNA, 15 bp, Homo sapiens
gtcctcttgtaatca

SEQ ID NO: 1742617 - DNA, 15 bp, Homo sapiens
tcctcttgtaatcag

SEQ ID NO: 1742618 - DNA, 15 bp, Homo sapiens
cctcttgtaatcagc

SEQ ID NO: 1742619 - DNA, 15 bp, Homo sapiens
ctcttgtaatcagca

SEQ ID NO: 1742620 - DNA, 15 bp, Homo sapiens
tcttgtaatcagcat

SEQ ID NO: 1742621 - DNA, 15 bp, Homo sapiens
cttgtaatcagcatc

SEQ ID NO: 1742622 - DNA, 15 bp, Homo sapiens
ttgtaatcagcatca

SEQ ID NO: 1742623 - DNA, 15 bp, Homo sapiens
tgtaatcagcatcag

SEQ ID NO: 1742624 - DNA, 15 bp, Homo sapiens
gtaatcagcatcagc

SEQ ID NO: 1742625 - DNA, 15 bp, Homo sapiens
taatcagcatcagct

SEQ ID NO: 1742626 - DNA, 15 bp, Homo sapiens
aatcagcatcagctg

SEQ ID NO: 1742627 - DNA, 15 bp, Homo sapiens
atcagcatcagctgc

SEQ ID NO: 1742628 - DNA, 15 bp, Homo sapiens
tcagcatcagctgcc

SEQ ID NO: 1742629 - DNA, 15 bp, Homo sapiens
cagcatcagctgccg

SEQ ID NO: 1742630 - DNA, 15 bp, Homo sapiens
agcatcagctgccgc

SEQ ID NO: 1742631 - DNA, 15 bp, Homo sapiens
gcatcagctgccgct

SEQ ID NO: 1742632 - DNA, 15 bp, Homo sapiens
catcagctgccgctg

SEQ ID NO: 1742633 - DNA, 15 bp, Homo sapiens
atcagctgccgctgc

SEQ ID NO: 1742634 - DNA, 15 bp, Homo sapiens
tcagctgccgctgca

SEQ ID NO: 1742635 - DNA, 15 bp, Homo sapiens
cagctgccgctgcat

SEQ ID NO: 1742636 - DNA, 15 bp, Homo sapiens
agctgccgctgcatg

SEQ ID NO: 1742637 - DNA, 15 bp, Homo sapiens
gctgccgctgcatgc

SEQ ID NO: 1742638 - DNA, 15 bp, Homo sapiens
ctgccgctgcatgca

SEQ ID NO: 1742639 - DNA, 15 bp, Homo sapiens
tgccgctgcatgcag

SEQ ID NO: 1742640 - DNA, 15 bp, Homo sapiens
gccgctgcatgcagc

SEQ ID NO: 1742641 - DNA, 15 bp, Homo sapiens
ccgctgcatgcagcg

SEQ ID NO: 1742642 - DNA, 15 bp, Homo sapiens
cgctgcatgcagcgt

SEQ ID NO: 1742643 - DNA, 15 bp, Homo sapiens
gctgcatgcagcgtt

SEQ ID NO: 1742644 - DNA, 15 bp, Homo sapiens
ctgcatgcagcgtta

SEQ ID NO: 1742645 - DNA, 15 bp, Homo sapiens
tgcatgcagcgttag

SEQ ID NO: 1742646 - DNA, 15 bp, Homo sapiens
gcatgcagcgttagg

SEQ ID NO: 1742647 - DNA, 15 bp, Homo sapiens
catgcagcgttaggt

SEQ ID NO: 1742648 - DNA, 15 bp, Homo sapiens
atgcagcgttaggta

SEQ ID NO: 1742649 - DNA, 15 bp, Homo sapiens
tgcagcgttaggtat

SEQ ID NO: 1742650 - DNA, 15 bp, Homo sapiens
gcagcgttaggtata

SEQ ID NO: 1742651 - DNA, 15 bp, Homo sapiens
cagcgttaggtataa

SEQ ID NO: 1742652 - DNA, 15 bp, Homo sapiens
agcgttaggtataat

SEQ ID NO: 1742653 - DNA, 15 bp, Homo sapiens
gcgttaggtataata

SEQ ID NO: 1742654 - DNA, 15 bp, Homo sapiens
cgttaggtataatag

SEQ ID NO: 1742655 - DNA, 15 bp, Homo sapiens
gttaggtataatagt

SEQ ID NO: 1742656 - DNA, 15 bp, Homo sapiens
ttaggtataatagta

SEQ ID NO: 1742657 - DNA, 15 bp, Homo sapiens
taggtataatagtat

SEQ ID NO: 1742658 - DNA, 15 bp, Homo sapiens
aggtataatagtatc

SEQ ID NO: 1742659 - DNA, 15 bp, Homo sapiens
ggtataatagtatct

SEQ ID NO: 1742660 - DNA, 15 bp, Homo sapiens
gtataatagtatctc

SEQ ID NO: 1742661 - DNA, 15 bp, Homo sapiens
tataatagtatctcc

SEQ ID NO: 1742662 - DNA, 15 bp, Homo sapiens
ataatagtatctcca

SEQ ID NO: 1742663 - DNA, 15 bp, Homo sapiens
taatagtatctccag

SEQ ID NO: 1742664 - DNA, 15 bp, Homo sapiens
aatagtatctccagg

SEQ ID NO: 1742665 - DNA, 15 bp, Homo sapiens
atagtatctccaggt

SEQ ID NO: 1742666 - DNA, 15 bp, Homo sapiens
gtatctccaggtttc

SEQ ID NO: 1742667 - DNA, 15 bp, Homo sapiens
tatctccaggtttcc

SEQ ID NO: 1742668 - DNA, 15 bp, Homo sapiens
atctccaggtttcca

SEQ ID NO: 1742669 - DNA, 15 bp, Homo sapiens
tctccaggtttccat

SEQ ID NO: 1742670 - DNA, 15 bp, Homo sapiens
ctccaggtttccatc

SEQ ID NO: 1742671 - DNA, 15 bp, Homo sapiens
tccaggtttccatca

SEQ ID NO: 1742672 - DNA, 15 bp, Homo sapiens
ccaggtttccatcag

SEQ ID NO: 1742673 - DNA, 15 bp, Homo sapiens
caggtttccatcaga

SEQ ID NO: 1742674 - DNA, 15 bp, Homo sapiens
aggtttccatcagaa

SEQ ID NO: 1742675 - DNA, 15 bp, Homo sapiens
ggtttccatcagaat

SEQ ID NO: 1742676 - DNA, 15 bp, Homo sapiens
gtttccatcagaatt

SEQ ID NO: 1742677 - DNA, 15 bp, Homo sapiens
tttccatcagaattc

SEQ ID NO: 1742678 - DNA, 15 bp, Homo sapiens
ttccatcagaattca

SEQ ID NO: 1742679 - DNA, 15 bp, Homo sapiens
tccatcagaattcac

SEQ ID NO: 1742680 - DNA, 15 bp, Homo sapiens
ccatcagaattcact

SEQ ID NO: 1742681 - DNA, 15 bp, Homo sapiens
catcagaattcactc

SEQ ID NO: 1742682 - DNA, 15 bp, Homo sapiens
atcagaattcactct

SEQ ID NO: 1742683 - DNA, 15 bp, Homo sapiens
tcagaattcactctc

SEQ ID NO: 1742684 - DNA, 15 bp, Homo sapiens
cagaattcactctcc

SEQ ID NO: 1742685 - DNA, 15 bp, Homo sapiens
agaattcactctcct

SEQ ID NO: 1742686 - DNA, 15 bp, Homo sapiens
gaattcactctcctc

SEQ ID NO: 1742687 - DNA, 15 bp, Homo sapiens
aattcactctcctca

SEQ ID NO: 1742688 - DNA, 15 bp, Homo sapiens
attcactctcctcat

SEQ ID NO: 1742689 - DNA, 15 bp, Homo sapiens
ttcactctcctcatt

SEQ ID NO: 1742690 - DNA, 15 bp, Homo sapiens
tcactctcctcattt

SEQ ID NO: 1742691 - DNA, 15 bp, Homo sapiens
cactctcctcatttt

SEQ ID NO: 1742692 - DNA, 15 bp, Homo sapiens
actctcctcattttc

SEQ ID NO: 1742693 - DNA, 15 bp, Homo sapiens
ctctcctcattttca

SEQ ID NO: 1742694 - DNA, 15 bp, Homo sapiens
tctcctcattttcac

SEQ ID NO: 1742695 - DNA, 15 bp, Homo sapiens
ctcctcattttcacg

SEQ ID NO: 1742696 - DNA, 15 bp, Homo sapiens
tcctcattttcacgc

SEQ ID NO: 1742697 - DNA, 15 bp, Homo sapiens
cctcattttcacgct

SEQ ID NO: 1742698 - DNA, 15 bp, Homo sapiens
ctcattttcacgctg

SEQ ID NO: 1742699 - DNA, 15 bp, Homo sapiens
tcattttcacgctgc

SEQ ID NO: 1742700 - DNA, 15 bp, Homo sapiens
cattttcacgctgca

SEQ ID NO: 1742701 - DNA, 15 bp, Homo sapiens
attttcacgctgcat

SEQ ID NO: 1742702 - DNA, 15 bp, Homo sapiens
ttttcacgctgcatc

SEQ ID NO: 1742703 - DNA, 15 bp, Homo sapiens
tttcacgctgcatcc

SEQ ID NO: 1742704 - DNA, 15 bp, Homo sapiens
ttcacgctgcatcct

SEQ ID NO: 1742705 - DNA, 15 bp, Homo sapiens
tcacgctgcatcctc

SEQ ID NO: 1742706 - DNA, 15 bp, Homo sapiens
cacgctgcatcctct

SEQ ID NO: 1742707 - DNA, 15 bp, Homo sapiens
acgctgcatcctctc

SEQ ID NO: 1742708 - DNA, 15 bp, Homo sapiens
cgctgcatcctctcc

SEQ ID NO: 1742709 - DNA, 15 bp, Homo sapiens
gctgcatcctctcca

SEQ ID NO: 1742710 - DNA, 15 bp, Homo sapiens
ctgcatcctctccaa

SEQ ID NO: 1742711 - DNA, 15 bp, Homo sapiens
tgcatcctctccaag

SEQ ID NO: 1742712 - DNA, 15 bp, Homo sapiens
gcatcctctccaaga

SEQ ID NO: 1742713 - DNA, 15 bp, Homo sapiens
catcctctccaagac

SEQ ID NO: 1742714 - DNA, 15 bp, Homo sapiens
atcctctccaagact

SEQ ID NO: 1742715 - DNA, 15 bp, Homo sapiens
tcctctccaagactt

SEQ ID NO: 1742716 - DNA, 15 bp, Homo sapiens
cctctccaagacttg

SEQ ID NO: 1742717 - DNA, 15 bp, Homo sapiens
ctctccaagacttgg

SEQ ID NO: 1742718 - DNA, 15 bp, Homo sapiens
tctccaagacttgga

SEQ ID NO: 1742719 - DNA, 15 bp, Homo sapiens
ctccaagacttggag

SEQ ID NO: 1742720 - DNA, 15 bp, Homo sapiens
tccaagacttggagc

SEQ ID NO: 1742721 - DNA, 15 bp, Homo sapiens
ccaagacttggagct

SEQ ID NO: 1742722 - DNA, 15 bp, Homo sapiens
caagacttggagctt

SEQ ID NO: 1742723 - DNA, 15 bp, Homo sapiens
aagacttggagcttg

SEQ ID NO: 1742724 - DNA, 15 bp, Homo sapiens
agacttggagcttgc

SEQ ID NO: 1742725 - DNA, 15 bp, Homo sapiens
gacttggagcttgct

SEQ ID NO: 1742726 - DNA, 15 bp, Homo sapiens
acttggagcttgcta

SEQ ID NO: 1742727 - DNA, 15 bp, Homo sapiens
cttggagcttgctag

SEQ ID NO: 1742728 - DNA, 15 bp, Homo sapiens
ttggagcttgctagg

SEQ ID NO: 1742729 - DNA, 15 bp, Homo sapiens
tggagcttgctagga

SEQ ID NO: 1742730 - DNA, 15 bp, Homo sapiens
ggagcttgctaggac

SEQ ID NO: 1742731 - DNA, 15 bp, Homo sapiens
gagcttgctaggaca

SEQ ID NO: 1742732 - DNA, 15 bp, Homo sapiens
agcttgctaggacaa

SEQ ID NO: 1742733 - DNA, 15 bp, Homo sapiens
gcttgctaggacaat

SEQ ID NO: 1742734 - DNA, 15 bp, Homo sapiens
cttgctaggacaata

SEQ ID NO: 1742735 - DNA, 15 bp, Homo sapiens
ttgctaggacaatat

SEQ ID NO: 1742736 - DNA, 15 bp, Homo sapiens
tgctaggacaatatg

SEQ ID NO: 1742737 - DNA, 15 bp, Homo sapiens
gctaggacaatatgt

SEQ ID NO: 1742738 - DNA, 15 bp, Homo sapiens
ctaggacaatatgtg

SEQ ID NO: 1742739 - DNA, 15 bp, Homo sapiens
taggacaatatgtgg

SEQ ID NO: 1742740 - DNA, 15 bp, Homo sapiens
aggacaatatgtggt

SEQ ID NO: 1742741 - DNA, 15 bp, Homo sapiens
ggacaatatgtggtt

SEQ ID NO: 1742742 - DNA, 15 bp, Homo sapiens
gacaatatgtggttc

SEQ ID NO: 1742743 - DNA, 15 bp, Homo sapiens
acaatatgtggttcc

SEQ ID NO: 1742744 - DNA, 15 bp, Homo sapiens
caatatgtggttccc

SEQ ID NO: 1742745 - DNA, 15 bp, Homo sapiens
aatatgtggttccca

SEQ ID NO: 1742746 - DNA, 15 bp, Homo sapiens
atatgtggttcccag

SEQ ID NO: 1742747 - DNA, 15 bp, Homo sapiens
tatgtggttcccagg

SEQ ID NO: 1742748 - DNA, 15 bp, Homo sapiens
atgtggttcccagga

SEQ ID NO: 1742749 - DNA, 15 bp, Homo sapiens
tgtggttcccaggac

SEQ ID NO: 1742750 - DNA, 15 bp, Homo sapiens
gtggttcccaggact

SEQ ID NO: 1742751 - DNA, 15 bp, Homo sapiens
tggttcccaggactt

SEQ ID NO: 1742752 - DNA, 15 bp, Homo sapiens
ggttcccaggacttg

SEQ ID NO: 1742753 - DNA, 15 bp, Homo sapiens
gttcccaggacttgg

SEQ ID NO: 1742754 - DNA, 15 bp, Homo sapiens
ttcccaggacttggg

SEQ ID NO: 1742755 - DNA, 15 bp, Homo sapiens
tcccaggacttggga

SEQ ID NO: 1742756 - DNA, 15 bp, Homo sapiens
cccaggacttgggaa

SEQ ID NO: 1742757 - DNA, 15 bp, Homo sapiens
ccaggacttgggaac

SEQ ID NO: 1742758 - DNA, 15 bp, Homo sapiens
caggacttgggaacc

SEQ ID NO: 1742759 - DNA, 15 bp, Homo sapiens
aggacttgggaaccc

SEQ ID NO: 1742760 - DNA, 15 bp, Homo sapiens
ggacttgggaacccc

SEQ ID NO: 1742761 - DNA, 15 bp, Homo sapiens
gacttgggaacccct

SEQ ID NO: 1742762 - DNA, 15 bp, Homo sapiens
acttgggaacccctg

SEQ ID NO: 1742763 - DNA, 15 bp, Homo sapiens
cttgggaacccctgg

SEQ ID NO: 1742764 - DNA, 15 bp, Homo sapiens
ttgggaacccctggg

SEQ ID NO: 1742765 - DNA, 15 bp, Homo sapiens
tgggaacccctgggt

SEQ ID NO: 1742766 - DNA, 15 bp, Homo sapiens
gggaacccctgggtg

SEQ ID NO: 1742767 - DNA, 15 bp, Homo sapiens
ggaacccctgggtgt

SEQ ID NO: 1742768 - DNA, 15 bp, Homo sapiens
gaacccctgggtgtc

SEQ ID NO: 1742769 - DNA, 15 bp, Homo sapiens
aacccctgggtgtct

SEQ ID NO: 1742770 - DNA, 15 bp, Homo sapiens
acccctgggtgtcta

SEQ ID NO: 1742771 - DNA, 15 bp, Homo sapiens
cccctgggtgtctag

SEQ ID NO: 1742772 - DNA, 15 bp, Homo sapiens
ccctgggtgtctaga

SEQ ID NO: 1742773 - DNA, 15 bp, Homo sapiens
cctgggtgtctagag

SEQ ID NO: 1742774 - DNA, 15 bp, Homo sapiens
ctgggtgtctagagt

SEQ ID NO: 1742775 - DNA, 15 bp, Homo sapiens
tgggtgtctagagtt

SEQ ID NO: 1742776 - DNA, 15 bp, Homo sapiens
gggtgtctagagttc

SEQ ID NO: 1742777 - DNA, 15 bp, Homo sapiens
ggtgtctagagttct

SEQ ID NO: 1742778 - DNA, 15 bp, Homo sapiens
gtgtctagagttctt

SEQ ID NO: 1742779 - DNA, 15 bp, Homo sapiens
tgtctagagttcttg

SEQ ID NO: 1742780 - DNA, 15 bp, Homo sapiens
gtctagagttcttga

SEQ ID NO: 1742781 - DNA, 15 bp, Homo sapiens
tctagagttcttgaa

SEQ ID NO: 1742782 - DNA, 15 bp, Homo sapiens
ctagagttcttgaag

SEQ ID NO: 1742783 - DNA, 15 bp, Homo sapiens
tagagttcttgaaga

SEQ ID NO: 1742784 - DNA, 15 bp, Homo sapiens
agagttcttgaagat

SEQ ID NO: 1742785 - DNA, 15 bp, Homo sapiens
gagttcttgaagatt

SEQ ID NO: 1742786 - DNA, 15 bp, Homo sapiens
agttcttgaagattc

SEQ ID NO: 1742787 - DNA, 15 bp, Homo sapiens
gttcttgaagattct

SEQ ID NO: 1742788 - DNA, 15 bp, Homo sapiens
ttcttgaagattctc

SEQ ID NO: 1742789 - DNA, 15 bp, Homo sapiens
tcttgaagattctct

SEQ ID NO: 1742790 - DNA, 15 bp, Homo sapiens
cttgaagattctctt

SEQ ID NO: 1742791 - DNA, 15 bp, Homo sapiens
ttgaagattctcttg

SEQ ID NO: 1742792 - DNA, 15 bp, Homo sapiens
tgaagattctcttgg

SEQ ID NO: 1742793 - DNA, 15 bp, Homo sapiens
gaagattctcttggc

SEQ ID NO: 1742794 - DNA, 15 bp, Homo sapiens
aagattctcttggct

SEQ ID NO: 1742795 - DNA, 15 bp, Homo sapiens
agattctcttggctg

SEQ ID NO: 1742796 - DNA, 15 bp, Homo sapiens
gattctcttggctgc

SEQ ID NO: 1742797 - DNA, 15 bp, Homo sapiens
attctcttggctgct

SEQ ID NO: 1742798 - DNA, 15 bp, Homo sapiens
ttctcttggctgctg

SEQ ID NO: 1742799 - DNA, 15 bp, Homo sapiens
tctcttggctgctgg

SEQ ID NO: 1742800 - DNA, 15 bp, Homo sapiens
ctcttggctgctggc

SEQ ID NO: 1742801 - DNA, 15 bp, Homo sapiens
tcttggctgctggct

SEQ ID NO: 1742802 - DNA, 15 bp, Homo sapiens
cttggctgctggctg

SEQ ID NO: 1742803 - DNA, 15 bp, Homo sapiens
ttggctgctggctgt

SEQ ID NO: 1742804 - DNA, 15 bp, Homo sapiens
tggctgctggctgtg

SEQ ID NO: 1742805 - DNA, 15 bp, Homo sapiens
ggctgctggctgtgg

SEQ ID NO: 1742806 - DNA, 15 bp, Homo sapiens
gctgctggctgtggg

SEQ ID NO: 1742807 - DNA, 15 bp, Homo sapiens
ctgctggctgtgggt

SEQ ID NO: 1742808 - DNA, 15 bp, Homo sapiens
tgctggctgtgggta

SEQ ID NO: 1742809 - DNA, 15 bp, Homo sapiens
gctggctgtgggtac

SEQ ID NO: 1742810 - DNA, 15 bp, Homo sapiens
ctggctgtgggtact

SEQ ID NO: 1742811 - DNA, 15 bp, Homo sapiens
tggctgtgggtactt

SEQ ID NO: 1742812 - DNA, 15 bp, Homo sapiens
ggctgtgggtacttt

SEQ ID NO: 1742813 - DNA, 15 bp, Homo sapiens
gctgtgggtacttta

SEQ ID NO: 1742814 - DNA, 15 bp, Homo sapiens
ctgtgggtactttag

SEQ ID NO: 1742815 - DNA, 15 bp, Homo sapiens
tgtgggtactttagg

SEQ ID NO: 1742816 - DNA, 15 bp, Homo sapiens
gtgggtactttaggg

SEQ ID NO: 1742817 - DNA, 15 bp, Homo sapiens
tgggtactttagggc

SEQ ID NO: 1742818 - DNA, 15 bp, Homo sapiens
gggtactttagggca

SEQ ID NO: 1742819 - DNA, 15 bp, Homo sapiens
ggtactttagggcat

SEQ ID NO: 1742820 - DNA, 15 bp, Homo sapiens
gtactttagggcatc

SEQ ID NO: 1742821 - DNA, 15 bp, Homo sapiens
tactttagggcatca

SEQ ID NO: 1742822 - DNA, 15 bp, Homo sapiens
actttagggcatcat

SEQ ID NO: 1742823 - DNA, 15 bp, Homo sapiens
ctttagggcatcatt

SEQ ID NO: 1742824 - DNA, 15 bp, Homo sapiens
tttagggcatcattt

SEQ ID NO: 1742825 - DNA, 15 bp, Homo sapiens
ttagggcatcatttc

SEQ ID NO: 1742826 - DNA, 15 bp, Homo sapiens
tagggcatcatttcc

SEQ ID NO: 1742827 - DNA, 15 bp, Homo sapiens
agggcatcatttcct

SEQ ID NO: 1742828 - DNA, 15 bp, Homo sapiens
gggcatcatttcctt

SEQ ID NO: 1742829 - DNA, 15 bp, Homo sapiens
ggcatcatttccttg

SEQ ID NO: 1742830 - DNA, 15 bp, Homo sapiens
gcatcatttccttga

SEQ ID NO: 1742831 - DNA, 15 bp, Homo sapiens
catcatttccttgac

SEQ ID NO: 1742832 - DNA, 15 bp, Homo sapiens
atcatttccttgact

SEQ ID NO: 1742833 - DNA, 15 bp, Homo sapiens
tcatttccttgactt

SEQ ID NO: 1742834 - DNA, 15 bp, Homo sapiens
catttccttgacttc

SEQ ID NO: 1742835 - DNA, 15 bp, Homo sapiens
atttccttgacttct

SEQ ID NO: 1742836 - DNA, 15 bp, Homo sapiens
tttccttgacttctg

SEQ ID NO: 1742837 - DNA, 15 bp, Homo sapiens
ttccttgacttctga

SEQ ID NO: 1742838 - DNA, 15 bp, Homo sapiens
tccttgacttctgag

SEQ ID NO: 1742839 - DNA, 15 bp, Homo sapiens
ccttgacttctgagt

SEQ ID NO: 1742840 - DNA, 15 bp, Homo sapiens
cttgacttctgagtg

SEQ ID NO: 1742841 - DNA, 15 bp, Homo sapiens
ttgacttctgagtgt

SEQ ID NO: 1742842 - DNA, 15 bp, Homo sapiens
tgacttctgagtgtc

SEQ ID NO: 1742843 - DNA, 15 bp, Homo sapiens
gacttctgagtgtct

SEQ ID NO: 1742844 - DNA, 15 bp, Homo sapiens
acttctgagtgtctc

SEQ ID NO: 1742845 - DNA, 15 bp, Homo sapiens
cttctgagtgtctca

SEQ ID NO: 1742846 - DNA, 15 bp, Homo sapiens
ttctgagtgtctcaa

SEQ ID NO: 1742847 - DNA, 15 bp, Homo sapiens
tctgagtgtctcaac

SEQ ID NO: 1742848 - DNA, 15 bp, Homo sapiens
ctgagtgtctcaact

SEQ ID NO: 1742849 - DNA, 15 bp, Homo sapiens
tgagtgtctcaacta

SEQ ID NO: 1742850 - DNA, 15 bp, Homo sapiens
gagtgtctcaactaa

SEQ ID NO: 1742851 - DNA, 15 bp, Homo sapiens
agtgtctcaactaac

SEQ ID NO: 1742852 - DNA, 15 bp, Homo sapiens
gtgtctcaactaact

SEQ ID NO: 1742853 - DNA, 15 bp, Homo sapiens
tgtctcaactaactg

SEQ ID NO: 1742854 - DNA, 15 bp, Homo sapiens
gtctcaactaactgc

SEQ ID NO: 1742855 - DNA, 15 bp, Homo sapiens
tctcaactaactgct

SEQ ID NO: 1742856 - DNA, 15 bp, Homo sapiens
ctcaactaactgctg

SEQ ID NO: 1742857 - DNA, 15 bp, Homo sapiens
tcaactaactgctga

SEQ ID NO: 1742858 - DNA, 15 bp, Homo sapiens
caactaactgctgaa

SEQ ID NO: 1742859 - DNA, 15 bp, Homo sapiens
aactaactgctgaag

SEQ ID NO: 1742860 - DNA, 15 bp, Homo sapiens
actaactgctgaaga

SEQ ID NO: 1742861 - DNA, 15 bp, Homo sapiens
ctaactgctgaagaa

SEQ ID NO: 1742862 - DNA, 15 bp, Homo sapiens
taactgctgaagaaa

SEQ ID NO: 1742863 - DNA, 15 bp, Homo sapiens
aactgctgaagaaac

SEQ ID NO: 1742864 - DNA, 15 bp, Homo sapiens
actgctgaagaaaca

SEQ ID NO: 1742865 - DNA, 15 bp, Homo sapiens
ctgctgaagaaacac

SEQ ID NO: 1742866 - DNA, 15 bp, Homo sapiens
tgctgaagaaacact

SEQ ID NO: 1742867 - DNA, 15 bp, Homo sapiens
gctgaagaaacactg

SEQ ID NO: 1742868 - DNA, 15 bp, Homo sapiens
ctgaagaaacactgt

SEQ ID NO: 1742869 - DNA, 15 bp, Homo sapiens
tgaagaaacactgtg

SEQ ID NO: 1742870 - DNA, 15 bp, Homo sapiens
gaagaaacactgtgt

SEQ ID NO: 1742871 - DNA, 15 bp, Homo sapiens
aagaaacactgtgta

SEQ ID NO: 1742872 - DNA, 15 bp, Homo sapiens
agaaacactgtgtag

SEQ ID NO: 1742873 - DNA, 15 bp, Homo sapiens
gaaacactgtgtagc

SEQ ID NO: 1742874 - DNA, 15 bp, Homo sapiens
aaacactgtgtagct

SEQ ID NO: 1742875 - DNA, 15 bp, Homo sapiens
aacactgtgtagctc

SEQ ID NO: 1742876 - DNA, 15 bp, Homo sapiens
acactgtgtagctct

SEQ ID NO: 1742877 - DNA, 15 bp, Homo sapiens
cactgtgtagctctg

SEQ ID NO: 1742878 - DNA, 15 bp, Homo sapiens
actgtgtagctctgt

SEQ ID NO: 1742879 - DNA, 15 bp, Homo sapiens
ctgtgtagctctgtt

SEQ ID NO: 1742880 - DNA, 15 bp, Homo sapiens
tgtgtagctctgttt

SEQ ID NO: 1742881 - DNA, 15 bp, Homo sapiens
gtgtagctctgtttc

SEQ ID NO: 1742882 - DNA, 15 bp, Homo sapiens
tgtagctctgtttcc

SEQ ID NO: 1742883 - DNA, 15 bp, Homo sapiens
gtagctctgtttcct

SEQ ID NO: 1742884 - DNA, 15 bp, Homo sapiens
tagctctgtttcctc

SEQ ID NO: 1742885 - DNA, 15 bp, Homo sapiens
agctctgtttcctcc

SEQ ID NO: 1742886 - DNA, 15 bp, Homo sapiens
gctctgtttcctccc

SEQ ID NO: 1742887 - DNA, 15 bp, Homo sapiens
ctctgtttcctcccc

SEQ ID NO: 1742888 - DNA, 15 bp, Homo sapiens
tctgtttcctcccct

SEQ ID NO: 1742889 - DNA, 15 bp, Homo sapiens
ctgtttcctcccctg

SEQ ID NO: 1742890 - DNA, 15 bp, Homo sapiens
tgtttcctcccctgc

SEQ ID NO: 1742891 - DNA, 15 bp, Homo sapiens
gtttcctcccctgcc

SEQ ID NO: 1742892 - DNA, 15 bp, Homo sapiens
tttcctcccctgccc

SEQ ID NO: 1742893 - DNA, 15 bp, Homo sapiens
ttcctcccctgcccc

SEQ ID NO: 1742894 - DNA, 15 bp, Homo sapiens
tcctcccctgcccct

SEQ ID NO: 1742895 - DNA, 15 bp, Homo sapiens
cctcccctgcccctc

SEQ ID NO: 1742896 - DNA, 15 bp, Homo sapiens
ctcccctgcccctca

SEQ ID NO: 1742897 - DNA, 15 bp, Homo sapiens
tcccctgcccctcaa

SEQ ID NO: 1742898 - DNA, 15 bp, Homo sapiens
cccctgcccctcaat

SEQ ID NO: 1742899 - DNA, 15 bp, Homo sapiens
ccctgcccctcaatc

SEQ ID NO: 1742900 - DNA, 15 bp, Homo sapiens
cctgcccctcaatcc

SEQ ID NO: 1742901 - DNA, 15 bp, Homo sapiens
ctgcccctcaatcct

SEQ ID NO: 1742902 - DNA, 15 bp, Homo sapiens
tgcccctcaatcctg

SEQ ID NO: 1742903 - DNA, 15 bp, Homo sapiens
gcccctcaatcctgc

SEQ ID NO: 1742904 - DNA, 15 bp, Homo sapiens
cccctcaatcctgct

SEQ ID NO: 1742905 - DNA, 15 bp, Homo sapiens
ccctcaatcctgctt

SEQ ID NO: 1742906 - DNA, 15 bp, Homo sapiens
cctcaatcctgcttc

SEQ ID NO: 1742907 - DNA, 15 bp, Homo sapiens
ctcaatcctgcttct

SEQ ID NO: 1742908 - DNA, 15 bp, Homo sapiens
tcaatcctgcttctt

SEQ ID NO: 1742909 - DNA, 15 bp, Homo sapiens
caatcctgcttcttt

SEQ ID NO: 1742910 - DNA, 15 bp, Homo sapiens
aatcctgcttctttc

SEQ ID NO: 1742911 - DNA, 15 bp, Homo sapiens
atcctgcttctttcc

SEQ ID NO: 1742912 - DNA, 15 bp, Homo sapiens
tcctgcttctttcca

SEQ ID NO: 1742913 - DNA, 15 bp, Homo sapiens
cctgcttctttccac

SEQ ID NO: 1742914 - DNA, 15 bp, Homo sapiens
ctgcttctttccaca

SEQ ID NO: 1742915 - DNA, 15 bp, Homo sapiens
tgcttctttccacat

SEQ ID NO: 1742916 - DNA, 15 bp, Homo sapiens
gcttctttccacatt

SEQ ID NO: 1742917 - DNA, 15 bp, Homo sapiens
cttctttccacattt

SEQ ID NO: 1742918 - DNA, 15 bp, Homo sapiens
ttctttccacatttc

SEQ ID NO: 1742919 - DNA, 15 bp, Homo sapiens
tctttccacatttca

SEQ ID NO: 1742920 - DNA, 15 bp, Homo sapiens
ctttccacatttcat

SEQ ID NO: 1742921 - DNA, 15 bp, Homo sapiens
tttccacatttcata

SEQ ID NO: 1742922 - DNA, 15 bp, Homo sapiens
ttccacatttcatat

SEQ ID NO: 1742923 - DNA, 15 bp, Homo sapiens
tccacatttcatatg

SEQ ID NO: 1742924 - DNA, 15 bp, Homo sapiens
ccacatttcatatgg

SEQ ID NO: 1742925 - DNA, 15 bp, Homo sapiens
cacatttcatatggg

SEQ ID NO: 1742926 - DNA, 15 bp, Homo sapiens
acatttcatatggga

SEQ ID NO: 1742927 - DNA, 15 bp, Homo sapiens
catttcatatgggag

SEQ ID NO: 1742928 - DNA, 15 bp, Homo sapiens
atttcatatgggaga

SEQ ID NO: 1742929 - DNA, 15 bp, Homo sapiens
tttcatatgggagaa

SEQ ID NO: 1742930 - DNA, 15 bp, Homo sapiens
ttcatatgggagaat

SEQ ID NO: 1742931 - DNA, 15 bp, Homo sapiens
tcatatgggagaatg

SEQ ID NO: 1742932 - DNA, 15 bp, Homo sapiens
catatgggagaatgg

SEQ ID NO: 1742933 - DNA, 15 bp, Homo sapiens
atatgggagaatggt

SEQ ID NO: 1742934 - DNA, 15 bp, Homo sapiens
tatgggagaatggtc

SEQ ID NO: 1742935 - DNA, 15 bp, Homo sapiens
atgggagaatggtca

SEQ ID NO: 1742936 - DNA, 15 bp, Homo sapiens
tgggagaatggtcag

SEQ ID NO: 1742937 - DNA, 15 bp, Homo sapiens
gggagaatggtcagt

SEQ ID NO: 1742938 - DNA, 15 bp, Homo sapiens
ggagaatggtcagtt

SEQ ID NO: 1742939 - DNA, 15 bp, Homo sapiens
gagaatggtcagttg

SEQ ID NO: 1742940 - DNA, 15 bp, Homo sapiens
agaatggtcagttgg

SEQ ID NO: 1742941 - DNA, 15 bp, Homo sapiens
gaatggtcagttgga

SEQ ID NO: 1742942 - DNA, 15 bp, Homo sapiens
aatggtcagttggat

SEQ ID NO: 1742943 - DNA, 15 bp, Homo sapiens
atggtcagttggatg

SEQ ID NO: 1742944 - DNA, 15 bp, Homo sapiens
tggtcagttggatgg

SEQ ID NO: 1742945 - DNA, 15 bp, Homo sapiens
ggtcagttggatgga

SEQ ID NO: 1742946 - DNA, 15 bp, Homo sapiens
gtcagttggatggaa

SEQ ID NO: 1742947 - DNA, 15 bp, Homo sapiens
tcagttggatggaat

SEQ ID NO: 1742948 - DNA, 15 bp, Homo sapiens
cagttggatggaatg

SEQ ID NO: 1742949 - DNA, 15 bp, Homo sapiens
agttggatggaatga

SEQ ID NO: 1742950 - DNA, 15 bp, Homo sapiens
gttggatggaatgaa

SEQ ID NO: 1742951 - DNA, 15 bp, Homo sapiens
ttggatggaatgaaa

SEQ ID NO: 1742952 - DNA, 15 bp, Homo sapiens
tggatggaatgaaaa

SEQ ID NO: 1742953 - DNA, 15 bp, Homo sapiens
ggatggaatgaaaat

SEQ ID NO: 1742954 - DNA, 15 bp, Homo sapiens
gatggaatgaaaata

SEQ ID NO: 1742955 - DNA, 15 bp, Homo sapiens
atggaatgaaaataa

SEQ ID NO: 1742956 - DNA, 15 bp, Homo sapiens
tggaatgaaaataaa

SEQ ID NO: 1742957 - DNA, 15 bp, Homo sapiens
ggaatgaaaataaac

SEQ ID NO: 1742958 - DNA, 15 bp, Homo sapiens
gaatgaaaataaact

SEQ ID NO: 1742959 - DNA, 15 bp, Homo sapiens
aatgaaaataaactt

SEQ ID NO: 1742960 - DNA, 15 bp, Homo sapiens
atgaaaataaacttt

SEQ ID NO: 1742961 - DNA, 15 bp, Homo sapiens
tgaaaataaactttt

SEQ ID NO: 1742962 - DNA, 15 bp, Homo sapiens
gaaaataaacttttc

SEQ ID NO: 1742963 - DNA, 15 bp, Homo sapiens
aaaataaacttttct

SEQ ID NO: 1742964 - DNA, 15 bp, Homo sapiens
aaataaacttttctt

SEQ ID NO: 1742965 - DNA, 15 bp, Homo sapiens
aataaacttttctta

SEQ ID NO: 1742966 - DNA, 15 bp, Homo sapiens
ataaacttttcttag

SEQ ID NO: 1742967 - DNA, 15 bp, Homo sapiens
taaacttttcttaga

SEQ ID NO: 1742968 - DNA, 15 bp, Homo sapiens
aaacttttcttagac

SEQ ID NO: 1742969 - DNA, 15 bp, Homo sapiens
aacttttcttagaca

SEQ ID NO: 1742970 - DNA, 15 bp, Homo sapiens
acttttcttagacaa

SEQ ID NO: 1742971 - DNA, 15 bp, Homo sapiens
cttttcttagacaag

SEQ ID NO: 1742972 - DNA, 15 bp, Homo sapiens
ttttcttagacaagt

SEQ ID NO: 1742973 - DNA, 15 bp, Homo sapiens
tttcttagacaagtt

SEQ ID NO: 1742974 - DNA, 15 bp, Homo sapiens
ttcttagacaagtta

SEQ ID NO: 1742975 - DNA, 15 bp, Homo sapiens
tcttagacaagttac

SEQ ID NO: 1742976 - DNA, 15 bp, Homo sapiens
cttagacaagttaca

SEQ ID NO: 1742977 - DNA, 15 bp, Homo sapiens
ttagacaagttacat

SEQ ID NO: 1742978 - DNA, 15 bp, Homo sapiens
tagacaagttacatg

SEQ ID NO: 1742979 - DNA, 15 bp, Homo sapiens
agacaagttacatga

SEQ ID NO: 1742980 - DNA, 15 bp, Homo sapiens
gacaagttacatgat

SEQ ID NO: 1742981 - DNA, 15 bp, Homo sapiens
acaagttacatgata

SEQ ID NO: 1742982 - DNA, 15 bp, Homo sapiens
caagttacatgatag

SEQ ID NO: 1742983 - DNA, 15 bp, Homo sapiens
aagttacatgataga

SEQ ID NO: 1742984 - DNA, 15 bp, Homo sapiens
agttacatgatagaa

SEQ ID NO: 1742985 - DNA, 15 bp, Homo sapiens
gttacatgatagaaa

SEQ ID NO: 1742986 - DNA, 15 bp, Homo sapiens
ttacatgatagaaaa

SEQ ID NO: 1742987 - DNA, 15 bp, Homo sapiens
tacatgatagaaaac

SEQ ID NO: 1742988 - DNA, 15 bp, Homo sapiens
acatgatagaaaaca

SEQ ID NO: 1742989 - DNA, 15 bp, Homo sapiens
catgatagaaaacat

SEQ ID NO: 1742990 - DNA, 15 bp, Homo sapiens
atgatagaaaacatc

SEQ ID NO: 1742991 - DNA, 15 bp, Homo sapiens
tgatagaaaacatct

SEQ ID NO: 1742992 - DNA, 15 bp, Homo sapiens
gatagaaaacatctt

SEQ ID NO: 1742993 - DNA, 15 bp, Homo sapiens
atagaaaacatcttg

SEQ ID NO: 1742994 - DNA, 15 bp, Homo sapiens
tagaaaacatcttga

SEQ ID NO: 1742995 - DNA, 15 bp, Homo sapiens
agaaaacatcttgaa

SEQ ID NO: 1742996 - DNA, 15 bp, Homo sapiens
gaaaacatcttgaat

SEQ ID NO: 1742997 - DNA, 15 bp, Homo sapiens
aaaacatcttgaatc

SEQ ID NO: 1742998 - DNA, 15 bp, Homo sapiens
aaacatcttgaatct

SEQ ID NO: 1742999 - DNA, 15 bp, Homo sapiens
aacatcttgaatcta

SEQ ID NO: 1743000 - DNA, 15 bp, Homo sapiens
acatcttgaatctag

SEQ ID NO: 1743001 - DNA, 15 bp, Homo sapiens
catcttgaatctagt

SEQ ID NO: 1743002 - DNA, 15 bp, Homo sapiens
atcttgaatctagtt

SEQ ID NO: 1743003 - DNA, 15 bp, Homo sapiens
tcttgaatctagtta

SEQ ID NO: 1743004 - DNA, 15 bp, Homo sapiens
cttgaatctagttaa

SEQ ID NO: 1743005 - DNA, 15 bp, Homo sapiens
ttgaatctagttaat

SEQ ID NO: 1743006 - DNA, 15 bp, Homo sapiens
tgaatctagttaata

SEQ ID NO: 1743007 - DNA, 15 bp, Homo sapiens
gaatctagttaatag

SEQ ID NO: 1743008 - DNA, 15 bp, Homo sapiens
aatctagttaatagt

SEQ ID NO: 1743009 - DNA, 15 bp, Homo sapiens
atctagttaatagtc

SEQ ID NO: 1743010 - DNA, 15 bp, Homo sapiens
tctagttaatagtct

SEQ ID NO: 1743011 - DNA, 15 bp, Homo sapiens
ctagttaatagtctt

SEQ ID NO: 1743012 - DNA, 15 bp, Homo sapiens
tagttaatagtctta

SEQ ID NO: 1743013 - DNA, 15 bp, Homo sapiens
agttaatagtcttag

SEQ ID NO: 1743014 - DNA, 15 bp, Homo sapiens
gttaatagtcttagc

SEQ ID NO: 1743015 - DNA, 15 bp, Homo sapiens
ttaatagtcttagct

SEQ ID NO: 1743016 - DNA, 15 bp, Homo sapiens
taatagtcttagctc

SEQ ID NO: 1743017 - DNA, 15 bp, Homo sapiens
aatagtcttagctcc

SEQ ID NO: 1743018 - DNA, 15 bp, Homo sapiens
atagtcttagctcca

SEQ ID NO: 1743019 - DNA, 15 bp, Homo sapiens
tagtcttagctccat

SEQ ID NO: 1743020 - DNA, 15 bp, Homo sapiens
agtcttagctccatt

SEQ ID NO: 1743021 - DNA, 15 bp, Homo sapiens
gtcttagctccatta

SEQ ID NO: 1743022 - DNA, 15 bp, Homo sapiens
tcttagctccattaa

SEQ ID NO: 1743023 - DNA, 15 bp, Homo sapiens
cttagctccattaat

SEQ ID NO: 1743024 - DNA, 15 bp, Homo sapiens
ttagctccattaatt

SEQ ID NO: 1743025 - DNA, 15 bp, Homo sapiens
tagctccattaattg

SEQ ID NO: 1743026 - DNA, 15 bp, Homo sapiens
agctccattaattgt

SEQ ID NO: 1743027 - DNA, 15 bp, Homo sapiens
gctccattaattgtt

SEQ ID NO: 1743028 - DNA, 15 bp, Homo sapiens
ctccattaattgtta

SEQ ID NO: 1743029 - DNA, 15 bp, Homo sapiens
tccattaattgttag

SEQ ID NO: 1743030 - DNA, 15 bp, Homo sapiens
ccattaattgttaga

SEQ ID NO: 1743031 - DNA, 15 bp, Homo sapiens
cattaattgttagaa

SEQ ID NO: 1743032 - DNA, 15 bp, Homo sapiens
attaattgttagaat

SEQ ID NO: 1743033 - DNA, 15 bp, Homo sapiens
ttaattgttagaatt

SEQ ID NO: 1743034 - DNA, 15 bp, Homo sapiens
taattgttagaattt

SEQ ID NO: 1743035 - DNA, 15 bp, Homo sapiens
aattgttagaatttt

SEQ ID NO: 1743036 - DNA, 15 bp, Homo sapiens
attgttagaattttg

SEQ ID NO: 1743037 - DNA, 15 bp, Homo sapiens
ttgttagaattttgt

SEQ ID NO: 1743038 - DNA, 15 bp, Homo sapiens
tgttagaattttgtc

SEQ ID NO: 1743039 - DNA, 15 bp, Homo sapiens
gttagaattttgtca

SEQ ID NO: 1743040 - DNA, 15 bp, Homo sapiens
ttagaattttgtcag

SEQ ID NO: 1743041 - DNA, 15 bp, Homo sapiens
tagaattttgtcaga

SEQ ID NO: 1743042 - DNA, 15 bp, Homo sapiens
agaattttgtcagag

SEQ ID NO: 1743043 - DNA, 15 bp, Homo sapiens
gaattttgtcagagt

SEQ ID NO: 1743044 - DNA, 15 bp, Homo sapiens
aattttgtcagagta

SEQ ID NO: 1743045 - DNA, 15 bp, Homo sapiens
attttgtcagagtag

SEQ ID NO: 1743046 - DNA, 15 bp, Homo sapiens
ttttgtcagagtaga

SEQ ID NO: 1743047 - DNA, 15 bp, Homo sapiens
tttgtcagagtagag

SEQ ID NO: 1743048 - DNA, 15 bp, Homo sapiens
ttgtcagagtagagc

SEQ ID NO: 1743049 - DNA, 15 bp, Homo sapiens
tgtcagagtagagca

SEQ ID NO: 1743050 - DNA, 15 bp, Homo sapiens
gtcagagtagagcag

SEQ ID NO: 1743051 - DNA, 15 bp, Homo sapiens
tcagagtagagcagg

SEQ ID NO: 1743052 - DNA, 15 bp, Homo sapiens
cagagtagagcaggt

SEQ ID NO: 1743053 - DNA, 15 bp, Homo sapiens
agagtagagcaggta

SEQ ID NO: 1743054 - DNA, 15 bp, Homo sapiens
gagtagagcaggtag

SEQ ID NO: 1743055 - DNA, 15 bp, Homo sapiens
agtagagcaggtaga

SEQ ID NO: 1743056 - DNA, 15 bp, Homo sapiens
gtagagcaggtagaa

SEQ ID NO: 1743057 - DNA, 15 bp, Homo sapiens
tagagcaggtagaat

SEQ ID NO: 1743058 - DNA, 15 bp, Homo sapiens
agagcaggtagaatt

SEQ ID NO: 1743059 - DNA, 15 bp, Homo sapiens
gagcaggtagaattg

SEQ ID NO: 1743060 - DNA, 15 bp, Homo sapiens
agcaggtagaattga

SEQ ID NO: 1743061 - DNA, 15 bp, Homo sapiens
gcaggtagaattgag

SEQ ID NO: 1743062 - DNA, 15 bp, Homo sapiens
caggtagaattgagc

SEQ ID NO: 1743063 - DNA, 15 bp, Homo sapiens
aggtagaattgagca

SEQ ID NO: 1743064 - DNA, 15 bp, Homo sapiens
ggtagaattgagcag

SEQ ID NO: 1743065 - DNA, 15 bp, Homo sapiens
gtagaattgagcagt

SEQ ID NO: 1743066 - DNA, 15 bp, Homo sapiens
tagaattgagcagta

SEQ ID NO: 1743067 - DNA, 15 bp, Homo sapiens
agaattgagcagtat

SEQ ID NO: 1743068 - DNA, 15 bp, Homo sapiens
gaattgagcagtatt

SEQ ID NO: 1743069 - DNA, 15 bp, Homo sapiens
aattgagcagtattg

SEQ ID NO: 1743070 - DNA, 15 bp, Homo sapiens
attgagcagtattga

SEQ ID NO: 1743071 - DNA, 15 bp, Homo sapiens
ttgagcagtattgaa

SEQ ID NO: 1743072 - DNA, 15 bp, Homo sapiens
tgagcagtattgaaa

SEQ ID NO: 1743073 - DNA, 15 bp, Homo sapiens
gagcagtattgaaac

SEQ ID NO: 1743074 - DNA, 15 bp, Homo sapiens
agcagtattgaaaca

SEQ ID NO: 1743075 - DNA, 15 bp, Homo sapiens
gcagtattgaaacaa

SEQ ID NO: 1743076 - DNA, 15 bp, Homo sapiens
cagtattgaaacaaa

SEQ ID NO: 1743077 - DNA, 15 bp, Homo sapiens
agtattgaaacaaaa

SEQ ID NO: 1743078 - DNA, 15 bp, Homo sapiens
gtattgaaacaaaac

SEQ ID NO: 1743079 - DNA, 15 bp, Homo sapiens
tattgaaacaaaaca

SEQ ID NO: 1743080 - DNA, 15 bp, Homo sapiens
attgaaacaaaacaa

SEQ ID NO: 1743081 - DNA, 15 bp, Homo sapiens
ttgaaacaaaacaaa

SEQ ID NO: 1743082 - DNA, 15 bp, Homo sapiens
tgaaacaaaacaaaa

SEQ ID NO: 1743083 - DNA, 15 bp, Homo sapiens
gaaacaaaacaaaat

SEQ ID NO: 1743084 - DNA, 15 bp, Homo sapiens
aaacaaaacaaaatc

SEQ ID NO: 1743085 - DNA, 15 bp, Homo sapiens
aacaaaacaaaatct

SEQ ID NO: 1743086 - DNA, 15 bp, Homo sapiens
acaaaacaaaatctt

SEQ ID NO: 1743087 - DNA, 15 bp, Homo sapiens
caaaacaaaatcttg

SEQ ID NO: 1743088 - DNA, 15 bp, Homo sapiens
aaaacaaaatcttgg

SEQ ID NO: 1743089 - DNA, 15 bp, Homo sapiens
aaacaaaatcttggg

SEQ ID NO: 1743090 - DNA, 15 bp, Homo sapiens
aacaaaatcttgggt

SEQ ID NO: 1743091 - DNA, 15 bp, Homo sapiens
acaaaatcttgggtt

SEQ ID NO: 1743092 - DNA, 15 bp, Homo sapiens
caaaatcttgggtta

SEQ ID NO: 1743093 - DNA, 15 bp, Homo sapiens
aaaatcttgggttat

SEQ ID NO: 1743094 - DNA, 15 bp, Homo sapiens
aaatcttgggttatt

SEQ ID NO: 1743095 - DNA, 15 bp, Homo sapiens
aatcttgggttatta

SEQ ID NO: 1743096 - DNA, 15 bp, Homo sapiens
atcttgggttattag

SEQ ID NO: 1743097 - DNA, 15 bp, Homo sapiens
tcttgggttattagc

SEQ ID NO: 1743098 - DNA, 15 bp, Homo sapiens
cttgggttattagct

SEQ ID NO: 1743099 - DNA, 15 bp, Homo sapiens
ttgggttattagctt

SEQ ID NO: 1743100 - DNA, 15 bp, Homo sapiens
tgggttattagcttt

SEQ ID NO: 1743101 - DNA, 15 bp, Homo sapiens
gggttattagctttg

SEQ ID NO: 1743102 - DNA, 15 bp, Homo sapiens
ggttattagctttgg

SEQ ID NO: 1743103 - DNA, 15 bp, Homo sapiens
gttattagctttggt

SEQ ID NO: 1743104 - DNA, 15 bp, Homo sapiens
ttattagctttggtc

SEQ ID NO: 1743105 - DNA, 15 bp, Homo sapiens
tattagctttggtct

SEQ ID NO: 1743106 - DNA, 15 bp, Homo sapiens
attagctttggtctt

SEQ ID NO: 1743107 - DNA, 15 bp, Homo sapiens
ttagctttggtcttg

SEQ ID NO: 1743108 - DNA, 15 bp, Homo sapiens
tagctttggtcttgc

SEQ ID NO: 1743109 - DNA, 15 bp, Homo sapiens
agctttggtcttgct

SEQ ID NO: 1743110 - DNA, 15 bp, Homo sapiens
gctttggtcttgcta

SEQ ID NO: 1743111 - DNA, 15 bp, Homo sapiens
ctttggtcttgctat

SEQ ID NO: 1743112 - DNA, 15 bp, Homo sapiens
tttggtcttgctatt

SEQ ID NO: 1743113 - DNA, 15 bp, Homo sapiens
ttggtcttgctattc

SEQ ID NO: 1743114 - DNA, 15 bp, Homo sapiens
tggtcttgctattca

SEQ ID NO: 1743115 - DNA, 15 bp, Homo sapiens
ggtcttgctattcac

SEQ ID NO: 1743116 - DNA, 15 bp, Homo sapiens
gtcttgctattcaca

SEQ ID NO: 1743117 - DNA, 15 bp, Homo sapiens
tcttgctattcacag

SEQ ID NO: 1743118 - DNA, 15 bp, Homo sapiens
cttgctattcacagt

SEQ ID NO: 1743119 - DNA, 15 bp, Homo sapiens
ttgctattcacagtg

SEQ ID NO: 1743120 - DNA, 15 bp, Homo sapiens
tgctattcacagtgt

SEQ ID NO: 1743121 - DNA, 15 bp, Homo sapiens
gctattcacagtgtg

SEQ ID NO: 1743122 - DNA, 15 bp, Homo sapiens
ctattcacagtgtgt

SEQ ID NO: 1743123 - DNA, 15 bp, Homo sapiens
tattcacagtgtgtg

SEQ ID NO: 1743124 - DNA, 15 bp, Homo sapiens
attcacagtgtgtga

SEQ ID NO: 1743125 - DNA, 15 bp, Homo sapiens
ttcacagtgtgtgag

SEQ ID NO: 1743126 - DNA, 15 bp, Homo sapiens
tcacagtgtgtgagg

SEQ ID NO: 1743127 - DNA, 15 bp, Homo sapiens
cacagtgtgtgaggc

SEQ ID NO: 1743128 - DNA, 15 bp, Homo sapiens
acagtgtgtgaggct

SEQ ID NO: 1743129 - DNA, 15 bp, Homo sapiens
cagtgtgtgaggctg

SEQ ID NO: 1743130 - DNA, 15 bp, Homo sapiens
agtgtgtgaggctgg

SEQ ID NO: 1743131 - DNA, 15 bp, Homo sapiens
gtgtgtgaggctgga

SEQ ID NO: 1743132 - DNA, 15 bp, Homo sapiens
tgtgtgaggctggag

SEQ ID NO: 1743133 - DNA, 15 bp, Homo sapiens
gtgtgaggctggaga

SEQ ID NO: 1743134 - DNA, 15 bp, Homo sapiens
tgtgaggctggagaa

SEQ ID NO: 1743135 - DNA, 15 bp, Homo sapiens
gtgaggctggagaag

SEQ ID NO: 1743136 - DNA, 15 bp, Homo sapiens
tgaggctggagaaga

SEQ ID NO: 1743137 - DNA, 15 bp, Homo sapiens
gaggctggagaagat

SEQ ID NO: 1743138 - DNA, 15 bp, Homo sapiens
aggctggagaagatc

SEQ ID NO: 1743139 - DNA, 15 bp, Homo sapiens
ggctggagaagatcc

SEQ ID NO: 1743140 - DNA, 15 bp, Homo sapiens
gctggagaagatccc

SEQ ID NO: 1743141 - DNA, 15 bp, Homo sapiens
ctggagaagatcccc

SEQ ID NO: 1743142 - DNA, 15 bp, Homo sapiens
tggagaagatcccca

SEQ ID NO: 1743143 - DNA, 15 bp, Homo sapiens
ggagaagatccccaa

SEQ ID NO: 1743144 - DNA, 15 bp, Homo sapiens
gagaagatccccaac

SEQ ID NO: 1743145 - DNA, 15 bp, Homo sapiens
agaagatccccaact

SEQ ID NO: 1743146 - DNA, 15 bp, Homo sapiens
gaagatccccaactt

SEQ ID NO: 1743147 - DNA, 15 bp, Homo sapiens
aagatccccaacttc

SEQ ID NO: 1743148 - DNA, 15 bp, Homo sapiens
agatccccaacttct

SEQ ID NO: 1743149 - DNA, 15 bp, Homo sapiens
gatccccaacttctc

SEQ ID NO: 1743150 - DNA, 15 bp, Homo sapiens
atccccaacttctct

SEQ ID NO: 1743151 - DNA, 15 bp, Homo sapiens
tccccaacttctcta

SEQ ID NO: 1743152 - DNA, 15 bp, Homo sapiens
ccccaacttctctag

SEQ ID NO: 1743153 - DNA, 15 bp, Homo sapiens
cccaacttctctagt

SEQ ID NO: 1743154 - DNA, 15 bp, Homo sapiens
ccaacttctctagtc

SEQ ID NO: 1743155 - DNA, 15 bp, Homo sapiens
caacttctctagtcc

SEQ ID NO: 1743156 - DNA, 15 bp, Homo sapiens
aacttctctagtcct

SEQ ID NO: 1743157 - DNA, 15 bp, Homo sapiens
acttctctagtcctc

SEQ ID NO: 1743158 - DNA, 15 bp, Homo sapiens
cttctctagtcctca

SEQ ID NO: 1743159 - DNA, 15 bp, Homo sapiens
ttctctagtcctcat

SEQ ID NO: 1743160 - DNA, 15 bp, Homo sapiens
tctctagtcctcatg

SEQ ID NO: 1743161 - DNA, 15 bp, Homo sapiens
ctctagtcctcatgt

SEQ ID NO: 1743162 - DNA, 15 bp, Homo sapiens
tctagtcctcatgtc

SEQ ID NO: 1743163 - DNA, 15 bp, Homo sapiens
ctagtcctcatgtcc

SEQ ID NO: 1743164 - DNA, 15 bp, Homo sapiens
tagtcctcatgtcct

SEQ ID NO: 1743165 - DNA, 15 bp, Homo sapiens
agtcctcatgtccta

SEQ ID NO: 1743166 - DNA, 15 bp, Homo sapiens
gtcctcatgtcctac

SEQ ID NO: 1743167 - DNA, 15 bp, Homo sapiens
tcctcatgtcctacc

SEQ ID NO: 1743168 - DNA, 15 bp, Homo sapiens
cctcatgtcctacct

SEQ ID NO: 1743169 - DNA, 15 bp, Homo sapiens
ctcatgtcctacctt

SEQ ID NO: 1743170 - DNA, 15 bp, Homo sapiens
tcatgtcctacctta

SEQ ID NO: 1743171 - DNA, 15 bp, Homo sapiens
catgtcctaccttag

SEQ ID NO: 1743172 - DNA, 15 bp, Homo sapiens
atgtcctaccttagt

SEQ ID NO: 1743173 - DNA, 15 bp, Homo sapiens
tgtcctaccttagta

SEQ ID NO: 1743174 - DNA, 15 bp, Homo sapiens
gtcctaccttagtaa

SEQ ID NO: 1743175 - DNA, 15 bp, Homo sapiens
tcctaccttagtaaa

SEQ ID NO: 1743176 - DNA, 15 bp, Homo sapiens
cctaccttagtaaaa

SEQ ID NO: 1743177 - DNA, 15 bp, Homo sapiens
ctaccttagtaaaat

SEQ ID NO: 1743178 - DNA, 15 bp, Homo sapiens
taccttagtaaaatg

SEQ ID NO: 1743179 - DNA, 15 bp, Homo sapiens
accttagtaaaatga

SEQ ID NO: 1743180 - DNA, 15 bp, Homo sapiens
ccttagtaaaatgag

SEQ ID NO: 1743181 - DNA, 15 bp, Homo sapiens
cttagtaaaatgaga

SEQ ID NO: 1743182 - DNA, 15 bp, Homo sapiens
ttagtaaaatgagaa

SEQ ID NO: 1743183 - DNA, 15 bp, Homo sapiens
tagtaaaatgagaaa

SEQ ID NO: 1743184 - DNA, 15 bp, Homo sapiens
agtaaaatgagaaat

SEQ ID NO: 1743185 - DNA, 15 bp, Homo sapiens
gtaaaatgagaaatt

SEQ ID NO: 1743186 - DNA, 15 bp, Homo sapiens
taaaatgagaaattg

SEQ ID NO: 1743187 - DNA, 15 bp, Homo sapiens
aaaatgagaaattgt

SEQ ID NO: 1743188 - DNA, 15 bp, Homo sapiens
aaatgagaaattgta

SEQ ID NO: 1743189 - DNA, 15 bp, Homo sapiens
aatgagaaattgtac

SEQ ID NO: 1743190 - DNA, 15 bp, Homo sapiens
atgagaaattgtacc

SEQ ID NO: 1743191 - DNA, 15 bp, Homo sapiens
tgagaaattgtacca

SEQ ID NO: 1743192 - DNA, 15 bp, Homo sapiens
gagaaattgtaccag

SEQ ID NO: 1743193 - DNA, 15 bp, Homo sapiens
agaaattgtaccaga

SEQ ID NO: 1743194 - DNA, 15 bp, Homo sapiens
gaaattgtaccagat

SEQ ID NO: 1743195 - DNA, 15 bp, Homo sapiens
aaattgtaccagata

SEQ ID NO: 1743196 - DNA, 15 bp, Homo sapiens
aattgtaccagatac

SEQ ID NO: 1743197 - DNA, 15 bp, Homo sapiens
attgtaccagatact

SEQ ID NO: 1743198 - DNA, 15 bp, Homo sapiens
ttgtaccagatactg

SEQ ID NO: 1743199 - DNA, 15 bp, Homo sapiens
tgtaccagatactgc

SEQ ID NO: 1743200 - DNA, 15 bp, Homo sapiens
gtaccagatactgcc

SEQ ID NO: 1743201 - DNA, 15 bp, Homo sapiens
taccagatactgccc

SEQ ID NO: 1743202 - DNA, 15 bp, Homo sapiens
accagatactgcccc

SEQ ID NO: 1743203 - DNA, 15 bp, Homo sapiens
ccagatactgcccca

SEQ ID NO: 1743204 - DNA, 15 bp, Homo sapiens
cagatactgccccaa

SEQ ID NO: 1743205 - DNA, 15 bp, Homo sapiens
agatactgccccaag

SEQ ID NO: 1743206 - DNA, 15 bp, Homo sapiens
gatactgccccaagt

SEQ ID NO: 1743207 - DNA, 15 bp, Homo sapiens
atactgccccaagtt

SEQ ID NO: 1743208 - DNA, 15 bp, Homo sapiens
tactgccccaagttc

SEQ ID NO: 1743209 - DNA, 15 bp, Homo sapiens
actgccccaagttcc

SEQ ID NO: 1743210 - DNA, 15 bp, Homo sapiens
ctgccccaagttcct

SEQ ID NO: 1743211 - DNA, 15 bp, Homo sapiens
tgccccaagttcctt

SEQ ID NO: 1743212 - DNA, 15 bp, Homo sapiens
gccccaagttccttc

SEQ ID NO: 1743213 - DNA, 15 bp, Homo sapiens
ccccaagttccttcc

SEQ ID NO: 1743214 - DNA, 15 bp, Homo sapiens
cccaagttccttcca

SEQ ID NO: 1743215 - DNA, 15 bp, Homo sapiens
ccaagttccttccag

SEQ ID NO: 1743216 - DNA, 15 bp, Homo sapiens
caagttccttccagc

SEQ ID NO: 1743217 - DNA, 15 bp, Homo sapiens
aagttccttccagct

SEQ ID NO: 1743218 - DNA, 15 bp, Homo sapiens
agttccttccagcta

SEQ ID NO: 1743219 - DNA, 15 bp, Homo sapiens
gttccttccagctaa

SEQ ID NO: 1743220 - DNA, 15 bp, Homo sapiens
ttccttccagctaaa

SEQ ID NO: 1743221 - DNA, 15 bp, Homo sapiens
tccttccagctaaaa

SEQ ID NO: 1743222 - DNA, 15 bp, Homo sapiens
ccttccagctaaaac

SEQ ID NO: 1743223 - DNA, 15 bp, Homo sapiens
cttccagctaaaacc

SEQ ID NO: 1743224 - DNA, 15 bp, Homo sapiens
ttccagctaaaaccc

SEQ ID NO: 1743225 - DNA, 15 bp, Homo sapiens
tccagctaaaaccct

SEQ ID NO: 1743226 - DNA, 15 bp, Homo sapiens
ccagctaaaaccctg

SEQ ID NO: 1743227 - DNA, 15 bp, Homo sapiens
cagctaaaaccctgt

SEQ ID NO: 1743228 - DNA, 15 bp, Homo sapiens
agctaaaaccctgtt

SEQ ID NO: 1743229 - DNA, 15 bp, Homo sapiens
gctaaaaccctgtta

SEQ ID NO: 1743230 - DNA, 15 bp, Homo sapiens
ctaaaaccctgttat

SEQ ID NO: 1743231 - DNA, 15 bp, Homo sapiens
taaaaccctgttatt

SEQ ID NO: 1743232 - DNA, 15 bp, Homo sapiens
aaaaccctgttattc

SEQ ID NO: 1743233 - DNA, 15 bp, Homo sapiens
aaaccctgttattct

SEQ ID NO: 1743234 - DNA, 15 bp, Homo sapiens
aaccctgttattcta

SEQ ID NO: 1743235 - DNA, 15 bp, Homo sapiens
accctgttattctaa

SEQ ID NO: 1743236 - DNA, 15 bp, Homo sapiens
ccctgttattctaag

SEQ ID NO: 1743237 - DNA, 15 bp, Homo sapiens
cctgttattctaagc

SEQ ID NO: 1743238 - DNA, 15 bp, Homo sapiens
ctgttattctaagca

SEQ ID NO: 1743239 - DNA, 15 bp, Homo sapiens
tgttattctaagcat

SEQ ID NO: 1743240 - DNA, 15 bp, Homo sapiens
gttattctaagcatc

SEQ ID NO: 1743241 - DNA, 15 bp, Homo sapiens
ttattctaagcatca

SEQ ID NO: 1743242 - DNA, 15 bp, Homo sapiens
tattctaagcatcag

SEQ ID NO: 1743243 - DNA, 15 bp, Homo sapiens
attctaagcatcaga

SEQ ID NO: 1743244 - DNA, 15 bp, Homo sapiens
ttctaagcatcagag

SEQ ID NO: 1743245 - DNA, 15 bp, Homo sapiens
tctaagcatcagaga

SEQ ID NO: 1743246 - DNA, 15 bp, Homo sapiens
ctaagcatcagagat

SEQ ID NO: 1743247 - DNA, 15 bp, Homo sapiens
taagcatcagagatt

SEQ ID NO: 1743248 - DNA, 15 bp, Homo sapiens
aagcatcagagattg

SEQ ID NO: 1743249 - DNA, 15 bp, Homo sapiens
agcatcagagattga

SEQ ID NO: 1743250 - DNA, 15 bp, Homo sapiens
gcatcagagattgaa

SEQ ID NO: 1743251 - DNA, 15 bp, Homo sapiens
catcagagattgaat

SEQ ID NO: 1743252 - DNA, 15 bp, Homo sapiens
atcagagattgaata

SEQ ID NO: 1743253 - DNA, 15 bp, Homo sapiens
tcagagattgaataa

SEQ ID NO: 1743254 - DNA, 15 bp, Homo sapiens
cagagattgaataac

SEQ ID NO: 1743255 - DNA, 15 bp, Homo sapiens
agagattgaataact

SEQ ID NO: 1743256 - DNA, 15 bp, Homo sapiens
gagattgaataactc

SEQ ID NO: 1743257 - DNA, 15 bp, Homo sapiens
agattgaataactca

SEQ ID NO: 1743258 - DNA, 15 bp, Homo sapiens
gattgaataactcag

SEQ ID NO: 1743259 - DNA, 15 bp, Homo sapiens
attgaataactcaga

SEQ ID NO: 1743260 - DNA, 15 bp, Homo sapiens
ttgaataactcagac

SEQ ID NO: 1743261 - DNA, 15 bp, Homo sapiens
tgaataactcagact

SEQ ID NO: 1743262 - DNA, 15 bp, Homo sapiens
gaataactcagactg

SEQ ID NO: 1743263 - DNA, 15 bp, Homo sapiens
aataactcagactgg

SEQ ID NO: 1743264 - DNA, 15 bp, Homo sapiens
ataactcagactggc

SEQ ID NO: 1743265 - DNA, 15 bp, Homo sapiens
taactcagactggcc

SEQ ID NO: 1743266 - DNA, 15 bp, Homo sapiens
aactcagactggcca

SEQ ID NO: 1743267 - DNA, 15 bp, Homo sapiens
actcagactggccag

SEQ ID NO: 1743268 - DNA, 15 bp, Homo sapiens
ctcagactggccagt

SEQ ID NO: 1743269 - DNA, 15 bp, Homo sapiens
tcagactggccagtt

SEQ ID NO: 1743270 - DNA, 15 bp, Homo sapiens
cagactggccagttt

SEQ ID NO: 1743271 - DNA, 15 bp, Homo sapiens
agactggccagttta

SEQ ID NO: 1743272 - DNA, 15 bp, Homo sapiens
gactggccagtttaa

SEQ ID NO: 1743273 - DNA, 15 bp, Homo sapiens
actggccagtttaaa

SEQ ID NO: 1743274 - DNA, 15 bp, Homo sapiens
ctggccagtttaaat

SEQ ID NO: 1743275 - DNA, 15 bp, Homo sapiens
tggccagtttaaatt

SEQ ID NO: 1743276 - DNA, 15 bp, Homo sapiens
ggccagtttaaattt

SEQ ID NO: 1743277 - DNA, 15 bp, Homo sapiens
gccagtttaaatttt

SEQ ID NO: 1743278 - DNA, 15 bp, Homo sapiens
ccagtttaaattttt

SEQ ID NO: 1743279 - DNA, 15 bp, Homo sapiens
cagtttaaatttttt

SEQ ID NO: 1743280 - DNA, 15 bp, Homo sapiens
agtttaaattttttt

SEQ ID NO: 1743281 - DNA, 15 bp, Homo sapiens
gtttaaattttttta

SEQ ID NO: 1743282 - DNA, 15 bp, Homo sapiens
tttaaatttttttag

SEQ ID NO: 1743283 - DNA, 15 bp, Homo sapiens
ttaaatttttttagt

SEQ ID NO: 1743284 - DNA, 15 bp, Homo sapiens
taaatttttttagta

SEQ ID NO: 1743285 - DNA, 15 bp, Homo sapiens
aaatttttttagtag

SEQ ID NO: 1743286 - DNA, 15 bp, Homo sapiens
aatttttttagtagc

SEQ ID NO: 1743287 - DNA, 15 bp, Homo sapiens
atttttttagtagct

SEQ ID NO: 1743288 - DNA, 15 bp, Homo sapiens
tttttttagtagcta

SEQ ID NO: 1743289 - DNA, 15 bp, Homo sapiens
ttttttagtagctac

SEQ ID NO: 1743290 - DNA, 15 bp, Homo sapiens
tttttagtagctact

SEQ ID NO: 1743291 - DNA, 15 bp, Homo sapiens
ttttagtagctactt

SEQ ID NO: 1743292 - DNA, 15 bp, Homo sapiens
tttagtagctacttt

SEQ ID NO: 1743293 - DNA, 15 bp, Homo sapiens
ttagtagctacttta

SEQ ID NO: 1743294 - DNA, 15 bp, Homo sapiens
tagtagctactttaa

SEQ ID NO: 1743295 - DNA, 15 bp, Homo sapiens
agtagctactttaac

SEQ ID NO: 1743296 - DNA, 15 bp, Homo sapiens
gtagctactttaacc

SEQ ID NO: 1743297 - DNA, 15 bp, Homo sapiens
tagctactttaacct

SEQ ID NO: 1743298 - DNA, 15 bp, Homo sapiens
agctactttaaccta

SEQ ID NO: 1743299 - DNA, 15 bp, Homo sapiens
gctactttaacctaa

SEQ ID NO: 1743300 - DNA, 15 bp, Homo sapiens
ctactttaacctaat

SEQ ID NO: 1743301 - DNA, 15 bp, Homo sapiens
tactttaacctaata

SEQ ID NO: 1743302 - DNA, 15 bp, Homo sapiens
actttaacctaatag

SEQ ID NO: 1743303 - DNA, 15 bp, Homo sapiens
ctttaacctaatagg

SEQ ID NO: 1743304 - DNA, 15 bp, Homo sapiens
tttaacctaataggg

SEQ ID NO: 1743305 - DNA, 15 bp, Homo sapiens
ttaacctaatagggt

SEQ ID NO: 1743306 - DNA, 15 bp, Homo sapiens
taacctaatagggtt

SEQ ID NO: 1743307 - DNA, 15 bp, Homo sapiens
aacctaatagggtta

SEQ ID NO: 1743308 - DNA, 15 bp, Homo sapiens
acctaatagggttat

SEQ ID NO: 1743309 - DNA, 15 bp, Homo sapiens
cctaatagggttatg

SEQ ID NO: 1743310 - DNA, 15 bp, Homo sapiens
ctaatagggttatga

SEQ ID NO: 1743311 - DNA, 15 bp, Homo sapiens
taatagggttatgaa

SEQ ID NO: 1743312 - DNA, 15 bp, Homo sapiens
aatagggttatgaaa

SEQ ID NO: 1743313 - DNA, 15 bp, Homo sapiens
atagggttatgaaat

SEQ ID NO: 1743314 - DNA, 15 bp, Homo sapiens
tagggttatgaaata

SEQ ID NO: 1743315 - DNA, 15 bp, Homo sapiens
agggttatgaaatat

SEQ ID NO: 1743316 - DNA, 15 bp, Homo sapiens
gggttatgaaatatg

SEQ ID NO: 1743317 - DNA, 15 bp, Homo sapiens
ggttatgaaatatga

SEQ ID NO: 1743318 - DNA, 15 bp, Homo sapiens
gttatgaaatatgaa

SEQ ID NO: 1743319 - DNA, 15 bp, Homo sapiens
ttatgaaatatgaaa

SEQ ID NO: 1743320 - DNA, 15 bp, Homo sapiens
tatgaaatatgaaag

SEQ ID NO: 1743321 - DNA, 15 bp, Homo sapiens
atgaaatatgaaaga

SEQ ID NO: 1743322 - DNA, 15 bp, Homo sapiens
tgaaatatgaaagat

SEQ ID NO: 1743323 - DNA, 15 bp, Homo sapiens
gaaatatgaaagatt

SEQ ID NO: 1743324 - DNA, 15 bp, Homo sapiens
aaatatgaaagatta

SEQ ID NO: 1743325 - DNA, 15 bp, Homo sapiens
aatatgaaagattaa

SEQ ID NO: 1743326 - DNA, 15 bp, Homo sapiens
atatgaaagattaaa

SEQ ID NO: 1743327 - DNA, 15 bp, Homo sapiens
tatgaaagattaaat

SEQ ID NO: 1743328 - DNA, 15 bp, Homo sapiens
atgaaagattaaata

SEQ ID NO: 1743329 - DNA, 15 bp, Homo sapiens
tgaaagattaaatat

SEQ ID NO: 1743330 - DNA, 15 bp, Homo sapiens
gaaagattaaatatg

SEQ ID NO: 1743331 - DNA, 15 bp, Homo sapiens
aaagattaaatatga

SEQ ID NO: 1743332 - DNA, 15 bp, Homo sapiens
aagattaaatatgaa

SEQ ID NO: 1743333 - DNA, 15 bp, Homo sapiens
agattaaatatgaaa

SEQ ID NO: 1743334 - DNA, 15 bp, Homo sapiens
gattaaatatgaaat

SEQ ID NO: 1743335 - DNA, 15 bp, Homo sapiens
attaaatatgaaata

SEQ ID NO: 1743336 - DNA, 15 bp, Homo sapiens
ttaaatatgaaatat

SEQ ID NO: 1743337 - DNA, 15 bp, Homo sapiens
taaatatgaaatatg

SEQ ID NO: 1743338 - DNA, 15 bp, Homo sapiens
aaatatgaaatatga

SEQ ID NO: 1743339 - DNA, 15 bp, Homo sapiens
aatatgaaatatgaa

SEQ ID NO: 1743340 - DNA, 15 bp, Homo sapiens
atatgaaatatgaaa

SEQ ID NO: 1743341 - DNA, 15 bp, Homo sapiens
aaatatgaaagattt

SEQ ID NO: 1743342 - DNA, 15 bp, Homo sapiens
aatatgaaagatttt

SEQ ID NO: 1743343 - DNA, 15 bp, Homo sapiens
atatgaaagatttta

SEQ ID NO: 1743344 - DNA, 15 bp, Homo sapiens
tatgaaagattttaa

SEQ ID NO: 1743345 - DNA, 15 bp, Homo sapiens
atgaaagattttaaa

SEQ ID NO: 1743346 - DNA, 15 bp, Homo sapiens
tgaaagattttaaat

SEQ ID NO: 1743347 - DNA, 15 bp, Homo sapiens
gaaagattttaaata

SEQ ID NO: 1743348 - DNA, 15 bp, Homo sapiens
aaagattttaaatat

SEQ ID NO: 1743349 - DNA, 15 bp, Homo sapiens
aagattttaaatatg

SEQ ID NO: 1743350 - DNA, 15 bp, Homo sapiens
agattttaaatatga

SEQ ID NO: 1743351 - DNA, 15 bp, Homo sapiens
gattttaaatatgaa

SEQ ID NO: 1743352 - DNA, 15 bp, Homo sapiens
attttaaatatgaaa

SEQ ID NO: 1743353 - DNA, 15 bp, Homo sapiens
ttttaaatatgaaag

SEQ ID NO: 1743354 - DNA, 15 bp, Homo sapiens
tttaaatatgaaaga

SEQ ID NO: 1743355 - DNA, 15 bp, Homo sapiens
ttaaatatgaaagat

SEQ ID NO: 1743356 - DNA, 15 bp, Homo sapiens
taaatatgaaagatt

SEQ ID NO: 1743357 - DNA, 15 bp, Homo sapiens
tatgaaagattaaaa

SEQ ID NO: 1743358 - DNA, 15 bp, Homo sapiens
atgaaagattaaaaa

SEQ ID NO: 1743359 - DNA, 15 bp, Homo sapiens
tgaaagattaaaaat

SEQ ID NO: 1743360 - DNA, 15 bp, Homo sapiens
gaaagattaaaaatg

SEQ ID NO: 1743361 - DNA, 15 bp, Homo sapiens
aaagattaaaaatgt

SEQ ID NO: 1743362 - DNA, 15 bp, Homo sapiens
aagattaaaaatgtt

SEQ ID NO: 1743363 - DNA, 15 bp, Homo sapiens
agattaaaaatgttt

SEQ ID NO: 1743364 - DNA, 15 bp, Homo sapiens
gattaaaaatgtttt

SEQ ID NO: 1743365 - DNA, 15 bp, Homo sapiens
attaaaaatgtttta

SEQ ID NO: 1743366 - DNA, 15 bp, Homo sapiens
ttaaaaatgttttaa

SEQ ID NO: 1743367 - DNA, 15 bp, Homo sapiens
taaaaatgttttaaa

SEQ ID NO: 1743368 - DNA, 15 bp, Homo sapiens
aaaaatgttttaaat

SEQ ID NO: 1743369 - DNA, 15 bp, Homo sapiens
aaaatgttttaaatg

SEQ ID NO: 1743370 - DNA, 15 bp, Homo sapiens
aaatgttttaaatgt

SEQ ID NO: 1743371 - DNA, 15 bp, Homo sapiens
aatgttttaaatgtt

SEQ ID NO: 1743372 - DNA, 15 bp, Homo sapiens
atgttttaaatgtta

SEQ ID NO: 1743373 - DNA, 15 bp, Homo sapiens
tgttttaaatgttaa

SEQ ID NO: 1743374 - DNA, 15 bp, Homo sapiens
gttttaaatgttaat

SEQ ID NO: 1743375 - DNA, 15 bp, Homo sapiens
ttttaaatgttaata

SEQ ID NO: 1743376 - DNA, 15 bp, Homo sapiens
tttaaatgttaatat

SEQ ID NO: 1743377 - DNA, 15 bp, Homo sapiens
ttaaatgttaatatc

SEQ ID NO: 1743378 - DNA, 15 bp, Homo sapiens
taaatgttaatatca

SEQ ID NO: 1743379 - DNA, 15 bp, Homo sapiens
aaatgttaatatcag

SEQ ID NO: 1743380 - DNA, 15 bp, Homo sapiens
aatgttaatatcagc

SEQ ID NO: 1743381 - DNA, 15 bp, Homo sapiens
atgttaatatcagca

SEQ ID NO: 1743382 - DNA, 15 bp, Homo sapiens
tgttaatatcagcag

SEQ ID NO: 1743383 - DNA, 15 bp, Homo sapiens
gttaatatcagcagt

SEQ ID NO: 1743384 - DNA, 15 bp, Homo sapiens
ttaatatcagcagtt

SEQ ID NO: 1743385 - DNA, 15 bp, Homo sapiens
taatatcagcagttc

SEQ ID NO: 1743386 - DNA, 15 bp, Homo sapiens
aatatcagcagttca

SEQ ID NO: 1743387 - DNA, 15 bp, Homo sapiens
atatcagcagttcaa

SEQ ID NO: 1743388 - DNA, 15 bp, Homo sapiens
tatcagcagttcaat

SEQ ID NO: 1743389 - DNA, 15 bp, Homo sapiens
atcagcagttcaatc

SEQ ID NO: 1743390 - DNA, 15 bp, Homo sapiens
tcagcagttcaatca

SEQ ID NO: 1743391 - DNA, 15 bp, Homo sapiens
cagcagttcaatcat

SEQ ID NO: 1743392 - DNA, 15 bp, Homo sapiens
agcagttcaatcata

SEQ ID NO: 1743393 - DNA, 15 bp, Homo sapiens
gcagttcaatcatag

SEQ ID NO: 1743394 - DNA, 15 bp, Homo sapiens
cagttcaatcatagt

SEQ ID NO: 1743395 - DNA, 15 bp, Homo sapiens
agttcaatcatagtt

SEQ ID NO: 1743396 - DNA, 15 bp, Homo sapiens
gttcaatcatagttt

SEQ ID NO: 1743397 - DNA, 15 bp, Homo sapiens
ttcaatcatagttta

SEQ ID NO: 1743398 - DNA, 15 bp, Homo sapiens
tcaatcatagtttaa

SEQ ID NO: 1743399 - DNA, 15 bp, Homo sapiens
caatcatagtttaat

SEQ ID NO: 1743400 - DNA, 15 bp, Homo sapiens
aatcatagtttaata

SEQ ID NO: 1743401 - DNA, 15 bp, Homo sapiens
atcatagtttaatat

SEQ ID NO: 1743402 - DNA, 15 bp, Homo sapiens
tcatagtttaatatt

SEQ ID NO: 1743403 - DNA, 15 bp, Homo sapiens
catagtttaatattg

SEQ ID NO: 1743404 - DNA, 15 bp, Homo sapiens
atagtttaatattgt

SEQ ID NO: 1743405 - DNA, 15 bp, Homo sapiens
tagtttaatattgtt

SEQ ID NO: 1743406 - DNA, 15 bp, Homo sapiens
agtttaatattgttt

SEQ ID NO: 1743407 - DNA, 15 bp, Homo sapiens
gtttaatattgttta

SEQ ID NO: 1743408 - DNA, 15 bp, Homo sapiens
tttaatattgtttac

SEQ ID NO: 1743409 - DNA, 15 bp, Homo sapiens
ttaatattgtttact

SEQ ID NO: 1743410 - DNA, 15 bp, Homo sapiens
taatattgtttactc

SEQ ID NO: 1743411 - DNA, 15 bp, Homo sapiens
aatattgtttactca

SEQ ID NO: 1743412 - DNA, 15 bp, Homo sapiens
atattgtttactcag

SEQ ID NO: 1743413 - DNA, 15 bp, Homo sapiens
tattgtttactcagt

SEQ ID NO: 1743414 - DNA, 15 bp, Homo sapiens
attgtttactcagtc

SEQ ID NO: 1743415 - DNA, 15 bp, Homo sapiens
ttgtttactcagtca

SEQ ID NO: 1743416 - DNA, 15 bp, Homo sapiens
tgtttactcagtcag

SEQ ID NO: 1743417 - DNA, 15 bp, Homo sapiens
gtttactcagtcagc

SEQ ID NO: 1743418 - DNA, 15 bp, Homo sapiens
tttactcagtcagca

SEQ ID NO: 1743419 - DNA, 15 bp, Homo sapiens
ttactcagtcagcac

SEQ ID NO: 1743420 - DNA, 15 bp, Homo sapiens
tactcagtcagcact

SEQ ID NO: 1743421 - DNA, 15 bp, Homo sapiens
actcagtcagcactt

SEQ ID NO: 1743422 - DNA, 15 bp, Homo sapiens
ctcagtcagcacttg

SEQ ID NO: 1743423 - DNA, 15 bp, Homo sapiens
tcagtcagcacttgc

SEQ ID NO: 1743424 - DNA, 15 bp, Homo sapiens
cagtcagcacttgct

SEQ ID NO: 1743425 - DNA, 15 bp, Homo sapiens
agtcagcacttgctt

SEQ ID NO: 1743426 - DNA, 15 bp, Homo sapiens
gtcagcacttgctta

SEQ ID NO: 1743427 - DNA, 15 bp, Homo sapiens
tcagcacttgcttaa

SEQ ID NO: 1743428 - DNA, 15 bp, Homo sapiens
cagcacttgcttaag

SEQ ID NO: 1743429 - DNA, 15 bp, Homo sapiens
agcacttgcttaaga

SEQ ID NO: 1743430 - DNA, 15 bp, Homo sapiens
gcacttgcttaagag

SEQ ID NO: 1743431 - DNA, 15 bp, Homo sapiens
cacttgcttaagagt

SEQ ID NO: 1743432 - DNA, 15 bp, Homo sapiens
acttgcttaagagtc

SEQ ID NO: 1743433 - DNA, 15 bp, Homo sapiens
cttgcttaagagtcg

SEQ ID NO: 1743434 - DNA, 15 bp, Homo sapiens
ttgcttaagagtcgg

SEQ ID NO: 1743435 - DNA, 15 bp, Homo sapiens
tgcttaagagtcgga

SEQ ID NO: 1743436 - DNA, 15 bp, Homo sapiens
gcttaagagtcggaa

SEQ ID NO: 1743437 - DNA, 15 bp, Homo sapiens
cttaagagtcggaaa

SEQ ID NO: 1743438 - DNA, 15 bp, Homo sapiens
ttaagagtcggaaag

SEQ ID NO: 1743439 - DNA, 15 bp, Homo sapiens
taagagtcggaaaga

SEQ ID NO: 1743440 - DNA, 15 bp, Homo sapiens
aagagtcggaaagaa

SEQ ID NO: 1743441 - DNA, 15 bp, Homo sapiens
agagtcggaaagaag

SEQ ID NO: 1743442 - DNA, 15 bp, Homo sapiens
gagtcggaaagaagg

SEQ ID NO: 1743443 - DNA, 15 bp, Homo sapiens
agtcggaaagaaggt

SEQ ID NO: 1743444 - DNA, 15 bp, Homo sapiens
gtcggaaagaaggtt

SEQ ID NO: 1743445 - DNA, 15 bp, Homo sapiens
tcggaaagaaggttc

SEQ ID NO: 1743446 - DNA, 15 bp, Homo sapiens
cggaaagaaggttct

SEQ ID NO: 1743447 - DNA, 15 bp, Homo sapiens
ggaaagaaggttcta

SEQ ID NO: 1743448 - DNA, 15 bp, Homo sapiens
gaaagaaggttctag

SEQ ID NO: 1743449 - DNA, 15 bp, Homo sapiens
aaagaaggttctaga

SEQ ID NO: 1743450 - DNA, 15 bp, Homo sapiens
aagaaggttctagaa

SEQ ID NO: 1743451 - DNA, 15 bp, Homo sapiens
agaaggttctagaaa

SEQ ID NO: 1743452 - DNA, 15 bp, Homo sapiens
gaaggttctagaaaa

SEQ ID NO: 1743453 - DNA, 15 bp, Homo sapiens
aaggttctagaaaaa

SEQ ID NO: 1743454 - DNA, 15 bp, Homo sapiens
aggttctagaaaaac

SEQ ID NO: 1743455 - DNA, 15 bp, Homo sapiens
ggttctagaaaaacc

SEQ ID NO: 1743456 - DNA, 15 bp, Homo sapiens
gttctagaaaaaccc

SEQ ID NO: 1743457 - DNA, 15 bp, Homo sapiens
ttctagaaaaacccc

SEQ ID NO: 1743458 - DNA, 15 bp, Homo sapiens
tctagaaaaacccca

SEQ ID NO: 1743459 - DNA, 15 bp, Homo sapiens
ctagaaaaaccccaa

SEQ ID NO: 1743460 - DNA, 15 bp, Homo sapiens
tagaaaaaccccaaa

SEQ ID NO: 1743461 - DNA, 15 bp, Homo sapiens
agaaaaaccccaaat

SEQ ID NO: 1743462 - DNA, 15 bp, Homo sapiens
gaaaaaccccaaatc

SEQ ID NO: 1743463 - DNA, 15 bp, Homo sapiens
aaaaaccccaaatca

SEQ ID NO: 1743464 - DNA, 15 bp, Homo sapiens
aaaaccccaaatcac

SEQ ID NO: 1743465 - DNA, 15 bp, Homo sapiens
aaaccccaaatcact

SEQ ID NO: 1743466 - DNA, 15 bp, Homo sapiens
aaccccaaatcacta

SEQ ID NO: 1743467 - DNA, 15 bp, Homo sapiens
accccaaatcactat

SEQ ID NO: 1743468 - DNA, 15 bp, Homo sapiens
ccccaaatcactatt

SEQ ID NO: 1743469 - DNA, 15 bp, Homo sapiens
cccaaatcactattt

SEQ ID NO: 1743470 - DNA, 15 bp, Homo sapiens
ccaaatcactattta

SEQ ID NO: 1743471 - DNA, 15 bp, Homo sapiens
caaatcactatttaa

SEQ ID NO: 1743472 - DNA, 15 bp, Homo sapiens
aaatcactatttaaa

SEQ ID NO: 1743473 - DNA, 15 bp, Homo sapiens
aatcactatttaaaa

SEQ ID NO: 1743474 - DNA, 15 bp, Homo sapiens
atcactatttaaaaa

SEQ ID NO: 1743475 - DNA, 15 bp, Homo sapiens
tcactatttaaaaag

SEQ ID NO: 1743476 - DNA, 15 bp, Homo sapiens
cactatttaaaaaga

SEQ ID NO: 1743477 - DNA, 15 bp, Homo sapiens
actatttaaaaagaa

SEQ ID NO: 1743478 - DNA, 15 bp, Homo sapiens
ctatttaaaaagaaa

SEQ ID NO: 1743479 - DNA, 15 bp, Homo sapiens
tatttaaaaagaaac

SEQ ID NO: 1743480 - DNA, 15 bp, Homo sapiens
atttaaaaagaaaca

SEQ ID NO: 1743481 - DNA, 15 bp, Homo sapiens
tttaaaaagaaacac

SEQ ID NO: 1743482 - DNA, 15 bp, Homo sapiens
ttaaaaagaaacact

SEQ ID NO: 1743483 - DNA, 15 bp, Homo sapiens
taaaaagaaacactc

SEQ ID NO: 1743484 - DNA, 15 bp, Homo sapiens
aaaaagaaacactct

SEQ ID NO: 1743485 - DNA, 15 bp, Homo sapiens
aaaagaaacactctc

SEQ ID NO: 1743486 - DNA, 15 bp, Homo sapiens
aaagaaacactctca

SEQ ID NO: 1743487 - DNA, 15 bp, Homo sapiens
aagaaacactctcat

SEQ ID NO: 1743488 - DNA, 15 bp, Homo sapiens
agaaacactctcatt

SEQ ID NO: 1743489 - DNA, 15 bp, Homo sapiens
gaaacactctcattt

SEQ ID NO: 1743490 - DNA, 15 bp, Homo sapiens
aaacactctcattta

SEQ ID NO: 1743491 - DNA, 15 bp, Homo sapiens
aacactctcatttac

SEQ ID NO: 1743492 - DNA, 15 bp, Homo sapiens
acactctcatttacc

SEQ ID NO: 1743493 - DNA, 15 bp, Homo sapiens
cactctcatttacct

SEQ ID NO: 1743494 - DNA, 15 bp, Homo sapiens
actctcatttacctg

SEQ ID NO: 1743495 - DNA, 15 bp, Homo sapiens
ctctcatttacctgg

SEQ ID NO: 1743496 - DNA, 15 bp, Homo sapiens
tctcatttacctggg

SEQ ID NO: 1743497 - DNA, 15 bp, Homo sapiens
ctcatttacctgggt

SEQ ID NO: 1743498 - DNA, 15 bp, Homo sapiens
tcatttacctgggta

SEQ ID NO: 1743499 - DNA, 15 bp, Homo sapiens
catttacctgggtac

SEQ ID NO: 1743500 - DNA, 15 bp, Homo sapiens
atttacctgggtaca

SEQ ID NO: 1743501 - DNA, 15 bp, Homo sapiens
tttacctgggtacag

SEQ ID NO: 1743502 - DNA, 15 bp, Homo sapiens
ttacctgggtacagt

SEQ ID NO: 1743503 - DNA, 15 bp, Homo sapiens
tacctgggtacagtt

SEQ ID NO: 1743504 - DNA, 15 bp, Homo sapiens
acctgggtacagttt

SEQ ID NO: 1743505 - DNA, 15 bp, Homo sapiens
cctgggtacagtttc

SEQ ID NO: 1743506 - DNA, 15 bp, Homo sapiens
ctgggtacagtttca

SEQ ID NO: 1743507 - DNA, 15 bp, Homo sapiens
tgggtacagtttcat

SEQ ID NO: 1743508 - DNA, 15 bp, Homo sapiens
gggtacagtttcatc

SEQ ID NO: 1743509 - DNA, 15 bp, Homo sapiens
ggtacagtttcatca

SEQ ID NO: 1743510 - DNA, 15 bp, Homo sapiens
gtacagtttcatcat

SEQ ID NO: 1743511 - DNA, 15 bp, Homo sapiens
tacagtttcatcatc

SEQ ID NO: 1743512 - DNA, 15 bp, Homo sapiens
acagtttcatcatca

SEQ ID NO: 1743513 - DNA, 15 bp, Homo sapiens
cagtttcatcatcat

SEQ ID NO: 1743514 - DNA, 15 bp, Homo sapiens
agtttcatcatcatt

SEQ ID NO: 1743515 - DNA, 15 bp, Homo sapiens
gtttcatcatcatta

SEQ ID NO: 1743516 - DNA, 15 bp, Homo sapiens
tttcatcatcattaa

SEQ ID NO: 1743517 - DNA, 15 bp, Homo sapiens
ttcatcatcattaaa

SEQ ID NO: 1743518 - DNA, 15 bp, Homo sapiens
tcatcatcattaaag

SEQ ID NO: 1743519 - DNA, 15 bp, Homo sapiens
catcatcattaaagt

SEQ ID NO: 1743520 - DNA, 15 bp, Homo sapiens
atcatcattaaagta

SEQ ID NO: 1743521 - DNA, 15 bp, Homo sapiens
tcatcattaaagtac

SEQ ID NO: 1743522 - DNA, 15 bp, Homo sapiens
catcattaaagtaca

SEQ ID NO: 1743523 - DNA, 15 bp, Homo sapiens
atcattaaagtacaa

SEQ ID NO: 1743524 - DNA, 15 bp, Homo sapiens
tcattaaagtacaac

SEQ ID NO: 1743525 - DNA, 15 bp, Homo sapiens
cattaaagtacaaca

SEQ ID NO: 1743526 - DNA, 15 bp, Homo sapiens
attaaagtacaacag

SEQ ID NO: 1743527 - DNA, 15 bp, Homo sapiens
ttaaagtacaacagg

SEQ ID NO: 1743528 - DNA, 15 bp, Homo sapiens
taaagtacaacaggg

SEQ ID NO: 1743529 - DNA, 15 bp, Homo sapiens
aaagtacaacagggt

SEQ ID NO: 1743530 - DNA, 15 bp, Homo sapiens
aagtacaacagggtt

SEQ ID NO: 1743531 - DNA, 15 bp, Homo sapiens
agtacaacagggttt

SEQ ID NO: 1743532 - DNA, 15 bp, Homo sapiens
gtacaacagggtttg

SEQ ID NO: 1743533 - DNA, 15 bp, Homo sapiens
tacaacagggtttga

SEQ ID NO: 1743534 - DNA, 15 bp, Homo sapiens
acaacagggtttgag

SEQ ID NO: 1743535 - DNA, 15 bp, Homo sapiens
caacagggtttgagg

SEQ ID NO: 1743536 - DNA, 15 bp, Homo sapiens
aacagggtttgaggt

SEQ ID NO: 1743537 - DNA, 15 bp, Homo sapiens
acagggtttgaggta

SEQ ID NO: 1743538 - DNA, 15 bp, Homo sapiens
cagggtttgaggtat

SEQ ID NO: 1743539 - DNA, 15 bp, Homo sapiens
agggtttgaggtatt

SEQ ID NO: 1743540 - DNA, 15 bp, Homo sapiens
gggtttgaggtattc

SEQ ID NO: 1743541 - DNA, 15 bp, Homo sapiens
ggtttgaggtattcc

SEQ ID NO: 1743542 - DNA, 15 bp, Homo sapiens
gtttgaggtattccc

SEQ ID NO: 1743543 - DNA, 15 bp, Homo sapiens
tttgaggtattccca

SEQ ID NO: 1743544 - DNA, 15 bp, Homo sapiens
ttgaggtattcccat

SEQ ID NO: 1743545 - DNA, 15 bp, Homo sapiens
tgaggtattcccatc

SEQ ID NO: 1743546 - DNA, 15 bp, Homo sapiens
gaggtattcccatcc

SEQ ID NO: 1743547 - DNA, 15 bp, Homo sapiens
aggtattcccatccc

SEQ ID NO: 1743548 - DNA, 15 bp, Homo sapiens
ggtattcccatccca

SEQ ID NO: 1743549 - DNA, 15 bp, Homo sapiens
gtattcccatcccaa

SEQ ID NO: 1743550 - DNA, 15 bp, Homo sapiens
tattcccatcccaat

SEQ ID NO: 1743551 - DNA, 15 bp, Homo sapiens
attcccatcccaatt

SEQ ID NO: 1743552 - DNA, 15 bp, Homo sapiens
ttcccatcccaattt

SEQ ID NO: 1743553 - DNA, 15 bp, Homo sapiens
tcccatcccaatttt

SEQ ID NO: 1743554 - DNA, 15 bp, Homo sapiens
cccatcccaattttc

SEQ ID NO: 1743555 - DNA, 15 bp, Homo sapiens
ccatcccaattttcc

SEQ ID NO: 1743556 - DNA, 15 bp, Homo sapiens
catcccaattttcca

SEQ ID NO: 1743557 - DNA, 15 bp, Homo sapiens
atcccaattttccaa

SEQ ID NO: 1743558 - DNA, 15 bp, Homo sapiens
tcccaattttccaaa

SEQ ID NO: 1743559 - DNA, 15 bp, Homo sapiens
cccaattttccaaaa

SEQ ID NO: 1743560 - DNA, 15 bp, Homo sapiens
ccaattttccaaaaa

SEQ ID NO: 1743561 - DNA, 15 bp, Homo sapiens
caattttccaaaaag

SEQ ID NO: 1743562 - DNA, 15 bp, Homo sapiens
aattttccaaaaagg

SEQ ID NO: 1743563 - DNA, 15 bp, Homo sapiens
attttccaaaaaggg

SEQ ID NO: 1743564 - DNA, 15 bp, Homo sapiens
ttttccaaaaagggc

SEQ ID NO: 1743565 - DNA, 15 bp, Homo sapiens
tttccaaaaagggct

SEQ ID NO: 1743566 - DNA, 15 bp, Homo sapiens
ttccaaaaagggctt

SEQ ID NO: 1743567 - DNA, 15 bp, Homo sapiens
tccaaaaagggcttg

SEQ ID NO: 1743568 - DNA, 15 bp, Homo sapiens
ccaaaaagggcttgg

SEQ ID NO: 1743569 - DNA, 15 bp, Homo sapiens
caaaaagggcttggt

SEQ ID NO: 1743570 - DNA, 15 bp, Homo sapiens
aaaaagggcttggta

SEQ ID NO: 1743571 - DNA, 15 bp, Homo sapiens
aaaagggcttggtag

SEQ ID NO: 1743572 - DNA, 15 bp, Homo sapiens
aaagggcttggtagt

SEQ ID NO: 1743573 - DNA, 15 bp, Homo sapiens
aagggcttggtagtg

SEQ ID NO: 1743574 - DNA, 15 bp, Homo sapiens
agggcttggtagtga

SEQ ID NO: 1743575 - DNA, 15 bp, Homo sapiens
gggcttggtagtgag

SEQ ID NO: 1743576 - DNA, 15 bp, Homo sapiens
ggcttggtagtgagg

SEQ ID NO: 1743577 - DNA, 15 bp, Homo sapiens
gcttggtagtgaggg

SEQ ID NO: 1743578 - DNA, 15 bp, Homo sapiens
cttggtagtgagggt

SEQ ID NO: 1743579 - DNA, 15 bp, Homo sapiens
ttggtagtgagggtg

SEQ ID NO: 1743580 - DNA, 15 bp, Homo sapiens
tggtagtgagggtgt

SEQ ID NO: 1743581 - DNA, 15 bp, Homo sapiens
ggtagtgagggtgtt

SEQ ID NO: 1743582 - DNA, 15 bp, Homo sapiens
gtagtgagggtgttg

SEQ ID NO: 1743583 - DNA, 15 bp, Homo sapiens
tagtgagggtgttgg

SEQ ID NO: 1743584 - DNA, 15 bp, Homo sapiens
agtgagggtgttggt

SEQ ID NO: 1743585 - DNA, 15 bp, Homo sapiens
gtgagggtgttggtt

SEQ ID NO: 1743586 - DNA, 15 bp, Homo sapiens
tgagggtgttggtta

SEQ ID NO: 1743587 - DNA, 15 bp, Homo sapiens
gagggtgttggttac

SEQ ID NO: 1743588 - DNA, 15 bp, Homo sapiens
agggtgttggttact

SEQ ID NO: 1743589 - DNA, 15 bp, Homo sapiens
gggtgttggttactg

SEQ ID NO: 1743590 - DNA, 15 bp, Homo sapiens
ggtgttggttactgg

SEQ ID NO: 1743591 - DNA, 15 bp, Homo sapiens
gtgttggttactggg

SEQ ID NO: 1743592 - DNA, 15 bp, Homo sapiens
tgttggttactgggc

SEQ ID NO: 1743593 - DNA, 15 bp, Homo sapiens
gttggttactgggca

SEQ ID NO: 1743594 - DNA, 15 bp, Homo sapiens
ttggttactgggcag

SEQ ID NO: 1743595 - DNA, 15 bp, Homo sapiens
tggttactgggcagg

SEQ ID NO: 1743596 - DNA, 15 bp, Homo sapiens
ggttactgggcaggg

SEQ ID NO: 1743597 - DNA, 15 bp, Homo sapiens
gttactgggcaggga

SEQ ID NO: 1743598 - DNA, 15 bp, Homo sapiens
ttactgggcagggag

SEQ ID NO: 1743599 - DNA, 15 bp, Homo sapiens
tactgggcagggagt

SEQ ID NO: 1743600 - DNA, 15 bp, Homo sapiens
actgggcagggagtg

SEQ ID NO: 1743601 - DNA, 15 bp, Homo sapiens
ctgggcagggagtgg

SEQ ID NO: 1743602 - DNA, 15 bp, Homo sapiens
tgggcagggagtggg

SEQ ID NO: 1743603 - DNA, 15 bp, Homo sapiens
gggcagggagtgggg

SEQ ID NO: 1743604 - DNA, 15 bp, Homo sapiens
ggcagggagtgggga

SEQ ID NO: 1743605 - DNA, 15 bp, Homo sapiens
gcagggagtggggag

SEQ ID NO: 1743606 - DNA, 15 bp, Homo sapiens
cagggagtggggagg

SEQ ID NO: 1743607 - DNA, 15 bp, Homo sapiens
agggagtggggaggg

SEQ ID NO: 1743608 - DNA, 15 bp, Homo sapiens
gggagtggggaggga

SEQ ID NO: 1743609 - DNA, 15 bp, Homo sapiens
ggagtggggagggaa

SEQ ID NO: 1743610 - DNA, 15 bp, Homo sapiens
gagtggggagggaag

SEQ ID NO: 1743611 - DNA, 15 bp, Homo sapiens
agtggggagggaaga

SEQ ID NO: 1743612 - DNA, 15 bp, Homo sapiens
gtggggagggaagac

SEQ ID NO: 1743613 - DNA, 15 bp, Homo sapiens
tggggagggaagact

SEQ ID NO: 1743614 - DNA, 15 bp, Homo sapiens
ggggagggaagactg

SEQ ID NO: 1743615 - DNA, 15 bp, Homo sapiens
gggagggaagactgc

SEQ ID NO: 1743616 - DNA, 15 bp, Homo sapiens
ggagggaagactgcc

SEQ ID NO: 1743617 - DNA, 15 bp, Homo sapiens
gagggaagactgcct

SEQ ID NO: 1743618 - DNA, 15 bp, Homo sapiens
agggaagactgcctc

SEQ ID NO: 1743619 - DNA, 15 bp, Homo sapiens
gggaagactgcctca

SEQ ID NO: 1743620 - DNA, 15 bp, Homo sapiens
ggaagactgcctcat

SEQ ID NO: 1743621 - DNA, 15 bp, Homo sapiens
gaagactgcctcata

SEQ ID NO: 1743622 - DNA, 15 bp, Homo sapiens
aagactgcctcataa

SEQ ID NO: 1743623 - DNA, 15 bp, Homo sapiens
agactgcctcataac

SEQ ID NO: 1743624 - DNA, 15 bp, Homo sapiens
gactgcctcataacc

SEQ ID NO: 1743625 - DNA, 15 bp, Homo sapiens
actgcctcataacca

SEQ ID NO: 1743626 - DNA, 15 bp, Homo sapiens
ctgcctcataaccat

SEQ ID NO: 1743627 - DNA, 15 bp, Homo sapiens
tgcctcataaccatc

SEQ ID NO: 1743628 - DNA, 15 bp, Homo sapiens
gcctcataaccatct

SEQ ID NO: 1743629 - DNA, 15 bp, Homo sapiens
cctcataaccatctt

SEQ ID NO: 1743630 - DNA, 15 bp, Homo sapiens
ctcataaccatcttg

SEQ ID NO: 1743631 - DNA, 15 bp, Homo sapiens
tcataaccatcttga

SEQ ID NO: 1743632 - DNA, 15 bp, Homo sapiens
cataaccatcttgac

SEQ ID NO: 1743633 - DNA, 15 bp, Homo sapiens
ataaccatcttgacc

SEQ ID NO: 1743634 - DNA, 15 bp, Homo sapiens
taaccatcttgaccc

SEQ ID NO: 1743635 - DNA, 15 bp, Homo sapiens
aaccatcttgaccca

SEQ ID NO: 1743636 - DNA, 15 bp, Homo sapiens
accatcttgacccag

SEQ ID NO: 1743637 - DNA, 15 bp, Homo sapiens
ccatcttgacccagg

SEQ ID NO: 1743638 - DNA, 15 bp, Homo sapiens
catcttgacccaggg

SEQ ID NO: 1743639 - DNA, 15 bp, Homo sapiens
atcttgacccagggc

SEQ ID NO: 1743640 - DNA, 15 bp, Homo sapiens
tcttgacccagggct

SEQ ID NO: 1743641 - DNA, 15 bp, Homo sapiens
cttgacccagggctt

SEQ ID NO: 1743642 - DNA, 15 bp, Homo sapiens
ttgacccagggcttg

SEQ ID NO: 1743643 - DNA, 15 bp, Homo sapiens
tgacccagggcttgt

SEQ ID NO: 1743644 - DNA, 15 bp, Homo sapiens
gacccagggcttgtc

SEQ ID NO: 1743645 - DNA, 15 bp, Homo sapiens
acccagggcttgtct

SEQ ID NO: 1743646 - DNA, 15 bp, Homo sapiens
cccagggcttgtctg

SEQ ID NO: 1743647 - DNA, 15 bp, Homo sapiens
ccagggcttgtctgg

SEQ ID NO: 1743648 - DNA, 15 bp, Homo sapiens
cagggcttgtctggt

SEQ ID NO: 1743649 - DNA, 15 bp, Homo sapiens
agggcttgtctggtc

SEQ ID NO: 1743650 - DNA, 15 bp, Homo sapiens
gggcttgtctggtca

SEQ ID NO: 1743651 - DNA, 15 bp, Homo sapiens
ggcttgtctggtcac

SEQ ID NO: 1743652 - DNA, 15 bp, Homo sapiens
gcttgtctggtcact

SEQ ID NO: 1743653 - DNA, 15 bp, Homo sapiens
cttgtctggtcactg

SEQ ID NO: 1743654 - DNA, 15 bp, Homo sapiens
ttgtctggtcactga

SEQ ID NO: 1743655 - DNA, 15 bp, Homo sapiens
tgtctggtcactgag

SEQ ID NO: 1743656 - DNA, 15 bp, Homo sapiens
gtctggtcactgaga

SEQ ID NO: 1743657 - DNA, 15 bp, Homo sapiens
tctggtcactgagat

SEQ ID NO: 1743658 - DNA, 15 bp, Homo sapiens
ctggtcactgagatt

SEQ ID NO: 1743659 - DNA, 15 bp, Homo sapiens
tggtcactgagatta

SEQ ID NO: 1743660 - DNA, 15 bp, Homo sapiens
ggtcactgagattaa

SEQ ID NO: 1743661 - DNA, 15 bp, Homo sapiens
gtcactgagattaag

SEQ ID NO: 1743662 - DNA, 15 bp, Homo sapiens
tcactgagattaagg

SEQ ID NO: 1743663 - DNA, 15 bp, Homo sapiens
cactgagattaaggg

SEQ ID NO: 1743664 - DNA, 15 bp, Homo sapiens
actgagattaagggc

SEQ ID NO: 1743665 - DNA, 15 bp, Homo sapiens
ctgagattaagggcc

SEQ ID NO: 1743666 - DNA, 15 bp, Homo sapiens
tgagattaagggccc

SEQ ID NO: 1743667 - DNA, 15 bp, Homo sapiens
gagattaagggccct

SEQ ID NO: 1743668 - DNA, 15 bp, Homo sapiens
agattaagggccctc

SEQ ID NO: 1743669 - DNA, 15 bp, Homo sapiens
gattaagggccctct

SEQ ID NO: 1743670 - DNA, 15 bp, Homo sapiens
attaagggccctctg

SEQ ID NO: 1743671 - DNA, 15 bp, Homo sapiens
ttaagggccctctgt

SEQ ID NO: 1743672 - DNA, 15 bp, Homo sapiens
taagggccctctgtg

SEQ ID NO: 1743673 - DNA, 15 bp, Homo sapiens
aagggccctctgtgc

SEQ ID NO: 1743674 - DNA, 15 bp, Homo sapiens
agggccctctgtgcc

SEQ ID NO: 1743675 - DNA, 15 bp, Homo sapiens
gggccctctgtgcca

SEQ ID NO: 1743676 - DNA, 15 bp, Homo sapiens
ggccctctgtgccac

SEQ ID NO: 1743677 - DNA, 15 bp, Homo sapiens
gccctctgtgccaca

SEQ ID NO: 1743678 - DNA, 15 bp, Homo sapiens
ccctctgtgccacag

SEQ ID NO: 1743679 - DNA, 15 bp, Homo sapiens
cctctgtgccacagc

SEQ ID NO: 1743680 - DNA, 15 bp, Homo sapiens
ctctgtgccacagct

SEQ ID NO: 1743681 - DNA, 15 bp, Homo sapiens
tctgtgccacagcta

SEQ ID NO: 1743682 - DNA, 15 bp, Homo sapiens
ctgtgccacagctaa

SEQ ID NO: 1743683 - DNA, 15 bp, Homo sapiens
tgtgccacagctaac

SEQ ID NO: 1743684 - DNA, 15 bp, Homo sapiens
gtgccacagctaacc

SEQ ID NO: 1743685 - DNA, 15 bp, Homo sapiens
tgccacagctaaccc

SEQ ID NO: 1743686 - DNA, 15 bp, Homo sapiens
gccacagctaacccg

SEQ ID NO: 1743687 - DNA, 15 bp, Homo sapiens
ccacagctaacccgt

SEQ ID NO: 1743688 - DNA, 15 bp, Homo sapiens
cacagctaacccgta

SEQ ID NO: 1743689 - DNA, 15 bp, Homo sapiens
acagctaacccgtaa

SEQ ID NO: 1743690 - DNA, 15 bp, Homo sapiens
cagctaacccgtaag

SEQ ID NO: 1743691 - DNA, 15 bp, Homo sapiens
agctaacccgtaagg

SEQ ID NO: 1743692 - DNA, 15 bp, Homo sapiens
gctaacccgtaaggg

SEQ ID NO: 1743693 - DNA, 15 bp, Homo sapiens
ctaacccgtaaggga

SEQ ID NO: 1743694 - DNA, 15 bp, Homo sapiens
taacccgtaagggag

SEQ ID NO: 1743695 - DNA, 15 bp, Homo sapiens
aacccgtaagggagt

SEQ ID NO: 1743696 - DNA, 15 bp, Homo sapiens
acccgtaagggagtt

SEQ ID NO: 1743697 - DNA, 15 bp, Homo sapiens
cccgtaagggagttg

SEQ ID NO: 1743698 - DNA, 15 bp, Homo sapiens
ccgtaagggagttga

SEQ ID NO: 1743699 - DNA, 15 bp, Homo sapiens
cgtaagggagttgat

SEQ ID NO: 1743700 - DNA, 15 bp, Homo sapiens
gtaagggagttgatc

SEQ ID NO: 1743701 - DNA, 15 bp, Homo sapiens
taagggagttgatcc

SEQ ID NO: 1743702 - DNA, 15 bp, Homo sapiens
aagggagttgatcca

SEQ ID NO: 1743703 - DNA, 15 bp, Homo sapiens
agggagttgatccat

SEQ ID NO: 1743704 - DNA, 15 bp, Homo sapiens
gggagttgatccatg

SEQ ID NO: 1743705 - DNA, 15 bp, Homo sapiens
ggagttgatccatga

SEQ ID NO: 1743706 - DNA, 15 bp, Homo sapiens
gagttgatccatgac

SEQ ID NO: 1743707 - DNA, 15 bp, Homo sapiens
agttgatccatgact

SEQ ID NO: 1743708 - DNA, 15 bp, Homo sapiens
gttgatccatgacta

SEQ ID NO: 1743709 - DNA, 15 bp, Homo sapiens
ttgatccatgactag

SEQ ID NO: 1743710 - DNA, 15 bp, Homo sapiens
tgatccatgactaga

SEQ ID NO: 1743711 - DNA, 15 bp, Homo sapiens
gatccatgactagaa

SEQ ID NO: 1743712 - DNA, 15 bp, Homo sapiens
atccatgactagaat

SEQ ID NO: 1743713 - DNA, 15 bp, Homo sapiens
tccatgactagaatg

SEQ ID NO: 1743714 - DNA, 15 bp, Homo sapiens
ccatgactagaatgt

SEQ ID NO: 1743715 - DNA, 15 bp, Homo sapiens
catgactagaatgtc

SEQ ID NO: 1743716 - DNA, 15 bp, Homo sapiens
atgactagaatgtca

SEQ ID NO: 1743717 - DNA, 15 bp, Homo sapiens
tgactagaatgtcaa

SEQ ID NO: 1743718 - DNA, 15 bp, Homo sapiens
gactagaatgtcaag

SEQ ID NO: 1743719 - DNA, 15 bp, Homo sapiens
actagaatgtcaaga

SEQ ID NO: 1743720 - DNA, 15 bp, Homo sapiens
ctagaatgtcaagag

SEQ ID NO: 1743721 - DNA, 15 bp, Homo sapiens
tagaatgtcaagagg

SEQ ID NO: 1743722 - DNA, 15 bp, Homo sapiens
agaatgtcaagagga

SEQ ID NO: 1743723 - DNA, 15 bp, Homo sapiens
gaatgtcaagaggag

SEQ ID NO: 1743724 - DNA, 15 bp, Homo sapiens
aatgtcaagaggagt

SEQ ID NO: 1743725 - DNA, 15 bp, Homo sapiens
atgtcaagaggagtg

SEQ ID NO: 1743726 - DNA, 15 bp, Homo sapiens
tgtcaagaggagtgt

SEQ ID NO: 1743727 - DNA, 15 bp, Homo sapiens
gtcaagaggagtgtc

SEQ ID NO: 1743728 - DNA, 15 bp, Homo sapiens
tcaagaggagtgtca

SEQ ID NO: 1743729 - DNA, 15 bp, Homo sapiens
caagaggagtgtcaa

SEQ ID NO: 1743730 - DNA, 15 bp, Homo sapiens
aagaggagtgtcaag

SEQ ID NO: 1743731 - DNA, 15 bp, Homo sapiens
agaggagtgtcaagt

SEQ ID NO: 1743732 - DNA, 15 bp, Homo sapiens
gaggagtgtcaagtc

SEQ ID NO: 1743733 - DNA, 15 bp, Homo sapiens
aggagtgtcaagtca

SEQ ID NO: 1743734 - DNA, 15 bp, Homo sapiens
ggagtgtcaagtcat

SEQ ID NO: 1743735 - DNA, 15 bp, Homo sapiens
gagtgtcaagtcatt

SEQ ID NO: 1743736 - DNA, 15 bp, Homo sapiens
agtgtcaagtcatta

SEQ ID NO: 1743737 - DNA, 15 bp, Homo sapiens
gtgtcaagtcattac

SEQ ID NO: 1743738 - DNA, 15 bp, Homo sapiens
tgtcaagtcattact

SEQ ID NO: 1743739 - DNA, 15 bp, Homo sapiens
gtcaagtcattactg

SEQ ID NO: 1743740 - DNA, 15 bp, Homo sapiens
tcaagtcattactgg

SEQ ID NO: 1743741 - DNA, 15 bp, Homo sapiens
caagtcattactggt

SEQ ID NO: 1743742 - DNA, 15 bp, Homo sapiens
aagtcattactggtt

SEQ ID NO: 1743743 - DNA, 15 bp, Homo sapiens
agtcattactggttt

SEQ ID NO: 1743744 - DNA, 15 bp, Homo sapiens
gtcattactggtttc

SEQ ID NO: 1743745 - DNA, 15 bp, Homo sapiens
tcattactggtttct

SEQ ID NO: 1743746 - DNA, 15 bp, Homo sapiens
cattactggtttctc

SEQ ID NO: 1743747 - DNA, 15 bp, Homo sapiens
attactggtttctcc

SEQ ID NO: 1743748 - DNA, 15 bp, Homo sapiens
ttactggtttctcct

SEQ ID NO: 1743749 - DNA, 15 bp, Homo sapiens
tactggtttctcctt

SEQ ID NO: 1743750 - DNA, 15 bp, Homo sapiens
actggtttctccttg

SEQ ID NO: 1743751 - DNA, 15 bp, Homo sapiens
ctggtttctccttgt

SEQ ID NO: 1743752 - DNA, 15 bp, Homo sapiens
tggtttctccttgtg

SEQ ID NO: 1743753 - DNA, 15 bp, Homo sapiens
ggtttctccttgtgt

SEQ ID NO: 1743754 - DNA, 15 bp, Homo sapiens
gtttctccttgtgta

SEQ ID NO: 1743755 - DNA, 15 bp, Homo sapiens
tttctccttgtgtaa

SEQ ID NO: 1743756 - DNA, 15 bp, Homo sapiens
ttctccttgtgtaaa

SEQ ID NO: 1743757 - DNA, 15 bp, Homo sapiens
tctccttgtgtaaat

SEQ ID NO: 1743758 - DNA, 15 bp, Homo sapiens
ctccttgtgtaaatt

SEQ ID NO: 1743759 - DNA, 15 bp, Homo sapiens
tccttgtgtaaatta

SEQ ID NO: 1743760 - DNA, 15 bp, Homo sapiens
ccttgtgtaaattac

SEQ ID NO: 1743761 - DNA, 15 bp, Homo sapiens
cttgtgtaaattaca

SEQ ID NO: 1743762 - DNA, 15 bp, Homo sapiens
ttgtgtaaattacac

SEQ ID NO: 1743763 - DNA, 15 bp, Homo sapiens
tgtgtaaattacaca

SEQ ID NO: 1743764 - DNA, 15 bp, Homo sapiens
gtgtaaattacacag

SEQ ID NO: 1743765 - DNA, 15 bp, Homo sapiens
tgtaaattacacagc

SEQ ID NO: 1743766 - DNA, 15 bp, Homo sapiens
gtaaattacacagca

SEQ ID NO: 1743767 - DNA, 15 bp, Homo sapiens
taaattacacagcag

SEQ ID NO: 1743768 - DNA, 15 bp, Homo sapiens
aaattacacagcagg

SEQ ID NO: 1743769 - DNA, 15 bp, Homo sapiens
aattacacagcaggg

SEQ ID NO: 1743770 - DNA, 15 bp, Homo sapiens
attacacagcagggg

SEQ ID NO: 1743771 - DNA, 15 bp, Homo sapiens
ttacacagcaggggt

SEQ ID NO: 1743772 - DNA, 15 bp, Homo sapiens
tacacagcaggggta

SEQ ID NO: 1743773 - DNA, 15 bp, Homo sapiens
acacagcaggggtag

SEQ ID NO: 1743774 - DNA, 15 bp, Homo sapiens
cacagcaggggtagc

SEQ ID NO: 1743775 - DNA, 15 bp, Homo sapiens
acagcaggggtagca

SEQ ID NO: 1743776 - DNA, 15 bp, Homo sapiens
cagcaggggtagcag

SEQ ID NO: 1743777 - DNA, 15 bp, Homo sapiens
agcaggggtagcaga

SEQ ID NO: 1743778 - DNA, 15 bp, Homo sapiens
gcaggggtagcagaa

SEQ ID NO: 1743779 - DNA, 15 bp, Homo sapiens
caggggtagcagaat

SEQ ID NO: 1743780 - DNA, 15 bp, Homo sapiens
aggggtagcagaata

SEQ ID NO: 1743781 - DNA, 15 bp, Homo sapiens
ggggtagcagaatag

SEQ ID NO: 1743782 - DNA, 15 bp, Homo sapiens
gggtagcagaatagc

SEQ ID NO: 1743783 - DNA, 15 bp, Homo sapiens
ggtagcagaatagca

SEQ ID NO: 1743784 - DNA, 15 bp, Homo sapiens
gtagcagaatagcat

SEQ ID NO: 1743785 - DNA, 15 bp, Homo sapiens
tagcagaatagcatt

SEQ ID NO: 1743786 - DNA, 15 bp, Homo sapiens
agcagaatagcatta

SEQ ID NO: 1743787 - DNA, 15 bp, Homo sapiens
gcagaatagcattat

SEQ ID NO: 1743788 - DNA, 15 bp, Homo sapiens
cagaatagcattatg

SEQ ID NO: 1743789 - DNA, 15 bp, Homo sapiens
agaatagcattatgg

SEQ ID NO: 1743790 - DNA, 15 bp, Homo sapiens
gaatagcattatggc

SEQ ID NO: 1743791 - DNA, 15 bp, Homo sapiens
aatagcattatggct

SEQ ID NO: 1743792 - DNA, 15 bp, Homo sapiens
atagcattatggctt

SEQ ID NO: 1743793 - DNA, 15 bp, Homo sapiens
tagcattatggctta

SEQ ID NO: 1743794 - DNA, 15 bp, Homo sapiens
agcattatggcttag

SEQ ID NO: 1743795 - DNA, 15 bp, Homo sapiens
gcattatggcttagg

SEQ ID NO: 1743796 - DNA, 15 bp, Homo sapiens
cattatggcttagga

SEQ ID NO: 1743797 - DNA, 15 bp, Homo sapiens
attatggcttaggaa

SEQ ID NO: 1743798 - DNA, 15 bp, Homo sapiens
ttatggcttaggaac

SEQ ID NO: 1743799 - DNA, 15 bp, Homo sapiens
tatggcttaggaaca

SEQ ID NO: 1743800 - DNA, 15 bp, Homo sapiens
atggcttaggaacat

SEQ ID NO: 1743801 - DNA, 15 bp, Homo sapiens
tggcttaggaacatg

SEQ ID NO: 1743802 - DNA, 15 bp, Homo sapiens
ggcttaggaacatgg

SEQ ID NO: 1743803 - DNA, 15 bp, Homo sapiens
gcttaggaacatgga

SEQ ID NO: 1743804 - DNA, 15 bp, Homo sapiens
cttaggaacatggac

SEQ ID NO: 1743805 - DNA, 15 bp, Homo sapiens
ttaggaacatggact

SEQ ID NO: 1743806 - DNA, 15 bp, Homo sapiens
taggaacatggactc

SEQ ID NO: 1743807 - DNA, 15 bp, Homo sapiens
aggaacatggactcc

SEQ ID NO: 1743808 - DNA, 15 bp, Homo sapiens
ggaacatggactcca

SEQ ID NO: 1743809 - DNA, 15 bp, Homo sapiens
gaacatggactccac

SEQ ID NO: 1743810 - DNA, 15 bp, Homo sapiens
aacatggactccaca

SEQ ID NO: 1743811 - DNA, 15 bp, Homo sapiens
acatggactccacat

SEQ ID NO: 1743812 - DNA, 15 bp, Homo sapiens
catggactccacatc

SEQ ID NO: 1743813 - DNA, 15 bp, Homo sapiens
atggactccacatca

SEQ ID NO: 1743814 - DNA, 15 bp, Homo sapiens
tggactccacatcag

SEQ ID NO: 1743815 - DNA, 15 bp, Homo sapiens
ggactccacatcaga

SEQ ID NO: 1743816 - DNA, 15 bp, Homo sapiens
gactccacatcagat

SEQ ID NO: 1743817 - DNA, 15 bp, Homo sapiens
actccacatcagata

SEQ ID NO: 1743818 - DNA, 15 bp, Homo sapiens
ctccacatcagatag

SEQ ID NO: 1743819 - DNA, 15 bp, Homo sapiens
tccacatcagatagt

SEQ ID NO: 1743820 - DNA, 15 bp, Homo sapiens
ccacatcagatagtc

SEQ ID NO: 1743821 - DNA, 15 bp, Homo sapiens
cacatcagatagtct

SEQ ID NO: 1743822 - DNA, 15 bp, Homo sapiens
acatcagatagtctc

SEQ ID NO: 1743823 - DNA, 15 bp, Homo sapiens
catcagatagtctca

SEQ ID NO: 1743824 - DNA, 15 bp, Homo sapiens
atcagatagtctcag

SEQ ID NO: 1743825 - DNA, 15 bp, Homo sapiens
tcagatagtctcagt

SEQ ID NO: 1743826 - DNA, 15 bp, Homo sapiens
cagatagtctcagtt

SEQ ID NO: 1743827 - DNA, 15 bp, Homo sapiens
agatagtctcagttg

SEQ ID NO: 1743828 - DNA, 15 bp, Homo sapiens
gatagtctcagttgg

SEQ ID NO: 1743829 - DNA, 15 bp, Homo sapiens
atagtctcagttgga

SEQ ID NO: 1743830 - DNA, 15 bp, Homo sapiens
tagtctcagttggaa

SEQ ID NO: 1743831 - DNA, 15 bp, Homo sapiens
agtctcagttggaat

SEQ ID NO: 1743832 - DNA, 15 bp, Homo sapiens
gtctcagttggaatt

SEQ ID NO: 1743833 - DNA, 15 bp, Homo sapiens
tctcagttggaattc

SEQ ID NO: 1743834 - DNA, 15 bp, Homo sapiens
ctcagttggaattct

SEQ ID NO: 1743835 - DNA, 15 bp, Homo sapiens
tcagttggaattctt

SEQ ID NO: 1743836 - DNA, 15 bp, Homo sapiens
cagttggaattcttg

SEQ ID NO: 1743837 - DNA, 15 bp, Homo sapiens
agttggaattcttgc

SEQ ID NO: 1743838 - DNA, 15 bp, Homo sapiens
gttggaattcttgct

SEQ ID NO: 1743839 - DNA, 15 bp, Homo sapiens
ttggaattcttgctt

SEQ ID NO: 1743840 - DNA, 15 bp, Homo sapiens
tggaattcttgcttt

SEQ ID NO: 1743841 - DNA, 15 bp, Homo sapiens
ggaattcttgctttg

SEQ ID NO: 1743842 - DNA, 15 bp, Homo sapiens
gaattcttgctttgc

SEQ ID NO: 1743843 - DNA, 15 bp, Homo sapiens
aattcttgctttgct

SEQ ID NO: 1743844 - DNA, 15 bp, Homo sapiens
attcttgctttgcta

SEQ ID NO: 1743845 - DNA, 15 bp, Homo sapiens
ttcttgctttgctac

SEQ ID NO: 1743846 - DNA, 15 bp, Homo sapiens
tcttgctttgctact

SEQ ID NO: 1743847 - DNA, 15 bp, Homo sapiens
cttgctttgctactt

SEQ ID NO: 1743848 - DNA, 15 bp, Homo sapiens
ttgctttgctactta

SEQ ID NO: 1743849 - DNA, 15 bp, Homo sapiens
tgctttgctacttat

SEQ ID NO: 1743850 - DNA, 15 bp, Homo sapiens
gctttgctacttatt

SEQ ID NO: 1743851 - DNA, 15 bp, Homo sapiens
ctttgctacttatta

SEQ ID NO: 1743852 - DNA, 15 bp, Homo sapiens
tttgctacttattaa

SEQ ID NO: 1743853 - DNA, 15 bp, Homo sapiens
ttgctacttattaac

SEQ ID NO: 1743854 - DNA, 15 bp, Homo sapiens
tgctacttattaact

SEQ ID NO: 1743855 - DNA, 15 bp, Homo sapiens
gctacttattaactt

SEQ ID NO: 1743856 - DNA, 15 bp, Homo sapiens
ctacttattaacttt

SEQ ID NO: 1743857 - DNA, 15 bp, Homo sapiens
tacttattaacttta

SEQ ID NO: 1743858 - DNA, 15 bp, Homo sapiens
acttattaactttag

SEQ ID NO: 1743859 - DNA, 15 bp, Homo sapiens
cttattaactttaga

SEQ ID NO: 1743860 - DNA, 15 bp, Homo sapiens
ttattaactttagaa

SEQ ID NO: 1743861 - DNA, 15 bp, Homo sapiens
tattaactttagaac

SEQ ID NO: 1743862 - DNA, 15 bp, Homo sapiens
attaactttagaact

SEQ ID NO: 1743863 - DNA, 15 bp, Homo sapiens
ttaactttagaactt

SEQ ID NO: 1743864 - DNA, 15 bp, Homo sapiens
taactttagaactta

SEQ ID NO: 1743865 - DNA, 15 bp, Homo sapiens
aactttagaacttaa

SEQ ID NO: 1743866 - DNA, 15 bp, Homo sapiens
actttagaacttaag

SEQ ID NO: 1743867 - DNA, 15 bp, Homo sapiens
ctttagaacttaagg

SEQ ID NO: 1743868 - DNA, 15 bp, Homo sapiens
tttagaacttaaggc

SEQ ID NO: 1743869 - DNA, 15 bp, Homo sapiens
ttagaacttaaggca

SEQ ID NO: 1743870 - DNA, 15 bp, Homo sapiens
tagaacttaaggcaa

SEQ ID NO: 1743871 - DNA, 15 bp, Homo sapiens
agaacttaaggcaat

SEQ ID NO: 1743872 - DNA, 15 bp, Homo sapiens
gaacttaaggcaatt

SEQ ID NO: 1743873 - DNA, 15 bp, Homo sapiens
aacttaaggcaattc

SEQ ID NO: 1743874 - DNA, 15 bp, Homo sapiens
acttaaggcaattca

SEQ ID NO: 1743875 - DNA, 15 bp, Homo sapiens
cttaaggcaattcag

SEQ ID NO: 1743876 - DNA, 15 bp, Homo sapiens
ttaaggcaattcagt

SEQ ID NO: 1743877 - DNA, 15 bp, Homo sapiens
taaggcaattcagtt

SEQ ID NO: 1743878 - DNA, 15 bp, Homo sapiens
aaggcaattcagtta

SEQ ID NO: 1743879 - DNA, 15 bp, Homo sapiens
aggcaattcagttaa

SEQ ID NO: 1743880 - DNA, 15 bp, Homo sapiens
ggcaattcagttaac

SEQ ID NO: 1743881 - DNA, 15 bp, Homo sapiens
gcaattcagttaact

SEQ ID NO: 1743882 - DNA, 15 bp, Homo sapiens
caattcagttaactt

SEQ ID NO: 1743883 - DNA, 15 bp, Homo sapiens
aattcagttaacttc

SEQ ID NO: 1743884 - DNA, 15 bp, Homo sapiens
attcagttaacttct

SEQ ID NO: 1743885 - DNA, 15 bp, Homo sapiens
ttcagttaacttctc

SEQ ID NO: 1743886 - DNA, 15 bp, Homo sapiens
tcagttaacttctct

SEQ ID NO: 1743887 - DNA, 15 bp, Homo sapiens
cagttaacttctctg

SEQ ID NO: 1743888 - DNA, 15 bp, Homo sapiens
agttaacttctctgt

SEQ ID NO: 1743889 - DNA, 15 bp, Homo sapiens
gttaacttctctgtg

SEQ ID NO: 1743890 - DNA, 15 bp, Homo sapiens
ttaacttctctgtgc

SEQ ID NO: 1743891 - DNA, 15 bp, Homo sapiens
taacttctctgtgcc

SEQ ID NO: 1743892 - DNA, 15 bp, Homo sapiens
aacttctctgtgcct

SEQ ID NO: 1743893 - DNA, 15 bp, Homo sapiens
acttctctgtgcctc

SEQ ID NO: 1743894 - DNA, 15 bp, Homo sapiens
cttctctgtgcctcg

SEQ ID NO: 1743895 - DNA, 15 bp, Homo sapiens
ttctctgtgcctcgg

SEQ ID NO: 1743896 - DNA, 15 bp, Homo sapiens
tctctgtgcctcggt

SEQ ID NO: 1743897 - DNA, 15 bp, Homo sapiens
ctctgtgcctcggtt

SEQ ID NO: 1743898 - DNA, 15 bp, Homo sapiens
tctgtgcctcggttc

SEQ ID NO: 1743899 - DNA, 15 bp, Homo sapiens
ctgtgcctcggttct

SEQ ID NO: 1743900 - DNA, 15 bp, Homo sapiens
tgtgcctcggttctc

SEQ ID NO: 1743901 - DNA, 15 bp, Homo sapiens
gtgcctcggttctct

SEQ ID NO: 1743902 - DNA, 15 bp, Homo sapiens
tgcctcggttctctc

SEQ ID NO: 1743903 - DNA, 15 bp, Homo sapiens
gcctcggttctctca

SEQ ID NO: 1743904 - DNA, 15 bp, Homo sapiens
cctcggttctctcat

SEQ ID NO: 1743905 - DNA, 15 bp, Homo sapiens
ctcggttctctcatc

SEQ ID NO: 1743906 - DNA, 15 bp, Homo sapiens
tcggttctctcatct

SEQ ID NO: 1743907 - DNA, 15 bp, Homo sapiens
cggttctctcatctg

SEQ ID NO: 1743908 - DNA, 15 bp, Homo sapiens
ggttctctcatctgt

SEQ ID NO: 1743909 - DNA, 15 bp, Homo sapiens
gttctctcatctgtg

SEQ ID NO: 1743910 - DNA, 15 bp, Homo sapiens
ttctctcatctgtgt

SEQ ID NO: 1743911 - DNA, 15 bp, Homo sapiens
tctctcatctgtgta

SEQ ID NO: 1743912 - DNA, 15 bp, Homo sapiens
ctctcatctgtgtaa

SEQ ID NO: 1743913 - DNA, 15 bp, Homo sapiens
tctcatctgtgtaaa

SEQ ID NO: 1743914 - DNA, 15 bp, Homo sapiens
ctcatctgtgtaaat

SEQ ID NO: 1743915 - DNA, 15 bp, Homo sapiens
tcatctgtgtaaata

SEQ ID NO: 1743916 - DNA, 15 bp, Homo sapiens
catctgtgtaaatag

SEQ ID NO: 1743917 - DNA, 15 bp, Homo sapiens
atctgtgtaaatagg

SEQ ID NO: 1743918 - DNA, 15 bp, Homo sapiens
tctgtgtaaatagga

SEQ ID NO: 1743919 - DNA, 15 bp, Homo sapiens
ctgtgtaaataggaa

SEQ ID NO: 1743920 - DNA, 15 bp, Homo sapiens
tgtgtaaataggaat

SEQ ID NO: 1743921 - DNA, 15 bp, Homo sapiens
gtgtaaataggaata

SEQ ID NO: 1743922 - DNA, 15 bp, Homo sapiens
tgtaaataggaatac

SEQ ID NO: 1743923 - DNA, 15 bp, Homo sapiens
gtaaataggaatact

SEQ ID NO: 1743924 - DNA, 15 bp, Homo sapiens
taaataggaatacta

SEQ ID NO: 1743925 - DNA, 15 bp, Homo sapiens
aaataggaatactat

SEQ ID NO: 1743926 - DNA, 15 bp, Homo sapiens
aataggaatactatt

SEQ ID NO: 1743927 - DNA, 15 bp, Homo sapiens
ataggaatactattt

SEQ ID NO: 1743928 - DNA, 15 bp, Homo sapiens
taggaatactatttc

SEQ ID NO: 1743929 - DNA, 15 bp, Homo sapiens
aggaatactatttcc

SEQ ID NO: 1743930 - DNA, 15 bp, Homo sapiens
ggaatactatttccc

SEQ ID NO: 1743931 - DNA, 15 bp, Homo sapiens
gaatactatttccct

SEQ ID NO: 1743932 - DNA, 15 bp, Homo sapiens
aatactatttccctt

SEQ ID NO: 1743933 - DNA, 15 bp, Homo sapiens
atactatttcccttt

SEQ ID NO: 1743934 - DNA, 15 bp, Homo sapiens
tactatttccctttc

SEQ ID NO: 1743935 - DNA, 15 bp, Homo sapiens
actatttccctttca

SEQ ID NO: 1743936 - DNA, 15 bp, Homo sapiens
ctatttccctttcaa

SEQ ID NO: 1743937 - DNA, 15 bp, Homo sapiens
tatttccctttcaag

SEQ ID NO: 1743938 - DNA, 15 bp, Homo sapiens
atttccctttcaagg

SEQ ID NO: 1743939 - DNA, 15 bp, Homo sapiens
tttccctttcaaggt

SEQ ID NO: 1743940 - DNA, 15 bp, Homo sapiens
ttccctttcaaggtt

SEQ ID NO: 1743941 - DNA, 15 bp, Homo sapiens
tccctttcaaggttg

SEQ ID NO: 1743942 - DNA, 15 bp, Homo sapiens
ccctttcaaggttgt

SEQ ID NO: 1743943 - DNA, 15 bp, Homo sapiens
cctttcaaggttgtg

SEQ ID NO: 1743944 - DNA, 15 bp, Homo sapiens
ctttcaaggttgtga

SEQ ID NO: 1743945 - DNA, 15 bp, Homo sapiens
tttcaaggttgtgag

SEQ ID NO: 1743946 - DNA, 15 bp, Homo sapiens
ttcaaggttgtgagg

SEQ ID NO: 1743947 - DNA, 15 bp, Homo sapiens
tcaaggttgtgaggc

SEQ ID NO: 1743948 - DNA, 15 bp, Homo sapiens
caaggttgtgaggct

SEQ ID NO: 1743949 - DNA, 15 bp, Homo sapiens
aaggttgtgaggcta

SEQ ID NO: 1743950 - DNA, 15 bp, Homo sapiens
aggttgtgaggctaa

SEQ ID NO: 1743951 - DNA, 15 bp, Homo sapiens
ggttgtgaggctaaa

SEQ ID NO: 1743952 - DNA, 15 bp, Homo sapiens
gttgtgaggctaaat

SEQ ID NO: 1743953 - DNA, 15 bp, Homo sapiens
ttgtgaggctaaatg

SEQ ID NO: 1743954 - DNA, 15 bp, Homo sapiens
tgtgaggctaaatga

SEQ ID NO: 1743955 - DNA, 15 bp, Homo sapiens
gtgaggctaaatgag

SEQ ID NO: 1743956 - DNA, 15 bp, Homo sapiens
tgaggctaaatgaga

SEQ ID NO: 1743957 - DNA, 15 bp, Homo sapiens
gaggctaaatgagat

SEQ ID NO: 1743958 - DNA, 15 bp, Homo sapiens
aggctaaatgagatc

SEQ ID NO: 1743959 - DNA, 15 bp, Homo sapiens
ggctaaatgagatca

SEQ ID NO: 1743960 - DNA, 15 bp, Homo sapiens
gctaaatgagatcat

SEQ ID NO: 1743961 - DNA, 15 bp, Homo sapiens
ctaaatgagatcata

SEQ ID NO: 1743962 - DNA, 15 bp, Homo sapiens
taaatgagatcatat

SEQ ID NO: 1743963 - DNA, 15 bp, Homo sapiens
aaatgagatcatatt

SEQ ID NO: 1743964 - DNA, 15 bp, Homo sapiens
aatgagatcatattg

SEQ ID NO: 1743965 - DNA, 15 bp, Homo sapiens
atgagatcatattgg

SEQ ID NO: 1743966 - DNA, 15 bp, Homo sapiens
tgagatcatattggt

SEQ ID NO: 1743967 - DNA, 15 bp, Homo sapiens
gagatcatattggtg

SEQ ID NO: 1743968 - DNA, 15 bp, Homo sapiens
agatcatattggtga

SEQ ID NO: 1743969 - DNA, 15 bp, Homo sapiens
gatcatattggtgaa

SEQ ID NO: 1743970 - DNA, 15 bp, Homo sapiens
atcatattggtgaat

SEQ ID NO: 1743971 - DNA, 15 bp, Homo sapiens
tcatattggtgaatg

SEQ ID NO: 1743972 - DNA, 15 bp, Homo sapiens
catattggtgaatga

SEQ ID NO: 1743973 - DNA, 15 bp, Homo sapiens
atattggtgaatgag

SEQ ID NO: 1743974 - DNA, 15 bp, Homo sapiens
tattggtgaatgagg

SEQ ID NO: 1743975 - DNA, 15 bp, Homo sapiens
attggtgaatgaggt

SEQ ID NO: 1743976 - DNA, 15 bp, Homo sapiens
ttggtgaatgaggta

SEQ ID NO: 1743977 - DNA, 15 bp, Homo sapiens
tggtgaatgaggtaa

SEQ ID NO: 1743978 - DNA, 15 bp, Homo sapiens
ggtgaatgaggtaat

SEQ ID NO: 1743979 - DNA, 15 bp, Homo sapiens
gtgaatgaggtaata

SEQ ID NO: 1743980 - DNA, 15 bp, Homo sapiens
tgaatgaggtaatac

SEQ ID NO: 1743981 - DNA, 15 bp, Homo sapiens
gaatgaggtaatact

SEQ ID NO: 1743982 - DNA, 15 bp, Homo sapiens
aatgaggtaatactt

SEQ ID NO: 1743983 - DNA, 15 bp, Homo sapiens
atgaggtaatacttg

SEQ ID NO: 1743984 - DNA, 15 bp, Homo sapiens
tgaggtaatacttgg

SEQ ID NO: 1743985 - DNA, 15 bp, Homo sapiens
gaggtaatacttgga

SEQ ID NO: 1743986 - DNA, 15 bp, Homo sapiens
aggtaatacttggac

SEQ ID NO: 1743987 - DNA, 15 bp, Homo sapiens
ggtaatacttggaca

SEQ ID NO: 1743988 - DNA, 15 bp, Homo sapiens
gtaatacttggacat

SEQ ID NO: 1743989 - DNA, 15 bp, Homo sapiens
taatacttggacata

SEQ ID NO: 1743990 - DNA, 15 bp, Homo sapiens
aatacttggacatag

SEQ ID NO: 1743991 - DNA, 15 bp, Homo sapiens
atacttggacatagt

SEQ ID NO: 1743992 - DNA, 15 bp, Homo sapiens
tacttggacatagta

SEQ ID NO: 1743993 - DNA, 15 bp, Homo sapiens
acttggacatagtaa

SEQ ID NO: 1743994 - DNA, 15 bp, Homo sapiens
cttggacatagtaaa

SEQ ID NO: 1743995 - DNA, 15 bp, Homo sapiens
ttggacatagtaaaa

SEQ ID NO: 1743996 - DNA, 15 bp, Homo sapiens
tggacatagtaaaag

SEQ ID NO: 1743997 - DNA, 15 bp, Homo sapiens
ggacatagtaaaagc

SEQ ID NO: 1743998 - DNA, 15 bp, Homo sapiens
gacatagtaaaagct

SEQ ID NO: 1743999 - DNA, 15 bp, Homo sapiens
acatagtaaaagctc

SEQ ID NO: 1744000 - DNA, 15 bp, Homo sapiens
catagtaaaagctca

SEQ ID NO: 1744001 - DNA, 15 bp, Homo sapiens
atagtaaaagctcag

SEQ ID NO: 1744002 - DNA, 15 bp, Homo sapiens
tagtaaaagctcagt

SEQ ID NO: 1744003 - DNA, 15 bp, Homo sapiens
agtaaaagctcagta

SEQ ID NO: 1744004 - DNA, 15 bp, Homo sapiens
gtaaaagctcagtaa

SEQ ID NO: 1744005 - DNA, 15 bp, Homo sapiens
taaaagctcagtaat

SEQ ID NO: 1744006 - DNA, 15 bp, Homo sapiens
aaaagctcagtaatt

SEQ ID NO: 1744007 - DNA, 15 bp, Homo sapiens
aaagctcagtaattt

SEQ ID NO: 1744008 - DNA, 15 bp, Homo sapiens
aagctcagtaatttt

SEQ ID NO: 1744009 - DNA, 15 bp, Homo sapiens
agctcagtaattttt

SEQ ID NO: 1744010 - DNA, 15 bp, Homo sapiens
gctcagtaatttttc

SEQ ID NO: 1744011 - DNA, 15 bp, Homo sapiens
ctcagtaatttttct

SEQ ID NO: 1744012 - DNA, 15 bp, Homo sapiens
tcagtaatttttctc

SEQ ID NO: 1744013 - DNA, 15 bp, Homo sapiens
cagtaatttttctct

SEQ ID NO: 1744014 - DNA, 15 bp, Homo sapiens
agtaatttttctcta

SEQ ID NO: 1744015 - DNA, 15 bp, Homo sapiens
gtaatttttctctat

SEQ ID NO: 1744016 - DNA, 15 bp, Homo sapiens
taatttttctctatt

SEQ ID NO: 1744017 - DNA, 15 bp, Homo sapiens
aatttttctctattc

SEQ ID NO: 1744018 - DNA, 15 bp, Homo sapiens
atttttctctattct

SEQ ID NO: 1744019 - DNA, 15 bp, Homo sapiens
tttttctctattctt

SEQ ID NO: 1744020 - DNA, 15 bp, Homo sapiens
ttttctctattcttg

SEQ ID NO: 1744021 - DNA, 15 bp, Homo sapiens
tttctctattcttgt

SEQ ID NO: 1744022 - DNA, 15 bp, Homo sapiens
ttctctattcttgta

SEQ ID NO: 1744023 - DNA, 15 bp, Homo sapiens
tctctattcttgtaa

SEQ ID NO: 1744024 - DNA, 15 bp, Homo sapiens
ctctattcttgtaat

SEQ ID NO: 1744025 - DNA, 15 bp, Homo sapiens
tctattcttgtaatt

SEQ ID NO: 1744026 - DNA, 15 bp, Homo sapiens
ctattcttgtaattg

SEQ ID NO: 1744027 - DNA, 15 bp, Homo sapiens
tattcttgtaattgc

SEQ ID NO: 1744028 - DNA, 15 bp, Homo sapiens
attcttgtaattgct

SEQ ID NO: 1744029 - DNA, 15 bp, Homo sapiens
ttcttgtaattgcta

SEQ ID NO: 1744030 - DNA, 15 bp, Homo sapiens
tcttgtaattgctat

SEQ ID NO: 1744031 - DNA, 15 bp, Homo sapiens
cttgtaattgctatc

SEQ ID NO: 1744032 - DNA, 15 bp, Homo sapiens
ttgtaattgctatct

SEQ ID NO: 1744033 - DNA, 15 bp, Homo sapiens
tgtaattgctatctg

SEQ ID NO: 1744034 - DNA, 15 bp, Homo sapiens
gtaattgctatctgt

SEQ ID NO: 1744035 - DNA, 15 bp, Homo sapiens
taattgctatctgtt

SEQ ID NO: 1744036 - DNA, 15 bp, Homo sapiens
aattgctatctgtta

SEQ ID NO: 1744037 - DNA, 15 bp, Homo sapiens
attgctatctgttat

SEQ ID NO: 1744038 - DNA, 15 bp, Homo sapiens
ttgctatctgttata

SEQ ID NO: 1744039 - DNA, 15 bp, Homo sapiens
tgctatctgttatat

SEQ ID NO: 1744040 - DNA, 15 bp, Homo sapiens
gctatctgttatatc

SEQ ID NO: 1744041 - DNA, 15 bp, Homo sapiens
ctatctgttatatct

SEQ ID NO: 1744042 - DNA, 15 bp, Homo sapiens
tatctgttatatctt

SEQ ID NO: 1744043 - DNA, 15 bp, Homo sapiens
atctgttatatcttt

SEQ ID NO: 1744044 - DNA, 15 bp, Homo sapiens
tctgttatatcttta

SEQ ID NO: 1744045 - DNA, 15 bp, Homo sapiens
ctgttatatctttat

SEQ ID NO: 1744046 - DNA, 15 bp, Homo sapiens
tgttatatctttatt

SEQ ID NO: 1744047 - DNA, 15 bp, Homo sapiens
gttatatctttatta

SEQ ID NO: 1744048 - DNA, 15 bp, Homo sapiens
ttatatctttattac

SEQ ID NO: 1744049 - DNA, 15 bp, Homo sapiens
tatatctttattaca

SEQ ID NO: 1744050 - DNA, 15 bp, Homo sapiens
atatctttattacaa

SEQ ID NO: 1744051 - DNA, 15 bp, Homo sapiens
tatctttattacaaa

SEQ ID NO: 1744052 - DNA, 15 bp, Homo sapiens
atctttattacaaat

SEQ ID NO: 1744053 - DNA, 15 bp, Homo sapiens
tctttattacaaatg

SEQ ID NO: 1744054 - DNA, 15 bp, Homo sapiens
ctttattacaaatga

SEQ ID NO: 1744055 - DNA, 15 bp, Homo sapiens
tttattacaaatgaa

SEQ ID NO: 1744056 - DNA, 15 bp, Homo sapiens
ttattacaaatgaaa

SEQ ID NO: 1744057 - DNA, 15 bp, Homo sapiens
tattacaaatgaaaa

SEQ ID NO: 1744058 - DNA, 15 bp, Homo sapiens
attacaaatgaaaaa

SEQ ID NO: 1744059 - DNA, 15 bp, Homo sapiens
ttacaaatgaaaaat

SEQ ID NO: 1744060 - DNA, 15 bp, Homo sapiens
tacaaatgaaaaatc

SEQ ID NO: 1744061 - DNA, 15 bp, Homo sapiens
acaaatgaaaaatct

SEQ ID NO: 1744062 - DNA, 15 bp, Homo sapiens
caaatgaaaaatcta

SEQ ID NO: 1744063 - DNA, 15 bp, Homo sapiens
aaatgaaaaatctat

SEQ ID NO: 1744064 - DNA, 15 bp, Homo sapiens
aatgaaaaatctatg

SEQ ID NO: 1744065 - DNA, 15 bp, Homo sapiens
atgaaaaatctatgg

SEQ ID NO: 1744066 - DNA, 15 bp, Homo sapiens
tgaaaaatctatggt

SEQ ID NO: 1744067 - DNA, 15 bp, Homo sapiens
gaaaaatctatggtt

SEQ ID NO: 1744068 - DNA, 15 bp, Homo sapiens
aaaaatctatggtta

SEQ ID NO: 1744069 - DNA, 15 bp, Homo sapiens
aaaatctatggttat

SEQ ID NO: 1744070 - DNA, 15 bp, Homo sapiens
aaatctatggttatt

SEQ ID NO: 1744071 - DNA, 15 bp, Homo sapiens
aatctatggttattc

SEQ ID NO: 1744072 - DNA, 15 bp, Homo sapiens
atctatggttattca

SEQ ID NO: 1744073 - DNA, 15 bp, Homo sapiens
tctatggttattcag

SEQ ID NO: 1744074 - DNA, 15 bp, Homo sapiens
ctatggttattcagt

SEQ ID NO: 1744075 - DNA, 15 bp, Homo sapiens
tatggttattcagtc

SEQ ID NO: 1744076 - DNA, 15 bp, Homo sapiens
atggttattcagtct

SEQ ID NO: 1744077 - DNA, 15 bp, Homo sapiens
tggttattcagtctc

SEQ ID NO: 1744078 - DNA, 15 bp, Homo sapiens
ggttattcagtctca

SEQ ID NO: 1744079 - DNA, 15 bp, Homo sapiens
gttattcagtctcaa

SEQ ID NO: 1744080 - DNA, 15 bp, Homo sapiens
ttattcagtctcaag

SEQ ID NO: 1744081 - DNA, 15 bp, Homo sapiens
tattcagtctcaagc

SEQ ID NO: 1744082 - DNA, 15 bp, Homo sapiens
attcagtctcaagca

SEQ ID NO: 1744083 - DNA, 15 bp, Homo sapiens
ttcagtctcaagcat

SEQ ID NO: 1744084 - DNA, 15 bp, Homo sapiens
tcagtctcaagcatc

SEQ ID NO: 1744085 - DNA, 15 bp, Homo sapiens
cagtctcaagcatca

SEQ ID NO: 1744086 - DNA, 15 bp, Homo sapiens
agtctcaagcatcac

SEQ ID NO: 1744087 - DNA, 15 bp, Homo sapiens
gtctcaagcatcaca

SEQ ID NO: 1744088 - DNA, 15 bp, Homo sapiens
tctcaagcatcacat

SEQ ID NO: 1744089 - DNA, 15 bp, Homo sapiens
ctcaagcatcacata

SEQ ID NO: 1744090 - DNA, 15 bp, Homo sapiens
tcaagcatcacatat

SEQ ID NO: 1744091 - DNA, 15 bp, Homo sapiens
caagcatcacatatc

SEQ ID NO: 1744092 - DNA, 15 bp, Homo sapiens
aagcatcacatatct

SEQ ID NO: 1744093 - DNA, 15 bp, Homo sapiens
agcatcacatatctt

SEQ ID NO: 1744094 - DNA, 15 bp, Homo sapiens
gcatcacatatcttc

SEQ ID NO: 1744095 - DNA, 15 bp, Homo sapiens
catcacatatcttcc

SEQ ID NO: 1744096 - DNA, 15 bp, Homo sapiens
atcacatatcttcct

SEQ ID NO: 1744097 - DNA, 15 bp, Homo sapiens
tcacatatcttcctt

SEQ ID NO: 1744098 - DNA, 15 bp, Homo sapiens
cacatatcttccttt

SEQ ID NO: 1744099 - DNA, 15 bp, Homo sapiens
acatatcttcctttc

SEQ ID NO: 1744100 - DNA, 15 bp, Homo sapiens
catatcttcctttca

SEQ ID NO: 1744101 - DNA, 15 bp, Homo sapiens
atatcttcctttcag

SEQ ID NO: 1744102 - DNA, 15 bp, Homo sapiens
tatcttcctttcagc

SEQ ID NO: 1744103 - DNA, 15 bp, Homo sapiens
atcttcctttcagct

SEQ ID NO: 1744104 - DNA, 15 bp, Homo sapiens
tcttcctttcagctc

SEQ ID NO: 1744105 - DNA, 15 bp, Homo sapiens
cttcctttcagctca

SEQ ID NO: 1744106 - DNA, 15 bp, Homo sapiens
ttcctttcagctcat

SEQ ID NO: 1744107 - DNA, 15 bp, Homo sapiens
tcctttcagctcatt

SEQ ID NO: 1744108 - DNA, 15 bp, Homo sapiens
cctttcagctcattg

SEQ ID NO: 1744109 - DNA, 15 bp, Homo sapiens
ctttcagctcattgc

SEQ ID NO: 1744110 - DNA, 15 bp, Homo sapiens
tttcagctcattgca

SEQ ID NO: 1744111 - DNA, 15 bp, Homo sapiens
ttcagctcattgcag

SEQ ID NO: 1744112 - DNA, 15 bp, Homo sapiens
tcagctcattgcaga

SEQ ID NO: 1744113 - DNA, 15 bp, Homo sapiens
cagctcattgcagaa

SEQ ID NO: 1744114 - DNA, 15 bp, Homo sapiens
agctcattgcagaag

SEQ ID NO: 1744115 - DNA, 15 bp, Homo sapiens
gctcattgcagaagc

SEQ ID NO: 1744116 - DNA, 15 bp, Homo sapiens
ctcattgcagaagct

SEQ ID NO: 1744117 - DNA, 15 bp, Homo sapiens
tcattgcagaagcta

SEQ ID NO: 1744118 - DNA, 15 bp, Homo sapiens
cattgcagaagctaa

SEQ ID NO: 1744119 - DNA, 15 bp, Homo sapiens
attgcagaagctaag

SEQ ID NO: 1744120 - DNA, 15 bp, Homo sapiens
ttgcagaagctaaga

SEQ ID NO: 1744121 - DNA, 15 bp, Homo sapiens
tgcagaagctaagaa

SEQ ID NO: 1744122 - DNA, 15 bp, Homo sapiens
gcagaagctaagaac

SEQ ID NO: 1744123 - DNA, 15 bp, Homo sapiens
cagaagctaagaact

SEQ ID NO: 1744124 - DNA, 15 bp, Homo sapiens
agaagctaagaactg

SEQ ID NO: 1744125 - DNA, 15 bp, Homo sapiens
gaagctaagaactga

SEQ ID NO: 1744126 - DNA, 15 bp, Homo sapiens
aagctaagaactgag

SEQ ID NO: 1744127 - DNA, 15 bp, Homo sapiens
agctaagaactgagg

SEQ ID NO: 1744128 - DNA, 15 bp, Homo sapiens
gctaagaactgaggt

SEQ ID NO: 1744129 - DNA, 15 bp, Homo sapiens
ctaagaactgaggta

SEQ ID NO: 1744130 - DNA, 15 bp, Homo sapiens
taagaactgaggtaa

SEQ ID NO: 1744131 - DNA, 15 bp, Homo sapiens
aagaactgaggtaaa

SEQ ID NO: 1744132 - DNA, 15 bp, Homo sapiens
agaactgaggtaaaa

SEQ ID NO: 1744133 - DNA, 15 bp, Homo sapiens
gaactgaggtaaaaa

SEQ ID NO: 1744134 - DNA, 15 bp, Homo sapiens
aactgaggtaaaaaa

SEQ ID NO: 1744135 - DNA, 15 bp, Homo sapiens
actgaggtaaaaaaa

SEQ ID NO: 1744136 - DNA, 15 bp, Homo sapiens
ctgaggtaaaaaaaa

SEQ ID NO: 1744137 - DNA, 15 bp, Homo sapiens
tgaggtaaaaaaaaa

SEQ ID NO: 1744138 - DNA, 15 bp, Homo sapiens
gaggtaaaaaaaaaa

SEQ ID NO: 1744139 - DNA, 15 bp, Homo sapiens
aggtaaaaaaaaaag

SEQ ID NO: 1744140 - DNA, 15 bp, Homo sapiens
ggtaaaaaaaaaagt

SEQ ID NO: 1744141 - DNA, 15 bp, Homo sapiens
gtaaaaaaaaaagtc

SEQ ID NO: 1744142 - DNA, 15 bp, Homo sapiens
taaaaaaaaaagtct

SEQ ID NO: 1744143 - DNA, 15 bp, Homo sapiens
aaaaaaaaaagtctt

SEQ ID NO: 1744144 - DNA, 15 bp, Homo sapiens
aaaaaaaaagtctta

SEQ ID NO: 1744145 - DNA, 15 bp, Homo sapiens
aaaaaaaagtcttaa

SEQ ID NO: 1744146 - DNA, 15 bp, Homo sapiens
aaaaaaagtcttaaa

SEQ ID NO: 1744147 - DNA, 15 bp, Homo sapiens
aaaaaagtcttaaag

SEQ ID NO: 1744148 - DNA, 15 bp, Homo sapiens
aaaaagtcttaaagc

SEQ ID NO: 1744149 - DNA, 15 bp, Homo sapiens
aaaagtcttaaagct

SEQ ID NO: 1744150 - DNA, 15 bp, Homo sapiens
aaagtcttaaagctg

SEQ ID NO: 1744151 - DNA, 15 bp, Homo sapiens
aagtcttaaagctgt

SEQ ID NO: 1744152 - DNA, 15 bp, Homo sapiens
agtcttaaagctgtt

SEQ ID NO: 1744153 - DNA, 15 bp, Homo sapiens
gtcttaaagctgtta

SEQ ID NO: 1744154 - DNA, 15 bp, Homo sapiens
tcttaaagctgttaa

SEQ ID NO: 1744155 - DNA, 15 bp, Homo sapiens
cttaaagctgttaaa

SEQ ID NO: 1744156 - DNA, 15 bp, Homo sapiens
ttaaagctgttaaaa

SEQ ID NO: 1744157 - DNA, 15 bp, Homo sapiens
taaagctgttaaaaa

SEQ ID NO: 1744158 - DNA, 15 bp, Homo sapiens
aaagctgttaaaaac

SEQ ID NO: 1744159 - DNA, 15 bp, Homo sapiens
aagctgttaaaaacc

SEQ ID NO: 1744160 - DNA, 15 bp, Homo sapiens
agctgttaaaaacct

SEQ ID NO: 1744161 - DNA, 15 bp, Homo sapiens
gctgttaaaaaccta

SEQ ID NO: 1744162 - DNA, 15 bp, Homo sapiens
ctgttaaaaacctaa

SEQ ID NO: 1744163 - DNA, 15 bp, Homo sapiens
tgttaaaaacctaaa

SEQ ID NO: 1744164 - DNA, 15 bp, Homo sapiens
gttaaaaacctaaaa

SEQ ID NO: 1744165 - DNA, 15 bp, Homo sapiens
ttaaaaacctaaaat

SEQ ID NO: 1744166 - DNA, 15 bp, Homo sapiens
taaaaacctaaaatt

SEQ ID NO: 1744167 - DNA, 15 bp, Homo sapiens
aaaaacctaaaatta

SEQ ID NO: 1744168 - DNA, 15 bp, Homo sapiens
aaaacctaaaattaa

SEQ ID NO: 1744169 - DNA, 15 bp, Homo sapiens
aaacctaaaattaag

SEQ ID NO: 1744170 - DNA, 15 bp, Homo sapiens
aacctaaaattaaga

SEQ ID NO: 1744171 - DNA, 15 bp, Homo sapiens
acctaaaattaagat

SEQ ID NO: 1744172 - DNA, 15 bp, Homo sapiens
cctaaaattaagatc

SEQ ID NO: 1744173 - DNA, 15 bp, Homo sapiens
ctaaaattaagatct

SEQ ID NO: 1744174 - DNA, 15 bp, Homo sapiens
taaaattaagatctt

SEQ ID NO: 1744175 - DNA, 15 bp, Homo sapiens
aaaattaagatctta

SEQ ID NO: 1744176 - DNA, 15 bp, Homo sapiens
aaattaagatcttat

SEQ ID NO: 1744177 - DNA, 15 bp, Homo sapiens
aattaagatcttatg

SEQ ID NO: 1744178 - DNA, 15 bp, Homo sapiens
attaagatcttatgc

SEQ ID NO: 1744179 - DNA, 15 bp, Homo sapiens
ttaagatcttatgct

SEQ ID NO: 1744180 - DNA, 15 bp, Homo sapiens
taagatcttatgctc

SEQ ID NO: 1744181 - DNA, 15 bp, Homo sapiens
aagatcttatgctcc

SEQ ID NO: 1744182 - DNA, 15 bp, Homo sapiens
agatcttatgctcca

SEQ ID NO: 1744183 - DNA, 15 bp, Homo sapiens
gatcttatgctccat

SEQ ID NO: 1744184 - DNA, 15 bp, Homo sapiens
atcttatgctccatg

SEQ ID NO: 1744185 - DNA, 15 bp, Homo sapiens
tcttatgctccatgt

SEQ ID NO: 1744186 - DNA, 15 bp, Homo sapiens
cttatgctccatgtg

SEQ ID NO: 1744187 - DNA, 15 bp, Homo sapiens
ttatgctccatgtgc

SEQ ID NO: 1744188 - DNA, 15 bp, Homo sapiens
tatgctccatgtgct

SEQ ID NO: 1744189 - DNA, 15 bp, Homo sapiens
atgctccatgtgctg

SEQ ID NO: 1744190 - DNA, 15 bp, Homo sapiens
tgctccatgtgctgt

SEQ ID NO: 1744191 - DNA, 15 bp, Homo sapiens
gctccatgtgctgtt

SEQ ID NO: 1744192 - DNA, 15 bp, Homo sapiens
ctccatgtgctgttg

SEQ ID NO: 1744193 - DNA, 15 bp, Homo sapiens
tccatgtgctgttgg

SEQ ID NO: 1744194 - DNA, 15 bp, Homo sapiens
ccatgtgctgttggt

SEQ ID NO: 1744195 - DNA, 15 bp, Homo sapiens
catgtgctgttggtt

SEQ ID NO: 1744196 - DNA, 15 bp, Homo sapiens
atgtgctgttggttt

SEQ ID NO: 1744197 - DNA, 15 bp, Homo sapiens
tgtgctgttggttta

SEQ ID NO: 1744198 - DNA, 15 bp, Homo sapiens
gtgctgttggtttag

SEQ ID NO: 1744199 - DNA, 15 bp, Homo sapiens
tgctgttggtttaga

SEQ ID NO: 1744200 - DNA, 15 bp, Homo sapiens
gctgttggtttagat

SEQ ID NO: 1744201 - DNA, 15 bp, Homo sapiens
ctgttggtttagatg

SEQ ID NO: 1744202 - DNA, 15 bp, Homo sapiens
tgttggtttagatga

SEQ ID NO: 1744203 - DNA, 15 bp, Homo sapiens
gttggtttagatgac

SEQ ID NO: 1744204 - DNA, 15 bp, Homo sapiens
ttggtttagatgact

SEQ ID NO: 1744205 - DNA, 15 bp, Homo sapiens
tggtttagatgactc

SEQ ID NO: 1744206 - DNA, 15 bp, Homo sapiens
ggtttagatgactca

SEQ ID NO: 1744207 - DNA, 15 bp, Homo sapiens
gtttagatgactcaa

SEQ ID NO: 1744208 - DNA, 15 bp, Homo sapiens
tttagatgactcaac

SEQ ID NO: 1744209 - DNA, 15 bp, Homo sapiens
ttagatgactcaact

SEQ ID NO: 1744210 - DNA, 15 bp, Homo sapiens
tagatgactcaacta

SEQ ID NO: 1744211 - DNA, 15 bp, Homo sapiens
agatgactcaactac

SEQ ID NO: 1744212 - DNA, 15 bp, Homo sapiens
gatgactcaactaca

SEQ ID NO: 1744213 - DNA, 15 bp, Homo sapiens
atgactcaactacag

SEQ ID NO: 1744214 - DNA, 15 bp, Homo sapiens
tgactcaactacaga

SEQ ID NO: 1744215 - DNA, 15 bp, Homo sapiens
gactcaactacagaa

SEQ ID NO: 1744216 - DNA, 15 bp, Homo sapiens
actcaactacagaac

SEQ ID NO: 1744217 - DNA, 15 bp, Homo sapiens
ctcaactacagaact

SEQ ID NO: 1744218 - DNA, 15 bp, Homo sapiens
tcaactacagaacta

SEQ ID NO: 1744219 - DNA, 15 bp, Homo sapiens
caactacagaactaa

SEQ ID NO: 1744220 - DNA, 15 bp, Homo sapiens
aactacagaactaag

SEQ ID NO: 1744221 - DNA, 15 bp, Homo sapiens
actacagaactaaga

SEQ ID NO: 1744222 - DNA, 15 bp, Homo sapiens
ctacagaactaagat

SEQ ID NO: 1744223 - DNA, 15 bp, Homo sapiens
tacagaactaagatt

SEQ ID NO: 1744224 - DNA, 15 bp, Homo sapiens
acagaactaagattt

SEQ ID NO: 1744225 - DNA, 15 bp, Homo sapiens
cagaactaagattta

SEQ ID NO: 1744226 - DNA, 15 bp, Homo sapiens
agaactaagatttag

SEQ ID NO: 1744227 - DNA, 15 bp, Homo sapiens
gaactaagatttaga

SEQ ID NO: 1744228 - DNA, 15 bp, Homo sapiens
aactaagatttagac

SEQ ID NO: 1744229 - DNA, 15 bp, Homo sapiens
actaagatttagact

SEQ ID NO: 1744230 - DNA, 15 bp, Homo sapiens
ctaagatttagacta

SEQ ID NO: 1744231 - DNA, 15 bp, Homo sapiens
taagatttagactaa

SEQ ID NO: 1744232 - DNA, 15 bp, Homo sapiens
aagatttagactaaa

SEQ ID NO: 1744233 - DNA, 15 bp, Homo sapiens
agatttagactaaat

SEQ ID NO: 1744234 - DNA, 15 bp, Homo sapiens
gatttagactaaata

SEQ ID NO: 1744235 - DNA, 15 bp, Homo sapiens
atttagactaaatag

SEQ ID NO: 1744236 - DNA, 15 bp, Homo sapiens
tttagactaaatagc

SEQ ID NO: 1744237 - DNA, 15 bp, Homo sapiens
ttagactaaatagct

SEQ ID NO: 1744238 - DNA, 15 bp, Homo sapiens
tagactaaatagcta

SEQ ID NO: 1744239 - DNA, 15 bp, Homo sapiens
agactaaatagctaa

SEQ ID NO: 1744240 - DNA, 15 bp, Homo sapiens
gactaaatagctaag

SEQ ID NO: 1744241 - DNA, 15 bp, Homo sapiens
actaaatagctaagt

SEQ ID NO: 1744242 - DNA, 15 bp, Homo sapiens
ctaaatagctaagtc

SEQ ID NO: 1744243 - DNA, 15 bp, Homo sapiens
taaatagctaagtca

SEQ ID NO: 1744244 - DNA, 15 bp, Homo sapiens
aaatagctaagtcac

SEQ ID NO: 1744245 - DNA, 15 bp, Homo sapiens
aatagctaagtcaca

SEQ ID NO: 1744246 - DNA, 15 bp, Homo sapiens
atagctaagtcacag

SEQ ID NO: 1744247 - DNA, 15 bp, Homo sapiens
tagctaagtcacaga

SEQ ID NO: 1744248 - DNA, 15 bp, Homo sapiens
agctaagtcacagac

SEQ ID NO: 1744249 - DNA, 15 bp, Homo sapiens
gctaagtcacagaca

SEQ ID NO: 1744250 - DNA, 15 bp, Homo sapiens
ctaagtcacagacaa

SEQ ID NO: 1744251 - DNA, 15 bp, Homo sapiens
taagtcacagacaat

SEQ ID NO: 1744252 - DNA, 15 bp, Homo sapiens
aagtcacagacaatc

SEQ ID NO: 1744253 - DNA, 15 bp, Homo sapiens
agtcacagacaatca

SEQ ID NO: 1744254 - DNA, 15 bp, Homo sapiens
gtcacagacaatcaa

SEQ ID NO: 1744255 - DNA, 15 bp, Homo sapiens
tcacagacaatcaac

SEQ ID NO: 1744256 - DNA, 15 bp, Homo sapiens
cacagacaatcaaca

SEQ ID NO: 1744257 - DNA, 15 bp, Homo sapiens
acagacaatcaacat

SEQ ID NO: 1744258 - DNA, 15 bp, Homo sapiens
cagacaatcaacatt

SEQ ID NO: 1744259 - DNA, 15 bp, Homo sapiens
agacaatcaacattt

SEQ ID NO: 1744260 - DNA, 15 bp, Homo sapiens
gacaatcaacatttg

SEQ ID NO: 1744261 - DNA, 15 bp, Homo sapiens
acaatcaacatttgt

SEQ ID NO: 1744262 - DNA, 15 bp, Homo sapiens
caatcaacatttgtc

SEQ ID NO: 1744263 - DNA, 15 bp, Homo sapiens
aatcaacatttgtca

SEQ ID NO: 1744264 - DNA, 15 bp, Homo sapiens
atcaacatttgtcaa

SEQ ID NO: 1744265 - DNA, 15 bp, Homo sapiens
tcaacatttgtcaag

SEQ ID NO: 1744266 - DNA, 15 bp, Homo sapiens
caacatttgtcaagg

SEQ ID NO: 1744267 - DNA, 15 bp, Homo sapiens
aacatttgtcaaggg

SEQ ID NO: 1744268 - DNA, 15 bp, Homo sapiens
acatttgtcaagggt

SEQ ID NO: 1744269 - DNA, 15 bp, Homo sapiens
catttgtcaagggtg

SEQ ID NO: 1744270 - DNA, 15 bp, Homo sapiens
atttgtcaagggtgg

SEQ ID NO: 1744271 - DNA, 15 bp, Homo sapiens
tttgtcaagggtggt

SEQ ID NO: 1744272 - DNA, 15 bp, Homo sapiens
ttgtcaagggtggtt

SEQ ID NO: 1744273 - DNA, 15 bp, Homo sapiens
tgtcaagggtggttt

SEQ ID NO: 1744274 - DNA, 15 bp, Homo sapiens
gtcaagggtggtttg

SEQ ID NO: 1744275 - DNA, 15 bp, Homo sapiens
tcaagggtggtttgg

SEQ ID NO: 1744276 - DNA, 15 bp, Homo sapiens
caagggtggtttggc

SEQ ID NO: 1744277 - DNA, 15 bp, Homo sapiens
aagggtggtttggct

SEQ ID NO: 1744278 - DNA, 15 bp, Homo sapiens
agggtggtttggctg

SEQ ID NO: 1744279 - DNA, 15 bp, Homo sapiens
gggtggtttggctgt

SEQ ID NO: 1744280 - DNA, 15 bp, Homo sapiens
ggtggtttggctgta

SEQ ID NO: 1744281 - DNA, 15 bp, Homo sapiens
gtggtttggctgtaa

SEQ ID NO: 1744282 - DNA, 15 bp, Homo sapiens
tggtttggctgtaag

SEQ ID NO: 1744283 - DNA, 15 bp, Homo sapiens
ggtttggctgtaaga

SEQ ID NO: 1744284 - DNA, 15 bp, Homo sapiens
gtttggctgtaagaa

SEQ ID NO: 1744285 - DNA, 15 bp, Homo sapiens
tttggctgtaagaat

SEQ ID NO: 1744286 - DNA, 15 bp, Homo sapiens
ttggctgtaagaatc

SEQ ID NO: 1744287 - DNA, 15 bp, Homo sapiens
tggctgtaagaatca

SEQ ID NO: 1744288 - DNA, 15 bp, Homo sapiens
ggctgtaagaatcag

SEQ ID NO: 1744289 - DNA, 15 bp, Homo sapiens
gctgtaagaatcaga

SEQ ID NO: 1744290 - DNA, 15 bp, Homo sapiens
ctgtaagaatcagag

SEQ ID NO: 1744291 - DNA, 15 bp, Homo sapiens
tgtaagaatcagaga

SEQ ID NO: 1744292 - DNA, 15 bp, Homo sapiens
gtaagaatcagagaa

SEQ ID NO: 1744293 - DNA, 15 bp, Homo sapiens
taagaatcagagaac

SEQ ID NO: 1744294 - DNA, 15 bp, Homo sapiens
aagaatcagagaact

SEQ ID NO: 1744295 - DNA, 15 bp, Homo sapiens
agaatcagagaactg

SEQ ID NO: 1744296 - DNA, 15 bp, Homo sapiens
gaatcagagaactgc

SEQ ID NO: 1744297 - DNA, 15 bp, Homo sapiens
aatcagagaactgct

SEQ ID NO: 1744298 - DNA, 15 bp, Homo sapiens
atcagagaactgctc

SEQ ID NO: 1744299 - DNA, 15 bp, Homo sapiens
tcagagaactgctct

SEQ ID NO: 1744300 - DNA, 15 bp, Homo sapiens
cagagaactgctctg

SEQ ID NO: 1744301 - DNA, 15 bp, Homo sapiens
agagaactgctctgg

SEQ ID NO: 1744302 - DNA, 15 bp, Homo sapiens
gagaactgctctggc

SEQ ID NO: 1744303 - DNA, 15 bp, Homo sapiens
agaactgctctggct

SEQ ID NO: 1744304 - DNA, 15 bp, Homo sapiens
gaactgctctggctg

SEQ ID NO: 1744305 - DNA, 15 bp, Homo sapiens
aactgctctggctgg

SEQ ID NO: 1744306 - DNA, 15 bp, Homo sapiens
actgctctggctggt

SEQ ID NO: 1744307 - DNA, 15 bp, Homo sapiens
ctgctctggctggtt

SEQ ID NO: 1744308 - DNA, 15 bp, Homo sapiens
tgctctggctggttt

SEQ ID NO: 1744309 - DNA, 15 bp, Homo sapiens
gctctggctggtttg

SEQ ID NO: 1744310 - DNA, 15 bp, Homo sapiens
ctctggctggtttgg

SEQ ID NO: 1744311 - DNA, 15 bp, Homo sapiens
tctggctggtttggg

SEQ ID NO: 1744312 - DNA, 15 bp, Homo sapiens
ctggctggtttgggt

SEQ ID NO: 1744313 - DNA, 15 bp, Homo sapiens
tggctggtttgggta

SEQ ID NO: 1744314 - DNA, 15 bp, Homo sapiens
ggctggtttgggtaa

SEQ ID NO: 1744315 - DNA, 15 bp, Homo sapiens
gctggtttgggtaaa

SEQ ID NO: 1744316 - DNA, 15 bp, Homo sapiens
ctggtttgggtaaaa

SEQ ID NO: 1744317 - DNA, 15 bp, Homo sapiens
tggtttgggtaaaag

SEQ ID NO: 1744318 - DNA, 15 bp, Homo sapiens
ggtttgggtaaaagc

SEQ ID NO: 1744319 - DNA, 15 bp, Homo sapiens
gtttgggtaaaagcg

SEQ ID NO: 1744320 - DNA, 15 bp, Homo sapiens
tttgggtaaaagcga

SEQ ID NO: 1744321 - DNA, 15 bp, Homo sapiens
ttgggtaaaagcgat

SEQ ID NO: 1744322 - DNA, 15 bp, Homo sapiens
tgggtaaaagcgatt

SEQ ID NO: 1744323 - DNA, 15 bp, Homo sapiens
gggtaaaagcgattt

SEQ ID NO: 1744324 - DNA, 15 bp, Homo sapiens
ggtaaaagcgatttg

SEQ ID NO: 1744325 - DNA, 15 bp, Homo sapiens
gtaaaagcgatttga

SEQ ID NO: 1744326 - DNA, 15 bp, Homo sapiens
taaaagcgatttgat

SEQ ID NO: 1744327 - DNA, 15 bp, Homo sapiens
aaaagcgatttgata

SEQ ID NO: 1744328 - DNA, 15 bp, Homo sapiens
aaagcgatttgatat

SEQ ID NO: 1744329 - DNA, 15 bp, Homo sapiens
aagcgatttgatata

SEQ ID NO: 1744330 - DNA, 15 bp, Homo sapiens
agcgatttgatataa

SEQ ID NO: 1744331 - DNA, 15 bp, Homo sapiens
gcgatttgatataag

SEQ ID NO: 1744332 - DNA, 15 bp, Homo sapiens
cgatttgatataagg

SEQ ID NO: 1744333 - DNA, 15 bp, Homo sapiens
gatttgatataagga

SEQ ID NO: 1744334 - DNA, 15 bp, Homo sapiens
atttgatataaggac

SEQ ID NO: 1744335 - DNA, 15 bp, Homo sapiens
tttgatataaggaca

SEQ ID NO: 1744336 - DNA, 15 bp, Homo sapiens
ttgatataaggacac

SEQ ID NO: 1744337 - DNA, 15 bp, Homo sapiens
tgatataaggacact

SEQ ID NO: 1744338 - DNA, 15 bp, Homo sapiens
gatataaggacactc

SEQ ID NO: 1744339 - DNA, 15 bp, Homo sapiens
atataaggacactcc

SEQ ID NO: 1744340 - DNA, 15 bp, Homo sapiens
tataaggacactcca

SEQ ID NO: 1744341 - DNA, 15 bp, Homo sapiens
ataaggacactccaa

SEQ ID NO: 1744342 - DNA, 15 bp, Homo sapiens
taaggacactccaaa

SEQ ID NO: 1744343 - DNA, 15 bp, Homo sapiens
aaggacactccaaag

SEQ ID NO: 1744344 - DNA, 15 bp, Homo sapiens
aggacactccaaagt

SEQ ID NO: 1744345 - DNA, 15 bp, Homo sapiens
ggacactccaaagtg

SEQ ID NO: 1744346 - DNA, 15 bp, Homo sapiens
gacactccaaagtgc

SEQ ID NO: 1744347 - DNA, 15 bp, Homo sapiens
acactccaaagtgca

SEQ ID NO: 1744348 - DNA, 15 bp, Homo sapiens
cactccaaagtgcaa

SEQ ID NO: 1744349 - DNA, 15 bp, Homo sapiens
actccaaagtgcaag

SEQ ID NO: 1744350 - DNA, 15 bp, Homo sapiens
ctccaaagtgcaaga

SEQ ID NO: 1744351 - DNA, 15 bp, Homo sapiens
tccaaagtgcaagaa

SEQ ID NO: 1744352 - DNA, 15 bp, Homo sapiens
ccaaagtgcaagaaa

SEQ ID NO: 1744353 - DNA, 15 bp, Homo sapiens
caaagtgcaagaaat

SEQ ID NO: 1744354 - DNA, 15 bp, Homo sapiens
aaagtgcaagaaata

SEQ ID NO: 1744355 - DNA, 15 bp, Homo sapiens
aagtgcaagaaatac

SEQ ID NO: 1744356 - DNA, 15 bp, Homo sapiens
agtgcaagaaataca

SEQ ID NO: 1744357 - DNA, 15 bp, Homo sapiens
gtgcaagaaatacag

SEQ ID NO: 1744358 - DNA, 15 bp, Homo sapiens
tgcaagaaatacagg

SEQ ID NO: 1744359 - DNA, 15 bp, Homo sapiens
gcaagaaatacaggc

SEQ ID NO: 1744360 - DNA, 15 bp, Homo sapiens
caagaaatacaggca

SEQ ID NO: 1744361 - DNA, 15 bp, Homo sapiens
aagaaatacaggcag

SEQ ID NO: 1744362 - DNA, 15 bp, Homo sapiens
agaaatacaggcagt

SEQ ID NO: 1744363 - DNA, 15 bp, Homo sapiens
gaaatacaggcagtt

SEQ ID NO: 1744364 - DNA, 15 bp, Homo sapiens
aaatacaggcagttt

SEQ ID NO: 1744365 - DNA, 15 bp, Homo sapiens
aatacaggcagtttg

SEQ ID NO: 1744366 - DNA, 15 bp, Homo sapiens
atacaggcagtttgt

SEQ ID NO: 1744367 - DNA, 15 bp, Homo sapiens
tacaggcagtttgtg

SEQ ID NO: 1744368 - DNA, 15 bp, Homo sapiens
acaggcagtttgtgt

SEQ ID NO: 1744369 - DNA, 15 bp, Homo sapiens
caggcagtttgtgtg

SEQ ID NO: 1744370 - DNA, 15 bp, Homo sapiens
aggcagtttgtgtgt

SEQ ID NO: 1744371 - DNA, 15 bp, Homo sapiens
ggcagtttgtgtgta

SEQ ID NO: 1744372 - DNA, 15 bp, Homo sapiens
gcagtttgtgtgtaa

SEQ ID NO: 1744373 - DNA, 15 bp, Homo sapiens
cagtttgtgtgtaac

SEQ ID NO: 1744374 - DNA, 15 bp, Homo sapiens
agtttgtgtgtaact

SEQ ID NO: 1744375 - DNA, 15 bp, Homo sapiens
gtttgtgtgtaactg

SEQ ID NO: 1744376 - DNA, 15 bp, Homo sapiens
tttgtgtgtaactgg

SEQ ID NO: 1744377 - DNA, 15 bp, Homo sapiens
ttgtgtgtaactggc

SEQ ID NO: 1744378 - DNA, 15 bp, Homo sapiens
tgtgtgtaactggct

SEQ ID NO: 1744379 - DNA, 15 bp, Homo sapiens
gtgtgtaactggctc

SEQ ID NO: 1744380 - DNA, 15 bp, Homo sapiens
tgtgtaactggctct

SEQ ID NO: 1744381 - DNA, 15 bp, Homo sapiens
gtgtaactggctctt

SEQ ID NO: 1744382 - DNA, 15 bp, Homo sapiens
tgtaactggctctta

SEQ ID NO: 1744383 - DNA, 15 bp, Homo sapiens
gtaactggctcttac

SEQ ID NO: 1744384 - DNA, 15 bp, Homo sapiens
taactggctcttaca

SEQ ID NO: 1744385 - DNA, 15 bp, Homo sapiens
aactggctcttacag

SEQ ID NO: 1744386 - DNA, 15 bp, Homo sapiens
actggctcttacagc

SEQ ID NO: 1744387 - DNA, 15 bp, Homo sapiens
ctggctcttacagcc

SEQ ID NO: 1744388 - DNA, 15 bp, Homo sapiens
tggctcttacagcca

SEQ ID NO: 1744389 - DNA, 15 bp, Homo sapiens
ggctcttacagccac

SEQ ID NO: 1744390 - DNA, 15 bp, Homo sapiens
gctcttacagccaca

SEQ ID NO: 1744391 - DNA, 15 bp, Homo sapiens
ctcttacagccacag

SEQ ID NO: 1744392 - DNA, 15 bp, Homo sapiens
tcttacagccacagg

SEQ ID NO: 1744393 - DNA, 15 bp, Homo sapiens
cttacagccacaggc

SEQ ID NO: 1744394 - DNA, 15 bp, Homo sapiens
ttacagccacaggct

SEQ ID NO: 1744395 - DNA, 15 bp, Homo sapiens
tacagccacaggctc

SEQ ID NO: 1744396 - DNA, 15 bp, Homo sapiens
acagccacaggctct

SEQ ID NO: 1744397 - DNA, 15 bp, Homo sapiens
cagccacaggctcta

SEQ ID NO: 1744398 - DNA, 15 bp, Homo sapiens
agccacaggctctaa

SEQ ID NO: 1744399 - DNA, 15 bp, Homo sapiens
gccacaggctctaat

SEQ ID NO: 1744400 - DNA, 15 bp, Homo sapiens
ccacaggctctaata

SEQ ID NO: 1744401 - DNA, 15 bp, Homo sapiens
cacaggctctaatat

SEQ ID NO: 1744402 - DNA, 15 bp, Homo sapiens
acaggctctaatatc

SEQ ID NO: 1744403 - DNA, 15 bp, Homo sapiens
caggctctaatatct

SEQ ID NO: 1744404 - DNA, 15 bp, Homo sapiens
aggctctaatatctg

SEQ ID NO: 1744405 - DNA, 15 bp, Homo sapiens
ggctctaatatctga

SEQ ID NO: 1744406 - DNA, 15 bp, Homo sapiens
gctctaatatctgag

SEQ ID NO: 1744407 - DNA, 15 bp, Homo sapiens
ctctaatatctgagt

SEQ ID NO: 1744408 - DNA, 15 bp, Homo sapiens
tctaatatctgagtc

SEQ ID NO: 1744409 - DNA, 15 bp, Homo sapiens
ctaatatctgagtct

SEQ ID NO: 1744410 - DNA, 15 bp, Homo sapiens
taatatctgagtctt

SEQ ID NO: 1744411 - DNA, 15 bp, Homo sapiens
aatatctgagtcttc

SEQ ID NO: 1744412 - DNA, 15 bp, Homo sapiens
atatctgagtcttcc

SEQ ID NO: 1744413 - DNA, 15 bp, Homo sapiens
tatctgagtcttcct

SEQ ID NO: 1744414 - DNA, 15 bp, Homo sapiens
atctgagtcttccta

SEQ ID NO: 1744415 - DNA, 15 bp, Homo sapiens
tctgagtcttcctat

SEQ ID NO: 1744416 - DNA, 15 bp, Homo sapiens
ctgagtcttcctata

SEQ ID NO: 1744417 - DNA, 15 bp, Homo sapiens
tgagtcttcctatac

SEQ ID NO: 1744418 - DNA, 15 bp, Homo sapiens
gagtcttcctataca

SEQ ID NO: 1744419 - DNA, 15 bp, Homo sapiens
agtcttcctatacat

SEQ ID NO: 1744420 - DNA, 15 bp, Homo sapiens
gtcttcctatacatc

SEQ ID NO: 1744421 - DNA, 15 bp, Homo sapiens
tcttcctatacatct

SEQ ID NO: 1744422 - DNA, 15 bp, Homo sapiens
cttcctatacatcta

SEQ ID NO: 1744423 - DNA, 15 bp, Homo sapiens
ttcctatacatctat

SEQ ID NO: 1744424 - DNA, 15 bp, Homo sapiens
tcctatacatctatt

SEQ ID NO: 1744425 - DNA, 15 bp, Homo sapiens
cctatacatctattc

SEQ ID NO: 1744426 - DNA, 15 bp, Homo sapiens
ctatacatctattcc

SEQ ID NO: 1744427 - DNA, 15 bp, Homo sapiens
tatacatctattcca

SEQ ID NO: 1744428 - DNA, 15 bp, Homo sapiens
atacatctattccat

SEQ ID NO: 1744429 - DNA, 15 bp, Homo sapiens
tacatctattccatt

SEQ ID NO: 1744430 - DNA, 15 bp, Homo sapiens
acatctattccattc

SEQ ID NO: 1744431 - DNA, 15 bp, Homo sapiens
catctattccattcc

SEQ ID NO: 1744432 - DNA, 15 bp, Homo sapiens
atctattccattcct

SEQ ID NO: 1744433 - DNA, 15 bp, Homo sapiens
tctattccattcctc

SEQ ID NO: 1744434 - DNA, 15 bp, Homo sapiens
ctattccattcctcg

SEQ ID NO: 1744435 - DNA, 15 bp, Homo sapiens
tattccattcctcgg

SEQ ID NO: 1744436 - DNA, 15 bp, Homo sapiens
attccattcctcgga

SEQ ID NO: 1744437 - DNA, 15 bp, Homo sapiens
ttccattcctcggat

SEQ ID NO: 1744438 - DNA, 15 bp, Homo sapiens
tccattcctcggatg

SEQ ID NO: 1744439 - DNA, 15 bp, Homo sapiens
ccattcctcggatgc

SEQ ID NO: 1744440 - DNA, 15 bp, Homo sapiens
cattcctcggatgct

SEQ ID NO: 1744441 - DNA, 15 bp, Homo sapiens
attcctcggatgctg

SEQ ID NO: 1744442 - DNA, 15 bp, Homo sapiens
ttcctcggatgctgt

SEQ ID NO: 1744443 - DNA, 15 bp, Homo sapiens
tcctcggatgctgta

SEQ ID NO: 1744444 - DNA, 15 bp, Homo sapiens
cctcggatgctgtat

SEQ ID NO: 1744445 - DNA, 15 bp, Homo sapiens
ctcggatgctgtata

SEQ ID NO: 1744446 - DNA, 15 bp, Homo sapiens
tcggatgctgtatat

SEQ ID NO: 1744447 - DNA, 15 bp, Homo sapiens
cggatgctgtatatt

SEQ ID NO: 1744448 - DNA, 15 bp, Homo sapiens
ggatgctgtatattc

SEQ ID NO: 1744449 - DNA, 15 bp, Homo sapiens
gatgctgtatattca

SEQ ID NO: 1744450 - DNA, 15 bp, Homo sapiens
atgctgtatattcag

SEQ ID NO: 1744451 - DNA, 15 bp, Homo sapiens
tgctgtatattcaga

SEQ ID NO: 1744452 - DNA, 15 bp, Homo sapiens
gctgtatattcagac

SEQ ID NO: 1744453 - DNA, 15 bp, Homo sapiens
ctgtatattcagacc

SEQ ID NO: 1744454 - DNA, 15 bp, Homo sapiens
tgtatattcagacca

SEQ ID NO: 1744455 - DNA, 15 bp, Homo sapiens
gtatattcagaccag

SEQ ID NO: 1744456 - DNA, 15 bp, Homo sapiens
tatattcagaccagc

SEQ ID NO: 1744457 - DNA, 15 bp, Homo sapiens
atattcagaccagct

SEQ ID NO: 1744458 - DNA, 15 bp, Homo sapiens
tattcagaccagctt

SEQ ID NO: 1744459 - DNA, 15 bp, Homo sapiens
attcagaccagcttc

SEQ ID NO: 1744460 - DNA, 15 bp, Homo sapiens
ttcagaccagcttct

SEQ ID NO: 1744461 - DNA, 15 bp, Homo sapiens
tcagaccagcttctt

SEQ ID NO: 1744462 - DNA, 15 bp, Homo sapiens
cagaccagcttctta

SEQ ID NO: 1744463 - DNA, 15 bp, Homo sapiens
agaccagcttcttac

SEQ ID NO: 1744464 - DNA, 15 bp, Homo sapiens
gaccagcttcttaca

SEQ ID NO: 1744465 - DNA, 15 bp, Homo sapiens
accagcttcttacac

SEQ ID NO: 1744466 - DNA, 15 bp, Homo sapiens
ccagcttcttacaca

SEQ ID NO: 1744467 - DNA, 15 bp, Homo sapiens
cagcttcttacacat

SEQ ID NO: 1744468 - DNA, 15 bp, Homo sapiens
agcttcttacacata

SEQ ID NO: 1744469 - DNA, 15 bp, Homo sapiens
gcttcttacacatac

SEQ ID NO: 1744470 - DNA, 15 bp, Homo sapiens
cttcttacacatacc

SEQ ID NO: 1744471 - DNA, 15 bp, Homo sapiens
ttcttacacataccc

SEQ ID NO: 1744472 - DNA, 15 bp, Homo sapiens
tcttacacataccca

SEQ ID NO: 1744473 - DNA, 15 bp, Homo sapiens
cttacacatacccaa

SEQ ID NO: 1744474 - DNA, 15 bp, Homo sapiens
ttacacatacccaat

SEQ ID NO: 1744475 - DNA, 15 bp, Homo sapiens
tacacatacccaatg

SEQ ID NO: 1744476 - DNA, 15 bp, Homo sapiens
acacatacccaatgt

SEQ ID NO: 1744477 - DNA, 15 bp, Homo sapiens
cacatacccaatgtg

SEQ ID NO: 1744478 - DNA, 15 bp, Homo sapiens
acatacccaatgtga

SEQ ID NO: 1744479 - DNA, 15 bp, Homo sapiens
catacccaatgtgac

SEQ ID NO: 1744480 - DNA, 15 bp, Homo sapiens
atacccaatgtgaca

SEQ ID NO: 1744481 - DNA, 15 bp, Homo sapiens
tacccaatgtgacat

SEQ ID NO: 1744482 - DNA, 15 bp, Homo sapiens
acccaatgtgacatc

SEQ ID NO: 1744483 - DNA, 15 bp, Homo sapiens
cccaatgtgacatca

SEQ ID NO: 1744484 - DNA, 15 bp, Homo sapiens
ccaatgtgacatcag

SEQ ID NO: 1744485 - DNA, 15 bp, Homo sapiens
caatgtgacatcagc

SEQ ID NO: 1744486 - DNA, 15 bp, Homo sapiens
aatgtgacatcagcc

SEQ ID NO: 1744487 - DNA, 15 bp, Homo sapiens
atgtgacatcagcct

SEQ ID NO: 1744488 - DNA, 15 bp, Homo sapiens
tgtgacatcagcctc

SEQ ID NO: 1744489 - DNA, 15 bp, Homo sapiens
gtgacatcagcctct

SEQ ID NO: 1744490 - DNA, 15 bp, Homo sapiens
tgacatcagcctctg

SEQ ID NO: 1744491 - DNA, 15 bp, Homo sapiens
gacatcagcctctga

SEQ ID NO: 1744492 - DNA, 15 bp, Homo sapiens
acatcagcctctgaa

SEQ ID NO: 1744493 - DNA, 15 bp, Homo sapiens
catcagcctctgaag

SEQ ID NO: 1744494 - DNA, 15 bp, Homo sapiens
atcagcctctgaagc

SEQ ID NO: 1744495 - DNA, 15 bp, Homo sapiens
tcagcctctgaagcc

SEQ ID NO: 1744496 - DNA, 15 bp, Homo sapiens
cagcctctgaagccc

SEQ ID NO: 1744497 - DNA, 15 bp, Homo sapiens
agcctctgaagcccc

SEQ ID NO: 1744498 - DNA, 15 bp, Homo sapiens
gcctctgaagcccca

SEQ ID NO: 1744499 - DNA, 15 bp, Homo sapiens
cctctgaagccccag

SEQ ID NO: 1744500 - DNA, 15 bp, Homo sapiens
ctctgaagccccagg

SEQ ID NO: 1744501 - DNA, 15 bp, Homo sapiens
tctgaagccccaggg

SEQ ID NO: 1744502 - DNA, 15 bp, Homo sapiens
ctgaagccccagggc

SEQ ID NO: 1744503 - DNA, 15 bp, Homo sapiens
tgaagccccagggcc

SEQ ID NO: 1744504 - DNA, 15 bp, Homo sapiens
gaagccccagggcct

SEQ ID NO: 1744505 - DNA, 15 bp, Homo sapiens
aagccccagggcctc

SEQ ID NO: 1744506 - DNA, 15 bp, Homo sapiens
agccccagggcctca

SEQ ID NO: 1744507 - DNA, 15 bp, Homo sapiens
gccccagggcctcac

SEQ ID NO: 1744508 - DNA, 15 bp, Homo sapiens
ccccagggcctcacg

SEQ ID NO: 1744509 - DNA, 15 bp, Homo sapiens
cccagggcctcacgg

SEQ ID NO: 1744510 - DNA, 15 bp, Homo sapiens
ccagggcctcacggt

SEQ ID NO: 1744511 - DNA, 15 bp, Homo sapiens
cagggcctcacggtt

SEQ ID NO: 1744512 - DNA, 15 bp, Homo sapiens
agggcctcacggttc

SEQ ID NO: 1744513 - DNA, 15 bp, Homo sapiens
gggcctcacggttca

SEQ ID NO: 1744514 - DNA, 15 bp, Homo sapiens
ggcctcacggttcaa

SEQ ID NO: 1744515 - DNA, 15 bp, Homo sapiens
gcctcacggttcaaa

SEQ ID NO: 1744516 - DNA, 15 bp, Homo sapiens
cctcacggttcaaac

SEQ ID NO: 1744517 - DNA, 15 bp, Homo sapiens
ctcacggttcaaact

SEQ ID NO: 1744518 - DNA, 15 bp, Homo sapiens
tcacggttcaaactt

SEQ ID NO: 1744519 - DNA, 15 bp, Homo sapiens
cacggttcaaacttg

SEQ ID NO: 1744520 - DNA, 15 bp, Homo sapiens
acggttcaaacttgt

SEQ ID NO: 1744521 - DNA, 15 bp, Homo sapiens
cggttcaaacttgtg

SEQ ID NO: 1744522 - DNA, 15 bp, Homo sapiens
ggttcaaacttgtgt

SEQ ID NO: 1744523 - DNA, 15 bp, Homo sapiens
gttcaaacttgtgtc

SEQ ID NO: 1744524 - DNA, 15 bp, Homo sapiens
ttcaaacttgtgtcc

SEQ ID NO: 1744525 - DNA, 15 bp, Homo sapiens
tcaaacttgtgtcca

SEQ ID NO: 1744526 - DNA, 15 bp, Homo sapiens
caaacttgtgtccag

SEQ ID NO: 1744527 - DNA, 15 bp, Homo sapiens
aaacttgtgtccagg

SEQ ID NO: 1744528 - DNA, 15 bp, Homo sapiens
aacttgtgtccaggg

SEQ ID NO: 1744529 - DNA, 15 bp, Homo sapiens
acttgtgtccagggc

SEQ ID NO: 1744530 - DNA, 15 bp, Homo sapiens
cttgtgtccagggcc

SEQ ID NO: 1744531 - DNA, 15 bp, Homo sapiens
ttgtgtccagggcca

SEQ ID NO: 1744532 - DNA, 15 bp, Homo sapiens
tgtgtccagggccag

SEQ ID NO: 1744533 - DNA, 15 bp, Homo sapiens
gtgtccagggccagg

SEQ ID NO: 1744534 - DNA, 15 bp, Homo sapiens
tgtccagggccagga

SEQ ID NO: 1744535 - DNA, 15 bp, Homo sapiens
gtccagggccaggaa

SEQ ID NO: 1744536 - DNA, 15 bp, Homo sapiens
tccagggccaggaaa

SEQ ID NO: 1744537 - DNA, 15 bp, Homo sapiens
ccagggccaggaaac

SEQ ID NO: 1744538 - DNA, 15 bp, Homo sapiens
cagggccaggaaacc

SEQ ID NO: 1744539 - DNA, 15 bp, Homo sapiens
agggccaggaaacca

SEQ ID NO: 1744540 - DNA, 15 bp, Homo sapiens
gggccaggaaaccaa

SEQ ID NO: 1744541 - DNA, 15 bp, Homo sapiens
ggccaggaaaccaaa

SEQ ID NO: 1744542 - DNA, 15 bp, Homo sapiens
gccaggaaaccaaat

SEQ ID NO: 1744543 - DNA, 15 bp, Homo sapiens
ccaggaaaccaaatc

SEQ ID NO: 1744544 - DNA, 15 bp, Homo sapiens
caggaaaccaaatct

SEQ ID NO: 1744545 - DNA, 15 bp, Homo sapiens
aggaaaccaaatctg

SEQ ID NO: 1744546 - DNA, 15 bp, Homo sapiens
ggaaaccaaatctga

SEQ ID NO: 1744547 - DNA, 15 bp, Homo sapiens
gaaaccaaatctgat

SEQ ID NO: 1744548 - DNA, 15 bp, Homo sapiens
aaaccaaatctgatt

SEQ ID NO: 1744549 - DNA, 15 bp, Homo sapiens
aaccaaatctgattg

SEQ ID NO: 1744550 - DNA, 15 bp, Homo sapiens
accaaatctgattga

SEQ ID NO: 1744551 - DNA, 15 bp, Homo sapiens
ccaaatctgattgac

SEQ ID NO: 1744552 - DNA, 15 bp, Homo sapiens
caaatctgattgacc

SEQ ID NO: 1744553 - DNA, 15 bp, Homo sapiens
aaatctgattgaccc

SEQ ID NO: 1744554 - DNA, 15 bp, Homo sapiens
aatctgattgaccca

SEQ ID NO: 1744555 - DNA, 15 bp, Homo sapiens
atctgattgacccag

SEQ ID NO: 1744556 - DNA, 15 bp, Homo sapiens
tctgattgacccaga

SEQ ID NO: 1744557 - DNA, 15 bp, Homo sapiens
ctgattgacccagat

SEQ ID NO: 1744558 - DNA, 15 bp, Homo sapiens
tgattgacccagatt

SEQ ID NO: 1744559 - DNA, 15 bp, Homo sapiens
gattgacccagatta

SEQ ID NO: 1744560 - DNA, 15 bp, Homo sapiens
attgacccagattag

SEQ ID NO: 1744561 - DNA, 15 bp, Homo sapiens
ttgacccagattagt

SEQ ID NO: 1744562 - DNA, 15 bp, Homo sapiens
tgacccagattagtc

SEQ ID NO: 1744563 - DNA, 15 bp, Homo sapiens
gacccagattagtca

SEQ ID NO: 1744564 - DNA, 15 bp, Homo sapiens
acccagattagtcag

SEQ ID NO: 1744565 - DNA, 15 bp, Homo sapiens
cccagattagtcaga

SEQ ID NO: 1744566 - DNA, 15 bp, Homo sapiens
ccagattagtcagat

SEQ ID NO: 1744567 - DNA, 15 bp, Homo sapiens
cagattagtcagatg

SEQ ID NO: 1744568 - DNA, 15 bp, Homo sapiens
agattagtcagatgt

SEQ ID NO: 1744569 - DNA, 15 bp, Homo sapiens
gattagtcagatgtc

SEQ ID NO: 1744570 - DNA, 15 bp, Homo sapiens
attagtcagatgtct

SEQ ID NO: 1744571 - DNA, 15 bp, Homo sapiens
ttagtcagatgtctg

SEQ ID NO: 1744572 - DNA, 15 bp, Homo sapiens
tagtcagatgtctga

SEQ ID NO: 1744573 - DNA, 15 bp, Homo sapiens
agtcagatgtctgac

SEQ ID NO: 1744574 - DNA, 15 bp, Homo sapiens
gtcagatgtctgact

SEQ ID NO: 1744575 - DNA, 15 bp, Homo sapiens
tcagatgtctgactc

SEQ ID NO: 1744576 - DNA, 15 bp, Homo sapiens
cagatgtctgactct

SEQ ID NO: 1744577 - DNA, 15 bp, Homo sapiens
agatgtctgactctg

SEQ ID NO: 1744578 - DNA, 15 bp, Homo sapiens
gatgtctgactctga

SEQ ID NO: 1744579 - DNA, 15 bp, Homo sapiens
atgtctgactctgat

SEQ ID NO: 1744580 - DNA, 15 bp, Homo sapiens
tgtctgactctgatt

SEQ ID NO: 1744581 - DNA, 15 bp, Homo sapiens
gtctgactctgattt

SEQ ID NO: 1744582 - DNA, 15 bp, Homo sapiens
tctgactctgattta

SEQ ID NO: 1744583 - DNA, 15 bp, Homo sapiens
ctgactctgatttaa

SEQ ID NO: 1744584 - DNA, 15 bp, Homo sapiens
tgactctgatttaat

SEQ ID NO: 1744585 - DNA, 15 bp, Homo sapiens
gactctgatttaatc

SEQ ID NO: 1744586 - DNA, 15 bp, Homo sapiens
actctgatttaatca

SEQ ID NO: 1744587 - DNA, 15 bp, Homo sapiens
ctctgatttaatcac

SEQ ID NO: 1744588 - DNA, 15 bp, Homo sapiens
tctgatttaatcacg

SEQ ID NO: 1744589 - DNA, 15 bp, Homo sapiens
ctgatttaatcacgg

SEQ ID NO: 1744590 - DNA, 15 bp, Homo sapiens
tgatttaatcacgga

SEQ ID NO: 1744591 - DNA, 15 bp, Homo sapiens
gatttaatcacggat

SEQ ID NO: 1744592 - DNA, 15 bp, Homo sapiens
atttaatcacggatt

SEQ ID NO: 1744593 - DNA, 15 bp, Homo sapiens
tttaatcacggattt

SEQ ID NO: 1744594 - DNA, 15 bp, Homo sapiens
ttaatcacggattta

SEQ ID NO: 1744595 - DNA, 15 bp, Homo sapiens
taatcacggatttaa

SEQ ID NO: 1744596 - DNA, 15 bp, Homo sapiens
aatcacggatttaaa

SEQ ID NO: 1744597 - DNA, 15 bp, Homo sapiens
atcacggatttaaag

SEQ ID NO: 1744598 - DNA, 15 bp, Homo sapiens
tcacggatttaaagc

SEQ ID NO: 1744599 - DNA, 15 bp, Homo sapiens
cacggatttaaagca

SEQ ID NO: 1744600 - DNA, 15 bp, Homo sapiens
acggatttaaagcat

SEQ ID NO: 1744601 - DNA, 15 bp, Homo sapiens
cggatttaaagcatg

SEQ ID NO: 1744602 - DNA, 15 bp, Homo sapiens
ggatttaaagcatgc

SEQ ID NO: 1744603 - DNA, 15 bp, Homo sapiens
gatttaaagcatgct

SEQ ID NO: 1744604 - DNA, 15 bp, Homo sapiens
atttaaagcatgctc

SEQ ID NO: 1744605 - DNA, 15 bp, Homo sapiens
tttaaagcatgctca

SEQ ID NO: 1744606 - DNA, 15 bp, Homo sapiens
ttaaagcatgctcat

SEQ ID NO: 1744607 - DNA, 15 bp, Homo sapiens
taaagcatgctcatg

SEQ ID NO: 1744608 - DNA, 15 bp, Homo sapiens
aaagcatgctcatgt

SEQ ID NO: 1744609 - DNA, 15 bp, Homo sapiens
aagcatgctcatgtt

SEQ ID NO: 1744610 - DNA, 15 bp, Homo sapiens
agcatgctcatgttg

SEQ ID NO: 1744611 - DNA, 15 bp, Homo sapiens
gcatgctcatgttgt

SEQ ID NO: 1744612 - DNA, 15 bp, Homo sapiens
catgctcatgttgtt

SEQ ID NO: 1744613 - DNA, 15 bp, Homo sapiens
atgctcatgttgttg

SEQ ID NO: 1744614 - DNA, 15 bp, Homo sapiens
tgctcatgttgttga

SEQ ID NO: 1744615 - DNA, 15 bp, Homo sapiens
gctcatgttgttgac

SEQ ID NO: 1744616 - DNA, 15 bp, Homo sapiens
ctcatgttgttgaca

SEQ ID NO: 1744617 - DNA, 15 bp, Homo sapiens
tcatgttgttgacaa

SEQ ID NO: 1744618 - DNA, 15 bp, Homo sapiens
catgttgttgacaat

SEQ ID NO: 1744619 - DNA, 15 bp, Homo sapiens
atgttgttgacaatt

SEQ ID NO: 1744620 - DNA, 15 bp, Homo sapiens
gttgttgacaattgg

SEQ ID NO: 1744621 - DNA, 15 bp, Homo sapiens
ttgttgacaattggg

SEQ ID NO: 1744622 - DNA, 15 bp, Homo sapiens
tgttgacaattggga

SEQ ID NO: 1744623 - DNA, 15 bp, Homo sapiens
gttgacaattgggat

SEQ ID NO: 1744624 - DNA, 15 bp, Homo sapiens
ttgacaattgggatc

SEQ ID NO: 1744625 - DNA, 15 bp, Homo sapiens
tgacaattgggatct

SEQ ID NO: 1744626 - DNA, 15 bp, Homo sapiens
gacaattgggatctc

SEQ ID NO: 1744627 - DNA, 15 bp, Homo sapiens
acaattgggatctcc

SEQ ID NO: 1744628 - DNA, 15 bp, Homo sapiens
caattgggatctcct

SEQ ID NO: 1744629 - DNA, 15 bp, Homo sapiens
aattgggatctcctt

SEQ ID NO: 1744630 - DNA, 15 bp, Homo sapiens
attgggatctccttc

SEQ ID NO: 1744631 - DNA, 15 bp, Homo sapiens
ttgggatctccttcc

SEQ ID NO: 1744632 - DNA, 15 bp, Homo sapiens
tgggatctccttccc

SEQ ID NO: 1744633 - DNA, 15 bp, Homo sapiens
gggatctccttccca

SEQ ID NO: 1744634 - DNA, 15 bp, Homo sapiens
ggatctccttcccat

SEQ ID NO: 1744635 - DNA, 15 bp, Homo sapiens
gatctccttcccatt

SEQ ID NO: 1744636 - DNA, 15 bp, Homo sapiens
atctccttcccattg

SEQ ID NO: 1744637 - DNA, 15 bp, Homo sapiens
tctccttcccattgt

SEQ ID NO: 1744638 - DNA, 15 bp, Homo sapiens
ctccttcccattgtg

SEQ ID NO: 1744639 - DNA, 15 bp, Homo sapiens
tccttcccattgtgg

SEQ ID NO: 1744640 - DNA, 15 bp, Homo sapiens
ccttcccattgtggg

SEQ ID NO: 1744641 - DNA, 15 bp, Homo sapiens
cttcccattgtgggt

SEQ ID NO: 1744642 - DNA, 15 bp, Homo sapiens
ttcccattgtgggtg

SEQ ID NO: 1744643 - DNA, 15 bp, Homo sapiens
tcccattgtgggtgg

SEQ ID NO: 1744644 - DNA, 15 bp, Homo sapiens
cccattgtgggtgga

SEQ ID NO: 1744645 - DNA, 15 bp, Homo sapiens
ccattgtgggtggac

SEQ ID NO: 1744646 - DNA, 15 bp, Homo sapiens
cattgtgggtggaca

SEQ ID NO: 1744647 - DNA, 15 bp, Homo sapiens
attgtgggtggacag

SEQ ID NO: 1744648 - DNA, 15 bp, Homo sapiens
ttgtgggtggacagc

SEQ ID NO: 1744649 - DNA, 15 bp, Homo sapiens
tgtgggtggacagct

SEQ ID NO: 1744650 - DNA, 15 bp, Homo sapiens
gtgggtggacagctt

SEQ ID NO: 1744651 - DNA, 15 bp, Homo sapiens
tgggtggacagcttt

SEQ ID NO: 1744652 - DNA, 15 bp, Homo sapiens
gggtggacagctttt

SEQ ID NO: 1744653 - DNA, 15 bp, Homo sapiens
ggtggacagctttta

SEQ ID NO: 1744654 - DNA, 15 bp, Homo sapiens
gtggacagcttttat

SEQ ID NO: 1744655 - DNA, 15 bp, Homo sapiens
tggacagcttttata

SEQ ID NO: 1744656 - DNA, 15 bp, Homo sapiens
ggacagcttttataa

SEQ ID NO: 1744657 - DNA, 15 bp, Homo sapiens
gacagcttttataag

SEQ ID NO: 1744658 - DNA, 15 bp, Homo sapiens
acagcttttataaga

SEQ ID NO: 1744659 - DNA, 15 bp, Homo sapiens
cagcttttataagaa

SEQ ID NO: 1744660 - DNA, 15 bp, Homo sapiens
agcttttataagaag

SEQ ID NO: 1744661 - DNA, 15 bp, Homo sapiens
gcttttataagaagt

SEQ ID NO: 1744662 - DNA, 15 bp, Homo sapiens
cttttataagaagtt

SEQ ID NO: 1744663 - DNA, 15 bp, Homo sapiens
ttttataagaagtta

SEQ ID NO: 1744664 - DNA, 15 bp, Homo sapiens
tttataagaagttat

SEQ ID NO: 1744665 - DNA, 15 bp, Homo sapiens
ttataagaagttata

SEQ ID NO: 1744666 - DNA, 15 bp, Homo sapiens
tataagaagttatac

SEQ ID NO: 1744667 - DNA, 15 bp, Homo sapiens
ataagaagttatact

SEQ ID NO: 1744668 - DNA, 15 bp, Homo sapiens
taagaagttatactc

SEQ ID NO: 1744669 - DNA, 15 bp, Homo sapiens
aagaagttatactca

SEQ ID NO: 1744670 - DNA, 15 bp, Homo sapiens
agaagttatactcag

SEQ ID NO: 1744671 - DNA, 15 bp, Homo sapiens
gaagttatactcagg

SEQ ID NO: 1744672 - DNA, 15 bp, Homo sapiens
aagttatactcaggg

SEQ ID NO: 1744673 - DNA, 15 bp, Homo sapiens
agttatactcaggga

SEQ ID NO: 1744674 - DNA, 15 bp, Homo sapiens
gttatactcagggag

SEQ ID NO: 1744675 - DNA, 15 bp, Homo sapiens
ttatactcagggagg

SEQ ID NO: 1744676 - DNA, 15 bp, Homo sapiens
tatactcagggagga

SEQ ID NO: 1744677 - DNA, 15 bp, Homo sapiens
atactcagggaggaa

SEQ ID NO: 1744678 - DNA, 15 bp, Homo sapiens
tactcagggaggaaa

SEQ ID NO: 1744679 - DNA, 15 bp, Homo sapiens
actcagggaggaaat

SEQ ID NO: 1744680 - DNA, 15 bp, Homo sapiens
ctcagggaggaaata

SEQ ID NO: 1744681 - DNA, 15 bp, Homo sapiens
tcagggaggaaataa

SEQ ID NO: 1744682 - DNA, 15 bp, Homo sapiens
cagggaggaaataat

SEQ ID NO: 1744683 - DNA, 15 bp, Homo sapiens
agggaggaaataatt

SEQ ID NO: 1744684 - DNA, 15 bp, Homo sapiens
gggaggaaataattg

SEQ ID NO: 1744685 - DNA, 15 bp, Homo sapiens
ggaggaaataattgg

SEQ ID NO: 1744686 - DNA, 15 bp, Homo sapiens
gaggaaataattggc

SEQ ID NO: 1744687 - DNA, 15 bp, Homo sapiens
aggaaataattggca

SEQ ID NO: 1744688 - DNA, 15 bp, Homo sapiens
ggaaataattggcag

SEQ ID NO: 1744689 - DNA, 15 bp, Homo sapiens
gaaataattggcagc

SEQ ID NO: 1744690 - DNA, 15 bp, Homo sapiens
aaataattggcagct

SEQ ID NO: 1744691 - DNA, 15 bp, Homo sapiens
aataattggcagctc

SEQ ID NO: 1744692 - DNA, 15 bp, Homo sapiens
ataattggcagctcc

SEQ ID NO: 1744693 - DNA, 15 bp, Homo sapiens
taattggcagctcca

SEQ ID NO: 1744694 - DNA, 15 bp, Homo sapiens
aattggcagctccaa

SEQ ID NO: 1744695 - DNA, 15 bp, Homo sapiens
attggcagctccaat

SEQ ID NO: 1744696 - DNA, 15 bp, Homo sapiens
ttggcagctccaata

SEQ ID NO: 1744697 - DNA, 15 bp, Homo sapiens
tggcagctccaatag

SEQ ID NO: 1744698 - DNA, 15 bp, Homo sapiens
ggcagctccaatagg

SEQ ID NO: 1744699 - DNA, 15 bp, Homo sapiens
gcagctccaataggc

SEQ ID NO: 1744700 - DNA, 15 bp, Homo sapiens
cagctccaataggcc

SEQ ID NO: 1744701 - DNA, 15 bp, Homo sapiens
agctccaataggccc

SEQ ID NO: 1744702 - DNA, 15 bp, Homo sapiens
gctccaataggccct

SEQ ID NO: 1744703 - DNA, 15 bp, Homo sapiens
ctccaataggccctt

SEQ ID NO: 1744704 - DNA, 15 bp, Homo sapiens
tccaataggccctta

SEQ ID NO: 1744705 - DNA, 15 bp, Homo sapiens
ccaataggcccttag

SEQ ID NO: 1744706 - DNA, 15 bp, Homo sapiens
caataggcccttaga

SEQ ID NO: 1744707 - DNA, 15 bp, Homo sapiens
aataggcccttagaa

SEQ ID NO: 1744708 - DNA, 15 bp, Homo sapiens
ataggcccttagaaa

SEQ ID NO: 1744709 - DNA, 15 bp, Homo sapiens
taggcccttagaaat

SEQ ID NO: 1744710 - DNA, 15 bp, Homo sapiens
aggcccttagaaatc

SEQ ID NO: 1744711 - DNA, 15 bp, Homo sapiens
ggcccttagaaatca

SEQ ID NO: 1744712 - DNA, 15 bp, Homo sapiens
gcccttagaaatcac

SEQ ID NO: 1744713 - DNA, 15 bp, Homo sapiens
cccttagaaatcaca

SEQ ID NO: 1744714 - DNA, 15 bp, Homo sapiens
ccttagaaatcacag

SEQ ID NO: 1744715 - DNA, 15 bp, Homo sapiens
cttagaaatcacagc

SEQ ID NO: 1744716 - DNA, 15 bp, Homo sapiens
ttagaaatcacagcc

SEQ ID NO: 1744717 - DNA, 15 bp, Homo sapiens
tagaaatcacagcct

SEQ ID NO: 1744718 - DNA, 15 bp, Homo sapiens
agaaatcacagccta

SEQ ID NO: 1744719 - DNA, 15 bp, Homo sapiens
gaaatcacagcctaa

SEQ ID NO: 1744720 - DNA, 15 bp, Homo sapiens
aaatcacagcctaat

SEQ ID NO: 1744721 - DNA, 15 bp, Homo sapiens
aatcacagcctaatc

SEQ ID NO: 1744722 - DNA, 15 bp, Homo sapiens
atcacagcctaatcc

SEQ ID NO: 1744723 - DNA, 15 bp, Homo sapiens
tcacagcctaatcct

SEQ ID NO: 1744724 - DNA, 15 bp, Homo sapiens
cacagcctaatcctt

SEQ ID NO: 1744725 - DNA, 15 bp, Homo sapiens
acagcctaatccttt

SEQ ID NO: 1744726 - DNA, 15 bp, Homo sapiens
cagcctaatcctttc

SEQ ID NO: 1744727 - DNA, 15 bp, Homo sapiens
agcctaatcctttct

SEQ ID NO: 1744728 - DNA, 15 bp, Homo sapiens
gcctaatcctttctt

SEQ ID NO: 1744729 - DNA, 15 bp, Homo sapiens
cctaatcctttcttt

SEQ ID NO: 1744730 - DNA, 15 bp, Homo sapiens
ctaatcctttctttt

SEQ ID NO: 1744731 - DNA, 15 bp, Homo sapiens
taatcctttctttta

SEQ ID NO: 1744732 - DNA, 15 bp, Homo sapiens
aatcctttcttttag

SEQ ID NO: 1744733 - DNA, 15 bp, Homo sapiens
atcctttcttttagg

SEQ ID NO: 1744734 - DNA, 15 bp, Homo sapiens
tcctttcttttagga

SEQ ID NO: 1744735 - DNA, 15 bp, Homo sapiens
cctttcttttaggac

SEQ ID NO: 1744736 - DNA, 15 bp, Homo sapiens
ctttcttttaggact

SEQ ID NO: 1744737 - DNA, 15 bp, Homo sapiens
tttcttttaggactc

SEQ ID NO: 1744738 - DNA, 15 bp, Homo sapiens
ttcttttaggactct

SEQ ID NO: 1744739 - DNA, 15 bp, Homo sapiens
tcttttaggactctg

SEQ ID NO: 1744740 - DNA, 15 bp, Homo sapiens
cttttaggactctgc

SEQ ID NO: 1744741 - DNA, 15 bp, Homo sapiens
ttttaggactctgcc

SEQ ID NO: 1744742 - DNA, 15 bp, Homo sapiens
tttaggactctgcct

SEQ ID NO: 1744743 - DNA, 15 bp, Homo sapiens
ttaggactctgcctt

SEQ ID NO: 1744744 - DNA, 15 bp, Homo sapiens
taggactctgccttg

SEQ ID NO: 1744745 - DNA, 15 bp, Homo sapiens
aggactctgccttgt

SEQ ID NO: 1744746 - DNA, 15 bp, Homo sapiens
ggactctgccttgtg

SEQ ID NO: 1744747 - DNA, 15 bp, Homo sapiens
gactctgccttgtga

SEQ ID NO: 1744748 - DNA, 15 bp, Homo sapiens
actctgccttgtgaa

SEQ ID NO: 1744749 - DNA, 15 bp, Homo sapiens
ctctgccttgtgaag

SEQ ID NO: 1744750 - DNA, 15 bp, Homo sapiens
tctgccttgtgaaga

SEQ ID NO: 1744751 - DNA, 15 bp, Homo sapiens
ctgccttgtgaagaa

SEQ ID NO: 1744752 - DNA, 15 bp, Homo sapiens
tgccttgtgaagaaa

SEQ ID NO: 1744753 - DNA, 15 bp, Homo sapiens
gccttgtgaagaaag

SEQ ID NO: 1744754 - DNA, 15 bp, Homo sapiens
ccttgtgaagaaagc

SEQ ID NO: 1744755 - DNA, 15 bp, Homo sapiens
cttgtgaagaaagcc

SEQ ID NO: 1744756 - DNA, 15 bp, Homo sapiens
ttgtgaagaaagcca

SEQ ID NO: 1744757 - DNA, 15 bp, Homo sapiens
tgtgaagaaagccag

SEQ ID NO: 1744758 - DNA, 15 bp, Homo sapiens
gtgaagaaagccagg

SEQ ID NO: 1744759 - DNA, 15 bp, Homo sapiens
tgaagaaagccaggc

SEQ ID NO: 1744760 - DNA, 15 bp, Homo sapiens
gaagaaagccaggcc

SEQ ID NO: 1744761 - DNA, 15 bp, Homo sapiens
aagaaagccaggcca

SEQ ID NO: 1744762 - DNA, 15 bp, Homo sapiens
agaaagccaggccac

SEQ ID NO: 1744763 - DNA, 15 bp, Homo sapiens
gaaagccaggccaca

SEQ ID NO: 1744764 - DNA, 15 bp, Homo sapiens
aaagccaggccacaa

SEQ ID NO: 1744765 - DNA, 15 bp, Homo sapiens
aagccaggccacaaa

SEQ ID NO: 1744766 - DNA, 15 bp, Homo sapiens
agccaggccacaaag

SEQ ID NO: 1744767 - DNA, 15 bp, Homo sapiens
gccaggccacaaagg

SEQ ID NO: 1744768 - DNA, 15 bp, Homo sapiens
ccaggccacaaaggg

SEQ ID NO: 1744769 - DNA, 15 bp, Homo sapiens
caggccacaaagggg

SEQ ID NO: 1744770 - DNA, 15 bp, Homo sapiens
aggccacaaaggggt

SEQ ID NO: 1744771 - DNA, 15 bp, Homo sapiens
ggccacaaaggggtt

SEQ ID NO: 1744772 - DNA, 15 bp, Homo sapiens
gccacaaaggggttg

SEQ ID NO: 1744773 - DNA, 15 bp, Homo sapiens
ccacaaaggggttgt

SEQ ID NO: 1744774 - DNA, 15 bp, Homo sapiens
cacaaaggggttgtg

SEQ ID NO: 1744775 - DNA, 15 bp, Homo sapiens
acaaaggggttgtga

SEQ ID NO: 1744776 - DNA, 15 bp, Homo sapiens
caaaggggttgtgac

SEQ ID NO: 1744777 - DNA, 15 bp, Homo sapiens
aaaggggttgtgact

SEQ ID NO: 1744778 - DNA, 15 bp, Homo sapiens
aaggggttgtgacta

SEQ ID NO: 1744779 - DNA, 15 bp, Homo sapiens
aggggttgtgactaa

SEQ ID NO: 1744780 - DNA, 15 bp, Homo sapiens
ggggttgtgactaag

SEQ ID NO: 1744781 - DNA, 15 bp, Homo sapiens
gggttgtgactaagg

SEQ ID NO: 1744782 - DNA, 15 bp, Homo sapiens
ggttgtgactaaggc

SEQ ID NO: 1744783 - DNA, 15 bp, Homo sapiens
gttgtgactaaggcc

SEQ ID NO: 1744784 - DNA, 15 bp, Homo sapiens
ttgtgactaaggcca

SEQ ID NO: 1744785 - DNA, 15 bp, Homo sapiens
tgtgactaaggccag

SEQ ID NO: 1744786 - DNA, 15 bp, Homo sapiens
gtgactaaggccagt

SEQ ID NO: 1744787 - DNA, 15 bp, Homo sapiens
tgactaaggccagtc

SEQ ID NO: 1744788 - DNA, 15 bp, Homo sapiens
gactaaggccagtca

SEQ ID NO: 1744789 - DNA, 15 bp, Homo sapiens
actaaggccagtcat

SEQ ID NO: 1744790 - DNA, 15 bp, Homo sapiens
ctaaggccagtcatg

SEQ ID NO: 1744791 - DNA, 15 bp, Homo sapiens
taaggccagtcatgt

SEQ ID NO: 1744792 - DNA, 15 bp, Homo sapiens
aaggccagtcatgta

SEQ ID NO: 1744793 - DNA, 15 bp, Homo sapiens
aggccagtcatgtaa

SEQ ID NO: 1744794 - DNA, 15 bp, Homo sapiens
ggccagtcatgtaac

SEQ ID NO: 1744795 - DNA, 15 bp, Homo sapiens
gccagtcatgtaact

SEQ ID NO: 1744796 - DNA, 15 bp, Homo sapiens
ccagtcatgtaactg

SEQ ID NO: 1744797 - DNA, 15 bp, Homo sapiens
cagtcatgtaactgc

SEQ ID NO: 1744798 - DNA, 15 bp, Homo sapiens
agtcatgtaactgcc

SEQ ID NO: 1744799 - DNA, 15 bp, Homo sapiens
gtcatgtaactgcct

SEQ ID NO: 1744800 - DNA, 15 bp, Homo sapiens
tcatgtaactgcctg

SEQ ID NO: 1744801 - DNA, 15 bp, Homo sapiens
catgtaactgcctgg

SEQ ID NO: 1744802 - DNA, 15 bp, Homo sapiens
atgtaactgcctggt

SEQ ID NO: 1744803 - DNA, 15 bp, Homo sapiens
tgtaactgcctggtg

SEQ ID NO: 1744804 - DNA, 15 bp, Homo sapiens
gtaactgcctggtgg

SEQ ID NO: 1744805 - DNA, 15 bp, Homo sapiens
taactgcctggtggc

SEQ ID NO: 1744806 - DNA, 15 bp, Homo sapiens
aactgcctggtggca

SEQ ID NO: 1744807 - DNA, 15 bp, Homo sapiens
actgcctggtggcag

SEQ ID NO: 1744808 - DNA, 15 bp, Homo sapiens
ctgcctggtggcagg

SEQ ID NO: 1744809 - DNA, 15 bp, Homo sapiens
tgcctggtggcaggc

SEQ ID NO: 1744810 - DNA, 15 bp, Homo sapiens
gcctggtggcaggct

SEQ ID NO: 1744811 - DNA, 15 bp, Homo sapiens
cctggtggcaggctg

SEQ ID NO: 1744812 - DNA, 15 bp, Homo sapiens
ctggtggcaggctgg

SEQ ID NO: 1744813 - DNA, 15 bp, Homo sapiens
tggtggcaggctggg

SEQ ID NO: 1744814 - DNA, 15 bp, Homo sapiens
ggtggcaggctggga

SEQ ID NO: 1744815 - DNA, 15 bp, Homo sapiens
gtggcaggctgggaa

SEQ ID NO: 1744816 - DNA, 15 bp, Homo sapiens
tggcaggctgggaat

SEQ ID NO: 1744817 - DNA, 15 bp, Homo sapiens
ggcaggctgggaata

SEQ ID NO: 1744818 - DNA, 15 bp, Homo sapiens
gcaggctgggaatag

SEQ ID NO: 1744819 - DNA, 15 bp, Homo sapiens
caggctgggaataga

SEQ ID NO: 1744820 - DNA, 15 bp, Homo sapiens
aggctgggaatagaa

SEQ ID NO: 1744821 - DNA, 15 bp, Homo sapiens
ggctgggaatagaac

SEQ ID NO: 1744822 - DNA, 15 bp, Homo sapiens
gctgggaatagaacc

SEQ ID NO: 1744823 - DNA, 15 bp, Homo sapiens
ctgggaatagaacca

SEQ ID NO: 1744824 - DNA, 15 bp, Homo sapiens
tgggaatagaaccag

SEQ ID NO: 1744825 - DNA, 15 bp, Homo sapiens
gggaatagaaccagg

SEQ ID NO: 1744826 - DNA, 15 bp, Homo sapiens
ggaatagaaccaggc

SEQ ID NO: 1744827 - DNA, 15 bp, Homo sapiens
gaatagaaccaggcc

SEQ ID NO: 1744828 - DNA, 15 bp, Homo sapiens
aatagaaccaggccc

SEQ ID NO: 1744829 - DNA, 15 bp, Homo sapiens
atagaaccaggccct

SEQ ID NO: 1744830 - DNA, 15 bp, Homo sapiens
tagaaccaggccctt

SEQ ID NO: 1744831 - DNA, 15 bp, Homo sapiens
agaaccaggcccttg

SEQ ID NO: 1744832 - DNA, 15 bp, Homo sapiens
gaaccaggcccttgg

SEQ ID NO: 1744833 - DNA, 15 bp, Homo sapiens
aaccaggcccttggt

SEQ ID NO: 1744834 - DNA, 15 bp, Homo sapiens
accaggcccttggtt

SEQ ID NO: 1744835 - DNA, 15 bp, Homo sapiens
ccaggcccttggttc

SEQ ID NO: 1744836 - DNA, 15 bp, Homo sapiens
caggcccttggttcc

SEQ ID NO: 1744837 - DNA, 15 bp, Homo sapiens
aggcccttggttccc

SEQ ID NO: 1744838 - DNA, 15 bp, Homo sapiens
ggcccttggttccca

SEQ ID NO: 1744839 - DNA, 15 bp, Homo sapiens
gcccttggttcccag

SEQ ID NO: 1744840 - DNA, 15 bp, Homo sapiens
cccttggttcccagg

SEQ ID NO: 1744841 - DNA, 15 bp, Homo sapiens
ccttggttcccaggc

SEQ ID NO: 1744842 - DNA, 15 bp, Homo sapiens
cttggttcccaggcc

SEQ ID NO: 1744843 - DNA, 15 bp, Homo sapiens
ttggttcccaggcca

SEQ ID NO: 1744844 - DNA, 15 bp, Homo sapiens
tggttcccaggccac

SEQ ID NO: 1744845 - DNA, 15 bp, Homo sapiens
ggttcccaggccaca

SEQ ID NO: 1744846 - DNA, 15 bp, Homo sapiens
gttcccaggccacag

SEQ ID NO: 1744847 - DNA, 15 bp, Homo sapiens
ttcccaggccacagt

SEQ ID NO: 1744848 - DNA, 15 bp, Homo sapiens
tcccaggccacagtt

SEQ ID NO: 1744849 - DNA, 15 bp, Homo sapiens
cccaggccacagttc

SEQ ID NO: 1744850 - DNA, 15 bp, Homo sapiens
ccaggccacagttct

SEQ ID NO: 1744851 - DNA, 15 bp, Homo sapiens
caggccacagttctt

SEQ ID NO: 1744852 - DNA, 15 bp, Homo sapiens
aggccacagttcttg

SEQ ID NO: 1744853 - DNA, 15 bp, Homo sapiens
ggccacagttcttgc

SEQ ID NO: 1744854 - DNA, 15 bp, Homo sapiens
gccacagttcttgcc

SEQ ID NO: 1744855 - DNA, 15 bp, Homo sapiens
ccacagttcttgccc

SEQ ID NO: 1744856 - DNA, 15 bp, Homo sapiens
cacagttcttgccct

SEQ ID NO: 1744857 - DNA, 15 bp, Homo sapiens
acagttcttgccctt

SEQ ID NO: 1744858 - DNA, 15 bp, Homo sapiens
cagttcttgccctta

SEQ ID NO: 1744859 - DNA, 15 bp, Homo sapiens
agttcttgcccttag

SEQ ID NO: 1744860 - DNA, 15 bp, Homo sapiens
gttcttgcccttagc

SEQ ID NO: 1744861 - DNA, 15 bp, Homo sapiens
ttcttgcccttagct

SEQ ID NO: 1744862 - DNA, 15 bp, Homo sapiens
tcttgcccttagctg

SEQ ID NO: 1744863 - DNA, 15 bp, Homo sapiens
cttgcccttagctga

SEQ ID NO: 1744864 - DNA, 15 bp, Homo sapiens
ttgcccttagctgat

SEQ ID NO: 1744865 - DNA, 15 bp, Homo sapiens
tgcccttagctgatc

SEQ ID NO: 1744866 - DNA, 15 bp, Homo sapiens
gcccttagctgatca

SEQ ID NO: 1744867 - DNA, 15 bp, Homo sapiens
cccttagctgatcag

SEQ ID NO: 1744868 - DNA, 15 bp, Homo sapiens
ccttagctgatcagc

SEQ ID NO: 1744869 - DNA, 15 bp, Homo sapiens
cttagctgatcagcc

SEQ ID NO: 1744870 - DNA, 15 bp, Homo sapiens
ttagctgatcagcct

SEQ ID NO: 1744871 - DNA, 15 bp, Homo sapiens
tagctgatcagcctt

SEQ ID NO: 1744872 - DNA, 15 bp, Homo sapiens
agctgatcagccttc

SEQ ID NO: 1744873 - DNA, 15 bp, Homo sapiens
gctgatcagccttcc

SEQ ID NO: 1744874 - DNA, 15 bp, Homo sapiens
ctgatcagccttcct

SEQ ID NO: 1744875 - DNA, 15 bp, Homo sapiens
tgatcagccttcctg

SEQ ID NO: 1744876 - DNA, 15 bp, Homo sapiens
gatcagccttcctga

SEQ ID NO: 1744877 - DNA, 15 bp, Homo sapiens
atcagccttcctgag

SEQ ID NO: 1744878 - DNA, 15 bp, Homo sapiens
tcagccttcctgagc

SEQ ID NO: 1744879 - DNA, 15 bp, Homo sapiens
cagccttcctgagca

SEQ ID NO: 1744880 - DNA, 15 bp, Homo sapiens
agccttcctgagcat

SEQ ID NO: 1744881 - DNA, 15 bp, Homo sapiens
gccttcctgagcata

SEQ ID NO: 1744882 - DNA, 15 bp, Homo sapiens
ccttcctgagcatac

SEQ ID NO: 1744883 - DNA, 15 bp, Homo sapiens
cttcctgagcataca

SEQ ID NO: 1744884 - DNA, 15 bp, Homo sapiens
ttcctgagcatacaa

SEQ ID NO: 1744885 - DNA, 15 bp, Homo sapiens
tcctgagcatacaaa

SEQ ID NO: 1744886 - DNA, 15 bp, Homo sapiens
cctgagcatacaaag

SEQ ID NO: 1744887 - DNA, 15 bp, Homo sapiens
ctgagcatacaaaga

SEQ ID NO: 1744888 - DNA, 15 bp, Homo sapiens
tgagcatacaaagac

SEQ ID NO: 1744889 - DNA, 15 bp, Homo sapiens
gagcatacaaagact

SEQ ID NO: 1744890 - DNA, 15 bp, Homo sapiens
agcatacaaagactt

SEQ ID NO: 1744891 - DNA, 15 bp, Homo sapiens
gcatacaaagacttg

SEQ ID NO: 1744892 - DNA, 15 bp, Homo sapiens
catacaaagacttgc

SEQ ID NO: 1744893 - DNA, 15 bp, Homo sapiens
atacaaagacttgcc

SEQ ID NO: 1744894 - DNA, 15 bp, Homo sapiens
tacaaagacttgcct

SEQ ID NO: 1744895 - DNA, 15 bp, Homo sapiens
acaaagacttgccta

SEQ ID NO: 1744896 - DNA, 15 bp, Homo sapiens
caaagacttgcctac

SEQ ID NO: 1744897 - DNA, 15 bp, Homo sapiens
aaagacttgcctacc

SEQ ID NO: 1744898 - DNA, 15 bp, Homo sapiens
aagacttgcctacca

SEQ ID NO: 1744899 - DNA, 15 bp, Homo sapiens
agacttgcctaccat

SEQ ID NO: 1744900 - DNA, 15 bp, Homo sapiens
gacttgcctaccata

SEQ ID NO: 1744901 - DNA, 15 bp, Homo sapiens
acttgcctaccatac

SEQ ID NO: 1744902 - DNA, 15 bp, Homo sapiens
cttgcctaccatact

SEQ ID NO: 1744903 - DNA, 15 bp, Homo sapiens
ttgcctaccatactt

SEQ ID NO: 1744904 - DNA, 15 bp, Homo sapiens
tgcctaccatactta

SEQ ID NO: 1744905 - DNA, 15 bp, Homo sapiens
gcctaccatacttag

SEQ ID NO: 1744906 - DNA, 15 bp, Homo sapiens
cctaccatacttagc

SEQ ID NO: 1744907 - DNA, 15 bp, Homo sapiens
ctaccatacttagca

SEQ ID NO: 1744908 - DNA, 15 bp, Homo sapiens
taccatacttagcac

SEQ ID NO: 1744909 - DNA, 15 bp, Homo sapiens
accatacttagcaca

SEQ ID NO: 1744910 - DNA, 15 bp, Homo sapiens
ccatacttagcacag

SEQ ID NO: 1744911 - DNA, 15 bp, Homo sapiens
catacttagcacagc

SEQ ID NO: 1744912 - DNA, 15 bp, Homo sapiens
atacttagcacagcc

SEQ ID NO: 1744913 - DNA, 15 bp, Homo sapiens
tacttagcacagcca

SEQ ID NO: 1744914 - DNA, 15 bp, Homo sapiens
acttagcacagccag

SEQ ID NO: 1744915 - DNA, 15 bp, Homo sapiens
cttagcacagccaga

SEQ ID NO: 1744916 - DNA, 15 bp, Homo sapiens
ttagcacagccagaa

SEQ ID NO: 1744917 - DNA, 15 bp, Homo sapiens
tagcacagccagaag

SEQ ID NO: 1744918 - DNA, 15 bp, Homo sapiens
agcacagccagaagt

SEQ ID NO: 1744919 - DNA, 15 bp, Homo sapiens
gcacagccagaagta

SEQ ID NO: 1744920 - DNA, 15 bp, Homo sapiens
cacagccagaagtac

SEQ ID NO: 1744921 - DNA, 15 bp, Homo sapiens
acagccagaagtacc

SEQ ID NO: 1744922 - DNA, 15 bp, Homo sapiens
cagccagaagtacca

SEQ ID NO: 1744923 - DNA, 15 bp, Homo sapiens
agccagaagtaccag

SEQ ID NO: 1744924 - DNA, 15 bp, Homo sapiens
gccagaagtaccagt

SEQ ID NO: 1744925 - DNA, 15 bp, Homo sapiens
ccagaagtaccagtt

SEQ ID NO: 1744926 - DNA, 15 bp, Homo sapiens
cagaagtaccagttt

SEQ ID NO: 1744927 - DNA, 15 bp, Homo sapiens
agaagtaccagtttt

SEQ ID NO: 1744928 - DNA, 15 bp, Homo sapiens
gaagtaccagttttg

SEQ ID NO: 1744929 - DNA, 15 bp, Homo sapiens
aagtaccagttttgt

SEQ ID NO: 1744930 - DNA, 15 bp, Homo sapiens
agtaccagttttgtc

SEQ ID NO: 1744931 - DNA, 15 bp, Homo sapiens
gtaccagttttgtca

SEQ ID NO: 1744932 - DNA, 15 bp, Homo sapiens
taccagttttgtcat

SEQ ID NO: 1744933 - DNA, 15 bp, Homo sapiens
accagttttgtcata

SEQ ID NO: 1744934 - DNA, 15 bp, Homo sapiens
ccagttttgtcataa

SEQ ID NO: 1744935 - DNA, 15 bp, Homo sapiens
cagttttgtcataaa

SEQ ID NO: 1744936 - DNA, 15 bp, Homo sapiens
agttttgtcataaag

SEQ ID NO: 1744937 - DNA, 15 bp, Homo sapiens
gttttgtcataaagc

SEQ ID NO: 1744938 - DNA, 15 bp, Homo sapiens
ttttgtcataaagct

SEQ ID NO: 1744939 - DNA, 15 bp, Homo sapiens
tttgtcataaagcta

SEQ ID NO: 1744940 - DNA, 15 bp, Homo sapiens
ttgtcataaagctag

SEQ ID NO: 1744941 - DNA, 15 bp, Homo sapiens
tgtcataaagctagt

SEQ ID NO: 1744942 - DNA, 15 bp, Homo sapiens
gtcataaagctagtc

SEQ ID NO: 1744943 - DNA, 15 bp, Homo sapiens
tcataaagctagtct

SEQ ID NO: 1744944 - DNA, 15 bp, Homo sapiens
cataaagctagtctt

SEQ ID NO: 1744945 - DNA, 15 bp, Homo sapiens
ataaagctagtcttg

SEQ ID NO: 1744946 - DNA, 15 bp, Homo sapiens
taaagctagtcttga

SEQ ID NO: 1744947 - DNA, 15 bp, Homo sapiens
aaagctagtcttgaa

SEQ ID NO: 1744948 - DNA, 15 bp, Homo sapiens
aagctagtcttgaac

SEQ ID NO: 1744949 - DNA, 15 bp, Homo sapiens
agctagtcttgaaca

SEQ ID NO: 1744950 - DNA, 15 bp, Homo sapiens
gctagtcttgaacag

SEQ ID NO: 1744951 - DNA, 15 bp, Homo sapiens
ctagtcttgaacaga

SEQ ID NO: 1744952 - DNA, 15 bp, Homo sapiens
tagtcttgaacagat

SEQ ID NO: 1744953 - DNA, 15 bp, Homo sapiens
agtcttgaacagatt

SEQ ID NO: 1744954 - DNA, 15 bp, Homo sapiens
gtcttgaacagatta

SEQ ID NO: 1744955 - DNA, 15 bp, Homo sapiens
tcttgaacagattat

SEQ ID NO: 1744956 - DNA, 15 bp, Homo sapiens
cttgaacagattatg

SEQ ID NO: 1744957 - DNA, 15 bp, Homo sapiens
ttgaacagattatgc

SEQ ID NO: 1744958 - DNA, 15 bp, Homo sapiens
tgaacagattatgcc

SEQ ID NO: 1744959 - DNA, 15 bp, Homo sapiens
gaacagattatgcct

SEQ ID NO: 1744960 - DNA, 15 bp, Homo sapiens
aacagattatgcctt

SEQ ID NO: 1744961 - DNA, 15 bp, Homo sapiens
acagattatgccttt

SEQ ID NO: 1744962 - DNA, 15 bp, Homo sapiens
cagattatgcctttg

SEQ ID NO: 1744963 - DNA, 15 bp, Homo sapiens
agattatgcctttgg

SEQ ID NO: 1744964 - DNA, 15 bp, Homo sapiens
gattatgcctttggt

SEQ ID NO: 1744965 - DNA, 15 bp, Homo sapiens
attatgcctttggtt

SEQ ID NO: 1744966 - DNA, 15 bp, Homo sapiens
ttatgcctttggttt

SEQ ID NO: 1744967 - DNA, 15 bp, Homo sapiens
tatgcctttggtttt

SEQ ID NO: 1744968 - DNA, 15 bp, Homo sapiens
atgcctttggttttt

SEQ ID NO: 1744969 - DNA, 15 bp, Homo sapiens
tgcctttggttttta

SEQ ID NO: 1744970 - DNA, 15 bp, Homo sapiens
gcctttggtttttaa

SEQ ID NO: 1744971 - DNA, 15 bp, Homo sapiens
cctttggtttttaat

SEQ ID NO: 1744972 - DNA, 15 bp, Homo sapiens
ctttggtttttaatt

SEQ ID NO: 1744973 - DNA, 15 bp, Homo sapiens
tttggtttttaattt

SEQ ID NO: 1744974 - DNA, 15 bp, Homo sapiens
ttggtttttaattta

SEQ ID NO: 1744975 - DNA, 15 bp, Homo sapiens
tggtttttaatttaa

SEQ ID NO: 1744976 - DNA, 15 bp, Homo sapiens
ggtttttaatttaaa

SEQ ID NO: 1744977 - DNA, 15 bp, Homo sapiens
gtttttaatttaaag

SEQ ID NO: 1744978 - DNA, 15 bp, Homo sapiens
tttttaatttaaagg

SEQ ID NO: 1744979 - DNA, 15 bp, Homo sapiens
ttttaatttaaagga

SEQ ID NO: 1744980 - DNA, 15 bp, Homo sapiens
tttaatttaaaggaa

SEQ ID NO: 1744981 - DNA, 15 bp, Homo sapiens
ttaatttaaaggaaa

SEQ ID NO: 1744982 - DNA, 15 bp, Homo sapiens
taatttaaaggaaat

SEQ ID NO: 1744983 - DNA, 15 bp, Homo sapiens
aatttaaaggaaatt

SEQ ID NO: 1744984 - DNA, 15 bp, Homo sapiens
atttaaaggaaatta

SEQ ID NO: 1744985 - DNA, 15 bp, Homo sapiens
tttaaaggaaattaa

SEQ ID NO: 1744986 - DNA, 15 bp, Homo sapiens
ttaaaggaaattaaa

SEQ ID NO: 1744987 - DNA, 15 bp, Homo sapiens
taaaggaaattaaag

SEQ ID NO: 1744988 - DNA, 15 bp, Homo sapiens
aaaggaaattaaagc

SEQ ID NO: 1744989 - DNA, 15 bp, Homo sapiens
aaggaaattaaagcc

SEQ ID NO: 1744990 - DNA, 15 bp, Homo sapiens
aggaaattaaagcct

SEQ ID NO: 1744991 - DNA, 15 bp, Homo sapiens
ggaaattaaagccta

SEQ ID NO: 1744992 - DNA, 15 bp, Homo sapiens
gaaattaaagcctat

SEQ ID NO: 1744993 - DNA, 15 bp, Homo sapiens
aaattaaagcctatc

SEQ ID NO: 1744994 - DNA, 15 bp, Homo sapiens
aattaaagcctatca

SEQ ID NO: 1744995 - DNA, 15 bp, Homo sapiens
attaaagcctatcaa

SEQ ID NO: 1744996 - DNA, 15 bp, Homo sapiens
ttaaagcctatcaac

SEQ ID NO: 1744997 - DNA, 15 bp, Homo sapiens
taaagcctatcaacg

SEQ ID NO: 1744998 - DNA, 15 bp, Homo sapiens
aaagcctatcaacgt

SEQ ID NO: 1744999 - DNA, 15 bp, Homo sapiens
aagcctatcaacgta

SEQ ID NO: 1745000 - DNA, 15 bp, Homo sapiens
agcctatcaacgtaa

SEQ ID NO: 1745001 - DNA, 15 bp, Homo sapiens
gcctatcaacgtaac

SEQ ID NO: 1745002 - DNA, 15 bp, Homo sapiens
cctatcaacgtaacc

SEQ ID NO: 1745003 - DNA, 15 bp, Homo sapiens
ctatcaacgtaacct

SEQ ID NO: 1745004 - DNA, 15 bp, Homo sapiens
tatcaacgtaacctt

SEQ ID NO: 1745005 - DNA, 15 bp, Homo sapiens
atcaacgtaaccttc

SEQ ID NO: 1745006 - DNA, 15 bp, Homo sapiens
tcaacgtaaccttca

SEQ ID NO: 1745007 - DNA, 15 bp, Homo sapiens
caacgtaaccttcag

SEQ ID NO: 1745008 - DNA, 15 bp, Homo sapiens
aacgtaaccttcagg

SEQ ID NO: 1745009 - DNA, 15 bp, Homo sapiens
acgtaaccttcagga

SEQ ID NO: 1745010 - DNA, 15 bp, Homo sapiens
cgtaaccttcaggat

SEQ ID NO: 1745011 - DNA, 15 bp, Homo sapiens
gtaaccttcaggata

SEQ ID NO: 1745012 - DNA, 15 bp, Homo sapiens
taaccttcaggatac

SEQ ID NO: 1745013 - DNA, 15 bp, Homo sapiens
aaccttcaggatact

SEQ ID NO: 1745014 - DNA, 15 bp, Homo sapiens
accttcaggatactt

SEQ ID NO: 1745015 - DNA, 15 bp, Homo sapiens
ccttcaggatacttt

SEQ ID NO: 1745016 - DNA, 15 bp, Homo sapiens
cttcaggatactttt

SEQ ID NO: 1745017 - DNA, 15 bp, Homo sapiens
ttcaggatacttttg

SEQ ID NO: 1745018 - DNA, 15 bp, Homo sapiens
tcaggatacttttga

SEQ ID NO: 1745019 - DNA, 15 bp, Homo sapiens
caggatacttttgac

SEQ ID NO: 1745020 - DNA, 15 bp, Homo sapiens
aggatacttttgaca

SEQ ID NO: 1745021 - DNA, 15 bp, Homo sapiens
ggatacttttgacag

SEQ ID NO: 1745022 - DNA, 15 bp, Homo sapiens
gatacttttgacaga

SEQ ID NO: 1745023 - DNA, 15 bp, Homo sapiens
atacttttgacagag

SEQ ID NO: 1745024 - DNA, 15 bp, Homo sapiens
tacttttgacagagc

SEQ ID NO: 1745025 - DNA, 15 bp, Homo sapiens
acttttgacagagcc

SEQ ID NO: 1745026 - DNA, 15 bp, Homo sapiens
cttttgacagagccc

SEQ ID NO: 1745027 - DNA, 15 bp, Homo sapiens
ttttgacagagccct

SEQ ID NO: 1745028 - DNA, 15 bp, Homo sapiens
tttgacagagcccta

SEQ ID NO: 1745029 - DNA, 15 bp, Homo sapiens
ttgacagagccctag

SEQ ID NO: 1745030 - DNA, 15 bp, Homo sapiens
tgacagagccctagg

SEQ ID NO: 1745031 - DNA, 15 bp, Homo sapiens
gacagagccctaggg

SEQ ID NO: 1745032 - DNA, 15 bp, Homo sapiens
acagagccctagggc

SEQ ID NO: 1745033 - DNA, 15 bp, Homo sapiens
cagagccctagggct

SEQ ID NO: 1745034 - DNA, 15 bp, Homo sapiens
agagccctagggctt

SEQ ID NO: 1745035 - DNA, 15 bp, Homo sapiens
gagccctagggctta

SEQ ID NO: 1745036 - DNA, 15 bp, Homo sapiens
agccctagggcttat

SEQ ID NO: 1745037 - DNA, 15 bp, Homo sapiens
gccctagggcttatt

SEQ ID NO: 1745038 - DNA, 15 bp, Homo sapiens
ccctagggcttattt

SEQ ID NO: 1745039 - DNA, 15 bp, Homo sapiens
cctagggcttatttt

SEQ ID NO: 1745040 - DNA, 15 bp, Homo sapiens
ctagggcttattttt

SEQ ID NO: 1745041 - DNA, 15 bp, Homo sapiens
tagggcttatttttc

SEQ ID NO: 1745042 - DNA, 15 bp, Homo sapiens
agggcttatttttca

SEQ ID NO: 1745043 - DNA, 15 bp, Homo sapiens
gggcttatttttcat

SEQ ID NO: 1745044 - DNA, 15 bp, Homo sapiens
ggcttatttttcatt

SEQ ID NO: 1745045 - DNA, 15 bp, Homo sapiens
gcttatttttcatta

SEQ ID NO: 1745046 - DNA, 15 bp, Homo sapiens
cttatttttcattat

SEQ ID NO: 1745047 - DNA, 15 bp, Homo sapiens
ttatttttcattatt

SEQ ID NO: 1745048 - DNA, 15 bp, Homo sapiens
tatttttcattattt

SEQ ID NO: 1745049 - DNA, 15 bp, Homo sapiens
atttttcattatttc

SEQ ID NO: 1745050 - DNA, 15 bp, Homo sapiens
tttttcattatttca

SEQ ID NO: 1745051 - DNA, 15 bp, Homo sapiens
ttttcattatttcag

SEQ ID NO: 1745052 - DNA, 15 bp, Homo sapiens
tttcattatttcaga

SEQ ID NO: 1745053 - DNA, 15 bp, Homo sapiens
ttcattatttcagaa

SEQ ID NO: 1745054 - DNA, 15 bp, Homo sapiens
tcattatttcagaag

SEQ ID NO: 1745055 - DNA, 15 bp, Homo sapiens
cattatttcagaagt

SEQ ID NO: 1745056 - DNA, 15 bp, Homo sapiens
attatttcagaagtg

SEQ ID NO: 1745057 - DNA, 15 bp, Homo sapiens
ttatttcagaagtga

SEQ ID NO: 1745058 - DNA, 15 bp, Homo sapiens
tatttcagaagtgaa

SEQ ID NO: 1745059 - DNA, 15 bp, Homo sapiens
atttcagaagtgaaa

SEQ ID NO: 1745060 - DNA, 15 bp, Homo sapiens
tttcagaagtgaaaa

SEQ ID NO: 1745061 - DNA, 15 bp, Homo sapiens
ttcagaagtgaaaac

SEQ ID NO: 1745062 - DNA, 15 bp, Homo sapiens
tcagaagtgaaaaca

SEQ ID NO: 1745063 - DNA, 15 bp, Homo sapiens
cagaagtgaaaacac

SEQ ID NO: 1745064 - DNA, 15 bp, Homo sapiens
agaagtgaaaacacc

SEQ ID NO: 1745065 - DNA, 15 bp, Homo sapiens
gaagtgaaaacacca

SEQ ID NO: 1745066 - DNA, 15 bp, Homo sapiens
aagtgaaaacaccac

SEQ ID NO: 1745067 - DNA, 15 bp, Homo sapiens
agtgaaaacaccact

SEQ ID NO: 1745068 - DNA, 15 bp, Homo sapiens
gtgaaaacaccactt

SEQ ID NO: 1745069 - DNA, 15 bp, Homo sapiens
tgaaaacaccacttc

SEQ ID NO: 1745070 - DNA, 15 bp, Homo sapiens
gaaaacaccacttct

SEQ ID NO: 1745071 - DNA, 15 bp, Homo sapiens
aaaacaccacttcta

SEQ ID NO: 1745072 - DNA, 15 bp, Homo sapiens
aaacaccacttctaa

SEQ ID NO: 1745073 - DNA, 15 bp, Homo sapiens
aacaccacttctaat

SEQ ID NO: 1745074 - DNA, 15 bp, Homo sapiens
acaccacttctaatg

SEQ ID NO: 1745075 - DNA, 15 bp, Homo sapiens
caccacttctaatga

SEQ ID NO: 1745076 - DNA, 15 bp, Homo sapiens
accacttctaatgaa

SEQ ID NO: 1745077 - DNA, 15 bp, Homo sapiens
ccacttctaatgaag

SEQ ID NO: 1745078 - DNA, 15 bp, Homo sapiens
cacttctaatgaagg

SEQ ID NO: 1745079 - DNA, 15 bp, Homo sapiens
acttctaatgaaggt

SEQ ID NO: 1745080 - DNA, 15 bp, Homo sapiens
cttctaatgaaggtc

SEQ ID NO: 1745081 - DNA, 15 bp, Homo sapiens
ttctaatgaaggtct

SEQ ID NO: 1745082 - DNA, 15 bp, Homo sapiens
tctaatgaaggtcta

SEQ ID NO: 1745083 - DNA, 15 bp, Homo sapiens
ctaatgaaggtctat

SEQ ID NO: 1745084 - DNA, 15 bp, Homo sapiens
taatgaaggtctatt

SEQ ID NO: 1745085 - DNA, 15 bp, Homo sapiens
aatgaaggtctattc

SEQ ID NO: 1745086 - DNA, 15 bp, Homo sapiens
atgaaggtctattct

SEQ ID NO: 1745087 - DNA, 15 bp, Homo sapiens
tgaaggtctattctg

SEQ ID NO: 1745088 - DNA, 15 bp, Homo sapiens
gaaggtctattctgt

SEQ ID NO: 1745089 - DNA, 15 bp, Homo sapiens
aaggtctattctgtg

SEQ ID NO: 1745090 - DNA, 15 bp, Homo sapiens
aggtctattctgtgt

SEQ ID NO: 1745091 - DNA, 15 bp, Homo sapiens
ggtctattctgtgtt

SEQ ID NO: 1745092 - DNA, 15 bp, Homo sapiens
gtctattctgtgtta

SEQ ID NO: 1745093 - DNA, 15 bp, Homo sapiens
tctattctgtgttac

SEQ ID NO: 1745094 - DNA, 15 bp, Homo sapiens
ctattctgtgttaca

SEQ ID NO: 1745095 - DNA, 15 bp, Homo sapiens
tattctgtgttacag

SEQ ID NO: 1745096 - DNA, 15 bp, Homo sapiens
attctgtgttacaga

SEQ ID NO: 1745097 - DNA, 15 bp, Homo sapiens
ttctgtgttacagat

SEQ ID NO: 1745098 - DNA, 15 bp, Homo sapiens
tctgtgttacagatt

SEQ ID NO: 1745099 - DNA, 15 bp, Homo sapiens
ctgtgttacagattg

SEQ ID NO: 1745100 - DNA, 15 bp, Homo sapiens
tgtgttacagattgc

SEQ ID NO: 1745101 - DNA, 15 bp, Homo sapiens
gtgttacagattgca

SEQ ID NO: 1745102 - DNA, 15 bp, Homo sapiens
tgttacagattgcaa

SEQ ID NO: 1745103 - DNA, 15 bp, Homo sapiens
gttacagattgcaac

SEQ ID NO: 1745104 - DNA, 15 bp, Homo sapiens
ttacagattgcaaca

SEQ ID NO: 1745105 - DNA, 15 bp, Homo sapiens
tacagattgcaacag

SEQ ID NO: 1745106 - DNA, 15 bp, Homo sapiens
acagattgcaacaga

SEQ ID NO: 1745107 - DNA, 15 bp, Homo sapiens
cagattgcaacagag

SEQ ID NO: 1745108 - DNA, 15 bp, Homo sapiens
agattgcaacagagg

SEQ ID NO: 1745109 - DNA, 15 bp, Homo sapiens
gattgcaacagaggc

SEQ ID NO: 1745110 - DNA, 15 bp, Homo sapiens
attgcaacagaggca

SEQ ID NO: 1745111 - DNA, 15 bp, Homo sapiens
ttgcaacagaggcaa

SEQ ID NO: 1745112 - DNA, 15 bp, Homo sapiens
tgcaacagaggcaat

SEQ ID NO: 1745113 - DNA, 15 bp, Homo sapiens
gcaacagaggcaata

SEQ ID NO: 1745114 - DNA, 15 bp, Homo sapiens
caacagaggcaatag

SEQ ID NO: 1745115 - DNA, 15 bp, Homo sapiens
aacagaggcaataga

SEQ ID NO: 1745116 - DNA, 15 bp, Homo sapiens
acagaggcaatagaa

SEQ ID NO: 1745117 - DNA, 15 bp, Homo sapiens
cagaggcaatagaaa

SEQ ID NO: 1745118 - DNA, 15 bp, Homo sapiens
agaggcaatagaaaa

SEQ ID NO: 1745119 - DNA, 15 bp, Homo sapiens
gaggcaatagaaaat

SEQ ID NO: 1745120 - DNA, 15 bp, Homo sapiens
aggcaatagaaaata

SEQ ID NO: 1745121 - DNA, 15 bp, Homo sapiens
ggcaatagaaaatat

SEQ ID NO: 1745122 - DNA, 15 bp, Homo sapiens
gcaatagaaaatatt

SEQ ID NO: 1745123 - DNA, 15 bp, Homo sapiens
caatagaaaatatta

SEQ ID NO: 1745124 - DNA, 15 bp, Homo sapiens
aatagaaaatattag

SEQ ID NO: 1745125 - DNA, 15 bp, Homo sapiens
atagaaaatattagg

SEQ ID NO: 1745126 - DNA, 15 bp, Homo sapiens
tagaaaatattagga

SEQ ID NO: 1745127 - DNA, 15 bp, Homo sapiens
agaaaatattaggac

SEQ ID NO: 1745128 - DNA, 15 bp, Homo sapiens
gaaaatattaggaca

SEQ ID NO: 1745129 - DNA, 15 bp, Homo sapiens
aaaatattaggacag

SEQ ID NO: 1745130 - DNA, 15 bp, Homo sapiens
aaatattaggacagt

SEQ ID NO: 1745131 - DNA, 15 bp, Homo sapiens
aatattaggacagtt

SEQ ID NO: 1745132 - DNA, 15 bp, Homo sapiens
atattaggacagttg

SEQ ID NO: 1745133 - DNA, 15 bp, Homo sapiens
tattaggacagttgt

SEQ ID NO: 1745134 - DNA, 15 bp, Homo sapiens
attaggacagttgtg

SEQ ID NO: 1745135 - DNA, 15 bp, Homo sapiens
ttaggacagttgtgt

SEQ ID NO: 1745136 - DNA, 15 bp, Homo sapiens
taggacagttgtgtc

SEQ ID NO: 1745137 - DNA, 15 bp, Homo sapiens
aggacagttgtgtct

SEQ ID NO: 1745138 - DNA, 15 bp, Homo sapiens
ggacagttgtgtctt

SEQ ID NO: 1745139 - DNA, 15 bp, Homo sapiens
gacagttgtgtcttt

SEQ ID NO: 1745140 - DNA, 15 bp, Homo sapiens
acagttgtgtctttg

SEQ ID NO: 1745141 - DNA, 15 bp, Homo sapiens
cagttgtgtctttga

SEQ ID NO: 1745142 - DNA, 15 bp, Homo sapiens
agttgtgtctttgac

SEQ ID NO: 1745143 - DNA, 15 bp, Homo sapiens
gttgtgtctttgacc

SEQ ID NO: 1745144 - DNA, 15 bp, Homo sapiens
ttgtgtctttgaccc

SEQ ID NO: 1745145 - DNA, 15 bp, Homo sapiens
tgtgtctttgaccca

SEQ ID NO: 1745146 - DNA, 15 bp, Homo sapiens
gtgtctttgacccag

SEQ ID NO: 1745147 - DNA, 15 bp, Homo sapiens
tgtctttgacccagg

SEQ ID NO: 1745148 - DNA, 15 bp, Homo sapiens
gtctttgacccagga

SEQ ID NO: 1745149 - DNA, 15 bp, Homo sapiens
tctttgacccaggaa

SEQ ID NO: 1745150 - DNA, 15 bp, Homo sapiens
ctttgacccaggaaa

SEQ ID NO: 1745151 - DNA, 15 bp, Homo sapiens
tttgacccaggaaag

SEQ ID NO: 1745152 - DNA, 15 bp, Homo sapiens
ttgacccaggaaaga

SEQ ID NO: 1745153 - DNA, 15 bp, Homo sapiens
tgacccaggaaagaa

SEQ ID NO: 1745154 - DNA, 15 bp, Homo sapiens
acccaggaaagaaaa

SEQ ID NO: 1745155 - DNA, 15 bp, Homo sapiens
cccaggaaagaaaat

SEQ ID NO: 1745156 - DNA, 15 bp, Homo sapiens
ccaggaaagaaaatt

SEQ ID NO: 1745157 - DNA, 15 bp, Homo sapiens
caggaaagaaaattt

SEQ ID NO: 1745158 - DNA, 15 bp, Homo sapiens
aggaaagaaaatttg

SEQ ID NO: 1745159 - DNA, 15 bp, Homo sapiens
ggaaagaaaatttga

SEQ ID NO: 1745160 - DNA, 15 bp, Homo sapiens
gaaagaaaatttgaa

SEQ ID NO: 1745161 - DNA, 15 bp, Homo sapiens
aaagaaaatttgaat

SEQ ID NO: 1745162 - DNA, 15 bp, Homo sapiens
aagaaaatttgaatc

SEQ ID NO: 1745163 - DNA, 15 bp, Homo sapiens
agaaaatttgaatca

SEQ ID NO: 1745164 - DNA, 15 bp, Homo sapiens
gaaaatttgaatcaa

SEQ ID NO: 1745165 - DNA, 15 bp, Homo sapiens
aaaatttgaatcaat

SEQ ID NO: 1745166 - DNA, 15 bp, Homo sapiens
aaatttgaatcaatg

SEQ ID NO: 1745167 - DNA, 15 bp, Homo sapiens
aatttgaatcaatgt

SEQ ID NO: 1745168 - DNA, 15 bp, Homo sapiens
atttgaatcaatgta

SEQ ID NO: 1745169 - DNA, 15 bp, Homo sapiens
tttgaatcaatgtat

SEQ ID NO: 1745170 - DNA, 15 bp, Homo sapiens
ttgaatcaatgtatg

SEQ ID NO: 1745171 - DNA, 15 bp, Homo sapiens
tgaatcaatgtatgt

SEQ ID NO: 1745172 - DNA, 15 bp, Homo sapiens
gaatcaatgtatgtt

SEQ ID NO: 1745173 - DNA, 15 bp, Homo sapiens
aatcaatgtatgttg

SEQ ID NO: 1745174 - DNA, 15 bp, Homo sapiens
atcaatgtatgttga

SEQ ID NO: 1745175 - DNA, 15 bp, Homo sapiens
tcaatgtatgttgaa

SEQ ID NO: 1745176 - DNA, 15 bp, Homo sapiens
caatgtatgttgaaa

SEQ ID NO: 1745177 - DNA, 15 bp, Homo sapiens
aatgtatgttgaaaa

SEQ ID NO: 1745178 - DNA, 15 bp, Homo sapiens
atgtatgttgaaaaa

SEQ ID NO: 1745179 - DNA, 15 bp, Homo sapiens
tgtatgttgaaaaat

SEQ ID NO: 1745180 - DNA, 15 bp, Homo sapiens
gtatgttgaaaaatt

SEQ ID NO: 1745181 - DNA, 15 bp, Homo sapiens
tatgttgaaaaattg

SEQ ID NO: 1745182 - DNA, 15 bp, Homo sapiens
atgttgaaaaattgt

SEQ ID NO: 1745183 - DNA, 15 bp, Homo sapiens
tgttgaaaaattgta

SEQ ID NO: 1745184 - DNA, 15 bp, Homo sapiens
gttgaaaaattgtat

SEQ ID NO: 1745185 - DNA, 15 bp, Homo sapiens
ttgaaaaattgtatg

SEQ ID NO: 1745186 - DNA, 15 bp, Homo sapiens
tgaaaaattgtatgg

SEQ ID NO: 1745187 - DNA, 15 bp, Homo sapiens
gaaaaattgtatgga

SEQ ID NO: 1745188 - DNA, 15 bp, Homo sapiens
aaaaattgtatggac

SEQ ID NO: 1745189 - DNA, 15 bp, Homo sapiens
aaaattgtatggacc

SEQ ID NO: 1745190 - DNA, 15 bp, Homo sapiens
aaattgtatggacct

SEQ ID NO: 1745191 - DNA, 15 bp, Homo sapiens
aattgtatggacctt

SEQ ID NO: 1745192 - DNA, 15 bp, Homo sapiens
attgtatggacctta

SEQ ID NO: 1745193 - DNA, 15 bp, Homo sapiens
ttgtatggaccttac

SEQ ID NO: 1745194 - DNA, 15 bp, Homo sapiens
tgtatggaccttaca

SEQ ID NO: 1745195 - DNA, 15 bp, Homo sapiens
gtatggaccttacag

SEQ ID NO: 1745196 - DNA, 15 bp, Homo sapiens
tatggaccttacagg

SEQ ID NO: 1745197 - DNA, 15 bp, Homo sapiens
atggaccttacaggt

SEQ ID NO: 1745198 - DNA, 15 bp, Homo sapiens
tggaccttacaggta

SEQ ID NO: 1745199 - DNA, 15 bp, Homo sapiens
ggaccttacaggtaa

SEQ ID NO: 1745200 - DNA, 15 bp, Homo sapiens
gaccttacaggtaat

SEQ ID NO: 1745201 - DNA, 15 bp, Homo sapiens
accttacaggtaatg

SEQ ID NO: 1745202 - DNA, 15 bp, Homo sapiens
ccttacaggtaatga

SEQ ID NO: 1745203 - DNA, 15 bp, Homo sapiens
cttacaggtaatgaa

SEQ ID NO: 1745204 - DNA, 15 bp, Homo sapiens
ttacaggtaatgaac

SEQ ID NO: 1745205 - DNA, 15 bp, Homo sapiens
tacaggtaatgaacc

SEQ ID NO: 1745206 - DNA, 15 bp, Homo sapiens
acaggtaatgaacca

SEQ ID NO: 1745207 - DNA, 15 bp, Homo sapiens
caggtaatgaaccat

SEQ ID NO: 1745208 - DNA, 15 bp, Homo sapiens
aggtaatgaaccata

SEQ ID NO: 1745209 - DNA, 15 bp, Homo sapiens
ggtaatgaaccatat

SEQ ID NO: 1745210 - DNA, 15 bp, Homo sapiens
gtaatgaaccatatg

SEQ ID NO: 1745211 - DNA, 15 bp, Homo sapiens
taatgaaccatatga

SEQ ID NO: 1745212 - DNA, 15 bp, Homo sapiens
aatgaaccatatgat

SEQ ID NO: 1745213 - DNA, 15 bp, Homo sapiens
atgaaccatatgatt

SEQ ID NO: 1745214 - DNA, 15 bp, Homo sapiens
tgaaccatatgattc

SEQ ID NO: 1745215 - DNA, 15 bp, Homo sapiens
gaaccatatgattcc

SEQ ID NO: 1745216 - DNA, 15 bp, Homo sapiens
aaccatatgattcct

SEQ ID NO: 1745217 - DNA, 15 bp, Homo sapiens
accatatgattcctg

SEQ ID NO: 1745218 - DNA, 15 bp, Homo sapiens
ccatatgattcctgc

SEQ ID NO: 1745219 - DNA, 15 bp, Homo sapiens
catatgattcctgct

SEQ ID NO: 1745220 - DNA, 15 bp, Homo sapiens
atatgattcctgcta

SEQ ID NO: 1745221 - DNA, 15 bp, Homo sapiens
tatgattcctgctaa

SEQ ID NO: 1745222 - DNA, 15 bp, Homo sapiens
atgattcctgctaag

SEQ ID NO: 1745223 - DNA, 15 bp, Homo sapiens
tgattcctgctaaga

SEQ ID NO: 1745224 - DNA, 15 bp, Homo sapiens
gattcctgctaagaa

SEQ ID NO: 1745225 - DNA, 15 bp, Homo sapiens
attcctgctaagaac

SEQ ID NO: 1745226 - DNA, 15 bp, Homo sapiens
ttcctgctaagaacc

SEQ ID NO: 1745227 - DNA, 15 bp, Homo sapiens
tcctgctaagaacct

SEQ ID NO: 1745228 - DNA, 15 bp, Homo sapiens
cctgctaagaaccta

SEQ ID NO: 1745229 - DNA, 15 bp, Homo sapiens
ctgctaagaacctag

SEQ ID NO: 1745230 - DNA, 15 bp, Homo sapiens
tgctaagaacctagt

SEQ ID NO: 1745231 - DNA, 15 bp, Homo sapiens
gctaagaacctagtg

SEQ ID NO: 1745232 - DNA, 15 bp, Homo sapiens
ctaagaacctagtgc

SEQ ID NO: 1745233 - DNA, 15 bp, Homo sapiens
taagaacctagtgct

SEQ ID NO: 1745234 - DNA, 15 bp, Homo sapiens
aagaacctagtgctt

SEQ ID NO: 1745235 - DNA, 15 bp, Homo sapiens
agaacctagtgcttt

SEQ ID NO: 1745236 - DNA, 15 bp, Homo sapiens
gaacctagtgctttc

SEQ ID NO: 1745237 - DNA, 15 bp, Homo sapiens
aacctagtgctttcc

SEQ ID NO: 1745238 - DNA, 15 bp, Homo sapiens
acctagtgctttcct

SEQ ID NO: 1745239 - DNA, 15 bp, Homo sapiens
cctagtgctttccta

SEQ ID NO: 1745240 - DNA, 15 bp, Homo sapiens
ctagtgctttcctaa

SEQ ID NO: 1745241 - DNA, 15 bp, Homo sapiens
tagtgctttcctaag

SEQ ID NO: 1745242 - DNA, 15 bp, Homo sapiens
agtgctttcctaagg

SEQ ID NO: 1745243 - DNA, 15 bp, Homo sapiens
gtgctttcctaaggc

SEQ ID NO: 1745244 - DNA, 15 bp, Homo sapiens
tgctttcctaaggct

SEQ ID NO: 1745245 - DNA, 15 bp, Homo sapiens
gctttcctaaggctg

SEQ ID NO: 1745246 - DNA, 15 bp, Homo sapiens
ctttcctaaggctga

SEQ ID NO: 1745247 - DNA, 15 bp, Homo sapiens
tttcctaaggctgaa

SEQ ID NO: 1745248 - DNA, 15 bp, Homo sapiens
ttcctaaggctgaat

SEQ ID NO: 1745249 - DNA, 15 bp, Homo sapiens
tcctaaggctgaatt

SEQ ID NO: 1745250 - DNA, 15 bp, Homo sapiens
cctaaggctgaatta

SEQ ID NO: 1745251 - DNA, 15 bp, Homo sapiens
ctaaggctgaattat

SEQ ID NO: 1745252 - DNA, 15 bp, Homo sapiens
taaggctgaattatt

SEQ ID NO: 1745253 - DNA, 15 bp, Homo sapiens
aaggctgaattattg

SEQ ID NO: 1745254 - DNA, 15 bp, Homo sapiens
aggctgaattattgt

SEQ ID NO: 1745255 - DNA, 15 bp, Homo sapiens
ggctgaattattgtc

SEQ ID NO: 1745256 - DNA, 15 bp, Homo sapiens
gctgaattattgtcc

SEQ ID NO: 1745257 - DNA, 15 bp, Homo sapiens
ctgaattattgtccc

SEQ ID NO: 1745258 - DNA, 15 bp, Homo sapiens
tgaattattgtccca

SEQ ID NO: 1745259 - DNA, 15 bp, Homo sapiens
gaattattgtcccaa

SEQ ID NO: 1745260 - DNA, 15 bp, Homo sapiens
aattattgtcccaaa

SEQ ID NO: 1745261 - DNA, 15 bp, Homo sapiens
attattgtcccaaaa

SEQ ID NO: 1745262 - DNA, 15 bp, Homo sapiens
ttattgtcccaaaaa

SEQ ID NO: 1745263 - DNA, 15 bp, Homo sapiens
tattgtcccaaaaag

SEQ ID NO: 1745264 - DNA, 15 bp, Homo sapiens
attgtcccaaaaaga

SEQ ID NO: 1745265 - DNA, 15 bp, Homo sapiens
ttgtcccaaaaagat

SEQ ID NO: 1745266 - DNA, 15 bp, Homo sapiens
tgtcccaaaaagata

SEQ ID NO: 1745267 - DNA, 15 bp, Homo sapiens
gtcccaaaaagataa

SEQ ID NO: 1745268 - DNA, 15 bp, Homo sapiens
tcccaaaaagataat

SEQ ID NO: 1745269 - DNA, 15 bp, Homo sapiens
cccaaaaagataata

SEQ ID NO: 1745270 - DNA, 15 bp, Homo sapiens
ccaaaaagataataa

SEQ ID NO: 1745271 - DNA, 15 bp, Homo sapiens
caaaaagataataaa

SEQ ID NO: 1745272 - DNA, 15 bp, Homo sapiens
aaaaagataataaaa

SEQ ID NO: 1745273 - DNA, 15 bp, Homo sapiens
aaaagataataaaag

SEQ ID NO: 1745274 - DNA, 15 bp, Homo sapiens
aaagataataaaagc

SEQ ID NO: 1745275 - DNA, 15 bp, Homo sapiens
aagataataaaagct

SEQ ID NO: 1745276 - DNA, 15 bp, Homo sapiens
agataataaaagctc

SEQ ID NO: 1745277 - DNA, 15 bp, Homo sapiens
gataataaaagctct

SEQ ID NO: 1745278 - DNA, 15 bp, Homo sapiens
ataataaaagctctg

SEQ ID NO: 1745279 - DNA, 15 bp, Homo sapiens
taataaaagctctgc

SEQ ID NO: 1745280 - DNA, 15 bp, Homo sapiens
aataaaagctctgct

SEQ ID NO: 1745281 - DNA, 15 bp, Homo sapiens
ataaaagctctgctg

SEQ ID NO: 1745282 - DNA, 15 bp, Homo sapiens
taaaagctctgctgc

SEQ ID NO: 1745283 - DNA, 15 bp, Homo sapiens
aaaagctctgctgct

SEQ ID NO: 1745284 - DNA, 15 bp, Homo sapiens
aaagctctgctgctc

SEQ ID NO: 1745285 - DNA, 15 bp, Homo sapiens
aagctctgctgctcc

SEQ ID NO: 1745286 - DNA, 15 bp, Homo sapiens
agctctgctgctcca

SEQ ID NO: 1745287 - DNA, 15 bp, Homo sapiens
gctctgctgctccaa

SEQ ID NO: 1745288 - DNA, 15 bp, Homo sapiens
ctctgctgctccaaa

SEQ ID NO: 1745289 - DNA, 15 bp, Homo sapiens
tctgctgctccaaac

SEQ ID NO: 1745290 - DNA, 15 bp, Homo sapiens
ctgctgctccaaaca

SEQ ID NO: 1745291 - DNA, 15 bp, Homo sapiens
tgctgctccaaacaa

SEQ ID NO: 1745292 - DNA, 15 bp, Homo sapiens
gctgctccaaacaat

SEQ ID NO: 1745293 - DNA, 15 bp, Homo sapiens
ctgctccaaacaatg

SEQ ID NO: 1745294 - DNA, 15 bp, Homo sapiens
tgctccaaacaatga

SEQ ID NO: 1745295 - DNA, 15 bp, Homo sapiens
gctccaaacaatgat

SEQ ID NO: 1745296 - DNA, 15 bp, Homo sapiens
ctccaaacaatgata

SEQ ID NO: 1745297 - DNA, 15 bp, Homo sapiens
tccaaacaatgatat

SEQ ID NO: 1745298 - DNA, 15 bp, Homo sapiens
ccaaacaatgatatg

SEQ ID NO: 1745299 - DNA, 15 bp, Homo sapiens
caaacaatgatatga

SEQ ID NO: 1745300 - DNA, 15 bp, Homo sapiens
aaacaatgatatgac

SEQ ID NO: 1745301 - DNA, 15 bp, Homo sapiens
aacaatgatatgact

SEQ ID NO: 1745302 - DNA, 15 bp, Homo sapiens
acaatgatatgacta

SEQ ID NO: 1745303 - DNA, 15 bp, Homo sapiens
caatgatatgactat

SEQ ID NO: 1745304 - DNA, 15 bp, Homo sapiens
aatgatatgactata

SEQ ID NO: 1745305 - DNA, 15 bp, Homo sapiens
atgatatgactataa

SEQ ID NO: 1745306 - DNA, 15 bp, Homo sapiens
tgatatgactataag

SEQ ID NO: 1745307 - DNA, 15 bp, Homo sapiens
gatatgactataagg

SEQ ID NO: 1745308 - DNA, 15 bp, Homo sapiens
atatgactataaggg

SEQ ID NO: 1745309 - DNA, 15 bp, Homo sapiens
tatgactataagggt

SEQ ID NO: 1745310 - DNA, 15 bp, Homo sapiens
atgactataagggtg

SEQ ID NO: 1745311 - DNA, 15 bp, Homo sapiens
tgactataagggtgg

SEQ ID NO: 1745312 - DNA, 15 bp, Homo sapiens
gactataagggtggc

SEQ ID NO: 1745313 - DNA, 15 bp, Homo sapiens
actataagggtggcc

SEQ ID NO: 1745314 - DNA, 15 bp, Homo sapiens
ctataagggtggcct

SEQ ID NO: 1745315 - DNA, 15 bp, Homo sapiens
tataagggtggcctt

SEQ ID NO: 1745316 - DNA, 15 bp, Homo sapiens
ataagggtggccttt

SEQ ID NO: 1745317 - DNA, 15 bp, Homo sapiens
taagggtggcctttt

SEQ ID NO: 1745318 - DNA, 15 bp, Homo sapiens
aagggtggccttttt

SEQ ID NO: 1745319 - DNA, 15 bp, Homo sapiens
agggtggcctttttt

SEQ ID NO: 1745320 - DNA, 15 bp, Homo sapiens
gggtggccttttttc

SEQ ID NO: 1745321 - DNA, 15 bp, Homo sapiens
ggtggccttttttca

SEQ ID NO: 1745322 - DNA, 15 bp, Homo sapiens
gtggccttttttcaa

SEQ ID NO: 1745323 - DNA, 15 bp, Homo sapiens
tggccttttttcaac

SEQ ID NO: 1745324 - DNA, 15 bp, Homo sapiens
ggccttttttcaaca

SEQ ID NO: 1745325 - DNA, 15 bp, Homo sapiens
gccttttttcaacaa

SEQ ID NO: 1745326 - DNA, 15 bp, Homo sapiens
ccttttttcaacaat

SEQ ID NO: 1745327 - DNA, 15 bp, Homo sapiens
cttttttcaacaatt

SEQ ID NO: 1745328 - DNA, 15 bp, Homo sapiens
ttttttcaacaattc

SEQ ID NO: 1745329 - DNA, 15 bp, Homo sapiens
tttttcaacaattct

SEQ ID NO: 1745330 - DNA, 15 bp, Homo sapiens
ttttcaacaattctg

SEQ ID NO: 1745331 - DNA, 15 bp, Homo sapiens
tttcaacaattctgt

SEQ ID NO: 1745332 - DNA, 15 bp, Homo sapiens
ttcaacaattctgtc

SEQ ID NO: 1745333 - DNA, 15 bp, Homo sapiens
tcaacaattctgtca

SEQ ID NO: 1745334 - DNA, 15 bp, Homo sapiens
caacaattctgtcac

SEQ ID NO: 1745335 - DNA, 15 bp, Homo sapiens
aacaattctgtcact

SEQ ID NO: 1745336 - DNA, 15 bp, Homo sapiens
acaattctgtcactg

SEQ ID NO: 1745337 - DNA, 15 bp, Homo sapiens
caattctgtcactga

SEQ ID NO: 1745338 - DNA, 15 bp, Homo sapiens
aattctgtcactgaa

SEQ ID NO: 1745339 - DNA, 15 bp, Homo sapiens
attctgtcactgaaa

SEQ ID NO: 1745340 - DNA, 15 bp, Homo sapiens
ttctgtcactgaaaa

SEQ ID NO: 1745341 - DNA, 15 bp, Homo sapiens
tctgtcactgaaaat

SEQ ID NO: 1745342 - DNA, 15 bp, Homo sapiens
ctgtcactgaaaata

SEQ ID NO: 1745343 - DNA, 15 bp, Homo sapiens
tgtcactgaaaataa

SEQ ID NO: 1745344 - DNA, 15 bp, Homo sapiens
gtcactgaaaataag

SEQ ID NO: 1745345 - DNA, 15 bp, Homo sapiens
tcactgaaaataagt

SEQ ID NO: 1745346 - DNA, 15 bp, Homo sapiens
cactgaaaataagta

SEQ ID NO: 1745347 - DNA, 15 bp, Homo sapiens
actgaaaataagtag

SEQ ID NO: 1745348 - DNA, 15 bp, Homo sapiens
ctgaaaataagtagc

SEQ ID NO: 1745349 - DNA, 15 bp, Homo sapiens
tgaaaataagtagct

SEQ ID NO: 1745350 - DNA, 15 bp, Homo sapiens
gaaaataagtagctt

SEQ ID NO: 1745351 - DNA, 15 bp, Homo sapiens
aaaataagtagcttt

SEQ ID NO: 1745352 - DNA, 15 bp, Homo sapiens
aaataagtagctttt

SEQ ID NO: 1745353 - DNA, 15 bp, Homo sapiens
aataagtagcttttt

SEQ ID NO: 1745354 - DNA, 15 bp, Homo sapiens
ataagtagctttttg

SEQ ID NO: 1745355 - DNA, 15 bp, Homo sapiens
taagtagctttttga

SEQ ID NO: 1745356 - DNA, 15 bp, Homo sapiens
aagtagctttttgat

SEQ ID NO: 1745357 - DNA, 15 bp, Homo sapiens
agtagctttttgatg

SEQ ID NO: 1745358 - DNA, 15 bp, Homo sapiens
gtagctttttgatgt

SEQ ID NO: 1745359 - DNA, 15 bp, Homo sapiens
tagctttttgatgtg

SEQ ID NO: 1745360 - DNA, 15 bp, Homo sapiens
agctttttgatgtga

SEQ ID NO: 1745361 - DNA, 15 bp, Homo sapiens
gctttttgatgtgac

SEQ ID NO: 1745362 - DNA, 15 bp, Homo sapiens
ctttttgatgtgact

SEQ ID NO: 1745363 - DNA, 15 bp, Homo sapiens
tttttgatgtgacta

SEQ ID NO: 1745364 - DNA, 15 bp, Homo sapiens
ttttgatgtgactag

SEQ ID NO: 1745365 - DNA, 15 bp, Homo sapiens
tttgatgtgactagg

SEQ ID NO: 1745366 - DNA, 15 bp, Homo sapiens
ttgatgtgactagga

SEQ ID NO: 1745367 - DNA, 15 bp, Homo sapiens
tgatgtgactaggac

SEQ ID NO: 1745368 - DNA, 15 bp, Homo sapiens
gatgtgactaggaca

SEQ ID NO: 1745369 - DNA, 15 bp, Homo sapiens
atgtgactaggacac

SEQ ID NO: 1745370 - DNA, 15 bp, Homo sapiens
tgtgactaggacaca

SEQ ID NO: 1745371 - DNA, 15 bp, Homo sapiens
gtgactaggacacag

SEQ ID NO: 1745372 - DNA, 15 bp, Homo sapiens
tgactaggacacaga

SEQ ID NO: 1745373 - DNA, 15 bp, Homo sapiens
gactaggacacagaa

SEQ ID NO: 1745374 - DNA, 15 bp, Homo sapiens
actaggacacagaat

SEQ ID NO: 1745375 - DNA, 15 bp, Homo sapiens
ctaggacacagaatt

SEQ ID NO: 1745376 - DNA, 15 bp, Homo sapiens
taggacacagaatta

SEQ ID NO: 1745377 - DNA, 15 bp, Homo sapiens
aggacacagaattat

SEQ ID NO: 1745378 - DNA, 15 bp, Homo sapiens
ggacacagaattata

SEQ ID NO: 1745379 - DNA, 15 bp, Homo sapiens
gacacagaattatat

SEQ ID NO: 1745380 - DNA, 15 bp, Homo sapiens
acacagaattatatt

SEQ ID NO: 1745381 - DNA, 15 bp, Homo sapiens
cacagaattatattt

SEQ ID NO: 1745382 - DNA, 15 bp, Homo sapiens
acagaattatatttt

SEQ ID NO: 1745383 - DNA, 15 bp, Homo sapiens
cagaattatattttt

SEQ ID NO: 1745384 - DNA, 15 bp, Homo sapiens
agaattatatttttt

SEQ ID NO: 1745385 - DNA, 15 bp, Homo sapiens
gaattatatttttta

SEQ ID NO: 1745386 - DNA, 15 bp, Homo sapiens
aattatattttttac

SEQ ID NO: 1745387 - DNA, 15 bp, Homo sapiens
attatattttttaca

SEQ ID NO: 1745388 - DNA, 15 bp, Homo sapiens
ttatattttttacat

SEQ ID NO: 1745389 - DNA, 15 bp, Homo sapiens
tatattttttacatc

SEQ ID NO: 1745390 - DNA, 15 bp, Homo sapiens
atattttttacatct

SEQ ID NO: 1745391 - DNA, 15 bp, Homo sapiens
attttttacatctta

SEQ ID NO: 1745392 - DNA, 15 bp, Homo sapiens
ttttttacatcttat

SEQ ID NO: 1745393 - DNA, 15 bp, Homo sapiens
tttttacatcttatg

SEQ ID NO: 1745394 - DNA, 15 bp, Homo sapiens
ttttacatcttatgc

SEQ ID NO: 1745395 - DNA, 15 bp, Homo sapiens
tttacatcttatgca

SEQ ID NO: 1745396 - DNA, 15 bp, Homo sapiens
ttacatcttatgcaa

SEQ ID NO: 1745397 - DNA, 15 bp, Homo sapiens
tacatcttatgcaaa

SEQ ID NO: 1745398 - DNA, 15 bp, Homo sapiens
acatcttatgcaaac

SEQ ID NO: 1745399 - DNA, 15 bp, Homo sapiens
catcttatgcaaaca

SEQ ID NO: 1745400 - DNA, 15 bp, Homo sapiens
atcttatgcaaacaa

SEQ ID NO: 1745401 - DNA, 15 bp, Homo sapiens
tcttatgcaaacaac

SEQ ID NO: 1745402 - DNA, 15 bp, Homo sapiens
cttatgcaaacaaca

SEQ ID NO: 1745403 - DNA, 15 bp, Homo sapiens
ttatgcaaacaacaa

SEQ ID NO: 1745404 - DNA, 15 bp, Homo sapiens
tatgcaaacaacaag

SEQ ID NO: 1745405 - DNA, 15 bp, Homo sapiens
atgcaaacaacaaga

SEQ ID NO: 1745406 - DNA, 15 bp, Homo sapiens
tgcaaacaacaagaa

SEQ ID NO: 1745407 - DNA, 15 bp, Homo sapiens
gcaaacaacaagaat

SEQ ID NO: 1745408 - DNA, 15 bp, Homo sapiens
caaacaacaagaata

SEQ ID NO: 1745409 - DNA, 15 bp, Homo sapiens
aaacaacaagaatag

SEQ ID NO: 1745410 - DNA, 15 bp, Homo sapiens
aacaacaagaatagg

SEQ ID NO: 1745411 - DNA, 15 bp, Homo sapiens
acaacaagaataggt

SEQ ID NO: 1745412 - DNA, 15 bp, Homo sapiens
caacaagaataggtc

SEQ ID NO: 1745413 - DNA, 15 bp, Homo sapiens
aacaagaataggtct

SEQ ID NO: 1745414 - DNA, 15 bp, Homo sapiens
acaagaataggtctc

SEQ ID NO: 1745415 - DNA, 15 bp, Homo sapiens
caagaataggtctcc

SEQ ID NO: 1745416 - DNA, 15 bp, Homo sapiens
aagaataggtctcca

SEQ ID NO: 1745417 - DNA, 15 bp, Homo sapiens
agaataggtctccaa

SEQ ID NO: 1745418 - DNA, 15 bp, Homo sapiens
gaataggtctccaag

SEQ ID NO: 1745419 - DNA, 15 bp, Homo sapiens
aataggtctccaaga

SEQ ID NO: 1745420 - DNA, 15 bp, Homo sapiens
ataggtctccaagac

SEQ ID NO: 1745421 - DNA, 15 bp, Homo sapiens
taggtctccaagacg

SEQ ID NO: 1745422 - DNA, 15 bp, Homo sapiens
aggtctccaagacgt

SEQ ID NO: 1745423 - DNA, 15 bp, Homo sapiens
ggtctccaagacgta

SEQ ID NO: 1745424 - DNA, 15 bp, Homo sapiens
gtctccaagacgtaa

SEQ ID NO: 1745425 - DNA, 15 bp, Homo sapiens
tctccaagacgtaaa

SEQ ID NO: 1745426 - DNA, 15 bp, Homo sapiens
ctccaagacgtaaaa

SEQ ID NO: 1745427 - DNA, 15 bp, Homo sapiens
tccaagacgtaaaag

SEQ ID NO: 1745428 - DNA, 15 bp, Homo sapiens
ccaagacgtaaaaga

SEQ ID NO: 1745429 - DNA, 15 bp, Homo sapiens
caagacgtaaaagat

SEQ ID NO: 1745430 - DNA, 15 bp, Homo sapiens
aagacgtaaaagata

SEQ ID NO: 1745431 - DNA, 15 bp, Homo sapiens
agacgtaaaagatat

SEQ ID NO: 1745432 - DNA, 15 bp, Homo sapiens
gacgtaaaagatata

SEQ ID NO: 1745433 - DNA, 15 bp, Homo sapiens
acgtaaaagatatag

SEQ ID NO: 1745434 - DNA, 15 bp, Homo sapiens
cgtaaaagatataga

SEQ ID NO: 1745435 - DNA, 15 bp, Homo sapiens
gtaaaagatatagag

SEQ ID NO: 1745436 - DNA, 15 bp, Homo sapiens
taaaagatatagaga

SEQ ID NO: 1745437 - DNA, 15 bp, Homo sapiens
aaaagatatagagaa

SEQ ID NO: 1745438 - DNA, 15 bp, Homo sapiens
aaagatatagagaat

SEQ ID NO: 1745439 - DNA, 15 bp, Homo sapiens
aagatatagagaatt

SEQ ID NO: 1745440 - DNA, 15 bp, Homo sapiens
agatatagagaattg

SEQ ID NO: 1745441 - DNA, 15 bp, Homo sapiens
gatatagagaattgc

SEQ ID NO: 1745442 - DNA, 15 bp, Homo sapiens
atatagagaattgca

SEQ ID NO: 1745443 - DNA, 15 bp, Homo sapiens
tatagagaattgcac

SEQ ID NO: 1745444 - DNA, 15 bp, Homo sapiens
atagagaattgcaca

SEQ ID NO: 1745445 - DNA, 15 bp, Homo sapiens
tagagaattgcacag

SEQ ID NO: 1745446 - DNA, 15 bp, Homo sapiens
agagaattgcacagt

SEQ ID NO: 1745447 - DNA, 15 bp, Homo sapiens
gagaattgcacagtc

SEQ ID NO: 1745448 - DNA, 15 bp, Homo sapiens
agaattgcacagtct

SEQ ID NO: 1745449 - DNA, 15 bp, Homo sapiens
gaattgcacagtctt

SEQ ID NO: 1745450 - DNA, 15 bp, Homo sapiens
aattgcacagtcttt

SEQ ID NO: 1745451 - DNA, 15 bp, Homo sapiens
attgcacagtctttg

SEQ ID NO: 1745452 - DNA, 15 bp, Homo sapiens
ttgcacagtctttgg

SEQ ID NO: 1745453 - DNA, 15 bp, Homo sapiens
tgcacagtctttggt

SEQ ID NO: 1745454 - DNA, 15 bp, Homo sapiens
gcacagtctttggtt

SEQ ID NO: 1745455 - DNA, 15 bp, Homo sapiens
cacagtctttggtta

SEQ ID NO: 1745456 - DNA, 15 bp, Homo sapiens
acagtctttggttat

SEQ ID NO: 1745457 - DNA, 15 bp, Homo sapiens
cagtctttggttatc

SEQ ID NO: 1745458 - DNA, 15 bp, Homo sapiens
agtctttggttatca

SEQ ID NO: 1745459 - DNA, 15 bp, Homo sapiens
gtctttggttatcag

SEQ ID NO: 1745460 - DNA, 15 bp, Homo sapiens
tctttggttatcagt

SEQ ID NO: 1745461 - DNA, 15 bp, Homo sapiens
ctttggttatcagtg

SEQ ID NO: 1745462 - DNA, 15 bp, Homo sapiens
tttggttatcagtgc

SEQ ID NO: 1745463 - DNA, 15 bp, Homo sapiens
ttggttatcagtgca

SEQ ID NO: 1745464 - DNA, 15 bp, Homo sapiens
tggttatcagtgcag

SEQ ID NO: 1745465 - DNA, 15 bp, Homo sapiens
ggttatcagtgcagg

SEQ ID NO: 1745466 - DNA, 15 bp, Homo sapiens
gttatcagtgcaggc

SEQ ID NO: 1745467 - DNA, 15 bp, Homo sapiens
ttatcagtgcaggca

SEQ ID NO: 1745468 - DNA, 15 bp, Homo sapiens
tatcagtgcaggcaa

SEQ ID NO: 1745469 - DNA, 15 bp, Homo sapiens
atcagtgcaggcaac

SEQ ID NO: 1745470 - DNA, 15 bp, Homo sapiens
tcagtgcaggcaaca

SEQ ID NO: 1745471 - DNA, 15 bp, Homo sapiens
cagtgcaggcaacat

SEQ ID NO: 1745472 - DNA, 15 bp, Homo sapiens
agtgcaggcaacata

SEQ ID NO: 1745473 - DNA, 15 bp, Homo sapiens
gtgcaggcaacataa

SEQ ID NO: 1745474 - DNA, 15 bp, Homo sapiens
tgcaggcaacataaa

SEQ ID NO: 1745475 - DNA, 15 bp, Homo sapiens
gcaggcaacataaat

SEQ ID NO: 1745476 - DNA, 15 bp, Homo sapiens
caggcaacataaata

SEQ ID NO: 1745477 - DNA, 15 bp, Homo sapiens
aggcaacataaataa

SEQ ID NO: 1745478 - DNA, 15 bp, Homo sapiens
ggcaacataaataac

SEQ ID NO: 1745479 - DNA, 15 bp, Homo sapiens
gcaacataaataacc

SEQ ID NO: 1745480 - DNA, 15 bp, Homo sapiens
caacataaataacct

SEQ ID NO: 1745481 - DNA, 15 bp, Homo sapiens
aacataaataaccta

SEQ ID NO: 1745482 - DNA, 15 bp, Homo sapiens
acataaataacctat

SEQ ID NO: 1745483 - DNA, 15 bp, Homo sapiens
cataaataacctatc

SEQ ID NO: 1745484 - DNA, 15 bp, Homo sapiens
ataaataacctatct

SEQ ID NO: 1745485 - DNA, 15 bp, Homo sapiens
taaataacctatctg

SEQ ID NO: 1745486 - DNA, 15 bp, Homo sapiens
aaataacctatctgg

SEQ ID NO: 1745487 - DNA, 15 bp, Homo sapiens
aataacctatctggg

SEQ ID NO: 1745488 - DNA, 15 bp, Homo sapiens
ataacctatctgggt

SEQ ID NO: 1745489 - DNA, 15 bp, Homo sapiens
taacctatctgggtg

SEQ ID NO: 1745490 - DNA, 15 bp, Homo sapiens
aacctatctgggtga

SEQ ID NO: 1745491 - DNA, 15 bp, Homo sapiens
acctatctgggtgac

SEQ ID NO: 1745492 - DNA, 15 bp, Homo sapiens
cctatctgggtgact

SEQ ID NO: 1745493 - DNA, 15 bp, Homo sapiens
ctatctgggtgactt

SEQ ID NO: 1745494 - DNA, 15 bp, Homo sapiens
tatctgggtgactta

SEQ ID NO: 1745495 - DNA, 15 bp, Homo sapiens
atctgggtgacttaa

SEQ ID NO: 1745496 - DNA, 15 bp, Homo sapiens
tctgggtgacttaag

SEQ ID NO: 1745497 - DNA, 15 bp, Homo sapiens
ctgggtgacttaaga

SEQ ID NO: 1745498 - DNA, 15 bp, Homo sapiens
tgggtgacttaagac

SEQ ID NO: 1745499 - DNA, 15 bp, Homo sapiens
gggtgacttaagaca

SEQ ID NO: 1745500 - DNA, 15 bp, Homo sapiens
ggtgacttaagacaa

SEQ ID NO: 1745501 - DNA, 15 bp, Homo sapiens
gtgacttaagacaaa

SEQ ID NO: 1745502 - DNA, 15 bp, Homo sapiens
tgacttaagacaaac

SEQ ID NO: 1745503 - DNA, 15 bp, Homo sapiens
gacttaagacaaaca

SEQ ID NO: 1745504 - DNA, 15 bp, Homo sapiens
acttaagacaaacat

SEQ ID NO: 1745505 - DNA, 15 bp, Homo sapiens
cttaagacaaacatt

SEQ ID NO: 1745506 - DNA, 15 bp, Homo sapiens
ttaagacaaacattc

SEQ ID NO: 1745507 - DNA, 15 bp, Homo sapiens
taagacaaacattcc

SEQ ID NO: 1745508 - DNA, 15 bp, Homo sapiens
aagacaaacattcct

SEQ ID NO: 1745509 - DNA, 15 bp, Homo sapiens
agacaaacattcctt

SEQ ID NO: 1745510 - DNA, 15 bp, Homo sapiens
gacaaacattccttt

SEQ ID NO: 1745511 - DNA, 15 bp, Homo sapiens
acaaacattccttta

SEQ ID NO: 1745512 - DNA, 15 bp, Homo sapiens
caaacattcctttaa

SEQ ID NO: 1745513 - DNA, 15 bp, Homo sapiens
aaacattcctttaag

SEQ ID NO: 1745514 - DNA, 15 bp, Homo sapiens
aacattcctttaagg

SEQ ID NO: 1745515 - DNA, 15 bp, Homo sapiens
acattcctttaagga

SEQ ID NO: 1745516 - DNA, 15 bp, Homo sapiens
cattcctttaaggaa

SEQ ID NO: 1745517 - DNA, 15 bp, Homo sapiens
attcctttaaggaat

SEQ ID NO: 1745518 - DNA, 15 bp, Homo sapiens
ttcctttaaggaatt

SEQ ID NO: 1745519 - DNA, 15 bp, Homo sapiens
tcctttaaggaattg

SEQ ID NO: 1745520 - DNA, 15 bp, Homo sapiens
cctttaaggaattgc

SEQ ID NO: 1745521 - DNA, 15 bp, Homo sapiens
ctttaaggaattgct

SEQ ID NO: 1745522 - DNA, 15 bp, Homo sapiens
tttaaggaattgctc

SEQ ID NO: 1745523 - DNA, 15 bp, Homo sapiens
ttaaggaattgctca

SEQ ID NO: 1745524 - DNA, 15 bp, Homo sapiens
taaggaattgctcaa

SEQ ID NO: 1745525 - DNA, 15 bp, Homo sapiens
aaggaattgctcaaa

SEQ ID NO: 1745526 - DNA, 15 bp, Homo sapiens
aggaattgctcaaac

SEQ ID NO: 1745527 - DNA, 15 bp, Homo sapiens
ggaattgctcaaacc

SEQ ID NO: 1745528 - DNA, 15 bp, Homo sapiens
gaattgctcaaacct

SEQ ID NO: 1745529 - DNA, 15 bp, Homo sapiens
aattgctcaaacctt

SEQ ID NO: 1745530 - DNA, 15 bp, Homo sapiens
attgctcaaaccttt

SEQ ID NO: 1745531 - DNA, 15 bp, Homo sapiens
ttgctcaaacctttc

SEQ ID NO: 1745532 - DNA, 15 bp, Homo sapiens
tgctcaaacctttct

SEQ ID NO: 1745533 - DNA, 15 bp, Homo sapiens
gctcaaacctttctt

SEQ ID NO: 1745534 - DNA, 15 bp, Homo sapiens
ctcaaacctttcttt

SEQ ID NO: 1745535 - DNA, 15 bp, Homo sapiens
tcaaacctttctttg

SEQ ID NO: 1745536 - DNA, 15 bp, Homo sapiens
caaacctttctttgc

SEQ ID NO: 1745537 - DNA, 15 bp, Homo sapiens
aaacctttctttgca

SEQ ID NO: 1745538 - DNA, 15 bp, Homo sapiens
aacctttctttgcag

SEQ ID NO: 1745539 - DNA, 15 bp, Homo sapiens
acctttctttgcagt

SEQ ID NO: 1745540 - DNA, 15 bp, Homo sapiens
cctttctttgcagtg

SEQ ID NO: 1745541 - DNA, 15 bp, Homo sapiens
ctttctttgcagtgt

SEQ ID NO: 1745542 - DNA, 15 bp, Homo sapiens
tttctttgcagtgtg

SEQ ID NO: 1745543 - DNA, 15 bp, Homo sapiens
ttctttgcagtgtgt

SEQ ID NO: 1745544 - DNA, 15 bp, Homo sapiens
tctttgcagtgtgta

SEQ ID NO: 1745545 - DNA, 15 bp, Homo sapiens
ctttgcagtgtgtag

SEQ ID NO: 1745546 - DNA, 15 bp, Homo sapiens
tttgcagtgtgtaga

SEQ ID NO: 1745547 - DNA, 15 bp, Homo sapiens
ttgcagtgtgtagac

SEQ ID NO: 1745548 - DNA, 15 bp, Homo sapiens
tgcagtgtgtagact

SEQ ID NO: 1745549 - DNA, 15 bp, Homo sapiens
gcagtgtgtagactg

SEQ ID NO: 1745550 - DNA, 15 bp, Homo sapiens
cagtgtgtagactga

SEQ ID NO: 1745551 - DNA, 15 bp, Homo sapiens
agtgtgtagactgaa

SEQ ID NO: 1745552 - DNA, 15 bp, Homo sapiens
gtgtgtagactgaac

SEQ ID NO: 1745553 - DNA, 15 bp, Homo sapiens
tgtgtagactgaacc

SEQ ID NO: 1745554 - DNA, 15 bp, Homo sapiens
gtgtagactgaacca

SEQ ID NO: 1745555 - DNA, 15 bp, Homo sapiens
tgtagactgaaccaa

SEQ ID NO: 1745556 - DNA, 15 bp, Homo sapiens
gtagactgaaccaaa

SEQ ID NO: 1745557 - DNA, 15 bp, Homo sapiens
tagactgaaccaaaa

SEQ ID NO: 1745558 - DNA, 15 bp, Homo sapiens
agactgaaccaaaag

SEQ ID NO: 1745559 - DNA, 15 bp, Homo sapiens
gactgaaccaaaagt

SEQ ID NO: 1745560 - DNA, 15 bp, Homo sapiens
actgaaccaaaagtg

SEQ ID NO: 1745561 - DNA, 15 bp, Homo sapiens
ctgaaccaaaagtga

SEQ ID NO: 1745562 - DNA, 15 bp, Homo sapiens
tgaaccaaaagtgag

SEQ ID NO: 1745563 - DNA, 15 bp, Homo sapiens
gaaccaaaagtgaga

SEQ ID NO: 1745564 - DNA, 15 bp, Homo sapiens
aaccaaaagtgagac

SEQ ID NO: 1745565 - DNA, 15 bp, Homo sapiens
accaaaagtgagact

SEQ ID NO: 1745566 - DNA, 15 bp, Homo sapiens
ccaaaagtgagactt

SEQ ID NO: 1745567 - DNA, 15 bp, Homo sapiens
caaaagtgagacttg

SEQ ID NO: 1745568 - DNA, 15 bp, Homo sapiens
aaaagtgagacttgc

SEQ ID NO: 1745569 - DNA, 15 bp, Homo sapiens
aaagtgagacttgct

SEQ ID NO: 1745570 - DNA, 15 bp, Homo sapiens
aagtgagacttgcta

SEQ ID NO: 1745571 - DNA, 15 bp, Homo sapiens
agtgagacttgctat

SEQ ID NO: 1745572 - DNA, 15 bp, Homo sapiens
gtgagacttgctatt

SEQ ID NO: 1745573 - DNA, 15 bp, Homo sapiens
tgagacttgctattg

SEQ ID NO: 1745574 - DNA, 15 bp, Homo sapiens
gagacttgctattgg

SEQ ID NO: 1745575 - DNA, 15 bp, Homo sapiens
agacttgctattggg

SEQ ID NO: 1745576 - DNA, 15 bp, Homo sapiens
gacttgctattgggt

SEQ ID NO: 1745577 - DNA, 15 bp, Homo sapiens
acttgctattgggta

SEQ ID NO: 1745578 - DNA, 15 bp, Homo sapiens
cttgctattgggtat

SEQ ID NO: 1745579 - DNA, 15 bp, Homo sapiens
ttgctattgggtatg

SEQ ID NO: 1745580 - DNA, 15 bp, Homo sapiens
tgctattgggtatgt

SEQ ID NO: 1745581 - DNA, 15 bp, Homo sapiens
gctattgggtatgtt

SEQ ID NO: 1745582 - DNA, 15 bp, Homo sapiens
ctattgggtatgttc

SEQ ID NO: 1745583 - DNA, 15 bp, Homo sapiens
tattgggtatgttcc

SEQ ID NO: 1745584 - DNA, 15 bp, Homo sapiens
attgggtatgttcca

SEQ ID NO: 1745585 - DNA, 15 bp, Homo sapiens
ttgggtatgttccag

SEQ ID NO: 1745586 - DNA, 15 bp, Homo sapiens
tgggtatgttccaga

SEQ ID NO: 1745587 - DNA, 15 bp, Homo sapiens
gggtatgttccagag

SEQ ID NO: 1745588 - DNA, 15 bp, Homo sapiens
ggtatgttccagagg

SEQ ID NO: 1745589 - DNA, 15 bp, Homo sapiens
gtatgttccagagga

SEQ ID NO: 1745590 - DNA, 15 bp, Homo sapiens
tatgttccagaggaa

SEQ ID NO: 1745591 - DNA, 15 bp, Homo sapiens
atgttccagaggaaa

SEQ ID NO: 1745592 - DNA, 15 bp, Homo sapiens
tgttccagaggaaag

SEQ ID NO: 1745593 - DNA, 15 bp, Homo sapiens
gttccagaggaaagt

SEQ ID NO: 1745594 - DNA, 15 bp, Homo sapiens
ttccagaggaaagta

SEQ ID NO: 1745595 - DNA, 15 bp, Homo sapiens
tccagaggaaagtat

SEQ ID NO: 1745596 - DNA, 15 bp, Homo sapiens
ccagaggaaagtatt

SEQ ID NO: 1745597 - DNA, 15 bp, Homo sapiens
cagaggaaagtattt

SEQ ID NO: 1745598 - DNA, 15 bp, Homo sapiens
agaggaaagtatttc

SEQ ID NO: 1745599 - DNA, 15 bp, Homo sapiens
gaggaaagtatttca

SEQ ID NO: 1745600 - DNA, 15 bp, Homo sapiens
aggaaagtatttcat

SEQ ID NO: 1745601 - DNA, 15 bp, Homo sapiens
ggaaagtatttcatt

SEQ ID NO: 1745602 - DNA, 15 bp, Homo sapiens
gaaagtatttcattt

SEQ ID NO: 1745603 - DNA, 15 bp, Homo sapiens
aaagtatttcatttg

SEQ ID NO: 1745604 - DNA, 15 bp, Homo sapiens
aagtatttcatttgt

SEQ ID NO: 1745605 - DNA, 15 bp, Homo sapiens
agtatttcatttgtt

SEQ ID NO: 1745606 - DNA, 15 bp, Homo sapiens
gtatttcatttgttc

SEQ ID NO: 1745607 - DNA, 15 bp, Homo sapiens
tatttcatttgttct

SEQ ID NO: 1745608 - DNA, 15 bp, Homo sapiens
atttcatttgttctc

SEQ ID NO: 1745609 - DNA, 15 bp, Homo sapiens
tttcatttgttctct

SEQ ID NO: 1745610 - DNA, 15 bp, Homo sapiens
ttcatttgttctctg

SEQ ID NO: 1745611 - DNA, 15 bp, Homo sapiens
tcatttgttctctga

SEQ ID NO: 1745612 - DNA, 15 bp, Homo sapiens
catttgttctctgaa

SEQ ID NO: 1745613 - DNA, 15 bp, Homo sapiens
atttgttctctgaat

SEQ ID NO: 1745614 - DNA, 15 bp, Homo sapiens
tttgttctctgaatg

SEQ ID NO: 1745615 - DNA, 15 bp, Homo sapiens
ttgttctctgaatga

SEQ ID NO: 1745616 - DNA, 15 bp, Homo sapiens
tgttctctgaatgag

SEQ ID NO: 1745617 - DNA, 15 bp, Homo sapiens
gttctctgaatgagg

SEQ ID NO: 1745618 - DNA, 15 bp, Homo sapiens
ttctctgaatgagga

SEQ ID NO: 1745619 - DNA, 15 bp, Homo sapiens
tctctgaatgaggac

SEQ ID NO: 1745620 - DNA, 15 bp, Homo sapiens
ctctgaatgaggacc

SEQ ID NO: 1745621 - DNA, 15 bp, Homo sapiens
tctgaatgaggacca

SEQ ID NO: 1745622 - DNA, 15 bp, Homo sapiens
ctgaatgaggaccag

SEQ ID NO: 1745623 - DNA, 15 bp, Homo sapiens
tgaatgaggaccaga

SEQ ID NO: 1745624 - DNA, 15 bp, Homo sapiens
gaatgaggaccagat

SEQ ID NO: 1745625 - DNA, 15 bp, Homo sapiens
aatgaggaccagatc

SEQ ID NO: 1745626 - DNA, 15 bp, Homo sapiens
atgaggaccagatcc

SEQ ID NO: 1745627 - DNA, 15 bp, Homo sapiens
tgaggaccagatcca

SEQ ID NO: 1745628 - DNA, 15 bp, Homo sapiens
gaggaccagatccaa

SEQ ID NO: 1745629 - DNA, 15 bp, Homo sapiens
aggaccagatccaac

SEQ ID NO: 1745630 - DNA, 15 bp, Homo sapiens
ggaccagatccaacc

SEQ ID NO: 1745631 - DNA, 15 bp, Homo sapiens
gaccagatccaacct

SEQ ID NO: 1745632 - DNA, 15 bp, Homo sapiens
accagatccaaccta

SEQ ID NO: 1745633 - DNA, 15 bp, Homo sapiens
ccagatccaacctac

SEQ ID NO: 1745634 - DNA, 15 bp, Homo sapiens
cagatccaacctact

SEQ ID NO: 1745635 - DNA, 15 bp, Homo sapiens
agatccaacctactc

SEQ ID NO: 1745636 - DNA, 15 bp, Homo sapiens
gatccaacctactct

SEQ ID NO: 1745637 - DNA, 15 bp, Homo sapiens
atccaacctactctg

SEQ ID NO: 1745638 - DNA, 15 bp, Homo sapiens
tccaacctactctga

SEQ ID NO: 1745639 - DNA, 15 bp, Homo sapiens
ccaacctactctgaa

SEQ ID NO: 1745640 - DNA, 15 bp, Homo sapiens
caacctactctgaag

SEQ ID NO: 1745641 - DNA, 15 bp, Homo sapiens
aacctactctgaaga

SEQ ID NO: 1745642 - DNA, 15 bp, Homo sapiens
acctactctgaagat

SEQ ID NO: 1745643 - DNA, 15 bp, Homo sapiens
cctactctgaagata

SEQ ID NO: 1745644 - DNA, 15 bp, Homo sapiens
ctactctgaagataa

SEQ ID NO: 1745645 - DNA, 15 bp, Homo sapiens
tactctgaagataaa

SEQ ID NO: 1745646 - DNA, 15 bp, Homo sapiens
actctgaagataaag

SEQ ID NO: 1745647 - DNA, 15 bp, Homo sapiens
ctctgaagataaaga

SEQ ID NO: 1745648 - DNA, 15 bp, Homo sapiens
tctgaagataaagaa

SEQ ID NO: 1745649 - DNA, 15 bp, Homo sapiens
ctgaagataaagaaa

SEQ ID NO: 1745650 - DNA, 15 bp, Homo sapiens
tgaagataaagaaac

SEQ ID NO: 1745651 - DNA, 15 bp, Homo sapiens
gaagataaagaaaca

SEQ ID NO: 1745652 - DNA, 15 bp, Homo sapiens
aagataaagaaacac

SEQ ID NO: 1745653 - DNA, 15 bp, Homo sapiens
agataaagaaacaca

SEQ ID NO: 1745654 - DNA, 15 bp, Homo sapiens
gataaagaaacacag

SEQ ID NO: 1745655 - DNA, 15 bp, Homo sapiens
ataaagaaacacaga

SEQ ID NO: 1745656 - DNA, 15 bp, Homo sapiens
taaagaaacacagac

SEQ ID NO: 1745657 - DNA, 15 bp, Homo sapiens
aaagaaacacagact

SEQ ID NO: 1745658 - DNA, 15 bp, Homo sapiens
aagaaacacagacta

SEQ ID NO: 1745659 - DNA, 15 bp, Homo sapiens
agaaacacagactat

SEQ ID NO: 1745660 - DNA, 15 bp, Homo sapiens
gaaacacagactatt

SEQ ID NO: 1745661 - DNA, 15 bp, Homo sapiens
aaacacagactattt

SEQ ID NO: 1745662 - DNA, 15 bp, Homo sapiens
aacacagactatttc

SEQ ID NO: 1745663 - DNA, 15 bp, Homo sapiens
acacagactatttca

SEQ ID NO: 1745664 - DNA, 15 bp, Homo sapiens
cacagactatttcag

SEQ ID NO: 1745665 - DNA, 15 bp, Homo sapiens
acagactatttcagt

SEQ ID NO: 1745666 - DNA, 15 bp, Homo sapiens
cagactatttcagtg

SEQ ID NO: 1745667 - DNA, 15 bp, Homo sapiens
agactatttcagtgg

SEQ ID NO: 1745668 - DNA, 15 bp, Homo sapiens
gactatttcagtggt

SEQ ID NO: 1745669 - DNA, 15 bp, Homo sapiens
actatttcagtggtt

SEQ ID NO: 1745670 - DNA, 15 bp, Homo sapiens
ctatttcagtggttt

SEQ ID NO: 1745671 - DNA, 15 bp, Homo sapiens
tatttcagtggttta

SEQ ID NO: 1745672 - DNA, 15 bp, Homo sapiens
atttcagtggtttat

SEQ ID NO: 1745673 - DNA, 15 bp, Homo sapiens
tttcagtggtttata

SEQ ID NO: 1745674 - DNA, 15 bp, Homo sapiens
ttcagtggtttatag

SEQ ID NO: 1745675 - DNA, 15 bp, Homo sapiens
tcagtggtttatagt

SEQ ID NO: 1745676 - DNA, 15 bp, Homo sapiens
cagtggtttatagtt

SEQ ID NO: 1745677 - DNA, 15 bp, Homo sapiens
agtggtttatagttg

SEQ ID NO: 1745678 - DNA, 15 bp, Homo sapiens
gtggtttatagttga

SEQ ID NO: 1745679 - DNA, 15 bp, Homo sapiens
tggtttatagttgag

SEQ ID NO: 1745680 - DNA, 15 bp, Homo sapiens
ggtttatagttgagc

SEQ ID NO: 1745681 - DNA, 15 bp, Homo sapiens
gtttatagttgagca

SEQ ID NO: 1745682 - DNA, 15 bp, Homo sapiens
tttatagttgagcaa

SEQ ID NO: 1745683 - DNA, 15 bp, Homo sapiens
ttatagttgagcaat

SEQ ID NO: 1745684 - DNA, 15 bp, Homo sapiens
tatagttgagcaatt

SEQ ID NO: 1745685 - DNA, 15 bp, Homo sapiens
atagttgagcaattc

SEQ ID NO: 1745686 - DNA, 15 bp, Homo sapiens
tagttgagcaattca

SEQ ID NO: 1745687 - DNA, 15 bp, Homo sapiens
agttgagcaattcaa

SEQ ID NO: 1745688 - DNA, 15 bp, Homo sapiens
gttgagcaattcaag

SEQ ID NO: 1745689 - DNA, 15 bp, Homo sapiens
ttgagcaattcaaga

SEQ ID NO: 1745690 - DNA, 15 bp, Homo sapiens
tgagcaattcaagaa

SEQ ID NO: 1745691 - DNA, 15 bp, Homo sapiens
gagcaattcaagaaa

SEQ ID NO: 1745692 - DNA, 15 bp, Homo sapiens
agcaattcaagaaac

SEQ ID NO: 1745693 - DNA, 15 bp, Homo sapiens
gcaattcaagaaact

SEQ ID NO: 1745694 - DNA, 15 bp, Homo sapiens
caattcaagaaactc

SEQ ID NO: 1745695 - DNA, 15 bp, Homo sapiens
aattcaagaaactcc

SEQ ID NO: 1745696 - DNA, 15 bp, Homo sapiens
attcaagaaactcct

SEQ ID NO: 1745697 - DNA, 15 bp, Homo sapiens
ttcaagaaactccta

SEQ ID NO: 1745698 - DNA, 15 bp, Homo sapiens
tcaagaaactcctaa

SEQ ID NO: 1745699 - DNA, 15 bp, Homo sapiens
caagaaactcctaat

SEQ ID NO: 1745700 - DNA, 15 bp, Homo sapiens
aagaaactcctaatg

SEQ ID NO: 1745701 - DNA, 15 bp, Homo sapiens
agaaactcctaatgg

SEQ ID NO: 1745702 - DNA, 15 bp, Homo sapiens
gaaactcctaatggc

SEQ ID NO: 1745703 - DNA, 15 bp, Homo sapiens
aaactcctaatggca

SEQ ID NO: 1745704 - DNA, 15 bp, Homo sapiens
aactcctaatggcac

SEQ ID NO: 1745705 - DNA, 15 bp, Homo sapiens
actcctaatggcacc

SEQ ID NO: 1745706 - DNA, 15 bp, Homo sapiens
ctcctaatggcacca

SEQ ID NO: 1745707 - DNA, 15 bp, Homo sapiens
tcctaatggcaccat

SEQ ID NO: 1745708 - DNA, 15 bp, Homo sapiens
cctaatggcaccatt

SEQ ID NO: 1745709 - DNA, 15 bp, Homo sapiens
ctaatggcaccattt

SEQ ID NO: 1745710 - DNA, 15 bp, Homo sapiens
taatggcaccatttg

SEQ ID NO: 1745711 - DNA, 15 bp, Homo sapiens
aatggcaccatttgc

SEQ ID NO: 1745712 - DNA, 15 bp, Homo sapiens
atggcaccatttgcc

SEQ ID NO: 1745713 - DNA, 15 bp, Homo sapiens
tggcaccatttgcca

SEQ ID NO: 1745714 - DNA, 15 bp, Homo sapiens
ggcaccatttgccac

SEQ ID NO: 1745715 - DNA, 15 bp, Homo sapiens
gcaccatttgccact

SEQ ID NO: 1745716 - DNA, 15 bp, Homo sapiens
caccatttgccactc

SEQ ID NO: 1745717 - DNA, 15 bp, Homo sapiens
accatttgccactca

SEQ ID NO: 1745718 - DNA, 15 bp, Homo sapiens
ccatttgccactcat

SEQ ID NO: 1745719 - DNA, 15 bp, Homo sapiens
catttgccactcatt

SEQ ID NO: 1745720 - DNA, 15 bp, Homo sapiens
atttgccactcattt

SEQ ID NO: 1745721 - DNA, 15 bp, Homo sapiens
tttgccactcatttc

SEQ ID NO: 1745722 - DNA, 15 bp, Homo sapiens
ttgccactcatttcc

SEQ ID NO: 1745723 - DNA, 15 bp, Homo sapiens
tgccactcatttcca

SEQ ID NO: 1745724 - DNA, 15 bp, Homo sapiens
gccactcatttccac

SEQ ID NO: 1745725 - DNA, 15 bp, Homo sapiens
ccactcatttccact

SEQ ID NO: 1745726 - DNA, 15 bp, Homo sapiens
cactcatttccactg

SEQ ID NO: 1745727 - DNA, 15 bp, Homo sapiens
actcatttccactgc

SEQ ID NO: 1745728 - DNA, 15 bp, Homo sapiens
ctcatttccactgca

SEQ ID NO: 1745729 - DNA, 15 bp, Homo sapiens
tcatttccactgcag

SEQ ID NO: 1745730 - DNA, 15 bp, Homo sapiens
catttccactgcagc

SEQ ID NO: 1745731 - DNA, 15 bp, Homo sapiens
atttccactgcagcc

SEQ ID NO: 1745732 - DNA, 15 bp, Homo sapiens
tttccactgcagcct

SEQ ID NO: 1745733 - DNA, 15 bp, Homo sapiens
ttccactgcagcctg

SEQ ID NO: 1745734 - DNA, 15 bp, Homo sapiens
tccactgcagcctga

SEQ ID NO: 1745735 - DNA, 15 bp, Homo sapiens
ccactgcagcctgat

SEQ ID NO: 1745736 - DNA, 15 bp, Homo sapiens
cactgcagcctgatt

SEQ ID NO: 1745737 - DNA, 15 bp, Homo sapiens
actgcagcctgattt

SEQ ID NO: 1745738 - DNA, 15 bp, Homo sapiens
ctgcagcctgatttt

SEQ ID NO: 1745739 - DNA, 15 bp, Homo sapiens
tgcagcctgatttta

SEQ ID NO: 1745740 - DNA, 15 bp, Homo sapiens
gcagcctgattttat

SEQ ID NO: 1745741 - DNA, 15 bp, Homo sapiens
cagcctgattttata

SEQ ID NO: 1745742 - DNA, 15 bp, Homo sapiens
agcctgattttataa

SEQ ID NO: 1745743 - DNA, 15 bp, Homo sapiens
gcctgattttataaa

SEQ ID NO: 1745744 - DNA, 15 bp, Homo sapiens
cctgattttataaat

SEQ ID NO: 1745745 - DNA, 15 bp, Homo sapiens
ctgattttataaatg

SEQ ID NO: 1745746 - DNA, 15 bp, Homo sapiens
tgattttataaatga

SEQ ID NO: 1745747 - DNA, 15 bp, Homo sapiens
gattttataaatgag

SEQ ID NO: 1745748 - DNA, 15 bp, Homo sapiens
attttataaatgagt

SEQ ID NO: 1745749 - DNA, 15 bp, Homo sapiens
ttttataaatgagta

SEQ ID NO: 1745750 - DNA, 15 bp, Homo sapiens
tttataaatgagtat

SEQ ID NO: 1745751 - DNA, 15 bp, Homo sapiens
ttataaatgagtatg

SEQ ID NO: 1745752 - DNA, 15 bp, Homo sapiens
tataaatgagtatgt

SEQ ID NO: 1745753 - DNA, 15 bp, Homo sapiens
ataaatgagtatgtt

SEQ ID NO: 1745754 - DNA, 15 bp, Homo sapiens
taaatgagtatgttt

SEQ ID NO: 1745755 - DNA, 15 bp, Homo sapiens
aaatgagtatgtttt

SEQ ID NO: 1745756 - DNA, 15 bp, Homo sapiens
aatgagtatgtttta

SEQ ID NO: 1745757 - DNA, 15 bp, Homo sapiens
atgagtatgttttaa

SEQ ID NO: 1745758 - DNA, 15 bp, Homo sapiens
tgagtatgttttaac

SEQ ID NO: 1745759 - DNA, 15 bp, Homo sapiens
gagtatgttttaaca

SEQ ID NO: 1745760 - DNA, 15 bp, Homo sapiens
agtatgttttaacac

SEQ ID NO: 1745761 - DNA, 15 bp, Homo sapiens
gtatgttttaacaca

SEQ ID NO: 1745762 - DNA, 15 bp, Homo sapiens
tatgttttaacacaa

SEQ ID NO: 1745763 - DNA, 15 bp, Homo sapiens
atgttttaacacaaa

SEQ ID NO: 1745764 - DNA, 15 bp, Homo sapiens
tgttttaacacaaag

SEQ ID NO: 1745765 - DNA, 15 bp, Homo sapiens
gttttaacacaaagt

SEQ ID NO: 1745766 - DNA, 15 bp, Homo sapiens
ttttaacacaaagtt

SEQ ID NO: 1745767 - DNA, 15 bp, Homo sapiens
tttaacacaaagttg

SEQ ID NO: 1745768 - DNA, 15 bp, Homo sapiens
ttaacacaaagttga

SEQ ID NO: 1745769 - DNA, 15 bp, Homo sapiens
taacacaaagttgaa

SEQ ID NO: 1745770 - DNA, 15 bp, Homo sapiens
aacacaaagttgaac

SEQ ID NO: 1745771 - DNA, 15 bp, Homo sapiens
acacaaagttgaaca

SEQ ID NO: 1745772 - DNA, 15 bp, Homo sapiens
cacaaagttgaacac

SEQ ID NO: 1745773 - DNA, 15 bp, Homo sapiens
acaaagttgaacaca

SEQ ID NO: 1745774 - DNA, 15 bp, Homo sapiens
caaagttgaacacaa

SEQ ID NO: 1745775 - DNA, 15 bp, Homo sapiens
aaagttgaacacaac

SEQ ID NO: 1745776 - DNA, 15 bp, Homo sapiens
aagttgaacacaact

SEQ ID NO: 1745777 - DNA, 15 bp, Homo sapiens
agttgaacacaactt

SEQ ID NO: 1745778 - DNA, 15 bp, Homo sapiens
gttgaacacaactta

SEQ ID NO: 1745779 - DNA, 15 bp, Homo sapiens
ttgaacacaacttag

SEQ ID NO: 1745780 - DNA, 15 bp, Homo sapiens
tgaacacaacttaga

SEQ ID NO: 1745781 - DNA, 15 bp, Homo sapiens
gaacacaacttagat

SEQ ID NO: 1745782 - DNA, 15 bp, Homo sapiens
aacacaacttagatt

SEQ ID NO: 1745783 - DNA, 15 bp, Homo sapiens
acacaacttagatta

SEQ ID NO: 1745784 - DNA, 15 bp, Homo sapiens
cacaacttagattac

SEQ ID NO: 1745785 - DNA, 15 bp, Homo sapiens
acaacttagattaca

SEQ ID NO: 1745786 - DNA, 15 bp, Homo sapiens
caacttagattacaa

SEQ ID NO: 1745787 - DNA, 15 bp, Homo sapiens
aacttagattacaat

SEQ ID NO: 1745788 - DNA, 15 bp, Homo sapiens
acttagattacaatt

SEQ ID NO: 1745789 - DNA, 15 bp, Homo sapiens
cttagattacaattt

SEQ ID NO: 1745790 - DNA, 15 bp, Homo sapiens
ttagattacaatttt

SEQ ID NO: 1745791 - DNA, 15 bp, Homo sapiens
tagattacaattttg

SEQ ID NO: 1745792 - DNA, 15 bp, Homo sapiens
agattacaattttgc

SEQ ID NO: 1745793 - DNA, 15 bp, Homo sapiens
gattacaattttgca

SEQ ID NO: 1745794 - DNA, 15 bp, Homo sapiens
attacaattttgcag

SEQ ID NO: 1745795 - DNA, 15 bp, Homo sapiens
ttacaattttgcaga

SEQ ID NO: 1745796 - DNA, 15 bp, Homo sapiens
tacaattttgcagac

SEQ ID NO: 1745797 - DNA, 15 bp, Homo sapiens
acaattttgcagact

SEQ ID NO: 1745798 - DNA, 15 bp, Homo sapiens
caattttgcagactg

SEQ ID NO: 1745799 - DNA, 15 bp, Homo sapiens
aattttgcagactgg

SEQ ID NO: 1745800 - DNA, 15 bp, Homo sapiens
attttgcagactgga

SEQ ID NO: 1745801 - DNA, 15 bp, Homo sapiens
ttttgcagactggaa

SEQ ID NO: 1745802 - DNA, 15 bp, Homo sapiens
tttgcagactggaac

SEQ ID NO: 1745803 - DNA, 15 bp, Homo sapiens
ttgcagactggaaca

SEQ ID NO: 1745804 - DNA, 15 bp, Homo sapiens
tgcagactggaacag

SEQ ID NO: 1745805 - DNA, 15 bp, Homo sapiens
gcagactggaacagt

SEQ ID NO: 1745806 - DNA, 15 bp, Homo sapiens
cagactggaacagta

SEQ ID NO: 1745807 - DNA, 15 bp, Homo sapiens
agactggaacagtag

SEQ ID NO: 1745808 - DNA, 15 bp, Homo sapiens
gactggaacagtagt

SEQ ID NO: 1745809 - DNA, 15 bp, Homo sapiens
actggaacagtagtt

SEQ ID NO: 1745810 - DNA, 15 bp, Homo sapiens
ctggaacagtagttt

SEQ ID NO: 1745811 - DNA, 15 bp, Homo sapiens
tggaacagtagtttt

SEQ ID NO: 1745812 - DNA, 15 bp, Homo sapiens
ggaacagtagttttg

SEQ ID NO: 1745813 - DNA, 15 bp, Homo sapiens
gaacagtagttttga

SEQ ID NO: 1745814 - DNA, 15 bp, Homo sapiens
aacagtagttttgaa

SEQ ID NO: 1745815 - DNA, 15 bp, Homo sapiens
acagtagttttgaac

SEQ ID NO: 1745816 - DNA, 15 bp, Homo sapiens
cagtagttttgaaca

SEQ ID NO: 1745817 - DNA, 15 bp, Homo sapiens
agtagttttgaacac

SEQ ID NO: 1745818 - DNA, 15 bp, Homo sapiens
gtagttttgaacact

SEQ ID NO: 1745819 - DNA, 15 bp, Homo sapiens
tagttttgaacactt

SEQ ID NO: 1745820 - DNA, 15 bp, Homo sapiens
agttttgaacacttg

SEQ ID NO: 1745821 - DNA, 15 bp, Homo sapiens
gttttgaacacttgc

SEQ ID NO: 1745822 - DNA, 15 bp, Homo sapiens
ttttgaacacttgca

SEQ ID NO: 1745823 - DNA, 15 bp, Homo sapiens
tttgaacacttgcaa

SEQ ID NO: 1745824 - DNA, 15 bp, Homo sapiens
ttgaacacttgcaaa

SEQ ID NO: 1745825 - DNA, 15 bp, Homo sapiens
tgaacacttgcaaat

SEQ ID NO: 1745826 - DNA, 15 bp, Homo sapiens
gaacacttgcaaatt

SEQ ID NO: 1745827 - DNA, 15 bp, Homo sapiens
aacacttgcaaattt

SEQ ID NO: 1745828 - DNA, 15 bp, Homo sapiens
acacttgcaaatttg

SEQ ID NO: 1745829 - DNA, 15 bp, Homo sapiens
cacttgcaaatttga

SEQ ID NO: 1745830 - DNA, 15 bp, Homo sapiens
acttgcaaatttgaa

SEQ ID NO: 1745831 - DNA, 15 bp, Homo sapiens
cttgcaaatttgaac

SEQ ID NO: 1745832 - DNA, 15 bp, Homo sapiens
ttgcaaatttgaaca

SEQ ID NO: 1745833 - DNA, 15 bp, Homo sapiens
tgcaaatttgaacag

SEQ ID NO: 1745834 - DNA, 15 bp, Homo sapiens
gcaaatttgaacaga

SEQ ID NO: 1745835 - DNA, 15 bp, Homo sapiens
caaatttgaacagat

SEQ ID NO: 1745836 - DNA, 15 bp, Homo sapiens
aaatttgaacagata

SEQ ID NO: 1745837 - DNA, 15 bp, Homo sapiens
aatttgaacagatat

SEQ ID NO: 1745838 - DNA, 15 bp, Homo sapiens
atttgaacagatatc

SEQ ID NO: 1745839 - DNA, 15 bp, Homo sapiens
tttgaacagatatct

SEQ ID NO: 1745840 - DNA, 15 bp, Homo sapiens
ttgaacagatatctt

SEQ ID NO: 1745841 - DNA, 15 bp, Homo sapiens
tgaacagatatcttt

SEQ ID NO: 1745842 - DNA, 15 bp, Homo sapiens
gaacagatatctttg

SEQ ID NO: 1745843 - DNA, 15 bp, Homo sapiens
aacagatatctttga

SEQ ID NO: 1745844 - DNA, 15 bp, Homo sapiens
acagatatctttgaa

SEQ ID NO: 1745845 - DNA, 15 bp, Homo sapiens
cagatatctttgaaa

SEQ ID NO: 1745846 - DNA, 15 bp, Homo sapiens
agatatctttgaaag

SEQ ID NO: 1745847 - DNA, 15 bp, Homo sapiens
gatatctttgaaagt

SEQ ID NO: 1745848 - DNA, 15 bp, Homo sapiens
atatctttgaaagtc

SEQ ID NO: 1745849 - DNA, 15 bp, Homo sapiens
tatctttgaaagtct

SEQ ID NO: 1745850 - DNA, 15 bp, Homo sapiens
atctttgaaagtctc

SEQ ID NO: 1745851 - DNA, 15 bp, Homo sapiens
tctttgaaagtctca

SEQ ID NO: 1745852 - DNA, 15 bp, Homo sapiens
ctttgaaagtctcaa

SEQ ID NO: 1745853 - DNA, 15 bp, Homo sapiens
tttgaaagtctcaat

SEQ ID NO: 1745854 - DNA, 15 bp, Homo sapiens
ttgaaagtctcaatt

SEQ ID NO: 1745855 - DNA, 15 bp, Homo sapiens
tgaaagtctcaattt

SEQ ID NO: 1745856 - DNA, 15 bp, Homo sapiens
gaaagtctcaattta

SEQ ID NO: 1745857 - DNA, 15 bp, Homo sapiens
aaagtctcaatttat

SEQ ID NO: 1745858 - DNA, 15 bp, Homo sapiens
aagtctcaatttatg

SEQ ID NO: 1745859 - DNA, 15 bp, Homo sapiens
agtctcaatttatgc

SEQ ID NO: 1745860 - DNA, 15 bp, Homo sapiens
gtctcaatttatgcc

SEQ ID NO: 1745861 - DNA, 15 bp, Homo sapiens
tctcaatttatgcca

SEQ ID NO: 1745862 - DNA, 15 bp, Homo sapiens
ctcaatttatgccat

SEQ ID NO: 1745863 - DNA, 15 bp, Homo sapiens
tcaatttatgccatc

SEQ ID NO: 1745864 - DNA, 15 bp, Homo sapiens
caatttatgccatct

SEQ ID NO: 1745865 - DNA, 15 bp, Homo sapiens
aatttatgccatctc

SEQ ID NO: 1745866 - DNA, 15 bp, Homo sapiens
atttatgccatctcc

SEQ ID NO: 1745867 - DNA, 15 bp, Homo sapiens
tttatgccatctcct

SEQ ID NO: 1745868 - DNA, 15 bp, Homo sapiens
ttatgccatctcctc

SEQ ID NO: 1745869 - DNA, 15 bp, Homo sapiens
tatgccatctcctca

SEQ ID NO: 1745870 - DNA, 15 bp, Homo sapiens
atgccatctcctcag

SEQ ID NO: 1745871 - DNA, 15 bp, Homo sapiens
tgccatctcctcagt

SEQ ID NO: 1745872 - DNA, 15 bp, Homo sapiens
gccatctcctcagtt

SEQ ID NO: 1745873 - DNA, 15 bp, Homo sapiens
ccatctcctcagtta

SEQ ID NO: 1745874 - DNA, 15 bp, Homo sapiens
catctcctcagttat

SEQ ID NO: 1745875 - DNA, 15 bp, Homo sapiens
atctcctcagttatg

SEQ ID NO: 1745876 - DNA, 15 bp, Homo sapiens
tctcctcagttatgc

SEQ ID NO: 1745877 - DNA, 15 bp, Homo sapiens
ctcctcagttatgca

SEQ ID NO: 1745878 - DNA, 15 bp, Homo sapiens
tcctcagttatgcac

SEQ ID NO: 1745879 - DNA, 15 bp, Homo sapiens
cctcagttatgcaca

SEQ ID NO: 1745880 - DNA, 15 bp, Homo sapiens
ctcagttatgcacac

SEQ ID NO: 1745881 - DNA, 15 bp, Homo sapiens
tcagttatgcacact

SEQ ID NO: 1745882 - DNA, 15 bp, Homo sapiens
cagttatgcacactt

SEQ ID NO: 1745883 - DNA, 15 bp, Homo sapiens
agttatgcacacttc

SEQ ID NO: 1745884 - DNA, 15 bp, Homo sapiens
gttatgcacacttca

SEQ ID NO: 1745885 - DNA, 15 bp, Homo sapiens
ttatgcacacttcat

SEQ ID NO: 1745886 - DNA, 15 bp, Homo sapiens
tatgcacacttcata

SEQ ID NO: 1745887 - DNA, 15 bp, Homo sapiens
atgcacacttcatat

SEQ ID NO: 1745888 - DNA, 15 bp, Homo sapiens
gcacacttcatatga

SEQ ID NO: 1745889 - DNA, 15 bp, Homo sapiens
cacacttcatatgat

SEQ ID NO: 1745890 - DNA, 15 bp, Homo sapiens
acacttcatatgata

SEQ ID NO: 1745891 - DNA, 15 bp, Homo sapiens
cacttcatatgatac

SEQ ID NO: 1745892 - DNA, 15 bp, Homo sapiens
acttcatatgatact

SEQ ID NO: 1745893 - DNA, 15 bp, Homo sapiens
cttcatatgatacta

SEQ ID NO: 1745894 - DNA, 15 bp, Homo sapiens
ttcatatgatactaa

SEQ ID NO: 1745895 - DNA, 15 bp, Homo sapiens
tcatatgatactaaa

SEQ ID NO: 1745896 - DNA, 15 bp, Homo sapiens
catatgatactaaat

SEQ ID NO: 1745897 - DNA, 15 bp, Homo sapiens
atatgatactaaata

SEQ ID NO: 1745898 - DNA, 15 bp, Homo sapiens
tatgatactaaataa

SEQ ID NO: 1745899 - DNA, 15 bp, Homo sapiens
atgatactaaataac

SEQ ID NO: 1745900 - DNA, 15 bp, Homo sapiens
tgatactaaataaca

SEQ ID NO: 1745901 - DNA, 15 bp, Homo sapiens
gatactaaataacat

SEQ ID NO: 1745902 - DNA, 15 bp, Homo sapiens
atactaaataacatg

SEQ ID NO: 1745903 - DNA, 15 bp, Homo sapiens
tactaaataacatgc

SEQ ID NO: 1745904 - DNA, 15 bp, Homo sapiens
actaaataacatgca

SEQ ID NO: 1745905 - DNA, 15 bp, Homo sapiens
ctaaataacatgcag

SEQ ID NO: 1745906 - DNA, 15 bp, Homo sapiens
taaataacatgcagc

SEQ ID NO: 1745907 - DNA, 15 bp, Homo sapiens
aaataacatgcagct

SEQ ID NO: 1745908 - DNA, 15 bp, Homo sapiens
aataacatgcagcta

SEQ ID NO: 1745909 - DNA, 15 bp, Homo sapiens
ataacatgcagctac

SEQ ID NO: 1745910 - DNA, 15 bp, Homo sapiens
taacatgcagctaca

SEQ ID NO: 1745911 - DNA, 15 bp, Homo sapiens
aacatgcagctacac

SEQ ID NO: 1745912 - DNA, 15 bp, Homo sapiens
acatgcagctacacc

SEQ ID NO: 1745913 - DNA, 15 bp, Homo sapiens
catgcagctacacct

SEQ ID NO: 1745914 - DNA, 15 bp, Homo sapiens
atgcagctacacctt

SEQ ID NO: 1745915 - DNA, 15 bp, Homo sapiens
tgcagctacaccttt

SEQ ID NO: 1745916 - DNA, 15 bp, Homo sapiens
gcagctacacctttg

SEQ ID NO: 1745917 - DNA, 15 bp, Homo sapiens
cagctacacctttgt

SEQ ID NO: 1745918 - DNA, 15 bp, Homo sapiens
agctacacctttgtg

SEQ ID NO: 1745919 - DNA, 15 bp, Homo sapiens
gctacacctttgtgt

SEQ ID NO: 1745920 - DNA, 15 bp, Homo sapiens
ctacacctttgtgtc

SEQ ID NO: 1745921 - DNA, 15 bp, Homo sapiens
tacacctttgtgtcc

SEQ ID NO: 1745922 - DNA, 15 bp, Homo sapiens
acacctttgtgtcca

SEQ ID NO: 1745923 - DNA, 15 bp, Homo sapiens
cacctttgtgtccat

SEQ ID NO: 1745924 - DNA, 15 bp, Homo sapiens
acctttgtgtccatt

SEQ ID NO: 1745925 - DNA, 15 bp, Homo sapiens
cctttgtgtccattt

SEQ ID NO: 1745926 - DNA, 15 bp, Homo sapiens
ctttgtgtccatttg

SEQ ID NO: 1745927 - DNA, 15 bp, Homo sapiens
tttgtgtccatttgt

SEQ ID NO: 1745928 - DNA, 15 bp, Homo sapiens
ttgtgtccatttgtt

SEQ ID NO: 1745929 - DNA, 15 bp, Homo sapiens
tgtgtccatttgttg

SEQ ID NO: 1745930 - DNA, 15 bp, Homo sapiens
gtgtccatttgttgt

SEQ ID NO: 1745931 - DNA, 15 bp, Homo sapiens
tgtccatttgttgtt

SEQ ID NO: 1745932 - DNA, 15 bp, Homo sapiens
gtccatttgttgttt

SEQ ID NO: 1745933 - DNA, 15 bp, Homo sapiens
tccatttgttgtttg

SEQ ID NO: 1745934 - DNA, 15 bp, Homo sapiens
ccatttgttgtttga

SEQ ID NO: 1745935 - DNA, 15 bp, Homo sapiens
catttgttgtttgac

SEQ ID NO: 1745936 - DNA, 15 bp, Homo sapiens
atttgttgtttgaca

SEQ ID NO: 1745937 - DNA, 15 bp, Homo sapiens
tttgttgtttgacat

SEQ ID NO: 1745938 - DNA, 15 bp, Homo sapiens
ttgttgtttgacata

SEQ ID NO: 1745939 - DNA, 15 bp, Homo sapiens
tgttgtttgacataa

SEQ ID NO: 1745940 - DNA, 15 bp, Homo sapiens
gttgtttgacataaa

SEQ ID NO: 1745941 - DNA, 15 bp, Homo sapiens
ttgtttgacataaaa

SEQ ID NO: 1745942 - DNA, 15 bp, Homo sapiens
tgtttgacataaaac

SEQ ID NO: 1745943 - DNA, 15 bp, Homo sapiens
gtttgacataaaaca

SEQ ID NO: 1745944 - DNA, 15 bp, Homo sapiens
tttgacataaaacat

SEQ ID NO: 1745945 - DNA, 15 bp, Homo sapiens
ttgacataaaacatg

SEQ ID NO: 1745946 - DNA, 15 bp, Homo sapiens
tgacataaaacatgt

SEQ ID NO: 1745947 - DNA, 15 bp, Homo sapiens
gacataaaacatgta

SEQ ID NO: 1745948 - DNA, 15 bp, Homo sapiens
acataaaacatgtat

SEQ ID NO: 1745949 - DNA, 15 bp, Homo sapiens
cataaaacatgtatg

SEQ ID NO: 1745950 - DNA, 15 bp, Homo sapiens
ataaaacatgtatgc

SEQ ID NO: 1745951 - DNA, 15 bp, Homo sapiens
taaaacatgtatgca

SEQ ID NO: 1745952 - DNA, 15 bp, Homo sapiens
aaaacatgtatgcac

SEQ ID NO: 1745953 - DNA, 15 bp, Homo sapiens
aaacatgtatgcacc

SEQ ID NO: 1745954 - DNA, 15 bp, Homo sapiens
aacatgtatgcacca

SEQ ID NO: 1745955 - DNA, 15 bp, Homo sapiens
acatgtatgcaccat

SEQ ID NO: 1745956 - DNA, 15 bp, Homo sapiens
catgtatgcaccatt

SEQ ID NO: 1745957 - DNA, 15 bp, Homo sapiens
atgtatgcaccatta

SEQ ID NO: 1745958 - DNA, 15 bp, Homo sapiens
tgtatgcaccattaa

SEQ ID NO: 1745959 - DNA, 15 bp, Homo sapiens
gtatgcaccattaat

SEQ ID NO: 1745960 - DNA, 15 bp, Homo sapiens
tatgcaccattaatg

SEQ ID NO: 1745961 - DNA, 15 bp, Homo sapiens
atgcaccattaatga

SEQ ID NO: 1745962 - DNA, 15 bp, Homo sapiens
tgcaccattaatgat

SEQ ID NO: 1745963 - DNA, 15 bp, Homo sapiens
gcaccattaatgatg

SEQ ID NO: 1745964 - DNA, 15 bp, Homo sapiens
caccattaatgatga

SEQ ID NO: 1745965 - DNA, 15 bp, Homo sapiens
accattaatgatgac

SEQ ID NO: 1745966 - DNA, 15 bp, Homo sapiens
ccattaatgatgacc

SEQ ID NO: 1745967 - DNA, 15 bp, Homo sapiens
cattaatgatgacct

SEQ ID NO: 1745968 - DNA, 15 bp, Homo sapiens
attaatgatgacctg

SEQ ID NO: 1745969 - DNA, 15 bp, Homo sapiens
ttaatgatgacctgt

SEQ ID NO: 1745970 - DNA, 15 bp, Homo sapiens
taatgatgacctgtt

SEQ ID NO: 1745971 - DNA, 15 bp, Homo sapiens
aatgatgacctgttt

SEQ ID NO: 1745972 - DNA, 15 bp, Homo sapiens
atgatgacctgtttt

SEQ ID NO: 1745973 - DNA, 15 bp, Homo sapiens
tgatgacctgttttt

SEQ ID NO: 1745974 - DNA, 15 bp, Homo sapiens
gatgacctgttttta

SEQ ID NO: 1745975 - DNA, 15 bp, Homo sapiens
atgacctgtttttaa

SEQ ID NO: 1745976 - DNA, 15 bp, Homo sapiens
tgacctgtttttaac

SEQ ID NO: 1745977 - DNA, 15 bp, Homo sapiens
gacctgtttttaact

SEQ ID NO: 1745978 - DNA, 15 bp, Homo sapiens
acctgtttttaactt

SEQ ID NO: 1745979 - DNA, 15 bp, Homo sapiens
cctgtttttaacttc

SEQ ID NO: 1745980 - DNA, 15 bp, Homo sapiens
ctgtttttaacttca

SEQ ID NO: 1745981 - DNA, 15 bp, Homo sapiens
tgtttttaacttcaa

SEQ ID NO: 1745982 - DNA, 15 bp, Homo sapiens
gtttttaacttcaag

SEQ ID NO: 1745983 - DNA, 15 bp, Homo sapiens
tttttaacttcaagg

SEQ ID NO: 1745984 - DNA, 15 bp, Homo sapiens
ttttaacttcaagga

SEQ ID NO: 1745985 - DNA, 15 bp, Homo sapiens
tttaacttcaaggag

SEQ ID NO: 1745986 - DNA, 15 bp, Homo sapiens
ttaacttcaaggagg

SEQ ID NO: 1745987 - DNA, 15 bp, Homo sapiens
taacttcaaggaggg

SEQ ID NO: 1745988 - DNA, 15 bp, Homo sapiens
aacttcaaggagggt

SEQ ID NO: 1745989 - DNA, 15 bp, Homo sapiens
acttcaaggagggtt

SEQ ID NO: 1745990 - DNA, 15 bp, Homo sapiens
cttcaaggagggtta

SEQ ID NO: 1745991 - DNA, 15 bp, Homo sapiens
ttcaaggagggttaa

SEQ ID NO: 1745992 - DNA, 15 bp, Homo sapiens
tcaaggagggttaag

SEQ ID NO: 1745993 - DNA, 15 bp, Homo sapiens
caaggagggttaagg

SEQ ID NO: 1745994 - DNA, 15 bp, Homo sapiens
aaggagggttaagga

SEQ ID NO: 1745995 - DNA, 15 bp, Homo sapiens
aggagggttaaggaa

SEQ ID NO: 1745996 - DNA, 15 bp, Homo sapiens
ggagggttaaggaag

SEQ ID NO: 1745997 - DNA, 15 bp, Homo sapiens
gagggttaaggaaga

SEQ ID NO: 1745998 - DNA, 15 bp, Homo sapiens
agggttaaggaagaa

SEQ ID NO: 1745999 - DNA, 15 bp, Homo sapiens
gggttaaggaagaat

SEQ ID NO: 1746000 - DNA, 15 bp, Homo sapiens
ggttaaggaagaata

SEQ ID NO: 1746001 - DNA, 15 bp, Homo sapiens
gttaaggaagaatag

SEQ ID NO: 1746002 - DNA, 15 bp, Homo sapiens
ttaaggaagaataga

SEQ ID NO: 1746003 - DNA, 15 bp, Homo sapiens
taaggaagaatagaa

SEQ ID NO: 1746004 - DNA, 15 bp, Homo sapiens
aaggaagaatagaaa

SEQ ID NO: 1746005 - DNA, 15 bp, Homo sapiens
aggaagaatagaaag

SEQ ID NO: 1746006 - DNA, 15 bp, Homo sapiens
ggaagaatagaaagg

SEQ ID NO: 1746007 - DNA, 15 bp, Homo sapiens
gaagaatagaaaggt

SEQ ID NO: 1746008 - DNA, 15 bp, Homo sapiens
aagaatagaaaggtg

SEQ ID NO: 1746009 - DNA, 15 bp, Homo sapiens
agaatagaaaggtga

SEQ ID NO: 1746010 - DNA, 15 bp, Homo sapiens
gaatagaaaggtgaa

SEQ ID NO: 1746011 - DNA, 15 bp, Homo sapiens
aatagaaaggtgaag

SEQ ID NO: 1746012 - DNA, 15 bp, Homo sapiens
atagaaaggtgaagc

SEQ ID NO: 1746013 - DNA, 15 bp, Homo sapiens
tagaaaggtgaagct

SEQ ID NO: 1746014 - DNA, 15 bp, Homo sapiens
agaaaggtgaagcta

SEQ ID NO: 1746015 - DNA, 15 bp, Homo sapiens
gaaaggtgaagctaa

SEQ ID NO: 1746016 - DNA, 15 bp, Homo sapiens
aaaggtgaagctaat

SEQ ID NO: 1746017 - DNA, 15 bp, Homo sapiens
aaggtgaagctaatt

SEQ ID NO: 1746018 - DNA, 15 bp, Homo sapiens
aggtgaagctaatta

SEQ ID NO: 1746019 - DNA, 15 bp, Homo sapiens
ggtgaagctaattat

SEQ ID NO: 1746020 - DNA, 15 bp, Homo sapiens
gtgaagctaattatg

SEQ ID NO: 1746021 - DNA, 15 bp, Homo sapiens
tgaagctaattatga

SEQ ID NO: 1746022 - DNA, 15 bp, Homo sapiens
gaagctaattatgaa

SEQ ID NO: 1746023 - DNA, 15 bp, Homo sapiens
aagctaattatgaac

SEQ ID NO: 1746024 - DNA, 15 bp, Homo sapiens
agctaattatgaact

SEQ ID NO: 1746025 - DNA, 15 bp, Homo sapiens
gctaattatgaactt

SEQ ID NO: 1746026 - DNA, 15 bp, Homo sapiens
ctaattatgaacttg

SEQ ID NO: 1746027 - DNA, 15 bp, Homo sapiens
taattatgaacttgg

SEQ ID NO: 1746028 - DNA, 15 bp, Homo sapiens
aattatgaacttggt

SEQ ID NO: 1746029 - DNA, 15 bp, Homo sapiens
attatgaacttggtt

SEQ ID NO: 1746030 - DNA, 15 bp, Homo sapiens
ttatgaacttggtta

SEQ ID NO: 1746031 - DNA, 15 bp, Homo sapiens
tatgaacttggttat

SEQ ID NO: 1746032 - DNA, 15 bp, Homo sapiens
atgaacttggttata

SEQ ID NO: 1746033 - DNA, 15 bp, Homo sapiens
tgaacttggttataa

SEQ ID NO: 1746034 - DNA, 15 bp, Homo sapiens
gaacttggttataat

SEQ ID NO: 1746035 - DNA, 15 bp, Homo sapiens
aacttggttataatt

SEQ ID NO: 1746036 - DNA, 15 bp, Homo sapiens
acttggttataattt

SEQ ID NO: 1746037 - DNA, 15 bp, Homo sapiens
cttggttataattta

SEQ ID NO: 1746038 - DNA, 15 bp, Homo sapiens
ttggttataatttaa

SEQ ID NO: 1746039 - DNA, 15 bp, Homo sapiens
tggttataatttaaa

SEQ ID NO: 1746040 - DNA, 15 bp, Homo sapiens
ggttataatttaaag

SEQ ID NO: 1746041 - DNA, 15 bp, Homo sapiens
gttataatttaaaga

SEQ ID NO: 1746042 - DNA, 15 bp, Homo sapiens
ttataatttaaagat

SEQ ID NO: 1746043 - DNA, 15 bp, Homo sapiens
tataatttaaagatt

SEQ ID NO: 1746044 - DNA, 15 bp, Homo sapiens
ataatttaaagattc

SEQ ID NO: 1746045 - DNA, 15 bp, Homo sapiens
taatttaaagattca

SEQ ID NO: 1746046 - DNA, 15 bp, Homo sapiens
aatttaaagattcaa

SEQ ID NO: 1746047 - DNA, 15 bp, Homo sapiens
atttaaagattcaat

SEQ ID NO: 1746048 - DNA, 15 bp, Homo sapiens
tttaaagattcaata

SEQ ID NO: 1746049 - DNA, 15 bp, Homo sapiens
ttaaagattcaatag

SEQ ID NO: 1746050 - DNA, 15 bp, Homo sapiens
taaagattcaatagc

SEQ ID NO: 1746051 - DNA, 15 bp, Homo sapiens
aaagattcaatagct

SEQ ID NO: 1746052 - DNA, 15 bp, Homo sapiens
aagattcaatagctt

SEQ ID NO: 1746053 - DNA, 15 bp, Homo sapiens
agattcaatagcttc

SEQ ID NO: 1746054 - DNA, 15 bp, Homo sapiens
gattcaatagcttca

SEQ ID NO: 1746055 - DNA, 15 bp, Homo sapiens
attcaatagcttcac

SEQ ID NO: 1746056 - DNA, 15 bp, Homo sapiens
ttcaatagcttcaca

SEQ ID NO: 1746057 - DNA, 15 bp, Homo sapiens
tcaatagcttcacag

SEQ ID NO: 1746058 - DNA, 15 bp, Homo sapiens
caatagcttcacaga

SEQ ID NO: 1746059 - DNA, 15 bp, Homo sapiens
aatagcttcacagaa

SEQ ID NO: 1746060 - DNA, 15 bp, Homo sapiens
atagcttcacagaat

SEQ ID NO: 1746061 - DNA, 15 bp, Homo sapiens
tagcttcacagaatg

SEQ ID NO: 1746062 - DNA, 15 bp, Homo sapiens
agcttcacagaatgc

SEQ ID NO: 1746063 - DNA, 15 bp, Homo sapiens
gcttcacagaatgct

SEQ ID NO: 1746064 - DNA, 15 bp, Homo sapiens
cttcacagaatgctc

SEQ ID NO: 1746065 - DNA, 15 bp, Homo sapiens
ttcacagaatgctca

SEQ ID NO: 1746066 - DNA, 15 bp, Homo sapiens
tcacagaatgctcaa

SEQ ID NO: 1746067 - DNA, 15 bp, Homo sapiens
cacagaatgctcaag

SEQ ID NO: 1746068 - DNA, 15 bp, Homo sapiens
acagaatgctcaagt

SEQ ID NO: 1746069 - DNA, 15 bp, Homo sapiens
cagaatgctcaagtt

SEQ ID NO: 1746070 - DNA, 15 bp, Homo sapiens
agaatgctcaagttt

SEQ ID NO: 1746071 - DNA, 15 bp, Homo sapiens
gaatgctcaagtttt

SEQ ID NO: 1746072 - DNA, 15 bp, Homo sapiens
aatgctcaagttttg

SEQ ID NO: 1746073 - DNA, 15 bp, Homo sapiens
atgctcaagttttgt

SEQ ID NO: 1746074 - DNA, 15 bp, Homo sapiens
tgctcaagttttgta

SEQ ID NO: 1746075 - DNA, 15 bp, Homo sapiens
gctcaagttttgtaa

SEQ ID NO: 1746076 - DNA, 15 bp, Homo sapiens
ctcaagttttgtaac

SEQ ID NO: 1746077 - DNA, 15 bp, Homo sapiens
tcaagttttgtaaca

SEQ ID NO: 1746078 - DNA, 15 bp, Homo sapiens
caagttttgtaacac

SEQ ID NO: 1746079 - DNA, 15 bp, Homo sapiens
aagttttgtaacacc

SEQ ID NO: 1746080 - DNA, 15 bp, Homo sapiens
agttttgtaacacca

SEQ ID NO: 1746081 - DNA, 15 bp, Homo sapiens
gttttgtaacaccat

SEQ ID NO: 1746082 - DNA, 15 bp, Homo sapiens
ttttgtaacaccatg

SEQ ID NO: 1746083 - DNA, 15 bp, Homo sapiens
tttgtaacaccatgt

SEQ ID NO: 1746084 - DNA, 15 bp, Homo sapiens
ttgtaacaccatgtt

SEQ ID NO: 1746085 - DNA, 15 bp, Homo sapiens
tgtaacaccatgttc

SEQ ID NO: 1746086 - DNA, 15 bp, Homo sapiens
gtaacaccatgttca

SEQ ID NO: 1746087 - DNA, 15 bp, Homo sapiens
taacaccatgttcac

SEQ ID NO: 1746088 - DNA, 15 bp, Homo sapiens
aacaccatgttcaca

SEQ ID NO: 1746089 - DNA, 15 bp, Homo sapiens
acaccatgttcacag

SEQ ID NO: 1746090 - DNA, 15 bp, Homo sapiens
caccatgttcacagc

SEQ ID NO: 1746091 - DNA, 15 bp, Homo sapiens
accatgttcacagca

SEQ ID NO: 1746092 - DNA, 15 bp, Homo sapiens
ccatgttcacagcac

SEQ ID NO: 1746093 - DNA, 15 bp, Homo sapiens
catgttcacagcaca

SEQ ID NO: 1746094 - DNA, 15 bp, Homo sapiens
atgttcacagcacat

SEQ ID NO: 1746095 - DNA, 15 bp, Homo sapiens
tgttcacagcacata

SEQ ID NO: 1746096 - DNA, 15 bp, Homo sapiens
gttcacagcacataa

SEQ ID NO: 1746097 - DNA, 15 bp, Homo sapiens
ttcacagcacataag

SEQ ID NO: 1746098 - DNA, 15 bp, Homo sapiens
tcacagcacataagt

SEQ ID NO: 1746099 - DNA, 15 bp, Homo sapiens
cacagcacataagtt

SEQ ID NO: 1746100 - DNA, 15 bp, Homo sapiens
acagcacataagtta

SEQ ID NO: 1746101 - DNA, 15 bp, Homo sapiens
cagcacataagttaa

SEQ ID NO: 1746102 - DNA, 15 bp, Homo sapiens
agcacataagttaaa

SEQ ID NO: 1746103 - DNA, 15 bp, Homo sapiens
gcacataagttaaac

SEQ ID NO: 1746104 - DNA, 15 bp, Homo sapiens
cacataagttaaacc

SEQ ID NO: 1746105 - DNA, 15 bp, Homo sapiens
acataagttaaacca

SEQ ID NO: 1746106 - DNA, 15 bp, Homo sapiens
cataagttaaaccat

SEQ ID NO: 1746107 - DNA, 15 bp, Homo sapiens
ataagttaaaccatc

SEQ ID NO: 1746108 - DNA, 15 bp, Homo sapiens
taagttaaaccatcc

SEQ ID NO: 1746109 - DNA, 15 bp, Homo sapiens
aagttaaaccatcca

SEQ ID NO: 1746110 - DNA, 15 bp, Homo sapiens
agttaaaccatccaa

SEQ ID NO: 1746111 - DNA, 15 bp, Homo sapiens
gttaaaccatccaaa

SEQ ID NO: 1746112 - DNA, 15 bp, Homo sapiens
ttaaaccatccaaat

SEQ ID NO: 1746113 - DNA, 15 bp, Homo sapiens
taaaccatccaaatt

SEQ ID NO: 1746114 - DNA, 15 bp, Homo sapiens
aaaccatccaaatta

SEQ ID NO: 1746115 - DNA, 15 bp, Homo sapiens
aaccatccaaattag

SEQ ID NO: 1746116 - DNA, 15 bp, Homo sapiens
accatccaaattagt

SEQ ID NO: 1746117 - DNA, 15 bp, Homo sapiens
ccatccaaattagta

SEQ ID NO: 1746118 - DNA, 15 bp, Homo sapiens
catccaaattagtaa

SEQ ID NO: 1746119 - DNA, 15 bp, Homo sapiens
atccaaattagtaat

SEQ ID NO: 1746120 - DNA, 15 bp, Homo sapiens
tccaaattagtaata

SEQ ID NO: 1746121 - DNA, 15 bp, Homo sapiens
ccaaattagtaatac

SEQ ID NO: 1746122 - DNA, 15 bp, Homo sapiens
caaattagtaatact

SEQ ID NO: 1746123 - DNA, 15 bp, Homo sapiens
aaattagtaatactt

SEQ ID NO: 1746124 - DNA, 15 bp, Homo sapiens
aattagtaatacttt

SEQ ID NO: 1746125 - DNA, 15 bp, Homo sapiens
attagtaatactttg

SEQ ID NO: 1746126 - DNA, 15 bp, Homo sapiens
ttagtaatactttga

SEQ ID NO: 1746127 - DNA, 15 bp, Homo sapiens
tagtaatactttgaa

SEQ ID NO: 1746128 - DNA, 15 bp, Homo sapiens
agtaatactttgaat

SEQ ID NO: 1746129 - DNA, 15 bp, Homo sapiens
gtaatactttgaatt

SEQ ID NO: 1746130 - DNA, 15 bp, Homo sapiens
taatactttgaattt

SEQ ID NO: 1746131 - DNA, 15 bp, Homo sapiens
aatactttgaatttt

SEQ ID NO: 1746132 - DNA, 15 bp, Homo sapiens
atactttgaattttt

SEQ ID NO: 1746133 - DNA, 15 bp, Homo sapiens
tactttgaatttttc

SEQ ID NO: 1746134 - DNA, 15 bp, Homo sapiens
actttgaatttttcc

SEQ ID NO: 1746135 - DNA, 15 bp, Homo sapiens
ctttgaatttttcct

SEQ ID NO: 1746136 - DNA, 15 bp, Homo sapiens
tttgaatttttcctt

SEQ ID NO: 1746137 - DNA, 15 bp, Homo sapiens
ttgaatttttccttt

SEQ ID NO: 1746138 - DNA, 15 bp, Homo sapiens
tgaatttttcctttt

SEQ ID NO: 1746139 - DNA, 15 bp, Homo sapiens
gaatttttccttttg

SEQ ID NO: 1746140 - DNA, 15 bp, Homo sapiens
aatttttccttttgc

SEQ ID NO: 1746141 - DNA, 15 bp, Homo sapiens
atttttccttttgcc

SEQ ID NO: 1746142 - DNA, 15 bp, Homo sapiens
tttttccttttgcca

SEQ ID NO: 1746143 - DNA, 15 bp, Homo sapiens
ttttccttttgccaa

SEQ ID NO: 1746144 - DNA, 15 bp, Homo sapiens
tttccttttgccaaa

SEQ ID NO: 1746145 - DNA, 15 bp, Homo sapiens
ttccttttgccaaaa

SEQ ID NO: 1746146 - DNA, 15 bp, Homo sapiens
tccttttgccaaaaa

SEQ ID NO: 1746147 - DNA, 15 bp, Homo sapiens
ccttttgccaaaaac

SEQ ID NO: 1746148 - DNA, 15 bp, Homo sapiens
cttttgccaaaaaca

SEQ ID NO: 1746149 - DNA, 15 bp, Homo sapiens
ttttgccaaaaacac

SEQ ID NO: 1746150 - DNA, 15 bp, Homo sapiens
tttgccaaaaacacc

SEQ ID NO: 1746151 - DNA, 15 bp, Homo sapiens
ttgccaaaaacaccc

SEQ ID NO: 1746152 - DNA, 15 bp, Homo sapiens
tgccaaaaacaccct

SEQ ID NO: 1746153 - DNA, 15 bp, Homo sapiens
gccaaaaacaccctc

SEQ ID NO: 1746154 - DNA, 15 bp, Homo sapiens
ccaaaaacaccctca

SEQ ID NO: 1746155 - DNA, 15 bp, Homo sapiens
caaaaacaccctcat

SEQ ID NO: 1746156 - DNA, 15 bp, Homo sapiens
aaaaacaccctcata

SEQ ID NO: 1746157 - DNA, 15 bp, Homo sapiens
aaaacaccctcatat

SEQ ID NO: 1746158 - DNA, 15 bp, Homo sapiens
aaacaccctcatatt

SEQ ID NO: 1746159 - DNA, 15 bp, Homo sapiens
aacaccctcatattt

SEQ ID NO: 1746160 - DNA, 15 bp, Homo sapiens
acaccctcatatttg

SEQ ID NO: 1746161 - DNA, 15 bp, Homo sapiens
caccctcatatttga

SEQ ID NO: 1746162 - DNA, 15 bp, Homo sapiens
accctcatatttgag

SEQ ID NO: 1746163 - DNA, 15 bp, Homo sapiens
ccctcatatttgaga

SEQ ID NO: 1746164 - DNA, 15 bp, Homo sapiens
cctcatatttgagag

SEQ ID NO: 1746165 - DNA, 15 bp, Homo sapiens
ctcatatttgagagt

SEQ ID NO: 1746166 - DNA, 15 bp, Homo sapiens
tcatatttgagagta

SEQ ID NO: 1746167 - DNA, 15 bp, Homo sapiens
catatttgagagtaa

SEQ ID NO: 1746168 - DNA, 15 bp, Homo sapiens
atatttgagagtaac

SEQ ID NO: 1746169 - DNA, 15 bp, Homo sapiens
tatttgagagtaact

SEQ ID NO: 1746170 - DNA, 15 bp, Homo sapiens
atttgagagtaactc

SEQ ID NO: 1746171 - DNA, 15 bp, Homo sapiens
tttgagagtaactca

SEQ ID NO: 1746172 - DNA, 15 bp, Homo sapiens
ttgagagtaactcaa

SEQ ID NO: 1746173 - DNA, 15 bp, Homo sapiens
tgagagtaactcaat

SEQ ID NO: 1746174 - DNA, 15 bp, Homo sapiens
gagagtaactcaatt

SEQ ID NO: 1746175 - DNA, 15 bp, Homo sapiens
agagtaactcaatta

SEQ ID NO: 1746176 - DNA, 15 bp, Homo sapiens
gagtaactcaattat

SEQ ID NO: 1746177 - DNA, 15 bp, Homo sapiens
agtaactcaattata

SEQ ID NO: 1746178 - DNA, 15 bp, Homo sapiens
gtaactcaattatag

SEQ ID NO: 1746179 - DNA, 15 bp, Homo sapiens
taactcaattatagt

SEQ ID NO: 1746180 - DNA, 15 bp, Homo sapiens
aactcaattatagtt

SEQ ID NO: 1746181 - DNA, 15 bp, Homo sapiens
actcaattatagttc

SEQ ID NO: 1746182 - DNA, 15 bp, Homo sapiens
ctcaattatagttct

SEQ ID NO: 1746183 - DNA, 15 bp, Homo sapiens
tcaattatagttctt

SEQ ID NO: 1746184 - DNA, 15 bp, Homo sapiens
caattatagttcttt

SEQ ID NO: 1746185 - DNA, 15 bp, Homo sapiens
aattatagttctttt

SEQ ID NO: 1746186 - DNA, 15 bp, Homo sapiens
attatagttcttttg

SEQ ID NO: 1746187 - DNA, 15 bp, Homo sapiens
ttatagttcttttgg

SEQ ID NO: 1746188 - DNA, 15 bp, Homo sapiens
tatagttcttttgga

SEQ ID NO: 1746189 - DNA, 15 bp, Homo sapiens
atagttcttttggag

SEQ ID NO: 1746190 - DNA, 15 bp, Homo sapiens
tagttcttttggagg

SEQ ID NO: 1746191 - DNA, 15 bp, Homo sapiens
agttcttttggagga

SEQ ID NO: 1746192 - DNA, 15 bp, Homo sapiens
gttcttttggaggat

SEQ ID NO: 1746193 - DNA, 15 bp, Homo sapiens
ttcttttggaggatt

SEQ ID NO: 1746194 - DNA, 15 bp, Homo sapiens
tcttttggaggattc

SEQ ID NO: 1746195 - DNA, 15 bp, Homo sapiens
cttttggaggattca

SEQ ID NO: 1746196 - DNA, 15 bp, Homo sapiens
ttttggaggattcag

SEQ ID NO: 1746197 - DNA, 15 bp, Homo sapiens
tttggaggattcaga

SEQ ID NO: 1746198 - DNA, 15 bp, Homo sapiens
ttggaggattcagaa

SEQ ID NO: 1746199 - DNA, 15 bp, Homo sapiens
tggaggattcagaag

SEQ ID NO: 1746200 - DNA, 15 bp, Homo sapiens
ggaggattcagaagc

SEQ ID NO: 1746201 - DNA, 15 bp, Homo sapiens
gaggattcagaagcc

SEQ ID NO: 1746202 - DNA, 15 bp, Homo sapiens
aggattcagaagcca

SEQ ID NO: 1746203 - DNA, 15 bp, Homo sapiens
ggattcagaagccaa

SEQ ID NO: 1746204 - DNA, 15 bp, Homo sapiens
gattcagaagccaat

SEQ ID NO: 1746205 - DNA, 15 bp, Homo sapiens
attcagaagccaata

SEQ ID NO: 1746206 - DNA, 15 bp, Homo sapiens
ttcagaagccaataa

SEQ ID NO: 1746207 - DNA, 15 bp, Homo sapiens
tcagaagccaataaa

SEQ ID NO: 1746208 - DNA, 15 bp, Homo sapiens
cagaagccaataaag

SEQ ID NO: 1746209 - DNA, 15 bp, Homo sapiens
agaagccaataaagt

SEQ ID NO: 1746210 - DNA, 15 bp, Homo sapiens
gaagccaataaagta

SEQ ID NO: 1746211 - DNA, 15 bp, Homo sapiens
aagccaataaagtat

SEQ ID NO: 1746212 - DNA, 15 bp, Homo sapiens
agccaataaagtata

SEQ ID NO: 1746213 - DNA, 15 bp, Homo sapiens
gccaataaagtatag

SEQ ID NO: 1746214 - DNA, 15 bp, Homo sapiens
ccaataaagtatagc

SEQ ID NO: 1746215 - DNA, 15 bp, Homo sapiens
caataaagtatagca

SEQ ID NO: 1746216 - DNA, 15 bp, Homo sapiens
aataaagtatagcat

SEQ ID NO: 1746217 - DNA, 15 bp, Homo sapiens
ataaagtatagcatg

SEQ ID NO: 1746218 - DNA, 15 bp, Homo sapiens
taaagtatagcatga

SEQ ID NO: 1746219 - DNA, 15 bp, Homo sapiens
aaagtatagcatgaa

SEQ ID NO: 1746220 - DNA, 15 bp, Homo sapiens
aagtatagcatgaag

SEQ ID NO: 1746221 - DNA, 15 bp, Homo sapiens
agtatagcatgaagt

SEQ ID NO: 1746222 - DNA, 15 bp, Homo sapiens
gtatagcatgaagtc

SEQ ID NO: 1746223 - DNA, 15 bp, Homo sapiens
tatagcatgaagtca

SEQ ID NO: 1746224 - DNA, 15 bp, Homo sapiens
atagcatgaagtcaa

SEQ ID NO: 1746225 - DNA, 15 bp, Homo sapiens
tagcatgaagtcaaa

SEQ ID NO: 1746226 - DNA, 15 bp, Homo sapiens
agcatgaagtcaaat

SEQ ID NO: 1746227 - DNA, 15 bp, Homo sapiens
gcatgaagtcaaatt

SEQ ID NO: 1746228 - DNA, 15 bp, Homo sapiens
catgaagtcaaatta

SEQ ID NO: 1746229 - DNA, 15 bp, Homo sapiens
atgaagtcaaattag

SEQ ID NO: 1746230 - DNA, 15 bp, Homo sapiens
tgaagtcaaattaga

SEQ ID NO: 1746231 - DNA, 15 bp, Homo sapiens
gaagtcaaattagaa

SEQ ID NO: 1746232 - DNA, 15 bp, Homo sapiens
aagtcaaattagaaa

SEQ ID NO: 1746233 - DNA, 15 bp, Homo sapiens
agtcaaattagaaac

SEQ ID NO: 1746234 - DNA, 15 bp, Homo sapiens
gtcaaattagaaact

SEQ ID NO: 1746235 - DNA, 15 bp, Homo sapiens
tcaaattagaaactg

SEQ ID NO: 1746236 - DNA, 15 bp, Homo sapiens
caaattagaaactgt

SEQ ID NO: 1746237 - DNA, 15 bp, Homo sapiens
aaattagaaactgta

SEQ ID NO: 1746238 - DNA, 15 bp, Homo sapiens
aattagaaactgtac

SEQ ID NO: 1746239 - DNA, 15 bp, Homo sapiens
attagaaactgtaca

SEQ ID NO: 1746240 - DNA, 15 bp, Homo sapiens
ttagaaactgtacaa

SEQ ID NO: 1746241 - DNA, 15 bp, Homo sapiens
tagaaactgtacaaa

SEQ ID NO: 1746242 - DNA, 15 bp, Homo sapiens
agaaactgtacaaaa

SEQ ID NO: 1746243 - DNA, 15 bp, Homo sapiens
gaaactgtacaaaat

SEQ ID NO: 1746244 - DNA, 15 bp, Homo sapiens
aaactgtacaaaata

SEQ ID NO: 1746245 - DNA, 15 bp, Homo sapiens
aactgtacaaaataa

SEQ ID NO: 1746246 - DNA, 15 bp, Homo sapiens
actgtacaaaataaa

SEQ ID NO: 1746247 - DNA, 15 bp, Homo sapiens
ctgtacaaaataaat

SEQ ID NO: 1746248 - DNA, 15 bp, Homo sapiens
tgtacaaaataaatt

SEQ ID NO: 1746249 - DNA, 15 bp, Homo sapiens
gtacaaaataaatta

SEQ ID NO: 1746250 - DNA, 15 bp, Homo sapiens
tacaaaataaattat

SEQ ID NO: 1746251 - DNA, 15 bp, Homo sapiens
acaaaataaattata

SEQ ID NO: 1746252 - DNA, 15 bp, Homo sapiens
caaaataaattatat

SEQ ID NO: 1746253 - DNA, 15 bp, Homo sapiens
aaaataaattatata

SEQ ID NO: 1746254 - DNA, 15 bp, Homo sapiens
aaataaattatatac

SEQ ID NO: 1746255 - DNA, 15 bp, Homo sapiens
aataaattatataca

SEQ ID NO: 1746256 - DNA, 15 bp, Homo sapiens
ataaattatatacag

SEQ ID NO: 1746257 - DNA, 15 bp, Homo sapiens
taaattatatacagg

SEQ ID NO: 1746258 - DNA, 15 bp, Homo sapiens
aaattatatacaggg

SEQ ID NO: 1746259 - DNA, 15 bp, Homo sapiens
aattatatacagggg

SEQ ID NO: 1746260 - DNA, 15 bp, Homo sapiens
attatatacaggggc

SEQ ID NO: 1746261 - DNA, 15 bp, Homo sapiens
ttatatacaggggcg

SEQ ID NO: 1746262 - DNA, 15 bp, Homo sapiens
tatatacaggggcgg

SEQ ID NO: 1746263 - DNA, 15 bp, Homo sapiens
atatacaggggcggc

SEQ ID NO: 1746264 - DNA, 15 bp, Homo sapiens
tatacaggggcggct

SEQ ID NO: 1746265 - DNA, 15 bp, Homo sapiens
atacaggggcggctg

SEQ ID NO: 1746266 - DNA, 15 bp, Homo sapiens
tacaggggcggctgg

SEQ ID NO: 1746267 - DNA, 15 bp, Homo sapiens
acaggggcggctggc

SEQ ID NO: 1746268 - DNA, 15 bp, Homo sapiens
caggggcggctggca

SEQ ID NO: 1746269 - DNA, 15 bp, Homo sapiens
aggggcggctggcag

SEQ ID NO: 1746270 - DNA, 15 bp, Homo sapiens
ggggcggctggcagg

SEQ ID NO: 1746271 - DNA, 15 bp, Homo sapiens
gggcggctggcagga

SEQ ID NO: 1746272 - DNA, 15 bp, Homo sapiens
ggcggctggcaggat

SEQ ID NO: 1746273 - DNA, 15 bp, Homo sapiens
gcggctggcaggatc

SEQ ID NO: 1746274 - DNA, 15 bp, Homo sapiens
cggctggcaggatct

SEQ ID NO: 1746275 - DNA, 15 bp, Homo sapiens
ggctggcaggatcta

SEQ ID NO: 1746276 - DNA, 15 bp, Homo sapiens
gctggcaggatctag

SEQ ID NO: 1746277 - DNA, 15 bp, Homo sapiens
ctggcaggatctagc

SEQ ID NO: 1746278 - DNA, 15 bp, Homo sapiens
tggcaggatctagct

SEQ ID NO: 1746279 - DNA, 15 bp, Homo sapiens
ggcaggatctagctt

SEQ ID NO: 1746280 - DNA, 15 bp, Homo sapiens
gcaggatctagcttg

SEQ ID NO: 1746281 - DNA, 15 bp, Homo sapiens
caggatctagcttgg

SEQ ID NO: 1746282 - DNA, 15 bp, Homo sapiens
aggatctagcttggg

SEQ ID NO: 1746283 - DNA, 15 bp, Homo sapiens
ggatctagcttggga

SEQ ID NO: 1746284 - DNA, 15 bp, Homo sapiens
gatctagcttgggaa

SEQ ID NO: 1746285 - DNA, 15 bp, Homo sapiens
atctagcttgggaaa

SEQ ID NO: 1746286 - DNA, 15 bp, Homo sapiens
tctagcttgggaaag

SEQ ID NO: 1746287 - DNA, 15 bp, Homo sapiens
ctagcttgggaaagg

SEQ ID NO: 1746288 - DNA, 15 bp, Homo sapiens
tagcttgggaaagga

SEQ ID NO: 1746289 - DNA, 15 bp, Homo sapiens
agcttgggaaaggac

SEQ ID NO: 1746290 - DNA, 15 bp, Homo sapiens
gcttgggaaaggact

SEQ ID NO: 1746291 - DNA, 15 bp, Homo sapiens
cttgggaaaggactt

SEQ ID NO: 1746292 - DNA, 15 bp, Homo sapiens
ttgggaaaggacttc

SEQ ID NO: 1746293 - DNA, 15 bp, Homo sapiens
tgggaaaggacttct

SEQ ID NO: 1746294 - DNA, 15 bp, Homo sapiens
gggaaaggacttctg

SEQ ID NO: 1746295 - DNA, 15 bp, Homo sapiens
ggaaaggacttctgg

SEQ ID NO: 1746296 - DNA, 15 bp, Homo sapiens
gaaaggacttctggt

SEQ ID NO: 1746297 - DNA, 15 bp, Homo sapiens
aaaggacttctggtg

SEQ ID NO: 1746298 - DNA, 15 bp, Homo sapiens
aaggacttctggtgt

SEQ ID NO: 1746299 - DNA, 15 bp, Homo sapiens
aggacttctggtgta

SEQ ID NO: 1746300 - DNA, 15 bp, Homo sapiens
ggacttctggtgtat

SEQ ID NO: 1746301 - DNA, 15 bp, Homo sapiens
gacttctggtgtata

SEQ ID NO: 1746302 - DNA, 15 bp, Homo sapiens
acttctggtgtatat

SEQ ID NO: 1746303 - DNA, 15 bp, Homo sapiens
cttctggtgtatatc

SEQ ID NO: 1746304 - DNA, 15 bp, Homo sapiens
ttctggtgtatatct

SEQ ID NO: 1746305 - DNA, 15 bp, Homo sapiens
tctggtgtatatcta

SEQ ID NO: 1746306 - DNA, 15 bp, Homo sapiens
ctggtgtatatctat

SEQ ID NO: 1746307 - DNA, 15 bp, Homo sapiens
tggtgtatatctatg

SEQ ID NO: 1746308 - DNA, 15 bp, Homo sapiens
ggtgtatatctatgt

SEQ ID NO: 1746309 - DNA, 15 bp, Homo sapiens
gtgtatatctatgta

SEQ ID NO: 1746310 - DNA, 15 bp, Homo sapiens
tgtatatctatgtaa

SEQ ID NO: 1746311 - DNA, 15 bp, Homo sapiens
gtatatctatgtaaa

SEQ ID NO: 1746312 - DNA, 15 bp, Homo sapiens
tatatctatgtaaac

SEQ ID NO: 1746313 - DNA, 15 bp, Homo sapiens
atatctatgtaaact

SEQ ID NO: 1746314 - DNA, 15 bp, Homo sapiens
tatctatgtaaactt

SEQ ID NO: 1746315 - DNA, 15 bp, Homo sapiens
atctatgtaaacttc

SEQ ID NO: 1746316 - DNA, 15 bp, Homo sapiens
tctatgtaaacttca

SEQ ID NO: 1746317 - DNA, 15 bp, Homo sapiens
ctatgtaaacttcag

SEQ ID NO: 1746318 - DNA, 15 bp, Homo sapiens
tatgtaaacttcagg

SEQ ID NO: 1746319 - DNA, 15 bp, Homo sapiens
atgtaaacttcaggg

SEQ ID NO: 1746320 - DNA, 15 bp, Homo sapiens
tgtaaacttcaggga

SEQ ID NO: 1746321 - DNA, 15 bp, Homo sapiens
gtaaacttcagggac

SEQ ID NO: 1746322 - DNA, 15 bp, Homo sapiens
taaacttcagggact

SEQ ID NO: 1746323 - DNA, 15 bp, Homo sapiens
aaacttcagggactc

SEQ ID NO: 1746324 - DNA, 15 bp, Homo sapiens
aacttcagggactca

SEQ ID NO: 1746325 - DNA, 15 bp, Homo sapiens
acttcagggactcaa

SEQ ID NO: 1746326 - DNA, 15 bp, Homo sapiens
cttcagggactcaac

SEQ ID NO: 1746327 - DNA, 15 bp, Homo sapiens
ttcagggactcaact

SEQ ID NO: 1746328 - DNA, 15 bp, Homo sapiens
tcagggactcaactt

SEQ ID NO: 1746329 - DNA, 15 bp, Homo sapiens
cagggactcaacttt

SEQ ID NO: 1746330 - DNA, 15 bp, Homo sapiens
agggactcaactttt

SEQ ID NO: 1746331 - DNA, 15 bp, Homo sapiens
gggactcaacttttg

SEQ ID NO: 1746332 - DNA, 15 bp, Homo sapiens
ggactcaacttttgt

SEQ ID NO: 1746333 - DNA, 15 bp, Homo sapiens
gactcaacttttgtg

SEQ ID NO: 1746334 - DNA, 15 bp, Homo sapiens
actcaacttttgtga

SEQ ID NO: 1746335 - DNA, 15 bp, Homo sapiens
ctcaacttttgtgaa

SEQ ID NO: 1746336 - DNA, 15 bp, Homo sapiens
tcaacttttgtgaat

SEQ ID NO: 1746337 - DNA, 15 bp, Homo sapiens
caacttttgtgaatc

SEQ ID NO: 1746338 - DNA, 15 bp, Homo sapiens
aacttttgtgaatct

SEQ ID NO: 1746339 - DNA, 15 bp, Homo sapiens
acttttgtgaatctg

SEQ ID NO: 1746340 - DNA, 15 bp, Homo sapiens
cttttgtgaatctga

SEQ ID NO: 1746341 - DNA, 15 bp, Homo sapiens
ttttgtgaatctgaa

SEQ ID NO: 1746342 - DNA, 15 bp, Homo sapiens
tttgtgaatctgaaa

SEQ ID NO: 1746343 - DNA, 15 bp, Homo sapiens
ttgtgaatctgaaac

SEQ ID NO: 1746344 - DNA, 15 bp, Homo sapiens
tgtgaatctgaaaca

SEQ ID NO: 1746345 - DNA, 15 bp, Homo sapiens
gtgaatctgaaacat

SEQ ID NO: 1746346 - DNA, 15 bp, Homo sapiens
tgaatctgaaacatg

SEQ ID NO: 1746347 - DNA, 15 bp, Homo sapiens
gaatctgaaacatga

SEQ ID NO: 1746348 - DNA, 15 bp, Homo sapiens
aatctgaaacatgaa

SEQ ID NO: 1746349 - DNA, 15 bp, Homo sapiens
atctgaaacatgaat

SEQ ID NO: 1746350 - DNA, 15 bp, Homo sapiens
tctgaaacatgaatt

SEQ ID NO: 1746351 - DNA, 15 bp, Homo sapiens
ctgaaacatgaattt

SEQ ID NO: 1746352 - DNA, 15 bp, Homo sapiens
tgaaacatgaatttt

SEQ ID NO: 1746353 - DNA, 15 bp, Homo sapiens
gaaacatgaatttta

SEQ ID NO: 1746354 - DNA, 15 bp, Homo sapiens
aaacatgaattttaa

SEQ ID NO: 1746355 - DNA, 15 bp, Homo sapiens
aacatgaattttaac

SEQ ID NO: 1746356 - DNA, 15 bp, Homo sapiens
acatgaattttaacc

SEQ ID NO: 1746357 - DNA, 15 bp, Homo sapiens
catgaattttaacct

SEQ ID NO: 1746358 - DNA, 15 bp, Homo sapiens
atgaattttaaccta

SEQ ID NO: 1746359 - DNA, 15 bp, Homo sapiens
tgaattttaacctaa

SEQ ID NO: 1746360 - DNA, 15 bp, Homo sapiens
gaattttaacctaac

SEQ ID NO: 1746361 - DNA, 15 bp, Homo sapiens
aattttaacctaaca

SEQ ID NO: 1746362 - DNA, 15 bp, Homo sapiens
attttaacctaacag

SEQ ID NO: 1746363 - DNA, 15 bp, Homo sapiens
ttttaacctaacaga

SEQ ID NO: 1746364 - DNA, 15 bp, Homo sapiens
tttaacctaacagag

SEQ ID NO: 1746365 - DNA, 15 bp, Homo sapiens
ttaacctaacagagt

SEQ ID NO: 1746366 - DNA, 15 bp, Homo sapiens
taacctaacagagta

SEQ ID NO: 1746367 - DNA, 15 bp, Homo sapiens
aacctaacagagtac

SEQ ID NO: 1746368 - DNA, 15 bp, Homo sapiens
acctaacagagtaca

SEQ ID NO: 1746369 - DNA, 15 bp, Homo sapiens
cctaacagagtacaa

SEQ ID NO: 1746370 - DNA, 15 bp, Homo sapiens
ctaacagagtacaat

SEQ ID NO: 1746371 - DNA, 15 bp, Homo sapiens
taacagagtacaatt

SEQ ID NO: 1746372 - DNA, 15 bp, Homo sapiens
aacagagtacaatta

SEQ ID NO: 1746373 - DNA, 15 bp, Homo sapiens
acagagtacaattag

SEQ ID NO: 1746374 - DNA, 15 bp, Homo sapiens
cagagtacaattagt

SEQ ID NO: 1746375 - DNA, 15 bp, Homo sapiens
agagtacaattagtt

SEQ ID NO: 1746376 - DNA, 15 bp, Homo sapiens
gagtacaattagtta

SEQ ID NO: 1746377 - DNA, 15 bp, Homo sapiens
agtacaattagttac

SEQ ID NO: 1746378 - DNA, 15 bp, Homo sapiens
gtacaattagttaca

SEQ ID NO: 1746379 - DNA, 15 bp, Homo sapiens
tacaattagttacag

SEQ ID NO: 1746380 - DNA, 15 bp, Homo sapiens
acaattagttacagg

SEQ ID NO: 1746381 - DNA, 15 bp, Homo sapiens
caattagttacagga

SEQ ID NO: 1746382 - DNA, 15 bp, Homo sapiens
aattagttacaggaa

SEQ ID NO: 1746383 - DNA, 15 bp, Homo sapiens
attagttacaggaaa

SEQ ID NO: 1746384 - DNA, 15 bp, Homo sapiens
ttagttacaggaaac

SEQ ID NO: 1746385 - DNA, 15 bp, Homo sapiens
tagttacaggaaaca

SEQ ID NO: 1746386 - DNA, 15 bp, Homo sapiens
agttacaggaaacaa

SEQ ID NO: 1746387 - DNA, 15 bp, Homo sapiens
gttacaggaaacaac

SEQ ID NO: 1746388 - DNA, 15 bp, Homo sapiens
ttacaggaaacaaca

SEQ ID NO: 1746389 - DNA, 15 bp, Homo sapiens
tacaggaaacaacat

SEQ ID NO: 1746390 - DNA, 15 bp, Homo sapiens
acaggaaacaacata

SEQ ID NO: 1746391 - DNA, 15 bp, Homo sapiens
caggaaacaacataa

SEQ ID NO: 1746392 - DNA, 15 bp, Homo sapiens
aggaaacaacataat

SEQ ID NO: 1746393 - DNA, 15 bp, Homo sapiens
ggaaacaacataata

SEQ ID NO: 1746394 - DNA, 15 bp, Homo sapiens
gaaacaacataatag

SEQ ID NO: 1746395 - DNA, 15 bp, Homo sapiens
aaacaacataatagt

SEQ ID NO: 1746396 - DNA, 15 bp, Homo sapiens
aacaacataatagta

SEQ ID NO: 1746397 - DNA, 15 bp, Homo sapiens
acaacataatagtag

SEQ ID NO: 1746398 - DNA, 15 bp, Homo sapiens
caacataatagtagt

SEQ ID NO: 1746399 - DNA, 15 bp, Homo sapiens
aacataatagtagta

SEQ ID NO: 1746400 - DNA, 15 bp, Homo sapiens
acataatagtagtaa

SEQ ID NO: 1746401 - DNA, 15 bp, Homo sapiens
cataatagtagtaaa

SEQ ID NO: 1746402 - DNA, 15 bp, Homo sapiens
ataatagtagtaaat

SEQ ID NO: 1746403 - DNA, 15 bp, Homo sapiens
taatagtagtaaatc

SEQ ID NO: 1746404 - DNA, 15 bp, Homo sapiens
aatagtagtaaatca

SEQ ID NO: 1746405 - DNA, 15 bp, Homo sapiens
atagtagtaaatcac

SEQ ID NO: 1746406 - DNA, 15 bp, Homo sapiens
tagtagtaaatcaca

SEQ ID NO: 1746407 - DNA, 15 bp, Homo sapiens
agtagtaaatcacat

SEQ ID NO: 1746408 - DNA, 15 bp, Homo sapiens
gtagtaaatcacatt

SEQ ID NO: 1746409 - DNA, 15 bp, Homo sapiens
tagtaaatcacattc

SEQ ID NO: 1746410 - DNA, 15 bp, Homo sapiens
agtaaatcacattca

SEQ ID NO: 1746411 - DNA, 15 bp, Homo sapiens
gtaaatcacattcag

SEQ ID NO: 1746412 - DNA, 15 bp, Homo sapiens
taaatcacattcaga

SEQ ID NO: 1746413 - DNA, 15 bp, Homo sapiens
aaatcacattcagat

SEQ ID NO: 1746414 - DNA, 15 bp, Homo sapiens
aatcacattcagata

SEQ ID NO: 1746415 - DNA, 15 bp, Homo sapiens
atcacattcagataa

SEQ ID NO: 1746416 - DNA, 15 bp, Homo sapiens
tcacattcagataat

SEQ ID NO: 1746417 - DNA, 15 bp, Homo sapiens
cacattcagataatt

SEQ ID NO: 1746418 - DNA, 15 bp, Homo sapiens
acattcagataattc

SEQ ID NO: 1746419 - DNA, 15 bp, Homo sapiens
cattcagataattca

SEQ ID NO: 1746420 - DNA, 15 bp, Homo sapiens
attcagataattcaa

SEQ ID NO: 1746421 - DNA, 15 bp, Homo sapiens
ttcagataattcaaa

SEQ ID NO: 1746422 - DNA, 15 bp, Homo sapiens
tcagataattcaaac

SEQ ID NO: 1746423 - DNA, 15 bp, Homo sapiens
cagataattcaaact

SEQ ID NO: 1746424 - DNA, 15 bp, Homo sapiens
agataattcaaactt

SEQ ID NO: 1746425 - DNA, 15 bp, Homo sapiens
gataattcaaactta

SEQ ID NO: 1746426 - DNA, 15 bp, Homo sapiens
ataattcaaacttaa

SEQ ID NO: 1746427 - DNA, 15 bp, Homo sapiens
taattcaaacttaaa

SEQ ID NO: 1746428 - DNA, 15 bp, Homo sapiens
aattcaaacttaaat

SEQ ID NO: 1746429 - DNA, 15 bp, Homo sapiens
attcaaacttaaatt

SEQ ID NO: 1746430 - DNA, 15 bp, Homo sapiens
ttcaaacttaaattc

SEQ ID NO: 1746431 - DNA, 15 bp, Homo sapiens
tcaaacttaaattca

SEQ ID NO: 1746432 - DNA, 15 bp, Homo sapiens
caaacttaaattcag

SEQ ID NO: 1746433 - DNA, 15 bp, Homo sapiens
aaacttaaattcaga

SEQ ID NO: 1746434 - DNA, 15 bp, Homo sapiens
aacttaaattcagat

SEQ ID NO: 1746435 - DNA, 15 bp, Homo sapiens
acttaaattcagatc

SEQ ID NO: 1746436 - DNA, 15 bp, Homo sapiens
cttaaattcagatcc

SEQ ID NO: 1746437 - DNA, 15 bp, Homo sapiens
ttaaattcagatcct

SEQ ID NO: 1746438 - DNA, 15 bp, Homo sapiens
taaattcagatcctg

SEQ ID NO: 1746439 - DNA, 15 bp, Homo sapiens
aaattcagatcctga

SEQ ID NO: 1746440 - DNA, 15 bp, Homo sapiens
aattcagatcctgac

SEQ ID NO: 1746441 - DNA, 15 bp, Homo sapiens
attcagatcctgaca

SEQ ID NO: 1746442 - DNA, 15 bp, Homo sapiens
ttcagatcctgacat

SEQ ID NO: 1746443 - DNA, 15 bp, Homo sapiens
tcagatcctgacatt

SEQ ID NO: 1746444 - DNA, 15 bp, Homo sapiens
cagatcctgacattt

SEQ ID NO: 1746445 - DNA, 15 bp, Homo sapiens
agatcctgacatttt

SEQ ID NO: 1746446 - DNA, 15 bp, Homo sapiens
gatcctgacatttta

SEQ ID NO: 1746447 - DNA, 15 bp, Homo sapiens
atcctgacattttag

SEQ ID NO: 1746448 - DNA, 15 bp, Homo sapiens
tcctgacattttagg

SEQ ID NO: 1746449 - DNA, 15 bp, Homo sapiens
cctgacattttaggt

SEQ ID NO: 1746450 - DNA, 15 bp, Homo sapiens
ctgacattttaggta

SEQ ID NO: 1746451 - DNA, 15 bp, Homo sapiens
tgacattttaggtat

SEQ ID NO: 1746452 - DNA, 15 bp, Homo sapiens
gacattttaggtatt

SEQ ID NO: 1746453 - DNA, 15 bp, Homo sapiens
acattttaggtattt

SEQ ID NO: 1746454 - DNA, 15 bp, Homo sapiens
cattttaggtatttt

SEQ ID NO: 1746455 - DNA, 15 bp, Homo sapiens
attttaggtattttt

SEQ ID NO: 1746456 - DNA, 15 bp, Homo sapiens
ttttaggtatttttg

SEQ ID NO: 1746457 - DNA, 15 bp, Homo sapiens
tttaggtatttttga

SEQ ID NO: 1746458 - DNA, 15 bp, Homo sapiens
ttaggtatttttgaa

SEQ ID NO: 1746459 - DNA, 15 bp, Homo sapiens
taggtatttttgaaa

SEQ ID NO: 1746460 - DNA, 15 bp, Homo sapiens
aggtatttttgaaac

SEQ ID NO: 1746461 - DNA, 15 bp, Homo sapiens
ggtatttttgaaaca

SEQ ID NO: 1746462 - DNA, 15 bp, Homo sapiens
gtatttttgaaacaa

SEQ ID NO: 1746463 - DNA, 15 bp, Homo sapiens
tatttttgaaacaac

SEQ ID NO: 1746464 - DNA, 15 bp, Homo sapiens
atttttgaaacaaca

SEQ ID NO: 1746465 - DNA, 15 bp, Homo sapiens
tttttgaaacaacaa

SEQ ID NO: 1746466 - DNA, 15 bp, Homo sapiens
ttttgaaacaacaac

SEQ ID NO: 1746467 - DNA, 15 bp, Homo sapiens
tttgaaacaacaact

SEQ ID NO: 1746468 - DNA, 15 bp, Homo sapiens
ttgaaacaacaacta

SEQ ID NO: 1746469 - DNA, 15 bp, Homo sapiens
tgaaacaacaactat

SEQ ID NO: 1746470 - DNA, 15 bp, Homo sapiens
gaaacaacaactatg

SEQ ID NO: 1746471 - DNA, 15 bp, Homo sapiens
aaacaacaactatgc

SEQ ID NO: 1746472 - DNA, 15 bp, Homo sapiens
aacaacaactatgct

SEQ ID NO: 1746473 - DNA, 15 bp, Homo sapiens
acaacaactatgctt

SEQ ID NO: 1746474 - DNA, 15 bp, Homo sapiens
caacaactatgctta

SEQ ID NO: 1746475 - DNA, 15 bp, Homo sapiens
aacaactatgcttaa

SEQ ID NO: 1746476 - DNA, 15 bp, Homo sapiens
acaactatgcttaat

SEQ ID NO: 1746477 - DNA, 15 bp, Homo sapiens
caactatgcttaata

SEQ ID NO: 1746478 - DNA, 15 bp, Homo sapiens
aactatgcttaatag

SEQ ID NO: 1746479 - DNA, 15 bp, Homo sapiens
actatgcttaatagg

SEQ ID NO: 1746480 - DNA, 15 bp, Homo sapiens
ctatgcttaatagga

SEQ ID NO: 1746481 - DNA, 15 bp, Homo sapiens
tatgcttaataggag

SEQ ID NO: 1746482 - DNA, 15 bp, Homo sapiens
atgcttaataggagt

SEQ ID NO: 1746483 - DNA, 15 bp, Homo sapiens
tgcttaataggagtt

SEQ ID NO: 1746484 - DNA, 15 bp, Homo sapiens
gcttaataggagttg

SEQ ID NO: 1746485 - DNA, 15 bp, Homo sapiens
cttaataggagttga

SEQ ID NO: 1746486 - DNA, 15 bp, Homo sapiens
ttaataggagttgaa

SEQ ID NO: 1746487 - DNA, 15 bp, Homo sapiens
taataggagttgaac

SEQ ID NO: 1746488 - DNA, 15 bp, Homo sapiens
aataggagttgaaca

SEQ ID NO: 1746489 - DNA, 15 bp, Homo sapiens
ataggagttgaacat

SEQ ID NO: 1746490 - DNA, 15 bp, Homo sapiens
taggagttgaacatt

SEQ ID NO: 1746491 - DNA, 15 bp, Homo sapiens
aggagttgaacattg

SEQ ID NO: 1746492 - DNA, 15 bp, Homo sapiens
ggagttgaacattgg

SEQ ID NO: 1746493 - DNA, 15 bp, Homo sapiens
gagttgaacattgga

SEQ ID NO: 1746494 - DNA, 15 bp, Homo sapiens
agttgaacattggag

SEQ ID NO: 1746495 - DNA, 15 bp, Homo sapiens
gttgaacattggagt

SEQ ID NO: 1746496 - DNA, 15 bp, Homo sapiens
ttgaacattggagtc

SEQ ID NO: 1746497 - DNA, 15 bp, Homo sapiens
tgaacattggagtca

SEQ ID NO: 1746498 - DNA, 15 bp, Homo sapiens
gaacattggagtcat

SEQ ID NO: 1746499 - DNA, 15 bp, Homo sapiens
aacattggagtcatc

SEQ ID NO: 1746500 - DNA, 15 bp, Homo sapiens
acattggagtcatca

SEQ ID NO: 1746501 - DNA, 15 bp, Homo sapiens
cattggagtcatcag

SEQ ID NO: 1746502 - DNA, 15 bp, Homo sapiens
attggagtcatcaga

SEQ ID NO: 1746503 - DNA, 15 bp, Homo sapiens
ttggagtcatcagat

SEQ ID NO: 1746504 - DNA, 15 bp, Homo sapiens
tggagtcatcagata

SEQ ID NO: 1746505 - DNA, 15 bp, Homo sapiens
ggagtcatcagatat

SEQ ID NO: 1746506 - DNA, 15 bp, Homo sapiens
gagtcatcagatatt

SEQ ID NO: 1746507 - DNA, 15 bp, Homo sapiens
agtcatcagatatta

SEQ ID NO: 1746508 - DNA, 15 bp, Homo sapiens
gtcatcagatattaa

SEQ ID NO: 1746509 - DNA, 15 bp, Homo sapiens
tcatcagatattaat

SEQ ID NO: 1746510 - DNA, 15 bp, Homo sapiens
catcagatattaata

SEQ ID NO: 1746511 - DNA, 15 bp, Homo sapiens
atcagatattaatat

SEQ ID NO: 1746512 - DNA, 15 bp, Homo sapiens
tcagatattaatatg

SEQ ID NO: 1746513 - DNA, 15 bp, Homo sapiens
cagatattaatatgt

SEQ ID NO: 1746514 - DNA, 15 bp, Homo sapiens
agatattaatatgta

SEQ ID NO: 1746515 - DNA, 15 bp, Homo sapiens
gatattaatatgtaa

SEQ ID NO: 1746516 - DNA, 15 bp, Homo sapiens
atattaatatgtaat

SEQ ID NO: 1746517 - DNA, 15 bp, Homo sapiens
tattaatatgtaata

SEQ ID NO: 1746518 - DNA, 15 bp, Homo sapiens
attaatatgtaataa

SEQ ID NO: 1746519 - DNA, 15 bp, Homo sapiens
ttaatatgtaataat

SEQ ID NO: 1746520 - DNA, 15 bp, Homo sapiens
taatatgtaataata

SEQ ID NO: 1746521 - DNA, 15 bp, Homo sapiens
aatatgtaataatat

SEQ ID NO: 1746522 - DNA, 15 bp, Homo sapiens
atatgtaataatatc

SEQ ID NO: 1746523 - DNA, 15 bp, Homo sapiens
tatgtaataatatca

SEQ ID NO: 1746524 - DNA, 15 bp, Homo sapiens
atgtaataatatcag

SEQ ID NO: 1746525 - DNA, 15 bp, Homo sapiens
tgtaataatatcagt

SEQ ID NO: 1746526 - DNA, 15 bp, Homo sapiens
gtaataatatcagtt

SEQ ID NO: 1746527 - DNA, 15 bp, Homo sapiens
taataatatcagtta

SEQ ID NO: 1746528 - DNA, 15 bp, Homo sapiens
aataatatcagttat

SEQ ID NO: 1746529 - DNA, 15 bp, Homo sapiens
ataatatcagttatc

SEQ ID NO: 1746530 - DNA, 15 bp, Homo sapiens
taatatcagttatca

SEQ ID NO: 1746531 - DNA, 15 bp, Homo sapiens
aatatcagttatcat

SEQ ID NO: 1746532 - DNA, 15 bp, Homo sapiens
atatcagttatcatt

SEQ ID NO: 1746533 - DNA, 15 bp, Homo sapiens
tatcagttatcattt

SEQ ID NO: 1746534 - DNA, 15 bp, Homo sapiens
atcagttatcatttg

SEQ ID NO: 1746535 - DNA, 15 bp, Homo sapiens
tcagttatcatttga

SEQ ID NO: 1746536 - DNA, 15 bp, Homo sapiens
cagttatcatttgag

SEQ ID NO: 1746537 - DNA, 15 bp, Homo sapiens
agttatcatttgagg

SEQ ID NO: 1746538 - DNA, 15 bp, Homo sapiens
gttatcatttgagga

SEQ ID NO: 1746539 - DNA, 15 bp, Homo sapiens
ttatcatttgaggaa

SEQ ID NO: 1746540 - DNA, 15 bp, Homo sapiens
tatcatttgaggaac

SEQ ID NO: 1746541 - DNA, 15 bp, Homo sapiens
atcatttgaggaacc

SEQ ID NO: 1746542 - DNA, 15 bp, Homo sapiens
tcatttgaggaacca

SEQ ID NO: 1746543 - DNA, 15 bp, Homo sapiens
catttgaggaaccac

SEQ ID NO: 1746544 - DNA, 15 bp, Homo sapiens
atttgaggaaccact

SEQ ID NO: 1746545 - DNA, 15 bp, Homo sapiens
tttgaggaaccacta

SEQ ID NO: 1746546 - DNA, 15 bp, Homo sapiens
ttgaggaaccactat

SEQ ID NO: 1746547 - DNA, 15 bp, Homo sapiens
tgaggaaccactatg

SEQ ID NO: 1746548 - DNA, 15 bp, Homo sapiens
gaggaaccactatga

SEQ ID NO: 1746549 - DNA, 15 bp, Homo sapiens
aggaaccactatgaa

SEQ ID NO: 1746550 - DNA, 15 bp, Homo sapiens
ggaaccactatgaac

SEQ ID NO: 1746551 - DNA, 15 bp, Homo sapiens
gaaccactatgaact

SEQ ID NO: 1746552 - DNA, 15 bp, Homo sapiens
aaccactatgaacta

SEQ ID NO: 1746553 - DNA, 15 bp, Homo sapiens
accactatgaactag

SEQ ID NO: 1746554 - DNA, 15 bp, Homo sapiens
ccactatgaactagg

SEQ ID NO: 1746555 - DNA, 15 bp, Homo sapiens
cactatgaactaggc

SEQ ID NO: 1746556 - DNA, 15 bp, Homo sapiens
actatgaactaggca

SEQ ID NO: 1746557 - DNA, 15 bp, Homo sapiens
ctatgaactaggcac

SEQ ID NO: 1746558 - DNA, 15 bp, Homo sapiens
tatgaactaggcact

SEQ ID NO: 1746559 - DNA, 15 bp, Homo sapiens
atgaactaggcactg

SEQ ID NO: 1746560 - DNA, 15 bp, Homo sapiens
tgaactaggcactgt

SEQ ID NO: 1746561 - DNA, 15 bp, Homo sapiens
gaactaggcactgtg

SEQ ID NO: 1746562 - DNA, 15 bp, Homo sapiens
aactaggcactgtgc

SEQ ID NO: 1746563 - DNA, 15 bp, Homo sapiens
actaggcactgtgct

SEQ ID NO: 1746564 - DNA, 15 bp, Homo sapiens
ctaggcactgtgcta

SEQ ID NO: 1746565 - DNA, 15 bp, Homo sapiens
taggcactgtgctag

SEQ ID NO: 1746566 - DNA, 15 bp, Homo sapiens
aggcactgtgctaga

SEQ ID NO: 1746567 - DNA, 15 bp, Homo sapiens
ggcactgtgctagac

SEQ ID NO: 1746568 - DNA, 15 bp, Homo sapiens
gcactgtgctagaca

SEQ ID NO: 1746569 - DNA, 15 bp, Homo sapiens
cactgtgctagacat

SEQ ID NO: 1746570 - DNA, 15 bp, Homo sapiens
actgtgctagacatt

SEQ ID NO: 1746571 - DNA, 15 bp, Homo sapiens
ctgtgctagacattt

SEQ ID NO: 1746572 - DNA, 15 bp, Homo sapiens
tgtgctagacattta

SEQ ID NO: 1746573 - DNA, 15 bp, Homo sapiens
gtgctagacatttat

SEQ ID NO: 1746574 - DNA, 15 bp, Homo sapiens
tgctagacatttata

SEQ ID NO: 1746575 - DNA, 15 bp, Homo sapiens
gctagacatttatat

SEQ ID NO: 1746576 - DNA, 15 bp, Homo sapiens
ctagacatttatatg

SEQ ID NO: 1746577 - DNA, 15 bp, Homo sapiens
tagacatttatatgg

SEQ ID NO: 1746578 - DNA, 15 bp, Homo sapiens
agacatttatatggt

SEQ ID NO: 1746579 - DNA, 15 bp, Homo sapiens
gacatttatatggtt

SEQ ID NO: 1746580 - DNA, 15 bp, Homo sapiens
acatttatatggttt

SEQ ID NO: 1746581 - DNA, 15 bp, Homo sapiens
catttatatggtttt

SEQ ID NO: 1746582 - DNA, 15 bp, Homo sapiens
atttatatggttttt

SEQ ID NO: 1746583 - DNA, 15 bp, Homo sapiens
tttatatggtttttg

SEQ ID NO: 1746584 - DNA, 15 bp, Homo sapiens
ttatatggtttttgt

SEQ ID NO: 1746585 - DNA, 15 bp, Homo sapiens
tatatggtttttgtc

SEQ ID NO: 1746586 - DNA, 15 bp, Homo sapiens
atatggtttttgtca

SEQ ID NO: 1746587 - DNA, 15 bp, Homo sapiens
tatggtttttgtcaa

SEQ ID NO: 1746588 - DNA, 15 bp, Homo sapiens
atggtttttgtcaaa

SEQ ID NO: 1746589 - DNA, 15 bp, Homo sapiens
tggtttttgtcaaaa

SEQ ID NO: 1746590 - DNA, 15 bp, Homo sapiens
ggtttttgtcaaaac

SEQ ID NO: 1746591 - DNA, 15 bp, Homo sapiens
gtttttgtcaaaaca

SEQ ID NO: 1746592 - DNA, 15 bp, Homo sapiens
tttttgtcaaaacaa

SEQ ID NO: 1746593 - DNA, 15 bp, Homo sapiens
ttttgtcaaaacaat

SEQ ID NO: 1746594 - DNA, 15 bp, Homo sapiens
tttgtcaaaacaatt

SEQ ID NO: 1746595 - DNA, 15 bp, Homo sapiens
ttgtcaaaacaattc

SEQ ID NO: 1746596 - DNA, 15 bp, Homo sapiens
tgtcaaaacaattct

SEQ ID NO: 1746597 - DNA, 15 bp, Homo sapiens
gtcaaaacaattctg

SEQ ID NO: 1746598 - DNA, 15 bp, Homo sapiens
tcaaaacaattctgc

SEQ ID NO: 1746599 - DNA, 15 bp, Homo sapiens
caaaacaattctgca

SEQ ID NO: 1746600 - DNA, 15 bp, Homo sapiens
aaaacaattctgcat

SEQ ID NO: 1746601 - DNA, 15 bp, Homo sapiens
aaacaattctgcatt

SEQ ID NO: 1746602 - DNA, 15 bp, Homo sapiens
aacaattctgcatta

SEQ ID NO: 1746603 - DNA, 15 bp, Homo sapiens
acaattctgcattac

SEQ ID NO: 1746604 - DNA, 15 bp, Homo sapiens
caattctgcattaca

SEQ ID NO: 1746605 - DNA, 15 bp, Homo sapiens
aattctgcattacag

SEQ ID NO: 1746606 - DNA, 15 bp, Homo sapiens
attctgcattacagt

SEQ ID NO: 1746607 - DNA, 15 bp, Homo sapiens
ttctgcattacagtg

SEQ ID NO: 1746608 - DNA, 15 bp, Homo sapiens
tctgcattacagtga

SEQ ID NO: 1746609 - DNA, 15 bp, Homo sapiens
ctgcattacagtgat

SEQ ID NO: 1746610 - DNA, 15 bp, Homo sapiens
tgcattacagtgatt

SEQ ID NO: 1746611 - DNA, 15 bp, Homo sapiens
gcattacagtgatta

SEQ ID NO: 1746612 - DNA, 15 bp, Homo sapiens
cattacagtgattat

SEQ ID NO: 1746613 - DNA, 15 bp, Homo sapiens
attacagtgattatt

SEQ ID NO: 1746614 - DNA, 15 bp, Homo sapiens
ttacagtgattattt

SEQ ID NO: 1746615 - DNA, 15 bp, Homo sapiens
tacagtgattatttc

SEQ ID NO: 1746616 - DNA, 15 bp, Homo sapiens
acagtgattatttcc

SEQ ID NO: 1746617 - DNA, 15 bp, Homo sapiens
cagtgattatttcca

SEQ ID NO: 1746618 - DNA, 15 bp, Homo sapiens
agtgattatttccat

SEQ ID NO: 1746619 - DNA, 15 bp, Homo sapiens
gtgattatttccatg

SEQ ID NO: 1746620 - DNA, 15 bp, Homo sapiens
tgattatttccatgg

SEQ ID NO: 1746621 - DNA, 15 bp, Homo sapiens
gattatttccatggt

SEQ ID NO: 1746622 - DNA, 15 bp, Homo sapiens
attatttccatggta

SEQ ID NO: 1746623 - DNA, 15 bp, Homo sapiens
ttatttccatggtat

SEQ ID NO: 1746624 - DNA, 15 bp, Homo sapiens
tatttccatggtata

SEQ ID NO: 1746625 - DNA, 15 bp, Homo sapiens
atttccatggtataa

SEQ ID NO: 1746626 - DNA, 15 bp, Homo sapiens
tttccatggtataaa

SEQ ID NO: 1746627 - DNA, 15 bp, Homo sapiens
ttccatggtataaat

SEQ ID NO: 1746628 - DNA, 15 bp, Homo sapiens
tccatggtataaatg

SEQ ID NO: 1746629 - DNA, 15 bp, Homo sapiens
ccatggtataaatgt

SEQ ID NO: 1746630 - DNA, 15 bp, Homo sapiens
catggtataaatgtt

SEQ ID NO: 1746631 - DNA, 15 bp, Homo sapiens
atggtataaatgttt

SEQ ID NO: 1746632 - DNA, 15 bp, Homo sapiens
tggtataaatgttta

SEQ ID NO: 1746633 - DNA, 15 bp, Homo sapiens
ggtataaatgtttag

SEQ ID NO: 1746634 - DNA, 15 bp, Homo sapiens
gtataaatgtttaga

SEQ ID NO: 1746635 - DNA, 15 bp, Homo sapiens
tataaatgtttagag

SEQ ID NO: 1746636 - DNA, 15 bp, Homo sapiens
ataaatgtttagaga

SEQ ID NO: 1746637 - DNA, 15 bp, Homo sapiens
taaatgtttagagaa

SEQ ID NO: 1746638 - DNA, 15 bp, Homo sapiens
aaatgtttagagaag

SEQ ID NO: 1746639 - DNA, 15 bp, Homo sapiens
aatgtttagagaagt

SEQ ID NO: 1746640 - DNA, 15 bp, Homo sapiens
atgtttagagaagtt

SEQ ID NO: 1746641 - DNA, 15 bp, Homo sapiens
tgtttagagaagtta

SEQ ID NO: 1746642 - DNA, 15 bp, Homo sapiens
gtttagagaagttat

SEQ ID NO: 1746643 - DNA, 15 bp, Homo sapiens
tttagagaagttatc

SEQ ID NO: 1746644 - DNA, 15 bp, Homo sapiens
ttagagaagttatca

SEQ ID NO: 1746645 - DNA, 15 bp, Homo sapiens
tagagaagttatcat

SEQ ID NO: 1746646 - DNA, 15 bp, Homo sapiens
agagaagttatcatt

SEQ ID NO: 1746647 - DNA, 15 bp, Homo sapiens
gagaagttatcattt

SEQ ID NO: 1746648 - DNA, 15 bp, Homo sapiens
agaagttatcattta

SEQ ID NO: 1746649 - DNA, 15 bp, Homo sapiens
gaagttatcatttac

SEQ ID NO: 1746650 - DNA, 15 bp, Homo sapiens
aagttatcatttacc

SEQ ID NO: 1746651 - DNA, 15 bp, Homo sapiens
agttatcatttaccc

SEQ ID NO: 1746652 - DNA, 15 bp, Homo sapiens
gttatcatttaccca

SEQ ID NO: 1746653 - DNA, 15 bp, Homo sapiens
ttatcatttacccaa

SEQ ID NO: 1746654 - DNA, 15 bp, Homo sapiens
tatcatttacccaaa

SEQ ID NO: 1746655 - DNA, 15 bp, Homo sapiens
atcatttacccaaac

SEQ ID NO: 1746656 - DNA, 15 bp, Homo sapiens
tcatttacccaaact

SEQ ID NO: 1746657 - DNA, 15 bp, Homo sapiens
catttacccaaacta

SEQ ID NO: 1746658 - DNA, 15 bp, Homo sapiens
atttacccaaactaa

SEQ ID NO: 1746659 - DNA, 15 bp, Homo sapiens
tttacccaaactaat

SEQ ID NO: 1746660 - DNA, 15 bp, Homo sapiens
ttacccaaactaata

SEQ ID NO: 1746661 - DNA, 15 bp, Homo sapiens
tacccaaactaatat

SEQ ID NO: 1746662 - DNA, 15 bp, Homo sapiens
acccaaactaatata

SEQ ID NO: 1746663 - DNA, 15 bp, Homo sapiens
cccaaactaatataa

SEQ ID NO: 1746664 - DNA, 15 bp, Homo sapiens
ccaaactaatataac

SEQ ID NO: 1746665 - DNA, 15 bp, Homo sapiens
caaactaatataact

SEQ ID NO: 1746666 - DNA, 15 bp, Homo sapiens
aaactaatataactg

SEQ ID NO: 1746667 - DNA, 15 bp, Homo sapiens
aactaatataactgg

SEQ ID NO: 1746668 - DNA, 15 bp, Homo sapiens
actaatataactgga

SEQ ID NO: 1746669 - DNA, 15 bp, Homo sapiens
ctaatataactggag

SEQ ID NO: 1746670 - DNA, 15 bp, Homo sapiens
taatataactggagg

SEQ ID NO: 1746671 - DNA, 15 bp, Homo sapiens
aatataactggaggt

SEQ ID NO: 1746672 - DNA, 15 bp, Homo sapiens
atataactggaggtg

SEQ ID NO: 1746673 - DNA, 15 bp, Homo sapiens
tataactggaggtgg

SEQ ID NO: 1746674 - DNA, 15 bp, Homo sapiens
ataactggaggtgga

SEQ ID NO: 1746675 - DNA, 15 bp, Homo sapiens
taactggaggtggaa

SEQ ID NO: 1746676 - DNA, 15 bp, Homo sapiens
aactggaggtggaac

SEQ ID NO: 1746677 - DNA, 15 bp, Homo sapiens
actggaggtggaact

SEQ ID NO: 1746678 - DNA, 15 bp, Homo sapiens
ctggaggtggaactt

SEQ ID NO: 1746679 - DNA, 15 bp, Homo sapiens
tggaggtggaactta

SEQ ID NO: 1746680 - DNA, 15 bp, Homo sapiens
ggaggtggaacttaa

SEQ ID NO: 1746681 - DNA, 15 bp, Homo sapiens
gaggtggaacttaaa

SEQ ID NO: 1746682 - DNA, 15 bp, Homo sapiens
aggtggaacttaaac

SEQ ID NO: 1746683 - DNA, 15 bp, Homo sapiens
ggtggaacttaaacc

SEQ ID NO: 1746684 - DNA, 15 bp, Homo sapiens
gtggaacttaaaccc

SEQ ID NO: 1746685 - DNA, 15 bp, Homo sapiens
tggaacttaaaccca

SEQ ID NO: 1746686 - DNA, 15 bp, Homo sapiens
ggaacttaaacccac

SEQ ID NO: 1746687 - DNA, 15 bp, Homo sapiens
gaacttaaacccact

SEQ ID NO: 1746688 - DNA, 15 bp, Homo sapiens
aacttaaacccactc

SEQ ID NO: 1746689 - DNA, 15 bp, Homo sapiens
acttaaacccactcg

SEQ ID NO: 1746690 - DNA, 15 bp, Homo sapiens
cttaaacccactcgg

SEQ ID NO: 1746691 - DNA, 15 bp, Homo sapiens
ttaaacccactcggc

SEQ ID NO: 1746692 - DNA, 15 bp, Homo sapiens
taaacccactcggcc

SEQ ID NO: 1746693 - DNA, 15 bp, Homo sapiens
aaacccactcggcca

SEQ ID NO: 1746694 - DNA, 15 bp, Homo sapiens
aacccactcggccag

SEQ ID NO: 1746695 - DNA, 15 bp, Homo sapiens
acccactcggccaga

SEQ ID NO: 1746696 - DNA, 15 bp, Homo sapiens
cccactcggccagac

SEQ ID NO: 1746697 - DNA, 15 bp, Homo sapiens
ccactcggccagact

SEQ ID NO: 1746698 - DNA, 15 bp, Homo sapiens
cactcggccagactt

SEQ ID NO: 1746699 - DNA, 15 bp, Homo sapiens
actcggccagactta

SEQ ID NO: 1746700 - DNA, 15 bp, Homo sapiens
ctcggccagacttag

SEQ ID NO: 1746701 - DNA, 15 bp, Homo sapiens
tcggccagacttaga

SEQ ID NO: 1746702 - DNA, 15 bp, Homo sapiens
cggccagacttagaa

SEQ ID NO: 1746703 - DNA, 15 bp, Homo sapiens
ggccagacttagaag

SEQ ID NO: 1746704 - DNA, 15 bp, Homo sapiens
gccagacttagaagc

SEQ ID NO: 1746705 - DNA, 15 bp, Homo sapiens
ccagacttagaagcc

SEQ ID NO: 1746706 - DNA, 15 bp, Homo sapiens
cagacttagaagccg

SEQ ID NO: 1746707 - DNA, 15 bp, Homo sapiens
agacttagaagccgt

SEQ ID NO: 1746708 - DNA, 15 bp, Homo sapiens
gacttagaagccgtg

SEQ ID NO: 1746709 - DNA, 15 bp, Homo sapiens
acttagaagccgtgc

SEQ ID NO: 1746710 - DNA, 15 bp, Homo sapiens
cttagaagccgtgct

SEQ ID NO: 1746711 - DNA, 15 bp, Homo sapiens
ttagaagccgtgctc

SEQ ID NO: 1746712 - DNA, 15 bp, Homo sapiens
tagaagccgtgctct

SEQ ID NO: 1746713 - DNA, 15 bp, Homo sapiens
agaagccgtgctctt

SEQ ID NO: 1746714 - DNA, 15 bp, Homo sapiens
gaagccgtgctcttt

SEQ ID NO: 1746715 - DNA, 15 bp, Homo sapiens
aagccgtgctctttc

SEQ ID NO: 1746716 - DNA, 15 bp, Homo sapiens
agccgtgctctttcc

SEQ ID NO: 1746717 - DNA, 15 bp, Homo sapiens
gccgtgctctttcca

SEQ ID NO: 1746718 - DNA, 15 bp, Homo sapiens
ccgtgctctttccac

SEQ ID NO: 1746719 - DNA, 15 bp, Homo sapiens
cgtgctctttccact

SEQ ID NO: 1746720 - DNA, 15 bp, Homo sapiens
gtgctctttccacta

SEQ ID NO: 1746721 - DNA, 15 bp, Homo sapiens
tgctctttccactac

SEQ ID NO: 1746722 - DNA, 15 bp, Homo sapiens
gctctttccactaca

SEQ ID NO: 1746723 - DNA, 15 bp, Homo sapiens
ctctttccactacac

SEQ ID NO: 1746724 - DNA, 15 bp, Homo sapiens
tctttccactacaca

SEQ ID NO: 1746725 - DNA, 15 bp, Homo sapiens
ctttccactacacag

SEQ ID NO: 1746726 - DNA, 15 bp, Homo sapiens
tttccactacacagc

SEQ ID NO: 1746727 - DNA, 15 bp, Homo sapiens
ttccactacacagcg

SEQ ID NO: 1746728 - DNA, 15 bp, Homo sapiens
tccactacacagcgc

SEQ ID NO: 1746729 - DNA, 15 bp, Homo sapiens
ccactacacagcgct

SEQ ID NO: 1746730 - DNA, 15 bp, Homo sapiens
cactacacagcgcta

SEQ ID NO: 1746731 - DNA, 15 bp, Homo sapiens
actacacagcgctaa

SEQ ID NO: 1746732 - DNA, 15 bp, Homo sapiens
ctacacagcgctaaa

SEQ ID NO: 1746733 - DNA, 15 bp, Homo sapiens
tacacagcgctaaag

SEQ ID NO: 1746734 - DNA, 15 bp, Homo sapiens
acacagcgctaaagg

SEQ ID NO: 1746735 - DNA, 15 bp, Homo sapiens
cacagcgctaaagga

SEQ ID NO: 1746736 - DNA, 15 bp, Homo sapiens
acagcgctaaaggag

SEQ ID NO: 1746737 - DNA, 15 bp, Homo sapiens
cagcgctaaaggagg

SEQ ID NO: 1746738 - DNA, 15 bp, Homo sapiens
agcgctaaaggaggc

SEQ ID NO: 1746739 - DNA, 15 bp, Homo sapiens
gcgctaaaggaggct

SEQ ID NO: 1746740 - DNA, 15 bp, Homo sapiens
cgctaaaggaggctg

SEQ ID NO: 1746741 - DNA, 15 bp, Homo sapiens
gctaaaggaggctga

SEQ ID NO: 1746742 - DNA, 15 bp, Homo sapiens
ctaaaggaggctgaa

SEQ ID NO: 1746743 - DNA, 15 bp, Homo sapiens
taaaggaggctgaag

SEQ ID NO: 1746744 - DNA, 15 bp, Homo sapiens
aaaggaggctgaaga

SEQ ID NO: 1746745 - DNA, 15 bp, Homo sapiens
aaggaggctgaagag

SEQ ID NO: 1746746 - DNA, 15 bp, Homo sapiens
aggaggctgaagaga

SEQ ID NO: 1746747 - DNA, 15 bp, Homo sapiens
ggaggctgaagagat

SEQ ID NO: 1746748 - DNA, 15 bp, Homo sapiens
gaggctgaagagatg

SEQ ID NO: 1746749 - DNA, 15 bp, Homo sapiens
aggctgaagagatgg

SEQ ID NO: 1746750 - DNA, 15 bp, Homo sapiens
ggctgaagagatggt

SEQ ID NO: 1746751 - DNA, 15 bp, Homo sapiens
gctgaagagatggtt

SEQ ID NO: 1746752 - DNA, 15 bp, Homo sapiens
ctgaagagatggtta

SEQ ID NO: 1746753 - DNA, 15 bp, Homo sapiens
tgaagagatggttac

SEQ ID NO: 1746754 - DNA, 15 bp, Homo sapiens
gaagagatggttaca

SEQ ID NO: 1746755 - DNA, 15 bp, Homo sapiens
aagagatggttacaa

SEQ ID NO: 1746756 - DNA, 15 bp, Homo sapiens
agagatggttacaag

SEQ ID NO: 1746757 - DNA, 15 bp, Homo sapiens
gagatggttacaagt

SEQ ID NO: 1746758 - DNA, 15 bp, Homo sapiens
agatggttacaagta

SEQ ID NO: 1746759 - DNA, 15 bp, Homo sapiens
gatggttacaagtat

SEQ ID NO: 1746760 - DNA, 15 bp, Homo sapiens
atggttacaagtata

SEQ ID NO: 1746761 - DNA, 15 bp, Homo sapiens
tggttacaagtatac

SEQ ID NO: 1746762 - DNA, 15 bp, Homo sapiens
ggttacaagtatact

SEQ ID NO: 1746763 - DNA, 15 bp, Homo sapiens
gttacaagtatactg

SEQ ID NO: 1746764 - DNA, 15 bp, Homo sapiens
ttacaagtatactga

SEQ ID NO: 1746765 - DNA, 15 bp, Homo sapiens
tacaagtatactgat

SEQ ID NO: 1746766 - DNA, 15 bp, Homo sapiens
acaagtatactgatt

SEQ ID NO: 1746767 - DNA, 15 bp, Homo sapiens
caagtatactgattt

SEQ ID NO: 1746768 - DNA, 15 bp, Homo sapiens
aagtatactgatttg

SEQ ID NO: 1746769 - DNA, 15 bp, Homo sapiens
agtatactgatttgc

SEQ ID NO: 1746770 - DNA, 15 bp, Homo sapiens
gtatactgatttgct

SEQ ID NO: 1746771 - DNA, 15 bp, Homo sapiens
tatactgatttgctt

SEQ ID NO: 1746772 - DNA, 15 bp, Homo sapiens
atactgatttgcttt

SEQ ID NO: 1746773 - DNA, 15 bp, Homo sapiens
tactgatttgctttt

SEQ ID NO: 1746774 - DNA, 15 bp, Homo sapiens
actgatttgcttttc

SEQ ID NO: 1746775 - DNA, 15 bp, Homo sapiens
ctgatttgcttttca

SEQ ID NO: 1746776 - DNA, 15 bp, Homo sapiens
tgatttgcttttcag

SEQ ID NO: 1746777 - DNA, 15 bp, Homo sapiens
gatttgcttttcagg

SEQ ID NO: 1746778 - DNA, 15 bp, Homo sapiens
atttgcttttcagga

SEQ ID NO: 1746779 - DNA, 15 bp, Homo sapiens
tttgcttttcaggaa

SEQ ID NO: 1746780 - DNA, 15 bp, Homo sapiens
gcttttcaggaattc

SEQ ID NO: 1746781 - DNA, 15 bp, Homo sapiens
cttttcaggaattct

SEQ ID NO: 1746782 - DNA, 15 bp, Homo sapiens
ttttcaggaattctg

SEQ ID NO: 1746783 - DNA, 15 bp, Homo sapiens
tttcaggaattctgt

SEQ ID NO: 1746784 - DNA, 15 bp, Homo sapiens
ttcaggaattctgtg

SEQ ID NO: 1746785 - DNA, 15 bp, Homo sapiens
tcaggaattctgtgc

SEQ ID NO: 1746786 - DNA, 15 bp, Homo sapiens
caggaattctgtgca

SEQ ID NO: 1746787 - DNA, 15 bp, Homo sapiens
aggaattctgtgcag

SEQ ID NO: 1746788 - DNA, 15 bp, Homo sapiens
ggaattctgtgcaga

SEQ ID NO: 1746789 - DNA, 15 bp, Homo sapiens
gaattctgtgcagaa

SEQ ID NO: 1746790 - DNA, 15 bp, Homo sapiens
aattctgtgcagaag

SEQ ID NO: 1746791 - DNA, 15 bp, Homo sapiens
attctgtgcagaagg

SEQ ID NO: 1746792 - DNA, 15 bp, Homo sapiens
ttctgtgcagaaggc

SEQ ID NO: 1746793 - DNA, 15 bp, Homo sapiens
tctgtgcagaaggca

SEQ ID NO: 1746794 - DNA, 15 bp, Homo sapiens
ctgtgcagaaggcac

SEQ ID NO: 1746795 - DNA, 15 bp, Homo sapiens
tgtgcagaaggcaca

SEQ ID NO: 1746796 - DNA, 15 bp, Homo sapiens
gtgcagaaggcacac

SEQ ID NO: 1746797 - DNA, 15 bp, Homo sapiens
tgcagaaggcacaca

SEQ ID NO: 1746798 - DNA, 15 bp, Homo sapiens
gcagaaggcacacat

SEQ ID NO: 1746799 - DNA, 15 bp, Homo sapiens
cagaaggcacacatc

SEQ ID NO: 1746800 - DNA, 15 bp, Homo sapiens
agaaggcacacatct

SEQ ID NO: 1746801 - DNA, 15 bp, Homo sapiens
gaaggcacacatcta

SEQ ID NO: 1746802 - DNA, 15 bp, Homo sapiens
aaggcacacatctat

SEQ ID NO: 1746803 - DNA, 15 bp, Homo sapiens
aggcacacatctatg

SEQ ID NO: 1746804 - DNA, 15 bp, Homo sapiens
ggcacacatctatgg

SEQ ID NO: 1746805 - DNA, 15 bp, Homo sapiens
gcacacatctatgga

SEQ ID NO: 1746806 - DNA, 15 bp, Homo sapiens
cacacatctatggaa

SEQ ID NO: 1746807 - DNA, 15 bp, Homo sapiens
acacatctatggaat

SEQ ID NO: 1746808 - DNA, 15 bp, Homo sapiens
cacatctatggaatt

SEQ ID NO: 1746809 - DNA, 15 bp, Homo sapiens
acatctatggaatta

SEQ ID NO: 1746810 - DNA, 15 bp, Homo sapiens
catctatggaattac

SEQ ID NO: 1746811 - DNA, 15 bp, Homo sapiens
atctatggaattact

SEQ ID NO: 1746812 - DNA, 15 bp, Homo sapiens
tctatggaattactt

SEQ ID NO: 1746813 - DNA, 15 bp, Homo sapiens
ctatggaattacttt

SEQ ID NO: 1746814 - DNA, 15 bp, Homo sapiens
tatggaattactttt

SEQ ID NO: 1746815 - DNA, 15 bp, Homo sapiens
atggaattactttta

SEQ ID NO: 1746816 - DNA, 15 bp, Homo sapiens
tggaattacttttag

SEQ ID NO: 1746817 - DNA, 15 bp, Homo sapiens
ggaattacttttagt

SEQ ID NO: 1746818 - DNA, 15 bp, Homo sapiens
gaattacttttagta

SEQ ID NO: 1746819 - DNA, 15 bp, Homo sapiens
aattacttttagtat

SEQ ID NO: 1746820 - DNA, 15 bp, Homo sapiens
attacttttagtatc

SEQ ID NO: 1746821 - DNA, 15 bp, Homo sapiens
ttacttttagtatct

SEQ ID NO: 1746822 - DNA, 15 bp, Homo sapiens
tacttttagtatctc

SEQ ID NO: 1746823 - DNA, 15 bp, Homo sapiens
acttttagtatctca

SEQ ID NO: 1746824 - DNA, 15 bp, Homo sapiens
cttttagtatctcac

SEQ ID NO: 1746825 - DNA, 15 bp, Homo sapiens
ttttagtatctcaca

SEQ ID NO: 1746826 - DNA, 15 bp, Homo sapiens
tttagtatctcacaa

SEQ ID NO: 1746827 - DNA, 15 bp, Homo sapiens
ttagtatctcacaag

SEQ ID NO: 1746828 - DNA, 15 bp, Homo sapiens
tagtatctcacaagc

SEQ ID NO: 1746829 - DNA, 15 bp, Homo sapiens
agtatctcacaagca

SEQ ID NO: 1746830 - DNA, 15 bp, Homo sapiens
gtatctcacaagcat

SEQ ID NO: 1746831 - DNA, 15 bp, Homo sapiens
tatctcacaagcatt

SEQ ID NO: 1746832 - DNA, 15 bp, Homo sapiens
atctcacaagcattt

SEQ ID NO: 1746833 - DNA, 15 bp, Homo sapiens
tctcacaagcattta

SEQ ID NO: 1746834 - DNA, 15 bp, Homo sapiens
ctcacaagcatttat

SEQ ID NO: 1746835 - DNA, 15 bp, Homo sapiens
tcacaagcatttatg

SEQ ID NO: 1746836 - DNA, 15 bp, Homo sapiens
cacaagcatttatgt

SEQ ID NO: 1746837 - DNA, 15 bp, Homo sapiens
acaagcatttatgta

SEQ ID NO: 1746838 - DNA, 15 bp, Homo sapiens
caagcatttatgtat

SEQ ID NO: 1746839 - DNA, 15 bp, Homo sapiens
aagcatttatgtatt

SEQ ID NO: 1746840 - DNA, 15 bp, Homo sapiens
agcatttatgtattt

SEQ ID NO: 1746841 - DNA, 15 bp, Homo sapiens
gcatttatgtatttt

SEQ ID NO: 1746842 - DNA, 15 bp, Homo sapiens
catttatgtattttt

SEQ ID NO: 1746843 - DNA, 15 bp, Homo sapiens
atttatgtatttttc

SEQ ID NO: 1746844 - DNA, 15 bp, Homo sapiens
tttatgtatttttcc

SEQ ID NO: 1746845 - DNA, 15 bp, Homo sapiens
ttatgtatttttcct

SEQ ID NO: 1746846 - DNA, 15 bp, Homo sapiens
tatgtatttttccta

SEQ ID NO: 1746847 - DNA, 15 bp, Homo sapiens
atgtatttttcctat

SEQ ID NO: 1746848 - DNA, 15 bp, Homo sapiens
tgtatttttcctatg

SEQ ID NO: 1746849 - DNA, 15 bp, Homo sapiens
gtatttttcctatgc

SEQ ID NO: 1746850 - DNA, 15 bp, Homo sapiens
tatttttcctatgcc

SEQ ID NO: 1746851 - DNA, 15 bp, Homo sapiens
atttttcctatgccg

SEQ ID NO: 1746852 - DNA, 15 bp, Homo sapiens
tttttcctatgccgg

SEQ ID NO: 1746853 - DNA, 15 bp, Homo sapiens
ttttcctatgccggt

SEQ ID NO: 1746854 - DNA, 15 bp, Homo sapiens
tttcctatgccggtt

SEQ ID NO: 1746855 - DNA, 15 bp, Homo sapiens
ttcctatgccggttg

SEQ ID NO: 1746856 - DNA, 15 bp, Homo sapiens
tcctatgccggttgt

SEQ ID NO: 1746857 - DNA, 15 bp, Homo sapiens
cctatgccggttgtt

SEQ ID NO: 1746858 - DNA, 15 bp, Homo sapiens
ctatgccggttgttt

SEQ ID NO: 1746859 - DNA, 15 bp, Homo sapiens
tatgccggttgtttt

SEQ ID NO: 1746860 - DNA, 15 bp, Homo sapiens
atgccggttgttttc

SEQ ID NO: 1746861 - DNA, 15 bp, Homo sapiens
tgccggttgttttcg

SEQ ID NO: 1746862 - DNA, 15 bp, Homo sapiens
gccggttgttttcga

SEQ ID NO: 1746863 - DNA, 15 bp, Homo sapiens
ccggttgttttcgat

SEQ ID NO: 1746864 - DNA, 15 bp, Homo sapiens
cggttgttttcgatt

SEQ ID NO: 1746865 - DNA, 15 bp, Homo sapiens
ggttgttttcgattt

SEQ ID NO: 1746866 - DNA, 15 bp, Homo sapiens
gttgttttcgatttg

SEQ ID NO: 1746867 - DNA, 15 bp, Homo sapiens
ttgttttcgatttgg

SEQ ID NO: 1746868 - DNA, 15 bp, Homo sapiens
tgttttcgatttggt

SEQ ID NO: 1746869 - DNA, 15 bp, Homo sapiens
gttttcgatttggtg

SEQ ID NO: 1746870 - DNA, 15 bp, Homo sapiens
ttttcgatttggtgc

SEQ ID NO: 1746871 - DNA, 15 bp, Homo sapiens
tttcgatttggtgca

SEQ ID NO: 1746872 - DNA, 15 bp, Homo sapiens
ttcgatttggtgcat

SEQ ID NO: 1746873 - DNA, 15 bp, Homo sapiens
tcgatttggtgcata

SEQ ID NO: 1746874 - DNA, 15 bp, Homo sapiens
cgatttggtgcatat

SEQ ID NO: 1746875 - DNA, 15 bp, Homo sapiens
gatttggtgcatatc

SEQ ID NO: 1746876 - DNA, 15 bp, Homo sapiens
atttggtgcatatct

SEQ ID NO: 1746877 - DNA, 15 bp, Homo sapiens
tttggtgcatatctc

SEQ ID NO: 1746878 - DNA, 15 bp, Homo sapiens
ttggtgcatatctca

SEQ ID NO: 1746879 - DNA, 15 bp, Homo sapiens
tggtgcatatctcat

SEQ ID NO: 1746880 - DNA, 15 bp, Homo sapiens
ggtgcatatctcatt

SEQ ID NO: 1746881 - DNA, 15 bp, Homo sapiens
gtgcatatctcattg

SEQ ID NO: 1746882 - DNA, 15 bp, Homo sapiens
tgcatatctcattgt

SEQ ID NO: 1746883 - DNA, 15 bp, Homo sapiens
gcatatctcattgtg

SEQ ID NO: 1746884 - DNA, 15 bp, Homo sapiens
catatctcattgtga

SEQ ID NO: 1746885 - DNA, 15 bp, Homo sapiens
atatctcattgtgaa

SEQ ID NO: 1746886 - DNA, 15 bp, Homo sapiens
tatctcattgtgaat

SEQ ID NO: 1746887 - DNA, 15 bp, Homo sapiens
atctcattgtgaatg

SEQ ID NO: 1746888 - DNA, 15 bp, Homo sapiens
tctcattgtgaatgg

SEQ ID NO: 1746889 - DNA, 15 bp, Homo sapiens
ctcattgtgaatgga

SEQ ID NO: 1746890 - DNA, 15 bp, Homo sapiens
tcattgtgaatggac

SEQ ID NO: 1746891 - DNA, 15 bp, Homo sapiens
cattgtgaatggaca

SEQ ID NO: 1746892 - DNA, 15 bp, Homo sapiens
attgtgaatggacat

SEQ ID NO: 1746893 - DNA, 15 bp, Homo sapiens
ttgtgaatggacata

SEQ ID NO: 1746894 - DNA, 15 bp, Homo sapiens
tgtgaatggacatat

SEQ ID NO: 1746895 - DNA, 15 bp, Homo sapiens
gtgaatggacatatg

SEQ ID NO: 1746896 - DNA, 15 bp, Homo sapiens
tgaatggacatatgc

SEQ ID NO: 1746897 - DNA, 15 bp, Homo sapiens
gaatggacatatgcg

SEQ ID NO: 1746898 - DNA, 15 bp, Homo sapiens
aatggacatatgcgc

SEQ ID NO: 1746899 - DNA, 15 bp, Homo sapiens
atggacatatgcgct

SEQ ID NO: 1746900 - DNA, 15 bp, Homo sapiens
tggacatatgcgctt

SEQ ID NO: 1746901 - DNA, 15 bp, Homo sapiens
ggacatatgcgcttc

SEQ ID NO: 1746902 - DNA, 15 bp, Homo sapiens
gacatatgcgcttca

SEQ ID NO: 1746903 - DNA, 15 bp, Homo sapiens
acatatgcgcttcag

SEQ ID NO: 1746904 - DNA, 15 bp, Homo sapiens
catatgcgcttcaga

SEQ ID NO: 1746905 - DNA, 15 bp, Homo sapiens
atatgcgcttcagag

SEQ ID NO: 1746906 - DNA, 15 bp, Homo sapiens
tatgcgcttcagaga

SEQ ID NO: 1746907 - DNA, 15 bp, Homo sapiens
atgcgcttcagagat

SEQ ID NO: 1746908 - DNA, 15 bp, Homo sapiens
tgcgcttcagagatg

SEQ ID NO: 1746909 - DNA, 15 bp, Homo sapiens
gcgcttcagagatgt

SEQ ID NO: 1746910 - DNA, 15 bp, Homo sapiens
cgcttcagagatgtt

SEQ ID NO: 1746911 - DNA, 15 bp, Homo sapiens
gcttcagagatgtta

SEQ ID NO: 1746912 - DNA, 15 bp, Homo sapiens
cttcagagatgttat

SEQ ID NO: 1746913 - DNA, 15 bp, Homo sapiens
ttcagagatgttatt

SEQ ID NO: 1746914 - DNA, 15 bp, Homo sapiens
tcagagatgttattc

SEQ ID NO: 1746915 - DNA, 15 bp, Homo sapiens
cagagatgttattct

SEQ ID NO: 1746916 - DNA, 15 bp, Homo sapiens
agagatgttattctg

SEQ ID NO: 1746917 - DNA, 15 bp, Homo sapiens
gagatgttattctgt

SEQ ID NO: 1746918 - DNA, 15 bp, Homo sapiens
agatgttattctgta

SEQ ID NO: 1746919 - DNA, 15 bp, Homo sapiens
gatgttattctgtaa

SEQ ID NO: 1746920 - DNA, 15 bp, Homo sapiens
atgttattctgtaag

SEQ ID NO: 1746921 - DNA, 15 bp, Homo sapiens
tgttattctgtaagt

SEQ ID NO: 1746922 - DNA, 15 bp, Homo sapiens
gttattctgtaagta

SEQ ID NO: 1746923 - DNA, 15 bp, Homo sapiens
ttattctgtaagtag

SEQ ID NO: 1746924 - DNA, 15 bp, Homo sapiens
tattctgtaagtagc

SEQ ID NO: 1746925 - DNA, 15 bp, Homo sapiens
attctgtaagtagct

SEQ ID NO: 1746926 - DNA, 15 bp, Homo sapiens
ttctgtaagtagctt

SEQ ID NO: 1746927 - DNA, 15 bp, Homo sapiens
tctgtaagtagcttt

SEQ ID NO: 1746928 - DNA, 15 bp, Homo sapiens
ctgtaagtagcttta

SEQ ID NO: 1746929 - DNA, 15 bp, Homo sapiens
tgtaagtagctttag

SEQ ID NO: 1746930 - DNA, 15 bp, Homo sapiens
gtaagtagctttaga

SEQ ID NO: 1746931 - DNA, 15 bp, Homo sapiens
taagtagctttagaa

SEQ ID NO: 1746932 - DNA, 15 bp, Homo sapiens
aagtagctttagaaa

SEQ ID NO: 1746933 - DNA, 15 bp, Homo sapiens
agtagctttagaaat

SEQ ID NO: 1746934 - DNA, 15 bp, Homo sapiens
gtagctttagaaata

SEQ ID NO: 1746935 - DNA, 15 bp, Homo sapiens
tagctttagaaatat

SEQ ID NO: 1746936 - DNA, 15 bp, Homo sapiens
agctttagaaatatt

SEQ ID NO: 1746937 - DNA, 15 bp, Homo sapiens
gctttagaaatatta

SEQ ID NO: 1746938 - DNA, 15 bp, Homo sapiens
ctttagaaatattaa

SEQ ID NO: 1746939 - DNA, 15 bp, Homo sapiens
tttagaaatattaag

SEQ ID NO: 1746940 - DNA, 15 bp, Homo sapiens
ttagaaatattaaga

SEQ ID NO: 1746941 - DNA, 15 bp, Homo sapiens
tagaaatattaagat

SEQ ID NO: 1746942 - DNA, 15 bp, Homo sapiens
agaaatattaagatt

SEQ ID NO: 1746943 - DNA, 15 bp, Homo sapiens
gaaatattaagatta

SEQ ID NO: 1746944 - DNA, 15 bp, Homo sapiens
aaatattaagattat

SEQ ID NO: 1746945 - DNA, 15 bp, Homo sapiens
aatattaagattatt

SEQ ID NO: 1746946 - DNA, 15 bp, Homo sapiens
atattaagattattc

SEQ ID NO: 1746947 - DNA, 15 bp, Homo sapiens
tattaagattattct

SEQ ID NO: 1746948 - DNA, 15 bp, Homo sapiens
attaagattattcta

SEQ ID NO: 1746949 - DNA, 15 bp, Homo sapiens
ttaagattattctat

SEQ ID NO: 1746950 - DNA, 15 bp, Homo sapiens
taagattattctata

SEQ ID NO: 1746951 - DNA, 15 bp, Homo sapiens
aagattattctataa

SEQ ID NO: 1746952 - DNA, 15 bp, Homo sapiens
agattattctataat

SEQ ID NO: 1746953 - DNA, 15 bp, Homo sapiens
gattattctataata

SEQ ID NO: 1746954 - DNA, 15 bp, Homo sapiens
attattctataataa

SEQ ID NO: 1746955 - DNA, 15 bp, Homo sapiens
ttattctataataag

SEQ ID NO: 1746956 - DNA, 15 bp, Homo sapiens
tattctataataagg

SEQ ID NO: 1746957 - DNA, 15 bp, Homo sapiens
attctataataaggt

SEQ ID NO: 1746958 - DNA, 15 bp, Homo sapiens
ttctataataaggtt

SEQ ID NO: 1746959 - DNA, 15 bp, Homo sapiens
tctataataaggttt

SEQ ID NO: 1746960 - DNA, 15 bp, Homo sapiens
ctataataaggtttt

SEQ ID NO: 1746961 - DNA, 15 bp, Homo sapiens
tataataaggtttta

SEQ ID NO: 1746962 - DNA, 15 bp, Homo sapiens
ataataaggttttag

SEQ ID NO: 1746963 - DNA, 15 bp, Homo sapiens
taataaggttttagt

SEQ ID NO: 1746964 - DNA, 15 bp, Homo sapiens
aataaggttttagta

SEQ ID NO: 1746965 - DNA, 15 bp, Homo sapiens
ataaggttttagtag

SEQ ID NO: 1746966 - DNA, 15 bp, Homo sapiens
taaggttttagtagg

SEQ ID NO: 1746967 - DNA, 15 bp, Homo sapiens
aaggttttagtaggt

SEQ ID NO: 1746968 - DNA, 15 bp, Homo sapiens
aggttttagtaggtt

SEQ ID NO: 1746969 - DNA, 15 bp, Homo sapiens
ggttttagtaggttt

SEQ ID NO: 1746970 - DNA, 15 bp, Homo sapiens
gttttagtaggttta

SEQ ID NO: 1746971 - DNA, 15 bp, Homo sapiens
ttttagtaggtttat

SEQ ID NO: 1746972 - DNA, 15 bp, Homo sapiens
tttagtaggtttatg

SEQ ID NO: 1746973 - DNA, 15 bp, Homo sapiens
ttagtaggtttatgc

SEQ ID NO: 1746974 - DNA, 15 bp, Homo sapiens
tagtaggtttatgca

SEQ ID NO: 1746975 - DNA, 15 bp, Homo sapiens
agtaggtttatgcaa

SEQ ID NO: 1746976 - DNA, 15 bp, Homo sapiens
gtaggtttatgcaaa

SEQ ID NO: 1746977 - DNA, 15 bp, Homo sapiens
taggtttatgcaaaa

SEQ ID NO: 1746978 - DNA, 15 bp, Homo sapiens
aggtttatgcaaaag

SEQ ID NO: 1746979 - DNA, 15 bp, Homo sapiens
ggtttatgcaaaagt

SEQ ID NO: 1746980 - DNA, 15 bp, Homo sapiens
gtttatgcaaaagtt

SEQ ID NO: 1746981 - DNA, 15 bp, Homo sapiens
tttatgcaaaagttt

SEQ ID NO: 1746982 - DNA, 15 bp, Homo sapiens
ttatgcaaaagttta

SEQ ID NO: 1746983 - DNA, 15 bp, Homo sapiens
tatgcaaaagtttag

SEQ ID NO: 1746984 - DNA, 15 bp, Homo sapiens
atgcaaaagtttaga

SEQ ID NO: 1746985 - DNA, 15 bp, Homo sapiens
tgcaaaagtttagag

SEQ ID NO: 1746986 - DNA, 15 bp, Homo sapiens
gcaaaagtttagagt

SEQ ID NO: 1746987 - DNA, 15 bp, Homo sapiens
caaaagtttagagta

SEQ ID NO: 1746988 - DNA, 15 bp, Homo sapiens
aaaagtttagagtag

SEQ ID NO: 1746989 - DNA, 15 bp, Homo sapiens
aaagtttagagtagg

SEQ ID NO: 1746990 - DNA, 15 bp, Homo sapiens
aagtttagagtagga

SEQ ID NO: 1746991 - DNA, 15 bp, Homo sapiens
agtttagagtaggaa

SEQ ID NO: 1746992 - DNA, 15 bp, Homo sapiens
gtttagagtaggaaa

SEQ ID NO: 1746993 - DNA, 15 bp, Homo sapiens
tttagagtaggaaaa

SEQ ID NO: 1746994 - DNA, 15 bp, Homo sapiens
ttagagtaggaaaaa

SEQ ID NO: 1746995 - DNA, 15 bp, Homo sapiens
tagagtaggaaaaaa

SEQ ID NO: 1746996 - DNA, 15 bp, Homo sapiens
agagtaggaaaaaaa

SEQ ID NO: 1746997 - DNA, 15 bp, Homo sapiens
gagtaggaaaaaaat

SEQ ID NO: 1746998 - DNA, 15 bp, Homo sapiens
agtaggaaaaaaatg

SEQ ID NO: 1746999 - DNA, 15 bp, Homo sapiens
gtaggaaaaaaatga

SEQ ID NO: 1747000 - DNA, 15 bp, Homo sapiens
taggaaaaaaatgac

SEQ ID NO: 1747001 - DNA, 15 bp, Homo sapiens
aggaaaaaaatgact

SEQ ID NO: 1747002 - DNA, 15 bp, Homo sapiens
ggaaaaaaatgactc

SEQ ID NO: 1747003 - DNA, 15 bp, Homo sapiens
gaaaaaaatgactcc

SEQ ID NO: 1747004 - DNA, 15 bp, Homo sapiens
aaaaaaatgactcct

SEQ ID NO: 1747005 - DNA, 15 bp, Homo sapiens
aaaaaatgactcctg

SEQ ID NO: 1747006 - DNA, 15 bp, Homo sapiens
aaaaatgactcctgt

SEQ ID NO: 1747007 - DNA, 15 bp, Homo sapiens
aaaatgactcctgtg

SEQ ID NO: 1747008 - DNA, 15 bp, Homo sapiens
aaatgactcctgtgt

SEQ ID NO: 1747009 - DNA, 15 bp, Homo sapiens
aatgactcctgtgtc

SEQ ID NO: 1747010 - DNA, 15 bp, Homo sapiens
atgactcctgtgtcc

SEQ ID NO: 1747011 - DNA, 15 bp, Homo sapiens
tgactcctgtgtcca

SEQ ID NO: 1747012 - DNA, 15 bp, Homo sapiens
gactcctgtgtccaa

SEQ ID NO: 1747013 - DNA, 15 bp, Homo sapiens
actcctgtgtccaaa

SEQ ID NO: 1747014 - DNA, 15 bp, Homo sapiens
ctcctgtgtccaaag

SEQ ID NO: 1747015 - DNA, 15 bp, Homo sapiens
tcctgtgtccaaaga

SEQ ID NO: 1747016 - DNA, 15 bp, Homo sapiens
cctgtgtccaaagat

SEQ ID NO: 1747017 - DNA, 15 bp, Homo sapiens
ctgtgtccaaagatg

SEQ ID NO: 1747018 - DNA, 15 bp, Homo sapiens
tgtgtccaaagatga

SEQ ID NO: 1747019 - DNA, 15 bp, Homo sapiens
gtgtccaaagatgag

SEQ ID NO: 1747020 - DNA, 15 bp, Homo sapiens
tgtccaaagatgagg

SEQ ID NO: 1747021 - DNA, 15 bp, Homo sapiens
gtccaaagatgaggt

SEQ ID NO: 1747022 - DNA, 15 bp, Homo sapiens
tccaaagatgaggtc

SEQ ID NO: 1747023 - DNA, 15 bp, Homo sapiens
ccaaagatgaggtca

SEQ ID NO: 1747024 - DNA, 15 bp, Homo sapiens
caaagatgaggtcag

SEQ ID NO: 1747025 - DNA, 15 bp, Homo sapiens
aaagatgaggtcagg

SEQ ID NO: 1747026 - DNA, 15 bp, Homo sapiens
aagatgaggtcaggg

SEQ ID NO: 1747027 - DNA, 15 bp, Homo sapiens
agatgaggtcaggga

SEQ ID NO: 1747028 - DNA, 15 bp, Homo sapiens
gatgaggtcagggat

SEQ ID NO: 1747029 - DNA, 15 bp, Homo sapiens
atgaggtcagggatt

SEQ ID NO: 1747030 - DNA, 15 bp, Homo sapiens
tgaggtcagggattt

SEQ ID NO: 1747031 - DNA, 15 bp, Homo sapiens
gaggtcagggattta

SEQ ID NO: 1747032 - DNA, 15 bp, Homo sapiens
aggtcagggatttaa

SEQ ID NO: 1747033 - DNA, 15 bp, Homo sapiens
ggtcagggatttaaa

SEQ ID NO: 1747034 - DNA, 15 bp, Homo sapiens
gtcagggatttaaat

SEQ ID NO: 1747035 - DNA, 15 bp, Homo sapiens
tcagggatttaaatt

SEQ ID NO: 1747036 - DNA, 15 bp, Homo sapiens
cagggatttaaattt

SEQ ID NO: 1747037 - DNA, 15 bp, Homo sapiens
agggatttaaattta

SEQ ID NO: 1747038 - DNA, 15 bp, Homo sapiens
gggatttaaatttac

SEQ ID NO: 1747039 - DNA, 15 bp, Homo sapiens
ggatttaaatttacc

SEQ ID NO: 1747040 - DNA, 15 bp, Homo sapiens
gatttaaatttacca

SEQ ID NO: 1747041 - DNA, 15 bp, Homo sapiens
atttaaatttaccac

SEQ ID NO: 1747042 - DNA, 15 bp, Homo sapiens
tttaaatttaccaca

SEQ ID NO: 1747043 - DNA, 15 bp, Homo sapiens
ttaaatttaccacag

SEQ ID NO: 1747044 - DNA, 15 bp, Homo sapiens
taaatttaccacagt

SEQ ID NO: 1747045 - DNA, 15 bp, Homo sapiens
aaatttaccacagtt

SEQ ID NO: 1747046 - DNA, 15 bp, Homo sapiens
aatttaccacagttt

SEQ ID NO: 1747047 - DNA, 15 bp, Homo sapiens
atttaccacagtttc

SEQ ID NO: 1747048 - DNA, 15 bp, Homo sapiens
tttaccacagtttcc

SEQ ID NO: 1747049 - DNA, 15 bp, Homo sapiens
ttaccacagtttcca

SEQ ID NO: 1747050 - DNA, 15 bp, Homo sapiens
taccacagtttccat

SEQ ID NO: 1747051 - DNA, 15 bp, Homo sapiens
accacagtttccatc

SEQ ID NO: 1747052 - DNA, 15 bp, Homo sapiens
ccacagtttccatcc

SEQ ID NO: 1747053 - DNA, 15 bp, Homo sapiens
cacagtttccatcct

SEQ ID NO: 1747054 - DNA, 15 bp, Homo sapiens
acagtttccatcctg

SEQ ID NO: 1747055 - DNA, 15 bp, Homo sapiens
cagtttccatcctgg

SEQ ID NO: 1747056 - DNA, 15 bp, Homo sapiens
agtttccatcctggc

SEQ ID NO: 1747057 - DNA, 15 bp, Homo sapiens
gtttccatcctggca

SEQ ID NO: 1747058 - DNA, 15 bp, Homo sapiens
tttccatcctggcag

SEQ ID NO: 1747059 - DNA, 15 bp, Homo sapiens
ttccatcctggcagg

SEQ ID NO: 1747060 - DNA, 15 bp, Homo sapiens
tccatcctggcaggc

SEQ ID NO: 1747061 - DNA, 15 bp, Homo sapiens
ccatcctggcaggca

SEQ ID NO: 1747062 - DNA, 15 bp, Homo sapiens
catcctggcaggcac

SEQ ID NO: 1747063 - DNA, 15 bp, Homo sapiens
atcctggcaggcaca

SEQ ID NO: 1747064 - DNA, 15 bp, Homo sapiens
tcctggcaggcacag

SEQ ID NO: 1747065 - DNA, 15 bp, Homo sapiens
cctggcaggcacaga

SEQ ID NO: 1747066 - DNA, 15 bp, Homo sapiens
ctggcaggcacagag

SEQ ID NO: 1747067 - DNA, 15 bp, Homo sapiens
tggcaggcacagaga

SEQ ID NO: 1747068 - DNA, 15 bp, Homo sapiens
ggcaggcacagagat

SEQ ID NO: 1747069 - DNA, 15 bp, Homo sapiens
gcaggcacagagatc

SEQ ID NO: 1747070 - DNA, 15 bp, Homo sapiens
caggcacagagatct

SEQ ID NO: 1747071 - DNA, 15 bp, Homo sapiens
aggcacagagatctg

SEQ ID NO: 1747072 - DNA, 15 bp, Homo sapiens
ggcacagagatctga

SEQ ID NO: 1747073 - DNA, 15 bp, Homo sapiens
gcacagagatctgat

SEQ ID NO: 1747074 - DNA, 15 bp, Homo sapiens
cacagagatctgatc

SEQ ID NO: 1747075 - DNA, 15 bp, Homo sapiens
acagagatctgatct

SEQ ID NO: 1747076 - DNA, 15 bp, Homo sapiens
cagagatctgatctt

SEQ ID NO: 1747077 - DNA, 15 bp, Homo sapiens
agagatctgatcttg

SEQ ID NO: 1747078 - DNA, 15 bp, Homo sapiens
gagatctgatcttgt

SEQ ID NO: 1747079 - DNA, 15 bp, Homo sapiens
agatctgatcttgtt

SEQ ID NO: 1747080 - DNA, 15 bp, Homo sapiens
gatctgatcttgtta

SEQ ID NO: 1747081 - DNA, 15 bp, Homo sapiens
atctgatcttgttaa

SEQ ID NO: 1747082 - DNA, 15 bp, Homo sapiens
tctgatcttgttaat

SEQ ID NO: 1747083 - DNA, 15 bp, Homo sapiens
ctgatcttgttaata

SEQ ID NO: 1747084 - DNA, 15 bp, Homo sapiens
tgatcttgttaatac

SEQ ID NO: 1747085 - DNA, 15 bp, Homo sapiens
gatcttgttaatact

SEQ ID NO: 1747086 - DNA, 15 bp, Homo sapiens
atcttgttaatactc

SEQ ID NO: 1747087 - DNA, 15 bp, Homo sapiens
tcttgttaatactcc

SEQ ID NO: 1747088 - DNA, 15 bp, Homo sapiens
cttgttaatactcca

SEQ ID NO: 1747089 - DNA, 15 bp, Homo sapiens
ttgttaatactccaa

SEQ ID NO: 1747090 - DNA, 15 bp, Homo sapiens
tgttaatactccaag

SEQ ID NO: 1747091 - DNA, 15 bp, Homo sapiens
gttaatactccaagt

SEQ ID NO: 1747092 - DNA, 15 bp, Homo sapiens
ttaatactccaagtg

SEQ ID NO: 1747093 - DNA, 15 bp, Homo sapiens
taatactccaagtgc

SEQ ID NO: 1747094 - DNA, 15 bp, Homo sapiens
aatactccaagtgca

SEQ ID NO: 1747095 - DNA, 15 bp, Homo sapiens
atactccaagtgcag

SEQ ID NO: 1747096 - DNA, 15 bp, Homo sapiens
tactccaagtgcagt

SEQ ID NO: 1747097 - DNA, 15 bp, Homo sapiens
actccaagtgcagtt

SEQ ID NO: 1747098 - DNA, 15 bp, Homo sapiens
ctccaagtgcagttt

SEQ ID NO: 1747099 - DNA, 15 bp, Homo sapiens
tccaagtgcagtttc

SEQ ID NO: 1747100 - DNA, 15 bp, Homo sapiens
ccaagtgcagtttca

SEQ ID NO: 1747101 - DNA, 15 bp, Homo sapiens
caagtgcagtttcat

SEQ ID NO: 1747102 - DNA, 15 bp, Homo sapiens
aagtgcagtttcatt

SEQ ID NO: 1747103 - DNA, 15 bp, Homo sapiens
agtgcagtttcattt

SEQ ID NO: 1747104 - DNA, 15 bp, Homo sapiens
gtgcagtttcatttt

SEQ ID NO: 1747105 - DNA, 15 bp, Homo sapiens
tgcagtttcattttg

SEQ ID NO: 1747106 - DNA, 15 bp, Homo sapiens
gcagtttcattttgc

SEQ ID NO: 1747107 - DNA, 15 bp, Homo sapiens
cagtttcattttgcg

SEQ ID NO: 1747108 - DNA, 15 bp, Homo sapiens
agtttcattttgcgg

SEQ ID NO: 1747109 - DNA, 15 bp, Homo sapiens
gtttcattttgcggg

SEQ ID NO: 1747110 - DNA, 15 bp, Homo sapiens
tttcattttgcgggc

SEQ ID NO: 1747111 - DNA, 15 bp, Homo sapiens
ttcattttgcgggct

SEQ ID NO: 1747112 - DNA, 15 bp, Homo sapiens
tcattttgcgggcta

SEQ ID NO: 1747113 - DNA, 15 bp, Homo sapiens
cattttgcgggctac

SEQ ID NO: 1747114 - DNA, 15 bp, Homo sapiens
attttgcgggctaca

SEQ ID NO: 1747115 - DNA, 15 bp, Homo sapiens
ttttgcgggctacaa

SEQ ID NO: 1747116 - DNA, 15 bp, Homo sapiens
tttgcgggctacaat

SEQ ID NO: 1747117 - DNA, 15 bp, Homo sapiens
ttgcgggctacaatt

SEQ ID NO: 1747118 - DNA, 15 bp, Homo sapiens
tgcgggctacaatta

SEQ ID NO: 1747119 - DNA, 15 bp, Homo sapiens
gcgggctacaattaa

SEQ ID NO: 1747120 - DNA, 15 bp, Homo sapiens
cgggctacaattaag

SEQ ID NO: 1747121 - DNA, 15 bp, Homo sapiens
gggctacaattaagc

SEQ ID NO: 1747122 - DNA, 15 bp, Homo sapiens
ggctacaattaagct

SEQ ID NO: 1747123 - DNA, 15 bp, Homo sapiens
gctacaattaagctt

SEQ ID NO: 1747124 - DNA, 15 bp, Homo sapiens
ctacaattaagctta

SEQ ID NO: 1747125 - DNA, 15 bp, Homo sapiens
tacaattaagcttat

SEQ ID NO: 1747126 - DNA, 15 bp, Homo sapiens
acaattaagcttatg

SEQ ID NO: 1747127 - DNA, 15 bp, Homo sapiens
caattaagcttatga

SEQ ID NO: 1747128 - DNA, 15 bp, Homo sapiens
aattaagcttatgaa

SEQ ID NO: 1747129 - DNA, 15 bp, Homo sapiens
attaagcttatgaaa

SEQ ID NO: 1747130 - DNA, 15 bp, Homo sapiens
ttaagcttatgaaaa

SEQ ID NO: 1747131 - DNA, 15 bp, Homo sapiens
taagcttatgaaaat

SEQ ID NO: 1747132 - DNA, 15 bp, Homo sapiens
aagcttatgaaaatg

SEQ ID NO: 1747133 - DNA, 15 bp, Homo sapiens
agcttatgaaaatga

SEQ ID NO: 1747134 - DNA, 15 bp, Homo sapiens
gcttatgaaaatgat

SEQ ID NO: 1747135 - DNA, 15 bp, Homo sapiens
cttatgaaaatgatc

SEQ ID NO: 1747136 - DNA, 15 bp, Homo sapiens
ttatgaaaatgatca

SEQ ID NO: 1747137 - DNA, 15 bp, Homo sapiens
tatgaaaatgatcag

SEQ ID NO: 1747138 - DNA, 15 bp, Homo sapiens
atgaaaatgatcaga

SEQ ID NO: 1747139 - DNA, 15 bp, Homo sapiens
tgaaaatgatcagaa

SEQ ID NO: 1747140 - DNA, 15 bp, Homo sapiens
gaaaatgatcagaaa

SEQ ID NO: 1747141 - DNA, 15 bp, Homo sapiens
aaaatgatcagaaag

SEQ ID NO: 1747142 - DNA, 15 bp, Homo sapiens
aaatgatcagaaagc

SEQ ID NO: 1747143 - DNA, 15 bp, Homo sapiens
aatgatcagaaagca

SEQ ID NO: 1747144 - DNA, 15 bp, Homo sapiens
atgatcagaaagcac

SEQ ID NO: 1747145 - DNA, 15 bp, Homo sapiens
tgatcagaaagcaca

SEQ ID NO: 1747146 - DNA, 15 bp, Homo sapiens
gatcagaaagcacag

SEQ ID NO: 1747147 - DNA, 15 bp, Homo sapiens
atcagaaagcacagt

SEQ ID NO: 1747148 - DNA, 15 bp, Homo sapiens
tcagaaagcacagtt

SEQ ID NO: 1747149 - DNA, 15 bp, Homo sapiens
cagaaagcacagttt

SEQ ID NO: 1747150 - DNA, 15 bp, Homo sapiens
agaaagcacagtttt

SEQ ID NO: 1747151 - DNA, 15 bp, Homo sapiens
gaaagcacagtttta

SEQ ID NO: 1747152 - DNA, 15 bp, Homo sapiens
aaagcacagttttag

SEQ ID NO: 1747153 - DNA, 15 bp, Homo sapiens
aagcacagttttagt

SEQ ID NO: 1747154 - DNA, 15 bp, Homo sapiens
agcacagttttagtt

SEQ ID NO: 1747155 - DNA, 15 bp, Homo sapiens
gcacagttttagttg

SEQ ID NO: 1747156 - DNA, 15 bp, Homo sapiens
cacagttttagttgt

SEQ ID NO: 1747157 - DNA, 15 bp, Homo sapiens
acagttttagttgta

SEQ ID NO: 1747158 - DNA, 15 bp, Homo sapiens
cagttttagttgtac

SEQ ID NO: 1747159 - DNA, 15 bp, Homo sapiens
agttttagttgtaca

SEQ ID NO: 1747160 - DNA, 15 bp, Homo sapiens
gttttagttgtacat

SEQ ID NO: 1747161 - DNA, 15 bp, Homo sapiens
ttttagttgtacata

SEQ ID NO: 1747162 - DNA, 15 bp, Homo sapiens
tttagttgtacatat

SEQ ID NO: 1747163 - DNA, 15 bp, Homo sapiens
ttagttgtacatatg

SEQ ID NO: 1747164 - DNA, 15 bp, Homo sapiens
tagttgtacatatga

SEQ ID NO: 1747165 - DNA, 15 bp, Homo sapiens
agttgtacatatgat

SEQ ID NO: 1747166 - DNA, 15 bp, Homo sapiens
gttgtacatatgatc

SEQ ID NO: 1747167 - DNA, 15 bp, Homo sapiens
ttgtacatatgatcc

SEQ ID NO: 1747168 - DNA, 15 bp, Homo sapiens
tgtacatatgatcct

SEQ ID NO: 1747169 - DNA, 15 bp, Homo sapiens
gtacatatgatcctg

SEQ ID NO: 1747170 - DNA, 15 bp, Homo sapiens
tacatatgatcctgg

SEQ ID NO: 1747171 - DNA, 15 bp, Homo sapiens
acatatgatcctggt

SEQ ID NO: 1747172 - DNA, 15 bp, Homo sapiens
catatgatcctggtc

SEQ ID NO: 1747173 - DNA, 15 bp, Homo sapiens
atatgatcctggtca

SEQ ID NO: 1747174 - DNA, 15 bp, Homo sapiens
tatgatcctggtcag

SEQ ID NO: 1747175 - DNA, 15 bp, Homo sapiens
atgatcctggtcagg

SEQ ID NO: 1747176 - DNA, 15 bp, Homo sapiens
tgatcctggtcagga

SEQ ID NO: 1747177 - DNA, 15 bp, Homo sapiens
gatcctggtcaggat

SEQ ID NO: 1747178 - DNA, 15 bp, Homo sapiens
atcctggtcaggatg

SEQ ID NO: 1747179 - DNA, 15 bp, Homo sapiens
tcctggtcaggatga

SEQ ID NO: 1747180 - DNA, 15 bp, Homo sapiens
cctggtcaggatgat

SEQ ID NO: 1747181 - DNA, 15 bp, Homo sapiens
ctggtcaggatgatg

SEQ ID NO: 1747182 - DNA, 15 bp, Homo sapiens
tggtcaggatgatgc

SEQ ID NO: 1747183 - DNA, 15 bp, Homo sapiens
ggtcaggatgatgca

SEQ ID NO: 1747184 - DNA, 15 bp, Homo sapiens
gtcaggatgatgcaa

SEQ ID NO: 1747185 - DNA, 15 bp, Homo sapiens
tcaggatgatgcaaa

SEQ ID NO: 1747186 - DNA, 15 bp, Homo sapiens
caggatgatgcaaat

SEQ ID NO: 1747187 - DNA, 15 bp, Homo sapiens
aggatgatgcaaatt

SEQ ID NO: 1747188 - DNA, 15 bp, Homo sapiens
ggatgatgcaaattt

SEQ ID NO: 1747189 - DNA, 15 bp, Homo sapiens
gatgatgcaaatttt

SEQ ID NO: 1747190 - DNA, 15 bp, Homo sapiens
atgatgcaaattttc

SEQ ID NO: 1747191 - DNA, 15 bp, Homo sapiens
tgatgcaaattttct

SEQ ID NO: 1747192 - DNA, 15 bp, Homo sapiens
gatgcaaattttctc

SEQ ID NO: 1747193 - DNA, 15 bp, Homo sapiens
atgcaaattttctca

SEQ ID NO: 1747194 - DNA, 15 bp, Homo sapiens
tgcaaattttctcat

SEQ ID NO: 1747195 - DNA, 15 bp, Homo sapiens
gcaaattttctcatt

SEQ ID NO: 1747196 - DNA, 15 bp, Homo sapiens
caaattttctcatta

SEQ ID NO: 1747197 - DNA, 15 bp, Homo sapiens
aaattttctcattat

SEQ ID NO: 1747198 - DNA, 15 bp, Homo sapiens
aattttctcattata

SEQ ID NO: 1747199 - DNA, 15 bp, Homo sapiens
attttctcattatag

SEQ ID NO: 1747200 - DNA, 15 bp, Homo sapiens
ttttctcattataga

SEQ ID NO: 1747201 - DNA, 15 bp, Homo sapiens
tttctcattatagaa

SEQ ID NO: 1747202 - DNA, 15 bp, Homo sapiens
ttctcattatagaat

SEQ ID NO: 1747203 - DNA, 15 bp, Homo sapiens
tctcattatagaata

SEQ ID NO: 1747204 - DNA, 15 bp, Homo sapiens
ctcattatagaatat

SEQ ID NO: 1747205 - DNA, 15 bp, Homo sapiens
tcattatagaatata

SEQ ID NO: 1747206 - DNA, 15 bp, Homo sapiens
cattatagaatatag

SEQ ID NO: 1747207 - DNA, 15 bp, Homo sapiens
attatagaatatagg

SEQ ID NO: 1747208 - DNA, 15 bp, Homo sapiens
ttatagaatataggc

SEQ ID NO: 1747209 - DNA, 15 bp, Homo sapiens
tatagaatataggca

SEQ ID NO: 1747210 - DNA, 15 bp, Homo sapiens
atagaatataggcag

SEQ ID NO: 1747211 - DNA, 15 bp, Homo sapiens
tagaatataggcaga

SEQ ID NO: 1747212 - DNA, 15 bp, Homo sapiens
agaatataggcagaa

SEQ ID NO: 1747213 - DNA, 15 bp, Homo sapiens
gaatataggcagaaa

SEQ ID NO: 1747214 - DNA, 15 bp, Homo sapiens
aatataggcagaaaa

SEQ ID NO: 1747215 - DNA, 15 bp, Homo sapiens
atataggcagaaaaa

SEQ ID NO: 1747216 - DNA, 15 bp, Homo sapiens
tataggcagaaaaaa

SEQ ID NO: 1747217 - DNA, 15 bp, Homo sapiens
ataggcagaaaaaat

SEQ ID NO: 1747218 - DNA, 15 bp, Homo sapiens
taggcagaaaaaatc

SEQ ID NO: 1747219 - DNA, 15 bp, Homo sapiens
aggcagaaaaaatca

SEQ ID NO: 1747220 - DNA, 15 bp, Homo sapiens
ggcagaaaaaatcat

SEQ ID NO: 1747221 - DNA, 15 bp, Homo sapiens
gcagaaaaaatcata

SEQ ID NO: 1747222 - DNA, 15 bp, Homo sapiens
cagaaaaaatcataa

SEQ ID NO: 1747223 - DNA, 15 bp, Homo sapiens
agaaaaaatcataat

SEQ ID NO: 1747224 - DNA, 15 bp, Homo sapiens
gaaaaaatcataatt

SEQ ID NO: 1747225 - DNA, 15 bp, Homo sapiens
aaaaaatcataatta

SEQ ID NO: 1747226 - DNA, 15 bp, Homo sapiens
aaaaatcataattag

SEQ ID NO: 1747227 - DNA, 15 bp, Homo sapiens
aaaatcataattaga

SEQ ID NO: 1747228 - DNA, 15 bp, Homo sapiens
aaatcataattagaa

SEQ ID NO: 1747229 - DNA, 15 bp, Homo sapiens
aatcataattagaaa

SEQ ID NO: 1747230 - DNA, 15 bp, Homo sapiens
atcataattagaaag

SEQ ID NO: 1747231 - DNA, 15 bp, Homo sapiens
tcataattagaaagt

SEQ ID NO: 1747232 - DNA, 15 bp, Homo sapiens
cataattagaaagtt

SEQ ID NO: 1747233 - DNA, 15 bp, Homo sapiens
ataattagaaagttg

SEQ ID NO: 1747234 - DNA, 15 bp, Homo sapiens
taattagaaagttgc

SEQ ID NO: 1747235 - DNA, 15 bp, Homo sapiens
aattagaaagttgct

SEQ ID NO: 1747236 - DNA, 15 bp, Homo sapiens
attagaaagttgctg

SEQ ID NO: 1747237 - DNA, 15 bp, Homo sapiens
ttagaaagttgctgg

SEQ ID NO: 1747238 - DNA, 15 bp, Homo sapiens
tagaaagttgctggt

SEQ ID NO: 1747239 - DNA, 15 bp, Homo sapiens
agaaagttgctggtg

SEQ ID NO: 1747240 - DNA, 15 bp, Homo sapiens
gaaagttgctggtga

SEQ ID NO: 1747241 - DNA, 15 bp, Homo sapiens
aaagttgctggtgac

SEQ ID NO: 1747242 - DNA, 15 bp, Homo sapiens
aagttgctggtgacc

SEQ ID NO: 1747243 - DNA, 15 bp, Homo sapiens
agttgctggtgacca

SEQ ID NO: 1747244 - DNA, 15 bp, Homo sapiens
gttgctggtgaccat

SEQ ID NO: 1747245 - DNA, 15 bp, Homo sapiens
ttgctggtgaccatg

SEQ ID NO: 1747246 - DNA, 15 bp, Homo sapiens
tgctggtgaccatgg

SEQ ID NO: 1747247 - DNA, 15 bp, Homo sapiens
gctggtgaccatgga

SEQ ID NO: 1747248 - DNA, 15 bp, Homo sapiens
ctggtgaccatggac

SEQ ID NO: 1747249 - DNA, 15 bp, Homo sapiens
tggtgaccatggact

SEQ ID NO: 1747250 - DNA, 15 bp, Homo sapiens
ggtgaccatggactc

SEQ ID NO: 1747251 - DNA, 15 bp, Homo sapiens
gtgaccatggactca

SEQ ID NO: 1747252 - DNA, 15 bp, Homo sapiens
tgaccatggactcaa

SEQ ID NO: 1747253 - DNA, 15 bp, Homo sapiens
gaccatggactcaaa

SEQ ID NO: 1747254 - DNA, 15 bp, Homo sapiens
accatggactcaaaa

SEQ ID NO: 1747255 - DNA, 15 bp, Homo sapiens
ccatggactcaaaac

SEQ ID NO: 1747256 - DNA, 15 bp, Homo sapiens
catggactcaaaaca

SEQ ID NO: 1747257 - DNA, 15 bp, Homo sapiens
atggactcaaaacag

SEQ ID NO: 1747258 - DNA, 15 bp, Homo sapiens
tggactcaaaacagg

SEQ ID NO: 1747259 - DNA, 15 bp, Homo sapiens
ggactcaaaacaggg

SEQ ID NO: 1747260 - DNA, 15 bp, Homo sapiens
gactcaaaacagggt

SEQ ID NO: 1747261 - DNA, 15 bp, Homo sapiens
actcaaaacagggtt

SEQ ID NO: 1747262 - DNA, 15 bp, Homo sapiens
ctcaaaacagggtta

SEQ ID NO: 1747263 - DNA, 15 bp, Homo sapiens
tcaaaacagggttat

SEQ ID NO: 1747264 - DNA, 15 bp, Homo sapiens
caaaacagggttata

SEQ ID NO: 1747265 - DNA, 15 bp, Homo sapiens
aaaacagggttatat

SEQ ID NO: 1747266 - DNA, 15 bp, Homo sapiens
aaacagggttatata

SEQ ID NO: 1747267 - DNA, 15 bp, Homo sapiens
aacagggttatatag

SEQ ID NO: 1747268 - DNA, 15 bp, Homo sapiens
acagggttatatagc

SEQ ID NO: 1747269 - DNA, 15 bp, Homo sapiens
cagggttatatagct

SEQ ID NO: 1747270 - DNA, 15 bp, Homo sapiens
agggttatatagctt

SEQ ID NO: 1747271 - DNA, 15 bp, Homo sapiens
gggttatatagctta

SEQ ID NO: 1747272 - DNA, 15 bp, Homo sapiens
ggttatatagcttac

SEQ ID NO: 1747273 - DNA, 15 bp, Homo sapiens
gttatatagcttact

SEQ ID NO: 1747274 - DNA, 15 bp, Homo sapiens
ttatatagcttacta

SEQ ID NO: 1747275 - DNA, 15 bp, Homo sapiens
tatatagcttactat

SEQ ID NO: 1747276 - DNA, 15 bp, Homo sapiens
atatagcttactatt

SEQ ID NO: 1747277 - DNA, 15 bp, Homo sapiens
tatagcttactatta

SEQ ID NO: 1747278 - DNA, 15 bp, Homo sapiens
atagcttactattat

SEQ ID NO: 1747279 - DNA, 15 bp, Homo sapiens
tagcttactattatc

SEQ ID NO: 1747280 - DNA, 15 bp, Homo sapiens
agcttactattatct

SEQ ID NO: 1747281 - DNA, 15 bp, Homo sapiens
gcttactattatcta

SEQ ID NO: 1747282 - DNA, 15 bp, Homo sapiens
cttactattatctac

SEQ ID NO: 1747283 - DNA, 15 bp, Homo sapiens
ttactattatctaca

SEQ ID NO: 1747284 - DNA, 15 bp, Homo sapiens
tactattatctacaa

SEQ ID NO: 1747285 - DNA, 15 bp, Homo sapiens
actattatctacaac

SEQ ID NO: 1747286 - DNA, 15 bp, Homo sapiens
ctattatctacaacc

SEQ ID NO: 1747287 - DNA, 15 bp, Homo sapiens
tattatctacaacca

SEQ ID NO: 1747288 - DNA, 15 bp, Homo sapiens
attatctacaaccaa

SEQ ID NO: 1747289 - DNA, 15 bp, Homo sapiens
ttatctacaaccaaa

SEQ ID NO: 1747290 - DNA, 15 bp, Homo sapiens
tatctacaaccaaaa

SEQ ID NO: 1747291 - DNA, 15 bp, Homo sapiens
atctacaaccaaaac

SEQ ID NO: 1747292 - DNA, 15 bp, Homo sapiens
tctacaaccaaaaca

SEQ ID NO: 1747293 - DNA, 15 bp, Homo sapiens
ctacaaccaaaacat

SEQ ID NO: 1747294 - DNA, 15 bp, Homo sapiens
tacaaccaaaacatg

SEQ ID NO: 1747295 - DNA, 15 bp, Homo sapiens
acaaccaaaacatgg

SEQ ID NO: 1747296 - DNA, 15 bp, Homo sapiens
caaccaaaacatggc

SEQ ID NO: 1747297 - DNA, 15 bp, Homo sapiens
aaccaaaacatggcc

SEQ ID NO: 1747298 - DNA, 15 bp, Homo sapiens
accaaaacatggcct

SEQ ID NO: 1747299 - DNA, 15 bp, Homo sapiens
ccaaaacatggcctg

SEQ ID NO: 1747300 - DNA, 15 bp, Homo sapiens
caaaacatggcctgg

SEQ ID NO: 1747301 - DNA, 15 bp, Homo sapiens
aaaacatggcctgga

SEQ ID NO: 1747302 - DNA, 15 bp, Homo sapiens
aaacatggcctggaa

SEQ ID NO: 1747303 - DNA, 15 bp, Homo sapiens
aacatggcctggaaa

SEQ ID NO: 1747304 - DNA, 15 bp, Homo sapiens
acatggcctggaaaa

SEQ ID NO: 1747305 - DNA, 15 bp, Homo sapiens
catggcctggaaaac

SEQ ID NO: 1747306 - DNA, 15 bp, Homo sapiens
atggcctggaaaaca

SEQ ID NO: 1747307 - DNA, 15 bp, Homo sapiens
tggcctggaaaacaa

SEQ ID NO: 1747308 - DNA, 15 bp, Homo sapiens
ggcctggaaaacaag

SEQ ID NO: 1747309 - DNA, 15 bp, Homo sapiens
gcctggaaaacaaga

SEQ ID NO: 1747310 - DNA, 15 bp, Homo sapiens
cctggaaaacaagat

SEQ ID NO: 1747311 - DNA, 15 bp, Homo sapiens
ctggaaaacaagatg

SEQ ID NO: 1747312 - DNA, 15 bp, Homo sapiens
tggaaaacaagatgg

SEQ ID NO: 1747313 - DNA, 15 bp, Homo sapiens
ggaaaacaagatggg

SEQ ID NO: 1747314 - DNA, 15 bp, Homo sapiens
gaaaacaagatggga

SEQ ID NO: 1747315 - DNA, 15 bp, Homo sapiens
aaaacaagatgggaa

SEQ ID NO: 1747316 - DNA, 15 bp, Homo sapiens
aaacaagatgggaat

SEQ ID NO: 1747317 - DNA, 15 bp, Homo sapiens
aacaagatgggaata

SEQ ID NO: 1747318 - DNA, 15 bp, Homo sapiens
acaagatgggaatac

SEQ ID NO: 1747319 - DNA, 15 bp, Homo sapiens
caagatgggaatact

SEQ ID NO: 1747320 - DNA, 15 bp, Homo sapiens
aagatgggaatactt

SEQ ID NO: 1747321 - DNA, 15 bp, Homo sapiens
agatgggaatacttg

SEQ ID NO: 1747322 - DNA, 15 bp, Homo sapiens
gatgggaatacttgt

SEQ ID NO: 1747323 - DNA, 15 bp, Homo sapiens
atgggaatacttgtt

SEQ ID NO: 1747324 - DNA, 15 bp, Homo sapiens
tgggaatacttgttg

SEQ ID NO: 1747325 - DNA, 15 bp, Homo sapiens
gggaatacttgttgg

SEQ ID NO: 1747326 - DNA, 15 bp, Homo sapiens
ggaatacttgttgga

SEQ ID NO: 1747327 - DNA, 15 bp, Homo sapiens
gaatacttgttggaa

SEQ ID NO: 1747328 - DNA, 15 bp, Homo sapiens
aatacttgttggaag

SEQ ID NO: 1747329 - DNA, 15 bp, Homo sapiens
atacttgttggaagt

SEQ ID NO: 1747330 - DNA, 15 bp, Homo sapiens
tacttgttggaagtc

SEQ ID NO: 1747331 - DNA, 15 bp, Homo sapiens
acttgttggaagtct

SEQ ID NO: 1747332 - DNA, 15 bp, Homo sapiens
cttgttggaagtctg

SEQ ID NO: 1747333 - DNA, 15 bp, Homo sapiens
ttgttggaagtctgg

SEQ ID NO: 1747334 - DNA, 15 bp, Homo sapiens
tgttggaagtctggc

SEQ ID NO: 1747335 - DNA, 15 bp, Homo sapiens
gttggaagtctggca

SEQ ID NO: 1747336 - DNA, 15 bp, Homo sapiens
ttggaagtctggcaa

SEQ ID NO: 1747337 - DNA, 15 bp, Homo sapiens
tggaagtctggcaaa

SEQ ID NO: 1747338 - DNA, 15 bp, Homo sapiens
ggaagtctggcaaag

SEQ ID NO: 1747339 - DNA, 15 bp, Homo sapiens
gaagtctggcaaagg

SEQ ID NO: 1747340 - DNA, 15 bp, Homo sapiens
aagtctggcaaaggc

SEQ ID NO: 1747341 - DNA, 15 bp, Homo sapiens
agtctggcaaaggca

SEQ ID NO: 1747342 - DNA, 15 bp, Homo sapiens
gtctggcaaaggcac

SEQ ID NO: 1747343 - DNA, 15 bp, Homo sapiens
tctggcaaaggcact

SEQ ID NO: 1747344 - DNA, 15 bp, Homo sapiens
ctggcaaaggcactc

SEQ ID NO: 1747345 - DNA, 15 bp, Homo sapiens
tggcaaaggcactct

SEQ ID NO: 1747346 - DNA, 15 bp, Homo sapiens
ggcaaaggcactctc

SEQ ID NO: 1747347 - DNA, 15 bp, Homo sapiens
gcaaaggcactctct

SEQ ID NO: 1747348 - DNA, 15 bp, Homo sapiens
caaaggcactctctc

SEQ ID NO: 1747349 - DNA, 15 bp, Homo sapiens
aaaggcactctctcc

SEQ ID NO: 1747350 - DNA, 15 bp, Homo sapiens
aaggcactctctccc

SEQ ID NO: 1747351 - DNA, 15 bp, Homo sapiens
aggcactctctccct

SEQ ID NO: 1747352 - DNA, 15 bp, Homo sapiens
ggcactctctcccta

SEQ ID NO: 1747353 - DNA, 15 bp, Homo sapiens
gcactctctccctaa

SEQ ID NO: 1747354 - DNA, 15 bp, Homo sapiens
cactctctccctaac

SEQ ID NO: 1747355 - DNA, 15 bp, Homo sapiens
actctctccctaacc

SEQ ID NO: 1747356 - DNA, 15 bp, Homo sapiens
ctctctccctaacca

SEQ ID NO: 1747357 - DNA, 15 bp, Homo sapiens
tctctccctaaccag

SEQ ID NO: 1747358 - DNA, 15 bp, Homo sapiens
ctctccctaaccagg

SEQ ID NO: 1747359 - DNA, 15 bp, Homo sapiens
tctccctaaccaggc

SEQ ID NO: 1747360 - DNA, 15 bp, Homo sapiens
ctccctaaccaggcc

SEQ ID NO: 1747361 - DNA, 15 bp, Homo sapiens
tccctaaccaggcct

SEQ ID NO: 1747362 - DNA, 15 bp, Homo sapiens
ccctaaccaggcctg

SEQ ID NO: 1747363 - DNA, 15 bp, Homo sapiens
cctaaccaggcctga

SEQ ID NO: 1747364 - DNA, 15 bp, Homo sapiens
ctaaccaggcctgag

SEQ ID NO: 1747365 - DNA, 15 bp, Homo sapiens
taaccaggcctgaga

SEQ ID NO: 1747366 - DNA, 15 bp, Homo sapiens
aaccaggcctgagat

SEQ ID NO: 1747367 - DNA, 15 bp, Homo sapiens
accaggcctgagatg

SEQ ID NO: 1747368 - DNA, 15 bp, Homo sapiens
ccaggcctgagatga

SEQ ID NO: 1747369 - DNA, 15 bp, Homo sapiens
caggcctgagatgag

SEQ ID NO: 1747370 - DNA, 15 bp, Homo sapiens
aggcctgagatgaga

SEQ ID NO: 1747371 - DNA, 15 bp, Homo sapiens
ggcctgagatgagac

SEQ ID NO: 1747372 - DNA, 15 bp, Homo sapiens
gcctgagatgagaca

SEQ ID NO: 1747373 - DNA, 15 bp, Homo sapiens
cctgagatgagacag

SEQ ID NO: 1747374 - DNA, 15 bp, Homo sapiens
ctgagatgagacagc

SEQ ID NO: 1747375 - DNA, 15 bp, Homo sapiens
tgagatgagacagcc

SEQ ID NO: 1747376 - DNA, 15 bp, Homo sapiens
gagatgagacagccc

SEQ ID NO: 1747377 - DNA, 15 bp, Homo sapiens
agatgagacagccct

SEQ ID NO: 1747378 - DNA, 15 bp, Homo sapiens
gatgagacagccctg

SEQ ID NO: 1747379 - DNA, 15 bp, Homo sapiens
atgagacagccctgc

SEQ ID NO: 1747380 - DNA, 15 bp, Homo sapiens
tgagacagccctgcc

SEQ ID NO: 1747381 - DNA, 15 bp, Homo sapiens
gagacagccctgcca

SEQ ID NO: 1747382 - DNA, 15 bp, Homo sapiens
agacagccctgccaa

SEQ ID NO: 1747383 - DNA, 15 bp, Homo sapiens
gacagccctgccaac

SEQ ID NO: 1747384 - DNA, 15 bp, Homo sapiens
acagccctgccaaca

SEQ ID NO: 1747385 - DNA, 15 bp, Homo sapiens
cagccctgccaacat

SEQ ID NO: 1747386 - DNA, 15 bp, Homo sapiens
ccctgccaacatttg

SEQ ID NO: 1747387 - DNA, 15 bp, Homo sapiens
cctgccaacatttgc

SEQ ID NO: 1747388 - DNA, 15 bp, Homo sapiens
ctgccaacatttgcc

SEQ ID NO: 1747389 - DNA, 15 bp, Homo sapiens
tgccaacatttgcct

SEQ ID NO: 1747390 - DNA, 15 bp, Homo sapiens
gccaacatttgcctc

SEQ ID NO: 1747391 - DNA, 15 bp, Homo sapiens
ccaacatttgcctct

SEQ ID NO: 1747392 - DNA, 15 bp, Homo sapiens
caacatttgcctctc

SEQ ID NO: 1747393 - DNA, 15 bp, Homo sapiens
aacatttgcctctca

SEQ ID NO: 1747394 - DNA, 15 bp, Homo sapiens
acatttgcctctcag

SEQ ID NO: 1747395 - DNA, 15 bp, Homo sapiens
catttgcctctcagc

SEQ ID NO: 1747396 - DNA, 15 bp, Homo sapiens
atttgcctctcagcc

SEQ ID NO: 1747397 - DNA, 15 bp, Homo sapiens
tttgcctctcagcct

SEQ ID NO: 1747398 - DNA, 15 bp, Homo sapiens
ttgcctctcagcctc

SEQ ID NO: 1747399 - DNA, 15 bp, Homo sapiens
tgcctctcagcctct

SEQ ID NO: 1747400 - DNA, 15 bp, Homo sapiens
gcctctcagcctctc

SEQ ID NO: 1747401 - DNA, 15 bp, Homo sapiens
cctctcagcctctcc

SEQ ID NO: 1747402 - DNA, 15 bp, Homo sapiens
ctctcagcctctcct

SEQ ID NO: 1747403 - DNA, 15 bp, Homo sapiens
tctcagcctctcctt

SEQ ID NO: 1747404 - DNA, 15 bp, Homo sapiens
ctcagcctctccttt

SEQ ID NO: 1747405 - DNA, 15 bp, Homo sapiens
tcagcctctcctttt

SEQ ID NO: 1747406 - DNA, 15 bp, Homo sapiens
cagcctctccttttt

SEQ ID NO: 1747407 - DNA, 15 bp, Homo sapiens
agcctctcctttttc

SEQ ID NO: 1747408 - DNA, 15 bp, Homo sapiens
gcctctcctttttcc

SEQ ID NO: 1747409 - DNA, 15 bp, Homo sapiens
cctctcctttttcct

SEQ ID NO: 1747410 - DNA, 15 bp, Homo sapiens
ctctcctttttcctt

SEQ ID NO: 1747411 - DNA, 15 bp, Homo sapiens
tctcctttttccttg

SEQ ID NO: 1747412 - DNA, 15 bp, Homo sapiens
ctcctttttccttgg

SEQ ID NO: 1747413 - DNA, 15 bp, Homo sapiens
tttttccttggtttc

SEQ ID NO: 1747414 - DNA, 15 bp, Homo sapiens
ttttccttggtttcc

SEQ ID NO: 1747415 - DNA, 15 bp, Homo sapiens
tttccttggtttcca

SEQ ID NO: 1747416 - DNA, 15 bp, Homo sapiens
ttccttggtttccaa

SEQ ID NO: 1747417 - DNA, 15 bp, Homo sapiens
tccttggtttccaag

SEQ ID NO: 1747418 - DNA, 15 bp, Homo sapiens
ccttggtttccaagg

SEQ ID NO: 1747419 - DNA, 15 bp, Homo sapiens
cttggtttccaaggc

SEQ ID NO: 1747420 - DNA, 15 bp, Homo sapiens
ttggtttccaaggca

SEQ ID NO: 1747421 - DNA, 15 bp, Homo sapiens
tggtttccaaggcaa

SEQ ID NO: 1747422 - DNA, 15 bp, Homo sapiens
ggtttccaaggcaaa

SEQ ID NO: 1747423 - DNA, 15 bp, Homo sapiens
gtttccaaggcaaac

SEQ ID NO: 1747424 - DNA, 15 bp, Homo sapiens
tttccaaggcaaact

SEQ ID NO: 1747425 - DNA, 15 bp, Homo sapiens
ttccaaggcaaacta

SEQ ID NO: 1747426 - DNA, 15 bp, Homo sapiens
tccaaggcaaactac

SEQ ID NO: 1747427 - DNA, 15 bp, Homo sapiens
ccaaggcaaactact

SEQ ID NO: 1747428 - DNA, 15 bp, Homo sapiens
caaggcaaactactg

SEQ ID NO: 1747429 - DNA, 15 bp, Homo sapiens
aaggcaaactactgg

SEQ ID NO: 1747430 - DNA, 15 bp, Homo sapiens
aggcaaactactggt

SEQ ID NO: 1747431 - DNA, 15 bp, Homo sapiens
ggcaaactactggtc

SEQ ID NO: 1747432 - DNA, 15 bp, Homo sapiens
gcaaactactggtct

SEQ ID NO: 1747433 - DNA, 15 bp, Homo sapiens
caaactactggtctt

SEQ ID NO: 1747434 - DNA, 15 bp, Homo sapiens
aaactactggtcttt

SEQ ID NO: 1747435 - DNA, 15 bp, Homo sapiens
aactactggtctttc

SEQ ID NO: 1747436 - DNA, 15 bp, Homo sapiens
actactggtctttct

SEQ ID NO: 1747437 - DNA, 15 bp, Homo sapiens
ctactggtctttctg

SEQ ID NO: 1747438 - DNA, 15 bp, Homo sapiens
tactggtctttctgt

SEQ ID NO: 1747439 - DNA, 15 bp, Homo sapiens
actggtctttctgtt

SEQ ID NO: 1747440 - DNA, 15 bp, Homo sapiens
ctggtctttctgttt

SEQ ID NO: 1747441 - DNA, 15 bp, Homo sapiens
tggtctttctgtttg

SEQ ID NO: 1747442 - DNA, 15 bp, Homo sapiens
ggtctttctgtttga

SEQ ID NO: 1747443 - DNA, 15 bp, Homo sapiens
gtctttctgtttgat

SEQ ID NO: 1747444 - DNA, 15 bp, Homo sapiens
tctttctgtttgatg

SEQ ID NO: 1747445 - DNA, 15 bp, Homo sapiens
ctttctgtttgatgc

SEQ ID NO: 1747446 - DNA, 15 bp, Homo sapiens
tttctgtttgatgcc

SEQ ID NO: 1747447 - DNA, 15 bp, Homo sapiens
ttctgtttgatgcct

SEQ ID NO: 1747448 - DNA, 15 bp, Homo sapiens
tctgtttgatgcctt

SEQ ID NO: 1747449 - DNA, 15 bp, Homo sapiens
ctgtttgatgccttc

SEQ ID NO: 1747450 - DNA, 15 bp, Homo sapiens
tgtttgatgccttct

SEQ ID NO: 1747451 - DNA, 15 bp, Homo sapiens
gtttgatgccttctt

SEQ ID NO: 1747452 - DNA, 15 bp, Homo sapiens
tttgatgccttcttt

SEQ ID NO: 1747453 - DNA, 15 bp, Homo sapiens
ttgatgccttctttc

SEQ ID NO: 1747454 - DNA, 15 bp, Homo sapiens
tgatgccttctttca

SEQ ID NO: 1747455 - DNA, 15 bp, Homo sapiens
gatgccttctttcat

SEQ ID NO: 1747456 - DNA, 15 bp, Homo sapiens
atgccttctttcata

SEQ ID NO: 1747457 - DNA, 15 bp, Homo sapiens
tgccttctttcataa

SEQ ID NO: 1747458 - DNA, 15 bp, Homo sapiens
gccttctttcataat

SEQ ID NO: 1747459 - DNA, 15 bp, Homo sapiens
ccttctttcataatg

SEQ ID NO: 1747460 - DNA, 15 bp, Homo sapiens
cttctttcataatgt

SEQ ID NO: 1747461 - DNA, 15 bp, Homo sapiens
ttctttcataatgtg

SEQ ID NO: 1747462 - DNA, 15 bp, Homo sapiens
tctttcataatgtgc

SEQ ID NO: 1747463 - DNA, 15 bp, Homo sapiens
ctttcataatgtgct

SEQ ID NO: 1747464 - DNA, 15 bp, Homo sapiens
tttcataatgtgctc

SEQ ID NO: 1747465 - DNA, 15 bp, Homo sapiens
ttcataatgtgctca

SEQ ID NO: 1747466 - DNA, 15 bp, Homo sapiens
tcataatgtgctcag

SEQ ID NO: 1747467 - DNA, 15 bp, Homo sapiens
cataatgtgctcagc

SEQ ID NO: 1747468 - DNA, 15 bp, Homo sapiens
ataatgtgctcagca

SEQ ID NO: 1747469 - DNA, 15 bp, Homo sapiens
taatgtgctcagcac

SEQ ID NO: 1747470 - DNA, 15 bp, Homo sapiens
aatgtgctcagcaca

SEQ ID NO: 1747471 - DNA, 15 bp, Homo sapiens
atgtgctcagcacat

SEQ ID NO: 1747472 - DNA, 15 bp, Homo sapiens
tgtgctcagcacatt

SEQ ID NO: 1747473 - DNA, 15 bp, Homo sapiens
gtgctcagcacattc

SEQ ID NO: 1747474 - DNA, 15 bp, Homo sapiens
tgctcagcacattcc

SEQ ID NO: 1747475 - DNA, 15 bp, Homo sapiens
gctcagcacattcca

SEQ ID NO: 1747476 - DNA, 15 bp, Homo sapiens
ctcagcacattccat

SEQ ID NO: 1747477 - DNA, 15 bp, Homo sapiens
tcagcacattccatt

SEQ ID NO: 1747478 - DNA, 15 bp, Homo sapiens
cagcacattccatta

SEQ ID NO: 1747479 - DNA, 15 bp, Homo sapiens
agcacattccattag

SEQ ID NO: 1747480 - DNA, 15 bp, Homo sapiens
gcacattccattagg

SEQ ID NO: 1747481 - DNA, 15 bp, Homo sapiens
cacattccattaggt

SEQ ID NO: 1747482 - DNA, 15 bp, Homo sapiens
acattccattaggtt

SEQ ID NO: 1747483 - DNA, 15 bp, Homo sapiens
cattccattaggttg

SEQ ID NO: 1747484 - DNA, 15 bp, Homo sapiens
attccattaggttgc

SEQ ID NO: 1747485 - DNA, 15 bp, Homo sapiens
ttccattaggttgca

SEQ ID NO: 1747486 - DNA, 15 bp, Homo sapiens
tccattaggttgcaa

SEQ ID NO: 1747487 - DNA, 15 bp, Homo sapiens
ccattaggttgcaat

SEQ ID NO: 1747488 - DNA, 15 bp, Homo sapiens
cattaggttgcaatc

SEQ ID NO: 1747489 - DNA, 15 bp, Homo sapiens
attaggttgcaatct

SEQ ID NO: 1747490 - DNA, 15 bp, Homo sapiens
ttaggttgcaatctg

SEQ ID NO: 1747491 - DNA, 15 bp, Homo sapiens
taggttgcaatctgg

SEQ ID NO: 1747492 - DNA, 15 bp, Homo sapiens
aggttgcaatctggg

SEQ ID NO: 1747493 - DNA, 15 bp, Homo sapiens
ggttgcaatctgggc

SEQ ID NO: 1747494 - DNA, 15 bp, Homo sapiens
gttgcaatctgggct

SEQ ID NO: 1747495 - DNA, 15 bp, Homo sapiens
ttgcaatctgggctt

SEQ ID NO: 1747496 - DNA, 15 bp, Homo sapiens
tgcaatctgggcttg

SEQ ID NO: 1747497 - DNA, 15 bp, Homo sapiens
gcaatctgggcttga

SEQ ID NO: 1747498 - DNA, 15 bp, Homo sapiens
caatctgggcttgaa

SEQ ID NO: 1747499 - DNA, 15 bp, Homo sapiens
aatctgggcttgaaa

SEQ ID NO: 1747500 - DNA, 15 bp, Homo sapiens
atctgggcttgaaag

SEQ ID NO: 1747501 - DNA, 15 bp, Homo sapiens
tctgggcttgaaaga

SEQ ID NO: 1747502 - DNA, 15 bp, Homo sapiens
ctgggcttgaaagag

SEQ ID NO: 1747503 - DNA, 15 bp, Homo sapiens
tgggcttgaaagagg

SEQ ID NO: 1747504 - DNA, 15 bp, Homo sapiens
gggcttgaaagaggg

SEQ ID NO: 1747505 - DNA, 15 bp, Homo sapiens
ggcttgaaagaggga

SEQ ID NO: 1747506 - DNA, 15 bp, Homo sapiens
gcttgaaagagggaa

SEQ ID NO: 1747507 - DNA, 15 bp, Homo sapiens
cttgaaagagggaag

SEQ ID NO: 1747508 - DNA, 15 bp, Homo sapiens
ttgaaagagggaagc

SEQ ID NO: 1747509 - DNA, 15 bp, Homo sapiens
tgaaagagggaagca

SEQ ID NO: 1747510 - DNA, 15 bp, Homo sapiens
gaaagagggaagcaa

SEQ ID NO: 1747511 - DNA, 15 bp, Homo sapiens
aaagagggaagcaac

SEQ ID NO: 1747512 - DNA, 15 bp, Homo sapiens
aagagggaagcaact

SEQ ID NO: 1747513 - DNA, 15 bp, Homo sapiens
agagggaagcaactc

SEQ ID NO: 1747514 - DNA, 15 bp, Homo sapiens
gagggaagcaactct

SEQ ID NO: 1747515 - DNA, 15 bp, Homo sapiens
agggaagcaactctt

SEQ ID NO: 1747516 - DNA, 15 bp, Homo sapiens
gggaagcaactcttt

SEQ ID NO: 1747517 - DNA, 15 bp, Homo sapiens
ggaagcaactctttt

SEQ ID NO: 1747518 - DNA, 15 bp, Homo sapiens
gaagcaactcttttt

SEQ ID NO: 1747519 - DNA, 15 bp, Homo sapiens
aagcaactcttttta

SEQ ID NO: 1747520 - DNA, 15 bp, Homo sapiens
agcaactctttttaa

SEQ ID NO: 1747521 - DNA, 15 bp, Homo sapiens
gcaactctttttaag

SEQ ID NO: 1747522 - DNA, 15 bp, Homo sapiens
caactctttttaaga

SEQ ID NO: 1747523 - DNA, 15 bp, Homo sapiens
aactctttttaagat

SEQ ID NO: 1747524 - DNA, 15 bp, Homo sapiens
actctttttaagatc

SEQ ID NO: 1747525 - DNA, 15 bp, Homo sapiens
ctctttttaagatca

SEQ ID NO: 1747526 - DNA, 15 bp, Homo sapiens
tctttttaagatcat

SEQ ID NO: 1747527 - DNA, 15 bp, Homo sapiens
ctttttaagatcatt

SEQ ID NO: 1747528 - DNA, 15 bp, Homo sapiens
tttttaagatcattt

SEQ ID NO: 1747529 - DNA, 15 bp, Homo sapiens
ttttaagatcatttg

SEQ ID NO: 1747530 - DNA, 15 bp, Homo sapiens
tttaagatcatttgg

SEQ ID NO: 1747531 - DNA, 15 bp, Homo sapiens
ttaagatcatttggt

SEQ ID NO: 1747532 - DNA, 15 bp, Homo sapiens
taagatcatttggta

SEQ ID NO: 1747533 - DNA, 15 bp, Homo sapiens
aagatcatttggtat

SEQ ID NO: 1747534 - DNA, 15 bp, Homo sapiens
agatcatttggtatg

SEQ ID NO: 1747535 - DNA, 15 bp, Homo sapiens
gatcatttggtatgt

SEQ ID NO: 1747536 - DNA, 15 bp, Homo sapiens
atcatttggtatgtt

SEQ ID NO: 1747537 - DNA, 15 bp, Homo sapiens
tcatttggtatgttt

SEQ ID NO: 1747538 - DNA, 15 bp, Homo sapiens
catttggtatgtttc

SEQ ID NO: 1747539 - DNA, 15 bp, Homo sapiens
atttggtatgtttct

SEQ ID NO: 1747540 - DNA, 15 bp, Homo sapiens
tttggtatgtttctg

SEQ ID NO: 1747541 - DNA, 15 bp, Homo sapiens
ttggtatgtttctgc

SEQ ID NO: 1747542 - DNA, 15 bp, Homo sapiens
tggtatgtttctgct

SEQ ID NO: 1747543 - DNA, 15 bp, Homo sapiens
ggtatgtttctgctc

SEQ ID NO: 1747544 - DNA, 15 bp, Homo sapiens
gtatgtttctgctct

SEQ ID NO: 1747545 - DNA, 15 bp, Homo sapiens
tatgtttctgctctg

SEQ ID NO: 1747546 - DNA, 15 bp, Homo sapiens
atgtttctgctctgg

SEQ ID NO: 1747547 - DNA, 15 bp, Homo sapiens
tgtttctgctctggt

SEQ ID NO: 1747548 - DNA, 15 bp, Homo sapiens
gtttctgctctggtg

SEQ ID NO: 1747549 - DNA, 15 bp, Homo sapiens
tttctgctctggtgg

SEQ ID NO: 1747550 - DNA, 15 bp, Homo sapiens
ttctgctctggtggg

SEQ ID NO: 1747551 - DNA, 15 bp, Homo sapiens
tctgctctggtggga

SEQ ID NO: 1747552 - DNA, 15 bp, Homo sapiens
ctgctctggtgggat

SEQ ID NO: 1747553 - DNA, 15 bp, Homo sapiens
tgctctggtgggatg

SEQ ID NO: 1747554 - DNA, 15 bp, Homo sapiens
gctctggtgggatga

SEQ ID NO: 1747555 - DNA, 15 bp, Homo sapiens
ctctggtgggatgat

SEQ ID NO: 1747556 - DNA, 15 bp, Homo sapiens
tctggtgggatgatt

SEQ ID NO: 1747557 - DNA, 15 bp, Homo sapiens
ctggtgggatgattt

SEQ ID NO: 1747558 - DNA, 15 bp, Homo sapiens
tggtgggatgatttt

SEQ ID NO: 1747559 - DNA, 15 bp, Homo sapiens
ggtgggatgatttta

SEQ ID NO: 1747560 - DNA, 15 bp, Homo sapiens
gtgggatgattttaa

SEQ ID NO: 1747561 - DNA, 15 bp, Homo sapiens
tgggatgattttaaa

SEQ ID NO: 1747562 - DNA, 15 bp, Homo sapiens
gggatgattttaaag

SEQ ID NO: 1747563 - DNA, 15 bp, Homo sapiens
ggatgattttaaagc

SEQ ID NO: 1747564 - DNA, 15 bp, Homo sapiens
gatgattttaaagca

SEQ ID NO: 1747565 - DNA, 15 bp, Homo sapiens
atgattttaaagcag

SEQ ID NO: 1747566 - DNA, 15 bp, Homo sapiens
tgattttaaagcagt

SEQ ID NO: 1747567 - DNA, 15 bp, Homo sapiens
gattttaaagcagtg

SEQ ID NO: 1747568 - DNA, 15 bp, Homo sapiens
attttaaagcagtgg

SEQ ID NO: 1747569 - DNA, 15 bp, Homo sapiens
ttttaaagcagtggt

SEQ ID NO: 1747570 - DNA, 15 bp, Homo sapiens
tttaaagcagtggtg

SEQ ID NO: 1747571 - DNA, 15 bp, Homo sapiens
ttaaagcagtggtga

SEQ ID NO: 1747572 - DNA, 15 bp, Homo sapiens
taaagcagtggtgaa

SEQ ID NO: 1747573 - DNA, 15 bp, Homo sapiens
aaagcagtggtgaac

SEQ ID NO: 1747574 - DNA, 15 bp, Homo sapiens
aagcagtggtgaaca

SEQ ID NO: 1747575 - DNA, 15 bp, Homo sapiens
agcagtggtgaacag

SEQ ID NO: 1747576 - DNA, 15 bp, Homo sapiens
gcagtggtgaacagc

SEQ ID NO: 1747577 - DNA, 15 bp, Homo sapiens
cagtggtgaacagcc

SEQ ID NO: 1747578 - DNA, 15 bp, Homo sapiens
agtggtgaacagcca

SEQ ID NO: 1747579 - DNA, 15 bp, Homo sapiens
gtggtgaacagccat

SEQ ID NO: 1747580 - DNA, 15 bp, Homo sapiens
tggtgaacagccatt

SEQ ID NO: 1747581 - DNA, 15 bp, Homo sapiens
ggtgaacagccattt

SEQ ID NO: 1747582 - DNA, 15 bp, Homo sapiens
gtgaacagccatttt

SEQ ID NO: 1747583 - DNA, 15 bp, Homo sapiens
tgaacagccattttt

SEQ ID NO: 1747584 - DNA, 15 bp, Homo sapiens
gaacagccatttttg

SEQ ID NO: 1747585 - DNA, 15 bp, Homo sapiens
aacagccatttttga

SEQ ID NO: 1747586 - DNA, 15 bp, Homo sapiens
acagccatttttgaa

SEQ ID NO: 1747587 - DNA, 15 bp, Homo sapiens
cagccatttttgaaa

SEQ ID NO: 1747588 - DNA, 15 bp, Homo sapiens
agccatttttgaaac

SEQ ID NO: 1747589 - DNA, 15 bp, Homo sapiens
gccatttttgaaaca

SEQ ID NO: 1747590 - DNA, 15 bp, Homo sapiens
ccatttttgaaacag

SEQ ID NO: 1747591 - DNA, 15 bp, Homo sapiens
catttttgaaacagg

SEQ ID NO: 1747592 - DNA, 15 bp, Homo sapiens
atttttgaaacaggg

SEQ ID NO: 1747593 - DNA, 15 bp, Homo sapiens
tttttgaaacagggt

SEQ ID NO: 1747594 - DNA, 15 bp, Homo sapiens
ttttgaaacagggtc

SEQ ID NO: 1747595 - DNA, 15 bp, Homo sapiens
tttgaaacagggtca

SEQ ID NO: 1747596 - DNA, 15 bp, Homo sapiens
ttgaaacagggtcaa

SEQ ID NO: 1747597 - DNA, 15 bp, Homo sapiens
tgaaacagggtcaag

SEQ ID NO: 1747598 - DNA, 15 bp, Homo sapiens
gaaacagggtcaaga

SEQ ID NO: 1747599 - DNA, 15 bp, Homo sapiens
aaacagggtcaagac

SEQ ID NO: 1747600 - DNA, 15 bp, Homo sapiens
aacagggtcaagaca

SEQ ID NO: 1747601 - DNA, 15 bp, Homo sapiens
acagggtcaagacaa

SEQ ID NO: 1747602 - DNA, 15 bp, Homo sapiens
cagggtcaagacaaa

SEQ ID NO: 1747603 - DNA, 15 bp, Homo sapiens
agggtcaagacaaaa

SEQ ID NO: 1747604 - DNA, 15 bp, Homo sapiens
gggtcaagacaaaaa

SEQ ID NO: 1747605 - DNA, 15 bp, Homo sapiens
ggtcaagacaaaaaa

SEQ ID NO: 1747606 - DNA, 15 bp, Homo sapiens
gtcaagacaaaaaag

SEQ ID NO: 1747607 - DNA, 15 bp, Homo sapiens
tcaagacaaaaaagc

SEQ ID NO: 1747608 - DNA, 15 bp, Homo sapiens
caagacaaaaaagcg

SEQ ID NO: 1747609 - DNA, 15 bp, Homo sapiens
aagacaaaaaagcga

SEQ ID NO: 1747610 - DNA, 15 bp, Homo sapiens
agacaaaaaagcgaa

SEQ ID NO: 1747611 - DNA, 15 bp, Homo sapiens
gacaaaaaagcgaaa

SEQ ID NO: 1747612 - DNA, 15 bp, Homo sapiens
acaaaaaagcgaaag

SEQ ID NO: 1747613 - DNA, 15 bp, Homo sapiens
caaaaaagcgaaagt

SEQ ID NO: 1747614 - DNA, 15 bp, Homo sapiens
aaaaaagcgaaagtg

SEQ ID NO: 1747615 - DNA, 15 bp, Homo sapiens
aaaaagcgaaagtgt

SEQ ID NO: 1747616 - DNA, 15 bp, Homo sapiens
aaaagcgaaagtgtg

SEQ ID NO: 1747617 - DNA, 15 bp, Homo sapiens
aaagcgaaagtgtgt

SEQ ID NO: 1747618 - DNA, 15 bp, Homo sapiens
aagcgaaagtgtgtt

SEQ ID NO: 1747619 - DNA, 15 bp, Homo sapiens
agcgaaagtgtgtta

SEQ ID NO: 1747620 - DNA, 15 bp, Homo sapiens
gcgaaagtgtgttaa

SEQ ID NO: 1747621 - DNA, 15 bp, Homo sapiens
cgaaagtgtgttaag

SEQ ID NO: 1747622 - DNA, 15 bp, Homo sapiens
gaaagtgtgttaaga

SEQ ID NO: 1747623 - DNA, 15 bp, Homo sapiens
aaagtgtgttaagag

SEQ ID NO: 1747624 - DNA, 15 bp, Homo sapiens
aagtgtgttaagagc

SEQ ID NO: 1747625 - DNA, 15 bp, Homo sapiens
agtgtgttaagagct

SEQ ID NO: 1747626 - DNA, 15 bp, Homo sapiens
gtgtgttaagagctg

SEQ ID NO: 1747627 - DNA, 15 bp, Homo sapiens
tgtgttaagagctgg

SEQ ID NO: 1747628 - DNA, 15 bp, Homo sapiens
gtgttaagagctggg

SEQ ID NO: 1747629 - DNA, 15 bp, Homo sapiens
tgttaagagctgggt

SEQ ID NO: 1747630 - DNA, 15 bp, Homo sapiens
gttaagagctgggtt

SEQ ID NO: 1747631 - DNA, 15 bp, Homo sapiens
ttaagagctgggttt

SEQ ID NO: 1747632 - DNA, 15 bp, Homo sapiens
taagagctgggtttt

SEQ ID NO: 1747633 - DNA, 15 bp, Homo sapiens
aagagctgggttttt

SEQ ID NO: 1747634 - DNA, 15 bp, Homo sapiens
agagctgggtttttt

SEQ ID NO: 1747635 - DNA, 15 bp, Homo sapiens
gagctgggttttttt

SEQ ID NO: 1747636 - DNA, 15 bp, Homo sapiens
agctgggtttttttt

SEQ ID NO: 1747637 - DNA, 15 bp, Homo sapiens
gctgggttttttttt

SEQ ID NO: 1747638 - DNA, 15 bp, Homo sapiens
ctgggtttttttttt

SEQ ID NO: 1747639 - DNA, 15 bp, Homo sapiens
tgggttttttttttc

SEQ ID NO: 1747640 - DNA, 15 bp, Homo sapiens
gggttttttttttca

SEQ ID NO: 1747641 - DNA, 15 bp, Homo sapiens
ggttttttttttcat

SEQ ID NO: 1747642 - DNA, 15 bp, Homo sapiens
gttttttttttcatc

SEQ ID NO: 1747643 - DNA, 15 bp, Homo sapiens
ttttttttttcatcc

SEQ ID NO: 1747644 - DNA, 15 bp, Homo sapiens
tttttttttcatcca

SEQ ID NO: 1747645 - DNA, 15 bp, Homo sapiens
ttttttttcatccaa

SEQ ID NO: 1747646 - DNA, 15 bp, Homo sapiens
tttttttcatccaaa

SEQ ID NO: 1747647 - DNA, 15 bp, Homo sapiens
ttttttcatccaaaa

SEQ ID NO: 1747648 - DNA, 15 bp, Homo sapiens
tttttcatccaaaat

SEQ ID NO: 1747649 - DNA, 15 bp, Homo sapiens
ttttcatccaaaatt

SEQ ID NO: 1747650 - DNA, 15 bp, Homo sapiens
tttcatccaaaatta

SEQ ID NO: 1747651 - DNA, 15 bp, Homo sapiens
ttcatccaaaattaa

SEQ ID NO: 1747652 - DNA, 15 bp, Homo sapiens
tcatccaaaattaaa

SEQ ID NO: 1747653 - DNA, 15 bp, Homo sapiens
catccaaaattaaaa

SEQ ID NO: 1747654 - DNA, 15 bp, Homo sapiens
atccaaaattaaaat

SEQ ID NO: 1747655 - DNA, 15 bp, Homo sapiens
tccaaaattaaaatt

SEQ ID NO: 1747656 - DNA, 15 bp, Homo sapiens
ccaaaattaaaatta

SEQ ID NO: 1747657 - DNA, 15 bp, Homo sapiens
caaaattaaaattac

SEQ ID NO: 1747658 - DNA, 15 bp, Homo sapiens
aaaattaaaattacc

SEQ ID NO: 1747659 - DNA, 15 bp, Homo sapiens
aaattaaaattacca

SEQ ID NO: 1747660 - DNA, 15 bp, Homo sapiens
aattaaaattaccat

SEQ ID NO: 1747661 - DNA, 15 bp, Homo sapiens
attaaaattaccatg

SEQ ID NO: 1747662 - DNA, 15 bp, Homo sapiens
ttaaaattaccatga

SEQ ID NO: 1747663 - DNA, 15 bp, Homo sapiens
taaaattaccatgaa

SEQ ID NO: 1747664 - DNA, 15 bp, Homo sapiens
aaaattaccatgaaa

SEQ ID NO: 1747665 - DNA, 15 bp, Homo sapiens
aaattaccatgaaaa

SEQ ID NO: 1747666 - DNA, 15 bp, Homo sapiens
aattaccatgaaaaa

SEQ ID NO: 1747667 - DNA, 15 bp, Homo sapiens
attaccatgaaaaaa

SEQ ID NO: 1747668 - DNA, 15 bp, Homo sapiens
ttaccatgaaaaaat

SEQ ID NO: 1747669 - DNA, 15 bp, Homo sapiens
taccatgaaaaaatg

SEQ ID NO: 1747670 - DNA, 15 bp, Homo sapiens
accatgaaaaaatgt

SEQ ID NO: 1747671 - DNA, 15 bp, Homo sapiens
ccatgaaaaaatgta

SEQ ID NO: 1747672 - DNA, 15 bp, Homo sapiens
catgaaaaaatgtat

SEQ ID NO: 1747673 - DNA, 15 bp, Homo sapiens
atgaaaaaatgtatc

SEQ ID NO: 1747674 - DNA, 15 bp, Homo sapiens
tgaaaaaatgtatct

SEQ ID NO: 1747675 - DNA, 15 bp, Homo sapiens
gaaaaaatgtatcta

SEQ ID NO: 1747676 - DNA, 15 bp, Homo sapiens
aaaaaatgtatctat

SEQ ID NO: 1747677 - DNA, 15 bp, Homo sapiens
aaaaatgtatctata

SEQ ID NO: 1747678 - DNA, 15 bp, Homo sapiens
aaaatgtatctatat

SEQ ID NO: 1747679 - DNA, 15 bp, Homo sapiens
aaatgtatctatata

SEQ ID NO: 1747680 - DNA, 15 bp, Homo sapiens
aatgtatctatataa

SEQ ID NO: 1747681 - DNA, 15 bp, Homo sapiens
atgtatctatataat

SEQ ID NO: 1747682 - DNA, 15 bp, Homo sapiens
tgtatctatataatc

SEQ ID NO: 1747683 - DNA, 15 bp, Homo sapiens
gtatctatataatct

SEQ ID NO: 1747684 - DNA, 15 bp, Homo sapiens
tatctatataatctt

SEQ ID NO: 1747685 - DNA, 15 bp, Homo sapiens
atctatataatcttt

SEQ ID NO: 1747686 - DNA, 15 bp, Homo sapiens
tctatataatctttg

SEQ ID NO: 1747687 - DNA, 15 bp, Homo sapiens
ctatataatctttgt

SEQ ID NO: 1747688 - DNA, 15 bp, Homo sapiens
tatataatctttgta

SEQ ID NO: 1747689 - DNA, 15 bp, Homo sapiens
atataatctttgtat

SEQ ID NO: 1747690 - DNA, 15 bp, Homo sapiens
tataatctttgtatc

SEQ ID NO: 1747691 - DNA, 15 bp, Homo sapiens
ataatctttgtatca

SEQ ID NO: 1747692 - DNA, 15 bp, Homo sapiens
taatctttgtatcag

SEQ ID NO: 1747693 - DNA, 15 bp, Homo sapiens
aatctttgtatcagg

SEQ ID NO: 1747694 - DNA, 15 bp, Homo sapiens
atctttgtatcagga

SEQ ID NO: 1747695 - DNA, 15 bp, Homo sapiens
tctttgtatcaggat

SEQ ID NO: 1747696 - DNA, 15 bp, Homo sapiens
ctttgtatcaggatc

SEQ ID NO: 1747697 - DNA, 15 bp, Homo sapiens
tttgtatcaggatcc

SEQ ID NO: 1747698 - DNA, 15 bp, Homo sapiens
ttgtatcaggatccc

SEQ ID NO: 1747699 - DNA, 15 bp, Homo sapiens
tgtatcaggatccca

SEQ ID NO: 1747700 - DNA, 15 bp, Homo sapiens
gtatcaggatcccag

SEQ ID NO: 1747701 - DNA, 15 bp, Homo sapiens
tatcaggatcccagc

SEQ ID NO: 1747702 - DNA, 15 bp, Homo sapiens
atcaggatcccagca

SEQ ID NO: 1747703 - DNA, 15 bp, Homo sapiens
tcaggatcccagcag

SEQ ID NO: 1747704 - DNA, 15 bp, Homo sapiens
caggatcccagcagg

SEQ ID NO: 1747705 - DNA, 15 bp, Homo sapiens
aggatcccagcagga

SEQ ID NO: 1747706 - DNA, 15 bp, Homo sapiens
ggatcccagcaggaa

SEQ ID NO: 1747707 - DNA, 15 bp, Homo sapiens
gatcccagcaggaaa

SEQ ID NO: 1747708 - DNA, 15 bp, Homo sapiens
atcccagcaggaaac

SEQ ID NO: 1747709 - DNA, 15 bp, Homo sapiens
tcccagcaggaaaca

SEQ ID NO: 1747710 - DNA, 15 bp, Homo sapiens
cccagcaggaaacaa

SEQ ID NO: 1747711 - DNA, 15 bp, Homo sapiens
ccagcaggaaacaaa

SEQ ID NO: 1747712 - DNA, 15 bp, Homo sapiens
cagcaggaaacaaat

SEQ ID NO: 1747713 - DNA, 15 bp, Homo sapiens
agcaggaaacaaatg

SEQ ID NO: 1747714 - DNA, 15 bp, Homo sapiens
gcaggaaacaaatgg

SEQ ID NO: 1747715 - DNA, 15 bp, Homo sapiens
caggaaacaaatggc

SEQ ID NO: 1747716 - DNA, 15 bp, Homo sapiens
aggaaacaaatggca

SEQ ID NO: 1747717 - DNA, 15 bp, Homo sapiens
ggaaacaaatggcac

SEQ ID NO: 1747718 - DNA, 15 bp, Homo sapiens
gaaacaaatggcaca

SEQ ID NO: 1747719 - DNA, 15 bp, Homo sapiens
aaacaaatggcacag

SEQ ID NO: 1747720 - DNA, 15 bp, Homo sapiens
aacaaatggcacagc

SEQ ID NO: 1747721 - DNA, 15 bp, Homo sapiens
acaaatggcacagca

SEQ ID NO: 1747722 - DNA, 15 bp, Homo sapiens
caaatggcacagcaa

SEQ ID NO: 1747723 - DNA, 15 bp, Homo sapiens
aaatggcacagcaaa

SEQ ID NO: 1747724 - DNA, 15 bp, Homo sapiens
aatggcacagcaaat

SEQ ID NO: 1747725 - DNA, 15 bp, Homo sapiens
atggcacagcaaatg

SEQ ID NO: 1747726 - DNA, 15 bp, Homo sapiens
tggcacagcaaatgg

SEQ ID NO: 1747727 - DNA, 15 bp, Homo sapiens
ggcacagcaaatggg

SEQ ID NO: 1747728 - DNA, 15 bp, Homo sapiens
gcacagcaaatgggt

SEQ ID NO: 1747729 - DNA, 15 bp, Homo sapiens
cacagcaaatgggtt

SEQ ID NO: 1747730 - DNA, 15 bp, Homo sapiens
acagcaaatgggtta

SEQ ID NO: 1747731 - DNA, 15 bp, Homo sapiens
cagcaaatgggttaa

SEQ ID NO: 1747732 - DNA, 15 bp, Homo sapiens
agcaaatgggttaat

SEQ ID NO: 1747733 - DNA, 15 bp, Homo sapiens
gcaaatgggttaatt

SEQ ID NO: 1747734 - DNA, 15 bp, Homo sapiens
caaatgggttaattg

SEQ ID NO: 1747735 - DNA, 15 bp, Homo sapiens
aaatgggttaattga

SEQ ID NO: 1747736 - DNA, 15 bp, Homo sapiens
aatgggttaattgat

SEQ ID NO: 1747737 - DNA, 15 bp, Homo sapiens
atgggttaattgatg

SEQ ID NO: 1747738 - DNA, 15 bp, Homo sapiens
tgggttaattgatga

SEQ ID NO: 1747739 - DNA, 15 bp, Homo sapiens
gggttaattgatgag

SEQ ID NO: 1747740 - DNA, 15 bp, Homo sapiens
ggttaattgatgagt

SEQ ID NO: 1747741 - DNA, 15 bp, Homo sapiens
gttaattgatgagtt

SEQ ID NO: 1747742 - DNA, 15 bp, Homo sapiens
ttaattgatgagttt

SEQ ID NO: 1747743 - DNA, 15 bp, Homo sapiens
taattgatgagtttg

SEQ ID NO: 1747744 - DNA, 15 bp, Homo sapiens
aattgatgagtttgc

SEQ ID NO: 1747745 - DNA, 15 bp, Homo sapiens
attgatgagtttgct

SEQ ID NO: 1747746 - DNA, 15 bp, Homo sapiens
ttgatgagtttgcta

SEQ ID NO: 1747747 - DNA, 15 bp, Homo sapiens
tgatgagtttgctaa

SEQ ID NO: 1747748 - DNA, 15 bp, Homo sapiens
gatgagtttgctaaa

SEQ ID NO: 1747749 - DNA, 15 bp, Homo sapiens
atgagtttgctaaag

SEQ ID NO: 1747750 - DNA, 15 bp, Homo sapiens
tgagtttgctaaagg

SEQ ID NO: 1747751 - DNA, 15 bp, Homo sapiens
gagtttgctaaaggg

SEQ ID NO: 1747752 - DNA, 15 bp, Homo sapiens
agtttgctaaagggt

SEQ ID NO: 1747753 - DNA, 15 bp, Homo sapiens
gtttgctaaagggtc

SEQ ID NO: 1747754 - DNA, 15 bp, Homo sapiens
tttgctaaagggtct

SEQ ID NO: 1747755 - DNA, 15 bp, Homo sapiens
ttgctaaagggtcta

SEQ ID NO: 1747756 - DNA, 15 bp, Homo sapiens
tgctaaagggtctat

SEQ ID NO: 1747757 - DNA, 15 bp, Homo sapiens
gctaaagggtctatt

SEQ ID NO: 1747758 - DNA, 15 bp, Homo sapiens
ctaaagggtctattt

SEQ ID NO: 1747759 - DNA, 15 bp, Homo sapiens
taaagggtctattta

SEQ ID NO: 1747760 - DNA, 15 bp, Homo sapiens
aaagggtctatttac

SEQ ID NO: 1747761 - DNA, 15 bp, Homo sapiens
aagggtctatttaca

SEQ ID NO: 1747762 - DNA, 15 bp, Homo sapiens
agggtctatttacaa

SEQ ID NO: 1747763 - DNA, 15 bp, Homo sapiens
gggtctatttacaaa

SEQ ID NO: 1747764 - DNA, 15 bp, Homo sapiens
ggtctatttacaaag

SEQ ID NO: 1747765 - DNA, 15 bp, Homo sapiens
gtctatttacaaagg

SEQ ID NO: 1747766 - DNA, 15 bp, Homo sapiens
tctatttacaaaggc

SEQ ID NO: 1747767 - DNA, 15 bp, Homo sapiens
ctatttacaaaggcc

SEQ ID NO: 1747768 - DNA, 15 bp, Homo sapiens
tatttacaaaggcct

SEQ ID NO: 1747769 - DNA, 15 bp, Homo sapiens
atttacaaaggcctg

SEQ ID NO: 1747770 - DNA, 15 bp, Homo sapiens
tttacaaaggcctgg

SEQ ID NO: 1747771 - DNA, 15 bp, Homo sapiens
ttacaaaggcctgga

SEQ ID NO: 1747772 - DNA, 15 bp, Homo sapiens
tacaaaggcctggaa

SEQ ID NO: 1747773 - DNA, 15 bp, Homo sapiens
acaaaggcctggaaa

SEQ ID NO: 1747774 - DNA, 15 bp, Homo sapiens
caaaggcctggaaag

SEQ ID NO: 1747775 - DNA, 15 bp, Homo sapiens
aaaggcctggaaagt

SEQ ID NO: 1747776 - DNA, 15 bp, Homo sapiens
aaggcctggaaagtg

SEQ ID NO: 1747777 - DNA, 15 bp, Homo sapiens
aggcctggaaagtgt

SEQ ID NO: 1747778 - DNA, 15 bp, Homo sapiens
ggcctggaaagtgtt

SEQ ID NO: 1747779 - DNA, 15 bp, Homo sapiens
gcctggaaagtgtta

SEQ ID NO: 1747780 - DNA, 15 bp, Homo sapiens
cctggaaagtgttaa

SEQ ID NO: 1747781 - DNA, 15 bp, Homo sapiens
ctggaaagtgttaag

SEQ ID NO: 1747782 - DNA, 15 bp, Homo sapiens
tggaaagtgttaagg

SEQ ID NO: 1747783 - DNA, 15 bp, Homo sapiens
ggaaagtgttaaggt

SEQ ID NO: 1747784 - DNA, 15 bp, Homo sapiens
gaaagtgttaaggta

SEQ ID NO: 1747785 - DNA, 15 bp, Homo sapiens
aaagtgttaaggtaa

SEQ ID NO: 1747786 - DNA, 15 bp, Homo sapiens
aagtgttaaggtaag

SEQ ID NO: 1747787 - DNA, 15 bp, Homo sapiens
agtgttaaggtaagc

SEQ ID NO: 1747788 - DNA, 15 bp, Homo sapiens
gtgttaaggtaagca

SEQ ID NO: 1747789 - DNA, 15 bp, Homo sapiens
tgttaaggtaagcag

SEQ ID NO: 1747790 - DNA, 15 bp, Homo sapiens
gttaaggtaagcagt

SEQ ID NO: 1747791 - DNA, 15 bp, Homo sapiens
ttaaggtaagcagta

SEQ ID NO: 1747792 - DNA, 15 bp, Homo sapiens
taaggtaagcagtac

SEQ ID NO: 1747793 - DNA, 15 bp, Homo sapiens
aaggtaagcagtacc

SEQ ID NO: 1747794 - DNA, 15 bp, Homo sapiens
aggtaagcagtaccc

SEQ ID NO: 1747795 - DNA, 15 bp, Homo sapiens
ggtaagcagtaccca

SEQ ID NO: 1747796 - DNA, 15 bp, Homo sapiens
gtaagcagtacccaa

SEQ ID NO: 1747797 - DNA, 15 bp, Homo sapiens
taagcagtacccaag

SEQ ID NO: 1747798 - DNA, 15 bp, Homo sapiens
aagcagtacccaaga

SEQ ID NO: 1747799 - DNA, 15 bp, Homo sapiens
agcagtacccaagaa

SEQ ID NO: 1747800 - DNA, 15 bp, Homo sapiens
gcagtacccaagaag

SEQ ID NO: 1747801 - DNA, 15 bp, Homo sapiens
cagtacccaagaagg

SEQ ID NO: 1747802 - DNA, 15 bp, Homo sapiens
agtacccaagaagga

SEQ ID NO: 1747803 - DNA, 15 bp, Homo sapiens
gtacccaagaaggaa

SEQ ID NO: 1747804 - DNA, 15 bp, Homo sapiens
tacccaagaaggaag

SEQ ID NO: 1747805 - DNA, 15 bp, Homo sapiens
acccaagaaggaagt

SEQ ID NO: 1747806 - DNA, 15 bp, Homo sapiens
cccaagaaggaagtt

SEQ ID NO: 1747807 - DNA, 15 bp, Homo sapiens
ccaagaaggaagtta

SEQ ID NO: 1747808 - DNA, 15 bp, Homo sapiens
caagaaggaagttaa

SEQ ID NO: 1747809 - DNA, 15 bp, Homo sapiens
aagaaggaagttaac

SEQ ID NO: 1747810 - DNA, 15 bp, Homo sapiens
agaaggaagttaaca

SEQ ID NO: 1747811 - DNA, 15 bp, Homo sapiens
gaaggaagttaacac

SEQ ID NO: 1747812 - DNA, 15 bp, Homo sapiens
aaggaagttaacacc

SEQ ID NO: 1747813 - DNA, 15 bp, Homo sapiens
aggaagttaacaccc

SEQ ID NO: 1747814 - DNA, 15 bp, Homo sapiens
ggaagttaacacccc

SEQ ID NO: 1747815 - DNA, 15 bp, Homo sapiens
gaagttaacacccca

SEQ ID NO: 1747816 - DNA, 15 bp, Homo sapiens
aagttaacaccccag

SEQ ID NO: 1747817 - DNA, 15 bp, Homo sapiens
agttaacaccccagc

SEQ ID NO: 1747818 - DNA, 15 bp, Homo sapiens
gttaacaccccagca

SEQ ID NO: 1747819 - DNA, 15 bp, Homo sapiens
ttaacaccccagcaa

SEQ ID NO: 1747820 - DNA, 15 bp, Homo sapiens
taacaccccagcaat

SEQ ID NO: 1747821 - DNA, 15 bp, Homo sapiens
aacaccccagcaata

SEQ ID NO: 1747822 - DNA, 15 bp, Homo sapiens
acaccccagcaatac

SEQ ID NO: 1747823 - DNA, 15 bp, Homo sapiens
caccccagcaatacc

SEQ ID NO: 1747824 - DNA, 15 bp, Homo sapiens
accccagcaataccc

SEQ ID NO: 1747825 - DNA, 15 bp, Homo sapiens
ccccagcaataccca

SEQ ID NO: 1747826 - DNA, 15 bp, Homo sapiens
cccagcaatacccag

SEQ ID NO: 1747827 - DNA, 15 bp, Homo sapiens
ccagcaatacccagc

SEQ ID NO: 1747828 - DNA, 15 bp, Homo sapiens
cagcaatacccagct

SEQ ID NO: 1747829 - DNA, 15 bp, Homo sapiens
agcaatacccagctg

SEQ ID NO: 1747830 - DNA, 15 bp, Homo sapiens
gcaatacccagctgg

SEQ ID NO: 1747831 - DNA, 15 bp, Homo sapiens
caatacccagctgga

SEQ ID NO: 1747832 - DNA, 15 bp, Homo sapiens
aatacccagctggaa

SEQ ID NO: 1747833 - DNA, 15 bp, Homo sapiens
atacccagctggaaa

SEQ ID NO: 1747834 - DNA, 15 bp, Homo sapiens
tacccagctggaaac

SEQ ID NO: 1747835 - DNA, 15 bp, Homo sapiens
acccagctggaaact

SEQ ID NO: 1747836 - DNA, 15 bp, Homo sapiens
cccagctggaaactg

SEQ ID NO: 1747837 - DNA, 15 bp, Homo sapiens
ccagctggaaactgc

SEQ ID NO: 1747838 - DNA, 15 bp, Homo sapiens
cagctggaaactgct

SEQ ID NO: 1747839 - DNA, 15 bp, Homo sapiens
agctggaaactgcta

SEQ ID NO: 1747840 - DNA, 15 bp, Homo sapiens
gctggaaactgctac

SEQ ID NO: 1747841 - DNA, 15 bp, Homo sapiens
ctggaaactgctacc

SEQ ID NO: 1747842 - DNA, 15 bp, Homo sapiens
tggaaactgctacca

SEQ ID NO: 1747843 - DNA, 15 bp, Homo sapiens
ggaaactgctaccac

SEQ ID NO: 1747844 - DNA, 15 bp, Homo sapiens
gaaactgctaccacc

SEQ ID NO: 1747845 - DNA, 15 bp, Homo sapiens
aaactgctaccaccc

SEQ ID NO: 1747846 - DNA, 15 bp, Homo sapiens
aactgctaccaccct

SEQ ID NO: 1747847 - DNA, 15 bp, Homo sapiens
actgctaccacccta

SEQ ID NO: 1747848 - DNA, 15 bp, Homo sapiens
ctgctaccaccctaa

SEQ ID NO: 1747849 - DNA, 15 bp, Homo sapiens
tgctaccaccctaag

SEQ ID NO: 1747850 - DNA, 15 bp, Homo sapiens
gctaccaccctaagc

SEQ ID NO: 1747851 - DNA, 15 bp, Homo sapiens
ctaccaccctaagcc

SEQ ID NO: 1747852 - DNA, 15 bp, Homo sapiens
taccaccctaagcct

SEQ ID NO: 1747853 - DNA, 15 bp, Homo sapiens
accaccctaagccta

SEQ ID NO: 1747854 - DNA, 15 bp, Homo sapiens
ccaccctaagcctaa

SEQ ID NO: 1747855 - DNA, 15 bp, Homo sapiens
caccctaagcctaaa

SEQ ID NO: 1747856 - DNA, 15 bp, Homo sapiens
accctaagcctaaag

SEQ ID NO: 1747857 - DNA, 15 bp, Homo sapiens
ccctaagcctaaagg

SEQ ID NO: 1747858 - DNA, 15 bp, Homo sapiens
cctaagcctaaaggc

SEQ ID NO: 1747859 - DNA, 15 bp, Homo sapiens
ctaagcctaaaggca

SEQ ID NO: 1747860 - DNA, 15 bp, Homo sapiens
taagcctaaaggcaa

SEQ ID NO: 1747861 - DNA, 15 bp, Homo sapiens
aagcctaaaggcaag

SEQ ID NO: 1747862 - DNA, 15 bp, Homo sapiens
agcctaaaggcaaga

SEQ ID NO: 1747863 - DNA, 15 bp, Homo sapiens
gcctaaaggcaagag

SEQ ID NO: 1747864 - DNA, 15 bp, Homo sapiens
cctaaaggcaagaga

SEQ ID NO: 1747865 - DNA, 15 bp, Homo sapiens
ctaaaggcaagagaa

SEQ ID NO: 1747866 - DNA, 15 bp, Homo sapiens
taaaggcaagagaag

SEQ ID NO: 1747867 - DNA, 15 bp, Homo sapiens
aaaggcaagagaagg

SEQ ID NO: 1747868 - DNA, 15 bp, Homo sapiens
aaggcaagagaaggg

SEQ ID NO: 1747869 - DNA, 15 bp, Homo sapiens
aggcaagagaaggga

SEQ ID NO: 1747870 - DNA, 15 bp, Homo sapiens
ggcaagagaagggaa

SEQ ID NO: 1747871 - DNA, 15 bp, Homo sapiens
gcaagagaagggaaa

SEQ ID NO: 1747872 - DNA, 15 bp, Homo sapiens
caagagaagggaaag

SEQ ID NO: 1747873 - DNA, 15 bp, Homo sapiens
aagagaagggaaaga

SEQ ID NO: 1747874 - DNA, 15 bp, Homo sapiens
agagaagggaaagat

SEQ ID NO: 1747875 - DNA, 15 bp, Homo sapiens
gagaagggaaagata

SEQ ID NO: 1747876 - DNA, 15 bp, Homo sapiens
agaagggaaagatag

SEQ ID NO: 1747877 - DNA, 15 bp, Homo sapiens
gaagggaaagatagc

SEQ ID NO: 1747878 - DNA, 15 bp, Homo sapiens
aagggaaagatagcc

SEQ ID NO: 1747879 - DNA, 15 bp, Homo sapiens
agggaaagatagcca

SEQ ID NO: 1747880 - DNA, 15 bp, Homo sapiens
gggaaagatagccag

SEQ ID NO: 1747881 - DNA, 15 bp, Homo sapiens
ggaaagatagccaga

SEQ ID NO: 1747882 - DNA, 15 bp, Homo sapiens
gaaagatagccagaa

SEQ ID NO: 1747883 - DNA, 15 bp, Homo sapiens
aaagatagccagaac

SEQ ID NO: 1747884 - DNA, 15 bp, Homo sapiens
aagatagccagaact

SEQ ID NO: 1747885 - DNA, 15 bp, Homo sapiens
agatagccagaactc

SEQ ID NO: 1747886 - DNA, 15 bp, Homo sapiens
gatagccagaactca

SEQ ID NO: 1747887 - DNA, 15 bp, Homo sapiens
atagccagaactcag

SEQ ID NO: 1747888 - DNA, 15 bp, Homo sapiens
tagccagaactcagc

SEQ ID NO: 1747889 - DNA, 15 bp, Homo sapiens
agccagaactcagca

SEQ ID NO: 1747890 - DNA, 15 bp, Homo sapiens
gccagaactcagcat

SEQ ID NO: 1747891 - DNA, 15 bp, Homo sapiens
ccagaactcagcata

SEQ ID NO: 1747892 - DNA, 15 bp, Homo sapiens
cagaactcagcatag

SEQ ID NO: 1747893 - DNA, 15 bp, Homo sapiens
agaactcagcatagg

SEQ ID NO: 1747894 - DNA, 15 bp, Homo sapiens
gaactcagcataggt

SEQ ID NO: 1747895 - DNA, 15 bp, Homo sapiens
aactcagcataggtg

SEQ ID NO: 1747896 - DNA, 15 bp, Homo sapiens
actcagcataggtgc

SEQ ID NO: 1747897 - DNA, 15 bp, Homo sapiens
ctcagcataggtgct

SEQ ID NO: 1747898 - DNA, 15 bp, Homo sapiens
tcagcataggtgctt

SEQ ID NO: 1747899 - DNA, 15 bp, Homo sapiens
cagcataggtgcttt

SEQ ID NO: 1747900 - DNA, 15 bp, Homo sapiens
agcataggtgctttc

SEQ ID NO: 1747901 - DNA, 15 bp, Homo sapiens
gcataggtgctttct

SEQ ID NO: 1747902 - DNA, 15 bp, Homo sapiens
cataggtgctttctg

SEQ ID NO: 1747903 - DNA, 15 bp, Homo sapiens
ataggtgctttctgt

SEQ ID NO: 1747904 - DNA, 15 bp, Homo sapiens
taggtgctttctgtg

SEQ ID NO: 1747905 - DNA, 15 bp, Homo sapiens
aggtgctttctgtgg

SEQ ID NO: 1747906 - DNA, 15 bp, Homo sapiens
ggtgctttctgtggt

SEQ ID NO: 1747907 - DNA, 15 bp, Homo sapiens
gtgctttctgtggtc

SEQ ID NO: 1747908 - DNA, 15 bp, Homo sapiens
tgctttctgtggtct

SEQ ID NO: 1747909 - DNA, 15 bp, Homo sapiens
gctttctgtggtctt

SEQ ID NO: 1747910 - DNA, 15 bp, Homo sapiens
ctttctgtggtcttt

SEQ ID NO: 1747911 - DNA, 15 bp, Homo sapiens
tttctgtggtctttg

SEQ ID NO: 1747912 - DNA, 15 bp, Homo sapiens
ttctgtggtctttga

SEQ ID NO: 1747913 - DNA, 15 bp, Homo sapiens
tctgtggtctttgat

SEQ ID NO: 1747914 - DNA, 15 bp, Homo sapiens
ctgtggtctttgatg

SEQ ID NO: 1747915 - DNA, 15 bp, Homo sapiens
tgtggtctttgatgg

SEQ ID NO: 1747916 - DNA, 15 bp, Homo sapiens
gtggtctttgatgga

SEQ ID NO: 1747917 - DNA, 15 bp, Homo sapiens
tggtctttgatggag

SEQ ID NO: 1747918 - DNA, 15 bp, Homo sapiens
ggtctttgatggagg

SEQ ID NO: 1747919 - DNA, 15 bp, Homo sapiens
gtctttgatggaggg

SEQ ID NO: 1747920 - DNA, 15 bp, Homo sapiens
tctttgatggaggga

SEQ ID NO: 1747921 - DNA, 15 bp, Homo sapiens
ctttgatggagggac

SEQ ID NO: 1747922 - DNA, 15 bp, Homo sapiens
tttgatggagggaca

SEQ ID NO: 1747923 - DNA, 15 bp, Homo sapiens
ttgatggagggacag

SEQ ID NO: 1747924 - DNA, 15 bp, Homo sapiens
tgatggagggacagc

SEQ ID NO: 1747925 - DNA, 15 bp, Homo sapiens
gatggagggacagca

SEQ ID NO: 1747926 - DNA, 15 bp, Homo sapiens
atggagggacagcaa

SEQ ID NO: 1747927 - DNA, 15 bp, Homo sapiens
tggagggacagcaac

SEQ ID NO: 1747928 - DNA, 15 bp, Homo sapiens
ggagggacagcaact

SEQ ID NO: 1747929 - DNA, 15 bp, Homo sapiens
gagggacagcaactg

SEQ ID NO: 1747930 - DNA, 15 bp, Homo sapiens
agggacagcaactgc

SEQ ID NO: 1747931 - DNA, 15 bp, Homo sapiens
gggacagcaactgca

SEQ ID NO: 1747932 - DNA, 15 bp, Homo sapiens
ggacagcaactgcac

SEQ ID NO: 1747933 - DNA, 15 bp, Homo sapiens
gacagcaactgcaca

SEQ ID NO: 1747934 - DNA, 15 bp, Homo sapiens
acagcaactgcacaa

SEQ ID NO: 1747935 - DNA, 15 bp, Homo sapiens
cagcaactgcacaag

SEQ ID NO: 1747936 - DNA, 15 bp, Homo sapiens
agcaactgcacaagc

SEQ ID NO: 1747937 - DNA, 15 bp, Homo sapiens
gcaactgcacaagca

SEQ ID NO: 1747938 - DNA, 15 bp, Homo sapiens
caactgcacaagcaa

SEQ ID NO: 1747939 - DNA, 15 bp, Homo sapiens
aactgcacaagcaat

SEQ ID NO: 1747940 - DNA, 15 bp, Homo sapiens
actgcacaagcaatc

SEQ ID NO: 1747941 - DNA, 15 bp, Homo sapiens
ctgcacaagcaatct

SEQ ID NO: 1747942 - DNA, 15 bp, Homo sapiens
tgcacaagcaatctg

SEQ ID NO: 1747943 - DNA, 15 bp, Homo sapiens
gcacaagcaatctga

SEQ ID NO: 1747944 - DNA, 15 bp, Homo sapiens
cacaagcaatctgac

SEQ ID NO: 1747945 - DNA, 15 bp, Homo sapiens
acaagcaatctgaca

SEQ ID NO: 1747946 - DNA, 15 bp, Homo sapiens
caagcaatctgacaa

SEQ ID NO: 1747947 - DNA, 15 bp, Homo sapiens
aagcaatctgacaag

SEQ ID NO: 1747948 - DNA, 15 bp, Homo sapiens
agcaatctgacaaga

SEQ ID NO: 1747949 - DNA, 15 bp, Homo sapiens
gcaatctgacaagaa

SEQ ID NO: 1747950 - DNA, 15 bp, Homo sapiens
caatctgacaagaaa

SEQ ID NO: 1747951 - DNA, 15 bp, Homo sapiens
aatctgacaagaaag

SEQ ID NO: 1747952 - DNA, 15 bp, Homo sapiens
atctgacaagaaaga

SEQ ID NO: 1747953 - DNA, 15 bp, Homo sapiens
tctgacaagaaagaa

SEQ ID NO: 1747954 - DNA, 15 bp, Homo sapiens
ctgacaagaaagaag

SEQ ID NO: 1747955 - DNA, 15 bp, Homo sapiens
tgacaagaaagaagc

SEQ ID NO: 1747956 - DNA, 15 bp, Homo sapiens
gacaagaaagaagcc

SEQ ID NO: 1747957 - DNA, 15 bp, Homo sapiens
acaagaaagaagcca

SEQ ID NO: 1747958 - DNA, 15 bp, Homo sapiens
caagaaagaagccaa

SEQ ID NO: 1747959 - DNA, 15 bp, Homo sapiens
aagaaagaagccaaa

SEQ ID NO: 1747960 - DNA, 15 bp, Homo sapiens
agaaagaagccaaag

SEQ ID NO: 1747961 - DNA, 15 bp, Homo sapiens
gaaagaagccaaaga

SEQ ID NO: 1747962 - DNA, 15 bp, Homo sapiens
aaagaagccaaagaa

SEQ ID NO: 1747963 - DNA, 15 bp, Homo sapiens
aagaagccaaagaaa

SEQ ID NO: 1747964 - DNA, 15 bp, Homo sapiens
agaagccaaagaaac

SEQ ID NO: 1747965 - DNA, 15 bp, Homo sapiens
gaagccaaagaaaca

SEQ ID NO: 1747966 - DNA, 15 bp, Homo sapiens
aagccaaagaaacaa

SEQ ID NO: 1747967 - DNA, 15 bp, Homo sapiens
agccaaagaaacaaa

SEQ ID NO: 1747968 - DNA, 15 bp, Homo sapiens
gccaaagaaacaaat

SEQ ID NO: 1747969 - DNA, 15 bp, Homo sapiens
ccaaagaaacaaata

SEQ ID NO: 1747970 - DNA, 15 bp, Homo sapiens
caaagaaacaaatac

SEQ ID NO: 1747971 - DNA, 15 bp, Homo sapiens
aaagaaacaaatacc

SEQ ID NO: 1747972 - DNA, 15 bp, Homo sapiens
aagaaacaaatacct

SEQ ID NO: 1747973 - DNA, 15 bp, Homo sapiens
agaaacaaatacctt

SEQ ID NO: 1747974 - DNA, 15 bp, Homo sapiens
gaaacaaataccttg

SEQ ID NO: 1747975 - DNA, 15 bp, Homo sapiens
aaacaaataccttgg

SEQ ID NO: 1747976 - DNA, 15 bp, Homo sapiens
aacaaataccttggc

SEQ ID NO: 1747977 - DNA, 15 bp, Homo sapiens
acaaataccttggcc

SEQ ID NO: 1747978 - DNA, 15 bp, Homo sapiens
caaataccttggcct

SEQ ID NO: 1747979 - DNA, 15 bp, Homo sapiens
aaataccttggcctc

SEQ ID NO: 1747980 - DNA, 15 bp, Homo sapiens
aataccttggcctca

SEQ ID NO: 1747981 - DNA, 15 bp, Homo sapiens
ataccttggcctcac

SEQ ID NO: 1747982 - DNA, 15 bp, Homo sapiens
taccttggcctcact

SEQ ID NO: 1747983 - DNA, 15 bp, Homo sapiens
accttggcctcactc

SEQ ID NO: 1747984 - DNA, 15 bp, Homo sapiens
ccttggcctcactcc

SEQ ID NO: 1747985 - DNA, 15 bp, Homo sapiens
cttggcctcactccc

SEQ ID NO: 1747986 - DNA, 15 bp, Homo sapiens
ttggcctcactccct

SEQ ID NO: 1747987 - DNA, 15 bp, Homo sapiens
tggcctcactccctt

SEQ ID NO: 1747988 - DNA, 15 bp, Homo sapiens
ggcctcactcccttc

SEQ ID NO: 1747989 - DNA, 15 bp, Homo sapiens
gcctcactcccttcc

SEQ ID NO: 1747990 - DNA, 15 bp, Homo sapiens
cctcactcccttcca

SEQ ID NO: 1747991 - DNA, 15 bp, Homo sapiens
ctcactcccttccag

SEQ ID NO: 1747992 - DNA, 15 bp, Homo sapiens
tcactcccttccagc

SEQ ID NO: 1747993 - DNA, 15 bp, Homo sapiens
cactcccttccagcc

SEQ ID NO: 1747994 - DNA, 15 bp, Homo sapiens
actcccttccagcct

SEQ ID NO: 1747995 - DNA, 15 bp, Homo sapiens
ctcccttccagcctc

SEQ ID NO: 1747996 - DNA, 15 bp, Homo sapiens
tcccttccagcctcc

SEQ ID NO: 1747997 - DNA, 15 bp, Homo sapiens
cccttccagcctccc

SEQ ID NO: 1747998 - DNA, 15 bp, Homo sapiens
cttccagcctcccta

SEQ ID NO: 1747999 - DNA, 15 bp, Homo sapiens
ttccagcctccctat

SEQ ID NO: 1748000 - DNA, 15 bp, Homo sapiens
tccagcctccctatc

SEQ ID NO: 1748001 - DNA, 15 bp, Homo sapiens
ccagcctccctatcc

SEQ ID NO: 1748002 - DNA, 15 bp, Homo sapiens
cagcctccctatcct

SEQ ID NO: 1748003 - DNA, 15 bp, Homo sapiens
agcctccctatcctc

SEQ ID NO: 1748004 - DNA, 15 bp, Homo sapiens
gcctccctatcctct

SEQ ID NO: 1748005 - DNA, 15 bp, Homo sapiens
cctccctatcctctg

SEQ ID NO: 1748006 - DNA, 15 bp, Homo sapiens
ctccctatcctctgc

SEQ ID NO: 1748007 - DNA, 15 bp, Homo sapiens
tccctatcctctgct

SEQ ID NO: 1748008 - DNA, 15 bp, Homo sapiens
ccctatcctctgctg

SEQ ID NO: 1748009 - DNA, 15 bp, Homo sapiens
cctatcctctgctgt

SEQ ID NO: 1748010 - DNA, 15 bp, Homo sapiens
ctatcctctgctgtg

SEQ ID NO: 1748011 - DNA, 15 bp, Homo sapiens
tatcctctgctgtgc

SEQ ID NO: 1748012 - DNA, 15 bp, Homo sapiens
atcctctgctgtgcc

SEQ ID NO: 1748013 - DNA, 15 bp, Homo sapiens
tcctctgctgtgcct

SEQ ID NO: 1748014 - DNA, 15 bp, Homo sapiens
cctctgctgtgcctt

SEQ ID NO: 1748015 - DNA, 15 bp, Homo sapiens
ctctgctgtgccttc

SEQ ID NO: 1748016 - DNA, 15 bp, Homo sapiens
tctgctgtgccttcc

SEQ ID NO: 1748017 - DNA, 15 bp, Homo sapiens
ctgctgtgccttcca

SEQ ID NO: 1748018 - DNA, 15 bp, Homo sapiens
tgctgtgccttccat

SEQ ID NO: 1748019 - DNA, 15 bp, Homo sapiens
gctgtgccttccatt

SEQ ID NO: 1748020 - DNA, 15 bp, Homo sapiens
ctgtgccttccattg

SEQ ID NO: 1748021 - DNA, 15 bp, Homo sapiens
tgtgccttccattgg

SEQ ID NO: 1748022 - DNA, 15 bp, Homo sapiens
gtgccttccattggc

SEQ ID NO: 1748023 - DNA, 15 bp, Homo sapiens
tgccttccattggcc

SEQ ID NO: 1748024 - DNA, 15 bp, Homo sapiens
gccttccattggcca

SEQ ID NO: 1748025 - DNA, 15 bp, Homo sapiens
ccttccattggccaa

SEQ ID NO: 1748026 - DNA, 15 bp, Homo sapiens
cttccattggccaaa

SEQ ID NO: 1748027 - DNA, 15 bp, Homo sapiens
ttccattggccaaat

SEQ ID NO: 1748028 - DNA, 15 bp, Homo sapiens
tccattggccaaatc

SEQ ID NO: 1748029 - DNA, 15 bp, Homo sapiens
ccattggccaaatcc

SEQ ID NO: 1748030 - DNA, 15 bp, Homo sapiens
cattggccaaatcct

SEQ ID NO: 1748031 - DNA, 15 bp, Homo sapiens
attggccaaatccta

SEQ ID NO: 1748032 - DNA, 15 bp, Homo sapiens
ttggccaaatcctat

SEQ ID NO: 1748033 - DNA, 15 bp, Homo sapiens
tggccaaatcctatg

SEQ ID NO: 1748034 - DNA, 15 bp, Homo sapiens
ggccaaatcctatga

SEQ ID NO: 1748035 - DNA, 15 bp, Homo sapiens
gccaaatcctatgaa

SEQ ID NO: 1748036 - DNA, 15 bp, Homo sapiens
ccaaatcctatgaaa

SEQ ID NO: 1748037 - DNA, 15 bp, Homo sapiens
caaatcctatgaaac

SEQ ID NO: 1748038 - DNA, 15 bp, Homo sapiens
aaatcctatgaaacc

SEQ ID NO: 1748039 - DNA, 15 bp, Homo sapiens
aatcctatgaaacca

SEQ ID NO: 1748040 - DNA, 15 bp, Homo sapiens
atcctatgaaaccag

SEQ ID NO: 1748041 - DNA, 15 bp, Homo sapiens
tcctatgaaaccaga

SEQ ID NO: 1748042 - DNA, 15 bp, Homo sapiens
cctatgaaaccagag

SEQ ID NO: 1748043 - DNA, 15 bp, Homo sapiens
ctatgaaaccagagg

SEQ ID NO: 1748044 - DNA, 15 bp, Homo sapiens
tatgaaaccagagga

SEQ ID NO: 1748045 - DNA, 15 bp, Homo sapiens
atgaaaccagaggac

SEQ ID NO: 1748046 - DNA, 15 bp, Homo sapiens
tgaaaccagaggaca

SEQ ID NO: 1748047 - DNA, 15 bp, Homo sapiens
gaaaccagaggacaa

SEQ ID NO: 1748048 - DNA, 15 bp, Homo sapiens
aaaccagaggacaag

SEQ ID NO: 1748049 - DNA, 15 bp, Homo sapiens
aaccagaggacaaga

SEQ ID NO: 1748050 - DNA, 15 bp, Homo sapiens
accagaggacaagaa

SEQ ID NO: 1748051 - DNA, 15 bp, Homo sapiens
ccagaggacaagaaa

SEQ ID NO: 1748052 - DNA, 15 bp, Homo sapiens
cagaggacaagaaaa

SEQ ID NO: 1748053 - DNA, 15 bp, Homo sapiens
agaggacaagaaaac

SEQ ID NO: 1748054 - DNA, 15 bp, Homo sapiens
gaggacaagaaaacc

SEQ ID NO: 1748055 - DNA, 15 bp, Homo sapiens
aggacaagaaaacct

SEQ ID NO: 1748056 - DNA, 15 bp, Homo sapiens
ggacaagaaaacctt

SEQ ID NO: 1748057 - DNA, 15 bp, Homo sapiens
gacaagaaaaccttt

SEQ ID NO: 1748058 - DNA, 15 bp, Homo sapiens
acaagaaaacctttt

SEQ ID NO: 1748059 - DNA, 15 bp, Homo sapiens
caagaaaaccttttg

SEQ ID NO: 1748060 - DNA, 15 bp, Homo sapiens
aagaaaaccttttga

SEQ ID NO: 1748061 - DNA, 15 bp, Homo sapiens
agaaaaccttttgat

SEQ ID NO: 1748062 - DNA, 15 bp, Homo sapiens
gaaaaccttttgatt

SEQ ID NO: 1748063 - DNA, 15 bp, Homo sapiens
aaaaccttttgattc

SEQ ID NO: 1748064 - DNA, 15 bp, Homo sapiens
aaaccttttgattca

SEQ ID NO: 1748065 - DNA, 15 bp, Homo sapiens
aaccttttgattcag

SEQ ID NO: 1748066 - DNA, 15 bp, Homo sapiens
accttttgattcagt

SEQ ID NO: 1748067 - DNA, 15 bp, Homo sapiens
ccttttgattcagtt

SEQ ID NO: 1748068 - DNA, 15 bp, Homo sapiens
cttttgattcagttc

SEQ ID NO: 1748069 - DNA, 15 bp, Homo sapiens
ttttgattcagttca

SEQ ID NO: 1748070 - DNA, 15 bp, Homo sapiens
tttgattcagttcat

SEQ ID NO: 1748071 - DNA, 15 bp, Homo sapiens
ttgattcagttcatg

SEQ ID NO: 1748072 - DNA, 15 bp, Homo sapiens
tgattcagttcatga

SEQ ID NO: 1748073 - DNA, 15 bp, Homo sapiens
gattcagttcatgat

SEQ ID NO: 1748074 - DNA, 15 bp, Homo sapiens
attcagttcatgata

SEQ ID NO: 1748075 - DNA, 15 bp, Homo sapiens
ttcagttcatgatag

SEQ ID NO: 1748076 - DNA, 15 bp, Homo sapiens
tcagttcatgatagt

SEQ ID NO: 1748077 - DNA, 15 bp, Homo sapiens
cagttcatgatagtt

SEQ ID NO: 1748078 - DNA, 15 bp, Homo sapiens
agttcatgatagttg

SEQ ID NO: 1748079 - DNA, 15 bp, Homo sapiens
gttcatgatagttgg

SEQ ID NO: 1748080 - DNA, 15 bp, Homo sapiens
ttcatgatagttgga

SEQ ID NO: 1748081 - DNA, 15 bp, Homo sapiens
tcatgatagttggaa

SEQ ID NO: 1748082 - DNA, 15 bp, Homo sapiens
catgatagttggaat

SEQ ID NO: 1748083 - DNA, 15 bp, Homo sapiens
atgatagttggaatc

SEQ ID NO: 1748084 - DNA, 15 bp, Homo sapiens
tgatagttggaatcc

SEQ ID NO: 1748085 - DNA, 15 bp, Homo sapiens
gatagttggaatccc

SEQ ID NO: 1748086 - DNA, 15 bp, Homo sapiens
atagttggaatcccc

SEQ ID NO: 1748087 - DNA, 15 bp, Homo sapiens
tagttggaatcccca

SEQ ID NO: 1748088 - DNA, 15 bp, Homo sapiens
agttggaatccccag

SEQ ID NO: 1748089 - DNA, 15 bp, Homo sapiens
gttggaatccccaga

SEQ ID NO: 1748090 - DNA, 15 bp, Homo sapiens
ttggaatccccagac

SEQ ID NO: 1748091 - DNA, 15 bp, Homo sapiens
tggaatccccagaca

SEQ ID NO: 1748092 - DNA, 15 bp, Homo sapiens
ggaatccccagacat

SEQ ID NO: 1748093 - DNA, 15 bp, Homo sapiens
gaatccccagacatg

SEQ ID NO: 1748094 - DNA, 15 bp, Homo sapiens
aatccccagacatgg

SEQ ID NO: 1748095 - DNA, 15 bp, Homo sapiens
atccccagacatgga

SEQ ID NO: 1748096 - DNA, 15 bp, Homo sapiens
tccccagacatggag

SEQ ID NO: 1748097 - DNA, 15 bp, Homo sapiens
ccccagacatggagt

SEQ ID NO: 1748098 - DNA, 15 bp, Homo sapiens
cccagacatggagta

SEQ ID NO: 1748099 - DNA, 15 bp, Homo sapiens
ccagacatggagtag

SEQ ID NO: 1748100 - DNA, 15 bp, Homo sapiens
cagacatggagtagg

SEQ ID NO: 1748101 - DNA, 15 bp, Homo sapiens
agacatggagtaggg

SEQ ID NO: 1748102 - DNA, 15 bp, Homo sapiens
gacatggagtagggg

SEQ ID NO: 1748103 - DNA, 15 bp, Homo sapiens
acatggagtaggggg

SEQ ID NO: 1748104 - DNA, 15 bp, Homo sapiens
catggagtaggggga

SEQ ID NO: 1748105 - DNA, 15 bp, Homo sapiens
atggagtagggggat

SEQ ID NO: 1748106 - DNA, 15 bp, Homo sapiens
tggagtagggggata

SEQ ID NO: 1748107 - DNA, 15 bp, Homo sapiens
ggagtagggggatag

SEQ ID NO: 1748108 - DNA, 15 bp, Homo sapiens
gagtagggggataga

SEQ ID NO: 1748109 - DNA, 15 bp, Homo sapiens
agtagggggatagaa

SEQ ID NO: 1748110 - DNA, 15 bp, Homo sapiens
gtagggggatagaag

SEQ ID NO: 1748111 - DNA, 15 bp, Homo sapiens
tagggggatagaagg

SEQ ID NO: 1748112 - DNA, 15 bp, Homo sapiens
agggggatagaaggt

SEQ ID NO: 1748113 - DNA, 15 bp, Homo sapiens
gggggatagaaggta

SEQ ID NO: 1748114 - DNA, 15 bp, Homo sapiens
ggggatagaaggtag

SEQ ID NO: 1748115 - DNA, 15 bp, Homo sapiens
gggatagaaggtaga

SEQ ID NO: 1748116 - DNA, 15 bp, Homo sapiens
ggatagaaggtagag

SEQ ID NO: 1748117 - DNA, 15 bp, Homo sapiens
gatagaaggtagaga

SEQ ID NO: 1748118 - DNA, 15 bp, Homo sapiens
atagaaggtagagat

SEQ ID NO: 1748119 - DNA, 15 bp, Homo sapiens
tagaaggtagagatg

SEQ ID NO: 1748120 - DNA, 15 bp, Homo sapiens
agaaggtagagatgg

SEQ ID NO: 1748121 - DNA, 15 bp, Homo sapiens
gaaggtagagatggg

SEQ ID NO: 1748122 - DNA, 15 bp, Homo sapiens
aaggtagagatgggt

SEQ ID NO: 1748123 - DNA, 15 bp, Homo sapiens
aggtagagatgggta

SEQ ID NO: 1748124 - DNA, 15 bp, Homo sapiens
ggtagagatgggtaa

SEQ ID NO: 1748125 - DNA, 15 bp, Homo sapiens
gtagagatgggtaaa

SEQ ID NO: 1748126 - DNA, 15 bp, Homo sapiens
tagagatgggtaaaa

SEQ ID NO: 1748127 - DNA, 15 bp, Homo sapiens
agagatgggtaaaaa

SEQ ID NO: 1748128 - DNA, 15 bp, Homo sapiens
gagatgggtaaaaag

SEQ ID NO: 1748129 - DNA, 15 bp, Homo sapiens
agatgggtaaaaagt

SEQ ID NO: 1748130 - DNA, 15 bp, Homo sapiens
gatgggtaaaaagtg

SEQ ID NO: 1748131 - DNA, 15 bp, Homo sapiens
atgggtaaaaagtga

SEQ ID NO: 1748132 - DNA, 15 bp, Homo sapiens
tgggtaaaaagtgag

SEQ ID NO: 1748133 - DNA, 15 bp, Homo sapiens
gggtaaaaagtgagg

SEQ ID NO: 1748134 - DNA, 15 bp, Homo sapiens
ggtaaaaagtgagga

SEQ ID NO: 1748135 - DNA, 15 bp, Homo sapiens
gtaaaaagtgaggag

SEQ ID NO: 1748136 - DNA, 15 bp, Homo sapiens
taaaaagtgaggagt

SEQ ID NO: 1748137 - DNA, 15 bp, Homo sapiens
aaaaagtgaggagtg

SEQ ID NO: 1748138 - DNA, 15 bp, Homo sapiens
aaaagtgaggagtga

SEQ ID NO: 1748139 - DNA, 15 bp, Homo sapiens
aaagtgaggagtgat

SEQ ID NO: 1748140 - DNA, 15 bp, Homo sapiens
aagtgaggagtgatt

SEQ ID NO: 1748141 - DNA, 15 bp, Homo sapiens
agtgaggagtgattt

SEQ ID NO: 1748142 - DNA, 15 bp, Homo sapiens
gtgaggagtgatttt

SEQ ID NO: 1748143 - DNA, 15 bp, Homo sapiens
tgaggagtgattttg

SEQ ID NO: 1748144 - DNA, 15 bp, Homo sapiens
gaggagtgattttgg

SEQ ID NO: 1748145 - DNA, 15 bp, Homo sapiens
aggagtgattttggg

SEQ ID NO: 1748146 - DNA, 15 bp, Homo sapiens
ggagtgattttgggg

SEQ ID NO: 1748147 - DNA, 15 bp, Homo sapiens
gagtgattttggggg

SEQ ID NO: 1748148 - DNA, 15 bp, Homo sapiens
agtgattttggggga

SEQ ID NO: 1748149 - DNA, 15 bp, Homo sapiens
gtgattttgggggac

SEQ ID NO: 1748150 - DNA, 15 bp, Homo sapiens
tgattttgggggaca

SEQ ID NO: 1748151 - DNA, 15 bp, Homo sapiens
gattttgggggacaa

SEQ ID NO: 1748152 - DNA, 15 bp, Homo sapiens
attttgggggacaaa

SEQ ID NO: 1748153 - DNA, 15 bp, Homo sapiens
ttttgggggacaaat

SEQ ID NO: 1748154 - DNA, 15 bp, Homo sapiens
tttgggggacaaatg

SEQ ID NO: 1748155 - DNA, 15 bp, Homo sapiens
ttgggggacaaatgg

SEQ ID NO: 1748156 - DNA, 15 bp, Homo sapiens
tgggggacaaatgga

SEQ ID NO: 1748157 - DNA, 15 bp, Homo sapiens
gggggacaaatggaa

SEQ ID NO: 1748158 - DNA, 15 bp, Homo sapiens
ggggacaaatggaac

SEQ ID NO: 1748159 - DNA, 15 bp, Homo sapiens
gggacaaatggaact

SEQ ID NO: 1748160 - DNA, 15 bp, Homo sapiens
ggacaaatggaacta

SEQ ID NO: 1748161 - DNA, 15 bp, Homo sapiens
gacaaatggaactag

SEQ ID NO: 1748162 - DNA, 15 bp, Homo sapiens
acaaatggaactagc

SEQ ID NO: 1748163 - DNA, 15 bp, Homo sapiens
caaatggaactagca

SEQ ID NO: 1748164 - DNA, 15 bp, Homo sapiens
aaatggaactagcag

SEQ ID NO: 1748165 - DNA, 15 bp, Homo sapiens
aatggaactagcagc

SEQ ID NO: 1748166 - DNA, 15 bp, Homo sapiens
atggaactagcagct

SEQ ID NO: 1748167 - DNA, 15 bp, Homo sapiens
tggaactagcagctg

SEQ ID NO: 1748168 - DNA, 15 bp, Homo sapiens
ggaactagcagctgg

SEQ ID NO: 1748169 - DNA, 15 bp, Homo sapiens
gaactagcagctggg

SEQ ID NO: 1748170 - DNA, 15 bp, Homo sapiens
aactagcagctgggg

SEQ ID NO: 1748171 - DNA, 15 bp, Homo sapiens
actagcagctgggga

SEQ ID NO: 1748172 - DNA, 15 bp, Homo sapiens
ctagcagctggggat

SEQ ID NO: 1748173 - DNA, 15 bp, Homo sapiens
tagcagctggggatt

SEQ ID NO: 1748174 - DNA, 15 bp, Homo sapiens
agcagctggggatta

SEQ ID NO: 1748175 - DNA, 15 bp, Homo sapiens
gcagctggggattac

SEQ ID NO: 1748176 - DNA, 15 bp, Homo sapiens
cagctggggattaca

SEQ ID NO: 1748177 - DNA, 15 bp, Homo sapiens
agctggggattacaa

SEQ ID NO: 1748178 - DNA, 15 bp, Homo sapiens
gctggggattacaac

SEQ ID NO: 1748179 - DNA, 15 bp, Homo sapiens
ctggggattacaact

SEQ ID NO: 1748180 - DNA, 15 bp, Homo sapiens
tggggattacaactt

SEQ ID NO: 1748181 - DNA, 15 bp, Homo sapiens
ggggattacaactta

SEQ ID NO: 1748182 - DNA, 15 bp, Homo sapiens
gggattacaacttag

SEQ ID NO: 1748183 - DNA, 15 bp, Homo sapiens
ggattacaacttaga

SEQ ID NO: 1748184 - DNA, 15 bp, Homo sapiens
gattacaacttagag

SEQ ID NO: 1748185 - DNA, 15 bp, Homo sapiens
attacaacttagagt

SEQ ID NO: 1748186 - DNA, 15 bp, Homo sapiens
ttacaacttagagta

SEQ ID NO: 1748187 - DNA, 15 bp, Homo sapiens
tacaacttagagtac

SEQ ID NO: 1748188 - DNA, 15 bp, Homo sapiens
acaacttagagtaca

SEQ ID NO: 1748189 - DNA, 15 bp, Homo sapiens
caacttagagtacaa

SEQ ID NO: 1748190 - DNA, 15 bp, Homo sapiens
aacttagagtacaac

SEQ ID NO: 1748191 - DNA, 15 bp, Homo sapiens
acttagagtacaact

SEQ ID NO: 1748192 - DNA, 15 bp, Homo sapiens
cttagagtacaacta

SEQ ID NO: 1748193 - DNA, 15 bp, Homo sapiens
ttagagtacaactat

SEQ ID NO: 1748194 - DNA, 15 bp, Homo sapiens
tagagtacaactatt

SEQ ID NO: 1748195 - DNA, 15 bp, Homo sapiens
agagtacaactattt

SEQ ID NO: 1748196 - DNA, 15 bp, Homo sapiens
gagtacaactattta

SEQ ID NO: 1748197 - DNA, 15 bp, Homo sapiens
agtacaactatttat

SEQ ID NO: 1748198 - DNA, 15 bp, Homo sapiens
gtacaactatttatt

SEQ ID NO: 1748199 - DNA, 15 bp, Homo sapiens
tacaactatttattg

SEQ ID NO: 1748200 - DNA, 15 bp, Homo sapiens
acaactatttattgt

SEQ ID NO: 1748201 - DNA, 15 bp, Homo sapiens
caactatttattgta

SEQ ID NO: 1748202 - DNA, 15 bp, Homo sapiens
aactatttattgtat

SEQ ID NO: 1748203 - DNA, 15 bp, Homo sapiens
actatttattgtata

SEQ ID NO: 1748204 - DNA, 15 bp, Homo sapiens
ctatttattgtataa

SEQ ID NO: 1748205 - DNA, 15 bp, Homo sapiens
tatttattgtataaa

SEQ ID NO: 1748206 - DNA, 15 bp, Homo sapiens
atttattgtataaaa

SEQ ID NO: 1748207 - DNA, 15 bp, Homo sapiens
tttattgtataaaaa

SEQ ID NO: 1748208 - DNA, 15 bp, Homo sapiens
ttattgtataaaaaa

SEQ ID NO: 1748209 - DNA, 15 bp, Homo sapiens
tattgtataaaaaat

SEQ ID NO: 1748210 - DNA, 15 bp, Homo sapiens
attgtataaaaaata

SEQ ID NO: 1748211 - DNA, 15 bp, Homo sapiens
ttgtataaaaaatat

SEQ ID NO: 1748212 - DNA, 15 bp, Homo sapiens
tgtataaaaaatatt

SEQ ID NO: 1748213 - DNA, 15 bp, Homo sapiens
gtataaaaaatattg

SEQ ID NO: 1748214 - DNA, 15 bp, Homo sapiens
tataaaaaatattga

SEQ ID NO: 1748215 - DNA, 15 bp, Homo sapiens
ataaaaaatattgag

SEQ ID NO: 1748216 - DNA, 15 bp, Homo sapiens
taaaaaatattgaga

SEQ ID NO: 1748217 - DNA, 15 bp, Homo sapiens
aaaaaatattgagaa

SEQ ID NO: 1748218 - DNA, 15 bp, Homo sapiens
aaaaatattgagaac

SEQ ID NO: 1748219 - DNA, 15 bp, Homo sapiens
aaaatattgagaaca

SEQ ID NO: 1748220 - DNA, 15 bp, Homo sapiens
aaatattgagaacat

SEQ ID NO: 1748221 - DNA, 15 bp, Homo sapiens
aatattgagaacatt

SEQ ID NO: 1748222 - DNA, 15 bp, Homo sapiens
atattgagaacattt

SEQ ID NO: 1748223 - DNA, 15 bp, Homo sapiens
tattgagaacatttc

SEQ ID NO: 1748224 - DNA, 15 bp, Homo sapiens
attgagaacatttct

SEQ ID NO: 1748225 - DNA, 15 bp, Homo sapiens
ttgagaacatttctg

SEQ ID NO: 1748226 - DNA, 15 bp, Homo sapiens
tgagaacatttctga

SEQ ID NO: 1748227 - DNA, 15 bp, Homo sapiens
gagaacatttctgaa

SEQ ID NO: 1748228 - DNA, 15 bp, Homo sapiens
agaacatttctgaaa

SEQ ID NO: 1748229 - DNA, 15 bp, Homo sapiens
gaacatttctgaaag

SEQ ID NO: 1748230 - DNA, 15 bp, Homo sapiens
aacatttctgaaagt

SEQ ID NO: 1748231 - DNA, 15 bp, Homo sapiens
acatttctgaaagtg

SEQ ID NO: 1748232 - DNA, 15 bp, Homo sapiens
catttctgaaagtga

SEQ ID NO: 1748233 - DNA, 15 bp, Homo sapiens
atttctgaaagtgaa

SEQ ID NO: 1748234 - DNA, 15 bp, Homo sapiens
tttctgaaagtgaaa

SEQ ID NO: 1748235 - DNA, 15 bp, Homo sapiens
ttctgaaagtgaaaa

SEQ ID NO: 1748236 - DNA, 15 bp, Homo sapiens
tctgaaagtgaaaac

SEQ ID NO: 1748237 - DNA, 15 bp, Homo sapiens
ctgaaagtgaaaacc

SEQ ID NO: 1748238 - DNA, 15 bp, Homo sapiens
tgaaagtgaaaaccg

SEQ ID NO: 1748239 - DNA, 15 bp, Homo sapiens
gaaagtgaaaaccgt

SEQ ID NO: 1748240 - DNA, 15 bp, Homo sapiens
aaagtgaaaaccgtt

SEQ ID NO: 1748241 - DNA, 15 bp, Homo sapiens
aagtgaaaaccgttg

SEQ ID NO: 1748242 - DNA, 15 bp, Homo sapiens
agtgaaaaccgttgg

SEQ ID NO: 1748243 - DNA, 15 bp, Homo sapiens
gtgaaaaccgttgga

SEQ ID NO: 1748244 - DNA, 15 bp, Homo sapiens
tgaaaaccgttggaa

SEQ ID NO: 1748245 - DNA, 15 bp, Homo sapiens
gaaaaccgttggaaa

SEQ ID NO: 1748246 - DNA, 15 bp, Homo sapiens
aaaaccgttggaaag

SEQ ID NO: 1748247 - DNA, 15 bp, Homo sapiens
aaaccgttggaaagt

SEQ ID NO: 1748248 - DNA, 15 bp, Homo sapiens
aaccgttggaaagtc

SEQ ID NO: 1748249 - DNA, 15 bp, Homo sapiens
accgttggaaagtca

SEQ ID NO: 1748250 - DNA, 15 bp, Homo sapiens
ccgttggaaagtcac

SEQ ID NO: 1748251 - DNA, 15 bp, Homo sapiens
cgttggaaagtcaca

SEQ ID NO: 1748252 - DNA, 15 bp, Homo sapiens
gttggaaagtcacat

SEQ ID NO: 1748253 - DNA, 15 bp, Homo sapiens
ttggaaagtcacatt

SEQ ID NO: 1748254 - DNA, 15 bp, Homo sapiens
tggaaagtcacatta

SEQ ID NO: 1748255 - DNA, 15 bp, Homo sapiens
ggaaagtcacattat

SEQ ID NO: 1748256 - DNA, 15 bp, Homo sapiens
gaaagtcacattatt

SEQ ID NO: 1748257 - DNA, 15 bp, Homo sapiens
aaagtcacattattc

SEQ ID NO: 1748258 - DNA, 15 bp, Homo sapiens
aagtcacattattcc

SEQ ID NO: 1748259 - DNA, 15 bp, Homo sapiens
agtcacattattcct

SEQ ID NO: 1748260 - DNA, 15 bp, Homo sapiens
gtcacattattcctg

SEQ ID NO: 1748261 - DNA, 15 bp, Homo sapiens
tcacattattcctgc

SEQ ID NO: 1748262 - DNA, 15 bp, Homo sapiens
cacattattcctgct

SEQ ID NO: 1748263 - DNA, 15 bp, Homo sapiens
acattattcctgctt

SEQ ID NO: 1748264 - DNA, 15 bp, Homo sapiens
cattattcctgcttc

SEQ ID NO: 1748265 - DNA, 15 bp, Homo sapiens
attattcctgcttcc

SEQ ID NO: 1748266 - DNA, 15 bp, Homo sapiens
ttattcctgcttcct

SEQ ID NO: 1748267 - DNA, 15 bp, Homo sapiens
tattcctgcttcctt

SEQ ID NO: 1748268 - DNA, 15 bp, Homo sapiens
attcctgcttccttt

SEQ ID NO: 1748269 - DNA, 15 bp, Homo sapiens
ttcctgcttcctttc

SEQ ID NO: 1748270 - DNA, 15 bp, Homo sapiens
tcctgcttcctttct

SEQ ID NO: 1748271 - DNA, 15 bp, Homo sapiens
cctgcttcctttctt

SEQ ID NO: 1748272 - DNA, 15 bp, Homo sapiens
ctgcttcctttcttt

SEQ ID NO: 1748273 - DNA, 15 bp, Homo sapiens
tgcttcctttctttt

SEQ ID NO: 1748274 - DNA, 15 bp, Homo sapiens
gcttcctttcttttt

SEQ ID NO: 1748275 - DNA, 15 bp, Homo sapiens
cttcctttctttttt

SEQ ID NO: 1748276 - DNA, 15 bp, Homo sapiens
ttcctttctttttta

SEQ ID NO: 1748277 - DNA, 15 bp, Homo sapiens
tcctttcttttttaa

SEQ ID NO: 1748278 - DNA, 15 bp, Homo sapiens
cctttcttttttaaa

SEQ ID NO: 1748279 - DNA, 15 bp, Homo sapiens
ctttcttttttaaaa

SEQ ID NO: 1748280 - DNA, 15 bp, Homo sapiens
tttcttttttaaaat

SEQ ID NO: 1748281 - DNA, 15 bp, Homo sapiens
ttcttttttaaaatc

SEQ ID NO: 1748282 - DNA, 15 bp, Homo sapiens
tcttttttaaaatca

SEQ ID NO: 1748283 - DNA, 15 bp, Homo sapiens
cttttttaaaatcat

SEQ ID NO: 1748284 - DNA, 15 bp, Homo sapiens
ttttttaaaatcatt

SEQ ID NO: 1748285 - DNA, 15 bp, Homo sapiens
tttttaaaatcattg

SEQ ID NO: 1748286 - DNA, 15 bp, Homo sapiens
ttttaaaatcattga

SEQ ID NO: 1748287 - DNA, 15 bp, Homo sapiens
tttaaaatcattgaa

SEQ ID NO: 1748288 - DNA, 15 bp, Homo sapiens
ttaaaatcattgaaa

SEQ ID NO: 1748289 - DNA, 15 bp, Homo sapiens
taaaatcattgaaat

SEQ ID NO: 1748290 - DNA, 15 bp, Homo sapiens
aaaatcattgaaatg

SEQ ID NO: 1748291 - DNA, 15 bp, Homo sapiens
aaatcattgaaatgt

SEQ ID NO: 1748292 - DNA, 15 bp, Homo sapiens
aatcattgaaatgtt

SEQ ID NO: 1748293 - DNA, 15 bp, Homo sapiens
atcattgaaatgtta

SEQ ID NO: 1748294 - DNA, 15 bp, Homo sapiens
tcattgaaatgttaa

SEQ ID NO: 1748295 - DNA, 15 bp, Homo sapiens
cattgaaatgttaaa

SEQ ID NO: 1748296 - DNA, 15 bp, Homo sapiens
attgaaatgttaaat

SEQ ID NO: 1748297 - DNA, 15 bp, Homo sapiens
ttgaaatgttaaatt

SEQ ID NO: 1748298 - DNA, 15 bp, Homo sapiens
tgaaatgttaaatta

SEQ ID NO: 1748299 - DNA, 15 bp, Homo sapiens
gaaatgttaaattat

SEQ ID NO: 1748300 - DNA, 15 bp, Homo sapiens
aaatgttaaattatg

SEQ ID NO: 1748301 - DNA, 15 bp, Homo sapiens
aatgttaaattatgg

SEQ ID NO: 1748302 - DNA, 15 bp, Homo sapiens
atgttaaattatgga

SEQ ID NO: 1748303 - DNA, 15 bp, Homo sapiens
tgttaaattatggaa

SEQ ID NO: 1748304 - DNA, 15 bp, Homo sapiens
gttaaattatggaaa

SEQ ID NO: 1748305 - DNA, 15 bp, Homo sapiens
ttaaattatggaaac

SEQ ID NO: 1748306 - DNA, 15 bp, Homo sapiens
taaattatggaaacc

SEQ ID NO: 1748307 - DNA, 15 bp, Homo sapiens
aaattatggaaacct

SEQ ID NO: 1748308 - DNA, 15 bp, Homo sapiens
aattatggaaaccta

SEQ ID NO: 1748309 - DNA, 15 bp, Homo sapiens
attatggaaacctag

SEQ ID NO: 1748310 - DNA, 15 bp, Homo sapiens
ttatggaaacctaga

SEQ ID NO: 1748311 - DNA, 15 bp, Homo sapiens
tatggaaacctagaa

SEQ ID NO: 1748312 - DNA, 15 bp, Homo sapiens
atggaaacctagaag

SEQ ID NO: 1748313 - DNA, 15 bp, Homo sapiens
tggaaacctagaaga

SEQ ID NO: 1748314 - DNA, 15 bp, Homo sapiens
ggaaacctagaagac

SEQ ID NO: 1748315 - DNA, 15 bp, Homo sapiens
gaaacctagaagaca

SEQ ID NO: 1748316 - DNA, 15 bp, Homo sapiens
aaacctagaagacag

SEQ ID NO: 1748317 - DNA, 15 bp, Homo sapiens
aacctagaagacagc

SEQ ID NO: 1748318 - DNA, 15 bp, Homo sapiens
acctagaagacagct

SEQ ID NO: 1748319 - DNA, 15 bp, Homo sapiens
cctagaagacagctt

SEQ ID NO: 1748320 - DNA, 15 bp, Homo sapiens
ctagaagacagcttt

SEQ ID NO: 1748321 - DNA, 15 bp, Homo sapiens
tagaagacagcttta

SEQ ID NO: 1748322 - DNA, 15 bp, Homo sapiens
agaagacagctttag

SEQ ID NO: 1748323 - DNA, 15 bp, Homo sapiens
gaagacagctttagg

SEQ ID NO: 1748324 - DNA, 15 bp, Homo sapiens
aagacagctttaggc

SEQ ID NO: 1748325 - DNA, 15 bp, Homo sapiens
agacagctttaggca

SEQ ID NO: 1748326 - DNA, 15 bp, Homo sapiens
gacagctttaggcag

SEQ ID NO: 1748327 - DNA, 15 bp, Homo sapiens
acagctttaggcagt

SEQ ID NO: 1748328 - DNA, 15 bp, Homo sapiens
cagctttaggcagta

SEQ ID NO: 1748329 - DNA, 15 bp, Homo sapiens
agctttaggcagtac

SEQ ID NO: 1748330 - DNA, 15 bp, Homo sapiens
gctttaggcagtaca

SEQ ID NO: 1748331 - DNA, 15 bp, Homo sapiens
ctttaggcagtacag

SEQ ID NO: 1748332 - DNA, 15 bp, Homo sapiens
tttaggcagtacagg

SEQ ID NO: 1748333 - DNA, 15 bp, Homo sapiens
ttaggcagtacaggg

SEQ ID NO: 1748334 - DNA, 15 bp, Homo sapiens
taggcagtacaggga

SEQ ID NO: 1748335 - DNA, 15 bp, Homo sapiens
aggcagtacagggaa

SEQ ID NO: 1748336 - DNA, 15 bp, Homo sapiens
ggcagtacagggaag

SEQ ID NO: 1748337 - DNA, 15 bp, Homo sapiens
gcagtacagggaagc

SEQ ID NO: 1748338 - DNA, 15 bp, Homo sapiens
cagtacagggaagct

SEQ ID NO: 1748339 - DNA, 15 bp, Homo sapiens
agtacagggaagcta

SEQ ID NO: 1748340 - DNA, 15 bp, Homo sapiens
gtacagggaagctat

SEQ ID NO: 1748341 - DNA, 15 bp, Homo sapiens
tacagggaagctatg

SEQ ID NO: 1748342 - DNA, 15 bp, Homo sapiens
acagggaagctatgc

SEQ ID NO: 1748343 - DNA, 15 bp, Homo sapiens
cagggaagctatgca

SEQ ID NO: 1748344 - DNA, 15 bp, Homo sapiens
agggaagctatgcag

SEQ ID NO: 1748345 - DNA, 15 bp, Homo sapiens
gggaagctatgcagc

SEQ ID NO: 1748346 - DNA, 15 bp, Homo sapiens
ggaagctatgcagcc

SEQ ID NO: 1748347 - DNA, 15 bp, Homo sapiens
gaagctatgcagcca

SEQ ID NO: 1748348 - DNA, 15 bp, Homo sapiens
aagctatgcagccac

SEQ ID NO: 1748349 - DNA, 15 bp, Homo sapiens
agctatgcagccaca

SEQ ID NO: 1748350 - DNA, 15 bp, Homo sapiens
gctatgcagccacat

SEQ ID NO: 1748351 - DNA, 15 bp, Homo sapiens
ctatgcagccacatg

SEQ ID NO: 1748352 - DNA, 15 bp, Homo sapiens
tatgcagccacatgt

SEQ ID NO: 1748353 - DNA, 15 bp, Homo sapiens
atgcagccacatgtg

SEQ ID NO: 1748354 - DNA, 15 bp, Homo sapiens
tgcagccacatgtgg

SEQ ID NO: 1748355 - DNA, 15 bp, Homo sapiens
gcagccacatgtggg

SEQ ID NO: 1748356 - DNA, 15 bp, Homo sapiens
cagccacatgtgggt

SEQ ID NO: 1748357 - DNA, 15 bp, Homo sapiens
agccacatgtgggtt

SEQ ID NO: 1748358 - DNA, 15 bp, Homo sapiens
gccacatgtgggttg

SEQ ID NO: 1748359 - DNA, 15 bp, Homo sapiens
ccacatgtgggttgt

SEQ ID NO: 1748360 - DNA, 15 bp, Homo sapiens
cacatgtgggttgtt

SEQ ID NO: 1748361 - DNA, 15 bp, Homo sapiens
acatgtgggttgttc

SEQ ID NO: 1748362 - DNA, 15 bp, Homo sapiens
catgtgggttgttca

SEQ ID NO: 1748363 - DNA, 15 bp, Homo sapiens
atgtgggttgttcat

SEQ ID NO: 1748364 - DNA, 15 bp, Homo sapiens
tgtgggttgttcatc

SEQ ID NO: 1748365 - DNA, 15 bp, Homo sapiens
gtgggttgttcatca

SEQ ID NO: 1748366 - DNA, 15 bp, Homo sapiens
tgggttgttcatcac

SEQ ID NO: 1748367 - DNA, 15 bp, Homo sapiens
gggttgttcatcact

SEQ ID NO: 1748368 - DNA, 15 bp, Homo sapiens
ggttgttcatcacta

SEQ ID NO: 1748369 - DNA, 15 bp, Homo sapiens
gttgttcatcactat

SEQ ID NO: 1748370 - DNA, 15 bp, Homo sapiens
ttgttcatcactatt

SEQ ID NO: 1748371 - DNA, 15 bp, Homo sapiens
tgttcatcactattt

SEQ ID NO: 1748372 - DNA, 15 bp, Homo sapiens
gttcatcactatttt

SEQ ID NO: 1748373 - DNA, 15 bp, Homo sapiens
ttcatcactatttta

SEQ ID NO: 1748374 - DNA, 15 bp, Homo sapiens
tcatcactattttaa

SEQ ID NO: 1748375 - DNA, 15 bp, Homo sapiens
catcactattttaaa

SEQ ID NO: 1748376 - DNA, 15 bp, Homo sapiens
atcactattttaaaa

SEQ ID NO: 1748377 - DNA, 15 bp, Homo sapiens
tcactattttaaaac

SEQ ID NO: 1748378 - DNA, 15 bp, Homo sapiens
cactattttaaaact

SEQ ID NO: 1748379 - DNA, 15 bp, Homo sapiens
actattttaaaactt

SEQ ID NO: 1748380 - DNA, 15 bp, Homo sapiens
ctattttaaaactta

SEQ ID NO: 1748381 - DNA, 15 bp, Homo sapiens
tattttaaaacttag

SEQ ID NO: 1748382 - DNA, 15 bp, Homo sapiens
attttaaaacttagt

SEQ ID NO: 1748383 - DNA, 15 bp, Homo sapiens
ttttaaaacttagtt

SEQ ID NO: 1748384 - DNA, 15 bp, Homo sapiens
tttaaaacttagttt

SEQ ID NO: 1748385 - DNA, 15 bp, Homo sapiens
ttaaaacttagtttt

SEQ ID NO: 1748386 - DNA, 15 bp, Homo sapiens
taaaacttagttttt

SEQ ID NO: 1748387 - DNA, 15 bp, Homo sapiens
aaaacttagtttttg

SEQ ID NO: 1748388 - DNA, 15 bp, Homo sapiens
aaacttagtttttgg

SEQ ID NO: 1748389 - DNA, 15 bp, Homo sapiens
aacttagtttttggc

SEQ ID NO: 1748390 - DNA, 15 bp, Homo sapiens
acttagtttttggca

SEQ ID NO: 1748391 - DNA, 15 bp, Homo sapiens
cttagtttttggcaa

SEQ ID NO: 1748392 - DNA, 15 bp, Homo sapiens
ttagtttttggcaac

SEQ ID NO: 1748393 - DNA, 15 bp, Homo sapiens
tagtttttggcaact

SEQ ID NO: 1748394 - DNA, 15 bp, Homo sapiens
agtttttggcaactc

SEQ ID NO: 1748395 - DNA, 15 bp, Homo sapiens
gtttttggcaactca

SEQ ID NO: 1748396 - DNA, 15 bp, Homo sapiens
tttttggcaactcac

SEQ ID NO: 1748397 - DNA, 15 bp, Homo sapiens
ttttggcaactcacc

SEQ ID NO: 1748398 - DNA, 15 bp, Homo sapiens
tttggcaactcacct

SEQ ID NO: 1748399 - DNA, 15 bp, Homo sapiens
ttggcaactcacctt

SEQ ID NO: 1748400 - DNA, 15 bp, Homo sapiens
tggcaactcaccttt

SEQ ID NO: 1748401 - DNA, 15 bp, Homo sapiens
ggcaactcacctttt

SEQ ID NO: 1748402 - DNA, 15 bp, Homo sapiens
gcaactcaccttttc

SEQ ID NO: 1748403 - DNA, 15 bp, Homo sapiens
caactcaccttttcg

SEQ ID NO: 1748404 - DNA, 15 bp, Homo sapiens
aactcaccttttcgt

SEQ ID NO: 1748405 - DNA, 15 bp, Homo sapiens
actcaccttttcgtc

SEQ ID NO: 1748406 - DNA, 15 bp, Homo sapiens
ctcaccttttcgtca

SEQ ID NO: 1748407 - DNA, 15 bp, Homo sapiens
tcaccttttcgtcaa

SEQ ID NO: 1748408 - DNA, 15 bp, Homo sapiens
caccttttcgtcaag

SEQ ID NO: 1748409 - DNA, 15 bp, Homo sapiens
accttttcgtcaagc

SEQ ID NO: 1748410 - DNA, 15 bp, Homo sapiens
ccttttcgtcaagca

SEQ ID NO: 1748411 - DNA, 15 bp, Homo sapiens
cttttcgtcaagcat

SEQ ID NO: 1748412 - DNA, 15 bp, Homo sapiens
ttttcgtcaagcatt

SEQ ID NO: 1748413 - DNA, 15 bp, Homo sapiens
tttcgtcaagcattt

SEQ ID NO: 1748414 - DNA, 15 bp, Homo sapiens
ttcgtcaagcattta

SEQ ID NO: 1748415 - DNA, 15 bp, Homo sapiens
tcgtcaagcatttaa

SEQ ID NO: 1748416 - DNA, 15 bp, Homo sapiens
cgtcaagcatttaaa

SEQ ID NO: 1748417 - DNA, 15 bp, Homo sapiens
gtcaagcatttaaag

SEQ ID NO: 1748418 - DNA, 15 bp, Homo sapiens
tcaagcatttaaagg

SEQ ID NO: 1748419 - DNA, 15 bp, Homo sapiens
caagcatttaaagga

SEQ ID NO: 1748420 - DNA, 15 bp, Homo sapiens
aagcatttaaaggaa

SEQ ID NO: 1748421 - DNA, 15 bp, Homo sapiens
agcatttaaaggaaa

SEQ ID NO: 1748422 - DNA, 15 bp, Homo sapiens
gcatttaaaggaaag

SEQ ID NO: 1748423 - DNA, 15 bp, Homo sapiens
catttaaaggaaagt

SEQ ID NO: 1748424 - DNA, 15 bp, Homo sapiens
atttaaaggaaagtt

SEQ ID NO: 1748425 - DNA, 15 bp, Homo sapiens
tttaaaggaaagttt

SEQ ID NO: 1748426 - DNA, 15 bp, Homo sapiens
ttaaaggaaagtttt

SEQ ID NO: 1748427 - DNA, 15 bp, Homo sapiens
taaaggaaagtttta

SEQ ID NO: 1748428 - DNA, 15 bp, Homo sapiens
aaaggaaagttttac

SEQ ID NO: 1748429 - DNA, 15 bp, Homo sapiens
aaggaaagttttact

SEQ ID NO: 1748430 - DNA, 15 bp, Homo sapiens
aggaaagttttacta

SEQ ID NO: 1748431 - DNA, 15 bp, Homo sapiens
ggaaagttttactat

SEQ ID NO: 1748432 - DNA, 15 bp, Homo sapiens
gaaagttttactata

SEQ ID NO: 1748433 - DNA, 15 bp, Homo sapiens
aaagttttactatac

SEQ ID NO: 1748434 - DNA, 15 bp, Homo sapiens
aagttttactatacc

SEQ ID NO: 1748435 - DNA, 15 bp, Homo sapiens
agttttactatacct

SEQ ID NO: 1748436 - DNA, 15 bp, Homo sapiens
gttttactatacctc

SEQ ID NO: 1748437 - DNA, 15 bp, Homo sapiens
ttttactatacctct

SEQ ID NO: 1748438 - DNA, 15 bp, Homo sapiens
tttactatacctctc

SEQ ID NO: 1748439 - DNA, 15 bp, Homo sapiens
ttactatacctctca

SEQ ID NO: 1748440 - DNA, 15 bp, Homo sapiens
tactatacctctcat

SEQ ID NO: 1748441 - DNA, 15 bp, Homo sapiens
actatacctctcatc

SEQ ID NO: 1748442 - DNA, 15 bp, Homo sapiens
ctatacctctcatcc

SEQ ID NO: 1748443 - DNA, 15 bp, Homo sapiens
tatacctctcatccc

SEQ ID NO: 1748444 - DNA, 15 bp, Homo sapiens
atacctctcatccca

SEQ ID NO: 1748445 - DNA, 15 bp, Homo sapiens
tacctctcatcccag

SEQ ID NO: 1748446 - DNA, 15 bp, Homo sapiens
acctctcatcccagc

SEQ ID NO: 1748447 - DNA, 15 bp, Homo sapiens
cctctcatcccagcc

SEQ ID NO: 1748448 - DNA, 15 bp, Homo sapiens
ctctcatcccagccc

SEQ ID NO: 1748449 - DNA, 15 bp, Homo sapiens
tctcatcccagcccc

SEQ ID NO: 1748450 - DNA, 15 bp, Homo sapiens
ctcatcccagcccct

SEQ ID NO: 1748451 - DNA, 15 bp, Homo sapiens
tcatcccagccccta

SEQ ID NO: 1748452 - DNA, 15 bp, Homo sapiens
catcccagcccctag

SEQ ID NO: 1748453 - DNA, 15 bp, Homo sapiens
atcccagcccctagg

SEQ ID NO: 1748454 - DNA, 15 bp, Homo sapiens
tcccagcccctaggt

SEQ ID NO: 1748455 - DNA, 15 bp, Homo sapiens
cccagcccctaggta

SEQ ID NO: 1748456 - DNA, 15 bp, Homo sapiens
ccagcccctaggtat

SEQ ID NO: 1748457 - DNA, 15 bp, Homo sapiens
cagcccctaggtatt

SEQ ID NO: 1748458 - DNA, 15 bp, Homo sapiens
agcccctaggtatta

SEQ ID NO: 1748459 - DNA, 15 bp, Homo sapiens
gcccctaggtattaa

SEQ ID NO: 1748460 - DNA, 15 bp, Homo sapiens
cccctaggtattaaa

SEQ ID NO: 1748461 - DNA, 15 bp, Homo sapiens
ccctaggtattaaaa

SEQ ID NO: 1748462 - DNA, 15 bp, Homo sapiens
cctaggtattaaaac

SEQ ID NO: 1748463 - DNA, 15 bp, Homo sapiens
ctaggtattaaaacc

SEQ ID NO: 1748464 - DNA, 15 bp, Homo sapiens
taggtattaaaaccc

SEQ ID NO: 1748465 - DNA, 15 bp, Homo sapiens
aggtattaaaaccca

SEQ ID NO: 1748466 - DNA, 15 bp, Homo sapiens
ggtattaaaacccat

SEQ ID NO: 1748467 - DNA, 15 bp, Homo sapiens
gtattaaaacccatt

SEQ ID NO: 1748468 - DNA, 15 bp, Homo sapiens
tattaaaacccattt

SEQ ID NO: 1748469 - DNA, 15 bp, Homo sapiens
attaaaacccatttt

SEQ ID NO: 1748470 - DNA, 15 bp, Homo sapiens
ttaaaacccattttt

SEQ ID NO: 1748471 - DNA, 15 bp, Homo sapiens
taaaacccattttta

SEQ ID NO: 1748472 - DNA, 15 bp, Homo sapiens
aaaacccatttttaa

SEQ ID NO: 1748473 - DNA, 15 bp, Homo sapiens
aaacccatttttaat

SEQ ID NO: 1748474 - DNA, 15 bp, Homo sapiens
aacccatttttaata

SEQ ID NO: 1748475 - DNA, 15 bp, Homo sapiens
acccatttttaatat

SEQ ID NO: 1748476 - DNA, 15 bp, Homo sapiens
cccatttttaatatc

SEQ ID NO: 1748477 - DNA, 15 bp, Homo sapiens
ccatttttaatatct

SEQ ID NO: 1748478 - DNA, 15 bp, Homo sapiens
catttttaatatctt

SEQ ID NO: 1748479 - DNA, 15 bp, Homo sapiens
atttttaatatctta

SEQ ID NO: 1748480 - DNA, 15 bp, Homo sapiens
tttttaatatcttag

SEQ ID NO: 1748481 - DNA, 15 bp, Homo sapiens
ttttaatatcttagc

SEQ ID NO: 1748482 - DNA, 15 bp, Homo sapiens
tttaatatcttagct

SEQ ID NO: 1748483 - DNA, 15 bp, Homo sapiens
ttaatatcttagctt

SEQ ID NO: 1748484 - DNA, 15 bp, Homo sapiens
taatatcttagcttt

SEQ ID NO: 1748485 - DNA, 15 bp, Homo sapiens
aatatcttagcttta

SEQ ID NO: 1748486 - DNA, 15 bp, Homo sapiens
atatcttagctttag

SEQ ID NO: 1748487 - DNA, 15 bp, Homo sapiens
tatcttagctttaga

SEQ ID NO: 1748488 - DNA, 15 bp, Homo sapiens
atcttagctttagaa

SEQ ID NO: 1748489 - DNA, 15 bp, Homo sapiens
tcttagctttagaaa

SEQ ID NO: 1748490 - DNA, 15 bp, Homo sapiens
cttagctttagaaat

SEQ ID NO: 1748491 - DNA, 15 bp, Homo sapiens
ttagctttagaaatt

SEQ ID NO: 1748492 - DNA, 15 bp, Homo sapiens
tagctttagaaattt

SEQ ID NO: 1748493 - DNA, 15 bp, Homo sapiens
agctttagaaatttg

SEQ ID NO: 1748494 - DNA, 15 bp, Homo sapiens
gctttagaaatttga

SEQ ID NO: 1748495 - DNA, 15 bp, Homo sapiens
ctttagaaatttgaa

SEQ ID NO: 1748496 - DNA, 15 bp, Homo sapiens
tttagaaatttgaag

SEQ ID NO: 1748497 - DNA, 15 bp, Homo sapiens
ttagaaatttgaagg

SEQ ID NO: 1748498 - DNA, 15 bp, Homo sapiens
tagaaatttgaaggt

SEQ ID NO: 1748499 - DNA, 15 bp, Homo sapiens
agaaatttgaaggtg

SEQ ID NO: 1748500 - DNA, 15 bp, Homo sapiens
gaaatttgaaggtga

SEQ ID NO: 1748501 - DNA, 15 bp, Homo sapiens
aaatttgaaggtgaa

SEQ ID NO: 1748502 - DNA, 15 bp, Homo sapiens
aatttgaaggtgaaa

SEQ ID NO: 1748503 - DNA, 15 bp, Homo sapiens
atttgaaggtgaaaa

SEQ ID NO: 1748504 - DNA, 15 bp, Homo sapiens
tttgaaggtgaaaac

SEQ ID NO: 1748505 - DNA, 15 bp, Homo sapiens
ttgaaggtgaaaact

SEQ ID NO: 1748506 - DNA, 15 bp, Homo sapiens
tgaaggtgaaaactt

SEQ ID NO: 1748507 - DNA, 15 bp, Homo sapiens
gaaggtgaaaactta

SEQ ID NO: 1748508 - DNA, 15 bp, Homo sapiens
aaggtgaaaacttaa

SEQ ID NO: 1748509 - DNA, 15 bp, Homo sapiens
aggtgaaaacttaaa

SEQ ID NO: 1748510 - DNA, 15 bp, Homo sapiens
ggtgaaaacttaaag

SEQ ID NO: 1748511 - DNA, 15 bp, Homo sapiens
gtgaaaacttaaagt

SEQ ID NO: 1748512 - DNA, 15 bp, Homo sapiens
tgaaaacttaaagtt

SEQ ID NO: 1748513 - DNA, 15 bp, Homo sapiens
gaaaacttaaagttc

SEQ ID NO: 1748514 - DNA, 15 bp, Homo sapiens
aaaacttaaagttct

SEQ ID NO: 1748515 - DNA, 15 bp, Homo sapiens
aaacttaaagttctc

SEQ ID NO: 1748516 - DNA, 15 bp, Homo sapiens
aacttaaagttctcc

SEQ ID NO: 1748517 - DNA, 15 bp, Homo sapiens
acttaaagttctcca

SEQ ID NO: 1748518 - DNA, 15 bp, Homo sapiens
cttaaagttctccat

SEQ ID NO: 1748519 - DNA, 15 bp, Homo sapiens
ttaaagttctccatt

SEQ ID NO: 1748520 - DNA, 15 bp, Homo sapiens
taaagttctccatta

SEQ ID NO: 1748521 - DNA, 15 bp, Homo sapiens
aaagttctccattat

SEQ ID NO: 1748522 - DNA, 15 bp, Homo sapiens
aagttctccattatt

SEQ ID NO: 1748523 - DNA, 15 bp, Homo sapiens
agttctccattatta

SEQ ID NO: 1748524 - DNA, 15 bp, Homo sapiens
gttctccattattag

SEQ ID NO: 1748525 - DNA, 15 bp, Homo sapiens
ttctccattattagt

SEQ ID NO: 1748526 - DNA, 15 bp, Homo sapiens
tctccattattagta

SEQ ID NO: 1748527 - DNA, 15 bp, Homo sapiens
ctccattattagtag

SEQ ID NO: 1748528 - DNA, 15 bp, Homo sapiens
tccattattagtaga

SEQ ID NO: 1748529 - DNA, 15 bp, Homo sapiens
ccattattagtagag

SEQ ID NO: 1748530 - DNA, 15 bp, Homo sapiens
cattattagtagaga

SEQ ID NO: 1748531 - DNA, 15 bp, Homo sapiens
attattagtagagaa

SEQ ID NO: 1748532 - DNA, 15 bp, Homo sapiens
ttattagtagagaac

SEQ ID NO: 1748533 - DNA, 15 bp, Homo sapiens
tattagtagagaact

SEQ ID NO: 1748534 - DNA, 15 bp, Homo sapiens
attagtagagaactc

SEQ ID NO: 1748535 - DNA, 15 bp, Homo sapiens
ttagtagagaactcc

SEQ ID NO: 1748536 - DNA, 15 bp, Homo sapiens
tagtagagaactccc

SEQ ID NO: 1748537 - DNA, 15 bp, Homo sapiens
agtagagaactccca

SEQ ID NO: 1748538 - DNA, 15 bp, Homo sapiens
gtagagaactcccac

SEQ ID NO: 1748539 - DNA, 15 bp, Homo sapiens
tagagaactcccact

SEQ ID NO: 1748540 - DNA, 15 bp, Homo sapiens
agagaactcccactc

SEQ ID NO: 1748541 - DNA, 15 bp, Homo sapiens
gagaactcccactcc

SEQ ID NO: 1748542 - DNA, 15 bp, Homo sapiens
agaactcccactcct

SEQ ID NO: 1748543 - DNA, 15 bp, Homo sapiens
gaactcccactcctt

SEQ ID NO: 1748544 - DNA, 15 bp, Homo sapiens
aactcccactccttt

SEQ ID NO: 1748545 - DNA, 15 bp, Homo sapiens
actcccactcctttc

SEQ ID NO: 1748546 - DNA, 15 bp, Homo sapiens
ctcccactcctttct

SEQ ID NO: 1748547 - DNA, 15 bp, Homo sapiens
tcccactcctttctc

SEQ ID NO: 1748548 - DNA, 15 bp, Homo sapiens
cccactcctttctct

SEQ ID NO: 1748549 - DNA, 15 bp, Homo sapiens
ccactcctttctctg

SEQ ID NO: 1748550 - DNA, 15 bp, Homo sapiens
cactcctttctctgg

SEQ ID NO: 1748551 - DNA, 15 bp, Homo sapiens
actcctttctctggg

SEQ ID NO: 1748552 - DNA, 15 bp, Homo sapiens
ctcctttctctgggg

SEQ ID NO: 1748553 - DNA, 15 bp, Homo sapiens
tcctttctctggggt

SEQ ID NO: 1748554 - DNA, 15 bp, Homo sapiens
cctttctctggggta

SEQ ID NO: 1748555 - DNA, 15 bp, Homo sapiens
ctttctctggggtag

SEQ ID NO: 1748556 - DNA, 15 bp, Homo sapiens
tttctctggggtagt

SEQ ID NO: 1748557 - DNA, 15 bp, Homo sapiens
ttctctggggtagtg

SEQ ID NO: 1748558 - DNA, 15 bp, Homo sapiens
tctctggggtagtgc

SEQ ID NO: 1748559 - DNA, 15 bp, Homo sapiens
ctctggggtagtgct

SEQ ID NO: 1748560 - DNA, 15 bp, Homo sapiens
tctggggtagtgctg

SEQ ID NO: 1748561 - DNA, 15 bp, Homo sapiens
ctggggtagtgctgg

SEQ ID NO: 1748562 - DNA, 15 bp, Homo sapiens
tggggtagtgctggt

SEQ ID NO: 1748563 - DNA, 15 bp, Homo sapiens
ggggtagtgctggta

SEQ ID NO: 1748564 - DNA, 15 bp, Homo sapiens
gggtagtgctggtat

SEQ ID NO: 1748565 - DNA, 15 bp, Homo sapiens
ggtagtgctggtatc

SEQ ID NO: 1748566 - DNA, 15 bp, Homo sapiens
gtagtgctggtatca

SEQ ID NO: 1748567 - DNA, 15 bp, Homo sapiens
tagtgctggtatcag

SEQ ID NO: 1748568 - DNA, 15 bp, Homo sapiens
agtgctggtatcaga

SEQ ID NO: 1748569 - DNA, 15 bp, Homo sapiens
gtgctggtatcagaa

SEQ ID NO: 1748570 - DNA, 15 bp, Homo sapiens
tgctggtatcagaag

SEQ ID NO: 1748571 - DNA, 15 bp, Homo sapiens
gctggtatcagaagt

SEQ ID NO: 1748572 - DNA, 15 bp, Homo sapiens
ctggtatcagaagta

SEQ ID NO: 1748573 - DNA, 15 bp, Homo sapiens
tggtatcagaagtaa

SEQ ID NO: 1748574 - DNA, 15 bp, Homo sapiens
ggtatcagaagtaaa

SEQ ID NO: 1748575 - DNA, 15 bp, Homo sapiens
gtatcagaagtaaat

SEQ ID NO: 1748576 - DNA, 15 bp, Homo sapiens
tatcagaagtaaatt

SEQ ID NO: 1748577 - DNA, 15 bp, Homo sapiens
atcagaagtaaattg

SEQ ID NO: 1748578 - DNA, 15 bp, Homo sapiens
tcagaagtaaattgc

SEQ ID NO: 1748579 - DNA, 15 bp, Homo sapiens
cagaagtaaattgct

SEQ ID NO: 1748580 - DNA, 15 bp, Homo sapiens
agaagtaaattgctt

SEQ ID NO: 1748581 - DNA, 15 bp, Homo sapiens
gaagtaaattgcttt

SEQ ID NO: 1748582 - DNA, 15 bp, Homo sapiens
aagtaaattgctttg

SEQ ID NO: 1748583 - DNA, 15 bp, Homo sapiens
agtaaattgctttgt

SEQ ID NO: 1748584 - DNA, 15 bp, Homo sapiens
gtaaattgctttgtg

SEQ ID NO: 1748585 - DNA, 15 bp, Homo sapiens
taaattgctttgtga

SEQ ID NO: 1748586 - DNA, 15 bp, Homo sapiens
aaattgctttgtgaa

SEQ ID NO: 1748587 - DNA, 15 bp, Homo sapiens
aattgctttgtgaag

SEQ ID NO: 1748588 - DNA, 15 bp, Homo sapiens
attgctttgtgaagt

SEQ ID NO: 1748589 - DNA, 15 bp, Homo sapiens
ttgctttgtgaagtt

SEQ ID NO: 1748590 - DNA, 15 bp, Homo sapiens
tgctttgtgaagttg

SEQ ID NO: 1748591 - DNA, 15 bp, Homo sapiens
gctttgtgaagttgt

SEQ ID NO: 1748592 - DNA, 15 bp, Homo sapiens
ctttgtgaagttgta

SEQ ID NO: 1748593 - DNA, 15 bp, Homo sapiens
tttgtgaagttgtag

SEQ ID NO: 1748594 - DNA, 15 bp, Homo sapiens
ttgtgaagttgtaga

SEQ ID NO: 1748595 - DNA, 15 bp, Homo sapiens
tgtgaagttgtagat

SEQ ID NO: 1748596 - DNA, 15 bp, Homo sapiens
gtgaagttgtagatc

SEQ ID NO: 1748597 - DNA, 15 bp, Homo sapiens
tgaagttgtagatct

SEQ ID NO: 1748598 - DNA, 15 bp, Homo sapiens
gaagttgtagatctc

SEQ ID NO: 1748599 - DNA, 15 bp, Homo sapiens
aagttgtagatctca

SEQ ID NO: 1748600 - DNA, 15 bp, Homo sapiens
agttgtagatctcag

SEQ ID NO: 1748601 - DNA, 15 bp, Homo sapiens
gttgtagatctcagg

SEQ ID NO: 1748602 - DNA, 15 bp, Homo sapiens
ttgtagatctcagga

SEQ ID NO: 1748603 - DNA, 15 bp, Homo sapiens
tgtagatctcaggat

SEQ ID NO: 1748604 - DNA, 15 bp, Homo sapiens
gtagatctcaggatc

SEQ ID NO: 1748605 - DNA, 15 bp, Homo sapiens
tagatctcaggatct

SEQ ID NO: 1748606 - DNA, 15 bp, Homo sapiens
agatctcaggatctt

SEQ ID NO: 1748607 - DNA, 15 bp, Homo sapiens
gatctcaggatcttt

SEQ ID NO: 1748608 - DNA, 15 bp, Homo sapiens
atctcaggatcttta

SEQ ID NO: 1748609 - DNA, 15 bp, Homo sapiens
tctcaggatctttag

SEQ ID NO: 1748610 - DNA, 15 bp, Homo sapiens
ctcaggatctttagc

SEQ ID NO: 1748611 - DNA, 15 bp, Homo sapiens
tcaggatctttagcc

SEQ ID NO: 1748612 - DNA, 15 bp, Homo sapiens
caggatctttagccc

SEQ ID NO: 1748613 - DNA, 15 bp, Homo sapiens
aggatctttagccct

SEQ ID NO: 1748614 - DNA, 15 bp, Homo sapiens
ggatctttagccctt

SEQ ID NO: 1748615 - DNA, 15 bp, Homo sapiens
gatctttagcccttc

SEQ ID NO: 1748616 - DNA, 15 bp, Homo sapiens
atctttagcccttcc

SEQ ID NO: 1748617 - DNA, 15 bp, Homo sapiens
tctttagcccttcct

SEQ ID NO: 1748618 - DNA, 15 bp, Homo sapiens
ctttagcccttccta

SEQ ID NO: 1748619 - DNA, 15 bp, Homo sapiens
tttagcccttcctaa

SEQ ID NO: 1748620 - DNA, 15 bp, Homo sapiens
ttagcccttcctaaa

SEQ ID NO: 1748621 - DNA, 15 bp, Homo sapiens
tagcccttcctaaaa

SEQ ID NO: 1748622 - DNA, 15 bp, Homo sapiens
agcccttcctaaaag

SEQ ID NO: 1748623 - DNA, 15 bp, Homo sapiens
gcccttcctaaaagt

SEQ ID NO: 1748624 - DNA, 15 bp, Homo sapiens
cccttcctaaaagtt

SEQ ID NO: 1748625 - DNA, 15 bp, Homo sapiens
ccttcctaaaagttg

SEQ ID NO: 1748626 - DNA, 15 bp, Homo sapiens
cttcctaaaagttgt

SEQ ID NO: 1748627 - DNA, 15 bp, Homo sapiens
ttcctaaaagttgtc

SEQ ID NO: 1748628 - DNA, 15 bp, Homo sapiens
tcctaaaagttgtca

SEQ ID NO: 1748629 - DNA, 15 bp, Homo sapiens
cctaaaagttgtcat

SEQ ID NO: 1748630 - DNA, 15 bp, Homo sapiens
ctaaaagttgtcata

SEQ ID NO: 1748631 - DNA, 15 bp, Homo sapiens
taaaagttgtcataa

SEQ ID NO: 1748632 - DNA, 15 bp, Homo sapiens
aaaagttgtcataat

SEQ ID NO: 1748633 - DNA, 15 bp, Homo sapiens
aaagttgtcataatc

SEQ ID NO: 1748634 - DNA, 15 bp, Homo sapiens
aagttgtcataatca

SEQ ID NO: 1748635 - DNA, 15 bp, Homo sapiens
agttgtcataatcaa

SEQ ID NO: 1748636 - DNA, 15 bp, Homo sapiens
gttgtcataatcaat

SEQ ID NO: 1748637 - DNA, 15 bp, Homo sapiens
ttgtcataatcaata

SEQ ID NO: 1748638 - DNA, 15 bp, Homo sapiens
tgtcataatcaatat

SEQ ID NO: 1748639 - DNA, 15 bp, Homo sapiens
gtcataatcaatatc

SEQ ID NO: 1748640 - DNA, 15 bp, Homo sapiens
tcataatcaatatcc

SEQ ID NO: 1748641 - DNA, 15 bp, Homo sapiens
cataatcaatatcca

SEQ ID NO: 1748642 - DNA, 15 bp, Homo sapiens
ataatcaatatccat

SEQ ID NO: 1748643 - DNA, 15 bp, Homo sapiens
taatcaatatccatc

SEQ ID NO: 1748644 - DNA, 15 bp, Homo sapiens
aatcaatatccatct

SEQ ID NO: 1748645 - DNA, 15 bp, Homo sapiens
atcaatatccatctt

SEQ ID NO: 1748646 - DNA, 15 bp, Homo sapiens
tcaatatccatcttt

SEQ ID NO: 1748647 - DNA, 15 bp, Homo sapiens
caatatccatcttta

SEQ ID NO: 1748648 - DNA, 15 bp, Homo sapiens
aatatccatctttaa

SEQ ID NO: 1748649 - DNA, 15 bp, Homo sapiens
atatccatctttaaa

SEQ ID NO: 1748650 - DNA, 15 bp, Homo sapiens
tatccatctttaaag

SEQ ID NO: 1748651 - DNA, 15 bp, Homo sapiens
atccatctttaaaga

SEQ ID NO: 1748652 - DNA, 15 bp, Homo sapiens
tccatctttaaagag

SEQ ID NO: 1748653 - DNA, 15 bp, Homo sapiens
ccatctttaaagagc

SEQ ID NO: 1748654 - DNA, 15 bp, Homo sapiens
catctttaaagagca

SEQ ID NO: 1748655 - DNA, 15 bp, Homo sapiens
atctttaaagagcat

SEQ ID NO: 1748656 - DNA, 15 bp, Homo sapiens
tctttaaagagcata

SEQ ID NO: 1748657 - DNA, 15 bp, Homo sapiens
ctttaaagagcatat

SEQ ID NO: 1748658 - DNA, 15 bp, Homo sapiens
tttaaagagcatata

SEQ ID NO: 1748659 - DNA, 15 bp, Homo sapiens
ttaaagagcatataa

SEQ ID NO: 1748660 - DNA, 15 bp, Homo sapiens
taaagagcatataat

SEQ ID NO: 1748661 - DNA, 15 bp, Homo sapiens
aaagagcatataatt

SEQ ID NO: 1748662 - DNA, 15 bp, Homo sapiens
aagagcatataatta

SEQ ID NO: 1748663 - DNA, 15 bp, Homo sapiens
agagcatataattag

SEQ ID NO: 1748664 - DNA, 15 bp, Homo sapiens
gagcatataattaga

SEQ ID NO: 1748665 - DNA, 15 bp, Homo sapiens
agcatataattagaa

SEQ ID NO: 1748666 - DNA, 15 bp, Homo sapiens
gcatataattagaaa

SEQ ID NO: 1748667 - DNA, 15 bp, Homo sapiens
catataattagaaaa

SEQ ID NO: 1748668 - DNA, 15 bp, Homo sapiens
atataattagaaaat

SEQ ID NO: 1748669 - DNA, 15 bp, Homo sapiens
tataattagaaaata

SEQ ID NO: 1748670 - DNA, 15 bp, Homo sapiens
ataattagaaaatag

SEQ ID NO: 1748671 - DNA, 15 bp, Homo sapiens
taattagaaaataga

SEQ ID NO: 1748672 - DNA, 15 bp, Homo sapiens
aattagaaaatagaa

SEQ ID NO: 1748673 - DNA, 15 bp, Homo sapiens
attagaaaatagaac

SEQ ID NO: 1748674 - DNA, 15 bp, Homo sapiens
ttagaaaatagaact

SEQ ID NO: 1748675 - DNA, 15 bp, Homo sapiens
tagaaaatagaactt

SEQ ID NO: 1748676 - DNA, 15 bp, Homo sapiens
agaaaatagaacttt

SEQ ID NO: 1748677 - DNA, 15 bp, Homo sapiens
gaaaatagaacttta

SEQ ID NO: 1748678 - DNA, 15 bp, Homo sapiens
aaaatagaactttag

SEQ ID NO: 1748679 - DNA, 15 bp, Homo sapiens
aaatagaactttagt

SEQ ID NO: 1748680 - DNA, 15 bp, Homo sapiens
aatagaactttagtt

SEQ ID NO: 1748681 - DNA, 15 bp, Homo sapiens
atagaactttagttt

SEQ ID NO: 1748682 - DNA, 15 bp, Homo sapiens
tagaactttagttta

SEQ ID NO: 1748683 - DNA, 15 bp, Homo sapiens
agaactttagtttaa

SEQ ID NO: 1748684 - DNA, 15 bp, Homo sapiens
gaactttagtttaag

SEQ ID NO: 1748685 - DNA, 15 bp, Homo sapiens
aactttagtttaagg

SEQ ID NO: 1748686 - DNA, 15 bp, Homo sapiens
actttagtttaaggt

SEQ ID NO: 1748687 - DNA, 15 bp, Homo sapiens
ctttagtttaaggtg

SEQ ID NO: 1748688 - DNA, 15 bp, Homo sapiens
tttagtttaaggtga

SEQ ID NO: 1748689 - DNA, 15 bp, Homo sapiens
ttagtttaaggtgac

SEQ ID NO: 1748690 - DNA, 15 bp, Homo sapiens
tagtttaaggtgact

SEQ ID NO: 1748691 - DNA, 15 bp, Homo sapiens
agtttaaggtgactt

SEQ ID NO: 1748692 - DNA, 15 bp, Homo sapiens
gtttaaggtgacttt

SEQ ID NO: 1748693 - DNA, 15 bp, Homo sapiens
tttaaggtgactttt

SEQ ID NO: 1748694 - DNA, 15 bp, Homo sapiens
ttaaggtgacttttt

SEQ ID NO: 1748695 - DNA, 15 bp, Homo sapiens
taaggtgactttttt

SEQ ID NO: 1748696 - DNA, 15 bp, Homo sapiens
aaggtgacttttttt

SEQ ID NO: 1748697 - DNA, 15 bp, Homo sapiens
aggtgactttttttt

SEQ ID NO: 1748698 - DNA, 15 bp, Homo sapiens
ggtgacttttttttc

SEQ ID NO: 1748699 - DNA, 15 bp, Homo sapiens
gtgacttttttttcc

SEQ ID NO: 1748700 - DNA, 15 bp, Homo sapiens
tgacttttttttcca

SEQ ID NO: 1748701 - DNA, 15 bp, Homo sapiens
gacttttttttccag

SEQ ID NO: 1748702 - DNA, 15 bp, Homo sapiens
acttttttttccaga

SEQ ID NO: 1748703 - DNA, 15 bp, Homo sapiens
cttttttttccagag

SEQ ID NO: 1748704 - DNA, 15 bp, Homo sapiens
ttttttttccagagt

SEQ ID NO: 1748705 - DNA, 15 bp, Homo sapiens
tttttttccagagtg

SEQ ID NO: 1748706 - DNA, 15 bp, Homo sapiens
ttttttccagagtgc

SEQ ID NO: 1748707 - DNA, 15 bp, Homo sapiens
tttttccagagtgct

SEQ ID NO: 1748708 - DNA, 15 bp, Homo sapiens
ttttccagagtgctg

SEQ ID NO: 1748709 - DNA, 15 bp, Homo sapiens
tttccagagtgctgt

SEQ ID NO: 1748710 - DNA, 15 bp, Homo sapiens
ttccagagtgctgtc

SEQ ID NO: 1748711 - DNA, 15 bp, Homo sapiens
tccagagtgctgtca

SEQ ID NO: 1748712 - DNA, 15 bp, Homo sapiens
ccagagtgctgtcaa

SEQ ID NO: 1748713 - DNA, 15 bp, Homo sapiens
cagagtgctgtcaat

SEQ ID NO: 1748714 - DNA, 15 bp, Homo sapiens
agagtgctgtcaata

SEQ ID NO: 1748715 - DNA, 15 bp, Homo sapiens
gagtgctgtcaatag

SEQ ID NO: 1748716 - DNA, 15 bp, Homo sapiens
agtgctgtcaatagt

SEQ ID NO: 1748717 - DNA, 15 bp, Homo sapiens
gtgctgtcaatagtt

SEQ ID NO: 1748718 - DNA, 15 bp, Homo sapiens
tgctgtcaatagtta

SEQ ID NO: 1748719 - DNA, 15 bp, Homo sapiens
gctgtcaatagttat

SEQ ID NO: 1748720 - DNA, 15 bp, Homo sapiens
ctgtcaatagttatt

SEQ ID NO: 1748721 - DNA, 15 bp, Homo sapiens
tgtcaatagttattt

SEQ ID NO: 1748722 - DNA, 15 bp, Homo sapiens
gtcaatagttatttt

SEQ ID NO: 1748723 - DNA, 15 bp, Homo sapiens
tcaatagttatttta

SEQ ID NO: 1748724 - DNA, 15 bp, Homo sapiens
caatagttattttaa

SEQ ID NO: 1748725 - DNA, 15 bp, Homo sapiens
aatagttattttaac

SEQ ID NO: 1748726 - DNA, 15 bp, Homo sapiens
atagttattttaact

SEQ ID NO: 1748727 - DNA, 15 bp, Homo sapiens
tagttattttaactt

SEQ ID NO: 1748728 - DNA, 15 bp, Homo sapiens
agttattttaacttt

SEQ ID NO: 1748729 - DNA, 15 bp, Homo sapiens
gttattttaactttt

SEQ ID NO: 1748730 - DNA, 15 bp, Homo sapiens
ttattttaactttta

SEQ ID NO: 1748731 - DNA, 15 bp, Homo sapiens
tattttaacttttat

SEQ ID NO: 1748732 - DNA, 15 bp, Homo sapiens
attttaacttttatt

SEQ ID NO: 1748733 - DNA, 15 bp, Homo sapiens
ttttaacttttattt

SEQ ID NO: 1748734 - DNA, 15 bp, Homo sapiens
tttaacttttatttt

SEQ ID NO: 1748735 - DNA, 15 bp, Homo sapiens
ttaacttttatttta

SEQ ID NO: 1748736 - DNA, 15 bp, Homo sapiens
taacttttattttag

SEQ ID NO: 1748737 - DNA, 15 bp, Homo sapiens
aacttttattttagg

SEQ ID NO: 1748738 - DNA, 15 bp, Homo sapiens
acttttattttaggt

SEQ ID NO: 1748739 - DNA, 15 bp, Homo sapiens
cttttattttaggtt

SEQ ID NO: 1748740 - DNA, 15 bp, Homo sapiens
ttttattttaggttc

SEQ ID NO: 1748741 - DNA, 15 bp, Homo sapiens
tttattttaggttca

SEQ ID NO: 1748742 - DNA, 15 bp, Homo sapiens
ttattttaggttcag

SEQ ID NO: 1748743 - DNA, 15 bp, Homo sapiens
tattttaggttcagg

SEQ ID NO: 1748744 - DNA, 15 bp, Homo sapiens
attttaggttcaggg

SEQ ID NO: 1748745 - DNA, 15 bp, Homo sapiens
ttttaggttcagggg

SEQ ID NO: 1748746 - DNA, 15 bp, Homo sapiens
tttaggttcaggggt

SEQ ID NO: 1748747 - DNA, 15 bp, Homo sapiens
ttaggttcaggggta

SEQ ID NO: 1748748 - DNA, 15 bp, Homo sapiens
taggttcaggggtac

SEQ ID NO: 1748749 - DNA, 15 bp, Homo sapiens
aggttcaggggtaca

SEQ ID NO: 1748750 - DNA, 15 bp, Homo sapiens
ggttcaggggtacat

SEQ ID NO: 1748751 - DNA, 15 bp, Homo sapiens
gttcaggggtacata

SEQ ID NO: 1748752 - DNA, 15 bp, Homo sapiens
ttcaggggtacatat

SEQ ID NO: 1748753 - DNA, 15 bp, Homo sapiens
tcaggggtacatatg

SEQ ID NO: 1748754 - DNA, 15 bp, Homo sapiens
caggggtacatatgc

SEQ ID NO: 1748755 - DNA, 15 bp, Homo sapiens
aggggtacatatgca

SEQ ID NO: 1748756 - DNA, 15 bp, Homo sapiens
ggggtacatatgcat

SEQ ID NO: 1748757 - DNA, 15 bp, Homo sapiens
gggtacatatgcatg

SEQ ID NO: 1748758 - DNA, 15 bp, Homo sapiens
ggtacatatgcatgt

SEQ ID NO: 1748759 - DNA, 15 bp, Homo sapiens
gtacatatgcatgtt

SEQ ID NO: 1748760 - DNA, 15 bp, Homo sapiens
tacatatgcatgttc

SEQ ID NO: 1748761 - DNA, 15 bp, Homo sapiens
acatatgcatgttcg

SEQ ID NO: 1748762 - DNA, 15 bp, Homo sapiens
catatgcatgttcgt

SEQ ID NO: 1748763 - DNA, 15 bp, Homo sapiens
atatgcatgttcgtt

SEQ ID NO: 1748764 - DNA, 15 bp, Homo sapiens
tatgcatgttcgtta

SEQ ID NO: 1748765 - DNA, 15 bp, Homo sapiens
atgcatgttcgttaa

SEQ ID NO: 1748766 - DNA, 15 bp, Homo sapiens
tgcatgttcgttaat

SEQ ID NO: 1748767 - DNA, 15 bp, Homo sapiens
gcatgttcgttaata

SEQ ID NO: 1748768 - DNA, 15 bp, Homo sapiens
catgttcgttaatac

SEQ ID NO: 1748769 - DNA, 15 bp, Homo sapiens
atgttcgttaataca

SEQ ID NO: 1748770 - DNA, 15 bp, Homo sapiens
tgttcgttaatacag

SEQ ID NO: 1748771 - DNA, 15 bp, Homo sapiens
gttcgttaatacagg

SEQ ID NO: 1748772 - DNA, 15 bp, Homo sapiens
ttcgttaatacaggc

SEQ ID NO: 1748773 - DNA, 15 bp, Homo sapiens
tcgttaatacaggca

SEQ ID NO: 1748774 - DNA, 15 bp, Homo sapiens
cgttaatacaggcaa

SEQ ID NO: 1748775 - DNA, 15 bp, Homo sapiens
gttaatacaggcaaa

SEQ ID NO: 1748776 - DNA, 15 bp, Homo sapiens
ttaatacaggcaaac

SEQ ID NO: 1748777 - DNA, 15 bp, Homo sapiens
taatacaggcaaact

SEQ ID NO: 1748778 - DNA, 15 bp, Homo sapiens
aatacaggcaaactc

SEQ ID NO: 1748779 - DNA, 15 bp, Homo sapiens
atacaggcaaactca

SEQ ID NO: 1748780 - DNA, 15 bp, Homo sapiens
tacaggcaaactcat

SEQ ID NO: 1748781 - DNA, 15 bp, Homo sapiens
acaggcaaactcatg

SEQ ID NO: 1748782 - DNA, 15 bp, Homo sapiens
caggcaaactcatgt

SEQ ID NO: 1748783 - DNA, 15 bp, Homo sapiens
aggcaaactcatgtc

SEQ ID NO: 1748784 - DNA, 15 bp, Homo sapiens
ggcaaactcatgtca

SEQ ID NO: 1748785 - DNA, 15 bp, Homo sapiens
gcaaactcatgtcat

SEQ ID NO: 1748786 - DNA, 15 bp, Homo sapiens
caaactcatgtcatg

SEQ ID NO: 1748787 - DNA, 15 bp, Homo sapiens
aaactcatgtcatgg

SEQ ID NO: 1748788 - DNA, 15 bp, Homo sapiens
aactcatgtcatggg

SEQ ID NO: 1748789 - DNA, 15 bp, Homo sapiens
actcatgtcatgggg

SEQ ID NO: 1748790 - DNA, 15 bp, Homo sapiens
ctcatgtcatggggg

SEQ ID NO: 1748791 - DNA, 15 bp, Homo sapiens
tcatgtcatgggggt

SEQ ID NO: 1748792 - DNA, 15 bp, Homo sapiens
catgtcatgggggtt

SEQ ID NO: 1748793 - DNA, 15 bp, Homo sapiens
atgtcatgggggttt

SEQ ID NO: 1748794 - DNA, 15 bp, Homo sapiens
tgtcatgggggtttg

SEQ ID NO: 1748795 - DNA, 15 bp, Homo sapiens
gtcatgggggtttgg

SEQ ID NO: 1748796 - DNA, 15 bp, Homo sapiens
tcatgggggtttggt

SEQ ID NO: 1748797 - DNA, 15 bp, Homo sapiens
catgggggtttggtg

SEQ ID NO: 1748798 - DNA, 15 bp, Homo sapiens
atgggggtttggtgt

SEQ ID NO: 1748799 - DNA, 15 bp, Homo sapiens
tgggggtttggtgta

SEQ ID NO: 1748800 - DNA, 15 bp, Homo sapiens
gggggtttggtgtac

SEQ ID NO: 1748801 - DNA, 15 bp, Homo sapiens
ggggtttggtgtaca

SEQ ID NO: 1748802 - DNA, 15 bp, Homo sapiens
gggtttggtgtacag

SEQ ID NO: 1748803 - DNA, 15 bp, Homo sapiens
ggtttggtgtacaga

SEQ ID NO: 1748804 - DNA, 15 bp, Homo sapiens
gtttggtgtacagac

SEQ ID NO: 1748805 - DNA, 15 bp, Homo sapiens
tttggtgtacagacc

SEQ ID NO: 1748806 - DNA, 15 bp, Homo sapiens
ttggtgtacagacca

SEQ ID NO: 1748807 - DNA, 15 bp, Homo sapiens
tggtgtacagaccat

SEQ ID NO: 1748808 - DNA, 15 bp, Homo sapiens
ggtgtacagaccatg

SEQ ID NO: 1748809 - DNA, 15 bp, Homo sapiens
gtgtacagaccatgt

SEQ ID NO: 1748810 - DNA, 15 bp, Homo sapiens
tgtacagaccatgtc

SEQ ID NO: 1748811 - DNA, 15 bp, Homo sapiens
gtacagaccatgtca

SEQ ID NO: 1748812 - DNA, 15 bp, Homo sapiens
tacagaccatgtcat

SEQ ID NO: 1748813 - DNA, 15 bp, Homo sapiens
acagaccatgtcatc

SEQ ID NO: 1748814 - DNA, 15 bp, Homo sapiens
cagaccatgtcatca

SEQ ID NO: 1748815 - DNA, 15 bp, Homo sapiens
agaccatgtcatcac

SEQ ID NO: 1748816 - DNA, 15 bp, Homo sapiens
gaccatgtcatcacc

SEQ ID NO: 1748817 - DNA, 15 bp, Homo sapiens
accatgtcatcaccc

SEQ ID NO: 1748818 - DNA, 15 bp, Homo sapiens
ccatgtcatcaccca

SEQ ID NO: 1748819 - DNA, 15 bp, Homo sapiens
catgtcatcacccag

SEQ ID NO: 1748820 - DNA, 15 bp, Homo sapiens
atgtcatcacccaga

SEQ ID NO: 1748821 - DNA, 15 bp, Homo sapiens
tgtcatcacccagat

SEQ ID NO: 1748822 - DNA, 15 bp, Homo sapiens
gtcatcacccagata

SEQ ID NO: 1748823 - DNA, 15 bp, Homo sapiens
tcatcacccagatac

SEQ ID NO: 1748824 - DNA, 15 bp, Homo sapiens
catcacccagatact

SEQ ID NO: 1748825 - DNA, 15 bp, Homo sapiens
atcacccagatacta

SEQ ID NO: 1748826 - DNA, 15 bp, Homo sapiens
tcacccagatactaa

SEQ ID NO: 1748827 - DNA, 15 bp, Homo sapiens
cacccagatactaag

SEQ ID NO: 1748828 - DNA, 15 bp, Homo sapiens
acccagatactaagc

SEQ ID NO: 1748829 - DNA, 15 bp, Homo sapiens
cccagatactaagca

SEQ ID NO: 1748830 - DNA, 15 bp, Homo sapiens
ccagatactaagcat

SEQ ID NO: 1748831 - DNA, 15 bp, Homo sapiens
cagatactaagcata

SEQ ID NO: 1748832 - DNA, 15 bp, Homo sapiens
agatactaagcataa

SEQ ID NO: 1748833 - DNA, 15 bp, Homo sapiens
gatactaagcataat

SEQ ID NO: 1748834 - DNA, 15 bp, Homo sapiens
atactaagcataata

SEQ ID NO: 1748835 - DNA, 15 bp, Homo sapiens
tactaagcataataa

SEQ ID NO: 1748836 - DNA, 15 bp, Homo sapiens
actaagcataataac

SEQ ID NO: 1748837 - DNA, 15 bp, Homo sapiens
ctaagcataataact

SEQ ID NO: 1748838 - DNA, 15 bp, Homo sapiens
taagcataataactg

SEQ ID NO: 1748839 - DNA, 15 bp, Homo sapiens
aagcataataactga

SEQ ID NO: 1748840 - DNA, 15 bp, Homo sapiens
agcataataactgat

SEQ ID NO: 1748841 - DNA, 15 bp, Homo sapiens
gcataataactgata

SEQ ID NO: 1748842 - DNA, 15 bp, Homo sapiens
cataataactgatag

SEQ ID NO: 1748843 - DNA, 15 bp, Homo sapiens
ataataactgatagc

SEQ ID NO: 1748844 - DNA, 15 bp, Homo sapiens
taataactgatagca

SEQ ID NO: 1748845 - DNA, 15 bp, Homo sapiens
aataactgatagcat

SEQ ID NO: 1748846 - DNA, 15 bp, Homo sapiens
ataactgatagcata

SEQ ID NO: 1748847 - DNA, 15 bp, Homo sapiens
taactgatagcatag

SEQ ID NO: 1748848 - DNA, 15 bp, Homo sapiens
aactgatagcatagt

SEQ ID NO: 1748849 - DNA, 15 bp, Homo sapiens
actgatagcatagtt

SEQ ID NO: 1748850 - DNA, 15 bp, Homo sapiens
ctgatagcatagtta

SEQ ID NO: 1748851 - DNA, 15 bp, Homo sapiens
tgatagcatagttat

SEQ ID NO: 1748852 - DNA, 15 bp, Homo sapiens
gatagcatagttatt

SEQ ID NO: 1748853 - DNA, 15 bp, Homo sapiens
atagcatagttattt

SEQ ID NO: 1748854 - DNA, 15 bp, Homo sapiens
tagcatagttatttt

SEQ ID NO: 1748855 - DNA, 15 bp, Homo sapiens
agcatagttatttta

SEQ ID NO: 1748856 - DNA, 15 bp, Homo sapiens
gcatagttattttaa

SEQ ID NO: 1748857 - DNA, 15 bp, Homo sapiens
catagttattttaat

SEQ ID NO: 1748858 - DNA, 15 bp, Homo sapiens
atagttattttaatt

SEQ ID NO: 1748859 - DNA, 15 bp, Homo sapiens
tagttattttaattg

SEQ ID NO: 1748860 - DNA, 15 bp, Homo sapiens
agttattttaattgt

SEQ ID NO: 1748861 - DNA, 15 bp, Homo sapiens
gttattttaattgta

SEQ ID NO: 1748862 - DNA, 15 bp, Homo sapiens
ttattttaattgtaa

SEQ ID NO: 1748863 - DNA, 15 bp, Homo sapiens
tattttaattgtaaa

SEQ ID NO: 1748864 - DNA, 15 bp, Homo sapiens
attttaattgtaaat

SEQ ID NO: 1748865 - DNA, 15 bp, Homo sapiens
ttttaattgtaaata

SEQ ID NO: 1748866 - DNA, 15 bp, Homo sapiens
tttaattgtaaataa

SEQ ID NO: 1748867 - DNA, 15 bp, Homo sapiens
ttaattgtaaataaa

SEQ ID NO: 1748868 - DNA, 15 bp, Homo sapiens
taattgtaaataaaa

SEQ ID NO: 1748869 - DNA, 15 bp, Homo sapiens
aattgtaaataaaaa

SEQ ID NO: 1748870 - DNA, 15 bp, Homo sapiens
attgtaaataaaaag

SEQ ID NO: 1748871 - DNA, 15 bp, Homo sapiens
ttgtaaataaaaagc

SEQ ID NO: 1748872 - DNA, 15 bp, Homo sapiens
tgtaaataaaaagct

SEQ ID NO: 1748873 - DNA, 15 bp, Homo sapiens
gtaaataaaaagcta

SEQ ID NO: 1748874 - DNA, 15 bp, Homo sapiens
taaataaaaagctat

SEQ ID NO: 1748875 - DNA, 15 bp, Homo sapiens
aaataaaaagctatt

SEQ ID NO: 1748876 - DNA, 15 bp, Homo sapiens
aataaaaagctattt

SEQ ID NO: 1748877 - DNA, 15 bp, Homo sapiens
ataaaaagctatttc

SEQ ID NO: 1748878 - DNA, 15 bp, Homo sapiens
taaaaagctatttct

SEQ ID NO: 1748879 - DNA, 15 bp, Homo sapiens
aaaaagctatttcta

SEQ ID NO: 1748880 - DNA, 15 bp, Homo sapiens
aaaagctatttctag

SEQ ID NO: 1748881 - DNA, 15 bp, Homo sapiens
aaagctatttctagt

SEQ ID NO: 1748882 - DNA, 15 bp, Homo sapiens
aagctatttctagta

SEQ ID NO: 1748883 - DNA, 15 bp, Homo sapiens
agctatttctagtaa

SEQ ID NO: 1748884 - DNA, 15 bp, Homo sapiens
gctatttctagtaaa

SEQ ID NO: 1748885 - DNA, 15 bp, Homo sapiens
ctatttctagtaaaa

SEQ ID NO: 1748886 - DNA, 15 bp, Homo sapiens
tatttctagtaaaag

SEQ ID NO: 1748887 - DNA, 15 bp, Homo sapiens
atttctagtaaaagc

SEQ ID NO: 1748888 - DNA, 15 bp, Homo sapiens
tttctagtaaaagct

SEQ ID NO: 1748889 - DNA, 15 bp, Homo sapiens
ttctagtaaaagctt

SEQ ID NO: 1748890 - DNA, 15 bp, Homo sapiens
tctagtaaaagctta

SEQ ID NO: 1748891 - DNA, 15 bp, Homo sapiens
ctagtaaaagcttat

SEQ ID NO: 1748892 - DNA, 15 bp, Homo sapiens
tagtaaaagcttatt

SEQ ID NO: 1748893 - DNA, 15 bp, Homo sapiens
agtaaaagcttattt

SEQ ID NO: 1748894 - DNA, 15 bp, Homo sapiens
gtaaaagcttatttt

SEQ ID NO: 1748895 - DNA, 15 bp, Homo sapiens
taaaagcttattttc

SEQ ID NO: 1748896 - DNA, 15 bp, Homo sapiens
aaaagcttattttcc

SEQ ID NO: 1748897 - DNA, 15 bp, Homo sapiens
aaagcttattttccc

SEQ ID NO: 1748898 - DNA, 15 bp, Homo sapiens
aagcttattttccct

SEQ ID NO: 1748899 - DNA, 15 bp, Homo sapiens
agcttattttcccta

SEQ ID NO: 1748900 - DNA, 15 bp, Homo sapiens
gcttattttccctaa

SEQ ID NO: 1748901 - DNA, 15 bp, Homo sapiens
cttattttccctaat

SEQ ID NO: 1748902 - DNA, 15 bp, Homo sapiens
ttattttccctaata

SEQ ID NO: 1748903 - DNA, 15 bp, Homo sapiens
tattttccctaataa

SEQ ID NO: 1748904 - DNA, 15 bp, Homo sapiens
attttccctaataaa

SEQ ID NO: 1748905 - DNA, 15 bp, Homo sapiens
ttttccctaataaaa

SEQ ID NO: 1748906 - DNA, 15 bp, Homo sapiens
tttccctaataaaaa

SEQ ID NO: 1748907 - DNA, 15 bp, Homo sapiens
ttccctaataaaaat

SEQ ID NO: 1748908 - DNA, 15 bp, Homo sapiens
tccctaataaaaatt

SEQ ID NO: 1748909 - DNA, 15 bp, Homo sapiens
ccctaataaaaatta

SEQ ID NO: 1748910 - DNA, 15 bp, Homo sapiens
cctaataaaaattat

SEQ ID NO: 1748911 - DNA, 15 bp, Homo sapiens
ctaataaaaattatt

SEQ ID NO: 1748912 - DNA, 15 bp, Homo sapiens
taataaaaattattt

SEQ ID NO: 1748913 - DNA, 15 bp, Homo sapiens
aataaaaattattta

SEQ ID NO: 1748914 - DNA, 15 bp, Homo sapiens
ataaaaattatttac

SEQ ID NO: 1748915 - DNA, 15 bp, Homo sapiens
taaaaattatttaca

SEQ ID NO: 1748916 - DNA, 15 bp, Homo sapiens
aaaaattatttacag

SEQ ID NO: 1748917 - DNA, 15 bp, Homo sapiens
aaaattatttacagt

SEQ ID NO: 1748918 - DNA, 15 bp, Homo sapiens
aaattatttacagtg

SEQ ID NO: 1748919 - DNA, 15 bp, Homo sapiens
aattatttacagtga

SEQ ID NO: 1748920 - DNA, 15 bp, Homo sapiens
attatttacagtgat

SEQ ID NO: 1748921 - DNA, 15 bp, Homo sapiens
ttatttacagtgatg

SEQ ID NO: 1748922 - DNA, 15 bp, Homo sapiens
tatttacagtgatga

SEQ ID NO: 1748923 - DNA, 15 bp, Homo sapiens
atttacagtgatgat

SEQ ID NO: 1748924 - DNA, 15 bp, Homo sapiens
tttacagtgatgatg

SEQ ID NO: 1748925 - DNA, 15 bp, Homo sapiens
ttacagtgatgatga

SEQ ID NO: 1748926 - DNA, 15 bp, Homo sapiens
tacagtgatgatgat

SEQ ID NO: 1748927 - DNA, 15 bp, Homo sapiens
acagtgatgatgatt

SEQ ID NO: 1748928 - DNA, 15 bp, Homo sapiens
cagtgatgatgatta

SEQ ID NO: 1748929 - DNA, 15 bp, Homo sapiens
agtgatgatgattat

SEQ ID NO: 1748930 - DNA, 15 bp, Homo sapiens
gtgatgatgattatc

SEQ ID NO: 1748931 - DNA, 15 bp, Homo sapiens
tgatgatgattatca

SEQ ID NO: 1748932 - DNA, 15 bp, Homo sapiens
gatgatgattatcat

SEQ ID NO: 1748933 - DNA, 15 bp, Homo sapiens
atgatgattatcatt

SEQ ID NO: 1748934 - DNA, 15 bp, Homo sapiens
tgatgattatcattt

SEQ ID NO: 1748935 - DNA, 15 bp, Homo sapiens
gatgattatcatttg

SEQ ID NO: 1748936 - DNA, 15 bp, Homo sapiens
atgattatcatttgt

SEQ ID NO: 1748937 - DNA, 15 bp, Homo sapiens
tgattatcatttgtg

SEQ ID NO: 1748938 - DNA, 15 bp, Homo sapiens
gattatcatttgtgt

SEQ ID NO: 1748939 - DNA, 15 bp, Homo sapiens
attatcatttgtgtg

SEQ ID NO: 1748940 - DNA, 15 bp, Homo sapiens
ttatcatttgtgtgg

SEQ ID NO: 1748941 - DNA, 15 bp, Homo sapiens
tatcatttgtgtggt

SEQ ID NO: 1748942 - DNA, 15 bp, Homo sapiens
atcatttgtgtggta

SEQ ID NO: 1748943 - DNA, 15 bp, Homo sapiens
tcatttgtgtggtag

SEQ ID NO: 1748944 - DNA, 15 bp, Homo sapiens
catttgtgtggtagt

SEQ ID NO: 1748945 - DNA, 15 bp, Homo sapiens
atttgtgtggtagta

SEQ ID NO: 1748946 - DNA, 15 bp, Homo sapiens
tttgtgtggtagtac

SEQ ID NO: 1748947 - DNA, 15 bp, Homo sapiens
ttgtgtggtagtaca

SEQ ID NO: 1748948 - DNA, 15 bp, Homo sapiens
tgtgtggtagtacag

SEQ ID NO: 1748949 - DNA, 15 bp, Homo sapiens
gtgtggtagtacaga

SEQ ID NO: 1748950 - DNA, 15 bp, Homo sapiens
tgtggtagtacagaa

SEQ ID NO: 1748951 - DNA, 15 bp, Homo sapiens
gtggtagtacagaag

SEQ ID NO: 1748952 - DNA, 15 bp, Homo sapiens
tggtagtacagaaga

SEQ ID NO: 1748953 - DNA, 15 bp, Homo sapiens
ggtagtacagaagaa

SEQ ID NO: 1748954 - DNA, 15 bp, Homo sapiens
gtagtacagaagaaa

SEQ ID NO: 1748955 - DNA, 15 bp, Homo sapiens
tagtacagaagaaac

SEQ ID NO: 1748956 - DNA, 15 bp, Homo sapiens
agtacagaagaaacc

SEQ ID NO: 1748957 - DNA, 15 bp, Homo sapiens
gtacagaagaaacca

SEQ ID NO: 1748958 - DNA, 15 bp, Homo sapiens
tacagaagaaaccac

SEQ ID NO: 1748959 - DNA, 15 bp, Homo sapiens
acagaagaaaccaca

SEQ ID NO: 1748960 - DNA, 15 bp, Homo sapiens
cagaagaaaccacaa

SEQ ID NO: 1748961 - DNA, 15 bp, Homo sapiens
agaagaaaccacaaa

SEQ ID NO: 1748962 - DNA, 15 bp, Homo sapiens
gaagaaaccacaaac

SEQ ID NO: 1748963 - DNA, 15 bp, Homo sapiens
aagaaaccacaaact

SEQ ID NO: 1748964 - DNA, 15 bp, Homo sapiens
agaaaccacaaactg

SEQ ID NO: 1748965 - DNA, 15 bp, Homo sapiens
gaaaccacaaactgg

SEQ ID NO: 1748966 - DNA, 15 bp, Homo sapiens
aaaccacaaactgga

SEQ ID NO: 1748967 - DNA, 15 bp, Homo sapiens
aaccacaaactggaa

SEQ ID NO: 1748968 - DNA, 15 bp, Homo sapiens
accacaaactggaag

SEQ ID NO: 1748969 - DNA, 15 bp, Homo sapiens
ccacaaactggaagt

SEQ ID NO: 1748970 - DNA, 15 bp, Homo sapiens
cacaaactggaagtc

SEQ ID NO: 1748971 - DNA, 15 bp, Homo sapiens
acaaactggaagtca

SEQ ID NO: 1748972 - DNA, 15 bp, Homo sapiens
caaactggaagtcag

SEQ ID NO: 1748973 - DNA, 15 bp, Homo sapiens
aaactggaagtcagg

SEQ ID NO: 1748974 - DNA, 15 bp, Homo sapiens
aactggaagtcaggg

SEQ ID NO: 1748975 - DNA, 15 bp, Homo sapiens
actggaagtcagggc

SEQ ID NO: 1748976 - DNA, 15 bp, Homo sapiens
ctggaagtcagggcc

SEQ ID NO: 1748977 - DNA, 15 bp, Homo sapiens
tggaagtcagggcca

SEQ ID NO: 1748978 - DNA, 15 bp, Homo sapiens
ggaagtcagggccag

SEQ ID NO: 1748979 - DNA, 15 bp, Homo sapiens
gaagtcagggccaga

SEQ ID NO: 1748980 - DNA, 15 bp, Homo sapiens
aagtcagggccagag

SEQ ID NO: 1748981 - DNA, 15 bp, Homo sapiens
agtcagggccagagc

SEQ ID NO: 1748982 - DNA, 15 bp, Homo sapiens
gtcagggccagagct

SEQ ID NO: 1748983 - DNA, 15 bp, Homo sapiens
tcagggccagagctt

SEQ ID NO: 1748984 - DNA, 15 bp, Homo sapiens
cagggccagagcttt

SEQ ID NO: 1748985 - DNA, 15 bp, Homo sapiens
agggccagagcttta

SEQ ID NO: 1748986 - DNA, 15 bp, Homo sapiens
gggccagagctttat

SEQ ID NO: 1748987 - DNA, 15 bp, Homo sapiens
gccagagctttatca

SEQ ID NO: 1748988 - DNA, 15 bp, Homo sapiens
ccagagctttatcag

SEQ ID NO: 1748989 - DNA, 15 bp, Homo sapiens
cagagctttatcaga

SEQ ID NO: 1748990 - DNA, 15 bp, Homo sapiens
agagctttatcagaa

SEQ ID NO: 1748991 - DNA, 15 bp, Homo sapiens
gagctttatcagaaa

SEQ ID NO: 1748992 - DNA, 15 bp, Homo sapiens
agctttatcagaaaa

SEQ ID NO: 1748993 - DNA, 15 bp, Homo sapiens
gctttatcagaaaaa

SEQ ID NO: 1748994 - DNA, 15 bp, Homo sapiens
ctttatcagaaaaag

SEQ ID NO: 1748995 - DNA, 15 bp, Homo sapiens
tttatcagaaaaagc

SEQ ID NO: 1748996 - DNA, 15 bp, Homo sapiens
ttatcagaaaaagct

SEQ ID NO: 1748997 - DNA, 15 bp, Homo sapiens
tatcagaaaaagctt

SEQ ID NO: 1748998 - DNA, 15 bp, Homo sapiens
atcagaaaaagctta

SEQ ID NO: 1748999 - DNA, 15 bp, Homo sapiens
tcagaaaaagcttac

SEQ ID NO: 1749000 - DNA, 15 bp, Homo sapiens
cagaaaaagcttact

SEQ ID NO: 1749001 - DNA, 15 bp, Homo sapiens
agaaaaagcttactt

SEQ ID NO: 1749002 - DNA, 15 bp, Homo sapiens
gaaaaagcttacttg

SEQ ID NO: 1749003 - DNA, 15 bp, Homo sapiens
aaaaagcttacttgg

SEQ ID NO: 1749004 - DNA, 15 bp, Homo sapiens
aaaagcttacttgga

SEQ ID NO: 1749005 - DNA, 15 bp, Homo sapiens
aaagcttacttggaa

SEQ ID NO: 1749006 - DNA, 15 bp, Homo sapiens
aagcttacttggaac

SEQ ID NO: 1749007 - DNA, 15 bp, Homo sapiens
agcttacttggaact

SEQ ID NO: 1749008 - DNA, 15 bp, Homo sapiens
gcttacttggaactg

SEQ ID NO: 1749009 - DNA, 15 bp, Homo sapiens
cttacttggaactga

SEQ ID NO: 1749010 - DNA, 15 bp, Homo sapiens
ttacttggaactgat

SEQ ID NO: 1749011 - DNA, 15 bp, Homo sapiens
tacttggaactgatc

SEQ ID NO: 1749012 - DNA, 15 bp, Homo sapiens
acttggaactgatca

SEQ ID NO: 1749013 - DNA, 15 bp, Homo sapiens
cttggaactgatcaa

SEQ ID NO: 1749014 - DNA, 15 bp, Homo sapiens
ttggaactgatcaag

SEQ ID NO: 1749015 - DNA, 15 bp, Homo sapiens
tggaactgatcaagg

SEQ ID NO: 1749016 - DNA, 15 bp, Homo sapiens
ggaactgatcaaggc

SEQ ID NO: 1749017 - DNA, 15 bp, Homo sapiens
gaactgatcaaggcc

SEQ ID NO: 1749018 - DNA, 15 bp, Homo sapiens
aactgatcaaggccc

SEQ ID NO: 1749019 - DNA, 15 bp, Homo sapiens
actgatcaaggccct

SEQ ID NO: 1749020 - DNA, 15 bp, Homo sapiens
ctgatcaaggccctt

SEQ ID NO: 1749021 - DNA, 15 bp, Homo sapiens
tgatcaaggccctta

SEQ ID NO: 1749022 - DNA, 15 bp, Homo sapiens
gatcaaggcccttac

SEQ ID NO: 1749023 - DNA, 15 bp, Homo sapiens
atcaaggcccttaca

SEQ ID NO: 1749024 - DNA, 15 bp, Homo sapiens
tcaaggcccttacac

SEQ ID NO: 1749025 - DNA, 15 bp, Homo sapiens
caaggcccttacaca

SEQ ID NO: 1749026 - DNA, 15 bp, Homo sapiens
aaggcccttacacac

SEQ ID NO: 1749027 - DNA, 15 bp, Homo sapiens
aggcccttacacact

SEQ ID NO: 1749028 - DNA, 15 bp, Homo sapiens
ggcccttacacactt

SEQ ID NO: 1749029 - DNA, 15 bp, Homo sapiens
gcccttacacacttt

SEQ ID NO: 1749030 - DNA, 15 bp, Homo sapiens
cccttacacactttg

SEQ ID NO: 1749031 - DNA, 15 bp, Homo sapiens
ccttacacactttgt

SEQ ID NO: 1749032 - DNA, 15 bp, Homo sapiens
cttacacactttgtg

SEQ ID NO: 1749033 - DNA, 15 bp, Homo sapiens
ttacacactttgtgc

SEQ ID NO: 1749034 - DNA, 15 bp, Homo sapiens
tacacactttgtgct

SEQ ID NO: 1749035 - DNA, 15 bp, Homo sapiens
acacactttgtgctt

SEQ ID NO: 1749036 - DNA, 15 bp, Homo sapiens
cacactttgtgcttc

SEQ ID NO: 1749037 - DNA, 15 bp, Homo sapiens
acactttgtgcttca

SEQ ID NO: 1749038 - DNA, 15 bp, Homo sapiens
cactttgtgcttcaa

SEQ ID NO: 1749039 - DNA, 15 bp, Homo sapiens
actttgtgcttcaat

SEQ ID NO: 1749040 - DNA, 15 bp, Homo sapiens
ctttgtgcttcaatt

SEQ ID NO: 1749041 - DNA, 15 bp, Homo sapiens
tttgtgcttcaattc

SEQ ID NO: 1749042 - DNA, 15 bp, Homo sapiens
ttgtgcttcaattcc

SEQ ID NO: 1749043 - DNA, 15 bp, Homo sapiens
tgtgcttcaattccc

SEQ ID NO: 1749044 - DNA, 15 bp, Homo sapiens
gtgcttcaattccct

SEQ ID NO: 1749045 - DNA, 15 bp, Homo sapiens
tgcttcaattccctc

SEQ ID NO: 1749046 - DNA, 15 bp, Homo sapiens
gcttcaattccctca

SEQ ID NO: 1749047 - DNA, 15 bp, Homo sapiens
cttcaattccctcaa

SEQ ID NO: 1749048 - DNA, 15 bp, Homo sapiens
ttcaattccctcaac

SEQ ID NO: 1749049 - DNA, 15 bp, Homo sapiens
tcaattccctcaact

SEQ ID NO: 1749050 - DNA, 15 bp, Homo sapiens
caattccctcaactc

SEQ ID NO: 1749051 - DNA, 15 bp, Homo sapiens
aattccctcaactct

SEQ ID NO: 1749052 - DNA, 15 bp, Homo sapiens
attccctcaactcta

SEQ ID NO: 1749053 - DNA, 15 bp, Homo sapiens
ttccctcaactctaa

SEQ ID NO: 1749054 - DNA, 15 bp, Homo sapiens
tccctcaactctaaa

SEQ ID NO: 1749055 - DNA, 15 bp, Homo sapiens
ccctcaactctaaaa

SEQ ID NO: 1749056 - DNA, 15 bp, Homo sapiens
cctcaactctaaaaa

SEQ ID NO: 1749057 - DNA, 15 bp, Homo sapiens
ctcaactctaaaaag

SEQ ID NO: 1749058 - DNA, 15 bp, Homo sapiens
tcaactctaaaaaga

SEQ ID NO: 1749059 - DNA, 15 bp, Homo sapiens
caactctaaaaagag

SEQ ID NO: 1749060 - DNA, 15 bp, Homo sapiens
aactctaaaaagagt

SEQ ID NO: 1749061 - DNA, 15 bp, Homo sapiens
actctaaaaagagta

SEQ ID NO: 1749062 - DNA, 15 bp, Homo sapiens
ctctaaaaagagtat

SEQ ID NO: 1749063 - DNA, 15 bp, Homo sapiens
tctaaaaagagtata

SEQ ID NO: 1749064 - DNA, 15 bp, Homo sapiens
ctaaaaagagtataa

SEQ ID NO: 1749065 - DNA, 15 bp, Homo sapiens
taaaaagagtataac

SEQ ID NO: 1749066 - DNA, 15 bp, Homo sapiens
aaaaagagtataacc

SEQ ID NO: 1749067 - DNA, 15 bp, Homo sapiens
aaaagagtataacca

SEQ ID NO: 1749068 - DNA, 15 bp, Homo sapiens
aaagagtataaccag

SEQ ID NO: 1749069 - DNA, 15 bp, Homo sapiens
aagagtataaccagc

SEQ ID NO: 1749070 - DNA, 15 bp, Homo sapiens
agagtataaccagca

SEQ ID NO: 1749071 - DNA, 15 bp, Homo sapiens
gagtataaccagcaa

SEQ ID NO: 1749072 - DNA, 15 bp, Homo sapiens
agtataaccagcaac

SEQ ID NO: 1749073 - DNA, 15 bp, Homo sapiens
gtataaccagcaact

SEQ ID NO: 1749074 - DNA, 15 bp, Homo sapiens
tataaccagcaacta

SEQ ID NO: 1749075 - DNA, 15 bp, Homo sapiens
ataaccagcaactaa

SEQ ID NO: 1749076 - DNA, 15 bp, Homo sapiens
taaccagcaactaaa

SEQ ID NO: 1749077 - DNA, 15 bp, Homo sapiens
aaccagcaactaaaa

SEQ ID NO: 1749078 - DNA, 15 bp, Homo sapiens
accagcaactaaaat

SEQ ID NO: 1749079 - DNA, 15 bp, Homo sapiens
ccagcaactaaaatt

SEQ ID NO: 1749080 - DNA, 15 bp, Homo sapiens
cagcaactaaaatta

SEQ ID NO: 1749081 - DNA, 15 bp, Homo sapiens
agcaactaaaattag

SEQ ID NO: 1749082 - DNA, 15 bp, Homo sapiens
gcaactaaaattagc

SEQ ID NO: 1749083 - DNA, 15 bp, Homo sapiens
caactaaaattagct

SEQ ID NO: 1749084 - DNA, 15 bp, Homo sapiens
aactaaaattagctg

SEQ ID NO: 1749085 - DNA, 15 bp, Homo sapiens
actaaaattagctga

SEQ ID NO: 1749086 - DNA, 15 bp, Homo sapiens
ctaaaattagctgag

SEQ ID NO: 1749087 - DNA, 15 bp, Homo sapiens
taaaattagctgagc

SEQ ID NO: 1749088 - DNA, 15 bp, Homo sapiens
aaaattagctgagct

SEQ ID NO: 1749089 - DNA, 15 bp, Homo sapiens
aaattagctgagctc

SEQ ID NO: 1749090 - DNA, 15 bp, Homo sapiens
aattagctgagctca

SEQ ID NO: 1749091 - DNA, 15 bp, Homo sapiens
attagctgagctcac

SEQ ID NO: 1749092 - DNA, 15 bp, Homo sapiens
ttagctgagctcaca

SEQ ID NO: 1749093 - DNA, 15 bp, Homo sapiens
tagctgagctcacag

SEQ ID NO: 1749094 - DNA, 15 bp, Homo sapiens
agctgagctcacaga

SEQ ID NO: 1749095 - DNA, 15 bp, Homo sapiens
gctgagctcacagat

SEQ ID NO: 1749096 - DNA, 15 bp, Homo sapiens
ctgagctcacagatc

SEQ ID NO: 1749097 - DNA, 15 bp, Homo sapiens
tgagctcacagatca

SEQ ID NO: 1749098 - DNA, 15 bp, Homo sapiens
gagctcacagatcag

SEQ ID NO: 1749099 - DNA, 15 bp, Homo sapiens
agctcacagatcaga

SEQ ID NO: 1749100 - DNA, 15 bp, Homo sapiens
gctcacagatcagat

SEQ ID NO: 1749101 - DNA, 15 bp, Homo sapiens
ctcacagatcagatt

SEQ ID NO: 1749102 - DNA, 15 bp, Homo sapiens
tcacagatcagattc

SEQ ID NO: 1749103 - DNA, 15 bp, Homo sapiens
cacagatcagattca

SEQ ID NO: 1749104 - DNA, 15 bp, Homo sapiens
acagatcagattcag

SEQ ID NO: 1749105 - DNA, 15 bp, Homo sapiens
cagatcagattcagt

SEQ ID NO: 1749106 - DNA, 15 bp, Homo sapiens
agatcagattcagtt

SEQ ID NO: 1749107 - DNA, 15 bp, Homo sapiens
gatcagattcagtta

SEQ ID NO: 1749108 - DNA, 15 bp, Homo sapiens
atcagattcagttat

SEQ ID NO: 1749109 - DNA, 15 bp, Homo sapiens
tcagattcagttata

SEQ ID NO: 1749110 - DNA, 15 bp, Homo sapiens
cagattcagttataa

SEQ ID NO: 1749111 - DNA, 15 bp, Homo sapiens
agattcagttataag

SEQ ID NO: 1749112 - DNA, 15 bp, Homo sapiens
gattcagttataagc

SEQ ID NO: 1749113 - DNA, 15 bp, Homo sapiens
attcagttataagcc

SEQ ID NO: 1749114 - DNA, 15 bp, Homo sapiens
ttcagttataagcct

SEQ ID NO: 1749115 - DNA, 15 bp, Homo sapiens
tcagttataagcctc

SEQ ID NO: 1749116 - DNA, 15 bp, Homo sapiens
cagttataagcctct

SEQ ID NO: 1749117 - DNA, 15 bp, Homo sapiens
agttataagcctctt

SEQ ID NO: 1749118 - DNA, 15 bp, Homo sapiens
gttataagcctcttc

SEQ ID NO: 1749119 - DNA, 15 bp, Homo sapiens
ttataagcctcttct

SEQ ID NO: 1749120 - DNA, 15 bp, Homo sapiens
tataagcctcttctt

SEQ ID NO: 1749121 - DNA, 15 bp, Homo sapiens
ataagcctcttcttg

SEQ ID NO: 1749122 - DNA, 15 bp, Homo sapiens
taagcctcttcttga

SEQ ID NO: 1749123 - DNA, 15 bp, Homo sapiens
aagcctcttcttgaa

SEQ ID NO: 1749124 - DNA, 15 bp, Homo sapiens
agcctcttcttgaaa

SEQ ID NO: 1749125 - DNA, 15 bp, Homo sapiens
gcctcttcttgaaag

SEQ ID NO: 1749126 - DNA, 15 bp, Homo sapiens
cctcttcttgaaagt

SEQ ID NO: 1749127 - DNA, 15 bp, Homo sapiens
ctcttcttgaaagta

SEQ ID NO: 1749128 - DNA, 15 bp, Homo sapiens
tcttcttgaaagtaa

SEQ ID NO: 1749129 - DNA, 15 bp, Homo sapiens
cttcttgaaagtaaa

SEQ ID NO: 1749130 - DNA, 15 bp, Homo sapiens
ttcttgaaagtaaaa

SEQ ID NO: 1749131 - DNA, 15 bp, Homo sapiens
tcttgaaagtaaaaa

SEQ ID NO: 1749132 - DNA, 15 bp, Homo sapiens
cttgaaagtaaaaac

SEQ ID NO: 1749133 - DNA, 15 bp, Homo sapiens
ttgaaagtaaaaacc

SEQ ID NO: 1749134 - DNA, 15 bp, Homo sapiens
tgaaagtaaaaacct

SEQ ID NO: 1749135 - DNA, 15 bp, Homo sapiens
gaaagtaaaaacctt

SEQ ID NO: 1749136 - DNA, 15 bp, Homo sapiens
aaagtaaaaaccttt

SEQ ID NO: 1749137 - DNA, 15 bp, Homo sapiens
aagtaaaaacctttg

SEQ ID NO: 1749138 - DNA, 15 bp, Homo sapiens
agtaaaaacctttgg

SEQ ID NO: 1749139 - DNA, 15 bp, Homo sapiens
gtaaaaacctttggg

SEQ ID NO: 1749140 - DNA, 15 bp, Homo sapiens
taaaaacctttggga

SEQ ID NO: 1749141 - DNA, 15 bp, Homo sapiens
aaaaacctttgggaa

SEQ ID NO: 1749142 - DNA, 15 bp, Homo sapiens
aaaacctttgggaag

SEQ ID NO: 1749143 - DNA, 15 bp, Homo sapiens
aaacctttgggaagt

SEQ ID NO: 1749144 - DNA, 15 bp, Homo sapiens
aacctttgggaagtc

SEQ ID NO: 1749145 - DNA, 15 bp, Homo sapiens
acctttgggaagtca

SEQ ID NO: 1749146 - DNA, 15 bp, Homo sapiens
cctttgggaagtcac

SEQ ID NO: 1749147 - DNA, 15 bp, Homo sapiens
ctttgggaagtcaca

SEQ ID NO: 1749148 - DNA, 15 bp, Homo sapiens
tttgggaagtcacag

SEQ ID NO: 1749149 - DNA, 15 bp, Homo sapiens
ttgggaagtcacagt

SEQ ID NO: 1749150 - DNA, 15 bp, Homo sapiens
tgggaagtcacagta

SEQ ID NO: 1749151 - DNA, 15 bp, Homo sapiens
gggaagtcacagtag

SEQ ID NO: 1749152 - DNA, 15 bp, Homo sapiens
ggaagtcacagtagt

SEQ ID NO: 1749153 - DNA, 15 bp, Homo sapiens
gaagtcacagtagtc

SEQ ID NO: 1749154 - DNA, 15 bp, Homo sapiens
aagtcacagtagtcc

SEQ ID NO: 1749155 - DNA, 15 bp, Homo sapiens
agtcacagtagtcct

SEQ ID NO: 1749156 - DNA, 15 bp, Homo sapiens
gtcacagtagtccta

SEQ ID NO: 1749157 - DNA, 15 bp, Homo sapiens
tcacagtagtcctaa

SEQ ID NO: 1749158 - DNA, 15 bp, Homo sapiens
cacagtagtcctaag

SEQ ID NO: 1749159 - DNA, 15 bp, Homo sapiens
acagtagtcctaaga

SEQ ID NO: 1749160 - DNA, 15 bp, Homo sapiens
cagtagtcctaagaa

SEQ ID NO: 1749161 - DNA, 15 bp, Homo sapiens
agtagtcctaagaaa

SEQ ID NO: 1749162 - DNA, 15 bp, Homo sapiens
gtagtcctaagaaat

SEQ ID NO: 1749163 - DNA, 15 bp, Homo sapiens
tagtcctaagaaatt

SEQ ID NO: 1749164 - DNA, 15 bp, Homo sapiens
agtcctaagaaatta

SEQ ID NO: 1749165 - DNA, 15 bp, Homo sapiens
gtcctaagaaattag

SEQ ID NO: 1749166 - DNA, 15 bp, Homo sapiens
tcctaagaaattagg

SEQ ID NO: 1749167 - DNA, 15 bp, Homo sapiens
cctaagaaattaggg

SEQ ID NO: 1749168 - DNA, 15 bp, Homo sapiens
ctaagaaattagggg

SEQ ID NO: 1749169 - DNA, 15 bp, Homo sapiens
taagaaattaggggc

SEQ ID NO: 1749170 - DNA, 15 bp, Homo sapiens
aagaaattaggggct

SEQ ID NO: 1749171 - DNA, 15 bp, Homo sapiens
agaaattaggggcta

SEQ ID NO: 1749172 - DNA, 15 bp, Homo sapiens
gaaattaggggctac

SEQ ID NO: 1749173 - DNA, 15 bp, Homo sapiens
aaattaggggctact

SEQ ID NO: 1749174 - DNA, 15 bp, Homo sapiens
aattaggggctacta

SEQ ID NO: 1749175 - DNA, 15 bp, Homo sapiens
attaggggctactat

SEQ ID NO: 1749176 - DNA, 15 bp, Homo sapiens
ttaggggctactatg

SEQ ID NO: 1749177 - DNA, 15 bp, Homo sapiens
taggggctactatgc

SEQ ID NO: 1749178 - DNA, 15 bp, Homo sapiens
aggggctactatgca

SEQ ID NO: 1749179 - DNA, 15 bp, Homo sapiens
ggggctactatgcaa

SEQ ID NO: 1749180 - DNA, 15 bp, Homo sapiens
gggctactatgcaaa

SEQ ID NO: 1749181 - DNA, 15 bp, Homo sapiens
ggctactatgcaaag

SEQ ID NO: 1749182 - DNA, 15 bp, Homo sapiens
gctactatgcaaagg

SEQ ID NO: 1749183 - DNA, 15 bp, Homo sapiens
ctactatgcaaaggg

SEQ ID NO: 1749184 - DNA, 15 bp, Homo sapiens
tactatgcaaaggga

SEQ ID NO: 1749185 - DNA, 15 bp, Homo sapiens
actatgcaaagggaa

SEQ ID NO: 1749186 - DNA, 15 bp, Homo sapiens
ctatgcaaagggaag

SEQ ID NO: 1749187 - DNA, 15 bp, Homo sapiens
tatgcaaagggaagt

SEQ ID NO: 1749188 - DNA, 15 bp, Homo sapiens
atgcaaagggaagtc

SEQ ID NO: 1749189 - DNA, 15 bp, Homo sapiens
tgcaaagggaagtca

SEQ ID NO: 1749190 - DNA, 15 bp, Homo sapiens
gcaaagggaagtcag

SEQ ID NO: 1749191 - DNA, 15 bp, Homo sapiens
caaagggaagtcaga

SEQ ID NO: 1749192 - DNA, 15 bp, Homo sapiens
aaagggaagtcagaa

SEQ ID NO: 1749193 - DNA, 15 bp, Homo sapiens
aagggaagtcagaaa

SEQ ID NO: 1749194 - DNA, 15 bp, Homo sapiens
agggaagtcagaaag

SEQ ID NO: 1749195 - DNA, 15 bp, Homo sapiens
gggaagtcagaaagc

SEQ ID NO: 1749196 - DNA, 15 bp, Homo sapiens
ggaagtcagaaagca

SEQ ID NO: 1749197 - DNA, 15 bp, Homo sapiens
gaagtcagaaagcaa

SEQ ID NO: 1749198 - DNA, 15 bp, Homo sapiens
aagtcagaaagcaag

SEQ ID NO: 1749199 - DNA, 15 bp, Homo sapiens
agtcagaaagcaagt

SEQ ID NO: 1749200 - DNA, 15 bp, Homo sapiens
gtcagaaagcaagtc

SEQ ID NO: 1749201 - DNA, 15 bp, Homo sapiens
tcagaaagcaagtcg

SEQ ID NO: 1749202 - DNA, 15 bp, Homo sapiens
cagaaagcaagtcga

SEQ ID NO: 1749203 - DNA, 15 bp, Homo sapiens
agaaagcaagtcgag

SEQ ID NO: 1749204 - DNA, 15 bp, Homo sapiens
gaaagcaagtcgaga

SEQ ID NO: 1749205 - DNA, 15 bp, Homo sapiens
aaagcaagtcgagaa

SEQ ID NO: 1749206 - DNA, 15 bp, Homo sapiens
aagcaagtcgagaaa

SEQ ID NO: 1749207 - DNA, 15 bp, Homo sapiens
agcaagtcgagaaaa

SEQ ID NO: 1749208 - DNA, 15 bp, Homo sapiens
gcaagtcgagaaaag

SEQ ID NO: 1749209 - DNA, 15 bp, Homo sapiens
caagtcgagaaaagg

SEQ ID NO: 1749210 - DNA, 15 bp, Homo sapiens
aagtcgagaaaaggt

SEQ ID NO: 1749211 - DNA, 15 bp, Homo sapiens
agtcgagaaaaggta

SEQ ID NO: 1749212 - DNA, 15 bp, Homo sapiens
gtcgagaaaaggtaa

SEQ ID NO: 1749213 - DNA, 15 bp, Homo sapiens
tcgagaaaaggtaaa

SEQ ID NO: 1749214 - DNA, 15 bp, Homo sapiens
cgagaaaaggtaaac

SEQ ID NO: 1749215 - DNA, 15 bp, Homo sapiens
gagaaaaggtaaacc

SEQ ID NO: 1749216 - DNA, 15 bp, Homo sapiens
agaaaaggtaaaccc

SEQ ID NO: 1749217 - DNA, 15 bp, Homo sapiens
gaaaaggtaaaccct

SEQ ID NO: 1749218 - DNA, 15 bp, Homo sapiens
aaaaggtaaaccctc

SEQ ID NO: 1749219 - DNA, 15 bp, Homo sapiens
aaaggtaaaccctca

SEQ ID NO: 1749220 - DNA, 15 bp, Homo sapiens
aaggtaaaccctcag

SEQ ID NO: 1749221 - DNA, 15 bp, Homo sapiens
aggtaaaccctcagg

SEQ ID NO: 1749222 - DNA, 15 bp, Homo sapiens
ggtaaaccctcagga

SEQ ID NO: 1749223 - DNA, 15 bp, Homo sapiens
gtaaaccctcaggaa

SEQ ID NO: 1749224 - DNA, 15 bp, Homo sapiens
taaaccctcaggaag

SEQ ID NO: 1749225 - DNA, 15 bp, Homo sapiens
aaaccctcaggaagt

SEQ ID NO: 1749226 - DNA, 15 bp, Homo sapiens
aaccctcaggaagtg

SEQ ID NO: 1749227 - DNA, 15 bp, Homo sapiens
accctcaggaagtgg

SEQ ID NO: 1749228 - DNA, 15 bp, Homo sapiens
ccctcaggaagtgga

SEQ ID NO: 1749229 - DNA, 15 bp, Homo sapiens
cctcaggaagtggat

SEQ ID NO: 1749230 - DNA, 15 bp, Homo sapiens
ctcaggaagtggatc

SEQ ID NO: 1749231 - DNA, 15 bp, Homo sapiens
tcaggaagtggatct

SEQ ID NO: 1749232 - DNA, 15 bp, Homo sapiens
caggaagtggatctt

SEQ ID NO: 1749233 - DNA, 15 bp, Homo sapiens
aggaagtggatcttg

SEQ ID NO: 1749234 - DNA, 15 bp, Homo sapiens
ggaagtggatcttgc

SEQ ID NO: 1749235 - DNA, 15 bp, Homo sapiens
gaagtggatcttgcc

SEQ ID NO: 1749236 - DNA, 15 bp, Homo sapiens
aagtggatcttgccc

SEQ ID NO: 1749237 - DNA, 15 bp, Homo sapiens
agtggatcttgcccc

SEQ ID NO: 1749238 - DNA, 15 bp, Homo sapiens
gtggatcttgcccct

SEQ ID NO: 1749239 - DNA, 15 bp, Homo sapiens
tggatcttgcccctc

SEQ ID NO: 1749240 - DNA, 15 bp, Homo sapiens
ggatcttgcccctct

SEQ ID NO: 1749241 - DNA, 15 bp, Homo sapiens
gatcttgcccctctc

SEQ ID NO: 1749242 - DNA, 15 bp, Homo sapiens
atcttgcccctctcc

SEQ ID NO: 1749243 - DNA, 15 bp, Homo sapiens
tcttgcccctctcct

SEQ ID NO: 1749244 - DNA, 15 bp, Homo sapiens
cttgcccctctccta

SEQ ID NO: 1749245 - DNA, 15 bp, Homo sapiens
ttgcccctctcctag

SEQ ID NO: 1749246 - DNA, 15 bp, Homo sapiens
tgcccctctcctaga

SEQ ID NO: 1749247 - DNA, 15 bp, Homo sapiens
gcccctctcctagat

SEQ ID NO: 1749248 - DNA, 15 bp, Homo sapiens
cccctctcctagatt

SEQ ID NO: 1749249 - DNA, 15 bp, Homo sapiens
ccctctcctagattt

SEQ ID NO: 1749250 - DNA, 15 bp, Homo sapiens
cctctcctagatttc

SEQ ID NO: 1749251 - DNA, 15 bp, Homo sapiens
ctctcctagatttct

SEQ ID NO: 1749252 - DNA, 15 bp, Homo sapiens
tctcctagatttctc

SEQ ID NO: 1749253 - DNA, 15 bp, Homo sapiens
ctcctagatttctct

SEQ ID NO: 1749254 - DNA, 15 bp, Homo sapiens
tcctagatttctctt

SEQ ID NO: 1749255 - DNA, 15 bp, Homo sapiens
cctagatttctcttg

SEQ ID NO: 1749256 - DNA, 15 bp, Homo sapiens
ctagatttctcttgt

SEQ ID NO: 1749257 - DNA, 15 bp, Homo sapiens
tagatttctcttgtt

SEQ ID NO: 1749258 - DNA, 15 bp, Homo sapiens
agatttctcttgtta

SEQ ID NO: 1749259 - DNA, 15 bp, Homo sapiens
gatttctcttgttac

SEQ ID NO: 1749260 - DNA, 15 bp, Homo sapiens
atttctcttgttact

SEQ ID NO: 1749261 - DNA, 15 bp, Homo sapiens
tttctcttgttacta

SEQ ID NO: 1749262 - DNA, 15 bp, Homo sapiens
ttctcttgttactag

SEQ ID NO: 1749263 - DNA, 15 bp, Homo sapiens
tctcttgttactaga

SEQ ID NO: 1749264 - DNA, 15 bp, Homo sapiens
ctcttgttactagaa

SEQ ID NO: 1749265 - DNA, 15 bp, Homo sapiens
tcttgttactagaat

SEQ ID NO: 1749266 - DNA, 15 bp, Homo sapiens
cttgttactagaatt

SEQ ID NO: 1749267 - DNA, 15 bp, Homo sapiens
ttgttactagaattt

SEQ ID NO: 1749268 - DNA, 15 bp, Homo sapiens
tgttactagaatttt

SEQ ID NO: 1749269 - DNA, 15 bp, Homo sapiens
gttactagaatttta

SEQ ID NO: 1749270 - DNA, 15 bp, Homo sapiens
ttactagaattttat

SEQ ID NO: 1749271 - DNA, 15 bp, Homo sapiens
tactagaattttatg

SEQ ID NO: 1749272 - DNA, 15 bp, Homo sapiens
actagaattttatga

SEQ ID NO: 1749273 - DNA, 15 bp, Homo sapiens
ctagaattttatgaa

SEQ ID NO: 1749274 - DNA, 15 bp, Homo sapiens
tagaattttatgaaa

SEQ ID NO: 1749275 - DNA, 15 bp, Homo sapiens
agaattttatgaaaa

SEQ ID NO: 1749276 - DNA, 15 bp, Homo sapiens
gaattttatgaaaat

SEQ ID NO: 1749277 - DNA, 15 bp, Homo sapiens
aattttatgaaaatg

SEQ ID NO: 1749278 - DNA, 15 bp, Homo sapiens
attttatgaaaatgt

SEQ ID NO: 1749279 - DNA, 15 bp, Homo sapiens
ttttatgaaaatgta

SEQ ID NO: 1749280 - DNA, 15 bp, Homo sapiens
tttatgaaaatgtat

SEQ ID NO: 1749281 - DNA, 15 bp, Homo sapiens
ttatgaaaatgtatg

SEQ ID NO: 1749282 - DNA, 15 bp, Homo sapiens
tatgaaaatgtatgt

SEQ ID NO: 1749283 - DNA, 15 bp, Homo sapiens
atgaaaatgtatgtc

SEQ ID NO: 1749284 - DNA, 15 bp, Homo sapiens
tgaaaatgtatgtcg

SEQ ID NO: 1749285 - DNA, 15 bp, Homo sapiens
gaaaatgtatgtcgg

SEQ ID NO: 1749286 - DNA, 15 bp, Homo sapiens
aaaatgtatgtcggg

SEQ ID NO: 1749287 - DNA, 15 bp, Homo sapiens
aaatgtatgtcgggg

SEQ ID NO: 1749288 - DNA, 15 bp, Homo sapiens
aatgtatgtcgggga

SEQ ID NO: 1749289 - DNA, 15 bp, Homo sapiens
atgtatgtcggggag

SEQ ID NO: 1749290 - DNA, 15 bp, Homo sapiens
tgtatgtcggggaga

SEQ ID NO: 1749291 - DNA, 15 bp, Homo sapiens
gtatgtcggggagaa

SEQ ID NO: 1749292 - DNA, 15 bp, Homo sapiens
tatgtcggggagaaa

SEQ ID NO: 1749293 - DNA, 15 bp, Homo sapiens
atgtcggggagaaag

SEQ ID NO: 1749294 - DNA, 15 bp, Homo sapiens
tgtcggggagaaagg

SEQ ID NO: 1749295 - DNA, 15 bp, Homo sapiens
gtcggggagaaaggg

SEQ ID NO: 1749296 - DNA, 15 bp, Homo sapiens
tcggggagaaagggg

SEQ ID NO: 1749297 - DNA, 15 bp, Homo sapiens
cggggagaaagggga

SEQ ID NO: 1749298 - DNA, 15 bp, Homo sapiens
ggggagaaaggggat

SEQ ID NO: 1749299 - DNA, 15 bp, Homo sapiens
gggagaaaggggatg

SEQ ID NO: 1749300 - DNA, 15 bp, Homo sapiens
ggagaaaggggatga

SEQ ID NO: 1749301 - DNA, 15 bp, Homo sapiens
gagaaaggggatgat

SEQ ID NO: 1749302 - DNA, 15 bp, Homo sapiens
agaaaggggatgatt

SEQ ID NO: 1749303 - DNA, 15 bp, Homo sapiens
gaaaggggatgatta

SEQ ID NO: 1749304 - DNA, 15 bp, Homo sapiens
aaaggggatgattaa

SEQ ID NO: 1749305 - DNA, 15 bp, Homo sapiens
aaggggatgattaag

SEQ ID NO: 1749306 - DNA, 15 bp, Homo sapiens
aggggatgattaagg

SEQ ID NO: 1749307 - DNA, 15 bp, Homo sapiens
ggggatgattaagga

SEQ ID NO: 1749308 - DNA, 15 bp, Homo sapiens
gggatgattaaggag

SEQ ID NO: 1749309 - DNA, 15 bp, Homo sapiens
ggatgattaaggagt

SEQ ID NO: 1749310 - DNA, 15 bp, Homo sapiens
gatgattaaggagta

SEQ ID NO: 1749311 - DNA, 15 bp, Homo sapiens
atgattaaggagtaa

SEQ ID NO: 1749312 - DNA, 15 bp, Homo sapiens
tgattaaggagtaaa

SEQ ID NO: 1749313 - DNA, 15 bp, Homo sapiens
gattaaggagtaaag

SEQ ID NO: 1749314 - DNA, 15 bp, Homo sapiens
attaaggagtaaagg

SEQ ID NO: 1749315 - DNA, 15 bp, Homo sapiens
ttaaggagtaaaggg

SEQ ID NO: 1749316 - DNA, 15 bp, Homo sapiens
taaggagtaaaggga

SEQ ID NO: 1749317 - DNA, 15 bp, Homo sapiens
aaggagtaaagggaa

SEQ ID NO: 1749318 - DNA, 15 bp, Homo sapiens
aggagtaaagggaaa

SEQ ID NO: 1749319 - DNA, 15 bp, Homo sapiens
ggagtaaagggaaaa

SEQ ID NO: 1749320 - DNA, 15 bp, Homo sapiens
gagtaaagggaaaaa

SEQ ID NO: 1749321 - DNA, 15 bp, Homo sapiens
agtaaagggaaaaaa

SEQ ID NO: 1749322 - DNA, 15 bp, Homo sapiens
gtaaagggaaaaaat

SEQ ID NO: 1749323 - DNA, 15 bp, Homo sapiens
taaagggaaaaaata

SEQ ID NO: 1749324 - DNA, 15 bp, Homo sapiens
aaagggaaaaaatac

SEQ ID NO: 1749325 - DNA, 15 bp, Homo sapiens
aagggaaaaaatact

SEQ ID NO: 1749326 - DNA, 15 bp, Homo sapiens
agggaaaaaatactg

SEQ ID NO: 1749327 - DNA, 15 bp, Homo sapiens
gggaaaaaatactgg

SEQ ID NO: 1749328 - DNA, 15 bp, Homo sapiens
ggaaaaaatactggt

SEQ ID NO: 1749329 - DNA, 15 bp, Homo sapiens
gaaaaaatactggta

SEQ ID NO: 1749330 - DNA, 15 bp, Homo sapiens
aaaaaatactggtaa

SEQ ID NO: 1749331 - DNA, 15 bp, Homo sapiens
aaaaatactggtaag

SEQ ID NO: 1749332 - DNA, 15 bp, Homo sapiens
aaaatactggtaagc

SEQ ID NO: 1749333 - DNA, 15 bp, Homo sapiens
aaatactggtaagca

SEQ ID NO: 1749334 - DNA, 15 bp, Homo sapiens
aatactggtaagcac

SEQ ID NO: 1749335 - DNA, 15 bp, Homo sapiens
atactggtaagcact

SEQ ID NO: 1749336 - DNA, 15 bp, Homo sapiens
tactggtaagcacta

SEQ ID NO: 1749337 - DNA, 15 bp, Homo sapiens
actggtaagcactat

SEQ ID NO: 1749338 - DNA, 15 bp, Homo sapiens
ctggtaagcactata

SEQ ID NO: 1749339 - DNA, 15 bp, Homo sapiens
tggtaagcactatac

SEQ ID NO: 1749340 - DNA, 15 bp, Homo sapiens
ggtaagcactatacc

SEQ ID NO: 1749341 - DNA, 15 bp, Homo sapiens
gtaagcactatacct

SEQ ID NO: 1749342 - DNA, 15 bp, Homo sapiens
taagcactatacctt

SEQ ID NO: 1749343 - DNA, 15 bp, Homo sapiens
aagcactataccttt

SEQ ID NO: 1749344 - DNA, 15 bp, Homo sapiens
agcactataccttta

SEQ ID NO: 1749345 - DNA, 15 bp, Homo sapiens
gcactatacctttag

SEQ ID NO: 1749346 - DNA, 15 bp, Homo sapiens
cactatacctttaga

SEQ ID NO: 1749347 - DNA, 15 bp, Homo sapiens
actatacctttagac

SEQ ID NO: 1749348 - DNA, 15 bp, Homo sapiens
ctatacctttagact

SEQ ID NO: 1749349 - DNA, 15 bp, Homo sapiens
tatacctttagactt

SEQ ID NO: 1749350 - DNA, 15 bp, Homo sapiens
atacctttagacttt

SEQ ID NO: 1749351 - DNA, 15 bp, Homo sapiens
tacctttagactttc

SEQ ID NO: 1749352 - DNA, 15 bp, Homo sapiens
acctttagactttca

SEQ ID NO: 1749353 - DNA, 15 bp, Homo sapiens
cctttagactttcaa

SEQ ID NO: 1749354 - DNA, 15 bp, Homo sapiens
ctttagactttcaaa

SEQ ID NO: 1749355 - DNA, 15 bp, Homo sapiens
tttagactttcaaac

SEQ ID NO: 1749356 - DNA, 15 bp, Homo sapiens
ttagactttcaaaca

SEQ ID NO: 1749357 - DNA, 15 bp, Homo sapiens
tagactttcaaacat

SEQ ID NO: 1749358 - DNA, 15 bp, Homo sapiens
agactttcaaacatc

SEQ ID NO: 1749359 - DNA, 15 bp, Homo sapiens
gactttcaaacatca

SEQ ID NO: 1749360 - DNA, 15 bp, Homo sapiens
actttcaaacatcat

SEQ ID NO: 1749361 - DNA, 15 bp, Homo sapiens
ctttcaaacatcatg

SEQ ID NO: 1749362 - DNA, 15 bp, Homo sapiens
tttcaaacatcatgg

SEQ ID NO: 1749363 - DNA, 15 bp, Homo sapiens
ttcaaacatcatgga

SEQ ID NO: 1749364 - DNA, 15 bp, Homo sapiens
tcaaacatcatggag

SEQ ID NO: 1749365 - DNA, 15 bp, Homo sapiens
caaacatcatggagt

SEQ ID NO: 1749366 - DNA, 15 bp, Homo sapiens
aaacatcatggagtt

SEQ ID NO: 1749367 - DNA, 15 bp, Homo sapiens
aacatcatggagtta

SEQ ID NO: 1749368 - DNA, 15 bp, Homo sapiens
acatcatggagttaa

SEQ ID NO: 1749369 - DNA, 15 bp, Homo sapiens
catcatggagttaat

SEQ ID NO: 1749370 - DNA, 15 bp, Homo sapiens
atcatggagttaatt

SEQ ID NO: 1749371 - DNA, 15 bp, Homo sapiens
tcatggagttaatta

SEQ ID NO: 1749372 - DNA, 15 bp, Homo sapiens
catggagttaattat

SEQ ID NO: 1749373 - DNA, 15 bp, Homo sapiens
atggagttaattata

SEQ ID NO: 1749374 - DNA, 15 bp, Homo sapiens
tggagttaattataa

SEQ ID NO: 1749375 - DNA, 15 bp, Homo sapiens
ggagttaattataaa

SEQ ID NO: 1749376 - DNA, 15 bp, Homo sapiens
gagttaattataaaa

SEQ ID NO: 1749377 - DNA, 15 bp, Homo sapiens
agttaattataaaag

SEQ ID NO: 1749378 - DNA, 15 bp, Homo sapiens
gttaattataaaagc

SEQ ID NO: 1749379 - DNA, 15 bp, Homo sapiens
ttaattataaaagct

SEQ ID NO: 1749380 - DNA, 15 bp, Homo sapiens
taattataaaagcta

SEQ ID NO: 1749381 - DNA, 15 bp, Homo sapiens
aattataaaagctaa

SEQ ID NO: 1749382 - DNA, 15 bp, Homo sapiens
attataaaagctaat

SEQ ID NO: 1749383 - DNA, 15 bp, Homo sapiens
ttataaaagctaatt

SEQ ID NO: 1749384 - DNA, 15 bp, Homo sapiens
tataaaagctaattt

SEQ ID NO: 1749385 - DNA, 15 bp, Homo sapiens
ataaaagctaatttt

SEQ ID NO: 1749386 - DNA, 15 bp, Homo sapiens
taaaagctaattttt

SEQ ID NO: 1749387 - DNA, 15 bp, Homo sapiens
aaaagctaatttttg

SEQ ID NO: 1749388 - DNA, 15 bp, Homo sapiens
aaagctaatttttga

SEQ ID NO: 1749389 - DNA, 15 bp, Homo sapiens
aagctaatttttgaa

SEQ ID NO: 1749390 - DNA, 15 bp, Homo sapiens
agctaatttttgaat

SEQ ID NO: 1749391 - DNA, 15 bp, Homo sapiens
gctaatttttgaatt

SEQ ID NO: 1749392 - DNA, 15 bp, Homo sapiens
ctaatttttgaattc

SEQ ID NO: 1749393 - DNA, 15 bp, Homo sapiens
taatttttgaattcc

SEQ ID NO: 1749394 - DNA, 15 bp, Homo sapiens
aatttttgaattcct

SEQ ID NO: 1749395 - DNA, 15 bp, Homo sapiens
atttttgaattcctc

SEQ ID NO: 1749396 - DNA, 15 bp, Homo sapiens
tttttgaattcctct

SEQ ID NO: 1749397 - DNA, 15 bp, Homo sapiens
ttttgaattcctcta

SEQ ID NO: 1749398 - DNA, 15 bp, Homo sapiens
tttgaattcctctac

SEQ ID NO: 1749399 - DNA, 15 bp, Homo sapiens
ttgaattcctctact

SEQ ID NO: 1749400 - DNA, 15 bp, Homo sapiens
tgaattcctctactt

SEQ ID NO: 1749401 - DNA, 15 bp, Homo sapiens
gaattcctctacttc

SEQ ID NO: 1749402 - DNA, 15 bp, Homo sapiens
aattcctctacttct

SEQ ID NO: 1749403 - DNA, 15 bp, Homo sapiens
attcctctacttctg

SEQ ID NO: 1749404 - DNA, 15 bp, Homo sapiens
ttcctctacttctgt

SEQ ID NO: 1749405 - DNA, 15 bp, Homo sapiens
tcctctacttctgtc

SEQ ID NO: 1749406 - DNA, 15 bp, Homo sapiens
cctctacttctgtct

SEQ ID NO: 1749407 - DNA, 15 bp, Homo sapiens
ctctacttctgtcta

SEQ ID NO: 1749408 - DNA, 15 bp, Homo sapiens
tctacttctgtctag

SEQ ID NO: 1749409 - DNA, 15 bp, Homo sapiens
ctacttctgtctagg

SEQ ID NO: 1749410 - DNA, 15 bp, Homo sapiens
tacttctgtctaggg

SEQ ID NO: 1749411 - DNA, 15 bp, Homo sapiens
acttctgtctagggt

SEQ ID NO: 1749412 - DNA, 15 bp, Homo sapiens
cttctgtctagggtg

SEQ ID NO: 1749413 - DNA, 15 bp, Homo sapiens
ttctgtctagggtgt

SEQ ID NO: 1749414 - DNA, 15 bp, Homo sapiens
tctgtctagggtgtt

SEQ ID NO: 1749415 - DNA, 15 bp, Homo sapiens
ctgtctagggtgttt

SEQ ID NO: 1749416 - DNA, 15 bp, Homo sapiens
tgtctagggtgtttt

SEQ ID NO: 1749417 - DNA, 15 bp, Homo sapiens
gtctagggtgttttc

SEQ ID NO: 1749418 - DNA, 15 bp, Homo sapiens
tctagggtgttttct

SEQ ID NO: 1749419 - DNA, 15 bp, Homo sapiens
ctagggtgttttctg

SEQ ID NO: 1749420 - DNA, 15 bp, Homo sapiens
tagggtgttttctgc

SEQ ID NO: 1749421 - DNA, 15 bp, Homo sapiens
agggtgttttctgca

SEQ ID NO: 1749422 - DNA, 15 bp, Homo sapiens
gggtgttttctgcaa

SEQ ID NO: 1749423 - DNA, 15 bp, Homo sapiens
ggtgttttctgcaat

SEQ ID NO: 1749424 - DNA, 15 bp, Homo sapiens
gtgttttctgcaatt

SEQ ID NO: 1749425 - DNA, 15 bp, Homo sapiens
tgttttctgcaattg

SEQ ID NO: 1749426 - DNA, 15 bp, Homo sapiens
gttttctgcaattgt

SEQ ID NO: 1749427 - DNA, 15 bp, Homo sapiens
ttttctgcaattgta

SEQ ID NO: 1749428 - DNA, 15 bp, Homo sapiens
tttctgcaattgtat

SEQ ID NO: 1749429 - DNA, 15 bp, Homo sapiens
ttctgcaattgtatt

SEQ ID NO: 1749430 - DNA, 15 bp, Homo sapiens
tctgcaattgtattt

SEQ ID NO: 1749431 - DNA, 15 bp, Homo sapiens
ctgcaattgtatttg

SEQ ID NO: 1749432 - DNA, 15 bp, Homo sapiens
tgcaattgtatttgg

SEQ ID NO: 1749433 - DNA, 15 bp, Homo sapiens
gcaattgtatttggt

SEQ ID NO: 1749434 - DNA, 15 bp, Homo sapiens
caattgtatttggtg

SEQ ID NO: 1749435 - DNA, 15 bp, Homo sapiens
aattgtatttggtgc

SEQ ID NO: 1749436 - DNA, 15 bp, Homo sapiens
attgtatttggtgca

SEQ ID NO: 1749437 - DNA, 15 bp, Homo sapiens
ttgtatttggtgcag

SEQ ID NO: 1749438 - DNA, 15 bp, Homo sapiens
tgtatttggtgcagt

SEQ ID NO: 1749439 - DNA, 15 bp, Homo sapiens
gtatttggtgcagtg

SEQ ID NO: 1749440 - DNA, 15 bp, Homo sapiens
tatttggtgcagtgg

SEQ ID NO: 1749441 - DNA, 15 bp, Homo sapiens
atttggtgcagtggc

SEQ ID NO: 1749442 - DNA, 15 bp, Homo sapiens
tttggtgcagtggct

SEQ ID NO: 1749443 - DNA, 15 bp, Homo sapiens
ttggtgcagtggctc

SEQ ID NO: 1749444 - DNA, 15 bp, Homo sapiens
tggtgcagtggctct

SEQ ID NO: 1749445 - DNA, 15 bp, Homo sapiens
ggtgcagtggctcta

SEQ ID NO: 1749446 - DNA, 15 bp, Homo sapiens
gtgcagtggctctag

SEQ ID NO: 1749447 - DNA, 15 bp, Homo sapiens
tgcagtggctctagg

SEQ ID NO: 1749448 - DNA, 15 bp, Homo sapiens
gcagtggctctagga

SEQ ID NO: 1749449 - DNA, 15 bp, Homo sapiens
cagtggctctaggac

SEQ ID NO: 1749450 - DNA, 15 bp, Homo sapiens
agtggctctaggaca

SEQ ID NO: 1749451 - DNA, 15 bp, Homo sapiens
gtggctctaggacat

SEQ ID NO: 1749452 - DNA, 15 bp, Homo sapiens
tggctctaggacatg

SEQ ID NO: 1749453 - DNA, 15 bp, Homo sapiens
ggctctaggacatgc

SEQ ID NO: 1749454 - DNA, 15 bp, Homo sapiens
gctctaggacatgcc

SEQ ID NO: 1749455 - DNA, 15 bp, Homo sapiens
ctctaggacatgcca

SEQ ID NO: 1749456 - DNA, 15 bp, Homo sapiens
tctaggacatgccag

SEQ ID NO: 1749457 - DNA, 15 bp, Homo sapiens
ctaggacatgccagt

SEQ ID NO: 1749458 - DNA, 15 bp, Homo sapiens
taggacatgccagtt

SEQ ID NO: 1749459 - DNA, 15 bp, Homo sapiens
aggacatgccagttc

SEQ ID NO: 1749460 - DNA, 15 bp, Homo sapiens
ggacatgccagttca

SEQ ID NO: 1749461 - DNA, 15 bp, Homo sapiens
gacatgccagttcat

SEQ ID NO: 1749462 - DNA, 15 bp, Homo sapiens
acatgccagttcatt

SEQ ID NO: 1749463 - DNA, 15 bp, Homo sapiens
catgccagttcattt

SEQ ID NO: 1749464 - DNA, 15 bp, Homo sapiens
atgccagttcatttg

SEQ ID NO: 1749465 - DNA, 15 bp, Homo sapiens
tgccagttcatttgc

SEQ ID NO: 1749466 - DNA, 15 bp, Homo sapiens
gccagttcatttgct

SEQ ID NO: 1749467 - DNA, 15 bp, Homo sapiens
ccagttcatttgctc

SEQ ID NO: 1749468 - DNA, 15 bp, Homo sapiens
cagttcatttgctcc

SEQ ID NO: 1749469 - DNA, 15 bp, Homo sapiens
agttcatttgctcca

SEQ ID NO: 1749470 - DNA, 15 bp, Homo sapiens
gttcatttgctccag

SEQ ID NO: 1749471 - DNA, 15 bp, Homo sapiens
ttcatttgctccaga

SEQ ID NO: 1749472 - DNA, 15 bp, Homo sapiens
tcatttgctccagac

SEQ ID NO: 1749473 - DNA, 15 bp, Homo sapiens
catttgctccagact

SEQ ID NO: 1749474 - DNA, 15 bp, Homo sapiens
atttgctccagacta

SEQ ID NO: 1749475 - DNA, 15 bp, Homo sapiens
tttgctccagactat

SEQ ID NO: 1749476 - DNA, 15 bp, Homo sapiens
ttgctccagactatg

SEQ ID NO: 1749477 - DNA, 15 bp, Homo sapiens
tgctccagactatgc

SEQ ID NO: 1749478 - DNA, 15 bp, Homo sapiens
gctccagactatgct

SEQ ID NO: 1749479 - DNA, 15 bp, Homo sapiens
ctccagactatgcta

SEQ ID NO: 1749480 - DNA, 15 bp, Homo sapiens
tccagactatgctaa

SEQ ID NO: 1749481 - DNA, 15 bp, Homo sapiens
ccagactatgctaaa

SEQ ID NO: 1749482 - DNA, 15 bp, Homo sapiens
cagactatgctaaag

SEQ ID NO: 1749483 - DNA, 15 bp, Homo sapiens
agactatgctaaagc

SEQ ID NO: 1749484 - DNA, 15 bp, Homo sapiens
gactatgctaaagct

SEQ ID NO: 1749485 - DNA, 15 bp, Homo sapiens
actatgctaaagcta

SEQ ID NO: 1749486 - DNA, 15 bp, Homo sapiens
ctatgctaaagctaa

SEQ ID NO: 1749487 - DNA, 15 bp, Homo sapiens
tatgctaaagctaag

SEQ ID NO: 1749488 - DNA, 15 bp, Homo sapiens
atgctaaagctaagc

SEQ ID NO: 1749489 - DNA, 15 bp, Homo sapiens
tgctaaagctaagct

SEQ ID NO: 1749490 - DNA, 15 bp, Homo sapiens
gctaaagctaagctg

SEQ ID NO: 1749491 - DNA, 15 bp, Homo sapiens
ctaaagctaagctgt

SEQ ID NO: 1749492 - DNA, 15 bp, Homo sapiens
taaagctaagctgtc

SEQ ID NO: 1749493 - DNA, 15 bp, Homo sapiens
aaagctaagctgtct

SEQ ID NO: 1749494 - DNA, 15 bp, Homo sapiens
aagctaagctgtctg

SEQ ID NO: 1749495 - DNA, 15 bp, Homo sapiens
agctaagctgtctgc

SEQ ID NO: 1749496 - DNA, 15 bp, Homo sapiens
gctaagctgtctgca

SEQ ID NO: 1749497 - DNA, 15 bp, Homo sapiens
ctaagctgtctgcag

SEQ ID NO: 1749498 - DNA, 15 bp, Homo sapiens
taagctgtctgcagc

SEQ ID NO: 1749499 - DNA, 15 bp, Homo sapiens
aagctgtctgcagcc

SEQ ID NO: 1749500 - DNA, 15 bp, Homo sapiens
agctgtctgcagccc

SEQ ID NO: 1749501 - DNA, 15 bp, Homo sapiens
gctgtctgcagccca

SEQ ID NO: 1749502 - DNA, 15 bp, Homo sapiens
ctgtctgcagcccac

SEQ ID NO: 1749503 - DNA, 15 bp, Homo sapiens
tgtctgcagcccact

SEQ ID NO: 1749504 - DNA, 15 bp, Homo sapiens
gtctgcagcccactt

SEQ ID NO: 1749505 - DNA, 15 bp, Homo sapiens
tctgcagcccactta

SEQ ID NO: 1749506 - DNA, 15 bp, Homo sapiens
ctgcagcccacttat

SEQ ID NO: 1749507 - DNA, 15 bp, Homo sapiens
tgcagcccacttatt

SEQ ID NO: 1749508 - DNA, 15 bp, Homo sapiens
gcagcccacttattc

SEQ ID NO: 1749509 - DNA, 15 bp, Homo sapiens
cagcccacttattca

SEQ ID NO: 1749510 - DNA, 15 bp, Homo sapiens
agcccacttattcat

SEQ ID NO: 1749511 - DNA, 15 bp, Homo sapiens
gcccacttattcatg

SEQ ID NO: 1749512 - DNA, 15 bp, Homo sapiens
cccacttattcatgc

SEQ ID NO: 1749513 - DNA, 15 bp, Homo sapiens
ccacttattcatgct

SEQ ID NO: 1749514 - DNA, 15 bp, Homo sapiens
cacttattcatgctg

SEQ ID NO: 1749515 - DNA, 15 bp, Homo sapiens
acttattcatgctgt

SEQ ID NO: 1749516 - DNA, 15 bp, Homo sapiens
cttattcatgctgtt

SEQ ID NO: 1749517 - DNA, 15 bp, Homo sapiens
ttattcatgctgttt

SEQ ID NO: 1749518 - DNA, 15 bp, Homo sapiens
tattcatgctgtttg

SEQ ID NO: 1749519 - DNA, 15 bp, Homo sapiens
attcatgctgtttga

SEQ ID NO: 1749520 - DNA, 15 bp, Homo sapiens
ttcatgctgtttgaa

SEQ ID NO: 1749521 - DNA, 15 bp, Homo sapiens
tcatgctgtttgaaa

SEQ ID NO: 1749522 - DNA, 15 bp, Homo sapiens
catgctgtttgaaag

SEQ ID NO: 1749523 - DNA, 15 bp, Homo sapiens
atgctgtttgaaaga

SEQ ID NO: 1749524 - DNA, 15 bp, Homo sapiens
tgctgtttgaaagac

SEQ ID NO: 1749525 - DNA, 15 bp, Homo sapiens
gctgtttgaaagaca

SEQ ID NO: 1749526 - DNA, 15 bp, Homo sapiens
ctgtttgaaagacaa

SEQ ID NO: 1749527 - DNA, 15 bp, Homo sapiens
tgtttgaaagacaac

SEQ ID NO: 1749528 - DNA, 15 bp, Homo sapiens
gtttgaaagacaacc

SEQ ID NO: 1749529 - DNA, 15 bp, Homo sapiens
tttgaaagacaacct

SEQ ID NO: 1749530 - DNA, 15 bp, Homo sapiens
ttgaaagacaacctc

SEQ ID NO: 1749531 - DNA, 15 bp, Homo sapiens
tgaaagacaacctct

SEQ ID NO: 1749532 - DNA, 15 bp, Homo sapiens
gaaagacaacctctg

SEQ ID NO: 1749533 - DNA, 15 bp, Homo sapiens
aaagacaacctctga

SEQ ID NO: 1749534 - DNA, 15 bp, Homo sapiens
aagacaacctctgat

SEQ ID NO: 1749535 - DNA, 15 bp, Homo sapiens
agacaacctctgatt

SEQ ID NO: 1749536 - DNA, 15 bp, Homo sapiens
ccgggttgtatcaca

SEQ ID NO: 1749537 - DNA, 15 bp, Homo sapiens
cgggttgtatcacag

SEQ ID NO: 1749538 - DNA, 15 bp, Homo sapiens
gggttgtatcacagg

SEQ ID NO: 1749539 - DNA, 15 bp, Homo sapiens
ggttgtatcacagga

SEQ ID NO: 1749540 - DNA, 15 bp, Homo sapiens
gttgtatcacaggat

SEQ ID NO: 1749541 - DNA, 15 bp, Homo sapiens
ttgtatcacaggatg

SEQ ID NO: 1749542 - DNA, 15 bp, Homo sapiens
tgtatcacaggatga

SEQ ID NO: 1749543 - DNA, 15 bp, Homo sapiens
gtatcacaggatgaa

SEQ ID NO: 1749544 - DNA, 15 bp, Homo sapiens
tatcacaggatgaaa

SEQ ID NO: 1749545 - DNA, 15 bp, Homo sapiens
atcacaggatgaaat

SEQ ID NO: 1749546 - DNA, 15 bp, Homo sapiens
tcacaggatgaaatt

SEQ ID NO: 1749547 - DNA, 15 bp, Homo sapiens
cacaggatgaaattg

SEQ ID NO: 1749548 - DNA, 15 bp, Homo sapiens
acaggatgaaattgt

SEQ ID NO: 1749549 - DNA, 15 bp, Homo sapiens
caggatgaaattgtg

SEQ ID NO: 1749550 - DNA, 15 bp, Homo sapiens
aggatgaaattgtga

SEQ ID NO: 1749551 - DNA, 15 bp, Homo sapiens
ggatgaaattgtgag

SEQ ID NO: 1749552 - DNA, 15 bp, Homo sapiens
gatgaaattgtgagt

SEQ ID NO: 1749553 - DNA, 15 bp, Homo sapiens
atgaaattgtgagtg

SEQ ID NO: 1749554 - DNA, 15 bp, Homo sapiens
tgaaattgtgagtgc

SEQ ID NO: 1749555 - DNA, 15 bp, Homo sapiens
gaaattgtgagtgca

SEQ ID NO: 1749556 - DNA, 15 bp, Homo sapiens
aaattgtgagtgcag

SEQ ID NO: 1749557 - DNA, 15 bp, Homo sapiens
aattgtgagtgcagc

SEQ ID NO: 1749558 - DNA, 15 bp, Homo sapiens
attgtgagtgcagcc

SEQ ID NO: 1749559 - DNA, 15 bp, Homo sapiens
ttgtgagtgcagcca

SEQ ID NO: 1749560 - DNA, 15 bp, Homo sapiens
tgtgagtgcagccaa

SEQ ID NO: 1749561 - DNA, 15 bp, Homo sapiens
gtgagtgcagccaaa

SEQ ID NO: 1749562 - DNA, 15 bp, Homo sapiens
tgagtgcagccaaag

SEQ ID NO: 1749563 - DNA, 15 bp, Homo sapiens
gagtgcagccaaagc

SEQ ID NO: 1749564 - DNA, 15 bp, Homo sapiens
agtgcagccaaagct

SEQ ID NO: 1749565 - DNA, 15 bp, Homo sapiens
gtgcagccaaagctg

SEQ ID NO: 1749566 - DNA, 15 bp, Homo sapiens
tgcagccaaagctgc

SEQ ID NO: 1749567 - DNA, 15 bp, Homo sapiens
gcagccaaagctgcc

SEQ ID NO: 1749568 - DNA, 15 bp, Homo sapiens
cagccaaagctgcca

SEQ ID NO: 1749569 - DNA, 15 bp, Homo sapiens
agccaaagctgccaa

SEQ ID NO: 1749570 - DNA, 15 bp, Homo sapiens
gccaaagctgccaac

SEQ ID NO: 1749571 - DNA, 15 bp, Homo sapiens
ccaaagctgccaaca

SEQ ID NO: 1749572 - DNA, 15 bp, Homo sapiens
caaagctgccaacat

SEQ ID NO: 1749573 - DNA, 15 bp, Homo sapiens
aaagctgccaacata

SEQ ID NO: 1749574 - DNA, 15 bp, Homo sapiens
aagctgccaacatac

SEQ ID NO: 1749575 - DNA, 15 bp, Homo sapiens
agctgccaacataca

SEQ ID NO: 1749576 - DNA, 15 bp, Homo sapiens
gctgccaacatacat

SEQ ID NO: 1749577 - DNA, 15 bp, Homo sapiens
ctgccaacatacatc

SEQ ID NO: 1749578 - DNA, 15 bp, Homo sapiens
tgccaacatacatcc

SEQ ID NO: 1749579 - DNA, 15 bp, Homo sapiens
gccaacatacatcct

SEQ ID NO: 1749580 - DNA, 15 bp, Homo sapiens
ccaacatacatcctt

SEQ ID NO: 1749581 - DNA, 15 bp, Homo sapiens
caacatacatccttt

SEQ ID NO: 1749582 - DNA, 15 bp, Homo sapiens
aacatacatcctttc

SEQ ID NO: 1749583 - DNA, 15 bp, Homo sapiens
acatacatcctttca

SEQ ID NO: 1749584 - DNA, 15 bp, Homo sapiens
catacatcctttcat

SEQ ID NO: 1749585 - DNA, 15 bp, Homo sapiens
atacatcctttcatc

SEQ ID NO: 1749586 - DNA, 15 bp, Homo sapiens
tacatcctttcatcg

SEQ ID NO: 1749587 - DNA, 15 bp, Homo sapiens
acatcctttcatcga

SEQ ID NO: 1749588 - DNA, 15 bp, Homo sapiens
catcctttcatcgag

SEQ ID NO: 1749589 - DNA, 15 bp, Homo sapiens
atcctttcatcgaga

SEQ ID NO: 1749590 - DNA, 15 bp, Homo sapiens
tcctttcatcgagac

SEQ ID NO: 1749591 - DNA, 15 bp, Homo sapiens
cctttcatcgagacg

SEQ ID NO: 1749592 - DNA, 15 bp, Homo sapiens
ctttcatcgagacgt

SEQ ID NO: 1749593 - DNA, 15 bp, Homo sapiens
tttcatcgagacgtt

SEQ ID NO: 1749594 - DNA, 15 bp, Homo sapiens
ttcatcgagacgtta

SEQ ID NO: 1749595 - DNA, 15 bp, Homo sapiens
tcatcgagacgttac

SEQ ID NO: 1749596 - DNA, 15 bp, Homo sapiens
catcgagacgttacc

SEQ ID NO: 1749597 - DNA, 15 bp, Homo sapiens
atcgagacgttaccc

SEQ ID NO: 1749598 - DNA, 15 bp, Homo sapiens
tcgagacgttacccc

SEQ ID NO: 1749599 - DNA, 15 bp, Homo sapiens
cgagacgttacccca

SEQ ID NO: 1749600 - DNA, 15 bp, Homo sapiens
gagacgttaccccac

SEQ ID NO: 1749601 - DNA, 15 bp, Homo sapiens
agacgttaccccacg

SEQ ID NO: 1749602 - DNA, 15 bp, Homo sapiens
gacgttaccccacgt

SEQ ID NO: 1749603 - DNA, 15 bp, Homo sapiens
acgttaccccacgta

SEQ ID NO: 1749604 - DNA, 15 bp, Homo sapiens
cgttaccccacgtaa

SEQ ID NO: 1749605 - DNA, 15 bp, Homo sapiens
gttaccccacgtaag

SEQ ID NO: 1749606 - DNA, 15 bp, Homo sapiens
ttaccccacgtaagt

SEQ ID NO: 1749607 - DNA, 15 bp, Homo sapiens
taccccacgtaagtt

SEQ ID NO: 1749608 - DNA, 15 bp, Homo sapiens
accccacgtaagtta

SEQ ID NO: 1749609 - DNA, 15 bp, Homo sapiens
ccccacgtaagttaa

SEQ ID NO: 1749610 - DNA, 15 bp, Homo sapiens
cccacgtaagttaaa

SEQ ID NO: 1749611 - DNA, 15 bp, Homo sapiens
ccacgtaagttaaag

SEQ ID NO: 1749612 - DNA, 15 bp, Homo sapiens
cacgtaagttaaaga

SEQ ID NO: 1749613 - DNA, 15 bp, Homo sapiens
acgtaagttaaagag

SEQ ID NO: 1749614 - DNA, 15 bp, Homo sapiens
cgtaagttaaagagt

SEQ ID NO: 1749615 - DNA, 15 bp, Homo sapiens
gtaagttaaagagta

SEQ ID NO: 1749616 - DNA, 15 bp, Homo sapiens
taagttaaagagtag

SEQ ID NO: 1749617 - DNA, 15 bp, Homo sapiens
aagttaaagagtagc

SEQ ID NO: 1749618 - DNA, 15 bp, Homo sapiens
agttaaagagtagct

SEQ ID NO: 1749619 - DNA, 15 bp, Homo sapiens
gttaaagagtagctg

SEQ ID NO: 1749620 - DNA, 15 bp, Homo sapiens
ttaaagagtagctga

SEQ ID NO: 1749621 - DNA, 15 bp, Homo sapiens
taaagagtagctgaa

SEQ ID NO: 1749622 - DNA, 15 bp, Homo sapiens
aaagagtagctgaaa

SEQ ID NO: 1749623 - DNA, 15 bp, Homo sapiens
aagagtagctgaaat

SEQ ID NO: 1749624 - DNA, 15 bp, Homo sapiens
agagtagctgaaatc

SEQ ID NO: 1749625 - DNA, 15 bp, Homo sapiens
gagtagctgaaatca

SEQ ID NO: 1749626 - DNA, 15 bp, Homo sapiens
agtagctgaaatcag

SEQ ID NO: 1749627 - DNA, 15 bp, Homo sapiens
gtagctgaaatcaga

SEQ ID NO: 1749628 - DNA, 15 bp, Homo sapiens
tagctgaaatcagaa

SEQ ID NO: 1749629 - DNA, 15 bp, Homo sapiens
agctgaaatcagaag

SEQ ID NO: 1749630 - DNA, 15 bp, Homo sapiens
gctgaaatcagaaga

SEQ ID NO: 1749631 - DNA, 15 bp, Homo sapiens
ctgaaatcagaagag

SEQ ID NO: 1749632 - DNA, 15 bp, Homo sapiens
tgaaatcagaagaga

SEQ ID NO: 1749633 - DNA, 15 bp, Homo sapiens
gaaatcagaagagac

SEQ ID NO: 1749634 - DNA, 15 bp, Homo sapiens
aaatcagaagagact

SEQ ID NO: 1749635 - DNA, 15 bp, Homo sapiens
aatcagaagagacta

SEQ ID NO: 1749636 - DNA, 15 bp, Homo sapiens
atcagaagagactac

SEQ ID NO: 1749637 - DNA, 15 bp, Homo sapiens
tcagaagagactact

SEQ ID NO: 1749638 - DNA, 15 bp, Homo sapiens
cagaagagactactt

SEQ ID NO: 1749639 - DNA, 15 bp, Homo sapiens
agaagagactacttt

SEQ ID NO: 1749640 - DNA, 15 bp, Homo sapiens
gaagagactactttt

SEQ ID NO: 1749641 - DNA, 15 bp, Homo sapiens
aagagactacttttt

SEQ ID NO: 1749642 - DNA, 15 bp, Homo sapiens
agagactacttttta

SEQ ID NO: 1749643 - DNA, 15 bp, Homo sapiens
gagactactttttat

SEQ ID NO: 1749644 - DNA, 15 bp, Homo sapiens
agactactttttatc

SEQ ID NO: 1749645 - DNA, 15 bp, Homo sapiens
gactactttttatcc

SEQ ID NO: 1749646 - DNA, 15 bp, Homo sapiens
actactttttatccc

SEQ ID NO: 1749647 - DNA, 15 bp, Homo sapiens
ctactttttatcccc

SEQ ID NO: 1749648 - DNA, 15 bp, Homo sapiens
tactttttatccccc

SEQ ID NO: 1749649 - DNA, 15 bp, Homo sapiens
actttttatccccca

SEQ ID NO: 1749650 - DNA, 15 bp, Homo sapiens
ctttttatcccccaa

SEQ ID NO: 1749651 - DNA, 15 bp, Homo sapiens
tttttatcccccaaa

SEQ ID NO: 1749652 - DNA, 15 bp, Homo sapiens
ttttatcccccaaac

SEQ ID NO: 1749653 - DNA, 15 bp, Homo sapiens
tttatcccccaaaca

SEQ ID NO: 1749654 - DNA, 15 bp, Homo sapiens
ttatcccccaaacaa

SEQ ID NO: 1749655 - DNA, 15 bp, Homo sapiens
tatcccccaaacaat

SEQ ID NO: 1749656 - DNA, 15 bp, Homo sapiens
atcccccaaacaatt

SEQ ID NO: 1749657 - DNA, 15 bp, Homo sapiens
tcccccaaacaatta

SEQ ID NO: 1749658 - DNA, 15 bp, Homo sapiens
cccccaaacaattac

SEQ ID NO: 1749659 - DNA, 15 bp, Homo sapiens
ccccaaacaattacc

SEQ ID NO: 1749660 - DNA, 15 bp, Homo sapiens
cccaaacaattacca

SEQ ID NO: 1749661 - DNA, 15 bp, Homo sapiens
ccaaacaattaccaa

SEQ ID NO: 1749662 - DNA, 15 bp, Homo sapiens
caaacaattaccaaa

SEQ ID NO: 1749663 - DNA, 15 bp, Homo sapiens
aaacaattaccaaag

SEQ ID NO: 1749664 - DNA, 15 bp, Homo sapiens
aacaattaccaaagt

SEQ ID NO: 1749665 - DNA, 15 bp, Homo sapiens
acaattaccaaagtt

SEQ ID NO: 1749666 - DNA, 15 bp, Homo sapiens
caattaccaaagtta

SEQ ID NO: 1749667 - DNA, 15 bp, Homo sapiens
aattaccaaagttat

SEQ ID NO: 1749668 - DNA, 15 bp, Homo sapiens
attaccaaagttatg

SEQ ID NO: 1749669 - DNA, 15 bp, Homo sapiens
ttaccaaagttatgc

SEQ ID NO: 1749670 - DNA, 15 bp, Homo sapiens
taccaaagttatgcc

SEQ ID NO: 1749671 - DNA, 15 bp, Homo sapiens
accaaagttatgcca

SEQ ID NO: 1749672 - DNA, 15 bp, Homo sapiens
ccaaagttatgccaa

SEQ ID NO: 1749673 - DNA, 15 bp, Homo sapiens
caaagttatgccaac

SEQ ID NO: 1749674 - DNA, 15 bp, Homo sapiens
aaagttatgccaaca

SEQ ID NO: 1749675 - DNA, 15 bp, Homo sapiens
aagttatgccaacaa

SEQ ID NO: 1749676 - DNA, 15 bp, Homo sapiens
agttatgccaacaaa

SEQ ID NO: 1749677 - DNA, 15 bp, Homo sapiens
gttatgccaacaaaa

SEQ ID NO: 1749678 - DNA, 15 bp, Homo sapiens
ttatgccaacaaaat

SEQ ID NO: 1749679 - DNA, 15 bp, Homo sapiens
tatgccaacaaaatc

SEQ ID NO: 1749680 - DNA, 15 bp, Homo sapiens
atgccaacaaaatct

SEQ ID NO: 1749681 - DNA, 15 bp, Homo sapiens
tgccaacaaaatctt

SEQ ID NO: 1749682 - DNA, 15 bp, Homo sapiens
gccaacaaaatcttg

SEQ ID NO: 1749683 - DNA, 15 bp, Homo sapiens
ccaacaaaatcttgt

SEQ ID NO: 1749684 - DNA, 15 bp, Homo sapiens
caacaaaatcttgta

SEQ ID NO: 1749685 - DNA, 15 bp, Homo sapiens
aacaaaatcttgtaa

SEQ ID NO: 1749686 - DNA, 15 bp, Homo sapiens
acaaaatcttgtaac

SEQ ID NO: 1749687 - DNA, 15 bp, Homo sapiens
caaaatcttgtaaca

SEQ ID NO: 1749688 - DNA, 15 bp, Homo sapiens
aaaatcttgtaacaa

SEQ ID NO: 1749689 - DNA, 15 bp, Homo sapiens
aaatcttgtaacaaa

SEQ ID NO: 1749690 - DNA, 15 bp, Homo sapiens
aatcttgtaacaaaa

SEQ ID NO: 1749691 - DNA, 15 bp, Homo sapiens
atcttgtaacaaaat

SEQ ID NO: 1749692 - DNA, 15 bp, Homo sapiens
tcttgtaacaaaata

SEQ ID NO: 1749693 - DNA, 15 bp, Homo sapiens
cttgtaacaaaatat

SEQ ID NO: 1749694 - DNA, 15 bp, Homo sapiens
ttgtaacaaaatatg

SEQ ID NO: 1749695 - DNA, 15 bp, Homo sapiens
tgtaacaaaatatgt

SEQ ID NO: 1749696 - DNA, 15 bp, Homo sapiens
gtaacaaaatatgtt

SEQ ID NO: 1749697 - DNA, 15 bp, Homo sapiens
taacaaaatatgttg

SEQ ID NO: 1749698 - DNA, 15 bp, Homo sapiens
aacaaaatatgttga

SEQ ID NO: 1749699 - DNA, 15 bp, Homo sapiens
acaaaatatgttgat

SEQ ID NO: 1749700 - DNA, 15 bp, Homo sapiens
caaaatatgttgatt

SEQ ID NO: 1749701 - DNA, 15 bp, Homo sapiens
aaaatatgttgattt

SEQ ID NO: 1749702 - DNA, 15 bp, Homo sapiens
aaatatgttgattta

SEQ ID NO: 1749703 - DNA, 15 bp, Homo sapiens
aatatgttgatttac

SEQ ID NO: 1749704 - DNA, 15 bp, Homo sapiens
atatgttgatttact

SEQ ID NO: 1749705 - DNA, 15 bp, Homo sapiens
tatgttgatttacta

SEQ ID NO: 1749706 - DNA, 15 bp, Homo sapiens
atgttgatttactaa

SEQ ID NO: 1749707 - DNA, 15 bp, Homo sapiens
tgttgatttactaac

SEQ ID NO: 1749708 - DNA, 15 bp, Homo sapiens
gttgatttactaaca

SEQ ID NO: 1749709 - DNA, 15 bp, Homo sapiens
ttgatttactaacat

SEQ ID NO: 1749710 - DNA, 15 bp, Homo sapiens
tgatttactaacatt

SEQ ID NO: 1749711 - DNA, 15 bp, Homo sapiens
gatttactaacatta

SEQ ID NO: 1749712 - DNA, 15 bp, Homo sapiens
atttactaacattaa

SEQ ID NO: 1749713 - DNA, 15 bp, Homo sapiens
tttactaacattaac

SEQ ID NO: 1749714 - DNA, 15 bp, Homo sapiens
ttactaacattaaca

SEQ ID NO: 1749715 - DNA, 15 bp, Homo sapiens
tactaacattaacaa

SEQ ID NO: 1749716 - DNA, 15 bp, Homo sapiens
actaacattaacaac

SEQ ID NO: 1749717 - DNA, 15 bp, Homo sapiens
ctaacattaacaact

SEQ ID NO: 1749718 - DNA, 15 bp, Homo sapiens
taacattaacaactt

SEQ ID NO: 1749719 - DNA, 15 bp, Homo sapiens
aacattaacaacttg

SEQ ID NO: 1749720 - DNA, 15 bp, Homo sapiens
acattaacaacttgg

SEQ ID NO: 1749721 - DNA, 15 bp, Homo sapiens
cattaacaacttgga

SEQ ID NO: 1749722 - DNA, 15 bp, Homo sapiens
attaacaacttggac

SEQ ID NO: 1749723 - DNA, 15 bp, Homo sapiens
ttaacaacttggaca

SEQ ID NO: 1749724 - DNA, 15 bp, Homo sapiens
taacaacttggacaa

SEQ ID NO: 1749725 - DNA, 15 bp, Homo sapiens
aacaacttggacaag

SEQ ID NO: 1749726 - DNA, 15 bp, Homo sapiens
acaacttggacaagg

SEQ ID NO: 1749727 - DNA, 15 bp, Homo sapiens
caacttggacaaggc

SEQ ID NO: 1749728 - DNA, 15 bp, Homo sapiens
aacttggacaaggca

SEQ ID NO: 1749729 - DNA, 15 bp, Homo sapiens
acttggacaaggcac

SEQ ID NO: 1749730 - DNA, 15 bp, Homo sapiens
cttggacaaggcact

SEQ ID NO: 1749731 - DNA, 15 bp, Homo sapiens
ttggacaaggcactt

SEQ ID NO: 1749732 - DNA, 15 bp, Homo sapiens
tggacaaggcacttc

SEQ ID NO: 1749733 - DNA, 15 bp, Homo sapiens
ggacaaggcacttca

SEQ ID NO: 1749734 - DNA, 15 bp, Homo sapiens
gacaaggcacttcag

SEQ ID NO: 1749735 - DNA, 15 bp, Homo sapiens
acaaggcacttcagg

SEQ ID NO: 1749736 - DNA, 15 bp, Homo sapiens
caaggcacttcagga

SEQ ID NO: 1749737 - DNA, 15 bp, Homo sapiens
aaggcacttcaggat

SEQ ID NO: 1749738 - DNA, 15 bp, Homo sapiens
aggcacttcaggata

SEQ ID NO: 1749739 - DNA, 15 bp, Homo sapiens
ggcacttcaggatac

SEQ ID NO: 1749740 - DNA, 15 bp, Homo sapiens
gcacttcaggatacc

SEQ ID NO: 1749741 - DNA, 15 bp, Homo sapiens
cacttcaggatacca

SEQ ID NO: 1749742 - DNA, 15 bp, Homo sapiens
acttcaggataccaa

SEQ ID NO: 1749743 - DNA, 15 bp, Homo sapiens
cttcaggataccaag

SEQ ID NO: 1749744 - DNA, 15 bp, Homo sapiens
ttcaggataccaagc

SEQ ID NO: 1749745 - DNA, 15 bp, Homo sapiens
tcaggataccaagct

SEQ ID NO: 1749746 - DNA, 15 bp, Homo sapiens
caggataccaagctt

SEQ ID NO: 1749747 - DNA, 15 bp, Homo sapiens
aggataccaagcttc

SEQ ID NO: 1749748 - DNA, 15 bp, Homo sapiens
ggataccaagcttcc

SEQ ID NO: 1749749 - DNA, 15 bp, Homo sapiens
gataccaagcttcct

SEQ ID NO: 1749750 - DNA, 15 bp, Homo sapiens
ataccaagcttcctt

SEQ ID NO: 1749751 - DNA, 15 bp, Homo sapiens
taccaagcttcctta

SEQ ID NO: 1749752 - DNA, 15 bp, Homo sapiens
accaagcttccttat

SEQ ID NO: 1749753 - DNA, 15 bp, Homo sapiens
ccaagcttccttatt

SEQ ID NO: 1749754 - DNA, 15 bp, Homo sapiens
caagcttccttattt

SEQ ID NO: 1749755 - DNA, 15 bp, Homo sapiens
aagcttccttatttg

SEQ ID NO: 1749756 - DNA, 15 bp, Homo sapiens
agcttccttatttgt

SEQ ID NO: 1749757 - DNA, 15 bp, Homo sapiens
gcttccttatttgta

SEQ ID NO: 1749758 - DNA, 15 bp, Homo sapiens
cttccttatttgtaa

SEQ ID NO: 1749759 - DNA, 15 bp, Homo sapiens
ttccttatttgtaaa

SEQ ID NO: 1749760 - DNA, 15 bp, Homo sapiens
tccttatttgtaaat

SEQ ID NO: 1749761 - DNA, 15 bp, Homo sapiens
ccttatttgtaaatg

SEQ ID NO: 1749762 - DNA, 15 bp, Homo sapiens
cttatttgtaaatgg

SEQ ID NO: 1749763 - DNA, 15 bp, Homo sapiens
ttatttgtaaatggg

SEQ ID NO: 1749764 - DNA, 15 bp, Homo sapiens
tatttgtaaatggga

SEQ ID NO: 1749765 - DNA, 15 bp, Homo sapiens
atttgtaaatgggaa

SEQ ID NO: 1749766 - DNA, 15 bp, Homo sapiens
tttgtaaatgggaat

SEQ ID NO: 1749767 - DNA, 15 bp, Homo sapiens
ttgtaaatgggaata

SEQ ID NO: 1749768 - DNA, 15 bp, Homo sapiens
tgtaaatgggaatac

SEQ ID NO: 1749769 - DNA, 15 bp, Homo sapiens
gtaaatgggaataca

SEQ ID NO: 1749770 - DNA, 15 bp, Homo sapiens
taaatgggaatacat

SEQ ID NO: 1749771 - DNA, 15 bp, Homo sapiens
aaatgggaatacatt

SEQ ID NO: 1749772 - DNA, 15 bp, Homo sapiens
aatgggaatacatta

SEQ ID NO: 1749773 - DNA, 15 bp, Homo sapiens
atgggaatacattat

SEQ ID NO: 1749774 - DNA, 15 bp, Homo sapiens
tgggaatacattatg

SEQ ID NO: 1749775 - DNA, 15 bp, Homo sapiens
gggaatacattatgc

SEQ ID NO: 1749776 - DNA, 15 bp, Homo sapiens
ggaatacattatgcc

SEQ ID NO: 1749777 - DNA, 15 bp, Homo sapiens
gaatacattatgcct

SEQ ID NO: 1749778 - DNA, 15 bp, Homo sapiens
aatacattatgccta

SEQ ID NO: 1749779 - DNA, 15 bp, Homo sapiens
atacattatgcctac

SEQ ID NO: 1749780 - DNA, 15 bp, Homo sapiens
tacattatgcctacc

SEQ ID NO: 1749781 - DNA, 15 bp, Homo sapiens
acattatgcctacct

SEQ ID NO: 1749782 - DNA, 15 bp, Homo sapiens
cattatgcctacctc

SEQ ID NO: 1749783 - DNA, 15 bp, Homo sapiens
attatgcctacctca

SEQ ID NO: 1749784 - DNA, 15 bp, Homo sapiens
ttatgcctacctcat

SEQ ID NO: 1749785 - DNA, 15 bp, Homo sapiens
tatgcctacctcata

SEQ ID NO: 1749786 - DNA, 15 bp, Homo sapiens
atgcctacctcatac

SEQ ID NO: 1749787 - DNA, 15 bp, Homo sapiens
tgcctacctcataca

SEQ ID NO: 1749788 - DNA, 15 bp, Homo sapiens
gcctacctcatacaa

SEQ ID NO: 1749789 - DNA, 15 bp, Homo sapiens
cctacctcatacaaa

SEQ ID NO: 1749790 - DNA, 15 bp, Homo sapiens
ctacctcatacaaat

SEQ ID NO: 1749791 - DNA, 15 bp, Homo sapiens
tacctcatacaaatg

SEQ ID NO: 1749792 - DNA, 15 bp, Homo sapiens
acctcatacaaatgt

SEQ ID NO: 1749793 - DNA, 15 bp, Homo sapiens
cctcatacaaatgta

SEQ ID NO: 1749794 - DNA, 15 bp, Homo sapiens
ctcatacaaatgtag

SEQ ID NO: 1749795 - DNA, 15 bp, Homo sapiens
tcatacaaatgtagt

SEQ ID NO: 1749796 - DNA, 15 bp, Homo sapiens
catacaaatgtagtg

SEQ ID NO: 1749797 - DNA, 15 bp, Homo sapiens
atacaaatgtagtga

SEQ ID NO: 1749798 - DNA, 15 bp, Homo sapiens
tacaaatgtagtgag

SEQ ID NO: 1749799 - DNA, 15 bp, Homo sapiens
acaaatgtagtgaga

SEQ ID NO: 1749800 - DNA, 15 bp, Homo sapiens
caaatgtagtgagaa

SEQ ID NO: 1749801 - DNA, 15 bp, Homo sapiens
aaatgtagtgagaag

SEQ ID NO: 1749802 - DNA, 15 bp, Homo sapiens
aatgtagtgagaagc

SEQ ID NO: 1749803 - DNA, 15 bp, Homo sapiens
atgtagtgagaagct

SEQ ID NO: 1749804 - DNA, 15 bp, Homo sapiens
tgtagtgagaagctc

SEQ ID NO: 1749805 - DNA, 15 bp, Homo sapiens
gtagtgagaagctca

SEQ ID NO: 1749806 - DNA, 15 bp, Homo sapiens
tagtgagaagctcaa

SEQ ID NO: 1749807 - DNA, 15 bp, Homo sapiens
agtgagaagctcaaa

SEQ ID NO: 1749808 - DNA, 15 bp, Homo sapiens
gtgagaagctcaaaa

SEQ ID NO: 1749809 - DNA, 15 bp, Homo sapiens
tgagaagctcaaaac

SEQ ID NO: 1749810 - DNA, 15 bp, Homo sapiens
gagaagctcaaaacc

SEQ ID NO: 1749811 - DNA, 15 bp, Homo sapiens
agaagctcaaaacca

SEQ ID NO: 1749812 - DNA, 15 bp, Homo sapiens
gaagctcaaaaccac

SEQ ID NO: 1749813 - DNA, 15 bp, Homo sapiens
aagctcaaaaccacc

SEQ ID NO: 1749814 - DNA, 15 bp, Homo sapiens
agctcaaaaccacca

SEQ ID NO: 1749815 - DNA, 15 bp, Homo sapiens
gctcaaaaccaccat

SEQ ID NO: 1749816 - DNA, 15 bp, Homo sapiens
ctcaaaaccaccata

SEQ ID NO: 1749817 - DNA, 15 bp, Homo sapiens
tcaaaaccaccatac

SEQ ID NO: 1749818 - DNA, 15 bp, Homo sapiens
caaaaccaccatact

SEQ ID NO: 1749819 - DNA, 15 bp, Homo sapiens
aaaaccaccatactt

SEQ ID NO: 1749820 - DNA, 15 bp, Homo sapiens
aaaccaccatacttc

SEQ ID NO: 1749821 - DNA, 15 bp, Homo sapiens
aaccaccatacttca

SEQ ID NO: 1749822 - DNA, 15 bp, Homo sapiens
accaccatacttcag

SEQ ID NO: 1749823 - DNA, 15 bp, Homo sapiens
ccaccatacttcagg

SEQ ID NO: 1749824 - DNA, 15 bp, Homo sapiens
caccatacttcaggt

SEQ ID NO: 1749825 - DNA, 15 bp, Homo sapiens
accatacttcaggtt

SEQ ID NO: 1749826 - DNA, 15 bp, Homo sapiens
ccatacttcaggtta

SEQ ID NO: 1749827 - DNA, 15 bp, Homo sapiens
catacttcaggttac

SEQ ID NO: 1749828 - DNA, 15 bp, Homo sapiens
atacttcaggttaca

SEQ ID NO: 1749829 - DNA, 15 bp, Homo sapiens
tacttcaggttacag

SEQ ID NO: 1749830 - DNA, 15 bp, Homo sapiens
acttcaggttacaga

SEQ ID NO: 1749831 - DNA, 15 bp, Homo sapiens
cttcaggttacagac

SEQ ID NO: 1749832 - DNA, 15 bp, Homo sapiens
ttcaggttacagact

SEQ ID NO: 1749833 - DNA, 15 bp, Homo sapiens
tcaggttacagactg

SEQ ID NO: 1749834 - DNA, 15 bp, Homo sapiens
caggttacagactgg

SEQ ID NO: 1749835 - DNA, 15 bp, Homo sapiens
aggttacagactggt

SEQ ID NO: 1749836 - DNA, 15 bp, Homo sapiens
ggttacagactggtg

SEQ ID NO: 1749837 - DNA, 15 bp, Homo sapiens
gttacagactggtgg

SEQ ID NO: 1749838 - DNA, 15 bp, Homo sapiens
ttacagactggtggt

SEQ ID NO: 1749839 - DNA, 15 bp, Homo sapiens
tacagactggtggtt

SEQ ID NO: 1749840 - DNA, 15 bp, Homo sapiens
acagactggtggttg

SEQ ID NO: 1749841 - DNA, 15 bp, Homo sapiens
cagactggtggttga

SEQ ID NO: 1749842 - DNA, 15 bp, Homo sapiens
agactggtggttgag

SEQ ID NO: 1749843 - DNA, 15 bp, Homo sapiens
gactggtggttgagg

SEQ ID NO: 1749844 - DNA, 15 bp, Homo sapiens
actggtggttgaggg

SEQ ID NO: 1749845 - DNA, 15 bp, Homo sapiens
ctggtggttgagggc

SEQ ID NO: 1749846 - DNA, 15 bp, Homo sapiens
tggtggttgagggct

SEQ ID NO: 1749847 - DNA, 15 bp, Homo sapiens
ggtggttgagggctg

SEQ ID NO: 1749848 - DNA, 15 bp, Homo sapiens
gtggttgagggctgc

SEQ ID NO: 1749849 - DNA, 15 bp, Homo sapiens
tggttgagggctgca

SEQ ID NO: 1749850 - DNA, 15 bp, Homo sapiens
ggttgagggctgcat

SEQ ID NO: 1749851 - DNA, 15 bp, Homo sapiens
gttgagggctgcatt

SEQ ID NO: 1749852 - DNA, 15 bp, Homo sapiens
ttgagggctgcattt

SEQ ID NO: 1749853 - DNA, 15 bp, Homo sapiens
tgagggctgcattta

SEQ ID NO: 1749854 - DNA, 15 bp, Homo sapiens
gagggctgcatttag

SEQ ID NO: 1749855 - DNA, 15 bp, Homo sapiens
agggctgcatttaga

SEQ ID NO: 1749856 - DNA, 15 bp, Homo sapiens
gggctgcatttagac

SEQ ID NO: 1749857 - DNA, 15 bp, Homo sapiens
ggctgcatttagact

SEQ ID NO: 1749858 - DNA, 15 bp, Homo sapiens
gctgcatttagactg

SEQ ID NO: 1749859 - DNA, 15 bp, Homo sapiens
ctgcatttagactgc

SEQ ID NO: 1749860 - DNA, 15 bp, Homo sapiens
tgcatttagactgca

SEQ ID NO: 1749861 - DNA, 15 bp, Homo sapiens
gcatttagactgcag

SEQ ID NO: 1749862 - DNA, 15 bp, Homo sapiens
catttagactgcagt

SEQ ID NO: 1749863 - DNA, 15 bp, Homo sapiens
atttagactgcagtc

SEQ ID NO: 1749864 - DNA, 15 bp, Homo sapiens
tttagactgcagtca

SEQ ID NO: 1749865 - DNA, 15 bp, Homo sapiens
ttagactgcagtcat

SEQ ID NO: 1749866 - DNA, 15 bp, Homo sapiens
tagactgcagtcatg

SEQ ID NO: 1749867 - DNA, 15 bp, Homo sapiens
agactgcagtcatgt

SEQ ID NO: 1749868 - DNA, 15 bp, Homo sapiens
gactgcagtcatgtt

SEQ ID NO: 1749869 - DNA, 15 bp, Homo sapiens
actgcagtcatgttt

SEQ ID NO: 1749870 - DNA, 15 bp, Homo sapiens
ctgcagtcatgtttg

SEQ ID NO: 1749871 - DNA, 15 bp, Homo sapiens
tgcagtcatgtttgg

SEQ ID NO: 1749872 - DNA, 15 bp, Homo sapiens
gcagtcatgtttggt

SEQ ID NO: 1749873 - DNA, 15 bp, Homo sapiens
cagtcatgtttggtt

SEQ ID NO: 1749874 - DNA, 15 bp, Homo sapiens
agtcatgtttggttt

SEQ ID NO: 1749875 - DNA, 15 bp, Homo sapiens
gtcatgtttggttta

SEQ ID NO: 1749876 - DNA, 15 bp, Homo sapiens
tcatgtttggtttag

SEQ ID NO: 1749877 - DNA, 15 bp, Homo sapiens
catgtttggtttagc

SEQ ID NO: 1749878 - DNA, 15 bp, Homo sapiens
atgtttggtttagcc

SEQ ID NO: 1749879 - DNA, 15 bp, Homo sapiens
tgtttggtttagccc

SEQ ID NO: 1749880 - DNA, 15 bp, Homo sapiens
gtttggtttagccct

SEQ ID NO: 1749881 - DNA, 15 bp, Homo sapiens
tttggtttagcccta

SEQ ID NO: 1749882 - DNA, 15 bp, Homo sapiens
ttggtttagccctat

SEQ ID NO: 1749883 - DNA, 15 bp, Homo sapiens
tggtttagccctatg

SEQ ID NO: 1749884 - DNA, 15 bp, Homo sapiens
ggtttagccctatgg

SEQ ID NO: 1749885 - DNA, 15 bp, Homo sapiens
gtttagccctatggt

SEQ ID NO: 1749886 - DNA, 15 bp, Homo sapiens
tttagccctatggta

SEQ ID NO: 1749887 - DNA, 15 bp, Homo sapiens
ttagccctatggtac

SEQ ID NO: 1749888 - DNA, 15 bp, Homo sapiens
tagccctatggtact

SEQ ID NO: 1749889 - DNA, 15 bp, Homo sapiens
agccctatggtactt

SEQ ID NO: 1749890 - DNA, 15 bp, Homo sapiens
gccctatggtacttt

SEQ ID NO: 1749891 - DNA, 15 bp, Homo sapiens
ccctatggtactttt

SEQ ID NO: 1749892 - DNA, 15 bp, Homo sapiens
cctatggtactttta

SEQ ID NO: 1749893 - DNA, 15 bp, Homo sapiens
ctatggtacttttaa

SEQ ID NO: 1749894 - DNA, 15 bp, Homo sapiens
tatggtacttttaaa

SEQ ID NO: 1749895 - DNA, 15 bp, Homo sapiens
atggtacttttaaaa

SEQ ID NO: 1749896 - DNA, 15 bp, Homo sapiens
tggtacttttaaaac

SEQ ID NO: 1749897 - DNA, 15 bp, Homo sapiens
ggtacttttaaaaca

SEQ ID NO: 1749898 - DNA, 15 bp, Homo sapiens
gtacttttaaaacaa

SEQ ID NO: 1749899 - DNA, 15 bp, Homo sapiens
tacttttaaaacaat

SEQ ID NO: 1749900 - DNA, 15 bp, Homo sapiens
acttttaaaacaatt

SEQ ID NO: 1749901 - DNA, 15 bp, Homo sapiens
cttttaaaacaatta

SEQ ID NO: 1749902 - DNA, 15 bp, Homo sapiens
ttttaaaacaattat

SEQ ID NO: 1749903 - DNA, 15 bp, Homo sapiens
tttaaaacaattata

SEQ ID NO: 1749904 - DNA, 15 bp, Homo sapiens
ttaaaacaattatag

SEQ ID NO: 1749905 - DNA, 15 bp, Homo sapiens
taaaacaattatagt

SEQ ID NO: 1749906 - DNA, 15 bp, Homo sapiens
aaaacaattatagtt

SEQ ID NO: 1749907 - DNA, 15 bp, Homo sapiens
aaacaattatagttt

SEQ ID NO: 1749908 - DNA, 15 bp, Homo sapiens
aacaattatagtttt

SEQ ID NO: 1749909 - DNA, 15 bp, Homo sapiens
acaattatagttttt

SEQ ID NO: 1749910 - DNA, 15 bp, Homo sapiens
caattatagttttta

SEQ ID NO: 1749911 - DNA, 15 bp, Homo sapiens
aattatagtttttat

SEQ ID NO: 1749912 - DNA, 15 bp, Homo sapiens
attatagtttttatt

SEQ ID NO: 1749913 - DNA, 15 bp, Homo sapiens
ttatagtttttattt

SEQ ID NO: 1749914 - DNA, 15 bp, Homo sapiens
tatagtttttatttt

SEQ ID NO: 1749915 - DNA, 15 bp, Homo sapiens
atagtttttattttg

SEQ ID NO: 1749916 - DNA, 15 bp, Homo sapiens
tagtttttattttga

SEQ ID NO: 1749917 - DNA, 15 bp, Homo sapiens
agtttttattttgag

SEQ ID NO: 1749918 - DNA, 15 bp, Homo sapiens
gtttttattttgaga

SEQ ID NO: 1749919 - DNA, 15 bp, Homo sapiens
tttttattttgagat

SEQ ID NO: 1749920 - DNA, 15 bp, Homo sapiens
ttttattttgagata

SEQ ID NO: 1749921 - DNA, 15 bp, Homo sapiens
tttattttgagataa

SEQ ID NO: 1749922 - DNA, 15 bp, Homo sapiens
ttattttgagataat

SEQ ID NO: 1749923 - DNA, 15 bp, Homo sapiens
tattttgagataatt

SEQ ID NO: 1749924 - DNA, 15 bp, Homo sapiens
attttgagataatta

SEQ ID NO: 1749925 - DNA, 15 bp, Homo sapiens
ttttgagataattat

SEQ ID NO: 1749926 - DNA, 15 bp, Homo sapiens
tttgagataattatg

SEQ ID NO: 1749927 - DNA, 15 bp, Homo sapiens
ttgagataattatgg

SEQ ID NO: 1749928 - DNA, 15 bp, Homo sapiens
tgagataattatgga

SEQ ID NO: 1749929 - DNA, 15 bp, Homo sapiens
gagataattatggat

SEQ ID NO: 1749930 - DNA, 15 bp, Homo sapiens
agataattatggatt

SEQ ID NO: 1749931 - DNA, 15 bp, Homo sapiens
gataattatggattt

SEQ ID NO: 1749932 - DNA, 15 bp, Homo sapiens
ataattatggattta

SEQ ID NO: 1749933 - DNA, 15 bp, Homo sapiens
taattatggatttac

SEQ ID NO: 1749934 - DNA, 15 bp, Homo sapiens
aattatggatttaca

SEQ ID NO: 1749935 - DNA, 15 bp, Homo sapiens
attatggatttacat

SEQ ID NO: 1749936 - DNA, 15 bp, Homo sapiens
ttatggatttacatg

SEQ ID NO: 1749937 - DNA, 15 bp, Homo sapiens
tatggatttacatgt

SEQ ID NO: 1749938 - DNA, 15 bp, Homo sapiens
atggatttacatgta

SEQ ID NO: 1749939 - DNA, 15 bp, Homo sapiens
tggatttacatgtaa

SEQ ID NO: 1749940 - DNA, 15 bp, Homo sapiens
ggatttacatgtaat

SEQ ID NO: 1749941 - DNA, 15 bp, Homo sapiens
gatttacatgtaatt

SEQ ID NO: 1749942 - DNA, 15 bp, Homo sapiens
atttacatgtaattg

SEQ ID NO: 1749943 - DNA, 15 bp, Homo sapiens
tttacatgtaattgt

SEQ ID NO: 1749944 - DNA, 15 bp, Homo sapiens
ttacatgtaattgta

SEQ ID NO: 1749945 - DNA, 15 bp, Homo sapiens
tacatgtaattgtaa

SEQ ID NO: 1749946 - DNA, 15 bp, Homo sapiens
acatgtaattgtaag

SEQ ID NO: 1749947 - DNA, 15 bp, Homo sapiens
catgtaattgtaagg

SEQ ID NO: 1749948 - DNA, 15 bp, Homo sapiens
atgtaattgtaagga

SEQ ID NO: 1749949 - DNA, 15 bp, Homo sapiens
tgtaattgtaaggaa

SEQ ID NO: 1749950 - DNA, 15 bp, Homo sapiens
gtaattgtaaggaat

SEQ ID NO: 1749951 - DNA, 15 bp, Homo sapiens
taattgtaaggaata

SEQ ID NO: 1749952 - DNA, 15 bp, Homo sapiens
aattgtaaggaatac

SEQ ID NO: 1749953 - DNA, 15 bp, Homo sapiens
attgtaaggaataca

SEQ ID NO: 1749954 - DNA, 15 bp, Homo sapiens
ttgtaaggaatacag

SEQ ID NO: 1749955 - DNA, 15 bp, Homo sapiens
tgtaaggaatacaga

SEQ ID NO: 1749956 - DNA, 15 bp, Homo sapiens
gtaaggaatacagag

SEQ ID NO: 1749957 - DNA, 15 bp, Homo sapiens
taaggaatacagaga

SEQ ID NO: 1749958 - DNA, 15 bp, Homo sapiens
aaggaatacagagat

SEQ ID NO: 1749959 - DNA, 15 bp, Homo sapiens
aggaatacagagatc

SEQ ID NO: 1749960 - DNA, 15 bp, Homo sapiens
ggaatacagagatct

SEQ ID NO: 1749961 - DNA, 15 bp, Homo sapiens
gaatacagagatctt

SEQ ID NO: 1749962 - DNA, 15 bp, Homo sapiens
aatacagagatctta

SEQ ID NO: 1749963 - DNA, 15 bp, Homo sapiens
atacagagatcttat

SEQ ID NO: 1749964 - DNA, 15 bp, Homo sapiens
tacagagatcttatg

SEQ ID NO: 1749965 - DNA, 15 bp, Homo sapiens
acagagatcttatgt

SEQ ID NO: 1749966 - DNA, 15 bp, Homo sapiens
cagagatcttatgta

SEQ ID NO: 1749967 - DNA, 15 bp, Homo sapiens
agagatcttatgtac

SEQ ID NO: 1749968 - DNA, 15 bp, Homo sapiens
gagatcttatgtacc

SEQ ID NO: 1749969 - DNA, 15 bp, Homo sapiens
agatcttatgtaccc

SEQ ID NO: 1749970 - DNA, 15 bp, Homo sapiens
gatcttatgtaccct

SEQ ID NO: 1749971 - DNA, 15 bp, Homo sapiens
atcttatgtaccctt

SEQ ID NO: 1749972 - DNA, 15 bp, Homo sapiens
tcttatgtacccttt

SEQ ID NO: 1749973 - DNA, 15 bp, Homo sapiens
cttatgtacccttta

SEQ ID NO: 1749974 - DNA, 15 bp, Homo sapiens
ttatgtaccctttac

SEQ ID NO: 1749975 - DNA, 15 bp, Homo sapiens
tatgtaccctttacc

SEQ ID NO: 1749976 - DNA, 15 bp, Homo sapiens
atgtaccctttacct

SEQ ID NO: 1749977 - DNA, 15 bp, Homo sapiens
tgtaccctttaccta

SEQ ID NO: 1749978 - DNA, 15 bp, Homo sapiens
gtaccctttacctag

SEQ ID NO: 1749979 - DNA, 15 bp, Homo sapiens
taccctttacctagt

SEQ ID NO: 1749980 - DNA, 15 bp, Homo sapiens
accctttacctagtt

SEQ ID NO: 1749981 - DNA, 15 bp, Homo sapiens
ccctttacctagttt

SEQ ID NO: 1749982 - DNA, 15 bp, Homo sapiens
cctttacctagtttc

SEQ ID NO: 1749983 - DNA, 15 bp, Homo sapiens
ctttacctagtttct

SEQ ID NO: 1749984 - DNA, 15 bp, Homo sapiens
tttacctagtttctg

SEQ ID NO: 1749985 - DNA, 15 bp, Homo sapiens
ttacctagtttctgc

SEQ ID NO: 1749986 - DNA, 15 bp, Homo sapiens
tacctagtttctgcc

SEQ ID NO: 1749987 - DNA, 15 bp, Homo sapiens
acctagtttctgcca

SEQ ID NO: 1749988 - DNA, 15 bp, Homo sapiens
cctagtttctgccaa

SEQ ID NO: 1749989 - DNA, 15 bp, Homo sapiens
ctagtttctgccaat

SEQ ID NO: 1749990 - DNA, 15 bp, Homo sapiens
tagtttctgccaatg

SEQ ID NO: 1749991 - DNA, 15 bp, Homo sapiens
agtttctgccaatga

SEQ ID NO: 1749992 - DNA, 15 bp, Homo sapiens
gtttctgccaatgac

SEQ ID NO: 1749993 - DNA, 15 bp, Homo sapiens
tttctgccaatgaca

SEQ ID NO: 1749994 - DNA, 15 bp, Homo sapiens
ttctgccaatgacaa

SEQ ID NO: 1749995 - DNA, 15 bp, Homo sapiens
tctgccaatgacaat

SEQ ID NO: 1749996 - DNA, 15 bp, Homo sapiens
ctgccaatgacaata

SEQ ID NO: 1749997 - DNA, 15 bp, Homo sapiens
tgccaatgacaatat

SEQ ID NO: 1749998 - DNA, 15 bp, Homo sapiens
gccaatgacaatatc

SEQ ID NO: 1749999 - DNA, 15 bp, Homo sapiens
ccaatgacaatatct

SEQ ID NO: 1750000 - DNA, 15 bp, Homo sapiens
caatgacaatatctt

SEQ ID NO: 1750001 - DNA, 15 bp, Homo sapiens
aatgacaatatcttg

SEQ ID NO: 1750002 - DNA, 15 bp, Homo sapiens
atgacaatatcttgc

SEQ ID NO: 1750003 - DNA, 15 bp, Homo sapiens
tgacaatatcttgca

SEQ ID NO: 1750004 - DNA, 15 bp, Homo sapiens
gacaatatcttgcaa

SEQ ID NO: 1750005 - DNA, 15 bp, Homo sapiens
acaatatcttgcaaa

SEQ ID NO: 1750006 - DNA, 15 bp, Homo sapiens
caatatcttgcaaaa

SEQ ID NO: 1750007 - DNA, 15 bp, Homo sapiens
aatatcttgcaaaac

SEQ ID NO: 1750008 - DNA, 15 bp, Homo sapiens
atatcttgcaaaact

SEQ ID NO: 1750009 - DNA, 15 bp, Homo sapiens
tatcttgcaaaacta

SEQ ID NO: 1750010 - DNA, 15 bp, Homo sapiens
atcttgcaaaactag

SEQ ID NO: 1750011 - DNA, 15 bp, Homo sapiens
tcttgcaaaactagt

SEQ ID NO: 1750012 - DNA, 15 bp, Homo sapiens
cttgcaaaactagta

SEQ ID NO: 1750013 - DNA, 15 bp, Homo sapiens
ttgcaaaactagtat

SEQ ID NO: 1750014 - DNA, 15 bp, Homo sapiens
tgcaaaactagtata

SEQ ID NO: 1750015 - DNA, 15 bp, Homo sapiens
gcaaaactagtatac

SEQ ID NO: 1750016 - DNA, 15 bp, Homo sapiens
caaaactagtataca

SEQ ID NO: 1750017 - DNA, 15 bp, Homo sapiens
aaaactagtatacag

SEQ ID NO: 1750018 - DNA, 15 bp, Homo sapiens
aaactagtatacagt

SEQ ID NO: 1750019 - DNA, 15 bp, Homo sapiens
aactagtatacagta

SEQ ID NO: 1750020 - DNA, 15 bp, Homo sapiens
actagtatacagtat

SEQ ID NO: 1750021 - DNA, 15 bp, Homo sapiens
ctagtatacagtatc

SEQ ID NO: 1750022 - DNA, 15 bp, Homo sapiens
tagtatacagtatca

SEQ ID NO: 1750023 - DNA, 15 bp, Homo sapiens
agtatacagtatcac

SEQ ID NO: 1750024 - DNA, 15 bp, Homo sapiens
gtatacagtatcaca

SEQ ID NO: 1750025 - DNA, 15 bp, Homo sapiens
tatacagtatcacaa

SEQ ID NO: 1750026 - DNA, 15 bp, Homo sapiens
atacagtatcacaag

SEQ ID NO: 1750027 - DNA, 15 bp, Homo sapiens
tacagtatcacaagc

SEQ ID NO: 1750028 - DNA, 15 bp, Homo sapiens
acagtatcacaagca

SEQ ID NO: 1750029 - DNA, 15 bp, Homo sapiens
cagtatcacaagcag

SEQ ID NO: 1750030 - DNA, 15 bp, Homo sapiens
agtatcacaagcagg

SEQ ID NO: 1750031 - DNA, 15 bp, Homo sapiens
gtatcacaagcagga

SEQ ID NO: 1750032 - DNA, 15 bp, Homo sapiens
tatcacaagcaggat

SEQ ID NO: 1750033 - DNA, 15 bp, Homo sapiens
atcacaagcaggata

SEQ ID NO: 1750034 - DNA, 15 bp, Homo sapiens
tcacaagcaggatac

SEQ ID NO: 1750035 - DNA, 15 bp, Homo sapiens
cacaagcaggatact

SEQ ID NO: 1750036 - DNA, 15 bp, Homo sapiens
acaagcaggatactg

SEQ ID NO: 1750037 - DNA, 15 bp, Homo sapiens
caagcaggatactga

SEQ ID NO: 1750038 - DNA, 15 bp, Homo sapiens
aagcaggatactgat

SEQ ID NO: 1750039 - DNA, 15 bp, Homo sapiens
agcaggatactgata

SEQ ID NO: 1750040 - DNA, 15 bp, Homo sapiens
gcaggatactgatat

SEQ ID NO: 1750041 - DNA, 15 bp, Homo sapiens
caggatactgatatt

SEQ ID NO: 1750042 - DNA, 15 bp, Homo sapiens
aggatactgatattg

SEQ ID NO: 1750043 - DNA, 15 bp, Homo sapiens
ggatactgatattga

SEQ ID NO: 1750044 - DNA, 15 bp, Homo sapiens
gatactgatattgat

SEQ ID NO: 1750045 - DNA, 15 bp, Homo sapiens
atactgatattgata

SEQ ID NO: 1750046 - DNA, 15 bp, Homo sapiens
tactgatattgatac

SEQ ID NO: 1750047 - DNA, 15 bp, Homo sapiens
actgatattgataca

SEQ ID NO: 1750048 - DNA, 15 bp, Homo sapiens
ctgatattgatacac

SEQ ID NO: 1750049 - DNA, 15 bp, Homo sapiens
tgatattgatacact

SEQ ID NO: 1750050 - DNA, 15 bp, Homo sapiens
gatattgatacactc

SEQ ID NO: 1750051 - DNA, 15 bp, Homo sapiens
atattgatacactcc

SEQ ID NO: 1750052 - DNA, 15 bp, Homo sapiens
tattgatacactcca

SEQ ID NO: 1750053 - DNA, 15 bp, Homo sapiens
attgatacactccac

SEQ ID NO: 1750054 - DNA, 15 bp, Homo sapiens
ttgatacactccact

SEQ ID NO: 1750055 - DNA, 15 bp, Homo sapiens
tgatacactccactc

SEQ ID NO: 1750056 - DNA, 15 bp, Homo sapiens
gatacactccactca

SEQ ID NO: 1750057 - DNA, 15 bp, Homo sapiens
atacactccactcat

SEQ ID NO: 1750058 - DNA, 15 bp, Homo sapiens
tacactccactcatc

SEQ ID NO: 1750059 - DNA, 15 bp, Homo sapiens
acactccactcatct

SEQ ID NO: 1750060 - DNA, 15 bp, Homo sapiens
cactccactcatctt

SEQ ID NO: 1750061 - DNA, 15 bp, Homo sapiens
actccactcatctta

SEQ ID NO: 1750062 - DNA, 15 bp, Homo sapiens
ctccactcatcttat

SEQ ID NO: 1750063 - DNA, 15 bp, Homo sapiens
tccactcatcttatt

SEQ ID NO: 1750064 - DNA, 15 bp, Homo sapiens
ccactcatcttattc

SEQ ID NO: 1750065 - DNA, 15 bp, Homo sapiens
cactcatcttattca

SEQ ID NO: 1750066 - DNA, 15 bp, Homo sapiens
actcatcttattcag

SEQ ID NO: 1750067 - DNA, 15 bp, Homo sapiens
ctcatcttattcaga

SEQ ID NO: 1750068 - DNA, 15 bp, Homo sapiens
tcatcttattcagac

SEQ ID NO: 1750069 - DNA, 15 bp, Homo sapiens
catcttattcagact

SEQ ID NO: 1750070 - DNA, 15 bp, Homo sapiens
atcttattcagactt

SEQ ID NO: 1750071 - DNA, 15 bp, Homo sapiens
tcttattcagacttc

SEQ ID NO: 1750072 - DNA, 15 bp, Homo sapiens
cttattcagacttcc

SEQ ID NO: 1750073 - DNA, 15 bp, Homo sapiens
ttattcagacttccc

SEQ ID NO: 1750074 - DNA, 15 bp, Homo sapiens
tattcagacttccct

SEQ ID NO: 1750075 - DNA, 15 bp, Homo sapiens
attcagacttccctt

SEQ ID NO: 1750076 - DNA, 15 bp, Homo sapiens
ttcagacttcccttg

SEQ ID NO: 1750077 - DNA, 15 bp, Homo sapiens
tcagacttcccttgt

SEQ ID NO: 1750078 - DNA, 15 bp, Homo sapiens
cagacttcccttgtt

SEQ ID NO: 1750079 - DNA, 15 bp, Homo sapiens
agacttcccttgttt

SEQ ID NO: 1750080 - DNA, 15 bp, Homo sapiens
gacttcccttgtttt

SEQ ID NO: 1750081 - DNA, 15 bp, Homo sapiens
acttcccttgtttta

SEQ ID NO: 1750082 - DNA, 15 bp, Homo sapiens
cttcccttgttttac

SEQ ID NO: 1750083 - DNA, 15 bp, Homo sapiens
ttcccttgttttact

SEQ ID NO: 1750084 - DNA, 15 bp, Homo sapiens
tcccttgttttactt

SEQ ID NO: 1750085 - DNA, 15 bp, Homo sapiens
cccttgttttacttg

SEQ ID NO: 1750086 - DNA, 15 bp, Homo sapiens
ccttgttttacttgc

SEQ ID NO: 1750087 - DNA, 15 bp, Homo sapiens
cttgttttacttgca

SEQ ID NO: 1750088 - DNA, 15 bp, Homo sapiens
ttgttttacttgcat

SEQ ID NO: 1750089 - DNA, 15 bp, Homo sapiens
tgttttacttgcatt

SEQ ID NO: 1750090 - DNA, 15 bp, Homo sapiens
gttttacttgcattc

SEQ ID NO: 1750091 - DNA, 15 bp, Homo sapiens
ttttacttgcattca

SEQ ID NO: 1750092 - DNA, 15 bp, Homo sapiens
tttacttgcattcat

SEQ ID NO: 1750093 - DNA, 15 bp, Homo sapiens
ttacttgcattcatt

SEQ ID NO: 1750094 - DNA, 15 bp, Homo sapiens
tacttgcattcattt

SEQ ID NO: 1750095 - DNA, 15 bp, Homo sapiens
acttgcattcatttg

SEQ ID NO: 1750096 - DNA, 15 bp, Homo sapiens
cttgcattcatttgc

SEQ ID NO: 1750097 - DNA, 15 bp, Homo sapiens
ttgcattcatttgca

SEQ ID NO: 1750098 - DNA, 15 bp, Homo sapiens
tgcattcatttgcat

SEQ ID NO: 1750099 - DNA, 15 bp, Homo sapiens
gcattcatttgcata

SEQ ID NO: 1750100 - DNA, 15 bp, Homo sapiens
cattcatttgcatat

SEQ ID NO: 1750101 - DNA, 15 bp, Homo sapiens
attcatttgcatatg

SEQ ID NO: 1750102 - DNA, 15 bp, Homo sapiens
ttcatttgcatatgg

SEQ ID NO: 1750103 - DNA, 15 bp, Homo sapiens
tcatttgcatatgga

SEQ ID NO: 1750104 - DNA, 15 bp, Homo sapiens
catttgcatatggat

SEQ ID NO: 1750105 - DNA, 15 bp, Homo sapiens
atttgcatatggatt

SEQ ID NO: 1750106 - DNA, 15 bp, Homo sapiens
tttgcatatggattt

SEQ ID NO: 1750107 - DNA, 15 bp, Homo sapiens
ttgcatatggattta

SEQ ID NO: 1750108 - DNA, 15 bp, Homo sapiens
tgcatatggatttag

SEQ ID NO: 1750109 - DNA, 15 bp, Homo sapiens
gcatatggatttagt

SEQ ID NO: 1750110 - DNA, 15 bp, Homo sapiens
catatggatttagtt

SEQ ID NO: 1750111 - DNA, 15 bp, Homo sapiens
atatggatttagttc

SEQ ID NO: 1750112 - DNA, 15 bp, Homo sapiens
tatggatttagttct

SEQ ID NO: 1750113 - DNA, 15 bp, Homo sapiens
atggatttagttctg

SEQ ID NO: 1750114 - DNA, 15 bp, Homo sapiens
tggatttagttctgt

SEQ ID NO: 1750115 - DNA, 15 bp, Homo sapiens
ttagttctgtgcagc

SEQ ID NO: 1750116 - DNA, 15 bp, Homo sapiens
tagttctgtgcagct

SEQ ID NO: 1750117 - DNA, 15 bp, Homo sapiens
agttctgtgcagctg

SEQ ID NO: 1750118 - DNA, 15 bp, Homo sapiens
gttctgtgcagctgt

SEQ ID NO: 1750119 - DNA, 15 bp, Homo sapiens
ttctgtgcagctgta

SEQ ID NO: 1750120 - DNA, 15 bp, Homo sapiens
tctgtgcagctgtat

SEQ ID NO: 1750121 - DNA, 15 bp, Homo sapiens
ctgtgcagctgtatt

SEQ ID NO: 1750122 - DNA, 15 bp, Homo sapiens
tgtgcagctgtattg

SEQ ID NO: 1750123 - DNA, 15 bp, Homo sapiens
gtgcagctgtattgc

SEQ ID NO: 1750124 - DNA, 15 bp, Homo sapiens
tgcagctgtattgca

SEQ ID NO: 1750125 - DNA, 15 bp, Homo sapiens
gcagctgtattgcag

SEQ ID NO: 1750126 - DNA, 15 bp, Homo sapiens
cagctgtattgcaga

SEQ ID NO: 1750127 - DNA, 15 bp, Homo sapiens
agctgtattgcagat

SEQ ID NO: 1750128 - DNA, 15 bp, Homo sapiens
gctgtattgcagatg

SEQ ID NO: 1750129 - DNA, 15 bp, Homo sapiens
tattgcagatgggga

SEQ ID NO: 1750130 - DNA, 15 bp, Homo sapiens
attgcagatggggat

SEQ ID NO: 1750131 - DNA, 15 bp, Homo sapiens
ttgcagatggggatt

SEQ ID NO: 1750132 - DNA, 15 bp, Homo sapiens
tgcagatggggattc

SEQ ID NO: 1750133 - DNA, 15 bp, Homo sapiens
gcagatggggattca

SEQ ID NO: 1750134 - DNA, 15 bp, Homo sapiens
cagatggggattcat

SEQ ID NO: 1750135 - DNA, 15 bp, Homo sapiens
agatggggattcata

SEQ ID NO: 1750136 - DNA, 15 bp, Homo sapiens
gatggggattcatag

SEQ ID NO: 1750137 - DNA, 15 bp, Homo sapiens
atggggattcataga

SEQ ID NO: 1750138 - DNA, 15 bp, Homo sapiens
tggggattcatagat

SEQ ID NO: 1750139 - DNA, 15 bp, Homo sapiens
ggggattcatagatc

SEQ ID NO: 1750140 - DNA, 15 bp, Homo sapiens
gggattcatagatcc

SEQ ID NO: 1750141 - DNA, 15 bp, Homo sapiens
ggattcatagatcca

SEQ ID NO: 1750142 - DNA, 15 bp, Homo sapiens
gattcatagatccac

SEQ ID NO: 1750143 - DNA, 15 bp, Homo sapiens
attcatagatccact

SEQ ID NO: 1750144 - DNA, 15 bp, Homo sapiens
ttcatagatccacta

SEQ ID NO: 1750145 - DNA, 15 bp, Homo sapiens
tcatagatccactaa

SEQ ID NO: 1750146 - DNA, 15 bp, Homo sapiens
catagatccactaat

SEQ ID NO: 1750147 - DNA, 15 bp, Homo sapiens
atagatccactaatt

SEQ ID NO: 1750148 - DNA, 15 bp, Homo sapiens
tagatccactaatta

SEQ ID NO: 1750149 - DNA, 15 bp, Homo sapiens
agatccactaattaa

SEQ ID NO: 1750150 - DNA, 15 bp, Homo sapiens
gatccactaattaag

SEQ ID NO: 1750151 - DNA, 15 bp, Homo sapiens
atccactaattaaga

SEQ ID NO: 1750152 - DNA, 15 bp, Homo sapiens
tccactaattaagaa

SEQ ID NO: 1750153 - DNA, 15 bp, Homo sapiens
ccactaattaagaac

SEQ ID NO: 1750154 - DNA, 15 bp, Homo sapiens
cactaattaagaaca

SEQ ID NO: 1750155 - DNA, 15 bp, Homo sapiens
actaattaagaacac

SEQ ID NO: 1750156 - DNA, 15 bp, Homo sapiens
ctaattaagaacact

SEQ ID NO: 1750157 - DNA, 15 bp, Homo sapiens
taattaagaacactg

SEQ ID NO: 1750158 - DNA, 15 bp, Homo sapiens
aattaagaacactgg

SEQ ID NO: 1750159 - DNA, 15 bp, Homo sapiens
attaagaacactggc

SEQ ID NO: 1750160 - DNA, 15 bp, Homo sapiens
ttaagaacactggcc

SEQ ID NO: 1750161 - DNA, 15 bp, Homo sapiens
taagaacactggcca

SEQ ID NO: 1750162 - DNA, 15 bp, Homo sapiens
aagaacactggccag

SEQ ID NO: 1750163 - DNA, 15 bp, Homo sapiens
agaacactggccagg

SEQ ID NO: 1750164 - DNA, 15 bp, Homo sapiens
gaacactggccaggc

SEQ ID NO: 1750165 - DNA, 15 bp, Homo sapiens
aacactggccaggca

SEQ ID NO: 1750166 - DNA, 15 bp, Homo sapiens
acactggccaggcac

SEQ ID NO: 1750167 - DNA, 15 bp, Homo sapiens
cactggccaggcacg

SEQ ID NO: 1750168 - DNA, 15 bp, Homo sapiens
actggccaggcacgg

SEQ ID NO: 1750169 - DNA, 15 bp, Homo sapiens
ctggccaggcacggt

SEQ ID NO: 1750170 - DNA, 15 bp, Homo sapiens
tggccaggcacggtg

SEQ ID NO: 1750171 - DNA, 15 bp, Homo sapiens
tcacacctgtaatct

SEQ ID NO: 1750172 - DNA, 15 bp, Homo sapiens
cacacctgtaatctc

SEQ ID NO: 1750173 - DNA, 15 bp, Homo sapiens
acacctgtaatctca

SEQ ID NO: 1750174 - DNA, 15 bp, Homo sapiens
cacctgtaatctcag

SEQ ID NO: 1750175 - DNA, 15 bp, Homo sapiens
acctgtaatctcagc

SEQ ID NO: 1750176 - DNA, 15 bp, Homo sapiens
aaggtgggtggatta

SEQ ID NO: 1750177 - DNA, 15 bp, Homo sapiens
aggtgggtggattac

SEQ ID NO: 1750178 - DNA, 15 bp, Homo sapiens
ggtgggtggattacg

SEQ ID NO: 1750179 - DNA, 15 bp, Homo sapiens
gtgggtggattacga

SEQ ID NO: 1750180 - DNA, 15 bp, Homo sapiens
tgggtggattacgag

SEQ ID NO: 1750181 - DNA, 15 bp, Homo sapiens
gggtggattacgagg

SEQ ID NO: 1750182 - DNA, 15 bp, Homo sapiens
ggtggattacgaggt

SEQ ID NO: 1750183 - DNA, 15 bp, Homo sapiens
gtggattacgaggtc

SEQ ID NO: 1750184 - DNA, 15 bp, Homo sapiens
tggattacgaggtca

SEQ ID NO: 1750185 - DNA, 15 bp, Homo sapiens
ggattacgaggtcag

SEQ ID NO: 1750186 - DNA, 15 bp, Homo sapiens
gtctctactaaaaac

SEQ ID NO: 1750187 - DNA, 15 bp, Homo sapiens
tctctactaaaaaca

SEQ ID NO: 1750188 - DNA, 15 bp, Homo sapiens
ctctactaaaaacac

SEQ ID NO: 1750189 - DNA, 15 bp, Homo sapiens
tctactaaaaacaca

SEQ ID NO: 1750190 - DNA, 15 bp, Homo sapiens
ctactaaaaacacaa

SEQ ID NO: 1750191 - DNA, 15 bp, Homo sapiens
tactaaaaacacaaa

SEQ ID NO: 1750192 - DNA, 15 bp, Homo sapiens
actaaaaacacaaaa

SEQ ID NO: 1750193 - DNA, 15 bp, Homo sapiens
ctaaaaacacaaaaa

SEQ ID NO: 1750194 - DNA, 15 bp, Homo sapiens
taaaaacacaaaaat

SEQ ID NO: 1750195 - DNA, 15 bp, Homo sapiens
aaaaacacaaaaatc

SEQ ID NO: 1750196 - DNA, 15 bp, Homo sapiens
aaaacacaaaaatca

SEQ ID NO: 1750197 - DNA, 15 bp, Homo sapiens
aaacacaaaaatcaa

SEQ ID NO: 1750198 - DNA, 15 bp, Homo sapiens
aacacaaaaatcaac

SEQ ID NO: 1750199 - DNA, 15 bp, Homo sapiens
acacaaaaatcaacc

SEQ ID NO: 1750200 - DNA, 15 bp, Homo sapiens
cacaaaaatcaacca

SEQ ID NO: 1750201 - DNA, 15 bp, Homo sapiens
acaaaaatcaaccag

SEQ ID NO: 1750202 - DNA, 15 bp, Homo sapiens
caaaaatcaaccagg

SEQ ID NO: 1750203 - DNA, 15 bp, Homo sapiens
aaaaatcaaccaggc

SEQ ID NO: 1750204 - DNA, 15 bp, Homo sapiens
aaaatcaaccaggcg

SEQ ID NO: 1750205 - DNA, 15 bp, Homo sapiens
aaatcaaccaggcgt

SEQ ID NO: 1750206 - DNA, 15 bp, Homo sapiens
aatcaaccaggcgtc

SEQ ID NO: 1750207 - DNA, 15 bp, Homo sapiens
atcaaccaggcgtcg

SEQ ID NO: 1750208 - DNA, 15 bp, Homo sapiens
tcaaccaggcgtcgt

SEQ ID NO: 1750209 - DNA, 15 bp, Homo sapiens
caaccaggcgtcgtg

SEQ ID NO: 1750210 - DNA, 15 bp, Homo sapiens
aaccaggcgtcgtgg

SEQ ID NO: 1750211 - DNA, 15 bp, Homo sapiens
accaggcgtcgtggt

SEQ ID NO: 1750212 - DNA, 15 bp, Homo sapiens
ccaggcgtcgtggtg

SEQ ID NO: 1750213 - DNA, 15 bp, Homo sapiens
caggcgtcgtggtgg

SEQ ID NO: 1750214 - DNA, 15 bp, Homo sapiens
aggcgtcgtggtggg

SEQ ID NO: 1750215 - DNA, 15 bp, Homo sapiens
ggcgtcgtggtgggc

SEQ ID NO: 1750216 - DNA, 15 bp, Homo sapiens
gcgtcgtggtgggca

SEQ ID NO: 1750217 - DNA, 15 bp, Homo sapiens
cgtcgtggtgggcac

SEQ ID NO: 1750218 - DNA, 15 bp, Homo sapiens
gtcgtggtgggcacc

SEQ ID NO: 1750219 - DNA, 15 bp, Homo sapiens
tcgtggtgggcacct

SEQ ID NO: 1750220 - DNA, 15 bp, Homo sapiens
cgtggtgggcacctg

SEQ ID NO: 1750221 - DNA, 15 bp, Homo sapiens
tggtgggcacctgta

SEQ ID NO: 1750222 - DNA, 15 bp, Homo sapiens
ggtgggcacctgtag

SEQ ID NO: 1750223 - DNA, 15 bp, Homo sapiens
gtgggcacctgtagt

SEQ ID NO: 1750224 - DNA, 15 bp, Homo sapiens
tgggcacctgtagtt

SEQ ID NO: 1750225 - DNA, 15 bp, Homo sapiens
gggcacctgtagttg

SEQ ID NO: 1750226 - DNA, 15 bp, Homo sapiens
ggcacctgtagttgc

SEQ ID NO: 1750227 - DNA, 15 bp, Homo sapiens
gcacctgtagttgca

SEQ ID NO: 1750228 - DNA, 15 bp, Homo sapiens
cacctgtagttgcag

SEQ ID NO: 1750229 - DNA, 15 bp, Homo sapiens
acctgtagttgcagc

SEQ ID NO: 1750230 - DNA, 15 bp, Homo sapiens
cctgtagttgcagct

SEQ ID NO: 1750231 - DNA, 15 bp, Homo sapiens
ctgtagttgcagcta

SEQ ID NO: 1750232 - DNA, 15 bp, Homo sapiens
tgtagttgcagctac

SEQ ID NO: 1750233 - DNA, 15 bp, Homo sapiens
gtagttgcagctact

SEQ ID NO: 1750234 - DNA, 15 bp, Homo sapiens
tagttgcagctactc

SEQ ID NO: 1750235 - DNA, 15 bp, Homo sapiens
agttgcagctactca

SEQ ID NO: 1750236 - DNA, 15 bp, Homo sapiens
gttgcagctactcag

SEQ ID NO: 1750237 - DNA, 15 bp, Homo sapiens
ttgcagctactcagg

SEQ ID NO: 1750238 - DNA, 15 bp, Homo sapiens
tgcagctactcagga

SEQ ID NO: 1750239 - DNA, 15 bp, Homo sapiens
gcagctactcaggag

SEQ ID NO: 1750240 - DNA, 15 bp, Homo sapiens
gaggcgggagaatcg

SEQ ID NO: 1750241 - DNA, 15 bp, Homo sapiens
aggcgggagaatcgc

SEQ ID NO: 1750242 - DNA, 15 bp, Homo sapiens
ggcgggagaatcgcc

SEQ ID NO: 1750243 - DNA, 15 bp, Homo sapiens
gcgggagaatcgcct

SEQ ID NO: 1750244 - DNA, 15 bp, Homo sapiens
cgggagaatcgcctg

SEQ ID NO: 1750245 - DNA, 15 bp, Homo sapiens
gggagaatcgcctga

SEQ ID NO: 1750246 - DNA, 15 bp, Homo sapiens
ggagaatcgcctgaa

SEQ ID NO: 1750247 - DNA, 15 bp, Homo sapiens
gagaatcgcctgaac

SEQ ID NO: 1750248 - DNA, 15 bp, Homo sapiens
agaatcgcctgaacc

SEQ ID NO: 1750249 - DNA, 15 bp, Homo sapiens
gaatcgcctgaacct

SEQ ID NO: 1750250 - DNA, 15 bp, Homo sapiens
aatcgcctgaacctg

SEQ ID NO: 1750251 - DNA, 15 bp, Homo sapiens
atcgcctgaacctga

SEQ ID NO: 1750252 - DNA, 15 bp, Homo sapiens
tcgcctgaacctgag

SEQ ID NO: 1750253 - DNA, 15 bp, Homo sapiens
cgcctgaacctgaga

SEQ ID NO: 1750254 - DNA, 15 bp, Homo sapiens
gcctgaacctgagaa

SEQ ID NO: 1750255 - DNA, 15 bp, Homo sapiens
cctgaacctgagaaa

SEQ ID NO: 1750256 - DNA, 15 bp, Homo sapiens
ctgaacctgagaaac

SEQ ID NO: 1750257 - DNA, 15 bp, Homo sapiens
tgaacctgagaaacg

SEQ ID NO: 1750258 - DNA, 15 bp, Homo sapiens
gaacctgagaaacgg

SEQ ID NO: 1750259 - DNA, 15 bp, Homo sapiens
aacctgagaaacgga

SEQ ID NO: 1750260 - DNA, 15 bp, Homo sapiens
acctgagaaacggag

SEQ ID NO: 1750261 - DNA, 15 bp, Homo sapiens
cctgagaaacggagg

SEQ ID NO: 1750262 - DNA, 15 bp, Homo sapiens
ctgagaaacggaggt

SEQ ID NO: 1750263 - DNA, 15 bp, Homo sapiens
tgagaaacggaggtt

SEQ ID NO: 1750264 - DNA, 15 bp, Homo sapiens
gagaaacggaggtta

SEQ ID NO: 1750265 - DNA, 15 bp, Homo sapiens
agaaacggaggttaa

SEQ ID NO: 1750266 - DNA, 15 bp, Homo sapiens
gaaacggaggttaaa

SEQ ID NO: 1750267 - DNA, 15 bp, Homo sapiens
aaacggaggttaaag

SEQ ID NO: 1750268 - DNA, 15 bp, Homo sapiens
aacggaggttaaagt

SEQ ID NO: 1750269 - DNA, 15 bp, Homo sapiens
acggaggttaaagtg

SEQ ID NO: 1750270 - DNA, 15 bp, Homo sapiens
cggaggttaaagtga

SEQ ID NO: 1750271 - DNA, 15 bp, Homo sapiens
ggaggttaaagtgat

SEQ ID NO: 1750272 - DNA, 15 bp, Homo sapiens
gaggttaaagtgatc

SEQ ID NO: 1750273 - DNA, 15 bp, Homo sapiens
aggttaaagtgatcc

SEQ ID NO: 1750274 - DNA, 15 bp, Homo sapiens
ggttaaagtgatcca

SEQ ID NO: 1750275 - DNA, 15 bp, Homo sapiens
gttaaagtgatccaa

SEQ ID NO: 1750276 - DNA, 15 bp, Homo sapiens
ttaaagtgatccaag

SEQ ID NO: 1750277 - DNA, 15 bp, Homo sapiens
taaagtgatccaaga

SEQ ID NO: 1750278 - DNA, 15 bp, Homo sapiens
aaagtgatccaagat

SEQ ID NO: 1750279 - DNA, 15 bp, Homo sapiens
aagtgatccaagatc

SEQ ID NO: 1750280 - DNA, 15 bp, Homo sapiens
agtgatccaagatca

SEQ ID NO: 1750281 - DNA, 15 bp, Homo sapiens
gtgatccaagatcac

SEQ ID NO: 1750282 - DNA, 15 bp, Homo sapiens
tgatccaagatcaca

SEQ ID NO: 1750283 - DNA, 15 bp, Homo sapiens
gatccaagatcacac

SEQ ID NO: 1750284 - DNA, 15 bp, Homo sapiens
atccaagatcacacc

SEQ ID NO: 1750285 - DNA, 15 bp, Homo sapiens
tccaagatcacacca

SEQ ID NO: 1750286 - DNA, 15 bp, Homo sapiens
ccaagatcacaccat

SEQ ID NO: 1750287 - DNA, 15 bp, Homo sapiens
caagatcacaccatt

SEQ ID NO: 1750288 - DNA, 15 bp, Homo sapiens
aaaaaaaagatacag

SEQ ID NO: 1750289 - DNA, 15 bp, Homo sapiens
aaaaaaagatacaga

SEQ ID NO: 1750290 - DNA, 15 bp, Homo sapiens
aaaaaagatacagaa

SEQ ID NO: 1750291 - DNA, 15 bp, Homo sapiens
aaaaagatacagaac

SEQ ID NO: 1750292 - DNA, 15 bp, Homo sapiens
aaaagatacagaaca

SEQ ID NO: 1750293 - DNA, 15 bp, Homo sapiens
aaagatacagaacat

SEQ ID NO: 1750294 - DNA, 15 bp, Homo sapiens
aagatacagaacatt

SEQ ID NO: 1750295 - DNA, 15 bp, Homo sapiens
agatacagaacattc

SEQ ID NO: 1750296 - DNA, 15 bp, Homo sapiens
gatacagaacattct

SEQ ID NO: 1750297 - DNA, 15 bp, Homo sapiens
atacagaacattctc

SEQ ID NO: 1750298 - DNA, 15 bp, Homo sapiens
tacagaacattctca

SEQ ID NO: 1750299 - DNA, 15 bp, Homo sapiens
acagaacattctcat

SEQ ID NO: 1750300 - DNA, 15 bp, Homo sapiens
cagaacattctcatc

SEQ ID NO: 1750301 - DNA, 15 bp, Homo sapiens
agaacattctcatct

SEQ ID NO: 1750302 - DNA, 15 bp, Homo sapiens
gaacattctcatctc

SEQ ID NO: 1750303 - DNA, 15 bp, Homo sapiens
aacattctcatctcc

SEQ ID NO: 1750304 - DNA, 15 bp, Homo sapiens
acattctcatctcca

SEQ ID NO: 1750305 - DNA, 15 bp, Homo sapiens
cattctcatctccat

SEQ ID NO: 1750306 - DNA, 15 bp, Homo sapiens
attctcatctccata

SEQ ID NO: 1750307 - DNA, 15 bp, Homo sapiens
ttctcatctccataa

SEQ ID NO: 1750308 - DNA, 15 bp, Homo sapiens
tctcatctccataaa

SEQ ID NO: 1750309 - DNA, 15 bp, Homo sapiens
ctcatctccataaag

SEQ ID NO: 1750310 - DNA, 15 bp, Homo sapiens
tcatctccataaaga

SEQ ID NO: 1750311 - DNA, 15 bp, Homo sapiens
catctccataaagat

SEQ ID NO: 1750312 - DNA, 15 bp, Homo sapiens
atctccataaagatc

SEQ ID NO: 1750313 - DNA, 15 bp, Homo sapiens
tctccataaagatcc

SEQ ID NO: 1750314 - DNA, 15 bp, Homo sapiens
ctccataaagatccc

SEQ ID NO: 1750315 - DNA, 15 bp, Homo sapiens
tccataaagatccct

SEQ ID NO: 1750316 - DNA, 15 bp, Homo sapiens
ccataaagatccctc

SEQ ID NO: 1750317 - DNA, 15 bp, Homo sapiens
cataaagatccctca

SEQ ID NO: 1750318 - DNA, 15 bp, Homo sapiens
ataaagatccctcat

SEQ ID NO: 1750319 - DNA, 15 bp, Homo sapiens
taaagatccctcata

SEQ ID NO: 1750320 - DNA, 15 bp, Homo sapiens
aaagatccctcatat

SEQ ID NO: 1750321 - DNA, 15 bp, Homo sapiens
aagatccctcatatt

SEQ ID NO: 1750322 - DNA, 15 bp, Homo sapiens
agatccctcatattg

SEQ ID NO: 1750323 - DNA, 15 bp, Homo sapiens
gatccctcatattgc

SEQ ID NO: 1750324 - DNA, 15 bp, Homo sapiens
atccctcatattgcc

SEQ ID NO: 1750325 - DNA, 15 bp, Homo sapiens
tccctcatattgccc

SEQ ID NO: 1750326 - DNA, 15 bp, Homo sapiens
ccctcatattgccct

SEQ ID NO: 1750327 - DNA, 15 bp, Homo sapiens
cctcatattgccctt

SEQ ID NO: 1750328 - DNA, 15 bp, Homo sapiens
ctcatattgcccttt

SEQ ID NO: 1750329 - DNA, 15 bp, Homo sapiens
tcatattgccctttt

SEQ ID NO: 1750330 - DNA, 15 bp, Homo sapiens
catattgccctttta

SEQ ID NO: 1750331 - DNA, 15 bp, Homo sapiens
atattgcccttttag

SEQ ID NO: 1750332 - DNA, 15 bp, Homo sapiens
tattgcccttttaga

SEQ ID NO: 1750333 - DNA, 15 bp, Homo sapiens
attgcccttttagag

SEQ ID NO: 1750334 - DNA, 15 bp, Homo sapiens
ttgcccttttagagc

SEQ ID NO: 1750335 - DNA, 15 bp, Homo sapiens
tgcccttttagagcc

SEQ ID NO: 1750336 - DNA, 15 bp, Homo sapiens
gcccttttagagcca

SEQ ID NO: 1750337 - DNA, 15 bp, Homo sapiens
cccttttagagccat

SEQ ID NO: 1750338 - DNA, 15 bp, Homo sapiens
ccttttagagccatg

SEQ ID NO: 1750339 - DNA, 15 bp, Homo sapiens
cttttagagccatgc

SEQ ID NO: 1750340 - DNA, 15 bp, Homo sapiens
ttttagagccatgca

SEQ ID NO: 1750341 - DNA, 15 bp, Homo sapiens
tttagagccatgcat

SEQ ID NO: 1750342 - DNA, 15 bp, Homo sapiens
ttagagccatgcata

SEQ ID NO: 1750343 - DNA, 15 bp, Homo sapiens
tagagccatgcatat

SEQ ID NO: 1750344 - DNA, 15 bp, Homo sapiens
agagccatgcatata

SEQ ID NO: 1750345 - DNA, 15 bp, Homo sapiens
gagccatgcatatat

SEQ ID NO: 1750346 - DNA, 15 bp, Homo sapiens
agccatgcatatatc

SEQ ID NO: 1750347 - DNA, 15 bp, Homo sapiens
gccatgcatatatcc

SEQ ID NO: 1750348 - DNA, 15 bp, Homo sapiens
ccatgcatatatccc

SEQ ID NO: 1750349 - DNA, 15 bp, Homo sapiens
catgcatatatccct

SEQ ID NO: 1750350 - DNA, 15 bp, Homo sapiens
atgcatatatccctt

SEQ ID NO: 1750351 - DNA, 15 bp, Homo sapiens
tgcatatatcccttc

SEQ ID NO: 1750352 - DNA, 15 bp, Homo sapiens
gcatatatcccttcc

SEQ ID NO: 1750353 - DNA, 15 bp, Homo sapiens
catatatcccttcct

SEQ ID NO: 1750354 - DNA, 15 bp, Homo sapiens
atatatcccttcctc

SEQ ID NO: 1750355 - DNA, 15 bp, Homo sapiens
tatatcccttcctcc

SEQ ID NO: 1750356 - DNA, 15 bp, Homo sapiens
atatcccttcctccc

SEQ ID NO: 1750357 - DNA, 15 bp, Homo sapiens
tatcccttcctccca

SEQ ID NO: 1750358 - DNA, 15 bp, Homo sapiens
atcccttcctcccac

SEQ ID NO: 1750359 - DNA, 15 bp, Homo sapiens
tcccttcctcccacc

SEQ ID NO: 1750360 - DNA, 15 bp, Homo sapiens
cccttcctcccaccc

SEQ ID NO: 1750361 - DNA, 15 bp, Homo sapiens
ccttcctcccaccct

SEQ ID NO: 1750362 - DNA, 15 bp, Homo sapiens
cttcctcccaccctc

SEQ ID NO: 1750363 - DNA, 15 bp, Homo sapiens
ttcctcccaccctca

SEQ ID NO: 1750364 - DNA, 15 bp, Homo sapiens
tcctcccaccctcat

SEQ ID NO: 1750365 - DNA, 15 bp, Homo sapiens
cctcccaccctcatt

SEQ ID NO: 1750366 - DNA, 15 bp, Homo sapiens
ctcccaccctcattc

SEQ ID NO: 1750367 - DNA, 15 bp, Homo sapiens
tcccaccctcattcc

SEQ ID NO: 1750368 - DNA, 15 bp, Homo sapiens
cccaccctcattcct

SEQ ID NO: 1750369 - DNA, 15 bp, Homo sapiens
ccaccctcattcctc

SEQ ID NO: 1750370 - DNA, 15 bp, Homo sapiens
caccctcattcctct

SEQ ID NO: 1750371 - DNA, 15 bp, Homo sapiens
accctcattcctctc

SEQ ID NO: 1750372 - DNA, 15 bp, Homo sapiens
ccctcattcctctca

SEQ ID NO: 1750373 - DNA, 15 bp, Homo sapiens
cctcattcctctcaa

SEQ ID NO: 1750374 - DNA, 15 bp, Homo sapiens
ctcattcctctcaaa

SEQ ID NO: 1750375 - DNA, 15 bp, Homo sapiens
tcattcctctcaaac

SEQ ID NO: 1750376 - DNA, 15 bp, Homo sapiens
cattcctctcaaact

SEQ ID NO: 1750377 - DNA, 15 bp, Homo sapiens
attcctctcaaactc

SEQ ID NO: 1750378 - DNA, 15 bp, Homo sapiens
ttcctctcaaactct

SEQ ID NO: 1750379 - DNA, 15 bp, Homo sapiens
tcctctcaaactctg

SEQ ID NO: 1750380 - DNA, 15 bp, Homo sapiens
cctctcaaactctgg

SEQ ID NO: 1750381 - DNA, 15 bp, Homo sapiens
ctctcaaactctggc

SEQ ID NO: 1750382 - DNA, 15 bp, Homo sapiens
tctcaaactctggca

SEQ ID NO: 1750383 - DNA, 15 bp, Homo sapiens
ctcaaactctggcaa

SEQ ID NO: 1750384 - DNA, 15 bp, Homo sapiens
tcaaactctggcaaa

SEQ ID NO: 1750385 - DNA, 15 bp, Homo sapiens
caaactctggcaaac

SEQ ID NO: 1750386 - DNA, 15 bp, Homo sapiens
aaactctggcaaaca

SEQ ID NO: 1750387 - DNA, 15 bp, Homo sapiens
aactctggcaaacat

SEQ ID NO: 1750388 - DNA, 15 bp, Homo sapiens
actctggcaaacatg

SEQ ID NO: 1750389 - DNA, 15 bp, Homo sapiens
ctctggcaaacatga

SEQ ID NO: 1750390 - DNA, 15 bp, Homo sapiens
tctggcaaacatgaa

SEQ ID NO: 1750391 - DNA, 15 bp, Homo sapiens
ctggcaaacatgaat

SEQ ID NO: 1750392 - DNA, 15 bp, Homo sapiens
tggcaaacatgaatc

SEQ ID NO: 1750393 - DNA, 15 bp, Homo sapiens
ggcaaacatgaatct

SEQ ID NO: 1750394 - DNA, 15 bp, Homo sapiens
gcaaacatgaatctg

SEQ ID NO: 1750395 - DNA, 15 bp, Homo sapiens
caaacatgaatctgt

SEQ ID NO: 1750396 - DNA, 15 bp, Homo sapiens
aaacatgaatctgtt

SEQ ID NO: 1750397 - DNA, 15 bp, Homo sapiens
aacatgaatctgttc

SEQ ID NO: 1750398 - DNA, 15 bp, Homo sapiens
acatgaatctgttct

SEQ ID NO: 1750399 - DNA, 15 bp, Homo sapiens
catgaatctgttctc

SEQ ID NO: 1750400 - DNA, 15 bp, Homo sapiens
atgaatctgttctcc

SEQ ID NO: 1750401 - DNA, 15 bp, Homo sapiens
tgaatctgttctccg

SEQ ID NO: 1750402 - DNA, 15 bp, Homo sapiens
gaatctgttctccgt

SEQ ID NO: 1750403 - DNA, 15 bp, Homo sapiens
aatctgttctccgtt

SEQ ID NO: 1750404 - DNA, 15 bp, Homo sapiens
atctgttctccgttt

SEQ ID NO: 1750405 - DNA, 15 bp, Homo sapiens
tctgttctccgtttg

SEQ ID NO: 1750406 - DNA, 15 bp, Homo sapiens
ctgttctccgtttgt

SEQ ID NO: 1750407 - DNA, 15 bp, Homo sapiens
tgttctccgtttgta

SEQ ID NO: 1750408 - DNA, 15 bp, Homo sapiens
gttctccgtttgtat

SEQ ID NO: 1750409 - DNA, 15 bp, Homo sapiens
ttctccgtttgtata

SEQ ID NO: 1750410 - DNA, 15 bp, Homo sapiens
tctccgtttgtataa

SEQ ID NO: 1750411 - DNA, 15 bp, Homo sapiens
ctccgtttgtataat

SEQ ID NO: 1750412 - DNA, 15 bp, Homo sapiens
tccgtttgtataatt

SEQ ID NO: 1750413 - DNA, 15 bp, Homo sapiens
ccgtttgtataattt

SEQ ID NO: 1750414 - DNA, 15 bp, Homo sapiens
cgtttgtataatttt

SEQ ID NO: 1750415 - DNA, 15 bp, Homo sapiens
gtttgtataatttta

SEQ ID NO: 1750416 - DNA, 15 bp, Homo sapiens
tttgtataattttat

SEQ ID NO: 1750417 - DNA, 15 bp, Homo sapiens
ttgtataattttata

SEQ ID NO: 1750418 - DNA, 15 bp, Homo sapiens
tgtataattttatat

SEQ ID NO: 1750419 - DNA, 15 bp, Homo sapiens
gtataattttatatt

SEQ ID NO: 1750420 - DNA, 15 bp, Homo sapiens
tataattttatattt

SEQ ID NO: 1750421 - DNA, 15 bp, Homo sapiens
ataattttatatttt

SEQ ID NO: 1750422 - DNA, 15 bp, Homo sapiens
taattttatatttta

SEQ ID NO: 1750423 - DNA, 15 bp, Homo sapiens
aattttatattttaa

SEQ ID NO: 1750424 - DNA, 15 bp, Homo sapiens
attttatattttaaa

SEQ ID NO: 1750425 - DNA, 15 bp, Homo sapiens
ttttatattttaaaa

SEQ ID NO: 1750426 - DNA, 15 bp, Homo sapiens
tttatattttaaaaa

SEQ ID NO: 1750427 - DNA, 15 bp, Homo sapiens
ttatattttaaaaat

SEQ ID NO: 1750428 - DNA, 15 bp, Homo sapiens
tatattttaaaaatg

SEQ ID NO: 1750429 - DNA, 15 bp, Homo sapiens
atattttaaaaatgt

SEQ ID NO: 1750430 - DNA, 15 bp, Homo sapiens
tattttaaaaatgtt

SEQ ID NO: 1750431 - DNA, 15 bp, Homo sapiens
attttaaaaatgttt

SEQ ID NO: 1750432 - DNA, 15 bp, Homo sapiens
ttttaaaaatgtttt

SEQ ID NO: 1750433 - DNA, 15 bp, Homo sapiens
aaaaatgttttataa

SEQ ID NO: 1750434 - DNA, 15 bp, Homo sapiens
aaaatgttttataaa

SEQ ID NO: 1750435 - DNA, 15 bp, Homo sapiens
aaatgttttataaaa

SEQ ID NO: 1750436 - DNA, 15 bp, Homo sapiens
aatgttttataaaaa

SEQ ID NO: 1750437 - DNA, 15 bp, Homo sapiens
atgttttataaaaat

SEQ ID NO: 1750438 - DNA, 15 bp, Homo sapiens
tgttttataaaaata

SEQ ID NO: 1750439 - DNA, 15 bp, Homo sapiens
tttataaaaatatat

SEQ ID NO: 1750440 - DNA, 15 bp, Homo sapiens
ttataaaaatatata

SEQ ID NO: 1750441 - DNA, 15 bp, Homo sapiens
tataaaaatatatac

SEQ ID NO: 1750442 - DNA, 15 bp, Homo sapiens
ataaaaatatataca

SEQ ID NO: 1750443 - DNA, 15 bp, Homo sapiens
taaaaatatatacag

SEQ ID NO: 1750444 - DNA, 15 bp, Homo sapiens
aaaaatatatacagt

SEQ ID NO: 1750445 - DNA, 15 bp, Homo sapiens
aaaatatatacagta

SEQ ID NO: 1750446 - DNA, 15 bp, Homo sapiens
aaatatatacagtat

SEQ ID NO: 1750447 - DNA, 15 bp, Homo sapiens
aatatatacagtatg

SEQ ID NO: 1750448 - DNA, 15 bp, Homo sapiens
atatatacagtatgt

SEQ ID NO: 1750449 - DNA, 15 bp, Homo sapiens
tatatacagtatgta

SEQ ID NO: 1750450 - DNA, 15 bp, Homo sapiens
atatacagtatgtaa

SEQ ID NO: 1750451 - DNA, 15 bp, Homo sapiens
tatacagtatgtaaa

SEQ ID NO: 1750452 - DNA, 15 bp, Homo sapiens
atacagtatgtaaac

SEQ ID NO: 1750453 - DNA, 15 bp, Homo sapiens
tacagtatgtaaact

SEQ ID NO: 1750454 - DNA, 15 bp, Homo sapiens
acagtatgtaaactt

SEQ ID NO: 1750455 - DNA, 15 bp, Homo sapiens
cagtatgtaaacttt

SEQ ID NO: 1750456 - DNA, 15 bp, Homo sapiens
agtatgtaaactttt

SEQ ID NO: 1750457 - DNA, 15 bp, Homo sapiens
gtatgtaaacttttg

SEQ ID NO: 1750458 - DNA, 15 bp, Homo sapiens
tatgtaaacttttgg

SEQ ID NO: 1750459 - DNA, 15 bp, Homo sapiens
atgtaaacttttggg

SEQ ID NO: 1750460 - DNA, 15 bp, Homo sapiens
tgtaaacttttggga

SEQ ID NO: 1750461 - DNA, 15 bp, Homo sapiens
gtaaacttttgggat

SEQ ID NO: 1750462 - DNA, 15 bp, Homo sapiens
taaacttttgggatt

SEQ ID NO: 1750463 - DNA, 15 bp, Homo sapiens
aaacttttgggatta

SEQ ID NO: 1750464 - DNA, 15 bp, Homo sapiens
aacttttgggattaa

SEQ ID NO: 1750465 - DNA, 15 bp, Homo sapiens
acttttgggattaac

SEQ ID NO: 1750466 - DNA, 15 bp, Homo sapiens
cttttgggattaact

SEQ ID NO: 1750467 - DNA, 15 bp, Homo sapiens
ttttgggattaactt

SEQ ID NO: 1750468 - DNA, 15 bp, Homo sapiens
tttgggattaacttt

SEQ ID NO: 1750469 - DNA, 15 bp, Homo sapiens
ttgggattaactttt

SEQ ID NO: 1750470 - DNA, 15 bp, Homo sapiens
tgggattaacttttg

SEQ ID NO: 1750471 - DNA, 15 bp, Homo sapiens
gggattaacttttgt

SEQ ID NO: 1750472 - DNA, 15 bp, Homo sapiens
ggattaacttttgtc

SEQ ID NO: 1750473 - DNA, 15 bp, Homo sapiens
gattaacttttgtct

SEQ ID NO: 1750474 - DNA, 15 bp, Homo sapiens
attaacttttgtctt

SEQ ID NO: 1750475 - DNA, 15 bp, Homo sapiens
ttaacttttgtcttt

SEQ ID NO: 1750476 - DNA, 15 bp, Homo sapiens
taacttttgtctttc

SEQ ID NO: 1750477 - DNA, 15 bp, Homo sapiens
aacttttgtctttca

SEQ ID NO: 1750478 - DNA, 15 bp, Homo sapiens
acttttgtctttcag

SEQ ID NO: 1750479 - DNA, 15 bp, Homo sapiens
cttttgtctttcagc

SEQ ID NO: 1750480 - DNA, 15 bp, Homo sapiens
ttttgtctttcagct

SEQ ID NO: 1750481 - DNA, 15 bp, Homo sapiens
tttgtctttcagcta

SEQ ID NO: 1750482 - DNA, 15 bp, Homo sapiens
ttgtctttcagctaa

SEQ ID NO: 1750483 - DNA, 15 bp, Homo sapiens
tgtctttcagctaat

SEQ ID NO: 1750484 - DNA, 15 bp, Homo sapiens
gtctttcagctaatt

SEQ ID NO: 1750485 - DNA, 15 bp, Homo sapiens
tctttcagctaattc

SEQ ID NO: 1750486 - DNA, 15 bp, Homo sapiens
ctttcagctaattcc

SEQ ID NO: 1750487 - DNA, 15 bp, Homo sapiens
tttcagctaattccc

SEQ ID NO: 1750488 - DNA, 15 bp, Homo sapiens
ttcagctaattccct

SEQ ID NO: 1750489 - DNA, 15 bp, Homo sapiens
tcagctaattccctg

SEQ ID NO: 1750490 - DNA, 15 bp, Homo sapiens
cagctaattccctga

SEQ ID NO: 1750491 - DNA, 15 bp, Homo sapiens
agctaattccctgaa

SEQ ID NO: 1750492 - DNA, 15 bp, Homo sapiens
gctaattccctgaag

SEQ ID NO: 1750493 - DNA, 15 bp, Homo sapiens
ctaattccctgaagt

SEQ ID NO: 1750494 - DNA, 15 bp, Homo sapiens
taattccctgaagtt

SEQ ID NO: 1750495 - DNA, 15 bp, Homo sapiens
aattccctgaagttg

SEQ ID NO: 1750496 - DNA, 15 bp, Homo sapiens
attccctgaagttgt

SEQ ID NO: 1750497 - DNA, 15 bp, Homo sapiens
ttccctgaagttgtg

SEQ ID NO: 1750498 - DNA, 15 bp, Homo sapiens
tccctgaagttgtgt

SEQ ID NO: 1750499 - DNA, 15 bp, Homo sapiens
ccctgaagttgtgtg

SEQ ID NO: 1750500 - DNA, 15 bp, Homo sapiens
cctgaagttgtgtgt

SEQ ID NO: 1750501 - DNA, 15 bp, Homo sapiens
ctgaagttgtgtgta

SEQ ID NO: 1750502 - DNA, 15 bp, Homo sapiens
tgaagttgtgtgtat

SEQ ID NO: 1750503 - DNA, 15 bp, Homo sapiens
gaagttgtgtgtatt

SEQ ID NO: 1750504 - DNA, 15 bp, Homo sapiens
aagttgtgtgtattc

SEQ ID NO: 1750505 - DNA, 15 bp, Homo sapiens
agttgtgtgtattca

SEQ ID NO: 1750506 - DNA, 15 bp, Homo sapiens
gttgtgtgtattcat

SEQ ID NO: 1750507 - DNA, 15 bp, Homo sapiens
ttgtgtgtattcata

SEQ ID NO: 1750508 - DNA, 15 bp, Homo sapiens
tgtgtgtattcatag

SEQ ID NO: 1750509 - DNA, 15 bp, Homo sapiens
gtgtgtattcatagg

SEQ ID NO: 1750510 - DNA, 15 bp, Homo sapiens
tgtgtattcataggc

SEQ ID NO: 1750511 - DNA, 15 bp, Homo sapiens
gtgtattcataggca

SEQ ID NO: 1750512 - DNA, 15 bp, Homo sapiens
tgtattcataggcat

SEQ ID NO: 1750513 - DNA, 15 bp, Homo sapiens
gtattcataggcatt

SEQ ID NO: 1750514 - DNA, 15 bp, Homo sapiens
tattcataggcattg

SEQ ID NO: 1750515 - DNA, 15 bp, Homo sapiens
attcataggcattgc

SEQ ID NO: 1750516 - DNA, 15 bp, Homo sapiens
ttcataggcattgct

SEQ ID NO: 1750517 - DNA, 15 bp, Homo sapiens
tcataggcattgctt

SEQ ID NO: 1750518 - DNA, 15 bp, Homo sapiens
cataggcattgcttt

SEQ ID NO: 1750519 - DNA, 15 bp, Homo sapiens
ataggcattgctttt

SEQ ID NO: 1750520 - DNA, 15 bp, Homo sapiens
taggcattgcttttt

SEQ ID NO: 1750521 - DNA, 15 bp, Homo sapiens
aggcattgcttttta

SEQ ID NO: 1750522 - DNA, 15 bp, Homo sapiens
ggcattgctttttat

SEQ ID NO: 1750523 - DNA, 15 bp, Homo sapiens
gcattgctttttatt

SEQ ID NO: 1750524 - DNA, 15 bp, Homo sapiens
cattgctttttatta

SEQ ID NO: 1750525 - DNA, 15 bp, Homo sapiens
attgctttttattac

SEQ ID NO: 1750526 - DNA, 15 bp, Homo sapiens
ttgctttttattact

SEQ ID NO: 1750527 - DNA, 15 bp, Homo sapiens
tgctttttattactg

SEQ ID NO: 1750528 - DNA, 15 bp, Homo sapiens
gctttttattactga

SEQ ID NO: 1750529 - DNA, 15 bp, Homo sapiens
ctttttattactgag

SEQ ID NO: 1750530 - DNA, 15 bp, Homo sapiens
tttttattactgagt

SEQ ID NO: 1750531 - DNA, 15 bp, Homo sapiens
ttttattactgagtg

SEQ ID NO: 1750532 - DNA, 15 bp, Homo sapiens
tttattactgagtga

SEQ ID NO: 1750533 - DNA, 15 bp, Homo sapiens
ttattactgagtgat

SEQ ID NO: 1750534 - DNA, 15 bp, Homo sapiens
tattactgagtgata

SEQ ID NO: 1750535 - DNA, 15 bp, Homo sapiens
attactgagtgatat

SEQ ID NO: 1750536 - DNA, 15 bp, Homo sapiens
ttactgagtgatatt

SEQ ID NO: 1750537 - DNA, 15 bp, Homo sapiens
tactgagtgatattc

SEQ ID NO: 1750538 - DNA, 15 bp, Homo sapiens
actgagtgatattcc

SEQ ID NO: 1750539 - DNA, 15 bp, Homo sapiens
ctgagtgatattcca

SEQ ID NO: 1750540 - DNA, 15 bp, Homo sapiens
tgagtgatattccac

SEQ ID NO: 1750541 - DNA, 15 bp, Homo sapiens
gagtgatattccaca

SEQ ID NO: 1750542 - DNA, 15 bp, Homo sapiens
agtgatattccacag

SEQ ID NO: 1750543 - DNA, 15 bp, Homo sapiens
gtgatattccacagt

SEQ ID NO: 1750544 - DNA, 15 bp, Homo sapiens
tgatattccacagtg

SEQ ID NO: 1750545 - DNA, 15 bp, Homo sapiens
gatattccacagtgt

SEQ ID NO: 1750546 - DNA, 15 bp, Homo sapiens
atattccacagtgtg

SEQ ID NO: 1750547 - DNA, 15 bp, Homo sapiens
tattccacagtgtgg

SEQ ID NO: 1750548 - DNA, 15 bp, Homo sapiens
attccacagtgtgga

SEQ ID NO: 1750549 - DNA, 15 bp, Homo sapiens
ttccacagtgtggat

SEQ ID NO: 1750550 - DNA, 15 bp, Homo sapiens
tccacagtgtggatg

SEQ ID NO: 1750551 - DNA, 15 bp, Homo sapiens
ccacagtgtggatgt

SEQ ID NO: 1750552 - DNA, 15 bp, Homo sapiens
cacagtgtggatgta

SEQ ID NO: 1750553 - DNA, 15 bp, Homo sapiens
acagtgtggatgtac

SEQ ID NO: 1750554 - DNA, 15 bp, Homo sapiens
cagtgtggatgtacc

SEQ ID NO: 1750555 - DNA, 15 bp, Homo sapiens
agtgtggatgtacca

SEQ ID NO: 1750556 - DNA, 15 bp, Homo sapiens
gtgtggatgtaccac

SEQ ID NO: 1750557 - DNA, 15 bp, Homo sapiens
tgtggatgtaccaca

SEQ ID NO: 1750558 - DNA, 15 bp, Homo sapiens
gtggatgtaccacag

SEQ ID NO: 1750559 - DNA, 15 bp, Homo sapiens
tggatgtaccacagt

SEQ ID NO: 1750560 - DNA, 15 bp, Homo sapiens
ggatgtaccacagtt

SEQ ID NO: 1750561 - DNA, 15 bp, Homo sapiens
gatgtaccacagttt

SEQ ID NO: 1750562 - DNA, 15 bp, Homo sapiens
atgtaccacagttta

SEQ ID NO: 1750563 - DNA, 15 bp, Homo sapiens
tgtaccacagtttaa

SEQ ID NO: 1750564 - DNA, 15 bp, Homo sapiens
gtaccacagtttaac

SEQ ID NO: 1750565 - DNA, 15 bp, Homo sapiens
taccacagtttaacc

SEQ ID NO: 1750566 - DNA, 15 bp, Homo sapiens
accacagtttaacca

SEQ ID NO: 1750567 - DNA, 15 bp, Homo sapiens
ccacagtttaaccat

SEQ ID NO: 1750568 - DNA, 15 bp, Homo sapiens
cacagtttaaccatt

SEQ ID NO: 1750569 - DNA, 15 bp, Homo sapiens
acagtttaaccattc

SEQ ID NO: 1750570 - DNA, 15 bp, Homo sapiens
cagtttaaccattca

SEQ ID NO: 1750571 - DNA, 15 bp, Homo sapiens
agtttaaccattcac

SEQ ID NO: 1750572 - DNA, 15 bp, Homo sapiens
gtttaaccattcacc

SEQ ID NO: 1750573 - DNA, 15 bp, Homo sapiens
tttaaccattcacct

SEQ ID NO: 1750574 - DNA, 15 bp, Homo sapiens
ttaaccattcacctg

SEQ ID NO: 1750575 - DNA, 15 bp, Homo sapiens
taaccattcacctgt

SEQ ID NO: 1750576 - DNA, 15 bp, Homo sapiens
aaccattcacctgtt

SEQ ID NO: 1750577 - DNA, 15 bp, Homo sapiens
accattcacctgttg

SEQ ID NO: 1750578 - DNA, 15 bp, Homo sapiens
ccattcacctgttga

SEQ ID NO: 1750579 - DNA, 15 bp, Homo sapiens
cattcacctgttgaa

SEQ ID NO: 1750580 - DNA, 15 bp, Homo sapiens
attcacctgttgaag

SEQ ID NO: 1750581 - DNA, 15 bp, Homo sapiens
ttcacctgttgaagg

SEQ ID NO: 1750582 - DNA, 15 bp, Homo sapiens
tcacctgttgaagga

SEQ ID NO: 1750583 - DNA, 15 bp, Homo sapiens
cacctgttgaaggat

SEQ ID NO: 1750584 - DNA, 15 bp, Homo sapiens
acctgttgaaggata

SEQ ID NO: 1750585 - DNA, 15 bp, Homo sapiens
cctgttgaaggatag

SEQ ID NO: 1750586 - DNA, 15 bp, Homo sapiens
ctgttgaaggatagc

SEQ ID NO: 1750587 - DNA, 15 bp, Homo sapiens
tgttgaaggatagct

SEQ ID NO: 1750588 - DNA, 15 bp, Homo sapiens
gttgaaggatagctg

SEQ ID NO: 1750589 - DNA, 15 bp, Homo sapiens
ttgaaggatagctgg

SEQ ID NO: 1750590 - DNA, 15 bp, Homo sapiens
tgaaggatagctggg

SEQ ID NO: 1750591 - DNA, 15 bp, Homo sapiens
gaaggatagctgggt

SEQ ID NO: 1750592 - DNA, 15 bp, Homo sapiens
aaggatagctgggtt

SEQ ID NO: 1750593 - DNA, 15 bp, Homo sapiens
aggatagctgggtta

SEQ ID NO: 1750594 - DNA, 15 bp, Homo sapiens
ggatagctgggttat

SEQ ID NO: 1750595 - DNA, 15 bp, Homo sapiens
gatagctgggttatt

SEQ ID NO: 1750596 - DNA, 15 bp, Homo sapiens
atagctgggttattt

SEQ ID NO: 1750597 - DNA, 15 bp, Homo sapiens
tagctgggttatttc

SEQ ID NO: 1750598 - DNA, 15 bp, Homo sapiens
agctgggttatttcc

SEQ ID NO: 1750599 - DNA, 15 bp, Homo sapiens
gctgggttatttcct

SEQ ID NO: 1750600 - DNA, 15 bp, Homo sapiens
ctgggttatttcctg

SEQ ID NO: 1750601 - DNA, 15 bp, Homo sapiens
tgggttatttcctgt

SEQ ID NO: 1750602 - DNA, 15 bp, Homo sapiens
gggttatttcctgtt

SEQ ID NO: 1750603 - DNA, 15 bp, Homo sapiens
ggttatttcctgttt

SEQ ID NO: 1750604 - DNA, 15 bp, Homo sapiens
gttatttcctgtttc

SEQ ID NO: 1750605 - DNA, 15 bp, Homo sapiens
ttatttcctgtttct

SEQ ID NO: 1750606 - DNA, 15 bp, Homo sapiens
tatttcctgtttctg

SEQ ID NO: 1750607 - DNA, 15 bp, Homo sapiens
atttcctgtttctgg

SEQ ID NO: 1750608 - DNA, 15 bp, Homo sapiens
tttcctgtttctggc

SEQ ID NO: 1750609 - DNA, 15 bp, Homo sapiens
ttcctgtttctggct

SEQ ID NO: 1750610 - DNA, 15 bp, Homo sapiens
tcctgtttctggcta

SEQ ID NO: 1750611 - DNA, 15 bp, Homo sapiens
cctgtttctggctat

SEQ ID NO: 1750612 - DNA, 15 bp, Homo sapiens
ctgtttctggctatt

SEQ ID NO: 1750613 - DNA, 15 bp, Homo sapiens
tgtttctggctattg

SEQ ID NO: 1750614 - DNA, 15 bp, Homo sapiens
gtttctggctattgc

SEQ ID NO: 1750615 - DNA, 15 bp, Homo sapiens
tttctggctattgca

SEQ ID NO: 1750616 - DNA, 15 bp, Homo sapiens
ttctggctattgcaa

SEQ ID NO: 1750617 - DNA, 15 bp, Homo sapiens
tctggctattgcaaa

SEQ ID NO: 1750618 - DNA, 15 bp, Homo sapiens
ctggctattgcaaat

SEQ ID NO: 1750619 - DNA, 15 bp, Homo sapiens
tggctattgcaaata

SEQ ID NO: 1750620 - DNA, 15 bp, Homo sapiens
ggctattgcaaataa

SEQ ID NO: 1750621 - DNA, 15 bp, Homo sapiens
gctattgcaaataaa

SEQ ID NO: 1750622 - DNA, 15 bp, Homo sapiens
ctattgcaaataaag

SEQ ID NO: 1750623 - DNA, 15 bp, Homo sapiens
tattgcaaataaagc

SEQ ID NO: 1750624 - DNA, 15 bp, Homo sapiens
attgcaaataaagct

SEQ ID NO: 1750625 - DNA, 15 bp, Homo sapiens
ttgcaaataaagctg

SEQ ID NO: 1750626 - DNA, 15 bp, Homo sapiens
tgcaaataaagctgc

SEQ ID NO: 1750627 - DNA, 15 bp, Homo sapiens
gcaaataaagctgct

SEQ ID NO: 1750628 - DNA, 15 bp, Homo sapiens
caaataaagctgctg

SEQ ID NO: 1750629 - DNA, 15 bp, Homo sapiens
aaataaagctgctgt

SEQ ID NO: 1750630 - DNA, 15 bp, Homo sapiens
aataaagctgctgta

SEQ ID NO: 1750631 - DNA, 15 bp, Homo sapiens
ataaagctgctgtaa

SEQ ID NO: 1750632 - DNA, 15 bp, Homo sapiens
taaagctgctgtaaa

SEQ ID NO: 1750633 - DNA, 15 bp, Homo sapiens
aaagctgctgtaaat

SEQ ID NO: 1750634 - DNA, 15 bp, Homo sapiens
aagctgctgtaaata

SEQ ID NO: 1750635 - DNA, 15 bp, Homo sapiens
agctgctgtaaatac

SEQ ID NO: 1750636 - DNA, 15 bp, Homo sapiens
gctgctgtaaatact

SEQ ID NO: 1750637 - DNA, 15 bp, Homo sapiens
ctgctgtaaatactt

SEQ ID NO: 1750638 - DNA, 15 bp, Homo sapiens
tgctgtaaatacttg

SEQ ID NO: 1750639 - DNA, 15 bp, Homo sapiens
gctgtaaatacttgt

SEQ ID NO: 1750640 - DNA, 15 bp, Homo sapiens
ctgtaaatacttgta

SEQ ID NO: 1750641 - DNA, 15 bp, Homo sapiens
tgtaaatacttgtat

SEQ ID NO: 1750642 - DNA, 15 bp, Homo sapiens
gtaaatacttgtata

SEQ ID NO: 1750643 - DNA, 15 bp, Homo sapiens
taaatacttgtatac

SEQ ID NO: 1750644 - DNA, 15 bp, Homo sapiens
aaatacttgtataca

SEQ ID NO: 1750645 - DNA, 15 bp, Homo sapiens
aatacttgtatacag

SEQ ID NO: 1750646 - DNA, 15 bp, Homo sapiens
atacttgtatacagg

SEQ ID NO: 1750647 - DNA, 15 bp, Homo sapiens
tacttgtatacaggt

SEQ ID NO: 1750648 - DNA, 15 bp, Homo sapiens
acttgtatacaggtt

SEQ ID NO: 1750649 - DNA, 15 bp, Homo sapiens
cttgtatacaggttt

SEQ ID NO: 1750650 - DNA, 15 bp, Homo sapiens
ttgtatacaggtttc

SEQ ID NO: 1750651 - DNA, 15 bp, Homo sapiens
tgtatacaggtttct

SEQ ID NO: 1750652 - DNA, 15 bp, Homo sapiens
gtatacaggtttctg

SEQ ID NO: 1750653 - DNA, 15 bp, Homo sapiens
tatacaggtttctgt

SEQ ID NO: 1750654 - DNA, 15 bp, Homo sapiens
atacaggtttctgta

SEQ ID NO: 1750655 - DNA, 15 bp, Homo sapiens
tacaggtttctgtat

SEQ ID NO: 1750656 - DNA, 15 bp, Homo sapiens
acaggtttctgtatg

SEQ ID NO: 1750657 - DNA, 15 bp, Homo sapiens
caggtttctgtatga

SEQ ID NO: 1750658 - DNA, 15 bp, Homo sapiens
aggtttctgtatgaa

SEQ ID NO: 1750659 - DNA, 15 bp, Homo sapiens
ggtttctgtatgaat

SEQ ID NO: 1750660 - DNA, 15 bp, Homo sapiens
gtttctgtatgaatt

SEQ ID NO: 1750661 - DNA, 15 bp, Homo sapiens
tttctgtatgaattc

SEQ ID NO: 1750662 - DNA, 15 bp, Homo sapiens
ttctgtatgaattca

SEQ ID NO: 1750663 - DNA, 15 bp, Homo sapiens
tctgtatgaattcaa

SEQ ID NO: 1750664 - DNA, 15 bp, Homo sapiens
ctgtatgaattcaag

SEQ ID NO: 1750665 - DNA, 15 bp, Homo sapiens
tgtatgaattcaagt

SEQ ID NO: 1750666 - DNA, 15 bp, Homo sapiens
gtatgaattcaagtt

SEQ ID NO: 1750667 - DNA, 15 bp, Homo sapiens
tatgaattcaagttt

SEQ ID NO: 1750668 - DNA, 15 bp, Homo sapiens
atgaattcaagtttt

SEQ ID NO: 1750669 - DNA, 15 bp, Homo sapiens
tgaattcaagttttt

SEQ ID NO: 1750670 - DNA, 15 bp, Homo sapiens
gaattcaagttttta

SEQ ID NO: 1750671 - DNA, 15 bp, Homo sapiens
aattcaagtttttat

SEQ ID NO: 1750672 - DNA, 15 bp, Homo sapiens
attcaagtttttatt

SEQ ID NO: 1750673 - DNA, 15 bp, Homo sapiens
ttcaagtttttattt

SEQ ID NO: 1750674 - DNA, 15 bp, Homo sapiens
tcaagtttttatttc

SEQ ID NO: 1750675 - DNA, 15 bp, Homo sapiens
caagtttttatttct

SEQ ID NO: 1750676 - DNA, 15 bp, Homo sapiens
aagtttttatttctt

SEQ ID NO: 1750677 - DNA, 15 bp, Homo sapiens
agtttttatttcttt

SEQ ID NO: 1750678 - DNA, 15 bp, Homo sapiens
gtttttatttctttg

SEQ ID NO: 1750679 - DNA, 15 bp, Homo sapiens
tttttatttctttgg

SEQ ID NO: 1750680 - DNA, 15 bp, Homo sapiens
ttttatttctttggg

SEQ ID NO: 1750681 - DNA, 15 bp, Homo sapiens
tttatttctttggga

SEQ ID NO: 1750682 - DNA, 15 bp, Homo sapiens
ttatttctttgggat

SEQ ID NO: 1750683 - DNA, 15 bp, Homo sapiens
tatttctttgggata

SEQ ID NO: 1750684 - DNA, 15 bp, Homo sapiens
atttctttgggataa

SEQ ID NO: 1750685 - DNA, 15 bp, Homo sapiens
tttctttgggataaa

SEQ ID NO: 1750686 - DNA, 15 bp, Homo sapiens
ttctttgggataaac

SEQ ID NO: 1750687 - DNA, 15 bp, Homo sapiens
tctttgggataaaca

SEQ ID NO: 1750688 - DNA, 15 bp, Homo sapiens
ctttgggataaacac

SEQ ID NO: 1750689 - DNA, 15 bp, Homo sapiens
tttgggataaacacc

SEQ ID NO: 1750690 - DNA, 15 bp, Homo sapiens
ttgggataaacaccc

SEQ ID NO: 1750691 - DNA, 15 bp, Homo sapiens
tgggataaacaccca

SEQ ID NO: 1750692 - DNA, 15 bp, Homo sapiens
gggataaacacccag

SEQ ID NO: 1750693 - DNA, 15 bp, Homo sapiens
ggataaacacccagg

SEQ ID NO: 1750694 - DNA, 15 bp, Homo sapiens
gataaacacccagga

SEQ ID NO: 1750695 - DNA, 15 bp, Homo sapiens
ataaacacccaggag

SEQ ID NO: 1750696 - DNA, 15 bp, Homo sapiens
taaacacccaggagt

SEQ ID NO: 1750697 - DNA, 15 bp, Homo sapiens
aaacacccaggagta

SEQ ID NO: 1750698 - DNA, 15 bp, Homo sapiens
aacacccaggagtag

SEQ ID NO: 1750699 - DNA, 15 bp, Homo sapiens
acacccaggagtaga

SEQ ID NO: 1750700 - DNA, 15 bp, Homo sapiens
cacccaggagtagaa

SEQ ID NO: 1750701 - DNA, 15 bp, Homo sapiens
acccaggagtagaat

SEQ ID NO: 1750702 - DNA, 15 bp, Homo sapiens
cccaggagtagaatt

SEQ ID NO: 1750703 - DNA, 15 bp, Homo sapiens
ccaggagtagaattg

SEQ ID NO: 1750704 - DNA, 15 bp, Homo sapiens
caggagtagaattgt

SEQ ID NO: 1750705 - DNA, 15 bp, Homo sapiens
aggagtagaattgtg

SEQ ID NO: 1750706 - DNA, 15 bp, Homo sapiens
ggagtagaattgtgg

SEQ ID NO: 1750707 - DNA, 15 bp, Homo sapiens
gagtagaattgtgga

SEQ ID NO: 1750708 - DNA, 15 bp, Homo sapiens
agtagaattgtggag

SEQ ID NO: 1750709 - DNA, 15 bp, Homo sapiens
gtagaattgtggagc

SEQ ID NO: 1750710 - DNA, 15 bp, Homo sapiens
tagaattgtggagca

SEQ ID NO: 1750711 - DNA, 15 bp, Homo sapiens
agaattgtggagcag

SEQ ID NO: 1750712 - DNA, 15 bp, Homo sapiens
gaattgtggagcagt

SEQ ID NO: 1750713 - DNA, 15 bp, Homo sapiens
aattgtggagcagta

SEQ ID NO: 1750714 - DNA, 15 bp, Homo sapiens
attgtggagcagtat

SEQ ID NO: 1750715 - DNA, 15 bp, Homo sapiens
ttgtggagcagtatg

SEQ ID NO: 1750716 - DNA, 15 bp, Homo sapiens
tgtggagcagtatgg

SEQ ID NO: 1750717 - DNA, 15 bp, Homo sapiens
gtggagcagtatggc

SEQ ID NO: 1750718 - DNA, 15 bp, Homo sapiens
tggagcagtatggca

SEQ ID NO: 1750719 - DNA, 15 bp, Homo sapiens
ggagcagtatggcaa

SEQ ID NO: 1750720 - DNA, 15 bp, Homo sapiens
gagcagtatggcaat

SEQ ID NO: 1750721 - DNA, 15 bp, Homo sapiens
agcagtatggcaatt

SEQ ID NO: 1750722 - DNA, 15 bp, Homo sapiens
gcagtatggcaattt

SEQ ID NO: 1750723 - DNA, 15 bp, Homo sapiens
cagtatggcaatttc

SEQ ID NO: 1750724 - DNA, 15 bp, Homo sapiens
agtatggcaatttca

SEQ ID NO: 1750725 - DNA, 15 bp, Homo sapiens
gtatggcaatttcat

SEQ ID NO: 1750726 - DNA, 15 bp, Homo sapiens
tatggcaatttcatg

SEQ ID NO: 1750727 - DNA, 15 bp, Homo sapiens
atggcaatttcatgt

SEQ ID NO: 1750728 - DNA, 15 bp, Homo sapiens
tggcaatttcatgtt

SEQ ID NO: 1750729 - DNA, 15 bp, Homo sapiens
ggcaatttcatgttt

SEQ ID NO: 1750730 - DNA, 15 bp, Homo sapiens
gcaatttcatgttta

SEQ ID NO: 1750731 - DNA, 15 bp, Homo sapiens
caatttcatgtttag

SEQ ID NO: 1750732 - DNA, 15 bp, Homo sapiens
aatttcatgtttagt

SEQ ID NO: 1750733 - DNA, 15 bp, Homo sapiens
atttcatgtttagtt

SEQ ID NO: 1750734 - DNA, 15 bp, Homo sapiens
tttcatgtttagttt

SEQ ID NO: 1750735 - DNA, 15 bp, Homo sapiens
ttcatgtttagttta

SEQ ID NO: 1750736 - DNA, 15 bp, Homo sapiens
tcatgtttagtttat

SEQ ID NO: 1750737 - DNA, 15 bp, Homo sapiens
catgtttagtttata

SEQ ID NO: 1750738 - DNA, 15 bp, Homo sapiens
atgtttagtttataa

SEQ ID NO: 1750739 - DNA, 15 bp, Homo sapiens
tgtttagtttataag

SEQ ID NO: 1750740 - DNA, 15 bp, Homo sapiens
gtttagtttataagc

SEQ ID NO: 1750741 - DNA, 15 bp, Homo sapiens
tttagtttataagcc

SEQ ID NO: 1750742 - DNA, 15 bp, Homo sapiens
ttagtttataagcca

SEQ ID NO: 1750743 - DNA, 15 bp, Homo sapiens
tagtttataagccac

SEQ ID NO: 1750744 - DNA, 15 bp, Homo sapiens
agtttataagccact

SEQ ID NO: 1750745 - DNA, 15 bp, Homo sapiens
gtttataagccactg

SEQ ID NO: 1750746 - DNA, 15 bp, Homo sapiens
tttataagccactgc

SEQ ID NO: 1750747 - DNA, 15 bp, Homo sapiens
ttataagccactgct

SEQ ID NO: 1750748 - DNA, 15 bp, Homo sapiens
tataagccactgcta

SEQ ID NO: 1750749 - DNA, 15 bp, Homo sapiens
ataagccactgctaa

SEQ ID NO: 1750750 - DNA, 15 bp, Homo sapiens
taagccactgctaaa

SEQ ID NO: 1750751 - DNA, 15 bp, Homo sapiens
aagccactgctaaac

SEQ ID NO: 1750752 - DNA, 15 bp, Homo sapiens
agccactgctaaact

SEQ ID NO: 1750753 - DNA, 15 bp, Homo sapiens
gccactgctaaactg

SEQ ID NO: 1750754 - DNA, 15 bp, Homo sapiens
ccactgctaaactgt

SEQ ID NO: 1750755 - DNA, 15 bp, Homo sapiens
cactgctaaactgtt

SEQ ID NO: 1750756 - DNA, 15 bp, Homo sapiens
actgctaaactgttt

SEQ ID NO: 1750757 - DNA, 15 bp, Homo sapiens
ctgctaaactgtttt

SEQ ID NO: 1750758 - DNA, 15 bp, Homo sapiens
gctaaactgttttcc

SEQ ID NO: 1750759 - DNA, 15 bp, Homo sapiens
ctaaactgttttcca

SEQ ID NO: 1750760 - DNA, 15 bp, Homo sapiens
taaactgttttccag

SEQ ID NO: 1750761 - DNA, 15 bp, Homo sapiens
aaactgttttccaga

SEQ ID NO: 1750762 - DNA, 15 bp, Homo sapiens
aactgttttccagag

SEQ ID NO: 1750763 - DNA, 15 bp, Homo sapiens
actgttttccagagt

SEQ ID NO: 1750764 - DNA, 15 bp, Homo sapiens
ctgttttccagagtg

SEQ ID NO: 1750765 - DNA, 15 bp, Homo sapiens
tgttttccagagtgg

SEQ ID NO: 1750766 - DNA, 15 bp, Homo sapiens
gttttccagagtggc

SEQ ID NO: 1750767 - DNA, 15 bp, Homo sapiens
ttttccagagtggcc

SEQ ID NO: 1750768 - DNA, 15 bp, Homo sapiens
tttccagagtggcca

SEQ ID NO: 1750769 - DNA, 15 bp, Homo sapiens
ttccagagtggccat

SEQ ID NO: 1750770 - DNA, 15 bp, Homo sapiens
tccagagtggccatc

SEQ ID NO: 1750771 - DNA, 15 bp, Homo sapiens
ccagagtggccatcc

SEQ ID NO: 1750772 - DNA, 15 bp, Homo sapiens
cagagtggccatccc

SEQ ID NO: 1750773 - DNA, 15 bp, Homo sapiens
agagtggccatccca

SEQ ID NO: 1750774 - DNA, 15 bp, Homo sapiens
gagtggccatcccat

SEQ ID NO: 1750775 - DNA, 15 bp, Homo sapiens
agtggccatcccatt

SEQ ID NO: 1750776 - DNA, 15 bp, Homo sapiens
gtggccatcccattt

SEQ ID NO: 1750777 - DNA, 15 bp, Homo sapiens
tggccatcccatttt

SEQ ID NO: 1750778 - DNA, 15 bp, Homo sapiens
ggccatcccatttta

SEQ ID NO: 1750779 - DNA, 15 bp, Homo sapiens
gccatcccattttac

SEQ ID NO: 1750780 - DNA, 15 bp, Homo sapiens
ccatcccattttaca

SEQ ID NO: 1750781 - DNA, 15 bp, Homo sapiens
catcccattttacat

SEQ ID NO: 1750782 - DNA, 15 bp, Homo sapiens
atcccattttacatt

SEQ ID NO: 1750783 - DNA, 15 bp, Homo sapiens
tcccattttacattc

SEQ ID NO: 1750784 - DNA, 15 bp, Homo sapiens
cccattttacattcc

SEQ ID NO: 1750785 - DNA, 15 bp, Homo sapiens
ccattttacattcct

SEQ ID NO: 1750786 - DNA, 15 bp, Homo sapiens
cattttacattccta

SEQ ID NO: 1750787 - DNA, 15 bp, Homo sapiens
attttacattcctac

SEQ ID NO: 1750788 - DNA, 15 bp, Homo sapiens
ttttacattcctacc

SEQ ID NO: 1750789 - DNA, 15 bp, Homo sapiens
tttacattcctacca

SEQ ID NO: 1750790 - DNA, 15 bp, Homo sapiens
ttacattcctaccag

SEQ ID NO: 1750791 - DNA, 15 bp, Homo sapiens
tacattcctaccagc

SEQ ID NO: 1750792 - DNA, 15 bp, Homo sapiens
acattcctaccagca

SEQ ID NO: 1750793 - DNA, 15 bp, Homo sapiens
cattcctaccagcaa

SEQ ID NO: 1750794 - DNA, 15 bp, Homo sapiens
attcctaccagcaat

SEQ ID NO: 1750795 - DNA, 15 bp, Homo sapiens
ttcctaccagcaatg

SEQ ID NO: 1750796 - DNA, 15 bp, Homo sapiens
tcctaccagcaatgt

SEQ ID NO: 1750797 - DNA, 15 bp, Homo sapiens
cctaccagcaatgtg

SEQ ID NO: 1750798 - DNA, 15 bp, Homo sapiens
ctaccagcaatgtgt

SEQ ID NO: 1750799 - DNA, 15 bp, Homo sapiens
taccagcaatgtgta

SEQ ID NO: 1750800 - DNA, 15 bp, Homo sapiens
accagcaatgtgtaa

SEQ ID NO: 1750801 - DNA, 15 bp, Homo sapiens
ccagcaatgtgtaag

SEQ ID NO: 1750802 - DNA, 15 bp, Homo sapiens
cagcaatgtgtaagt

SEQ ID NO: 1750803 - DNA, 15 bp, Homo sapiens
agcaatgtgtaagtg

SEQ ID NO: 1750804 - DNA, 15 bp, Homo sapiens
gcaatgtgtaagtga

SEQ ID NO: 1750805 - DNA, 15 bp, Homo sapiens
caatgtgtaagtgat

SEQ ID NO: 1750806 - DNA, 15 bp, Homo sapiens
aatgtgtaagtgatg

SEQ ID NO: 1750807 - DNA, 15 bp, Homo sapiens
atgtgtaagtgatgt

SEQ ID NO: 1750808 - DNA, 15 bp, Homo sapiens
tgtgtaagtgatgta

SEQ ID NO: 1750809 - DNA, 15 bp, Homo sapiens
gtgtaagtgatgtag

SEQ ID NO: 1750810 - DNA, 15 bp, Homo sapiens
tgtaagtgatgtagt

SEQ ID NO: 1750811 - DNA, 15 bp, Homo sapiens
gtaagtgatgtagtt

SEQ ID NO: 1750812 - DNA, 15 bp, Homo sapiens
taagtgatgtagttt

SEQ ID NO: 1750813 - DNA, 15 bp, Homo sapiens
aagtgatgtagtttc

SEQ ID NO: 1750814 - DNA, 15 bp, Homo sapiens
agtgatgtagtttct

SEQ ID NO: 1750815 - DNA, 15 bp, Homo sapiens
gtgatgtagtttctc

SEQ ID NO: 1750816 - DNA, 15 bp, Homo sapiens
tgatgtagtttctct

SEQ ID NO: 1750817 - DNA, 15 bp, Homo sapiens
gatgtagtttctctg

SEQ ID NO: 1750818 - DNA, 15 bp, Homo sapiens
atgtagtttctctga

SEQ ID NO: 1750819 - DNA, 15 bp, Homo sapiens
tgtagtttctctgaa

SEQ ID NO: 1750820 - DNA, 15 bp, Homo sapiens
gtagtttctctgaat

SEQ ID NO: 1750821 - DNA, 15 bp, Homo sapiens
tagtttctctgaatc

SEQ ID NO: 1750822 - DNA, 15 bp, Homo sapiens
agtttctctgaatct

SEQ ID NO: 1750823 - DNA, 15 bp, Homo sapiens
gtttctctgaatctt

SEQ ID NO: 1750824 - DNA, 15 bp, Homo sapiens
tttctctgaatcttt

SEQ ID NO: 1750825 - DNA, 15 bp, Homo sapiens
ttctctgaatctttg

SEQ ID NO: 1750826 - DNA, 15 bp, Homo sapiens
tctctgaatctttgc

SEQ ID NO: 1750827 - DNA, 15 bp, Homo sapiens
ctctgaatctttgcc

SEQ ID NO: 1750828 - DNA, 15 bp, Homo sapiens
tctgaatctttgcca

SEQ ID NO: 1750829 - DNA, 15 bp, Homo sapiens
ctgaatctttgccag

SEQ ID NO: 1750830 - DNA, 15 bp, Homo sapiens
tgaatctttgccagc

SEQ ID NO: 1750831 - DNA, 15 bp, Homo sapiens
gaatctttgccagca

SEQ ID NO: 1750832 - DNA, 15 bp, Homo sapiens
aatctttgccagcat

SEQ ID NO: 1750833 - DNA, 15 bp, Homo sapiens
atctttgccagcatt

SEQ ID NO: 1750834 - DNA, 15 bp, Homo sapiens
tctttgccagcattt

SEQ ID NO: 1750835 - DNA, 15 bp, Homo sapiens
ctttgccagcattta

SEQ ID NO: 1750836 - DNA, 15 bp, Homo sapiens
tttgccagcatttac

SEQ ID NO: 1750837 - DNA, 15 bp, Homo sapiens
ttgccagcatttact

SEQ ID NO: 1750838 - DNA, 15 bp, Homo sapiens
tgccagcatttactg

SEQ ID NO: 1750839 - DNA, 15 bp, Homo sapiens
gccagcatttactgt

SEQ ID NO: 1750840 - DNA, 15 bp, Homo sapiens
ccagcatttactgtt

SEQ ID NO: 1750841 - DNA, 15 bp, Homo sapiens
cagcatttactgttg

SEQ ID NO: 1750842 - DNA, 15 bp, Homo sapiens
agcatttactgttgt

SEQ ID NO: 1750843 - DNA, 15 bp, Homo sapiens
gcatttactgttgtc

SEQ ID NO: 1750844 - DNA, 15 bp, Homo sapiens
catttactgttgtca

SEQ ID NO: 1750845 - DNA, 15 bp, Homo sapiens
atttactgttgtcat

SEQ ID NO: 1750846 - DNA, 15 bp, Homo sapiens
tttactgttgtcatt

SEQ ID NO: 1750847 - DNA, 15 bp, Homo sapiens
ttactgttgtcatta

SEQ ID NO: 1750848 - DNA, 15 bp, Homo sapiens
tactgttgtcattag

SEQ ID NO: 1750849 - DNA, 15 bp, Homo sapiens
actgttgtcattagt

SEQ ID NO: 1750850 - DNA, 15 bp, Homo sapiens
ctgttgtcattagtt

SEQ ID NO: 1750851 - DNA, 15 bp, Homo sapiens
tgttgtcattagttt

SEQ ID NO: 1750852 - DNA, 15 bp, Homo sapiens
gttgtcattagtttt

SEQ ID NO: 1750853 - DNA, 15 bp, Homo sapiens
ttgtcattagttttt

SEQ ID NO: 1750854 - DNA, 15 bp, Homo sapiens
tgtcattagttttta

SEQ ID NO: 1750855 - DNA, 15 bp, Homo sapiens
gtcattagtttttat

SEQ ID NO: 1750856 - DNA, 15 bp, Homo sapiens
tcattagtttttatt

SEQ ID NO: 1750857 - DNA, 15 bp, Homo sapiens
cattagtttttattt

SEQ ID NO: 1750858 - DNA, 15 bp, Homo sapiens
attagtttttatttt

SEQ ID NO: 1750859 - DNA, 15 bp, Homo sapiens
ttagtttttattttt

SEQ ID NO: 1750860 - DNA, 15 bp, Homo sapiens
tagtttttattttta

SEQ ID NO: 1750861 - DNA, 15 bp, Homo sapiens
agtttttatttttac

SEQ ID NO: 1750862 - DNA, 15 bp, Homo sapiens
gtttttatttttacc

SEQ ID NO: 1750863 - DNA, 15 bp, Homo sapiens
tttttatttttacca

SEQ ID NO: 1750864 - DNA, 15 bp, Homo sapiens
ttttatttttaccac

SEQ ID NO: 1750865 - DNA, 15 bp, Homo sapiens
tttatttttaccact

SEQ ID NO: 1750866 - DNA, 15 bp, Homo sapiens
ttatttttaccactc

SEQ ID NO: 1750867 - DNA, 15 bp, Homo sapiens
tatttttaccactct

SEQ ID NO: 1750868 - DNA, 15 bp, Homo sapiens
atttttaccactctg

SEQ ID NO: 1750869 - DNA, 15 bp, Homo sapiens
tttttaccactctga

SEQ ID NO: 1750870 - DNA, 15 bp, Homo sapiens
ttttaccactctgat

SEQ ID NO: 1750871 - DNA, 15 bp, Homo sapiens
tttaccactctgata

SEQ ID NO: 1750872 - DNA, 15 bp, Homo sapiens
ttaccactctgataa

SEQ ID NO: 1750873 - DNA, 15 bp, Homo sapiens
taccactctgataag

SEQ ID NO: 1750874 - DNA, 15 bp, Homo sapiens
accactctgataaga

SEQ ID NO: 1750875 - DNA, 15 bp, Homo sapiens
ccactctgataagag

SEQ ID NO: 1750876 - DNA, 15 bp, Homo sapiens
cactctgataagagt

SEQ ID NO: 1750877 - DNA, 15 bp, Homo sapiens
actctgataagagtg

SEQ ID NO: 1750878 - DNA, 15 bp, Homo sapiens
ctctgataagagtgt

SEQ ID NO: 1750879 - DNA, 15 bp, Homo sapiens
tctgataagagtgta

SEQ ID NO: 1750880 - DNA, 15 bp, Homo sapiens
ctgataagagtgtag

SEQ ID NO: 1750881 - DNA, 15 bp, Homo sapiens
tgataagagtgtagt

SEQ ID NO: 1750882 - DNA, 15 bp, Homo sapiens
gataagagtgtagtg

SEQ ID NO: 1750883 - DNA, 15 bp, Homo sapiens
ataagagtgtagtga

SEQ ID NO: 1750884 - DNA, 15 bp, Homo sapiens
taagagtgtagtgat

SEQ ID NO: 1750885 - DNA, 15 bp, Homo sapiens
aagagtgtagtgata

SEQ ID NO: 1750886 - DNA, 15 bp, Homo sapiens
agagtgtagtgatac

SEQ ID NO: 1750887 - DNA, 15 bp, Homo sapiens
gagtgtagtgataca

SEQ ID NO: 1750888 - DNA, 15 bp, Homo sapiens
agtgtagtgatacat

SEQ ID NO: 1750889 - DNA, 15 bp, Homo sapiens
gtgtagtgatacatc

SEQ ID NO: 1750890 - DNA, 15 bp, Homo sapiens
tgtagtgatacatca

SEQ ID NO: 1750891 - DNA, 15 bp, Homo sapiens
gtagtgatacatcac

SEQ ID NO: 1750892 - DNA, 15 bp, Homo sapiens
tagtgatacatcact

SEQ ID NO: 1750893 - DNA, 15 bp, Homo sapiens
agtgatacatcactg

SEQ ID NO: 1750894 - DNA, 15 bp, Homo sapiens
gtgatacatcactgt

SEQ ID NO: 1750895 - DNA, 15 bp, Homo sapiens
tgatacatcactgtg

SEQ ID NO: 1750896 - DNA, 15 bp, Homo sapiens
gatacatcactgtgg

SEQ ID NO: 1750897 - DNA, 15 bp, Homo sapiens
atacatcactgtggc

SEQ ID NO: 1750898 - DNA, 15 bp, Homo sapiens
tacatcactgtggct

SEQ ID NO: 1750899 - DNA, 15 bp, Homo sapiens
catcactgtggcttt

SEQ ID NO: 1750900 - DNA, 15 bp, Homo sapiens
atcactgtggcttta

SEQ ID NO: 1750901 - DNA, 15 bp, Homo sapiens
tcactgtggctttaa

SEQ ID NO: 1750902 - DNA, 15 bp, Homo sapiens
cactgtggctttaat

SEQ ID NO: 1750903 - DNA, 15 bp, Homo sapiens
actgtggctttaata

SEQ ID NO: 1750904 - DNA, 15 bp, Homo sapiens
ctgtggctttaatat

SEQ ID NO: 1750905 - DNA, 15 bp, Homo sapiens
tgtggctttaatatg

SEQ ID NO: 1750906 - DNA, 15 bp, Homo sapiens
gtggctttaatatgc

SEQ ID NO: 1750907 - DNA, 15 bp, Homo sapiens
tggctttaatatgca

SEQ ID NO: 1750908 - DNA, 15 bp, Homo sapiens
ggctttaatatgcat

SEQ ID NO: 1750909 - DNA, 15 bp, Homo sapiens
gctttaatatgcatt

SEQ ID NO: 1750910 - DNA, 15 bp, Homo sapiens
ctttaatatgcattt

SEQ ID NO: 1750911 - DNA, 15 bp, Homo sapiens
tttaatatgcatttc

SEQ ID NO: 1750912 - DNA, 15 bp, Homo sapiens
ttaatatgcatttcc

SEQ ID NO: 1750913 - DNA, 15 bp, Homo sapiens
taatatgcatttccc

SEQ ID NO: 1750914 - DNA, 15 bp, Homo sapiens
aatatgcatttccca

SEQ ID NO: 1750915 - DNA, 15 bp, Homo sapiens
atatgcatttcccaa

SEQ ID NO: 1750916 - DNA, 15 bp, Homo sapiens
tatgcatttcccaat

SEQ ID NO: 1750917 - DNA, 15 bp, Homo sapiens
atgcatttcccaatg

SEQ ID NO: 1750918 - DNA, 15 bp, Homo sapiens
tgcatttcccaatgg

SEQ ID NO: 1750919 - DNA, 15 bp, Homo sapiens
gcatttcccaatggc

SEQ ID NO: 1750920 - DNA, 15 bp, Homo sapiens
catttcccaatggca

SEQ ID NO: 1750921 - DNA, 15 bp, Homo sapiens
atttcccaatggcaa

SEQ ID NO: 1750922 - DNA, 15 bp, Homo sapiens
tttcccaatggcaaa

SEQ ID NO: 1750923 - DNA, 15 bp, Homo sapiens
ttcccaatggcaaat

SEQ ID NO: 1750924 - DNA, 15 bp, Homo sapiens
cccaatggcaaatga

SEQ ID NO: 1750925 - DNA, 15 bp, Homo sapiens
ccaatggcaaatgat

SEQ ID NO: 1750926 - DNA, 15 bp, Homo sapiens
caatggcaaatgatg

SEQ ID NO: 1750927 - DNA, 15 bp, Homo sapiens
aatggcaaatgatgt

SEQ ID NO: 1750928 - DNA, 15 bp, Homo sapiens
atggcaaatgatgtt

SEQ ID NO: 1750929 - DNA, 15 bp, Homo sapiens
tggcaaatgatgttg

SEQ ID NO: 1750930 - DNA, 15 bp, Homo sapiens
ggcaaatgatgttga

SEQ ID NO: 1750931 - DNA, 15 bp, Homo sapiens
gcaaatgatgttgaa

SEQ ID NO: 1750932 - DNA, 15 bp, Homo sapiens
caaatgatgttgaac

SEQ ID NO: 1750933 - DNA, 15 bp, Homo sapiens
aaatgatgttgaaca

SEQ ID NO: 1750934 - DNA, 15 bp, Homo sapiens
aatgatgttgaacat

SEQ ID NO: 1750935 - DNA, 15 bp, Homo sapiens
atgatgttgaacata

SEQ ID NO: 1750936 - DNA, 15 bp, Homo sapiens
tgatgttgaacatag

SEQ ID NO: 1750937 - DNA, 15 bp, Homo sapiens
gatgttgaacatagt

SEQ ID NO: 1750938 - DNA, 15 bp, Homo sapiens
atgttgaacatagtt

SEQ ID NO: 1750939 - DNA, 15 bp, Homo sapiens
tgttgaacatagttt

SEQ ID NO: 1750940 - DNA, 15 bp, Homo sapiens
gttgaacatagtttt

SEQ ID NO: 1750941 - DNA, 15 bp, Homo sapiens
ttgaacatagttttt

SEQ ID NO: 1750942 - DNA, 15 bp, Homo sapiens
tgaacatagtttttt

SEQ ID NO: 1750943 - DNA, 15 bp, Homo sapiens
gaacatagtttttta

SEQ ID NO: 1750944 - DNA, 15 bp, Homo sapiens
aacatagttttttat

SEQ ID NO: 1750945 - DNA, 15 bp, Homo sapiens
acatagttttttata

SEQ ID NO: 1750946 - DNA, 15 bp, Homo sapiens
catagttttttatat

SEQ ID NO: 1750947 - DNA, 15 bp, Homo sapiens
atagttttttatatg

SEQ ID NO: 1750948 - DNA, 15 bp, Homo sapiens
tagttttttatatgc

SEQ ID NO: 1750949 - DNA, 15 bp, Homo sapiens
agttttttatatgct

SEQ ID NO: 1750950 - DNA, 15 bp, Homo sapiens
gttttttatatgctt

SEQ ID NO: 1750951 - DNA, 15 bp, Homo sapiens
ttttttatatgctta

SEQ ID NO: 1750952 - DNA, 15 bp, Homo sapiens
tttttatatgcttat

SEQ ID NO: 1750953 - DNA, 15 bp, Homo sapiens
ttttatatgcttatt

SEQ ID NO: 1750954 - DNA, 15 bp, Homo sapiens
tttatatgcttattt

SEQ ID NO: 1750955 - DNA, 15 bp, Homo sapiens
ttatatgcttattta

SEQ ID NO: 1750956 - DNA, 15 bp, Homo sapiens
tatatgcttatttac

SEQ ID NO: 1750957 - DNA, 15 bp, Homo sapiens
atatgcttatttacc

SEQ ID NO: 1750958 - DNA, 15 bp, Homo sapiens
tatgcttatttacca

SEQ ID NO: 1750959 - DNA, 15 bp, Homo sapiens
atgcttatttaccat

SEQ ID NO: 1750960 - DNA, 15 bp, Homo sapiens
tgcttatttaccatc

SEQ ID NO: 1750961 - DNA, 15 bp, Homo sapiens
gcttatttaccatct

SEQ ID NO: 1750962 - DNA, 15 bp, Homo sapiens
cttatttaccatcta

SEQ ID NO: 1750963 - DNA, 15 bp, Homo sapiens
ttatttaccatctat

SEQ ID NO: 1750964 - DNA, 15 bp, Homo sapiens
tatttaccatctata

SEQ ID NO: 1750965 - DNA, 15 bp, Homo sapiens
atttaccatctatat

SEQ ID NO: 1750966 - DNA, 15 bp, Homo sapiens
tttaccatctatata

SEQ ID NO: 1750967 - DNA, 15 bp, Homo sapiens
ttaccatctatatat

SEQ ID NO: 1750968 - DNA, 15 bp, Homo sapiens
taccatctatatatc

SEQ ID NO: 1750969 - DNA, 15 bp, Homo sapiens
accatctatatatcc

SEQ ID NO: 1750970 - DNA, 15 bp, Homo sapiens
ccatctatatatcct

SEQ ID NO: 1750971 - DNA, 15 bp, Homo sapiens
catctatatatcctc

SEQ ID NO: 1750972 - DNA, 15 bp, Homo sapiens
atctatatatcctct

SEQ ID NO: 1750973 - DNA, 15 bp, Homo sapiens
tctatatatcctctt

SEQ ID NO: 1750974 - DNA, 15 bp, Homo sapiens
ctatatatcctcttg

SEQ ID NO: 1750975 - DNA, 15 bp, Homo sapiens
tatatatcctcttgg

SEQ ID NO: 1750976 - DNA, 15 bp, Homo sapiens
atatatcctcttggt

SEQ ID NO: 1750977 - DNA, 15 bp, Homo sapiens
tatatcctcttggtg

SEQ ID NO: 1750978 - DNA, 15 bp, Homo sapiens
atatcctcttggtga

SEQ ID NO: 1750979 - DNA, 15 bp, Homo sapiens
tatcctcttggtgaa

SEQ ID NO: 1750980 - DNA, 15 bp, Homo sapiens
atcctcttggtgaaa

SEQ ID NO: 1750981 - DNA, 15 bp, Homo sapiens
tcctcttggtgaaat

SEQ ID NO: 1750982 - DNA, 15 bp, Homo sapiens
cctcttggtgaaatg

SEQ ID NO: 1750983 - DNA, 15 bp, Homo sapiens
ctcttggtgaaatgt

SEQ ID NO: 1750984 - DNA, 15 bp, Homo sapiens
tcttggtgaaatgtc

SEQ ID NO: 1750985 - DNA, 15 bp, Homo sapiens
cttggtgaaatgtct

SEQ ID NO: 1750986 - DNA, 15 bp, Homo sapiens
ttggtgaaatgtctc

SEQ ID NO: 1750987 - DNA, 15 bp, Homo sapiens
tggtgaaatgtctcc

SEQ ID NO: 1750988 - DNA, 15 bp, Homo sapiens
ggtgaaatgtctcca

SEQ ID NO: 1750989 - DNA, 15 bp, Homo sapiens
gtgaaatgtctccat

SEQ ID NO: 1750990 - DNA, 15 bp, Homo sapiens
tgaaatgtctccatg

SEQ ID NO: 1750991 - DNA, 15 bp, Homo sapiens
gaaatgtctccatgt

SEQ ID NO: 1750992 - DNA, 15 bp, Homo sapiens
aaatgtctccatgtt

SEQ ID NO: 1750993 - DNA, 15 bp, Homo sapiens
aatgtctccatgttg

SEQ ID NO: 1750994 - DNA, 15 bp, Homo sapiens
atgtctccatgttgt

SEQ ID NO: 1750995 - DNA, 15 bp, Homo sapiens
tgtctccatgttgtt

SEQ ID NO: 1750996 - DNA, 15 bp, Homo sapiens
gtctccatgttgttt

SEQ ID NO: 1750997 - DNA, 15 bp, Homo sapiens
tctccatgttgtttg

SEQ ID NO: 1750998 - DNA, 15 bp, Homo sapiens
ctccatgttgtttgc

SEQ ID NO: 1750999 - DNA, 15 bp, Homo sapiens
tccatgttgtttgcc

SEQ ID NO: 1751000 - DNA, 15 bp, Homo sapiens
ccatgttgtttgccc

SEQ ID NO: 1751001 - DNA, 15 bp, Homo sapiens
catgttgtttgccca

SEQ ID NO: 1751002 - DNA, 15 bp, Homo sapiens
atgttgtttgcccat

SEQ ID NO: 1751003 - DNA, 15 bp, Homo sapiens
tgttgtttgcccata

SEQ ID NO: 1751004 - DNA, 15 bp, Homo sapiens
gttgtttgcccatat

SEQ ID NO: 1751005 - DNA, 15 bp, Homo sapiens
ttgtttgcccatatt

SEQ ID NO: 1751006 - DNA, 15 bp, Homo sapiens
tgtttgcccatattc

SEQ ID NO: 1751007 - DNA, 15 bp, Homo sapiens
gtttgcccatattct

SEQ ID NO: 1751008 - DNA, 15 bp, Homo sapiens
tttgcccatattcta

SEQ ID NO: 1751009 - DNA, 15 bp, Homo sapiens
ttgcccatattctaa

SEQ ID NO: 1751010 - DNA, 15 bp, Homo sapiens
tgcccatattctaat

SEQ ID NO: 1751011 - DNA, 15 bp, Homo sapiens
gcccatattctaatt

SEQ ID NO: 1751012 - DNA, 15 bp, Homo sapiens
cccatattctaattg

SEQ ID NO: 1751013 - DNA, 15 bp, Homo sapiens
ccatattctaattgg

SEQ ID NO: 1751014 - DNA, 15 bp, Homo sapiens
catattctaattgga

SEQ ID NO: 1751015 - DNA, 15 bp, Homo sapiens
atattctaattggat

SEQ ID NO: 1751016 - DNA, 15 bp, Homo sapiens
tattctaattggatt

SEQ ID NO: 1751017 - DNA, 15 bp, Homo sapiens
attctaattggattt

SEQ ID NO: 1751018 - DNA, 15 bp, Homo sapiens
ttctaattggatttt

SEQ ID NO: 1751019 - DNA, 15 bp, Homo sapiens
tctaattggattttt

SEQ ID NO: 1751020 - DNA, 15 bp, Homo sapiens
ctaattggattttta

SEQ ID NO: 1751021 - DNA, 15 bp, Homo sapiens
taattggatttttat

SEQ ID NO: 1751022 - DNA, 15 bp, Homo sapiens
aattggatttttatc

SEQ ID NO: 1751023 - DNA, 15 bp, Homo sapiens
attggatttttatct

SEQ ID NO: 1751024 - DNA, 15 bp, Homo sapiens
ttggatttttatctt

SEQ ID NO: 1751025 - DNA, 15 bp, Homo sapiens
tggatttttatcttt

SEQ ID NO: 1751026 - DNA, 15 bp, Homo sapiens
ggatttttatctttt

SEQ ID NO: 1751027 - DNA, 15 bp, Homo sapiens
gatttttatctttta

SEQ ID NO: 1751028 - DNA, 15 bp, Homo sapiens
atttttatcttttac

SEQ ID NO: 1751029 - DNA, 15 bp, Homo sapiens
tttttatcttttact

SEQ ID NO: 1751030 - DNA, 15 bp, Homo sapiens
ttttatcttttactg

SEQ ID NO: 1751031 - DNA, 15 bp, Homo sapiens
tttatcttttactgc

SEQ ID NO: 1751032 - DNA, 15 bp, Homo sapiens
ttatcttttactgct

SEQ ID NO: 1751033 - DNA, 15 bp, Homo sapiens
tatcttttactgctg

SEQ ID NO: 1751034 - DNA, 15 bp, Homo sapiens
atcttttactgctga

SEQ ID NO: 1751035 - DNA, 15 bp, Homo sapiens
tcttttactgctgag

SEQ ID NO: 1751036 - DNA, 15 bp, Homo sapiens
cttttactgctgagt

SEQ ID NO: 1751037 - DNA, 15 bp, Homo sapiens
ttttactgctgagtt

SEQ ID NO: 1751038 - DNA, 15 bp, Homo sapiens
tttactgctgagttt

SEQ ID NO: 1751039 - DNA, 15 bp, Homo sapiens
ttactgctgagtttt

SEQ ID NO: 1751040 - DNA, 15 bp, Homo sapiens
tactgctgagttttc

SEQ ID NO: 1751041 - DNA, 15 bp, Homo sapiens
actgctgagttttca

SEQ ID NO: 1751042 - DNA, 15 bp, Homo sapiens
ctgctgagttttcag

SEQ ID NO: 1751043 - DNA, 15 bp, Homo sapiens
tgctgagttttcaga

SEQ ID NO: 1751044 - DNA, 15 bp, Homo sapiens
gctgagttttcagaa

SEQ ID NO: 1751045 - DNA, 15 bp, Homo sapiens
ctgagttttcagaag

SEQ ID NO: 1751046 - DNA, 15 bp, Homo sapiens
tgagttttcagaagt

SEQ ID NO: 1751047 - DNA, 15 bp, Homo sapiens
gagttttcagaagtt

SEQ ID NO: 1751048 - DNA, 15 bp, Homo sapiens
agttttcagaagttt

SEQ ID NO: 1751049 - DNA, 15 bp, Homo sapiens
gttttcagaagtttt

SEQ ID NO: 1751050 - DNA, 15 bp, Homo sapiens
tttcagaagtttttt

SEQ ID NO: 1751051 - DNA, 15 bp, Homo sapiens
ttcagaagttttttt

SEQ ID NO: 1751052 - DNA, 15 bp, Homo sapiens
tcagaagtttttttt

SEQ ID NO: 1751053 - DNA, 15 bp, Homo sapiens
cagaagttttttttg

SEQ ID NO: 1751054 - DNA, 15 bp, Homo sapiens
agaagttttttttgt

SEQ ID NO: 1751055 - DNA, 15 bp, Homo sapiens
gaagttttttttgtt

SEQ ID NO: 1751056 - DNA, 15 bp, Homo sapiens
aagttttttttgttt

SEQ ID NO: 1751057 - DNA, 15 bp, Homo sapiens
ttgtttgtttgttta

SEQ ID NO: 1751058 - DNA, 15 bp, Homo sapiens
tgtttgtttgtttaa

SEQ ID NO: 1751059 - DNA, 15 bp, Homo sapiens
gtttgtttgtttaac

SEQ ID NO: 1751060 - DNA, 15 bp, Homo sapiens
tttgtttgtttaaca

SEQ ID NO: 1751061 - DNA, 15 bp, Homo sapiens
ttgtttgtttaacat

SEQ ID NO: 1751062 - DNA, 15 bp, Homo sapiens
tgtttgtttaacata

SEQ ID NO: 1751063 - DNA, 15 bp, Homo sapiens
gtttgtttaacatat

SEQ ID NO: 1751064 - DNA, 15 bp, Homo sapiens
tttgtttaacatatt

SEQ ID NO: 1751065 - DNA, 15 bp, Homo sapiens
ttgtttaacatattg

SEQ ID NO: 1751066 - DNA, 15 bp, Homo sapiens
tgtttaacatattgt

SEQ ID NO: 1751067 - DNA, 15 bp, Homo sapiens
gtttaacatattgta

SEQ ID NO: 1751068 - DNA, 15 bp, Homo sapiens
tttaacatattgtaa

SEQ ID NO: 1751069 - DNA, 15 bp, Homo sapiens
ttaacatattgtaat

SEQ ID NO: 1751070 - DNA, 15 bp, Homo sapiens
taacatattgtaatt

SEQ ID NO: 1751071 - DNA, 15 bp, Homo sapiens
aacatattgtaatta

SEQ ID NO: 1751072 - DNA, 15 bp, Homo sapiens
acatattgtaattac

SEQ ID NO: 1751073 - DNA, 15 bp, Homo sapiens
catattgtaattact

SEQ ID NO: 1751074 - DNA, 15 bp, Homo sapiens
atattgtaattactg

SEQ ID NO: 1751075 - DNA, 15 bp, Homo sapiens
tattgtaattactgt

SEQ ID NO: 1751076 - DNA, 15 bp, Homo sapiens
attgtaattactgtt

SEQ ID NO: 1751077 - DNA, 15 bp, Homo sapiens
ttgtaattactgttg

SEQ ID NO: 1751078 - DNA, 15 bp, Homo sapiens
tgtaattactgttgg

SEQ ID NO: 1751079 - DNA, 15 bp, Homo sapiens
gtaattactgttgga

SEQ ID NO: 1751080 - DNA, 15 bp, Homo sapiens
taattactgttggat

SEQ ID NO: 1751081 - DNA, 15 bp, Homo sapiens
aattactgttggata

SEQ ID NO: 1751082 - DNA, 15 bp, Homo sapiens
attactgttggatat

SEQ ID NO: 1751083 - DNA, 15 bp, Homo sapiens
ttactgttggatatg

SEQ ID NO: 1751084 - DNA, 15 bp, Homo sapiens
tactgttggatatgt

SEQ ID NO: 1751085 - DNA, 15 bp, Homo sapiens
actgttggatatgta

SEQ ID NO: 1751086 - DNA, 15 bp, Homo sapiens
ctgttggatatgtag

SEQ ID NO: 1751087 - DNA, 15 bp, Homo sapiens
tgttggatatgtagt

SEQ ID NO: 1751088 - DNA, 15 bp, Homo sapiens
gttggatatgtagtt

SEQ ID NO: 1751089 - DNA, 15 bp, Homo sapiens
ttggatatgtagttt

SEQ ID NO: 1751090 - DNA, 15 bp, Homo sapiens
tggatatgtagtttg

SEQ ID NO: 1751091 - DNA, 15 bp, Homo sapiens
ggatatgtagtttgt

SEQ ID NO: 1751092 - DNA, 15 bp, Homo sapiens
gatatgtagtttgta

SEQ ID NO: 1751093 - DNA, 15 bp, Homo sapiens
atatgtagtttgtaa

SEQ ID NO: 1751094 - DNA, 15 bp, Homo sapiens
tatgtagtttgtaaa

SEQ ID NO: 1751095 - DNA, 15 bp, Homo sapiens
atgtagtttgtaaat

SEQ ID NO: 1751096 - DNA, 15 bp, Homo sapiens
tgtagtttgtaaatg

SEQ ID NO: 1751097 - DNA, 15 bp, Homo sapiens
gtagtttgtaaatgt

SEQ ID NO: 1751098 - DNA, 15 bp, Homo sapiens
tagtttgtaaatgtt

SEQ ID NO: 1751099 - DNA, 15 bp, Homo sapiens
agtttgtaaatgttt

SEQ ID NO: 1751100 - DNA, 15 bp, Homo sapiens
gtttgtaaatgtttt

SEQ ID NO: 1751101 - DNA, 15 bp, Homo sapiens
tttgtaaatgttttc

SEQ ID NO: 1751102 - DNA, 15 bp, Homo sapiens
ttgtaaatgttttct

SEQ ID NO: 1751103 - DNA, 15 bp, Homo sapiens
tgtaaatgttttctc

SEQ ID NO: 1751104 - DNA, 15 bp, Homo sapiens
gtaaatgttttctcc

SEQ ID NO: 1751105 - DNA, 15 bp, Homo sapiens
taaatgttttctccc

SEQ ID NO: 1751106 - DNA, 15 bp, Homo sapiens
aaatgttttctccca

SEQ ID NO: 1751107 - DNA, 15 bp, Homo sapiens
aatgttttctcccag

SEQ ID NO: 1751108 - DNA, 15 bp, Homo sapiens
atgttttctcccagt

SEQ ID NO: 1751109 - DNA, 15 bp, Homo sapiens
tgttttctcccagtc

SEQ ID NO: 1751110 - DNA, 15 bp, Homo sapiens
gttttctcccagtct

SEQ ID NO: 1751111 - DNA, 15 bp, Homo sapiens
ttttctcccagtctg

SEQ ID NO: 1751112 - DNA, 15 bp, Homo sapiens
tttctcccagtctgt

SEQ ID NO: 1751113 - DNA, 15 bp, Homo sapiens
ttctcccagtctgta

SEQ ID NO: 1751114 - DNA, 15 bp, Homo sapiens
tctcccagtctgtag

SEQ ID NO: 1751115 - DNA, 15 bp, Homo sapiens
ctcccagtctgtagc

SEQ ID NO: 1751116 - DNA, 15 bp, Homo sapiens
tcccagtctgtagct

SEQ ID NO: 1751117 - DNA, 15 bp, Homo sapiens
cccagtctgtagctt

SEQ ID NO: 1751118 - DNA, 15 bp, Homo sapiens
ccagtctgtagcttg

SEQ ID NO: 1751119 - DNA, 15 bp, Homo sapiens
cagtctgtagcttgt

SEQ ID NO: 1751120 - DNA, 15 bp, Homo sapiens
agtctgtagcttgtt

SEQ ID NO: 1751121 - DNA, 15 bp, Homo sapiens
gtctgtagcttgttt

SEQ ID NO: 1751122 - DNA, 15 bp, Homo sapiens
tctgtagcttgttta

SEQ ID NO: 1751123 - DNA, 15 bp, Homo sapiens
ctgtagcttgtttat

SEQ ID NO: 1751124 - DNA, 15 bp, Homo sapiens
tgtagcttgtttatt

SEQ ID NO: 1751125 - DNA, 15 bp, Homo sapiens
gtagcttgtttattc

SEQ ID NO: 1751126 - DNA, 15 bp, Homo sapiens
tagcttgtttattca

SEQ ID NO: 1751127 - DNA, 15 bp, Homo sapiens
agcttgtttattcat

SEQ ID NO: 1751128 - DNA, 15 bp, Homo sapiens
gcttgtttattcatc

SEQ ID NO: 1751129 - DNA, 15 bp, Homo sapiens
cttgtttattcatcc

SEQ ID NO: 1751130 - DNA, 15 bp, Homo sapiens
ttgtttattcatcct

SEQ ID NO: 1751131 - DNA, 15 bp, Homo sapiens
tgtttattcatccta

SEQ ID NO: 1751132 - DNA, 15 bp, Homo sapiens
gtttattcatcctat

SEQ ID NO: 1751133 - DNA, 15 bp, Homo sapiens
tattcatcctataag

SEQ ID NO: 1751134 - DNA, 15 bp, Homo sapiens
attcatcctataaga

SEQ ID NO: 1751135 - DNA, 15 bp, Homo sapiens
ttcatcctataagaa

SEQ ID NO: 1751136 - DNA, 15 bp, Homo sapiens
tcatcctataagaag

SEQ ID NO: 1751137 - DNA, 15 bp, Homo sapiens
catcctataagaagg

SEQ ID NO: 1751138 - DNA, 15 bp, Homo sapiens
atcctataagaaggt

SEQ ID NO: 1751139 - DNA, 15 bp, Homo sapiens
tcctataagaaggtc

SEQ ID NO: 1751140 - DNA, 15 bp, Homo sapiens
cctataagaaggtct

SEQ ID NO: 1751141 - DNA, 15 bp, Homo sapiens
ctataagaaggtctt

SEQ ID NO: 1751142 - DNA, 15 bp, Homo sapiens
tataagaaggtcttt

SEQ ID NO: 1751143 - DNA, 15 bp, Homo sapiens
ataagaaggtctttg

SEQ ID NO: 1751144 - DNA, 15 bp, Homo sapiens
taagaaggtctttgc

SEQ ID NO: 1751145 - DNA, 15 bp, Homo sapiens
aagaaggtctttgca

SEQ ID NO: 1751146 - DNA, 15 bp, Homo sapiens
agaaggtctttgcag

SEQ ID NO: 1751147 - DNA, 15 bp, Homo sapiens
gaaggtctttgcaga

SEQ ID NO: 1751148 - DNA, 15 bp, Homo sapiens
aaggtctttgcagag

SEQ ID NO: 1751149 - DNA, 15 bp, Homo sapiens
aggtctttgcagagc

SEQ ID NO: 1751150 - DNA, 15 bp, Homo sapiens
ggtctttgcagagca

SEQ ID NO: 1751151 - DNA, 15 bp, Homo sapiens
gtctttgcagagcaa

SEQ ID NO: 1751152 - DNA, 15 bp, Homo sapiens
tctttgcagagcaaa

SEQ ID NO: 1751153 - DNA, 15 bp, Homo sapiens
ctttgcagagcaaaa

SEQ ID NO: 1751154 - DNA, 15 bp, Homo sapiens
tttgcagagcaaaag

SEQ ID NO: 1751155 - DNA, 15 bp, Homo sapiens
ttgcagagcaaaagt

SEQ ID NO: 1751156 - DNA, 15 bp, Homo sapiens
gcagagcaaaagttt

SEQ ID NO: 1751157 - DNA, 15 bp, Homo sapiens
cagagcaaaagtttt

SEQ ID NO: 1751158 - DNA, 15 bp, Homo sapiens
agagcaaaagtttta

SEQ ID NO: 1751159 - DNA, 15 bp, Homo sapiens
gagcaaaagttttac

SEQ ID NO: 1751160 - DNA, 15 bp, Homo sapiens
agcaaaagttttact

SEQ ID NO: 1751161 - DNA, 15 bp, Homo sapiens
gcaaaagttttactt

SEQ ID NO: 1751162 - DNA, 15 bp, Homo sapiens
caaaagttttacttt

SEQ ID NO: 1751163 - DNA, 15 bp, Homo sapiens
aaaagttttactttt

SEQ ID NO: 1751164 - DNA, 15 bp, Homo sapiens
aaagttttacttttg

SEQ ID NO: 1751165 - DNA, 15 bp, Homo sapiens
aagttttacttttga

SEQ ID NO: 1751166 - DNA, 15 bp, Homo sapiens
agttttacttttgat

SEQ ID NO: 1751167 - DNA, 15 bp, Homo sapiens
gttttacttttgatg

SEQ ID NO: 1751168 - DNA, 15 bp, Homo sapiens
ttttacttttgatga

SEQ ID NO: 1751169 - DNA, 15 bp, Homo sapiens
tttacttttgatgag

SEQ ID NO: 1751170 - DNA, 15 bp, Homo sapiens
ttacttttgatgagg

SEQ ID NO: 1751171 - DNA, 15 bp, Homo sapiens
tacttttgatgaggt

SEQ ID NO: 1751172 - DNA, 15 bp, Homo sapiens
acttttgatgaggtc

SEQ ID NO: 1751173 - DNA, 15 bp, Homo sapiens
cttttgatgaggtcc

SEQ ID NO: 1751174 - DNA, 15 bp, Homo sapiens
tgaggtccaatttac

SEQ ID NO: 1751175 - DNA, 15 bp, Homo sapiens
gaggtccaatttacc

SEQ ID NO: 1751176 - DNA, 15 bp, Homo sapiens
aggtccaatttacca

SEQ ID NO: 1751177 - DNA, 15 bp, Homo sapiens
ggtccaatttaccaa

SEQ ID NO: 1751178 - DNA, 15 bp, Homo sapiens
gtccaatttaccaat

SEQ ID NO: 1751179 - DNA, 15 bp, Homo sapiens
tccaatttaccaatt

SEQ ID NO: 1751180 - DNA, 15 bp, Homo sapiens
ccaatttaccaattc

SEQ ID NO: 1751181 - DNA, 15 bp, Homo sapiens
caatttaccaattct

SEQ ID NO: 1751182 - DNA, 15 bp, Homo sapiens
aatttaccaattctt

SEQ ID NO: 1751183 - DNA, 15 bp, Homo sapiens
atttaccaattcttc

SEQ ID NO: 1751184 - DNA, 15 bp, Homo sapiens
tttaccaattcttcc

SEQ ID NO: 1751185 - DNA, 15 bp, Homo sapiens
ttaccaattcttcct

SEQ ID NO: 1751186 - DNA, 15 bp, Homo sapiens
taccaattcttcctt

SEQ ID NO: 1751187 - DNA, 15 bp, Homo sapiens
accaattcttccttt

SEQ ID NO: 1751188 - DNA, 15 bp, Homo sapiens
ccaattcttcctttt

SEQ ID NO: 1751189 - DNA, 15 bp, Homo sapiens
caattcttcctttta

SEQ ID NO: 1751190 - DNA, 15 bp, Homo sapiens
aattcttccttttat

SEQ ID NO: 1751191 - DNA, 15 bp, Homo sapiens
attcttccttttatg

SEQ ID NO: 1751192 - DNA, 15 bp, Homo sapiens
ttcttccttttatgg

SEQ ID NO: 1751193 - DNA, 15 bp, Homo sapiens
tcttccttttatgga

SEQ ID NO: 1751194 - DNA, 15 bp, Homo sapiens
cttccttttatggat

SEQ ID NO: 1751195 - DNA, 15 bp, Homo sapiens
ttccttttatggatt

SEQ ID NO: 1751196 - DNA, 15 bp, Homo sapiens
tccttttatggatta

SEQ ID NO: 1751197 - DNA, 15 bp, Homo sapiens
ccttttatggattat

SEQ ID NO: 1751198 - DNA, 15 bp, Homo sapiens
cttttatggattatg

SEQ ID NO: 1751199 - DNA, 15 bp, Homo sapiens
ttttatggattatgc

SEQ ID NO: 1751200 - DNA, 15 bp, Homo sapiens
tttatggattatgct

SEQ ID NO: 1751201 - DNA, 15 bp, Homo sapiens
ttatggattatgctt

SEQ ID NO: 1751202 - DNA, 15 bp, Homo sapiens
tatggattatgcttt

SEQ ID NO: 1751203 - DNA, 15 bp, Homo sapiens
atggattatgctttc

SEQ ID NO: 1751204 - DNA, 15 bp, Homo sapiens
tggattatgctttca

SEQ ID NO: 1751205 - DNA, 15 bp, Homo sapiens
ggattatgctttcag

SEQ ID NO: 1751206 - DNA, 15 bp, Homo sapiens
gattatgctttcagt

SEQ ID NO: 1751207 - DNA, 15 bp, Homo sapiens
attatgctttcagtg

SEQ ID NO: 1751208 - DNA, 15 bp, Homo sapiens
ttatgctttcagtgt

SEQ ID NO: 1751209 - DNA, 15 bp, Homo sapiens
tatgctttcagtgtc

SEQ ID NO: 1751210 - DNA, 15 bp, Homo sapiens
atgctttcagtgtca

SEQ ID NO: 1751211 - DNA, 15 bp, Homo sapiens
tgctttcagtgtcaa

SEQ ID NO: 1751212 - DNA, 15 bp, Homo sapiens
gctttcagtgtcaag

SEQ ID NO: 1751213 - DNA, 15 bp, Homo sapiens
ctttcagtgtcaagt

SEQ ID NO: 1751214 - DNA, 15 bp, Homo sapiens
tttcagtgtcaagtc

SEQ ID NO: 1751215 - DNA, 15 bp, Homo sapiens
ttcagtgtcaagtct

SEQ ID NO: 1751216 - DNA, 15 bp, Homo sapiens
tcagtgtcaagtcta

SEQ ID NO: 1751217 - DNA, 15 bp, Homo sapiens
cagtgtcaagtctaa

SEQ ID NO: 1751218 - DNA, 15 bp, Homo sapiens
agtgtcaagtctaag

SEQ ID NO: 1751219 - DNA, 15 bp, Homo sapiens
gtgtcaagtctaaga

SEQ ID NO: 1751220 - DNA, 15 bp, Homo sapiens
tgtcaagtctaagaa

SEQ ID NO: 1751221 - DNA, 15 bp, Homo sapiens
gtcaagtctaagaac

SEQ ID NO: 1751222 - DNA, 15 bp, Homo sapiens
tcaagtctaagaact

SEQ ID NO: 1751223 - DNA, 15 bp, Homo sapiens
caagtctaagaactc

SEQ ID NO: 1751224 - DNA, 15 bp, Homo sapiens
aagtctaagaactcg

SEQ ID NO: 1751225 - DNA, 15 bp, Homo sapiens
agtctaagaactcgt

SEQ ID NO: 1751226 - DNA, 15 bp, Homo sapiens
gtctaagaactcgtt

SEQ ID NO: 1751227 - DNA, 15 bp, Homo sapiens
tctaagaactcgttg

SEQ ID NO: 1751228 - DNA, 15 bp, Homo sapiens
ctaagaactcgttgc

SEQ ID NO: 1751229 - DNA, 15 bp, Homo sapiens
taagaactcgttgcc

SEQ ID NO: 1751230 - DNA, 15 bp, Homo sapiens
aagaactcgttgcct

SEQ ID NO: 1751231 - DNA, 15 bp, Homo sapiens
agaactcgttgccta

SEQ ID NO: 1751232 - DNA, 15 bp, Homo sapiens
gaactcgttgcctag

SEQ ID NO: 1751233 - DNA, 15 bp, Homo sapiens
aactcgttgcctagc

SEQ ID NO: 1751234 - DNA, 15 bp, Homo sapiens
actcgttgcctagcc

SEQ ID NO: 1751235 - DNA, 15 bp, Homo sapiens
ctcgttgcctagccc

SEQ ID NO: 1751236 - DNA, 15 bp, Homo sapiens
tcgttgcctagccct

SEQ ID NO: 1751237 - DNA, 15 bp, Homo sapiens
cgttgcctagcccta

SEQ ID NO: 1751238 - DNA, 15 bp, Homo sapiens
gttgcctagccctag

SEQ ID NO: 1751239 - DNA, 15 bp, Homo sapiens
ttgcctagccctagg

SEQ ID NO: 1751240 - DNA, 15 bp, Homo sapiens
tgcctagccctaggc

SEQ ID NO: 1751241 - DNA, 15 bp, Homo sapiens
gcctagccctaggcc

SEQ ID NO: 1751242 - DNA, 15 bp, Homo sapiens
cctagccctaggccc

SEQ ID NO: 1751243 - DNA, 15 bp, Homo sapiens
ctagccctaggccca

SEQ ID NO: 1751244 - DNA, 15 bp, Homo sapiens
tagccctaggcccaa

SEQ ID NO: 1751245 - DNA, 15 bp, Homo sapiens
agccctaggcccaaa

SEQ ID NO: 1751246 - DNA, 15 bp, Homo sapiens
gccctaggcccaaaa

SEQ ID NO: 1751247 - DNA, 15 bp, Homo sapiens
ccctaggcccaaaat

SEQ ID NO: 1751248 - DNA, 15 bp, Homo sapiens
cctaggcccaaaata

SEQ ID NO: 1751249 - DNA, 15 bp, Homo sapiens
ctaggcccaaaatat

SEQ ID NO: 1751250 - DNA, 15 bp, Homo sapiens
taggcccaaaatatt

SEQ ID NO: 1751251 - DNA, 15 bp, Homo sapiens
aggcccaaaatattt

SEQ ID NO: 1751252 - DNA, 15 bp, Homo sapiens
ggcccaaaatatttt

SEQ ID NO: 1751253 - DNA, 15 bp, Homo sapiens
gcccaaaatattttc

SEQ ID NO: 1751254 - DNA, 15 bp, Homo sapiens
cccaaaatattttct

SEQ ID NO: 1751255 - DNA, 15 bp, Homo sapiens
ccaaaatattttctc

SEQ ID NO: 1751256 - DNA, 15 bp, Homo sapiens
caaaatattttctcc

SEQ ID NO: 1751257 - DNA, 15 bp, Homo sapiens
aaaatattttctcca

SEQ ID NO: 1751258 - DNA, 15 bp, Homo sapiens
aaatattttctccat

SEQ ID NO: 1751259 - DNA, 15 bp, Homo sapiens
aatattttctccatg

SEQ ID NO: 1751260 - DNA, 15 bp, Homo sapiens
atattttctccatgt

SEQ ID NO: 1751261 - DNA, 15 bp, Homo sapiens
tattttctccatgtt

SEQ ID NO: 1751262 - DNA, 15 bp, Homo sapiens
attttctccatgttt

SEQ ID NO: 1751263 - DNA, 15 bp, Homo sapiens
ttttctccatgtttt

SEQ ID NO: 1751264 - DNA, 15 bp, Homo sapiens
tttctccatgttttt

SEQ ID NO: 1751265 - DNA, 15 bp, Homo sapiens
ttctccatgtttttt

SEQ ID NO: 1751266 - DNA, 15 bp, Homo sapiens
tctccatgttttttt

SEQ ID NO: 1751267 - DNA, 15 bp, Homo sapiens
ctccatgtttttttc

SEQ ID NO: 1751268 - DNA, 15 bp, Homo sapiens
tccatgtttttttct

SEQ ID NO: 1751269 - DNA, 15 bp, Homo sapiens
ccatgtttttttcta

SEQ ID NO: 1751270 - DNA, 15 bp, Homo sapiens
catgtttttttctaa

SEQ ID NO: 1751271 - DNA, 15 bp, Homo sapiens
atgtttttttctaaa

SEQ ID NO: 1751272 - DNA, 15 bp, Homo sapiens
tgtttttttctaaaa

SEQ ID NO: 1751273 - DNA, 15 bp, Homo sapiens
gtttttttctaaaag

SEQ ID NO: 1751274 - DNA, 15 bp, Homo sapiens
tttttttctaaaagt

SEQ ID NO: 1751275 - DNA, 15 bp, Homo sapiens
ttttttctaaaagtt

SEQ ID NO: 1751276 - DNA, 15 bp, Homo sapiens
tttttctaaaagttt

SEQ ID NO: 1751277 - DNA, 15 bp, Homo sapiens
ttttctaaaagtttt

SEQ ID NO: 1751278 - DNA, 15 bp, Homo sapiens
tttctaaaagtttta

SEQ ID NO: 1751279 - DNA, 15 bp, Homo sapiens
ttctaaaagttttat

SEQ ID NO: 1751280 - DNA, 15 bp, Homo sapiens
tctaaaagttttata

SEQ ID NO: 1751281 - DNA, 15 bp, Homo sapiens
ctaaaagttttatag

SEQ ID NO: 1751282 - DNA, 15 bp, Homo sapiens
taaaagttttatagc

SEQ ID NO: 1751283 - DNA, 15 bp, Homo sapiens
aaaagttttatagct

SEQ ID NO: 1751284 - DNA, 15 bp, Homo sapiens
aaagttttatagctt

SEQ ID NO: 1751285 - DNA, 15 bp, Homo sapiens
aagttttatagcttt

SEQ ID NO: 1751286 - DNA, 15 bp, Homo sapiens
agttttatagcttta

SEQ ID NO: 1751287 - DNA, 15 bp, Homo sapiens
gttttatagctttac

SEQ ID NO: 1751288 - DNA, 15 bp, Homo sapiens
ttttatagctttaca

SEQ ID NO: 1751289 - DNA, 15 bp, Homo sapiens
tttatagctttacat

SEQ ID NO: 1751290 - DNA, 15 bp, Homo sapiens
ttatagctttacatt

SEQ ID NO: 1751291 - DNA, 15 bp, Homo sapiens
tatagctttacattt

SEQ ID NO: 1751292 - DNA, 15 bp, Homo sapiens
atagctttacatttt

SEQ ID NO: 1751293 - DNA, 15 bp, Homo sapiens
tagctttacatttta

SEQ ID NO: 1751294 - DNA, 15 bp, Homo sapiens
agctttacattttaa

SEQ ID NO: 1751295 - DNA, 15 bp, Homo sapiens
gctttacattttaaa

SEQ ID NO: 1751296 - DNA, 15 bp, Homo sapiens
ctttacattttaaat

SEQ ID NO: 1751297 - DNA, 15 bp, Homo sapiens
tttacattttaaatt

SEQ ID NO: 1751298 - DNA, 15 bp, Homo sapiens
ttacattttaaattt

SEQ ID NO: 1751299 - DNA, 15 bp, Homo sapiens
tacattttaaatttc

SEQ ID NO: 1751300 - DNA, 15 bp, Homo sapiens
acattttaaatttca

SEQ ID NO: 1751301 - DNA, 15 bp, Homo sapiens
cattttaaatttcag

SEQ ID NO: 1751302 - DNA, 15 bp, Homo sapiens
attttaaatttcagt

SEQ ID NO: 1751303 - DNA, 15 bp, Homo sapiens
ttttaaatttcagtc

SEQ ID NO: 1751304 - DNA, 15 bp, Homo sapiens
tttaaatttcagtcc

SEQ ID NO: 1751305 - DNA, 15 bp, Homo sapiens
ttaaatttcagtcca

SEQ ID NO: 1751306 - DNA, 15 bp, Homo sapiens
taaatttcagtccat

SEQ ID NO: 1751307 - DNA, 15 bp, Homo sapiens
aaatttcagtccatg

SEQ ID NO: 1751308 - DNA, 15 bp, Homo sapiens
aatttcagtccatga

SEQ ID NO: 1751309 - DNA, 15 bp, Homo sapiens
atttcagtccatgat

SEQ ID NO: 1751310 - DNA, 15 bp, Homo sapiens
tttcagtccatgatc

SEQ ID NO: 1751311 - DNA, 15 bp, Homo sapiens
ttcagtccatgatcc

SEQ ID NO: 1751312 - DNA, 15 bp, Homo sapiens
tcagtccatgatcca

SEQ ID NO: 1751313 - DNA, 15 bp, Homo sapiens
cagtccatgatccat

SEQ ID NO: 1751314 - DNA, 15 bp, Homo sapiens
agtccatgatccatt

SEQ ID NO: 1751315 - DNA, 15 bp, Homo sapiens
gtccatgatccattt

SEQ ID NO: 1751316 - DNA, 15 bp, Homo sapiens
tccatgatccatttt

SEQ ID NO: 1751317 - DNA, 15 bp, Homo sapiens
ccatgatccattttt

SEQ ID NO: 1751318 - DNA, 15 bp, Homo sapiens
catgatccattttta

SEQ ID NO: 1751319 - DNA, 15 bp, Homo sapiens
atgatccatttttag

SEQ ID NO: 1751320 - DNA, 15 bp, Homo sapiens
tgatccatttttagt

SEQ ID NO: 1751321 - DNA, 15 bp, Homo sapiens
gatccatttttagtt

SEQ ID NO: 1751322 - DNA, 15 bp, Homo sapiens
atccatttttagttc

SEQ ID NO: 1751323 - DNA, 15 bp, Homo sapiens
tccatttttagttca

SEQ ID NO: 1751324 - DNA, 15 bp, Homo sapiens
ccatttttagttcac

SEQ ID NO: 1751325 - DNA, 15 bp, Homo sapiens
catttttagttcact

SEQ ID NO: 1751326 - DNA, 15 bp, Homo sapiens
atttttagttcactt

SEQ ID NO: 1751327 - DNA, 15 bp, Homo sapiens
tttttagttcacttt

SEQ ID NO: 1751328 - DNA, 15 bp, Homo sapiens
ttttagttcacttta

SEQ ID NO: 1751329 - DNA, 15 bp, Homo sapiens
tttagttcactttaa

SEQ ID NO: 1751330 - DNA, 15 bp, Homo sapiens
ttagttcactttaaa

SEQ ID NO: 1751331 - DNA, 15 bp, Homo sapiens
tagttcactttaaac

SEQ ID NO: 1751332 - DNA, 15 bp, Homo sapiens
agttcactttaaaca

SEQ ID NO: 1751333 - DNA, 15 bp, Homo sapiens
gttcactttaaacat

SEQ ID NO: 1751334 - DNA, 15 bp, Homo sapiens
ttcactttaaacatg

SEQ ID NO: 1751335 - DNA, 15 bp, Homo sapiens
tcactttaaacatgt

SEQ ID NO: 1751336 - DNA, 15 bp, Homo sapiens
cactttaaacatgtg

SEQ ID NO: 1751337 - DNA, 15 bp, Homo sapiens
actttaaacatgtgt

SEQ ID NO: 1751338 - DNA, 15 bp, Homo sapiens
ctttaaacatgtgta

SEQ ID NO: 1751339 - DNA, 15 bp, Homo sapiens
tttaaacatgtgtag

SEQ ID NO: 1751340 - DNA, 15 bp, Homo sapiens
ttaaacatgtgtagc

SEQ ID NO: 1751341 - DNA, 15 bp, Homo sapiens
taaacatgtgtagcc

SEQ ID NO: 1751342 - DNA, 15 bp, Homo sapiens
aaacatgtgtagccc

SEQ ID NO: 1751343 - DNA, 15 bp, Homo sapiens
aacatgtgtagccct

SEQ ID NO: 1751344 - DNA, 15 bp, Homo sapiens
acatgtgtagccctg

SEQ ID NO: 1751345 - DNA, 15 bp, Homo sapiens
catgtgtagccctgg

SEQ ID NO: 1751346 - DNA, 15 bp, Homo sapiens
atgtgtagccctgga

SEQ ID NO: 1751347 - DNA, 15 bp, Homo sapiens
tgtgtagccctggaa

SEQ ID NO: 1751348 - DNA, 15 bp, Homo sapiens
gtgtagccctggaag

SEQ ID NO: 1751349 - DNA, 15 bp, Homo sapiens
tgtagccctggaagg

SEQ ID NO: 1751350 - DNA, 15 bp, Homo sapiens
gtagccctggaagga

SEQ ID NO: 1751351 - DNA, 15 bp, Homo sapiens
tagccctggaaggat

SEQ ID NO: 1751352 - DNA, 15 bp, Homo sapiens
agccctggaaggatg

SEQ ID NO: 1751353 - DNA, 15 bp, Homo sapiens
gccctggaaggatgg

SEQ ID NO: 1751354 - DNA, 15 bp, Homo sapiens
ccctggaaggatggc

SEQ ID NO: 1751355 - DNA, 15 bp, Homo sapiens
cctggaaggatggct

SEQ ID NO: 1751356 - DNA, 15 bp, Homo sapiens
ctggaaggatggctt

SEQ ID NO: 1751357 - DNA, 15 bp, Homo sapiens
tggaaggatggcttg

SEQ ID NO: 1751358 - DNA, 15 bp, Homo sapiens
ggaaggatggcttga

SEQ ID NO: 1751359 - DNA, 15 bp, Homo sapiens
gaaggatggcttgag

SEQ ID NO: 1751360 - DNA, 15 bp, Homo sapiens
aaggatggcttgagg

SEQ ID NO: 1751361 - DNA, 15 bp, Homo sapiens
aggatggcttgaggt

SEQ ID NO: 1751362 - DNA, 15 bp, Homo sapiens
ggatggcttgaggtc

SEQ ID NO: 1751363 - DNA, 15 bp, Homo sapiens
gatggcttgaggtcc

SEQ ID NO: 1751364 - DNA, 15 bp, Homo sapiens
atggcttgaggtccc

SEQ ID NO: 1751365 - DNA, 15 bp, Homo sapiens
tggcttgaggtccct

SEQ ID NO: 1751366 - DNA, 15 bp, Homo sapiens
ggcttgaggtcccta

SEQ ID NO: 1751367 - DNA, 15 bp, Homo sapiens
gcttgaggtccctaa

SEQ ID NO: 1751368 - DNA, 15 bp, Homo sapiens
cttgaggtccctaaa

SEQ ID NO: 1751369 - DNA, 15 bp, Homo sapiens
ttgaggtccctaaaa

SEQ ID NO: 1751370 - DNA, 15 bp, Homo sapiens
tgaggtccctaaaag

SEQ ID NO: 1751371 - DNA, 15 bp, Homo sapiens
gaggtccctaaaagt

SEQ ID NO: 1751372 - DNA, 15 bp, Homo sapiens
aggtccctaaaagtg

SEQ ID NO: 1751373 - DNA, 15 bp, Homo sapiens
ggtccctaaaagtga

SEQ ID NO: 1751374 - DNA, 15 bp, Homo sapiens
gtccctaaaagtgat

SEQ ID NO: 1751375 - DNA, 15 bp, Homo sapiens
tccctaaaagtgatg

SEQ ID NO: 1751376 - DNA, 15 bp, Homo sapiens
ccctaaaagtgatgg

SEQ ID NO: 1751377 - DNA, 15 bp, Homo sapiens
cctaaaagtgatggt

SEQ ID NO: 1751378 - DNA, 15 bp, Homo sapiens
ctaaaagtgatggta

SEQ ID NO: 1751379 - DNA, 15 bp, Homo sapiens
taaaagtgatggtag

SEQ ID NO: 1751380 - DNA, 15 bp, Homo sapiens
aaaagtgatggtagg

SEQ ID NO: 1751381 - DNA, 15 bp, Homo sapiens
aaagtgatggtaggg

SEQ ID NO: 1751382 - DNA, 15 bp, Homo sapiens
aagtgatggtaggga

SEQ ID NO: 1751383 - DNA, 15 bp, Homo sapiens
agtgatggtagggac

SEQ ID NO: 1751384 - DNA, 15 bp, Homo sapiens
gtgatggtagggaca

SEQ ID NO: 1751385 - DNA, 15 bp, Homo sapiens
tgatggtagggacaa

SEQ ID NO: 1751386 - DNA, 15 bp, Homo sapiens
gatggtagggacaat

SEQ ID NO: 1751387 - DNA, 15 bp, Homo sapiens
atggtagggacaatt

SEQ ID NO: 1751388 - DNA, 15 bp, Homo sapiens
tggtagggacaattc

SEQ ID NO: 1751389 - DNA, 15 bp, Homo sapiens
ggtagggacaattca

SEQ ID NO: 1751390 - DNA, 15 bp, Homo sapiens
gtagggacaattcat

SEQ ID NO: 1751391 - DNA, 15 bp, Homo sapiens
tagggacaattcatt

SEQ ID NO: 1751392 - DNA, 15 bp, Homo sapiens
agggacaattcattt

SEQ ID NO: 1751393 - DNA, 15 bp, Homo sapiens
gggacaattcatttt

SEQ ID NO: 1751394 - DNA, 15 bp, Homo sapiens
ggacaattcatttta

SEQ ID NO: 1751395 - DNA, 15 bp, Homo sapiens
gacaattcattttat

SEQ ID NO: 1751396 - DNA, 15 bp, Homo sapiens
acaattcattttatg

SEQ ID NO: 1751397 - DNA, 15 bp, Homo sapiens
caattcattttatgg

SEQ ID NO: 1751398 - DNA, 15 bp, Homo sapiens
aattcattttatggc

SEQ ID NO: 1751399 - DNA, 15 bp, Homo sapiens
attcattttatggca

SEQ ID NO: 1751400 - DNA, 15 bp, Homo sapiens
ttcattttatggcat

SEQ ID NO: 1751401 - DNA, 15 bp, Homo sapiens
tcattttatggcatt

SEQ ID NO: 1751402 - DNA, 15 bp, Homo sapiens
cattttatggcattc

SEQ ID NO: 1751403 - DNA, 15 bp, Homo sapiens
attttatggcattct

SEQ ID NO: 1751404 - DNA, 15 bp, Homo sapiens
ttttatggcattctt

SEQ ID NO: 1751405 - DNA, 15 bp, Homo sapiens
tttatggcattcttc

SEQ ID NO: 1751406 - DNA, 15 bp, Homo sapiens
ttatggcattcttcc

SEQ ID NO: 1751407 - DNA, 15 bp, Homo sapiens
tatggcattcttcca

SEQ ID NO: 1751408 - DNA, 15 bp, Homo sapiens
atggcattcttccag

SEQ ID NO: 1751409 - DNA, 15 bp, Homo sapiens
tggcattcttccagc

SEQ ID NO: 1751410 - DNA, 15 bp, Homo sapiens
ggcattcttccagca

SEQ ID NO: 1751411 - DNA, 15 bp, Homo sapiens
gcattcttccagcat

SEQ ID NO: 1751412 - DNA, 15 bp, Homo sapiens
cattcttccagcatt

SEQ ID NO: 1751413 - DNA, 15 bp, Homo sapiens
attcttccagcattc

SEQ ID NO: 1751414 - DNA, 15 bp, Homo sapiens
ttcttccagcattcg

SEQ ID NO: 1751415 - DNA, 15 bp, Homo sapiens
tcttccagcattcgg

SEQ ID NO: 1751416 - DNA, 15 bp, Homo sapiens
cttccagcattcggg

SEQ ID NO: 1751417 - DNA, 15 bp, Homo sapiens
ttccagcattcgggg

SEQ ID NO: 1751418 - DNA, 15 bp, Homo sapiens
tccagcattcggggt

SEQ ID NO: 1751419 - DNA, 15 bp, Homo sapiens
ccagcattcggggtt

SEQ ID NO: 1751420 - DNA, 15 bp, Homo sapiens
cagcattcggggttc

SEQ ID NO: 1751421 - DNA, 15 bp, Homo sapiens
agcattcggggttcc

SEQ ID NO: 1751422 - DNA, 15 bp, Homo sapiens
gcattcggggttcca

SEQ ID NO: 1751423 - DNA, 15 bp, Homo sapiens
cattcggggttccac

SEQ ID NO: 1751424 - DNA, 15 bp, Homo sapiens
attcggggttccact

SEQ ID NO: 1751425 - DNA, 15 bp, Homo sapiens
ttcggggttccactg

SEQ ID NO: 1751426 - DNA, 15 bp, Homo sapiens
tcggggttccactgg

SEQ ID NO: 1751427 - DNA, 15 bp, Homo sapiens
cggggttccactggg

SEQ ID NO: 1751428 - DNA, 15 bp, Homo sapiens
ggggttccactgggt

SEQ ID NO: 1751429 - DNA, 15 bp, Homo sapiens
gggttccactgggtt

SEQ ID NO: 1751430 - DNA, 15 bp, Homo sapiens
ggttccactgggtta

SEQ ID NO: 1751431 - DNA, 15 bp, Homo sapiens
gttccactgggttac

SEQ ID NO: 1751432 - DNA, 15 bp, Homo sapiens
ttccactgggttaca

SEQ ID NO: 1751433 - DNA, 15 bp, Homo sapiens
tccactgggttacac

SEQ ID NO: 1751434 - DNA, 15 bp, Homo sapiens
ccactgggttacact

SEQ ID NO: 1751435 - DNA, 15 bp, Homo sapiens
cactgggttacactg

SEQ ID NO: 1751436 - DNA, 15 bp, Homo sapiens
actgggttacactga

SEQ ID NO: 1751437 - DNA, 15 bp, Homo sapiens
ctgggttacactgac

SEQ ID NO: 1751438 - DNA, 15 bp, Homo sapiens
tgggttacactgacg

SEQ ID NO: 1751439 - DNA, 15 bp, Homo sapiens
gggttacactgacgt

SEQ ID NO: 1751440 - DNA, 15 bp, Homo sapiens
ggttacactgacgta

SEQ ID NO: 1751441 - DNA, 15 bp, Homo sapiens
gttacactgacgtag

SEQ ID NO: 1751442 - DNA, 15 bp, Homo sapiens
ttacactgacgtaga

SEQ ID NO: 1751443 - DNA, 15 bp, Homo sapiens
tacactgacgtagag

SEQ ID NO: 1751444 - DNA, 15 bp, Homo sapiens
acactgacgtagagc

SEQ ID NO: 1751445 - DNA, 15 bp, Homo sapiens
cactgacgtagagct

SEQ ID NO: 1751446 - DNA, 15 bp, Homo sapiens
actgacgtagagctt

SEQ ID NO: 1751447 - DNA, 15 bp, Homo sapiens
ctgacgtagagctta

SEQ ID NO: 1751448 - DNA, 15 bp, Homo sapiens
tgacgtagagcttaa

SEQ ID NO: 1751449 - DNA, 15 bp, Homo sapiens
gacgtagagcttaat

SEQ ID NO: 1751450 - DNA, 15 bp, Homo sapiens
acgtagagcttaatt

SEQ ID NO: 1751451 - DNA, 15 bp, Homo sapiens
cgtagagcttaatta

SEQ ID NO: 1751452 - DNA, 15 bp, Homo sapiens
gtagagcttaattat

SEQ ID NO: 1751453 - DNA, 15 bp, Homo sapiens
tagagcttaattatt

SEQ ID NO: 1751454 - DNA, 15 bp, Homo sapiens
agagcttaattattt

SEQ ID NO: 1751455 - DNA, 15 bp, Homo sapiens
gagcttaattatttt

SEQ ID NO: 1751456 - DNA, 15 bp, Homo sapiens
agcttaattattttt

SEQ ID NO: 1751457 - DNA, 15 bp, Homo sapiens
gcttaattatttttg

SEQ ID NO: 1751458 - DNA, 15 bp, Homo sapiens
cttaattatttttgc

SEQ ID NO: 1751459 - DNA, 15 bp, Homo sapiens
ttaattatttttgct

SEQ ID NO: 1751460 - DNA, 15 bp, Homo sapiens
taattatttttgctt

SEQ ID NO: 1751461 - DNA, 15 bp, Homo sapiens
aattatttttgcttt

SEQ ID NO: 1751462 - DNA, 15 bp, Homo sapiens
attatttttgctttt

SEQ ID NO: 1751463 - DNA, 15 bp, Homo sapiens
ttatttttgctttta

SEQ ID NO: 1751464 - DNA, 15 bp, Homo sapiens
tatttttgcttttat

SEQ ID NO: 1751465 - DNA, 15 bp, Homo sapiens
atttttgcttttatt

SEQ ID NO: 1751466 - DNA, 15 bp, Homo sapiens
tttttgcttttattt

SEQ ID NO: 1751467 - DNA, 15 bp, Homo sapiens
ttttgcttttatttt

SEQ ID NO: 1751468 - DNA, 15 bp, Homo sapiens
tttgcttttattttc

SEQ ID NO: 1751469 - DNA, 15 bp, Homo sapiens
ttgcttttattttct

SEQ ID NO: 1751470 - DNA, 15 bp, Homo sapiens
tgcttttattttctg

SEQ ID NO: 1751471 - DNA, 15 bp, Homo sapiens
gcttttattttctgc

SEQ ID NO: 1751472 - DNA, 15 bp, Homo sapiens
cttttattttctgct

SEQ ID NO: 1751473 - DNA, 15 bp, Homo sapiens
ttttattttctgcta

SEQ ID NO: 1751474 - DNA, 15 bp, Homo sapiens
tttattttctgctat

SEQ ID NO: 1751475 - DNA, 15 bp, Homo sapiens
ttattttctgctata

SEQ ID NO: 1751476 - DNA, 15 bp, Homo sapiens
tattttctgctatag

SEQ ID NO: 1751477 - DNA, 15 bp, Homo sapiens
attttctgctatagt

SEQ ID NO: 1751478 - DNA, 15 bp, Homo sapiens
ttttctgctatagtt

SEQ ID NO: 1751479 - DNA, 15 bp, Homo sapiens
tttctgctatagtta

SEQ ID NO: 1751480 - DNA, 15 bp, Homo sapiens
ttctgctatagttag

SEQ ID NO: 1751481 - DNA, 15 bp, Homo sapiens
tctgctatagttaga

SEQ ID NO: 1751482 - DNA, 15 bp, Homo sapiens
ctgctatagttagaa

SEQ ID NO: 1751483 - DNA, 15 bp, Homo sapiens
tgctatagttagaaa

SEQ ID NO: 1751484 - DNA, 15 bp, Homo sapiens
gctatagttagaaat

SEQ ID NO: 1751485 - DNA, 15 bp, Homo sapiens
ctatagttagaaatc

SEQ ID NO: 1751486 - DNA, 15 bp, Homo sapiens
tatagttagaaatca

SEQ ID NO: 1751487 - DNA, 15 bp, Homo sapiens
atagttagaaatcac

SEQ ID NO: 1751488 - DNA, 15 bp, Homo sapiens
tagttagaaatcact

SEQ ID NO: 1751489 - DNA, 15 bp, Homo sapiens
agttagaaatcactc

SEQ ID NO: 1751490 - DNA, 15 bp, Homo sapiens
gttagaaatcactca

SEQ ID NO: 1751491 - DNA, 15 bp, Homo sapiens
ttagaaatcactcac

SEQ ID NO: 1751492 - DNA, 15 bp, Homo sapiens
tagaaatcactcaca

SEQ ID NO: 1751493 - DNA, 15 bp, Homo sapiens
agaaatcactcacac

SEQ ID NO: 1751494 - DNA, 15 bp, Homo sapiens
gaaatcactcacacc

SEQ ID NO: 1751495 - DNA, 15 bp, Homo sapiens
aaatcactcacaccc

SEQ ID NO: 1751496 - DNA, 15 bp, Homo sapiens
aatcactcacaccca

SEQ ID NO: 1751497 - DNA, 15 bp, Homo sapiens
atcactcacacccac

SEQ ID NO: 1751498 - DNA, 15 bp, Homo sapiens
tcactcacacccaca

SEQ ID NO: 1751499 - DNA, 15 bp, Homo sapiens
cactcacacccacaa

SEQ ID NO: 1751500 - DNA, 15 bp, Homo sapiens
actcacacccacaaa

SEQ ID NO: 1751501 - DNA, 15 bp, Homo sapiens
ctcacacccacaaat

SEQ ID NO: 1751502 - DNA, 15 bp, Homo sapiens
tcacacccacaaata

SEQ ID NO: 1751503 - DNA, 15 bp, Homo sapiens
cacacccacaaataa

SEQ ID NO: 1751504 - DNA, 15 bp, Homo sapiens
acacccacaaataaa

SEQ ID NO: 1751505 - DNA, 15 bp, Homo sapiens
cacccacaaataaaa

SEQ ID NO: 1751506 - DNA, 15 bp, Homo sapiens
acccacaaataaaat

SEQ ID NO: 1751507 - DNA, 15 bp, Homo sapiens
cccacaaataaaatt

SEQ ID NO: 1751508 - DNA, 15 bp, Homo sapiens
ccacaaataaaattt

SEQ ID NO: 1751509 - DNA, 15 bp, Homo sapiens
cacaaataaaatttt

SEQ ID NO: 1751510 - DNA, 15 bp, Homo sapiens
acaaataaaatttta

SEQ ID NO: 1751511 - DNA, 15 bp, Homo sapiens
caaataaaattttaa

SEQ ID NO: 1751512 - DNA, 15 bp, Homo sapiens
aaataaaattttaaa

SEQ ID NO: 1751513 - DNA, 15 bp, Homo sapiens
aataaaattttaaaa

SEQ ID NO: 1751514 - DNA, 15 bp, Homo sapiens
ataaaattttaaaac

SEQ ID NO: 1751515 - DNA, 15 bp, Homo sapiens
taaaattttaaaacc

SEQ ID NO: 1751516 - DNA, 15 bp, Homo sapiens
aaaattttaaaaccc

SEQ ID NO: 1751517 - DNA, 15 bp, Homo sapiens
aaattttaaaaccct

SEQ ID NO: 1751518 - DNA, 15 bp, Homo sapiens
aattttaaaaccctt

SEQ ID NO: 1751519 - DNA, 15 bp, Homo sapiens
attttaaaacccttt

SEQ ID NO: 1751520 - DNA, 15 bp, Homo sapiens
ttttaaaaccctttc

SEQ ID NO: 1751521 - DNA, 15 bp, Homo sapiens
tttaaaaccctttca

SEQ ID NO: 1751522 - DNA, 15 bp, Homo sapiens
ttaaaaccctttcat

SEQ ID NO: 1751523 - DNA, 15 bp, Homo sapiens
taaaaccctttcatt

SEQ ID NO: 1751524 - DNA, 15 bp, Homo sapiens
aaaaccctttcattt

SEQ ID NO: 1751525 - DNA, 15 bp, Homo sapiens
aaaccctttcatttt

SEQ ID NO: 1751526 - DNA, 15 bp, Homo sapiens
aaccctttcattttg

SEQ ID NO: 1751527 - DNA, 15 bp, Homo sapiens
accctttcattttgg

SEQ ID NO: 1751528 - DNA, 15 bp, Homo sapiens
ccctttcattttggt

SEQ ID NO: 1751529 - DNA, 15 bp, Homo sapiens
cctttcattttggtt

SEQ ID NO: 1751530 - DNA, 15 bp, Homo sapiens
ctttcattttggtta

SEQ ID NO: 1751531 - DNA, 15 bp, Homo sapiens
tttcattttggttag

SEQ ID NO: 1751532 - DNA, 15 bp, Homo sapiens
ttcattttggttagc

SEQ ID NO: 1751533 - DNA, 15 bp, Homo sapiens
tcattttggttagcc

SEQ ID NO: 1751534 - DNA, 15 bp, Homo sapiens
cattttggttagcct

SEQ ID NO: 1751535 - DNA, 15 bp, Homo sapiens
attttggttagcctt

SEQ ID NO: 1751536 - DNA, 15 bp, Homo sapiens
ttttggttagcctta

SEQ ID NO: 1751537 - DNA, 15 bp, Homo sapiens
tttggttagccttac

SEQ ID NO: 1751538 - DNA, 15 bp, Homo sapiens
ttggttagccttacc

SEQ ID NO: 1751539 - DNA, 15 bp, Homo sapiens
tggttagccttacca

SEQ ID NO: 1751540 - DNA, 15 bp, Homo sapiens
ggttagccttaccaa

SEQ ID NO: 1751541 - DNA, 15 bp, Homo sapiens
gttagccttaccaac

SEQ ID NO: 1751542 - DNA, 15 bp, Homo sapiens
ttagccttaccaacc

SEQ ID NO: 1751543 - DNA, 15 bp, Homo sapiens
tagccttaccaacct

SEQ ID NO: 1751544 - DNA, 15 bp, Homo sapiens
agccttaccaacctt

SEQ ID NO: 1751545 - DNA, 15 bp, Homo sapiens
gccttaccaaccttt

SEQ ID NO: 1751546 - DNA, 15 bp, Homo sapiens
ccttaccaaccttta

SEQ ID NO: 1751547 - DNA, 15 bp, Homo sapiens
cttaccaacctttaa

SEQ ID NO: 1751548 - DNA, 15 bp, Homo sapiens
ttaccaacctttaat

SEQ ID NO: 1751549 - DNA, 15 bp, Homo sapiens
taccaacctttaatg

SEQ ID NO: 1751550 - DNA, 15 bp, Homo sapiens
accaacctttaatgc

SEQ ID NO: 1751551 - DNA, 15 bp, Homo sapiens
ccaacctttaatgca

SEQ ID NO: 1751552 - DNA, 15 bp, Homo sapiens
caacctttaatgcac

SEQ ID NO: 1751553 - DNA, 15 bp, Homo sapiens
aacctttaatgcaca

SEQ ID NO: 1751554 - DNA, 15 bp, Homo sapiens
acctttaatgcacat

SEQ ID NO: 1751555 - DNA, 15 bp, Homo sapiens
cctttaatgcacatt

SEQ ID NO: 1751556 - DNA, 15 bp, Homo sapiens
ctttaatgcacattg

SEQ ID NO: 1751557 - DNA, 15 bp, Homo sapiens
tttaatgcacattga

SEQ ID NO: 1751558 - DNA, 15 bp, Homo sapiens
ttaatgcacattgac

SEQ ID NO: 1751559 - DNA, 15 bp, Homo sapiens
taatgcacattgacc

SEQ ID NO: 1751560 - DNA, 15 bp, Homo sapiens
aatgcacattgacct

SEQ ID NO: 1751561 - DNA, 15 bp, Homo sapiens
atgcacattgacctg

SEQ ID NO: 1751562 - DNA, 15 bp, Homo sapiens
tgcacattgacctga

SEQ ID NO: 1751563 - DNA, 15 bp, Homo sapiens
gcacattgacctgaa

SEQ ID NO: 1751564 - DNA, 15 bp, Homo sapiens
cacattgacctgaat

SEQ ID NO: 1751565 - DNA, 15 bp, Homo sapiens
acattgacctgaatc

SEQ ID NO: 1751566 - DNA, 15 bp, Homo sapiens
cattgacctgaatca

SEQ ID NO: 1751567 - DNA, 15 bp, Homo sapiens
attgacctgaatcaa

SEQ ID NO: 1751568 - DNA, 15 bp, Homo sapiens
ttgacctgaatcaaa

SEQ ID NO: 1751569 - DNA, 15 bp, Homo sapiens
tgacctgaatcaaat

SEQ ID NO: 1751570 - DNA, 15 bp, Homo sapiens
gacctgaatcaaata

SEQ ID NO: 1751571 - DNA, 15 bp, Homo sapiens
acctgaatcaaatat

SEQ ID NO: 1751572 - DNA, 15 bp, Homo sapiens
cctgaatcaaatatt

SEQ ID NO: 1751573 - DNA, 15 bp, Homo sapiens
ctgaatcaaatattg

SEQ ID NO: 1751574 - DNA, 15 bp, Homo sapiens
tgaatcaaatattgg

SEQ ID NO: 1751575 - DNA, 15 bp, Homo sapiens
gaatcaaatattgga

SEQ ID NO: 1751576 - DNA, 15 bp, Homo sapiens
aatcaaatattggat

SEQ ID NO: 1751577 - DNA, 15 bp, Homo sapiens
atcaaatattggatt

SEQ ID NO: 1751578 - DNA, 15 bp, Homo sapiens
tcaaatattggattt

SEQ ID NO: 1751579 - DNA, 15 bp, Homo sapiens
caaatattggatttg

SEQ ID NO: 1751580 - DNA, 15 bp, Homo sapiens
aaatattggatttga

SEQ ID NO: 1751581 - DNA, 15 bp, Homo sapiens
aatattggatttgac

SEQ ID NO: 1751582 - DNA, 15 bp, Homo sapiens
atattggatttgact

SEQ ID NO: 1751583 - DNA, 15 bp, Homo sapiens
tattggatttgactg

SEQ ID NO: 1751584 - DNA, 15 bp, Homo sapiens
attggatttgactgt

SEQ ID NO: 1751585 - DNA, 15 bp, Homo sapiens
ttggatttgactgtg

SEQ ID NO: 1751586 - DNA, 15 bp, Homo sapiens
tggatttgactgtga

SEQ ID NO: 1751587 - DNA, 15 bp, Homo sapiens
ggatttgactgtgaa

SEQ ID NO: 1751588 - DNA, 15 bp, Homo sapiens
gatttgactgtgaat

SEQ ID NO: 1751589 - DNA, 15 bp, Homo sapiens
atttgactgtgaata

SEQ ID NO: 1751590 - DNA, 15 bp, Homo sapiens
tttgactgtgaatag

SEQ ID NO: 1751591 - DNA, 15 bp, Homo sapiens
ttgactgtgaataga

SEQ ID NO: 1751592 - DNA, 15 bp, Homo sapiens
tgactgtgaatagaa

SEQ ID NO: 1751593 - DNA, 15 bp, Homo sapiens
gactgtgaatagaaa

SEQ ID NO: 1751594 - DNA, 15 bp, Homo sapiens
actgtgaatagaaaa

SEQ ID NO: 1751595 - DNA, 15 bp, Homo sapiens
ctgtgaatagaaaaa

SEQ ID NO: 1751596 - DNA, 15 bp, Homo sapiens
tgtgaatagaaaaat

SEQ ID NO: 1751597 - DNA, 15 bp, Homo sapiens
gtgaatagaaaaatt

SEQ ID NO: 1751598 - DNA, 15 bp, Homo sapiens
tgaatagaaaaattt

SEQ ID NO: 1751599 - DNA, 15 bp, Homo sapiens
gaatagaaaaattta

SEQ ID NO: 1751600 - DNA, 15 bp, Homo sapiens
aatagaaaaatttac

SEQ ID NO: 1751601 - DNA, 15 bp, Homo sapiens
atagaaaaatttaca

SEQ ID NO: 1751602 - DNA, 15 bp, Homo sapiens
tagaaaaatttacag

SEQ ID NO: 1751603 - DNA, 15 bp, Homo sapiens
agaaaaatttacagc

SEQ ID NO: 1751604 - DNA, 15 bp, Homo sapiens
gaaaaatttacagct

SEQ ID NO: 1751605 - DNA, 15 bp, Homo sapiens
aaaaatttacagctt

SEQ ID NO: 1751606 - DNA, 15 bp, Homo sapiens
aaaatttacagcttc

SEQ ID NO: 1751607 - DNA, 15 bp, Homo sapiens
aaatttacagcttca

SEQ ID NO: 1751608 - DNA, 15 bp, Homo sapiens
aatttacagcttcag

SEQ ID NO: 1751609 - DNA, 15 bp, Homo sapiens
atttacagcttcagc

SEQ ID NO: 1751610 - DNA, 15 bp, Homo sapiens
tttacagcttcagct

SEQ ID NO: 1751611 - DNA, 15 bp, Homo sapiens
ttacagcttcagctc

SEQ ID NO: 1751612 - DNA, 15 bp, Homo sapiens
tacagcttcagctct

SEQ ID NO: 1751613 - DNA, 15 bp, Homo sapiens
acagcttcagctctt

SEQ ID NO: 1751614 - DNA, 15 bp, Homo sapiens
cagcttcagctctta

SEQ ID NO: 1751615 - DNA, 15 bp, Homo sapiens
agcttcagctcttaa

SEQ ID NO: 1751616 - DNA, 15 bp, Homo sapiens
gcttcagctcttaat

SEQ ID NO: 1751617 - DNA, 15 bp, Homo sapiens
cttcagctcttaata

SEQ ID NO: 1751618 - DNA, 15 bp, Homo sapiens
ttcagctcttaatat

SEQ ID NO: 1751619 - DNA, 15 bp, Homo sapiens
tcagctcttaatata

SEQ ID NO: 1751620 - DNA, 15 bp, Homo sapiens
cagctcttaatataa

SEQ ID NO: 1751621 - DNA, 15 bp, Homo sapiens
agctcttaatataag

SEQ ID NO: 1751622 - DNA, 15 bp, Homo sapiens
gctcttaatataagt

SEQ ID NO: 1751623 - DNA, 15 bp, Homo sapiens
ctcttaatataagtg

SEQ ID NO: 1751624 - DNA, 15 bp, Homo sapiens
tcttaatataagtga

SEQ ID NO: 1751625 - DNA, 15 bp, Homo sapiens
cttaatataagtgac

SEQ ID NO: 1751626 - DNA, 15 bp, Homo sapiens
ttaatataagtgacc

SEQ ID NO: 1751627 - DNA, 15 bp, Homo sapiens
taatataagtgacca

SEQ ID NO: 1751628 - DNA, 15 bp, Homo sapiens
aatataagtgaccac

SEQ ID NO: 1751629 - DNA, 15 bp, Homo sapiens
atataagtgaccact

SEQ ID NO: 1751630 - DNA, 15 bp, Homo sapiens
tataagtgaccactg

SEQ ID NO: 1751631 - DNA, 15 bp, Homo sapiens
ataagtgaccactgg

SEQ ID NO: 1751632 - DNA, 15 bp, Homo sapiens
taagtgaccactgga

SEQ ID NO: 1751633 - DNA, 15 bp, Homo sapiens
aagtgaccactggac

SEQ ID NO: 1751634 - DNA, 15 bp, Homo sapiens
agtgaccactggacc

SEQ ID NO: 1751635 - DNA, 15 bp, Homo sapiens
gtgaccactggacct

SEQ ID NO: 1751636 - DNA, 15 bp, Homo sapiens
tgaccactggacctt

SEQ ID NO: 1751637 - DNA, 15 bp, Homo sapiens
gaccactggacctta

SEQ ID NO: 1751638 - DNA, 15 bp, Homo sapiens
accactggaccttag

SEQ ID NO: 1751639 - DNA, 15 bp, Homo sapiens
ccactggaccttagg

SEQ ID NO: 1751640 - DNA, 15 bp, Homo sapiens
cactggaccttagga

SEQ ID NO: 1751641 - DNA, 15 bp, Homo sapiens
actggaccttaggaa

SEQ ID NO: 1751642 - DNA, 15 bp, Homo sapiens
ctggaccttaggaaa

SEQ ID NO: 1751643 - DNA, 15 bp, Homo sapiens
tggaccttaggaaat

SEQ ID NO: 1751644 - DNA, 15 bp, Homo sapiens
ggaccttaggaaatt

SEQ ID NO: 1751645 - DNA, 15 bp, Homo sapiens
gaccttaggaaatta

SEQ ID NO: 1751646 - DNA, 15 bp, Homo sapiens
accttaggaaattaa

SEQ ID NO: 1751647 - DNA, 15 bp, Homo sapiens
ccttaggaaattaat

SEQ ID NO: 1751648 - DNA, 15 bp, Homo sapiens
cttaggaaattaatt

SEQ ID NO: 1751649 - DNA, 15 bp, Homo sapiens
ttaggaaattaattc

SEQ ID NO: 1751650 - DNA, 15 bp, Homo sapiens
taggaaattaattca

SEQ ID NO: 1751651 - DNA, 15 bp, Homo sapiens
aggaaattaattcac

SEQ ID NO: 1751652 - DNA, 15 bp, Homo sapiens
ggaaattaattcaca

SEQ ID NO: 1751653 - DNA, 15 bp, Homo sapiens
gaaattaattcacat

SEQ ID NO: 1751654 - DNA, 15 bp, Homo sapiens
aaattaattcacatg

SEQ ID NO: 1751655 - DNA, 15 bp, Homo sapiens
aattaattcacatga

SEQ ID NO: 1751656 - DNA, 15 bp, Homo sapiens
attaattcacatgat

SEQ ID NO: 1751657 - DNA, 15 bp, Homo sapiens
ttaattcacatgata

SEQ ID NO: 1751658 - DNA, 15 bp, Homo sapiens
taattcacatgatat

SEQ ID NO: 1751659 - DNA, 15 bp, Homo sapiens
aattcacatgatata

SEQ ID NO: 1751660 - DNA, 15 bp, Homo sapiens
attcacatgatatac

SEQ ID NO: 1751661 - DNA, 15 bp, Homo sapiens
ttcacatgatataca

SEQ ID NO: 1751662 - DNA, 15 bp, Homo sapiens
tcacatgatatacat

SEQ ID NO: 1751663 - DNA, 15 bp, Homo sapiens
cacatgatatacatc

SEQ ID NO: 1751664 - DNA, 15 bp, Homo sapiens
acatgatatacatca

SEQ ID NO: 1751665 - DNA, 15 bp, Homo sapiens
catgatatacatcac

SEQ ID NO: 1751666 - DNA, 15 bp, Homo sapiens
atgatatacatcact

SEQ ID NO: 1751667 - DNA, 15 bp, Homo sapiens
tgatatacatcactg

SEQ ID NO: 1751668 - DNA, 15 bp, Homo sapiens
gatatacatcactgc

SEQ ID NO: 1751669 - DNA, 15 bp, Homo sapiens
atatacatcactgca

SEQ ID NO: 1751670 - DNA, 15 bp, Homo sapiens
tatacatcactgcat

SEQ ID NO: 1751671 - DNA, 15 bp, Homo sapiens
atacatcactgcata

SEQ ID NO: 1751672 - DNA, 15 bp, Homo sapiens
tacatcactgcataa

SEQ ID NO: 1751673 - DNA, 15 bp, Homo sapiens
acatcactgcataag

SEQ ID NO: 1751674 - DNA, 15 bp, Homo sapiens
gcaggacagagaaac

SEQ ID NO: 1751675 - DNA, 15 bp, Homo sapiens
caggacagagaaaca

SEQ ID NO: 1751676 - DNA, 15 bp, Homo sapiens
aggacagagaaacat

SEQ ID NO: 1751677 - DNA, 15 bp, Homo sapiens
ggacagagaaacatg

SEQ ID NO: 1751678 - DNA, 15 bp, Homo sapiens
gacagagaaacatga

SEQ ID NO: 1751679 - DNA, 15 bp, Homo sapiens
acagagaaacatgaa

SEQ ID NO: 1751680 - DNA, 15 bp, Homo sapiens
cagagaaacatgaat

SEQ ID NO: 1751681 - DNA, 15 bp, Homo sapiens
agagaaacatgaata

SEQ ID NO: 1751682 - DNA, 15 bp, Homo sapiens
gagaaacatgaatat

SEQ ID NO: 1751683 - DNA, 15 bp, Homo sapiens
agaaacatgaatatg

SEQ ID NO: 1751684 - DNA, 15 bp, Homo sapiens
gaaacatgaatatgc

SEQ ID NO: 1751685 - DNA, 15 bp, Homo sapiens
aaacatgaatatgca

SEQ ID NO: 1751686 - DNA, 15 bp, Homo sapiens
aacatgaatatgcat

SEQ ID NO: 1751687 - DNA, 15 bp, Homo sapiens
acatgaatatgcatt

SEQ ID NO: 1751688 - DNA, 15 bp, Homo sapiens
catgaatatgcatta

SEQ ID NO: 1751689 - DNA, 15 bp, Homo sapiens
atgaatatgcattaa

SEQ ID NO: 1751690 - DNA, 15 bp, Homo sapiens
tgaatatgcattaaa

SEQ ID NO: 1751691 - DNA, 15 bp, Homo sapiens
gaatatgcattaaat

SEQ ID NO: 1751692 - DNA, 15 bp, Homo sapiens
aatatgcattaaatg

SEQ ID NO: 1751693 - DNA, 15 bp, Homo sapiens
atatgcattaaatgc

SEQ ID NO: 1751694 - DNA, 15 bp, Homo sapiens
tatgcattaaatgcc

SEQ ID NO: 1751695 - DNA, 15 bp, Homo sapiens
atgcattaaatgcct

SEQ ID NO: 1751696 - DNA, 15 bp, Homo sapiens
tgcattaaatgccta

SEQ ID NO: 1751697 - DNA, 15 bp, Homo sapiens
gcattaaatgcctaa

SEQ ID NO: 1751698 - DNA, 15 bp, Homo sapiens
cattaaatgcctaag

SEQ ID NO: 1751699 - DNA, 15 bp, Homo sapiens
attaaatgcctaagt

SEQ ID NO: 1751700 - DNA, 15 bp, Homo sapiens
ttaaatgcctaagtg

SEQ ID NO: 1751701 - DNA, 15 bp, Homo sapiens
taaatgcctaagtgg

SEQ ID NO: 1751702 - DNA, 15 bp, Homo sapiens
aaatgcctaagtgga

SEQ ID NO: 1751703 - DNA, 15 bp, Homo sapiens
aatgcctaagtggaa

SEQ ID NO: 1751704 - DNA, 15 bp, Homo sapiens
atgcctaagtggaaa

SEQ ID NO: 1751705 - DNA, 15 bp, Homo sapiens
tgcctaagtggaaaa

SEQ ID NO: 1751706 - DNA, 15 bp, Homo sapiens
gcctaagtggaaaaa

SEQ ID NO: 1751707 - DNA, 15 bp, Homo sapiens
cctaagtggaaaaaa

SEQ ID NO: 1751708 - DNA, 15 bp, Homo sapiens
ctaagtggaaaaaaa

SEQ ID NO: 1751709 - DNA, 15 bp, Homo sapiens
taagtggaaaaaaat

SEQ ID NO: 1751710 - DNA, 15 bp, Homo sapiens
aagtggaaaaaaata

SEQ ID NO: 1751711 - DNA, 15 bp, Homo sapiens
agtggaaaaaaatag

SEQ ID NO: 1751712 - DNA, 15 bp, Homo sapiens
gtggaaaaaaatagt

SEQ ID NO: 1751713 - DNA, 15 bp, Homo sapiens
tggaaaaaaatagtt

SEQ ID NO: 1751714 - DNA, 15 bp, Homo sapiens
ggaaaaaaatagtta

SEQ ID NO: 1751715 - DNA, 15 bp, Homo sapiens
gaaaaaaatagttac

SEQ ID NO: 1751716 - DNA, 15 bp, Homo sapiens
aaaaaaatagttact

SEQ ID NO: 1751717 - DNA, 15 bp, Homo sapiens
aaaaaatagttactt

SEQ ID NO: 1751718 - DNA, 15 bp, Homo sapiens
aaaaatagttactta

SEQ ID NO: 1751719 - DNA, 15 bp, Homo sapiens
aaaatagttacttat

SEQ ID NO: 1751720 - DNA, 15 bp, Homo sapiens
aaatagttacttatg

SEQ ID NO: 1751721 - DNA, 15 bp, Homo sapiens
aatagttacttatgt

SEQ ID NO: 1751722 - DNA, 15 bp, Homo sapiens
atagttacttatgta

SEQ ID NO: 1751723 - DNA, 15 bp, Homo sapiens
tagttacttatgtag

SEQ ID NO: 1751724 - DNA, 15 bp, Homo sapiens
agttacttatgtagc

SEQ ID NO: 1751725 - DNA, 15 bp, Homo sapiens
gttacttatgtagca

SEQ ID NO: 1751726 - DNA, 15 bp, Homo sapiens
ttacttatgtagcaa

SEQ ID NO: 1751727 - DNA, 15 bp, Homo sapiens
tacttatgtagcaag

SEQ ID NO: 1751728 - DNA, 15 bp, Homo sapiens
acttatgtagcaagt

SEQ ID NO: 1751729 - DNA, 15 bp, Homo sapiens
cttatgtagcaagtg

SEQ ID NO: 1751730 - DNA, 15 bp, Homo sapiens
ttatgtagcaagtga

SEQ ID NO: 1751731 - DNA, 15 bp, Homo sapiens
tatgtagcaagtgac

SEQ ID NO: 1751732 - DNA, 15 bp, Homo sapiens
atgtagcaagtgaca

SEQ ID NO: 1751733 - DNA, 15 bp, Homo sapiens
tgtagcaagtgacag

SEQ ID NO: 1751734 - DNA, 15 bp, Homo sapiens
gtagcaagtgacaga

SEQ ID NO: 1751735 - DNA, 15 bp, Homo sapiens
tagcaagtgacagat

SEQ ID NO: 1751736 - DNA, 15 bp, Homo sapiens
agcaagtgacagatg

SEQ ID NO: 1751737 - DNA, 15 bp, Homo sapiens
gcaagtgacagatgg

SEQ ID NO: 1751738 - DNA, 15 bp, Homo sapiens
caagtgacagatggc

SEQ ID NO: 1751739 - DNA, 15 bp, Homo sapiens
aagtgacagatggca

SEQ ID NO: 1751740 - DNA, 15 bp, Homo sapiens
agtgacagatggcaa

SEQ ID NO: 1751741 - DNA, 15 bp, Homo sapiens
gtgacagatggcaat

SEQ ID NO: 1751742 - DNA, 15 bp, Homo sapiens
tgacagatggcaata

SEQ ID NO: 1751743 - DNA, 15 bp, Homo sapiens
gacagatggcaatat

SEQ ID NO: 1751744 - DNA, 15 bp, Homo sapiens
acagatggcaatata

SEQ ID NO: 1751745 - DNA, 15 bp, Homo sapiens
cagatggcaatataa

SEQ ID NO: 1751746 - DNA, 15 bp, Homo sapiens
agatggcaatataag

SEQ ID NO: 1751747 - DNA, 15 bp, Homo sapiens
gatggcaatataaga

SEQ ID NO: 1751748 - DNA, 15 bp, Homo sapiens
atggcaatataagaa

SEQ ID NO: 1751749 - DNA, 15 bp, Homo sapiens
tggcaatataagaat

SEQ ID NO: 1751750 - DNA, 15 bp, Homo sapiens
ggcaatataagaatc

SEQ ID NO: 1751751 - DNA, 15 bp, Homo sapiens
gcaatataagaatca

SEQ ID NO: 1751752 - DNA, 15 bp, Homo sapiens
caatataagaatcac

SEQ ID NO: 1751753 - DNA, 15 bp, Homo sapiens
aatataagaatcaca

SEQ ID NO: 1751754 - DNA, 15 bp, Homo sapiens
atataagaatcacag

SEQ ID NO: 1751755 - DNA, 15 bp, Homo sapiens
tataagaatcacagt

SEQ ID NO: 1751756 - DNA, 15 bp, Homo sapiens
ataagaatcacagtg

SEQ ID NO: 1751757 - DNA, 15 bp, Homo sapiens
taagaatcacagtgt

SEQ ID NO: 1751758 - DNA, 15 bp, Homo sapiens
aagaatcacagtgta

SEQ ID NO: 1751759 - DNA, 15 bp, Homo sapiens
agaatcacagtgtag

SEQ ID NO: 1751760 - DNA, 15 bp, Homo sapiens
gaatcacagtgtagg

SEQ ID NO: 1751761 - DNA, 15 bp, Homo sapiens
aatcacagtgtagga

SEQ ID NO: 1751762 - DNA, 15 bp, Homo sapiens
atcacagtgtaggaa

SEQ ID NO: 1751763 - DNA, 15 bp, Homo sapiens
tcacagtgtaggaaa

SEQ ID NO: 1751764 - DNA, 15 bp, Homo sapiens
cacagtgtaggaaag

SEQ ID NO: 1751765 - DNA, 15 bp, Homo sapiens
acagtgtaggaaagg

SEQ ID NO: 1751766 - DNA, 15 bp, Homo sapiens
cagtgtaggaaaggc

SEQ ID NO: 1751767 - DNA, 15 bp, Homo sapiens
agtgtaggaaaggca

SEQ ID NO: 1751768 - DNA, 15 bp, Homo sapiens
gtgtaggaaaggcat

SEQ ID NO: 1751769 - DNA, 15 bp, Homo sapiens
tgtaggaaaggcatt

SEQ ID NO: 1751770 - DNA, 15 bp, Homo sapiens
gtaggaaaggcattt

SEQ ID NO: 1751771 - DNA, 15 bp, Homo sapiens
taggaaaggcattta

SEQ ID NO: 1751772 - DNA, 15 bp, Homo sapiens
aggaaaggcatttaa

SEQ ID NO: 1751773 - DNA, 15 bp, Homo sapiens
ggaaaggcatttaaa

SEQ ID NO: 1751774 - DNA, 15 bp, Homo sapiens
gaaaggcatttaaaa

SEQ ID NO: 1751775 - DNA, 15 bp, Homo sapiens
aaaggcatttaaaaa

SEQ ID NO: 1751776 - DNA, 15 bp, Homo sapiens
aaggcatttaaaaac

SEQ ID NO: 1751777 - DNA, 15 bp, Homo sapiens
aggcatttaaaaaca

SEQ ID NO: 1751778 - DNA, 15 bp, Homo sapiens
ggcatttaaaaacaa

SEQ ID NO: 1751779 - DNA, 15 bp, Homo sapiens
gcatttaaaaacaaa

SEQ ID NO: 1751780 - DNA, 15 bp, Homo sapiens
catttaaaaacaaaa

SEQ ID NO: 1751781 - DNA, 15 bp, Homo sapiens
atttaaaaacaaaag

SEQ ID NO: 1751782 - DNA, 15 bp, Homo sapiens
tttaaaaacaaaagt

SEQ ID NO: 1751783 - DNA, 15 bp, Homo sapiens
ttaaaaacaaaagta

SEQ ID NO: 1751784 - DNA, 15 bp, Homo sapiens
taaaaacaaaagtaa

SEQ ID NO: 1751785 - DNA, 15 bp, Homo sapiens
aaaaacaaaagtaat

SEQ ID NO: 1751786 - DNA, 15 bp, Homo sapiens
aaaacaaaagtaata

SEQ ID NO: 1751787 - DNA, 15 bp, Homo sapiens
aaacaaaagtaatac

SEQ ID NO: 1751788 - DNA, 15 bp, Homo sapiens
aacaaaagtaatacc

SEQ ID NO: 1751789 - DNA, 15 bp, Homo sapiens
acaaaagtaatacct

SEQ ID NO: 1751790 - DNA, 15 bp, Homo sapiens
caaaagtaatacctt

SEQ ID NO: 1751791 - DNA, 15 bp, Homo sapiens
aaaagtaataccttt

SEQ ID NO: 1751792 - DNA, 15 bp, Homo sapiens
aaagtaatacctttc

SEQ ID NO: 1751793 - DNA, 15 bp, Homo sapiens
aagtaatacctttcc

SEQ ID NO: 1751794 - DNA, 15 bp, Homo sapiens
agtaatacctttcct

SEQ ID NO: 1751795 - DNA, 15 bp, Homo sapiens
gtaatacctttccta

SEQ ID NO: 1751796 - DNA, 15 bp, Homo sapiens
taatacctttcctac

SEQ ID NO: 1751797 - DNA, 15 bp, Homo sapiens
aatacctttcctact

SEQ ID NO: 1751798 - DNA, 15 bp, Homo sapiens
atacctttcctactc

SEQ ID NO: 1751799 - DNA, 15 bp, Homo sapiens
tacctttcctactct

SEQ ID NO: 1751800 - DNA, 15 bp, Homo sapiens
acctttcctactcta

SEQ ID NO: 1751801 - DNA, 15 bp, Homo sapiens
cctttcctactctat

SEQ ID NO: 1751802 - DNA, 15 bp, Homo sapiens
ctttcctactctata

SEQ ID NO: 1751803 - DNA, 15 bp, Homo sapiens
tttcctactctatag

SEQ ID NO: 1751804 - DNA, 15 bp, Homo sapiens
ttcctactctatagc

SEQ ID NO: 1751805 - DNA, 15 bp, Homo sapiens
tcctactctatagca

SEQ ID NO: 1751806 - DNA, 15 bp, Homo sapiens
cctactctatagcac

SEQ ID NO: 1751807 - DNA, 15 bp, Homo sapiens
ctactctatagcaca

SEQ ID NO: 1751808 - DNA, 15 bp, Homo sapiens
tactctatagcacag

SEQ ID NO: 1751809 - DNA, 15 bp, Homo sapiens
actctatagcacaga

SEQ ID NO: 1751810 - DNA, 15 bp, Homo sapiens
ctctatagcacagaa

SEQ ID NO: 1751811 - DNA, 15 bp, Homo sapiens
tctatagcacagaaa

SEQ ID NO: 1751812 - DNA, 15 bp, Homo sapiens
ctatagcacagaaag

SEQ ID NO: 1751813 - DNA, 15 bp, Homo sapiens
tatagcacagaaaga

SEQ ID NO: 1751814 - DNA, 15 bp, Homo sapiens
atagcacagaaagaa

SEQ ID NO: 1751815 - DNA, 15 bp, Homo sapiens
tagcacagaaagaat

SEQ ID NO: 1751816 - DNA, 15 bp, Homo sapiens
agcacagaaagaata

SEQ ID NO: 1751817 - DNA, 15 bp, Homo sapiens
gcacagaaagaataa

SEQ ID NO: 1751818 - DNA, 15 bp, Homo sapiens
cacagaaagaataaa

SEQ ID NO: 1751819 - DNA, 15 bp, Homo sapiens
acagaaagaataaaa

SEQ ID NO: 1751820 - DNA, 15 bp, Homo sapiens
cagaaagaataaaaa

SEQ ID NO: 1751821 - DNA, 15 bp, Homo sapiens
agaaagaataaaaaa

SEQ ID NO: 1751822 - DNA, 15 bp, Homo sapiens
gaaagaataaaaaag

SEQ ID NO: 1751823 - DNA, 15 bp, Homo sapiens
aaagaataaaaaaga

SEQ ID NO: 1751824 - DNA, 15 bp, Homo sapiens
aagaataaaaaagag

SEQ ID NO: 1751825 - DNA, 15 bp, Homo sapiens
agaataaaaaagaga

SEQ ID NO: 1751826 - DNA, 15 bp, Homo sapiens
gaataaaaaagagaa

SEQ ID NO: 1751827 - DNA, 15 bp, Homo sapiens
aataaaaaagagaag

SEQ ID NO: 1751828 - DNA, 15 bp, Homo sapiens
ataaaaaagagaagc

SEQ ID NO: 1751829 - DNA, 15 bp, Homo sapiens
taaaaaagagaagcc

SEQ ID NO: 1751830 - DNA, 15 bp, Homo sapiens
aaaaaagagaagcct

SEQ ID NO: 1751831 - DNA, 15 bp, Homo sapiens
aaaaagagaagcctc

SEQ ID NO: 1751832 - DNA, 15 bp, Homo sapiens
aaaagagaagcctca

SEQ ID NO: 1751833 - DNA, 15 bp, Homo sapiens
aaagagaagcctcac

SEQ ID NO: 1751834 - DNA, 15 bp, Homo sapiens
aagagaagcctcacc

SEQ ID NO: 1751835 - DNA, 15 bp, Homo sapiens
agagaagcctcacct

SEQ ID NO: 1751836 - DNA, 15 bp, Homo sapiens
gagaagcctcacctg

SEQ ID NO: 1751837 - DNA, 15 bp, Homo sapiens
agaagcctcacctgt

SEQ ID NO: 1751838 - DNA, 15 bp, Homo sapiens
gaagcctcacctgtc

SEQ ID NO: 1751839 - DNA, 15 bp, Homo sapiens
aagcctcacctgtca

SEQ ID NO: 1751840 - DNA, 15 bp, Homo sapiens
agcctcacctgtcat

SEQ ID NO: 1751841 - DNA, 15 bp, Homo sapiens
gcctcacctgtcatc

SEQ ID NO: 1751842 - DNA, 15 bp, Homo sapiens
cctcacctgtcatct

SEQ ID NO: 1751843 - DNA, 15 bp, Homo sapiens
ctcacctgtcatctc

SEQ ID NO: 1751844 - DNA, 15 bp, Homo sapiens
tcacctgtcatctct

SEQ ID NO: 1751845 - DNA, 15 bp, Homo sapiens
cacctgtcatctctg

SEQ ID NO: 1751846 - DNA, 15 bp, Homo sapiens
acctgtcatctctga

SEQ ID NO: 1751847 - DNA, 15 bp, Homo sapiens
cctgtcatctctgat

SEQ ID NO: 1751848 - DNA, 15 bp, Homo sapiens
ctgtcatctctgata

SEQ ID NO: 1751849 - DNA, 15 bp, Homo sapiens
tgtcatctctgatat

SEQ ID NO: 1751850 - DNA, 15 bp, Homo sapiens
gtcatctctgatatg

SEQ ID NO: 1751851 - DNA, 15 bp, Homo sapiens
tcatctctgatatgg

SEQ ID NO: 1751852 - DNA, 15 bp, Homo sapiens
catctctgatatggt

SEQ ID NO: 1751853 - DNA, 15 bp, Homo sapiens
atctctgatatggta

SEQ ID NO: 1751854 - DNA, 15 bp, Homo sapiens
tctctgatatggtag

SEQ ID NO: 1751855 - DNA, 15 bp, Homo sapiens
ctctgatatggtaga

SEQ ID NO: 1751856 - DNA, 15 bp, Homo sapiens
tctgatatggtagaa

SEQ ID NO: 1751857 - DNA, 15 bp, Homo sapiens
ctgatatggtagaaa

SEQ ID NO: 1751858 - DNA, 15 bp, Homo sapiens
tgatatggtagaaaa

SEQ ID NO: 1751859 - DNA, 15 bp, Homo sapiens
gatatggtagaaaaa

SEQ ID NO: 1751860 - DNA, 15 bp, Homo sapiens
atatggtagaaaaat

SEQ ID NO: 1751861 - DNA, 15 bp, Homo sapiens
tatggtagaaaaatc

SEQ ID NO: 1751862 - DNA, 15 bp, Homo sapiens
atggtagaaaaatcc

SEQ ID NO: 1751863 - DNA, 15 bp, Homo sapiens
tggtagaaaaatcca

SEQ ID NO: 1751864 - DNA, 15 bp, Homo sapiens
ggtagaaaaatccat

SEQ ID NO: 1751865 - DNA, 15 bp, Homo sapiens
gtagaaaaatccata

SEQ ID NO: 1751866 - DNA, 15 bp, Homo sapiens
tagaaaaatccataa

SEQ ID NO: 1751867 - DNA, 15 bp, Homo sapiens
agaaaaatccataac

SEQ ID NO: 1751868 - DNA, 15 bp, Homo sapiens
gaaaaatccataacc

SEQ ID NO: 1751869 - DNA, 15 bp, Homo sapiens
aaaaatccataacca

SEQ ID NO: 1751870 - DNA, 15 bp, Homo sapiens
aaaatccataaccat

SEQ ID NO: 1751871 - DNA, 15 bp, Homo sapiens
aaatccataaccatt

SEQ ID NO: 1751872 - DNA, 15 bp, Homo sapiens
aatccataaccattg

SEQ ID NO: 1751873 - DNA, 15 bp, Homo sapiens
atccataaccattgt

SEQ ID NO: 1751874 - DNA, 15 bp, Homo sapiens
tccataaccattgtg

SEQ ID NO: 1751875 - DNA, 15 bp, Homo sapiens
ccataaccattgtgt

SEQ ID NO: 1751876 - DNA, 15 bp, Homo sapiens
cataaccattgtgta

SEQ ID NO: 1751877 - DNA, 15 bp, Homo sapiens
ataaccattgtgtac

SEQ ID NO: 1751878 - DNA, 15 bp, Homo sapiens
taaccattgtgtacc

SEQ ID NO: 1751879 - DNA, 15 bp, Homo sapiens
aaccattgtgtacca

SEQ ID NO: 1751880 - DNA, 15 bp, Homo sapiens
accattgtgtaccat

SEQ ID NO: 1751881 - DNA, 15 bp, Homo sapiens
ccattgtgtaccatg

SEQ ID NO: 1751882 - DNA, 15 bp, Homo sapiens
cattgtgtaccatgg

SEQ ID NO: 1751883 - DNA, 15 bp, Homo sapiens
attgtgtaccatggg

SEQ ID NO: 1751884 - DNA, 15 bp, Homo sapiens
ttgtgtaccatggga

SEQ ID NO: 1751885 - DNA, 15 bp, Homo sapiens
tgtgtaccatgggaa

SEQ ID NO: 1751886 - DNA, 15 bp, Homo sapiens
gtgtaccatgggaac

SEQ ID NO: 1751887 - DNA, 15 bp, Homo sapiens
tgtaccatgggaact

SEQ ID NO: 1751888 - DNA, 15 bp, Homo sapiens
gtaccatgggaacta

SEQ ID NO: 1751889 - DNA, 15 bp, Homo sapiens
taccatgggaactac

SEQ ID NO: 1751890 - DNA, 15 bp, Homo sapiens
accatgggaactacc

SEQ ID NO: 1751891 - DNA, 15 bp, Homo sapiens
ccatgggaactacca

SEQ ID NO: 1751892 - DNA, 15 bp, Homo sapiens
catgggaactaccac

SEQ ID NO: 1751893 - DNA, 15 bp, Homo sapiens
atgggaactaccact

SEQ ID NO: 1751894 - DNA, 15 bp, Homo sapiens
tgggaactaccactc

SEQ ID NO: 1751895 - DNA, 15 bp, Homo sapiens
gggaactaccactcc

SEQ ID NO: 1751896 - DNA, 15 bp, Homo sapiens
ggaactaccactccc

SEQ ID NO: 1751897 - DNA, 15 bp, Homo sapiens
gaactaccactccct

SEQ ID NO: 1751898 - DNA, 15 bp, Homo sapiens
aactaccactccctg

SEQ ID NO: 1751899 - DNA, 15 bp, Homo sapiens
actaccactccctgg

SEQ ID NO: 1751900 - DNA, 15 bp, Homo sapiens
ctaccactccctgga

SEQ ID NO: 1751901 - DNA, 15 bp, Homo sapiens
taccactccctggac

SEQ ID NO: 1751902 - DNA, 15 bp, Homo sapiens
accactccctggact

SEQ ID NO: 1751903 - DNA, 15 bp, Homo sapiens
ccactccctggactc

SEQ ID NO: 1751904 - DNA, 15 bp, Homo sapiens
cactccctggactcg

SEQ ID NO: 1751905 - DNA, 15 bp, Homo sapiens
actccctggactcgt

SEQ ID NO: 1751906 - DNA, 15 bp, Homo sapiens
ctccctggactcgta

SEQ ID NO: 1751907 - DNA, 15 bp, Homo sapiens
tccctggactcgtaa

SEQ ID NO: 1751908 - DNA, 15 bp, Homo sapiens
ccctggactcgtaaa

SEQ ID NO: 1751909 - DNA, 15 bp, Homo sapiens
cctggactcgtaaat

SEQ ID NO: 1751910 - DNA, 15 bp, Homo sapiens
ctggactcgtaaata

SEQ ID NO: 1751911 - DNA, 15 bp, Homo sapiens
tggactcgtaaatag

SEQ ID NO: 1751912 - DNA, 15 bp, Homo sapiens
ggactcgtaaatagc

SEQ ID NO: 1751913 - DNA, 15 bp, Homo sapiens
gactcgtaaatagcc

SEQ ID NO: 1751914 - DNA, 15 bp, Homo sapiens
actcgtaaatagcca

SEQ ID NO: 1751915 - DNA, 15 bp, Homo sapiens
ctcgtaaatagccaa

SEQ ID NO: 1751916 - DNA, 15 bp, Homo sapiens
tcgtaaatagccaac

SEQ ID NO: 1751917 - DNA, 15 bp, Homo sapiens
cgtaaatagccaacc

SEQ ID NO: 1751918 - DNA, 15 bp, Homo sapiens
gtaaatagccaacca

SEQ ID NO: 1751919 - DNA, 15 bp, Homo sapiens
taaatagccaaccag

SEQ ID NO: 1751920 - DNA, 15 bp, Homo sapiens
aaatagccaaccaga

SEQ ID NO: 1751921 - DNA, 15 bp, Homo sapiens
aatagccaaccagac

SEQ ID NO: 1751922 - DNA, 15 bp, Homo sapiens
atagccaaccagact

SEQ ID NO: 1751923 - DNA, 15 bp, Homo sapiens
tagccaaccagactt

SEQ ID NO: 1751924 - DNA, 15 bp, Homo sapiens
agccaaccagacttg

SEQ ID NO: 1751925 - DNA, 15 bp, Homo sapiens
gccaaccagacttgt

SEQ ID NO: 1751926 - DNA, 15 bp, Homo sapiens
ccaaccagacttgtt

SEQ ID NO: 1751927 - DNA, 15 bp, Homo sapiens
caaccagacttgttg

SEQ ID NO: 1751928 - DNA, 15 bp, Homo sapiens
aaccagacttgttga

SEQ ID NO: 1751929 - DNA, 15 bp, Homo sapiens
accagacttgttgag

SEQ ID NO: 1751930 - DNA, 15 bp, Homo sapiens
ccagacttgttgaga

SEQ ID NO: 1751931 - DNA, 15 bp, Homo sapiens
cagacttgttgagag

SEQ ID NO: 1751932 - DNA, 15 bp, Homo sapiens
agacttgttgagaga

SEQ ID NO: 1751933 - DNA, 15 bp, Homo sapiens
gacttgttgagagaa

SEQ ID NO: 1751934 - DNA, 15 bp, Homo sapiens
acttgttgagagaac

SEQ ID NO: 1751935 - DNA, 15 bp, Homo sapiens
cttgttgagagaaca

SEQ ID NO: 1751936 - DNA, 15 bp, Homo sapiens
ttgttgagagaacaa

SEQ ID NO: 1751937 - DNA, 15 bp, Homo sapiens
ttgagagaacaaaat

SEQ ID NO: 1751938 - DNA, 15 bp, Homo sapiens
tgagagaacaaaatt

SEQ ID NO: 1751939 - DNA, 15 bp, Homo sapiens
gagagaacaaaattt

SEQ ID NO: 1751940 - DNA, 15 bp, Homo sapiens
agagaacaaaatttc

SEQ ID NO: 1751941 - DNA, 15 bp, Homo sapiens
gagaacaaaatttcc

SEQ ID NO: 1751942 - DNA, 15 bp, Homo sapiens
agaacaaaatttcca

SEQ ID NO: 1751943 - DNA, 15 bp, Homo sapiens
gaacaaaatttccac

SEQ ID NO: 1751944 - DNA, 15 bp, Homo sapiens
aacaaaatttccacc

SEQ ID NO: 1751945 - DNA, 15 bp, Homo sapiens
acaaaatttccacct

SEQ ID NO: 1751946 - DNA, 15 bp, Homo sapiens
caaaatttccacctc

SEQ ID NO: 1751947 - DNA, 15 bp, Homo sapiens
aaaatttccacctcc

SEQ ID NO: 1751948 - DNA, 15 bp, Homo sapiens
aaatttccacctcct

SEQ ID NO: 1751949 - DNA, 15 bp, Homo sapiens
aatttccacctcctc

SEQ ID NO: 1751950 - DNA, 15 bp, Homo sapiens
atttccacctcctcc

SEQ ID NO: 1751951 - DNA, 15 bp, Homo sapiens
tttccacctcctccg

SEQ ID NO: 1751952 - DNA, 15 bp, Homo sapiens
ttccacctcctccgc

SEQ ID NO: 1751953 - DNA, 15 bp, Homo sapiens
tccacctcctccgct

SEQ ID NO: 1751954 - DNA, 15 bp, Homo sapiens
ccacctcctccgctg

SEQ ID NO: 1751955 - DNA, 15 bp, Homo sapiens
cacctcctccgctgt

SEQ ID NO: 1751956 - DNA, 15 bp, Homo sapiens
acctcctccgctgtg

SEQ ID NO: 1751957 - DNA, 15 bp, Homo sapiens
cctcctccgctgtgt

SEQ ID NO: 1751958 - DNA, 15 bp, Homo sapiens
ctcctccgctgtgtg

SEQ ID NO: 1751959 - DNA, 15 bp, Homo sapiens
tcctccgctgtgtgg

SEQ ID NO: 1751960 - DNA, 15 bp, Homo sapiens
cctccgctgtgtggc

SEQ ID NO: 1751961 - DNA, 15 bp, Homo sapiens
ctccgctgtgtggca

SEQ ID NO: 1751962 - DNA, 15 bp, Homo sapiens
tccgctgtgtggcac

SEQ ID NO: 1751963 - DNA, 15 bp, Homo sapiens
ccgctgtgtggcaca

SEQ ID NO: 1751964 - DNA, 15 bp, Homo sapiens
cgctgtgtggcacaa

SEQ ID NO: 1751965 - DNA, 15 bp, Homo sapiens
gctgtgtggcacaat

SEQ ID NO: 1751966 - DNA, 15 bp, Homo sapiens
ctgtgtggcacaata

SEQ ID NO: 1751967 - DNA, 15 bp, Homo sapiens
tgtgtggcacaataa

SEQ ID NO: 1751968 - DNA, 15 bp, Homo sapiens
gtgtggcacaataaa

SEQ ID NO: 1751969 - DNA, 15 bp, Homo sapiens
tgtggcacaataaaa

SEQ ID NO: 1751970 - DNA, 15 bp, Homo sapiens
gtggcacaataaaag

SEQ ID NO: 1751971 - DNA, 15 bp, Homo sapiens
tggcacaataaaaga

SEQ ID NO: 1751972 - DNA, 15 bp, Homo sapiens
ggcacaataaaagaa

SEQ ID NO: 1751973 - DNA, 15 bp, Homo sapiens
gcacaataaaagaac

SEQ ID NO: 1751974 - DNA, 15 bp, Homo sapiens
cacaataaaagaaca

SEQ ID NO: 1751975 - DNA, 15 bp, Homo sapiens
acaataaaagaacat

SEQ ID NO: 1751976 - DNA, 15 bp, Homo sapiens
caataaaagaacatt

SEQ ID NO: 1751977 - DNA, 15 bp, Homo sapiens
aataaaagaacattt

SEQ ID NO: 1751978 - DNA, 15 bp, Homo sapiens
ataaaagaacatttt

SEQ ID NO: 1751979 - DNA, 15 bp, Homo sapiens
taaaagaacatttta

SEQ ID NO: 1751980 - DNA, 15 bp, Homo sapiens
aaaagaacattttac

SEQ ID NO: 1751981 - DNA, 15 bp, Homo sapiens
aaagaacattttact

SEQ ID NO: 1751982 - DNA, 15 bp, Homo sapiens
aagaacattttacta

SEQ ID NO: 1751983 - DNA, 15 bp, Homo sapiens
agaacattttactag

SEQ ID NO: 1751984 - DNA, 15 bp, Homo sapiens
gaacattttactagg

SEQ ID NO: 1751985 - DNA, 15 bp, Homo sapiens
aacattttactaggc

SEQ ID NO: 1751986 - DNA, 15 bp, Homo sapiens
acattttactaggcc

SEQ ID NO: 1751987 - DNA, 15 bp, Homo sapiens
cattttactaggcct

SEQ ID NO: 1751988 - DNA, 15 bp, Homo sapiens
attttactaggccta

SEQ ID NO: 1751989 - DNA, 15 bp, Homo sapiens
ttttactaggcctac

SEQ ID NO: 1751990 - DNA, 15 bp, Homo sapiens
tttactaggcctaca

SEQ ID NO: 1751991 - DNA, 15 bp, Homo sapiens
ttactaggcctacag

SEQ ID NO: 1751992 - DNA, 15 bp, Homo sapiens
tactaggcctacaga

SEQ ID NO: 1751993 - DNA, 15 bp, Homo sapiens
actaggcctacagat

SEQ ID NO: 1751994 - DNA, 15 bp, Homo sapiens
ctaggcctacagatg

SEQ ID NO: 1751995 - DNA, 15 bp, Homo sapiens
taggcctacagatgc

SEQ ID NO: 1751996 - DNA, 15 bp, Homo sapiens
aggcctacagatgct

SEQ ID NO: 1751997 - DNA, 15 bp, Homo sapiens
ggcctacagatgctt

SEQ ID NO: 1751998 - DNA, 15 bp, Homo sapiens
gcctacagatgctta

SEQ ID NO: 1751999 - DNA, 15 bp, Homo sapiens
cctacagatgcttat

SEQ ID NO: 1752000 - DNA, 15 bp, Homo sapiens
ctacagatgcttata

SEQ ID NO: 1752001 - DNA, 15 bp, Homo sapiens
tacagatgcttatat

SEQ ID NO: 1752002 - DNA, 15 bp, Homo sapiens
acagatgcttatatt

SEQ ID NO: 1752003 - DNA, 15 bp, Homo sapiens
cagatgcttatattg

SEQ ID NO: 1752004 - DNA, 15 bp, Homo sapiens
agatgcttatattgt

SEQ ID NO: 1752005 - DNA, 15 bp, Homo sapiens
gatgcttatattgtt

SEQ ID NO: 1752006 - DNA, 15 bp, Homo sapiens
atgcttatattgttt

SEQ ID NO: 1752007 - DNA, 15 bp, Homo sapiens
tgcttatattgtttc

SEQ ID NO: 1752008 - DNA, 15 bp, Homo sapiens
gcttatattgtttct

SEQ ID NO: 1752009 - DNA, 15 bp, Homo sapiens
cttatattgtttcta

SEQ ID NO: 1752010 - DNA, 15 bp, Homo sapiens
ttatattgtttctaa

SEQ ID NO: 1752011 - DNA, 15 bp, Homo sapiens
tatattgtttctaaa

SEQ ID NO: 1752012 - DNA, 15 bp, Homo sapiens
atattgtttctaaaa

SEQ ID NO: 1752013 - DNA, 15 bp, Homo sapiens
tattgtttctaaaaa

SEQ ID NO: 1752014 - DNA, 15 bp, Homo sapiens
attgtttctaaaaac

SEQ ID NO: 1752015 - DNA, 15 bp, Homo sapiens
ttgtttctaaaaacc

SEQ ID NO: 1752016 - DNA, 15 bp, Homo sapiens
tgtttctaaaaacca

SEQ ID NO: 1752017 - DNA, 15 bp, Homo sapiens
gtttctaaaaaccat

SEQ ID NO: 1752018 - DNA, 15 bp, Homo sapiens
tttctaaaaaccatt

SEQ ID NO: 1752019 - DNA, 15 bp, Homo sapiens
ttctaaaaaccattt

SEQ ID NO: 1752020 - DNA, 15 bp, Homo sapiens
tctaaaaaccattta

SEQ ID NO: 1752021 - DNA, 15 bp, Homo sapiens
ctaaaaaccatttaa

SEQ ID NO: 1752022 - DNA, 15 bp, Homo sapiens
taaaaaccatttaat

SEQ ID NO: 1752023 - DNA, 15 bp, Homo sapiens
aaaaaccatttaata

SEQ ID NO: 1752024 - DNA, 15 bp, Homo sapiens
aaaaccatttaatat

SEQ ID NO: 1752025 - DNA, 15 bp, Homo sapiens
aaaccatttaatata

SEQ ID NO: 1752026 - DNA, 15 bp, Homo sapiens
aaccatttaatatac

SEQ ID NO: 1752027 - DNA, 15 bp, Homo sapiens
accatttaatataca

SEQ ID NO: 1752028 - DNA, 15 bp, Homo sapiens
ccatttaatatacaa

SEQ ID NO: 1752029 - DNA, 15 bp, Homo sapiens
catttaatatacaaa

SEQ ID NO: 1752030 - DNA, 15 bp, Homo sapiens
atttaatatacaaaa

SEQ ID NO: 1752031 - DNA, 15 bp, Homo sapiens
tttaatatacaaaaa

SEQ ID NO: 1752032 - DNA, 15 bp, Homo sapiens
ttaatatacaaaaag

SEQ ID NO: 1752033 - DNA, 15 bp, Homo sapiens
taatatacaaaaaga

SEQ ID NO: 1752034 - DNA, 15 bp, Homo sapiens
aatatacaaaaagag

SEQ ID NO: 1752035 - DNA, 15 bp, Homo sapiens
atatacaaaaagagg

SEQ ID NO: 1752036 - DNA, 15 bp, Homo sapiens
tatacaaaaagagga

SEQ ID NO: 1752037 - DNA, 15 bp, Homo sapiens
atacaaaaagaggaa

SEQ ID NO: 1752038 - DNA, 15 bp, Homo sapiens
tacaaaaagaggaag

SEQ ID NO: 1752039 - DNA, 15 bp, Homo sapiens
acaaaaagaggaagc

SEQ ID NO: 1752040 - DNA, 15 bp, Homo sapiens
caaaaagaggaagcc

SEQ ID NO: 1752041 - DNA, 15 bp, Homo sapiens
aaaaagaggaagcca

SEQ ID NO: 1752042 - DNA, 15 bp, Homo sapiens
aaaagaggaagccaa

SEQ ID NO: 1752043 - DNA, 15 bp, Homo sapiens
aaagaggaagccaat

SEQ ID NO: 1752044 - DNA, 15 bp, Homo sapiens
aagaggaagccaatt

SEQ ID NO: 1752045 - DNA, 15 bp, Homo sapiens
agaggaagccaattg

SEQ ID NO: 1752046 - DNA, 15 bp, Homo sapiens
gaggaagccaattga

SEQ ID NO: 1752047 - DNA, 15 bp, Homo sapiens
aggaagccaattgat

SEQ ID NO: 1752048 - DNA, 15 bp, Homo sapiens
ggaagccaattgatg

SEQ ID NO: 1752049 - DNA, 15 bp, Homo sapiens
gaagccaattgatga

SEQ ID NO: 1752050 - DNA, 15 bp, Homo sapiens
aagccaattgatgaa

SEQ ID NO: 1752051 - DNA, 15 bp, Homo sapiens
agccaattgatgaag

SEQ ID NO: 1752052 - DNA, 15 bp, Homo sapiens
gccaattgatgaagc

SEQ ID NO: 1752053 - DNA, 15 bp, Homo sapiens
ccaattgatgaagct

SEQ ID NO: 1752054 - DNA, 15 bp, Homo sapiens
caattgatgaagctg

SEQ ID NO: 1752055 - DNA, 15 bp, Homo sapiens
aattgatgaagctgt

SEQ ID NO: 1752056 - DNA, 15 bp, Homo sapiens
attgatgaagctgta

SEQ ID NO: 1752057 - DNA, 15 bp, Homo sapiens
ttgatgaagctgtaa

SEQ ID NO: 1752058 - DNA, 15 bp, Homo sapiens
tgatgaagctgtaaa

SEQ ID NO: 1752059 - DNA, 15 bp, Homo sapiens
gatgaagctgtaaaa

SEQ ID NO: 1752060 - DNA, 15 bp, Homo sapiens
atgaagctgtaaaac

SEQ ID NO: 1752061 - DNA, 15 bp, Homo sapiens
tgaagctgtaaaaca

SEQ ID NO: 1752062 - DNA, 15 bp, Homo sapiens
gaagctgtaaaacac

SEQ ID NO: 1752063 - DNA, 15 bp, Homo sapiens
aagctgtaaaacact

SEQ ID NO: 1752064 - DNA, 15 bp, Homo sapiens
agctgtaaaacacta

SEQ ID NO: 1752065 - DNA, 15 bp, Homo sapiens
gctgtaaaacactac

SEQ ID NO: 1752066 - DNA, 15 bp, Homo sapiens
ctgtaaaacactaca

SEQ ID NO: 1752067 - DNA, 15 bp, Homo sapiens
tgtaaaacactacac

SEQ ID NO: 1752068 - DNA, 15 bp, Homo sapiens
gtaaaacactacact

SEQ ID NO: 1752069 - DNA, 15 bp, Homo sapiens
taaaacactacacta

SEQ ID NO: 1752070 - DNA, 15 bp, Homo sapiens
aaaacactacactat

SEQ ID NO: 1752071 - DNA, 15 bp, Homo sapiens
aaacactacactata

SEQ ID NO: 1752072 - DNA, 15 bp, Homo sapiens
aacactacactatat

SEQ ID NO: 1752073 - DNA, 15 bp, Homo sapiens
acactacactatatt

SEQ ID NO: 1752074 - DNA, 15 bp, Homo sapiens
cactacactatatta

SEQ ID NO: 1752075 - DNA, 15 bp, Homo sapiens
actacactatattac

SEQ ID NO: 1752076 - DNA, 15 bp, Homo sapiens
ctacactatattacc

SEQ ID NO: 1752077 - DNA, 15 bp, Homo sapiens
acactatattacctt

SEQ ID NO: 1752078 - DNA, 15 bp, Homo sapiens
cactatattaccttt

SEQ ID NO: 1752079 - DNA, 15 bp, Homo sapiens
actatattacctttt

SEQ ID NO: 1752080 - DNA, 15 bp, Homo sapiens
ctatattaccttttg

SEQ ID NO: 1752081 - DNA, 15 bp, Homo sapiens
tatattaccttttgg

SEQ ID NO: 1752082 - DNA, 15 bp, Homo sapiens
atattaccttttgga

SEQ ID NO: 1752083 - DNA, 15 bp, Homo sapiens
tattaccttttggaa

SEQ ID NO: 1752084 - DNA, 15 bp, Homo sapiens
attaccttttggaaa

SEQ ID NO: 1752085 - DNA, 15 bp, Homo sapiens
ttaccttttggaaaa

SEQ ID NO: 1752086 - DNA, 15 bp, Homo sapiens
taccttttggaaaaa

SEQ ID NO: 1752087 - DNA, 15 bp, Homo sapiens
accttttggaaaaaa

SEQ ID NO: 1752088 - DNA, 15 bp, Homo sapiens
ccttttggaaaaaag

SEQ ID NO: 1752089 - DNA, 15 bp, Homo sapiens
cttttggaaaaaagt

SEQ ID NO: 1752090 - DNA, 15 bp, Homo sapiens
ttttggaaaaaagtg

SEQ ID NO: 1752091 - DNA, 15 bp, Homo sapiens
tttggaaaaaagtgg

SEQ ID NO: 1752092 - DNA, 15 bp, Homo sapiens
ttggaaaaaagtggg

SEQ ID NO: 1752093 - DNA, 15 bp, Homo sapiens
tggaaaaaagtgggt

SEQ ID NO: 1752094 - DNA, 15 bp, Homo sapiens
ggaaaaaagtgggtc

SEQ ID NO: 1752095 - DNA, 15 bp, Homo sapiens
gaaaaaagtgggtcc

SEQ ID NO: 1752096 - DNA, 15 bp, Homo sapiens
aaaaaagtgggtccg

SEQ ID NO: 1752097 - DNA, 15 bp, Homo sapiens
aaaaagtgggtccgt

SEQ ID NO: 1752098 - DNA, 15 bp, Homo sapiens
aaaagtgggtccgta

SEQ ID NO: 1752099 - DNA, 15 bp, Homo sapiens
aaagtgggtccgtaa

SEQ ID NO: 1752100 - DNA, 15 bp, Homo sapiens
aagtgggtccgtaaa

SEQ ID NO: 1752101 - DNA, 15 bp, Homo sapiens
agtgggtccgtaaag

SEQ ID NO: 1752102 - DNA, 15 bp, Homo sapiens
gtgggtccgtaaaga

SEQ ID NO: 1752103 - DNA, 15 bp, Homo sapiens
tgggtccgtaaagag

SEQ ID NO: 1752104 - DNA, 15 bp, Homo sapiens
gggtccgtaaagagt

SEQ ID NO: 1752105 - DNA, 15 bp, Homo sapiens
ggtccgtaaagagtt

SEQ ID NO: 1752106 - DNA, 15 bp, Homo sapiens
gtccgtaaagagttc

SEQ ID NO: 1752107 - DNA, 15 bp, Homo sapiens
tccgtaaagagttct

SEQ ID NO: 1752108 - DNA, 15 bp, Homo sapiens
ccgtaaagagttctg

SEQ ID NO: 1752109 - DNA, 15 bp, Homo sapiens
cgtaaagagttctgg

SEQ ID NO: 1752110 - DNA, 15 bp, Homo sapiens
gtaaagagttctgga

SEQ ID NO: 1752111 - DNA, 15 bp, Homo sapiens
taaagagttctggaa

SEQ ID NO: 1752112 - DNA, 15 bp, Homo sapiens
aaagagttctggaac

SEQ ID NO: 1752113 - DNA, 15 bp, Homo sapiens
aagagttctggaaca

SEQ ID NO: 1752114 - DNA, 15 bp, Homo sapiens
agagttctggaacag

SEQ ID NO: 1752115 - DNA, 15 bp, Homo sapiens
gagttctggaacagg

SEQ ID NO: 1752116 - DNA, 15 bp, Homo sapiens
agttctggaacagga

SEQ ID NO: 1752117 - DNA, 15 bp, Homo sapiens
gttctggaacaggaa

SEQ ID NO: 1752118 - DNA, 15 bp, Homo sapiens
ttctggaacaggaag

SEQ ID NO: 1752119 - DNA, 15 bp, Homo sapiens
tctggaacaggaaga

SEQ ID NO: 1752120 - DNA, 15 bp, Homo sapiens
ctggaacaggaagac

SEQ ID NO: 1752121 - DNA, 15 bp, Homo sapiens
tggaacaggaagacc

SEQ ID NO: 1752122 - DNA, 15 bp, Homo sapiens
ggaacaggaagacct

SEQ ID NO: 1752123 - DNA, 15 bp, Homo sapiens
gaacaggaagacctt

SEQ ID NO: 1752124 - DNA, 15 bp, Homo sapiens
aacaggaagaccttc

SEQ ID NO: 1752125 - DNA, 15 bp, Homo sapiens
acaggaagaccttcc

SEQ ID NO: 1752126 - DNA, 15 bp, Homo sapiens
caggaagaccttcct

SEQ ID NO: 1752127 - DNA, 15 bp, Homo sapiens
aggaagaccttcctc

SEQ ID NO: 1752128 - DNA, 15 bp, Homo sapiens
ggaagaccttcctct

SEQ ID NO: 1752129 - DNA, 15 bp, Homo sapiens
gaagaccttcctctt

SEQ ID NO: 1752130 - DNA, 15 bp, Homo sapiens
aagaccttcctcttt

SEQ ID NO: 1752131 - DNA, 15 bp, Homo sapiens
agaccttcctctttt

SEQ ID NO: 1752132 - DNA, 15 bp, Homo sapiens
gaccttcctcttttg

SEQ ID NO: 1752133 - DNA, 15 bp, Homo sapiens
accttcctcttttgc

SEQ ID NO: 1752134 - DNA, 15 bp, Homo sapiens
ccttcctcttttgct

SEQ ID NO: 1752135 - DNA, 15 bp, Homo sapiens
cttcctcttttgcta

SEQ ID NO: 1752136 - DNA, 15 bp, Homo sapiens
ttcctcttttgctat

SEQ ID NO: 1752137 - DNA, 15 bp, Homo sapiens
tcctcttttgctatg

SEQ ID NO: 1752138 - DNA, 15 bp, Homo sapiens
cctcttttgctatga

SEQ ID NO: 1752139 - DNA, 15 bp, Homo sapiens
ctcttttgctatgag

SEQ ID NO: 1752140 - DNA, 15 bp, Homo sapiens
tcttttgctatgagt

SEQ ID NO: 1752141 - DNA, 15 bp, Homo sapiens
cttttgctatgagta

SEQ ID NO: 1752142 - DNA, 15 bp, Homo sapiens
ttttgctatgagtaa

SEQ ID NO: 1752143 - DNA, 15 bp, Homo sapiens
tttgctatgagtaag

SEQ ID NO: 1752144 - DNA, 15 bp, Homo sapiens
ttgctatgagtaaga

SEQ ID NO: 1752145 - DNA, 15 bp, Homo sapiens
tgctatgagtaagag

SEQ ID NO: 1752146 - DNA, 15 bp, Homo sapiens
gctatgagtaagaga

SEQ ID NO: 1752147 - DNA, 15 bp, Homo sapiens
ctatgagtaagagac

SEQ ID NO: 1752148 - DNA, 15 bp, Homo sapiens
tatgagtaagagacc

SEQ ID NO: 1752149 - DNA, 15 bp, Homo sapiens
atgagtaagagacct

SEQ ID NO: 1752150 - DNA, 15 bp, Homo sapiens
tgagtaagagaccta

SEQ ID NO: 1752151 - DNA, 15 bp, Homo sapiens
gagtaagagacctaa

SEQ ID NO: 1752152 - DNA, 15 bp, Homo sapiens
agtaagagacctaaa

SEQ ID NO: 1752153 - DNA, 15 bp, Homo sapiens
gtaagagacctaaaa

SEQ ID NO: 1752154 - DNA, 15 bp, Homo sapiens
taagagacctaaaag

SEQ ID NO: 1752155 - DNA, 15 bp, Homo sapiens
aagagacctaaaagg

SEQ ID NO: 1752156 - DNA, 15 bp, Homo sapiens
agagacctaaaaggt

SEQ ID NO: 1752157 - DNA, 15 bp, Homo sapiens
gagacctaaaaggtg

SEQ ID NO: 1752158 - DNA, 15 bp, Homo sapiens
agacctaaaaggtga

SEQ ID NO: 1752159 - DNA, 15 bp, Homo sapiens
gacctaaaaggtgac

SEQ ID NO: 1752160 - DNA, 15 bp, Homo sapiens
acctaaaaggtgacg

SEQ ID NO: 1752161 - DNA, 15 bp, Homo sapiens
cctaaaaggtgacga

SEQ ID NO: 1752162 - DNA, 15 bp, Homo sapiens
ctaaaaggtgacgat

SEQ ID NO: 1752163 - DNA, 15 bp, Homo sapiens
taaaaggtgacgatc

SEQ ID NO: 1752164 - DNA, 15 bp, Homo sapiens
aaaaggtgacgatca

SEQ ID NO: 1752165 - DNA, 15 bp, Homo sapiens
aaaggtgacgatcaa

SEQ ID NO: 1752166 - DNA, 15 bp, Homo sapiens
aaggtgacgatcaaa

SEQ ID NO: 1752167 - DNA, 15 bp, Homo sapiens
aggtgacgatcaaat

SEQ ID NO: 1752168 - DNA, 15 bp, Homo sapiens
ggtgacgatcaaatc

SEQ ID NO: 1752169 - DNA, 15 bp, Homo sapiens
gtgacgatcaaatcc

SEQ ID NO: 1752170 - DNA, 15 bp, Homo sapiens
tgacgatcaaatcct

SEQ ID NO: 1752171 - DNA, 15 bp, Homo sapiens
gacgatcaaatcctg

SEQ ID NO: 1752172 - DNA, 15 bp, Homo sapiens
acgatcaaatcctgc

SEQ ID NO: 1752173 - DNA, 15 bp, Homo sapiens
cgatcaaatcctgca

SEQ ID NO: 1752174 - DNA, 15 bp, Homo sapiens
gatcaaatcctgcaa

SEQ ID NO: 1752175 - DNA, 15 bp, Homo sapiens
atcaaatcctgcaat

SEQ ID NO: 1752176 - DNA, 15 bp, Homo sapiens
tcaaatcctgcaatg

SEQ ID NO: 1752177 - DNA, 15 bp, Homo sapiens
caaatcctgcaatga

SEQ ID NO: 1752178 - DNA, 15 bp, Homo sapiens
aaatcctgcaatgaa

SEQ ID NO: 1752179 - DNA, 15 bp, Homo sapiens
aatcctgcaatgaaa

SEQ ID NO: 1752180 - DNA, 15 bp, Homo sapiens
atcctgcaatgaaac

SEQ ID NO: 1752181 - DNA, 15 bp, Homo sapiens
tcctgcaatgaaacc

SEQ ID NO: 1752182 - DNA, 15 bp, Homo sapiens
cctgcaatgaaaccc

SEQ ID NO: 1752183 - DNA, 15 bp, Homo sapiens
ctgcaatgaaacccc

SEQ ID NO: 1752184 - DNA, 15 bp, Homo sapiens
tgcaatgaaacccca

SEQ ID NO: 1752185 - DNA, 15 bp, Homo sapiens
gcaatgaaaccccaa

SEQ ID NO: 1752186 - DNA, 15 bp, Homo sapiens
caatgaaaccccaaa

SEQ ID NO: 1752187 - DNA, 15 bp, Homo sapiens
aatgaaaccccaaat

SEQ ID NO: 1752188 - DNA, 15 bp, Homo sapiens
atgaaaccccaaatc

SEQ ID NO: 1752189 - DNA, 15 bp, Homo sapiens
tgaaaccccaaatct

SEQ ID NO: 1752190 - DNA, 15 bp, Homo sapiens
gaaaccccaaatctc

SEQ ID NO: 1752191 - DNA, 15 bp, Homo sapiens
aaaccccaaatctca

SEQ ID NO: 1752192 - DNA, 15 bp, Homo sapiens
aaccccaaatctcag

SEQ ID NO: 1752193 - DNA, 15 bp, Homo sapiens
accccaaatctcagg

SEQ ID NO: 1752194 - DNA, 15 bp, Homo sapiens
ccccaaatctcaggt

SEQ ID NO: 1752195 - DNA, 15 bp, Homo sapiens
cccaaatctcaggtt

SEQ ID NO: 1752196 - DNA, 15 bp, Homo sapiens
ccaaatctcaggtta

SEQ ID NO: 1752197 - DNA, 15 bp, Homo sapiens
caaatctcaggttag

SEQ ID NO: 1752198 - DNA, 15 bp, Homo sapiens
aaatctcaggttaga

SEQ ID NO: 1752199 - DNA, 15 bp, Homo sapiens
aatctcaggttagaa

SEQ ID NO: 1752200 - DNA, 15 bp, Homo sapiens
atctcaggttagaaa

SEQ ID NO: 1752201 - DNA, 15 bp, Homo sapiens
tctcaggttagaaaa

SEQ ID NO: 1752202 - DNA, 15 bp, Homo sapiens
ctcaggttagaaaaa

SEQ ID NO: 1752203 - DNA, 15 bp, Homo sapiens
tcaggttagaaaaaa

SEQ ID NO: 1752204 - DNA, 15 bp, Homo sapiens
caggttagaaaaaaa

SEQ ID NO: 1752205 - DNA, 15 bp, Homo sapiens
aggttagaaaaaaat

SEQ ID NO: 1752206 - DNA, 15 bp, Homo sapiens
ggttagaaaaaaatt

SEQ ID NO: 1752207 - DNA, 15 bp, Homo sapiens
gttagaaaaaaattt

SEQ ID NO: 1752208 - DNA, 15 bp, Homo sapiens
ttagaaaaaaatttt

SEQ ID NO: 1752209 - DNA, 15 bp, Homo sapiens
tagaaaaaaattttt

SEQ ID NO: 1752210 - DNA, 15 bp, Homo sapiens
agaaaaaaatttttc

SEQ ID NO: 1752211 - DNA, 15 bp, Homo sapiens
gaaaaaaatttttca

SEQ ID NO: 1752212 - DNA, 15 bp, Homo sapiens
aaaaaaatttttcac

SEQ ID NO: 1752213 - DNA, 15 bp, Homo sapiens
aaaaaatttttcacc

SEQ ID NO: 1752214 - DNA, 15 bp, Homo sapiens
aaaaatttttcacca

SEQ ID NO: 1752215 - DNA, 15 bp, Homo sapiens
aaaatttttcaccat

SEQ ID NO: 1752216 - DNA, 15 bp, Homo sapiens
aaatttttcaccatg

SEQ ID NO: 1752217 - DNA, 15 bp, Homo sapiens
aatttttcaccatga

SEQ ID NO: 1752218 - DNA, 15 bp, Homo sapiens
atttttcaccatgag

SEQ ID NO: 1752219 - DNA, 15 bp, Homo sapiens
tttttcaccatgaga

SEQ ID NO: 1752220 - DNA, 15 bp, Homo sapiens
ttttcaccatgagag

SEQ ID NO: 1752221 - DNA, 15 bp, Homo sapiens
tttcaccatgagaga

SEQ ID NO: 1752222 - DNA, 15 bp, Homo sapiens
ttcaccatgagagat

SEQ ID NO: 1752223 - DNA, 15 bp, Homo sapiens
tcaccatgagagatt

SEQ ID NO: 1752224 - DNA, 15 bp, Homo sapiens
caccatgagagattt

SEQ ID NO: 1752225 - DNA, 15 bp, Homo sapiens
accatgagagatttt

SEQ ID NO: 1752226 - DNA, 15 bp, Homo sapiens
ccatgagagattttt

SEQ ID NO: 1752227 - DNA, 15 bp, Homo sapiens
catgagagattttta

SEQ ID NO: 1752228 - DNA, 15 bp, Homo sapiens
atgagagatttttaa

SEQ ID NO: 1752229 - DNA, 15 bp, Homo sapiens
tgagagatttttaag

SEQ ID NO: 1752230 - DNA, 15 bp, Homo sapiens
agatttttaagtcag

SEQ ID NO: 1752231 - DNA, 15 bp, Homo sapiens
gatttttaagtcaga

SEQ ID NO: 1752232 - DNA, 15 bp, Homo sapiens
atttttaagtcagaa

SEQ ID NO: 1752233 - DNA, 15 bp, Homo sapiens
tttttaagtcagaaa

SEQ ID NO: 1752234 - DNA, 15 bp, Homo sapiens
ttttaagtcagaaaa

SEQ ID NO: 1752235 - DNA, 15 bp, Homo sapiens
tttaagtcagaaaaa

SEQ ID NO: 1752236 - DNA, 15 bp, Homo sapiens
ttaagtcagaaaaat

SEQ ID NO: 1752237 - DNA, 15 bp, Homo sapiens
taagtcagaaaaatt

SEQ ID NO: 1752238 - DNA, 15 bp, Homo sapiens
aagtcagaaaaattt

SEQ ID NO: 1752239 - DNA, 15 bp, Homo sapiens
agtcagaaaaatttt

SEQ ID NO: 1752240 - DNA, 15 bp, Homo sapiens
gtcagaaaaatttta

SEQ ID NO: 1752241 - DNA, 15 bp, Homo sapiens
tcagaaaaattttaa

SEQ ID NO: 1752242 - DNA, 15 bp, Homo sapiens
cagaaaaattttaac

SEQ ID NO: 1752243 - DNA, 15 bp, Homo sapiens
agaaaaattttaact

SEQ ID NO: 1752244 - DNA, 15 bp, Homo sapiens
gaaaaattttaactt

SEQ ID NO: 1752245 - DNA, 15 bp, Homo sapiens
aaaaattttaactta

SEQ ID NO: 1752246 - DNA, 15 bp, Homo sapiens
aaaattttaacttaa

SEQ ID NO: 1752247 - DNA, 15 bp, Homo sapiens
aaattttaacttaag

SEQ ID NO: 1752248 - DNA, 15 bp, Homo sapiens
aattttaacttaagt

SEQ ID NO: 1752249 - DNA, 15 bp, Homo sapiens
attttaacttaagta

SEQ ID NO: 1752250 - DNA, 15 bp, Homo sapiens
ttttaacttaagtac

SEQ ID NO: 1752251 - DNA, 15 bp, Homo sapiens
tttaacttaagtacc

SEQ ID NO: 1752252 - DNA, 15 bp, Homo sapiens
ttaacttaagtacct

SEQ ID NO: 1752253 - DNA, 15 bp, Homo sapiens
taacttaagtacctt

SEQ ID NO: 1752254 - DNA, 15 bp, Homo sapiens
aacttaagtaccttt

SEQ ID NO: 1752255 - DNA, 15 bp, Homo sapiens
acttaagtacctttt

SEQ ID NO: 1752256 - DNA, 15 bp, Homo sapiens
cttaagtaccttttc

SEQ ID NO: 1752257 - DNA, 15 bp, Homo sapiens
ttaagtaccttttcc

SEQ ID NO: 1752258 - DNA, 15 bp, Homo sapiens
taagtaccttttcca

SEQ ID NO: 1752259 - DNA, 15 bp, Homo sapiens
aagtaccttttccag

SEQ ID NO: 1752260 - DNA, 15 bp, Homo sapiens
agtaccttttccagc

SEQ ID NO: 1752261 - DNA, 15 bp, Homo sapiens
gtaccttttccagct

SEQ ID NO: 1752262 - DNA, 15 bp, Homo sapiens
taccttttccagctg

SEQ ID NO: 1752263 - DNA, 15 bp, Homo sapiens
accttttccagctga

SEQ ID NO: 1752264 - DNA, 15 bp, Homo sapiens
ccttttccagctgaa

SEQ ID NO: 1752265 - DNA, 15 bp, Homo sapiens
cttttccagctgaac

SEQ ID NO: 1752266 - DNA, 15 bp, Homo sapiens
ttttccagctgaaca

SEQ ID NO: 1752267 - DNA, 15 bp, Homo sapiens
tttccagctgaacaa

SEQ ID NO: 1752268 - DNA, 15 bp, Homo sapiens
ttccagctgaacaat

SEQ ID NO: 1752269 - DNA, 15 bp, Homo sapiens
tccagctgaacaatc

SEQ ID NO: 1752270 - DNA, 15 bp, Homo sapiens
ccagctgaacaatct

SEQ ID NO: 1752271 - DNA, 15 bp, Homo sapiens
cagctgaacaatctt

SEQ ID NO: 1752272 - DNA, 15 bp, Homo sapiens
agctgaacaatcttt

SEQ ID NO: 1752273 - DNA, 15 bp, Homo sapiens
gctgaacaatctttc

SEQ ID NO: 1752274 - DNA, 15 bp, Homo sapiens
ctgaacaatctttca

SEQ ID NO: 1752275 - DNA, 15 bp, Homo sapiens
tgaacaatctttcat

SEQ ID NO: 1752276 - DNA, 15 bp, Homo sapiens
gaacaatctttcatc

SEQ ID NO: 1752277 - DNA, 15 bp, Homo sapiens
aacaatctttcatca

SEQ ID NO: 1752278 - DNA, 15 bp, Homo sapiens
acaatctttcatcat

SEQ ID NO: 1752279 - DNA, 15 bp, Homo sapiens
caatctttcatcatt

SEQ ID NO: 1752280 - DNA, 15 bp, Homo sapiens
aatctttcatcattt

SEQ ID NO: 1752281 - DNA, 15 bp, Homo sapiens
atctttcatcatttt

SEQ ID NO: 1752282 - DNA, 15 bp, Homo sapiens
tctttcatcatttta

SEQ ID NO: 1752283 - DNA, 15 bp, Homo sapiens
ctttcatcattttat

SEQ ID NO: 1752284 - DNA, 15 bp, Homo sapiens
tttcatcattttatt

SEQ ID NO: 1752285 - DNA, 15 bp, Homo sapiens
ttcatcattttatta

SEQ ID NO: 1752286 - DNA, 15 bp, Homo sapiens
tcatcattttattat

SEQ ID NO: 1752287 - DNA, 15 bp, Homo sapiens
catcattttattatg

SEQ ID NO: 1752288 - DNA, 15 bp, Homo sapiens
atcattttattatgc

SEQ ID NO: 1752289 - DNA, 15 bp, Homo sapiens
tcattttattatgct

SEQ ID NO: 1752290 - DNA, 15 bp, Homo sapiens
cattttattatgctt

SEQ ID NO: 1752291 - DNA, 15 bp, Homo sapiens
attttattatgcttt

SEQ ID NO: 1752292 - DNA, 15 bp, Homo sapiens
ttttattatgctttg

SEQ ID NO: 1752293 - DNA, 15 bp, Homo sapiens
tttattatgctttgc

SEQ ID NO: 1752294 - DNA, 15 bp, Homo sapiens
ttattatgctttgca

SEQ ID NO: 1752295 - DNA, 15 bp, Homo sapiens
tattatgctttgcaa

SEQ ID NO: 1752296 - DNA, 15 bp, Homo sapiens
attatgctttgcaaa

SEQ ID NO: 1752297 - DNA, 15 bp, Homo sapiens
ttatgctttgcaaaa

SEQ ID NO: 1752298 - DNA, 15 bp, Homo sapiens
tatgctttgcaaaag

SEQ ID NO: 1752299 - DNA, 15 bp, Homo sapiens
atgctttgcaaaagc

SEQ ID NO: 1752300 - DNA, 15 bp, Homo sapiens
tgctttgcaaaagct

SEQ ID NO: 1752301 - DNA, 15 bp, Homo sapiens
gctttgcaaaagctt

SEQ ID NO: 1752302 - DNA, 15 bp, Homo sapiens
ctttgcaaaagcttg

SEQ ID NO: 1752303 - DNA, 15 bp, Homo sapiens
tttgcaaaagcttgt

SEQ ID NO: 1752304 - DNA, 15 bp, Homo sapiens
ttgcaaaagcttgta

SEQ ID NO: 1752305 - DNA, 15 bp, Homo sapiens
tgcaaaagcttgtaa

SEQ ID NO: 1752306 - DNA, 15 bp, Homo sapiens
gcaaaagcttgtaac

SEQ ID NO: 1752307 - DNA, 15 bp, Homo sapiens
caaaagcttgtaaca

SEQ ID NO: 1752308 - DNA, 15 bp, Homo sapiens
aaaagcttgtaacat

SEQ ID NO: 1752309 - DNA, 15 bp, Homo sapiens
aaagcttgtaacatc

SEQ ID NO: 1752310 - DNA, 15 bp, Homo sapiens
aagcttgtaacatct

SEQ ID NO: 1752311 - DNA, 15 bp, Homo sapiens
agcttgtaacatctt

SEQ ID NO: 1752312 - DNA, 15 bp, Homo sapiens
gcttgtaacatcttt

SEQ ID NO: 1752313 - DNA, 15 bp, Homo sapiens
cttgtaacatctttt

SEQ ID NO: 1752314 - DNA, 15 bp, Homo sapiens
ttgtaacatcttttg

SEQ ID NO: 1752315 - DNA, 15 bp, Homo sapiens
tgtaacatcttttgc

SEQ ID NO: 1752316 - DNA, 15 bp, Homo sapiens
gtaacatcttttgct

SEQ ID NO: 1752317 - DNA, 15 bp, Homo sapiens
taacatcttttgctg

SEQ ID NO: 1752318 - DNA, 15 bp, Homo sapiens
aacatcttttgctgc

SEQ ID NO: 1752319 - DNA, 15 bp, Homo sapiens
acatcttttgctgcc

SEQ ID NO: 1752320 - DNA, 15 bp, Homo sapiens
catcttttgctgccg

SEQ ID NO: 1752321 - DNA, 15 bp, Homo sapiens
atcttttgctgccgc

SEQ ID NO: 1752322 - DNA, 15 bp, Homo sapiens
tcttttgctgccgct

SEQ ID NO: 1752323 - DNA, 15 bp, Homo sapiens
cttttgctgccgctc

SEQ ID NO: 1752324 - DNA, 15 bp, Homo sapiens
ttttgctgccgctca

SEQ ID NO: 1752325 - DNA, 15 bp, Homo sapiens
tttgctgccgctcac

SEQ ID NO: 1752326 - DNA, 15 bp, Homo sapiens
ttgctgccgctcacg

SEQ ID NO: 1752327 - DNA, 15 bp, Homo sapiens
tgctgccgctcacga

SEQ ID NO: 1752328 - DNA, 15 bp, Homo sapiens
gctgccgctcacgaa

SEQ ID NO: 1752329 - DNA, 15 bp, Homo sapiens
ctgccgctcacgaag

SEQ ID NO: 1752330 - DNA, 15 bp, Homo sapiens
tgccgctcacgaagc

SEQ ID NO: 1752331 - DNA, 15 bp, Homo sapiens
gccgctcacgaagct

SEQ ID NO: 1752332 - DNA, 15 bp, Homo sapiens
ccgctcacgaagctg

SEQ ID NO: 1752333 - DNA, 15 bp, Homo sapiens
cgctcacgaagctgt

SEQ ID NO: 1752334 - DNA, 15 bp, Homo sapiens
gctcacgaagctgta

SEQ ID NO: 1752335 - DNA, 15 bp, Homo sapiens
ctcacgaagctgtat

SEQ ID NO: 1752336 - DNA, 15 bp, Homo sapiens
tcacgaagctgtatt

SEQ ID NO: 1752337 - DNA, 15 bp, Homo sapiens
cacgaagctgtatta

SEQ ID NO: 1752338 - DNA, 15 bp, Homo sapiens
acgaagctgtattaa

SEQ ID NO: 1752339 - DNA, 15 bp, Homo sapiens
cgaagctgtattaaa

SEQ ID NO: 1752340 - DNA, 15 bp, Homo sapiens
gaagctgtattaaaa

SEQ ID NO: 1752341 - DNA, 15 bp, Homo sapiens
aagctgtattaaaaa

SEQ ID NO: 1752342 - DNA, 15 bp, Homo sapiens
agctgtattaaaaat

SEQ ID NO: 1752343 - DNA, 15 bp, Homo sapiens
gctgtattaaaaatc

SEQ ID NO: 1752344 - DNA, 15 bp, Homo sapiens
ctgtattaaaaatcg

SEQ ID NO: 1752345 - DNA, 15 bp, Homo sapiens
tgtattaaaaatcga

SEQ ID NO: 1752346 - DNA, 15 bp, Homo sapiens
gtattaaaaatcgag

SEQ ID NO: 1752347 - DNA, 15 bp, Homo sapiens
tattaaaaatcgaga

SEQ ID NO: 1752348 - DNA, 15 bp, Homo sapiens
attaaaaatcgagag

SEQ ID NO: 1752349 - DNA, 15 bp, Homo sapiens
ttaaaaatcgagaga

SEQ ID NO: 1752350 - DNA, 15 bp, Homo sapiens
taaaaatcgagagac

SEQ ID NO: 1752351 - DNA, 15 bp, Homo sapiens
aaaaatcgagagaca

SEQ ID NO: 1752352 - DNA, 15 bp, Homo sapiens
aaaatcgagagacac

SEQ ID NO: 1752353 - DNA, 15 bp, Homo sapiens
aaatcgagagacact

SEQ ID NO: 1752354 - DNA, 15 bp, Homo sapiens
aatcgagagacactt

SEQ ID NO: 1752355 - DNA, 15 bp, Homo sapiens
atcgagagacacttc

SEQ ID NO: 1752356 - DNA, 15 bp, Homo sapiens
tcgagagacacttca

SEQ ID NO: 1752357 - DNA, 15 bp, Homo sapiens
cgagagacacttcaa

SEQ ID NO: 1752358 - DNA, 15 bp, Homo sapiens
gagagacacttcaat

SEQ ID NO: 1752359 - DNA, 15 bp, Homo sapiens
agagacacttcaata

SEQ ID NO: 1752360 - DNA, 15 bp, Homo sapiens
gagacacttcaataa

SEQ ID NO: 1752361 - DNA, 15 bp, Homo sapiens
agacacttcaataac

SEQ ID NO: 1752362 - DNA, 15 bp, Homo sapiens
gacacttcaataaca

SEQ ID NO: 1752363 - DNA, 15 bp, Homo sapiens
acacttcaataacac

SEQ ID NO: 1752364 - DNA, 15 bp, Homo sapiens
cacttcaataacaca

SEQ ID NO: 1752365 - DNA, 15 bp, Homo sapiens
acttcaataacacac

SEQ ID NO: 1752366 - DNA, 15 bp, Homo sapiens
cttcaataacacact

SEQ ID NO: 1752367 - DNA, 15 bp, Homo sapiens
ttcaataacacactg

SEQ ID NO: 1752368 - DNA, 15 bp, Homo sapiens
tcaataacacactgt

SEQ ID NO: 1752369 - DNA, 15 bp, Homo sapiens
caataacacactgtg

SEQ ID NO: 1752370 - DNA, 15 bp, Homo sapiens
aataacacactgtgc

SEQ ID NO: 1752371 - DNA, 15 bp, Homo sapiens
ataacacactgtgca

SEQ ID NO: 1752372 - DNA, 15 bp, Homo sapiens
taacacactgtgcaa

SEQ ID NO: 1752373 - DNA, 15 bp, Homo sapiens
aacacactgtgcaaa

SEQ ID NO: 1752374 - DNA, 15 bp, Homo sapiens
acacactgtgcaaaa

SEQ ID NO: 1752375 - DNA, 15 bp, Homo sapiens
cacactgtgcaaaac

SEQ ID NO: 1752376 - DNA, 15 bp, Homo sapiens
acactgtgcaaaacc

SEQ ID NO: 1752377 - DNA, 15 bp, Homo sapiens
cactgtgcaaaaccc

SEQ ID NO: 1752378 - DNA, 15 bp, Homo sapiens
actgtgcaaaaccca

SEQ ID NO: 1752379 - DNA, 15 bp, Homo sapiens
ctgtgcaaaacccaa

SEQ ID NO: 1752380 - DNA, 15 bp, Homo sapiens
tgtgcaaaacccaac

SEQ ID NO: 1752381 - DNA, 15 bp, Homo sapiens
gtgcaaaacccaact

SEQ ID NO: 1752382 - DNA, 15 bp, Homo sapiens
tgcaaaacccaacta

SEQ ID NO: 1752383 - DNA, 15 bp, Homo sapiens
gcaaaacccaactag

SEQ ID NO: 1752384 - DNA, 15 bp, Homo sapiens
caaaacccaactaga

SEQ ID NO: 1752385 - DNA, 15 bp, Homo sapiens
aaaacccaactagaa

SEQ ID NO: 1752386 - DNA, 15 bp, Homo sapiens
aaacccaactagaaa

SEQ ID NO: 1752387 - DNA, 15 bp, Homo sapiens
aacccaactagaaaa

SEQ ID NO: 1752388 - DNA, 15 bp, Homo sapiens
acccaactagaaaaa

SEQ ID NO: 1752389 - DNA, 15 bp, Homo sapiens
cccaactagaaaaaa

SEQ ID NO: 1752390 - DNA, 15 bp, Homo sapiens
ccaactagaaaaaaa

SEQ ID NO: 1752391 - DNA, 15 bp, Homo sapiens
aactagaaaaaaatc

SEQ ID NO: 1752392 - DNA, 15 bp, Homo sapiens
actagaaaaaaatcc

SEQ ID NO: 1752393 - DNA, 15 bp, Homo sapiens
ctagaaaaaaatcct

SEQ ID NO: 1752394 - DNA, 15 bp, Homo sapiens
tagaaaaaaatccta

SEQ ID NO: 1752395 - DNA, 15 bp, Homo sapiens
agaaaaaaatcctaa

SEQ ID NO: 1752396 - DNA, 15 bp, Homo sapiens
gaaaaaaatcctaag

SEQ ID NO: 1752397 - DNA, 15 bp, Homo sapiens
aaaaaaatcctaagc

SEQ ID NO: 1752398 - DNA, 15 bp, Homo sapiens
aaaaaatcctaagct

SEQ ID NO: 1752399 - DNA, 15 bp, Homo sapiens
aaaaatcctaagctc

SEQ ID NO: 1752400 - DNA, 15 bp, Homo sapiens
aaaatcctaagctca

SEQ ID NO: 1752401 - DNA, 15 bp, Homo sapiens
aaatcctaagctcat

SEQ ID NO: 1752402 - DNA, 15 bp, Homo sapiens
aatcctaagctcatt

SEQ ID NO: 1752403 - DNA, 15 bp, Homo sapiens
atcctaagctcattg

SEQ ID NO: 1752404 - DNA, 15 bp, Homo sapiens
tcctaagctcattgt

SEQ ID NO: 1752405 - DNA, 15 bp, Homo sapiens
cctaagctcattgta

SEQ ID NO: 1752406 - DNA, 15 bp, Homo sapiens
ctaagctcattgtaa

SEQ ID NO: 1752407 - DNA, 15 bp, Homo sapiens
taagctcattgtaat

SEQ ID NO: 1752408 - DNA, 15 bp, Homo sapiens
aagctcattgtaatt

SEQ ID NO: 1752409 - DNA, 15 bp, Homo sapiens
agctcattgtaatta

SEQ ID NO: 1752410 - DNA, 15 bp, Homo sapiens
gctcattgtaattag

SEQ ID NO: 1752411 - DNA, 15 bp, Homo sapiens
ctcattgtaattagg

SEQ ID NO: 1752412 - DNA, 15 bp, Homo sapiens
tcattgtaattagga

SEQ ID NO: 1752413 - DNA, 15 bp, Homo sapiens
cattgtaattaggat

SEQ ID NO: 1752414 - DNA, 15 bp, Homo sapiens
attgtaattaggatt

SEQ ID NO: 1752415 - DNA, 15 bp, Homo sapiens
ttgtaattaggattg

SEQ ID NO: 1752416 - DNA, 15 bp, Homo sapiens
tgtaattaggattgg

SEQ ID NO: 1752417 - DNA, 15 bp, Homo sapiens
gtaattaggattggg

SEQ ID NO: 1752418 - DNA, 15 bp, Homo sapiens
taattaggattgggg

SEQ ID NO: 1752419 - DNA, 15 bp, Homo sapiens
aattaggattggggt

SEQ ID NO: 1752420 - DNA, 15 bp, Homo sapiens
attaggattggggta

SEQ ID NO: 1752421 - DNA, 15 bp, Homo sapiens
ttaggattggggtaa

SEQ ID NO: 1752422 - DNA, 15 bp, Homo sapiens
taggattggggtaat

SEQ ID NO: 1752423 - DNA, 15 bp, Homo sapiens
aggattggggtaatt

SEQ ID NO: 1752424 - DNA, 15 bp, Homo sapiens
ggattggggtaattt

SEQ ID NO: 1752425 - DNA, 15 bp, Homo sapiens
gattggggtaatttg

SEQ ID NO: 1752426 - DNA, 15 bp, Homo sapiens
attggggtaatttgg

SEQ ID NO: 1752427 - DNA, 15 bp, Homo sapiens
ttggggtaatttggg

SEQ ID NO: 1752428 - DNA, 15 bp, Homo sapiens
tggggtaatttggga

SEQ ID NO: 1752429 - DNA, 15 bp, Homo sapiens
ggggtaatttgggag

SEQ ID NO: 1752430 - DNA, 15 bp, Homo sapiens
gggtaatttgggaga

SEQ ID NO: 1752431 - DNA, 15 bp, Homo sapiens
ggtaatttgggagag

SEQ ID NO: 1752432 - DNA, 15 bp, Homo sapiens
gtaatttgggagagg

SEQ ID NO: 1752433 - DNA, 15 bp, Homo sapiens
taatttgggagagga

SEQ ID NO: 1752434 - DNA, 15 bp, Homo sapiens
aatttgggagaggaa

SEQ ID NO: 1752435 - DNA, 15 bp, Homo sapiens
atttgggagaggaaa

SEQ ID NO: 1752436 - DNA, 15 bp, Homo sapiens
tttgggagaggaaag

SEQ ID NO: 1752437 - DNA, 15 bp, Homo sapiens
ttgggagaggaaaga

SEQ ID NO: 1752438 - DNA, 15 bp, Homo sapiens
tgggagaggaaagat

SEQ ID NO: 1752439 - DNA, 15 bp, Homo sapiens
gggagaggaaagatt

SEQ ID NO: 1752440 - DNA, 15 bp, Homo sapiens
ggagaggaaagattt

SEQ ID NO: 1752441 - DNA, 15 bp, Homo sapiens
gagaggaaagatttc

SEQ ID NO: 1752442 - DNA, 15 bp, Homo sapiens
agaggaaagatttct

SEQ ID NO: 1752443 - DNA, 15 bp, Homo sapiens
gaggaaagatttcta

SEQ ID NO: 1752444 - DNA, 15 bp, Homo sapiens
aggaaagatttctag

SEQ ID NO: 1752445 - DNA, 15 bp, Homo sapiens
ggaaagatttctagg

SEQ ID NO: 1752446 - DNA, 15 bp, Homo sapiens
gaaagatttctagga

SEQ ID NO: 1752447 - DNA, 15 bp, Homo sapiens
aaagatttctaggaa

SEQ ID NO: 1752448 - DNA, 15 bp, Homo sapiens
aagatttctaggaag

SEQ ID NO: 1752449 - DNA, 15 bp, Homo sapiens
agatttctaggaaga

SEQ ID NO: 1752450 - DNA, 15 bp, Homo sapiens
gatttctaggaagat

SEQ ID NO: 1752451 - DNA, 15 bp, Homo sapiens
atttctaggaagatc

SEQ ID NO: 1752452 - DNA, 15 bp, Homo sapiens
tttctaggaagatct

SEQ ID NO: 1752453 - DNA, 15 bp, Homo sapiens
ttctaggaagatcta

SEQ ID NO: 1752454 - DNA, 15 bp, Homo sapiens
ctaggaagatctata

SEQ ID NO: 1752455 - DNA, 15 bp, Homo sapiens
taggaagatctataa

SEQ ID NO: 1752456 - DNA, 15 bp, Homo sapiens
aggaagatctataac

SEQ ID NO: 1752457 - DNA, 15 bp, Homo sapiens
ggaagatctataaca

SEQ ID NO: 1752458 - DNA, 15 bp, Homo sapiens
gaagatctataacac

SEQ ID NO: 1752459 - DNA, 15 bp, Homo sapiens
aagatctataacaca

SEQ ID NO: 1752460 - DNA, 15 bp, Homo sapiens
agatctataacacat

SEQ ID NO: 1752461 - DNA, 15 bp, Homo sapiens
gatctataacacata

SEQ ID NO: 1752462 - DNA, 15 bp, Homo sapiens
atctataacacatac

SEQ ID NO: 1752463 - DNA, 15 bp, Homo sapiens
tctataacacatact

SEQ ID NO: 1752464 - DNA, 15 bp, Homo sapiens
ctataacacatactc

SEQ ID NO: 1752465 - DNA, 15 bp, Homo sapiens
tataacacatactcc

SEQ ID NO: 1752466 - DNA, 15 bp, Homo sapiens
ataacacatactcct

SEQ ID NO: 1752467 - DNA, 15 bp, Homo sapiens
taacacatactccta

SEQ ID NO: 1752468 - DNA, 15 bp, Homo sapiens
aacacatactcctat

SEQ ID NO: 1752469 - DNA, 15 bp, Homo sapiens
acacatactcctata

SEQ ID NO: 1752470 - DNA, 15 bp, Homo sapiens
cacatactcctatat

SEQ ID NO: 1752471 - DNA, 15 bp, Homo sapiens
acatactcctatatc

SEQ ID NO: 1752472 - DNA, 15 bp, Homo sapiens
catactcctatatct

SEQ ID NO: 1752473 - DNA, 15 bp, Homo sapiens
atactcctatatctt

SEQ ID NO: 1752474 - DNA, 15 bp, Homo sapiens
tactcctatatcttt

SEQ ID NO: 1752475 - DNA, 15 bp, Homo sapiens
actcctatatctttc

SEQ ID NO: 1752476 - DNA, 15 bp, Homo sapiens
ctcctatatctttcc

SEQ ID NO: 1752477 - DNA, 15 bp, Homo sapiens
tcctatatctttcca

SEQ ID NO: 1752478 - DNA, 15 bp, Homo sapiens
cctatatctttccat

SEQ ID NO: 1752479 - DNA, 15 bp, Homo sapiens
ctatatctttccatc

SEQ ID NO: 1752480 - DNA, 15 bp, Homo sapiens
tatatctttccatca

SEQ ID NO: 1752481 - DNA, 15 bp, Homo sapiens
atatctttccatcag

SEQ ID NO: 1752482 - DNA, 15 bp, Homo sapiens
tatctttccatcagt

SEQ ID NO: 1752483 - DNA, 15 bp, Homo sapiens
atctttccatcagtt

SEQ ID NO: 1752484 - DNA, 15 bp, Homo sapiens
tctttccatcagtta

SEQ ID NO: 1752485 - DNA, 15 bp, Homo sapiens
ctttccatcagttat

SEQ ID NO: 1752486 - DNA, 15 bp, Homo sapiens
tttccatcagttatt

SEQ ID NO: 1752487 - DNA, 15 bp, Homo sapiens
ttccatcagttattc

SEQ ID NO: 1752488 - DNA, 15 bp, Homo sapiens
tccatcagttattct

SEQ ID NO: 1752489 - DNA, 15 bp, Homo sapiens
ccatcagttattcta

SEQ ID NO: 1752490 - DNA, 15 bp, Homo sapiens
catcagttattctat

SEQ ID NO: 1752491 - DNA, 15 bp, Homo sapiens
atcagttattctatc

SEQ ID NO: 1752492 - DNA, 15 bp, Homo sapiens
tcagttattctatcg

SEQ ID NO: 1752493 - DNA, 15 bp, Homo sapiens
cagttattctatcgc

SEQ ID NO: 1752494 - DNA, 15 bp, Homo sapiens
agttattctatcgcc

SEQ ID NO: 1752495 - DNA, 15 bp, Homo sapiens
gttattctatcgcct

SEQ ID NO: 1752496 - DNA, 15 bp, Homo sapiens
ttattctatcgccta

SEQ ID NO: 1752497 - DNA, 15 bp, Homo sapiens
tattctatcgcctag

SEQ ID NO: 1752498 - DNA, 15 bp, Homo sapiens
attctatcgcctagt

SEQ ID NO: 1752499 - DNA, 15 bp, Homo sapiens
ttctatcgcctagtc

SEQ ID NO: 1752500 - DNA, 15 bp, Homo sapiens
tctatcgcctagtct

SEQ ID NO: 1752501 - DNA, 15 bp, Homo sapiens
ctatcgcctagtctt

SEQ ID NO: 1752502 - DNA, 15 bp, Homo sapiens
tatcgcctagtcttc

SEQ ID NO: 1752503 - DNA, 15 bp, Homo sapiens
atcgcctagtcttcc

SEQ ID NO: 1752504 - DNA, 15 bp, Homo sapiens
tcgcctagtcttccc

SEQ ID NO: 1752505 - DNA, 15 bp, Homo sapiens
cgcctagtcttccct

SEQ ID NO: 1752506 - DNA, 15 bp, Homo sapiens
gcctagtcttccctg

SEQ ID NO: 1752507 - DNA, 15 bp, Homo sapiens
cctagtcttccctgt

SEQ ID NO: 1752508 - DNA, 15 bp, Homo sapiens
ctagtcttccctgta

SEQ ID NO: 1752509 - DNA, 15 bp, Homo sapiens
tagtcttccctgtat

SEQ ID NO: 1752510 - DNA, 15 bp, Homo sapiens
agtcttccctgtata

SEQ ID NO: 1752511 - DNA, 15 bp, Homo sapiens
gtcttccctgtatat

SEQ ID NO: 1752512 - DNA, 15 bp, Homo sapiens
tcttccctgtatatc

SEQ ID NO: 1752513 - DNA, 15 bp, Homo sapiens
cttccctgtatatcc

SEQ ID NO: 1752514 - DNA, 15 bp, Homo sapiens
ttccctgtatatcct

SEQ ID NO: 1752515 - DNA, 15 bp, Homo sapiens
tccctgtatatcctg

SEQ ID NO: 1752516 - DNA, 15 bp, Homo sapiens
ccctgtatatcctgc

SEQ ID NO: 1752517 - DNA, 15 bp, Homo sapiens
cctgtatatcctgct

SEQ ID NO: 1752518 - DNA, 15 bp, Homo sapiens
ctgtatatcctgctt

SEQ ID NO: 1752519 - DNA, 15 bp, Homo sapiens
tgtatatcctgcttc

SEQ ID NO: 1752520 - DNA, 15 bp, Homo sapiens
gtatatcctgcttct

SEQ ID NO: 1752521 - DNA, 15 bp, Homo sapiens
tatatcctgcttctt

SEQ ID NO: 1752522 - DNA, 15 bp, Homo sapiens
atatcctgcttctta

SEQ ID NO: 1752523 - DNA, 15 bp, Homo sapiens
tatcctgcttcttat

SEQ ID NO: 1752524 - DNA, 15 bp, Homo sapiens
atcctgcttcttatt

SEQ ID NO: 1752525 - DNA, 15 bp, Homo sapiens
tcctgcttcttattt

SEQ ID NO: 1752526 - DNA, 15 bp, Homo sapiens
cctgcttcttatttc

SEQ ID NO: 1752527 - DNA, 15 bp, Homo sapiens
ctgcttcttatttct

SEQ ID NO: 1752528 - DNA, 15 bp, Homo sapiens
tgcttcttatttctt

SEQ ID NO: 1752529 - DNA, 15 bp, Homo sapiens
gcttcttatttcttt

SEQ ID NO: 1752530 - DNA, 15 bp, Homo sapiens
cttcttatttctttc

SEQ ID NO: 1752531 - DNA, 15 bp, Homo sapiens
ttcttatttctttcc

SEQ ID NO: 1752532 - DNA, 15 bp, Homo sapiens
tcttatttctttcct

SEQ ID NO: 1752533 - DNA, 15 bp, Homo sapiens
cttatttctttcctg

SEQ ID NO: 1752534 - DNA, 15 bp, Homo sapiens
ttatttctttcctgg

SEQ ID NO: 1752535 - DNA, 15 bp, Homo sapiens
tatttctttcctgga

SEQ ID NO: 1752536 - DNA, 15 bp, Homo sapiens
atttctttcctggaa

SEQ ID NO: 1752537 - DNA, 15 bp, Homo sapiens
tttctttcctggaat

SEQ ID NO: 1752538 - DNA, 15 bp, Homo sapiens
ttctttcctggaata

SEQ ID NO: 1752539 - DNA, 15 bp, Homo sapiens
tctttcctggaatag

SEQ ID NO: 1752540 - DNA, 15 bp, Homo sapiens
ctttcctggaatagg

SEQ ID NO: 1752541 - DNA, 15 bp, Homo sapiens
tttcctggaatagga

SEQ ID NO: 1752542 - DNA, 15 bp, Homo sapiens
ttcctggaataggaa

SEQ ID NO: 1752543 - DNA, 15 bp, Homo sapiens
tcctggaataggaaa

SEQ ID NO: 1752544 - DNA, 15 bp, Homo sapiens
cctggaataggaaac

SEQ ID NO: 1752545 - DNA, 15 bp, Homo sapiens
ctggaataggaaact

SEQ ID NO: 1752546 - DNA, 15 bp, Homo sapiens
tggaataggaaacta

SEQ ID NO: 1752547 - DNA, 15 bp, Homo sapiens
ggaataggaaactat

SEQ ID NO: 1752548 - DNA, 15 bp, Homo sapiens
gaataggaaactatg

SEQ ID NO: 1752549 - DNA, 15 bp, Homo sapiens
aataggaaactatga

SEQ ID NO: 1752550 - DNA, 15 bp, Homo sapiens
ataggaaactatgaa

SEQ ID NO: 1752551 - DNA, 15 bp, Homo sapiens
taggaaactatgaac

SEQ ID NO: 1752552 - DNA, 15 bp, Homo sapiens
aggaaactatgaact

SEQ ID NO: 1752553 - DNA, 15 bp, Homo sapiens
ggaaactatgaactt

SEQ ID NO: 1752554 - DNA, 15 bp, Homo sapiens
gaaactatgaacttg

SEQ ID NO: 1752555 - DNA, 15 bp, Homo sapiens
aaactatgaacttgt

SEQ ID NO: 1752556 - DNA, 15 bp, Homo sapiens
aactatgaacttgtg

SEQ ID NO: 1752557 - DNA, 15 bp, Homo sapiens
actatgaacttgtgg

SEQ ID NO: 1752558 - DNA, 15 bp, Homo sapiens
ctatgaacttgtggg

SEQ ID NO: 1752559 - DNA, 15 bp, Homo sapiens
tatgaacttgtgggc

SEQ ID NO: 1752560 - DNA, 15 bp, Homo sapiens
atgaacttgtgggca

SEQ ID NO: 1752561 - DNA, 15 bp, Homo sapiens
tgaacttgtgggcag

SEQ ID NO: 1752562 - DNA, 15 bp, Homo sapiens
gaacttgtgggcagc

SEQ ID NO: 1752563 - DNA, 15 bp, Homo sapiens
aacttgtgggcagca

SEQ ID NO: 1752564 - DNA, 15 bp, Homo sapiens
acttgtgggcagcac

SEQ ID NO: 1752565 - DNA, 15 bp, Homo sapiens
cttgtgggcagcact

SEQ ID NO: 1752566 - DNA, 15 bp, Homo sapiens
ttgtgggcagcactg

SEQ ID NO: 1752567 - DNA, 15 bp, Homo sapiens
tgtgggcagcactga

SEQ ID NO: 1752568 - DNA, 15 bp, Homo sapiens
gtgggcagcactgaa

SEQ ID NO: 1752569 - DNA, 15 bp, Homo sapiens
tgggcagcactgaag

SEQ ID NO: 1752570 - DNA, 15 bp, Homo sapiens
gggcagcactgaagt

SEQ ID NO: 1752571 - DNA, 15 bp, Homo sapiens
ggcagcactgaagtg

SEQ ID NO: 1752572 - DNA, 15 bp, Homo sapiens
gcagcactgaagtga

SEQ ID NO: 1752573 - DNA, 15 bp, Homo sapiens
cagcactgaagtgac

SEQ ID NO: 1752574 - DNA, 15 bp, Homo sapiens
agcactgaagtgaca

SEQ ID NO: 1752575 - DNA, 15 bp, Homo sapiens
gcactgaagtgacac

SEQ ID NO: 1752576 - DNA, 15 bp, Homo sapiens
cactgaagtgacact

SEQ ID NO: 1752577 - DNA, 15 bp, Homo sapiens
actgaagtgacacta

SEQ ID NO: 1752578 - DNA, 15 bp, Homo sapiens
ctgaagtgacactaa

SEQ ID NO: 1752579 - DNA, 15 bp, Homo sapiens
tgaagtgacactaac

SEQ ID NO: 1752580 - DNA, 15 bp, Homo sapiens
gaagtgacactaaca

SEQ ID NO: 1752581 - DNA, 15 bp, Homo sapiens
aagtgacactaacaa

SEQ ID NO: 1752582 - DNA, 15 bp, Homo sapiens
agtgacactaacaag

SEQ ID NO: 1752583 - DNA, 15 bp, Homo sapiens
gtgacactaacaagt

SEQ ID NO: 1752584 - DNA, 15 bp, Homo sapiens
tgacactaacaagta

SEQ ID NO: 1752585 - DNA, 15 bp, Homo sapiens
gacactaacaagtat

SEQ ID NO: 1752586 - DNA, 15 bp, Homo sapiens
acactaacaagtata

SEQ ID NO: 1752587 - DNA, 15 bp, Homo sapiens
cactaacaagtataa

SEQ ID NO: 1752588 - DNA, 15 bp, Homo sapiens
actaacaagtataaa

SEQ ID NO: 1752589 - DNA, 15 bp, Homo sapiens
ctaacaagtataaag

SEQ ID NO: 1752590 - DNA, 15 bp, Homo sapiens
taacaagtataaaga

SEQ ID NO: 1752591 - DNA, 15 bp, Homo sapiens
aacaagtataaagat

SEQ ID NO: 1752592 - DNA, 15 bp, Homo sapiens
acaagtataaagata

SEQ ID NO: 1752593 - DNA, 15 bp, Homo sapiens
caagtataaagataa

SEQ ID NO: 1752594 - DNA, 15 bp, Homo sapiens
aagtataaagataaa

SEQ ID NO: 1752595 - DNA, 15 bp, Homo sapiens
agtataaagataaaa

SEQ ID NO: 1752596 - DNA, 15 bp, Homo sapiens
gtataaagataaaag

SEQ ID NO: 1752597 - DNA, 15 bp, Homo sapiens
tataaagataaaagc

SEQ ID NO: 1752598 - DNA, 15 bp, Homo sapiens
ataaagataaaagca

SEQ ID NO: 1752599 - DNA, 15 bp, Homo sapiens
taaagataaaagcaa

SEQ ID NO: 1752600 - DNA, 15 bp, Homo sapiens
aaagataaaagcaac

SEQ ID NO: 1752601 - DNA, 15 bp, Homo sapiens
aagataaaagcaacc

SEQ ID NO: 1752602 - DNA, 15 bp, Homo sapiens
agataaaagcaaccg

SEQ ID NO: 1752603 - DNA, 15 bp, Homo sapiens
gataaaagcaaccga

SEQ ID NO: 1752604 - DNA, 15 bp, Homo sapiens
ataaaagcaaccgat

SEQ ID NO: 1752605 - DNA, 15 bp, Homo sapiens
taaaagcaaccgata

SEQ ID NO: 1752606 - DNA, 15 bp, Homo sapiens
aaaagcaaccgatat

SEQ ID NO: 1752607 - DNA, 15 bp, Homo sapiens
aaagcaaccgatatt

SEQ ID NO: 1752608 - DNA, 15 bp, Homo sapiens
aagcaaccgatattt

SEQ ID NO: 1752609 - DNA, 15 bp, Homo sapiens
agcaaccgatatttc

SEQ ID NO: 1752610 - DNA, 15 bp, Homo sapiens
gcaaccgatatttca

SEQ ID NO: 1752611 - DNA, 15 bp, Homo sapiens
caaccgatatttcaa

SEQ ID NO: 1752612 - DNA, 15 bp, Homo sapiens
aaccgatatttcaaa

SEQ ID NO: 1752613 - DNA, 15 bp, Homo sapiens
accgatatttcaaaa

SEQ ID NO: 1752614 - DNA, 15 bp, Homo sapiens
ccgatatttcaaaaa

SEQ ID NO: 1752615 - DNA, 15 bp, Homo sapiens
cgatatttcaaaaat

SEQ ID NO: 1752616 - DNA, 15 bp, Homo sapiens
gatatttcaaaaatg

SEQ ID NO: 1752617 - DNA, 15 bp, Homo sapiens
atatttcaaaaatga

SEQ ID NO: 1752618 - DNA, 15 bp, Homo sapiens
tatttcaaaaatgaa

SEQ ID NO: 1752619 - DNA, 15 bp, Homo sapiens
atttcaaaaatgaaa

SEQ ID NO: 1752620 - DNA, 15 bp, Homo sapiens
tttcaaaaatgaaag

SEQ ID NO: 1752621 - DNA, 15 bp, Homo sapiens
ttcaaaaatgaaagc

SEQ ID NO: 1752622 - DNA, 15 bp, Homo sapiens
tcaaaaatgaaagca

SEQ ID NO: 1752623 - DNA, 15 bp, Homo sapiens
caaaaatgaaagcat

SEQ ID NO: 1752624 - DNA, 15 bp, Homo sapiens
aaaaatgaaagcata

SEQ ID NO: 1752625 - DNA, 15 bp, Homo sapiens
aaaatgaaagcataa

SEQ ID NO: 1752626 - DNA, 15 bp, Homo sapiens
aaatgaaagcataac

SEQ ID NO: 1752627 - DNA, 15 bp, Homo sapiens
aatgaaagcataact

SEQ ID NO: 1752628 - DNA, 15 bp, Homo sapiens
atgaaagcataacta

SEQ ID NO: 1752629 - DNA, 15 bp, Homo sapiens
tgaaagcataactaa

SEQ ID NO: 1752630 - DNA, 15 bp, Homo sapiens
gaaagcataactaaa

SEQ ID NO: 1752631 - DNA, 15 bp, Homo sapiens
aaagcataactaaaa

SEQ ID NO: 1752632 - DNA, 15 bp, Homo sapiens
aagcataactaaaaa

SEQ ID NO: 1752633 - DNA, 15 bp, Homo sapiens
agcataactaaaaat

SEQ ID NO: 1752634 - DNA, 15 bp, Homo sapiens
gcataactaaaaatg

SEQ ID NO: 1752635 - DNA, 15 bp, Homo sapiens
cataactaaaaatga

SEQ ID NO: 1752636 - DNA, 15 bp, Homo sapiens
ataactaaaaatgac

SEQ ID NO: 1752637 - DNA, 15 bp, Homo sapiens
taactaaaaatgaca

SEQ ID NO: 1752638 - DNA, 15 bp, Homo sapiens
aactaaaaatgacaa

SEQ ID NO: 1752639 - DNA, 15 bp, Homo sapiens
actaaaaatgacaat

SEQ ID NO: 1752640 - DNA, 15 bp, Homo sapiens
ctaaaaatgacaata

SEQ ID NO: 1752641 - DNA, 15 bp, Homo sapiens
taaaaatgacaataa

SEQ ID NO: 1752642 - DNA, 15 bp, Homo sapiens
aaaaatgacaataaa

SEQ ID NO: 1752643 - DNA, 15 bp, Homo sapiens
aaaatgacaataaag

SEQ ID NO: 1752644 - DNA, 15 bp, Homo sapiens
aaatgacaataaagc

SEQ ID NO: 1752645 - DNA, 15 bp, Homo sapiens
aatgacaataaagca

SEQ ID NO: 1752646 - DNA, 15 bp, Homo sapiens
atgacaataaagcag

SEQ ID NO: 1752647 - DNA, 15 bp, Homo sapiens
tgacaataaagcagt

SEQ ID NO: 1752648 - DNA, 15 bp, Homo sapiens
gacaataaagcagtt

SEQ ID NO: 1752649 - DNA, 15 bp, Homo sapiens
acaataaagcagttc

SEQ ID NO: 1752650 - DNA, 15 bp, Homo sapiens
caataaagcagttct

SEQ ID NO: 1752651 - DNA, 15 bp, Homo sapiens
aataaagcagttcta

SEQ ID NO: 1752652 - DNA, 15 bp, Homo sapiens
ataaagcagttctat

SEQ ID NO: 1752653 - DNA, 15 bp, Homo sapiens
taaagcagttctata

SEQ ID NO: 1752654 - DNA, 15 bp, Homo sapiens
aaagcagttctataa

SEQ ID NO: 1752655 - DNA, 15 bp, Homo sapiens
aagcagttctataaa

SEQ ID NO: 1752656 - DNA, 15 bp, Homo sapiens
agcagttctataaaa

SEQ ID NO: 1752657 - DNA, 15 bp, Homo sapiens
gcagttctataaaat

SEQ ID NO: 1752658 - DNA, 15 bp, Homo sapiens
cagttctataaaatt

SEQ ID NO: 1752659 - DNA, 15 bp, Homo sapiens
agttctataaaatta

SEQ ID NO: 1752660 - DNA, 15 bp, Homo sapiens
gttctataaaattaa

SEQ ID NO: 1752661 - DNA, 15 bp, Homo sapiens
ttctataaaattaag

SEQ ID NO: 1752662 - DNA, 15 bp, Homo sapiens
tctataaaattaaga

SEQ ID NO: 1752663 - DNA, 15 bp, Homo sapiens
ctataaaattaagat

SEQ ID NO: 1752664 - DNA, 15 bp, Homo sapiens
tataaaattaagata

SEQ ID NO: 1752665 - DNA, 15 bp, Homo sapiens
ataaaattaagatac

SEQ ID NO: 1752666 - DNA, 15 bp, Homo sapiens
taaaattaagataca

SEQ ID NO: 1752667 - DNA, 15 bp, Homo sapiens
aaaattaagatacag

SEQ ID NO: 1752668 - DNA, 15 bp, Homo sapiens
aaattaagatacagg

SEQ ID NO: 1752669 - DNA, 15 bp, Homo sapiens
aattaagatacaggc

SEQ ID NO: 1752670 - DNA, 15 bp, Homo sapiens
attaagatacaggca

SEQ ID NO: 1752671 - DNA, 15 bp, Homo sapiens
ttaagatacaggcac

SEQ ID NO: 1752672 - DNA, 15 bp, Homo sapiens
taagatacaggcact

SEQ ID NO: 1752673 - DNA, 15 bp, Homo sapiens
aagatacaggcactc

SEQ ID NO: 1752674 - DNA, 15 bp, Homo sapiens
agatacaggcactca

SEQ ID NO: 1752675 - DNA, 15 bp, Homo sapiens
gatacaggcactcat

SEQ ID NO: 1752676 - DNA, 15 bp, Homo sapiens
atacaggcactcata

SEQ ID NO: 1752677 - DNA, 15 bp, Homo sapiens
tacaggcactcatat

SEQ ID NO: 1752678 - DNA, 15 bp, Homo sapiens
acaggcactcatata

SEQ ID NO: 1752679 - DNA, 15 bp, Homo sapiens
caggcactcatatat

SEQ ID NO: 1752680 - DNA, 15 bp, Homo sapiens
aggcactcatatata

SEQ ID NO: 1752681 - DNA, 15 bp, Homo sapiens
ggcactcatatataa

SEQ ID NO: 1752682 - DNA, 15 bp, Homo sapiens
gcactcatatataac

SEQ ID NO: 1752683 - DNA, 15 bp, Homo sapiens
cactcatatataacc

SEQ ID NO: 1752684 - DNA, 15 bp, Homo sapiens
actcatatataacca

SEQ ID NO: 1752685 - DNA, 15 bp, Homo sapiens
ctcatatataaccac

SEQ ID NO: 1752686 - DNA, 15 bp, Homo sapiens
tcatatataaccaca

SEQ ID NO: 1752687 - DNA, 15 bp, Homo sapiens
catatataaccacat

SEQ ID NO: 1752688 - DNA, 15 bp, Homo sapiens
atatataaccacatc

SEQ ID NO: 1752689 - DNA, 15 bp, Homo sapiens
tatataaccacatct

SEQ ID NO: 1752690 - DNA, 15 bp, Homo sapiens
atataaccacatcta

SEQ ID NO: 1752691 - DNA, 15 bp, Homo sapiens
tataaccacatctag

SEQ ID NO: 1752692 - DNA, 15 bp, Homo sapiens
ataaccacatctagc

SEQ ID NO: 1752693 - DNA, 15 bp, Homo sapiens
taaccacatctagca

SEQ ID NO: 1752694 - DNA, 15 bp, Homo sapiens
aaccacatctagcaa

SEQ ID NO: 1752695 - DNA, 15 bp, Homo sapiens
accacatctagcaaa

SEQ ID NO: 1752696 - DNA, 15 bp, Homo sapiens
ccacatctagcaaaa

SEQ ID NO: 1752697 - DNA, 15 bp, Homo sapiens
cacatctagcaaaac

SEQ ID NO: 1752698 - DNA, 15 bp, Homo sapiens
acatctagcaaaact

SEQ ID NO: 1752699 - DNA, 15 bp, Homo sapiens
catctagcaaaacta

SEQ ID NO: 1752700 - DNA, 15 bp, Homo sapiens
atctagcaaaactaa

SEQ ID NO: 1752701 - DNA, 15 bp, Homo sapiens
tctagcaaaactaaa

SEQ ID NO: 1752702 - DNA, 15 bp, Homo sapiens
ctagcaaaactaaag

SEQ ID NO: 1752703 - DNA, 15 bp, Homo sapiens
tagcaaaactaaaga

SEQ ID NO: 1752704 - DNA, 15 bp, Homo sapiens
agcaaaactaaagaa

SEQ ID NO: 1752705 - DNA, 15 bp, Homo sapiens
gcaaaactaaagaaa

SEQ ID NO: 1752706 - DNA, 15 bp, Homo sapiens
caaaactaaagaaac

SEQ ID NO: 1752707 - DNA, 15 bp, Homo sapiens
aaaactaaagaaaca

SEQ ID NO: 1752708 - DNA, 15 bp, Homo sapiens
aaactaaagaaacaa

SEQ ID NO: 1752709 - DNA, 15 bp, Homo sapiens
aactaaagaaacaaa

SEQ ID NO: 1752710 - DNA, 15 bp, Homo sapiens
actaaagaaacaaat

SEQ ID NO: 1752711 - DNA, 15 bp, Homo sapiens
ctaaagaaacaaata

SEQ ID NO: 1752712 - DNA, 15 bp, Homo sapiens
taaagaaacaaatat

SEQ ID NO: 1752713 - DNA, 15 bp, Homo sapiens
aaagaaacaaatata

SEQ ID NO: 1752714 - DNA, 15 bp, Homo sapiens
aagaaacaaatataa

SEQ ID NO: 1752715 - DNA, 15 bp, Homo sapiens
agaaacaaatataat

SEQ ID NO: 1752716 - DNA, 15 bp, Homo sapiens
gaaacaaatataata

SEQ ID NO: 1752717 - DNA, 15 bp, Homo sapiens
acaaatataatacta

SEQ ID NO: 1752718 - DNA, 15 bp, Homo sapiens
caaatataatactaa

SEQ ID NO: 1752719 - DNA, 15 bp, Homo sapiens
aaatataatactaaa

SEQ ID NO: 1752720 - DNA, 15 bp, Homo sapiens
aatataatactaaaa

SEQ ID NO: 1752721 - DNA, 15 bp, Homo sapiens
atataatactaaaat

SEQ ID NO: 1752722 - DNA, 15 bp, Homo sapiens
tataatactaaaata

SEQ ID NO: 1752723 - DNA, 15 bp, Homo sapiens
ataatactaaaataa

SEQ ID NO: 1752724 - DNA, 15 bp, Homo sapiens
taatactaaaataac

SEQ ID NO: 1752725 - DNA, 15 bp, Homo sapiens
aatactaaaataaca

SEQ ID NO: 1752726 - DNA, 15 bp, Homo sapiens
atactaaaataacag

SEQ ID NO: 1752727 - DNA, 15 bp, Homo sapiens
tactaaaataacagt

SEQ ID NO: 1752728 - DNA, 15 bp, Homo sapiens
actaaaataacagtg

SEQ ID NO: 1752729 - DNA, 15 bp, Homo sapiens
ctaaaataacagtga

SEQ ID NO: 1752730 - DNA, 15 bp, Homo sapiens
taaaataacagtgag

SEQ ID NO: 1752731 - DNA, 15 bp, Homo sapiens
aaaataacagtgaga

SEQ ID NO: 1752732 - DNA, 15 bp, Homo sapiens
aaataacagtgagaa

SEQ ID NO: 1752733 - DNA, 15 bp, Homo sapiens
aataacagtgagaag

SEQ ID NO: 1752734 - DNA, 15 bp, Homo sapiens
ataacagtgagaagg

SEQ ID NO: 1752735 - DNA, 15 bp, Homo sapiens
taacagtgagaagga

SEQ ID NO: 1752736 - DNA, 15 bp, Homo sapiens
aacagtgagaaggaa

SEQ ID NO: 1752737 - DNA, 15 bp, Homo sapiens
acagtgagaaggaaa

SEQ ID NO: 1752738 - DNA, 15 bp, Homo sapiens
cagtgagaaggaaat

SEQ ID NO: 1752739 - DNA, 15 bp, Homo sapiens
agtgagaaggaaatt

SEQ ID NO: 1752740 - DNA, 15 bp, Homo sapiens
gtgagaaggaaattt

SEQ ID NO: 1752741 - DNA, 15 bp, Homo sapiens
tgagaaggaaatttg

SEQ ID NO: 1752742 - DNA, 15 bp, Homo sapiens
gagaaggaaatttgc

SEQ ID NO: 1752743 - DNA, 15 bp, Homo sapiens
agaaggaaatttgct

SEQ ID NO: 1752744 - DNA, 15 bp, Homo sapiens
gaaggaaatttgctg

SEQ ID NO: 1752745 - DNA, 15 bp, Homo sapiens
aaggaaatttgctgt

SEQ ID NO: 1752746 - DNA, 15 bp, Homo sapiens
aggaaatttgctgtt

SEQ ID NO: 1752747 - DNA, 15 bp, Homo sapiens
ggaaatttgctgttg

SEQ ID NO: 1752748 - DNA, 15 bp, Homo sapiens
gaaatttgctgttgt

SEQ ID NO: 1752749 - DNA, 15 bp, Homo sapiens
aaatttgctgttgtc

SEQ ID NO: 1752750 - DNA, 15 bp, Homo sapiens
aatttgctgttgtct

SEQ ID NO: 1752751 - DNA, 15 bp, Homo sapiens
atttgctgttgtcta

SEQ ID NO: 1752752 - DNA, 15 bp, Homo sapiens
tttgctgttgtctaa

SEQ ID NO: 1752753 - DNA, 15 bp, Homo sapiens
ttgctgttgtctaaa

SEQ ID NO: 1752754 - DNA, 15 bp, Homo sapiens
tgctgttgtctaaat

SEQ ID NO: 1752755 - DNA, 15 bp, Homo sapiens
gctgttgtctaaatg

SEQ ID NO: 1752756 - DNA, 15 bp, Homo sapiens
ctgttgtctaaatgc

SEQ ID NO: 1752757 - DNA, 15 bp, Homo sapiens
tgttgtctaaatgct

SEQ ID NO: 1752758 - DNA, 15 bp, Homo sapiens
gttgtctaaatgctt

SEQ ID NO: 1752759 - DNA, 15 bp, Homo sapiens
ttgtctaaatgcttc

SEQ ID NO: 1752760 - DNA, 15 bp, Homo sapiens
tgtctaaatgcttca

SEQ ID NO: 1752761 - DNA, 15 bp, Homo sapiens
gtctaaatgcttcaa

SEQ ID NO: 1752762 - DNA, 15 bp, Homo sapiens
tctaaatgcttcaaa

SEQ ID NO: 1752763 - DNA, 15 bp, Homo sapiens
ctaaatgcttcaaaa

SEQ ID NO: 1752764 - DNA, 15 bp, Homo sapiens
taaatgcttcaaaaa

SEQ ID NO: 1752765 - DNA, 15 bp, Homo sapiens
aaatgcttcaaaaaa

SEQ ID NO: 1752766 - DNA, 15 bp, Homo sapiens
aatgcttcaaaaaaa

SEQ ID NO: 1752767 - DNA, 15 bp, Homo sapiens
atgcttcaaaaaaaa

SEQ ID NO: 1752768 - DNA, 15 bp, Homo sapiens
tgcttcaaaaaaaag

SEQ ID NO: 1752769 - DNA, 15 bp, Homo sapiens
gcttcaaaaaaaaga

SEQ ID NO: 1752770 - DNA, 15 bp, Homo sapiens
cttcaaaaaaaagag

SEQ ID NO: 1752771 - DNA, 15 bp, Homo sapiens
ttcaaaaaaaagagt

SEQ ID NO: 1752772 - DNA, 15 bp, Homo sapiens
tcaaaaaaaagagta

SEQ ID NO: 1752773 - DNA, 15 bp, Homo sapiens
caaaaaaaagagtat

SEQ ID NO: 1752774 - DNA, 15 bp, Homo sapiens
aaaaaaaagagtatg

SEQ ID NO: 1752775 - DNA, 15 bp, Homo sapiens
aaaaaaagagtatga

SEQ ID NO: 1752776 - DNA, 15 bp, Homo sapiens
aaaaaagagtatgaa

SEQ ID NO: 1752777 - DNA, 15 bp, Homo sapiens
aaaaagagtatgaaa

SEQ ID NO: 1752778 - DNA, 15 bp, Homo sapiens
aaaagagtatgaaac

SEQ ID NO: 1752779 - DNA, 15 bp, Homo sapiens
aaagagtatgaaaca

SEQ ID NO: 1752780 - DNA, 15 bp, Homo sapiens
aagagtatgaaacaa

SEQ ID NO: 1752781 - DNA, 15 bp, Homo sapiens
agagtatgaaacaaa

SEQ ID NO: 1752782 - DNA, 15 bp, Homo sapiens
gagtatgaaacaaag

SEQ ID NO: 1752783 - DNA, 15 bp, Homo sapiens
agtatgaaacaaagc

SEQ ID NO: 1752784 - DNA, 15 bp, Homo sapiens
gtatgaaacaaagca

SEQ ID NO: 1752785 - DNA, 15 bp, Homo sapiens
tatgaaacaaagcat

SEQ ID NO: 1752786 - DNA, 15 bp, Homo sapiens
atgaaacaaagcata

SEQ ID NO: 1752787 - DNA, 15 bp, Homo sapiens
tgaaacaaagcatac

SEQ ID NO: 1752788 - DNA, 15 bp, Homo sapiens
gaaacaaagcataca

SEQ ID NO: 1752789 - DNA, 15 bp, Homo sapiens
aaacaaagcatacaa

SEQ ID NO: 1752790 - DNA, 15 bp, Homo sapiens
aacaaagcatacaac

SEQ ID NO: 1752791 - DNA, 15 bp, Homo sapiens
acaaagcatacaact

SEQ ID NO: 1752792 - DNA, 15 bp, Homo sapiens
caaagcatacaactg

SEQ ID NO: 1752793 - DNA, 15 bp, Homo sapiens
aaagcatacaactgt

SEQ ID NO: 1752794 - DNA, 15 bp, Homo sapiens
aagcatacaactgtc

SEQ ID NO: 1752795 - DNA, 15 bp, Homo sapiens
agcatacaactgtcc

SEQ ID NO: 1752796 - DNA, 15 bp, Homo sapiens
gcatacaactgtcct

SEQ ID NO: 1752797 - DNA, 15 bp, Homo sapiens
catacaactgtcctg

SEQ ID NO: 1752798 - DNA, 15 bp, Homo sapiens
atacaactgtcctgg

SEQ ID NO: 1752799 - DNA, 15 bp, Homo sapiens
tacaactgtcctggt

SEQ ID NO: 1752800 - DNA, 15 bp, Homo sapiens
acaactgtcctggtt

SEQ ID NO: 1752801 - DNA, 15 bp, Homo sapiens
caactgtcctggttc

SEQ ID NO: 1752802 - DNA, 15 bp, Homo sapiens
aactgtcctggttcc

SEQ ID NO: 1752803 - DNA, 15 bp, Homo sapiens
actgtcctggttcca

SEQ ID NO: 1752804 - DNA, 15 bp, Homo sapiens
ctgtcctggttccac

SEQ ID NO: 1752805 - DNA, 15 bp, Homo sapiens
tgtcctggttccact

SEQ ID NO: 1752806 - DNA, 15 bp, Homo sapiens
gtcctggttccacta

SEQ ID NO: 1752807 - DNA, 15 bp, Homo sapiens
tcctggttccactat

SEQ ID NO: 1752808 - DNA, 15 bp, Homo sapiens
cctggttccactata

SEQ ID NO: 1752809 - DNA, 15 bp, Homo sapiens
ctggttccactatat

SEQ ID NO: 1752810 - DNA, 15 bp, Homo sapiens
tggttccactatatg

SEQ ID NO: 1752811 - DNA, 15 bp, Homo sapiens
ggttccactatatga

SEQ ID NO: 1752812 - DNA, 15 bp, Homo sapiens
gttccactatatgaa

SEQ ID NO: 1752813 - DNA, 15 bp, Homo sapiens
ttccactatatgaaa

SEQ ID NO: 1752814 - DNA, 15 bp, Homo sapiens
tccactatatgaaac

SEQ ID NO: 1752815 - DNA, 15 bp, Homo sapiens
ccactatatgaaaca

SEQ ID NO: 1752816 - DNA, 15 bp, Homo sapiens
cactatatgaaacaa

SEQ ID NO: 1752817 - DNA, 15 bp, Homo sapiens
actatatgaaacaag

SEQ ID NO: 1752818 - DNA, 15 bp, Homo sapiens
ctatatgaaacaaga

SEQ ID NO: 1752819 - DNA, 15 bp, Homo sapiens
tatatgaaacaagaa

SEQ ID NO: 1752820 - DNA, 15 bp, Homo sapiens
atatgaaacaagaat

SEQ ID NO: 1752821 - DNA, 15 bp, Homo sapiens
tatgaaacaagaatc

SEQ ID NO: 1752822 - DNA, 15 bp, Homo sapiens
atgaaacaagaatct

SEQ ID NO: 1752823 - DNA, 15 bp, Homo sapiens
tgaaacaagaatctg

SEQ ID NO: 1752824 - DNA, 15 bp, Homo sapiens
gaaacaagaatctgt

SEQ ID NO: 1752825 - DNA, 15 bp, Homo sapiens
aaacaagaatctgtc

SEQ ID NO: 1752826 - DNA, 15 bp, Homo sapiens
aacaagaatctgtca

SEQ ID NO: 1752827 - DNA, 15 bp, Homo sapiens
acaagaatctgtcat

SEQ ID NO: 1752828 - DNA, 15 bp, Homo sapiens
caagaatctgtcatt

SEQ ID NO: 1752829 - DNA, 15 bp, Homo sapiens
aagaatctgtcattt

SEQ ID NO: 1752830 - DNA, 15 bp, Homo sapiens
agaatctgtcatttc

SEQ ID NO: 1752831 - DNA, 15 bp, Homo sapiens
gaatctgtcatttca

SEQ ID NO: 1752832 - DNA, 15 bp, Homo sapiens
aatctgtcatttcaa

SEQ ID NO: 1752833 - DNA, 15 bp, Homo sapiens
atctgtcatttcaaa

SEQ ID NO: 1752834 - DNA, 15 bp, Homo sapiens
tctgtcatttcaaaa

SEQ ID NO: 1752835 - DNA, 15 bp, Homo sapiens
ctgtcatttcaaaaa

SEQ ID NO: 1752836 - DNA, 15 bp, Homo sapiens
tgtcatttcaaaaac

SEQ ID NO: 1752837 - DNA, 15 bp, Homo sapiens
gtcatttcaaaaaca

SEQ ID NO: 1752838 - DNA, 15 bp, Homo sapiens
tcatttcaaaaacat

SEQ ID NO: 1752839 - DNA, 15 bp, Homo sapiens
catttcaaaaacatt

SEQ ID NO: 1752840 - DNA, 15 bp, Homo sapiens
atttcaaaaacattc

SEQ ID NO: 1752841 - DNA, 15 bp, Homo sapiens
tttcaaaaacattca

SEQ ID NO: 1752842 - DNA, 15 bp, Homo sapiens
ttcaaaaacattcaa

SEQ ID NO: 1752843 - DNA, 15 bp, Homo sapiens
tcaaaaacattcaac

SEQ ID NO: 1752844 - DNA, 15 bp, Homo sapiens
caaaaacattcaacc

SEQ ID NO: 1752845 - DNA, 15 bp, Homo sapiens
aaaaacattcaacca

SEQ ID NO: 1752846 - DNA, 15 bp, Homo sapiens
aaaacattcaaccac

SEQ ID NO: 1752847 - DNA, 15 bp, Homo sapiens
aaacattcaaccaca

SEQ ID NO: 1752848 - DNA, 15 bp, Homo sapiens
aacattcaaccacat

SEQ ID NO: 1752849 - DNA, 15 bp, Homo sapiens
acattcaaccacatc

SEQ ID NO: 1752850 - DNA, 15 bp, Homo sapiens
cattcaaccacatca

SEQ ID NO: 1752851 - DNA, 15 bp, Homo sapiens
attcaaccacatcaa

SEQ ID NO: 1752852 - DNA, 15 bp, Homo sapiens
ttcaaccacatcaag

SEQ ID NO: 1752853 - DNA, 15 bp, Homo sapiens
tcaaccacatcaaga

SEQ ID NO: 1752854 - DNA, 15 bp, Homo sapiens
caaccacatcaagaa

SEQ ID NO: 1752855 - DNA, 15 bp, Homo sapiens
aaccacatcaagaaa

SEQ ID NO: 1752856 - DNA, 15 bp, Homo sapiens
accacatcaagaaaa

SEQ ID NO: 1752857 - DNA, 15 bp, Homo sapiens
ccacatcaagaaaac

SEQ ID NO: 1752858 - DNA, 15 bp, Homo sapiens
cacatcaagaaaacc

SEQ ID NO: 1752859 - DNA, 15 bp, Homo sapiens
acatcaagaaaacct

SEQ ID NO: 1752860 - DNA, 15 bp, Homo sapiens
catcaagaaaacctt

SEQ ID NO: 1752861 - DNA, 15 bp, Homo sapiens
atcaagaaaaccttc

SEQ ID NO: 1752862 - DNA, 15 bp, Homo sapiens
tcaagaaaaccttcc

SEQ ID NO: 1752863 - DNA, 15 bp, Homo sapiens
caagaaaaccttcct

SEQ ID NO: 1752864 - DNA, 15 bp, Homo sapiens
aagaaaaccttcctt

SEQ ID NO: 1752865 - DNA, 15 bp, Homo sapiens
agaaaaccttccttt

SEQ ID NO: 1752866 - DNA, 15 bp, Homo sapiens
gaaaaccttcctttt

SEQ ID NO: 1752867 - DNA, 15 bp, Homo sapiens
aaaaccttcctttta

SEQ ID NO: 1752868 - DNA, 15 bp, Homo sapiens
aaaccttccttttaa

SEQ ID NO: 1752869 - DNA, 15 bp, Homo sapiens
aaccttccttttaaa

SEQ ID NO: 1752870 - DNA, 15 bp, Homo sapiens
accttccttttaaag

SEQ ID NO: 1752871 - DNA, 15 bp, Homo sapiens
ccttccttttaaagg

SEQ ID NO: 1752872 - DNA, 15 bp, Homo sapiens
cttccttttaaaggc

SEQ ID NO: 1752873 - DNA, 15 bp, Homo sapiens
ttccttttaaaggca

SEQ ID NO: 1752874 - DNA, 15 bp, Homo sapiens
tccttttaaaggcac

SEQ ID NO: 1752875 - DNA, 15 bp, Homo sapiens
ccttttaaaggcacc

SEQ ID NO: 1752876 - DNA, 15 bp, Homo sapiens
cttttaaaggcacct

SEQ ID NO: 1752877 - DNA, 15 bp, Homo sapiens
ttttaaaggcacctt

SEQ ID NO: 1752878 - DNA, 15 bp, Homo sapiens
tttaaaggcaccttg

SEQ ID NO: 1752879 - DNA, 15 bp, Homo sapiens
ttaaaggcaccttgg

SEQ ID NO: 1752880 - DNA, 15 bp, Homo sapiens
taaaggcaccttggg

SEQ ID NO: 1752881 - DNA, 15 bp, Homo sapiens
aaaggcaccttggga

SEQ ID NO: 1752882 - DNA, 15 bp, Homo sapiens
aaggcaccttgggat

SEQ ID NO: 1752883 - DNA, 15 bp, Homo sapiens
aggcaccttgggatt

SEQ ID NO: 1752884 - DNA, 15 bp, Homo sapiens
ggcaccttgggattt

SEQ ID NO: 1752885 - DNA, 15 bp, Homo sapiens
gcaccttgggatttc

SEQ ID NO: 1752886 - DNA, 15 bp, Homo sapiens
caccttgggatttct

SEQ ID NO: 1752887 - DNA, 15 bp, Homo sapiens
accttgggatttctg

SEQ ID NO: 1752888 - DNA, 15 bp, Homo sapiens
ccttgggatttctgc

SEQ ID NO: 1752889 - DNA, 15 bp, Homo sapiens
cttgggatttctgca

SEQ ID NO: 1752890 - DNA, 15 bp, Homo sapiens
ttgggatttctgcac

SEQ ID NO: 1752891 - DNA, 15 bp, Homo sapiens
tgggatttctgcact

SEQ ID NO: 1752892 - DNA, 15 bp, Homo sapiens
gggatttctgcactt

SEQ ID NO: 1752893 - DNA, 15 bp, Homo sapiens
ggatttctgcacttt

SEQ ID NO: 1752894 - DNA, 15 bp, Homo sapiens
gatttctgcactttg

SEQ ID NO: 1752895 - DNA, 15 bp, Homo sapiens
atttctgcactttgt

SEQ ID NO: 1752896 - DNA, 15 bp, Homo sapiens
tttctgcactttgtt

SEQ ID NO: 1752897 - DNA, 15 bp, Homo sapiens
ttctgcactttgttg

SEQ ID NO: 1752898 - DNA, 15 bp, Homo sapiens
tctgcactttgttgg

SEQ ID NO: 1752899 - DNA, 15 bp, Homo sapiens
ctgcactttgttggt

SEQ ID NO: 1752900 - DNA, 15 bp, Homo sapiens
tgcactttgttggtg

SEQ ID NO: 1752901 - DNA, 15 bp, Homo sapiens
gcactttgttggtgt

SEQ ID NO: 1752902 - DNA, 15 bp, Homo sapiens
cactttgttggtgtt

SEQ ID NO: 1752903 - DNA, 15 bp, Homo sapiens
actttgttggtgttg

SEQ ID NO: 1752904 - DNA, 15 bp, Homo sapiens
ctttgttggtgttgt

SEQ ID NO: 1752905 - DNA, 15 bp, Homo sapiens
tttgttggtgttgtt

SEQ ID NO: 1752906 - DNA, 15 bp, Homo sapiens
ttgttggtgttgttc

SEQ ID NO: 1752907 - DNA, 15 bp, Homo sapiens
tgttggtgttgttct

SEQ ID NO: 1752908 - DNA, 15 bp, Homo sapiens
gttggtgttgttcta

SEQ ID NO: 1752909 - DNA, 15 bp, Homo sapiens
ttggtgttgttctaa

SEQ ID NO: 1752910 - DNA, 15 bp, Homo sapiens
tggtgttgttctaaa

SEQ ID NO: 1752911 - DNA, 15 bp, Homo sapiens
ggtgttgttctaaag

SEQ ID NO: 1752912 - DNA, 15 bp, Homo sapiens
gtgttgttctaaagg

SEQ ID NO: 1752913 - DNA, 15 bp, Homo sapiens
tgttgttctaaaggt

SEQ ID NO: 1752914 - DNA, 15 bp, Homo sapiens
gttgttctaaaggta

SEQ ID NO: 1752915 - DNA, 15 bp, Homo sapiens
ttgttctaaaggtag

SEQ ID NO: 1752916 - DNA, 15 bp, Homo sapiens
tgttctaaaggtaga

SEQ ID NO: 1752917 - DNA, 15 bp, Homo sapiens
gttctaaaggtagat

SEQ ID NO: 1752918 - DNA, 15 bp, Homo sapiens
ttctaaaggtagatt

SEQ ID NO: 1752919 - DNA, 15 bp, Homo sapiens
tctaaaggtagatta

SEQ ID NO: 1752920 - DNA, 15 bp, Homo sapiens
ctaaaggtagattag

SEQ ID NO: 1752921 - DNA, 15 bp, Homo sapiens
taaaggtagattaga

SEQ ID NO: 1752922 - DNA, 15 bp, Homo sapiens
aaaggtagattagaa

SEQ ID NO: 1752923 - DNA, 15 bp, Homo sapiens
aaggtagattagaag

SEQ ID NO: 1752924 - DNA, 15 bp, Homo sapiens
aggtagattagaagt

SEQ ID NO: 1752925 - DNA, 15 bp, Homo sapiens
ggtagattagaagtc

SEQ ID NO: 1752926 - DNA, 15 bp, Homo sapiens
gtagattagaagtcc

SEQ ID NO: 1752927 - DNA, 15 bp, Homo sapiens
tagattagaagtcct

SEQ ID NO: 1752928 - DNA, 15 bp, Homo sapiens
agattagaagtcctg

SEQ ID NO: 1752929 - DNA, 15 bp, Homo sapiens
gattagaagtcctga

SEQ ID NO: 1752930 - DNA, 15 bp, Homo sapiens
attagaagtcctgaa

SEQ ID NO: 1752931 - DNA, 15 bp, Homo sapiens
ttagaagtcctgaaa

SEQ ID NO: 1752932 - DNA, 15 bp, Homo sapiens
tagaagtcctgaaat

SEQ ID NO: 1752933 - DNA, 15 bp, Homo sapiens
agaagtcctgaaata

SEQ ID NO: 1752934 - DNA, 15 bp, Homo sapiens
gaagtcctgaaatac

SEQ ID NO: 1752935 - DNA, 15 bp, Homo sapiens
aagtcctgaaatacc

SEQ ID NO: 1752936 - DNA, 15 bp, Homo sapiens
agtcctgaaatacct

SEQ ID NO: 1752937 - DNA, 15 bp, Homo sapiens
gtcctgaaataccta

SEQ ID NO: 1752938 - DNA, 15 bp, Homo sapiens
tcctgaaatacctaa

SEQ ID NO: 1752939 - DNA, 15 bp, Homo sapiens
cctgaaatacctaaa

SEQ ID NO: 1752940 - DNA, 15 bp, Homo sapiens
ctgaaatacctaaag

SEQ ID NO: 1752941 - DNA, 15 bp, Homo sapiens
tgaaatacctaaagt

SEQ ID NO: 1752942 - DNA, 15 bp, Homo sapiens
gaaatacctaaagta

SEQ ID NO: 1752943 - DNA, 15 bp, Homo sapiens
aaatacctaaagtac

SEQ ID NO: 1752944 - DNA, 15 bp, Homo sapiens
aatacctaaagtact

SEQ ID NO: 1752945 - DNA, 15 bp, Homo sapiens
atacctaaagtactg

SEQ ID NO: 1752946 - DNA, 15 bp, Homo sapiens
tacctaaagtactga

SEQ ID NO: 1752947 - DNA, 15 bp, Homo sapiens
acctaaagtactgaa

SEQ ID NO: 1752948 - DNA, 15 bp, Homo sapiens
cctaaagtactgaag

SEQ ID NO: 1752949 - DNA, 15 bp, Homo sapiens
ctaaagtactgaaga

SEQ ID NO: 1752950 - DNA, 15 bp, Homo sapiens
taaagtactgaagac

SEQ ID NO: 1752951 - DNA, 15 bp, Homo sapiens
aaagtactgaagacc

SEQ ID NO: 1752952 - DNA, 15 bp, Homo sapiens
aagtactgaagaccc

SEQ ID NO: 1752953 - DNA, 15 bp, Homo sapiens
agtactgaagaccct

SEQ ID NO: 1752954 - DNA, 15 bp, Homo sapiens
gtactgaagaccctt

SEQ ID NO: 1752955 - DNA, 15 bp, Homo sapiens
tactgaagacccttt

SEQ ID NO: 1752956 - DNA, 15 bp, Homo sapiens
actgaagaccctttg

SEQ ID NO: 1752957 - DNA, 15 bp, Homo sapiens
ctgaagaccctttgc

SEQ ID NO: 1752958 - DNA, 15 bp, Homo sapiens
tgaagaccctttgcc

SEQ ID NO: 1752959 - DNA, 15 bp, Homo sapiens
gaagaccctttgcct

SEQ ID NO: 1752960 - DNA, 15 bp, Homo sapiens
aagaccctttgccta

SEQ ID NO: 1752961 - DNA, 15 bp, Homo sapiens
agaccctttgcctag

SEQ ID NO: 1752962 - DNA, 15 bp, Homo sapiens
gaccctttgcctaga

SEQ ID NO: 1752963 - DNA, 15 bp, Homo sapiens
accctttgcctagaa

SEQ ID NO: 1752964 - DNA, 15 bp, Homo sapiens
ccctttgcctagaaa

SEQ ID NO: 1752965 - DNA, 15 bp, Homo sapiens
cctttgcctagaaaa

SEQ ID NO: 1752966 - DNA, 15 bp, Homo sapiens
ctttgcctagaaaat

SEQ ID NO: 1752967 - DNA, 15 bp, Homo sapiens
tttgcctagaaaata

SEQ ID NO: 1752968 - DNA, 15 bp, Homo sapiens
ttgcctagaaaataa

SEQ ID NO: 1752969 - DNA, 15 bp, Homo sapiens
tgcctagaaaataac

SEQ ID NO: 1752970 - DNA, 15 bp, Homo sapiens
gcctagaaaataaca

SEQ ID NO: 1752971 - DNA, 15 bp, Homo sapiens
cctagaaaataacac

SEQ ID NO: 1752972 - DNA, 15 bp, Homo sapiens
ctagaaaataacaca

SEQ ID NO: 1752973 - DNA, 15 bp, Homo sapiens
tagaaaataacacaa

SEQ ID NO: 1752974 - DNA, 15 bp, Homo sapiens
agaaaataacacaaa

SEQ ID NO: 1752975 - DNA, 15 bp, Homo sapiens
gaaaataacacaaat

SEQ ID NO: 1752976 - DNA, 15 bp, Homo sapiens
aaaataacacaaatg

SEQ ID NO: 1752977 - DNA, 15 bp, Homo sapiens
aaataacacaaatgg

SEQ ID NO: 1752978 - DNA, 15 bp, Homo sapiens
aataacacaaatggg

SEQ ID NO: 1752979 - DNA, 15 bp, Homo sapiens
ataacacaaatggga

SEQ ID NO: 1752980 - DNA, 15 bp, Homo sapiens
taacacaaatgggat

SEQ ID NO: 1752981 - DNA, 15 bp, Homo sapiens
aacacaaatgggatc

SEQ ID NO: 1752982 - DNA, 15 bp, Homo sapiens
acacaaatgggatcc

SEQ ID NO: 1752983 - DNA, 15 bp, Homo sapiens
cacaaatgggatcct

SEQ ID NO: 1752984 - DNA, 15 bp, Homo sapiens
acaaatgggatcctt

SEQ ID NO: 1752985 - DNA, 15 bp, Homo sapiens
caaatgggatccttt

SEQ ID NO: 1752986 - DNA, 15 bp, Homo sapiens
aaatgggatcctttt

SEQ ID NO: 1752987 - DNA, 15 bp, Homo sapiens
aatgggatccttttc

SEQ ID NO: 1752988 - DNA, 15 bp, Homo sapiens
atgggatccttttcc

SEQ ID NO: 1752989 - DNA, 15 bp, Homo sapiens
tgggatccttttcct

SEQ ID NO: 1752990 - DNA, 15 bp, Homo sapiens
gggatccttttcctg

SEQ ID NO: 1752991 - DNA, 15 bp, Homo sapiens
ggatccttttcctgc

SEQ ID NO: 1752992 - DNA, 15 bp, Homo sapiens
gatccttttcctgcc

SEQ ID NO: 1752993 - DNA, 15 bp, Homo sapiens
atccttttcctgcct

SEQ ID NO: 1752994 - DNA, 15 bp, Homo sapiens
tccttttcctgcctt

SEQ ID NO: 1752995 - DNA, 15 bp, Homo sapiens
ccttttcctgccttc

SEQ ID NO: 1752996 - DNA, 15 bp, Homo sapiens
cttttcctgccttcc

SEQ ID NO: 1752997 - DNA, 15 bp, Homo sapiens
ttttcctgccttccc

SEQ ID NO: 1752998 - DNA, 15 bp, Homo sapiens
tttcctgccttccct

SEQ ID NO: 1752999 - DNA, 15 bp, Homo sapiens
ttcctgccttccctg

SEQ ID NO: 1753000 - DNA, 15 bp, Homo sapiens
tcctgccttccctgt

SEQ ID NO: 1753001 - DNA, 15 bp, Homo sapiens
cctgccttccctgtt

SEQ ID NO: 1753002 - DNA, 15 bp, Homo sapiens
ctgccttccctgttt

SEQ ID NO: 1753003 - DNA, 15 bp, Homo sapiens
tgccttccctgtttc

SEQ ID NO: 1753004 - DNA, 15 bp, Homo sapiens
gccttccctgtttcc

SEQ ID NO: 1753005 - DNA, 15 bp, Homo sapiens
ccttccctgtttcca

SEQ ID NO: 1753006 - DNA, 15 bp, Homo sapiens
cttccctgtttccaa

SEQ ID NO: 1753007 - DNA, 15 bp, Homo sapiens
ttccctgtttccaat

SEQ ID NO: 1753008 - DNA, 15 bp, Homo sapiens
tccctgtttccaatt

SEQ ID NO: 1753009 - DNA, 15 bp, Homo sapiens
ccctgtttccaatta

SEQ ID NO: 1753010 - DNA, 15 bp, Homo sapiens
cctgtttccaattac

SEQ ID NO: 1753011 - DNA, 15 bp, Homo sapiens
ctgtttccaattaca

SEQ ID NO: 1753012 - DNA, 15 bp, Homo sapiens
tgtttccaattacac

SEQ ID NO: 1753013 - DNA, 15 bp, Homo sapiens
gtttccaattacaca

SEQ ID NO: 1753014 - DNA, 15 bp, Homo sapiens
tttccaattacacat

SEQ ID NO: 1753015 - DNA, 15 bp, Homo sapiens
ttccaattacacatt

SEQ ID NO: 1753016 - DNA, 15 bp, Homo sapiens
tccaattacacattt

SEQ ID NO: 1753017 - DNA, 15 bp, Homo sapiens
ccaattacacatttc

SEQ ID NO: 1753018 - DNA, 15 bp, Homo sapiens
caattacacatttca

SEQ ID NO: 1753019 - DNA, 15 bp, Homo sapiens
aattacacatttcac

SEQ ID NO: 1753020 - DNA, 15 bp, Homo sapiens
attacacatttcact

SEQ ID NO: 1753021 - DNA, 15 bp, Homo sapiens
ttacacatttcactg

SEQ ID NO: 1753022 - DNA, 15 bp, Homo sapiens
tacacatttcactgg

SEQ ID NO: 1753023 - DNA, 15 bp, Homo sapiens
acacatttcactggt

SEQ ID NO: 1753024 - DNA, 15 bp, Homo sapiens
cacatttcactggtg

SEQ ID NO: 1753025 - DNA, 15 bp, Homo sapiens
acatttcactggtga

SEQ ID NO: 1753026 - DNA, 15 bp, Homo sapiens
catttcactggtgaa

SEQ ID NO: 1753027 - DNA, 15 bp, Homo sapiens
atttcactggtgaat

SEQ ID NO: 1753028 - DNA, 15 bp, Homo sapiens
tttcactggtgaatg

SEQ ID NO: 1753029 - DNA, 15 bp, Homo sapiens
ttcactggtgaatga

SEQ ID NO: 1753030 - DNA, 15 bp, Homo sapiens
tcactggtgaatgaa

SEQ ID NO: 1753031 - DNA, 15 bp, Homo sapiens
cactggtgaatgaac

SEQ ID NO: 1753032 - DNA, 15 bp, Homo sapiens
actggtgaatgaaca

SEQ ID NO: 1753033 - DNA, 15 bp, Homo sapiens
ctggtgaatgaacaa

SEQ ID NO: 1753034 - DNA, 15 bp, Homo sapiens
tggtgaatgaacaaa

SEQ ID NO: 1753035 - DNA, 15 bp, Homo sapiens
ggtgaatgaacaaat

SEQ ID NO: 1753036 - DNA, 15 bp, Homo sapiens
gtgaatgaacaaatg

SEQ ID NO: 1753037 - DNA, 15 bp, Homo sapiens
tgaatgaacaaatgc

SEQ ID NO: 1753038 - DNA, 15 bp, Homo sapiens
gaatgaacaaatgct

SEQ ID NO: 1753039 - DNA, 15 bp, Homo sapiens
aatgaacaaatgctt

SEQ ID NO: 1753040 - DNA, 15 bp, Homo sapiens
atgaacaaatgcttt

SEQ ID NO: 1753041 - DNA, 15 bp, Homo sapiens
tgaacaaatgcttta

SEQ ID NO: 1753042 - DNA, 15 bp, Homo sapiens
gaacaaatgctttaa

SEQ ID NO: 1753043 - DNA, 15 bp, Homo sapiens
aacaaatgctttaaa

SEQ ID NO: 1753044 - DNA, 15 bp, Homo sapiens
acaaatgctttaaaa

SEQ ID NO: 1753045 - DNA, 15 bp, Homo sapiens
caaatgctttaaaaa

SEQ ID NO: 1753046 - DNA, 15 bp, Homo sapiens
aaatgctttaaaaac

SEQ ID NO: 1753047 - DNA, 15 bp, Homo sapiens
aatgctttaaaaacc

SEQ ID NO: 1753048 - DNA, 15 bp, Homo sapiens
atgctttaaaaacct

SEQ ID NO: 1753049 - DNA, 15 bp, Homo sapiens
tgctttaaaaacctc

SEQ ID NO: 1753050 - DNA, 15 bp, Homo sapiens
gctttaaaaacctca

SEQ ID NO: 1753051 - DNA, 15 bp, Homo sapiens
ctttaaaaacctcag

SEQ ID NO: 1753052 - DNA, 15 bp, Homo sapiens
tttaaaaacctcaga

SEQ ID NO: 1753053 - DNA, 15 bp, Homo sapiens
ttaaaaacctcagaa

SEQ ID NO: 1753054 - DNA, 15 bp, Homo sapiens
taaaaacctcagaaa

SEQ ID NO: 1753055 - DNA, 15 bp, Homo sapiens
aaaaacctcagaaaa

SEQ ID NO: 1753056 - DNA, 15 bp, Homo sapiens
aaaacctcagaaaag

SEQ ID NO: 1753057 - DNA, 15 bp, Homo sapiens
aaacctcagaaaaga

SEQ ID NO: 1753058 - DNA, 15 bp, Homo sapiens
aacctcagaaaagat

SEQ ID NO: 1753059 - DNA, 15 bp, Homo sapiens
acctcagaaaagatg

SEQ ID NO: 1753060 - DNA, 15 bp, Homo sapiens
cctcagaaaagatgt

SEQ ID NO: 1753061 - DNA, 15 bp, Homo sapiens
ctcagaaaagatgtc

SEQ ID NO: 1753062 - DNA, 15 bp, Homo sapiens
tcagaaaagatgtct

SEQ ID NO: 1753063 - DNA, 15 bp, Homo sapiens
cagaaaagatgtctc

SEQ ID NO: 1753064 - DNA, 15 bp, Homo sapiens
gaaaagatgtctcaa

SEQ ID NO: 1753065 - DNA, 15 bp, Homo sapiens
aaaagatgtctcaaa

SEQ ID NO: 1753066 - DNA, 15 bp, Homo sapiens
aaagatgtctcaaag

SEQ ID NO: 1753067 - DNA, 15 bp, Homo sapiens
aagatgtctcaaagt

SEQ ID NO: 1753068 - DNA, 15 bp, Homo sapiens
agatgtctcaaagta

SEQ ID NO: 1753069 - DNA, 15 bp, Homo sapiens
gatgtctcaaagtat

SEQ ID NO: 1753070 - DNA, 15 bp, Homo sapiens
atgtctcaaagtatt

SEQ ID NO: 1753071 - DNA, 15 bp, Homo sapiens
tgtctcaaagtattt

SEQ ID NO: 1753072 - DNA, 15 bp, Homo sapiens
gtctcaaagtatttt

SEQ ID NO: 1753073 - DNA, 15 bp, Homo sapiens
tctcaaagtatttta

SEQ ID NO: 1753074 - DNA, 15 bp, Homo sapiens
ctcaaagtattttaa

SEQ ID NO: 1753075 - DNA, 15 bp, Homo sapiens
tcaaagtattttaat

SEQ ID NO: 1753076 - DNA, 15 bp, Homo sapiens
caaagtattttaatg

SEQ ID NO: 1753077 - DNA, 15 bp, Homo sapiens
aaagtattttaatga

SEQ ID NO: 1753078 - DNA, 15 bp, Homo sapiens
aagtattttaatgat

SEQ ID NO: 1753079 - DNA, 15 bp, Homo sapiens
agtattttaatgatc

SEQ ID NO: 1753080 - DNA, 15 bp, Homo sapiens
gtattttaatgatcc

SEQ ID NO: 1753081 - DNA, 15 bp, Homo sapiens
tattttaatgatcca

SEQ ID NO: 1753082 - DNA, 15 bp, Homo sapiens
attttaatgatccag

SEQ ID NO: 1753083 - DNA, 15 bp, Homo sapiens
ttttaatgatccagg

SEQ ID NO: 1753084 - DNA, 15 bp, Homo sapiens
ttaatgatccaggaa

SEQ ID NO: 1753085 - DNA, 15 bp, Homo sapiens
taatgatccaggaaa

SEQ ID NO: 1753086 - DNA, 15 bp, Homo sapiens
aatgatccaggaaaa

SEQ ID NO: 1753087 - DNA, 15 bp, Homo sapiens
atgatccaggaaaac

SEQ ID NO: 1753088 - DNA, 15 bp, Homo sapiens
tgatccaggaaaact

SEQ ID NO: 1753089 - DNA, 15 bp, Homo sapiens
gatccaggaaaactg

SEQ ID NO: 1753090 - DNA, 15 bp, Homo sapiens
atccaggaaaactga

SEQ ID NO: 1753091 - DNA, 15 bp, Homo sapiens
tccaggaaaactgaa

SEQ ID NO: 1753092 - DNA, 15 bp, Homo sapiens
ccaggaaaactgaag

SEQ ID NO: 1753093 - DNA, 15 bp, Homo sapiens
caggaaaactgaagc

SEQ ID NO: 1753094 - DNA, 15 bp, Homo sapiens
aggaaaactgaagca

SEQ ID NO: 1753095 - DNA, 15 bp, Homo sapiens
ggaaaactgaagcaa

SEQ ID NO: 1753096 - DNA, 15 bp, Homo sapiens
gaaaactgaagcaaa

SEQ ID NO: 1753097 - DNA, 15 bp, Homo sapiens
aaaactgaagcaaag

SEQ ID NO: 1753098 - DNA, 15 bp, Homo sapiens
aaactgaagcaaaga

SEQ ID NO: 1753099 - DNA, 15 bp, Homo sapiens
aactgaagcaaagaa

SEQ ID NO: 1753100 - DNA, 15 bp, Homo sapiens
actgaagcaaagaag

SEQ ID NO: 1753101 - DNA, 15 bp, Homo sapiens
ctgaagcaaagaagt

SEQ ID NO: 1753102 - DNA, 15 bp, Homo sapiens
tgaagcaaagaagtt

SEQ ID NO: 1753103 - DNA, 15 bp, Homo sapiens
gaagcaaagaagtta

SEQ ID NO: 1753104 - DNA, 15 bp, Homo sapiens
aagcaaagaagttag

SEQ ID NO: 1753105 - DNA, 15 bp, Homo sapiens
agcaaagaagttagt

SEQ ID NO: 1753106 - DNA, 15 bp, Homo sapiens
gcaaagaagttagtt

SEQ ID NO: 1753107 - DNA, 15 bp, Homo sapiens
caaagaagttagtta

SEQ ID NO: 1753108 - DNA, 15 bp, Homo sapiens
aaagaagttagttac

SEQ ID NO: 1753109 - DNA, 15 bp, Homo sapiens
aagaagttagttact

SEQ ID NO: 1753110 - DNA, 15 bp, Homo sapiens
agaagttagttactc

SEQ ID NO: 1753111 - DNA, 15 bp, Homo sapiens
gaagttagttactca

SEQ ID NO: 1753112 - DNA, 15 bp, Homo sapiens
aagttagttactcaa

SEQ ID NO: 1753113 - DNA, 15 bp, Homo sapiens
agttagttactcaaa

SEQ ID NO: 1753114 - DNA, 15 bp, Homo sapiens
gttagttactcaaag

SEQ ID NO: 1753115 - DNA, 15 bp, Homo sapiens
ttagttactcaaaga

SEQ ID NO: 1753116 - DNA, 15 bp, Homo sapiens
tagttactcaaagac

SEQ ID NO: 1753117 - DNA, 15 bp, Homo sapiens
agttactcaaagacc

SEQ ID NO: 1753118 - DNA, 15 bp, Homo sapiens
gttactcaaagacca

SEQ ID NO: 1753119 - DNA, 15 bp, Homo sapiens
ttactcaaagaccac

SEQ ID NO: 1753120 - DNA, 15 bp, Homo sapiens
tactcaaagaccacg

SEQ ID NO: 1753121 - DNA, 15 bp, Homo sapiens
actcaaagaccacgg

SEQ ID NO: 1753122 - DNA, 15 bp, Homo sapiens
ctcaaagaccacggt

SEQ ID NO: 1753123 - DNA, 15 bp, Homo sapiens
tcaaagaccacggtt

SEQ ID NO: 1753124 - DNA, 15 bp, Homo sapiens
caaagaccacggttc

SEQ ID NO: 1753125 - DNA, 15 bp, Homo sapiens
aaagaccacggttcc

SEQ ID NO: 1753126 - DNA, 15 bp, Homo sapiens
aagaccacggttcct

SEQ ID NO: 1753127 - DNA, 15 bp, Homo sapiens
agaccacggttcctt

SEQ ID NO: 1753128 - DNA, 15 bp, Homo sapiens
gaccacggttccttt

SEQ ID NO: 1753129 - DNA, 15 bp, Homo sapiens
accacggttccttta

SEQ ID NO: 1753130 - DNA, 15 bp, Homo sapiens
ccacggttcctttag

SEQ ID NO: 1753131 - DNA, 15 bp, Homo sapiens
cacggttcctttaga

SEQ ID NO: 1753132 - DNA, 15 bp, Homo sapiens
acggttcctttagaa

SEQ ID NO: 1753133 - DNA, 15 bp, Homo sapiens
cggttcctttagaac

SEQ ID NO: 1753134 - DNA, 15 bp, Homo sapiens
ggttcctttagaaca

SEQ ID NO: 1753135 - DNA, 15 bp, Homo sapiens
gttcctttagaacaa

SEQ ID NO: 1753136 - DNA, 15 bp, Homo sapiens
ttcctttagaacaat

SEQ ID NO: 1753137 - DNA, 15 bp, Homo sapiens
tcctttagaacaatt

SEQ ID NO: 1753138 - DNA, 15 bp, Homo sapiens
cctttagaacaatta

SEQ ID NO: 1753139 - DNA, 15 bp, Homo sapiens
ctttagaacaattaa

SEQ ID NO: 1753140 - DNA, 15 bp, Homo sapiens
tttagaacaattaaa

SEQ ID NO: 1753141 - DNA, 15 bp, Homo sapiens
ttagaacaattaaac

SEQ ID NO: 1753142 - DNA, 15 bp, Homo sapiens
tagaacaattaaaca

SEQ ID NO: 1753143 - DNA, 15 bp, Homo sapiens
agaacaattaaacaa

SEQ ID NO: 1753144 - DNA, 15 bp, Homo sapiens
gaacaattaaacaaa

SEQ ID NO: 1753145 - DNA, 15 bp, Homo sapiens
aacaattaaacaaat

SEQ ID NO: 1753146 - DNA, 15 bp, Homo sapiens
acaattaaacaaatc

SEQ ID NO: 1753147 - DNA, 15 bp, Homo sapiens
caattaaacaaatct

SEQ ID NO: 1753148 - DNA, 15 bp, Homo sapiens
aattaaacaaatctt

SEQ ID NO: 1753149 - DNA, 15 bp, Homo sapiens
attaaacaaatcttg

SEQ ID NO: 1753150 - DNA, 15 bp, Homo sapiens
ttaaacaaatcttgt

SEQ ID NO: 1753151 - DNA, 15 bp, Homo sapiens
taaacaaatcttgtg

SEQ ID NO: 1753152 - DNA, 15 bp, Homo sapiens
aaacaaatcttgtga

SEQ ID NO: 1753153 - DNA, 15 bp, Homo sapiens
aacaaatcttgtgag

SEQ ID NO: 1753154 - DNA, 15 bp, Homo sapiens
acaaatcttgtgagt

SEQ ID NO: 1753155 - DNA, 15 bp, Homo sapiens
caaatcttgtgagtt

SEQ ID NO: 1753156 - DNA, 15 bp, Homo sapiens
aaatcttgtgagttt

SEQ ID NO: 1753157 - DNA, 15 bp, Homo sapiens
aatcttgtgagtttt

SEQ ID NO: 1753158 - DNA, 15 bp, Homo sapiens
atcttgtgagttttt

SEQ ID NO: 1753159 - DNA, 15 bp, Homo sapiens
tcttgtgagtttttt

SEQ ID NO: 1753160 - DNA, 15 bp, Homo sapiens
cttgtgagttttttt

SEQ ID NO: 1753161 - DNA, 15 bp, Homo sapiens
ttgtgagtttttttc

SEQ ID NO: 1753162 - DNA, 15 bp, Homo sapiens
tgtgagtttttttcc

SEQ ID NO: 1753163 - DNA, 15 bp, Homo sapiens
gtgagtttttttcct

SEQ ID NO: 1753164 - DNA, 15 bp, Homo sapiens
tgagtttttttcctt

SEQ ID NO: 1753165 - DNA, 15 bp, Homo sapiens
gagtttttttccttt

SEQ ID NO: 1753166 - DNA, 15 bp, Homo sapiens
agtttttttcctttc

SEQ ID NO: 1753167 - DNA, 15 bp, Homo sapiens
gtttttttcctttcc

SEQ ID NO: 1753168 - DNA, 15 bp, Homo sapiens
tttttttcctttcca

SEQ ID NO: 1753169 - DNA, 15 bp, Homo sapiens
ttttttcctttccaa

SEQ ID NO: 1753170 - DNA, 15 bp, Homo sapiens
tttttcctttccaat

SEQ ID NO: 1753171 - DNA, 15 bp, Homo sapiens
ttttcctttccaata

SEQ ID NO: 1753172 - DNA, 15 bp, Homo sapiens
tttcctttccaatac

SEQ ID NO: 1753173 - DNA, 15 bp, Homo sapiens
ttcctttccaatact

SEQ ID NO: 1753174 - DNA, 15 bp, Homo sapiens
tcctttccaatactc

SEQ ID NO: 1753175 - DNA, 15 bp, Homo sapiens
cctttccaatactca

SEQ ID NO: 1753176 - DNA, 15 bp, Homo sapiens
ctttccaatactcac

SEQ ID NO: 1753177 - DNA, 15 bp, Homo sapiens
tttccaatactcaca

SEQ ID NO: 1753178 - DNA, 15 bp, Homo sapiens
ttccaatactcacat

SEQ ID NO: 1753179 - DNA, 15 bp, Homo sapiens
tccaatactcacatt

SEQ ID NO: 1753180 - DNA, 15 bp, Homo sapiens
ccaatactcacattg

SEQ ID NO: 1753181 - DNA, 15 bp, Homo sapiens
caatactcacattga

SEQ ID NO: 1753182 - DNA, 15 bp, Homo sapiens
aatactcacattgac

SEQ ID NO: 1753183 - DNA, 15 bp, Homo sapiens
atactcacattgaca

SEQ ID NO: 1753184 - DNA, 15 bp, Homo sapiens
tactcacattgacag

SEQ ID NO: 1753185 - DNA, 15 bp, Homo sapiens
actcacattgacaga

SEQ ID NO: 1753186 - DNA, 15 bp, Homo sapiens
ctcacattgacagaa

SEQ ID NO: 1753187 - DNA, 15 bp, Homo sapiens
tcacattgacagaag

SEQ ID NO: 1753188 - DNA, 15 bp, Homo sapiens
cacattgacagaagg

SEQ ID NO: 1753189 - DNA, 15 bp, Homo sapiens
acattgacagaagga

SEQ ID NO: 1753190 - DNA, 15 bp, Homo sapiens
cattgacagaaggat

SEQ ID NO: 1753191 - DNA, 15 bp, Homo sapiens
attgacagaaggatc

SEQ ID NO: 1753192 - DNA, 15 bp, Homo sapiens
ttgacagaaggatcc

SEQ ID NO: 1753193 - DNA, 15 bp, Homo sapiens
tgacagaaggatcct

SEQ ID NO: 1753194 - DNA, 15 bp, Homo sapiens
gacagaaggatcctg

SEQ ID NO: 1753195 - DNA, 15 bp, Homo sapiens
acagaaggatcctgc

SEQ ID NO: 1753196 - DNA, 15 bp, Homo sapiens
cagaaggatcctgca

SEQ ID NO: 1753197 - DNA, 15 bp, Homo sapiens
agaaggatcctgcat

SEQ ID NO: 1753198 - DNA, 15 bp, Homo sapiens
gaaggatcctgcatg

SEQ ID NO: 1753199 - DNA, 15 bp, Homo sapiens
aaggatcctgcatgg

SEQ ID NO: 1753200 - DNA, 15 bp, Homo sapiens
aggatcctgcatgga

SEQ ID NO: 1753201 - DNA, 15 bp, Homo sapiens
ggatcctgcatggac

SEQ ID NO: 1753202 - DNA, 15 bp, Homo sapiens
gatcctgcatggact

SEQ ID NO: 1753203 - DNA, 15 bp, Homo sapiens
atcctgcatggactg

SEQ ID NO: 1753204 - DNA, 15 bp, Homo sapiens
tcctgcatggactgg

SEQ ID NO: 1753205 - DNA, 15 bp, Homo sapiens
cctgcatggactggc

SEQ ID NO: 1753206 - DNA, 15 bp, Homo sapiens
ctgcatggactggca

SEQ ID NO: 1753207 - DNA, 15 bp, Homo sapiens
tgcatggactggcac

SEQ ID NO: 1753208 - DNA, 15 bp, Homo sapiens
gcatggactggcacc

SEQ ID NO: 1753209 - DNA, 15 bp, Homo sapiens
catggactggcacca

SEQ ID NO: 1753210 - DNA, 15 bp, Homo sapiens
atggactggcaccac

SEQ ID NO: 1753211 - DNA, 15 bp, Homo sapiens
tggactggcaccacc

SEQ ID NO: 1753212 - DNA, 15 bp, Homo sapiens
ggactggcaccacct

SEQ ID NO: 1753213 - DNA, 15 bp, Homo sapiens
gactggcaccacctc

SEQ ID NO: 1753214 - DNA, 15 bp, Homo sapiens
actggcaccacctca

SEQ ID NO: 1753215 - DNA, 15 bp, Homo sapiens
ctggcaccacctcac

SEQ ID NO: 1753216 - DNA, 15 bp, Homo sapiens
tggcaccacctcact

SEQ ID NO: 1753217 - DNA, 15 bp, Homo sapiens
ggcaccacctcactg

SEQ ID NO: 1753218 - DNA, 15 bp, Homo sapiens
gcaccacctcactgc

SEQ ID NO: 1753219 - DNA, 15 bp, Homo sapiens
caccacctcactgct

SEQ ID NO: 1753220 - DNA, 15 bp, Homo sapiens
accacctcactgctt

SEQ ID NO: 1753221 - DNA, 15 bp, Homo sapiens
ccacctcactgcttc

SEQ ID NO: 1753222 - DNA, 15 bp, Homo sapiens
cacctcactgcttca

SEQ ID NO: 1753223 - DNA, 15 bp, Homo sapiens
acctcactgcttcaa

SEQ ID NO: 1753224 - DNA, 15 bp, Homo sapiens
cctcactgcttcaac

SEQ ID NO: 1753225 - DNA, 15 bp, Homo sapiens
ctcactgcttcaact

SEQ ID NO: 1753226 - DNA, 15 bp, Homo sapiens
tcactgcttcaactg

SEQ ID NO: 1753227 - DNA, 15 bp, Homo sapiens
cactgcttcaactgt

SEQ ID NO: 1753228 - DNA, 15 bp, Homo sapiens
actgcttcaactgtg

SEQ ID NO: 1753229 - DNA, 15 bp, Homo sapiens
ctgcttcaactgtgc

SEQ ID NO: 1753230 - DNA, 15 bp, Homo sapiens
tgcttcaactgtgca

SEQ ID NO: 1753231 - DNA, 15 bp, Homo sapiens
gcttcaactgtgcat

SEQ ID NO: 1753232 - DNA, 15 bp, Homo sapiens
cttcaactgtgcatg

SEQ ID NO: 1753233 - DNA, 15 bp, Homo sapiens
ttcaactgtgcatga

SEQ ID NO: 1753234 - DNA, 15 bp, Homo sapiens
tcaactgtgcatgat

SEQ ID NO: 1753235 - DNA, 15 bp, Homo sapiens
caactgtgcatgatc

SEQ ID NO: 1753236 - DNA, 15 bp, Homo sapiens
aactgtgcatgatcg

SEQ ID NO: 1753237 - DNA, 15 bp, Homo sapiens
actgtgcatgatcgc

SEQ ID NO: 1753238 - DNA, 15 bp, Homo sapiens
ctgtgcatgatcgca

SEQ ID NO: 1753239 - DNA, 15 bp, Homo sapiens
tgtgcatgatcgcat

SEQ ID NO: 1753240 - DNA, 15 bp, Homo sapiens
gtgcatgatcgcata

SEQ ID NO: 1753241 - DNA, 15 bp, Homo sapiens
tgcatgatcgcatag

SEQ ID NO: 1753242 - DNA, 15 bp, Homo sapiens
gcatgatcgcatagt

SEQ ID NO: 1753243 - DNA, 15 bp, Homo sapiens
catgatcgcatagtc

SEQ ID NO: 1753244 - DNA, 15 bp, Homo sapiens
atgatcgcatagtct

SEQ ID NO: 1753245 - DNA, 15 bp, Homo sapiens
tgatcgcatagtctc

SEQ ID NO: 1753246 - DNA, 15 bp, Homo sapiens
gatcgcatagtctct

SEQ ID NO: 1753247 - DNA, 15 bp, Homo sapiens
atcgcatagtctctg

SEQ ID NO: 1753248 - DNA, 15 bp, Homo sapiens
tcgcatagtctctgt

SEQ ID NO: 1753249 - DNA, 15 bp, Homo sapiens
cgcatagtctctgta

SEQ ID NO: 1753250 - DNA, 15 bp, Homo sapiens
gcatagtctctgtac

SEQ ID NO: 1753251 - DNA, 15 bp, Homo sapiens
catagtctctgtacg

SEQ ID NO: 1753252 - DNA, 15 bp, Homo sapiens
atagtctctgtacgg

SEQ ID NO: 1753253 - DNA, 15 bp, Homo sapiens
tagtctctgtacggc

SEQ ID NO: 1753254 - DNA, 15 bp, Homo sapiens
agtctctgtacggcc

SEQ ID NO: 1753255 - DNA, 15 bp, Homo sapiens
gtctctgtacggcca

SEQ ID NO: 1753256 - DNA, 15 bp, Homo sapiens
tctctgtacggccat

SEQ ID NO: 1753257 - DNA, 15 bp, Homo sapiens
ctctgtacggccatg

SEQ ID NO: 1753258 - DNA, 15 bp, Homo sapiens
tctgtacggccatga

SEQ ID NO: 1753259 - DNA, 15 bp, Homo sapiens
ctgtacggccatgat

SEQ ID NO: 1753260 - DNA, 15 bp, Homo sapiens
tgtacggccatgata

SEQ ID NO: 1753261 - DNA, 15 bp, Homo sapiens
gtacggccatgataa

SEQ ID NO: 1753262 - DNA, 15 bp, Homo sapiens
tacggccatgataaa

SEQ ID NO: 1753263 - DNA, 15 bp, Homo sapiens
acggccatgataaaa

SEQ ID NO: 1753264 - DNA, 15 bp, Homo sapiens
cggccatgataaaaa

SEQ ID NO: 1753265 - DNA, 15 bp, Homo sapiens
ggccatgataaaaat

SEQ ID NO: 1753266 - DNA, 15 bp, Homo sapiens
gccatgataaaaatg

SEQ ID NO: 1753267 - DNA, 15 bp, Homo sapiens
ccatgataaaaatgt

SEQ ID NO: 1753268 - DNA, 15 bp, Homo sapiens
catgataaaaatgtc

SEQ ID NO: 1753269 - DNA, 15 bp, Homo sapiens
atgataaaaatgtct

SEQ ID NO: 1753270 - DNA, 15 bp, Homo sapiens
tgataaaaatgtctt

SEQ ID NO: 1753271 - DNA, 15 bp, Homo sapiens
gataaaaatgtcttg

SEQ ID NO: 1753272 - DNA, 15 bp, Homo sapiens
ataaaaatgtcttgt

SEQ ID NO: 1753273 - DNA, 15 bp, Homo sapiens
taaaaatgtcttgtc

SEQ ID NO: 1753274 - DNA, 15 bp, Homo sapiens
aaaaatgtcttgtca

SEQ ID NO: 1753275 - DNA, 15 bp, Homo sapiens
aaaatgtcttgtcat

SEQ ID NO: 1753276 - DNA, 15 bp, Homo sapiens
aaatgtcttgtcata

SEQ ID NO: 1753277 - DNA, 15 bp, Homo sapiens
aatgtcttgtcatag

SEQ ID NO: 1753278 - DNA, 15 bp, Homo sapiens
atgtcttgtcatagc

SEQ ID NO: 1753279 - DNA, 15 bp, Homo sapiens
tgtcttgtcatagct

SEQ ID NO: 1753280 - DNA, 15 bp, Homo sapiens
gtcttgtcatagctg

SEQ ID NO: 1753281 - DNA, 15 bp, Homo sapiens
tcttgtcatagctgt

SEQ ID NO: 1753282 - DNA, 15 bp, Homo sapiens
cttgtcatagctgtt

SEQ ID NO: 1753283 - DNA, 15 bp, Homo sapiens
ttgtcatagctgttt

SEQ ID NO: 1753284 - DNA, 15 bp, Homo sapiens
tgtcatagctgtttc

SEQ ID NO: 1753285 - DNA, 15 bp, Homo sapiens
gtcatagctgtttca

SEQ ID NO: 1753286 - DNA, 15 bp, Homo sapiens
tcatagctgtttcat

SEQ ID NO: 1753287 - DNA, 15 bp, Homo sapiens
catagctgtttcata

SEQ ID NO: 1753288 - DNA, 15 bp, Homo sapiens
atagctgtttcatag

SEQ ID NO: 1753289 - DNA, 15 bp, Homo sapiens
tagctgtttcatagc

SEQ ID NO: 1753290 - DNA, 15 bp, Homo sapiens
agctgtttcatagca

SEQ ID NO: 1753291 - DNA, 15 bp, Homo sapiens
gctgtttcatagcaa

SEQ ID NO: 1753292 - DNA, 15 bp, Homo sapiens
ctgtttcatagcaac

SEQ ID NO: 1753293 - DNA, 15 bp, Homo sapiens
tgtttcatagcaaca

SEQ ID NO: 1753294 - DNA, 15 bp, Homo sapiens
gtttcatagcaacaa

SEQ ID NO: 1753295 - DNA, 15 bp, Homo sapiens
tttcatagcaacaac

SEQ ID NO: 1753296 - DNA, 15 bp, Homo sapiens
ttcatagcaacaacc

SEQ ID NO: 1753297 - DNA, 15 bp, Homo sapiens
tcatagcaacaacca

SEQ ID NO: 1753298 - DNA, 15 bp, Homo sapiens
catagcaacaaccag

SEQ ID NO: 1753299 - DNA, 15 bp, Homo sapiens
atagcaacaaccagg

SEQ ID NO: 1753300 - DNA, 15 bp, Homo sapiens
tagcaacaaccaggg

SEQ ID NO: 1753301 - DNA, 15 bp, Homo sapiens
agcaacaaccagggc

SEQ ID NO: 1753302 - DNA, 15 bp, Homo sapiens
gcaacaaccagggct

SEQ ID NO: 1753303 - DNA, 15 bp, Homo sapiens
caacaaccagggcta

SEQ ID NO: 1753304 - DNA, 15 bp, Homo sapiens
aacaaccagggctac

SEQ ID NO: 1753305 - DNA, 15 bp, Homo sapiens
acaaccagggctaca

SEQ ID NO: 1753306 - DNA, 15 bp, Homo sapiens
caaccagggctacaa

SEQ ID NO: 1753307 - DNA, 15 bp, Homo sapiens
aaccagggctacaag

SEQ ID NO: 1753308 - DNA, 15 bp, Homo sapiens
accagggctacaaga

SEQ ID NO: 1753309 - DNA, 15 bp, Homo sapiens
ccagggctacaagaa

SEQ ID NO: 1753310 - DNA, 15 bp, Homo sapiens
cagggctacaagaaa

SEQ ID NO: 1753311 - DNA, 15 bp, Homo sapiens
agggctacaagaaaa

SEQ ID NO: 1753312 - DNA, 15 bp, Homo sapiens
gggctacaagaaaaa

SEQ ID NO: 1753313 - DNA, 15 bp, Homo sapiens
ggctacaagaaaaaa

SEQ ID NO: 1753314 - DNA, 15 bp, Homo sapiens
gctacaagaaaaaat

SEQ ID NO: 1753315 - DNA, 15 bp, Homo sapiens
ctacaagaaaaaatt

SEQ ID NO: 1753316 - DNA, 15 bp, Homo sapiens
tacaagaaaaaatta

SEQ ID NO: 1753317 - DNA, 15 bp, Homo sapiens
acaagaaaaaattaa

SEQ ID NO: 1753318 - DNA, 15 bp, Homo sapiens
caagaaaaaattaaa

SEQ ID NO: 1753319 - DNA, 15 bp, Homo sapiens
aagaaaaaattaaaa

SEQ ID NO: 1753320 - DNA, 15 bp, Homo sapiens
agaaaaaattaaaag

SEQ ID NO: 1753321 - DNA, 15 bp, Homo sapiens
gaaaaaattaaaaga

SEQ ID NO: 1753322 - DNA, 15 bp, Homo sapiens
aaaaaattaaaagag

SEQ ID NO: 1753323 - DNA, 15 bp, Homo sapiens
aaaaattaaaagagt

SEQ ID NO: 1753324 - DNA, 15 bp, Homo sapiens
aaaattaaaagagtg

SEQ ID NO: 1753325 - DNA, 15 bp, Homo sapiens
aaattaaaagagtgt

SEQ ID NO: 1753326 - DNA, 15 bp, Homo sapiens
aattaaaagagtgta

SEQ ID NO: 1753327 - DNA, 15 bp, Homo sapiens
attaaaagagtgtat

SEQ ID NO: 1753328 - DNA, 15 bp, Homo sapiens
ttaaaagagtgtatc

SEQ ID NO: 1753329 - DNA, 15 bp, Homo sapiens
taaaagagtgtatca

SEQ ID NO: 1753330 - DNA, 15 bp, Homo sapiens
aaaagagtgtatcat

SEQ ID NO: 1753331 - DNA, 15 bp, Homo sapiens
aaagagtgtatcata

SEQ ID NO: 1753332 - DNA, 15 bp, Homo sapiens
aagagtgtatcataa

SEQ ID NO: 1753333 - DNA, 15 bp, Homo sapiens
agagtgtatcataag

SEQ ID NO: 1753334 - DNA, 15 bp, Homo sapiens
gagtgtatcataaga

SEQ ID NO: 1753335 - DNA, 15 bp, Homo sapiens
agtgtatcataagaa

SEQ ID NO: 1753336 - DNA, 15 bp, Homo sapiens
gtgtatcataagaaa

SEQ ID NO: 1753337 - DNA, 15 bp, Homo sapiens
tgtatcataagaaag

SEQ ID NO: 1753338 - DNA, 15 bp, Homo sapiens
gtatcataagaaaga

SEQ ID NO: 1753339 - DNA, 15 bp, Homo sapiens
tatcataagaaagaa

SEQ ID NO: 1753340 - DNA, 15 bp, Homo sapiens
atcataagaaagaaa

SEQ ID NO: 1753341 - DNA, 15 bp, Homo sapiens
tcataagaaagaaaa

SEQ ID NO: 1753342 - DNA, 15 bp, Homo sapiens
cataagaaagaaaat

SEQ ID NO: 1753343 - DNA, 15 bp, Homo sapiens
ataagaaagaaaatg

SEQ ID NO: 1753344 - DNA, 15 bp, Homo sapiens
taagaaagaaaatgc

SEQ ID NO: 1753345 - DNA, 15 bp, Homo sapiens
aagaaagaaaatgct

SEQ ID NO: 1753346 - DNA, 15 bp, Homo sapiens
agaaagaaaatgctc

SEQ ID NO: 1753347 - DNA, 15 bp, Homo sapiens
gaaagaaaatgctct

SEQ ID NO: 1753348 - DNA, 15 bp, Homo sapiens
aaagaaaatgctcta

SEQ ID NO: 1753349 - DNA, 15 bp, Homo sapiens
aagaaaatgctctaa

SEQ ID NO: 1753350 - DNA, 15 bp, Homo sapiens
agaaaatgctctaat

SEQ ID NO: 1753351 - DNA, 15 bp, Homo sapiens
gaaaatgctctaata

SEQ ID NO: 1753352 - DNA, 15 bp, Homo sapiens
aaaatgctctaatat

SEQ ID NO: 1753353 - DNA, 15 bp, Homo sapiens
aaatgctctaatatc

SEQ ID NO: 1753354 - DNA, 15 bp, Homo sapiens
aatgctctaatatca

SEQ ID NO: 1753355 - DNA, 15 bp, Homo sapiens
atgctctaatatcat

SEQ ID NO: 1753356 - DNA, 15 bp, Homo sapiens
tgctctaatatcatt

SEQ ID NO: 1753357 - DNA, 15 bp, Homo sapiens
gctctaatatcatta

SEQ ID NO: 1753358 - DNA, 15 bp, Homo sapiens
ctctaatatcattac

SEQ ID NO: 1753359 - DNA, 15 bp, Homo sapiens
tctaatatcattaca

SEQ ID NO: 1753360 - DNA, 15 bp, Homo sapiens
ctaatatcattacag

SEQ ID NO: 1753361 - DNA, 15 bp, Homo sapiens
taatatcattacaga

SEQ ID NO: 1753362 - DNA, 15 bp, Homo sapiens
aatatcattacagat

SEQ ID NO: 1753363 - DNA, 15 bp, Homo sapiens
atatcattacagata

SEQ ID NO: 1753364 - DNA, 15 bp, Homo sapiens
tatcattacagatat

SEQ ID NO: 1753365 - DNA, 15 bp, Homo sapiens
atcattacagatata

SEQ ID NO: 1753366 - DNA, 15 bp, Homo sapiens
tcattacagatatag

SEQ ID NO: 1753367 - DNA, 15 bp, Homo sapiens
cattacagatatagt

SEQ ID NO: 1753368 - DNA, 15 bp, Homo sapiens
attacagatatagtt

SEQ ID NO: 1753369 - DNA, 15 bp, Homo sapiens
ttacagatatagttg

SEQ ID NO: 1753370 - DNA, 15 bp, Homo sapiens
tacagatatagttgc

SEQ ID NO: 1753371 - DNA, 15 bp, Homo sapiens
acagatatagttgcc

SEQ ID NO: 1753372 - DNA, 15 bp, Homo sapiens
cagatatagttgcct

SEQ ID NO: 1753373 - DNA, 15 bp, Homo sapiens
agatatagttgccta

SEQ ID NO: 1753374 - DNA, 15 bp, Homo sapiens
gatatagttgcctaa

SEQ ID NO: 1753375 - DNA, 15 bp, Homo sapiens
atatagttgcctaat

SEQ ID NO: 1753376 - DNA, 15 bp, Homo sapiens
tatagttgcctaata

SEQ ID NO: 1753377 - DNA, 15 bp, Homo sapiens
atagttgcctaataa

SEQ ID NO: 1753378 - DNA, 15 bp, Homo sapiens
tagttgcctaataaa

SEQ ID NO: 1753379 - DNA, 15 bp, Homo sapiens
agttgcctaataaag

SEQ ID NO: 1753380 - DNA, 15 bp, Homo sapiens
gttgcctaataaagc

SEQ ID NO: 1753381 - DNA, 15 bp, Homo sapiens
ttgcctaataaagct

SEQ ID NO: 1753382 - DNA, 15 bp, Homo sapiens
tgcctaataaagcta

SEQ ID NO: 1753383 - DNA, 15 bp, Homo sapiens
gcctaataaagctag

SEQ ID NO: 1753384 - DNA, 15 bp, Homo sapiens
cctaataaagctagc

SEQ ID NO: 1753385 - DNA, 15 bp, Homo sapiens
ctaataaagctagct

SEQ ID NO: 1753386 - DNA, 15 bp, Homo sapiens
taataaagctagctt

SEQ ID NO: 1753387 - DNA, 15 bp, Homo sapiens
aataaagctagcttt

SEQ ID NO: 1753388 - DNA, 15 bp, Homo sapiens
ataaagctagctttg

SEQ ID NO: 1753389 - DNA, 15 bp, Homo sapiens
taaagctagctttgt

SEQ ID NO: 1753390 - DNA, 15 bp, Homo sapiens
aaagctagctttgtt

SEQ ID NO: 1753391 - DNA, 15 bp, Homo sapiens
aagctagctttgttc

SEQ ID NO: 1753392 - DNA, 15 bp, Homo sapiens
agctagctttgttca

SEQ ID NO: 1753393 - DNA, 15 bp, Homo sapiens
gctagctttgttcag

SEQ ID NO: 1753394 - DNA, 15 bp, Homo sapiens
ctagctttgttcaga

SEQ ID NO: 1753395 - DNA, 15 bp, Homo sapiens
tagctttgttcagag

SEQ ID NO: 1753396 - DNA, 15 bp, Homo sapiens
agctttgttcagaga

SEQ ID NO: 1753397 - DNA, 15 bp, Homo sapiens
gctttgttcagagac

SEQ ID NO: 1753398 - DNA, 15 bp, Homo sapiens
ctttgttcagagact

SEQ ID NO: 1753399 - DNA, 15 bp, Homo sapiens
tttgttcagagacta

SEQ ID NO: 1753400 - DNA, 15 bp, Homo sapiens
ttgttcagagactaa

SEQ ID NO: 1753401 - DNA, 15 bp, Homo sapiens
tgttcagagactaag

SEQ ID NO: 1753402 - DNA, 15 bp, Homo sapiens
gttcagagactaagc

SEQ ID NO: 1753403 - DNA, 15 bp, Homo sapiens
ttcagagactaagcc

SEQ ID NO: 1753404 - DNA, 15 bp, Homo sapiens
tcagagactaagccc

SEQ ID NO: 1753405 - DNA, 15 bp, Homo sapiens
cagagactaagccct

SEQ ID NO: 1753406 - DNA, 15 bp, Homo sapiens
agagactaagccctt

SEQ ID NO: 1753407 - DNA, 15 bp, Homo sapiens
gagactaagcccttt

SEQ ID NO: 1753408 - DNA, 15 bp, Homo sapiens
agactaagcccttta

SEQ ID NO: 1753409 - DNA, 15 bp, Homo sapiens
gactaagccctttaa

SEQ ID NO: 1753410 - DNA, 15 bp, Homo sapiens
actaagccctttaac

SEQ ID NO: 1753411 - DNA, 15 bp, Homo sapiens
ctaagccctttaaca

SEQ ID NO: 1753412 - DNA, 15 bp, Homo sapiens
taagccctttaacac

SEQ ID NO: 1753413 - DNA, 15 bp, Homo sapiens
aagccctttaacaca

SEQ ID NO: 1753414 - DNA, 15 bp, Homo sapiens
agccctttaacacag

SEQ ID NO: 1753415 - DNA, 15 bp, Homo sapiens
gccctttaacacaga

SEQ ID NO: 1753416 - DNA, 15 bp, Homo sapiens
ccctttaacacagat

SEQ ID NO: 1753417 - DNA, 15 bp, Homo sapiens
cctttaacacagata

SEQ ID NO: 1753418 - DNA, 15 bp, Homo sapiens
ctttaacacagatag

SEQ ID NO: 1753419 - DNA, 15 bp, Homo sapiens
tttaacacagatagg

SEQ ID NO: 1753420 - DNA, 15 bp, Homo sapiens
ttaacacagataggt

SEQ ID NO: 1753421 - DNA, 15 bp, Homo sapiens
taacacagataggtt

SEQ ID NO: 1753422 - DNA, 15 bp, Homo sapiens
aacacagataggttg

SEQ ID NO: 1753423 - DNA, 15 bp, Homo sapiens
acacagataggttgg

SEQ ID NO: 1753424 - DNA, 15 bp, Homo sapiens
cacagataggttgga

SEQ ID NO: 1753425 - DNA, 15 bp, Homo sapiens
acagataggttggag

SEQ ID NO: 1753426 - DNA, 15 bp, Homo sapiens
cagataggttggaga

SEQ ID NO: 1753427 - DNA, 15 bp, Homo sapiens
agataggttggagac

SEQ ID NO: 1753428 - DNA, 15 bp, Homo sapiens
gataggttggagact

SEQ ID NO: 1753429 - DNA, 15 bp, Homo sapiens
ataggttggagactt

SEQ ID NO: 1753430 - DNA, 15 bp, Homo sapiens
taggttggagacttt

SEQ ID NO: 1753431 - DNA, 15 bp, Homo sapiens
aggttggagactttc

SEQ ID NO: 1753432 - DNA, 15 bp, Homo sapiens
ggttggagactttca

SEQ ID NO: 1753433 - DNA, 15 bp, Homo sapiens
gttggagactttcaa

SEQ ID NO: 1753434 - DNA, 15 bp, Homo sapiens
ttggagactttcaac

SEQ ID NO: 1753435 - DNA, 15 bp, Homo sapiens
tggagactttcaaca

SEQ ID NO: 1753436 - DNA, 15 bp, Homo sapiens
ggagactttcaacaa

SEQ ID NO: 1753437 - DNA, 15 bp, Homo sapiens
gagactttcaacaaa

SEQ ID NO: 1753438 - DNA, 15 bp, Homo sapiens
agactttcaacaaaa

SEQ ID NO: 1753439 - DNA, 15 bp, Homo sapiens
gactttcaacaaaaa

SEQ ID NO: 1753440 - DNA, 15 bp, Homo sapiens
actttcaacaaaaaa

SEQ ID NO: 1753441 - DNA, 15 bp, Homo sapiens
ctttcaacaaaaaag

SEQ ID NO: 1753442 - DNA, 15 bp, Homo sapiens
tttcaacaaaaaaga

SEQ ID NO: 1753443 - DNA, 15 bp, Homo sapiens
ttcaacaaaaaagag

SEQ ID NO: 1753444 - DNA, 15 bp, Homo sapiens
tcaacaaaaaagagc

SEQ ID NO: 1753445 - DNA, 15 bp, Homo sapiens
caacaaaaaagagcc

SEQ ID NO: 1753446 - DNA, 15 bp, Homo sapiens
aacaaaaaagagcct

SEQ ID NO: 1753447 - DNA, 15 bp, Homo sapiens
acaaaaaagagccta

SEQ ID NO: 1753448 - DNA, 15 bp, Homo sapiens
caaaaaagagcctat

SEQ ID NO: 1753449 - DNA, 15 bp, Homo sapiens
aaaaaagagcctatt

SEQ ID NO: 1753450 - DNA, 15 bp, Homo sapiens
aaaaagagcctattt

SEQ ID NO: 1753451 - DNA, 15 bp, Homo sapiens
aaaagagcctatttc

SEQ ID NO: 1753452 - DNA, 15 bp, Homo sapiens
aaagagcctatttcc

SEQ ID NO: 1753453 - DNA, 15 bp, Homo sapiens
aagagcctatttcca

SEQ ID NO: 1753454 - DNA, 15 bp, Homo sapiens
agagcctatttccaa

SEQ ID NO: 1753455 - DNA, 15 bp, Homo sapiens
gagcctatttccaat

SEQ ID NO: 1753456 - DNA, 15 bp, Homo sapiens
agcctatttccaata

SEQ ID NO: 1753457 - DNA, 15 bp, Homo sapiens
gcctatttccaatac

SEQ ID NO: 1753458 - DNA, 15 bp, Homo sapiens
cctatttccaatacc

SEQ ID NO: 1753459 - DNA, 15 bp, Homo sapiens
ctatttccaatacca

SEQ ID NO: 1753460 - DNA, 15 bp, Homo sapiens
tatttccaataccaa

SEQ ID NO: 1753461 - DNA, 15 bp, Homo sapiens
atttccaataccaaa

SEQ ID NO: 1753462 - DNA, 15 bp, Homo sapiens
tttccaataccaaag

SEQ ID NO: 1753463 - DNA, 15 bp, Homo sapiens
ttccaataccaaaga

SEQ ID NO: 1753464 - DNA, 15 bp, Homo sapiens
tccaataccaaagag

SEQ ID NO: 1753465 - DNA, 15 bp, Homo sapiens
ccaataccaaagagc

SEQ ID NO: 1753466 - DNA, 15 bp, Homo sapiens
caataccaaagagca

SEQ ID NO: 1753467 - DNA, 15 bp, Homo sapiens
aataccaaagagcaa

SEQ ID NO: 1753468 - DNA, 15 bp, Homo sapiens
ataccaaagagcaaa

SEQ ID NO: 1753469 - DNA, 15 bp, Homo sapiens
taccaaagagcaaaa

SEQ ID NO: 1753470 - DNA, 15 bp, Homo sapiens
accaaagagcaaaaa

SEQ ID NO: 1753471 - DNA, 15 bp, Homo sapiens
ccaaagagcaaaaaa

SEQ ID NO: 1753472 - DNA, 15 bp, Homo sapiens
caaagagcaaaaaat

SEQ ID NO: 1753473 - DNA, 15 bp, Homo sapiens
aaagagcaaaaaata

SEQ ID NO: 1753474 - DNA, 15 bp, Homo sapiens
aagagcaaaaaatac

SEQ ID NO: 1753475 - DNA, 15 bp, Homo sapiens
agagcaaaaaatact

SEQ ID NO: 1753476 - DNA, 15 bp, Homo sapiens
gagcaaaaaatactc

SEQ ID NO: 1753477 - DNA, 15 bp, Homo sapiens
agcaaaaaatactct

SEQ ID NO: 1753478 - DNA, 15 bp, Homo sapiens
gcaaaaaatactctg

SEQ ID NO: 1753479 - DNA, 15 bp, Homo sapiens
caaaaaatactctga

SEQ ID NO: 1753480 - DNA, 15 bp, Homo sapiens
aaaaaatactctgat

SEQ ID NO: 1753481 - DNA, 15 bp, Homo sapiens
aaaaatactctgata

SEQ ID NO: 1753482 - DNA, 15 bp, Homo sapiens
aaaatactctgataa

SEQ ID NO: 1753483 - DNA, 15 bp, Homo sapiens
aaatactctgataat

SEQ ID NO: 1753484 - DNA, 15 bp, Homo sapiens
aatactctgataatg

SEQ ID NO: 1753485 - DNA, 15 bp, Homo sapiens
atactctgataatgt

SEQ ID NO: 1753486 - DNA, 15 bp, Homo sapiens
tactctgataatgtg

SEQ ID NO: 1753487 - DNA, 15 bp, Homo sapiens
actctgataatgtgg

SEQ ID NO: 1753488 - DNA, 15 bp, Homo sapiens
ctctgataatgtggg

SEQ ID NO: 1753489 - DNA, 15 bp, Homo sapiens
tctgataatgtgggc

SEQ ID NO: 1753490 - DNA, 15 bp, Homo sapiens
ctgataatgtgggct

SEQ ID NO: 1753491 - DNA, 15 bp, Homo sapiens
tgataatgtgggctg

SEQ ID NO: 1753492 - DNA, 15 bp, Homo sapiens
gataatgtgggctgt

SEQ ID NO: 1753493 - DNA, 15 bp, Homo sapiens
ataatgtgggctgtt

SEQ ID NO: 1753494 - DNA, 15 bp, Homo sapiens
taatgtgggctgttt

SEQ ID NO: 1753495 - DNA, 15 bp, Homo sapiens
aatgtgggctgtttc

SEQ ID NO: 1753496 - DNA, 15 bp, Homo sapiens
atgtgggctgtttca

SEQ ID NO: 1753497 - DNA, 15 bp, Homo sapiens
tgtgggctgtttcaa

SEQ ID NO: 1753498 - DNA, 15 bp, Homo sapiens
gtgggctgtttcaaa

SEQ ID NO: 1753499 - DNA, 15 bp, Homo sapiens
tgggctgtttcaaag

SEQ ID NO: 1753500 - DNA, 15 bp, Homo sapiens
gggctgtttcaaagg

SEQ ID NO: 1753501 - DNA, 15 bp, Homo sapiens
ggctgtttcaaaggc

SEQ ID NO: 1753502 - DNA, 15 bp, Homo sapiens
gctgtttcaaaggcg

SEQ ID NO: 1753503 - DNA, 15 bp, Homo sapiens
ctgtttcaaaggcgt

SEQ ID NO: 1753504 - DNA, 15 bp, Homo sapiens
tgtttcaaaggcgtg

SEQ ID NO: 1753505 - DNA, 15 bp, Homo sapiens
gtttcaaaggcgtgg

SEQ ID NO: 1753506 - DNA, 15 bp, Homo sapiens
tttcaaaggcgtggc

SEQ ID NO: 1753507 - DNA, 15 bp, Homo sapiens
ttcaaaggcgtggct

SEQ ID NO: 1753508 - DNA, 15 bp, Homo sapiens
tcaaaggcgtggctg

SEQ ID NO: 1753509 - DNA, 15 bp, Homo sapiens
caaaggcgtggctgc

SEQ ID NO: 1753510 - DNA, 15 bp, Homo sapiens
aaaggcgtggctgct

SEQ ID NO: 1753511 - DNA, 15 bp, Homo sapiens
aaggcgtggctgctg

SEQ ID NO: 1753512 - DNA, 15 bp, Homo sapiens
aggcgtggctgctgt

SEQ ID NO: 1753513 - DNA, 15 bp, Homo sapiens
ggcgtggctgctgtc

SEQ ID NO: 1753514 - DNA, 15 bp, Homo sapiens
gcgtggctgctgtca

SEQ ID NO: 1753515 - DNA, 15 bp, Homo sapiens
cgtggctgctgtcag

SEQ ID NO: 1753516 - DNA, 15 bp, Homo sapiens
gtggctgctgtcagg

SEQ ID NO: 1753517 - DNA, 15 bp, Homo sapiens
tggctgctgtcaggt

SEQ ID NO: 1753518 - DNA, 15 bp, Homo sapiens
ggctgctgtcaggtc

SEQ ID NO: 1753519 - DNA, 15 bp, Homo sapiens
gctgctgtcaggtca

SEQ ID NO: 1753520 - DNA, 15 bp, Homo sapiens
ctgctgtcaggtcat

SEQ ID NO: 1753521 - DNA, 15 bp, Homo sapiens
tgctgtcaggtcata

SEQ ID NO: 1753522 - DNA, 15 bp, Homo sapiens
gctgtcaggtcatat

SEQ ID NO: 1753523 - DNA, 15 bp, Homo sapiens
ctgtcaggtcatata

SEQ ID NO: 1753524 - DNA, 15 bp, Homo sapiens
tgtcaggtcatatac

SEQ ID NO: 1753525 - DNA, 15 bp, Homo sapiens
gtcaggtcatataca

SEQ ID NO: 1753526 - DNA, 15 bp, Homo sapiens
tcaggtcatatacat

SEQ ID NO: 1753527 - DNA, 15 bp, Homo sapiens
caggtcatatacatt

SEQ ID NO: 1753528 - DNA, 15 bp, Homo sapiens
aggtcatatacatta

SEQ ID NO: 1753529 - DNA, 15 bp, Homo sapiens
ggtcatatacattac

SEQ ID NO: 1753530 - DNA, 15 bp, Homo sapiens
gtcatatacattaca

SEQ ID NO: 1753531 - DNA, 15 bp, Homo sapiens
tcatatacattacag

SEQ ID NO: 1753532 - DNA, 15 bp, Homo sapiens
catatacattacagc

SEQ ID NO: 1753533 - DNA, 15 bp, Homo sapiens
atatacattacagcc

SEQ ID NO: 1753534 - DNA, 15 bp, Homo sapiens
tatacattacagcct

SEQ ID NO: 1753535 - DNA, 15 bp, Homo sapiens
atacattacagcctc

SEQ ID NO: 1753536 - DNA, 15 bp, Homo sapiens
tacattacagcctct

SEQ ID NO: 1753537 - DNA, 15 bp, Homo sapiens
acattacagcctcta

SEQ ID NO: 1753538 - DNA, 15 bp, Homo sapiens
cattacagcctctaa

SEQ ID NO: 1753539 - DNA, 15 bp, Homo sapiens
attacagcctctaag

SEQ ID NO: 1753540 - DNA, 15 bp, Homo sapiens
ttacagcctctaaga

SEQ ID NO: 1753541 - DNA, 15 bp, Homo sapiens
tacagcctctaagat

SEQ ID NO: 1753542 - DNA, 15 bp, Homo sapiens
acagcctctaagatg

SEQ ID NO: 1753543 - DNA, 15 bp, Homo sapiens
cagcctctaagatgg

SEQ ID NO: 1753544 - DNA, 15 bp, Homo sapiens
agcctctaagatggc

SEQ ID NO: 1753545 - DNA, 15 bp, Homo sapiens
gcctctaagatggcc

SEQ ID NO: 1753546 - DNA, 15 bp, Homo sapiens
cctctaagatggccc

SEQ ID NO: 1753547 - DNA, 15 bp, Homo sapiens
ctctaagatggcccc

SEQ ID NO: 1753548 - DNA, 15 bp, Homo sapiens
tctaagatggccccc

SEQ ID NO: 1753549 - DNA, 15 bp, Homo sapiens
ctaagatggcccccg

SEQ ID NO: 1753550 - DNA, 15 bp, Homo sapiens
taagatggcccccgt

SEQ ID NO: 1753551 - DNA, 15 bp, Homo sapiens
aagatggcccccgtg

SEQ ID NO: 1753552 - DNA, 15 bp, Homo sapiens
agatggcccccgtga

SEQ ID NO: 1753553 - DNA, 15 bp, Homo sapiens
gatggcccccgtgat

SEQ ID NO: 1753554 - DNA, 15 bp, Homo sapiens
atggcccccgtgatt

SEQ ID NO: 1753555 - DNA, 15 bp, Homo sapiens
tggcccccgtgattc

SEQ ID NO: 1753556 - DNA, 15 bp, Homo sapiens
ggcccccgtgattcc

SEQ ID NO: 1753557 - DNA, 15 bp, Homo sapiens
gcccccgtgattcct

SEQ ID NO: 1753558 - DNA, 15 bp, Homo sapiens
cccccgtgattcctg

SEQ ID NO: 1753559 - DNA, 15 bp, Homo sapiens
ccccgtgattcctgc

SEQ ID NO: 1753560 - DNA, 15 bp, Homo sapiens
cccgtgattcctgcc

SEQ ID NO: 1753561 - DNA, 15 bp, Homo sapiens
ccgtgattcctgcct

SEQ ID NO: 1753562 - DNA, 15 bp, Homo sapiens
cgtgattcctgcctc

SEQ ID NO: 1753563 - DNA, 15 bp, Homo sapiens
gtgattcctgcctcc

SEQ ID NO: 1753564 - DNA, 15 bp, Homo sapiens
tgattcctgcctcct

SEQ ID NO: 1753565 - DNA, 15 bp, Homo sapiens
gattcctgcctcctg

SEQ ID NO: 1753566 - DNA, 15 bp, Homo sapiens
attcctgcctcctgc

SEQ ID NO: 1753567 - DNA, 15 bp, Homo sapiens
ttcctgcctcctgct

SEQ ID NO: 1753568 - DNA, 15 bp, Homo sapiens
tcctgcctcctgcta

SEQ ID NO: 1753569 - DNA, 15 bp, Homo sapiens
cctgcctcctgctat

SEQ ID NO: 1753570 - DNA, 15 bp, Homo sapiens
ctgcctcctgctatt

SEQ ID NO: 1753571 - DNA, 15 bp, Homo sapiens
tgcctcctgctattt

SEQ ID NO: 1753572 - DNA, 15 bp, Homo sapiens
gcctcctgctattta

SEQ ID NO: 1753573 - DNA, 15 bp, Homo sapiens
cctcctgctatttat

SEQ ID NO: 1753574 - DNA, 15 bp, Homo sapiens
ctcctgctatttatg

SEQ ID NO: 1753575 - DNA, 15 bp, Homo sapiens
tcctgctatttatgc

SEQ ID NO: 1753576 - DNA, 15 bp, Homo sapiens
cctgctatttatgct

SEQ ID NO: 1753577 - DNA, 15 bp, Homo sapiens
ctgctatttatgctc

SEQ ID NO: 1753578 - DNA, 15 bp, Homo sapiens
tgctatttatgctct

SEQ ID NO: 1753579 - DNA, 15 bp, Homo sapiens
gctatttatgctctg

SEQ ID NO: 1753580 - DNA, 15 bp, Homo sapiens
ctatttatgctctgc

SEQ ID NO: 1753581 - DNA, 15 bp, Homo sapiens
tatttatgctctgct

SEQ ID NO: 1753582 - DNA, 15 bp, Homo sapiens
atttatgctctgctg

SEQ ID NO: 1753583 - DNA, 15 bp, Homo sapiens
tttatgctctgctgt

SEQ ID NO: 1753584 - DNA, 15 bp, Homo sapiens
ttatgctctgctgta

SEQ ID NO: 1753585 - DNA, 15 bp, Homo sapiens
tatgctctgctgtaa

SEQ ID NO: 1753586 - DNA, 15 bp, Homo sapiens
atgctctgctgtaac

SEQ ID NO: 1753587 - DNA, 15 bp, Homo sapiens
tgctctgctgtaacc

SEQ ID NO: 1753588 - DNA, 15 bp, Homo sapiens
gctctgctgtaaccc

SEQ ID NO: 1753589 - DNA, 15 bp, Homo sapiens
ctctgctgtaacccc

SEQ ID NO: 1753590 - DNA, 15 bp, Homo sapiens
tctgctgtaacccct

SEQ ID NO: 1753591 - DNA, 15 bp, Homo sapiens
ctgctgtaacccctc

SEQ ID NO: 1753592 - DNA, 15 bp, Homo sapiens
tgctgtaacccctca

SEQ ID NO: 1753593 - DNA, 15 bp, Homo sapiens
gctgtaacccctcac

SEQ ID NO: 1753594 - DNA, 15 bp, Homo sapiens
ctgtaacccctcact

SEQ ID NO: 1753595 - DNA, 15 bp, Homo sapiens
tgtaacccctcactt

SEQ ID NO: 1753596 - DNA, 15 bp, Homo sapiens
gtaacccctcacttt

SEQ ID NO: 1753597 - DNA, 15 bp, Homo sapiens
taacccctcactttt

SEQ ID NO: 1753598 - DNA, 15 bp, Homo sapiens
aacccctcacttttg

SEQ ID NO: 1753599 - DNA, 15 bp, Homo sapiens
acccctcacttttga

SEQ ID NO: 1753600 - DNA, 15 bp, Homo sapiens
cccctcacttttgag

SEQ ID NO: 1753601 - DNA, 15 bp, Homo sapiens
ccctcacttttgagc

SEQ ID NO: 1753602 - DNA, 15 bp, Homo sapiens
cctcacttttgagcg

SEQ ID NO: 1753603 - DNA, 15 bp, Homo sapiens
ctcacttttgagcgc

SEQ ID NO: 1753604 - DNA, 15 bp, Homo sapiens
tcacttttgagcgca

SEQ ID NO: 1753605 - DNA, 15 bp, Homo sapiens
cacttttgagcgcag

SEQ ID NO: 1753606 - DNA, 15 bp, Homo sapiens
acttttgagcgcagg

SEQ ID NO: 1753607 - DNA, 15 bp, Homo sapiens
cttttgagcgcaggc

SEQ ID NO: 1753608 - DNA, 15 bp, Homo sapiens
ttttgagcgcaggct

SEQ ID NO: 1753609 - DNA, 15 bp, Homo sapiens
tttgagcgcaggcta

SEQ ID NO: 1753610 - DNA, 15 bp, Homo sapiens
ttgagcgcaggctag

SEQ ID NO: 1753611 - DNA, 15 bp, Homo sapiens
tgagcgcaggctaga

SEQ ID NO: 1753612 - DNA, 15 bp, Homo sapiens
gagcgcaggctagac

SEQ ID NO: 1753613 - DNA, 15 bp, Homo sapiens
agcgcaggctagaca

SEQ ID NO: 1753614 - DNA, 15 bp, Homo sapiens
gcgcaggctagacag

SEQ ID NO: 1753615 - DNA, 15 bp, Homo sapiens
cgcaggctagacagt

SEQ ID NO: 1753616 - DNA, 15 bp, Homo sapiens
gcaggctagacagtg

SEQ ID NO: 1753617 - DNA, 15 bp, Homo sapiens
caggctagacagtga

SEQ ID NO: 1753618 - DNA, 15 bp, Homo sapiens
aggctagacagtgac

SEQ ID NO: 1753619 - DNA, 15 bp, Homo sapiens
ggctagacagtgact

SEQ ID NO: 1753620 - DNA, 15 bp, Homo sapiens
gctagacagtgactt

SEQ ID NO: 1753621 - DNA, 15 bp, Homo sapiens
ctagacagtgacttg

SEQ ID NO: 1753622 - DNA, 15 bp, Homo sapiens
tagacagtgacttgc

SEQ ID NO: 1753623 - DNA, 15 bp, Homo sapiens
agacagtgacttgca

SEQ ID NO: 1753624 - DNA, 15 bp, Homo sapiens
gacagtgacttgcat

SEQ ID NO: 1753625 - DNA, 15 bp, Homo sapiens
acagtgacttgcatc

SEQ ID NO: 1753626 - DNA, 15 bp, Homo sapiens
cagtgacttgcatct

SEQ ID NO: 1753627 - DNA, 15 bp, Homo sapiens
agtgacttgcatcta

SEQ ID NO: 1753628 - DNA, 15 bp, Homo sapiens
gtgacttgcatctaa

SEQ ID NO: 1753629 - DNA, 15 bp, Homo sapiens
tgacttgcatctaat

SEQ ID NO: 1753630 - DNA, 15 bp, Homo sapiens
gacttgcatctaatg

SEQ ID NO: 1753631 - DNA, 15 bp, Homo sapiens
acttgcatctaatgg

SEQ ID NO: 1753632 - DNA, 15 bp, Homo sapiens
cttgcatctaatggg

SEQ ID NO: 1753633 - DNA, 15 bp, Homo sapiens
ttgcatctaatgggg

SEQ ID NO: 1753634 - DNA, 15 bp, Homo sapiens
tgcatctaatgggga

SEQ ID NO: 1753635 - DNA, 15 bp, Homo sapiens
gcatctaatggggag

SEQ ID NO: 1753636 - DNA, 15 bp, Homo sapiens
catctaatggggaga

SEQ ID NO: 1753637 - DNA, 15 bp, Homo sapiens
atctaatggggagag

SEQ ID NO: 1753638 - DNA, 15 bp, Homo sapiens
tctaatggggagagt

SEQ ID NO: 1753639 - DNA, 15 bp, Homo sapiens
ctaatggggagagta

SEQ ID NO: 1753640 - DNA, 15 bp, Homo sapiens
taatggggagagtac

SEQ ID NO: 1753641 - DNA, 15 bp, Homo sapiens
aatggggagagtaca

SEQ ID NO: 1753642 - DNA, 15 bp, Homo sapiens
atggggagagtacag

SEQ ID NO: 1753643 - DNA, 15 bp, Homo sapiens
tggggagagtacagc

SEQ ID NO: 1753644 - DNA, 15 bp, Homo sapiens
ggggagagtacagca

SEQ ID NO: 1753645 - DNA, 15 bp, Homo sapiens
gggagagtacagcac

SEQ ID NO: 1753646 - DNA, 15 bp, Homo sapiens
ggagagtacagcaca

SEQ ID NO: 1753647 - DNA, 15 bp, Homo sapiens
gagagtacagcacaa

SEQ ID NO: 1753648 - DNA, 15 bp, Homo sapiens
agagtacagcacaag

SEQ ID NO: 1753649 - DNA, 15 bp, Homo sapiens
gagtacagcacaagt

SEQ ID NO: 1753650 - DNA, 15 bp, Homo sapiens
agtacagcacaagtg

SEQ ID NO: 1753651 - DNA, 15 bp, Homo sapiens
gtacagcacaagtga

SEQ ID NO: 1753652 - DNA, 15 bp, Homo sapiens
tacagcacaagtgat

SEQ ID NO: 1753653 - DNA, 15 bp, Homo sapiens
acagcacaagtgatg

SEQ ID NO: 1753654 - DNA, 15 bp, Homo sapiens
cagcacaagtgatgg

SEQ ID NO: 1753655 - DNA, 15 bp, Homo sapiens
agcacaagtgatggg

SEQ ID NO: 1753656 - DNA, 15 bp, Homo sapiens
gcacaagtgatggga

SEQ ID NO: 1753657 - DNA, 15 bp, Homo sapiens
cacaagtgatgggat

SEQ ID NO: 1753658 - DNA, 15 bp, Homo sapiens
acaagtgatgggata

SEQ ID NO: 1753659 - DNA, 15 bp, Homo sapiens
caagtgatgggatat

SEQ ID NO: 1753660 - DNA, 15 bp, Homo sapiens
aagtgatgggatatc

SEQ ID NO: 1753661 - DNA, 15 bp, Homo sapiens
agtgatgggatatca

SEQ ID NO: 1753662 - DNA, 15 bp, Homo sapiens
gtgatgggatatcac

SEQ ID NO: 1753663 - DNA, 15 bp, Homo sapiens
tgatgggatatcaca

SEQ ID NO: 1753664 - DNA, 15 bp, Homo sapiens
gatgggatatcacat

SEQ ID NO: 1753665 - DNA, 15 bp, Homo sapiens
atgggatatcacatc

SEQ ID NO: 1753666 - DNA, 15 bp, Homo sapiens
tgggatatcacatct

SEQ ID NO: 1753667 - DNA, 15 bp, Homo sapiens
gggatatcacatctg

SEQ ID NO: 1753668 - DNA, 15 bp, Homo sapiens
ggatatcacatctgc

SEQ ID NO: 1753669 - DNA, 15 bp, Homo sapiens
gatatcacatctgca

SEQ ID NO: 1753670 - DNA, 15 bp, Homo sapiens
atatcacatctgcaa

SEQ ID NO: 1753671 - DNA, 15 bp, Homo sapiens
tatcacatctgcaat

SEQ ID NO: 1753672 - DNA, 15 bp, Homo sapiens
atcacatctgcaatt

SEQ ID NO: 1753673 - DNA, 15 bp, Homo sapiens
tcacatctgcaatta

SEQ ID NO: 1753674 - DNA, 15 bp, Homo sapiens
cacatctgcaattag

SEQ ID NO: 1753675 - DNA, 15 bp, Homo sapiens
acatctgcaattagg

SEQ ID NO: 1753676 - DNA, 15 bp, Homo sapiens
catctgcaattaggt

SEQ ID NO: 1753677 - DNA, 15 bp, Homo sapiens
atctgcaattaggtt

SEQ ID NO: 1753678 - DNA, 15 bp, Homo sapiens
tctgcaattaggtta

SEQ ID NO: 1753679 - DNA, 15 bp, Homo sapiens
ctgcaattaggttac

SEQ ID NO: 1753680 - DNA, 15 bp, Homo sapiens
tgcaattaggttaca

SEQ ID NO: 1753681 - DNA, 15 bp, Homo sapiens
gcaattaggttacaa

SEQ ID NO: 1753682 - DNA, 15 bp, Homo sapiens
caattaggttacaaa

SEQ ID NO: 1753683 - DNA, 15 bp, Homo sapiens
aattaggttacaaag

SEQ ID NO: 1753684 - DNA, 15 bp, Homo sapiens
attaggttacaaaga

SEQ ID NO: 1753685 - DNA, 15 bp, Homo sapiens
ttaggttacaaagag

SEQ ID NO: 1753686 - DNA, 15 bp, Homo sapiens
taggttacaaagaga

SEQ ID NO: 1753687 - DNA, 15 bp, Homo sapiens
aggttacaaagagag

SEQ ID NO: 1753688 - DNA, 15 bp, Homo sapiens
ggttacaaagagagc

SEQ ID NO: 1753689 - DNA, 15 bp, Homo sapiens
gttacaaagagagct

SEQ ID NO: 1753690 - DNA, 15 bp, Homo sapiens
ttacaaagagagctc

SEQ ID NO: 1753691 - DNA, 15 bp, Homo sapiens
tacaaagagagctct

SEQ ID NO: 1753692 - DNA, 15 bp, Homo sapiens
acaaagagagctctc

SEQ ID NO: 1753693 - DNA, 15 bp, Homo sapiens
caaagagagctctct

SEQ ID NO: 1753694 - DNA, 15 bp, Homo sapiens
aaagagagctctctc

SEQ ID NO: 1753695 - DNA, 15 bp, Homo sapiens
aagagagctctctct

SEQ ID NO: 1753696 - DNA, 15 bp, Homo sapiens
agagagctctctctt

SEQ ID NO: 1753697 - DNA, 15 bp, Homo sapiens
gagagctctctcttg

SEQ ID NO: 1753698 - DNA, 15 bp, Homo sapiens
agagctctctcttgt

SEQ ID NO: 1753699 - DNA, 15 bp, Homo sapiens
gagctctctcttgtt

SEQ ID NO: 1753700 - DNA, 15 bp, Homo sapiens
agctctctcttgttc

SEQ ID NO: 1753701 - DNA, 15 bp, Homo sapiens
gctctctcttgttct

SEQ ID NO: 1753702 - DNA, 15 bp, Homo sapiens
ctctctcttgttctc

SEQ ID NO: 1753703 - DNA, 15 bp, Homo sapiens
tctctcttgttctct

SEQ ID NO: 1753704 - DNA, 15 bp, Homo sapiens
ctctcttgttctctt

SEQ ID NO: 1753705 - DNA, 15 bp, Homo sapiens
tctcttgttctctta

SEQ ID NO: 1753706 - DNA, 15 bp, Homo sapiens
ctcttgttctcttat

SEQ ID NO: 1753707 - DNA, 15 bp, Homo sapiens
tcttgttctcttatt

SEQ ID NO: 1753708 - DNA, 15 bp, Homo sapiens
cttgttctcttattt

SEQ ID NO: 1753709 - DNA, 15 bp, Homo sapiens
ttgttctcttatttc

SEQ ID NO: 1753710 - DNA, 15 bp, Homo sapiens
tgttctcttatttct

SEQ ID NO: 1753711 - DNA, 15 bp, Homo sapiens
gttctcttatttctc

SEQ ID NO: 1753712 - DNA, 15 bp, Homo sapiens
ttctcttatttctca

SEQ ID NO: 1753713 - DNA, 15 bp, Homo sapiens
tctcttatttctcat

SEQ ID NO: 1753714 - DNA, 15 bp, Homo sapiens
ctcttatttctcatc

SEQ ID NO: 1753715 - DNA, 15 bp, Homo sapiens
tcttatttctcatct

SEQ ID NO: 1753716 - DNA, 15 bp, Homo sapiens
cttatttctcatctg

SEQ ID NO: 1753717 - DNA, 15 bp, Homo sapiens
ttatttctcatctga

SEQ ID NO: 1753718 - DNA, 15 bp, Homo sapiens
tatttctcatctgaa

SEQ ID NO: 1753719 - DNA, 15 bp, Homo sapiens
atttctcatctgaag

SEQ ID NO: 1753720 - DNA, 15 bp, Homo sapiens
tttctcatctgaaga

SEQ ID NO: 1753721 - DNA, 15 bp, Homo sapiens
ttctcatctgaagaa

SEQ ID NO: 1753722 - DNA, 15 bp, Homo sapiens
tctcatctgaagaaa

SEQ ID NO: 1753723 - DNA, 15 bp, Homo sapiens
ctcatctgaagaaag

SEQ ID NO: 1753724 - DNA, 15 bp, Homo sapiens
tcatctgaagaaagc

SEQ ID NO: 1753725 - DNA, 15 bp, Homo sapiens
catctgaagaaagcc

SEQ ID NO: 1753726 - DNA, 15 bp, Homo sapiens
atctgaagaaagcca

SEQ ID NO: 1753727 - DNA, 15 bp, Homo sapiens
tctgaagaaagccag

SEQ ID NO: 1753728 - DNA, 15 bp, Homo sapiens
ctgaagaaagccagc

SEQ ID NO: 1753729 - DNA, 15 bp, Homo sapiens
tgaagaaagccagct

SEQ ID NO: 1753730 - DNA, 15 bp, Homo sapiens
gaagaaagccagctg

SEQ ID NO: 1753731 - DNA, 15 bp, Homo sapiens
aagaaagccagctgc

SEQ ID NO: 1753732 - DNA, 15 bp, Homo sapiens
agaaagccagctgcc

SEQ ID NO: 1753733 - DNA, 15 bp, Homo sapiens
gaaagccagctgcca

SEQ ID NO: 1753734 - DNA, 15 bp, Homo sapiens
aaagccagctgccat

SEQ ID NO: 1753735 - DNA, 15 bp, Homo sapiens
aagccagctgccatg

SEQ ID NO: 1753736 - DNA, 15 bp, Homo sapiens
agccagctgccatgc

SEQ ID NO: 1753737 - DNA, 15 bp, Homo sapiens
gccagctgccatgct

SEQ ID NO: 1753738 - DNA, 15 bp, Homo sapiens
ccagctgccatgctg

SEQ ID NO: 1753739 - DNA, 15 bp, Homo sapiens
cagctgccatgctga

SEQ ID NO: 1753740 - DNA, 15 bp, Homo sapiens
agctgccatgctgag

SEQ ID NO: 1753741 - DNA, 15 bp, Homo sapiens
gctgccatgctgagg

SEQ ID NO: 1753742 - DNA, 15 bp, Homo sapiens
ctgccatgctgaggg

SEQ ID NO: 1753743 - DNA, 15 bp, Homo sapiens
tgccatgctgagggc

SEQ ID NO: 1753744 - DNA, 15 bp, Homo sapiens
gccatgctgagggct

SEQ ID NO: 1753745 - DNA, 15 bp, Homo sapiens
ccatgctgagggctg

SEQ ID NO: 1753746 - DNA, 15 bp, Homo sapiens
catgctgagggctgc

SEQ ID NO: 1753747 - DNA, 15 bp, Homo sapiens
atgctgagggctgcc

SEQ ID NO: 1753748 - DNA, 15 bp, Homo sapiens
tgctgagggctgccc

SEQ ID NO: 1753749 - DNA, 15 bp, Homo sapiens
gctgagggctgcccg

SEQ ID NO: 1753750 - DNA, 15 bp, Homo sapiens
ctgagggctgcccga

SEQ ID NO: 1753751 - DNA, 15 bp, Homo sapiens
tgagggctgcccgat

SEQ ID NO: 1753752 - DNA, 15 bp, Homo sapiens
gagggctgcccgatg

SEQ ID NO: 1753753 - DNA, 15 bp, Homo sapiens
agggctgcccgatgg

SEQ ID NO: 1753754 - DNA, 15 bp, Homo sapiens
gggctgcccgatgga

SEQ ID NO: 1753755 - DNA, 15 bp, Homo sapiens
ggctgcccgatggag

SEQ ID NO: 1753756 - DNA, 15 bp, Homo sapiens
gctgcccgatggaga

SEQ ID NO: 1753757 - DNA, 15 bp, Homo sapiens
ctgcccgatggagag

SEQ ID NO: 1753758 - DNA, 15 bp, Homo sapiens
tgcccgatggagagg

SEQ ID NO: 1753759 - DNA, 15 bp, Homo sapiens
gcccgatggagaggc

SEQ ID NO: 1753760 - DNA, 15 bp, Homo sapiens
cccgatggagaggcc

SEQ ID NO: 1753761 - DNA, 15 bp, Homo sapiens
ccgatggagaggccc

SEQ ID NO: 1753762 - DNA, 15 bp, Homo sapiens
cgatggagaggccct

SEQ ID NO: 1753763 - DNA, 15 bp, Homo sapiens
gatggagaggcccta

SEQ ID NO: 1753764 - DNA, 15 bp, Homo sapiens
atggagaggccctag

SEQ ID NO: 1753765 - DNA, 15 bp, Homo sapiens
tggagaggccctagc

SEQ ID NO: 1753766 - DNA, 15 bp, Homo sapiens
ggagaggccctagcg

SEQ ID NO: 1753767 - DNA, 15 bp, Homo sapiens
gagaggccctagcgg

SEQ ID NO: 1753768 - DNA, 15 bp, Homo sapiens
agaggccctagcggc

SEQ ID NO: 1753769 - DNA, 15 bp, Homo sapiens
gaggccctagcggca

SEQ ID NO: 1753770 - DNA, 15 bp, Homo sapiens
aggccctagcggcag

SEQ ID NO: 1753771 - DNA, 15 bp, Homo sapiens
ggccctagcggcaga

SEQ ID NO: 1753772 - DNA, 15 bp, Homo sapiens
gccctagcggcagaa

SEQ ID NO: 1753773 - DNA, 15 bp, Homo sapiens
ccctagcggcagaaa

SEQ ID NO: 1753774 - DNA, 15 bp, Homo sapiens
cctagcggcagaaaa

SEQ ID NO: 1753775 - DNA, 15 bp, Homo sapiens
ctagcggcagaaaac

SEQ ID NO: 1753776 - DNA, 15 bp, Homo sapiens
tagcggcagaaaact

SEQ ID NO: 1753777 - DNA, 15 bp, Homo sapiens
agcggcagaaaactg

SEQ ID NO: 1753778 - DNA, 15 bp, Homo sapiens
gcggcagaaaactga

SEQ ID NO: 1753779 - DNA, 15 bp, Homo sapiens
cggcagaaaactgag

SEQ ID NO: 1753780 - DNA, 15 bp, Homo sapiens
ggcagaaaactgagg

SEQ ID NO: 1753781 - DNA, 15 bp, Homo sapiens
gcagaaaactgaggg

SEQ ID NO: 1753782 - DNA, 15 bp, Homo sapiens
cagaaaactgagggt

SEQ ID NO: 1753783 - DNA, 15 bp, Homo sapiens
agaaaactgagggtg

SEQ ID NO: 1753784 - DNA, 15 bp, Homo sapiens
gaaaactgagggtga

SEQ ID NO: 1753785 - DNA, 15 bp, Homo sapiens
aaaactgagggtgac

SEQ ID NO: 1753786 - DNA, 15 bp, Homo sapiens
aaactgagggtgacc

SEQ ID NO: 1753787 - DNA, 15 bp, Homo sapiens
aactgagggtgaccc

SEQ ID NO: 1753788 - DNA, 15 bp, Homo sapiens
actgagggtgaccct

SEQ ID NO: 1753789 - DNA, 15 bp, Homo sapiens
ctgagggtgaccctc

SEQ ID NO: 1753790 - DNA, 15 bp, Homo sapiens
tgagggtgaccctct

SEQ ID NO: 1753791 - DNA, 15 bp, Homo sapiens
gagggtgaccctctg

SEQ ID NO: 1753792 - DNA, 15 bp, Homo sapiens
agggtgaccctctgg

SEQ ID NO: 1753793 - DNA, 15 bp, Homo sapiens
gggtgaccctctgga

SEQ ID NO: 1753794 - DNA, 15 bp, Homo sapiens
ggtgaccctctggac

SEQ ID NO: 1753795 - DNA, 15 bp, Homo sapiens
gtgaccctctggaca

SEQ ID NO: 1753796 - DNA, 15 bp, Homo sapiens
tgaccctctggacaa

SEQ ID NO: 1753797 - DNA, 15 bp, Homo sapiens
gaccctctggacaac

SEQ ID NO: 1753798 - DNA, 15 bp, Homo sapiens
accctctggacaaca

SEQ ID NO: 1753799 - DNA, 15 bp, Homo sapiens
ccctctggacaacag

SEQ ID NO: 1753800 - DNA, 15 bp, Homo sapiens
cctctggacaacagc

SEQ ID NO: 1753801 - DNA, 15 bp, Homo sapiens
ctctggacaacagct

SEQ ID NO: 1753802 - DNA, 15 bp, Homo sapiens
tctggacaacagcta

SEQ ID NO: 1753803 - DNA, 15 bp, Homo sapiens
ctggacaacagctag

SEQ ID NO: 1753804 - DNA, 15 bp, Homo sapiens
tggacaacagctagg

SEQ ID NO: 1753805 - DNA, 15 bp, Homo sapiens
ggacaacagctaggg

SEQ ID NO: 1753806 - DNA, 15 bp, Homo sapiens
gacaacagctaggga

SEQ ID NO: 1753807 - DNA, 15 bp, Homo sapiens
acaacagctagggag

SEQ ID NO: 1753808 - DNA, 15 bp, Homo sapiens
caacagctagggagg

SEQ ID NO: 1753809 - DNA, 15 bp, Homo sapiens
aacagctagggagga

SEQ ID NO: 1753810 - DNA, 15 bp, Homo sapiens
acagctagggaggaa

SEQ ID NO: 1753811 - DNA, 15 bp, Homo sapiens
cagctagggaggaac

SEQ ID NO: 1753812 - DNA, 15 bp, Homo sapiens
agctagggaggaact

SEQ ID NO: 1753813 - DNA, 15 bp, Homo sapiens
gctagggaggaactg

SEQ ID NO: 1753814 - DNA, 15 bp, Homo sapiens
ctagggaggaactga

SEQ ID NO: 1753815 - DNA, 15 bp, Homo sapiens
tagggaggaactgaa

SEQ ID NO: 1753816 - DNA, 15 bp, Homo sapiens
agggaggaactgaat

SEQ ID NO: 1753817 - DNA, 15 bp, Homo sapiens
gggaggaactgaatg

SEQ ID NO: 1753818 - DNA, 15 bp, Homo sapiens
ggaggaactgaatgc

SEQ ID NO: 1753819 - DNA, 15 bp, Homo sapiens
gaggaactgaatgct

SEQ ID NO: 1753820 - DNA, 15 bp, Homo sapiens
aggaactgaatgcta

SEQ ID NO: 1753821 - DNA, 15 bp, Homo sapiens
ggaactgaatgctac

SEQ ID NO: 1753822 - DNA, 15 bp, Homo sapiens
gaactgaatgctact

SEQ ID NO: 1753823 - DNA, 15 bp, Homo sapiens
aactgaatgctacta

SEQ ID NO: 1753824 - DNA, 15 bp, Homo sapiens
actgaatgctactag

SEQ ID NO: 1753825 - DNA, 15 bp, Homo sapiens
ctgaatgctactagt

SEQ ID NO: 1753826 - DNA, 15 bp, Homo sapiens
tgaatgctactagtt

SEQ ID NO: 1753827 - DNA, 15 bp, Homo sapiens
gaatgctactagttc

SEQ ID NO: 1753828 - DNA, 15 bp, Homo sapiens
aatgctactagttcc

SEQ ID NO: 1753829 - DNA, 15 bp, Homo sapiens
atgctactagttccc

SEQ ID NO: 1753830 - DNA, 15 bp, Homo sapiens
tgctactagttcccg

SEQ ID NO: 1753831 - DNA, 15 bp, Homo sapiens
gctactagttcccgt

SEQ ID NO: 1753832 - DNA, 15 bp, Homo sapiens
ctactagttcccgtg

SEQ ID NO: 1753833 - DNA, 15 bp, Homo sapiens
tactagttcccgtgg

SEQ ID NO: 1753834 - DNA, 15 bp, Homo sapiens
actagttcccgtggg

SEQ ID NO: 1753835 - DNA, 15 bp, Homo sapiens
ctagttcccgtgggt

SEQ ID NO: 1753836 - DNA, 15 bp, Homo sapiens
tagttcccgtgggtg

SEQ ID NO: 1753837 - DNA, 15 bp, Homo sapiens
agttcccgtgggtga

SEQ ID NO: 1753838 - DNA, 15 bp, Homo sapiens
gttcccgtgggtgag

SEQ ID NO: 1753839 - DNA, 15 bp, Homo sapiens
ttcccgtgggtgagc

SEQ ID NO: 1753840 - DNA, 15 bp, Homo sapiens
tcccgtgggtgagct

SEQ ID NO: 1753841 - DNA, 15 bp, Homo sapiens
cccgtgggtgagctg

SEQ ID NO: 1753842 - DNA, 15 bp, Homo sapiens
ccgtgggtgagctga

SEQ ID NO: 1753843 - DNA, 15 bp, Homo sapiens
cgtgggtgagctgag

SEQ ID NO: 1753844 - DNA, 15 bp, Homo sapiens
gtgggtgagctgaga

SEQ ID NO: 1753845 - DNA, 15 bp, Homo sapiens
tgggtgagctgagaa

SEQ ID NO: 1753846 - DNA, 15 bp, Homo sapiens
gggtgagctgagaag

SEQ ID NO: 1753847 - DNA, 15 bp, Homo sapiens
ggtgagctgagaagt

SEQ ID NO: 1753848 - DNA, 15 bp, Homo sapiens
gtgagctgagaagtg

SEQ ID NO: 1753849 - DNA, 15 bp, Homo sapiens
tgagctgagaagtgg

SEQ ID NO: 1753850 - DNA, 15 bp, Homo sapiens
gagctgagaagtgga

SEQ ID NO: 1753851 - DNA, 15 bp, Homo sapiens
agctgagaagtggac

SEQ ID NO: 1753852 - DNA, 15 bp, Homo sapiens
gctgagaagtggacc

SEQ ID NO: 1753853 - DNA, 15 bp, Homo sapiens
ctgagaagtggacct

SEQ ID NO: 1753854 - DNA, 15 bp, Homo sapiens
tgagaagtggaccta

SEQ ID NO: 1753855 - DNA, 15 bp, Homo sapiens
gagaagtggacctac

SEQ ID NO: 1753856 - DNA, 15 bp, Homo sapiens
agaagtggacctacc

SEQ ID NO: 1753857 - DNA, 15 bp, Homo sapiens
gaagtggacctaccc

SEQ ID NO: 1753858 - DNA, 15 bp, Homo sapiens
aagtggacctaccct

SEQ ID NO: 1753859 - DNA, 15 bp, Homo sapiens
agtggacctaccctc

SEQ ID NO: 1753860 - DNA, 15 bp, Homo sapiens
gtggacctaccctca

SEQ ID NO: 1753861 - DNA, 15 bp, Homo sapiens
tggacctaccctcag

SEQ ID NO: 1753862 - DNA, 15 bp, Homo sapiens
ggacctaccctcagg

SEQ ID NO: 1753863 - DNA, 15 bp, Homo sapiens
gacctaccctcagga

SEQ ID NO: 1753864 - DNA, 15 bp, Homo sapiens
acctaccctcaggag

SEQ ID NO: 1753865 - DNA, 15 bp, Homo sapiens
cctaccctcaggaga

SEQ ID NO: 1753866 - DNA, 15 bp, Homo sapiens
ctaccctcaggagag

SEQ ID NO: 1753867 - DNA, 15 bp, Homo sapiens
taccctcaggagagc

SEQ ID NO: 1753868 - DNA, 15 bp, Homo sapiens
accctcaggagagca

SEQ ID NO: 1753869 - DNA, 15 bp, Homo sapiens
ccctcaggagagcag

SEQ ID NO: 1753870 - DNA, 15 bp, Homo sapiens
cctcaggagagcaga

SEQ ID NO: 1753871 - DNA, 15 bp, Homo sapiens
ctcaggagagcagat

SEQ ID NO: 1753872 - DNA, 15 bp, Homo sapiens
tcaggagagcagatg

SEQ ID NO: 1753873 - DNA, 15 bp, Homo sapiens
caggagagcagatga

SEQ ID NO: 1753874 - DNA, 15 bp, Homo sapiens
aggagagcagatgaa

SEQ ID NO: 1753875 - DNA, 15 bp, Homo sapiens
ggagagcagatgaaa

SEQ ID NO: 1753876 - DNA, 15 bp, Homo sapiens
gagagcagatgaaaa

SEQ ID NO: 1753877 - DNA, 15 bp, Homo sapiens
agagcagatgaaaac

SEQ ID NO: 1753878 - DNA, 15 bp, Homo sapiens
gagcagatgaaaaca

SEQ ID NO: 1753879 - DNA, 15 bp, Homo sapiens
gcagatgaaaacagc

SEQ ID NO: 1753880 - DNA, 15 bp, Homo sapiens
cagatgaaaacagcc

SEQ ID NO: 1753881 - DNA, 15 bp, Homo sapiens
agatgaaaacagcct

SEQ ID NO: 1753882 - DNA, 15 bp, Homo sapiens
gatgaaaacagcctt

SEQ ID NO: 1753883 - DNA, 15 bp, Homo sapiens
atgaaaacagccttg

SEQ ID NO: 1753884 - DNA, 15 bp, Homo sapiens
tgaaaacagccttgg

SEQ ID NO: 1753885 - DNA, 15 bp, Homo sapiens
gaaaacagccttggc

SEQ ID NO: 1753886 - DNA, 15 bp, Homo sapiens
aaaacagccttggct

SEQ ID NO: 1753887 - DNA, 15 bp, Homo sapiens
aaacagccttggctg

SEQ ID NO: 1753888 - DNA, 15 bp, Homo sapiens
aacagccttggctga

SEQ ID NO: 1753889 - DNA, 15 bp, Homo sapiens
acagccttggctgat

SEQ ID NO: 1753890 - DNA, 15 bp, Homo sapiens
cagccttggctgata

SEQ ID NO: 1753891 - DNA, 15 bp, Homo sapiens
agccttggctgatac

SEQ ID NO: 1753892 - DNA, 15 bp, Homo sapiens
gccttggctgatact

SEQ ID NO: 1753893 - DNA, 15 bp, Homo sapiens
ccttggctgatactg

SEQ ID NO: 1753894 - DNA, 15 bp, Homo sapiens
cttggctgatactga

SEQ ID NO: 1753895 - DNA, 15 bp, Homo sapiens
ttggctgatactgac

SEQ ID NO: 1753896 - DNA, 15 bp, Homo sapiens
tggctgatactgact

SEQ ID NO: 1753897 - DNA, 15 bp, Homo sapiens
ggctgatactgacta

SEQ ID NO: 1753898 - DNA, 15 bp, Homo sapiens
gctgatactgactac

SEQ ID NO: 1753899 - DNA, 15 bp, Homo sapiens
ctgatactgactaca

SEQ ID NO: 1753900 - DNA, 15 bp, Homo sapiens
tgatactgactacaa

SEQ ID NO: 1753901 - DNA, 15 bp, Homo sapiens
gatactgactacaac

SEQ ID NO: 1753902 - DNA, 15 bp, Homo sapiens
atactgactacaacc

SEQ ID NO: 1753903 - DNA, 15 bp, Homo sapiens
tactgactacaacct

SEQ ID NO: 1753904 - DNA, 15 bp, Homo sapiens
actgactacaacctc

SEQ ID NO: 1753905 - DNA, 15 bp, Homo sapiens
ctgactacaacctca

SEQ ID NO: 1753906 - DNA, 15 bp, Homo sapiens
tgactacaacctcat

SEQ ID NO: 1753907 - DNA, 15 bp, Homo sapiens
gactacaacctcatg

SEQ ID NO: 1753908 - DNA, 15 bp, Homo sapiens
actacaacctcatga

SEQ ID NO: 1753909 - DNA, 15 bp, Homo sapiens
ctacaacctcatgaa

SEQ ID NO: 1753910 - DNA, 15 bp, Homo sapiens
tacaacctcatgaaa

SEQ ID NO: 1753911 - DNA, 15 bp, Homo sapiens
acaacctcatgaaaa

SEQ ID NO: 1753912 - DNA, 15 bp, Homo sapiens
caacctcatgaaaaa

SEQ ID NO: 1753913 - DNA, 15 bp, Homo sapiens
aacctcatgaaaaac

SEQ ID NO: 1753914 - DNA, 15 bp, Homo sapiens
acctcatgaaaaacc

SEQ ID NO: 1753915 - DNA, 15 bp, Homo sapiens
cctcatgaaaaacct

SEQ ID NO: 1753916 - DNA, 15 bp, Homo sapiens
ctcatgaaaaacctt

SEQ ID NO: 1753917 - DNA, 15 bp, Homo sapiens
tcatgaaaaaccttt

SEQ ID NO: 1753918 - DNA, 15 bp, Homo sapiens
catgaaaaaccttta

SEQ ID NO: 1753919 - DNA, 15 bp, Homo sapiens
atgaaaaacctttat

SEQ ID NO: 1753920 - DNA, 15 bp, Homo sapiens
tgaaaaacctttatt

SEQ ID NO: 1753921 - DNA, 15 bp, Homo sapiens
gaaaaacctttatta

SEQ ID NO: 1753922 - DNA, 15 bp, Homo sapiens
aaaaacctttattaa

SEQ ID NO: 1753923 - DNA, 15 bp, Homo sapiens
aaaacctttattaag

SEQ ID NO: 1753924 - DNA, 15 bp, Homo sapiens
aaacctttattaagt

SEQ ID NO: 1753925 - DNA, 15 bp, Homo sapiens
aacctttattaagtc

SEQ ID NO: 1753926 - DNA, 15 bp, Homo sapiens
acctttattaagtca

SEQ ID NO: 1753927 - DNA, 15 bp, Homo sapiens
cctttattaagtcag

SEQ ID NO: 1753928 - DNA, 15 bp, Homo sapiens
ctttattaagtcaga

SEQ ID NO: 1753929 - DNA, 15 bp, Homo sapiens
tttattaagtcagag

SEQ ID NO: 1753930 - DNA, 15 bp, Homo sapiens
ttattaagtcagagt

SEQ ID NO: 1753931 - DNA, 15 bp, Homo sapiens
tattaagtcagagtt

SEQ ID NO: 1753932 - DNA, 15 bp, Homo sapiens
attaagtcagagtta

SEQ ID NO: 1753933 - DNA, 15 bp, Homo sapiens
ttaagtcagagttac

SEQ ID NO: 1753934 - DNA, 15 bp, Homo sapiens
taagtcagagttact

SEQ ID NO: 1753935 - DNA, 15 bp, Homo sapiens
aagtcagagttactc

SEQ ID NO: 1753936 - DNA, 15 bp, Homo sapiens
agtcagagttactca

SEQ ID NO: 1753937 - DNA, 15 bp, Homo sapiens
gtcagagttactcaa

SEQ ID NO: 1753938 - DNA, 15 bp, Homo sapiens
tcagagttactcaac

SEQ ID NO: 1753939 - DNA, 15 bp, Homo sapiens
cagagttactcaact

SEQ ID NO: 1753940 - DNA, 15 bp, Homo sapiens
agagttactcaacta

SEQ ID NO: 1753941 - DNA, 15 bp, Homo sapiens
gagttactcaactaa

SEQ ID NO: 1753942 - DNA, 15 bp, Homo sapiens
agttactcaactaag

SEQ ID NO: 1753943 - DNA, 15 bp, Homo sapiens
gttactcaactaagc

SEQ ID NO: 1753944 - DNA, 15 bp, Homo sapiens
ttactcaactaagct

SEQ ID NO: 1753945 - DNA, 15 bp, Homo sapiens
tactcaactaagctg

SEQ ID NO: 1753946 - DNA, 15 bp, Homo sapiens
actcaactaagctgc

SEQ ID NO: 1753947 - DNA, 15 bp, Homo sapiens
ctcaactaagctgca

SEQ ID NO: 1753948 - DNA, 15 bp, Homo sapiens
tcaactaagctgcat

SEQ ID NO: 1753949 - DNA, 15 bp, Homo sapiens
caactaagctgcatc

SEQ ID NO: 1753950 - DNA, 15 bp, Homo sapiens
aactaagctgcatca

SEQ ID NO: 1753951 - DNA, 15 bp, Homo sapiens
actaagctgcatcac

SEQ ID NO: 1753952 - DNA, 15 bp, Homo sapiens
ctaagctgcatcaca

SEQ ID NO: 1753953 - DNA, 15 bp, Homo sapiens
taagctgcatcacaa

SEQ ID NO: 1753954 - DNA, 15 bp, Homo sapiens
aagctgcatcacaaa

SEQ ID NO: 1753955 - DNA, 15 bp, Homo sapiens
agctgcatcacaaaa

SEQ ID NO: 1753956 - DNA, 15 bp, Homo sapiens
gctgcatcacaaaaa

SEQ ID NO: 1753957 - DNA, 15 bp, Homo sapiens
ctgcatcacaaaaaa

SEQ ID NO: 1753958 - DNA, 15 bp, Homo sapiens
tgcatcacaaaaaat

SEQ ID NO: 1753959 - DNA, 15 bp, Homo sapiens
gcatcacaaaaaatg

SEQ ID NO: 1753960 - DNA, 15 bp, Homo sapiens
catcacaaaaaatga

SEQ ID NO: 1753961 - DNA, 15 bp, Homo sapiens
atcacaaaaaatgac

SEQ ID NO: 1753962 - DNA, 15 bp, Homo sapiens
tcacaaaaaatgacc

SEQ ID NO: 1753963 - DNA, 15 bp, Homo sapiens
cacaaaaaatgaccc

SEQ ID NO: 1753964 - DNA, 15 bp, Homo sapiens
acaaaaaatgaccca

SEQ ID NO: 1753965 - DNA, 15 bp, Homo sapiens
caaaaaatgacccac

SEQ ID NO: 1753966 - DNA, 15 bp, Homo sapiens
aaaaaatgacccaca

SEQ ID NO: 1753967 - DNA, 15 bp, Homo sapiens
aaaaatgacccacaa

SEQ ID NO: 1753968 - DNA, 15 bp, Homo sapiens
aaaatgacccacaaa

SEQ ID NO: 1753969 - DNA, 15 bp, Homo sapiens
aaatgacccacaaaa

SEQ ID NO: 1753970 - DNA, 15 bp, Homo sapiens
aatgacccacaaaat

SEQ ID NO: 1753971 - DNA, 15 bp, Homo sapiens
atgacccacaaaatt

SEQ ID NO: 1753972 - DNA, 15 bp, Homo sapiens
tgacccacaaaattg

SEQ ID NO: 1753973 - DNA, 15 bp, Homo sapiens
gacccacaaaattgt

SEQ ID NO: 1753974 - DNA, 15 bp, Homo sapiens
acccacaaaattgtg

SEQ ID NO: 1753975 - DNA, 15 bp, Homo sapiens
cccacaaaattgtga

SEQ ID NO: 1753976 - DNA, 15 bp, Homo sapiens
ccacaaaattgtgat

SEQ ID NO: 1753977 - DNA, 15 bp, Homo sapiens
cacaaaattgtgata

SEQ ID NO: 1753978 - DNA, 15 bp, Homo sapiens
acaaaattgtgatat

SEQ ID NO: 1753979 - DNA, 15 bp, Homo sapiens
caaaattgtgatata

SEQ ID NO: 1753980 - DNA, 15 bp, Homo sapiens
aaaattgtgatataa

SEQ ID NO: 1753981 - DNA, 15 bp, Homo sapiens
aaattgtgatataaa

SEQ ID NO: 1753982 - DNA, 15 bp, Homo sapiens
aattgtgatataaaa

SEQ ID NO: 1753983 - DNA, 15 bp, Homo sapiens
attgtgatataaaat

SEQ ID NO: 1753984 - DNA, 15 bp, Homo sapiens
ttgtgatataaaatt

SEQ ID NO: 1753985 - DNA, 15 bp, Homo sapiens
tgtgatataaaatta

SEQ ID NO: 1753986 - DNA, 15 bp, Homo sapiens
gtgatataaaattac

SEQ ID NO: 1753987 - DNA, 15 bp, Homo sapiens
tgatataaaattact

SEQ ID NO: 1753988 - DNA, 15 bp, Homo sapiens
gatataaaattactg

SEQ ID NO: 1753989 - DNA, 15 bp, Homo sapiens
atataaaattactga

SEQ ID NO: 1753990 - DNA, 15 bp, Homo sapiens
tataaaattactgac

SEQ ID NO: 1753991 - DNA, 15 bp, Homo sapiens
ataaaattactgacc

SEQ ID NO: 1753992 - DNA, 15 bp, Homo sapiens
taaaattactgaccc

SEQ ID NO: 1753993 - DNA, 15 bp, Homo sapiens
aaaattactgaccca

SEQ ID NO: 1753994 - DNA, 15 bp, Homo sapiens
aaattactgacccac

SEQ ID NO: 1753995 - DNA, 15 bp, Homo sapiens
aattactgacccaca

SEQ ID NO: 1753996 - DNA, 15 bp, Homo sapiens
attactgacccacaa

SEQ ID NO: 1753997 - DNA, 15 bp, Homo sapiens
ttactgacccacaaa

SEQ ID NO: 1753998 - DNA, 15 bp, Homo sapiens
tactgacccacaaaa

SEQ ID NO: 1753999 - DNA, 15 bp, Homo sapiens
actgacccacaaaat

SEQ ID NO: 1754000 - DNA, 15 bp, Homo sapiens
ctgacccacaaaata

SEQ ID NO: 1754001 - DNA, 15 bp, Homo sapiens
tgacccacaaaatat

SEQ ID NO: 1754002 - DNA, 15 bp, Homo sapiens
gacccacaaaatatg

SEQ ID NO: 1754003 - DNA, 15 bp, Homo sapiens
acccacaaaatatgt

SEQ ID NO: 1754004 - DNA, 15 bp, Homo sapiens
cccacaaaatatgtg

SEQ ID NO: 1754005 - DNA, 15 bp, Homo sapiens
ccacaaaatatgtga

SEQ ID NO: 1754006 - DNA, 15 bp, Homo sapiens
cacaaaatatgtgat

SEQ ID NO: 1754007 - DNA, 15 bp, Homo sapiens
acaaaatatgtgata

SEQ ID NO: 1754008 - DNA, 15 bp, Homo sapiens
caaaatatgtgatat

SEQ ID NO: 1754009 - DNA, 15 bp, Homo sapiens
aaaatatgtgatata

SEQ ID NO: 1754010 - DNA, 15 bp, Homo sapiens
aaatatgtgatataa

SEQ ID NO: 1754011 - DNA, 15 bp, Homo sapiens
aatatgtgatataaa

SEQ ID NO: 1754012 - DNA, 15 bp, Homo sapiens
atatgtgatataaaa

SEQ ID NO: 1754013 - DNA, 15 bp, Homo sapiens
tatgtgatataaaat

SEQ ID NO: 1754014 - DNA, 15 bp, Homo sapiens
atgtgatataaaatt

SEQ ID NO: 1754015 - DNA, 15 bp, Homo sapiens
ctgacccacaaaatg

SEQ ID NO: 1754016 - DNA, 15 bp, Homo sapiens
tgacccacaaaatgt

SEQ ID NO: 1754017 - DNA, 15 bp, Homo sapiens
gacccacaaaatgtg

SEQ ID NO: 1754018 - DNA, 15 bp, Homo sapiens
acccacaaaatgtgt

SEQ ID NO: 1754019 - DNA, 15 bp, Homo sapiens
cccacaaaatgtgtg

SEQ ID NO: 1754020 - DNA, 15 bp, Homo sapiens
ccacaaaatgtgtga

SEQ ID NO: 1754021 - DNA, 15 bp, Homo sapiens
cacaaaatgtgtgat

SEQ ID NO: 1754022 - DNA, 15 bp, Homo sapiens
acaaaatgtgtgata

SEQ ID NO: 1754023 - DNA, 15 bp, Homo sapiens
caaaatgtgtgatat

SEQ ID NO: 1754024 - DNA, 15 bp, Homo sapiens
aaaatgtgtgatata

SEQ ID NO: 1754025 - DNA, 15 bp, Homo sapiens
aaatgtgtgatataa

SEQ ID NO: 1754026 - DNA, 15 bp, Homo sapiens
aatgtgtgatataaa

SEQ ID NO: 1754027 - DNA, 15 bp, Homo sapiens
atgtgtgatataaaa

SEQ ID NO: 1754028 - DNA, 15 bp, Homo sapiens
tgtgtgatataaaaa

SEQ ID NO: 1754029 - DNA, 15 bp, Homo sapiens
gtgtgatataaaaaa

SEQ ID NO: 1754030 - DNA, 15 bp, Homo sapiens
tgtgatataaaaaag

SEQ ID NO: 1754031 - DNA, 15 bp, Homo sapiens
gtgatataaaaaagt

SEQ ID NO: 1754032 - DNA, 15 bp, Homo sapiens
tgatataaaaaagta

SEQ ID NO: 1754033 - DNA, 15 bp, Homo sapiens
gatataaaaaagtat

SEQ ID NO: 1754034 - DNA, 15 bp, Homo sapiens
atataaaaaagtatg

SEQ ID NO: 1754035 - DNA, 15 bp, Homo sapiens
tataaaaaagtatgt

SEQ ID NO: 1754036 - DNA, 15 bp, Homo sapiens
ataaaaaagtatgtg

SEQ ID NO: 1754037 - DNA, 15 bp, Homo sapiens
taaaaaagtatgtgt

SEQ ID NO: 1754038 - DNA, 15 bp, Homo sapiens
aaaaaagtatgtgtt

SEQ ID NO: 1754039 - DNA, 15 bp, Homo sapiens
aaaaagtatgtgttt

SEQ ID NO: 1754040 - DNA, 15 bp, Homo sapiens
aaaagtatgtgtttt

SEQ ID NO: 1754041 - DNA, 15 bp, Homo sapiens
aaagtatgtgtttta

SEQ ID NO: 1754042 - DNA, 15 bp, Homo sapiens
aagtatgtgttttaa

SEQ ID NO: 1754043 - DNA, 15 bp, Homo sapiens
agtatgtgttttaag

SEQ ID NO: 1754044 - DNA, 15 bp, Homo sapiens
gtatgtgttttaagc

SEQ ID NO: 1754045 - DNA, 15 bp, Homo sapiens
tatgtgttttaagcc

SEQ ID NO: 1754046 - DNA, 15 bp, Homo sapiens
atgtgttttaagcca

SEQ ID NO: 1754047 - DNA, 15 bp, Homo sapiens
tgtgttttaagccac

SEQ ID NO: 1754048 - DNA, 15 bp, Homo sapiens
gtgttttaagccact

SEQ ID NO: 1754049 - DNA, 15 bp, Homo sapiens
tgttttaagccacta

SEQ ID NO: 1754050 - DNA, 15 bp, Homo sapiens
gttttaagccactac

SEQ ID NO: 1754051 - DNA, 15 bp, Homo sapiens
ttttaagccactacg

SEQ ID NO: 1754052 - DNA, 15 bp, Homo sapiens
tttaagccactacgt

SEQ ID NO: 1754053 - DNA, 15 bp, Homo sapiens
ttaagccactacgtt

SEQ ID NO: 1754054 - DNA, 15 bp, Homo sapiens
taagccactacgttt

SEQ ID NO: 1754055 - DNA, 15 bp, Homo sapiens
aagccactacgtttt

SEQ ID NO: 1754056 - DNA, 15 bp, Homo sapiens
agccactacgttttg

SEQ ID NO: 1754057 - DNA, 15 bp, Homo sapiens
gccactacgttttgg

SEQ ID NO: 1754058 - DNA, 15 bp, Homo sapiens
ccactacgttttggg

SEQ ID NO: 1754059 - DNA, 15 bp, Homo sapiens
cactacgttttgggg

SEQ ID NO: 1754060 - DNA, 15 bp, Homo sapiens
actacgttttggggt

SEQ ID NO: 1754061 - DNA, 15 bp, Homo sapiens
ctacgttttggggta

SEQ ID NO: 1754062 - DNA, 15 bp, Homo sapiens
tacgttttggggtaa

SEQ ID NO: 1754063 - DNA, 15 bp, Homo sapiens
acgttttggggtaat

SEQ ID NO: 1754064 - DNA, 15 bp, Homo sapiens
cgttttggggtaatt

SEQ ID NO: 1754065 - DNA, 15 bp, Homo sapiens
gttttggggtaattt

SEQ ID NO: 1754066 - DNA, 15 bp, Homo sapiens
ttttggggtaattta

SEQ ID NO: 1754067 - DNA, 15 bp, Homo sapiens
tttggggtaatttat

SEQ ID NO: 1754068 - DNA, 15 bp, Homo sapiens
ttggggtaatttatt

SEQ ID NO: 1754069 - DNA, 15 bp, Homo sapiens
tggggtaatttatta

SEQ ID NO: 1754070 - DNA, 15 bp, Homo sapiens
ggggtaatttattac

SEQ ID NO: 1754071 - DNA, 15 bp, Homo sapiens
gggtaatttattaca

SEQ ID NO: 1754072 - DNA, 15 bp, Homo sapiens
ggtaatttattacac

SEQ ID NO: 1754073 - DNA, 15 bp, Homo sapiens
gtaatttattacaca

SEQ ID NO: 1754074 - DNA, 15 bp, Homo sapiens
taatttattacacag

SEQ ID NO: 1754075 - DNA, 15 bp, Homo sapiens
aatttattacacaga

SEQ ID NO: 1754076 - DNA, 15 bp, Homo sapiens
atttattacacagaa

SEQ ID NO: 1754077 - DNA, 15 bp, Homo sapiens
tttattacacagaaa

SEQ ID NO: 1754078 - DNA, 15 bp, Homo sapiens
ttattacacagaaat

SEQ ID NO: 1754079 - DNA, 15 bp, Homo sapiens
tattacacagaaata

SEQ ID NO: 1754080 - DNA, 15 bp, Homo sapiens
attacacagaaatag

SEQ ID NO: 1754081 - DNA, 15 bp, Homo sapiens
ttacacagaaatagg

SEQ ID NO: 1754082 - DNA, 15 bp, Homo sapiens
tacacagaaataggt

SEQ ID NO: 1754083 - DNA, 15 bp, Homo sapiens
acacagaaataggta

SEQ ID NO: 1754084 - DNA, 15 bp, Homo sapiens
cacagaaataggtaa

SEQ ID NO: 1754085 - DNA, 15 bp, Homo sapiens
acagaaataggtaat

SEQ ID NO: 1754086 - DNA, 15 bp, Homo sapiens
cagaaataggtaata

SEQ ID NO: 1754087 - DNA, 15 bp, Homo sapiens
agaaataggtaatac

SEQ ID NO: 1754088 - DNA, 15 bp, Homo sapiens
gaaataggtaataca

SEQ ID NO: 1754089 - DNA, 15 bp, Homo sapiens
aaataggtaatacag

SEQ ID NO: 1754090 - DNA, 15 bp, Homo sapiens
aataggtaatacaga

SEQ ID NO: 1754091 - DNA, 15 bp, Homo sapiens
ataggtaatacagag

SEQ ID NO: 1754092 - DNA, 15 bp, Homo sapiens
taggtaatacagagt

SEQ ID NO: 1754093 - DNA, 15 bp, Homo sapiens
aggtaatacagagtc

SEQ ID NO: 1754094 - DNA, 15 bp, Homo sapiens
ggtaatacagagtcc

SEQ ID NO: 1754095 - DNA, 15 bp, Homo sapiens
gtaatacagagtcct

SEQ ID NO: 1754096 - DNA, 15 bp, Homo sapiens
taatacagagtcctt

SEQ ID NO: 1754097 - DNA, 15 bp, Homo sapiens
aatacagagtccttg

SEQ ID NO: 1754098 - DNA, 15 bp, Homo sapiens
atacagagtccttga

SEQ ID NO: 1754099 - DNA, 15 bp, Homo sapiens
tacagagtccttgac

SEQ ID NO: 1754100 - DNA, 15 bp, Homo sapiens
acagagtccttgacc

SEQ ID NO: 1754101 - DNA, 15 bp, Homo sapiens
cagagtccttgacct

SEQ ID NO: 1754102 - DNA, 15 bp, Homo sapiens
agagtccttgacctt

SEQ ID NO: 1754103 - DNA, 15 bp, Homo sapiens
gagtccttgaccttt

SEQ ID NO: 1754104 - DNA, 15 bp, Homo sapiens
agtccttgaccttta

SEQ ID NO: 1754105 - DNA, 15 bp, Homo sapiens
gtccttgacctttag

SEQ ID NO: 1754106 - DNA, 15 bp, Homo sapiens
tccttgacctttagt

SEQ ID NO: 1754107 - DNA, 15 bp, Homo sapiens
ccttgacctttagtg

SEQ ID NO: 1754108 - DNA, 15 bp, Homo sapiens
cttgacctttagtgc

SEQ ID NO: 1754109 - DNA, 15 bp, Homo sapiens
ttgacctttagtgcc

SEQ ID NO: 1754110 - DNA, 15 bp, Homo sapiens
tgacctttagtgcct

SEQ ID NO: 1754111 - DNA, 15 bp, Homo sapiens
gacctttagtgcctc

SEQ ID NO: 1754112 - DNA, 15 bp, Homo sapiens
acctttagtgcctcc

SEQ ID NO: 1754113 - DNA, 15 bp, Homo sapiens
cctttagtgcctcca

SEQ ID NO: 1754114 - DNA, 15 bp, Homo sapiens
ctttagtgcctccat

SEQ ID NO: 1754115 - DNA, 15 bp, Homo sapiens
tttagtgcctccata

SEQ ID NO: 1754116 - DNA, 15 bp, Homo sapiens
ttagtgcctccatat

SEQ ID NO: 1754117 - DNA, 15 bp, Homo sapiens
tagtgcctccatata

SEQ ID NO: 1754118 - DNA, 15 bp, Homo sapiens
agtgcctccatatag

SEQ ID NO: 1754119 - DNA, 15 bp, Homo sapiens
gtgcctccatataga

SEQ ID NO: 1754120 - DNA, 15 bp, Homo sapiens
tgcctccatatagaa

SEQ ID NO: 1754121 - DNA, 15 bp, Homo sapiens
gcctccatatagaac

SEQ ID NO: 1754122 - DNA, 15 bp, Homo sapiens
cctccatatagaaca

SEQ ID NO: 1754123 - DNA, 15 bp, Homo sapiens
ctccatatagaacat

SEQ ID NO: 1754124 - DNA, 15 bp, Homo sapiens
tccatatagaacatg

SEQ ID NO: 1754125 - DNA, 15 bp, Homo sapiens
ccatatagaacatga

SEQ ID NO: 1754126 - DNA, 15 bp, Homo sapiens
catatagaacatgaa

SEQ ID NO: 1754127 - DNA, 15 bp, Homo sapiens
atatagaacatgaag

SEQ ID NO: 1754128 - DNA, 15 bp, Homo sapiens
tatagaacatgaagg

SEQ ID NO: 1754129 - DNA, 15 bp, Homo sapiens
atagaacatgaagga

SEQ ID NO: 1754130 - DNA, 15 bp, Homo sapiens
tagaacatgaaggac

SEQ ID NO: 1754131 - DNA, 15 bp, Homo sapiens
agaacatgaaggact

SEQ ID NO: 1754132 - DNA, 15 bp, Homo sapiens
gaacatgaaggacta

SEQ ID NO: 1754133 - DNA, 15 bp, Homo sapiens
aacatgaaggactag

SEQ ID NO: 1754134 - DNA, 15 bp, Homo sapiens
acatgaaggactaga

SEQ ID NO: 1754135 - DNA, 15 bp, Homo sapiens
catgaaggactagaa

SEQ ID NO: 1754136 - DNA, 15 bp, Homo sapiens
atgaaggactagaat

SEQ ID NO: 1754137 - DNA, 15 bp, Homo sapiens
tgaaggactagaata

SEQ ID NO: 1754138 - DNA, 15 bp, Homo sapiens
gaaggactagaataa

SEQ ID NO: 1754139 - DNA, 15 bp, Homo sapiens
aaggactagaataaa

SEQ ID NO: 1754140 - DNA, 15 bp, Homo sapiens
aggactagaataaag

SEQ ID NO: 1754141 - DNA, 15 bp, Homo sapiens
ggactagaataaagt

SEQ ID NO: 1754142 - DNA, 15 bp, Homo sapiens
gactagaataaagta

SEQ ID NO: 1754143 - DNA, 15 bp, Homo sapiens
actagaataaagtag

SEQ ID NO: 1754144 - DNA, 15 bp, Homo sapiens
ctagaataaagtaga

SEQ ID NO: 1754145 - DNA, 15 bp, Homo sapiens
tagaataaagtagaa

SEQ ID NO: 1754146 - DNA, 15 bp, Homo sapiens
agaataaagtagaag

SEQ ID NO: 1754147 - DNA, 15 bp, Homo sapiens
gaataaagtagaagt

SEQ ID NO: 1754148 - DNA, 15 bp, Homo sapiens
aataaagtagaagta

SEQ ID NO: 1754149 - DNA, 15 bp, Homo sapiens
ataaagtagaagtat

SEQ ID NO: 1754150 - DNA, 15 bp, Homo sapiens
taaagtagaagtata

SEQ ID NO: 1754151 - DNA, 15 bp, Homo sapiens
aaagtagaagtataa

SEQ ID NO: 1754152 - DNA, 15 bp, Homo sapiens
aagtagaagtataat

SEQ ID NO: 1754153 - DNA, 15 bp, Homo sapiens
agtagaagtataatt

SEQ ID NO: 1754154 - DNA, 15 bp, Homo sapiens
gtagaagtataattt

SEQ ID NO: 1754155 - DNA, 15 bp, Homo sapiens
tagaagtataattta

SEQ ID NO: 1754156 - DNA, 15 bp, Homo sapiens
agaagtataatttaa

SEQ ID NO: 1754157 - DNA, 15 bp, Homo sapiens
gaagtataatttaag

SEQ ID NO: 1754158 - DNA, 15 bp, Homo sapiens
aagtataatttaaga

SEQ ID NO: 1754159 - DNA, 15 bp, Homo sapiens
agtataatttaagaa

SEQ ID NO: 1754160 - DNA, 15 bp, Homo sapiens
gtataatttaagaag

SEQ ID NO: 1754161 - DNA, 15 bp, Homo sapiens
tataatttaagaagt

SEQ ID NO: 1754162 - DNA, 15 bp, Homo sapiens
ataatttaagaagtt

SEQ ID NO: 1754163 - DNA, 15 bp, Homo sapiens
taatttaagaagttc

SEQ ID NO: 1754164 - DNA, 15 bp, Homo sapiens
aatttaagaagttcc

SEQ ID NO: 1754165 - DNA, 15 bp, Homo sapiens
atttaagaagttccc

SEQ ID NO: 1754166 - DNA, 15 bp, Homo sapiens
tttaagaagttcccc

SEQ ID NO: 1754167 - DNA, 15 bp, Homo sapiens
ttaagaagttcccca

SEQ ID NO: 1754168 - DNA, 15 bp, Homo sapiens
taagaagttccccag

SEQ ID NO: 1754169 - DNA, 15 bp, Homo sapiens
aagaagttccccagg

SEQ ID NO: 1754170 - DNA, 15 bp, Homo sapiens
agaagttccccaggg

SEQ ID NO: 1754171 - DNA, 15 bp, Homo sapiens
gaagttccccagggt

SEQ ID NO: 1754172 - DNA, 15 bp, Homo sapiens
aagttccccagggtg

SEQ ID NO: 1754173 - DNA, 15 bp, Homo sapiens
agttccccagggtga

SEQ ID NO: 1754174 - DNA, 15 bp, Homo sapiens
gttccccagggtgat

SEQ ID NO: 1754175 - DNA, 15 bp, Homo sapiens
ttccccagggtgata

SEQ ID NO: 1754176 - DNA, 15 bp, Homo sapiens
tccccagggtgatat

SEQ ID NO: 1754177 - DNA, 15 bp, Homo sapiens
ccccagggtgatatc

SEQ ID NO: 1754178 - DNA, 15 bp, Homo sapiens
cccagggtgatatct

SEQ ID NO: 1754179 - DNA, 15 bp, Homo sapiens
ccagggtgatatctg

SEQ ID NO: 1754180 - DNA, 15 bp, Homo sapiens
cagggtgatatctgt

SEQ ID NO: 1754181 - DNA, 15 bp, Homo sapiens
agggtgatatctgtt

SEQ ID NO: 1754182 - DNA, 15 bp, Homo sapiens
gggtgatatctgttt

SEQ ID NO: 1754183 - DNA, 15 bp, Homo sapiens
ggtgatatctgtttt

SEQ ID NO: 1754184 - DNA, 15 bp, Homo sapiens
gtgatatctgttttc

SEQ ID NO: 1754185 - DNA, 15 bp, Homo sapiens
tgatatctgttttcc

SEQ ID NO: 1754186 - DNA, 15 bp, Homo sapiens
gatatctgttttcct

SEQ ID NO: 1754187 - DNA, 15 bp, Homo sapiens
atatctgttttcctg

SEQ ID NO: 1754188 - DNA, 15 bp, Homo sapiens
tatctgttttcctgg

SEQ ID NO: 1754189 - DNA, 15 bp, Homo sapiens
atctgttttcctggg

SEQ ID NO: 1754190 - DNA, 15 bp, Homo sapiens
tctgttttcctgggt

SEQ ID NO: 1754191 - DNA, 15 bp, Homo sapiens
ctgttttcctgggtt

SEQ ID NO: 1754192 - DNA, 15 bp, Homo sapiens
tgttttcctgggttg

SEQ ID NO: 1754193 - DNA, 15 bp, Homo sapiens
gttttcctgggttgg

SEQ ID NO: 1754194 - DNA, 15 bp, Homo sapiens
ttttcctgggttgga

SEQ ID NO: 1754195 - DNA, 15 bp, Homo sapiens
tttcctgggttggag

SEQ ID NO: 1754196 - DNA, 15 bp, Homo sapiens
ttcctgggttggaga

SEQ ID NO: 1754197 - DNA, 15 bp, Homo sapiens
tcctgggttggagaa

SEQ ID NO: 1754198 - DNA, 15 bp, Homo sapiens
cctgggttggagaat

SEQ ID NO: 1754199 - DNA, 15 bp, Homo sapiens
ctgggttggagaatg

SEQ ID NO: 1754200 - DNA, 15 bp, Homo sapiens
tgggttggagaatga

SEQ ID NO: 1754201 - DNA, 15 bp, Homo sapiens
gggttggagaatgat

SEQ ID NO: 1754202 - DNA, 15 bp, Homo sapiens
ggttggagaatgata

SEQ ID NO: 1754203 - DNA, 15 bp, Homo sapiens
gttggagaatgatat

SEQ ID NO: 1754204 - DNA, 15 bp, Homo sapiens
ttggagaatgatata

SEQ ID NO: 1754205 - DNA, 15 bp, Homo sapiens
tggagaatgatatag

SEQ ID NO: 1754206 - DNA, 15 bp, Homo sapiens
ggagaatgatatagc

SEQ ID NO: 1754207 - DNA, 15 bp, Homo sapiens
gagaatgatatagca

SEQ ID NO: 1754208 - DNA, 15 bp, Homo sapiens
agaatgatatagcaa

SEQ ID NO: 1754209 - DNA, 15 bp, Homo sapiens
gaatgatatagcaat

SEQ ID NO: 1754210 - DNA, 15 bp, Homo sapiens
aatgatatagcaatt

SEQ ID NO: 1754211 - DNA, 15 bp, Homo sapiens
atgatatagcaattt

SEQ ID NO: 1754212 - DNA, 15 bp, Homo sapiens
tgatatagcaatttt

SEQ ID NO: 1754213 - DNA, 15 bp, Homo sapiens
gatatagcaatttta

SEQ ID NO: 1754214 - DNA, 15 bp, Homo sapiens
atatagcaattttag

SEQ ID NO: 1754215 - DNA, 15 bp, Homo sapiens
tatagcaattttagg

SEQ ID NO: 1754216 - DNA, 15 bp, Homo sapiens
atagcaattttaggt

SEQ ID NO: 1754217 - DNA, 15 bp, Homo sapiens
tagcaattttaggta

SEQ ID NO: 1754218 - DNA, 15 bp, Homo sapiens
agcaattttaggtat

SEQ ID NO: 1754219 - DNA, 15 bp, Homo sapiens
gcaattttaggtata

SEQ ID NO: 1754220 - DNA, 15 bp, Homo sapiens
caattttaggtataa

SEQ ID NO: 1754221 - DNA, 15 bp, Homo sapiens
aattttaggtataaa

SEQ ID NO: 1754222 - DNA, 15 bp, Homo sapiens
attttaggtataaaa

SEQ ID NO: 1754223 - DNA, 15 bp, Homo sapiens
ttttaggtataaaac

SEQ ID NO: 1754224 - DNA, 15 bp, Homo sapiens
tttaggtataaaact

SEQ ID NO: 1754225 - DNA, 15 bp, Homo sapiens
ttaggtataaaactc

SEQ ID NO: 1754226 - DNA, 15 bp, Homo sapiens
taggtataaaactct

SEQ ID NO: 1754227 - DNA, 15 bp, Homo sapiens
aggtataaaactctc

SEQ ID NO: 1754228 - DNA, 15 bp, Homo sapiens
ggtataaaactctct

SEQ ID NO: 1754229 - DNA, 15 bp, Homo sapiens
gtataaaactctctt

SEQ ID NO: 1754230 - DNA, 15 bp, Homo sapiens
tataaaactctctta

SEQ ID NO: 1754231 - DNA, 15 bp, Homo sapiens
ataaaactctcttac

SEQ ID NO: 1754232 - DNA, 15 bp, Homo sapiens
taaaactctcttact

SEQ ID NO: 1754233 - DNA, 15 bp, Homo sapiens
aaaactctcttactt

SEQ ID NO: 1754234 - DNA, 15 bp, Homo sapiens
aaactctcttacttt

SEQ ID NO: 1754235 - DNA, 15 bp, Homo sapiens
aactctcttactttc

SEQ ID NO: 1754236 - DNA, 15 bp, Homo sapiens
actctcttactttct

SEQ ID NO: 1754237 - DNA, 15 bp, Homo sapiens
ctctcttactttctt

SEQ ID NO: 1754238 - DNA, 15 bp, Homo sapiens
tctcttactttctta

SEQ ID NO: 1754239 - DNA, 15 bp, Homo sapiens
ctcttactttcttat

SEQ ID NO: 1754240 - DNA, 15 bp, Homo sapiens
tcttactttcttatt

SEQ ID NO: 1754241 - DNA, 15 bp, Homo sapiens
cttactttcttattg

SEQ ID NO: 1754242 - DNA, 15 bp, Homo sapiens
ttactttcttattgg

SEQ ID NO: 1754243 - DNA, 15 bp, Homo sapiens
tactttcttattggt

SEQ ID NO: 1754244 - DNA, 15 bp, Homo sapiens
actttcttattggtt

SEQ ID NO: 1754245 - DNA, 15 bp, Homo sapiens
ctttcttattggtta

SEQ ID NO: 1754246 - DNA, 15 bp, Homo sapiens
tttcttattggttag

SEQ ID NO: 1754247 - DNA, 15 bp, Homo sapiens
ttcttattggttaga

SEQ ID NO: 1754248 - DNA, 15 bp, Homo sapiens
tcttattggttagaa

SEQ ID NO: 1754249 - DNA, 15 bp, Homo sapiens
cttattggttagaat

SEQ ID NO: 1754250 - DNA, 15 bp, Homo sapiens
ttattggttagaatt

SEQ ID NO: 1754251 - DNA, 15 bp, Homo sapiens
tattggttagaattt

SEQ ID NO: 1754252 - DNA, 15 bp, Homo sapiens
attggttagaattta

SEQ ID NO: 1754253 - DNA, 15 bp, Homo sapiens
ttggttagaatttag

SEQ ID NO: 1754254 - DNA, 15 bp, Homo sapiens
tggttagaatttaga

SEQ ID NO: 1754255 - DNA, 15 bp, Homo sapiens
ggttagaatttagag

SEQ ID NO: 1754256 - DNA, 15 bp, Homo sapiens
gttagaatttagagt

SEQ ID NO: 1754257 - DNA, 15 bp, Homo sapiens
ttagaatttagagtc

SEQ ID NO: 1754258 - DNA, 15 bp, Homo sapiens
tagaatttagagtca

SEQ ID NO: 1754259 - DNA, 15 bp, Homo sapiens
agaatttagagtcaa

SEQ ID NO: 1754260 - DNA, 15 bp, Homo sapiens
gaatttagagtcaaa

SEQ ID NO: 1754261 - DNA, 15 bp, Homo sapiens
aatttagagtcaaag

SEQ ID NO: 1754262 - DNA, 15 bp, Homo sapiens
atttagagtcaaaga

SEQ ID NO: 1754263 - DNA, 15 bp, Homo sapiens
tttagagtcaaagag

SEQ ID NO: 1754264 - DNA, 15 bp, Homo sapiens
ttagagtcaaagaga

SEQ ID NO: 1754265 - DNA, 15 bp, Homo sapiens
tagagtcaaagagat

SEQ ID NO: 1754266 - DNA, 15 bp, Homo sapiens
agagtcaaagagatc

SEQ ID NO: 1754267 - DNA, 15 bp, Homo sapiens
gagtcaaagagatca

SEQ ID NO: 1754268 - DNA, 15 bp, Homo sapiens
agtcaaagagatcaa

SEQ ID NO: 1754269 - DNA, 15 bp, Homo sapiens
gtcaaagagatcaaa

SEQ ID NO: 1754270 - DNA, 15 bp, Homo sapiens
tcaaagagatcaaat

SEQ ID NO: 1754271 - DNA, 15 bp, Homo sapiens
caaagagatcaaata

SEQ ID NO: 1754272 - DNA, 15 bp, Homo sapiens
aaagagatcaaataa

SEQ ID NO: 1754273 - DNA, 15 bp, Homo sapiens
aagagatcaaataaa

SEQ ID NO: 1754274 - DNA, 15 bp, Homo sapiens
agagatcaaataaag

SEQ ID NO: 1754275 - DNA, 15 bp, Homo sapiens
gagatcaaataaagt

SEQ ID NO: 1754276 - DNA, 15 bp, Homo sapiens
agatcaaataaagtg

SEQ ID NO: 1754277 - DNA, 15 bp, Homo sapiens
gatcaaataaagtga

SEQ ID NO: 1754278 - DNA, 15 bp, Homo sapiens
atcaaataaagtgag

SEQ ID NO: 1754279 - DNA, 15 bp, Homo sapiens
tcaaataaagtgaga

SEQ ID NO: 1754280 - DNA, 15 bp, Homo sapiens
caaataaagtgagag

SEQ ID NO: 1754281 - DNA, 15 bp, Homo sapiens
aaataaagtgagagt

SEQ ID NO: 1754282 - DNA, 15 bp, Homo sapiens
aataaagtgagagtg

SEQ ID NO: 1754283 - DNA, 15 bp, Homo sapiens
ataaagtgagagtga

SEQ ID NO: 1754284 - DNA, 15 bp, Homo sapiens
taaagtgagagtgaa

SEQ ID NO: 1754285 - DNA, 15 bp, Homo sapiens
aaagtgagagtgaaa

SEQ ID NO: 1754286 - DNA, 15 bp, Homo sapiens
aagtgagagtgaaaa

SEQ ID NO: 1754287 - DNA, 15 bp, Homo sapiens
agtgagagtgaaaag

SEQ ID NO: 1754288 - DNA, 15 bp, Homo sapiens
gtgagagtgaaaagt

SEQ ID NO: 1754289 - DNA, 15 bp, Homo sapiens
tgagagtgaaaagtc

SEQ ID NO: 1754290 - DNA, 15 bp, Homo sapiens
gagagtgaaaagtct

SEQ ID NO: 1754291 - DNA, 15 bp, Homo sapiens
agagtgaaaagtctc

SEQ ID NO: 1754292 - DNA, 15 bp, Homo sapiens
gagtgaaaagtctct

SEQ ID NO: 1754293 - DNA, 15 bp, Homo sapiens
agtgaaaagtctctg

SEQ ID NO: 1754294 - DNA, 15 bp, Homo sapiens
gtgaaaagtctctga

SEQ ID NO: 1754295 - DNA, 15 bp, Homo sapiens
tgaaaagtctctgaa

SEQ ID NO: 1754296 - DNA, 15 bp, Homo sapiens
gaaaagtctctgaat

SEQ ID NO: 1754297 - DNA, 15 bp, Homo sapiens
aaaagtctctgaatg

SEQ ID NO: 1754298 - DNA, 15 bp, Homo sapiens
aaagtctctgaatgt

SEQ ID NO: 1754299 - DNA, 15 bp, Homo sapiens
aagtctctgaatgtg

SEQ ID NO: 1754300 - DNA, 15 bp, Homo sapiens
agtctctgaatgtgg

SEQ ID NO: 1754301 - DNA, 15 bp, Homo sapiens
gtctctgaatgtggg

SEQ ID NO: 1754302 - DNA, 15 bp, Homo sapiens
tctctgaatgtgggt

SEQ ID NO: 1754303 - DNA, 15 bp, Homo sapiens
ctctgaatgtgggta

SEQ ID NO: 1754304 - DNA, 15 bp, Homo sapiens
tctgaatgtgggtac

SEQ ID NO: 1754305 - DNA, 15 bp, Homo sapiens
ctgaatgtgggtact

SEQ ID NO: 1754306 - DNA, 15 bp, Homo sapiens
tgaatgtgggtacta

SEQ ID NO: 1754307 - DNA, 15 bp, Homo sapiens
gaatgtgggtactag

SEQ ID NO: 1754308 - DNA, 15 bp, Homo sapiens
aatgtgggtactagg

SEQ ID NO: 1754309 - DNA, 15 bp, Homo sapiens
atgtgggtactagga

SEQ ID NO: 1754310 - DNA, 15 bp, Homo sapiens
tgtgggtactaggag

SEQ ID NO: 1754311 - DNA, 15 bp, Homo sapiens
gtgggtactaggagg

SEQ ID NO: 1754312 - DNA, 15 bp, Homo sapiens
tgggtactaggaggg

SEQ ID NO: 1754313 - DNA, 15 bp, Homo sapiens
gggtactaggagggc

SEQ ID NO: 1754314 - DNA, 15 bp, Homo sapiens
ggtactaggagggct

SEQ ID NO: 1754315 - DNA, 15 bp, Homo sapiens
gtactaggagggctc

SEQ ID NO: 1754316 - DNA, 15 bp, Homo sapiens
tactaggagggctca

SEQ ID NO: 1754317 - DNA, 15 bp, Homo sapiens
actaggagggctcaa

SEQ ID NO: 1754318 - DNA, 15 bp, Homo sapiens
ctaggagggctcaaa

SEQ ID NO: 1754319 - DNA, 15 bp, Homo sapiens
taggagggctcaaac

SEQ ID NO: 1754320 - DNA, 15 bp, Homo sapiens
aggagggctcaaaca

SEQ ID NO: 1754321 - DNA, 15 bp, Homo sapiens
ggagggctcaaacag

SEQ ID NO: 1754322 - DNA, 15 bp, Homo sapiens
gagggctcaaacagt

SEQ ID NO: 1754323 - DNA, 15 bp, Homo sapiens
agggctcaaacagtt

SEQ ID NO: 1754324 - DNA, 15 bp, Homo sapiens
gggctcaaacagttt

SEQ ID NO: 1754325 - DNA, 15 bp, Homo sapiens
ggctcaaacagtttt

SEQ ID NO: 1754326 - DNA, 15 bp, Homo sapiens
gctcaaacagttttc

SEQ ID NO: 1754327 - DNA, 15 bp, Homo sapiens
ctcaaacagttttca

SEQ ID NO: 1754328 - DNA, 15 bp, Homo sapiens
tcaaacagttttcaa

SEQ ID NO: 1754329 - DNA, 15 bp, Homo sapiens
caaacagttttcaag

SEQ ID NO: 1754330 - DNA, 15 bp, Homo sapiens
aaacagttttcaagc

SEQ ID NO: 1754331 - DNA, 15 bp, Homo sapiens
aacagttttcaagcc

SEQ ID NO: 1754332 - DNA, 15 bp, Homo sapiens
acagttttcaagcct

SEQ ID NO: 1754333 - DNA, 15 bp, Homo sapiens
cagttttcaagcctc

SEQ ID NO: 1754334 - DNA, 15 bp, Homo sapiens
agttttcaagcctct

SEQ ID NO: 1754335 - DNA, 15 bp, Homo sapiens
gttttcaagcctctt

SEQ ID NO: 1754336 - DNA, 15 bp, Homo sapiens
ttttcaagcctcttc

SEQ ID NO: 1754337 - DNA, 15 bp, Homo sapiens
tttcaagcctcttct

SEQ ID NO: 1754338 - DNA, 15 bp, Homo sapiens
ttcaagcctcttctg

SEQ ID NO: 1754339 - DNA, 15 bp, Homo sapiens
tcaagcctcttctgt

SEQ ID NO: 1754340 - DNA, 15 bp, Homo sapiens
caagcctcttctgtt

SEQ ID NO: 1754341 - DNA, 15 bp, Homo sapiens
aagcctcttctgttc

SEQ ID NO: 1754342 - DNA, 15 bp, Homo sapiens
agcctcttctgttca

SEQ ID NO: 1754343 - DNA, 15 bp, Homo sapiens
gcctcttctgttcag

SEQ ID NO: 1754344 - DNA, 15 bp, Homo sapiens
cctcttctgttcagt

SEQ ID NO: 1754345 - DNA, 15 bp, Homo sapiens
ctcttctgttcagtg

SEQ ID NO: 1754346 - DNA, 15 bp, Homo sapiens
tcttctgttcagtgt

SEQ ID NO: 1754347 - DNA, 15 bp, Homo sapiens
cttctgttcagtgtt

SEQ ID NO: 1754348 - DNA, 15 bp, Homo sapiens
ttctgttcagtgttt

SEQ ID NO: 1754349 - DNA, 15 bp, Homo sapiens
tctgttcagtgtttc

SEQ ID NO: 1754350 - DNA, 15 bp, Homo sapiens
ctgttcagtgtttct

SEQ ID NO: 1754351 - DNA, 15 bp, Homo sapiens
tgttcagtgtttctg

SEQ ID NO: 1754352 - DNA, 15 bp, Homo sapiens
gttcagtgtttctgt

SEQ ID NO: 1754353 - DNA, 15 bp, Homo sapiens
ttcagtgtttctgtc

SEQ ID NO: 1754354 - DNA, 15 bp, Homo sapiens
tcagtgtttctgtct

SEQ ID NO: 1754355 - DNA, 15 bp, Homo sapiens
cagtgtttctgtctc

SEQ ID NO: 1754356 - DNA, 15 bp, Homo sapiens
agtgtttctgtctct

SEQ ID NO: 1754357 - DNA, 15 bp, Homo sapiens
gtgtttctgtctctc

SEQ ID NO: 1754358 - DNA, 15 bp, Homo sapiens
tgtttctgtctctct

SEQ ID NO: 1754359 - DNA, 15 bp, Homo sapiens
gtttctgtctctctg

SEQ ID NO: 1754360 - DNA, 15 bp, Homo sapiens
tttctgtctctctgg

SEQ ID NO: 1754361 - DNA, 15 bp, Homo sapiens
ttctgtctctctgga

SEQ ID NO: 1754362 - DNA, 15 bp, Homo sapiens
tctgtctctctggag

SEQ ID NO: 1754363 - DNA, 15 bp, Homo sapiens
ctgtctctctggagt

SEQ ID NO: 1754364 - DNA, 15 bp, Homo sapiens
tgtctctctggagtg

SEQ ID NO: 1754365 - DNA, 15 bp, Homo sapiens
gtctctctggagtga

SEQ ID NO: 1754366 - DNA, 15 bp, Homo sapiens
tctctctggagtgaa

SEQ ID NO: 1754367 - DNA, 15 bp, Homo sapiens
ctctctggagtgaaa

SEQ ID NO: 1754368 - DNA, 15 bp, Homo sapiens
tctctggagtgaaat

SEQ ID NO: 1754369 - DNA, 15 bp, Homo sapiens
ctctggagtgaaatg

SEQ ID NO: 1754370 - DNA, 15 bp, Homo sapiens
tctggagtgaaatgg

SEQ ID NO: 1754371 - DNA, 15 bp, Homo sapiens
ctggagtgaaatggt

SEQ ID NO: 1754372 - DNA, 15 bp, Homo sapiens
tggagtgaaatggta

SEQ ID NO: 1754373 - DNA, 15 bp, Homo sapiens
ggagtgaaatggtat

SEQ ID NO: 1754374 - DNA, 15 bp, Homo sapiens
gagtgaaatggtatc

SEQ ID NO: 1754375 - DNA, 15 bp, Homo sapiens
agtgaaatggtatcc

SEQ ID NO: 1754376 - DNA, 15 bp, Homo sapiens
gtgaaatggtatccc

SEQ ID NO: 1754377 - DNA, 15 bp, Homo sapiens
tgaaatggtatccct

SEQ ID NO: 1754378 - DNA, 15 bp, Homo sapiens
gaaatggtatccctt

SEQ ID NO: 1754379 - DNA, 15 bp, Homo sapiens
aaatggtatcccttc

SEQ ID NO: 1754380 - DNA, 15 bp, Homo sapiens
aatggtatcccttca

SEQ ID NO: 1754381 - DNA, 15 bp, Homo sapiens
atggtatcccttcaa

SEQ ID NO: 1754382 - DNA, 15 bp, Homo sapiens
tggtatcccttcaaa

SEQ ID NO: 1754383 - DNA, 15 bp, Homo sapiens
ggtatcccttcaaag

SEQ ID NO: 1754384 - DNA, 15 bp, Homo sapiens
gtatcccttcaaagt

SEQ ID NO: 1754385 - DNA, 15 bp, Homo sapiens
tatcccttcaaagtg

SEQ ID NO: 1754386 - DNA, 15 bp, Homo sapiens
atcccttcaaagtgt

SEQ ID NO: 1754387 - DNA, 15 bp, Homo sapiens
tcccttcaaagtgtg

SEQ ID NO: 1754388 - DNA, 15 bp, Homo sapiens
cccttcaaagtgtga

SEQ ID NO: 1754389 - DNA, 15 bp, Homo sapiens
ccttcaaagtgtgaa

SEQ ID NO: 1754390 - DNA, 15 bp, Homo sapiens
cttcaaagtgtgaag

SEQ ID NO: 1754391 - DNA, 15 bp, Homo sapiens
ttcaaagtgtgaagg

SEQ ID NO: 1754392 - DNA, 15 bp, Homo sapiens
tcaaagtgtgaagga

SEQ ID NO: 1754393 - DNA, 15 bp, Homo sapiens
caaagtgtgaaggag

SEQ ID NO: 1754394 - DNA, 15 bp, Homo sapiens
aaagtgtgaaggaga

SEQ ID NO: 1754395 - DNA, 15 bp, Homo sapiens
aagtgtgaaggagaa

SEQ ID NO: 1754396 - DNA, 15 bp, Homo sapiens
agtgtgaaggagaaa

SEQ ID NO: 1754397 - DNA, 15 bp, Homo sapiens
gtgtgaaggagaaag

SEQ ID NO: 1754398 - DNA, 15 bp, Homo sapiens
tgtgaaggagaaagt

SEQ ID NO: 1754399 - DNA, 15 bp, Homo sapiens
gtgaaggagaaagtg

SEQ ID NO: 1754400 - DNA, 15 bp, Homo sapiens
tgaaggagaaagtgt

SEQ ID NO: 1754401 - DNA, 15 bp, Homo sapiens
gaaggagaaagtgtg

SEQ ID NO: 1754402 - DNA, 15 bp, Homo sapiens
aaggagaaagtgtga

SEQ ID NO: 1754403 - DNA, 15 bp, Homo sapiens
aggagaaagtgtgaa

SEQ ID NO: 1754404 - DNA, 15 bp, Homo sapiens
ggagaaagtgtgaat

SEQ ID NO: 1754405 - DNA, 15 bp, Homo sapiens
gagaaagtgtgaata

SEQ ID NO: 1754406 - DNA, 15 bp, Homo sapiens
agaaagtgtgaataa

SEQ ID NO: 1754407 - DNA, 15 bp, Homo sapiens
gaaagtgtgaataat

SEQ ID NO: 1754408 - DNA, 15 bp, Homo sapiens
aaagtgtgaataata

SEQ ID NO: 1754409 - DNA, 15 bp, Homo sapiens
aagtgtgaataatat

SEQ ID NO: 1754410 - DNA, 15 bp, Homo sapiens
agtgtgaataatatt

SEQ ID NO: 1754411 - DNA, 15 bp, Homo sapiens
gtgtgaataatattt

SEQ ID NO: 1754412 - DNA, 15 bp, Homo sapiens
tgtgaataatatttt

SEQ ID NO: 1754413 - DNA, 15 bp, Homo sapiens
gtgaataatattttt

SEQ ID NO: 1754414 - DNA, 15 bp, Homo sapiens
tgaataatattttta

SEQ ID NO: 1754415 - DNA, 15 bp, Homo sapiens
gaataatatttttaa

SEQ ID NO: 1754416 - DNA, 15 bp, Homo sapiens
aataatatttttaaa

SEQ ID NO: 1754417 - DNA, 15 bp, Homo sapiens
ataatatttttaaat

SEQ ID NO: 1754418 - DNA, 15 bp, Homo sapiens
taatatttttaaata

SEQ ID NO: 1754419 - DNA, 15 bp, Homo sapiens
aatatttttaaatag

SEQ ID NO: 1754420 - DNA, 15 bp, Homo sapiens
atatttttaaatagc

SEQ ID NO: 1754421 - DNA, 15 bp, Homo sapiens
tatttttaaatagca

SEQ ID NO: 1754422 - DNA, 15 bp, Homo sapiens
atttttaaatagcac

SEQ ID NO: 1754423 - DNA, 15 bp, Homo sapiens
tttttaaatagcact

SEQ ID NO: 1754424 - DNA, 15 bp, Homo sapiens
ttttaaatagcacta

SEQ ID NO: 1754425 - DNA, 15 bp, Homo sapiens
tttaaatagcactaa

SEQ ID NO: 1754426 - DNA, 15 bp, Homo sapiens
ttaaatagcactaaa

SEQ ID NO: 1754427 - DNA, 15 bp, Homo sapiens
taaatagcactaaaa

SEQ ID NO: 1754428 - DNA, 15 bp, Homo sapiens
aaatagcactaaaat

SEQ ID NO: 1754429 - DNA, 15 bp, Homo sapiens
aatagcactaaaata

SEQ ID NO: 1754430 - DNA, 15 bp, Homo sapiens
atagcactaaaataa

SEQ ID NO: 1754431 - DNA, 15 bp, Homo sapiens
tagcactaaaataac

SEQ ID NO: 1754432 - DNA, 15 bp, Homo sapiens
agcactaaaataaca

SEQ ID NO: 1754433 - DNA, 15 bp, Homo sapiens
gcactaaaataacat

SEQ ID NO: 1754434 - DNA, 15 bp, Homo sapiens
cactaaaataacatt

SEQ ID NO: 1754435 - DNA, 15 bp, Homo sapiens
actaaaataacattc

SEQ ID NO: 1754436 - DNA, 15 bp, Homo sapiens
ctaaaataacattct

SEQ ID NO: 1754437 - DNA, 15 bp, Homo sapiens
taaaataacattctt

SEQ ID NO: 1754438 - DNA, 15 bp, Homo sapiens
aaaataacattcttt

SEQ ID NO: 1754439 - DNA, 15 bp, Homo sapiens
aaataacattctttc

SEQ ID NO: 1754440 - DNA, 15 bp, Homo sapiens
aataacattctttca

SEQ ID NO: 1754441 - DNA, 15 bp, Homo sapiens
ataacattctttcag

SEQ ID NO: 1754442 - DNA, 15 bp, Homo sapiens
taacattctttcagg

SEQ ID NO: 1754443 - DNA, 15 bp, Homo sapiens
aacattctttcagga

SEQ ID NO: 1754444 - DNA, 15 bp, Homo sapiens
acattctttcaggaa

SEQ ID NO: 1754445 - DNA, 15 bp, Homo sapiens
cattctttcaggaaa

SEQ ID NO: 1754446 - DNA, 15 bp, Homo sapiens
attctttcaggaaaa

SEQ ID NO: 1754447 - DNA, 15 bp, Homo sapiens
ttctttcaggaaaac

SEQ ID NO: 1754448 - DNA, 15 bp, Homo sapiens
tctttcaggaaaaca

SEQ ID NO: 1754449 - DNA, 15 bp, Homo sapiens
ctttcaggaaaacaa

SEQ ID NO: 1754450 - DNA, 15 bp, Homo sapiens
tttcaggaaaacaaa

SEQ ID NO: 1754451 - DNA, 15 bp, Homo sapiens
ttcaggaaaacaaat

SEQ ID NO: 1754452 - DNA, 15 bp, Homo sapiens
tcaggaaaacaaatt

SEQ ID NO: 1754453 - DNA, 15 bp, Homo sapiens
caggaaaacaaatta

SEQ ID NO: 1754454 - DNA, 15 bp, Homo sapiens
aacaaattaaaaata

SEQ ID NO: 1754455 - DNA, 15 bp, Homo sapiens
acaaattaaaaataa

SEQ ID NO: 1754456 - DNA, 15 bp, Homo sapiens
caaattaaaaataaa

SEQ ID NO: 1754457 - DNA, 15 bp, Homo sapiens
aattaaaaataaaag

SEQ ID NO: 1754458 - DNA, 15 bp, Homo sapiens
attaaaaataaaagc

SEQ ID NO: 1754459 - DNA, 15 bp, Homo sapiens
ttaaaaataaaagca

SEQ ID NO: 1754460 - DNA, 15 bp, Homo sapiens
taaaaataaaagcag

SEQ ID NO: 1754461 - DNA, 15 bp, Homo sapiens
aaaaataaaagcagt

SEQ ID NO: 1754462 - DNA, 15 bp, Homo sapiens
aaaataaaagcagta

SEQ ID NO: 1754463 - DNA, 15 bp, Homo sapiens
aaataaaagcagtaa

SEQ ID NO: 1754464 - DNA, 15 bp, Homo sapiens
aataaaagcagtaaa

SEQ ID NO: 1754465 - DNA, 15 bp, Homo sapiens
ataaaagcagtaaaa

SEQ ID NO: 1754466 - DNA, 15 bp, Homo sapiens
taaaagcagtaaaaa

SEQ ID NO: 1754467 - DNA, 15 bp, Homo sapiens
aaaagcagtaaaaat

SEQ ID NO: 1754468 - DNA, 15 bp, Homo sapiens
aaagcagtaaaaatg

SEQ ID NO: 1754469 - DNA, 15 bp, Homo sapiens
aagcagtaaaaatga

SEQ ID NO: 1754470 - DNA, 15 bp, Homo sapiens
agcagtaaaaatgag

SEQ ID NO: 1754471 - DNA, 15 bp, Homo sapiens
gcagtaaaaatgagt

SEQ ID NO: 1754472 - DNA, 15 bp, Homo sapiens
cagtaaaaatgagta

SEQ ID NO: 1754473 - DNA, 15 bp, Homo sapiens
agtaaaaatgagtaa

SEQ ID NO: 1754474 - DNA, 15 bp, Homo sapiens
gtaaaaatgagtaat

SEQ ID NO: 1754475 - DNA, 15 bp, Homo sapiens
taaaaatgagtaata

SEQ ID NO: 1754476 - DNA, 15 bp, Homo sapiens
aaaaatgagtaataa

SEQ ID NO: 1754477 - DNA, 15 bp, Homo sapiens
aaaatgagtaataaa

SEQ ID NO: 1754478 - DNA, 15 bp, Homo sapiens
aaatgagtaataaaa

SEQ ID NO: 1754479 - DNA, 15 bp, Homo sapiens
aatgagtaataaaat

SEQ ID NO: 1754480 - DNA, 15 bp, Homo sapiens
atgagtaataaaata

SEQ ID NO: 1754481 - DNA, 15 bp, Homo sapiens
tgagtaataaaatat

SEQ ID NO: 1754482 - DNA, 15 bp, Homo sapiens
gagtaataaaatatt

SEQ ID NO: 1754483 - DNA, 15 bp, Homo sapiens
agtaataaaatatta

SEQ ID NO: 1754484 - DNA, 15 bp, Homo sapiens
gtaataaaatattac

SEQ ID NO: 1754485 - DNA, 15 bp, Homo sapiens
taataaaatattacc

SEQ ID NO: 1754486 - DNA, 15 bp, Homo sapiens
aataaaatattacca

SEQ ID NO: 1754487 - DNA, 15 bp, Homo sapiens
ataaaatattaccac

SEQ ID NO: 1754488 - DNA, 15 bp, Homo sapiens
taaaatattaccact

SEQ ID NO: 1754489 - DNA, 15 bp, Homo sapiens
aaaatattaccactg

SEQ ID NO: 1754490 - DNA, 15 bp, Homo sapiens
aaatattaccactgt

SEQ ID NO: 1754491 - DNA, 15 bp, Homo sapiens
aatattaccactgta

SEQ ID NO: 1754492 - DNA, 15 bp, Homo sapiens
atattaccactgtaa

SEQ ID NO: 1754493 - DNA, 15 bp, Homo sapiens
tattaccactgtaac

SEQ ID NO: 1754494 - DNA, 15 bp, Homo sapiens
attaccactgtaacc

SEQ ID NO: 1754495 - DNA, 15 bp, Homo sapiens
ttaccactgtaacct

SEQ ID NO: 1754496 - DNA, 15 bp, Homo sapiens
taccactgtaacctc

SEQ ID NO: 1754497 - DNA, 15 bp, Homo sapiens
accactgtaacctca

SEQ ID NO: 1754498 - DNA, 15 bp, Homo sapiens
ccactgtaacctcaa

SEQ ID NO: 1754499 - DNA, 15 bp, Homo sapiens
cactgtaacctcaaa

SEQ ID NO: 1754500 - DNA, 15 bp, Homo sapiens
actgtaacctcaaat

SEQ ID NO: 1754501 - DNA, 15 bp, Homo sapiens
ctgtaacctcaaatg

SEQ ID NO: 1754502 - DNA, 15 bp, Homo sapiens
tgtaacctcaaatga

SEQ ID NO: 1754503 - DNA, 15 bp, Homo sapiens
gtaacctcaaatgaa

SEQ ID NO: 1754504 - DNA, 15 bp, Homo sapiens
taacctcaaatgaaa

SEQ ID NO: 1754505 - DNA, 15 bp, Homo sapiens
aacctcaaatgaaat

SEQ ID NO: 1754506 - DNA, 15 bp, Homo sapiens
acctcaaatgaaata

SEQ ID NO: 1754507 - DNA, 15 bp, Homo sapiens
cctcaaatgaaataa

SEQ ID NO: 1754508 - DNA, 15 bp, Homo sapiens
ctcaaatgaaataat

SEQ ID NO: 1754509 - DNA, 15 bp, Homo sapiens
tcaaatgaaataatg

SEQ ID NO: 1754510 - DNA, 15 bp, Homo sapiens
caaatgaaataatga

SEQ ID NO: 1754511 - DNA, 15 bp, Homo sapiens
aaatgaaataatgaa

SEQ ID NO: 1754512 - DNA, 15 bp, Homo sapiens
aatgaaataatgaac

SEQ ID NO: 1754513 - DNA, 15 bp, Homo sapiens
atgaaataatgaacc

SEQ ID NO: 1754514 - DNA, 15 bp, Homo sapiens
tgaaataatgaacct

SEQ ID NO: 1754515 - DNA, 15 bp, Homo sapiens
gaaataatgaacctt

SEQ ID NO: 1754516 - DNA, 15 bp, Homo sapiens
aaataatgaacctta

SEQ ID NO: 1754517 - DNA, 15 bp, Homo sapiens
aataatgaaccttag

SEQ ID NO: 1754518 - DNA, 15 bp, Homo sapiens
ataatgaaccttagc

SEQ ID NO: 1754519 - DNA, 15 bp, Homo sapiens
taatgaaccttagca

SEQ ID NO: 1754520 - DNA, 15 bp, Homo sapiens
aatgaaccttagcaa

SEQ ID NO: 1754521 - DNA, 15 bp, Homo sapiens
atgaaccttagcaat

SEQ ID NO: 1754522 - DNA, 15 bp, Homo sapiens
tgaaccttagcaatg

SEQ ID NO: 1754523 - DNA, 15 bp, Homo sapiens
gaaccttagcaatga

SEQ ID NO: 1754524 - DNA, 15 bp, Homo sapiens
aaccttagcaatgat

SEQ ID NO: 1754525 - DNA, 15 bp, Homo sapiens
accttagcaatgatc

SEQ ID NO: 1754526 - DNA, 15 bp, Homo sapiens
ccttagcaatgatct

SEQ ID NO: 1754527 - DNA, 15 bp, Homo sapiens
cttagcaatgatctt

SEQ ID NO: 1754528 - DNA, 15 bp, Homo sapiens
ttagcaatgatcttc

SEQ ID NO: 1754529 - DNA, 15 bp, Homo sapiens
tagcaatgatcttca

SEQ ID NO: 1754530 - DNA, 15 bp, Homo sapiens
agcaatgatcttcaa

SEQ ID NO: 1754531 - DNA, 15 bp, Homo sapiens
gcaatgatcttcaat

SEQ ID NO: 1754532 - DNA, 15 bp, Homo sapiens
caatgatcttcaatg

SEQ ID NO: 1754533 - DNA, 15 bp, Homo sapiens
aatgatcttcaatga

SEQ ID NO: 1754534 - DNA, 15 bp, Homo sapiens
atgatcttcaatgac

SEQ ID NO: 1754535 - DNA, 15 bp, Homo sapiens
tgatcttcaatgact

SEQ ID NO: 1754536 - DNA, 15 bp, Homo sapiens
gatcttcaatgacta

SEQ ID NO: 1754537 - DNA, 15 bp, Homo sapiens
atcttcaatgactac

SEQ ID NO: 1754538 - DNA, 15 bp, Homo sapiens
tcttcaatgactact

SEQ ID NO: 1754539 - DNA, 15 bp, Homo sapiens
cttcaatgactactg

SEQ ID NO: 1754540 - DNA, 15 bp, Homo sapiens
ttcaatgactactga

SEQ ID NO: 1754541 - DNA, 15 bp, Homo sapiens
tcaatgactactgaa

SEQ ID NO: 1754542 - DNA, 15 bp, Homo sapiens
caatgactactgaaa

SEQ ID NO: 1754543 - DNA, 15 bp, Homo sapiens
aatgactactgaaac

SEQ ID NO: 1754544 - DNA, 15 bp, Homo sapiens
atgactactgaaacg

SEQ ID NO: 1754545 - DNA, 15 bp, Homo sapiens
tgactactgaaacgt

SEQ ID NO: 1754546 - DNA, 15 bp, Homo sapiens
gactactgaaacgtt

SEQ ID NO: 1754547 - DNA, 15 bp, Homo sapiens
actactgaaacgtta

SEQ ID NO: 1754548 - DNA, 15 bp, Homo sapiens
ctactgaaacgttag

SEQ ID NO: 1754549 - DNA, 15 bp, Homo sapiens
tactgaaacgttagg

SEQ ID NO: 1754550 - DNA, 15 bp, Homo sapiens
actgaaacgttaggt

SEQ ID NO: 1754551 - DNA, 15 bp, Homo sapiens
ctgaaacgttaggta

SEQ ID NO: 1754552 - DNA, 15 bp, Homo sapiens
tgaaacgttaggtaa

SEQ ID NO: 1754553 - DNA, 15 bp, Homo sapiens
gaaacgttaggtaaa

SEQ ID NO: 1754554 - DNA, 15 bp, Homo sapiens
aaacgttaggtaaaa

SEQ ID NO: 1754555 - DNA, 15 bp, Homo sapiens
aacgttaggtaaaaa

SEQ ID NO: 1754556 - DNA, 15 bp, Homo sapiens
acgttaggtaaaaaa

SEQ ID NO: 1754557 - DNA, 15 bp, Homo sapiens
cgttaggtaaaaaat

SEQ ID NO: 1754558 - DNA, 15 bp, Homo sapiens
gttaggtaaaaaatt

SEQ ID NO: 1754559 - DNA, 15 bp, Homo sapiens
ttaggtaaaaaattc

SEQ ID NO: 1754560 - DNA, 15 bp, Homo sapiens
taggtaaaaaattca

SEQ ID NO: 1754561 - DNA, 15 bp, Homo sapiens
aggtaaaaaattcag

SEQ ID NO: 1754562 - DNA, 15 bp, Homo sapiens
ggtaaaaaattcagg

SEQ ID NO: 1754563 - DNA, 15 bp, Homo sapiens
gtaaaaaattcaggg

SEQ ID NO: 1754564 - DNA, 15 bp, Homo sapiens
taaaaaattcaggga

SEQ ID NO: 1754565 - DNA, 15 bp, Homo sapiens
aaaaaattcagggag

SEQ ID NO: 1754566 - DNA, 15 bp, Homo sapiens
aaaaattcagggagt

SEQ ID NO: 1754567 - DNA, 15 bp, Homo sapiens
aaaattcagggagta

SEQ ID NO: 1754568 - DNA, 15 bp, Homo sapiens
aaattcagggagtaa

SEQ ID NO: 1754569 - DNA, 15 bp, Homo sapiens
aattcagggagtaaa

SEQ ID NO: 1754570 - DNA, 15 bp, Homo sapiens
attcagggagtaaac

SEQ ID NO: 1754571 - DNA, 15 bp, Homo sapiens
ttcagggagtaaact

SEQ ID NO: 1754572 - DNA, 15 bp, Homo sapiens
tcagggagtaaactt

SEQ ID NO: 1754573 - DNA, 15 bp, Homo sapiens
cagggagtaaacttt

SEQ ID NO: 1754574 - DNA, 15 bp, Homo sapiens
agggagtaaactttt

SEQ ID NO: 1754575 - DNA, 15 bp, Homo sapiens
gggagtaaacttttt

SEQ ID NO: 1754576 - DNA, 15 bp, Homo sapiens
ggagtaaacttttta

SEQ ID NO: 1754577 - DNA, 15 bp, Homo sapiens
gagtaaactttttat

SEQ ID NO: 1754578 - DNA, 15 bp, Homo sapiens
agtaaactttttata

SEQ ID NO: 1754579 - DNA, 15 bp, Homo sapiens
gtaaactttttataa

SEQ ID NO: 1754580 - DNA, 15 bp, Homo sapiens
taaactttttataat

SEQ ID NO: 1754581 - DNA, 15 bp, Homo sapiens
aaactttttataata

SEQ ID NO: 1754582 - DNA, 15 bp, Homo sapiens
aactttttataatag

SEQ ID NO: 1754583 - DNA, 15 bp, Homo sapiens
actttttataataga

SEQ ID NO: 1754584 - DNA, 15 bp, Homo sapiens
ctttttataatagat

SEQ ID NO: 1754585 - DNA, 15 bp, Homo sapiens
tttttataatagatg

SEQ ID NO: 1754586 - DNA, 15 bp, Homo sapiens
ttttataatagatgc

SEQ ID NO: 1754587 - DNA, 15 bp, Homo sapiens
tttataatagatgct

SEQ ID NO: 1754588 - DNA, 15 bp, Homo sapiens
ttataatagatgctg

SEQ ID NO: 1754589 - DNA, 15 bp, Homo sapiens
tataatagatgctgg

SEQ ID NO: 1754590 - DNA, 15 bp, Homo sapiens
ataatagatgctggc

SEQ ID NO: 1754591 - DNA, 15 bp, Homo sapiens
taatagatgctggct

SEQ ID NO: 1754592 - DNA, 15 bp, Homo sapiens
aatagatgctggctg

SEQ ID NO: 1754593 - DNA, 15 bp, Homo sapiens
atagatgctggctga

SEQ ID NO: 1754594 - DNA, 15 bp, Homo sapiens
tagatgctggctgac

SEQ ID NO: 1754595 - DNA, 15 bp, Homo sapiens
agatgctggctgaca

SEQ ID NO: 1754596 - DNA, 15 bp, Homo sapiens
gatgctggctgacaa

SEQ ID NO: 1754597 - DNA, 15 bp, Homo sapiens
atgctggctgacaag

SEQ ID NO: 1754598 - DNA, 15 bp, Homo sapiens
tgctggctgacaagt

SEQ ID NO: 1754599 - DNA, 15 bp, Homo sapiens
gctggctgacaagta

SEQ ID NO: 1754600 - DNA, 15 bp, Homo sapiens
ctggctgacaagtaa

SEQ ID NO: 1754601 - DNA, 15 bp, Homo sapiens
tggctgacaagtaaa

SEQ ID NO: 1754602 - DNA, 15 bp, Homo sapiens
ggctgacaagtaaac

SEQ ID NO: 1754603 - DNA, 15 bp, Homo sapiens
gctgacaagtaaaca

SEQ ID NO: 1754604 - DNA, 15 bp, Homo sapiens
ctgacaagtaaacac

SEQ ID NO: 1754605 - DNA, 15 bp, Homo sapiens
tgacaagtaaacaca

SEQ ID NO: 1754606 - DNA, 15 bp, Homo sapiens
gacaagtaaacacac

SEQ ID NO: 1754607 - DNA, 15 bp, Homo sapiens
acaagtaaacacact

SEQ ID NO: 1754608 - DNA, 15 bp, Homo sapiens
caagtaaacacactc

SEQ ID NO: 1754609 - DNA, 15 bp, Homo sapiens
aagtaaacacactct

SEQ ID NO: 1754610 - DNA, 15 bp, Homo sapiens
agtaaacacactctt

SEQ ID NO: 1754611 - DNA, 15 bp, Homo sapiens
gtaaacacactctta

SEQ ID NO: 1754612 - DNA, 15 bp, Homo sapiens
taaacacactcttaa

SEQ ID NO: 1754613 - DNA, 15 bp, Homo sapiens
aaacacactcttaat

SEQ ID NO: 1754614 - DNA, 15 bp, Homo sapiens
aacacactcttaatc

SEQ ID NO: 1754615 - DNA, 15 bp, Homo sapiens
acacactcttaatct

SEQ ID NO: 1754616 - DNA, 15 bp, Homo sapiens
cacactcttaatctt

SEQ ID NO: 1754617 - DNA, 15 bp, Homo sapiens
acactcttaatctta

SEQ ID NO: 1754618 - DNA, 15 bp, Homo sapiens
cactcttaatcttaa

SEQ ID NO: 1754619 - DNA, 15 bp, Homo sapiens
actcttaatcttaaa

SEQ ID NO: 1754620 - DNA, 15 bp, Homo sapiens
ctcttaatcttaaaa

SEQ ID NO: 1754621 - DNA, 15 bp, Homo sapiens
tcttaatcttaaaag

SEQ ID NO: 1754622 - DNA, 15 bp, Homo sapiens
cttaatcttaaaaga

SEQ ID NO: 1754623 - DNA, 15 bp, Homo sapiens
ttaatcttaaaagat

SEQ ID NO: 1754624 - DNA, 15 bp, Homo sapiens
taatcttaaaagatg

SEQ ID NO: 1754625 - DNA, 15 bp, Homo sapiens
aatcttaaaagatgg

SEQ ID NO: 1754626 - DNA, 15 bp, Homo sapiens
atcttaaaagatgga

SEQ ID NO: 1754627 - DNA, 15 bp, Homo sapiens
tcttaaaagatggag

SEQ ID NO: 1754628 - DNA, 15 bp, Homo sapiens
cttaaaagatggagt

SEQ ID NO: 1754629 - DNA, 15 bp, Homo sapiens
ttaaaagatggagta

SEQ ID NO: 1754630 - DNA, 15 bp, Homo sapiens
taaaagatggagtag

SEQ ID NO: 1754631 - DNA, 15 bp, Homo sapiens
aaaagatggagtaga

SEQ ID NO: 1754632 - DNA, 15 bp, Homo sapiens
aaagatggagtagaa

SEQ ID NO: 1754633 - DNA, 15 bp, Homo sapiens
aagatggagtagaaa

SEQ ID NO: 1754634 - DNA, 15 bp, Homo sapiens
agatggagtagaaag

SEQ ID NO: 1754635 - DNA, 15 bp, Homo sapiens
gatggagtagaaagc

SEQ ID NO: 1754636 - DNA, 15 bp, Homo sapiens
atggagtagaaagca

SEQ ID NO: 1754637 - DNA, 15 bp, Homo sapiens
tggagtagaaagcaa

SEQ ID NO: 1754638 - DNA, 15 bp, Homo sapiens
ggagtagaaagcaaa

SEQ ID NO: 1754639 - DNA, 15 bp, Homo sapiens
gagtagaaagcaaag

SEQ ID NO: 1754640 - DNA, 15 bp, Homo sapiens
agtagaaagcaaaga

SEQ ID NO: 1754641 - DNA, 15 bp, Homo sapiens
gtagaaagcaaagag

SEQ ID NO: 1754642 - DNA, 15 bp, Homo sapiens
tagaaagcaaagagc

SEQ ID NO: 1754643 - DNA, 15 bp, Homo sapiens
agaaagcaaagagca

SEQ ID NO: 1754644 - DNA, 15 bp, Homo sapiens
gaaagcaaagagcat

SEQ ID NO: 1754645 - DNA, 15 bp, Homo sapiens
aaagcaaagagcatt

SEQ ID NO: 1754646 - DNA, 15 bp, Homo sapiens
aagcaaagagcatta

SEQ ID NO: 1754647 - DNA, 15 bp, Homo sapiens
agcaaagagcattaa

SEQ ID NO: 1754648 - DNA, 15 bp, Homo sapiens
gcaaagagcattaac

SEQ ID NO: 1754649 - DNA, 15 bp, Homo sapiens
caaagagcattaact

SEQ ID NO: 1754650 - DNA, 15 bp, Homo sapiens
aaagagcattaacta

SEQ ID NO: 1754651 - DNA, 15 bp, Homo sapiens
aagagcattaactat

SEQ ID NO: 1754652 - DNA, 15 bp, Homo sapiens
agagcattaactatt

SEQ ID NO: 1754653 - DNA, 15 bp, Homo sapiens
gagcattaactattg

SEQ ID NO: 1754654 - DNA, 15 bp, Homo sapiens
agcattaactattgg

SEQ ID NO: 1754655 - DNA, 15 bp, Homo sapiens
gcattaactattgga

SEQ ID NO: 1754656 - DNA, 15 bp, Homo sapiens
cattaactattggat

SEQ ID NO: 1754657 - DNA, 15 bp, Homo sapiens
attaactattggatt

SEQ ID NO: 1754658 - DNA, 15 bp, Homo sapiens
ttaactattggattt

SEQ ID NO: 1754659 - DNA, 15 bp, Homo sapiens
taactattggattta

SEQ ID NO: 1754660 - DNA, 15 bp, Homo sapiens
aactattggatttat

SEQ ID NO: 1754661 - DNA, 15 bp, Homo sapiens
actattggatttatt

SEQ ID NO: 1754662 - DNA, 15 bp, Homo sapiens
ctattggatttatta

SEQ ID NO: 1754663 - DNA, 15 bp, Homo sapiens
tattggatttattat

SEQ ID NO: 1754664 - DNA, 15 bp, Homo sapiens
attggatttattatt

SEQ ID NO: 1754665 - DNA, 15 bp, Homo sapiens
ttggatttattattg

SEQ ID NO: 1754666 - DNA, 15 bp, Homo sapiens
tggatttattattgt

SEQ ID NO: 1754667 - DNA, 15 bp, Homo sapiens
ggatttattattgta

SEQ ID NO: 1754668 - DNA, 15 bp, Homo sapiens
gatttattattgtaa

SEQ ID NO: 1754669 - DNA, 15 bp, Homo sapiens
atttattattgtaaa

SEQ ID NO: 1754670 - DNA, 15 bp, Homo sapiens
tttattattgtaaaa

SEQ ID NO: 1754671 - DNA, 15 bp, Homo sapiens
ttattattgtaaaac

SEQ ID NO: 1754672 - DNA, 15 bp, Homo sapiens
tattattgtaaaaca

SEQ ID NO: 1754673 - DNA, 15 bp, Homo sapiens
attattgtaaaacat

SEQ ID NO: 1754674 - DNA, 15 bp, Homo sapiens
ttattgtaaaacata

SEQ ID NO: 1754675 - DNA, 15 bp, Homo sapiens
tattgtaaaacataa

SEQ ID NO: 1754676 - DNA, 15 bp, Homo sapiens
attgtaaaacataac

SEQ ID NO: 1754677 - DNA, 15 bp, Homo sapiens
ttgtaaaacataacc

SEQ ID NO: 1754678 - DNA, 15 bp, Homo sapiens
tgtaaaacataacca

SEQ ID NO: 1754679 - DNA, 15 bp, Homo sapiens
gtaaaacataaccaa

SEQ ID NO: 1754680 - DNA, 15 bp, Homo sapiens
taaaacataaccaaa

SEQ ID NO: 1754681 - DNA, 15 bp, Homo sapiens
aaaacataaccaaaa

SEQ ID NO: 1754682 - DNA, 15 bp, Homo sapiens
aaacataaccaaaat

SEQ ID NO: 1754683 - DNA, 15 bp, Homo sapiens
aacataaccaaaata

SEQ ID NO: 1754684 - DNA, 15 bp, Homo sapiens
acataaccaaaatag

SEQ ID NO: 1754685 - DNA, 15 bp, Homo sapiens
cataaccaaaatagg

SEQ ID NO: 1754686 - DNA, 15 bp, Homo sapiens
ataaccaaaatagga

SEQ ID NO: 1754687 - DNA, 15 bp, Homo sapiens
taaccaaaataggaa

SEQ ID NO: 1754688 - DNA, 15 bp, Homo sapiens
aaccaaaataggaac

SEQ ID NO: 1754689 - DNA, 15 bp, Homo sapiens
accaaaataggaact

SEQ ID NO: 1754690 - DNA, 15 bp, Homo sapiens
ccaaaataggaactg

SEQ ID NO: 1754691 - DNA, 15 bp, Homo sapiens
caaaataggaactga

SEQ ID NO: 1754692 - DNA, 15 bp, Homo sapiens
aaaataggaactgat

SEQ ID NO: 1754693 - DNA, 15 bp, Homo sapiens
aaataggaactgatg

SEQ ID NO: 1754694 - DNA, 15 bp, Homo sapiens
aataggaactgatgc

SEQ ID NO: 1754695 - DNA, 15 bp, Homo sapiens
ataggaactgatgca

SEQ ID NO: 1754696 - DNA, 15 bp, Homo sapiens
taggaactgatgcat

SEQ ID NO: 1754697 - DNA, 15 bp, Homo sapiens
aggaactgatgcata

SEQ ID NO: 1754698 - DNA, 15 bp, Homo sapiens
ggaactgatgcatat

SEQ ID NO: 1754699 - DNA, 15 bp, Homo sapiens
gaactgatgcatatt

SEQ ID NO: 1754700 - DNA, 15 bp, Homo sapiens
aactgatgcatatta

SEQ ID NO: 1754701 - DNA, 15 bp, Homo sapiens
actgatgcatattat

SEQ ID NO: 1754702 - DNA, 15 bp, Homo sapiens
ctgatgcatattatc

SEQ ID NO: 1754703 - DNA, 15 bp, Homo sapiens
tgatgcatattatca

SEQ ID NO: 1754704 - DNA, 15 bp, Homo sapiens
gatgcatattatcaa

SEQ ID NO: 1754705 - DNA, 15 bp, Homo sapiens
atgcatattatcaat

SEQ ID NO: 1754706 - DNA, 15 bp, Homo sapiens
tgcatattatcaatc

SEQ ID NO: 1754707 - DNA, 15 bp, Homo sapiens
gcatattatcaatcc

SEQ ID NO: 1754708 - DNA, 15 bp, Homo sapiens
catattatcaatcct

SEQ ID NO: 1754709 - DNA, 15 bp, Homo sapiens
atattatcaatcctc

SEQ ID NO: 1754710 - DNA, 15 bp, Homo sapiens
tattatcaatcctct

SEQ ID NO: 1754711 - DNA, 15 bp, Homo sapiens
attatcaatcctcta

SEQ ID NO: 1754712 - DNA, 15 bp, Homo sapiens
ttatcaatcctctag

SEQ ID NO: 1754713 - DNA, 15 bp, Homo sapiens
tatcaatcctctagc

SEQ ID NO: 1754714 - DNA, 15 bp, Homo sapiens
atcaatcctctagct

SEQ ID NO: 1754715 - DNA, 15 bp, Homo sapiens
tcaatcctctagctc

SEQ ID NO: 1754716 - DNA, 15 bp, Homo sapiens
caatcctctagctct

SEQ ID NO: 1754717 - DNA, 15 bp, Homo sapiens
aatcctctagctcta

SEQ ID NO: 1754718 - DNA, 15 bp, Homo sapiens
atcctctagctctaa

SEQ ID NO: 1754719 - DNA, 15 bp, Homo sapiens
tcctctagctctaac

SEQ ID NO: 1754720 - DNA, 15 bp, Homo sapiens
cctctagctctaact

SEQ ID NO: 1754721 - DNA, 15 bp, Homo sapiens
ctctagctctaacta

SEQ ID NO: 1754722 - DNA, 15 bp, Homo sapiens
tctagctctaactac

SEQ ID NO: 1754723 - DNA, 15 bp, Homo sapiens
ctagctctaactacc

SEQ ID NO: 1754724 - DNA, 15 bp, Homo sapiens
tagctctaactacca

SEQ ID NO: 1754725 - DNA, 15 bp, Homo sapiens
agctctaactaccag

SEQ ID NO: 1754726 - DNA, 15 bp, Homo sapiens
gctctaactaccagt

SEQ ID NO: 1754727 - DNA, 15 bp, Homo sapiens
ctctaactaccagtt

SEQ ID NO: 1754728 - DNA, 15 bp, Homo sapiens
tctaactaccagttt

SEQ ID NO: 1754729 - DNA, 15 bp, Homo sapiens
ctaactaccagttta

SEQ ID NO: 1754730 - DNA, 15 bp, Homo sapiens
taactaccagtttac

SEQ ID NO: 1754731 - DNA, 15 bp, Homo sapiens
aactaccagtttaca

SEQ ID NO: 1754732 - DNA, 15 bp, Homo sapiens
actaccagtttacaa

SEQ ID NO: 1754733 - DNA, 15 bp, Homo sapiens
ctaccagtttacaag

SEQ ID NO: 1754734 - DNA, 15 bp, Homo sapiens
taccagtttacaaga

SEQ ID NO: 1754735 - DNA, 15 bp, Homo sapiens
accagtttacaagac

SEQ ID NO: 1754736 - DNA, 15 bp, Homo sapiens
ccagtttacaagaca

SEQ ID NO: 1754737 - DNA, 15 bp, Homo sapiens
cagtttacaagacat

SEQ ID NO: 1754738 - DNA, 15 bp, Homo sapiens
agtttacaagacata

SEQ ID NO: 1754739 - DNA, 15 bp, Homo sapiens
gtttacaagacatac

SEQ ID NO: 1754740 - DNA, 15 bp, Homo sapiens
tttacaagacataca

SEQ ID NO: 1754741 - DNA, 15 bp, Homo sapiens
ttacaagacatacag

SEQ ID NO: 1754742 - DNA, 15 bp, Homo sapiens
tacaagacatacagg

SEQ ID NO: 1754743 - DNA, 15 bp, Homo sapiens
acaagacatacagga

SEQ ID NO: 1754744 - DNA, 15 bp, Homo sapiens
caagacatacaggag

SEQ ID NO: 1754745 - DNA, 15 bp, Homo sapiens
aagacatacaggaga

SEQ ID NO: 1754746 - DNA, 15 bp, Homo sapiens
agacatacaggagac

SEQ ID NO: 1754747 - DNA, 15 bp, Homo sapiens
gacatacaggagact

SEQ ID NO: 1754748 - DNA, 15 bp, Homo sapiens
acatacaggagactg

SEQ ID NO: 1754749 - DNA, 15 bp, Homo sapiens
catacaggagactga

SEQ ID NO: 1754750 - DNA, 15 bp, Homo sapiens
atacaggagactgag

SEQ ID NO: 1754751 - DNA, 15 bp, Homo sapiens
tacaggagactgagc

SEQ ID NO: 1754752 - DNA, 15 bp, Homo sapiens
acaggagactgagca

SEQ ID NO: 1754753 - DNA, 15 bp, Homo sapiens
caggagactgagcaa

SEQ ID NO: 1754754 - DNA, 15 bp, Homo sapiens
aggagactgagcaac

SEQ ID NO: 1754755 - DNA, 15 bp, Homo sapiens
ggagactgagcaaca

SEQ ID NO: 1754756 - DNA, 15 bp, Homo sapiens
gagactgagcaacat

SEQ ID NO: 1754757 - DNA, 15 bp, Homo sapiens
agactgagcaacatg

SEQ ID NO: 1754758 - DNA, 15 bp, Homo sapiens
gactgagcaacatgt

SEQ ID NO: 1754759 - DNA, 15 bp, Homo sapiens
actgagcaacatgtt

SEQ ID NO: 1754760 - DNA, 15 bp, Homo sapiens
ctgagcaacatgtta

SEQ ID NO: 1754761 - DNA, 15 bp, Homo sapiens
tgagcaacatgttaa

SEQ ID NO: 1754762 - DNA, 15 bp, Homo sapiens
gagcaacatgttaaa

SEQ ID NO: 1754763 - DNA, 15 bp, Homo sapiens
agcaacatgttaaat

SEQ ID NO: 1754764 - DNA, 15 bp, Homo sapiens
gcaacatgttaaata

SEQ ID NO: 1754765 - DNA, 15 bp, Homo sapiens
caacatgttaaatat

SEQ ID NO: 1754766 - DNA, 15 bp, Homo sapiens
aacatgttaaatatc

SEQ ID NO: 1754767 - DNA, 15 bp, Homo sapiens
acatgttaaatatca

SEQ ID NO: 1754768 - DNA, 15 bp, Homo sapiens
catgttaaatatcac

SEQ ID NO: 1754769 - DNA, 15 bp, Homo sapiens
atgttaaatatcacc

SEQ ID NO: 1754770 - DNA, 15 bp, Homo sapiens
tgttaaatatcacca

SEQ ID NO: 1754771 - DNA, 15 bp, Homo sapiens
gttaaatatcaccat

SEQ ID NO: 1754772 - DNA, 15 bp, Homo sapiens
ttaaatatcaccatg

SEQ ID NO: 1754773 - DNA, 15 bp, Homo sapiens
taaatatcaccatgg

SEQ ID NO: 1754774 - DNA, 15 bp, Homo sapiens
aaatatcaccatggg

SEQ ID NO: 1754775 - DNA, 15 bp, Homo sapiens
aatatcaccatggga

SEQ ID NO: 1754776 - DNA, 15 bp, Homo sapiens
atatcaccatgggaa

SEQ ID NO: 1754777 - DNA, 15 bp, Homo sapiens
tatcaccatgggaat

SEQ ID NO: 1754778 - DNA, 15 bp, Homo sapiens
atcaccatgggaata

SEQ ID NO: 1754779 - DNA, 15 bp, Homo sapiens
tcaccatgggaatac

SEQ ID NO: 1754780 - DNA, 15 bp, Homo sapiens
caccatgggaataca

SEQ ID NO: 1754781 - DNA, 15 bp, Homo sapiens
accatgggaatacaa

SEQ ID NO: 1754782 - DNA, 15 bp, Homo sapiens
ccatgggaatacaat

SEQ ID NO: 1754783 - DNA, 15 bp, Homo sapiens
catgggaatacaatc

SEQ ID NO: 1754784 - DNA, 15 bp, Homo sapiens
atgggaatacaatca

SEQ ID NO: 1754785 - DNA, 15 bp, Homo sapiens
tgggaatacaatcag

SEQ ID NO: 1754786 - DNA, 15 bp, Homo sapiens
gggaatacaatcagg

SEQ ID NO: 1754787 - DNA, 15 bp, Homo sapiens
ggaatacaatcagga

SEQ ID NO: 1754788 - DNA, 15 bp, Homo sapiens
gaatacaatcaggaa

SEQ ID NO: 1754789 - DNA, 15 bp, Homo sapiens
aatacaatcaggaaa

SEQ ID NO: 1754790 - DNA, 15 bp, Homo sapiens
atacaatcaggaaaa

SEQ ID NO: 1754791 - DNA, 15 bp, Homo sapiens
tacaatcaggaaaat

SEQ ID NO: 1754792 - DNA, 15 bp, Homo sapiens
acaatcaggaaaatt

SEQ ID NO: 1754793 - DNA, 15 bp, Homo sapiens
caatcaggaaaattc

SEQ ID NO: 1754794 - DNA, 15 bp, Homo sapiens
aatcaggaaaattca

SEQ ID NO: 1754795 - DNA, 15 bp, Homo sapiens
atcaggaaaattcag

SEQ ID NO: 1754796 - DNA, 15 bp, Homo sapiens
tcaggaaaattcaga

SEQ ID NO: 1754797 - DNA, 15 bp, Homo sapiens
caggaaaattcagaa

SEQ ID NO: 1754798 - DNA, 15 bp, Homo sapiens
aggaaaattcagaaa

SEQ ID NO: 1754799 - DNA, 15 bp, Homo sapiens
ggaaaattcagaaaa

SEQ ID NO: 1754800 - DNA, 15 bp, Homo sapiens
gaaaattcagaaaac

SEQ ID NO: 1754801 - DNA, 15 bp, Homo sapiens
aaaattcagaaaact

SEQ ID NO: 1754802 - DNA, 15 bp, Homo sapiens
aaattcagaaaactc

SEQ ID NO: 1754803 - DNA, 15 bp, Homo sapiens
aattcagaaaactct

SEQ ID NO: 1754804 - DNA, 15 bp, Homo sapiens
attcagaaaactcta

SEQ ID NO: 1754805 - DNA, 15 bp, Homo sapiens
ttcagaaaactctac

SEQ ID NO: 1754806 - DNA, 15 bp, Homo sapiens
tcagaaaactctaca

SEQ ID NO: 1754807 - DNA, 15 bp, Homo sapiens
cagaaaactctacag

SEQ ID NO: 1754808 - DNA, 15 bp, Homo sapiens
agaaaactctacagg

SEQ ID NO: 1754809 - DNA, 15 bp, Homo sapiens
gaaaactctacagga

SEQ ID NO: 1754810 - DNA, 15 bp, Homo sapiens
aaaactctacaggat

SEQ ID NO: 1754811 - DNA, 15 bp, Homo sapiens
aaactctacaggata

SEQ ID NO: 1754812 - DNA, 15 bp, Homo sapiens
aactctacaggataa

SEQ ID NO: 1754813 - DNA, 15 bp, Homo sapiens
actctacaggataaa

SEQ ID NO: 1754814 - DNA, 15 bp, Homo sapiens
ctctacaggataaat

SEQ ID NO: 1754815 - DNA, 15 bp, Homo sapiens
tctacaggataaatg

SEQ ID NO: 1754816 - DNA, 15 bp, Homo sapiens
ctacaggataaatga

SEQ ID NO: 1754817 - DNA, 15 bp, Homo sapiens
tacaggataaatgac

SEQ ID NO: 1754818 - DNA, 15 bp, Homo sapiens
acaggataaatgacc

SEQ ID NO: 1754819 - DNA, 15 bp, Homo sapiens
caggataaatgaccc

SEQ ID NO: 1754820 - DNA, 15 bp, Homo sapiens
aggataaatgaccca

SEQ ID NO: 1754821 - DNA, 15 bp, Homo sapiens
ggataaatgacccag

SEQ ID NO: 1754822 - DNA, 15 bp, Homo sapiens
gggattacaggcgct

SEQ ID NO: 1754823 - DNA, 15 bp, Homo sapiens
ggattacaggcgcta

SEQ ID NO: 1754824 - DNA, 15 bp, Homo sapiens
gattacaggcgctac

SEQ ID NO: 1754825 - DNA, 15 bp, Homo sapiens
attacaggcgctacc

SEQ ID NO: 1754826 - DNA, 15 bp, Homo sapiens
ttacaggcgctacca

SEQ ID NO: 1754827 - DNA, 15 bp, Homo sapiens
tacaggcgctaccat

SEQ ID NO: 1754828 - DNA, 15 bp, Homo sapiens
acaggcgctaccatg

SEQ ID NO: 1754829 - DNA, 15 bp, Homo sapiens
caggcgctaccatgc

SEQ ID NO: 1754830 - DNA, 15 bp, Homo sapiens
aggcgctaccatgcc

SEQ ID NO: 1754831 - DNA, 15 bp, Homo sapiens
ggcgctaccatgccc

SEQ ID NO: 1754832 - DNA, 15 bp, Homo sapiens
gcgctaccatgcccg

SEQ ID NO: 1754833 - DNA, 15 bp, Homo sapiens
cgctaccatgcccgg

SEQ ID NO: 1754834 - DNA, 15 bp, Homo sapiens
gctaccatgcccggc

SEQ ID NO: 1754835 - DNA, 15 bp, Homo sapiens
ctaccatgcccggct

SEQ ID NO: 1754836 - DNA, 15 bp, Homo sapiens
taccatgcccggcta

SEQ ID NO: 1754837 - DNA, 15 bp, Homo sapiens
ttcgccatgttggcg

SEQ ID NO: 1754838 - DNA, 15 bp, Homo sapiens
tcgccatgttggcga

SEQ ID NO: 1754839 - DNA, 15 bp, Homo sapiens
cgccatgttggcgag

SEQ ID NO: 1754840 - DNA, 15 bp, Homo sapiens
gccatgttggcgagg

SEQ ID NO: 1754841 - DNA, 15 bp, Homo sapiens
ccatgttggcgaggc

SEQ ID NO: 1754842 - DNA, 15 bp, Homo sapiens
catgttggcgaggct

SEQ ID NO: 1754843 - DNA, 15 bp, Homo sapiens
atgttggcgaggctg

SEQ ID NO: 1754844 - DNA, 15 bp, Homo sapiens
tgttggcgaggctgg

SEQ ID NO: 1754845 - DNA, 15 bp, Homo sapiens
gttggcgaggctggt

SEQ ID NO: 1754846 - DNA, 15 bp, Homo sapiens
ttggcgaggctggtc

SEQ ID NO: 1754847 - DNA, 15 bp, Homo sapiens
tggcgaggctggtct

SEQ ID NO: 1754848 - DNA, 15 bp, Homo sapiens
ggcgaggctggtctt

SEQ ID NO: 1754849 - DNA, 15 bp, Homo sapiens
gcgaggctggtcttg

SEQ ID NO: 1754850 - DNA, 15 bp, Homo sapiens
cgaggctggtcttga

SEQ ID NO: 1754851 - DNA, 15 bp, Homo sapiens
gaggctggtcttgaa

SEQ ID NO: 1754852 - DNA, 15 bp, Homo sapiens
acctcaggtgatcta

SEQ ID NO: 1754853 - DNA, 15 bp, Homo sapiens
cctcaggtgatctac

SEQ ID NO: 1754854 - DNA, 15 bp, Homo sapiens
ctcaggtgatctacc

SEQ ID NO: 1754855 - DNA, 15 bp, Homo sapiens
tcaggtgatctaccc

SEQ ID NO: 1754856 - DNA, 15 bp, Homo sapiens
caggtgatctacccg

SEQ ID NO: 1754857 - DNA, 15 bp, Homo sapiens
aggtgatctacccgc

SEQ ID NO: 1754858 - DNA, 15 bp, Homo sapiens
ggtgatctacccgcc

SEQ ID NO: 1754859 - DNA, 15 bp, Homo sapiens
gtgatctacccgcct

SEQ ID NO: 1754860 - DNA, 15 bp, Homo sapiens
tgatctacccgcctg

SEQ ID NO: 1754861 - DNA, 15 bp, Homo sapiens
gatctacccgcctgg

SEQ ID NO: 1754862 - DNA, 15 bp, Homo sapiens
atctacccgcctggg

SEQ ID NO: 1754863 - DNA, 15 bp, Homo sapiens
tctacccgcctgggc

SEQ ID NO: 1754864 - DNA, 15 bp, Homo sapiens
ctacccgcctgggcc

SEQ ID NO: 1754865 - DNA, 15 bp, Homo sapiens
tacccgcctgggcct

SEQ ID NO: 1754866 - DNA, 15 bp, Homo sapiens
acccgcctgggcctc

SEQ ID NO: 1754867 - DNA, 15 bp, Homo sapiens
gcctcccaaagtgca

SEQ ID NO: 1754868 - DNA, 15 bp, Homo sapiens
cctcccaaagtgcat

SEQ ID NO: 1754869 - DNA, 15 bp, Homo sapiens
ctcccaaagtgcatc

SEQ ID NO: 1754870 - DNA, 15 bp, Homo sapiens
tcccaaagtgcatca

SEQ ID NO: 1754871 - DNA, 15 bp, Homo sapiens
cccaaagtgcatcag

SEQ ID NO: 1754872 - DNA, 15 bp, Homo sapiens
ccaaagtgcatcagt

SEQ ID NO: 1754873 - DNA, 15 bp, Homo sapiens
caaagtgcatcagtg

SEQ ID NO: 1754874 - DNA, 15 bp, Homo sapiens
aaagtgcatcagtgg

SEQ ID NO: 1754875 - DNA, 15 bp, Homo sapiens
aagtgcatcagtggt

SEQ ID NO: 1754876 - DNA, 15 bp, Homo sapiens
agtgcatcagtggta

SEQ ID NO: 1754877 - DNA, 15 bp, Homo sapiens
gtgcatcagtggtat

SEQ ID NO: 1754878 - DNA, 15 bp, Homo sapiens
tgcatcagtggtatt

SEQ ID NO: 1754879 - DNA, 15 bp, Homo sapiens
gcatcagtggtattt

SEQ ID NO: 1754880 - DNA, 15 bp, Homo sapiens
catcagtggtatttt

SEQ ID NO: 1754881 - DNA, 15 bp, Homo sapiens
atcagtggtattttt

SEQ ID NO: 1754882 - DNA, 15 bp, Homo sapiens
tcagtggtattttta

SEQ ID NO: 1754883 - DNA, 15 bp, Homo sapiens
cagtggtatttttaa

SEQ ID NO: 1754884 - DNA, 15 bp, Homo sapiens
agtggtatttttaat

SEQ ID NO: 1754885 - DNA, 15 bp, Homo sapiens
gtggtatttttaata

SEQ ID NO: 1754886 - DNA, 15 bp, Homo sapiens
tggtatttttaatac

SEQ ID NO: 1754887 - DNA, 15 bp, Homo sapiens
ggtatttttaatact

SEQ ID NO: 1754888 - DNA, 15 bp, Homo sapiens
gtatttttaatactc

SEQ ID NO: 1754889 - DNA, 15 bp, Homo sapiens
tatttttaatactct

SEQ ID NO: 1754890 - DNA, 15 bp, Homo sapiens
atttttaatactctt

SEQ ID NO: 1754891 - DNA, 15 bp, Homo sapiens
tttttaatactcttt

SEQ ID NO: 1754892 - DNA, 15 bp, Homo sapiens
ttttaatactctttt

SEQ ID NO: 1754893 - DNA, 15 bp, Homo sapiens
tttaatactcttttt

SEQ ID NO: 1754894 - DNA, 15 bp, Homo sapiens
ttaatactctttttt

SEQ ID NO: 1754895 - DNA, 15 bp, Homo sapiens
taatactctttttta

SEQ ID NO: 1754896 - DNA, 15 bp, Homo sapiens
aatactcttttttaa

SEQ ID NO: 1754897 - DNA, 15 bp, Homo sapiens
atactcttttttaaa

SEQ ID NO: 1754898 - DNA, 15 bp, Homo sapiens
tactcttttttaaaa

SEQ ID NO: 1754899 - DNA, 15 bp, Homo sapiens
actcttttttaaaaa

SEQ ID NO: 1754900 - DNA, 15 bp, Homo sapiens
ctcttttttaaaaaa

SEQ ID NO: 1754901 - DNA, 15 bp, Homo sapiens
tcttttttaaaaaag

SEQ ID NO: 1754902 - DNA, 15 bp, Homo sapiens
cttttttaaaaaagg

SEQ ID NO: 1754903 - DNA, 15 bp, Homo sapiens
ttttttaaaaaagga

SEQ ID NO: 1754904 - DNA, 15 bp, Homo sapiens
tttttaaaaaaggat

SEQ ID NO: 1754905 - DNA, 15 bp, Homo sapiens
ttttaaaaaaggatt

SEQ ID NO: 1754906 - DNA, 15 bp, Homo sapiens
tttaaaaaaggattc

SEQ ID NO: 1754907 - DNA, 15 bp, Homo sapiens
ttaaaaaaggattca

SEQ ID NO: 1754908 - DNA, 15 bp, Homo sapiens
taaaaaaggattcac

SEQ ID NO: 1754909 - DNA, 15 bp, Homo sapiens
aaaaaaggattcacc

SEQ ID NO: 1754910 - DNA, 15 bp, Homo sapiens
aaaaaggattcacct

SEQ ID NO: 1754911 - DNA, 15 bp, Homo sapiens
aaaaggattcaccta

SEQ ID NO: 1754912 - DNA, 15 bp, Homo sapiens
aaaggattcacctaa

SEQ ID NO: 1754913 - DNA, 15 bp, Homo sapiens
aaggattcacctaac

SEQ ID NO: 1754914 - DNA, 15 bp, Homo sapiens
aggattcacctaact

SEQ ID NO: 1754915 - DNA, 15 bp, Homo sapiens
ggattcacctaactg

SEQ ID NO: 1754916 - DNA, 15 bp, Homo sapiens
gattcacctaactga

SEQ ID NO: 1754917 - DNA, 15 bp, Homo sapiens
attcacctaactgag

SEQ ID NO: 1754918 - DNA, 15 bp, Homo sapiens
ttcacctaactgagg

SEQ ID NO: 1754919 - DNA, 15 bp, Homo sapiens
tcacctaactgaggg

SEQ ID NO: 1754920 - DNA, 15 bp, Homo sapiens
cacctaactgagggt

SEQ ID NO: 1754921 - DNA, 15 bp, Homo sapiens
acctaactgagggtg

SEQ ID NO: 1754922 - DNA, 15 bp, Homo sapiens
cctaactgagggtgg

SEQ ID NO: 1754923 - DNA, 15 bp, Homo sapiens
ctaactgagggtgga

SEQ ID NO: 1754924 - DNA, 15 bp, Homo sapiens
taactgagggtggag

SEQ ID NO: 1754925 - DNA, 15 bp, Homo sapiens
aactgagggtggagg

SEQ ID NO: 1754926 - DNA, 15 bp, Homo sapiens
actgagggtggagga

SEQ ID NO: 1754927 - DNA, 15 bp, Homo sapiens
ctgagggtggaggat

SEQ ID NO: 1754928 - DNA, 15 bp, Homo sapiens
tgagggtggaggatg

SEQ ID NO: 1754929 - DNA, 15 bp, Homo sapiens
gagggtggaggatgg

SEQ ID NO: 1754930 - DNA, 15 bp, Homo sapiens
agggtggaggatggg

SEQ ID NO: 1754931 - DNA, 15 bp, Homo sapiens
gggtggaggatggga

SEQ ID NO: 1754932 - DNA, 15 bp, Homo sapiens
ggtggaggatgggag

SEQ ID NO: 1754933 - DNA, 15 bp, Homo sapiens
gtggaggatgggagg

SEQ ID NO: 1754934 - DNA, 15 bp, Homo sapiens
tggaggatgggagga

SEQ ID NO: 1754935 - DNA, 15 bp, Homo sapiens
ggaggatgggaggag

SEQ ID NO: 1754936 - DNA, 15 bp, Homo sapiens
gaggatgggaggagg

SEQ ID NO: 1754937 - DNA, 15 bp, Homo sapiens
aggatgggaggaggg

SEQ ID NO: 1754938 - DNA, 15 bp, Homo sapiens
ggatgggaggaggga

SEQ ID NO: 1754939 - DNA, 15 bp, Homo sapiens
gatgggaggagggag

SEQ ID NO: 1754940 - DNA, 15 bp, Homo sapiens
atgggaggagggaga

SEQ ID NO: 1754941 - DNA, 15 bp, Homo sapiens
tgggaggagggagag

SEQ ID NO: 1754942 - DNA, 15 bp, Homo sapiens
gggaggagggagagc

SEQ ID NO: 1754943 - DNA, 15 bp, Homo sapiens
ggaggagggagagca

SEQ ID NO: 1754944 - DNA, 15 bp, Homo sapiens
gaggagggagagcag

SEQ ID NO: 1754945 - DNA, 15 bp, Homo sapiens
aggagggagagcagg

SEQ ID NO: 1754946 - DNA, 15 bp, Homo sapiens
ggagggagagcagga

SEQ ID NO: 1754947 - DNA, 15 bp, Homo sapiens
gagggagagcaggaa

SEQ ID NO: 1754948 - DNA, 15 bp, Homo sapiens
agggagagcaggaaa

SEQ ID NO: 1754949 - DNA, 15 bp, Homo sapiens
gggagagcaggaaaa

SEQ ID NO: 1754950 - DNA, 15 bp, Homo sapiens
ggagagcaggaaaaa

SEQ ID NO: 1754951 - DNA, 15 bp, Homo sapiens
gagagcaggaaaaaa

SEQ ID NO: 1754952 - DNA, 15 bp, Homo sapiens
agagcaggaaaaaac

SEQ ID NO: 1754953 - DNA, 15 bp, Homo sapiens
gagcaggaaaaaaca

SEQ ID NO: 1754954 - DNA, 15 bp, Homo sapiens
agcaggaaaaaacac

SEQ ID NO: 1754955 - DNA, 15 bp, Homo sapiens
gcaggaaaaaacact

SEQ ID NO: 1754956 - DNA, 15 bp, Homo sapiens
caggaaaaaacactt

SEQ ID NO: 1754957 - DNA, 15 bp, Homo sapiens
aggaaaaaacacttg

SEQ ID NO: 1754958 - DNA, 15 bp, Homo sapiens
ggaaaaaacacttgg

SEQ ID NO: 1754959 - DNA, 15 bp, Homo sapiens
gaaaaaacacttggg

SEQ ID NO: 1754960 - DNA, 15 bp, Homo sapiens
aaaaaacacttgggt

SEQ ID NO: 1754961 - DNA, 15 bp, Homo sapiens
aaaaacacttgggta

SEQ ID NO: 1754962 - DNA, 15 bp, Homo sapiens
aaaacacttgggtac

SEQ ID NO: 1754963 - DNA, 15 bp, Homo sapiens
aaacacttgggtaca

SEQ ID NO: 1754964 - DNA, 15 bp, Homo sapiens
aacacttgggtacaa

SEQ ID NO: 1754965 - DNA, 15 bp, Homo sapiens
acacttgggtacaaa

SEQ ID NO: 1754966 - DNA, 15 bp, Homo sapiens
cacttgggtacaaag

SEQ ID NO: 1754967 - DNA, 15 bp, Homo sapiens
acttgggtacaaagc

SEQ ID NO: 1754968 - DNA, 15 bp, Homo sapiens
cttgggtacaaagct

SEQ ID NO: 1754969 - DNA, 15 bp, Homo sapiens
ttgggtacaaagctt

SEQ ID NO: 1754970 - DNA, 15 bp, Homo sapiens
tgggtacaaagctta

SEQ ID NO: 1754971 - DNA, 15 bp, Homo sapiens
gggtacaaagcttac

SEQ ID NO: 1754972 - DNA, 15 bp, Homo sapiens
ggtacaaagcttact

SEQ ID NO: 1754973 - DNA, 15 bp, Homo sapiens
gtacaaagcttacta

SEQ ID NO: 1754974 - DNA, 15 bp, Homo sapiens
tacaaagcttactac

SEQ ID NO: 1754975 - DNA, 15 bp, Homo sapiens
acaaagcttactacc

SEQ ID NO: 1754976 - DNA, 15 bp, Homo sapiens
caaagcttactacct

SEQ ID NO: 1754977 - DNA, 15 bp, Homo sapiens
aaagcttactacctg

SEQ ID NO: 1754978 - DNA, 15 bp, Homo sapiens
aagcttactacctgg

SEQ ID NO: 1754979 - DNA, 15 bp, Homo sapiens
agcttactacctggg

SEQ ID NO: 1754980 - DNA, 15 bp, Homo sapiens
gcttactacctgggt

SEQ ID NO: 1754981 - DNA, 15 bp, Homo sapiens
cttactacctgggtg

SEQ ID NO: 1754982 - DNA, 15 bp, Homo sapiens
ttactacctgggtga

SEQ ID NO: 1754983 - DNA, 15 bp, Homo sapiens
tactacctgggtgat

SEQ ID NO: 1754984 - DNA, 15 bp, Homo sapiens
actacctgggtgatt

SEQ ID NO: 1754985 - DNA, 15 bp, Homo sapiens
ctacctgggtgatta

SEQ ID NO: 1754986 - DNA, 15 bp, Homo sapiens
tacctgggtgattaa

SEQ ID NO: 1754987 - DNA, 15 bp, Homo sapiens
acctgggtgattaaa

SEQ ID NO: 1754988 - DNA, 15 bp, Homo sapiens
cctgggtgattaaat

SEQ ID NO: 1754989 - DNA, 15 bp, Homo sapiens
ctgggtgattaaata

SEQ ID NO: 1754990 - DNA, 15 bp, Homo sapiens
tgggtgattaaataa

SEQ ID NO: 1754991 - DNA, 15 bp, Homo sapiens
gggtgattaaataat

SEQ ID NO: 1754992 - DNA, 15 bp, Homo sapiens
ggtgattaaataatc

SEQ ID NO: 1754993 - DNA, 15 bp, Homo sapiens
gtgattaaataatct

SEQ ID NO: 1754994 - DNA, 15 bp, Homo sapiens
tgattaaataatctg

SEQ ID NO: 1754995 - DNA, 15 bp, Homo sapiens
gattaaataatctgt

SEQ ID NO: 1754996 - DNA, 15 bp, Homo sapiens
attaaataatctgta

SEQ ID NO: 1754997 - DNA, 15 bp, Homo sapiens
ttaaataatctgtac

SEQ ID NO: 1754998 - DNA, 15 bp, Homo sapiens
taaataatctgtaca

SEQ ID NO: 1754999 - DNA, 15 bp, Homo sapiens
aaataatctgtacaa

SEQ ID NO: 1755000 - DNA, 15 bp, Homo sapiens
aataatctgtacaac

SEQ ID NO: 1755001 - DNA, 15 bp, Homo sapiens
ataatctgtacaaca

SEQ ID NO: 1755002 - DNA, 15 bp, Homo sapiens
taatctgtacaacaa

SEQ ID NO: 1755003 - DNA, 15 bp, Homo sapiens
aatctgtacaacaaa

SEQ ID NO: 1755004 - DNA, 15 bp, Homo sapiens
atctgtacaacaaaa

SEQ ID NO: 1755005 - DNA, 15 bp, Homo sapiens
tctgtacaacaaaac

SEQ ID NO: 1755006 - DNA, 15 bp, Homo sapiens
ctgtacaacaaaacc

SEQ ID NO: 1755007 - DNA, 15 bp, Homo sapiens
tgtacaacaaaaccc

SEQ ID NO: 1755008 - DNA, 15 bp, Homo sapiens
gtacaacaaaacccc

SEQ ID NO: 1755009 - DNA, 15 bp, Homo sapiens
tacaacaaaaccccg

SEQ ID NO: 1755010 - DNA, 15 bp, Homo sapiens
acaacaaaaccccgt

SEQ ID NO: 1755011 - DNA, 15 bp, Homo sapiens
caacaaaaccccgtg

SEQ ID NO: 1755012 - DNA, 15 bp, Homo sapiens
aacaaaaccccgtga

SEQ ID NO: 1755013 - DNA, 15 bp, Homo sapiens
acaaaaccccgtgac

SEQ ID NO: 1755014 - DNA, 15 bp, Homo sapiens
caaaaccccgtgaca

SEQ ID NO: 1755015 - DNA, 15 bp, Homo sapiens
aaaaccccgtgacac

SEQ ID NO: 1755016 - DNA, 15 bp, Homo sapiens
aaaccccgtgacact

SEQ ID NO: 1755017 - DNA, 15 bp, Homo sapiens
aaccccgtgacacta

SEQ ID NO: 1755018 - DNA, 15 bp, Homo sapiens
accccgtgacactag

SEQ ID NO: 1755019 - DNA, 15 bp, Homo sapiens
ccccgtgacactagt

SEQ ID NO: 1755020 - DNA, 15 bp, Homo sapiens
cccgtgacactagtt

SEQ ID NO: 1755021 - DNA, 15 bp, Homo sapiens
ccgtgacactagttt

SEQ ID NO: 1755022 - DNA, 15 bp, Homo sapiens
cgtgacactagttta

SEQ ID NO: 1755023 - DNA, 15 bp, Homo sapiens
gtgacactagtttac

SEQ ID NO: 1755024 - DNA, 15 bp, Homo sapiens
tgacactagtttacc

SEQ ID NO: 1755025 - DNA, 15 bp, Homo sapiens
gacactagtttacct

SEQ ID NO: 1755026 - DNA, 15 bp, Homo sapiens
acactagtttaccta

SEQ ID NO: 1755027 - DNA, 15 bp, Homo sapiens
cactagtttacctat

SEQ ID NO: 1755028 - DNA, 15 bp, Homo sapiens
actagtttacctata

SEQ ID NO: 1755029 - DNA, 15 bp, Homo sapiens
ctagtttacctatat

SEQ ID NO: 1755030 - DNA, 15 bp, Homo sapiens
tagtttacctatata

SEQ ID NO: 1755031 - DNA, 15 bp, Homo sapiens
agtttacctatataa

SEQ ID NO: 1755032 - DNA, 15 bp, Homo sapiens
gtttacctatataac

SEQ ID NO: 1755033 - DNA, 15 bp, Homo sapiens
tttacctatataaca

SEQ ID NO: 1755034 - DNA, 15 bp, Homo sapiens
ttacctatataacaa

SEQ ID NO: 1755035 - DNA, 15 bp, Homo sapiens
tacctatataacaaa

SEQ ID NO: 1755036 - DNA, 15 bp, Homo sapiens
acctatataacaaac

SEQ ID NO: 1755037 - DNA, 15 bp, Homo sapiens
cctatataacaaacc

SEQ ID NO: 1755038 - DNA, 15 bp, Homo sapiens
ctatataacaaacct

SEQ ID NO: 1755039 - DNA, 15 bp, Homo sapiens
tatataacaaaccta

SEQ ID NO: 1755040 - DNA, 15 bp, Homo sapiens
atataacaaacctac

SEQ ID NO: 1755041 - DNA, 15 bp, Homo sapiens
tataacaaacctact

SEQ ID NO: 1755042 - DNA, 15 bp, Homo sapiens
ataacaaacctactt

SEQ ID NO: 1755043 - DNA, 15 bp, Homo sapiens
taacaaacctacttg

SEQ ID NO: 1755044 - DNA, 15 bp, Homo sapiens
aacaaacctacttgt

SEQ ID NO: 1755045 - DNA, 15 bp, Homo sapiens
acaaacctacttgtg

SEQ ID NO: 1755046 - DNA, 15 bp, Homo sapiens
caaacctacttgtgc

SEQ ID NO: 1755047 - DNA, 15 bp, Homo sapiens
aaacctacttgtgca

SEQ ID NO: 1755048 - DNA, 15 bp, Homo sapiens
aacctacttgtgcat

SEQ ID NO: 1755049 - DNA, 15 bp, Homo sapiens
acctacttgtgcatc

SEQ ID NO: 1755050 - DNA, 15 bp, Homo sapiens
cctacttgtgcatcc

SEQ ID NO: 1755051 - DNA, 15 bp, Homo sapiens
ctacttgtgcatccc

SEQ ID NO: 1755052 - DNA, 15 bp, Homo sapiens
tacttgtgcatcccc

SEQ ID NO: 1755053 - DNA, 15 bp, Homo sapiens
acttgtgcatcccca

SEQ ID NO: 1755054 - DNA, 15 bp, Homo sapiens
cttgtgcatccccaa

SEQ ID NO: 1755055 - DNA, 15 bp, Homo sapiens
ttgtgcatccccaaa

SEQ ID NO: 1755056 - DNA, 15 bp, Homo sapiens
tgtgcatccccaaac

SEQ ID NO: 1755057 - DNA, 15 bp, Homo sapiens
gtgcatccccaaacc

SEQ ID NO: 1755058 - DNA, 15 bp, Homo sapiens
tgcatccccaaacct

SEQ ID NO: 1755059 - DNA, 15 bp, Homo sapiens
gcatccccaaaccta

SEQ ID NO: 1755060 - DNA, 15 bp, Homo sapiens
catccccaaacctaa

SEQ ID NO: 1755061 - DNA, 15 bp, Homo sapiens
atccccaaacctaaa

SEQ ID NO: 1755062 - DNA, 15 bp, Homo sapiens
tccccaaacctaaaa

SEQ ID NO: 1755063 - DNA, 15 bp, Homo sapiens
ccccaaacctaaaat

SEQ ID NO: 1755064 - DNA, 15 bp, Homo sapiens
cccaaacctaaaata

SEQ ID NO: 1755065 - DNA, 15 bp, Homo sapiens
ccaaacctaaaataa

SEQ ID NO: 1755066 - DNA, 15 bp, Homo sapiens
caaacctaaaataaa

SEQ ID NO: 1755067 - DNA, 15 bp, Homo sapiens
aaacctaaaataaaa

SEQ ID NO: 1755068 - DNA, 15 bp, Homo sapiens
aacctaaaataaaag

SEQ ID NO: 1755069 - DNA, 15 bp, Homo sapiens
acctaaaataaaagt

SEQ ID NO: 1755070 - DNA, 15 bp, Homo sapiens
cctaaaataaaagtt

SEQ ID NO: 1755071 - DNA, 15 bp, Homo sapiens
ctaaaataaaagtta

SEQ ID NO: 1755072 - DNA, 15 bp, Homo sapiens
taaaataaaagttaa

SEQ ID NO: 1755073 - DNA, 15 bp, Homo sapiens
aaaataaaagttaaa

SEQ ID NO: 1755074 - DNA, 15 bp, Homo sapiens
aaataaaagttaaaa

SEQ ID NO: 1755075 - DNA, 15 bp, Homo sapiens
aataaaagttaaaaa

SEQ ID NO: 1755076 - DNA, 15 bp, Homo sapiens
ataaaagttaaaaaa

SEQ ID NO: 1755077 - DNA, 15 bp, Homo sapiens
taaaagttaaaaaaa

SEQ ID NO: 1755078 - DNA, 15 bp, Homo sapiens
aaaagttaaaaaaag

SEQ ID NO: 1755079 - DNA, 15 bp, Homo sapiens
aaagttaaaaaaaga

SEQ ID NO: 1755080 - DNA, 15 bp, Homo sapiens
aagttaaaaaaagat

SEQ ID NO: 1755081 - DNA, 15 bp, Homo sapiens
gttaaaaaaagattc

SEQ ID NO: 1755082 - DNA, 15 bp, Homo sapiens
ttaaaaaaagattca

SEQ ID NO: 1755083 - DNA, 15 bp, Homo sapiens
taaaaaaagattcat

SEQ ID NO: 1755084 - DNA, 15 bp, Homo sapiens
aaaaaaagattcatt

SEQ ID NO: 1755085 - DNA, 15 bp, Homo sapiens
aaaaaagattcattg

SEQ ID NO: 1755086 - DNA, 15 bp, Homo sapiens
aaaaagattcattgc

SEQ ID NO: 1755087 - DNA, 15 bp, Homo sapiens
aaaagattcattgca

SEQ ID NO: 1755088 - DNA, 15 bp, Homo sapiens
aaagattcattgcac

SEQ ID NO: 1755089 - DNA, 15 bp, Homo sapiens
aagattcattgcact

SEQ ID NO: 1755090 - DNA, 15 bp, Homo sapiens
agattcattgcactc

SEQ ID NO: 1755091 - DNA, 15 bp, Homo sapiens
gattcattgcactca

SEQ ID NO: 1755092 - DNA, 15 bp, Homo sapiens
attcattgcactcaa

SEQ ID NO: 1755093 - DNA, 15 bp, Homo sapiens
ttcattgcactcaag

SEQ ID NO: 1755094 - DNA, 15 bp, Homo sapiens
tcattgcactcaagt

SEQ ID NO: 1755095 - DNA, 15 bp, Homo sapiens
cattgcactcaagtt

SEQ ID NO: 1755096 - DNA, 15 bp, Homo sapiens
attgcactcaagtta

SEQ ID NO: 1755097 - DNA, 15 bp, Homo sapiens
ttgcactcaagttaa

SEQ ID NO: 1755098 - DNA, 15 bp, Homo sapiens
tgcactcaagttaac

SEQ ID NO: 1755099 - DNA, 15 bp, Homo sapiens
gcactcaagttaaca

SEQ ID NO: 1755100 - DNA, 15 bp, Homo sapiens
cactcaagttaacag

SEQ ID NO: 1755101 - DNA, 15 bp, Homo sapiens
actcaagttaacagc

SEQ ID NO: 1755102 - DNA, 15 bp, Homo sapiens
ctcaagttaacagca

SEQ ID NO: 1755103 - DNA, 15 bp, Homo sapiens
tcaagttaacagcac

SEQ ID NO: 1755104 - DNA, 15 bp, Homo sapiens
caagttaacagcacc

SEQ ID NO: 1755105 - DNA, 15 bp, Homo sapiens
aagttaacagcaccc

SEQ ID NO: 1755106 - DNA, 15 bp, Homo sapiens
agttaacagcaccct

SEQ ID NO: 1755107 - DNA, 15 bp, Homo sapiens
gttaacagcaccctc

SEQ ID NO: 1755108 - DNA, 15 bp, Homo sapiens
ttaacagcaccctct

SEQ ID NO: 1755109 - DNA, 15 bp, Homo sapiens
taacagcaccctctt

SEQ ID NO: 1755110 - DNA, 15 bp, Homo sapiens
aacagcaccctcttc

SEQ ID NO: 1755111 - DNA, 15 bp, Homo sapiens
acagcaccctcttct

SEQ ID NO: 1755112 - DNA, 15 bp, Homo sapiens
cagcaccctcttctg

SEQ ID NO: 1755113 - DNA, 15 bp, Homo sapiens
agcaccctcttctga

SEQ ID NO: 1755114 - DNA, 15 bp, Homo sapiens
gcaccctcttctgaa

SEQ ID NO: 1755115 - DNA, 15 bp, Homo sapiens
caccctcttctgaat

SEQ ID NO: 1755116 - DNA, 15 bp, Homo sapiens
accctcttctgaatg

SEQ ID NO: 1755117 - DNA, 15 bp, Homo sapiens
ccctcttctgaatga

SEQ ID NO: 1755118 - DNA, 15 bp, Homo sapiens
cctcttctgaatgat

SEQ ID NO: 1755119 - DNA, 15 bp, Homo sapiens
ctcttctgaatgatg

SEQ ID NO: 1755120 - DNA, 15 bp, Homo sapiens
tcttctgaatgatgt

SEQ ID NO: 1755121 - DNA, 15 bp, Homo sapiens
cttctgaatgatgta

SEQ ID NO: 1755122 - DNA, 15 bp, Homo sapiens
ttctgaatgatgtac

SEQ ID NO: 1755123 - DNA, 15 bp, Homo sapiens
tctgaatgatgtact

SEQ ID NO: 1755124 - DNA, 15 bp, Homo sapiens
ctgaatgatgtacta

SEQ ID NO: 1755125 - DNA, 15 bp, Homo sapiens
tgaatgatgtactaa

SEQ ID NO: 1755126 - DNA, 15 bp, Homo sapiens
gaatgatgtactaat

SEQ ID NO: 1755127 - DNA, 15 bp, Homo sapiens
aatgatgtactaatt

SEQ ID NO: 1755128 - DNA, 15 bp, Homo sapiens
atgatgtactaatta

SEQ ID NO: 1755129 - DNA, 15 bp, Homo sapiens
tgatgtactaattat

SEQ ID NO: 1755130 - DNA, 15 bp, Homo sapiens
gatgtactaattatt

SEQ ID NO: 1755131 - DNA, 15 bp, Homo sapiens
atgtactaattatta

SEQ ID NO: 1755132 - DNA, 15 bp, Homo sapiens
tgtactaattattat

SEQ ID NO: 1755133 - DNA, 15 bp, Homo sapiens
gtactaattattatt

SEQ ID NO: 1755134 - DNA, 15 bp, Homo sapiens
tactaattattattg

SEQ ID NO: 1755135 - DNA, 15 bp, Homo sapiens
actaattattattga

SEQ ID NO: 1755136 - DNA, 15 bp, Homo sapiens
ctaattattattgat

SEQ ID NO: 1755137 - DNA, 15 bp, Homo sapiens
taattattattgatt

SEQ ID NO: 1755138 - DNA, 15 bp, Homo sapiens
aattattattgattt

SEQ ID NO: 1755139 - DNA, 15 bp, Homo sapiens
attattattgatttg

SEQ ID NO: 1755140 - DNA, 15 bp, Homo sapiens
ttattattgatttga

SEQ ID NO: 1755141 - DNA, 15 bp, Homo sapiens
tattattgatttgag

SEQ ID NO: 1755142 - DNA, 15 bp, Homo sapiens
attattgatttgaga

SEQ ID NO: 1755143 - DNA, 15 bp, Homo sapiens
ttattgatttgagaa

SEQ ID NO: 1755144 - DNA, 15 bp, Homo sapiens
tattgatttgagaaa

SEQ ID NO: 1755145 - DNA, 15 bp, Homo sapiens
attgatttgagaaag

SEQ ID NO: 1755146 - DNA, 15 bp, Homo sapiens
ttgatttgagaaagt

SEQ ID NO: 1755147 - DNA, 15 bp, Homo sapiens
tgatttgagaaagta

SEQ ID NO: 1755148 - DNA, 15 bp, Homo sapiens
gatttgagaaagtaa

SEQ ID NO: 1755149 - DNA, 15 bp, Homo sapiens
atttgagaaagtaag

SEQ ID NO: 1755150 - DNA, 15 bp, Homo sapiens
tttgagaaagtaagc

SEQ ID NO: 1755151 - DNA, 15 bp, Homo sapiens
ttgagaaagtaagca

SEQ ID NO: 1755152 - DNA, 15 bp, Homo sapiens
tgagaaagtaagcat

SEQ ID NO: 1755153 - DNA, 15 bp, Homo sapiens
gagaaagtaagcatc

SEQ ID NO: 1755154 - DNA, 15 bp, Homo sapiens
agaaagtaagcatca

SEQ ID NO: 1755155 - DNA, 15 bp, Homo sapiens
gaaagtaagcatcag

SEQ ID NO: 1755156 - DNA, 15 bp, Homo sapiens
aaagtaagcatcaga

SEQ ID NO: 1755157 - DNA, 15 bp, Homo sapiens
aagtaagcatcagat

SEQ ID NO: 1755158 - DNA, 15 bp, Homo sapiens
agtaagcatcagatt

SEQ ID NO: 1755159 - DNA, 15 bp, Homo sapiens
gtaagcatcagattg

SEQ ID NO: 1755160 - DNA, 15 bp, Homo sapiens
taagcatcagattgg

SEQ ID NO: 1755161 - DNA, 15 bp, Homo sapiens
aagcatcagattgga

SEQ ID NO: 1755162 - DNA, 15 bp, Homo sapiens
agcatcagattggat

SEQ ID NO: 1755163 - DNA, 15 bp, Homo sapiens
gcatcagattggatc

SEQ ID NO: 1755164 - DNA, 15 bp, Homo sapiens
catcagattggatcc

SEQ ID NO: 1755165 - DNA, 15 bp, Homo sapiens
atcagattggatcca

SEQ ID NO: 1755166 - DNA, 15 bp, Homo sapiens
tcagattggatccag

SEQ ID NO: 1755167 - DNA, 15 bp, Homo sapiens
cagattggatccagt

SEQ ID NO: 1755168 - DNA, 15 bp, Homo sapiens
agattggatccagtt

SEQ ID NO: 1755169 - DNA, 15 bp, Homo sapiens
gattggatccagttt

SEQ ID NO: 1755170 - DNA, 15 bp, Homo sapiens
attggatccagtttc

SEQ ID NO: 1755171 - DNA, 15 bp, Homo sapiens
ttggatccagtttcc

SEQ ID NO: 1755172 - DNA, 15 bp, Homo sapiens
tggatccagtttcca

SEQ ID NO: 1755173 - DNA, 15 bp, Homo sapiens
ggatccagtttccaa

SEQ ID NO: 1755174 - DNA, 15 bp, Homo sapiens
gatccagtttccaaa

SEQ ID NO: 1755175 - DNA, 15 bp, Homo sapiens
atccagtttccaaaa

SEQ ID NO: 1755176 - DNA, 15 bp, Homo sapiens
tccagtttccaaaaa

SEQ ID NO: 1755177 - DNA, 15 bp, Homo sapiens
ccagtttccaaaaac

SEQ ID NO: 1755178 - DNA, 15 bp, Homo sapiens
cagtttccaaaaact

SEQ ID NO: 1755179 - DNA, 15 bp, Homo sapiens
agtttccaaaaactt

SEQ ID NO: 1755180 - DNA, 15 bp, Homo sapiens
gtttccaaaaacttt

SEQ ID NO: 1755181 - DNA, 15 bp, Homo sapiens
tttccaaaaactttc

SEQ ID NO: 1755182 - DNA, 15 bp, Homo sapiens
ttccaaaaactttcg

SEQ ID NO: 1755183 - DNA, 15 bp, Homo sapiens
tccaaaaactttcgg

SEQ ID NO: 1755184 - DNA, 15 bp, Homo sapiens
ccaaaaactttcggt

SEQ ID NO: 1755185 - DNA, 15 bp, Homo sapiens
caaaaactttcggtg

SEQ ID NO: 1755186 - DNA, 15 bp, Homo sapiens
aaaaactttcggtga

SEQ ID NO: 1755187 - DNA, 15 bp, Homo sapiens
aaaactttcggtgag

SEQ ID NO: 1755188 - DNA, 15 bp, Homo sapiens
aaactttcggtgagc

SEQ ID NO: 1755189 - DNA, 15 bp, Homo sapiens
aactttcggtgagcc

SEQ ID NO: 1755190 - DNA, 15 bp, Homo sapiens
actttcggtgagcct

SEQ ID NO: 1755191 - DNA, 15 bp, Homo sapiens
ctttcggtgagcctc

SEQ ID NO: 1755192 - DNA, 15 bp, Homo sapiens
tttcggtgagcctct

SEQ ID NO: 1755193 - DNA, 15 bp, Homo sapiens
ttcggtgagcctctg

SEQ ID NO: 1755194 - DNA, 15 bp, Homo sapiens
tcggtgagcctctgt

SEQ ID NO: 1755195 - DNA, 15 bp, Homo sapiens
cggtgagcctctgtc

SEQ ID NO: 1755196 - DNA, 15 bp, Homo sapiens
ggtgagcctctgtct

SEQ ID NO: 1755197 - DNA, 15 bp, Homo sapiens
gtgagcctctgtctg

SEQ ID NO: 1755198 - DNA, 15 bp, Homo sapiens
tgagcctctgtctgt

SEQ ID NO: 1755199 - DNA, 15 bp, Homo sapiens
gagcctctgtctgtg

SEQ ID NO: 1755200 - DNA, 15 bp, Homo sapiens
agcctctgtctgtga

SEQ ID NO: 1755201 - DNA, 15 bp, Homo sapiens
gcctctgtctgtgac

SEQ ID NO: 1755202 - DNA, 15 bp, Homo sapiens
cctctgtctgtgaca

SEQ ID NO: 1755203 - DNA, 15 bp, Homo sapiens
ctctgtctgtgacag

SEQ ID NO: 1755204 - DNA, 15 bp, Homo sapiens
tctgtctgtgacagc

SEQ ID NO: 1755205 - DNA, 15 bp, Homo sapiens
ctgtctgtgacagct

SEQ ID NO: 1755206 - DNA, 15 bp, Homo sapiens
tgtctgtgacagctg

SEQ ID NO: 1755207 - DNA, 15 bp, Homo sapiens
gtctgtgacagctgt

SEQ ID NO: 1755208 - DNA, 15 bp, Homo sapiens
tctgtgacagctgtt

SEQ ID NO: 1755209 - DNA, 15 bp, Homo sapiens
ctgtgacagctgttc

SEQ ID NO: 1755210 - DNA, 15 bp, Homo sapiens
tgtgacagctgttca

SEQ ID NO: 1755211 - DNA, 15 bp, Homo sapiens
gtgacagctgttcaa

SEQ ID NO: 1755212 - DNA, 15 bp, Homo sapiens
tgacagctgttcaag

SEQ ID NO: 1755213 - DNA, 15 bp, Homo sapiens
gacagctgttcaagc

SEQ ID NO: 1755214 - DNA, 15 bp, Homo sapiens
acagctgttcaagct

SEQ ID NO: 1755215 - DNA, 15 bp, Homo sapiens
cagctgttcaagcta

SEQ ID NO: 1755216 - DNA, 15 bp, Homo sapiens
agctgttcaagctat

SEQ ID NO: 1755217 - DNA, 15 bp, Homo sapiens
gctgttcaagctatg

SEQ ID NO: 1755218 - DNA, 15 bp, Homo sapiens
ctgttcaagctatga

SEQ ID NO: 1755219 - DNA, 15 bp, Homo sapiens
tgttcaagctatgaa

SEQ ID NO: 1755220 - DNA, 15 bp, Homo sapiens
gttcaagctatgaat

SEQ ID NO: 1755221 - DNA, 15 bp, Homo sapiens
ttcaagctatgaatg

SEQ ID NO: 1755222 - DNA, 15 bp, Homo sapiens
tcaagctatgaatgc

SEQ ID NO: 1755223 - DNA, 15 bp, Homo sapiens
caagctatgaatgcg

SEQ ID NO: 1755224 - DNA, 15 bp, Homo sapiens
aagctatgaatgcgg

SEQ ID NO: 1755225 - DNA, 15 bp, Homo sapiens
agctatgaatgcgga

SEQ ID NO: 1755226 - DNA, 15 bp, Homo sapiens
gctatgaatgcggat

SEQ ID NO: 1755227 - DNA, 15 bp, Homo sapiens
ctatgaatgcggatt

SEQ ID NO: 1755228 - DNA, 15 bp, Homo sapiens
tatgaatgcggattg

SEQ ID NO: 1755229 - DNA, 15 bp, Homo sapiens
atgaatgcggattgg

SEQ ID NO: 1755230 - DNA, 15 bp, Homo sapiens
tgaatgcggattggg

SEQ ID NO: 1755231 - DNA, 15 bp, Homo sapiens
gaatgcggattgggc

SEQ ID NO: 1755232 - DNA, 15 bp, Homo sapiens
aatgcggattgggct

SEQ ID NO: 1755233 - DNA, 15 bp, Homo sapiens
atgcggattgggctc

SEQ ID NO: 1755234 - DNA, 15 bp, Homo sapiens
tgcggattgggctca

SEQ ID NO: 1755235 - DNA, 15 bp, Homo sapiens
gcggattgggctcag

SEQ ID NO: 1755236 - DNA, 15 bp, Homo sapiens
cggattgggctcagg

SEQ ID NO: 1755237 - DNA, 15 bp, Homo sapiens
ggattgggctcaggc

SEQ ID NO: 1755238 - DNA, 15 bp, Homo sapiens
gattgggctcaggct

SEQ ID NO: 1755239 - DNA, 15 bp, Homo sapiens
attgggctcaggctc

SEQ ID NO: 1755240 - DNA, 15 bp, Homo sapiens
ttgggctcaggctca

SEQ ID NO: 1755241 - DNA, 15 bp, Homo sapiens
tgggctcaggctcag

SEQ ID NO: 1755242 - DNA, 15 bp, Homo sapiens
gggctcaggctcaga

SEQ ID NO: 1755243 - DNA, 15 bp, Homo sapiens
ggctcaggctcagaa

SEQ ID NO: 1755244 - DNA, 15 bp, Homo sapiens
gctcaggctcagaac

SEQ ID NO: 1755245 - DNA, 15 bp, Homo sapiens
ctcaggctcagaaca

SEQ ID NO: 1755246 - DNA, 15 bp, Homo sapiens
tcaggctcagaacat

SEQ ID NO: 1755247 - DNA, 15 bp, Homo sapiens
caggctcagaacatc

SEQ ID NO: 1755248 - DNA, 15 bp, Homo sapiens
aggctcagaacatct

SEQ ID NO: 1755249 - DNA, 15 bp, Homo sapiens
ggctcagaacatctt

SEQ ID NO: 1755250 - DNA, 15 bp, Homo sapiens
gctcagaacatcttc

SEQ ID NO: 1755251 - DNA, 15 bp, Homo sapiens
ctcagaacatcttcc

SEQ ID NO: 1755252 - DNA, 15 bp, Homo sapiens
tcagaacatcttcct

SEQ ID NO: 1755253 - DNA, 15 bp, Homo sapiens
cagaacatcttccta

SEQ ID NO: 1755254 - DNA, 15 bp, Homo sapiens
agaacatcttcctac

SEQ ID NO: 1755255 - DNA, 15 bp, Homo sapiens
gaacatcttcctacc

SEQ ID NO: 1755256 - DNA, 15 bp, Homo sapiens
aacatcttcctaccg

SEQ ID NO: 1755257 - DNA, 15 bp, Homo sapiens
acatcttcctaccgt

SEQ ID NO: 1755258 - DNA, 15 bp, Homo sapiens
catcttcctaccgtg

SEQ ID NO: 1755259 - DNA, 15 bp, Homo sapiens
atcttcctaccgtgg

SEQ ID NO: 1755260 - DNA, 15 bp, Homo sapiens
tcttcctaccgtgga

SEQ ID NO: 1755261 - DNA, 15 bp, Homo sapiens
cttcctaccgtggag

SEQ ID NO: 1755262 - DNA, 15 bp, Homo sapiens
ttcctaccgtggagc

SEQ ID NO: 1755263 - DNA, 15 bp, Homo sapiens
tcctaccgtggagct

SEQ ID NO: 1755264 - DNA, 15 bp, Homo sapiens
cctaccgtggagcta

SEQ ID NO: 1755265 - DNA, 15 bp, Homo sapiens
ctaccgtggagctag

SEQ ID NO: 1755266 - DNA, 15 bp, Homo sapiens
taccgtggagctagg

SEQ ID NO: 1755267 - DNA, 15 bp, Homo sapiens
accgtggagctagga

SEQ ID NO: 1755268 - DNA, 15 bp, Homo sapiens
ccgtggagctaggaa

SEQ ID NO: 1755269 - DNA, 15 bp, Homo sapiens
cgtggagctaggaat

SEQ ID NO: 1755270 - DNA, 15 bp, Homo sapiens
gtggagctaggaatg

SEQ ID NO: 1755271 - DNA, 15 bp, Homo sapiens
tggagctaggaatga

SEQ ID NO: 1755272 - DNA, 15 bp, Homo sapiens
ggagctaggaatgag

SEQ ID NO: 1755273 - DNA, 15 bp, Homo sapiens
gagctaggaatgagc

SEQ ID NO: 1755274 - DNA, 15 bp, Homo sapiens
agctaggaatgagct

SEQ ID NO: 1755275 - DNA, 15 bp, Homo sapiens
gctaggaatgagctc

SEQ ID NO: 1755276 - DNA, 15 bp, Homo sapiens
ctaggaatgagctct

SEQ ID NO: 1755277 - DNA, 15 bp, Homo sapiens
taggaatgagctctt

SEQ ID NO: 1755278 - DNA, 15 bp, Homo sapiens
aggaatgagctcttt

SEQ ID NO: 1755279 - DNA, 15 bp, Homo sapiens
ggaatgagctctttc

SEQ ID NO: 1755280 - DNA, 15 bp, Homo sapiens
gaatgagctctttcc

SEQ ID NO: 1755281 - DNA, 15 bp, Homo sapiens
aatgagctctttcca

SEQ ID NO: 1755282 - DNA, 15 bp, Homo sapiens
atgagctctttccac

SEQ ID NO: 1755283 - DNA, 15 bp, Homo sapiens
tgagctctttccact

SEQ ID NO: 1755284 - DNA, 15 bp, Homo sapiens
gagctctttccactc

SEQ ID NO: 1755285 - DNA, 15 bp, Homo sapiens
agctctttccactcc

SEQ ID NO: 1755286 - DNA, 15 bp, Homo sapiens
gctctttccactccc

SEQ ID NO: 1755287 - DNA, 15 bp, Homo sapiens
ctctttccactcccg

SEQ ID NO: 1755288 - DNA, 15 bp, Homo sapiens
tctttccactcccgc

SEQ ID NO: 1755289 - DNA, 15 bp, Homo sapiens
ctttccactcccgca

SEQ ID NO: 1755290 - DNA, 15 bp, Homo sapiens
tttccactcccgcag

SEQ ID NO: 1755291 - DNA, 15 bp, Homo sapiens
ttccactcccgcaga

SEQ ID NO: 1755292 - DNA, 15 bp, Homo sapiens
tccactcccgcagat

SEQ ID NO: 1755293 - DNA, 15 bp, Homo sapiens
ccactcccgcagatg

SEQ ID NO: 1755294 - DNA, 15 bp, Homo sapiens
cactcccgcagatgg

SEQ ID NO: 1755295 - DNA, 15 bp, Homo sapiens
actcccgcagatgga

SEQ ID NO: 1755296 - DNA, 15 bp, Homo sapiens
ctcccgcagatggag

SEQ ID NO: 1755297 - DNA, 15 bp, Homo sapiens
tcccgcagatggagt

SEQ ID NO: 1755298 - DNA, 15 bp, Homo sapiens
cccgcagatggagtg

SEQ ID NO: 1755299 - DNA, 15 bp, Homo sapiens
ccgcagatggagtgt

SEQ ID NO: 1755300 - DNA, 15 bp, Homo sapiens
cgcagatggagtgtt

SEQ ID NO: 1755301 - DNA, 15 bp, Homo sapiens
gcagatggagtgttt

SEQ ID NO: 1755302 - DNA, 15 bp, Homo sapiens
cagatggagtgtttt

SEQ ID NO: 1755303 - DNA, 15 bp, Homo sapiens
agatggagtgttttc

SEQ ID NO: 1755304 - DNA, 15 bp, Homo sapiens
gatggagtgttttct

SEQ ID NO: 1755305 - DNA, 15 bp, Homo sapiens
atggagtgttttctg

SEQ ID NO: 1755306 - DNA, 15 bp, Homo sapiens
tggagtgttttctgc

SEQ ID NO: 1755307 - DNA, 15 bp, Homo sapiens
ggagtgttttctgct

SEQ ID NO: 1755308 - DNA, 15 bp, Homo sapiens
gagtgttttctgctt

SEQ ID NO: 1755309 - DNA, 15 bp, Homo sapiens
agtgttttctgcttg

SEQ ID NO: 1755310 - DNA, 15 bp, Homo sapiens
gtgttttctgcttgt

SEQ ID NO: 1755311 - DNA, 15 bp, Homo sapiens
tgttttctgcttgtt

SEQ ID NO: 1755312 - DNA, 15 bp, Homo sapiens
gttttctgcttgttt

SEQ ID NO: 1755313 - DNA, 15 bp, Homo sapiens
ttttctgcttgtttg

SEQ ID NO: 1755314 - DNA, 15 bp, Homo sapiens
tttctgcttgtttgc

SEQ ID NO: 1755315 - DNA, 15 bp, Homo sapiens
ttctgcttgtttgct

SEQ ID NO: 1755316 - DNA, 15 bp, Homo sapiens
tctgcttgtttgctt

SEQ ID NO: 1755317 - DNA, 15 bp, Homo sapiens
ctgcttgtttgcttg

SEQ ID NO: 1755318 - DNA, 15 bp, Homo sapiens
tgcttgtttgcttgt

SEQ ID NO: 1755319 - DNA, 15 bp, Homo sapiens
gcttgtttgcttgtt

SEQ ID NO: 1755320 - DNA, 15 bp, Homo sapiens
cttgtttgcttgttt

SEQ ID NO: 1755321 - DNA, 15 bp, Homo sapiens
ttgtttgcttgtttg

SEQ ID NO: 1755322 - DNA, 15 bp, Homo sapiens
tgtttgcttgtttgt

SEQ ID NO: 1755323 - DNA, 15 bp, Homo sapiens
gtttgcttgtttgtt

SEQ ID NO: 1755324 - DNA, 15 bp, Homo sapiens
ttgcttgtttgtttt

SEQ ID NO: 1755325 - DNA, 15 bp, Homo sapiens
tgcttgtttgttttg

SEQ ID NO: 1755326 - DNA, 15 bp, Homo sapiens
gcttgtttgttttgg

SEQ ID NO: 1755327 - DNA, 15 bp, Homo sapiens
cttgtttgttttgga

SEQ ID NO: 1755328 - DNA, 15 bp, Homo sapiens
ttgtttgttttggag

SEQ ID NO: 1755329 - DNA, 15 bp, Homo sapiens
tgtttgttttggaga

SEQ ID NO: 1755330 - DNA, 15 bp, Homo sapiens
gtttgttttggagat

SEQ ID NO: 1755331 - DNA, 15 bp, Homo sapiens
tttgttttggagatg

SEQ ID NO: 1755332 - DNA, 15 bp, Homo sapiens
ttgttttggagatgg

SEQ ID NO: 1755333 - DNA, 15 bp, Homo sapiens
tgttttggagatggg

SEQ ID NO: 1755334 - DNA, 15 bp, Homo sapiens
gttttggagatgggg

SEQ ID NO: 1755335 - DNA, 15 bp, Homo sapiens
ttttggagatggggt

SEQ ID NO: 1755336 - DNA, 15 bp, Homo sapiens
tttggagatggggtc

SEQ ID NO: 1755337 - DNA, 15 bp, Homo sapiens
ttggagatggggtct

SEQ ID NO: 1755338 - DNA, 15 bp, Homo sapiens
tggagatggggtctc

SEQ ID NO: 1755339 - DNA, 15 bp, Homo sapiens
ggagatggggtctcc

SEQ ID NO: 1755340 - DNA, 15 bp, Homo sapiens
gagatggggtctccc

SEQ ID NO: 1755341 - DNA, 15 bp, Homo sapiens
agatggggtctccct

SEQ ID NO: 1755342 - DNA, 15 bp, Homo sapiens
gatggggtctccctc

SEQ ID NO: 1755343 - DNA, 15 bp, Homo sapiens
atggggtctccctct

SEQ ID NO: 1755344 - DNA, 15 bp, Homo sapiens
tggggtctccctctg

SEQ ID NO: 1755345 - DNA, 15 bp, Homo sapiens
ggggtctccctctgt

SEQ ID NO: 1755346 - DNA, 15 bp, Homo sapiens
gggtctccctctgtg

SEQ ID NO: 1755347 - DNA, 15 bp, Homo sapiens
ggtctccctctgtgg

SEQ ID NO: 1755348 - DNA, 15 bp, Homo sapiens
gtctccctctgtggc

SEQ ID NO: 1755349 - DNA, 15 bp, Homo sapiens
tctccctctgtggcc

SEQ ID NO: 1755350 - DNA, 15 bp, Homo sapiens
ctccctctgtggccc

SEQ ID NO: 1755351 - DNA, 15 bp, Homo sapiens
tccctctgtggccca

SEQ ID NO: 1755352 - DNA, 15 bp, Homo sapiens
ccctctgtggcccag

SEQ ID NO: 1755353 - DNA, 15 bp, Homo sapiens
cctctgtggcccagg

SEQ ID NO: 1755354 - DNA, 15 bp, Homo sapiens
ctctgtggcccaggc

SEQ ID NO: 1755355 - DNA, 15 bp, Homo sapiens
tctgtggcccaggct

SEQ ID NO: 1755356 - DNA, 15 bp, Homo sapiens
ctgtggcccaggctg

SEQ ID NO: 1755357 - DNA, 15 bp, Homo sapiens
tggcccaggctggag

SEQ ID NO: 1755358 - DNA, 15 bp, Homo sapiens
ggcccaggctggagc

SEQ ID NO: 1755359 - DNA, 15 bp, Homo sapiens
gcccaggctggagca

SEQ ID NO: 1755360 - DNA, 15 bp, Homo sapiens
cccaggctggagcac

SEQ ID NO: 1755361 - DNA, 15 bp, Homo sapiens
ccaggctggagcact

SEQ ID NO: 1755362 - DNA, 15 bp, Homo sapiens
caggctggagcactg

SEQ ID NO: 1755363 - DNA, 15 bp, Homo sapiens
aggctggagcactgc

SEQ ID NO: 1755364 - DNA, 15 bp, Homo sapiens
ggctggagcactgca

SEQ ID NO: 1755365 - DNA, 15 bp, Homo sapiens
gctggagcactgcag

SEQ ID NO: 1755366 - DNA, 15 bp, Homo sapiens
ctggagcactgcagc

SEQ ID NO: 1755367 - DNA, 15 bp, Homo sapiens
tggagcactgcagcc

SEQ ID NO: 1755368 - DNA, 15 bp, Homo sapiens
ggagcactgcagcct

SEQ ID NO: 1755369 - DNA, 15 bp, Homo sapiens
gagcactgcagcctc

SEQ ID NO: 1755370 - DNA, 15 bp, Homo sapiens
agcactgcagcctct

SEQ ID NO: 1755371 - DNA, 15 bp, Homo sapiens
gcactgcagcctcta

SEQ ID NO: 1755372 - DNA, 15 bp, Homo sapiens
cactgcagcctctac

SEQ ID NO: 1755373 - DNA, 15 bp, Homo sapiens
actgcagcctctacc

SEQ ID NO: 1755374 - DNA, 15 bp, Homo sapiens
ctgcagcctctacca

SEQ ID NO: 1755375 - DNA, 15 bp, Homo sapiens
tgcagcctctaccat

SEQ ID NO: 1755376 - DNA, 15 bp, Homo sapiens
gcagcctctaccatc

SEQ ID NO: 1755377 - DNA, 15 bp, Homo sapiens
cagcctctaccatcc

SEQ ID NO: 1755378 - DNA, 15 bp, Homo sapiens
agcctctaccatcca

SEQ ID NO: 1755379 - DNA, 15 bp, Homo sapiens
gcctctaccatccag

SEQ ID NO: 1755380 - DNA, 15 bp, Homo sapiens
cctctaccatccagg

SEQ ID NO: 1755381 - DNA, 15 bp, Homo sapiens
ctctaccatccaggt

SEQ ID NO: 1755382 - DNA, 15 bp, Homo sapiens
tctaccatccaggtt

SEQ ID NO: 1755383 - DNA, 15 bp, Homo sapiens
ctaccatccaggttc

SEQ ID NO: 1755384 - DNA, 15 bp, Homo sapiens
taccatccaggttca

SEQ ID NO: 1755385 - DNA, 15 bp, Homo sapiens
accatccaggttcaa

SEQ ID NO: 1755386 - DNA, 15 bp, Homo sapiens
ccatccaggttcaag

SEQ ID NO: 1755387 - DNA, 15 bp, Homo sapiens
catccaggttcaaga

SEQ ID NO: 1755388 - DNA, 15 bp, Homo sapiens
atccaggttcaagag

SEQ ID NO: 1755389 - DNA, 15 bp, Homo sapiens
tccaggttcaagaga

SEQ ID NO: 1755390 - DNA, 15 bp, Homo sapiens
ccaggttcaagagat

SEQ ID NO: 1755391 - DNA, 15 bp, Homo sapiens
caggttcaagagatt

SEQ ID NO: 1755392 - DNA, 15 bp, Homo sapiens
aggttcaagagattc

SEQ ID NO: 1755393 - DNA, 15 bp, Homo sapiens
ggttcaagagattcc

SEQ ID NO: 1755394 - DNA, 15 bp, Homo sapiens
gttcaagagattccc

SEQ ID NO: 1755395 - DNA, 15 bp, Homo sapiens
ttcaagagattcccc

SEQ ID NO: 1755396 - DNA, 15 bp, Homo sapiens
tcaagagattcccct

SEQ ID NO: 1755397 - DNA, 15 bp, Homo sapiens
caagagattcccctg

SEQ ID NO: 1755398 - DNA, 15 bp, Homo sapiens
aagagattcccctgc

SEQ ID NO: 1755399 - DNA, 15 bp, Homo sapiens
agagattcccctgcc

SEQ ID NO: 1755400 - DNA, 15 bp, Homo sapiens
gagattcccctgcct

SEQ ID NO: 1755401 - DNA, 15 bp, Homo sapiens
agattcccctgcctc

SEQ ID NO: 1755402 - DNA, 15 bp, Homo sapiens
gattcccctgcctca

SEQ ID NO: 1755403 - DNA, 15 bp, Homo sapiens
attcccctgcctcag

SEQ ID NO: 1755404 - DNA, 15 bp, Homo sapiens
ttcccctgcctcagc

SEQ ID NO: 1755405 - DNA, 15 bp, Homo sapiens
tcccctgcctcagcc

SEQ ID NO: 1755406 - DNA, 15 bp, Homo sapiens
cccctgcctcagcct

SEQ ID NO: 1755407 - DNA, 15 bp, Homo sapiens
ggattacaggcacct

SEQ ID NO: 1755408 - DNA, 15 bp, Homo sapiens
gattacaggcacctg

SEQ ID NO: 1755409 - DNA, 15 bp, Homo sapiens
attacaggcacctgc

SEQ ID NO: 1755410 - DNA, 15 bp, Homo sapiens
ttacaggcacctgcc

SEQ ID NO: 1755411 - DNA, 15 bp, Homo sapiens
tacaggcacctgcca

SEQ ID NO: 1755412 - DNA, 15 bp, Homo sapiens
acaggcacctgccac

SEQ ID NO: 1755413 - DNA, 15 bp, Homo sapiens
caggcacctgccacc

SEQ ID NO: 1755414 - DNA, 15 bp, Homo sapiens
aggcacctgccacca

SEQ ID NO: 1755415 - DNA, 15 bp, Homo sapiens
ggcacctgccaccat

SEQ ID NO: 1755416 - DNA, 15 bp, Homo sapiens
gcacctgccaccatg

SEQ ID NO: 1755417 - DNA, 15 bp, Homo sapiens
cacctgccaccatgc

SEQ ID NO: 1755418 - DNA, 15 bp, Homo sapiens
acctgccaccatgcc

SEQ ID NO: 1755419 - DNA, 15 bp, Homo sapiens
tgccaccatgcctgc

SEQ ID NO: 1755420 - DNA, 15 bp, Homo sapiens
gccaccatgcctgcc

SEQ ID NO: 1755421 - DNA, 15 bp, Homo sapiens
ccaccatgcctgcca

SEQ ID NO: 1755422 - DNA, 15 bp, Homo sapiens
caccatgcctgccac

SEQ ID NO: 1755423 - DNA, 15 bp, Homo sapiens
accatgcctgccacc

SEQ ID NO: 1755424 - DNA, 15 bp, Homo sapiens
ccatgcctgccacca

SEQ ID NO: 1755425 - DNA, 15 bp, Homo sapiens
catgcctgccaccac

SEQ ID NO: 1755426 - DNA, 15 bp, Homo sapiens
atgcctgccaccaca

SEQ ID NO: 1755427 - DNA, 15 bp, Homo sapiens
ctgccaccacacccg

SEQ ID NO: 1755428 - DNA, 15 bp, Homo sapiens
tgccaccacacccgc

SEQ ID NO: 1755429 - DNA, 15 bp, Homo sapiens
gccaccacacccgcc

SEQ ID NO: 1755430 - DNA, 15 bp, Homo sapiens
ccaccacacccgcca

SEQ ID NO: 1755431 - DNA, 15 bp, Homo sapiens
caccacacccgccac

SEQ ID NO: 1755432 - DNA, 15 bp, Homo sapiens
accacacccgccacc

SEQ ID NO: 1755433 - DNA, 15 bp, Homo sapiens
ccacacccgccacca

SEQ ID NO: 1755434 - DNA, 15 bp, Homo sapiens
cacacccgccaccac

SEQ ID NO: 1755435 - DNA, 15 bp, Homo sapiens
acacccgccaccaca

SEQ ID NO: 1755436 - DNA, 15 bp, Homo sapiens
acccgccaccacacc

SEQ ID NO: 1755437 - DNA, 15 bp, Homo sapiens
ccgccaccacaccca

SEQ ID NO: 1755438 - DNA, 15 bp, Homo sapiens
cgccaccacacccag

SEQ ID NO: 1755439 - DNA, 15 bp, Homo sapiens
tgtatttttagcagc

SEQ ID NO: 1755440 - DNA, 15 bp, Homo sapiens
gtatttttagcagcg

SEQ ID NO: 1755441 - DNA, 15 bp, Homo sapiens
tatttttagcagcga

SEQ ID NO: 1755442 - DNA, 15 bp, Homo sapiens
atttttagcagcgac

SEQ ID NO: 1755443 - DNA, 15 bp, Homo sapiens
tttttagcagcgacg

SEQ ID NO: 1755444 - DNA, 15 bp, Homo sapiens
ttttagcagcgacgg

SEQ ID NO: 1755445 - DNA, 15 bp, Homo sapiens
tttagcagcgacggg

SEQ ID NO: 1755446 - DNA, 15 bp, Homo sapiens
ttagcagcgacgggg

SEQ ID NO: 1755447 - DNA, 15 bp, Homo sapiens
tagcagcgacggggt

SEQ ID NO: 1755448 - DNA, 15 bp, Homo sapiens
agcagcgacggggtt

SEQ ID NO: 1755449 - DNA, 15 bp, Homo sapiens
gcagcgacggggttt

SEQ ID NO: 1755450 - DNA, 15 bp, Homo sapiens
cagcgacggggtttc

SEQ ID NO: 1755451 - DNA, 15 bp, Homo sapiens
agcgacggggtttca

SEQ ID NO: 1755452 - DNA, 15 bp, Homo sapiens
gcgacggggtttcac

SEQ ID NO: 1755453 - DNA, 15 bp, Homo sapiens
cgacggggtttcacc

SEQ ID NO: 1755454 - DNA, 15 bp, Homo sapiens
ggctggtctcgaacc

SEQ ID NO: 1755455 - DNA, 15 bp, Homo sapiens
gctggtctcgaaccc

SEQ ID NO: 1755456 - DNA, 15 bp, Homo sapiens
ctggtctcgaacccc

SEQ ID NO: 1755457 - DNA, 15 bp, Homo sapiens
tggtctcgaacccct

SEQ ID NO: 1755458 - DNA, 15 bp, Homo sapiens
ggtctcgaacccctg

SEQ ID NO: 1755459 - DNA, 15 bp, Homo sapiens
gtctcgaacccctga

SEQ ID NO: 1755460 - DNA, 15 bp, Homo sapiens
tctcgaacccctgac

SEQ ID NO: 1755461 - DNA, 15 bp, Homo sapiens
ctcgaacccctgacc

SEQ ID NO: 1755462 - DNA, 15 bp, Homo sapiens
tcgaacccctgacct

SEQ ID NO: 1755463 - DNA, 15 bp, Homo sapiens
cgaacccctgacctc

SEQ ID NO: 1755464 - DNA, 15 bp, Homo sapiens
gaacccctgacctca

SEQ ID NO: 1755465 - DNA, 15 bp, Homo sapiens
ccctgacctcaggtg

SEQ ID NO: 1755466 - DNA, 15 bp, Homo sapiens
atccgcctgcctcgg

SEQ ID NO: 1755467 - DNA, 15 bp, Homo sapiens
tccgcctgcctcggc

SEQ ID NO: 1755468 - DNA, 15 bp, Homo sapiens
ccgcctgcctcggcc

SEQ ID NO: 1755469 - DNA, 15 bp, Homo sapiens
cgcctgcctcggcct

SEQ ID NO: 1755470 - DNA, 15 bp, Homo sapiens
caaagtgctgggatg

SEQ ID NO: 1755471 - DNA, 15 bp, Homo sapiens
aaagtgctgggatga

SEQ ID NO: 1755472 - DNA, 15 bp, Homo sapiens
aagtgctgggatgac

SEQ ID NO: 1755473 - DNA, 15 bp, Homo sapiens
agtgctgggatgaca

SEQ ID NO: 1755474 - DNA, 15 bp, Homo sapiens
gtgctgggatgacag

SEQ ID NO: 1755475 - DNA, 15 bp, Homo sapiens
tgctgggatgacaga

SEQ ID NO: 1755476 - DNA, 15 bp, Homo sapiens
gctgggatgacagac

SEQ ID NO: 1755477 - DNA, 15 bp, Homo sapiens
ctgggatgacagacg

SEQ ID NO: 1755478 - DNA, 15 bp, Homo sapiens
tgggatgacagacgt

SEQ ID NO: 1755479 - DNA, 15 bp, Homo sapiens
gggatgacagacgtg

SEQ ID NO: 1755480 - DNA, 15 bp, Homo sapiens
ggatgacagacgtga

SEQ ID NO: 1755481 - DNA, 15 bp, Homo sapiens
gatgacagacgtgag

SEQ ID NO: 1755482 - DNA, 15 bp, Homo sapiens
atgacagacgtgagc

SEQ ID NO: 1755483 - DNA, 15 bp, Homo sapiens
tgacagacgtgagcc

SEQ ID NO: 1755484 - DNA, 15 bp, Homo sapiens
gacagacgtgagcca

SEQ ID NO: 1755485 - DNA, 15 bp, Homo sapiens
agacgtgagccaccg

SEQ ID NO: 1755486 - DNA, 15 bp, Homo sapiens
gacgtgagccaccgt

SEQ ID NO: 1755487 - DNA, 15 bp, Homo sapiens
acgtgagccaccgtg

SEQ ID NO: 1755488 - DNA, 15 bp, Homo sapiens
accgtgcccggcccc

SEQ ID NO: 1755489 - DNA, 15 bp, Homo sapiens
ccgtgcccggcccca

SEQ ID NO: 1755490 - DNA, 15 bp, Homo sapiens
cgtgcccggccccag

SEQ ID NO: 1755491 - DNA, 15 bp, Homo sapiens
gtgcccggccccaga

SEQ ID NO: 1755492 - DNA, 15 bp, Homo sapiens
tgcccggccccagat

SEQ ID NO: 1755493 - DNA, 15 bp, Homo sapiens
gcccggccccagatg

SEQ ID NO: 1755494 - DNA, 15 bp, Homo sapiens
cccggccccagatgg

SEQ ID NO: 1755495 - DNA, 15 bp, Homo sapiens
ccggccccagatgga

SEQ ID NO: 1755496 - DNA, 15 bp, Homo sapiens
cggccccagatggag

SEQ ID NO: 1755497 - DNA, 15 bp, Homo sapiens
ggccccagatggagt

SEQ ID NO: 1755498 - DNA, 15 bp, Homo sapiens
gccccagatggagtt

SEQ ID NO: 1755499 - DNA, 15 bp, Homo sapiens
ccccagatggagttt

SEQ ID NO: 1755500 - DNA, 15 bp, Homo sapiens
cccagatggagtttt

SEQ ID NO: 1755501 - DNA, 15 bp, Homo sapiens
ccagatggagttttg

SEQ ID NO: 1755502 - DNA, 15 bp, Homo sapiens
cagatggagttttga

SEQ ID NO: 1755503 - DNA, 15 bp, Homo sapiens
agatggagttttgat

SEQ ID NO: 1755504 - DNA, 15 bp, Homo sapiens
gatggagttttgatc

SEQ ID NO: 1755505 - DNA, 15 bp, Homo sapiens
atggagttttgatct

SEQ ID NO: 1755506 - DNA, 15 bp, Homo sapiens
tggagttttgatctc

SEQ ID NO: 1755507 - DNA, 15 bp, Homo sapiens
ggagttttgatctcc

SEQ ID NO: 1755508 - DNA, 15 bp, Homo sapiens
gagttttgatctcca

SEQ ID NO: 1755509 - DNA, 15 bp, Homo sapiens
agttttgatctccaa

SEQ ID NO: 1755510 - DNA, 15 bp, Homo sapiens
gttttgatctccaaa

SEQ ID NO: 1755511 - DNA, 15 bp, Homo sapiens
ttttgatctccaaaa

SEQ ID NO: 1755512 - DNA, 15 bp, Homo sapiens
tttgatctccaaaaa

SEQ ID NO: 1755513 - DNA, 15 bp, Homo sapiens
ttgatctccaaaaac

SEQ ID NO: 1755514 - DNA, 15 bp, Homo sapiens
tgatctccaaaaacc

SEQ ID NO: 1755515 - DNA, 15 bp, Homo sapiens
gatctccaaaaacca

SEQ ID NO: 1755516 - DNA, 15 bp, Homo sapiens
atctccaaaaaccaa

SEQ ID NO: 1755517 - DNA, 15 bp, Homo sapiens
tctccaaaaaccaag

SEQ ID NO: 1755518 - DNA, 15 bp, Homo sapiens
ctccaaaaaccaaga

SEQ ID NO: 1755519 - DNA, 15 bp, Homo sapiens
tccaaaaaccaagaa

SEQ ID NO: 1755520 - DNA, 15 bp, Homo sapiens
ccaaaaaccaagaag

SEQ ID NO: 1755521 - DNA, 15 bp, Homo sapiens
caaaaaccaagaagc

SEQ ID NO: 1755522 - DNA, 15 bp, Homo sapiens
aaaaaccaagaagct

SEQ ID NO: 1755523 - DNA, 15 bp, Homo sapiens
aaaaccaagaagctt

SEQ ID NO: 1755524 - DNA, 15 bp, Homo sapiens
aaaccaagaagcttc

SEQ ID NO: 1755525 - DNA, 15 bp, Homo sapiens
aaccaagaagcttct

SEQ ID NO: 1755526 - DNA, 15 bp, Homo sapiens
accaagaagcttctt

SEQ ID NO: 1755527 - DNA, 15 bp, Homo sapiens
ccaagaagcttcttc

SEQ ID NO: 1755528 - DNA, 15 bp, Homo sapiens
caagaagcttcttca

SEQ ID NO: 1755529 - DNA, 15 bp, Homo sapiens
aagaagcttcttcac

SEQ ID NO: 1755530 - DNA, 15 bp, Homo sapiens
agaagcttcttcaca

SEQ ID NO: 1755531 - DNA, 15 bp, Homo sapiens
gaagcttcttcacat

SEQ ID NO: 1755532 - DNA, 15 bp, Homo sapiens
aagcttcttcacatg

SEQ ID NO: 1755533 - DNA, 15 bp, Homo sapiens
agcttcttcacatga

SEQ ID NO: 1755534 - DNA, 15 bp, Homo sapiens
gcttcttcacatgat

SEQ ID NO: 1755535 - DNA, 15 bp, Homo sapiens
cttcttcacatgatc

SEQ ID NO: 1755536 - DNA, 15 bp, Homo sapiens
ttcttcacatgatct

SEQ ID NO: 1755537 - DNA, 15 bp, Homo sapiens
tcttcacatgatctt

SEQ ID NO: 1755538 - DNA, 15 bp, Homo sapiens
cttcacatgatcttt

SEQ ID NO: 1755539 - DNA, 15 bp, Homo sapiens
ttcacatgatctttc

SEQ ID NO: 1755540 - DNA, 15 bp, Homo sapiens
tcacatgatctttct

SEQ ID NO: 1755541 - DNA, 15 bp, Homo sapiens
cacatgatctttctg

SEQ ID NO: 1755542 - DNA, 15 bp, Homo sapiens
acatgatctttctgg

SEQ ID NO: 1755543 - DNA, 15 bp, Homo sapiens
catgatctttctggt

SEQ ID NO: 1755544 - DNA, 15 bp, Homo sapiens
atgatctttctggtt

SEQ ID NO: 1755545 - DNA, 15 bp, Homo sapiens
tgatctttctggtta

SEQ ID NO: 1755546 - DNA, 15 bp, Homo sapiens
gatctttctggttac

SEQ ID NO: 1755547 - DNA, 15 bp, Homo sapiens
atctttctggttact

SEQ ID NO: 1755548 - DNA, 15 bp, Homo sapiens
tctttctggttactg

SEQ ID NO: 1755549 - DNA, 15 bp, Homo sapiens
ctttctggttactgt

SEQ ID NO: 1755550 - DNA, 15 bp, Homo sapiens
tttctggttactgtg

SEQ ID NO: 1755551 - DNA, 15 bp, Homo sapiens
ttctggttactgtgc

SEQ ID NO: 1755552 - DNA, 15 bp, Homo sapiens
tctggttactgtgca

SEQ ID NO: 1755553 - DNA, 15 bp, Homo sapiens
ctggttactgtgcag

SEQ ID NO: 1755554 - DNA, 15 bp, Homo sapiens
tggttactgtgcaga

SEQ ID NO: 1755555 - DNA, 15 bp, Homo sapiens
ggttactgtgcagag

SEQ ID NO: 1755556 - DNA, 15 bp, Homo sapiens
gttactgtgcagagg

SEQ ID NO: 1755557 - DNA, 15 bp, Homo sapiens
ttactgtgcagaggc

SEQ ID NO: 1755558 - DNA, 15 bp, Homo sapiens
tactgtgcagaggct

SEQ ID NO: 1755559 - DNA, 15 bp, Homo sapiens
actgtgcagaggctc

SEQ ID NO: 1755560 - DNA, 15 bp, Homo sapiens
ctgtgcagaggctct

SEQ ID NO: 1755561 - DNA, 15 bp, Homo sapiens
tgtgcagaggctctc

SEQ ID NO: 1755562 - DNA, 15 bp, Homo sapiens
gtgcagaggctctca

SEQ ID NO: 1755563 - DNA, 15 bp, Homo sapiens
tgcagaggctctcag

SEQ ID NO: 1755564 - DNA, 15 bp, Homo sapiens
gcagaggctctcagg

SEQ ID NO: 1755565 - DNA, 15 bp, Homo sapiens
cagaggctctcaggg

SEQ ID NO: 1755566 - DNA, 15 bp, Homo sapiens
agaggctctcagggt

SEQ ID NO: 1755567 - DNA, 15 bp, Homo sapiens
gaggctctcagggta

SEQ ID NO: 1755568 - DNA, 15 bp, Homo sapiens
aggctctcagggtag

SEQ ID NO: 1755569 - DNA, 15 bp, Homo sapiens
ggctctcagggtaga

SEQ ID NO: 1755570 - DNA, 15 bp, Homo sapiens
gctctcagggtagaa

SEQ ID NO: 1755571 - DNA, 15 bp, Homo sapiens
ctctcagggtagaag

SEQ ID NO: 1755572 - DNA, 15 bp, Homo sapiens
tctcagggtagaagg

SEQ ID NO: 1755573 - DNA, 15 bp, Homo sapiens
ctcagggtagaaggg

SEQ ID NO: 1755574 - DNA, 15 bp, Homo sapiens
tcagggtagaagggg

SEQ ID NO: 1755575 - DNA, 15 bp, Homo sapiens
cagggtagaaggggc

SEQ ID NO: 1755576 - DNA, 15 bp, Homo sapiens
agggtagaaggggcc

SEQ ID NO: 1755577 - DNA, 15 bp, Homo sapiens
gggtagaaggggcct

SEQ ID NO: 1755578 - DNA, 15 bp, Homo sapiens
ggtagaaggggcctg

SEQ ID NO: 1755579 - DNA, 15 bp, Homo sapiens
gtagaaggggcctgt

SEQ ID NO: 1755580 - DNA, 15 bp, Homo sapiens
tagaaggggcctgtg

SEQ ID NO: 1755581 - DNA, 15 bp, Homo sapiens
agaaggggcctgtgc

SEQ ID NO: 1755582 - DNA, 15 bp, Homo sapiens
gaaggggcctgtgca

SEQ ID NO: 1755583 - DNA, 15 bp, Homo sapiens
aaggggcctgtgcac

SEQ ID NO: 1755584 - DNA, 15 bp, Homo sapiens
aggggcctgtgcacc

SEQ ID NO: 1755585 - DNA, 15 bp, Homo sapiens
ggggcctgtgcacca

SEQ ID NO: 1755586 - DNA, 15 bp, Homo sapiens
gggcctgtgcaccac

SEQ ID NO: 1755587 - DNA, 15 bp, Homo sapiens
ggcctgtgcaccacc

SEQ ID NO: 1755588 - DNA, 15 bp, Homo sapiens
gcctgtgcaccacct

SEQ ID NO: 1755589 - DNA, 15 bp, Homo sapiens
cctgtgcaccacctc

SEQ ID NO: 1755590 - DNA, 15 bp, Homo sapiens
ctgtgcaccacctct

SEQ ID NO: 1755591 - DNA, 15 bp, Homo sapiens
tgtgcaccacctctg

SEQ ID NO: 1755592 - DNA, 15 bp, Homo sapiens
gtgcaccacctctgg

SEQ ID NO: 1755593 - DNA, 15 bp, Homo sapiens
tgcaccacctctggg

SEQ ID NO: 1755594 - DNA, 15 bp, Homo sapiens
gcaccacctctgggt

SEQ ID NO: 1755595 - DNA, 15 bp, Homo sapiens
caccacctctgggtg

SEQ ID NO: 1755596 - DNA, 15 bp, Homo sapiens
accacctctgggtgt

SEQ ID NO: 1755597 - DNA, 15 bp, Homo sapiens
ccacctctgggtgta

SEQ ID NO: 1755598 - DNA, 15 bp, Homo sapiens
cacctctgggtgtac

SEQ ID NO: 1755599 - DNA, 15 bp, Homo sapiens
acctctgggtgtacc

SEQ ID NO: 1755600 - DNA, 15 bp, Homo sapiens
cctctgggtgtacct

SEQ ID NO: 1755601 - DNA, 15 bp, Homo sapiens
ctctgggtgtacctc

SEQ ID NO: 1755602 - DNA, 15 bp, Homo sapiens
tctgggtgtacctca

SEQ ID NO: 1755603 - DNA, 15 bp, Homo sapiens
ctgggtgtacctcat

SEQ ID NO: 1755604 - DNA, 15 bp, Homo sapiens
tgggtgtacctcatt

SEQ ID NO: 1755605 - DNA, 15 bp, Homo sapiens
gggtgtacctcattt

SEQ ID NO: 1755606 - DNA, 15 bp, Homo sapiens
ggtgtacctcattta

SEQ ID NO: 1755607 - DNA, 15 bp, Homo sapiens
gtgtacctcatttaa

SEQ ID NO: 1755608 - DNA, 15 bp, Homo sapiens
tgtacctcatttaag

SEQ ID NO: 1755609 - DNA, 15 bp, Homo sapiens
gtacctcatttaaga

SEQ ID NO: 1755610 - DNA, 15 bp, Homo sapiens
tacctcatttaagat

SEQ ID NO: 1755611 - DNA, 15 bp, Homo sapiens
acctcatttaagatc

SEQ ID NO: 1755612 - DNA, 15 bp, Homo sapiens
cctcatttaagatcc

SEQ ID NO: 1755613 - DNA, 15 bp, Homo sapiens
ctcatttaagatccc

SEQ ID NO: 1755614 - DNA, 15 bp, Homo sapiens
tcatttaagatccct

SEQ ID NO: 1755615 - DNA, 15 bp, Homo sapiens
catttaagatccctg

SEQ ID NO: 1755616 - DNA, 15 bp, Homo sapiens
atttaagatccctga

SEQ ID NO: 1755617 - DNA, 15 bp, Homo sapiens
tttaagatccctgag

SEQ ID NO: 1755618 - DNA, 15 bp, Homo sapiens
ttaagatccctgaga

SEQ ID NO: 1755619 - DNA, 15 bp, Homo sapiens
taagatccctgagaa

SEQ ID NO: 1755620 - DNA, 15 bp, Homo sapiens
aagatccctgagaac

SEQ ID NO: 1755621 - DNA, 15 bp, Homo sapiens
agatccctgagaaca

SEQ ID NO: 1755622 - DNA, 15 bp, Homo sapiens
gatccctgagaacat

SEQ ID NO: 1755623 - DNA, 15 bp, Homo sapiens
atccctgagaacatg

SEQ ID NO: 1755624 - DNA, 15 bp, Homo sapiens
tccctgagaacatga

SEQ ID NO: 1755625 - DNA, 15 bp, Homo sapiens
ccctgagaacatgag

SEQ ID NO: 1755626 - DNA, 15 bp, Homo sapiens
cctgagaacatgagt

SEQ ID NO: 1755627 - DNA, 15 bp, Homo sapiens
ctgagaacatgagtg

SEQ ID NO: 1755628 - DNA, 15 bp, Homo sapiens
tgagaacatgagtgg

SEQ ID NO: 1755629 - DNA, 15 bp, Homo sapiens
gagaacatgagtgga

SEQ ID NO: 1755630 - DNA, 15 bp, Homo sapiens
agaacatgagtggaa

SEQ ID NO: 1755631 - DNA, 15 bp, Homo sapiens
gaacatgagtggaac

SEQ ID NO: 1755632 - DNA, 15 bp, Homo sapiens
atgagtggaacaaaa

SEQ ID NO: 1755633 - DNA, 15 bp, Homo sapiens
tgagtggaacaaaat

SEQ ID NO: 1755634 - DNA, 15 bp, Homo sapiens
gagtggaacaaaata

SEQ ID NO: 1755635 - DNA, 15 bp, Homo sapiens
agtggaacaaaatag

SEQ ID NO: 1755636 - DNA, 15 bp, Homo sapiens
gtggaacaaaatagc

SEQ ID NO: 1755637 - DNA, 15 bp, Homo sapiens
tggaacaaaatagcc

SEQ ID NO: 1755638 - DNA, 15 bp, Homo sapiens
ggaacaaaatagcca

SEQ ID NO: 1755639 - DNA, 15 bp, Homo sapiens
gaacaaaatagccag

SEQ ID NO: 1755640 - DNA, 15 bp, Homo sapiens
aacaaaatagccagg

SEQ ID NO: 1755641 - DNA, 15 bp, Homo sapiens
acaaaatagccagga

SEQ ID NO: 1755642 - DNA, 15 bp, Homo sapiens
caaaatagccaggag

SEQ ID NO: 1755643 - DNA, 15 bp, Homo sapiens
aaaatagccaggaga

SEQ ID NO: 1755644 - DNA, 15 bp, Homo sapiens
aaatagccaggagag

SEQ ID NO: 1755645 - DNA, 15 bp, Homo sapiens
aatagccaggagaga

SEQ ID NO: 1755646 - DNA, 15 bp, Homo sapiens
atagccaggagagaa

SEQ ID NO: 1755647 - DNA, 15 bp, Homo sapiens
tagccaggagagaaa

SEQ ID NO: 1755648 - DNA, 15 bp, Homo sapiens
agccaggagagaaac

SEQ ID NO: 1755649 - DNA, 15 bp, Homo sapiens
gccaggagagaaacc

SEQ ID NO: 1755650 - DNA, 15 bp, Homo sapiens
ccaggagagaaacct

SEQ ID NO: 1755651 - DNA, 15 bp, Homo sapiens
caggagagaaacctg

SEQ ID NO: 1755652 - DNA, 15 bp, Homo sapiens
aggagagaaacctgg

SEQ ID NO: 1755653 - DNA, 15 bp, Homo sapiens
ggagagaaacctggg

SEQ ID NO: 1755654 - DNA, 15 bp, Homo sapiens
gagagaaacctggga

SEQ ID NO: 1755655 - DNA, 15 bp, Homo sapiens
agagaaacctgggag

SEQ ID NO: 1755656 - DNA, 15 bp, Homo sapiens
gagaaacctgggaga

SEQ ID NO: 1755657 - DNA, 15 bp, Homo sapiens
agaaacctgggagag

SEQ ID NO: 1755658 - DNA, 15 bp, Homo sapiens
gaaacctgggagaga

SEQ ID NO: 1755659 - DNA, 15 bp, Homo sapiens
aaacctgggagagaa

SEQ ID NO: 1755660 - DNA, 15 bp, Homo sapiens
aacctgggagagaag

SEQ ID NO: 1755661 - DNA, 15 bp, Homo sapiens
acctgggagagaagc

SEQ ID NO: 1755662 - DNA, 15 bp, Homo sapiens
cctgggagagaagct

SEQ ID NO: 1755663 - DNA, 15 bp, Homo sapiens
ctgggagagaagctt

SEQ ID NO: 1755664 - DNA, 15 bp, Homo sapiens
tgggagagaagcttc

SEQ ID NO: 1755665 - DNA, 15 bp, Homo sapiens
gggagagaagcttca

SEQ ID NO: 1755666 - DNA, 15 bp, Homo sapiens
ggagagaagcttcag

SEQ ID NO: 1755667 - DNA, 15 bp, Homo sapiens
gagagaagcttcaga

SEQ ID NO: 1755668 - DNA, 15 bp, Homo sapiens
agagaagcttcagag

SEQ ID NO: 1755669 - DNA, 15 bp, Homo sapiens
gagaagcttcagagc

SEQ ID NO: 1755670 - DNA, 15 bp, Homo sapiens
agaagcttcagagcc

SEQ ID NO: 1755671 - DNA, 15 bp, Homo sapiens
gaagcttcagagcca

SEQ ID NO: 1755672 - DNA, 15 bp, Homo sapiens
aagcttcagagccag

SEQ ID NO: 1755673 - DNA, 15 bp, Homo sapiens
agcttcagagccagg

SEQ ID NO: 1755674 - DNA, 15 bp, Homo sapiens
gcttcagagccaggc

SEQ ID NO: 1755675 - DNA, 15 bp, Homo sapiens
cttcagagccaggct

SEQ ID NO: 1755676 - DNA, 15 bp, Homo sapiens
ttcagagccaggctc

SEQ ID NO: 1755677 - DNA, 15 bp, Homo sapiens
tcagagccaggctcc

SEQ ID NO: 1755678 - DNA, 15 bp, Homo sapiens
cagagccaggctcca

SEQ ID NO: 1755679 - DNA, 15 bp, Homo sapiens
agagccaggctccag

SEQ ID NO: 1755680 - DNA, 15 bp, Homo sapiens
gagccaggctccagg

SEQ ID NO: 1755681 - DNA, 15 bp, Homo sapiens
agccaggctccaggg

SEQ ID NO: 1755682 - DNA, 15 bp, Homo sapiens
gccaggctccaggga

SEQ ID NO: 1755683 - DNA, 15 bp, Homo sapiens
ccaggctccagggac

SEQ ID NO: 1755684 - DNA, 15 bp, Homo sapiens
caggctccagggaca

SEQ ID NO: 1755685 - DNA, 15 bp, Homo sapiens
aggctccagggacac

SEQ ID NO: 1755686 - DNA, 15 bp, Homo sapiens
ggctccagggacaca

SEQ ID NO: 1755687 - DNA, 15 bp, Homo sapiens
gctccagggacacag

SEQ ID NO: 1755688 - DNA, 15 bp, Homo sapiens
ctccagggacacaga

SEQ ID NO: 1755689 - DNA, 15 bp, Homo sapiens
tccagggacacagag

SEQ ID NO: 1755690 - DNA, 15 bp, Homo sapiens
ccagggacacagagg

SEQ ID NO: 1755691 - DNA, 15 bp, Homo sapiens
cagggacacagagga

SEQ ID NO: 1755692 - DNA, 15 bp, Homo sapiens
agggacacagaggac

SEQ ID NO: 1755693 - DNA, 15 bp, Homo sapiens
gggacacagaggact

SEQ ID NO: 1755694 - DNA, 15 bp, Homo sapiens
ggacacagaggactt

SEQ ID NO: 1755695 - DNA, 15 bp, Homo sapiens
gacacagaggacttc

SEQ ID NO: 1755696 - DNA, 15 bp, Homo sapiens
acacagaggacttca

SEQ ID NO: 1755697 - DNA, 15 bp, Homo sapiens
cacagaggacttcac

SEQ ID NO: 1755698 - DNA, 15 bp, Homo sapiens
acagaggacttcacc

SEQ ID NO: 1755699 - DNA, 15 bp, Homo sapiens
cagaggacttcacca

SEQ ID NO: 1755700 - DNA, 15 bp, Homo sapiens
agaggacttcaccaa

SEQ ID NO: 1755701 - DNA, 15 bp, Homo sapiens
gaggacttcaccaac

SEQ ID NO: 1755702 - DNA, 15 bp, Homo sapiens
aggacttcaccaaca

SEQ ID NO: 1755703 - DNA, 15 bp, Homo sapiens
ggacttcaccaacat

SEQ ID NO: 1755704 - DNA, 15 bp, Homo sapiens
gacttcaccaacatt

SEQ ID NO: 1755705 - DNA, 15 bp, Homo sapiens
acttcaccaacattc

SEQ ID NO: 1755706 - DNA, 15 bp, Homo sapiens
cttcaccaacattca

SEQ ID NO: 1755707 - DNA, 15 bp, Homo sapiens
ttcaccaacattcac

SEQ ID NO: 1755708 - DNA, 15 bp, Homo sapiens
tcaccaacattcaca

SEQ ID NO: 1755709 - DNA, 15 bp, Homo sapiens
caccaacattcacag

SEQ ID NO: 1755710 - DNA, 15 bp, Homo sapiens
accaacattcacagg

SEQ ID NO: 1755711 - DNA, 15 bp, Homo sapiens
ccaacattcacaggg

SEQ ID NO: 1755712 - DNA, 15 bp, Homo sapiens
caacattcacaggga

SEQ ID NO: 1755713 - DNA, 15 bp, Homo sapiens
aacattcacagggac

SEQ ID NO: 1755714 - DNA, 15 bp, Homo sapiens
acattcacagggacc

SEQ ID NO: 1755715 - DNA, 15 bp, Homo sapiens
cattcacagggacca

SEQ ID NO: 1755716 - DNA, 15 bp, Homo sapiens
attcacagggaccac

SEQ ID NO: 1755717 - DNA, 15 bp, Homo sapiens
ttcacagggaccacg

SEQ ID NO: 1755718 - DNA, 15 bp, Homo sapiens
tcacagggaccacgg

SEQ ID NO: 1755719 - DNA, 15 bp, Homo sapiens
cacagggaccacgga

SEQ ID NO: 1755720 - DNA, 15 bp, Homo sapiens
acagggaccacggat

SEQ ID NO: 1755721 - DNA, 15 bp, Homo sapiens
cagggaccacggatt

SEQ ID NO: 1755722 - DNA, 15 bp, Homo sapiens
agggaccacggattc

SEQ ID NO: 1755723 - DNA, 15 bp, Homo sapiens
gggaccacggattcc

SEQ ID NO: 1755724 - DNA, 15 bp, Homo sapiens
ggaccacggattccc

SEQ ID NO: 1755725 - DNA, 15 bp, Homo sapiens
gaccacggattccca

SEQ ID NO: 1755726 - DNA, 15 bp, Homo sapiens
accacggattcccac

SEQ ID NO: 1755727 - DNA, 15 bp, Homo sapiens
ccacggattcccact

SEQ ID NO: 1755728 - DNA, 15 bp, Homo sapiens
cacggattcccactc

SEQ ID NO: 1755729 - DNA, 15 bp, Homo sapiens
acggattcccactca

SEQ ID NO: 1755730 - DNA, 15 bp, Homo sapiens
cggattcccactcag

SEQ ID NO: 1755731 - DNA, 15 bp, Homo sapiens
ggattcccactcaga

SEQ ID NO: 1755732 - DNA, 15 bp, Homo sapiens
gattcccactcagaa

SEQ ID NO: 1755733 - DNA, 15 bp, Homo sapiens
attcccactcagaaa

SEQ ID NO: 1755734 - DNA, 15 bp, Homo sapiens
ttcccactcagaaag

SEQ ID NO: 1755735 - DNA, 15 bp, Homo sapiens
tcccactcagaaagc

SEQ ID NO: 1755736 - DNA, 15 bp, Homo sapiens
cccactcagaaagca

SEQ ID NO: 1755737 - DNA, 15 bp, Homo sapiens
ccactcagaaagcag

SEQ ID NO: 1755738 - DNA, 15 bp, Homo sapiens
cactcagaaagcagg

SEQ ID NO: 1755739 - DNA, 15 bp, Homo sapiens
actcagaaagcagga

SEQ ID NO: 1755740 - DNA, 15 bp, Homo sapiens
ctcagaaagcaggaa

SEQ ID NO: 1755741 - DNA, 15 bp, Homo sapiens
tcagaaagcaggaag

SEQ ID NO: 1755742 - DNA, 15 bp, Homo sapiens
cagaaagcaggaagg

SEQ ID NO: 1755743 - DNA, 15 bp, Homo sapiens
agaaagcaggaaggc

SEQ ID NO: 1755744 - DNA, 15 bp, Homo sapiens
gaaagcaggaaggcc

SEQ ID NO: 1755745 - DNA, 15 bp, Homo sapiens
aaagcaggaaggcca

SEQ ID NO: 1755746 - DNA, 15 bp, Homo sapiens
aagcaggaaggccac

SEQ ID NO: 1755747 - DNA, 15 bp, Homo sapiens
agcaggaaggccacg

SEQ ID NO: 1755748 - DNA, 15 bp, Homo sapiens
gcaggaaggccacgt

SEQ ID NO: 1755749 - DNA, 15 bp, Homo sapiens
caggaaggccacgtt

SEQ ID NO: 1755750 - DNA, 15 bp, Homo sapiens
aggaaggccacgttt

SEQ ID NO: 1755751 - DNA, 15 bp, Homo sapiens
ggaaggccacgtttt

SEQ ID NO: 1755752 - DNA, 15 bp, Homo sapiens
gaaggccacgttttc

SEQ ID NO: 1755753 - DNA, 15 bp, Homo sapiens
aaggccacgttttct

SEQ ID NO: 1755754 - DNA, 15 bp, Homo sapiens
aggccacgttttctg

SEQ ID NO: 1755755 - DNA, 15 bp, Homo sapiens
ggccacgttttctga

SEQ ID NO: 1755756 - DNA, 15 bp, Homo sapiens
gccacgttttctgag

SEQ ID NO: 1755757 - DNA, 15 bp, Homo sapiens
ccacgttttctgagc

SEQ ID NO: 1755758 - DNA, 15 bp, Homo sapiens
cacgttttctgagca

SEQ ID NO: 1755759 - DNA, 15 bp, Homo sapiens
acgttttctgagcaa

SEQ ID NO: 1755760 - DNA, 15 bp, Homo sapiens
cgttttctgagcaaa

SEQ ID NO: 1755761 - DNA, 15 bp, Homo sapiens
gttttctgagcaaaa

SEQ ID NO: 1755762 - DNA, 15 bp, Homo sapiens
ttttctgagcaaaac

SEQ ID NO: 1755763 - DNA, 15 bp, Homo sapiens
tttctgagcaaaact

SEQ ID NO: 1755764 - DNA, 15 bp, Homo sapiens
ttctgagcaaaactt

SEQ ID NO: 1755765 - DNA, 15 bp, Homo sapiens
tctgagcaaaacttt

SEQ ID NO: 1755766 - DNA, 15 bp, Homo sapiens
ctgagcaaaactttg

SEQ ID NO: 1755767 - DNA, 15 bp, Homo sapiens
tgagcaaaactttgt

SEQ ID NO: 1755768 - DNA, 15 bp, Homo sapiens
gagcaaaactttgtg

SEQ ID NO: 1755769 - DNA, 15 bp, Homo sapiens
agcaaaactttgtga

SEQ ID NO: 1755770 - DNA, 15 bp, Homo sapiens
gcaaaactttgtgag

SEQ ID NO: 1755771 - DNA, 15 bp, Homo sapiens
caaaactttgtgaga

SEQ ID NO: 1755772 - DNA, 15 bp, Homo sapiens
aaaactttgtgagag

SEQ ID NO: 1755773 - DNA, 15 bp, Homo sapiens
aaactttgtgagagc

SEQ ID NO: 1755774 - DNA, 15 bp, Homo sapiens
aactttgtgagagcg

SEQ ID NO: 1755775 - DNA, 15 bp, Homo sapiens
actttgtgagagcgg

SEQ ID NO: 1755776 - DNA, 15 bp, Homo sapiens
ctttgtgagagcggt

SEQ ID NO: 1755777 - DNA, 15 bp, Homo sapiens
tttgtgagagcggtg

SEQ ID NO: 1755778 - DNA, 15 bp, Homo sapiens
ttgtgagagcggtgg

SEQ ID NO: 1755779 - DNA, 15 bp, Homo sapiens
tgtgagagcggtggg

SEQ ID NO: 1755780 - DNA, 15 bp, Homo sapiens
gtgagagcggtgggg

SEQ ID NO: 1755781 - DNA, 15 bp, Homo sapiens
tgagagcggtgggga

SEQ ID NO: 1755782 - DNA, 15 bp, Homo sapiens
gagagcggtggggag

SEQ ID NO: 1755783 - DNA, 15 bp, Homo sapiens
agagcggtggggagc

SEQ ID NO: 1755784 - DNA, 15 bp, Homo sapiens
gagcggtggggagcc

SEQ ID NO: 1755785 - DNA, 15 bp, Homo sapiens
agcggtggggagcct

SEQ ID NO: 1755786 - DNA, 15 bp, Homo sapiens
gcggtggggagcctt

SEQ ID NO: 1755787 - DNA, 15 bp, Homo sapiens
cggtggggagccttc

SEQ ID NO: 1755788 - DNA, 15 bp, Homo sapiens
ggtggggagccttcc

SEQ ID NO: 1755789 - DNA, 15 bp, Homo sapiens
gtggggagccttcca

SEQ ID NO: 1755790 - DNA, 15 bp, Homo sapiens
tggggagccttccaa

SEQ ID NO: 1755791 - DNA, 15 bp, Homo sapiens
ggggagccttccaat

SEQ ID NO: 1755792 - DNA, 15 bp, Homo sapiens
gggagccttccaatg

SEQ ID NO: 1755793 - DNA, 15 bp, Homo sapiens
ggagccttccaatgg

SEQ ID NO: 1755794 - DNA, 15 bp, Homo sapiens
gagccttccaatgga

SEQ ID NO: 1755795 - DNA, 15 bp, Homo sapiens
agccttccaatggag

SEQ ID NO: 1755796 - DNA, 15 bp, Homo sapiens
gccttccaatggagg

SEQ ID NO: 1755797 - DNA, 15 bp, Homo sapiens
ccttccaatggagga

SEQ ID NO: 1755798 - DNA, 15 bp, Homo sapiens
cttccaatggaggat

SEQ ID NO: 1755799 - DNA, 15 bp, Homo sapiens
ttccaatggaggatg

SEQ ID NO: 1755800 - DNA, 15 bp, Homo sapiens
tccaatggaggatgc

SEQ ID NO: 1755801 - DNA, 15 bp, Homo sapiens
ccaatggaggatgcc

SEQ ID NO: 1755802 - DNA, 15 bp, Homo sapiens
caatggaggatgcct

SEQ ID NO: 1755803 - DNA, 15 bp, Homo sapiens
aatggaggatgcctg

SEQ ID NO: 1755804 - DNA, 15 bp, Homo sapiens
atggaggatgcctgt

SEQ ID NO: 1755805 - DNA, 15 bp, Homo sapiens
tggaggatgcctgtg

SEQ ID NO: 1755806 - DNA, 15 bp, Homo sapiens
ggaggatgcctgtgg

SEQ ID NO: 1755807 - DNA, 15 bp, Homo sapiens
gaggatgcctgtggc

SEQ ID NO: 1755808 - DNA, 15 bp, Homo sapiens
aggatgcctgtggca

SEQ ID NO: 1755809 - DNA, 15 bp, Homo sapiens
ggatgcctgtggcat

SEQ ID NO: 1755810 - DNA, 15 bp, Homo sapiens
gatgcctgtggcatc

SEQ ID NO: 1755811 - DNA, 15 bp, Homo sapiens
atgcctgtggcatct

SEQ ID NO: 1755812 - DNA, 15 bp, Homo sapiens
tgcctgtggcatctg

SEQ ID NO: 1755813 - DNA, 15 bp, Homo sapiens
gcctgtggcatctgg

SEQ ID NO: 1755814 - DNA, 15 bp, Homo sapiens
cctgtggcatctggg

SEQ ID NO: 1755815 - DNA, 15 bp, Homo sapiens
ctgtggcatctgggg

SEQ ID NO: 1755816 - DNA, 15 bp, Homo sapiens
tgtggcatctgggga

SEQ ID NO: 1755817 - DNA, 15 bp, Homo sapiens
gtggcatctggggag

SEQ ID NO: 1755818 - DNA, 15 bp, Homo sapiens
tggcatctggggaga

SEQ ID NO: 1755819 - DNA, 15 bp, Homo sapiens
ggcatctggggagac

SEQ ID NO: 1755820 - DNA, 15 bp, Homo sapiens
gcatctggggagact

SEQ ID NO: 1755821 - DNA, 15 bp, Homo sapiens
catctggggagactc

SEQ ID NO: 1755822 - DNA, 15 bp, Homo sapiens
atctggggagactct

SEQ ID NO: 1755823 - DNA, 15 bp, Homo sapiens
tctggggagactctc

SEQ ID NO: 1755824 - DNA, 15 bp, Homo sapiens
ctggggagactctct

SEQ ID NO: 1755825 - DNA, 15 bp, Homo sapiens
tggggagactctctg

SEQ ID NO: 1755826 - DNA, 15 bp, Homo sapiens
ggggagactctctga

SEQ ID NO: 1755827 - DNA, 15 bp, Homo sapiens
gggagactctctgat

SEQ ID NO: 1755828 - DNA, 15 bp, Homo sapiens
ggagactctctgata

SEQ ID NO: 1755829 - DNA, 15 bp, Homo sapiens
gagactctctgatat

SEQ ID NO: 1755830 - DNA, 15 bp, Homo sapiens
agactctctgatatg

SEQ ID NO: 1755831 - DNA, 15 bp, Homo sapiens
gactctctgatatgg

SEQ ID NO: 1755832 - DNA, 15 bp, Homo sapiens
actctctgatatggt

SEQ ID NO: 1755833 - DNA, 15 bp, Homo sapiens
ctctctgatatggtt

SEQ ID NO: 1755834 - DNA, 15 bp, Homo sapiens
tctctgatatggttt

SEQ ID NO: 1755835 - DNA, 15 bp, Homo sapiens
ctctgatatggtttg

SEQ ID NO: 1755836 - DNA, 15 bp, Homo sapiens
tctgatatggtttgg

SEQ ID NO: 1755837 - DNA, 15 bp, Homo sapiens
ctgatatggtttggc

SEQ ID NO: 1755838 - DNA, 15 bp, Homo sapiens
ctgtgtccccacccg

SEQ ID NO: 1755839 - DNA, 15 bp, Homo sapiens
tgtgtccccacccga

SEQ ID NO: 1755840 - DNA, 15 bp, Homo sapiens
gtgtccccacccgaa

SEQ ID NO: 1755841 - DNA, 15 bp, Homo sapiens
tgtccccacccgaat

SEQ ID NO: 1755842 - DNA, 15 bp, Homo sapiens
gtccccacccgaatc

SEQ ID NO: 1755843 - DNA, 15 bp, Homo sapiens
tccccacccgaatct

SEQ ID NO: 1755844 - DNA, 15 bp, Homo sapiens
ccccacccgaatctc

SEQ ID NO: 1755845 - DNA, 15 bp, Homo sapiens
cccacccgaatctca

SEQ ID NO: 1755846 - DNA, 15 bp, Homo sapiens
ccacccgaatctcat

SEQ ID NO: 1755847 - DNA, 15 bp, Homo sapiens
cacccgaatctcatc

SEQ ID NO: 1755848 - DNA, 15 bp, Homo sapiens
acccgaatctcatcc

SEQ ID NO: 1755849 - DNA, 15 bp, Homo sapiens
cccgaatctcatccg

SEQ ID NO: 1755850 - DNA, 15 bp, Homo sapiens
ccgaatctcatccga

SEQ ID NO: 1755851 - DNA, 15 bp, Homo sapiens
cgaatctcatccgaa

SEQ ID NO: 1755852 - DNA, 15 bp, Homo sapiens
gaatctcatccgaaa

SEQ ID NO: 1755853 - DNA, 15 bp, Homo sapiens
aatctcatccgaaat

SEQ ID NO: 1755854 - DNA, 15 bp, Homo sapiens
atctcatccgaaatt

SEQ ID NO: 1755855 - DNA, 15 bp, Homo sapiens
tctcatccgaaattg

SEQ ID NO: 1755856 - DNA, 15 bp, Homo sapiens
ctcatccgaaattgt

SEQ ID NO: 1755857 - DNA, 15 bp, Homo sapiens
tcatccgaaattgta

SEQ ID NO: 1755858 - DNA, 15 bp, Homo sapiens
catccgaaattgtaa

SEQ ID NO: 1755859 - DNA, 15 bp, Homo sapiens
atccgaaattgtaat

SEQ ID NO: 1755860 - DNA, 15 bp, Homo sapiens
tccgaaattgtaatc

SEQ ID NO: 1755861 - DNA, 15 bp, Homo sapiens
ccgaaattgtaatcc

SEQ ID NO: 1755862 - DNA, 15 bp, Homo sapiens
cgaaattgtaatccc

SEQ ID NO: 1755863 - DNA, 15 bp, Homo sapiens
gaaattgtaatcccc

SEQ ID NO: 1755864 - DNA, 15 bp, Homo sapiens
aaattgtaatcccca

SEQ ID NO: 1755865 - DNA, 15 bp, Homo sapiens
aattgtaatccccac

SEQ ID NO: 1755866 - DNA, 15 bp, Homo sapiens
attgtaatccccacg

SEQ ID NO: 1755867 - DNA, 15 bp, Homo sapiens
ttgtaatccccacgt

SEQ ID NO: 1755868 - DNA, 15 bp, Homo sapiens
tgtaatccccacgtg

SEQ ID NO: 1755869 - DNA, 15 bp, Homo sapiens
gtaatccccacgtgt

SEQ ID NO: 1755870 - DNA, 15 bp, Homo sapiens
taatccccacgtgtc

SEQ ID NO: 1755871 - DNA, 15 bp, Homo sapiens
aatccccacgtgtcg

SEQ ID NO: 1755872 - DNA, 15 bp, Homo sapiens
atccccacgtgtcga

SEQ ID NO: 1755873 - DNA, 15 bp, Homo sapiens
tccccacgtgtcgag

SEQ ID NO: 1755874 - DNA, 15 bp, Homo sapiens
ccccacgtgtcgagg

SEQ ID NO: 1755875 - DNA, 15 bp, Homo sapiens
cccacgtgtcgaggg

SEQ ID NO: 1755876 - DNA, 15 bp, Homo sapiens
ccacgtgtcgaggga

SEQ ID NO: 1755877 - DNA, 15 bp, Homo sapiens
cacgtgtcgagggag

SEQ ID NO: 1755878 - DNA, 15 bp, Homo sapiens
acgtgtcgagggagg

SEQ ID NO: 1755879 - DNA, 15 bp, Homo sapiens
cgtgtcgagggaggg

SEQ ID NO: 1755880 - DNA, 15 bp, Homo sapiens
gtgtcgagggaggga

SEQ ID NO: 1755881 - DNA, 15 bp, Homo sapiens
tgtcgagggagggat

SEQ ID NO: 1755882 - DNA, 15 bp, Homo sapiens
gtcgagggagggatc

SEQ ID NO: 1755883 - DNA, 15 bp, Homo sapiens
tcgagggagggatct

SEQ ID NO: 1755884 - DNA, 15 bp, Homo sapiens
cgagggagggatctg

SEQ ID NO: 1755885 - DNA, 15 bp, Homo sapiens
gagggagggatctgg

SEQ ID NO: 1755886 - DNA, 15 bp, Homo sapiens
agggagggatctggt

SEQ ID NO: 1755887 - DNA, 15 bp, Homo sapiens
gggagggatctggtg

SEQ ID NO: 1755888 - DNA, 15 bp, Homo sapiens
ggagggatctggtgg

SEQ ID NO: 1755889 - DNA, 15 bp, Homo sapiens
gagggatctggtggg

SEQ ID NO: 1755890 - DNA, 15 bp, Homo sapiens
agggatctggtggga

SEQ ID NO: 1755891 - DNA, 15 bp, Homo sapiens
gggatctggtgggag

SEQ ID NO: 1755892 - DNA, 15 bp, Homo sapiens
ggatctggtgggagg

SEQ ID NO: 1755893 - DNA, 15 bp, Homo sapiens
gatctggtgggaggt

SEQ ID NO: 1755894 - DNA, 15 bp, Homo sapiens
atctggtgggaggtg

SEQ ID NO: 1755895 - DNA, 15 bp, Homo sapiens
tctggtgggaggtga

SEQ ID NO: 1755896 - DNA, 15 bp, Homo sapiens
ctggtgggaggtgat

SEQ ID NO: 1755897 - DNA, 15 bp, Homo sapiens
tggtgggaggtgatt

SEQ ID NO: 1755898 - DNA, 15 bp, Homo sapiens
ggtgggaggtgattg

SEQ ID NO: 1755899 - DNA, 15 bp, Homo sapiens
gtgggaggtgattgg

SEQ ID NO: 1755900 - DNA, 15 bp, Homo sapiens
tgggaggtgattgga

SEQ ID NO: 1755901 - DNA, 15 bp, Homo sapiens
gggaggtgattggat

SEQ ID NO: 1755902 - DNA, 15 bp, Homo sapiens
ggaggtgattggatc

SEQ ID NO: 1755903 - DNA, 15 bp, Homo sapiens
gaggtgattggatca

SEQ ID NO: 1755904 - DNA, 15 bp, Homo sapiens
aggtgattggatcat

SEQ ID NO: 1755905 - DNA, 15 bp, Homo sapiens
ggtgattggatcata

SEQ ID NO: 1755906 - DNA, 15 bp, Homo sapiens
gtgattggatcataa

SEQ ID NO: 1755907 - DNA, 15 bp, Homo sapiens
tgattggatcataaa

SEQ ID NO: 1755908 - DNA, 15 bp, Homo sapiens
gattggatcataaag

SEQ ID NO: 1755909 - DNA, 15 bp, Homo sapiens
attggatcataaagg

SEQ ID NO: 1755910 - DNA, 15 bp, Homo sapiens
ttggatcataaaggt

SEQ ID NO: 1755911 - DNA, 15 bp, Homo sapiens
tggatcataaaggta

SEQ ID NO: 1755912 - DNA, 15 bp, Homo sapiens
ggatcataaaggtag

SEQ ID NO: 1755913 - DNA, 15 bp, Homo sapiens
gatcataaaggtaga

SEQ ID NO: 1755914 - DNA, 15 bp, Homo sapiens
atcataaaggtagat

SEQ ID NO: 1755915 - DNA, 15 bp, Homo sapiens
tcataaaggtagatt

SEQ ID NO: 1755916 - DNA, 15 bp, Homo sapiens
cataaaggtagattt

SEQ ID NO: 1755917 - DNA, 15 bp, Homo sapiens
ataaaggtagatttc

SEQ ID NO: 1755918 - DNA, 15 bp, Homo sapiens
taaaggtagatttcc

SEQ ID NO: 1755919 - DNA, 15 bp, Homo sapiens
aaaggtagatttcct

SEQ ID NO: 1755920 - DNA, 15 bp, Homo sapiens
aaggtagatttcctc

SEQ ID NO: 1755921 - DNA, 15 bp, Homo sapiens
aggtagatttcctct

SEQ ID NO: 1755922 - DNA, 15 bp, Homo sapiens
ggtagatttcctcta

SEQ ID NO: 1755923 - DNA, 15 bp, Homo sapiens
gtagatttcctctat

SEQ ID NO: 1755924 - DNA, 15 bp, Homo sapiens
tagatttcctctatg

SEQ ID NO: 1755925 - DNA, 15 bp, Homo sapiens
agatttcctctatgc

SEQ ID NO: 1755926 - DNA, 15 bp, Homo sapiens
gatttcctctatgct

SEQ ID NO: 1755927 - DNA, 15 bp, Homo sapiens
atttcctctatgctg

SEQ ID NO: 1755928 - DNA, 15 bp, Homo sapiens
tttcctctatgctgt

SEQ ID NO: 1755929 - DNA, 15 bp, Homo sapiens
ttcctctatgctgtt

SEQ ID NO: 1755930 - DNA, 15 bp, Homo sapiens
tcctctatgctgttc

SEQ ID NO: 1755931 - DNA, 15 bp, Homo sapiens
cctctatgctgttct

SEQ ID NO: 1755932 - DNA, 15 bp, Homo sapiens
ctctatgctgttctc

SEQ ID NO: 1755933 - DNA, 15 bp, Homo sapiens
tctatgctgttctca

SEQ ID NO: 1755934 - DNA, 15 bp, Homo sapiens
ctatgctgttctcat

SEQ ID NO: 1755935 - DNA, 15 bp, Homo sapiens
tatgctgttctcatg

SEQ ID NO: 1755936 - DNA, 15 bp, Homo sapiens
tgctgttctcatgat

SEQ ID NO: 1755937 - DNA, 15 bp, Homo sapiens
gctgttctcatgata

SEQ ID NO: 1755938 - DNA, 15 bp, Homo sapiens
ctgttctcatgatag

SEQ ID NO: 1755939 - DNA, 15 bp, Homo sapiens
tgttctcatgatagt

SEQ ID NO: 1755940 - DNA, 15 bp, Homo sapiens
gttctcatgatagtg

SEQ ID NO: 1755941 - DNA, 15 bp, Homo sapiens
ttctcatgatagtga

SEQ ID NO: 1755942 - DNA, 15 bp, Homo sapiens
tctcatgatagtgag

SEQ ID NO: 1755943 - DNA, 15 bp, Homo sapiens
ctcatgatagtgagt

SEQ ID NO: 1755944 - DNA, 15 bp, Homo sapiens
tcatgatagtgagtg

SEQ ID NO: 1755945 - DNA, 15 bp, Homo sapiens
catgatagtgagtga

SEQ ID NO: 1755946 - DNA, 15 bp, Homo sapiens
atgatagtgagtgag

SEQ ID NO: 1755947 - DNA, 15 bp, Homo sapiens
tgatagtgagtgagt

SEQ ID NO: 1755948 - DNA, 15 bp, Homo sapiens
gatagtgagtgagtt

SEQ ID NO: 1755949 - DNA, 15 bp, Homo sapiens
atagtgagtgagttt

SEQ ID NO: 1755950 - DNA, 15 bp, Homo sapiens
tagtgagtgagttta

SEQ ID NO: 1755951 - DNA, 15 bp, Homo sapiens
agtgagtgagtttaa

SEQ ID NO: 1755952 - DNA, 15 bp, Homo sapiens
gtgagtgagtttaaa

SEQ ID NO: 1755953 - DNA, 15 bp, Homo sapiens
tgagtgagtttaaaa

SEQ ID NO: 1755954 - DNA, 15 bp, Homo sapiens
gagtgagtttaaaaa

SEQ ID NO: 1755955 - DNA, 15 bp, Homo sapiens
agtgagtttaaaaag

SEQ ID NO: 1755956 - DNA, 15 bp, Homo sapiens
gtgagtttaaaaagt

SEQ ID NO: 1755957 - DNA, 15 bp, Homo sapiens
tgagtttaaaaagtt

SEQ ID NO: 1755958 - DNA, 15 bp, Homo sapiens
gagtttaaaaagttt

SEQ ID NO: 1755959 - DNA, 15 bp, Homo sapiens
agtttaaaaagttta

SEQ ID NO: 1755960 - DNA, 15 bp, Homo sapiens
gtttaaaaagtttac

SEQ ID NO: 1755961 - DNA, 15 bp, Homo sapiens
tttaaaaagtttaca

SEQ ID NO: 1755962 - DNA, 15 bp, Homo sapiens
ttaaaaagtttacac

SEQ ID NO: 1755963 - DNA, 15 bp, Homo sapiens
taaaaagtttacact

SEQ ID NO: 1755964 - DNA, 15 bp, Homo sapiens
aaaaagtttacactc

SEQ ID NO: 1755965 - DNA, 15 bp, Homo sapiens
aaaagtttacactct

SEQ ID NO: 1755966 - DNA, 15 bp, Homo sapiens
aaagtttacactctt

SEQ ID NO: 1755967 - DNA, 15 bp, Homo sapiens
aagtttacactctta

SEQ ID NO: 1755968 - DNA, 15 bp, Homo sapiens
agtttacactcttat

SEQ ID NO: 1755969 - DNA, 15 bp, Homo sapiens
gtttacactcttatg

SEQ ID NO: 1755970 - DNA, 15 bp, Homo sapiens
tttacactcttatgg

SEQ ID NO: 1755971 - DNA, 15 bp, Homo sapiens
ttacactcttatggt

SEQ ID NO: 1755972 - DNA, 15 bp, Homo sapiens
tacactcttatggtt

SEQ ID NO: 1755973 - DNA, 15 bp, Homo sapiens
acactcttatggttt

SEQ ID NO: 1755974 - DNA, 15 bp, Homo sapiens
cactcttatggttta

SEQ ID NO: 1755975 - DNA, 15 bp, Homo sapiens
actcttatggtttaa

SEQ ID NO: 1755976 - DNA, 15 bp, Homo sapiens
ctcttatggtttaaa

SEQ ID NO: 1755977 - DNA, 15 bp, Homo sapiens
tcttatggtttaaaa

SEQ ID NO: 1755978 - DNA, 15 bp, Homo sapiens
cttatggtttaaaag

SEQ ID NO: 1755979 - DNA, 15 bp, Homo sapiens
ttatggtttaaaagt

SEQ ID NO: 1755980 - DNA, 15 bp, Homo sapiens
tatggtttaaaagtt

SEQ ID NO: 1755981 - DNA, 15 bp, Homo sapiens
atggtttaaaagttt

SEQ ID NO: 1755982 - DNA, 15 bp, Homo sapiens
tggtttaaaagtttt

SEQ ID NO: 1755983 - DNA, 15 bp, Homo sapiens
ggtttaaaagttttt

SEQ ID NO: 1755984 - DNA, 15 bp, Homo sapiens
gtttaaaagtttttg

SEQ ID NO: 1755985 - DNA, 15 bp, Homo sapiens
tttaaaagtttttgg

SEQ ID NO: 1755986 - DNA, 15 bp, Homo sapiens
ttaaaagtttttggc

SEQ ID NO: 1755987 - DNA, 15 bp, Homo sapiens
taaaagtttttggca

SEQ ID NO: 1755988 - DNA, 15 bp, Homo sapiens
aaaagtttttggcag

SEQ ID NO: 1755989 - DNA, 15 bp, Homo sapiens
aaagtttttggcagt

SEQ ID NO: 1755990 - DNA, 15 bp, Homo sapiens
aagtttttggcagtt

SEQ ID NO: 1755991 - DNA, 15 bp, Homo sapiens
agtttttggcagttc

SEQ ID NO: 1755992 - DNA, 15 bp, Homo sapiens
gtttttggcagttcc

SEQ ID NO: 1755993 - DNA, 15 bp, Homo sapiens
tttttggcagttcct

SEQ ID NO: 1755994 - DNA, 15 bp, Homo sapiens
ttttggcagttcctc

SEQ ID NO: 1755995 - DNA, 15 bp, Homo sapiens
tttggcagttcctcc

SEQ ID NO: 1755996 - DNA, 15 bp, Homo sapiens
ttggcagttcctccc

SEQ ID NO: 1755997 - DNA, 15 bp, Homo sapiens
tggcagttcctcccc

SEQ ID NO: 1755998 - DNA, 15 bp, Homo sapiens
ggcagttcctcccct

SEQ ID NO: 1755999 - DNA, 15 bp, Homo sapiens
gcagttcctcccctc

SEQ ID NO: 1756000 - DNA, 15 bp, Homo sapiens
cagttcctcccctca

SEQ ID NO: 1756001 - DNA, 15 bp, Homo sapiens
agttcctcccctcat

SEQ ID NO: 1756002 - DNA, 15 bp, Homo sapiens
gttcctcccctcatt

SEQ ID NO: 1756003 - DNA, 15 bp, Homo sapiens
ttcctcccctcattc

SEQ ID NO: 1756004 - DNA, 15 bp, Homo sapiens
tcctcccctcattct

SEQ ID NO: 1756005 - DNA, 15 bp, Homo sapiens
cctcccctcattctt

SEQ ID NO: 1756006 - DNA, 15 bp, Homo sapiens
ctcccctcattcttc

SEQ ID NO: 1756007 - DNA, 15 bp, Homo sapiens
tcccctcattcttct

SEQ ID NO: 1756008 - DNA, 15 bp, Homo sapiens
cccctcattcttctc

SEQ ID NO: 1756009 - DNA, 15 bp, Homo sapiens
ccctcattcttctct

SEQ ID NO: 1756010 - DNA, 15 bp, Homo sapiens
cctcattcttctctc

SEQ ID NO: 1756011 - DNA, 15 bp, Homo sapiens
ctcattcttctctcc

SEQ ID NO: 1756012 - DNA, 15 bp, Homo sapiens
tcattcttctctcct

SEQ ID NO: 1756013 - DNA, 15 bp, Homo sapiens
cattcttctctcctg

SEQ ID NO: 1756014 - DNA, 15 bp, Homo sapiens
attcttctctcctgc

SEQ ID NO: 1756015 - DNA, 15 bp, Homo sapiens
ttcttctctcctgcc

SEQ ID NO: 1756016 - DNA, 15 bp, Homo sapiens
tcttctctcctgcca

SEQ ID NO: 1756017 - DNA, 15 bp, Homo sapiens
cttctctcctgccac

SEQ ID NO: 1756018 - DNA, 15 bp, Homo sapiens
ttctctcctgccacc

SEQ ID NO: 1756019 - DNA, 15 bp, Homo sapiens
tctctcctgccacca

SEQ ID NO: 1756020 - DNA, 15 bp, Homo sapiens
ctctcctgccaccat

SEQ ID NO: 1756021 - DNA, 15 bp, Homo sapiens
tctcctgccaccatg

SEQ ID NO: 1756022 - DNA, 15 bp, Homo sapiens
ctcctgccaccatgt

SEQ ID NO: 1756023 - DNA, 15 bp, Homo sapiens
tcctgccaccatgta

SEQ ID NO: 1756024 - DNA, 15 bp, Homo sapiens
cctgccaccatgtaa

SEQ ID NO: 1756025 - DNA, 15 bp, Homo sapiens
ctgccaccatgtaag

SEQ ID NO: 1756026 - DNA, 15 bp, Homo sapiens
tgccaccatgtaaga

SEQ ID NO: 1756027 - DNA, 15 bp, Homo sapiens
gccaccatgtaagat

SEQ ID NO: 1756028 - DNA, 15 bp, Homo sapiens
ccaccatgtaagatg

SEQ ID NO: 1756029 - DNA, 15 bp, Homo sapiens
caccatgtaagatgt

SEQ ID NO: 1756030 - DNA, 15 bp, Homo sapiens
accatgtaagatgta

SEQ ID NO: 1756031 - DNA, 15 bp, Homo sapiens
ccatgtaagatgtac

SEQ ID NO: 1756032 - DNA, 15 bp, Homo sapiens
catgtaagatgtacc

SEQ ID NO: 1756033 - DNA, 15 bp, Homo sapiens
atgtaagatgtacct

SEQ ID NO: 1756034 - DNA, 15 bp, Homo sapiens
tgtaagatgtacctt

SEQ ID NO: 1756035 - DNA, 15 bp, Homo sapiens
gtaagatgtaccttg

SEQ ID NO: 1756036 - DNA, 15 bp, Homo sapiens
taagatgtaccttgc

SEQ ID NO: 1756037 - DNA, 15 bp, Homo sapiens
aagatgtaccttgct

SEQ ID NO: 1756038 - DNA, 15 bp, Homo sapiens
agatgtaccttgctt

SEQ ID NO: 1756039 - DNA, 15 bp, Homo sapiens
gatgtaccttgcttc

SEQ ID NO: 1756040 - DNA, 15 bp, Homo sapiens
atgtaccttgcttcc

SEQ ID NO: 1756041 - DNA, 15 bp, Homo sapiens
tgtaccttgcttccc

SEQ ID NO: 1756042 - DNA, 15 bp, Homo sapiens
gtaccttgcttcccc

SEQ ID NO: 1756043 - DNA, 15 bp, Homo sapiens
taccttgcttcccct

SEQ ID NO: 1756044 - DNA, 15 bp, Homo sapiens
accttgcttcccctt

SEQ ID NO: 1756045 - DNA, 15 bp, Homo sapiens
ccttgcttccccttt

SEQ ID NO: 1756046 - DNA, 15 bp, Homo sapiens
cttgcttcccctttg

SEQ ID NO: 1756047 - DNA, 15 bp, Homo sapiens
ttgcttcccctttgc

SEQ ID NO: 1756048 - DNA, 15 bp, Homo sapiens
tgcttcccctttgcc

SEQ ID NO: 1756049 - DNA, 15 bp, Homo sapiens
gcttcccctttgcct

SEQ ID NO: 1756050 - DNA, 15 bp, Homo sapiens
cttcccctttgcctt

SEQ ID NO: 1756051 - DNA, 15 bp, Homo sapiens
ttcccctttgccttc

SEQ ID NO: 1756052 - DNA, 15 bp, Homo sapiens
tcccctttgccttcc

SEQ ID NO: 1756053 - DNA, 15 bp, Homo sapiens
cccctttgccttcca

SEQ ID NO: 1756054 - DNA, 15 bp, Homo sapiens
ccctttgccttccac

SEQ ID NO: 1756055 - DNA, 15 bp, Homo sapiens
cctttgccttccacc

SEQ ID NO: 1756056 - DNA, 15 bp, Homo sapiens
ctttgccttccacca

SEQ ID NO: 1756057 - DNA, 15 bp, Homo sapiens
tttgccttccaccat

SEQ ID NO: 1756058 - DNA, 15 bp, Homo sapiens
ttgccttccaccatg

SEQ ID NO: 1756059 - DNA, 15 bp, Homo sapiens
tgccttccaccatga

SEQ ID NO: 1756060 - DNA, 15 bp, Homo sapiens
gccttccaccatgat

SEQ ID NO: 1756061 - DNA, 15 bp, Homo sapiens
ccttccaccatgatt

SEQ ID NO: 1756062 - DNA, 15 bp, Homo sapiens
cttccaccatgattg

SEQ ID NO: 1756063 - DNA, 15 bp, Homo sapiens
ttccaccatgattgt

SEQ ID NO: 1756064 - DNA, 15 bp, Homo sapiens
tccaccatgattgta

SEQ ID NO: 1756065 - DNA, 15 bp, Homo sapiens
ccaccatgattgtaa

SEQ ID NO: 1756066 - DNA, 15 bp, Homo sapiens
caccatgattgtaag

SEQ ID NO: 1756067 - DNA, 15 bp, Homo sapiens
accatgattgtaagt

SEQ ID NO: 1756068 - DNA, 15 bp, Homo sapiens
ccatgattgtaagtt

SEQ ID NO: 1756069 - DNA, 15 bp, Homo sapiens
catgattgtaagttt

SEQ ID NO: 1756070 - DNA, 15 bp, Homo sapiens
atgattgtaagtttc

SEQ ID NO: 1756071 - DNA, 15 bp, Homo sapiens
tgattgtaagtttcc

SEQ ID NO: 1756072 - DNA, 15 bp, Homo sapiens
gattgtaagtttcct

SEQ ID NO: 1756073 - DNA, 15 bp, Homo sapiens
attgtaagtttcctg

SEQ ID NO: 1756074 - DNA, 15 bp, Homo sapiens
ttgtaagtttcctga

SEQ ID NO: 1756075 - DNA, 15 bp, Homo sapiens
tgtaagtttcctgag

SEQ ID NO: 1756076 - DNA, 15 bp, Homo sapiens
gtaagtttcctgagg

SEQ ID NO: 1756077 - DNA, 15 bp, Homo sapiens
taagtttcctgaggc

SEQ ID NO: 1756078 - DNA, 15 bp, Homo sapiens
aagtttcctgaggcc

SEQ ID NO: 1756079 - DNA, 15 bp, Homo sapiens
agtttcctgaggcct

SEQ ID NO: 1756080 - DNA, 15 bp, Homo sapiens
gtttcctgaggcctc

SEQ ID NO: 1756081 - DNA, 15 bp, Homo sapiens
tttcctgaggcctcc

SEQ ID NO: 1756082 - DNA, 15 bp, Homo sapiens
ttcctgaggcctccc

SEQ ID NO: 1756083 - DNA, 15 bp, Homo sapiens
tcctgaggcctcccc

SEQ ID NO: 1756084 - DNA, 15 bp, Homo sapiens
cctgaggcctcccca

SEQ ID NO: 1756085 - DNA, 15 bp, Homo sapiens
cctccccagccatga

SEQ ID NO: 1756086 - DNA, 15 bp, Homo sapiens
ctccccagccatgag

SEQ ID NO: 1756087 - DNA, 15 bp, Homo sapiens
tccccagccatgagg

SEQ ID NO: 1756088 - DNA, 15 bp, Homo sapiens
ccccagccatgagga

SEQ ID NO: 1756089 - DNA, 15 bp, Homo sapiens
cccagccatgaggaa

SEQ ID NO: 1756090 - DNA, 15 bp, Homo sapiens
ccagccatgaggaac

SEQ ID NO: 1756091 - DNA, 15 bp, Homo sapiens
cagccatgaggaact

SEQ ID NO: 1756092 - DNA, 15 bp, Homo sapiens
agccatgaggaactc

SEQ ID NO: 1756093 - DNA, 15 bp, Homo sapiens
gccatgaggaactct

SEQ ID NO: 1756094 - DNA, 15 bp, Homo sapiens
ccatgaggaactctg

SEQ ID NO: 1756095 - DNA, 15 bp, Homo sapiens
catgaggaactctga

SEQ ID NO: 1756096 - DNA, 15 bp, Homo sapiens
atgaggaactctgag

SEQ ID NO: 1756097 - DNA, 15 bp, Homo sapiens
tgaggaactctgagt

SEQ ID NO: 1756098 - DNA, 15 bp, Homo sapiens
gaggaactctgagtc

SEQ ID NO: 1756099 - DNA, 15 bp, Homo sapiens
aggaactctgagtca

SEQ ID NO: 1756100 - DNA, 15 bp, Homo sapiens
ggaactctgagtcaa

SEQ ID NO: 1756101 - DNA, 15 bp, Homo sapiens
gaactctgagtcaat

SEQ ID NO: 1756102 - DNA, 15 bp, Homo sapiens
aactctgagtcaatt

SEQ ID NO: 1756103 - DNA, 15 bp, Homo sapiens
actctgagtcaatta

SEQ ID NO: 1756104 - DNA, 15 bp, Homo sapiens
ctctgagtcaattaa

SEQ ID NO: 1756105 - DNA, 15 bp, Homo sapiens
tctgagtcaattaaa

SEQ ID NO: 1756106 - DNA, 15 bp, Homo sapiens
ctgagtcaattaaac

SEQ ID NO: 1756107 - DNA, 15 bp, Homo sapiens
tgagtcaattaaacc

SEQ ID NO: 1756108 - DNA, 15 bp, Homo sapiens
gagtcaattaaacct

SEQ ID NO: 1756109 - DNA, 15 bp, Homo sapiens
agtcaattaaacctc

SEQ ID NO: 1756110 - DNA, 15 bp, Homo sapiens
gtcaattaaacctct

SEQ ID NO: 1756111 - DNA, 15 bp, Homo sapiens
tcaattaaacctctt

SEQ ID NO: 1756112 - DNA, 15 bp, Homo sapiens
caattaaacctcttt

SEQ ID NO: 1756113 - DNA, 15 bp, Homo sapiens
aattaaacctctttt

SEQ ID NO: 1756114 - DNA, 15 bp, Homo sapiens
attaaacctcttttc

SEQ ID NO: 1756115 - DNA, 15 bp, Homo sapiens
ttaaacctcttttct

SEQ ID NO: 1756116 - DNA, 15 bp, Homo sapiens
taaacctcttttctt

SEQ ID NO: 1756117 - DNA, 15 bp, Homo sapiens
aaacctcttttcttt

SEQ ID NO: 1756118 - DNA, 15 bp, Homo sapiens
aacctcttttcttta

SEQ ID NO: 1756119 - DNA, 15 bp, Homo sapiens
acctcttttctttat

SEQ ID NO: 1756120 - DNA, 15 bp, Homo sapiens
cctcttttctttata

SEQ ID NO: 1756121 - DNA, 15 bp, Homo sapiens
ctcttttctttataa

SEQ ID NO: 1756122 - DNA, 15 bp, Homo sapiens
tcttttctttataag

SEQ ID NO: 1756123 - DNA, 15 bp, Homo sapiens
cttttctttataagt

SEQ ID NO: 1756124 - DNA, 15 bp, Homo sapiens
ttttctttataagtt

SEQ ID NO: 1756125 - DNA, 15 bp, Homo sapiens
tttctttataagtta

SEQ ID NO: 1756126 - DNA, 15 bp, Homo sapiens
ttctttataagttac

SEQ ID NO: 1756127 - DNA, 15 bp, Homo sapiens
tctttataagttacc

SEQ ID NO: 1756128 - DNA, 15 bp, Homo sapiens
ctttataagttaccc

SEQ ID NO: 1756129 - DNA, 15 bp, Homo sapiens
tttataagttaccca

SEQ ID NO: 1756130 - DNA, 15 bp, Homo sapiens
ttataagttacccag

SEQ ID NO: 1756131 - DNA, 15 bp, Homo sapiens
tataagttacccagt

SEQ ID NO: 1756132 - DNA, 15 bp, Homo sapiens
ataagttacccagtc

SEQ ID NO: 1756133 - DNA, 15 bp, Homo sapiens
taagttacccagtct

SEQ ID NO: 1756134 - DNA, 15 bp, Homo sapiens
aagttacccagtctc

SEQ ID NO: 1756135 - DNA, 15 bp, Homo sapiens
agttacccagtctca

SEQ ID NO: 1756136 - DNA, 15 bp, Homo sapiens
gttacccagtctcag

SEQ ID NO: 1756137 - DNA, 15 bp, Homo sapiens
cccagtctcaggtag

SEQ ID NO: 1756138 - DNA, 15 bp, Homo sapiens
ccagtctcaggtagt

SEQ ID NO: 1756139 - DNA, 15 bp, Homo sapiens
cagtctcaggtagtt

SEQ ID NO: 1756140 - DNA, 15 bp, Homo sapiens
agtctcaggtagttc

SEQ ID NO: 1756141 - DNA, 15 bp, Homo sapiens
gtctcaggtagttct

SEQ ID NO: 1756142 - DNA, 15 bp, Homo sapiens
tctcaggtagttctt

SEQ ID NO: 1756143 - DNA, 15 bp, Homo sapiens
ctcaggtagttcttt

SEQ ID NO: 1756144 - DNA, 15 bp, Homo sapiens
tcaggtagttcttta

SEQ ID NO: 1756145 - DNA, 15 bp, Homo sapiens
caggtagttctttag

SEQ ID NO: 1756146 - DNA, 15 bp, Homo sapiens
aggtagttctttaga

SEQ ID NO: 1756147 - DNA, 15 bp, Homo sapiens
ggtagttctttagag

SEQ ID NO: 1756148 - DNA, 15 bp, Homo sapiens
gtagttctttagagc

SEQ ID NO: 1756149 - DNA, 15 bp, Homo sapiens
tagttctttagagca

SEQ ID NO: 1756150 - DNA, 15 bp, Homo sapiens
agttctttagagcag

SEQ ID NO: 1756151 - DNA, 15 bp, Homo sapiens
gttctttagagcagt

SEQ ID NO: 1756152 - DNA, 15 bp, Homo sapiens
ttctttagagcagtg

SEQ ID NO: 1756153 - DNA, 15 bp, Homo sapiens
tctttagagcagtgt

SEQ ID NO: 1756154 - DNA, 15 bp, Homo sapiens
ctttagagcagtgtg

SEQ ID NO: 1756155 - DNA, 15 bp, Homo sapiens
tttagagcagtgtga

SEQ ID NO: 1756156 - DNA, 15 bp, Homo sapiens
ttagagcagtgtgaa

SEQ ID NO: 1756157 - DNA, 15 bp, Homo sapiens
tagagcagtgtgaaa

SEQ ID NO: 1756158 - DNA, 15 bp, Homo sapiens
agagcagtgtgaaaa

SEQ ID NO: 1756159 - DNA, 15 bp, Homo sapiens
gagcagtgtgaaaac

SEQ ID NO: 1756160 - DNA, 15 bp, Homo sapiens
aaaacggactaatac

SEQ ID NO: 1756161 - DNA, 15 bp, Homo sapiens
aaacggactaataca

SEQ ID NO: 1756162 - DNA, 15 bp, Homo sapiens
aacggactaatacac

SEQ ID NO: 1756163 - DNA, 15 bp, Homo sapiens
acggactaatacacc

SEQ ID NO: 1756164 - DNA, 15 bp, Homo sapiens
cggactaatacacct

SEQ ID NO: 1756165 - DNA, 15 bp, Homo sapiens
ggactaatacacctt

SEQ ID NO: 1756166 - DNA, 15 bp, Homo sapiens
gactaatacaccttc

SEQ ID NO: 1756167 - DNA, 15 bp, Homo sapiens
actaatacaccttcc

SEQ ID NO: 1756168 - DNA, 15 bp, Homo sapiens
ctaatacaccttcca

SEQ ID NO: 1756169 - DNA, 15 bp, Homo sapiens
taatacaccttccat

SEQ ID NO: 1756170 - DNA, 15 bp, Homo sapiens
aatacaccttccatg

SEQ ID NO: 1756171 - DNA, 15 bp, Homo sapiens
atacaccttccatga

SEQ ID NO: 1756172 - DNA, 15 bp, Homo sapiens
tacaccttccatgaa

SEQ ID NO: 1756173 - DNA, 15 bp, Homo sapiens
acaccttccatgaac

SEQ ID NO: 1756174 - DNA, 15 bp, Homo sapiens
caccttccatgaact

SEQ ID NO: 1756175 - DNA, 15 bp, Homo sapiens
accttccatgaacta

SEQ ID NO: 1756176 - DNA, 15 bp, Homo sapiens
ccttccatgaactaa

SEQ ID NO: 1756177 - DNA, 15 bp, Homo sapiens
cttccatgaactaag

SEQ ID NO: 1756178 - DNA, 15 bp, Homo sapiens
ttccatgaactaaga

SEQ ID NO: 1756179 - DNA, 15 bp, Homo sapiens
tccatgaactaagac

SEQ ID NO: 1756180 - DNA, 15 bp, Homo sapiens
ccatgaactaagaca

SEQ ID NO: 1756181 - DNA, 15 bp, Homo sapiens
catgaactaagacaa

SEQ ID NO: 1756182 - DNA, 15 bp, Homo sapiens
atgaactaagacaaa

SEQ ID NO: 1756183 - DNA, 15 bp, Homo sapiens
tgaactaagacaaaa

SEQ ID NO: 1756184 - DNA, 15 bp, Homo sapiens
gaactaagacaaaac

SEQ ID NO: 1756185 - DNA, 15 bp, Homo sapiens
aactaagacaaaaca

SEQ ID NO: 1756186 - DNA, 15 bp, Homo sapiens
actaagacaaaacac

SEQ ID NO: 1756187 - DNA, 15 bp, Homo sapiens
ctaagacaaaacacc

SEQ ID NO: 1756188 - DNA, 15 bp, Homo sapiens
taagacaaaacaccc

SEQ ID NO: 1756189 - DNA, 15 bp, Homo sapiens
aagacaaaacaccca

SEQ ID NO: 1756190 - DNA, 15 bp, Homo sapiens
agacaaaacacccac

SEQ ID NO: 1756191 - DNA, 15 bp, Homo sapiens
gacaaaacacccact

SEQ ID NO: 1756192 - DNA, 15 bp, Homo sapiens
acaaaacacccactg

SEQ ID NO: 1756193 - DNA, 15 bp, Homo sapiens
caaaacacccactgg

SEQ ID NO: 1756194 - DNA, 15 bp, Homo sapiens
aaaacacccactggc

SEQ ID NO: 1756195 - DNA, 15 bp, Homo sapiens
aaacacccactggca

SEQ ID NO: 1756196 - DNA, 15 bp, Homo sapiens
aacacccactggcat

SEQ ID NO: 1756197 - DNA, 15 bp, Homo sapiens
acacccactggcatt

SEQ ID NO: 1756198 - DNA, 15 bp, Homo sapiens
cacccactggcattc

SEQ ID NO: 1756199 - DNA, 15 bp, Homo sapiens
acccactggcattca

SEQ ID NO: 1756200 - DNA, 15 bp, Homo sapiens
cccactggcattcaa

SEQ ID NO: 1756201 - DNA, 15 bp, Homo sapiens
ccactggcattcaag

SEQ ID NO: 1756202 - DNA, 15 bp, Homo sapiens
cactggcattcaaga

SEQ ID NO: 1756203 - DNA, 15 bp, Homo sapiens
actggcattcaagac

SEQ ID NO: 1756204 - DNA, 15 bp, Homo sapiens
ctggcattcaagacc

SEQ ID NO: 1756205 - DNA, 15 bp, Homo sapiens
tggcattcaagaccc

SEQ ID NO: 1756206 - DNA, 15 bp, Homo sapiens
ggcattcaagaccct

SEQ ID NO: 1756207 - DNA, 15 bp, Homo sapiens
gcattcaagaccctt

SEQ ID NO: 1756208 - DNA, 15 bp, Homo sapiens
cattcaagaccctta

SEQ ID NO: 1756209 - DNA, 15 bp, Homo sapiens
attcaagacccttat

SEQ ID NO: 1756210 - DNA, 15 bp, Homo sapiens
ttcaagacccttatt

SEQ ID NO: 1756211 - DNA, 15 bp, Homo sapiens
tcaagacccttattc

SEQ ID NO: 1756212 - DNA, 15 bp, Homo sapiens
caagacccttattca

SEQ ID NO: 1756213 - DNA, 15 bp, Homo sapiens
aagacccttattcaa

SEQ ID NO: 1756214 - DNA, 15 bp, Homo sapiens
agacccttattcaat

SEQ ID NO: 1756215 - DNA, 15 bp, Homo sapiens
gacccttattcaatg

SEQ ID NO: 1756216 - DNA, 15 bp, Homo sapiens
acccttattcaatgg

SEQ ID NO: 1756217 - DNA, 15 bp, Homo sapiens
cccttattcaatggc

SEQ ID NO: 1756218 - DNA, 15 bp, Homo sapiens
ccttattcaatggct

SEQ ID NO: 1756219 - DNA, 15 bp, Homo sapiens
cttattcaatggctg

SEQ ID NO: 1756220 - DNA, 15 bp, Homo sapiens
ttattcaatggctgg

SEQ ID NO: 1756221 - DNA, 15 bp, Homo sapiens
tattcaatggctgga

SEQ ID NO: 1756222 - DNA, 15 bp, Homo sapiens
attcaatggctggaa

SEQ ID NO: 1756223 - DNA, 15 bp, Homo sapiens
ttcaatggctggaat

SEQ ID NO: 1756224 - DNA, 15 bp, Homo sapiens
tcaatggctggaatc

SEQ ID NO: 1756225 - DNA, 15 bp, Homo sapiens
caatggctggaatct

SEQ ID NO: 1756226 - DNA, 15 bp, Homo sapiens
aatggctggaatctc

SEQ ID NO: 1756227 - DNA, 15 bp, Homo sapiens
atggctggaatctcc

SEQ ID NO: 1756228 - DNA, 15 bp, Homo sapiens
tggctggaatctcca

SEQ ID NO: 1756229 - DNA, 15 bp, Homo sapiens
ggctggaatctccaa

SEQ ID NO: 1756230 - DNA, 15 bp, Homo sapiens
gctggaatctccaaa

SEQ ID NO: 1756231 - DNA, 15 bp, Homo sapiens
ctggaatctccaaat

SEQ ID NO: 1756232 - DNA, 15 bp, Homo sapiens
tggaatctccaaatc

SEQ ID NO: 1756233 - DNA, 15 bp, Homo sapiens
ggaatctccaaatca

SEQ ID NO: 1756234 - DNA, 15 bp, Homo sapiens
gaatctccaaatcaa

SEQ ID NO: 1756235 - DNA, 15 bp, Homo sapiens
aatctccaaatcaat

SEQ ID NO: 1756236 - DNA, 15 bp, Homo sapiens
atctccaaatcaata

SEQ ID NO: 1756237 - DNA, 15 bp, Homo sapiens
tctccaaatcaataa

SEQ ID NO: 1756238 - DNA, 15 bp, Homo sapiens
ctccaaatcaataaa

SEQ ID NO: 1756239 - DNA, 15 bp, Homo sapiens
tccaaatcaataaac

SEQ ID NO: 1756240 - DNA, 15 bp, Homo sapiens
ccaaatcaataaact

SEQ ID NO: 1756241 - DNA, 15 bp, Homo sapiens
caaatcaataaactc

SEQ ID NO: 1756242 - DNA, 15 bp, Homo sapiens
aaatcaataaactca

SEQ ID NO: 1756243 - DNA, 15 bp, Homo sapiens
aatcaataaactcat

SEQ ID NO: 1756244 - DNA, 15 bp, Homo sapiens
atcaataaactcatc

SEQ ID NO: 1756245 - DNA, 15 bp, Homo sapiens
tcaataaactcatca

SEQ ID NO: 1756246 - DNA, 15 bp, Homo sapiens
caataaactcatcaa

SEQ ID NO: 1756247 - DNA, 15 bp, Homo sapiens
aataaactcatcaat

SEQ ID NO: 1756248 - DNA, 15 bp, Homo sapiens
ataaactcatcaatt

SEQ ID NO: 1756249 - DNA, 15 bp, Homo sapiens
taaactcatcaattg

SEQ ID NO: 1756250 - DNA, 15 bp, Homo sapiens
aaactcatcaattgg

SEQ ID NO: 1756251 - DNA, 15 bp, Homo sapiens
aactcatcaattgga

SEQ ID NO: 1756252 - DNA, 15 bp, Homo sapiens
actcatcaattggaa

SEQ ID NO: 1756253 - DNA, 15 bp, Homo sapiens
ctcatcaattggaaa

SEQ ID NO: 1756254 - DNA, 15 bp, Homo sapiens
tcatcaattggaaac

SEQ ID NO: 1756255 - DNA, 15 bp, Homo sapiens
catcaattggaaacc

SEQ ID NO: 1756256 - DNA, 15 bp, Homo sapiens
atcaattggaaacca

SEQ ID NO: 1756257 - DNA, 15 bp, Homo sapiens
tcaattggaaaccac

SEQ ID NO: 1756258 - DNA, 15 bp, Homo sapiens
caattggaaaccact

SEQ ID NO: 1756259 - DNA, 15 bp, Homo sapiens
aattggaaaccactt

SEQ ID NO: 1756260 - DNA, 15 bp, Homo sapiens
attggaaaccacttt

SEQ ID NO: 1756261 - DNA, 15 bp, Homo sapiens
ttggaaaccactttt

SEQ ID NO: 1756262 - DNA, 15 bp, Homo sapiens
tggaaaccacttttg

SEQ ID NO: 1756263 - DNA, 15 bp, Homo sapiens
ggaaaccacttttgg

SEQ ID NO: 1756264 - DNA, 15 bp, Homo sapiens
gaaaccacttttggc

SEQ ID NO: 1756265 - DNA, 15 bp, Homo sapiens
aaaccacttttggca

SEQ ID NO: 1756266 - DNA, 15 bp, Homo sapiens
aaccacttttggcat

SEQ ID NO: 1756267 - DNA, 15 bp, Homo sapiens
accacttttggcatt

SEQ ID NO: 1756268 - DNA, 15 bp, Homo sapiens
ccacttttggcattg

SEQ ID NO: 1756269 - DNA, 15 bp, Homo sapiens
cacttttggcattgc

SEQ ID NO: 1756270 - DNA, 15 bp, Homo sapiens
acttttggcattgct

SEQ ID NO: 1756271 - DNA, 15 bp, Homo sapiens
cttttggcattgctg

SEQ ID NO: 1756272 - DNA, 15 bp, Homo sapiens
ttttggcattgctga

SEQ ID NO: 1756273 - DNA, 15 bp, Homo sapiens
tttggcattgctgag

SEQ ID NO: 1756274 - DNA, 15 bp, Homo sapiens
ttggcattgctgaga

SEQ ID NO: 1756275 - DNA, 15 bp, Homo sapiens
tggcattgctgagag

SEQ ID NO: 1756276 - DNA, 15 bp, Homo sapiens
ggcattgctgagagt

SEQ ID NO: 1756277 - DNA, 15 bp, Homo sapiens
gcattgctgagagta

SEQ ID NO: 1756278 - DNA, 15 bp, Homo sapiens
cattgctgagagtat

SEQ ID NO: 1756279 - DNA, 15 bp, Homo sapiens
attgctgagagtata

SEQ ID NO: 1756280 - DNA, 15 bp, Homo sapiens
ttgctgagagtataa

SEQ ID NO: 1756281 - DNA, 15 bp, Homo sapiens
tgctgagagtataaa

SEQ ID NO: 1756282 - DNA, 15 bp, Homo sapiens
gctgagagtataaaa

SEQ ID NO: 1756283 - DNA, 15 bp, Homo sapiens
ctgagagtataaaag

SEQ ID NO: 1756284 - DNA, 15 bp, Homo sapiens
tgagagtataaaaga

SEQ ID NO: 1756285 - DNA, 15 bp, Homo sapiens
gagagtataaaagaa

SEQ ID NO: 1756286 - DNA, 15 bp, Homo sapiens
agagtataaaagaaa

SEQ ID NO: 1756287 - DNA, 15 bp, Homo sapiens
gagtataaaagaaac

SEQ ID NO: 1756288 - DNA, 15 bp, Homo sapiens
agtataaaagaaact

SEQ ID NO: 1756289 - DNA, 15 bp, Homo sapiens
gtataaaagaaacta

SEQ ID NO: 1756290 - DNA, 15 bp, Homo sapiens
tataaaagaaactaa

SEQ ID NO: 1756291 - DNA, 15 bp, Homo sapiens
ataaaagaaactaaa

SEQ ID NO: 1756292 - DNA, 15 bp, Homo sapiens
taaaagaaactaaaa

SEQ ID NO: 1756293 - DNA, 15 bp, Homo sapiens
aaaagaaactaaaat

SEQ ID NO: 1756294 - DNA, 15 bp, Homo sapiens
aaagaaactaaaatg

SEQ ID NO: 1756295 - DNA, 15 bp, Homo sapiens
aagaaactaaaatgc

SEQ ID NO: 1756296 - DNA, 15 bp, Homo sapiens
agaaactaaaatgcc

SEQ ID NO: 1756297 - DNA, 15 bp, Homo sapiens
gaaactaaaatgcct

SEQ ID NO: 1756298 - DNA, 15 bp, Homo sapiens
aaactaaaatgccta

SEQ ID NO: 1756299 - DNA, 15 bp, Homo sapiens
aactaaaatgcctag

SEQ ID NO: 1756300 - DNA, 15 bp, Homo sapiens
actaaaatgcctagg

SEQ ID NO: 1756301 - DNA, 15 bp, Homo sapiens
ctaaaatgcctaggg

SEQ ID NO: 1756302 - DNA, 15 bp, Homo sapiens
taaaatgcctagggc

SEQ ID NO: 1756303 - DNA, 15 bp, Homo sapiens
aaaatgcctagggct

SEQ ID NO: 1756304 - DNA, 15 bp, Homo sapiens
aaatgcctagggctg

SEQ ID NO: 1756305 - DNA, 15 bp, Homo sapiens
aatgcctagggctgc

SEQ ID NO: 1756306 - DNA, 15 bp, Homo sapiens
atgcctagggctgct

SEQ ID NO: 1756307 - DNA, 15 bp, Homo sapiens
tgcctagggctgctt

SEQ ID NO: 1756308 - DNA, 15 bp, Homo sapiens
gcctagggctgcttt

SEQ ID NO: 1756309 - DNA, 15 bp, Homo sapiens
cctagggctgctttc

SEQ ID NO: 1756310 - DNA, 15 bp, Homo sapiens
ctagggctgctttct

SEQ ID NO: 1756311 - DNA, 15 bp, Homo sapiens
tagggctgctttctt

SEQ ID NO: 1756312 - DNA, 15 bp, Homo sapiens
agggctgctttcttt

SEQ ID NO: 1756313 - DNA, 15 bp, Homo sapiens
gggctgctttctttt

SEQ ID NO: 1756314 - DNA, 15 bp, Homo sapiens
gctgctttcttttct

SEQ ID NO: 1756315 - DNA, 15 bp, Homo sapiens
ctgctttcttttctt

SEQ ID NO: 1756316 - DNA, 15 bp, Homo sapiens
tgctttcttttcttt

SEQ ID NO: 1756317 - DNA, 15 bp, Homo sapiens
gctttcttttctttt

SEQ ID NO: 1756318 - DNA, 15 bp, Homo sapiens
ctttcttttcttttc

SEQ ID NO: 1756319 - DNA, 15 bp, Homo sapiens
ttcttttcttttcct

SEQ ID NO: 1756320 - DNA, 15 bp, Homo sapiens
tcttttcttttcctt

SEQ ID NO: 1756321 - DNA, 15 bp, Homo sapiens
cttttcttttccttt

SEQ ID NO: 1756322 - DNA, 15 bp, Homo sapiens
ttttcttttcctttt

SEQ ID NO: 1756323 - DNA, 15 bp, Homo sapiens
tttttagacagtgtt

SEQ ID NO: 1756324 - DNA, 15 bp, Homo sapiens
ttttagacagtgttt

SEQ ID NO: 1756325 - DNA, 15 bp, Homo sapiens
tttagacagtgtttt

SEQ ID NO: 1756326 - DNA, 15 bp, Homo sapiens
ttagacagtgttttg

SEQ ID NO: 1756327 - DNA, 15 bp, Homo sapiens
tagacagtgttttgc

SEQ ID NO: 1756328 - DNA, 15 bp, Homo sapiens
agacagtgttttgct

SEQ ID NO: 1756329 - DNA, 15 bp, Homo sapiens
gacagtgttttgctc

SEQ ID NO: 1756330 - DNA, 15 bp, Homo sapiens
acagtgttttgctct

SEQ ID NO: 1756331 - DNA, 15 bp, Homo sapiens
cagtgttttgctctt

SEQ ID NO: 1756332 - DNA, 15 bp, Homo sapiens
agtgttttgctcttg

SEQ ID NO: 1756333 - DNA, 15 bp, Homo sapiens
gtgttttgctcttgc

SEQ ID NO: 1756334 - DNA, 15 bp, Homo sapiens
tgttttgctcttgct

SEQ ID NO: 1756335 - DNA, 15 bp, Homo sapiens
gttttgctcttgctg

SEQ ID NO: 1756336 - DNA, 15 bp, Homo sapiens
ttttgctcttgctgc

SEQ ID NO: 1756337 - DNA, 15 bp, Homo sapiens
tttgctcttgctgcc

SEQ ID NO: 1756338 - DNA, 15 bp, Homo sapiens
ttgctcttgctgccc

SEQ ID NO: 1756339 - DNA, 15 bp, Homo sapiens
tgctcttgctgccca

SEQ ID NO: 1756340 - DNA, 15 bp, Homo sapiens
gctcttgctgcccag

SEQ ID NO: 1756341 - DNA, 15 bp, Homo sapiens
ctcactgcaacctcc

SEQ ID NO: 1756342 - DNA, 15 bp, Homo sapiens
caacctccacctcca

SEQ ID NO: 1756343 - DNA, 15 bp, Homo sapiens
aacctccacctccag

SEQ ID NO: 1756344 - DNA, 15 bp, Homo sapiens
acctccacctccagg

SEQ ID NO: 1756345 - DNA, 15 bp, Homo sapiens
cctccacctccaggg

SEQ ID NO: 1756346 - DNA, 15 bp, Homo sapiens
ctccacctccagggt

SEQ ID NO: 1756347 - DNA, 15 bp, Homo sapiens
tccacctccagggtt

SEQ ID NO: 1756348 - DNA, 15 bp, Homo sapiens
ccacctccagggttc

SEQ ID NO: 1756349 - DNA, 15 bp, Homo sapiens
cacctccagggttca

SEQ ID NO: 1756350 - DNA, 15 bp, Homo sapiens
acctccagggttcaa

SEQ ID NO: 1756351 - DNA, 15 bp, Homo sapiens
cctccagggttcaag

SEQ ID NO: 1756352 - DNA, 15 bp, Homo sapiens
ctccagggttcaagc

SEQ ID NO: 1756353 - DNA, 15 bp, Homo sapiens
tccagggttcaagcg

SEQ ID NO: 1756354 - DNA, 15 bp, Homo sapiens
ccagggttcaagcga

SEQ ID NO: 1756355 - DNA, 15 bp, Homo sapiens
cagggttcaagcgat

SEQ ID NO: 1756356 - DNA, 15 bp, Homo sapiens
agggttcaagcgatt

SEQ ID NO: 1756357 - DNA, 15 bp, Homo sapiens
caagcgattctccca

SEQ ID NO: 1756358 - DNA, 15 bp, Homo sapiens
aagcgattctcccac

SEQ ID NO: 1756359 - DNA, 15 bp, Homo sapiens
agcgattctcccaca

SEQ ID NO: 1756360 - DNA, 15 bp, Homo sapiens
gcgattctcccacat

SEQ ID NO: 1756361 - DNA, 15 bp, Homo sapiens
cgattctcccacatc

SEQ ID NO: 1756362 - DNA, 15 bp, Homo sapiens
gattctcccacatca

SEQ ID NO: 1756363 - DNA, 15 bp, Homo sapiens
attctcccacatcag

SEQ ID NO: 1756364 - DNA, 15 bp, Homo sapiens
ttctcccacatcagc

SEQ ID NO: 1756365 - DNA, 15 bp, Homo sapiens
tctcccacatcagcc

SEQ ID NO: 1756366 - DNA, 15 bp, Homo sapiens
ctcccacatcagcct

SEQ ID NO: 1756367 - DNA, 15 bp, Homo sapiens
tcccacatcagcctc

SEQ ID NO: 1756368 - DNA, 15 bp, Homo sapiens
cccacatcagcctcc

SEQ ID NO: 1756369 - DNA, 15 bp, Homo sapiens
ccacatcagcctccc

SEQ ID NO: 1756370 - DNA, 15 bp, Homo sapiens
cacatcagcctccca

SEQ ID NO: 1756371 - DNA, 15 bp, Homo sapiens
acatcagcctcccaa

SEQ ID NO: 1756372 - DNA, 15 bp, Homo sapiens
catcagcctcccaag

SEQ ID NO: 1756373 - DNA, 15 bp, Homo sapiens
atcagcctcccaagt

SEQ ID NO: 1756374 - DNA, 15 bp, Homo sapiens
gggattacaggcacg

SEQ ID NO: 1756375 - DNA, 15 bp, Homo sapiens
ggattacaggcacgt

SEQ ID NO: 1756376 - DNA, 15 bp, Homo sapiens
gattacaggcacgtg

SEQ ID NO: 1756377 - DNA, 15 bp, Homo sapiens
attacaggcacgtgc

SEQ ID NO: 1756378 - DNA, 15 bp, Homo sapiens
ttacaggcacgtgcc

SEQ ID NO: 1756379 - DNA, 15 bp, Homo sapiens
tacaggcacgtgcca

SEQ ID NO: 1756380 - DNA, 15 bp, Homo sapiens
acaggcacgtgccac

SEQ ID NO: 1756381 - DNA, 15 bp, Homo sapiens
caggcacgtgccacc

SEQ ID NO: 1756382 - DNA, 15 bp, Homo sapiens
aggcacgtgccacca

SEQ ID NO: 1756383 - DNA, 15 bp, Homo sapiens
ggcacgtgccaccac

SEQ ID NO: 1756384 - DNA, 15 bp, Homo sapiens
gcacgtgccaccacg

SEQ ID NO: 1756385 - DNA, 15 bp, Homo sapiens
cacgtgccaccacgc

SEQ ID NO: 1756386 - DNA, 15 bp, Homo sapiens
acgtgccaccacgcc

SEQ ID NO: 1756387 - DNA, 15 bp, Homo sapiens
cgtgccaccacgccc

SEQ ID NO: 1756388 - DNA, 15 bp, Homo sapiens
atacaacagttttat

SEQ ID NO: 1756389 - DNA, 15 bp, Homo sapiens
tacaacagttttatt

SEQ ID NO: 1756390 - DNA, 15 bp, Homo sapiens
acaacagttttattc

SEQ ID NO: 1756391 - DNA, 15 bp, Homo sapiens
caacagttttattct

SEQ ID NO: 1756392 - DNA, 15 bp, Homo sapiens
aacagttttattctc

SEQ ID NO: 1756393 - DNA, 15 bp, Homo sapiens
acagttttattctct

SEQ ID NO: 1756394 - DNA, 15 bp, Homo sapiens
cagttttattctctt

SEQ ID NO: 1756395 - DNA, 15 bp, Homo sapiens
agttttattctcttt

SEQ ID NO: 1756396 - DNA, 15 bp, Homo sapiens
gttttattctctttt

SEQ ID NO: 1756397 - DNA, 15 bp, Homo sapiens
ttttattctcttttc

SEQ ID NO: 1756398 - DNA, 15 bp, Homo sapiens
tttattctcttttca

SEQ ID NO: 1756399 - DNA, 15 bp, Homo sapiens
ttattctcttttcaa

SEQ ID NO: 1756400 - DNA, 15 bp, Homo sapiens
tattctcttttcaag

SEQ ID NO: 1756401 - DNA, 15 bp, Homo sapiens
attctcttttcaagc

SEQ ID NO: 1756402 - DNA, 15 bp, Homo sapiens
ttctcttttcaagcc

SEQ ID NO: 1756403 - DNA, 15 bp, Homo sapiens
tctcttttcaagcct

SEQ ID NO: 1756404 - DNA, 15 bp, Homo sapiens
ctcttttcaagcctc

SEQ ID NO: 1756405 - DNA, 15 bp, Homo sapiens
tcttttcaagcctct

SEQ ID NO: 1756406 - DNA, 15 bp, Homo sapiens
cttttcaagcctctc

SEQ ID NO: 1756407 - DNA, 15 bp, Homo sapiens
ttttcaagcctctca

SEQ ID NO: 1756408 - DNA, 15 bp, Homo sapiens
tttcaagcctctcaa

SEQ ID NO: 1756409 - DNA, 15 bp, Homo sapiens
ttcaagcctctcaac

SEQ ID NO: 1756410 - DNA, 15 bp, Homo sapiens
tcaagcctctcaacc

SEQ ID NO: 1756411 - DNA, 15 bp, Homo sapiens
caagcctctcaacct

SEQ ID NO: 1756412 - DNA, 15 bp, Homo sapiens
aagcctctcaacctc

SEQ ID NO: 1756413 - DNA, 15 bp, Homo sapiens
agcctctcaacctcc

SEQ ID NO: 1756414 - DNA, 15 bp, Homo sapiens
gcctctcaacctcca

SEQ ID NO: 1756415 - DNA, 15 bp, Homo sapiens
cctctcaacctccag

SEQ ID NO: 1756416 - DNA, 15 bp, Homo sapiens
ctctcaacctccagc

SEQ ID NO: 1756417 - DNA, 15 bp, Homo sapiens
tctcaacctccagct

SEQ ID NO: 1756418 - DNA, 15 bp, Homo sapiens
ctcaacctccagctc

SEQ ID NO: 1756419 - DNA, 15 bp, Homo sapiens
tcaacctccagctct

SEQ ID NO: 1756420 - DNA, 15 bp, Homo sapiens
caacctccagctctg

SEQ ID NO: 1756421 - DNA, 15 bp, Homo sapiens
aacctccagctctga

SEQ ID NO: 1756422 - DNA, 15 bp, Homo sapiens
acctccagctctgat

SEQ ID NO: 1756423 - DNA, 15 bp, Homo sapiens
cctccagctctgata

SEQ ID NO: 1756424 - DNA, 15 bp, Homo sapiens
ctccagctctgatat

SEQ ID NO: 1756425 - DNA, 15 bp, Homo sapiens
tccagctctgatata

SEQ ID NO: 1756426 - DNA, 15 bp, Homo sapiens
ccagctctgatatat

SEQ ID NO: 1756427 - DNA, 15 bp, Homo sapiens
cagctctgatatatg

SEQ ID NO: 1756428 - DNA, 15 bp, Homo sapiens
agctctgatatatgc

SEQ ID NO: 1756429 - DNA, 15 bp, Homo sapiens
gctctgatatatgcc

SEQ ID NO: 1756430 - DNA, 15 bp, Homo sapiens
ctctgatatatgcca

SEQ ID NO: 1756431 - DNA, 15 bp, Homo sapiens
tctgatatatgccat

SEQ ID NO: 1756432 - DNA, 15 bp, Homo sapiens
ctgatatatgccatt

SEQ ID NO: 1756433 - DNA, 15 bp, Homo sapiens
tgatatatgccattg

SEQ ID NO: 1756434 - DNA, 15 bp, Homo sapiens
gatatatgccattga

SEQ ID NO: 1756435 - DNA, 15 bp, Homo sapiens
atatatgccattgat

SEQ ID NO: 1756436 - DNA, 15 bp, Homo sapiens
tatatgccattgatg

SEQ ID NO: 1756437 - DNA, 15 bp, Homo sapiens
atatgccattgatga

SEQ ID NO: 1756438 - DNA, 15 bp, Homo sapiens
tatgccattgatgac

SEQ ID NO: 1756439 - DNA, 15 bp, Homo sapiens
atgccattgatgaca

SEQ ID NO: 1756440 - DNA, 15 bp, Homo sapiens
tgccattgatgacac

SEQ ID NO: 1756441 - DNA, 15 bp, Homo sapiens
gccattgatgacacc

SEQ ID NO: 1756442 - DNA, 15 bp, Homo sapiens
ccattgatgacacct

SEQ ID NO: 1756443 - DNA, 15 bp, Homo sapiens
cattgatgacaccta

SEQ ID NO: 1756444 - DNA, 15 bp, Homo sapiens
attgatgacacctat

SEQ ID NO: 1756445 - DNA, 15 bp, Homo sapiens
ttgatgacacctatt

SEQ ID NO: 1756446 - DNA, 15 bp, Homo sapiens
tgatgacacctattg

SEQ ID NO: 1756447 - DNA, 15 bp, Homo sapiens
gatgacacctattgc

SEQ ID NO: 1756448 - DNA, 15 bp, Homo sapiens
atgacacctattgca

SEQ ID NO: 1756449 - DNA, 15 bp, Homo sapiens
tgacacctattgcac

SEQ ID NO: 1756450 - DNA, 15 bp, Homo sapiens
gacacctattgcacc

SEQ ID NO: 1756451 - DNA, 15 bp, Homo sapiens
acacctattgcacct

SEQ ID NO: 1756452 - DNA, 15 bp, Homo sapiens
cacctattgcacctg

SEQ ID NO: 1756453 - DNA, 15 bp, Homo sapiens
acctattgcacctga

SEQ ID NO: 1756454 - DNA, 15 bp, Homo sapiens
cctattgcacctgac

SEQ ID NO: 1756455 - DNA, 15 bp, Homo sapiens
ctattgcacctgaca

SEQ ID NO: 1756456 - DNA, 15 bp, Homo sapiens
tattgcacctgacac

SEQ ID NO: 1756457 - DNA, 15 bp, Homo sapiens
attgcacctgacacg

SEQ ID NO: 1756458 - DNA, 15 bp, Homo sapiens
ttgcacctgacacgt

SEQ ID NO: 1756459 - DNA, 15 bp, Homo sapiens
tgcacctgacacgtg

SEQ ID NO: 1756460 - DNA, 15 bp, Homo sapiens
gcacctgacacgtga

SEQ ID NO: 1756461 - DNA, 15 bp, Homo sapiens
cacctgacacgtgag

SEQ ID NO: 1756462 - DNA, 15 bp, Homo sapiens
acctgacacgtgagg

SEQ ID NO: 1756463 - DNA, 15 bp, Homo sapiens
cctgacacgtgaggc

SEQ ID NO: 1756464 - DNA, 15 bp, Homo sapiens
ctgacacgtgaggca

SEQ ID NO: 1756465 - DNA, 15 bp, Homo sapiens
tgacacgtgaggcat

SEQ ID NO: 1756466 - DNA, 15 bp, Homo sapiens
gacacgtgaggcatc

SEQ ID NO: 1756467 - DNA, 15 bp, Homo sapiens
acacgtgaggcatca

SEQ ID NO: 1756468 - DNA, 15 bp, Homo sapiens
cacgtgaggcatcaa

SEQ ID NO: 1756469 - DNA, 15 bp, Homo sapiens
acgtgaggcatcaat

SEQ ID NO: 1756470 - DNA, 15 bp, Homo sapiens
cgtgaggcatcaatg

SEQ ID NO: 1756471 - DNA, 15 bp, Homo sapiens
gtgaggcatcaatgt

SEQ ID NO: 1756472 - DNA, 15 bp, Homo sapiens
tgaggcatcaatgtg

SEQ ID NO: 1756473 - DNA, 15 bp, Homo sapiens
gaggcatcaatgtgg

SEQ ID NO: 1756474 - DNA, 15 bp, Homo sapiens
aggcatcaatgtgga

SEQ ID NO: 1756475 - DNA, 15 bp, Homo sapiens
ggcatcaatgtggac

SEQ ID NO: 1756476 - DNA, 15 bp, Homo sapiens
gcatcaatgtggact

SEQ ID NO: 1756477 - DNA, 15 bp, Homo sapiens
catcaatgtggactg

SEQ ID NO: 1756478 - DNA, 15 bp, Homo sapiens
atcaatgtggactgg

SEQ ID NO: 1756479 - DNA, 15 bp, Homo sapiens
tcaatgtggactgga

SEQ ID NO: 1756480 - DNA, 15 bp, Homo sapiens
caatgtggactggac

SEQ ID NO: 1756481 - DNA, 15 bp, Homo sapiens
aatgtggactggact

SEQ ID NO: 1756482 - DNA, 15 bp, Homo sapiens
atgtggactggactc

SEQ ID NO: 1756483 - DNA, 15 bp, Homo sapiens
tgtggactggactct

SEQ ID NO: 1756484 - DNA, 15 bp, Homo sapiens
gtggactggactctg

SEQ ID NO: 1756485 - DNA, 15 bp, Homo sapiens
tggactggactctgt

SEQ ID NO: 1756486 - DNA, 15 bp, Homo sapiens
ggactggactctgtc

SEQ ID NO: 1756487 - DNA, 15 bp, Homo sapiens
gactggactctgtcc

SEQ ID NO: 1756488 - DNA, 15 bp, Homo sapiens
actggactctgtcct

SEQ ID NO: 1756489 - DNA, 15 bp, Homo sapiens
ctggactctgtcctt

SEQ ID NO: 1756490 - DNA, 15 bp, Homo sapiens
tggactctgtccttg

SEQ ID NO: 1756491 - DNA, 15 bp, Homo sapiens
ggactctgtccttgc

SEQ ID NO: 1756492 - DNA, 15 bp, Homo sapiens
gactctgtccttgcg

SEQ ID NO: 1756493 - DNA, 15 bp, Homo sapiens
actctgtccttgcgg

SEQ ID NO: 1756494 - DNA, 15 bp, Homo sapiens
ctctgtccttgcggg

SEQ ID NO: 1756495 - DNA, 15 bp, Homo sapiens
tctgtccttgcgggc

SEQ ID NO: 1756496 - DNA, 15 bp, Homo sapiens
ctgtccttgcgggca

SEQ ID NO: 1756497 - DNA, 15 bp, Homo sapiens
tgtccttgcgggcag

SEQ ID NO: 1756498 - DNA, 15 bp, Homo sapiens
gtccttgcgggcaga

SEQ ID NO: 1756499 - DNA, 15 bp, Homo sapiens
tccttgcgggcagag

SEQ ID NO: 1756500 - DNA, 15 bp, Homo sapiens
ccttgcgggcagagg

SEQ ID NO: 1756501 - DNA, 15 bp, Homo sapiens
cttgcgggcagaggg

SEQ ID NO: 1756502 - DNA, 15 bp, Homo sapiens
ttgcgggcagagggc

SEQ ID NO: 1756503 - DNA, 15 bp, Homo sapiens
tgcgggcagagggcc

SEQ ID NO: 1756504 - DNA, 15 bp, Homo sapiens
gcgggcagagggcct

SEQ ID NO: 1756505 - DNA, 15 bp, Homo sapiens
cgggcagagggcctg

SEQ ID NO: 1756506 - DNA, 15 bp, Homo sapiens
gggcagagggcctgc

SEQ ID NO: 1756507 - DNA, 15 bp, Homo sapiens
ggcagagggcctgca

SEQ ID NO: 1756508 - DNA, 15 bp, Homo sapiens
gcagagggcctgcaa

SEQ ID NO: 1756509 - DNA, 15 bp, Homo sapiens
cagagggcctgcaag

SEQ ID NO: 1756510 - DNA, 15 bp, Homo sapiens
agagggcctgcaagt

SEQ ID NO: 1756511 - DNA, 15 bp, Homo sapiens
gagggcctgcaagtt

SEQ ID NO: 1756512 - DNA, 15 bp, Homo sapiens
agggcctgcaagttg

SEQ ID NO: 1756513 - DNA, 15 bp, Homo sapiens
gggcctgcaagttgg

SEQ ID NO: 1756514 - DNA, 15 bp, Homo sapiens
ggcctgcaagttggg

SEQ ID NO: 1756515 - DNA, 15 bp, Homo sapiens
gcctgcaagttgggc

SEQ ID NO: 1756516 - DNA, 15 bp, Homo sapiens
cctgcaagttgggcc

SEQ ID NO: 1756517 - DNA, 15 bp, Homo sapiens
ctgcaagttgggccc

SEQ ID NO: 1756518 - DNA, 15 bp, Homo sapiens
tgcaagttgggccca

SEQ ID NO: 1756519 - DNA, 15 bp, Homo sapiens
gcaagttgggcccac

SEQ ID NO: 1756520 - DNA, 15 bp, Homo sapiens
caagttgggcccacc

SEQ ID NO: 1756521 - DNA, 15 bp, Homo sapiens
aagttgggcccaccc

SEQ ID NO: 1756522 - DNA, 15 bp, Homo sapiens
agttgggcccaccct

SEQ ID NO: 1756523 - DNA, 15 bp, Homo sapiens
gttgggcccaccctt

SEQ ID NO: 1756524 - DNA, 15 bp, Homo sapiens
ttgggcccacccttt

SEQ ID NO: 1756525 - DNA, 15 bp, Homo sapiens
tgggcccaccctttt

SEQ ID NO: 1756526 - DNA, 15 bp, Homo sapiens
gggcccaccctttta

SEQ ID NO: 1756527 - DNA, 15 bp, Homo sapiens
ggcccacccttttat

SEQ ID NO: 1756528 - DNA, 15 bp, Homo sapiens
gcccacccttttatt

SEQ ID NO: 1756529 - DNA, 15 bp, Homo sapiens
cccacccttttattt

SEQ ID NO: 1756530 - DNA, 15 bp, Homo sapiens
ccacccttttatttc

SEQ ID NO: 1756531 - DNA, 15 bp, Homo sapiens
cacccttttatttcc

SEQ ID NO: 1756532 - DNA, 15 bp, Homo sapiens
acccttttatttcca

SEQ ID NO: 1756533 - DNA, 15 bp, Homo sapiens
cccttttatttccac

SEQ ID NO: 1756534 - DNA, 15 bp, Homo sapiens
ccttttatttccacc

SEQ ID NO: 1756535 - DNA, 15 bp, Homo sapiens
cttttatttccaccc

SEQ ID NO: 1756536 - DNA, 15 bp, Homo sapiens
ttttatttccacccg

SEQ ID NO: 1756537 - DNA, 15 bp, Homo sapiens
tttatttccacccgg

SEQ ID NO: 1756538 - DNA, 15 bp, Homo sapiens
ttatttccacccggg

SEQ ID NO: 1756539 - DNA, 15 bp, Homo sapiens
tatttccacccgggg

SEQ ID NO: 1756540 - DNA, 15 bp, Homo sapiens
atttccacccgggga

SEQ ID NO: 1756541 - DNA, 15 bp, Homo sapiens
tttccacccggggaa

SEQ ID NO: 1756542 - DNA, 15 bp, Homo sapiens
ttccacccggggaat

SEQ ID NO: 1756543 - DNA, 15 bp, Homo sapiens
tccacccggggaatt

SEQ ID NO: 1756544 - DNA, 15 bp, Homo sapiens
ccacccggggaattt

SEQ ID NO: 1756545 - DNA, 15 bp, Homo sapiens
cacccggggaatttc

SEQ ID NO: 1756546 - DNA, 15 bp, Homo sapiens
acccggggaatttcc

SEQ ID NO: 1756547 - DNA, 15 bp, Homo sapiens
cccggggaatttcct

SEQ ID NO: 1756548 - DNA, 15 bp, Homo sapiens
ccggggaatttcctg

SEQ ID NO: 1756549 - DNA, 15 bp, Homo sapiens
cggggaatttcctgg

SEQ ID NO: 1756550 - DNA, 15 bp, Homo sapiens
ggggaatttcctggc

SEQ ID NO: 1756551 - DNA, 15 bp, Homo sapiens
gggaatttcctggct

SEQ ID NO: 1756552 - DNA, 15 bp, Homo sapiens
ggaatttcctggctg

SEQ ID NO: 1756553 - DNA, 15 bp, Homo sapiens
gaatttcctggctgt

SEQ ID NO: 1756554 - DNA, 15 bp, Homo sapiens
aatttcctggctgtc

SEQ ID NO: 1756555 - DNA, 15 bp, Homo sapiens
atttcctggctgtcc

SEQ ID NO: 1756556 - DNA, 15 bp, Homo sapiens
tttcctggctgtccc

SEQ ID NO: 1756557 - DNA, 15 bp, Homo sapiens
ttcctggctgtccct

SEQ ID NO: 1756558 - DNA, 15 bp, Homo sapiens
tcctggctgtccctg

SEQ ID NO: 1756559 - DNA, 15 bp, Homo sapiens
cctggctgtccctgc

SEQ ID NO: 1756560 - DNA, 15 bp, Homo sapiens
ctggctgtccctgcc

SEQ ID NO: 1756561 - DNA, 15 bp, Homo sapiens
tggctgtccctgcct

SEQ ID NO: 1756562 - DNA, 15 bp, Homo sapiens
ggctgtccctgcctg

SEQ ID NO: 1756563 - DNA, 15 bp, Homo sapiens
gctgtccctgcctgc

SEQ ID NO: 1756564 - DNA, 15 bp, Homo sapiens
ctgtccctgcctgct

SEQ ID NO: 1756565 - DNA, 15 bp, Homo sapiens
tgtccctgcctgctc

SEQ ID NO: 1756566 - DNA, 15 bp, Homo sapiens
gtccctgcctgctcc

SEQ ID NO: 1756567 - DNA, 15 bp, Homo sapiens
tccctgcctgctcct

SEQ ID NO: 1756568 - DNA, 15 bp, Homo sapiens
ccctgcctgctcctc

SEQ ID NO: 1756569 - DNA, 15 bp, Homo sapiens
cctgcctgctcctct

SEQ ID NO: 1756570 - DNA, 15 bp, Homo sapiens
ctgcctgctcctctc

SEQ ID NO: 1756571 - DNA, 15 bp, Homo sapiens
tgcctgctcctctcc

SEQ ID NO: 1756572 - DNA, 15 bp, Homo sapiens
gcctgctcctctccc

SEQ ID NO: 1756573 - DNA, 15 bp, Homo sapiens
cctgctcctctcccc

SEQ ID NO: 1756574 - DNA, 15 bp, Homo sapiens
ctgctcctctcccct

SEQ ID NO: 1756575 - DNA, 15 bp, Homo sapiens
tgctcctctcccctt

SEQ ID NO: 1756576 - DNA, 15 bp, Homo sapiens
gctcctctccccttg

SEQ ID NO: 1756577 - DNA, 15 bp, Homo sapiens
ctcctctccccttga

SEQ ID NO: 1756578 - DNA, 15 bp, Homo sapiens
tcctctccccttgaa

SEQ ID NO: 1756579 - DNA, 15 bp, Homo sapiens
cctctccccttgaac

SEQ ID NO: 1756580 - DNA, 15 bp, Homo sapiens
ctctccccttgaacc

SEQ ID NO: 1756581 - DNA, 15 bp, Homo sapiens
tctccccttgaaccc

SEQ ID NO: 1756582 - DNA, 15 bp, Homo sapiens
ctccccttgaaccca

SEQ ID NO: 1756583 - DNA, 15 bp, Homo sapiens
tccccttgaacccag

SEQ ID NO: 1756584 - DNA, 15 bp, Homo sapiens
ccccttgaacccagg

SEQ ID NO: 1756585 - DNA, 15 bp, Homo sapiens
cccttgaacccaggc

SEQ ID NO: 1756586 - DNA, 15 bp, Homo sapiens
ccttgaacccaggcg

SEQ ID NO: 1756587 - DNA, 15 bp, Homo sapiens
cttgaacccaggcgt

SEQ ID NO: 1756588 - DNA, 15 bp, Homo sapiens
ttgaacccaggcgtg

SEQ ID NO: 1756589 - DNA, 15 bp, Homo sapiens
tgaacccaggcgtgc

SEQ ID NO: 1756590 - DNA, 15 bp, Homo sapiens
gaacccaggcgtgcc

SEQ ID NO: 1756591 - DNA, 15 bp, Homo sapiens
aacccaggcgtgcct

SEQ ID NO: 1756592 - DNA, 15 bp, Homo sapiens
acccaggcgtgcctc

SEQ ID NO: 1756593 - DNA, 15 bp, Homo sapiens
cccaggcgtgcctct

SEQ ID NO: 1756594 - DNA, 15 bp, Homo sapiens
ccaggcgtgcctcta

SEQ ID NO: 1756595 - DNA, 15 bp, Homo sapiens
caggcgtgcctctac

SEQ ID NO: 1756596 - DNA, 15 bp, Homo sapiens
aggcgtgcctctacc

SEQ ID NO: 1756597 - DNA, 15 bp, Homo sapiens
ggcgtgcctctacct

SEQ ID NO: 1756598 - DNA, 15 bp, Homo sapiens
gcgtgcctctacctg

SEQ ID NO: 1756599 - DNA, 15 bp, Homo sapiens
cgtgcctctacctgg

SEQ ID NO: 1756600 - DNA, 15 bp, Homo sapiens
gtgcctctacctggt

SEQ ID NO: 1756601 - DNA, 15 bp, Homo sapiens
tgcctctacctggta

SEQ ID NO: 1756602 - DNA, 15 bp, Homo sapiens
gcctctacctggtag

SEQ ID NO: 1756603 - DNA, 15 bp, Homo sapiens
cctctacctggtagt

SEQ ID NO: 1756604 - DNA, 15 bp, Homo sapiens
ctctacctggtagtt

SEQ ID NO: 1756605 - DNA, 15 bp, Homo sapiens
tctacctggtagttg

SEQ ID NO: 1756606 - DNA, 15 bp, Homo sapiens
ctacctggtagttga

SEQ ID NO: 1756607 - DNA, 15 bp, Homo sapiens
tacctggtagttgag

SEQ ID NO: 1756608 - DNA, 15 bp, Homo sapiens
acctggtagttgagg

SEQ ID NO: 1756609 - DNA, 15 bp, Homo sapiens
cctggtagttgaggt

SEQ ID NO: 1756610 - DNA, 15 bp, Homo sapiens
ctggtagttgaggtc

SEQ ID NO: 1756611 - DNA, 15 bp, Homo sapiens
tggtagttgaggtct

SEQ ID NO: 1756612 - DNA, 15 bp, Homo sapiens
ggtagttgaggtctc

SEQ ID NO: 1756613 - DNA, 15 bp, Homo sapiens
gtagttgaggtctct

SEQ ID NO: 1756614 - DNA, 15 bp, Homo sapiens
tagttgaggtctctg

SEQ ID NO: 1756615 - DNA, 15 bp, Homo sapiens
agttgaggtctctga

SEQ ID NO: 1756616 - DNA, 15 bp, Homo sapiens
gttgaggtctctgac

SEQ ID NO: 1756617 - DNA, 15 bp, Homo sapiens
ttgaggtctctgacc

SEQ ID NO: 1756618 - DNA, 15 bp, Homo sapiens
tgaggtctctgacct

SEQ ID NO: 1756619 - DNA, 15 bp, Homo sapiens
gaggtctctgacctc

SEQ ID NO: 1756620 - DNA, 15 bp, Homo sapiens
aggtctctgacctcc

SEQ ID NO: 1756621 - DNA, 15 bp, Homo sapiens
ggtctctgacctcca

SEQ ID NO: 1756622 - DNA, 15 bp, Homo sapiens
gtctctgacctccag

SEQ ID NO: 1756623 - DNA, 15 bp, Homo sapiens
tctctgacctccagg

SEQ ID NO: 1756624 - DNA, 15 bp, Homo sapiens
ctctgacctccaggg

SEQ ID NO: 1756625 - DNA, 15 bp, Homo sapiens
tctgacctccagggt

SEQ ID NO: 1756626 - DNA, 15 bp, Homo sapiens
ctgacctccagggtg

SEQ ID NO: 1756627 - DNA, 15 bp, Homo sapiens
tgacctccagggtgt

SEQ ID NO: 1756628 - DNA, 15 bp, Homo sapiens
gacctccagggtgtt

SEQ ID NO: 1756629 - DNA, 15 bp, Homo sapiens
acctccagggtgttg

SEQ ID NO: 1756630 - DNA, 15 bp, Homo sapiens
cctccagggtgttgg

SEQ ID NO: 1756631 - DNA, 15 bp, Homo sapiens
ctccagggtgttggg

SEQ ID NO: 1756632 - DNA, 15 bp, Homo sapiens
tccagggtgttgggc

SEQ ID NO: 1756633 - DNA, 15 bp, Homo sapiens
ccagggtgttgggct

SEQ ID NO: 1756634 - DNA, 15 bp, Homo sapiens
cagggtgttgggctg

SEQ ID NO: 1756635 - DNA, 15 bp, Homo sapiens
agggtgttgggctgg

SEQ ID NO: 1756636 - DNA, 15 bp, Homo sapiens
gggtgttgggctggc

SEQ ID NO: 1756637 - DNA, 15 bp, Homo sapiens
ggtgttgggctggcc

SEQ ID NO: 1756638 - DNA, 15 bp, Homo sapiens
gtgttgggctggcca

SEQ ID NO: 1756639 - DNA, 15 bp, Homo sapiens
tgttgggctggccac

SEQ ID NO: 1756640 - DNA, 15 bp, Homo sapiens
gttgggctggccact

SEQ ID NO: 1756641 - DNA, 15 bp, Homo sapiens
ttgggctggccactg

SEQ ID NO: 1756642 - DNA, 15 bp, Homo sapiens
tgggctggccactgt

SEQ ID NO: 1756643 - DNA, 15 bp, Homo sapiens
gggctggccactgta

SEQ ID NO: 1756644 - DNA, 15 bp, Homo sapiens
ggctggccactgtag

SEQ ID NO: 1756645 - DNA, 15 bp, Homo sapiens
gctggccactgtagg

SEQ ID NO: 1756646 - DNA, 15 bp, Homo sapiens
ctggccactgtaggt

SEQ ID NO: 1756647 - DNA, 15 bp, Homo sapiens
tggccactgtaggtg

SEQ ID NO: 1756648 - DNA, 15 bp, Homo sapiens
ggccactgtaggtga

SEQ ID NO: 1756649 - DNA, 15 bp, Homo sapiens
gccactgtaggtgaa

SEQ ID NO: 1756650 - DNA, 15 bp, Homo sapiens
ccactgtaggtgaag

SEQ ID NO: 1756651 - DNA, 15 bp, Homo sapiens
cactgtaggtgaagt

SEQ ID NO: 1756652 - DNA, 15 bp, Homo sapiens
actgtaggtgaagta

SEQ ID NO: 1756653 - DNA, 15 bp, Homo sapiens
ctgtaggtgaagtac

SEQ ID NO: 1756654 - DNA, 15 bp, Homo sapiens
tgtaggtgaagtaca

SEQ ID NO: 1756655 - DNA, 15 bp, Homo sapiens
gtaggtgaagtacag

SEQ ID NO: 1756656 - DNA, 15 bp, Homo sapiens
taggtgaagtacagg

SEQ ID NO: 1756657 - DNA, 15 bp, Homo sapiens
aggtgaagtacaggc

SEQ ID NO: 1756658 - DNA, 15 bp, Homo sapiens
ggtgaagtacaggct

SEQ ID NO: 1756659 - DNA, 15 bp, Homo sapiens
gtgaagtacaggctg

SEQ ID NO: 1756660 - DNA, 15 bp, Homo sapiens
tgaagtacaggctgt

SEQ ID NO: 1756661 - DNA, 15 bp, Homo sapiens
gaagtacaggctgtt

SEQ ID NO: 1756662 - DNA, 15 bp, Homo sapiens
aagtacaggctgttg

SEQ ID NO: 1756663 - DNA, 15 bp, Homo sapiens
agtacaggctgttgt

SEQ ID NO: 1756664 - DNA, 15 bp, Homo sapiens
gtacaggctgttgtc

SEQ ID NO: 1756665 - DNA, 15 bp, Homo sapiens
tacaggctgttgtca

SEQ ID NO: 1756666 - DNA, 15 bp, Homo sapiens
acaggctgttgtcac

SEQ ID NO: 1756667 - DNA, 15 bp, Homo sapiens
caggctgttgtcact

SEQ ID NO: 1756668 - DNA, 15 bp, Homo sapiens
aggctgttgtcactt

SEQ ID NO: 1756669 - DNA, 15 bp, Homo sapiens
ggctgttgtcacttt

SEQ ID NO: 1756670 - DNA, 15 bp, Homo sapiens
gctgttgtcactttc

SEQ ID NO: 1756671 - DNA, 15 bp, Homo sapiens
ctgttgtcactttca

SEQ ID NO: 1756672 - DNA, 15 bp, Homo sapiens
tgttgtcactttcag

SEQ ID NO: 1756673 - DNA, 15 bp, Homo sapiens
gttgtcactttcaga

SEQ ID NO: 1756674 - DNA, 15 bp, Homo sapiens
ttgtcactttcagag

SEQ ID NO: 1756675 - DNA, 15 bp, Homo sapiens
tgtcactttcagagg

SEQ ID NO: 1756676 - DNA, 15 bp, Homo sapiens
gtcactttcagagga

SEQ ID NO: 1756677 - DNA, 15 bp, Homo sapiens
tcactttcagaggag

SEQ ID NO: 1756678 - DNA, 15 bp, Homo sapiens
cactttcagaggaga

SEQ ID NO: 1756679 - DNA, 15 bp, Homo sapiens
actttcagaggagaa

SEQ ID NO: 1756680 - DNA, 15 bp, Homo sapiens
ctttcagaggagaac

SEQ ID NO: 1756681 - DNA, 15 bp, Homo sapiens
tttcagaggagaaca

SEQ ID NO: 1756682 - DNA, 15 bp, Homo sapiens
ttcagaggagaacaa

SEQ ID NO: 1756683 - DNA, 15 bp, Homo sapiens
tcagaggagaacaat

SEQ ID NO: 1756684 - DNA, 15 bp, Homo sapiens
cagaggagaacaatc

SEQ ID NO: 1756685 - DNA, 15 bp, Homo sapiens
agaggagaacaatct

SEQ ID NO: 1756686 - DNA, 15 bp, Homo sapiens
gaggagaacaatcta

SEQ ID NO: 1756687 - DNA, 15 bp, Homo sapiens
aggagaacaatctat

SEQ ID NO: 1756688 - DNA, 15 bp, Homo sapiens
ggagaacaatctatc

SEQ ID NO: 1756689 - DNA, 15 bp, Homo sapiens
gagaacaatctatcc

SEQ ID NO: 1756690 - DNA, 15 bp, Homo sapiens
agaacaatctatcct

SEQ ID NO: 1756691 - DNA, 15 bp, Homo sapiens
gaacaatctatcctg

SEQ ID NO: 1756692 - DNA, 15 bp, Homo sapiens
aacaatctatcctgg

SEQ ID NO: 1756693 - DNA, 15 bp, Homo sapiens
acaatctatcctgga

SEQ ID NO: 1756694 - DNA, 15 bp, Homo sapiens
caatctatcctggag

SEQ ID NO: 1756695 - DNA, 15 bp, Homo sapiens
aatctatcctggagg

SEQ ID NO: 1756696 - DNA, 15 bp, Homo sapiens
atctatcctggaggc

SEQ ID NO: 1756697 - DNA, 15 bp, Homo sapiens
tctatcctggaggcc

SEQ ID NO: 1756698 - DNA, 15 bp, Homo sapiens
ctatcctggaggccc

SEQ ID NO: 1756699 - DNA, 15 bp, Homo sapiens
tatcctggaggccct

SEQ ID NO: 1756700 - DNA, 15 bp, Homo sapiens
atcctggaggccctg

SEQ ID NO: 1756701 - DNA, 15 bp, Homo sapiens
tcctggaggccctgt

SEQ ID NO: 1756702 - DNA, 15 bp, Homo sapiens
cctggaggccctgtg

SEQ ID NO: 1756703 - DNA, 15 bp, Homo sapiens
ctggaggccctgtgg

SEQ ID NO: 1756704 - DNA, 15 bp, Homo sapiens
tggaggccctgtggg

SEQ ID NO: 1756705 - DNA, 15 bp, Homo sapiens
ggaggccctgtggga

SEQ ID NO: 1756706 - DNA, 15 bp, Homo sapiens
gaggccctgtgggag

SEQ ID NO: 1756707 - DNA, 15 bp, Homo sapiens
aggccctgtgggaga

SEQ ID NO: 1756708 - DNA, 15 bp, Homo sapiens
ggccctgtgggagac

SEQ ID NO: 1756709 - DNA, 15 bp, Homo sapiens
gccctgtgggagaca

SEQ ID NO: 1756710 - DNA, 15 bp, Homo sapiens
ccctgtgggagacag

SEQ ID NO: 1756711 - DNA, 15 bp, Homo sapiens
cctgtgggagacagg

SEQ ID NO: 1756712 - DNA, 15 bp, Homo sapiens
ctgtgggagacagga

SEQ ID NO: 1756713 - DNA, 15 bp, Homo sapiens
tgtgggagacaggag

SEQ ID NO: 1756714 - DNA, 15 bp, Homo sapiens
gtgggagacaggaga

SEQ ID NO: 1756715 - DNA, 15 bp, Homo sapiens
tgggagacaggagag

SEQ ID NO: 1756716 - DNA, 15 bp, Homo sapiens
gggagacaggagaga

SEQ ID NO: 1756717 - DNA, 15 bp, Homo sapiens
ggagacaggagagat

SEQ ID NO: 1756718 - DNA, 15 bp, Homo sapiens
gagacaggagagatg

SEQ ID NO: 1756719 - DNA, 15 bp, Homo sapiens
agacaggagagatga

SEQ ID NO: 1756720 - DNA, 15 bp, Homo sapiens
gacaggagagatgag

SEQ ID NO: 1756721 - DNA, 15 bp, Homo sapiens
acaggagagatgagg

SEQ ID NO: 1756722 - DNA, 15 bp, Homo sapiens
caggagagatgaggg

SEQ ID NO: 1756723 - DNA, 15 bp, Homo sapiens
aggagagatgagggg

SEQ ID NO: 1756724 - DNA, 15 bp, Homo sapiens
ggagagatgaggggc

SEQ ID NO: 1756725 - DNA, 15 bp, Homo sapiens
gagagatgaggggct

SEQ ID NO: 1756726 - DNA, 15 bp, Homo sapiens
agagatgaggggctc

SEQ ID NO: 1756727 - DNA, 15 bp, Homo sapiens
gagatgaggggctcc

SEQ ID NO: 1756728 - DNA, 15 bp, Homo sapiens
agatgaggggctcct

SEQ ID NO: 1756729 - DNA, 15 bp, Homo sapiens
gatgaggggctcctt

SEQ ID NO: 1756730 - DNA, 15 bp, Homo sapiens
atgaggggctccttt

SEQ ID NO: 1756731 - DNA, 15 bp, Homo sapiens
tgaggggctccttta

SEQ ID NO: 1756732 - DNA, 15 bp, Homo sapiens
gaggggctcctttag

SEQ ID NO: 1756733 - DNA, 15 bp, Homo sapiens
aggggctcctttaga

SEQ ID NO: 1756734 - DNA, 15 bp, Homo sapiens
ggggctcctttagaa

SEQ ID NO: 1756735 - DNA, 15 bp, Homo sapiens
gggctcctttagaag

SEQ ID NO: 1756736 - DNA, 15 bp, Homo sapiens
ggctcctttagaagc

SEQ ID NO: 1756737 - DNA, 15 bp, Homo sapiens
gctcctttagaagct

SEQ ID NO: 1756738 - DNA, 15 bp, Homo sapiens
ctcctttagaagctg

SEQ ID NO: 1756739 - DNA, 15 bp, Homo sapiens
tcctttagaagctgc

SEQ ID NO: 1756740 - DNA, 15 bp, Homo sapiens
cctttagaagctgct

SEQ ID NO: 1756741 - DNA, 15 bp, Homo sapiens
ctttagaagctgctg

SEQ ID NO: 1756742 - DNA, 15 bp, Homo sapiens
tttagaagctgctga

SEQ ID NO: 1756743 - DNA, 15 bp, Homo sapiens
ttagaagctgctgag

SEQ ID NO: 1756744 - DNA, 15 bp, Homo sapiens
tagaagctgctgaga

SEQ ID NO: 1756745 - DNA, 15 bp, Homo sapiens
agaagctgctgagaa

SEQ ID NO: 1756746 - DNA, 15 bp, Homo sapiens
gaagctgctgagaac

SEQ ID NO: 1756747 - DNA, 15 bp, Homo sapiens
aagctgctgagaaca

SEQ ID NO: 1756748 - DNA, 15 bp, Homo sapiens
agctgctgagaacat

SEQ ID NO: 1756749 - DNA, 15 bp, Homo sapiens
gctgctgagaacata

SEQ ID NO: 1756750 - DNA, 15 bp, Homo sapiens
ctgctgagaacatag

SEQ ID NO: 1756751 - DNA, 15 bp, Homo sapiens
tgctgagaacatagg

SEQ ID NO: 1756752 - DNA, 15 bp, Homo sapiens
gctgagaacatagga

SEQ ID NO: 1756753 - DNA, 15 bp, Homo sapiens
ctgagaacataggag

SEQ ID NO: 1756754 - DNA, 15 bp, Homo sapiens
tgagaacataggaga

SEQ ID NO: 1756755 - DNA, 15 bp, Homo sapiens
gagaacataggagaa

SEQ ID NO: 1756756 - DNA, 15 bp, Homo sapiens
agaacataggagaag

SEQ ID NO: 1756757 - DNA, 15 bp, Homo sapiens
gaacataggagaaga

SEQ ID NO: 1756758 - DNA, 15 bp, Homo sapiens
aacataggagaagac

SEQ ID NO: 1756759 - DNA, 15 bp, Homo sapiens
acataggagaagaca

SEQ ID NO: 1756760 - DNA, 15 bp, Homo sapiens
cataggagaagacaa

SEQ ID NO: 1756761 - DNA, 15 bp, Homo sapiens
ataggagaagacaag

SEQ ID NO: 1756762 - DNA, 15 bp, Homo sapiens
taggagaagacaaga

SEQ ID NO: 1756763 - DNA, 15 bp, Homo sapiens
aggagaagacaagaa

SEQ ID NO: 1756764 - DNA, 15 bp, Homo sapiens
ggagaagacaagaag

SEQ ID NO: 1756765 - DNA, 15 bp, Homo sapiens
gagaagacaagaagg

SEQ ID NO: 1756766 - DNA, 15 bp, Homo sapiens
agaagacaagaagga

SEQ ID NO: 1756767 - DNA, 15 bp, Homo sapiens
gaagacaagaaggaa

SEQ ID NO: 1756768 - DNA, 15 bp, Homo sapiens
aagacaagaaggaaa

SEQ ID NO: 1756769 - DNA, 15 bp, Homo sapiens
agacaagaaggaaac

SEQ ID NO: 1756770 - DNA, 15 bp, Homo sapiens
gacaagaaggaaacc

SEQ ID NO: 1756771 - DNA, 15 bp, Homo sapiens
acaagaaggaaacca

SEQ ID NO: 1756772 - DNA, 15 bp, Homo sapiens
caagaaggaaaccaa

SEQ ID NO: 1756773 - DNA, 15 bp, Homo sapiens
aagaaggaaaccaac

SEQ ID NO: 1756774 - DNA, 15 bp, Homo sapiens
agaaggaaaccaaca

SEQ ID NO: 1756775 - DNA, 15 bp, Homo sapiens
gaaggaaaccaacag

SEQ ID NO: 1756776 - DNA, 15 bp, Homo sapiens
aaggaaaccaacagg

SEQ ID NO: 1756777 - DNA, 15 bp, Homo sapiens
aggaaaccaacaggt

SEQ ID NO: 1756778 - DNA, 15 bp, Homo sapiens
ggaaaccaacaggtg

SEQ ID NO: 1756779 - DNA, 15 bp, Homo sapiens
gaaaccaacaggtga

SEQ ID NO: 1756780 - DNA, 15 bp, Homo sapiens
aaaccaacaggtgag

SEQ ID NO: 1756781 - DNA, 15 bp, Homo sapiens
aaccaacaggtgaga

SEQ ID NO: 1756782 - DNA, 15 bp, Homo sapiens
accaacaggtgagag

SEQ ID NO: 1756783 - DNA, 15 bp, Homo sapiens
ccaacaggtgagagc

SEQ ID NO: 1756784 - DNA, 15 bp, Homo sapiens
caacaggtgagagca

SEQ ID NO: 1756785 - DNA, 15 bp, Homo sapiens
aacaggtgagagcaa

SEQ ID NO: 1756786 - DNA, 15 bp, Homo sapiens
acaggtgagagcaac

SEQ ID NO: 1756787 - DNA, 15 bp, Homo sapiens
caggtgagagcaact

SEQ ID NO: 1756788 - DNA, 15 bp, Homo sapiens
aggtgagagcaactt

SEQ ID NO: 1756789 - DNA, 15 bp, Homo sapiens
ggtgagagcaacttc

SEQ ID NO: 1756790 - DNA, 15 bp, Homo sapiens
gtgagagcaacttct

SEQ ID NO: 1756791 - DNA, 15 bp, Homo sapiens
tgagagcaacttctt

SEQ ID NO: 1756792 - DNA, 15 bp, Homo sapiens
gagagcaacttctta

SEQ ID NO: 1756793 - DNA, 15 bp, Homo sapiens
agagcaacttcttag

SEQ ID NO: 1756794 - DNA, 15 bp, Homo sapiens
gagcaacttcttaga

SEQ ID NO: 1756795 - DNA, 15 bp, Homo sapiens
agcaacttcttagag

SEQ ID NO: 1756796 - DNA, 15 bp, Homo sapiens
gcaacttcttagagc

SEQ ID NO: 1756797 - DNA, 15 bp, Homo sapiens
caacttcttagagcc

SEQ ID NO: 1756798 - DNA, 15 bp, Homo sapiens
aacttcttagagccg

SEQ ID NO: 1756799 - DNA, 15 bp, Homo sapiens
acttcttagagccga

SEQ ID NO: 1756800 - DNA, 15 bp, Homo sapiens
cttcttagagccgac

SEQ ID NO: 1756801 - DNA, 15 bp, Homo sapiens
ttcttagagccgacg

SEQ ID NO: 1756802 - DNA, 15 bp, Homo sapiens
tcttagagccgacgt

SEQ ID NO: 1756803 - DNA, 15 bp, Homo sapiens
cttagagccgacgtg

SEQ ID NO: 1756804 - DNA, 15 bp, Homo sapiens
ttagagccgacgtgg

SEQ ID NO: 1756805 - DNA, 15 bp, Homo sapiens
tagagccgacgtggt

SEQ ID NO: 1756806 - DNA, 15 bp, Homo sapiens
agagccgacgtggtt

SEQ ID NO: 1756807 - DNA, 15 bp, Homo sapiens
gagccgacgtggtta

SEQ ID NO: 1756808 - DNA, 15 bp, Homo sapiens
agccgacgtggttaa

SEQ ID NO: 1756809 - DNA, 15 bp, Homo sapiens
gccgacgtggttaaa

SEQ ID NO: 1756810 - DNA, 15 bp, Homo sapiens
ccgacgtggttaaat

SEQ ID NO: 1756811 - DNA, 15 bp, Homo sapiens
cgacgtggttaaatc

SEQ ID NO: 1756812 - DNA, 15 bp, Homo sapiens
gacgtggttaaatct

SEQ ID NO: 1756813 - DNA, 15 bp, Homo sapiens
acgtggttaaatctc

SEQ ID NO: 1756814 - DNA, 15 bp, Homo sapiens
cgtggttaaatctca

SEQ ID NO: 1756815 - DNA, 15 bp, Homo sapiens
gtggttaaatctcaa

SEQ ID NO: 1756816 - DNA, 15 bp, Homo sapiens
tggttaaatctcaaa

SEQ ID NO: 1756817 - DNA, 15 bp, Homo sapiens
ggttaaatctcaaat

SEQ ID NO: 1756818 - DNA, 15 bp, Homo sapiens
gttaaatctcaaatt

SEQ ID NO: 1756819 - DNA, 15 bp, Homo sapiens
ttaaatctcaaattg

SEQ ID NO: 1756820 - DNA, 15 bp, Homo sapiens
taaatctcaaattgg

SEQ ID NO: 1756821 - DNA, 15 bp, Homo sapiens
aaatctcaaattggc

SEQ ID NO: 1756822 - DNA, 15 bp, Homo sapiens
aatctcaaattggca

SEQ ID NO: 1756823 - DNA, 15 bp, Homo sapiens
atctcaaattggcaa

SEQ ID NO: 1756824 - DNA, 15 bp, Homo sapiens
tctcaaattggcaac

SEQ ID NO: 1756825 - DNA, 15 bp, Homo sapiens
ctcaaattggcaaca

SEQ ID NO: 1756826 - DNA, 15 bp, Homo sapiens
tcaaattggcaacag

SEQ ID NO: 1756827 - DNA, 15 bp, Homo sapiens
caaattggcaacaga

SEQ ID NO: 1756828 - DNA, 15 bp, Homo sapiens
aaattggcaacagat

SEQ ID NO: 1756829 - DNA, 15 bp, Homo sapiens
aattggcaacagatg

SEQ ID NO: 1756830 - DNA, 15 bp, Homo sapiens
attggcaacagatgg

SEQ ID NO: 1756831 - DNA, 15 bp, Homo sapiens
ttggcaacagatggg

SEQ ID NO: 1756832 - DNA, 15 bp, Homo sapiens
tggcaacagatggga

SEQ ID NO: 1756833 - DNA, 15 bp, Homo sapiens
ggcaacagatgggat

SEQ ID NO: 1756834 - DNA, 15 bp, Homo sapiens
gcaacagatgggatt

SEQ ID NO: 1756835 - DNA, 15 bp, Homo sapiens
caacagatgggattg

SEQ ID NO: 1756836 - DNA, 15 bp, Homo sapiens
aacagatgggattgc

SEQ ID NO: 1756837 - DNA, 15 bp, Homo sapiens
acagatgggattgca

SEQ ID NO: 1756838 - DNA, 15 bp, Homo sapiens
cagatgggattgcac

SEQ ID NO: 1756839 - DNA, 15 bp, Homo sapiens
agatgggattgcaca

SEQ ID NO: 1756840 - DNA, 15 bp, Homo sapiens
gatgggattgcacag

SEQ ID NO: 1756841 - DNA, 15 bp, Homo sapiens
atgggattgcacagg

SEQ ID NO: 1756842 - DNA, 15 bp, Homo sapiens
tgggattgcacaggt

SEQ ID NO: 1756843 - DNA, 15 bp, Homo sapiens
gggattgcacaggtg

SEQ ID NO: 1756844 - DNA, 15 bp, Homo sapiens
ggattgcacaggtgg

SEQ ID NO: 1756845 - DNA, 15 bp, Homo sapiens
gattgcacaggtgga

SEQ ID NO: 1756846 - DNA, 15 bp, Homo sapiens
attgcacaggtggaa

SEQ ID NO: 1756847 - DNA, 15 bp, Homo sapiens
ttgcacaggtggaac

SEQ ID NO: 1756848 - DNA, 15 bp, Homo sapiens
tgcacaggtggaacc

SEQ ID NO: 1756849 - DNA, 15 bp, Homo sapiens
gcacaggtggaacct

SEQ ID NO: 1756850 - DNA, 15 bp, Homo sapiens
cacaggtggaacctc

SEQ ID NO: 1756851 - DNA, 15 bp, Homo sapiens
acaggtggaacctca

SEQ ID NO: 1756852 - DNA, 15 bp, Homo sapiens
caggtggaacctcag

SEQ ID NO: 1756853 - DNA, 15 bp, Homo sapiens
aggtggaacctcagg

SEQ ID NO: 1756854 - DNA, 15 bp, Homo sapiens
ggtggaacctcaggg

SEQ ID NO: 1756855 - DNA, 15 bp, Homo sapiens
gtggaacctcagggc

SEQ ID NO: 1756856 - DNA, 15 bp, Homo sapiens
tggaacctcagggct

SEQ ID NO: 1756857 - DNA, 15 bp, Homo sapiens
ggaacctcagggctt

SEQ ID NO: 1756858 - DNA, 15 bp, Homo sapiens
gaacctcagggcttt

SEQ ID NO: 1756859 - DNA, 15 bp, Homo sapiens
aacctcagggctttg

SEQ ID NO: 1756860 - DNA, 15 bp, Homo sapiens
acctcagggctttgg

SEQ ID NO: 1756861 - DNA, 15 bp, Homo sapiens
cctcagggctttggg

SEQ ID NO: 1756862 - DNA, 15 bp, Homo sapiens
ctcagggctttggga

SEQ ID NO: 1756863 - DNA, 15 bp, Homo sapiens
tcagggctttgggaa

SEQ ID NO: 1756864 - DNA, 15 bp, Homo sapiens
cagggctttgggaaa

SEQ ID NO: 1756865 - DNA, 15 bp, Homo sapiens
agggctttgggaaaa

SEQ ID NO: 1756866 - DNA, 15 bp, Homo sapiens
gggctttgggaaaat

SEQ ID NO: 1756867 - DNA, 15 bp, Homo sapiens
ggctttgggaaaata

SEQ ID NO: 1756868 - DNA, 15 bp, Homo sapiens
gctttgggaaaatag

SEQ ID NO: 1756869 - DNA, 15 bp, Homo sapiens
ctttgggaaaatagg

SEQ ID NO: 1756870 - DNA, 15 bp, Homo sapiens
tttgggaaaatagga

SEQ ID NO: 1756871 - DNA, 15 bp, Homo sapiens
ttgggaaaataggag

SEQ ID NO: 1756872 - DNA, 15 bp, Homo sapiens
tgggaaaataggagt

SEQ ID NO: 1756873 - DNA, 15 bp, Homo sapiens
gggaaaataggagtg

SEQ ID NO: 1756874 - DNA, 15 bp, Homo sapiens
ggaaaataggagtgc

SEQ ID NO: 1756875 - DNA, 15 bp, Homo sapiens
gaaaataggagtgct

SEQ ID NO: 1756876 - DNA, 15 bp, Homo sapiens
aaaataggagtgctg

SEQ ID NO: 1756877 - DNA, 15 bp, Homo sapiens
aaataggagtgctga

SEQ ID NO: 1756878 - DNA, 15 bp, Homo sapiens
aataggagtgctgac

SEQ ID NO: 1756879 - DNA, 15 bp, Homo sapiens
ataggagtgctgaca

SEQ ID NO: 1756880 - DNA, 15 bp, Homo sapiens
taggagtgctgacaa

SEQ ID NO: 1756881 - DNA, 15 bp, Homo sapiens
aggagtgctgacaag

SEQ ID NO: 1756882 - DNA, 15 bp, Homo sapiens
ggagtgctgacaagg

SEQ ID NO: 1756883 - DNA, 15 bp, Homo sapiens
gagtgctgacaaggg

SEQ ID NO: 1756884 - DNA, 15 bp, Homo sapiens
agtgctgacaagggc

SEQ ID NO: 1756885 - DNA, 15 bp, Homo sapiens
gtgctgacaagggcc

SEQ ID NO: 1756886 - DNA, 15 bp, Homo sapiens
tgctgacaagggccc

SEQ ID NO: 1756887 - DNA, 15 bp, Homo sapiens
gctgacaagggccca

SEQ ID NO: 1756888 - DNA, 15 bp, Homo sapiens
ctgacaagggcccat

SEQ ID NO: 1756889 - DNA, 15 bp, Homo sapiens
tgacaagggcccatc

SEQ ID NO: 1756890 - DNA, 15 bp, Homo sapiens
gacaagggcccatct

SEQ ID NO: 1756891 - DNA, 15 bp, Homo sapiens
acaagggcccatctc

SEQ ID NO: 1756892 - DNA, 15 bp, Homo sapiens
caagggcccatctcc

SEQ ID NO: 1756893 - DNA, 15 bp, Homo sapiens
aagggcccatctcct

SEQ ID NO: 1756894 - DNA, 15 bp, Homo sapiens
agggcccatctcctc

SEQ ID NO: 1756895 - DNA, 15 bp, Homo sapiens
gggcccatctcctct

SEQ ID NO: 1756896 - DNA, 15 bp, Homo sapiens
ggcccatctcctctt

SEQ ID NO: 1756897 - DNA, 15 bp, Homo sapiens
gcccatctcctcttc

SEQ ID NO: 1756898 - DNA, 15 bp, Homo sapiens
cccatctcctcttcc

SEQ ID NO: 1756899 - DNA, 15 bp, Homo sapiens
ccatctcctcttccc

SEQ ID NO: 1756900 - DNA, 15 bp, Homo sapiens
catctcctcttccct

SEQ ID NO: 1756901 - DNA, 15 bp, Homo sapiens
atctcctcttccctt

SEQ ID NO: 1756902 - DNA, 15 bp, Homo sapiens
tctcctcttcccttc

SEQ ID NO: 1756903 - DNA, 15 bp, Homo sapiens
ctcctcttcccttca

SEQ ID NO: 1756904 - DNA, 15 bp, Homo sapiens
tcctcttcccttcag

SEQ ID NO: 1756905 - DNA, 15 bp, Homo sapiens
cctcttcccttcaga

SEQ ID NO: 1756906 - DNA, 15 bp, Homo sapiens
ctcttcccttcagag

SEQ ID NO: 1756907 - DNA, 15 bp, Homo sapiens
tcttcccttcagaga

SEQ ID NO: 1756908 - DNA, 15 bp, Homo sapiens
cttcccttcagagag

SEQ ID NO: 1756909 - DNA, 15 bp, Homo sapiens
ttcccttcagagaga

SEQ ID NO: 1756910 - DNA, 15 bp, Homo sapiens
tcccttcagagagag

SEQ ID NO: 1756911 - DNA, 15 bp, Homo sapiens
cccttcagagagagg

SEQ ID NO: 1756912 - DNA, 15 bp, Homo sapiens
ccttcagagagaggt

SEQ ID NO: 1756913 - DNA, 15 bp, Homo sapiens
cttcagagagaggtt

SEQ ID NO: 1756914 - DNA, 15 bp, Homo sapiens
ttcagagagaggttt

SEQ ID NO: 1756915 - DNA, 15 bp, Homo sapiens
tcagagagaggtttg

SEQ ID NO: 1756916 - DNA, 15 bp, Homo sapiens
cagagagaggtttgg

SEQ ID NO: 1756917 - DNA, 15 bp, Homo sapiens
agagagaggtttggg

SEQ ID NO: 1756918 - DNA, 15 bp, Homo sapiens
gagagaggtttgggg

SEQ ID NO: 1756919 - DNA, 15 bp, Homo sapiens
agagaggtttggggc

SEQ ID NO: 1756920 - DNA, 15 bp, Homo sapiens
gagaggtttggggct

SEQ ID NO: 1756921 - DNA, 15 bp, Homo sapiens
agaggtttggggctt

SEQ ID NO: 1756922 - DNA, 15 bp, Homo sapiens
gaggtttggggcttc

SEQ ID NO: 1756923 - DNA, 15 bp, Homo sapiens
aggtttggggcttct

SEQ ID NO: 1756924 - DNA, 15 bp, Homo sapiens
ggtttggggcttctc

SEQ ID NO: 1756925 - DNA, 15 bp, Homo sapiens
gtttggggcttctcc

SEQ ID NO: 1756926 - DNA, 15 bp, Homo sapiens
tttggggcttctccc

SEQ ID NO: 1756927 - DNA, 15 bp, Homo sapiens
ttggggcttctcccg

SEQ ID NO: 1756928 - DNA, 15 bp, Homo sapiens
tggggcttctcccgg

SEQ ID NO: 1756929 - DNA, 15 bp, Homo sapiens
ggggcttctcccggg

SEQ ID NO: 1756930 - DNA, 15 bp, Homo sapiens
gggcttctcccgggg

SEQ ID NO: 1756931 - DNA, 15 bp, Homo sapiens
ggcttctcccggggc

SEQ ID NO: 1756932 - DNA, 15 bp, Homo sapiens
gcttctcccggggca

SEQ ID NO: 1756933 - DNA, 15 bp, Homo sapiens
cttctcccggggcac

SEQ ID NO: 1756934 - DNA, 15 bp, Homo sapiens
ttctcccggggcacc

SEQ ID NO: 1756935 - DNA, 15 bp, Homo sapiens
tctcccggggcacct

SEQ ID NO: 1756936 - DNA, 15 bp, Homo sapiens
ctcccggggcacctt

SEQ ID NO: 1756937 - DNA, 15 bp, Homo sapiens
tcccggggcaccttc

SEQ ID NO: 1756938 - DNA, 15 bp, Homo sapiens
cccggggcaccttcc

SEQ ID NO: 1756939 - DNA, 15 bp, Homo sapiens
ccggggcaccttccc

SEQ ID NO: 1756940 - DNA, 15 bp, Homo sapiens
cggggcaccttccca

SEQ ID NO: 1756941 - DNA, 15 bp, Homo sapiens
ggggcaccttcccag

SEQ ID NO: 1756942 - DNA, 15 bp, Homo sapiens
gggcaccttcccaga

SEQ ID NO: 1756943 - DNA, 15 bp, Homo sapiens
ggcaccttcccagag

SEQ ID NO: 1756944 - DNA, 15 bp, Homo sapiens
gcaccttcccagaga

SEQ ID NO: 1756945 - DNA, 15 bp, Homo sapiens
caccttcccagagaa

SEQ ID NO: 1756946 - DNA, 15 bp, Homo sapiens
accttcccagagaac

SEQ ID NO: 1756947 - DNA, 15 bp, Homo sapiens
ccttcccagagaacc

SEQ ID NO: 1756948 - DNA, 15 bp, Homo sapiens
cttcccagagaacct

SEQ ID NO: 1756949 - DNA, 15 bp, Homo sapiens
ttcccagagaacctc

SEQ ID NO: 1756950 - DNA, 15 bp, Homo sapiens
tcccagagaacctca

SEQ ID NO: 1756951 - DNA, 15 bp, Homo sapiens
cccagagaacctcaa

SEQ ID NO: 1756952 - DNA, 15 bp, Homo sapiens
ccagagaacctcaac

SEQ ID NO: 1756953 - DNA, 15 bp, Homo sapiens
cagagaacctcaacc

SEQ ID NO: 1756954 - DNA, 15 bp, Homo sapiens
agagaacctcaacct

SEQ ID NO: 1756955 - DNA, 15 bp, Homo sapiens
gagaacctcaacctc

SEQ ID NO: 1756956 - DNA, 15 bp, Homo sapiens
agaacctcaacctca

SEQ ID NO: 1756957 - DNA, 15 bp, Homo sapiens
gaacctcaacctcag

SEQ ID NO: 1756958 - DNA, 15 bp, Homo sapiens
aacctcaacctcagg

SEQ ID NO: 1756959 - DNA, 15 bp, Homo sapiens
acctcaacctcaggc

SEQ ID NO: 1756960 - DNA, 15 bp, Homo sapiens
cctcaacctcaggct

SEQ ID NO: 1756961 - DNA, 15 bp, Homo sapiens
ctcaacctcaggctg

SEQ ID NO: 1756962 - DNA, 15 bp, Homo sapiens
tcaacctcaggctgg

SEQ ID NO: 1756963 - DNA, 15 bp, Homo sapiens
caacctcaggctggt

SEQ ID NO: 1756964 - DNA, 15 bp, Homo sapiens
aacctcaggctggtg

SEQ ID NO: 1756965 - DNA, 15 bp, Homo sapiens
acctcaggctggtgg

SEQ ID NO: 1756966 - DNA, 15 bp, Homo sapiens
cctcaggctggtgga

SEQ ID NO: 1756967 - DNA, 15 bp, Homo sapiens
ctcaggctggtggag

SEQ ID NO: 1756968 - DNA, 15 bp, Homo sapiens
tcaggctggtggagc

SEQ ID NO: 1756969 - DNA, 15 bp, Homo sapiens
caggctggtggagcc

SEQ ID NO: 1756970 - DNA, 15 bp, Homo sapiens
aggctggtggagcct

SEQ ID NO: 1756971 - DNA, 15 bp, Homo sapiens
ggctggtggagcctg

SEQ ID NO: 1756972 - DNA, 15 bp, Homo sapiens
gctggtggagcctga

SEQ ID NO: 1756973 - DNA, 15 bp, Homo sapiens
ctggtggagcctgaa

SEQ ID NO: 1756974 - DNA, 15 bp, Homo sapiens
tggtggagcctgaag

SEQ ID NO: 1756975 - DNA, 15 bp, Homo sapiens
ggtggagcctgaagc

SEQ ID NO: 1756976 - DNA, 15 bp, Homo sapiens
gtggagcctgaagcc

SEQ ID NO: 1756977 - DNA, 15 bp, Homo sapiens
tggagcctgaagcca

SEQ ID NO: 1756978 - DNA, 15 bp, Homo sapiens
ggagcctgaagccaa

SEQ ID NO: 1756979 - DNA, 15 bp, Homo sapiens
gagcctgaagccaag

SEQ ID NO: 1756980 - DNA, 15 bp, Homo sapiens
agcctgaagccaagc

SEQ ID NO: 1756981 - DNA, 15 bp, Homo sapiens
gcctgaagccaagca

SEQ ID NO: 1756982 - DNA, 15 bp, Homo sapiens
cctgaagccaagcag

SEQ ID NO: 1756983 - DNA, 15 bp, Homo sapiens
ctgaagccaagcagc

SEQ ID NO: 1756984 - DNA, 15 bp, Homo sapiens
tgaagccaagcagct

SEQ ID NO: 1756985 - DNA, 15 bp, Homo sapiens
gaagccaagcagctt

SEQ ID NO: 1756986 - DNA, 15 bp, Homo sapiens
aagccaagcagcttc

SEQ ID NO: 1756987 - DNA, 15 bp, Homo sapiens
agccaagcagcttct

SEQ ID NO: 1756988 - DNA, 15 bp, Homo sapiens
gccaagcagcttctg

SEQ ID NO: 1756989 - DNA, 15 bp, Homo sapiens
ccaagcagcttctgg

SEQ ID NO: 1756990 - DNA, 15 bp, Homo sapiens
caagcagcttctggt

SEQ ID NO: 1756991 - DNA, 15 bp, Homo sapiens
aagcagcttctggta

SEQ ID NO: 1756992 - DNA, 15 bp, Homo sapiens
agcagcttctggtaa

SEQ ID NO: 1756993 - DNA, 15 bp, Homo sapiens
gcagcttctggtaaa

SEQ ID NO: 1756994 - DNA, 15 bp, Homo sapiens
cagcttctggtaaag

SEQ ID NO: 1756995 - DNA, 15 bp, Homo sapiens
agcttctggtaaaga

SEQ ID NO: 1756996 - DNA, 15 bp, Homo sapiens
gcttctggtaaagag

SEQ ID NO: 1756997 - DNA, 15 bp, Homo sapiens
cttctggtaaagaga

SEQ ID NO: 1756998 - DNA, 15 bp, Homo sapiens
ttctggtaaagagac

SEQ ID NO: 1756999 - DNA, 15 bp, Homo sapiens
tctggtaaagagacc

SEQ ID NO: 1757000 - DNA, 15 bp, Homo sapiens
ctggtaaagagaccc

SEQ ID NO: 1757001 - DNA, 15 bp, Homo sapiens
tggtaaagagaccca

SEQ ID NO: 1757002 - DNA, 15 bp, Homo sapiens
ggtaaagagacccag

SEQ ID NO: 1757003 - DNA, 15 bp, Homo sapiens
gtaaagagacccaga

SEQ ID NO: 1757004 - DNA, 15 bp, Homo sapiens
taaagagacccagac

SEQ ID NO: 1757005 - DNA, 15 bp, Homo sapiens
aaagagacccagact

SEQ ID NO: 1757006 - DNA, 15 bp, Homo sapiens
aagagacccagactc

SEQ ID NO: 1757007 - DNA, 15 bp, Homo sapiens
agagacccagactct

SEQ ID NO: 1757008 - DNA, 15 bp, Homo sapiens
gagacccagactctg

SEQ ID NO: 1757009 - DNA, 15 bp, Homo sapiens
agacccagactctgg

SEQ ID NO: 1757010 - DNA, 15 bp, Homo sapiens
gacccagactctgga

SEQ ID NO: 1757011 - DNA, 15 bp, Homo sapiens
acccagactctggac

SEQ ID NO: 1757012 - DNA, 15 bp, Homo sapiens
cccagactctggacc

SEQ ID NO: 1757013 - DNA, 15 bp, Homo sapiens
ccagactctggaccg

SEQ ID NO: 1757014 - DNA, 15 bp, Homo sapiens
cagactctggaccgg

SEQ ID NO: 1757015 - DNA, 15 bp, Homo sapiens
agactctggaccgga

SEQ ID NO: 1757016 - DNA, 15 bp, Homo sapiens
gactctggaccggag

SEQ ID NO: 1757017 - DNA, 15 bp, Homo sapiens
actctggaccggaga

SEQ ID NO: 1757018 - DNA, 15 bp, Homo sapiens
ctctggaccggagag

SEQ ID NO: 1757019 - DNA, 15 bp, Homo sapiens
tctggaccggagaga

SEQ ID NO: 1757020 - DNA, 15 bp, Homo sapiens
ctggaccggagagag

SEQ ID NO: 1757021 - DNA, 15 bp, Homo sapiens
tggaccggagagagt

SEQ ID NO: 1757022 - DNA, 15 bp, Homo sapiens
ggaccggagagagtt

SEQ ID NO: 1757023 - DNA, 15 bp, Homo sapiens
gaccggagagagttc

SEQ ID NO: 1757024 - DNA, 15 bp, Homo sapiens
accggagagagttct

SEQ ID NO: 1757025 - DNA, 15 bp, Homo sapiens
ccggagagagttcta

SEQ ID NO: 1757026 - DNA, 15 bp, Homo sapiens
cggagagagttctat

SEQ ID NO: 1757027 - DNA, 15 bp, Homo sapiens
ggagagagttctata

SEQ ID NO: 1757028 - DNA, 15 bp, Homo sapiens
gagagagttctataa

SEQ ID NO: 1757029 - DNA, 15 bp, Homo sapiens
agagagttctataaa

SEQ ID NO: 1757030 - DNA, 15 bp, Homo sapiens
gagagttctataaaa

SEQ ID NO: 1757031 - DNA, 15 bp, Homo sapiens
agagttctataaaaa

SEQ ID NO: 1757032 - DNA, 15 bp, Homo sapiens
gagttctataaaaaa

SEQ ID NO: 1757033 - DNA, 15 bp, Homo sapiens
agttctataaaaaaa

SEQ ID NO: 1757034 - DNA, 15 bp, Homo sapiens
gttctataaaaaaac

SEQ ID NO: 1757035 - DNA, 15 bp, Homo sapiens
ttctataaaaaaacc

SEQ ID NO: 1757036 - DNA, 15 bp, Homo sapiens
tctataaaaaaacct

SEQ ID NO: 1757037 - DNA, 15 bp, Homo sapiens
ctataaaaaaacctc

SEQ ID NO: 1757038 - DNA, 15 bp, Homo sapiens
tataaaaaaacctct

SEQ ID NO: 1757039 - DNA, 15 bp, Homo sapiens
ataaaaaaacctctg

SEQ ID NO: 1757040 - DNA, 15 bp, Homo sapiens
taaaaaaacctctgt

SEQ ID NO: 1757041 - DNA, 15 bp, Homo sapiens
aaaaaaacctctgtg

SEQ ID NO: 1757042 - DNA, 15 bp, Homo sapiens
aaaaaacctctgtgc

SEQ ID NO: 1757043 - DNA, 15 bp, Homo sapiens
aaaaacctctgtgct

SEQ ID NO: 1757044 - DNA, 15 bp, Homo sapiens
aaaacctctgtgctc

SEQ ID NO: 1757045 - DNA, 15 bp, Homo sapiens
aaacctctgtgctct

SEQ ID NO: 1757046 - DNA, 15 bp, Homo sapiens
aacctctgtgctctg

SEQ ID NO: 1757047 - DNA, 15 bp, Homo sapiens
acctctgtgctctga

SEQ ID NO: 1757048 - DNA, 15 bp, Homo sapiens
cctctgtgctctgag

SEQ ID NO: 1757049 - DNA, 15 bp, Homo sapiens
ctctgtgctctgaga

SEQ ID NO: 1757050 - DNA, 15 bp, Homo sapiens
tctgtgctctgagaa

SEQ ID NO: 1757051 - DNA, 15 bp, Homo sapiens
ctgtgctctgagaag

SEQ ID NO: 1757052 - DNA, 15 bp, Homo sapiens
tgtgctctgagaaga

SEQ ID NO: 1757053 - DNA, 15 bp, Homo sapiens
gtgctctgagaagac

SEQ ID NO: 1757054 - DNA, 15 bp, Homo sapiens
tgctctgagaagacc

SEQ ID NO: 1757055 - DNA, 15 bp, Homo sapiens
gctctgagaagacct

SEQ ID NO: 1757056 - DNA, 15 bp, Homo sapiens
ctctgagaagacctg

SEQ ID NO: 1757057 - DNA, 15 bp, Homo sapiens
tctgagaagacctga

SEQ ID NO: 1757058 - DNA, 15 bp, Homo sapiens
ctgagaagacctgac

SEQ ID NO: 1757059 - DNA, 15 bp, Homo sapiens
tgagaagacctgact

SEQ ID NO: 1757060 - DNA, 15 bp, Homo sapiens
gagaagacctgactg

SEQ ID NO: 1757061 - DNA, 15 bp, Homo sapiens
agaagacctgactgg

SEQ ID NO: 1757062 - DNA, 15 bp, Homo sapiens
gaagacctgactgga

SEQ ID NO: 1757063 - DNA, 15 bp, Homo sapiens
aagacctgactggag

SEQ ID NO: 1757064 - DNA, 15 bp, Homo sapiens
agacctgactggagt

SEQ ID NO: 1757065 - DNA, 15 bp, Homo sapiens
gacctgactggagtg

SEQ ID NO: 1757066 - DNA, 15 bp, Homo sapiens
acctgactggagtgg

SEQ ID NO: 1757067 - DNA, 15 bp, Homo sapiens
cctgactggagtggg

SEQ ID NO: 1757068 - DNA, 15 bp, Homo sapiens
ctgactggagtgggc

SEQ ID NO: 1757069 - DNA, 15 bp, Homo sapiens
tgactggagtgggca

SEQ ID NO: 1757070 - DNA, 15 bp, Homo sapiens
gactggagtgggcaa

SEQ ID NO: 1757071 - DNA, 15 bp, Homo sapiens
actggagtgggcaaa

SEQ ID NO: 1757072 - DNA, 15 bp, Homo sapiens
ctggagtgggcaaac

SEQ ID NO: 1757073 - DNA, 15 bp, Homo sapiens
tggagtgggcaaact

SEQ ID NO: 1757074 - DNA, 15 bp, Homo sapiens
ggagtgggcaaactc

SEQ ID NO: 1757075 - DNA, 15 bp, Homo sapiens
gagtgggcaaactct

SEQ ID NO: 1757076 - DNA, 15 bp, Homo sapiens
agtgggcaaactctt

SEQ ID NO: 1757077 - DNA, 15 bp, Homo sapiens
gtgggcaaactcttt

SEQ ID NO: 1757078 - DNA, 15 bp, Homo sapiens
tgggcaaactctttg

SEQ ID NO: 1757079 - DNA, 15 bp, Homo sapiens
gggcaaactctttgc

SEQ ID NO: 1757080 - DNA, 15 bp, Homo sapiens
ggcaaactctttgcc

SEQ ID NO: 1757081 - DNA, 15 bp, Homo sapiens
gcaaactctttgcct

SEQ ID NO: 1757082 - DNA, 15 bp, Homo sapiens
caaactctttgcctt

SEQ ID NO: 1757083 - DNA, 15 bp, Homo sapiens
aaactctttgccttt

SEQ ID NO: 1757084 - DNA, 15 bp, Homo sapiens
aactctttgccttta

SEQ ID NO: 1757085 - DNA, 15 bp, Homo sapiens
actctttgcctttaa

SEQ ID NO: 1757086 - DNA, 15 bp, Homo sapiens
ctctttgcctttaac

SEQ ID NO: 1757087 - DNA, 15 bp, Homo sapiens
tctttgcctttaact

SEQ ID NO: 1757088 - DNA, 15 bp, Homo sapiens
ctttgcctttaactt

SEQ ID NO: 1757089 - DNA, 15 bp, Homo sapiens
tttgcctttaacttt

SEQ ID NO: 1757090 - DNA, 15 bp, Homo sapiens
ttgcctttaactttc

SEQ ID NO: 1757091 - DNA, 15 bp, Homo sapiens
tgcctttaactttct

SEQ ID NO: 1757092 - DNA, 15 bp, Homo sapiens
gcctttaactttctc

SEQ ID NO: 1757093 - DNA, 15 bp, Homo sapiens
cctttaactttctct

SEQ ID NO: 1757094 - DNA, 15 bp, Homo sapiens
ctttaactttctctt

SEQ ID NO: 1757095 - DNA, 15 bp, Homo sapiens
tttaactttctcttc

SEQ ID NO: 1757096 - DNA, 15 bp, Homo sapiens
ttaactttctcttcc

SEQ ID NO: 1757097 - DNA, 15 bp, Homo sapiens
taactttctcttccc

SEQ ID NO: 1757098 - DNA, 15 bp, Homo sapiens
aactttctcttccct

SEQ ID NO: 1757099 - DNA, 15 bp, Homo sapiens
actttctcttccctg

SEQ ID NO: 1757100 - DNA, 15 bp, Homo sapiens
ctttctcttccctgc

SEQ ID NO: 1757101 - DNA, 15 bp, Homo sapiens
tttctcttccctgca

SEQ ID NO: 1757102 - DNA, 15 bp, Homo sapiens
ttctcttccctgcag

SEQ ID NO: 1757103 - DNA, 15 bp, Homo sapiens
tctcttccctgcagc

SEQ ID NO: 1757104 - DNA, 15 bp, Homo sapiens
ctcttccctgcagct

SEQ ID NO: 1757105 - DNA, 15 bp, Homo sapiens
tcttccctgcagctg

SEQ ID NO: 1757106 - DNA, 15 bp, Homo sapiens
cttccctgcagctgg

SEQ ID NO: 1757107 - DNA, 15 bp, Homo sapiens
ttccctgcagctggc

SEQ ID NO: 1757108 - DNA, 15 bp, Homo sapiens
tccctgcagctggct

SEQ ID NO: 1757109 - DNA, 15 bp, Homo sapiens
ccctgcagctggctt

SEQ ID NO: 1757110 - DNA, 15 bp, Homo sapiens
cctgcagctggctta

SEQ ID NO: 1757111 - DNA, 15 bp, Homo sapiens
ctgcagctggcttaa

SEQ ID NO: 1757112 - DNA, 15 bp, Homo sapiens
tgcagctggcttaat

SEQ ID NO: 1757113 - DNA, 15 bp, Homo sapiens
gcagctggcttaata

SEQ ID NO: 1757114 - DNA, 15 bp, Homo sapiens
cagctggcttaatat

SEQ ID NO: 1757115 - DNA, 15 bp, Homo sapiens
agctggcttaatatc

SEQ ID NO: 1757116 - DNA, 15 bp, Homo sapiens
gctggcttaatatct

SEQ ID NO: 1757117 - DNA, 15 bp, Homo sapiens
ctggcttaatatctc

SEQ ID NO: 1757118 - DNA, 15 bp, Homo sapiens
tggcttaatatctcc

SEQ ID NO: 1757119 - DNA, 15 bp, Homo sapiens
ggcttaatatctcct

SEQ ID NO: 1757120 - DNA, 15 bp, Homo sapiens
gcttaatatctcctg

SEQ ID NO: 1757121 - DNA, 15 bp, Homo sapiens
cttaatatctcctga

SEQ ID NO: 1757122 - DNA, 15 bp, Homo sapiens
ttaatatctcctgag

SEQ ID NO: 1757123 - DNA, 15 bp, Homo sapiens
taatatctcctgagg

SEQ ID NO: 1757124 - DNA, 15 bp, Homo sapiens
aatatctcctgaggc

SEQ ID NO: 1757125 - DNA, 15 bp, Homo sapiens
atatctcctgaggcc

SEQ ID NO: 1757126 - DNA, 15 bp, Homo sapiens
tatctcctgaggcca

SEQ ID NO: 1757127 - DNA, 15 bp, Homo sapiens
atctcctgaggccaa

SEQ ID NO: 1757128 - DNA, 15 bp, Homo sapiens
tctcctgaggccaaa

SEQ ID NO: 1757129 - DNA, 15 bp, Homo sapiens
ctcctgaggccaaac

SEQ ID NO: 1757130 - DNA, 15 bp, Homo sapiens
tcctgaggccaaaca

SEQ ID NO: 1757131 - DNA, 15 bp, Homo sapiens
cctgaggccaaacag

SEQ ID NO: 1757132 - DNA, 15 bp, Homo sapiens
ctgaggccaaacaga

SEQ ID NO: 1757133 - DNA, 15 bp, Homo sapiens
tgaggccaaacagac

SEQ ID NO: 1757134 - DNA, 15 bp, Homo sapiens
gaggccaaacagaca

SEQ ID NO: 1757135 - DNA, 15 bp, Homo sapiens
aggccaaacagacat

SEQ ID NO: 1757136 - DNA, 15 bp, Homo sapiens
ggccaaacagacatg

SEQ ID NO: 1757137 - DNA, 15 bp, Homo sapiens
gccaaacagacatga

SEQ ID NO: 1757138 - DNA, 15 bp, Homo sapiens
ccaaacagacatgac

SEQ ID NO: 1757139 - DNA, 15 bp, Homo sapiens
caaacagacatgaca

SEQ ID NO: 1757140 - DNA, 15 bp, Homo sapiens
aaacagacatgacac

SEQ ID NO: 1757141 - DNA, 15 bp, Homo sapiens
aacagacatgacact

SEQ ID NO: 1757142 - DNA, 15 bp, Homo sapiens
acagacatgacactt

SEQ ID NO: 1757143 - DNA, 15 bp, Homo sapiens
cagacatgacacttg

SEQ ID NO: 1757144 - DNA, 15 bp, Homo sapiens
agacatgacacttgc

SEQ ID NO: 1757145 - DNA, 15 bp, Homo sapiens
gacatgacacttgca

SEQ ID NO: 1757146 - DNA, 15 bp, Homo sapiens
acatgacacttgcag

SEQ ID NO: 1757147 - DNA, 15 bp, Homo sapiens
catgacacttgcagc

SEQ ID NO: 1757148 - DNA, 15 bp, Homo sapiens
atgacacttgcagca

SEQ ID NO: 1757149 - DNA, 15 bp, Homo sapiens
tgacacttgcagcat

SEQ ID NO: 1757150 - DNA, 15 bp, Homo sapiens
gacacttgcagcatg

SEQ ID NO: 1757151 - DNA, 15 bp, Homo sapiens
acacttgcagcatgt

SEQ ID NO: 1757152 - DNA, 15 bp, Homo sapiens
cacttgcagcatgtg

SEQ ID NO: 1757153 - DNA, 15 bp, Homo sapiens
acttgcagcatgtga

SEQ ID NO: 1757154 - DNA, 15 bp, Homo sapiens
cttgcagcatgtgag

SEQ ID NO: 1757155 - DNA, 15 bp, Homo sapiens
ttgcagcatgtgaga

SEQ ID NO: 1757156 - DNA, 15 bp, Homo sapiens
tgcagcatgtgagag

SEQ ID NO: 1757157 - DNA, 15 bp, Homo sapiens
gcagcatgtgagagg

SEQ ID NO: 1757158 - DNA, 15 bp, Homo sapiens
cagcatgtgagaggg

SEQ ID NO: 1757159 - DNA, 15 bp, Homo sapiens
agcatgtgagaggga

SEQ ID NO: 1757160 - DNA, 15 bp, Homo sapiens
gcatgtgagagggaa

SEQ ID NO: 1757161 - DNA, 15 bp, Homo sapiens
catgtgagagggaag

SEQ ID NO: 1757162 - DNA, 15 bp, Homo sapiens
atgtgagagggaagc

SEQ ID NO: 1757163 - DNA, 15 bp, Homo sapiens
tgtgagagggaagca

SEQ ID NO: 1757164 - DNA, 15 bp, Homo sapiens
gtgagagggaagcag

SEQ ID NO: 1757165 - DNA, 15 bp, Homo sapiens
tgagagggaagcagc

SEQ ID NO: 1757166 - DNA, 15 bp, Homo sapiens
gagagggaagcagct

SEQ ID NO: 1757167 - DNA, 15 bp, Homo sapiens
agagggaagcagctg

SEQ ID NO: 1757168 - DNA, 15 bp, Homo sapiens
gagggaagcagctgt

SEQ ID NO: 1757169 - DNA, 15 bp, Homo sapiens
agggaagcagctgtt

SEQ ID NO: 1757170 - DNA, 15 bp, Homo sapiens
gggaagcagctgttg

SEQ ID NO: 1757171 - DNA, 15 bp, Homo sapiens
ggaagcagctgttga

SEQ ID NO: 1757172 - DNA, 15 bp, Homo sapiens
gaagcagctgttgag

SEQ ID NO: 1757173 - DNA, 15 bp, Homo sapiens
aagcagctgttgaga

SEQ ID NO: 1757174 - DNA, 15 bp, Homo sapiens
agcagctgttgagag

SEQ ID NO: 1757175 - DNA, 15 bp, Homo sapiens
gcagctgttgagagt

SEQ ID NO: 1757176 - DNA, 15 bp, Homo sapiens
cagctgttgagagtt

SEQ ID NO: 1757177 - DNA, 15 bp, Homo sapiens
agctgttgagagtta

SEQ ID NO: 1757178 - DNA, 15 bp, Homo sapiens
gctgttgagagttaa

SEQ ID NO: 1757179 - DNA, 15 bp, Homo sapiens
ctgttgagagttaat

SEQ ID NO: 1757180 - DNA, 15 bp, Homo sapiens
tgttgagagttaatg

SEQ ID NO: 1757181 - DNA, 15 bp, Homo sapiens
gttgagagttaatgc

SEQ ID NO: 1757182 - DNA, 15 bp, Homo sapiens
ttgagagttaatgcc

SEQ ID NO: 1757183 - DNA, 15 bp, Homo sapiens
tgagagttaatgccc

SEQ ID NO: 1757184 - DNA, 15 bp, Homo sapiens
gagagttaatgccca

SEQ ID NO: 1757185 - DNA, 15 bp, Homo sapiens
agagttaatgcccaa

SEQ ID NO: 1757186 - DNA, 15 bp, Homo sapiens
gagttaatgcccaat

SEQ ID NO: 1757187 - DNA, 15 bp, Homo sapiens
agttaatgcccaata

SEQ ID NO: 1757188 - DNA, 15 bp, Homo sapiens
gttaatgcccaatat

SEQ ID NO: 1757189 - DNA, 15 bp, Homo sapiens
ttaatgcccaatatt

SEQ ID NO: 1757190 - DNA, 15 bp, Homo sapiens
taatgcccaatattc

SEQ ID NO: 1757191 - DNA, 15 bp, Homo sapiens
aatgcccaatattca

SEQ ID NO: 1757192 - DNA, 15 bp, Homo sapiens
atgcccaatattcat

SEQ ID NO: 1757193 - DNA, 15 bp, Homo sapiens
tgcccaatattcatg

SEQ ID NO: 1757194 - DNA, 15 bp, Homo sapiens
gcccaatattcatga

SEQ ID NO: 1757195 - DNA, 15 bp, Homo sapiens
cccaatattcatgaa

SEQ ID NO: 1757196 - DNA, 15 bp, Homo sapiens
ccaatattcatgaag

SEQ ID NO: 1757197 - DNA, 15 bp, Homo sapiens
caatattcatgaaga

SEQ ID NO: 1757198 - DNA, 15 bp, Homo sapiens
aatattcatgaagat

SEQ ID NO: 1757199 - DNA, 15 bp, Homo sapiens
atattcatgaagata

SEQ ID NO: 1757200 - DNA, 15 bp, Homo sapiens
tattcatgaagatac

SEQ ID NO: 1757201 - DNA, 15 bp, Homo sapiens
attcatgaagatacc

SEQ ID NO: 1757202 - DNA, 15 bp, Homo sapiens
ttcatgaagatacca

SEQ ID NO: 1757203 - DNA, 15 bp, Homo sapiens
tcatgaagataccac

SEQ ID NO: 1757204 - DNA, 15 bp, Homo sapiens
catgaagataccacc

SEQ ID NO: 1757205 - DNA, 15 bp, Homo sapiens
atgaagataccaccc

SEQ ID NO: 1757206 - DNA, 15 bp, Homo sapiens
tgaagataccaccct

SEQ ID NO: 1757207 - DNA, 15 bp, Homo sapiens
gaagataccaccctg

SEQ ID NO: 1757208 - DNA, 15 bp, Homo sapiens
aagataccaccctga

SEQ ID NO: 1757209 - DNA, 15 bp, Homo sapiens
agataccaccctgag

SEQ ID NO: 1757210 - DNA, 15 bp, Homo sapiens
gataccaccctgaga

SEQ ID NO: 1757211 - DNA, 15 bp, Homo sapiens
ataccaccctgagaa

SEQ ID NO: 1757212 - DNA, 15 bp, Homo sapiens
taccaccctgagaaa

SEQ ID NO: 1757213 - DNA, 15 bp, Homo sapiens
accaccctgagaaaa

SEQ ID NO: 1757214 - DNA, 15 bp, Homo sapiens
ccaccctgagaaaaa

SEQ ID NO: 1757215 - DNA, 15 bp, Homo sapiens
caccctgagaaaaat

SEQ ID NO: 1757216 - DNA, 15 bp, Homo sapiens
accctgagaaaaatt

SEQ ID NO: 1757217 - DNA, 15 bp, Homo sapiens
ccctgagaaaaattc

SEQ ID NO: 1757218 - DNA, 15 bp, Homo sapiens
cctgagaaaaattct

SEQ ID NO: 1757219 - DNA, 15 bp, Homo sapiens
ctgagaaaaattcta

SEQ ID NO: 1757220 - DNA, 15 bp, Homo sapiens
tgagaaaaattctaa

SEQ ID NO: 1757221 - DNA, 15 bp, Homo sapiens
gagaaaaattctaac

SEQ ID NO: 1757222 - DNA, 15 bp, Homo sapiens
agaaaaattctaacc

SEQ ID NO: 1757223 - DNA, 15 bp, Homo sapiens
gaaaaattctaacca

SEQ ID NO: 1757224 - DNA, 15 bp, Homo sapiens
aaaaattctaaccaa

SEQ ID NO: 1757225 - DNA, 15 bp, Homo sapiens
aaaattctaaccaac

SEQ ID NO: 1757226 - DNA, 15 bp, Homo sapiens
aaattctaaccaaca

SEQ ID NO: 1757227 - DNA, 15 bp, Homo sapiens
aattctaaccaacat

SEQ ID NO: 1757228 - DNA, 15 bp, Homo sapiens
attctaaccaacatc

SEQ ID NO: 1757229 - DNA, 15 bp, Homo sapiens
ttctaaccaacatct

SEQ ID NO: 1757230 - DNA, 15 bp, Homo sapiens
tctaaccaacatctt

SEQ ID NO: 1757231 - DNA, 15 bp, Homo sapiens
ctaaccaacatctta

SEQ ID NO: 1757232 - DNA, 15 bp, Homo sapiens
taaccaacatcttag

SEQ ID NO: 1757233 - DNA, 15 bp, Homo sapiens
aaccaacatcttagt

SEQ ID NO: 1757234 - DNA, 15 bp, Homo sapiens
accaacatcttagtc

SEQ ID NO: 1757235 - DNA, 15 bp, Homo sapiens
ccaacatcttagtcc

SEQ ID NO: 1757236 - DNA, 15 bp, Homo sapiens
caacatcttagtcct

SEQ ID NO: 1757237 - DNA, 15 bp, Homo sapiens
aacatcttagtcctc

SEQ ID NO: 1757238 - DNA, 15 bp, Homo sapiens
acatcttagtcctca

SEQ ID NO: 1757239 - DNA, 15 bp, Homo sapiens
catcttagtcctcac

SEQ ID NO: 1757240 - DNA, 15 bp, Homo sapiens
atcttagtcctcact

SEQ ID NO: 1757241 - DNA, 15 bp, Homo sapiens
tcttagtcctcacta

SEQ ID NO: 1757242 - DNA, 15 bp, Homo sapiens
cttagtcctcactaa

SEQ ID NO: 1757243 - DNA, 15 bp, Homo sapiens
ttagtcctcactaac

SEQ ID NO: 1757244 - DNA, 15 bp, Homo sapiens
tagtcctcactaaca

SEQ ID NO: 1757245 - DNA, 15 bp, Homo sapiens
agtcctcactaacat

SEQ ID NO: 1757246 - DNA, 15 bp, Homo sapiens
gtcctcactaacatc

SEQ ID NO: 1757247 - DNA, 15 bp, Homo sapiens
tcctcactaacatct

SEQ ID NO: 1757248 - DNA, 15 bp, Homo sapiens
cctcactaacatctg

SEQ ID NO: 1757249 - DNA, 15 bp, Homo sapiens
ctcactaacatctgg

SEQ ID NO: 1757250 - DNA, 15 bp, Homo sapiens
tcactaacatctggc

SEQ ID NO: 1757251 - DNA, 15 bp, Homo sapiens
cactaacatctggca

SEQ ID NO: 1757252 - DNA, 15 bp, Homo sapiens
actaacatctggcat

SEQ ID NO: 1757253 - DNA, 15 bp, Homo sapiens
ctaacatctggcata

SEQ ID NO: 1757254 - DNA, 15 bp, Homo sapiens
taacatctggcatac

SEQ ID NO: 1757255 - DNA, 15 bp, Homo sapiens
aacatctggcatact

SEQ ID NO: 1757256 - DNA, 15 bp, Homo sapiens
acatctggcatactt

SEQ ID NO: 1757257 - DNA, 15 bp, Homo sapiens
catctggcatacttc

SEQ ID NO: 1757258 - DNA, 15 bp, Homo sapiens
atctggcatacttct

SEQ ID NO: 1757259 - DNA, 15 bp, Homo sapiens
tctggcatacttctc

SEQ ID NO: 1757260 - DNA, 15 bp, Homo sapiens
ctggcatacttctcc

SEQ ID NO: 1757261 - DNA, 15 bp, Homo sapiens
tggcatacttctcct

SEQ ID NO: 1757262 - DNA, 15 bp, Homo sapiens
ggcatacttctcctc

SEQ ID NO: 1757263 - DNA, 15 bp, Homo sapiens
gcatacttctcctca

SEQ ID NO: 1757264 - DNA, 15 bp, Homo sapiens
catacttctcctcat

SEQ ID NO: 1757265 - DNA, 15 bp, Homo sapiens
atacttctcctcata

SEQ ID NO: 1757266 - DNA, 15 bp, Homo sapiens
tacttctcctcatat

SEQ ID NO: 1757267 - DNA, 15 bp, Homo sapiens
acttctcctcatatc

SEQ ID NO: 1757268 - DNA, 15 bp, Homo sapiens
cttctcctcatatct

SEQ ID NO: 1757269 - DNA, 15 bp, Homo sapiens
ttctcctcatatctg

SEQ ID NO: 1757270 - DNA, 15 bp, Homo sapiens
tctcctcatatctga

SEQ ID NO: 1757271 - DNA, 15 bp, Homo sapiens
ctcctcatatctgat

SEQ ID NO: 1757272 - DNA, 15 bp, Homo sapiens
tcctcatatctgatt

SEQ ID NO: 1757273 - DNA, 15 bp, Homo sapiens
cctcatatctgattt

SEQ ID NO: 1757274 - DNA, 15 bp, Homo sapiens
ctcatatctgatttt

SEQ ID NO: 1757275 - DNA, 15 bp, Homo sapiens
tcatatctgattttg

SEQ ID NO: 1757276 - DNA, 15 bp, Homo sapiens
catatctgattttga

SEQ ID NO: 1757277 - DNA, 15 bp, Homo sapiens
atatctgattttgat

SEQ ID NO: 1757278 - DNA, 15 bp, Homo sapiens
tatctgattttgatg

SEQ ID NO: 1757279 - DNA, 15 bp, Homo sapiens
atctgattttgatga

SEQ ID NO: 1757280 - DNA, 15 bp, Homo sapiens
tctgattttgatgaa

SEQ ID NO: 1757281 - DNA, 15 bp, Homo sapiens
ctgattttgatgaag

SEQ ID NO: 1757282 - DNA, 15 bp, Homo sapiens
tgattttgatgaaga

SEQ ID NO: 1757283 - DNA, 15 bp, Homo sapiens
gattttgatgaagag

SEQ ID NO: 1757284 - DNA, 15 bp, Homo sapiens
attttgatgaagagt

SEQ ID NO: 1757285 - DNA, 15 bp, Homo sapiens
ttttgatgaagagtt

SEQ ID NO: 1757286 - DNA, 15 bp, Homo sapiens
tttgatgaagagttc

SEQ ID NO: 1757287 - DNA, 15 bp, Homo sapiens
ttgatgaagagttca

SEQ ID NO: 1757288 - DNA, 15 bp, Homo sapiens
tgatgaagagttcat

SEQ ID NO: 1757289 - DNA, 15 bp, Homo sapiens
gatgaagagttcatg

SEQ ID NO: 1757290 - DNA, 15 bp, Homo sapiens
atgaagagttcatgc

SEQ ID NO: 1757291 - DNA, 15 bp, Homo sapiens
tgaagagttcatgca

SEQ ID NO: 1757292 - DNA, 15 bp, Homo sapiens
gaagagttcatgcaa

SEQ ID NO: 1757293 - DNA, 15 bp, Homo sapiens
aagagttcatgcaac

SEQ ID NO: 1757294 - DNA, 15 bp, Homo sapiens
agagttcatgcaaca

SEQ ID NO: 1757295 - DNA, 15 bp, Homo sapiens
gagttcatgcaacaa

SEQ ID NO: 1757296 - DNA, 15 bp, Homo sapiens
agttcatgcaacaaa

SEQ ID NO: 1757297 - DNA, 15 bp, Homo sapiens
gttcatgcaacaaag

SEQ ID NO: 1757298 - DNA, 15 bp, Homo sapiens
ttcatgcaacaaagt

SEQ ID NO: 1757299 - DNA, 15 bp, Homo sapiens
tcatgcaacaaagtg

SEQ ID NO: 1757300 - DNA, 15 bp, Homo sapiens
catgcaacaaagtga

SEQ ID NO: 1757301 - DNA, 15 bp, Homo sapiens
atgcaacaaagtgat

SEQ ID NO: 1757302 - DNA, 15 bp, Homo sapiens
tgcaacaaagtgatg

SEQ ID NO: 1757303 - DNA, 15 bp, Homo sapiens
gcaacaaagtgatgg

SEQ ID NO: 1757304 - DNA, 15 bp, Homo sapiens
caacaaagtgatgga

SEQ ID NO: 1757305 - DNA, 15 bp, Homo sapiens
aacaaagtgatggaa

SEQ ID NO: 1757306 - DNA, 15 bp, Homo sapiens
acaaagtgatggaaa

SEQ ID NO: 1757307 - DNA, 15 bp, Homo sapiens
caaagtgatggaaaa

SEQ ID NO: 1757308 - DNA, 15 bp, Homo sapiens
aaagtgatggaaaat

SEQ ID NO: 1757309 - DNA, 15 bp, Homo sapiens
aagtgatggaaaatg

SEQ ID NO: 1757310 - DNA, 15 bp, Homo sapiens
agtgatggaaaatgc

SEQ ID NO: 1757311 - DNA, 15 bp, Homo sapiens
gtgatggaaaatgct

SEQ ID NO: 1757312 - DNA, 15 bp, Homo sapiens
tgatggaaaatgctg

SEQ ID NO: 1757313 - DNA, 15 bp, Homo sapiens
gatggaaaatgctgc

SEQ ID NO: 1757314 - DNA, 15 bp, Homo sapiens
atggaaaatgctgct

SEQ ID NO: 1757315 - DNA, 15 bp, Homo sapiens
tggaaaatgctgctg

SEQ ID NO: 1757316 - DNA, 15 bp, Homo sapiens
ggaaaatgctgctgg

SEQ ID NO: 1757317 - DNA, 15 bp, Homo sapiens
gaaaatgctgctggg

SEQ ID NO: 1757318 - DNA, 15 bp, Homo sapiens
aaaatgctgctggga

SEQ ID NO: 1757319 - DNA, 15 bp, Homo sapiens
aaatgctgctgggag

SEQ ID NO: 1757320 - DNA, 15 bp, Homo sapiens
aatgctgctgggagc

SEQ ID NO: 1757321 - DNA, 15 bp, Homo sapiens
atgctgctgggagct

SEQ ID NO: 1757322 - DNA, 15 bp, Homo sapiens
tgctgctgggagctt

SEQ ID NO: 1757323 - DNA, 15 bp, Homo sapiens
gctgctgggagcttt

SEQ ID NO: 1757324 - DNA, 15 bp, Homo sapiens
ctgctgggagctttg

SEQ ID NO: 1757325 - DNA, 15 bp, Homo sapiens
tgctgggagctttga

SEQ ID NO: 1757326 - DNA, 15 bp, Homo sapiens
gctgggagctttgag

SEQ ID NO: 1757327 - DNA, 15 bp, Homo sapiens
ctgggagctttgaga

SEQ ID NO: 1757328 - DNA, 15 bp, Homo sapiens
tgggagctttgagag

SEQ ID NO: 1757329 - DNA, 15 bp, Homo sapiens
gggagctttgagagg

SEQ ID NO: 1757330 - DNA, 15 bp, Homo sapiens
ggagctttgagagga

SEQ ID NO: 1757331 - DNA, 15 bp, Homo sapiens
gagctttgagaggaa

SEQ ID NO: 1757332 - DNA, 15 bp, Homo sapiens
agctttgagaggaag

SEQ ID NO: 1757333 - DNA, 15 bp, Homo sapiens
gctttgagaggaagt

SEQ ID NO: 1757334 - DNA, 15 bp, Homo sapiens
ctttgagaggaagtc

SEQ ID NO: 1757335 - DNA, 15 bp, Homo sapiens
tttgagaggaagtcc

SEQ ID NO: 1757336 - DNA, 15 bp, Homo sapiens
ttgagaggaagtccc

SEQ ID NO: 1757337 - DNA, 15 bp, Homo sapiens
tgagaggaagtccct

SEQ ID NO: 1757338 - DNA, 15 bp, Homo sapiens
gagaggaagtccctc

SEQ ID NO: 1757339 - DNA, 15 bp, Homo sapiens
agaggaagtccctct

SEQ ID NO: 1757340 - DNA, 15 bp, Homo sapiens
gaggaagtccctctc

SEQ ID NO: 1757341 - DNA, 15 bp, Homo sapiens
aggaagtccctctca

SEQ ID NO: 1757342 - DNA, 15 bp, Homo sapiens
ggaagtccctctcat

SEQ ID NO: 1757343 - DNA, 15 bp, Homo sapiens
gaagtccctctcatc

SEQ ID NO: 1757344 - DNA, 15 bp, Homo sapiens
aagtccctctcatca

SEQ ID NO: 1757345 - DNA, 15 bp, Homo sapiens
agtccctctcatcat

SEQ ID NO: 1757346 - DNA, 15 bp, Homo sapiens
gtccctctcatcatc

SEQ ID NO: 1757347 - DNA, 15 bp, Homo sapiens
tccctctcatcatca

SEQ ID NO: 1757348 - DNA, 15 bp, Homo sapiens
ccctctcatcatcat

SEQ ID NO: 1757349 - DNA, 15 bp, Homo sapiens
cctctcatcatcatc

SEQ ID NO: 1757350 - DNA, 15 bp, Homo sapiens
ctctcatcatcatca

SEQ ID NO: 1757351 - DNA, 15 bp, Homo sapiens
tctcatcatcatcat

SEQ ID NO: 1757352 - DNA, 15 bp, Homo sapiens
ctcatcatcatcatc

SEQ ID NO: 1757353 - DNA, 15 bp, Homo sapiens
atcatcatcatcatg

SEQ ID NO: 1757354 - DNA, 15 bp, Homo sapiens
tcatcatcatcatgt

SEQ ID NO: 1757355 - DNA, 15 bp, Homo sapiens
catcatcatcatgtt

SEQ ID NO: 1757356 - DNA, 15 bp, Homo sapiens
atcatcatcatgttg

SEQ ID NO: 1757357 - DNA, 15 bp, Homo sapiens
tcatcatcatgttgt

SEQ ID NO: 1757358 - DNA, 15 bp, Homo sapiens
catcatcatgttgtt

SEQ ID NO: 1757359 - DNA, 15 bp, Homo sapiens
atcatcatgttgttg

SEQ ID NO: 1757360 - DNA, 15 bp, Homo sapiens
tcatcatgttgttgt

SEQ ID NO: 1757361 - DNA, 15 bp, Homo sapiens
catcatgttgttgtt

SEQ ID NO: 1757362 - DNA, 15 bp, Homo sapiens
atcatgttgttgtta

SEQ ID NO: 1757363 - DNA, 15 bp, Homo sapiens
tcatgttgttgttat

SEQ ID NO: 1757364 - DNA, 15 bp, Homo sapiens
catgttgttgttatt

SEQ ID NO: 1757365 - DNA, 15 bp, Homo sapiens
atgttgttgttattg

SEQ ID NO: 1757366 - DNA, 15 bp, Homo sapiens
gttgttgttattgtc

SEQ ID NO: 1757367 - DNA, 15 bp, Homo sapiens
ttgttgttattgtcg

SEQ ID NO: 1757368 - DNA, 15 bp, Homo sapiens
tgttgttattgtcga

SEQ ID NO: 1757369 - DNA, 15 bp, Homo sapiens
gttgttattgtcgaa

SEQ ID NO: 1757370 - DNA, 15 bp, Homo sapiens
ttgttattgtcgaag

SEQ ID NO: 1757371 - DNA, 15 bp, Homo sapiens
tgttattgtcgaagt

SEQ ID NO: 1757372 - DNA, 15 bp, Homo sapiens
gttattgtcgaagtg

SEQ ID NO: 1757373 - DNA, 15 bp, Homo sapiens
ttattgtcgaagtgg

SEQ ID NO: 1757374 - DNA, 15 bp, Homo sapiens
tattgtcgaagtggt

SEQ ID NO: 1757375 - DNA, 15 bp, Homo sapiens
attgtcgaagtggtg

SEQ ID NO: 1757376 - DNA, 15 bp, Homo sapiens
ttgtcgaagtggtgg

SEQ ID NO: 1757377 - DNA, 15 bp, Homo sapiens
tgtcgaagtggtggt

SEQ ID NO: 1757378 - DNA, 15 bp, Homo sapiens
gtcgaagtggtggta

SEQ ID NO: 1757379 - DNA, 15 bp, Homo sapiens
tcgaagtggtggtat

SEQ ID NO: 1757380 - DNA, 15 bp, Homo sapiens
cgaagtggtggtata

SEQ ID NO: 1757381 - DNA, 15 bp, Homo sapiens
gaagtggtggtatat

SEQ ID NO: 1757382 - DNA, 15 bp, Homo sapiens
aagtggtggtatatt

SEQ ID NO: 1757383 - DNA, 15 bp, Homo sapiens
agtggtggtatattt

SEQ ID NO: 1757384 - DNA, 15 bp, Homo sapiens
gtggtggtatatttg

SEQ ID NO: 1757385 - DNA, 15 bp, Homo sapiens
tggtggtatatttga

SEQ ID NO: 1757386 - DNA, 15 bp, Homo sapiens
ggtggtatatttgaa

SEQ ID NO: 1757387 - DNA, 15 bp, Homo sapiens
gtggtatatttgaat

SEQ ID NO: 1757388 - DNA, 15 bp, Homo sapiens
tggtatatttgaatg

SEQ ID NO: 1757389 - DNA, 15 bp, Homo sapiens
ggtatatttgaatgt

SEQ ID NO: 1757390 - DNA, 15 bp, Homo sapiens
gtatatttgaatgta

SEQ ID NO: 1757391 - DNA, 15 bp, Homo sapiens
tatatttgaatgtac

SEQ ID NO: 1757392 - DNA, 15 bp, Homo sapiens
atatttgaatgtaca

SEQ ID NO: 1757393 - DNA, 15 bp, Homo sapiens
tatttgaatgtacat

SEQ ID NO: 1757394 - DNA, 15 bp, Homo sapiens
atttgaatgtacatt

SEQ ID NO: 1757395 - DNA, 15 bp, Homo sapiens
tttgaatgtacatta

SEQ ID NO: 1757396 - DNA, 15 bp, Homo sapiens
ttgaatgtacattaa

SEQ ID NO: 1757397 - DNA, 15 bp, Homo sapiens
tgaatgtacattaaa

SEQ ID NO: 1757398 - DNA, 15 bp, Homo sapiens
gaatgtacattaaaa

SEQ ID NO: 1757399 - DNA, 15 bp, Homo sapiens
aatgtacattaaaaa

SEQ ID NO: 1757400 - DNA, 15 bp, Homo sapiens
atgtacattaaaaaa

SEQ ID NO: 1757401 - DNA, 15 bp, Homo sapiens
tgtacattaaaaaat

SEQ ID NO: 1757402 - DNA, 15 bp, Homo sapiens
gtacattaaaaaatc

SEQ ID NO: 1757403 - DNA, 15 bp, Homo sapiens
tacattaaaaaatca

SEQ ID NO: 1757404 - DNA, 15 bp, Homo sapiens
acattaaaaaatcaa

SEQ ID NO: 1757405 - DNA, 15 bp, Homo sapiens
cattaaaaaatcaat

SEQ ID NO: 1757406 - DNA, 15 bp, Homo sapiens
attaaaaaatcaatg

SEQ ID NO: 1757407 - DNA, 15 bp, Homo sapiens
ttaaaaaatcaatgt

SEQ ID NO: 1757408 - DNA, 15 bp, Homo sapiens
taaaaaatcaatgtt

SEQ ID NO: 1757409 - DNA, 15 bp, Homo sapiens
aaaaaatcaatgttt

SEQ ID NO: 1757410 - DNA, 15 bp, Homo sapiens
aaaaatcaatgtttc

SEQ ID NO: 1757411 - DNA, 15 bp, Homo sapiens
aaaatcaatgtttca

SEQ ID NO: 1757412 - DNA, 15 bp, Homo sapiens
aaatcaatgtttcat

SEQ ID NO: 1757413 - DNA, 15 bp, Homo sapiens
aatcaatgtttcatg

SEQ ID NO: 1757414 - DNA, 15 bp, Homo sapiens
atcaatgtttcatgg

SEQ ID NO: 1757415 - DNA, 15 bp, Homo sapiens
tcaatgtttcatggt

SEQ ID NO: 1757416 - DNA, 15 bp, Homo sapiens
caatgtttcatggtg

SEQ ID NO: 1757417 - DNA, 15 bp, Homo sapiens
aatgtttcatggtgt

SEQ ID NO: 1757418 - DNA, 15 bp, Homo sapiens
atgtttcatggtgtc

SEQ ID NO: 1757419 - DNA, 15 bp, Homo sapiens
tgtttcatggtgtcg

SEQ ID NO: 1757420 - DNA, 15 bp, Homo sapiens
gtttcatggtgtcgg

SEQ ID NO: 1757421 - DNA, 15 bp, Homo sapiens
tttcatggtgtcggc

SEQ ID NO: 1757422 - DNA, 15 bp, Homo sapiens
ttcatggtgtcggct

SEQ ID NO: 1757423 - DNA, 15 bp, Homo sapiens
tcatggtgtcggctg

SEQ ID NO: 1757424 - DNA, 15 bp, Homo sapiens
catggtgtcggctga

SEQ ID NO: 1757425 - DNA, 15 bp, Homo sapiens
atggtgtcggctgat

SEQ ID NO: 1757426 - DNA, 15 bp, Homo sapiens
tggtgtcggctgata

SEQ ID NO: 1757427 - DNA, 15 bp, Homo sapiens
ggtgtcggctgatac

SEQ ID NO: 1757428 - DNA, 15 bp, Homo sapiens
gtgtcggctgatacc

SEQ ID NO: 1757429 - DNA, 15 bp, Homo sapiens
tgtcggctgatacct

SEQ ID NO: 1757430 - DNA, 15 bp, Homo sapiens
gtcggctgatacctt

SEQ ID NO: 1757431 - DNA, 15 bp, Homo sapiens
tcggctgataccttt

SEQ ID NO: 1757432 - DNA, 15 bp, Homo sapiens
cggctgatacctttg

SEQ ID NO: 1757433 - DNA, 15 bp, Homo sapiens
ggctgatacctttga

SEQ ID NO: 1757434 - DNA, 15 bp, Homo sapiens
gctgatacctttgaa

SEQ ID NO: 1757435 - DNA, 15 bp, Homo sapiens
ctgatacctttgaat

SEQ ID NO: 1757436 - DNA, 15 bp, Homo sapiens
tgatacctttgaatg

SEQ ID NO: 1757437 - DNA, 15 bp, Homo sapiens
gatacctttgaatgg

SEQ ID NO: 1757438 - DNA, 15 bp, Homo sapiens
atacctttgaatggt

SEQ ID NO: 1757439 - DNA, 15 bp, Homo sapiens
tacctttgaatggta

SEQ ID NO: 1757440 - DNA, 15 bp, Homo sapiens
acctttgaatggtat

SEQ ID NO: 1757441 - DNA, 15 bp, Homo sapiens
cctttgaatggtatt

SEQ ID NO: 1757442 - DNA, 15 bp, Homo sapiens
ctttgaatggtatta

SEQ ID NO: 1757443 - DNA, 15 bp, Homo sapiens
tttgaatggtattaa

SEQ ID NO: 1757444 - DNA, 15 bp, Homo sapiens
ttgaatggtattaac

SEQ ID NO: 1757445 - DNA, 15 bp, Homo sapiens
tgaatggtattaacc

SEQ ID NO: 1757446 - DNA, 15 bp, Homo sapiens
gaatggtattaacca

SEQ ID NO: 1757447 - DNA, 15 bp, Homo sapiens
aatggtattaaccat

SEQ ID NO: 1757448 - DNA, 15 bp, Homo sapiens
atggtattaaccatc

SEQ ID NO: 1757449 - DNA, 15 bp, Homo sapiens
tggtattaaccatct

SEQ ID NO: 1757450 - DNA, 15 bp, Homo sapiens
ggtattaaccatctg

SEQ ID NO: 1757451 - DNA, 15 bp, Homo sapiens
gtattaaccatctgc

SEQ ID NO: 1757452 - DNA, 15 bp, Homo sapiens
tattaaccatctgca

SEQ ID NO: 1757453 - DNA, 15 bp, Homo sapiens
attaaccatctgcag

SEQ ID NO: 1757454 - DNA, 15 bp, Homo sapiens
ttaaccatctgcaga

SEQ ID NO: 1757455 - DNA, 15 bp, Homo sapiens
taaccatctgcagat

SEQ ID NO: 1757456 - DNA, 15 bp, Homo sapiens
aaccatctgcagatc

SEQ ID NO: 1757457 - DNA, 15 bp, Homo sapiens
accatctgcagatct

SEQ ID NO: 1757458 - DNA, 15 bp, Homo sapiens
ccatctgcagatctc

SEQ ID NO: 1757459 - DNA, 15 bp, Homo sapiens
catctgcagatctca

SEQ ID NO: 1757460 - DNA, 15 bp, Homo sapiens
atctgcagatctcaa

SEQ ID NO: 1757461 - DNA, 15 bp, Homo sapiens
tctgcagatctcaat

SEQ ID NO: 1757462 - DNA, 15 bp, Homo sapiens
ctgcagatctcaatt

SEQ ID NO: 1757463 - DNA, 15 bp, Homo sapiens
tgcagatctcaattc

SEQ ID NO: 1757464 - DNA, 15 bp, Homo sapiens
gcagatctcaattcc

SEQ ID NO: 1757465 - DNA, 15 bp, Homo sapiens
cagatctcaattcct

SEQ ID NO: 1757466 - DNA, 15 bp, Homo sapiens
agatctcaattcctc

SEQ ID NO: 1757467 - DNA, 15 bp, Homo sapiens
gatctcaattcctcc

SEQ ID NO: 1757468 - DNA, 15 bp, Homo sapiens
atctcaattcctcct

SEQ ID NO: 1757469 - DNA, 15 bp, Homo sapiens
tctcaattcctccta

SEQ ID NO: 1757470 - DNA, 15 bp, Homo sapiens
ctcaattcctcctat

SEQ ID NO: 1757471 - DNA, 15 bp, Homo sapiens
tcaattcctcctatt

SEQ ID NO: 1757472 - DNA, 15 bp, Homo sapiens
caattcctcctattt

SEQ ID NO: 1757473 - DNA, 15 bp, Homo sapiens
aattcctcctatttt

SEQ ID NO: 1757474 - DNA, 15 bp, Homo sapiens
attcctcctattttg

SEQ ID NO: 1757475 - DNA, 15 bp, Homo sapiens
ttcctcctattttga

SEQ ID NO: 1757476 - DNA, 15 bp, Homo sapiens
tcctcctattttgac

SEQ ID NO: 1757477 - DNA, 15 bp, Homo sapiens
cctcctattttgaca

SEQ ID NO: 1757478 - DNA, 15 bp, Homo sapiens
ctcctattttgacaa

SEQ ID NO: 1757479 - DNA, 15 bp, Homo sapiens
tcctattttgacaat

SEQ ID NO: 1757480 - DNA, 15 bp, Homo sapiens
cctattttgacaatt

SEQ ID NO: 1757481 - DNA, 15 bp, Homo sapiens
ctattttgacaattc

SEQ ID NO: 1757482 - DNA, 15 bp, Homo sapiens
tattttgacaattca

SEQ ID NO: 1757483 - DNA, 15 bp, Homo sapiens
attttgacaattcaa

SEQ ID NO: 1757484 - DNA, 15 bp, Homo sapiens
ttttgacaattcaat

SEQ ID NO: 1757485 - DNA, 15 bp, Homo sapiens
tttgacaattcaatc

SEQ ID NO: 1757486 - DNA, 15 bp, Homo sapiens
ttgacaattcaatca

SEQ ID NO: 1757487 - DNA, 15 bp, Homo sapiens
tgacaattcaatcat

SEQ ID NO: 1757488 - DNA, 15 bp, Homo sapiens
gacaattcaatcatt

SEQ ID NO: 1757489 - DNA, 15 bp, Homo sapiens
acaattcaatcattt

SEQ ID NO: 1757490 - DNA, 15 bp, Homo sapiens
caattcaatcattta

SEQ ID NO: 1757491 - DNA, 15 bp, Homo sapiens
aattcaatcatttaa

SEQ ID NO: 1757492 - DNA, 15 bp, Homo sapiens
attcaatcatttaaa

SEQ ID NO: 1757493 - DNA, 15 bp, Homo sapiens
ttcaatcatttaaac

SEQ ID NO: 1757494 - DNA, 15 bp, Homo sapiens
tcaatcatttaaacc

SEQ ID NO: 1757495 - DNA, 15 bp, Homo sapiens
caatcatttaaacca

SEQ ID NO: 1757496 - DNA, 15 bp, Homo sapiens
aatcatttaaaccat

SEQ ID NO: 1757497 - DNA, 15 bp, Homo sapiens
atcatttaaaccatt

SEQ ID NO: 1757498 - DNA, 15 bp, Homo sapiens
tcatttaaaccattg

SEQ ID NO: 1757499 - DNA, 15 bp, Homo sapiens
catttaaaccattga

SEQ ID NO: 1757500 - DNA, 15 bp, Homo sapiens
atttaaaccattgag

SEQ ID NO: 1757501 - DNA, 15 bp, Homo sapiens
tttaaaccattgagg

SEQ ID NO: 1757502 - DNA, 15 bp, Homo sapiens
ttaaaccattgaggc

SEQ ID NO: 1757503 - DNA, 15 bp, Homo sapiens
taaaccattgaggcc

SEQ ID NO: 1757504 - DNA, 15 bp, Homo sapiens
aaaccattgaggccc

SEQ ID NO: 1757505 - DNA, 15 bp, Homo sapiens
aaccattgaggccca

SEQ ID NO: 1757506 - DNA, 15 bp, Homo sapiens
accattgaggcccaa

SEQ ID NO: 1757507 - DNA, 15 bp, Homo sapiens
ccattgaggcccaaa

SEQ ID NO: 1757508 - DNA, 15 bp, Homo sapiens
cattgaggcccaaac

SEQ ID NO: 1757509 - DNA, 15 bp, Homo sapiens
attgaggcccaaaca

SEQ ID NO: 1757510 - DNA, 15 bp, Homo sapiens
ttgaggcccaaacaa

SEQ ID NO: 1757511 - DNA, 15 bp, Homo sapiens
tgaggcccaaacaaa

SEQ ID NO: 1757512 - DNA, 15 bp, Homo sapiens
gaggcccaaacaaag

SEQ ID NO: 1757513 - DNA, 15 bp, Homo sapiens
aggcccaaacaaaga

SEQ ID NO: 1757514 - DNA, 15 bp, Homo sapiens
ggcccaaacaaagaa

SEQ ID NO: 1757515 - DNA, 15 bp, Homo sapiens
gcccaaacaaagaag

SEQ ID NO: 1757516 - DNA, 15 bp, Homo sapiens
cccaaacaaagaagc

SEQ ID NO: 1757517 - DNA, 15 bp, Homo sapiens
ccaaacaaagaagca

SEQ ID NO: 1757518 - DNA, 15 bp, Homo sapiens
caaacaaagaagcaa

SEQ ID NO: 1757519 - DNA, 15 bp, Homo sapiens
aaacaaagaagcaac

SEQ ID NO: 1757520 - DNA, 15 bp, Homo sapiens
aacaaagaagcaaca

SEQ ID NO: 1757521 - DNA, 15 bp, Homo sapiens
acaaagaagcaacag

SEQ ID NO: 1757522 - DNA, 15 bp, Homo sapiens
caaagaagcaacagg

SEQ ID NO: 1757523 - DNA, 15 bp, Homo sapiens
aaagaagcaacagga

SEQ ID NO: 1757524 - DNA, 15 bp, Homo sapiens
aagaagcaacaggaa

SEQ ID NO: 1757525 - DNA, 15 bp, Homo sapiens
agaagcaacaggaag

SEQ ID NO: 1757526 - DNA, 15 bp, Homo sapiens
gaagcaacaggaagt

SEQ ID NO: 1757527 - DNA, 15 bp, Homo sapiens
aagcaacaggaagtc

SEQ ID NO: 1757528 - DNA, 15 bp, Homo sapiens
agcaacaggaagtcc

SEQ ID NO: 1757529 - DNA, 15 bp, Homo sapiens
gcaacaggaagtccc

SEQ ID NO: 1757530 - DNA, 15 bp, Homo sapiens
caacaggaagtcccc

SEQ ID NO: 1757531 - DNA, 15 bp, Homo sapiens
aacaggaagtccccc

SEQ ID NO: 1757532 - DNA, 15 bp, Homo sapiens
acaggaagtccccca

SEQ ID NO: 1757533 - DNA, 15 bp, Homo sapiens
caggaagtcccccat

SEQ ID NO: 1757534 - DNA, 15 bp, Homo sapiens
aggaagtcccccatc

SEQ ID NO: 1757535 - DNA, 15 bp, Homo sapiens
ggaagtcccccatca

SEQ ID NO: 1757536 - DNA, 15 bp, Homo sapiens
gaagtcccccatcat

SEQ ID NO: 1757537 - DNA, 15 bp, Homo sapiens
aagtcccccatcatt

SEQ ID NO: 1757538 - DNA, 15 bp, Homo sapiens
agtcccccatcattt

SEQ ID NO: 1757539 - DNA, 15 bp, Homo sapiens
gtcccccatcatttc

SEQ ID NO: 1757540 - DNA, 15 bp, Homo sapiens
tcccccatcatttct

SEQ ID NO: 1757541 - DNA, 15 bp, Homo sapiens
cccccatcatttctt

SEQ ID NO: 1757542 - DNA, 15 bp, Homo sapiens
ccccatcatttcttt

SEQ ID NO: 1757543 - DNA, 15 bp, Homo sapiens
cccatcatttctttt

SEQ ID NO: 1757544 - DNA, 15 bp, Homo sapiens
ccatcatttcttttt

SEQ ID NO: 1757545 - DNA, 15 bp, Homo sapiens
catcatttctttttc

SEQ ID NO: 1757546 - DNA, 15 bp, Homo sapiens
atcatttctttttct

SEQ ID NO: 1757547 - DNA, 15 bp, Homo sapiens
tcatttctttttctt

SEQ ID NO: 1757548 - DNA, 15 bp, Homo sapiens
catttctttttcttt

SEQ ID NO: 1757549 - DNA, 15 bp, Homo sapiens
atttctttttctttg

SEQ ID NO: 1757550 - DNA, 15 bp, Homo sapiens
tttctttttctttgg

SEQ ID NO: 1757551 - DNA, 15 bp, Homo sapiens
ttctttttctttgga

SEQ ID NO: 1757552 - DNA, 15 bp, Homo sapiens
tctttttctttggat

SEQ ID NO: 1757553 - DNA, 15 bp, Homo sapiens
ctttttctttggatt

SEQ ID NO: 1757554 - DNA, 15 bp, Homo sapiens
tttttctttggattg

SEQ ID NO: 1757555 - DNA, 15 bp, Homo sapiens
ttttctttggattgg

SEQ ID NO: 1757556 - DNA, 15 bp, Homo sapiens
tttctttggattggg

SEQ ID NO: 1757557 - DNA, 15 bp, Homo sapiens
ttctttggattgggt

SEQ ID NO: 1757558 - DNA, 15 bp, Homo sapiens
tctttggattgggtc

SEQ ID NO: 1757559 - DNA, 15 bp, Homo sapiens
ctttggattgggtct

SEQ ID NO: 1757560 - DNA, 15 bp, Homo sapiens
tttggattgggtctc

SEQ ID NO: 1757561 - DNA, 15 bp, Homo sapiens
ttggattgggtctcg

SEQ ID NO: 1757562 - DNA, 15 bp, Homo sapiens
tggattgggtctcgc

SEQ ID NO: 1757563 - DNA, 15 bp, Homo sapiens
ggattgggtctcgct

SEQ ID NO: 1757564 - DNA, 15 bp, Homo sapiens
gattgggtctcgctc

SEQ ID NO: 1757565 - DNA, 15 bp, Homo sapiens
attgggtctcgctct

SEQ ID NO: 1757566 - DNA, 15 bp, Homo sapiens
ttgggtctcgctcta

SEQ ID NO: 1757567 - DNA, 15 bp, Homo sapiens
tgggtctcgctctat

SEQ ID NO: 1757568 - DNA, 15 bp, Homo sapiens
gggtctcgctctatc

SEQ ID NO: 1757569 - DNA, 15 bp, Homo sapiens
ggtctcgctctatca

SEQ ID NO: 1757570 - DNA, 15 bp, Homo sapiens
gtctcgctctatcac

SEQ ID NO: 1757571 - DNA, 15 bp, Homo sapiens
tctcgctctatcacc

SEQ ID NO: 1757572 - DNA, 15 bp, Homo sapiens
ctcgctctatcaccc

SEQ ID NO: 1757573 - DNA, 15 bp, Homo sapiens
tcgctctatcaccca

SEQ ID NO: 1757574 - DNA, 15 bp, Homo sapiens
cgctctatcacccag

SEQ ID NO: 1757575 - DNA, 15 bp, Homo sapiens
gctctatcacccagg

SEQ ID NO: 1757576 - DNA, 15 bp, Homo sapiens
ctctatcacccagga

SEQ ID NO: 1757577 - DNA, 15 bp, Homo sapiens
tctatcacccaggat

SEQ ID NO: 1757578 - DNA, 15 bp, Homo sapiens
ctatcacccaggatg

SEQ ID NO: 1757579 - DNA, 15 bp, Homo sapiens
tatcacccaggatgg

SEQ ID NO: 1757580 - DNA, 15 bp, Homo sapiens
atcacccaggatgga

SEQ ID NO: 1757581 - DNA, 15 bp, Homo sapiens
tcacccaggatggag

SEQ ID NO: 1757582 - DNA, 15 bp, Homo sapiens
cacccaggatggagt

SEQ ID NO: 1757583 - DNA, 15 bp, Homo sapiens
acccaggatggagtg

SEQ ID NO: 1757584 - DNA, 15 bp, Homo sapiens
atggagtgcagtgac

SEQ ID NO: 1757585 - DNA, 15 bp, Homo sapiens
tggagtgcagtgaca

SEQ ID NO: 1757586 - DNA, 15 bp, Homo sapiens
ggagtgcagtgacat

SEQ ID NO: 1757587 - DNA, 15 bp, Homo sapiens
gagtgcagtgacatg

SEQ ID NO: 1757588 - DNA, 15 bp, Homo sapiens
agtgcagtgacatga

SEQ ID NO: 1757589 - DNA, 15 bp, Homo sapiens
gtgcagtgacatgat

SEQ ID NO: 1757590 - DNA, 15 bp, Homo sapiens
tgcagtgacatgatc

SEQ ID NO: 1757591 - DNA, 15 bp, Homo sapiens
gcagtgacatgatca

SEQ ID NO: 1757592 - DNA, 15 bp, Homo sapiens
cagtgacatgatcac

SEQ ID NO: 1757593 - DNA, 15 bp, Homo sapiens
agtgacatgatcaca

SEQ ID NO: 1757594 - DNA, 15 bp, Homo sapiens
gtgacatgatcacag

SEQ ID NO: 1757595 - DNA, 15 bp, Homo sapiens
tgacatgatcacagc

SEQ ID NO: 1757596 - DNA, 15 bp, Homo sapiens
gacatgatcacagct

SEQ ID NO: 1757597 - DNA, 15 bp, Homo sapiens
acatgatcacagctc

SEQ ID NO: 1757598 - DNA, 15 bp, Homo sapiens
catgatcacagctca

SEQ ID NO: 1757599 - DNA, 15 bp, Homo sapiens
atgatcacagctcac

SEQ ID NO: 1757600 - DNA, 15 bp, Homo sapiens
cacagctcactgcat

SEQ ID NO: 1757601 - DNA, 15 bp, Homo sapiens
acagctcactgcatc

SEQ ID NO: 1757602 - DNA, 15 bp, Homo sapiens
cagctcactgcatcc

SEQ ID NO: 1757603 - DNA, 15 bp, Homo sapiens
agctcactgcatcct

SEQ ID NO: 1757604 - DNA, 15 bp, Homo sapiens
gctcactgcatcctc

SEQ ID NO: 1757605 - DNA, 15 bp, Homo sapiens
ctcactgcatcctca

SEQ ID NO: 1757606 - DNA, 15 bp, Homo sapiens
tcactgcatcctcaa

SEQ ID NO: 1757607 - DNA, 15 bp, Homo sapiens
cactgcatcctcaac

SEQ ID NO: 1757608 - DNA, 15 bp, Homo sapiens
actgcatcctcaacc

SEQ ID NO: 1757609 - DNA, 15 bp, Homo sapiens
ctgcatcctcaacct

SEQ ID NO: 1757610 - DNA, 15 bp, Homo sapiens
tgcatcctcaacctc

SEQ ID NO: 1757611 - DNA, 15 bp, Homo sapiens
gcatcctcaacctct

SEQ ID NO: 1757612 - DNA, 15 bp, Homo sapiens
catcctcaacctctc

SEQ ID NO: 1757613 - DNA, 15 bp, Homo sapiens
atcctcaacctctca

SEQ ID NO: 1757614 - DNA, 15 bp, Homo sapiens
tcctcaacctctcag

SEQ ID NO: 1757615 - DNA, 15 bp, Homo sapiens
cctcaacctctcagg

SEQ ID NO: 1757616 - DNA, 15 bp, Homo sapiens
ctcaacctctcaggc

SEQ ID NO: 1757617 - DNA, 15 bp, Homo sapiens
tcaacctctcaggct

SEQ ID NO: 1757618 - DNA, 15 bp, Homo sapiens
caacctctcaggctc

SEQ ID NO: 1757619 - DNA, 15 bp, Homo sapiens
aacctctcaggctca

SEQ ID NO: 1757620 - DNA, 15 bp, Homo sapiens
ctctcaggctcaagc

SEQ ID NO: 1757621 - DNA, 15 bp, Homo sapiens
tctcaggctcaagca

SEQ ID NO: 1757622 - DNA, 15 bp, Homo sapiens
ctcaggctcaagcaa

SEQ ID NO: 1757623 - DNA, 15 bp, Homo sapiens
tcaggctcaagcaat

SEQ ID NO: 1757624 - DNA, 15 bp, Homo sapiens
aggctcaagcaatcc

SEQ ID NO: 1757625 - DNA, 15 bp, Homo sapiens
cacctcagcctcccc

SEQ ID NO: 1757626 - DNA, 15 bp, Homo sapiens
acctcagcctcccca

SEQ ID NO: 1757627 - DNA, 15 bp, Homo sapiens
cctcagcctccccac

SEQ ID NO: 1757628 - DNA, 15 bp, Homo sapiens
ctcagcctccccacc

SEQ ID NO: 1757629 - DNA, 15 bp, Homo sapiens
tcagcctccccacca

SEQ ID NO: 1757630 - DNA, 15 bp, Homo sapiens
cagcctccccaccac

SEQ ID NO: 1757631 - DNA, 15 bp, Homo sapiens
agcctccccaccaca

SEQ ID NO: 1757632 - DNA, 15 bp, Homo sapiens
gcctccccaccacac

SEQ ID NO: 1757633 - DNA, 15 bp, Homo sapiens
cctccccaccacacc

SEQ ID NO: 1757634 - DNA, 15 bp, Homo sapiens
ctccccaccacaccc

SEQ ID NO: 1757635 - DNA, 15 bp, Homo sapiens
tccccaccacaccca

SEQ ID NO: 1757636 - DNA, 15 bp, Homo sapiens
ccccaccacacccag

SEQ ID NO: 1757637 - DNA, 15 bp, Homo sapiens
cccaccacacccagc

SEQ ID NO: 1757638 - DNA, 15 bp, Homo sapiens
ttgtattttttgtag

SEQ ID NO: 1757639 - DNA, 15 bp, Homo sapiens
tgtattttttgtaga

SEQ ID NO: 1757640 - DNA, 15 bp, Homo sapiens
gtattttttgtagag

SEQ ID NO: 1757641 - DNA, 15 bp, Homo sapiens
tcaccatgttggtct

SEQ ID NO: 1757642 - DNA, 15 bp, Homo sapiens
caccatgttggtctc

SEQ ID NO: 1757643 - DNA, 15 bp, Homo sapiens
accatgttggtctca

SEQ ID NO: 1757644 - DNA, 15 bp, Homo sapiens
ccatgttggtctcaa

SEQ ID NO: 1757645 - DNA, 15 bp, Homo sapiens
catgttggtctcaaa

SEQ ID NO: 1757646 - DNA, 15 bp, Homo sapiens
atgttggtctcaaac

SEQ ID NO: 1757647 - DNA, 15 bp, Homo sapiens
tgttggtctcaaact

SEQ ID NO: 1757648 - DNA, 15 bp, Homo sapiens
gttggtctcaaactc

SEQ ID NO: 1757649 - DNA, 15 bp, Homo sapiens
ttggtctcaaactcc

SEQ ID NO: 1757650 - DNA, 15 bp, Homo sapiens
ggctcaagtgatcca

SEQ ID NO: 1757651 - DNA, 15 bp, Homo sapiens
gctcaagtgatccac

SEQ ID NO: 1757652 - DNA, 15 bp, Homo sapiens
ccacccacctcagca

SEQ ID NO: 1757653 - DNA, 15 bp, Homo sapiens
cacccacctcagcat

SEQ ID NO: 1757654 - DNA, 15 bp, Homo sapiens
acccacctcagcatc

SEQ ID NO: 1757655 - DNA, 15 bp, Homo sapiens
cccacctcagcatcc

SEQ ID NO: 1757656 - DNA, 15 bp, Homo sapiens
ccacctcagcatccc

SEQ ID NO: 1757657 - DNA, 15 bp, Homo sapiens
cacctcagcatccca

SEQ ID NO: 1757658 - DNA, 15 bp, Homo sapiens
acctcagcatcccaa

SEQ ID NO: 1757659 - DNA, 15 bp, Homo sapiens
atcccaaagtgctgt

SEQ ID NO: 1757660 - DNA, 15 bp, Homo sapiens
tcccaaagtgctgtg

SEQ ID NO: 1757661 - DNA, 15 bp, Homo sapiens
cccaaagtgctgtga

SEQ ID NO: 1757662 - DNA, 15 bp, Homo sapiens
ccaaagtgctgtgat

SEQ ID NO: 1757663 - DNA, 15 bp, Homo sapiens
caaagtgctgtgatt

SEQ ID NO: 1757664 - DNA, 15 bp, Homo sapiens
aaagtgctgtgatta

SEQ ID NO: 1757665 - DNA, 15 bp, Homo sapiens
aagtgctgtgattac

SEQ ID NO: 1757666 - DNA, 15 bp, Homo sapiens
agtgctgtgattaca

SEQ ID NO: 1757667 - DNA, 15 bp, Homo sapiens
gtgctgtgattacaa

SEQ ID NO: 1757668 - DNA, 15 bp, Homo sapiens
tgctgtgattacaag

SEQ ID NO: 1757669 - DNA, 15 bp, Homo sapiens
gctgtgattacaagg

SEQ ID NO: 1757670 - DNA, 15 bp, Homo sapiens
ctgtgattacaaggg

SEQ ID NO: 1757671 - DNA, 15 bp, Homo sapiens
tgtgattacaagggt

SEQ ID NO: 1757672 - DNA, 15 bp, Homo sapiens
gtgattacaagggtg

SEQ ID NO: 1757673 - DNA, 15 bp, Homo sapiens
tgattacaagggtga

SEQ ID NO: 1757674 - DNA, 15 bp, Homo sapiens
gattacaagggtgaa

SEQ ID NO: 1757675 - DNA, 15 bp, Homo sapiens
attacaagggtgaac

SEQ ID NO: 1757676 - DNA, 15 bp, Homo sapiens
ttacaagggtgaacc

SEQ ID NO: 1757677 - DNA, 15 bp, Homo sapiens
tacaagggtgaacca

SEQ ID NO: 1757678 - DNA, 15 bp, Homo sapiens
acaagggtgaaccac

SEQ ID NO: 1757679 - DNA, 15 bp, Homo sapiens
caagggtgaaccacc

SEQ ID NO: 1757680 - DNA, 15 bp, Homo sapiens
aagggtgaaccacct

SEQ ID NO: 1757681 - DNA, 15 bp, Homo sapiens
agggtgaaccacctc

SEQ ID NO: 1757682 - DNA, 15 bp, Homo sapiens
gggtgaaccacctcg

SEQ ID NO: 1757683 - DNA, 15 bp, Homo sapiens
ggtgaaccacctcgt

SEQ ID NO: 1757684 - DNA, 15 bp, Homo sapiens
gtgaaccacctcgtc

SEQ ID NO: 1757685 - DNA, 15 bp, Homo sapiens
tgaaccacctcgtct

SEQ ID NO: 1757686 - DNA, 15 bp, Homo sapiens
gaaccacctcgtctg

SEQ ID NO: 1757687 - DNA, 15 bp, Homo sapiens
aaccacctcgtctga

SEQ ID NO: 1757688 - DNA, 15 bp, Homo sapiens
accacctcgtctgac

SEQ ID NO: 1757689 - DNA, 15 bp, Homo sapiens
ccacctcgtctgacc

SEQ ID NO: 1757690 - DNA, 15 bp, Homo sapiens
cacctcgtctgacct

SEQ ID NO: 1757691 - DNA, 15 bp, Homo sapiens
acctcgtctgacctc

SEQ ID NO: 1757692 - DNA, 15 bp, Homo sapiens
cctcgtctgacctcc

SEQ ID NO: 1757693 - DNA, 15 bp, Homo sapiens
ctcgtctgacctcca

SEQ ID NO: 1757694 - DNA, 15 bp, Homo sapiens
tcgtctgacctccat

SEQ ID NO: 1757695 - DNA, 15 bp, Homo sapiens
cgtctgacctccatt

SEQ ID NO: 1757696 - DNA, 15 bp, Homo sapiens
gtctgacctccattt

SEQ ID NO: 1757697 - DNA, 15 bp, Homo sapiens
tctgacctccatttt

SEQ ID NO: 1757698 - DNA, 15 bp, Homo sapiens
ctgacctccattttt

SEQ ID NO: 1757699 - DNA, 15 bp, Homo sapiens
tgacctccatttttt

SEQ ID NO: 1757700 - DNA, 15 bp, Homo sapiens
gacctccatttttta

SEQ ID NO: 1757701 - DNA, 15 bp, Homo sapiens
acctccattttttac

SEQ ID NO: 1757702 - DNA, 15 bp, Homo sapiens
cctccattttttact

SEQ ID NO: 1757703 - DNA, 15 bp, Homo sapiens
ctccattttttactg

SEQ ID NO: 1757704 - DNA, 15 bp, Homo sapiens
tccattttttactgc

SEQ ID NO: 1757705 - DNA, 15 bp, Homo sapiens
ccattttttactgca

SEQ ID NO: 1757706 - DNA, 15 bp, Homo sapiens
cattttttactgcat

SEQ ID NO: 1757707 - DNA, 15 bp, Homo sapiens
attttttactgcatt

SEQ ID NO: 1757708 - DNA, 15 bp, Homo sapiens
ttttttactgcattc

SEQ ID NO: 1757709 - DNA, 15 bp, Homo sapiens
tttttactgcattca

SEQ ID NO: 1757710 - DNA, 15 bp, Homo sapiens
ttttactgcattcaa

SEQ ID NO: 1757711 - DNA, 15 bp, Homo sapiens
tttactgcattcaat

SEQ ID NO: 1757712 - DNA, 15 bp, Homo sapiens
ttactgcattcaatt

SEQ ID NO: 1757713 - DNA, 15 bp, Homo sapiens
tactgcattcaattt

SEQ ID NO: 1757714 - DNA, 15 bp, Homo sapiens
actgcattcaatttt

SEQ ID NO: 1757715 - DNA, 15 bp, Homo sapiens
ctgcattcaattttt

SEQ ID NO: 1757716 - DNA, 15 bp, Homo sapiens
tgcattcaatttttc

SEQ ID NO: 1757717 - DNA, 15 bp, Homo sapiens
gcattcaatttttct

SEQ ID NO: 1757718 - DNA, 15 bp, Homo sapiens
cattcaatttttctt

SEQ ID NO: 1757719 - DNA, 15 bp, Homo sapiens
attcaatttttctta

SEQ ID NO: 1757720 - DNA, 15 bp, Homo sapiens
ttcaatttttcttac

SEQ ID NO: 1757721 - DNA, 15 bp, Homo sapiens
tcaatttttcttaca

SEQ ID NO: 1757722 - DNA, 15 bp, Homo sapiens
caatttttcttacat

SEQ ID NO: 1757723 - DNA, 15 bp, Homo sapiens
aatttttcttacatt

SEQ ID NO: 1757724 - DNA, 15 bp, Homo sapiens
atttttcttacattt

SEQ ID NO: 1757725 - DNA, 15 bp, Homo sapiens
tttttcttacatttc

SEQ ID NO: 1757726 - DNA, 15 bp, Homo sapiens
ttttcttacatttct

SEQ ID NO: 1757727 - DNA, 15 bp, Homo sapiens
tttcttacatttctg

SEQ ID NO: 1757728 - DNA, 15 bp, Homo sapiens
ttcttacatttctgt

SEQ ID NO: 1757729 - DNA, 15 bp, Homo sapiens
tcttacatttctgtc

SEQ ID NO: 1757730 - DNA, 15 bp, Homo sapiens
cttacatttctgtca

SEQ ID NO: 1757731 - DNA, 15 bp, Homo sapiens
ttacatttctgtcag

SEQ ID NO: 1757732 - DNA, 15 bp, Homo sapiens
tacatttctgtcagg

SEQ ID NO: 1757733 - DNA, 15 bp, Homo sapiens
acatttctgtcaggc

SEQ ID NO: 1757734 - DNA, 15 bp, Homo sapiens
catttctgtcaggca

SEQ ID NO: 1757735 - DNA, 15 bp, Homo sapiens
atttctgtcaggcag

SEQ ID NO: 1757736 - DNA, 15 bp, Homo sapiens
tttctgtcaggcagg

SEQ ID NO: 1757737 - DNA, 15 bp, Homo sapiens
ttctgtcaggcagga

SEQ ID NO: 1757738 - DNA, 15 bp, Homo sapiens
tctgtcaggcaggaa

SEQ ID NO: 1757739 - DNA, 15 bp, Homo sapiens
ctgtcaggcaggaac

SEQ ID NO: 1757740 - DNA, 15 bp, Homo sapiens
tgtcaggcaggaaca

SEQ ID NO: 1757741 - DNA, 15 bp, Homo sapiens
gtcaggcaggaacaa

SEQ ID NO: 1757742 - DNA, 15 bp, Homo sapiens
tcaggcaggaacaag

SEQ ID NO: 1757743 - DNA, 15 bp, Homo sapiens
caggcaggaacaagt

SEQ ID NO: 1757744 - DNA, 15 bp, Homo sapiens
aggcaggaacaagta

SEQ ID NO: 1757745 - DNA, 15 bp, Homo sapiens
ggcaggaacaagtac

SEQ ID NO: 1757746 - DNA, 15 bp, Homo sapiens
gcaggaacaagtaca

SEQ ID NO: 1757747 - DNA, 15 bp, Homo sapiens
caggaacaagtacac

SEQ ID NO: 1757748 - DNA, 15 bp, Homo sapiens
aggaacaagtacact

SEQ ID NO: 1757749 - DNA, 15 bp, Homo sapiens
ggaacaagtacactt

SEQ ID NO: 1757750 - DNA, 15 bp, Homo sapiens
gaacaagtacacttt

SEQ ID NO: 1757751 - DNA, 15 bp, Homo sapiens
aacaagtacactttc

SEQ ID NO: 1757752 - DNA, 15 bp, Homo sapiens
acaagtacactttca

SEQ ID NO: 1757753 - DNA, 15 bp, Homo sapiens
caagtacactttcat

SEQ ID NO: 1757754 - DNA, 15 bp, Homo sapiens
aagtacactttcatt

SEQ ID NO: 1757755 - DNA, 15 bp, Homo sapiens
agtacactttcatta

SEQ ID NO: 1757756 - DNA, 15 bp, Homo sapiens
gtacactttcattaa

SEQ ID NO: 1757757 - DNA, 15 bp, Homo sapiens
tacactttcattaac

SEQ ID NO: 1757758 - DNA, 15 bp, Homo sapiens
acactttcattaaca

SEQ ID NO: 1757759 - DNA, 15 bp, Homo sapiens
cactttcattaacaa

SEQ ID NO: 1757760 - DNA, 15 bp, Homo sapiens
actttcattaacaag

SEQ ID NO: 1757761 - DNA, 15 bp, Homo sapiens
ctttcattaacaagt

SEQ ID NO: 1757762 - DNA, 15 bp, Homo sapiens
tttcattaacaagtt

SEQ ID NO: 1757763 - DNA, 15 bp, Homo sapiens
ttcattaacaagttc

SEQ ID NO: 1757764 - DNA, 15 bp, Homo sapiens
tcattaacaagttcc

SEQ ID NO: 1757765 - DNA, 15 bp, Homo sapiens
cattaacaagttccc

SEQ ID NO: 1757766 - DNA, 15 bp, Homo sapiens
attaacaagttccca

SEQ ID NO: 1757767 - DNA, 15 bp, Homo sapiens
ttaacaagttcccat

SEQ ID NO: 1757768 - DNA, 15 bp, Homo sapiens
taacaagttcccata

SEQ ID NO: 1757769 - DNA, 15 bp, Homo sapiens
aacaagttcccatag

SEQ ID NO: 1757770 - DNA, 15 bp, Homo sapiens
acaagttcccataga

SEQ ID NO: 1757771 - DNA, 15 bp, Homo sapiens
caagttcccatagac

SEQ ID NO: 1757772 - DNA, 15 bp, Homo sapiens
aagttcccatagact

SEQ ID NO: 1757773 - DNA, 15 bp, Homo sapiens
agttcccatagactt

SEQ ID NO: 1757774 - DNA, 15 bp, Homo sapiens
gttcccatagacttt

SEQ ID NO: 1757775 - DNA, 15 bp, Homo sapiens
ttcccatagactttc

SEQ ID NO: 1757776 - DNA, 15 bp, Homo sapiens
tcccatagactttcc

SEQ ID NO: 1757777 - DNA, 15 bp, Homo sapiens
cccatagactttcct

SEQ ID NO: 1757778 - DNA, 15 bp, Homo sapiens
ccatagactttcctc

SEQ ID NO: 1757779 - DNA, 15 bp, Homo sapiens
catagactttcctcc

SEQ ID NO: 1757780 - DNA, 15 bp, Homo sapiens
atagactttcctcct

SEQ ID NO: 1757781 - DNA, 15 bp, Homo sapiens
tagactttcctcctc

SEQ ID NO: 1757782 - DNA, 15 bp, Homo sapiens
agactttcctcctca

SEQ ID NO: 1757783 - DNA, 15 bp, Homo sapiens
gactttcctcctcaa

SEQ ID NO: 1757784 - DNA, 15 bp, Homo sapiens
actttcctcctcaag

SEQ ID NO: 1757785 - DNA, 15 bp, Homo sapiens
ctttcctcctcaagc

SEQ ID NO: 1757786 - DNA, 15 bp, Homo sapiens
tttcctcctcaagct

SEQ ID NO: 1757787 - DNA, 15 bp, Homo sapiens
ttcctcctcaagcta

SEQ ID NO: 1757788 - DNA, 15 bp, Homo sapiens
tcctcctcaagctac

SEQ ID NO: 1757789 - DNA, 15 bp, Homo sapiens
cctcctcaagctacc

SEQ ID NO: 1757790 - DNA, 15 bp, Homo sapiens
ctcctcaagctacca

SEQ ID NO: 1757791 - DNA, 15 bp, Homo sapiens
tcctcaagctaccat

SEQ ID NO: 1757792 - DNA, 15 bp, Homo sapiens
cctcaagctaccatt

SEQ ID NO: 1757793 - DNA, 15 bp, Homo sapiens
ctcaagctaccattc

SEQ ID NO: 1757794 - DNA, 15 bp, Homo sapiens
tcaagctaccattct

SEQ ID NO: 1757795 - DNA, 15 bp, Homo sapiens
caagctaccattctc

SEQ ID NO: 1757796 - DNA, 15 bp, Homo sapiens
aagctaccattctca

SEQ ID NO: 1757797 - DNA, 15 bp, Homo sapiens
agctaccattctcac

SEQ ID NO: 1757798 - DNA, 15 bp, Homo sapiens
gctaccattctcaca

SEQ ID NO: 1757799 - DNA, 15 bp, Homo sapiens
ctaccattctcacac

SEQ ID NO: 1757800 - DNA, 15 bp, Homo sapiens
taccattctcacact

SEQ ID NO: 1757801 - DNA, 15 bp, Homo sapiens
accattctcacacta

SEQ ID NO: 1757802 - DNA, 15 bp, Homo sapiens
ccattctcacactat

SEQ ID NO: 1757803 - DNA, 15 bp, Homo sapiens
cattctcacactata

SEQ ID NO: 1757804 - DNA, 15 bp, Homo sapiens
attctcacactatac

SEQ ID NO: 1757805 - DNA, 15 bp, Homo sapiens
ttctcacactataca

SEQ ID NO: 1757806 - DNA, 15 bp, Homo sapiens
tctcacactatacat

SEQ ID NO: 1757807 - DNA, 15 bp, Homo sapiens
ctcacactatacatt

SEQ ID NO: 1757808 - DNA, 15 bp, Homo sapiens
tcacactatacattc

SEQ ID NO: 1757809 - DNA, 15 bp, Homo sapiens
cacactatacattcc

SEQ ID NO: 1757810 - DNA, 15 bp, Homo sapiens
acactatacattcct

SEQ ID NO: 1757811 - DNA, 15 bp, Homo sapiens
cactatacattcctt

SEQ ID NO: 1757812 - DNA, 15 bp, Homo sapiens
actatacattccttc

SEQ ID NO: 1757813 - DNA, 15 bp, Homo sapiens
ctatacattccttca

SEQ ID NO: 1757814 - DNA, 15 bp, Homo sapiens
tatacattccttcaa

SEQ ID NO: 1757815 - DNA, 15 bp, Homo sapiens
atacattccttcaat

SEQ ID NO: 1757816 - DNA, 15 bp, Homo sapiens
tacattccttcaatc

SEQ ID NO: 1757817 - DNA, 15 bp, Homo sapiens
acattccttcaatca

SEQ ID NO: 1757818 - DNA, 15 bp, Homo sapiens
cattccttcaatcaa

SEQ ID NO: 1757819 - DNA, 15 bp, Homo sapiens
attccttcaatcaac

SEQ ID NO: 1757820 - DNA, 15 bp, Homo sapiens
ttccttcaatcaacc

SEQ ID NO: 1757821 - DNA, 15 bp, Homo sapiens
tccttcaatcaacca

SEQ ID NO: 1757822 - DNA, 15 bp, Homo sapiens
ccttcaatcaaccat

SEQ ID NO: 1757823 - DNA, 15 bp, Homo sapiens
cttcaatcaaccatg

SEQ ID NO: 1757824 - DNA, 15 bp, Homo sapiens
ttcaatcaaccatgc

SEQ ID NO: 1757825 - DNA, 15 bp, Homo sapiens
tcaatcaaccatgca

SEQ ID NO: 1757826 - DNA, 15 bp, Homo sapiens
caatcaaccatgcac

SEQ ID NO: 1757827 - DNA, 15 bp, Homo sapiens
aatcaaccatgcacc

SEQ ID NO: 1757828 - DNA, 15 bp, Homo sapiens
atcaaccatgcaccc

SEQ ID NO: 1757829 - DNA, 15 bp, Homo sapiens
tcaaccatgcaccca

SEQ ID NO: 1757830 - DNA, 15 bp, Homo sapiens
caaccatgcacccaa

SEQ ID NO: 1757831 - DNA, 15 bp, Homo sapiens
aaccatgcacccaac

SEQ ID NO: 1757832 - DNA, 15 bp, Homo sapiens
accatgcacccaaca

SEQ ID NO: 1757833 - DNA, 15 bp, Homo sapiens
ccatgcacccaacaa

SEQ ID NO: 1757834 - DNA, 15 bp, Homo sapiens
catgcacccaacaaa

SEQ ID NO: 1757835 - DNA, 15 bp, Homo sapiens
atgcacccaacaaac

SEQ ID NO: 1757836 - DNA, 15 bp, Homo sapiens
tgcacccaacaaaca

SEQ ID NO: 1757837 - DNA, 15 bp, Homo sapiens
gcacccaacaaacac

SEQ ID NO: 1757838 - DNA, 15 bp, Homo sapiens
cacccaacaaacact

SEQ ID NO: 1757839 - DNA, 15 bp, Homo sapiens
acccaacaaacactt

SEQ ID NO: 1757840 - DNA, 15 bp, Homo sapiens
cccaacaaacactta

SEQ ID NO: 1757841 - DNA, 15 bp, Homo sapiens
ccaacaaacacttat

SEQ ID NO: 1757842 - DNA, 15 bp, Homo sapiens
caacaaacacttatg

SEQ ID NO: 1757843 - DNA, 15 bp, Homo sapiens
aacaaacacttatgg

SEQ ID NO: 1757844 - DNA, 15 bp, Homo sapiens
acaaacacttatggg

SEQ ID NO: 1757845 - DNA, 15 bp, Homo sapiens
caaacacttatgggg

SEQ ID NO: 1757846 - DNA, 15 bp, Homo sapiens
aaacacttatgggga

SEQ ID NO: 1757847 - DNA, 15 bp, Homo sapiens
aacacttatggggag

SEQ ID NO: 1757848 - DNA, 15 bp, Homo sapiens
acacttatggggagc

SEQ ID NO: 1757849 - DNA, 15 bp, Homo sapiens
cacttatggggagcc

SEQ ID NO: 1757850 - DNA, 15 bp, Homo sapiens
acttatggggagccc

SEQ ID NO: 1757851 - DNA, 15 bp, Homo sapiens
cttatggggagccca

SEQ ID NO: 1757852 - DNA, 15 bp, Homo sapiens
ttatggggagcccag

SEQ ID NO: 1757853 - DNA, 15 bp, Homo sapiens
tatggggagcccaga

SEQ ID NO: 1757854 - DNA, 15 bp, Homo sapiens
atggggagcccagaa

SEQ ID NO: 1757855 - DNA, 15 bp, Homo sapiens
tggggagcccagaac

SEQ ID NO: 1757856 - DNA, 15 bp, Homo sapiens
ggggagcccagaaca

SEQ ID NO: 1757857 - DNA, 15 bp, Homo sapiens
gggagcccagaacac

SEQ ID NO: 1757858 - DNA, 15 bp, Homo sapiens
ggagcccagaacacc

SEQ ID NO: 1757859 - DNA, 15 bp, Homo sapiens
gagcccagaacaccc

SEQ ID NO: 1757860 - DNA, 15 bp, Homo sapiens
agcccagaacaccct

SEQ ID NO: 1757861 - DNA, 15 bp, Homo sapiens
gcccagaacaccctt

SEQ ID NO: 1757862 - DNA, 15 bp, Homo sapiens
cccagaacacccttc

SEQ ID NO: 1757863 - DNA, 15 bp, Homo sapiens
ccagaacacccttca

SEQ ID NO: 1757864 - DNA, 15 bp, Homo sapiens
cagaacacccttcag

SEQ ID NO: 1757865 - DNA, 15 bp, Homo sapiens
agaacacccttcagg

SEQ ID NO: 1757866 - DNA, 15 bp, Homo sapiens
gaacacccttcaggc

SEQ ID NO: 1757867 - DNA, 15 bp, Homo sapiens
aacacccttcaggct

SEQ ID NO: 1757868 - DNA, 15 bp, Homo sapiens
acacccttcaggctt

SEQ ID NO: 1757869 - DNA, 15 bp, Homo sapiens
cacccttcaggcttg

SEQ ID NO: 1757870 - DNA, 15 bp, Homo sapiens
acccttcaggcttgg

SEQ ID NO: 1757871 - DNA, 15 bp, Homo sapiens
cccttcaggcttgga

SEQ ID NO: 1757872 - DNA, 15 bp, Homo sapiens
ccttcaggcttggaa

SEQ ID NO: 1757873 - DNA, 15 bp, Homo sapiens
cttcaggcttggaat

SEQ ID NO: 1757874 - DNA, 15 bp, Homo sapiens
ttcaggcttggaatt

SEQ ID NO: 1757875 - DNA, 15 bp, Homo sapiens
tcaggcttggaattt

SEQ ID NO: 1757876 - DNA, 15 bp, Homo sapiens
caggcttggaatttg

SEQ ID NO: 1757877 - DNA, 15 bp, Homo sapiens
aggcttggaatttgg

SEQ ID NO: 1757878 - DNA, 15 bp, Homo sapiens
ggcttggaatttggg

SEQ ID NO: 1757879 - DNA, 15 bp, Homo sapiens
gcttggaatttggga

SEQ ID NO: 1757880 - DNA, 15 bp, Homo sapiens
cttggaatttgggat

SEQ ID NO: 1757881 - DNA, 15 bp, Homo sapiens
ttggaatttgggatg

SEQ ID NO: 1757882 - DNA, 15 bp, Homo sapiens
tggaatttgggatgt

SEQ ID NO: 1757883 - DNA, 15 bp, Homo sapiens
ggaatttgggatgtg

SEQ ID NO: 1757884 - DNA, 15 bp, Homo sapiens
gaatttgggatgtga

SEQ ID NO: 1757885 - DNA, 15 bp, Homo sapiens
aatttgggatgtgac

SEQ ID NO: 1757886 - DNA, 15 bp, Homo sapiens
atttgggatgtgaca

SEQ ID NO: 1757887 - DNA, 15 bp, Homo sapiens
tttgggatgtgacaa

SEQ ID NO: 1757888 - DNA, 15 bp, Homo sapiens
ttgggatgtgacaat

SEQ ID NO: 1757889 - DNA, 15 bp, Homo sapiens
tgggatgtgacaatg

SEQ ID NO: 1757890 - DNA, 15 bp, Homo sapiens
gggatgtgacaatga

SEQ ID NO: 1757891 - DNA, 15 bp, Homo sapiens
ggatgtgacaatgaa

SEQ ID NO: 1757892 - DNA, 15 bp, Homo sapiens
gatgtgacaatgaaa

SEQ ID NO: 1757893 - DNA, 15 bp, Homo sapiens
atgtgacaatgaaaa

SEQ ID NO: 1757894 - DNA, 15 bp, Homo sapiens
tgtgacaatgaaaag

SEQ ID NO: 1757895 - DNA, 15 bp, Homo sapiens
gtgacaatgaaaagg

SEQ ID NO: 1757896 - DNA, 15 bp, Homo sapiens
tgacaatgaaaaggc

SEQ ID NO: 1757897 - DNA, 15 bp, Homo sapiens
gacaatgaaaaggcc

SEQ ID NO: 1757898 - DNA, 15 bp, Homo sapiens
acaatgaaaaggccg

SEQ ID NO: 1757899 - DNA, 15 bp, Homo sapiens
caatgaaaaggccgt

SEQ ID NO: 1757900 - DNA, 15 bp, Homo sapiens
aatgaaaaggccgtt

SEQ ID NO: 1757901 - DNA, 15 bp, Homo sapiens
atgaaaaggccgttg

SEQ ID NO: 1757902 - DNA, 15 bp, Homo sapiens
tgaaaaggccgttga

SEQ ID NO: 1757903 - DNA, 15 bp, Homo sapiens
gaaaaggccgttgaa

SEQ ID NO: 1757904 - DNA, 15 bp, Homo sapiens
aaaaggccgttgaaa

SEQ ID NO: 1757905 - DNA, 15 bp, Homo sapiens
aaaggccgttgaaaa

SEQ ID NO: 1757906 - DNA, 15 bp, Homo sapiens
aaggccgttgaaaag

SEQ ID NO: 1757907 - DNA, 15 bp, Homo sapiens
aggccgttgaaaagc

SEQ ID NO: 1757908 - DNA, 15 bp, Homo sapiens
ggccgttgaaaagct

SEQ ID NO: 1757909 - DNA, 15 bp, Homo sapiens
gccgttgaaaagctt

SEQ ID NO: 1757910 - DNA, 15 bp, Homo sapiens
ccgttgaaaagctta

SEQ ID NO: 1757911 - DNA, 15 bp, Homo sapiens
cgttgaaaagcttag

SEQ ID NO: 1757912 - DNA, 15 bp, Homo sapiens
gttgaaaagcttaga

SEQ ID NO: 1757913 - DNA, 15 bp, Homo sapiens
ttgaaaagcttagat

SEQ ID NO: 1757914 - DNA, 15 bp, Homo sapiens
tgaaaagcttagatt

SEQ ID NO: 1757915 - DNA, 15 bp, Homo sapiens
gaaaagcttagattt

SEQ ID NO: 1757916 - DNA, 15 bp, Homo sapiens
aaaagcttagatttt

SEQ ID NO: 1757917 - DNA, 15 bp, Homo sapiens
aaagcttagattttg

SEQ ID NO: 1757918 - DNA, 15 bp, Homo sapiens
aagcttagattttgg

SEQ ID NO: 1757919 - DNA, 15 bp, Homo sapiens
agcttagattttggc

SEQ ID NO: 1757920 - DNA, 15 bp, Homo sapiens
gcttagattttggca

SEQ ID NO: 1757921 - DNA, 15 bp, Homo sapiens
cttagattttggcag

SEQ ID NO: 1757922 - DNA, 15 bp, Homo sapiens
ttagattttggcaga

SEQ ID NO: 1757923 - DNA, 15 bp, Homo sapiens
tagattttggcagat

SEQ ID NO: 1757924 - DNA, 15 bp, Homo sapiens
agattttggcagatg

SEQ ID NO: 1757925 - DNA, 15 bp, Homo sapiens
gattttggcagatga

SEQ ID NO: 1757926 - DNA, 15 bp, Homo sapiens
attttggcagatgag

SEQ ID NO: 1757927 - DNA, 15 bp, Homo sapiens
ttttggcagatgaga

SEQ ID NO: 1757928 - DNA, 15 bp, Homo sapiens
tttggcagatgagac

SEQ ID NO: 1757929 - DNA, 15 bp, Homo sapiens
ttggcagatgagaca

SEQ ID NO: 1757930 - DNA, 15 bp, Homo sapiens
tggcagatgagacag

SEQ ID NO: 1757931 - DNA, 15 bp, Homo sapiens
ggcagatgagacagg

SEQ ID NO: 1757932 - DNA, 15 bp, Homo sapiens
gcagatgagacaggt

SEQ ID NO: 1757933 - DNA, 15 bp, Homo sapiens
cagatgagacaggtg

SEQ ID NO: 1757934 - DNA, 15 bp, Homo sapiens
agatgagacaggtga

SEQ ID NO: 1757935 - DNA, 15 bp, Homo sapiens
gatgagacaggtgat

SEQ ID NO: 1757936 - DNA, 15 bp, Homo sapiens
atgagacaggtgatt

SEQ ID NO: 1757937 - DNA, 15 bp, Homo sapiens
tgagacaggtgatta

SEQ ID NO: 1757938 - DNA, 15 bp, Homo sapiens
gagacaggtgattac

SEQ ID NO: 1757939 - DNA, 15 bp, Homo sapiens
agacaggtgattacg

SEQ ID NO: 1757940 - DNA, 15 bp, Homo sapiens
gacaggtgattacga

SEQ ID NO: 1757941 - DNA, 15 bp, Homo sapiens
acaggtgattacgat

SEQ ID NO: 1757942 - DNA, 15 bp, Homo sapiens
caggtgattacgatg

SEQ ID NO: 1757943 - DNA, 15 bp, Homo sapiens
aggtgattacgatgg

SEQ ID NO: 1757944 - DNA, 15 bp, Homo sapiens
ggtgattacgatgga

SEQ ID NO: 1757945 - DNA, 15 bp, Homo sapiens
gtgattacgatggag

SEQ ID NO: 1757946 - DNA, 15 bp, Homo sapiens
tgattacgatggagc

SEQ ID NO: 1757947 - DNA, 15 bp, Homo sapiens
gattacgatggagcg

SEQ ID NO: 1757948 - DNA, 15 bp, Homo sapiens
attacgatggagcga

SEQ ID NO: 1757949 - DNA, 15 bp, Homo sapiens
ttacgatggagcgag

SEQ ID NO: 1757950 - DNA, 15 bp, Homo sapiens
tacgatggagcgaga

SEQ ID NO: 1757951 - DNA, 15 bp, Homo sapiens
acgatggagcgagac

SEQ ID NO: 1757952 - DNA, 15 bp, Homo sapiens
cgatggagcgagaca

SEQ ID NO: 1757953 - DNA, 15 bp, Homo sapiens
gatggagcgagacag

SEQ ID NO: 1757954 - DNA, 15 bp, Homo sapiens
atggagcgagacaga

SEQ ID NO: 1757955 - DNA, 15 bp, Homo sapiens
tggagcgagacagac

SEQ ID NO: 1757956 - DNA, 15 bp, Homo sapiens
ggagcgagacagacc

SEQ ID NO: 1757957 - DNA, 15 bp, Homo sapiens
gagcgagacagacca

SEQ ID NO: 1757958 - DNA, 15 bp, Homo sapiens
agcgagacagaccag

SEQ ID NO: 1757959 - DNA, 15 bp, Homo sapiens
gcgagacagaccagg

SEQ ID NO: 1757960 - DNA, 15 bp, Homo sapiens
cgagacagaccaggc

SEQ ID NO: 1757961 - DNA, 15 bp, Homo sapiens
gagacagaccaggca

SEQ ID NO: 1757962 - DNA, 15 bp, Homo sapiens
agacagaccaggcag

SEQ ID NO: 1757963 - DNA, 15 bp, Homo sapiens
gacagaccaggcaga

SEQ ID NO: 1757964 - DNA, 15 bp, Homo sapiens
acagaccaggcagag

SEQ ID NO: 1757965 - DNA, 15 bp, Homo sapiens
cagaccaggcagaga

SEQ ID NO: 1757966 - DNA, 15 bp, Homo sapiens
agaccaggcagagag

SEQ ID NO: 1757967 - DNA, 15 bp, Homo sapiens
gaccaggcagagagg

SEQ ID NO: 1757968 - DNA, 15 bp, Homo sapiens
accaggcagagaggg

SEQ ID NO: 1757969 - DNA, 15 bp, Homo sapiens
ccaggcagagaggga

SEQ ID NO: 1757970 - DNA, 15 bp, Homo sapiens
caggcagagagggag

SEQ ID NO: 1757971 - DNA, 15 bp, Homo sapiens
aggcagagagggagg

SEQ ID NO: 1757972 - DNA, 15 bp, Homo sapiens
ggcagagagggaggc

SEQ ID NO: 1757973 - DNA, 15 bp, Homo sapiens
gcagagagggaggct

SEQ ID NO: 1757974 - DNA, 15 bp, Homo sapiens
cagagagggaggctg

SEQ ID NO: 1757975 - DNA, 15 bp, Homo sapiens
agagagggaggctga

SEQ ID NO: 1757976 - DNA, 15 bp, Homo sapiens
gagagggaggctgac

SEQ ID NO: 1757977 - DNA, 15 bp, Homo sapiens
agagggaggctgacc

SEQ ID NO: 1757978 - DNA, 15 bp, Homo sapiens
gagggaggctgacct

SEQ ID NO: 1757979 - DNA, 15 bp, Homo sapiens
agggaggctgacctc

SEQ ID NO: 1757980 - DNA, 15 bp, Homo sapiens
gggaggctgacctca

SEQ ID NO: 1757981 - DNA, 15 bp, Homo sapiens
ggaggctgacctcaa

SEQ ID NO: 1757982 - DNA, 15 bp, Homo sapiens
gaggctgacctcaag

SEQ ID NO: 1757983 - DNA, 15 bp, Homo sapiens
aggctgacctcaagc

SEQ ID NO: 1757984 - DNA, 15 bp, Homo sapiens
ggctgacctcaagca

SEQ ID NO: 1757985 - DNA, 15 bp, Homo sapiens
gctgacctcaagcat

SEQ ID NO: 1757986 - DNA, 15 bp, Homo sapiens
ctgacctcaagcatc

SEQ ID NO: 1757987 - DNA, 15 bp, Homo sapiens
tgacctcaagcatct

SEQ ID NO: 1757988 - DNA, 15 bp, Homo sapiens
gacctcaagcatctg

SEQ ID NO: 1757989 - DNA, 15 bp, Homo sapiens
acctcaagcatctga

SEQ ID NO: 1757990 - DNA, 15 bp, Homo sapiens
cctcaagcatctgac

SEQ ID NO: 1757991 - DNA, 15 bp, Homo sapiens
ctcaagcatctgacc

SEQ ID NO: 1757992 - DNA, 15 bp, Homo sapiens
tcaagcatctgacca

SEQ ID NO: 1757993 - DNA, 15 bp, Homo sapiens
caagcatctgaccag

SEQ ID NO: 1757994 - DNA, 15 bp, Homo sapiens
aagcatctgaccagg

SEQ ID NO: 1757995 - DNA, 15 bp, Homo sapiens
agcatctgaccaggg

SEQ ID NO: 1757996 - DNA, 15 bp, Homo sapiens
gcatctgaccagggt

SEQ ID NO: 1757997 - DNA, 15 bp, Homo sapiens
catctgaccagggtt

SEQ ID NO: 1757998 - DNA, 15 bp, Homo sapiens
atctgaccagggttt

SEQ ID NO: 1757999 - DNA, 15 bp, Homo sapiens
tctgaccagggttta

SEQ ID NO: 1758000 - DNA, 15 bp, Homo sapiens
ctgaccagggtttat

SEQ ID NO: 1758001 - DNA, 15 bp, Homo sapiens
tgaccagggtttatt

SEQ ID NO: 1758002 - DNA, 15 bp, Homo sapiens
gaccagggtttattt

SEQ ID NO: 1758003 - DNA, 15 bp, Homo sapiens
accagggtttatttt

SEQ ID NO: 1758004 - DNA, 15 bp, Homo sapiens
ccagggtttattttc

SEQ ID NO: 1758005 - DNA, 15 bp, Homo sapiens
cagggtttattttca

SEQ ID NO: 1758006 - DNA, 15 bp, Homo sapiens
agggtttattttcac

SEQ ID NO: 1758007 - DNA, 15 bp, Homo sapiens
gggtttattttcact

SEQ ID NO: 1758008 - DNA, 15 bp, Homo sapiens
ggtttattttcacta

SEQ ID NO: 1758009 - DNA, 15 bp, Homo sapiens
gtttattttcactat

SEQ ID NO: 1758010 - DNA, 15 bp, Homo sapiens
tttattttcactatg

SEQ ID NO: 1758011 - DNA, 15 bp, Homo sapiens
ttattttcactatgt

SEQ ID NO: 1758012 - DNA, 15 bp, Homo sapiens
tattttcactatgta

SEQ ID NO: 1758013 - DNA, 15 bp, Homo sapiens
attttcactatgtac

SEQ ID NO: 1758014 - DNA, 15 bp, Homo sapiens
ttttcactatgtaca

SEQ ID NO: 1758015 - DNA, 15 bp, Homo sapiens
tttcactatgtacac

SEQ ID NO: 1758016 - DNA, 15 bp, Homo sapiens
ttcactatgtacaca

SEQ ID NO: 1758017 - DNA, 15 bp, Homo sapiens
tcactatgtacacaa

SEQ ID NO: 1758018 - DNA, 15 bp, Homo sapiens
cactatgtacacaat

SEQ ID NO: 1758019 - DNA, 15 bp, Homo sapiens
actatgtacacaatg

SEQ ID NO: 1758020 - DNA, 15 bp, Homo sapiens
ctatgtacacaatgc

SEQ ID NO: 1758021 - DNA, 15 bp, Homo sapiens
tatgtacacaatgca

SEQ ID NO: 1758022 - DNA, 15 bp, Homo sapiens
atgtacacaatgcac

SEQ ID NO: 1758023 - DNA, 15 bp, Homo sapiens
tgtacacaatgcacg

SEQ ID NO: 1758024 - DNA, 15 bp, Homo sapiens
gtacacaatgcacgc

SEQ ID NO: 1758025 - DNA, 15 bp, Homo sapiens
tacacaatgcacgca

SEQ ID NO: 1758026 - DNA, 15 bp, Homo sapiens
acacaatgcacgcac

SEQ ID NO: 1758027 - DNA, 15 bp, Homo sapiens
cacaatgcacgcaca

SEQ ID NO: 1758028 - DNA, 15 bp, Homo sapiens
acaatgcacgcacat

SEQ ID NO: 1758029 - DNA, 15 bp, Homo sapiens
caatgcacgcacatg

SEQ ID NO: 1758030 - DNA, 15 bp, Homo sapiens
aatgcacgcacatgc

SEQ ID NO: 1758031 - DNA, 15 bp, Homo sapiens
atgcacgcacatgct

SEQ ID NO: 1758032 - DNA, 15 bp, Homo sapiens
tgcacgcacatgctg

SEQ ID NO: 1758033 - DNA, 15 bp, Homo sapiens
gcacgcacatgctgt

SEQ ID NO: 1758034 - DNA, 15 bp, Homo sapiens
cacgcacatgctgta

SEQ ID NO: 1758035 - DNA, 15 bp, Homo sapiens
acgcacatgctgtag

SEQ ID NO: 1758036 - DNA, 15 bp, Homo sapiens
cgcacatgctgtagg

SEQ ID NO: 1758037 - DNA, 15 bp, Homo sapiens
gcacatgctgtaggt

SEQ ID NO: 1758038 - DNA, 15 bp, Homo sapiens
cacatgctgtaggtg

SEQ ID NO: 1758039 - DNA, 15 bp, Homo sapiens
acatgctgtaggtga

SEQ ID NO: 1758040 - DNA, 15 bp, Homo sapiens
catgctgtaggtgaa

SEQ ID NO: 1758041 - DNA, 15 bp, Homo sapiens
atgctgtaggtgaaa

SEQ ID NO: 1758042 - DNA, 15 bp, Homo sapiens
tgctgtaggtgaaac

SEQ ID NO: 1758043 - DNA, 15 bp, Homo sapiens
gctgtaggtgaaact

SEQ ID NO: 1758044 - DNA, 15 bp, Homo sapiens
ctgtaggtgaaacta

SEQ ID NO: 1758045 - DNA, 15 bp, Homo sapiens
tgtaggtgaaactaa

SEQ ID NO: 1758046 - DNA, 15 bp, Homo sapiens
gtaggtgaaactaac

SEQ ID NO: 1758047 - DNA, 15 bp, Homo sapiens
taggtgaaactaaca

SEQ ID NO: 1758048 - DNA, 15 bp, Homo sapiens
aggtgaaactaacat

SEQ ID NO: 1758049 - DNA, 15 bp, Homo sapiens
ggtgaaactaacatg

SEQ ID NO: 1758050 - DNA, 15 bp, Homo sapiens
gtgaaactaacatga

SEQ ID NO: 1758051 - DNA, 15 bp, Homo sapiens
tgaaactaacatgac

SEQ ID NO: 1758052 - DNA, 15 bp, Homo sapiens
gaaactaacatgact

SEQ ID NO: 1758053 - DNA, 15 bp, Homo sapiens
aaactaacatgactt

SEQ ID NO: 1758054 - DNA, 15 bp, Homo sapiens
aactaacatgactta

SEQ ID NO: 1758055 - DNA, 15 bp, Homo sapiens
actaacatgacttat

SEQ ID NO: 1758056 - DNA, 15 bp, Homo sapiens
ctaacatgacttatg

SEQ ID NO: 1758057 - DNA, 15 bp, Homo sapiens
taacatgacttatgc

SEQ ID NO: 1758058 - DNA, 15 bp, Homo sapiens
aacatgacttatgcc

SEQ ID NO: 1758059 - DNA, 15 bp, Homo sapiens
acatgacttatgcct

SEQ ID NO: 1758060 - DNA, 15 bp, Homo sapiens
catgacttatgcctt

SEQ ID NO: 1758061 - DNA, 15 bp, Homo sapiens
atgacttatgcctta

SEQ ID NO: 1758062 - DNA, 15 bp, Homo sapiens
tgacttatgccttac

SEQ ID NO: 1758063 - DNA, 15 bp, Homo sapiens
gacttatgccttacg

SEQ ID NO: 1758064 - DNA, 15 bp, Homo sapiens
acttatgccttacgt

SEQ ID NO: 1758065 - DNA, 15 bp, Homo sapiens
cttatgccttacgtg

SEQ ID NO: 1758066 - DNA, 15 bp, Homo sapiens
ttatgccttacgtga

SEQ ID NO: 1758067 - DNA, 15 bp, Homo sapiens
tatgccttacgtgaa

SEQ ID NO: 1758068 - DNA, 15 bp, Homo sapiens
atgccttacgtgaaa

SEQ ID NO: 1758069 - DNA, 15 bp, Homo sapiens
tgccttacgtgaaaa

SEQ ID NO: 1758070 - DNA, 15 bp, Homo sapiens
gccttacgtgaaaat

SEQ ID NO: 1758071 - DNA, 15 bp, Homo sapiens
ccttacgtgaaaata

SEQ ID NO: 1758072 - DNA, 15 bp, Homo sapiens
cttacgtgaaaataa

SEQ ID NO: 1758073 - DNA, 15 bp, Homo sapiens
ttacgtgaaaataac

SEQ ID NO: 1758074 - DNA, 15 bp, Homo sapiens
tacgtgaaaataaca

SEQ ID NO: 1758075 - DNA, 15 bp, Homo sapiens
acgtgaaaataacaa

SEQ ID NO: 1758076 - DNA, 15 bp, Homo sapiens
cgtgaaaataacaaa

SEQ ID NO: 1758077 - DNA, 15 bp, Homo sapiens
gtgaaaataacaaat

SEQ ID NO: 1758078 - DNA, 15 bp, Homo sapiens
tgaaaataacaaata

SEQ ID NO: 1758079 - DNA, 15 bp, Homo sapiens
gaaaataacaaataa

SEQ ID NO: 1758080 - DNA, 15 bp, Homo sapiens
aaaataacaaataac

SEQ ID NO: 1758081 - DNA, 15 bp, Homo sapiens
aaataacaaataaca

SEQ ID NO: 1758082 - DNA, 15 bp, Homo sapiens
aataacaaataacat

SEQ ID NO: 1758083 - DNA, 15 bp, Homo sapiens
ataacaaataacata

SEQ ID NO: 1758084 - DNA, 15 bp, Homo sapiens
taacaaataacatac

SEQ ID NO: 1758085 - DNA, 15 bp, Homo sapiens
aacaaataacataca

SEQ ID NO: 1758086 - DNA, 15 bp, Homo sapiens
acaaataacatacag

SEQ ID NO: 1758087 - DNA, 15 bp, Homo sapiens
caaataacatacagc

SEQ ID NO: 1758088 - DNA, 15 bp, Homo sapiens
aaataacatacagca

SEQ ID NO: 1758089 - DNA, 15 bp, Homo sapiens
aataacatacagcag

SEQ ID NO: 1758090 - DNA, 15 bp, Homo sapiens
ataacatacagcagt

SEQ ID NO: 1758091 - DNA, 15 bp, Homo sapiens
taacatacagcagtc

SEQ ID NO: 1758092 - DNA, 15 bp, Homo sapiens
aacatacagcagtct

SEQ ID NO: 1758093 - DNA, 15 bp, Homo sapiens
acatacagcagtctt

SEQ ID NO: 1758094 - DNA, 15 bp, Homo sapiens
catacagcagtcttc

SEQ ID NO: 1758095 - DNA, 15 bp, Homo sapiens
atacagcagtcttct

SEQ ID NO: 1758096 - DNA, 15 bp, Homo sapiens
tacagcagtcttctt

SEQ ID NO: 1758097 - DNA, 15 bp, Homo sapiens
acagcagtcttcttg

SEQ ID NO: 1758098 - DNA, 15 bp, Homo sapiens
cagcagtcttcttgt

SEQ ID NO: 1758099 - DNA, 15 bp, Homo sapiens
agcagtcttcttgtc

SEQ ID NO: 1758100 - DNA, 15 bp, Homo sapiens
gcagtcttcttgtca

SEQ ID NO: 1758101 - DNA, 15 bp, Homo sapiens
cagtcttcttgtcaa

SEQ ID NO: 1758102 - DNA, 15 bp, Homo sapiens
agtcttcttgtcaaa

SEQ ID NO: 1758103 - DNA, 15 bp, Homo sapiens
gtcttcttgtcaaag

SEQ ID NO: 1758104 - DNA, 15 bp, Homo sapiens
tcttcttgtcaaagt

SEQ ID NO: 1758105 - DNA, 15 bp, Homo sapiens
cttcttgtcaaagta

SEQ ID NO: 1758106 - DNA, 15 bp, Homo sapiens
ttcttgtcaaagtac

SEQ ID NO: 1758107 - DNA, 15 bp, Homo sapiens
tcttgtcaaagtacc

SEQ ID NO: 1758108 - DNA, 15 bp, Homo sapiens
cttgtcaaagtaccc

SEQ ID NO: 1758109 - DNA, 15 bp, Homo sapiens
ttgtcaaagtacccc

SEQ ID NO: 1758110 - DNA, 15 bp, Homo sapiens
tgtcaaagtacccct

SEQ ID NO: 1758111 - DNA, 15 bp, Homo sapiens
gtcaaagtacccctg

SEQ ID NO: 1758112 - DNA, 15 bp, Homo sapiens
tcaaagtacccctgc

SEQ ID NO: 1758113 - DNA, 15 bp, Homo sapiens
caaagtacccctgca

SEQ ID NO: 1758114 - DNA, 15 bp, Homo sapiens
aaagtacccctgcaa

SEQ ID NO: 1758115 - DNA, 15 bp, Homo sapiens
aagtacccctgcaat

SEQ ID NO: 1758116 - DNA, 15 bp, Homo sapiens
agtacccctgcaatg

SEQ ID NO: 1758117 - DNA, 15 bp, Homo sapiens
gtacccctgcaatga

SEQ ID NO: 1758118 - DNA, 15 bp, Homo sapiens
tacccctgcaatgat

SEQ ID NO: 1758119 - DNA, 15 bp, Homo sapiens
acccctgcaatgatg

SEQ ID NO: 1758120 - DNA, 15 bp, Homo sapiens
cccctgcaatgatgg

SEQ ID NO: 1758121 - DNA, 15 bp, Homo sapiens
ccctgcaatgatggg

SEQ ID NO: 1758122 - DNA, 15 bp, Homo sapiens
cctgcaatgatgggg

SEQ ID NO: 1758123 - DNA, 15 bp, Homo sapiens
ctgcaatgatggggg

SEQ ID NO: 1758124 - DNA, 15 bp, Homo sapiens
tgcaatgatgggggc

SEQ ID NO: 1758125 - DNA, 15 bp, Homo sapiens
gcaatgatgggggcc

SEQ ID NO: 1758126 - DNA, 15 bp, Homo sapiens
caatgatgggggcca

SEQ ID NO: 1758127 - DNA, 15 bp, Homo sapiens
aatgatgggggccag

SEQ ID NO: 1758128 - DNA, 15 bp, Homo sapiens
atgatgggggccaga

SEQ ID NO: 1758129 - DNA, 15 bp, Homo sapiens
tgatgggggccagaa

SEQ ID NO: 1758130 - DNA, 15 bp, Homo sapiens
gatgggggccagaag

SEQ ID NO: 1758131 - DNA, 15 bp, Homo sapiens
atgggggccagaagt

SEQ ID NO: 1758132 - DNA, 15 bp, Homo sapiens
tgggggccagaagtt

SEQ ID NO: 1758133 - DNA, 15 bp, Homo sapiens
gggggccagaagttc

SEQ ID NO: 1758134 - DNA, 15 bp, Homo sapiens
ggggccagaagttct

SEQ ID NO: 1758135 - DNA, 15 bp, Homo sapiens
gggccagaagttctc

SEQ ID NO: 1758136 - DNA, 15 bp, Homo sapiens
ggccagaagttctcg

SEQ ID NO: 1758137 - DNA, 15 bp, Homo sapiens
gccagaagttctcgg

SEQ ID NO: 1758138 - DNA, 15 bp, Homo sapiens
ccagaagttctcgga

SEQ ID NO: 1758139 - DNA, 15 bp, Homo sapiens
cagaagttctcggaa

SEQ ID NO: 1758140 - DNA, 15 bp, Homo sapiens
agaagttctcggaaa

SEQ ID NO: 1758141 - DNA, 15 bp, Homo sapiens
gaagttctcggaaag

SEQ ID NO: 1758142 - DNA, 15 bp, Homo sapiens
aagttctcggaaaga

SEQ ID NO: 1758143 - DNA, 15 bp, Homo sapiens
agttctcggaaagaa

SEQ ID NO: 1758144 - DNA, 15 bp, Homo sapiens
gttctcggaaagaac

SEQ ID NO: 1758145 - DNA, 15 bp, Homo sapiens
ttctcggaaagaaca

SEQ ID NO: 1758146 - DNA, 15 bp, Homo sapiens
tctcggaaagaacat

SEQ ID NO: 1758147 - DNA, 15 bp, Homo sapiens
ctcggaaagaacatt

SEQ ID NO: 1758148 - DNA, 15 bp, Homo sapiens
tcggaaagaacattc

SEQ ID NO: 1758149 - DNA, 15 bp, Homo sapiens
cggaaagaacattcc

SEQ ID NO: 1758150 - DNA, 15 bp, Homo sapiens
ggaaagaacattcca

SEQ ID NO: 1758151 - DNA, 15 bp, Homo sapiens
gaaagaacattccag

SEQ ID NO: 1758152 - DNA, 15 bp, Homo sapiens
aaagaacattccagg

SEQ ID NO: 1758153 - DNA, 15 bp, Homo sapiens
aagaacattccaggt

SEQ ID NO: 1758154 - DNA, 15 bp, Homo sapiens
agaacattccaggtc

SEQ ID NO: 1758155 - DNA, 15 bp, Homo sapiens
gaacattccaggtca

SEQ ID NO: 1758156 - DNA, 15 bp, Homo sapiens
aacattccaggtcag

SEQ ID NO: 1758157 - DNA, 15 bp, Homo sapiens
acattccaggtcagt

SEQ ID NO: 1758158 - DNA, 15 bp, Homo sapiens
cattccaggtcagtg

SEQ ID NO: 1758159 - DNA, 15 bp, Homo sapiens
attccaggtcagtgg

SEQ ID NO: 1758160 - DNA, 15 bp, Homo sapiens
ttccaggtcagtgga

SEQ ID NO: 1758161 - DNA, 15 bp, Homo sapiens
tccaggtcagtggag

SEQ ID NO: 1758162 - DNA, 15 bp, Homo sapiens
ccaggtcagtggagg

SEQ ID NO: 1758163 - DNA, 15 bp, Homo sapiens
caggtcagtggaggt

SEQ ID NO: 1758164 - DNA, 15 bp, Homo sapiens
aggtcagtggaggtg

SEQ ID NO: 1758165 - DNA, 15 bp, Homo sapiens
ggtcagtggaggtgg

SEQ ID NO: 1758166 - DNA, 15 bp, Homo sapiens
gtcagtggaggtgga

SEQ ID NO: 1758167 - DNA, 15 bp, Homo sapiens
tcagtggaggtggag

SEQ ID NO: 1758168 - DNA, 15 bp, Homo sapiens
cagtggaggtggagg

SEQ ID NO: 1758169 - DNA, 15 bp, Homo sapiens
gtggaggtggaggga

SEQ ID NO: 1758170 - DNA, 15 bp, Homo sapiens
tggaggtggagggaa

SEQ ID NO: 1758171 - DNA, 15 bp, Homo sapiens
ggaggtggagggaaa

SEQ ID NO: 1758172 - DNA, 15 bp, Homo sapiens
gaggtggagggaaag

SEQ ID NO: 1758173 - DNA, 15 bp, Homo sapiens
aggtggagggaaaga

SEQ ID NO: 1758174 - DNA, 15 bp, Homo sapiens
ggtggagggaaagaa

SEQ ID NO: 1758175 - DNA, 15 bp, Homo sapiens
tggagggaaagaaat

SEQ ID NO: 1758176 - DNA, 15 bp, Homo sapiens
ggagggaaagaaatt

SEQ ID NO: 1758177 - DNA, 15 bp, Homo sapiens
gagggaaagaaattc

SEQ ID NO: 1758178 - DNA, 15 bp, Homo sapiens
agggaaagaaattcg

SEQ ID NO: 1758179 - DNA, 15 bp, Homo sapiens
gggaaagaaattcgg

SEQ ID NO: 1758180 - DNA, 15 bp, Homo sapiens
ggaaagaaattcggt

SEQ ID NO: 1758181 - DNA, 15 bp, Homo sapiens
gaaagaaattcggtg

SEQ ID NO: 1758182 - DNA, 15 bp, Homo sapiens
aaagaaattcggtga

SEQ ID NO: 1758183 - DNA, 15 bp, Homo sapiens
aagaaattcggtgac

SEQ ID NO: 1758184 - DNA, 15 bp, Homo sapiens
agaaattcggtgaca

SEQ ID NO: 1758185 - DNA, 15 bp, Homo sapiens
gaaattcggtgacag

SEQ ID NO: 1758186 - DNA, 15 bp, Homo sapiens
aaattcggtgacagt

SEQ ID NO: 1758187 - DNA, 15 bp, Homo sapiens
aattcggtgacagta

SEQ ID NO: 1758188 - DNA, 15 bp, Homo sapiens
attcggtgacagtat

SEQ ID NO: 1758189 - DNA, 15 bp, Homo sapiens
ttcggtgacagtatg

SEQ ID NO: 1758190 - DNA, 15 bp, Homo sapiens
tcggtgacagtatgc

SEQ ID NO: 1758191 - DNA, 15 bp, Homo sapiens
cggtgacagtatgcc

SEQ ID NO: 1758192 - DNA, 15 bp, Homo sapiens
ggtgacagtatgccg

SEQ ID NO: 1758193 - DNA, 15 bp, Homo sapiens
gtgacagtatgccgc

SEQ ID NO: 1758194 - DNA, 15 bp, Homo sapiens
tgacagtatgccgca

SEQ ID NO: 1758195 - DNA, 15 bp, Homo sapiens
gacagtatgccgcag

SEQ ID NO: 1758196 - DNA, 15 bp, Homo sapiens
acagtatgccgcagg

SEQ ID NO: 1758197 - DNA, 15 bp, Homo sapiens
cagtatgccgcaggc

SEQ ID NO: 1758198 - DNA, 15 bp, Homo sapiens
agtatgccgcaggcg

SEQ ID NO: 1758199 - DNA, 15 bp, Homo sapiens
gtatgccgcaggcgt

SEQ ID NO: 1758200 - DNA, 15 bp, Homo sapiens
tatgccgcaggcgtg

SEQ ID NO: 1758201 - DNA, 15 bp, Homo sapiens
atgccgcaggcgtgc

SEQ ID NO: 1758202 - DNA, 15 bp, Homo sapiens
tgccgcaggcgtgct

SEQ ID NO: 1758203 - DNA, 15 bp, Homo sapiens
gccgcaggcgtgctg

SEQ ID NO: 1758204 - DNA, 15 bp, Homo sapiens
ccgcaggcgtgctgt

SEQ ID NO: 1758205 - DNA, 15 bp, Homo sapiens
cgcaggcgtgctgtg

SEQ ID NO: 1758206 - DNA, 15 bp, Homo sapiens
gcaggcgtgctgtgg

SEQ ID NO: 1758207 - DNA, 15 bp, Homo sapiens
caggcgtgctgtggg

SEQ ID NO: 1758208 - DNA, 15 bp, Homo sapiens
aggcgtgctgtgggg

SEQ ID NO: 1758209 - DNA, 15 bp, Homo sapiens
ggcgtgctgtgggga

SEQ ID NO: 1758210 - DNA, 15 bp, Homo sapiens
gcgtgctgtggggaa

SEQ ID NO: 1758211 - DNA, 15 bp, Homo sapiens
cgtgctgtggggaac

SEQ ID NO: 1758212 - DNA, 15 bp, Homo sapiens
gtgctgtggggaacc

SEQ ID NO: 1758213 - DNA, 15 bp, Homo sapiens
tgctgtggggaaccc

SEQ ID NO: 1758214 - DNA, 15 bp, Homo sapiens
gctgtggggaaccct

SEQ ID NO: 1758215 - DNA, 15 bp, Homo sapiens
ctgtggggaaccctt

SEQ ID NO: 1758216 - DNA, 15 bp, Homo sapiens
tgtggggaaccctta

SEQ ID NO: 1758217 - DNA, 15 bp, Homo sapiens
gtggggaacccttag

SEQ ID NO: 1758218 - DNA, 15 bp, Homo sapiens
tggggaacccttaga

SEQ ID NO: 1758219 - DNA, 15 bp, Homo sapiens
ggggaacccttagag

SEQ ID NO: 1758220 - DNA, 15 bp, Homo sapiens
gggaacccttagagt

SEQ ID NO: 1758221 - DNA, 15 bp, Homo sapiens
ggaacccttagagtt

SEQ ID NO: 1758222 - DNA, 15 bp, Homo sapiens
gaacccttagagttc

SEQ ID NO: 1758223 - DNA, 15 bp, Homo sapiens
aacccttagagttct

SEQ ID NO: 1758224 - DNA, 15 bp, Homo sapiens
acccttagagttctg

SEQ ID NO: 1758225 - DNA, 15 bp, Homo sapiens
cccttagagttctgg

SEQ ID NO: 1758226 - DNA, 15 bp, Homo sapiens
ccttagagttctggg

SEQ ID NO: 1758227 - DNA, 15 bp, Homo sapiens
cttagagttctggga

SEQ ID NO: 1758228 - DNA, 15 bp, Homo sapiens
ttagagttctgggag

SEQ ID NO: 1758229 - DNA, 15 bp, Homo sapiens
tagagttctgggaga

SEQ ID NO: 1758230 - DNA, 15 bp, Homo sapiens
agagttctgggagag

SEQ ID NO: 1758231 - DNA, 15 bp, Homo sapiens
gagttctgggagagt

SEQ ID NO: 1758232 - DNA, 15 bp, Homo sapiens
agttctgggagagta

SEQ ID NO: 1758233 - DNA, 15 bp, Homo sapiens
gttctgggagagtat

SEQ ID NO: 1758234 - DNA, 15 bp, Homo sapiens
ttctgggagagtatg

SEQ ID NO: 1758235 - DNA, 15 bp, Homo sapiens
tctgggagagtatga

SEQ ID NO: 1758236 - DNA, 15 bp, Homo sapiens
ctgggagagtatgaa

SEQ ID NO: 1758237 - DNA, 15 bp, Homo sapiens
tgggagagtatgaaa

SEQ ID NO: 1758238 - DNA, 15 bp, Homo sapiens
gggagagtatgaaaa

SEQ ID NO: 1758239 - DNA, 15 bp, Homo sapiens
ggagagtatgaaaaa

SEQ ID NO: 1758240 - DNA, 15 bp, Homo sapiens
gagagtatgaaaaac

SEQ ID NO: 1758241 - DNA, 15 bp, Homo sapiens
agagtatgaaaaaca

SEQ ID NO: 1758242 - DNA, 15 bp, Homo sapiens
gagtatgaaaaacag

SEQ ID NO: 1758243 - DNA, 15 bp, Homo sapiens
agtatgaaaaacagc

SEQ ID NO: 1758244 - DNA, 15 bp, Homo sapiens
gtatgaaaaacagca

SEQ ID NO: 1758245 - DNA, 15 bp, Homo sapiens
tatgaaaaacagcag

SEQ ID NO: 1758246 - DNA, 15 bp, Homo sapiens
atgaaaaacagcaga

SEQ ID NO: 1758247 - DNA, 15 bp, Homo sapiens
tgaaaaacagcagac

SEQ ID NO: 1758248 - DNA, 15 bp, Homo sapiens
gaaaaacagcagacg

SEQ ID NO: 1758249 - DNA, 15 bp, Homo sapiens
aaaaacagcagacga

SEQ ID NO: 1758250 - DNA, 15 bp, Homo sapiens
aaaacagcagacgaa

SEQ ID NO: 1758251 - DNA, 15 bp, Homo sapiens
aaacagcagacgaaa

SEQ ID NO: 1758252 - DNA, 15 bp, Homo sapiens
aacagcagacgaaag

SEQ ID NO: 1758253 - DNA, 15 bp, Homo sapiens
acagcagacgaaagt

SEQ ID NO: 1758254 - DNA, 15 bp, Homo sapiens
cagcagacgaaagtg

SEQ ID NO: 1758255 - DNA, 15 bp, Homo sapiens
agcagacgaaagtga

SEQ ID NO: 1758256 - DNA, 15 bp, Homo sapiens
gcagacgaaagtgac

SEQ ID NO: 1758257 - DNA, 15 bp, Homo sapiens
cagacgaaagtgact

SEQ ID NO: 1758258 - DNA, 15 bp, Homo sapiens
agacgaaagtgactt

SEQ ID NO: 1758259 - DNA, 15 bp, Homo sapiens
gacgaaagtgacttc

SEQ ID NO: 1758260 - DNA, 15 bp, Homo sapiens
acgaaagtgacttcc

SEQ ID NO: 1758261 - DNA, 15 bp, Homo sapiens
cgaaagtgacttcca

SEQ ID NO: 1758262 - DNA, 15 bp, Homo sapiens
gaaagtgacttccat

SEQ ID NO: 1758263 - DNA, 15 bp, Homo sapiens
aaagtgacttccatt

SEQ ID NO: 1758264 - DNA, 15 bp, Homo sapiens
aagtgacttccattg

SEQ ID NO: 1758265 - DNA, 15 bp, Homo sapiens
agtgacttccattgc

SEQ ID NO: 1758266 - DNA, 15 bp, Homo sapiens
gtgacttccattgct

SEQ ID NO: 1758267 - DNA, 15 bp, Homo sapiens
tgacttccattgctt

SEQ ID NO: 1758268 - DNA, 15 bp, Homo sapiens
gacttccattgctta

SEQ ID NO: 1758269 - DNA, 15 bp, Homo sapiens
acttccattgcttaa

SEQ ID NO: 1758270 - DNA, 15 bp, Homo sapiens
cttccattgcttaat

SEQ ID NO: 1758271 - DNA, 15 bp, Homo sapiens
ttccattgcttaatg

SEQ ID NO: 1758272 - DNA, 15 bp, Homo sapiens
tccattgcttaatgt

SEQ ID NO: 1758273 - DNA, 15 bp, Homo sapiens
ccattgcttaatgtt

SEQ ID NO: 1758274 - DNA, 15 bp, Homo sapiens
cattgcttaatgttt

SEQ ID NO: 1758275 - DNA, 15 bp, Homo sapiens
attgcttaatgtttg

SEQ ID NO: 1758276 - DNA, 15 bp, Homo sapiens
ttgcttaatgtttga

SEQ ID NO: 1758277 - DNA, 15 bp, Homo sapiens
tgcttaatgtttgaa

SEQ ID NO: 1758278 - DNA, 15 bp, Homo sapiens
gcttaatgtttgaat

SEQ ID NO: 1758279 - DNA, 15 bp, Homo sapiens
cttaatgtttgaatt

SEQ ID NO: 1758280 - DNA, 15 bp, Homo sapiens
ttaatgtttgaatta

SEQ ID NO: 1758281 - DNA, 15 bp, Homo sapiens
taatgtttgaattat

SEQ ID NO: 1758282 - DNA, 15 bp, Homo sapiens
aatgtttgaattatc

SEQ ID NO: 1758283 - DNA, 15 bp, Homo sapiens
atgtttgaattatca

SEQ ID NO: 1758284 - DNA, 15 bp, Homo sapiens
tgtttgaattatcac

SEQ ID NO: 1758285 - DNA, 15 bp, Homo sapiens
gtttgaattatcacc

SEQ ID NO: 1758286 - DNA, 15 bp, Homo sapiens
tttgaattatcacca

SEQ ID NO: 1758287 - DNA, 15 bp, Homo sapiens
ttgaattatcaccat

SEQ ID NO: 1758288 - DNA, 15 bp, Homo sapiens
tgaattatcaccata

SEQ ID NO: 1758289 - DNA, 15 bp, Homo sapiens
gaattatcaccataa

SEQ ID NO: 1758290 - DNA, 15 bp, Homo sapiens
aattatcaccataaa

SEQ ID NO: 1758291 - DNA, 15 bp, Homo sapiens
attatcaccataaag

SEQ ID NO: 1758292 - DNA, 15 bp, Homo sapiens
ttatcaccataaaga

SEQ ID NO: 1758293 - DNA, 15 bp, Homo sapiens
tatcaccataaagac

SEQ ID NO: 1758294 - DNA, 15 bp, Homo sapiens
atcaccataaagacc

SEQ ID NO: 1758295 - DNA, 15 bp, Homo sapiens
tcaccataaagaccc

SEQ ID NO: 1758296 - DNA, 15 bp, Homo sapiens
caccataaagaccca

SEQ ID NO: 1758297 - DNA, 15 bp, Homo sapiens
accataaagacccaa

SEQ ID NO: 1758298 - DNA, 15 bp, Homo sapiens
ccataaagacccaaa

SEQ ID NO: 1758299 - DNA, 15 bp, Homo sapiens
cataaagacccaaaa

SEQ ID NO: 1758300 - DNA, 15 bp, Homo sapiens
ataaagacccaaaat

SEQ ID NO: 1758301 - DNA, 15 bp, Homo sapiens
taaagacccaaaatt

SEQ ID NO: 1758302 - DNA, 15 bp, Homo sapiens
aaagacccaaaatta

SEQ ID NO: 1758303 - DNA, 15 bp, Homo sapiens
aagacccaaaattat

SEQ ID NO: 1758304 - DNA, 15 bp, Homo sapiens
agacccaaaattata

SEQ ID NO: 1758305 - DNA, 15 bp, Homo sapiens
gacccaaaattatac

SEQ ID NO: 1758306 - DNA, 15 bp, Homo sapiens
acccaaaattataca

SEQ ID NO: 1758307 - DNA, 15 bp, Homo sapiens
cccaaaattatacag

SEQ ID NO: 1758308 - DNA, 15 bp, Homo sapiens
ccaaaattatacaga

SEQ ID NO: 1758309 - DNA, 15 bp, Homo sapiens
caaaattatacagaa

SEQ ID NO: 1758310 - DNA, 15 bp, Homo sapiens
aaaattatacagaaa

SEQ ID NO: 1758311 - DNA, 15 bp, Homo sapiens
aaattatacagaaaa

SEQ ID NO: 1758312 - DNA, 15 bp, Homo sapiens
aattatacagaaaaa

SEQ ID NO: 1758313 - DNA, 15 bp, Homo sapiens
attatacagaaaaaa

SEQ ID NO: 1758314 - DNA, 15 bp, Homo sapiens
ttatacagaaaaaaa

SEQ ID NO: 1758315 - DNA, 15 bp, Homo sapiens
tatacagaaaaaaat

SEQ ID NO: 1758316 - DNA, 15 bp, Homo sapiens
atacagaaaaaaatg

SEQ ID NO: 1758317 - DNA, 15 bp, Homo sapiens
tacagaaaaaaatgg

SEQ ID NO: 1758318 - DNA, 15 bp, Homo sapiens
acagaaaaaaatggg

SEQ ID NO: 1758319 - DNA, 15 bp, Homo sapiens
cagaaaaaaatggga

SEQ ID NO: 1758320 - DNA, 15 bp, Homo sapiens
agaaaaaaatgggaa

SEQ ID NO: 1758321 - DNA, 15 bp, Homo sapiens
gaaaaaaatgggaaa

SEQ ID NO: 1758322 - DNA, 15 bp, Homo sapiens
aaaaaaatgggaaag

SEQ ID NO: 1758323 - DNA, 15 bp, Homo sapiens
aaaaaatgggaaaga

SEQ ID NO: 1758324 - DNA, 15 bp, Homo sapiens
aaaaatgggaaagat

SEQ ID NO: 1758325 - DNA, 15 bp, Homo sapiens
aaaatgggaaagata

SEQ ID NO: 1758326 - DNA, 15 bp, Homo sapiens
aaatgggaaagataa

SEQ ID NO: 1758327 - DNA, 15 bp, Homo sapiens
aatgggaaagataaa

SEQ ID NO: 1758328 - DNA, 15 bp, Homo sapiens
atgggaaagataaac

SEQ ID NO: 1758329 - DNA, 15 bp, Homo sapiens
tgggaaagataaaca

SEQ ID NO: 1758330 - DNA, 15 bp, Homo sapiens
gggaaagataaacac

SEQ ID NO: 1758331 - DNA, 15 bp, Homo sapiens
ggaaagataaacacc

SEQ ID NO: 1758332 - DNA, 15 bp, Homo sapiens
gaaagataaacacct

SEQ ID NO: 1758333 - DNA, 15 bp, Homo sapiens
aaagataaacaccta

SEQ ID NO: 1758334 - DNA, 15 bp, Homo sapiens
aagataaacacctaa

SEQ ID NO: 1758335 - DNA, 15 bp, Homo sapiens
agataaacacctaat

SEQ ID NO: 1758336 - DNA, 15 bp, Homo sapiens
gataaacacctaatt

SEQ ID NO: 1758337 - DNA, 15 bp, Homo sapiens
ataaacacctaattc

SEQ ID NO: 1758338 - DNA, 15 bp, Homo sapiens
taaacacctaattca

SEQ ID NO: 1758339 - DNA, 15 bp, Homo sapiens
aaacacctaattcag

SEQ ID NO: 1758340 - DNA, 15 bp, Homo sapiens
aacacctaattcagg

SEQ ID NO: 1758341 - DNA, 15 bp, Homo sapiens
acacctaattcagga

SEQ ID NO: 1758342 - DNA, 15 bp, Homo sapiens
cacctaattcaggag

SEQ ID NO: 1758343 - DNA, 15 bp, Homo sapiens
acctaattcaggaga

SEQ ID NO: 1758344 - DNA, 15 bp, Homo sapiens
cctaattcaggagag

SEQ ID NO: 1758345 - DNA, 15 bp, Homo sapiens
ctaattcaggagagg

SEQ ID NO: 1758346 - DNA, 15 bp, Homo sapiens
taattcaggagaggg

SEQ ID NO: 1758347 - DNA, 15 bp, Homo sapiens
aattcaggagagggg

SEQ ID NO: 1758348 - DNA, 15 bp, Homo sapiens
attcaggagaggggt

SEQ ID NO: 1758349 - DNA, 15 bp, Homo sapiens
ttcaggagaggggtt

SEQ ID NO: 1758350 - DNA, 15 bp, Homo sapiens
tcaggagaggggtta

SEQ ID NO: 1758351 - DNA, 15 bp, Homo sapiens
caggagaggggttat

SEQ ID NO: 1758352 - DNA, 15 bp, Homo sapiens
aggagaggggttatc

SEQ ID NO: 1758353 - DNA, 15 bp, Homo sapiens
ggagaggggttatct

SEQ ID NO: 1758354 - DNA, 15 bp, Homo sapiens
gagaggggttatctc

SEQ ID NO: 1758355 - DNA, 15 bp, Homo sapiens
agaggggttatctct

SEQ ID NO: 1758356 - DNA, 15 bp, Homo sapiens
gaggggttatctctg

SEQ ID NO: 1758357 - DNA, 15 bp, Homo sapiens
aggggttatctctgg

SEQ ID NO: 1758358 - DNA, 15 bp, Homo sapiens
ggggttatctctggg

SEQ ID NO: 1758359 - DNA, 15 bp, Homo sapiens
gggttatctctgggg

SEQ ID NO: 1758360 - DNA, 15 bp, Homo sapiens
ggttatctctgggga

SEQ ID NO: 1758361 - DNA, 15 bp, Homo sapiens
gttatctctggggag

SEQ ID NO: 1758362 - DNA, 15 bp, Homo sapiens
ttatctctggggagc

SEQ ID NO: 1758363 - DNA, 15 bp, Homo sapiens
tatctctggggagcg

SEQ ID NO: 1758364 - DNA, 15 bp, Homo sapiens
atctctggggagcgg

SEQ ID NO: 1758365 - DNA, 15 bp, Homo sapiens
tctctggggagcggg

SEQ ID NO: 1758366 - DNA, 15 bp, Homo sapiens
ctctggggagcgggg

SEQ ID NO: 1758367 - DNA, 15 bp, Homo sapiens
tctggggagcgggga

SEQ ID NO: 1758368 - DNA, 15 bp, Homo sapiens
ctggggagcggggag

SEQ ID NO: 1758369 - DNA, 15 bp, Homo sapiens
tggggagcggggaga

SEQ ID NO: 1758370 - DNA, 15 bp, Homo sapiens
ggggagcggggagag

SEQ ID NO: 1758371 - DNA, 15 bp, Homo sapiens
gggagcggggagaga

SEQ ID NO: 1758372 - DNA, 15 bp, Homo sapiens
ggagcggggagagat

SEQ ID NO: 1758373 - DNA, 15 bp, Homo sapiens
gagcggggagagatg

SEQ ID NO: 1758374 - DNA, 15 bp, Homo sapiens
agcggggagagatga

SEQ ID NO: 1758375 - DNA, 15 bp, Homo sapiens
gcggggagagatgaa

SEQ ID NO: 1758376 - DNA, 15 bp, Homo sapiens
cggggagagatgaaa

SEQ ID NO: 1758377 - DNA, 15 bp, Homo sapiens
ggggagagatgaaag

SEQ ID NO: 1758378 - DNA, 15 bp, Homo sapiens
gggagagatgaaagg

SEQ ID NO: 1758379 - DNA, 15 bp, Homo sapiens
ggagagatgaaagga

SEQ ID NO: 1758380 - DNA, 15 bp, Homo sapiens
gagagatgaaaggag

SEQ ID NO: 1758381 - DNA, 15 bp, Homo sapiens
agagatgaaaggaga

SEQ ID NO: 1758382 - DNA, 15 bp, Homo sapiens
gagatgaaaggagaa

SEQ ID NO: 1758383 - DNA, 15 bp, Homo sapiens
agatgaaaggagaaa

SEQ ID NO: 1758384 - DNA, 15 bp, Homo sapiens
gatgaaaggagaaag

SEQ ID NO: 1758385 - DNA, 15 bp, Homo sapiens
atgaaaggagaaagg

SEQ ID NO: 1758386 - DNA, 15 bp, Homo sapiens
tgaaaggagaaaggg

SEQ ID NO: 1758387 - DNA, 15 bp, Homo sapiens
gaaaggagaaagggg

SEQ ID NO: 1758388 - DNA, 15 bp, Homo sapiens
aaaggagaaagggga

SEQ ID NO: 1758389 - DNA, 15 bp, Homo sapiens
aaggagaaaggggac

SEQ ID NO: 1758390 - DNA, 15 bp, Homo sapiens
aggagaaaggggaca

SEQ ID NO: 1758391 - DNA, 15 bp, Homo sapiens
ggagaaaggggacac

SEQ ID NO: 1758392 - DNA, 15 bp, Homo sapiens
gagaaaggggacaca

SEQ ID NO: 1758393 - DNA, 15 bp, Homo sapiens
agaaaggggacacag

SEQ ID NO: 1758394 - DNA, 15 bp, Homo sapiens
gaaaggggacacagt

SEQ ID NO: 1758395 - DNA, 15 bp, Homo sapiens
aaaggggacacagta

SEQ ID NO: 1758396 - DNA, 15 bp, Homo sapiens
aaggggacacagtag

SEQ ID NO: 1758397 - DNA, 15 bp, Homo sapiens
aggggacacagtagg

SEQ ID NO: 1758398 - DNA, 15 bp, Homo sapiens
ggggacacagtagga

SEQ ID NO: 1758399 - DNA, 15 bp, Homo sapiens
gggacacagtaggag

SEQ ID NO: 1758400 - DNA, 15 bp, Homo sapiens
ggacacagtaggagt

SEQ ID NO: 1758401 - DNA, 15 bp, Homo sapiens
gacacagtaggagtg

SEQ ID NO: 1758402 - DNA, 15 bp, Homo sapiens
acacagtaggagtgc

SEQ ID NO: 1758403 - DNA, 15 bp, Homo sapiens
cacagtaggagtgcg

SEQ ID NO: 1758404 - DNA, 15 bp, Homo sapiens
acagtaggagtgcgg

SEQ ID NO: 1758405 - DNA, 15 bp, Homo sapiens
cagtaggagtgcggg

SEQ ID NO: 1758406 - DNA, 15 bp, Homo sapiens
agtaggagtgcgggg

SEQ ID NO: 1758407 - DNA, 15 bp, Homo sapiens
gtaggagtgcgggga

SEQ ID NO: 1758408 - DNA, 15 bp, Homo sapiens
taggagtgcggggat

SEQ ID NO: 1758409 - DNA, 15 bp, Homo sapiens
aggagtgcggggatc

SEQ ID NO: 1758410 - DNA, 15 bp, Homo sapiens
ggagtgcggggatca

SEQ ID NO: 1758411 - DNA, 15 bp, Homo sapiens
gagtgcggggatcaa

SEQ ID NO: 1758412 - DNA, 15 bp, Homo sapiens
agtgcggggatcaag

SEQ ID NO: 1758413 - DNA, 15 bp, Homo sapiens
gtgcggggatcaagc

SEQ ID NO: 1758414 - DNA, 15 bp, Homo sapiens
tgcggggatcaagct

SEQ ID NO: 1758415 - DNA, 15 bp, Homo sapiens
gcggggatcaagctt

SEQ ID NO: 1758416 - DNA, 15 bp, Homo sapiens
cggggatcaagcttc

SEQ ID NO: 1758417 - DNA, 15 bp, Homo sapiens
ggggatcaagcttca

SEQ ID NO: 1758418 - DNA, 15 bp, Homo sapiens
gggatcaagcttcaa

SEQ ID NO: 1758419 - DNA, 15 bp, Homo sapiens
ggatcaagcttcaaa

SEQ ID NO: 1758420 - DNA, 15 bp, Homo sapiens
gatcaagcttcaaag

SEQ ID NO: 1758421 - DNA, 15 bp, Homo sapiens
atcaagcttcaaagc

SEQ ID NO: 1758422 - DNA, 15 bp, Homo sapiens
tcaagcttcaaagct

SEQ ID NO: 1758423 - DNA, 15 bp, Homo sapiens
caagcttcaaagctt

SEQ ID NO: 1758424 - DNA, 15 bp, Homo sapiens
aagcttcaaagcttt

SEQ ID NO: 1758425 - DNA, 15 bp, Homo sapiens
agcttcaaagctttt

SEQ ID NO: 1758426 - DNA, 15 bp, Homo sapiens
gcttcaaagcttttg

SEQ ID NO: 1758427 - DNA, 15 bp, Homo sapiens
cttcaaagcttttgg

SEQ ID NO: 1758428 - DNA, 15 bp, Homo sapiens
ttcaaagcttttggt

SEQ ID NO: 1758429 - DNA, 15 bp, Homo sapiens
tcaaagcttttggta

SEQ ID NO: 1758430 - DNA, 15 bp, Homo sapiens
caaagcttttggtaa

SEQ ID NO: 1758431 - DNA, 15 bp, Homo sapiens
aaagcttttggtaat

SEQ ID NO: 1758432 - DNA, 15 bp, Homo sapiens
aagcttttggtaatt

SEQ ID NO: 1758433 - DNA, 15 bp, Homo sapiens
agcttttggtaattg

SEQ ID NO: 1758434 - DNA, 15 bp, Homo sapiens
gcttttggtaattgg

SEQ ID NO: 1758435 - DNA, 15 bp, Homo sapiens
cttttggtaattggt

SEQ ID NO: 1758436 - DNA, 15 bp, Homo sapiens
ttttggtaattggtg

SEQ ID NO: 1758437 - DNA, 15 bp, Homo sapiens
tttggtaattggtgg

SEQ ID NO: 1758438 - DNA, 15 bp, Homo sapiens
ttggtaattggtggt

SEQ ID NO: 1758439 - DNA, 15 bp, Homo sapiens
tggtaattggtggtg

SEQ ID NO: 1758440 - DNA, 15 bp, Homo sapiens
ggtaattggtggtgt

SEQ ID NO: 1758441 - DNA, 15 bp, Homo sapiens
gtaattggtggtgtg

SEQ ID NO: 1758442 - DNA, 15 bp, Homo sapiens
taattggtggtgtgt

SEQ ID NO: 1758443 - DNA, 15 bp, Homo sapiens
aattggtggtgtgta

SEQ ID NO: 1758444 - DNA, 15 bp, Homo sapiens
attggtggtgtgtac

SEQ ID NO: 1758445 - DNA, 15 bp, Homo sapiens
ttggtggtgtgtaca

SEQ ID NO: 1758446 - DNA, 15 bp, Homo sapiens
tggtggtgtgtacat

SEQ ID NO: 1758447 - DNA, 15 bp, Homo sapiens
ggtggtgtgtacatg

SEQ ID NO: 1758448 - DNA, 15 bp, Homo sapiens
gtggtgtgtacatga

SEQ ID NO: 1758449 - DNA, 15 bp, Homo sapiens
tggtgtgtacatgag

SEQ ID NO: 1758450 - DNA, 15 bp, Homo sapiens
ggtgtgtacatgaga

SEQ ID NO: 1758451 - DNA, 15 bp, Homo sapiens
gtgtgtacatgagag

SEQ ID NO: 1758452 - DNA, 15 bp, Homo sapiens
tgtgtacatgagagt

SEQ ID NO: 1758453 - DNA, 15 bp, Homo sapiens
gtgtacatgagagtt

SEQ ID NO: 1758454 - DNA, 15 bp, Homo sapiens
tgtacatgagagttc

SEQ ID NO: 1758455 - DNA, 15 bp, Homo sapiens
gtacatgagagttct

SEQ ID NO: 1758456 - DNA, 15 bp, Homo sapiens
tacatgagagttctt

SEQ ID NO: 1758457 - DNA, 15 bp, Homo sapiens
acatgagagttcttt

SEQ ID NO: 1758458 - DNA, 15 bp, Homo sapiens
catgagagttcttta

SEQ ID NO: 1758459 - DNA, 15 bp, Homo sapiens
atgagagttctttaa

SEQ ID NO: 1758460 - DNA, 15 bp, Homo sapiens
tgagagttctttaag

SEQ ID NO: 1758461 - DNA, 15 bp, Homo sapiens
gagagttctttaagc

SEQ ID NO: 1758462 - DNA, 15 bp, Homo sapiens
agagttctttaagct

SEQ ID NO: 1758463 - DNA, 15 bp, Homo sapiens
gagttctttaagctg

SEQ ID NO: 1758464 - DNA, 15 bp, Homo sapiens
agttctttaagctga

SEQ ID NO: 1758465 - DNA, 15 bp, Homo sapiens
gttctttaagctgat

SEQ ID NO: 1758466 - DNA, 15 bp, Homo sapiens
ttctttaagctgatt

SEQ ID NO: 1758467 - DNA, 15 bp, Homo sapiens
tctttaagctgattt

SEQ ID NO: 1758468 - DNA, 15 bp, Homo sapiens
ctttaagctgatttg

SEQ ID NO: 1758469 - DNA, 15 bp, Homo sapiens
tttaagctgatttgt

SEQ ID NO: 1758470 - DNA, 15 bp, Homo sapiens
ttaagctgatttgtg

SEQ ID NO: 1758471 - DNA, 15 bp, Homo sapiens
taagctgatttgtgt

SEQ ID NO: 1758472 - DNA, 15 bp, Homo sapiens
aagctgatttgtgta

SEQ ID NO: 1758473 - DNA, 15 bp, Homo sapiens
agctgatttgtgtac

SEQ ID NO: 1758474 - DNA, 15 bp, Homo sapiens
gctgatttgtgtacg

SEQ ID NO: 1758475 - DNA, 15 bp, Homo sapiens
ctgatttgtgtacga

SEQ ID NO: 1758476 - DNA, 15 bp, Homo sapiens
tgatttgtgtacgat

SEQ ID NO: 1758477 - DNA, 15 bp, Homo sapiens
gatttgtgtacgata

SEQ ID NO: 1758478 - DNA, 15 bp, Homo sapiens
atttgtgtacgatat

SEQ ID NO: 1758479 - DNA, 15 bp, Homo sapiens
tttgtgtacgatatt

SEQ ID NO: 1758480 - DNA, 15 bp, Homo sapiens
ttgtgtacgatattt

SEQ ID NO: 1758481 - DNA, 15 bp, Homo sapiens
tgtgtacgatatttc

SEQ ID NO: 1758482 - DNA, 15 bp, Homo sapiens
gtgtacgatatttca

SEQ ID NO: 1758483 - DNA, 15 bp, Homo sapiens
tgtacgatatttcac

SEQ ID NO: 1758484 - DNA, 15 bp, Homo sapiens
gtacgatatttcaca

SEQ ID NO: 1758485 - DNA, 15 bp, Homo sapiens
tacgatatttcacaa

SEQ ID NO: 1758486 - DNA, 15 bp, Homo sapiens
acgatatttcacaat

SEQ ID NO: 1758487 - DNA, 15 bp, Homo sapiens
cgatatttcacaata

SEQ ID NO: 1758488 - DNA, 15 bp, Homo sapiens
gatatttcacaatat

SEQ ID NO: 1758489 - DNA, 15 bp, Homo sapiens
atatttcacaatatg

SEQ ID NO: 1758490 - DNA, 15 bp, Homo sapiens
tatttcacaatatgt

SEQ ID NO: 1758491 - DNA, 15 bp, Homo sapiens
atttcacaatatgtt

SEQ ID NO: 1758492 - DNA, 15 bp, Homo sapiens
tttcacaatatgttg

SEQ ID NO: 1758493 - DNA, 15 bp, Homo sapiens
ttcacaatatgttgt

SEQ ID NO: 1758494 - DNA, 15 bp, Homo sapiens
tcacaatatgttgtc

SEQ ID NO: 1758495 - DNA, 15 bp, Homo sapiens
cacaatatgttgtca

SEQ ID NO: 1758496 - DNA, 15 bp, Homo sapiens
acaatatgttgtcaa

SEQ ID NO: 1758497 - DNA, 15 bp, Homo sapiens
caatatgttgtcaaa

SEQ ID NO: 1758498 - DNA, 15 bp, Homo sapiens
aatatgttgtcaaat

SEQ ID NO: 1758499 - DNA, 15 bp, Homo sapiens
atatgttgtcaaatt

SEQ ID NO: 1758500 - DNA, 15 bp, Homo sapiens
tatgttgtcaaattg

SEQ ID NO: 1758501 - DNA, 15 bp, Homo sapiens
atgttgtcaaattga

SEQ ID NO: 1758502 - DNA, 15 bp, Homo sapiens
tgttgtcaaattgag

SEQ ID NO: 1758503 - DNA, 15 bp, Homo sapiens
gttgtcaaattgaga

SEQ ID NO: 1758504 - DNA, 15 bp, Homo sapiens
ttgtcaaattgagag

SEQ ID NO: 1758505 - DNA, 15 bp, Homo sapiens
tgtcaaattgagaga

SEQ ID NO: 1758506 - DNA, 15 bp, Homo sapiens
gtcaaattgagagag

SEQ ID NO: 1758507 - DNA, 15 bp, Homo sapiens
tcaaattgagagagc

SEQ ID NO: 1758508 - DNA, 15 bp, Homo sapiens
caaattgagagagca

SEQ ID NO: 1758509 - DNA, 15 bp, Homo sapiens
aaattgagagagcaa

SEQ ID NO: 1758510 - DNA, 15 bp, Homo sapiens
aattgagagagcaag

SEQ ID NO: 1758511 - DNA, 15 bp, Homo sapiens
attgagagagcaagc

SEQ ID NO: 1758512 - DNA, 15 bp, Homo sapiens
ttgagagagcaagcc

SEQ ID NO: 1758513 - DNA, 15 bp, Homo sapiens
tgagagagcaagcca

SEQ ID NO: 1758514 - DNA, 15 bp, Homo sapiens
gagagagcaagccag

SEQ ID NO: 1758515 - DNA, 15 bp, Homo sapiens
agagagcaagccagt

SEQ ID NO: 1758516 - DNA, 15 bp, Homo sapiens
gagagcaagccagtg

SEQ ID NO: 1758517 - DNA, 15 bp, Homo sapiens
agagcaagccagtga

SEQ ID NO: 1758518 - DNA, 15 bp, Homo sapiens
gagcaagccagtgag

SEQ ID NO: 1758519 - DNA, 15 bp, Homo sapiens
agcaagccagtgagt

SEQ ID NO: 1758520 - DNA, 15 bp, Homo sapiens
gcaagccagtgagta

SEQ ID NO: 1758521 - DNA, 15 bp, Homo sapiens
caagccagtgagtag

SEQ ID NO: 1758522 - DNA, 15 bp, Homo sapiens
aagccagtgagtaga

SEQ ID NO: 1758523 - DNA, 15 bp, Homo sapiens
agccagtgagtagaa

SEQ ID NO: 1758524 - DNA, 15 bp, Homo sapiens
gccagtgagtagaac

SEQ ID NO: 1758525 - DNA, 15 bp, Homo sapiens
ccagtgagtagaact

SEQ ID NO: 1758526 - DNA, 15 bp, Homo sapiens
cagtgagtagaactc

SEQ ID NO: 1758527 - DNA, 15 bp, Homo sapiens
agtgagtagaactcc

SEQ ID NO: 1758528 - DNA, 15 bp, Homo sapiens
gtgagtagaactcca

SEQ ID NO: 1758529 - DNA, 15 bp, Homo sapiens
tgagtagaactccag

SEQ ID NO: 1758530 - DNA, 15 bp, Homo sapiens
gagtagaactccaga

SEQ ID NO: 1758531 - DNA, 15 bp, Homo sapiens
agtagaactccagag

SEQ ID NO: 1758532 - DNA, 15 bp, Homo sapiens
gtagaactccagagt

SEQ ID NO: 1758533 - DNA, 15 bp, Homo sapiens
tagaactccagagtt

SEQ ID NO: 1758534 - DNA, 15 bp, Homo sapiens
agaactccagagttc

SEQ ID NO: 1758535 - DNA, 15 bp, Homo sapiens
gaactccagagttcc

SEQ ID NO: 1758536 - DNA, 15 bp, Homo sapiens
aactccagagttcca

SEQ ID NO: 1758537 - DNA, 15 bp, Homo sapiens
actccagagttccat

SEQ ID NO: 1758538 - DNA, 15 bp, Homo sapiens
ctccagagttccatt

SEQ ID NO: 1758539 - DNA, 15 bp, Homo sapiens
tccagagttccattc

SEQ ID NO: 1758540 - DNA, 15 bp, Homo sapiens
ccagagttccattcc

SEQ ID NO: 1758541 - DNA, 15 bp, Homo sapiens
cagagttccattccc

SEQ ID NO: 1758542 - DNA, 15 bp, Homo sapiens
agagttccattccca

SEQ ID NO: 1758543 - DNA, 15 bp, Homo sapiens
gagttccattcccac

SEQ ID NO: 1758544 - DNA, 15 bp, Homo sapiens
agttccattcccacc

SEQ ID NO: 1758545 - DNA, 15 bp, Homo sapiens
gttccattcccacct

SEQ ID NO: 1758546 - DNA, 15 bp, Homo sapiens
ttccattcccacctc

SEQ ID NO: 1758547 - DNA, 15 bp, Homo sapiens
tccattcccacctca

SEQ ID NO: 1758548 - DNA, 15 bp, Homo sapiens
ccattcccacctcaa

SEQ ID NO: 1758549 - DNA, 15 bp, Homo sapiens
cattcccacctcaac

SEQ ID NO: 1758550 - DNA, 15 bp, Homo sapiens
attcccacctcaacc

SEQ ID NO: 1758551 - DNA, 15 bp, Homo sapiens
ttcccacctcaaccc

SEQ ID NO: 1758552 - DNA, 15 bp, Homo sapiens
tcccacctcaacccc

SEQ ID NO: 1758553 - DNA, 15 bp, Homo sapiens
cccacctcaacccca

SEQ ID NO: 1758554 - DNA, 15 bp, Homo sapiens
ccacctcaaccccag

SEQ ID NO: 1758555 - DNA, 15 bp, Homo sapiens
cacctcaaccccagt

SEQ ID NO: 1758556 - DNA, 15 bp, Homo sapiens
acctcaaccccagtt

SEQ ID NO: 1758557 - DNA, 15 bp, Homo sapiens
cctcaaccccagttg

SEQ ID NO: 1758558 - DNA, 15 bp, Homo sapiens
ctcaaccccagttgc

SEQ ID NO: 1758559 - DNA, 15 bp, Homo sapiens
tcaaccccagttgcc

SEQ ID NO: 1758560 - DNA, 15 bp, Homo sapiens
caaccccagttgcca

SEQ ID NO: 1758561 - DNA, 15 bp, Homo sapiens
aaccccagttgccaa

SEQ ID NO: 1758562 - DNA, 15 bp, Homo sapiens
accccagttgccaaa

SEQ ID NO: 1758563 - DNA, 15 bp, Homo sapiens
ccccagttgccaaag

SEQ ID NO: 1758564 - DNA, 15 bp, Homo sapiens
cccagttgccaaagc

SEQ ID NO: 1758565 - DNA, 15 bp, Homo sapiens
ccagttgccaaagcc

SEQ ID NO: 1758566 - DNA, 15 bp, Homo sapiens
cagttgccaaagccc

SEQ ID NO: 1758567 - DNA, 15 bp, Homo sapiens
agttgccaaagcccc

SEQ ID NO: 1758568 - DNA, 15 bp, Homo sapiens
gttgccaaagccccc

SEQ ID NO: 1758569 - DNA, 15 bp, Homo sapiens
ttgccaaagccccca

SEQ ID NO: 1758570 - DNA, 15 bp, Homo sapiens
tgccaaagcccccaa

SEQ ID NO: 1758571 - DNA, 15 bp, Homo sapiens
gccaaagcccccaag

SEQ ID NO: 1758572 - DNA, 15 bp, Homo sapiens
ccaaagcccccaagc

SEQ ID NO: 1758573 - DNA, 15 bp, Homo sapiens
caaagcccccaagca

SEQ ID NO: 1758574 - DNA, 15 bp, Homo sapiens
aaagcccccaagcag

SEQ ID NO: 1758575 - DNA, 15 bp, Homo sapiens
aagcccccaagcagg

SEQ ID NO: 1758576 - DNA, 15 bp, Homo sapiens
agcccccaagcagga

SEQ ID NO: 1758577 - DNA, 15 bp, Homo sapiens
gcccccaagcaggag

SEQ ID NO: 1758578 - DNA, 15 bp, Homo sapiens
cccccaagcaggagg

SEQ ID NO: 1758579 - DNA, 15 bp, Homo sapiens
ccccaagcaggaggg

SEQ ID NO: 1758580 - DNA, 15 bp, Homo sapiens
cccaagcaggaggga

SEQ ID NO: 1758581 - DNA, 15 bp, Homo sapiens
ccaagcaggagggag

SEQ ID NO: 1758582 - DNA, 15 bp, Homo sapiens
caagcaggagggagg

SEQ ID NO: 1758583 - DNA, 15 bp, Homo sapiens
aagcaggagggaggt

SEQ ID NO: 1758584 - DNA, 15 bp, Homo sapiens
agcaggagggaggtt

SEQ ID NO: 1758585 - DNA, 15 bp, Homo sapiens
gcaggagggaggttg

SEQ ID NO: 1758586 - DNA, 15 bp, Homo sapiens
caggagggaggttga

SEQ ID NO: 1758587 - DNA, 15 bp, Homo sapiens
aggagggaggttgag

SEQ ID NO: 1758588 - DNA, 15 bp, Homo sapiens
ggagggaggttgagg

SEQ ID NO: 1758589 - DNA, 15 bp, Homo sapiens
gagggaggttgaggg

SEQ ID NO: 1758590 - DNA, 15 bp, Homo sapiens
agggaggttgaggga

SEQ ID NO: 1758591 - DNA, 15 bp, Homo sapiens
gggaggttgagggag

SEQ ID NO: 1758592 - DNA, 15 bp, Homo sapiens
ggaggttgagggaga

SEQ ID NO: 1758593 - DNA, 15 bp, Homo sapiens
gaggttgagggagag

SEQ ID NO: 1758594 - DNA, 15 bp, Homo sapiens
aggttgagggagagg

SEQ ID NO: 1758595 - DNA, 15 bp, Homo sapiens
ggttgagggagagga

SEQ ID NO: 1758596 - DNA, 15 bp, Homo sapiens
gttgagggagaggag

SEQ ID NO: 1758597 - DNA, 15 bp, Homo sapiens
ttgagggagaggagg

SEQ ID NO: 1758598 - DNA, 15 bp, Homo sapiens
tgagggagaggaggt

SEQ ID NO: 1758599 - DNA, 15 bp, Homo sapiens
gagggagaggaggta

SEQ ID NO: 1758600 - DNA, 15 bp, Homo sapiens
agggagaggaggtaa

SEQ ID NO: 1758601 - DNA, 15 bp, Homo sapiens
gggagaggaggtaag

SEQ ID NO: 1758602 - DNA, 15 bp, Homo sapiens
ggagaggaggtaaga

SEQ ID NO: 1758603 - DNA, 15 bp, Homo sapiens
gagaggaggtaagaa

SEQ ID NO: 1758604 - DNA, 15 bp, Homo sapiens
agaggaggtaagaag

SEQ ID NO: 1758605 - DNA, 15 bp, Homo sapiens
gaggaggtaagaagg

SEQ ID NO: 1758606 - DNA, 15 bp, Homo sapiens
aggaggtaagaaggt

SEQ ID NO: 1758607 - DNA, 15 bp, Homo sapiens
ggaggtaagaaggtc

SEQ ID NO: 1758608 - DNA, 15 bp, Homo sapiens
gaggtaagaaggtct

SEQ ID NO: 1758609 - DNA, 15 bp, Homo sapiens
aggtaagaaggtctg

SEQ ID NO: 1758610 - DNA, 15 bp, Homo sapiens
ggtaagaaggtctgt

SEQ ID NO: 1758611 - DNA, 15 bp, Homo sapiens
gtaagaaggtctgtg

SEQ ID NO: 1758612 - DNA, 15 bp, Homo sapiens
taagaaggtctgtgc

SEQ ID NO: 1758613 - DNA, 15 bp, Homo sapiens
aagaaggtctgtgcc

SEQ ID NO: 1758614 - DNA, 15 bp, Homo sapiens
agaaggtctgtgccc

SEQ ID NO: 1758615 - DNA, 15 bp, Homo sapiens
gaaggtctgtgcccc

SEQ ID NO: 1758616 - DNA, 15 bp, Homo sapiens
aaggtctgtgcccca

SEQ ID NO: 1758617 - DNA, 15 bp, Homo sapiens
aggtctgtgccccaa

SEQ ID NO: 1758618 - DNA, 15 bp, Homo sapiens
ggtctgtgccccaag

SEQ ID NO: 1758619 - DNA, 15 bp, Homo sapiens
gtctgtgccccaagc

SEQ ID NO: 1758620 - DNA, 15 bp, Homo sapiens
tctgtgccccaagct

SEQ ID NO: 1758621 - DNA, 15 bp, Homo sapiens
ctgtgccccaagctc

SEQ ID NO: 1758622 - DNA, 15 bp, Homo sapiens
tgtgccccaagctcc

SEQ ID NO: 1758623 - DNA, 15 bp, Homo sapiens
gtgccccaagctcct

SEQ ID NO: 1758624 - DNA, 15 bp, Homo sapiens
tgccccaagctcctg

SEQ ID NO: 1758625 - DNA, 15 bp, Homo sapiens
gccccaagctcctga

SEQ ID NO: 1758626 - DNA, 15 bp, Homo sapiens
ccccaagctcctgag

SEQ ID NO: 1758627 - DNA, 15 bp, Homo sapiens
cccaagctcctgagg

SEQ ID NO: 1758628 - DNA, 15 bp, Homo sapiens
ccaagctcctgagga

SEQ ID NO: 1758629 - DNA, 15 bp, Homo sapiens
caagctcctgaggag

SEQ ID NO: 1758630 - DNA, 15 bp, Homo sapiens
aagctcctgaggaga

SEQ ID NO: 1758631 - DNA, 15 bp, Homo sapiens
agctcctgaggagat

SEQ ID NO: 1758632 - DNA, 15 bp, Homo sapiens
gctcctgaggagatt

SEQ ID NO: 1758633 - DNA, 15 bp, Homo sapiens
ctcctgaggagattg

SEQ ID NO: 1758634 - DNA, 15 bp, Homo sapiens
tcctgaggagattga

SEQ ID NO: 1758635 - DNA, 15 bp, Homo sapiens
cctgaggagattgaa

SEQ ID NO: 1758636 - DNA, 15 bp, Homo sapiens
ctgaggagattgaaa

SEQ ID NO: 1758637 - DNA, 15 bp, Homo sapiens
tgaggagattgaaag

SEQ ID NO: 1758638 - DNA, 15 bp, Homo sapiens
gaggagattgaaagc

SEQ ID NO: 1758639 - DNA, 15 bp, Homo sapiens
aggagattgaaagca

SEQ ID NO: 1758640 - DNA, 15 bp, Homo sapiens
ggagattgaaagcag

SEQ ID NO: 1758641 - DNA, 15 bp, Homo sapiens
gagattgaaagcagc

SEQ ID NO: 1758642 - DNA, 15 bp, Homo sapiens
agattgaaagcagct

SEQ ID NO: 1758643 - DNA, 15 bp, Homo sapiens
gattgaaagcagctc

SEQ ID NO: 1758644 - DNA, 15 bp, Homo sapiens
attgaaagcagctcg

SEQ ID NO: 1758645 - DNA, 15 bp, Homo sapiens
ttgaaagcagctcgg

SEQ ID NO: 1758646 - DNA, 15 bp, Homo sapiens
tgaaagcagctcgga

SEQ ID NO: 1758647 - DNA, 15 bp, Homo sapiens
gaaagcagctcggac

SEQ ID NO: 1758648 - DNA, 15 bp, Homo sapiens
aaagcagctcggaca

SEQ ID NO: 1758649 - DNA, 15 bp, Homo sapiens
aagcagctcggacag

SEQ ID NO: 1758650 - DNA, 15 bp, Homo sapiens
agcagctcggacaga

SEQ ID NO: 1758651 - DNA, 15 bp, Homo sapiens
gcagctcggacagat

SEQ ID NO: 1758652 - DNA, 15 bp, Homo sapiens
cagctcggacagatg

SEQ ID NO: 1758653 - DNA, 15 bp, Homo sapiens
agctcggacagatgc

SEQ ID NO: 1758654 - DNA, 15 bp, Homo sapiens
gctcggacagatgct

SEQ ID NO: 1758655 - DNA, 15 bp, Homo sapiens
ctcggacagatgctg

SEQ ID NO: 1758656 - DNA, 15 bp, Homo sapiens
tcggacagatgctgg

SEQ ID NO: 1758657 - DNA, 15 bp, Homo sapiens
cggacagatgctgga

SEQ ID NO: 1758658 - DNA, 15 bp, Homo sapiens
ggacagatgctggac

SEQ ID NO: 1758659 - DNA, 15 bp, Homo sapiens
gacagatgctggact

SEQ ID NO: 1758660 - DNA, 15 bp, Homo sapiens
acagatgctggactc

SEQ ID NO: 1758661 - DNA, 15 bp, Homo sapiens
agatgctggactcct

SEQ ID NO: 1758662 - DNA, 15 bp, Homo sapiens
gatgctggactcctg

SEQ ID NO: 1758663 - DNA, 15 bp, Homo sapiens
atgctggactcctgg

SEQ ID NO: 1758664 - DNA, 15 bp, Homo sapiens
tgctggactcctggc

SEQ ID NO: 1758665 - DNA, 15 bp, Homo sapiens
gctggactcctggca

SEQ ID NO: 1758666 - DNA, 15 bp, Homo sapiens
ctggactcctggcag

SEQ ID NO: 1758667 - DNA, 15 bp, Homo sapiens
tggactcctggcaga

SEQ ID NO: 1758668 - DNA, 15 bp, Homo sapiens
ggactcctggcagat

SEQ ID NO: 1758669 - DNA, 15 bp, Homo sapiens
gactcctggcagatc

SEQ ID NO: 1758670 - DNA, 15 bp, Homo sapiens
actcctggcagatca

SEQ ID NO: 1758671 - DNA, 15 bp, Homo sapiens
ctcctggcagatcag

SEQ ID NO: 1758672 - DNA, 15 bp, Homo sapiens
tcctggcagatcagc

SEQ ID NO: 1758673 - DNA, 15 bp, Homo sapiens
cctggcagatcagcc

SEQ ID NO: 1758674 - DNA, 15 bp, Homo sapiens
ctggcagatcagccc

SEQ ID NO: 1758675 - DNA, 15 bp, Homo sapiens
tggcagatcagccct

SEQ ID NO: 1758676 - DNA, 15 bp, Homo sapiens
ggcagatcagccctt

SEQ ID NO: 1758677 - DNA, 15 bp, Homo sapiens
gcagatcagcccttc

SEQ ID NO: 1758678 - DNA, 15 bp, Homo sapiens
cagatcagcccttcg

SEQ ID NO: 1758679 - DNA, 15 bp, Homo sapiens
agatcagcccttcgg

SEQ ID NO: 1758680 - DNA, 15 bp, Homo sapiens
gatcagcccttcggc

SEQ ID NO: 1758681 - DNA, 15 bp, Homo sapiens
atcagcccttcggcc

SEQ ID NO: 1758682 - DNA, 15 bp, Homo sapiens
tcagcccttcggcct

SEQ ID NO: 1758683 - DNA, 15 bp, Homo sapiens
cagcccttcggcctt

SEQ ID NO: 1758684 - DNA, 15 bp, Homo sapiens
agcccttcggccttg

SEQ ID NO: 1758685 - DNA, 15 bp, Homo sapiens
gcccttcggccttgc

SEQ ID NO: 1758686 - DNA, 15 bp, Homo sapiens
cccttcggccttgcc

SEQ ID NO: 1758687 - DNA, 15 bp, Homo sapiens
ccttcggccttgccc

SEQ ID NO: 1758688 - DNA, 15 bp, Homo sapiens
cttcggccttgcccc

SEQ ID NO: 1758689 - DNA, 15 bp, Homo sapiens
ttcggccttgcccct

SEQ ID NO: 1758690 - DNA, 15 bp, Homo sapiens
tcggccttgcccctc

SEQ ID NO: 1758691 - DNA, 15 bp, Homo sapiens
cggccttgcccctca

SEQ ID NO: 1758692 - DNA, 15 bp, Homo sapiens
ggccttgcccctcac

SEQ ID NO: 1758693 - DNA, 15 bp, Homo sapiens
gccttgcccctcact

SEQ ID NO: 1758694 - DNA, 15 bp, Homo sapiens
ccttgcccctcactc

SEQ ID NO: 1758695 - DNA, 15 bp, Homo sapiens
cttgcccctcactcg

SEQ ID NO: 1758696 - DNA, 15 bp, Homo sapiens
ttgcccctcactcgc

SEQ ID NO: 1758697 - DNA, 15 bp, Homo sapiens
tgcccctcactcgcc

SEQ ID NO: 1758698 - DNA, 15 bp, Homo sapiens
gcccctcactcgccc

SEQ ID NO: 1758699 - DNA, 15 bp, Homo sapiens
cccctcactcgccct

SEQ ID NO: 1758700 - DNA, 15 bp, Homo sapiens
ccctcactcgccctc

SEQ ID NO: 1758701 - DNA, 15 bp, Homo sapiens
cctcactcgccctct

SEQ ID NO: 1758702 - DNA, 15 bp, Homo sapiens
ctcactcgccctctc

SEQ ID NO: 1758703 - DNA, 15 bp, Homo sapiens
tcactcgccctctcc

SEQ ID NO: 1758704 - DNA, 15 bp, Homo sapiens
cactcgccctctccg

SEQ ID NO: 1758705 - DNA, 15 bp, Homo sapiens
actcgccctctccgc

SEQ ID NO: 1758706 - DNA, 15 bp, Homo sapiens
ctcgccctctccgct

SEQ ID NO: 1758707 - DNA, 15 bp, Homo sapiens
tcgccctctccgctg

SEQ ID NO: 1758708 - DNA, 15 bp, Homo sapiens
cgccctctccgctgt

SEQ ID NO: 1758709 - DNA, 15 bp, Homo sapiens
gccctctccgctgtc

SEQ ID NO: 1758710 - DNA, 15 bp, Homo sapiens
ccctctccgctgtca

SEQ ID NO: 1758711 - DNA, 15 bp, Homo sapiens
cctctccgctgtcac

SEQ ID NO: 1758712 - DNA, 15 bp, Homo sapiens
ctctccgctgtcact

SEQ ID NO: 1758713 - DNA, 15 bp, Homo sapiens
tctccgctgtcactg

SEQ ID NO: 1758714 - DNA, 15 bp, Homo sapiens
ctccgctgtcactgt

SEQ ID NO: 1758715 - DNA, 15 bp, Homo sapiens
tccgctgtcactgtg

SEQ ID NO: 1758716 - DNA, 15 bp, Homo sapiens
ccgctgtcactgtgc

SEQ ID NO: 1758717 - DNA, 15 bp, Homo sapiens
cgctgtcactgtgca

SEQ ID NO: 1758718 - DNA, 15 bp, Homo sapiens
gctgtcactgtgcac

SEQ ID NO: 1758719 - DNA, 15 bp, Homo sapiens
ctgtcactgtgcaca

SEQ ID NO: 1758720 - DNA, 15 bp, Homo sapiens
tgtcactgtgcacat

SEQ ID NO: 1758721 - DNA, 15 bp, Homo sapiens
gtcactgtgcacatt

SEQ ID NO: 1758722 - DNA, 15 bp, Homo sapiens
tcactgtgcacattg

SEQ ID NO: 1758723 - DNA, 15 bp, Homo sapiens
cactgtgcacattgc

SEQ ID NO: 1758724 - DNA, 15 bp, Homo sapiens
actgtgcacattgct

SEQ ID NO: 1758725 - DNA, 15 bp, Homo sapiens
ctgtgcacattgctt

SEQ ID NO: 1758726 - DNA, 15 bp, Homo sapiens
tgtgcacattgcttc

SEQ ID NO: 1758727 - DNA, 15 bp, Homo sapiens
gtgcacattgcttca

SEQ ID NO: 1758728 - DNA, 15 bp, Homo sapiens
tgcacattgcttcat

SEQ ID NO: 1758729 - DNA, 15 bp, Homo sapiens
gcacattgcttcatt

SEQ ID NO: 1758730 - DNA, 15 bp, Homo sapiens
cacattgcttcattg

SEQ ID NO: 1758731 - DNA, 15 bp, Homo sapiens
acattgcttcattgt

SEQ ID NO: 1758732 - DNA, 15 bp, Homo sapiens
cattgcttcattgtc

SEQ ID NO: 1758733 - DNA, 15 bp, Homo sapiens
attgcttcattgtcc

SEQ ID NO: 1758734 - DNA, 15 bp, Homo sapiens
ttgcttcattgtccc

SEQ ID NO: 1758735 - DNA, 15 bp, Homo sapiens
tgcttcattgtccca

SEQ ID NO: 1758736 - DNA, 15 bp, Homo sapiens
gcttcattgtcccat

SEQ ID NO: 1758737 - DNA, 15 bp, Homo sapiens
cttcattgtcccatt

SEQ ID NO: 1758738 - DNA, 15 bp, Homo sapiens
ttcattgtcccattt

SEQ ID NO: 1758739 - DNA, 15 bp, Homo sapiens
tcattgtcccatttt

SEQ ID NO: 1758740 - DNA, 15 bp, Homo sapiens
cattgtcccattttt

SEQ ID NO: 1758741 - DNA, 15 bp, Homo sapiens
attgtcccatttttg

SEQ ID NO: 1758742 - DNA, 15 bp, Homo sapiens
ttgtcccatttttgt

SEQ ID NO: 1758743 - DNA, 15 bp, Homo sapiens
tgtcccatttttgtt

SEQ ID NO: 1758744 - DNA, 15 bp, Homo sapiens
gtcccatttttgttg

SEQ ID NO: 1758745 - DNA, 15 bp, Homo sapiens
tcccatttttgttgt

SEQ ID NO: 1758746 - DNA, 15 bp, Homo sapiens
cccatttttgttgtt

SEQ ID NO: 1758747 - DNA, 15 bp, Homo sapiens
ccatttttgttgttg

SEQ ID NO: 1758748 - DNA, 15 bp, Homo sapiens
catttttgttgttgt

SEQ ID NO: 1758749 - DNA, 15 bp, Homo sapiens
atttttgttgttgtt

SEQ ID NO: 1758750 - DNA, 15 bp, Homo sapiens
gttgttgttgttgaa

SEQ ID NO: 1758751 - DNA, 15 bp, Homo sapiens
ttgttgttgttgaat

SEQ ID NO: 1758752 - DNA, 15 bp, Homo sapiens
tgttgttgttgaatc

SEQ ID NO: 1758753 - DNA, 15 bp, Homo sapiens
gttgttgttgaatca

SEQ ID NO: 1758754 - DNA, 15 bp, Homo sapiens
ttgttgttgaatcat

SEQ ID NO: 1758755 - DNA, 15 bp, Homo sapiens
tgttgttgaatcatc

SEQ ID NO: 1758756 - DNA, 15 bp, Homo sapiens
gttgttgaatcatca

SEQ ID NO: 1758757 - DNA, 15 bp, Homo sapiens
ttgttgaatcatcaa

SEQ ID NO: 1758758 - DNA, 15 bp, Homo sapiens
tgttgaatcatcaaa

SEQ ID NO: 1758759 - DNA, 15 bp, Homo sapiens
gttgaatcatcaaaa

SEQ ID NO: 1758760 - DNA, 15 bp, Homo sapiens
ttgaatcatcaaaaa

SEQ ID NO: 1758761 - DNA, 15 bp, Homo sapiens
tgaatcatcaaaaaa

SEQ ID NO: 1758762 - DNA, 15 bp, Homo sapiens
gaatcatcaaaaaat

SEQ ID NO: 1758763 - DNA, 15 bp, Homo sapiens
aatcatcaaaaaatc

SEQ ID NO: 1758764 - DNA, 15 bp, Homo sapiens
atcatcaaaaaatct

SEQ ID NO: 1758765 - DNA, 15 bp, Homo sapiens
tcatcaaaaaatctt

SEQ ID NO: 1758766 - DNA, 15 bp, Homo sapiens
catcaaaaaatctta

SEQ ID NO: 1758767 - DNA, 15 bp, Homo sapiens
atcaaaaaatcttag

SEQ ID NO: 1758768 - DNA, 15 bp, Homo sapiens
tcaaaaaatcttagc

SEQ ID NO: 1758769 - DNA, 15 bp, Homo sapiens
caaaaaatcttagcc

SEQ ID NO: 1758770 - DNA, 15 bp, Homo sapiens
aaaaaatcttagcca

SEQ ID NO: 1758771 - DNA, 15 bp, Homo sapiens
aaaaatcttagccat

SEQ ID NO: 1758772 - DNA, 15 bp, Homo sapiens
aaaatcttagccatt

SEQ ID NO: 1758773 - DNA, 15 bp, Homo sapiens
aaatcttagccattg

SEQ ID NO: 1758774 - DNA, 15 bp, Homo sapiens
aatcttagccattgc

SEQ ID NO: 1758775 - DNA, 15 bp, Homo sapiens
atcttagccattgcc

SEQ ID NO: 1758776 - DNA, 15 bp, Homo sapiens
tcttagccattgcca

SEQ ID NO: 1758777 - DNA, 15 bp, Homo sapiens
cttagccattgccag

SEQ ID NO: 1758778 - DNA, 15 bp, Homo sapiens
ttagccattgccagc

SEQ ID NO: 1758779 - DNA, 15 bp, Homo sapiens
tagccattgccagct

SEQ ID NO: 1758780 - DNA, 15 bp, Homo sapiens
agccattgccagctg

SEQ ID NO: 1758781 - DNA, 15 bp, Homo sapiens
gccattgccagctgt

SEQ ID NO: 1758782 - DNA, 15 bp, Homo sapiens
ccattgccagctgtg

SEQ ID NO: 1758783 - DNA, 15 bp, Homo sapiens
cattgccagctgtgc

SEQ ID NO: 1758784 - DNA, 15 bp, Homo sapiens
attgccagctgtgcg

SEQ ID NO: 1758785 - DNA, 15 bp, Homo sapiens
ttgccagctgtgcgc

SEQ ID NO: 1758786 - DNA, 15 bp, Homo sapiens
tgccagctgtgcgca

SEQ ID NO: 1758787 - DNA, 15 bp, Homo sapiens
gccagctgtgcgcag

SEQ ID NO: 1758788 - DNA, 15 bp, Homo sapiens
ccagctgtgcgcagt

SEQ ID NO: 1758789 - DNA, 15 bp, Homo sapiens
cagctgtgcgcagtg

SEQ ID NO: 1758790 - DNA, 15 bp, Homo sapiens
agctgtgcgcagtgg

SEQ ID NO: 1758791 - DNA, 15 bp, Homo sapiens
gctgtgcgcagtggc

SEQ ID NO: 1758792 - DNA, 15 bp, Homo sapiens
ctgtgcgcagtggct

SEQ ID NO: 1758793 - DNA, 15 bp, Homo sapiens
tgtgcgcagtggctc

SEQ ID NO: 1758794 - DNA, 15 bp, Homo sapiens
gtgcgcagtggctca

SEQ ID NO: 1758795 - DNA, 15 bp, Homo sapiens
tgcgcagtggctcat

SEQ ID NO: 1758796 - DNA, 15 bp, Homo sapiens
gcgcagtggctcatg

SEQ ID NO: 1758797 - DNA, 15 bp, Homo sapiens
cgcagtggctcatgc

SEQ ID NO: 1758798 - DNA, 15 bp, Homo sapiens
ttgggaagctgagga

SEQ ID NO: 1758799 - DNA, 15 bp, Homo sapiens
tgggaagctgaggag

SEQ ID NO: 1758800 - DNA, 15 bp, Homo sapiens
gggaagctgaggagg

SEQ ID NO: 1758801 - DNA, 15 bp, Homo sapiens
ggaagctgaggaggg

SEQ ID NO: 1758802 - DNA, 15 bp, Homo sapiens
gaagctgaggagggc

SEQ ID NO: 1758803 - DNA, 15 bp, Homo sapiens
aagctgaggagggca

SEQ ID NO: 1758804 - DNA, 15 bp, Homo sapiens
agctgaggagggcag

SEQ ID NO: 1758805 - DNA, 15 bp, Homo sapiens
gctgaggagggcaga

SEQ ID NO: 1758806 - DNA, 15 bp, Homo sapiens
ctgaggagggcagat

SEQ ID NO: 1758807 - DNA, 15 bp, Homo sapiens
tgaggagggcagatc

SEQ ID NO: 1758808 - DNA, 15 bp, Homo sapiens
gaggagggcagatca

SEQ ID NO: 1758809 - DNA, 15 bp, Homo sapiens
aggagggcagatcac

SEQ ID NO: 1758810 - DNA, 15 bp, Homo sapiens
ggagggcagatcacc

SEQ ID NO: 1758811 - DNA, 15 bp, Homo sapiens
gagggcagatcacct

SEQ ID NO: 1758812 - DNA, 15 bp, Homo sapiens
agggcagatcacctg

SEQ ID NO: 1758813 - DNA, 15 bp, Homo sapiens
agttcaagaccagct

SEQ ID NO: 1758814 - DNA, 15 bp, Homo sapiens
gttcaagaccagctt

SEQ ID NO: 1758815 - DNA, 15 bp, Homo sapiens
ttcaagaccagcttg

SEQ ID NO: 1758816 - DNA, 15 bp, Homo sapiens
tcaagaccagcttgg

SEQ ID NO: 1758817 - DNA, 15 bp, Homo sapiens
caagaccagcttggc

SEQ ID NO: 1758818 - DNA, 15 bp, Homo sapiens
aagaccagcttggcc

SEQ ID NO: 1758819 - DNA, 15 bp, Homo sapiens
agaccagcttggcca

SEQ ID NO: 1758820 - DNA, 15 bp, Homo sapiens
gaccagcttggccaa

SEQ ID NO: 1758821 - DNA, 15 bp, Homo sapiens
accagcttggccaaa

SEQ ID NO: 1758822 - DNA, 15 bp, Homo sapiens
ccagcttggccaaaa

SEQ ID NO: 1758823 - DNA, 15 bp, Homo sapiens
cagcttggccaaaac

SEQ ID NO: 1758824 - DNA, 15 bp, Homo sapiens
agcttggccaaaaca

SEQ ID NO: 1758825 - DNA, 15 bp, Homo sapiens
gcttggccaaaacag

SEQ ID NO: 1758826 - DNA, 15 bp, Homo sapiens
cttggccaaaacagt

SEQ ID NO: 1758827 - DNA, 15 bp, Homo sapiens
ttggccaaaacagtg

SEQ ID NO: 1758828 - DNA, 15 bp, Homo sapiens
tggccaaaacagtga

SEQ ID NO: 1758829 - DNA, 15 bp, Homo sapiens
ggccaaaacagtgaa

SEQ ID NO: 1758830 - DNA, 15 bp, Homo sapiens
gccaaaacagtgaaa

SEQ ID NO: 1758831 - DNA, 15 bp, Homo sapiens
ccaaaacagtgaaac

SEQ ID NO: 1758832 - DNA, 15 bp, Homo sapiens
caaaacagtgaaacc

SEQ ID NO: 1758833 - DNA, 15 bp, Homo sapiens
aaacagtgaaaccct

SEQ ID NO: 1758834 - DNA, 15 bp, Homo sapiens
aacagtgaaaccctg

SEQ ID NO: 1758835 - DNA, 15 bp, Homo sapiens
tacaaaaaaaaattg

SEQ ID NO: 1758836 - DNA, 15 bp, Homo sapiens
acaaaaaaaaattgc

SEQ ID NO: 1758837 - DNA, 15 bp, Homo sapiens
caaaaaaaaattgcc

SEQ ID NO: 1758838 - DNA, 15 bp, Homo sapiens
aaaaaaaaattgccg

SEQ ID NO: 1758839 - DNA, 15 bp, Homo sapiens
aaaaaaaattgccgg

SEQ ID NO: 1758840 - DNA, 15 bp, Homo sapiens
aaaaaaattgccggg

SEQ ID NO: 1758841 - DNA, 15 bp, Homo sapiens
aaaaaattgccgggc

SEQ ID NO: 1758842 - DNA, 15 bp, Homo sapiens
aaaaattgccgggca

SEQ ID NO: 1758843 - DNA, 15 bp, Homo sapiens
aaaattgccgggcat

SEQ ID NO: 1758844 - DNA, 15 bp, Homo sapiens
aaattgccgggcatg

SEQ ID NO: 1758845 - DNA, 15 bp, Homo sapiens
aattgccgggcatgg

SEQ ID NO: 1758846 - DNA, 15 bp, Homo sapiens
attgccgggcatggt

SEQ ID NO: 1758847 - DNA, 15 bp, Homo sapiens
ttgccgggcatggtg

SEQ ID NO: 1758848 - DNA, 15 bp, Homo sapiens
tgccgggcatggtgg

SEQ ID NO: 1758849 - DNA, 15 bp, Homo sapiens
gcatggtggcacacc

SEQ ID NO: 1758850 - DNA, 15 bp, Homo sapiens
catggtggcacaccc

SEQ ID NO: 1758851 - DNA, 15 bp, Homo sapiens
atggtggcacacccc

SEQ ID NO: 1758852 - DNA, 15 bp, Homo sapiens
tggtggcacacccct

SEQ ID NO: 1758853 - DNA, 15 bp, Homo sapiens
ggtggcacaccccta

SEQ ID NO: 1758854 - DNA, 15 bp, Homo sapiens
gtggcacacccctat

SEQ ID NO: 1758855 - DNA, 15 bp, Homo sapiens
tggcacacccctata

SEQ ID NO: 1758856 - DNA, 15 bp, Homo sapiens
ggcacacccctatag

SEQ ID NO: 1758857 - DNA, 15 bp, Homo sapiens
gcacacccctatagt

SEQ ID NO: 1758858 - DNA, 15 bp, Homo sapiens
cacacccctatagtc

SEQ ID NO: 1758859 - DNA, 15 bp, Homo sapiens
acacccctatagtcc

SEQ ID NO: 1758860 - DNA, 15 bp, Homo sapiens
cacccctatagtccc

SEQ ID NO: 1758861 - DNA, 15 bp, Homo sapiens
acccctatagtccca

SEQ ID NO: 1758862 - DNA, 15 bp, Homo sapiens
cccctatagtcccag

SEQ ID NO: 1758863 - DNA, 15 bp, Homo sapiens
ccctatagtcccagc

SEQ ID NO: 1758864 - DNA, 15 bp, Homo sapiens
tatagtcccagctac

SEQ ID NO: 1758865 - DNA, 15 bp, Homo sapiens
atagtcccagctacc

SEQ ID NO: 1758866 - DNA, 15 bp, Homo sapiens
tagtcccagctaccc

SEQ ID NO: 1758867 - DNA, 15 bp, Homo sapiens
agtcccagctaccct

SEQ ID NO: 1758868 - DNA, 15 bp, Homo sapiens
gtcccagctacccta

SEQ ID NO: 1758869 - DNA, 15 bp, Homo sapiens
tcccagctaccctac

SEQ ID NO: 1758870 - DNA, 15 bp, Homo sapiens
cccagctaccctact

SEQ ID NO: 1758871 - DNA, 15 bp, Homo sapiens
ccagctaccctactc

SEQ ID NO: 1758872 - DNA, 15 bp, Homo sapiens
cagctaccctactca

SEQ ID NO: 1758873 - DNA, 15 bp, Homo sapiens
agctaccctactcaa

SEQ ID NO: 1758874 - DNA, 15 bp, Homo sapiens
gctaccctactcaag

SEQ ID NO: 1758875 - DNA, 15 bp, Homo sapiens
ctaccctactcaaga

SEQ ID NO: 1758876 - DNA, 15 bp, Homo sapiens
taccctactcaagag

SEQ ID NO: 1758877 - DNA, 15 bp, Homo sapiens
accctactcaagagg

SEQ ID NO: 1758878 - DNA, 15 bp, Homo sapiens
ccctactcaagaggt

SEQ ID NO: 1758879 - DNA, 15 bp, Homo sapiens
cctactcaagaggtt

SEQ ID NO: 1758880 - DNA, 15 bp, Homo sapiens
ctactcaagaggttg

SEQ ID NO: 1758881 - DNA, 15 bp, Homo sapiens
tactcaagaggttga

SEQ ID NO: 1758882 - DNA, 15 bp, Homo sapiens
actcaagaggttgag

SEQ ID NO: 1758883 - DNA, 15 bp, Homo sapiens
ctcaagaggttgagg

SEQ ID NO: 1758884 - DNA, 15 bp, Homo sapiens
tcaagaggttgaggc

SEQ ID NO: 1758885 - DNA, 15 bp, Homo sapiens
caagaggttgaggca

SEQ ID NO: 1758886 - DNA, 15 bp, Homo sapiens
aagaggttgaggcag

SEQ ID NO: 1758887 - DNA, 15 bp, Homo sapiens
agaggttgaggcagg

SEQ ID NO: 1758888 - DNA, 15 bp, Homo sapiens
gttgaggcaggagaa

SEQ ID NO: 1758889 - DNA, 15 bp, Homo sapiens
gaatcacttgaaccg

SEQ ID NO: 1758890 - DNA, 15 bp, Homo sapiens
aatcacttgaaccgg

SEQ ID NO: 1758891 - DNA, 15 bp, Homo sapiens
atcacttgaaccggc

SEQ ID NO: 1758892 - DNA, 15 bp, Homo sapiens
tcacttgaaccggca

SEQ ID NO: 1758893 - DNA, 15 bp, Homo sapiens
cacttgaaccggcag

SEQ ID NO: 1758894 - DNA, 15 bp, Homo sapiens
acttgaaccggcagg

SEQ ID NO: 1758895 - DNA, 15 bp, Homo sapiens
cttgaaccggcaggt

SEQ ID NO: 1758896 - DNA, 15 bp, Homo sapiens
ttgaaccggcaggtg

SEQ ID NO: 1758897 - DNA, 15 bp, Homo sapiens
tgaaccggcaggtgg

SEQ ID NO: 1758898 - DNA, 15 bp, Homo sapiens
gaaccggcaggtgga

SEQ ID NO: 1758899 - DNA, 15 bp, Homo sapiens
aaccggcaggtggag

SEQ ID NO: 1758900 - DNA, 15 bp, Homo sapiens
accggcaggtggagg

SEQ ID NO: 1758901 - DNA, 15 bp, Homo sapiens
ccggcaggtggaggt

SEQ ID NO: 1758902 - DNA, 15 bp, Homo sapiens
cggcaggtggaggtg

SEQ ID NO: 1758903 - DNA, 15 bp, Homo sapiens
ggcaggtggaggtgc

SEQ ID NO: 1758904 - DNA, 15 bp, Homo sapiens
gcaggtggaggtgca

SEQ ID NO: 1758905 - DNA, 15 bp, Homo sapiens
caggtggaggtgcag

SEQ ID NO: 1758906 - DNA, 15 bp, Homo sapiens
aggtggaggtgcagg

SEQ ID NO: 1758907 - DNA, 15 bp, Homo sapiens
ggtggaggtgcaggg

SEQ ID NO: 1758908 - DNA, 15 bp, Homo sapiens
gtggaggtgcaggga

SEQ ID NO: 1758909 - DNA, 15 bp, Homo sapiens
tggaggtgcagggag

SEQ ID NO: 1758910 - DNA, 15 bp, Homo sapiens
ggaggtgcagggagc

SEQ ID NO: 1758911 - DNA, 15 bp, Homo sapiens
gaggtgcagggagcc

SEQ ID NO: 1758912 - DNA, 15 bp, Homo sapiens
aggtgcagggagccg

SEQ ID NO: 1758913 - DNA, 15 bp, Homo sapiens
ggtgcagggagccga

SEQ ID NO: 1758914 - DNA, 15 bp, Homo sapiens
gtgcagggagccgag

SEQ ID NO: 1758915 - DNA, 15 bp, Homo sapiens
tgcagggagccgaga

SEQ ID NO: 1758916 - DNA, 15 bp, Homo sapiens
gcagggagccgagat

SEQ ID NO: 1758917 - DNA, 15 bp, Homo sapiens
cagggagccgagatc

SEQ ID NO: 1758918 - DNA, 15 bp, Homo sapiens
agggagccgagatcg

SEQ ID NO: 1758919 - DNA, 15 bp, Homo sapiens
gggagccgagatcgt

SEQ ID NO: 1758920 - DNA, 15 bp, Homo sapiens
ggagccgagatcgtg

SEQ ID NO: 1758921 - DNA, 15 bp, Homo sapiens
gccgagatcgtgcct

SEQ ID NO: 1758922 - DNA, 15 bp, Homo sapiens
ccgagatcgtgcctc

SEQ ID NO: 1758923 - DNA, 15 bp, Homo sapiens
cgagatcgtgcctct

SEQ ID NO: 1758924 - DNA, 15 bp, Homo sapiens
gagatcgtgcctctg

SEQ ID NO: 1758925 - DNA, 15 bp, Homo sapiens
agatcgtgcctctgc

SEQ ID NO: 1758926 - DNA, 15 bp, Homo sapiens
gatcgtgcctctgca

SEQ ID NO: 1758927 - DNA, 15 bp, Homo sapiens
atcgtgcctctgcac

SEQ ID NO: 1758928 - DNA, 15 bp, Homo sapiens
tcgtgcctctgcact

SEQ ID NO: 1758929 - DNA, 15 bp, Homo sapiens
cgtgcctctgcactc

SEQ ID NO: 1758930 - DNA, 15 bp, Homo sapiens
gtgcctctgcactcc

SEQ ID NO: 1758931 - DNA, 15 bp, Homo sapiens
tgcctctgcactcca

SEQ ID NO: 1758932 - DNA, 15 bp, Homo sapiens
agcctgggccacagc

SEQ ID NO: 1758933 - DNA, 15 bp, Homo sapiens
gcctgggccacagcg

SEQ ID NO: 1758934 - DNA, 15 bp, Homo sapiens
cctgggccacagcgt

SEQ ID NO: 1758935 - DNA, 15 bp, Homo sapiens
ctgggccacagcgtg

SEQ ID NO: 1758936 - DNA, 15 bp, Homo sapiens
tgggccacagcgtga

SEQ ID NO: 1758937 - DNA, 15 bp, Homo sapiens
gggccacagcgtgag

SEQ ID NO: 1758938 - DNA, 15 bp, Homo sapiens
ggccacagcgtgaga

SEQ ID NO: 1758939 - DNA, 15 bp, Homo sapiens
gccacagcgtgagac

SEQ ID NO: 1758940 - DNA, 15 bp, Homo sapiens
ccacagcgtgagact

SEQ ID NO: 1758941 - DNA, 15 bp, Homo sapiens
cacagcgtgagactc

SEQ ID NO: 1758942 - DNA, 15 bp, Homo sapiens
acagcgtgagactct

SEQ ID NO: 1758943 - DNA, 15 bp, Homo sapiens
cagcgtgagactctg

SEQ ID NO: 1758944 - DNA, 15 bp, Homo sapiens
agcgtgagactctgt

SEQ ID NO: 1758945 - DNA, 15 bp, Homo sapiens
gcgtgagactctgtc

SEQ ID NO: 1758946 - DNA, 15 bp, Homo sapiens
cgtgagactctgtca

SEQ ID NO: 1758947 - DNA, 15 bp, Homo sapiens
gtgagactctgtcaa

SEQ ID NO: 1758948 - DNA, 15 bp, Homo sapiens
tgagactctgtcaaa

SEQ ID NO: 1758949 - DNA, 15 bp, Homo sapiens
gagactctgtcaaaa

SEQ ID NO: 1758950 - DNA, 15 bp, Homo sapiens
agactctgtcaaaaa

SEQ ID NO: 1758951 - DNA, 15 bp, Homo sapiens
gactctgtcaaaaaa

SEQ ID NO: 1758952 - DNA, 15 bp, Homo sapiens
actctgtcaaaaaaa

SEQ ID NO: 1758953 - DNA, 15 bp, Homo sapiens
ctctgtcaaaaaaaa

SEQ ID NO: 1758954 - DNA, 15 bp, Homo sapiens
tctgtcaaaaaaaaa

SEQ ID NO: 1758955 - DNA, 15 bp, Homo sapiens
ctgtcaaaaaaaaaa

SEQ ID NO: 1758956 - DNA, 15 bp, Homo sapiens
aaaaaaaaaaatctt

SEQ ID NO: 1758957 - DNA, 15 bp, Homo sapiens
aaaaaaaaaatctta

SEQ ID NO: 1758958 - DNA, 15 bp, Homo sapiens
aaaaaaaaatcttat

SEQ ID NO: 1758959 - DNA, 15 bp, Homo sapiens
aaaaaaaatcttatc

SEQ ID NO: 1758960 - DNA, 15 bp, Homo sapiens
aaaaaaatcttatcc

SEQ ID NO: 1758961 - DNA, 15 bp, Homo sapiens
aaaaaatcttatcca

SEQ ID NO: 1758962 - DNA, 15 bp, Homo sapiens
aaaaatcttatccat

SEQ ID NO: 1758963 - DNA, 15 bp, Homo sapiens
aaaatcttatccatt

SEQ ID NO: 1758964 - DNA, 15 bp, Homo sapiens
aaatcttatccattt

SEQ ID NO: 1758965 - DNA, 15 bp, Homo sapiens
aatcttatccatttc

SEQ ID NO: 1758966 - DNA, 15 bp, Homo sapiens
atcttatccatttct

SEQ ID NO: 1758967 - DNA, 15 bp, Homo sapiens
tcttatccatttcta

SEQ ID NO: 1758968 - DNA, 15 bp, Homo sapiens
cttatccatttctaa

SEQ ID NO: 1758969 - DNA, 15 bp, Homo sapiens
ttatccatttctaag

SEQ ID NO: 1758970 - DNA, 15 bp, Homo sapiens
tatccatttctaaga

SEQ ID NO: 1758971 - DNA, 15 bp, Homo sapiens
atccatttctaagag

SEQ ID NO: 1758972 - DNA, 15 bp, Homo sapiens
tccatttctaagaga

SEQ ID NO: 1758973 - DNA, 15 bp, Homo sapiens
ccatttctaagagac

SEQ ID NO: 1758974 - DNA, 15 bp, Homo sapiens
catttctaagagact

SEQ ID NO: 1758975 - DNA, 15 bp, Homo sapiens
atttctaagagactc

SEQ ID NO: 1758976 - DNA, 15 bp, Homo sapiens
tttctaagagactca

SEQ ID NO: 1758977 - DNA, 15 bp, Homo sapiens
ttctaagagactcat

SEQ ID NO: 1758978 - DNA, 15 bp, Homo sapiens
tctaagagactcatg

SEQ ID NO: 1758979 - DNA, 15 bp, Homo sapiens
ctaagagactcatgt

SEQ ID NO: 1758980 - DNA, 15 bp, Homo sapiens
taagagactcatgtg

SEQ ID NO: 1758981 - DNA, 15 bp, Homo sapiens
aagagactcatgtgg

SEQ ID NO: 1758982 - DNA, 15 bp, Homo sapiens
agagactcatgtggg

SEQ ID NO: 1758983 - DNA, 15 bp, Homo sapiens
gagactcatgtgggc

SEQ ID NO: 1758984 - DNA, 15 bp, Homo sapiens
agactcatgtgggct

SEQ ID NO: 1758985 - DNA, 15 bp, Homo sapiens
gactcatgtgggcta

SEQ ID NO: 1758986 - DNA, 15 bp, Homo sapiens
actcatgtgggctaa

SEQ ID NO: 1758987 - DNA, 15 bp, Homo sapiens
ctcatgtgggctaac

SEQ ID NO: 1758988 - DNA, 15 bp, Homo sapiens
tcatgtgggctaaca

SEQ ID NO: 1758989 - DNA, 15 bp, Homo sapiens
catgtgggctaacat

SEQ ID NO: 1758990 - DNA, 15 bp, Homo sapiens
atgtgggctaacatg

SEQ ID NO: 1758991 - DNA, 15 bp, Homo sapiens
tgtgggctaacatgc

SEQ ID NO: 1758992 - DNA, 15 bp, Homo sapiens
gtgggctaacatgca

SEQ ID NO: 1758993 - DNA, 15 bp, Homo sapiens
tgggctaacatgcat

SEQ ID NO: 1758994 - DNA, 15 bp, Homo sapiens
gggctaacatgcatc

SEQ ID NO: 1758995 - DNA, 15 bp, Homo sapiens
ggctaacatgcatct

SEQ ID NO: 1758996 - DNA, 15 bp, Homo sapiens
gctaacatgcatctt

SEQ ID NO: 1758997 - DNA, 15 bp, Homo sapiens
ctaacatgcatcttg

SEQ ID NO: 1758998 - DNA, 15 bp, Homo sapiens
taacatgcatcttgc

SEQ ID NO: 1758999 - DNA, 15 bp, Homo sapiens
aacatgcatcttgct

SEQ ID NO: 1759000 - DNA, 15 bp, Homo sapiens
acatgcatcttgctg

SEQ ID NO: 1759001 - DNA, 15 bp, Homo sapiens
catgcatcttgctgt

SEQ ID NO: 1759002 - DNA, 15 bp, Homo sapiens
atgcatcttgctgtt

SEQ ID NO: 1759003 - DNA, 15 bp, Homo sapiens
tgcatcttgctgttg

SEQ ID NO: 1759004 - DNA, 15 bp, Homo sapiens
gcatcttgctgttgt

SEQ ID NO: 1759005 - DNA, 15 bp, Homo sapiens
catcttgctgttgtt

SEQ ID NO: 1759006 - DNA, 15 bp, Homo sapiens
atcttgctgttgttg

SEQ ID NO: 1759007 - DNA, 15 bp, Homo sapiens
tcttgctgttgttgt

SEQ ID NO: 1759008 - DNA, 15 bp, Homo sapiens
cttgctgttgttgtt

SEQ ID NO: 1759009 - DNA, 15 bp, Homo sapiens
ttgctgttgttgttt

SEQ ID NO: 1759010 - DNA, 15 bp, Homo sapiens
tgctgttgttgtttt

SEQ ID NO: 1759011 - DNA, 15 bp, Homo sapiens
gctgttgttgttttt

SEQ ID NO: 1759012 - DNA, 15 bp, Homo sapiens
ctgttgttgttttta

SEQ ID NO: 1759013 - DNA, 15 bp, Homo sapiens
gttgttgtttttaaa

SEQ ID NO: 1759014 - DNA, 15 bp, Homo sapiens
ttgttgtttttaaaa

SEQ ID NO: 1759015 - DNA, 15 bp, Homo sapiens
tgttgtttttaaaac

SEQ ID NO: 1759016 - DNA, 15 bp, Homo sapiens
gttgtttttaaaaca

SEQ ID NO: 1759017 - DNA, 15 bp, Homo sapiens
ttgtttttaaaacaa

SEQ ID NO: 1759018 - DNA, 15 bp, Homo sapiens
tgtttttaaaacaaa

SEQ ID NO: 1759019 - DNA, 15 bp, Homo sapiens
gtttttaaaacaaat

SEQ ID NO: 1759020 - DNA, 15 bp, Homo sapiens
tttttaaaacaaata

SEQ ID NO: 1759021 - DNA, 15 bp, Homo sapiens
ttttaaaacaaatat

SEQ ID NO: 1759022 - DNA, 15 bp, Homo sapiens
tttaaaacaaatatc

SEQ ID NO: 1759023 - DNA, 15 bp, Homo sapiens
ttaaaacaaatatct

SEQ ID NO: 1759024 - DNA, 15 bp, Homo sapiens
aaaacaaatatctgc

SEQ ID NO: 1759025 - DNA, 15 bp, Homo sapiens
aaacaaatatctgca

SEQ ID NO: 1759026 - DNA, 15 bp, Homo sapiens
aacaaatatctgcag

SEQ ID NO: 1759027 - DNA, 15 bp, Homo sapiens
acaaatatctgcagg

SEQ ID NO: 1759028 - DNA, 15 bp, Homo sapiens
caaatatctgcagga

SEQ ID NO: 1759029 - DNA, 15 bp, Homo sapiens
aaatatctgcaggag

SEQ ID NO: 1759030 - DNA, 15 bp, Homo sapiens
aatatctgcaggagg

SEQ ID NO: 1759031 - DNA, 15 bp, Homo sapiens
atatctgcaggaggg

SEQ ID NO: 1759032 - DNA, 15 bp, Homo sapiens
tatctgcaggaggga

SEQ ID NO: 1759033 - DNA, 15 bp, Homo sapiens
atctgcaggagggat

SEQ ID NO: 1759034 - DNA, 15 bp, Homo sapiens
tctgcaggagggata

SEQ ID NO: 1759035 - DNA, 15 bp, Homo sapiens
ctgcaggagggatat

SEQ ID NO: 1759036 - DNA, 15 bp, Homo sapiens
tgcaggagggatatt

SEQ ID NO: 1759037 - DNA, 15 bp, Homo sapiens
gcaggagggatatta

SEQ ID NO: 1759038 - DNA, 15 bp, Homo sapiens
caggagggatattag

SEQ ID NO: 1759039 - DNA, 15 bp, Homo sapiens
aggagggatattaga

SEQ ID NO: 1759040 - DNA, 15 bp, Homo sapiens
ggagggatattagac

SEQ ID NO: 1759041 - DNA, 15 bp, Homo sapiens
gagggatattagaca

SEQ ID NO: 1759042 - DNA, 15 bp, Homo sapiens
agggatattagacaa

SEQ ID NO: 1759043 - DNA, 15 bp, Homo sapiens
gggatattagacaat

SEQ ID NO: 1759044 - DNA, 15 bp, Homo sapiens
ggatattagacaatg

SEQ ID NO: 1759045 - DNA, 15 bp, Homo sapiens
gatattagacaatgt

SEQ ID NO: 1759046 - DNA, 15 bp, Homo sapiens
atattagacaatgta

SEQ ID NO: 1759047 - DNA, 15 bp, Homo sapiens
tattagacaatgtaa

SEQ ID NO: 1759048 - DNA, 15 bp, Homo sapiens
attagacaatgtaaa

SEQ ID NO: 1759049 - DNA, 15 bp, Homo sapiens
ttagacaatgtaaat

SEQ ID NO: 1759050 - DNA, 15 bp, Homo sapiens
tagacaatgtaaatg

SEQ ID NO: 1759051 - DNA, 15 bp, Homo sapiens
agacaatgtaaatga

SEQ ID NO: 1759052 - DNA, 15 bp, Homo sapiens
gacaatgtaaatgag

SEQ ID NO: 1759053 - DNA, 15 bp, Homo sapiens
acaatgtaaatgagc

SEQ ID NO: 1759054 - DNA, 15 bp, Homo sapiens
caatgtaaatgagct

SEQ ID NO: 1759055 - DNA, 15 bp, Homo sapiens
aatgtaaatgagctg

SEQ ID NO: 1759056 - DNA, 15 bp, Homo sapiens
tgtaaatgagctgag

SEQ ID NO: 1759057 - DNA, 15 bp, Homo sapiens
gtaaatgagctgaga

SEQ ID NO: 1759058 - DNA, 15 bp, Homo sapiens
taaatgagctgagaa

SEQ ID NO: 1759059 - DNA, 15 bp, Homo sapiens
aaatgagctgagaaa

SEQ ID NO: 1759060 - DNA, 15 bp, Homo sapiens
aatgagctgagaaat

SEQ ID NO: 1759061 - DNA, 15 bp, Homo sapiens
atgagctgagaaatt

SEQ ID NO: 1759062 - DNA, 15 bp, Homo sapiens
tgagctgagaaatta

SEQ ID NO: 1759063 - DNA, 15 bp, Homo sapiens
gagctgagaaattac

SEQ ID NO: 1759064 - DNA, 15 bp, Homo sapiens
agctgagaaattact

SEQ ID NO: 1759065 - DNA, 15 bp, Homo sapiens
gctgagaaattactt

SEQ ID NO: 1759066 - DNA, 15 bp, Homo sapiens
ctgagaaattacttc

SEQ ID NO: 1759067 - DNA, 15 bp, Homo sapiens
tgagaaattacttct

SEQ ID NO: 1759068 - DNA, 15 bp, Homo sapiens
gagaaattacttctg

SEQ ID NO: 1759069 - DNA, 15 bp, Homo sapiens
agaaattacttctgc

SEQ ID NO: 1759070 - DNA, 15 bp, Homo sapiens
gaaattacttctgct

SEQ ID NO: 1759071 - DNA, 15 bp, Homo sapiens
aaattacttctgctg

SEQ ID NO: 1759072 - DNA, 15 bp, Homo sapiens
aattacttctgctgg

SEQ ID NO: 1759073 - DNA, 15 bp, Homo sapiens
attacttctgctggc

SEQ ID NO: 1759074 - DNA, 15 bp, Homo sapiens
ttacttctgctggcc

SEQ ID NO: 1759075 - DNA, 15 bp, Homo sapiens
tacttctgctggcca

SEQ ID NO: 1759076 - DNA, 15 bp, Homo sapiens
acttctgctggccaa

SEQ ID NO: 1759077 - DNA, 15 bp, Homo sapiens
cttctgctggccaaa

SEQ ID NO: 1759078 - DNA, 15 bp, Homo sapiens
ttctgctggccaaaa

SEQ ID NO: 1759079 - DNA, 15 bp, Homo sapiens
tctgctggccaaaac

SEQ ID NO: 1759080 - DNA, 15 bp, Homo sapiens
ctgctggccaaaaca

SEQ ID NO: 1759081 - DNA, 15 bp, Homo sapiens
tgctggccaaaacat

SEQ ID NO: 1759082 - DNA, 15 bp, Homo sapiens
gctggccaaaacatc

SEQ ID NO: 1759083 - DNA, 15 bp, Homo sapiens
ctggccaaaacatcc

SEQ ID NO: 1759084 - DNA, 15 bp, Homo sapiens
tggccaaaacatccc

SEQ ID NO: 1759085 - DNA, 15 bp, Homo sapiens
ggccaaaacatcccc

SEQ ID NO: 1759086 - DNA, 15 bp, Homo sapiens
gccaaaacatcccca

SEQ ID NO: 1759087 - DNA, 15 bp, Homo sapiens
ccaaaacatccccag

SEQ ID NO: 1759088 - DNA, 15 bp, Homo sapiens
caaaacatccccagg

SEQ ID NO: 1759089 - DNA, 15 bp, Homo sapiens
aaaacatccccaggt

SEQ ID NO: 1759090 - DNA, 15 bp, Homo sapiens
aaacatccccaggtc

SEQ ID NO: 1759091 - DNA, 15 bp, Homo sapiens
aacatccccaggtcg

SEQ ID NO: 1759092 - DNA, 15 bp, Homo sapiens
acatccccaggtcgg

SEQ ID NO: 1759093 - DNA, 15 bp, Homo sapiens
catccccaggtcgga

SEQ ID NO: 1759094 - DNA, 15 bp, Homo sapiens
atccccaggtcggat

SEQ ID NO: 1759095 - DNA, 15 bp, Homo sapiens
tccccaggtcggatt

SEQ ID NO: 1759096 - DNA, 15 bp, Homo sapiens
ccccaggtcggattt

SEQ ID NO: 1759097 - DNA, 15 bp, Homo sapiens
cccaggtcggattta

SEQ ID NO: 1759098 - DNA, 15 bp, Homo sapiens
ccaggtcggatttag

SEQ ID NO: 1759099 - DNA, 15 bp, Homo sapiens
caggtcggatttagg

SEQ ID NO: 1759100 - DNA, 15 bp, Homo sapiens
aggtcggatttaggc

SEQ ID NO: 1759101 - DNA, 15 bp, Homo sapiens
ggtcggatttaggca

SEQ ID NO: 1759102 - DNA, 15 bp, Homo sapiens
gtcggatttaggcat

SEQ ID NO: 1759103 - DNA, 15 bp, Homo sapiens
tcggatttaggcatg

SEQ ID NO: 1759104 - DNA, 15 bp, Homo sapiens
cggatttaggcatgg

SEQ ID NO: 1759105 - DNA, 15 bp, Homo sapiens
ggatttaggcatgga

SEQ ID NO: 1759106 - DNA, 15 bp, Homo sapiens
gatttaggcatggag

SEQ ID NO: 1759107 - DNA, 15 bp, Homo sapiens
atttaggcatggagg

SEQ ID NO: 1759108 - DNA, 15 bp, Homo sapiens
tttaggcatggagga

SEQ ID NO: 1759109 - DNA, 15 bp, Homo sapiens
ttaggcatggaggag

SEQ ID NO: 1759110 - DNA, 15 bp, Homo sapiens
taggcatggaggagg

SEQ ID NO: 1759111 - DNA, 15 bp, Homo sapiens
aggcatggaggaggc

SEQ ID NO: 1759112 - DNA, 15 bp, Homo sapiens
ggcatggaggaggcg

SEQ ID NO: 1759113 - DNA, 15 bp, Homo sapiens
gcatggaggaggcgc

SEQ ID NO: 1759114 - DNA, 15 bp, Homo sapiens
catggaggaggcgct

SEQ ID NO: 1759115 - DNA, 15 bp, Homo sapiens
atggaggaggcgctg

SEQ ID NO: 1759116 - DNA, 15 bp, Homo sapiens
tggaggaggcgctga

SEQ ID NO: 1759117 - DNA, 15 bp, Homo sapiens
ggaggaggcgctgag

SEQ ID NO: 1759118 - DNA, 15 bp, Homo sapiens
gaggaggcgctgagg

SEQ ID NO: 1759119 - DNA, 15 bp, Homo sapiens
aggaggcgctgagga

SEQ ID NO: 1759120 - DNA, 15 bp, Homo sapiens
ggaggcgctgaggaa

SEQ ID NO: 1759121 - DNA, 15 bp, Homo sapiens
gaggcgctgaggaag

SEQ ID NO: 1759122 - DNA, 15 bp, Homo sapiens
aggcgctgaggaagg

SEQ ID NO: 1759123 - DNA, 15 bp, Homo sapiens
ggcgctgaggaagga

SEQ ID NO: 1759124 - DNA, 15 bp, Homo sapiens
gcgctgaggaaggaa

SEQ ID NO: 1759125 - DNA, 15 bp, Homo sapiens
cgctgaggaaggaag

SEQ ID NO: 1759126 - DNA, 15 bp, Homo sapiens
gctgaggaaggaagg

SEQ ID NO: 1759127 - DNA, 15 bp, Homo sapiens
ctgaggaaggaaggt

SEQ ID NO: 1759128 - DNA, 15 bp, Homo sapiens
tgaggaaggaaggtc

SEQ ID NO: 1759129 - DNA, 15 bp, Homo sapiens
gaggaaggaaggtca

SEQ ID NO: 1759130 - DNA, 15 bp, Homo sapiens
aggaaggaaggtcag

SEQ ID NO: 1759131 - DNA, 15 bp, Homo sapiens
ggaaggaaggtcaga

SEQ ID NO: 1759132 - DNA, 15 bp, Homo sapiens
gaaggaaggtcagac

SEQ ID NO: 1759133 - DNA, 15 bp, Homo sapiens
aaggaaggtcagaca

SEQ ID NO: 1759134 - DNA, 15 bp, Homo sapiens
aggaaggtcagacat

SEQ ID NO: 1759135 - DNA, 15 bp, Homo sapiens
ggaaggtcagacatt

SEQ ID NO: 1759136 - DNA, 15 bp, Homo sapiens
gaaggtcagacattt

SEQ ID NO: 1759137 - DNA, 15 bp, Homo sapiens
aaggtcagacatttg

SEQ ID NO: 1759138 - DNA, 15 bp, Homo sapiens
aggtcagacatttgg

SEQ ID NO: 1759139 - DNA, 15 bp, Homo sapiens
ggtcagacatttgga

SEQ ID NO: 1759140 - DNA, 15 bp, Homo sapiens
gtcagacatttggag

SEQ ID NO: 1759141 - DNA, 15 bp, Homo sapiens
tcagacatttggagt

SEQ ID NO: 1759142 - DNA, 15 bp, Homo sapiens
cagacatttggagtc

SEQ ID NO: 1759143 - DNA, 15 bp, Homo sapiens
agacatttggagtct

SEQ ID NO: 1759144 - DNA, 15 bp, Homo sapiens
gacatttggagtctg

SEQ ID NO: 1759145 - DNA, 15 bp, Homo sapiens
acatttggagtctgg

SEQ ID NO: 1759146 - DNA, 15 bp, Homo sapiens
catttggagtctgga

SEQ ID NO: 1759147 - DNA, 15 bp, Homo sapiens
atttggagtctggag

SEQ ID NO: 1759148 - DNA, 15 bp, Homo sapiens
tttggagtctggagc

SEQ ID NO: 1759149 - DNA, 15 bp, Homo sapiens
ttggagtctggagca

SEQ ID NO: 1759150 - DNA, 15 bp, Homo sapiens
tggagtctggagcaa

SEQ ID NO: 1759151 - DNA, 15 bp, Homo sapiens
ggagtctggagcaat

SEQ ID NO: 1759152 - DNA, 15 bp, Homo sapiens
gagtctggagcaatg

SEQ ID NO: 1759153 - DNA, 15 bp, Homo sapiens
agtctggagcaatgt

SEQ ID NO: 1759154 - DNA, 15 bp, Homo sapiens
gtctggagcaatgtg

SEQ ID NO: 1759155 - DNA, 15 bp, Homo sapiens
tctggagcaatgtgt

SEQ ID NO: 1759156 - DNA, 15 bp, Homo sapiens
ctggagcaatgtgtg

SEQ ID NO: 1759157 - DNA, 15 bp, Homo sapiens
tggagcaatgtgtgg

SEQ ID NO: 1759158 - DNA, 15 bp, Homo sapiens
ggagcaatgtgtgga

SEQ ID NO: 1759159 - DNA, 15 bp, Homo sapiens
gagcaatgtgtggag

SEQ ID NO: 1759160 - DNA, 15 bp, Homo sapiens
agcaatgtgtggagg

SEQ ID NO: 1759161 - DNA, 15 bp, Homo sapiens
gcaatgtgtggaggt

SEQ ID NO: 1759162 - DNA, 15 bp, Homo sapiens
caatgtgtggaggta

SEQ ID NO: 1759163 - DNA, 15 bp, Homo sapiens
aatgtgtggaggtaa

SEQ ID NO: 1759164 - DNA, 15 bp, Homo sapiens
atgtgtggaggtaac

SEQ ID NO: 1759165 - DNA, 15 bp, Homo sapiens
tgtgtggaggtaacc

SEQ ID NO: 1759166 - DNA, 15 bp, Homo sapiens
gtgtggaggtaacct

SEQ ID NO: 1759167 - DNA, 15 bp, Homo sapiens
tgtggaggtaacctg

SEQ ID NO: 1759168 - DNA, 15 bp, Homo sapiens
gtggaggtaacctgc

SEQ ID NO: 1759169 - DNA, 15 bp, Homo sapiens
tggaggtaacctgca

SEQ ID NO: 1759170 - DNA, 15 bp, Homo sapiens
ggaggtaacctgcag

SEQ ID NO: 1759171 - DNA, 15 bp, Homo sapiens
gaggtaacctgcagc

SEQ ID NO: 1759172 - DNA, 15 bp, Homo sapiens
aggtaacctgcagcc

SEQ ID NO: 1759173 - DNA, 15 bp, Homo sapiens
ggtaacctgcagccc

SEQ ID NO: 1759174 - DNA, 15 bp, Homo sapiens
gtaacctgcagccca

SEQ ID NO: 1759175 - DNA, 15 bp, Homo sapiens
taacctgcagcccaa

SEQ ID NO: 1759176 - DNA, 15 bp, Homo sapiens
aacctgcagcccaac

SEQ ID NO: 1759177 - DNA, 15 bp, Homo sapiens
acctgcagcccaact

SEQ ID NO: 1759178 - DNA, 15 bp, Homo sapiens
cctgcagcccaactg

SEQ ID NO: 1759179 - DNA, 15 bp, Homo sapiens
ctgcagcccaactgg

SEQ ID NO: 1759180 - DNA, 15 bp, Homo sapiens
tgcagcccaactggg

SEQ ID NO: 1759181 - DNA, 15 bp, Homo sapiens
gcagcccaactgggt

SEQ ID NO: 1759182 - DNA, 15 bp, Homo sapiens
cagcccaactgggtt

SEQ ID NO: 1759183 - DNA, 15 bp, Homo sapiens
agcccaactgggttc

SEQ ID NO: 1759184 - DNA, 15 bp, Homo sapiens
gcccaactgggttcc

SEQ ID NO: 1759185 - DNA, 15 bp, Homo sapiens
cccaactgggttcca

SEQ ID NO: 1759186 - DNA, 15 bp, Homo sapiens
ccaactgggttccac

SEQ ID NO: 1759187 - DNA, 15 bp, Homo sapiens
caactgggttccact

SEQ ID NO: 1759188 - DNA, 15 bp, Homo sapiens
aactgggttccactg

SEQ ID NO: 1759189 - DNA, 15 bp, Homo sapiens
actgggttccactgt

SEQ ID NO: 1759190 - DNA, 15 bp, Homo sapiens
ctgggttccactgtg

SEQ ID NO: 1759191 - DNA, 15 bp, Homo sapiens
tgggttccactgtgt

SEQ ID NO: 1759192 - DNA, 15 bp, Homo sapiens
gggttccactgtgtg

SEQ ID NO: 1759193 - DNA, 15 bp, Homo sapiens
ggttccactgtgtgg

SEQ ID NO: 1759194 - DNA, 15 bp, Homo sapiens
gttccactgtgtggt

SEQ ID NO: 1759195 - DNA, 15 bp, Homo sapiens
ttccactgtgtggtg

SEQ ID NO: 1759196 - DNA, 15 bp, Homo sapiens
tccactgtgtggtgc

SEQ ID NO: 1759197 - DNA, 15 bp, Homo sapiens
ccactgtgtggtgct

SEQ ID NO: 1759198 - DNA, 15 bp, Homo sapiens
cactgtgtggtgctt

SEQ ID NO: 1759199 - DNA, 15 bp, Homo sapiens
actgtgtggtgcttt

SEQ ID NO: 1759200 - DNA, 15 bp, Homo sapiens
ctgtgtggtgctttg

SEQ ID NO: 1759201 - DNA, 15 bp, Homo sapiens
tgtgtggtgctttga

SEQ ID NO: 1759202 - DNA, 15 bp, Homo sapiens
gtgtggtgctttgag

SEQ ID NO: 1759203 - DNA, 15 bp, Homo sapiens
tgtggtgctttgaga

SEQ ID NO: 1759204 - DNA, 15 bp, Homo sapiens
gtggtgctttgagaa

SEQ ID NO: 1759205 - DNA, 15 bp, Homo sapiens
tggtgctttgagaag

SEQ ID NO: 1759206 - DNA, 15 bp, Homo sapiens
ggtgctttgagaagg

SEQ ID NO: 1759207 - DNA, 15 bp, Homo sapiens
gtgctttgagaaggg

SEQ ID NO: 1759208 - DNA, 15 bp, Homo sapiens
tgctttgagaagggg

SEQ ID NO: 1759209 - DNA, 15 bp, Homo sapiens
gctttgagaagggga

SEQ ID NO: 1759210 - DNA, 15 bp, Homo sapiens
ctttgagaaggggag

SEQ ID NO: 1759211 - DNA, 15 bp, Homo sapiens
tttgagaaggggagg

SEQ ID NO: 1759212 - DNA, 15 bp, Homo sapiens
ttgagaaggggaggg

SEQ ID NO: 1759213 - DNA, 15 bp, Homo sapiens
tgagaaggggaggga

SEQ ID NO: 1759214 - DNA, 15 bp, Homo sapiens
gagaaggggagggag

SEQ ID NO: 1759215 - DNA, 15 bp, Homo sapiens
agaaggggagggagc

SEQ ID NO: 1759216 - DNA, 15 bp, Homo sapiens
gaaggggagggagct

SEQ ID NO: 1759217 - DNA, 15 bp, Homo sapiens
aaggggagggagctg

SEQ ID NO: 1759218 - DNA, 15 bp, Homo sapiens
aggggagggagctgg

SEQ ID NO: 1759219 - DNA, 15 bp, Homo sapiens
ggggagggagctggc

SEQ ID NO: 1759220 - DNA, 15 bp, Homo sapiens
gggagggagctggca

SEQ ID NO: 1759221 - DNA, 15 bp, Homo sapiens
ggagggagctggcag

SEQ ID NO: 1759222 - DNA, 15 bp, Homo sapiens
gagggagctggcaga

SEQ ID NO: 1759223 - DNA, 15 bp, Homo sapiens
agggagctggcagac

SEQ ID NO: 1759224 - DNA, 15 bp, Homo sapiens
gggagctggcagaca

SEQ ID NO: 1759225 - DNA, 15 bp, Homo sapiens
ggagctggcagacag

SEQ ID NO: 1759226 - DNA, 15 bp, Homo sapiens
gagctggcagacaga

SEQ ID NO: 1759227 - DNA, 15 bp, Homo sapiens
agctggcagacagag

SEQ ID NO: 1759228 - DNA, 15 bp, Homo sapiens
gctggcagacagagg

SEQ ID NO: 1759229 - DNA, 15 bp, Homo sapiens
ctggcagacagagga

SEQ ID NO: 1759230 - DNA, 15 bp, Homo sapiens
tggcagacagaggag

SEQ ID NO: 1759231 - DNA, 15 bp, Homo sapiens
ggcagacagaggagg

SEQ ID NO: 1759232 - DNA, 15 bp, Homo sapiens
gcagacagaggaggc

SEQ ID NO: 1759233 - DNA, 15 bp, Homo sapiens
cagacagaggaggca

SEQ ID NO: 1759234 - DNA, 15 bp, Homo sapiens
agacagaggaggcag

SEQ ID NO: 1759235 - DNA, 15 bp, Homo sapiens
gacagaggaggcaga

SEQ ID NO: 1759236 - DNA, 15 bp, Homo sapiens
acagaggaggcagag

SEQ ID NO: 1759237 - DNA, 15 bp, Homo sapiens
cagaggaggcagagc

SEQ ID NO: 1759238 - DNA, 15 bp, Homo sapiens
agaggaggcagagca

SEQ ID NO: 1759239 - DNA, 15 bp, Homo sapiens
gaggaggcagagcag

SEQ ID NO: 1759240 - DNA, 15 bp, Homo sapiens
aggaggcagagcaga

SEQ ID NO: 1759241 - DNA, 15 bp, Homo sapiens
ggaggcagagcagaa

SEQ ID NO: 1759242 - DNA, 15 bp, Homo sapiens
gaggcagagcagaaa

SEQ ID NO: 1759243 - DNA, 15 bp, Homo sapiens
aggcagagcagaaac

SEQ ID NO: 1759244 - DNA, 15 bp, Homo sapiens
ggcagagcagaaact

SEQ ID NO: 1759245 - DNA, 15 bp, Homo sapiens
gcagagcagaaactg

SEQ ID NO: 1759246 - DNA, 15 bp, Homo sapiens
cagagcagaaactgg

SEQ ID NO: 1759247 - DNA, 15 bp, Homo sapiens
agagcagaaactggg

SEQ ID NO: 1759248 - DNA, 15 bp, Homo sapiens
gagcagaaactgggt

SEQ ID NO: 1759249 - DNA, 15 bp, Homo sapiens
agcagaaactgggta

SEQ ID NO: 1759250 - DNA, 15 bp, Homo sapiens
gcagaaactgggtaa

SEQ ID NO: 1759251 - DNA, 15 bp, Homo sapiens
cagaaactgggtaag

SEQ ID NO: 1759252 - DNA, 15 bp, Homo sapiens
agaaactgggtaaga

SEQ ID NO: 1759253 - DNA, 15 bp, Homo sapiens
gaaactgggtaagag

SEQ ID NO: 1759254 - DNA, 15 bp, Homo sapiens
aaactgggtaagagg

SEQ ID NO: 1759255 - DNA, 15 bp, Homo sapiens
aactgggtaagagga

SEQ ID NO: 1759256 - DNA, 15 bp, Homo sapiens
actgggtaagaggaa

SEQ ID NO: 1759257 - DNA, 15 bp, Homo sapiens
ctgggtaagaggaag

SEQ ID NO: 1759258 - DNA, 15 bp, Homo sapiens
tgggtaagaggaagg

SEQ ID NO: 1759259 - DNA, 15 bp, Homo sapiens
gggtaagaggaaggg

SEQ ID NO: 1759260 - DNA, 15 bp, Homo sapiens
ggtaagaggaagggg

SEQ ID NO: 1759261 - DNA, 15 bp, Homo sapiens
gtaagaggaagggga

SEQ ID NO: 1759262 - DNA, 15 bp, Homo sapiens
taagaggaaggggag

SEQ ID NO: 1759263 - DNA, 15 bp, Homo sapiens
aagaggaaggggaga

SEQ ID NO: 1759264 - DNA, 15 bp, Homo sapiens
agaggaaggggagag

SEQ ID NO: 1759265 - DNA, 15 bp, Homo sapiens
gaggaaggggagagg

SEQ ID NO: 1759266 - DNA, 15 bp, Homo sapiens
aggaaggggagaggt

SEQ ID NO: 1759267 - DNA, 15 bp, Homo sapiens
ggaaggggagaggtg

SEQ ID NO: 1759268 - DNA, 15 bp, Homo sapiens
gaaggggagaggtgc

SEQ ID NO: 1759269 - DNA, 15 bp, Homo sapiens
aaggggagaggtgcc

SEQ ID NO: 1759270 - DNA, 15 bp, Homo sapiens
aggggagaggtgcct

SEQ ID NO: 1759271 - DNA, 15 bp, Homo sapiens
ggggagaggtgcctg

SEQ ID NO: 1759272 - DNA, 15 bp, Homo sapiens
gggagaggtgcctgg

SEQ ID NO: 1759273 - DNA, 15 bp, Homo sapiens
ggagaggtgcctggt

SEQ ID NO: 1759274 - DNA, 15 bp, Homo sapiens
gagaggtgcctggtt

SEQ ID NO: 1759275 - DNA, 15 bp, Homo sapiens
agaggtgcctggttg

SEQ ID NO: 1759276 - DNA, 15 bp, Homo sapiens
gaggtgcctggttgc

SEQ ID NO: 1759277 - DNA, 15 bp, Homo sapiens
aggtgcctggttgct

SEQ ID NO: 1759278 - DNA, 15 bp, Homo sapiens
ggtgcctggttgctt

SEQ ID NO: 1759279 - DNA, 15 bp, Homo sapiens
gtgcctggttgcttg

SEQ ID NO: 1759280 - DNA, 15 bp, Homo sapiens
tgcctggttgcttgt

SEQ ID NO: 1759281 - DNA, 15 bp, Homo sapiens
gcctggttgcttgtt

SEQ ID NO: 1759282 - DNA, 15 bp, Homo sapiens
cctggttgcttgttc

SEQ ID NO: 1759283 - DNA, 15 bp, Homo sapiens
ctggttgcttgttcc

SEQ ID NO: 1759284 - DNA, 15 bp, Homo sapiens
tggttgcttgttcca

SEQ ID NO: 1759285 - DNA, 15 bp, Homo sapiens
ggttgcttgttccaa

SEQ ID NO: 1759286 - DNA, 15 bp, Homo sapiens
gttgcttgttccaag

SEQ ID NO: 1759287 - DNA, 15 bp, Homo sapiens
ttgcttgttccaagg

SEQ ID NO: 1759288 - DNA, 15 bp, Homo sapiens
tgcttgttccaaggc

SEQ ID NO: 1759289 - DNA, 15 bp, Homo sapiens
gcttgttccaaggct

SEQ ID NO: 1759290 - DNA, 15 bp, Homo sapiens
cttgttccaaggctc

SEQ ID NO: 1759291 - DNA, 15 bp, Homo sapiens
ttgttccaaggctca

SEQ ID NO: 1759292 - DNA, 15 bp, Homo sapiens
tgttccaaggctcac

SEQ ID NO: 1759293 - DNA, 15 bp, Homo sapiens
gttccaaggctcacc

SEQ ID NO: 1759294 - DNA, 15 bp, Homo sapiens
ttccaaggctcaccc

SEQ ID NO: 1759295 - DNA, 15 bp, Homo sapiens
tccaaggctcacccc

SEQ ID NO: 1759296 - DNA, 15 bp, Homo sapiens
ccaaggctcacccca

SEQ ID NO: 1759297 - DNA, 15 bp, Homo sapiens
caaggctcaccccaa

SEQ ID NO: 1759298 - DNA, 15 bp, Homo sapiens
aaggctcaccccaag

SEQ ID NO: 1759299 - DNA, 15 bp, Homo sapiens
gctcaccccaagccc

SEQ ID NO: 1759300 - DNA, 15 bp, Homo sapiens
ctcaccccaagcccc

SEQ ID NO: 1759301 - DNA, 15 bp, Homo sapiens
tcaccccaagcccct

SEQ ID NO: 1759302 - DNA, 15 bp, Homo sapiens
caccccaagcccctt

SEQ ID NO: 1759303 - DNA, 15 bp, Homo sapiens
accccaagccccttc

SEQ ID NO: 1759304 - DNA, 15 bp, Homo sapiens
ccccaagccccttca

SEQ ID NO: 1759305 - DNA, 15 bp, Homo sapiens
cccaagccccttcac

SEQ ID NO: 1759306 - DNA, 15 bp, Homo sapiens
ccaagccccttcact

SEQ ID NO: 1759307 - DNA, 15 bp, Homo sapiens
caagccccttcactg

SEQ ID NO: 1759308 - DNA, 15 bp, Homo sapiens
aagccccttcactgt

SEQ ID NO: 1759309 - DNA, 15 bp, Homo sapiens
agccccttcactgtg

SEQ ID NO: 1759310 - DNA, 15 bp, Homo sapiens
gccccttcactgtgg

SEQ ID NO: 1759311 - DNA, 15 bp, Homo sapiens
ccccttcactgtggc

SEQ ID NO: 1759312 - DNA, 15 bp, Homo sapiens
cccttcactgtggcc

SEQ ID NO: 1759313 - DNA, 15 bp, Homo sapiens
ccttcactgtggcct

SEQ ID NO: 1759314 - DNA, 15 bp, Homo sapiens
cttcactgtggcctg

SEQ ID NO: 1759315 - DNA, 15 bp, Homo sapiens
ttcactgtggcctgg

SEQ ID NO: 1759316 - DNA, 15 bp, Homo sapiens
tcactgtggcctggg

SEQ ID NO: 1759317 - DNA, 15 bp, Homo sapiens
cactgtggcctggga

SEQ ID NO: 1759318 - DNA, 15 bp, Homo sapiens
ctgtggcctgggaag

SEQ ID NO: 1759319 - DNA, 15 bp, Homo sapiens
tgtggcctgggaagg

SEQ ID NO: 1759320 - DNA, 15 bp, Homo sapiens
gtggcctgggaaggc

SEQ ID NO: 1759321 - DNA, 15 bp, Homo sapiens
tggcctgggaaggca

SEQ ID NO: 1759322 - DNA, 15 bp, Homo sapiens
ggcctgggaaggcag

SEQ ID NO: 1759323 - DNA, 15 bp, Homo sapiens
gcctgggaaggcagg

SEQ ID NO: 1759324 - DNA, 15 bp, Homo sapiens
cctgggaaggcaggt

SEQ ID NO: 1759325 - DNA, 15 bp, Homo sapiens
ctgggaaggcaggtg

SEQ ID NO: 1759326 - DNA, 15 bp, Homo sapiens
tgggaaggcaggtgt

SEQ ID NO: 1759327 - DNA, 15 bp, Homo sapiens
gggaaggcaggtgtg

SEQ ID NO: 1759328 - DNA, 15 bp, Homo sapiens
ggaaggcaggtgtgg

SEQ ID NO: 1759329 - DNA, 15 bp, Homo sapiens
gaaggcaggtgtggg

SEQ ID NO: 1759330 - DNA, 15 bp, Homo sapiens
aaggcaggtgtgggc

SEQ ID NO: 1759331 - DNA, 15 bp, Homo sapiens
aggcaggtgtgggcc

SEQ ID NO: 1759332 - DNA, 15 bp, Homo sapiens
ggcaggtgtgggcca

SEQ ID NO: 1759333 - DNA, 15 bp, Homo sapiens
gcaggtgtgggccag

SEQ ID NO: 1759334 - DNA, 15 bp, Homo sapiens
caggtgtgggccagc

SEQ ID NO: 1759335 - DNA, 15 bp, Homo sapiens
aggtgtgggccagcc

SEQ ID NO: 1759336 - DNA, 15 bp, Homo sapiens
ggtgtgggccagccc

SEQ ID NO: 1759337 - DNA, 15 bp, Homo sapiens
gtgtgggccagccct

SEQ ID NO: 1759338 - DNA, 15 bp, Homo sapiens
tgtgggccagccctg

SEQ ID NO: 1759339 - DNA, 15 bp, Homo sapiens
gtgggccagccctga

SEQ ID NO: 1759340 - DNA, 15 bp, Homo sapiens
tgggccagccctgac

SEQ ID NO: 1759341 - DNA, 15 bp, Homo sapiens
gggccagccctgact

SEQ ID NO: 1759342 - DNA, 15 bp, Homo sapiens
ggccagccctgactc

SEQ ID NO: 1759343 - DNA, 15 bp, Homo sapiens
gccagccctgactcc

SEQ ID NO: 1759344 - DNA, 15 bp, Homo sapiens
ccagccctgactcca

SEQ ID NO: 1759345 - DNA, 15 bp, Homo sapiens
cagccctgactccaa

SEQ ID NO: 1759346 - DNA, 15 bp, Homo sapiens
agccctgactccaac

SEQ ID NO: 1759347 - DNA, 15 bp, Homo sapiens
gccctgactccaacc

SEQ ID NO: 1759348 - DNA, 15 bp, Homo sapiens
ccctgactccaacca

SEQ ID NO: 1759349 - DNA, 15 bp, Homo sapiens
cctgactccaaccac

SEQ ID NO: 1759350 - DNA, 15 bp, Homo sapiens
ctgactccaaccacc

SEQ ID NO: 1759351 - DNA, 15 bp, Homo sapiens
tgactccaaccacca

SEQ ID NO: 1759352 - DNA, 15 bp, Homo sapiens
gactccaaccaccat

SEQ ID NO: 1759353 - DNA, 15 bp, Homo sapiens
actccaaccaccatt

SEQ ID NO: 1759354 - DNA, 15 bp, Homo sapiens
ctccaaccaccattg

SEQ ID NO: 1759355 - DNA, 15 bp, Homo sapiens
tccaaccaccattga

SEQ ID NO: 1759356 - DNA, 15 bp, Homo sapiens
ccaaccaccattgag

SEQ ID NO: 1759357 - DNA, 15 bp, Homo sapiens
caaccaccattgagg

SEQ ID NO: 1759358 - DNA, 15 bp, Homo sapiens
aaccaccattgaggg

SEQ ID NO: 1759359 - DNA, 15 bp, Homo sapiens
accaccattgaggga

SEQ ID NO: 1759360 - DNA, 15 bp, Homo sapiens
ccaccattgagggat

SEQ ID NO: 1759361 - DNA, 15 bp, Homo sapiens
caccattgagggatt

SEQ ID NO: 1759362 - DNA, 15 bp, Homo sapiens
accattgagggattg

SEQ ID NO: 1759363 - DNA, 15 bp, Homo sapiens
ccattgagggattgt

SEQ ID NO: 1759364 - DNA, 15 bp, Homo sapiens
cattgagggattgtg

SEQ ID NO: 1759365 - DNA, 15 bp, Homo sapiens
attgagggattgtgc

SEQ ID NO: 1759366 - DNA, 15 bp, Homo sapiens
ttgagggattgtgcc

SEQ ID NO: 1759367 - DNA, 15 bp, Homo sapiens
tgagggattgtgcct

SEQ ID NO: 1759368 - DNA, 15 bp, Homo sapiens
gagggattgtgcctt

SEQ ID NO: 1759369 - DNA, 15 bp, Homo sapiens
agggattgtgccttc

SEQ ID NO: 1759370 - DNA, 15 bp, Homo sapiens
gggattgtgccttcc

SEQ ID NO: 1759371 - DNA, 15 bp, Homo sapiens
ggattgtgccttcca

SEQ ID NO: 1759372 - DNA, 15 bp, Homo sapiens
gattgtgccttccag

SEQ ID NO: 1759373 - DNA, 15 bp, Homo sapiens
attgtgccttccagg

SEQ ID NO: 1759374 - DNA, 15 bp, Homo sapiens
ttgtgccttccagga

SEQ ID NO: 1759375 - DNA, 15 bp, Homo sapiens
tgtgccttccaggag

SEQ ID NO: 1759376 - DNA, 15 bp, Homo sapiens
gtgccttccaggagt

SEQ ID NO: 1759377 - DNA, 15 bp, Homo sapiens
tgccttccaggagtt

SEQ ID NO: 1759378 - DNA, 15 bp, Homo sapiens
gccttccaggagttg

SEQ ID NO: 1759379 - DNA, 15 bp, Homo sapiens
ccttccaggagttgc

SEQ ID NO: 1759380 - DNA, 15 bp, Homo sapiens
cttccaggagttgca

SEQ ID NO: 1759381 - DNA, 15 bp, Homo sapiens
ttccaggagttgcac

SEQ ID NO: 1759382 - DNA, 15 bp, Homo sapiens
tccaggagttgcaca

SEQ ID NO: 1759383 - DNA, 15 bp, Homo sapiens
ccaggagttgcacag

SEQ ID NO: 1759384 - DNA, 15 bp, Homo sapiens
caggagttgcacagg

SEQ ID NO: 1759385 - DNA, 15 bp, Homo sapiens
aggagttgcacaggc

SEQ ID NO: 1759386 - DNA, 15 bp, Homo sapiens
ggagttgcacaggca

SEQ ID NO: 1759387 - DNA, 15 bp, Homo sapiens
gagttgcacaggcag

SEQ ID NO: 1759388 - DNA, 15 bp, Homo sapiens
agttgcacaggcagc

SEQ ID NO: 1759389 - DNA, 15 bp, Homo sapiens
gttgcacaggcagct

SEQ ID NO: 1759390 - DNA, 15 bp, Homo sapiens
ttgcacaggcagctc

SEQ ID NO: 1759391 - DNA, 15 bp, Homo sapiens
tgcacaggcagctca

SEQ ID NO: 1759392 - DNA, 15 bp, Homo sapiens
gcacaggcagctcat

SEQ ID NO: 1759393 - DNA, 15 bp, Homo sapiens
cacaggcagctcatc

SEQ ID NO: 1759394 - DNA, 15 bp, Homo sapiens
acaggcagctcatct

SEQ ID NO: 1759395 - DNA, 15 bp, Homo sapiens
caggcagctcatctt

SEQ ID NO: 1759396 - DNA, 15 bp, Homo sapiens
aggcagctcatcttt

SEQ ID NO: 1759397 - DNA, 15 bp, Homo sapiens
ggcagctcatctttc

SEQ ID NO: 1759398 - DNA, 15 bp, Homo sapiens
gcagctcatctttcg

SEQ ID NO: 1759399 - DNA, 15 bp, Homo sapiens
cagctcatctttcgg

SEQ ID NO: 1759400 - DNA, 15 bp, Homo sapiens
agctcatctttcgga

SEQ ID NO: 1759401 - DNA, 15 bp, Homo sapiens
gctcatctttcggag

SEQ ID NO: 1759402 - DNA, 15 bp, Homo sapiens
ctcatctttcggagg

SEQ ID NO: 1759403 - DNA, 15 bp, Homo sapiens
tcatctttcggagga

SEQ ID NO: 1759404 - DNA, 15 bp, Homo sapiens
catctttcggaggaa

SEQ ID NO: 1759405 - DNA, 15 bp, Homo sapiens
atctttcggaggaag

SEQ ID NO: 1759406 - DNA, 15 bp, Homo sapiens
tctttcggaggaaga

SEQ ID NO: 1759407 - DNA, 15 bp, Homo sapiens
ctttcggaggaagaa

SEQ ID NO: 1759408 - DNA, 15 bp, Homo sapiens
tttcggaggaagaaa

SEQ ID NO: 1759409 - DNA, 15 bp, Homo sapiens
ttcggaggaagaaaa

SEQ ID NO: 1759410 - DNA, 15 bp, Homo sapiens
tcggaggaagaaaat

SEQ ID NO: 1759411 - DNA, 15 bp, Homo sapiens
cggaggaagaaaatt

SEQ ID NO: 1759412 - DNA, 15 bp, Homo sapiens
ggaggaagaaaattc

SEQ ID NO: 1759413 - DNA, 15 bp, Homo sapiens
gaggaagaaaattcg

SEQ ID NO: 1759414 - DNA, 15 bp, Homo sapiens
aggaagaaaattcgt

SEQ ID NO: 1759415 - DNA, 15 bp, Homo sapiens
ggaagaaaattcgtg

SEQ ID NO: 1759416 - DNA, 15 bp, Homo sapiens
gaagaaaattcgtgc

SEQ ID NO: 1759417 - DNA, 15 bp, Homo sapiens
aagaaaattcgtgcc

SEQ ID NO: 1759418 - DNA, 15 bp, Homo sapiens
agaaaattcgtgcct

SEQ ID NO: 1759419 - DNA, 15 bp, Homo sapiens
gaaaattcgtgcctg

SEQ ID NO: 1759420 - DNA, 15 bp, Homo sapiens
aaaattcgtgcctgg

SEQ ID NO: 1759421 - DNA, 15 bp, Homo sapiens
aaattcgtgcctggg

SEQ ID NO: 1759422 - DNA, 15 bp, Homo sapiens
aattcgtgcctgggt

SEQ ID NO: 1759423 - DNA, 15 bp, Homo sapiens
attcgtgcctgggtt

SEQ ID NO: 1759424 - DNA, 15 bp, Homo sapiens
ttcgtgcctgggttg

SEQ ID NO: 1759425 - DNA, 15 bp, Homo sapiens
tcgtgcctgggttgg

SEQ ID NO: 1759426 - DNA, 15 bp, Homo sapiens
cgtgcctgggttggg

SEQ ID NO: 1759427 - DNA, 15 bp, Homo sapiens
gtgcctgggttgggg

SEQ ID NO: 1759428 - DNA, 15 bp, Homo sapiens
tgcctgggttgggga

SEQ ID NO: 1759429 - DNA, 15 bp, Homo sapiens
gcctgggttggggac

SEQ ID NO: 1759430 - DNA, 15 bp, Homo sapiens
cctgggttggggacg

SEQ ID NO: 1759431 - DNA, 15 bp, Homo sapiens
ctgggttggggacga

SEQ ID NO: 1759432 - DNA, 15 bp, Homo sapiens
tgggttggggacgac

SEQ ID NO: 1759433 - DNA, 15 bp, Homo sapiens
gggttggggacgacc

SEQ ID NO: 1759434 - DNA, 15 bp, Homo sapiens
ggttggggacgacct

SEQ ID NO: 1759435 - DNA, 15 bp, Homo sapiens
gttggggacgacctc

SEQ ID NO: 1759436 - DNA, 15 bp, Homo sapiens
ttggggacgacctct

SEQ ID NO: 1759437 - DNA, 15 bp, Homo sapiens
tggggacgacctctg

SEQ ID NO: 1759438 - DNA, 15 bp, Homo sapiens
ggggacgacctctgt

SEQ ID NO: 1759439 - DNA, 15 bp, Homo sapiens
gggacgacctctgtt

SEQ ID NO: 1759440 - DNA, 15 bp, Homo sapiens
ggacgacctctgttc

SEQ ID NO: 1759441 - DNA, 15 bp, Homo sapiens
gacgacctctgttcc

SEQ ID NO: 1759442 - DNA, 15 bp, Homo sapiens
acgacctctgttcca

SEQ ID NO: 1759443 - DNA, 15 bp, Homo sapiens
cgacctctgttccat

SEQ ID NO: 1759444 - DNA, 15 bp, Homo sapiens
gacctctgttccatt

SEQ ID NO: 1759445 - DNA, 15 bp, Homo sapiens
acctctgttccattt

SEQ ID NO: 1759446 - DNA, 15 bp, Homo sapiens
cctctgttccatttt

SEQ ID NO: 1759447 - DNA, 15 bp, Homo sapiens
ctctgttccatttta

SEQ ID NO: 1759448 - DNA, 15 bp, Homo sapiens
tctgttccattttaa

SEQ ID NO: 1759449 - DNA, 15 bp, Homo sapiens
ctgttccattttaaa

SEQ ID NO: 1759450 - DNA, 15 bp, Homo sapiens
tgttccattttaaaa

SEQ ID NO: 1759451 - DNA, 15 bp, Homo sapiens
gttccattttaaaat

SEQ ID NO: 1759452 - DNA, 15 bp, Homo sapiens
ttccattttaaaata

SEQ ID NO: 1759453 - DNA, 15 bp, Homo sapiens
tccattttaaaatat

SEQ ID NO: 1759454 - DNA, 15 bp, Homo sapiens
ccattttaaaatatt

SEQ ID NO: 1759455 - DNA, 15 bp, Homo sapiens
cattttaaaatattt

SEQ ID NO: 1759456 - DNA, 15 bp, Homo sapiens
attttaaaatatttt

SEQ ID NO: 1759457 - DNA, 15 bp, Homo sapiens
tttaaaatattttcc

SEQ ID NO: 1759458 - DNA, 15 bp, Homo sapiens
ttaaaatattttcct

SEQ ID NO: 1759459 - DNA, 15 bp, Homo sapiens
taaaatattttcctt

SEQ ID NO: 1759460 - DNA, 15 bp, Homo sapiens
aaaatattttccttg

SEQ ID NO: 1759461 - DNA, 15 bp, Homo sapiens
aaatattttccttgg

SEQ ID NO: 1759462 - DNA, 15 bp, Homo sapiens
aatattttccttggc

SEQ ID NO: 1759463 - DNA, 15 bp, Homo sapiens
atattttccttggct

SEQ ID NO: 1759464 - DNA, 15 bp, Homo sapiens
tattttccttggctc

SEQ ID NO: 1759465 - DNA, 15 bp, Homo sapiens
attttccttggctcc

SEQ ID NO: 1759466 - DNA, 15 bp, Homo sapiens
ttttccttggctccc

SEQ ID NO: 1759467 - DNA, 15 bp, Homo sapiens
tttccttggctccca

SEQ ID NO: 1759468 - DNA, 15 bp, Homo sapiens
ttccttggctcccag

SEQ ID NO: 1759469 - DNA, 15 bp, Homo sapiens
tccttggctcccagg

SEQ ID NO: 1759470 - DNA, 15 bp, Homo sapiens
ccttggctcccagga

SEQ ID NO: 1759471 - DNA, 15 bp, Homo sapiens
cttggctcccaggaa

SEQ ID NO: 1759472 - DNA, 15 bp, Homo sapiens
ttggctcccaggaag

SEQ ID NO: 1759473 - DNA, 15 bp, Homo sapiens
tggctcccaggaagg

SEQ ID NO: 1759474 - DNA, 15 bp, Homo sapiens
ggctcccaggaagga

SEQ ID NO: 1759475 - DNA, 15 bp, Homo sapiens
gctcccaggaaggat

SEQ ID NO: 1759476 - DNA, 15 bp, Homo sapiens
ctcccaggaaggatt

SEQ ID NO: 1759477 - DNA, 15 bp, Homo sapiens
tcccaggaaggattt

SEQ ID NO: 1759478 - DNA, 15 bp, Homo sapiens
cccaggaaggatttg

SEQ ID NO: 1759479 - DNA, 15 bp, Homo sapiens
ccaggaaggatttgt

SEQ ID NO: 1759480 - DNA, 15 bp, Homo sapiens
caggaaggatttgtt

SEQ ID NO: 1759481 - DNA, 15 bp, Homo sapiens
aggaaggatttgtta

SEQ ID NO: 1759482 - DNA, 15 bp, Homo sapiens
ggaaggatttgttag

SEQ ID NO: 1759483 - DNA, 15 bp, Homo sapiens
gaaggatttgttaga

SEQ ID NO: 1759484 - DNA, 15 bp, Homo sapiens
aaggatttgttagac

SEQ ID NO: 1759485 - DNA, 15 bp, Homo sapiens
aggatttgttagact

SEQ ID NO: 1759486 - DNA, 15 bp, Homo sapiens
ggatttgttagactc

SEQ ID NO: 1759487 - DNA, 15 bp, Homo sapiens
gatttgttagactct

SEQ ID NO: 1759488 - DNA, 15 bp, Homo sapiens
atttgttagactctt

SEQ ID NO: 1759489 - DNA, 15 bp, Homo sapiens
tttgttagactcttc

SEQ ID NO: 1759490 - DNA, 15 bp, Homo sapiens
ttgttagactcttcc

SEQ ID NO: 1759491 - DNA, 15 bp, Homo sapiens
tgttagactcttcct

SEQ ID NO: 1759492 - DNA, 15 bp, Homo sapiens
gttagactcttcctg

SEQ ID NO: 1759493 - DNA, 15 bp, Homo sapiens
ttagactcttcctga

SEQ ID NO: 1759494 - DNA, 15 bp, Homo sapiens
tagactcttcctgag

SEQ ID NO: 1759495 - DNA, 15 bp, Homo sapiens
agactcttcctgagg

SEQ ID NO: 1759496 - DNA, 15 bp, Homo sapiens
gactcttcctgaggt

SEQ ID NO: 1759497 - DNA, 15 bp, Homo sapiens
actcttcctgaggtt

SEQ ID NO: 1759498 - DNA, 15 bp, Homo sapiens
ctcttcctgaggttt

SEQ ID NO: 1759499 - DNA, 15 bp, Homo sapiens
tcttcctgaggtttt

SEQ ID NO: 1759500 - DNA, 15 bp, Homo sapiens
cttcctgaggttttg

SEQ ID NO: 1759501 - DNA, 15 bp, Homo sapiens
ttcctgaggttttga

SEQ ID NO: 1759502 - DNA, 15 bp, Homo sapiens
tcctgaggttttgac

SEQ ID NO: 1759503 - DNA, 15 bp, Homo sapiens
cctgaggttttgaca

SEQ ID NO: 1759504 - DNA, 15 bp, Homo sapiens
ctgaggttttgacaa

SEQ ID NO: 1759505 - DNA, 15 bp, Homo sapiens
tgaggttttgacaaa

SEQ ID NO: 1759506 - DNA, 15 bp, Homo sapiens
gaggttttgacaaac

SEQ ID NO: 1759507 - DNA, 15 bp, Homo sapiens
aggttttgacaaact

SEQ ID NO: 1759508 - DNA, 15 bp, Homo sapiens
ggttttgacaaactc

SEQ ID NO: 1759509 - DNA, 15 bp, Homo sapiens
gttttgacaaactct

SEQ ID NO: 1759510 - DNA, 15 bp, Homo sapiens
ttttgacaaactctc

SEQ ID NO: 1759511 - DNA, 15 bp, Homo sapiens
tttgacaaactctct

SEQ ID NO: 1759512 - DNA, 15 bp, Homo sapiens
ttgacaaactctctg

SEQ ID NO: 1759513 - DNA, 15 bp, Homo sapiens
tgacaaactctctgt

SEQ ID NO: 1759514 - DNA, 15 bp, Homo sapiens
gacaaactctctgta

SEQ ID NO: 1759515 - DNA, 15 bp, Homo sapiens
acaaactctctgtat

SEQ ID NO: 1759516 - DNA, 15 bp, Homo sapiens
caaactctctgtatt

SEQ ID NO: 1759517 - DNA, 15 bp, Homo sapiens
aaactctctgtattt

SEQ ID NO: 1759518 - DNA, 15 bp, Homo sapiens
aactctctgtatttt

SEQ ID NO: 1759519 - DNA, 15 bp, Homo sapiens
actctctgtattttt

SEQ ID NO: 1759520 - DNA, 15 bp, Homo sapiens
ctctctgtatttttc

SEQ ID NO: 1759521 - DNA, 15 bp, Homo sapiens
tctctgtatttttca

SEQ ID NO: 1759522 - DNA, 15 bp, Homo sapiens
ctctgtatttttcaa

SEQ ID NO: 1759523 - DNA, 15 bp, Homo sapiens
tctgtatttttcaaa

SEQ ID NO: 1759524 - DNA, 15 bp, Homo sapiens
ctgtatttttcaaat

SEQ ID NO: 1759525 - DNA, 15 bp, Homo sapiens
tgtatttttcaaata

SEQ ID NO: 1759526 - DNA, 15 bp, Homo sapiens
gtatttttcaaatac

SEQ ID NO: 1759527 - DNA, 15 bp, Homo sapiens
tatttttcaaatact

SEQ ID NO: 1759528 - DNA, 15 bp, Homo sapiens
atttttcaaatactt

SEQ ID NO: 1759529 - DNA, 15 bp, Homo sapiens
tttttcaaatactta

SEQ ID NO: 1759530 - DNA, 15 bp, Homo sapiens
ttttcaaatacttaa

SEQ ID NO: 1759531 - DNA, 15 bp, Homo sapiens
tttcaaatacttaag

SEQ ID NO: 1759532 - DNA, 15 bp, Homo sapiens
ttcaaatacttaagt

SEQ ID NO: 1759533 - DNA, 15 bp, Homo sapiens
tcaaatacttaagta

SEQ ID NO: 1759534 - DNA, 15 bp, Homo sapiens
caaatacttaagtat

SEQ ID NO: 1759535 - DNA, 15 bp, Homo sapiens
aaatacttaagtatc

SEQ ID NO: 1759536 - DNA, 15 bp, Homo sapiens
aatacttaagtatct

SEQ ID NO: 1759537 - DNA, 15 bp, Homo sapiens
atacttaagtatcta

SEQ ID NO: 1759538 - DNA, 15 bp, Homo sapiens
tacttaagtatctat

SEQ ID NO: 1759539 - DNA, 15 bp, Homo sapiens
acttaagtatctatt

SEQ ID NO: 1759540 - DNA, 15 bp, Homo sapiens
cttaagtatctattc

SEQ ID NO: 1759541 - DNA, 15 bp, Homo sapiens
ttaagtatctattcg

SEQ ID NO: 1759542 - DNA, 15 bp, Homo sapiens
taagtatctattcgg

SEQ ID NO: 1759543 - DNA, 15 bp, Homo sapiens
aagtatctattcggc

SEQ ID NO: 1759544 - DNA, 15 bp, Homo sapiens
agtatctattcggct

SEQ ID NO: 1759545 - DNA, 15 bp, Homo sapiens
gtatctattcggctg

SEQ ID NO: 1759546 - DNA, 15 bp, Homo sapiens
tatctattcggctga

SEQ ID NO: 1759547 - DNA, 15 bp, Homo sapiens
atctattcggctgac

SEQ ID NO: 1759548 - DNA, 15 bp, Homo sapiens
tctattcggctgaca

SEQ ID NO: 1759549 - DNA, 15 bp, Homo sapiens
ctattcggctgacat

SEQ ID NO: 1759550 - DNA, 15 bp, Homo sapiens
tattcggctgacatc

SEQ ID NO: 1759551 - DNA, 15 bp, Homo sapiens
attcggctgacatct

SEQ ID NO: 1759552 - DNA, 15 bp, Homo sapiens
ttcggctgacatctt

SEQ ID NO: 1759553 - DNA, 15 bp, Homo sapiens
tcggctgacatctta

SEQ ID NO: 1759554 - DNA, 15 bp, Homo sapiens
cggctgacatcttaa

SEQ ID NO: 1759555 - DNA, 15 bp, Homo sapiens
ggctgacatcttaat

SEQ ID NO: 1759556 - DNA, 15 bp, Homo sapiens
gctgacatcttaatc

SEQ ID NO: 1759557 - DNA, 15 bp, Homo sapiens
ctgacatcttaatca

SEQ ID NO: 1759558 - DNA, 15 bp, Homo sapiens
tgacatcttaatcag

SEQ ID NO: 1759559 - DNA, 15 bp, Homo sapiens
gacatcttaatcagt

SEQ ID NO: 1759560 - DNA, 15 bp, Homo sapiens
acatcttaatcagta

SEQ ID NO: 1759561 - DNA, 15 bp, Homo sapiens
catcttaatcagtac

SEQ ID NO: 1759562 - DNA, 15 bp, Homo sapiens
atcttaatcagtacg

SEQ ID NO: 1759563 - DNA, 15 bp, Homo sapiens
tcttaatcagtacga

SEQ ID NO: 1759564 - DNA, 15 bp, Homo sapiens
cttaatcagtacgac

SEQ ID NO: 1759565 - DNA, 15 bp, Homo sapiens
ttaatcagtacgact

SEQ ID NO: 1759566 - DNA, 15 bp, Homo sapiens
taatcagtacgactg

SEQ ID NO: 1759567 - DNA, 15 bp, Homo sapiens
aatcagtacgactgt

SEQ ID NO: 1759568 - DNA, 15 bp, Homo sapiens
atcagtacgactgtc

SEQ ID NO: 1759569 - DNA, 15 bp, Homo sapiens
tcagtacgactgtca

SEQ ID NO: 1759570 - DNA, 15 bp, Homo sapiens
cagtacgactgtcag

SEQ ID NO: 1759571 - DNA, 15 bp, Homo sapiens
agtacgactgtcaga

SEQ ID NO: 1759572 - DNA, 15 bp, Homo sapiens
gtacgactgtcagaa

SEQ ID NO: 1759573 - DNA, 15 bp, Homo sapiens
tacgactgtcagaac

SEQ ID NO: 1759574 - DNA, 15 bp, Homo sapiens
acgactgtcagaaca

SEQ ID NO: 1759575 - DNA, 15 bp, Homo sapiens
cgactgtcagaacat

SEQ ID NO: 1759576 - DNA, 15 bp, Homo sapiens
gactgtcagaacatc

SEQ ID NO: 1759577 - DNA, 15 bp, Homo sapiens
actgtcagaacatca

SEQ ID NO: 1759578 - DNA, 15 bp, Homo sapiens
ctgtcagaacatcac

SEQ ID NO: 1759579 - DNA, 15 bp, Homo sapiens
tgtcagaacatcact

SEQ ID NO: 1759580 - DNA, 15 bp, Homo sapiens
gtcagaacatcactt

SEQ ID NO: 1759581 - DNA, 15 bp, Homo sapiens
tcagaacatcacttg

SEQ ID NO: 1759582 - DNA, 15 bp, Homo sapiens
cagaacatcacttga

SEQ ID NO: 1759583 - DNA, 15 bp, Homo sapiens
agaacatcacttgaa

SEQ ID NO: 1759584 - DNA, 15 bp, Homo sapiens
gaacatcacttgaat

SEQ ID NO: 1759585 - DNA, 15 bp, Homo sapiens
aacatcacttgaatt

SEQ ID NO: 1759586 - DNA, 15 bp, Homo sapiens
acatcacttgaattt

SEQ ID NO: 1759587 - DNA, 15 bp, Homo sapiens
catcacttgaatttc

SEQ ID NO: 1759588 - DNA, 15 bp, Homo sapiens
atcacttgaatttct

SEQ ID NO: 1759589 - DNA, 15 bp, Homo sapiens
tcacttgaatttctg

SEQ ID NO: 1759590 - DNA, 15 bp, Homo sapiens
cacttgaatttctga

SEQ ID NO: 1759591 - DNA, 15 bp, Homo sapiens
acttgaatttctgac

SEQ ID NO: 1759592 - DNA, 15 bp, Homo sapiens
cttgaatttctgaca

SEQ ID NO: 1759593 - DNA, 15 bp, Homo sapiens
ttgaatttctgacag

SEQ ID NO: 1759594 - DNA, 15 bp, Homo sapiens
tgaatttctgacagg

SEQ ID NO: 1759595 - DNA, 15 bp, Homo sapiens
gaatttctgacaggt

SEQ ID NO: 1759596 - DNA, 15 bp, Homo sapiens
aatttctgacaggtg

SEQ ID NO: 1759597 - DNA, 15 bp, Homo sapiens
atttctgacaggtga

SEQ ID NO: 1759598 - DNA, 15 bp, Homo sapiens
tttctgacaggtgac

SEQ ID NO: 1759599 - DNA, 15 bp, Homo sapiens
ttctgacaggtgaca

SEQ ID NO: 1759600 - DNA, 15 bp, Homo sapiens
tctgacaggtgacac

SEQ ID NO: 1759601 - DNA, 15 bp, Homo sapiens
ctgacaggtgacacc

SEQ ID NO: 1759602 - DNA, 15 bp, Homo sapiens
tgacaggtgacaccc

SEQ ID NO: 1759603 - DNA, 15 bp, Homo sapiens
gacaggtgacaccca

SEQ ID NO: 1759604 - DNA, 15 bp, Homo sapiens
acaggtgacacccaa

SEQ ID NO: 1759605 - DNA, 15 bp, Homo sapiens
caggtgacacccaaa

SEQ ID NO: 1759606 - DNA, 15 bp, Homo sapiens
aggtgacacccaaaa

SEQ ID NO: 1759607 - DNA, 15 bp, Homo sapiens
ggtgacacccaaaaa

SEQ ID NO: 1759608 - DNA, 15 bp, Homo sapiens
gtgacacccaaaaaa

SEQ ID NO: 1759609 - DNA, 15 bp, Homo sapiens
tgacacccaaaaaag

SEQ ID NO: 1759610 - DNA, 15 bp, Homo sapiens
gacacccaaaaaagc

SEQ ID NO: 1759611 - DNA, 15 bp, Homo sapiens
acacccaaaaaagca

SEQ ID NO: 1759612 - DNA, 15 bp, Homo sapiens
cacccaaaaaagcaa

SEQ ID NO: 1759613 - DNA, 15 bp, Homo sapiens
acccaaaaaagcaaa

SEQ ID NO: 1759614 - DNA, 15 bp, Homo sapiens
cccaaaaaagcaaaa

SEQ ID NO: 1759615 - DNA, 15 bp, Homo sapiens
ccaaaaaagcaaaag

SEQ ID NO: 1759616 - DNA, 15 bp, Homo sapiens
caaaaaagcaaaagc

SEQ ID NO: 1759617 - DNA, 15 bp, Homo sapiens
aaaaaagcaaaagca

SEQ ID NO: 1759618 - DNA, 15 bp, Homo sapiens
aaaaagcaaaagcag

SEQ ID NO: 1759619 - DNA, 15 bp, Homo sapiens
aaaagcaaaagcagg

SEQ ID NO: 1759620 - DNA, 15 bp, Homo sapiens
aaagcaaaagcaggt

SEQ ID NO: 1759621 - DNA, 15 bp, Homo sapiens
aagcaaaagcaggtt

SEQ ID NO: 1759622 - DNA, 15 bp, Homo sapiens
agcaaaagcaggttt

SEQ ID NO: 1759623 - DNA, 15 bp, Homo sapiens
gcaaaagcaggttta

SEQ ID NO: 1759624 - DNA, 15 bp, Homo sapiens
caaaagcaggtttat

SEQ ID NO: 1759625 - DNA, 15 bp, Homo sapiens
aaaagcaggtttatt

SEQ ID NO: 1759626 - DNA, 15 bp, Homo sapiens
aaagcaggtttattt

SEQ ID NO: 1759627 - DNA, 15 bp, Homo sapiens
aagcaggtttatttg

SEQ ID NO: 1759628 - DNA, 15 bp, Homo sapiens
agcaggtttatttgt

SEQ ID NO: 1759629 - DNA, 15 bp, Homo sapiens
gcaggtttatttgta

SEQ ID NO: 1759630 - DNA, 15 bp, Homo sapiens
caggtttatttgtag

SEQ ID NO: 1759631 - DNA, 15 bp, Homo sapiens
aggtttatttgtagg

SEQ ID NO: 1759632 - DNA, 15 bp, Homo sapiens
ggtttatttgtaggt

SEQ ID NO: 1759633 - DNA, 15 bp, Homo sapiens
gtttatttgtaggta

SEQ ID NO: 1759634 - DNA, 15 bp, Homo sapiens
tttatttgtaggtaa

SEQ ID NO: 1759635 - DNA, 15 bp, Homo sapiens
ttatttgtaggtaac

SEQ ID NO: 1759636 - DNA, 15 bp, Homo sapiens
tatttgtaggtaacc

SEQ ID NO: 1759637 - DNA, 15 bp, Homo sapiens
atttgtaggtaacca

SEQ ID NO: 1759638 - DNA, 15 bp, Homo sapiens
tttgtaggtaaccag

SEQ ID NO: 1759639 - DNA, 15 bp, Homo sapiens
ttgtaggtaaccagc

SEQ ID NO: 1759640 - DNA, 15 bp, Homo sapiens
tgtaggtaaccagct

SEQ ID NO: 1759641 - DNA, 15 bp, Homo sapiens
gtaggtaaccagctc

SEQ ID NO: 1759642 - DNA, 15 bp, Homo sapiens
taggtaaccagctct

SEQ ID NO: 1759643 - DNA, 15 bp, Homo sapiens
aggtaaccagctctg

SEQ ID NO: 1759644 - DNA, 15 bp, Homo sapiens
ggtaaccagctctgc

SEQ ID NO: 1759645 - DNA, 15 bp, Homo sapiens
gtaaccagctctgct

SEQ ID NO: 1759646 - DNA, 15 bp, Homo sapiens
taaccagctctgctc

SEQ ID NO: 1759647 - DNA, 15 bp, Homo sapiens
aaccagctctgctca

SEQ ID NO: 1759648 - DNA, 15 bp, Homo sapiens
accagctctgctcat

SEQ ID NO: 1759649 - DNA, 15 bp, Homo sapiens
ccagctctgctcatg

SEQ ID NO: 1759650 - DNA, 15 bp, Homo sapiens
cagctctgctcatgc

SEQ ID NO: 1759651 - DNA, 15 bp, Homo sapiens
agctctgctcatgct

SEQ ID NO: 1759652 - DNA, 15 bp, Homo sapiens
gctctgctcatgctg

SEQ ID NO: 1759653 - DNA, 15 bp, Homo sapiens
ctctgctcatgctgg

SEQ ID NO: 1759654 - DNA, 15 bp, Homo sapiens
tctgctcatgctggg

SEQ ID NO: 1759655 - DNA, 15 bp, Homo sapiens
ctgctcatgctgggc

SEQ ID NO: 1759656 - DNA, 15 bp, Homo sapiens
tgctcatgctgggct

SEQ ID NO: 1759657 - DNA, 15 bp, Homo sapiens
gctcatgctgggcta

SEQ ID NO: 1759658 - DNA, 15 bp, Homo sapiens
ctcatgctgggctac

SEQ ID NO: 1759659 - DNA, 15 bp, Homo sapiens
tcatgctgggctaca

SEQ ID NO: 1759660 - DNA, 15 bp, Homo sapiens
catgctgggctacat

SEQ ID NO: 1759661 - DNA, 15 bp, Homo sapiens
atgctgggctacatt

SEQ ID NO: 1759662 - DNA, 15 bp, Homo sapiens
tgctgggctacattg

SEQ ID NO: 1759663 - DNA, 15 bp, Homo sapiens
gctgggctacattgt

SEQ ID NO: 1759664 - DNA, 15 bp, Homo sapiens
ctgggctacattgta

SEQ ID NO: 1759665 - DNA, 15 bp, Homo sapiens
tgggctacattgtaa

SEQ ID NO: 1759666 - DNA, 15 bp, Homo sapiens
gggctacattgtaat

SEQ ID NO: 1759667 - DNA, 15 bp, Homo sapiens
ggctacattgtaatt

SEQ ID NO: 1759668 - DNA, 15 bp, Homo sapiens
gctacattgtaattt

SEQ ID NO: 1759669 - DNA, 15 bp, Homo sapiens
ctacattgtaatttc

SEQ ID NO: 1759670 - DNA, 15 bp, Homo sapiens
tacattgtaatttct

SEQ ID NO: 1759671 - DNA, 15 bp, Homo sapiens
acattgtaatttctc

SEQ ID NO: 1759672 - DNA, 15 bp, Homo sapiens
cattgtaatttctcc

SEQ ID NO: 1759673 - DNA, 15 bp, Homo sapiens
attgtaatttctcct

SEQ ID NO: 1759674 - DNA, 15 bp, Homo sapiens
ttgtaatttctcctc

SEQ ID NO: 1759675 - DNA, 15 bp, Homo sapiens
tgtaatttctcctcg

SEQ ID NO: 1759676 - DNA, 15 bp, Homo sapiens
gtaatttctcctcgt

SEQ ID NO: 1759677 - DNA, 15 bp, Homo sapiens
taatttctcctcgta

SEQ ID NO: 1759678 - DNA, 15 bp, Homo sapiens
aatttctcctcgtat

SEQ ID NO: 1759679 - DNA, 15 bp, Homo sapiens
atttctcctcgtatt

SEQ ID NO: 1759680 - DNA, 15 bp, Homo sapiens
tttctcctcgtatta

SEQ ID NO: 1759681 - DNA, 15 bp, Homo sapiens
ttctcctcgtattaa

SEQ ID NO: 1759682 - DNA, 15 bp, Homo sapiens
tctcctcgtattaac

SEQ ID NO: 1759683 - DNA, 15 bp, Homo sapiens
ctcctcgtattaact

SEQ ID NO: 1759684 - DNA, 15 bp, Homo sapiens
tcctcgtattaactt

SEQ ID NO: 1759685 - DNA, 15 bp, Homo sapiens
cctcgtattaacttc

SEQ ID NO: 1759686 - DNA, 15 bp, Homo sapiens
ctcgtattaacttct

SEQ ID NO: 1759687 - DNA, 15 bp, Homo sapiens
tcgtattaacttctg

SEQ ID NO: 1759688 - DNA, 15 bp, Homo sapiens
cgtattaacttctga

SEQ ID NO: 1759689 - DNA, 15 bp, Homo sapiens
gtattaacttctgat

SEQ ID NO: 1759690 - DNA, 15 bp, Homo sapiens
tattaacttctgatc

SEQ ID NO: 1759691 - DNA, 15 bp, Homo sapiens
attaacttctgatca

SEQ ID NO: 1759692 - DNA, 15 bp, Homo sapiens
ttaacttctgatcaa

SEQ ID NO: 1759693 - DNA, 15 bp, Homo sapiens
taacttctgatcaaa

SEQ ID NO: 1759694 - DNA, 15 bp, Homo sapiens
aacttctgatcaaat

SEQ ID NO: 1759695 - DNA, 15 bp, Homo sapiens
acttctgatcaaatt

SEQ ID NO: 1759696 - DNA, 15 bp, Homo sapiens
cttctgatcaaattc

SEQ ID NO: 1759697 - DNA, 15 bp, Homo sapiens
ttctgatcaaattcc

SEQ ID NO: 1759698 - DNA, 15 bp, Homo sapiens
tctgatcaaattcct

SEQ ID NO: 1759699 - DNA, 15 bp, Homo sapiens
ctgatcaaattcctg

SEQ ID NO: 1759700 - DNA, 15 bp, Homo sapiens
tgatcaaattcctga

SEQ ID NO: 1759701 - DNA, 15 bp, Homo sapiens
gatcaaattcctgag

SEQ ID NO: 1759702 - DNA, 15 bp, Homo sapiens
atcaaattcctgagt

SEQ ID NO: 1759703 - DNA, 15 bp, Homo sapiens
tcaaattcctgagtc

SEQ ID NO: 1759704 - DNA, 15 bp, Homo sapiens
caaattcctgagtca

SEQ ID NO: 1759705 - DNA, 15 bp, Homo sapiens
aaattcctgagtcag

SEQ ID NO: 1759706 - DNA, 15 bp, Homo sapiens
aattcctgagtcaga

SEQ ID NO: 1759707 - DNA, 15 bp, Homo sapiens
attcctgagtcagat

SEQ ID NO: 1759708 - DNA, 15 bp, Homo sapiens
ttcctgagtcagatg

SEQ ID NO: 1759709 - DNA, 15 bp, Homo sapiens
tcctgagtcagatgc

SEQ ID NO: 1759710 - DNA, 15 bp, Homo sapiens
cctgagtcagatgcc

SEQ ID NO: 1759711 - DNA, 15 bp, Homo sapiens
ctgagtcagatgcct

SEQ ID NO: 1759712 - DNA, 15 bp, Homo sapiens
tgagtcagatgccta

SEQ ID NO: 1759713 - DNA, 15 bp, Homo sapiens
gagtcagatgcctag

SEQ ID NO: 1759714 - DNA, 15 bp, Homo sapiens
agtcagatgcctagg

SEQ ID NO: 1759715 - DNA, 15 bp, Homo sapiens
gtcagatgcctaggc

SEQ ID NO: 1759716 - DNA, 15 bp, Homo sapiens
tcagatgcctaggca

SEQ ID NO: 1759717 - DNA, 15 bp, Homo sapiens
cagatgcctaggcaa

SEQ ID NO: 1759718 - DNA, 15 bp, Homo sapiens
agatgcctaggcaag

SEQ ID NO: 1759719 - DNA, 15 bp, Homo sapiens
gatgcctaggcaaga

SEQ ID NO: 1759720 - DNA, 15 bp, Homo sapiens
atgcctaggcaagaa

SEQ ID NO: 1759721 - DNA, 15 bp, Homo sapiens
tgcctaggcaagaag

SEQ ID NO: 1759722 - DNA, 15 bp, Homo sapiens
gcctaggcaagaagg

SEQ ID NO: 1759723 - DNA, 15 bp, Homo sapiens
cctaggcaagaagga

SEQ ID NO: 1759724 - DNA, 15 bp, Homo sapiens
ctaggcaagaaggaa

SEQ ID NO: 1759725 - DNA, 15 bp, Homo sapiens
taggcaagaaggaaa

SEQ ID NO: 1759726 - DNA, 15 bp, Homo sapiens
aggcaagaaggaaac

SEQ ID NO: 1759727 - DNA, 15 bp, Homo sapiens
ggcaagaaggaaact

SEQ ID NO: 1759728 - DNA, 15 bp, Homo sapiens
gcaagaaggaaactc

SEQ ID NO: 1759729 - DNA, 15 bp, Homo sapiens
caagaaggaaactca

SEQ ID NO: 1759730 - DNA, 15 bp, Homo sapiens
aagaaggaaactcac

SEQ ID NO: 1759731 - DNA, 15 bp, Homo sapiens
agaaggaaactcaca

SEQ ID NO: 1759732 - DNA, 15 bp, Homo sapiens
gaaggaaactcacag

SEQ ID NO: 1759733 - DNA, 15 bp, Homo sapiens
aaggaaactcacaga

SEQ ID NO: 1759734 - DNA, 15 bp, Homo sapiens
aggaaactcacagag

SEQ ID NO: 1759735 - DNA, 15 bp, Homo sapiens
ggaaactcacagagc

SEQ ID NO: 1759736 - DNA, 15 bp, Homo sapiens
gaaactcacagagca

SEQ ID NO: 1759737 - DNA, 15 bp, Homo sapiens
aaactcacagagcac

SEQ ID NO: 1759738 - DNA, 15 bp, Homo sapiens
aactcacagagcaca

SEQ ID NO: 1759739 - DNA, 15 bp, Homo sapiens
actcacagagcacat

SEQ ID NO: 1759740 - DNA, 15 bp, Homo sapiens
ctcacagagcacatg

SEQ ID NO: 1759741 - DNA, 15 bp, Homo sapiens
tcacagagcacatgt

SEQ ID NO: 1759742 - DNA, 15 bp, Homo sapiens
cacagagcacatgtt

SEQ ID NO: 1759743 - DNA, 15 bp, Homo sapiens
acagagcacatgttt

SEQ ID NO: 1759744 - DNA, 15 bp, Homo sapiens
cagagcacatgtttc

SEQ ID NO: 1759745 - DNA, 15 bp, Homo sapiens
agagcacatgtttct

SEQ ID NO: 1759746 - DNA, 15 bp, Homo sapiens
gagcacatgtttcta

SEQ ID NO: 1759747 - DNA, 15 bp, Homo sapiens
agcacatgtttctag

SEQ ID NO: 1759748 - DNA, 15 bp, Homo sapiens
gcacatgtttctagt

SEQ ID NO: 1759749 - DNA, 15 bp, Homo sapiens
cacatgtttctagtt

SEQ ID NO: 1759750 - DNA, 15 bp, Homo sapiens
acatgtttctagttc

SEQ ID NO: 1759751 - DNA, 15 bp, Homo sapiens
catgtttctagttct

SEQ ID NO: 1759752 - DNA, 15 bp, Homo sapiens
atgtttctagttctg

SEQ ID NO: 1759753 - DNA, 15 bp, Homo sapiens
tgtttctagttctga

SEQ ID NO: 1759754 - DNA, 15 bp, Homo sapiens
gtttctagttctgag

SEQ ID NO: 1759755 - DNA, 15 bp, Homo sapiens
tttctagttctgaga

SEQ ID NO: 1759756 - DNA, 15 bp, Homo sapiens
ttctagttctgagat

SEQ ID NO: 1759757 - DNA, 15 bp, Homo sapiens
tctagttctgagatg

SEQ ID NO: 1759758 - DNA, 15 bp, Homo sapiens
ctagttctgagatga

SEQ ID NO: 1759759 - DNA, 15 bp, Homo sapiens
tagttctgagatgag

SEQ ID NO: 1759760 - DNA, 15 bp, Homo sapiens
agttctgagatgagg

SEQ ID NO: 1759761 - DNA, 15 bp, Homo sapiens
gttctgagatgagga

SEQ ID NO: 1759762 - DNA, 15 bp, Homo sapiens
ttctgagatgaggag

SEQ ID NO: 1759763 - DNA, 15 bp, Homo sapiens
tctgagatgaggagc

SEQ ID NO: 1759764 - DNA, 15 bp, Homo sapiens
ctgagatgaggagcc

SEQ ID NO: 1759765 - DNA, 15 bp, Homo sapiens
tgagatgaggagcct

SEQ ID NO: 1759766 - DNA, 15 bp, Homo sapiens
gagatgaggagccta

SEQ ID NO: 1759767 - DNA, 15 bp, Homo sapiens
agatgaggagcctat

SEQ ID NO: 1759768 - DNA, 15 bp, Homo sapiens
gatgaggagcctatg

SEQ ID NO: 1759769 - DNA, 15 bp, Homo sapiens
atgaggagcctatgc

SEQ ID NO: 1759770 - DNA, 15 bp, Homo sapiens
tgaggagcctatgcc

SEQ ID NO: 1759771 - DNA, 15 bp, Homo sapiens
gaggagcctatgccc

SEQ ID NO: 1759772 - DNA, 15 bp, Homo sapiens
aggagcctatgcccc

SEQ ID NO: 1759773 - DNA, 15 bp, Homo sapiens
ggagcctatgccccg

SEQ ID NO: 1759774 - DNA, 15 bp, Homo sapiens
gagcctatgccccgg

SEQ ID NO: 1759775 - DNA, 15 bp, Homo sapiens
agcctatgccccggg

SEQ ID NO: 1759776 - DNA, 15 bp, Homo sapiens
gcctatgccccgggg

SEQ ID NO: 1759777 - DNA, 15 bp, Homo sapiens
cctatgccccggggg

SEQ ID NO: 1759778 - DNA, 15 bp, Homo sapiens
ctatgccccgggggg

SEQ ID NO: 1759779 - DNA, 15 bp, Homo sapiens
tatgccccgggggga

SEQ ID NO: 1759780 - DNA, 15 bp, Homo sapiens
atgccccggggggag

SEQ ID NO: 1759781 - DNA, 15 bp, Homo sapiens
tgccccggggggagt

SEQ ID NO: 1759782 - DNA, 15 bp, Homo sapiens
gccccggggggagtg

SEQ ID NO: 1759783 - DNA, 15 bp, Homo sapiens
ccccggggggagtga

SEQ ID NO: 1759784 - DNA, 15 bp, Homo sapiens
cccggggggagtgat

SEQ ID NO: 1759785 - DNA, 15 bp, Homo sapiens
ccggggggagtgatg

SEQ ID NO: 1759786 - DNA, 15 bp, Homo sapiens
cggggggagtgatgt

SEQ ID NO: 1759787 - DNA, 15 bp, Homo sapiens
ggggggagtgatgtg

SEQ ID NO: 1759788 - DNA, 15 bp, Homo sapiens
gggggagtgatgtgc

SEQ ID NO: 1759789 - DNA, 15 bp, Homo sapiens
ggggagtgatgtgct

SEQ ID NO: 1759790 - DNA, 15 bp, Homo sapiens
gggagtgatgtgctg

SEQ ID NO: 1759791 - DNA, 15 bp, Homo sapiens
ggagtgatgtgctga

SEQ ID NO: 1759792 - DNA, 15 bp, Homo sapiens
gagtgatgtgctgac

SEQ ID NO: 1759793 - DNA, 15 bp, Homo sapiens
agtgatgtgctgaca

SEQ ID NO: 1759794 - DNA, 15 bp, Homo sapiens
gtgatgtgctgacac

SEQ ID NO: 1759795 - DNA, 15 bp, Homo sapiens
tgatgtgctgacact

SEQ ID NO: 1759796 - DNA, 15 bp, Homo sapiens
gatgtgctgacactc

SEQ ID NO: 1759797 - DNA, 15 bp, Homo sapiens
atgtgctgacactca

SEQ ID NO: 1759798 - DNA, 15 bp, Homo sapiens
tgtgctgacactcac

SEQ ID NO: 1759799 - DNA, 15 bp, Homo sapiens
gtgctgacactcacg

SEQ ID NO: 1759800 - DNA, 15 bp, Homo sapiens
tgctgacactcacgg

SEQ ID NO: 1759801 - DNA, 15 bp, Homo sapiens
gctgacactcacggc

SEQ ID NO: 1759802 - DNA, 15 bp, Homo sapiens
ctgacactcacggct

SEQ ID NO: 1759803 - DNA, 15 bp, Homo sapiens
tgacactcacggctg

SEQ ID NO: 1759804 - DNA, 15 bp, Homo sapiens
gacactcacggctgg

SEQ ID NO: 1759805 - DNA, 15 bp, Homo sapiens
acactcacggctgga

SEQ ID NO: 1759806 - DNA, 15 bp, Homo sapiens
cactcacggctggag

SEQ ID NO: 1759807 - DNA, 15 bp, Homo sapiens
actcacggctggagg

SEQ ID NO: 1759808 - DNA, 15 bp, Homo sapiens
ctcacggctggaggg

SEQ ID NO: 1759809 - DNA, 15 bp, Homo sapiens
tcacggctggagggt

SEQ ID NO: 1759810 - DNA, 15 bp, Homo sapiens
cacggctggagggtt

SEQ ID NO: 1759811 - DNA, 15 bp, Homo sapiens
acggctggagggttg

SEQ ID NO: 1759812 - DNA, 15 bp, Homo sapiens
cggctggagggttgg

SEQ ID NO: 1759813 - DNA, 15 bp, Homo sapiens
ggctggagggttggc

SEQ ID NO: 1759814 - DNA, 15 bp, Homo sapiens
gctggagggttggca

SEQ ID NO: 1759815 - DNA, 15 bp, Homo sapiens
ctggagggttggcaa

SEQ ID NO: 1759816 - DNA, 15 bp, Homo sapiens
tggagggttggcaag

SEQ ID NO: 1759817 - DNA, 15 bp, Homo sapiens
ggagggttggcaaga

SEQ ID NO: 1759818 - DNA, 15 bp, Homo sapiens
gagggttggcaagag

SEQ ID NO: 1759819 - DNA, 15 bp, Homo sapiens
agggttggcaagagg

SEQ ID NO: 1759820 - DNA, 15 bp, Homo sapiens
gggttggcaagagga

SEQ ID NO: 1759821 - DNA, 15 bp, Homo sapiens
ggttggcaagaggac

SEQ ID NO: 1759822 - DNA, 15 bp, Homo sapiens
gttggcaagaggaca

SEQ ID NO: 1759823 - DNA, 15 bp, Homo sapiens
ttggcaagaggacac

SEQ ID NO: 1759824 - DNA, 15 bp, Homo sapiens
tggcaagaggacacg

SEQ ID NO: 1759825 - DNA, 15 bp, Homo sapiens
ggcaagaggacacgc

SEQ ID NO: 1759826 - DNA, 15 bp, Homo sapiens
gcaagaggacacgca

SEQ ID NO: 1759827 - DNA, 15 bp, Homo sapiens
caagaggacacgcag

SEQ ID NO: 1759828 - DNA, 15 bp, Homo sapiens
aagaggacacgcagg

SEQ ID NO: 1759829 - DNA, 15 bp, Homo sapiens
agaggacacgcagga

SEQ ID NO: 1759830 - DNA, 15 bp, Homo sapiens
gaggacacgcaggac

SEQ ID NO: 1759831 - DNA, 15 bp, Homo sapiens
aggacacgcaggact

SEQ ID NO: 1759832 - DNA, 15 bp, Homo sapiens
ggacacgcaggactt

SEQ ID NO: 1759833 - DNA, 15 bp, Homo sapiens
gacacgcaggacttg

SEQ ID NO: 1759834 - DNA, 15 bp, Homo sapiens
acacgcaggacttgt

SEQ ID NO: 1759835 - DNA, 15 bp, Homo sapiens
cacgcaggacttgtt

SEQ ID NO: 1759836 - DNA, 15 bp, Homo sapiens
acgcaggacttgttc

SEQ ID NO: 1759837 - DNA, 15 bp, Homo sapiens
cgcaggacttgttcc

SEQ ID NO: 1759838 - DNA, 15 bp, Homo sapiens
gcaggacttgttcct

SEQ ID NO: 1759839 - DNA, 15 bp, Homo sapiens
caggacttgttcctg

SEQ ID NO: 1759840 - DNA, 15 bp, Homo sapiens
aggacttgttcctgg

SEQ ID NO: 1759841 - DNA, 15 bp, Homo sapiens
ggacttgttcctggc

SEQ ID NO: 1759842 - DNA, 15 bp, Homo sapiens
gacttgttcctggct

SEQ ID NO: 1759843 - DNA, 15 bp, Homo sapiens
acttgttcctggctg

SEQ ID NO: 1759844 - DNA, 15 bp, Homo sapiens
cttgttcctggctga

SEQ ID NO: 1759845 - DNA, 15 bp, Homo sapiens
ttgttcctggctgaa

SEQ ID NO: 1759846 - DNA, 15 bp, Homo sapiens
tgttcctggctgaag

SEQ ID NO: 1759847 - DNA, 15 bp, Homo sapiens
gttcctggctgaaga

SEQ ID NO: 1759848 - DNA, 15 bp, Homo sapiens
ttcctggctgaagaa

SEQ ID NO: 1759849 - DNA, 15 bp, Homo sapiens
tcctggctgaagaaa

SEQ ID NO: 1759850 - DNA, 15 bp, Homo sapiens
cctggctgaagaaat

SEQ ID NO: 1759851 - DNA, 15 bp, Homo sapiens
ctggctgaagaaatt

SEQ ID NO: 1759852 - DNA, 15 bp, Homo sapiens
tggctgaagaaattt

SEQ ID NO: 1759853 - DNA, 15 bp, Homo sapiens
ggctgaagaaatttt

SEQ ID NO: 1759854 - DNA, 15 bp, Homo sapiens
gctgaagaaatttta

SEQ ID NO: 1759855 - DNA, 15 bp, Homo sapiens
ctgaagaaattttat

SEQ ID NO: 1759856 - DNA, 15 bp, Homo sapiens
tgaagaaattttatc

SEQ ID NO: 1759857 - DNA, 15 bp, Homo sapiens
gaagaaattttatcg

SEQ ID NO: 1759858 - DNA, 15 bp, Homo sapiens
aagaaattttatcga

SEQ ID NO: 1759859 - DNA, 15 bp, Homo sapiens
agaaattttatcgaa

SEQ ID NO: 1759860 - DNA, 15 bp, Homo sapiens
gaaattttatcgaaa

SEQ ID NO: 1759861 - DNA, 15 bp, Homo sapiens
aaattttatcgaaac

SEQ ID NO: 1759862 - DNA, 15 bp, Homo sapiens
aattttatcgaaaca

SEQ ID NO: 1759863 - DNA, 15 bp, Homo sapiens
attttatcgaaacat

SEQ ID NO: 1759864 - DNA, 15 bp, Homo sapiens
ttttatcgaaacatt

SEQ ID NO: 1759865 - DNA, 15 bp, Homo sapiens
tttatcgaaacattc

SEQ ID NO: 1759866 - DNA, 15 bp, Homo sapiens
ttatcgaaacattca

SEQ ID NO: 1759867 - DNA, 15 bp, Homo sapiens
tatcgaaacattcag

SEQ ID NO: 1759868 - DNA, 15 bp, Homo sapiens
atcgaaacattcagc

SEQ ID NO: 1759869 - DNA, 15 bp, Homo sapiens
tcgaaacattcagcc

SEQ ID NO: 1759870 - DNA, 15 bp, Homo sapiens
cgaaacattcagcct

SEQ ID NO: 1759871 - DNA, 15 bp, Homo sapiens
gaaacattcagccta

SEQ ID NO: 1759872 - DNA, 15 bp, Homo sapiens
aaacattcagcctag

SEQ ID NO: 1759873 - DNA, 15 bp, Homo sapiens
aacattcagcctagg

SEQ ID NO: 1759874 - DNA, 15 bp, Homo sapiens
acattcagcctaggt

SEQ ID NO: 1759875 - DNA, 15 bp, Homo sapiens
cattcagcctaggtc

SEQ ID NO: 1759876 - DNA, 15 bp, Homo sapiens
attcagcctaggtca

SEQ ID NO: 1759877 - DNA, 15 bp, Homo sapiens
ttcagcctaggtcac

SEQ ID NO: 1759878 - DNA, 15 bp, Homo sapiens
tcagcctaggtcaca

SEQ ID NO: 1759879 - DNA, 15 bp, Homo sapiens
cagcctaggtcacac

SEQ ID NO: 1759880 - DNA, 15 bp, Homo sapiens
agcctaggtcacaca

SEQ ID NO: 1759881 - DNA, 15 bp, Homo sapiens
gcctaggtcacacac

SEQ ID NO: 1759882 - DNA, 15 bp, Homo sapiens
cctaggtcacacaca

SEQ ID NO: 1759883 - DNA, 15 bp, Homo sapiens
ctaggtcacacacag

SEQ ID NO: 1759884 - DNA, 15 bp, Homo sapiens
taggtcacacacagc

SEQ ID NO: 1759885 - DNA, 15 bp, Homo sapiens
aggtcacacacagct

SEQ ID NO: 1759886 - DNA, 15 bp, Homo sapiens
ggtcacacacagctc

SEQ ID NO: 1759887 - DNA, 15 bp, Homo sapiens
gtcacacacagctct

SEQ ID NO: 1759888 - DNA, 15 bp, Homo sapiens
tcacacacagctctg

SEQ ID NO: 1759889 - DNA, 15 bp, Homo sapiens
cacacacagctctgc

SEQ ID NO: 1759890 - DNA, 15 bp, Homo sapiens
acacacagctctgcc

SEQ ID NO: 1759891 - DNA, 15 bp, Homo sapiens
cacacagctctgcct

SEQ ID NO: 1759892 - DNA, 15 bp, Homo sapiens
acacagctctgcctg

SEQ ID NO: 1759893 - DNA, 15 bp, Homo sapiens
cacagctctgcctgc

SEQ ID NO: 1759894 - DNA, 15 bp, Homo sapiens
acagctctgcctgct

SEQ ID NO: 1759895 - DNA, 15 bp, Homo sapiens
cagctctgcctgctg

SEQ ID NO: 1759896 - DNA, 15 bp, Homo sapiens
agctctgcctgctgc

SEQ ID NO: 1759897 - DNA, 15 bp, Homo sapiens
gctctgcctgctgcc

SEQ ID NO: 1759898 - DNA, 15 bp, Homo sapiens
ctctgcctgctgcca

SEQ ID NO: 1759899 - DNA, 15 bp, Homo sapiens
tctgcctgctgccag

SEQ ID NO: 1759900 - DNA, 15 bp, Homo sapiens
ctgcctgctgccagg

SEQ ID NO: 1759901 - DNA, 15 bp, Homo sapiens
tgcctgctgccaggg

SEQ ID NO: 1759902 - DNA, 15 bp, Homo sapiens
gcctgctgccagggt

SEQ ID NO: 1759903 - DNA, 15 bp, Homo sapiens
cctgctgccagggtt

SEQ ID NO: 1759904 - DNA, 15 bp, Homo sapiens
ctgctgccagggttt

SEQ ID NO: 1759905 - DNA, 15 bp, Homo sapiens
tgctgccagggtttc

SEQ ID NO: 1759906 - DNA, 15 bp, Homo sapiens
gctgccagggtttct

SEQ ID NO: 1759907 - DNA, 15 bp, Homo sapiens
ctgccagggtttctc

SEQ ID NO: 1759908 - DNA, 15 bp, Homo sapiens
tgccagggtttctct

SEQ ID NO: 1759909 - DNA, 15 bp, Homo sapiens
gccagggtttctctt

SEQ ID NO: 1759910 - DNA, 15 bp, Homo sapiens
ccagggtttctcttg

SEQ ID NO: 1759911 - DNA, 15 bp, Homo sapiens
cagggtttctcttgt

SEQ ID NO: 1759912 - DNA, 15 bp, Homo sapiens
agggtttctcttgtc

SEQ ID NO: 1759913 - DNA, 15 bp, Homo sapiens
gggtttctcttgtcc

SEQ ID NO: 1759914 - DNA, 15 bp, Homo sapiens
ggtttctcttgtcct

SEQ ID NO: 1759915 - DNA, 15 bp, Homo sapiens
gtttctcttgtcctt

SEQ ID NO: 1759916 - DNA, 15 bp, Homo sapiens
tttctcttgtccttc

SEQ ID NO: 1759917 - DNA, 15 bp, Homo sapiens
ttctcttgtccttct

SEQ ID NO: 1759918 - DNA, 15 bp, Homo sapiens
tctcttgtccttctc

SEQ ID NO: 1759919 - DNA, 15 bp, Homo sapiens
ctcttgtccttctct

SEQ ID NO: 1759920 - DNA, 15 bp, Homo sapiens
tcttgtccttctctg

SEQ ID NO: 1759921 - DNA, 15 bp, Homo sapiens
cttgtccttctctgt

SEQ ID NO: 1759922 - DNA, 15 bp, Homo sapiens
ttgtccttctctgtt

SEQ ID NO: 1759923 - DNA, 15 bp, Homo sapiens
tgtccttctctgttg

SEQ ID NO: 1759924 - DNA, 15 bp, Homo sapiens
gtccttctctgttgc

SEQ ID NO: 1759925 - DNA, 15 bp, Homo sapiens
tccttctctgttgct

SEQ ID NO: 1759926 - DNA, 15 bp, Homo sapiens
ccttctctgttgctg

SEQ ID NO: 1759927 - DNA, 15 bp, Homo sapiens
cttctctgttgctgc

SEQ ID NO: 1759928 - DNA, 15 bp, Homo sapiens
ttctctgttgctgct

SEQ ID NO: 1759929 - DNA, 15 bp, Homo sapiens
tctctgttgctgctc

SEQ ID NO: 1759930 - DNA, 15 bp, Homo sapiens
ctctgttgctgctcc

SEQ ID NO: 1759931 - DNA, 15 bp, Homo sapiens
tctgttgctgctcct

SEQ ID NO: 1759932 - DNA, 15 bp, Homo sapiens
ctgttgctgctcctg

SEQ ID NO: 1759933 - DNA, 15 bp, Homo sapiens
tgttgctgctcctgc

SEQ ID NO: 1759934 - DNA, 15 bp, Homo sapiens
gttgctgctcctgcc

SEQ ID NO: 1759935 - DNA, 15 bp, Homo sapiens
ttgctgctcctgccc

SEQ ID NO: 1759936 - DNA, 15 bp, Homo sapiens
tgctgctcctgccca

SEQ ID NO: 1759937 - DNA, 15 bp, Homo sapiens
gctgctcctgcccat

SEQ ID NO: 1759938 - DNA, 15 bp, Homo sapiens
ctgctcctgcccatg

SEQ ID NO: 1759939 - DNA, 15 bp, Homo sapiens
tgctcctgcccatgg

SEQ ID NO: 1759940 - DNA, 15 bp, Homo sapiens
gctcctgcccatggc

SEQ ID NO: 1759941 - DNA, 15 bp, Homo sapiens
ctcctgcccatggca

SEQ ID NO: 1759942 - DNA, 15 bp, Homo sapiens
tcctgcccatggcat

SEQ ID NO: 1759943 - DNA, 15 bp, Homo sapiens
cctgcccatggcatg

SEQ ID NO: 1759944 - DNA, 15 bp, Homo sapiens
ctgcccatggcatga

SEQ ID NO: 1759945 - DNA, 15 bp, Homo sapiens
tgcccatggcatgag

SEQ ID NO: 1759946 - DNA, 15 bp, Homo sapiens
gcccatggcatgagg

SEQ ID NO: 1759947 - DNA, 15 bp, Homo sapiens
cccatggcatgagga

SEQ ID NO: 1759948 - DNA, 15 bp, Homo sapiens
ccatggcatgaggag

SEQ ID NO: 1759949 - DNA, 15 bp, Homo sapiens
catggcatgaggagt

SEQ ID NO: 1759950 - DNA, 15 bp, Homo sapiens
atggcatgaggagtt

SEQ ID NO: 1759951 - DNA, 15 bp, Homo sapiens
tggcatgaggagttt

SEQ ID NO: 1759952 - DNA, 15 bp, Homo sapiens
ggcatgaggagtttg

SEQ ID NO: 1759953 - DNA, 15 bp, Homo sapiens
gcatgaggagtttgt

SEQ ID NO: 1759954 - DNA, 15 bp, Homo sapiens
catgaggagtttgtg

SEQ ID NO: 1759955 - DNA, 15 bp, Homo sapiens
atgaggagtttgtgg

SEQ ID NO: 1759956 - DNA, 15 bp, Homo sapiens
tgaggagtttgtggg

SEQ ID NO: 1759957 - DNA, 15 bp, Homo sapiens
gaggagtttgtgggt

SEQ ID NO: 1759958 - DNA, 15 bp, Homo sapiens
aggagtttgtgggtt

SEQ ID NO: 1759959 - DNA, 15 bp, Homo sapiens
ggagtttgtgggtta

SEQ ID NO: 1759960 - DNA, 15 bp, Homo sapiens
gagtttgtgggttaa

SEQ ID NO: 1759961 - DNA, 15 bp, Homo sapiens
agtttgtgggttaag

SEQ ID NO: 1759962 - DNA, 15 bp, Homo sapiens
gtttgtgggttaagg

SEQ ID NO: 1759963 - DNA, 15 bp, Homo sapiens
tttgtgggttaaggg

SEQ ID NO: 1759964 - DNA, 15 bp, Homo sapiens
ttgtgggttaagggc

SEQ ID NO: 1759965 - DNA, 15 bp, Homo sapiens
tgtgggttaagggca

SEQ ID NO: 1759966 - DNA, 15 bp, Homo sapiens
gtgggttaagggcac

SEQ ID NO: 1759967 - DNA, 15 bp, Homo sapiens
tgggttaagggcact

SEQ ID NO: 1759968 - DNA, 15 bp, Homo sapiens
gggttaagggcactt

SEQ ID NO: 1759969 - DNA, 15 bp, Homo sapiens
ggttaagggcacttg

SEQ ID NO: 1759970 - DNA, 15 bp, Homo sapiens
gttaagggcacttgc

SEQ ID NO: 1759971 - DNA, 15 bp, Homo sapiens
ttaagggcacttgcc

SEQ ID NO: 1759972 - DNA, 15 bp, Homo sapiens
taagggcacttgcca

SEQ ID NO: 1759973 - DNA, 15 bp, Homo sapiens
aagggcacttgccac

SEQ ID NO: 1759974 - DNA, 15 bp, Homo sapiens
agggcacttgccact

SEQ ID NO: 1759975 - DNA, 15 bp, Homo sapiens
gggcacttgccactc

SEQ ID NO: 1759976 - DNA, 15 bp, Homo sapiens
ggcacttgccactcc

SEQ ID NO: 1759977 - DNA, 15 bp, Homo sapiens
gcacttgccactcca

SEQ ID NO: 1759978 - DNA, 15 bp, Homo sapiens
cacttgccactccag

SEQ ID NO: 1759979 - DNA, 15 bp, Homo sapiens
acttgccactccagg

SEQ ID NO: 1759980 - DNA, 15 bp, Homo sapiens
cttgccactccaggt

SEQ ID NO: 1759981 - DNA, 15 bp, Homo sapiens
ttgccactccaggtg

SEQ ID NO: 1759982 - DNA, 15 bp, Homo sapiens
tgccactccaggtgc

SEQ ID NO: 1759983 - DNA, 15 bp, Homo sapiens
gccactccaggtgcc

SEQ ID NO: 1759984 - DNA, 15 bp, Homo sapiens
ccactccaggtgccc

SEQ ID NO: 1759985 - DNA, 15 bp, Homo sapiens
cactccaggtgccca

SEQ ID NO: 1759986 - DNA, 15 bp, Homo sapiens
actccaggtgcccaa

SEQ ID NO: 1759987 - DNA, 15 bp, Homo sapiens
ctccaggtgcccaag

SEQ ID NO: 1759988 - DNA, 15 bp, Homo sapiens
tccaggtgcccaaga

SEQ ID NO: 1759989 - DNA, 15 bp, Homo sapiens
ccaggtgcccaagat

SEQ ID NO: 1759990 - DNA, 15 bp, Homo sapiens
caggtgcccaagatg

SEQ ID NO: 1759991 - DNA, 15 bp, Homo sapiens
aggtgcccaagatgc

SEQ ID NO: 1759992 - DNA, 15 bp, Homo sapiens
ggtgcccaagatgcc

SEQ ID NO: 1759993 - DNA, 15 bp, Homo sapiens
gtgcccaagatgcca

SEQ ID NO: 1759994 - DNA, 15 bp, Homo sapiens
tgcccaagatgccag

SEQ ID NO: 1759995 - DNA, 15 bp, Homo sapiens
gcccaagatgccaga

SEQ ID NO: 1759996 - DNA, 15 bp, Homo sapiens
cccaagatgccagat

SEQ ID NO: 1759997 - DNA, 15 bp, Homo sapiens
ccaagatgccagata

SEQ ID NO: 1759998 - DNA, 15 bp, Homo sapiens
caagatgccagatat

SEQ ID NO: 1759999 - DNA, 15 bp, Homo sapiens
aagatgccagatatt

SEQ ID NO: 1760000 - DNA, 15 bp, Homo sapiens
agatgccagatattc

SEQ ID NO: 1760001 - DNA, 15 bp, Homo sapiens
gatgccagatattct

SEQ ID NO: 1760002 - DNA, 15 bp, Homo sapiens
atgccagatattctc

SEQ ID NO: 1760003 - DNA, 15 bp, Homo sapiens
tgccagatattctct

SEQ ID NO: 1760004 - DNA, 15 bp, Homo sapiens
gccagatattctctg

SEQ ID NO: 1760005 - DNA, 15 bp, Homo sapiens
ccagatattctctgt

SEQ ID NO: 1760006 - DNA, 15 bp, Homo sapiens
cagatattctctgtg

SEQ ID NO: 1760007 - DNA, 15 bp, Homo sapiens
agatattctctgtgc

SEQ ID NO: 1760008 - DNA, 15 bp, Homo sapiens
gatattctctgtgca

SEQ ID NO: 1760009 - DNA, 15 bp, Homo sapiens
atattctctgtgcaa

SEQ ID NO: 1760010 - DNA, 15 bp, Homo sapiens
tattctctgtgcaaa

SEQ ID NO: 1760011 - DNA, 15 bp, Homo sapiens
attctctgtgcaaat

SEQ ID NO: 1760012 - DNA, 15 bp, Homo sapiens
ttctctgtgcaaatg

SEQ ID NO: 1760013 - DNA, 15 bp, Homo sapiens
tctctgtgcaaatgg

SEQ ID NO: 1760014 - DNA, 15 bp, Homo sapiens
ctctgtgcaaatggc

SEQ ID NO: 1760015 - DNA, 15 bp, Homo sapiens
tctgtgcaaatggcc

SEQ ID NO: 1760016 - DNA, 15 bp, Homo sapiens
ctgtgcaaatggccc

SEQ ID NO: 1760017 - DNA, 15 bp, Homo sapiens
tgtgcaaatggcccc

SEQ ID NO: 1760018 - DNA, 15 bp, Homo sapiens
gtgcaaatggcccca

SEQ ID NO: 1760019 - DNA, 15 bp, Homo sapiens
tgcaaatggccccaa

SEQ ID NO: 1760020 - DNA, 15 bp, Homo sapiens
gcaaatggccccaag

SEQ ID NO: 1760021 - DNA, 15 bp, Homo sapiens
caaatggccccaagt

SEQ ID NO: 1760022 - DNA, 15 bp, Homo sapiens
aaatggccccaagtc

SEQ ID NO: 1760023 - DNA, 15 bp, Homo sapiens
aatggccccaagtcc

SEQ ID NO: 1760024 - DNA, 15 bp, Homo sapiens
atggccccaagtcca

SEQ ID NO: 1760025 - DNA, 15 bp, Homo sapiens
tggccccaagtccat

SEQ ID NO: 1760026 - DNA, 15 bp, Homo sapiens
ggccccaagtccatc

SEQ ID NO: 1760027 - DNA, 15 bp, Homo sapiens
gccccaagtccatcc

SEQ ID NO: 1760028 - DNA, 15 bp, Homo sapiens
ccccaagtccatccc

SEQ ID NO: 1760029 - DNA, 15 bp, Homo sapiens
cccaagtccatcccc

SEQ ID NO: 1760030 - DNA, 15 bp, Homo sapiens
ccaagtccatcccca

SEQ ID NO: 1760031 - DNA, 15 bp, Homo sapiens
caagtccatccccag

SEQ ID NO: 1760032 - DNA, 15 bp, Homo sapiens
aagtccatccccagg

SEQ ID NO: 1760033 - DNA, 15 bp, Homo sapiens
agtccatccccaggg

SEQ ID NO: 1760034 - DNA, 15 bp, Homo sapiens
gtccatccccagggt

SEQ ID NO: 1760035 - DNA, 15 bp, Homo sapiens
tccatccccagggtc

SEQ ID NO: 1760036 - DNA, 15 bp, Homo sapiens
ccatccccagggtct

SEQ ID NO: 1760037 - DNA, 15 bp, Homo sapiens
catccccagggtctg

SEQ ID NO: 1760038 - DNA, 15 bp, Homo sapiens
atccccagggtctgt

SEQ ID NO: 1760039 - DNA, 15 bp, Homo sapiens
tccccagggtctgta

SEQ ID NO: 1760040 - DNA, 15 bp, Homo sapiens
ccccagggtctgtac

SEQ ID NO: 1760041 - DNA, 15 bp, Homo sapiens
cccagggtctgtaca

SEQ ID NO: 1760042 - DNA, 15 bp, Homo sapiens
ccagggtctgtacac

SEQ ID NO: 1760043 - DNA, 15 bp, Homo sapiens
cagggtctgtacacc

SEQ ID NO: 1760044 - DNA, 15 bp, Homo sapiens
agggtctgtacacct

SEQ ID NO: 1760045 - DNA, 15 bp, Homo sapiens
gggtctgtacacctc

SEQ ID NO: 1760046 - DNA, 15 bp, Homo sapiens
ggtctgtacacctct

SEQ ID NO: 1760047 - DNA, 15 bp, Homo sapiens
gtctgtacacctctt

SEQ ID NO: 1760048 - DNA, 15 bp, Homo sapiens
tctgtacacctcttc

SEQ ID NO: 1760049 - DNA, 15 bp, Homo sapiens
ctgtacacctcttcc

SEQ ID NO: 1760050 - DNA, 15 bp, Homo sapiens
tgtacacctcttccc

SEQ ID NO: 1760051 - DNA, 15 bp, Homo sapiens
gtacacctcttccca

SEQ ID NO: 1760052 - DNA, 15 bp, Homo sapiens
tacacctcttcccag

SEQ ID NO: 1760053 - DNA, 15 bp, Homo sapiens
acacctcttcccagg

SEQ ID NO: 1760054 - DNA, 15 bp, Homo sapiens
cacctcttcccaggc

SEQ ID NO: 1760055 - DNA, 15 bp, Homo sapiens
acctcttcccaggcc

SEQ ID NO: 1760056 - DNA, 15 bp, Homo sapiens
cctcttcccaggccc

SEQ ID NO: 1760057 - DNA, 15 bp, Homo sapiens
ctcttcccaggccca

SEQ ID NO: 1760058 - DNA, 15 bp, Homo sapiens
tcttcccaggcccaa

SEQ ID NO: 1760059 - DNA, 15 bp, Homo sapiens
cttcccaggcccaac

SEQ ID NO: 1760060 - DNA, 15 bp, Homo sapiens
ttcccaggcccaacc

SEQ ID NO: 1760061 - DNA, 15 bp, Homo sapiens
tcccaggcccaacct

SEQ ID NO: 1760062 - DNA, 15 bp, Homo sapiens
cccaggcccaacctc

SEQ ID NO: 1760063 - DNA, 15 bp, Homo sapiens
ccaggcccaacctcc

SEQ ID NO: 1760064 - DNA, 15 bp, Homo sapiens
caggcccaacctcct

SEQ ID NO: 1760065 - DNA, 15 bp, Homo sapiens
aggcccaacctcctg

SEQ ID NO: 1760066 - DNA, 15 bp, Homo sapiens
ggcccaacctcctga

SEQ ID NO: 1760067 - DNA, 15 bp, Homo sapiens
gcccaacctcctgag

SEQ ID NO: 1760068 - DNA, 15 bp, Homo sapiens
cccaacctcctgagg

SEQ ID NO: 1760069 - DNA, 15 bp, Homo sapiens
ccaacctcctgagga

SEQ ID NO: 1760070 - DNA, 15 bp, Homo sapiens
caacctcctgaggac

SEQ ID NO: 1760071 - DNA, 15 bp, Homo sapiens
aacctcctgaggact

SEQ ID NO: 1760072 - DNA, 15 bp, Homo sapiens
acctcctgaggactt

SEQ ID NO: 1760073 - DNA, 15 bp, Homo sapiens
cctcctgaggacttt

SEQ ID NO: 1760074 - DNA, 15 bp, Homo sapiens
ctcctgaggactttt

SEQ ID NO: 1760075 - DNA, 15 bp, Homo sapiens
tcctgaggactttta

SEQ ID NO: 1760076 - DNA, 15 bp, Homo sapiens
cctgaggacttttag

SEQ ID NO: 1760077 - DNA, 15 bp, Homo sapiens
ctgaggacttttagg

SEQ ID NO: 1760078 - DNA, 15 bp, Homo sapiens
tgaggacttttaggc

SEQ ID NO: 1760079 - DNA, 15 bp, Homo sapiens
gaggacttttaggcc

SEQ ID NO: 1760080 - DNA, 15 bp, Homo sapiens
aggacttttaggcca

SEQ ID NO: 1760081 - DNA, 15 bp, Homo sapiens
ggacttttaggccag

SEQ ID NO: 1760082 - DNA, 15 bp, Homo sapiens
gacttttaggccaga

SEQ ID NO: 1760083 - DNA, 15 bp, Homo sapiens
acttttaggccagag

SEQ ID NO: 1760084 - DNA, 15 bp, Homo sapiens
cttttaggccagaga

SEQ ID NO: 1760085 - DNA, 15 bp, Homo sapiens
ttttaggccagagaa

SEQ ID NO: 1760086 - DNA, 15 bp, Homo sapiens
tttaggccagagaag

SEQ ID NO: 1760087 - DNA, 15 bp, Homo sapiens
ttaggccagagaagt

SEQ ID NO: 1760088 - DNA, 15 bp, Homo sapiens
taggccagagaagta

SEQ ID NO: 1760089 - DNA, 15 bp, Homo sapiens
aggccagagaagtat

SEQ ID NO: 1760090 - DNA, 15 bp, Homo sapiens
ggccagagaagtata

SEQ ID NO: 1760091 - DNA, 15 bp, Homo sapiens
gccagagaagtatat

SEQ ID NO: 1760092 - DNA, 15 bp, Homo sapiens
ccagagaagtatatg

SEQ ID NO: 1760093 - DNA, 15 bp, Homo sapiens
cagagaagtatatgt

SEQ ID NO: 1760094 - DNA, 15 bp, Homo sapiens
agagaagtatatgtc

SEQ ID NO: 1760095 - DNA, 15 bp, Homo sapiens
gagaagtatatgtct

SEQ ID NO: 1760096 - DNA, 15 bp, Homo sapiens
agaagtatatgtctg

SEQ ID NO: 1760097 - DNA, 15 bp, Homo sapiens
gaagtatatgtctgt

SEQ ID NO: 1760098 - DNA, 15 bp, Homo sapiens
aagtatatgtctgtg

SEQ ID NO: 1760099 - DNA, 15 bp, Homo sapiens
agtatatgtctgtgc

SEQ ID NO: 1760100 - DNA, 15 bp, Homo sapiens
gtatatgtctgtgca

SEQ ID NO: 1760101 - DNA, 15 bp, Homo sapiens
tatatgtctgtgcag

SEQ ID NO: 1760102 - DNA, 15 bp, Homo sapiens
atatgtctgtgcagg

SEQ ID NO: 1760103 - DNA, 15 bp, Homo sapiens
tatgtctgtgcaggg

SEQ ID NO: 1760104 - DNA, 15 bp, Homo sapiens
atgtctgtgcagggc

SEQ ID NO: 1760105 - DNA, 15 bp, Homo sapiens
tgtctgtgcagggca

SEQ ID NO: 1760106 - DNA, 15 bp, Homo sapiens
gtctgtgcagggcag

SEQ ID NO: 1760107 - DNA, 15 bp, Homo sapiens
tctgtgcagggcagg

SEQ ID NO: 1760108 - DNA, 15 bp, Homo sapiens
ctgtgcagggcaggg

SEQ ID NO: 1760109 - DNA, 15 bp, Homo sapiens
tgtgcagggcagggc

SEQ ID NO: 1760110 - DNA, 15 bp, Homo sapiens
gtgcagggcagggct

SEQ ID NO: 1760111 - DNA, 15 bp, Homo sapiens
tgcagggcagggctg

SEQ ID NO: 1760112 - DNA, 15 bp, Homo sapiens
gcagggcagggctgc

SEQ ID NO: 1760113 - DNA, 15 bp, Homo sapiens
cagggcagggctgca

SEQ ID NO: 1760114 - DNA, 15 bp, Homo sapiens
agggcagggctgcaa

SEQ ID NO: 1760115 - DNA, 15 bp, Homo sapiens
gggcagggctgcaat

SEQ ID NO: 1760116 - DNA, 15 bp, Homo sapiens
ggcagggctgcaatg

SEQ ID NO: 1760117 - DNA, 15 bp, Homo sapiens
gcagggctgcaatgc

SEQ ID NO: 1760118 - DNA, 15 bp, Homo sapiens
cagggctgcaatgca

SEQ ID NO: 1760119 - DNA, 15 bp, Homo sapiens
agggctgcaatgcag

SEQ ID NO: 1760120 - DNA, 15 bp, Homo sapiens
gggctgcaatgcagg

SEQ ID NO: 1760121 - DNA, 15 bp, Homo sapiens
ggctgcaatgcaggt

SEQ ID NO: 1760122 - DNA, 15 bp, Homo sapiens
gctgcaatgcaggta

SEQ ID NO: 1760123 - DNA, 15 bp, Homo sapiens
ctgcaatgcaggtag

SEQ ID NO: 1760124 - DNA, 15 bp, Homo sapiens
tgcaatgcaggtagg

SEQ ID NO: 1760125 - DNA, 15 bp, Homo sapiens
gcaatgcaggtaggc

SEQ ID NO: 1760126 - DNA, 15 bp, Homo sapiens
caatgcaggtaggca

SEQ ID NO: 1760127 - DNA, 15 bp, Homo sapiens
aatgcaggtaggcag

SEQ ID NO: 1760128 - DNA, 15 bp, Homo sapiens
atgcaggtaggcagg

SEQ ID NO: 1760129 - DNA, 15 bp, Homo sapiens
tgcaggtaggcagga

SEQ ID NO: 1760130 - DNA, 15 bp, Homo sapiens
gcaggtaggcaggag

SEQ ID NO: 1760131 - DNA, 15 bp, Homo sapiens
caggtaggcaggagg

SEQ ID NO: 1760132 - DNA, 15 bp, Homo sapiens
aggtaggcaggaggg

SEQ ID NO: 1760133 - DNA, 15 bp, Homo sapiens
ggtaggcaggagggt

SEQ ID NO: 1760134 - DNA, 15 bp, Homo sapiens
gtaggcaggagggtg

SEQ ID NO: 1760135 - DNA, 15 bp, Homo sapiens
taggcaggagggtga

SEQ ID NO: 1760136 - DNA, 15 bp, Homo sapiens
aggcaggagggtgac

SEQ ID NO: 1760137 - DNA, 15 bp, Homo sapiens
ggcaggagggtgacc

SEQ ID NO: 1760138 - DNA, 15 bp, Homo sapiens
gcaggagggtgacca

SEQ ID NO: 1760139 - DNA, 15 bp, Homo sapiens
caggagggtgaccat

SEQ ID NO: 1760140 - DNA, 15 bp, Homo sapiens
aggagggtgaccatc

SEQ ID NO: 1760141 - DNA, 15 bp, Homo sapiens
ggagggtgaccatcc

SEQ ID NO: 1760142 - DNA, 15 bp, Homo sapiens
gagggtgaccatcca

SEQ ID NO: 1760143 - DNA, 15 bp, Homo sapiens
agggtgaccatccag

SEQ ID NO: 1760144 - DNA, 15 bp, Homo sapiens
gggtgaccatccagg

SEQ ID NO: 1760145 - DNA, 15 bp, Homo sapiens
ggtgaccatccaggg

SEQ ID NO: 1760146 - DNA, 15 bp, Homo sapiens
gtgaccatccagggt

SEQ ID NO: 1760147 - DNA, 15 bp, Homo sapiens
tgaccatccagggtg

SEQ ID NO: 1760148 - DNA, 15 bp, Homo sapiens
gaccatccagggtgt

SEQ ID NO: 1760149 - DNA, 15 bp, Homo sapiens
accatccagggtgtt

SEQ ID NO: 1760150 - DNA, 15 bp, Homo sapiens
ccatccagggtgttg

SEQ ID NO: 1760151 - DNA, 15 bp, Homo sapiens
catccagggtgttga

SEQ ID NO: 1760152 - DNA, 15 bp, Homo sapiens
atccagggtgttgag

SEQ ID NO: 1760153 - DNA, 15 bp, Homo sapiens
tccagggtgttgagg

SEQ ID NO: 1760154 - DNA, 15 bp, Homo sapiens
ccagggtgttgaggg

SEQ ID NO: 1760155 - DNA, 15 bp, Homo sapiens
cagggtgttgagggc

SEQ ID NO: 1760156 - DNA, 15 bp, Homo sapiens
agggtgttgagggcc

SEQ ID NO: 1760157 - DNA, 15 bp, Homo sapiens
gggtgttgagggccc

SEQ ID NO: 1760158 - DNA, 15 bp, Homo sapiens
ggtgttgagggcccc

SEQ ID NO: 1760159 - DNA, 15 bp, Homo sapiens
gtgttgagggcccca

SEQ ID NO: 1760160 - DNA, 15 bp, Homo sapiens
tgttgagggccccat

SEQ ID NO: 1760161 - DNA, 15 bp, Homo sapiens
gttgagggccccatg

SEQ ID NO: 1760162 - DNA, 15 bp, Homo sapiens
ttgagggccccatgg

SEQ ID NO: 1760163 - DNA, 15 bp, Homo sapiens
tgagggccccatgga

SEQ ID NO: 1760164 - DNA, 15 bp, Homo sapiens
gagggccccatggag

SEQ ID NO: 1760165 - DNA, 15 bp, Homo sapiens
agggccccatggagt

SEQ ID NO: 1760166 - DNA, 15 bp, Homo sapiens
gggccccatggagtg

SEQ ID NO: 1760167 - DNA, 15 bp, Homo sapiens
ggccccatggagtgg

SEQ ID NO: 1760168 - DNA, 15 bp, Homo sapiens
gccccatggagtggg

SEQ ID NO: 1760169 - DNA, 15 bp, Homo sapiens
ccccatggagtggga

SEQ ID NO: 1760170 - DNA, 15 bp, Homo sapiens
cccatggagtgggat

SEQ ID NO: 1760171 - DNA, 15 bp, Homo sapiens
ccatggagtgggatg

SEQ ID NO: 1760172 - DNA, 15 bp, Homo sapiens
catggagtgggatgg

SEQ ID NO: 1760173 - DNA, 15 bp, Homo sapiens
atggagtgggatgga

SEQ ID NO: 1760174 - DNA, 15 bp, Homo sapiens
tggagtgggatggag

SEQ ID NO: 1760175 - DNA, 15 bp, Homo sapiens
ggagtgggatggagc

SEQ ID NO: 1760176 - DNA, 15 bp, Homo sapiens
gagtgggatggagct

SEQ ID NO: 1760177 - DNA, 15 bp, Homo sapiens
agtgggatggagctg

SEQ ID NO: 1760178 - DNA, 15 bp, Homo sapiens
gtgggatggagctga

SEQ ID NO: 1760179 - DNA, 15 bp, Homo sapiens
tgggatggagctgag

SEQ ID NO: 1760180 - DNA, 15 bp, Homo sapiens
gggatggagctgagg

SEQ ID NO: 1760181 - DNA, 15 bp, Homo sapiens
ggatggagctgaggg

SEQ ID NO: 1760182 - DNA, 15 bp, Homo sapiens
gatggagctgagggg

SEQ ID NO: 1760183 - DNA, 15 bp, Homo sapiens
atggagctgaggggg

SEQ ID NO: 1760184 - DNA, 15 bp, Homo sapiens
tggagctgagggggc

SEQ ID NO: 1760185 - DNA, 15 bp, Homo sapiens
ggagctgagggggcc

SEQ ID NO: 1760186 - DNA, 15 bp, Homo sapiens
gagctgagggggcca

SEQ ID NO: 1760187 - DNA, 15 bp, Homo sapiens
agctgagggggccag

SEQ ID NO: 1760188 - DNA, 15 bp, Homo sapiens
gctgagggggccaga

SEQ ID NO: 1760189 - DNA, 15 bp, Homo sapiens
ctgagggggccagaa

SEQ ID NO: 1760190 - DNA, 15 bp, Homo sapiens
tgagggggccagaaa

SEQ ID NO: 1760191 - DNA, 15 bp, Homo sapiens
gagggggccagaaaa

SEQ ID NO: 1760192 - DNA, 15 bp, Homo sapiens
agggggccagaaaag

SEQ ID NO: 1760193 - DNA, 15 bp, Homo sapiens
gggggccagaaaagg

SEQ ID NO: 1760194 - DNA, 15 bp, Homo sapiens
ggggccagaaaaggg

SEQ ID NO: 1760195 - DNA, 15 bp, Homo sapiens
gggccagaaaagggg

SEQ ID NO: 1760196 - DNA, 15 bp, Homo sapiens
ggccagaaaaggggg

SEQ ID NO: 1760197 - DNA, 15 bp, Homo sapiens
gccagaaaaggggga

SEQ ID NO: 1760198 - DNA, 15 bp, Homo sapiens
ccagaaaagggggac

SEQ ID NO: 1760199 - DNA, 15 bp, Homo sapiens
cagaaaagggggaca

SEQ ID NO: 1760200 - DNA, 15 bp, Homo sapiens
agaaaagggggacag

SEQ ID NO: 1760201 - DNA, 15 bp, Homo sapiens
gaaaagggggacagg

SEQ ID NO: 1760202 - DNA, 15 bp, Homo sapiens
aaaagggggacaggt

SEQ ID NO: 1760203 - DNA, 15 bp, Homo sapiens
aaagggggacaggtt

SEQ ID NO: 1760204 - DNA, 15 bp, Homo sapiens
aagggggacaggttg

SEQ ID NO: 1760205 - DNA, 15 bp, Homo sapiens
agggggacaggttgt

SEQ ID NO: 1760206 - DNA, 15 bp, Homo sapiens
gggggacaggttgtg

SEQ ID NO: 1760207 - DNA, 15 bp, Homo sapiens
ggggacaggttgtgg

SEQ ID NO: 1760208 - DNA, 15 bp, Homo sapiens
gggacaggttgtggc

SEQ ID NO: 1760209 - DNA, 15 bp, Homo sapiens
ggacaggttgtggct

SEQ ID NO: 1760210 - DNA, 15 bp, Homo sapiens
gacaggttgtggctc

SEQ ID NO: 1760211 - DNA, 15 bp, Homo sapiens
acaggttgtggctcg

SEQ ID NO: 1760212 - DNA, 15 bp, Homo sapiens
caggttgtggctcgg

SEQ ID NO: 1760213 - DNA, 15 bp, Homo sapiens
aggttgtggctcggg

SEQ ID NO: 1760214 - DNA, 15 bp, Homo sapiens
ggttgtggctcgggc

SEQ ID NO: 1760215 - DNA, 15 bp, Homo sapiens
gttgtggctcgggct

SEQ ID NO: 1760216 - DNA, 15 bp, Homo sapiens
ttgtggctcgggctg

SEQ ID NO: 1760217 - DNA, 15 bp, Homo sapiens
tgtggctcgggctgg

SEQ ID NO: 1760218 - DNA, 15 bp, Homo sapiens
gtggctcgggctgga

SEQ ID NO: 1760219 - DNA, 15 bp, Homo sapiens
tggctcgggctggaa

SEQ ID NO: 1760220 - DNA, 15 bp, Homo sapiens
ggctcgggctggaag

SEQ ID NO: 1760221 - DNA, 15 bp, Homo sapiens
gctcgggctggaagt

SEQ ID NO: 1760222 - DNA, 15 bp, Homo sapiens
ctcgggctggaagtg

SEQ ID NO: 1760223 - DNA, 15 bp, Homo sapiens
tcgggctggaagtgg

SEQ ID NO: 1760224 - DNA, 15 bp, Homo sapiens
cgggctggaagtggc

SEQ ID NO: 1760225 - DNA, 15 bp, Homo sapiens
gggctggaagtggct

SEQ ID NO: 1760226 - DNA, 15 bp, Homo sapiens
ggctggaagtggctc

SEQ ID NO: 1760227 - DNA, 15 bp, Homo sapiens
gctggaagtggctcc

SEQ ID NO: 1760228 - DNA, 15 bp, Homo sapiens
ctggaagtggctccc

SEQ ID NO: 1760229 - DNA, 15 bp, Homo sapiens
tggaagtggctcccc

SEQ ID NO: 1760230 - DNA, 15 bp, Homo sapiens
ggaagtggctccccc

SEQ ID NO: 1760231 - DNA, 15 bp, Homo sapiens
gaagtggctcccccg

SEQ ID NO: 1760232 - DNA, 15 bp, Homo sapiens
aagtggctcccccgt

SEQ ID NO: 1760233 - DNA, 15 bp, Homo sapiens
agtggctcccccgta

SEQ ID NO: 1760234 - DNA, 15 bp, Homo sapiens
gtggctcccccgtac

SEQ ID NO: 1760235 - DNA, 15 bp, Homo sapiens
tggctcccccgtacc

SEQ ID NO: 1760236 - DNA, 15 bp, Homo sapiens
ggctcccccgtacca

SEQ ID NO: 1760237 - DNA, 15 bp, Homo sapiens
gctcccccgtaccag

SEQ ID NO: 1760238 - DNA, 15 bp, Homo sapiens
ctcccccgtaccagc

SEQ ID NO: 1760239 - DNA, 15 bp, Homo sapiens
tcccccgtaccagcg

SEQ ID NO: 1760240 - DNA, 15 bp, Homo sapiens
cccccgtaccagcgc

SEQ ID NO: 1760241 - DNA, 15 bp, Homo sapiens
ccccgtaccagcgca

SEQ ID NO: 1760242 - DNA, 15 bp, Homo sapiens
cccgtaccagcgcat

SEQ ID NO: 1760243 - DNA, 15 bp, Homo sapiens
ccgtaccagcgcatt

SEQ ID NO: 1760244 - DNA, 15 bp, Homo sapiens
cgtaccagcgcattc

SEQ ID NO: 1760245 - DNA, 15 bp, Homo sapiens
gtaccagcgcattct

SEQ ID NO: 1760246 - DNA, 15 bp, Homo sapiens
taccagcgcattcta

SEQ ID NO: 1760247 - DNA, 15 bp, Homo sapiens
accagcgcattctag

SEQ ID NO: 1760248 - DNA, 15 bp, Homo sapiens
ccagcgcattctagc

SEQ ID NO: 1760249 - DNA, 15 bp, Homo sapiens
cagcgcattctagcc

SEQ ID NO: 1760250 - DNA, 15 bp, Homo sapiens
agcgcattctagcca

SEQ ID NO: 1760251 - DNA, 15 bp, Homo sapiens
gcgcattctagccaa

SEQ ID NO: 1760252 - DNA, 15 bp, Homo sapiens
cgcattctagccaag

SEQ ID NO: 1760253 - DNA, 15 bp, Homo sapiens
gcattctagccaagt

SEQ ID NO: 1760254 - DNA, 15 bp, Homo sapiens
cattctagccaagtt

SEQ ID NO: 1760255 - DNA, 15 bp, Homo sapiens
attctagccaagttg

SEQ ID NO: 1760256 - DNA, 15 bp, Homo sapiens
ttctagccaagttgc

SEQ ID NO: 1760257 - DNA, 15 bp, Homo sapiens
tctagccaagttgcc

SEQ ID NO: 1760258 - DNA, 15 bp, Homo sapiens
ctagccaagttgcct

SEQ ID NO: 1760259 - DNA, 15 bp, Homo sapiens
tagccaagttgcctt

SEQ ID NO: 1760260 - DNA, 15 bp, Homo sapiens
agccaagttgcctta

SEQ ID NO: 1760261 - DNA, 15 bp, Homo sapiens
gccaagttgccttag

SEQ ID NO: 1760262 - DNA, 15 bp, Homo sapiens
ccaagttgccttaga

SEQ ID NO: 1760263 - DNA, 15 bp, Homo sapiens
caagttgccttagaa

SEQ ID NO: 1760264 - DNA, 15 bp, Homo sapiens
aagttgccttagaat

SEQ ID NO: 1760265 - DNA, 15 bp, Homo sapiens
agttgccttagaatt

SEQ ID NO: 1760266 - DNA, 15 bp, Homo sapiens
gttgccttagaattt

SEQ ID NO: 1760267 - DNA, 15 bp, Homo sapiens
ttgccttagaatttc

SEQ ID NO: 1760268 - DNA, 15 bp, Homo sapiens
tgccttagaatttct

SEQ ID NO: 1760269 - DNA, 15 bp, Homo sapiens
gccttagaatttctc

SEQ ID NO: 1760270 - DNA, 15 bp, Homo sapiens
ccttagaatttctca

SEQ ID NO: 1760271 - DNA, 15 bp, Homo sapiens
cttagaatttctcaa
